United States Patent Application Publication US 2015/0141320 A1 - sequence listing, part 31

SEQ ID NO: 1143035 - DNA, 15 bp, Homo sapiens
gcaacatcctaagta

SEQ ID NO: 1143036 - DNA, 15 bp, Homo sapiens
agcaacatcctaagt

SEQ ID NO: 1143037 - DNA, 15 bp, Homo sapiens
cagcaacatcctaag

SEQ ID NO: 1143038 - DNA, 15 bp, Homo sapiens
acagcaacatcctaa

SEQ ID NO: 1143039 - DNA, 15 bp, Homo sapiens
cacagcaacatccta

SEQ ID NO: 1143040 - DNA, 15 bp, Homo sapiens
tcacagcaacatcct

SEQ ID NO: 1143041 - DNA, 15 bp, Homo sapiens
ttcacagcaacatcc

SEQ ID NO: 1143042 - DNA, 15 bp, Homo sapiens
tttcacagcaacatc

SEQ ID NO: 1143043 - DNA, 15 bp, Homo sapiens
atttcacagcaacat

SEQ ID NO: 1143044 - DNA, 15 bp, Homo sapiens
aatttcacagcaaca

SEQ ID NO: 1143045 - DNA, 15 bp, Homo sapiens
gaatttcacagcaac

SEQ ID NO: 1143046 - DNA, 15 bp, Homo sapiens
tgaatttcacagcaa

SEQ ID NO: 1143047 - DNA, 15 bp, Homo sapiens
gtgaatttcacagca

SEQ ID NO: 1143048 - DNA, 15 bp, Homo sapiens
ggtgaatttcacagc

SEQ ID NO: 1143049 - DNA, 15 bp, Homo sapiens
aggtgaatttcacag

SEQ ID NO: 1143050 - DNA, 15 bp, Homo sapiens
gaggtgaatttcaca

SEQ ID NO: 1143051 - DNA, 15 bp, Homo sapiens
cgaggtgaatttcac

SEQ ID NO: 1143052 - DNA, 15 bp, Homo sapiens
acgaggtgaatttca

SEQ ID NO: 1143053 - DNA, 15 bp, Homo sapiens
aacgaggtgaatttc

SEQ ID NO: 1143054 - DNA, 15 bp, Homo sapiens
aaacgaggtgaattt

SEQ ID NO: 1143055 - DNA, 15 bp, Homo sapiens
aaaacgaggtgaatt

SEQ ID NO: 1143056 - DNA, 15 bp, Homo sapiens
taaaacgaggtgaat

SEQ ID NO: 1143057 - DNA, 15 bp, Homo sapiens
ttaaaacgaggtgaa

SEQ ID NO: 1143058 - DNA, 15 bp, Homo sapiens
tttaaaacgaggtga

SEQ ID NO: 1143059 - DNA, 15 bp, Homo sapiens
atttaaaacgaggtg

SEQ ID NO: 1143060 - DNA, 15 bp, Homo sapiens
aatttaaaacgaggt

SEQ ID NO: 1143061 - DNA, 15 bp, Homo sapiens
aaatttaaaacgagg

SEQ ID NO: 1143062 - DNA, 15 bp, Homo sapiens
taaatttaaaacgag

SEQ ID NO: 1143063 - DNA, 15 bp, Homo sapiens
ataaatttaaaacga

SEQ ID NO: 1143064 - DNA, 15 bp, Homo sapiens
cataaatttaaaacg

SEQ ID NO: 1143065 - DNA, 15 bp, Homo sapiens
gcataaatttaaaac

SEQ ID NO: 1143066 - DNA, 15 bp, Homo sapiens
agcataaatttaaaa

SEQ ID NO: 1143067 - DNA, 15 bp, Homo sapiens
aagcataaatttaaa

SEQ ID NO: 1143068 - DNA, 15 bp, Homo sapiens
taagcataaatttaa

SEQ ID NO: 1143069 - DNA, 15 bp, Homo sapiens
ctaagcataaattta

SEQ ID NO: 1143070 - DNA, 15 bp, Homo sapiens
tctaagcataaattt

SEQ ID NO: 1143071 - DNA, 15 bp, Homo sapiens
ctctaagcataaatt

SEQ ID NO: 1143072 - DNA, 15 bp, Homo sapiens
cctctaagcataaat

SEQ ID NO: 1143073 - DNA, 15 bp, Homo sapiens
gcctctaagcataaa

SEQ ID NO: 1143074 - DNA, 15 bp, Homo sapiens
agcctctaagcataa

SEQ ID NO: 1143075 - DNA, 15 bp, Homo sapiens
cagcctctaagcata

SEQ ID NO: 1143076 - DNA, 15 bp, Homo sapiens
acagcctctaagcat

SEQ ID NO: 1143077 - DNA, 15 bp, Homo sapiens
tacagcctctaagca

SEQ ID NO: 1143078 - DNA, 15 bp, Homo sapiens
ttacagcctctaagc

SEQ ID NO: 1143079 - DNA, 15 bp, Homo sapiens
tttacagcctctaag

SEQ ID NO: 1143080 - DNA, 15 bp, Homo sapiens
ttttacagcctctaa

SEQ ID NO: 1143081 - DNA, 15 bp, Homo sapiens
attttacagcctcta

SEQ ID NO: 1143082 - DNA, 15 bp, Homo sapiens
aattttacagcctct

SEQ ID NO: 1143083 - DNA, 15 bp, Homo sapiens
caattttacagcctc

SEQ ID NO: 1143084 - DNA, 15 bp, Homo sapiens
acaattttacagcct

SEQ ID NO: 1143085 - DNA, 15 bp, Homo sapiens
tacaattttacagcc

SEQ ID NO: 1143086 - DNA, 15 bp, Homo sapiens
atacaattttacagc

SEQ ID NO: 1143087 - DNA, 15 bp, Homo sapiens
aatacaattttacag

SEQ ID NO: 1143088 - DNA, 15 bp, Homo sapiens
gaatacaattttaca

SEQ ID NO: 1143089 - DNA, 15 bp, Homo sapiens
tgaatacaattttac

SEQ ID NO: 1143090 - DNA, 15 bp, Homo sapiens
ttgaatacaatttta

SEQ ID NO: 1143091 - DNA, 15 bp, Homo sapiens
attgaatacaatttt

SEQ ID NO: 1143092 - DNA, 15 bp, Homo sapiens
aattgaatacaattt

SEQ ID NO: 1143093 - DNA, 15 bp, Homo sapiens
taattgaatacaatt

SEQ ID NO: 1143094 - DNA, 15 bp, Homo sapiens
ttaattgaatacaat

SEQ ID NO: 1143095 - DNA, 15 bp, Homo sapiens
attaattgaatacaa

SEQ ID NO: 1143096 - DNA, 15 bp, Homo sapiens
tattaattgaataca

SEQ ID NO: 1143097 - DNA, 15 bp, Homo sapiens
atattaattgaatac

SEQ ID NO: 1143098 - DNA, 15 bp, Homo sapiens
catattaattgaata

SEQ ID NO: 1143099 - DNA, 15 bp, Homo sapiens
tcatattaattgaat

SEQ ID NO: 1143100 - DNA, 15 bp, Homo sapiens
ttcatattaattgaa

SEQ ID NO: 1143101 - DNA, 15 bp, Homo sapiens
tttcatattaattga

SEQ ID NO: 1143102 - DNA, 15 bp, Homo sapiens
ttttcatattaattg

SEQ ID NO: 1143103 - DNA, 15 bp, Homo sapiens
gttttcatattaatt

SEQ ID NO: 1143104 - DNA, 15 bp, Homo sapiens
tgttttcatattaat

SEQ ID NO: 1143105 - DNA, 15 bp, Homo sapiens
atgttttcatattaa

SEQ ID NO: 1143106 - DNA, 15 bp, Homo sapiens
aatgttttcatatta

SEQ ID NO: 1143107 - DNA, 15 bp, Homo sapiens
aaatgttttcatatt

SEQ ID NO: 1143108 - DNA, 15 bp, Homo sapiens
taaatgttttcatat

SEQ ID NO: 1143109 - DNA, 15 bp, Homo sapiens
ttaaatgttttcata

SEQ ID NO: 1143110 - DNA, 15 bp, Homo sapiens
tttaaatgttttcat

SEQ ID NO: 1143111 - DNA, 15 bp, Homo sapiens
ttttaaatgttttca

SEQ ID NO: 1143112 - DNA, 15 bp, Homo sapiens
attttaaatgttttc

SEQ ID NO: 1143113 - DNA, 15 bp, Homo sapiens
cattttaaatgtttt

SEQ ID NO: 1143114 - DNA, 15 bp, Homo sapiens
gcattttaaatgttt

SEQ ID NO: 1143115 - DNA, 15 bp, Homo sapiens
agcattttaaatgtt

SEQ ID NO: 1143116 - DNA, 15 bp, Homo sapiens
aagcattttaaatgt

SEQ ID NO: 1143117 - DNA, 15 bp, Homo sapiens
aaagcattttaaatg

SEQ ID NO: 1143118 - DNA, 15 bp, Homo sapiens
aaaagcattttaaat

SEQ ID NO: 1143119 - DNA, 15 bp, Homo sapiens
aaaaagcattttaaa

SEQ ID NO: 1143120 - DNA, 15 bp, Homo sapiens
taaaaagcattttaa

SEQ ID NO: 1143121 - DNA, 15 bp, Homo sapiens
ttaaaaagcatttta

SEQ ID NO: 1143122 - DNA, 15 bp, Homo sapiens
attaaaaagcatttt

SEQ ID NO: 1143123 - DNA, 15 bp, Homo sapiens
cattaaaaagcattt

SEQ ID NO: 1143124 - DNA, 15 bp, Homo sapiens
acattaaaaagcatt

SEQ ID NO: 1143125 - DNA, 15 bp, Homo sapiens
aacattaaaaagcat

SEQ ID NO: 1143126 - DNA, 15 bp, Homo sapiens
taacattaaaaagca

SEQ ID NO: 1143127 - DNA, 15 bp, Homo sapiens
ttaacattaaaaagc

SEQ ID NO: 1143128 - DNA, 15 bp, Homo sapiens
gttaacattaaaaag

SEQ ID NO: 1143129 - DNA, 15 bp, Homo sapiens
tgttaacattaaaaa

SEQ ID NO: 1143130 - DNA, 15 bp, Homo sapiens
ttgttaacattaaaa

SEQ ID NO: 1143131 - DNA, 15 bp, Homo sapiens
gttgttaacattaaa

SEQ ID NO: 1143132 - DNA, 15 bp, Homo sapiens
ggttgttaacattaa

SEQ ID NO: 1143133 - DNA, 15 bp, Homo sapiens
aggttgttaacatta

SEQ ID NO: 1143134 - DNA, 15 bp, Homo sapiens
caggttgttaacatt

SEQ ID NO: 1143135 - DNA, 15 bp, Homo sapiens
tcaggttgttaacat

SEQ ID NO: 1143136 - DNA, 15 bp, Homo sapiens
gtcaggttgttaaca

SEQ ID NO: 1143137 - DNA, 15 bp, Homo sapiens
ggtcaggttgttaac

SEQ ID NO: 1143138 - DNA, 15 bp, Homo sapiens
gggtcaggttgttaa

SEQ ID NO: 1143139 - DNA, 15 bp, Homo sapiens
agggtcaggttgtta

SEQ ID NO: 1143140 - DNA, 15 bp, Homo sapiens
cagggtcaggttgtt

SEQ ID NO: 1143141 - DNA, 15 bp, Homo sapiens
acagggtcaggttgt

SEQ ID NO: 1143142 - DNA, 15 bp, Homo sapiens
cacagggtcaggttg

SEQ ID NO: 1143143 - DNA, 15 bp, Homo sapiens
gcacagggtcaggtt

SEQ ID NO: 1143144 - DNA, 15 bp, Homo sapiens
agcacagggtcaggt

SEQ ID NO: 1143145 - DNA, 15 bp, Homo sapiens
aagcacagggtcagg

SEQ ID NO: 1143146 - DNA, 15 bp, Homo sapiens
aaagcacagggtcag

SEQ ID NO: 1143147 - DNA, 15 bp, Homo sapiens
taaaagcacagggtc

SEQ ID NO: 1143148 - DNA, 15 bp, Homo sapiens
ttaaaagcacagggt

SEQ ID NO: 1143149 - DNA, 15 bp, Homo sapiens
gttaaaagcacaggg

SEQ ID NO: 1143150 - DNA, 15 bp, Homo sapiens
agttaaaagcacagg

SEQ ID NO: 1143151 - DNA, 15 bp, Homo sapiens
tagttaaaagcacag

SEQ ID NO: 1143152 - DNA, 15 bp, Homo sapiens
atagttaaaagcaca

SEQ ID NO: 1143153 - DNA, 15 bp, Homo sapiens
tatagttaaaagcac

SEQ ID NO: 1143154 - DNA, 15 bp, Homo sapiens
ctatagttaaaagca

SEQ ID NO: 1143155 - DNA, 15 bp, Homo sapiens
gctatagttaaaagc

SEQ ID NO: 1143156 - DNA, 15 bp, Homo sapiens
agctatagttaaaag

SEQ ID NO: 1143157 - DNA, 15 bp, Homo sapiens
cagctatagttaaaa

SEQ ID NO: 1143158 - DNA, 15 bp, Homo sapiens
tcagctatagttaaa

SEQ ID NO: 1143159 - DNA, 15 bp, Homo sapiens
gtcagctatagttaa

SEQ ID NO: 1143160 - DNA, 15 bp, Homo sapiens
tgtcagctatagtta

SEQ ID NO: 1143161 - DNA, 15 bp, Homo sapiens
ctgtcagctatagtt

SEQ ID NO: 1143162 - DNA, 15 bp, Homo sapiens
tctgtcagctatagt

SEQ ID NO: 1143163 - DNA, 15 bp, Homo sapiens
gtctgtcagctatag

SEQ ID NO: 1143164 - DNA, 15 bp, Homo sapiens
agtctgtcagctata

SEQ ID NO: 1143165 - DNA, 15 bp, Homo sapiens
gagtctgtcagctat

SEQ ID NO: 1143166 - DNA, 15 bp, Homo sapiens
tgagtctgtcagcta

SEQ ID NO: 1143167 - DNA, 15 bp, Homo sapiens
ttgagtctgtcagct

SEQ ID NO: 1143168 - DNA, 15 bp, Homo sapiens
cttgagtctgtcagc

SEQ ID NO: 1143169 - DNA, 15 bp, Homo sapiens
acttgagtctgtcag

SEQ ID NO: 1143170 - DNA, 15 bp, Homo sapiens
cacttgagtctgtca

SEQ ID NO: 1143171 - DNA, 15 bp, Homo sapiens
acacttgagtctgtc

SEQ ID NO: 1143172 - DNA, 15 bp, Homo sapiens
aacacttgagtctgt

SEQ ID NO: 1143173 - DNA, 15 bp, Homo sapiens
gaacacttgagtctg

SEQ ID NO: 1143174 - DNA, 15 bp, Homo sapiens
agaacacttgagtct

SEQ ID NO: 1143175 - DNA, 15 bp, Homo sapiens
cagaacacttgagtc

SEQ ID NO: 1143176 - DNA, 15 bp, Homo sapiens
acagaacacttgagt

SEQ ID NO: 1143177 - DNA, 15 bp, Homo sapiens
aacagaacacttgag

SEQ ID NO: 1143178 - DNA, 15 bp, Homo sapiens
aaacagaacacttga

SEQ ID NO: 1143179 - DNA, 15 bp, Homo sapiens
aaaacagaacacttg

SEQ ID NO: 1143180 - DNA, 15 bp, Homo sapiens
gaaaacagaacactt

SEQ ID NO: 1143181 - DNA, 15 bp, Homo sapiens
ggaaaacagaacact

SEQ ID NO: 1143182 - DNA, 15 bp, Homo sapiens
aggaaaacagaacac

SEQ ID NO: 1143183 - DNA, 15 bp, Homo sapiens
aaggaaaacagaaca

SEQ ID NO: 1143184 - DNA, 15 bp, Homo sapiens
aaaggaaaacagaac

SEQ ID NO: 1143185 - DNA, 15 bp, Homo sapiens
aaaaggaaaacagaa

SEQ ID NO: 1143186 - DNA, 15 bp, Homo sapiens
gaaaaggaaaacaga

SEQ ID NO: 1143187 - DNA, 15 bp, Homo sapiens
ggaaaaggaaaacag

SEQ ID NO: 1143188 - DNA, 15 bp, Homo sapiens
gggaaaaggaaaaca

SEQ ID NO: 1143189 - DNA, 15 bp, Homo sapiens
tgggaaaaggaaaac

SEQ ID NO: 1143190 - DNA, 15 bp, Homo sapiens
ctgggaaaaggaaaa

SEQ ID NO: 1143191 - DNA, 15 bp, Homo sapiens
tctgggaaaaggaaa

SEQ ID NO: 1143192 - DNA, 15 bp, Homo sapiens
ttctgggaaaaggaa

SEQ ID NO: 1143193 - DNA, 15 bp, Homo sapiens
gttctgggaaaagga

SEQ ID NO: 1143194 - DNA, 15 bp, Homo sapiens
ggttctgggaaaagg

SEQ ID NO: 1143195 - DNA, 15 bp, Homo sapiens
tggttctgggaaaag

SEQ ID NO: 1143196 - DNA, 15 bp, Homo sapiens
gtggttctgggaaaa

SEQ ID NO: 1143197 - DNA, 15 bp, Homo sapiens
agtggttctgggaaa

SEQ ID NO: 1143198 - DNA, 15 bp, Homo sapiens
tagtggttctgggaa

SEQ ID NO: 1143199 - DNA, 15 bp, Homo sapiens
ttagtggttctggga

SEQ ID NO: 1143200 - DNA, 15 bp, Homo sapiens
tttagtggttctggg

SEQ ID NO: 1143201 - DNA, 15 bp, Homo sapiens
ttttagtggttctgg

SEQ ID NO: 1143202 - DNA, 15 bp, Homo sapiens
tttttagtggttctg

SEQ ID NO: 1143203 - DNA, 15 bp, Homo sapiens
atttttagtggttct

SEQ ID NO: 1143204 - DNA, 15 bp, Homo sapiens
catttttagtggttc

SEQ ID NO: 1143205 - DNA, 15 bp, Homo sapiens
tcatttttagtggtt

SEQ ID NO: 1143206 - DNA, 15 bp, Homo sapiens
ttcatttttagtggt

SEQ ID NO: 1143207 - DNA, 15 bp, Homo sapiens
gttcatttttagtgg

SEQ ID NO: 1143208 - DNA, 15 bp, Homo sapiens
ggttcatttttagtg

SEQ ID NO: 1143209 - DNA, 15 bp, Homo sapiens
aggttcatttttagt

SEQ ID NO: 1143210 - DNA, 15 bp, Homo sapiens
aaggttcatttttag

SEQ ID NO: 1143211 - DNA, 15 bp, Homo sapiens
aaaggttcattttta

SEQ ID NO: 1143212 - DNA, 15 bp, Homo sapiens
caaaggttcattttt

SEQ ID NO: 1143213 - DNA, 15 bp, Homo sapiens
ccaaaggttcatttt

SEQ ID NO: 1143214 - DNA, 15 bp, Homo sapiens
cccaaaggttcattt

SEQ ID NO: 1143215 - DNA, 15 bp, Homo sapiens
tcccaaaggttcatt

SEQ ID NO: 1143216 - DNA, 15 bp, Homo sapiens
gtcccaaaggttcat

SEQ ID NO: 1143217 - DNA, 15 bp, Homo sapiens
tgtcccaaaggttca

SEQ ID NO: 1143218 - DNA, 15 bp, Homo sapiens
gtgtcccaaaggttc

SEQ ID NO: 1143219 - DNA, 15 bp, Homo sapiens
agtgtcccaaaggtt

SEQ ID NO: 1143220 - DNA, 15 bp, Homo sapiens
cagtgtcccaaaggt

SEQ ID NO: 1143221 - DNA, 15 bp, Homo sapiens
ccagtgtcccaaagg

SEQ ID NO: 1143222 - DNA, 15 bp, Homo sapiens
accagtgtcccaaag

SEQ ID NO: 1143223 - DNA, 15 bp, Homo sapiens
gaccagtgtcccaaa

SEQ ID NO: 1143224 - DNA, 15 bp, Homo sapiens
ggaccagtgtcccaa

SEQ ID NO: 1143225 - DNA, 15 bp, Homo sapiens
gggaccagtgtccca

SEQ ID NO: 1143226 - DNA, 15 bp, Homo sapiens
agggaccagtgtccc

SEQ ID NO: 1143227 - DNA, 15 bp, Homo sapiens
aagggaccagtgtcc

SEQ ID NO: 1143228 - DNA, 15 bp, Homo sapiens
aaagggaccagtgtc

SEQ ID NO: 1143229 - DNA, 15 bp, Homo sapiens
caaagggaccagtgt

SEQ ID NO: 1143230 - DNA, 15 bp, Homo sapiens
acaaagggaccagtg

SEQ ID NO: 1143231 - DNA, 15 bp, Homo sapiens
cacaaagggaccagt

SEQ ID NO: 1143232 - DNA, 15 bp, Homo sapiens
tcacaaagggaccag

SEQ ID NO: 1143233 - DNA, 15 bp, Homo sapiens
gtcacaaagggacca

SEQ ID NO: 1143234 - DNA, 15 bp, Homo sapiens
tgtcacaaagggacc

SEQ ID NO: 1143235 - DNA, 15 bp, Homo sapiens
ttgtcacaaagggac

SEQ ID NO: 1143236 - DNA, 15 bp, Homo sapiens
attgtcacaaaggga

SEQ ID NO: 1143237 - DNA, 15 bp, Homo sapiens
aattgtcacaaaggg

SEQ ID NO: 1143238 - DNA, 15 bp, Homo sapiens
aaattgtcacaaagg

SEQ ID NO: 1143239 - DNA, 15 bp, Homo sapiens
aaaattgtcacaaag

SEQ ID NO: 1143240 - DNA, 15 bp, Homo sapiens
taaaattgtcacaaa

SEQ ID NO: 1143241 - DNA, 15 bp, Homo sapiens
ctaaaattgtcacaa

SEQ ID NO: 1143242 - DNA, 15 bp, Homo sapiens
cctaaaattgtcaca

SEQ ID NO: 1143243 - DNA, 15 bp, Homo sapiens
ccctaaaattgtcac

SEQ ID NO: 1143244 - DNA, 15 bp, Homo sapiens
tccctaaaattgtca

SEQ ID NO: 1143245 - DNA, 15 bp, Homo sapiens
gtccctaaaattgtc

SEQ ID NO: 1143246 - DNA, 15 bp, Homo sapiens
ggtccctaaaattgt

SEQ ID NO: 1143247 - DNA, 15 bp, Homo sapiens
gggtccctaaaattg

SEQ ID NO: 1143248 - DNA, 15 bp, Homo sapiens
tgggtccctaaaatt

SEQ ID NO: 1143249 - DNA, 15 bp, Homo sapiens
ctgggtccctaaaat

SEQ ID NO: 1143250 - DNA, 15 bp, Homo sapiens
gctgggtccctaaaa

SEQ ID NO: 1143251 - DNA, 15 bp, Homo sapiens
agctgggtccctaaa

SEQ ID NO: 1143252 - DNA, 15 bp, Homo sapiens
gagctgggtccctaa

SEQ ID NO: 1143253 - DNA, 15 bp, Homo sapiens
ggagctgggtcccta

SEQ ID NO: 1143254 - DNA, 15 bp, Homo sapiens
tggagctgggtccct

SEQ ID NO: 1143255 - DNA, 15 bp, Homo sapiens
atggagctgggtccc

SEQ ID NO: 1143256 - DNA, 15 bp, Homo sapiens
aatggagctgggtcc

SEQ ID NO: 1143257 - DNA, 15 bp, Homo sapiens
caatggagctgggtc

SEQ ID NO: 1143258 - DNA, 15 bp, Homo sapiens
ccaatggagctgggt

SEQ ID NO: 1143259 - DNA, 15 bp, Homo sapiens
gccaatggagctggg

SEQ ID NO: 1143260 - DNA, 15 bp, Homo sapiens
agccaatggagctgg

SEQ ID NO: 1143261 - DNA, 15 bp, Homo sapiens
gagccaatggagctg

SEQ ID NO: 1143262 - DNA, 15 bp, Homo sapiens
agagccaatggagct

SEQ ID NO: 1143263 - DNA, 15 bp, Homo sapiens
aagagccaatggagc

SEQ ID NO: 1143264 - DNA, 15 bp, Homo sapiens
caagagccaatggag

SEQ ID NO: 1143265 - DNA, 15 bp, Homo sapiens
tcaagagccaatgga

SEQ ID NO: 1143266 - DNA, 15 bp, Homo sapiens
gtcaagagccaatgg

SEQ ID NO: 1143267 - DNA, 15 bp, Homo sapiens
agtcaagagccaatg

SEQ ID NO: 1143268 - DNA, 15 bp, Homo sapiens
aagtcaagagccaat

SEQ ID NO: 1143269 - DNA, 15 bp, Homo sapiens
ctttaaaaattttaa

SEQ ID NO: 1143270 - DNA, 15 bp, Homo sapiens
actttaaaaatttta

SEQ ID NO: 1143271 - DNA, 15 bp, Homo sapiens
gactttaaaaatttt

SEQ ID NO: 1143272 - DNA, 15 bp, Homo sapiens
tgactttaaaaattt

SEQ ID NO: 1143273 - DNA, 15 bp, Homo sapiens
ctgactttaaaaatt

SEQ ID NO: 1143274 - DNA, 15 bp, Homo sapiens
tctgactttaaaaat

SEQ ID NO: 1143275 - DNA, 15 bp, Homo sapiens
atctgactttaaaaa

SEQ ID NO: 1143276 - DNA, 15 bp, Homo sapiens
aatctgactttaaaa

SEQ ID NO: 1143277 - DNA, 15 bp, Homo sapiens
taatctgactttaaa

SEQ ID NO: 1143278 - DNA, 15 bp, Homo sapiens
ttaatctgactttaa

SEQ ID NO: 1143279 - DNA, 15 bp, Homo sapiens
tttaatctgacttta

SEQ ID NO: 1143280 - DNA, 15 bp, Homo sapiens
ctttaatctgacttt

SEQ ID NO: 1143281 - DNA, 15 bp, Homo sapiens
gctttaatctgactt

SEQ ID NO: 1143282 - DNA, 15 bp, Homo sapiens
tgctttaatctgact

SEQ ID NO: 1143283 - DNA, 15 bp, Homo sapiens
ttgctttaatctgac

SEQ ID NO: 1143284 - DNA, 15 bp, Homo sapiens
attgctttaatctga

SEQ ID NO: 1143285 - DNA, 15 bp, Homo sapiens
cattgctttaatctg

SEQ ID NO: 1143286 - DNA, 15 bp, Homo sapiens
gcattgctttaatct

SEQ ID NO: 1143287 - DNA, 15 bp, Homo sapiens
tgcattgctttaatc

SEQ ID NO: 1143288 - DNA, 15 bp, Homo sapiens
ttgcattgctttaat

SEQ ID NO: 1143289 - DNA, 15 bp, Homo sapiens
attgcattgctttaa

SEQ ID NO: 1143290 - DNA, 15 bp, Homo sapiens
aattgcattgcttta

SEQ ID NO: 1143291 - DNA, 15 bp, Homo sapiens
gaattgcattgcttt

SEQ ID NO: 1143292 - DNA, 15 bp, Homo sapiens
tgaattgcattgctt

SEQ ID NO: 1143293 - DNA, 15 bp, Homo sapiens
gtgaattgcattgct

SEQ ID NO: 1143294 - DNA, 15 bp, Homo sapiens
agtgaattgcattgc

SEQ ID NO: 1143295 - DNA, 15 bp, Homo sapiens
aagtgaattgcattg

SEQ ID NO: 1143296 - DNA, 15 bp, Homo sapiens
taagtgaattgcatt

SEQ ID NO: 1143297 - DNA, 15 bp, Homo sapiens
ataagtgaattgcat

SEQ ID NO: 1143298 - DNA, 15 bp, Homo sapiens
gataagtgaattgca

SEQ ID NO: 1143299 - DNA, 15 bp, Homo sapiens
tgataagtgaattgc

SEQ ID NO: 1143300 - DNA, 15 bp, Homo sapiens
gtgataagtgaattg

SEQ ID NO: 1143301 - DNA, 15 bp, Homo sapiens
tgtgataagtgaatt

SEQ ID NO: 1143302 - DNA, 15 bp, Homo sapiens
gtgtgataagtgaat

SEQ ID NO: 1143303 - DNA, 15 bp, Homo sapiens
tgtgtgataagtgaa

SEQ ID NO: 1143304 - DNA, 15 bp, Homo sapiens
atgtgtgataagtga

SEQ ID NO: 1143305 - DNA, 15 bp, Homo sapiens
gatgtgtgataagtg

SEQ ID NO: 1143306 - DNA, 15 bp, Homo sapiens
tgatgtgtgataagt

SEQ ID NO: 1143307 - DNA, 15 bp, Homo sapiens
atgatgtgtgataag

SEQ ID NO: 1143308 - DNA, 15 bp, Homo sapiens
aatgatgtgtgataa

SEQ ID NO: 1143309 - DNA, 15 bp, Homo sapiens
aaatgatgtgtgata

SEQ ID NO: 1143310 - DNA, 15 bp, Homo sapiens
gaaatgatgtgtgat

SEQ ID NO: 1143311 - DNA, 15 bp, Homo sapiens
agaaatgatgtgtga

SEQ ID NO: 1143312 - DNA, 15 bp, Homo sapiens
gagaaatgatgtgtg

SEQ ID NO: 1143313 - DNA, 15 bp, Homo sapiens
agagaaatgatgtgt

SEQ ID NO: 1143314 - DNA, 15 bp, Homo sapiens
aagagaaatgatgtg

SEQ ID NO: 1143315 - DNA, 15 bp, Homo sapiens
aaagagaaatgatgt

SEQ ID NO: 1143316 - DNA, 15 bp, Homo sapiens
aaaagagaaatgatg

SEQ ID NO: 1143317 - DNA, 15 bp, Homo sapiens
caaaagagaaatgat

SEQ ID NO: 1143318 - DNA, 15 bp, Homo sapiens
ccaaaagagaaatga

SEQ ID NO: 1143319 - DNA, 15 bp, Homo sapiens
tccaaaagagaaatg

SEQ ID NO: 1143320 - DNA, 15 bp, Homo sapiens
gtccaaaagagaaat

SEQ ID NO: 1143321 - DNA, 15 bp, Homo sapiens
ggtccaaaagagaaa

SEQ ID NO: 1143322 - DNA, 15 bp, Homo sapiens
tggtccaaaagagaa

SEQ ID NO: 1143323 - DNA, 15 bp, Homo sapiens
ttggtccaaaagaga

SEQ ID NO: 1143324 - DNA, 15 bp, Homo sapiens
attggtccaaaagag

SEQ ID NO: 1143325 - DNA, 15 bp, Homo sapiens
aattggtccaaaaga

SEQ ID NO: 1143326 - DNA, 15 bp, Homo sapiens
aaattggtccaaaag

SEQ ID NO: 1143327 - DNA, 15 bp, Homo sapiens
aaaattggtccaaaa

SEQ ID NO: 1143328 - DNA, 15 bp, Homo sapiens
taaaattggtccaaa

SEQ ID NO: 1143329 - DNA, 15 bp, Homo sapiens
ataaaattggtccaa

SEQ ID NO: 1143330 - DNA, 15 bp, Homo sapiens
aataaaattggtcca

SEQ ID NO: 1143331 - DNA, 15 bp, Homo sapiens
taataaaattggtcc

SEQ ID NO: 1143332 - DNA, 15 bp, Homo sapiens
ctaataaaattggtc

SEQ ID NO: 1143333 - DNA, 15 bp, Homo sapiens
actaataaaattggt

SEQ ID NO: 1143334 - DNA, 15 bp, Homo sapiens
aactaataaaattgg

SEQ ID NO: 1143335 - DNA, 15 bp, Homo sapiens
gaactaataaaattg

SEQ ID NO: 1143336 - DNA, 15 bp, Homo sapiens
agaactaataaaatt

SEQ ID NO: 1143337 - DNA, 15 bp, Homo sapiens
cagaactaataaaat

SEQ ID NO: 1143338 - DNA, 15 bp, Homo sapiens
acagaactaataaaa

SEQ ID NO: 1143339 - DNA, 15 bp, Homo sapiens
aacagaactaataaa

SEQ ID NO: 1143340 - DNA, 15 bp, Homo sapiens
aaacagaactaataa

SEQ ID NO: 1143341 - DNA, 15 bp, Homo sapiens
aaaacagaactaata

SEQ ID NO: 1143342 - DNA, 15 bp, Homo sapiens
aaaaacagaactaat

SEQ ID NO: 1143343 - DNA, 15 bp, Homo sapiens
caaaaacagaactaa

SEQ ID NO: 1143344 - DNA, 15 bp, Homo sapiens
acaaaaacagaacta

SEQ ID NO: 1143345 - DNA, 15 bp, Homo sapiens
aacaaaaacagaact

SEQ ID NO: 1143346 - DNA, 15 bp, Homo sapiens
aaacaaaaacagaac

SEQ ID NO: 1143347 - DNA, 15 bp, Homo sapiens
aaaacaaaaacagaa

SEQ ID NO: 1143348 - DNA, 15 bp, Homo sapiens
aaaaacaaaaacaga

SEQ ID NO: 1143349 - DNA, 15 bp, Homo sapiens
taaaaacaaaaacag

SEQ ID NO: 1143350 - DNA, 15 bp, Homo sapiens
gtaaaaacaaaaaca

SEQ ID NO: 1143351 - DNA, 15 bp, Homo sapiens
agtaaaaacaaaaac

SEQ ID NO: 1143352 - DNA, 15 bp, Homo sapiens
tagtaaaaacaaaaa

SEQ ID NO: 1143353 - DNA, 15 bp, Homo sapiens
ttagtaaaaacaaaa

SEQ ID NO: 1143354 - DNA, 15 bp, Homo sapiens
attagtaaaaacaaa

SEQ ID NO: 1143355 - DNA, 15 bp, Homo sapiens
tattagtaaaaacaa

SEQ ID NO: 1143356 - DNA, 15 bp, Homo sapiens
gtattagtaaaaaca

SEQ ID NO: 1143357 - DNA, 15 bp, Homo sapiens
ggtattagtaaaaac

SEQ ID NO: 1143358 - DNA, 15 bp, Homo sapiens
tggtattagtaaaaa

SEQ ID NO: 1143359 - DNA, 15 bp, Homo sapiens
ctggtattagtaaaa

SEQ ID NO: 1143360 - DNA, 15 bp, Homo sapiens
tctggtattagtaaa

SEQ ID NO: 1143361 - DNA, 15 bp, Homo sapiens
ttctggtattagtaa

SEQ ID NO: 1143362 - DNA, 15 bp, Homo sapiens
attctggtattagta

SEQ ID NO: 1143363 - DNA, 15 bp, Homo sapiens
tattctggtattagt

SEQ ID NO: 1143364 - DNA, 15 bp, Homo sapiens
ttattctggtattag

SEQ ID NO: 1143365 - DNA, 15 bp, Homo sapiens
attattctggtatta

SEQ ID NO: 1143366 - DNA, 15 bp, Homo sapiens
aattattctggtatt

SEQ ID NO: 1143367 - DNA, 15 bp, Homo sapiens
gaattattctggtat

SEQ ID NO: 1143368 - DNA, 15 bp, Homo sapiens
ggaattattctggta

SEQ ID NO: 1143369 - DNA, 15 bp, Homo sapiens
gggaattattctggt

SEQ ID NO: 1143370 - DNA, 15 bp, Homo sapiens
tgggaattattctgg

SEQ ID NO: 1143371 - DNA, 15 bp, Homo sapiens
ttgggaattattctg

SEQ ID NO: 1143372 - DNA, 15 bp, Homo sapiens
gttgggaattattct

SEQ ID NO: 1143373 - DNA, 15 bp, Homo sapiens
agttgggaattattc

SEQ ID NO: 1143374 - DNA, 15 bp, Homo sapiens
aagttgggaattatt

SEQ ID NO: 1143375 - DNA, 15 bp, Homo sapiens
aaagttgggaattat

SEQ ID NO: 1143376 - DNA, 15 bp, Homo sapiens
gaaagttgggaatta

SEQ ID NO: 1143377 - DNA, 15 bp, Homo sapiens
agaaagttgggaatt

SEQ ID NO: 1143378 - DNA, 15 bp, Homo sapiens
aagaaagttgggaat

SEQ ID NO: 1143379 - DNA, 15 bp, Homo sapiens
taagaaagttgggaa

SEQ ID NO: 1143380 - DNA, 15 bp, Homo sapiens
ataagaaagttggga

SEQ ID NO: 1143381 - DNA, 15 bp, Homo sapiens
aataagaaagttggg

SEQ ID NO: 1143382 - DNA, 15 bp, Homo sapiens
aaataagaaagttgg

SEQ ID NO: 1143383 - DNA, 15 bp, Homo sapiens
caaataagaaagttg

SEQ ID NO: 1143384 - DNA, 15 bp, Homo sapiens
ccaaataagaaagtt

SEQ ID NO: 1143385 - DNA, 15 bp, Homo sapiens
tccaaataagaaagt

SEQ ID NO: 1143386 - DNA, 15 bp, Homo sapiens
ctccaaataagaaag

SEQ ID NO: 1143387 - DNA, 15 bp, Homo sapiens
gctccaaataagaaa

SEQ ID NO: 1143388 - DNA, 15 bp, Homo sapiens
tgctccaaataagaa

SEQ ID NO: 1143389 - DNA, 15 bp, Homo sapiens
ctgctccaaataaga

SEQ ID NO: 1143390 - DNA, 15 bp, Homo sapiens
actgctccaaataag

SEQ ID NO: 1143391 - DNA, 15 bp, Homo sapiens
aactgctccaaataa

SEQ ID NO: 1143392 - DNA, 15 bp, Homo sapiens
aaactgctccaaata

SEQ ID NO: 1143393 - DNA, 15 bp, Homo sapiens
caaactgctccaaat

SEQ ID NO: 1143394 - DNA, 15 bp, Homo sapiens
gcaaactgctccaaa

SEQ ID NO: 1143395 - DNA, 15 bp, Homo sapiens
agcaaactgctccaa

SEQ ID NO: 1143396 - DNA, 15 bp, Homo sapiens
aagcaaactgctcca

SEQ ID NO: 1143397 - DNA, 15 bp, Homo sapiens
aaagcaaactgctcc

SEQ ID NO: 1143398 - DNA, 15 bp, Homo sapiens
aaaagcaaactgctc

SEQ ID NO: 1143399 - DNA, 15 bp, Homo sapiens
aaaaagcaaactgct

SEQ ID NO: 1143400 - DNA, 15 bp, Homo sapiens
aaaaaagcaaactgc

SEQ ID NO: 1143401 - DNA, 15 bp, Homo sapiens
aaaaaaagcaaactg

SEQ ID NO: 1143402 - DNA, 15 bp, Homo sapiens
aaaaaaaagcaaact

SEQ ID NO: 1143403 - DNA, 15 bp, Homo sapiens
aaaaaaaaagcaaac

SEQ ID NO: 1143404 - DNA, 15 bp, Homo sapiens
aaaaaaaaaagcaaa

SEQ ID NO: 1143405 - DNA, 15 bp, Homo sapiens
aaaaaaaaaaagcaa

SEQ ID NO: 1143406 - DNA, 15 bp, Homo sapiens
aaaaaaaaaaaagca

SEQ ID NO: 1143407 - DNA, 15 bp, Homo sapiens
gttaaaaaaaaaaaa

SEQ ID NO: 1143408 - DNA, 15 bp, Homo sapiens
agttaaaaaaaaaaa

SEQ ID NO: 1143409 - DNA, 15 bp, Homo sapiens
aagttaaaaaaaaaa

SEQ ID NO: 1143410 - DNA, 15 bp, Homo sapiens
caagttaaaaaaaaa

SEQ ID NO: 1143411 - DNA, 15 bp, Homo sapiens
acaagttaaaaaaaa

SEQ ID NO: 1143412 - DNA, 15 bp, Homo sapiens
cacaagttaaaaaaa

SEQ ID NO: 1143413 - DNA, 15 bp, Homo sapiens
gcacaagttaaaaaa

SEQ ID NO: 1143414 - DNA, 15 bp, Homo sapiens
ggcacaagttaaaaa

SEQ ID NO: 1143415 - DNA, 15 bp, Homo sapiens
aggcacaagttaaaa

SEQ ID NO: 1143416 - DNA, 15 bp, Homo sapiens
taggcacaagttaaa

SEQ ID NO: 1143417 - DNA, 15 bp, Homo sapiens
ttaggcacaagttaa

SEQ ID NO: 1143418 - DNA, 15 bp, Homo sapiens
attaggcacaagtta

SEQ ID NO: 1143419 - DNA, 15 bp, Homo sapiens
aattaggcacaagtt

SEQ ID NO: 1143420 - DNA, 15 bp, Homo sapiens
taattaggcacaagt

SEQ ID NO: 1143421 - DNA, 15 bp, Homo sapiens
ataattaggcacaag

SEQ ID NO: 1143422 - DNA, 15 bp, Homo sapiens
cataattaggcacaa

SEQ ID NO: 1143423 - DNA, 15 bp, Homo sapiens
tcataattaggcaca

SEQ ID NO: 1143424 - DNA, 15 bp, Homo sapiens
ttcataattaggcac

SEQ ID NO: 1143425 - DNA, 15 bp, Homo sapiens
tttcataattaggca

SEQ ID NO: 1143426 - DNA, 15 bp, Homo sapiens
gtttcataattaggc

SEQ ID NO: 1143427 - DNA, 15 bp, Homo sapiens
agtttcataattagg

SEQ ID NO: 1143428 - DNA, 15 bp, Homo sapiens
cagtttcataattag

SEQ ID NO: 1143429 - DNA, 15 bp, Homo sapiens
tcagtttcataatta

SEQ ID NO: 1143430 - DNA, 15 bp, Homo sapiens
ttcagtttcataatt

SEQ ID NO: 1143431 - DNA, 15 bp, Homo sapiens
attcagtttcataat

SEQ ID NO: 1143432 - DNA, 15 bp, Homo sapiens
cattcagtttcataa

SEQ ID NO: 1143433 - DNA, 15 bp, Homo sapiens
ccattcagtttcata

SEQ ID NO: 1143434 - DNA, 15 bp, Homo sapiens
gccattcagtttcat

SEQ ID NO: 1143435 - DNA, 15 bp, Homo sapiens
agccattcagtttca

SEQ ID NO: 1143436 - DNA, 15 bp, Homo sapiens
aagccattcagtttc

SEQ ID NO: 1143437 - DNA, 15 bp, Homo sapiens
aaagccattcagttt

SEQ ID NO: 1143438 - DNA, 15 bp, Homo sapiens
taaagccattcagtt

SEQ ID NO: 1143439 - DNA, 15 bp, Homo sapiens
ttaaagccattcagt

SEQ ID NO: 1143440 - DNA, 15 bp, Homo sapiens
cttaaagccattcag

SEQ ID NO: 1143441 - DNA, 15 bp, Homo sapiens
gcttaaagccattca

SEQ ID NO: 1143442 - DNA, 15 bp, Homo sapiens
agcttaaagccattc

SEQ ID NO: 1143443 - DNA, 15 bp, Homo sapiens
cagcttaaagccatt

SEQ ID NO: 1143444 - DNA, 15 bp, Homo sapiens
ccagcttaaagccat

SEQ ID NO: 1143445 - DNA, 15 bp, Homo sapiens
tccagcttaaagcca

SEQ ID NO: 1143446 - DNA, 15 bp, Homo sapiens
gtccagcttaaagcc

SEQ ID NO: 1143447 - DNA, 15 bp, Homo sapiens
tgtccagcttaaagc

SEQ ID NO: 1143448 - DNA, 15 bp, Homo sapiens
atgtccagcttaaag

SEQ ID NO: 1143449 - DNA, 15 bp, Homo sapiens
catgtccagcttaaa

SEQ ID NO: 1143450 - DNA, 15 bp, Homo sapiens
ccatgtccagcttaa

SEQ ID NO: 1143451 - DNA, 15 bp, Homo sapiens
gccatgtccagctta

SEQ ID NO: 1143452 - DNA, 15 bp, Homo sapiens
tgccatgtccagctt

SEQ ID NO: 1143453 - DNA, 15 bp, Homo sapiens
ctgccatgtccagct

SEQ ID NO: 1143454 - DNA, 15 bp, Homo sapiens
tctgccatgtccagc

SEQ ID NO: 1143455 - DNA, 15 bp, Homo sapiens
ctctgccatgtccag

SEQ ID NO: 1143456 - DNA, 15 bp, Homo sapiens
tctctgccatgtcca

SEQ ID NO: 1143457 - DNA, 15 bp, Homo sapiens
ctctctgccatgtcc

SEQ ID NO: 1143458 - DNA, 15 bp, Homo sapiens
cctctctgccatgtc

SEQ ID NO: 1143459 - DNA, 15 bp, Homo sapiens
acctctctgccatgt

SEQ ID NO: 1143460 - DNA, 15 bp, Homo sapiens
cacctctctgccatg

SEQ ID NO: 1143461 - DNA, 15 bp, Homo sapiens
gcacctctctgccat

SEQ ID NO: 1143462 - DNA, 15 bp, Homo sapiens
ggcacctctctgcca

SEQ ID NO: 1143463 - DNA, 15 bp, Homo sapiens
tggcacctctctgcc

SEQ ID NO: 1143464 - DNA, 15 bp, Homo sapiens
ttggcacctctctgc

SEQ ID NO: 1143465 - DNA, 15 bp, Homo sapiens
tttggcacctctctg

SEQ ID NO: 1143466 - DNA, 15 bp, Homo sapiens
atttggcacctctct

SEQ ID NO: 1143467 - DNA, 15 bp, Homo sapiens
aatttggcacctctc

SEQ ID NO: 1143468 - DNA, 15 bp, Homo sapiens
gaatttggcacctct

SEQ ID NO: 1143469 - DNA, 15 bp, Homo sapiens
tgaatttggcacctc

SEQ ID NO: 1143470 - DNA, 15 bp, Homo sapiens
ttgaatttggcacct

SEQ ID NO: 1143471 - DNA, 15 bp, Homo sapiens
cttgaatttggcacc

SEQ ID NO: 1143472 - DNA, 15 bp, Homo sapiens
ccttgaatttggcac

SEQ ID NO: 1143473 - DNA, 15 bp, Homo sapiens
accttgaatttggca

SEQ ID NO: 1143474 - DNA, 15 bp, Homo sapiens
gaccttgaatttggc

SEQ ID NO: 1143475 - DNA, 15 bp, Homo sapiens
agaccttgaatttgg

SEQ ID NO: 1143476 - DNA, 15 bp, Homo sapiens
gagaccttgaatttg

SEQ ID NO: 1143477 - DNA, 15 bp, Homo sapiens
agagaccttgaattt

SEQ ID NO: 1143478 - DNA, 15 bp, Homo sapiens
gagagaccttgaatt

SEQ ID NO: 1143479 - DNA, 15 bp, Homo sapiens
agagagaccttgaat

SEQ ID NO: 1143480 - DNA, 15 bp, Homo sapiens
cagagagaccttgaa

SEQ ID NO: 1143481 - DNA, 15 bp, Homo sapiens
ccagagagaccttga

SEQ ID NO: 1143482 - DNA, 15 bp, Homo sapiens
cccagagagaccttg

SEQ ID NO: 1143483 - DNA, 15 bp, Homo sapiens
ccccagagagacctt

SEQ ID NO: 1143484 - DNA, 15 bp, Homo sapiens
tccccagagagacct

SEQ ID NO: 1143485 - DNA, 15 bp, Homo sapiens
ttccccagagagacc

SEQ ID NO: 1143486 - DNA, 15 bp, Homo sapiens
attccccagagagac

SEQ ID NO: 1143487 - DNA, 15 bp, Homo sapiens
cattccccagagaga

SEQ ID NO: 1143488 - DNA, 15 bp, Homo sapiens
ccattccccagagag

SEQ ID NO: 1143489 - DNA, 15 bp, Homo sapiens
gccattccccagaga

SEQ ID NO: 1143490 - DNA, 15 bp, Homo sapiens
tgccattccccagag

SEQ ID NO: 1143491 - DNA, 15 bp, Homo sapiens
gtgccattccccaga

SEQ ID NO: 1143492 - DNA, 15 bp, Homo sapiens
tgtgccattccccag

SEQ ID NO: 1143493 - DNA, 15 bp, Homo sapiens
ttgtgccattcccca

SEQ ID NO: 1143494 - DNA, 15 bp, Homo sapiens
cttgtgccattcccc

SEQ ID NO: 1143495 - DNA, 15 bp, Homo sapiens
gcttgtgccattccc

SEQ ID NO: 1143496 - DNA, 15 bp, Homo sapiens
tgcttgtgccattcc

SEQ ID NO: 1143497 - DNA, 15 bp, Homo sapiens
ttgcttgtgccattc

SEQ ID NO: 1143498 - DNA, 15 bp, Homo sapiens
cttgcttgtgccatt

SEQ ID NO: 1143499 - DNA, 15 bp, Homo sapiens
acttgcttgtgccat

SEQ ID NO: 1143500 - DNA, 15 bp, Homo sapiens
gacttgcttgtgcca

SEQ ID NO: 1143501 - DNA, 15 bp, Homo sapiens
tgacttgcttgtgcc

SEQ ID NO: 1143502 - DNA, 15 bp, Homo sapiens
gtgacttgcttgtgc

SEQ ID NO: 1143503 - DNA, 15 bp, Homo sapiens
agtgacttgcttgtg

SEQ ID NO: 1143504 - DNA, 15 bp, Homo sapiens
aagtgacttgcttgt

SEQ ID NO: 1143505 - DNA, 15 bp, Homo sapiens
taagtgacttgcttg

SEQ ID NO: 1143506 - DNA, 15 bp, Homo sapiens
gtaagtgacttgctt

SEQ ID NO: 1143507 - DNA, 15 bp, Homo sapiens
tgtaagtgacttgct

SEQ ID NO: 1143508 - DNA, 15 bp, Homo sapiens
ctgtaagtgacttgc

SEQ ID NO: 1143509 - DNA, 15 bp, Homo sapiens
tctgtaagtgacttg

SEQ ID NO: 1143510 - DNA, 15 bp, Homo sapiens
ttctgtaagtgactt

SEQ ID NO: 1143511 - DNA, 15 bp, Homo sapiens
gttctgtaagtgact

SEQ ID NO: 1143512 - DNA, 15 bp, Homo sapiens
agttctgtaagtgac

SEQ ID NO: 1143513 - DNA, 15 bp, Homo sapiens
cagttctgtaagtga

SEQ ID NO: 1143514 - DNA, 15 bp, Homo sapiens
acagttctgtaagtg

SEQ ID NO: 1143515 - DNA, 15 bp, Homo sapiens
cacagttctgtaagt

SEQ ID NO: 1143516 - DNA, 15 bp, Homo sapiens
ccacagttctgtaag

SEQ ID NO: 1143517 - DNA, 15 bp, Homo sapiens
accacagttctgtaa

SEQ ID NO: 1143518 - DNA, 15 bp, Homo sapiens
aaccacagttctgta

SEQ ID NO: 1143519 - DNA, 15 bp, Homo sapiens
caaccacagttctgt

SEQ ID NO: 1143520 - DNA, 15 bp, Homo sapiens
tcaaccacagttctg

SEQ ID NO: 1143521 - DNA, 15 bp, Homo sapiens
gtcaaccacagttct

SEQ ID NO: 1143522 - DNA, 15 bp, Homo sapiens
tgtcaaccacagttc

SEQ ID NO: 1143523 - DNA, 15 bp, Homo sapiens
gtgtcaaccacagtt

SEQ ID NO: 1143524 - DNA, 15 bp, Homo sapiens
tgtgtcaaccacagt

SEQ ID NO: 1143525 - DNA, 15 bp, Homo sapiens
ctgtgtcaaccacag

SEQ ID NO: 1143526 - DNA, 15 bp, Homo sapiens
tctgtgtcaaccaca

SEQ ID NO: 1143527 - DNA, 15 bp, Homo sapiens
ctctgtgtcaaccac

SEQ ID NO: 1143528 - DNA, 15 bp, Homo sapiens
tctctgtgtcaacca

SEQ ID NO: 1143529 - DNA, 15 bp, Homo sapiens
atctctgtgtcaacc

SEQ ID NO: 1143530 - DNA, 15 bp, Homo sapiens
tatctctgtgtcaac

SEQ ID NO: 1143531 - DNA, 15 bp, Homo sapiens
ttatctctgtgtcaa

SEQ ID NO: 1143532 - DNA, 15 bp, Homo sapiens
tttatctctgtgtca

SEQ ID NO: 1143533 - DNA, 15 bp, Homo sapiens
gtttatctctgtgtc

SEQ ID NO: 1143534 - DNA, 15 bp, Homo sapiens
agtttatctctgtgt

SEQ ID NO: 1143535 - DNA, 15 bp, Homo sapiens
gagtttatctctgtg

SEQ ID NO: 1143536 - DNA, 15 bp, Homo sapiens
cgagtttatctctgt

SEQ ID NO: 1143537 - DNA, 15 bp, Homo sapiens
gcgagtttatctctg

SEQ ID NO: 1143538 - DNA, 15 bp, Homo sapiens
cgcgagtttatctct

SEQ ID NO: 1143539 - DNA, 15 bp, Homo sapiens
tcgcgagtttatctc

SEQ ID NO: 1143540 - DNA, 15 bp, Homo sapiens
ctcgcgagtttatct

SEQ ID NO: 1143541 - DNA, 15 bp, Homo sapiens
tctcgcgagtttatc

SEQ ID NO: 1143542 - DNA, 15 bp, Homo sapiens
ctctcgcgagtttat

SEQ ID NO: 1143543 - DNA, 15 bp, Homo sapiens
actctcgcgagttta

SEQ ID NO: 1143544 - DNA, 15 bp, Homo sapiens
aactctcgcgagttt

SEQ ID NO: 1143545 - DNA, 15 bp, Homo sapiens
caactctcgcgagtt

SEQ ID NO: 1143546 - DNA, 15 bp, Homo sapiens
gcaactctcgcgagt

SEQ ID NO: 1143547 - DNA, 15 bp, Homo sapiens
ggcaactctcgcgag

SEQ ID NO: 1143548 - DNA, 15 bp, Homo sapiens
tggcaactctcgcga

SEQ ID NO: 1143549 - DNA, 15 bp, Homo sapiens
ttggcaactctcgcg

SEQ ID NO: 1143550 - DNA, 15 bp, Homo sapiens
gttggcaactctcgc

SEQ ID NO: 1143551 - DNA, 15 bp, Homo sapiens
agttggcaactctcg

SEQ ID NO: 1143552 - DNA, 15 bp, Homo sapiens
aagttggcaactctc

SEQ ID NO: 1143553 - DNA, 15 bp, Homo sapiens
aaagttggcaactct

SEQ ID NO: 1143554 - DNA, 15 bp, Homo sapiens
caaagttggcaactc

SEQ ID NO: 1143555 - DNA, 15 bp, Homo sapiens
acaaagttggcaact

SEQ ID NO: 1143556 - DNA, 15 bp, Homo sapiens
aacaaagttggcaac

SEQ ID NO: 1143557 - DNA, 15 bp, Homo sapiens
aaacaaagttggcaa

SEQ ID NO: 1143558 - DNA, 15 bp, Homo sapiens
aaaacaaagttggca

SEQ ID NO: 1143559 - DNA, 15 bp, Homo sapiens
caaaacaaagttggc

SEQ ID NO: 1143560 - DNA, 15 bp, Homo sapiens
ccaaaacaaagttgg

SEQ ID NO: 1143561 - DNA, 15 bp, Homo sapiens
accaaaacaaagttg

SEQ ID NO: 1143562 - DNA, 15 bp, Homo sapiens
taccaaaacaaagtt

SEQ ID NO: 1143563 - DNA, 15 bp, Homo sapiens
ctaccaaaacaaagt

SEQ ID NO: 1143564 - DNA, 15 bp, Homo sapiens
gctaccaaaacaaag

SEQ ID NO: 1143565 - DNA, 15 bp, Homo sapiens
ggctaccaaaacaaa

SEQ ID NO: 1143566 - DNA, 15 bp, Homo sapiens
aggctaccaaaacaa

SEQ ID NO: 1143567 - DNA, 15 bp, Homo sapiens
gaggctaccaaaaca

SEQ ID NO: 1143568 - DNA, 15 bp, Homo sapiens
ggaggctaccaaaac

SEQ ID NO: 1143569 - DNA, 15 bp, Homo sapiens
cggaggctaccaaaa

SEQ ID NO: 1143570 - DNA, 15 bp, Homo sapiens
tcggaggctaccaaa

SEQ ID NO: 1143571 - DNA, 15 bp, Homo sapiens
ttcggaggctaccaa

SEQ ID NO: 1143572 - DNA, 15 bp, Homo sapiens
attcggaggctacca

SEQ ID NO: 1143573 - DNA, 15 bp, Homo sapiens
aattcggaggctacc

SEQ ID NO: 1143574 - DNA, 15 bp, Homo sapiens
taattcggaggctac

SEQ ID NO: 1143575 - DNA, 15 bp, Homo sapiens
ataattcggaggcta

SEQ ID NO: 1143576 - DNA, 15 bp, Homo sapiens
tataattcggaggct

SEQ ID NO: 1143577 - DNA, 15 bp, Homo sapiens
ttataattcggaggc

SEQ ID NO: 1143578 - DNA, 15 bp, Homo sapiens
tttataattcggagg

SEQ ID NO: 1143579 - DNA, 15 bp, Homo sapiens
gtttataattcggag

SEQ ID NO: 1143580 - DNA, 15 bp, Homo sapiens
tgtttataattcgga

SEQ ID NO: 1143581 - DNA, 15 bp, Homo sapiens
gtgtttataattcgg

SEQ ID NO: 1143582 - DNA, 15 bp, Homo sapiens
agtgtttataattcg

SEQ ID NO: 1143583 - DNA, 15 bp, Homo sapiens
gagtgtttataattc

SEQ ID NO: 1143584 - DNA, 15 bp, Homo sapiens
ggagtgtttataatt

SEQ ID NO: 1143585 - DNA, 15 bp, Homo sapiens
aggagtgtttataat

SEQ ID NO: 1143586 - DNA, 15 bp, Homo sapiens
caggagtgtttataa

SEQ ID NO: 1143587 - DNA, 15 bp, Homo sapiens
acaggagtgtttata

SEQ ID NO: 1143588 - DNA, 15 bp, Homo sapiens
aacaggagtgtttat

SEQ ID NO: 1143589 - DNA, 15 bp, Homo sapiens
taacaggagtgttta

SEQ ID NO: 1143590 - DNA, 15 bp, Homo sapiens
ataacaggagtgttt

SEQ ID NO: 1143591 - DNA, 15 bp, Homo sapiens
cataacaggagtgtt

SEQ ID NO: 1143592 - DNA, 15 bp, Homo sapiens
tcataacaggagtgt

SEQ ID NO: 1143593 - DNA, 15 bp, Homo sapiens
atcataacaggagtg

SEQ ID NO: 1143594 - DNA, 15 bp, Homo sapiens
catcataacaggagt

SEQ ID NO: 1143595 - DNA, 15 bp, Homo sapiens
gcatcataacaggag

SEQ ID NO: 1143596 - DNA, 15 bp, Homo sapiens
agcatcataacagga

SEQ ID NO: 1143597 - DNA, 15 bp, Homo sapiens
aagcatcataacagg

SEQ ID NO: 1143598 - DNA, 15 bp, Homo sapiens
caagcatcataacag

SEQ ID NO: 1143599 - DNA, 15 bp, Homo sapiens
ccaagcatcataaca

SEQ ID NO: 1143600 - DNA, 15 bp, Homo sapiens
accaagcatcataac

SEQ ID NO: 1143601 - DNA, 15 bp, Homo sapiens
taccaagcatcataa

SEQ ID NO: 1143602 - DNA, 15 bp, Homo sapiens
gtaccaagcatcata

SEQ ID NO: 1143603 - DNA, 15 bp, Homo sapiens
ggtaccaagcatcat

SEQ ID NO: 1143604 - DNA, 15 bp, Homo sapiens
gggtaccaagcatca

SEQ ID NO: 1143605 - DNA, 15 bp, Homo sapiens
agggtaccaagcatc

SEQ ID NO: 1143606 - DNA, 15 bp, Homo sapiens
cagggtaccaagcat

SEQ ID NO: 1143607 - DNA, 15 bp, Homo sapiens
acagggtaccaagca

SEQ ID NO: 1143608 - DNA, 15 bp, Homo sapiens
tacagggtaccaagc

SEQ ID NO: 1143609 - DNA, 15 bp, Homo sapiens
ctacagggtaccaag

SEQ ID NO: 1143610 - DNA, 15 bp, Homo sapiens
gctacagggtaccaa

SEQ ID NO: 1143611 - DNA, 15 bp, Homo sapiens
ggctacagggtacca

SEQ ID NO: 1143612 - DNA, 15 bp, Homo sapiens
tggctacagggtacc

SEQ ID NO: 1143613 - DNA, 15 bp, Homo sapiens
atggctacagggtac

SEQ ID NO: 1143614 - DNA, 15 bp, Homo sapiens
catggctacagggta

SEQ ID NO: 1143615 - DNA, 15 bp, Homo sapiens
acatggctacagggt

SEQ ID NO: 1143616 - DNA, 15 bp, Homo sapiens
aacatggctacaggg

SEQ ID NO: 1143617 - DNA, 15 bp, Homo sapiens
aaacatggctacagg

SEQ ID NO: 1143618 - DNA, 15 bp, Homo sapiens
gaaacatggctacag

SEQ ID NO: 1143619 - DNA, 15 bp, Homo sapiens
agaaacatggctaca

SEQ ID NO: 1143620 - DNA, 15 bp, Homo sapiens
gagaaacatggctac

SEQ ID NO: 1143621 - DNA, 15 bp, Homo sapiens
tgagaaacatggcta

SEQ ID NO: 1143622 - DNA, 15 bp, Homo sapiens
atgagaaacatggct

SEQ ID NO: 1143623 - DNA, 15 bp, Homo sapiens
aatgagaaacatggc

SEQ ID NO: 1143624 - DNA, 15 bp, Homo sapiens
taatgagaaacatgg

SEQ ID NO: 1143625 - DNA, 15 bp, Homo sapiens
ctaatgagaaacatg

SEQ ID NO: 1143626 - DNA, 15 bp, Homo sapiens
cctaatgagaaacat

SEQ ID NO: 1143627 - DNA, 15 bp, Homo sapiens
gcctaatgagaaaca

SEQ ID NO: 1143628 - DNA, 15 bp, Homo sapiens
agcctaatgagaaac

SEQ ID NO: 1143629 - DNA, 15 bp, Homo sapiens
aagcctaatgagaaa

SEQ ID NO: 1143630 - DNA, 15 bp, Homo sapiens
taagcctaatgagaa

SEQ ID NO: 1143631 - DNA, 15 bp, Homo sapiens
gtaagcctaatgaga

SEQ ID NO: 1143632 - DNA, 15 bp, Homo sapiens
agtaagcctaatgag

SEQ ID NO: 1143633 - DNA, 15 bp, Homo sapiens
cagtaagcctaatga

SEQ ID NO: 1143634 - DNA, 15 bp, Homo sapiens
ccagtaagcctaatg

SEQ ID NO: 1143635 - DNA, 15 bp, Homo sapiens
tccagtaagcctaat

SEQ ID NO: 1143636 - DNA, 15 bp, Homo sapiens
atccagtaagcctaa

SEQ ID NO: 1143637 - DNA, 15 bp, Homo sapiens
catccagtaagccta

SEQ ID NO: 1143638 - DNA, 15 bp, Homo sapiens
gcatccagtaagcct

SEQ ID NO: 1143639 - DNA, 15 bp, Homo sapiens
agcatccagtaagcc

SEQ ID NO: 1143640 - DNA, 15 bp, Homo sapiens
tagcatccagtaagc

SEQ ID NO: 1143641 - DNA, 15 bp, Homo sapiens
atagcatccagtaag

SEQ ID NO: 1143642 - DNA, 15 bp, Homo sapiens
catagcatccagtaa

SEQ ID NO: 1143643 - DNA, 15 bp, Homo sapiens
ccatagcatccagta

SEQ ID NO: 1143644 - DNA, 15 bp, Homo sapiens
tccatagcatccagt

SEQ ID NO: 1143645 - DNA, 15 bp, Homo sapiens
ctccatagcatccag

SEQ ID NO: 1143646 - DNA, 15 bp, Homo sapiens
actccatagcatcca

SEQ ID NO: 1143647 - DNA, 15 bp, Homo sapiens
tactccatagcatcc

SEQ ID NO: 1143648 - DNA, 15 bp, Homo sapiens
atactccatagcatc

SEQ ID NO: 1143649 - DNA, 15 bp, Homo sapiens
aatactccatagcat

SEQ ID NO: 1143650 - DNA, 15 bp, Homo sapiens
aaatactccatagca

SEQ ID NO: 1143651 - DNA, 15 bp, Homo sapiens
taaatactccatagc

SEQ ID NO: 1143652 - DNA, 15 bp, Homo sapiens
ctaaatactccatag

SEQ ID NO: 1143653 - DNA, 15 bp, Homo sapiens
tctaaatactccata

SEQ ID NO: 1143654 - DNA, 15 bp, Homo sapiens
atctaaatactccat

SEQ ID NO: 1143655 - DNA, 15 bp, Homo sapiens
catctaaatactcca

SEQ ID NO: 1143656 - DNA, 15 bp, Homo sapiens
ccatctaaatactcc

SEQ ID NO: 1143657 - DNA, 15 bp, Homo sapiens
tccatctaaatactc

SEQ ID NO: 1143658 - DNA, 15 bp, Homo sapiens
ttccatctaaatact

SEQ ID NO: 1143659 - DNA, 15 bp, Homo sapiens
tttccatctaaatac

SEQ ID NO: 1143660 - DNA, 15 bp, Homo sapiens
ctttccatctaaata

SEQ ID NO: 1143661 - DNA, 15 bp, Homo sapiens
actttccatctaaat

SEQ ID NO: 1143662 - DNA, 15 bp, Homo sapiens
aactttccatctaaa

SEQ ID NO: 1143663 - DNA, 15 bp, Homo sapiens
gaactttccatctaa

SEQ ID NO: 1143664 - DNA, 15 bp, Homo sapiens
ggaactttccatcta

SEQ ID NO: 1143665 - DNA, 15 bp, Homo sapiens
aggaactttccatct

SEQ ID NO: 1143666 - DNA, 15 bp, Homo sapiens
gaggaactttccatc

SEQ ID NO: 1143667 - DNA, 15 bp, Homo sapiens
tgaggaactttccat

SEQ ID NO: 1143668 - DNA, 15 bp, Homo sapiens
ttgaggaactttcca

SEQ ID NO: 1143669 - DNA, 15 bp, Homo sapiens
tttgaggaactttcc

SEQ ID NO: 1143670 - DNA, 15 bp, Homo sapiens
atttgaggaactttc

SEQ ID NO: 1143671 - DNA, 15 bp, Homo sapiens
catttgaggaacttt

SEQ ID NO: 1143672 - DNA, 15 bp, Homo sapiens
acatttgaggaactt

SEQ ID NO: 1143673 - DNA, 15 bp, Homo sapiens
aacatttgaggaact

SEQ ID NO: 1143674 - DNA, 15 bp, Homo sapiens
taacatttgaggaac

SEQ ID NO: 1143675 - DNA, 15 bp, Homo sapiens
ataacatttgaggaa

SEQ ID NO: 1143676 - DNA, 15 bp, Homo sapiens
cataacatttgagga

SEQ ID NO: 1143677 - DNA, 15 bp, Homo sapiens
tcataacatttgagg

SEQ ID NO: 1143678 - DNA, 15 bp, Homo sapiens
ttcataacatttgag

SEQ ID NO: 1143679 - DNA, 15 bp, Homo sapiens
attcataacatttga

SEQ ID NO: 1143680 - DNA, 15 bp, Homo sapiens
aattcataacatttg

SEQ ID NO: 1143681 - DNA, 15 bp, Homo sapiens
aaattcataacattt

SEQ ID NO: 1143682 - DNA, 15 bp, Homo sapiens
gaaattcataacatt

SEQ ID NO: 1143683 - DNA, 15 bp, Homo sapiens
ggaaattcataacat

SEQ ID NO: 1143684 - DNA, 15 bp, Homo sapiens
tggaaattcataaca

SEQ ID NO: 1143685 - DNA, 15 bp, Homo sapiens
ctggaaattcataac

SEQ ID NO: 1143686 - DNA, 15 bp, Homo sapiens
gctggaaattcataa

SEQ ID NO: 1143687 - DNA, 15 bp, Homo sapiens
tgctggaaattcata

SEQ ID NO: 1143688 - DNA, 15 bp, Homo sapiens
atgctggaaattcat

SEQ ID NO: 1143689 - DNA, 15 bp, Homo sapiens
gatgctggaaattca

SEQ ID NO: 1143690 - DNA, 15 bp, Homo sapiens
ggatgctggaaattc

SEQ ID NO: 1143691 - DNA, 15 bp, Homo sapiens
gagtggatgctggaa

SEQ ID NO: 1143692 - DNA, 15 bp, Homo sapiens
agagtggatgctgga

SEQ ID NO: 1143693 - DNA, 15 bp, Homo sapiens
aagagtggatgctgg

SEQ ID NO: 1143694 - DNA, 15 bp, Homo sapiens
aaagagtggatgctg

SEQ ID NO: 1143695 - DNA, 15 bp, Homo sapiens
caaagagtggatgct

SEQ ID NO: 1143696 - DNA, 15 bp, Homo sapiens
ccaaagagtggatgc

SEQ ID NO: 1143697 - DNA, 15 bp, Homo sapiens
accaaagagtggatg

SEQ ID NO: 1143698 - DNA, 15 bp, Homo sapiens
gaccaaagagtggat

SEQ ID NO: 1143699 - DNA, 15 bp, Homo sapiens
cgaccaaagagtgga

SEQ ID NO: 1143700 - DNA, 15 bp, Homo sapiens
acgaccaaagagtgg

SEQ ID NO: 1143701 - DNA, 15 bp, Homo sapiens
aacgaccaaagagtg

SEQ ID NO: 1143702 - DNA, 15 bp, Homo sapiens
aaacgaccaaagagt

SEQ ID NO: 1143703 - DNA, 15 bp, Homo sapiens
caaacgaccaaagag

SEQ ID NO: 1143704 - DNA, 15 bp, Homo sapiens
acaaacgaccaaaga

SEQ ID NO: 1143705 - DNA, 15 bp, Homo sapiens
tacaaacgaccaaag

SEQ ID NO: 1143706 - DNA, 15 bp, Homo sapiens
ttacaaacgaccaaa

SEQ ID NO: 1143707 - DNA, 15 bp, Homo sapiens
tttacaaacgaccaa

SEQ ID NO: 1143708 - DNA, 15 bp, Homo sapiens
ttttacaaacgacca

SEQ ID NO: 1143709 - DNA, 15 bp, Homo sapiens
tttttacaaacgacc

SEQ ID NO: 1143710 - DNA, 15 bp, Homo sapiens
atttttacaaacgac

SEQ ID NO: 1143711 - DNA, 15 bp, Homo sapiens
tatttttacaaacga

SEQ ID NO: 1143712 - DNA, 15 bp, Homo sapiens
ttatttttacaaacg

SEQ ID NO: 1143713 - DNA, 15 bp, Homo sapiens
attatttttacaaac

SEQ ID NO: 1143714 - DNA, 15 bp, Homo sapiens
tattatttttacaaa

SEQ ID NO: 1143715 - DNA, 15 bp, Homo sapiens
atattatttttacaa

SEQ ID NO: 1143716 - DNA, 15 bp, Homo sapiens
aatattatttttaca

SEQ ID NO: 1143717 - DNA, 15 bp, Homo sapiens
gaatattatttttac

SEQ ID NO: 1143718 - DNA, 15 bp, Homo sapiens
agaatattattttta

SEQ ID NO: 1143719 - DNA, 15 bp, Homo sapiens
gagaatattattttt

SEQ ID NO: 1143720 - DNA, 15 bp, Homo sapiens
tgagaatattatttt

SEQ ID NO: 1143721 - DNA, 15 bp, Homo sapiens
atgagaatattattt

SEQ ID NO: 1143722 - DNA, 15 bp, Homo sapiens
tatgagaatattatt

SEQ ID NO: 1143723 - DNA, 15 bp, Homo sapiens
gtatgagaatattat

SEQ ID NO: 1143724 - DNA, 15 bp, Homo sapiens
ggtatgagaatatta

SEQ ID NO: 1143725 - DNA, 15 bp, Homo sapiens
aggtatgagaatatt

SEQ ID NO: 1143726 - DNA, 15 bp, Homo sapiens
gaggtatgagaatat

SEQ ID NO: 1143727 - DNA, 15 bp, Homo sapiens
agaggtatgagaata

SEQ ID NO: 1143728 - DNA, 15 bp, Homo sapiens
aagaggtatgagaat

SEQ ID NO: 1143729 - DNA, 15 bp, Homo sapiens
taagaggtatgagaa

SEQ ID NO: 1143730 - DNA, 15 bp, Homo sapiens
ctaagaggtatgaga

SEQ ID NO: 1143731 - DNA, 15 bp, Homo sapiens
tctaagaggtatgag

SEQ ID NO: 1143732 - DNA, 15 bp, Homo sapiens
ttctaagaggtatga

SEQ ID NO: 1143733 - DNA, 15 bp, Homo sapiens
cttctaagaggtatg

SEQ ID NO: 1143734 - DNA, 15 bp, Homo sapiens
tcttctaagaggtat

SEQ ID NO: 1143735 - DNA, 15 bp, Homo sapiens
gtcttctaagaggta

SEQ ID NO: 1143736 - DNA, 15 bp, Homo sapiens
tgtcttctaagaggt

SEQ ID NO: 1143737 - DNA, 15 bp, Homo sapiens
ttgtcttctaagagg

SEQ ID NO: 1143738 - DNA, 15 bp, Homo sapiens
attgtcttctaagag

SEQ ID NO: 1143739 - DNA, 15 bp, Homo sapiens
cattgtcttctaaga

SEQ ID NO: 1143740 - DNA, 15 bp, Homo sapiens
tcattgtcttctaag

SEQ ID NO: 1143741 - DNA, 15 bp, Homo sapiens
ttcattgtcttctaa

SEQ ID NO: 1143742 - DNA, 15 bp, Homo sapiens
tttcattgtcttcta

SEQ ID NO: 1143743 - DNA, 15 bp, Homo sapiens
atttcattgtcttct

SEQ ID NO: 1143744 - DNA, 15 bp, Homo sapiens
gatttcattgtcttc

SEQ ID NO: 1143745 - DNA, 15 bp, Homo sapiens
agatttcattgtctt

SEQ ID NO: 1143746 - DNA, 15 bp, Homo sapiens
aagatttcattgtct

SEQ ID NO: 1143747 - DNA, 15 bp, Homo sapiens
aaagatttcattgtc

SEQ ID NO: 1143748 - DNA, 15 bp, Homo sapiens
taaagatttcattgt

SEQ ID NO: 1143749 - DNA, 15 bp, Homo sapiens
ttaaagatttcattg

SEQ ID NO: 1143750 - DNA, 15 bp, Homo sapiens
tttaaagatttcatt

SEQ ID NO: 1143751 - DNA, 15 bp, Homo sapiens
ctttaaagatttcat

SEQ ID NO: 1143752 - DNA, 15 bp, Homo sapiens
cctttaaagatttca

SEQ ID NO: 1143753 - DNA, 15 bp, Homo sapiens
tcctttaaagatttc

SEQ ID NO: 1143754 - DNA, 15 bp, Homo sapiens
atcctttaaagattt

SEQ ID NO: 1143755 - DNA, 15 bp, Homo sapiens
tatcctttaaagatt

SEQ ID NO: 1143756 - DNA, 15 bp, Homo sapiens
gtatcctttaaagat

SEQ ID NO: 1143757 - DNA, 15 bp, Homo sapiens
agtatcctttaaaga

SEQ ID NO: 1143758 - DNA, 15 bp, Homo sapiens
gagtatcctttaaag

SEQ ID NO: 1143759 - DNA, 15 bp, Homo sapiens
tgagtatcctttaaa

SEQ ID NO: 1143760 - DNA, 15 bp, Homo sapiens
gtgagtatcctttaa

SEQ ID NO: 1143761 - DNA, 15 bp, Homo sapiens
agtgagtatccttta

SEQ ID NO: 1143762 - DNA, 15 bp, Homo sapiens
gagtgagtatccttt

SEQ ID NO: 1143763 - DNA, 15 bp, Homo sapiens
agagtgagtatcctt

SEQ ID NO: 1143764 - DNA, 15 bp, Homo sapiens
tagagtgagtatcct

SEQ ID NO: 1143765 - DNA, 15 bp, Homo sapiens
ttagagtgagtatcc

SEQ ID NO: 1143766 - DNA, 15 bp, Homo sapiens
tttagagtgagtatc

SEQ ID NO: 1143767 - DNA, 15 bp, Homo sapiens
atttagagtgagtat

SEQ ID NO: 1143768 - DNA, 15 bp, Homo sapiens
gatttagagtgagta

SEQ ID NO: 1143769 - DNA, 15 bp, Homo sapiens
ggatttagagtgagt

SEQ ID NO: 1143770 - DNA, 15 bp, Homo sapiens
tggatttagagtgag

SEQ ID NO: 1143771 - DNA, 15 bp, Homo sapiens
ctggatttagagtga

SEQ ID NO: 1143772 - DNA, 15 bp, Homo sapiens
tctggatttagagtg

SEQ ID NO: 1143773 - DNA, 15 bp, Homo sapiens
gtctggatttagagt

SEQ ID NO: 1143774 - DNA, 15 bp, Homo sapiens
agtctggatttagag

SEQ ID NO: 1143775 - DNA, 15 bp, Homo sapiens
cagtctggatttaga

SEQ ID NO: 1143776 - DNA, 15 bp, Homo sapiens
gcagtctggatttag

SEQ ID NO: 1143777 - DNA, 15 bp, Homo sapiens
agcagtctggattta

SEQ ID NO: 1143778 - DNA, 15 bp, Homo sapiens
aagcagtctggattt

SEQ ID NO: 1143779 - DNA, 15 bp, Homo sapiens
taagcagtctggatt

SEQ ID NO: 1143780 - DNA, 15 bp, Homo sapiens
ataagcagtctggat

SEQ ID NO: 1143781 - DNA, 15 bp, Homo sapiens
aataagcagtctgga

SEQ ID NO: 1143782 - DNA, 15 bp, Homo sapiens
caataagcagtctgg

SEQ ID NO: 1143783 - DNA, 15 bp, Homo sapiens
tcaataagcagtctg

SEQ ID NO: 1143784 - DNA, 15 bp, Homo sapiens
atcaataagcagtct

SEQ ID NO: 1143785 - DNA, 15 bp, Homo sapiens
catcaataagcagtc

SEQ ID NO: 1143786 - DNA, 15 bp, Homo sapiens
acatcaataagcagt

SEQ ID NO: 1143787 - DNA, 15 bp, Homo sapiens
cacatcaataagcag

SEQ ID NO: 1143788 - DNA, 15 bp, Homo sapiens
acacatcaataagca

SEQ ID NO: 1143789 - DNA, 15 bp, Homo sapiens
aacacatcaataagc

SEQ ID NO: 1143790 - DNA, 15 bp, Homo sapiens
caacacatcaataag

SEQ ID NO: 1143791 - DNA, 15 bp, Homo sapiens
tcaacacatcaataa

SEQ ID NO: 1143792 - DNA, 15 bp, Homo sapiens
ctcaacacatcaata

SEQ ID NO: 1143793 - DNA, 15 bp, Homo sapiens
tctcaacacatcaat

SEQ ID NO: 1143794 - DNA, 15 bp, Homo sapiens
ctctcaacacatcaa

SEQ ID NO: 1143795 - DNA, 15 bp, Homo sapiens
actctcaacacatca

SEQ ID NO: 1143796 - DNA, 15 bp, Homo sapiens
aactctcaacacatc

SEQ ID NO: 1143797 - DNA, 15 bp, Homo sapiens
caactctcaacacat

SEQ ID NO: 1143798 - DNA, 15 bp, Homo sapiens
acaactctcaacaca

SEQ ID NO: 1143799 - DNA, 15 bp, Homo sapiens
tacaactctcaacac

SEQ ID NO: 1143800 - DNA, 15 bp, Homo sapiens
ctacaactctcaaca

SEQ ID NO: 1143801 - DNA, 15 bp, Homo sapiens
tctacaactctcaac

SEQ ID NO: 1143802 - DNA, 15 bp, Homo sapiens
ctctacaactctcaa

SEQ ID NO: 1143803 - DNA, 15 bp, Homo sapiens
actctacaactctca

SEQ ID NO: 1143804 - DNA, 15 bp, Homo sapiens
aactctacaactctc

SEQ ID NO: 1143805 - DNA, 15 bp, Homo sapiens
aaactctacaactct

SEQ ID NO: 1143806 - DNA, 15 bp, Homo sapiens
taaactctacaactc

SEQ ID NO: 1143807 - DNA, 15 bp, Homo sapiens
ttaaactctacaact

SEQ ID NO: 1143808 - DNA, 15 bp, Homo sapiens
gttaaactctacaac

SEQ ID NO: 1143809 - DNA, 15 bp, Homo sapiens
tgttaaactctacaa

SEQ ID NO: 1143810 - DNA, 15 bp, Homo sapiens
ttgttaaactctaca

SEQ ID NO: 1143811 - DNA, 15 bp, Homo sapiens
tttgttaaactctac

SEQ ID NO: 1143812 - DNA, 15 bp, Homo sapiens
ttttgttaaactcta

SEQ ID NO: 1143813 - DNA, 15 bp, Homo sapiens
tttttgttaaactct

SEQ ID NO: 1143814 - DNA, 15 bp, Homo sapiens
atttttgttaaactc

SEQ ID NO: 1143815 - DNA, 15 bp, Homo sapiens
gatttttgttaaact

SEQ ID NO: 1143816 - DNA, 15 bp, Homo sapiens
tgatttttgttaaac

SEQ ID NO: 1143817 - DNA, 15 bp, Homo sapiens
atgatttttgttaaa

SEQ ID NO: 1143818 - DNA, 15 bp, Homo sapiens
catgatttttgttaa

SEQ ID NO: 1143819 - DNA, 15 bp, Homo sapiens
ccatgatttttgtta

SEQ ID NO: 1143820 - DNA, 15 bp, Homo sapiens
cccatgatttttgtt

SEQ ID NO: 1143821 - DNA, 15 bp, Homo sapiens
ccccatgatttttgt

SEQ ID NO: 1143822 - DNA, 15 bp, Homo sapiens
cccccatgatttttg

SEQ ID NO: 1143823 - DNA, 15 bp, Homo sapiens
acccccatgattttt

SEQ ID NO: 1143824 - DNA, 15 bp, Homo sapiens
aacccccatgatttt

SEQ ID NO: 1143825 - DNA, 15 bp, Homo sapiens
caacccccatgattt

SEQ ID NO: 1143826 - DNA, 15 bp, Homo sapiens
ccaacccccatgatt

SEQ ID NO: 1143827 - DNA, 15 bp, Homo sapiens
cccaacccccatgat

SEQ ID NO: 1143828 - DNA, 15 bp, Homo sapiens
tcccaacccccatga

SEQ ID NO: 1143829 - DNA, 15 bp, Homo sapiens
ttcccaacccccatg

SEQ ID NO: 1143830 - DNA, 15 bp, Homo sapiens
gttcccaacccccat

SEQ ID NO: 1143831 - DNA, 15 bp, Homo sapiens
tgttcccaaccccca

SEQ ID NO: 1143832 - DNA, 15 bp, Homo sapiens
ctgttcccaaccccc

SEQ ID NO: 1143833 - DNA, 15 bp, Homo sapiens
tctgttcccaacccc

SEQ ID NO: 1143834 - DNA, 15 bp, Homo sapiens
atctgttcccaaccc

SEQ ID NO: 1143835 - DNA, 15 bp, Homo sapiens
tatctgttcccaacc

SEQ ID NO: 1143836 - DNA, 15 bp, Homo sapiens
ctatctgttcccaac

SEQ ID NO: 1143837 - DNA, 15 bp, Homo sapiens
tctatctgttcccaa

SEQ ID NO: 1143838 - DNA, 15 bp, Homo sapiens
ctctatctgttccca

SEQ ID NO: 1143839 - DNA, 15 bp, Homo sapiens
actctatctgttccc

SEQ ID NO: 1143840 - DNA, 15 bp, Homo sapiens
cactctatctgttcc

SEQ ID NO: 1143841 - DNA, 15 bp, Homo sapiens
tcactctatctgttc

SEQ ID NO: 1143842 - DNA, 15 bp, Homo sapiens
ctcactctatctgtt

SEQ ID NO: 1143843 - DNA, 15 bp, Homo sapiens
cctcactctatctgt

SEQ ID NO: 1143844 - DNA, 15 bp, Homo sapiens
acctcactctatctg

SEQ ID NO: 1143845 - DNA, 15 bp, Homo sapiens
tacctcactctatct

SEQ ID NO: 1143846 - DNA, 15 bp, Homo sapiens
gtacctcactctatc

SEQ ID NO: 1143847 - DNA, 15 bp, Homo sapiens
agtacctcactctat

SEQ ID NO: 1143848 - DNA, 15 bp, Homo sapiens
aagtacctcactcta

SEQ ID NO: 1143849 - DNA, 15 bp, Homo sapiens
taagtacctcactct

SEQ ID NO: 1143850 - DNA, 15 bp, Homo sapiens
ctaagtacctcactc

SEQ ID NO: 1143851 - DNA, 15 bp, Homo sapiens
gctaagtacctcact

SEQ ID NO: 1143852 - DNA, 15 bp, Homo sapiens
agctaagtacctcac

SEQ ID NO: 1143853 - DNA, 15 bp, Homo sapiens
cagctaagtacctca

SEQ ID NO: 1143854 - DNA, 15 bp, Homo sapiens
tcagctaagtacctc

SEQ ID NO: 1143855 - DNA, 15 bp, Homo sapiens
ctcagctaagtacct

SEQ ID NO: 1143856 - DNA, 15 bp, Homo sapiens
cctcagctaagtacc

SEQ ID NO: 1143857 - DNA, 15 bp, Homo sapiens
acctcagctaagtac

SEQ ID NO: 1143858 - DNA, 15 bp, Homo sapiens
aacctcagctaagta

SEQ ID NO: 1143859 - DNA, 15 bp, Homo sapiens
gaacctcagctaagt

SEQ ID NO: 1143860 - DNA, 15 bp, Homo sapiens
ggaacctcagctaag

SEQ ID NO: 1143861 - DNA, 15 bp, Homo sapiens
tggaacctcagctaa

SEQ ID NO: 1143862 - DNA, 15 bp, Homo sapiens
ctggaacctcagcta

SEQ ID NO: 1143863 - DNA, 15 bp, Homo sapiens
gctggaacctcagct

SEQ ID NO: 1143864 - DNA, 15 bp, Homo sapiens
agctggaacctcagc

SEQ ID NO: 1143865 - DNA, 15 bp, Homo sapiens
aagctggaacctcag

SEQ ID NO: 1143866 - DNA, 15 bp, Homo sapiens
taagctggaacctca

SEQ ID NO: 1143867 - DNA, 15 bp, Homo sapiens
ataagctggaacctc

SEQ ID NO: 1143868 - DNA, 15 bp, Homo sapiens
gataagctggaacct

SEQ ID NO: 1143869 - DNA, 15 bp, Homo sapiens
agataagctggaacc

SEQ ID NO: 1143870 - DNA, 15 bp, Homo sapiens
gagataagctggaac

SEQ ID NO: 1143871 - DNA, 15 bp, Homo sapiens
agagataagctggaa

SEQ ID NO: 1143872 - DNA, 15 bp, Homo sapiens
aagagataagctgga

SEQ ID NO: 1143873 - DNA, 15 bp, Homo sapiens
taagagataagctgg

SEQ ID NO: 1143874 - DNA, 15 bp, Homo sapiens
ctaagagataagctg

SEQ ID NO: 1143875 - DNA, 15 bp, Homo sapiens
tctaagagataagct

SEQ ID NO: 1143876 - DNA, 15 bp, Homo sapiens
ctctaagagataagc

SEQ ID NO: 1143877 - DNA, 15 bp, Homo sapiens
tctctaagagataag

SEQ ID NO: 1143878 - DNA, 15 bp, Homo sapiens
atctctaagagataa

SEQ ID NO: 1143879 - DNA, 15 bp, Homo sapiens
catctctaagagata

SEQ ID NO: 1143880 - DNA, 15 bp, Homo sapiens
acatctctaagagat

SEQ ID NO: 1143881 - DNA, 15 bp, Homo sapiens
aacatctctaagaga

SEQ ID NO: 1143882 - DNA, 15 bp, Homo sapiens
aaacatctctaagag

SEQ ID NO: 1143883 - DNA, 15 bp, Homo sapiens
taaacatctctaaga

SEQ ID NO: 1143884 - DNA, 15 bp, Homo sapiens
gtaaacatctctaag

SEQ ID NO: 1143885 - DNA, 15 bp, Homo sapiens
agtaaacatctctaa

SEQ ID NO: 1143886 - DNA, 15 bp, Homo sapiens
aagtaaacatctcta

SEQ ID NO: 1143887 - DNA, 15 bp, Homo sapiens
taagtaaacatctct

SEQ ID NO: 1143888 - DNA, 15 bp, Homo sapiens
ctaagtaaacatctc

SEQ ID NO: 1143889 - DNA, 15 bp, Homo sapiens
actaagtaaacatct

SEQ ID NO: 1143890 - DNA, 15 bp, Homo sapiens
gactaagtaaacatc

SEQ ID NO: 1143891 - DNA, 15 bp, Homo sapiens
agactaagtaaacat

SEQ ID NO: 1143892 - DNA, 15 bp, Homo sapiens
tagactaagtaaaca

SEQ ID NO: 1143893 - DNA, 15 bp, Homo sapiens
atagactaagtaaac

SEQ ID NO: 1143894 - DNA, 15 bp, Homo sapiens
aatagactaagtaaa

SEQ ID NO: 1143895 - DNA, 15 bp, Homo sapiens
gaatagactaagtaa

SEQ ID NO: 1143896 - DNA, 15 bp, Homo sapiens
agaatagactaagta

SEQ ID NO: 1143897 - DNA, 15 bp, Homo sapiens
aagaatagactaagt

SEQ ID NO: 1143898 - DNA, 15 bp, Homo sapiens
aaagaatagactaag

SEQ ID NO: 1143899 - DNA, 15 bp, Homo sapiens
taaagaatagactaa

SEQ ID NO: 1143900 - DNA, 15 bp, Homo sapiens
ctaaagaatagacta

SEQ ID NO: 1143901 - DNA, 15 bp, Homo sapiens
tctaaagaatagact

SEQ ID NO: 1143902 - DNA, 15 bp, Homo sapiens
ttctaaagaatagac

SEQ ID NO: 1143903 - DNA, 15 bp, Homo sapiens
attctaaagaataga

SEQ ID NO: 1143904 - DNA, 15 bp, Homo sapiens
aattctaaagaatag

SEQ ID NO: 1143905 - DNA, 15 bp, Homo sapiens
caattctaaagaata

SEQ ID NO: 1143906 - DNA, 15 bp, Homo sapiens
acaattctaaagaat

SEQ ID NO: 1143907 - DNA, 15 bp, Homo sapiens
aacaattctaaagaa

SEQ ID NO: 1143908 - DNA, 15 bp, Homo sapiens
caacaattctaaaga

SEQ ID NO: 1143909 - DNA, 15 bp, Homo sapiens
ccaacaattctaaag

SEQ ID NO: 1143910 - DNA, 15 bp, Homo sapiens
tccaacaattctaaa

SEQ ID NO: 1143911 - DNA, 15 bp, Homo sapiens
atccaacaattctaa

SEQ ID NO: 1143912 - DNA, 15 bp, Homo sapiens
catccaacaattcta

SEQ ID NO: 1143913 - DNA, 15 bp, Homo sapiens
gcatccaacaattct

SEQ ID NO: 1143914 - DNA, 15 bp, Homo sapiens
agcatccaacaattc

SEQ ID NO: 1143915 - DNA, 15 bp, Homo sapiens
aagcatccaacaatt

SEQ ID NO: 1143916 - DNA, 15 bp, Homo sapiens
caagcatccaacaat

SEQ ID NO: 1143917 - DNA, 15 bp, Homo sapiens
ccaagcatccaacaa

SEQ ID NO: 1143918 - DNA, 15 bp, Homo sapiens
tccaagcatccaaca

SEQ ID NO: 1143919 - DNA, 15 bp, Homo sapiens
gtccaagcatccaac

SEQ ID NO: 1143920 - DNA, 15 bp, Homo sapiens
tgtccaagcatccaa

SEQ ID NO: 1143921 - DNA, 15 bp, Homo sapiens
ttgtccaagcatcca

SEQ ID NO: 1143922 - DNA, 15 bp, Homo sapiens
gttgtccaagcatcc

SEQ ID NO: 1143923 - DNA, 15 bp, Homo sapiens
ggttgtccaagcatc

SEQ ID NO: 1143924 - DNA, 15 bp, Homo sapiens
tggttgtccaagcat

SEQ ID NO: 1143925 - DNA, 15 bp, Homo sapiens
ctggttgtccaagca

SEQ ID NO: 1143926 - DNA, 15 bp, Homo sapiens
tctggttgtccaagc

SEQ ID NO: 1143927 - DNA, 15 bp, Homo sapiens
gtctggttgtccaag

SEQ ID NO: 1143928 - DNA, 15 bp, Homo sapiens
agtctggttgtccaa

SEQ ID NO: 1143929 - DNA, 15 bp, Homo sapiens
aagtctggttgtcca

SEQ ID NO: 1143930 - DNA, 15 bp, Homo sapiens
taagtctggttgtcc

SEQ ID NO: 1143931 - DNA, 15 bp, Homo sapiens
ttaagtctggttgtc

SEQ ID NO: 1143932 - DNA, 15 bp, Homo sapiens
attaagtctggttgt

SEQ ID NO: 1143933 - DNA, 15 bp, Homo sapiens
tattaagtctggttg

SEQ ID NO: 1143934 - DNA, 15 bp, Homo sapiens
ctattaagtctggtt

SEQ ID NO: 1143935 - DNA, 15 bp, Homo sapiens
cctattaagtctggt

SEQ ID NO: 1143936 - DNA, 15 bp, Homo sapiens
tcctattaagtctgg

SEQ ID NO: 1143937 - DNA, 15 bp, Homo sapiens
ctcctattaagtctg

SEQ ID NO: 1143938 - DNA, 15 bp, Homo sapiens
gctcctattaagtct

SEQ ID NO: 1143939 - DNA, 15 bp, Homo sapiens
ggctcctattaagtc

SEQ ID NO: 1143940 - DNA, 15 bp, Homo sapiens
tggctcctattaagt

SEQ ID NO: 1143941 - DNA, 15 bp, Homo sapiens
ttggctcctattaag

SEQ ID NO: 1143942 - DNA, 15 bp, Homo sapiens
tttggctcctattaa

SEQ ID NO: 1143943 - DNA, 15 bp, Homo sapiens
atttggctcctatta

SEQ ID NO: 1143944 - DNA, 15 bp, Homo sapiens
catttggctcctatt

SEQ ID NO: 1143945 - DNA, 15 bp, Homo sapiens
tcatttggctcctat

SEQ ID NO: 1143946 - DNA, 15 bp, Homo sapiens
ctcatttggctccta

SEQ ID NO: 1143947 - DNA, 15 bp, Homo sapiens
tctcatttggctcct

SEQ ID NO: 1143948 - DNA, 15 bp, Homo sapiens
ttctcatttggctcc

SEQ ID NO: 1143949 - DNA, 15 bp, Homo sapiens
tttctcatttggctc

SEQ ID NO: 1143950 - DNA, 15 bp, Homo sapiens
ctttctcatttggct

SEQ ID NO: 1143951 - DNA, 15 bp, Homo sapiens
cctttctcatttggc

SEQ ID NO: 1143952 - DNA, 15 bp, Homo sapiens
gcctttctcatttgg

SEQ ID NO: 1143953 - DNA, 15 bp, Homo sapiens
tgcctttctcatttg

SEQ ID NO: 1143954 - DNA, 15 bp, Homo sapiens
atgcctttctcattt

SEQ ID NO: 1143955 - DNA, 15 bp, Homo sapiens
catgcctttctcatt

SEQ ID NO: 1143956 - DNA, 15 bp, Homo sapiens
acatgcctttctcat

SEQ ID NO: 1143957 - DNA, 15 bp, Homo sapiens
aacatgcctttctca

SEQ ID NO: 1143958 - DNA, 15 bp, Homo sapiens
taacatgcctttctc

SEQ ID NO: 1143959 - DNA, 15 bp, Homo sapiens
ctaacatgcctttct

SEQ ID NO: 1143960 - DNA, 15 bp, Homo sapiens
tctaacatgcctttc

SEQ ID NO: 1143961 - DNA, 15 bp, Homo sapiens
ttctaacatgccttt

SEQ ID NO: 1143962 - DNA, 15 bp, Homo sapiens
cttctaacatgcctt

SEQ ID NO: 1143963 - DNA, 15 bp, Homo sapiens
tcttctaacatgcct

SEQ ID NO: 1143964 - DNA, 15 bp, Homo sapiens
ttcttctaacatgcc

SEQ ID NO: 1143965 - DNA, 15 bp, Homo sapiens
tttcttctaacatgc

SEQ ID NO: 1143966 - DNA, 15 bp, Homo sapiens
ttttcttctaacatg

SEQ ID NO: 1143967 - DNA, 15 bp, Homo sapiens
tttttcttctaacat

SEQ ID NO: 1143968 - DNA, 15 bp, Homo sapiens
ttttttcttctaaca

SEQ ID NO: 1143969 - DNA, 15 bp, Homo sapiens
tttttttcttctaac

SEQ ID NO: 1143970 - DNA, 15 bp, Homo sapiens
ctttttttcttctaa

SEQ ID NO: 1143971 - DNA, 15 bp, Homo sapiens
cctttttttcttcta

SEQ ID NO: 1143972 - DNA, 15 bp, Homo sapiens
acctttttttcttct

SEQ ID NO: 1143973 - DNA, 15 bp, Homo sapiens
aacctttttttcttc

SEQ ID NO: 1143974 - DNA, 15 bp, Homo sapiens
gaacctttttttctt

SEQ ID NO: 1143975 - DNA, 15 bp, Homo sapiens
tgaacctttttttct

SEQ ID NO: 1143976 - DNA, 15 bp, Homo sapiens
atgaacctttttttc

SEQ ID NO: 1143977 - DNA, 15 bp, Homo sapiens
tatgaaccttttttt

SEQ ID NO: 1143978 - DNA, 15 bp, Homo sapiens
atatgaacctttttt

SEQ ID NO: 1143979 - DNA, 15 bp, Homo sapiens
aatatgaaccttttt

SEQ ID NO: 1143980 - DNA, 15 bp, Homo sapiens
taatatgaacctttt

SEQ ID NO: 1143981 - DNA, 15 bp, Homo sapiens
gtaatatgaaccttt

SEQ ID NO: 1143982 - DNA, 15 bp, Homo sapiens
tgtaatatgaacctt

SEQ ID NO: 1143983 - DNA, 15 bp, Homo sapiens
ttgtaatatgaacct

SEQ ID NO: 1143984 - DNA, 15 bp, Homo sapiens
cttgtaatatgaacc

SEQ ID NO: 1143985 - DNA, 15 bp, Homo sapiens
tcttgtaatatgaac

SEQ ID NO: 1143986 - DNA, 15 bp, Homo sapiens
cctcttgtaatatga

SEQ ID NO: 1143987 - DNA, 15 bp, Homo sapiens
ccctcttgtaatatg

SEQ ID NO: 1143988 - DNA, 15 bp, Homo sapiens
accctcttgtaatat

SEQ ID NO: 1143989 - DNA, 15 bp, Homo sapiens
gaccctcttgtaata

SEQ ID NO: 1143990 - DNA, 15 bp, Homo sapiens
agaccctcttgtaat

SEQ ID NO: 1143991 - DNA, 15 bp, Homo sapiens
cagaccctcttgtaa

SEQ ID NO: 1143992 - DNA, 15 bp, Homo sapiens
tcagaccctcttgta

SEQ ID NO: 1143993 - DNA, 15 bp, Homo sapiens
gtcagaccctcttgt

SEQ ID NO: 1143994 - DNA, 15 bp, Homo sapiens
tgtcagaccctcttg

SEQ ID NO: 1143995 - DNA, 15 bp, Homo sapiens
ttgtcagaccctctt

SEQ ID NO: 1143996 - DNA, 15 bp, Homo sapiens
attgtcagaccctct

SEQ ID NO: 1143997 - DNA, 15 bp, Homo sapiens
cattgtcagaccctc

SEQ ID NO: 1143998 - DNA, 15 bp, Homo sapiens
tcattgtcagaccct

SEQ ID NO: 1143999 - DNA, 15 bp, Homo sapiens
gtcattgtcagaccc

SEQ ID NO: 1144000 - DNA, 15 bp, Homo sapiens
agtcattgtcagacc

SEQ ID NO: 1144001 - DNA, 15 bp, Homo sapiens
aagtcattgtcagac

SEQ ID NO: 1144002 - DNA, 15 bp, Homo sapiens
taagtcattgtcaga

SEQ ID NO: 1144003 - DNA, 15 bp, Homo sapiens
ataagtcattgtcag

SEQ ID NO: 1144004 - DNA, 15 bp, Homo sapiens
aataagtcattgtca

SEQ ID NO: 1144005 - DNA, 15 bp, Homo sapiens
caataagtcattgtc

SEQ ID NO: 1144006 - DNA, 15 bp, Homo sapiens
acaataagtcattgt

SEQ ID NO: 1144007 - DNA, 15 bp, Homo sapiens
cacaataagtcattg

SEQ ID NO: 1144008 - DNA, 15 bp, Homo sapiens
tcacaataagtcatt

SEQ ID NO: 1144009 - DNA, 15 bp, Homo sapiens
ctcacaataagtcat

SEQ ID NO: 1144010 - DNA, 15 bp, Homo sapiens
gctcacaataagtca

SEQ ID NO: 1144011 - DNA, 15 bp, Homo sapiens
tgctcacaataagtc

SEQ ID NO: 1144012 - DNA, 15 bp, Homo sapiens
ttgctcacaataagt

SEQ ID NO: 1144013 - DNA, 15 bp, Homo sapiens
tttgctcacaataag

SEQ ID NO: 1144014 - DNA, 15 bp, Homo sapiens
ctttgctcacaataa

SEQ ID NO: 1144015 - DNA, 15 bp, Homo sapiens
gctttgctcacaata

SEQ ID NO: 1144016 - DNA, 15 bp, Homo sapiens
agctttgctcacaat

SEQ ID NO: 1144017 - DNA, 15 bp, Homo sapiens
gagctttgctcacaa

SEQ ID NO: 1144018 - DNA, 15 bp, Homo sapiens
cgagctttgctcaca

SEQ ID NO: 1144019 - DNA, 15 bp, Homo sapiens
acgagctttgctcac

SEQ ID NO: 1144020 - DNA, 15 bp, Homo sapiens
gacgagctttgctca

SEQ ID NO: 1144021 - DNA, 15 bp, Homo sapiens
ggacgagctttgctc

SEQ ID NO: 1144022 - DNA, 15 bp, Homo sapiens
aggacgagctttgct

SEQ ID NO: 1144023 - DNA, 15 bp, Homo sapiens
aaggacgagctttgc

SEQ ID NO: 1144024 - DNA, 15 bp, Homo sapiens
caaggacgagctttg

SEQ ID NO: 1144025 - DNA, 15 bp, Homo sapiens
acaaggacgagcttt

SEQ ID NO: 1144026 - DNA, 15 bp, Homo sapiens
gacaaggacgagctt

SEQ ID NO: 1144027 - DNA, 15 bp, Homo sapiens
tgacaaggacgagct

SEQ ID NO: 1144028 - DNA, 15 bp, Homo sapiens
ttgacaaggacgagc

SEQ ID NO: 1144029 - DNA, 15 bp, Homo sapiens
gttgacaaggacgag

SEQ ID NO: 1144030 - DNA, 15 bp, Homo sapiens
tgttgacaaggacga

SEQ ID NO: 1144031 - DNA, 15 bp, Homo sapiens
ctgttgacaaggacg

SEQ ID NO: 1144032 - DNA, 15 bp, Homo sapiens
tctgttgacaaggac

SEQ ID NO: 1144033 - DNA, 15 bp, Homo sapiens
ttctgttgacaagga

SEQ ID NO: 1144034 - DNA, 15 bp, Homo sapiens
attctgttgacaagg

SEQ ID NO: 1144035 - DNA, 15 bp, Homo sapiens
tattctgttgacaag

SEQ ID NO: 1144036 - DNA, 15 bp, Homo sapiens
ttattctgttgacaa

SEQ ID NO: 1144037 - DNA, 15 bp, Homo sapiens
tttattctgttgaca

SEQ ID NO: 1144038 - DNA, 15 bp, Homo sapiens
ctttattctgttgac

SEQ ID NO: 1144039 - DNA, 15 bp, Homo sapiens
gctttattctgttga

SEQ ID NO: 1144040 - DNA, 15 bp, Homo sapiens
ggctttattctgttg

SEQ ID NO: 1144041 - DNA, 15 bp, Homo sapiens
tggctttattctgtt

SEQ ID NO: 1144042 - DNA, 15 bp, Homo sapiens
gtggctttattctgt

SEQ ID NO: 1144043 - DNA, 15 bp, Homo sapiens
agtggctttattctg

SEQ ID NO: 1144044 - DNA, 15 bp, Homo sapiens
gagtggctttattct

SEQ ID NO: 1144045 - DNA, 15 bp, Homo sapiens
ggagtggctttattc

SEQ ID NO: 1144046 - DNA, 15 bp, Homo sapiens
tggagtggctttatt

SEQ ID NO: 1144047 - DNA, 15 bp, Homo sapiens
atggagtggctttat

SEQ ID NO: 1144048 - DNA, 15 bp, Homo sapiens
catggagtggcttta

SEQ ID NO: 1144049 - DNA, 15 bp, Homo sapiens
tcatggagtggcttt

SEQ ID NO: 1144050 - DNA, 15 bp, Homo sapiens
gtcatggagtggctt

SEQ ID NO: 1144051 - DNA, 15 bp, Homo sapiens
tgtcatggagtggct

SEQ ID NO: 1144052 - DNA, 15 bp, Homo sapiens
ctgtcatggagtggc

SEQ ID NO: 1144053 - DNA, 15 bp, Homo sapiens
cctgtcatggagtgg

SEQ ID NO: 1144054 - DNA, 15 bp, Homo sapiens
ccctgtcatggagtg

SEQ ID NO: 1144055 - DNA, 15 bp, Homo sapiens
accctgtcatggagt

SEQ ID NO: 1144056 - DNA, 15 bp, Homo sapiens
aaccctgtcatggag

SEQ ID NO: 1144057 - DNA, 15 bp, Homo sapiens
caaccctgtcatgga

SEQ ID NO: 1144058 - DNA, 15 bp, Homo sapiens
acaaccctgtcatgg

SEQ ID NO: 1144059 - DNA, 15 bp, Homo sapiens
aacaaccctgtcatg

SEQ ID NO: 1144060 - DNA, 15 bp, Homo sapiens
gaacaaccctgtcat

SEQ ID NO: 1144061 - DNA, 15 bp, Homo sapiens
ggaacaaccctgtca

SEQ ID NO: 1144062 - DNA, 15 bp, Homo sapiens
gggaacaaccctgtc

SEQ ID NO: 1144063 - DNA, 15 bp, Homo sapiens
agggaacaaccctgt

SEQ ID NO: 1144064 - DNA, 15 bp, Homo sapiens
gagggaacaaccctg

SEQ ID NO: 1144065 - DNA, 15 bp, Homo sapiens
tgagggaacaaccct

SEQ ID NO: 1144066 - DNA, 15 bp, Homo sapiens
gtgagggaacaaccc

SEQ ID NO: 1144067 - DNA, 15 bp, Homo sapiens
tgtgagggaacaacc

SEQ ID NO: 1144068 - DNA, 15 bp, Homo sapiens
ttgtgagggaacaac

SEQ ID NO: 1144069 - DNA, 15 bp, Homo sapiens
attgtgagggaacaa

SEQ ID NO: 1144070 - DNA, 15 bp, Homo sapiens
cattgtgagggaaca

SEQ ID NO: 1144071 - DNA, 15 bp, Homo sapiens
tcattgtgagggaac

SEQ ID NO: 1144072 - DNA, 15 bp, Homo sapiens
ctcattgtgagggaa

SEQ ID NO: 1144073 - DNA, 15 bp, Homo sapiens
actcattgtgaggga

SEQ ID NO: 1144074 - DNA, 15 bp, Homo sapiens
gactcattgtgaggg

SEQ ID NO: 1144075 - DNA, 15 bp, Homo sapiens
tgactcattgtgagg

SEQ ID NO: 1144076 - DNA, 15 bp, Homo sapiens
ctgactcattgtgag

SEQ ID NO: 1144077 - DNA, 15 bp, Homo sapiens
actgactcattgtga

SEQ ID NO: 1144078 - DNA, 15 bp, Homo sapiens
aactgactcattgtg

SEQ ID NO: 1144079 - DNA, 15 bp, Homo sapiens
caactgactcattgt

SEQ ID NO: 1144080 - DNA, 15 bp, Homo sapiens
acaactgactcattg

SEQ ID NO: 1144081 - DNA, 15 bp, Homo sapiens
cacaactgactcatt

SEQ ID NO: 1144082 - DNA, 15 bp, Homo sapiens
gcacaactgactcat

SEQ ID NO: 1144083 - DNA, 15 bp, Homo sapiens
tgcacaactgactca

SEQ ID NO: 1144084 - DNA, 15 bp, Homo sapiens
ctgcacaactgactc

SEQ ID NO: 1144085 - DNA, 15 bp, Homo sapiens
tctgcacaactgact

SEQ ID NO: 1144086 - DNA, 15 bp, Homo sapiens
ttctgcacaactgac

SEQ ID NO: 1144087 - DNA, 15 bp, Homo sapiens
tttctgcacaactga

SEQ ID NO: 1144088 - DNA, 15 bp, Homo sapiens
ctttctgcacaactg

SEQ ID NO: 1144089 - DNA, 15 bp, Homo sapiens
actttctgcacaact

SEQ ID NO: 1144090 - DNA, 15 bp, Homo sapiens
tactttctgcacaac

SEQ ID NO: 1144091 - DNA, 15 bp, Homo sapiens
atactttctgcacaa

SEQ ID NO: 1144092 - DNA, 15 bp, Homo sapiens
catactttctgcaca

SEQ ID NO: 1144093 - DNA, 15 bp, Homo sapiens
gcatactttctgcac

SEQ ID NO: 1144094 - DNA, 15 bp, Homo sapiens
tgcatactttctgca

SEQ ID NO: 1144095 - DNA, 15 bp, Homo sapiens
gtgcatactttctgc

SEQ ID NO: 1144096 - DNA, 15 bp, Homo sapiens
tgtgcatactttctg

SEQ ID NO: 1144097 - DNA, 15 bp, Homo sapiens
gtgtgcatactttct

SEQ ID NO: 1144098 - DNA, 15 bp, Homo sapiens
tgtgtgcatactttc

SEQ ID NO: 1144099 - DNA, 15 bp, Homo sapiens
ttgtgtgcatacttt

SEQ ID NO: 1144100 - DNA, 15 bp, Homo sapiens
gttgtgtgcatactt

SEQ ID NO: 1144101 - DNA, 15 bp, Homo sapiens
tgttgtgtgcatact

SEQ ID NO: 1144102 - DNA, 15 bp, Homo sapiens
atgttgtgtgcatac

SEQ ID NO: 1144103 - DNA, 15 bp, Homo sapiens
aatgttgtgtgcata

SEQ ID NO: 1144104 - DNA, 15 bp, Homo sapiens
gaatgttgtgtgcat

SEQ ID NO: 1144105 - DNA, 15 bp, Homo sapiens
agaatgttgtgtgca

SEQ ID NO: 1144106 - DNA, 15 bp, Homo sapiens
cagaatgttgtgtgc

SEQ ID NO: 1144107 - DNA, 15 bp, Homo sapiens
gcagaatgttgtgtg

SEQ ID NO: 1144108 - DNA, 15 bp, Homo sapiens
tgcagaatgttgtgt

SEQ ID NO: 1144109 - DNA, 15 bp, Homo sapiens
atgcagaatgttgtg

SEQ ID NO: 1144110 - DNA, 15 bp, Homo sapiens
gatgcagaatgttgt

SEQ ID NO: 1144111 - DNA, 15 bp, Homo sapiens
ggatgcagaatgttg

SEQ ID NO: 1144112 - DNA, 15 bp, Homo sapiens
tggatgcagaatgtt

SEQ ID NO: 1144113 - DNA, 15 bp, Homo sapiens
ttggatgcagaatgt

SEQ ID NO: 1144114 - DNA, 15 bp, Homo sapiens
tttggatgcagaatg

SEQ ID NO: 1144115 - DNA, 15 bp, Homo sapiens
ttttggatgcagaat

SEQ ID NO: 1144116 - DNA, 15 bp, Homo sapiens
gttttggatgcagaa

SEQ ID NO: 1144117 - DNA, 15 bp, Homo sapiens
tgttttggatgcaga

SEQ ID NO: 1144118 - DNA, 15 bp, Homo sapiens
atgttttggatgcag

SEQ ID NO: 1144119 - DNA, 15 bp, Homo sapiens
aatgttttggatgca

SEQ ID NO: 1144120 - DNA, 15 bp, Homo sapiens
taatgttttggatgc

SEQ ID NO: 1144121 - DNA, 15 bp, Homo sapiens
ttaatgttttggatg

SEQ ID NO: 1144122 - DNA, 15 bp, Homo sapiens
cttaatgttttggat

SEQ ID NO: 1144123 - DNA, 15 bp, Homo sapiens
ccttaatgttttgga

SEQ ID NO: 1144124 - DNA, 15 bp, Homo sapiens
tccttaatgttttgg

SEQ ID NO: 1144125 - DNA, 15 bp, Homo sapiens
gtccttaatgttttg

SEQ ID NO: 1144126 - DNA, 15 bp, Homo sapiens
cgtccttaatgtttt

SEQ ID NO: 1144127 - DNA, 15 bp, Homo sapiens
ccgtccttaatgttt

SEQ ID NO: 1144128 - DNA, 15 bp, Homo sapiens
tccgtccttaatgtt

SEQ ID NO: 1144129 - DNA, 15 bp, Homo sapiens
ctccgtccttaatgt

SEQ ID NO: 1144130 - DNA, 15 bp, Homo sapiens
actccgtccttaatg

SEQ ID NO: 1144131 - DNA, 15 bp, Homo sapiens
aactccgtccttaat

SEQ ID NO: 1144132 - DNA, 15 bp, Homo sapiens
caactccgtccttaa

SEQ ID NO: 1144133 - DNA, 15 bp, Homo sapiens
ccaactccgtcctta

SEQ ID NO: 1144134 - DNA, 15 bp, Homo sapiens
tccaactccgtcctt

SEQ ID NO: 1144135 - DNA, 15 bp, Homo sapiens
ctccaactccgtcct

SEQ ID NO: 1144136 - DNA, 15 bp, Homo sapiens
tctccaactccgtcc

SEQ ID NO: 1144137 - DNA, 15 bp, Homo sapiens
ttctccaactccgtc

SEQ ID NO: 1144138 - DNA, 15 bp, Homo sapiens
tttctccaactccgt

SEQ ID NO: 1144139 - DNA, 15 bp, Homo sapiens
ttttctccaactccg

SEQ ID NO: 1144140 - DNA, 15 bp, Homo sapiens
gttttctccaactcc

SEQ ID NO: 1144141 - DNA, 15 bp, Homo sapiens
tgttttctccaactc

SEQ ID NO: 1144142 - DNA, 15 bp, Homo sapiens
ctgttttctccaact

SEQ ID NO: 1144143 - DNA, 15 bp, Homo sapiens
actgttttctccaac

SEQ ID NO: 1144144 - DNA, 15 bp, Homo sapiens
aactgttttctccaa

SEQ ID NO: 1144145 - DNA, 15 bp, Homo sapiens
aaactgttttctcca

SEQ ID NO: 1144146 - DNA, 15 bp, Homo sapiens
aaaactgttttctcc

SEQ ID NO: 1144147 - DNA, 15 bp, Homo sapiens
aaaaactgttttctc

SEQ ID NO: 1144148 - DNA, 15 bp, Homo sapiens
gaaaaactgttttct

SEQ ID NO: 1144149 - DNA, 15 bp, Homo sapiens
agaaaaactgttttc

SEQ ID NO: 1144150 - DNA, 15 bp, Homo sapiens
cagaaaaactgtttt

SEQ ID NO: 1144151 - DNA, 15 bp, Homo sapiens
gcagaaaaactgttt

SEQ ID NO: 1144152 - DNA, 15 bp, Homo sapiens
tgcagaaaaactgtt

SEQ ID NO: 1144153 - DNA, 15 bp, Homo sapiens
ctgcagaaaaactgt

SEQ ID NO: 1144154 - DNA, 15 bp, Homo sapiens
tctgcagaaaaactg

SEQ ID NO: 1144155 - DNA, 15 bp, Homo sapiens
ctctgcagaaaaact

SEQ ID NO: 1144156 - DNA, 15 bp, Homo sapiens
actctgcagaaaaac

SEQ ID NO: 1144157 - DNA, 15 bp, Homo sapiens
cactctgcagaaaaa

SEQ ID NO: 1144158 - DNA, 15 bp, Homo sapiens
acactctgcagaaaa

SEQ ID NO: 1144159 - DNA, 15 bp, Homo sapiens
gacactctgcagaaa

SEQ ID NO: 1144160 - DNA, 15 bp, Homo sapiens
tgacactctgcagaa

SEQ ID NO: 1144161 - DNA, 15 bp, Homo sapiens
ttgacactctgcaga

SEQ ID NO: 1144162 - DNA, 15 bp, Homo sapiens
cttgacactctgcag

SEQ ID NO: 1144163 - DNA, 15 bp, Homo sapiens
ccttgacactctgca

SEQ ID NO: 1144164 - DNA, 15 bp, Homo sapiens
tccttgacactctgc

SEQ ID NO: 1144165 - DNA, 15 bp, Homo sapiens
gtccttgacactctg

SEQ ID NO: 1144166 - DNA, 15 bp, Homo sapiens
agtccttgacactct

SEQ ID NO: 1144167 - DNA, 15 bp, Homo sapiens
aagtccttgacactc

SEQ ID NO: 1144168 - DNA, 15 bp, Homo sapiens
caagtccttgacact

SEQ ID NO: 1144169 - DNA, 15 bp, Homo sapiens
tcaagtccttgacac

SEQ ID NO: 1144170 - DNA, 15 bp, Homo sapiens
atcaagtccttgaca

SEQ ID NO: 1144171 - DNA, 15 bp, Homo sapiens
tatcaagtccttgac

SEQ ID NO: 1144172 - DNA, 15 bp, Homo sapiens
atatcaagtccttga

SEQ ID NO: 1144173 - DNA, 15 bp, Homo sapiens
gatatcaagtccttg

SEQ ID NO: 1144174 - DNA, 15 bp, Homo sapiens
agatatcaagtcctt

SEQ ID NO: 1144175 - DNA, 15 bp, Homo sapiens
aagatatcaagtcct

SEQ ID NO: 1144176 - DNA, 15 bp, Homo sapiens
aaagatatcaagtcc

SEQ ID NO: 1144177 - DNA, 15 bp, Homo sapiens
aaaagatatcaagtc

SEQ ID NO: 1144178 - DNA, 15 bp, Homo sapiens
taaaagatatcaagt

SEQ ID NO: 1144179 - DNA, 15 bp, Homo sapiens
ataaaagatatcaag

SEQ ID NO: 1144180 - DNA, 15 bp, Homo sapiens
cataaaagatatcaa

SEQ ID NO: 1144181 - DNA, 15 bp, Homo sapiens
gcataaaagatatca

SEQ ID NO: 1144182 - DNA, 15 bp, Homo sapiens
agcataaaagatatc

SEQ ID NO: 1144183 - DNA, 15 bp, Homo sapiens
cagcataaaagatat

SEQ ID NO: 1144184 - DNA, 15 bp, Homo sapiens
acagcataaaagata

SEQ ID NO: 1144185 - DNA, 15 bp, Homo sapiens
gacagcataaaagat

SEQ ID NO: 1144186 - DNA, 15 bp, Homo sapiens
agacagcataaaaga

SEQ ID NO: 1144187 - DNA, 15 bp, Homo sapiens
gagacagcataaaag

SEQ ID NO: 1144188 - DNA, 15 bp, Homo sapiens
agagacagcataaaa

SEQ ID NO: 1144189 - DNA, 15 bp, Homo sapiens
cagagacagcataaa

SEQ ID NO: 1144190 - DNA, 15 bp, Homo sapiens
acagagacagcataa

SEQ ID NO: 1144191 - DNA, 15 bp, Homo sapiens
cacagagacagcata

SEQ ID NO: 1144192 - DNA, 15 bp, Homo sapiens
tcacagagacagcat

SEQ ID NO: 1144193 - DNA, 15 bp, Homo sapiens
gtcacagagacagca

SEQ ID NO: 1144194 - DNA, 15 bp, Homo sapiens
agtcacagagacagc

SEQ ID NO: 1144195 - DNA, 15 bp, Homo sapiens
tagtcacagagacag

SEQ ID NO: 1144196 - DNA, 15 bp, Homo sapiens
atagtcacagagaca

SEQ ID NO: 1144197 - DNA, 15 bp, Homo sapiens
tatagtcacagagac

SEQ ID NO: 1144198 - DNA, 15 bp, Homo sapiens
ttatagtcacagaga

SEQ ID NO: 1144199 - DNA, 15 bp, Homo sapiens
attatagtcacagag

SEQ ID NO: 1144200 - DNA, 15 bp, Homo sapiens
tattatagtcacaga

SEQ ID NO: 1144201 - DNA, 15 bp, Homo sapiens
ctattatagtcacag

SEQ ID NO: 1144202 - DNA, 15 bp, Homo sapiens
actattatagtcaca

SEQ ID NO: 1144203 - DNA, 15 bp, Homo sapiens
gactattatagtcac

SEQ ID NO: 1144204 - DNA, 15 bp, Homo sapiens
agactattatagtca

SEQ ID NO: 1144205 - DNA, 15 bp, Homo sapiens
tagactattatagtc

SEQ ID NO: 1144206 - DNA, 15 bp, Homo sapiens
ctagactattatagt

SEQ ID NO: 1144207 - DNA, 15 bp, Homo sapiens
tctagactattatag

SEQ ID NO: 1144208 - DNA, 15 bp, Homo sapiens
ttctagactattata

SEQ ID NO: 1144209 - DNA, 15 bp, Homo sapiens
tttctagactattat

SEQ ID NO: 1144210 - DNA, 15 bp, Homo sapiens
ttttctagactatta

SEQ ID NO: 1144211 - DNA, 15 bp, Homo sapiens
attttctagactatt

SEQ ID NO: 1144212 - DNA, 15 bp, Homo sapiens
aattttctagactat

SEQ ID NO: 1144213 - DNA, 15 bp, Homo sapiens
gaattttctagacta

SEQ ID NO: 1144214 - DNA, 15 bp, Homo sapiens
agaattttctagact

SEQ ID NO: 1144215 - DNA, 15 bp, Homo sapiens
cagaattttctagac

SEQ ID NO: 1144216 - DNA, 15 bp, Homo sapiens
gcagaattttctaga

SEQ ID NO: 1144217 - DNA, 15 bp, Homo sapiens
cgcagaattttctag

SEQ ID NO: 1144218 - DNA, 15 bp, Homo sapiens
ccgcagaattttcta

SEQ ID NO: 1144219 - DNA, 15 bp, Homo sapiens
cccgcagaattttct

SEQ ID NO: 1144220 - DNA, 15 bp, Homo sapiens
tcccgcagaattttc

SEQ ID NO: 1144221 - DNA, 15 bp, Homo sapiens
ttcccgcagaatttt

SEQ ID NO: 1144222 - DNA, 15 bp, Homo sapiens
tttcccgcagaattt

SEQ ID NO: 1144223 - DNA, 15 bp, Homo sapiens
ttttcccgcagaatt

SEQ ID NO: 1144224 - DNA, 15 bp, Homo sapiens
attttcccgcagaat

SEQ ID NO: 1144225 - DNA, 15 bp, Homo sapiens
tattttcccgcagaa

SEQ ID NO: 1144226 - DNA, 15 bp, Homo sapiens
ctattttcccgcaga

SEQ ID NO: 1144227 - DNA, 15 bp, Homo sapiens
gctattttcccgcag

SEQ ID NO: 1144228 - DNA, 15 bp, Homo sapiens
agctattttcccgca

SEQ ID NO: 1144229 - DNA, 15 bp, Homo sapiens
cagctattttcccgc

SEQ ID NO: 1144230 - DNA, 15 bp, Homo sapiens
gcagctattttcccg

SEQ ID NO: 1144231 - DNA, 15 bp, Homo sapiens
tgcagctattttccc

SEQ ID NO: 1144232 - DNA, 15 bp, Homo sapiens
gtgcagctattttcc

SEQ ID NO: 1144233 - DNA, 15 bp, Homo sapiens
ggtgcagctattttc

SEQ ID NO: 1144234 - DNA, 15 bp, Homo sapiens
gggtgcagctatttt

SEQ ID NO: 1144235 - DNA, 15 bp, Homo sapiens
agggtgcagctattt

SEQ ID NO: 1144236 - DNA, 15 bp, Homo sapiens
cagggtgcagctatt

SEQ ID NO: 1144237 - DNA, 15 bp, Homo sapiens
tcagggtgcagctat

SEQ ID NO: 1144238 - DNA, 15 bp, Homo sapiens
atcagggtgcagcta

SEQ ID NO: 1144239 - DNA, 15 bp, Homo sapiens
aatcagggtgcagct

SEQ ID NO: 1144240 - DNA, 15 bp, Homo sapiens
caatcagggtgcagc

SEQ ID NO: 1144241 - DNA, 15 bp, Homo sapiens
acaatcagggtgcag

SEQ ID NO: 1144242 - DNA, 15 bp, Homo sapiens
gacaatcagggtgca

SEQ ID NO: 1144243 - DNA, 15 bp, Homo sapiens
ggacaatcagggtgc

SEQ ID NO: 1144244 - DNA, 15 bp, Homo sapiens
aggacaatcagggtg

SEQ ID NO: 1144245 - DNA, 15 bp, Homo sapiens
aaggacaatcagggt

SEQ ID NO: 1144246 - DNA, 15 bp, Homo sapiens
caaggacaatcaggg

SEQ ID NO: 1144247 - DNA, 15 bp, Homo sapiens
gcaaggacaatcagg

SEQ ID NO: 1144248 - DNA, 15 bp, Homo sapiens
tgcaaggacaatcag

SEQ ID NO: 1144249 - DNA, 15 bp, Homo sapiens
atgcaaggacaatca

SEQ ID NO: 1144250 - DNA, 15 bp, Homo sapiens
aatgcaaggacaatc

SEQ ID NO: 1144251 - DNA, 15 bp, Homo sapiens
caatgcaaggacaat

SEQ ID NO: 1144252 - DNA, 15 bp, Homo sapiens
gcaatgcaaggacaa

SEQ ID NO: 1144253 - DNA, 15 bp, Homo sapiens
ggcaatgcaaggaca

SEQ ID NO: 1144254 - DNA, 15 bp, Homo sapiens
aggcaatgcaaggac

SEQ ID NO: 1144255 - DNA, 15 bp, Homo sapiens
gaggcaatgcaagga

SEQ ID NO: 1144256 - DNA, 15 bp, Homo sapiens
agaggcaatgcaagg

SEQ ID NO: 1144257 - DNA, 15 bp, Homo sapiens
aagaggcaatgcaag

SEQ ID NO: 1144258 - DNA, 15 bp, Homo sapiens
caagaggcaatgcaa

SEQ ID NO: 1144259 - DNA, 15 bp, Homo sapiens
acaagaggcaatgca

SEQ ID NO: 1144260 - DNA, 15 bp, Homo sapiens
aacaagaggcaatgc

SEQ ID NO: 1144261 - DNA, 15 bp, Homo sapiens
aaacaagaggcaatg

SEQ ID NO: 1144262 - DNA, 15 bp, Homo sapiens
caaacaagaggcaat

SEQ ID NO: 1144263 - DNA, 15 bp, Homo sapiens
tcaaacaagaggcaa

SEQ ID NO: 1144264 - DNA, 15 bp, Homo sapiens
ctcaaacaagaggca

SEQ ID NO: 1144265 - DNA, 15 bp, Homo sapiens
cctcaaacaagaggc

SEQ ID NO: 1144266 - DNA, 15 bp, Homo sapiens
ccctcaaacaagagg

SEQ ID NO: 1144267 - DNA, 15 bp, Homo sapiens
cccctcaaacaagag

SEQ ID NO: 1144268 - DNA, 15 bp, Homo sapiens
tcccctcaaacaaga

SEQ ID NO: 1144269 - DNA, 15 bp, Homo sapiens
ttcccctcaaacaag

SEQ ID NO: 1144270 - DNA, 15 bp, Homo sapiens
tttcccctcaaacaa

SEQ ID NO: 1144271 - DNA, 15 bp, Homo sapiens
ttttcccctcaaaca

SEQ ID NO: 1144272 - DNA, 15 bp, Homo sapiens
tttttcccctcaaac

SEQ ID NO: 1144273 - DNA, 15 bp, Homo sapiens
atttttcccctcaaa

SEQ ID NO: 1144274 - DNA, 15 bp, Homo sapiens
catttttcccctcaa

SEQ ID NO: 1144275 - DNA, 15 bp, Homo sapiens
gcatttttcccctca

SEQ ID NO: 1144276 - DNA, 15 bp, Homo sapiens
ggcatttttcccctc

SEQ ID NO: 1144277 - DNA, 15 bp, Homo sapiens
tggcatttttcccct

SEQ ID NO: 1144278 - DNA, 15 bp, Homo sapiens
atggcatttttcccc

SEQ ID NO: 1144279 - DNA, 15 bp, Homo sapiens
aatggcatttttccc

SEQ ID NO: 1144280 - DNA, 15 bp, Homo sapiens
aaatggcatttttcc

SEQ ID NO: 1144281 - DNA, 15 bp, Homo sapiens
ttacaggctttagag

SEQ ID NO: 1144282 - DNA, 15 bp, Homo sapiens
cttacaggctttaga

SEQ ID NO: 1144283 - DNA, 15 bp, Homo sapiens
gcttacaggctttag

SEQ ID NO: 1144284 - DNA, 15 bp, Homo sapiens
tgcttacaggcttta

SEQ ID NO: 1144285 - DNA, 15 bp, Homo sapiens
atgcttacaggcttt

SEQ ID NO: 1144286 - DNA, 15 bp, Homo sapiens
catgcttacaggctt

SEQ ID NO: 1144287 - DNA, 15 bp, Homo sapiens
tcatgcttacaggct

SEQ ID NO: 1144288 - DNA, 15 bp, Homo sapiens
atcatgcttacaggc

SEQ ID NO: 1144289 - DNA, 15 bp, Homo sapiens
catcatgcttacagg

SEQ ID NO: 1144290 - DNA, 15 bp, Homo sapiens
acatcatgcttacag

SEQ ID NO: 1144291 - DNA, 15 bp, Homo sapiens
aacatcatgcttaca

SEQ ID NO: 1144292 - DNA, 15 bp, Homo sapiens
aaacatcatgcttac

SEQ ID NO: 1144293 - DNA, 15 bp, Homo sapiens
caaacatcatgctta

SEQ ID NO: 1144294 - DNA, 15 bp, Homo sapiens
acaaacatcatgctt

SEQ ID NO: 1144295 - DNA, 15 bp, Homo sapiens
tacaaacatcatgct

SEQ ID NO: 1144296 - DNA, 15 bp, Homo sapiens
atacaaacatcatgc

SEQ ID NO: 1144297 - DNA, 15 bp, Homo sapiens
catacaaacatcatg

SEQ ID NO: 1144298 - DNA, 15 bp, Homo sapiens
acatacaaacatcat

SEQ ID NO: 1144299 - DNA, 15 bp, Homo sapiens
gacatacaaacatca

SEQ ID NO: 1144300 - DNA, 15 bp, Homo sapiens
agacatacaaacatc

SEQ ID NO: 1144301 - DNA, 15 bp, Homo sapiens
cagacatacaaacat

SEQ ID NO: 1144302 - DNA, 15 bp, Homo sapiens
gcagacatacaaaca

SEQ ID NO: 1144303 - DNA, 15 bp, Homo sapiens
tgcagacatacaaac

SEQ ID NO: 1144304 - DNA, 15 bp, Homo sapiens
atgcagacatacaaa

SEQ ID NO: 1144305 - DNA, 15 bp, Homo sapiens
tatgcagacatacaa

SEQ ID NO: 1144306 - DNA, 15 bp, Homo sapiens
ctatgcagacataca

SEQ ID NO: 1144307 - DNA, 15 bp, Homo sapiens
gctatgcagacatac

SEQ ID NO: 1144308 - DNA, 15 bp, Homo sapiens
tgctatgcagacata

SEQ ID NO: 1144309 - DNA, 15 bp, Homo sapiens
ctgctatgcagacat

SEQ ID NO: 1144310 - DNA, 15 bp, Homo sapiens
actgctatgcagaca

SEQ ID NO: 1144311 - DNA, 15 bp, Homo sapiens
cactgctatgcagac

SEQ ID NO: 1144312 - DNA, 15 bp, Homo sapiens
acactgctatgcaga

SEQ ID NO: 1144313 - DNA, 15 bp, Homo sapiens
aacactgctatgcag

SEQ ID NO: 1144314 - DNA, 15 bp, Homo sapiens
caacactgctatgca

SEQ ID NO: 1144315 - DNA, 15 bp, Homo sapiens
gcaacactgctatgc

SEQ ID NO: 1144316 - DNA, 15 bp, Homo sapiens
agcaacactgctatg

SEQ ID NO: 1144317 - DNA, 15 bp, Homo sapiens
cagcaacactgctat

SEQ ID NO: 1144318 - DNA, 15 bp, Homo sapiens
tcagcaacactgcta

SEQ ID NO: 1144319 - DNA, 15 bp, Homo sapiens
atcagcaacactgct

SEQ ID NO: 1144320 - DNA, 15 bp, Homo sapiens
aatcagcaacactgc

SEQ ID NO: 1144321 - DNA, 15 bp, Homo sapiens
caatcagcaacactg

SEQ ID NO: 1144322 - DNA, 15 bp, Homo sapiens
acaatcagcaacact

SEQ ID NO: 1144323 - DNA, 15 bp, Homo sapiens
tacaatcagcaacac

SEQ ID NO: 1144324 - DNA, 15 bp, Homo sapiens
ttacaatcagcaaca

SEQ ID NO: 1144325 - DNA, 15 bp, Homo sapiens
gttacaatcagcaac

SEQ ID NO: 1144326 - DNA, 15 bp, Homo sapiens
cgttacaatcagcaa

SEQ ID NO: 1144327 - DNA, 15 bp, Homo sapiens
tcgttacaatcagca

SEQ ID NO: 1144328 - DNA, 15 bp, Homo sapiens
ctcgttacaatcagc

SEQ ID NO: 1144329 - DNA, 15 bp, Homo sapiens
actcgttacaatcag

SEQ ID NO: 1144330 - DNA, 15 bp, Homo sapiens
cactcgttacaatca

SEQ ID NO: 1144331 - DNA, 15 bp, Homo sapiens
gcactcgttacaatc

SEQ ID NO: 1144332 - DNA, 15 bp, Homo sapiens
agcactcgttacaat

SEQ ID NO: 1144333 - DNA, 15 bp, Homo sapiens
cagcactcgttacaa

SEQ ID NO: 1144334 - DNA, 15 bp, Homo sapiens
acagcactcgttaca

SEQ ID NO: 1144335 - DNA, 15 bp, Homo sapiens
gacagcactcgttac

SEQ ID NO: 1144336 - DNA, 15 bp, Homo sapiens
agacagcactcgtta

SEQ ID NO: 1144337 - DNA, 15 bp, Homo sapiens
cagacagcactcgtt

SEQ ID NO: 1144338 - DNA, 15 bp, Homo sapiens
acagacagcactcgt

SEQ ID NO: 1144339 - DNA, 15 bp, Homo sapiens
tacagacagcactcg

SEQ ID NO: 1144340 - DNA, 15 bp, Homo sapiens
atacagacagcactc

SEQ ID NO: 1144341 - DNA, 15 bp, Homo sapiens
catacagacagcact

SEQ ID NO: 1144342 - DNA, 15 bp, Homo sapiens
gcatacagacagcac

SEQ ID NO: 1144343 - DNA, 15 bp, Homo sapiens
agcatacagacagca

SEQ ID NO: 1144344 - DNA, 15 bp, Homo sapiens
tagcatacagacagc

SEQ ID NO: 1144345 - DNA, 15 bp, Homo sapiens
ttagcatacagacag

SEQ ID NO: 1144346 - DNA, 15 bp, Homo sapiens
tttagcatacagaca

SEQ ID NO: 1144347 - DNA, 15 bp, Homo sapiens
ttttagcatacagac

SEQ ID NO: 1144348 - DNA, 15 bp, Homo sapiens
cttttagcatacaga

SEQ ID NO: 1144349 - DNA, 15 bp, Homo sapiens
ccttttagcatacag

SEQ ID NO: 1144350 - DNA, 15 bp, Homo sapiens
gccttttagcataca

SEQ ID NO: 1144351 - DNA, 15 bp, Homo sapiens
ggccttttagcatac

SEQ ID NO: 1144352 - DNA, 15 bp, Homo sapiens
aggccttttagcata

SEQ ID NO: 1144353 - DNA, 15 bp, Homo sapiens
caggccttttagcat

SEQ ID NO: 1144354 - DNA, 15 bp, Homo sapiens
tcaggccttttagca

SEQ ID NO: 1144355 - DNA, 15 bp, Homo sapiens
ttcaggccttttagc

SEQ ID NO: 1144356 - DNA, 15 bp, Homo sapiens
tttcaggccttttag

SEQ ID NO: 1144357 - DNA, 15 bp, Homo sapiens
ctttcaggcctttta

SEQ ID NO: 1144358 - DNA, 15 bp, Homo sapiens
cctttcaggcctttt

SEQ ID NO: 1144359 - DNA, 15 bp, Homo sapiens
acctttcaggccttt

SEQ ID NO: 1144360 - DNA, 15 bp, Homo sapiens
cacctttcaggcctt

SEQ ID NO: 1144361 - DNA, 15 bp, Homo sapiens
acacctttcaggcct

SEQ ID NO: 1144362 - DNA, 15 bp, Homo sapiens
gacacctttcaggcc

SEQ ID NO: 1144363 - DNA, 15 bp, Homo sapiens
agacacctttcaggc

SEQ ID NO: 1144364 - DNA, 15 bp, Homo sapiens
tagacacctttcagg

SEQ ID NO: 1144365 - DNA, 15 bp, Homo sapiens
atagacacctttcag

SEQ ID NO: 1144366 - DNA, 15 bp, Homo sapiens
gatagacacctttca

SEQ ID NO: 1144367 - DNA, 15 bp, Homo sapiens
agatagacacctttc

SEQ ID NO: 1144368 - DNA, 15 bp, Homo sapiens
cagatagacaccttt

SEQ ID NO: 1144369 - DNA, 15 bp, Homo sapiens
ccagatagacacctt

SEQ ID NO: 1144370 - DNA, 15 bp, Homo sapiens
tccagatagacacct

SEQ ID NO: 1144371 - DNA, 15 bp, Homo sapiens
ttccagatagacacc

SEQ ID NO: 1144372 - DNA, 15 bp, Homo sapiens
cttccagatagacac

SEQ ID NO: 1144373 - DNA, 15 bp, Homo sapiens
gcttccagatagaca

SEQ ID NO: 1144374 - DNA, 15 bp, Homo sapiens
tgcttccagatagac

SEQ ID NO: 1144375 - DNA, 15 bp, Homo sapiens
ctgcttccagataga

SEQ ID NO: 1144376 - DNA, 15 bp, Homo sapiens
actgcttccagatag

SEQ ID NO: 1144377 - DNA, 15 bp, Homo sapiens
aactgcttccagata

SEQ ID NO: 1144378 - DNA, 15 bp, Homo sapiens
aaactgcttccagat

SEQ ID NO: 1144379 - DNA, 15 bp, Homo sapiens
taaactgcttccaga

SEQ ID NO: 1144380 - DNA, 15 bp, Homo sapiens
ataaactgcttccag

SEQ ID NO: 1144381 - DNA, 15 bp, Homo sapiens
tataaactgcttcca

SEQ ID NO: 1144382 - DNA, 15 bp, Homo sapiens
ttataaactgcttcc

SEQ ID NO: 1144383 - DNA, 15 bp, Homo sapiens
tttataaactgcttc

SEQ ID NO: 1144384 - DNA, 15 bp, Homo sapiens
ttttataaactgctt

SEQ ID NO: 1144385 - DNA, 15 bp, Homo sapiens
attttataaactgct

SEQ ID NO: 1144386 - DNA, 15 bp, Homo sapiens
aattttataaactgc

SEQ ID NO: 1144387 - DNA, 15 bp, Homo sapiens
taattttataaactg

SEQ ID NO: 1144388 - DNA, 15 bp, Homo sapiens
ctaattttataaact

SEQ ID NO: 1144389 - DNA, 15 bp, Homo sapiens
tctaattttataaac

SEQ ID NO: 1144390 - DNA, 15 bp, Homo sapiens
atctaattttataaa

SEQ ID NO: 1144391 - DNA, 15 bp, Homo sapiens
tatctaattttataa

SEQ ID NO: 1144392 - DNA, 15 bp, Homo sapiens
ttatctaattttata

SEQ ID NO: 1144393 - DNA, 15 bp, Homo sapiens
attatctaattttat

SEQ ID NO: 1144394 - DNA, 15 bp, Homo sapiens
tattatctaatttta

SEQ ID NO: 1144395 - DNA, 15 bp, Homo sapiens
ttattatctaatttt

SEQ ID NO: 1144396 - DNA, 15 bp, Homo sapiens
tttattatctaattt

SEQ ID NO: 1144397 - DNA, 15 bp, Homo sapiens
ttttattatctaatt

SEQ ID NO: 1144398 - DNA, 15 bp, Homo sapiens
tttttattatctaat

SEQ ID NO: 1144399 - DNA, 15 bp, Homo sapiens
atttttattatctaa

SEQ ID NO: 1144400 - DNA, 15 bp, Homo sapiens
aatttttattatcta

SEQ ID NO: 1144401 - DNA, 15 bp, Homo sapiens
aaatttttattatct

SEQ ID NO: 1144402 - DNA, 15 bp, Homo sapiens
caaatttttattatc

SEQ ID NO: 1144403 - DNA, 15 bp, Homo sapiens
tcaaatttttattat

SEQ ID NO: 1144404 - DNA, 15 bp, Homo sapiens
ttcaaatttttatta

SEQ ID NO: 1144405 - DNA, 15 bp, Homo sapiens
tttcaaatttttatt

SEQ ID NO: 1144406 - DNA, 15 bp, Homo sapiens
ctttcaaatttttat

SEQ ID NO: 1144407 - DNA, 15 bp, Homo sapiens
actttcaaattttta

SEQ ID NO: 1144408 - DNA, 15 bp, Homo sapiens
tactttcaaattttt

SEQ ID NO: 1144409 - DNA, 15 bp, Homo sapiens
atactttcaaatttt

SEQ ID NO: 1144410 - DNA, 15 bp, Homo sapiens
aatactttcaaattt

SEQ ID NO: 1144411 - DNA, 15 bp, Homo sapiens
caatactttcaaatt

SEQ ID NO: 1144412 - DNA, 15 bp, Homo sapiens
tcaatactttcaaat

SEQ ID NO: 1144413 - DNA, 15 bp, Homo sapiens
gctcaatctagtaac

SEQ ID NO: 1144414 - DNA, 15 bp, Homo sapiens
tgctcaatctagtaa

SEQ ID NO: 1144415 - DNA, 15 bp, Homo sapiens
atgctcaatctagta

SEQ ID NO: 1144416 - DNA, 15 bp, Homo sapiens
gatgctcaatctagt

SEQ ID NO: 1144417 - DNA, 15 bp, Homo sapiens
agatgctcaatctag

SEQ ID NO: 1144418 - DNA, 15 bp, Homo sapiens
cagatgctcaatcta

SEQ ID NO: 1144419 - DNA, 15 bp, Homo sapiens
tcagatgctcaatct

SEQ ID NO: 1144420 - DNA, 15 bp, Homo sapiens
atcagatgctcaatc

SEQ ID NO: 1144421 - DNA, 15 bp, Homo sapiens
gatcagatgctcaat

SEQ ID NO: 1144422 - DNA, 15 bp, Homo sapiens
agatcagatgctcaa

SEQ ID NO: 1144423 - DNA, 15 bp, Homo sapiens
tagatcagatgctca

SEQ ID NO: 1144424 - DNA, 15 bp, Homo sapiens
atagatcagatgctc

SEQ ID NO: 1144425 - DNA, 15 bp, Homo sapiens
tatagatcagatgct

SEQ ID NO: 1144426 - DNA, 15 bp, Homo sapiens
atatagatcagatgc

SEQ ID NO: 1144427 - DNA, 15 bp, Homo sapiens
aatatagatcagatg

SEQ ID NO: 1144428 - DNA, 15 bp, Homo sapiens
taatatagatcagat

SEQ ID NO: 1144429 - DNA, 15 bp, Homo sapiens
ctaatatagatcaga

SEQ ID NO: 1144430 - DNA, 15 bp, Homo sapiens
tctaatatagatcag

SEQ ID NO: 1144431 - DNA, 15 bp, Homo sapiens
ttctaatatagatca

SEQ ID NO: 1144432 - DNA, 15 bp, Homo sapiens
tttctaatatagatc

SEQ ID NO: 1144433 - DNA, 15 bp, Homo sapiens
atttctaatatagat

SEQ ID NO: 1144434 - DNA, 15 bp, Homo sapiens
gatttctaatataga

SEQ ID NO: 1144435 - DNA, 15 bp, Homo sapiens
cgatttctaatatag

SEQ ID NO: 1144436 - DNA, 15 bp, Homo sapiens
tcgatttctaatata

SEQ ID NO: 1144437 - DNA, 15 bp, Homo sapiens
atcgatttctaatat

SEQ ID NO: 1144438 - DNA, 15 bp, Homo sapiens
gatcgatttctaata

SEQ ID NO: 1144439 - DNA, 15 bp, Homo sapiens
tgatcgatttctaat

SEQ ID NO: 1144440 - DNA, 15 bp, Homo sapiens
atgatcgatttctaa

SEQ ID NO: 1144441 - DNA, 15 bp, Homo sapiens
gatgatcgatttcta

SEQ ID NO: 1144442 - DNA, 15 bp, Homo sapiens
agatgatcgatttct

SEQ ID NO: 1144443 - DNA, 15 bp, Homo sapiens
cagatgatcgatttc

SEQ ID NO: 1144444 - DNA, 15 bp, Homo sapiens
ccagatgatcgattt

SEQ ID NO: 1144445 - DNA, 15 bp, Homo sapiens
gccagatgatcgatt

SEQ ID NO: 1144446 - DNA, 15 bp, Homo sapiens
tgccagatgatcgat

SEQ ID NO: 1144447 - DNA, 15 bp, Homo sapiens
ctgccagatgatcga

SEQ ID NO: 1144448 - DNA, 15 bp, Homo sapiens
gctgccagatgatcg

SEQ ID NO: 1144449 - DNA, 15 bp, Homo sapiens
ggctgccagatgatc

SEQ ID NO: 1144450 - DNA, 15 bp, Homo sapiens
tggctgccagatgat

SEQ ID NO: 1144451 - DNA, 15 bp, Homo sapiens
atggctgccagatga

SEQ ID NO: 1144452 - DNA, 15 bp, Homo sapiens
catggctgccagatg

SEQ ID NO: 1144453 - DNA, 15 bp, Homo sapiens
acatggctgccagat

SEQ ID NO: 1144454 - DNA, 15 bp, Homo sapiens
gacatggctgccaga

SEQ ID NO: 1144455 - DNA, 15 bp, Homo sapiens
agacatggctgccag

SEQ ID NO: 1144456 - DNA, 15 bp, Homo sapiens
tagacatggctgcca

SEQ ID NO: 1144457 - DNA, 15 bp, Homo sapiens
ctagacatggctgcc

SEQ ID NO: 1144458 - DNA, 15 bp, Homo sapiens
gctagacatggctgc

SEQ ID NO: 1144459 - DNA, 15 bp, Homo sapiens
tgctagacatggctg

SEQ ID NO: 1144460 - DNA, 15 bp, Homo sapiens
ctgctagacatggct

SEQ ID NO: 1144461 - DNA, 15 bp, Homo sapiens
gctgctagacatggc

SEQ ID NO: 1144462 - DNA, 15 bp, Homo sapiens
tgctgctagacatgg

SEQ ID NO: 1144463 - DNA, 15 bp, Homo sapiens
atgctgctagacatg

SEQ ID NO: 1144464 - DNA, 15 bp, Homo sapiens
gatgctgctagacat

SEQ ID NO: 1144465 - DNA, 15 bp, Homo sapiens
agatgctgctagaca

SEQ ID NO: 1144466 - DNA, 15 bp, Homo sapiens
tagatgctgctagac

SEQ ID NO: 1144467 - DNA, 15 bp, Homo sapiens
atagatgctgctaga

SEQ ID NO: 1144468 - DNA, 15 bp, Homo sapiens
tatagatgctgctag

SEQ ID NO: 1144469 - DNA, 15 bp, Homo sapiens
ctatagatgctgcta

SEQ ID NO: 1144470 - DNA, 15 bp, Homo sapiens
gctatagatgctgct

SEQ ID NO: 1144471 - DNA, 15 bp, Homo sapiens
ggctatagatgctgc

SEQ ID NO: 1144472 - DNA, 15 bp, Homo sapiens
aggctatagatgctg

SEQ ID NO: 1144473 - DNA, 15 bp, Homo sapiens
taggctatagatgct

SEQ ID NO: 1144474 - DNA, 15 bp, Homo sapiens
ataggctatagatgc

SEQ ID NO: 1144475 - DNA, 15 bp, Homo sapiens
cataggctatagatg

SEQ ID NO: 1144476 - DNA, 15 bp, Homo sapiens
gcataggctatagat

SEQ ID NO: 1144477 - DNA, 15 bp, Homo sapiens
ggcataggctataga

SEQ ID NO: 1144478 - DNA, 15 bp, Homo sapiens
tggcataggctatag

SEQ ID NO: 1144479 - DNA, 15 bp, Homo sapiens
atggcataggctata

SEQ ID NO: 1144480 - DNA, 15 bp, Homo sapiens
aatggcataggctat

SEQ ID NO: 1144481 - DNA, 15 bp, Homo sapiens
caatggcataggcta

SEQ ID NO: 1144482 - DNA, 15 bp, Homo sapiens
gcaatggcataggct

SEQ ID NO: 1144483 - DNA, 15 bp, Homo sapiens
tgcaatggcataggc

SEQ ID NO: 1144484 - DNA, 15 bp, Homo sapiens
atgcaatggcatagg

SEQ ID NO: 1144485 - DNA, 15 bp, Homo sapiens
catgcaatggcatag

SEQ ID NO: 1144486 - DNA, 15 bp, Homo sapiens
acatgcaatggcata

SEQ ID NO: 1144487 - DNA, 15 bp, Homo sapiens
aacatgcaatggcat

SEQ ID NO: 1144488 - DNA, 15 bp, Homo sapiens
caacatgcaatggca

SEQ ID NO: 1144489 - DNA, 15 bp, Homo sapiens
ccaacatgcaatggc

SEQ ID NO: 1144490 - DNA, 15 bp, Homo sapiens
gccaacatgcaatgg

SEQ ID NO: 1144491 - DNA, 15 bp, Homo sapiens
agccaacatgcaatg

SEQ ID NO: 1144492 - DNA, 15 bp, Homo sapiens
aagccaacatgcaat

SEQ ID NO: 1144493 - DNA, 15 bp, Homo sapiens
aaagccaacatgcaa

SEQ ID NO: 1144494 - DNA, 15 bp, Homo sapiens
gaaagccaacatgca

SEQ ID NO: 1144495 - DNA, 15 bp, Homo sapiens
ggaaagccaacatgc

SEQ ID NO: 1144496 - DNA, 15 bp, Homo sapiens
gggaaagccaacatg

SEQ ID NO: 1144497 - DNA, 15 bp, Homo sapiens
ggggaaagccaacat

SEQ ID NO: 1144498 - DNA, 15 bp, Homo sapiens
gggggaaagccaaca

SEQ ID NO: 1144499 - DNA, 15 bp, Homo sapiens
tgggggaaagccaac

SEQ ID NO: 1144500 - DNA, 15 bp, Homo sapiens
ttgggggaaagccaa

SEQ ID NO: 1144501 - DNA, 15 bp, Homo sapiens
cttgggggaaagcca

SEQ ID NO: 1144502 - DNA, 15 bp, Homo sapiens
ccttgggggaaagcc

SEQ ID NO: 1144503 - DNA, 15 bp, Homo sapiens
accttgggggaaagc

SEQ ID NO: 1144504 - DNA, 15 bp, Homo sapiens
caccttgggggaaag

SEQ ID NO: 1144505 - DNA, 15 bp, Homo sapiens
gcaccttgggggaaa

SEQ ID NO: 1144506 - DNA, 15 bp, Homo sapiens
tgcaccttgggggaa

SEQ ID NO: 1144507 - DNA, 15 bp, Homo sapiens
atgcaccttggggga

SEQ ID NO: 1144508 - DNA, 15 bp, Homo sapiens
tatgcaccttggggg

SEQ ID NO: 1144509 - DNA, 15 bp, Homo sapiens
ctatgcaccttgggg

SEQ ID NO: 1144510 - DNA, 15 bp, Homo sapiens
actatgcaccttggg

SEQ ID NO: 1144511 - DNA, 15 bp, Homo sapiens
tactatgcaccttgg

SEQ ID NO: 1144512 - DNA, 15 bp, Homo sapiens
ctactatgcaccttg

SEQ ID NO: 1144513 - DNA, 15 bp, Homo sapiens
cctactatgcacctt

SEQ ID NO: 1144514 - DNA, 15 bp, Homo sapiens
acctactatgcacct

SEQ ID NO: 1144515 - DNA, 15 bp, Homo sapiens
aacctactatgcacc

SEQ ID NO: 1144516 - DNA, 15 bp, Homo sapiens
aaacctactatgcac

SEQ ID NO: 1144517 - DNA, 15 bp, Homo sapiens
taaacctactatgca

SEQ ID NO: 1144518 - DNA, 15 bp, Homo sapiens
ataaacctactatgc

SEQ ID NO: 1144519 - DNA, 15 bp, Homo sapiens
aataaacctactatg

SEQ ID NO: 1144520 - DNA, 15 bp, Homo sapiens
aaataaacctactat

SEQ ID NO: 1144521 - DNA, 15 bp, Homo sapiens
caaataaacctacta

SEQ ID NO: 1144522 - DNA, 15 bp, Homo sapiens
tcaaataaacctact

SEQ ID NO: 1144523 - DNA, 15 bp, Homo sapiens
ctcaaataaacctac

SEQ ID NO: 1144524 - DNA, 15 bp, Homo sapiens
cctcaaataaaccta

SEQ ID NO: 1144525 - DNA, 15 bp, Homo sapiens
tcctcaaataaacct

SEQ ID NO: 1144526 - DNA, 15 bp, Homo sapiens
gtcctcaaataaacc

SEQ ID NO: 1144527 - DNA, 15 bp, Homo sapiens
agtcctcaaataaac

SEQ ID NO: 1144528 - DNA, 15 bp, Homo sapiens
cagtcctcaaataaa

SEQ ID NO: 1144529 - DNA, 15 bp, Homo sapiens
tcagtcctcaaataa

SEQ ID NO: 1144530 - DNA, 15 bp, Homo sapiens
ttcagtcctcaaata

SEQ ID NO: 1144531 - DNA, 15 bp, Homo sapiens
attcagtcctcaaat

SEQ ID NO: 1144532 - DNA, 15 bp, Homo sapiens
aattcagtcctcaaa

SEQ ID NO: 1144533 - DNA, 15 bp, Homo sapiens
gaattcagtcctcaa

SEQ ID NO: 1144534 - DNA, 15 bp, Homo sapiens
tgaattcagtcctca

SEQ ID NO: 1144535 - DNA, 15 bp, Homo sapiens
gtgaattcagtcctc

SEQ ID NO: 1144536 - DNA, 15 bp, Homo sapiens
tgtgaattcagtcct

SEQ ID NO: 1144537 - DNA, 15 bp, Homo sapiens
atgtgaattcagtcc

SEQ ID NO: 1144538 - DNA, 15 bp, Homo sapiens
gatgtgaattcagtc

SEQ ID NO: 1144539 - DNA, 15 bp, Homo sapiens
agatgtgaattcagt

SEQ ID NO: 1144540 - DNA, 15 bp, Homo sapiens
aagatgtgaattcag

SEQ ID NO: 1144541 - DNA, 15 bp, Homo sapiens
taagatgtgaattca

SEQ ID NO: 1144542 - DNA, 15 bp, Homo sapiens
ataagatgtgaattc

SEQ ID NO: 1144543 - DNA, 15 bp, Homo sapiens
tataagatgtgaatt

SEQ ID NO: 1144544 - DNA, 15 bp, Homo sapiens
gtataagatgtgaat

SEQ ID NO: 1144545 - DNA, 15 bp, Homo sapiens
ggtataagatgtgaa

SEQ ID NO: 1144546 - DNA, 15 bp, Homo sapiens
aggtataagatgtga

SEQ ID NO: 1144547 - DNA, 15 bp, Homo sapiens
caggtataagatgtg

SEQ ID NO: 1144548 - DNA, 15 bp, Homo sapiens
acaggtataagatgt

SEQ ID NO: 1144549 - DNA, 15 bp, Homo sapiens
aacaggtataagatg

SEQ ID NO: 1144550 - DNA, 15 bp, Homo sapiens
aaacaggtataagat

SEQ ID NO: 1144551 - DNA, 15 bp, Homo sapiens
taaacaggtataaga

SEQ ID NO: 1144552 - DNA, 15 bp, Homo sapiens
ataaacaggtataag

SEQ ID NO: 1144553 - DNA, 15 bp, Homo sapiens
aataaacaggtataa

SEQ ID NO: 1144554 - DNA, 15 bp, Homo sapiens
aaataaacaggtata

SEQ ID NO: 1144555 - DNA, 15 bp, Homo sapiens
gaaataaacaggtat

SEQ ID NO: 1144556 - DNA, 15 bp, Homo sapiens
agaaataaacaggta

SEQ ID NO: 1144557 - DNA, 15 bp, Homo sapiens
gagaaataaacaggt

SEQ ID NO: 1144558 - DNA, 15 bp, Homo sapiens
tgagaaataaacagg

SEQ ID NO: 1144559 - DNA, 15 bp, Homo sapiens
atgagaaataaacag

SEQ ID NO: 1144560 - DNA, 15 bp, Homo sapiens
catgagaaataaaca

SEQ ID NO: 1144561 - DNA, 15 bp, Homo sapiens
ccatgagaaataaac

SEQ ID NO: 1144562 - DNA, 15 bp, Homo sapiens
tccatgagaaataaa

SEQ ID NO: 1144563 - DNA, 15 bp, Homo sapiens
ttccatgagaaataa

SEQ ID NO: 1144564 - DNA, 15 bp, Homo sapiens
gttccatgagaaata

SEQ ID NO: 1144565 - DNA, 15 bp, Homo sapiens
agttccatgagaaat

SEQ ID NO: 1144566 - DNA, 15 bp, Homo sapiens
aagttccatgagaaa

SEQ ID NO: 1144567 - DNA, 15 bp, Homo sapiens
aaagttccatgagaa

SEQ ID NO: 1144568 - DNA, 15 bp, Homo sapiens
gaaagttccatgaga

SEQ ID NO: 1144569 - DNA, 15 bp, Homo sapiens
agaaagttccatgag

SEQ ID NO: 1144570 - DNA, 15 bp, Homo sapiens
tagaaagttccatga

SEQ ID NO: 1144571 - DNA, 15 bp, Homo sapiens
gtagaaagttccatg

SEQ ID NO: 1144572 - DNA, 15 bp, Homo sapiens
agtagaaagttccat

SEQ ID NO: 1144573 - DNA, 15 bp, Homo sapiens
cagtagaaagttcca

SEQ ID NO: 1144574 - DNA, 15 bp, Homo sapiens
gcagtagaaagttcc

SEQ ID NO: 1144575 - DNA, 15 bp, Homo sapiens
tgcagtagaaagttc

SEQ ID NO: 1144576 - DNA, 15 bp, Homo sapiens
ctgcagtagaaagtt

SEQ ID NO: 1144577 - DNA, 15 bp, Homo sapiens
cctgcagtagaaagt

SEQ ID NO: 1144578 - DNA, 15 bp, Homo sapiens
tcctgcagtagaaag

SEQ ID NO: 1144579 - DNA, 15 bp, Homo sapiens
gtcctgcagtagaaa

SEQ ID NO: 1144580 - DNA, 15 bp, Homo sapiens
cgtcctgcagtagaa

SEQ ID NO: 1144581 - DNA, 15 bp, Homo sapiens
acgtcctgcagtaga

SEQ ID NO: 1144582 - DNA, 15 bp, Homo sapiens
cacgtcctgcagtag

SEQ ID NO: 1144583 - DNA, 15 bp, Homo sapiens
tcacgtcctgcagta

SEQ ID NO: 1144584 - DNA, 15 bp, Homo sapiens
gtcacgtcctgcagt

SEQ ID NO: 1144585 - DNA, 15 bp, Homo sapiens
tgtcacgtcctgcag

SEQ ID NO: 1144586 - DNA, 15 bp, Homo sapiens
ctgtcacgtcctgca

SEQ ID NO: 1144587 - DNA, 15 bp, Homo sapiens
cctgtcacgtcctgc

SEQ ID NO: 1144588 - DNA, 15 bp, Homo sapiens
acctgtcacgtcctg

SEQ ID NO: 1144589 - DNA, 15 bp, Homo sapiens
cacctgtcacgtcct

SEQ ID NO: 1144590 - DNA, 15 bp, Homo sapiens
gcacctgtcacgtcc

SEQ ID NO: 1144591 - DNA, 15 bp, Homo sapiens
agcacctgtcacgtc

SEQ ID NO: 1144592 - DNA, 15 bp, Homo sapiens
tagcacctgtcacgt

SEQ ID NO: 1144593 - DNA, 15 bp, Homo sapiens
ctagcacctgtcacg

SEQ ID NO: 1144594 - DNA, 15 bp, Homo sapiens
tctagcacctgtcac

SEQ ID NO: 1144595 - DNA, 15 bp, Homo sapiens
gtctagcacctgtca

SEQ ID NO: 1144596 - DNA, 15 bp, Homo sapiens
agtctagcacctgtc

SEQ ID NO: 1144597 - DNA, 15 bp, Homo sapiens
cagtctagcacctgt

SEQ ID NO: 1144598 - DNA, 15 bp, Homo sapiens
acagtctagcacctg

SEQ ID NO: 1144599 - DNA, 15 bp, Homo sapiens
gacagtctagcacct

SEQ ID NO: 1144600 - DNA, 15 bp, Homo sapiens
tgacagtctagcacc

SEQ ID NO: 1144601 - DNA, 15 bp, Homo sapiens
ctgacagtctagcac

SEQ ID NO: 1144602 - DNA, 15 bp, Homo sapiens
actgacagtctagca

SEQ ID NO: 1144603 - DNA, 15 bp, Homo sapiens
tactgacagtctagc

SEQ ID NO: 1144604 - DNA, 15 bp, Homo sapiens
ttactgacagtctag

SEQ ID NO: 1144605 - DNA, 15 bp, Homo sapiens
tttactgacagtcta

SEQ ID NO: 1144606 - DNA, 15 bp, Homo sapiens
ctttactgacagtct

SEQ ID NO: 1144607 - DNA, 15 bp, Homo sapiens
tctttactgacagtc

SEQ ID NO: 1144608 - DNA, 15 bp, Homo sapiens
atctttactgacagt

SEQ ID NO: 1144609 - DNA, 15 bp, Homo sapiens
catctttactgacag

SEQ ID NO: 1144610 - DNA, 15 bp, Homo sapiens
ccatctttactgaca

SEQ ID NO: 1144611 - DNA, 15 bp, Homo sapiens
accatctttactgac

SEQ ID NO: 1144612 - DNA, 15 bp, Homo sapiens
aaccatctttactga

SEQ ID NO: 1144613 - DNA, 15 bp, Homo sapiens
caaccatctttactg

SEQ ID NO: 1144614 - DNA, 15 bp, Homo sapiens
tcaaccatctttact

SEQ ID NO: 1144615 - DNA, 15 bp, Homo sapiens
ttcaaccatctttac

SEQ ID NO: 1144616 - DNA, 15 bp, Homo sapiens
attcaaccatcttta

SEQ ID NO: 1144617 - DNA, 15 bp, Homo sapiens
gattcaaccatcttt

SEQ ID NO: 1144618 - DNA, 15 bp, Homo sapiens
tgattcaaccatctt

SEQ ID NO: 1144619 - DNA, 15 bp, Homo sapiens
ttgattcaaccatct

SEQ ID NO: 1144620 - DNA, 15 bp, Homo sapiens
attgattcaaccatc

SEQ ID NO: 1144621 - DNA, 15 bp, Homo sapiens
cattgattcaaccat

SEQ ID NO: 1144622 - DNA, 15 bp, Homo sapiens
tcattgattcaacca

SEQ ID NO: 1144623 - DNA, 15 bp, Homo sapiens
ttcattgattcaacc

SEQ ID NO: 1144624 - DNA, 15 bp, Homo sapiens
attcattgattcaac

SEQ ID NO: 1144625 - DNA, 15 bp, Homo sapiens
tattcattgattcaa

SEQ ID NO: 1144626 - DNA, 15 bp, Homo sapiens
ctattcattgattca

SEQ ID NO: 1144627 - DNA, 15 bp, Homo sapiens
tctattcattgattc

SEQ ID NO: 1144628 - DNA, 15 bp, Homo sapiens
atctattcattgatt

SEQ ID NO: 1144629 - DNA, 15 bp, Homo sapiens
catctattcattgat

SEQ ID NO: 1144630 - DNA, 15 bp, Homo sapiens
tcatctattcattga

SEQ ID NO: 1144631 - DNA, 15 bp, Homo sapiens
atcatctattcattg

SEQ ID NO: 1144632 - DNA, 15 bp, Homo sapiens
aatcatctattcatt

SEQ ID NO: 1144633 - DNA, 15 bp, Homo sapiens
caatcatctattcat

SEQ ID NO: 1144634 - DNA, 15 bp, Homo sapiens
tcaatcatctattca

SEQ ID NO: 1144635 - DNA, 15 bp, Homo sapiens
ttcaatcatctattc

SEQ ID NO: 1144636 - DNA, 15 bp, Homo sapiens
attcaatcatctatt

SEQ ID NO: 1144637 - DNA, 15 bp, Homo sapiens
aattcaatcatctat

SEQ ID NO: 1144638 - DNA, 15 bp, Homo sapiens
taattcaatcatcta

SEQ ID NO: 1144639 - DNA, 15 bp, Homo sapiens
ttaattcaatcatct

SEQ ID NO: 1144640 - DNA, 15 bp, Homo sapiens
attaattcaatcatc

SEQ ID NO: 1144641 - DNA, 15 bp, Homo sapiens
aattaattcaatcat

SEQ ID NO: 1144642 - DNA, 15 bp, Homo sapiens
aaattaattcaatca

SEQ ID NO: 1144643 - DNA, 15 bp, Homo sapiens
taaattaattcaatc

SEQ ID NO: 1144644 - DNA, 15 bp, Homo sapiens
gtaaattaattcaat

SEQ ID NO: 1144645 - DNA, 15 bp, Homo sapiens
ttgtaaattaattca

SEQ ID NO: 1144646 - DNA, 15 bp, Homo sapiens
tttgtaaattaattc

SEQ ID NO: 1144647 - DNA, 15 bp, Homo sapiens
ctttgtaaattaatt

SEQ ID NO: 1144648 - DNA, 15 bp, Homo sapiens
tctttgtaaattaat

SEQ ID NO: 1144649 - DNA, 15 bp, Homo sapiens
ctctttgtaaattaa

SEQ ID NO: 1144650 - DNA, 15 bp, Homo sapiens
tctctttgtaaatta

SEQ ID NO: 1144651 - DNA, 15 bp, Homo sapiens
gtctctttgtaaatt

SEQ ID NO: 1144652 - DNA, 15 bp, Homo sapiens
agtctctttgtaaat

SEQ ID NO: 1144653 - DNA, 15 bp, Homo sapiens
aagtctctttgtaaa

SEQ ID NO: 1144654 - DNA, 15 bp, Homo sapiens
caagtctctttgtaa

SEQ ID NO: 1144655 - DNA, 15 bp, Homo sapiens
gcaagtctctttgta

SEQ ID NO: 1144656 - DNA, 15 bp, Homo sapiens
agcaagtctctttgt

SEQ ID NO: 1144657 - DNA, 15 bp, Homo sapiens
aagcaagtctctttg

SEQ ID NO: 1144658 - DNA, 15 bp, Homo sapiens
aaagcaagtctcttt

SEQ ID NO: 1144659 - DNA, 15 bp, Homo sapiens
taaagcaagtctctt

SEQ ID NO: 1144660 - DNA, 15 bp, Homo sapiens
ctaaagcaagtctct

SEQ ID NO: 1144661 - DNA, 15 bp, Homo sapiens
actaaagcaagtctc

SEQ ID NO: 1144662 - DNA, 15 bp, Homo sapiens
tactaaagcaagtct

SEQ ID NO: 1144663 - DNA, 15 bp, Homo sapiens
ttactaaagcaagtc

SEQ ID NO: 1144664 - DNA, 15 bp, Homo sapiens
attactaaagcaagt

SEQ ID NO: 1144665 - DNA, 15 bp, Homo sapiens
aattactaaagcaag

SEQ ID NO: 1144666 - DNA, 15 bp, Homo sapiens
caattactaaagcaa

SEQ ID NO: 1144667 - DNA, 15 bp, Homo sapiens
acaattactaaagca

SEQ ID NO: 1144668 - DNA, 15 bp, Homo sapiens
gacaattactaaagc

SEQ ID NO: 1144669 - DNA, 15 bp, Homo sapiens
tgacaattactaaag

SEQ ID NO: 1144670 - DNA, 15 bp, Homo sapiens
ttgacaattactaaa

SEQ ID NO: 1144671 - DNA, 15 bp, Homo sapiens
gttgacaattactaa

SEQ ID NO: 1144672 - DNA, 15 bp, Homo sapiens
agttgacaattacta

SEQ ID NO: 1144673 - DNA, 15 bp, Homo sapiens
gagttgacaattact

SEQ ID NO: 1144674 - DNA, 15 bp, Homo sapiens
agagttgacaattac

SEQ ID NO: 1144675 - DNA, 15 bp, Homo sapiens
aagagttgacaatta

SEQ ID NO: 1144676 - DNA, 15 bp, Homo sapiens
gaagagttgacaatt

SEQ ID NO: 1144677 - DNA, 15 bp, Homo sapiens
tgaagagttgacaat

SEQ ID NO: 1144678 - DNA, 15 bp, Homo sapiens
gtgaagagttgacaa

SEQ ID NO: 1144679 - DNA, 15 bp, Homo sapiens
agtgaagagttgaca

SEQ ID NO: 1144680 - DNA, 15 bp, Homo sapiens
aagtgaagagttgac

SEQ ID NO: 1144681 - DNA, 15 bp, Homo sapiens
taagtgaagagttga

SEQ ID NO: 1144682 - DNA, 15 bp, Homo sapiens
ataagtgaagagttg

SEQ ID NO: 1144683 - DNA, 15 bp, Homo sapiens
aataagtgaagagtt

SEQ ID NO: 1144684 - DNA, 15 bp, Homo sapiens
gaataagtgaagagt

SEQ ID NO: 1144685 - DNA, 15 bp, Homo sapiens
tgaataagtgaagag

SEQ ID NO: 1144686 - DNA, 15 bp, Homo sapiens
ttgaataagtgaaga

SEQ ID NO: 1144687 - DNA, 15 bp, Homo sapiens
gttgaataagtgaag

SEQ ID NO: 1144688 - DNA, 15 bp, Homo sapiens
tgttgaataagtgaa

SEQ ID NO: 1144689 - DNA, 15 bp, Homo sapiens
ttgttgaataagtga

SEQ ID NO: 1144690 - DNA, 15 bp, Homo sapiens
tttgttgaataagtg

SEQ ID NO: 1144691 - DNA, 15 bp, Homo sapiens
atttgttgaataagt

SEQ ID NO: 1144692 - DNA, 15 bp, Homo sapiens
tatttgttgaataag

SEQ ID NO: 1144693 - DNA, 15 bp, Homo sapiens
atatttgttgaataa

SEQ ID NO: 1144694 - DNA, 15 bp, Homo sapiens
aatatttgttgaata

SEQ ID NO: 1144695 - DNA, 15 bp, Homo sapiens
aaatatttgttgaat

SEQ ID NO: 1144696 - DNA, 15 bp, Homo sapiens
caaatatttgttgaa

SEQ ID NO: 1144697 - DNA, 15 bp, Homo sapiens
ctcaaatatttgttg

SEQ ID NO: 1144698 - DNA, 15 bp, Homo sapiens
cctcaaatatttgtt

SEQ ID NO: 1144699 - DNA, 15 bp, Homo sapiens
ccctcaaatatttgt

SEQ ID NO: 1144700 - DNA, 15 bp, Homo sapiens
accctcaaatatttg

SEQ ID NO: 1144701 - DNA, 15 bp, Homo sapiens
caccctcaaatattt

SEQ ID NO: 1144702 - DNA, 15 bp, Homo sapiens
acaccctcaaatatt

SEQ ID NO: 1144703 - DNA, 15 bp, Homo sapiens
aacaccctcaaatat

SEQ ID NO: 1144704 - DNA, 15 bp, Homo sapiens
aaacaccctcaaata

SEQ ID NO: 1144705 - DNA, 15 bp, Homo sapiens
gaaacaccctcaaat

SEQ ID NO: 1144706 - DNA, 15 bp, Homo sapiens
tgaaacaccctcaaa

SEQ ID NO: 1144707 - DNA, 15 bp, Homo sapiens
atgaaacaccctcaa

SEQ ID NO: 1144708 - DNA, 15 bp, Homo sapiens
catgaaacaccctca

SEQ ID NO: 1144709 - DNA, 15 bp, Homo sapiens
acatgaaacaccctc

SEQ ID NO: 1144710 - DNA, 15 bp, Homo sapiens
cacatgaaacaccct

SEQ ID NO: 1144711 - DNA, 15 bp, Homo sapiens
gcacatgaaacaccc

SEQ ID NO: 1144712 - DNA, 15 bp, Homo sapiens
cgcacatgaaacacc

SEQ ID NO: 1144713 - DNA, 15 bp, Homo sapiens
tcgcacatgaaacac

SEQ ID NO: 1144714 - DNA, 15 bp, Homo sapiens
ttcgcacatgaaaca

SEQ ID NO: 1144715 - DNA, 15 bp, Homo sapiens
cttcgcacatgaaac

SEQ ID NO: 1144716 - DNA, 15 bp, Homo sapiens
acttcgcacatgaaa

SEQ ID NO: 1144717 - DNA, 15 bp, Homo sapiens
tacttcgcacatgaa

SEQ ID NO: 1144718 - DNA, 15 bp, Homo sapiens
gtacttcgcacatga

SEQ ID NO: 1144719 - DNA, 15 bp, Homo sapiens
ggtacttcgcacatg

SEQ ID NO: 1144720 - DNA, 15 bp, Homo sapiens
tggtacttcgcacat

SEQ ID NO: 1144721 - DNA, 15 bp, Homo sapiens
atggtacttcgcaca

SEQ ID NO: 1144722 - DNA, 15 bp, Homo sapiens
aatggtacttcgcac

SEQ ID NO: 1144723 - DNA, 15 bp, Homo sapiens
gaatggtacttcgca

SEQ ID NO: 1144724 - DNA, 15 bp, Homo sapiens
agaatggtacttcgc

SEQ ID NO: 1144725 - DNA, 15 bp, Homo sapiens
cagaatggtacttcg

SEQ ID NO: 1144726 - DNA, 15 bp, Homo sapiens
acagaatggtacttc

SEQ ID NO: 1144727 - DNA, 15 bp, Homo sapiens
cacagaatggtactt

SEQ ID NO: 1144728 - DNA, 15 bp, Homo sapiens
acacagaatggtact

SEQ ID NO: 1144729 - DNA, 15 bp, Homo sapiens
cacacagaatggtac

SEQ ID NO: 1144730 - DNA, 15 bp, Homo sapiens
acacacagaatggta

SEQ ID NO: 1144731 - DNA, 15 bp, Homo sapiens
aacacacagaatggt

SEQ ID NO: 1144732 - DNA, 15 bp, Homo sapiens
gaacacacagaatgg

SEQ ID NO: 1144733 - DNA, 15 bp, Homo sapiens
cgaacacacagaatg

SEQ ID NO: 1144734 - DNA, 15 bp, Homo sapiens
acgaacacacagaat

SEQ ID NO: 1144735 - DNA, 15 bp, Homo sapiens
tacgaacacacagaa

SEQ ID NO: 1144736 - DNA, 15 bp, Homo sapiens
ttacgaacacacaga

SEQ ID NO: 1144737 - DNA, 15 bp, Homo sapiens
attacgaacacacag

SEQ ID NO: 1144738 - DNA, 15 bp, Homo sapiens
tattacgaacacaca

SEQ ID NO: 1144739 - DNA, 15 bp, Homo sapiens
atattacgaacacac

SEQ ID NO: 1144740 - DNA, 15 bp, Homo sapiens
tatattacgaacaca

SEQ ID NO: 1144741 - DNA, 15 bp, Homo sapiens
atatattacgaacac

SEQ ID NO: 1144742 - DNA, 15 bp, Homo sapiens
gatatattacgaaca

SEQ ID NO: 1144743 - DNA, 15 bp, Homo sapiens
tgatatattacgaac

SEQ ID NO: 1144744 - DNA, 15 bp, Homo sapiens
ctgatatattacgaa

SEQ ID NO: 1144745 - DNA, 15 bp, Homo sapiens
actgatatattacga

SEQ ID NO: 1144746 - DNA, 15 bp, Homo sapiens
cactgatatattacg

SEQ ID NO: 1144747 - DNA, 15 bp, Homo sapiens
tcactgatatattac

SEQ ID NO: 1144748 - DNA, 15 bp, Homo sapiens
ttcactgatatatta

SEQ ID NO: 1144749 - DNA, 15 bp, Homo sapiens
gttcactgatatatt

SEQ ID NO: 1144750 - DNA, 15 bp, Homo sapiens
tgttcactgatatat

SEQ ID NO: 1144751 - DNA, 15 bp, Homo sapiens
ttgttcactgatata

SEQ ID NO: 1144752 - DNA, 15 bp, Homo sapiens
tttgttcactgatat

SEQ ID NO: 1144753 - DNA, 15 bp, Homo sapiens
ctttgttcactgata

SEQ ID NO: 1144754 - DNA, 15 bp, Homo sapiens
gctttgttcactgat

SEQ ID NO: 1144755 - DNA, 15 bp, Homo sapiens
tgctttgttcactga

SEQ ID NO: 1144756 - DNA, 15 bp, Homo sapiens
gtgctttgttcactg

SEQ ID NO: 1144757 - DNA, 15 bp, Homo sapiens
tgtgctttgttcact

SEQ ID NO: 1144758 - DNA, 15 bp, Homo sapiens
ctgtgctttgttcac

SEQ ID NO: 1144759 - DNA, 15 bp, Homo sapiens
tctgtgctttgttca

SEQ ID NO: 1144760 - DNA, 15 bp, Homo sapiens
atctgtgctttgttc

SEQ ID NO: 1144761 - DNA, 15 bp, Homo sapiens
gatctgtgctttgtt

SEQ ID NO: 1144762 - DNA, 15 bp, Homo sapiens
agatctgtgctttgt

SEQ ID NO: 1144763 - DNA, 15 bp, Homo sapiens
gagatctgtgctttg

SEQ ID NO: 1144764 - DNA, 15 bp, Homo sapiens
agagatctgtgcttt

SEQ ID NO: 1144765 - DNA, 15 bp, Homo sapiens
cagagatctgtgctt

SEQ ID NO: 1144766 - DNA, 15 bp, Homo sapiens
acagagatctgtgct

SEQ ID NO: 1144767 - DNA, 15 bp, Homo sapiens
gacagagatctgtgc

SEQ ID NO: 1144768 - DNA, 15 bp, Homo sapiens
ggacagagatctgtg

SEQ ID NO: 1144769 - DNA, 15 bp, Homo sapiens
aggacagagatctgt

SEQ ID NO: 1144770 - DNA, 15 bp, Homo sapiens
aaggacagagatctg

SEQ ID NO: 1144771 - DNA, 15 bp, Homo sapiens
aaaggacagagatct

SEQ ID NO: 1144772 - DNA, 15 bp, Homo sapiens
aaaaggacagagatc

SEQ ID NO: 1144773 - DNA, 15 bp, Homo sapiens
caaaaggacagagat

SEQ ID NO: 1144774 - DNA, 15 bp, Homo sapiens
ccaaaaggacagaga

SEQ ID NO: 1144775 - DNA, 15 bp, Homo sapiens
accaaaaggacagag

SEQ ID NO: 1144776 - DNA, 15 bp, Homo sapiens
caccaaaaggacaga

SEQ ID NO: 1144777 - DNA, 15 bp, Homo sapiens
gcaccaaaaggacag

SEQ ID NO: 1144778 - DNA, 15 bp, Homo sapiens
agcaccaaaaggaca

SEQ ID NO: 1144779 - DNA, 15 bp, Homo sapiens
aagcaccaaaaggac

SEQ ID NO: 1144780 - DNA, 15 bp, Homo sapiens
taagcaccaaaagga

SEQ ID NO: 1144781 - DNA, 15 bp, Homo sapiens
gtaagcaccaaaagg

SEQ ID NO: 1144782 - DNA, 15 bp, Homo sapiens
tgtaagcaccaaaag

SEQ ID NO: 1144783 - DNA, 15 bp, Homo sapiens
atgtaagcaccaaaa

SEQ ID NO: 1144784 - DNA, 15 bp, Homo sapiens
aatgtaagcaccaaa

SEQ ID NO: 1144785 - DNA, 15 bp, Homo sapiens
gaatgtaagcaccaa

SEQ ID NO: 1144786 - DNA, 15 bp, Homo sapiens
ggaatgtaagcacca

SEQ ID NO: 1144787 - DNA, 15 bp, Homo sapiens
tggaatgtaagcacc

SEQ ID NO: 1144788 - DNA, 15 bp, Homo sapiens
ctggaatgtaagcac

SEQ ID NO: 1144789 - DNA, 15 bp, Homo sapiens
actggaatgtaagca

SEQ ID NO: 1144790 - DNA, 15 bp, Homo sapiens
tactggaatgtaagc

SEQ ID NO: 1144791 - DNA, 15 bp, Homo sapiens
ctactggaatgtaag

SEQ ID NO: 1144792 - DNA, 15 bp, Homo sapiens
tctactggaatgtaa

SEQ ID NO: 1144793 - DNA, 15 bp, Homo sapiens
ctctactggaatgta

SEQ ID NO: 1144794 - DNA, 15 bp, Homo sapiens
cctctactggaatgt

SEQ ID NO: 1144795 - DNA, 15 bp, Homo sapiens
ccctctactggaatg

SEQ ID NO: 1144796 - DNA, 15 bp, Homo sapiens
tccctctactggaat

SEQ ID NO: 1144797 - DNA, 15 bp, Homo sapiens
ctccctctactggaa

SEQ ID NO: 1144798 - DNA, 15 bp, Homo sapiens
tctccctctactgga

SEQ ID NO: 1144799 - DNA, 15 bp, Homo sapiens
atctccctctactgg

SEQ ID NO: 1144800 - DNA, 15 bp, Homo sapiens
tatctccctctactg

SEQ ID NO: 1144801 - DNA, 15 bp, Homo sapiens
ctatctccctctact

SEQ ID NO: 1144802 - DNA, 15 bp, Homo sapiens
tctatctccctctac

SEQ ID NO: 1144803 - DNA, 15 bp, Homo sapiens
atctatctccctcta

SEQ ID NO: 1144804 - DNA, 15 bp, Homo sapiens
catctatctccctct

SEQ ID NO: 1144805 - DNA, 15 bp, Homo sapiens
tcatctatctccctc

SEQ ID NO: 1144806 - DNA, 15 bp, Homo sapiens
atcatctatctccct

SEQ ID NO: 1144807 - DNA, 15 bp, Homo sapiens
tatcatctatctccc

SEQ ID NO: 1144808 - DNA, 15 bp, Homo sapiens
ttatcatctatctcc

SEQ ID NO: 1144809 - DNA, 15 bp, Homo sapiens
tttatcatctatctc

SEQ ID NO: 1144810 - DNA, 15 bp, Homo sapiens
gtttatcatctatct

SEQ ID NO: 1144811 - DNA, 15 bp, Homo sapiens
agtttatcatctatc

SEQ ID NO: 1144812 - DNA, 15 bp, Homo sapiens
aagtttatcatctat

SEQ ID NO: 1144813 - DNA, 15 bp, Homo sapiens
aaagtttatcatcta

SEQ ID NO: 1144814 - DNA, 15 bp, Homo sapiens
gaaagtttatcatct

SEQ ID NO: 1144815 - DNA, 15 bp, Homo sapiens
ggaaagtttatcatc

SEQ ID NO: 1144816 - DNA, 15 bp, Homo sapiens
aggaaagtttatcat

SEQ ID NO: 1144817 - DNA, 15 bp, Homo sapiens
caggaaagtttatca

SEQ ID NO: 1144818 - DNA, 15 bp, Homo sapiens
tcaggaaagtttatc

SEQ ID NO: 1144819 - DNA, 15 bp, Homo sapiens
gtcaggaaagtttat

SEQ ID NO: 1144820 - DNA, 15 bp, Homo sapiens
agtcaggaaagttta

SEQ ID NO: 1144821 - DNA, 15 bp, Homo sapiens
cagtcaggaaagttt

SEQ ID NO: 1144822 - DNA, 15 bp, Homo sapiens
ccagtcaggaaagtt

SEQ ID NO: 1144823 - DNA, 15 bp, Homo sapiens
cccagtcaggaaagt

SEQ ID NO: 1144824 - DNA, 15 bp, Homo sapiens
tcccagtcaggaaag

SEQ ID NO: 1144825 - DNA, 15 bp, Homo sapiens
ctcccagtcaggaaa

SEQ ID NO: 1144826 - DNA, 15 bp, Homo sapiens
actcccagtcaggaa

SEQ ID NO: 1144827 - DNA, 15 bp, Homo sapiens
gactcccagtcagga

SEQ ID NO: 1144828 - DNA, 15 bp, Homo sapiens
ggactcccagtcagg

SEQ ID NO: 1144829 - DNA, 15 bp, Homo sapiens
aggactcccagtcag

SEQ ID NO: 1144830 - DNA, 15 bp, Homo sapiens
caggactcccagtca

SEQ ID NO: 1144831 - DNA, 15 bp, Homo sapiens
ccaggactcccagtc

SEQ ID NO: 1144832 - DNA, 15 bp, Homo sapiens
gccaggactcccagt

SEQ ID NO: 1144833 - DNA, 15 bp, Homo sapiens
tgccaggactcccag

SEQ ID NO: 1144834 - DNA, 15 bp, Homo sapiens
ttgccaggactccca

SEQ ID NO: 1144835 - DNA, 15 bp, Homo sapiens
tttgccaggactccc

SEQ ID NO: 1144836 - DNA, 15 bp, Homo sapiens
ctttgccaggactcc

SEQ ID NO: 1144837 - DNA, 15 bp, Homo sapiens
cctttgccaggactc

SEQ ID NO: 1144838 - DNA, 15 bp, Homo sapiens
gcctttgccaggact

SEQ ID NO: 1144839 - DNA, 15 bp, Homo sapiens
tgcctttgccaggac

SEQ ID NO: 1144840 - DNA, 15 bp, Homo sapiens
atgcctttgccagga

SEQ ID NO: 1144841 - DNA, 15 bp, Homo sapiens
gatgcctttgccagg

SEQ ID NO: 1144842 - DNA, 15 bp, Homo sapiens
ggatgcctttgccag

SEQ ID NO: 1144843 - DNA, 15 bp, Homo sapiens
aggatgcctttgcca

SEQ ID NO: 1144844 - DNA, 15 bp, Homo sapiens
caggatgcctttgcc

SEQ ID NO: 1144845 - DNA, 15 bp, Homo sapiens
tcaggatgcctttgc

SEQ ID NO: 1144846 - DNA, 15 bp, Homo sapiens
ctcaggatgcctttg

SEQ ID NO: 1144847 - DNA, 15 bp, Homo sapiens
gctcaggatgccttt

SEQ ID NO: 1144848 - DNA, 15 bp, Homo sapiens
tgctcaggatgcctt

SEQ ID NO: 1144849 - DNA, 15 bp, Homo sapiens
ttgctcaggatgcct

SEQ ID NO: 1144850 - DNA, 15 bp, Homo sapiens
tttgctcaggatgcc

SEQ ID NO: 1144851 - DNA, 15 bp, Homo sapiens
atttgctcaggatgc

SEQ ID NO: 1144852 - DNA, 15 bp, Homo sapiens
tatttgctcaggatg

SEQ ID NO: 1144853 - DNA, 15 bp, Homo sapiens
ttatttgctcaggat

SEQ ID NO: 1144854 - DNA, 15 bp, Homo sapiens
cttatttgctcagga

SEQ ID NO: 1144855 - DNA, 15 bp, Homo sapiens
acttatttgctcagg

SEQ ID NO: 1144856 - DNA, 15 bp, Homo sapiens
gacttatttgctcag

SEQ ID NO: 1144857 - DNA, 15 bp, Homo sapiens
tgacttatttgctca

SEQ ID NO: 1144858 - DNA, 15 bp, Homo sapiens
ttgacttatttgctc

SEQ ID NO: 1144859 - DNA, 15 bp, Homo sapiens
tttgacttatttgct

SEQ ID NO: 1144860 - DNA, 15 bp, Homo sapiens
ttttgacttatttgc

SEQ ID NO: 1144861 - DNA, 15 bp, Homo sapiens
tttttgacttatttg

SEQ ID NO: 1144862 - DNA, 15 bp, Homo sapiens
ttttttgacttattt

SEQ ID NO: 1144863 - DNA, 15 bp, Homo sapiens
tttttttgacttatt

SEQ ID NO: 1144864 - DNA, 15 bp, Homo sapiens
ttttttttgacttat

SEQ ID NO: 1144865 - DNA, 15 bp, Homo sapiens
tttttttttgactta

SEQ ID NO: 1144866 - DNA, 15 bp, Homo sapiens
ttttttttttgactt

SEQ ID NO: 1144867 - DNA, 15 bp, Homo sapiens
tttttttttttgact

SEQ ID NO: 1144868 - DNA, 15 bp, Homo sapiens
ttttttttttttgac

SEQ ID NO: 1144869 - DNA, 15 bp, Homo sapiens
tcccttttttttttt

SEQ ID NO: 1144870 - DNA, 15 bp, Homo sapiens
ttccctttttttttt

SEQ ID NO: 1144871 - DNA, 15 bp, Homo sapiens
tttcccttttttttt

SEQ ID NO: 1144872 - DNA, 15 bp, Homo sapiens
ttttccctttttttt

SEQ ID NO: 1144873 - DNA, 15 bp, Homo sapiens
cttttcccttttttt

SEQ ID NO: 1144874 - DNA, 15 bp, Homo sapiens
gcttttccctttttt

SEQ ID NO: 1144875 - DNA, 15 bp, Homo sapiens
tgcttttcccttttt

SEQ ID NO: 1144876 - DNA, 15 bp, Homo sapiens
gtcttgcttttccct

SEQ ID NO: 1144877 - DNA, 15 bp, Homo sapiens
tgtcttgcttttccc

SEQ ID NO: 1144878 - DNA, 15 bp, Homo sapiens
atgtcttgcttttcc

SEQ ID NO: 1144879 - DNA, 15 bp, Homo sapiens
aatgtcttgcttttc

SEQ ID NO: 1144880 - DNA, 15 bp, Homo sapiens
aaatgtcttgctttt

SEQ ID NO: 1144881 - DNA, 15 bp, Homo sapiens
taaatgtcttgcttt

SEQ ID NO: 1144882 - DNA, 15 bp, Homo sapiens
ctaaatgtcttgctt

SEQ ID NO: 1144883 - DNA, 15 bp, Homo sapiens
cctaaatgtcttgct

SEQ ID NO: 1144884 - DNA, 15 bp, Homo sapiens
ccctaaatgtcttgc

SEQ ID NO: 1144885 - DNA, 15 bp, Homo sapiens
gccctaaatgtcttg

SEQ ID NO: 1144886 - DNA, 15 bp, Homo sapiens
ggccctaaatgtctt

SEQ ID NO: 1144887 - DNA, 15 bp, Homo sapiens
aggccctaaatgtct

SEQ ID NO: 1144888 - DNA, 15 bp, Homo sapiens
aaggccctaaatgtc

SEQ ID NO: 1144889 - DNA, 15 bp, Homo sapiens
caaggccctaaatgt

SEQ ID NO: 1144890 - DNA, 15 bp, Homo sapiens
acaaggccctaaatg

SEQ ID NO: 1144891 - DNA, 15 bp, Homo sapiens
tacaaggccctaaat

SEQ ID NO: 1144892 - DNA, 15 bp, Homo sapiens
ttacaaggccctaaa

SEQ ID NO: 1144893 - DNA, 15 bp, Homo sapiens
tttacaaggccctaa

SEQ ID NO: 1144894 - DNA, 15 bp, Homo sapiens
gtttacaaggcccta

SEQ ID NO: 1144895 - DNA, 15 bp, Homo sapiens
ggtttacaaggccct

SEQ ID NO: 1144896 - DNA, 15 bp, Homo sapiens
aggtttacaaggccc

SEQ ID NO: 1144897 - DNA, 15 bp, Homo sapiens
gaggtttacaaggcc

SEQ ID NO: 1144898 - DNA, 15 bp, Homo sapiens
ggaggtttacaaggc

SEQ ID NO: 1144899 - DNA, 15 bp, Homo sapiens
tggaggtttacaagg

SEQ ID NO: 1144900 - DNA, 15 bp, Homo sapiens
gtggaggtttacaag

SEQ ID NO: 1144901 - DNA, 15 bp, Homo sapiens
tgtggaggtttacaa

SEQ ID NO: 1144902 - DNA, 15 bp, Homo sapiens
ttgtggaggtttaca

SEQ ID NO: 1144903 - DNA, 15 bp, Homo sapiens
tttgtggaggtttac

SEQ ID NO: 1144904 - DNA, 15 bp, Homo sapiens
ctttgtggaggttta

SEQ ID NO: 1144905 - DNA, 15 bp, Homo sapiens
tctttgtggaggttt

SEQ ID NO: 1144906 - DNA, 15 bp, Homo sapiens
gtctttgtggaggtt

SEQ ID NO: 1144907 - DNA, 15 bp, Homo sapiens
agtctttgtggaggt

SEQ ID NO: 1144908 - DNA, 15 bp, Homo sapiens
aagtctttgtggagg

SEQ ID NO: 1144909 - DNA, 15 bp, Homo sapiens
gaagtctttgtggag

SEQ ID NO: 1144910 - DNA, 15 bp, Homo sapiens
tgaagtctttgtgga

SEQ ID NO: 1144911 - DNA, 15 bp, Homo sapiens
ttgaagtctttgtgg

SEQ ID NO: 1144912 - DNA, 15 bp, Homo sapiens
cttgaagtctttgtg

SEQ ID NO: 1144913 - DNA, 15 bp, Homo sapiens
gtcttgaagtctttg

SEQ ID NO: 1144914 - DNA, 15 bp, Homo sapiens
agtcttgaagtcttt

SEQ ID NO: 1144915 - DNA, 15 bp, Homo sapiens
aagtcttgaagtctt

SEQ ID NO: 1144916 - DNA, 15 bp, Homo sapiens
gaagtcttgaagtct

SEQ ID NO: 1144917 - DNA, 15 bp, Homo sapiens
tgaagtcttgaagtc

SEQ ID NO: 1144918 - DNA, 15 bp, Homo sapiens
ctgaagtcttgaagt

SEQ ID NO: 1144919 - DNA, 15 bp, Homo sapiens
gctgaagtcttgaag

SEQ ID NO: 1144920 - DNA, 15 bp, Homo sapiens
agctgaagtcttgaa

SEQ ID NO: 1144921 - DNA, 15 bp, Homo sapiens
aagctgaagtcttga

SEQ ID NO: 1144922 - DNA, 15 bp, Homo sapiens
aaagctgaagtcttg

SEQ ID NO: 1144923 - DNA, 15 bp, Homo sapiens
gaaagctgaagtctt

SEQ ID NO: 1144924 - DNA, 15 bp, Homo sapiens
tgaaagctgaagtct

SEQ ID NO: 1144925 - DNA, 15 bp, Homo sapiens
gtgaaagctgaagtc

SEQ ID NO: 1144926 - DNA, 15 bp, Homo sapiens
ggtgaaagctgaagt

SEQ ID NO: 1144927 - DNA, 15 bp, Homo sapiens
gggtgaaagctgaag

SEQ ID NO: 1144928 - DNA, 15 bp, Homo sapiens
tgggtgaaagctgaa

SEQ ID NO: 1144929 - DNA, 15 bp, Homo sapiens
ctgggtgaaagctga

SEQ ID NO: 1144930 - DNA, 15 bp, Homo sapiens
actgggtgaaagctg

SEQ ID NO: 1144931 - DNA, 15 bp, Homo sapiens
cactgggtgaaagct

SEQ ID NO: 1144932 - DNA, 15 bp, Homo sapiens
tcactgggtgaaagc

SEQ ID NO: 1144933 - DNA, 15 bp, Homo sapiens
ttcactgggtgaaag

SEQ ID NO: 1144934 - DNA, 15 bp, Homo sapiens
tttcactgggtgaaa

SEQ ID NO: 1144935 - DNA, 15 bp, Homo sapiens
atttcactgggtgaa

SEQ ID NO: 1144936 - DNA, 15 bp, Homo sapiens
catttcactgggtga

SEQ ID NO: 1144937 - DNA, 15 bp, Homo sapiens
ccatttcactgggtg

SEQ ID NO: 1144938 - DNA, 15 bp, Homo sapiens
gccatttcactgggt

SEQ ID NO: 1144939 - DNA, 15 bp, Homo sapiens
tgccatttcactggg

SEQ ID NO: 1144940 - DNA, 15 bp, Homo sapiens
ctgccatttcactgg

SEQ ID NO: 1144941 - DNA, 15 bp, Homo sapiens
gctgccatttcactg

SEQ ID NO: 1144942 - DNA, 15 bp, Homo sapiens
ggctgccatttcact

SEQ ID NO: 1144943 - DNA, 15 bp, Homo sapiens
cggctgccatttcac

SEQ ID NO: 1144944 - DNA, 15 bp, Homo sapiens
gcggctgccatttca

SEQ ID NO: 1144945 - DNA, 15 bp, Homo sapiens
agcggctgccatttc

SEQ ID NO: 1144946 - DNA, 15 bp, Homo sapiens
cagcggctgccattt

SEQ ID NO: 1144947 - DNA, 15 bp, Homo sapiens
ccagcggctgccatt

SEQ ID NO: 1144948 - DNA, 15 bp, Homo sapiens
tccagcggctgccat

SEQ ID NO: 1144949 - DNA, 15 bp, Homo sapiens
ttccagcggctgcca

SEQ ID NO: 1144950 - DNA, 15 bp, Homo sapiens
cttccagcggctgcc

SEQ ID NO: 1144951 - DNA, 15 bp, Homo sapiens
acttccagcggctgc

SEQ ID NO: 1144952 - DNA, 15 bp, Homo sapiens
aacttccagcggctg

SEQ ID NO: 1144953 - DNA, 15 bp, Homo sapiens
aaacttccagcggct

SEQ ID NO: 1144954 - DNA, 15 bp, Homo sapiens
gaaacttccagcggc

SEQ ID NO: 1144955 - DNA, 15 bp, Homo sapiens
agaaacttccagcgg

SEQ ID NO: 1144956 - DNA, 15 bp, Homo sapiens
cagaaacttccagcg

SEQ ID NO: 1144957 - DNA, 15 bp, Homo sapiens
tcagaaacttccagc

SEQ ID NO: 1144958 - DNA, 15 bp, Homo sapiens
ctcagaaacttccag

SEQ ID NO: 1144959 - DNA, 15 bp, Homo sapiens
gctcagaaacttcca

SEQ ID NO: 1144960 - DNA, 15 bp, Homo sapiens
agctcagaaacttcc

SEQ ID NO: 1144961 - DNA, 15 bp, Homo sapiens
cagctcagaaacttc

SEQ ID NO: 1144962 - DNA, 15 bp, Homo sapiens
tcagctcagaaactt

SEQ ID NO: 1144963 - DNA, 15 bp, Homo sapiens
ctcagctcagaaact

SEQ ID NO: 1144964 - DNA, 15 bp, Homo sapiens
cctcagctcagaaac

SEQ ID NO: 1144965 - DNA, 15 bp, Homo sapiens
tcctcagctcagaaa

SEQ ID NO: 1144966 - DNA, 15 bp, Homo sapiens
ctcctcagctcagaa

SEQ ID NO: 1144967 - DNA, 15 bp, Homo sapiens
actcctcagctcaga

SEQ ID NO: 1144968 - DNA, 15 bp, Homo sapiens
tactcctcagctcag

SEQ ID NO: 1144969 - DNA, 15 bp, Homo sapiens
ctactcctcagctca

SEQ ID NO: 1144970 - DNA, 15 bp, Homo sapiens
gctactcctcagctc

SEQ ID NO: 1144971 - DNA, 15 bp, Homo sapiens
tgctactcctcagct

SEQ ID NO: 1144972 - DNA, 15 bp, Homo sapiens
atgctactcctcagc

SEQ ID NO: 1144973 - DNA, 15 bp, Homo sapiens
catgctactcctcag

SEQ ID NO: 1144974 - DNA, 15 bp, Homo sapiens
ccatgctactcctca

SEQ ID NO: 1144975 - DNA, 15 bp, Homo sapiens
accatgctactcctc

SEQ ID NO: 1144976 - DNA, 15 bp, Homo sapiens
gaccatgctactcct

SEQ ID NO: 1144977 - DNA, 15 bp, Homo sapiens
tgaccatgctactcc

SEQ ID NO: 1144978 - DNA, 15 bp, Homo sapiens
ctgaccatgctactc

SEQ ID NO: 1144979 - DNA, 15 bp, Homo sapiens
tctgaccatgctact

SEQ ID NO: 1144980 - DNA, 15 bp, Homo sapiens
gtctgaccatgctac

SEQ ID NO: 1144981 - DNA, 15 bp, Homo sapiens
agtctgaccatgcta

SEQ ID NO: 1144982 - DNA, 15 bp, Homo sapiens
aagtctgaccatgct

SEQ ID NO: 1144983 - DNA, 15 bp, Homo sapiens
caagtctgaccatgc

SEQ ID NO: 1144984 - DNA, 15 bp, Homo sapiens
gcaagtctgaccatg

SEQ ID NO: 1144985 - DNA, 15 bp, Homo sapiens
tgcaagtctgaccat

SEQ ID NO: 1144986 - DNA, 15 bp, Homo sapiens
atgcaagtctgacca

SEQ ID NO: 1144987 - DNA, 15 bp, Homo sapiens
aatgcaagtctgacc

SEQ ID NO: 1144988 - DNA, 15 bp, Homo sapiens
aaatgcaagtctgac

SEQ ID NO: 1144989 - DNA, 15 bp, Homo sapiens
aaaatgcaagtctga

SEQ ID NO: 1144990 - DNA, 15 bp, Homo sapiens
gaaaatgcaagtctg

SEQ ID NO: 1144991 - DNA, 15 bp, Homo sapiens
tgaaaatgcaagtct

SEQ ID NO: 1144992 - DNA, 15 bp, Homo sapiens
ttgaaaatgcaagtc

SEQ ID NO: 1144993 - DNA, 15 bp, Homo sapiens
tttgaaaatgcaagt

SEQ ID NO: 1144994 - DNA, 15 bp, Homo sapiens
ctttgaaaatgcaag

SEQ ID NO: 1144995 - DNA, 15 bp, Homo sapiens
gctttgaaaatgcaa

SEQ ID NO: 1144996 - DNA, 15 bp, Homo sapiens
tgctttgaaaatgca

SEQ ID NO: 1144997 - DNA, 15 bp, Homo sapiens
atgctttgaaaatgc

SEQ ID NO: 1144998 - DNA, 15 bp, Homo sapiens
gatgctttgaaaatg

SEQ ID NO: 1144999 - DNA, 15 bp, Homo sapiens
ggatgctttgaaaat

SEQ ID NO: 1145000 - DNA, 15 bp, Homo sapiens
gggatgctttgaaaa

SEQ ID NO: 1145001 - DNA, 15 bp, Homo sapiens
tgggatgctttgaaa

SEQ ID NO: 1145002 - DNA, 15 bp, Homo sapiens
gtgggatgctttgaa

SEQ ID NO: 1145003 - DNA, 15 bp, Homo sapiens
agtgggatgctttga

SEQ ID NO: 1145004 - DNA, 15 bp, Homo sapiens
cagtgggatgctttg

SEQ ID NO: 1145005 - DNA, 15 bp, Homo sapiens
ccagtgggatgcttt

SEQ ID NO: 1145006 - DNA, 15 bp, Homo sapiens
gccagtgggatgctt

SEQ ID NO: 1145007 - DNA, 15 bp, Homo sapiens
agccagtgggatgct

SEQ ID NO: 1145008 - DNA, 15 bp, Homo sapiens
cagccagtgggatgc

SEQ ID NO: 1145009 - DNA, 15 bp, Homo sapiens
gcagccagtgggatg

SEQ ID NO: 1145010 - DNA, 15 bp, Homo sapiens
agcagccagtgggat

SEQ ID NO: 1145011 - DNA, 15 bp, Homo sapiens
cagcagccagtggga

SEQ ID NO: 1145012 - DNA, 15 bp, Homo sapiens
acagcagccagtggg

SEQ ID NO: 1145013 - DNA, 15 bp, Homo sapiens
cacagcagccagtgg

SEQ ID NO: 1145014 - DNA, 15 bp, Homo sapiens
acacagcagccagtg

SEQ ID NO: 1145015 - DNA, 15 bp, Homo sapiens
aacacagcagccagt

SEQ ID NO: 1145016 - DNA, 15 bp, Homo sapiens
caacacagcagccag

SEQ ID NO: 1145017 - DNA, 15 bp, Homo sapiens
tcaacacagcagcca

SEQ ID NO: 1145018 - DNA, 15 bp, Homo sapiens
ctcaacacagcagcc

SEQ ID NO: 1145019 - DNA, 15 bp, Homo sapiens
tctcaacacagcagc

SEQ ID NO: 1145020 - DNA, 15 bp, Homo sapiens
ttctcaacacagcag

SEQ ID NO: 1145021 - DNA, 15 bp, Homo sapiens
attctcaacacagca

SEQ ID NO: 1145022 - DNA, 15 bp, Homo sapiens
tattctcaacacagc

SEQ ID NO: 1145023 - DNA, 15 bp, Homo sapiens
ctattctcaacacag

SEQ ID NO: 1145024 - DNA, 15 bp, Homo sapiens
tctattctcaacaca

SEQ ID NO: 1145025 - DNA, 15 bp, Homo sapiens
gtctattctcaacac

SEQ ID NO: 1145026 - DNA, 15 bp, Homo sapiens
agtctattctcaaca

SEQ ID NO: 1145027 - DNA, 15 bp, Homo sapiens
aagtctattctcaac

SEQ ID NO: 1145028 - DNA, 15 bp, Homo sapiens
caagtctattctcaa

SEQ ID NO: 1145029 - DNA, 15 bp, Homo sapiens
ccaagtctattctca

SEQ ID NO: 1145030 - DNA, 15 bp, Homo sapiens
accaagtctattctc

SEQ ID NO: 1145031 - DNA, 15 bp, Homo sapiens
aaccaagtctattct

SEQ ID NO: 1145032 - DNA, 15 bp, Homo sapiens
caaccaagtctattc

SEQ ID NO: 1145033 - DNA, 15 bp, Homo sapiens
ccaaccaagtctatt

SEQ ID NO: 1145034 - DNA, 15 bp, Homo sapiens
cccaaccaagtctat

SEQ ID NO: 1145035 - DNA, 15 bp, Homo sapiens
tcccaaccaagtcta

SEQ ID NO: 1145036 - DNA, 15 bp, Homo sapiens
ttcccaaccaagtct

SEQ ID NO: 1145037 - DNA, 15 bp, Homo sapiens
attcccaaccaagtc

SEQ ID NO: 1145038 - DNA, 15 bp, Homo sapiens
tattcccaaccaagt

SEQ ID NO: 1145039 - DNA, 15 bp, Homo sapiens
ctattcccaaccaag

SEQ ID NO: 1145040 - DNA, 15 bp, Homo sapiens
cctattcccaaccaa

SEQ ID NO: 1145041 - DNA, 15 bp, Homo sapiens
ccctattcccaacca

SEQ ID NO: 1145042 - DNA, 15 bp, Homo sapiens
tccctattcccaacc

SEQ ID NO: 1145043 - DNA, 15 bp, Homo sapiens
gtccctattcccaac

SEQ ID NO: 1145044 - DNA, 15 bp, Homo sapiens
tgtccctattcccaa

SEQ ID NO: 1145045 - DNA, 15 bp, Homo sapiens
ttgtccctattccca

SEQ ID NO: 1145046 - DNA, 15 bp, Homo sapiens
cttgtccctattccc

SEQ ID NO: 1145047 - DNA, 15 bp, Homo sapiens
tcttgtccctattcc

SEQ ID NO: 1145048 - DNA, 15 bp, Homo sapiens
ctcttgtccctattc

SEQ ID NO: 1145049 - DNA, 15 bp, Homo sapiens
actcttgtccctatt

SEQ ID NO: 1145050 - DNA, 15 bp, Homo sapiens
tactcttgtccctat

SEQ ID NO: 1145051 - DNA, 15 bp, Homo sapiens
ctactcttgtcccta

SEQ ID NO: 1145052 - DNA, 15 bp, Homo sapiens
tctactcttgtccct

SEQ ID NO: 1145053 - DNA, 15 bp, Homo sapiens
ttctactcttgtccc

SEQ ID NO: 1145054 - DNA, 15 bp, Homo sapiens
cttctactcttgtcc

SEQ ID NO: 1145055 - DNA, 15 bp, Homo sapiens
gcttctactcttgtc

SEQ ID NO: 1145056 - DNA, 15 bp, Homo sapiens
tgcttctactcttgt

SEQ ID NO: 1145057 - DNA, 15 bp, Homo sapiens
ttgcttctactcttg

SEQ ID NO: 1145058 - DNA, 15 bp, Homo sapiens
tttgcttctactctt

SEQ ID NO: 1145059 - DNA, 15 bp, Homo sapiens
ctttgcttctactct

SEQ ID NO: 1145060 - DNA, 15 bp, Homo sapiens
tctttgcttctactc

SEQ ID NO: 1145061 - DNA, 15 bp, Homo sapiens
atctttgcttctact

SEQ ID NO: 1145062 - DNA, 15 bp, Homo sapiens
gatctttgcttctac

SEQ ID NO: 1145063 - DNA, 15 bp, Homo sapiens
agatctttgcttcta

SEQ ID NO: 1145064 - DNA, 15 bp, Homo sapiens
gagatctttgcttct

SEQ ID NO: 1145065 - DNA, 15 bp, Homo sapiens
agagatctttgcttc

SEQ ID NO: 1145066 - DNA, 15 bp, Homo sapiens
aagagatctttgctt

SEQ ID NO: 1145067 - DNA, 15 bp, Homo sapiens
gaagagatctttgct

SEQ ID NO: 1145068 - DNA, 15 bp, Homo sapiens
ggaagagatctttgc

SEQ ID NO: 1145069 - DNA, 15 bp, Homo sapiens
gggaagagatctttg

SEQ ID NO: 1145070 - DNA, 15 bp, Homo sapiens
agggaagagatcttt

SEQ ID NO: 1145071 - DNA, 15 bp, Homo sapiens
tagggaagagatctt

SEQ ID NO: 1145072 - DNA, 15 bp, Homo sapiens
atagggaagagatct

SEQ ID NO: 1145073 - DNA, 15 bp, Homo sapiens
aatagggaagagatc

SEQ ID NO: 1145074 - DNA, 15 bp, Homo sapiens
taatagggaagagat

SEQ ID NO: 1145075 - DNA, 15 bp, Homo sapiens
gtaatagggaagaga

SEQ ID NO: 1145076 - DNA, 15 bp, Homo sapiens
agtaatagggaagag

SEQ ID NO: 1145077 - DNA, 15 bp, Homo sapiens
aagtaatagggaaga

SEQ ID NO: 1145078 - DNA, 15 bp, Homo sapiens
gaagtaatagggaag

SEQ ID NO: 1145079 - DNA, 15 bp, Homo sapiens
ggaagtaatagggaa

SEQ ID NO: 1145080 - DNA, 15 bp, Homo sapiens
gggaagtaataggga

SEQ ID NO: 1145081 - DNA, 15 bp, Homo sapiens
agggaagtaataggg

SEQ ID NO: 1145082 - DNA, 15 bp, Homo sapiens
tagggaagtaatagg

SEQ ID NO: 1145083 - DNA, 15 bp, Homo sapiens
atagggaagtaatag

SEQ ID NO: 1145084 - DNA, 15 bp, Homo sapiens
ttatagggaagtaat

SEQ ID NO: 1145085 - DNA, 15 bp, Homo sapiens
cttatagggaagtaa

SEQ ID NO: 1145086 - DNA, 15 bp, Homo sapiens
tcttatagggaagta

SEQ ID NO: 1145087 - DNA, 15 bp, Homo sapiens
ttcttatagggaagt

SEQ ID NO: 1145088 - DNA, 15 bp, Homo sapiens
cttcttatagggaag

SEQ ID NO: 1145089 - DNA, 15 bp, Homo sapiens
tcttcttatagggaa

SEQ ID NO: 1145090 - DNA, 15 bp, Homo sapiens
ttcttcttataggga

SEQ ID NO: 1145091 - DNA, 15 bp, Homo sapiens
tttcttcttataggg

SEQ ID NO: 1145092 - DNA, 15 bp, Homo sapiens
atttcttcttatagg

SEQ ID NO: 1145093 - DNA, 15 bp, Homo sapiens
catttcttcttatag

SEQ ID NO: 1145094 - DNA, 15 bp, Homo sapiens
gcatttcttcttata

SEQ ID NO: 1145095 - DNA, 15 bp, Homo sapiens
tgcatttcttcttat

SEQ ID NO: 1145096 - DNA, 15 bp, Homo sapiens
ctgcatttcttctta

SEQ ID NO: 1145097 - DNA, 15 bp, Homo sapiens
actgcatttcttctt

SEQ ID NO: 1145098 - DNA, 15 bp, Homo sapiens
tactgcatttcttct

SEQ ID NO: 1145099 - DNA, 15 bp, Homo sapiens
ttactgcatttcttc

SEQ ID NO: 1145100 - DNA, 15 bp, Homo sapiens
attactgcatttctt

SEQ ID NO: 1145101 - DNA, 15 bp, Homo sapiens
tattactgcatttct

SEQ ID NO: 1145102 - DNA, 15 bp, Homo sapiens
gtattactgcatttc

SEQ ID NO: 1145103 - DNA, 15 bp, Homo sapiens
agtattactgcattt

SEQ ID NO: 1145104 - DNA, 15 bp, Homo sapiens
aagtattactgcatt

SEQ ID NO: 1145105 - DNA, 15 bp, Homo sapiens
gaagtattactgcat

SEQ ID NO: 1145106 - DNA, 15 bp, Homo sapiens
ggaagtattactgca

SEQ ID NO: 1145107 - DNA, 15 bp, Homo sapiens
gggaagtattactgc

SEQ ID NO: 1145108 - DNA, 15 bp, Homo sapiens
agggaagtattactg

SEQ ID NO: 1145109 - DNA, 15 bp, Homo sapiens
tagggaagtattact

SEQ ID NO: 1145110 - DNA, 15 bp, Homo sapiens
gtagggaagtattac

SEQ ID NO: 1145111 - DNA, 15 bp, Homo sapiens
agtagggaagtatta

SEQ ID NO: 1145112 - DNA, 15 bp, Homo sapiens
tagtagggaagtatt

SEQ ID NO: 1145113 - DNA, 15 bp, Homo sapiens
gtagtagggaagtat

SEQ ID NO: 1145114 - DNA, 15 bp, Homo sapiens
agtagtagggaagta

SEQ ID NO: 1145115 - DNA, 15 bp, Homo sapiens
cagtagtagggaagt

SEQ ID NO: 1145116 - DNA, 15 bp, Homo sapiens
acagtagtagggaag

SEQ ID NO: 1145117 - DNA, 15 bp, Homo sapiens
aacagtagtagggaa

SEQ ID NO: 1145118 - DNA, 15 bp, Homo sapiens
caacagtagtaggga

SEQ ID NO: 1145119 - DNA, 15 bp, Homo sapiens
gcaacagtagtaggg

SEQ ID NO: 1145120 - DNA, 15 bp, Homo sapiens
agcaacagtagtagg

SEQ ID NO: 1145121 - DNA, 15 bp, Homo sapiens
aagcaacagtagtag

SEQ ID NO: 1145122 - DNA, 15 bp, Homo sapiens
taagcaacagtagta

SEQ ID NO: 1145123 - DNA, 15 bp, Homo sapiens
ataagcaacagtagt

SEQ ID NO: 1145124 - DNA, 15 bp, Homo sapiens
aataagcaacagtag

SEQ ID NO: 1145125 - DNA, 15 bp, Homo sapiens
taataagcaacagta

SEQ ID NO: 1145126 - DNA, 15 bp, Homo sapiens
ataataagcaacagt

SEQ ID NO: 1145127 - DNA, 15 bp, Homo sapiens
aataataagcaacag

SEQ ID NO: 1145128 - DNA, 15 bp, Homo sapiens
caataataagcaaca

SEQ ID NO: 1145129 - DNA, 15 bp, Homo sapiens
acaataataagcaac

SEQ ID NO: 1145130 - DNA, 15 bp, Homo sapiens
aacaataataagcaa

SEQ ID NO: 1145131 - DNA, 15 bp, Homo sapiens
caacaataataagca

SEQ ID NO: 1145132 - DNA, 15 bp, Homo sapiens
gcaacaataataagc

SEQ ID NO: 1145133 - DNA, 15 bp, Homo sapiens
tgcaacaataataag

SEQ ID NO: 1145134 - DNA, 15 bp, Homo sapiens
ttgcaacaataataa

SEQ ID NO: 1145135 - DNA, 15 bp, Homo sapiens
attgcaacaataata

SEQ ID NO: 1145136 - DNA, 15 bp, Homo sapiens
cattgcaacaataat

SEQ ID NO: 1145137 - DNA, 15 bp, Homo sapiens
acattgcaacaataa

SEQ ID NO: 1145138 - DNA, 15 bp, Homo sapiens
aacattgcaacaata

SEQ ID NO: 1145139 - DNA, 15 bp, Homo sapiens
gaacattgcaacaat

SEQ ID NO: 1145140 - DNA, 15 bp, Homo sapiens
agaacattgcaacaa

SEQ ID NO: 1145141 - DNA, 15 bp, Homo sapiens
aagaacattgcaaca

SEQ ID NO: 1145142 - DNA, 15 bp, Homo sapiens
gaagaacattgcaac

SEQ ID NO: 1145143 - DNA, 15 bp, Homo sapiens
agaagaacattgcaa

SEQ ID NO: 1145144 - DNA, 15 bp, Homo sapiens
aagaagaacattgca

SEQ ID NO: 1145145 - DNA, 15 bp, Homo sapiens
taagaagaacattgc

SEQ ID NO: 1145146 - DNA, 15 bp, Homo sapiens
ttaagaagaacattg

SEQ ID NO: 1145147 - DNA, 15 bp, Homo sapiens
attaagaagaacatt

SEQ ID NO: 1145148 - DNA, 15 bp, Homo sapiens
aattaagaagaacat

SEQ ID NO: 1145149 - DNA, 15 bp, Homo sapiens
gaattaagaagaaca

SEQ ID NO: 1145150 - DNA, 15 bp, Homo sapiens
agaattaagaagaac

SEQ ID NO: 1145151 - DNA, 15 bp, Homo sapiens
aagaattaagaagaa

SEQ ID NO: 1145152 - DNA, 15 bp, Homo sapiens
caagaattaagaaga

SEQ ID NO: 1145153 - DNA, 15 bp, Homo sapiens
gcaagaattaagaag

SEQ ID NO: 1145154 - DNA, 15 bp, Homo sapiens
agcaagaattaagaa

SEQ ID NO: 1145155 - DNA, 15 bp, Homo sapiens
aagcaagaattaaga

SEQ ID NO: 1145156 - DNA, 15 bp, Homo sapiens
aaagcaagaattaag

SEQ ID NO: 1145157 - DNA, 15 bp, Homo sapiens
aaaagcaagaattaa

SEQ ID NO: 1145158 - DNA, 15 bp, Homo sapiens
taaaagcaagaatta

SEQ ID NO: 1145159 - DNA, 15 bp, Homo sapiens
ttaaaagcaagaatt

SEQ ID NO: 1145160 - DNA, 15 bp, Homo sapiens
tttaaaagcaagaat

SEQ ID NO: 1145161 - DNA, 15 bp, Homo sapiens
gtttaaaagcaagaa

SEQ ID NO: 1145162 - DNA, 15 bp, Homo sapiens
tgtttaaaagcaaga

SEQ ID NO: 1145163 - DNA, 15 bp, Homo sapiens
ctgtttaaaagcaag

SEQ ID NO: 1145164 - DNA, 15 bp, Homo sapiens
tctgtttaaaagcaa

SEQ ID NO: 1145165 - DNA, 15 bp, Homo sapiens
atctgtttaaaagca

SEQ ID NO: 1145166 - DNA, 15 bp, Homo sapiens
tatctgtttaaaagc

SEQ ID NO: 1145167 - DNA, 15 bp, Homo sapiens
gtatctgtttaaaag

SEQ ID NO: 1145168 - DNA, 15 bp, Homo sapiens
tgtatctgtttaaaa

SEQ ID NO: 1145169 - DNA, 15 bp, Homo sapiens
atgtatctgtttaaa

SEQ ID NO: 1145170 - DNA, 15 bp, Homo sapiens
aatgtatctgtttaa

SEQ ID NO: 1145171 - DNA, 15 bp, Homo sapiens
aaatgtatctgttta

SEQ ID NO: 1145172 - DNA, 15 bp, Homo sapiens
aaaatgtatctgttt

SEQ ID NO: 1145173 - DNA, 15 bp, Homo sapiens
aaaaatgtatctgtt

SEQ ID NO: 1145174 - DNA, 15 bp, Homo sapiens
taaaaatgtatctgt

SEQ ID NO: 1145175 - DNA, 15 bp, Homo sapiens
ataaaaatgtatctg

SEQ ID NO: 1145176 - DNA, 15 bp, Homo sapiens
cataaaaatgtatct

SEQ ID NO: 1145177 - DNA, 15 bp, Homo sapiens
gcataaaaatgtatc

SEQ ID NO: 1145178 - DNA, 15 bp, Homo sapiens
agcataaaaatgtat

SEQ ID NO: 1145179 - DNA, 15 bp, Homo sapiens
gagcataaaaatgta

SEQ ID NO: 1145180 - DNA, 15 bp, Homo sapiens
tgagcataaaaatgt

SEQ ID NO: 1145181 - DNA, 15 bp, Homo sapiens
ttgagcataaaaatg

SEQ ID NO: 1145182 - DNA, 15 bp, Homo sapiens
tttgagcataaaaat

SEQ ID NO: 1145183 - DNA, 15 bp, Homo sapiens
ttttgagcataaaaa

SEQ ID NO: 1145184 - DNA, 15 bp, Homo sapiens
attttgagcataaaa

SEQ ID NO: 1145185 - DNA, 15 bp, Homo sapiens
cattttgagcataaa

SEQ ID NO: 1145186 - DNA, 15 bp, Homo sapiens
acattttgagcataa

SEQ ID NO: 1145187 - DNA, 15 bp, Homo sapiens
aacattttgagcata

SEQ ID NO: 1145188 - DNA, 15 bp, Homo sapiens
taacattttgagcat

SEQ ID NO: 1145189 - DNA, 15 bp, Homo sapiens
ttaacattttgagca

SEQ ID NO: 1145190 - DNA, 15 bp, Homo sapiens
attaacattttgagc

SEQ ID NO: 1145191 - DNA, 15 bp, Homo sapiens
cattaacattttgag

SEQ ID NO: 1145192 - DNA, 15 bp, Homo sapiens
gcattaacattttga

SEQ ID NO: 1145193 - DNA, 15 bp, Homo sapiens
agcattaacattttg

SEQ ID NO: 1145194 - DNA, 15 bp, Homo sapiens
aagcattaacatttt

SEQ ID NO: 1145195 - DNA, 15 bp, Homo sapiens
gaagcattaacattt

SEQ ID NO: 1145196 - DNA, 15 bp, Homo sapiens
agaagcattaacatt

SEQ ID NO: 1145197 - DNA, 15 bp, Homo sapiens
gagaagcattaacat

SEQ ID NO: 1145198 - DNA, 15 bp, Homo sapiens
agagaagcattaaca

SEQ ID NO: 1145199 - DNA, 15 bp, Homo sapiens
gagagaagcattaac

SEQ ID NO: 1145200 - DNA, 15 bp, Homo sapiens
tgagagaagcattaa

SEQ ID NO: 1145201 - DNA, 15 bp, Homo sapiens
atgagagaagcatta

SEQ ID NO: 1145202 - DNA, 15 bp, Homo sapiens
tatgagagaagcatt

SEQ ID NO: 1145203 - DNA, 15 bp, Homo sapiens
ctatgagagaagcat

SEQ ID NO: 1145204 - DNA, 15 bp, Homo sapiens
cctatgagagaagca

SEQ ID NO: 1145205 - DNA, 15 bp, Homo sapiens
tcctatgagagaagc

SEQ ID NO: 1145206 - DNA, 15 bp, Homo sapiens
atcctatgagagaag

SEQ ID NO: 1145207 - DNA, 15 bp, Homo sapiens
aatcctatgagagaa

SEQ ID NO: 1145208 - DNA, 15 bp, Homo sapiens
caatcctatgagaga

SEQ ID NO: 1145209 - DNA, 15 bp, Homo sapiens
tcaatcctatgagag

SEQ ID NO: 1145210 - DNA, 15 bp, Homo sapiens
gtcaatcctatgaga

SEQ ID NO: 1145211 - DNA, 15 bp, Homo sapiens
agtcaatcctatgag

SEQ ID NO: 1145212 - DNA, 15 bp, Homo sapiens
gagtcaatcctatga

SEQ ID NO: 1145213 - DNA, 15 bp, Homo sapiens
tgagtcaatcctatg

SEQ ID NO: 1145214 - DNA, 15 bp, Homo sapiens
atgagtcaatcctat

SEQ ID NO: 1145215 - DNA, 15 bp, Homo sapiens
aatgagtcaatccta

SEQ ID NO: 1145216 - DNA, 15 bp, Homo sapiens
aaatgagtcaatcct

SEQ ID NO: 1145217 - DNA, 15 bp, Homo sapiens
taaatgagtcaatcc

SEQ ID NO: 1145218 - DNA, 15 bp, Homo sapiens
ttaaatgagtcaatc

SEQ ID NO: 1145219 - DNA, 15 bp, Homo sapiens
attaaatgagtcaat

SEQ ID NO: 1145220 - DNA, 15 bp, Homo sapiens
tattaaatgagtcaa

SEQ ID NO: 1145221 - DNA, 15 bp, Homo sapiens
ctattaaatgagtca

SEQ ID NO: 1145222 - DNA, 15 bp, Homo sapiens
actattaaatgagtc

SEQ ID NO: 1145223 - DNA, 15 bp, Homo sapiens
tactattaaatgagt

SEQ ID NO: 1145224 - DNA, 15 bp, Homo sapiens
atactattaaatgag

SEQ ID NO: 1145225 - DNA, 15 bp, Homo sapiens
gatactattaaatga

SEQ ID NO: 1145226 - DNA, 15 bp, Homo sapiens
tgatactattaaatg

SEQ ID NO: 1145227 - DNA, 15 bp, Homo sapiens
ttgatactattaaat

SEQ ID NO: 1145228 - DNA, 15 bp, Homo sapiens
gttgatactattaaa

SEQ ID NO: 1145229 - DNA, 15 bp, Homo sapiens
agttgatactattaa

SEQ ID NO: 1145230 - DNA, 15 bp, Homo sapiens
aagttgatactatta

SEQ ID NO: 1145231 - DNA, 15 bp, Homo sapiens
taagttgatactatt

SEQ ID NO: 1145232 - DNA, 15 bp, Homo sapiens
ttaagttgatactat

SEQ ID NO: 1145233 - DNA, 15 bp, Homo sapiens
attaagttgatacta

SEQ ID NO: 1145234 - DNA, 15 bp, Homo sapiens
cattaagttgatact

SEQ ID NO: 1145235 - DNA, 15 bp, Homo sapiens
tcattaagttgatac

SEQ ID NO: 1145236 - DNA, 15 bp, Homo sapiens
atcattaagttgata

SEQ ID NO: 1145237 - DNA, 15 bp, Homo sapiens
tatcattaagttgat

SEQ ID NO: 1145238 - DNA, 15 bp, Homo sapiens
gtatcattaagttga

SEQ ID NO: 1145239 - DNA, 15 bp, Homo sapiens
agtatcattaagttg

SEQ ID NO: 1145240 - DNA, 15 bp, Homo sapiens
tagtatcattaagtt

SEQ ID NO: 1145241 - DNA, 15 bp, Homo sapiens
ttagtatcattaagt

SEQ ID NO: 1145242 - DNA, 15 bp, Homo sapiens
gttagtatcattaag

SEQ ID NO: 1145243 - DNA, 15 bp, Homo sapiens
agttagtatcattaa

SEQ ID NO: 1145244 - DNA, 15 bp, Homo sapiens
aagttagtatcatta

SEQ ID NO: 1145245 - DNA, 15 bp, Homo sapiens
taagttagtatcatt

SEQ ID NO: 1145246 - DNA, 15 bp, Homo sapiens
ataagttagtatcat

SEQ ID NO: 1145247 - DNA, 15 bp, Homo sapiens
aataagttagtatca

SEQ ID NO: 1145248 - DNA, 15 bp, Homo sapiens
taataagttagtatc

SEQ ID NO: 1145249 - DNA, 15 bp, Homo sapiens
ctaataagttagtat

SEQ ID NO: 1145250 - DNA, 15 bp, Homo sapiens
tctaataagttagta

SEQ ID NO: 1145251 - DNA, 15 bp, Homo sapiens
ttctaataagttagt

SEQ ID NO: 1145252 - DNA, 15 bp, Homo sapiens
cttctaataagttag

SEQ ID NO: 1145253 - DNA, 15 bp, Homo sapiens
gcttctaataagtta

SEQ ID NO: 1145254 - DNA, 15 bp, Homo sapiens
tgcttctaataagtt

SEQ ID NO: 1145255 - DNA, 15 bp, Homo sapiens
atgcttctaataagt

SEQ ID NO: 1145256 - DNA, 15 bp, Homo sapiens
aatgcttctaataag

SEQ ID NO: 1145257 - DNA, 15 bp, Homo sapiens
caatgcttctaataa

SEQ ID NO: 1145258 - DNA, 15 bp, Homo sapiens
tcaatgcttctaata

SEQ ID NO: 1145259 - DNA, 15 bp, Homo sapiens
atcaatgcttctaat

SEQ ID NO: 1145260 - DNA, 15 bp, Homo sapiens
gatcaatgcttctaa

SEQ ID NO: 1145261 - DNA, 15 bp, Homo sapiens
tgatcaatgcttcta

SEQ ID NO: 1145262 - DNA, 15 bp, Homo sapiens
ttgatcaatgcttct

SEQ ID NO: 1145263 - DNA, 15 bp, Homo sapiens
attgatcaatgcttc

SEQ ID NO: 1145264 - DNA, 15 bp, Homo sapiens
gattgatcaatgctt

SEQ ID NO: 1145265 - DNA, 15 bp, Homo sapiens
ggattgatcaatgct

SEQ ID NO: 1145266 - DNA, 15 bp, Homo sapiens
aggattgatcaatgc

SEQ ID NO: 1145267 - DNA, 15 bp, Homo sapiens
caggattgatcaatg

SEQ ID NO: 1145268 - DNA, 15 bp, Homo sapiens
tcaggattgatcaat

SEQ ID NO: 1145269 - DNA, 15 bp, Homo sapiens
ttcaggattgatcaa

SEQ ID NO: 1145270 - DNA, 15 bp, Homo sapiens
attcaggattgatca

SEQ ID NO: 1145271 - DNA, 15 bp, Homo sapiens
aattcaggattgatc

SEQ ID NO: 1145272 - DNA, 15 bp, Homo sapiens
aaattcaggattgat

SEQ ID NO: 1145273 - DNA, 15 bp, Homo sapiens
gaaattcaggattga

SEQ ID NO: 1145274 - DNA, 15 bp, Homo sapiens
agaaattcaggattg

SEQ ID NO: 1145275 - DNA, 15 bp, Homo sapiens
aagaaattcaggatt

SEQ ID NO: 1145276 - DNA, 15 bp, Homo sapiens
gaagaaattcaggat

SEQ ID NO: 1145277 - DNA, 15 bp, Homo sapiens
ggaagaaattcagga

SEQ ID NO: 1145278 - DNA, 15 bp, Homo sapiens
aggaagaaattcagg

SEQ ID NO: 1145279 - DNA, 15 bp, Homo sapiens
aaggaagaaattcag

SEQ ID NO: 1145280 - DNA, 15 bp, Homo sapiens
aaaggaagaaattca

SEQ ID NO: 1145281 - DNA, 15 bp, Homo sapiens
caaaggaagaaattc

SEQ ID NO: 1145282 - DNA, 15 bp, Homo sapiens
acaaaggaagaaatt

SEQ ID NO: 1145283 - DNA, 15 bp, Homo sapiens
cacaaaggaagaaat

SEQ ID NO: 1145284 - DNA, 15 bp, Homo sapiens
cgcacaaaggaagaa

SEQ ID NO: 1145285 - DNA, 15 bp, Homo sapiens
ccgcacaaaggaaga

SEQ ID NO: 1145286 - DNA, 15 bp, Homo sapiens
accgcacaaaggaag

SEQ ID NO: 1145287 - DNA, 15 bp, Homo sapiens
caccgcacaaaggaa

SEQ ID NO: 1145288 - DNA, 15 bp, Homo sapiens
acaccgcacaaagga

SEQ ID NO: 1145289 - DNA, 15 bp, Homo sapiens
aacaccgcacaaagg

SEQ ID NO: 1145290 - DNA, 15 bp, Homo sapiens
aaacaccgcacaaag

SEQ ID NO: 1145291 - DNA, 15 bp, Homo sapiens
taaacaccgcacaaa

SEQ ID NO: 1145292 - DNA, 15 bp, Homo sapiens
ctaaacaccgcacaa

SEQ ID NO: 1145293 - DNA, 15 bp, Homo sapiens
cctaaacaccgcaca

SEQ ID NO: 1145294 - DNA, 15 bp, Homo sapiens
acctaaacaccgcac

SEQ ID NO: 1145295 - DNA, 15 bp, Homo sapiens
cacctaaacaccgca

SEQ ID NO: 1145296 - DNA, 15 bp, Homo sapiens
ccacctaaacaccgc

SEQ ID NO: 1145297 - DNA, 15 bp, Homo sapiens
cccacctaaacaccg

SEQ ID NO: 1145298 - DNA, 15 bp, Homo sapiens
ccccacctaaacacc

SEQ ID NO: 1145299 - DNA, 15 bp, Homo sapiens
tccccacctaaacac

SEQ ID NO: 1145300 - DNA, 15 bp, Homo sapiens
ttccccacctaaaca

SEQ ID NO: 1145301 - DNA, 15 bp, Homo sapiens
cttccccacctaaac

SEQ ID NO: 1145302 - DNA, 15 bp, Homo sapiens
tcttccccacctaaa

SEQ ID NO: 1145303 - DNA, 15 bp, Homo sapiens
atcttccccacctaa

SEQ ID NO: 1145304 - DNA, 15 bp, Homo sapiens
catcttccccaccta

SEQ ID NO: 1145305 - DNA, 15 bp, Homo sapiens
acatcttccccacct

SEQ ID NO: 1145306 - DNA, 15 bp, Homo sapiens
aacatcttccccacc

SEQ ID NO: 1145307 - DNA, 15 bp, Homo sapiens
taacatcttccccac

SEQ ID NO: 1145308 - DNA, 15 bp, Homo sapiens
ataacatcttcccca

SEQ ID NO: 1145309 - DNA, 15 bp, Homo sapiens
aataacatcttcccc

SEQ ID NO: 1145310 - DNA, 15 bp, Homo sapiens
gaataacatcttccc

SEQ ID NO: 1145311 - DNA, 15 bp, Homo sapiens
tgaataacatcttcc

SEQ ID NO: 1145312 - DNA, 15 bp, Homo sapiens
ttgaataacatcttc

SEQ ID NO: 1145313 - DNA, 15 bp, Homo sapiens
cttgaataacatctt

SEQ ID NO: 1145314 - DNA, 15 bp, Homo sapiens
tcttgaataacatct

SEQ ID NO: 1145315 - DNA, 15 bp, Homo sapiens
ctcttgaataacatc

SEQ ID NO: 1145316 - DNA, 15 bp, Homo sapiens
cctcttgaataacat

SEQ ID NO: 1145317 - DNA, 15 bp, Homo sapiens
gcctcttgaataaca

SEQ ID NO: 1145318 - DNA, 15 bp, Homo sapiens
agcctcttgaataac

SEQ ID NO: 1145319 - DNA, 15 bp, Homo sapiens
tagcctcttgaataa

SEQ ID NO: 1145320 - DNA, 15 bp, Homo sapiens
ttagcctcttgaata

SEQ ID NO: 1145321 - DNA, 15 bp, Homo sapiens
cttagcctcttgaat

SEQ ID NO: 1145322 - DNA, 15 bp, Homo sapiens
tcttagcctcttgaa

SEQ ID NO: 1145323 - DNA, 15 bp, Homo sapiens
gtcttagcctcttga

SEQ ID NO: 1145324 - DNA, 15 bp, Homo sapiens
agtcttagcctcttg

SEQ ID NO: 1145325 - DNA, 15 bp, Homo sapiens
gagtcttagcctctt

SEQ ID NO: 1145326 - DNA, 15 bp, Homo sapiens
agagtcttagcctct

SEQ ID NO: 1145327 - DNA, 15 bp, Homo sapiens
cagagtcttagcctc

SEQ ID NO: 1145328 - DNA, 15 bp, Homo sapiens
tcagagtcttagcct

SEQ ID NO: 1145329 - DNA, 15 bp, Homo sapiens
ttcagagtcttagcc

SEQ ID NO: 1145330 - DNA, 15 bp, Homo sapiens
tttcagagtcttagc

SEQ ID NO: 1145331 - DNA, 15 bp, Homo sapiens
ctttcagagtcttag

SEQ ID NO: 1145332 - DNA, 15 bp, Homo sapiens
tctttcagagtctta

SEQ ID NO: 1145333 - DNA, 15 bp, Homo sapiens
ctctttcagagtctt

SEQ ID NO: 1145334 - DNA, 15 bp, Homo sapiens
cctctttcagagtct

SEQ ID NO: 1145335 - DNA, 15 bp, Homo sapiens
gcctctttcagagtc

SEQ ID NO: 1145336 - DNA, 15 bp, Homo sapiens
agcctctttcagagt

SEQ ID NO: 1145337 - DNA, 15 bp, Homo sapiens
aagcctctttcagag

SEQ ID NO: 1145338 - DNA, 15 bp, Homo sapiens
caagcctctttcaga

SEQ ID NO: 1145339 - DNA, 15 bp, Homo sapiens
gcaagcctctttcag

SEQ ID NO: 1145340 - DNA, 15 bp, Homo sapiens
tgcaagcctctttca

SEQ ID NO: 1145341 - DNA, 15 bp, Homo sapiens
ctgcaagcctctttc

SEQ ID NO: 1145342 - DNA, 15 bp, Homo sapiens
actgcaagcctcttt

SEQ ID NO: 1145343 - DNA, 15 bp, Homo sapiens
gactgcaagcctctt

SEQ ID NO: 1145344 - DNA, 15 bp, Homo sapiens
tgactgcaagcctct

SEQ ID NO: 1145345 - DNA, 15 bp, Homo sapiens
ctgactgcaagcctc

SEQ ID NO: 1145346 - DNA, 15 bp, Homo sapiens
actgactgcaagcct

SEQ ID NO: 1145347 - DNA, 15 bp, Homo sapiens
cactgactgcaagcc

SEQ ID NO: 1145348 - DNA, 15 bp, Homo sapiens
tcactgactgcaagc

SEQ ID NO: 1145349 - DNA, 15 bp, Homo sapiens
ttcactgactgcaag

SEQ ID NO: 1145350 - DNA, 15 bp, Homo sapiens
gttcactgactgcaa

SEQ ID NO: 1145351 - DNA, 15 bp, Homo sapiens
tgttcactgactgca

SEQ ID NO: 1145352 - DNA, 15 bp, Homo sapiens
ttgttcactgactgc

SEQ ID NO: 1145353 - DNA, 15 bp, Homo sapiens
tttgttcactgactg

SEQ ID NO: 1145354 - DNA, 15 bp, Homo sapiens
atttgttcactgact

SEQ ID NO: 1145355 - DNA, 15 bp, Homo sapiens
aatttgttcactgac

SEQ ID NO: 1145356 - DNA, 15 bp, Homo sapiens
aaatttgttcactga

SEQ ID NO: 1145357 - DNA, 15 bp, Homo sapiens
aaaatttgttcactg

SEQ ID NO: 1145358 - DNA, 15 bp, Homo sapiens
taaaatttgttcact

SEQ ID NO: 1145359 - DNA, 15 bp, Homo sapiens
gtaaaatttgttcac

SEQ ID NO: 1145360 - DNA, 15 bp, Homo sapiens
agtaaaatttgttca

SEQ ID NO: 1145361 - DNA, 15 bp, Homo sapiens
aagtaaaatttgttc

SEQ ID NO: 1145362 - DNA, 15 bp, Homo sapiens
caagtaaaatttgtt

SEQ ID NO: 1145363 - DNA, 15 bp, Homo sapiens
acaagtaaaatttgt

SEQ ID NO: 1145364 - DNA, 15 bp, Homo sapiens
gacaagtaaaatttg

SEQ ID NO: 1145365 - DNA, 15 bp, Homo sapiens
agacaagtaaaattt

SEQ ID NO: 1145366 - DNA, 15 bp, Homo sapiens
tagacaagtaaaatt

SEQ ID NO: 1145367 - DNA, 15 bp, Homo sapiens
atagacaagtaaaat

SEQ ID NO: 1145368 - DNA, 15 bp, Homo sapiens
catagacaagtaaaa

SEQ ID NO: 1145369 - DNA, 15 bp, Homo sapiens
acatagacaagtaaa

SEQ ID NO: 1145370 - DNA, 15 bp, Homo sapiens
cacatagacaagtaa

SEQ ID NO: 1145371 - DNA, 15 bp, Homo sapiens
acacatagacaagta

SEQ ID NO: 1145372 - DNA, 15 bp, Homo sapiens
aacacatagacaagt

SEQ ID NO: 1145373 - DNA, 15 bp, Homo sapiens
aaacacatagacaag

SEQ ID NO: 1145374 - DNA, 15 bp, Homo sapiens
caaacacatagacaa

SEQ ID NO: 1145375 - DNA, 15 bp, Homo sapiens
acaaacacatagaca

SEQ ID NO: 1145376 - DNA, 15 bp, Homo sapiens
aacaaacacatagac

SEQ ID NO: 1145377 - DNA, 15 bp, Homo sapiens
caacaaacacataga

SEQ ID NO: 1145378 - DNA, 15 bp, Homo sapiens
ccaacaaacacatag

SEQ ID NO: 1145379 - DNA, 15 bp, Homo sapiens
tccaacaaacacata

SEQ ID NO: 1145380 - DNA, 15 bp, Homo sapiens
atccaacaaacacat

SEQ ID NO: 1145381 - DNA, 15 bp, Homo sapiens
catccaacaaacaca

SEQ ID NO: 1145382 - DNA, 15 bp, Homo sapiens
acatccaacaaacac

SEQ ID NO: 1145383 - DNA, 15 bp, Homo sapiens
gacatccaacaaaca

SEQ ID NO: 1145384 - DNA, 15 bp, Homo sapiens
agacatccaacaaac

SEQ ID NO: 1145385 - DNA, 15 bp, Homo sapiens
tagacatccaacaaa

SEQ ID NO: 1145386 - DNA, 15 bp, Homo sapiens
gtagacatccaacaa

SEQ ID NO: 1145387 - DNA, 15 bp, Homo sapiens
agtagacatccaaca

SEQ ID NO: 1145388 - DNA, 15 bp, Homo sapiens
aagtagacatccaac

SEQ ID NO: 1145389 - DNA, 15 bp, Homo sapiens
gaagtagacatccaa

SEQ ID NO: 1145390 - DNA, 15 bp, Homo sapiens
tgaagtagacatcca

SEQ ID NO: 1145391 - DNA, 15 bp, Homo sapiens
atgaagtagacatcc

SEQ ID NO: 1145392 - DNA, 15 bp, Homo sapiens
gatgaagtagacatc

SEQ ID NO: 1145393 - DNA, 15 bp, Homo sapiens
agatgaagtagacat

SEQ ID NO: 1145394 - DNA, 15 bp, Homo sapiens
aagatgaagtagaca

SEQ ID NO: 1145395 - DNA, 15 bp, Homo sapiens
aaagatgaagtagac

SEQ ID NO: 1145396 - DNA, 15 bp, Homo sapiens
gaaagatgaagtaga

SEQ ID NO: 1145397 - DNA, 15 bp, Homo sapiens
agaaagatgaagtag

SEQ ID NO: 1145398 - DNA, 15 bp, Homo sapiens
tagaaagatgaagta

SEQ ID NO: 1145399 - DNA, 15 bp, Homo sapiens
ttagaaagatgaagt

SEQ ID NO: 1145400 - DNA, 15 bp, Homo sapiens
gttagaaagatgaag

SEQ ID NO: 1145401 - DNA, 15 bp, Homo sapiens
agttagaaagatgaa

SEQ ID NO: 1145402 - DNA, 15 bp, Homo sapiens
cagttagaaagatga

SEQ ID NO: 1145403 - DNA, 15 bp, Homo sapiens
tcagttagaaagatg

SEQ ID NO: 1145404 - DNA, 15 bp, Homo sapiens
ttcagttagaaagat

SEQ ID NO: 1145405 - DNA, 15 bp, Homo sapiens
tttcagttagaaaga

SEQ ID NO: 1145406 - DNA, 15 bp, Homo sapiens
gtttcagttagaaag

SEQ ID NO: 1145407 - DNA, 15 bp, Homo sapiens
ggtttcagttagaaa

SEQ ID NO: 1145408 - DNA, 15 bp, Homo sapiens
aggtttcagttagaa

SEQ ID NO: 1145409 - DNA, 15 bp, Homo sapiens
gaggtttcagttaga

SEQ ID NO: 1145410 - DNA, 15 bp, Homo sapiens
ggaggtttcagttag

SEQ ID NO: 1145411 - DNA, 15 bp, Homo sapiens
aggaggtttcagtta

SEQ ID NO: 1145412 - DNA, 15 bp, Homo sapiens
caggaggtttcagtt

SEQ ID NO: 1145413 - DNA, 15 bp, Homo sapiens
gcaggaggtttcagt

SEQ ID NO: 1145414 - DNA, 15 bp, Homo sapiens
ggcaggaggtttcag

SEQ ID NO: 1145415 - DNA, 15 bp, Homo sapiens
aggcaggaggtttca

SEQ ID NO: 1145416 - DNA, 15 bp, Homo sapiens
caggcaggaggtttc

SEQ ID NO: 1145417 - DNA, 15 bp, Homo sapiens
acaggcaggaggttt

SEQ ID NO: 1145418 - DNA, 15 bp, Homo sapiens
tacaggcaggaggtt

SEQ ID NO: 1145419 - DNA, 15 bp, Homo sapiens
ttacaggcaggaggt

SEQ ID NO: 1145420 - DNA, 15 bp, Homo sapiens
gttacaggcaggagg

SEQ ID NO: 1145421 - DNA, 15 bp, Homo sapiens
ggttacaggcaggag

SEQ ID NO: 1145422 - DNA, 15 bp, Homo sapiens
tggttacaggcagga

SEQ ID NO: 1145423 - DNA, 15 bp, Homo sapiens
gtggttacaggcagg

SEQ ID NO: 1145424 - DNA, 15 bp, Homo sapiens
agtggttacaggcag

SEQ ID NO: 1145425 - DNA, 15 bp, Homo sapiens
aagtggttacaggca

SEQ ID NO: 1145426 - DNA, 15 bp, Homo sapiens
taagtggttacaggc

SEQ ID NO: 1145427 - DNA, 15 bp, Homo sapiens
ctaagtggttacagg

SEQ ID NO: 1145428 - DNA, 15 bp, Homo sapiens
cctaagtggttacag

SEQ ID NO: 1145429 - DNA, 15 bp, Homo sapiens
acctaagtggttaca

SEQ ID NO: 1145430 - DNA, 15 bp, Homo sapiens
cacctaagtggttac

SEQ ID NO: 1145431 - DNA, 15 bp, Homo sapiens
acacctaagtggtta

SEQ ID NO: 1145432 - DNA, 15 bp, Homo sapiens
cacacctaagtggtt

SEQ ID NO: 1145433 - DNA, 15 bp, Homo sapiens
tcacacctaagtggt

SEQ ID NO: 1145434 - DNA, 15 bp, Homo sapiens
atcacacctaagtgg

SEQ ID NO: 1145435 - DNA, 15 bp, Homo sapiens
gatcacacctaagtg

SEQ ID NO: 1145436 - DNA, 15 bp, Homo sapiens
agatcacacctaagt

SEQ ID NO: 1145437 - DNA, 15 bp, Homo sapiens
aagatcacacctaag

SEQ ID NO: 1145438 - DNA, 15 bp, Homo sapiens
aaagatcacacctaa

SEQ ID NO: 1145439 - DNA, 15 bp, Homo sapiens
aaaagatcacaccta

SEQ ID NO: 1145440 - DNA, 15 bp, Homo sapiens
aaaaagatcacacct

SEQ ID NO: 1145441 - DNA, 15 bp, Homo sapiens
aaaaaagatcacacc

SEQ ID NO: 1145442 - DNA, 15 bp, Homo sapiens
taaaaaagatcacac

SEQ ID NO: 1145443 - DNA, 15 bp, Homo sapiens
ctaaaaaagatcaca

SEQ ID NO: 1145444 - DNA, 15 bp, Homo sapiens
actaaaaaagatcac

SEQ ID NO: 1145445 - DNA, 15 bp, Homo sapiens
cactaaaaaagatca

SEQ ID NO: 1145446 - DNA, 15 bp, Homo sapiens
tcactaaaaaagatc

SEQ ID NO: 1145447 - DNA, 15 bp, Homo sapiens
gtcactaaaaaagat

SEQ ID NO: 1145448 - DNA, 15 bp, Homo sapiens
tgtcactaaaaaaga

SEQ ID NO: 1145449 - DNA, 15 bp, Homo sapiens
atgtcactaaaaaag

SEQ ID NO: 1145450 - DNA, 15 bp, Homo sapiens
gatgtcactaaaaaa

SEQ ID NO: 1145451 - DNA, 15 bp, Homo sapiens
agatgtcactaaaaa

SEQ ID NO: 1145452 - DNA, 15 bp, Homo sapiens
gagatgtcactaaaa

SEQ ID NO: 1145453 - DNA, 15 bp, Homo sapiens
ggagatgtcactaaa

SEQ ID NO: 1145454 - DNA, 15 bp, Homo sapiens
tggagatgtcactaa

SEQ ID NO: 1145455 - DNA, 15 bp, Homo sapiens
ttggagatgtcacta

SEQ ID NO: 1145456 - DNA, 15 bp, Homo sapiens
tttggagatgtcact

SEQ ID NO: 1145457 - DNA, 15 bp, Homo sapiens
ttttggagatgtcac

SEQ ID NO: 1145458 - DNA, 15 bp, Homo sapiens
attttggagatgtca

SEQ ID NO: 1145459 - DNA, 15 bp, Homo sapiens
gattttggagatgtc

SEQ ID NO: 1145460 - DNA, 15 bp, Homo sapiens
tgattttggagatgt

SEQ ID NO: 1145461 - DNA, 15 bp, Homo sapiens
ctgattttggagatg

SEQ ID NO: 1145462 - DNA, 15 bp, Homo sapiens
actgattttggagat

SEQ ID NO: 1145463 - DNA, 15 bp, Homo sapiens
cactgattttggaga

SEQ ID NO: 1145464 - DNA, 15 bp, Homo sapiens
tcactgattttggag

SEQ ID NO: 1145465 - DNA, 15 bp, Homo sapiens
ttcactgattttgga

SEQ ID NO: 1145466 - DNA, 15 bp, Homo sapiens
cttcactgattttgg

SEQ ID NO: 1145467 - DNA, 15 bp, Homo sapiens
ccttcactgattttg

SEQ ID NO: 1145468 - DNA, 15 bp, Homo sapiens
tccttcactgatttt

SEQ ID NO: 1145469 - DNA, 15 bp, Homo sapiens
ttccttcactgattt

SEQ ID NO: 1145470 - DNA, 15 bp, Homo sapiens
attccttcactgatt

SEQ ID NO: 1145471 - DNA, 15 bp, Homo sapiens
aattccttcactgat

SEQ ID NO: 1145472 - DNA, 15 bp, Homo sapiens
caattccttcactga

SEQ ID NO: 1145473 - DNA, 15 bp, Homo sapiens
ccaattccttcactg

SEQ ID NO: 1145474 - DNA, 15 bp, Homo sapiens
accaattccttcact

SEQ ID NO: 1145475 - DNA, 15 bp, Homo sapiens
caccaattccttcac

SEQ ID NO: 1145476 - DNA, 15 bp, Homo sapiens
tcaccaattccttca

SEQ ID NO: 1145477 - DNA, 15 bp, Homo sapiens
gtcaccaattccttc

SEQ ID NO: 1145478 - DNA, 15 bp, Homo sapiens
tgtcaccaattcctt

SEQ ID NO: 1145479 - DNA, 15 bp, Homo sapiens
ttgtcaccaattcct

SEQ ID NO: 1145480 - DNA, 15 bp, Homo sapiens
cttgtcaccaattcc

SEQ ID NO: 1145481 - DNA, 15 bp, Homo sapiens
ccttgtcaccaattc

SEQ ID NO: 1145482 - DNA, 15 bp, Homo sapiens
accttgtcaccaatt

SEQ ID NO: 1145483 - DNA, 15 bp, Homo sapiens
aaccttgtcaccaat

SEQ ID NO: 1145484 - DNA, 15 bp, Homo sapiens
caaccttgtcaccaa

SEQ ID NO: 1145485 - DNA, 15 bp, Homo sapiens
ccaaccttgtcacca

SEQ ID NO: 1145486 - DNA, 15 bp, Homo sapiens
tccaaccttgtcacc

SEQ ID NO: 1145487 - DNA, 15 bp, Homo sapiens
ttccaaccttgtcac

SEQ ID NO: 1145488 - DNA, 15 bp, Homo sapiens
attccaaccttgtca

SEQ ID NO: 1145489 - DNA, 15 bp, Homo sapiens
cattccaaccttgtc

SEQ ID NO: 1145490 - DNA, 15 bp, Homo sapiens
acattccaaccttgt

SEQ ID NO: 1145491 - DNA, 15 bp, Homo sapiens
aacattccaaccttg

SEQ ID NO: 1145492 - DNA, 15 bp, Homo sapiens
gaacattccaacctt

SEQ ID NO: 1145493 - DNA, 15 bp, Homo sapiens
agaacattccaacct

SEQ ID NO: 1145494 - DNA, 15 bp, Homo sapiens
aagaacattccaacc

SEQ ID NO: 1145495 - DNA, 15 bp, Homo sapiens
aaagaacattccaac

SEQ ID NO: 1145496 - DNA, 15 bp, Homo sapiens
gaaagaacattccaa

SEQ ID NO: 1145497 - DNA, 15 bp, Homo sapiens
tgaaagaacattcca

SEQ ID NO: 1145498 - DNA, 15 bp, Homo sapiens
ttgaaagaacattcc

SEQ ID NO: 1145499 - DNA, 15 bp, Homo sapiens
cttgaaagaacattc

SEQ ID NO: 1145500 - DNA, 15 bp, Homo sapiens
gcttgaaagaacatt

SEQ ID NO: 1145501 - DNA, 15 bp, Homo sapiens
tgcttgaaagaacat

SEQ ID NO: 1145502 - DNA, 15 bp, Homo sapiens
ctgcttgaaagaaca

SEQ ID NO: 1145503 - DNA, 15 bp, Homo sapiens
actgcttgaaagaac

SEQ ID NO: 1145504 - DNA, 15 bp, Homo sapiens
tactgcttgaaagaa

SEQ ID NO: 1145505 - DNA, 15 bp, Homo sapiens
ctactgcttgaaaga

SEQ ID NO: 1145506 - DNA, 15 bp, Homo sapiens
gctactgcttgaaag

SEQ ID NO: 1145507 - DNA, 15 bp, Homo sapiens
ggctactgcttgaaa

SEQ ID NO: 1145508 - DNA, 15 bp, Homo sapiens
tggctactgcttgaa

SEQ ID NO: 1145509 - DNA, 15 bp, Homo sapiens
gtggctactgcttga

SEQ ID NO: 1145510 - DNA, 15 bp, Homo sapiens
cgtggctactgcttg

SEQ ID NO: 1145511 - DNA, 15 bp, Homo sapiens
acgtggctactgctt

SEQ ID NO: 1145512 - DNA, 15 bp, Homo sapiens
aacgtggctactgct

SEQ ID NO: 1145513 - DNA, 15 bp, Homo sapiens
aaacgtggctactgc

SEQ ID NO: 1145514 - DNA, 15 bp, Homo sapiens
aaaacgtggctactg

SEQ ID NO: 1145515 - DNA, 15 bp, Homo sapiens
aaaaacgtggctact

SEQ ID NO: 1145516 - DNA, 15 bp, Homo sapiens
aaaaaacgtggctac

SEQ ID NO: 1145517 - DNA, 15 bp, Homo sapiens
caaaaaacgtggcta

SEQ ID NO: 1145518 - DNA, 15 bp, Homo sapiens
gcaaaaaacgtggct

SEQ ID NO: 1145519 - DNA, 15 bp, Homo sapiens
tgcaaaaaacgtggc

SEQ ID NO: 1145520 - DNA, 15 bp, Homo sapiens
ctgcaaaaaacgtgg

SEQ ID NO: 1145521 - DNA, 15 bp, Homo sapiens
cctgcaaaaaacgtg

SEQ ID NO: 1145522 - DNA, 15 bp, Homo sapiens
tcctgcaaaaaacgt

SEQ ID NO: 1145523 - DNA, 15 bp, Homo sapiens
atcctgcaaaaaacg

SEQ ID NO: 1145524 - DNA, 15 bp, Homo sapiens
aatcctgcaaaaaac

SEQ ID NO: 1145525 - DNA, 15 bp, Homo sapiens
gaatcctgcaaaaaa

SEQ ID NO: 1145526 - DNA, 15 bp, Homo sapiens
tgaatcctgcaaaaa

SEQ ID NO: 1145527 - DNA, 15 bp, Homo sapiens
atgaatcctgcaaaa

SEQ ID NO: 1145528 - DNA, 15 bp, Homo sapiens
tatgaatcctgcaaa

SEQ ID NO: 1145529 - DNA, 15 bp, Homo sapiens
ctatgaatcctgcaa

SEQ ID NO: 1145530 - DNA, 15 bp, Homo sapiens
actatgaatcctgca

SEQ ID NO: 1145531 - DNA, 15 bp, Homo sapiens
cactatgaatcctgc

SEQ ID NO: 1145532 - DNA, 15 bp, Homo sapiens
ccactatgaatcctg

SEQ ID NO: 1145533 - DNA, 15 bp, Homo sapiens
cccactatgaatcct

SEQ ID NO: 1145534 - DNA, 15 bp, Homo sapiens
tcccactatgaatcc

SEQ ID NO: 1145535 - DNA, 15 bp, Homo sapiens
atcccactatgaatc

SEQ ID NO: 1145536 - DNA, 15 bp, Homo sapiens
aatcccactatgaat

SEQ ID NO: 1145537 - DNA, 15 bp, Homo sapiens
gaatcccactatgaa

SEQ ID NO: 1145538 - DNA, 15 bp, Homo sapiens
tgaatcccactatga

SEQ ID NO: 1145539 - DNA, 15 bp, Homo sapiens
atgaatcccactatg

SEQ ID NO: 1145540 - DNA, 15 bp, Homo sapiens
gatgaatcccactat

SEQ ID NO: 1145541 - DNA, 15 bp, Homo sapiens
tgatgaatcccacta

SEQ ID NO: 1145542 - DNA, 15 bp, Homo sapiens
ctgatgaatcccact

SEQ ID NO: 1145543 - DNA, 15 bp, Homo sapiens
tctgatgaatcccac

SEQ ID NO: 1145544 - DNA, 15 bp, Homo sapiens
ctctgatgaatccca

SEQ ID NO: 1145545 - DNA, 15 bp, Homo sapiens
cctctgatgaatccc

SEQ ID NO: 1145546 - DNA, 15 bp, Homo sapiens
tcctctgatgaatcc

SEQ ID NO: 1145547 - DNA, 15 bp, Homo sapiens
atcctctgatgaatc

SEQ ID NO: 1145548 - DNA, 15 bp, Homo sapiens
catcctctgatgaat

SEQ ID NO: 1145549 - DNA, 15 bp, Homo sapiens
ccatcctctgatgaa

SEQ ID NO: 1145550 - DNA, 15 bp, Homo sapiens
tccatcctctgatga

SEQ ID NO: 1145551 - DNA, 15 bp, Homo sapiens
ttccatcctctgatg

SEQ ID NO: 1145552 - DNA, 15 bp, Homo sapiens
cttccatcctctgat

SEQ ID NO: 1145553 - DNA, 15 bp, Homo sapiens
gcttccatcctctga

SEQ ID NO: 1145554 - DNA, 15 bp, Homo sapiens
agcttccatcctctg

SEQ ID NO: 1145555 - DNA, 15 bp, Homo sapiens
gagcttccatcctct

SEQ ID NO: 1145556 - DNA, 15 bp, Homo sapiens
tgagcttccatcctc

SEQ ID NO: 1145557 - DNA, 15 bp, Homo sapiens
gtgagcttccatcct

SEQ ID NO: 1145558 - DNA, 15 bp, Homo sapiens
ggtgagcttccatcc

SEQ ID NO: 1145559 - DNA, 15 bp, Homo sapiens
gggtgagcttccatc

SEQ ID NO: 1145560 - DNA, 15 bp, Homo sapiens
agggtgagcttccat

SEQ ID NO: 1145561 - DNA, 15 bp, Homo sapiens
aagggtgagcttcca

SEQ ID NO: 1145562 - DNA, 15 bp, Homo sapiens
caagggtgagcttcc

SEQ ID NO: 1145563 - DNA, 15 bp, Homo sapiens
acaagggtgagcttc

SEQ ID NO: 1145564 - DNA, 15 bp, Homo sapiens
cacaagggtgagctt

SEQ ID NO: 1145565 - DNA, 15 bp, Homo sapiens
tcacaagggtgagct

SEQ ID NO: 1145566 - DNA, 15 bp, Homo sapiens
atcacaagggtgagc

SEQ ID NO: 1145567 - DNA, 15 bp, Homo sapiens
tatcacaagggtgag

SEQ ID NO: 1145568 - DNA, 15 bp, Homo sapiens
ttatcacaagggtga

SEQ ID NO: 1145569 - DNA, 15 bp, Homo sapiens
attatcacaagggtg

SEQ ID NO: 1145570 - DNA, 15 bp, Homo sapiens
cattatcacaagggt

SEQ ID NO: 1145571 - DNA, 15 bp, Homo sapiens
ccattatcacaaggg

SEQ ID NO: 1145572 - DNA, 15 bp, Homo sapiens
gccattatcacaagg

SEQ ID NO: 1145573 - DNA, 15 bp, Homo sapiens
ggccattatcacaag

SEQ ID NO: 1145574 - DNA, 15 bp, Homo sapiens
tggccattatcacaa

SEQ ID NO: 1145575 - DNA, 15 bp, Homo sapiens
atggccattatcaca

SEQ ID NO: 1145576 - DNA, 15 bp, Homo sapiens
gatggccattatcac

SEQ ID NO: 1145577 - DNA, 15 bp, Homo sapiens
tgatggccattatca

SEQ ID NO: 1145578 - DNA, 15 bp, Homo sapiens
ctgatggccattatc

SEQ ID NO: 1145579 - DNA, 15 bp, Homo sapiens
gctgatggccattat

SEQ ID NO: 1145580 - DNA, 15 bp, Homo sapiens
ggctgatggccatta

SEQ ID NO: 1145581 - DNA, 15 bp, Homo sapiens
gggctgatggccatt

SEQ ID NO: 1145582 - DNA, 15 bp, Homo sapiens
agggctgatggccat

SEQ ID NO: 1145583 - DNA, 15 bp, Homo sapiens
tagggctgatggcca

SEQ ID NO: 1145584 - DNA, 15 bp, Homo sapiens
atagggctgatggcc

SEQ ID NO: 1145585 - DNA, 15 bp, Homo sapiens
aatagggctgatggc

SEQ ID NO: 1145586 - DNA, 15 bp, Homo sapiens
gaatagggctgatgg

SEQ ID NO: 1145587 - DNA, 15 bp, Homo sapiens
agaatagggctgatg

SEQ ID NO: 1145588 - DNA, 15 bp, Homo sapiens
tagaatagggctgat

SEQ ID NO: 1145589 - DNA, 15 bp, Homo sapiens
ctagaatagggctga

SEQ ID NO: 1145590 - DNA, 15 bp, Homo sapiens
cctagaatagggctg

SEQ ID NO: 1145591 - DNA, 15 bp, Homo sapiens
tcctagaatagggct

SEQ ID NO: 1145592 - DNA, 15 bp, Homo sapiens
gtcctagaatagggc

SEQ ID NO: 1145593 - DNA, 15 bp, Homo sapiens
agtcctagaataggg

SEQ ID NO: 1145594 - DNA, 15 bp, Homo sapiens
gagtcctagaatagg

SEQ ID NO: 1145595 - DNA, 15 bp, Homo sapiens
agagtcctagaatag

SEQ ID NO: 1145596 - DNA, 15 bp, Homo sapiens
gagagtcctagaata

SEQ ID NO: 1145597 - DNA, 15 bp, Homo sapiens
agagagtcctagaat

SEQ ID NO: 1145598 - DNA, 15 bp, Homo sapiens
cagagagtcctagaa

SEQ ID NO: 1145599 - DNA, 15 bp, Homo sapiens
gcagagagtcctaga

SEQ ID NO: 1145600 - DNA, 15 bp, Homo sapiens
tgcagagagtcctag

SEQ ID NO: 1145601 - DNA, 15 bp, Homo sapiens
ctgcagagagtccta

SEQ ID NO: 1145602 - DNA, 15 bp, Homo sapiens
gctgcagagagtcct

SEQ ID NO: 1145603 - DNA, 15 bp, Homo sapiens
ggctgcagagagtcc

SEQ ID NO: 1145604 - DNA, 15 bp, Homo sapiens
cggctgcagagagtc

SEQ ID NO: 1145605 - DNA, 15 bp, Homo sapiens
acggctgcagagagt

SEQ ID NO: 1145606 - DNA, 15 bp, Homo sapiens
aacggctgcagagag

SEQ ID NO: 1145607 - DNA, 15 bp, Homo sapiens
aaacggctgcagaga

SEQ ID NO: 1145608 - DNA, 15 bp, Homo sapiens
caaacggctgcagag

SEQ ID NO: 1145609 - DNA, 15 bp, Homo sapiens
ccaaacggctgcaga

SEQ ID NO: 1145610 - DNA, 15 bp, Homo sapiens
cccaaacggctgcag

SEQ ID NO: 1145611 - DNA, 15 bp, Homo sapiens
gcccaaacggctgca

SEQ ID NO: 1145612 - DNA, 15 bp, Homo sapiens
tgcccaaacggctgc

SEQ ID NO: 1145613 - DNA, 15 bp, Homo sapiens
ttgcccaaacggctg

SEQ ID NO: 1145614 - DNA, 15 bp, Homo sapiens
tttgcccaaacggct

SEQ ID NO: 1145615 - DNA, 15 bp, Homo sapiens
ctttgcccaaacggc

SEQ ID NO: 1145616 - DNA, 15 bp, Homo sapiens
cctttgcccaaacgg

SEQ ID NO: 1145617 - DNA, 15 bp, Homo sapiens
acctttgcccaaacg

SEQ ID NO: 1145618 - DNA, 15 bp, Homo sapiens
tacctttgcccaaac

SEQ ID NO: 1145619 - DNA, 15 bp, Homo sapiens
atacctttgcccaaa

SEQ ID NO: 1145620 - DNA, 15 bp, Homo sapiens
catacctttgcccaa

SEQ ID NO: 1145621 - DNA, 15 bp, Homo sapiens
acatacctttgccca

SEQ ID NO: 1145622 - DNA, 15 bp, Homo sapiens
cacatacctttgccc

SEQ ID NO: 1145623 - DNA, 15 bp, Homo sapiens
tcacatacctttgcc

SEQ ID NO: 1145624 - DNA, 15 bp, Homo sapiens
ttcacatacctttgc

SEQ ID NO: 1145625 - DNA, 15 bp, Homo sapiens
tttcacatacctttg

SEQ ID NO: 1145626 - DNA, 15 bp, Homo sapiens
ctttcacataccttt

SEQ ID NO: 1145627 - DNA, 15 bp, Homo sapiens
gctttcacatacctt

SEQ ID NO: 1145628 - DNA, 15 bp, Homo sapiens
agctttcacatacct

SEQ ID NO: 1145629 - DNA, 15 bp, Homo sapiens
cagctttcacatacc

SEQ ID NO: 1145630 - DNA, 15 bp, Homo sapiens
ccagctttcacatac

SEQ ID NO: 1145631 - DNA, 15 bp, Homo sapiens
cccagctttcacata

SEQ ID NO: 1145632 - DNA, 15 bp, Homo sapiens
gcccagctttcacat

SEQ ID NO: 1145633 - DNA, 15 bp, Homo sapiens
ggcccagctttcaca

SEQ ID NO: 1145634 - DNA, 15 bp, Homo sapiens
aggcccagctttcac

SEQ ID NO: 1145635 - DNA, 15 bp, Homo sapiens
aaggcccagctttca

SEQ ID NO: 1145636 - DNA, 15 bp, Homo sapiens
aaaggcccagctttc

SEQ ID NO: 1145637 - DNA, 15 bp, Homo sapiens
aaaaggcccagcttt

SEQ ID NO: 1145638 - DNA, 15 bp, Homo sapiens
aaaaaggcccagctt

SEQ ID NO: 1145639 - DNA, 15 bp, Homo sapiens
taaaaaggcccagct

SEQ ID NO: 1145640 - DNA, 15 bp, Homo sapiens
ataaaaaggcccagc

SEQ ID NO: 1145641 - DNA, 15 bp, Homo sapiens
cataaaaaggcccag

SEQ ID NO: 1145642 - DNA, 15 bp, Homo sapiens
acataaaaaggccca

SEQ ID NO: 1145643 - DNA, 15 bp, Homo sapiens
cacataaaaaggccc

SEQ ID NO: 1145644 - DNA, 15 bp, Homo sapiens
acacataaaaaggcc

SEQ ID NO: 1145645 - DNA, 15 bp, Homo sapiens
cacacataaaaaggc

SEQ ID NO: 1145646 - DNA, 15 bp, Homo sapiens
acacacataaaaagg

SEQ ID NO: 1145647 - DNA, 15 bp, Homo sapiens
aacacacataaaaag

SEQ ID NO: 1145648 - DNA, 15 bp, Homo sapiens
taacacacataaaaa

SEQ ID NO: 1145649 - DNA, 15 bp, Homo sapiens
ttaacacacataaaa

SEQ ID NO: 1145650 - DNA, 15 bp, Homo sapiens
gttaacacacataaa

SEQ ID NO: 1145651 - DNA, 15 bp, Homo sapiens
ggttaacacacataa

SEQ ID NO: 1145652 - DNA, 15 bp, Homo sapiens
gggttaacacacata

SEQ ID NO: 1145653 - DNA, 15 bp, Homo sapiens
ggggttaacacacat

SEQ ID NO: 1145654 - DNA, 15 bp, Homo sapiens
aggggttaacacaca

SEQ ID NO: 1145655 - DNA, 15 bp, Homo sapiens
caggggttaacacac

SEQ ID NO: 1145656 - DNA, 15 bp, Homo sapiens
gcaggggttaacaca

SEQ ID NO: 1145657 - DNA, 15 bp, Homo sapiens
tgcaggggttaacac

SEQ ID NO: 1145658 - DNA, 15 bp, Homo sapiens
gtgcaggggttaaca

SEQ ID NO: 1145659 - DNA, 15 bp, Homo sapiens
tgtgcaggggttaac

SEQ ID NO: 1145660 - DNA, 15 bp, Homo sapiens
gtgtgcaggggttaa

SEQ ID NO: 1145661 - DNA, 15 bp, Homo sapiens
tgtgtgcaggggtta

SEQ ID NO: 1145662 - DNA, 15 bp, Homo sapiens
ctgtgtgcaggggtt

SEQ ID NO: 1145663 - DNA, 15 bp, Homo sapiens
actgtgtgcaggggt

SEQ ID NO: 1145664 - DNA, 15 bp, Homo sapiens
tactgtgtgcagggg

SEQ ID NO: 1145665 - DNA, 15 bp, Homo sapiens
ttactgtgtgcaggg

SEQ ID NO: 1145666 - DNA, 15 bp, Homo sapiens
attactgtgtgcagg

SEQ ID NO: 1145667 - DNA, 15 bp, Homo sapiens
gattactgtgtgcag

SEQ ID NO: 1145668 - DNA, 15 bp, Homo sapiens
agattactgtgtgca

SEQ ID NO: 1145669 - DNA, 15 bp, Homo sapiens
aagattactgtgtgc

SEQ ID NO: 1145670 - DNA, 15 bp, Homo sapiens
aaagattactgtgtg

SEQ ID NO: 1145671 - DNA, 15 bp, Homo sapiens
taaagattactgtgt

SEQ ID NO: 1145672 - DNA, 15 bp, Homo sapiens
ttaaagattactgtg

SEQ ID NO: 1145673 - DNA, 15 bp, Homo sapiens
attaaagattactgt

SEQ ID NO: 1145674 - DNA, 15 bp, Homo sapiens
tattaaagattactg

SEQ ID NO: 1145675 - DNA, 15 bp, Homo sapiens
atattaaagattact

SEQ ID NO: 1145676 - DNA, 15 bp, Homo sapiens
catattaaagattac

SEQ ID NO: 1145677 - DNA, 15 bp, Homo sapiens
gcatattaaagatta

SEQ ID NO: 1145678 - DNA, 15 bp, Homo sapiens
tgcatattaaagatt

SEQ ID NO: 1145679 - DNA, 15 bp, Homo sapiens
ctgcatattaaagat

SEQ ID NO: 1145680 - DNA, 15 bp, Homo sapiens
tctgcatattaaaga

SEQ ID NO: 1145681 - DNA, 15 bp, Homo sapiens
ttctgcatattaaag

SEQ ID NO: 1145682 - DNA, 15 bp, Homo sapiens
cttctgcatattaaa

SEQ ID NO: 1145683 - DNA, 15 bp, Homo sapiens
acttctgcatattaa

SEQ ID NO: 1145684 - DNA, 15 bp, Homo sapiens
gacttctgcatatta

SEQ ID NO: 1145685 - DNA, 15 bp, Homo sapiens
agacttctgcatatt

SEQ ID NO: 1145686 - DNA, 15 bp, Homo sapiens
gagacttctgcatat

SEQ ID NO: 1145687 - DNA, 15 bp, Homo sapiens
cgagacttctgcata

SEQ ID NO: 1145688 - DNA, 15 bp, Homo sapiens
acgagacttctgcat

SEQ ID NO: 1145689 - DNA, 15 bp, Homo sapiens
tacgagacttctgca

SEQ ID NO: 1145690 - DNA, 15 bp, Homo sapiens
gtacgagacttctgc

SEQ ID NO: 1145691 - DNA, 15 bp, Homo sapiens
agtacgagacttctg

SEQ ID NO: 1145692 - DNA, 15 bp, Homo sapiens
aagtacgagacttct

SEQ ID NO: 1145693 - DNA, 15 bp, Homo sapiens
caagtacgagacttc

SEQ ID NO: 1145694 - DNA, 15 bp, Homo sapiens
acaagtacgagactt

SEQ ID NO: 1145695 - DNA, 15 bp, Homo sapiens
tacaagtacgagact

SEQ ID NO: 1145696 - DNA, 15 bp, Homo sapiens
gtacaagtacgagac

SEQ ID NO: 1145697 - DNA, 15 bp, Homo sapiens
ggtacaagtacgaga

SEQ ID NO: 1145698 - DNA, 15 bp, Homo sapiens
aggtacaagtacgag

SEQ ID NO: 1145699 - DNA, 15 bp, Homo sapiens
caggtacaagtacga

SEQ ID NO: 1145700 - DNA, 15 bp, Homo sapiens
acaggtacaagtacg

SEQ ID NO: 1145701 - DNA, 15 bp, Homo sapiens
aacaggtacaagtac

SEQ ID NO: 1145702 - DNA, 15 bp, Homo sapiens
gaacaggtacaagta

SEQ ID NO: 1145703 - DNA, 15 bp, Homo sapiens
tgaacaggtacaagt

SEQ ID NO: 1145704 - DNA, 15 bp, Homo sapiens
ctgaacaggtacaag

SEQ ID NO: 1145705 - DNA, 15 bp, Homo sapiens
cctgaacaggtacaa

SEQ ID NO: 1145706 - DNA, 15 bp, Homo sapiens
acctgaacaggtaca

SEQ ID NO: 1145707 - DNA, 15 bp, Homo sapiens
gacctgaacaggtac

SEQ ID NO: 1145708 - DNA, 15 bp, Homo sapiens
agacctgaacaggta

SEQ ID NO: 1145709 - DNA, 15 bp, Homo sapiens
tagacctgaacaggt

SEQ ID NO: 1145710 - DNA, 15 bp, Homo sapiens
gtagacctgaacagg

SEQ ID NO: 1145711 - DNA, 15 bp, Homo sapiens
tgtagacctgaacag

SEQ ID NO: 1145712 - DNA, 15 bp, Homo sapiens
atgtagacctgaaca

SEQ ID NO: 1145713 - DNA, 15 bp, Homo sapiens
aatgtagacctgaac

SEQ ID NO: 1145714 - DNA, 15 bp, Homo sapiens
taatgtagacctgaa

SEQ ID NO: 1145715 - DNA, 15 bp, Homo sapiens
ttaatgtagacctga

SEQ ID NO: 1145716 - DNA, 15 bp, Homo sapiens
tttaatgtagacctg

SEQ ID NO: 1145717 - DNA, 15 bp, Homo sapiens
atttaatgtagacct

SEQ ID NO: 1145718 - DNA, 15 bp, Homo sapiens
catttaatgtagacc

SEQ ID NO: 1145719 - DNA, 15 bp, Homo sapiens
acatttaatgtagac

SEQ ID NO: 1145720 - DNA, 15 bp, Homo sapiens
gacatttaatgtaga

SEQ ID NO: 1145721 - DNA, 15 bp, Homo sapiens
tgacatttaatgtag

SEQ ID NO: 1145722 - DNA, 15 bp, Homo sapiens
ctgacatttaatgta

SEQ ID NO: 1145723 - DNA, 15 bp, Homo sapiens
actgacatttaatgt

SEQ ID NO: 1145724 - DNA, 15 bp, Homo sapiens
aactgacatttaatg

SEQ ID NO: 1145725 - DNA, 15 bp, Homo sapiens
caactgacatttaat

SEQ ID NO: 1145726 - DNA, 15 bp, Homo sapiens
tcaactgacatttaa

SEQ ID NO: 1145727 - DNA, 15 bp, Homo sapiens
ttcaactgacattta

SEQ ID NO: 1145728 - DNA, 15 bp, Homo sapiens
tttcaactgacattt

SEQ ID NO: 1145729 - DNA, 15 bp, Homo sapiens
gtttcaactgacatt

SEQ ID NO: 1145730 - DNA, 15 bp, Homo sapiens
agtttcaactgacat

SEQ ID NO: 1145731 - DNA, 15 bp, Homo sapiens
tagtttcaactgaca

SEQ ID NO: 1145732 - DNA, 15 bp, Homo sapiens
gtagtttcaactgac

SEQ ID NO: 1145733 - DNA, 15 bp, Homo sapiens
tgtagtttcaactga

SEQ ID NO: 1145734 - DNA, 15 bp, Homo sapiens
atgtagtttcaactg

SEQ ID NO: 1145735 - DNA, 15 bp, Homo sapiens
gatgtagtttcaact

SEQ ID NO: 1145736 - DNA, 15 bp, Homo sapiens
ggatgtagtttcaac

SEQ ID NO: 1145737 - DNA, 15 bp, Homo sapiens
tggatgtagtttcaa

SEQ ID NO: 1145738 - DNA, 15 bp, Homo sapiens
ctggatgtagtttca

SEQ ID NO: 1145739 - DNA, 15 bp, Homo sapiens
actggatgtagtttc

SEQ ID NO: 1145740 - DNA, 15 bp, Homo sapiens
tactggatgtagttt

SEQ ID NO: 1145741 - DNA, 15 bp, Homo sapiens
ttactggatgtagtt

SEQ ID NO: 1145742 - DNA, 15 bp, Homo sapiens
gttactggatgtagt

SEQ ID NO: 1145743 - DNA, 15 bp, Homo sapiens
tgttactggatgtag

SEQ ID NO: 1145744 - DNA, 15 bp, Homo sapiens
atgttactggatgta

SEQ ID NO: 1145745 - DNA, 15 bp, Homo sapiens
catgttactggatgt

SEQ ID NO: 1145746 - DNA, 15 bp, Homo sapiens
ccatgttactggatg

SEQ ID NO: 1145747 - DNA, 15 bp, Homo sapiens
accatgttactggat

SEQ ID NO: 1145748 - DNA, 15 bp, Homo sapiens
caccatgttactgga

SEQ ID NO: 1145749 - DNA, 15 bp, Homo sapiens
acaccatgttactgg

SEQ ID NO: 1145750 - DNA, 15 bp, Homo sapiens
aacaccatgttactg

SEQ ID NO: 1145751 - DNA, 15 bp, Homo sapiens
taacaccatgttact

SEQ ID NO: 1145752 - DNA, 15 bp, Homo sapiens
ttaacaccatgttac

SEQ ID NO: 1145753 - DNA, 15 bp, Homo sapiens
attaacaccatgtta

SEQ ID NO: 1145754 - DNA, 15 bp, Homo sapiens
tattaacaccatgtt

SEQ ID NO: 1145755 - DNA, 15 bp, Homo sapiens
atattaacaccatgt

SEQ ID NO: 1145756 - DNA, 15 bp, Homo sapiens
catattaacaccatg

SEQ ID NO: 1145757 - DNA, 15 bp, Homo sapiens
tcatattaacaccat

SEQ ID NO: 1145758 - DNA, 15 bp, Homo sapiens
atcatattaacacca

SEQ ID NO: 1145759 - DNA, 15 bp, Homo sapiens
catcatattaacacc

SEQ ID NO: 1145760 - DNA, 15 bp, Homo sapiens
gcatcatattaacac

SEQ ID NO: 1145761 - DNA, 15 bp, Homo sapiens
agcatcatattaaca

SEQ ID NO: 1145762 - DNA, 15 bp, Homo sapiens
aagcatcatattaac

SEQ ID NO: 1145763 - DNA, 15 bp, Homo sapiens
aaagcatcatattaa

SEQ ID NO: 1145764 - DNA, 15 bp, Homo sapiens
gaaagcatcatatta

SEQ ID NO: 1145765 - DNA, 15 bp, Homo sapiens
tgaaagcatcatatt

SEQ ID NO: 1145766 - DNA, 15 bp, Homo sapiens
atgaaagcatcatat

SEQ ID NO: 1145767 - DNA, 15 bp, Homo sapiens
tatgaaagcatcata

SEQ ID NO: 1145768 - DNA, 15 bp, Homo sapiens
ttatgaaagcatcat

SEQ ID NO: 1145769 - DNA, 15 bp, Homo sapiens
cttatgaaagcatca

SEQ ID NO: 1145770 - DNA, 15 bp, Homo sapiens
ccttatgaaagcatc

SEQ ID NO: 1145771 - DNA, 15 bp, Homo sapiens
tccttatgaaagcat

SEQ ID NO: 1145772 - DNA, 15 bp, Homo sapiens
ttccttatgaaagca

SEQ ID NO: 1145773 - DNA, 15 bp, Homo sapiens
tttccttatgaaagc

SEQ ID NO: 1145774 - DNA, 15 bp, Homo sapiens
atttccttatgaaag

SEQ ID NO: 1145775 - DNA, 15 bp, Homo sapiens
aatttccttatgaaa

SEQ ID NO: 1145776 - DNA, 15 bp, Homo sapiens
taatttccttatgaa

SEQ ID NO: 1145777 - DNA, 15 bp, Homo sapiens
ttaatttccttatga

SEQ ID NO: 1145778 - DNA, 15 bp, Homo sapiens
attaatttccttatg

SEQ ID NO: 1145779 - DNA, 15 bp, Homo sapiens
aattaatttccttat

SEQ ID NO: 1145780 - DNA, 15 bp, Homo sapiens
aaattaatttcctta

SEQ ID NO: 1145781 - DNA, 15 bp, Homo sapiens
aaaattaatttcctt

SEQ ID NO: 1145782 - DNA, 15 bp, Homo sapiens
aaaaattaatttcct

SEQ ID NO: 1145783 - DNA, 15 bp, Homo sapiens
taaaaattaatttcc

SEQ ID NO: 1145784 - DNA, 15 bp, Homo sapiens
ttaaaaattaatttc

SEQ ID NO: 1145785 - DNA, 15 bp, Homo sapiens
gttaaaaattaattt

SEQ ID NO: 1145786 - DNA, 15 bp, Homo sapiens
tgttaaaaattaatt

SEQ ID NO: 1145787 - DNA, 15 bp, Homo sapiens
atgttaaaaattaat

SEQ ID NO: 1145788 - DNA, 15 bp, Homo sapiens
tatgttaaaaattaa

SEQ ID NO: 1145789 - DNA, 15 bp, Homo sapiens
ttatgttaaaaatta

SEQ ID NO: 1145790 - DNA, 15 bp, Homo sapiens
attatgttaaaaatt

SEQ ID NO: 1145791 - DNA, 15 bp, Homo sapiens
aattatgttaaaaat

SEQ ID NO: 1145792 - DNA, 15 bp, Homo sapiens
gaattatgttaaaaa

SEQ ID NO: 1145793 - DNA, 15 bp, Homo sapiens
tgaattatgttaaaa

SEQ ID NO: 1145794 - DNA, 15 bp, Homo sapiens
ttgaattatgttaaa

SEQ ID NO: 1145795 - DNA, 15 bp, Homo sapiens
tttgaattatgttaa

SEQ ID NO: 1145796 - DNA, 15 bp, Homo sapiens
ttttgaattatgtta

SEQ ID NO: 1145797 - DNA, 15 bp, Homo sapiens
attttgaattatgtt

SEQ ID NO: 1145798 - DNA, 15 bp, Homo sapiens
cattttgaattatgt

SEQ ID NO: 1145799 - DNA, 15 bp, Homo sapiens
acattttgaattatg

SEQ ID NO: 1145800 - DNA, 15 bp, Homo sapiens
gacattttgaattat

SEQ ID NO: 1145801 - DNA, 15 bp, Homo sapiens
tgacattttgaatta

SEQ ID NO: 1145802 - DNA, 15 bp, Homo sapiens
gtgacattttgaatt

SEQ ID NO: 1145803 - DNA, 15 bp, Homo sapiens
tgtgacattttgaat

SEQ ID NO: 1145804 - DNA, 15 bp, Homo sapiens
ctgtgacattttgaa

SEQ ID NO: 1145805 - DNA, 15 bp, Homo sapiens
cctgtgacattttga

SEQ ID NO: 1145806 - DNA, 15 bp, Homo sapiens
gcctgtgacattttg

SEQ ID NO: 1145807 - DNA, 15 bp, Homo sapiens
agcctgtgacatttt

SEQ ID NO: 1145808 - DNA, 15 bp, Homo sapiens
cagcctgtgacattt

SEQ ID NO: 1145809 - DNA, 15 bp, Homo sapiens
ccagcctgtgacatt

SEQ ID NO: 1145810 - DNA, 15 bp, Homo sapiens
cccagcctgtgacat

SEQ ID NO: 1145811 - DNA, 15 bp, Homo sapiens
acccagcctgtgaca

SEQ ID NO: 1145812 - DNA, 15 bp, Homo sapiens
cacccagcctgtgac

SEQ ID NO: 1145813 - DNA, 15 bp, Homo sapiens
acacccagcctgtga

SEQ ID NO: 1145814 - DNA, 15 bp, Homo sapiens
cacacccagcctgtg

SEQ ID NO: 1145815 - DNA, 15 bp, Homo sapiens
ccacacccagcctgt

SEQ ID NO: 1145816 - DNA, 15 bp, Homo sapiens
accacacccagcctg

SEQ ID NO: 1145817 - DNA, 15 bp, Homo sapiens
caccacacccagcct

SEQ ID NO: 1145818 - DNA, 15 bp, Homo sapiens
tcaccacacccagcc

SEQ ID NO: 1145819 - DNA, 15 bp, Homo sapiens
gtcaccacacccagc

SEQ ID NO: 1145820 - DNA, 15 bp, Homo sapiens
agtcaccacacccag

SEQ ID NO: 1145821 - DNA, 15 bp, Homo sapiens
gagtcaccacaccca

SEQ ID NO: 1145822 - DNA, 15 bp, Homo sapiens
tgagtcaccacaccc

SEQ ID NO: 1145823 - DNA, 15 bp, Homo sapiens
atgagtcaccacacc

SEQ ID NO: 1145824 - DNA, 15 bp, Homo sapiens
aatgagtcaccacac

SEQ ID NO: 1145825 - DNA, 15 bp, Homo sapiens
gaatgagtcaccaca

SEQ ID NO: 1145826 - DNA, 15 bp, Homo sapiens
ggaatgagtcaccac

SEQ ID NO: 1145827 - DNA, 15 bp, Homo sapiens
aggaatgagtcacca

SEQ ID NO: 1145828 - DNA, 15 bp, Homo sapiens
caggaatgagtcacc

SEQ ID NO: 1145829 - DNA, 15 bp, Homo sapiens
acaggaatgagtcac

SEQ ID NO: 1145830 - DNA, 15 bp, Homo sapiens
tacaggaatgagtca

SEQ ID NO: 1145831 - DNA, 15 bp, Homo sapiens
atacaggaatgagtc

SEQ ID NO: 1145832 - DNA, 15 bp, Homo sapiens
gatacaggaatgagt

SEQ ID NO: 1145833 - DNA, 15 bp, Homo sapiens
ggatacaggaatgag

SEQ ID NO: 1145834 - DNA, 15 bp, Homo sapiens
gggatacaggaatga

SEQ ID NO: 1145835 - DNA, 15 bp, Homo sapiens
tgggatacaggaatg

SEQ ID NO: 1145836 - DNA, 15 bp, Homo sapiens
ctgggatacaggaat

SEQ ID NO: 1145837 - DNA, 15 bp, Homo sapiens
gctgggatacaggaa

SEQ ID NO: 1145838 - DNA, 15 bp, Homo sapiens
tgctgggatacagga

SEQ ID NO: 1145839 - DNA, 15 bp, Homo sapiens
gtgctgggatacagg

SEQ ID NO: 1145840 - DNA, 15 bp, Homo sapiens
agtgctgggatacag

SEQ ID NO: 1145841 - DNA, 15 bp, Homo sapiens
aagtgctgggataca

SEQ ID NO: 1145842 - DNA, 15 bp, Homo sapiens
aaagtgctgggatac

SEQ ID NO: 1145843 - DNA, 15 bp, Homo sapiens
gtaccttggcctccc

SEQ ID NO: 1145844 - DNA, 15 bp, Homo sapiens
tgtaccttggcctcc

SEQ ID NO: 1145845 - DNA, 15 bp, Homo sapiens
atgtaccttggcctc

SEQ ID NO: 1145846 - DNA, 15 bp, Homo sapiens
tatgtaccttggcct

SEQ ID NO: 1145847 - DNA, 15 bp, Homo sapiens
ttatgtaccttggcc

SEQ ID NO: 1145848 - DNA, 15 bp, Homo sapiens
tttatgtaccttggc

SEQ ID NO: 1145849 - DNA, 15 bp, Homo sapiens
atttatgtaccttgg

SEQ ID NO: 1145850 - DNA, 15 bp, Homo sapiens
gatttatgtaccttg

SEQ ID NO: 1145851 - DNA, 15 bp, Homo sapiens
tgatttatgtacctt

SEQ ID NO: 1145852 - DNA, 15 bp, Homo sapiens
gtgatttatgtacct

SEQ ID NO: 1145853 - DNA, 15 bp, Homo sapiens
agtgatttatgtacc

SEQ ID NO: 1145854 - DNA, 15 bp, Homo sapiens
aagtgatttatgtac

SEQ ID NO: 1145855 - DNA, 15 bp, Homo sapiens
caagtgatttatgta

SEQ ID NO: 1145856 - DNA, 15 bp, Homo sapiens
tcaagtgatttatgt

SEQ ID NO: 1145857 - DNA, 15 bp, Homo sapiens
ctcaagtgatttatg

SEQ ID NO: 1145858 - DNA, 15 bp, Homo sapiens
cctcaagtgatttat

SEQ ID NO: 1145859 - DNA, 15 bp, Homo sapiens
acctcaagtgattta

SEQ ID NO: 1145860 - DNA, 15 bp, Homo sapiens
tccaggctggtctgg

SEQ ID NO: 1145861 - DNA, 15 bp, Homo sapiens
gtccaggctggtctg

SEQ ID NO: 1145862 - DNA, 15 bp, Homo sapiens
catgttgtccaggct

SEQ ID NO: 1145863 - DNA, 15 bp, Homo sapiens
ccatgttgtccaggc

SEQ ID NO: 1145864 - DNA, 15 bp, Homo sapiens
gccatgttgtccagg

SEQ ID NO: 1145865 - DNA, 15 bp, Homo sapiens
tgccatgttgtccag

SEQ ID NO: 1145866 - DNA, 15 bp, Homo sapiens
ttgccatgttgtcca

SEQ ID NO: 1145867 - DNA, 15 bp, Homo sapiens
tttgccatgttgtcc

SEQ ID NO: 1145868 - DNA, 15 bp, Homo sapiens
ttttgccatgttgtc

SEQ ID NO: 1145869 - DNA, 15 bp, Homo sapiens
gttttgccatgttgt

SEQ ID NO: 1145870 - DNA, 15 bp, Homo sapiens
agagttttgccatgt

SEQ ID NO: 1145871 - DNA, 15 bp, Homo sapiens
cagagttttgccatg

SEQ ID NO: 1145872 - DNA, 15 bp, Homo sapiens
acagagttttgccat

SEQ ID NO: 1145873 - DNA, 15 bp, Homo sapiens
gacagagttttgcca

SEQ ID NO: 1145874 - DNA, 15 bp, Homo sapiens
agacagagttttgcc

SEQ ID NO: 1145875 - DNA, 15 bp, Homo sapiens
gagacagagttttgc

SEQ ID NO: 1145876 - DNA, 15 bp, Homo sapiens
agagacagagttttg

SEQ ID NO: 1145877 - DNA, 15 bp, Homo sapiens
tagagacagagtttt

SEQ ID NO: 1145878 - DNA, 15 bp, Homo sapiens
gtagagacagagttt

SEQ ID NO: 1145879 - DNA, 15 bp, Homo sapiens
agtagagacagagtt

SEQ ID NO: 1145880 - DNA, 15 bp, Homo sapiens
tagtagagacagagt

SEQ ID NO: 1145881 - DNA, 15 bp, Homo sapiens
ttagtagagacagag

SEQ ID NO: 1145882 - DNA, 15 bp, Homo sapiens
tttagtagagacaga

SEQ ID NO: 1145883 - DNA, 15 bp, Homo sapiens
catatttttagtaga

SEQ ID NO: 1145884 - DNA, 15 bp, Homo sapiens
tcatatttttagtag

SEQ ID NO: 1145885 - DNA, 15 bp, Homo sapiens
ttcatatttttagta

SEQ ID NO: 1145886 - DNA, 15 bp, Homo sapiens
tttcatatttttagt

SEQ ID NO: 1145887 - DNA, 15 bp, Homo sapiens
ttttcatatttttag

SEQ ID NO: 1145888 - DNA, 15 bp, Homo sapiens
tttttcatattttta

SEQ ID NO: 1145889 - DNA, 15 bp, Homo sapiens
gtttttcatattttt

SEQ ID NO: 1145890 - DNA, 15 bp, Homo sapiens
agtttttcatatttt

SEQ ID NO: 1145891 - DNA, 15 bp, Homo sapiens
tagtttttcatattt

SEQ ID NO: 1145892 - DNA, 15 bp, Homo sapiens
ctagtttttcatatt

SEQ ID NO: 1145893 - DNA, 15 bp, Homo sapiens
gctagtttttcatat

SEQ ID NO: 1145894 - DNA, 15 bp, Homo sapiens
ggctagtttttcata

SEQ ID NO: 1145895 - DNA, 15 bp, Homo sapiens
aggctagtttttcat

SEQ ID NO: 1145896 - DNA, 15 bp, Homo sapiens
aaggctagtttttca

SEQ ID NO: 1145897 - DNA, 15 bp, Homo sapiens
caaggctagtttttc

SEQ ID NO: 1145898 - DNA, 15 bp, Homo sapiens
gcaaggctagttttt

SEQ ID NO: 1145899 - DNA, 15 bp, Homo sapiens
cgcaaggctagtttt

SEQ ID NO: 1145900 - DNA, 15 bp, Homo sapiens
acgcaaggctagttt

SEQ ID NO: 1145901 - DNA, 15 bp, Homo sapiens
cacgcaaggctagtt

SEQ ID NO: 1145902 - DNA, 15 bp, Homo sapiens
ccacgcaaggctagt

SEQ ID NO: 1145903 - DNA, 15 bp, Homo sapiens
accacgcaaggctag

SEQ ID NO: 1145904 - DNA, 15 bp, Homo sapiens
caccacgcaaggcta

SEQ ID NO: 1145905 - DNA, 15 bp, Homo sapiens
ccaccacgcaaggct

SEQ ID NO: 1145906 - DNA, 15 bp, Homo sapiens
accaccacgcaaggc

SEQ ID NO: 1145907 - DNA, 15 bp, Homo sapiens
caccaccacgcaagg

SEQ ID NO: 1145908 - DNA, 15 bp, Homo sapiens
gcaccaccacgcaag

SEQ ID NO: 1145909 - DNA, 15 bp, Homo sapiens
tgcaccaccacgcaa

SEQ ID NO: 1145910 - DNA, 15 bp, Homo sapiens
atgcaccaccacgca

SEQ ID NO: 1145911 - DNA, 15 bp, Homo sapiens
gtctcagcctcccaa

SEQ ID NO: 1145912 - DNA, 15 bp, Homo sapiens
tgtctcagcctccca

SEQ ID NO: 1145913 - DNA, 15 bp, Homo sapiens
ctgtctcagcctccc

SEQ ID NO: 1145914 - DNA, 15 bp, Homo sapiens
cctgtctcagcctcc

SEQ ID NO: 1145915 - DNA, 15 bp, Homo sapiens
tcctgtctcagcctc

SEQ ID NO: 1145916 - DNA, 15 bp, Homo sapiens
tctcctgtctcagcc

SEQ ID NO: 1145917 - DNA, 15 bp, Homo sapiens
ttctcctgtctcagc

SEQ ID NO: 1145918 - DNA, 15 bp, Homo sapiens
attctcctgtctcag

SEQ ID NO: 1145919 - DNA, 15 bp, Homo sapiens
gattctcctgtctca

SEQ ID NO: 1145920 - DNA, 15 bp, Homo sapiens
cgattctcctgtctc

SEQ ID NO: 1145921 - DNA, 15 bp, Homo sapiens
gcgattctcctgtct

SEQ ID NO: 1145922 - DNA, 15 bp, Homo sapiens
agcgattctcctgtc

SEQ ID NO: 1145923 - DNA, 15 bp, Homo sapiens
cagcgattctcctgt

SEQ ID NO: 1145924 - DNA, 15 bp, Homo sapiens
tcagcgattctcctg

SEQ ID NO: 1145925 - DNA, 15 bp, Homo sapiens
ttcagcgattctcct

SEQ ID NO: 1145926 - DNA, 15 bp, Homo sapiens
gttcagcgattctcc

SEQ ID NO: 1145927 - DNA, 15 bp, Homo sapiens
agttcagcgattctc

SEQ ID NO: 1145928 - DNA, 15 bp, Homo sapiens
gagttcagcgattct

SEQ ID NO: 1145929 - DNA, 15 bp, Homo sapiens
tgagttcagcgattc

SEQ ID NO: 1145930 - DNA, 15 bp, Homo sapiens
ctgagttcagcgatt

SEQ ID NO: 1145931 - DNA, 15 bp, Homo sapiens
cctgagttcagcgat

SEQ ID NO: 1145932 - DNA, 15 bp, Homo sapiens
tcctgagttcagcga

SEQ ID NO: 1145933 - DNA, 15 bp, Homo sapiens
ctcctgagttcagcg

SEQ ID NO: 1145934 - DNA, 15 bp, Homo sapiens
cctcctgagttcagc

SEQ ID NO: 1145935 - DNA, 15 bp, Homo sapiens
acctcctgagttcag

SEQ ID NO: 1145936 - DNA, 15 bp, Homo sapiens
cacctcctgagttca

SEQ ID NO: 1145937 - DNA, 15 bp, Homo sapiens
ccacctcctgagttc

SEQ ID NO: 1145938 - DNA, 15 bp, Homo sapiens
tccacctcctgagtt

SEQ ID NO: 1145939 - DNA, 15 bp, Homo sapiens
ctccacctcctgagt

SEQ ID NO: 1145940 - DNA, 15 bp, Homo sapiens
cctccacctcctgag

SEQ ID NO: 1145941 - DNA, 15 bp, Homo sapiens
acctccacctcctga

SEQ ID NO: 1145942 - DNA, 15 bp, Homo sapiens
cgacctccacctcct

SEQ ID NO: 1145943 - DNA, 15 bp, Homo sapiens
gcgacctccacctcc

SEQ ID NO: 1145944 - DNA, 15 bp, Homo sapiens
tgcgacctccacctc

SEQ ID NO: 1145945 - DNA, 15 bp, Homo sapiens
ctgcgacctccacct

SEQ ID NO: 1145946 - DNA, 15 bp, Homo sapiens
actgcgacctccacc

SEQ ID NO: 1145947 - DNA, 15 bp, Homo sapiens
cactgcgacctccac

SEQ ID NO: 1145948 - DNA, 15 bp, Homo sapiens
tcactgcgacctcca

SEQ ID NO: 1145949 - DNA, 15 bp, Homo sapiens
ggctcactgcgacct

SEQ ID NO: 1145950 - DNA, 15 bp, Homo sapiens
gggctcactgcgacc

SEQ ID NO: 1145951 - DNA, 15 bp, Homo sapiens
tgggctcactgcgac

SEQ ID NO: 1145952 - DNA, 15 bp, Homo sapiens
ctgggctcactgcga

SEQ ID NO: 1145953 - DNA, 15 bp, Homo sapiens
tctgggctcactgcg

SEQ ID NO: 1145954 - DNA, 15 bp, Homo sapiens
atgatctgggctcac

SEQ ID NO: 1145955 - DNA, 15 bp, Homo sapiens
catgatctgggctca

SEQ ID NO: 1145956 - DNA, 15 bp, Homo sapiens
gcatgatctgggctc

SEQ ID NO: 1145957 - DNA, 15 bp, Homo sapiens
ggcatgatctgggct

SEQ ID NO: 1145958 - DNA, 15 bp, Homo sapiens
tggcatgatctgggc

SEQ ID NO: 1145959 - DNA, 15 bp, Homo sapiens
gtggcatgatctggg

SEQ ID NO: 1145960 - DNA, 15 bp, Homo sapiens
agtggcatgatctgg

SEQ ID NO: 1145961 - DNA, 15 bp, Homo sapiens
aagtggcatgatctg

SEQ ID NO: 1145962 - DNA, 15 bp, Homo sapiens
gaagtggcatgatct

SEQ ID NO: 1145963 - DNA, 15 bp, Homo sapiens
tgaagtggcatgatc

SEQ ID NO: 1145964 - DNA, 15 bp, Homo sapiens
gtgaagtggcatgat

SEQ ID NO: 1145965 - DNA, 15 bp, Homo sapiens
agtgaagtggcatga

SEQ ID NO: 1145966 - DNA, 15 bp, Homo sapiens
gagtgaagtggcatg

SEQ ID NO: 1145967 - DNA, 15 bp, Homo sapiens
ggagtgaagtggcat

SEQ ID NO: 1145968 - DNA, 15 bp, Homo sapiens
tggagtgaagtggca

SEQ ID NO: 1145969 - DNA, 15 bp, Homo sapiens
ctggagtgaagtggc

SEQ ID NO: 1145970 - DNA, 15 bp, Homo sapiens
gctggagtgaagtgg

SEQ ID NO: 1145971 - DNA, 15 bp, Homo sapiens
agctggagtgaagtg

SEQ ID NO: 1145972 - DNA, 15 bp, Homo sapiens
aagctggagtgaagt

SEQ ID NO: 1145973 - DNA, 15 bp, Homo sapiens
caagctggagtgaag

SEQ ID NO: 1145974 - DNA, 15 bp, Homo sapiens
ccaagctggagtgaa

SEQ ID NO: 1145975 - DNA, 15 bp, Homo sapiens
cccaagctggagtga

SEQ ID NO: 1145976 - DNA, 15 bp, Homo sapiens
tactctgtcacccaa

SEQ ID NO: 1145977 - DNA, 15 bp, Homo sapiens
ttactctgtcaccca

SEQ ID NO: 1145978 - DNA, 15 bp, Homo sapiens
cttactctgtcaccc

SEQ ID NO: 1145979 - DNA, 15 bp, Homo sapiens
tcttactctgtcacc

SEQ ID NO: 1145980 - DNA, 15 bp, Homo sapiens
gtcttactctgtcac

SEQ ID NO: 1145981 - DNA, 15 bp, Homo sapiens
agtcttactctgtca

SEQ ID NO: 1145982 - DNA, 15 bp, Homo sapiens
aagtcttactctgtc

SEQ ID NO: 1145983 - DNA, 15 bp, Homo sapiens
gaagtcttactctgt

SEQ ID NO: 1145984 - DNA, 15 bp, Homo sapiens
tgaagtcttactctg

SEQ ID NO: 1145985 - DNA, 15 bp, Homo sapiens
atgaagtcttactct

SEQ ID NO: 1145986 - DNA, 15 bp, Homo sapiens
gatgaagtcttactc

SEQ ID NO: 1145987 - DNA, 15 bp, Homo sapiens
agatgaagtcttact

SEQ ID NO: 1145988 - DNA, 15 bp, Homo sapiens
gagatgaagtcttac

SEQ ID NO: 1145989 - DNA, 15 bp, Homo sapiens
tgagatgaagtctta

SEQ ID NO: 1145990 - DNA, 15 bp, Homo sapiens
ttgagatgaagtctt

SEQ ID NO: 1145991 - DNA, 15 bp, Homo sapiens
tttgagatgaagtct

SEQ ID NO: 1145992 - DNA, 15 bp, Homo sapiens
ttttgagatgaagtc

SEQ ID NO: 1145993 - DNA, 15 bp, Homo sapiens
tttttgagatgaagt

SEQ ID NO: 1145994 - DNA, 15 bp, Homo sapiens
ttttttgagatgaag

SEQ ID NO: 1145995 - DNA, 15 bp, Homo sapiens
tttttttgagatgaa

SEQ ID NO: 1145996 - DNA, 15 bp, Homo sapiens
ttttttttgagatga

SEQ ID NO: 1145997 - DNA, 15 bp, Homo sapiens
gtgaatttttttttt

SEQ ID NO: 1145998 - DNA, 15 bp, Homo sapiens
tgtgaattttttttt

SEQ ID NO: 1145999 - DNA, 15 bp, Homo sapiens
ctgtgaatttttttt

SEQ ID NO: 1146000 - DNA, 15 bp, Homo sapiens
actgtgaattttttt

SEQ ID NO: 1146001 - DNA, 15 bp, Homo sapiens
aactgtgaatttttt

SEQ ID NO: 1146002 - DNA, 15 bp, Homo sapiens
gaactgtgaattttt

SEQ ID NO: 1146003 - DNA, 15 bp, Homo sapiens
agaactgtgaatttt

SEQ ID NO: 1146004 - DNA, 15 bp, Homo sapiens
aagaactgtgaattt

SEQ ID NO: 1146005 - DNA, 15 bp, Homo sapiens
taagaactgtgaatt

SEQ ID NO: 1146006 - DNA, 15 bp, Homo sapiens
gtaagaactgtgaat

SEQ ID NO: 1146007 - DNA, 15 bp, Homo sapiens
agtaagaactgtgaa

SEQ ID NO: 1146008 - DNA, 15 bp, Homo sapiens
aagtaagaactgtga

SEQ ID NO: 1146009 - DNA, 15 bp, Homo sapiens
gaagtaagaactgtg

SEQ ID NO: 1146010 - DNA, 15 bp, Homo sapiens
cgaagtaagaactgt

SEQ ID NO: 1146011 - DNA, 15 bp, Homo sapiens
tcgaagtaagaactg

SEQ ID NO: 1146012 - DNA, 15 bp, Homo sapiens
atcgaagtaagaact

SEQ ID NO: 1146013 - DNA, 15 bp, Homo sapiens
aatcgaagtaagaac

SEQ ID NO: 1146014 - DNA, 15 bp, Homo sapiens
taatcgaagtaagaa

SEQ ID NO: 1146015 - DNA, 15 bp, Homo sapiens
gtaatcgaagtaaga

SEQ ID NO: 1146016 - DNA, 15 bp, Homo sapiens
ggtaatcgaagtaag

SEQ ID NO: 1146017 - DNA, 15 bp, Homo sapiens
gggtaatcgaagtaa

SEQ ID NO: 1146018 - DNA, 15 bp, Homo sapiens
agggtaatcgaagta

SEQ ID NO: 1146019 - DNA, 15 bp, Homo sapiens
aagggtaatcgaagt

SEQ ID NO: 1146020 - DNA, 15 bp, Homo sapiens
taagggtaatcgaag

SEQ ID NO: 1146021 - DNA, 15 bp, Homo sapiens
ctaagggtaatcgaa

SEQ ID NO: 1146022 - DNA, 15 bp, Homo sapiens
actaagggtaatcga

SEQ ID NO: 1146023 - DNA, 15 bp, Homo sapiens
aactaagggtaatcg

SEQ ID NO: 1146024 - DNA, 15 bp, Homo sapiens
taactaagggtaatc

SEQ ID NO: 1146025 - DNA, 15 bp, Homo sapiens
ttaactaagggtaat

SEQ ID NO: 1146026 - DNA, 15 bp, Homo sapiens
cttaactaagggtaa

SEQ ID NO: 1146027 - DNA, 15 bp, Homo sapiens
ccttaactaagggta

SEQ ID NO: 1146028 - DNA, 15 bp, Homo sapiens
tccttaactaagggt

SEQ ID NO: 1146029 - DNA, 15 bp, Homo sapiens
ttccttaactaaggg

SEQ ID NO: 1146030 - DNA, 15 bp, Homo sapiens
cttccttaactaagg

SEQ ID NO: 1146031 - DNA, 15 bp, Homo sapiens
acttccttaactaag

SEQ ID NO: 1146032 - DNA, 15 bp, Homo sapiens
cacttccttaactaa

SEQ ID NO: 1146033 - DNA, 15 bp, Homo sapiens
gcacttccttaacta

SEQ ID NO: 1146034 - DNA, 15 bp, Homo sapiens
tgcacttccttaact

SEQ ID NO: 1146035 - DNA, 15 bp, Homo sapiens
ttgcacttccttaac

SEQ ID NO: 1146036 - DNA, 15 bp, Homo sapiens
gttgcacttccttaa

SEQ ID NO: 1146037 - DNA, 15 bp, Homo sapiens
agttgcacttcctta

SEQ ID NO: 1146038 - DNA, 15 bp, Homo sapiens
aagttgcacttcctt

SEQ ID NO: 1146039 - DNA, 15 bp, Homo sapiens
aaagttgcacttcct

SEQ ID NO: 1146040 - DNA, 15 bp, Homo sapiens
taaagttgcacttcc

SEQ ID NO: 1146041 - DNA, 15 bp, Homo sapiens
ttaaagttgcacttc

SEQ ID NO: 1146042 - DNA, 15 bp, Homo sapiens
tttaaagttgcactt

SEQ ID NO: 1146043 - DNA, 15 bp, Homo sapiens
ttttaaagttgcact

SEQ ID NO: 1146044 - DNA, 15 bp, Homo sapiens
attttaaagttgcac

SEQ ID NO: 1146045 - DNA, 15 bp, Homo sapiens
tattttaaagttgca

SEQ ID NO: 1146046 - DNA, 15 bp, Homo sapiens
atattttaaagttgc

SEQ ID NO: 1146047 - DNA, 15 bp, Homo sapiens
tatattttaaagttg

SEQ ID NO: 1146048 - DNA, 15 bp, Homo sapiens
ttatattttaaagtt

SEQ ID NO: 1146049 - DNA, 15 bp, Homo sapiens
gttatattttaaagt

SEQ ID NO: 1146050 - DNA, 15 bp, Homo sapiens
tgttatattttaaag

SEQ ID NO: 1146051 - DNA, 15 bp, Homo sapiens
atgttatattttaaa

SEQ ID NO: 1146052 - DNA, 15 bp, Homo sapiens
aatgttatattttaa

SEQ ID NO: 1146053 - DNA, 15 bp, Homo sapiens
aaatgttatatttta

SEQ ID NO: 1146054 - DNA, 15 bp, Homo sapiens
gaaatgttatatttt

SEQ ID NO: 1146055 - DNA, 15 bp, Homo sapiens
ggaaatgttatattt

SEQ ID NO: 1146056 - DNA, 15 bp, Homo sapiens
gggaaatgttatatt

SEQ ID NO: 1146057 - DNA, 15 bp, Homo sapiens
agggaaatgttatat

SEQ ID NO: 1146058 - DNA, 15 bp, Homo sapiens
gagggaaatgttata

SEQ ID NO: 1146059 - DNA, 15 bp, Homo sapiens
tgagggaaatgttat

SEQ ID NO: 1146060 - DNA, 15 bp, Homo sapiens
ttgagggaaatgtta

SEQ ID NO: 1146061 - DNA, 15 bp, Homo sapiens
tttgagggaaatgtt

SEQ ID NO: 1146062 - DNA, 15 bp, Homo sapiens
atttgagggaaatgt

SEQ ID NO: 1146063 - DNA, 15 bp, Homo sapiens
aatttgagggaaatg

SEQ ID NO: 1146064 - DNA, 15 bp, Homo sapiens
taatttgagggaaat

SEQ ID NO: 1146065 - DNA, 15 bp, Homo sapiens
ataatttgagggaaa

SEQ ID NO: 1146066 - DNA, 15 bp, Homo sapiens
aataatttgagggaa

SEQ ID NO: 1146067 - DNA, 15 bp, Homo sapiens
caataatttgaggga

SEQ ID NO: 1146068 - DNA, 15 bp, Homo sapiens
gcaataatttgaggg

SEQ ID NO: 1146069 - DNA, 15 bp, Homo sapiens
tgcaataatttgagg

SEQ ID NO: 1146070 - DNA, 15 bp, Homo sapiens
atgcaataatttgag

SEQ ID NO: 1146071 - DNA, 15 bp, Homo sapiens
catgcaataatttga

SEQ ID NO: 1146072 - DNA, 15 bp, Homo sapiens
tcatgcaataatttg

SEQ ID NO: 1146073 - DNA, 15 bp, Homo sapiens
ttcatgcaataattt

SEQ ID NO: 1146074 - DNA, 15 bp, Homo sapiens
gttcatgcaataatt

SEQ ID NO: 1146075 - DNA, 15 bp, Homo sapiens
tgttcatgcaataat

SEQ ID NO: 1146076 - DNA, 15 bp, Homo sapiens
atgttcatgcaataa

SEQ ID NO: 1146077 - DNA, 15 bp, Homo sapiens
tatgttcatgcaata

SEQ ID NO: 1146078 - DNA, 15 bp, Homo sapiens
ttatgttcatgcaat

SEQ ID NO: 1146079 - DNA, 15 bp, Homo sapiens
tttatgttcatgcaa

SEQ ID NO: 1146080 - DNA, 15 bp, Homo sapiens
ttttatgttcatgca

SEQ ID NO: 1146081 - DNA, 15 bp, Homo sapiens
tttttatgttcatgc

SEQ ID NO: 1146082 - DNA, 15 bp, Homo sapiens
atttttatgttcatg

SEQ ID NO: 1146083 - DNA, 15 bp, Homo sapiens
aatttttatgttcat

SEQ ID NO: 1146084 - DNA, 15 bp, Homo sapiens
aaatttttatgttca

SEQ ID NO: 1146085 - DNA, 15 bp, Homo sapiens
aaaatttttatgttc

SEQ ID NO: 1146086 - DNA, 15 bp, Homo sapiens
taaaatttttatgtt

SEQ ID NO: 1146087 - DNA, 15 bp, Homo sapiens
ttaaaatttttatgt

SEQ ID NO: 1146088 - DNA, 15 bp, Homo sapiens
tttaaaatttttatg

SEQ ID NO: 1146089 - DNA, 15 bp, Homo sapiens
atttaaaatttttat

SEQ ID NO: 1146090 - DNA, 15 bp, Homo sapiens
ctatttaaaattttt

SEQ ID NO: 1146091 - DNA, 15 bp, Homo sapiens
tctatttaaaatttt

SEQ ID NO: 1146092 - DNA, 15 bp, Homo sapiens
ctctatttaaaattt

SEQ ID NO: 1146093 - DNA, 15 bp, Homo sapiens
actctatttaaaatt

SEQ ID NO: 1146094 - DNA, 15 bp, Homo sapiens
aactctatttaaaat

SEQ ID NO: 1146095 - DNA, 15 bp, Homo sapiens
aaactctatttaaaa

SEQ ID NO: 1146096 - DNA, 15 bp, Homo sapiens
caaactctatttaaa

SEQ ID NO: 1146097 - DNA, 15 bp, Homo sapiens
acaaactctatttaa

SEQ ID NO: 1146098 - DNA, 15 bp, Homo sapiens
tacaaactctattta

SEQ ID NO: 1146099 - DNA, 15 bp, Homo sapiens
atacaaactctattt

SEQ ID NO: 1146100 - DNA, 15 bp, Homo sapiens
aatacaaactctatt

SEQ ID NO: 1146101 - DNA, 15 bp, Homo sapiens
aaatacaaactctat

SEQ ID NO: 1146102 - DNA, 15 bp, Homo sapiens
caaatacaaactcta

SEQ ID NO: 1146103 - DNA, 15 bp, Homo sapiens
acaaatacaaactct

SEQ ID NO: 1146104 - DNA, 15 bp, Homo sapiens
aacaaatacaaactc

SEQ ID NO: 1146105 - DNA, 15 bp, Homo sapiens
gaacaaatacaaact

SEQ ID NO: 1146106 - DNA, 15 bp, Homo sapiens
agaacaaatacaaac

SEQ ID NO: 1146107 - DNA, 15 bp, Homo sapiens
tagaacaaatacaaa

SEQ ID NO: 1146108 - DNA, 15 bp, Homo sapiens
atagaacaaatacaa

SEQ ID NO: 1146109 - DNA, 15 bp, Homo sapiens
aatagaacaaataca

SEQ ID NO: 1146110 - DNA, 15 bp, Homo sapiens
aaatagaacaaatac

SEQ ID NO: 1146111 - DNA, 15 bp, Homo sapiens
caaatagaacaaata

SEQ ID NO: 1146112 - DNA, 15 bp, Homo sapiens
acaaatagaacaaat

SEQ ID NO: 1146113 - DNA, 15 bp, Homo sapiens
aacaaatagaacaaa

SEQ ID NO: 1146114 - DNA, 15 bp, Homo sapiens
aaacaaatagaacaa

SEQ ID NO: 1146115 - DNA, 15 bp, Homo sapiens
aaaacaaatagaaca

SEQ ID NO: 1146116 - DNA, 15 bp, Homo sapiens
taaaacaaatagaac

SEQ ID NO: 1146117 - DNA, 15 bp, Homo sapiens
ttaaaacaaatagaa

SEQ ID NO: 1146118 - DNA, 15 bp, Homo sapiens
attaaaacaaataga

SEQ ID NO: 1146119 - DNA, 15 bp, Homo sapiens
gattaaaacaaatag

SEQ ID NO: 1146120 - DNA, 15 bp, Homo sapiens
tgattaaaacaaata

SEQ ID NO: 1146121 - DNA, 15 bp, Homo sapiens
atgattaaaacaaat

SEQ ID NO: 1146122 - DNA, 15 bp, Homo sapiens
aatgattaaaacaaa

SEQ ID NO: 1146123 - DNA, 15 bp, Homo sapiens
taatgattaaaacaa

SEQ ID NO: 1146124 - DNA, 15 bp, Homo sapiens
gtaatgattaaaaca

SEQ ID NO: 1146125 - DNA, 15 bp, Homo sapiens
ggtaatgattaaaac

SEQ ID NO: 1146126 - DNA, 15 bp, Homo sapiens
aggtaatgattaaaa

SEQ ID NO: 1146127 - DNA, 15 bp, Homo sapiens
caggtaatgattaaa

SEQ ID NO: 1146128 - DNA, 15 bp, Homo sapiens
acaggtaatgattaa

SEQ ID NO: 1146129 - DNA, 15 bp, Homo sapiens
cacaggtaatgatta

SEQ ID NO: 1146130 - DNA, 15 bp, Homo sapiens
tcacaggtaatgatt

SEQ ID NO: 1146131 - DNA, 15 bp, Homo sapiens
atcacaggtaatgat

SEQ ID NO: 1146132 - DNA, 15 bp, Homo sapiens
catcacaggtaatga

SEQ ID NO: 1146133 - DNA, 15 bp, Homo sapiens
ccatcacaggtaatg

SEQ ID NO: 1146134 - DNA, 15 bp, Homo sapiens
accatcacaggtaat

SEQ ID NO: 1146135 - DNA, 15 bp, Homo sapiens
aaccatcacaggtaa

SEQ ID NO: 1146136 - DNA, 15 bp, Homo sapiens
taaccatcacaggta

SEQ ID NO: 1146137 - DNA, 15 bp, Homo sapiens
ttaaccatcacaggt

SEQ ID NO: 1146138 - DNA, 15 bp, Homo sapiens
cttaaccatcacagg

SEQ ID NO: 1146139 - DNA, 15 bp, Homo sapiens
acttaaccatcacag

SEQ ID NO: 1146140 - DNA, 15 bp, Homo sapiens
cacttaaccatcaca

SEQ ID NO: 1146141 - DNA, 15 bp, Homo sapiens
ccacttaaccatcac

SEQ ID NO: 1146142 - DNA, 15 bp, Homo sapiens
gccacttaaccatca

SEQ ID NO: 1146143 - DNA, 15 bp, Homo sapiens
tgccacttaaccatc

SEQ ID NO: 1146144 - DNA, 15 bp, Homo sapiens
gtgccacttaaccat

SEQ ID NO: 1146145 - DNA, 15 bp, Homo sapiens
agtgccacttaacca

SEQ ID NO: 1146146 - DNA, 15 bp, Homo sapiens
gagtgccacttaacc

SEQ ID NO: 1146147 - DNA, 15 bp, Homo sapiens
agagtgccacttaac

SEQ ID NO: 1146148 - DNA, 15 bp, Homo sapiens
cagagtgccacttaa

SEQ ID NO: 1146149 - DNA, 15 bp, Homo sapiens
gcagagtgccactta

SEQ ID NO: 1146150 - DNA, 15 bp, Homo sapiens
ggcagagtgccactt

SEQ ID NO: 1146151 - DNA, 15 bp, Homo sapiens
tggcagagtgccact

SEQ ID NO: 1146152 - DNA, 15 bp, Homo sapiens
ctggcagagtgccac

SEQ ID NO: 1146153 - DNA, 15 bp, Homo sapiens
actggcagagtgcca

SEQ ID NO: 1146154 - DNA, 15 bp, Homo sapiens
aactggcagagtgcc

SEQ ID NO: 1146155 - DNA, 15 bp, Homo sapiens
aaactggcagagtgc

SEQ ID NO: 1146156 - DNA, 15 bp, Homo sapiens
aaaactggcagagtg

SEQ ID NO: 1146157 - DNA, 15 bp, Homo sapiens
caaaactggcagagt

SEQ ID NO: 1146158 - DNA, 15 bp, Homo sapiens
gcaaaactggcagag

SEQ ID NO: 1146159 - DNA, 15 bp, Homo sapiens
ggcaaaactggcaga

SEQ ID NO: 1146160 - DNA, 15 bp, Homo sapiens
aggcaaaactggcag

SEQ ID NO: 1146161 - DNA, 15 bp, Homo sapiens
caggcaaaactggca

SEQ ID NO: 1146162 - DNA, 15 bp, Homo sapiens
ccaggcaaaactggc

SEQ ID NO: 1146163 - DNA, 15 bp, Homo sapiens
gccaggcaaaactgg

SEQ ID NO: 1146164 - DNA, 15 bp, Homo sapiens
tgccaggcaaaactg

SEQ ID NO: 1146165 - DNA, 15 bp, Homo sapiens
ttgccaggcaaaact

SEQ ID NO: 1146166 - DNA, 15 bp, Homo sapiens
attgccaggcaaaac

SEQ ID NO: 1146167 - DNA, 15 bp, Homo sapiens
tattgccaggcaaaa

SEQ ID NO: 1146168 - DNA, 15 bp, Homo sapiens
ttattgccaggcaaa

SEQ ID NO: 1146169 - DNA, 15 bp, Homo sapiens
tttattgccaggcaa

SEQ ID NO: 1146170 - DNA, 15 bp, Homo sapiens
ttttattgccaggca

SEQ ID NO: 1146171 - DNA, 15 bp, Homo sapiens
attttattgccaggc

SEQ ID NO: 1146172 - DNA, 15 bp, Homo sapiens
tattttattgccagg

SEQ ID NO: 1146173 - DNA, 15 bp, Homo sapiens
gtattttattgccag

SEQ ID NO: 1146174 - DNA, 15 bp, Homo sapiens
tgtattttattgcca

SEQ ID NO: 1146175 - DNA, 15 bp, Homo sapiens
gtgtattttattgcc

SEQ ID NO: 1146176 - DNA, 15 bp, Homo sapiens
tgtgtattttattgc

SEQ ID NO: 1146177 - DNA, 15 bp, Homo sapiens
ttgtgtattttattg

SEQ ID NO: 1146178 - DNA, 15 bp, Homo sapiens
tttgtgtattttatt

SEQ ID NO: 1146179 - DNA, 15 bp, Homo sapiens
ttttgtgtattttat

SEQ ID NO: 1146180 - DNA, 15 bp, Homo sapiens
attttgtgtatttta

SEQ ID NO: 1146181 - DNA, 15 bp, Homo sapiens
cattttgtgtatttt

SEQ ID NO: 1146182 - DNA, 15 bp, Homo sapiens
acattttgtgtattt

SEQ ID NO: 1146183 - DNA, 15 bp, Homo sapiens
tacattttgtgtatt

SEQ ID NO: 1146184 - DNA, 15 bp, Homo sapiens
atacattttgtgtat

SEQ ID NO: 1146185 - DNA, 15 bp, Homo sapiens
aatacattttgtgta

SEQ ID NO: 1146186 - DNA, 15 bp, Homo sapiens
gaatacattttgtgt

SEQ ID NO: 1146187 - DNA, 15 bp, Homo sapiens
agaatacattttgtg

SEQ ID NO: 1146188 - DNA, 15 bp, Homo sapiens
tagaatacattttgt

SEQ ID NO: 1146189 - DNA, 15 bp, Homo sapiens
gtagaatacattttg

SEQ ID NO: 1146190 - DNA, 15 bp, Homo sapiens
agtagaatacatttt

SEQ ID NO: 1146191 - DNA, 15 bp, Homo sapiens
aagtagaatacattt

SEQ ID NO: 1146192 - DNA, 15 bp, Homo sapiens
aaagtagaatacatt

SEQ ID NO: 1146193 - DNA, 15 bp, Homo sapiens
taaagtagaatacat

SEQ ID NO: 1146194 - DNA, 15 bp, Homo sapiens
ctaaagtagaataca

SEQ ID NO: 1146195 - DNA, 15 bp, Homo sapiens
gctaaagtagaatac

SEQ ID NO: 1146196 - DNA, 15 bp, Homo sapiens
ggctaaagtagaata

SEQ ID NO: 1146197 - DNA, 15 bp, Homo sapiens
tggctaaagtagaat

SEQ ID NO: 1146198 - DNA, 15 bp, Homo sapiens
ttggctaaagtagaa

SEQ ID NO: 1146199 - DNA, 15 bp, Homo sapiens
gttggctaaagtaga

SEQ ID NO: 1146200 - DNA, 15 bp, Homo sapiens
tgttggctaaagtag

SEQ ID NO: 1146201 - DNA, 15 bp, Homo sapiens
gtgttggctaaagta

SEQ ID NO: 1146202 - DNA, 15 bp, Homo sapiens
agtgttggctaaagt

SEQ ID NO: 1146203 - DNA, 15 bp, Homo sapiens
aagtgttggctaaag

SEQ ID NO: 1146204 - DNA, 15 bp, Homo sapiens
gaagtgttggctaaa

SEQ ID NO: 1146205 - DNA, 15 bp, Homo sapiens
tgaagtgttggctaa

SEQ ID NO: 1146206 - DNA, 15 bp, Homo sapiens
ctgaagtgttggcta

SEQ ID NO: 1146207 - DNA, 15 bp, Homo sapiens
tctgaagtgttggct

SEQ ID NO: 1146208 - DNA, 15 bp, Homo sapiens
ctctgaagtgttggc

SEQ ID NO: 1146209 - DNA, 15 bp, Homo sapiens
actctgaagtgttgg

SEQ ID NO: 1146210 - DNA, 15 bp, Homo sapiens
aactctgaagtgttg

SEQ ID NO: 1146211 - DNA, 15 bp, Homo sapiens
caactctgaagtgtt

SEQ ID NO: 1146212 - DNA, 15 bp, Homo sapiens
tcaactctgaagtgt

SEQ ID NO: 1146213 - DNA, 15 bp, Homo sapiens
ctcaactctgaagtg

SEQ ID NO: 1146214 - DNA, 15 bp, Homo sapiens
tctcaactctgaagt

SEQ ID NO: 1146215 - DNA, 15 bp, Homo sapiens
ttctcaactctgaag

SEQ ID NO: 1146216 - DNA, 15 bp, Homo sapiens
tttctcaactctgaa

SEQ ID NO: 1146217 - DNA, 15 bp, Homo sapiens
atttctcaactctga

SEQ ID NO: 1146218 - DNA, 15 bp, Homo sapiens
aatttctcaactctg

SEQ ID NO: 1146219 - DNA, 15 bp, Homo sapiens
aaatttctcaactct

SEQ ID NO: 1146220 - DNA, 15 bp, Homo sapiens
aaaatttctcaactc

SEQ ID NO: 1146221 - DNA, 15 bp, Homo sapiens
taaaatttctcaact

SEQ ID NO: 1146222 - DNA, 15 bp, Homo sapiens
gtaaaatttctcaac

SEQ ID NO: 1146223 - DNA, 15 bp, Homo sapiens
agtaaaatttctcaa

SEQ ID NO: 1146224 - DNA, 15 bp, Homo sapiens
cagtaaaatttctca

SEQ ID NO: 1146225 - DNA, 15 bp, Homo sapiens
ccagtaaaatttctc

SEQ ID NO: 1146226 - DNA, 15 bp, Homo sapiens
gccagtaaaatttct

SEQ ID NO: 1146227 - DNA, 15 bp, Homo sapiens
tgccagtaaaatttc

SEQ ID NO: 1146228 - DNA, 15 bp, Homo sapiens
ttgccagtaaaattt

SEQ ID NO: 1146229 - DNA, 15 bp, Homo sapiens
attgccagtaaaatt

SEQ ID NO: 1146230 - DNA, 15 bp, Homo sapiens
aattgccagtaaaat

SEQ ID NO: 1146231 - DNA, 15 bp, Homo sapiens
aaattgccagtaaaa

SEQ ID NO: 1146232 - DNA, 15 bp, Homo sapiens
aaaattgccagtaaa

SEQ ID NO: 1146233 - DNA, 15 bp, Homo sapiens
aaaaattgccagtaa

SEQ ID NO: 1146234 - DNA, 15 bp, Homo sapiens
caaaaattgccagta

SEQ ID NO: 1146235 - DNA, 15 bp, Homo sapiens
gcaaaaattgccagt

SEQ ID NO: 1146236 - DNA, 15 bp, Homo sapiens
agcaaaaattgccag

SEQ ID NO: 1146237 - DNA, 15 bp, Homo sapiens
gagcaaaaattgcca

SEQ ID NO: 1146238 - DNA, 15 bp, Homo sapiens
tgagcaaaaattgcc

SEQ ID NO: 1146239 - DNA, 15 bp, Homo sapiens
atgagcaaaaattgc

SEQ ID NO: 1146240 - DNA, 15 bp, Homo sapiens
gatgagcaaaaattg

SEQ ID NO: 1146241 - DNA, 15 bp, Homo sapiens
ggatgagcaaaaatt

SEQ ID NO: 1146242 - DNA, 15 bp, Homo sapiens
aggatgagcaaaaat

SEQ ID NO: 1146243 - DNA, 15 bp, Homo sapiens
caggatgagcaaaaa

SEQ ID NO: 1146244 - DNA, 15 bp, Homo sapiens
tcaggatgagcaaaa

SEQ ID NO: 1146245 - DNA, 15 bp, Homo sapiens
gtcaggatgagcaaa

SEQ ID NO: 1146246 - DNA, 15 bp, Homo sapiens
cgtcaggatgagcaa

SEQ ID NO: 1146247 - DNA, 15 bp, Homo sapiens
acgtcaggatgagca

SEQ ID NO: 1146248 - DNA, 15 bp, Homo sapiens
aacgtcaggatgagc

SEQ ID NO: 1146249 - DNA, 15 bp, Homo sapiens
caacgtcaggatgag

SEQ ID NO: 1146250 - DNA, 15 bp, Homo sapiens
tcaacgtcaggatga

SEQ ID NO: 1146251 - DNA, 15 bp, Homo sapiens
atcaacgtcaggatg

SEQ ID NO: 1146252 - DNA, 15 bp, Homo sapiens
catcaacgtcaggat

SEQ ID NO: 1146253 - DNA, 15 bp, Homo sapiens
tcatcaacgtcagga

SEQ ID NO: 1146254 - DNA, 15 bp, Homo sapiens
atcatcaacgtcagg

SEQ ID NO: 1146255 - DNA, 15 bp, Homo sapiens
aatcatcaacgtcag

SEQ ID NO: 1146256 - DNA, 15 bp, Homo sapiens
aaatcatcaacgtca

SEQ ID NO: 1146257 - DNA, 15 bp, Homo sapiens
taaatcatcaacgtc

SEQ ID NO: 1146258 - DNA, 15 bp, Homo sapiens
gtaaatcatcaacgt

SEQ ID NO: 1146259 - DNA, 15 bp, Homo sapiens
tgtaaatcatcaacg

SEQ ID NO: 1146260 - DNA, 15 bp, Homo sapiens
gtgtaaatcatcaac

SEQ ID NO: 1146261 - DNA, 15 bp, Homo sapiens
tgtgtaaatcatcaa

SEQ ID NO: 1146262 - DNA, 15 bp, Homo sapiens
ctgtgtaaatcatca

SEQ ID NO: 1146263 - DNA, 15 bp, Homo sapiens
actgtgtaaatcatc

SEQ ID NO: 1146264 - DNA, 15 bp, Homo sapiens
cactgtgtaaatcat

SEQ ID NO: 1146265 - DNA, 15 bp, Homo sapiens
tcactgtgtaaatca

SEQ ID NO: 1146266 - DNA, 15 bp, Homo sapiens
ttcactgtgtaaatc

SEQ ID NO: 1146267 - DNA, 15 bp, Homo sapiens
gttcactgtgtaaat

SEQ ID NO: 1146268 - DNA, 15 bp, Homo sapiens
agttcactgtgtaaa

SEQ ID NO: 1146269 - DNA, 15 bp, Homo sapiens
tagttcactgtgtaa

SEQ ID NO: 1146270 - DNA, 15 bp, Homo sapiens
gtagttcactgtgta

SEQ ID NO: 1146271 - DNA, 15 bp, Homo sapiens
ggtagttcactgtgt

SEQ ID NO: 1146272 - DNA, 15 bp, Homo sapiens
aggtagttcactgtg

SEQ ID NO: 1146273 - DNA, 15 bp, Homo sapiens
caggtagttcactgt

SEQ ID NO: 1146274 - DNA, 15 bp, Homo sapiens
tacaggtagttcact

SEQ ID NO: 1146275 - DNA, 15 bp, Homo sapiens
atacaggtagttcac

SEQ ID NO: 1146276 - DNA, 15 bp, Homo sapiens
gatacaggtagttca

SEQ ID NO: 1146277 - DNA, 15 bp, Homo sapiens
agatacaggtagttc

SEQ ID NO: 1146278 - DNA, 15 bp, Homo sapiens
gagatacaggtagtt

SEQ ID NO: 1146279 - DNA, 15 bp, Homo sapiens
agagatacaggtagt

SEQ ID NO: 1146280 - DNA, 15 bp, Homo sapiens
aagagatacaggtag

SEQ ID NO: 1146281 - DNA, 15 bp, Homo sapiens
aaagagatacaggta

SEQ ID NO: 1146282 - DNA, 15 bp, Homo sapiens
aaaagagatacaggt

SEQ ID NO: 1146283 - DNA, 15 bp, Homo sapiens
caaaagagatacagg

SEQ ID NO: 1146284 - DNA, 15 bp, Homo sapiens
acaaaagagatacag

SEQ ID NO: 1146285 - DNA, 15 bp, Homo sapiens
aacaaaagagataca

SEQ ID NO: 1146286 - DNA, 15 bp, Homo sapiens
aaacaaaagagatac

SEQ ID NO: 1146287 - DNA, 15 bp, Homo sapiens
aaaacaaaagagata

SEQ ID NO: 1146288 - DNA, 15 bp, Homo sapiens
caaaacaaaagagat

SEQ ID NO: 1146289 - DNA, 15 bp, Homo sapiens
tcaaaacaaaagaga

SEQ ID NO: 1146290 - DNA, 15 bp, Homo sapiens
atcaaaacaaaagag

SEQ ID NO: 1146291 - DNA, 15 bp, Homo sapiens
aatcaaaacaaaaga

SEQ ID NO: 1146292 - DNA, 15 bp, Homo sapiens
gaatcaaaacaaaag

SEQ ID NO: 1146293 - DNA, 15 bp, Homo sapiens
agaatcaaaacaaaa

SEQ ID NO: 1146294 - DNA, 15 bp, Homo sapiens
aagaatcaaaacaaa

SEQ ID NO: 1146295 - DNA, 15 bp, Homo sapiens
gaagaatcaaaacaa

SEQ ID NO: 1146296 - DNA, 15 bp, Homo sapiens
ggaagaatcaaaaca

SEQ ID NO: 1146297 - DNA, 15 bp, Homo sapiens
aggaagaatcaaaac

SEQ ID NO: 1146298 - DNA, 15 bp, Homo sapiens
aaggaagaatcaaaa

SEQ ID NO: 1146299 - DNA, 15 bp, Homo sapiens
aaaggaagaatcaaa

SEQ ID NO: 1146300 - DNA, 15 bp, Homo sapiens
caaaggaagaatcaa

SEQ ID NO: 1146301 - DNA, 15 bp, Homo sapiens
gcaaaggaagaatca

SEQ ID NO: 1146302 - DNA, 15 bp, Homo sapiens
agcaaaggaagaatc

SEQ ID NO: 1146303 - DNA, 15 bp, Homo sapiens
aagcaaaggaagaat

SEQ ID NO: 1146304 - DNA, 15 bp, Homo sapiens
aaagcaaaggaagaa

SEQ ID NO: 1146305 - DNA, 15 bp, Homo sapiens
aaaagcaaaggaaga

SEQ ID NO: 1146306 - DNA, 15 bp, Homo sapiens
gaaaagcaaaggaag

SEQ ID NO: 1146307 - DNA, 15 bp, Homo sapiens
agaaaagcaaaggaa

SEQ ID NO: 1146308 - DNA, 15 bp, Homo sapiens
gagaaaagcaaagga

SEQ ID NO: 1146309 - DNA, 15 bp, Homo sapiens
ggagaaaagcaaagg

SEQ ID NO: 1146310 - DNA, 15 bp, Homo sapiens
aggagaaaagcaaag

SEQ ID NO: 1146311 - DNA, 15 bp, Homo sapiens
caggagaaaagcaaa

SEQ ID NO: 1146312 - DNA, 15 bp, Homo sapiens
tcaggagaaaagcaa

SEQ ID NO: 1146313 - DNA, 15 bp, Homo sapiens
ttcaggagaaaagca

SEQ ID NO: 1146314 - DNA, 15 bp, Homo sapiens
tttcaggagaaaagc

SEQ ID NO: 1146315 - DNA, 15 bp, Homo sapiens
gtttcaggagaaaag

SEQ ID NO: 1146316 - DNA, 15 bp, Homo sapiens
tgtttcaggagaaaa

SEQ ID NO: 1146317 - DNA, 15 bp, Homo sapiens
atgtttcaggagaaa

SEQ ID NO: 1146318 - DNA, 15 bp, Homo sapiens
gatgtttcaggagaa

SEQ ID NO: 1146319 - DNA, 15 bp, Homo sapiens
agatgtttcaggaga

SEQ ID NO: 1146320 - DNA, 15 bp, Homo sapiens
aagatgtttcaggag

SEQ ID NO: 1146321 - DNA, 15 bp, Homo sapiens
caagatgtttcagga

SEQ ID NO: 1146322 - DNA, 15 bp, Homo sapiens
acaagatgtttcagg

SEQ ID NO: 1146323 - DNA, 15 bp, Homo sapiens
aacaagatgtttcag

SEQ ID NO: 1146324 - DNA, 15 bp, Homo sapiens
aaacaagatgtttca

SEQ ID NO: 1146325 - DNA, 15 bp, Homo sapiens
caaacaagatgtttc

SEQ ID NO: 1146326 - DNA, 15 bp, Homo sapiens
ccaaacaagatgttt

SEQ ID NO: 1146327 - DNA, 15 bp, Homo sapiens
gccaaacaagatgtt

SEQ ID NO: 1146328 - DNA, 15 bp, Homo sapiens
agccaaacaagatgt

SEQ ID NO: 1146329 - DNA, 15 bp, Homo sapiens
tagccaaacaagatg

SEQ ID NO: 1146330 - DNA, 15 bp, Homo sapiens
atagccaaacaagat

SEQ ID NO: 1146331 - DNA, 15 bp, Homo sapiens
gatagccaaacaaga

SEQ ID NO: 1146332 - DNA, 15 bp, Homo sapiens
agatagccaaacaag

SEQ ID NO: 1146333 - DNA, 15 bp, Homo sapiens
aagatagccaaacaa

SEQ ID NO: 1146334 - DNA, 15 bp, Homo sapiens
taagatagccaaaca

SEQ ID NO: 1146335 - DNA, 15 bp, Homo sapiens
ataagatagccaaac

SEQ ID NO: 1146336 - DNA, 15 bp, Homo sapiens
aataagatagccaaa

SEQ ID NO: 1146337 - DNA, 15 bp, Homo sapiens
taataagatagccaa

SEQ ID NO: 1146338 - DNA, 15 bp, Homo sapiens
ataataagatagcca

SEQ ID NO: 1146339 - DNA, 15 bp, Homo sapiens
aataataagatagcc

SEQ ID NO: 1146340 - DNA, 15 bp, Homo sapiens
gaataataagatagc

SEQ ID NO: 1146341 - DNA, 15 bp, Homo sapiens
tgaataataagatag

SEQ ID NO: 1146342 - DNA, 15 bp, Homo sapiens
ctgaataataagata

SEQ ID NO: 1146343 - DNA, 15 bp, Homo sapiens
gctgaataataagat

SEQ ID NO: 1146344 - DNA, 15 bp, Homo sapiens
tgctgaataataaga

SEQ ID NO: 1146345 - DNA, 15 bp, Homo sapiens
ctgctgaataataag

SEQ ID NO: 1146346 - DNA, 15 bp, Homo sapiens
tctgctgaataataa

SEQ ID NO: 1146347 - DNA, 15 bp, Homo sapiens
ttctgctgaataata

SEQ ID NO: 1146348 - DNA, 15 bp, Homo sapiens
attctgctgaataat

SEQ ID NO: 1146349 - DNA, 15 bp, Homo sapiens
cattctgctgaataa

SEQ ID NO: 1146350 - DNA, 15 bp, Homo sapiens
gcattctgctgaata

SEQ ID NO: 1146351 - DNA, 15 bp, Homo sapiens
ggcattctgctgaat

SEQ ID NO: 1146352 - DNA, 15 bp, Homo sapiens
gggcattctgctgaa

SEQ ID NO: 1146353 - DNA, 15 bp, Homo sapiens
tgggcattctgctga

SEQ ID NO: 1146354 - DNA, 15 bp, Homo sapiens
atgggcattctgctg

SEQ ID NO: 1146355 - DNA, 15 bp, Homo sapiens
catgggcattctgct

SEQ ID NO: 1146356 - DNA, 15 bp, Homo sapiens
tcatgggcattctgc

SEQ ID NO: 1146357 - DNA, 15 bp, Homo sapiens
ctcatgggcattctg

SEQ ID NO: 1146358 - DNA, 15 bp, Homo sapiens
cctcatgggcattct

SEQ ID NO: 1146359 - DNA, 15 bp, Homo sapiens
tcctcatgggcattc

SEQ ID NO: 1146360 - DNA, 15 bp, Homo sapiens
ctcctcatgggcatt

SEQ ID NO: 1146361 - DNA, 15 bp, Homo sapiens
cctcctcatgggcat

SEQ ID NO: 1146362 - DNA, 15 bp, Homo sapiens
acctcctcatgggca

SEQ ID NO: 1146363 - DNA, 15 bp, Homo sapiens
gacctcctcatgggc

SEQ ID NO: 1146364 - DNA, 15 bp, Homo sapiens
agacctcctcatggg

SEQ ID NO: 1146365 - DNA, 15 bp, Homo sapiens
cagacctcctcatgg

SEQ ID NO: 1146366 - DNA, 15 bp, Homo sapiens
ccagacctcctcatg

SEQ ID NO: 1146367 - DNA, 15 bp, Homo sapiens
tccagacctcctcat

SEQ ID NO: 1146368 - DNA, 15 bp, Homo sapiens
ttccagacctcctca

SEQ ID NO: 1146369 - DNA, 15 bp, Homo sapiens
cttccagacctcctc

SEQ ID NO: 1146370 - DNA, 15 bp, Homo sapiens
acttccagacctcct

SEQ ID NO: 1146371 - DNA, 15 bp, Homo sapiens
tacttccagacctcc

SEQ ID NO: 1146372 - DNA, 15 bp, Homo sapiens
atacttccagacctc

SEQ ID NO: 1146373 - DNA, 15 bp, Homo sapiens
aatacttccagacct

SEQ ID NO: 1146374 - DNA, 15 bp, Homo sapiens
caatacttccagacc

SEQ ID NO: 1146375 - DNA, 15 bp, Homo sapiens
acaatacttccagac

SEQ ID NO: 1146376 - DNA, 15 bp, Homo sapiens
aacaatacttccaga

SEQ ID NO: 1146377 - DNA, 15 bp, Homo sapiens
aaacaatacttccag

SEQ ID NO: 1146378 - DNA, 15 bp, Homo sapiens
aaaacaatacttcca

SEQ ID NO: 1146379 - DNA, 15 bp, Homo sapiens
aaaaacaatacttcc

SEQ ID NO: 1146380 - DNA, 15 bp, Homo sapiens
taaaaacaatacttc

SEQ ID NO: 1146381 - DNA, 15 bp, Homo sapiens
ataaaaacaatactt

SEQ ID NO: 1146382 - DNA, 15 bp, Homo sapiens
tataaaaacaatact

SEQ ID NO: 1146383 - DNA, 15 bp, Homo sapiens
ctataaaaacaatac

SEQ ID NO: 1146384 - DNA, 15 bp, Homo sapiens
actataaaaacaata

SEQ ID NO: 1146385 - DNA, 15 bp, Homo sapiens
tactataaaaacaat

SEQ ID NO: 1146386 - DNA, 15 bp, Homo sapiens
ttactataaaaacaa

SEQ ID NO: 1146387 - DNA, 15 bp, Homo sapiens
attactataaaaaca

SEQ ID NO: 1146388 - DNA, 15 bp, Homo sapiens
aattactataaaaac

SEQ ID NO: 1146389 - DNA, 15 bp, Homo sapiens
taattactataaaaa

SEQ ID NO: 1146390 - DNA, 15 bp, Homo sapiens
ttaattactataaaa

SEQ ID NO: 1146391 - DNA, 15 bp, Homo sapiens
tttaattactataaa

SEQ ID NO: 1146392 - DNA, 15 bp, Homo sapiens
ttttaattactataa

SEQ ID NO: 1146393 - DNA, 15 bp, Homo sapiens
tttttaattactata

SEQ ID NO: 1146394 - DNA, 15 bp, Homo sapiens
atttttaattactat

SEQ ID NO: 1146395 - DNA, 15 bp, Homo sapiens
aatttttaattacta

SEQ ID NO: 1146396 - DNA, 15 bp, Homo sapiens
caatttttaattact

SEQ ID NO: 1146397 - DNA, 15 bp, Homo sapiens
acaatttttaattac

SEQ ID NO: 1146398 - DNA, 15 bp, Homo sapiens
cacaatttttaatta

SEQ ID NO: 1146399 - DNA, 15 bp, Homo sapiens
tcacaatttttaatt

SEQ ID NO: 1146400 - DNA, 15 bp, Homo sapiens
gtcacaatttttaat

SEQ ID NO: 1146401 - DNA, 15 bp, Homo sapiens
tgtcacaatttttaa

SEQ ID NO: 1146402 - DNA, 15 bp, Homo sapiens
gtgtcacaattttta

SEQ ID NO: 1146403 - DNA, 15 bp, Homo sapiens
tgtgtcacaattttt

SEQ ID NO: 1146404 - DNA, 15 bp, Homo sapiens
ttgtgtcacaatttt

SEQ ID NO: 1146405 - DNA, 15 bp, Homo sapiens
cttgtgtcacaattt

SEQ ID NO: 1146406 - DNA, 15 bp, Homo sapiens
acttgtgtcacaatt

SEQ ID NO: 1146407 - DNA, 15 bp, Homo sapiens
gacttgtgtcacaat

SEQ ID NO: 1146408 - DNA, 15 bp, Homo sapiens
ggacttgtgtcacaa

SEQ ID NO: 1146409 - DNA, 15 bp, Homo sapiens
tggacttgtgtcaca

SEQ ID NO: 1146410 - DNA, 15 bp, Homo sapiens
ttggacttgtgtcac

SEQ ID NO: 1146411 - DNA, 15 bp, Homo sapiens
tttggacttgtgtca

SEQ ID NO: 1146412 - DNA, 15 bp, Homo sapiens
ctttggacttgtgtc

SEQ ID NO: 1146413 - DNA, 15 bp, Homo sapiens
actttggacttgtgt

SEQ ID NO: 1146414 - DNA, 15 bp, Homo sapiens
cactttggacttgtg

SEQ ID NO: 1146415 - DNA, 15 bp, Homo sapiens
ccactttggacttgt

SEQ ID NO: 1146416 - DNA, 15 bp, Homo sapiens
cccactttggacttg

SEQ ID NO: 1146417 - DNA, 15 bp, Homo sapiens
acccactttggactt

SEQ ID NO: 1146418 - DNA, 15 bp, Homo sapiens
cacccactttggact

SEQ ID NO: 1146419 - DNA, 15 bp, Homo sapiens
ccacccactttggac

SEQ ID NO: 1146420 - DNA, 15 bp, Homo sapiens
tccacccactttgga

SEQ ID NO: 1146421 - DNA, 15 bp, Homo sapiens
atccacccactttgg

SEQ ID NO: 1146422 - DNA, 15 bp, Homo sapiens
gatccacccactttg

SEQ ID NO: 1146423 - DNA, 15 bp, Homo sapiens
tgatccacccacttt

SEQ ID NO: 1146424 - DNA, 15 bp, Homo sapiens
gtgatccacccactt

SEQ ID NO: 1146425 - DNA, 15 bp, Homo sapiens
cgtgatccacccact

SEQ ID NO: 1146426 - DNA, 15 bp, Homo sapiens
aatctcctgacctcg

SEQ ID NO: 1146427 - DNA, 15 bp, Homo sapiens
caatctcctgacctc

SEQ ID NO: 1146428 - DNA, 15 bp, Homo sapiens
tcaatctcctgacct

SEQ ID NO: 1146429 - DNA, 15 bp, Homo sapiens
ctcaatctcctgacc

SEQ ID NO: 1146430 - DNA, 15 bp, Homo sapiens
tctcaatctcctgac

SEQ ID NO: 1146431 - DNA, 15 bp, Homo sapiens
gtctcaatctcctga

SEQ ID NO: 1146432 - DNA, 15 bp, Homo sapiens
ggtctcaatctcctg

SEQ ID NO: 1146433 - DNA, 15 bp, Homo sapiens
atggtctcaatctcc

SEQ ID NO: 1146434 - DNA, 15 bp, Homo sapiens
gatggtctcaatctc

SEQ ID NO: 1146435 - DNA, 15 bp, Homo sapiens
ggatggtctcaatct

SEQ ID NO: 1146436 - DNA, 15 bp, Homo sapiens
aggatggtctcaatc

SEQ ID NO: 1146437 - DNA, 15 bp, Homo sapiens
caggatggtctcaat

SEQ ID NO: 1146438 - DNA, 15 bp, Homo sapiens
ccaggatggtctcaa

SEQ ID NO: 1146439 - DNA, 15 bp, Homo sapiens
gccaggatggtctca

SEQ ID NO: 1146440 - DNA, 15 bp, Homo sapiens
agggtttcactgtgt

SEQ ID NO: 1146441 - DNA, 15 bp, Homo sapiens
cagggtttcactgtg

SEQ ID NO: 1146442 - DNA, 15 bp, Homo sapiens
acagggtttcactgt

SEQ ID NO: 1146443 - DNA, 15 bp, Homo sapiens
gacagggtttcactg

SEQ ID NO: 1146444 - DNA, 15 bp, Homo sapiens
atttgtatttttagt

SEQ ID NO: 1146445 - DNA, 15 bp, Homo sapiens
tatttgtatttttag

SEQ ID NO: 1146446 - DNA, 15 bp, Homo sapiens
ttatttgtattttta

SEQ ID NO: 1146447 - DNA, 15 bp, Homo sapiens
attatttgtattttt

SEQ ID NO: 1146448 - DNA, 15 bp, Homo sapiens
aattatttgtatttt

SEQ ID NO: 1146449 - DNA, 15 bp, Homo sapiens
taattatttgtattt

SEQ ID NO: 1146450 - DNA, 15 bp, Homo sapiens
ctaattatttgtatt

SEQ ID NO: 1146451 - DNA, 15 bp, Homo sapiens
gctaattatttgtat

SEQ ID NO: 1146452 - DNA, 15 bp, Homo sapiens
ggctaattatttgta

SEQ ID NO: 1146453 - DNA, 15 bp, Homo sapiens
tggctaattatttgt

SEQ ID NO: 1146454 - DNA, 15 bp, Homo sapiens
ctggctaattatttg

SEQ ID NO: 1146455 - DNA, 15 bp, Homo sapiens
cctggctaattattt

SEQ ID NO: 1146456 - DNA, 15 bp, Homo sapiens
gcctggctaattatt

SEQ ID NO: 1146457 - DNA, 15 bp, Homo sapiens
cgcctggctaattat

SEQ ID NO: 1146458 - DNA, 15 bp, Homo sapiens
acgcctggctaatta

SEQ ID NO: 1146459 - DNA, 15 bp, Homo sapiens
acaccaccacgcctg

SEQ ID NO: 1146460 - DNA, 15 bp, Homo sapiens
cacaccaccacgcct

SEQ ID NO: 1146461 - DNA, 15 bp, Homo sapiens
gcacaccaccacgcc

SEQ ID NO: 1146462 - DNA, 15 bp, Homo sapiens
tgcacaccaccacgc

SEQ ID NO: 1146463 - DNA, 15 bp, Homo sapiens
gtgcacaccaccacg

SEQ ID NO: 1146464 - DNA, 15 bp, Homo sapiens
agtgcacaccaccac

SEQ ID NO: 1146465 - DNA, 15 bp, Homo sapiens
aagtgcacaccacca

SEQ ID NO: 1146466 - DNA, 15 bp, Homo sapiens
caagtgcacaccacc

SEQ ID NO: 1146467 - DNA, 15 bp, Homo sapiens
acaagtgcacaccac

SEQ ID NO: 1146468 - DNA, 15 bp, Homo sapiens
tacaagtgcacacca

SEQ ID NO: 1146469 - DNA, 15 bp, Homo sapiens
ctacaagtgcacacc

SEQ ID NO: 1146470 - DNA, 15 bp, Homo sapiens
actacaagtgcacac

SEQ ID NO: 1146471 - DNA, 15 bp, Homo sapiens
gactacaagtgcaca

SEQ ID NO: 1146472 - DNA, 15 bp, Homo sapiens
ggactacaagtgcac

SEQ ID NO: 1146473 - DNA, 15 bp, Homo sapiens
gggactacaagtgca

SEQ ID NO: 1146474 - DNA, 15 bp, Homo sapiens
tgggactacaagtgc

SEQ ID NO: 1146475 - DNA, 15 bp, Homo sapiens
ctgggactacaagtg

SEQ ID NO: 1146476 - DNA, 15 bp, Homo sapiens
gctgggactacaagt

SEQ ID NO: 1146477 - DNA, 15 bp, Homo sapiens
agctgggactacaag

SEQ ID NO: 1146478 - DNA, 15 bp, Homo sapiens
tagctgggactacaa

SEQ ID NO: 1146479 - DNA, 15 bp, Homo sapiens
tcttctgcctcagcc

SEQ ID NO: 1146480 - DNA, 15 bp, Homo sapiens
ttcttctgcctcagc

SEQ ID NO: 1146481 - DNA, 15 bp, Homo sapiens
attcttctgcctcag

SEQ ID NO: 1146482 - DNA, 15 bp, Homo sapiens
gattcttctgcctca

SEQ ID NO: 1146483 - DNA, 15 bp, Homo sapiens
tgattcttctgcctc

SEQ ID NO: 1146484 - DNA, 15 bp, Homo sapiens
gtgattcttctgcct

SEQ ID NO: 1146485 - DNA, 15 bp, Homo sapiens
agtgattcttctgcc

SEQ ID NO: 1146486 - DNA, 15 bp, Homo sapiens
aagtgattcttctgc

SEQ ID NO: 1146487 - DNA, 15 bp, Homo sapiens
caagtgattcttctg

SEQ ID NO: 1146488 - DNA, 15 bp, Homo sapiens
tcaagtgattcttct

SEQ ID NO: 1146489 - DNA, 15 bp, Homo sapiens
ttcaagtgattcttc

SEQ ID NO: 1146490 - DNA, 15 bp, Homo sapiens
tttcaagtgattctt

SEQ ID NO: 1146491 - DNA, 15 bp, Homo sapiens
gtttcaagtgattct

SEQ ID NO: 1146492 - DNA, 15 bp, Homo sapiens
agtttcaagtgattc

SEQ ID NO: 1146493 - DNA, 15 bp, Homo sapiens
cagtttcaagtgatt

SEQ ID NO: 1146494 - DNA, 15 bp, Homo sapiens
ccagtttcaagtgat

SEQ ID NO: 1146495 - DNA, 15 bp, Homo sapiens
cccagtttcaagtga

SEQ ID NO: 1146496 - DNA, 15 bp, Homo sapiens
tcccagtttcaagtg

SEQ ID NO: 1146497 - DNA, 15 bp, Homo sapiens
ctcccagtttcaagt

SEQ ID NO: 1146498 - DNA, 15 bp, Homo sapiens
cctcccagtttcaag

SEQ ID NO: 1146499 - DNA, 15 bp, Homo sapiens
gcctcccagtttcaa

SEQ ID NO: 1146500 - DNA, 15 bp, Homo sapiens
tgcctcccagtttca

SEQ ID NO: 1146501 - DNA, 15 bp, Homo sapiens
ctgcctcccagtttc

SEQ ID NO: 1146502 - DNA, 15 bp, Homo sapiens
tctgcctcccagttt

SEQ ID NO: 1146503 - DNA, 15 bp, Homo sapiens
ctctgcctcccagtt

SEQ ID NO: 1146504 - DNA, 15 bp, Homo sapiens
cctctgcctcccagt

SEQ ID NO: 1146505 - DNA, 15 bp, Homo sapiens
taacctctgcctccc

SEQ ID NO: 1146506 - DNA, 15 bp, Homo sapiens
ggggtctcactctgt

SEQ ID NO: 1146507 - DNA, 15 bp, Homo sapiens
cggggtctcactctg

SEQ ID NO: 1146508 - DNA, 15 bp, Homo sapiens
acggggtctcactct

SEQ ID NO: 1146509 - DNA, 15 bp, Homo sapiens
gacggggtctcactc

SEQ ID NO: 1146510 - DNA, 15 bp, Homo sapiens
agacggggtctcact

SEQ ID NO: 1146511 - DNA, 15 bp, Homo sapiens
tgagacggggtctca

SEQ ID NO: 1146512 - DNA, 15 bp, Homo sapiens
tttttttgagacggg

SEQ ID NO: 1146513 - DNA, 15 bp, Homo sapiens
cacaatttttttttt

SEQ ID NO: 1146514 - DNA, 15 bp, Homo sapiens
tcacaattttttttt

SEQ ID NO: 1146515 - DNA, 15 bp, Homo sapiens
gtcacaatttttttt

SEQ ID NO: 1146516 - DNA, 15 bp, Homo sapiens
tgtcacaattttttt

SEQ ID NO: 1146517 - DNA, 15 bp, Homo sapiens
gtgtcacaatttttt

SEQ ID NO: 1146518 - DNA, 15 bp, Homo sapiens
attgtgtcacaattt

SEQ ID NO: 1146519 - DNA, 15 bp, Homo sapiens
tattgtgtcacaatt

SEQ ID NO: 1146520 - DNA, 15 bp, Homo sapiens
ttattgtgtcacaat

SEQ ID NO: 1146521 - DNA, 15 bp, Homo sapiens
tttattgtgtcacaa

SEQ ID NO: 1146522 - DNA, 15 bp, Homo sapiens
ctttattgtgtcaca

SEQ ID NO: 1146523 - DNA, 15 bp, Homo sapiens
actttattgtgtcac

SEQ ID NO: 1146524 - DNA, 15 bp, Homo sapiens
aactttattgtgtca

SEQ ID NO: 1146525 - DNA, 15 bp, Homo sapiens
taactttattgtgtc

SEQ ID NO: 1146526 - DNA, 15 bp, Homo sapiens
ttaactttattgtgt

SEQ ID NO: 1146527 - DNA, 15 bp, Homo sapiens
cttaactttattgtg

SEQ ID NO: 1146528 - DNA, 15 bp, Homo sapiens
tcttaactttattgt

SEQ ID NO: 1146529 - DNA, 15 bp, Homo sapiens
ttcttaactttattg

SEQ ID NO: 1146530 - DNA, 15 bp, Homo sapiens
attcttaactttatt

SEQ ID NO: 1146531 - DNA, 15 bp, Homo sapiens
cattcttaactttat

SEQ ID NO: 1146532 - DNA, 15 bp, Homo sapiens
ccattcttaacttta

SEQ ID NO: 1146533 - DNA, 15 bp, Homo sapiens
accattcttaacttt

SEQ ID NO: 1146534 - DNA, 15 bp, Homo sapiens
taccattcttaactt

SEQ ID NO: 1146535 - DNA, 15 bp, Homo sapiens
ttaccattcttaact

SEQ ID NO: 1146536 - DNA, 15 bp, Homo sapiens
tttaccattcttaac

SEQ ID NO: 1146537 - DNA, 15 bp, Homo sapiens
atttaccattcttaa

SEQ ID NO: 1146538 - DNA, 15 bp, Homo sapiens
aatttaccattctta

SEQ ID NO: 1146539 - DNA, 15 bp, Homo sapiens
gaatttaccattctt

SEQ ID NO: 1146540 - DNA, 15 bp, Homo sapiens
agaatttaccattct

SEQ ID NO: 1146541 - DNA, 15 bp, Homo sapiens
aagaatttaccattc

SEQ ID NO: 1146542 - DNA, 15 bp, Homo sapiens
aaagaatttaccatt

SEQ ID NO: 1146543 - DNA, 15 bp, Homo sapiens
gaaagaatttaccat

SEQ ID NO: 1146544 - DNA, 15 bp, Homo sapiens
tgaaagaatttacca

SEQ ID NO: 1146545 - DNA, 15 bp, Homo sapiens
ttgaaagaatttacc

SEQ ID NO: 1146546 - DNA, 15 bp, Homo sapiens
tttgaaagaatttac

SEQ ID NO: 1146547 - DNA, 15 bp, Homo sapiens
ctttgaaagaattta

SEQ ID NO: 1146548 - DNA, 15 bp, Homo sapiens
gctttgaaagaattt

SEQ ID NO: 1146549 - DNA, 15 bp, Homo sapiens
tgctttgaaagaatt

SEQ ID NO: 1146550 - DNA, 15 bp, Homo sapiens
ctgctttgaaagaat

SEQ ID NO: 1146551 - DNA, 15 bp, Homo sapiens
actgctttgaaagaa

SEQ ID NO: 1146552 - DNA, 15 bp, Homo sapiens
tactgctttgaaaga

SEQ ID NO: 1146553 - DNA, 15 bp, Homo sapiens
ttactgctttgaaag

SEQ ID NO: 1146554 - DNA, 15 bp, Homo sapiens
tttactgctttgaaa

SEQ ID NO: 1146555 - DNA, 15 bp, Homo sapiens
ctttactgctttgaa

SEQ ID NO: 1146556 - DNA, 15 bp, Homo sapiens
actttactgctttga

SEQ ID NO: 1146557 - DNA, 15 bp, Homo sapiens
aactttactgctttg

SEQ ID NO: 1146558 - DNA, 15 bp, Homo sapiens
aaactttactgcttt

SEQ ID NO: 1146559 - DNA, 15 bp, Homo sapiens
aaaactttactgctt

SEQ ID NO: 1146560 - DNA, 15 bp, Homo sapiens
taaaactttactgct

SEQ ID NO: 1146561 - DNA, 15 bp, Homo sapiens
ataaaactttactgc

SEQ ID NO: 1146562 - DNA, 15 bp, Homo sapiens
aataaaactttactg

SEQ ID NO: 1146563 - DNA, 15 bp, Homo sapiens
aaataaaactttact

SEQ ID NO: 1146564 - DNA, 15 bp, Homo sapiens
aaaataaaactttac

SEQ ID NO: 1146565 - DNA, 15 bp, Homo sapiens
taaaataaaacttta

SEQ ID NO: 1146566 - DNA, 15 bp, Homo sapiens
ataaaataaaacttt

SEQ ID NO: 1146567 - DNA, 15 bp, Homo sapiens
aataaaataaaactt

SEQ ID NO: 1146568 - DNA, 15 bp, Homo sapiens
aaataaaataaaact

SEQ ID NO: 1146569 - DNA, 15 bp, Homo sapiens
ggtaaaataaaataa

SEQ ID NO: 1146570 - DNA, 15 bp, Homo sapiens
aggtaaaataaaata

SEQ ID NO: 1146571 - DNA, 15 bp, Homo sapiens
aaggtaaaataaaat

SEQ ID NO: 1146572 - DNA, 15 bp, Homo sapiens
taaggtaaaataaaa

SEQ ID NO: 1146573 - DNA, 15 bp, Homo sapiens
gtaaggtaaaataaa

SEQ ID NO: 1146574 - DNA, 15 bp, Homo sapiens
tgtaaggtaaaataa

SEQ ID NO: 1146575 - DNA, 15 bp, Homo sapiens
ttgtaaggtaaaata

SEQ ID NO: 1146576 - DNA, 15 bp, Homo sapiens
gttgtaaggtaaaat

SEQ ID NO: 1146577 - DNA, 15 bp, Homo sapiens
agttgtaaggtaaaa

SEQ ID NO: 1146578 - DNA, 15 bp, Homo sapiens
tagttgtaaggtaaa

SEQ ID NO: 1146579 - DNA, 15 bp, Homo sapiens
ttagttgtaaggtaa

SEQ ID NO: 1146580 - DNA, 15 bp, Homo sapiens
gttagttgtaaggta

SEQ ID NO: 1146581 - DNA, 15 bp, Homo sapiens
tgttagttgtaaggt

SEQ ID NO: 1146582 - DNA, 15 bp, Homo sapiens
ttgttagttgtaagg

SEQ ID NO: 1146583 - DNA, 15 bp, Homo sapiens
tttgttagttgtaag

SEQ ID NO: 1146584 - DNA, 15 bp, Homo sapiens
ctttgttagttgtaa

SEQ ID NO: 1146585 - DNA, 15 bp, Homo sapiens
tctttgttagttgta

SEQ ID NO: 1146586 - DNA, 15 bp, Homo sapiens
ttctttgttagttgt

SEQ ID NO: 1146587 - DNA, 15 bp, Homo sapiens
tttctttgttagttg

SEQ ID NO: 1146588 - DNA, 15 bp, Homo sapiens
ttttctttgttagtt

SEQ ID NO: 1146589 - DNA, 15 bp, Homo sapiens
tttttctttgttagt

SEQ ID NO: 1146590 - DNA, 15 bp, Homo sapiens
gtttttctttgttag

SEQ ID NO: 1146591 - DNA, 15 bp, Homo sapiens
tgtttttctttgtta

SEQ ID NO: 1146592 - DNA, 15 bp, Homo sapiens
ctgtttttctttgtt

SEQ ID NO: 1146593 - DNA, 15 bp, Homo sapiens
actgtttttctttgt

SEQ ID NO: 1146594 - DNA, 15 bp, Homo sapiens
tactgtttttctttg

SEQ ID NO: 1146595 - DNA, 15 bp, Homo sapiens
ctactgtttttcttt

SEQ ID NO: 1146596 - DNA, 15 bp, Homo sapiens
tctactgtttttctt

SEQ ID NO: 1146597 - DNA, 15 bp, Homo sapiens
atctactgtttttct

SEQ ID NO: 1146598 - DNA, 15 bp, Homo sapiens
catctactgtttttc

SEQ ID NO: 1146599 - DNA, 15 bp, Homo sapiens
acatctactgttttt

SEQ ID NO: 1146600 - DNA, 15 bp, Homo sapiens
cacatctactgtttt

SEQ ID NO: 1146601 - DNA, 15 bp, Homo sapiens
ccacatctactgttt

SEQ ID NO: 1146602 - DNA, 15 bp, Homo sapiens
tccacatctactgtt

SEQ ID NO: 1146603 - DNA, 15 bp, Homo sapiens
ttccacatctactgt

SEQ ID NO: 1146604 - DNA, 15 bp, Homo sapiens
gttccacatctactg

SEQ ID NO: 1146605 - DNA, 15 bp, Homo sapiens
agttccacatctact

SEQ ID NO: 1146606 - DNA, 15 bp, Homo sapiens
aagttccacatctac

SEQ ID NO: 1146607 - DNA, 15 bp, Homo sapiens
caagttccacatcta

SEQ ID NO: 1146608 - DNA, 15 bp, Homo sapiens
tcaagttccacatct

SEQ ID NO: 1146609 - DNA, 15 bp, Homo sapiens
gtcaagttccacatc

SEQ ID NO: 1146610 - DNA, 15 bp, Homo sapiens
tgtcaagttccacat

SEQ ID NO: 1146611 - DNA, 15 bp, Homo sapiens
ctgtcaagttccaca

SEQ ID NO: 1146612 - DNA, 15 bp, Homo sapiens
actgtcaagttccac

SEQ ID NO: 1146613 - DNA, 15 bp, Homo sapiens
cactgtcaagttcca

SEQ ID NO: 1146614 - DNA, 15 bp, Homo sapiens
acactgtcaagttcc

SEQ ID NO: 1146615 - DNA, 15 bp, Homo sapiens
aacactgtcaagttc

SEQ ID NO: 1146616 - DNA, 15 bp, Homo sapiens
gaacactgtcaagtt

SEQ ID NO: 1146617 - DNA, 15 bp, Homo sapiens
ggaacactgtcaagt

SEQ ID NO: 1146618 - DNA, 15 bp, Homo sapiens
gggaacactgtcaag

SEQ ID NO: 1146619 - DNA, 15 bp, Homo sapiens
tgggaacactgtcaa

SEQ ID NO: 1146620 - DNA, 15 bp, Homo sapiens
ttgggaacactgtca

SEQ ID NO: 1146621 - DNA, 15 bp, Homo sapiens
cttgggaacactgtc

SEQ ID NO: 1146622 - DNA, 15 bp, Homo sapiens
tcttgggaacactgt

SEQ ID NO: 1146623 - DNA, 15 bp, Homo sapiens
ctcttgggaacactg

SEQ ID NO: 1146624 - DNA, 15 bp, Homo sapiens
actcttgggaacact

SEQ ID NO: 1146625 - DNA, 15 bp, Homo sapiens
cactcttgggaacac

SEQ ID NO: 1146626 - DNA, 15 bp, Homo sapiens
gcactcttgggaaca

SEQ ID NO: 1146627 - DNA, 15 bp, Homo sapiens
agcactcttgggaac

SEQ ID NO: 1146628 - DNA, 15 bp, Homo sapiens
tagcactcttgggaa

SEQ ID NO: 1146629 - DNA, 15 bp, Homo sapiens
atagcactcttggga

SEQ ID NO: 1146630 - DNA, 15 bp, Homo sapiens
aatagcactcttggg

SEQ ID NO: 1146631 - DNA, 15 bp, Homo sapiens
aaatagcactcttgg

SEQ ID NO: 1146632 - DNA, 15 bp, Homo sapiens
taaatagcactcttg

SEQ ID NO: 1146633 - DNA, 15 bp, Homo sapiens
ctaaatagcactctt

SEQ ID NO: 1146634 - DNA, 15 bp, Homo sapiens
tctaaatagcactct

SEQ ID NO: 1146635 - DNA, 15 bp, Homo sapiens
ctctaaatagcactc

SEQ ID NO: 1146636 - DNA, 15 bp, Homo sapiens
tctctaaatagcact

SEQ ID NO: 1146637 - DNA, 15 bp, Homo sapiens
ttctctaaatagcac

SEQ ID NO: 1146638 - DNA, 15 bp, Homo sapiens
attctctaaatagca

SEQ ID NO: 1146639 - DNA, 15 bp, Homo sapiens
aattctctaaatagc

SEQ ID NO: 1146640 - DNA, 15 bp, Homo sapiens
taattctctaaatag

SEQ ID NO: 1146641 - DNA, 15 bp, Homo sapiens
ataattctctaaata

SEQ ID NO: 1146642 - DNA, 15 bp, Homo sapiens
cataattctctaaat

SEQ ID NO: 1146643 - DNA, 15 bp, Homo sapiens
acataattctctaaa

SEQ ID NO: 1146644 - DNA, 15 bp, Homo sapiens
cacataattctctaa

SEQ ID NO: 1146645 - DNA, 15 bp, Homo sapiens
acacataattctcta

SEQ ID NO: 1146646 - DNA, 15 bp, Homo sapiens
cacacataattctct

SEQ ID NO: 1146647 - DNA, 15 bp, Homo sapiens
ccacacataattctc

SEQ ID NO: 1146648 - DNA, 15 bp, Homo sapiens
tccacacataattct

SEQ ID NO: 1146649 - DNA, 15 bp, Homo sapiens
atccacacataattc

SEQ ID NO: 1146650 - DNA, 15 bp, Homo sapiens
aatccacacataatt

SEQ ID NO: 1146651 - DNA, 15 bp, Homo sapiens
aaatccacacataat

SEQ ID NO: 1146652 - DNA, 15 bp, Homo sapiens
aaaatccacacataa

SEQ ID NO: 1146653 - DNA, 15 bp, Homo sapiens
gaaaatccacacata

SEQ ID NO: 1146654 - DNA, 15 bp, Homo sapiens
agaaaatccacacat

SEQ ID NO: 1146655 - DNA, 15 bp, Homo sapiens
aaagaaaatccacac

SEQ ID NO: 1146656 - DNA, 15 bp, Homo sapiens
aaaagaaaatccaca

SEQ ID NO: 1146657 - DNA, 15 bp, Homo sapiens
aaaaagaaaatccac

SEQ ID NO: 1146658 - DNA, 15 bp, Homo sapiens
aaaaaagaaaatcca

SEQ ID NO: 1146659 - DNA, 15 bp, Homo sapiens
gaaaaaagaaaatcc

SEQ ID NO: 1146660 - DNA, 15 bp, Homo sapiens
caggaaaaaagaaaa

SEQ ID NO: 1146661 - DNA, 15 bp, Homo sapiens
tcaggaaaaaagaaa

SEQ ID NO: 1146662 - DNA, 15 bp, Homo sapiens
ctcaggaaaaaagaa

SEQ ID NO: 1146663 - DNA, 15 bp, Homo sapiens
actcaggaaaaaaga

SEQ ID NO: 1146664 - DNA, 15 bp, Homo sapiens
tactcaggaaaaaag

SEQ ID NO: 1146665 - DNA, 15 bp, Homo sapiens
gtactcaggaaaaaa

SEQ ID NO: 1146666 - DNA, 15 bp, Homo sapiens
agtactcaggaaaaa

SEQ ID NO: 1146667 - DNA, 15 bp, Homo sapiens
gagtactcaggaaaa

SEQ ID NO: 1146668 - DNA, 15 bp, Homo sapiens
agagtactcaggaaa

SEQ ID NO: 1146669 - DNA, 15 bp, Homo sapiens
aagagtactcaggaa

SEQ ID NO: 1146670 - DNA, 15 bp, Homo sapiens
caagagtactcagga

SEQ ID NO: 1146671 - DNA, 15 bp, Homo sapiens
ccaagagtactcagg

SEQ ID NO: 1146672 - DNA, 15 bp, Homo sapiens
cccaagagtactcag

SEQ ID NO: 1146673 - DNA, 15 bp, Homo sapiens
ccccaagagtactca

SEQ ID NO: 1146674 - DNA, 15 bp, Homo sapiens
tccccaagagtactc

SEQ ID NO: 1146675 - DNA, 15 bp, Homo sapiens
ctccccaagagtact

SEQ ID NO: 1146676 - DNA, 15 bp, Homo sapiens
gctccccaagagtac

SEQ ID NO: 1146677 - DNA, 15 bp, Homo sapiens
ggctccccaagagta

SEQ ID NO: 1146678 - DNA, 15 bp, Homo sapiens
aggctccccaagagt

SEQ ID NO: 1146679 - DNA, 15 bp, Homo sapiens
taggctccccaagag

SEQ ID NO: 1146680 - DNA, 15 bp, Homo sapiens
ataggctccccaaga

SEQ ID NO: 1146681 - DNA, 15 bp, Homo sapiens
gataggctccccaag

SEQ ID NO: 1146682 - DNA, 15 bp, Homo sapiens
tgataggctccccaa

SEQ ID NO: 1146683 - DNA, 15 bp, Homo sapiens
gtgataggctcccca

SEQ ID NO: 1146684 - DNA, 15 bp, Homo sapiens
ggtgataggctcccc

SEQ ID NO: 1146685 - DNA, 15 bp, Homo sapiens
tggtgataggctccc

SEQ ID NO: 1146686 - DNA, 15 bp, Homo sapiens
ctggtgataggctcc

SEQ ID NO: 1146687 - DNA, 15 bp, Homo sapiens
cctggtgataggctc

SEQ ID NO: 1146688 - DNA, 15 bp, Homo sapiens
ccctggtgataggct

SEQ ID NO: 1146689 - DNA, 15 bp, Homo sapiens
accctggtgataggc

SEQ ID NO: 1146690 - DNA, 15 bp, Homo sapiens
caccctggtgatagg

SEQ ID NO: 1146691 - DNA, 15 bp, Homo sapiens
ccaccctggtgatag

SEQ ID NO: 1146692 - DNA, 15 bp, Homo sapiens
cccaccctggtgata

SEQ ID NO: 1146693 - DNA, 15 bp, Homo sapiens
acccaccctggtgat

SEQ ID NO: 1146694 - DNA, 15 bp, Homo sapiens
gacccaccctggtga

SEQ ID NO: 1146695 - DNA, 15 bp, Homo sapiens
tgacccaccctggtg

SEQ ID NO: 1146696 - DNA, 15 bp, Homo sapiens
ctgacccaccctggt

SEQ ID NO: 1146697 - DNA, 15 bp, Homo sapiens
tctgacccaccctgg

SEQ ID NO: 1146698 - DNA, 15 bp, Homo sapiens
atctgacccaccctg

SEQ ID NO: 1146699 - DNA, 15 bp, Homo sapiens
tatctgacccaccct

SEQ ID NO: 1146700 - DNA, 15 bp, Homo sapiens
atatctgacccaccc

SEQ ID NO: 1146701 - DNA, 15 bp, Homo sapiens
tatatctgacccacc

SEQ ID NO: 1146702 - DNA, 15 bp, Homo sapiens
ctatatctgacccac

SEQ ID NO: 1146703 - DNA, 15 bp, Homo sapiens
gctatatctgaccca

SEQ ID NO: 1146704 - DNA, 15 bp, Homo sapiens
ggctatatctgaccc

SEQ ID NO: 1146705 - DNA, 15 bp, Homo sapiens
aggctatatctgacc

SEQ ID NO: 1146706 - DNA, 15 bp, Homo sapiens
aaggctatatctgac

SEQ ID NO: 1146707 - DNA, 15 bp, Homo sapiens
aaaggctatatctga

SEQ ID NO: 1146708 - DNA, 15 bp, Homo sapiens
caaaggctatatctg

SEQ ID NO: 1146709 - DNA, 15 bp, Homo sapiens
tcaaaggctatatct

SEQ ID NO: 1146710 - DNA, 15 bp, Homo sapiens
ctcaaaggctatatc

SEQ ID NO: 1146711 - DNA, 15 bp, Homo sapiens
cctcaaaggctatat

SEQ ID NO: 1146712 - DNA, 15 bp, Homo sapiens
ccctcaaaggctata

SEQ ID NO: 1146713 - DNA, 15 bp, Homo sapiens
tccctcaaaggctat

SEQ ID NO: 1146714 - DNA, 15 bp, Homo sapiens
atccctcaaaggcta

SEQ ID NO: 1146715 - DNA, 15 bp, Homo sapiens
catccctcaaaggct

SEQ ID NO: 1146716 - DNA, 15 bp, Homo sapiens
acatccctcaaaggc

SEQ ID NO: 1146717 - DNA, 15 bp, Homo sapiens
cacatccctcaaagg

SEQ ID NO: 1146718 - DNA, 15 bp, Homo sapiens
ccacatccctcaaag

SEQ ID NO: 1146719 - DNA, 15 bp, Homo sapiens
tccacatccctcaaa

SEQ ID NO: 1146720 - DNA, 15 bp, Homo sapiens
gtccacatccctcaa

SEQ ID NO: 1146721 - DNA, 15 bp, Homo sapiens
cgtccacatccctca

SEQ ID NO: 1146722 - DNA, 15 bp, Homo sapiens
gcgtccacatccctc

SEQ ID NO: 1146723 - DNA, 15 bp, Homo sapiens
tgcgtccacatccct

SEQ ID NO: 1146724 - DNA, 15 bp, Homo sapiens
ctgcgtccacatccc

SEQ ID NO: 1146725 - DNA, 15 bp, Homo sapiens
gctgcgtccacatcc

SEQ ID NO: 1146726 - DNA, 15 bp, Homo sapiens
ggctgcgtccacatc

SEQ ID NO: 1146727 - DNA, 15 bp, Homo sapiens
tggctgcgtccacat

SEQ ID NO: 1146728 - DNA, 15 bp, Homo sapiens
atggctgcgtccaca

SEQ ID NO: 1146729 - DNA, 15 bp, Homo sapiens
aatggctgcgtccac

SEQ ID NO: 1146730 - DNA, 15 bp, Homo sapiens
caatggctgcgtcca

SEQ ID NO: 1146731 - DNA, 15 bp, Homo sapiens
ccaatggctgcgtcc

SEQ ID NO: 1146732 - DNA, 15 bp, Homo sapiens
tccaatggctgcgtc

SEQ ID NO: 1146733 - DNA, 15 bp, Homo sapiens
atccaatggctgcgt

SEQ ID NO: 1146734 - DNA, 15 bp, Homo sapiens
gatccaatggctgcg

SEQ ID NO: 1146735 - DNA, 15 bp, Homo sapiens
ggatccaatggctgc

SEQ ID NO: 1146736 - DNA, 15 bp, Homo sapiens
tggatccaatggctg

SEQ ID NO: 1146737 - DNA, 15 bp, Homo sapiens
ctggatccaatggct

SEQ ID NO: 1146738 - DNA, 15 bp, Homo sapiens
tctggatccaatggc

SEQ ID NO: 1146739 - DNA, 15 bp, Homo sapiens
ttctggatccaatgg

SEQ ID NO: 1146740 - DNA, 15 bp, Homo sapiens
gttctggatccaatg

SEQ ID NO: 1146741 - DNA, 15 bp, Homo sapiens
tgttctggatccaat

SEQ ID NO: 1146742 - DNA, 15 bp, Homo sapiens
gtgttctggatccaa

SEQ ID NO: 1146743 - DNA, 15 bp, Homo sapiens
agtgttctggatcca

SEQ ID NO: 1146744 - DNA, 15 bp, Homo sapiens
cagtgttctggatcc

SEQ ID NO: 1146745 - DNA, 15 bp, Homo sapiens
ccagtgttctggatc

SEQ ID NO: 1146746 - DNA, 15 bp, Homo sapiens
gccagtgttctggat

SEQ ID NO: 1146747 - DNA, 15 bp, Homo sapiens
tgccagtgttctgga

SEQ ID NO: 1146748 - DNA, 15 bp, Homo sapiens
atgccagtgttctgg

SEQ ID NO: 1146749 - DNA, 15 bp, Homo sapiens
aatgccagtgttctg

SEQ ID NO: 1146750 - DNA, 15 bp, Homo sapiens
aaatgccagtgttct

SEQ ID NO: 1146751 - DNA, 15 bp, Homo sapiens
caaatgccagtgttc

SEQ ID NO: 1146752 - DNA, 15 bp, Homo sapiens
gcaaatgccagtgtt

SEQ ID NO: 1146753 - DNA, 15 bp, Homo sapiens
agcaaatgccagtgt

SEQ ID NO: 1146754 - DNA, 15 bp, Homo sapiens
tagcaaatgccagtg

SEQ ID NO: 1146755 - DNA, 15 bp, Homo sapiens
gtagcaaatgccagt

SEQ ID NO: 1146756 - DNA, 15 bp, Homo sapiens
tgtagcaaatgccag

SEQ ID NO: 1146757 - DNA, 15 bp, Homo sapiens
atgtagcaaatgcca

SEQ ID NO: 1146758 - DNA, 15 bp, Homo sapiens
catgtagcaaatgcc

SEQ ID NO: 1146759 - DNA, 15 bp, Homo sapiens
tcatgtagcaaatgc

SEQ ID NO: 1146760 - DNA, 15 bp, Homo sapiens
gtcatgtagcaaatg

SEQ ID NO: 1146761 - DNA, 15 bp, Homo sapiens
agtcatgtagcaaat

SEQ ID NO: 1146762 - DNA, 15 bp, Homo sapiens
aagtcatgtagcaaa

SEQ ID NO: 1146763 - DNA, 15 bp, Homo sapiens
aaagtcatgtagcaa

SEQ ID NO: 1146764 - DNA, 15 bp, Homo sapiens
taaagtcatgtagca

SEQ ID NO: 1146765 - DNA, 15 bp, Homo sapiens
ttaaagtcatgtagc

SEQ ID NO: 1146766 - DNA, 15 bp, Homo sapiens
attaaagtcatgtag

SEQ ID NO: 1146767 - DNA, 15 bp, Homo sapiens
tattaaagtcatgta

SEQ ID NO: 1146768 - DNA, 15 bp, Homo sapiens
atattaaagtcatgt

SEQ ID NO: 1146769 - DNA, 15 bp, Homo sapiens
aatattaaagtcatg

SEQ ID NO: 1146770 - DNA, 15 bp, Homo sapiens
aaatattaaagtcat

SEQ ID NO: 1146771 - DNA, 15 bp, Homo sapiens
caaatattaaagtca

SEQ ID NO: 1146772 - DNA, 15 bp, Homo sapiens
acaaatattaaagtc

SEQ ID NO: 1146773 - DNA, 15 bp, Homo sapiens
aacaaatattaaagt

SEQ ID NO: 1146774 - DNA, 15 bp, Homo sapiens
taacaaatattaaag

SEQ ID NO: 1146775 - DNA, 15 bp, Homo sapiens
ttaacaaatattaaa

SEQ ID NO: 1146776 - DNA, 15 bp, Homo sapiens
tttaacaaatattaa

SEQ ID NO: 1146777 - DNA, 15 bp, Homo sapiens
ctttaacaaatatta

SEQ ID NO: 1146778 - DNA, 15 bp, Homo sapiens
cctttaacaaatatt

SEQ ID NO: 1146779 - DNA, 15 bp, Homo sapiens
tcctttaacaaatat

SEQ ID NO: 1146780 - DNA, 15 bp, Homo sapiens
ctcctttaacaaata

SEQ ID NO: 1146781 - DNA, 15 bp, Homo sapiens
tctcctttaacaaat

SEQ ID NO: 1146782 - DNA, 15 bp, Homo sapiens
ctctcctttaacaaa

SEQ ID NO: 1146783 - DNA, 15 bp, Homo sapiens
cctctcctttaacaa

SEQ ID NO: 1146784 - DNA, 15 bp, Homo sapiens
ccctctcctttaaca

SEQ ID NO: 1146785 - DNA, 15 bp, Homo sapiens
accctctcctttaac

SEQ ID NO: 1146786 - DNA, 15 bp, Homo sapiens
aaccctctcctttaa

SEQ ID NO: 1146787 - DNA, 15 bp, Homo sapiens
aaaccctctccttta

SEQ ID NO: 1146788 - DNA, 15 bp, Homo sapiens
caaaccctctccttt

SEQ ID NO: 1146789 - DNA, 15 bp, Homo sapiens
ccaaaccctctcctt

SEQ ID NO: 1146790 - DNA, 15 bp, Homo sapiens
cccaaaccctctcct

SEQ ID NO: 1146791 - DNA, 15 bp, Homo sapiens
tcccaaaccctctcc

SEQ ID NO: 1146792 - DNA, 15 bp, Homo sapiens
ttcccaaaccctctc

SEQ ID NO: 1146793 - DNA, 15 bp, Homo sapiens
cttcccaaaccctct

SEQ ID NO: 1146794 - DNA, 15 bp, Homo sapiens
tcttcccaaaccctc

SEQ ID NO: 1146795 - DNA, 15 bp, Homo sapiens
ttcttcccaaaccct

SEQ ID NO: 1146796 - DNA, 15 bp, Homo sapiens
tttcttcccaaaccc

SEQ ID NO: 1146797 - DNA, 15 bp, Homo sapiens
ttttcttcccaaacc

SEQ ID NO: 1146798 - DNA, 15 bp, Homo sapiens
tttttcttcccaaac

SEQ ID NO: 1146799 - DNA, 15 bp, Homo sapiens
ctttttcttcccaaa

SEQ ID NO: 1146800 - DNA, 15 bp, Homo sapiens
actttttcttcccaa

SEQ ID NO: 1146801 - DNA, 15 bp, Homo sapiens
tactttttcttccca

SEQ ID NO: 1146802 - DNA, 15 bp, Homo sapiens
ctactttttcttccc

SEQ ID NO: 1146803 - DNA, 15 bp, Homo sapiens
cctactttttcttcc

SEQ ID NO: 1146804 - DNA, 15 bp, Homo sapiens
acctactttttcttc

SEQ ID NO: 1146805 - DNA, 15 bp, Homo sapiens
aacctactttttctt

SEQ ID NO: 1146806 - DNA, 15 bp, Homo sapiens
taacctactttttct

SEQ ID NO: 1146807 - DNA, 15 bp, Homo sapiens
ttaacctactttttc

SEQ ID NO: 1146808 - DNA, 15 bp, Homo sapiens
tttaacctacttttt

SEQ ID NO: 1146809 - DNA, 15 bp, Homo sapiens
ctttaacctactttt

SEQ ID NO: 1146810 - DNA, 15 bp, Homo sapiens
cctttaacctacttt

SEQ ID NO: 1146811 - DNA, 15 bp, Homo sapiens
ccctttaacctactt

SEQ ID NO: 1146812 - DNA, 15 bp, Homo sapiens
accctttaacctact

SEQ ID NO: 1146813 - DNA, 15 bp, Homo sapiens
aaccctttaacctac

SEQ ID NO: 1146814 - DNA, 15 bp, Homo sapiens
caaccctttaaccta

SEQ ID NO: 1146815 - DNA, 15 bp, Homo sapiens
tcaaccctttaacct

SEQ ID NO: 1146816 - DNA, 15 bp, Homo sapiens
gtcaaccctttaacc

SEQ ID NO: 1146817 - DNA, 15 bp, Homo sapiens
ggtcaaccctttaac

SEQ ID NO: 1146818 - DNA, 15 bp, Homo sapiens
tggtcaaccctttaa

SEQ ID NO: 1146819 - DNA, 15 bp, Homo sapiens
ctggtcaacccttta

SEQ ID NO: 1146820 - DNA, 15 bp, Homo sapiens
tctggtcaacccttt

SEQ ID NO: 1146821 - DNA, 15 bp, Homo sapiens
ctctggtcaaccctt

SEQ ID NO: 1146822 - DNA, 15 bp, Homo sapiens
actctggtcaaccct

SEQ ID NO: 1146823 - DNA, 15 bp, Homo sapiens
cactctggtcaaccc

SEQ ID NO: 1146824 - DNA, 15 bp, Homo sapiens
gcactctggtcaacc

SEQ ID NO: 1146825 - DNA, 15 bp, Homo sapiens
ggcactctggtcaac

SEQ ID NO: 1146826 - DNA, 15 bp, Homo sapiens
aggcactctggtcaa

SEQ ID NO: 1146827 - DNA, 15 bp, Homo sapiens
aaggcactctggtca

SEQ ID NO: 1146828 - DNA, 15 bp, Homo sapiens
aaaggcactctggtc

SEQ ID NO: 1146829 - DNA, 15 bp, Homo sapiens
taaaggcactctggt

SEQ ID NO: 1146830 - DNA, 15 bp, Homo sapiens
ttaaaggcactctgg

SEQ ID NO: 1146831 - DNA, 15 bp, Homo sapiens
tttaaaggcactctg

SEQ ID NO: 1146832 - DNA, 15 bp, Homo sapiens
gtttaaaggcactct

SEQ ID NO: 1146833 - DNA, 15 bp, Homo sapiens
agtttaaaggcactc

SEQ ID NO: 1146834 - DNA, 15 bp, Homo sapiens
aagtttaaaggcact

SEQ ID NO: 1146835 - DNA, 15 bp, Homo sapiens
aaagtttaaaggcac

SEQ ID NO: 1146836 - DNA, 15 bp, Homo sapiens
aaaagtttaaaggca

SEQ ID NO: 1146837 - DNA, 15 bp, Homo sapiens
gaaaagtttaaaggc

SEQ ID NO: 1146838 - DNA, 15 bp, Homo sapiens
agaaaagtttaaagg

SEQ ID NO: 1146839 - DNA, 15 bp, Homo sapiens
gagaaaagtttaaag

SEQ ID NO: 1146840 - DNA, 15 bp, Homo sapiens
ggagaaaagtttaaa

SEQ ID NO: 1146841 - DNA, 15 bp, Homo sapiens
gggagaaaagtttaa

SEQ ID NO: 1146842 - DNA, 15 bp, Homo sapiens
agggagaaaagttta

SEQ ID NO: 1146843 - DNA, 15 bp, Homo sapiens
tagggagaaaagttt

SEQ ID NO: 1146844 - DNA, 15 bp, Homo sapiens
atagggagaaaagtt

SEQ ID NO: 1146845 - DNA, 15 bp, Homo sapiens
tatagggagaaaagt

SEQ ID NO: 1146846 - DNA, 15 bp, Homo sapiens
gtatagggagaaaag

SEQ ID NO: 1146847 - DNA, 15 bp, Homo sapiens
tgtatagggagaaaa

SEQ ID NO: 1146848 - DNA, 15 bp, Homo sapiens
ttgtatagggagaaa

SEQ ID NO: 1146849 - DNA, 15 bp, Homo sapiens
tttgtatagggagaa

SEQ ID NO: 1146850 - DNA, 15 bp, Homo sapiens
ttttgtatagggaga

SEQ ID NO: 1146851 - DNA, 15 bp, Homo sapiens
cttttgtatagggag

SEQ ID NO: 1146852 - DNA, 15 bp, Homo sapiens
acttttgtataggga

SEQ ID NO: 1146853 - DNA, 15 bp, Homo sapiens
cacttttgtataggg

SEQ ID NO: 1146854 - DNA, 15 bp, Homo sapiens
tcacttttgtatagg

SEQ ID NO: 1146855 - DNA, 15 bp, Homo sapiens
atcacttttgtatag

SEQ ID NO: 1146856 - DNA, 15 bp, Homo sapiens
gatcacttttgtata

SEQ ID NO: 1146857 - DNA, 15 bp, Homo sapiens
tgatcacttttgtat

SEQ ID NO: 1146858 - DNA, 15 bp, Homo sapiens
gtgatcacttttgta

SEQ ID NO: 1146859 - DNA, 15 bp, Homo sapiens
agtgatcacttttgt

SEQ ID NO: 1146860 - DNA, 15 bp, Homo sapiens
cagtgatcacttttg

SEQ ID NO: 1146861 - DNA, 15 bp, Homo sapiens
acagtgatcactttt

SEQ ID NO: 1146862 - DNA, 15 bp, Homo sapiens
aacagtgatcacttt

SEQ ID NO: 1146863 - DNA, 15 bp, Homo sapiens
aaacagtgatcactt

SEQ ID NO: 1146864 - DNA, 15 bp, Homo sapiens
gaaacagtgatcact

SEQ ID NO: 1146865 - DNA, 15 bp, Homo sapiens
agaaacagtgatcac

SEQ ID NO: 1146866 - DNA, 15 bp, Homo sapiens
aagaaacagtgatca

SEQ ID NO: 1146867 - DNA, 15 bp, Homo sapiens
aaagaaacagtgatc

SEQ ID NO: 1146868 - DNA, 15 bp, Homo sapiens
aaaagaaacagtgat

SEQ ID NO: 1146869 - DNA, 15 bp, Homo sapiens
gaaaagaaacagtga

SEQ ID NO: 1146870 - DNA, 15 bp, Homo sapiens
agaaaagaaacagtg

SEQ ID NO: 1146871 - DNA, 15 bp, Homo sapiens
cagaaaagaaacagt

SEQ ID NO: 1146872 - DNA, 15 bp, Homo sapiens
acagaaaagaaacag

SEQ ID NO: 1146873 - DNA, 15 bp, Homo sapiens
gacagaaaagaaaca

SEQ ID NO: 1146874 - DNA, 15 bp, Homo sapiens
ggacagaaaagaaac

SEQ ID NO: 1146875 - DNA, 15 bp, Homo sapiens
tggacagaaaagaaa

SEQ ID NO: 1146876 - DNA, 15 bp, Homo sapiens
ctggacagaaaagaa

SEQ ID NO: 1146877 - DNA, 15 bp, Homo sapiens
tctggacagaaaaga

SEQ ID NO: 1146878 - DNA, 15 bp, Homo sapiens
atctggacagaaaag

SEQ ID NO: 1146879 - DNA, 15 bp, Homo sapiens
tatctggacagaaaa

SEQ ID NO: 1146880 - DNA, 15 bp, Homo sapiens
gtatctggacagaaa

SEQ ID NO: 1146881 - DNA, 15 bp, Homo sapiens
agtatctggacagaa

SEQ ID NO: 1146882 - DNA, 15 bp, Homo sapiens
gagtatctggacaga

SEQ ID NO: 1146883 - DNA, 15 bp, Homo sapiens
agagtatctggacag

SEQ ID NO: 1146884 - DNA, 15 bp, Homo sapiens
gagagtatctggaca

SEQ ID NO: 1146885 - DNA, 15 bp, Homo sapiens
cgagagtatctggac

SEQ ID NO: 1146886 - DNA, 15 bp, Homo sapiens
ccgagagtatctgga

SEQ ID NO: 1146887 - DNA, 15 bp, Homo sapiens
gccgagagtatctgg

SEQ ID NO: 1146888 - DNA, 15 bp, Homo sapiens
tgccgagagtatctg

SEQ ID NO: 1146889 - DNA, 15 bp, Homo sapiens
atgccgagagtatct

SEQ ID NO: 1146890 - DNA, 15 bp, Homo sapiens
aatgccgagagtatc

SEQ ID NO: 1146891 - DNA, 15 bp, Homo sapiens
aaatgccgagagtat

SEQ ID NO: 1146892 - DNA, 15 bp, Homo sapiens
taaatgccgagagta

SEQ ID NO: 1146893 - DNA, 15 bp, Homo sapiens
ctaaatgccgagagt

SEQ ID NO: 1146894 - DNA, 15 bp, Homo sapiens
actaaatgccgagag

SEQ ID NO: 1146895 - DNA, 15 bp, Homo sapiens
cactaaatgccgaga

SEQ ID NO: 1146896 - DNA, 15 bp, Homo sapiens
tcactaaatgccgag

SEQ ID NO: 1146897 - DNA, 15 bp, Homo sapiens
gtcactaaatgccga

SEQ ID NO: 1146898 - DNA, 15 bp, Homo sapiens
tgtcactaaatgccg

SEQ ID NO: 1146899 - DNA, 15 bp, Homo sapiens
ttgtcactaaatgcc

SEQ ID NO: 1146900 - DNA, 15 bp, Homo sapiens
tttgtcactaaatgc

SEQ ID NO: 1146901 - DNA, 15 bp, Homo sapiens
ctttgtcactaaatg

SEQ ID NO: 1146902 - DNA, 15 bp, Homo sapiens
tctttgtcactaaat

SEQ ID NO: 1146903 - DNA, 15 bp, Homo sapiens
ttctttgtcactaaa

SEQ ID NO: 1146904 - DNA, 15 bp, Homo sapiens
gttctttgtcactaa

SEQ ID NO: 1146905 - DNA, 15 bp, Homo sapiens
agttctttgtcacta

SEQ ID NO: 1146906 - DNA, 15 bp, Homo sapiens
tagttctttgtcact

SEQ ID NO: 1146907 - DNA, 15 bp, Homo sapiens
ctagttctttgtcac

SEQ ID NO: 1146908 - DNA, 15 bp, Homo sapiens
gctagttctttgtca

SEQ ID NO: 1146909 - DNA, 15 bp, Homo sapiens
agctagttctttgtc

SEQ ID NO: 1146910 - DNA, 15 bp, Homo sapiens
cagctagttctttgt

SEQ ID NO: 1146911 - DNA, 15 bp, Homo sapiens
gcagctagttctttg

SEQ ID NO: 1146912 - DNA, 15 bp, Homo sapiens
agcagctagttcttt

SEQ ID NO: 1146913 - DNA, 15 bp, Homo sapiens
aagcagctagttctt

SEQ ID NO: 1146914 - DNA, 15 bp, Homo sapiens
taagcagctagttct

SEQ ID NO: 1146915 - DNA, 15 bp, Homo sapiens
ataagcagctagttc

SEQ ID NO: 1146916 - DNA, 15 bp, Homo sapiens
cataagcagctagtt

SEQ ID NO: 1146917 - DNA, 15 bp, Homo sapiens
gcataagcagctagt

SEQ ID NO: 1146918 - DNA, 15 bp, Homo sapiens
tgcataagcagctag

SEQ ID NO: 1146919 - DNA, 15 bp, Homo sapiens
ttgcataagcagcta

SEQ ID NO: 1146920 - DNA, 15 bp, Homo sapiens
tttgcataagcagct

SEQ ID NO: 1146921 - DNA, 15 bp, Homo sapiens
ttttgcataagcagc

SEQ ID NO: 1146922 - DNA, 15 bp, Homo sapiens
cttttgcataagcag

SEQ ID NO: 1146923 - DNA, 15 bp, Homo sapiens
gcttttgcataagca

SEQ ID NO: 1146924 - DNA, 15 bp, Homo sapiens
tgcttttgcataagc

SEQ ID NO: 1146925 - DNA, 15 bp, Homo sapiens
ctgcttttgcataag

SEQ ID NO: 1146926 - DNA, 15 bp, Homo sapiens
cctgcttttgcataa

SEQ ID NO: 1146927 - DNA, 15 bp, Homo sapiens
gcctgcttttgcata

SEQ ID NO: 1146928 - DNA, 15 bp, Homo sapiens
cgcctgcttttgcat

SEQ ID NO: 1146929 - DNA, 15 bp, Homo sapiens
gcgcctgcttttgca

SEQ ID NO: 1146930 - DNA, 15 bp, Homo sapiens
ggcgcctgcttttgc

SEQ ID NO: 1146931 - DNA, 15 bp, Homo sapiens
cggcgcctgcttttg

SEQ ID NO: 1146932 - DNA, 15 bp, Homo sapiens
acggcgcctgctttt

SEQ ID NO: 1146933 - DNA, 15 bp, Homo sapiens
cacggcgcctgcttt

SEQ ID NO: 1146934 - DNA, 15 bp, Homo sapiens
ccacggcgcctgctt

SEQ ID NO: 1146935 - DNA, 15 bp, Homo sapiens
gccacggcgcctgct

SEQ ID NO: 1146936 - DNA, 15 bp, Homo sapiens
tgccacggcgcctgc

SEQ ID NO: 1146937 - DNA, 15 bp, Homo sapiens
ctgccacggcgcctg

SEQ ID NO: 1146938 - DNA, 15 bp, Homo sapiens
tctgccacggcgcct

SEQ ID NO: 1146939 - DNA, 15 bp, Homo sapiens
ttctgccacggcgcc

SEQ ID NO: 1146940 - DNA, 15 bp, Homo sapiens
cttctgccacggcgc

SEQ ID NO: 1146941 - DNA, 15 bp, Homo sapiens
tcttctgccacggcg

SEQ ID NO: 1146942 - DNA, 15 bp, Homo sapiens
ctcttctgccacggc

SEQ ID NO: 1146943 - DNA, 15 bp, Homo sapiens
cctcttctgccacgg

SEQ ID NO: 1146944 - DNA, 15 bp, Homo sapiens
gcctcttctgccacg

SEQ ID NO: 1146945 - DNA, 15 bp, Homo sapiens
agcctcttctgccac

SEQ ID NO: 1146946 - DNA, 15 bp, Homo sapiens
gagcctcttctgcca

SEQ ID NO: 1146947 - DNA, 15 bp, Homo sapiens
agagcctcttctgcc

SEQ ID NO: 1146948 - DNA, 15 bp, Homo sapiens
cagagcctcttctgc

SEQ ID NO: 1146949 - DNA, 15 bp, Homo sapiens
ccagagcctcttctg

SEQ ID NO: 1146950 - DNA, 15 bp, Homo sapiens
cccagagcctcttct

SEQ ID NO: 1146951 - DNA, 15 bp, Homo sapiens
ccccagagcctcttc

SEQ ID NO: 1146952 - DNA, 15 bp, Homo sapiens
cccccagagcctctt

SEQ ID NO: 1146953 - DNA, 15 bp, Homo sapiens
gcccccagagcctct

SEQ ID NO: 1146954 - DNA, 15 bp, Homo sapiens
ggcccccagagcctc

SEQ ID NO: 1146955 - DNA, 15 bp, Homo sapiens
tggcccccagagcct

SEQ ID NO: 1146956 - DNA, 15 bp, Homo sapiens
atggcccccagagcc

SEQ ID NO: 1146957 - DNA, 15 bp, Homo sapiens
gatggcccccagagc

SEQ ID NO: 1146958 - DNA, 15 bp, Homo sapiens
tgatggcccccagag

SEQ ID NO: 1146959 - DNA, 15 bp, Homo sapiens
ctgatggcccccaga

SEQ ID NO: 1146960 - DNA, 15 bp, Homo sapiens
cctgatggcccccag

SEQ ID NO: 1146961 - DNA, 15 bp, Homo sapiens
tcctgatggccccca

SEQ ID NO: 1146962 - DNA, 15 bp, Homo sapiens
gtcctgatggccccc

SEQ ID NO: 1146963 - DNA, 15 bp, Homo sapiens
agtcctgatggcccc

SEQ ID NO: 1146964 - DNA, 15 bp, Homo sapiens
cagtcctgatggccc

SEQ ID NO: 1146965 - DNA, 15 bp, Homo sapiens
acagtcctgatggcc

SEQ ID NO: 1146966 - DNA, 15 bp, Homo sapiens
cacagtcctgatggc

SEQ ID NO: 1146967 - DNA, 15 bp, Homo sapiens
tcacagtcctgatgg

SEQ ID NO: 1146968 - DNA, 15 bp, Homo sapiens
atcacagtcctgatg

SEQ ID NO: 1146969 - DNA, 15 bp, Homo sapiens
tatcacagtcctgat

SEQ ID NO: 1146970 - DNA, 15 bp, Homo sapiens
ctatcacagtcctga

SEQ ID NO: 1146971 - DNA, 15 bp, Homo sapiens
gctatcacagtcctg

SEQ ID NO: 1146972 - DNA, 15 bp, Homo sapiens
agctatcacagtcct

SEQ ID NO: 1146973 - DNA, 15 bp, Homo sapiens
aagctatcacagtcc

SEQ ID NO: 1146974 - DNA, 15 bp, Homo sapiens
aaagctatcacagtc

SEQ ID NO: 1146975 - DNA, 15 bp, Homo sapiens
gaaagctatcacagt

SEQ ID NO: 1146976 - DNA, 15 bp, Homo sapiens
cgaaagctatcacag

SEQ ID NO: 1146977 - DNA, 15 bp, Homo sapiens
ccgaaagctatcaca

SEQ ID NO: 1146978 - DNA, 15 bp, Homo sapiens
cccgaaagctatcac

SEQ ID NO: 1146979 - DNA, 15 bp, Homo sapiens
ccccgaaagctatca

SEQ ID NO: 1146980 - DNA, 15 bp, Homo sapiens
cccccgaaagctatc

SEQ ID NO: 1146981 - DNA, 15 bp, Homo sapiens
gcccccgaaagctat

SEQ ID NO: 1146982 - DNA, 15 bp, Homo sapiens
ggcccccgaaagcta

SEQ ID NO: 1146983 - DNA, 15 bp, Homo sapiens
tggcccccgaaagct

SEQ ID NO: 1146984 - DNA, 15 bp, Homo sapiens
ctggcccccgaaagc

SEQ ID NO: 1146985 - DNA, 15 bp, Homo sapiens
tctggcccccgaaag

SEQ ID NO: 1146986 - DNA, 15 bp, Homo sapiens
ttctggcccccgaaa

SEQ ID NO: 1146987 - DNA, 15 bp, Homo sapiens
gttctggcccccgaa

SEQ ID NO: 1146988 - DNA, 15 bp, Homo sapiens
tgttctggcccccga

SEQ ID NO: 1146989 - DNA, 15 bp, Homo sapiens
ttgttctggcccccg

SEQ ID NO: 1146990 - DNA, 15 bp, Homo sapiens
tttgttctggccccc

SEQ ID NO: 1146991 - DNA, 15 bp, Homo sapiens
ctttgttctggcccc

SEQ ID NO: 1146992 - DNA, 15 bp, Homo sapiens
tctttgttctggccc

SEQ ID NO: 1146993 - DNA, 15 bp, Homo sapiens
ctctttgttctggcc

SEQ ID NO: 1146994 - DNA, 15 bp, Homo sapiens
gctctttgttctggc

SEQ ID NO: 1146995 - DNA, 15 bp, Homo sapiens
agctctttgttctgg

SEQ ID NO: 1146996 - DNA, 15 bp, Homo sapiens
cagctctttgttctg

SEQ ID NO: 1146997 - DNA, 15 bp, Homo sapiens
ccagctctttgttct

SEQ ID NO: 1146998 - DNA, 15 bp, Homo sapiens
tccagctctttgttc

SEQ ID NO: 1146999 - DNA, 15 bp, Homo sapiens
ttccagctctttgtt

SEQ ID NO: 1147000 - DNA, 15 bp, Homo sapiens
tttccagctctttgt

SEQ ID NO: 1147001 - DNA, 15 bp, Homo sapiens
ctttccagctctttg

SEQ ID NO: 1147002 - DNA, 15 bp, Homo sapiens
cctttccagctcttt

SEQ ID NO: 1147003 - DNA, 15 bp, Homo sapiens
acctttccagctctt

SEQ ID NO: 1147004 - DNA, 15 bp, Homo sapiens
gacctttccagctct

SEQ ID NO: 1147005 - DNA, 15 bp, Homo sapiens
tgacctttccagctc

SEQ ID NO: 1147006 - DNA, 15 bp, Homo sapiens
ctgacctttccagct

SEQ ID NO: 1147007 - DNA, 15 bp, Homo sapiens
cctgacctttccagc

SEQ ID NO: 1147008 - DNA, 15 bp, Homo sapiens
tcctgacctttccag

SEQ ID NO: 1147009 - DNA, 15 bp, Homo sapiens
ttcctgacctttcca

SEQ ID NO: 1147010 - DNA, 15 bp, Homo sapiens
cttcctgacctttcc

SEQ ID NO: 1147011 - DNA, 15 bp, Homo sapiens
ccttcctgacctttc

SEQ ID NO: 1147012 - DNA, 15 bp, Homo sapiens
accttcctgaccttt

SEQ ID NO: 1147013 - DNA, 15 bp, Homo sapiens
aaccttcctgacctt

SEQ ID NO: 1147014 - DNA, 15 bp, Homo sapiens
gaaccttcctgacct

SEQ ID NO: 1147015 - DNA, 15 bp, Homo sapiens
agaaccttcctgacc

SEQ ID NO: 1147016 - DNA, 15 bp, Homo sapiens
aagaaccttcctgac

SEQ ID NO: 1147017 - DNA, 15 bp, Homo sapiens
aaagaaccttcctga

SEQ ID NO: 1147018 - DNA, 15 bp, Homo sapiens
taaagaaccttcctg

SEQ ID NO: 1147019 - DNA, 15 bp, Homo sapiens
ctaaagaaccttcct

SEQ ID NO: 1147020 - DNA, 15 bp, Homo sapiens
gctaaagaaccttcc

SEQ ID NO: 1147021 - DNA, 15 bp, Homo sapiens
ggctaaagaaccttc

SEQ ID NO: 1147022 - DNA, 15 bp, Homo sapiens
tggctaaagaacctt

SEQ ID NO: 1147023 - DNA, 15 bp, Homo sapiens
gtggctaaagaacct

SEQ ID NO: 1147024 - DNA, 15 bp, Homo sapiens
agtggctaaagaacc

SEQ ID NO: 1147025 - DNA, 15 bp, Homo sapiens
cagtggctaaagaac

SEQ ID NO: 1147026 - DNA, 15 bp, Homo sapiens
ccagtggctaaagaa

SEQ ID NO: 1147027 - DNA, 15 bp, Homo sapiens
accagtggctaaaga

SEQ ID NO: 1147028 - DNA, 15 bp, Homo sapiens
aaccagtggctaaag

SEQ ID NO: 1147029 - DNA, 15 bp, Homo sapiens
aaaccagtggctaaa

SEQ ID NO: 1147030 - DNA, 15 bp, Homo sapiens
taaaccagtggctaa

SEQ ID NO: 1147031 - DNA, 15 bp, Homo sapiens
ttaaaccagtggcta

SEQ ID NO: 1147032 - DNA, 15 bp, Homo sapiens
cttaaaccagtggct

SEQ ID NO: 1147033 - DNA, 15 bp, Homo sapiens
ccttaaaccagtggc

SEQ ID NO: 1147034 - DNA, 15 bp, Homo sapiens
tccttaaaccagtgg

SEQ ID NO: 1147035 - DNA, 15 bp, Homo sapiens
ttccttaaaccagtg

SEQ ID NO: 1147036 - DNA, 15 bp, Homo sapiens
attccttaaaccagt

SEQ ID NO: 1147037 - DNA, 15 bp, Homo sapiens
cattccttaaaccag

SEQ ID NO: 1147038 - DNA, 15 bp, Homo sapiens
acattccttaaacca

SEQ ID NO: 1147039 - DNA, 15 bp, Homo sapiens
cacattccttaaacc

SEQ ID NO: 1147040 - DNA, 15 bp, Homo sapiens
acacattccttaaac

SEQ ID NO: 1147041 - DNA, 15 bp, Homo sapiens
aacacattccttaaa

SEQ ID NO: 1147042 - DNA, 15 bp, Homo sapiens
aaacacattccttaa

SEQ ID NO: 1147043 - DNA, 15 bp, Homo sapiens
aaaacacattcctta

SEQ ID NO: 1147044 - DNA, 15 bp, Homo sapiens
aaaaacacattcctt

SEQ ID NO: 1147045 - DNA, 15 bp, Homo sapiens
taaaaacacattcct

SEQ ID NO: 1147046 - DNA, 15 bp, Homo sapiens
gtaaaaacacattcc

SEQ ID NO: 1147047 - DNA, 15 bp, Homo sapiens
tgtaaaaacacattc

SEQ ID NO: 1147048 - DNA, 15 bp, Homo sapiens
atgtaaaaacacatt

SEQ ID NO: 1147049 - DNA, 15 bp, Homo sapiens
aatgtaaaaacacat

SEQ ID NO: 1147050 - DNA, 15 bp, Homo sapiens
aaatgtaaaaacaca

SEQ ID NO: 1147051 - DNA, 15 bp, Homo sapiens
aaaatgtaaaaacac

SEQ ID NO: 1147052 - DNA, 15 bp, Homo sapiens
caaaatgtaaaaaca

SEQ ID NO: 1147053 - DNA, 15 bp, Homo sapiens
acaaaatgtaaaaac

SEQ ID NO: 1147054 - DNA, 15 bp, Homo sapiens
aacaaaatgtaaaaa

SEQ ID NO: 1147055 - DNA, 15 bp, Homo sapiens
caacaaaatgtaaaa

SEQ ID NO: 1147056 - DNA, 15 bp, Homo sapiens
gcaacaaaatgtaaa

SEQ ID NO: 1147057 - DNA, 15 bp, Homo sapiens
agcaacaaaatgtaa

SEQ ID NO: 1147058 - DNA, 15 bp, Homo sapiens
aagcaacaaaatgta

SEQ ID NO: 1147059 - DNA, 15 bp, Homo sapiens
gaagcaacaaaatgt

SEQ ID NO: 1147060 - DNA, 15 bp, Homo sapiens
agaagcaacaaaatg

SEQ ID NO: 1147061 - DNA, 15 bp, Homo sapiens
aagaagcaacaaaat

SEQ ID NO: 1147062 - DNA, 15 bp, Homo sapiens
gaagaagcaacaaaa

SEQ ID NO: 1147063 - DNA, 15 bp, Homo sapiens
agaagaagcaacaaa

SEQ ID NO: 1147064 - DNA, 15 bp, Homo sapiens
aagaagaagcaacaa

SEQ ID NO: 1147065 - DNA, 15 bp, Homo sapiens
aaagaagaagcaaca

SEQ ID NO: 1147066 - DNA, 15 bp, Homo sapiens
caaagaagaagcaac

SEQ ID NO: 1147067 - DNA, 15 bp, Homo sapiens
acaaagaagaagcaa

SEQ ID NO: 1147068 - DNA, 15 bp, Homo sapiens
cacaaagaagaagca

SEQ ID NO: 1147069 - DNA, 15 bp, Homo sapiens
ccacaaagaagaagc

SEQ ID NO: 1147070 - DNA, 15 bp, Homo sapiens
accacaaagaagaag

SEQ ID NO: 1147071 - DNA, 15 bp, Homo sapiens
taccacaaagaagaa

SEQ ID NO: 1147072 - DNA, 15 bp, Homo sapiens
ataccacaaagaaga

SEQ ID NO: 1147073 - DNA, 15 bp, Homo sapiens
cataccacaaagaag

SEQ ID NO: 1147074 - DNA, 15 bp, Homo sapiens
acataccacaaagaa

SEQ ID NO: 1147075 - DNA, 15 bp, Homo sapiens
cacataccacaaaga

SEQ ID NO: 1147076 - DNA, 15 bp, Homo sapiens
acacataccacaaag

SEQ ID NO: 1147077 - DNA, 15 bp, Homo sapiens
aacacataccacaaa

SEQ ID NO: 1147078 - DNA, 15 bp, Homo sapiens
aaacacataccacaa

SEQ ID NO: 1147079 - DNA, 15 bp, Homo sapiens
aaaacacataccaca

SEQ ID NO: 1147080 - DNA, 15 bp, Homo sapiens
aaaaacacataccac

SEQ ID NO: 1147081 - DNA, 15 bp, Homo sapiens
aaaaaacacatacca

SEQ ID NO: 1147082 - DNA, 15 bp, Homo sapiens
taaaaaacacatacc

SEQ ID NO: 1147083 - DNA, 15 bp, Homo sapiens
gtaaaaaacacatac

SEQ ID NO: 1147084 - DNA, 15 bp, Homo sapiens
ggtaaaaaacacata

SEQ ID NO: 1147085 - DNA, 15 bp, Homo sapiens
aggtaaaaaacacat

SEQ ID NO: 1147086 - DNA, 15 bp, Homo sapiens
aaggtaaaaaacaca

SEQ ID NO: 1147087 - DNA, 15 bp, Homo sapiens
gaaggtaaaaaacac

SEQ ID NO: 1147088 - DNA, 15 bp, Homo sapiens
ggaaggtaaaaaaca

SEQ ID NO: 1147089 - DNA, 15 bp, Homo sapiens
gggaaggtaaaaaac

SEQ ID NO: 1147090 - DNA, 15 bp, Homo sapiens
agggaaggtaaaaaa

SEQ ID NO: 1147091 - DNA, 15 bp, Homo sapiens
aagggaaggtaaaaa

SEQ ID NO: 1147092 - DNA, 15 bp, Homo sapiens
aaagggaaggtaaaa

SEQ ID NO: 1147093 - DNA, 15 bp, Homo sapiens
gaaagggaaggtaaa

SEQ ID NO: 1147094 - DNA, 15 bp, Homo sapiens
ggaaagggaaggtaa

SEQ ID NO: 1147095 - DNA, 15 bp, Homo sapiens
aggaaagggaaggta

SEQ ID NO: 1147096 - DNA, 15 bp, Homo sapiens
taggaaagggaaggt

SEQ ID NO: 1147097 - DNA, 15 bp, Homo sapiens
ttaggaaagggaagg

SEQ ID NO: 1147098 - DNA, 15 bp, Homo sapiens
attaggaaagggaag

SEQ ID NO: 1147099 - DNA, 15 bp, Homo sapiens
tattaggaaagggaa

SEQ ID NO: 1147100 - DNA, 15 bp, Homo sapiens
atattaggaaaggga

SEQ ID NO: 1147101 - DNA, 15 bp, Homo sapiens
aatattaggaaaggg

SEQ ID NO: 1147102 - DNA, 15 bp, Homo sapiens
taatattaggaaagg

SEQ ID NO: 1147103 - DNA, 15 bp, Homo sapiens
ttaatattaggaaag

SEQ ID NO: 1147104 - DNA, 15 bp, Homo sapiens
gttaatattaggaaa

SEQ ID NO: 1147105 - DNA, 15 bp, Homo sapiens
ggttaatattaggaa

SEQ ID NO: 1147106 - DNA, 15 bp, Homo sapiens
gggttaatattagga

SEQ ID NO: 1147107 - DNA, 15 bp, Homo sapiens
agggttaatattagg

SEQ ID NO: 1147108 - DNA, 15 bp, Homo sapiens
aagggttaatattag

SEQ ID NO: 1147109 - DNA, 15 bp, Homo sapiens
gaagggttaatatta

SEQ ID NO: 1147110 - DNA, 15 bp, Homo sapiens
agaagggttaatatt

SEQ ID NO: 1147111 - DNA, 15 bp, Homo sapiens
gagaagggttaatat

SEQ ID NO: 1147112 - DNA, 15 bp, Homo sapiens
cgagaagggttaata

SEQ ID NO: 1147113 - DNA, 15 bp, Homo sapiens
gcgagaagggttaat

SEQ ID NO: 1147114 - DNA, 15 bp, Homo sapiens
tgcgagaagggttaa

SEQ ID NO: 1147115 - DNA, 15 bp, Homo sapiens
atgcgagaagggtta

SEQ ID NO: 1147116 - DNA, 15 bp, Homo sapiens
tatgcgagaagggtt

SEQ ID NO: 1147117 - DNA, 15 bp, Homo sapiens
ttatgcgagaagggt

SEQ ID NO: 1147118 - DNA, 15 bp, Homo sapiens
tttatgcgagaaggg

SEQ ID NO: 1147119 - DNA, 15 bp, Homo sapiens
atttatgcgagaagg

SEQ ID NO: 1147120 - DNA, 15 bp, Homo sapiens
aatttatgcgagaag

SEQ ID NO: 1147121 - DNA, 15 bp, Homo sapiens
taatttatgcgagaa

SEQ ID NO: 1147122 - DNA, 15 bp, Homo sapiens
ataatttatgcgaga

SEQ ID NO: 1147123 - DNA, 15 bp, Homo sapiens
tataatttatgcgag

SEQ ID NO: 1147124 - DNA, 15 bp, Homo sapiens
ttataatttatgcga

SEQ ID NO: 1147125 - DNA, 15 bp, Homo sapiens
cttataatttatgcg

SEQ ID NO: 1147126 - DNA, 15 bp, Homo sapiens
gcttataatttatgc

SEQ ID NO: 1147127 - DNA, 15 bp, Homo sapiens
tgcttataatttatg

SEQ ID NO: 1147128 - DNA, 15 bp, Homo sapiens
gtgcttataatttat

SEQ ID NO: 1147129 - DNA, 15 bp, Homo sapiens
ggtgcttataattta

SEQ ID NO: 1147130 - DNA, 15 bp, Homo sapiens
gggtgcttataattt

SEQ ID NO: 1147131 - DNA, 15 bp, Homo sapiens
agggtgcttataatt

SEQ ID NO: 1147132 - DNA, 15 bp, Homo sapiens
aagggtgcttataat

SEQ ID NO: 1147133 - DNA, 15 bp, Homo sapiens
aaagggtgcttataa

SEQ ID NO: 1147134 - DNA, 15 bp, Homo sapiens
taaagggtgcttata

SEQ ID NO: 1147135 - DNA, 15 bp, Homo sapiens
gtaaagggtgcttat

SEQ ID NO: 1147136 - DNA, 15 bp, Homo sapiens
agtaaagggtgctta

SEQ ID NO: 1147137 - DNA, 15 bp, Homo sapiens
cagtaaagggtgctt

SEQ ID NO: 1147138 - DNA, 15 bp, Homo sapiens
tcagtaaagggtgct

SEQ ID NO: 1147139 - DNA, 15 bp, Homo sapiens
atcagtaaagggtgc

SEQ ID NO: 1147140 - DNA, 15 bp, Homo sapiens
catcagtaaagggtg

SEQ ID NO: 1147141 - DNA, 15 bp, Homo sapiens
ccatcagtaaagggt

SEQ ID NO: 1147142 - DNA, 15 bp, Homo sapiens
gccatcagtaaaggg

SEQ ID NO: 1147143 - DNA, 15 bp, Homo sapiens
agccatcagtaaagg

SEQ ID NO: 1147144 - DNA, 15 bp, Homo sapiens
tagccatcagtaaag

SEQ ID NO: 1147145 - DNA, 15 bp, Homo sapiens
atagccatcagtaaa

SEQ ID NO: 1147146 - DNA, 15 bp, Homo sapiens
tatagccatcagtaa

SEQ ID NO: 1147147 - DNA, 15 bp, Homo sapiens
ctatagccatcagta

SEQ ID NO: 1147148 - DNA, 15 bp, Homo sapiens
actatagccatcagt

SEQ ID NO: 1147149 - DNA, 15 bp, Homo sapiens
aactatagccatcag

SEQ ID NO: 1147150 - DNA, 15 bp, Homo sapiens
caactatagccatca

SEQ ID NO: 1147151 - DNA, 15 bp, Homo sapiens
tcaactatagccatc

SEQ ID NO: 1147152 - DNA, 15 bp, Homo sapiens
ttcaactatagccat

SEQ ID NO: 1147153 - DNA, 15 bp, Homo sapiens
attcaactatagcca

SEQ ID NO: 1147154 - DNA, 15 bp, Homo sapiens
cattcaactatagcc

SEQ ID NO: 1147155 - DNA, 15 bp, Homo sapiens
acattcaactatagc

SEQ ID NO: 1147156 - DNA, 15 bp, Homo sapiens
gacattcaactatag

SEQ ID NO: 1147157 - DNA, 15 bp, Homo sapiens
tgacattcaactata

SEQ ID NO: 1147158 - DNA, 15 bp, Homo sapiens
ctgacattcaactat

SEQ ID NO: 1147159 - DNA, 15 bp, Homo sapiens
tctgacattcaacta

SEQ ID NO: 1147160 - DNA, 15 bp, Homo sapiens
gtctgacattcaact

SEQ ID NO: 1147161 - DNA, 15 bp, Homo sapiens
agtctgacattcaac

SEQ ID NO: 1147162 - DNA, 15 bp, Homo sapiens
gagtctgacattcaa

SEQ ID NO: 1147163 - DNA, 15 bp, Homo sapiens
agagtctgacattca

SEQ ID NO: 1147164 - DNA, 15 bp, Homo sapiens
tagagtctgacattc

SEQ ID NO: 1147165 - DNA, 15 bp, Homo sapiens
ttagagtctgacatt

SEQ ID NO: 1147166 - DNA, 15 bp, Homo sapiens
tttagagtctgacat

SEQ ID NO: 1147167 - DNA, 15 bp, Homo sapiens
ctttagagtctgaca

SEQ ID NO: 1147168 - DNA, 15 bp, Homo sapiens
gctttagagtctgac

SEQ ID NO: 1147169 - DNA, 15 bp, Homo sapiens
tgctttagagtctga

SEQ ID NO: 1147170 - DNA, 15 bp, Homo sapiens
ttgctttagagtctg

SEQ ID NO: 1147171 - DNA, 15 bp, Homo sapiens
cttgctttagagtct

SEQ ID NO: 1147172 - DNA, 15 bp, Homo sapiens
tcttgctttagagtc

SEQ ID NO: 1147173 - DNA, 15 bp, Homo sapiens
atcttgctttagagt

SEQ ID NO: 1147174 - DNA, 15 bp, Homo sapiens
aatcttgctttagag

SEQ ID NO: 1147175 - DNA, 15 bp, Homo sapiens
gaatcttgctttaga

SEQ ID NO: 1147176 - DNA, 15 bp, Homo sapiens
agaatcttgctttag

SEQ ID NO: 1147177 - DNA, 15 bp, Homo sapiens
aagaatcttgcttta

SEQ ID NO: 1147178 - DNA, 15 bp, Homo sapiens
taagaatcttgcttt

SEQ ID NO: 1147179 - DNA, 15 bp, Homo sapiens
ttaagaatcttgctt

SEQ ID NO: 1147180 - DNA, 15 bp, Homo sapiens
attaagaatcttgct

SEQ ID NO: 1147181 - DNA, 15 bp, Homo sapiens
gattaagaatcttgc

SEQ ID NO: 1147182 - DNA, 15 bp, Homo sapiens
tgattaagaatcttg

SEQ ID NO: 1147183 - DNA, 15 bp, Homo sapiens
atgattaagaatctt

SEQ ID NO: 1147184 - DNA, 15 bp, Homo sapiens
aatgattaagaatct

SEQ ID NO: 1147185 - DNA, 15 bp, Homo sapiens
aaatgattaagaatc

SEQ ID NO: 1147186 - DNA, 15 bp, Homo sapiens
taaatgattaagaat

SEQ ID NO: 1147187 - DNA, 15 bp, Homo sapiens
ataaatgattaagaa

SEQ ID NO: 1147188 - DNA, 15 bp, Homo sapiens
cataaatgattaaga

SEQ ID NO: 1147189 - DNA, 15 bp, Homo sapiens
acataaatgattaag

SEQ ID NO: 1147190 - DNA, 15 bp, Homo sapiens
aacataaatgattaa

SEQ ID NO: 1147191 - DNA, 15 bp, Homo sapiens
gaacataaatgatta

SEQ ID NO: 1147192 - DNA, 15 bp, Homo sapiens
ggaacataaatgatt

SEQ ID NO: 1147193 - DNA, 15 bp, Homo sapiens
tggaacataaatgat

SEQ ID NO: 1147194 - DNA, 15 bp, Homo sapiens
atggaacataaatga

SEQ ID NO: 1147195 - DNA, 15 bp, Homo sapiens
catggaacataaatg

SEQ ID NO: 1147196 - DNA, 15 bp, Homo sapiens
ccatggaacataaat

SEQ ID NO: 1147197 - DNA, 15 bp, Homo sapiens
tccatggaacataaa

SEQ ID NO: 1147198 - DNA, 15 bp, Homo sapiens
gtccatggaacataa

SEQ ID NO: 1147199 - DNA, 15 bp, Homo sapiens
agtccatggaacata

SEQ ID NO: 1147200 - DNA, 15 bp, Homo sapiens
gagtccatggaacat

SEQ ID NO: 1147201 - DNA, 15 bp, Homo sapiens
agagtccatggaaca

SEQ ID NO: 1147202 - DNA, 15 bp, Homo sapiens
aagagtccatggaac

SEQ ID NO: 1147203 - DNA, 15 bp, Homo sapiens
aaagagtccatggaa

SEQ ID NO: 1147204 - DNA, 15 bp, Homo sapiens
aaaagagtccatgga

SEQ ID NO: 1147205 - DNA, 15 bp, Homo sapiens
caaaagagtccatgg

SEQ ID NO: 1147206 - DNA, 15 bp, Homo sapiens
ccaaaagagtccatg

SEQ ID NO: 1147207 - DNA, 15 bp, Homo sapiens
gccaaaagagtccat

SEQ ID NO: 1147208 - DNA, 15 bp, Homo sapiens
agccaaaagagtcca

SEQ ID NO: 1147209 - DNA, 15 bp, Homo sapiens
tagccaaaagagtcc

SEQ ID NO: 1147210 - DNA, 15 bp, Homo sapiens
atagccaaaagagtc

SEQ ID NO: 1147211 - DNA, 15 bp, Homo sapiens
catagccaaaagagt

SEQ ID NO: 1147212 - DNA, 15 bp, Homo sapiens
acatagccaaaagag

SEQ ID NO: 1147213 - DNA, 15 bp, Homo sapiens
cacatagccaaaaga

SEQ ID NO: 1147214 - DNA, 15 bp, Homo sapiens
tcacatagccaaaag

SEQ ID NO: 1147215 - DNA, 15 bp, Homo sapiens
atcacatagccaaaa

SEQ ID NO: 1147216 - DNA, 15 bp, Homo sapiens
tatcacatagccaaa

SEQ ID NO: 1147217 - DNA, 15 bp, Homo sapiens
ttatcacatagccaa

SEQ ID NO: 1147218 - DNA, 15 bp, Homo sapiens
attatcacatagcca

SEQ ID NO: 1147219 - DNA, 15 bp, Homo sapiens
tattatcacatagcc

SEQ ID NO: 1147220 - DNA, 15 bp, Homo sapiens
gtattatcacatagc

SEQ ID NO: 1147221 - DNA, 15 bp, Homo sapiens
tgtattatcacatag

SEQ ID NO: 1147222 - DNA, 15 bp, Homo sapiens
ttgtattatcacata

SEQ ID NO: 1147223 - DNA, 15 bp, Homo sapiens
tttgtattatcacat

SEQ ID NO: 1147224 - DNA, 15 bp, Homo sapiens
atttgtattatcaca

SEQ ID NO: 1147225 - DNA, 15 bp, Homo sapiens
catttgtattatcac

SEQ ID NO: 1147226 - DNA, 15 bp, Homo sapiens
ccatttgtattatca

SEQ ID NO: 1147227 - DNA, 15 bp, Homo sapiens
tccatttgtattatc

SEQ ID NO: 1147228 - DNA, 15 bp, Homo sapiens
gtccatttgtattat

SEQ ID NO: 1147229 - DNA, 15 bp, Homo sapiens
agtccatttgtatta

SEQ ID NO: 1147230 - DNA, 15 bp, Homo sapiens
gagtccatttgtatt

SEQ ID NO: 1147231 - DNA, 15 bp, Homo sapiens
ggagtccatttgtat

SEQ ID NO: 1147232 - DNA, 15 bp, Homo sapiens
gggagtccatttgta

SEQ ID NO: 1147233 - DNA, 15 bp, Homo sapiens
agggagtccatttgt

SEQ ID NO: 1147234 - DNA, 15 bp, Homo sapiens
aagggagtccatttg

SEQ ID NO: 1147235 - DNA, 15 bp, Homo sapiens
caagggagtccattt

SEQ ID NO: 1147236 - DNA, 15 bp, Homo sapiens
acaagggagtccatt

SEQ ID NO: 1147237 - DNA, 15 bp, Homo sapiens
aacaagggagtccat

SEQ ID NO: 1147238 - DNA, 15 bp, Homo sapiens
aaacaagggagtcca

SEQ ID NO: 1147239 - DNA, 15 bp, Homo sapiens
aaaacaagggagtcc

SEQ ID NO: 1147240 - DNA, 15 bp, Homo sapiens
aaaaacaagggagtc

SEQ ID NO: 1147241 - DNA, 15 bp, Homo sapiens
taaaaacaagggagt

SEQ ID NO: 1147242 - DNA, 15 bp, Homo sapiens
ttaaaaacaagggag

SEQ ID NO: 1147243 - DNA, 15 bp, Homo sapiens
tttaaaaacaaggga

SEQ ID NO: 1147244 - DNA, 15 bp, Homo sapiens
atttaaaaacaaggg

SEQ ID NO: 1147245 - DNA, 15 bp, Homo sapiens
catttaaaaacaagg

SEQ ID NO: 1147246 - DNA, 15 bp, Homo sapiens
gcatttaaaaacaag

SEQ ID NO: 1147247 - DNA, 15 bp, Homo sapiens
tgcatttaaaaacaa

SEQ ID NO: 1147248 - DNA, 15 bp, Homo sapiens
atgcatttaaaaaca

SEQ ID NO: 1147249 - DNA, 15 bp, Homo sapiens
tatgcatttaaaaac

SEQ ID NO: 1147250 - DNA, 15 bp, Homo sapiens
ttatgcatttaaaaa

SEQ ID NO: 1147251 - DNA, 15 bp, Homo sapiens
tttatgcatttaaaa

SEQ ID NO: 1147252 - DNA, 15 bp, Homo sapiens
gtttatgcatttaaa

SEQ ID NO: 1147253 - DNA, 15 bp, Homo sapiens
ggtttatgcatttaa

SEQ ID NO: 1147254 - DNA, 15 bp, Homo sapiens
tggtttatgcattta

SEQ ID NO: 1147255 - DNA, 15 bp, Homo sapiens
ttggtttatgcattt

SEQ ID NO: 1147256 - DNA, 15 bp, Homo sapiens
tttggtttatgcatt

SEQ ID NO: 1147257 - DNA, 15 bp, Homo sapiens
ttttggtttatgcat

SEQ ID NO: 1147258 - DNA, 15 bp, Homo sapiens
attttggtttatgca

SEQ ID NO: 1147259 - DNA, 15 bp, Homo sapiens
tattttggtttatgc

SEQ ID NO: 1147260 - DNA, 15 bp, Homo sapiens
atattttggtttatg

SEQ ID NO: 1147261 - DNA, 15 bp, Homo sapiens
catattttggtttat

SEQ ID NO: 1147262 - DNA, 15 bp, Homo sapiens
gcatattttggttta

SEQ ID NO: 1147263 - DNA, 15 bp, Homo sapiens
agcatattttggttt

SEQ ID NO: 1147264 - DNA, 15 bp, Homo sapiens
tagcatattttggtt

SEQ ID NO: 1147265 - DNA, 15 bp, Homo sapiens
ctagcatattttggt

SEQ ID NO: 1147266 - DNA, 15 bp, Homo sapiens
gctagcatattttgg

SEQ ID NO: 1147267 - DNA, 15 bp, Homo sapiens
ggctagcatattttg

SEQ ID NO: 1147268 - DNA, 15 bp, Homo sapiens
gggctagcatatttt

SEQ ID NO: 1147269 - DNA, 15 bp, Homo sapiens
agggctagcatattt

SEQ ID NO: 1147270 - DNA, 15 bp, Homo sapiens
aagggctagcatatt

SEQ ID NO: 1147271 - DNA, 15 bp, Homo sapiens
aaagggctagcatat

SEQ ID NO: 1147272 - DNA, 15 bp, Homo sapiens
caaagggctagcata

SEQ ID NO: 1147273 - DNA, 15 bp, Homo sapiens
ccaaagggctagcat

SEQ ID NO: 1147274 - DNA, 15 bp, Homo sapiens
cccaaagggctagca

SEQ ID NO: 1147275 - DNA, 15 bp, Homo sapiens
tcccaaagggctagc

SEQ ID NO: 1147276 - DNA, 15 bp, Homo sapiens
ttcccaaagggctag

SEQ ID NO: 1147277 - DNA, 15 bp, Homo sapiens
cttcccaaagggcta

SEQ ID NO: 1147278 - DNA, 15 bp, Homo sapiens
gcttcccaaagggct

SEQ ID NO: 1147279 - DNA, 15 bp, Homo sapiens
ggcttcccaaagggc

SEQ ID NO: 1147280 - DNA, 15 bp, Homo sapiens
tggcttcccaaaggg

SEQ ID NO: 1147281 - DNA, 15 bp, Homo sapiens
ttggcttcccaaagg

SEQ ID NO: 1147282 - DNA, 15 bp, Homo sapiens
gccttggcttcccaa

SEQ ID NO: 1147283 - DNA, 15 bp, Homo sapiens
tgccttggcttccca

SEQ ID NO: 1147284 - DNA, 15 bp, Homo sapiens
ctgccttggcttccc

SEQ ID NO: 1147285 - DNA, 15 bp, Homo sapiens
cctgccttggcttcc

SEQ ID NO: 1147286 - DNA, 15 bp, Homo sapiens
tcctgccttggcttc

SEQ ID NO: 1147287 - DNA, 15 bp, Homo sapiens
ctcctgccttggctt

SEQ ID NO: 1147288 - DNA, 15 bp, Homo sapiens
cctcctgccttggct

SEQ ID NO: 1147289 - DNA, 15 bp, Homo sapiens
ccctcctgccttggc

SEQ ID NO: 1147290 - DNA, 15 bp, Homo sapiens
accctcctgccttgg

SEQ ID NO: 1147291 - DNA, 15 bp, Homo sapiens
taccctcctgccttg

SEQ ID NO: 1147292 - DNA, 15 bp, Homo sapiens
ctaccctcctgcctt

SEQ ID NO: 1147293 - DNA, 15 bp, Homo sapiens
gctaccctcctgcct

SEQ ID NO: 1147294 - DNA, 15 bp, Homo sapiens
agctaccctcctgcc

SEQ ID NO: 1147295 - DNA, 15 bp, Homo sapiens
cagctaccctcctgc

SEQ ID NO: 1147296 - DNA, 15 bp, Homo sapiens
ccagctaccctcctg

SEQ ID NO: 1147297 - DNA, 15 bp, Homo sapiens
tccagctaccctcct

SEQ ID NO: 1147298 - DNA, 15 bp, Homo sapiens
ttccagctaccctcc

SEQ ID NO: 1147299 - DNA, 15 bp, Homo sapiens
attccagctaccctc

SEQ ID NO: 1147300 - DNA, 15 bp, Homo sapiens
gattccagctaccct

SEQ ID NO: 1147301 - DNA, 15 bp, Homo sapiens
ggattccagctaccc

SEQ ID NO: 1147302 - DNA, 15 bp, Homo sapiens
tggattccagctacc

SEQ ID NO: 1147303 - DNA, 15 bp, Homo sapiens
ctggattccagctac

SEQ ID NO: 1147304 - DNA, 15 bp, Homo sapiens
cctggattccagcta

SEQ ID NO: 1147305 - DNA, 15 bp, Homo sapiens
tcctggattccagct

SEQ ID NO: 1147306 - DNA, 15 bp, Homo sapiens
ctcctggattccagc

SEQ ID NO: 1147307 - DNA, 15 bp, Homo sapiens
gctcctggattccag

SEQ ID NO: 1147308 - DNA, 15 bp, Homo sapiens
agctcctggattcca

SEQ ID NO: 1147309 - DNA, 15 bp, Homo sapiens
gagctcctggattcc

SEQ ID NO: 1147310 - DNA, 15 bp, Homo sapiens
tgagctcctggattc

SEQ ID NO: 1147311 - DNA, 15 bp, Homo sapiens
ttgagctcctggatt

SEQ ID NO: 1147312 - DNA, 15 bp, Homo sapiens
cttgagctcctggat

SEQ ID NO: 1147313 - DNA, 15 bp, Homo sapiens
tcttgagctcctgga

SEQ ID NO: 1147314 - DNA, 15 bp, Homo sapiens
gtcttgagctcctgg

SEQ ID NO: 1147315 - DNA, 15 bp, Homo sapiens
tactacattgcccag

SEQ ID NO: 1147316 - DNA, 15 bp, Homo sapiens
ttactacattgccca

SEQ ID NO: 1147317 - DNA, 15 bp, Homo sapiens
cttactacattgccc

SEQ ID NO: 1147318 - DNA, 15 bp, Homo sapiens
tcttactacattgcc

SEQ ID NO: 1147319 - DNA, 15 bp, Homo sapiens
gtcttactacattgc

SEQ ID NO: 1147320 - DNA, 15 bp, Homo sapiens
ggtcttactacattg

SEQ ID NO: 1147321 - DNA, 15 bp, Homo sapiens
gggtcttactacatt

SEQ ID NO: 1147322 - DNA, 15 bp, Homo sapiens
agggtcttactacat

SEQ ID NO: 1147323 - DNA, 15 bp, Homo sapiens
cagggtcttactaca

SEQ ID NO: 1147324 - DNA, 15 bp, Homo sapiens
ccagggtcttactac

SEQ ID NO: 1147325 - DNA, 15 bp, Homo sapiens
gccagggtcttacta

SEQ ID NO: 1147326 - DNA, 15 bp, Homo sapiens
agccagggtcttact

SEQ ID NO: 1147327 - DNA, 15 bp, Homo sapiens
gagccagggtcttac

SEQ ID NO: 1147328 - DNA, 15 bp, Homo sapiens
agagccagggtctta

SEQ ID NO: 1147329 - DNA, 15 bp, Homo sapiens
tagagccagggtctt

SEQ ID NO: 1147330 - DNA, 15 bp, Homo sapiens
gtagagccagggtct

SEQ ID NO: 1147331 - DNA, 15 bp, Homo sapiens
tgtagagccagggtc

SEQ ID NO: 1147332 - DNA, 15 bp, Homo sapiens
ttgtagagccagggt

SEQ ID NO: 1147333 - DNA, 15 bp, Homo sapiens
attgtagagccaggg

SEQ ID NO: 1147334 - DNA, 15 bp, Homo sapiens
aattgtagagccagg

SEQ ID NO: 1147335 - DNA, 15 bp, Homo sapiens
aaattgtagagccag

SEQ ID NO: 1147336 - DNA, 15 bp, Homo sapiens
aaaattgtagagcca

SEQ ID NO: 1147337 - DNA, 15 bp, Homo sapiens
aaaaattgtagagcc

SEQ ID NO: 1147338 - DNA, 15 bp, Homo sapiens
aaaaaattgtagagc

SEQ ID NO: 1147339 - DNA, 15 bp, Homo sapiens
aaaaaaattgtagag

SEQ ID NO: 1147340 - DNA, 15 bp, Homo sapiens
aaaaaaaattgtaga

SEQ ID NO: 1147341 - DNA, 15 bp, Homo sapiens
aaaaaaaaattgtag

SEQ ID NO: 1147342 - DNA, 15 bp, Homo sapiens
aaaaaaaaaattgta

SEQ ID NO: 1147343 - DNA, 15 bp, Homo sapiens
tattaaaaaaaaaaa

SEQ ID NO: 1147344 - DNA, 15 bp, Homo sapiens
ttattaaaaaaaaaa

SEQ ID NO: 1147345 - DNA, 15 bp, Homo sapiens
cttattaaaaaaaaa

SEQ ID NO: 1147346 - DNA, 15 bp, Homo sapiens
gcttattaaaaaaaa

SEQ ID NO: 1147347 - DNA, 15 bp, Homo sapiens
agcttattaaaaaaa

SEQ ID NO: 1147348 - DNA, 15 bp, Homo sapiens
cagcttattaaaaaa

SEQ ID NO: 1147349 - DNA, 15 bp, Homo sapiens
tcagcttattaaaaa

SEQ ID NO: 1147350 - DNA, 15 bp, Homo sapiens
ctcagcttattaaaa

SEQ ID NO: 1147351 - DNA, 15 bp, Homo sapiens
actcagcttattaaa

SEQ ID NO: 1147352 - DNA, 15 bp, Homo sapiens
cactcagcttattaa

SEQ ID NO: 1147353 - DNA, 15 bp, Homo sapiens
acactcagcttatta

SEQ ID NO: 1147354 - DNA, 15 bp, Homo sapiens
cacactcagcttatt

SEQ ID NO: 1147355 - DNA, 15 bp, Homo sapiens
ccacactcagcttat

SEQ ID NO: 1147356 - DNA, 15 bp, Homo sapiens
accacactcagctta

SEQ ID NO: 1147357 - DNA, 15 bp, Homo sapiens
caccacactcagctt

SEQ ID NO: 1147358 - DNA, 15 bp, Homo sapiens
ccaccacactcagct

SEQ ID NO: 1147359 - DNA, 15 bp, Homo sapiens
accaccacactcagc

SEQ ID NO: 1147360 - DNA, 15 bp, Homo sapiens
caccaccacactcag

SEQ ID NO: 1147361 - DNA, 15 bp, Homo sapiens
acaccaccacactca

SEQ ID NO: 1147362 - DNA, 15 bp, Homo sapiens
cacaccaccacactc

SEQ ID NO: 1147363 - DNA, 15 bp, Homo sapiens
gcacaccaccacact

SEQ ID NO: 1147364 - DNA, 15 bp, Homo sapiens
tgcacaccaccacac

SEQ ID NO: 1147365 - DNA, 15 bp, Homo sapiens
gtgcacaccaccaca

SEQ ID NO: 1147366 - DNA, 15 bp, Homo sapiens
ggtgcacaccaccac

SEQ ID NO: 1147367 - DNA, 15 bp, Homo sapiens
aggtgcacaccacca

SEQ ID NO: 1147368 - DNA, 15 bp, Homo sapiens
caggtgcacaccacc

SEQ ID NO: 1147369 - DNA, 15 bp, Homo sapiens
acaggtgcacaccac

SEQ ID NO: 1147370 - DNA, 15 bp, Homo sapiens
cacaggtgcacacca

SEQ ID NO: 1147371 - DNA, 15 bp, Homo sapiens
ccacaggtgcacacc

SEQ ID NO: 1147372 - DNA, 15 bp, Homo sapiens
accacaggtgcacac

SEQ ID NO: 1147373 - DNA, 15 bp, Homo sapiens
gaccacaggtgcaca

SEQ ID NO: 1147374 - DNA, 15 bp, Homo sapiens
ggaccacaggtgcac

SEQ ID NO: 1147375 - DNA, 15 bp, Homo sapiens
gggaccacaggtgca

SEQ ID NO: 1147376 - DNA, 15 bp, Homo sapiens
tgggaccacaggtgc

SEQ ID NO: 1147377 - DNA, 15 bp, Homo sapiens
ctgggaccacaggtg

SEQ ID NO: 1147378 - DNA, 15 bp, Homo sapiens
gctgggaccacaggt

SEQ ID NO: 1147379 - DNA, 15 bp, Homo sapiens
tgagtagctgggacc

SEQ ID NO: 1147380 - DNA, 15 bp, Homo sapiens
ggattctcctgcctc

SEQ ID NO: 1147381 - DNA, 15 bp, Homo sapiens
gggattctcctgcct

SEQ ID NO: 1147382 - DNA, 15 bp, Homo sapiens
agggattctcctgcc

SEQ ID NO: 1147383 - DNA, 15 bp, Homo sapiens
aagggattctcctgc

SEQ ID NO: 1147384 - DNA, 15 bp, Homo sapiens
caagggattctcctg

SEQ ID NO: 1147385 - DNA, 15 bp, Homo sapiens
ctcaagggattctcc

SEQ ID NO: 1147386 - DNA, 15 bp, Homo sapiens
gctcaagggattctc

SEQ ID NO: 1147387 - DNA, 15 bp, Homo sapiens
ggctcaagggattct

SEQ ID NO: 1147388 - DNA, 15 bp, Homo sapiens
gggctcaagggattc

SEQ ID NO: 1147389 - DNA, 15 bp, Homo sapiens
tgggctcaagggatt

SEQ ID NO: 1147390 - DNA, 15 bp, Homo sapiens
ctgggctcaagggat

SEQ ID NO: 1147391 - DNA, 15 bp, Homo sapiens
tctgggctcaaggga

SEQ ID NO: 1147392 - DNA, 15 bp, Homo sapiens
ttctgggctcaaggg

SEQ ID NO: 1147393 - DNA, 15 bp, Homo sapiens
attctgggctcaagg

SEQ ID NO: 1147394 - DNA, 15 bp, Homo sapiens
cattctgggctcaag

SEQ ID NO: 1147395 - DNA, 15 bp, Homo sapiens
acattctgggctcaa

SEQ ID NO: 1147396 - DNA, 15 bp, Homo sapiens
gacattctgggctca

SEQ ID NO: 1147397 - DNA, 15 bp, Homo sapiens
tgacattctgggctc

SEQ ID NO: 1147398 - DNA, 15 bp, Homo sapiens
ttgacattctgggct

SEQ ID NO: 1147399 - DNA, 15 bp, Homo sapiens
cttgacattctgggc

SEQ ID NO: 1147400 - DNA, 15 bp, Homo sapiens
ccttgacattctggg

SEQ ID NO: 1147401 - DNA, 15 bp, Homo sapiens
cccttgacattctgg

SEQ ID NO: 1147402 - DNA, 15 bp, Homo sapiens
acccttgacattctg

SEQ ID NO: 1147403 - DNA, 15 bp, Homo sapiens
cacccttgacattct

SEQ ID NO: 1147404 - DNA, 15 bp, Homo sapiens
gcacccttgacattc

SEQ ID NO: 1147405 - DNA, 15 bp, Homo sapiens
tgcacccttgacatt

SEQ ID NO: 1147406 - DNA, 15 bp, Homo sapiens
ctgcacccttgacat

SEQ ID NO: 1147407 - DNA, 15 bp, Homo sapiens
actgcacccttgaca

SEQ ID NO: 1147408 - DNA, 15 bp, Homo sapiens
cactgcacccttgac

SEQ ID NO: 1147409 - DNA, 15 bp, Homo sapiens
tcactgcacccttga

SEQ ID NO: 1147410 - DNA, 15 bp, Homo sapiens
ctcactgcacccttg

SEQ ID NO: 1147411 - DNA, 15 bp, Homo sapiens
gctcactgcaccctt

SEQ ID NO: 1147412 - DNA, 15 bp, Homo sapiens
agctcactgcaccct

SEQ ID NO: 1147413 - DNA, 15 bp, Homo sapiens
cagctcactgcaccc

SEQ ID NO: 1147414 - DNA, 15 bp, Homo sapiens
tcagctcactgcacc

SEQ ID NO: 1147415 - DNA, 15 bp, Homo sapiens
ttcagctcactgcac

SEQ ID NO: 1147416 - DNA, 15 bp, Homo sapiens
gttcagctcactgca

SEQ ID NO: 1147417 - DNA, 15 bp, Homo sapiens
agttcagctcactgc

SEQ ID NO: 1147418 - DNA, 15 bp, Homo sapiens
gagttcagctcactg

SEQ ID NO: 1147419 - DNA, 15 bp, Homo sapiens
ggagttcagctcact

SEQ ID NO: 1147420 - DNA, 15 bp, Homo sapiens
tggagttcagctcac

SEQ ID NO: 1147421 - DNA, 15 bp, Homo sapiens
ctggagttcagctca

SEQ ID NO: 1147422 - DNA, 15 bp, Homo sapiens
gctggagttcagctc

SEQ ID NO: 1147423 - DNA, 15 bp, Homo sapiens
ggctggagttcagct

SEQ ID NO: 1147424 - DNA, 15 bp, Homo sapiens
aggctggagttcagc

SEQ ID NO: 1147425 - DNA, 15 bp, Homo sapiens
tccaggctggagttc

SEQ ID NO: 1147426 - DNA, 15 bp, Homo sapiens
atccaggctggagtt

SEQ ID NO: 1147427 - DNA, 15 bp, Homo sapiens
atcatccaggctgga

SEQ ID NO: 1147428 - DNA, 15 bp, Homo sapiens
tatcatccaggctgg

SEQ ID NO: 1147429 - DNA, 15 bp, Homo sapiens
ctatcatccaggctg

SEQ ID NO: 1147430 - DNA, 15 bp, Homo sapiens
tctatcatccaggct

SEQ ID NO: 1147431 - DNA, 15 bp, Homo sapiens
ctctatcatccaggc

SEQ ID NO: 1147432 - DNA, 15 bp, Homo sapiens
actctatcatccagg

SEQ ID NO: 1147433 - DNA, 15 bp, Homo sapiens
cactctatcatccag

SEQ ID NO: 1147434 - DNA, 15 bp, Homo sapiens
tcactctatcatcca

SEQ ID NO: 1147435 - DNA, 15 bp, Homo sapiens
ctcactctatcatcc

SEQ ID NO: 1147436 - DNA, 15 bp, Homo sapiens
gctcactctatcatc

SEQ ID NO: 1147437 - DNA, 15 bp, Homo sapiens
ggctcactctatcat

SEQ ID NO: 1147438 - DNA, 15 bp, Homo sapiens
aggctcactctatca

SEQ ID NO: 1147439 - DNA, 15 bp, Homo sapiens
gaggctcactctatc

SEQ ID NO: 1147440 - DNA, 15 bp, Homo sapiens
agaggctcactctat

SEQ ID NO: 1147441 - DNA, 15 bp, Homo sapiens
tagaggctcactcta

SEQ ID NO: 1147442 - DNA, 15 bp, Homo sapiens
atagaggctcactct

SEQ ID NO: 1147443 - DNA, 15 bp, Homo sapiens
gatagaggctcactc

SEQ ID NO: 1147444 - DNA, 15 bp, Homo sapiens
tgatagaggctcact

SEQ ID NO: 1147445 - DNA, 15 bp, Homo sapiens
gtgatagaggctcac

SEQ ID NO: 1147446 - DNA, 15 bp, Homo sapiens
tgtgatagaggctca

SEQ ID NO: 1147447 - DNA, 15 bp, Homo sapiens
ttgtgatagaggctc

SEQ ID NO: 1147448 - DNA, 15 bp, Homo sapiens
tttgtgatagaggct

SEQ ID NO: 1147449 - DNA, 15 bp, Homo sapiens
ttttgtgatagaggc

SEQ ID NO: 1147450 - DNA, 15 bp, Homo sapiens
tttttgtgatagagg

SEQ ID NO: 1147451 - DNA, 15 bp, Homo sapiens
ttttttgtgatagag

SEQ ID NO: 1147452 - DNA, 15 bp, Homo sapiens
tttttttgtgataga

SEQ ID NO: 1147453 - DNA, 15 bp, Homo sapiens
ctttttttgtgatag

SEQ ID NO: 1147454 - DNA, 15 bp, Homo sapiens
tctttttttgtgata

SEQ ID NO: 1147455 - DNA, 15 bp, Homo sapiens
ctctttttttgtgat

SEQ ID NO: 1147456 - DNA, 15 bp, Homo sapiens
actctttttttgtga

SEQ ID NO: 1147457 - DNA, 15 bp, Homo sapiens
tactctttttttgtg

SEQ ID NO: 1147458 - DNA, 15 bp, Homo sapiens
ttactctttttttgt

SEQ ID NO: 1147459 - DNA, 15 bp, Homo sapiens
tttactctttttttg

SEQ ID NO: 1147460 - DNA, 15 bp, Homo sapiens
ttttactcttttttt

SEQ ID NO: 1147461 - DNA, 15 bp, Homo sapiens
tttttactctttttt

SEQ ID NO: 1147462 - DNA, 15 bp, Homo sapiens
atttttactcttttt

SEQ ID NO: 1147463 - DNA, 15 bp, Homo sapiens
aatttttactctttt

SEQ ID NO: 1147464 - DNA, 15 bp, Homo sapiens
aaatttttactcttt

SEQ ID NO: 1147465 - DNA, 15 bp, Homo sapiens
aaaatttttactctt

SEQ ID NO: 1147466 - DNA, 15 bp, Homo sapiens
aaaaatttttactct

SEQ ID NO: 1147467 - DNA, 15 bp, Homo sapiens
aaaaaatttttactc

SEQ ID NO: 1147468 - DNA, 15 bp, Homo sapiens
taaaaaatttttact

SEQ ID NO: 1147469 - DNA, 15 bp, Homo sapiens
ttaaaaaatttttac

SEQ ID NO: 1147470 - DNA, 15 bp, Homo sapiens
tttaaaaaattttta

SEQ ID NO: 1147471 - DNA, 15 bp, Homo sapiens
ttttaaaaaattttt

SEQ ID NO: 1147472 - DNA, 15 bp, Homo sapiens
tttttaaaaaatttt

SEQ ID NO: 1147473 - DNA, 15 bp, Homo sapiens
gtttttaaaaaattt

SEQ ID NO: 1147474 - DNA, 15 bp, Homo sapiens
ggtttttaaaaaatt

SEQ ID NO: 1147475 - DNA, 15 bp, Homo sapiens
tggtttttaaaaaat

SEQ ID NO: 1147476 - DNA, 15 bp, Homo sapiens
ttggtttttaaaaaa

SEQ ID NO: 1147477 - DNA, 15 bp, Homo sapiens
tttggtttttaaaaa

SEQ ID NO: 1147478 - DNA, 15 bp, Homo sapiens
ttttggtttttaaaa

SEQ ID NO: 1147479 - DNA, 15 bp, Homo sapiens
tttttggtttttaaa

SEQ ID NO: 1147480 - DNA, 15 bp, Homo sapiens
ttttttggtttttaa

SEQ ID NO: 1147481 - DNA, 15 bp, Homo sapiens
attttttggttttta

SEQ ID NO: 1147482 - DNA, 15 bp, Homo sapiens
tattttttggttttt

SEQ ID NO: 1147483 - DNA, 15 bp, Homo sapiens
ttattttttggtttt

SEQ ID NO: 1147484 - DNA, 15 bp, Homo sapiens
tttattttttggttt

SEQ ID NO: 1147485 - DNA, 15 bp, Homo sapiens
atttattttttggtt

SEQ ID NO: 1147486 - DNA, 15 bp, Homo sapiens
tatttattttttggt

SEQ ID NO: 1147487 - DNA, 15 bp, Homo sapiens
ttatttattttttgg

SEQ ID NO: 1147488 - DNA, 15 bp, Homo sapiens
gcttttatttattta

SEQ ID NO: 1147489 - DNA, 15 bp, Homo sapiens
ggcttttatttattt

SEQ ID NO: 1147490 - DNA, 15 bp, Homo sapiens
gggcttttatttatt

SEQ ID NO: 1147491 - DNA, 15 bp, Homo sapiens
ggggcttttatttat

SEQ ID NO: 1147492 - DNA, 15 bp, Homo sapiens
tggggcttttattta

SEQ ID NO: 1147493 - DNA, 15 bp, Homo sapiens
ttggggcttttattt

SEQ ID NO: 1147494 - DNA, 15 bp, Homo sapiens
tttggggcttttatt

SEQ ID NO: 1147495 - DNA, 15 bp, Homo sapiens
ttttggggcttttat

SEQ ID NO: 1147496 - DNA, 15 bp, Homo sapiens
tttttggggctttta

SEQ ID NO: 1147497 - DNA, 15 bp, Homo sapiens
ttttttggggctttt

SEQ ID NO: 1147498 - DNA, 15 bp, Homo sapiens
gttttttggggcttt

SEQ ID NO: 1147499 - DNA, 15 bp, Homo sapiens
tgttttttggggctt

SEQ ID NO: 1147500 - DNA, 15 bp, Homo sapiens
ttgttttttggggct

SEQ ID NO: 1147501 - DNA, 15 bp, Homo sapiens
tttgttttttggggc

SEQ ID NO: 1147502 - DNA, 15 bp, Homo sapiens
ttttgttttttgggg

SEQ ID NO: 1147503 - DNA, 15 bp, Homo sapiens
attttgttttttggg

SEQ ID NO: 1147504 - DNA, 15 bp, Homo sapiens
tattttgttttttgg

SEQ ID NO: 1147505 - DNA, 15 bp, Homo sapiens
ttattttgttttttg

SEQ ID NO: 1147506 - DNA, 15 bp, Homo sapiens
cttattttgtttttt

SEQ ID NO: 1147507 - DNA, 15 bp, Homo sapiens
acttattttgttttt

SEQ ID NO: 1147508 - DNA, 15 bp, Homo sapiens
tacttattttgtttt

SEQ ID NO: 1147509 - DNA, 15 bp, Homo sapiens
ctacttattttgttt

SEQ ID NO: 1147510 - DNA, 15 bp, Homo sapiens
cctacttattttgtt

SEQ ID NO: 1147511 - DNA, 15 bp, Homo sapiens
ccctacttattttgt

SEQ ID NO: 1147512 - DNA, 15 bp, Homo sapiens
accctacttattttg

SEQ ID NO: 1147513 - DNA, 15 bp, Homo sapiens
aaccctacttatttt

SEQ ID NO: 1147514 - DNA, 15 bp, Homo sapiens
taaccctacttattt

SEQ ID NO: 1147515 - DNA, 15 bp, Homo sapiens
gtaaccctacttatt

SEQ ID NO: 1147516 - DNA, 15 bp, Homo sapiens
tgtaaccctacttat

SEQ ID NO: 1147517 - DNA, 15 bp, Homo sapiens
ttgtaaccctactta

SEQ ID NO: 1147518 - DNA, 15 bp, Homo sapiens
tttgtaaccctactt

SEQ ID NO: 1147519 - DNA, 15 bp, Homo sapiens
ctttgtaaccctact

SEQ ID NO: 1147520 - DNA, 15 bp, Homo sapiens
cctttgtaaccctac

SEQ ID NO: 1147521 - DNA, 15 bp, Homo sapiens
tcctttgtaacccta

SEQ ID NO: 1147522 - DNA, 15 bp, Homo sapiens
ttcctttgtaaccct

SEQ ID NO: 1147523 - DNA, 15 bp, Homo sapiens
tttcctttgtaaccc

SEQ ID NO: 1147524 - DNA, 15 bp, Homo sapiens
ttttcctttgtaacc

SEQ ID NO: 1147525 - DNA, 15 bp, Homo sapiens
attttcctttgtaac

SEQ ID NO: 1147526 - DNA, 15 bp, Homo sapiens
tattttcctttgtaa

SEQ ID NO: 1147527 - DNA, 15 bp, Homo sapiens
ttattttcctttgta

SEQ ID NO: 1147528 - DNA, 15 bp, Homo sapiens
attattttcctttgt

SEQ ID NO: 1147529 - DNA, 15 bp, Homo sapiens
aattattttcctttg

SEQ ID NO: 1147530 - DNA, 15 bp, Homo sapiens
taattattttccttt

SEQ ID NO: 1147531 - DNA, 15 bp, Homo sapiens
ataattattttcctt

SEQ ID NO: 1147532 - DNA, 15 bp, Homo sapiens
tataattattttcct

SEQ ID NO: 1147533 - DNA, 15 bp, Homo sapiens
atataattattttcc

SEQ ID NO: 1147534 - DNA, 15 bp, Homo sapiens
aatataattattttc

SEQ ID NO: 1147535 - DNA, 15 bp, Homo sapiens
tttaatataattatt

SEQ ID NO: 1147536 - DNA, 15 bp, Homo sapiens
ttttaatataattat

SEQ ID NO: 1147537 - DNA, 15 bp, Homo sapiens
tttttaatataatta

SEQ ID NO: 1147538 - DNA, 15 bp, Homo sapiens
atttttaatataatt

SEQ ID NO: 1147539 - DNA, 15 bp, Homo sapiens
tatttttaatataat

SEQ ID NO: 1147540 - DNA, 15 bp, Homo sapiens
gtatttttaatataa

SEQ ID NO: 1147541 - DNA, 15 bp, Homo sapiens
agtatttttaatata

SEQ ID NO: 1147542 - DNA, 15 bp, Homo sapiens
aagtatttttaatat

SEQ ID NO: 1147543 - DNA, 15 bp, Homo sapiens
taagtatttttaata

SEQ ID NO: 1147544 - DNA, 15 bp, Homo sapiens
ataagtatttttaat

SEQ ID NO: 1147545 - DNA, 15 bp, Homo sapiens
gataagtatttttaa

SEQ ID NO: 1147546 - DNA, 15 bp, Homo sapiens
tgataagtattttta

SEQ ID NO: 1147547 - DNA, 15 bp, Homo sapiens
ttgataagtattttt

SEQ ID NO: 1147548 - DNA, 15 bp, Homo sapiens
tttgataagtatttt

SEQ ID NO: 1147549 - DNA, 15 bp, Homo sapiens
ttttgataagtattt

SEQ ID NO: 1147550 - DNA, 15 bp, Homo sapiens
attttgataagtatt

SEQ ID NO: 1147551 - DNA, 15 bp, Homo sapiens
tattttgataagtat

SEQ ID NO: 1147552 - DNA, 15 bp, Homo sapiens
aaaaaatattttgat

SEQ ID NO: 1147553 - DNA, 15 bp, Homo sapiens
taaaaaatattttga

SEQ ID NO: 1147554 - DNA, 15 bp, Homo sapiens
ataaaaaatattttg

SEQ ID NO: 1147555 - DNA, 15 bp, Homo sapiens
aataaaaaatatttt

SEQ ID NO: 1147556 - DNA, 15 bp, Homo sapiens
aaataaaaaatattt

SEQ ID NO: 1147557 - DNA, 15 bp, Homo sapiens
aaaataaaaaatatt

SEQ ID NO: 1147558 - DNA, 15 bp, Homo sapiens
taaaataaaaaatat

SEQ ID NO: 1147559 - DNA, 15 bp, Homo sapiens
ataaaataaaaaata

SEQ ID NO: 1147560 - DNA, 15 bp, Homo sapiens
aataaaataaaaaat

SEQ ID NO: 1147561 - DNA, 15 bp, Homo sapiens
gagtaaaataaaata

SEQ ID NO: 1147562 - DNA, 15 bp, Homo sapiens
ggagtaaaataaaat

SEQ ID NO: 1147563 - DNA, 15 bp, Homo sapiens
aggagtaaaataaaa

SEQ ID NO: 1147564 - DNA, 15 bp, Homo sapiens
aaggagtaaaataaa

SEQ ID NO: 1147565 - DNA, 15 bp, Homo sapiens
taaggagtaaaataa

SEQ ID NO: 1147566 - DNA, 15 bp, Homo sapiens
ttaaggagtaaaata

SEQ ID NO: 1147567 - DNA, 15 bp, Homo sapiens
attaaggagtaaaat

SEQ ID NO: 1147568 - DNA, 15 bp, Homo sapiens
cattaaggagtaaaa

SEQ ID NO: 1147569 - DNA, 15 bp, Homo sapiens
tcattaaggagtaaa

SEQ ID NO: 1147570 - DNA, 15 bp, Homo sapiens
gtcattaaggagtaa

SEQ ID NO: 1147571 - DNA, 15 bp, Homo sapiens
agtcattaaggagta

SEQ ID NO: 1147572 - DNA, 15 bp, Homo sapiens
tagtcattaaggagt

SEQ ID NO: 1147573 - DNA, 15 bp, Homo sapiens
atagtcattaaggag

SEQ ID NO: 1147574 - DNA, 15 bp, Homo sapiens
catagtcattaagga

SEQ ID NO: 1147575 - DNA, 15 bp, Homo sapiens
tcatagtcattaagg

SEQ ID NO: 1147576 - DNA, 15 bp, Homo sapiens
ttcatagtcattaag

SEQ ID NO: 1147577 - DNA, 15 bp, Homo sapiens
gttcatagtcattaa

SEQ ID NO: 1147578 - DNA, 15 bp, Homo sapiens
agttcatagtcatta

SEQ ID NO: 1147579 - DNA, 15 bp, Homo sapiens
cagttcatagtcatt

SEQ ID NO: 1147580 - DNA, 15 bp, Homo sapiens
ccagttcatagtcat

SEQ ID NO: 1147581 - DNA, 15 bp, Homo sapiens
tccagttcatagtca

SEQ ID NO: 1147582 - DNA, 15 bp, Homo sapiens
ttccagttcatagtc

SEQ ID NO: 1147583 - DNA, 15 bp, Homo sapiens
attccagttcatagt

SEQ ID NO: 1147584 - DNA, 15 bp, Homo sapiens
tattccagttcatag

SEQ ID NO: 1147585 - DNA, 15 bp, Homo sapiens
atattccagttcata

SEQ ID NO: 1147586 - DNA, 15 bp, Homo sapiens
tatattccagttcat

SEQ ID NO: 1147587 - DNA, 15 bp, Homo sapiens
ctatattccagttca

SEQ ID NO: 1147588 - DNA, 15 bp, Homo sapiens
tctatattccagttc

SEQ ID NO: 1147589 - DNA, 15 bp, Homo sapiens
ttctatattccagtt

SEQ ID NO: 1147590 - DNA, 15 bp, Homo sapiens
cttctatattccagt

SEQ ID NO: 1147591 - DNA, 15 bp, Homo sapiens
tcttctatattccag

SEQ ID NO: 1147592 - DNA, 15 bp, Homo sapiens
ctcttctatattcca

SEQ ID NO: 1147593 - DNA, 15 bp, Homo sapiens
tctcttctatattcc

SEQ ID NO: 1147594 - DNA, 15 bp, Homo sapiens
ttctcttctatattc

SEQ ID NO: 1147595 - DNA, 15 bp, Homo sapiens
tttctcttctatatt

SEQ ID NO: 1147596 - DNA, 15 bp, Homo sapiens
ttttctcttctatat

SEQ ID NO: 1147597 - DNA, 15 bp, Homo sapiens
tttttctcttctata

SEQ ID NO: 1147598 - DNA, 15 bp, Homo sapiens
gtttttctcttctat

SEQ ID NO: 1147599 - DNA, 15 bp, Homo sapiens
ggtttttctcttcta

SEQ ID NO: 1147600 - DNA, 15 bp, Homo sapiens
aggtttttctcttct

SEQ ID NO: 1147601 - DNA, 15 bp, Homo sapiens
caggtttttctcttc

SEQ ID NO: 1147602 - DNA, 15 bp, Homo sapiens
tcaggtttttctctt

SEQ ID NO: 1147603 - DNA, 15 bp, Homo sapiens
ctcaggtttttctct

SEQ ID NO: 1147604 - DNA, 15 bp, Homo sapiens
tctcaggtttttctc

SEQ ID NO: 1147605 - DNA, 15 bp, Homo sapiens
ttctcaggtttttct

SEQ ID NO: 1147606 - DNA, 15 bp, Homo sapiens
tttctcaggtttttc

SEQ ID NO: 1147607 - DNA, 15 bp, Homo sapiens
ttttctcaggttttt

SEQ ID NO: 1147608 - DNA, 15 bp, Homo sapiens
gttttctcaggtttt

SEQ ID NO: 1147609 - DNA, 15 bp, Homo sapiens
tgttttctcaggttt

SEQ ID NO: 1147610 - DNA, 15 bp, Homo sapiens
atgttttctcaggtt

SEQ ID NO: 1147611 - DNA, 15 bp, Homo sapiens
gatgttttctcaggt

SEQ ID NO: 1147612 - DNA, 15 bp, Homo sapiens
cgatgttttctcagg

SEQ ID NO: 1147613 - DNA, 15 bp, Homo sapiens
tcgatgttttctcag

SEQ ID NO: 1147614 - DNA, 15 bp, Homo sapiens
gtcgatgttttctca

SEQ ID NO: 1147615 - DNA, 15 bp, Homo sapiens
agtcgatgttttctc

SEQ ID NO: 1147616 - DNA, 15 bp, Homo sapiens
aagtcgatgttttct

SEQ ID NO: 1147617 - DNA, 15 bp, Homo sapiens
gaagtcgatgttttc

SEQ ID NO: 1147618 - DNA, 15 bp, Homo sapiens
ggaagtcgatgtttt

SEQ ID NO: 1147619 - DNA, 15 bp, Homo sapiens
aggaagtcgatgttt

SEQ ID NO: 1147620 - DNA, 15 bp, Homo sapiens
taggaagtcgatgtt

SEQ ID NO: 1147621 - DNA, 15 bp, Homo sapiens
ctaggaagtcgatgt

SEQ ID NO: 1147622 - DNA, 15 bp, Homo sapiens
actaggaagtcgatg

SEQ ID NO: 1147623 - DNA, 15 bp, Homo sapiens
aactaggaagtcgat

SEQ ID NO: 1147624 - DNA, 15 bp, Homo sapiens
taactaggaagtcga

SEQ ID NO: 1147625 - DNA, 15 bp, Homo sapiens
ataactaggaagtcg

SEQ ID NO: 1147626 - DNA, 15 bp, Homo sapiens
tataactaggaagtc

SEQ ID NO: 1147627 - DNA, 15 bp, Homo sapiens
ctataactaggaagt

SEQ ID NO: 1147628 - DNA, 15 bp, Homo sapiens
gctataactaggaag

SEQ ID NO: 1147629 - DNA, 15 bp, Homo sapiens
ggctataactaggaa

SEQ ID NO: 1147630 - DNA, 15 bp, Homo sapiens
gggctataactagga

SEQ ID NO: 1147631 - DNA, 15 bp, Homo sapiens
tgggctataactagg

SEQ ID NO: 1147632 - DNA, 15 bp, Homo sapiens
ctgggctataactag

SEQ ID NO: 1147633 - DNA, 15 bp, Homo sapiens
tctgggctataacta

SEQ ID NO: 1147634 - DNA, 15 bp, Homo sapiens
ttctgggctataact

SEQ ID NO: 1147635 - DNA, 15 bp, Homo sapiens
attctgggctataac

SEQ ID NO: 1147636 - DNA, 15 bp, Homo sapiens
aattctgggctataa

SEQ ID NO: 1147637 - DNA, 15 bp, Homo sapiens
gaattctgggctata

SEQ ID NO: 1147638 - DNA, 15 bp, Homo sapiens
agaattctgggctat

SEQ ID NO: 1147639 - DNA, 15 bp, Homo sapiens
aagaattctgggcta

SEQ ID NO: 1147640 - DNA, 15 bp, Homo sapiens
aaagaattctgggct

SEQ ID NO: 1147641 - DNA, 15 bp, Homo sapiens
caaagaattctgggc

SEQ ID NO: 1147642 - DNA, 15 bp, Homo sapiens
acaaagaattctggg

SEQ ID NO: 1147643 - DNA, 15 bp, Homo sapiens
tacaaagaattctgg

SEQ ID NO: 1147644 - DNA, 15 bp, Homo sapiens
ctacaaagaattctg

SEQ ID NO: 1147645 - DNA, 15 bp, Homo sapiens
cctacaaagaattct

SEQ ID NO: 1147646 - DNA, 15 bp, Homo sapiens
ccctacaaagaattc

SEQ ID NO: 1147647 - DNA, 15 bp, Homo sapiens
gccctacaaagaatt

SEQ ID NO: 1147648 - DNA, 15 bp, Homo sapiens
ggccctacaaagaat

SEQ ID NO: 1147649 - DNA, 15 bp, Homo sapiens
aggccctacaaagaa

SEQ ID NO: 1147650 - DNA, 15 bp, Homo sapiens
aaggccctacaaaga

SEQ ID NO: 1147651 - DNA, 15 bp, Homo sapiens
caaggccctacaaag

SEQ ID NO: 1147652 - DNA, 15 bp, Homo sapiens
acaaggccctacaaa

SEQ ID NO: 1147653 - DNA, 15 bp, Homo sapiens
cacaaggccctacaa

SEQ ID NO: 1147654 - DNA, 15 bp, Homo sapiens
ccacaaggccctaca

SEQ ID NO: 1147655 - DNA, 15 bp, Homo sapiens
cccacaaggccctac

SEQ ID NO: 1147656 - DNA, 15 bp, Homo sapiens
acccacaaggcccta

SEQ ID NO: 1147657 - DNA, 15 bp, Homo sapiens
gacccacaaggccct

SEQ ID NO: 1147658 - DNA, 15 bp, Homo sapiens
ggacccacaaggccc

SEQ ID NO: 1147659 - DNA, 15 bp, Homo sapiens
aggacccacaaggcc

SEQ ID NO: 1147660 - DNA, 15 bp, Homo sapiens
gaggacccacaaggc

SEQ ID NO: 1147661 - DNA, 15 bp, Homo sapiens
ggaggacccacaagg

SEQ ID NO: 1147662 - DNA, 15 bp, Homo sapiens
tggaggacccacaag

SEQ ID NO: 1147663 - DNA, 15 bp, Homo sapiens
atggaggacccacaa

SEQ ID NO: 1147664 - DNA, 15 bp, Homo sapiens
tatggaggacccaca

SEQ ID NO: 1147665 - DNA, 15 bp, Homo sapiens
ttatggaggacccac

SEQ ID NO: 1147666 - DNA, 15 bp, Homo sapiens
gttatggaggaccca

SEQ ID NO: 1147667 - DNA, 15 bp, Homo sapiens
tgttatggaggaccc

SEQ ID NO: 1147668 - DNA, 15 bp, Homo sapiens
ttgttatggaggacc

SEQ ID NO: 1147669 - DNA, 15 bp, Homo sapiens
attgttatggaggac

SEQ ID NO: 1147670 - DNA, 15 bp, Homo sapiens
cattgttatggagga

SEQ ID NO: 1147671 - DNA, 15 bp, Homo sapiens
tcattgttatggagg

SEQ ID NO: 1147672 - DNA, 15 bp, Homo sapiens
ctcattgttatggag

SEQ ID NO: 1147673 - DNA, 15 bp, Homo sapiens
cctcattgttatgga

SEQ ID NO: 1147674 - DNA, 15 bp, Homo sapiens
gcctcattgttatgg

SEQ ID NO: 1147675 - DNA, 15 bp, Homo sapiens
tgcctcattgttatg

SEQ ID NO: 1147676 - DNA, 15 bp, Homo sapiens
ctgcctcattgttat

SEQ ID NO: 1147677 - DNA, 15 bp, Homo sapiens
cctgcctcattgtta

SEQ ID NO: 1147678 - DNA, 15 bp, Homo sapiens
ccctgcctcattgtt

SEQ ID NO: 1147679 - DNA, 15 bp, Homo sapiens
gccctgcctcattgt

SEQ ID NO: 1147680 - DNA, 15 bp, Homo sapiens
agccctgcctcattg

SEQ ID NO: 1147681 - DNA, 15 bp, Homo sapiens
aagccctgcctcatt

SEQ ID NO: 1147682 - DNA, 15 bp, Homo sapiens
gaagccctgcctcat

SEQ ID NO: 1147683 - DNA, 15 bp, Homo sapiens
ggaagccctgcctca

SEQ ID NO: 1147684 - DNA, 15 bp, Homo sapiens
gggaagccctgcctc

SEQ ID NO: 1147685 - DNA, 15 bp, Homo sapiens
tgggaagccctgcct

SEQ ID NO: 1147686 - DNA, 15 bp, Homo sapiens
gtgggaagccctgcc

SEQ ID NO: 1147687 - DNA, 15 bp, Homo sapiens
ggtgggaagccctgc

SEQ ID NO: 1147688 - DNA, 15 bp, Homo sapiens
gggtgggaagccctg

SEQ ID NO: 1147689 - DNA, 15 bp, Homo sapiens
tgggtgggaagccct

SEQ ID NO: 1147690 - DNA, 15 bp, Homo sapiens
ctgggtgggaagccc

SEQ ID NO: 1147691 - DNA, 15 bp, Homo sapiens
cctgggtgggaagcc

SEQ ID NO: 1147692 - DNA, 15 bp, Homo sapiens
gcctgggtgggaagc

SEQ ID NO: 1147693 - DNA, 15 bp, Homo sapiens
ggcctgggtgggaag

SEQ ID NO: 1147694 - DNA, 15 bp, Homo sapiens
aggcctgggtgggaa

SEQ ID NO: 1147695 - DNA, 15 bp, Homo sapiens
gaggcctgggtggga

SEQ ID NO: 1147696 - DNA, 15 bp, Homo sapiens
agaggcctgggtggg

SEQ ID NO: 1147697 - DNA, 15 bp, Homo sapiens
cagaggcctgggtgg

SEQ ID NO: 1147698 - DNA, 15 bp, Homo sapiens
ccagaggcctgggtg

SEQ ID NO: 1147699 - DNA, 15 bp, Homo sapiens
gccagaggcctgggt

SEQ ID NO: 1147700 - DNA, 15 bp, Homo sapiens
tgccagaggcctggg

SEQ ID NO: 1147701 - DNA, 15 bp, Homo sapiens
atgccagaggcctgg

SEQ ID NO: 1147702 - DNA, 15 bp, Homo sapiens
aatgccagaggcctg

SEQ ID NO: 1147703 - DNA, 15 bp, Homo sapiens
gaatgccagaggcct

SEQ ID NO: 1147704 - DNA, 15 bp, Homo sapiens
tgaatgccagaggcc

SEQ ID NO: 1147705 - DNA, 15 bp, Homo sapiens
ttgaatgccagaggc

SEQ ID NO: 1147706 - DNA, 15 bp, Homo sapiens
gttgaatgccagagg

SEQ ID NO: 1147707 - DNA, 15 bp, Homo sapiens
agttgaatgccagag

SEQ ID NO: 1147708 - DNA, 15 bp, Homo sapiens
aagttgaatgccaga

SEQ ID NO: 1147709 - DNA, 15 bp, Homo sapiens
aaagttgaatgccag

SEQ ID NO: 1147710 - DNA, 15 bp, Homo sapiens
taaagttgaatgcca

SEQ ID NO: 1147711 - DNA, 15 bp, Homo sapiens
ttaaagttgaatgcc

SEQ ID NO: 1147712 - DNA, 15 bp, Homo sapiens
attaaagttgaatgc

SEQ ID NO: 1147713 - DNA, 15 bp, Homo sapiens
cattaaagttgaatg

SEQ ID NO: 1147714 - DNA, 15 bp, Homo sapiens
tcattaaagttgaat

SEQ ID NO: 1147715 - DNA, 15 bp, Homo sapiens
atcattaaagttgaa

SEQ ID NO: 1147716 - DNA, 15 bp, Homo sapiens
gatcattaaagttga

SEQ ID NO: 1147717 - DNA, 15 bp, Homo sapiens
ggatcattaaagttg

SEQ ID NO: 1147718 - DNA, 15 bp, Homo sapiens
tggatcattaaagtt

SEQ ID NO: 1147719 - DNA, 15 bp, Homo sapiens
ctggatcattaaagt

SEQ ID NO: 1147720 - DNA, 15 bp, Homo sapiens
cctggatcattaaag

SEQ ID NO: 1147721 - DNA, 15 bp, Homo sapiens
tcctggatcattaaa

SEQ ID NO: 1147722 - DNA, 15 bp, Homo sapiens
atcctggatcattaa

SEQ ID NO: 1147723 - DNA, 15 bp, Homo sapiens
tatcctggatcatta

SEQ ID NO: 1147724 - DNA, 15 bp, Homo sapiens
ttatcctggatcatt

SEQ ID NO: 1147725 - DNA, 15 bp, Homo sapiens
cttatcctggatcat

SEQ ID NO: 1147726 - DNA, 15 bp, Homo sapiens
gcttatcctggatca

SEQ ID NO: 1147727 - DNA, 15 bp, Homo sapiens
ggcttatcctggatc

SEQ ID NO: 1147728 - DNA, 15 bp, Homo sapiens
aggcttatcctggat

SEQ ID NO: 1147729 - DNA, 15 bp, Homo sapiens
caggcttatcctgga

SEQ ID NO: 1147730 - DNA, 15 bp, Homo sapiens
ccaggcttatcctgg

SEQ ID NO: 1147731 - DNA, 15 bp, Homo sapiens
tccaggcttatcctg

SEQ ID NO: 1147732 - DNA, 15 bp, Homo sapiens
ttccaggcttatcct

SEQ ID NO: 1147733 - DNA, 15 bp, Homo sapiens
tttccaggcttatcc

SEQ ID NO: 1147734 - DNA, 15 bp, Homo sapiens
ttttccaggcttatc

SEQ ID NO: 1147735 - DNA, 15 bp, Homo sapiens
attttccaggcttat

SEQ ID NO: 1147736 - DNA, 15 bp, Homo sapiens
aattttccaggctta

SEQ ID NO: 1147737 - DNA, 15 bp, Homo sapiens
caattttccaggctt

SEQ ID NO: 1147738 - DNA, 15 bp, Homo sapiens
tcaattttccaggct

SEQ ID NO: 1147739 - DNA, 15 bp, Homo sapiens
gtcaattttccaggc

SEQ ID NO: 1147740 - DNA, 15 bp, Homo sapiens
ggtcaattttccagg

SEQ ID NO: 1147741 - DNA, 15 bp, Homo sapiens
tggtcaattttccag

SEQ ID NO: 1147742 - DNA, 15 bp, Homo sapiens
ctggtcaattttcca

SEQ ID NO: 1147743 - DNA, 15 bp, Homo sapiens
actggtcaattttcc

SEQ ID NO: 1147744 - DNA, 15 bp, Homo sapiens
tactggtcaattttc

SEQ ID NO: 1147745 - DNA, 15 bp, Homo sapiens
atactggtcaatttt

SEQ ID NO: 1147746 - DNA, 15 bp, Homo sapiens
gatactggtcaattt

SEQ ID NO: 1147747 - DNA, 15 bp, Homo sapiens
agatactggtcaatt

SEQ ID NO: 1147748 - DNA, 15 bp, Homo sapiens
cagatactggtcaat

SEQ ID NO: 1147749 - DNA, 15 bp, Homo sapiens
ccagatactggtcaa

SEQ ID NO: 1147750 - DNA, 15 bp, Homo sapiens
tccagatactggtca

SEQ ID NO: 1147751 - DNA, 15 bp, Homo sapiens
ctccagatactggtc

SEQ ID NO: 1147752 - DNA, 15 bp, Homo sapiens
cctccagatactggt

SEQ ID NO: 1147753 - DNA, 15 bp, Homo sapiens
gcctccagatactgg

SEQ ID NO: 1147754 - DNA, 15 bp, Homo sapiens
tgcctccagatactg

SEQ ID NO: 1147755 - DNA, 15 bp, Homo sapiens
atgcctccagatact

SEQ ID NO: 1147756 - DNA, 15 bp, Homo sapiens
catgcctccagatac

SEQ ID NO: 1147757 - DNA, 15 bp, Homo sapiens
acatgcctccagata

SEQ ID NO: 1147758 - DNA, 15 bp, Homo sapiens
aacatgcctccagat

SEQ ID NO: 1147759 - DNA, 15 bp, Homo sapiens
caacatgcctccaga

SEQ ID NO: 1147760 - DNA, 15 bp, Homo sapiens
gcaacatgcctccag

SEQ ID NO: 1147761 - DNA, 15 bp, Homo sapiens
tgcaacatgcctcca

SEQ ID NO: 1147762 - DNA, 15 bp, Homo sapiens
ttgcaacatgcctcc

SEQ ID NO: 1147763 - DNA, 15 bp, Homo sapiens
tttgcaacatgcctc

SEQ ID NO: 1147764 - DNA, 15 bp, Homo sapiens
gtttgcaacatgcct

SEQ ID NO: 1147765 - DNA, 15 bp, Homo sapiens
agtttgcaacatgcc

SEQ ID NO: 1147766 - DNA, 15 bp, Homo sapiens
gagtttgcaacatgc

SEQ ID NO: 1147767 - DNA, 15 bp, Homo sapiens
agagtttgcaacatg

SEQ ID NO: 1147768 - DNA, 15 bp, Homo sapiens
aagagtttgcaacat

SEQ ID NO: 1147769 - DNA, 15 bp, Homo sapiens
gaagagtttgcaaca

SEQ ID NO: 1147770 - DNA, 15 bp, Homo sapiens
agaagagtttgcaac

SEQ ID NO: 1147771 - DNA, 15 bp, Homo sapiens
gagaagagtttgcaa

SEQ ID NO: 1147772 - DNA, 15 bp, Homo sapiens
agagaagagtttgca

SEQ ID NO: 1147773 - DNA, 15 bp, Homo sapiens
cagagaagagtttgc

SEQ ID NO: 1147774 - DNA, 15 bp, Homo sapiens
tcagagaagagtttg

SEQ ID NO: 1147775 - DNA, 15 bp, Homo sapiens
ttcagagaagagttt

SEQ ID NO: 1147776 - DNA, 15 bp, Homo sapiens
tttcagagaagagtt

SEQ ID NO: 1147777 - DNA, 15 bp, Homo sapiens
ttttcagagaagagt

SEQ ID NO: 1147778 - DNA, 15 bp, Homo sapiens
tttttcagagaagag

SEQ ID NO: 1147779 - DNA, 15 bp, Homo sapiens
ttttttcagagaaga

SEQ ID NO: 1147780 - DNA, 15 bp, Homo sapiens
attttttcagagaag

SEQ ID NO: 1147781 - DNA, 15 bp, Homo sapiens
aattttttcagagaa

SEQ ID NO: 1147782 - DNA, 15 bp, Homo sapiens
taattttttcagaga

SEQ ID NO: 1147783 - DNA, 15 bp, Homo sapiens
ataattttttcagag

SEQ ID NO: 1147784 - DNA, 15 bp, Homo sapiens
gataattttttcaga

SEQ ID NO: 1147785 - DNA, 15 bp, Homo sapiens
tgataattttttcag

SEQ ID NO: 1147786 - DNA, 15 bp, Homo sapiens
ttgataattttttca

SEQ ID NO: 1147787 - DNA, 15 bp, Homo sapiens
cttgataattttttc

SEQ ID NO: 1147788 - DNA, 15 bp, Homo sapiens
ccttgataatttttt

SEQ ID NO: 1147789 - DNA, 15 bp, Homo sapiens
gccttgataattttt

SEQ ID NO: 1147790 - DNA, 15 bp, Homo sapiens
tgccttgataatttt

SEQ ID NO: 1147791 - DNA, 15 bp, Homo sapiens
atgccttgataattt

SEQ ID NO: 1147792 - DNA, 15 bp, Homo sapiens
catgccttgataatt

SEQ ID NO: 1147793 - DNA, 15 bp, Homo sapiens
tcatgccttgataat

SEQ ID NO: 1147794 - DNA, 15 bp, Homo sapiens
atcatgccttgataa

SEQ ID NO: 1147795 - DNA, 15 bp, Homo sapiens
aatcatgccttgata

SEQ ID NO: 1147796 - DNA, 15 bp, Homo sapiens
caatcatgccttgat

SEQ ID NO: 1147797 - DNA, 15 bp, Homo sapiens
tcaatcatgccttga

SEQ ID NO: 1147798 - DNA, 15 bp, Homo sapiens
gtcaatcatgccttg

SEQ ID NO: 1147799 - DNA, 15 bp, Homo sapiens
tgtcaatcatgcctt

SEQ ID NO: 1147800 - DNA, 15 bp, Homo sapiens
atgtcaatcatgcct

SEQ ID NO: 1147801 - DNA, 15 bp, Homo sapiens
tatgtcaatcatgcc

SEQ ID NO: 1147802 - DNA, 15 bp, Homo sapiens
atatgtcaatcatgc

SEQ ID NO: 1147803 - DNA, 15 bp, Homo sapiens
catatgtcaatcatg

SEQ ID NO: 1147804 - DNA, 15 bp, Homo sapiens
tcatatgtcaatcat

SEQ ID NO: 1147805 - DNA, 15 bp, Homo sapiens
ttcatatgtcaatca

SEQ ID NO: 1147806 - DNA, 15 bp, Homo sapiens
tttcatatgtcaatc

SEQ ID NO: 1147807 - DNA, 15 bp, Homo sapiens
ttttcatatgtcaat

SEQ ID NO: 1147808 - DNA, 15 bp, Homo sapiens
cttttcatatgtcaa

SEQ ID NO: 1147809 - DNA, 15 bp, Homo sapiens
gcttttcatatgtca

SEQ ID NO: 1147810 - DNA, 15 bp, Homo sapiens
agcttttcatatgtc

SEQ ID NO: 1147811 - DNA, 15 bp, Homo sapiens
cagcttttcatatgt

SEQ ID NO: 1147812 - DNA, 15 bp, Homo sapiens
acagcttttcatatg

SEQ ID NO: 1147813 - DNA, 15 bp, Homo sapiens
cacagcttttcatat

SEQ ID NO: 1147814 - DNA, 15 bp, Homo sapiens
acacagcttttcata

SEQ ID NO: 1147815 - DNA, 15 bp, Homo sapiens
tacacagcttttcat

SEQ ID NO: 1147816 - DNA, 15 bp, Homo sapiens
atacacagcttttca

SEQ ID NO: 1147817 - DNA, 15 bp, Homo sapiens
tatacacagcttttc

SEQ ID NO: 1147818 - DNA, 15 bp, Homo sapiens
gtatacacagctttt

SEQ ID NO: 1147819 - DNA, 15 bp, Homo sapiens
tgtatacacagcttt

SEQ ID NO: 1147820 - DNA, 15 bp, Homo sapiens
atgtatacacagctt

SEQ ID NO: 1147821 - DNA, 15 bp, Homo sapiens
gatgtatacacagct

SEQ ID NO: 1147822 - DNA, 15 bp, Homo sapiens
agatgtatacacagc

SEQ ID NO: 1147823 - DNA, 15 bp, Homo sapiens
aagatgtatacacag

SEQ ID NO: 1147824 - DNA, 15 bp, Homo sapiens
aaagatgtatacaca

SEQ ID NO: 1147825 - DNA, 15 bp, Homo sapiens
taaagatgtatacac

SEQ ID NO: 1147826 - DNA, 15 bp, Homo sapiens
ctaaagatgtataca

SEQ ID NO: 1147827 - DNA, 15 bp, Homo sapiens
actaaagatgtatac

SEQ ID NO: 1147828 - DNA, 15 bp, Homo sapiens
cactaaagatgtata

SEQ ID NO: 1147829 - DNA, 15 bp, Homo sapiens
acactaaagatgtat

SEQ ID NO: 1147830 - DNA, 15 bp, Homo sapiens
cacactaaagatgta

SEQ ID NO: 1147831 - DNA, 15 bp, Homo sapiens
acacactaaagatgt

SEQ ID NO: 1147832 - DNA, 15 bp, Homo sapiens
tacacactaaagatg

SEQ ID NO: 1147833 - DNA, 15 bp, Homo sapiens
atacacactaaagat

SEQ ID NO: 1147834 - DNA, 15 bp, Homo sapiens
tatacacactaaaga

SEQ ID NO: 1147835 - DNA, 15 bp, Homo sapiens
atatacacactaaag

SEQ ID NO: 1147836 - DNA, 15 bp, Homo sapiens
gatatacacactaaa

SEQ ID NO: 1147837 - DNA, 15 bp, Homo sapiens
agatatacacactaa

SEQ ID NO: 1147838 - DNA, 15 bp, Homo sapiens
gagatatacacacta

SEQ ID NO: 1147839 - DNA, 15 bp, Homo sapiens
tgagatatacacact

SEQ ID NO: 1147840 - DNA, 15 bp, Homo sapiens
ttgagatatacacac

SEQ ID NO: 1147841 - DNA, 15 bp, Homo sapiens
attgagatatacaca

SEQ ID NO: 1147842 - DNA, 15 bp, Homo sapiens
cattgagatatacac

SEQ ID NO: 1147843 - DNA, 15 bp, Homo sapiens
tcattgagatataca

SEQ ID NO: 1147844 - DNA, 15 bp, Homo sapiens
ctcattgagatatac

SEQ ID NO: 1147845 - DNA, 15 bp, Homo sapiens
actcattgagatata

SEQ ID NO: 1147846 - DNA, 15 bp, Homo sapiens
aactcattgagatat

SEQ ID NO: 1147847 - DNA, 15 bp, Homo sapiens
aaactcattgagata

SEQ ID NO: 1147848 - DNA, 15 bp, Homo sapiens
caaactcattgagat

SEQ ID NO: 1147849 - DNA, 15 bp, Homo sapiens
ccaaactcattgaga

SEQ ID NO: 1147850 - DNA, 15 bp, Homo sapiens
cccaaactcattgag

SEQ ID NO: 1147851 - DNA, 15 bp, Homo sapiens
ccccaaactcattga

SEQ ID NO: 1147852 - DNA, 15 bp, Homo sapiens
tccccaaactcattg

SEQ ID NO: 1147853 - DNA, 15 bp, Homo sapiens
atccccaaactcatt

SEQ ID NO: 1147854 - DNA, 15 bp, Homo sapiens
tatccccaaactcat

SEQ ID NO: 1147855 - DNA, 15 bp, Homo sapiens
ttatccccaaactca

SEQ ID NO: 1147856 - DNA, 15 bp, Homo sapiens
cttatccccaaactc

SEQ ID NO: 1147857 - DNA, 15 bp, Homo sapiens
tcttatccccaaact

SEQ ID NO: 1147858 - DNA, 15 bp, Homo sapiens
ttcttatccccaaac

SEQ ID NO: 1147859 - DNA, 15 bp, Homo sapiens
attcttatccccaaa

SEQ ID NO: 1147860 - DNA, 15 bp, Homo sapiens
tattcttatccccaa

SEQ ID NO: 1147861 - DNA, 15 bp, Homo sapiens
gtattcttatcccca

SEQ ID NO: 1147862 - DNA, 15 bp, Homo sapiens
tgtattcttatcccc

SEQ ID NO: 1147863 - DNA, 15 bp, Homo sapiens
gtgtattcttatccc

SEQ ID NO: 1147864 - DNA, 15 bp, Homo sapiens
ggtgtattcttatcc

SEQ ID NO: 1147865 - DNA, 15 bp, Homo sapiens
aggtgtattcttatc

SEQ ID NO: 1147866 - DNA, 15 bp, Homo sapiens
taggtgtattcttat

SEQ ID NO: 1147867 - DNA, 15 bp, Homo sapiens
ataggtgtattctta

SEQ ID NO: 1147868 - DNA, 15 bp, Homo sapiens
cataggtgtattctt

SEQ ID NO: 1147869 - DNA, 15 bp, Homo sapiens
tcataggtgtattct

SEQ ID NO: 1147870 - DNA, 15 bp, Homo sapiens
ttcataggtgtattc

SEQ ID NO: 1147871 - DNA, 15 bp, Homo sapiens
tttcataggtgtatt

SEQ ID NO: 1147872 - DNA, 15 bp, Homo sapiens
ttttcataggtgtat

SEQ ID NO: 1147873 - DNA, 15 bp, Homo sapiens
tttttcataggtgta

SEQ ID NO: 1147874 - DNA, 15 bp, Homo sapiens
ctttttcataggtgt

SEQ ID NO: 1147875 - DNA, 15 bp, Homo sapiens
cctttttcataggtg

SEQ ID NO: 1147876 - DNA, 15 bp, Homo sapiens
gcctttttcataggt

SEQ ID NO: 1147877 - DNA, 15 bp, Homo sapiens
agcctttttcatagg

SEQ ID NO: 1147878 - DNA, 15 bp, Homo sapiens
tagcctttttcatag

SEQ ID NO: 1147879 - DNA, 15 bp, Homo sapiens
atagcctttttcata

SEQ ID NO: 1147880 - DNA, 15 bp, Homo sapiens
aatagcctttttcat

SEQ ID NO: 1147881 - DNA, 15 bp, Homo sapiens
gaatagcctttttca

SEQ ID NO: 1147882 - DNA, 15 bp, Homo sapiens
agaatagcctttttc

SEQ ID NO: 1147883 - DNA, 15 bp, Homo sapiens
cagaatagccttttt

SEQ ID NO: 1147884 - DNA, 15 bp, Homo sapiens
gcagaatagcctttt

SEQ ID NO: 1147885 - DNA, 15 bp, Homo sapiens
agcagaatagccttt

SEQ ID NO: 1147886 - DNA, 15 bp, Homo sapiens
gagcagaatagcctt

SEQ ID NO: 1147887 - DNA, 15 bp, Homo sapiens
agagcagaatagcct

SEQ ID NO: 1147888 - DNA, 15 bp, Homo sapiens
tagagcagaatagcc

SEQ ID NO: 1147889 - DNA, 15 bp, Homo sapiens
gtagagcagaatagc

SEQ ID NO: 1147890 - DNA, 15 bp, Homo sapiens
agtagagcagaatag

SEQ ID NO: 1147891 - DNA, 15 bp, Homo sapiens
aagtagagcagaata

SEQ ID NO: 1147892 - DNA, 15 bp, Homo sapiens
taagtagagcagaat

SEQ ID NO: 1147893 - DNA, 15 bp, Homo sapiens
ttaagtagagcagaa

SEQ ID NO: 1147894 - DNA, 15 bp, Homo sapiens
tttaagtagagcaga

SEQ ID NO: 1147895 - DNA, 15 bp, Homo sapiens
atttaagtagagcag

SEQ ID NO: 1147896 - DNA, 15 bp, Homo sapiens
catttaagtagagca

SEQ ID NO: 1147897 - DNA, 15 bp, Homo sapiens
tcatttaagtagagc

SEQ ID NO: 1147898 - DNA, 15 bp, Homo sapiens
ttcatttaagtagag

SEQ ID NO: 1147899 - DNA, 15 bp, Homo sapiens
tttcatttaagtaga

SEQ ID NO: 1147900 - DNA, 15 bp, Homo sapiens
ttttcatttaagtag

SEQ ID NO: 1147901 - DNA, 15 bp, Homo sapiens
attttcatttaagta

SEQ ID NO: 1147902 - DNA, 15 bp, Homo sapiens
tattttcatttaagt

SEQ ID NO: 1147903 - DNA, 15 bp, Homo sapiens
ttattttcatttaag

SEQ ID NO: 1147904 - DNA, 15 bp, Homo sapiens
attattttcatttaa

SEQ ID NO: 1147905 - DNA, 15 bp, Homo sapiens
aattattttcattta

SEQ ID NO: 1147906 - DNA, 15 bp, Homo sapiens
taattattttcattt

SEQ ID NO: 1147907 - DNA, 15 bp, Homo sapiens
gtaattattttcatt

SEQ ID NO: 1147908 - DNA, 15 bp, Homo sapiens
agtaattattttcat

SEQ ID NO: 1147909 - DNA, 15 bp, Homo sapiens
aagtaattattttca

SEQ ID NO: 1147910 - DNA, 15 bp, Homo sapiens
taagtaattattttc

SEQ ID NO: 1147911 - DNA, 15 bp, Homo sapiens
ctaagtaattatttt

SEQ ID NO: 1147912 - DNA, 15 bp, Homo sapiens
cctaagtaattattt

SEQ ID NO: 1147913 - DNA, 15 bp, Homo sapiens
ccctaagtaattatt

SEQ ID NO: 1147914 - DNA, 15 bp, Homo sapiens
accctaagtaattat

SEQ ID NO: 1147915 - DNA, 15 bp, Homo sapiens
aaccctaagtaatta

SEQ ID NO: 1147916 - DNA, 15 bp, Homo sapiens
aaaccctaagtaatt

SEQ ID NO: 1147917 - DNA, 15 bp, Homo sapiens
aaaaccctaagtaat

SEQ ID NO: 1147918 - DNA, 15 bp, Homo sapiens
taaaaccctaagtaa

SEQ ID NO: 1147919 - DNA, 15 bp, Homo sapiens
ataaaaccctaagta

SEQ ID NO: 1147920 - DNA, 15 bp, Homo sapiens
aataaaaccctaagt

SEQ ID NO: 1147921 - DNA, 15 bp, Homo sapiens
aaataaaaccctaag

SEQ ID NO: 1147922 - DNA, 15 bp, Homo sapiens
taaataaaaccctaa

SEQ ID NO: 1147923 - DNA, 15 bp, Homo sapiens
ttaaataaaacccta

SEQ ID NO: 1147924 - DNA, 15 bp, Homo sapiens
tttaaataaaaccct

SEQ ID NO: 1147925 - DNA, 15 bp, Homo sapiens
atttaaataaaaccc

SEQ ID NO: 1147926 - DNA, 15 bp, Homo sapiens
tatttaaataaaacc

SEQ ID NO: 1147927 - DNA, 15 bp, Homo sapiens
ttatttaaataaaac

SEQ ID NO: 1147928 - DNA, 15 bp, Homo sapiens
gttatttaaataaaa

SEQ ID NO: 1147929 - DNA, 15 bp, Homo sapiens
tgttatttaaataaa

SEQ ID NO: 1147930 - DNA, 15 bp, Homo sapiens
ttgttatttaaataa

SEQ ID NO: 1147931 - DNA, 15 bp, Homo sapiens
attgttatttaaata

SEQ ID NO: 1147932 - DNA, 15 bp, Homo sapiens
tattgttatttaaat

SEQ ID NO: 1147933 - DNA, 15 bp, Homo sapiens
atattgttatttaaa

SEQ ID NO: 1147934 - DNA, 15 bp, Homo sapiens
gatattgttatttaa

SEQ ID NO: 1147935 - DNA, 15 bp, Homo sapiens
ggatattgttattta

SEQ ID NO: 1147936 - DNA, 15 bp, Homo sapiens
gggatattgttattt

SEQ ID NO: 1147937 - DNA, 15 bp, Homo sapiens
ggggatattgttatt

SEQ ID NO: 1147938 - DNA, 15 bp, Homo sapiens
aggggatattgttat

SEQ ID NO: 1147939 - DNA, 15 bp, Homo sapiens
taggggatattgtta

SEQ ID NO: 1147940 - DNA, 15 bp, Homo sapiens
gtaggggatattgtt

SEQ ID NO: 1147941 - DNA, 15 bp, Homo sapiens
agtaggggatattgt

SEQ ID NO: 1147942 - DNA, 15 bp, Homo sapiens
cagtaggggatattg

SEQ ID NO: 1147943 - DNA, 15 bp, Homo sapiens
acagtaggggatatt

SEQ ID NO: 1147944 - DNA, 15 bp, Homo sapiens
tacagtaggggatat

SEQ ID NO: 1147945 - DNA, 15 bp, Homo sapiens
ctacagtaggggata

SEQ ID NO: 1147946 - DNA, 15 bp, Homo sapiens
actacagtaggggat

SEQ ID NO: 1147947 - DNA, 15 bp, Homo sapiens
aactacagtagggga

SEQ ID NO: 1147948 - DNA, 15 bp, Homo sapiens
caactacagtagggg

SEQ ID NO: 1147949 - DNA, 15 bp, Homo sapiens
tcaactacagtaggg

SEQ ID NO: 1147950 - DNA, 15 bp, Homo sapiens
ttcaactacagtagg

SEQ ID NO: 1147951 - DNA, 15 bp, Homo sapiens
cttcaactacagtag

SEQ ID NO: 1147952 - DNA, 15 bp, Homo sapiens
acttcaactacagta

SEQ ID NO: 1147953 - DNA, 15 bp, Homo sapiens
tacttcaactacagt

SEQ ID NO: 1147954 - DNA, 15 bp, Homo sapiens
atacttcaactacag

SEQ ID NO: 1147955 - DNA, 15 bp, Homo sapiens
catacttcaactaca

SEQ ID NO: 1147956 - DNA, 15 bp, Homo sapiens
tcatacttcaactac

SEQ ID NO: 1147957 - DNA, 15 bp, Homo sapiens
atcatacttcaacta

SEQ ID NO: 1147958 - DNA, 15 bp, Homo sapiens
aatcatacttcaact

SEQ ID NO: 1147959 - DNA, 15 bp, Homo sapiens
gaatcatacttcaac

SEQ ID NO: 1147960 - DNA, 15 bp, Homo sapiens
ggaatcatacttcaa

SEQ ID NO: 1147961 - DNA, 15 bp, Homo sapiens
tggaatcatacttca

SEQ ID NO: 1147962 - DNA, 15 bp, Homo sapiens
atggaatcatacttc

SEQ ID NO: 1147963 - DNA, 15 bp, Homo sapiens
tatggaatcatactt

SEQ ID NO: 1147964 - DNA, 15 bp, Homo sapiens
atatggaatcatact

SEQ ID NO: 1147965 - DNA, 15 bp, Homo sapiens
tatatggaatcatac

SEQ ID NO: 1147966 - DNA, 15 bp, Homo sapiens
ttatatggaatcata

SEQ ID NO: 1147967 - DNA, 15 bp, Homo sapiens
tttatatggaatcat

SEQ ID NO: 1147968 - DNA, 15 bp, Homo sapiens
ctttatatggaatca

SEQ ID NO: 1147969 - DNA, 15 bp, Homo sapiens
actttatatggaatc

SEQ ID NO: 1147970 - DNA, 15 bp, Homo sapiens
tactttatatggaat

SEQ ID NO: 1147971 - DNA, 15 bp, Homo sapiens
atactttatatggaa

SEQ ID NO: 1147972 - DNA, 15 bp, Homo sapiens
aatactttatatgga

SEQ ID NO: 1147973 - DNA, 15 bp, Homo sapiens
aaatactttatatgg

SEQ ID NO: 1147974 - DNA, 15 bp, Homo sapiens
aaaatactttatatg

SEQ ID NO: 1147975 - DNA, 15 bp, Homo sapiens
gaaaatactttatat

SEQ ID NO: 1147976 - DNA, 15 bp, Homo sapiens
agaaaatactttata

SEQ ID NO: 1147977 - DNA, 15 bp, Homo sapiens
aagaaaatactttat

SEQ ID NO: 1147978 - DNA, 15 bp, Homo sapiens
aaagaaaatacttta

SEQ ID NO: 1147979 - DNA, 15 bp, Homo sapiens
caaagaaaatacttt

SEQ ID NO: 1147980 - DNA, 15 bp, Homo sapiens
ccaaagaaaatactt

SEQ ID NO: 1147981 - DNA, 15 bp, Homo sapiens
gccaaagaaaatact

SEQ ID NO: 1147982 - DNA, 15 bp, Homo sapiens
tagccaaagaaaata

SEQ ID NO: 1147983 - DNA, 15 bp, Homo sapiens
atagccaaagaaaat

SEQ ID NO: 1147984 - DNA, 15 bp, Homo sapiens
aatagccaaagaaaa

SEQ ID NO: 1147985 - DNA, 15 bp, Homo sapiens
gaatagccaaagaaa

SEQ ID NO: 1147986 - DNA, 15 bp, Homo sapiens
agaatagccaaagaa

SEQ ID NO: 1147987 - DNA, 15 bp, Homo sapiens
tagaatagccaaaga

SEQ ID NO: 1147988 - DNA, 15 bp, Homo sapiens
atagaatagccaaag

SEQ ID NO: 1147989 - DNA, 15 bp, Homo sapiens
catagaatagccaaa

SEQ ID NO: 1147990 - DNA, 15 bp, Homo sapiens
ccatagaatagccaa

SEQ ID NO: 1147991 - DNA, 15 bp, Homo sapiens
cccatagaatagcca

SEQ ID NO: 1147992 - DNA, 15 bp, Homo sapiens
tcccatagaatagcc

SEQ ID NO: 1147993 - DNA, 15 bp, Homo sapiens
gtcccatagaatagc

SEQ ID NO: 1147994 - DNA, 15 bp, Homo sapiens
agtcccatagaatag

SEQ ID NO: 1147995 - DNA, 15 bp, Homo sapiens
gagtcccatagaata

SEQ ID NO: 1147996 - DNA, 15 bp, Homo sapiens
agagtcccatagaat

SEQ ID NO: 1147997 - DNA, 15 bp, Homo sapiens
aagagtcccatagaa

SEQ ID NO: 1147998 - DNA, 15 bp, Homo sapiens
caagagtcccataga

SEQ ID NO: 1147999 - DNA, 15 bp, Homo sapiens
tcaagagtcccatag

SEQ ID NO: 1148000 - DNA, 15 bp, Homo sapiens
atcaagagtcccata

SEQ ID NO: 1148001 - DNA, 15 bp, Homo sapiens
tatcaagagtcccat

SEQ ID NO: 1148002 - DNA, 15 bp, Homo sapiens
gtatcaagagtccca

SEQ ID NO: 1148003 - DNA, 15 bp, Homo sapiens
agtatcaagagtccc

SEQ ID NO: 1148004 - DNA, 15 bp, Homo sapiens
gagtatcaagagtcc

SEQ ID NO: 1148005 - DNA, 15 bp, Homo sapiens
tgagtatcaagagtc

SEQ ID NO: 1148006 - DNA, 15 bp, Homo sapiens
gtgagtatcaagagt

SEQ ID NO: 1148007 - DNA, 15 bp, Homo sapiens
tgtgagtatcaagag

SEQ ID NO: 1148008 - DNA, 15 bp, Homo sapiens
ttgtgagtatcaaga

SEQ ID NO: 1148009 - DNA, 15 bp, Homo sapiens
gttgtgagtatcaag

SEQ ID NO: 1148010 - DNA, 15 bp, Homo sapiens
agttgtgagtatcaa

SEQ ID NO: 1148011 - DNA, 15 bp, Homo sapiens
gagttgtgagtatca

SEQ ID NO: 1148012 - DNA, 15 bp, Homo sapiens
agagttgtgagtatc

SEQ ID NO: 1148013 - DNA, 15 bp, Homo sapiens
aagagttgtgagtat

SEQ ID NO: 1148014 - DNA, 15 bp, Homo sapiens
caagagttgtgagta

SEQ ID NO: 1148015 - DNA, 15 bp, Homo sapiens
ccaagagttgtgagt

SEQ ID NO: 1148016 - DNA, 15 bp, Homo sapiens
tccaagagttgtgag

SEQ ID NO: 1148017 - DNA, 15 bp, Homo sapiens
atccaagagttgtga

SEQ ID NO: 1148018 - DNA, 15 bp, Homo sapiens
tatccaagagttgtg

SEQ ID NO: 1148019 - DNA, 15 bp, Homo sapiens
atatccaagagttgt

SEQ ID NO: 1148020 - DNA, 15 bp, Homo sapiens
tatatccaagagttg

SEQ ID NO: 1148021 - DNA, 15 bp, Homo sapiens
ttatatccaagagtt

SEQ ID NO: 1148022 - DNA, 15 bp, Homo sapiens
tttatatccaagagt

SEQ ID NO: 1148023 - DNA, 15 bp, Homo sapiens
ttttatatccaagag

SEQ ID NO: 1148024 - DNA, 15 bp, Homo sapiens
tttttatatccaaga

SEQ ID NO: 1148025 - DNA, 15 bp, Homo sapiens
atttttatatccaag

SEQ ID NO: 1148026 - DNA, 15 bp, Homo sapiens
aatttttatatccaa

SEQ ID NO: 1148027 - DNA, 15 bp, Homo sapiens
gaatttttatatcca

SEQ ID NO: 1148028 - DNA, 15 bp, Homo sapiens
agaatttttatatcc

SEQ ID NO: 1148029 - DNA, 15 bp, Homo sapiens
gagaatttttatatc

SEQ ID NO: 1148030 - DNA, 15 bp, Homo sapiens
agagaatttttatat

SEQ ID NO: 1148031 - DNA, 15 bp, Homo sapiens
cagagaatttttata

SEQ ID NO: 1148032 - DNA, 15 bp, Homo sapiens
ccagagaatttttat

SEQ ID NO: 1148033 - DNA, 15 bp, Homo sapiens
tccagagaattttta

SEQ ID NO: 1148034 - DNA, 15 bp, Homo sapiens
ttccagagaattttt

SEQ ID NO: 1148035 - DNA, 15 bp, Homo sapiens
tttccagagaatttt

SEQ ID NO: 1148036 - DNA, 15 bp, Homo sapiens
atttccagagaattt

SEQ ID NO: 1148037 - DNA, 15 bp, Homo sapiens
aatttccagagaatt

SEQ ID NO: 1148038 - DNA, 15 bp, Homo sapiens
gaatttccagagaat

SEQ ID NO: 1148039 - DNA, 15 bp, Homo sapiens
agaatttccagagaa

SEQ ID NO: 1148040 - DNA, 15 bp, Homo sapiens
gagaatttccagaga

SEQ ID NO: 1148041 - DNA, 15 bp, Homo sapiens
agagaatttccagag

SEQ ID NO: 1148042 - DNA, 15 bp, Homo sapiens
tagagaatttccaga

SEQ ID NO: 1148043 - DNA, 15 bp, Homo sapiens
ctagagaatttccag

SEQ ID NO: 1148044 - DNA, 15 bp, Homo sapiens
gctagagaatttcca

SEQ ID NO: 1148045 - DNA, 15 bp, Homo sapiens
tgctagagaatttcc

SEQ ID NO: 1148046 - DNA, 15 bp, Homo sapiens
atgctagagaatttc

SEQ ID NO: 1148047 - DNA, 15 bp, Homo sapiens
aatgctagagaattt

SEQ ID NO: 1148048 - DNA, 15 bp, Homo sapiens
taatgctagagaatt

SEQ ID NO: 1148049 - DNA, 15 bp, Homo sapiens
ttaatgctagagaat

SEQ ID NO: 1148050 - DNA, 15 bp, Homo sapiens
tttaatgctagagaa

SEQ ID NO: 1148051 - DNA, 15 bp, Homo sapiens
ttttaatgctagaga

SEQ ID NO: 1148052 - DNA, 15 bp, Homo sapiens
tttttaatgctagag

SEQ ID NO: 1148053 - DNA, 15 bp, Homo sapiens
gtttttaatgctaga

SEQ ID NO: 1148054 - DNA, 15 bp, Homo sapiens
tgtttttaatgctag

SEQ ID NO: 1148055 - DNA, 15 bp, Homo sapiens
ttgtttttaatgcta

SEQ ID NO: 1148056 - DNA, 15 bp, Homo sapiens
tttgtttttaatgct

SEQ ID NO: 1148057 - DNA, 15 bp, Homo sapiens
ctttgtttttaatgc

SEQ ID NO: 1148058 - DNA, 15 bp, Homo sapiens
actttgtttttaatg

SEQ ID NO: 1148059 - DNA, 15 bp, Homo sapiens
aactttgtttttaat

SEQ ID NO: 1148060 - DNA, 15 bp, Homo sapiens
aaactttgtttttaa

SEQ ID NO: 1148061 - DNA, 15 bp, Homo sapiens
gaaactttgttttta

SEQ ID NO: 1148062 - DNA, 15 bp, Homo sapiens
ggaaactttgttttt

SEQ ID NO: 1148063 - DNA, 15 bp, Homo sapiens
gggaaactttgtttt

SEQ ID NO: 1148064 - DNA, 15 bp, Homo sapiens
agggaaactttgttt

SEQ ID NO: 1148065 - DNA, 15 bp, Homo sapiens
aagggaaactttgtt

SEQ ID NO: 1148066 - DNA, 15 bp, Homo sapiens
taagggaaactttgt

SEQ ID NO: 1148067 - DNA, 15 bp, Homo sapiens
ataagggaaactttg

SEQ ID NO: 1148068 - DNA, 15 bp, Homo sapiens
aataagggaaacttt

SEQ ID NO: 1148069 - DNA, 15 bp, Homo sapiens
gaataagggaaactt

SEQ ID NO: 1148070 - DNA, 15 bp, Homo sapiens
ggaataagggaaact

SEQ ID NO: 1148071 - DNA, 15 bp, Homo sapiens
gggaataagggaaac

SEQ ID NO: 1148072 - DNA, 15 bp, Homo sapiens
ggggaataagggaaa

SEQ ID NO: 1148073 - DNA, 15 bp, Homo sapiens
gggggaataagggaa

SEQ ID NO: 1148074 - DNA, 15 bp, Homo sapiens
ggggggaataaggga

SEQ ID NO: 1148075 - DNA, 15 bp, Homo sapiens
tggggggaataaggg

SEQ ID NO: 1148076 - DNA, 15 bp, Homo sapiens
atggggggaataagg

SEQ ID NO: 1148077 - DNA, 15 bp, Homo sapiens
aatggggggaataag

SEQ ID NO: 1148078 - DNA, 15 bp, Homo sapiens
aaatggggggaataa

SEQ ID NO: 1148079 - DNA, 15 bp, Homo sapiens
taaatggggggaata

SEQ ID NO: 1148080 - DNA, 15 bp, Homo sapiens
ttaaatggggggaat

SEQ ID NO: 1148081 - DNA, 15 bp, Homo sapiens
attaaatggggggaa

SEQ ID NO: 1148082 - DNA, 15 bp, Homo sapiens
aattaaatgggggga

SEQ ID NO: 1148083 - DNA, 15 bp, Homo sapiens
aaattaaatgggggg

SEQ ID NO: 1148084 - DNA, 15 bp, Homo sapiens
aaaattaaatggggg

SEQ ID NO: 1148085 - DNA, 15 bp, Homo sapiens
gaaaattaaatgggg

SEQ ID NO: 1148086 - DNA, 15 bp, Homo sapiens
agaaaattaaatggg

SEQ ID NO: 1148087 - DNA, 15 bp, Homo sapiens
tagaaaattaaatgg

SEQ ID NO: 1148088 - DNA, 15 bp, Homo sapiens
gtagaaaattaaatg

SEQ ID NO: 1148089 - DNA, 15 bp, Homo sapiens
agtagaaaattaaat

SEQ ID NO: 1148090 - DNA, 15 bp, Homo sapiens
aagtagaaaattaaa

SEQ ID NO: 1148091 - DNA, 15 bp, Homo sapiens
aaagtagaaaattaa

SEQ ID NO: 1148092 - DNA, 15 bp, Homo sapiens
aaaagtagaaaatta

SEQ ID NO: 1148093 - DNA, 15 bp, Homo sapiens
gaaaagtagaaaatt

SEQ ID NO: 1148094 - DNA, 15 bp, Homo sapiens
agaaaagtagaaaat

SEQ ID NO: 1148095 - DNA, 15 bp, Homo sapiens
tagaaaagtagaaaa

SEQ ID NO: 1148096 - DNA, 15 bp, Homo sapiens
atagaaaagtagaaa

SEQ ID NO: 1148097 - DNA, 15 bp, Homo sapiens
accgcccgccttggc

SEQ ID NO: 1148098 - DNA, 15 bp, Homo sapiens
gaccgcccgccttgg

SEQ ID NO: 1148099 - DNA, 15 bp, Homo sapiens
tgaccgcccgccttg

SEQ ID NO: 1148100 - DNA, 15 bp, Homo sapiens
gtgaccgcccgcctt

SEQ ID NO: 1148101 - DNA, 15 bp, Homo sapiens
cgtgaccgcccgcct

SEQ ID NO: 1148102 - DNA, 15 bp, Homo sapiens
tcgtgaccgcccgcc

SEQ ID NO: 1148103 - DNA, 15 bp, Homo sapiens
ctcgtgaccgcccgc

SEQ ID NO: 1148104 - DNA, 15 bp, Homo sapiens
cctcgtgaccgcccg

SEQ ID NO: 1148105 - DNA, 15 bp, Homo sapiens
acctcgtgaccgccc

SEQ ID NO: 1148106 - DNA, 15 bp, Homo sapiens
gacctcgtgaccgcc

SEQ ID NO: 1148107 - DNA, 15 bp, Homo sapiens
tgacctcgtgaccgc

SEQ ID NO: 1148108 - DNA, 15 bp, Homo sapiens
ctgacctcgtgaccg

SEQ ID NO: 1148109 - DNA, 15 bp, Homo sapiens
cctgacctcgtgacc

SEQ ID NO: 1148110 - DNA, 15 bp, Homo sapiens
tcctgacctcgtgac

SEQ ID NO: 1148111 - DNA, 15 bp, Homo sapiens
atcttgatctcctga

SEQ ID NO: 1148112 - DNA, 15 bp, Homo sapiens
gatcttgatctcctg

SEQ ID NO: 1148113 - DNA, 15 bp, Homo sapiens
tgatcttgatctcct

SEQ ID NO: 1148114 - DNA, 15 bp, Homo sapiens
atgatcttgatctcc

SEQ ID NO: 1148115 - DNA, 15 bp, Homo sapiens
gatgatcttgatctc

SEQ ID NO: 1148116 - DNA, 15 bp, Homo sapiens
ggatgatcttgatct

SEQ ID NO: 1148117 - DNA, 15 bp, Homo sapiens
aggatgatcttgatc

SEQ ID NO: 1148118 - DNA, 15 bp, Homo sapiens
caggatgatcttgat

SEQ ID NO: 1148119 - DNA, 15 bp, Homo sapiens
ccaggatgatcttga

SEQ ID NO: 1148120 - DNA, 15 bp, Homo sapiens
gccaggatgatcttg

SEQ ID NO: 1148121 - DNA, 15 bp, Homo sapiens
agccaggatgatctt

SEQ ID NO: 1148122 - DNA, 15 bp, Homo sapiens
tgtttcaccatgtta

SEQ ID NO: 1148123 - DNA, 15 bp, Homo sapiens
gtgtttcaccatgtt

SEQ ID NO: 1148124 - DNA, 15 bp, Homo sapiens
ggtgtttcaccatgt

SEQ ID NO: 1148125 - DNA, 15 bp, Homo sapiens
cggtgtttcaccatg

SEQ ID NO: 1148126 - DNA, 15 bp, Homo sapiens
acggtgtttcaccat

SEQ ID NO: 1148127 - DNA, 15 bp, Homo sapiens
gacggtgtttcacca

SEQ ID NO: 1148128 - DNA, 15 bp, Homo sapiens
agacggtgtttcacc

SEQ ID NO: 1148129 - DNA, 15 bp, Homo sapiens
gagacggtgtttcac

SEQ ID NO: 1148130 - DNA, 15 bp, Homo sapiens
agagacggtgtttca

SEQ ID NO: 1148131 - DNA, 15 bp, Homo sapiens
gtagagacggtgttt

SEQ ID NO: 1148132 - DNA, 15 bp, Homo sapiens
agtagagacggtgtt

SEQ ID NO: 1148133 - DNA, 15 bp, Homo sapiens
tagtagagacggtgt

SEQ ID NO: 1148134 - DNA, 15 bp, Homo sapiens
ttagtagagacggtg

SEQ ID NO: 1148135 - DNA, 15 bp, Homo sapiens
tttagtagagacggt

SEQ ID NO: 1148136 - DNA, 15 bp, Homo sapiens
ctgtatttttagtag

SEQ ID NO: 1148137 - DNA, 15 bp, Homo sapiens
tctgtatttttagta

SEQ ID NO: 1148138 - DNA, 15 bp, Homo sapiens
ttctgtatttttagt

SEQ ID NO: 1148139 - DNA, 15 bp, Homo sapiens
tttctgtatttttag

SEQ ID NO: 1148140 - DNA, 15 bp, Homo sapiens
ttttctgtattttta

SEQ ID NO: 1148141 - DNA, 15 bp, Homo sapiens
attttctgtattttt

SEQ ID NO: 1148142 - DNA, 15 bp, Homo sapiens
aattttctgtatttt

SEQ ID NO: 1148143 - DNA, 15 bp, Homo sapiens
taattttctgtattt

SEQ ID NO: 1148144 - DNA, 15 bp, Homo sapiens
ctaattttctgtatt

SEQ ID NO: 1148145 - DNA, 15 bp, Homo sapiens
gctaattttctgtat

SEQ ID NO: 1148146 - DNA, 15 bp, Homo sapiens
ggctaattttctgta

SEQ ID NO: 1148147 - DNA, 15 bp, Homo sapiens
cggctaattttctgt

SEQ ID NO: 1148148 - DNA, 15 bp, Homo sapiens
ccggctaattttctg

SEQ ID NO: 1148149 - DNA, 15 bp, Homo sapiens
cccggctaattttct

SEQ ID NO: 1148150 - DNA, 15 bp, Homo sapiens
gcccggctaattttc

SEQ ID NO: 1148151 - DNA, 15 bp, Homo sapiens
gagagtagctgggac

SEQ ID NO: 1148152 - DNA, 15 bp, Homo sapiens
cgagagtagctggga

SEQ ID NO: 1148153 - DNA, 15 bp, Homo sapiens
tcgagagtagctggg

SEQ ID NO: 1148154 - DNA, 15 bp, Homo sapiens
ctcgagagtagctgg

SEQ ID NO: 1148155 - DNA, 15 bp, Homo sapiens
cctcgagagtagctg

SEQ ID NO: 1148156 - DNA, 15 bp, Homo sapiens
gcctcgagagtagct

SEQ ID NO: 1148157 - DNA, 15 bp, Homo sapiens
agcctcgagagtagc

SEQ ID NO: 1148158 - DNA, 15 bp, Homo sapiens
cagcctcgagagtag

SEQ ID NO: 1148159 - DNA, 15 bp, Homo sapiens
tcagcctcgagagta

SEQ ID NO: 1148160 - DNA, 15 bp, Homo sapiens
ctcagcctcgagagt

SEQ ID NO: 1148161 - DNA, 15 bp, Homo sapiens
cctcagcctcgagag

SEQ ID NO: 1148162 - DNA, 15 bp, Homo sapiens
gcctcagcctcgaga

SEQ ID NO: 1148163 - DNA, 15 bp, Homo sapiens
tgcctcagcctcgag

SEQ ID NO: 1148164 - DNA, 15 bp, Homo sapiens
ctgcctcagcctcga

SEQ ID NO: 1148165 - DNA, 15 bp, Homo sapiens
cctgcctcagcctcg

SEQ ID NO: 1148166 - DNA, 15 bp, Homo sapiens
gttctcctgcctcag

SEQ ID NO: 1148167 - DNA, 15 bp, Homo sapiens
tgttctcctgcctca

SEQ ID NO: 1148168 - DNA, 15 bp, Homo sapiens
ctgttctcctgcctc

SEQ ID NO: 1148169 - DNA, 15 bp, Homo sapiens
actgttctcctgcct

SEQ ID NO: 1148170 - DNA, 15 bp, Homo sapiens
cactgttctcctgcc

SEQ ID NO: 1148171 - DNA, 15 bp, Homo sapiens
acactgttctcctgc

SEQ ID NO: 1148172 - DNA, 15 bp, Homo sapiens
cacactgttctcctg

SEQ ID NO: 1148173 - DNA, 15 bp, Homo sapiens
tcacactgttctcct

SEQ ID NO: 1148174 - DNA, 15 bp, Homo sapiens
ttcacactgttctcc

SEQ ID NO: 1148175 - DNA, 15 bp, Homo sapiens
gttcacactgttctc

SEQ ID NO: 1148176 - DNA, 15 bp, Homo sapiens
ggttcacactgttct

SEQ ID NO: 1148177 - DNA, 15 bp, Homo sapiens
gggttcacactgttc

SEQ ID NO: 1148178 - DNA, 15 bp, Homo sapiens
cgggttcacactgtt

SEQ ID NO: 1148179 - DNA, 15 bp, Homo sapiens
ccgggttcacactgt

SEQ ID NO: 1148180 - DNA, 15 bp, Homo sapiens
cccgggttcacactg

SEQ ID NO: 1148181 - DNA, 15 bp, Homo sapiens
tcccgggttcacact

SEQ ID NO: 1148182 - DNA, 15 bp, Homo sapiens
ctcccgggttcacac

SEQ ID NO: 1148183 - DNA, 15 bp, Homo sapiens
cctcccgggttcaca

SEQ ID NO: 1148184 - DNA, 15 bp, Homo sapiens
cactcactgcaagct

SEQ ID NO: 1148185 - DNA, 15 bp, Homo sapiens
ccactcactgcaagc

SEQ ID NO: 1148186 - DNA, 15 bp, Homo sapiens
tccactcactgcaag

SEQ ID NO: 1148187 - DNA, 15 bp, Homo sapiens
ctccactcactgcaa

SEQ ID NO: 1148188 - DNA, 15 bp, Homo sapiens
tctccactcactgca

SEQ ID NO: 1148189 - DNA, 15 bp, Homo sapiens
atctccactcactgc

SEQ ID NO: 1148190 - DNA, 15 bp, Homo sapiens
catctccactcactg

SEQ ID NO: 1148191 - DNA, 15 bp, Homo sapiens
ccatctccactcact

SEQ ID NO: 1148192 - DNA, 15 bp, Homo sapiens
cccatctccactcac

SEQ ID NO: 1148193 - DNA, 15 bp, Homo sapiens
gcccatctccactca

SEQ ID NO: 1148194 - DNA, 15 bp, Homo sapiens
ggcccatctccactc

SEQ ID NO: 1148195 - DNA, 15 bp, Homo sapiens
tggcccatctccact

SEQ ID NO: 1148196 - DNA, 15 bp, Homo sapiens
gtggcccatctccac

SEQ ID NO: 1148197 - DNA, 15 bp, Homo sapiens
agtggcccatctcca

SEQ ID NO: 1148198 - DNA, 15 bp, Homo sapiens
cagtggcccatctcc

SEQ ID NO: 1148199 - DNA, 15 bp, Homo sapiens
gcagtggcccatctc

SEQ ID NO: 1148200 - DNA, 15 bp, Homo sapiens
tgcagtggcccatct

SEQ ID NO: 1148201 - DNA, 15 bp, Homo sapiens
gtgcagtggcccatc

SEQ ID NO: 1148202 - DNA, 15 bp, Homo sapiens
agtgcagtggcccat

SEQ ID NO: 1148203 - DNA, 15 bp, Homo sapiens
gagtgcagtggccca

SEQ ID NO: 1148204 - DNA, 15 bp, Homo sapiens
ggagtgcagtggccc

SEQ ID NO: 1148205 - DNA, 15 bp, Homo sapiens
tggagtgcagtggcc

SEQ ID NO: 1148206 - DNA, 15 bp, Homo sapiens
aatggagtctcgctc

SEQ ID NO: 1148207 - DNA, 15 bp, Homo sapiens
aaatggagtctcgct

SEQ ID NO: 1148208 - DNA, 15 bp, Homo sapiens
gaaatggagtctcgc

SEQ ID NO: 1148209 - DNA, 15 bp, Homo sapiens
tgaaatggagtctcg

SEQ ID NO: 1148210 - DNA, 15 bp, Homo sapiens
ttgaaatggagtctc

SEQ ID NO: 1148211 - DNA, 15 bp, Homo sapiens
tttgaaatggagtct

SEQ ID NO: 1148212 - DNA, 15 bp, Homo sapiens
ttttgaaatggagtc

SEQ ID NO: 1148213 - DNA, 15 bp, Homo sapiens
tttttgaaatggagt

SEQ ID NO: 1148214 - DNA, 15 bp, Homo sapiens
ttttttgaaatggag

SEQ ID NO: 1148215 - DNA, 15 bp, Homo sapiens
tttttttgaaatgga

SEQ ID NO: 1148216 - DNA, 15 bp, Homo sapiens
ttttttttgaaatgg

SEQ ID NO: 1148217 - DNA, 15 bp, Homo sapiens
tttttttttgaaatg

SEQ ID NO: 1148218 - DNA, 15 bp, Homo sapiens
ctttttttttgaaat

SEQ ID NO: 1148219 - DNA, 15 bp, Homo sapiens
gctttttttttgaaa

SEQ ID NO: 1148220 - DNA, 15 bp, Homo sapiens
tgctttttttttgaa

SEQ ID NO: 1148221 - DNA, 15 bp, Homo sapiens
ctgctttttttttga

SEQ ID NO: 1148222 - DNA, 15 bp, Homo sapiens
tctgctttttttttg

SEQ ID NO: 1148223 - DNA, 15 bp, Homo sapiens
ttctgcttttttttt

SEQ ID NO: 1148224 - DNA, 15 bp, Homo sapiens
gttctgctttttttt

SEQ ID NO: 1148225 - DNA, 15 bp, Homo sapiens
tgttctgcttttttt

SEQ ID NO: 1148226 - DNA, 15 bp, Homo sapiens
gtgttctgctttttt

SEQ ID NO: 1148227 - DNA, 15 bp, Homo sapiens
ggtgttctgcttttt

SEQ ID NO: 1148228 - DNA, 15 bp, Homo sapiens
tggtgttctgctttt

SEQ ID NO: 1148229 - DNA, 15 bp, Homo sapiens
atggtgttctgcttt

SEQ ID NO: 1148230 - DNA, 15 bp, Homo sapiens
tatggtgttctgctt

SEQ ID NO: 1148231 - DNA, 15 bp, Homo sapiens
ttatggtgttctgct

SEQ ID NO: 1148232 - DNA, 15 bp, Homo sapiens
cttatggtgttctgc

SEQ ID NO: 1148233 - DNA, 15 bp, Homo sapiens
gcttatggtgttctg

SEQ ID NO: 1148234 - DNA, 15 bp, Homo sapiens
agcttatggtgttct

SEQ ID NO: 1148235 - DNA, 15 bp, Homo sapiens
tagcttatggtgttc

SEQ ID NO: 1148236 - DNA, 15 bp, Homo sapiens
atagcttatggtgtt

SEQ ID NO: 1148237 - DNA, 15 bp, Homo sapiens
gatagcttatggtgt

SEQ ID NO: 1148238 - DNA, 15 bp, Homo sapiens
tgatagcttatggtg

SEQ ID NO: 1148239 - DNA, 15 bp, Homo sapiens
ttgatagcttatggt

SEQ ID NO: 1148240 - DNA, 15 bp, Homo sapiens
tttgatagcttatgg

SEQ ID NO: 1148241 - DNA, 15 bp, Homo sapiens
ttttgatagcttatg

SEQ ID NO: 1148242 - DNA, 15 bp, Homo sapiens
attttgatagcttat

SEQ ID NO: 1148243 - DNA, 15 bp, Homo sapiens
aattttgatagctta

SEQ ID NO: 1148244 - DNA, 15 bp, Homo sapiens
taattttgatagctt

SEQ ID NO: 1148245 - DNA, 15 bp, Homo sapiens
ataattttgatagct

SEQ ID NO: 1148246 - DNA, 15 bp, Homo sapiens
tataattttgatagc

SEQ ID NO: 1148247 - DNA, 15 bp, Homo sapiens
atataattttgatag

SEQ ID NO: 1148248 - DNA, 15 bp, Homo sapiens
catataattttgata

SEQ ID NO: 1148249 - DNA, 15 bp, Homo sapiens
acatataattttgat

SEQ ID NO: 1148250 - DNA, 15 bp, Homo sapiens
tacatataattttga

SEQ ID NO: 1148251 - DNA, 15 bp, Homo sapiens
ctacatataattttg

SEQ ID NO: 1148252 - DNA, 15 bp, Homo sapiens
tctacatataatttt

SEQ ID NO: 1148253 - DNA, 15 bp, Homo sapiens
gtctacatataattt

SEQ ID NO: 1148254 - DNA, 15 bp, Homo sapiens
ggtctacatataatt

SEQ ID NO: 1148255 - DNA, 15 bp, Homo sapiens
tggtctacatataat

SEQ ID NO: 1148256 - DNA, 15 bp, Homo sapiens
ctggtctacatataa

SEQ ID NO: 1148257 - DNA, 15 bp, Homo sapiens
cctggtctacatata

SEQ ID NO: 1148258 - DNA, 15 bp, Homo sapiens
tcctggtctacatat

SEQ ID NO: 1148259 - DNA, 15 bp, Homo sapiens
ttcctggtctacata

SEQ ID NO: 1148260 - DNA, 15 bp, Homo sapiens
cttcctggtctacat

SEQ ID NO: 1148261 - DNA, 15 bp, Homo sapiens
ccttcctggtctaca

SEQ ID NO: 1148262 - DNA, 15 bp, Homo sapiens
accttcctggtctac

SEQ ID NO: 1148263 - DNA, 15 bp, Homo sapiens
taccttcctggtcta

SEQ ID NO: 1148264 - DNA, 15 bp, Homo sapiens
ttaccttcctggtct

SEQ ID NO: 1148265 - DNA, 15 bp, Homo sapiens
cttaccttcctggtc

SEQ ID NO: 1148266 - DNA, 15 bp, Homo sapiens
acttaccttcctggt

SEQ ID NO: 1148267 - DNA, 15 bp, Homo sapiens
cacttaccttcctgg

SEQ ID NO: 1148268 - DNA, 15 bp, Homo sapiens
acacttaccttcctg

SEQ ID NO: 1148269 - DNA, 15 bp, Homo sapiens
cacacttaccttcct

SEQ ID NO: 1148270 - DNA, 15 bp, Homo sapiens
gcacacttaccttcc

SEQ ID NO: 1148271 - DNA, 15 bp, Homo sapiens
tgcacacttaccttc

SEQ ID NO: 1148272 - DNA, 15 bp, Homo sapiens
atgcacacttacctt

SEQ ID NO: 1148273 - DNA, 15 bp, Homo sapiens
aatgcacacttacct

SEQ ID NO: 1148274 - DNA, 15 bp, Homo sapiens
aaatgcacacttacc

SEQ ID NO: 1148275 - DNA, 15 bp, Homo sapiens
aaaatgcacacttac

SEQ ID NO: 1148276 - DNA, 15 bp, Homo sapiens
aaaaatgcacactta

SEQ ID NO: 1148277 - DNA, 15 bp, Homo sapiens
taaaaatgcacactt

SEQ ID NO: 1148278 - DNA, 15 bp, Homo sapiens
ataaaaatgcacact

SEQ ID NO: 1148279 - DNA, 15 bp, Homo sapiens
aataaaaatgcacac

SEQ ID NO: 1148280 - DNA, 15 bp, Homo sapiens
aaataaaaatgcaca

SEQ ID NO: 1148281 - DNA, 15 bp, Homo sapiens
taaataaaaatgcac

SEQ ID NO: 1148282 - DNA, 15 bp, Homo sapiens
ttaaataaaaatgca

SEQ ID NO: 1148283 - DNA, 15 bp, Homo sapiens
tttaaataaaaatgc

SEQ ID NO: 1148284 - DNA, 15 bp, Homo sapiens
atttaaataaaaatg

SEQ ID NO: 1148285 - DNA, 15 bp, Homo sapiens
aatttaaataaaaat

SEQ ID NO: 1148286 - DNA, 15 bp, Homo sapiens
aaatttaaataaaaa

SEQ ID NO: 1148287 - DNA, 15 bp, Homo sapiens
taaatttaaataaaa

SEQ ID NO: 1148288 - DNA, 15 bp, Homo sapiens
ttaaatttaaataaa

SEQ ID NO: 1148289 - DNA, 15 bp, Homo sapiens
attaaatttaaataa

SEQ ID NO: 1148290 - DNA, 15 bp, Homo sapiens
tattaaatttaaata

SEQ ID NO: 1148291 - DNA, 15 bp, Homo sapiens
atattaaatttaaat

SEQ ID NO: 1148292 - DNA, 15 bp, Homo sapiens
aatattaaatttaaa

SEQ ID NO: 1148293 - DNA, 15 bp, Homo sapiens
caatattaaatttaa

SEQ ID NO: 1148294 - DNA, 15 bp, Homo sapiens
ccaatattaaattta

SEQ ID NO: 1148295 - DNA, 15 bp, Homo sapiens
tccaatattaaattt

SEQ ID NO: 1148296 - DNA, 15 bp, Homo sapiens
ttccaatattaaatt

SEQ ID NO: 1148297 - DNA, 15 bp, Homo sapiens
gttccaatattaaat

SEQ ID NO: 1148298 - DNA, 15 bp, Homo sapiens
tgttccaatattaaa

SEQ ID NO: 1148299 - DNA, 15 bp, Homo sapiens
atgttccaatattaa

SEQ ID NO: 1148300 - DNA, 15 bp, Homo sapiens
tatgttccaatatta

SEQ ID NO: 1148301 - DNA, 15 bp, Homo sapiens
ttatgttccaatatt

SEQ ID NO: 1148302 - DNA, 15 bp, Homo sapiens
tttatgttccaatat

SEQ ID NO: 1148303 - DNA, 15 bp, Homo sapiens
ttttatgttccaata

SEQ ID NO: 1148304 - DNA, 15 bp, Homo sapiens
tttttatgttccaat

SEQ ID NO: 1148305 - DNA, 15 bp, Homo sapiens
atttttatgttccaa

SEQ ID NO: 1148306 - DNA, 15 bp, Homo sapiens
tatttttatgttcca

SEQ ID NO: 1148307 - DNA, 15 bp, Homo sapiens
ttatttttatgttcc

SEQ ID NO: 1148308 - DNA, 15 bp, Homo sapiens
attatttttatgttc

SEQ ID NO: 1148309 - DNA, 15 bp, Homo sapiens
cattatttttatgtt

SEQ ID NO: 1148310 - DNA, 15 bp, Homo sapiens
ccattatttttatgt

SEQ ID NO: 1148311 - DNA, 15 bp, Homo sapiens
accattatttttatg

SEQ ID NO: 1148312 - DNA, 15 bp, Homo sapiens
taccattatttttat

SEQ ID NO: 1148313 - DNA, 15 bp, Homo sapiens
ataccattattttta

SEQ ID NO: 1148314 - DNA, 15 bp, Homo sapiens
cataccattattttt

SEQ ID NO: 1148315 - DNA, 15 bp, Homo sapiens
gcataccattatttt

SEQ ID NO: 1148316 - DNA, 15 bp, Homo sapiens
ggcataccattattt

SEQ ID NO: 1148317 - DNA, 15 bp, Homo sapiens
tggcataccattatt

SEQ ID NO: 1148318 - DNA, 15 bp, Homo sapiens
ttggcataccattat

SEQ ID NO: 1148319 - DNA, 15 bp, Homo sapiens
tttggcataccatta

SEQ ID NO: 1148320 - DNA, 15 bp, Homo sapiens
ttttggcataccatt

SEQ ID NO: 1148321 - DNA, 15 bp, Homo sapiens
tttttggcataccat

SEQ ID NO: 1148322 - DNA, 15 bp, Homo sapiens
gtttttggcatacca

SEQ ID NO: 1148323 - DNA, 15 bp, Homo sapiens
tgtttttggcatacc

SEQ ID NO: 1148324 - DNA, 15 bp, Homo sapiens
atgtttttggcatac

SEQ ID NO: 1148325 - DNA, 15 bp, Homo sapiens
tatgtttttggcata

SEQ ID NO: 1148326 - DNA, 15 bp, Homo sapiens
ttatgtttttggcat

SEQ ID NO: 1148327 - DNA, 15 bp, Homo sapiens
tttatgtttttggca

SEQ ID NO: 1148328 - DNA, 15 bp, Homo sapiens
ttttatgtttttggc

SEQ ID NO: 1148329 - DNA, 15 bp, Homo sapiens
gttttatgtttttgg

SEQ ID NO: 1148330 - DNA, 15 bp, Homo sapiens
ggttttatgtttttg

SEQ ID NO: 1148331 - DNA, 15 bp, Homo sapiens
gggttttatgttttt

SEQ ID NO: 1148332 - DNA, 15 bp, Homo sapiens
tgggttttatgtttt

SEQ ID NO: 1148333 - DNA, 15 bp, Homo sapiens
ttgggttttatgttt

SEQ ID NO: 1148334 - DNA, 15 bp, Homo sapiens
tttgggttttatgtt

SEQ ID NO: 1148335 - DNA, 15 bp, Homo sapiens
ttttgggttttatgt

SEQ ID NO: 1148336 - DNA, 15 bp, Homo sapiens
attttgggttttatg

SEQ ID NO: 1148337 - DNA, 15 bp, Homo sapiens
aattttgggttttat

SEQ ID NO: 1148338 - DNA, 15 bp, Homo sapiens
caattttgggtttta

SEQ ID NO: 1148339 - DNA, 15 bp, Homo sapiens
acaattttgggtttt

SEQ ID NO: 1148340 - DNA, 15 bp, Homo sapiens
aacaattttgggttt

SEQ ID NO: 1148341 - DNA, 15 bp, Homo sapiens
aaacaattttgggtt

SEQ ID NO: 1148342 - DNA, 15 bp, Homo sapiens
taaacaattttgggt

SEQ ID NO: 1148343 - DNA, 15 bp, Homo sapiens
ataaacaattttggg

SEQ ID NO: 1148344 - DNA, 15 bp, Homo sapiens
cataaacaattttgg

SEQ ID NO: 1148345 - DNA, 15 bp, Homo sapiens
ccataaacaattttg

SEQ ID NO: 1148346 - DNA, 15 bp, Homo sapiens
gccataaacaatttt

SEQ ID NO: 1148347 - DNA, 15 bp, Homo sapiens
tgccataaacaattt

SEQ ID NO: 1148348 - DNA, 15 bp, Homo sapiens
ttgccataaacaatt

SEQ ID NO: 1148349 - DNA, 15 bp, Homo sapiens
tttgccataaacaat

SEQ ID NO: 1148350 - DNA, 15 bp, Homo sapiens
atttgccataaacaa

SEQ ID NO: 1148351 - DNA, 15 bp, Homo sapiens
tatttgccataaaca

SEQ ID NO: 1148352 - DNA, 15 bp, Homo sapiens
ttatttgccataaac

SEQ ID NO: 1148353 - DNA, 15 bp, Homo sapiens
attatttgccataaa

SEQ ID NO: 1148354 - DNA, 15 bp, Homo sapiens
gattatttgccataa

SEQ ID NO: 1148355 - DNA, 15 bp, Homo sapiens
ggattatttgccata

SEQ ID NO: 1148356 - DNA, 15 bp, Homo sapiens
aggattatttgccat

SEQ ID NO: 1148357 - DNA, 15 bp, Homo sapiens
aaggattatttgcca

SEQ ID NO: 1148358 - DNA, 15 bp, Homo sapiens
gaaggattatttgcc

SEQ ID NO: 1148359 - DNA, 15 bp, Homo sapiens
ggaaggattatttgc

SEQ ID NO: 1148360 - DNA, 15 bp, Homo sapiens
tggaaggattatttg

SEQ ID NO: 1148361 - DNA, 15 bp, Homo sapiens
gtggaaggattattt

SEQ ID NO: 1148362 - DNA, 15 bp, Homo sapiens
cgtggaaggattatt

SEQ ID NO: 1148363 - DNA, 15 bp, Homo sapiens
tcgtggaaggattat

SEQ ID NO: 1148364 - DNA, 15 bp, Homo sapiens
ttcgtggaaggatta

SEQ ID NO: 1148365 - DNA, 15 bp, Homo sapiens
tttcgtggaaggatt

SEQ ID NO: 1148366 - DNA, 15 bp, Homo sapiens
ttttcgtggaaggat

SEQ ID NO: 1148367 - DNA, 15 bp, Homo sapiens
tttttcgtggaagga

SEQ ID NO: 1148368 - DNA, 15 bp, Homo sapiens
ttttttcgtggaagg

SEQ ID NO: 1148369 - DNA, 15 bp, Homo sapiens
gttttttcgtggaag

SEQ ID NO: 1148370 - DNA, 15 bp, Homo sapiens
agttttttcgtggaa

SEQ ID NO: 1148371 - DNA, 15 bp, Homo sapiens
cagttttttcgtgga

SEQ ID NO: 1148372 - DNA, 15 bp, Homo sapiens
acagttttttcgtgg

SEQ ID NO: 1148373 - DNA, 15 bp, Homo sapiens
tacagttttttcgtg

SEQ ID NO: 1148374 - DNA, 15 bp, Homo sapiens
atacagttttttcgt

SEQ ID NO: 1148375 - DNA, 15 bp, Homo sapiens
tatacagttttttcg

SEQ ID NO: 1148376 - DNA, 15 bp, Homo sapiens
atatacagttttttc

SEQ ID NO: 1148377 - DNA, 15 bp, Homo sapiens
tatatacagtttttt

SEQ ID NO: 1148378 - DNA, 15 bp, Homo sapiens
atatatacagttttt

SEQ ID NO: 1148379 - DNA, 15 bp, Homo sapiens
catatatacagtttt

SEQ ID NO: 1148380 - DNA, 15 bp, Homo sapiens
tcatatatacagttt

SEQ ID NO: 1148381 - DNA, 15 bp, Homo sapiens
ttcatatatacagtt

SEQ ID NO: 1148382 - DNA, 15 bp, Homo sapiens
tttcatatatacagt

SEQ ID NO: 1148383 - DNA, 15 bp, Homo sapiens
ttttcatatatacag

SEQ ID NO: 1148384 - DNA, 15 bp, Homo sapiens
attttcatatataca

SEQ ID NO: 1148385 - DNA, 15 bp, Homo sapiens
tattttcatatatac

SEQ ID NO: 1148386 - DNA, 15 bp, Homo sapiens
ttattttcatatata

SEQ ID NO: 1148387 - DNA, 15 bp, Homo sapiens
tttattttcatatat

SEQ ID NO: 1148388 - DNA, 15 bp, Homo sapiens
atttattttcatata

SEQ ID NO: 1148389 - DNA, 15 bp, Homo sapiens
tatttattttcatat

SEQ ID NO: 1148390 - DNA, 15 bp, Homo sapiens
atatttattttcata

SEQ ID NO: 1148391 - DNA, 15 bp, Homo sapiens
gatatttattttcat

SEQ ID NO: 1148392 - DNA, 15 bp, Homo sapiens
tgatatttattttca

SEQ ID NO: 1148393 - DNA, 15 bp, Homo sapiens
ctgatatttattttc

SEQ ID NO: 1148394 - DNA, 15 bp, Homo sapiens
cctgatatttatttt

SEQ ID NO: 1148395 - DNA, 15 bp, Homo sapiens
tcctgatatttattt

SEQ ID NO: 1148396 - DNA, 15 bp, Homo sapiens
ctcctgatatttatt

SEQ ID NO: 1148397 - DNA, 15 bp, Homo sapiens
tctcctgatatttat

SEQ ID NO: 1148398 - DNA, 15 bp, Homo sapiens
ctctcctgatattta

SEQ ID NO: 1148399 - DNA, 15 bp, Homo sapiens
tctctcctgatattt

SEQ ID NO: 1148400 - DNA, 15 bp, Homo sapiens
ctctctcctgatatt

SEQ ID NO: 1148401 - DNA, 15 bp, Homo sapiens
gctctctcctgatat

SEQ ID NO: 1148402 - DNA, 15 bp, Homo sapiens
tgctctctcctgata

SEQ ID NO: 1148403 - DNA, 15 bp, Homo sapiens
atgctctctcctgat

SEQ ID NO: 1148404 - DNA, 15 bp, Homo sapiens
tatgctctctcctga

SEQ ID NO: 1148405 - DNA, 15 bp, Homo sapiens
ttatgctctctcctg

SEQ ID NO: 1148406 - DNA, 15 bp, Homo sapiens
cttatgctctctcct

SEQ ID NO: 1148407 - DNA, 15 bp, Homo sapiens
gcttatgctctctcc

SEQ ID NO: 1148408 - DNA, 15 bp, Homo sapiens
agcttatgctctctc

SEQ ID NO: 1148409 - DNA, 15 bp, Homo sapiens
aagcttatgctctct

SEQ ID NO: 1148410 - DNA, 15 bp, Homo sapiens
aaagcttatgctctc

SEQ ID NO: 1148411 - DNA, 15 bp, Homo sapiens
aaaagcttatgctct

SEQ ID NO: 1148412 - DNA, 15 bp, Homo sapiens
aaaaagcttatgctc

SEQ ID NO: 1148413 - DNA, 15 bp, Homo sapiens
taaaaagcttatgct

SEQ ID NO: 1148414 - DNA, 15 bp, Homo sapiens
ataaaaagcttatgc

SEQ ID NO: 1148415 - DNA, 15 bp, Homo sapiens
aataaaaagcttatg

SEQ ID NO: 1148416 - DNA, 15 bp, Homo sapiens
aaataaaaagcttat

SEQ ID NO: 1148417 - DNA, 15 bp, Homo sapiens
aaaataaaaagctta

SEQ ID NO: 1148418 - DNA, 15 bp, Homo sapiens
aaaaataaaaagctt

SEQ ID NO: 1148419 - DNA, 15 bp, Homo sapiens
caaaaataaaaagct

SEQ ID NO: 1148420 - DNA, 15 bp, Homo sapiens
acaaaaataaaaagc

SEQ ID NO: 1148421 - DNA, 15 bp, Homo sapiens
aacaaaaataaaaag

SEQ ID NO: 1148422 - DNA, 15 bp, Homo sapiens
gaacaaaaataaaaa

SEQ ID NO: 1148423 - DNA, 15 bp, Homo sapiens
agaacaaaaataaaa

SEQ ID NO: 1148424 - DNA, 15 bp, Homo sapiens
aagaacaaaaataaa

SEQ ID NO: 1148425 - DNA, 15 bp, Homo sapiens
caagaacaaaaataa

SEQ ID NO: 1148426 - DNA, 15 bp, Homo sapiens
gcaagaacaaaaata

SEQ ID NO: 1148427 - DNA, 15 bp, Homo sapiens
tgcaagaacaaaaat

SEQ ID NO: 1148428 - DNA, 15 bp, Homo sapiens
atgcaagaacaaaaa

SEQ ID NO: 1148429 - DNA, 15 bp, Homo sapiens
tatgcaagaacaaaa

SEQ ID NO: 1148430 - DNA, 15 bp, Homo sapiens
atatgcaagaacaaa

SEQ ID NO: 1148431 - DNA, 15 bp, Homo sapiens
aatatgcaagaacaa

SEQ ID NO: 1148432 - DNA, 15 bp, Homo sapiens
caatatgcaagaaca

SEQ ID NO: 1148433 - DNA, 15 bp, Homo sapiens
gcaatatgcaagaac

SEQ ID NO: 1148434 - DNA, 15 bp, Homo sapiens
agcaatatgcaagaa

SEQ ID NO: 1148435 - DNA, 15 bp, Homo sapiens
cagcaatatgcaaga

SEQ ID NO: 1148436 - DNA, 15 bp, Homo sapiens
acagcaatatgcaag

SEQ ID NO: 1148437 - DNA, 15 bp, Homo sapiens
aacagcaatatgcaa

SEQ ID NO: 1148438 - DNA, 15 bp, Homo sapiens
aaacagcaatatgca

SEQ ID NO: 1148439 - DNA, 15 bp, Homo sapiens
taaacagcaatatgc

SEQ ID NO: 1148440 - DNA, 15 bp, Homo sapiens
ataaacagcaatatg

SEQ ID NO: 1148441 - DNA, 15 bp, Homo sapiens
aataaacagcaatat

SEQ ID NO: 1148442 - DNA, 15 bp, Homo sapiens
aaataaacagcaata

SEQ ID NO: 1148443 - DNA, 15 bp, Homo sapiens
gaaataaacagcaat

SEQ ID NO: 1148444 - DNA, 15 bp, Homo sapiens
agaaataaacagcaa

SEQ ID NO: 1148445 - DNA, 15 bp, Homo sapiens
tagaaataaacagca

SEQ ID NO: 1148446 - DNA, 15 bp, Homo sapiens
ttagaaataaacagc

SEQ ID NO: 1148447 - DNA, 15 bp, Homo sapiens
attagaaataaacag

SEQ ID NO: 1148448 - DNA, 15 bp, Homo sapiens
aattagaaataaaca

SEQ ID NO: 1148449 - DNA, 15 bp, Homo sapiens
taattagaaataaac

SEQ ID NO: 1148450 - DNA, 15 bp, Homo sapiens
ataattagaaataaa

SEQ ID NO: 1148451 - DNA, 15 bp, Homo sapiens
aataattagaaataa

SEQ ID NO: 1148452 - DNA, 15 bp, Homo sapiens
taataattagaaata

SEQ ID NO: 1148453 - DNA, 15 bp, Homo sapiens
ataataattagaaat

SEQ ID NO: 1148454 - DNA, 15 bp, Homo sapiens
aataataattagaaa

SEQ ID NO: 1148455 - DNA, 15 bp, Homo sapiens
aaataataattagaa

SEQ ID NO: 1148456 - DNA, 15 bp, Homo sapiens
gaaataataattaga

SEQ ID NO: 1148457 - DNA, 15 bp, Homo sapiens
agaaataataattag

SEQ ID NO: 1148458 - DNA, 15 bp, Homo sapiens
tagaaataataatta

SEQ ID NO: 1148459 - DNA, 15 bp, Homo sapiens
ttagaaataataatt

SEQ ID NO: 1148460 - DNA, 15 bp, Homo sapiens
tttagaaataataat

SEQ ID NO: 1148461 - DNA, 15 bp, Homo sapiens
gtttagaaataataa

SEQ ID NO: 1148462 - DNA, 15 bp, Homo sapiens
tgtttagaaataata

SEQ ID NO: 1148463 - DNA, 15 bp, Homo sapiens
gtgtttagaaataat

SEQ ID NO: 1148464 - DNA, 15 bp, Homo sapiens
agtgtttagaaataa

SEQ ID NO: 1148465 - DNA, 15 bp, Homo sapiens
cagtgtttagaaata

SEQ ID NO: 1148466 - DNA, 15 bp, Homo sapiens
tcagtgtttagaaat

SEQ ID NO: 1148467 - DNA, 15 bp, Homo sapiens
ttcagtgtttagaaa

SEQ ID NO: 1148468 - DNA, 15 bp, Homo sapiens
gttcagtgtttagaa

SEQ ID NO: 1148469 - DNA, 15 bp, Homo sapiens
ggttcagtgtttaga

SEQ ID NO: 1148470 - DNA, 15 bp, Homo sapiens
tggttcagtgtttag

SEQ ID NO: 1148471 - DNA, 15 bp, Homo sapiens
ttggttcagtgttta

SEQ ID NO: 1148472 - DNA, 15 bp, Homo sapiens
cttggttcagtgttt

SEQ ID NO: 1148473 - DNA, 15 bp, Homo sapiens
acttggttcagtgtt

SEQ ID NO: 1148474 - DNA, 15 bp, Homo sapiens
aacttggttcagtgt

SEQ ID NO: 1148475 - DNA, 15 bp, Homo sapiens
taacttggttcagtg

SEQ ID NO: 1148476 - DNA, 15 bp, Homo sapiens
ttaacttggttcagt

SEQ ID NO: 1148477 - DNA, 15 bp, Homo sapiens
tttaacttggttcag

SEQ ID NO: 1148478 - DNA, 15 bp, Homo sapiens
atttaacttggttca

SEQ ID NO: 1148479 - DNA, 15 bp, Homo sapiens
tatttaacttggttc

SEQ ID NO: 1148480 - DNA, 15 bp, Homo sapiens
atatttaacttggtt

SEQ ID NO: 1148481 - DNA, 15 bp, Homo sapiens
aatatttaacttggt

SEQ ID NO: 1148482 - DNA, 15 bp, Homo sapiens
taatatttaacttgg

SEQ ID NO: 1148483 - DNA, 15 bp, Homo sapiens
ctaatatttaacttg

SEQ ID NO: 1148484 - DNA, 15 bp, Homo sapiens
cctaatatttaactt

SEQ ID NO: 1148485 - DNA, 15 bp, Homo sapiens
acctaatatttaact

SEQ ID NO: 1148486 - DNA, 15 bp, Homo sapiens
tacctaatatttaac

SEQ ID NO: 1148487 - DNA, 15 bp, Homo sapiens
ctacctaatatttaa

SEQ ID NO: 1148488 - DNA, 15 bp, Homo sapiens
cctacctaatattta

SEQ ID NO: 1148489 - DNA, 15 bp, Homo sapiens
tcctacctaatattt

SEQ ID NO: 1148490 - DNA, 15 bp, Homo sapiens
atcctacctaatatt

SEQ ID NO: 1148491 - DNA, 15 bp, Homo sapiens
catcctacctaatat

SEQ ID NO: 1148492 - DNA, 15 bp, Homo sapiens
acatcctacctaata

SEQ ID NO: 1148493 - DNA, 15 bp, Homo sapiens
aacatcctacctaat

SEQ ID NO: 1148494 - DNA, 15 bp, Homo sapiens
aaacatcctacctaa

SEQ ID NO: 1148495 - DNA, 15 bp, Homo sapiens
aaaacatcctaccta

SEQ ID NO: 1148496 - DNA, 15 bp, Homo sapiens
aaaaacatcctacct

SEQ ID NO: 1148497 - DNA, 15 bp, Homo sapiens
gaaaaacatcctacc

SEQ ID NO: 1148498 - DNA, 15 bp, Homo sapiens
tgaaaaacatcctac

SEQ ID NO: 1148499 - DNA, 15 bp, Homo sapiens
atgaaaaacatccta

SEQ ID NO: 1148500 - DNA, 15 bp, Homo sapiens
catgaaaaacatcct

SEQ ID NO: 1148501 - DNA, 15 bp, Homo sapiens
tcatgaaaaacatcc

SEQ ID NO: 1148502 - DNA, 15 bp, Homo sapiens
ttcatgaaaaacatc

SEQ ID NO: 1148503 - DNA, 15 bp, Homo sapiens
attcatgaaaaacat

SEQ ID NO: 1148504 - DNA, 15 bp, Homo sapiens
cattcatgaaaaaca

SEQ ID NO: 1148505 - DNA, 15 bp, Homo sapiens
ccattcatgaaaaac

SEQ ID NO: 1148506 - DNA, 15 bp, Homo sapiens
accattcatgaaaaa

SEQ ID NO: 1148507 - DNA, 15 bp, Homo sapiens
gaccattcatgaaaa

SEQ ID NO: 1148508 - DNA, 15 bp, Homo sapiens
ggaccattcatgaaa

SEQ ID NO: 1148509 - DNA, 15 bp, Homo sapiens
aggaccattcatgaa

SEQ ID NO: 1148510 - DNA, 15 bp, Homo sapiens
caggaccattcatga

SEQ ID NO: 1148511 - DNA, 15 bp, Homo sapiens
tcaggaccattcatg

SEQ ID NO: 1148512 - DNA, 15 bp, Homo sapiens
atcaggaccattcat

SEQ ID NO: 1148513 - DNA, 15 bp, Homo sapiens
tatcaggaccattca

SEQ ID NO: 1148514 - DNA, 15 bp, Homo sapiens
gtatcaggaccattc

SEQ ID NO: 1148515 - DNA, 15 bp, Homo sapiens
agtatcaggaccatt

SEQ ID NO: 1148516 - DNA, 15 bp, Homo sapiens
aagtatcaggaccat

SEQ ID NO: 1148517 - DNA, 15 bp, Homo sapiens
gaagtatcaggacca

SEQ ID NO: 1148518 - DNA, 15 bp, Homo sapiens
tgaagtatcaggacc

SEQ ID NO: 1148519 - DNA, 15 bp, Homo sapiens
ctgaagtatcaggac

SEQ ID NO: 1148520 - DNA, 15 bp, Homo sapiens
gctgaagtatcagga

SEQ ID NO: 1148521 - DNA, 15 bp, Homo sapiens
agctgaagtatcagg

SEQ ID NO: 1148522 - DNA, 15 bp, Homo sapiens
tagctgaagtatcag

SEQ ID NO: 1148523 - DNA, 15 bp, Homo sapiens
atagctgaagtatca

SEQ ID NO: 1148524 - DNA, 15 bp, Homo sapiens
aatagctgaagtatc

SEQ ID NO: 1148525 - DNA, 15 bp, Homo sapiens
taatagctgaagtat

SEQ ID NO: 1148526 - DNA, 15 bp, Homo sapiens
ttaatagctgaagta

SEQ ID NO: 1148527 - DNA, 15 bp, Homo sapiens
tttaatagctgaagt

SEQ ID NO: 1148528 - DNA, 15 bp, Homo sapiens
atttaatagctgaag

SEQ ID NO: 1148529 - DNA, 15 bp, Homo sapiens
catttaatagctgaa

SEQ ID NO: 1148530 - DNA, 15 bp, Homo sapiens
ccatttaatagctga

SEQ ID NO: 1148531 - DNA, 15 bp, Homo sapiens
accatttaatagctg

SEQ ID NO: 1148532 - DNA, 15 bp, Homo sapiens
aaccatttaatagct

SEQ ID NO: 1148533 - DNA, 15 bp, Homo sapiens
taaccatttaatagc

SEQ ID NO: 1148534 - DNA, 15 bp, Homo sapiens
ttaaccatttaatag

SEQ ID NO: 1148535 - DNA, 15 bp, Homo sapiens
tttaaccatttaata

SEQ ID NO: 1148536 - DNA, 15 bp, Homo sapiens
atttaaccatttaat

SEQ ID NO: 1148537 - DNA, 15 bp, Homo sapiens
tatttaaccatttaa

SEQ ID NO: 1148538 - DNA, 15 bp, Homo sapiens
gtatttaaccattta

SEQ ID NO: 1148539 - DNA, 15 bp, Homo sapiens
agtatttaaccattt

SEQ ID NO: 1148540 - DNA, 15 bp, Homo sapiens
aagtatttaaccatt

SEQ ID NO: 1148541 - DNA, 15 bp, Homo sapiens
taagtatttaaccat

SEQ ID NO: 1148542 - DNA, 15 bp, Homo sapiens
ttaagtatttaacca

SEQ ID NO: 1148543 - DNA, 15 bp, Homo sapiens
attaagtatttaacc

SEQ ID NO: 1148544 - DNA, 15 bp, Homo sapiens
tattaagtatttaac

SEQ ID NO: 1148545 - DNA, 15 bp, Homo sapiens
ctattaagtatttaa

SEQ ID NO: 1148546 - DNA, 15 bp, Homo sapiens
cctattaagtattta

SEQ ID NO: 1148547 - DNA, 15 bp, Homo sapiens
tcctattaagtattt

SEQ ID NO: 1148548 - DNA, 15 bp, Homo sapiens
ttcctattaagtatt

SEQ ID NO: 1148549 - DNA, 15 bp, Homo sapiens
tttcctattaagtat

SEQ ID NO: 1148550 - DNA, 15 bp, Homo sapiens
atttcctattaagta

SEQ ID NO: 1148551 - DNA, 15 bp, Homo sapiens
tatttcctattaagt

SEQ ID NO: 1148552 - DNA, 15 bp, Homo sapiens
atatttcctattaag

SEQ ID NO: 1148553 - DNA, 15 bp, Homo sapiens
aatatttcctattaa

SEQ ID NO: 1148554 - DNA, 15 bp, Homo sapiens
aaatatttcctatta

SEQ ID NO: 1148555 - DNA, 15 bp, Homo sapiens
gaaatatttcctatt

SEQ ID NO: 1148556 - DNA, 15 bp, Homo sapiens
agaaatatttcctat

SEQ ID NO: 1148557 - DNA, 15 bp, Homo sapiens
aagaaatatttccta

SEQ ID NO: 1148558 - DNA, 15 bp, Homo sapiens
aaagaaatatttcct

SEQ ID NO: 1148559 - DNA, 15 bp, Homo sapiens
gaaagaaatatttcc

SEQ ID NO: 1148560 - DNA, 15 bp, Homo sapiens
agaaagaaatatttc

SEQ ID NO: 1148561 - DNA, 15 bp, Homo sapiens
aagaaagaaatattt

SEQ ID NO: 1148562 - DNA, 15 bp, Homo sapiens
aaagaaagaaatatt

SEQ ID NO: 1148563 - DNA, 15 bp, Homo sapiens
gaaagaaagaaatat

SEQ ID NO: 1148564 - DNA, 15 bp, Homo sapiens
tgaaagaaagaaata

SEQ ID NO: 1148565 - DNA, 15 bp, Homo sapiens
ctgaaagaaagaaat

SEQ ID NO: 1148566 - DNA, 15 bp, Homo sapiens
tctgaaagaaagaaa

SEQ ID NO: 1148567 - DNA, 15 bp, Homo sapiens
atctgaaagaaagaa

SEQ ID NO: 1148568 - DNA, 15 bp, Homo sapiens
aatctgaaagaaaga

SEQ ID NO: 1148569 - DNA, 15 bp, Homo sapiens
taatctgaaagaaag

SEQ ID NO: 1148570 - DNA, 15 bp, Homo sapiens
ttaatctgaaagaaa

SEQ ID NO: 1148571 - DNA, 15 bp, Homo sapiens
gttaatctgaaagaa

SEQ ID NO: 1148572 - DNA, 15 bp, Homo sapiens
tgttaatctgaaaga

SEQ ID NO: 1148573 - DNA, 15 bp, Homo sapiens
atgttaatctgaaag

SEQ ID NO: 1148574 - DNA, 15 bp, Homo sapiens
aatgttaatctgaaa

SEQ ID NO: 1148575 - DNA, 15 bp, Homo sapiens
caatgttaatctgaa

SEQ ID NO: 1148576 - DNA, 15 bp, Homo sapiens
tcaatgttaatctga

SEQ ID NO: 1148577 - DNA, 15 bp, Homo sapiens
atcaatgttaatctg

SEQ ID NO: 1148578 - DNA, 15 bp, Homo sapiens
catcaatgttaatct

SEQ ID NO: 1148579 - DNA, 15 bp, Homo sapiens
ccatcaatgttaatc

SEQ ID NO: 1148580 - DNA, 15 bp, Homo sapiens
cccatcaatgttaat

SEQ ID NO: 1148581 - DNA, 15 bp, Homo sapiens
gcccatcaatgttaa

SEQ ID NO: 1148582 - DNA, 15 bp, Homo sapiens
tgcccatcaatgtta

SEQ ID NO: 1148583 - DNA, 15 bp, Homo sapiens
ctgcccatcaatgtt

SEQ ID NO: 1148584 - DNA, 15 bp, Homo sapiens
cctgcccatcaatgt

SEQ ID NO: 1148585 - DNA, 15 bp, Homo sapiens
tcctgcccatcaatg

SEQ ID NO: 1148586 - DNA, 15 bp, Homo sapiens
atcctgcccatcaat

SEQ ID NO: 1148587 - DNA, 15 bp, Homo sapiens
tatcctgcccatcaa

SEQ ID NO: 1148588 - DNA, 15 bp, Homo sapiens
atatcctgcccatca

SEQ ID NO: 1148589 - DNA, 15 bp, Homo sapiens
aatatcctgcccatc

SEQ ID NO: 1148590 - DNA, 15 bp, Homo sapiens
taatatcctgcccat

SEQ ID NO: 1148591 - DNA, 15 bp, Homo sapiens
ctaatatcctgccca

SEQ ID NO: 1148592 - DNA, 15 bp, Homo sapiens
cctaatatcctgccc

SEQ ID NO: 1148593 - DNA, 15 bp, Homo sapiens
tcctaatatcctgcc

SEQ ID NO: 1148594 - DNA, 15 bp, Homo sapiens
ttcctaatatcctgc

SEQ ID NO: 1148595 - DNA, 15 bp, Homo sapiens
gttcctaatatcctg

SEQ ID NO: 1148596 - DNA, 15 bp, Homo sapiens
agttcctaatatcct

SEQ ID NO: 1148597 - DNA, 15 bp, Homo sapiens
aagttcctaatatcc

SEQ ID NO: 1148598 - DNA, 15 bp, Homo sapiens
aaagttcctaatatc

SEQ ID NO: 1148599 - DNA, 15 bp, Homo sapiens
taaagttcctaatat

SEQ ID NO: 1148600 - DNA, 15 bp, Homo sapiens
ttaaagttcctaata

SEQ ID NO: 1148601 - DNA, 15 bp, Homo sapiens
attaaagttcctaat

SEQ ID NO: 1148602 - DNA, 15 bp, Homo sapiens
cattaaagttcctaa

SEQ ID NO: 1148603 - DNA, 15 bp, Homo sapiens
acattaaagttccta

SEQ ID NO: 1148604 - DNA, 15 bp, Homo sapiens
tacattaaagttcct

SEQ ID NO: 1148605 - DNA, 15 bp, Homo sapiens
ttacattaaagttcc

SEQ ID NO: 1148606 - DNA, 15 bp, Homo sapiens
tttacattaaagttc

SEQ ID NO: 1148607 - DNA, 15 bp, Homo sapiens
gtttacattaaagtt

SEQ ID NO: 1148608 - DNA, 15 bp, Homo sapiens
agtttacattaaagt

SEQ ID NO: 1148609 - DNA, 15 bp, Homo sapiens
tagtttacattaaag

SEQ ID NO: 1148610 - DNA, 15 bp, Homo sapiens
atagtttacattaaa

SEQ ID NO: 1148611 - DNA, 15 bp, Homo sapiens
gatagtttacattaa

SEQ ID NO: 1148612 - DNA, 15 bp, Homo sapiens
agatagtttacatta

SEQ ID NO: 1148613 - DNA, 15 bp, Homo sapiens
cagatagtttacatt

SEQ ID NO: 1148614 - DNA, 15 bp, Homo sapiens
tcagatagtttacat

SEQ ID NO: 1148615 - DNA, 15 bp, Homo sapiens
ctcagatagtttaca

SEQ ID NO: 1148616 - DNA, 15 bp, Homo sapiens
cctcagatagtttac

SEQ ID NO: 1148617 - DNA, 15 bp, Homo sapiens
ccctcagatagttta

SEQ ID NO: 1148618 - DNA, 15 bp, Homo sapiens
tccctcagatagttt

SEQ ID NO: 1148619 - DNA, 15 bp, Homo sapiens
ttccctcagatagtt

SEQ ID NO: 1148620 - DNA, 15 bp, Homo sapiens
tttccctcagatagt

SEQ ID NO: 1148621 - DNA, 15 bp, Homo sapiens
atttccctcagatag

SEQ ID NO: 1148622 - DNA, 15 bp, Homo sapiens
gatttccctcagata

SEQ ID NO: 1148623 - DNA, 15 bp, Homo sapiens
tgatttccctcagat

SEQ ID NO: 1148624 - DNA, 15 bp, Homo sapiens
atgatttccctcaga

SEQ ID NO: 1148625 - DNA, 15 bp, Homo sapiens
aatgatttccctcag

SEQ ID NO: 1148626 - DNA, 15 bp, Homo sapiens
caatgatttccctca

SEQ ID NO: 1148627 - DNA, 15 bp, Homo sapiens
ccaatgatttccctc

SEQ ID NO: 1148628 - DNA, 15 bp, Homo sapiens
accaatgatttccct

SEQ ID NO: 1148629 - DNA, 15 bp, Homo sapiens
caccaatgatttccc

SEQ ID NO: 1148630 - DNA, 15 bp, Homo sapiens
acaccaatgatttcc

SEQ ID NO: 1148631 - DNA, 15 bp, Homo sapiens
cacaccaatgatttc

SEQ ID NO: 1148632 - DNA, 15 bp, Homo sapiens
ccacaccaatgattt

SEQ ID NO: 1148633 - DNA, 15 bp, Homo sapiens
accacaccaatgatt

SEQ ID NO: 1148634 - DNA, 15 bp, Homo sapiens
caccacaccaatgat

SEQ ID NO: 1148635 - DNA, 15 bp, Homo sapiens
tcaccacaccaatga

SEQ ID NO: 1148636 - DNA, 15 bp, Homo sapiens
ctcaccacaccaatg

SEQ ID NO: 1148637 - DNA, 15 bp, Homo sapiens
actcaccacaccaat

SEQ ID NO: 1148638 - DNA, 15 bp, Homo sapiens
gactcaccacaccaa

SEQ ID NO: 1148639 - DNA, 15 bp, Homo sapiens
tgactcaccacacca

SEQ ID NO: 1148640 - DNA, 15 bp, Homo sapiens
ctgactcaccacacc

SEQ ID NO: 1148641 - DNA, 15 bp, Homo sapiens
cctgactcaccacac

SEQ ID NO: 1148642 - DNA, 15 bp, Homo sapiens
tcctgactcaccaca

SEQ ID NO: 1148643 - DNA, 15 bp, Homo sapiens
ctcctgactcaccac

SEQ ID NO: 1148644 - DNA, 15 bp, Homo sapiens
gctcctgactcacca

SEQ ID NO: 1148645 - DNA, 15 bp, Homo sapiens
ggctcctgactcacc

SEQ ID NO: 1148646 - DNA, 15 bp, Homo sapiens
cggctcctgactcac

SEQ ID NO: 1148647 - DNA, 15 bp, Homo sapiens
ccggctcctgactca

SEQ ID NO: 1148648 - DNA, 15 bp, Homo sapiens
accggctcctgactc

SEQ ID NO: 1148649 - DNA, 15 bp, Homo sapiens
caccggctcctgact

SEQ ID NO: 1148650 - DNA, 15 bp, Homo sapiens
gcaccggctcctgac

SEQ ID NO: 1148651 - DNA, 15 bp, Homo sapiens
agcaccggctcctga

SEQ ID NO: 1148652 - DNA, 15 bp, Homo sapiens
cagcaccggctcctg

SEQ ID NO: 1148653 - DNA, 15 bp, Homo sapiens
acagcaccggctcct

SEQ ID NO: 1148654 - DNA, 15 bp, Homo sapiens
aacagcaccggctcc

SEQ ID NO: 1148655 - DNA, 15 bp, Homo sapiens
aaacagcaccggctc

SEQ ID NO: 1148656 - DNA, 15 bp, Homo sapiens
aaaacagcaccggct

SEQ ID NO: 1148657 - DNA, 15 bp, Homo sapiens
gaaaacagcaccggc

SEQ ID NO: 1148658 - DNA, 15 bp, Homo sapiens
ggaaaacagcaccgg

SEQ ID NO: 1148659 - DNA, 15 bp, Homo sapiens
tggaaaacagcaccg

SEQ ID NO: 1148660 - DNA, 15 bp, Homo sapiens
gtggaaaacagcacc

SEQ ID NO: 1148661 - DNA, 15 bp, Homo sapiens
ggtggaaaacagcac

SEQ ID NO: 1148662 - DNA, 15 bp, Homo sapiens
tggtggaaaacagca

SEQ ID NO: 1148663 - DNA, 15 bp, Homo sapiens
gtggtggaaaacagc

SEQ ID NO: 1148664 - DNA, 15 bp, Homo sapiens
tgtggtggaaaacag

SEQ ID NO: 1148665 - DNA, 15 bp, Homo sapiens
ttgtggtggaaaaca

SEQ ID NO: 1148666 - DNA, 15 bp, Homo sapiens
attgtggtggaaaac

SEQ ID NO: 1148667 - DNA, 15 bp, Homo sapiens
aattgtggtggaaaa

SEQ ID NO: 1148668 - DNA, 15 bp, Homo sapiens
caattgtggtggaaa

SEQ ID NO: 1148669 - DNA, 15 bp, Homo sapiens
gcaattgtggtggaa

SEQ ID NO: 1148670 - DNA, 15 bp, Homo sapiens
agcaattgtggtgga

SEQ ID NO: 1148671 - DNA, 15 bp, Homo sapiens
cagcaattgtggtgg

SEQ ID NO: 1148672 - DNA, 15 bp, Homo sapiens
tcagcaattgtggtg

SEQ ID NO: 1148673 - DNA, 15 bp, Homo sapiens
ttcagcaattgtggt

SEQ ID NO: 1148674 - DNA, 15 bp, Homo sapiens
tttcagcaattgtgg

SEQ ID NO: 1148675 - DNA, 15 bp, Homo sapiens
ttttcagcaattgtg

SEQ ID NO: 1148676 - DNA, 15 bp, Homo sapiens
attttcagcaattgt

SEQ ID NO: 1148677 - DNA, 15 bp, Homo sapiens
tattttcagcaattg

SEQ ID NO: 1148678 - DNA, 15 bp, Homo sapiens
atattttcagcaatt

SEQ ID NO: 1148679 - DNA, 15 bp, Homo sapiens
aatattttcagcaat

SEQ ID NO: 1148680 - DNA, 15 bp, Homo sapiens
aaatattttcagcaa

SEQ ID NO: 1148681 - DNA, 15 bp, Homo sapiens
caaatattttcagca

SEQ ID NO: 1148682 - DNA, 15 bp, Homo sapiens
acaaatattttcagc

SEQ ID NO: 1148683 - DNA, 15 bp, Homo sapiens
aacaaatattttcag

SEQ ID NO: 1148684 - DNA, 15 bp, Homo sapiens
taacaaatattttca

SEQ ID NO: 1148685 - DNA, 15 bp, Homo sapiens
ataacaaatattttc

SEQ ID NO: 1148686 - DNA, 15 bp, Homo sapiens
cataacaaatatttt

SEQ ID NO: 1148687 - DNA, 15 bp, Homo sapiens
ccataacaaatattt

SEQ ID NO: 1148688 - DNA, 15 bp, Homo sapiens
gccataacaaatatt

SEQ ID NO: 1148689 - DNA, 15 bp, Homo sapiens
ggccataacaaatat

SEQ ID NO: 1148690 - DNA, 15 bp, Homo sapiens
cggccataacaaata

SEQ ID NO: 1148691 - DNA, 15 bp, Homo sapiens
acggccataacaaat

SEQ ID NO: 1148692 - DNA, 15 bp, Homo sapiens
cacggccataacaaa

SEQ ID NO: 1148693 - DNA, 15 bp, Homo sapiens
ccacggccataacaa

SEQ ID NO: 1148694 - DNA, 15 bp, Homo sapiens
tccacggccataaca

SEQ ID NO: 1148695 - DNA, 15 bp, Homo sapiens
ttccacggccataac

SEQ ID NO: 1148696 - DNA, 15 bp, Homo sapiens
tttccacggccataa

SEQ ID NO: 1148697 - DNA, 15 bp, Homo sapiens
atttccacggccata

SEQ ID NO: 1148698 - DNA, 15 bp, Homo sapiens
catttccacggccat

SEQ ID NO: 1148699 - DNA, 15 bp, Homo sapiens
acatttccacggcca

SEQ ID NO: 1148700 - DNA, 15 bp, Homo sapiens
tacatttccacggcc

SEQ ID NO: 1148701 - DNA, 15 bp, Homo sapiens
ttacatttccacggc

SEQ ID NO: 1148702 - DNA, 15 bp, Homo sapiens
gttacatttccacgg

SEQ ID NO: 1148703 - DNA, 15 bp, Homo sapiens
ggttacatttccacg

SEQ ID NO: 1148704 - DNA, 15 bp, Homo sapiens
tggttacatttccac

SEQ ID NO: 1148705 - DNA, 15 bp, Homo sapiens
atggttacatttcca

SEQ ID NO: 1148706 - DNA, 15 bp, Homo sapiens
catggttacatttcc

SEQ ID NO: 1148707 - DNA, 15 bp, Homo sapiens
ccatggttacatttc

SEQ ID NO: 1148708 - DNA, 15 bp, Homo sapiens
tccatggttacattt

SEQ ID NO: 1148709 - DNA, 15 bp, Homo sapiens
atccatggttacatt

SEQ ID NO: 1148710 - DNA, 15 bp, Homo sapiens
catccatggttacat

SEQ ID NO: 1148711 - DNA, 15 bp, Homo sapiens
tcatccatggttaca

SEQ ID NO: 1148712 - DNA, 15 bp, Homo sapiens
ctcatccatggttac

SEQ ID NO: 1148713 - DNA, 15 bp, Homo sapiens
tctcatccatggtta

SEQ ID NO: 1148714 - DNA, 15 bp, Homo sapiens
atctcatccatggtt

SEQ ID NO: 1148715 - DNA, 15 bp, Homo sapiens
tatctcatccatggt

SEQ ID NO: 1148716 - DNA, 15 bp, Homo sapiens
ttatctcatccatgg

SEQ ID NO: 1148717 - DNA, 15 bp, Homo sapiens
tttatctcatccatg

SEQ ID NO: 1148718 - DNA, 15 bp, Homo sapiens
ctttatctcatccat

SEQ ID NO: 1148719 - DNA, 15 bp, Homo sapiens
tctttatctcatcca

SEQ ID NO: 1148720 - DNA, 15 bp, Homo sapiens
ttctttatctcatcc

SEQ ID NO: 1148721 - DNA, 15 bp, Homo sapiens
tttctttatctcatc

SEQ ID NO: 1148722 - DNA, 15 bp, Homo sapiens
ctttctttatctcat

SEQ ID NO: 1148723 - DNA, 15 bp, Homo sapiens
gctttctttatctca

SEQ ID NO: 1148724 - DNA, 15 bp, Homo sapiens
agctttctttatctc

SEQ ID NO: 1148725 - DNA, 15 bp, Homo sapiens
cagctttctttatct

SEQ ID NO: 1148726 - DNA, 15 bp, Homo sapiens
acagctttctttatc

SEQ ID NO: 1148727 - DNA, 15 bp, Homo sapiens
gacagctttctttat

SEQ ID NO: 1148728 - DNA, 15 bp, Homo sapiens
tgacagctttcttta

SEQ ID NO: 1148729 - DNA, 15 bp, Homo sapiens
ttgacagctttcttt

SEQ ID NO: 1148730 - DNA, 15 bp, Homo sapiens
tttgacagctttctt

SEQ ID NO: 1148731 - DNA, 15 bp, Homo sapiens
ctttgacagctttct

SEQ ID NO: 1148732 - DNA, 15 bp, Homo sapiens
tctttgacagctttc

SEQ ID NO: 1148733 - DNA, 15 bp, Homo sapiens
ctctttgacagcttt

SEQ ID NO: 1148734 - DNA, 15 bp, Homo sapiens
cctctttgacagctt

SEQ ID NO: 1148735 - DNA, 15 bp, Homo sapiens
gcctctttgacagct

SEQ ID NO: 1148736 - DNA, 15 bp, Homo sapiens
ggcctctttgacagc

SEQ ID NO: 1148737 - DNA, 15 bp, Homo sapiens
tggcctctttgacag

SEQ ID NO: 1148738 - DNA, 15 bp, Homo sapiens
ttggcctctttgaca

SEQ ID NO: 1148739 - DNA, 15 bp, Homo sapiens
gttggcctctttgac

SEQ ID NO: 1148740 - DNA, 15 bp, Homo sapiens
cgttggcctctttga

SEQ ID NO: 1148741 - DNA, 15 bp, Homo sapiens
gcgttggcctctttg

SEQ ID NO: 1148742 - DNA, 15 bp, Homo sapiens
ggcgttggcctcttt

SEQ ID NO: 1148743 - DNA, 15 bp, Homo sapiens
aggcgttggcctctt

SEQ ID NO: 1148744 - DNA, 15 bp, Homo sapiens
taggcgttggcctct

SEQ ID NO: 1148745 - DNA, 15 bp, Homo sapiens
ataggcgttggcctc

SEQ ID NO: 1148746 - DNA, 15 bp, Homo sapiens
cataggcgttggcct

SEQ ID NO: 1148747 - DNA, 15 bp, Homo sapiens
tcataggcgttggcc

SEQ ID NO: 1148748 - DNA, 15 bp, Homo sapiens
ctcataggcgttggc

SEQ ID NO: 1148749 - DNA, 15 bp, Homo sapiens
actcataggcgttgg

SEQ ID NO: 1148750 - DNA, 15 bp, Homo sapiens
aactcataggcgttg

SEQ ID NO: 1148751 - DNA, 15 bp, Homo sapiens
aaactcataggcgtt

SEQ ID NO: 1148752 - DNA, 15 bp, Homo sapiens
taaactcataggcgt

SEQ ID NO: 1148753 - DNA, 15 bp, Homo sapiens
ataaactcataggcg

SEQ ID NO: 1148754 - DNA, 15 bp, Homo sapiens
gataaactcataggc

SEQ ID NO: 1148755 - DNA, 15 bp, Homo sapiens
tgataaactcatagg

SEQ ID NO: 1148756 - DNA, 15 bp, Homo sapiens
atgataaactcatag

SEQ ID NO: 1148757 - DNA, 15 bp, Homo sapiens
catgataaactcata

SEQ ID NO: 1148758 - DNA, 15 bp, Homo sapiens
tcatgataaactcat

SEQ ID NO: 1148759 - DNA, 15 bp, Homo sapiens
ttcatgataaactca

SEQ ID NO: 1148760 - DNA, 15 bp, Homo sapiens
tttcatgataaactc

SEQ ID NO: 1148761 - DNA, 15 bp, Homo sapiens
atttcatgataaact

SEQ ID NO: 1148762 - DNA, 15 bp, Homo sapiens
aatttcatgataaac

SEQ ID NO: 1148763 - DNA, 15 bp, Homo sapiens
taatttcatgataaa

SEQ ID NO: 1148764 - DNA, 15 bp, Homo sapiens
gtaatttcatgataa

SEQ ID NO: 1148765 - DNA, 15 bp, Homo sapiens
ggtaatttcatgata

SEQ ID NO: 1148766 - DNA, 15 bp, Homo sapiens
tggtaatttcatgat

SEQ ID NO: 1148767 - DNA, 15 bp, Homo sapiens
gtggtaatttcatga

SEQ ID NO: 1148768 - DNA, 15 bp, Homo sapiens
tgtggtaatttcatg

SEQ ID NO: 1148769 - DNA, 15 bp, Homo sapiens
ctgtggtaatttcat

SEQ ID NO: 1148770 - DNA, 15 bp, Homo sapiens
cctgtggtaatttca

SEQ ID NO: 1148771 - DNA, 15 bp, Homo sapiens
acctgtggtaatttc

SEQ ID NO: 1148772 - DNA, 15 bp, Homo sapiens
tacctgtggtaattt

SEQ ID NO: 1148773 - DNA, 15 bp, Homo sapiens
ttacctgtggtaatt

SEQ ID NO: 1148774 - DNA, 15 bp, Homo sapiens
tttacctgtggtaat

SEQ ID NO: 1148775 - DNA, 15 bp, Homo sapiens
ctttacctgtggtaa

SEQ ID NO: 1148776 - DNA, 15 bp, Homo sapiens
gctttacctgtggta

SEQ ID NO: 1148777 - DNA, 15 bp, Homo sapiens
ggctttacctgtggt

SEQ ID NO: 1148778 - DNA, 15 bp, Homo sapiens
aggctttacctgtgg

SEQ ID NO: 1148779 - DNA, 15 bp, Homo sapiens
gaggctttacctgtg

SEQ ID NO: 1148780 - DNA, 15 bp, Homo sapiens
agaggctttacctgt

SEQ ID NO: 1148781 - DNA, 15 bp, Homo sapiens
cagaggctttacctg

SEQ ID NO: 1148782 - DNA, 15 bp, Homo sapiens
tcagaggctttacct

SEQ ID NO: 1148783 - DNA, 15 bp, Homo sapiens
atcagaggctttacc

SEQ ID NO: 1148784 - DNA, 15 bp, Homo sapiens
tatcagaggctttac

SEQ ID NO: 1148785 - DNA, 15 bp, Homo sapiens
ttatcagaggcttta

SEQ ID NO: 1148786 - DNA, 15 bp, Homo sapiens
tttatcagaggcttt

SEQ ID NO: 1148787 - DNA, 15 bp, Homo sapiens
ctttatcagaggctt

SEQ ID NO: 1148788 - DNA, 15 bp, Homo sapiens
actttatcagaggct

SEQ ID NO: 1148789 - DNA, 15 bp, Homo sapiens
tactttatcagaggc

SEQ ID NO: 1148790 - DNA, 15 bp, Homo sapiens
ctactttatcagagg

SEQ ID NO: 1148791 - DNA, 15 bp, Homo sapiens
actactttatcagag

SEQ ID NO: 1148792 - DNA, 15 bp, Homo sapiens
aactactttatcaga

SEQ ID NO: 1148793 - DNA, 15 bp, Homo sapiens
caactactttatcag

SEQ ID NO: 1148794 - DNA, 15 bp, Homo sapiens
acaactactttatca

SEQ ID NO: 1148795 - DNA, 15 bp, Homo sapiens
gacaactactttatc

SEQ ID NO: 1148796 - DNA, 15 bp, Homo sapiens
ggacaactactttat

SEQ ID NO: 1148797 - DNA, 15 bp, Homo sapiens
aggacaactacttta

SEQ ID NO: 1148798 - DNA, 15 bp, Homo sapiens
aaggacaactacttt

SEQ ID NO: 1148799 - DNA, 15 bp, Homo sapiens
caaggacaactactt

SEQ ID NO: 1148800 - DNA, 15 bp, Homo sapiens
tcaaggacaactact

SEQ ID NO: 1148801 - DNA, 15 bp, Homo sapiens
ttcaaggacaactac

SEQ ID NO: 1148802 - DNA, 15 bp, Homo sapiens
tttcaaggacaacta

SEQ ID NO: 1148803 - DNA, 15 bp, Homo sapiens
atttcaaggacaact

SEQ ID NO: 1148804 - DNA, 15 bp, Homo sapiens
aatttcaaggacaac

SEQ ID NO: 1148805 - DNA, 15 bp, Homo sapiens
taatttcaaggacaa

SEQ ID NO: 1148806 - DNA, 15 bp, Homo sapiens
ctaatttcaaggaca

SEQ ID NO: 1148807 - DNA, 15 bp, Homo sapiens
tctaatttcaaggac

SEQ ID NO: 1148808 - DNA, 15 bp, Homo sapiens
ttctaatttcaagga

SEQ ID NO: 1148809 - DNA, 15 bp, Homo sapiens
attctaatttcaagg

SEQ ID NO: 1148810 - DNA, 15 bp, Homo sapiens
aattctaatttcaag

SEQ ID NO: 1148811 - DNA, 15 bp, Homo sapiens
aaattctaatttcaa

SEQ ID NO: 1148812 - DNA, 15 bp, Homo sapiens
gaaattctaatttca

SEQ ID NO: 1148813 - DNA, 15 bp, Homo sapiens
tgaaattctaatttc

SEQ ID NO: 1148814 - DNA, 15 bp, Homo sapiens
gtgaaattctaattt

SEQ ID NO: 1148815 - DNA, 15 bp, Homo sapiens
ggtgaaattctaatt

SEQ ID NO: 1148816 - DNA, 15 bp, Homo sapiens
aggtgaaattctaat

SEQ ID NO: 1148817 - DNA, 15 bp, Homo sapiens
gaggtgaaattctaa

SEQ ID NO: 1148818 - DNA, 15 bp, Homo sapiens
tgaggtgaaattcta

SEQ ID NO: 1148819 - DNA, 15 bp, Homo sapiens
atgaggtgaaattct

SEQ ID NO: 1148820 - DNA, 15 bp, Homo sapiens
tatgaggtgaaattc

SEQ ID NO: 1148821 - DNA, 15 bp, Homo sapiens
ctatgaggtgaaatt

SEQ ID NO: 1148822 - DNA, 15 bp, Homo sapiens
cctatgaggtgaaat

SEQ ID NO: 1148823 - DNA, 15 bp, Homo sapiens
tcctatgaggtgaaa

SEQ ID NO: 1148824 - DNA, 15 bp, Homo sapiens
gtcctatgaggtgaa

SEQ ID NO: 1148825 - DNA, 15 bp, Homo sapiens
agtcctatgaggtga

SEQ ID NO: 1148826 - DNA, 15 bp, Homo sapiens
cagtcctatgaggtg

SEQ ID NO: 1148827 - DNA, 15 bp, Homo sapiens
tcagtcctatgaggt

SEQ ID NO: 1148828 - DNA, 15 bp, Homo sapiens
ctcagtcctatgagg

SEQ ID NO: 1148829 - DNA, 15 bp, Homo sapiens
actcagtcctatgag

SEQ ID NO: 1148830 - DNA, 15 bp, Homo sapiens
aactcagtcctatga

SEQ ID NO: 1148831 - DNA, 15 bp, Homo sapiens
aaactcagtcctatg

SEQ ID NO: 1148832 - DNA, 15 bp, Homo sapiens
taaactcagtcctat

SEQ ID NO: 1148833 - DNA, 15 bp, Homo sapiens
ataaactcagtccta

SEQ ID NO: 1148834 - DNA, 15 bp, Homo sapiens
aataaactcagtcct

SEQ ID NO: 1148835 - DNA, 15 bp, Homo sapiens
gaataaactcagtcc

SEQ ID NO: 1148836 - DNA, 15 bp, Homo sapiens
agaataaactcagtc

SEQ ID NO: 1148837 - DNA, 15 bp, Homo sapiens
aagaataaactcagt

SEQ ID NO: 1148838 - DNA, 15 bp, Homo sapiens
gaagaataaactcag

SEQ ID NO: 1148839 - DNA, 15 bp, Homo sapiens
tgaagaataaactca

SEQ ID NO: 1148840 - DNA, 15 bp, Homo sapiens
ttgaagaataaactc

SEQ ID NO: 1148841 - DNA, 15 bp, Homo sapiens
tttgaagaataaact

SEQ ID NO: 1148842 - DNA, 15 bp, Homo sapiens
ctttgaagaataaac

SEQ ID NO: 1148843 - DNA, 15 bp, Homo sapiens
cctttgaagaataaa

SEQ ID NO: 1148844 - DNA, 15 bp, Homo sapiens
acctttgaagaataa

SEQ ID NO: 1148845 - DNA, 15 bp, Homo sapiens
aacctttgaagaata

SEQ ID NO: 1148846 - DNA, 15 bp, Homo sapiens
aaacctttgaagaat

SEQ ID NO: 1148847 - DNA, 15 bp, Homo sapiens
taaacctttgaagaa

SEQ ID NO: 1148848 - DNA, 15 bp, Homo sapiens
ctaaacctttgaaga

SEQ ID NO: 1148849 - DNA, 15 bp, Homo sapiens
gctaaacctttgaag

SEQ ID NO: 1148850 - DNA, 15 bp, Homo sapiens
agctaaacctttgaa

SEQ ID NO: 1148851 - DNA, 15 bp, Homo sapiens
tagctaaacctttga

SEQ ID NO: 1148852 - DNA, 15 bp, Homo sapiens
ttagctaaacctttg

SEQ ID NO: 1148853 - DNA, 15 bp, Homo sapiens
attagctaaaccttt

SEQ ID NO: 1148854 - DNA, 15 bp, Homo sapiens
tattagctaaacctt

SEQ ID NO: 1148855 - DNA, 15 bp, Homo sapiens
ttattagctaaacct

SEQ ID NO: 1148856 - DNA, 15 bp, Homo sapiens
attattagctaaacc

SEQ ID NO: 1148857 - DNA, 15 bp, Homo sapiens
cattattagctaaac

SEQ ID NO: 1148858 - DNA, 15 bp, Homo sapiens
acattattagctaaa

SEQ ID NO: 1148859 - DNA, 15 bp, Homo sapiens
aacattattagctaa

SEQ ID NO: 1148860 - DNA, 15 bp, Homo sapiens
aaacattattagcta

SEQ ID NO: 1148861 - DNA, 15 bp, Homo sapiens
caaacattattagct

SEQ ID NO: 1148862 - DNA, 15 bp, Homo sapiens
tcaaacattattagc

SEQ ID NO: 1148863 - DNA, 15 bp, Homo sapiens
ctcaaacattattag

SEQ ID NO: 1148864 - DNA, 15 bp, Homo sapiens
tctcaaacattatta

SEQ ID NO: 1148865 - DNA, 15 bp, Homo sapiens
atctcaaacattatt

SEQ ID NO: 1148866 - DNA, 15 bp, Homo sapiens
catctcaaacattat

SEQ ID NO: 1148867 - DNA, 15 bp, Homo sapiens
gcatctcaaacatta

SEQ ID NO: 1148868 - DNA, 15 bp, Homo sapiens
tgcatctcaaacatt

SEQ ID NO: 1148869 - DNA, 15 bp, Homo sapiens
ttgcatctcaaacat

SEQ ID NO: 1148870 - DNA, 15 bp, Homo sapiens
cttgcatctcaaaca

SEQ ID NO: 1148871 - DNA, 15 bp, Homo sapiens
tcttgcatctcaaac

SEQ ID NO: 1148872 - DNA, 15 bp, Homo sapiens
atcttgcatctcaaa

SEQ ID NO: 1148873 - DNA, 15 bp, Homo sapiens
aatcttgcatctcaa

SEQ ID NO: 1148874 - DNA, 15 bp, Homo sapiens
caatcttgcatctca

SEQ ID NO: 1148875 - DNA, 15 bp, Homo sapiens
acaatcttgcatctc

SEQ ID NO: 1148876 - DNA, 15 bp, Homo sapiens
gacaatcttgcatct

SEQ ID NO: 1148877 - DNA, 15 bp, Homo sapiens
ggacaatcttgcatc

SEQ ID NO: 1148878 - DNA, 15 bp, Homo sapiens
tggacaatcttgcat

SEQ ID NO: 1148879 - DNA, 15 bp, Homo sapiens
ttggacaatcttgca

SEQ ID NO: 1148880 - DNA, 15 bp, Homo sapiens
gttggacaatcttgc

SEQ ID NO: 1148881 - DNA, 15 bp, Homo sapiens
agttggacaatcttg

SEQ ID NO: 1148882 - DNA, 15 bp, Homo sapiens
aagttggacaatctt

SEQ ID NO: 1148883 - DNA, 15 bp, Homo sapiens
aaagttggacaatct

SEQ ID NO: 1148884 - DNA, 15 bp, Homo sapiens
caaagttggacaatc

SEQ ID NO: 1148885 - DNA, 15 bp, Homo sapiens
gcaaagttggacaat

SEQ ID NO: 1148886 - DNA, 15 bp, Homo sapiens
agcaaagttggacaa

SEQ ID NO: 1148887 - DNA, 15 bp, Homo sapiens
tagcaaagttggaca

SEQ ID NO: 1148888 - DNA, 15 bp, Homo sapiens
ctagcaaagttggac

SEQ ID NO: 1148889 - DNA, 15 bp, Homo sapiens
tctagcaaagttgga

SEQ ID NO: 1148890 - DNA, 15 bp, Homo sapiens
atctagcaaagttgg

SEQ ID NO: 1148891 - DNA, 15 bp, Homo sapiens
tatctagcaaagttg

SEQ ID NO: 1148892 - DNA, 15 bp, Homo sapiens
ttatctagcaaagtt

SEQ ID NO: 1148893 - DNA, 15 bp, Homo sapiens
cttatctagcaaagt

SEQ ID NO: 1148894 - DNA, 15 bp, Homo sapiens
acttatctagcaaag

SEQ ID NO: 1148895 - DNA, 15 bp, Homo sapiens
gacttatctagcaaa

SEQ ID NO: 1148896 - DNA, 15 bp, Homo sapiens
ggacttatctagcaa

SEQ ID NO: 1148897 - DNA, 15 bp, Homo sapiens
gggacttatctagca

SEQ ID NO: 1148898 - DNA, 15 bp, Homo sapiens
ggggacttatctagc

SEQ ID NO: 1148899 - DNA, 15 bp, Homo sapiens
aggggacttatctag

SEQ ID NO: 1148900 - DNA, 15 bp, Homo sapiens
caggggacttatcta

SEQ ID NO: 1148901 - DNA, 15 bp, Homo sapiens
tcaggggacttatct

SEQ ID NO: 1148902 - DNA, 15 bp, Homo sapiens
ttcaggggacttatc

SEQ ID NO: 1148903 - DNA, 15 bp, Homo sapiens
attcaggggacttat

SEQ ID NO: 1148904 - DNA, 15 bp, Homo sapiens
cattcaggggactta

SEQ ID NO: 1148905 - DNA, 15 bp, Homo sapiens
tcattcaggggactt

SEQ ID NO: 1148906 - DNA, 15 bp, Homo sapiens
gtcattcaggggact

SEQ ID NO: 1148907 - DNA, 15 bp, Homo sapiens
agtcattcaggggac

SEQ ID NO: 1148908 - DNA, 15 bp, Homo sapiens
gagtcattcagggga

SEQ ID NO: 1148909 - DNA, 15 bp, Homo sapiens
tgagtcattcagggg

SEQ ID NO: 1148910 - DNA, 15 bp, Homo sapiens
ctgagtcattcaggg

SEQ ID NO: 1148911 - DNA, 15 bp, Homo sapiens
actgagtcattcagg

SEQ ID NO: 1148912 - DNA, 15 bp, Homo sapiens
aactgagtcattcag

SEQ ID NO: 1148913 - DNA, 15 bp, Homo sapiens
taactgagtcattca

SEQ ID NO: 1148914 - DNA, 15 bp, Homo sapiens
ctaactgagtcattc

SEQ ID NO: 1148915 - DNA, 15 bp, Homo sapiens
cctaactgagtcatt

SEQ ID NO: 1148916 - DNA, 15 bp, Homo sapiens
ccctaactgagtcat

SEQ ID NO: 1148917 - DNA, 15 bp, Homo sapiens
cccctaactgagtca

SEQ ID NO: 1148918 - DNA, 15 bp, Homo sapiens
acccctaactgagtc

SEQ ID NO: 1148919 - DNA, 15 bp, Homo sapiens
aacccctaactgagt

SEQ ID NO: 1148920 - DNA, 15 bp, Homo sapiens
taacccctaactgag

SEQ ID NO: 1148921 - DNA, 15 bp, Homo sapiens
ttaacccctaactga

SEQ ID NO: 1148922 - DNA, 15 bp, Homo sapiens
tttaacccctaactg

SEQ ID NO: 1148923 - DNA, 15 bp, Homo sapiens
ctttaacccctaact

SEQ ID NO: 1148924 - DNA, 15 bp, Homo sapiens
cctttaacccctaac

SEQ ID NO: 1148925 - DNA, 15 bp, Homo sapiens
tcctttaacccctaa

SEQ ID NO: 1148926 - DNA, 15 bp, Homo sapiens
atcctttaaccccta

SEQ ID NO: 1148927 - DNA, 15 bp, Homo sapiens
aatcctttaacccct

SEQ ID NO: 1148928 - DNA, 15 bp, Homo sapiens
taatcctttaacccc

SEQ ID NO: 1148929 - DNA, 15 bp, Homo sapiens
ataatcctttaaccc

SEQ ID NO: 1148930 - DNA, 15 bp, Homo sapiens
tataatcctttaacc

SEQ ID NO: 1148931 - DNA, 15 bp, Homo sapiens
ctataatcctttaac

SEQ ID NO: 1148932 - DNA, 15 bp, Homo sapiens
gctataatcctttaa

SEQ ID NO: 1148933 - DNA, 15 bp, Homo sapiens
tgctataatccttta

SEQ ID NO: 1148934 - DNA, 15 bp, Homo sapiens
atgctataatccttt

SEQ ID NO: 1148935 - DNA, 15 bp, Homo sapiens
catgctataatcctt

SEQ ID NO: 1148936 - DNA, 15 bp, Homo sapiens
ccatgctataatcct

SEQ ID NO: 1148937 - DNA, 15 bp, Homo sapiens
accatgctataatcc

SEQ ID NO: 1148938 - DNA, 15 bp, Homo sapiens
taccatgctataatc

SEQ ID NO: 1148939 - DNA, 15 bp, Homo sapiens
ctaccatgctataat

SEQ ID NO: 1148940 - DNA, 15 bp, Homo sapiens
tctaccatgctataa

SEQ ID NO: 1148941 - DNA, 15 bp, Homo sapiens
atctaccatgctata

SEQ ID NO: 1148942 - DNA, 15 bp, Homo sapiens
catctaccatgctat

SEQ ID NO: 1148943 - DNA, 15 bp, Homo sapiens
tcatctaccatgcta

SEQ ID NO: 1148944 - DNA, 15 bp, Homo sapiens
atcatctaccatgct

SEQ ID NO: 1148945 - DNA, 15 bp, Homo sapiens
aatcatctaccatgc

SEQ ID NO: 1148946 - DNA, 15 bp, Homo sapiens
taatcatctaccatg

SEQ ID NO: 1148947 - DNA, 15 bp, Homo sapiens
ttaatcatctaccat

SEQ ID NO: 1148948 - DNA, 15 bp, Homo sapiens
attaatcatctacca

SEQ ID NO: 1148949 - DNA, 15 bp, Homo sapiens
tattaatcatctacc

SEQ ID NO: 1148950 - DNA, 15 bp, Homo sapiens
atattaatcatctac

SEQ ID NO: 1148951 - DNA, 15 bp, Homo sapiens
tatattaatcatcta

SEQ ID NO: 1148952 - DNA, 15 bp, Homo sapiens
ttatattaatcatct

SEQ ID NO: 1148953 - DNA, 15 bp, Homo sapiens
tttatattaatcatc

SEQ ID NO: 1148954 - DNA, 15 bp, Homo sapiens
ttttatattaatcat

SEQ ID NO: 1148955 - DNA, 15 bp, Homo sapiens
attttatattaatca

SEQ ID NO: 1148956 - DNA, 15 bp, Homo sapiens
aattttatattaatc

SEQ ID NO: 1148957 - DNA, 15 bp, Homo sapiens
aaattttatattaat

SEQ ID NO: 1148958 - DNA, 15 bp, Homo sapiens
aaaattttatattaa

SEQ ID NO: 1148959 - DNA, 15 bp, Homo sapiens
taaaattttatatta

SEQ ID NO: 1148960 - DNA, 15 bp, Homo sapiens
ataaaattttatatt

SEQ ID NO: 1148961 - DNA, 15 bp, Homo sapiens
tataaaattttatat

SEQ ID NO: 1148962 - DNA, 15 bp, Homo sapiens
gtataaaattttata

SEQ ID NO: 1148963 - DNA, 15 bp, Homo sapiens
tgtataaaattttat

SEQ ID NO: 1148964 - DNA, 15 bp, Homo sapiens
ctgtataaaatttta

SEQ ID NO: 1148965 - DNA, 15 bp, Homo sapiens
gctgtataaaatttt

SEQ ID NO: 1148966 - DNA, 15 bp, Homo sapiens
tgctgtataaaattt

SEQ ID NO: 1148967 - DNA, 15 bp, Homo sapiens
atgctgtataaaatt

SEQ ID NO: 1148968 - DNA, 15 bp, Homo sapiens
catgctgtataaaat

SEQ ID NO: 1148969 - DNA, 15 bp, Homo sapiens
acatgctgtataaaa

SEQ ID NO: 1148970 - DNA, 15 bp, Homo sapiens
cacatgctgtataaa

SEQ ID NO: 1148971 - DNA, 15 bp, Homo sapiens
acacatgctgtataa

SEQ ID NO: 1148972 - DNA, 15 bp, Homo sapiens
gacacatgctgtata

SEQ ID NO: 1148973 - DNA, 15 bp, Homo sapiens
tgacacatgctgtat

SEQ ID NO: 1148974 - DNA, 15 bp, Homo sapiens
ctgacacatgctgta

SEQ ID NO: 1148975 - DNA, 15 bp, Homo sapiens
actgacacatgctgt

SEQ ID NO: 1148976 - DNA, 15 bp, Homo sapiens
aactgacacatgctg

SEQ ID NO: 1148977 - DNA, 15 bp, Homo sapiens
aaactgacacatgct

SEQ ID NO: 1148978 - DNA, 15 bp, Homo sapiens
aaaactgacacatgc

SEQ ID NO: 1148979 - DNA, 15 bp, Homo sapiens
aaaaactgacacatg

SEQ ID NO: 1148980 - DNA, 15 bp, Homo sapiens
aaaaaactgacacat

SEQ ID NO: 1148981 - DNA, 15 bp, Homo sapiens
taaaaaactgacaca

SEQ ID NO: 1148982 - DNA, 15 bp, Homo sapiens
ataaaaaactgacac

SEQ ID NO: 1148983 - DNA, 15 bp, Homo sapiens
tataaaaaactgaca

SEQ ID NO: 1148984 - DNA, 15 bp, Homo sapiens
ttataaaaaactgac

SEQ ID NO: 1148985 - DNA, 15 bp, Homo sapiens
attataaaaaactga

SEQ ID NO: 1148986 - DNA, 15 bp, Homo sapiens
aattataaaaaactg

SEQ ID NO: 1148987 - DNA, 15 bp, Homo sapiens
gaattataaaaaact

SEQ ID NO: 1148988 - DNA, 15 bp, Homo sapiens
tgaattataaaaaac

SEQ ID NO: 1148989 - DNA, 15 bp, Homo sapiens
ctgaattataaaaaa

SEQ ID NO: 1148990 - DNA, 15 bp, Homo sapiens
tctgaattataaaaa

SEQ ID NO: 1148991 - DNA, 15 bp, Homo sapiens
ttctgaattataaaa

SEQ ID NO: 1148992 - DNA, 15 bp, Homo sapiens
attctgaattataaa

SEQ ID NO: 1148993 - DNA, 15 bp, Homo sapiens
aattctgaattataa

SEQ ID NO: 1148994 - DNA, 15 bp, Homo sapiens
gaattctgaattata

SEQ ID NO: 1148995 - DNA, 15 bp, Homo sapiens
tgaattctgaattat

SEQ ID NO: 1148996 - DNA, 15 bp, Homo sapiens
atgaattctgaatta

SEQ ID NO: 1148997 - DNA, 15 bp, Homo sapiens
aatgaattctgaatt

SEQ ID NO: 1148998 - DNA, 15 bp, Homo sapiens
aaatgaattctgaat

SEQ ID NO: 1148999 - DNA, 15 bp, Homo sapiens
taaatgaattctgaa

SEQ ID NO: 1149000 - DNA, 15 bp, Homo sapiens
ataaatgaattctga

SEQ ID NO: 1149001 - DNA, 15 bp, Homo sapiens
gataaatgaattctg

SEQ ID NO: 1149002 - DNA, 15 bp, Homo sapiens
agataaatgaattct

SEQ ID NO: 1149003 - DNA, 15 bp, Homo sapiens
aagataaatgaattc

SEQ ID NO: 1149004 - DNA, 15 bp, Homo sapiens
taagataaatgaatt

SEQ ID NO: 1149005 - DNA, 15 bp, Homo sapiens
ataagataaatgaat

SEQ ID NO: 1149006 - DNA, 15 bp, Homo sapiens
gataagataaatgaa

SEQ ID NO: 1149007 - DNA, 15 bp, Homo sapiens
tgataagataaatga

SEQ ID NO: 1149008 - DNA, 15 bp, Homo sapiens
atgataagataaatg

SEQ ID NO: 1149009 - DNA, 15 bp, Homo sapiens
tatgataagataaat

SEQ ID NO: 1149010 - DNA, 15 bp, Homo sapiens
gtatgataagataaa

SEQ ID NO: 1149011 - DNA, 15 bp, Homo sapiens
agtatgataagataa

SEQ ID NO: 1149012 - DNA, 15 bp, Homo sapiens
aagtatgataagata

SEQ ID NO: 1149013 - DNA, 15 bp, Homo sapiens
aaagtatgataagat

SEQ ID NO: 1149014 - DNA, 15 bp, Homo sapiens
taaagtatgataaga

SEQ ID NO: 1149015 - DNA, 15 bp, Homo sapiens
ataaagtatgataag

SEQ ID NO: 1149016 - DNA, 15 bp, Homo sapiens
cataaagtatgataa

SEQ ID NO: 1149017 - DNA, 15 bp, Homo sapiens
tcataaagtatgata

SEQ ID NO: 1149018 - DNA, 15 bp, Homo sapiens
atcataaagtatgat

SEQ ID NO: 1149019 - DNA, 15 bp, Homo sapiens
tatcataaagtatga

SEQ ID NO: 1149020 - DNA, 15 bp, Homo sapiens
gtatcataaagtatg

SEQ ID NO: 1149021 - DNA, 15 bp, Homo sapiens
tgtatcataaagtat

SEQ ID NO: 1149022 - DNA, 15 bp, Homo sapiens
atgtatcataaagta

SEQ ID NO: 1149023 - DNA, 15 bp, Homo sapiens
aatgtatcataaagt

SEQ ID NO: 1149024 - DNA, 15 bp, Homo sapiens
taatgtatcataaag

SEQ ID NO: 1149025 - DNA, 15 bp, Homo sapiens
ttaatgtatcataaa

SEQ ID NO: 1149026 - DNA, 15 bp, Homo sapiens
tttaatgtatcataa

SEQ ID NO: 1149027 - DNA, 15 bp, Homo sapiens
ttttaatgtatcata

SEQ ID NO: 1149028 - DNA, 15 bp, Homo sapiens
attttaatgtatcat

SEQ ID NO: 1149029 - DNA, 15 bp, Homo sapiens
tattttaatgtatca

SEQ ID NO: 1149030 - DNA, 15 bp, Homo sapiens
ctattttaatgtatc

SEQ ID NO: 1149031 - DNA, 15 bp, Homo sapiens
actattttaatgtat

SEQ ID NO: 1149032 - DNA, 15 bp, Homo sapiens
aactattttaatgta

SEQ ID NO: 1149033 - DNA, 15 bp, Homo sapiens
taactattttaatgt

SEQ ID NO: 1149034 - DNA, 15 bp, Homo sapiens
ttaactattttaatg

SEQ ID NO: 1149035 - DNA, 15 bp, Homo sapiens
cttaactattttaat

SEQ ID NO: 1149036 - DNA, 15 bp, Homo sapiens
tcttaactattttaa

SEQ ID NO: 1149037 - DNA, 15 bp, Homo sapiens
gtcttaactatttta

SEQ ID NO: 1149038 - DNA, 15 bp, Homo sapiens
tgtcttaactatttt

SEQ ID NO: 1149039 - DNA, 15 bp, Homo sapiens
ttgtcttaactattt

SEQ ID NO: 1149040 - DNA, 15 bp, Homo sapiens
tttgtcttaactatt

SEQ ID NO: 1149041 - DNA, 15 bp, Homo sapiens
ctttgtcttaactat

SEQ ID NO: 1149042 - DNA, 15 bp, Homo sapiens
gctttgtcttaacta

SEQ ID NO: 1149043 - DNA, 15 bp, Homo sapiens
agctttgtcttaact

SEQ ID NO: 1149044 - DNA, 15 bp, Homo sapiens
gagctttgtcttaac

SEQ ID NO: 1149045 - DNA, 15 bp, Homo sapiens
ggagctttgtcttaa

SEQ ID NO: 1149046 - DNA, 15 bp, Homo sapiens
tggagctttgtctta

SEQ ID NO: 1149047 - DNA, 15 bp, Homo sapiens
atggagctttgtctt

SEQ ID NO: 1149048 - DNA, 15 bp, Homo sapiens
catggagctttgtct

SEQ ID NO: 1149049 - DNA, 15 bp, Homo sapiens
acatggagctttgtc

SEQ ID NO: 1149050 - DNA, 15 bp, Homo sapiens
aacatggagctttgt

SEQ ID NO: 1149051 - DNA, 15 bp, Homo sapiens
caacatggagctttg

SEQ ID NO: 1149052 - DNA, 15 bp, Homo sapiens
acaacatggagcttt

SEQ ID NO: 1149053 - DNA, 15 bp, Homo sapiens
gacaacatggagctt

SEQ ID NO: 1149054 - DNA, 15 bp, Homo sapiens
agacaacatggagct

SEQ ID NO: 1149055 - DNA, 15 bp, Homo sapiens
aagacaacatggagc

SEQ ID NO: 1149056 - DNA, 15 bp, Homo sapiens
aaagacaacatggag

SEQ ID NO: 1149057 - DNA, 15 bp, Homo sapiens
taaagacaacatgga

SEQ ID NO: 1149058 - DNA, 15 bp, Homo sapiens
ataaagacaacatgg

SEQ ID NO: 1149059 - DNA, 15 bp, Homo sapiens
cataaagacaacatg

SEQ ID NO: 1149060 - DNA, 15 bp, Homo sapiens
acataaagacaacat

SEQ ID NO: 1149061 - DNA, 15 bp, Homo sapiens
tacataaagacaaca

SEQ ID NO: 1149062 - DNA, 15 bp, Homo sapiens
ctacataaagacaac

SEQ ID NO: 1149063 - DNA, 15 bp, Homo sapiens
actacataaagacaa

SEQ ID NO: 1149064 - DNA, 15 bp, Homo sapiens
aactacataaagaca

SEQ ID NO: 1149065 - DNA, 15 bp, Homo sapiens
gaactacataaagac

SEQ ID NO: 1149066 - DNA, 15 bp, Homo sapiens
agaactacataaaga

SEQ ID NO: 1149067 - DNA, 15 bp, Homo sapiens
tagaactacataaag

SEQ ID NO: 1149068 - DNA, 15 bp, Homo sapiens
atagaactacataaa

SEQ ID NO: 1149069 - DNA, 15 bp, Homo sapiens
tatagaactacataa

SEQ ID NO: 1149070 - DNA, 15 bp, Homo sapiens
ctatagaactacata

SEQ ID NO: 1149071 - DNA, 15 bp, Homo sapiens
tctatagaactacat

SEQ ID NO: 1149072 - DNA, 15 bp, Homo sapiens
ttctatagaactaca

SEQ ID NO: 1149073 - DNA, 15 bp, Homo sapiens
attctatagaactac

SEQ ID NO: 1149074 - DNA, 15 bp, Homo sapiens
aattctatagaacta

SEQ ID NO: 1149075 - DNA, 15 bp, Homo sapiens
gaattctatagaact

SEQ ID NO: 1149076 - DNA, 15 bp, Homo sapiens
ggaattctatagaac

SEQ ID NO: 1149077 - DNA, 15 bp, Homo sapiens
aggaattctatagaa

SEQ ID NO: 1149078 - DNA, 15 bp, Homo sapiens
taggaattctataga

SEQ ID NO: 1149079 - DNA, 15 bp, Homo sapiens
ctaggaattctatag

SEQ ID NO: 1149080 - DNA, 15 bp, Homo sapiens
gctaggaattctata

SEQ ID NO: 1149081 - DNA, 15 bp, Homo sapiens
ggctaggaattctat

SEQ ID NO: 1149082 - DNA, 15 bp, Homo sapiens
aggctaggaattcta

SEQ ID NO: 1149083 - DNA, 15 bp, Homo sapiens
aaggctaggaattct

SEQ ID NO: 1149084 - DNA, 15 bp, Homo sapiens
aaaggctaggaattc

SEQ ID NO: 1149085 - DNA, 15 bp, Homo sapiens
aaaaggctaggaatt

SEQ ID NO: 1149086 - DNA, 15 bp, Homo sapiens
aaaaaggctaggaat

SEQ ID NO: 1149087 - DNA, 15 bp, Homo sapiens
taaaaaggctaggaa

SEQ ID NO: 1149088 - DNA, 15 bp, Homo sapiens
ttaaaaaggctagga

SEQ ID NO: 1149089 - DNA, 15 bp, Homo sapiens
tttaaaaaggctagg

SEQ ID NO: 1149090 - DNA, 15 bp, Homo sapiens
atttaaaaaggctag

SEQ ID NO: 1149091 - DNA, 15 bp, Homo sapiens
aatttaaaaaggcta

SEQ ID NO: 1149092 - DNA, 15 bp, Homo sapiens
aaatttaaaaaggct

SEQ ID NO: 1149093 - DNA, 15 bp, Homo sapiens
taaatttaaaaaggc

SEQ ID NO: 1149094 - DNA, 15 bp, Homo sapiens
ttaaatttaaaaagg

SEQ ID NO: 1149095 - DNA, 15 bp, Homo sapiens
cttaaatttaaaaag

SEQ ID NO: 1149096 - DNA, 15 bp, Homo sapiens
acttaaatttaaaaa

SEQ ID NO: 1149097 - DNA, 15 bp, Homo sapiens
aacttaaatttaaaa

SEQ ID NO: 1149098 - DNA, 15 bp, Homo sapiens
taacttaaatttaaa

SEQ ID NO: 1149099 - DNA, 15 bp, Homo sapiens
gtaacttaaatttaa

SEQ ID NO: 1149100 - DNA, 15 bp, Homo sapiens
agtaacttaaattta

SEQ ID NO: 1149101 - DNA, 15 bp, Homo sapiens
aagtaacttaaattt

SEQ ID NO: 1149102 - DNA, 15 bp, Homo sapiens
gaagtaacttaaatt

SEQ ID NO: 1149103 - DNA, 15 bp, Homo sapiens
tgaagtaacttaaat

SEQ ID NO: 1149104 - DNA, 15 bp, Homo sapiens
ttgaagtaacttaaa

SEQ ID NO: 1149105 - DNA, 15 bp, Homo sapiens
cttgaagtaacttaa

SEQ ID NO: 1149106 - DNA, 15 bp, Homo sapiens
tcttgaagtaactta

SEQ ID NO: 1149107 - DNA, 15 bp, Homo sapiens
ctcttgaagtaactt

SEQ ID NO: 1149108 - DNA, 15 bp, Homo sapiens
gctcttgaagtaact

SEQ ID NO: 1149109 - DNA, 15 bp, Homo sapiens
agctcttgaagtaac

SEQ ID NO: 1149110 - DNA, 15 bp, Homo sapiens
cagctcttgaagtaa

SEQ ID NO: 1149111 - DNA, 15 bp, Homo sapiens
tcagctcttgaagta

SEQ ID NO: 1149112 - DNA, 15 bp, Homo sapiens
atcagctcttgaagt

SEQ ID NO: 1149113 - DNA, 15 bp, Homo sapiens
gatcagctcttgaag

SEQ ID NO: 1149114 - DNA, 15 bp, Homo sapiens
ggatcagctcttgaa

SEQ ID NO: 1149115 - DNA, 15 bp, Homo sapiens
tggatcagctcttga

SEQ ID NO: 1149116 - DNA, 15 bp, Homo sapiens
atggatcagctcttg

SEQ ID NO: 1149117 - DNA, 15 bp, Homo sapiens
catggatcagctctt

SEQ ID NO: 1149118 - DNA, 15 bp, Homo sapiens
acatggatcagctct

SEQ ID NO: 1149119 - DNA, 15 bp, Homo sapiens
aacatggatcagctc

SEQ ID NO: 1149120 - DNA, 15 bp, Homo sapiens
aaacatggatcagct

SEQ ID NO: 1149121 - DNA, 15 bp, Homo sapiens
aaaacatggatcagc

SEQ ID NO: 1149122 - DNA, 15 bp, Homo sapiens
gaaaacatggatcag

SEQ ID NO: 1149123 - DNA, 15 bp, Homo sapiens
agaaaacatggatca

SEQ ID NO: 1149124 - DNA, 15 bp, Homo sapiens
cagaaaacatggatc

SEQ ID NO: 1149125 - DNA, 15 bp, Homo sapiens
acagaaaacatggat

SEQ ID NO: 1149126 - DNA, 15 bp, Homo sapiens
cacagaaaacatgga

SEQ ID NO: 1149127 - DNA, 15 bp, Homo sapiens
acacagaaaacatgg

SEQ ID NO: 1149128 - DNA, 15 bp, Homo sapiens
aacacagaaaacatg

SEQ ID NO: 1149129 - DNA, 15 bp, Homo sapiens
taacacagaaaacat

SEQ ID NO: 1149130 - DNA, 15 bp, Homo sapiens
ctaacacagaaaaca

SEQ ID NO: 1149131 - DNA, 15 bp, Homo sapiens
tctaacacagaaaac

SEQ ID NO: 1149132 - DNA, 15 bp, Homo sapiens
ttctaacacagaaaa

SEQ ID NO: 1149133 - DNA, 15 bp, Homo sapiens
tttctaacacagaaa

SEQ ID NO: 1149134 - DNA, 15 bp, Homo sapiens
atttctaacacagaa

SEQ ID NO: 1149135 - DNA, 15 bp, Homo sapiens
aatttctaacacaga

SEQ ID NO: 1149136 - DNA, 15 bp, Homo sapiens
aaatttctaacacag

SEQ ID NO: 1149137 - DNA, 15 bp, Homo sapiens
caaatttctaacaca

SEQ ID NO: 1149138 - DNA, 15 bp, Homo sapiens
tcaaatttctaacac

SEQ ID NO: 1149139 - DNA, 15 bp, Homo sapiens
gtcaaatttctaaca

SEQ ID NO: 1149140 - DNA, 15 bp, Homo sapiens
tgtcaaatttctaac

SEQ ID NO: 1149141 - DNA, 15 bp, Homo sapiens
gtgtcaaatttctaa

SEQ ID NO: 1149142 - DNA, 15 bp, Homo sapiens
ggtgtcaaatttcta

SEQ ID NO: 1149143 - DNA, 15 bp, Homo sapiens
gggtgtcaaatttct

SEQ ID NO: 1149144 - DNA, 15 bp, Homo sapiens
agggtgtcaaatttc

SEQ ID NO: 1149145 - DNA, 15 bp, Homo sapiens
cagggtgtcaaattt

SEQ ID NO: 1149146 - DNA, 15 bp, Homo sapiens
ccagggtgtcaaatt

SEQ ID NO: 1149147 - DNA, 15 bp, Homo sapiens
accagggtgtcaaat

SEQ ID NO: 1149148 - DNA, 15 bp, Homo sapiens
aaccagggtgtcaaa

SEQ ID NO: 1149149 - DNA, 15 bp, Homo sapiens
caaccagggtgtcaa

SEQ ID NO: 1149150 - DNA, 15 bp, Homo sapiens
ccaaccagggtgtca

SEQ ID NO: 1149151 - DNA, 15 bp, Homo sapiens
tccaaccagggtgtc

SEQ ID NO: 1149152 - DNA, 15 bp, Homo sapiens
ctccaaccagggtgt

SEQ ID NO: 1149153 - DNA, 15 bp, Homo sapiens
tctccaaccagggtg

SEQ ID NO: 1149154 - DNA, 15 bp, Homo sapiens
ctctccaaccagggt

SEQ ID NO: 1149155 - DNA, 15 bp, Homo sapiens
tctctccaaccaggg

SEQ ID NO: 1149156 - DNA, 15 bp, Homo sapiens
ctctctccaaccagg

SEQ ID NO: 1149157 - DNA, 15 bp, Homo sapiens
tctctctccaaccag

SEQ ID NO: 1149158 - DNA, 15 bp, Homo sapiens
ctctctctccaacca

SEQ ID NO: 1149159 - DNA, 15 bp, Homo sapiens
cctctctctccaacc

SEQ ID NO: 1149160 - DNA, 15 bp, Homo sapiens
ccctctctctccaac

SEQ ID NO: 1149161 - DNA, 15 bp, Homo sapiens
cccctctctctccaa

SEQ ID NO: 1149162 - DNA, 15 bp, Homo sapiens
gcccctctctctcca

SEQ ID NO: 1149163 - DNA, 15 bp, Homo sapiens
ggcccctctctctcc

SEQ ID NO: 1149164 - DNA, 15 bp, Homo sapiens
gggcccctctctctc

SEQ ID NO: 1149165 - DNA, 15 bp, Homo sapiens
tgggcccctctctct

SEQ ID NO: 1149166 - DNA, 15 bp, Homo sapiens
ctgggcccctctctc

SEQ ID NO: 1149167 - DNA, 15 bp, Homo sapiens
gctgggcccctctct

SEQ ID NO: 1149168 - DNA, 15 bp, Homo sapiens
agctgggcccctctc

SEQ ID NO: 1149169 - DNA, 15 bp, Homo sapiens
cagctgggcccctct

SEQ ID NO: 1149170 - DNA, 15 bp, Homo sapiens
tcagctgggcccctc

SEQ ID NO: 1149171 - DNA, 15 bp, Homo sapiens
ctcagctgggcccct

SEQ ID NO: 1149172 - DNA, 15 bp, Homo sapiens
actcagctgggcccc

SEQ ID NO: 1149173 - DNA, 15 bp, Homo sapiens
cactcagctgggccc

SEQ ID NO: 1149174 - DNA, 15 bp, Homo sapiens
ccactcagctgggcc

SEQ ID NO: 1149175 - DNA, 15 bp, Homo sapiens
accactcagctgggc

SEQ ID NO: 1149176 - DNA, 15 bp, Homo sapiens
caccactcagctggg

SEQ ID NO: 1149177 - DNA, 15 bp, Homo sapiens
ccaccactcagctgg

SEQ ID NO: 1149178 - DNA, 15 bp, Homo sapiens
cccaccactcagctg

SEQ ID NO: 1149179 - DNA, 15 bp, Homo sapiens
gcccaccactcagct

SEQ ID NO: 1149180 - DNA, 15 bp, Homo sapiens
tgcccaccactcagc

SEQ ID NO: 1149181 - DNA, 15 bp, Homo sapiens
ctgcccaccactcag

SEQ ID NO: 1149182 - DNA, 15 bp, Homo sapiens
tctgcccaccactca

SEQ ID NO: 1149183 - DNA, 15 bp, Homo sapiens
ttctgcccaccactc

SEQ ID NO: 1149184 - DNA, 15 bp, Homo sapiens
cttctgcccaccact

SEQ ID NO: 1149185 - DNA, 15 bp, Homo sapiens
gcttctgcccaccac

SEQ ID NO: 1149186 - DNA, 15 bp, Homo sapiens
tgcttctgcccacca

SEQ ID NO: 1149187 - DNA, 15 bp, Homo sapiens
ctgcttctgcccacc

SEQ ID NO: 1149188 - DNA, 15 bp, Homo sapiens
tctgcttctgcccac

SEQ ID NO: 1149189 - DNA, 15 bp, Homo sapiens
ctctgcttctgccca

SEQ ID NO: 1149190 - DNA, 15 bp, Homo sapiens
cctctgcttctgccc

SEQ ID NO: 1149191 - DNA, 15 bp, Homo sapiens
tcctctgcttctgcc

SEQ ID NO: 1149192 - DNA, 15 bp, Homo sapiens
atcctctgcttctgc

SEQ ID NO: 1149193 - DNA, 15 bp, Homo sapiens
gatcctctgcttctg

SEQ ID NO: 1149194 - DNA, 15 bp, Homo sapiens
cgatcctctgcttct

SEQ ID NO: 1149195 - DNA, 15 bp, Homo sapiens
gcgatcctctgcttc

SEQ ID NO: 1149196 - DNA, 15 bp, Homo sapiens
ggcgatcctctgctt

SEQ ID NO: 1149197 - DNA, 15 bp, Homo sapiens
tggcgatcctctgct

SEQ ID NO: 1149198 - DNA, 15 bp, Homo sapiens
atggcgatcctctgc

SEQ ID NO: 1149199 - DNA, 15 bp, Homo sapiens
aatggcgatcctctg

SEQ ID NO: 1149200 - DNA, 15 bp, Homo sapiens
caatggcgatcctct

SEQ ID NO: 1149201 - DNA, 15 bp, Homo sapiens
gcaatggcgatcctc

SEQ ID NO: 1149202 - DNA, 15 bp, Homo sapiens
tgcaatggcgatcct

SEQ ID NO: 1149203 - DNA, 15 bp, Homo sapiens
gtgcaatggcgatcc

SEQ ID NO: 1149204 - DNA, 15 bp, Homo sapiens
cgtgcaatggcgatc

SEQ ID NO: 1149205 - DNA, 15 bp, Homo sapiens
acgtgcaatggcgat

SEQ ID NO: 1149206 - DNA, 15 bp, Homo sapiens
cacgtgcaatggcga

SEQ ID NO: 1149207 - DNA, 15 bp, Homo sapiens
gcacgtgcaatggcg

SEQ ID NO: 1149208 - DNA, 15 bp, Homo sapiens
ggcacgtgcaatggc

SEQ ID NO: 1149209 - DNA, 15 bp, Homo sapiens
gggcacgtgcaatgg

SEQ ID NO: 1149210 - DNA, 15 bp, Homo sapiens
agggcacgtgcaatg

SEQ ID NO: 1149211 - DNA, 15 bp, Homo sapiens
cagggcacgtgcaat

SEQ ID NO: 1149212 - DNA, 15 bp, Homo sapiens
ccagggcacgtgcaa

SEQ ID NO: 1149213 - DNA, 15 bp, Homo sapiens
accagggcacgtgca

SEQ ID NO: 1149214 - DNA, 15 bp, Homo sapiens
aaccagggcacgtgc

SEQ ID NO: 1149215 - DNA, 15 bp, Homo sapiens
gaaccagggcacgtg

SEQ ID NO: 1149216 - DNA, 15 bp, Homo sapiens
cgaaccagggcacgt

SEQ ID NO: 1149217 - DNA, 15 bp, Homo sapiens
gcgaaccagggcacg

SEQ ID NO: 1149218 - DNA, 15 bp, Homo sapiens
tgcgaaccagggcac

SEQ ID NO: 1149219 - DNA, 15 bp, Homo sapiens
ttgcgaaccagggca

SEQ ID NO: 1149220 - DNA, 15 bp, Homo sapiens
gttgcgaaccagggc

SEQ ID NO: 1149221 - DNA, 15 bp, Homo sapiens
ggttgcgaaccaggg

SEQ ID NO: 1149222 - DNA, 15 bp, Homo sapiens
gggttgcgaaccagg

SEQ ID NO: 1149223 - DNA, 15 bp, Homo sapiens
ggggttgcgaaccag

SEQ ID NO: 1149224 - DNA, 15 bp, Homo sapiens
tggggttgcgaacca

SEQ ID NO: 1149225 - DNA, 15 bp, Homo sapiens
ttggggttgcgaacc

SEQ ID NO: 1149226 - DNA, 15 bp, Homo sapiens
cttggggttgcgaac

SEQ ID NO: 1149227 - DNA, 15 bp, Homo sapiens
tcttggggttgcgaa

SEQ ID NO: 1149228 - DNA, 15 bp, Homo sapiens
atcttggggttgcga

SEQ ID NO: 1149229 - DNA, 15 bp, Homo sapiens
gatcttggggttgcg

SEQ ID NO: 1149230 - DNA, 15 bp, Homo sapiens
ggatcttggggttgc

SEQ ID NO: 1149231 - DNA, 15 bp, Homo sapiens
aggatcttggggttg

SEQ ID NO: 1149232 - DNA, 15 bp, Homo sapiens
aaggatcttggggtt

SEQ ID NO: 1149233 - DNA, 15 bp, Homo sapiens
gaaggatcttggggt

SEQ ID NO: 1149234 - DNA, 15 bp, Homo sapiens
agaaggatcttgggg

SEQ ID NO: 1149235 - DNA, 15 bp, Homo sapiens
cagaaggatcttggg

SEQ ID NO: 1149236 - DNA, 15 bp, Homo sapiens
gcagaaggatcttgg

SEQ ID NO: 1149237 - DNA, 15 bp, Homo sapiens
agcagaaggatcttg

SEQ ID NO: 1149238 - DNA, 15 bp, Homo sapiens
cagcagaaggatctt

SEQ ID NO: 1149239 - DNA, 15 bp, Homo sapiens
ccagcagaaggatct

SEQ ID NO: 1149240 - DNA, 15 bp, Homo sapiens
tccagcagaaggatc

SEQ ID NO: 1149241 - DNA, 15 bp, Homo sapiens
atccagcagaaggat

SEQ ID NO: 1149242 - DNA, 15 bp, Homo sapiens
catccagcagaagga

SEQ ID NO: 1149243 - DNA, 15 bp, Homo sapiens
tcatccagcagaagg

SEQ ID NO: 1149244 - DNA, 15 bp, Homo sapiens
ctcatccagcagaag

SEQ ID NO: 1149245 - DNA, 15 bp, Homo sapiens
cctcatccagcagaa

SEQ ID NO: 1149246 - DNA, 15 bp, Homo sapiens
gcctcatccagcaga

SEQ ID NO: 1149247 - DNA, 15 bp, Homo sapiens
ggcctcatccagcag

SEQ ID NO: 1149248 - DNA, 15 bp, Homo sapiens
tggcctcatccagca

SEQ ID NO: 1149249 - DNA, 15 bp, Homo sapiens
gtggcctcatccagc

SEQ ID NO: 1149250 - DNA, 15 bp, Homo sapiens
cgtggcctcatccag

SEQ ID NO: 1149251 - DNA, 15 bp, Homo sapiens
acgtggcctcatcca

SEQ ID NO: 1149252 - DNA, 15 bp, Homo sapiens
gacgtggcctcatcc

SEQ ID NO: 1149253 - DNA, 15 bp, Homo sapiens
tgacgtggcctcatc

SEQ ID NO: 1149254 - DNA, 15 bp, Homo sapiens
ctgacgtggcctcat

SEQ ID NO: 1149255 - DNA, 15 bp, Homo sapiens
gctgacgtggcctca

SEQ ID NO: 1149256 - DNA, 15 bp, Homo sapiens
tgctgacgtggcctc

SEQ ID NO: 1149257 - DNA, 15 bp, Homo sapiens
atgctgacgtggcct

SEQ ID NO: 1149258 - DNA, 15 bp, Homo sapiens
aatgctgacgtggcc

SEQ ID NO: 1149259 - DNA, 15 bp, Homo sapiens
caatgctgacgtggc

SEQ ID NO: 1149260 - DNA, 15 bp, Homo sapiens
ccaatgctgacgtgg

SEQ ID NO: 1149261 - DNA, 15 bp, Homo sapiens
tccaatgctgacgtg

SEQ ID NO: 1149262 - DNA, 15 bp, Homo sapiens
gtccaatgctgacgt

SEQ ID NO: 1149263 - DNA, 15 bp, Homo sapiens
tgtccaatgctgacg

SEQ ID NO: 1149264 - DNA, 15 bp, Homo sapiens
gtgtccaatgctgac

SEQ ID NO: 1149265 - DNA, 15 bp, Homo sapiens
tgtgtccaatgctga

SEQ ID NO: 1149266 - DNA, 15 bp, Homo sapiens
ctgtgtccaatgctg

SEQ ID NO: 1149267 - DNA, 15 bp, Homo sapiens
tctgtgtccaatgct

SEQ ID NO: 1149268 - DNA, 15 bp, Homo sapiens
ttctgtgtccaatgc

SEQ ID NO: 1149269 - DNA, 15 bp, Homo sapiens
tttctgtgtccaatg

SEQ ID NO: 1149270 - DNA, 15 bp, Homo sapiens
ctttctgtgtccaat

SEQ ID NO: 1149271 - DNA, 15 bp, Homo sapiens
actttctgtgtccaa

SEQ ID NO: 1149272 - DNA, 15 bp, Homo sapiens
cactttctgtgtcca

SEQ ID NO: 1149273 - DNA, 15 bp, Homo sapiens
tcactttctgtgtcc

SEQ ID NO: 1149274 - DNA, 15 bp, Homo sapiens
ttcactttctgtgtc

SEQ ID NO: 1149275 - DNA, 15 bp, Homo sapiens
cttcactttctgtgt

SEQ ID NO: 1149276 - DNA, 15 bp, Homo sapiens
gcttcactttctgtg

SEQ ID NO: 1149277 - DNA, 15 bp, Homo sapiens
agcttcactttctgt

SEQ ID NO: 1149278 - DNA, 15 bp, Homo sapiens
cagcttcactttctg

SEQ ID NO: 1149279 - DNA, 15 bp, Homo sapiens
tcagcttcactttct

SEQ ID NO: 1149280 - DNA, 15 bp, Homo sapiens
ctcagcttcactttc

SEQ ID NO: 1149281 - DNA, 15 bp, Homo sapiens
cctcagcttcacttt

SEQ ID NO: 1149282 - DNA, 15 bp, Homo sapiens
acctcagcttcactt

SEQ ID NO: 1149283 - DNA, 15 bp, Homo sapiens
tacctcagcttcact

SEQ ID NO: 1149284 - DNA, 15 bp, Homo sapiens
gtacctcagcttcac

SEQ ID NO: 1149285 - DNA, 15 bp, Homo sapiens
tgtacctcagcttca

SEQ ID NO: 1149286 - DNA, 15 bp, Homo sapiens
ctgtacctcagcttc

SEQ ID NO: 1149287 - DNA, 15 bp, Homo sapiens
cctgtacctcagctt

SEQ ID NO: 1149288 - DNA, 15 bp, Homo sapiens
gcctgtacctcagct

SEQ ID NO: 1149289 - DNA, 15 bp, Homo sapiens
tgcctgtacctcagc

SEQ ID NO: 1149290 - DNA, 15 bp, Homo sapiens
ctgcctgtacctcag

SEQ ID NO: 1149291 - DNA, 15 bp, Homo sapiens
gctgcctgtacctca

SEQ ID NO: 1149292 - DNA, 15 bp, Homo sapiens
agctgcctgtacctc

SEQ ID NO: 1149293 - DNA, 15 bp, Homo sapiens
gagctgcctgtacct

SEQ ID NO: 1149294 - DNA, 15 bp, Homo sapiens
agagctgcctgtacc

SEQ ID NO: 1149295 - DNA, 15 bp, Homo sapiens
cagagctgcctgtac

SEQ ID NO: 1149296 - DNA, 15 bp, Homo sapiens
ccagagctgcctgta

SEQ ID NO: 1149297 - DNA, 15 bp, Homo sapiens
tccagagctgcctgt

SEQ ID NO: 1149298 - DNA, 15 bp, Homo sapiens
atccagagctgcctg

SEQ ID NO: 1149299 - DNA, 15 bp, Homo sapiens
tatccagagctgcct

SEQ ID NO: 1149300 - DNA, 15 bp, Homo sapiens
ttatccagagctgcc

SEQ ID NO: 1149301 - DNA, 15 bp, Homo sapiens
cttatccagagctgc

SEQ ID NO: 1149302 - DNA, 15 bp, Homo sapiens
ccttatccagagctg

SEQ ID NO: 1149303 - DNA, 15 bp, Homo sapiens
accttatccagagct

SEQ ID NO: 1149304 - DNA, 15 bp, Homo sapiens
gaccttatccagagc

SEQ ID NO: 1149305 - DNA, 15 bp, Homo sapiens
tgaccttatccagag

SEQ ID NO: 1149306 - DNA, 15 bp, Homo sapiens
ctgaccttatccaga

SEQ ID NO: 1149307 - DNA, 15 bp, Homo sapiens
actgaccttatccag

SEQ ID NO: 1149308 - DNA, 15 bp, Homo sapiens
tactgaccttatcca

SEQ ID NO: 1149309 - DNA, 15 bp, Homo sapiens
ctactgaccttatcc

SEQ ID NO: 1149310 - DNA, 15 bp, Homo sapiens
tctactgaccttatc

SEQ ID NO: 1149311 - DNA, 15 bp, Homo sapiens
gtctactgaccttat

SEQ ID NO: 1149312 - DNA, 15 bp, Homo sapiens
agtctactgacctta

SEQ ID NO: 1149313 - DNA, 15 bp, Homo sapiens
gagtctactgacctt

SEQ ID NO: 1149314 - DNA, 15 bp, Homo sapiens
agagtctactgacct

SEQ ID NO: 1149315 - DNA, 15 bp, Homo sapiens
tagagtctactgacc

SEQ ID NO: 1149316 - DNA, 15 bp, Homo sapiens
ttagagtctactgac

SEQ ID NO: 1149317 - DNA, 15 bp, Homo sapiens
tttagagtctactga

SEQ ID NO: 1149318 - DNA, 15 bp, Homo sapiens
ttttagagtctactg

SEQ ID NO: 1149319 - DNA, 15 bp, Homo sapiens
tttttagagtctact

SEQ ID NO: 1149320 - DNA, 15 bp, Homo sapiens
ctttttagagtctac

SEQ ID NO: 1149321 - DNA, 15 bp, Homo sapiens
gctttttagagtcta

SEQ ID NO: 1149322 - DNA, 15 bp, Homo sapiens
agctttttagagtct

SEQ ID NO: 1149323 - DNA, 15 bp, Homo sapiens
cagctttttagagtc

SEQ ID NO: 1149324 - DNA, 15 bp, Homo sapiens
tcagctttttagagt

SEQ ID NO: 1149325 - DNA, 15 bp, Homo sapiens
ttcagctttttagag

SEQ ID NO: 1149326 - DNA, 15 bp, Homo sapiens
cttcagctttttaga

SEQ ID NO: 1149327 - DNA, 15 bp, Homo sapiens
ccttcagctttttag

SEQ ID NO: 1149328 - DNA, 15 bp, Homo sapiens
tccttcagcttttta

SEQ ID NO: 1149329 - DNA, 15 bp, Homo sapiens
gtccttcagcttttt

SEQ ID NO: 1149330 - DNA, 15 bp, Homo sapiens
ggtccttcagctttt

SEQ ID NO: 1149331 - DNA, 15 bp, Homo sapiens
tggtccttcagcttt

SEQ ID NO: 1149332 - DNA, 15 bp, Homo sapiens
gtggtccttcagctt

SEQ ID NO: 1149333 - DNA, 15 bp, Homo sapiens
ggtggtccttcagct

SEQ ID NO: 1149334 - DNA, 15 bp, Homo sapiens
tggtggtccttcagc

SEQ ID NO: 1149335 - DNA, 15 bp, Homo sapiens
gtggtggtccttcag

SEQ ID NO: 1149336 - DNA, 15 bp, Homo sapiens
tgtggtggtccttca

SEQ ID NO: 1149337 - DNA, 15 bp, Homo sapiens
atgtggtggtccttc

SEQ ID NO: 1149338 - DNA, 15 bp, Homo sapiens
aatgtggtggtcctt

SEQ ID NO: 1149339 - DNA, 15 bp, Homo sapiens
caatgtggtggtcct

SEQ ID NO: 1149340 - DNA, 15 bp, Homo sapiens
tcaatgtggtggtcc

SEQ ID NO: 1149341 - DNA, 15 bp, Homo sapiens
ttcaatgtggtggtc

SEQ ID NO: 1149342 - DNA, 15 bp, Homo sapiens
tttcaatgtggtggt

SEQ ID NO: 1149343 - DNA, 15 bp, Homo sapiens
gtttcaatgtggtgg

SEQ ID NO: 1149344 - DNA, 15 bp, Homo sapiens
ggtttcaatgtggtg

SEQ ID NO: 1149345 - DNA, 15 bp, Homo sapiens
aggtttcaatgtggt

SEQ ID NO: 1149346 - DNA, 15 bp, Homo sapiens
taggtttcaatgtgg

SEQ ID NO: 1149347 - DNA, 15 bp, Homo sapiens
ataggtttcaatgtg

SEQ ID NO: 1149348 - DNA, 15 bp, Homo sapiens
aataggtttcaatgt

SEQ ID NO: 1149349 - DNA, 15 bp, Homo sapiens
caataggtttcaatg

SEQ ID NO: 1149350 - DNA, 15 bp, Homo sapiens
tcaataggtttcaat

SEQ ID NO: 1149351 - DNA, 15 bp, Homo sapiens
ttcaataggtttcaa

SEQ ID NO: 1149352 - DNA, 15 bp, Homo sapiens
cttcaataggtttca

SEQ ID NO: 1149353 - DNA, 15 bp, Homo sapiens
tcttcaataggtttc

SEQ ID NO: 1149354 - DNA, 15 bp, Homo sapiens
atcttcaataggttt

SEQ ID NO: 1149355 - DNA, 15 bp, Homo sapiens
aatcttcaataggtt

SEQ ID NO: 1149356 - DNA, 15 bp, Homo sapiens
gaatcttcaataggt

SEQ ID NO: 1149357 - DNA, 15 bp, Homo sapiens
agaatcttcaatagg

SEQ ID NO: 1149358 - DNA, 15 bp, Homo sapiens
aagaatcttcaatag

SEQ ID NO: 1149359 - DNA, 15 bp, Homo sapiens
caagaatcttcaata

SEQ ID NO: 1149360 - DNA, 15 bp, Homo sapiens
gcaagaatcttcaat

SEQ ID NO: 1149361 - DNA, 15 bp, Homo sapiens
ggcaagaatcttcaa

SEQ ID NO: 1149362 - DNA, 15 bp, Homo sapiens
tggcaagaatcttca

SEQ ID NO: 1149363 - DNA, 15 bp, Homo sapiens
ctggcaagaatcttc

SEQ ID NO: 1149364 - DNA, 15 bp, Homo sapiens
actggcaagaatctt

SEQ ID NO: 1149365 - DNA, 15 bp, Homo sapiens
cactggcaagaatct

SEQ ID NO: 1149366 - DNA, 15 bp, Homo sapiens
gcactggcaagaatc

SEQ ID NO: 1149367 - DNA, 15 bp, Homo sapiens
agcactggcaagaat

SEQ ID NO: 1149368 - DNA, 15 bp, Homo sapiens
aagcactggcaagaa

SEQ ID NO: 1149369 - DNA, 15 bp, Homo sapiens
gaagcactggcaaga

SEQ ID NO: 1149370 - DNA, 15 bp, Homo sapiens
ggaagcactggcaag

SEQ ID NO: 1149371 - DNA, 15 bp, Homo sapiens
cggaagcactggcaa

SEQ ID NO: 1149372 - DNA, 15 bp, Homo sapiens
ccggaagcactggca

SEQ ID NO: 1149373 - DNA, 15 bp, Homo sapiens
tccggaagcactggc

SEQ ID NO: 1149374 - DNA, 15 bp, Homo sapiens
ctccggaagcactgg

SEQ ID NO: 1149375 - DNA, 15 bp, Homo sapiens
actccggaagcactg

SEQ ID NO: 1149376 - DNA, 15 bp, Homo sapiens
gactccggaagcact

SEQ ID NO: 1149377 - DNA, 15 bp, Homo sapiens
agactccggaagcac

SEQ ID NO: 1149378 - DNA, 15 bp, Homo sapiens
cagactccggaagca

SEQ ID NO: 1149379 - DNA, 15 bp, Homo sapiens
ccagactccggaagc

SEQ ID NO: 1149380 - DNA, 15 bp, Homo sapiens
cccagactccggaag

SEQ ID NO: 1149381 - DNA, 15 bp, Homo sapiens
gcccagactccggaa

SEQ ID NO: 1149382 - DNA, 15 bp, Homo sapiens
agcccagactccgga

SEQ ID NO: 1149383 - DNA, 15 bp, Homo sapiens
cagcccagactccgg

SEQ ID NO: 1149384 - DNA, 15 bp, Homo sapiens
tcagcccagactccg

SEQ ID NO: 1149385 - DNA, 15 bp, Homo sapiens
ctcagcccagactcc

SEQ ID NO: 1149386 - DNA, 15 bp, Homo sapiens
tctcagcccagactc

SEQ ID NO: 1149387 - DNA, 15 bp, Homo sapiens
ttctcagcccagact

SEQ ID NO: 1149388 - DNA, 15 bp, Homo sapiens
tttctcagcccagac

SEQ ID NO: 1149389 - DNA, 15 bp, Homo sapiens
gtttctcagcccaga

SEQ ID NO: 1149390 - DNA, 15 bp, Homo sapiens
tgtttctcagcccag

SEQ ID NO: 1149391 - DNA, 15 bp, Homo sapiens
ctgtttctcagccca

SEQ ID NO: 1149392 - DNA, 15 bp, Homo sapiens
tctgtttctcagccc

SEQ ID NO: 1149393 - DNA, 15 bp, Homo sapiens
ttctgtttctcagcc

SEQ ID NO: 1149394 - DNA, 15 bp, Homo sapiens
tttctgtttctcagc

SEQ ID NO: 1149395 - DNA, 15 bp, Homo sapiens
gtttctgtttctcag

SEQ ID NO: 1149396 - DNA, 15 bp, Homo sapiens
tgtttctgtttctca

SEQ ID NO: 1149397 - DNA, 15 bp, Homo sapiens
atgtttctgtttctc

SEQ ID NO: 1149398 - DNA, 15 bp, Homo sapiens
tatgtttctgtttct

SEQ ID NO: 1149399 - DNA, 15 bp, Homo sapiens
ctatgtttctgtttc

SEQ ID NO: 1149400 - DNA, 15 bp, Homo sapiens
gctatgtttctgttt

SEQ ID NO: 1149401 - DNA, 15 bp, Homo sapiens
tgctatgtttctgtt

SEQ ID NO: 1149402 - DNA, 15 bp, Homo sapiens
ttgctatgtttctgt

SEQ ID NO: 1149403 - DNA, 15 bp, Homo sapiens
tttgctatgtttctg

SEQ ID NO: 1149404 - DNA, 15 bp, Homo sapiens
atttgctatgtttct

SEQ ID NO: 1149405 - DNA, 15 bp, Homo sapiens
catttgctatgtttc

SEQ ID NO: 1149406 - DNA, 15 bp, Homo sapiens
ccatttgctatgttt

SEQ ID NO: 1149407 - DNA, 15 bp, Homo sapiens
tccatttgctatgtt

SEQ ID NO: 1149408 - DNA, 15 bp, Homo sapiens
ctccatttgctatgt

SEQ ID NO: 1149409 - DNA, 15 bp, Homo sapiens
gctccatttgctatg

SEQ ID NO: 1149410 - DNA, 15 bp, Homo sapiens
agctccatttgctat

SEQ ID NO: 1149411 - DNA, 15 bp, Homo sapiens
tagctccatttgcta

SEQ ID NO: 1149412 - DNA, 15 bp, Homo sapiens
gtagctccatttgct

SEQ ID NO: 1149413 - DNA, 15 bp, Homo sapiens
ggtagctccatttgc

SEQ ID NO: 1149414 - DNA, 15 bp, Homo sapiens
aggtagctccatttg

SEQ ID NO: 1149415 - DNA, 15 bp, Homo sapiens
gaggtagctccattt

SEQ ID NO: 1149416 - DNA, 15 bp, Homo sapiens
tgaggtagctccatt

SEQ ID NO: 1149417 - DNA, 15 bp, Homo sapiens
atgaggtagctccat

SEQ ID NO: 1149418 - DNA, 15 bp, Homo sapiens
catgaggtagctcca

SEQ ID NO: 1149419 - DNA, 15 bp, Homo sapiens
ccatgaggtagctcc

SEQ ID NO: 1149420 - DNA, 15 bp, Homo sapiens
tccatgaggtagctc

SEQ ID NO: 1149421 - DNA, 15 bp, Homo sapiens
ctccatgaggtagct

SEQ ID NO: 1149422 - DNA, 15 bp, Homo sapiens
gctccatgaggtagc

SEQ ID NO: 1149423 - DNA, 15 bp, Homo sapiens
agctccatgaggtag

SEQ ID NO: 1149424 - DNA, 15 bp, Homo sapiens
cagctccatgaggta

SEQ ID NO: 1149425 - DNA, 15 bp, Homo sapiens
acagctccatgaggt

SEQ ID NO: 1149426 - DNA, 15 bp, Homo sapiens
tacagctccatgagg

SEQ ID NO: 1149427 - DNA, 15 bp, Homo sapiens
atacagctccatgag

SEQ ID NO: 1149428 - DNA, 15 bp, Homo sapiens
aatacagctccatga

SEQ ID NO: 1149429 - DNA, 15 bp, Homo sapiens
caatacagctccatg

SEQ ID NO: 1149430 - DNA, 15 bp, Homo sapiens
tcaatacagctccat

SEQ ID NO: 1149431 - DNA, 15 bp, Homo sapiens
atcaatacagctcca

SEQ ID NO: 1149432 - DNA, 15 bp, Homo sapiens
aatcaatacagctcc

SEQ ID NO: 1149433 - DNA, 15 bp, Homo sapiens
aaatcaatacagctc

SEQ ID NO: 1149434 - DNA, 15 bp, Homo sapiens
gaaatcaatacagct

SEQ ID NO: 1149435 - DNA, 15 bp, Homo sapiens
agaaatcaatacagc

SEQ ID NO: 1149436 - DNA, 15 bp, Homo sapiens
gagaaatcaatacag

SEQ ID NO: 1149437 - DNA, 15 bp, Homo sapiens
ggagaaatcaataca

SEQ ID NO: 1149438 - DNA, 15 bp, Homo sapiens
aggagaaatcaatac

SEQ ID NO: 1149439 - DNA, 15 bp, Homo sapiens
aaggagaaatcaata

SEQ ID NO: 1149440 - DNA, 15 bp, Homo sapiens
aaaggagaaatcaat

SEQ ID NO: 1149441 - DNA, 15 bp, Homo sapiens
gaaaggagaaatcaa

SEQ ID NO: 1149442 - DNA, 15 bp, Homo sapiens
agaaaggagaaatca

SEQ ID NO: 1149443 - DNA, 15 bp, Homo sapiens
cagaaaggagaaatc

SEQ ID NO: 1149444 - DNA, 15 bp, Homo sapiens
acagaaaggagaaat

SEQ ID NO: 1149445 - DNA, 15 bp, Homo sapiens
gacagaaaggagaaa

SEQ ID NO: 1149446 - DNA, 15 bp, Homo sapiens
tgacagaaaggagaa

SEQ ID NO: 1149447 - DNA, 15 bp, Homo sapiens
ctgacagaaaggaga

SEQ ID NO: 1149448 - DNA, 15 bp, Homo sapiens
cctgacagaaaggag

SEQ ID NO: 1149449 - DNA, 15 bp, Homo sapiens
acctgacagaaagga

SEQ ID NO: 1149450 - DNA, 15 bp, Homo sapiens
aacctgacagaaagg

SEQ ID NO: 1149451 - DNA, 15 bp, Homo sapiens
taacctgacagaaag

SEQ ID NO: 1149452 - DNA, 15 bp, Homo sapiens
gtaacctgacagaaa

SEQ ID NO: 1149453 - DNA, 15 bp, Homo sapiens
tgtaacctgacagaa

SEQ ID NO: 1149454 - DNA, 15 bp, Homo sapiens
atgtaacctgacaga

SEQ ID NO: 1149455 - DNA, 15 bp, Homo sapiens
aatgtaacctgacag

SEQ ID NO: 1149456 - DNA, 15 bp, Homo sapiens
caatgtaacctgaca

SEQ ID NO: 1149457 - DNA, 15 bp, Homo sapiens
acaatgtaacctgac

SEQ ID NO: 1149458 - DNA, 15 bp, Homo sapiens
gacaatgtaacctga

SEQ ID NO: 1149459 - DNA, 15 bp, Homo sapiens
agacaatgtaacctg

SEQ ID NO: 1149460 - DNA, 15 bp, Homo sapiens
aagacaatgtaacct

SEQ ID NO: 1149461 - DNA, 15 bp, Homo sapiens
gaagacaatgtaacc

SEQ ID NO: 1149462 - DNA, 15 bp, Homo sapiens
tgaagacaatgtaac

SEQ ID NO: 1149463 - DNA, 15 bp, Homo sapiens
ctgaagacaatgtaa

SEQ ID NO: 1149464 - DNA, 15 bp, Homo sapiens
tctgaagacaatgta

SEQ ID NO: 1149465 - DNA, 15 bp, Homo sapiens
ctctgaagacaatgt

SEQ ID NO: 1149466 - DNA, 15 bp, Homo sapiens
tctctgaagacaatg

SEQ ID NO: 1149467 - DNA, 15 bp, Homo sapiens
gtctctgaagacaat

SEQ ID NO: 1149468 - DNA, 15 bp, Homo sapiens
tgtctctgaagacaa

SEQ ID NO: 1149469 - DNA, 15 bp, Homo sapiens
ctgtctctgaagaca

SEQ ID NO: 1149470 - DNA, 15 bp, Homo sapiens
cctgtctctgaagac

SEQ ID NO: 1149471 - DNA, 15 bp, Homo sapiens
acctgtctctgaaga

SEQ ID NO: 1149472 - DNA, 15 bp, Homo sapiens
cacctgtctctgaag

SEQ ID NO: 1149473 - DNA, 15 bp, Homo sapiens
tcacctgtctctgaa

SEQ ID NO: 1149474 - DNA, 15 bp, Homo sapiens
ttcacctgtctctga

SEQ ID NO: 1149475 - DNA, 15 bp, Homo sapiens
cttcacctgtctctg

SEQ ID NO: 1149476 - DNA, 15 bp, Homo sapiens
ccttcacctgtctct

SEQ ID NO: 1149477 - DNA, 15 bp, Homo sapiens
cccttcacctgtctc

SEQ ID NO: 1149478 - DNA, 15 bp, Homo sapiens
acccttcacctgtct

SEQ ID NO: 1149479 - DNA, 15 bp, Homo sapiens
tacccttcacctgtc

SEQ ID NO: 1149480 - DNA, 15 bp, Homo sapiens
gtacccttcacctgt

SEQ ID NO: 1149481 - DNA, 15 bp, Homo sapiens
agtacccttcacctg

SEQ ID NO: 1149482 - DNA, 15 bp, Homo sapiens
cagtacccttcacct

SEQ ID NO: 1149483 - DNA, 15 bp, Homo sapiens
tcagtacccttcacc

SEQ ID NO: 1149484 - DNA, 15 bp, Homo sapiens
gtcagtacccttcac

SEQ ID NO: 1149485 - DNA, 15 bp, Homo sapiens
agtcagtacccttca

SEQ ID NO: 1149486 - DNA, 15 bp, Homo sapiens
aagtcagtacccttc

SEQ ID NO: 1149487 - DNA, 15 bp, Homo sapiens
caagtcagtaccctt

SEQ ID NO: 1149488 - DNA, 15 bp, Homo sapiens
acaagtcagtaccct

SEQ ID NO: 1149489 - DNA, 15 bp, Homo sapiens
aacaagtcagtaccc

SEQ ID NO: 1149490 - DNA, 15 bp, Homo sapiens
aaacaagtcagtacc

SEQ ID NO: 1149491 - DNA, 15 bp, Homo sapiens
aaaacaagtcagtac

SEQ ID NO: 1149492 - DNA, 15 bp, Homo sapiens
caaaacaagtcagta

SEQ ID NO: 1149493 - DNA, 15 bp, Homo sapiens
tcaaaacaagtcagt

SEQ ID NO: 1149494 - DNA, 15 bp, Homo sapiens
gtcaaaacaagtcag

SEQ ID NO: 1149495 - DNA, 15 bp, Homo sapiens
ggtcaaaacaagtca

SEQ ID NO: 1149496 - DNA, 15 bp, Homo sapiens
tggtcaaaacaagtc

SEQ ID NO: 1149497 - DNA, 15 bp, Homo sapiens
atggtcaaaacaagt

SEQ ID NO: 1149498 - DNA, 15 bp, Homo sapiens
catggtcaaaacaag

SEQ ID NO: 1149499 - DNA, 15 bp, Homo sapiens
ccatggtcaaaacaa

SEQ ID NO: 1149500 - DNA, 15 bp, Homo sapiens
accatggtcaaaaca

SEQ ID NO: 1149501 - DNA, 15 bp, Homo sapiens
caccatggtcaaaac

SEQ ID NO: 1149502 - DNA, 15 bp, Homo sapiens
gcaccatggtcaaaa

SEQ ID NO: 1149503 - DNA, 15 bp, Homo sapiens
tgcaccatggtcaaa

SEQ ID NO: 1149504 - DNA, 15 bp, Homo sapiens
ctgcaccatggtcaa

SEQ ID NO: 1149505 - DNA, 15 bp, Homo sapiens
actgcaccatggtca

SEQ ID NO: 1149506 - DNA, 15 bp, Homo sapiens
cactgcaccatggtc

SEQ ID NO: 1149507 - DNA, 15 bp, Homo sapiens
tcactgcaccatggt

SEQ ID NO: 1149508 - DNA, 15 bp, Homo sapiens
ctcactgcaccatgg

SEQ ID NO: 1149509 - DNA, 15 bp, Homo sapiens
gctcactgcaccatg

SEQ ID NO: 1149510 - DNA, 15 bp, Homo sapiens
ggctcactgcaccat

SEQ ID NO: 1149511 - DNA, 15 bp, Homo sapiens
gggctcactgcacca

SEQ ID NO: 1149512 - DNA, 15 bp, Homo sapiens
tgggctcactgcacc

SEQ ID NO: 1149513 - DNA, 15 bp, Homo sapiens
ctgggctcactgcac

SEQ ID NO: 1149514 - DNA, 15 bp, Homo sapiens
ggatctgggctcact

SEQ ID NO: 1149515 - DNA, 15 bp, Homo sapiens
tggatctgggctcac

SEQ ID NO: 1149516 - DNA, 15 bp, Homo sapiens
ctggatctgggctca

SEQ ID NO: 1149517 - DNA, 15 bp, Homo sapiens
cctggatctgggctc

SEQ ID NO: 1149518 - DNA, 15 bp, Homo sapiens
acctggatctgggct

SEQ ID NO: 1149519 - DNA, 15 bp, Homo sapiens
gacctggatctgggc

SEQ ID NO: 1149520 - DNA, 15 bp, Homo sapiens
agacctggatctggg

SEQ ID NO: 1149521 - DNA, 15 bp, Homo sapiens
aagacctggatctgg

SEQ ID NO: 1149522 - DNA, 15 bp, Homo sapiens
aaagacctggatctg

SEQ ID NO: 1149523 - DNA, 15 bp, Homo sapiens
taaagacctggatct

SEQ ID NO: 1149524 - DNA, 15 bp, Homo sapiens
ataaagacctggatc

SEQ ID NO: 1149525 - DNA, 15 bp, Homo sapiens
tataaagacctggat

SEQ ID NO: 1149526 - DNA, 15 bp, Homo sapiens
ttataaagacctgga

SEQ ID NO: 1149527 - DNA, 15 bp, Homo sapiens
gttataaagacctgg

SEQ ID NO: 1149528 - DNA, 15 bp, Homo sapiens
tgttataaagacctg

SEQ ID NO: 1149529 - DNA, 15 bp, Homo sapiens
ttgttataaagacct

SEQ ID NO: 1149530 - DNA, 15 bp, Homo sapiens
cttgttataaagacc

SEQ ID NO: 1149531 - DNA, 15 bp, Homo sapiens
gcttgttataaagac

SEQ ID NO: 1149532 - DNA, 15 bp, Homo sapiens
ggcttgttataaaga

SEQ ID NO: 1149533 - DNA, 15 bp, Homo sapiens
tggcttgttataaag

SEQ ID NO: 1149534 - DNA, 15 bp, Homo sapiens
atggcttgttataaa

SEQ ID NO: 1149535 - DNA, 15 bp, Homo sapiens
aatggcttgttataa

SEQ ID NO: 1149536 - DNA, 15 bp, Homo sapiens
aaatggcttgttata

SEQ ID NO: 1149537 - DNA, 15 bp, Homo sapiens
taaatggcttgttat

SEQ ID NO: 1149538 - DNA, 15 bp, Homo sapiens
ctaaatggcttgtta

SEQ ID NO: 1149539 - DNA, 15 bp, Homo sapiens
gctaaatggcttgtt

SEQ ID NO: 1149540 - DNA, 15 bp, Homo sapiens
agctaaatggcttgt

SEQ ID NO: 1149541 - DNA, 15 bp, Homo sapiens
aagctaaatggcttg

SEQ ID NO: 1149542 - DNA, 15 bp, Homo sapiens
aaagctaaatggctt

SEQ ID NO: 1149543 - DNA, 15 bp, Homo sapiens
caaagctaaatggct

SEQ ID NO: 1149544 - DNA, 15 bp, Homo sapiens
acaaagctaaatggc

SEQ ID NO: 1149545 - DNA, 15 bp, Homo sapiens
aacaaagctaaatgg

SEQ ID NO: 1149546 - DNA, 15 bp, Homo sapiens
aaacaaagctaaatg

SEQ ID NO: 1149547 - DNA, 15 bp, Homo sapiens
taaacaaagctaaat

SEQ ID NO: 1149548 - DNA, 15 bp, Homo sapiens
ataaacaaagctaaa

SEQ ID NO: 1149549 - DNA, 15 bp, Homo sapiens
aataaacaaagctaa

SEQ ID NO: 1149550 - DNA, 15 bp, Homo sapiens
aaataaacaaagcta

SEQ ID NO: 1149551 - DNA, 15 bp, Homo sapiens
gaaataaacaaagct

SEQ ID NO: 1149552 - DNA, 15 bp, Homo sapiens
agaaataaacaaagc

SEQ ID NO: 1149553 - DNA, 15 bp, Homo sapiens
aagaaataaacaaag

SEQ ID NO: 1149554 - DNA, 15 bp, Homo sapiens
caagaaataaacaaa

SEQ ID NO: 1149555 - DNA, 15 bp, Homo sapiens
gcaagaaataaacaa

SEQ ID NO: 1149556 - DNA, 15 bp, Homo sapiens
tgcaagaaataaaca

SEQ ID NO: 1149557 - DNA, 15 bp, Homo sapiens
gtgcaagaaataaac

SEQ ID NO: 1149558 - DNA, 15 bp, Homo sapiens
tgtgcaagaaataaa

SEQ ID NO: 1149559 - DNA, 15 bp, Homo sapiens
atgtgcaagaaataa

SEQ ID NO: 1149560 - DNA, 15 bp, Homo sapiens
catgtgcaagaaata

SEQ ID NO: 1149561 - DNA, 15 bp, Homo sapiens
ccatgtgcaagaaat

SEQ ID NO: 1149562 - DNA, 15 bp, Homo sapiens
cccatgtgcaagaaa

SEQ ID NO: 1149563 - DNA, 15 bp, Homo sapiens
gcccatgtgcaagaa

SEQ ID NO: 1149564 - DNA, 15 bp, Homo sapiens
agcccatgtgcaaga

SEQ ID NO: 1149565 - DNA, 15 bp, Homo sapiens
tagcccatgtgcaag

SEQ ID NO: 1149566 - DNA, 15 bp, Homo sapiens
atagcccatgtgcaa

SEQ ID NO: 1149567 - DNA, 15 bp, Homo sapiens
aatagcccatgtgca

SEQ ID NO: 1149568 - DNA, 15 bp, Homo sapiens
caatagcccatgtgc

SEQ ID NO: 1149569 - DNA, 15 bp, Homo sapiens
gcaatagcccatgtg

SEQ ID NO: 1149570 - DNA, 15 bp, Homo sapiens
tgcaatagcccatgt

SEQ ID NO: 1149571 - DNA, 15 bp, Homo sapiens
ttgcaatagcccatg

SEQ ID NO: 1149572 - DNA, 15 bp, Homo sapiens
cttgcaatagcccat

SEQ ID NO: 1149573 - DNA, 15 bp, Homo sapiens
tcttgcaatagccca

SEQ ID NO: 1149574 - DNA, 15 bp, Homo sapiens
gtcttgcaatagccc

SEQ ID NO: 1149575 - DNA, 15 bp, Homo sapiens
agtcttgcaatagcc

SEQ ID NO: 1149576 - DNA, 15 bp, Homo sapiens
tagtcttgcaatagc

SEQ ID NO: 1149577 - DNA, 15 bp, Homo sapiens
gtagtcttgcaatag

SEQ ID NO: 1149578 - DNA, 15 bp, Homo sapiens
agtagtcttgcaata

SEQ ID NO: 1149579 - DNA, 15 bp, Homo sapiens
aagtagtcttgcaat

SEQ ID NO: 1149580 - DNA, 15 bp, Homo sapiens
aaagtagtcttgcaa

SEQ ID NO: 1149581 - DNA, 15 bp, Homo sapiens
aaaagtagtcttgca

SEQ ID NO: 1149582 - DNA, 15 bp, Homo sapiens
caaaagtagtcttgc

SEQ ID NO: 1149583 - DNA, 15 bp, Homo sapiens
tcaaaagtagtcttg

SEQ ID NO: 1149584 - DNA, 15 bp, Homo sapiens
gtcaaaagtagtctt

SEQ ID NO: 1149585 - DNA, 15 bp, Homo sapiens
ggtcaaaagtagtct

SEQ ID NO: 1149586 - DNA, 15 bp, Homo sapiens
tggtcaaaagtagtc

SEQ ID NO: 1149587 - DNA, 15 bp, Homo sapiens
ttggtcaaaagtagt

SEQ ID NO: 1149588 - DNA, 15 bp, Homo sapiens
tttggtcaaaagtag

SEQ ID NO: 1149589 - DNA, 15 bp, Homo sapiens
ttttggtcaaaagta

SEQ ID NO: 1149590 - DNA, 15 bp, Homo sapiens
cttttggtcaaaagt

SEQ ID NO: 1149591 - DNA, 15 bp, Homo sapiens
acttttggtcaaaag

SEQ ID NO: 1149592 - DNA, 15 bp, Homo sapiens
tacttttggtcaaaa

SEQ ID NO: 1149593 - DNA, 15 bp, Homo sapiens
ctacttttggtcaaa

SEQ ID NO: 1149594 - DNA, 15 bp, Homo sapiens
actacttttggtcaa

SEQ ID NO: 1149595 - DNA, 15 bp, Homo sapiens
gactacttttggtca

SEQ ID NO: 1149596 - DNA, 15 bp, Homo sapiens
tgactacttttggtc

SEQ ID NO: 1149597 - DNA, 15 bp, Homo sapiens
atgactacttttggt

SEQ ID NO: 1149598 - DNA, 15 bp, Homo sapiens
catgactacttttgg

SEQ ID NO: 1149599 - DNA, 15 bp, Homo sapiens
acatgactacttttg

SEQ ID NO: 1149600 - DNA, 15 bp, Homo sapiens
aacatgactactttt

SEQ ID NO: 1149601 - DNA, 15 bp, Homo sapiens
taacatgactacttt

SEQ ID NO: 1149602 - DNA, 15 bp, Homo sapiens
ttaacatgactactt

SEQ ID NO: 1149603 - DNA, 15 bp, Homo sapiens
tttaacatgactact

SEQ ID NO: 1149604 - DNA, 15 bp, Homo sapiens
ttttaacatgactac

SEQ ID NO: 1149605 - DNA, 15 bp, Homo sapiens
attttaacatgacta

SEQ ID NO: 1149606 - DNA, 15 bp, Homo sapiens
tattttaacatgact

SEQ ID NO: 1149607 - DNA, 15 bp, Homo sapiens
atattttaacatgac

SEQ ID NO: 1149608 - DNA, 15 bp, Homo sapiens
tatattttaacatga

SEQ ID NO: 1149609 - DNA, 15 bp, Homo sapiens
atatattttaacatg

SEQ ID NO: 1149610 - DNA, 15 bp, Homo sapiens
tatatattttaacat

SEQ ID NO: 1149611 - DNA, 15 bp, Homo sapiens
atatatattttaaca

SEQ ID NO: 1149612 - DNA, 15 bp, Homo sapiens
tatatatattttaac

SEQ ID NO: 1149613 - DNA, 15 bp, Homo sapiens
atatatatattttaa

SEQ ID NO: 1149614 - DNA, 15 bp, Homo sapiens
aatatatatatttta

SEQ ID NO: 1149615 - DNA, 15 bp, Homo sapiens
aaatatatatatttt

SEQ ID NO: 1149616 - DNA, 15 bp, Homo sapiens
aaaatatatatattt

SEQ ID NO: 1149617 - DNA, 15 bp, Homo sapiens
aaaaatatatatatt

SEQ ID NO: 1149618 - DNA, 15 bp, Homo sapiens
taaaaatatatatat

SEQ ID NO: 1149619 - DNA, 15 bp, Homo sapiens
ttaaaaatatatata

SEQ ID NO: 1149620 - DNA, 15 bp, Homo sapiens
tttaaaaatatatat

SEQ ID NO: 1149621 - DNA, 15 bp, Homo sapiens
atttaaaaatatata

SEQ ID NO: 1149622 - DNA, 15 bp, Homo sapiens
gatttaaaaatatat

SEQ ID NO: 1149623 - DNA, 15 bp, Homo sapiens
ggatttaaaaatata

SEQ ID NO: 1149624 - DNA, 15 bp, Homo sapiens
cggatttaaaaatat

SEQ ID NO: 1149625 - DNA, 15 bp, Homo sapiens
ccggatttaaaaata

SEQ ID NO: 1149626 - DNA, 15 bp, Homo sapiens
accggatttaaaaat

SEQ ID NO: 1149627 - DNA, 15 bp, Homo sapiens
aaccggatttaaaaa

SEQ ID NO: 1149628 - DNA, 15 bp, Homo sapiens
taaccggatttaaaa

SEQ ID NO: 1149629 - DNA, 15 bp, Homo sapiens
gtaaccggatttaaa

SEQ ID NO: 1149630 - DNA, 15 bp, Homo sapiens
ggtaaccggatttaa

SEQ ID NO: 1149631 - DNA, 15 bp, Homo sapiens
gggtaaccggattta

SEQ ID NO: 1149632 - DNA, 15 bp, Homo sapiens
tgggtaaccggattt

SEQ ID NO: 1149633 - DNA, 15 bp, Homo sapiens
ctgggtaaccggatt

SEQ ID NO: 1149634 - DNA, 15 bp, Homo sapiens
tctgggtaaccggat

SEQ ID NO: 1149635 - DNA, 15 bp, Homo sapiens
gtctgggtaaccgga

SEQ ID NO: 1149636 - DNA, 15 bp, Homo sapiens
tgtctgggtaaccgg

SEQ ID NO: 1149637 - DNA, 15 bp, Homo sapiens
gtgtctgggtaaccg

SEQ ID NO: 1149638 - DNA, 15 bp, Homo sapiens
agtgtctgggtaacc

SEQ ID NO: 1149639 - DNA, 15 bp, Homo sapiens
cagtgtctgggtaac

SEQ ID NO: 1149640 - DNA, 15 bp, Homo sapiens
ccagtgtctgggtaa

SEQ ID NO: 1149641 - DNA, 15 bp, Homo sapiens
accagtgtctgggta

SEQ ID NO: 1149642 - DNA, 15 bp, Homo sapiens
gaccagtgtctgggt

SEQ ID NO: 1149643 - DNA, 15 bp, Homo sapiens
ggaccagtgtctggg

SEQ ID NO: 1149644 - DNA, 15 bp, Homo sapiens
tggaccagtgtctgg

SEQ ID NO: 1149645 - DNA, 15 bp, Homo sapiens
ctggaccagtgtctg

SEQ ID NO: 1149646 - DNA, 15 bp, Homo sapiens
gctggaccagtgtct

SEQ ID NO: 1149647 - DNA, 15 bp, Homo sapiens
agctggaccagtgtc

SEQ ID NO: 1149648 - DNA, 15 bp, Homo sapiens
cagctggaccagtgt

SEQ ID NO: 1149649 - DNA, 15 bp, Homo sapiens
tcagctggaccagtg

SEQ ID NO: 1149650 - DNA, 15 bp, Homo sapiens
ttcagctggaccagt

SEQ ID NO: 1149651 - DNA, 15 bp, Homo sapiens
tttcagctggaccag

SEQ ID NO: 1149652 - DNA, 15 bp, Homo sapiens
ttttcagctggacca

SEQ ID NO: 1149653 - DNA, 15 bp, Homo sapiens
gttttcagctggacc

SEQ ID NO: 1149654 - DNA, 15 bp, Homo sapiens
agttttcagctggac

SEQ ID NO: 1149655 - DNA, 15 bp, Homo sapiens
tagttttcagctgga

SEQ ID NO: 1149656 - DNA, 15 bp, Homo sapiens
ttagttttcagctgg

SEQ ID NO: 1149657 - DNA, 15 bp, Homo sapiens
attagttttcagctg

SEQ ID NO: 1149658 - DNA, 15 bp, Homo sapiens
aattagttttcagct

SEQ ID NO: 1149659 - DNA, 15 bp, Homo sapiens
gaattagttttcagc

SEQ ID NO: 1149660 - DNA, 15 bp, Homo sapiens
tgaattagttttcag

SEQ ID NO: 1149661 - DNA, 15 bp, Homo sapiens
ctgaattagttttca

SEQ ID NO: 1149662 - DNA, 15 bp, Homo sapiens
tctgaattagttttc

SEQ ID NO: 1149663 - DNA, 15 bp, Homo sapiens
ttctgaattagtttt

SEQ ID NO: 1149664 - DNA, 15 bp, Homo sapiens
attctgaattagttt

SEQ ID NO: 1149665 - DNA, 15 bp, Homo sapiens
tattctgaattagtt

SEQ ID NO: 1149666 - DNA, 15 bp, Homo sapiens
gtattctgaattagt

SEQ ID NO: 1149667 - DNA, 15 bp, Homo sapiens
agtattctgaattag

SEQ ID NO: 1149668 - DNA, 15 bp, Homo sapiens
gagtattctgaatta

SEQ ID NO: 1149669 - DNA, 15 bp, Homo sapiens
tgagtattctgaatt

SEQ ID NO: 1149670 - DNA, 15 bp, Homo sapiens
gtgagtattctgaat

SEQ ID NO: 1149671 - DNA, 15 bp, Homo sapiens
ggtgagtattctgaa

SEQ ID NO: 1149672 - DNA, 15 bp, Homo sapiens
gggtgagtattctga

SEQ ID NO: 1149673 - DNA, 15 bp, Homo sapiens
agggtgagtattctg

SEQ ID NO: 1149674 - DNA, 15 bp, Homo sapiens
tagggtgagtattct

SEQ ID NO: 1149675 - DNA, 15 bp, Homo sapiens
atagggtgagtattc

SEQ ID NO: 1149676 - DNA, 15 bp, Homo sapiens
aatagggtgagtatt

SEQ ID NO: 1149677 - DNA, 15 bp, Homo sapiens
aaatagggtgagtat

SEQ ID NO: 1149678 - DNA, 15 bp, Homo sapiens
aaaatagggtgagta

SEQ ID NO: 1149679 - DNA, 15 bp, Homo sapiens
caaaatagggtgagt

SEQ ID NO: 1149680 - DNA, 15 bp, Homo sapiens
acaaaatagggtgag

SEQ ID NO: 1149681 - DNA, 15 bp, Homo sapiens
tacaaaatagggtga

SEQ ID NO: 1149682 - DNA, 15 bp, Homo sapiens
ctacaaaatagggtg

SEQ ID NO: 1149683 - DNA, 15 bp, Homo sapiens
cctacaaaatagggt

SEQ ID NO: 1149684 - DNA, 15 bp, Homo sapiens
gcctacaaaataggg

SEQ ID NO: 1149685 - DNA, 15 bp, Homo sapiens
tgcctacaaaatagg

SEQ ID NO: 1149686 - DNA, 15 bp, Homo sapiens
ctgcctacaaaatag

SEQ ID NO: 1149687 - DNA, 15 bp, Homo sapiens
actgcctacaaaata

SEQ ID NO: 1149688 - DNA, 15 bp, Homo sapiens
cactgcctacaaaat

SEQ ID NO: 1149689 - DNA, 15 bp, Homo sapiens
tcactgcctacaaaa

SEQ ID NO: 1149690 - DNA, 15 bp, Homo sapiens
gtcactgcctacaaa

SEQ ID NO: 1149691 - DNA, 15 bp, Homo sapiens
tgtcactgcctacaa

SEQ ID NO: 1149692 - DNA, 15 bp, Homo sapiens
atgtcactgcctaca

SEQ ID NO: 1149693 - DNA, 15 bp, Homo sapiens
gatgtcactgcctac

SEQ ID NO: 1149694 - DNA, 15 bp, Homo sapiens
tgatgtcactgccta

SEQ ID NO: 1149695 - DNA, 15 bp, Homo sapiens
atgatgtcactgcct

SEQ ID NO: 1149696 - DNA, 15 bp, Homo sapiens
gatgatgtcactgcc

SEQ ID NO: 1149697 - DNA, 15 bp, Homo sapiens
agatgatgtcactgc

SEQ ID NO: 1149698 - DNA, 15 bp, Homo sapiens
aagatgatgtcactg

SEQ ID NO: 1149699 - DNA, 15 bp, Homo sapiens
aaagatgatgtcact

SEQ ID NO: 1149700 - DNA, 15 bp, Homo sapiens
taaagatgatgtcac

SEQ ID NO: 1149701 - DNA, 15 bp, Homo sapiens
ataaagatgatgtca

SEQ ID NO: 1149702 - DNA, 15 bp, Homo sapiens
gataaagatgatgtc

SEQ ID NO: 1149703 - DNA, 15 bp, Homo sapiens
agataaagatgatgt

SEQ ID NO: 1149704 - DNA, 15 bp, Homo sapiens
tagataaagatgatg

SEQ ID NO: 1149705 - DNA, 15 bp, Homo sapiens
atagataaagatgat

SEQ ID NO: 1149706 - DNA, 15 bp, Homo sapiens
aatagataaagatga

SEQ ID NO: 1149707 - DNA, 15 bp, Homo sapiens
gaatagataaagatg

SEQ ID NO: 1149708 - DNA, 15 bp, Homo sapiens
tgaatagataaagat

SEQ ID NO: 1149709 - DNA, 15 bp, Homo sapiens
atgaatagataaaga

SEQ ID NO: 1149710 - DNA, 15 bp, Homo sapiens
catgaatagataaag

SEQ ID NO: 1149711 - DNA, 15 bp, Homo sapiens
acatgaatagataaa

SEQ ID NO: 1149712 - DNA, 15 bp, Homo sapiens
tacatgaatagataa

SEQ ID NO: 1149713 - DNA, 15 bp, Homo sapiens
ctacatgaatagata

SEQ ID NO: 1149714 - DNA, 15 bp, Homo sapiens
cctacatgaatagat

SEQ ID NO: 1149715 - DNA, 15 bp, Homo sapiens
acctacatgaataga

SEQ ID NO: 1149716 - DNA, 15 bp, Homo sapiens
cacctacatgaatag

SEQ ID NO: 1149717 - DNA, 15 bp, Homo sapiens
tcacctacatgaata

SEQ ID NO: 1149718 - DNA, 15 bp, Homo sapiens
gtcacctacatgaat

SEQ ID NO: 1149719 - DNA, 15 bp, Homo sapiens
ggtcacctacatgaa

SEQ ID NO: 1149720 - DNA, 15 bp, Homo sapiens
tggtcacctacatga

SEQ ID NO: 1149721 - DNA, 15 bp, Homo sapiens
ctggtcacctacatg

SEQ ID NO: 1149722 - DNA, 15 bp, Homo sapiens
cctggtcacctacat

SEQ ID NO: 1149723 - DNA, 15 bp, Homo sapiens
acctggtcacctaca

SEQ ID NO: 1149724 - DNA, 15 bp, Homo sapiens
cacctggtcacctac

SEQ ID NO: 1149725 - DNA, 15 bp, Homo sapiens
gcacctggtcaccta

SEQ ID NO: 1149726 - DNA, 15 bp, Homo sapiens
agcacctggtcacct

SEQ ID NO: 1149727 - DNA, 15 bp, Homo sapiens
aagcacctggtcacc

SEQ ID NO: 1149728 - DNA, 15 bp, Homo sapiens
aaagcacctggtcac

SEQ ID NO: 1149729 - DNA, 15 bp, Homo sapiens
aaaagcacctggtca

SEQ ID NO: 1149730 - DNA, 15 bp, Homo sapiens
gaaaagcacctggtc

SEQ ID NO: 1149731 - DNA, 15 bp, Homo sapiens
agaaaagcacctggt

SEQ ID NO: 1149732 - DNA, 15 bp, Homo sapiens
cagaaaagcacctgg

SEQ ID NO: 1149733 - DNA, 15 bp, Homo sapiens
ccagaaaagcacctg

SEQ ID NO: 1149734 - DNA, 15 bp, Homo sapiens
tccagaaaagcacct

SEQ ID NO: 1149735 - DNA, 15 bp, Homo sapiens
ttccagaaaagcacc

SEQ ID NO: 1149736 - DNA, 15 bp, Homo sapiens
tttccagaaaagcac

SEQ ID NO: 1149737 - DNA, 15 bp, Homo sapiens
atttccagaaaagca

SEQ ID NO: 1149738 - DNA, 15 bp, Homo sapiens
tatttccagaaaagc

SEQ ID NO: 1149739 - DNA, 15 bp, Homo sapiens
ttatttccagaaaag

SEQ ID NO: 1149740 - DNA, 15 bp, Homo sapiens
tttatttccagaaaa

SEQ ID NO: 1149741 - DNA, 15 bp, Homo sapiens
ctttatttccagaaa

SEQ ID NO: 1149742 - DNA, 15 bp, Homo sapiens
actttatttccagaa

SEQ ID NO: 1149743 - DNA, 15 bp, Homo sapiens
aactttatttccaga

SEQ ID NO: 1149744 - DNA, 15 bp, Homo sapiens
gaactttatttccag

SEQ ID NO: 1149745 - DNA, 15 bp, Homo sapiens
tgaactttatttcca

SEQ ID NO: 1149746 - DNA, 15 bp, Homo sapiens
ttgaactttatttcc

SEQ ID NO: 1149747 - DNA, 15 bp, Homo sapiens
gttgaactttatttc

SEQ ID NO: 1149748 - DNA, 15 bp, Homo sapiens
agttgaactttattt

SEQ ID NO: 1149749 - DNA, 15 bp, Homo sapiens
gagttgaactttatt

SEQ ID NO: 1149750 - DNA, 15 bp, Homo sapiens
agagttgaactttat

SEQ ID NO: 1149751 - DNA, 15 bp, Homo sapiens
cagagttgaacttta

SEQ ID NO: 1149752 - DNA, 15 bp, Homo sapiens
acagagttgaacttt

SEQ ID NO: 1149753 - DNA, 15 bp, Homo sapiens
tacagagttgaactt

SEQ ID NO: 1149754 - DNA, 15 bp, Homo sapiens
gtacagagttgaact

SEQ ID NO: 1149755 - DNA, 15 bp, Homo sapiens
agtacagagttgaac

SEQ ID NO: 1149756 - DNA, 15 bp, Homo sapiens
aagtacagagttgaa

SEQ ID NO: 1149757 - DNA, 15 bp, Homo sapiens
caagtacagagttga

SEQ ID NO: 1149758 - DNA, 15 bp, Homo sapiens
acaagtacagagttg

SEQ ID NO: 1149759 - DNA, 15 bp, Homo sapiens
gacaagtacagagtt

SEQ ID NO: 1149760 - DNA, 15 bp, Homo sapiens
agacaagtacagagt

SEQ ID NO: 1149761 - DNA, 15 bp, Homo sapiens
tagacaagtacagag

SEQ ID NO: 1149762 - DNA, 15 bp, Homo sapiens
ttagacaagtacaga

SEQ ID NO: 1149763 - DNA, 15 bp, Homo sapiens
cttagacaagtacag

SEQ ID NO: 1149764 - DNA, 15 bp, Homo sapiens
gcttagacaagtaca

SEQ ID NO: 1149765 - DNA, 15 bp, Homo sapiens
tgcttagacaagtac

SEQ ID NO: 1149766 - DNA, 15 bp, Homo sapiens
atgcttagacaagta

SEQ ID NO: 1149767 - DNA, 15 bp, Homo sapiens
tatgcttagacaagt

SEQ ID NO: 1149768 - DNA, 15 bp, Homo sapiens
atatgcttagacaag

SEQ ID NO: 1149769 - DNA, 15 bp, Homo sapiens
tatatgcttagacaa

SEQ ID NO: 1149770 - DNA, 15 bp, Homo sapiens
ttatatgcttagaca

SEQ ID NO: 1149771 - DNA, 15 bp, Homo sapiens
tttatatgcttagac

SEQ ID NO: 1149772 - DNA, 15 bp, Homo sapiens
atttatatgcttaga

SEQ ID NO: 1149773 - DNA, 15 bp, Homo sapiens
tatttatatgcttag

SEQ ID NO: 1149774 - DNA, 15 bp, Homo sapiens
ttatttatatgctta

SEQ ID NO: 1149775 - DNA, 15 bp, Homo sapiens
tttatttatatgctt

SEQ ID NO: 1149776 - DNA, 15 bp, Homo sapiens
gtttatttatatgct

SEQ ID NO: 1149777 - DNA, 15 bp, Homo sapiens
tgtttatttatatgc

SEQ ID NO: 1149778 - DNA, 15 bp, Homo sapiens
ttgtttatttatatg

SEQ ID NO: 1149779 - DNA, 15 bp, Homo sapiens
attgtttatttatat

SEQ ID NO: 1149780 - DNA, 15 bp, Homo sapiens
aattgtttatttata

SEQ ID NO: 1149781 - DNA, 15 bp, Homo sapiens
gaattgtttatttat

SEQ ID NO: 1149782 - DNA, 15 bp, Homo sapiens
tgaattgtttattta

SEQ ID NO: 1149783 - DNA, 15 bp, Homo sapiens
aatgaattgtttatt

SEQ ID NO: 1149784 - DNA, 15 bp, Homo sapiens
aaatgaattgtttat

SEQ ID NO: 1149785 - DNA, 15 bp, Homo sapiens
aaaatgaattgttta

SEQ ID NO: 1149786 - DNA, 15 bp, Homo sapiens
taaaatgaattgttt

SEQ ID NO: 1149787 - DNA, 15 bp, Homo sapiens
ttaaaatgaattgtt

SEQ ID NO: 1149788 - DNA, 15 bp, Homo sapiens
cttaaaatgaattgt

SEQ ID NO: 1149789 - DNA, 15 bp, Homo sapiens
ccttaaaatgaattg

SEQ ID NO: 1149790 - DNA, 15 bp, Homo sapiens
cccttaaaatgaatt

SEQ ID NO: 1149791 - DNA, 15 bp, Homo sapiens
acccttaaaatgaat

SEQ ID NO: 1149792 - DNA, 15 bp, Homo sapiens
cacccttaaaatgaa

SEQ ID NO: 1149793 - DNA, 15 bp, Homo sapiens
gcacccttaaaatga

SEQ ID NO: 1149794 - DNA, 15 bp, Homo sapiens
agcacccttaaaatg

SEQ ID NO: 1149795 - DNA, 15 bp, Homo sapiens
cagcacccttaaaat

SEQ ID NO: 1149796 - DNA, 15 bp, Homo sapiens
tcagcacccttaaaa

SEQ ID NO: 1149797 - DNA, 15 bp, Homo sapiens
ctcagcacccttaaa

SEQ ID NO: 1149798 - DNA, 15 bp, Homo sapiens
actcagcacccttaa

SEQ ID NO: 1149799 - DNA, 15 bp, Homo sapiens
aactcagcaccctta

SEQ ID NO: 1149800 - DNA, 15 bp, Homo sapiens
gaactcagcaccctt

SEQ ID NO: 1149801 - DNA, 15 bp, Homo sapiens
tgaactcagcaccct

SEQ ID NO: 1149802 - DNA, 15 bp, Homo sapiens
atgaactcagcaccc

SEQ ID NO: 1149803 - DNA, 15 bp, Homo sapiens
gatgaactcagcacc

SEQ ID NO: 1149804 - DNA, 15 bp, Homo sapiens
agatgaactcagcac

SEQ ID NO: 1149805 - DNA, 15 bp, Homo sapiens
cagatgaactcagca

SEQ ID NO: 1149806 - DNA, 15 bp, Homo sapiens
acagatgaactcagc

SEQ ID NO: 1149807 - DNA, 15 bp, Homo sapiens
gacagatgaactcag

SEQ ID NO: 1149808 - DNA, 15 bp, Homo sapiens
ggacagatgaactca

SEQ ID NO: 1149809 - DNA, 15 bp, Homo sapiens
tggacagatgaactc

SEQ ID NO: 1149810 - DNA, 15 bp, Homo sapiens
ctggacagatgaact

SEQ ID NO: 1149811 - DNA, 15 bp, Homo sapiens
gctggacagatgaac

SEQ ID NO: 1149812 - DNA, 15 bp, Homo sapiens
agctggacagatgaa

SEQ ID NO: 1149813 - DNA, 15 bp, Homo sapiens
gagctggacagatga

SEQ ID NO: 1149814 - DNA, 15 bp, Homo sapiens
tgagctggacagatg

SEQ ID NO: 1149815 - DNA, 15 bp, Homo sapiens
ctgagctggacagat

SEQ ID NO: 1149816 - DNA, 15 bp, Homo sapiens
tctgagctggacaga

SEQ ID NO: 1149817 - DNA, 15 bp, Homo sapiens
atctgagctggacag

SEQ ID NO: 1149818 - DNA, 15 bp, Homo sapiens
tatctgagctggaca

SEQ ID NO: 1149819 - DNA, 15 bp, Homo sapiens
atatctgagctggac

SEQ ID NO: 1149820 - DNA, 15 bp, Homo sapiens
aatatctgagctgga

SEQ ID NO: 1149821 - DNA, 15 bp, Homo sapiens
aaatatctgagctgg

SEQ ID NO: 1149822 - DNA, 15 bp, Homo sapiens
gaaatatctgagctg

SEQ ID NO: 1149823 - DNA, 15 bp, Homo sapiens
agaaatatctgagct

SEQ ID NO: 1149824 - DNA, 15 bp, Homo sapiens
tagaaatatctgagc

SEQ ID NO: 1149825 - DNA, 15 bp, Homo sapiens
ttagaaatatctgag

SEQ ID NO: 1149826 - DNA, 15 bp, Homo sapiens
cttagaaatatctga

SEQ ID NO: 1149827 - DNA, 15 bp, Homo sapiens
acttagaaatatctg

SEQ ID NO: 1149828 - DNA, 15 bp, Homo sapiens
gacttagaaatatct

SEQ ID NO: 1149829 - DNA, 15 bp, Homo sapiens
agacttagaaatatc

SEQ ID NO: 1149830 - DNA, 15 bp, Homo sapiens
gagacttagaaatat

SEQ ID NO: 1149831 - DNA, 15 bp, Homo sapiens
agagacttagaaata

SEQ ID NO: 1149832 - DNA, 15 bp, Homo sapiens
gagagacttagaaat

SEQ ID NO: 1149833 - DNA, 15 bp, Homo sapiens
tgagagacttagaaa

SEQ ID NO: 1149834 - DNA, 15 bp, Homo sapiens
atgagagacttagaa

SEQ ID NO: 1149835 - DNA, 15 bp, Homo sapiens
aatgagagacttaga

SEQ ID NO: 1149836 - DNA, 15 bp, Homo sapiens
taatgagagacttag

SEQ ID NO: 1149837 - DNA, 15 bp, Homo sapiens
ctaatgagagactta

SEQ ID NO: 1149838 - DNA, 15 bp, Homo sapiens
gctaatgagagactt

SEQ ID NO: 1149839 - DNA, 15 bp, Homo sapiens
tgctaatgagagact

SEQ ID NO: 1149840 - DNA, 15 bp, Homo sapiens
atgctaatgagagac

SEQ ID NO: 1149841 - DNA, 15 bp, Homo sapiens
aatgctaatgagaga

SEQ ID NO: 1149842 - DNA, 15 bp, Homo sapiens
aaatgctaatgagag

SEQ ID NO: 1149843 - DNA, 15 bp, Homo sapiens
aaaatgctaatgaga

SEQ ID NO: 1149844 - DNA, 15 bp, Homo sapiens
aaaaatgctaatgag

SEQ ID NO: 1149845 - DNA, 15 bp, Homo sapiens
taaaaatgctaatga

SEQ ID NO: 1149846 - DNA, 15 bp, Homo sapiens
gtaaaaatgctaatg

SEQ ID NO: 1149847 - DNA, 15 bp, Homo sapiens
agtaaaaatgctaat

SEQ ID NO: 1149848 - DNA, 15 bp, Homo sapiens
tagtaaaaatgctaa

SEQ ID NO: 1149849 - DNA, 15 bp, Homo sapiens
ttagtaaaaatgcta

SEQ ID NO: 1149850 - DNA, 15 bp, Homo sapiens
cttagtaaaaatgct

SEQ ID NO: 1149851 - DNA, 15 bp, Homo sapiens
gcttagtaaaaatgc

SEQ ID NO: 1149852 - DNA, 15 bp, Homo sapiens
agcttagtaaaaatg

SEQ ID NO: 1149853 - DNA, 15 bp, Homo sapiens
cagcttagtaaaaat

SEQ ID NO: 1149854 - DNA, 15 bp, Homo sapiens
tcagcttagtaaaaa

SEQ ID NO: 1149855 - DNA, 15 bp, Homo sapiens
ttcagcttagtaaaa

SEQ ID NO: 1149856 - DNA, 15 bp, Homo sapiens
cttcagcttagtaaa

SEQ ID NO: 1149857 - DNA, 15 bp, Homo sapiens
acttcagcttagtaa

SEQ ID NO: 1149858 - DNA, 15 bp, Homo sapiens
cacttcagcttagta

SEQ ID NO: 1149859 - DNA, 15 bp, Homo sapiens
acacttcagcttagt

SEQ ID NO: 1149860 - DNA, 15 bp, Homo sapiens
gacacttcagcttag

SEQ ID NO: 1149861 - DNA, 15 bp, Homo sapiens
tgacacttcagctta

SEQ ID NO: 1149862 - DNA, 15 bp, Homo sapiens
gtgacacttcagctt

SEQ ID NO: 1149863 - DNA, 15 bp, Homo sapiens
tgtgacacttcagct

SEQ ID NO: 1149864 - DNA, 15 bp, Homo sapiens
ctgtgacacttcagc

SEQ ID NO: 1149865 - DNA, 15 bp, Homo sapiens
cctgtgacacttcag

SEQ ID NO: 1149866 - DNA, 15 bp, Homo sapiens
tcctgtgacacttca

SEQ ID NO: 1149867 - DNA, 15 bp, Homo sapiens
ttcctgtgacacttc

SEQ ID NO: 1149868 - DNA, 15 bp, Homo sapiens
tttcctgtgacactt

SEQ ID NO: 1149869 - DNA, 15 bp, Homo sapiens
ctttcctgtgacact

SEQ ID NO: 1149870 - DNA, 15 bp, Homo sapiens
tctttcctgtgacac

SEQ ID NO: 1149871 - DNA, 15 bp, Homo sapiens
gtctttcctgtgaca

SEQ ID NO: 1149872 - DNA, 15 bp, Homo sapiens
ggtctttcctgtgac

SEQ ID NO: 1149873 - DNA, 15 bp, Homo sapiens
aggtctttcctgtga

SEQ ID NO: 1149874 - DNA, 15 bp, Homo sapiens
aaggtctttcctgtg

SEQ ID NO: 1149875 - DNA, 15 bp, Homo sapiens
taaggtctttcctgt

SEQ ID NO: 1149876 - DNA, 15 bp, Homo sapiens
ataaggtctttcctg

SEQ ID NO: 1149877 - DNA, 15 bp, Homo sapiens
gataaggtctttcct

SEQ ID NO: 1149878 - DNA, 15 bp, Homo sapiens
agataaggtctttcc

SEQ ID NO: 1149879 - DNA, 15 bp, Homo sapiens
aagataaggtctttc

SEQ ID NO: 1149880 - DNA, 15 bp, Homo sapiens
caagataaggtcttt

SEQ ID NO: 1149881 - DNA, 15 bp, Homo sapiens
ccaagataaggtctt

SEQ ID NO: 1149882 - DNA, 15 bp, Homo sapiens
accaagataaggtct

SEQ ID NO: 1149883 - DNA, 15 bp, Homo sapiens
taccaagataaggtc

SEQ ID NO: 1149884 - DNA, 15 bp, Homo sapiens
gtaccaagataaggt

SEQ ID NO: 1149885 - DNA, 15 bp, Homo sapiens
tgtaccaagataagg

SEQ ID NO: 1149886 - DNA, 15 bp, Homo sapiens
gtgtaccaagataag

SEQ ID NO: 1149887 - DNA, 15 bp, Homo sapiens
agtgtaccaagataa

SEQ ID NO: 1149888 - DNA, 15 bp, Homo sapiens
aagtgtaccaagata

SEQ ID NO: 1149889 - DNA, 15 bp, Homo sapiens
aaagtgtaccaagat

SEQ ID NO: 1149890 - DNA, 15 bp, Homo sapiens
aaaagtgtaccaaga

SEQ ID NO: 1149891 - DNA, 15 bp, Homo sapiens
caaaagtgtaccaag

SEQ ID NO: 1149892 - DNA, 15 bp, Homo sapiens
ccaaaagtgtaccaa

SEQ ID NO: 1149893 - DNA, 15 bp, Homo sapiens
cccaaaagtgtacca

SEQ ID NO: 1149894 - DNA, 15 bp, Homo sapiens
ccccaaaagtgtacc

SEQ ID NO: 1149895 - DNA, 15 bp, Homo sapiens
cccccaaaagtgtac

SEQ ID NO: 1149896 - DNA, 15 bp, Homo sapiens
acccccaaaagtgta

SEQ ID NO: 1149897 - DNA, 15 bp, Homo sapiens
tacccccaaaagtgt

SEQ ID NO: 1149898 - DNA, 15 bp, Homo sapiens
ttacccccaaaagtg

SEQ ID NO: 1149899 - DNA, 15 bp, Homo sapiens
attacccccaaaagt

SEQ ID NO: 1149900 - DNA, 15 bp, Homo sapiens
cattacccccaaaag

SEQ ID NO: 1149901 - DNA, 15 bp, Homo sapiens
gcattacccccaaaa

SEQ ID NO: 1149902 - DNA, 15 bp, Homo sapiens
agcattacccccaaa

SEQ ID NO: 1149903 - DNA, 15 bp, Homo sapiens
cagcattacccccaa

SEQ ID NO: 1149904 - DNA, 15 bp, Homo sapiens
tcagcattaccccca

SEQ ID NO: 1149905 - DNA, 15 bp, Homo sapiens
atcagcattaccccc

SEQ ID NO: 1149906 - DNA, 15 bp, Homo sapiens
catcagcattacccc

SEQ ID NO: 1149907 - DNA, 15 bp, Homo sapiens
acatcagcattaccc

SEQ ID NO: 1149908 - DNA, 15 bp, Homo sapiens
gacatcagcattacc

SEQ ID NO: 1149909 - DNA, 15 bp, Homo sapiens
tgacatcagcattac

SEQ ID NO: 1149910 - DNA, 15 bp, Homo sapiens
atgacatcagcatta

SEQ ID NO: 1149911 - DNA, 15 bp, Homo sapiens
gatgacatcagcatt

SEQ ID NO: 1149912 - DNA, 15 bp, Homo sapiens
agatgacatcagcat

SEQ ID NO: 1149913 - DNA, 15 bp, Homo sapiens
cagatgacatcagca

SEQ ID NO: 1149914 - DNA, 15 bp, Homo sapiens
acagatgacatcagc

SEQ ID NO: 1149915 - DNA, 15 bp, Homo sapiens
tacagatgacatcag

SEQ ID NO: 1149916 - DNA, 15 bp, Homo sapiens
atacagatgacatca

SEQ ID NO: 1149917 - DNA, 15 bp, Homo sapiens
aatacagatgacatc

SEQ ID NO: 1149918 - DNA, 15 bp, Homo sapiens
taatacagatgacat

SEQ ID NO: 1149919 - DNA, 15 bp, Homo sapiens
ttaatacagatgaca

SEQ ID NO: 1149920 - DNA, 15 bp, Homo sapiens
gttaatacagatgac

SEQ ID NO: 1149921 - DNA, 15 bp, Homo sapiens
tgttaatacagatga

SEQ ID NO: 1149922 - DNA, 15 bp, Homo sapiens
ttgttaatacagatg

SEQ ID NO: 1149923 - DNA, 15 bp, Homo sapiens
gttgttaatacagat

SEQ ID NO: 1149924 - DNA, 15 bp, Homo sapiens
tgttgttaatacaga

SEQ ID NO: 1149925 - DNA, 15 bp, Homo sapiens
gtgttgttaatacag

SEQ ID NO: 1149926 - DNA, 15 bp, Homo sapiens
tgtgttgttaataca

SEQ ID NO: 1149927 - DNA, 15 bp, Homo sapiens
ttgtgttgttaatac

SEQ ID NO: 1149928 - DNA, 15 bp, Homo sapiens
attgtgttgttaata

SEQ ID NO: 1149929 - DNA, 15 bp, Homo sapiens
cattgtgttgttaat

SEQ ID NO: 1149930 - DNA, 15 bp, Homo sapiens
acattgtgttgttaa

SEQ ID NO: 1149931 - DNA, 15 bp, Homo sapiens
tacattgtgttgtta

SEQ ID NO: 1149932 - DNA, 15 bp, Homo sapiens
ttacattgtgttgtt

SEQ ID NO: 1149933 - DNA, 15 bp, Homo sapiens
tttacattgtgttgt

SEQ ID NO: 1149934 - DNA, 15 bp, Homo sapiens
atttacattgtgttg

SEQ ID NO: 1149935 - DNA, 15 bp, Homo sapiens
tatttacattgtgtt

SEQ ID NO: 1149936 - DNA, 15 bp, Homo sapiens
gtatttacattgtgt

SEQ ID NO: 1149937 - DNA, 15 bp, Homo sapiens
ggtatttacattgtg

SEQ ID NO: 1149938 - DNA, 15 bp, Homo sapiens
tggtatttacattgt

SEQ ID NO: 1149939 - DNA, 15 bp, Homo sapiens
ctggtatttacattg

SEQ ID NO: 1149940 - DNA, 15 bp, Homo sapiens
tctggtatttacatt

SEQ ID NO: 1149941 - DNA, 15 bp, Homo sapiens
ctctggtatttacat

SEQ ID NO: 1149942 - DNA, 15 bp, Homo sapiens
actctggtatttaca

SEQ ID NO: 1149943 - DNA, 15 bp, Homo sapiens
gactctggtatttac

SEQ ID NO: 1149944 - DNA, 15 bp, Homo sapiens
tgactctggtattta

SEQ ID NO: 1149945 - DNA, 15 bp, Homo sapiens
ctgactctggtattt

SEQ ID NO: 1149946 - DNA, 15 bp, Homo sapiens
tctgactctggtatt

SEQ ID NO: 1149947 - DNA, 15 bp, Homo sapiens
atctgactctggtat

SEQ ID NO: 1149948 - DNA, 15 bp, Homo sapiens
catctgactctggta

SEQ ID NO: 1149949 - DNA, 15 bp, Homo sapiens
tcatctgactctggt

SEQ ID NO: 1149950 - DNA, 15 bp, Homo sapiens
gtcatctgactctgg

SEQ ID NO: 1149951 - DNA, 15 bp, Homo sapiens
tgtcatctgactctg

SEQ ID NO: 1149952 - DNA, 15 bp, Homo sapiens
gtgtcatctgactct

SEQ ID NO: 1149953 - DNA, 15 bp, Homo sapiens
ggtgtcatctgactc

SEQ ID NO: 1149954 - DNA, 15 bp, Homo sapiens
tggtgtcatctgact

SEQ ID NO: 1149955 - DNA, 15 bp, Homo sapiens
atggtgtcatctgac

SEQ ID NO: 1149956 - DNA, 15 bp, Homo sapiens
tatggtgtcatctga

SEQ ID NO: 1149957 - DNA, 15 bp, Homo sapiens
ctatggtgtcatctg

SEQ ID NO: 1149958 - DNA, 15 bp, Homo sapiens
tctatggtgtcatct

SEQ ID NO: 1149959 - DNA, 15 bp, Homo sapiens
ttctatggtgtcatc

SEQ ID NO: 1149960 - DNA, 15 bp, Homo sapiens
tttctatggtgtcat

SEQ ID NO: 1149961 - DNA, 15 bp, Homo sapiens
atttctatggtgtca

SEQ ID NO: 1149962 - DNA, 15 bp, Homo sapiens
aatttctatggtgtc

SEQ ID NO: 1149963 - DNA, 15 bp, Homo sapiens
taatttctatggtgt

SEQ ID NO: 1149964 - DNA, 15 bp, Homo sapiens
ctaatttctatggtg

SEQ ID NO: 1149965 - DNA, 15 bp, Homo sapiens
actaatttctatggt

SEQ ID NO: 1149966 - DNA, 15 bp, Homo sapiens
aactaatttctatgg

SEQ ID NO: 1149967 - DNA, 15 bp, Homo sapiens
aaactaatttctatg

SEQ ID NO: 1149968 - DNA, 15 bp, Homo sapiens
gaaactaatttctat

SEQ ID NO: 1149969 - DNA, 15 bp, Homo sapiens
tgaaactaatttcta

SEQ ID NO: 1149970 - DNA, 15 bp, Homo sapiens
ttgaaactaatttct

SEQ ID NO: 1149971 - DNA, 15 bp, Homo sapiens
tttgaaactaatttc

SEQ ID NO: 1149972 - DNA, 15 bp, Homo sapiens
gtttgaaactaattt

SEQ ID NO: 1149973 - DNA, 15 bp, Homo sapiens
tgtttgaaactaatt

SEQ ID NO: 1149974 - DNA, 15 bp, Homo sapiens
gtgtttgaaactaat

SEQ ID NO: 1149975 - DNA, 15 bp, Homo sapiens
tgtgtttgaaactaa

SEQ ID NO: 1149976 - DNA, 15 bp, Homo sapiens
atgtgtttgaaacta

SEQ ID NO: 1149977 - DNA, 15 bp, Homo sapiens
tatgtgtttgaaact

SEQ ID NO: 1149978 - DNA, 15 bp, Homo sapiens
ttatgtgtttgaaac

SEQ ID NO: 1149979 - DNA, 15 bp, Homo sapiens
tttatgtgtttgaaa

SEQ ID NO: 1149980 - DNA, 15 bp, Homo sapiens
atttatgtgtttgaa

SEQ ID NO: 1149981 - DNA, 15 bp, Homo sapiens
tatttatgtgtttga

SEQ ID NO: 1149982 - DNA, 15 bp, Homo sapiens
atatttatgtgtttg

SEQ ID NO: 1149983 - DNA, 15 bp, Homo sapiens
gatatttatgtgttt

SEQ ID NO: 1149984 - DNA, 15 bp, Homo sapiens
tgatatttatgtgtt

SEQ ID NO: 1149985 - DNA, 15 bp, Homo sapiens
atgatatttatgtgt

SEQ ID NO: 1149986 - DNA, 15 bp, Homo sapiens
tatgatatttatgtg

SEQ ID NO: 1149987 - DNA, 15 bp, Homo sapiens
ttatgatatttatgt

SEQ ID NO: 1149988 - DNA, 15 bp, Homo sapiens
tttatgatatttatg

SEQ ID NO: 1149989 - DNA, 15 bp, Homo sapiens
atttatgatatttat

SEQ ID NO: 1149990 - DNA, 15 bp, Homo sapiens
tatttatgatattta

SEQ ID NO: 1149991 - DNA, 15 bp, Homo sapiens
atatttatgatattt

SEQ ID NO: 1149992 - DNA, 15 bp, Homo sapiens
tatatttatgatatt

SEQ ID NO: 1149993 - DNA, 15 bp, Homo sapiens
atatatttatgatat

SEQ ID NO: 1149994 - DNA, 15 bp, Homo sapiens
aatatatttatgata

SEQ ID NO: 1149995 - DNA, 15 bp, Homo sapiens
aaatatatttatgat

SEQ ID NO: 1149996 - DNA, 15 bp, Homo sapiens
caaatatatttatga

SEQ ID NO: 1149997 - DNA, 15 bp, Homo sapiens
tcaaatatatttatg

SEQ ID NO: 1149998 - DNA, 15 bp, Homo sapiens
atcaaatatatttat

SEQ ID NO: 1149999 - DNA, 15 bp, Homo sapiens
aatcaaatatattta

SEQ ID NO: 1150000 - DNA, 15 bp, Homo sapiens
aaatcaaatatattt

SEQ ID NO: 1150001 - DNA, 15 bp, Homo sapiens
taaatcaaatatatt

SEQ ID NO: 1150002 - DNA, 15 bp, Homo sapiens
ttaaatcaaatatat

SEQ ID NO: 1150003 - DNA, 15 bp, Homo sapiens
cttaaatcaaatata

SEQ ID NO: 1150004 - DNA, 15 bp, Homo sapiens
tcttaaatcaaatat

SEQ ID NO: 1150005 - DNA, 15 bp, Homo sapiens
gtcttaaatcaaata

SEQ ID NO: 1150006 - DNA, 15 bp, Homo sapiens
tgtcttaaatcaaat

SEQ ID NO: 1150007 - DNA, 15 bp, Homo sapiens
ctgtcttaaatcaaa

SEQ ID NO: 1150008 - DNA, 15 bp, Homo sapiens
actgtcttaaatcaa

SEQ ID NO: 1150009 - DNA, 15 bp, Homo sapiens
aactgtcttaaatca

SEQ ID NO: 1150010 - DNA, 15 bp, Homo sapiens
gaactgtcttaaatc

SEQ ID NO: 1150011 - DNA, 15 bp, Homo sapiens
tgaactgtcttaaat

SEQ ID NO: 1150012 - DNA, 15 bp, Homo sapiens
ctgaactgtcttaaa

SEQ ID NO: 1150013 - DNA, 15 bp, Homo sapiens
actgaactgtcttaa

SEQ ID NO: 1150014 - DNA, 15 bp, Homo sapiens
tactgaactgtctta

SEQ ID NO: 1150015 - DNA, 15 bp, Homo sapiens
ttactgaactgtctt

SEQ ID NO: 1150016 - DNA, 15 bp, Homo sapiens
attactgaactgtct

SEQ ID NO: 1150017 - DNA, 15 bp, Homo sapiens
tattactgaactgtc

SEQ ID NO: 1150018 - DNA, 15 bp, Homo sapiens
ttattactgaactgt

SEQ ID NO: 1150019 - DNA, 15 bp, Homo sapiens
attattactgaactg

SEQ ID NO: 1150020 - DNA, 15 bp, Homo sapiens
tattattactgaact

SEQ ID NO: 1150021 - DNA, 15 bp, Homo sapiens
atattattactgaac

SEQ ID NO: 1150022 - DNA, 15 bp, Homo sapiens
catattattactgaa

SEQ ID NO: 1150023 - DNA, 15 bp, Homo sapiens
acatattattactga

SEQ ID NO: 1150024 - DNA, 15 bp, Homo sapiens
cacatattattactg

SEQ ID NO: 1150025 - DNA, 15 bp, Homo sapiens
gcacatattattact

SEQ ID NO: 1150026 - DNA, 15 bp, Homo sapiens
tgcacatattattac

SEQ ID NO: 1150027 - DNA, 15 bp, Homo sapiens
ttgcacatattatta

SEQ ID NO: 1150028 - DNA, 15 bp, Homo sapiens
cttgcacatattatt

SEQ ID NO: 1150029 - DNA, 15 bp, Homo sapiens
acttgcacatattat

SEQ ID NO: 1150030 - DNA, 15 bp, Homo sapiens
aacttgcacatatta

SEQ ID NO: 1150031 - DNA, 15 bp, Homo sapiens
gaacttgcacatatt

SEQ ID NO: 1150032 - DNA, 15 bp, Homo sapiens
ggaacttgcacatat

SEQ ID NO: 1150033 - DNA, 15 bp, Homo sapiens
aggaacttgcacata

SEQ ID NO: 1150034 - DNA, 15 bp, Homo sapiens
aaggaacttgcacat

SEQ ID NO: 1150035 - DNA, 15 bp, Homo sapiens
taaggaacttgcaca

SEQ ID NO: 1150036 - DNA, 15 bp, Homo sapiens
ttaaggaacttgcac

SEQ ID NO: 1150037 - DNA, 15 bp, Homo sapiens
cttaaggaacttgca

SEQ ID NO: 1150038 - DNA, 15 bp, Homo sapiens
ccttaaggaacttgc

SEQ ID NO: 1150039 - DNA, 15 bp, Homo sapiens
tccttaaggaacttg

SEQ ID NO: 1150040 - DNA, 15 bp, Homo sapiens
ttccttaaggaactt

SEQ ID NO: 1150041 - DNA, 15 bp, Homo sapiens
attccttaaggaact

SEQ ID NO: 1150042 - DNA, 15 bp, Homo sapiens
aattccttaaggaac

SEQ ID NO: 1150043 - DNA, 15 bp, Homo sapiens
gaattccttaaggaa

SEQ ID NO: 1150044 - DNA, 15 bp, Homo sapiens
agaattccttaagga

SEQ ID NO: 1150045 - DNA, 15 bp, Homo sapiens
tagaattccttaagg

SEQ ID NO: 1150046 - DNA, 15 bp, Homo sapiens
atagaattccttaag

SEQ ID NO: 1150047 - DNA, 15 bp, Homo sapiens
gatagaattccttaa

SEQ ID NO: 1150048 - DNA, 15 bp, Homo sapiens
agatagaattcctta

SEQ ID NO: 1150049 - DNA, 15 bp, Homo sapiens
cagatagaattcctt

SEQ ID NO: 1150050 - DNA, 15 bp, Homo sapiens
tcagatagaattcct

SEQ ID NO: 1150051 - DNA, 15 bp, Homo sapiens
ttcagatagaattcc

SEQ ID NO: 1150052 - DNA, 15 bp, Homo sapiens
gttcagatagaattc

SEQ ID NO: 1150053 - DNA, 15 bp, Homo sapiens
ggttcagatagaatt

SEQ ID NO: 1150054 - DNA, 15 bp, Homo sapiens
tggttcagatagaat

SEQ ID NO: 1150055 - DNA, 15 bp, Homo sapiens
gtggttcagatagaa

SEQ ID NO: 1150056 - DNA, 15 bp, Homo sapiens
ggtggttcagataga

SEQ ID NO: 1150057 - DNA, 15 bp, Homo sapiens
aggtggttcagatag

SEQ ID NO: 1150058 - DNA, 15 bp, Homo sapiens
gaggtggttcagata

SEQ ID NO: 1150059 - DNA, 15 bp, Homo sapiens
agaggtggttcagat

SEQ ID NO: 1150060 - DNA, 15 bp, Homo sapiens
aagaggtggttcaga

SEQ ID NO: 1150061 - DNA, 15 bp, Homo sapiens
taagaggtggttcag

SEQ ID NO: 1150062 - DNA, 15 bp, Homo sapiens
gtaagaggtggttca

SEQ ID NO: 1150063 - DNA, 15 bp, Homo sapiens
tgtaagaggtggttc

SEQ ID NO: 1150064 - DNA, 15 bp, Homo sapiens
ttgtaagaggtggtt

SEQ ID NO: 1150065 - DNA, 15 bp, Homo sapiens
attgtaagaggtggt

SEQ ID NO: 1150066 - DNA, 15 bp, Homo sapiens
aattgtaagaggtgg

SEQ ID NO: 1150067 - DNA, 15 bp, Homo sapiens
aaattgtaagaggtg

SEQ ID NO: 1150068 - DNA, 15 bp, Homo sapiens
taaattgtaagaggt

SEQ ID NO: 1150069 - DNA, 15 bp, Homo sapiens
ttaaattgtaagagg

SEQ ID NO: 1150070 - DNA, 15 bp, Homo sapiens
cttaaattgtaagag

SEQ ID NO: 1150071 - DNA, 15 bp, Homo sapiens
tcttaaattgtaaga

SEQ ID NO: 1150072 - DNA, 15 bp, Homo sapiens
ctcttaaattgtaag

SEQ ID NO: 1150073 - DNA, 15 bp, Homo sapiens
tctcttaaattgtaa

SEQ ID NO: 1150074 - DNA, 15 bp, Homo sapiens
gtctcttaaattgta

SEQ ID NO: 1150075 - DNA, 15 bp, Homo sapiens
tgtctcttaaattgt

SEQ ID NO: 1150076 - DNA, 15 bp, Homo sapiens
ttgtctcttaaattg

SEQ ID NO: 1150077 - DNA, 15 bp, Homo sapiens
cttgtctcttaaatt

SEQ ID NO: 1150078 - DNA, 15 bp, Homo sapiens
gcttgtctcttaaat

SEQ ID NO: 1150079 - DNA, 15 bp, Homo sapiens
agcttgtctcttaaa

SEQ ID NO: 1150080 - DNA, 15 bp, Homo sapiens
cagcttgtctcttaa

SEQ ID NO: 1150081 - DNA, 15 bp, Homo sapiens
gcagcttgtctctta

SEQ ID NO: 1150082 - DNA, 15 bp, Homo sapiens
tgcagcttgtctctt

SEQ ID NO: 1150083 - DNA, 15 bp, Homo sapiens
gtgcagcttgtctct

SEQ ID NO: 1150084 - DNA, 15 bp, Homo sapiens
cgtgcagcttgtctc

SEQ ID NO: 1150085 - DNA, 15 bp, Homo sapiens
tcgtgcagcttgtct

SEQ ID NO: 1150086 - DNA, 15 bp, Homo sapiens
ttcgtgcagcttgtc

SEQ ID NO: 1150087 - DNA, 15 bp, Homo sapiens
gttcgtgcagcttgt

SEQ ID NO: 1150088 - DNA, 15 bp, Homo sapiens
ggttcgtgcagcttg

SEQ ID NO: 1150089 - DNA, 15 bp, Homo sapiens
aggttcgtgcagctt

SEQ ID NO: 1150090 - DNA, 15 bp, Homo sapiens
aaggttcgtgcagct

SEQ ID NO: 1150091 - DNA, 15 bp, Homo sapiens
taaggttcgtgcagc

SEQ ID NO: 1150092 - DNA, 15 bp, Homo sapiens
ataaggttcgtgcag

SEQ ID NO: 1150093 - DNA, 15 bp, Homo sapiens
aataaggttcgtgca

SEQ ID NO: 1150094 - DNA, 15 bp, Homo sapiens
aaataaggttcgtgc

SEQ ID NO: 1150095 - DNA, 15 bp, Homo sapiens
aaaataaggttcgtg

SEQ ID NO: 1150096 - DNA, 15 bp, Homo sapiens
gaaaataaggttcgt

SEQ ID NO: 1150097 - DNA, 15 bp, Homo sapiens
agaaaataaggttcg

SEQ ID NO: 1150098 - DNA, 15 bp, Homo sapiens
gagaaaataaggttc

SEQ ID NO: 1150099 - DNA, 15 bp, Homo sapiens
tgagaaaataaggtt

SEQ ID NO: 1150100 - DNA, 15 bp, Homo sapiens
ctgagaaaataaggt

SEQ ID NO: 1150101 - DNA, 15 bp, Homo sapiens
cctgagaaaataagg

SEQ ID NO: 1150102 - DNA, 15 bp, Homo sapiens
tcctgagaaaataag

SEQ ID NO: 1150103 - DNA, 15 bp, Homo sapiens
ttcctgagaaaataa

SEQ ID NO: 1150104 - DNA, 15 bp, Homo sapiens
tttcctgagaaaata

SEQ ID NO: 1150105 - DNA, 15 bp, Homo sapiens
ttttcctgagaaaat

SEQ ID NO: 1150106 - DNA, 15 bp, Homo sapiens
attttcctgagaaaa

SEQ ID NO: 1150107 - DNA, 15 bp, Homo sapiens
aattttcctgagaaa

SEQ ID NO: 1150108 - DNA, 15 bp, Homo sapiens
aaattttcctgagaa

SEQ ID NO: 1150109 - DNA, 15 bp, Homo sapiens
taaattttcctgaga

SEQ ID NO: 1150110 - DNA, 15 bp, Homo sapiens
ataaattttcctgag

SEQ ID NO: 1150111 - DNA, 15 bp, Homo sapiens
tataaattttcctga

SEQ ID NO: 1150112 - DNA, 15 bp, Homo sapiens
atataaattttcctg

SEQ ID NO: 1150113 - DNA, 15 bp, Homo sapiens
gatataaattttcct

SEQ ID NO: 1150114 - DNA, 15 bp, Homo sapiens
agatataaattttcc

SEQ ID NO: 1150115 - DNA, 15 bp, Homo sapiens
cagatataaattttc

SEQ ID NO: 1150116 - DNA, 15 bp, Homo sapiens
tcagatataaatttt

SEQ ID NO: 1150117 - DNA, 15 bp, Homo sapiens
ttcagatataaattt

SEQ ID NO: 1150118 - DNA, 15 bp, Homo sapiens
attcagatataaatt

SEQ ID NO: 1150119 - DNA, 15 bp, Homo sapiens
gattcagatataaat

SEQ ID NO: 1150120 - DNA, 15 bp, Homo sapiens
ggattcagatataaa

SEQ ID NO: 1150121 - DNA, 15 bp, Homo sapiens
aggattcagatataa

SEQ ID NO: 1150122 - DNA, 15 bp, Homo sapiens
taggattcagatata

SEQ ID NO: 1150123 - DNA, 15 bp, Homo sapiens
ttaggattcagatat

SEQ ID NO: 1150124 - DNA, 15 bp, Homo sapiens
cttaggattcagata

SEQ ID NO: 1150125 - DNA, 15 bp, Homo sapiens
acttaggattcagat

SEQ ID NO: 1150126 - DNA, 15 bp, Homo sapiens
aacttaggattcaga

SEQ ID NO: 1150127 - DNA, 15 bp, Homo sapiens
taacttaggattcag

SEQ ID NO: 1150128 - DNA, 15 bp, Homo sapiens
ttaacttaggattca

SEQ ID NO: 1150129 - DNA, 15 bp, Homo sapiens
gttaacttaggattc

SEQ ID NO: 1150130 - DNA, 15 bp, Homo sapiens
ggttaacttaggatt

SEQ ID NO: 1150131 - DNA, 15 bp, Homo sapiens
aggttaacttaggat

SEQ ID NO: 1150132 - DNA, 15 bp, Homo sapiens
taggttaacttagga

SEQ ID NO: 1150133 - DNA, 15 bp, Homo sapiens
ttaggttaacttagg

SEQ ID NO: 1150134 - DNA, 15 bp, Homo sapiens
attaggttaacttag

SEQ ID NO: 1150135 - DNA, 15 bp, Homo sapiens
aattaggttaactta

SEQ ID NO: 1150136 - DNA, 15 bp, Homo sapiens
gaattaggttaactt

SEQ ID NO: 1150137 - DNA, 15 bp, Homo sapiens
ggaattaggttaact

SEQ ID NO: 1150138 - DNA, 15 bp, Homo sapiens
gggaattaggttaac

SEQ ID NO: 1150139 - DNA, 15 bp, Homo sapiens
agggaattaggttaa

SEQ ID NO: 1150140 - DNA, 15 bp, Homo sapiens
aagggaattaggtta

SEQ ID NO: 1150141 - DNA, 15 bp, Homo sapiens
aaagggaattaggtt

SEQ ID NO: 1150142 - DNA, 15 bp, Homo sapiens
aaaagggaattaggt

SEQ ID NO: 1150143 - DNA, 15 bp, Homo sapiens
taaaagggaattagg

SEQ ID NO: 1150144 - DNA, 15 bp, Homo sapiens
ataaaagggaattag

SEQ ID NO: 1150145 - DNA, 15 bp, Homo sapiens
cataaaagggaatta

SEQ ID NO: 1150146 - DNA, 15 bp, Homo sapiens
gcataaaagggaatt

SEQ ID NO: 1150147 - DNA, 15 bp, Homo sapiens
agcataaaagggaat

SEQ ID NO: 1150148 - DNA, 15 bp, Homo sapiens
cagcataaaagggaa

SEQ ID NO: 1150149 - DNA, 15 bp, Homo sapiens
acagcataaaaggga

SEQ ID NO: 1150150 - DNA, 15 bp, Homo sapiens
tacagcataaaaggg

SEQ ID NO: 1150151 - DNA, 15 bp, Homo sapiens
ttacagcataaaagg

SEQ ID NO: 1150152 - DNA, 15 bp, Homo sapiens
tttacagcataaaag

SEQ ID NO: 1150153 - DNA, 15 bp, Homo sapiens
gtttacagcataaaa

SEQ ID NO: 1150154 - DNA, 15 bp, Homo sapiens
agtttacagcataaa

SEQ ID NO: 1150155 - DNA, 15 bp, Homo sapiens
cagtttacagcataa

SEQ ID NO: 1150156 - DNA, 15 bp, Homo sapiens
acagtttacagcata

SEQ ID NO: 1150157 - DNA, 15 bp, Homo sapiens
tacagtttacagcat

SEQ ID NO: 1150158 - DNA, 15 bp, Homo sapiens
ctacagtttacagca

SEQ ID NO: 1150159 - DNA, 15 bp, Homo sapiens
actacagtttacagc

SEQ ID NO: 1150160 - DNA, 15 bp, Homo sapiens
aactacagtttacag

SEQ ID NO: 1150161 - DNA, 15 bp, Homo sapiens
taactacagtttaca

SEQ ID NO: 1150162 - DNA, 15 bp, Homo sapiens
ttaactacagtttac

SEQ ID NO: 1150163 - DNA, 15 bp, Homo sapiens
attaactacagttta

SEQ ID NO: 1150164 - DNA, 15 bp, Homo sapiens
aattaactacagttt

SEQ ID NO: 1150165 - DNA, 15 bp, Homo sapiens
taattaactacagtt

SEQ ID NO: 1150166 - DNA, 15 bp, Homo sapiens
ttaattaactacagt

SEQ ID NO: 1150167 - DNA, 15 bp, Homo sapiens
attaattaactacag

SEQ ID NO: 1150168 - DNA, 15 bp, Homo sapiens
cattaattaactaca

SEQ ID NO: 1150169 - DNA, 15 bp, Homo sapiens
gcattaattaactac

SEQ ID NO: 1150170 - DNA, 15 bp, Homo sapiens
ggcattaattaacta

SEQ ID NO: 1150171 - DNA, 15 bp, Homo sapiens
aggcattaattaact

SEQ ID NO: 1150172 - DNA, 15 bp, Homo sapiens
gaggcattaattaac

SEQ ID NO: 1150173 - DNA, 15 bp, Homo sapiens
tgaggcattaattaa

SEQ ID NO: 1150174 - DNA, 15 bp, Homo sapiens
atgaggcattaatta

SEQ ID NO: 1150175 - DNA, 15 bp, Homo sapiens
catgaggcattaatt

SEQ ID NO: 1150176 - DNA, 15 bp, Homo sapiens
ccatgaggcattaat

SEQ ID NO: 1150177 - DNA, 15 bp, Homo sapiens
accatgaggcattaa

SEQ ID NO: 1150178 - DNA, 15 bp, Homo sapiens
aaccatgaggcatta

SEQ ID NO: 1150179 - DNA, 15 bp, Homo sapiens
aaaccatgaggcatt

SEQ ID NO: 1150180 - DNA, 15 bp, Homo sapiens
taaaccatgaggcat

SEQ ID NO: 1150181 - DNA, 15 bp, Homo sapiens
ataaaccatgaggca

SEQ ID NO: 1150182 - DNA, 15 bp, Homo sapiens
gataaaccatgaggc

SEQ ID NO: 1150183 - DNA, 15 bp, Homo sapiens
tgataaaccatgagg

SEQ ID NO: 1150184 - DNA, 15 bp, Homo sapiens
ctgataaaccatgag

SEQ ID NO: 1150185 - DNA, 15 bp, Homo sapiens
gctgataaaccatga

SEQ ID NO: 1150186 - DNA, 15 bp, Homo sapiens
agctgataaaccatg

SEQ ID NO: 1150187 - DNA, 15 bp, Homo sapiens
aagctgataaaccat

SEQ ID NO: 1150188 - DNA, 15 bp, Homo sapiens
taagctgataaacca

SEQ ID NO: 1150189 - DNA, 15 bp, Homo sapiens
ttaagctgataaacc

SEQ ID NO: 1150190 - DNA, 15 bp, Homo sapiens
attaagctgataaac

SEQ ID NO: 1150191 - DNA, 15 bp, Homo sapiens
tattaagctgataaa

SEQ ID NO: 1150192 - DNA, 15 bp, Homo sapiens
atattaagctgataa

SEQ ID NO: 1150193 - DNA, 15 bp, Homo sapiens
gatattaagctgata

SEQ ID NO: 1150194 - DNA, 15 bp, Homo sapiens
agatattaagctgat

SEQ ID NO: 1150195 - DNA, 15 bp, Homo sapiens
aagatattaagctga

SEQ ID NO: 1150196 - DNA, 15 bp, Homo sapiens
caagatattaagctg

SEQ ID NO: 1150197 - DNA, 15 bp, Homo sapiens
tcaagatattaagct

SEQ ID NO: 1150198 - DNA, 15 bp, Homo sapiens
gtcaagatattaagc

SEQ ID NO: 1150199 - DNA, 15 bp, Homo sapiens
agtcaagatattaag

SEQ ID NO: 1150200 - DNA, 15 bp, Homo sapiens
gagtcaagatattaa

SEQ ID NO: 1150201 - DNA, 15 bp, Homo sapiens
agagtcaagatatta

SEQ ID NO: 1150202 - DNA, 15 bp, Homo sapiens
aagagtcaagatatt

SEQ ID NO: 1150203 - DNA, 15 bp, Homo sapiens
aaagagtcaagatat

SEQ ID NO: 1150204 - DNA, 15 bp, Homo sapiens
aaaagagtcaagata

SEQ ID NO: 1150205 - DNA, 15 bp, Homo sapiens
aaaaagagtcaagat

SEQ ID NO: 1150206 - DNA, 15 bp, Homo sapiens
caaaaagagtcaaga

SEQ ID NO: 1150207 - DNA, 15 bp, Homo sapiens
acaaaaagagtcaag

SEQ ID NO: 1150208 - DNA, 15 bp, Homo sapiens
aacaaaaagagtcaa

SEQ ID NO: 1150209 - DNA, 15 bp, Homo sapiens
caacaaaaagagtca

SEQ ID NO: 1150210 - DNA, 15 bp, Homo sapiens
acaacaaaaagagtc

SEQ ID NO: 1150211 - DNA, 15 bp, Homo sapiens
aacaacaaaaagagt

SEQ ID NO: 1150212 - DNA, 15 bp, Homo sapiens
aaacaacaaaaagag

SEQ ID NO: 1150213 - DNA, 15 bp, Homo sapiens
aaaacaacaaaaaga

SEQ ID NO: 1150214 - DNA, 15 bp, Homo sapiens
aaaaacaacaaaaag

SEQ ID NO: 1150215 - DNA, 15 bp, Homo sapiens
aaaaaacaacaaaaa

SEQ ID NO: 1150216 - DNA, 15 bp, Homo sapiens
taaaaaacaacaaaa

SEQ ID NO: 1150217 - DNA, 15 bp, Homo sapiens
ttaaaaaacaacaaa

SEQ ID NO: 1150218 - DNA, 15 bp, Homo sapiens
cttaaaaaacaacaa

SEQ ID NO: 1150219 - DNA, 15 bp, Homo sapiens
tcttaaaaaacaaca

SEQ ID NO: 1150220 - DNA, 15 bp, Homo sapiens
gtcttaaaaaacaac

SEQ ID NO: 1150221 - DNA, 15 bp, Homo sapiens
tgtcttaaaaaacaa

SEQ ID NO: 1150222 - DNA, 15 bp, Homo sapiens
ctgtcttaaaaaaca

SEQ ID NO: 1150223 - DNA, 15 bp, Homo sapiens
cctgtcttaaaaaac

SEQ ID NO: 1150224 - DNA, 15 bp, Homo sapiens
aagaccctgtcttaa

SEQ ID NO: 1150225 - DNA, 15 bp, Homo sapiens
caagaccctgtctta

SEQ ID NO: 1150226 - DNA, 15 bp, Homo sapiens
gcaagaccctgtctt

SEQ ID NO: 1150227 - DNA, 15 bp, Homo sapiens
gacagagcaagaccc

SEQ ID NO: 1150228 - DNA, 15 bp, Homo sapiens
tgacagagcaagacc

SEQ ID NO: 1150229 - DNA, 15 bp, Homo sapiens
cgctgggtgacagag

SEQ ID NO: 1150230 - DNA, 15 bp, Homo sapiens
acgctgggtgacaga

SEQ ID NO: 1150231 - DNA, 15 bp, Homo sapiens
cacgctgggtgacag

SEQ ID NO: 1150232 - DNA, 15 bp, Homo sapiens
ccacgctgggtgaca

SEQ ID NO: 1150233 - DNA, 15 bp, Homo sapiens
tccacgctgggtgac

SEQ ID NO: 1150234 - DNA, 15 bp, Homo sapiens
ctccacgctgggtga

SEQ ID NO: 1150235 - DNA, 15 bp, Homo sapiens
actccacgctgggtg

SEQ ID NO: 1150236 - DNA, 15 bp, Homo sapiens
cactccacgctgggt

SEQ ID NO: 1150237 - DNA, 15 bp, Homo sapiens
gcactccacgctggg

SEQ ID NO: 1150238 - DNA, 15 bp, Homo sapiens
tgcactccacgctgg

SEQ ID NO: 1150239 - DNA, 15 bp, Homo sapiens
ctgcactccacgctg

SEQ ID NO: 1150240 - DNA, 15 bp, Homo sapiens
actgcactccacgct

SEQ ID NO: 1150241 - DNA, 15 bp, Homo sapiens
gactgcactccacgc

SEQ ID NO: 1150242 - DNA, 15 bp, Homo sapiens
cgactgcactccacg

SEQ ID NO: 1150243 - DNA, 15 bp, Homo sapiens
acgactgcactccac

SEQ ID NO: 1150244 - DNA, 15 bp, Homo sapiens
cacgactgcactcca

SEQ ID NO: 1150245 - DNA, 15 bp, Homo sapiens
acacgactgcactcc

SEQ ID NO: 1150246 - DNA, 15 bp, Homo sapiens
cacacgactgcactc

SEQ ID NO: 1150247 - DNA, 15 bp, Homo sapiens
tcacacgactgcact

SEQ ID NO: 1150248 - DNA, 15 bp, Homo sapiens
atcacacgactgcac

SEQ ID NO: 1150249 - DNA, 15 bp, Homo sapiens
aatcacacgactgca

SEQ ID NO: 1150250 - DNA, 15 bp, Homo sapiens
taatcacacgactgc

SEQ ID NO: 1150251 - DNA, 15 bp, Homo sapiens
ataatcacacgactg

SEQ ID NO: 1150252 - DNA, 15 bp, Homo sapiens
cataatcacacgact

SEQ ID NO: 1150253 - DNA, 15 bp, Homo sapiens
ccataatcacacgac

SEQ ID NO: 1150254 - DNA, 15 bp, Homo sapiens
gccataatcacacga

SEQ ID NO: 1150255 - DNA, 15 bp, Homo sapiens
agccataatcacacg

SEQ ID NO: 1150256 - DNA, 15 bp, Homo sapiens
gagccataatcacac

SEQ ID NO: 1150257 - DNA, 15 bp, Homo sapiens
ggagccataatcaca

SEQ ID NO: 1150258 - DNA, 15 bp, Homo sapiens
gggagccataatcac

SEQ ID NO: 1150259 - DNA, 15 bp, Homo sapiens
agggagccataatca

SEQ ID NO: 1150260 - DNA, 15 bp, Homo sapiens
cagggagccataatc

SEQ ID NO: 1150261 - DNA, 15 bp, Homo sapiens
gcagggagccataat

SEQ ID NO: 1150262 - DNA, 15 bp, Homo sapiens
tgcagggagccataa

SEQ ID NO: 1150263 - DNA, 15 bp, Homo sapiens
ctgcagggagccata

SEQ ID NO: 1150264 - DNA, 15 bp, Homo sapiens
gctgcagggagccat

SEQ ID NO: 1150265 - DNA, 15 bp, Homo sapiens
ggctgcagggagcca

SEQ ID NO: 1150266 - DNA, 15 bp, Homo sapiens
aggctgcagggagcc

SEQ ID NO: 1150267 - DNA, 15 bp, Homo sapiens
ggaggctgcagggag

SEQ ID NO: 1150268 - DNA, 15 bp, Homo sapiens
tggaggctgcaggga

SEQ ID NO: 1150269 - DNA, 15 bp, Homo sapiens
gtggaggctgcaggg

SEQ ID NO: 1150270 - DNA, 15 bp, Homo sapiens
ggtggaggctgcagg

SEQ ID NO: 1150271 - DNA, 15 bp, Homo sapiens
aggaggtggaggctg

SEQ ID NO: 1150272 - DNA, 15 bp, Homo sapiens
ccaggaggtggaggc

SEQ ID NO: 1150273 - DNA, 15 bp, Homo sapiens
gcccaggaggtggag

SEQ ID NO: 1150274 - DNA, 15 bp, Homo sapiens
agcccaggaggtgga

SEQ ID NO: 1150275 - DNA, 15 bp, Homo sapiens
gagcccaggaggtgg

SEQ ID NO: 1150276 - DNA, 15 bp, Homo sapiens
tgagcccaggaggtg

SEQ ID NO: 1150277 - DNA, 15 bp, Homo sapiens
ttgagcccaggaggt

SEQ ID NO: 1150278 - DNA, 15 bp, Homo sapiens
cttgagcccaggagg

SEQ ID NO: 1150279 - DNA, 15 bp, Homo sapiens
ggcttgagcccagga

SEQ ID NO: 1150280 - DNA, 15 bp, Homo sapiens
tggcttgagcccagg

SEQ ID NO: 1150281 - DNA, 15 bp, Homo sapiens
atggcttgagcccag

SEQ ID NO: 1150282 - DNA, 15 bp, Homo sapiens
gatggcttgagccca

SEQ ID NO: 1150283 - DNA, 15 bp, Homo sapiens
ggatggcttgagccc

SEQ ID NO: 1150284 - DNA, 15 bp, Homo sapiens
aggatggcttgagcc

SEQ ID NO: 1150285 - DNA, 15 bp, Homo sapiens
aaggatggcttgagc

SEQ ID NO: 1150286 - DNA, 15 bp, Homo sapiens
gaaggatggcttgag

SEQ ID NO: 1150287 - DNA, 15 bp, Homo sapiens
ggaaggatggcttga

SEQ ID NO: 1150288 - DNA, 15 bp, Homo sapiens
tggaaggatggcttg

SEQ ID NO: 1150289 - DNA, 15 bp, Homo sapiens
gtggaaggatggctt

SEQ ID NO: 1150290 - DNA, 15 bp, Homo sapiens
ggtggaaggatggct

SEQ ID NO: 1150291 - DNA, 15 bp, Homo sapiens
aggtggaaggatggc

SEQ ID NO: 1150292 - DNA, 15 bp, Homo sapiens
gaggtggaaggatgg

SEQ ID NO: 1150293 - DNA, 15 bp, Homo sapiens
tgaggtggaaggatg

SEQ ID NO: 1150294 - DNA, 15 bp, Homo sapiens
ctgaggtggaaggat

SEQ ID NO: 1150295 - DNA, 15 bp, Homo sapiens
gctgaggtggaagga

SEQ ID NO: 1150296 - DNA, 15 bp, Homo sapiens
ggctgaggtggaagg

SEQ ID NO: 1150297 - DNA, 15 bp, Homo sapiens
aggctgaggtggaag

SEQ ID NO: 1150298 - DNA, 15 bp, Homo sapiens
gaggctgaggtggaa

SEQ ID NO: 1150299 - DNA, 15 bp, Homo sapiens
caggaggctgaggtg

SEQ ID NO: 1150300 - DNA, 15 bp, Homo sapiens
tcaggaggctgaggt

SEQ ID NO: 1150301 - DNA, 15 bp, Homo sapiens
tgcagtcccagctac

SEQ ID NO: 1150302 - DNA, 15 bp, Homo sapiens
ctgcagtcccagcta

SEQ ID NO: 1150303 - DNA, 15 bp, Homo sapiens
cctgcagtcccagct

SEQ ID NO: 1150304 - DNA, 15 bp, Homo sapiens
acctgcagtcccagc

SEQ ID NO: 1150305 - DNA, 15 bp, Homo sapiens
cacctgcagtcccag

SEQ ID NO: 1150306 - DNA, 15 bp, Homo sapiens
acacctgcagtccca

SEQ ID NO: 1150307 - DNA, 15 bp, Homo sapiens
cacacctgcagtccc

SEQ ID NO: 1150308 - DNA, 15 bp, Homo sapiens
gcacacctgcagtcc

SEQ ID NO: 1150309 - DNA, 15 bp, Homo sapiens
cgcacacctgcagtc

SEQ ID NO: 1150310 - DNA, 15 bp, Homo sapiens
gcgcacacctgcagt

SEQ ID NO: 1150311 - DNA, 15 bp, Homo sapiens
ggcgcacacctgcag

SEQ ID NO: 1150312 - DNA, 15 bp, Homo sapiens
tggcgcacacctgca

SEQ ID NO: 1150313 - DNA, 15 bp, Homo sapiens
gtggcgcacacctgc

SEQ ID NO: 1150314 - DNA, 15 bp, Homo sapiens
aggtgtggtggcgca

SEQ ID NO: 1150315 - DNA, 15 bp, Homo sapiens
acccatctctaccaa

SEQ ID NO: 1150316 - DNA, 15 bp, Homo sapiens
aacccatctctacca

SEQ ID NO: 1150317 - DNA, 15 bp, Homo sapiens
aaacccatctctacc

SEQ ID NO: 1150318 - DNA, 15 bp, Homo sapiens
aaaacccatctctac

SEQ ID NO: 1150319 - DNA, 15 bp, Homo sapiens
aaaaacccatctcta

SEQ ID NO: 1150320 - DNA, 15 bp, Homo sapiens
caaaaacccatctct

SEQ ID NO: 1150321 - DNA, 15 bp, Homo sapiens
gcaaaaacccatctc

SEQ ID NO: 1150322 - DNA, 15 bp, Homo sapiens
ggcaaaaacccatct

SEQ ID NO: 1150323 - DNA, 15 bp, Homo sapiens
tggcaaaaacccatc

SEQ ID NO: 1150324 - DNA, 15 bp, Homo sapiens
atggcaaaaacccat

SEQ ID NO: 1150325 - DNA, 15 bp, Homo sapiens
catggcaaaaaccca

SEQ ID NO: 1150326 - DNA, 15 bp, Homo sapiens
acatggcaaaaaccc

SEQ ID NO: 1150327 - DNA, 15 bp, Homo sapiens
aacatggcaaaaacc

SEQ ID NO: 1150328 - DNA, 15 bp, Homo sapiens
caacatggcaaaaac

SEQ ID NO: 1150329 - DNA, 15 bp, Homo sapiens
gcaacatggcaaaaa

SEQ ID NO: 1150330 - DNA, 15 bp, Homo sapiens
gggcaacatggcaaa

SEQ ID NO: 1150331 - DNA, 15 bp, Homo sapiens
tgggcaacatggcaa

SEQ ID NO: 1150332 - DNA, 15 bp, Homo sapiens
ctgggcaacatggca

SEQ ID NO: 1150333 - DNA, 15 bp, Homo sapiens
cctgggcaacatggc

SEQ ID NO: 1150334 - DNA, 15 bp, Homo sapiens
ctcaggagtttgaga

SEQ ID NO: 1150335 - DNA, 15 bp, Homo sapiens
actcaggagtttgag

SEQ ID NO: 1150336 - DNA, 15 bp, Homo sapiens
aactcaggagtttga

SEQ ID NO: 1150337 - DNA, 15 bp, Homo sapiens
gaactcaggagtttg

SEQ ID NO: 1150338 - DNA, 15 bp, Homo sapiens
tgaactcaggagttt

SEQ ID NO: 1150339 - DNA, 15 bp, Homo sapiens
ttgaactcaggagtt

SEQ ID NO: 1150340 - DNA, 15 bp, Homo sapiens
cttgaactcaggagt

SEQ ID NO: 1150341 - DNA, 15 bp, Homo sapiens
acttgaactcaggag

SEQ ID NO: 1150342 - DNA, 15 bp, Homo sapiens
cacttgaactcagga

SEQ ID NO: 1150343 - DNA, 15 bp, Homo sapiens
tcacttgaactcagg

SEQ ID NO: 1150344 - DNA, 15 bp, Homo sapiens
atcacttgaactcag

SEQ ID NO: 1150345 - DNA, 15 bp, Homo sapiens
gatcacttgaactca

SEQ ID NO: 1150346 - DNA, 15 bp, Homo sapiens
tgatcacttgaactc

SEQ ID NO: 1150347 - DNA, 15 bp, Homo sapiens
atgatcacttgaact

SEQ ID NO: 1150348 - DNA, 15 bp, Homo sapiens
gatgatcacttgaac

SEQ ID NO: 1150349 - DNA, 15 bp, Homo sapiens
ggatgatcacttgaa

SEQ ID NO: 1150350 - DNA, 15 bp, Homo sapiens
aggatgatcacttga

SEQ ID NO: 1150351 - DNA, 15 bp, Homo sapiens
caggatgatcacttg

SEQ ID NO: 1150352 - DNA, 15 bp, Homo sapiens
gcaggatgatcactt

SEQ ID NO: 1150353 - DNA, 15 bp, Homo sapiens
ggcaggatgatcact

SEQ ID NO: 1150354 - DNA, 15 bp, Homo sapiens
aggcaggatgatcac

SEQ ID NO: 1150355 - DNA, 15 bp, Homo sapiens
gaggcaggatgatca

SEQ ID NO: 1150356 - DNA, 15 bp, Homo sapiens
tgaggcaggatgatc

SEQ ID NO: 1150357 - DNA, 15 bp, Homo sapiens
ttgaggcaggatgat

SEQ ID NO: 1150358 - DNA, 15 bp, Homo sapiens
gttgaggcaggatga

SEQ ID NO: 1150359 - DNA, 15 bp, Homo sapiens
ggttgaggcaggatg

SEQ ID NO: 1150360 - DNA, 15 bp, Homo sapiens
aggttgaggcaggat

SEQ ID NO: 1150361 - DNA, 15 bp, Homo sapiens
tgggaggttgaggca

SEQ ID NO: 1150362 - DNA, 15 bp, Homo sapiens
gcactttgggaggtt

SEQ ID NO: 1150363 - DNA, 15 bp, Homo sapiens
tagcactttgggagg

SEQ ID NO: 1150364 - DNA, 15 bp, Homo sapiens
ctagcactttgggag

SEQ ID NO: 1150365 - DNA, 15 bp, Homo sapiens
cctagcactttggga

SEQ ID NO: 1150366 - DNA, 15 bp, Homo sapiens
aaatcctagcacttt

SEQ ID NO: 1150367 - DNA, 15 bp, Homo sapiens
taaatcctagcactt

SEQ ID NO: 1150368 - DNA, 15 bp, Homo sapiens
ataaatcctagcact

SEQ ID NO: 1150369 - DNA, 15 bp, Homo sapiens
tataaatcctagcac

SEQ ID NO: 1150370 - DNA, 15 bp, Homo sapiens
ctataaatcctagca

SEQ ID NO: 1150371 - DNA, 15 bp, Homo sapiens
tctataaatcctagc

SEQ ID NO: 1150372 - DNA, 15 bp, Homo sapiens
atctataaatcctag

SEQ ID NO: 1150373 - DNA, 15 bp, Homo sapiens
catctataaatccta

SEQ ID NO: 1150374 - DNA, 15 bp, Homo sapiens
acatctataaatcct

SEQ ID NO: 1150375 - DNA, 15 bp, Homo sapiens
cacatctataaatcc

SEQ ID NO: 1150376 - DNA, 15 bp, Homo sapiens
tcacatctataaatc

SEQ ID NO: 1150377 - DNA, 15 bp, Homo sapiens
ctcacatctataaat

SEQ ID NO: 1150378 - DNA, 15 bp, Homo sapiens
gctcacatctataaa

SEQ ID NO: 1150379 - DNA, 15 bp, Homo sapiens
ggctcacatctataa

SEQ ID NO: 1150380 - DNA, 15 bp, Homo sapiens
tggctcacatctata

SEQ ID NO: 1150381 - DNA, 15 bp, Homo sapiens
gtggctcacatctat

SEQ ID NO: 1150382 - DNA, 15 bp, Homo sapiens
agtggctcacatcta

SEQ ID NO: 1150383 - DNA, 15 bp, Homo sapiens
taggtgcagtggctc

SEQ ID NO: 1150384 - DNA, 15 bp, Homo sapiens
ttaggtgcagtggct

SEQ ID NO: 1150385 - DNA, 15 bp, Homo sapiens
gttaggtgcagtggc

SEQ ID NO: 1150386 - DNA, 15 bp, Homo sapiens
ggttaggtgcagtgg

SEQ ID NO: 1150387 - DNA, 15 bp, Homo sapiens
tggttaggtgcagtg

SEQ ID NO: 1150388 - DNA, 15 bp, Homo sapiens
ttggttaggtgcagt

SEQ ID NO: 1150389 - DNA, 15 bp, Homo sapiens
attggttaggtgcag

SEQ ID NO: 1150390 - DNA, 15 bp, Homo sapiens
tattggttaggtgca

SEQ ID NO: 1150391 - DNA, 15 bp, Homo sapiens
atattggttaggtgc

SEQ ID NO: 1150392 - DNA, 15 bp, Homo sapiens
gatattggttaggtg

SEQ ID NO: 1150393 - DNA, 15 bp, Homo sapiens
agatattggttaggt

SEQ ID NO: 1150394 - DNA, 15 bp, Homo sapiens
aagatattggttagg

SEQ ID NO: 1150395 - DNA, 15 bp, Homo sapiens
caagatattggttag

SEQ ID NO: 1150396 - DNA, 15 bp, Homo sapiens
tcaagatattggtta

SEQ ID NO: 1150397 - DNA, 15 bp, Homo sapiens
gtcaagatattggtt

SEQ ID NO: 1150398 - DNA, 15 bp, Homo sapiens
agtcaagatattggt

SEQ ID NO: 1150399 - DNA, 15 bp, Homo sapiens
aagtcaagatattgg

SEQ ID NO: 1150400 - DNA, 15 bp, Homo sapiens
taagtcaagatattg

SEQ ID NO: 1150401 - DNA, 15 bp, Homo sapiens
ataagtcaagatatt

SEQ ID NO: 1150402 - DNA, 15 bp, Homo sapiens
aataagtcaagatat

SEQ ID NO: 1150403 - DNA, 15 bp, Homo sapiens
aaataagtcaagata

SEQ ID NO: 1150404 - DNA, 15 bp, Homo sapiens
aaaataagtcaagat

SEQ ID NO: 1150405 - DNA, 15 bp, Homo sapiens
taaaataagtcaaga

SEQ ID NO: 1150406 - DNA, 15 bp, Homo sapiens
ataaaataagtcaag

SEQ ID NO: 1150407 - DNA, 15 bp, Homo sapiens
tataaaataagtcaa

SEQ ID NO: 1150408 - DNA, 15 bp, Homo sapiens
atataaaataagtca

SEQ ID NO: 1150409 - DNA, 15 bp, Homo sapiens
tatataaaataagtc

SEQ ID NO: 1150410 - DNA, 15 bp, Homo sapiens
ttatataaaataagt

SEQ ID NO: 1150411 - DNA, 15 bp, Homo sapiens
attatataaaataag

SEQ ID NO: 1150412 - DNA, 15 bp, Homo sapiens
aattatataaaataa

SEQ ID NO: 1150413 - DNA, 15 bp, Homo sapiens
aaattatataaaata

SEQ ID NO: 1150414 - DNA, 15 bp, Homo sapiens
taaattatataaaat

SEQ ID NO: 1150415 - DNA, 15 bp, Homo sapiens
ttaaattatataaaa

SEQ ID NO: 1150416 - DNA, 15 bp, Homo sapiens
attaaattatataaa

SEQ ID NO: 1150417 - DNA, 15 bp, Homo sapiens
tattaaattatataa

SEQ ID NO: 1150418 - DNA, 15 bp, Homo sapiens
ttattaaattatata

SEQ ID NO: 1150419 - DNA, 15 bp, Homo sapiens
attattaaattatat

SEQ ID NO: 1150420 - DNA, 15 bp, Homo sapiens
cattattaaattata

SEQ ID NO: 1150421 - DNA, 15 bp, Homo sapiens
tcattattaaattat

SEQ ID NO: 1150422 - DNA, 15 bp, Homo sapiens
atcattattaaatta

SEQ ID NO: 1150423 - DNA, 15 bp, Homo sapiens
aatcattattaaatt

SEQ ID NO: 1150424 - DNA, 15 bp, Homo sapiens
taatcattattaaat

SEQ ID NO: 1150425 - DNA, 15 bp, Homo sapiens
ttaatcattattaaa

SEQ ID NO: 1150426 - DNA, 15 bp, Homo sapiens
attaatcattattaa

SEQ ID NO: 1150427 - DNA, 15 bp, Homo sapiens
tattaatcattatta

SEQ ID NO: 1150428 - DNA, 15 bp, Homo sapiens
ttattaatcattatt

SEQ ID NO: 1150429 - DNA, 15 bp, Homo sapiens
gttattaatcattat

SEQ ID NO: 1150430 - DNA, 15 bp, Homo sapiens
tgttattaatcatta

SEQ ID NO: 1150431 - DNA, 15 bp, Homo sapiens
gtgttattaatcatt

SEQ ID NO: 1150432 - DNA, 15 bp, Homo sapiens
tgtgttattaatcat

SEQ ID NO: 1150433 - DNA, 15 bp, Homo sapiens
ttgtgttattaatca

SEQ ID NO: 1150434 - DNA, 15 bp, Homo sapiens
attgtgttattaatc

SEQ ID NO: 1150435 - DNA, 15 bp, Homo sapiens
tattgtgttattaat

SEQ ID NO: 1150436 - DNA, 15 bp, Homo sapiens
ttattgtgttattaa

SEQ ID NO: 1150437 - DNA, 15 bp, Homo sapiens
attattgtgttatta

SEQ ID NO: 1150438 - DNA, 15 bp, Homo sapiens
tattattgtgttatt

SEQ ID NO: 1150439 - DNA, 15 bp, Homo sapiens
ttattattgtgttat

SEQ ID NO: 1150440 - DNA, 15 bp, Homo sapiens
attattattgtgtta

SEQ ID NO: 1150441 - DNA, 15 bp, Homo sapiens
aattattattgtgtt

SEQ ID NO: 1150442 - DNA, 15 bp, Homo sapiens
taattattattgtgt

SEQ ID NO: 1150443 - DNA, 15 bp, Homo sapiens
ataattattattgtg

SEQ ID NO: 1150444 - DNA, 15 bp, Homo sapiens
aataattattattgt

SEQ ID NO: 1150445 - DNA, 15 bp, Homo sapiens
gaataattattattg

SEQ ID NO: 1150446 - DNA, 15 bp, Homo sapiens
ggaataattattatt

SEQ ID NO: 1150447 - DNA, 15 bp, Homo sapiens
aggaataattattat

SEQ ID NO: 1150448 - DNA, 15 bp, Homo sapiens
aaggaataattatta

SEQ ID NO: 1150449 - DNA, 15 bp, Homo sapiens
taaggaataattatt

SEQ ID NO: 1150450 - DNA, 15 bp, Homo sapiens
gtaaggaataattat

SEQ ID NO: 1150451 - DNA, 15 bp, Homo sapiens
tgtaaggaataatta

SEQ ID NO: 1150452 - DNA, 15 bp, Homo sapiens
ttgtaaggaataatt

SEQ ID NO: 1150453 - DNA, 15 bp, Homo sapiens
tttgtaaggaataat

SEQ ID NO: 1150454 - DNA, 15 bp, Homo sapiens
atttgtaaggaataa

SEQ ID NO: 1150455 - DNA, 15 bp, Homo sapiens
aatttgtaaggaata

SEQ ID NO: 1150456 - DNA, 15 bp, Homo sapiens
gaatttgtaaggaat

SEQ ID NO: 1150457 - DNA, 15 bp, Homo sapiens
agaatttgtaaggaa

SEQ ID NO: 1150458 - DNA, 15 bp, Homo sapiens
aagaatttgtaagga

SEQ ID NO: 1150459 - DNA, 15 bp, Homo sapiens
caagaatttgtaagg

SEQ ID NO: 1150460 - DNA, 15 bp, Homo sapiens
gcaagaatttgtaag

SEQ ID NO: 1150461 - DNA, 15 bp, Homo sapiens
tgcaagaatttgtaa

SEQ ID NO: 1150462 - DNA, 15 bp, Homo sapiens
gtgcaagaatttgta

SEQ ID NO: 1150463 - DNA, 15 bp, Homo sapiens
agtgcaagaatttgt

SEQ ID NO: 1150464 - DNA, 15 bp, Homo sapiens
cagtgcaagaatttg

SEQ ID NO: 1150465 - DNA, 15 bp, Homo sapiens
tcagtgcaagaattt

SEQ ID NO: 1150466 - DNA, 15 bp, Homo sapiens
ttcagtgcaagaatt

SEQ ID NO: 1150467 - DNA, 15 bp, Homo sapiens
attcagtgcaagaat

SEQ ID NO: 1150468 - DNA, 15 bp, Homo sapiens
aattcagtgcaagaa

SEQ ID NO: 1150469 - DNA, 15 bp, Homo sapiens
taattcagtgcaaga

SEQ ID NO: 1150470 - DNA, 15 bp, Homo sapiens
ataattcagtgcaag

SEQ ID NO: 1150471 - DNA, 15 bp, Homo sapiens
tataattcagtgcaa

SEQ ID NO: 1150472 - DNA, 15 bp, Homo sapiens
gtataattcagtgca

SEQ ID NO: 1150473 - DNA, 15 bp, Homo sapiens
agtataattcagtgc

SEQ ID NO: 1150474 - DNA, 15 bp, Homo sapiens
cagtataattcagtg

SEQ ID NO: 1150475 - DNA, 15 bp, Homo sapiens
gcagtataattcagt

SEQ ID NO: 1150476 - DNA, 15 bp, Homo sapiens
agcagtataattcag

SEQ ID NO: 1150477 - DNA, 15 bp, Homo sapiens
aagcagtataattca

SEQ ID NO: 1150478 - DNA, 15 bp, Homo sapiens
aaagcagtataattc

SEQ ID NO: 1150479 - DNA, 15 bp, Homo sapiens
aaaagcagtataatt

SEQ ID NO: 1150480 - DNA, 15 bp, Homo sapiens
caaaagcagtataat

SEQ ID NO: 1150481 - DNA, 15 bp, Homo sapiens
acaaaagcagtataa

SEQ ID NO: 1150482 - DNA, 15 bp, Homo sapiens
cacaaaagcagtata

SEQ ID NO: 1150483 - DNA, 15 bp, Homo sapiens
acacaaaagcagtat

SEQ ID NO: 1150484 - DNA, 15 bp, Homo sapiens
tacacaaaagcagta

SEQ ID NO: 1150485 - DNA, 15 bp, Homo sapiens
atacacaaaagcagt

SEQ ID NO: 1150486 - DNA, 15 bp, Homo sapiens
tatacacaaaagcag

SEQ ID NO: 1150487 - DNA, 15 bp, Homo sapiens
atatacacaaaagca

SEQ ID NO: 1150488 - DNA, 15 bp, Homo sapiens
aatatacacaaaagc

SEQ ID NO: 1150489 - DNA, 15 bp, Homo sapiens
taatatacacaaaag

SEQ ID NO: 1150490 - DNA, 15 bp, Homo sapiens
ttaatatacacaaaa

SEQ ID NO: 1150491 - DNA, 15 bp, Homo sapiens
tttaatatacacaaa

SEQ ID NO: 1150492 - DNA, 15 bp, Homo sapiens
atttaatatacacaa

SEQ ID NO: 1150493 - DNA, 15 bp, Homo sapiens
gatttaatatacaca

SEQ ID NO: 1150494 - DNA, 15 bp, Homo sapiens
tgatttaatatacac

SEQ ID NO: 1150495 - DNA, 15 bp, Homo sapiens
atgatttaatataca

SEQ ID NO: 1150496 - DNA, 15 bp, Homo sapiens
catgatttaatatac

SEQ ID NO: 1150497 - DNA, 15 bp, Homo sapiens
tcatgatttaatata

SEQ ID NO: 1150498 - DNA, 15 bp, Homo sapiens
atcatgatttaatat

SEQ ID NO: 1150499 - DNA, 15 bp, Homo sapiens
tatcatgatttaata

SEQ ID NO: 1150500 - DNA, 15 bp, Homo sapiens
atatcatgatttaat

SEQ ID NO: 1150501 - DNA, 15 bp, Homo sapiens
aatatcatgatttaa

SEQ ID NO: 1150502 - DNA, 15 bp, Homo sapiens
taatatcatgattta

SEQ ID NO: 1150503 - DNA, 15 bp, Homo sapiens
ttaatatcatgattt

SEQ ID NO: 1150504 - DNA, 15 bp, Homo sapiens
cttaatatcatgatt

SEQ ID NO: 1150505 - DNA, 15 bp, Homo sapiens
ccttaatatcatgat

SEQ ID NO: 1150506 - DNA, 15 bp, Homo sapiens
tccttaatatcatga

SEQ ID NO: 1150507 - DNA, 15 bp, Homo sapiens
ctccttaatatcatg

SEQ ID NO: 1150508 - DNA, 15 bp, Homo sapiens
actccttaatatcat

SEQ ID NO: 1150509 - DNA, 15 bp, Homo sapiens
gactccttaatatca

SEQ ID NO: 1150510 - DNA, 15 bp, Homo sapiens
tgactccttaatatc

SEQ ID NO: 1150511 - DNA, 15 bp, Homo sapiens
ttgactccttaatat

SEQ ID NO: 1150512 - DNA, 15 bp, Homo sapiens
tttgactccttaata

SEQ ID NO: 1150513 - DNA, 15 bp, Homo sapiens
ttttgactccttaat

SEQ ID NO: 1150514 - DNA, 15 bp, Homo sapiens
attttgactccttaa

SEQ ID NO: 1150515 - DNA, 15 bp, Homo sapiens
tattttgactcctta

SEQ ID NO: 1150516 - DNA, 15 bp, Homo sapiens
atattttgactcctt

SEQ ID NO: 1150517 - DNA, 15 bp, Homo sapiens
tatattttgactcct

SEQ ID NO: 1150518 - DNA, 15 bp, Homo sapiens
ttatattttgactcc

SEQ ID NO: 1150519 - DNA, 15 bp, Homo sapiens
attatattttgactc

SEQ ID NO: 1150520 - DNA, 15 bp, Homo sapiens
cattatattttgact

SEQ ID NO: 1150521 - DNA, 15 bp, Homo sapiens
gcattatattttgac

SEQ ID NO: 1150522 - DNA, 15 bp, Homo sapiens
tgcattatattttga

SEQ ID NO: 1150523 - DNA, 15 bp, Homo sapiens
atgcattatattttg

SEQ ID NO: 1150524 - DNA, 15 bp, Homo sapiens
tatgcattatatttt

SEQ ID NO: 1150525 - DNA, 15 bp, Homo sapiens
atatgcattatattt

SEQ ID NO: 1150526 - DNA, 15 bp, Homo sapiens
catatgcattatatt

SEQ ID NO: 1150527 - DNA, 15 bp, Homo sapiens
tcatatgcattatat

SEQ ID NO: 1150528 - DNA, 15 bp, Homo sapiens
ctcatatgcattata

SEQ ID NO: 1150529 - DNA, 15 bp, Homo sapiens
tctcatatgcattat

SEQ ID NO: 1150530 - DNA, 15 bp, Homo sapiens
gtctcatatgcatta

SEQ ID NO: 1150531 - DNA, 15 bp, Homo sapiens
agtctcatatgcatt

SEQ ID NO: 1150532 - DNA, 15 bp, Homo sapiens
cagtctcatatgcat

SEQ ID NO: 1150533 - DNA, 15 bp, Homo sapiens
ccagtctcatatgca

SEQ ID NO: 1150534 - DNA, 15 bp, Homo sapiens
accagtctcatatgc

SEQ ID NO: 1150535 - DNA, 15 bp, Homo sapiens
taccagtctcatatg

SEQ ID NO: 1150536 - DNA, 15 bp, Homo sapiens
ataccagtctcatat

SEQ ID NO: 1150537 - DNA, 15 bp, Homo sapiens
tataccagtctcata

SEQ ID NO: 1150538 - DNA, 15 bp, Homo sapiens
atataccagtctcat

SEQ ID NO: 1150539 - DNA, 15 bp, Homo sapiens
catataccagtctca

SEQ ID NO: 1150540 - DNA, 15 bp, Homo sapiens
ccatataccagtctc

SEQ ID NO: 1150541 - DNA, 15 bp, Homo sapiens
accatataccagtct

SEQ ID NO: 1150542 - DNA, 15 bp, Homo sapiens
aaccatataccagtc

SEQ ID NO: 1150543 - DNA, 15 bp, Homo sapiens
caaccatataccagt

SEQ ID NO: 1150544 - DNA, 15 bp, Homo sapiens
ccaaccatataccag

SEQ ID NO: 1150545 - DNA, 15 bp, Homo sapiens
accaaccatatacca

SEQ ID NO: 1150546 - DNA, 15 bp, Homo sapiens
aaccaaccatatacc

SEQ ID NO: 1150547 - DNA, 15 bp, Homo sapiens
taaccaaccatatac

SEQ ID NO: 1150548 - DNA, 15 bp, Homo sapiens
ataaccaaccatata

SEQ ID NO: 1150549 - DNA, 15 bp, Homo sapiens
aataaccaaccatat

SEQ ID NO: 1150550 - DNA, 15 bp, Homo sapiens
gaataaccaaccata

SEQ ID NO: 1150551 - DNA, 15 bp, Homo sapiens
agaataaccaaccat

SEQ ID NO: 1150552 - DNA, 15 bp, Homo sapiens
cagaataaccaacca

SEQ ID NO: 1150553 - DNA, 15 bp, Homo sapiens
tcagaataaccaacc

SEQ ID NO: 1150554 - DNA, 15 bp, Homo sapiens
ttcagaataaccaac

SEQ ID NO: 1150555 - DNA, 15 bp, Homo sapiens
cttcagaataaccaa

SEQ ID NO: 1150556 - DNA, 15 bp, Homo sapiens
acttcagaataacca

SEQ ID NO: 1150557 - DNA, 15 bp, Homo sapiens
aacttcagaataacc

SEQ ID NO: 1150558 - DNA, 15 bp, Homo sapiens
taacttcagaataac

SEQ ID NO: 1150559 - DNA, 15 bp, Homo sapiens
gtaacttcagaataa

SEQ ID NO: 1150560 - DNA, 15 bp, Homo sapiens
agtaacttcagaata

SEQ ID NO: 1150561 - DNA, 15 bp, Homo sapiens
aagtaacttcagaat

SEQ ID NO: 1150562 - DNA, 15 bp, Homo sapiens
taagtaacttcagaa

SEQ ID NO: 1150563 - DNA, 15 bp, Homo sapiens
ttaagtaacttcaga

SEQ ID NO: 1150564 - DNA, 15 bp, Homo sapiens
tttaagtaacttcag

SEQ ID NO: 1150565 - DNA, 15 bp, Homo sapiens
ctttaagtaacttca

SEQ ID NO: 1150566 - DNA, 15 bp, Homo sapiens
gctttaagtaacttc

SEQ ID NO: 1150567 - DNA, 15 bp, Homo sapiens
tgctttaagtaactt

SEQ ID NO: 1150568 - DNA, 15 bp, Homo sapiens
ctgctttaagtaact

SEQ ID NO: 1150569 - DNA, 15 bp, Homo sapiens
actgctttaagtaac

SEQ ID NO: 1150570 - DNA, 15 bp, Homo sapiens
tactgctttaagtaa

SEQ ID NO: 1150571 - DNA, 15 bp, Homo sapiens
gtactgctttaagta

SEQ ID NO: 1150572 - DNA, 15 bp, Homo sapiens
tgtactgctttaagt

SEQ ID NO: 1150573 - DNA, 15 bp, Homo sapiens
atgtactgctttaag

SEQ ID NO: 1150574 - DNA, 15 bp, Homo sapiens
gatgtactgctttaa

SEQ ID NO: 1150575 - DNA, 15 bp, Homo sapiens
tgatgtactgcttta

SEQ ID NO: 1150576 - DNA, 15 bp, Homo sapiens
atgatgtactgcttt

SEQ ID NO: 1150577 - DNA, 15 bp, Homo sapiens
tatgatgtactgctt

SEQ ID NO: 1150578 - DNA, 15 bp, Homo sapiens
ttatgatgtactgct

SEQ ID NO: 1150579 - DNA, 15 bp, Homo sapiens
tttatgatgtactgc

SEQ ID NO: 1150580 - DNA, 15 bp, Homo sapiens
ctttatgatgtactg

SEQ ID NO: 1150581 - DNA, 15 bp, Homo sapiens
actttatgatgtact

SEQ ID NO: 1150582 - DNA, 15 bp, Homo sapiens
tactttatgatgtac

SEQ ID NO: 1150583 - DNA, 15 bp, Homo sapiens
ttactttatgatgta

SEQ ID NO: 1150584 - DNA, 15 bp, Homo sapiens
attactttatgatgt

SEQ ID NO: 1150585 - DNA, 15 bp, Homo sapiens
tattactttatgatg

SEQ ID NO: 1150586 - DNA, 15 bp, Homo sapiens
gtattactttatgat

SEQ ID NO: 1150587 - DNA, 15 bp, Homo sapiens
tgtattactttatga

SEQ ID NO: 1150588 - DNA, 15 bp, Homo sapiens
atgtattactttatg

SEQ ID NO: 1150589 - DNA, 15 bp, Homo sapiens
catgtattactttat

SEQ ID NO: 1150590 - DNA, 15 bp, Homo sapiens
gcatgtattacttta

SEQ ID NO: 1150591 - DNA, 15 bp, Homo sapiens
tgcatgtattacttt

SEQ ID NO: 1150592 - DNA, 15 bp, Homo sapiens
atgcatgtattactt

SEQ ID NO: 1150593 - DNA, 15 bp, Homo sapiens
tatgcatgtattact

SEQ ID NO: 1150594 - DNA, 15 bp, Homo sapiens
ttatgcatgtattac

SEQ ID NO: 1150595 - DNA, 15 bp, Homo sapiens
cttatgcatgtatta

SEQ ID NO: 1150596 - DNA, 15 bp, Homo sapiens
acttatgcatgtatt

SEQ ID NO: 1150597 - DNA, 15 bp, Homo sapiens
aacttatgcatgtat

SEQ ID NO: 1150598 - DNA, 15 bp, Homo sapiens
taacttatgcatgta

SEQ ID NO: 1150599 - DNA, 15 bp, Homo sapiens
ataacttatgcatgt

SEQ ID NO: 1150600 - DNA, 15 bp, Homo sapiens
aataacttatgcatg

SEQ ID NO: 1150601 - DNA, 15 bp, Homo sapiens
gaataacttatgcat

SEQ ID NO: 1150602 - DNA, 15 bp, Homo sapiens
agaataacttatgca

SEQ ID NO: 1150603 - DNA, 15 bp, Homo sapiens
tagaataacttatgc

SEQ ID NO: 1150604 - DNA, 15 bp, Homo sapiens
ttagaataacttatg

SEQ ID NO: 1150605 - DNA, 15 bp, Homo sapiens
gttagaataacttat

SEQ ID NO: 1150606 - DNA, 15 bp, Homo sapiens
agttagaataactta

SEQ ID NO: 1150607 - DNA, 15 bp, Homo sapiens
aagttagaataactt

SEQ ID NO: 1150608 - DNA, 15 bp, Homo sapiens
taagttagaataact

SEQ ID NO: 1150609 - DNA, 15 bp, Homo sapiens
ttaagttagaataac

SEQ ID NO: 1150610 - DNA, 15 bp, Homo sapiens
tttaagttagaataa

SEQ ID NO: 1150611 - DNA, 15 bp, Homo sapiens
ttttaagttagaata

SEQ ID NO: 1150612 - DNA, 15 bp, Homo sapiens
tttttaagttagaat

SEQ ID NO: 1150613 - DNA, 15 bp, Homo sapiens
atttttaagttagaa

SEQ ID NO: 1150614 - DNA, 15 bp, Homo sapiens
tatttttaagttaga

SEQ ID NO: 1150615 - DNA, 15 bp, Homo sapiens
atatttttaagttag

SEQ ID NO: 1150616 - DNA, 15 bp, Homo sapiens
tatatttttaagtta

SEQ ID NO: 1150617 - DNA, 15 bp, Homo sapiens
ttatatttttaagtt

SEQ ID NO: 1150618 - DNA, 15 bp, Homo sapiens
attatatttttaagt

SEQ ID NO: 1150619 - DNA, 15 bp, Homo sapiens
aattatatttttaag

SEQ ID NO: 1150620 - DNA, 15 bp, Homo sapiens
taattatatttttaa

SEQ ID NO: 1150621 - DNA, 15 bp, Homo sapiens
ctaattatattttta

SEQ ID NO: 1150622 - DNA, 15 bp, Homo sapiens
tctaattatattttt

SEQ ID NO: 1150623 - DNA, 15 bp, Homo sapiens
gtctaattatatttt

SEQ ID NO: 1150624 - DNA, 15 bp, Homo sapiens
tgtctaattatattt

SEQ ID NO: 1150625 - DNA, 15 bp, Homo sapiens
atgtctaattatatt

SEQ ID NO: 1150626 - DNA, 15 bp, Homo sapiens
aatgtctaattatat

SEQ ID NO: 1150627 - DNA, 15 bp, Homo sapiens
gaatgtctaattata

SEQ ID NO: 1150628 - DNA, 15 bp, Homo sapiens
tgaatgtctaattat

SEQ ID NO: 1150629 - DNA, 15 bp, Homo sapiens
atgaatgtctaatta

SEQ ID NO: 1150630 - DNA, 15 bp, Homo sapiens
catgaatgtctaatt

SEQ ID NO: 1150631 - DNA, 15 bp, Homo sapiens
acatgaatgtctaat

SEQ ID NO: 1150632 - DNA, 15 bp, Homo sapiens
tacatgaatgtctaa

SEQ ID NO: 1150633 - DNA, 15 bp, Homo sapiens
atacatgaatgtcta

SEQ ID NO: 1150634 - DNA, 15 bp, Homo sapiens
aatacatgaatgtct

SEQ ID NO: 1150635 - DNA, 15 bp, Homo sapiens
caatacatgaatgtc

SEQ ID NO: 1150636 - DNA, 15 bp, Homo sapiens
ccaatacatgaatgt

SEQ ID NO: 1150637 - DNA, 15 bp, Homo sapiens
gccaatacatgaatg

SEQ ID NO: 1150638 - DNA, 15 bp, Homo sapiens
tgccaatacatgaat

SEQ ID NO: 1150639 - DNA, 15 bp, Homo sapiens
atgccaatacatgaa

SEQ ID NO: 1150640 - DNA, 15 bp, Homo sapiens
tatgccaatacatga

SEQ ID NO: 1150641 - DNA, 15 bp, Homo sapiens
ctatgccaatacatg

SEQ ID NO: 1150642 - DNA, 15 bp, Homo sapiens
tctatgccaatacat

SEQ ID NO: 1150643 - DNA, 15 bp, Homo sapiens
gtctatgccaataca

SEQ ID NO: 1150644 - DNA, 15 bp, Homo sapiens
agtctatgccaatac

SEQ ID NO: 1150645 - DNA, 15 bp, Homo sapiens
aagtctatgccaata

SEQ ID NO: 1150646 - DNA, 15 bp, Homo sapiens
aaagtctatgccaat

SEQ ID NO: 1150647 - DNA, 15 bp, Homo sapiens
aaaagtctatgccaa

SEQ ID NO: 1150648 - DNA, 15 bp, Homo sapiens
aaaaagtctatgcca

SEQ ID NO: 1150649 - DNA, 15 bp, Homo sapiens
taaaaagtctatgcc

SEQ ID NO: 1150650 - DNA, 15 bp, Homo sapiens
ctaaaaagtctatgc

SEQ ID NO: 1150651 - DNA, 15 bp, Homo sapiens
tctaaaaagtctatg

SEQ ID NO: 1150652 - DNA, 15 bp, Homo sapiens
ctctaaaaagtctat

SEQ ID NO: 1150653 - DNA, 15 bp, Homo sapiens
actctaaaaagtcta

SEQ ID NO: 1150654 - DNA, 15 bp, Homo sapiens
tactctaaaaagtct

SEQ ID NO: 1150655 - DNA, 15 bp, Homo sapiens
ttactctaaaaagtc

SEQ ID NO: 1150656 - DNA, 15 bp, Homo sapiens
tttactctaaaaagt

SEQ ID NO: 1150657 - DNA, 15 bp, Homo sapiens
ctttactctaaaaag

SEQ ID NO: 1150658 - DNA, 15 bp, Homo sapiens
actttactctaaaaa

SEQ ID NO: 1150659 - DNA, 15 bp, Homo sapiens
gactttactctaaaa

SEQ ID NO: 1150660 - DNA, 15 bp, Homo sapiens
cgactttactctaaa

SEQ ID NO: 1150661 - DNA, 15 bp, Homo sapiens
ccgactttactctaa

SEQ ID NO: 1150662 - DNA, 15 bp, Homo sapiens
cccgactttactcta

SEQ ID NO: 1150663 - DNA, 15 bp, Homo sapiens
acccgactttactct

SEQ ID NO: 1150664 - DNA, 15 bp, Homo sapiens
tacccgactttactc

SEQ ID NO: 1150665 - DNA, 15 bp, Homo sapiens
ctacccgactttact

SEQ ID NO: 1150666 - DNA, 15 bp, Homo sapiens
tctacccgactttac

SEQ ID NO: 1150667 - DNA, 15 bp, Homo sapiens
ttctacccgacttta

SEQ ID NO: 1150668 - DNA, 15 bp, Homo sapiens
attctacccgacttt

SEQ ID NO: 1150669 - DNA, 15 bp, Homo sapiens
cattctacccgactt

SEQ ID NO: 1150670 - DNA, 15 bp, Homo sapiens
tcattctacccgact

SEQ ID NO: 1150671 - DNA, 15 bp, Homo sapiens
ctcattctacccgac

SEQ ID NO: 1150672 - DNA, 15 bp, Homo sapiens
tctcattctacccga

SEQ ID NO: 1150673 - DNA, 15 bp, Homo sapiens
ctctcattctacccg

SEQ ID NO: 1150674 - DNA, 15 bp, Homo sapiens
tctctcattctaccc

SEQ ID NO: 1150675 - DNA, 15 bp, Homo sapiens
atctctcattctacc

SEQ ID NO: 1150676 - DNA, 15 bp, Homo sapiens
tatctctcattctac

SEQ ID NO: 1150677 - DNA, 15 bp, Homo sapiens
atatctctcattcta

SEQ ID NO: 1150678 - DNA, 15 bp, Homo sapiens
tatatctctcattct

SEQ ID NO: 1150679 - DNA, 15 bp, Homo sapiens
atatatctctcattc

SEQ ID NO: 1150680 - DNA, 15 bp, Homo sapiens
aatatatctctcatt

SEQ ID NO: 1150681 - DNA, 15 bp, Homo sapiens
aaatatatctctcat

SEQ ID NO: 1150682 - DNA, 15 bp, Homo sapiens
taaatatatctctca

SEQ ID NO: 1150683 - DNA, 15 bp, Homo sapiens
gtaaatatatctctc

SEQ ID NO: 1150684 - DNA, 15 bp, Homo sapiens
ggtaaatatatctct

SEQ ID NO: 1150685 - DNA, 15 bp, Homo sapiens
tggtaaatatatctc

SEQ ID NO: 1150686 - DNA, 15 bp, Homo sapiens
ttggtaaatatatct

SEQ ID NO: 1150687 - DNA, 15 bp, Homo sapiens
tttggtaaatatatc

SEQ ID NO: 1150688 - DNA, 15 bp, Homo sapiens
ttttggtaaatatat

SEQ ID NO: 1150689 - DNA, 15 bp, Homo sapiens
tttttggtaaatata

SEQ ID NO: 1150690 - DNA, 15 bp, Homo sapiens
ttttttggtaaatat

SEQ ID NO: 1150691 - DNA, 15 bp, Homo sapiens
attttttggtaaata

SEQ ID NO: 1150692 - DNA, 15 bp, Homo sapiens
gattttttggtaaat

SEQ ID NO: 1150693 - DNA, 15 bp, Homo sapiens
tgattttttggtaaa

SEQ ID NO: 1150694 - DNA, 15 bp, Homo sapiens
ttgattttttggtaa

SEQ ID NO: 1150695 - DNA, 15 bp, Homo sapiens
tttgattttttggta

SEQ ID NO: 1150696 - DNA, 15 bp, Homo sapiens
ttttgattttttggt

SEQ ID NO: 1150697 - DNA, 15 bp, Homo sapiens
tttttgattttttgg

SEQ ID NO: 1150698 - DNA, 15 bp, Homo sapiens
gtttttgattttttg

SEQ ID NO: 1150699 - DNA, 15 bp, Homo sapiens
tgtttttgatttttt

SEQ ID NO: 1150700 - DNA, 15 bp, Homo sapiens
ttgtttttgattttt

SEQ ID NO: 1150701 - DNA, 15 bp, Homo sapiens
tttgtttttgatttt

SEQ ID NO: 1150702 - DNA, 15 bp, Homo sapiens
ttttgtttttgattt

SEQ ID NO: 1150703 - DNA, 15 bp, Homo sapiens
tttttgtttttgatt

SEQ ID NO: 1150704 - DNA, 15 bp, Homo sapiens
ttttttgtttttgat

SEQ ID NO: 1150705 - DNA, 15 bp, Homo sapiens
tcttttttgtttttg

SEQ ID NO: 1150706 - DNA, 15 bp, Homo sapiens
ctcttttttgttttt

SEQ ID NO: 1150707 - DNA, 15 bp, Homo sapiens
actcttttttgtttt

SEQ ID NO: 1150708 - DNA, 15 bp, Homo sapiens
gactcttttttgttt

SEQ ID NO: 1150709 - DNA, 15 bp, Homo sapiens
ggactcttttttgtt

SEQ ID NO: 1150710 - DNA, 15 bp, Homo sapiens
aggactcttttttgt

SEQ ID NO: 1150711 - DNA, 15 bp, Homo sapiens
taggactcttttttg

SEQ ID NO: 1150712 - DNA, 15 bp, Homo sapiens
ataggactctttttt

SEQ ID NO: 1150713 - DNA, 15 bp, Homo sapiens
aataggactcttttt

SEQ ID NO: 1150714 - DNA, 15 bp, Homo sapiens
gaataggactctttt

SEQ ID NO: 1150715 - DNA, 15 bp, Homo sapiens
tgaataggactcttt

SEQ ID NO: 1150716 - DNA, 15 bp, Homo sapiens
ctgaataggactctt

SEQ ID NO: 1150717 - DNA, 15 bp, Homo sapiens
gctgaataggactct

SEQ ID NO: 1150718 - DNA, 15 bp, Homo sapiens
ggctgaataggactc

SEQ ID NO: 1150719 - DNA, 15 bp, Homo sapiens
gggctgaataggact

SEQ ID NO: 1150720 - DNA, 15 bp, Homo sapiens
agggctgaataggac

SEQ ID NO: 1150721 - DNA, 15 bp, Homo sapiens
cagggctgaatagga

SEQ ID NO: 1150722 - DNA, 15 bp, Homo sapiens
ccagggctgaatagg

SEQ ID NO: 1150723 - DNA, 15 bp, Homo sapiens
tccagggctgaatag

SEQ ID NO: 1150724 - DNA, 15 bp, Homo sapiens
ctccagggctgaata

SEQ ID NO: 1150725 - DNA, 15 bp, Homo sapiens
actccagggctgaat

SEQ ID NO: 1150726 - DNA, 15 bp, Homo sapiens
gactccagggctgaa

SEQ ID NO: 1150727 - DNA, 15 bp, Homo sapiens
agactccagggctga

SEQ ID NO: 1150728 - DNA, 15 bp, Homo sapiens
tagactccagggctg

SEQ ID NO: 1150729 - DNA, 15 bp, Homo sapiens
ctagactccagggct

SEQ ID NO: 1150730 - DNA, 15 bp, Homo sapiens
cctagactccagggc

SEQ ID NO: 1150731 - DNA, 15 bp, Homo sapiens
acctagactccaggg

SEQ ID NO: 1150732 - DNA, 15 bp, Homo sapiens
aacctagactccagg

SEQ ID NO: 1150733 - DNA, 15 bp, Homo sapiens
gaacctagactccag

SEQ ID NO: 1150734 - DNA, 15 bp, Homo sapiens
ggaacctagactcca

SEQ ID NO: 1150735 - DNA, 15 bp, Homo sapiens
tggaacctagactcc

SEQ ID NO: 1150736 - DNA, 15 bp, Homo sapiens
ttggaacctagactc

SEQ ID NO: 1150737 - DNA, 15 bp, Homo sapiens
attggaacctagact

SEQ ID NO: 1150738 - DNA, 15 bp, Homo sapiens
gattggaacctagac

SEQ ID NO: 1150739 - DNA, 15 bp, Homo sapiens
tgattggaacctaga

SEQ ID NO: 1150740 - DNA, 15 bp, Homo sapiens
atgattggaacctag

SEQ ID NO: 1150741 - DNA, 15 bp, Homo sapiens
aatgattggaaccta

SEQ ID NO: 1150742 - DNA, 15 bp, Homo sapiens
aaatgattggaacct

SEQ ID NO: 1150743 - DNA, 15 bp, Homo sapiens
gaaatgattggaacc

SEQ ID NO: 1150744 - DNA, 15 bp, Homo sapiens
ggaaatgattggaac

SEQ ID NO: 1150745 - DNA, 15 bp, Homo sapiens
tggaaatgattggaa

SEQ ID NO: 1150746 - DNA, 15 bp, Homo sapiens
ctggaaatgattgga

SEQ ID NO: 1150747 - DNA, 15 bp, Homo sapiens
cctggaaatgattgg

SEQ ID NO: 1150748 - DNA, 15 bp, Homo sapiens
tcctggaaatgattg

SEQ ID NO: 1150749 - DNA, 15 bp, Homo sapiens
atcctggaaatgatt

SEQ ID NO: 1150750 - DNA, 15 bp, Homo sapiens
tatcctggaaatgat

SEQ ID NO: 1150751 - DNA, 15 bp, Homo sapiens
gtatcctggaaatga

SEQ ID NO: 1150752 - DNA, 15 bp, Homo sapiens
tgtatcctggaaatg

SEQ ID NO: 1150753 - DNA, 15 bp, Homo sapiens
ctgtatcctggaaat

SEQ ID NO: 1150754 - DNA, 15 bp, Homo sapiens
tctgtatcctggaaa

SEQ ID NO: 1150755 - DNA, 15 bp, Homo sapiens
atctgtatcctggaa

SEQ ID NO: 1150756 - DNA, 15 bp, Homo sapiens
tatctgtatcctgga

SEQ ID NO: 1150757 - DNA, 15 bp, Homo sapiens
atatctgtatcctgg

SEQ ID NO: 1150758 - DNA, 15 bp, Homo sapiens
aatatctgtatcctg

SEQ ID NO: 1150759 - DNA, 15 bp, Homo sapiens
gaatatctgtatcct

SEQ ID NO: 1150760 - DNA, 15 bp, Homo sapiens
tgaatatctgtatcc

SEQ ID NO: 1150761 - DNA, 15 bp, Homo sapiens
ttgaatatctgtatc

SEQ ID NO: 1150762 - DNA, 15 bp, Homo sapiens
attgaatatctgtat

SEQ ID NO: 1150763 - DNA, 15 bp, Homo sapiens
tattgaatatctgta

SEQ ID NO: 1150764 - DNA, 15 bp, Homo sapiens
atattgaatatctgt

SEQ ID NO: 1150765 - DNA, 15 bp, Homo sapiens
tatattgaatatctg

SEQ ID NO: 1150766 - DNA, 15 bp, Homo sapiens
gtatattgaatatct

SEQ ID NO: 1150767 - DNA, 15 bp, Homo sapiens
tgtatattgaatatc

SEQ ID NO: 1150768 - DNA, 15 bp, Homo sapiens
ttgtatattgaatat

SEQ ID NO: 1150769 - DNA, 15 bp, Homo sapiens
attgtatattgaata

SEQ ID NO: 1150770 - DNA, 15 bp, Homo sapiens
tattgtatattgaat

SEQ ID NO: 1150771 - DNA, 15 bp, Homo sapiens
atattgtatattgaa

SEQ ID NO: 1150772 - DNA, 15 bp, Homo sapiens
tatattgtatattga

SEQ ID NO: 1150773 - DNA, 15 bp, Homo sapiens
ctatattgtatattg

SEQ ID NO: 1150774 - DNA, 15 bp, Homo sapiens
actatattgtatatt

SEQ ID NO: 1150775 - DNA, 15 bp, Homo sapiens
aactatattgtatat

SEQ ID NO: 1150776 - DNA, 15 bp, Homo sapiens
gaactatattgtata

SEQ ID NO: 1150777 - DNA, 15 bp, Homo sapiens
agaactatattgtat

SEQ ID NO: 1150778 - DNA, 15 bp, Homo sapiens
aagaactatattgta

SEQ ID NO: 1150779 - DNA, 15 bp, Homo sapiens
caagaactatattgt

SEQ ID NO: 1150780 - DNA, 15 bp, Homo sapiens
gcaagaactatattg

SEQ ID NO: 1150781 - DNA, 15 bp, Homo sapiens
agcaagaactatatt

SEQ ID NO: 1150782 - DNA, 15 bp, Homo sapiens
cagcaagaactatat

SEQ ID NO: 1150783 - DNA, 15 bp, Homo sapiens
acagcaagaactata

SEQ ID NO: 1150784 - DNA, 15 bp, Homo sapiens
cacagcaagaactat

SEQ ID NO: 1150785 - DNA, 15 bp, Homo sapiens
gcacagcaagaacta

SEQ ID NO: 1150786 - DNA, 15 bp, Homo sapiens
agcacagcaagaact

SEQ ID NO: 1150787 - DNA, 15 bp, Homo sapiens
tagcacagcaagaac

SEQ ID NO: 1150788 - DNA, 15 bp, Homo sapiens
ttagcacagcaagaa

SEQ ID NO: 1150789 - DNA, 15 bp, Homo sapiens
tttagcacagcaaga

SEQ ID NO: 1150790 - DNA, 15 bp, Homo sapiens
ttttagcacagcaag

SEQ ID NO: 1150791 - DNA, 15 bp, Homo sapiens
cttttagcacagcaa

SEQ ID NO: 1150792 - DNA, 15 bp, Homo sapiens
tcttttagcacagca

SEQ ID NO: 1150793 - DNA, 15 bp, Homo sapiens
ttcttttagcacagc

SEQ ID NO: 1150794 - DNA, 15 bp, Homo sapiens
attcttttagcacag

SEQ ID NO: 1150795 - DNA, 15 bp, Homo sapiens
tattcttttagcaca

SEQ ID NO: 1150796 - DNA, 15 bp, Homo sapiens
ctattcttttagcac

SEQ ID NO: 1150797 - DNA, 15 bp, Homo sapiens
tctattcttttagca

SEQ ID NO: 1150798 - DNA, 15 bp, Homo sapiens
ttctattcttttagc

SEQ ID NO: 1150799 - DNA, 15 bp, Homo sapiens
attctattcttttag

SEQ ID NO: 1150800 - DNA, 15 bp, Homo sapiens
aattctattctttta

SEQ ID NO: 1150801 - DNA, 15 bp, Homo sapiens
taattctattctttt

SEQ ID NO: 1150802 - DNA, 15 bp, Homo sapiens
ataattctattcttt

SEQ ID NO: 1150803 - DNA, 15 bp, Homo sapiens
aataattctattctt

SEQ ID NO: 1150804 - DNA, 15 bp, Homo sapiens
caataattctattct

SEQ ID NO: 1150805 - DNA, 15 bp, Homo sapiens
ccaataattctattc

SEQ ID NO: 1150806 - DNA, 15 bp, Homo sapiens
tccaataattctatt

SEQ ID NO: 1150807 - DNA, 15 bp, Homo sapiens
ctccaataattctat

SEQ ID NO: 1150808 - DNA, 15 bp, Homo sapiens
tctccaataattcta

SEQ ID NO: 1150809 - DNA, 15 bp, Homo sapiens
atctccaataattct

SEQ ID NO: 1150810 - DNA, 15 bp, Homo sapiens
catctccaataattc

SEQ ID NO: 1150811 - DNA, 15 bp, Homo sapiens
tcatctccaataatt

SEQ ID NO: 1150812 - DNA, 15 bp, Homo sapiens
gtcatctccaataat

SEQ ID NO: 1150813 - DNA, 15 bp, Homo sapiens
ggtcatctccaataa

SEQ ID NO: 1150814 - DNA, 15 bp, Homo sapiens
tggtcatctccaata

SEQ ID NO: 1150815 - DNA, 15 bp, Homo sapiens
ctggtcatctccaat

SEQ ID NO: 1150816 - DNA, 15 bp, Homo sapiens
actggtcatctccaa

SEQ ID NO: 1150817 - DNA, 15 bp, Homo sapiens
tactggtcatctcca

SEQ ID NO: 1150818 - DNA, 15 bp, Homo sapiens
atactggtcatctcc

SEQ ID NO: 1150819 - DNA, 15 bp, Homo sapiens
catactggtcatctc

SEQ ID NO: 1150820 - DNA, 15 bp, Homo sapiens
acatactggtcatct

SEQ ID NO: 1150821 - DNA, 15 bp, Homo sapiens
tacatactggtcatc

SEQ ID NO: 1150822 - DNA, 15 bp, Homo sapiens
atacatactggtcat

SEQ ID NO: 1150823 - DNA, 15 bp, Homo sapiens
aatacatactggtca

SEQ ID NO: 1150824 - DNA, 15 bp, Homo sapiens
caatacatactggtc

SEQ ID NO: 1150825 - DNA, 15 bp, Homo sapiens
acaatacatactggt

SEQ ID NO: 1150826 - DNA, 15 bp, Homo sapiens
aacaatacatactgg

SEQ ID NO: 1150827 - DNA, 15 bp, Homo sapiens
aaacaatacatactg

SEQ ID NO: 1150828 - DNA, 15 bp, Homo sapiens
aaaacaatacatact

SEQ ID NO: 1150829 - DNA, 15 bp, Homo sapiens
aaaaacaatacatac

SEQ ID NO: 1150830 - DNA, 15 bp, Homo sapiens
gaaaaacaatacata

SEQ ID NO: 1150831 - DNA, 15 bp, Homo sapiens
tgaaaaacaatacat

SEQ ID NO: 1150832 - DNA, 15 bp, Homo sapiens
atgaaaaacaataca

SEQ ID NO: 1150833 - DNA, 15 bp, Homo sapiens
tatgaaaaacaatac

SEQ ID NO: 1150834 - DNA, 15 bp, Homo sapiens
ttatgaaaaacaata

SEQ ID NO: 1150835 - DNA, 15 bp, Homo sapiens
attatgaaaaacaat

SEQ ID NO: 1150836 - DNA, 15 bp, Homo sapiens
tattatgaaaaacaa

SEQ ID NO: 1150837 - DNA, 15 bp, Homo sapiens
atattatgaaaaaca

SEQ ID NO: 1150838 - DNA, 15 bp, Homo sapiens
catattatgaaaaac

SEQ ID NO: 1150839 - DNA, 15 bp, Homo sapiens
tcatattatgaaaaa

SEQ ID NO: 1150840 - DNA, 15 bp, Homo sapiens
gtcatattatgaaaa

SEQ ID NO: 1150841 - DNA, 15 bp, Homo sapiens
ggtcatattatgaaa

SEQ ID NO: 1150842 - DNA, 15 bp, Homo sapiens
aggtcatattatgaa

SEQ ID NO: 1150843 - DNA, 15 bp, Homo sapiens
gaggtcatattatga

SEQ ID NO: 1150844 - DNA, 15 bp, Homo sapiens
agaggtcatattatg

SEQ ID NO: 1150845 - DNA, 15 bp, Homo sapiens
cagaggtcatattat

SEQ ID NO: 1150846 - DNA, 15 bp, Homo sapiens
gcagaggtcatatta

SEQ ID NO: 1150847 - DNA, 15 bp, Homo sapiens
ggcagaggtcatatt

SEQ ID NO: 1150848 - DNA, 15 bp, Homo sapiens
tggcagaggtcatat

SEQ ID NO: 1150849 - DNA, 15 bp, Homo sapiens
ctggcagaggtcata

SEQ ID NO: 1150850 - DNA, 15 bp, Homo sapiens
tctggcagaggtcat

SEQ ID NO: 1150851 - DNA, 15 bp, Homo sapiens
ttctggcagaggtca

SEQ ID NO: 1150852 - DNA, 15 bp, Homo sapiens
tttctggcagaggtc

SEQ ID NO: 1150853 - DNA, 15 bp, Homo sapiens
ttttctggcagaggt

SEQ ID NO: 1150854 - DNA, 15 bp, Homo sapiens
tttttctggcagagg

SEQ ID NO: 1150855 - DNA, 15 bp, Homo sapiens
gtttttctggcagag

SEQ ID NO: 1150856 - DNA, 15 bp, Homo sapiens
agtttttctggcaga

SEQ ID NO: 1150857 - DNA, 15 bp, Homo sapiens
cagtttttctggcag

SEQ ID NO: 1150858 - DNA, 15 bp, Homo sapiens
acagtttttctggca

SEQ ID NO: 1150859 - DNA, 15 bp, Homo sapiens
cacagtttttctggc

SEQ ID NO: 1150860 - DNA, 15 bp, Homo sapiens
tcacagtttttctgg

SEQ ID NO: 1150861 - DNA, 15 bp, Homo sapiens
atcacagtttttctg

SEQ ID NO: 1150862 - DNA, 15 bp, Homo sapiens
gatcacagtttttct

SEQ ID NO: 1150863 - DNA, 15 bp, Homo sapiens
agatcacagtttttc

SEQ ID NO: 1150864 - DNA, 15 bp, Homo sapiens
aagatcacagttttt

SEQ ID NO: 1150865 - DNA, 15 bp, Homo sapiens
caagatcacagtttt

SEQ ID NO: 1150866 - DNA, 15 bp, Homo sapiens
gcaagatcacagttt

SEQ ID NO: 1150867 - DNA, 15 bp, Homo sapiens
tgcaagatcacagtt

SEQ ID NO: 1150868 - DNA, 15 bp, Homo sapiens
ttgcaagatcacagt

SEQ ID NO: 1150869 - DNA, 15 bp, Homo sapiens
cttgcaagatcacag

SEQ ID NO: 1150870 - DNA, 15 bp, Homo sapiens
acttgcaagatcaca

SEQ ID NO: 1150871 - DNA, 15 bp, Homo sapiens
aacttgcaagatcac

SEQ ID NO: 1150872 - DNA, 15 bp, Homo sapiens
aaacttgcaagatca

SEQ ID NO: 1150873 - DNA, 15 bp, Homo sapiens
aaaacttgcaagatc

SEQ ID NO: 1150874 - DNA, 15 bp, Homo sapiens
taaaacttgcaagat

SEQ ID NO: 1150875 - DNA, 15 bp, Homo sapiens
ctaaaacttgcaaga

SEQ ID NO: 1150876 - DNA, 15 bp, Homo sapiens
actaaaacttgcaag

SEQ ID NO: 1150877 - DNA, 15 bp, Homo sapiens
tactaaaacttgcaa

SEQ ID NO: 1150878 - DNA, 15 bp, Homo sapiens
gtactaaaacttgca

SEQ ID NO: 1150879 - DNA, 15 bp, Homo sapiens
cgtactaaaacttgc

SEQ ID NO: 1150880 - DNA, 15 bp, Homo sapiens
acgtactaaaacttg

SEQ ID NO: 1150881 - DNA, 15 bp, Homo sapiens
tacgtactaaaactt

SEQ ID NO: 1150882 - DNA, 15 bp, Homo sapiens
atacgtactaaaact

SEQ ID NO: 1150883 - DNA, 15 bp, Homo sapiens
aatacgtactaaaac

SEQ ID NO: 1150884 - DNA, 15 bp, Homo sapiens
aaatacgtactaaaa

SEQ ID NO: 1150885 - DNA, 15 bp, Homo sapiens
caaatacgtactaaa

SEQ ID NO: 1150886 - DNA, 15 bp, Homo sapiens
ccaaatacgtactaa

SEQ ID NO: 1150887 - DNA, 15 bp, Homo sapiens
tccaaatacgtacta

SEQ ID NO: 1150888 - DNA, 15 bp, Homo sapiens
gtccaaatacgtact

SEQ ID NO: 1150889 - DNA, 15 bp, Homo sapiens
tgtccaaatacgtac

SEQ ID NO: 1150890 - DNA, 15 bp, Homo sapiens
ttgtccaaatacgta

SEQ ID NO: 1150891 - DNA, 15 bp, Homo sapiens
cttgtccaaatacgt

SEQ ID NO: 1150892 - DNA, 15 bp, Homo sapiens
acttgtccaaatacg

SEQ ID NO: 1150893 - DNA, 15 bp, Homo sapiens
gacttgtccaaatac

SEQ ID NO: 1150894 - DNA, 15 bp, Homo sapiens
tgacttgtccaaata

SEQ ID NO: 1150895 - DNA, 15 bp, Homo sapiens
ttgacttgtccaaat

SEQ ID NO: 1150896 - DNA, 15 bp, Homo sapiens
attgacttgtccaaa

SEQ ID NO: 1150897 - DNA, 15 bp, Homo sapiens
aattgacttgtccaa

SEQ ID NO: 1150898 - DNA, 15 bp, Homo sapiens
gaattgacttgtcca

SEQ ID NO: 1150899 - DNA, 15 bp, Homo sapiens
tgaattgacttgtcc

SEQ ID NO: 1150900 - DNA, 15 bp, Homo sapiens
atgaattgacttgtc

SEQ ID NO: 1150901 - DNA, 15 bp, Homo sapiens
aatgaattgacttgt

SEQ ID NO: 1150902 - DNA, 15 bp, Homo sapiens
gaatgaattgacttg

SEQ ID NO: 1150903 - DNA, 15 bp, Homo sapiens
tgaatgaattgactt

SEQ ID NO: 1150904 - DNA, 15 bp, Homo sapiens
ttgaatgaattgact

SEQ ID NO: 1150905 - DNA, 15 bp, Homo sapiens
attgaatgaattgac

SEQ ID NO: 1150906 - DNA, 15 bp, Homo sapiens
aattgaatgaattga

SEQ ID NO: 1150907 - DNA, 15 bp, Homo sapiens
aaattgaatgaattg

SEQ ID NO: 1150908 - DNA, 15 bp, Homo sapiens
aaaattgaatgaatt

SEQ ID NO: 1150909 - DNA, 15 bp, Homo sapiens
taaaattgaatgaat

SEQ ID NO: 1150910 - DNA, 15 bp, Homo sapiens
ctaaaattgaatgaa

SEQ ID NO: 1150911 - DNA, 15 bp, Homo sapiens
gctaaaattgaatga

SEQ ID NO: 1150912 - DNA, 15 bp, Homo sapiens
agctaaaattgaatg

SEQ ID NO: 1150913 - DNA, 15 bp, Homo sapiens
cagctaaaattgaat

SEQ ID NO: 1150914 - DNA, 15 bp, Homo sapiens
acagctaaaattgaa

SEQ ID NO: 1150915 - DNA, 15 bp, Homo sapiens
aacagctaaaattga

SEQ ID NO: 1150916 - DNA, 15 bp, Homo sapiens
aaacagctaaaattg

SEQ ID NO: 1150917 - DNA, 15 bp, Homo sapiens
gaaacagctaaaatt

SEQ ID NO: 1150918 - DNA, 15 bp, Homo sapiens
agaaacagctaaaat

SEQ ID NO: 1150919 - DNA, 15 bp, Homo sapiens
aagaaacagctaaaa

SEQ ID NO: 1150920 - DNA, 15 bp, Homo sapiens
gaagaaacagctaaa

SEQ ID NO: 1150921 - DNA, 15 bp, Homo sapiens
cgaagaaacagctaa

SEQ ID NO: 1150922 - DNA, 15 bp, Homo sapiens
acgaagaaacagcta

SEQ ID NO: 1150923 - DNA, 15 bp, Homo sapiens
cacgaagaaacagct

SEQ ID NO: 1150924 - DNA, 15 bp, Homo sapiens
acacgaagaaacagc

SEQ ID NO: 1150925 - DNA, 15 bp, Homo sapiens
aacacgaagaaacag

SEQ ID NO: 1150926 - DNA, 15 bp, Homo sapiens
gaacacgaagaaaca

SEQ ID NO: 1150927 - DNA, 15 bp, Homo sapiens
agaacacgaagaaac

SEQ ID NO: 1150928 - DNA, 15 bp, Homo sapiens
tagaacacgaagaaa

SEQ ID NO: 1150929 - DNA, 15 bp, Homo sapiens
atagaacacgaagaa

SEQ ID NO: 1150930 - DNA, 15 bp, Homo sapiens
tatagaacacgaaga

SEQ ID NO: 1150931 - DNA, 15 bp, Homo sapiens
ctatagaacacgaag

SEQ ID NO: 1150932 - DNA, 15 bp, Homo sapiens
cctatagaacacgaa

SEQ ID NO: 1150933 - DNA, 15 bp, Homo sapiens
tcctatagaacacga

SEQ ID NO: 1150934 - DNA, 15 bp, Homo sapiens
atcctatagaacacg

SEQ ID NO: 1150935 - DNA, 15 bp, Homo sapiens
gatcctatagaacac

SEQ ID NO: 1150936 - DNA, 15 bp, Homo sapiens
tgatcctatagaaca

SEQ ID NO: 1150937 - DNA, 15 bp, Homo sapiens
atgatcctatagaac

SEQ ID NO: 1150938 - DNA, 15 bp, Homo sapiens
tatgatcctatagaa

SEQ ID NO: 1150939 - DNA, 15 bp, Homo sapiens
ctatgatcctataga

SEQ ID NO: 1150940 - DNA, 15 bp, Homo sapiens
gctatgatcctatag

SEQ ID NO: 1150941 - DNA, 15 bp, Homo sapiens
tgctatgatcctata

SEQ ID NO: 1150942 - DNA, 15 bp, Homo sapiens
gtgctatgatcctat

SEQ ID NO: 1150943 - DNA, 15 bp, Homo sapiens
tgtgctatgatccta

SEQ ID NO: 1150944 - DNA, 15 bp, Homo sapiens
gtgtgctatgatcct

SEQ ID NO: 1150945 - DNA, 15 bp, Homo sapiens
agtgtgctatgatcc

SEQ ID NO: 1150946 - DNA, 15 bp, Homo sapiens
gagtgtgctatgatc

SEQ ID NO: 1150947 - DNA, 15 bp, Homo sapiens
ggagtgtgctatgat

SEQ ID NO: 1150948 - DNA, 15 bp, Homo sapiens
aggagtgtgctatga

SEQ ID NO: 1150949 - DNA, 15 bp, Homo sapiens
gaggagtgtgctatg

SEQ ID NO: 1150950 - DNA, 15 bp, Homo sapiens
tgaggagtgtgctat

SEQ ID NO: 1150951 - DNA, 15 bp, Homo sapiens
ctgaggagtgtgcta

SEQ ID NO: 1150952 - DNA, 15 bp, Homo sapiens
actgaggagtgtgct

SEQ ID NO: 1150953 - DNA, 15 bp, Homo sapiens
aactgaggagtgtgc

SEQ ID NO: 1150954 - DNA, 15 bp, Homo sapiens
caactgaggagtgtg

SEQ ID NO: 1150955 - DNA, 15 bp, Homo sapiens
tcaactgaggagtgt

SEQ ID NO: 1150956 - DNA, 15 bp, Homo sapiens
atcaactgaggagtg

SEQ ID NO: 1150957 - DNA, 15 bp, Homo sapiens
tatcaactgaggagt

SEQ ID NO: 1150958 - DNA, 15 bp, Homo sapiens
ttatcaactgaggag

SEQ ID NO: 1150959 - DNA, 15 bp, Homo sapiens
gttatcaactgagga

SEQ ID NO: 1150960 - DNA, 15 bp, Homo sapiens
ggttatcaactgagg

SEQ ID NO: 1150961 - DNA, 15 bp, Homo sapiens
aggttatcaactgag

SEQ ID NO: 1150962 - DNA, 15 bp, Homo sapiens
aaggttatcaactga

SEQ ID NO: 1150963 - DNA, 15 bp, Homo sapiens
aaaggttatcaactg

SEQ ID NO: 1150964 - DNA, 15 bp, Homo sapiens
aaaaggttatcaact

SEQ ID NO: 1150965 - DNA, 15 bp, Homo sapiens
aaaaaggttatcaac

SEQ ID NO: 1150966 - DNA, 15 bp, Homo sapiens
aaaaaaggttatcaa

SEQ ID NO: 1150967 - DNA, 15 bp, Homo sapiens
taaaaaaggttatca

SEQ ID NO: 1150968 - DNA, 15 bp, Homo sapiens
ataaaaaaggttatc

SEQ ID NO: 1150969 - DNA, 15 bp, Homo sapiens
tataaaaaaggttat

SEQ ID NO: 1150970 - DNA, 15 bp, Homo sapiens
atataaaaaaggtta

SEQ ID NO: 1150971 - DNA, 15 bp, Homo sapiens
aatataaaaaaggtt

SEQ ID NO: 1150972 - DNA, 15 bp, Homo sapiens
aaatataaaaaaggt

SEQ ID NO: 1150973 - DNA, 15 bp, Homo sapiens
taaatataaaaaagg

SEQ ID NO: 1150974 - DNA, 15 bp, Homo sapiens
gtaaatataaaaaag

SEQ ID NO: 1150975 - DNA, 15 bp, Homo sapiens
agtaaatataaaaaa

SEQ ID NO: 1150976 - DNA, 15 bp, Homo sapiens
aagtaaatataaaaa

SEQ ID NO: 1150977 - DNA, 15 bp, Homo sapiens
aaagtaaatataaaa

SEQ ID NO: 1150978 - DNA, 15 bp, Homo sapiens
taaagtaaatataaa

SEQ ID NO: 1150979 - DNA, 15 bp, Homo sapiens
ttaaagtaaatataa

SEQ ID NO: 1150980 - DNA, 15 bp, Homo sapiens
tttaaagtaaatata

SEQ ID NO: 1150981 - DNA, 15 bp, Homo sapiens
ttttaaagtaaatat

SEQ ID NO: 1150982 - DNA, 15 bp, Homo sapiens
tttttaaagtaaata

SEQ ID NO: 1150983 - DNA, 15 bp, Homo sapiens
atttttaaagtaaat

SEQ ID NO: 1150984 - DNA, 15 bp, Homo sapiens
tatttttaaagtaaa

SEQ ID NO: 1150985 - DNA, 15 bp, Homo sapiens
ctatttttaaagtaa

SEQ ID NO: 1150986 - DNA, 15 bp, Homo sapiens
gctatttttaaagta

SEQ ID NO: 1150987 - DNA, 15 bp, Homo sapiens
agctatttttaaagt

SEQ ID NO: 1150988 - DNA, 15 bp, Homo sapiens
cagctatttttaaag

SEQ ID NO: 1150989 - DNA, 15 bp, Homo sapiens
tcagctatttttaaa

SEQ ID NO: 1150990 - DNA, 15 bp, Homo sapiens
atcagctatttttaa

SEQ ID NO: 1150991 - DNA, 15 bp, Homo sapiens
catcagctattttta

SEQ ID NO: 1150992 - DNA, 15 bp, Homo sapiens
tcatcagctattttt

SEQ ID NO: 1150993 - DNA, 15 bp, Homo sapiens
ttcatcagctatttt

SEQ ID NO: 1150994 - DNA, 15 bp, Homo sapiens
gttcatcagctattt

SEQ ID NO: 1150995 - DNA, 15 bp, Homo sapiens
agttcatcagctatt

SEQ ID NO: 1150996 - DNA, 15 bp, Homo sapiens
tagttcatcagctat

SEQ ID NO: 1150997 - DNA, 15 bp, Homo sapiens
gtagttcatcagcta

SEQ ID NO: 1150998 - DNA, 15 bp, Homo sapiens
agtagttcatcagct

SEQ ID NO: 1150999 - DNA, 15 bp, Homo sapiens
gagtagttcatcagc

SEQ ID NO: 1151000 - DNA, 15 bp, Homo sapiens
tgagtagttcatcag

SEQ ID NO: 1151001 - DNA, 15 bp, Homo sapiens
atgagtagttcatca

SEQ ID NO: 1151002 - DNA, 15 bp, Homo sapiens
tatgagtagttcatc

SEQ ID NO: 1151003 - DNA, 15 bp, Homo sapiens
ttatgagtagttcat

SEQ ID NO: 1151004 - DNA, 15 bp, Homo sapiens
attatgagtagttca

SEQ ID NO: 1151005 - DNA, 15 bp, Homo sapiens
aattatgagtagttc

SEQ ID NO: 1151006 - DNA, 15 bp, Homo sapiens
aaattatgagtagtt

SEQ ID NO: 1151007 - DNA, 15 bp, Homo sapiens
aaaattatgagtagt

SEQ ID NO: 1151008 - DNA, 15 bp, Homo sapiens
aaaaattatgagtag

SEQ ID NO: 1151009 - DNA, 15 bp, Homo sapiens
aaaaaattatgagta

SEQ ID NO: 1151010 - DNA, 15 bp, Homo sapiens
taaaaaattatgagt

SEQ ID NO: 1151011 - DNA, 15 bp, Homo sapiens
ttaaaaaattatgag

SEQ ID NO: 1151012 - DNA, 15 bp, Homo sapiens
tttaaaaaattatga

SEQ ID NO: 1151013 - DNA, 15 bp, Homo sapiens
ctttaaaaaattatg

SEQ ID NO: 1151014 - DNA, 15 bp, Homo sapiens
actttaaaaaattat

SEQ ID NO: 1151015 - DNA, 15 bp, Homo sapiens
gactttaaaaaatta

SEQ ID NO: 1151016 - DNA, 15 bp, Homo sapiens
agactttaaaaaatt

SEQ ID NO: 1151017 - DNA, 15 bp, Homo sapiens
gagactttaaaaaat

SEQ ID NO: 1151018 - DNA, 15 bp, Homo sapiens
ggagactttaaaaaa

SEQ ID NO: 1151019 - DNA, 15 bp, Homo sapiens
tggagactttaaaaa

SEQ ID NO: 1151020 - DNA, 15 bp, Homo sapiens
ctggagactttaaaa

SEQ ID NO: 1151021 - DNA, 15 bp, Homo sapiens
cctggagactttaaa

SEQ ID NO: 1151022 - DNA, 15 bp, Homo sapiens
tcctggagactttaa

SEQ ID NO: 1151023 - DNA, 15 bp, Homo sapiens
ttcctggagacttta

SEQ ID NO: 1151024 - DNA, 15 bp, Homo sapiens
tttcctggagacttt

SEQ ID NO: 1151025 - DNA, 15 bp, Homo sapiens
ttttcctggagactt

SEQ ID NO: 1151026 - DNA, 15 bp, Homo sapiens
cttttcctggagact

SEQ ID NO: 1151027 - DNA, 15 bp, Homo sapiens
gcttttcctggagac

SEQ ID NO: 1151028 - DNA, 15 bp, Homo sapiens
ggcttttcctggaga

SEQ ID NO: 1151029 - DNA, 15 bp, Homo sapiens
tggcttttcctggag

SEQ ID NO: 1151030 - DNA, 15 bp, Homo sapiens
atggcttttcctgga

SEQ ID NO: 1151031 - DNA, 15 bp, Homo sapiens
aatggcttttcctgg

SEQ ID NO: 1151032 - DNA, 15 bp, Homo sapiens
taatggcttttcctg

SEQ ID NO: 1151033 - DNA, 15 bp, Homo sapiens
ctaatggcttttcct

SEQ ID NO: 1151034 - DNA, 15 bp, Homo sapiens
gctaatggcttttcc

SEQ ID NO: 1151035 - DNA, 15 bp, Homo sapiens
tgctaatggcttttc

SEQ ID NO: 1151036 - DNA, 15 bp, Homo sapiens
ctgctaatggctttt

SEQ ID NO: 1151037 - DNA, 15 bp, Homo sapiens
gctgctaatggcttt

SEQ ID NO: 1151038 - DNA, 15 bp, Homo sapiens
agctgctaatggctt

SEQ ID NO: 1151039 - DNA, 15 bp, Homo sapiens
aagctgctaatggct

SEQ ID NO: 1151040 - DNA, 15 bp, Homo sapiens
taagctgctaatggc

SEQ ID NO: 1151041 - DNA, 15 bp, Homo sapiens
ctaagctgctaatgg

SEQ ID NO: 1151042 - DNA, 15 bp, Homo sapiens
cctaagctgctaatg

SEQ ID NO: 1151043 - DNA, 15 bp, Homo sapiens
ccctaagctgctaat

SEQ ID NO: 1151044 - DNA, 15 bp, Homo sapiens
accctaagctgctaa

SEQ ID NO: 1151045 - DNA, 15 bp, Homo sapiens
caccctaagctgcta

SEQ ID NO: 1151046 - DNA, 15 bp, Homo sapiens
tcaccctaagctgct

SEQ ID NO: 1151047 - DNA, 15 bp, Homo sapiens
atcaccctaagctgc

SEQ ID NO: 1151048 - DNA, 15 bp, Homo sapiens
catcaccctaagctg

SEQ ID NO: 1151049 - DNA, 15 bp, Homo sapiens
ccatcaccctaagct

SEQ ID NO: 1151050 - DNA, 15 bp, Homo sapiens
accatcaccctaagc

SEQ ID NO: 1151051 - DNA, 15 bp, Homo sapiens
aaccatcaccctaag

SEQ ID NO: 1151052 - DNA, 15 bp, Homo sapiens
taaccatcaccctaa

SEQ ID NO: 1151053 - DNA, 15 bp, Homo sapiens
ttaaccatcacccta

SEQ ID NO: 1151054 - DNA, 15 bp, Homo sapiens
cttaaccatcaccct

SEQ ID NO: 1151055 - DNA, 15 bp, Homo sapiens
tcttaaccatcaccc

SEQ ID NO: 1151056 - DNA, 15 bp, Homo sapiens
ctcttaaccatcacc

SEQ ID NO: 1151057 - DNA, 15 bp, Homo sapiens
gctcttaaccatcac

SEQ ID NO: 1151058 - DNA, 15 bp, Homo sapiens
tgctcttaaccatca

SEQ ID NO: 1151059 - DNA, 15 bp, Homo sapiens
gtgctcttaaccatc

SEQ ID NO: 1151060 - DNA, 15 bp, Homo sapiens
tgtgctcttaaccat

SEQ ID NO: 1151061 - DNA, 15 bp, Homo sapiens
ctgtgctcttaacca

SEQ ID NO: 1151062 - DNA, 15 bp, Homo sapiens
cctgtgctcttaacc

SEQ ID NO: 1151063 - DNA, 15 bp, Homo sapiens
gcctgtgctcttaac

SEQ ID NO: 1151064 - DNA, 15 bp, Homo sapiens
agcctgtgctcttaa

SEQ ID NO: 1151065 - DNA, 15 bp, Homo sapiens
aagcctgtgctctta

SEQ ID NO: 1151066 - DNA, 15 bp, Homo sapiens
aaagcctgtgctctt

SEQ ID NO: 1151067 - DNA, 15 bp, Homo sapiens
caaagcctgtgctct

SEQ ID NO: 1151068 - DNA, 15 bp, Homo sapiens
tcaaagcctgtgctc

SEQ ID NO: 1151069 - DNA, 15 bp, Homo sapiens
atcaaagcctgtgct

SEQ ID NO: 1151070 - DNA, 15 bp, Homo sapiens
catcaaagcctgtgc

SEQ ID NO: 1151071 - DNA, 15 bp, Homo sapiens
gcatcaaagcctgtg

SEQ ID NO: 1151072 - DNA, 15 bp, Homo sapiens
agcatcaaagcctgt

SEQ ID NO: 1151073 - DNA, 15 bp, Homo sapiens
tagcatcaaagcctg

SEQ ID NO: 1151074 - DNA, 15 bp, Homo sapiens
ctagcatcaaagcct

SEQ ID NO: 1151075 - DNA, 15 bp, Homo sapiens
cctagcatcaaagcc

SEQ ID NO: 1151076 - DNA, 15 bp, Homo sapiens
gcctagcatcaaagc

SEQ ID NO: 1151077 - DNA, 15 bp, Homo sapiens
agcctagcatcaaag

SEQ ID NO: 1151078 - DNA, 15 bp, Homo sapiens
cagcctagcatcaaa

SEQ ID NO: 1151079 - DNA, 15 bp, Homo sapiens
ccagcctagcatcaa

SEQ ID NO: 1151080 - DNA, 15 bp, Homo sapiens
cccagcctagcatca

SEQ ID NO: 1151081 - DNA, 15 bp, Homo sapiens
tcccagcctagcatc

SEQ ID NO: 1151082 - DNA, 15 bp, Homo sapiens
atcccagcctagcat

SEQ ID NO: 1151083 - DNA, 15 bp, Homo sapiens
aatcccagcctagca

SEQ ID NO: 1151084 - DNA, 15 bp, Homo sapiens
caatcccagcctagc

SEQ ID NO: 1151085 - DNA, 15 bp, Homo sapiens
ccaatcccagcctag

SEQ ID NO: 1151086 - DNA, 15 bp, Homo sapiens
tccaatcccagccta

SEQ ID NO: 1151087 - DNA, 15 bp, Homo sapiens
ctccaatcccagcct

SEQ ID NO: 1151088 - DNA, 15 bp, Homo sapiens
actccaatcccagcc

SEQ ID NO: 1151089 - DNA, 15 bp, Homo sapiens
gactccaatcccagc

SEQ ID NO: 1151090 - DNA, 15 bp, Homo sapiens
ggactccaatcccag

SEQ ID NO: 1151091 - DNA, 15 bp, Homo sapiens
aggactccaatccca

SEQ ID NO: 1151092 - DNA, 15 bp, Homo sapiens
caggactccaatccc

SEQ ID NO: 1151093 - DNA, 15 bp, Homo sapiens
ccaggactccaatcc

SEQ ID NO: 1151094 - DNA, 15 bp, Homo sapiens
gccaggactccaatc

SEQ ID NO: 1151095 - DNA, 15 bp, Homo sapiens
agccaggactccaat

SEQ ID NO: 1151096 - DNA, 15 bp, Homo sapiens
gagccaggactccaa

SEQ ID NO: 1151097 - DNA, 15 bp, Homo sapiens
agagccaggactcca

SEQ ID NO: 1151098 - DNA, 15 bp, Homo sapiens
cagagccaggactcc

SEQ ID NO: 1151099 - DNA, 15 bp, Homo sapiens
acagagccaggactc

SEQ ID NO: 1151100 - DNA, 15 bp, Homo sapiens
aacagagccaggact

SEQ ID NO: 1151101 - DNA, 15 bp, Homo sapiens
gaacagagccaggac

SEQ ID NO: 1151102 - DNA, 15 bp, Homo sapiens
agaacagagccagga

SEQ ID NO: 1151103 - DNA, 15 bp, Homo sapiens
aagaacagagccagg

SEQ ID NO: 1151104 - DNA, 15 bp, Homo sapiens
aaagaacagagccag

SEQ ID NO: 1151105 - DNA, 15 bp, Homo sapiens
aaaagaacagagcca

SEQ ID NO: 1151106 - DNA, 15 bp, Homo sapiens
gaaaagaacagagcc

SEQ ID NO: 1151107 - DNA, 15 bp, Homo sapiens
agaaaagaacagagc

SEQ ID NO: 1151108 - DNA, 15 bp, Homo sapiens
tagaaaagaacagag

SEQ ID NO: 1151109 - DNA, 15 bp, Homo sapiens
ctagaaaagaacaga

SEQ ID NO: 1151110 - DNA, 15 bp, Homo sapiens
gctagaaaagaacag

SEQ ID NO: 1151111 - DNA, 15 bp, Homo sapiens
agctagaaaagaaca

SEQ ID NO: 1151112 - DNA, 15 bp, Homo sapiens
cagctagaaaagaac

SEQ ID NO: 1151113 - DNA, 15 bp, Homo sapiens
acagctagaaaagaa

SEQ ID NO: 1151114 - DNA, 15 bp, Homo sapiens
cacagctagaaaaga

SEQ ID NO: 1151115 - DNA, 15 bp, Homo sapiens
acacagctagaaaag

SEQ ID NO: 1151116 - DNA, 15 bp, Homo sapiens
gacacagctagaaaa

SEQ ID NO: 1151117 - DNA, 15 bp, Homo sapiens
ggacacagctagaaa

SEQ ID NO: 1151118 - DNA, 15 bp, Homo sapiens
aggacacagctagaa

SEQ ID NO: 1151119 - DNA, 15 bp, Homo sapiens
aaggacacagctaga

SEQ ID NO: 1151120 - DNA, 15 bp, Homo sapiens
caaggacacagctag

SEQ ID NO: 1151121 - DNA, 15 bp, Homo sapiens
ccaaggacacagcta

SEQ ID NO: 1151122 - DNA, 15 bp, Homo sapiens
cccaaggacacagct

SEQ ID NO: 1151123 - DNA, 15 bp, Homo sapiens
gcccaaggacacagc

SEQ ID NO: 1151124 - DNA, 15 bp, Homo sapiens
tgcccaaggacacag

SEQ ID NO: 1151125 - DNA, 15 bp, Homo sapiens
gtgcccaaggacaca

SEQ ID NO: 1151126 - DNA, 15 bp, Homo sapiens
cgtgcccaaggacac

SEQ ID NO: 1151127 - DNA, 15 bp, Homo sapiens
acgtgcccaaggaca

SEQ ID NO: 1151128 - DNA, 15 bp, Homo sapiens
aacgtgcccaaggac

SEQ ID NO: 1151129 - DNA, 15 bp, Homo sapiens
taacgtgcccaagga

SEQ ID NO: 1151130 - DNA, 15 bp, Homo sapiens
ttaacgtgcccaagg

SEQ ID NO: 1151131 - DNA, 15 bp, Homo sapiens
gttaacgtgcccaag

SEQ ID NO: 1151132 - DNA, 15 bp, Homo sapiens
agttaacgtgcccaa

SEQ ID NO: 1151133 - DNA, 15 bp, Homo sapiens
tagttaacgtgccca

SEQ ID NO: 1151134 - DNA, 15 bp, Homo sapiens
ttagttaacgtgccc

SEQ ID NO: 1151135 - DNA, 15 bp, Homo sapiens
gttagttaacgtgcc

SEQ ID NO: 1151136 - DNA, 15 bp, Homo sapiens
ggttagttaacgtgc

SEQ ID NO: 1151137 - DNA, 15 bp, Homo sapiens
aggttagttaacgtg

SEQ ID NO: 1151138 - DNA, 15 bp, Homo sapiens
gaggttagttaacgt

SEQ ID NO: 1151139 - DNA, 15 bp, Homo sapiens
agaggttagttaacg

SEQ ID NO: 1151140 - DNA, 15 bp, Homo sapiens
gagaggttagttaac

SEQ ID NO: 1151141 - DNA, 15 bp, Homo sapiens
agagaggttagttaa

SEQ ID NO: 1151142 - DNA, 15 bp, Homo sapiens
tagagaggttagtta

SEQ ID NO: 1151143 - DNA, 15 bp, Homo sapiens
ttagagaggttagtt

SEQ ID NO: 1151144 - DNA, 15 bp, Homo sapiens
cttagagaggttagt

SEQ ID NO: 1151145 - DNA, 15 bp, Homo sapiens
gcttagagaggttag

SEQ ID NO: 1151146 - DNA, 15 bp, Homo sapiens
ggcttagagaggtta

SEQ ID NO: 1151147 - DNA, 15 bp, Homo sapiens
aggcttagagaggtt

SEQ ID NO: 1151148 - DNA, 15 bp, Homo sapiens
caggcttagagaggt

SEQ ID NO: 1151149 - DNA, 15 bp, Homo sapiens
tcaggcttagagagg

SEQ ID NO: 1151150 - DNA, 15 bp, Homo sapiens
ctcaggcttagagag

SEQ ID NO: 1151151 - DNA, 15 bp, Homo sapiens
tctcaggcttagaga

SEQ ID NO: 1151152 - DNA, 15 bp, Homo sapiens
gtctcaggcttagag

SEQ ID NO: 1151153 - DNA, 15 bp, Homo sapiens
tgtctcaggcttaga

SEQ ID NO: 1151154 - DNA, 15 bp, Homo sapiens
atgtctcaggcttag

SEQ ID NO: 1151155 - DNA, 15 bp, Homo sapiens
gatgtctcaggctta

SEQ ID NO: 1151156 - DNA, 15 bp, Homo sapiens
agatgtctcaggctt

SEQ ID NO: 1151157 - DNA, 15 bp, Homo sapiens
gagatgtctcaggct

SEQ ID NO: 1151158 - DNA, 15 bp, Homo sapiens
agagatgtctcaggc

SEQ ID NO: 1151159 - DNA, 15 bp, Homo sapiens
cagagatgtctcagg

SEQ ID NO: 1151160 - DNA, 15 bp, Homo sapiens
tcagagatgtctcag

SEQ ID NO: 1151161 - DNA, 15 bp, Homo sapiens
ttcagagatgtctca

SEQ ID NO: 1151162 - DNA, 15 bp, Homo sapiens
cttcagagatgtctc

SEQ ID NO: 1151163 - DNA, 15 bp, Homo sapiens
acttcagagatgtct

SEQ ID NO: 1151164 - DNA, 15 bp, Homo sapiens
tacttcagagatgtc

SEQ ID NO: 1151165 - DNA, 15 bp, Homo sapiens
ttacttcagagatgt

SEQ ID NO: 1151166 - DNA, 15 bp, Homo sapiens
attacttcagagatg

SEQ ID NO: 1151167 - DNA, 15 bp, Homo sapiens
tattacttcagagat

SEQ ID NO: 1151168 - DNA, 15 bp, Homo sapiens
ctattacttcagaga

SEQ ID NO: 1151169 - DNA, 15 bp, Homo sapiens
cctattacttcagag

SEQ ID NO: 1151170 - DNA, 15 bp, Homo sapiens
ccctattacttcaga

SEQ ID NO: 1151171 - DNA, 15 bp, Homo sapiens
cccctattacttcag

SEQ ID NO: 1151172 - DNA, 15 bp, Homo sapiens
tcccctattacttca

SEQ ID NO: 1151173 - DNA, 15 bp, Homo sapiens
ttcccctattacttc

SEQ ID NO: 1151174 - DNA, 15 bp, Homo sapiens
cttcccctattactt

SEQ ID NO: 1151175 - DNA, 15 bp, Homo sapiens
tcttcccctattact

SEQ ID NO: 1151176 - DNA, 15 bp, Homo sapiens
ctcttcccctattac

SEQ ID NO: 1151177 - DNA, 15 bp, Homo sapiens
cctcttcccctatta

SEQ ID NO: 1151178 - DNA, 15 bp, Homo sapiens
ccctcttcccctatt

SEQ ID NO: 1151179 - DNA, 15 bp, Homo sapiens
cccctcttcccctat

SEQ ID NO: 1151180 - DNA, 15 bp, Homo sapiens
tcccctcttccccta

SEQ ID NO: 1151181 - DNA, 15 bp, Homo sapiens
gtcccctcttcccct

SEQ ID NO: 1151182 - DNA, 15 bp, Homo sapiens
tgtcccctcttcccc

SEQ ID NO: 1151183 - DNA, 15 bp, Homo sapiens
ctgtcccctcttccc

SEQ ID NO: 1151184 - DNA, 15 bp, Homo sapiens
tctgtcccctcttcc

SEQ ID NO: 1151185 - DNA, 15 bp, Homo sapiens
ttctgtcccctcttc

SEQ ID NO: 1151186 - DNA, 15 bp, Homo sapiens
tttctgtcccctctt

SEQ ID NO: 1151187 - DNA, 15 bp, Homo sapiens
atttctgtcccctct

SEQ ID NO: 1151188 - DNA, 15 bp, Homo sapiens
tatttctgtcccctc

SEQ ID NO: 1151189 - DNA, 15 bp, Homo sapiens
ctatttctgtcccct

SEQ ID NO: 1151190 - DNA, 15 bp, Homo sapiens
actatttctgtcccc

SEQ ID NO: 1151191 - DNA, 15 bp, Homo sapiens
tactatttctgtccc

SEQ ID NO: 1151192 - DNA, 15 bp, Homo sapiens
atactatttctgtcc

SEQ ID NO: 1151193 - DNA, 15 bp, Homo sapiens
gatactatttctgtc

SEQ ID NO: 1151194 - DNA, 15 bp, Homo sapiens
tgatactatttctgt

SEQ ID NO: 1151195 - DNA, 15 bp, Homo sapiens
atgatactatttctg

SEQ ID NO: 1151196 - DNA, 15 bp, Homo sapiens
tatgatactatttct

SEQ ID NO: 1151197 - DNA, 15 bp, Homo sapiens
ctatgatactatttc

SEQ ID NO: 1151198 - DNA, 15 bp, Homo sapiens
cctatgatactattt

SEQ ID NO: 1151199 - DNA, 15 bp, Homo sapiens
tcctatgatactatt

SEQ ID NO: 1151200 - DNA, 15 bp, Homo sapiens
atcctatgatactat

SEQ ID NO: 1151201 - DNA, 15 bp, Homo sapiens
aatcctatgatacta

SEQ ID NO: 1151202 - DNA, 15 bp, Homo sapiens
taatcctatgatact

SEQ ID NO: 1151203 - DNA, 15 bp, Homo sapiens
ataatcctatgatac

SEQ ID NO: 1151204 - DNA, 15 bp, Homo sapiens
aataatcctatgata

SEQ ID NO: 1151205 - DNA, 15 bp, Homo sapiens
aaataatcctatgat

SEQ ID NO: 1151206 - DNA, 15 bp, Homo sapiens
taaataatcctatga

SEQ ID NO: 1151207 - DNA, 15 bp, Homo sapiens
ttaaataatcctatg

SEQ ID NO: 1151208 - DNA, 15 bp, Homo sapiens
tttaaataatcctat

SEQ ID NO: 1151209 - DNA, 15 bp, Homo sapiens
ctttaaataatccta

SEQ ID NO: 1151210 - DNA, 15 bp, Homo sapiens
tctttaaataatcct

SEQ ID NO: 1151211 - DNA, 15 bp, Homo sapiens
ttctttaaataatcc

SEQ ID NO: 1151212 - DNA, 15 bp, Homo sapiens
attctttaaataatc

SEQ ID NO: 1151213 - DNA, 15 bp, Homo sapiens
tattctttaaataat

SEQ ID NO: 1151214 - DNA, 15 bp, Homo sapiens
ttattctttaaataa

SEQ ID NO: 1151215 - DNA, 15 bp, Homo sapiens
gttattctttaaata

SEQ ID NO: 1151216 - DNA, 15 bp, Homo sapiens
ggttattctttaaat

SEQ ID NO: 1151217 - DNA, 15 bp, Homo sapiens
tggttattctttaaa

SEQ ID NO: 1151218 - DNA, 15 bp, Homo sapiens
ttggttattctttaa

SEQ ID NO: 1151219 - DNA, 15 bp, Homo sapiens
cttggttattcttta

SEQ ID NO: 1151220 - DNA, 15 bp, Homo sapiens
tcttggttattcttt

SEQ ID NO: 1151221 - DNA, 15 bp, Homo sapiens
atcttggttattctt

SEQ ID NO: 1151222 - DNA, 15 bp, Homo sapiens
tatcttggttattct

SEQ ID NO: 1151223 - DNA, 15 bp, Homo sapiens
gtatcttggttattc

SEQ ID NO: 1151224 - DNA, 15 bp, Homo sapiens
agtatcttggttatt

SEQ ID NO: 1151225 - DNA, 15 bp, Homo sapiens
cagtatcttggttat

SEQ ID NO: 1151226 - DNA, 15 bp, Homo sapiens
gcagtatcttggtta

SEQ ID NO: 1151227 - DNA, 15 bp, Homo sapiens
tgcagtatcttggtt

SEQ ID NO: 1151228 - DNA, 15 bp, Homo sapiens
atgcagtatcttggt

SEQ ID NO: 1151229 - DNA, 15 bp, Homo sapiens
catgcagtatcttgg

SEQ ID NO: 1151230 - DNA, 15 bp, Homo sapiens
acatgcagtatcttg

SEQ ID NO: 1151231 - DNA, 15 bp, Homo sapiens
tacatgcagtatctt

SEQ ID NO: 1151232 - DNA, 15 bp, Homo sapiens
ttacatgcagtatct

SEQ ID NO: 1151233 - DNA, 15 bp, Homo sapiens
tttacatgcagtatc

SEQ ID NO: 1151234 - DNA, 15 bp, Homo sapiens
ctttacatgcagtat

SEQ ID NO: 1151235 - DNA, 15 bp, Homo sapiens
actttacatgcagta

SEQ ID NO: 1151236 - DNA, 15 bp, Homo sapiens
aactttacatgcagt

SEQ ID NO: 1151237 - DNA, 15 bp, Homo sapiens
taactttacatgcag

SEQ ID NO: 1151238 - DNA, 15 bp, Homo sapiens
ataactttacatgca

SEQ ID NO: 1151239 - DNA, 15 bp, Homo sapiens
aataactttacatgc

SEQ ID NO: 1151240 - DNA, 15 bp, Homo sapiens
taataactttacatg

SEQ ID NO: 1151241 - DNA, 15 bp, Homo sapiens
ctaataactttacat

SEQ ID NO: 1151242 - DNA, 15 bp, Homo sapiens
gctaataactttaca

SEQ ID NO: 1151243 - DNA, 15 bp, Homo sapiens
tgctaataactttac

SEQ ID NO: 1151244 - DNA, 15 bp, Homo sapiens
gtgctaataacttta

SEQ ID NO: 1151245 - DNA, 15 bp, Homo sapiens
tgtgctaataacttt

SEQ ID NO: 1151246 - DNA, 15 bp, Homo sapiens
atgtgctaataactt

SEQ ID NO: 1151247 - DNA, 15 bp, Homo sapiens
catgtgctaataact

SEQ ID NO: 1151248 - DNA, 15 bp, Homo sapiens
gcatgtgctaataac

SEQ ID NO: 1151249 - DNA, 15 bp, Homo sapiens
ggcatgtgctaataa

SEQ ID NO: 1151250 - DNA, 15 bp, Homo sapiens
aggcatgtgctaata

SEQ ID NO: 1151251 - DNA, 15 bp, Homo sapiens
taggcatgtgctaat

SEQ ID NO: 1151252 - DNA, 15 bp, Homo sapiens
ctaggcatgtgctaa

SEQ ID NO: 1151253 - DNA, 15 bp, Homo sapiens
gctaggcatgtgcta

SEQ ID NO: 1151254 - DNA, 15 bp, Homo sapiens
tgctaggcatgtgct

SEQ ID NO: 1151255 - DNA, 15 bp, Homo sapiens
gtgctaggcatgtgc

SEQ ID NO: 1151256 - DNA, 15 bp, Homo sapiens
tgtgctaggcatgtg

SEQ ID NO: 1151257 - DNA, 15 bp, Homo sapiens
atgtgctaggcatgt

SEQ ID NO: 1151258 - DNA, 15 bp, Homo sapiens
tatgtgctaggcatg

SEQ ID NO: 1151259 - DNA, 15 bp, Homo sapiens
atatgtgctaggcat

SEQ ID NO: 1151260 - DNA, 15 bp, Homo sapiens
catatgtgctaggca

SEQ ID NO: 1151261 - DNA, 15 bp, Homo sapiens
tcatatgtgctaggc

SEQ ID NO: 1151262 - DNA, 15 bp, Homo sapiens
ttcatatgtgctagg

SEQ ID NO: 1151263 - DNA, 15 bp, Homo sapiens
tttcatatgtgctag

SEQ ID NO: 1151264 - DNA, 15 bp, Homo sapiens
gtttcatatgtgcta

SEQ ID NO: 1151265 - DNA, 15 bp, Homo sapiens
tgtttcatatgtgct

SEQ ID NO: 1151266 - DNA, 15 bp, Homo sapiens
gtgtttcatatgtgc

SEQ ID NO: 1151267 - DNA, 15 bp, Homo sapiens
agtgtttcatatgtg

SEQ ID NO: 1151268 - DNA, 15 bp, Homo sapiens
aagtgtttcatatgt

SEQ ID NO: 1151269 - DNA, 15 bp, Homo sapiens
caagtgtttcatatg

SEQ ID NO: 1151270 - DNA, 15 bp, Homo sapiens
tcaagtgtttcatat

SEQ ID NO: 1151271 - DNA, 15 bp, Homo sapiens
atcaagtgtttcata

SEQ ID NO: 1151272 - DNA, 15 bp, Homo sapiens
tatcaagtgtttcat

SEQ ID NO: 1151273 - DNA, 15 bp, Homo sapiens
atatcaagtgtttca

SEQ ID NO: 1151274 - DNA, 15 bp, Homo sapiens
aatatcaagtgtttc

SEQ ID NO: 1151275 - DNA, 15 bp, Homo sapiens
caatatcaagtgttt

SEQ ID NO: 1151276 - DNA, 15 bp, Homo sapiens
acaatatcaagtgtt

SEQ ID NO: 1151277 - DNA, 15 bp, Homo sapiens
aacaatatcaagtgt

SEQ ID NO: 1151278 - DNA, 15 bp, Homo sapiens
caacaatatcaagtg

SEQ ID NO: 1151279 - DNA, 15 bp, Homo sapiens
ccaacaatatcaagt

SEQ ID NO: 1151280 - DNA, 15 bp, Homo sapiens
gccaacaatatcaag

SEQ ID NO: 1151281 - DNA, 15 bp, Homo sapiens
agccaacaatatcaa

SEQ ID NO: 1151282 - DNA, 15 bp, Homo sapiens
cagccaacaatatca

SEQ ID NO: 1151283 - DNA, 15 bp, Homo sapiens
gcagccaacaatatc

SEQ ID NO: 1151284 - DNA, 15 bp, Homo sapiens
agcagccaacaatat

SEQ ID NO: 1151285 - DNA, 15 bp, Homo sapiens
cagcagccaacaata

SEQ ID NO: 1151286 - DNA, 15 bp, Homo sapiens
gcagcagccaacaat

SEQ ID NO: 1151287 - DNA, 15 bp, Homo sapiens
agcagcagccaacaa

SEQ ID NO: 1151288 - DNA, 15 bp, Homo sapiens
tagcagcagccaaca

SEQ ID NO: 1151289 - DNA, 15 bp, Homo sapiens
atagcagcagccaac

SEQ ID NO: 1151290 - DNA, 15 bp, Homo sapiens
aatagcagcagccaa

SEQ ID NO: 1151291 - DNA, 15 bp, Homo sapiens
taatagcagcagcca

SEQ ID NO: 1151292 - DNA, 15 bp, Homo sapiens
ataatagcagcagcc

SEQ ID NO: 1151293 - DNA, 15 bp, Homo sapiens
aataatagcagcagc

SEQ ID NO: 1151294 - DNA, 15 bp, Homo sapiens
taataatagcagcag

SEQ ID NO: 1151295 - DNA, 15 bp, Homo sapiens
ataataatagcagca

SEQ ID NO: 1151296 - DNA, 15 bp, Homo sapiens
cataataatagcagc

SEQ ID NO: 1151297 - DNA, 15 bp, Homo sapiens
ccataataatagcag

SEQ ID NO: 1151298 - DNA, 15 bp, Homo sapiens
accataataatagca

SEQ ID NO: 1151299 - DNA, 15 bp, Homo sapiens
caccataataatagc

SEQ ID NO: 1151300 - DNA, 15 bp, Homo sapiens
tcaccataataatag

SEQ ID NO: 1151301 - DNA, 15 bp, Homo sapiens
atcaccataataata

SEQ ID NO: 1151302 - DNA, 15 bp, Homo sapiens
aatcaccataataat

SEQ ID NO: 1151303 - DNA, 15 bp, Homo sapiens
taatcaccataataa

SEQ ID NO: 1151304 - DNA, 15 bp, Homo sapiens
ctaatcaccataata

SEQ ID NO: 1151305 - DNA, 15 bp, Homo sapiens
gctaatcaccataat

SEQ ID NO: 1151306 - DNA, 15 bp, Homo sapiens
tgctaatcaccataa

SEQ ID NO: 1151307 - DNA, 15 bp, Homo sapiens
atgctaatcaccata

SEQ ID NO: 1151308 - DNA, 15 bp, Homo sapiens
aatgctaatcaccat

SEQ ID NO: 1151309 - DNA, 15 bp, Homo sapiens
gtaatgctaatcacc

SEQ ID NO: 1151310 - DNA, 15 bp, Homo sapiens
ggtaatgctaatcac

SEQ ID NO: 1151311 - DNA, 15 bp, Homo sapiens
tggtaatgctaatca

SEQ ID NO: 1151312 - DNA, 15 bp, Homo sapiens
ctggtaatgctaatc

SEQ ID NO: 1151313 - DNA, 15 bp, Homo sapiens
cctggtaatgctaat

SEQ ID NO: 1151314 - DNA, 15 bp, Homo sapiens
tcctggtaatgctaa

SEQ ID NO: 1151315 - DNA, 15 bp, Homo sapiens
atcctggtaatgcta

SEQ ID NO: 1151316 - DNA, 15 bp, Homo sapiens
aatcctggtaatgct

SEQ ID NO: 1151317 - DNA, 15 bp, Homo sapiens
taatcctggtaatgc

SEQ ID NO: 1151318 - DNA, 15 bp, Homo sapiens
ataatcctggtaatg

SEQ ID NO: 1151319 - DNA, 15 bp, Homo sapiens
aataatcctggtaat

SEQ ID NO: 1151320 - DNA, 15 bp, Homo sapiens
taataatcctggtaa

SEQ ID NO: 1151321 - DNA, 15 bp, Homo sapiens
ataataatcctggta

SEQ ID NO: 1151322 - DNA, 15 bp, Homo sapiens
aataataatcctggt

SEQ ID NO: 1151323 - DNA, 15 bp, Homo sapiens
taataataatcctgg

SEQ ID NO: 1151324 - DNA, 15 bp, Homo sapiens
ataataataatcctg

SEQ ID NO: 1151325 - DNA, 15 bp, Homo sapiens
aataataataatcct

SEQ ID NO: 1151326 - DNA, 15 bp, Homo sapiens
taataataataatcc

SEQ ID NO: 1151327 - DNA, 15 bp, Homo sapiens
ataataataataatc

SEQ ID NO: 1151328 - DNA, 15 bp, Homo sapiens
aaaataataataata

SEQ ID NO: 1151329 - DNA, 15 bp, Homo sapiens
aaaaataataataat

SEQ ID NO: 1151330 - DNA, 15 bp, Homo sapiens
caaaaaataataata

SEQ ID NO: 1151331 - DNA, 15 bp, Homo sapiens
ccaaaaaataataat

SEQ ID NO: 1151332 - DNA, 15 bp, Homo sapiens
accaaaaaataataa

SEQ ID NO: 1151333 - DNA, 15 bp, Homo sapiens
aaccaaaaaataata

SEQ ID NO: 1151334 - DNA, 15 bp, Homo sapiens
caaccaaaaaataat

SEQ ID NO: 1151335 - DNA, 15 bp, Homo sapiens
gcaaccaaaaaataa

SEQ ID NO: 1151336 - DNA, 15 bp, Homo sapiens
agcaaccaaaaaata

SEQ ID NO: 1151337 - DNA, 15 bp, Homo sapiens
tagcaaccaaaaaat

SEQ ID NO: 1151338 - DNA, 15 bp, Homo sapiens
ttagcaaccaaaaaa

SEQ ID NO: 1151339 - DNA, 15 bp, Homo sapiens
tttagcaaccaaaaa

SEQ ID NO: 1151340 - DNA, 15 bp, Homo sapiens
atttagcaaccaaaa

SEQ ID NO: 1151341 - DNA, 15 bp, Homo sapiens
aatttagcaaccaaa

SEQ ID NO: 1151342 - DNA, 15 bp, Homo sapiens
caatttagcaaccaa

SEQ ID NO: 1151343 - DNA, 15 bp, Homo sapiens
ccaatttagcaacca

SEQ ID NO: 1151344 - DNA, 15 bp, Homo sapiens
accaatttagcaacc

SEQ ID NO: 1151345 - DNA, 15 bp, Homo sapiens
aaccaatttagcaac

SEQ ID NO: 1151346 - DNA, 15 bp, Homo sapiens
taaccaatttagcaa

SEQ ID NO: 1151347 - DNA, 15 bp, Homo sapiens
gtaaccaatttagca

SEQ ID NO: 1151348 - DNA, 15 bp, Homo sapiens
ggtaaccaatttagc

SEQ ID NO: 1151349 - DNA, 15 bp, Homo sapiens
aggtaaccaatttag

SEQ ID NO: 1151350 - DNA, 15 bp, Homo sapiens
taggtaaccaattta

SEQ ID NO: 1151351 - DNA, 15 bp, Homo sapiens
ataggtaaccaattt

SEQ ID NO: 1151352 - DNA, 15 bp, Homo sapiens
aataggtaaccaatt

SEQ ID NO: 1151353 - DNA, 15 bp, Homo sapiens
caataggtaaccaat

SEQ ID NO: 1151354 - DNA, 15 bp, Homo sapiens
gcaataggtaaccaa

SEQ ID NO: 1151355 - DNA, 15 bp, Homo sapiens
agcaataggtaacca

SEQ ID NO: 1151356 - DNA, 15 bp, Homo sapiens
tagcaataggtaacc

SEQ ID NO: 1151357 - DNA, 15 bp, Homo sapiens
atagcaataggtaac

SEQ ID NO: 1151358 - DNA, 15 bp, Homo sapiens
catagcaataggtaa

SEQ ID NO: 1151359 - DNA, 15 bp, Homo sapiens
acatagcaataggta

SEQ ID NO: 1151360 - DNA, 15 bp, Homo sapiens
tacatagcaataggt

SEQ ID NO: 1151361 - DNA, 15 bp, Homo sapiens
ttacatagcaatagg

SEQ ID NO: 1151362 - DNA, 15 bp, Homo sapiens
cttacatagcaatag

SEQ ID NO: 1151363 - DNA, 15 bp, Homo sapiens
tcttacatagcaata

SEQ ID NO: 1151364 - DNA, 15 bp, Homo sapiens
ttcttacatagcaat

SEQ ID NO: 1151365 - DNA, 15 bp, Homo sapiens
tttcttacatagcaa

SEQ ID NO: 1151366 - DNA, 15 bp, Homo sapiens
gtttcttacatagca

SEQ ID NO: 1151367 - DNA, 15 bp, Homo sapiens
agtttcttacatagc

SEQ ID NO: 1151368 - DNA, 15 bp, Homo sapiens
tagtttcttacatag

SEQ ID NO: 1151369 - DNA, 15 bp, Homo sapiens
atagtttcttacata

SEQ ID NO: 1151370 - DNA, 15 bp, Homo sapiens
gatagtttcttacat

SEQ ID NO: 1151371 - DNA, 15 bp, Homo sapiens
agatagtttcttaca

SEQ ID NO: 1151372 - DNA, 15 bp, Homo sapiens
aagatagtttcttac

SEQ ID NO: 1151373 - DNA, 15 bp, Homo sapiens
caagatagtttctta

SEQ ID NO: 1151374 - DNA, 15 bp, Homo sapiens
tcaagatagtttctt

SEQ ID NO: 1151375 - DNA, 15 bp, Homo sapiens
ctcaagatagtttct

SEQ ID NO: 1151376 - DNA, 15 bp, Homo sapiens
actcaagatagtttc

SEQ ID NO: 1151377 - DNA, 15 bp, Homo sapiens
gactcaagatagttt

SEQ ID NO: 1151378 - DNA, 15 bp, Homo sapiens
ggactcaagatagtt

SEQ ID NO: 1151379 - DNA, 15 bp, Homo sapiens
tggactcaagatagt

SEQ ID NO: 1151380 - DNA, 15 bp, Homo sapiens
gtggactcaagatag

SEQ ID NO: 1151381 - DNA, 15 bp, Homo sapiens
cgtggactcaagata

SEQ ID NO: 1151382 - DNA, 15 bp, Homo sapiens
gcgtggactcaagat

SEQ ID NO: 1151383 - DNA, 15 bp, Homo sapiens
agcgtggactcaaga

SEQ ID NO: 1151384 - DNA, 15 bp, Homo sapiens
aagcgtggactcaag

SEQ ID NO: 1151385 - DNA, 15 bp, Homo sapiens
taagcgtggactcaa

SEQ ID NO: 1151386 - DNA, 15 bp, Homo sapiens
ttaagcgtggactca

SEQ ID NO: 1151387 - DNA, 15 bp, Homo sapiens
tttaagcgtggactc

SEQ ID NO: 1151388 - DNA, 15 bp, Homo sapiens
ttttaagcgtggact

SEQ ID NO: 1151389 - DNA, 15 bp, Homo sapiens
gttttaagcgtggac

SEQ ID NO: 1151390 - DNA, 15 bp, Homo sapiens
tgttttaagcgtgga

SEQ ID NO: 1151391 - DNA, 15 bp, Homo sapiens
ttgttttaagcgtgg

SEQ ID NO: 1151392 - DNA, 15 bp, Homo sapiens
attgttttaagcgtg

SEQ ID NO: 1151393 - DNA, 15 bp, Homo sapiens
aattgttttaagcgt

SEQ ID NO: 1151394 - DNA, 15 bp, Homo sapiens
gaattgttttaagcg

SEQ ID NO: 1151395 - DNA, 15 bp, Homo sapiens
tgaattgttttaagc

SEQ ID NO: 1151396 - DNA, 15 bp, Homo sapiens
ctgaattgttttaag

SEQ ID NO: 1151397 - DNA, 15 bp, Homo sapiens
actgaattgttttaa

SEQ ID NO: 1151398 - DNA, 15 bp, Homo sapiens
cactgaattgtttta

SEQ ID NO: 1151399 - DNA, 15 bp, Homo sapiens
acactgaattgtttt

SEQ ID NO: 1151400 - DNA, 15 bp, Homo sapiens
tacactgaattgttt

SEQ ID NO: 1151401 - DNA, 15 bp, Homo sapiens
atacactgaattgtt

SEQ ID NO: 1151402 - DNA, 15 bp, Homo sapiens
aatacactgaattgt

SEQ ID NO: 1151403 - DNA, 15 bp, Homo sapiens
caatacactgaattg

SEQ ID NO: 1151404 - DNA, 15 bp, Homo sapiens
ccaatacactgaatt

SEQ ID NO: 1151405 - DNA, 15 bp, Homo sapiens
gccaatacactgaat

SEQ ID NO: 1151406 - DNA, 15 bp, Homo sapiens
agccaatacactgaa

SEQ ID NO: 1151407 - DNA, 15 bp, Homo sapiens
cagccaatacactga

SEQ ID NO: 1151408 - DNA, 15 bp, Homo sapiens
tcagccaatacactg

SEQ ID NO: 1151409 - DNA, 15 bp, Homo sapiens
ctcagccaatacact

SEQ ID NO: 1151410 - DNA, 15 bp, Homo sapiens
actcagccaatacac

SEQ ID NO: 1151411 - DNA, 15 bp, Homo sapiens
tactcagccaataca

SEQ ID NO: 1151412 - DNA, 15 bp, Homo sapiens
ctactcagccaatac

SEQ ID NO: 1151413 - DNA, 15 bp, Homo sapiens
tctactcagccaata

SEQ ID NO: 1151414 - DNA, 15 bp, Homo sapiens
atctactcagccaat

SEQ ID NO: 1151415 - DNA, 15 bp, Homo sapiens
gatctactcagccaa

SEQ ID NO: 1151416 - DNA, 15 bp, Homo sapiens
ggatctactcagcca

SEQ ID NO: 1151417 - DNA, 15 bp, Homo sapiens
aggatctactcagcc

SEQ ID NO: 1151418 - DNA, 15 bp, Homo sapiens
gaggatctactcagc

SEQ ID NO: 1151419 - DNA, 15 bp, Homo sapiens
agaggatctactcag

SEQ ID NO: 1151420 - DNA, 15 bp, Homo sapiens
cagaggatctactca

SEQ ID NO: 1151421 - DNA, 15 bp, Homo sapiens
acagaggatctactc

SEQ ID NO: 1151422 - DNA, 15 bp, Homo sapiens
aacagaggatctact

SEQ ID NO: 1151423 - DNA, 15 bp, Homo sapiens
gaacagaggatctac

SEQ ID NO: 1151424 - DNA, 15 bp, Homo sapiens
agaacagaggatcta

SEQ ID NO: 1151425 - DNA, 15 bp, Homo sapiens
aagaacagaggatct

SEQ ID NO: 1151426 - DNA, 15 bp, Homo sapiens
aaagaacagaggatc

SEQ ID NO: 1151427 - DNA, 15 bp, Homo sapiens
gaaagaacagaggat

SEQ ID NO: 1151428 - DNA, 15 bp, Homo sapiens
ggaaagaacagagga

SEQ ID NO: 1151429 - DNA, 15 bp, Homo sapiens
tggaaagaacagagg

SEQ ID NO: 1151430 - DNA, 15 bp, Homo sapiens
gtggaaagaacagag

SEQ ID NO: 1151431 - DNA, 15 bp, Homo sapiens
ggtggaaagaacaga

SEQ ID NO: 1151432 - DNA, 15 bp, Homo sapiens
aggtggaaagaacag

SEQ ID NO: 1151433 - DNA, 15 bp, Homo sapiens
caggtggaaagaaca

SEQ ID NO: 1151434 - DNA, 15 bp, Homo sapiens
tcaggtggaaagaac

SEQ ID NO: 1151435 - DNA, 15 bp, Homo sapiens
ctcaggtggaaagaa

SEQ ID NO: 1151436 - DNA, 15 bp, Homo sapiens
gctcaggtggaaaga

SEQ ID NO: 1151437 - DNA, 15 bp, Homo sapiens
tgctcaggtggaaag

SEQ ID NO: 1151438 - DNA, 15 bp, Homo sapiens
gtgctcaggtggaaa

SEQ ID NO: 1151439 - DNA, 15 bp, Homo sapiens
tgtgctcaggtggaa

SEQ ID NO: 1151440 - DNA, 15 bp, Homo sapiens
atgtgctcaggtgga

SEQ ID NO: 1151441 - DNA, 15 bp, Homo sapiens
catgtgctcaggtgg

SEQ ID NO: 1151442 - DNA, 15 bp, Homo sapiens
ccatgtgctcaggtg

SEQ ID NO: 1151443 - DNA, 15 bp, Homo sapiens
gccatgtgctcaggt

SEQ ID NO: 1151444 - DNA, 15 bp, Homo sapiens
agccatgtgctcagg

SEQ ID NO: 1151445 - DNA, 15 bp, Homo sapiens
cagccatgtgctcag

SEQ ID NO: 1151446 - DNA, 15 bp, Homo sapiens
gcagccatgtgctca

SEQ ID NO: 1151447 - DNA, 15 bp, Homo sapiens
tgcagccatgtgctc

SEQ ID NO: 1151448 - DNA, 15 bp, Homo sapiens
atgcagccatgtgct

SEQ ID NO: 1151449 - DNA, 15 bp, Homo sapiens
aatgcagccatgtgc

SEQ ID NO: 1151450 - DNA, 15 bp, Homo sapiens
aaatgcagccatgtg

SEQ ID NO: 1151451 - DNA, 15 bp, Homo sapiens
taaatgcagccatgt

SEQ ID NO: 1151452 - DNA, 15 bp, Homo sapiens
gtaaatgcagccatg

SEQ ID NO: 1151453 - DNA, 15 bp, Homo sapiens
ggtaaatgcagccat

SEQ ID NO: 1151454 - DNA, 15 bp, Homo sapiens
aggtaaatgcagcca

SEQ ID NO: 1151455 - DNA, 15 bp, Homo sapiens
caggtaaatgcagcc

SEQ ID NO: 1151456 - DNA, 15 bp, Homo sapiens
ccaggtaaatgcagc

SEQ ID NO: 1151457 - DNA, 15 bp, Homo sapiens
tccaggtaaatgcag

SEQ ID NO: 1151458 - DNA, 15 bp, Homo sapiens
ctccaggtaaatgca

SEQ ID NO: 1151459 - DNA, 15 bp, Homo sapiens
cctccaggtaaatgc

SEQ ID NO: 1151460 - DNA, 15 bp, Homo sapiens
ccctccaggtaaatg

SEQ ID NO: 1151461 - DNA, 15 bp, Homo sapiens
gccctccaggtaaat

SEQ ID NO: 1151462 - DNA, 15 bp, Homo sapiens
agccctccaggtaaa

SEQ ID NO: 1151463 - DNA, 15 bp, Homo sapiens
cagccctccaggtaa

SEQ ID NO: 1151464 - DNA, 15 bp, Homo sapiens
ccagccctccaggta

SEQ ID NO: 1151465 - DNA, 15 bp, Homo sapiens
gccagccctccaggt

SEQ ID NO: 1151466 - DNA, 15 bp, Homo sapiens
agccagccctccagg

SEQ ID NO: 1151467 - DNA, 15 bp, Homo sapiens
aagccagccctccag

SEQ ID NO: 1151468 - DNA, 15 bp, Homo sapiens
gaagccagccctcca

SEQ ID NO: 1151469 - DNA, 15 bp, Homo sapiens
tgaagccagccctcc

SEQ ID NO: 1151470 - DNA, 15 bp, Homo sapiens
atgaagccagccctc

SEQ ID NO: 1151471 - DNA, 15 bp, Homo sapiens
aatgaagccagccct

SEQ ID NO: 1151472 - DNA, 15 bp, Homo sapiens
taatgaagccagccc

SEQ ID NO: 1151473 - DNA, 15 bp, Homo sapiens
ttaatgaagccagcc

SEQ ID NO: 1151474 - DNA, 15 bp, Homo sapiens
tttaatgaagccagc

SEQ ID NO: 1151475 - DNA, 15 bp, Homo sapiens
ttttaatgaagccag

SEQ ID NO: 1151476 - DNA, 15 bp, Homo sapiens
attttaatgaagcca

SEQ ID NO: 1151477 - DNA, 15 bp, Homo sapiens
cattttaatgaagcc

SEQ ID NO: 1151478 - DNA, 15 bp, Homo sapiens
ccattttaatgaagc

SEQ ID NO: 1151479 - DNA, 15 bp, Homo sapiens
accattttaatgaag

SEQ ID NO: 1151480 - DNA, 15 bp, Homo sapiens
gaccattttaatgaa

SEQ ID NO: 1151481 - DNA, 15 bp, Homo sapiens
ggaccattttaatga

SEQ ID NO: 1151482 - DNA, 15 bp, Homo sapiens
tggaccattttaatg

SEQ ID NO: 1151483 - DNA, 15 bp, Homo sapiens
atggaccattttaat

SEQ ID NO: 1151484 - DNA, 15 bp, Homo sapiens
catggaccattttaa

SEQ ID NO: 1151485 - DNA, 15 bp, Homo sapiens
ccatggaccatttta

SEQ ID NO: 1151486 - DNA, 15 bp, Homo sapiens
accatggaccatttt

SEQ ID NO: 1151487 - DNA, 15 bp, Homo sapiens
caccatggaccattt

SEQ ID NO: 1151488 - DNA, 15 bp, Homo sapiens
ccaccatggaccatt

SEQ ID NO: 1151489 - DNA, 15 bp, Homo sapiens
gccaccatggaccat

SEQ ID NO: 1151490 - DNA, 15 bp, Homo sapiens
ggccaccatggacca

SEQ ID NO: 1151491 - DNA, 15 bp, Homo sapiens
aggccaccatggacc

SEQ ID NO: 1151492 - DNA, 15 bp, Homo sapiens
gaggccaccatggac

SEQ ID NO: 1151493 - DNA, 15 bp, Homo sapiens
tgaggccaccatgga

SEQ ID NO: 1151494 - DNA, 15 bp, Homo sapiens
gtgaggccaccatgg

SEQ ID NO: 1151495 - DNA, 15 bp, Homo sapiens
agtgaggccaccatg

SEQ ID NO: 1151496 - DNA, 15 bp, Homo sapiens
gagtgaggccaccat

SEQ ID NO: 1151497 - DNA, 15 bp, Homo sapiens
tgagtgaggccacca

SEQ ID NO: 1151498 - DNA, 15 bp, Homo sapiens
gtgagtgaggccacc

SEQ ID NO: 1151499 - DNA, 15 bp, Homo sapiens
tgtgagtgaggccac

SEQ ID NO: 1151500 - DNA, 15 bp, Homo sapiens
gtgtgagtgaggcca

SEQ ID NO: 1151501 - DNA, 15 bp, Homo sapiens
cgtgtgagtgaggcc

SEQ ID NO: 1151502 - DNA, 15 bp, Homo sapiens
gcgtgtgagtgaggc

SEQ ID NO: 1151503 - DNA, 15 bp, Homo sapiens
agcgtgtgagtgagg

SEQ ID NO: 1151504 - DNA, 15 bp, Homo sapiens
cagcgtgtgagtgag

SEQ ID NO: 1151505 - DNA, 15 bp, Homo sapiens
ccagcgtgtgagtga

SEQ ID NO: 1151506 - DNA, 15 bp, Homo sapiens
gccagcgtgtgagtg

SEQ ID NO: 1151507 - DNA, 15 bp, Homo sapiens
agccagcgtgtgagt

SEQ ID NO: 1151508 - DNA, 15 bp, Homo sapiens
cagccagcgtgtgag

SEQ ID NO: 1151509 - DNA, 15 bp, Homo sapiens
acagccagcgtgtga

SEQ ID NO: 1151510 - DNA, 15 bp, Homo sapiens
aacagccagcgtgtg

SEQ ID NO: 1151511 - DNA, 15 bp, Homo sapiens
caacagccagcgtgt

SEQ ID NO: 1151512 - DNA, 15 bp, Homo sapiens
ccaacagccagcgtg

SEQ ID NO: 1151513 - DNA, 15 bp, Homo sapiens
gccaacagccagcgt

SEQ ID NO: 1151514 - DNA, 15 bp, Homo sapiens
agccaacagccagcg

SEQ ID NO: 1151515 - DNA, 15 bp, Homo sapiens
cagccaacagccagc

SEQ ID NO: 1151516 - DNA, 15 bp, Homo sapiens
ccagccaacagccag

SEQ ID NO: 1151517 - DNA, 15 bp, Homo sapiens
gccagccaacagcca

SEQ ID NO: 1151518 - DNA, 15 bp, Homo sapiens
ggccagccaacagcc

SEQ ID NO: 1151519 - DNA, 15 bp, Homo sapiens
tggccagccaacagc

SEQ ID NO: 1151520 - DNA, 15 bp, Homo sapiens
atggccagccaacag

SEQ ID NO: 1151521 - DNA, 15 bp, Homo sapiens
gatggccagccaaca

SEQ ID NO: 1151522 - DNA, 15 bp, Homo sapiens
agatggccagccaac

SEQ ID NO: 1151523 - DNA, 15 bp, Homo sapiens
gagatggccagccaa

SEQ ID NO: 1151524 - DNA, 15 bp, Homo sapiens
tgagatggccagcca

SEQ ID NO: 1151525 - DNA, 15 bp, Homo sapiens
ttgagatggccagcc

SEQ ID NO: 1151526 - DNA, 15 bp, Homo sapiens
attgagatggccagc

SEQ ID NO: 1151527 - DNA, 15 bp, Homo sapiens
aattgagatggccag

SEQ ID NO: 1151528 - DNA, 15 bp, Homo sapiens
gaattgagatggcca

SEQ ID NO: 1151529 - DNA, 15 bp, Homo sapiens
agaattgagatggcc

SEQ ID NO: 1151530 - DNA, 15 bp, Homo sapiens
gagaattgagatggc

SEQ ID NO: 1151531 - DNA, 15 bp, Homo sapiens
ggagaattgagatgg

SEQ ID NO: 1151532 - DNA, 15 bp, Homo sapiens
tggagaattgagatg

SEQ ID NO: 1151533 - DNA, 15 bp, Homo sapiens
atggagaattgagat

SEQ ID NO: 1151534 - DNA, 15 bp, Homo sapiens
catggagaattgaga

SEQ ID NO: 1151535 - DNA, 15 bp, Homo sapiens
acatggagaattgag

SEQ ID NO: 1151536 - DNA, 15 bp, Homo sapiens
cacatggagaattga

SEQ ID NO: 1151537 - DNA, 15 bp, Homo sapiens
tcacatggagaattg

SEQ ID NO: 1151538 - DNA, 15 bp, Homo sapiens
gtcacatggagaatt

SEQ ID NO: 1151539 - DNA, 15 bp, Homo sapiens
agtcacatggagaat

SEQ ID NO: 1151540 - DNA, 15 bp, Homo sapiens
aagtcacatggagaa

SEQ ID NO: 1151541 - DNA, 15 bp, Homo sapiens
gaagtcacatggaga

SEQ ID NO: 1151542 - DNA, 15 bp, Homo sapiens
agaagtcacatggag

SEQ ID NO: 1151543 - DNA, 15 bp, Homo sapiens
gagaagtcacatgga

SEQ ID NO: 1151544 - DNA, 15 bp, Homo sapiens
tgagaagtcacatgg

SEQ ID NO: 1151545 - DNA, 15 bp, Homo sapiens
gtgagaagtcacatg

SEQ ID NO: 1151546 - DNA, 15 bp, Homo sapiens
tgtgagaagtcacat

SEQ ID NO: 1151547 - DNA, 15 bp, Homo sapiens
gtgtgagaagtcaca

SEQ ID NO: 1151548 - DNA, 15 bp, Homo sapiens
agtgtgagaagtcac

SEQ ID NO: 1151549 - DNA, 15 bp, Homo sapiens
gagtgtgagaagtca

SEQ ID NO: 1151550 - DNA, 15 bp, Homo sapiens
tgagtgtgagaagtc

SEQ ID NO: 1151551 - DNA, 15 bp, Homo sapiens
atgagtgtgagaagt

SEQ ID NO: 1151552 - DNA, 15 bp, Homo sapiens
gtatgagtgtgagaa

SEQ ID NO: 1151553 - DNA, 15 bp, Homo sapiens
tgtatgagtgtgaga

SEQ ID NO: 1151554 - DNA, 15 bp, Homo sapiens
ttgtatgagtgtgag

SEQ ID NO: 1151555 - DNA, 15 bp, Homo sapiens
attgtatgagtgtga

SEQ ID NO: 1151556 - DNA, 15 bp, Homo sapiens
tattgtatgagtgtg

SEQ ID NO: 1151557 - DNA, 15 bp, Homo sapiens
ctattgtatgagtgt

SEQ ID NO: 1151558 - DNA, 15 bp, Homo sapiens
cctattgtatgagtg

SEQ ID NO: 1151559 - DNA, 15 bp, Homo sapiens
gcctattgtatgagt

SEQ ID NO: 1151560 - DNA, 15 bp, Homo sapiens
agcctattgtatgag

SEQ ID NO: 1151561 - DNA, 15 bp, Homo sapiens
tagcctattgtatga

SEQ ID NO: 1151562 - DNA, 15 bp, Homo sapiens
ttagcctattgtatg

SEQ ID NO: 1151563 - DNA, 15 bp, Homo sapiens
gttagcctattgtat

SEQ ID NO: 1151564 - DNA, 15 bp, Homo sapiens
ggttagcctattgta

SEQ ID NO: 1151565 - DNA, 15 bp, Homo sapiens
aggttagcctattgt

SEQ ID NO: 1151566 - DNA, 15 bp, Homo sapiens
caggttagcctattg

SEQ ID NO: 1151567 - DNA, 15 bp, Homo sapiens
ccaggttagcctatt

SEQ ID NO: 1151568 - DNA, 15 bp, Homo sapiens
gccaggttagcctat

SEQ ID NO: 1151569 - DNA, 15 bp, Homo sapiens
agccaggttagccta

SEQ ID NO: 1151570 - DNA, 15 bp, Homo sapiens
aagccaggttagcct

SEQ ID NO: 1151571 - DNA, 15 bp, Homo sapiens
gaagccaggttagcc

SEQ ID NO: 1151572 - DNA, 15 bp, Homo sapiens
ggaagccaggttagc

SEQ ID NO: 1151573 - DNA, 15 bp, Homo sapiens
aggaagccaggttag

SEQ ID NO: 1151574 - DNA, 15 bp, Homo sapiens
aaggaagccaggtta

SEQ ID NO: 1151575 - DNA, 15 bp, Homo sapiens
taaggaagccaggtt

SEQ ID NO: 1151576 - DNA, 15 bp, Homo sapiens
ataaggaagccaggt

SEQ ID NO: 1151577 - DNA, 15 bp, Homo sapiens
tataaggaagccagg

SEQ ID NO: 1151578 - DNA, 15 bp, Homo sapiens
atataaggaagccag

SEQ ID NO: 1151579 - DNA, 15 bp, Homo sapiens
catataaggaagcca

SEQ ID NO: 1151580 - DNA, 15 bp, Homo sapiens
tcatataaggaagcc

SEQ ID NO: 1151581 - DNA, 15 bp, Homo sapiens
ttcatataaggaagc

SEQ ID NO: 1151582 - DNA, 15 bp, Homo sapiens
tttcatataaggaag

SEQ ID NO: 1151583 - DNA, 15 bp, Homo sapiens
ctttcatataaggaa

SEQ ID NO: 1151584 - DNA, 15 bp, Homo sapiens
actttcatataagga

SEQ ID NO: 1151585 - DNA, 15 bp, Homo sapiens
aactttcatataagg

SEQ ID NO: 1151586 - DNA, 15 bp, Homo sapiens
aaactttcatataag

SEQ ID NO: 1151587 - DNA, 15 bp, Homo sapiens
gaaactttcatataa

SEQ ID NO: 1151588 - DNA, 15 bp, Homo sapiens
tgaaactttcatata

SEQ ID NO: 1151589 - DNA, 15 bp, Homo sapiens
ctgaaactttcatat

SEQ ID NO: 1151590 - DNA, 15 bp, Homo sapiens
cctgaaactttcata

SEQ ID NO: 1151591 - DNA, 15 bp, Homo sapiens
ccctgaaactttcat

SEQ ID NO: 1151592 - DNA, 15 bp, Homo sapiens
gccctgaaactttca

SEQ ID NO: 1151593 - DNA, 15 bp, Homo sapiens
tgccctgaaactttc

SEQ ID NO: 1151594 - DNA, 15 bp, Homo sapiens
ctgccctgaaacttt

SEQ ID NO: 1151595 - DNA, 15 bp, Homo sapiens
actgccctgaaactt

SEQ ID NO: 1151596 - DNA, 15 bp, Homo sapiens
cactgccctgaaact

SEQ ID NO: 1151597 - DNA, 15 bp, Homo sapiens
acactgccctgaaac

SEQ ID NO: 1151598 - DNA, 15 bp, Homo sapiens
tacactgccctgaaa

SEQ ID NO: 1151599 - DNA, 15 bp, Homo sapiens
gtacactgccctgaa

SEQ ID NO: 1151600 - DNA, 15 bp, Homo sapiens
ggtacactgccctga

SEQ ID NO: 1151601 - DNA, 15 bp, Homo sapiens
gggtacactgccctg

SEQ ID NO: 1151602 - DNA, 15 bp, Homo sapiens
tgggtacactgccct

SEQ ID NO: 1151603 - DNA, 15 bp, Homo sapiens
ctgggtacactgccc

SEQ ID NO: 1151604 - DNA, 15 bp, Homo sapiens
tctgggtacactgcc

SEQ ID NO: 1151605 - DNA, 15 bp, Homo sapiens
ctctgggtacactgc

SEQ ID NO: 1151606 - DNA, 15 bp, Homo sapiens
tctctgggtacactg

SEQ ID NO: 1151607 - DNA, 15 bp, Homo sapiens
ctctctgggtacact

SEQ ID NO: 1151608 - DNA, 15 bp, Homo sapiens
gctctctgggtacac

SEQ ID NO: 1151609 - DNA, 15 bp, Homo sapiens
tgctctctgggtaca

SEQ ID NO: 1151610 - DNA, 15 bp, Homo sapiens
ttgctctctgggtac

SEQ ID NO: 1151611 - DNA, 15 bp, Homo sapiens
tttgctctctgggta

SEQ ID NO: 1151612 - DNA, 15 bp, Homo sapiens
ctttgctctctgggt

SEQ ID NO: 1151613 - DNA, 15 bp, Homo sapiens
tctttgctctctggg

SEQ ID NO: 1151614 - DNA, 15 bp, Homo sapiens
gtctttgctctctgg

SEQ ID NO: 1151615 - DNA, 15 bp, Homo sapiens
agtctttgctctctg

SEQ ID NO: 1151616 - DNA, 15 bp, Homo sapiens
tagtctttgctctct

SEQ ID NO: 1151617 - DNA, 15 bp, Homo sapiens
ttagtctttgctctc

SEQ ID NO: 1151618 - DNA, 15 bp, Homo sapiens
attagtctttgctct

SEQ ID NO: 1151619 - DNA, 15 bp, Homo sapiens
cattagtctttgctc

SEQ ID NO: 1151620 - DNA, 15 bp, Homo sapiens
acattagtctttgct

SEQ ID NO: 1151621 - DNA, 15 bp, Homo sapiens
cacattagtctttgc

SEQ ID NO: 1151622 - DNA, 15 bp, Homo sapiens
acacattagtctttg

SEQ ID NO: 1151623 - DNA, 15 bp, Homo sapiens
cacacattagtcttt

SEQ ID NO: 1151624 - DNA, 15 bp, Homo sapiens
tcacacattagtctt

SEQ ID NO: 1151625 - DNA, 15 bp, Homo sapiens
ttcacacattagtct

SEQ ID NO: 1151626 - DNA, 15 bp, Homo sapiens
cttcacacattagtc

SEQ ID NO: 1151627 - DNA, 15 bp, Homo sapiens
acttcacacattagt

SEQ ID NO: 1151628 - DNA, 15 bp, Homo sapiens
cacttcacacattag

SEQ ID NO: 1151629 - DNA, 15 bp, Homo sapiens
acacttcacacatta

SEQ ID NO: 1151630 - DNA, 15 bp, Homo sapiens
gacacttcacacatt

SEQ ID NO: 1151631 - DNA, 15 bp, Homo sapiens
ggacacttcacacat

SEQ ID NO: 1151632 - DNA, 15 bp, Homo sapiens
tggacacttcacaca

SEQ ID NO: 1151633 - DNA, 15 bp, Homo sapiens
ctggacacttcacac

SEQ ID NO: 1151634 - DNA, 15 bp, Homo sapiens
tctggacacttcaca

SEQ ID NO: 1151635 - DNA, 15 bp, Homo sapiens
ctctggacacttcac

SEQ ID NO: 1151636 - DNA, 15 bp, Homo sapiens
cctctggacacttca

SEQ ID NO: 1151637 - DNA, 15 bp, Homo sapiens
tcctctggacacttc

SEQ ID NO: 1151638 - DNA, 15 bp, Homo sapiens
atcctctggacactt

SEQ ID NO: 1151639 - DNA, 15 bp, Homo sapiens
aatcctctggacact

SEQ ID NO: 1151640 - DNA, 15 bp, Homo sapiens
taatcctctggacac

SEQ ID NO: 1151641 - DNA, 15 bp, Homo sapiens
ctaatcctctggaca

SEQ ID NO: 1151642 - DNA, 15 bp, Homo sapiens
tctaatcctctggac

SEQ ID NO: 1151643 - DNA, 15 bp, Homo sapiens
gtctaatcctctgga

SEQ ID NO: 1151644 - DNA, 15 bp, Homo sapiens
agtctaatcctctgg

SEQ ID NO: 1151645 - DNA, 15 bp, Homo sapiens
gagtctaatcctctg

SEQ ID NO: 1151646 - DNA, 15 bp, Homo sapiens
ggagtctaatcctct

SEQ ID NO: 1151647 - DNA, 15 bp, Homo sapiens
tggagtctaatcctc

SEQ ID NO: 1151648 - DNA, 15 bp, Homo sapiens
ctggagtctaatcct

SEQ ID NO: 1151649 - DNA, 15 bp, Homo sapiens
tctggagtctaatcc

SEQ ID NO: 1151650 - DNA, 15 bp, Homo sapiens
ttctggagtctaatc

SEQ ID NO: 1151651 - DNA, 15 bp, Homo sapiens
gttctggagtctaat

SEQ ID NO: 1151652 - DNA, 15 bp, Homo sapiens
agttctggagtctaa

SEQ ID NO: 1151653 - DNA, 15 bp, Homo sapiens
gagttctggagtcta

SEQ ID NO: 1151654 - DNA, 15 bp, Homo sapiens
tgagttctggagtct

SEQ ID NO: 1151655 - DNA, 15 bp, Homo sapiens
atgagttctggagtc

SEQ ID NO: 1151656 - DNA, 15 bp, Homo sapiens
gatgagttctggagt

SEQ ID NO: 1151657 - DNA, 15 bp, Homo sapiens
agatgagttctggag

SEQ ID NO: 1151658 - DNA, 15 bp, Homo sapiens
aagatgagttctgga

SEQ ID NO: 1151659 - DNA, 15 bp, Homo sapiens
caagatgagttctgg

SEQ ID NO: 1151660 - DNA, 15 bp, Homo sapiens
acaagatgagttctg

SEQ ID NO: 1151661 - DNA, 15 bp, Homo sapiens
aacaagatgagttct

SEQ ID NO: 1151662 - DNA, 15 bp, Homo sapiens
caacaagatgagttc

SEQ ID NO: 1151663 - DNA, 15 bp, Homo sapiens
ccaacaagatgagtt

SEQ ID NO: 1151664 - DNA, 15 bp, Homo sapiens
accaacaagatgagt

SEQ ID NO: 1151665 - DNA, 15 bp, Homo sapiens
gaccaacaagatgag

SEQ ID NO: 1151666 - DNA, 15 bp, Homo sapiens
tgaccaacaagatga

SEQ ID NO: 1151667 - DNA, 15 bp, Homo sapiens
gtgaccaacaagatg

SEQ ID NO: 1151668 - DNA, 15 bp, Homo sapiens
tgtgaccaacaagat

SEQ ID NO: 1151669 - DNA, 15 bp, Homo sapiens
ctgtgaccaacaaga

SEQ ID NO: 1151670 - DNA, 15 bp, Homo sapiens
gctgtgaccaacaag

SEQ ID NO: 1151671 - DNA, 15 bp, Homo sapiens
tgctgtgaccaacaa

SEQ ID NO: 1151672 - DNA, 15 bp, Homo sapiens
ttgctgtgaccaaca

SEQ ID NO: 1151673 - DNA, 15 bp, Homo sapiens
cttgctgtgaccaac

SEQ ID NO: 1151674 - DNA, 15 bp, Homo sapiens
acttgctgtgaccaa

SEQ ID NO: 1151675 - DNA, 15 bp, Homo sapiens
gacttgctgtgacca

SEQ ID NO: 1151676 - DNA, 15 bp, Homo sapiens
tgacttgctgtgacc

SEQ ID NO: 1151677 - DNA, 15 bp, Homo sapiens
atgacttgctgtgac

SEQ ID NO: 1151678 - DNA, 15 bp, Homo sapiens
tatgacttgctgtga

SEQ ID NO: 1151679 - DNA, 15 bp, Homo sapiens
ctatgacttgctgtg

SEQ ID NO: 1151680 - DNA, 15 bp, Homo sapiens
cctatgacttgctgt

SEQ ID NO: 1151681 - DNA, 15 bp, Homo sapiens
gcctatgacttgctg

SEQ ID NO: 1151682 - DNA, 15 bp, Homo sapiens
agcctatgacttgct

SEQ ID NO: 1151683 - DNA, 15 bp, Homo sapiens
tagcctatgacttgc

SEQ ID NO: 1151684 - DNA, 15 bp, Homo sapiens
ctagcctatgacttg

SEQ ID NO: 1151685 - DNA, 15 bp, Homo sapiens
gctagcctatgactt

SEQ ID NO: 1151686 - DNA, 15 bp, Homo sapiens
ggctagcctatgact

SEQ ID NO: 1151687 - DNA, 15 bp, Homo sapiens
gggctagcctatgac

SEQ ID NO: 1151688 - DNA, 15 bp, Homo sapiens
tgggctagcctatga

SEQ ID NO: 1151689 - DNA, 15 bp, Homo sapiens
ctgggctagcctatg

SEQ ID NO: 1151690 - DNA, 15 bp, Homo sapiens
tctgggctagcctat

SEQ ID NO: 1151691 - DNA, 15 bp, Homo sapiens
atctgggctagccta

SEQ ID NO: 1151692 - DNA, 15 bp, Homo sapiens
aatctgggctagcct

SEQ ID NO: 1151693 - DNA, 15 bp, Homo sapiens
aaatctgggctagcc

SEQ ID NO: 1151694 - DNA, 15 bp, Homo sapiens
caaatctgggctagc

SEQ ID NO: 1151695 - DNA, 15 bp, Homo sapiens
tcaaatctgggctag

SEQ ID NO: 1151696 - DNA, 15 bp, Homo sapiens
ctcaaatctgggcta

SEQ ID NO: 1151697 - DNA, 15 bp, Homo sapiens
cctcaaatctgggct

SEQ ID NO: 1151698 - DNA, 15 bp, Homo sapiens
tcctcaaatctgggc

SEQ ID NO: 1151699 - DNA, 15 bp, Homo sapiens
ctcctcaaatctggg

SEQ ID NO: 1151700 - DNA, 15 bp, Homo sapiens
tctcctcaaatctgg

SEQ ID NO: 1151701 - DNA, 15 bp, Homo sapiens
atctcctcaaatctg

SEQ ID NO: 1151702 - DNA, 15 bp, Homo sapiens
tatctcctcaaatct

SEQ ID NO: 1151703 - DNA, 15 bp, Homo sapiens
ttatctcctcaaatc

SEQ ID NO: 1151704 - DNA, 15 bp, Homo sapiens
gttatctcctcaaat

SEQ ID NO: 1151705 - DNA, 15 bp, Homo sapiens
tgttatctcctcaaa

SEQ ID NO: 1151706 - DNA, 15 bp, Homo sapiens
ctgttatctcctcaa

SEQ ID NO: 1151707 - DNA, 15 bp, Homo sapiens
tctgttatctcctca

SEQ ID NO: 1151708 - DNA, 15 bp, Homo sapiens
gtctgttatctcctc

SEQ ID NO: 1151709 - DNA, 15 bp, Homo sapiens
agtctgttatctcct

SEQ ID NO: 1151710 - DNA, 15 bp, Homo sapiens
cagtctgttatctcc

SEQ ID NO: 1151711 - DNA, 15 bp, Homo sapiens
acagtctgttatctc

SEQ ID NO: 1151712 - DNA, 15 bp, Homo sapiens
cacagtctgttatct

SEQ ID NO: 1151713 - DNA, 15 bp, Homo sapiens
gcacagtctgttatc

SEQ ID NO: 1151714 - DNA, 15 bp, Homo sapiens
ggcacagtctgttat

SEQ ID NO: 1151715 - DNA, 15 bp, Homo sapiens
aggcacagtctgtta

SEQ ID NO: 1151716 - DNA, 15 bp, Homo sapiens
gaggcacagtctgtt

SEQ ID NO: 1151717 - DNA, 15 bp, Homo sapiens
agaggcacagtctgt

SEQ ID NO: 1151718 - DNA, 15 bp, Homo sapiens
aagaggcacagtctg

SEQ ID NO: 1151719 - DNA, 15 bp, Homo sapiens
taagaggcacagtct

SEQ ID NO: 1151720 - DNA, 15 bp, Homo sapiens
ttaagaggcacagtc

SEQ ID NO: 1151721 - DNA, 15 bp, Homo sapiens
attaagaggcacagt

SEQ ID NO: 1151722 - DNA, 15 bp, Homo sapiens
cattaagaggcacag

SEQ ID NO: 1151723 - DNA, 15 bp, Homo sapiens
ccattaagaggcaca

SEQ ID NO: 1151724 - DNA, 15 bp, Homo sapiens
cccattaagaggcac

SEQ ID NO: 1151725 - DNA, 15 bp, Homo sapiens
acccattaagaggca

SEQ ID NO: 1151726 - DNA, 15 bp, Homo sapiens
cacccattaagaggc

SEQ ID NO: 1151727 - DNA, 15 bp, Homo sapiens
tcacccattaagagg

SEQ ID NO: 1151728 - DNA, 15 bp, Homo sapiens
ctcacccattaagag

SEQ ID NO: 1151729 - DNA, 15 bp, Homo sapiens
gctcacccattaaga

SEQ ID NO: 1151730 - DNA, 15 bp, Homo sapiens
tgctcacccattaag

SEQ ID NO: 1151731 - DNA, 15 bp, Homo sapiens
ctgctcacccattaa

SEQ ID NO: 1151732 - DNA, 15 bp, Homo sapiens
actgctcacccatta

SEQ ID NO: 1151733 - DNA, 15 bp, Homo sapiens
tactgctcacccatt

SEQ ID NO: 1151734 - DNA, 15 bp, Homo sapiens
ttactgctcacccat

SEQ ID NO: 1151735 - DNA, 15 bp, Homo sapiens
tttactgctcaccca

SEQ ID NO: 1151736 - DNA, 15 bp, Homo sapiens
ttttactgctcaccc

SEQ ID NO: 1151737 - DNA, 15 bp, Homo sapiens
tttttactgctcacc

SEQ ID NO: 1151738 - DNA, 15 bp, Homo sapiens
ttttttactgctcac

SEQ ID NO: 1151739 - DNA, 15 bp, Homo sapiens
attttttactgctca

SEQ ID NO: 1151740 - DNA, 15 bp, Homo sapiens
gattttttactgctc

SEQ ID NO: 1151741 - DNA, 15 bp, Homo sapiens
agattttttactgct

SEQ ID NO: 1151742 - DNA, 15 bp, Homo sapiens
cagattttttactgc

SEQ ID NO: 1151743 - DNA, 15 bp, Homo sapiens
acagattttttactg

SEQ ID NO: 1151744 - DNA, 15 bp, Homo sapiens
cacagattttttact

SEQ ID NO: 1151745 - DNA, 15 bp, Homo sapiens
tcacagattttttac

SEQ ID NO: 1151746 - DNA, 15 bp, Homo sapiens
gtcacagatttttta

SEQ ID NO: 1151747 - DNA, 15 bp, Homo sapiens
ggtcacagatttttt

SEQ ID NO: 1151748 - DNA, 15 bp, Homo sapiens
tggtcacagattttt

SEQ ID NO: 1151749 - DNA, 15 bp, Homo sapiens
atggtcacagatttt

SEQ ID NO: 1151750 - DNA, 15 bp, Homo sapiens
tatggtcacagattt

SEQ ID NO: 1151751 - DNA, 15 bp, Homo sapiens
atatggtcacagatt

SEQ ID NO: 1151752 - DNA, 15 bp, Homo sapiens
aatatggtcacagat

SEQ ID NO: 1151753 - DNA, 15 bp, Homo sapiens
caatatggtcacaga

SEQ ID NO: 1151754 - DNA, 15 bp, Homo sapiens
tcaatatggtcacag

SEQ ID NO: 1151755 - DNA, 15 bp, Homo sapiens
ttcaatatggtcaca

SEQ ID NO: 1151756 - DNA, 15 bp, Homo sapiens
attcaatatggtcac

SEQ ID NO: 1151757 - DNA, 15 bp, Homo sapiens
gattcaatatggtca

SEQ ID NO: 1151758 - DNA, 15 bp, Homo sapiens
agattcaatatggtc

SEQ ID NO: 1151759 - DNA, 15 bp, Homo sapiens
aagattcaatatggt

SEQ ID NO: 1151760 - DNA, 15 bp, Homo sapiens
gaagattcaatatgg

SEQ ID NO: 1151761 - DNA, 15 bp, Homo sapiens
agaagattcaatatg

SEQ ID NO: 1151762 - DNA, 15 bp, Homo sapiens
tagaagattcaatat

SEQ ID NO: 1151763 - DNA, 15 bp, Homo sapiens
ttagaagattcaata

SEQ ID NO: 1151764 - DNA, 15 bp, Homo sapiens
tttagaagattcaat

SEQ ID NO: 1151765 - DNA, 15 bp, Homo sapiens
ctttagaagattcaa

SEQ ID NO: 1151766 - DNA, 15 bp, Homo sapiens
gctttagaagattca

SEQ ID NO: 1151767 - DNA, 15 bp, Homo sapiens
tgctttagaagattc

SEQ ID NO: 1151768 - DNA, 15 bp, Homo sapiens
atgctttagaagatt

SEQ ID NO: 1151769 - DNA, 15 bp, Homo sapiens
catgctttagaagat

SEQ ID NO: 1151770 - DNA, 15 bp, Homo sapiens
gcatgctttagaaga

SEQ ID NO: 1151771 - DNA, 15 bp, Homo sapiens
ggcatgctttagaag

SEQ ID NO: 1151772 - DNA, 15 bp, Homo sapiens
gggcatgctttagaa

SEQ ID NO: 1151773 - DNA, 15 bp, Homo sapiens
agggcatgctttaga

SEQ ID NO: 1151774 - DNA, 15 bp, Homo sapiens
gagggcatgctttag

SEQ ID NO: 1151775 - DNA, 15 bp, Homo sapiens
agagggcatgcttta

SEQ ID NO: 1151776 - DNA, 15 bp, Homo sapiens
cagagggcatgcttt

SEQ ID NO: 1151777 - DNA, 15 bp, Homo sapiens
acagagggcatgctt

SEQ ID NO: 1151778 - DNA, 15 bp, Homo sapiens
gacagagggcatgct

SEQ ID NO: 1151779 - DNA, 15 bp, Homo sapiens
tgacagagggcatgc

SEQ ID NO: 1151780 - DNA, 15 bp, Homo sapiens
gtgacagagggcatg

SEQ ID NO: 1151781 - DNA, 15 bp, Homo sapiens
tgtgacagagggcat

SEQ ID NO: 1151782 - DNA, 15 bp, Homo sapiens
ttgtgacagagggca

SEQ ID NO: 1151783 - DNA, 15 bp, Homo sapiens
attgtgacagagggc

SEQ ID NO: 1151784 - DNA, 15 bp, Homo sapiens
aattgtgacagaggg

SEQ ID NO: 1151785 - DNA, 15 bp, Homo sapiens
taattgtgacagagg

SEQ ID NO: 1151786 - DNA, 15 bp, Homo sapiens
ataattgtgacagag

SEQ ID NO: 1151787 - DNA, 15 bp, Homo sapiens
aataattgtgacaga

SEQ ID NO: 1151788 - DNA, 15 bp, Homo sapiens
aaataattgtgacag

SEQ ID NO: 1151789 - DNA, 15 bp, Homo sapiens
taaataattgtgaca

SEQ ID NO: 1151790 - DNA, 15 bp, Homo sapiens
gtaaataattgtgac

SEQ ID NO: 1151791 - DNA, 15 bp, Homo sapiens
tgtaaataattgtga

SEQ ID NO: 1151792 - DNA, 15 bp, Homo sapiens
atgtaaataattgtg

SEQ ID NO: 1151793 - DNA, 15 bp, Homo sapiens
aatgtaaataattgt

SEQ ID NO: 1151794 - DNA, 15 bp, Homo sapiens
aaatgtaaataattg

SEQ ID NO: 1151795 - DNA, 15 bp, Homo sapiens
gaaatgtaaataatt

SEQ ID NO: 1151796 - DNA, 15 bp, Homo sapiens
agaaatgtaaataat

SEQ ID NO: 1151797 - DNA, 15 bp, Homo sapiens
aagaaatgtaaataa

SEQ ID NO: 1151798 - DNA, 15 bp, Homo sapiens
gaagaaatgtaaata

SEQ ID NO: 1151799 - DNA, 15 bp, Homo sapiens
tggaagaaatgtaaa

SEQ ID NO: 1151800 - DNA, 15 bp, Homo sapiens
gtggaagaaatgtaa

SEQ ID NO: 1151801 - DNA, 15 bp, Homo sapiens
tgtggaagaaatgta

SEQ ID NO: 1151802 - DNA, 15 bp, Homo sapiens
atgtggaagaaatgt

SEQ ID NO: 1151803 - DNA, 15 bp, Homo sapiens
catgtggaagaaatg

SEQ ID NO: 1151804 - DNA, 15 bp, Homo sapiens
gcatgtggaagaaat

SEQ ID NO: 1151805 - DNA, 15 bp, Homo sapiens
tgcatgtggaagaaa

SEQ ID NO: 1151806 - DNA, 15 bp, Homo sapiens
ttgcatgtggaagaa

SEQ ID NO: 1151807 - DNA, 15 bp, Homo sapiens
tttgcatgtggaaga

SEQ ID NO: 1151808 - DNA, 15 bp, Homo sapiens
ttttgcatgtggaag

SEQ ID NO: 1151809 - DNA, 15 bp, Homo sapiens
cttttgcatgtggaa

SEQ ID NO: 1151810 - DNA, 15 bp, Homo sapiens
tcttttgcatgtgga

SEQ ID NO: 1151811 - DNA, 15 bp, Homo sapiens
ttcttttgcatgtgg

SEQ ID NO: 1151812 - DNA, 15 bp, Homo sapiens
cttcttttgcatgtg

SEQ ID NO: 1151813 - DNA, 15 bp, Homo sapiens
ccttcttttgcatgt

SEQ ID NO: 1151814 - DNA, 15 bp, Homo sapiens
accttcttttgcatg

SEQ ID NO: 1151815 - DNA, 15 bp, Homo sapiens
gaccttcttttgcat

SEQ ID NO: 1151816 - DNA, 15 bp, Homo sapiens
tgaccttcttttgca

SEQ ID NO: 1151817 - DNA, 15 bp, Homo sapiens
gtgaccttcttttgc

SEQ ID NO: 1151818 - DNA, 15 bp, Homo sapiens
ggtgaccttcttttg

SEQ ID NO: 1151819 - DNA, 15 bp, Homo sapiens
aggtgaccttctttt

SEQ ID NO: 1151820 - DNA, 15 bp, Homo sapiens
gaggtgaccttcttt

SEQ ID NO: 1151821 - DNA, 15 bp, Homo sapiens
agaggtgaccttctt

SEQ ID NO: 1151822 - DNA, 15 bp, Homo sapiens
aagaggtgaccttct

SEQ ID NO: 1151823 - DNA, 15 bp, Homo sapiens
gaagaggtgaccttc

SEQ ID NO: 1151824 - DNA, 15 bp, Homo sapiens
ggaagaggtgacctt

SEQ ID NO: 1151825 - DNA, 15 bp, Homo sapiens
aggaagaggtgacct

SEQ ID NO: 1151826 - DNA, 15 bp, Homo sapiens
gaggaagaggtgacc

SEQ ID NO: 1151827 - DNA, 15 bp, Homo sapiens
tgaggaagaggtgac

SEQ ID NO: 1151828 - DNA, 15 bp, Homo sapiens
ctgaggaagaggtga

SEQ ID NO: 1151829 - DNA, 15 bp, Homo sapiens
tctgaggaagaggtg

SEQ ID NO: 1151830 - DNA, 15 bp, Homo sapiens
gtctgaggaagaggt

SEQ ID NO: 1151831 - DNA, 15 bp, Homo sapiens
ggtctgaggaagagg

SEQ ID NO: 1151832 - DNA, 15 bp, Homo sapiens
gggtctgaggaagag

SEQ ID NO: 1151833 - DNA, 15 bp, Homo sapiens
agggtctgaggaaga

SEQ ID NO: 1151834 - DNA, 15 bp, Homo sapiens
gagggtctgaggaag

SEQ ID NO: 1151835 - DNA, 15 bp, Homo sapiens
tgagggtctgaggaa

SEQ ID NO: 1151836 - DNA, 15 bp, Homo sapiens
ttgagggtctgagga

SEQ ID NO: 1151837 - DNA, 15 bp, Homo sapiens
tttgagggtctgagg

SEQ ID NO: 1151838 - DNA, 15 bp, Homo sapiens
ttttgagggtctgag

SEQ ID NO: 1151839 - DNA, 15 bp, Homo sapiens
attttgagggtctga

SEQ ID NO: 1151840 - DNA, 15 bp, Homo sapiens
cattttgagggtctg

SEQ ID NO: 1151841 - DNA, 15 bp, Homo sapiens
acattttgagggtct

SEQ ID NO: 1151842 - DNA, 15 bp, Homo sapiens
aacattttgagggtc

SEQ ID NO: 1151843 - DNA, 15 bp, Homo sapiens
gaacattttgagggt

SEQ ID NO: 1151844 - DNA, 15 bp, Homo sapiens
tgaacattttgaggg

SEQ ID NO: 1151845 - DNA, 15 bp, Homo sapiens
atgaacattttgagg

SEQ ID NO: 1151846 - DNA, 15 bp, Homo sapiens
tatgaacattttgag

SEQ ID NO: 1151847 - DNA, 15 bp, Homo sapiens
gtatgaacattttga

SEQ ID NO: 1151848 - DNA, 15 bp, Homo sapiens
tgtatgaacattttg

SEQ ID NO: 1151849 - DNA, 15 bp, Homo sapiens
ctgtatgaacatttt

SEQ ID NO: 1151850 - DNA, 15 bp, Homo sapiens
actgtatgaacattt

SEQ ID NO: 1151851 - DNA, 15 bp, Homo sapiens
cactgtatgaacatt

SEQ ID NO: 1151852 - DNA, 15 bp, Homo sapiens
tcactgtatgaacat

SEQ ID NO: 1151853 - DNA, 15 bp, Homo sapiens
atcactgtatgaaca

SEQ ID NO: 1151854 - DNA, 15 bp, Homo sapiens
tatcactgtatgaac

SEQ ID NO: 1151855 - DNA, 15 bp, Homo sapiens
ctatcactgtatgaa

SEQ ID NO: 1151856 - DNA, 15 bp, Homo sapiens
gctatcactgtatga

SEQ ID NO: 1151857 - DNA, 15 bp, Homo sapiens
tgctatcactgtatg

SEQ ID NO: 1151858 - DNA, 15 bp, Homo sapiens
atgctatcactgtat

SEQ ID NO: 1151859 - DNA, 15 bp, Homo sapiens
gatgctatcactgta

SEQ ID NO: 1151860 - DNA, 15 bp, Homo sapiens
agatgctatcactgt

SEQ ID NO: 1151861 - DNA, 15 bp, Homo sapiens
cagatgctatcactg

SEQ ID NO: 1151862 - DNA, 15 bp, Homo sapiens
ccagatgctatcact

SEQ ID NO: 1151863 - DNA, 15 bp, Homo sapiens
gccagatgctatcac

SEQ ID NO: 1151864 - DNA, 15 bp, Homo sapiens
agccagatgctatca

SEQ ID NO: 1151865 - DNA, 15 bp, Homo sapiens
gagccagatgctatc

SEQ ID NO: 1151866 - DNA, 15 bp, Homo sapiens
tgagccagatgctat

SEQ ID NO: 1151867 - DNA, 15 bp, Homo sapiens
ttgagccagatgcta

SEQ ID NO: 1151868 - DNA, 15 bp, Homo sapiens
tttgagccagatgct

SEQ ID NO: 1151869 - DNA, 15 bp, Homo sapiens
ctttgagccagatgc

SEQ ID NO: 1151870 - DNA, 15 bp, Homo sapiens
tctttgagccagatg

SEQ ID NO: 1151871 - DNA, 15 bp, Homo sapiens
gtctttgagccagat

SEQ ID NO: 1151872 - DNA, 15 bp, Homo sapiens
ggtctttgagccaga

SEQ ID NO: 1151873 - DNA, 15 bp, Homo sapiens
tggtctttgagccag

SEQ ID NO: 1151874 - DNA, 15 bp, Homo sapiens
ctggtctttgagcca

SEQ ID NO: 1151875 - DNA, 15 bp, Homo sapiens
actggtctttgagcc

SEQ ID NO: 1151876 - DNA, 15 bp, Homo sapiens
tactggtctttgagc

SEQ ID NO: 1151877 - DNA, 15 bp, Homo sapiens
atactggtctttgag

SEQ ID NO: 1151878 - DNA, 15 bp, Homo sapiens
gatactggtctttga

SEQ ID NO: 1151879 - DNA, 15 bp, Homo sapiens
agatactggtctttg

SEQ ID NO: 1151880 - DNA, 15 bp, Homo sapiens
cagatactggtcttt

SEQ ID NO: 1151881 - DNA, 15 bp, Homo sapiens
tcagatactggtctt

SEQ ID NO: 1151882 - DNA, 15 bp, Homo sapiens
ttcagatactggtct

SEQ ID NO: 1151883 - DNA, 15 bp, Homo sapiens
cttcagatactggtc

SEQ ID NO: 1151884 - DNA, 15 bp, Homo sapiens
tcttcagatactggt

SEQ ID NO: 1151885 - DNA, 15 bp, Homo sapiens
atcttcagatactgg

SEQ ID NO: 1151886 - DNA, 15 bp, Homo sapiens
gatcttcagatactg

SEQ ID NO: 1151887 - DNA, 15 bp, Homo sapiens
agatcttcagatact

SEQ ID NO: 1151888 - DNA, 15 bp, Homo sapiens
cagatcttcagatac

SEQ ID NO: 1151889 - DNA, 15 bp, Homo sapiens
gcagatcttcagata

SEQ ID NO: 1151890 - DNA, 15 bp, Homo sapiens
tgcatatggactgtg

SEQ ID NO: 1151891 - DNA, 15 bp, Homo sapiens
ctgcatatggactgt

SEQ ID NO: 1151892 - DNA, 15 bp, Homo sapiens
actgcatatggactg

SEQ ID NO: 1151893 - DNA, 15 bp, Homo sapiens
tactgcatatggact

SEQ ID NO: 1151894 - DNA, 15 bp, Homo sapiens
atactgcatatggac

SEQ ID NO: 1151895 - DNA, 15 bp, Homo sapiens
catactgcatatgga

SEQ ID NO: 1151896 - DNA, 15 bp, Homo sapiens
acatactgcatatgg

SEQ ID NO: 1151897 - DNA, 15 bp, Homo sapiens
gacatactgcatatg

SEQ ID NO: 1151898 - DNA, 15 bp, Homo sapiens
tgacatactgcatat

SEQ ID NO: 1151899 - DNA, 15 bp, Homo sapiens
ttgacatactgcata

SEQ ID NO: 1151900 - DNA, 15 bp, Homo sapiens
gttgacatactgcat

SEQ ID NO: 1151901 - DNA, 15 bp, Homo sapiens
ggttgacatactgca

SEQ ID NO: 1151902 - DNA, 15 bp, Homo sapiens
aggttgacatactgc

SEQ ID NO: 1151903 - DNA, 15 bp, Homo sapiens
taggttgacatactg

SEQ ID NO: 1151904 - DNA, 15 bp, Homo sapiens
ataggttgacatact

SEQ ID NO: 1151905 - DNA, 15 bp, Homo sapiens
cataggttgacatac

SEQ ID NO: 1151906 - DNA, 15 bp, Homo sapiens
acataggttgacata

SEQ ID NO: 1151907 - DNA, 15 bp, Homo sapiens
aacataggttgacat

SEQ ID NO: 1151908 - DNA, 15 bp, Homo sapiens
taacataggttgaca

SEQ ID NO: 1151909 - DNA, 15 bp, Homo sapiens
ttaacataggttgac

SEQ ID NO: 1151910 - DNA, 15 bp, Homo sapiens
gttaacataggttga

SEQ ID NO: 1151911 - DNA, 15 bp, Homo sapiens
tgttaacataggttg

SEQ ID NO: 1151912 - DNA, 15 bp, Homo sapiens
ttgttaacataggtt

SEQ ID NO: 1151913 - DNA, 15 bp, Homo sapiens
gttgttaacataggt

SEQ ID NO: 1151914 - DNA, 15 bp, Homo sapiens
ggttgttaacatagg

SEQ ID NO: 1151915 - DNA, 15 bp, Homo sapiens
tggttgttaacatag

SEQ ID NO: 1151916 - DNA, 15 bp, Homo sapiens
atggttgttaacata

SEQ ID NO: 1151917 - DNA, 15 bp, Homo sapiens
catggttgttaacat

SEQ ID NO: 1151918 - DNA, 15 bp, Homo sapiens
gcatggttgttaaca

SEQ ID NO: 1151919 - DNA, 15 bp, Homo sapiens
tgcatggttgttaac

SEQ ID NO: 1151920 - DNA, 15 bp, Homo sapiens
ctgcatggttgttaa

SEQ ID NO: 1151921 - DNA, 15 bp, Homo sapiens
actgcatggttgtta

SEQ ID NO: 1151922 - DNA, 15 bp, Homo sapiens
gactgcatggttgtt

SEQ ID NO: 1151923 - DNA, 15 bp, Homo sapiens
tgactgcatggttgt

SEQ ID NO: 1151924 - DNA, 15 bp, Homo sapiens
ctgactgcatggttg

SEQ ID NO: 1151925 - DNA, 15 bp, Homo sapiens
tctgactgcatggtt

SEQ ID NO: 1151926 - DNA, 15 bp, Homo sapiens
ttctgactgcatggt

SEQ ID NO: 1151927 - DNA, 15 bp, Homo sapiens
tttctgactgcatgg

SEQ ID NO: 1151928 - DNA, 15 bp, Homo sapiens
ctttctgactgcatg

SEQ ID NO: 1151929 - DNA, 15 bp, Homo sapiens
actttctgactgcat

SEQ ID NO: 1151930 - DNA, 15 bp, Homo sapiens
tactttctgactgca

SEQ ID NO: 1151931 - DNA, 15 bp, Homo sapiens
ctactttctgactgc

SEQ ID NO: 1151932 - DNA, 15 bp, Homo sapiens
tctactttctgactg

SEQ ID NO: 1151933 - DNA, 15 bp, Homo sapiens
ttctactttctgact

SEQ ID NO: 1151934 - DNA, 15 bp, Homo sapiens
attctactttctgac

SEQ ID NO: 1151935 - DNA, 15 bp, Homo sapiens
tattctactttctga

SEQ ID NO: 1151936 - DNA, 15 bp, Homo sapiens
ctattctactttctg

SEQ ID NO: 1151937 - DNA, 15 bp, Homo sapiens
tctattctactttct

SEQ ID NO: 1151938 - DNA, 15 bp, Homo sapiens
ctctattctactttc

SEQ ID NO: 1151939 - DNA, 15 bp, Homo sapiens
tctctattctacttt

SEQ ID NO: 1151940 - DNA, 15 bp, Homo sapiens
atctctattctactt

SEQ ID NO: 1151941 - DNA, 15 bp, Homo sapiens
aatctctattctact

SEQ ID NO: 1151942 - DNA, 15 bp, Homo sapiens
taatctctattctac

SEQ ID NO: 1151943 - DNA, 15 bp, Homo sapiens
gtaatctctattcta

SEQ ID NO: 1151944 - DNA, 15 bp, Homo sapiens
ggtaatctctattct

SEQ ID NO: 1151945 - DNA, 15 bp, Homo sapiens
tggtaatctctattc

SEQ ID NO: 1151946 - DNA, 15 bp, Homo sapiens
ctggtaatctctatt

SEQ ID NO: 1151947 - DNA, 15 bp, Homo sapiens
cctggtaatctctat

SEQ ID NO: 1151948 - DNA, 15 bp, Homo sapiens
tcctggtaatctcta

SEQ ID NO: 1151949 - DNA, 15 bp, Homo sapiens
ctcctggtaatctct

SEQ ID NO: 1151950 - DNA, 15 bp, Homo sapiens
gctcctggtaatctc

SEQ ID NO: 1151951 - DNA, 15 bp, Homo sapiens
agctcctggtaatct

SEQ ID NO: 1151952 - DNA, 15 bp, Homo sapiens
cagctcctggtaatc

SEQ ID NO: 1151953 - DNA, 15 bp, Homo sapiens
ccagctcctggtaat

SEQ ID NO: 1151954 - DNA, 15 bp, Homo sapiens
cccagctcctggtaa

SEQ ID NO: 1151955 - DNA, 15 bp, Homo sapiens
tcccagctcctggta

SEQ ID NO: 1151956 - DNA, 15 bp, Homo sapiens
ctcccagctcctggt

SEQ ID NO: 1151957 - DNA, 15 bp, Homo sapiens
cctcccagctcctgg

SEQ ID NO: 1151958 - DNA, 15 bp, Homo sapiens
tcctcccagctcctg

SEQ ID NO: 1151959 - DNA, 15 bp, Homo sapiens
ctcctcccagctcct

SEQ ID NO: 1151960 - DNA, 15 bp, Homo sapiens
cctcctcccagctcc

SEQ ID NO: 1151961 - DNA, 15 bp, Homo sapiens
tcctcctcccagctc

SEQ ID NO: 1151962 - DNA, 15 bp, Homo sapiens
ctcctcctcccagct

SEQ ID NO: 1151963 - DNA, 15 bp, Homo sapiens
cctcctcctcccagc

SEQ ID NO: 1151964 - DNA, 15 bp, Homo sapiens
ccctcctcctcccag

SEQ ID NO: 1151965 - DNA, 15 bp, Homo sapiens
tccctcctcctccca

SEQ ID NO: 1151966 - DNA, 15 bp, Homo sapiens
ttccctcctcctccc

SEQ ID NO: 1151967 - DNA, 15 bp, Homo sapiens
attccctcctcctcc

SEQ ID NO: 1151968 - DNA, 15 bp, Homo sapiens
cattccctcctcctc

SEQ ID NO: 1151969 - DNA, 15 bp, Homo sapiens
ccattccctcctcct

SEQ ID NO: 1151970 - DNA, 15 bp, Homo sapiens
cccattccctcctcc

SEQ ID NO: 1151971 - DNA, 15 bp, Homo sapiens
ccccattccctcctc

SEQ ID NO: 1151972 - DNA, 15 bp, Homo sapiens
tccccattccctcct

SEQ ID NO: 1151973 - DNA, 15 bp, Homo sapiens
ctccccattccctcc

SEQ ID NO: 1151974 - DNA, 15 bp, Homo sapiens
actccccattccctc

SEQ ID NO: 1151975 - DNA, 15 bp, Homo sapiens
gactccccattccct

SEQ ID NO: 1151976 - DNA, 15 bp, Homo sapiens
tgactccccattccc

SEQ ID NO: 1151977 - DNA, 15 bp, Homo sapiens
ctgactccccattcc

SEQ ID NO: 1151978 - DNA, 15 bp, Homo sapiens
actgactccccattc

SEQ ID NO: 1151979 - DNA, 15 bp, Homo sapiens
cactgactccccatt

SEQ ID NO: 1151980 - DNA, 15 bp, Homo sapiens
acactgactccccat

SEQ ID NO: 1151981 - DNA, 15 bp, Homo sapiens
tacactgactcccca

SEQ ID NO: 1151982 - DNA, 15 bp, Homo sapiens
ttacactgactcccc

SEQ ID NO: 1151983 - DNA, 15 bp, Homo sapiens
attacactgactccc

SEQ ID NO: 1151984 - DNA, 15 bp, Homo sapiens
cattacactgactcc

SEQ ID NO: 1151985 - DNA, 15 bp, Homo sapiens
ccattacactgactc

SEQ ID NO: 1151986 - DNA, 15 bp, Homo sapiens
accattacactgact

SEQ ID NO: 1151987 - DNA, 15 bp, Homo sapiens
taccattacactgac

SEQ ID NO: 1151988 - DNA, 15 bp, Homo sapiens
ataccattacactga

SEQ ID NO: 1151989 - DNA, 15 bp, Homo sapiens
gataccattacactg

SEQ ID NO: 1151990 - DNA, 15 bp, Homo sapiens
tgataccattacact

SEQ ID NO: 1151991 - DNA, 15 bp, Homo sapiens
ttgataccattacac

SEQ ID NO: 1151992 - DNA, 15 bp, Homo sapiens
cttgataccattaca

SEQ ID NO: 1151993 - DNA, 15 bp, Homo sapiens
acttgataccattac

SEQ ID NO: 1151994 - DNA, 15 bp, Homo sapiens
aacttgataccatta

SEQ ID NO: 1151995 - DNA, 15 bp, Homo sapiens
aaacttgataccatt

SEQ ID NO: 1151996 - DNA, 15 bp, Homo sapiens
caaacttgataccat

SEQ ID NO: 1151997 - DNA, 15 bp, Homo sapiens
ccaaacttgatacca

SEQ ID NO: 1151998 - DNA, 15 bp, Homo sapiens
cccaaacttgatacc

SEQ ID NO: 1151999 - DNA, 15 bp, Homo sapiens
tcccaaacttgatac

SEQ ID NO: 1152000 - DNA, 15 bp, Homo sapiens
ttcccaaacttgata

SEQ ID NO: 1152001 - DNA, 15 bp, Homo sapiens
cttcccaaacttgat

SEQ ID NO: 1152002 - DNA, 15 bp, Homo sapiens
acttcccaaacttga

SEQ ID NO: 1152003 - DNA, 15 bp, Homo sapiens
aacttcccaaacttg

SEQ ID NO: 1152004 - DNA, 15 bp, Homo sapiens
aaacttcccaaactt

SEQ ID NO: 1152005 - DNA, 15 bp, Homo sapiens
caaacttcccaaact

SEQ ID NO: 1152006 - DNA, 15 bp, Homo sapiens
ccaaacttcccaaac

SEQ ID NO: 1152007 - DNA, 15 bp, Homo sapiens
cccaaacttcccaaa

SEQ ID NO: 1152008 - DNA, 15 bp, Homo sapiens
tcccaaacttcccaa

SEQ ID NO: 1152009 - DNA, 15 bp, Homo sapiens
ttcccaaacttccca

SEQ ID NO: 1152010 - DNA, 15 bp, Homo sapiens
cttcccaaacttccc

SEQ ID NO: 1152011 - DNA, 15 bp, Homo sapiens
ccttcccaaacttcc

SEQ ID NO: 1152012 - DNA, 15 bp, Homo sapiens
gccttcccaaacttc

SEQ ID NO: 1152013 - DNA, 15 bp, Homo sapiens
cgccttcccaaactt

SEQ ID NO: 1152014 - DNA, 15 bp, Homo sapiens
tcgccttcccaaact

SEQ ID NO: 1152015 - DNA, 15 bp, Homo sapiens
ttcgccttcccaaac

SEQ ID NO: 1152016 - DNA, 15 bp, Homo sapiens
tttcgccttcccaaa

SEQ ID NO: 1152017 - DNA, 15 bp, Homo sapiens
ttttcgccttcccaa

SEQ ID NO: 1152018 - DNA, 15 bp, Homo sapiens
cttttcgccttccca

SEQ ID NO: 1152019 - DNA, 15 bp, Homo sapiens
acttttcgccttccc

SEQ ID NO: 1152020 - DNA, 15 bp, Homo sapiens
aacttttcgccttcc

SEQ ID NO: 1152021 - DNA, 15 bp, Homo sapiens
gaacttttcgccttc

SEQ ID NO: 1152022 - DNA, 15 bp, Homo sapiens
agaacttttcgcctt

SEQ ID NO: 1152023 - DNA, 15 bp, Homo sapiens
cagaacttttcgcct

SEQ ID NO: 1152024 - DNA, 15 bp, Homo sapiens
acagaacttttcgcc

SEQ ID NO: 1152025 - DNA, 15 bp, Homo sapiens
tacagaacttttcgc

SEQ ID NO: 1152026 - DNA, 15 bp, Homo sapiens
ctacagaacttttcg

SEQ ID NO: 1152027 - DNA, 15 bp, Homo sapiens
tctacagaacttttc

SEQ ID NO: 1152028 - DNA, 15 bp, Homo sapiens
atctacagaactttt

SEQ ID NO: 1152029 - DNA, 15 bp, Homo sapiens
catctacagaacttt

SEQ ID NO: 1152030 - DNA, 15 bp, Homo sapiens
ccatctacagaactt

SEQ ID NO: 1152031 - DNA, 15 bp, Homo sapiens
tccatctacagaact

SEQ ID NO: 1152032 - DNA, 15 bp, Homo sapiens
atccatctacagaac

SEQ ID NO: 1152033 - DNA, 15 bp, Homo sapiens
tatccatctacagaa

SEQ ID NO: 1152034 - DNA, 15 bp, Homo sapiens
gtatccatctacaga

SEQ ID NO: 1152035 - DNA, 15 bp, Homo sapiens
agtatccatctacag

SEQ ID NO: 1152036 - DNA, 15 bp, Homo sapiens
cagtatccatctaca

SEQ ID NO: 1152037 - DNA, 15 bp, Homo sapiens
ccagtatccatctac

SEQ ID NO: 1152038 - DNA, 15 bp, Homo sapiens
accagtatccatcta

SEQ ID NO: 1152039 - DNA, 15 bp, Homo sapiens
caccagtatccatct

SEQ ID NO: 1152040 - DNA, 15 bp, Homo sapiens
tcaccagtatccatc

SEQ ID NO: 1152041 - DNA, 15 bp, Homo sapiens
ttcaccagtatccat

SEQ ID NO: 1152042 - DNA, 15 bp, Homo sapiens
cttcaccagtatcca

SEQ ID NO: 1152043 - DNA, 15 bp, Homo sapiens
ccttcaccagtatcc

SEQ ID NO: 1152044 - DNA, 15 bp, Homo sapiens
accttcaccagtatc

SEQ ID NO: 1152045 - DNA, 15 bp, Homo sapiens
aaccttcaccagtat

SEQ ID NO: 1152046 - DNA, 15 bp, Homo sapiens
caaccttcaccagta

SEQ ID NO: 1152047 - DNA, 15 bp, Homo sapiens
gcaaccttcaccagt

SEQ ID NO: 1152048 - DNA, 15 bp, Homo sapiens
tgcaaccttcaccag

SEQ ID NO: 1152049 - DNA, 15 bp, Homo sapiens
gtgcaaccttcacca

SEQ ID NO: 1152050 - DNA, 15 bp, Homo sapiens
tgtgcaaccttcacc

SEQ ID NO: 1152051 - DNA, 15 bp, Homo sapiens
ttgtgcaaccttcac

SEQ ID NO: 1152052 - DNA, 15 bp, Homo sapiens
gttgtgcaaccttca

SEQ ID NO: 1152053 - DNA, 15 bp, Homo sapiens
tgttgtgcaaccttc

SEQ ID NO: 1152054 - DNA, 15 bp, Homo sapiens
ttgttgtgcaacctt

SEQ ID NO: 1152055 - DNA, 15 bp, Homo sapiens
attgttgtgcaacct

SEQ ID NO: 1152056 - DNA, 15 bp, Homo sapiens
cattgttgtgcaacc

SEQ ID NO: 1152057 - DNA, 15 bp, Homo sapiens
acattgttgtgcaac

SEQ ID NO: 1152058 - DNA, 15 bp, Homo sapiens
cacattgttgtgcaa

SEQ ID NO: 1152059 - DNA, 15 bp, Homo sapiens
gtcacattgttgtgc

SEQ ID NO: 1152060 - DNA, 15 bp, Homo sapiens
agtcacattgttgtg

SEQ ID NO: 1152061 - DNA, 15 bp, Homo sapiens
cagtcacattgttgt

SEQ ID NO: 1152062 - DNA, 15 bp, Homo sapiens
acagtcacattgttg

SEQ ID NO: 1152063 - DNA, 15 bp, Homo sapiens
tacagtcacattgtt

SEQ ID NO: 1152064 - DNA, 15 bp, Homo sapiens
gtacagtcacattgt

SEQ ID NO: 1152065 - DNA, 15 bp, Homo sapiens
agtacagtcacattg

SEQ ID NO: 1152066 - DNA, 15 bp, Homo sapiens
aagtacagtcacatt

SEQ ID NO: 1152067 - DNA, 15 bp, Homo sapiens
taagtacagtcacat

SEQ ID NO: 1152068 - DNA, 15 bp, Homo sapiens
ttaagtacagtcaca

SEQ ID NO: 1152069 - DNA, 15 bp, Homo sapiens
gttaagtacagtcac

SEQ ID NO: 1152070 - DNA, 15 bp, Homo sapiens
cgttaagtacagtca

SEQ ID NO: 1152071 - DNA, 15 bp, Homo sapiens
gcgttaagtacagtc

SEQ ID NO: 1152072 - DNA, 15 bp, Homo sapiens
ggcgttaagtacagt

SEQ ID NO: 1152073 - DNA, 15 bp, Homo sapiens
tggcgttaagtacag

SEQ ID NO: 1152074 - DNA, 15 bp, Homo sapiens
gtggcgttaagtaca

SEQ ID NO: 1152075 - DNA, 15 bp, Homo sapiens
agtggcgttaagtac

SEQ ID NO: 1152076 - DNA, 15 bp, Homo sapiens
cagtggcgttaagta

SEQ ID NO: 1152077 - DNA, 15 bp, Homo sapiens
tcagtggcgttaagt

SEQ ID NO: 1152078 - DNA, 15 bp, Homo sapiens
ttcagtggcgttaag

SEQ ID NO: 1152079 - DNA, 15 bp, Homo sapiens
attcagtggcgttaa

SEQ ID NO: 1152080 - DNA, 15 bp, Homo sapiens
aattcagtggcgtta

SEQ ID NO: 1152081 - DNA, 15 bp, Homo sapiens
taattcagtggcgtt

SEQ ID NO: 1152082 - DNA, 15 bp, Homo sapiens
ataattcagtggcgt

SEQ ID NO: 1152083 - DNA, 15 bp, Homo sapiens
tataattcagtggcg

SEQ ID NO: 1152084 - DNA, 15 bp, Homo sapiens
gtataattcagtggc

SEQ ID NO: 1152085 - DNA, 15 bp, Homo sapiens
tgtataattcagtgg

SEQ ID NO: 1152086 - DNA, 15 bp, Homo sapiens
gtgtataattcagtg

SEQ ID NO: 1152087 - DNA, 15 bp, Homo sapiens
agtgtataattcagt

SEQ ID NO: 1152088 - DNA, 15 bp, Homo sapiens
aagtgtataattcag

SEQ ID NO: 1152089 - DNA, 15 bp, Homo sapiens
taagtgtataattca

SEQ ID NO: 1152090 - DNA, 15 bp, Homo sapiens
ttaagtgtataattc

SEQ ID NO: 1152091 - DNA, 15 bp, Homo sapiens
tttaagtgtataatt

SEQ ID NO: 1152092 - DNA, 15 bp, Homo sapiens
ttttaagtgtataat

SEQ ID NO: 1152093 - DNA, 15 bp, Homo sapiens
tttttaagtgtataa

SEQ ID NO: 1152094 - DNA, 15 bp, Homo sapiens
atttttaagtgtata

SEQ ID NO: 1152095 - DNA, 15 bp, Homo sapiens
catttttaagtgtat

SEQ ID NO: 1152096 - DNA, 15 bp, Homo sapiens
ccatttttaagtgta

SEQ ID NO: 1152097 - DNA, 15 bp, Homo sapiens
taaccatttttaagt

SEQ ID NO: 1152098 - DNA, 15 bp, Homo sapiens
ttaaccatttttaag

SEQ ID NO: 1152099 - DNA, 15 bp, Homo sapiens
tttaaccatttttaa

SEQ ID NO: 1152100 - DNA, 15 bp, Homo sapiens
ttttaaccattttta

SEQ ID NO: 1152101 - DNA, 15 bp, Homo sapiens
attttaaccattttt

SEQ ID NO: 1152102 - DNA, 15 bp, Homo sapiens
cattttaaccatttt

SEQ ID NO: 1152103 - DNA, 15 bp, Homo sapiens
ccattttaaccattt

SEQ ID NO: 1152104 - DNA, 15 bp, Homo sapiens
accattttaaccatt

SEQ ID NO: 1152105 - DNA, 15 bp, Homo sapiens
taccattttaaccat

SEQ ID NO: 1152106 - DNA, 15 bp, Homo sapiens
ttaccattttaacca

SEQ ID NO: 1152107 - DNA, 15 bp, Homo sapiens
tttaccattttaacc

SEQ ID NO: 1152108 - DNA, 15 bp, Homo sapiens
atttaccattttaac

SEQ ID NO: 1152109 - DNA, 15 bp, Homo sapiens
aatttaccattttaa

SEQ ID NO: 1152110 - DNA, 15 bp, Homo sapiens
aaatttaccatttta

SEQ ID NO: 1152111 - DNA, 15 bp, Homo sapiens
aaaatttaccatttt

SEQ ID NO: 1152112 - DNA, 15 bp, Homo sapiens
caaaatttaccattt

SEQ ID NO: 1152113 - DNA, 15 bp, Homo sapiens
acaaaatttaccatt

SEQ ID NO: 1152114 - DNA, 15 bp, Homo sapiens
cacaaaatttaccat

SEQ ID NO: 1152115 - DNA, 15 bp, Homo sapiens
acacaaaatttacca

SEQ ID NO: 1152116 - DNA, 15 bp, Homo sapiens
aacacaaaatttacc

SEQ ID NO: 1152117 - DNA, 15 bp, Homo sapiens
taacacaaaatttac

SEQ ID NO: 1152118 - DNA, 15 bp, Homo sapiens
ataacacaaaattta

SEQ ID NO: 1152119 - DNA, 15 bp, Homo sapiens
cataacacaaaattt

SEQ ID NO: 1152120 - DNA, 15 bp, Homo sapiens
acataacacaaaatt

SEQ ID NO: 1152121 - DNA, 15 bp, Homo sapiens
tacataacacaaaat

SEQ ID NO: 1152122 - DNA, 15 bp, Homo sapiens
atacataacacaaaa

SEQ ID NO: 1152123 - DNA, 15 bp, Homo sapiens
tatacataacacaaa

SEQ ID NO: 1152124 - DNA, 15 bp, Homo sapiens
atatacataacacaa

SEQ ID NO: 1152125 - DNA, 15 bp, Homo sapiens
aatatacataacaca

SEQ ID NO: 1152126 - DNA, 15 bp, Homo sapiens
aaatatacataacac

SEQ ID NO: 1152127 - DNA, 15 bp, Homo sapiens
aaaatatacataaca

SEQ ID NO: 1152128 - DNA, 15 bp, Homo sapiens
taaaatatacataac

SEQ ID NO: 1152129 - DNA, 15 bp, Homo sapiens
gtaaaatatacataa

SEQ ID NO: 1152130 - DNA, 15 bp, Homo sapiens
ggtaaaatatacata

SEQ ID NO: 1152131 - DNA, 15 bp, Homo sapiens
tggtaaaatatacat

SEQ ID NO: 1152132 - DNA, 15 bp, Homo sapiens
gtggtaaaatataca

SEQ ID NO: 1152133 - DNA, 15 bp, Homo sapiens
tgtggtaaaatatac

SEQ ID NO: 1152134 - DNA, 15 bp, Homo sapiens
ttgtggtaaaatata

SEQ ID NO: 1152135 - DNA, 15 bp, Homo sapiens
attgtggtaaaatat

SEQ ID NO: 1152136 - DNA, 15 bp, Homo sapiens
aattgtggtaaaata

SEQ ID NO: 1152137 - DNA, 15 bp, Homo sapiens
taattgtggtaaaat

SEQ ID NO: 1152138 - DNA, 15 bp, Homo sapiens
gtaattgtggtaaaa

SEQ ID NO: 1152139 - DNA, 15 bp, Homo sapiens
ggtaattgtggtaaa

SEQ ID NO: 1152140 - DNA, 15 bp, Homo sapiens
tggtaattgtggtaa

SEQ ID NO: 1152141 - DNA, 15 bp, Homo sapiens
ttggtaattgtggta

SEQ ID NO: 1152142 - DNA, 15 bp, Homo sapiens
tttggtaattgtggt

SEQ ID NO: 1152143 - DNA, 15 bp, Homo sapiens
ttttggtaattgtgg

SEQ ID NO: 1152144 - DNA, 15 bp, Homo sapiens
gttttggtaattgtg

SEQ ID NO: 1152145 - DNA, 15 bp, Homo sapiens
ggttttggtaattgt

SEQ ID NO: 1152146 - DNA, 15 bp, Homo sapiens
gggttttggtaattg

SEQ ID NO: 1152147 - DNA, 15 bp, Homo sapiens
agggttttggtaatt

SEQ ID NO: 1152148 - DNA, 15 bp, Homo sapiens
tagggttttggtaat

SEQ ID NO: 1152149 - DNA, 15 bp, Homo sapiens
gtagggttttggtaa

SEQ ID NO: 1152150 - DNA, 15 bp, Homo sapiens
tgtagggttttggta

SEQ ID NO: 1152151 - DNA, 15 bp, Homo sapiens
atgtagggttttggt

SEQ ID NO: 1152152 - DNA, 15 bp, Homo sapiens
tatgtagggttttgg

SEQ ID NO: 1152153 - DNA, 15 bp, Homo sapiens
atatgtagggttttg

SEQ ID NO: 1152154 - DNA, 15 bp, Homo sapiens
aatatgtagggtttt

SEQ ID NO: 1152155 - DNA, 15 bp, Homo sapiens
aaatatgtagggttt

SEQ ID NO: 1152156 - DNA, 15 bp, Homo sapiens
caaatatgtagggtt

SEQ ID NO: 1152157 - DNA, 15 bp, Homo sapiens
tcaaatatgtagggt

SEQ ID NO: 1152158 - DNA, 15 bp, Homo sapiens
ttcaaatatgtaggg

SEQ ID NO: 1152159 - DNA, 15 bp, Homo sapiens
cttcaaatatgtagg

SEQ ID NO: 1152160 - DNA, 15 bp, Homo sapiens
gcttcaaatatgtag

SEQ ID NO: 1152161 - DNA, 15 bp, Homo sapiens
ggcttcaaatatgta

SEQ ID NO: 1152162 - DNA, 15 bp, Homo sapiens
aggcttcaaatatgt

SEQ ID NO: 1152163 - DNA, 15 bp, Homo sapiens
taggcttcaaatatg

SEQ ID NO: 1152164 - DNA, 15 bp, Homo sapiens
ctaggcttcaaatat

SEQ ID NO: 1152165 - DNA, 15 bp, Homo sapiens
actaggcttcaaata

SEQ ID NO: 1152166 - DNA, 15 bp, Homo sapiens
aactaggcttcaaat

SEQ ID NO: 1152167 - DNA, 15 bp, Homo sapiens
aaactaggcttcaaa

SEQ ID NO: 1152168 - DNA, 15 bp, Homo sapiens
aaaactaggcttcaa

SEQ ID NO: 1152169 - DNA, 15 bp, Homo sapiens
taaaactaggcttca

SEQ ID NO: 1152170 - DNA, 15 bp, Homo sapiens
ttaaaactaggcttc

SEQ ID NO: 1152171 - DNA, 15 bp, Homo sapiens
tttaaaactaggctt

SEQ ID NO: 1152172 - DNA, 15 bp, Homo sapiens
gtttaaaactaggct

SEQ ID NO: 1152173 - DNA, 15 bp, Homo sapiens
tgtttaaaactaggc

SEQ ID NO: 1152174 - DNA, 15 bp, Homo sapiens
atgtttaaaactagg

SEQ ID NO: 1152175 - DNA, 15 bp, Homo sapiens
catgtttaaaactag

SEQ ID NO: 1152176 - DNA, 15 bp, Homo sapiens
acatgtttaaaacta

SEQ ID NO: 1152177 - DNA, 15 bp, Homo sapiens
cacatgtttaaaact

SEQ ID NO: 1152178 - DNA, 15 bp, Homo sapiens
tcacatgtttaaaac

SEQ ID NO: 1152179 - DNA, 15 bp, Homo sapiens
gtcacatgtttaaaa

SEQ ID NO: 1152180 - DNA, 15 bp, Homo sapiens
tgtcacatgtttaaa

SEQ ID NO: 1152181 - DNA, 15 bp, Homo sapiens
gtgtcacatgtttaa

SEQ ID NO: 1152182 - DNA, 15 bp, Homo sapiens
agtgtcacatgttta

SEQ ID NO: 1152183 - DNA, 15 bp, Homo sapiens
gagtgtcacatgttt

SEQ ID NO: 1152184 - DNA, 15 bp, Homo sapiens
tgagtgtcacatgtt

SEQ ID NO: 1152185 - DNA, 15 bp, Homo sapiens
ttgagtgtcacatgt

SEQ ID NO: 1152186 - DNA, 15 bp, Homo sapiens
cttgagtgtcacatg

SEQ ID NO: 1152187 - DNA, 15 bp, Homo sapiens
gcttgagtgtcacat

SEQ ID NO: 1152188 - DNA, 15 bp, Homo sapiens
ggcttgagtgtcaca

SEQ ID NO: 1152189 - DNA, 15 bp, Homo sapiens
tggcttgagtgtcac

SEQ ID NO: 1152190 - DNA, 15 bp, Homo sapiens
gtggcttgagtgtca

SEQ ID NO: 1152191 - DNA, 15 bp, Homo sapiens
agtggcttgagtgtc

SEQ ID NO: 1152192 - DNA, 15 bp, Homo sapiens
tagtggcttgagtgt

SEQ ID NO: 1152193 - DNA, 15 bp, Homo sapiens
atagtggcttgagtg

SEQ ID NO: 1152194 - DNA, 15 bp, Homo sapiens
aatagtggcttgagt

SEQ ID NO: 1152195 - DNA, 15 bp, Homo sapiens
aaatagtggcttgag

SEQ ID NO: 1152196 - DNA, 15 bp, Homo sapiens
taaatagtggcttga

SEQ ID NO: 1152197 - DNA, 15 bp, Homo sapiens
ataaatagtggcttg

SEQ ID NO: 1152198 - DNA, 15 bp, Homo sapiens
cataaatagtggctt

SEQ ID NO: 1152199 - DNA, 15 bp, Homo sapiens
tcataaatagtggct

SEQ ID NO: 1152200 - DNA, 15 bp, Homo sapiens
ctcataaatagtggc

SEQ ID NO: 1152201 - DNA, 15 bp, Homo sapiens
tctcataaatagtgg

SEQ ID NO: 1152202 - DNA, 15 bp, Homo sapiens
ctctcataaatagtg

SEQ ID NO: 1152203 - DNA, 15 bp, Homo sapiens
cctctcataaatagt

SEQ ID NO: 1152204 - DNA, 15 bp, Homo sapiens
tcctctcataaatag

SEQ ID NO: 1152205 - DNA, 15 bp, Homo sapiens
ttcctctcataaata

SEQ ID NO: 1152206 - DNA, 15 bp, Homo sapiens
attcctctcataaat

SEQ ID NO: 1152207 - DNA, 15 bp, Homo sapiens
cattcctctcataaa

SEQ ID NO: 1152208 - DNA, 15 bp, Homo sapiens
tcattcctctcataa

SEQ ID NO: 1152209 - DNA, 15 bp, Homo sapiens
ttcattcctctcata

SEQ ID NO: 1152210 - DNA, 15 bp, Homo sapiens
cttcattcctctcat

SEQ ID NO: 1152211 - DNA, 15 bp, Homo sapiens
tcttcattcctctca

SEQ ID NO: 1152212 - DNA, 15 bp, Homo sapiens
ttcttcattcctctc

SEQ ID NO: 1152213 - DNA, 15 bp, Homo sapiens
cttcttcattcctct

SEQ ID NO: 1152214 - DNA, 15 bp, Homo sapiens
ccttcttcattcctc

SEQ ID NO: 1152215 - DNA, 15 bp, Homo sapiens
tccttcttcattcct

SEQ ID NO: 1152216 - DNA, 15 bp, Homo sapiens
atccttcttcattcc

SEQ ID NO: 1152217 - DNA, 15 bp, Homo sapiens
gatccttcttcattc

SEQ ID NO: 1152218 - DNA, 15 bp, Homo sapiens
tgatccttcttcatt

SEQ ID NO: 1152219 - DNA, 15 bp, Homo sapiens
ctgatccttcttcat

SEQ ID NO: 1152220 - DNA, 15 bp, Homo sapiens
actgatccttcttca

SEQ ID NO: 1152221 - DNA, 15 bp, Homo sapiens
aactgatccttcttc

SEQ ID NO: 1152222 - DNA, 15 bp, Homo sapiens
taactgatccttctt

SEQ ID NO: 1152223 - DNA, 15 bp, Homo sapiens
ataactgatccttct

SEQ ID NO: 1152224 - DNA, 15 bp, Homo sapiens
cataactgatccttc

SEQ ID NO: 1152225 - DNA, 15 bp, Homo sapiens
acataactgatcctt

SEQ ID NO: 1152226 - DNA, 15 bp, Homo sapiens
tacataactgatcct

SEQ ID NO: 1152227 - DNA, 15 bp, Homo sapiens
ttacataactgatcc

SEQ ID NO: 1152228 - DNA, 15 bp, Homo sapiens
attacataactgatc

SEQ ID NO: 1152229 - DNA, 15 bp, Homo sapiens
gattacataactgat

SEQ ID NO: 1152230 - DNA, 15 bp, Homo sapiens
ggattacataactga

SEQ ID NO: 1152231 - DNA, 15 bp, Homo sapiens
tggattacataactg

SEQ ID NO: 1152232 - DNA, 15 bp, Homo sapiens
ttggattacataact

SEQ ID NO: 1152233 - DNA, 15 bp, Homo sapiens
cttggattacataac

SEQ ID NO: 1152234 - DNA, 15 bp, Homo sapiens
acttggattacataa

SEQ ID NO: 1152235 - DNA, 15 bp, Homo sapiens
cacttggattacata

SEQ ID NO: 1152236 - DNA, 15 bp, Homo sapiens
ccacttggattacat

SEQ ID NO: 1152237 - DNA, 15 bp, Homo sapiens
cccacttggattaca

SEQ ID NO: 1152238 - DNA, 15 bp, Homo sapiens
gcccacttggattac

SEQ ID NO: 1152239 - DNA, 15 bp, Homo sapiens
cgcccacttggatta

SEQ ID NO: 1152240 - DNA, 15 bp, Homo sapiens
acgcccacttggatt

SEQ ID NO: 1152241 - DNA, 15 bp, Homo sapiens
aacgcccacttggat

SEQ ID NO: 1152242 - DNA, 15 bp, Homo sapiens
aaacgcccacttgga

SEQ ID NO: 1152243 - DNA, 15 bp, Homo sapiens
aaaacgcccacttgg

SEQ ID NO: 1152244 - DNA, 15 bp, Homo sapiens
taaaacgcccacttg

SEQ ID NO: 1152245 - DNA, 15 bp, Homo sapiens
ttaaaacgcccactt

SEQ ID NO: 1152246 - DNA, 15 bp, Homo sapiens
tttaaaacgcccact

SEQ ID NO: 1152247 - DNA, 15 bp, Homo sapiens
atttaaaacgcccac

SEQ ID NO: 1152248 - DNA, 15 bp, Homo sapiens
tatttaaaacgccca

SEQ ID NO: 1152249 - DNA, 15 bp, Homo sapiens
atatttaaaacgccc

SEQ ID NO: 1152250 - DNA, 15 bp, Homo sapiens
aatatttaaaacgcc

SEQ ID NO: 1152251 - DNA, 15 bp, Homo sapiens
gaatatttaaaacgc

SEQ ID NO: 1152252 - DNA, 15 bp, Homo sapiens
agaatatttaaaacg

SEQ ID NO: 1152253 - DNA, 15 bp, Homo sapiens
aagaatatttaaaac

SEQ ID NO: 1152254 - DNA, 15 bp, Homo sapiens
aaagaatatttaaaa

SEQ ID NO: 1152255 - DNA, 15 bp, Homo sapiens
aaaagaatatttaaa

SEQ ID NO: 1152256 - DNA, 15 bp, Homo sapiens
caaaagaatatttaa

SEQ ID NO: 1152257 - DNA, 15 bp, Homo sapiens
acaaaagaatattta

SEQ ID NO: 1152258 - DNA, 15 bp, Homo sapiens
tacaaaagaatattt

SEQ ID NO: 1152259 - DNA, 15 bp, Homo sapiens
ctacaaaagaatatt

SEQ ID NO: 1152260 - DNA, 15 bp, Homo sapiens
tctacaaaagaatat

SEQ ID NO: 1152261 - DNA, 15 bp, Homo sapiens
atctacaaaagaata

SEQ ID NO: 1152262 - DNA, 15 bp, Homo sapiens
aatctacaaaagaat

SEQ ID NO: 1152263 - DNA, 15 bp, Homo sapiens
aaatctacaaaagaa

SEQ ID NO: 1152264 - DNA, 15 bp, Homo sapiens
aaaatctacaaaaga

SEQ ID NO: 1152265 - DNA, 15 bp, Homo sapiens
aaaaatctacaaaag

SEQ ID NO: 1152266 - DNA, 15 bp, Homo sapiens
caaaaatctacaaaa

SEQ ID NO: 1152267 - DNA, 15 bp, Homo sapiens
ccaaaaatctacaaa

SEQ ID NO: 1152268 - DNA, 15 bp, Homo sapiens
tccaaaaatctacaa

SEQ ID NO: 1152269 - DNA, 15 bp, Homo sapiens
gtccaaaaatctaca

SEQ ID NO: 1152270 - DNA, 15 bp, Homo sapiens
ggtccaaaaatctac

SEQ ID NO: 1152271 - DNA, 15 bp, Homo sapiens
tggtccaaaaatcta

SEQ ID NO: 1152272 - DNA, 15 bp, Homo sapiens
ctggtccaaaaatct

SEQ ID NO: 1152273 - DNA, 15 bp, Homo sapiens
cctggtccaaaaatc

SEQ ID NO: 1152274 - DNA, 15 bp, Homo sapiens
gcctggtccaaaaat

SEQ ID NO: 1152275 - DNA, 15 bp, Homo sapiens
cgcctggtccaaaaa

SEQ ID NO: 1152276 - DNA, 15 bp, Homo sapiens
tcgcctggtccaaaa

SEQ ID NO: 1152277 - DNA, 15 bp, Homo sapiens
atcgcctggtccaaa

SEQ ID NO: 1152278 - DNA, 15 bp, Homo sapiens
catcgcctggtccaa

SEQ ID NO: 1152279 - DNA, 15 bp, Homo sapiens
tcatcgcctggtcca

SEQ ID NO: 1152280 - DNA, 15 bp, Homo sapiens
atcatcgcctggtcc

SEQ ID NO: 1152281 - DNA, 15 bp, Homo sapiens
catcatcgcctggtc

SEQ ID NO: 1152282 - DNA, 15 bp, Homo sapiens
gcatcatcgcctggt

SEQ ID NO: 1152283 - DNA, 15 bp, Homo sapiens
tgcatcatcgcctgg

SEQ ID NO: 1152284 - DNA, 15 bp, Homo sapiens
ctgcatcatcgcctg

SEQ ID NO: 1152285 - DNA, 15 bp, Homo sapiens
actgcatcatcgcct

SEQ ID NO: 1152286 - DNA, 15 bp, Homo sapiens
cactgcatcatcgcc

SEQ ID NO: 1152287 - DNA, 15 bp, Homo sapiens
tcactgcatcatcgc

SEQ ID NO: 1152288 - DNA, 15 bp, Homo sapiens
ttcactgcatcatcg

SEQ ID NO: 1152289 - DNA, 15 bp, Homo sapiens
cttcactgcatcatc

SEQ ID NO: 1152290 - DNA, 15 bp, Homo sapiens
gcttcactgcatcat

SEQ ID NO: 1152291 - DNA, 15 bp, Homo sapiens
tgcttcactgcatca

SEQ ID NO: 1152292 - DNA, 15 bp, Homo sapiens
ctgcttcactgcatc

SEQ ID NO: 1152293 - DNA, 15 bp, Homo sapiens
gctgcttcactgcat

SEQ ID NO: 1152294 - DNA, 15 bp, Homo sapiens
tgctgcttcactgca

SEQ ID NO: 1152295 - DNA, 15 bp, Homo sapiens
ctgctgcttcactgc

SEQ ID NO: 1152296 - DNA, 15 bp, Homo sapiens
tctgctgcttcactg

SEQ ID NO: 1152297 - DNA, 15 bp, Homo sapiens
ttctgctgcttcact

SEQ ID NO: 1152298 - DNA, 15 bp, Homo sapiens
cttctgctgcttcac

SEQ ID NO: 1152299 - DNA, 15 bp, Homo sapiens
acttctgctgcttca

SEQ ID NO: 1152300 - DNA, 15 bp, Homo sapiens
cacttctgctgcttc

SEQ ID NO: 1152301 - DNA, 15 bp, Homo sapiens
gcacttctgctgctt

SEQ ID NO: 1152302 - DNA, 15 bp, Homo sapiens
tgcacttctgctgct

SEQ ID NO: 1152303 - DNA, 15 bp, Homo sapiens
ttgcacttctgctgc

SEQ ID NO: 1152304 - DNA, 15 bp, Homo sapiens
gttgcacttctgctg

SEQ ID NO: 1152305 - DNA, 15 bp, Homo sapiens
tgttgcacttctgct

SEQ ID NO: 1152306 - DNA, 15 bp, Homo sapiens
atgttgcacttctgc

SEQ ID NO: 1152307 - DNA, 15 bp, Homo sapiens
tatgttgcacttctg

SEQ ID NO: 1152308 - DNA, 15 bp, Homo sapiens
atatgttgcacttct

SEQ ID NO: 1152309 - DNA, 15 bp, Homo sapiens
aatatgttgcacttc

SEQ ID NO: 1152310 - DNA, 15 bp, Homo sapiens
gaatatgttgcactt

SEQ ID NO: 1152311 - DNA, 15 bp, Homo sapiens
agaatatgttgcact

SEQ ID NO: 1152312 - DNA, 15 bp, Homo sapiens
gagaatatgttgcac

SEQ ID NO: 1152313 - DNA, 15 bp, Homo sapiens
agagaatatgttgca

SEQ ID NO: 1152314 - DNA, 15 bp, Homo sapiens
aagagaatatgttgc

SEQ ID NO: 1152315 - DNA, 15 bp, Homo sapiens
aaagagaatatgttg

SEQ ID NO: 1152316 - DNA, 15 bp, Homo sapiens
caaagagaatatgtt

SEQ ID NO: 1152317 - DNA, 15 bp, Homo sapiens
tcaaagagaatatgt

SEQ ID NO: 1152318 - DNA, 15 bp, Homo sapiens
atcaaagagaatatg

SEQ ID NO: 1152319 - DNA, 15 bp, Homo sapiens
aatcaaagagaatat

SEQ ID NO: 1152320 - DNA, 15 bp, Homo sapiens
aaatcaaagagaata

SEQ ID NO: 1152321 - DNA, 15 bp, Homo sapiens
aaaatcaaagagaat

SEQ ID NO: 1152322 - DNA, 15 bp, Homo sapiens
gaaaatcaaagagaa

SEQ ID NO: 1152323 - DNA, 15 bp, Homo sapiens
agaaaatcaaagaga

SEQ ID NO: 1152324 - DNA, 15 bp, Homo sapiens
aagaaaatcaaagag

SEQ ID NO: 1152325 - DNA, 15 bp, Homo sapiens
taagaaaatcaaaga

SEQ ID NO: 1152326 - DNA, 15 bp, Homo sapiens
ataagaaaatcaaag

SEQ ID NO: 1152327 - DNA, 15 bp, Homo sapiens
aataagaaaatcaaa

SEQ ID NO: 1152328 - DNA, 15 bp, Homo sapiens
aaataagaaaatcaa

SEQ ID NO: 1152329 - DNA, 15 bp, Homo sapiens
gaaataagaaaatca

SEQ ID NO: 1152330 - DNA, 15 bp, Homo sapiens
agaaataagaaaatc

SEQ ID NO: 1152331 - DNA, 15 bp, Homo sapiens
cagaaataagaaaat

SEQ ID NO: 1152332 - DNA, 15 bp, Homo sapiens
ccagaaataagaaaa

SEQ ID NO: 1152333 - DNA, 15 bp, Homo sapiens
cccagaaataagaaa

SEQ ID NO: 1152334 - DNA, 15 bp, Homo sapiens
tcccagaaataagaa

SEQ ID NO: 1152335 - DNA, 15 bp, Homo sapiens
ttcccagaaataaga

SEQ ID NO: 1152336 - DNA, 15 bp, Homo sapiens
attcccagaaataag

SEQ ID NO: 1152337 - DNA, 15 bp, Homo sapiens
aattcccagaaataa

SEQ ID NO: 1152338 - DNA, 15 bp, Homo sapiens
taattcccagaaata

SEQ ID NO: 1152339 - DNA, 15 bp, Homo sapiens
ataattcccagaaat

SEQ ID NO: 1152340 - DNA, 15 bp, Homo sapiens
aataattcccagaaa

SEQ ID NO: 1152341 - DNA, 15 bp, Homo sapiens
aaataattcccagaa

SEQ ID NO: 1152342 - DNA, 15 bp, Homo sapiens
gaaataattcccaga

SEQ ID NO: 1152343 - DNA, 15 bp, Homo sapiens
agaaataattcccag

SEQ ID NO: 1152344 - DNA, 15 bp, Homo sapiens
aagaaataattccca

SEQ ID NO: 1152345 - DNA, 15 bp, Homo sapiens
aaagaaataattccc

SEQ ID NO: 1152346 - DNA, 15 bp, Homo sapiens
aaaagaaataattcc

SEQ ID NO: 1152347 - DNA, 15 bp, Homo sapiens
aaaaagaaataattc

SEQ ID NO: 1152348 - DNA, 15 bp, Homo sapiens
aaaaaagaaataatt

SEQ ID NO: 1152349 - DNA, 15 bp, Homo sapiens
aaaaaaagaaataat

SEQ ID NO: 1152350 - DNA, 15 bp, Homo sapiens
taaaaaaagaaataa

SEQ ID NO: 1152351 - DNA, 15 bp, Homo sapiens
gtaaaaaaagaaata

SEQ ID NO: 1152352 - DNA, 15 bp, Homo sapiens
agtaaaaaaagaaat

SEQ ID NO: 1152353 - DNA, 15 bp, Homo sapiens
aagtaaaaaaagaaa

SEQ ID NO: 1152354 - DNA, 15 bp, Homo sapiens
aaagtaaaaaaagaa

SEQ ID NO: 1152355 - DNA, 15 bp, Homo sapiens
gaaagtaaaaaaaga

SEQ ID NO: 1152356 - DNA, 15 bp, Homo sapiens
agaaagtaaaaaaag

SEQ ID NO: 1152357 - DNA, 15 bp, Homo sapiens
aagaaagtaaaaaaa

SEQ ID NO: 1152358 - DNA, 15 bp, Homo sapiens
gaagaaagtaaaaaa

SEQ ID NO: 1152359 - DNA, 15 bp, Homo sapiens
ggaagaaagtaaaaa

SEQ ID NO: 1152360 - DNA, 15 bp, Homo sapiens
aggaagaaagtaaaa

SEQ ID NO: 1152361 - DNA, 15 bp, Homo sapiens
aaggaagaaagtaaa

SEQ ID NO: 1152362 - DNA, 15 bp, Homo sapiens
gaaggaagaaagtaa

SEQ ID NO: 1152363 - DNA, 15 bp, Homo sapiens
tgaaggaagaaagta

SEQ ID NO: 1152364 - DNA, 15 bp, Homo sapiens
ctgaaggaagaaagt

SEQ ID NO: 1152365 - DNA, 15 bp, Homo sapiens
cctgaaggaagaaag

SEQ ID NO: 1152366 - DNA, 15 bp, Homo sapiens
acctgaaggaagaaa

SEQ ID NO: 1152367 - DNA, 15 bp, Homo sapiens
tacctgaaggaagaa

SEQ ID NO: 1152368 - DNA, 15 bp, Homo sapiens
ctacctgaaggaaga

SEQ ID NO: 1152369 - DNA, 15 bp, Homo sapiens
cctacctgaaggaag

SEQ ID NO: 1152370 - DNA, 15 bp, Homo sapiens
acctacctgaaggaa

SEQ ID NO: 1152371 - DNA, 15 bp, Homo sapiens
tacctacctgaagga

SEQ ID NO: 1152372 - DNA, 15 bp, Homo sapiens
gtacctacctgaagg

SEQ ID NO: 1152373 - DNA, 15 bp, Homo sapiens
ggtacctacctgaag

SEQ ID NO: 1152374 - DNA, 15 bp, Homo sapiens
gggtacctacctgaa

SEQ ID NO: 1152375 - DNA, 15 bp, Homo sapiens
tgggtacctacctga

SEQ ID NO: 1152376 - DNA, 15 bp, Homo sapiens
atgggtacctacctg

SEQ ID NO: 1152377 - DNA, 15 bp, Homo sapiens
catgggtacctacct

SEQ ID NO: 1152378 - DNA, 15 bp, Homo sapiens
tcatgggtacctacc

SEQ ID NO: 1152379 - DNA, 15 bp, Homo sapiens
atcatgggtacctac

SEQ ID NO: 1152380 - DNA, 15 bp, Homo sapiens
aatcatgggtaccta

SEQ ID NO: 1152381 - DNA, 15 bp, Homo sapiens
aaatcatgggtacct

SEQ ID NO: 1152382 - DNA, 15 bp, Homo sapiens
caaatcatgggtacc

SEQ ID NO: 1152383 - DNA, 15 bp, Homo sapiens
gcaaatcatgggtac

SEQ ID NO: 1152384 - DNA, 15 bp, Homo sapiens
ggcaaatcatgggta

SEQ ID NO: 1152385 - DNA, 15 bp, Homo sapiens
aggcaaatcatgggt

SEQ ID NO: 1152386 - DNA, 15 bp, Homo sapiens
aaggcaaatcatggg

SEQ ID NO: 1152387 - DNA, 15 bp, Homo sapiens
aaaggcaaatcatgg

SEQ ID NO: 1152388 - DNA, 15 bp, Homo sapiens
gaaaggcaaatcatg

SEQ ID NO: 1152389 - DNA, 15 bp, Homo sapiens
agaaaggcaaatcat

SEQ ID NO: 1152390 - DNA, 15 bp, Homo sapiens
gagaaaggcaaatca

SEQ ID NO: 1152391 - DNA, 15 bp, Homo sapiens
tgagaaaggcaaatc

SEQ ID NO: 1152392 - DNA, 15 bp, Homo sapiens
atgagaaaggcaaat

SEQ ID NO: 1152393 - DNA, 15 bp, Homo sapiens
gatgagaaaggcaaa

SEQ ID NO: 1152394 - DNA, 15 bp, Homo sapiens
tgatgagaaaggcaa

SEQ ID NO: 1152395 - DNA, 15 bp, Homo sapiens
ttgatgagaaaggca

SEQ ID NO: 1152396 - DNA, 15 bp, Homo sapiens
cttgatgagaaaggc

SEQ ID NO: 1152397 - DNA, 15 bp, Homo sapiens
acttgatgagaaagg

SEQ ID NO: 1152398 - DNA, 15 bp, Homo sapiens
aacttgatgagaaag

SEQ ID NO: 1152399 - DNA, 15 bp, Homo sapiens
aaacttgatgagaaa

SEQ ID NO: 1152400 - DNA, 15 bp, Homo sapiens
taaacttgatgagaa

SEQ ID NO: 1152401 - DNA, 15 bp, Homo sapiens
ataaacttgatgaga

SEQ ID NO: 1152402 - DNA, 15 bp, Homo sapiens
tataaacttgatgag

SEQ ID NO: 1152403 - DNA, 15 bp, Homo sapiens
ttataaacttgatga

SEQ ID NO: 1152404 - DNA, 15 bp, Homo sapiens
attataaacttgatg

SEQ ID NO: 1152405 - DNA, 15 bp, Homo sapiens
aattataaacttgat

SEQ ID NO: 1152406 - DNA, 15 bp, Homo sapiens
aaattataaacttga

SEQ ID NO: 1152407 - DNA, 15 bp, Homo sapiens
taaattataaacttg

SEQ ID NO: 1152408 - DNA, 15 bp, Homo sapiens
ttaaattataaactt

SEQ ID NO: 1152409 - DNA, 15 bp, Homo sapiens
attaaattataaact

SEQ ID NO: 1152410 - DNA, 15 bp, Homo sapiens
aattaaattataaac

SEQ ID NO: 1152411 - DNA, 15 bp, Homo sapiens
taattaaattataaa

SEQ ID NO: 1152412 - DNA, 15 bp, Homo sapiens
ctaattaaattataa

SEQ ID NO: 1152413 - DNA, 15 bp, Homo sapiens
tctaattaaattata

SEQ ID NO: 1152414 - DNA, 15 bp, Homo sapiens
ctctaattaaattat

SEQ ID NO: 1152415 - DNA, 15 bp, Homo sapiens
tctctaattaaatta

SEQ ID NO: 1152416 - DNA, 15 bp, Homo sapiens
ttctctaattaaatt

SEQ ID NO: 1152417 - DNA, 15 bp, Homo sapiens
tttctctaattaaat

SEQ ID NO: 1152418 - DNA, 15 bp, Homo sapiens
atttctctaattaaa

SEQ ID NO: 1152419 - DNA, 15 bp, Homo sapiens
aatttctctaattaa

SEQ ID NO: 1152420 - DNA, 15 bp, Homo sapiens
taatttctctaatta

SEQ ID NO: 1152421 - DNA, 15 bp, Homo sapiens
ttaatttctctaatt

SEQ ID NO: 1152422 - DNA, 15 bp, Homo sapiens
tttaatttctctaat

SEQ ID NO: 1152423 - DNA, 15 bp, Homo sapiens
atttaatttctctaa

SEQ ID NO: 1152424 - DNA, 15 bp, Homo sapiens
aatttaatttctcta

SEQ ID NO: 1152425 - DNA, 15 bp, Homo sapiens
taatttaatttctct

SEQ ID NO: 1152426 - DNA, 15 bp, Homo sapiens
ttaatttaatttctc

SEQ ID NO: 1152427 - DNA, 15 bp, Homo sapiens
tttaatttaatttct

SEQ ID NO: 1152428 - DNA, 15 bp, Homo sapiens
gtttaatttaatttc

SEQ ID NO: 1152429 - DNA, 15 bp, Homo sapiens
ggtttaatttaattt

SEQ ID NO: 1152430 - DNA, 15 bp, Homo sapiens
aggtttaatttaatt

SEQ ID NO: 1152431 - DNA, 15 bp, Homo sapiens
taggtttaatttaat

SEQ ID NO: 1152432 - DNA, 15 bp, Homo sapiens
ttaggtttaatttaa

SEQ ID NO: 1152433 - DNA, 15 bp, Homo sapiens
attaggtttaattta

SEQ ID NO: 1152434 - DNA, 15 bp, Homo sapiens
cattaggtttaattt

SEQ ID NO: 1152435 - DNA, 15 bp, Homo sapiens
ccattaggtttaatt

SEQ ID NO: 1152436 - DNA, 15 bp, Homo sapiens
tccattaggtttaat

SEQ ID NO: 1152437 - DNA, 15 bp, Homo sapiens
ctccattaggtttaa

SEQ ID NO: 1152438 - DNA, 15 bp, Homo sapiens
gctccattaggttta

SEQ ID NO: 1152439 - DNA, 15 bp, Homo sapiens
agctccattaggttt

SEQ ID NO: 1152440 - DNA, 15 bp, Homo sapiens
aagctccattaggtt

SEQ ID NO: 1152441 - DNA, 15 bp, Homo sapiens
gaagctccattaggt

SEQ ID NO: 1152442 - DNA, 15 bp, Homo sapiens
ggaagctccattagg

SEQ ID NO: 1152443 - DNA, 15 bp, Homo sapiens
tggaagctccattag

SEQ ID NO: 1152444 - DNA, 15 bp, Homo sapiens
ttggaagctccatta

SEQ ID NO: 1152445 - DNA, 15 bp, Homo sapiens
tttggaagctccatt

SEQ ID NO: 1152446 - DNA, 15 bp, Homo sapiens
atttggaagctccat

SEQ ID NO: 1152447 - DNA, 15 bp, Homo sapiens
aatttggaagctcca

SEQ ID NO: 1152448 - DNA, 15 bp, Homo sapiens
gaatttggaagctcc

SEQ ID NO: 1152449 - DNA, 15 bp, Homo sapiens
agaatttggaagctc

SEQ ID NO: 1152450 - DNA, 15 bp, Homo sapiens
aagaatttggaagct

SEQ ID NO: 1152451 - DNA, 15 bp, Homo sapiens
taagaatttggaagc

SEQ ID NO: 1152452 - DNA, 15 bp, Homo sapiens
gtaagaatttggaag

SEQ ID NO: 1152453 - DNA, 15 bp, Homo sapiens
tgtaagaatttggaa

SEQ ID NO: 1152454 - DNA, 15 bp, Homo sapiens
ctgtaagaatttgga

SEQ ID NO: 1152455 - DNA, 15 bp, Homo sapiens
actgtaagaatttgg

SEQ ID NO: 1152456 - DNA, 15 bp, Homo sapiens
cactgtaagaatttg

SEQ ID NO: 1152457 - DNA, 15 bp, Homo sapiens
tcactgtaagaattt

SEQ ID NO: 1152458 - DNA, 15 bp, Homo sapiens
ttcactgtaagaatt

SEQ ID NO: 1152459 - DNA, 15 bp, Homo sapiens
tttcactgtaagaat

SEQ ID NO: 1152460 - DNA, 15 bp, Homo sapiens
atttcactgtaagaa

SEQ ID NO: 1152461 - DNA, 15 bp, Homo sapiens
tatttcactgtaaga

SEQ ID NO: 1152462 - DNA, 15 bp, Homo sapiens
ttatttcactgtaag

SEQ ID NO: 1152463 - DNA, 15 bp, Homo sapiens
tttatttcactgtaa

SEQ ID NO: 1152464 - DNA, 15 bp, Homo sapiens
atttatttcactgta

SEQ ID NO: 1152465 - DNA, 15 bp, Homo sapiens
aatttatttcactgt

SEQ ID NO: 1152466 - DNA, 15 bp, Homo sapiens
caatttatttcactg

SEQ ID NO: 1152467 - DNA, 15 bp, Homo sapiens
gcaatttatttcact

SEQ ID NO: 1152468 - DNA, 15 bp, Homo sapiens
tgcaatttatttcac

SEQ ID NO: 1152469 - DNA, 15 bp, Homo sapiens
ttgcaatttatttca

SEQ ID NO: 1152470 - DNA, 15 bp, Homo sapiens
tttgcaatttatttc

SEQ ID NO: 1152471 - DNA, 15 bp, Homo sapiens
gtttgcaatttattt

SEQ ID NO: 1152472 - DNA, 15 bp, Homo sapiens
tgtttgcaatttatt

SEQ ID NO: 1152473 - DNA, 15 bp, Homo sapiens
atgtttgcaatttat

SEQ ID NO: 1152474 - DNA, 15 bp, Homo sapiens
catgtttgcaattta

SEQ ID NO: 1152475 - DNA, 15 bp, Homo sapiens
tcatgtttgcaattt

SEQ ID NO: 1152476 - DNA, 15 bp, Homo sapiens
atcatgtttgcaatt

SEQ ID NO: 1152477 - DNA, 15 bp, Homo sapiens
aatcatgtttgcaat

SEQ ID NO: 1152478 - DNA, 15 bp, Homo sapiens
caatcatgtttgcaa

SEQ ID NO: 1152479 - DNA, 15 bp, Homo sapiens
ccaatcatgtttgca

SEQ ID NO: 1152480 - DNA, 15 bp, Homo sapiens
gccaatcatgtttgc

SEQ ID NO: 1152481 - DNA, 15 bp, Homo sapiens
tgccaatcatgtttg

SEQ ID NO: 1152482 - DNA, 15 bp, Homo sapiens
atgccaatcatgttt

SEQ ID NO: 1152483 - DNA, 15 bp, Homo sapiens
tatgccaatcatgtt

SEQ ID NO: 1152484 - DNA, 15 bp, Homo sapiens
ttatgccaatcatgt

SEQ ID NO: 1152485 - DNA, 15 bp, Homo sapiens
cttatgccaatcatg

SEQ ID NO: 1152486 - DNA, 15 bp, Homo sapiens
ccttatgccaatcat

SEQ ID NO: 1152487 - DNA, 15 bp, Homo sapiens
gccttatgccaatca

SEQ ID NO: 1152488 - DNA, 15 bp, Homo sapiens
agccttatgccaatc

SEQ ID NO: 1152489 - DNA, 15 bp, Homo sapiens
gagccttatgccaat

SEQ ID NO: 1152490 - DNA, 15 bp, Homo sapiens
agagccttatgccaa

SEQ ID NO: 1152491 - DNA, 15 bp, Homo sapiens
cagagccttatgcca

SEQ ID NO: 1152492 - DNA, 15 bp, Homo sapiens
gcagagccttatgcc

SEQ ID NO: 1152493 - DNA, 15 bp, Homo sapiens
agcagagccttatgc

SEQ ID NO: 1152494 - DNA, 15 bp, Homo sapiens
cagcagagccttatg

SEQ ID NO: 1152495 - DNA, 15 bp, Homo sapiens
ccagcagagccttat

SEQ ID NO: 1152496 - DNA, 15 bp, Homo sapiens
tccagcagagcctta

SEQ ID NO: 1152497 - DNA, 15 bp, Homo sapiens
ctccagcagagcctt

SEQ ID NO: 1152498 - DNA, 15 bp, Homo sapiens
cctccagcagagcct

SEQ ID NO: 1152499 - DNA, 15 bp, Homo sapiens
ccctccagcagagcc

SEQ ID NO: 1152500 - DNA, 15 bp, Homo sapiens
accctccagcagagc

SEQ ID NO: 1152501 - DNA, 15 bp, Homo sapiens
ctaccctccagcaga

SEQ ID NO: 1152502 - DNA, 15 bp, Homo sapiens
tctaccctccagcag

SEQ ID NO: 1152503 - DNA, 15 bp, Homo sapiens
gtctaccctccagca

SEQ ID NO: 1152504 - DNA, 15 bp, Homo sapiens
agtctaccctccagc

SEQ ID NO: 1152505 - DNA, 15 bp, Homo sapiens
gagtctaccctccag

SEQ ID NO: 1152506 - DNA, 15 bp, Homo sapiens
ggagtctaccctcca

SEQ ID NO: 1152507 - DNA, 15 bp, Homo sapiens
aggagtctaccctcc

SEQ ID NO: 1152508 - DNA, 15 bp, Homo sapiens
aaggagtctaccctc

SEQ ID NO: 1152509 - DNA, 15 bp, Homo sapiens
taaggagtctaccct

SEQ ID NO: 1152510 - DNA, 15 bp, Homo sapiens
ataaggagtctaccc

SEQ ID NO: 1152511 - DNA, 15 bp, Homo sapiens
gataaggagtctacc

SEQ ID NO: 1152512 - DNA, 15 bp, Homo sapiens
tgataaggagtctac

SEQ ID NO: 1152513 - DNA, 15 bp, Homo sapiens
ctgataaggagtcta

SEQ ID NO: 1152514 - DNA, 15 bp, Homo sapiens
cctgataaggagtct

SEQ ID NO: 1152515 - DNA, 15 bp, Homo sapiens
ccctgataaggagtc

SEQ ID NO: 1152516 - DNA, 15 bp, Homo sapiens
cccctgataaggagt

SEQ ID NO: 1152517 - DNA, 15 bp, Homo sapiens
ccccctgataaggag

SEQ ID NO: 1152518 - DNA, 15 bp, Homo sapiens
tccccctgataagga

SEQ ID NO: 1152519 - DNA, 15 bp, Homo sapiens
ttccccctgataagg

SEQ ID NO: 1152520 - DNA, 15 bp, Homo sapiens
cttccccctgataag

SEQ ID NO: 1152521 - DNA, 15 bp, Homo sapiens
acttccccctgataa

SEQ ID NO: 1152522 - DNA, 15 bp, Homo sapiens
cacttccccctgata

SEQ ID NO: 1152523 - DNA, 15 bp, Homo sapiens
acacttccccctgat

SEQ ID NO: 1152524 - DNA, 15 bp, Homo sapiens
cacacttccccctga

SEQ ID NO: 1152525 - DNA, 15 bp, Homo sapiens
tcacacttccccctg

SEQ ID NO: 1152526 - DNA, 15 bp, Homo sapiens
gtcacacttccccct

SEQ ID NO: 1152527 - DNA, 15 bp, Homo sapiens
agtcacacttccccc

SEQ ID NO: 1152528 - DNA, 15 bp, Homo sapiens
aagtcacacttcccc

SEQ ID NO: 1152529 - DNA, 15 bp, Homo sapiens
gaagtcacacttccc

SEQ ID NO: 1152530 - DNA, 15 bp, Homo sapiens
ggaagtcacacttcc

SEQ ID NO: 1152531 - DNA, 15 bp, Homo sapiens
gggaagtcacacttc

SEQ ID NO: 1152532 - DNA, 15 bp, Homo sapiens
agggaagtcacactt

SEQ ID NO: 1152533 - DNA, 15 bp, Homo sapiens
cagggaagtcacact

SEQ ID NO: 1152534 - DNA, 15 bp, Homo sapiens
acagggaagtcacac

SEQ ID NO: 1152535 - DNA, 15 bp, Homo sapiens
cacagggaagtcaca

SEQ ID NO: 1152536 - DNA, 15 bp, Homo sapiens
acacagggaagtcac

SEQ ID NO: 1152537 - DNA, 15 bp, Homo sapiens
gacacagggaagtca

SEQ ID NO: 1152538 - DNA, 15 bp, Homo sapiens
ggacacagggaagtc

SEQ ID NO: 1152539 - DNA, 15 bp, Homo sapiens
aggacacagggaagt

SEQ ID NO: 1152540 - DNA, 15 bp, Homo sapiens
taggacacagggaag

SEQ ID NO: 1152541 - DNA, 15 bp, Homo sapiens
ttaggacacagggaa

SEQ ID NO: 1152542 - DNA, 15 bp, Homo sapiens
gttaggacacaggga

SEQ ID NO: 1152543 - DNA, 15 bp, Homo sapiens
agttaggacacaggg

SEQ ID NO: 1152544 - DNA, 15 bp, Homo sapiens
aagttaggacacagg

SEQ ID NO: 1152545 - DNA, 15 bp, Homo sapiens
taagttaggacacag

SEQ ID NO: 1152546 - DNA, 15 bp, Homo sapiens
ataagttaggacaca

SEQ ID NO: 1152547 - DNA, 15 bp, Homo sapiens
tataagttaggacac

SEQ ID NO: 1152548 - DNA, 15 bp, Homo sapiens
atataagttaggaca

SEQ ID NO: 1152549 - DNA, 15 bp, Homo sapiens
aatataagttaggac

SEQ ID NO: 1152550 - DNA, 15 bp, Homo sapiens
taatataagttagga

SEQ ID NO: 1152551 - DNA, 15 bp, Homo sapiens
gtaatataagttagg

SEQ ID NO: 1152552 - DNA, 15 bp, Homo sapiens
tgtaatataagttag

SEQ ID NO: 1152553 - DNA, 15 bp, Homo sapiens
atgtaatataagtta

SEQ ID NO: 1152554 - DNA, 15 bp, Homo sapiens
aatgtaatataagtt

SEQ ID NO: 1152555 - DNA, 15 bp, Homo sapiens
taatgtaatataagt

SEQ ID NO: 1152556 - DNA, 15 bp, Homo sapiens
gtaatgtaatataag

SEQ ID NO: 1152557 - DNA, 15 bp, Homo sapiens
tgtaatgtaatataa

SEQ ID NO: 1152558 - DNA, 15 bp, Homo sapiens
ttgtaatgtaatata

SEQ ID NO: 1152559 - DNA, 15 bp, Homo sapiens
cttgtaatgtaatat

SEQ ID NO: 1152560 - DNA, 15 bp, Homo sapiens
acttgtaatgtaata

SEQ ID NO: 1152561 - DNA, 15 bp, Homo sapiens
aacttgtaatgtaat

SEQ ID NO: 1152562 - DNA, 15 bp, Homo sapiens
aaacttgtaatgtaa

SEQ ID NO: 1152563 - DNA, 15 bp, Homo sapiens
caaacttgtaatgta

SEQ ID NO: 1152564 - DNA, 15 bp, Homo sapiens
gcaaacttgtaatgt

SEQ ID NO: 1152565 - DNA, 15 bp, Homo sapiens
ggcaaacttgtaatg

SEQ ID NO: 1152566 - DNA, 15 bp, Homo sapiens
gggcaaacttgtaat

SEQ ID NO: 1152567 - DNA, 15 bp, Homo sapiens
agggcaaacttgtaa

SEQ ID NO: 1152568 - DNA, 15 bp, Homo sapiens
gagggcaaacttgta

SEQ ID NO: 1152569 - DNA, 15 bp, Homo sapiens
tgagggcaaacttgt

SEQ ID NO: 1152570 - DNA, 15 bp, Homo sapiens
ctgagggcaaacttg

SEQ ID NO: 1152571 - DNA, 15 bp, Homo sapiens
gctgagggcaaactt

SEQ ID NO: 1152572 - DNA, 15 bp, Homo sapiens
tgctgagggcaaact

SEQ ID NO: 1152573 - DNA, 15 bp, Homo sapiens
ctgctgagggcaaac

SEQ ID NO: 1152574 - DNA, 15 bp, Homo sapiens
tctgctgagggcaaa

SEQ ID NO: 1152575 - DNA, 15 bp, Homo sapiens
gtctgctgagggcaa

SEQ ID NO: 1152576 - DNA, 15 bp, Homo sapiens
tgtctgctgagggca

SEQ ID NO: 1152577 - DNA, 15 bp, Homo sapiens
atgtctgctgagggc

SEQ ID NO: 1152578 - DNA, 15 bp, Homo sapiens
aatgtctgctgaggg

SEQ ID NO: 1152579 - DNA, 15 bp, Homo sapiens
gaatgtctgctgagg

SEQ ID NO: 1152580 - DNA, 15 bp, Homo sapiens
tgaatgtctgctgag

SEQ ID NO: 1152581 - DNA, 15 bp, Homo sapiens
atgaatgtctgctga

SEQ ID NO: 1152582 - DNA, 15 bp, Homo sapiens
aatgaatgtctgctg

SEQ ID NO: 1152583 - DNA, 15 bp, Homo sapiens
taatgaatgtctgct

SEQ ID NO: 1152584 - DNA, 15 bp, Homo sapiens
gtaatgaatgtctgc

SEQ ID NO: 1152585 - DNA, 15 bp, Homo sapiens
ggtaatgaatgtctg

SEQ ID NO: 1152586 - DNA, 15 bp, Homo sapiens
tggtaatgaatgtct

SEQ ID NO: 1152587 - DNA, 15 bp, Homo sapiens
ttggtaatgaatgtc

SEQ ID NO: 1152588 - DNA, 15 bp, Homo sapiens
cttggtaatgaatgt

SEQ ID NO: 1152589 - DNA, 15 bp, Homo sapiens
ccttggtaatgaatg

SEQ ID NO: 1152590 - DNA, 15 bp, Homo sapiens
tccttggtaatgaat

SEQ ID NO: 1152591 - DNA, 15 bp, Homo sapiens
gtccttggtaatgaa

SEQ ID NO: 1152592 - DNA, 15 bp, Homo sapiens
tgtccttggtaatga

SEQ ID NO: 1152593 - DNA, 15 bp, Homo sapiens
ttgtccttggtaatg

SEQ ID NO: 1152594 - DNA, 15 bp, Homo sapiens
cttgtccttggtaat

SEQ ID NO: 1152595 - DNA, 15 bp, Homo sapiens
tcttgtccttggtaa

SEQ ID NO: 1152596 - DNA, 15 bp, Homo sapiens
ctcttgtccttggta

SEQ ID NO: 1152597 - DNA, 15 bp, Homo sapiens
tctcttgtccttggt

SEQ ID NO: 1152598 - DNA, 15 bp, Homo sapiens
gtctcttgtccttgg

SEQ ID NO: 1152599 - DNA, 15 bp, Homo sapiens
ggtctcttgtccttg

SEQ ID NO: 1152600 - DNA, 15 bp, Homo sapiens
aggtctcttgtcctt

SEQ ID NO: 1152601 - DNA, 15 bp, Homo sapiens
gaggtctcttgtcct

SEQ ID NO: 1152602 - DNA, 15 bp, Homo sapiens
tgaggtctcttgtcc

SEQ ID NO: 1152603 - DNA, 15 bp, Homo sapiens
ctgaggtctcttgtc

SEQ ID NO: 1152604 - DNA, 15 bp, Homo sapiens
actgaggtctcttgt

SEQ ID NO: 1152605 - DNA, 15 bp, Homo sapiens
aactgaggtctcttg

SEQ ID NO: 1152606 - DNA, 15 bp, Homo sapiens
aaactgaggtctctt

SEQ ID NO: 1152607 - DNA, 15 bp, Homo sapiens
taaactgaggtctct

SEQ ID NO: 1152608 - DNA, 15 bp, Homo sapiens
gtaaactgaggtctc

SEQ ID NO: 1152609 - DNA, 15 bp, Homo sapiens
agtaaactgaggtct

SEQ ID NO: 1152610 - DNA, 15 bp, Homo sapiens
cagtaaactgaggtc

SEQ ID NO: 1152611 - DNA, 15 bp, Homo sapiens
gcagtaaactgaggt

SEQ ID NO: 1152612 - DNA, 15 bp, Homo sapiens
tgcagtaaactgagg

SEQ ID NO: 1152613 - DNA, 15 bp, Homo sapiens
ctgcagtaaactgag

SEQ ID NO: 1152614 - DNA, 15 bp, Homo sapiens
tctgcagtaaactga

SEQ ID NO: 1152615 - DNA, 15 bp, Homo sapiens
ttctgcagtaaactg

SEQ ID NO: 1152616 - DNA, 15 bp, Homo sapiens
gttctgcagtaaact

SEQ ID NO: 1152617 - DNA, 15 bp, Homo sapiens
tgttctgcagtaaac

SEQ ID NO: 1152618 - DNA, 15 bp, Homo sapiens
atgttctgcagtaaa

SEQ ID NO: 1152619 - DNA, 15 bp, Homo sapiens
tatgttctgcagtaa

SEQ ID NO: 1152620 - DNA, 15 bp, Homo sapiens
ttatgttctgcagta

SEQ ID NO: 1152621 - DNA, 15 bp, Homo sapiens
cttatgttctgcagt

SEQ ID NO: 1152622 - DNA, 15 bp, Homo sapiens
tcttatgttctgcag

SEQ ID NO: 1152623 - DNA, 15 bp, Homo sapiens
ctcttatgttctgca

SEQ ID NO: 1152624 - DNA, 15 bp, Homo sapiens
actcttatgttctgc

SEQ ID NO: 1152625 - DNA, 15 bp, Homo sapiens
tactcttatgttctg

SEQ ID NO: 1152626 - DNA, 15 bp, Homo sapiens
ttactcttatgttct

SEQ ID NO: 1152627 - DNA, 15 bp, Homo sapiens
gttactcttatgttc

SEQ ID NO: 1152628 - DNA, 15 bp, Homo sapiens
agttactcttatgtt

SEQ ID NO: 1152629 - DNA, 15 bp, Homo sapiens
aagttactcttatgt

SEQ ID NO: 1152630 - DNA, 15 bp, Homo sapiens
taagttactcttatg

SEQ ID NO: 1152631 - DNA, 15 bp, Homo sapiens
ttaagttactcttat

SEQ ID NO: 1152632 - DNA, 15 bp, Homo sapiens
tttaagttactctta

SEQ ID NO: 1152633 - DNA, 15 bp, Homo sapiens
atttaagttactctt

SEQ ID NO: 1152634 - DNA, 15 bp, Homo sapiens
aatttaagttactct

SEQ ID NO: 1152635 - DNA, 15 bp, Homo sapiens
gaatttaagttactc

SEQ ID NO: 1152636 - DNA, 15 bp, Homo sapiens
tgaatttaagttact

SEQ ID NO: 1152637 - DNA, 15 bp, Homo sapiens
ttgaatttaagttac

SEQ ID NO: 1152638 - DNA, 15 bp, Homo sapiens
gttgaatttaagtta

SEQ ID NO: 1152639 - DNA, 15 bp, Homo sapiens
tgttgaatttaagtt

SEQ ID NO: 1152640 - DNA, 15 bp, Homo sapiens
ctgttgaatttaagt

SEQ ID NO: 1152641 - DNA, 15 bp, Homo sapiens
cctgttgaatttaag

SEQ ID NO: 1152642 - DNA, 15 bp, Homo sapiens
acctgttgaatttaa

SEQ ID NO: 1152643 - DNA, 15 bp, Homo sapiens
aacctgttgaattta

SEQ ID NO: 1152644 - DNA, 15 bp, Homo sapiens
caacctgttgaattt

SEQ ID NO: 1152645 - DNA, 15 bp, Homo sapiens
ccaacctgttgaatt

SEQ ID NO: 1152646 - DNA, 15 bp, Homo sapiens
cccaacctgttgaat

SEQ ID NO: 1152647 - DNA, 15 bp, Homo sapiens
tcccaacctgttgaa

SEQ ID NO: 1152648 - DNA, 15 bp, Homo sapiens
ttcccaacctgttga

SEQ ID NO: 1152649 - DNA, 15 bp, Homo sapiens
gttcccaacctgttg

SEQ ID NO: 1152650 - DNA, 15 bp, Homo sapiens
agttcccaacctgtt

SEQ ID NO: 1152651 - DNA, 15 bp, Homo sapiens
cagttcccaacctgt

SEQ ID NO: 1152652 - DNA, 15 bp, Homo sapiens
ccagttcccaacctg

SEQ ID NO: 1152653 - DNA, 15 bp, Homo sapiens
cccagttcccaacct

SEQ ID NO: 1152654 - DNA, 15 bp, Homo sapiens
tcccagttcccaacc

SEQ ID NO: 1152655 - DNA, 15 bp, Homo sapiens
ttcccagttcccaac

SEQ ID NO: 1152656 - DNA, 15 bp, Homo sapiens
tttcccagttcccaa

SEQ ID NO: 1152657 - DNA, 15 bp, Homo sapiens
ctttcccagttccca

SEQ ID NO: 1152658 - DNA, 15 bp, Homo sapiens
actttcccagttccc

SEQ ID NO: 1152659 - DNA, 15 bp, Homo sapiens
tactttcccagttcc

SEQ ID NO: 1152660 - DNA, 15 bp, Homo sapiens
gtactttcccagttc

SEQ ID NO: 1152661 - DNA, 15 bp, Homo sapiens
tgtactttcccagtt

SEQ ID NO: 1152662 - DNA, 15 bp, Homo sapiens
ctgtactttcccagt

SEQ ID NO: 1152663 - DNA, 15 bp, Homo sapiens
actgtactttcccag

SEQ ID NO: 1152664 - DNA, 15 bp, Homo sapiens
gactgtactttccca

SEQ ID NO: 1152665 - DNA, 15 bp, Homo sapiens
ggactgtactttccc

SEQ ID NO: 1152666 - DNA, 15 bp, Homo sapiens
tggactgtactttcc

SEQ ID NO: 1152667 - DNA, 15 bp, Homo sapiens
ttggactgtactttc

SEQ ID NO: 1152668 - DNA, 15 bp, Homo sapiens
attggactgtacttt

SEQ ID NO: 1152669 - DNA, 15 bp, Homo sapiens
tattggactgtactt

SEQ ID NO: 1152670 - DNA, 15 bp, Homo sapiens
ctattggactgtact

SEQ ID NO: 1152671 - DNA, 15 bp, Homo sapiens
gctattggactgtac

SEQ ID NO: 1152672 - DNA, 15 bp, Homo sapiens
tgctattggactgta

SEQ ID NO: 1152673 - DNA, 15 bp, Homo sapiens
atgctattggactgt

SEQ ID NO: 1152674 - DNA, 15 bp, Homo sapiens
aatgctattggactg

SEQ ID NO: 1152675 - DNA, 15 bp, Homo sapiens
gaatgctattggact

SEQ ID NO: 1152676 - DNA, 15 bp, Homo sapiens
agaatgctattggac

SEQ ID NO: 1152677 - DNA, 15 bp, Homo sapiens
gagaatgctattgga

SEQ ID NO: 1152678 - DNA, 15 bp, Homo sapiens
agagaatgctattgg

SEQ ID NO: 1152679 - DNA, 15 bp, Homo sapiens
aagagaatgctattg

SEQ ID NO: 1152680 - DNA, 15 bp, Homo sapiens
aaagagaatgctatt

SEQ ID NO: 1152681 - DNA, 15 bp, Homo sapiens
aaaagagaatgctat

SEQ ID NO: 1152682 - DNA, 15 bp, Homo sapiens
gaaaagagaatgcta

SEQ ID NO: 1152683 - DNA, 15 bp, Homo sapiens
agaaaagagaatgct

SEQ ID NO: 1152684 - DNA, 15 bp, Homo sapiens
cagaaaagagaatgc

SEQ ID NO: 1152685 - DNA, 15 bp, Homo sapiens
acagaaaagagaatg

SEQ ID NO: 1152686 - DNA, 15 bp, Homo sapiens
aacagaaaagagaat

SEQ ID NO: 1152687 - DNA, 15 bp, Homo sapiens
caacagaaaagagaa

SEQ ID NO: 1152688 - DNA, 15 bp, Homo sapiens
acaacagaaaagaga

SEQ ID NO: 1152689 - DNA, 15 bp, Homo sapiens
aacaacagaaaagag

SEQ ID NO: 1152690 - DNA, 15 bp, Homo sapiens
taacaacagaaaaga

SEQ ID NO: 1152691 - DNA, 15 bp, Homo sapiens
gtaacaacagaaaag

SEQ ID NO: 1152692 - DNA, 15 bp, Homo sapiens
agtaacaacagaaaa

SEQ ID NO: 1152693 - DNA, 15 bp, Homo sapiens
gagtaacaacagaaa

SEQ ID NO: 1152694 - DNA, 15 bp, Homo sapiens
agagtaacaacagaa

SEQ ID NO: 1152695 - DNA, 15 bp, Homo sapiens
aagagtaacaacaga

SEQ ID NO: 1152696 - DNA, 15 bp, Homo sapiens
aaagagtaacaacag

SEQ ID NO: 1152697 - DNA, 15 bp, Homo sapiens
taaagagtaacaaca

SEQ ID NO: 1152698 - DNA, 15 bp, Homo sapiens
ataaagagtaacaac

SEQ ID NO: 1152699 - DNA, 15 bp, Homo sapiens
tataaagagtaacaa

SEQ ID NO: 1152700 - DNA, 15 bp, Homo sapiens
ctataaagagtaaca

SEQ ID NO: 1152701 - DNA, 15 bp, Homo sapiens
tctataaagagtaac

SEQ ID NO: 1152702 - DNA, 15 bp, Homo sapiens
ttctataaagagtaa

SEQ ID NO: 1152703 - DNA, 15 bp, Homo sapiens
attctataaagagta

SEQ ID NO: 1152704 - DNA, 15 bp, Homo sapiens
tattctataaagagt

SEQ ID NO: 1152705 - DNA, 15 bp, Homo sapiens
atattctataaagag

SEQ ID NO: 1152706 - DNA, 15 bp, Homo sapiens
gatattctataaaga

SEQ ID NO: 1152707 - DNA, 15 bp, Homo sapiens
tgatattctataaag

SEQ ID NO: 1152708 - DNA, 15 bp, Homo sapiens
ttgatattctataaa

SEQ ID NO: 1152709 - DNA, 15 bp, Homo sapiens
cttgatattctataa

SEQ ID NO: 1152710 - DNA, 15 bp, Homo sapiens
acttgatattctata

SEQ ID NO: 1152711 - DNA, 15 bp, Homo sapiens
tacttgatattctat

SEQ ID NO: 1152712 - DNA, 15 bp, Homo sapiens
ttacttgatattcta

SEQ ID NO: 1152713 - DNA, 15 bp, Homo sapiens
gttacttgatattct

SEQ ID NO: 1152714 - DNA, 15 bp, Homo sapiens
agttacttgatattc

SEQ ID NO: 1152715 - DNA, 15 bp, Homo sapiens
aagttacttgatatt

SEQ ID NO: 1152716 - DNA, 15 bp, Homo sapiens
gaagttacttgatat

SEQ ID NO: 1152717 - DNA, 15 bp, Homo sapiens
agaagttacttgata

SEQ ID NO: 1152718 - DNA, 15 bp, Homo sapiens
gagaagttacttgat

SEQ ID NO: 1152719 - DNA, 15 bp, Homo sapiens
agagaagttacttga

SEQ ID NO: 1152720 - DNA, 15 bp, Homo sapiens
cagagaagttacttg

SEQ ID NO: 1152721 - DNA, 15 bp, Homo sapiens
tcagagaagttactt

SEQ ID NO: 1152722 - DNA, 15 bp, Homo sapiens
atcagagaagttact

SEQ ID NO: 1152723 - DNA, 15 bp, Homo sapiens
gatcagagaagttac

SEQ ID NO: 1152724 - DNA, 15 bp, Homo sapiens
agatcagagaagtta

SEQ ID NO: 1152725 - DNA, 15 bp, Homo sapiens
aagatcagagaagtt

SEQ ID NO: 1152726 - DNA, 15 bp, Homo sapiens
aaagatcagagaagt

SEQ ID NO: 1152727 - DNA, 15 bp, Homo sapiens
aaaagatcagagaag

SEQ ID NO: 1152728 - DNA, 15 bp, Homo sapiens
gaaaagatcagagaa

SEQ ID NO: 1152729 - DNA, 15 bp, Homo sapiens
ggaaaagatcagaga

SEQ ID NO: 1152730 - DNA, 15 bp, Homo sapiens
aggaaaagatcagag

SEQ ID NO: 1152731 - DNA, 15 bp, Homo sapiens
taggaaaagatcaga

SEQ ID NO: 1152732 - DNA, 15 bp, Homo sapiens
gtaggaaaagatcag

SEQ ID NO: 1152733 - DNA, 15 bp, Homo sapiens
agtaggaaaagatca

SEQ ID NO: 1152734 - DNA, 15 bp, Homo sapiens
aagtaggaaaagatc

SEQ ID NO: 1152735 - DNA, 15 bp, Homo sapiens
taagtaggaaaagat

SEQ ID NO: 1152736 - DNA, 15 bp, Homo sapiens
ttaagtaggaaaaga

SEQ ID NO: 1152737 - DNA, 15 bp, Homo sapiens
attaagtaggaaaag

SEQ ID NO: 1152738 - DNA, 15 bp, Homo sapiens
aattaagtaggaaaa

SEQ ID NO: 1152739 - DNA, 15 bp, Homo sapiens
caattaagtaggaaa

SEQ ID NO: 1152740 - DNA, 15 bp, Homo sapiens
tcaattaagtaggaa

SEQ ID NO: 1152741 - DNA, 15 bp, Homo sapiens
atcaattaagtagga

SEQ ID NO: 1152742 - DNA, 15 bp, Homo sapiens
catcaattaagtagg

SEQ ID NO: 1152743 - DNA, 15 bp, Homo sapiens
tcatcaattaagtag

SEQ ID NO: 1152744 - DNA, 15 bp, Homo sapiens
ttcatcaattaagta

SEQ ID NO: 1152745 - DNA, 15 bp, Homo sapiens
gttcatcaattaagt

SEQ ID NO: 1152746 - DNA, 15 bp, Homo sapiens
agttcatcaattaag

SEQ ID NO: 1152747 - DNA, 15 bp, Homo sapiens
tagttcatcaattaa

SEQ ID NO: 1152748 - DNA, 15 bp, Homo sapiens
atagttcatcaatta

SEQ ID NO: 1152749 - DNA, 15 bp, Homo sapiens
aatagttcatcaatt

SEQ ID NO: 1152750 - DNA, 15 bp, Homo sapiens
aaatagttcatcaat

SEQ ID NO: 1152751 - DNA, 15 bp, Homo sapiens
caaatagttcatcaa

SEQ ID NO: 1152752 - DNA, 15 bp, Homo sapiens
tcaaatagttcatca

SEQ ID NO: 1152753 - DNA, 15 bp, Homo sapiens
ttcaaatagttcatc

SEQ ID NO: 1152754 - DNA, 15 bp, Homo sapiens
tttcaaatagttcat

SEQ ID NO: 1152755 - DNA, 15 bp, Homo sapiens
ctttcaaatagttca

SEQ ID NO: 1152756 - DNA, 15 bp, Homo sapiens
tctttcaaatagttc

SEQ ID NO: 1152757 - DNA, 15 bp, Homo sapiens
ttctttcaaatagtt

SEQ ID NO: 1152758 - DNA, 15 bp, Homo sapiens
gttctttcaaatagt

SEQ ID NO: 1152759 - DNA, 15 bp, Homo sapiens
tgttctttcaaatag

SEQ ID NO: 1152760 - DNA, 15 bp, Homo sapiens
atgttctttcaaata

SEQ ID NO: 1152761 - DNA, 15 bp, Homo sapiens
tatgttctttcaaat

SEQ ID NO: 1152762 - DNA, 15 bp, Homo sapiens
ttatgttctttcaaa

SEQ ID NO: 1152763 - DNA, 15 bp, Homo sapiens
attatgttctttcaa

SEQ ID NO: 1152764 - DNA, 15 bp, Homo sapiens
tattatgttctttca

SEQ ID NO: 1152765 - DNA, 15 bp, Homo sapiens
atattatgttctttc

SEQ ID NO: 1152766 - DNA, 15 bp, Homo sapiens
aatattatgttcttt

SEQ ID NO: 1152767 - DNA, 15 bp, Homo sapiens
aaatattatgttctt

SEQ ID NO: 1152768 - DNA, 15 bp, Homo sapiens
aaaatattatgttct

SEQ ID NO: 1152769 - DNA, 15 bp, Homo sapiens
caaaatattatgttc

SEQ ID NO: 1152770 - DNA, 15 bp, Homo sapiens
gcaaaatattatgtt

SEQ ID NO: 1152771 - DNA, 15 bp, Homo sapiens
tgcaaaatattatgt

SEQ ID NO: 1152772 - DNA, 15 bp, Homo sapiens
atgcaaaatattatg

SEQ ID NO: 1152773 - DNA, 15 bp, Homo sapiens
aatgcaaaatattat

SEQ ID NO: 1152774 - DNA, 15 bp, Homo sapiens
gaatgcaaaatatta

SEQ ID NO: 1152775 - DNA, 15 bp, Homo sapiens
agaatgcaaaatatt

SEQ ID NO: 1152776 - DNA, 15 bp, Homo sapiens
tagaatgcaaaatat

SEQ ID NO: 1152777 - DNA, 15 bp, Homo sapiens
ttagaatgcaaaata

SEQ ID NO: 1152778 - DNA, 15 bp, Homo sapiens
gttagaatgcaaaat

SEQ ID NO: 1152779 - DNA, 15 bp, Homo sapiens
cgttagaatgcaaaa

SEQ ID NO: 1152780 - DNA, 15 bp, Homo sapiens
acgttagaatgcaaa

SEQ ID NO: 1152781 - DNA, 15 bp, Homo sapiens
aacgttagaatgcaa

SEQ ID NO: 1152782 - DNA, 15 bp, Homo sapiens
caacgttagaatgca

SEQ ID NO: 1152783 - DNA, 15 bp, Homo sapiens
acaacgttagaatgc

SEQ ID NO: 1152784 - DNA, 15 bp, Homo sapiens
tacaacgttagaatg

SEQ ID NO: 1152785 - DNA, 15 bp, Homo sapiens
ctacaacgttagaat

SEQ ID NO: 1152786 - DNA, 15 bp, Homo sapiens
tctacaacgttagaa

SEQ ID NO: 1152787 - DNA, 15 bp, Homo sapiens
gtctacaacgttaga

SEQ ID NO: 1152788 - DNA, 15 bp, Homo sapiens
ggtctacaacgttag

SEQ ID NO: 1152789 - DNA, 15 bp, Homo sapiens
aggtctacaacgtta

SEQ ID NO: 1152790 - DNA, 15 bp, Homo sapiens
caggtctacaacgtt

SEQ ID NO: 1152791 - DNA, 15 bp, Homo sapiens
ccaggtctacaacgt

SEQ ID NO: 1152792 - DNA, 15 bp, Homo sapiens
gccaggtctacaacg

SEQ ID NO: 1152793 - DNA, 15 bp, Homo sapiens
ggccaggtctacaac

SEQ ID NO: 1152794 - DNA, 15 bp, Homo sapiens
tggccaggtctacaa

SEQ ID NO: 1152795 - DNA, 15 bp, Homo sapiens
ttggccaggtctaca

SEQ ID NO: 1152796 - DNA, 15 bp, Homo sapiens
tttggccaggtctac

SEQ ID NO: 1152797 - DNA, 15 bp, Homo sapiens
ttttggccaggtcta

SEQ ID NO: 1152798 - DNA, 15 bp, Homo sapiens
attttggccaggtct

SEQ ID NO: 1152799 - DNA, 15 bp, Homo sapiens
tattttggccaggtc

SEQ ID NO: 1152800 - DNA, 15 bp, Homo sapiens
ttattttggccaggt

SEQ ID NO: 1152801 - DNA, 15 bp, Homo sapiens
tttattttggccagg

SEQ ID NO: 1152802 - DNA, 15 bp, Homo sapiens
gtttattttggccag

SEQ ID NO: 1152803 - DNA, 15 bp, Homo sapiens
agtttattttggcca

SEQ ID NO: 1152804 - DNA, 15 bp, Homo sapiens
tagtttattttggcc

SEQ ID NO: 1152805 - DNA, 15 bp, Homo sapiens
ctagtttattttggc

SEQ ID NO: 1152806 - DNA, 15 bp, Homo sapiens
actagtttattttgg

SEQ ID NO: 1152807 - DNA, 15 bp, Homo sapiens
gactagtttattttg

SEQ ID NO: 1152808 - DNA, 15 bp, Homo sapiens
tgactagtttatttt

SEQ ID NO: 1152809 - DNA, 15 bp, Homo sapiens
ttgactagtttattt

SEQ ID NO: 1152810 - DNA, 15 bp, Homo sapiens
tttgactagtttatt

SEQ ID NO: 1152811 - DNA, 15 bp, Homo sapiens
gtttgactagtttat

SEQ ID NO: 1152812 - DNA, 15 bp, Homo sapiens
agtttgactagttta

SEQ ID NO: 1152813 - DNA, 15 bp, Homo sapiens
gagtttgactagttt

SEQ ID NO: 1152814 - DNA, 15 bp, Homo sapiens
agagtttgactagtt

SEQ ID NO: 1152815 - DNA, 15 bp, Homo sapiens
gagagtttgactagt

SEQ ID NO: 1152816 - DNA, 15 bp, Homo sapiens
agagagtttgactag

SEQ ID NO: 1152817 - DNA, 15 bp, Homo sapiens
tagagagtttgacta

SEQ ID NO: 1152818 - DNA, 15 bp, Homo sapiens
ttagagagtttgact

SEQ ID NO: 1152819 - DNA, 15 bp, Homo sapiens
attagagagtttgac

SEQ ID NO: 1152820 - DNA, 15 bp, Homo sapiens
aattagagagtttga

SEQ ID NO: 1152821 - DNA, 15 bp, Homo sapiens
caattagagagtttg

SEQ ID NO: 1152822 - DNA, 15 bp, Homo sapiens
acaattagagagttt

SEQ ID NO: 1152823 - DNA, 15 bp, Homo sapiens
tacaattagagagtt

SEQ ID NO: 1152824 - DNA, 15 bp, Homo sapiens
gtacaattagagagt

SEQ ID NO: 1152825 - DNA, 15 bp, Homo sapiens
agtacaattagagag

SEQ ID NO: 1152826 - DNA, 15 bp, Homo sapiens
aagtacaattagaga

SEQ ID NO: 1152827 - DNA, 15 bp, Homo sapiens
aaagtacaattagag

SEQ ID NO: 1152828 - DNA, 15 bp, Homo sapiens
aaaagtacaattaga

SEQ ID NO: 1152829 - DNA, 15 bp, Homo sapiens
gaaaagtacaattag

SEQ ID NO: 1152830 - DNA, 15 bp, Homo sapiens
agaaaagtacaatta

SEQ ID NO: 1152831 - DNA, 15 bp, Homo sapiens
tagaaaagtacaatt

SEQ ID NO: 1152832 - DNA, 15 bp, Homo sapiens
gtagaaaagtacaat

SEQ ID NO: 1152833 - DNA, 15 bp, Homo sapiens
ggtagaaaagtacaa

SEQ ID NO: 1152834 - DNA, 15 bp, Homo sapiens
gggtagaaaagtaca

SEQ ID NO: 1152835 - DNA, 15 bp, Homo sapiens
tgggtagaaaagtac

SEQ ID NO: 1152836 - DNA, 15 bp, Homo sapiens
ctgggtagaaaagta

SEQ ID NO: 1152837 - DNA, 15 bp, Homo sapiens
actgggtagaaaagt

SEQ ID NO: 1152838 - DNA, 15 bp, Homo sapiens
aactgggtagaaaag

SEQ ID NO: 1152839 - DNA, 15 bp, Homo sapiens
taactgggtagaaaa

SEQ ID NO: 1152840 - DNA, 15 bp, Homo sapiens
ctaactgggtagaaa

SEQ ID NO: 1152841 - DNA, 15 bp, Homo sapiens
tctaactgggtagaa

SEQ ID NO: 1152842 - DNA, 15 bp, Homo sapiens
gtctaactgggtaga

SEQ ID NO: 1152843 - DNA, 15 bp, Homo sapiens
agtctaactgggtag

SEQ ID NO: 1152844 - DNA, 15 bp, Homo sapiens
aagtctaactgggta

SEQ ID NO: 1152845 - DNA, 15 bp, Homo sapiens
gaagtctaactgggt

SEQ ID NO: 1152846 - DNA, 15 bp, Homo sapiens
agaagtctaactggg

SEQ ID NO: 1152847 - DNA, 15 bp, Homo sapiens
gagaagtctaactgg

SEQ ID NO: 1152848 - DNA, 15 bp, Homo sapiens
agagaagtctaactg

SEQ ID NO: 1152849 - DNA, 15 bp, Homo sapiens
cagagaagtctaact

SEQ ID NO: 1152850 - DNA, 15 bp, Homo sapiens
acagagaagtctaac

SEQ ID NO: 1152851 - DNA, 15 bp, Homo sapiens
tacagagaagtctaa

SEQ ID NO: 1152852 - DNA, 15 bp, Homo sapiens
ttacagagaagtcta

SEQ ID NO: 1152853 - DNA, 15 bp, Homo sapiens
attacagagaagtct

SEQ ID NO: 1152854 - DNA, 15 bp, Homo sapiens
aattacagagaagtc

SEQ ID NO: 1152855 - DNA, 15 bp, Homo sapiens
aaattacagagaagt

SEQ ID NO: 1152856 - DNA, 15 bp, Homo sapiens
gaaattacagagaag

SEQ ID NO: 1152857 - DNA, 15 bp, Homo sapiens
agaaattacagagaa

SEQ ID NO: 1152858 - DNA, 15 bp, Homo sapiens
aagaaattacagaga

SEQ ID NO: 1152859 - DNA, 15 bp, Homo sapiens
aaagaaattacagag

SEQ ID NO: 1152860 - DNA, 15 bp, Homo sapiens
aaaagaaattacaga

SEQ ID NO: 1152861 - DNA, 15 bp, Homo sapiens
caaaagaaattacag

SEQ ID NO: 1152862 - DNA, 15 bp, Homo sapiens
acaaaagaaattaca

SEQ ID NO: 1152863 - DNA, 15 bp, Homo sapiens
gacaaaagaaattac

SEQ ID NO: 1152864 - DNA, 15 bp, Homo sapiens
agacaaaagaaatta

SEQ ID NO: 1152865 - DNA, 15 bp, Homo sapiens
gagacaaaagaaatt

SEQ ID NO: 1152866 - DNA, 15 bp, Homo sapiens
agagacaaaagaaat

SEQ ID NO: 1152867 - DNA, 15 bp, Homo sapiens
aagagacaaaagaaa

SEQ ID NO: 1152868 - DNA, 15 bp, Homo sapiens
aaagagacaaaagaa

SEQ ID NO: 1152869 - DNA, 15 bp, Homo sapiens
taaagagacaaaaga

SEQ ID NO: 1152870 - DNA, 15 bp, Homo sapiens
ttaaagagacaaaag

SEQ ID NO: 1152871 - DNA, 15 bp, Homo sapiens
gttaaagagacaaaa

SEQ ID NO: 1152872 - DNA, 15 bp, Homo sapiens
ggttaaagagacaaa

SEQ ID NO: 1152873 - DNA, 15 bp, Homo sapiens
gggttaaagagacaa

SEQ ID NO: 1152874 - DNA, 15 bp, Homo sapiens
tgggttaaagagaca

SEQ ID NO: 1152875 - DNA, 15 bp, Homo sapiens
ctgggttaaagagac

SEQ ID NO: 1152876 - DNA, 15 bp, Homo sapiens
actgggttaaagaga

SEQ ID NO: 1152877 - DNA, 15 bp, Homo sapiens
cactgggttaaagag

SEQ ID NO: 1152878 - DNA, 15 bp, Homo sapiens
ccactgggttaaaga

SEQ ID NO: 1152879 - DNA, 15 bp, Homo sapiens
cccactgggttaaag

SEQ ID NO: 1152880 - DNA, 15 bp, Homo sapiens
gcccactgggttaaa

SEQ ID NO: 1152881 - DNA, 15 bp, Homo sapiens
tgcccactgggttaa

SEQ ID NO: 1152882 - DNA, 15 bp, Homo sapiens
gtgcccactgggtta

SEQ ID NO: 1152883 - DNA, 15 bp, Homo sapiens
ggtgcccactgggtt

SEQ ID NO: 1152884 - DNA, 15 bp, Homo sapiens
tggtgcccactgggt

SEQ ID NO: 1152885 - DNA, 15 bp, Homo sapiens
gtggtgcccactggg

SEQ ID NO: 1152886 - DNA, 15 bp, Homo sapiens
tgtggtgcccactgg

SEQ ID NO: 1152887 - DNA, 15 bp, Homo sapiens
atgtggtgcccactg

SEQ ID NO: 1152888 - DNA, 15 bp, Homo sapiens
tatgtggtgcccact

SEQ ID NO: 1152889 - DNA, 15 bp, Homo sapiens
ctatgtggtgcccac

SEQ ID NO: 1152890 - DNA, 15 bp, Homo sapiens
cctatgtggtgccca

SEQ ID NO: 1152891 - DNA, 15 bp, Homo sapiens
gcctatgtggtgccc

SEQ ID NO: 1152892 - DNA, 15 bp, Homo sapiens
ggcctatgtggtgcc

SEQ ID NO: 1152893 - DNA, 15 bp, Homo sapiens
aggcctatgtggtgc

SEQ ID NO: 1152894 - DNA, 15 bp, Homo sapiens
aaggcctatgtggtg

SEQ ID NO: 1152895 - DNA, 15 bp, Homo sapiens
aaaggcctatgtggt

SEQ ID NO: 1152896 - DNA, 15 bp, Homo sapiens
gaaaggcctatgtgg

SEQ ID NO: 1152897 - DNA, 15 bp, Homo sapiens
cgaaaggcctatgtg

SEQ ID NO: 1152898 - DNA, 15 bp, Homo sapiens
tcgaaaggcctatgt

SEQ ID NO: 1152899 - DNA, 15 bp, Homo sapiens
ttcgaaaggcctatg

SEQ ID NO: 1152900 - DNA, 15 bp, Homo sapiens
attcgaaaggcctat

SEQ ID NO: 1152901 - DNA, 15 bp, Homo sapiens
tattcgaaaggccta

SEQ ID NO: 1152902 - DNA, 15 bp, Homo sapiens
atattcgaaaggcct

SEQ ID NO: 1152903 - DNA, 15 bp, Homo sapiens
tatattcgaaaggcc

SEQ ID NO: 1152904 - DNA, 15 bp, Homo sapiens
ttatattcgaaaggc

SEQ ID NO: 1152905 - DNA, 15 bp, Homo sapiens
attatattcgaaagg

SEQ ID NO: 1152906 - DNA, 15 bp, Homo sapiens
tattatattcgaaag

SEQ ID NO: 1152907 - DNA, 15 bp, Homo sapiens
gtattatattcgaaa

SEQ ID NO: 1152908 - DNA, 15 bp, Homo sapiens
tgtattatattcgaa

SEQ ID NO: 1152909 - DNA, 15 bp, Homo sapiens
ttgtattatattcga

SEQ ID NO: 1152910 - DNA, 15 bp, Homo sapiens
attgtattatattcg

SEQ ID NO: 1152911 - DNA, 15 bp, Homo sapiens
gattgtattatattc

SEQ ID NO: 1152912 - DNA, 15 bp, Homo sapiens
ggattgtattatatt

SEQ ID NO: 1152913 - DNA, 15 bp, Homo sapiens
tggattgtattatat

SEQ ID NO: 1152914 - DNA, 15 bp, Homo sapiens
atggattgtattata

SEQ ID NO: 1152915 - DNA, 15 bp, Homo sapiens
gatggattgtattat

SEQ ID NO: 1152916 - DNA, 15 bp, Homo sapiens
tgatggattgtatta

SEQ ID NO: 1152917 - DNA, 15 bp, Homo sapiens
ttgatggattgtatt

SEQ ID NO: 1152918 - DNA, 15 bp, Homo sapiens
cttgatggattgtat

SEQ ID NO: 1152919 - DNA, 15 bp, Homo sapiens
acttgatggattgta

SEQ ID NO: 1152920 - DNA, 15 bp, Homo sapiens
gacttgatggattgt

SEQ ID NO: 1152921 - DNA, 15 bp, Homo sapiens
tgacttgatggattg

SEQ ID NO: 1152922 - DNA, 15 bp, Homo sapiens
ctgacttgatggatt

SEQ ID NO: 1152923 - DNA, 15 bp, Homo sapiens
gctgacttgatggat

SEQ ID NO: 1152924 - DNA, 15 bp, Homo sapiens
tgctgacttgatgga

SEQ ID NO: 1152925 - DNA, 15 bp, Homo sapiens
ttgctgacttgatgg

SEQ ID NO: 1152926 - DNA, 15 bp, Homo sapiens
tttgctgacttgatg

SEQ ID NO: 1152927 - DNA, 15 bp, Homo sapiens
ttttgctgacttgat

SEQ ID NO: 1152928 - DNA, 15 bp, Homo sapiens
attttgctgacttga

SEQ ID NO: 1152929 - DNA, 15 bp, Homo sapiens
tattttgctgacttg

SEQ ID NO: 1152930 - DNA, 15 bp, Homo sapiens
ctattttgctgactt

SEQ ID NO: 1152931 - DNA, 15 bp, Homo sapiens
actattttgctgact

SEQ ID NO: 1152932 - DNA, 15 bp, Homo sapiens
cactattttgctgac

SEQ ID NO: 1152933 - DNA, 15 bp, Homo sapiens
acactattttgctga

SEQ ID NO: 1152934 - DNA, 15 bp, Homo sapiens
aacactattttgctg

SEQ ID NO: 1152935 - DNA, 15 bp, Homo sapiens
aaacactattttgct

SEQ ID NO: 1152936 - DNA, 15 bp, Homo sapiens
gaaacactattttgc

SEQ ID NO: 1152937 - DNA, 15 bp, Homo sapiens
ggaaacactattttg

SEQ ID NO: 1152938 - DNA, 15 bp, Homo sapiens
aggaaacactatttt

SEQ ID NO: 1152939 - DNA, 15 bp, Homo sapiens
taggaaacactattt

SEQ ID NO: 1152940 - DNA, 15 bp, Homo sapiens
ctaggaaacactatt

SEQ ID NO: 1152941 - DNA, 15 bp, Homo sapiens
actaggaaacactat

SEQ ID NO: 1152942 - DNA, 15 bp, Homo sapiens
gactaggaaacacta

SEQ ID NO: 1152943 - DNA, 15 bp, Homo sapiens
tgactaggaaacact

SEQ ID NO: 1152944 - DNA, 15 bp, Homo sapiens
atgactaggaaacac

SEQ ID NO: 1152945 - DNA, 15 bp, Homo sapiens
catgactaggaaaca

SEQ ID NO: 1152946 - DNA, 15 bp, Homo sapiens
gcatgactaggaaac

SEQ ID NO: 1152947 - DNA, 15 bp, Homo sapiens
ggcatgactaggaaa

SEQ ID NO: 1152948 - DNA, 15 bp, Homo sapiens
tggcatgactaggaa

SEQ ID NO: 1152949 - DNA, 15 bp, Homo sapiens
ctggcatgactagga

SEQ ID NO: 1152950 - DNA, 15 bp, Homo sapiens
gctggcatgactagg

SEQ ID NO: 1152951 - DNA, 15 bp, Homo sapiens
tgctggcatgactag

SEQ ID NO: 1152952 - DNA, 15 bp, Homo sapiens
atgctggcatgacta

SEQ ID NO: 1152953 - DNA, 15 bp, Homo sapiens
catgctggcatgact

SEQ ID NO: 1152954 - DNA, 15 bp, Homo sapiens
gcatgctggcatgac

SEQ ID NO: 1152955 - DNA, 15 bp, Homo sapiens
agcatgctggcatga

SEQ ID NO: 1152956 - DNA, 15 bp, Homo sapiens
aagcatgctggcatg

SEQ ID NO: 1152957 - DNA, 15 bp, Homo sapiens
gaagcatgctggcat

SEQ ID NO: 1152958 - DNA, 15 bp, Homo sapiens
agaagcatgctggca

SEQ ID NO: 1152959 - DNA, 15 bp, Homo sapiens
gagaagcatgctggc

SEQ ID NO: 1152960 - DNA, 15 bp, Homo sapiens
agagaagcatgctgg

SEQ ID NO: 1152961 - DNA, 15 bp, Homo sapiens
aagagaagcatgctg

SEQ ID NO: 1152962 - DNA, 15 bp, Homo sapiens
aaagagaagcatgct

SEQ ID NO: 1152963 - DNA, 15 bp, Homo sapiens
aaaagagaagcatgc

SEQ ID NO: 1152964 - DNA, 15 bp, Homo sapiens
taaaagagaagcatg

SEQ ID NO: 1152965 - DNA, 15 bp, Homo sapiens
ataaaagagaagcat

SEQ ID NO: 1152966 - DNA, 15 bp, Homo sapiens
aataaaagagaagca

SEQ ID NO: 1152967 - DNA, 15 bp, Homo sapiens
taataaaagagaagc

SEQ ID NO: 1152968 - DNA, 15 bp, Homo sapiens
ataataaaagagaag

SEQ ID NO: 1152969 - DNA, 15 bp, Homo sapiens
aataataaaagagaa

SEQ ID NO: 1152970 - DNA, 15 bp, Homo sapiens
caataataaaagaga

SEQ ID NO: 1152971 - DNA, 15 bp, Homo sapiens
acaataataaaagag

SEQ ID NO: 1152972 - DNA, 15 bp, Homo sapiens
aacaataataaaaga

SEQ ID NO: 1152973 - DNA, 15 bp, Homo sapiens
caacaataataaaag

SEQ ID NO: 1152974 - DNA, 15 bp, Homo sapiens
tcaacaataataaaa

SEQ ID NO: 1152975 - DNA, 15 bp, Homo sapiens
ttcaacaataataaa

SEQ ID NO: 1152976 - DNA, 15 bp, Homo sapiens
gttcaacaataataa

SEQ ID NO: 1152977 - DNA, 15 bp, Homo sapiens
ggttcaacaataata

SEQ ID NO: 1152978 - DNA, 15 bp, Homo sapiens
tggttcaacaataat

SEQ ID NO: 1152979 - DNA, 15 bp, Homo sapiens
ttggttcaacaataa

SEQ ID NO: 1152980 - DNA, 15 bp, Homo sapiens
attggttcaacaata

SEQ ID NO: 1152981 - DNA, 15 bp, Homo sapiens
cattggttcaacaat

SEQ ID NO: 1152982 - DNA, 15 bp, Homo sapiens
ccattggttcaacaa

SEQ ID NO: 1152983 - DNA, 15 bp, Homo sapiens
gccattggttcaaca

SEQ ID NO: 1152984 - DNA, 15 bp, Homo sapiens
tgccattggttcaac

SEQ ID NO: 1152985 - DNA, 15 bp, Homo sapiens
ttgccattggttcaa

SEQ ID NO: 1152986 - DNA, 15 bp, Homo sapiens
tttgccattggttca

SEQ ID NO: 1152987 - DNA, 15 bp, Homo sapiens
ctttgccattggttc

SEQ ID NO: 1152988 - DNA, 15 bp, Homo sapiens
actttgccattggtt

SEQ ID NO: 1152989 - DNA, 15 bp, Homo sapiens
tactttgccattggt

SEQ ID NO: 1152990 - DNA, 15 bp, Homo sapiens
ttactttgccattgg

SEQ ID NO: 1152991 - DNA, 15 bp, Homo sapiens
tttactttgccattg

SEQ ID NO: 1152992 - DNA, 15 bp, Homo sapiens
gtttactttgccatt

SEQ ID NO: 1152993 - DNA, 15 bp, Homo sapiens
ggtttactttgccat

SEQ ID NO: 1152994 - DNA, 15 bp, Homo sapiens
tggtttactttgcca

SEQ ID NO: 1152995 - DNA, 15 bp, Homo sapiens
ttggtttactttgcc

SEQ ID NO: 1152996 - DNA, 15 bp, Homo sapiens
cttggtttactttgc

SEQ ID NO: 1152997 - DNA, 15 bp, Homo sapiens
acttggtttactttg

SEQ ID NO: 1152998 - DNA, 15 bp, Homo sapiens
aacttggtttacttt

SEQ ID NO: 1152999 - DNA, 15 bp, Homo sapiens
aaacttggtttactt

SEQ ID NO: 1153000 - DNA, 15 bp, Homo sapiens
aaaacttggtttact

SEQ ID NO: 1153001 - DNA, 15 bp, Homo sapiens
aaaaacttggtttac

SEQ ID NO: 1153002 - DNA, 15 bp, Homo sapiens
aaaaaacttggttta

SEQ ID NO: 1153003 - DNA, 15 bp, Homo sapiens
taaaaaacttggttt

SEQ ID NO: 1153004 - DNA, 15 bp, Homo sapiens
ataaaaaacttggtt

SEQ ID NO: 1153005 - DNA, 15 bp, Homo sapiens
aataaaaaacttggt

SEQ ID NO: 1153006 - DNA, 15 bp, Homo sapiens
aaataaaaaacttgg

SEQ ID NO: 1153007 - DNA, 15 bp, Homo sapiens
taaataaaaaacttg

SEQ ID NO: 1153008 - DNA, 15 bp, Homo sapiens
ctaaataaaaaactt

SEQ ID NO: 1153009 - DNA, 15 bp, Homo sapiens
tctaaataaaaaact

SEQ ID NO: 1153010 - DNA, 15 bp, Homo sapiens
ttctaaataaaaaac

SEQ ID NO: 1153011 - DNA, 15 bp, Homo sapiens
tttctaaataaaaaa

SEQ ID NO: 1153012 - DNA, 15 bp, Homo sapiens
atttctaaataaaaa

SEQ ID NO: 1153013 - DNA, 15 bp, Homo sapiens
gatttctaaataaaa

SEQ ID NO: 1153014 - DNA, 15 bp, Homo sapiens
tgatttctaaataaa

SEQ ID NO: 1153015 - DNA, 15 bp, Homo sapiens
atgatttctaaataa

SEQ ID NO: 1153016 - DNA, 15 bp, Homo sapiens
aatgatttctaaata

SEQ ID NO: 1153017 - DNA, 15 bp, Homo sapiens
caatgatttctaaat

SEQ ID NO: 1153018 - DNA, 15 bp, Homo sapiens
gcaatgatttctaaa

SEQ ID NO: 1153019 - DNA, 15 bp, Homo sapiens
ggcaatgatttctaa

SEQ ID NO: 1153020 - DNA, 15 bp, Homo sapiens
gggcaatgatttcta

SEQ ID NO: 1153021 - DNA, 15 bp, Homo sapiens
agggcaatgatttct

SEQ ID NO: 1153022 - DNA, 15 bp, Homo sapiens
tagggcaatgatttc

SEQ ID NO: 1153023 - DNA, 15 bp, Homo sapiens
gtagggcaatgattt

SEQ ID NO: 1153024 - DNA, 15 bp, Homo sapiens
agtagggcaatgatt

SEQ ID NO: 1153025 - DNA, 15 bp, Homo sapiens
tagtagggcaatgat

SEQ ID NO: 1153026 - DNA, 15 bp, Homo sapiens
ctagtagggcaatga

SEQ ID NO: 1153027 - DNA, 15 bp, Homo sapiens
tctagtagggcaatg

SEQ ID NO: 1153028 - DNA, 15 bp, Homo sapiens
gtctagtagggcaat

SEQ ID NO: 1153029 - DNA, 15 bp, Homo sapiens
tgtctagtagggcaa

SEQ ID NO: 1153030 - DNA, 15 bp, Homo sapiens
gtgtctagtagggca

SEQ ID NO: 1153031 - DNA, 15 bp, Homo sapiens
tgtgtctagtagggc

SEQ ID NO: 1153032 - DNA, 15 bp, Homo sapiens
ttgtgtctagtaggg

SEQ ID NO: 1153033 - DNA, 15 bp, Homo sapiens
gttgtgtctagtagg

SEQ ID NO: 1153034 - DNA, 15 bp, Homo sapiens
agttgtgtctagtag

SEQ ID NO: 1153035 - DNA, 15 bp, Homo sapiens
gagttgtgtctagta

SEQ ID NO: 1153036 - DNA, 15 bp, Homo sapiens
tgagttgtgtctagt

SEQ ID NO: 1153037 - DNA, 15 bp, Homo sapiens
ttgagttgtgtctag

SEQ ID NO: 1153038 - DNA, 15 bp, Homo sapiens
attgagttgtgtcta

SEQ ID NO: 1153039 - DNA, 15 bp, Homo sapiens
cattgagttgtgtct

SEQ ID NO: 1153040 - DNA, 15 bp, Homo sapiens
tcattgagttgtgtc

SEQ ID NO: 1153041 - DNA, 15 bp, Homo sapiens
atcattgagttgtgt

SEQ ID NO: 1153042 - DNA, 15 bp, Homo sapiens
aatcattgagttgtg

SEQ ID NO: 1153043 - DNA, 15 bp, Homo sapiens
aaatcattgagttgt

SEQ ID NO: 1153044 - DNA, 15 bp, Homo sapiens
caaatcattgagttg

SEQ ID NO: 1153045 - DNA, 15 bp, Homo sapiens
tcaaatcattgagtt

SEQ ID NO: 1153046 - DNA, 15 bp, Homo sapiens
atcaaatcattgagt

SEQ ID NO: 1153047 - DNA, 15 bp, Homo sapiens
gatcaaatcattgag

SEQ ID NO: 1153048 - DNA, 15 bp, Homo sapiens
ggatcaaatcattga

SEQ ID NO: 1153049 - DNA, 15 bp, Homo sapiens
tggatcaaatcattg

SEQ ID NO: 1153050 - DNA, 15 bp, Homo sapiens
ctggatcaaatcatt

SEQ ID NO: 1153051 - DNA, 15 bp, Homo sapiens
gctggatcaaatcat

SEQ ID NO: 1153052 - DNA, 15 bp, Homo sapiens
ggctggatcaaatca

SEQ ID NO: 1153053 - DNA, 15 bp, Homo sapiens
gggctggatcaaatc

SEQ ID NO: 1153054 - DNA, 15 bp, Homo sapiens
ggggctggatcaaat

SEQ ID NO: 1153055 - DNA, 15 bp, Homo sapiens
tggggctggatcaaa

SEQ ID NO: 1153056 - DNA, 15 bp, Homo sapiens
ctggggctggatcaa

SEQ ID NO: 1153057 - DNA, 15 bp, Homo sapiens
actggggctggatca

SEQ ID NO: 1153058 - DNA, 15 bp, Homo sapiens
gactggggctggatc

SEQ ID NO: 1153059 - DNA, 15 bp, Homo sapiens
ggactggggctggat

SEQ ID NO: 1153060 - DNA, 15 bp, Homo sapiens
agggactggggctgg

SEQ ID NO: 1153061 - DNA, 15 bp, Homo sapiens
cagggactggggctg

SEQ ID NO: 1153062 - DNA, 15 bp, Homo sapiens
ccagggactggggct

SEQ ID NO: 1153063 - DNA, 15 bp, Homo sapiens
gccagggactggggc

SEQ ID NO: 1153064 - DNA, 15 bp, Homo sapiens
tgccagggactgggg

SEQ ID NO: 1153065 - DNA, 15 bp, Homo sapiens
atgccagggactggg

SEQ ID NO: 1153066 - DNA, 15 bp, Homo sapiens
catgccagggactgg

SEQ ID NO: 1153067 - DNA, 15 bp, Homo sapiens
gcatgccagggactg

SEQ ID NO: 1153068 - DNA, 15 bp, Homo sapiens
agcatgccagggact

SEQ ID NO: 1153069 - DNA, 15 bp, Homo sapiens
tagcatgccagggac

SEQ ID NO: 1153070 - DNA, 15 bp, Homo sapiens
ctagcatgccaggga

SEQ ID NO: 1153071 - DNA, 15 bp, Homo sapiens
cctagcatgccaggg

SEQ ID NO: 1153072 - DNA, 15 bp, Homo sapiens
ccctagcatgccagg

SEQ ID NO: 1153073 - DNA, 15 bp, Homo sapiens
tccctagcatgccag

SEQ ID NO: 1153074 - DNA, 15 bp, Homo sapiens
ctccctagcatgcca

SEQ ID NO: 1153075 - DNA, 15 bp, Homo sapiens
actccctagcatgcc

SEQ ID NO: 1153076 - DNA, 15 bp, Homo sapiens
cactccctagcatgc

SEQ ID NO: 1153077 - DNA, 15 bp, Homo sapiens
gcactccctagcatg

SEQ ID NO: 1153078 - DNA, 15 bp, Homo sapiens
tgcactccctagcat

SEQ ID NO: 1153079 - DNA, 15 bp, Homo sapiens
ctgcactccctagca

SEQ ID NO: 1153080 - DNA, 15 bp, Homo sapiens
gctgcactccctagc

SEQ ID NO: 1153081 - DNA, 15 bp, Homo sapiens
agctgcactccctag

SEQ ID NO: 1153082 - DNA, 15 bp, Homo sapiens
tagctgcactcccta

SEQ ID NO: 1153083 - DNA, 15 bp, Homo sapiens
ctagctgcactccct

SEQ ID NO: 1153084 - DNA, 15 bp, Homo sapiens
tctagctgcactccc

SEQ ID NO: 1153085 - DNA, 15 bp, Homo sapiens
ttctagctgcactcc

SEQ ID NO: 1153086 - DNA, 15 bp, Homo sapiens
tttctagctgcactc

SEQ ID NO: 1153087 - DNA, 15 bp, Homo sapiens
ttttctagctgcact

SEQ ID NO: 1153088 - DNA, 15 bp, Homo sapiens
attttctagctgcac

SEQ ID NO: 1153089 - DNA, 15 bp, Homo sapiens
cattttctagctgca

SEQ ID NO: 1153090 - DNA, 15 bp, Homo sapiens
acattttctagctgc

SEQ ID NO: 1153091 - DNA, 15 bp, Homo sapiens
cacattttctagctg

SEQ ID NO: 1153092 - DNA, 15 bp, Homo sapiens
acacattttctagct

SEQ ID NO: 1153093 - DNA, 15 bp, Homo sapiens
aacacattttctagc

SEQ ID NO: 1153094 - DNA, 15 bp, Homo sapiens
aaacacattttctag

SEQ ID NO: 1153095 - DNA, 15 bp, Homo sapiens
gaaacacattttcta

SEQ ID NO: 1153096 - DNA, 15 bp, Homo sapiens
tgaaacacattttct

SEQ ID NO: 1153097 - DNA, 15 bp, Homo sapiens
ctgaaacacattttc

SEQ ID NO: 1153098 - DNA, 15 bp, Homo sapiens
cctgaaacacatttt

SEQ ID NO: 1153099 - DNA, 15 bp, Homo sapiens
ccctgaaacacattt

SEQ ID NO: 1153100 - DNA, 15 bp, Homo sapiens
cccctgaaacacatt

SEQ ID NO: 1153101 - DNA, 15 bp, Homo sapiens
gcccctgaaacacat

SEQ ID NO: 1153102 - DNA, 15 bp, Homo sapiens
ggcccctgaaacaca

SEQ ID NO: 1153103 - DNA, 15 bp, Homo sapiens
cggcccctgaaacac

SEQ ID NO: 1153104 - DNA, 15 bp, Homo sapiens
gcggcccctgaaaca

SEQ ID NO: 1153105 - DNA, 15 bp, Homo sapiens
tgcggcccctgaaac

SEQ ID NO: 1153106 - DNA, 15 bp, Homo sapiens
ctgcggcccctgaaa

SEQ ID NO: 1153107 - DNA, 15 bp, Homo sapiens
cctgcggcccctgaa

SEQ ID NO: 1153108 - DNA, 15 bp, Homo sapiens
tcctgcggcccctga

SEQ ID NO: 1153109 - DNA, 15 bp, Homo sapiens
ttcctgcggcccctg

SEQ ID NO: 1153110 - DNA, 15 bp, Homo sapiens
gttcctgcggcccct

SEQ ID NO: 1153111 - DNA, 15 bp, Homo sapiens
tgttcctgcggcccc

SEQ ID NO: 1153112 - DNA, 15 bp, Homo sapiens
ctgttcctgcggccc

SEQ ID NO: 1153113 - DNA, 15 bp, Homo sapiens
actgttcctgcggcc

SEQ ID NO: 1153114 - DNA, 15 bp, Homo sapiens
cactgttcctgcggc

SEQ ID NO: 1153115 - DNA, 15 bp, Homo sapiens
ccactgttcctgcgg

SEQ ID NO: 1153116 - DNA, 15 bp, Homo sapiens
cccactgttcctgcg

SEQ ID NO: 1153117 - DNA, 15 bp, Homo sapiens
gcccactgttcctgc

SEQ ID NO: 1153118 - DNA, 15 bp, Homo sapiens
agcccactgttcctg

SEQ ID NO: 1153119 - DNA, 15 bp, Homo sapiens
cagcccactgttcct

SEQ ID NO: 1153120 - DNA, 15 bp, Homo sapiens
tcagcccactgttcc

SEQ ID NO: 1153121 - DNA, 15 bp, Homo sapiens
atcagcccactgttc

SEQ ID NO: 1153122 - DNA, 15 bp, Homo sapiens
catcagcccactgtt

SEQ ID NO: 1153123 - DNA, 15 bp, Homo sapiens
gcatcagcccactgt

SEQ ID NO: 1153124 - DNA, 15 bp, Homo sapiens
tgcatcagcccactg

SEQ ID NO: 1153125 - DNA, 15 bp, Homo sapiens
atgcatcagcccact

SEQ ID NO: 1153126 - DNA, 15 bp, Homo sapiens
tatgcatcagcccac

SEQ ID NO: 1153127 - DNA, 15 bp, Homo sapiens
ctatgcatcagccca

SEQ ID NO: 1153128 - DNA, 15 bp, Homo sapiens
tctatgcatcagccc

SEQ ID NO: 1153129 - DNA, 15 bp, Homo sapiens
ttctatgcatcagcc

SEQ ID NO: 1153130 - DNA, 15 bp, Homo sapiens
gttctatgcatcagc

SEQ ID NO: 1153131 - DNA, 15 bp, Homo sapiens
ggttctatgcatcag

SEQ ID NO: 1153132 - DNA, 15 bp, Homo sapiens
aggttctatgcatca

SEQ ID NO: 1153133 - DNA, 15 bp, Homo sapiens
caggttctatgcatc

SEQ ID NO: 1153134 - DNA, 15 bp, Homo sapiens
acaggttctatgcat

SEQ ID NO: 1153135 - DNA, 15 bp, Homo sapiens
tacaggttctatgca

SEQ ID NO: 1153136 - DNA, 15 bp, Homo sapiens
ctacaggttctatgc

SEQ ID NO: 1153137 - DNA, 15 bp, Homo sapiens
gctacaggttctatg

SEQ ID NO: 1153138 - DNA, 15 bp, Homo sapiens
tgctacaggttctat

SEQ ID NO: 1153139 - DNA, 15 bp, Homo sapiens
ttgctacaggttcta

SEQ ID NO: 1153140 - DNA, 15 bp, Homo sapiens
attgctacaggttct

SEQ ID NO: 1153141 - DNA, 15 bp, Homo sapiens
gattgctacaggttc

SEQ ID NO: 1153142 - DNA, 15 bp, Homo sapiens
ggattgctacaggtt

SEQ ID NO: 1153143 - DNA, 15 bp, Homo sapiens
tggattgctacaggt

SEQ ID NO: 1153144 - DNA, 15 bp, Homo sapiens
gtggattgctacagg

SEQ ID NO: 1153145 - DNA, 15 bp, Homo sapiens
ggtggattgctacag

SEQ ID NO: 1153146 - DNA, 15 bp, Homo sapiens
tggtggattgctaca

SEQ ID NO: 1153147 - DNA, 15 bp, Homo sapiens
ctggtggattgctac

SEQ ID NO: 1153148 - DNA, 15 bp, Homo sapiens
gctggtggattgcta

SEQ ID NO: 1153149 - DNA, 15 bp, Homo sapiens
tgctggtggattgct

SEQ ID NO: 1153150 - DNA, 15 bp, Homo sapiens
ttgctggtggattgc

SEQ ID NO: 1153151 - DNA, 15 bp, Homo sapiens
tttgctggtggattg

SEQ ID NO: 1153152 - DNA, 15 bp, Homo sapiens
atttgctggtggatt

SEQ ID NO: 1153153 - DNA, 15 bp, Homo sapiens
catttgctggtggat

SEQ ID NO: 1153154 - DNA, 15 bp, Homo sapiens
ccatttgctggtgga

SEQ ID NO: 1153155 - DNA, 15 bp, Homo sapiens
tccatttgctggtgg

SEQ ID NO: 1153156 - DNA, 15 bp, Homo sapiens
ctccatttgctggtg

SEQ ID NO: 1153157 - DNA, 15 bp, Homo sapiens
cctccatttgctggt

SEQ ID NO: 1153158 - DNA, 15 bp, Homo sapiens
ccctccatttgctgg

SEQ ID NO: 1153159 - DNA, 15 bp, Homo sapiens
cccctccatttgctg

SEQ ID NO: 1153160 - DNA, 15 bp, Homo sapiens
ccccctccatttgct

SEQ ID NO: 1153161 - DNA, 15 bp, Homo sapiens
tccccctccatttgc

SEQ ID NO: 1153162 - DNA, 15 bp, Homo sapiens
ctccccctccatttg

SEQ ID NO: 1153163 - DNA, 15 bp, Homo sapiens
cctccccctccattt

SEQ ID NO: 1153164 - DNA, 15 bp, Homo sapiens
ccctccccctccatt

SEQ ID NO: 1153165 - DNA, 15 bp, Homo sapiens
gccctccccctccat

SEQ ID NO: 1153166 - DNA, 15 bp, Homo sapiens
tgccctccccctcca

SEQ ID NO: 1153167 - DNA, 15 bp, Homo sapiens
ctgccctccccctcc

SEQ ID NO: 1153168 - DNA, 15 bp, Homo sapiens
actgccctccccctc

SEQ ID NO: 1153169 - DNA, 15 bp, Homo sapiens
gactgccctccccct

SEQ ID NO: 1153170 - DNA, 15 bp, Homo sapiens
agactgccctccccc

SEQ ID NO: 1153171 - DNA, 15 bp, Homo sapiens
cagactgccctcccc

SEQ ID NO: 1153172 - DNA, 15 bp, Homo sapiens
ccagactgccctccc

SEQ ID NO: 1153173 - DNA, 15 bp, Homo sapiens
accagactgccctcc

SEQ ID NO: 1153174 - DNA, 15 bp, Homo sapiens
gaccagactgccctc

SEQ ID NO: 1153175 - DNA, 15 bp, Homo sapiens
ggaccagactgccct

SEQ ID NO: 1153176 - DNA, 15 bp, Homo sapiens
aggaccagactgccc

SEQ ID NO: 1153177 - DNA, 15 bp, Homo sapiens
caggaccagactgcc

SEQ ID NO: 1153178 - DNA, 15 bp, Homo sapiens
ccaggaccagactgc

SEQ ID NO: 1153179 - DNA, 15 bp, Homo sapiens
tccaggaccagactg

SEQ ID NO: 1153180 - DNA, 15 bp, Homo sapiens
gtccaggaccagact

SEQ ID NO: 1153181 - DNA, 15 bp, Homo sapiens
tgtccaggaccagac

SEQ ID NO: 1153182 - DNA, 15 bp, Homo sapiens
ttgtccaggaccaga

SEQ ID NO: 1153183 - DNA, 15 bp, Homo sapiens
cttgtccaggaccag

SEQ ID NO: 1153184 - DNA, 15 bp, Homo sapiens
ccttgtccaggacca

SEQ ID NO: 1153185 - DNA, 15 bp, Homo sapiens
tccttgtccaggacc

SEQ ID NO: 1153186 - DNA, 15 bp, Homo sapiens
ttccttgtccaggac

SEQ ID NO: 1153187 - DNA, 15 bp, Homo sapiens
gttccttgtccagga

SEQ ID NO: 1153188 - DNA, 15 bp, Homo sapiens
tgttccttgtccagg

SEQ ID NO: 1153189 - DNA, 15 bp, Homo sapiens
gtgttccttgtccag

SEQ ID NO: 1153190 - DNA, 15 bp, Homo sapiens
ggtgttccttgtcca

SEQ ID NO: 1153191 - DNA, 15 bp, Homo sapiens
aggtgttccttgtcc

SEQ ID NO: 1153192 - DNA, 15 bp, Homo sapiens
caggtgttccttgtc

SEQ ID NO: 1153193 - DNA, 15 bp, Homo sapiens
ccaggtgttccttgt

SEQ ID NO: 1153194 - DNA, 15 bp, Homo sapiens
cccaggtgttccttg

SEQ ID NO: 1153195 - DNA, 15 bp, Homo sapiens
ccccaggtgttcctt

SEQ ID NO: 1153196 - DNA, 15 bp, Homo sapiens
gccccaggtgttcct

SEQ ID NO: 1153197 - DNA, 15 bp, Homo sapiens
ggccccaggtgttcc

SEQ ID NO: 1153198 - DNA, 15 bp, Homo sapiens
cggccccaggtgttc

SEQ ID NO: 1153199 - DNA, 15 bp, Homo sapiens
tcggccccaggtgtt

SEQ ID NO: 1153200 - DNA, 15 bp, Homo sapiens
atcggccccaggtgt

SEQ ID NO: 1153201 - DNA, 15 bp, Homo sapiens
aatcggccccaggtg

SEQ ID NO: 1153202 - DNA, 15 bp, Homo sapiens
gaatcggccccaggt

SEQ ID NO: 1153203 - DNA, 15 bp, Homo sapiens
tgaatcggccccagg

SEQ ID NO: 1153204 - DNA, 15 bp, Homo sapiens
gtgaatcggccccag

SEQ ID NO: 1153205 - DNA, 15 bp, Homo sapiens
agtgaatcggcccca

SEQ ID NO: 1153206 - DNA, 15 bp, Homo sapiens
cagtgaatcggcccc

SEQ ID NO: 1153207 - DNA, 15 bp, Homo sapiens
ccagtgaatcggccc

SEQ ID NO: 1153208 - DNA, 15 bp, Homo sapiens
cccagtgaatcggcc

SEQ ID NO: 1153209 - DNA, 15 bp, Homo sapiens
acccagtgaatcggc

SEQ ID NO: 1153210 - DNA, 15 bp, Homo sapiens
cacccagtgaatcgg

SEQ ID NO: 1153211 - DNA, 15 bp, Homo sapiens
gcacccagtgaatcg

SEQ ID NO: 1153212 - DNA, 15 bp, Homo sapiens
tgcacccagtgaatc

SEQ ID NO: 1153213 - DNA, 15 bp, Homo sapiens
gtgcacccagtgaat

SEQ ID NO: 1153214 - DNA, 15 bp, Homo sapiens
agtgcacccagtgaa

SEQ ID NO: 1153215 - DNA, 15 bp, Homo sapiens
cagtgcacccagtga

SEQ ID NO: 1153216 - DNA, 15 bp, Homo sapiens
tcagtgcacccagtg

SEQ ID NO: 1153217 - DNA, 15 bp, Homo sapiens
atcagtgcacccagt

SEQ ID NO: 1153218 - DNA, 15 bp, Homo sapiens
gatcagtgcacccag

SEQ ID NO: 1153219 - DNA, 15 bp, Homo sapiens
tgatcagtgcaccca

SEQ ID NO: 1153220 - DNA, 15 bp, Homo sapiens
atgatcagtgcaccc

SEQ ID NO: 1153221 - DNA, 15 bp, Homo sapiens
gatgatcagtgcacc

SEQ ID NO: 1153222 - DNA, 15 bp, Homo sapiens
agatgatcagtgcac

SEQ ID NO: 1153223 - DNA, 15 bp, Homo sapiens
tagatgatcagtgca

SEQ ID NO: 1153224 - DNA, 15 bp, Homo sapiens
atagatgatcagtgc

SEQ ID NO: 1153225 - DNA, 15 bp, Homo sapiens
gatagatgatcagtg

SEQ ID NO: 1153226 - DNA, 15 bp, Homo sapiens
ggatagatgatcagt

SEQ ID NO: 1153227 - DNA, 15 bp, Homo sapiens
gggatagatgatcag

SEQ ID NO: 1153228 - DNA, 15 bp, Homo sapiens
ggggatagatgatca

SEQ ID NO: 1153229 - DNA, 15 bp, Homo sapiens
gggggatagatgatc

SEQ ID NO: 1153230 - DNA, 15 bp, Homo sapiens
agggggatagatgat

SEQ ID NO: 1153231 - DNA, 15 bp, Homo sapiens
cagggggatagatga

SEQ ID NO: 1153232 - DNA, 15 bp, Homo sapiens
ccagggggatagatg

SEQ ID NO: 1153233 - DNA, 15 bp, Homo sapiens
gccagggggatagat

SEQ ID NO: 1153234 - DNA, 15 bp, Homo sapiens
agccagggggataga

SEQ ID NO: 1153235 - DNA, 15 bp, Homo sapiens
aagccagggggatag

SEQ ID NO: 1153236 - DNA, 15 bp, Homo sapiens
taagccagggggata

SEQ ID NO: 1153237 - DNA, 15 bp, Homo sapiens
ctaagccagggggat

SEQ ID NO: 1153238 - DNA, 15 bp, Homo sapiens
actaagccaggggga

SEQ ID NO: 1153239 - DNA, 15 bp, Homo sapiens
tactaagccaggggg

SEQ ID NO: 1153240 - DNA, 15 bp, Homo sapiens
ttactaagccagggg

SEQ ID NO: 1153241 - DNA, 15 bp, Homo sapiens
tttactaagccaggg

SEQ ID NO: 1153242 - DNA, 15 bp, Homo sapiens
gtttactaagccagg

SEQ ID NO: 1153243 - DNA, 15 bp, Homo sapiens
tgtttactaagccag

SEQ ID NO: 1153244 - DNA, 15 bp, Homo sapiens
ctgtttactaagcca

SEQ ID NO: 1153245 - DNA, 15 bp, Homo sapiens
actgtttactaagcc

SEQ ID NO: 1153246 - DNA, 15 bp, Homo sapiens
aactgtttactaagc

SEQ ID NO: 1153247 - DNA, 15 bp, Homo sapiens
gaactgtttactaag

SEQ ID NO: 1153248 - DNA, 15 bp, Homo sapiens
agaactgtttactaa

SEQ ID NO: 1153249 - DNA, 15 bp, Homo sapiens
cagaactgtttacta

SEQ ID NO: 1153250 - DNA, 15 bp, Homo sapiens
tcagaactgtttact

SEQ ID NO: 1153251 - DNA, 15 bp, Homo sapiens
atcagaactgtttac

SEQ ID NO: 1153252 - DNA, 15 bp, Homo sapiens
catcagaactgttta

SEQ ID NO: 1153253 - DNA, 15 bp, Homo sapiens
acatcagaactgttt

SEQ ID NO: 1153254 - DNA, 15 bp, Homo sapiens
cacatcagaactgtt

SEQ ID NO: 1153255 - DNA, 15 bp, Homo sapiens
gcacatcagaactgt

SEQ ID NO: 1153256 - DNA, 15 bp, Homo sapiens
tgcacatcagaactg

SEQ ID NO: 1153257 - DNA, 15 bp, Homo sapiens
gtgcacatcagaact

SEQ ID NO: 1153258 - DNA, 15 bp, Homo sapiens
agtgcacatcagaac

SEQ ID NO: 1153259 - DNA, 15 bp, Homo sapiens
gagtgcacatcagaa

SEQ ID NO: 1153260 - DNA, 15 bp, Homo sapiens
ggagtgcacatcaga

SEQ ID NO: 1153261 - DNA, 15 bp, Homo sapiens
gggagtgcacatcag

SEQ ID NO: 1153262 - DNA, 15 bp, Homo sapiens
ggggagtgcacatca

SEQ ID NO: 1153263 - DNA, 15 bp, Homo sapiens
gggggagtgcacatc

SEQ ID NO: 1153264 - DNA, 15 bp, Homo sapiens
cgggggagtgcacat

SEQ ID NO: 1153265 - DNA, 15 bp, Homo sapiens
acgggggagtgcaca

SEQ ID NO: 1153266 - DNA, 15 bp, Homo sapiens
cacgggggagtgcac

SEQ ID NO: 1153267 - DNA, 15 bp, Homo sapiens
acacgggggagtgca

SEQ ID NO: 1153268 - DNA, 15 bp, Homo sapiens
cacacgggggagtgc

SEQ ID NO: 1153269 - DNA, 15 bp, Homo sapiens
gcacacgggggagtg

SEQ ID NO: 1153270 - DNA, 15 bp, Homo sapiens
ggcacacgggggagt

SEQ ID NO: 1153271 - DNA, 15 bp, Homo sapiens
gggcacacgggggag

SEQ ID NO: 1153272 - DNA, 15 bp, Homo sapiens
agggcacacggggga

SEQ ID NO: 1153273 - DNA, 15 bp, Homo sapiens
gagggcacacggggg

SEQ ID NO: 1153274 - DNA, 15 bp, Homo sapiens
cgagggcacacgggg

SEQ ID NO: 1153275 - DNA, 15 bp, Homo sapiens
ccgagggcacacggg

SEQ ID NO: 1153276 - DNA, 15 bp, Homo sapiens
gccgagggcacacgg

SEQ ID NO: 1153277 - DNA, 15 bp, Homo sapiens
tgccgagggcacacg

SEQ ID NO: 1153278 - DNA, 15 bp, Homo sapiens
gtgccgagggcacac

SEQ ID NO: 1153279 - DNA, 15 bp, Homo sapiens
cgtgccgagggcaca

SEQ ID NO: 1153280 - DNA, 15 bp, Homo sapiens
ccgtgccgagggcac

SEQ ID NO: 1153281 - DNA, 15 bp, Homo sapiens
gccgtgccgagggca

SEQ ID NO: 1153282 - DNA, 15 bp, Homo sapiens
agccgtgccgagggc

SEQ ID NO: 1153283 - DNA, 15 bp, Homo sapiens
tagccgtgccgaggg

SEQ ID NO: 1153284 - DNA, 15 bp, Homo sapiens
gtagccgtgccgagg

SEQ ID NO: 1153285 - DNA, 15 bp, Homo sapiens
ggtagccgtgccgag

SEQ ID NO: 1153286 - DNA, 15 bp, Homo sapiens
gggtagccgtgccga

SEQ ID NO: 1153287 - DNA, 15 bp, Homo sapiens
ggggtagccgtgccg

SEQ ID NO: 1153288 - DNA, 15 bp, Homo sapiens
tggggtagccgtgcc

SEQ ID NO: 1153289 - DNA, 15 bp, Homo sapiens
ttggggtagccgtgc

SEQ ID NO: 1153290 - DNA, 15 bp, Homo sapiens
gttggggtagccgtg

SEQ ID NO: 1153291 - DNA, 15 bp, Homo sapiens
tgttggggtagccgt

SEQ ID NO: 1153292 - DNA, 15 bp, Homo sapiens
gtgttggggtagccg

SEQ ID NO: 1153293 - DNA, 15 bp, Homo sapiens
agtgttggggtagcc

SEQ ID NO: 1153294 - DNA, 15 bp, Homo sapiens
gagtgttggggtagc

SEQ ID NO: 1153295 - DNA, 15 bp, Homo sapiens
tgagtgttggggtag

SEQ ID NO: 1153296 - DNA, 15 bp, Homo sapiens
gtgagtgttggggta

SEQ ID NO: 1153297 - DNA, 15 bp, Homo sapiens
tgtgagtgttggggt

SEQ ID NO: 1153298 - DNA, 15 bp, Homo sapiens
gtgtgagtgttgggg

SEQ ID NO: 1153299 - DNA, 15 bp, Homo sapiens
agtgtgagtgttggg

SEQ ID NO: 1153300 - DNA, 15 bp, Homo sapiens
cagtgtgagtgttgg

SEQ ID NO: 1153301 - DNA, 15 bp, Homo sapiens
acagtgtgagtgttg

SEQ ID NO: 1153302 - DNA, 15 bp, Homo sapiens
cacagtgtgagtgtt

SEQ ID NO: 1153303 - DNA, 15 bp, Homo sapiens
ccacagtgtgagtgt

SEQ ID NO: 1153304 - DNA, 15 bp, Homo sapiens
gccacagtgtgagtg

SEQ ID NO: 1153305 - DNA, 15 bp, Homo sapiens
agccacagtgtgagt

SEQ ID NO: 1153306 - DNA, 15 bp, Homo sapiens
cagccacagtgtgag

SEQ ID NO: 1153307 - DNA, 15 bp, Homo sapiens
ccagccacagtgtga

SEQ ID NO: 1153308 - DNA, 15 bp, Homo sapiens
tccagccacagtgtg

SEQ ID NO: 1153309 - DNA, 15 bp, Homo sapiens
ctccagccacagtgt

SEQ ID NO: 1153310 - DNA, 15 bp, Homo sapiens
tctccagccacagtg

SEQ ID NO: 1153311 - DNA, 15 bp, Homo sapiens
gtctccagccacagt

SEQ ID NO: 1153312 - DNA, 15 bp, Homo sapiens
agtctccagccacag

SEQ ID NO: 1153313 - DNA, 15 bp, Homo sapiens
gagtctccagccaca

SEQ ID NO: 1153314 - DNA, 15 bp, Homo sapiens
tgagtctccagccac

SEQ ID NO: 1153315 - DNA, 15 bp, Homo sapiens
gtgagtctccagcca

SEQ ID NO: 1153316 - DNA, 15 bp, Homo sapiens
tgtgagtctccagcc

SEQ ID NO: 1153317 - DNA, 15 bp, Homo sapiens
gtgtgagtctccagc

SEQ ID NO: 1153318 - DNA, 15 bp, Homo sapiens
cgtgtgagtctccag

SEQ ID NO: 1153319 - DNA, 15 bp, Homo sapiens
acgtgtgagtctcca

SEQ ID NO: 1153320 - DNA, 15 bp, Homo sapiens
gacgtgtgagtctcc

SEQ ID NO: 1153321 - DNA, 15 bp, Homo sapiens
ggacgtgtgagtctc

SEQ ID NO: 1153322 - DNA, 15 bp, Homo sapiens
gggacgtgtgagtct

SEQ ID NO: 1153323 - DNA, 15 bp, Homo sapiens
tgggacgtgtgagtc

SEQ ID NO: 1153324 - DNA, 15 bp, Homo sapiens
ctgggacgtgtgagt

SEQ ID NO: 1153325 - DNA, 15 bp, Homo sapiens
tctgggacgtgtgag

SEQ ID NO: 1153326 - DNA, 15 bp, Homo sapiens
ttctgggacgtgtga

SEQ ID NO: 1153327 - DNA, 15 bp, Homo sapiens
cttctgggacgtgtg

SEQ ID NO: 1153328 - DNA, 15 bp, Homo sapiens
acttctgggacgtgt

SEQ ID NO: 1153329 - DNA, 15 bp, Homo sapiens
tacttctgggacgtg

SEQ ID NO: 1153330 - DNA, 15 bp, Homo sapiens
ttacttctgggacgt

SEQ ID NO: 1153331 - DNA, 15 bp, Homo sapiens
cttacttctgggacg

SEQ ID NO: 1153332 - DNA, 15 bp, Homo sapiens
gcttacttctgggac

SEQ ID NO: 1153333 - DNA, 15 bp, Homo sapiens
ggcttacttctggga

SEQ ID NO: 1153334 - DNA, 15 bp, Homo sapiens
gggcttacttctggg

SEQ ID NO: 1153335 - DNA, 15 bp, Homo sapiens
tgggcttacttctgg

SEQ ID NO: 1153336 - DNA, 15 bp, Homo sapiens
gtgggcttacttctg

SEQ ID NO: 1153337 - DNA, 15 bp, Homo sapiens
agtgggcttacttct

SEQ ID NO: 1153338 - DNA, 15 bp, Homo sapiens
aagtgggcttacttc

SEQ ID NO: 1153339 - DNA, 15 bp, Homo sapiens
gaagtgggcttactt

SEQ ID NO: 1153340 - DNA, 15 bp, Homo sapiens
agaagtgggcttact

SEQ ID NO: 1153341 - DNA, 15 bp, Homo sapiens
cagaagtgggcttac

SEQ ID NO: 1153342 - DNA, 15 bp, Homo sapiens
ccagaagtgggctta

SEQ ID NO: 1153343 - DNA, 15 bp, Homo sapiens
tccagaagtgggctt

SEQ ID NO: 1153344 - DNA, 15 bp, Homo sapiens
atccagaagtgggct

SEQ ID NO: 1153345 - DNA, 15 bp, Homo sapiens
tatccagaagtgggc

SEQ ID NO: 1153346 - DNA, 15 bp, Homo sapiens
atatccagaagtggg

SEQ ID NO: 1153347 - DNA, 15 bp, Homo sapiens
gatatccagaagtgg

SEQ ID NO: 1153348 - DNA, 15 bp, Homo sapiens
agatatccagaagtg

SEQ ID NO: 1153349 - DNA, 15 bp, Homo sapiens
cagatatccagaagt

SEQ ID NO: 1153350 - DNA, 15 bp, Homo sapiens
ccagatatccagaag

SEQ ID NO: 1153351 - DNA, 15 bp, Homo sapiens
tccagatatccagaa

SEQ ID NO: 1153352 - DNA, 15 bp, Homo sapiens
gtccagatatccaga

SEQ ID NO: 1153353 - DNA, 15 bp, Homo sapiens
agtccagatatccag

SEQ ID NO: 1153354 - DNA, 15 bp, Homo sapiens
gagtccagatatcca

SEQ ID NO: 1153355 - DNA, 15 bp, Homo sapiens
ggagtccagatatcc

SEQ ID NO: 1153356 - DNA, 15 bp, Homo sapiens
aggagtccagatatc

SEQ ID NO: 1153357 - DNA, 15 bp, Homo sapiens
gaggagtccagatat

SEQ ID NO: 1153358 - DNA, 15 bp, Homo sapiens
agaggagtccagata

SEQ ID NO: 1153359 - DNA, 15 bp, Homo sapiens
gagaggagtccagat

SEQ ID NO: 1153360 - DNA, 15 bp, Homo sapiens
ggagaggagtccaga

SEQ ID NO: 1153361 - DNA, 15 bp, Homo sapiens
tggagaggagtccag

SEQ ID NO: 1153362 - DNA, 15 bp, Homo sapiens
ctggagaggagtcca

SEQ ID NO: 1153363 - DNA, 15 bp, Homo sapiens
actggagaggagtcc

SEQ ID NO: 1153364 - DNA, 15 bp, Homo sapiens
aactggagaggagtc

SEQ ID NO: 1153365 - DNA, 15 bp, Homo sapiens
aaactggagaggagt

SEQ ID NO: 1153366 - DNA, 15 bp, Homo sapiens
caaactggagaggag

SEQ ID NO: 1153367 - DNA, 15 bp, Homo sapiens
ccaaactggagagga

SEQ ID NO: 1153368 - DNA, 15 bp, Homo sapiens
tccaaactggagagg

SEQ ID NO: 1153369 - DNA, 15 bp, Homo sapiens
atccaaactggagag

SEQ ID NO: 1153370 - DNA, 15 bp, Homo sapiens
catccaaactggaga

SEQ ID NO: 1153371 - DNA, 15 bp, Homo sapiens
acatccaaactggag

SEQ ID NO: 1153372 - DNA, 15 bp, Homo sapiens
cacatccaaactgga

SEQ ID NO: 1153373 - DNA, 15 bp, Homo sapiens
ccacatccaaactgg

SEQ ID NO: 1153374 - DNA, 15 bp, Homo sapiens
accacatccaaactg

SEQ ID NO: 1153375 - DNA, 15 bp, Homo sapiens
taccacatccaaact

SEQ ID NO: 1153376 - DNA, 15 bp, Homo sapiens
ttaccacatccaaac

SEQ ID NO: 1153377 - DNA, 15 bp, Homo sapiens
attaccacatccaaa

SEQ ID NO: 1153378 - DNA, 15 bp, Homo sapiens
aattaccacatccaa

SEQ ID NO: 1153379 - DNA, 15 bp, Homo sapiens
taattaccacatcca

SEQ ID NO: 1153380 - DNA, 15 bp, Homo sapiens
ctaattaccacatcc

SEQ ID NO: 1153381 - DNA, 15 bp, Homo sapiens
tctaattaccacatc

SEQ ID NO: 1153382 - DNA, 15 bp, Homo sapiens
ttctaattaccacat

SEQ ID NO: 1153383 - DNA, 15 bp, Homo sapiens
tttctaattaccaca

SEQ ID NO: 1153384 - DNA, 15 bp, Homo sapiens
ctttctaattaccac

SEQ ID NO: 1153385 - DNA, 15 bp, Homo sapiens
actttctaattacca

SEQ ID NO: 1153386 - DNA, 15 bp, Homo sapiens
tactttctaattacc

SEQ ID NO: 1153387 - DNA, 15 bp, Homo sapiens
ctactttctaattac

SEQ ID NO: 1153388 - DNA, 15 bp, Homo sapiens
cctactttctaatta

SEQ ID NO: 1153389 - DNA, 15 bp, Homo sapiens
tcctactttctaatt

SEQ ID NO: 1153390 - DNA, 15 bp, Homo sapiens
ttcctactttctaat

SEQ ID NO: 1153391 - DNA, 15 bp, Homo sapiens
tttcctactttctaa

SEQ ID NO: 1153392 - DNA, 15 bp, Homo sapiens
atttcctactttcta

SEQ ID NO: 1153393 - DNA, 15 bp, Homo sapiens
aatttcctactttct

SEQ ID NO: 1153394 - DNA, 15 bp, Homo sapiens
caatttcctactttc

SEQ ID NO: 1153395 - DNA, 15 bp, Homo sapiens
acaatttcctacttt

SEQ ID NO: 1153396 - DNA, 15 bp, Homo sapiens
gacaatttcctactt

SEQ ID NO: 1153397 - DNA, 15 bp, Homo sapiens
ggacaatttcctact

SEQ ID NO: 1153398 - DNA, 15 bp, Homo sapiens
gggacaatttcctac

SEQ ID NO: 1153399 - DNA, 15 bp, Homo sapiens
tgggacaatttccta

SEQ ID NO: 1153400 - DNA, 15 bp, Homo sapiens
ttgggacaatttcct

SEQ ID NO: 1153401 - DNA, 15 bp, Homo sapiens
tttgggacaatttcc

SEQ ID NO: 1153402 - DNA, 15 bp, Homo sapiens
ctttgggacaatttc

SEQ ID NO: 1153403 - DNA, 15 bp, Homo sapiens
tctttgggacaattt

SEQ ID NO: 1153404 - DNA, 15 bp, Homo sapiens
ctctttgggacaatt

SEQ ID NO: 1153405 - DNA, 15 bp, Homo sapiens
cctctttgggacaat

SEQ ID NO: 1153406 - DNA, 15 bp, Homo sapiens
gcctctttgggacaa

SEQ ID NO: 1153407 - DNA, 15 bp, Homo sapiens
agcctctttgggaca

SEQ ID NO: 1153408 - DNA, 15 bp, Homo sapiens
cagcctctttgggac

SEQ ID NO: 1153409 - DNA, 15 bp, Homo sapiens
ccagcctctttggga

SEQ ID NO: 1153410 - DNA, 15 bp, Homo sapiens
cccagcctctttggg

SEQ ID NO: 1153411 - DNA, 15 bp, Homo sapiens
ccccagcctctttgg

SEQ ID NO: 1153412 - DNA, 15 bp, Homo sapiens
tccccagcctctttg

SEQ ID NO: 1153413 - DNA, 15 bp, Homo sapiens
cttccccagcctctt

SEQ ID NO: 1153414 - DNA, 15 bp, Homo sapiens
ccttccccagcctct

SEQ ID NO: 1153415 - DNA, 15 bp, Homo sapiens
tccttccccagcctc

SEQ ID NO: 1153416 - DNA, 15 bp, Homo sapiens
ttccttccccagcct

SEQ ID NO: 1153417 - DNA, 15 bp, Homo sapiens
cttccttccccagcc

SEQ ID NO: 1153418 - DNA, 15 bp, Homo sapiens
tcttccttccccagc

SEQ ID NO: 1153419 - DNA, 15 bp, Homo sapiens
ctcttccttccccag

SEQ ID NO: 1153420 - DNA, 15 bp, Homo sapiens
gtactcttccttccc

SEQ ID NO: 1153421 - DNA, 15 bp, Homo sapiens
ggtactcttccttcc

SEQ ID NO: 1153422 - DNA, 15 bp, Homo sapiens
gggtactcttccttc

SEQ ID NO: 1153423 - DNA, 15 bp, Homo sapiens
agggtactcttcctt

SEQ ID NO: 1153424 - DNA, 15 bp, Homo sapiens
cagggtactcttcct

SEQ ID NO: 1153425 - DNA, 15 bp, Homo sapiens
tcagggtactcttcc

SEQ ID NO: 1153426 - DNA, 15 bp, Homo sapiens
atcagggtactcttc

SEQ ID NO: 1153427 - DNA, 15 bp, Homo sapiens
aatcagggtactctt

SEQ ID NO: 1153428 - DNA, 15 bp, Homo sapiens
caatcagggtactct

SEQ ID NO: 1153429 - DNA, 15 bp, Homo sapiens
acaatcagggtactc

SEQ ID NO: 1153430 - DNA, 15 bp, Homo sapiens
aacaatcagggtact

SEQ ID NO: 1153431 - DNA, 15 bp, Homo sapiens
gaacaatcagggtac

SEQ ID NO: 1153432 - DNA, 15 bp, Homo sapiens
ggaacaatcagggta

SEQ ID NO: 1153433 - DNA, 15 bp, Homo sapiens
gggaacaatcagggt

SEQ ID NO: 1153434 - DNA, 15 bp, Homo sapiens
ggggaacaatcaggg

SEQ ID NO: 1153435 - DNA, 15 bp, Homo sapiens
tggggaacaatcagg

SEQ ID NO: 1153436 - DNA, 15 bp, Homo sapiens
ttggggaacaatcag

SEQ ID NO: 1153437 - DNA, 15 bp, Homo sapiens
attggggaacaatca

SEQ ID NO: 1153438 - DNA, 15 bp, Homo sapiens
gattggggaacaatc

SEQ ID NO: 1153439 - DNA, 15 bp, Homo sapiens
agattggggaacaat

SEQ ID NO: 1153440 - DNA, 15 bp, Homo sapiens
cagattggggaacaa

SEQ ID NO: 1153441 - DNA, 15 bp, Homo sapiens
tcagattggggaaca

SEQ ID NO: 1153442 - DNA, 15 bp, Homo sapiens
ctcagattggggaac

SEQ ID NO: 1153443 - DNA, 15 bp, Homo sapiens
actcagattggggaa

SEQ ID NO: 1153444 - DNA, 15 bp, Homo sapiens
cactcagattgggga

SEQ ID NO: 1153445 - DNA, 15 bp, Homo sapiens
gcactcagattgggg

SEQ ID NO: 1153446 - DNA, 15 bp, Homo sapiens
tgcactcagattggg

SEQ ID NO: 1153447 - DNA, 15 bp, Homo sapiens
ctgcactcagattgg

SEQ ID NO: 1153448 - DNA, 15 bp, Homo sapiens
cctgcactcagattg

SEQ ID NO: 1153449 - DNA, 15 bp, Homo sapiens
acctgcactcagatt

SEQ ID NO: 1153450 - DNA, 15 bp, Homo sapiens
cacctgcactcagat

SEQ ID NO: 1153451 - DNA, 15 bp, Homo sapiens
ccacctgcactcaga

SEQ ID NO: 1153452 - DNA, 15 bp, Homo sapiens
tccacctgcactcag

SEQ ID NO: 1153453 - DNA, 15 bp, Homo sapiens
ctccacctgcactca

SEQ ID NO: 1153454 - DNA, 15 bp, Homo sapiens
gctccacctgcactc

SEQ ID NO: 1153455 - DNA, 15 bp, Homo sapiens
agctccacctgcact

SEQ ID NO: 1153456 - DNA, 15 bp, Homo sapiens
cagctccacctgcac

SEQ ID NO: 1153457 - DNA, 15 bp, Homo sapiens
acagctccacctgca

SEQ ID NO: 1153458 - DNA, 15 bp, Homo sapiens
cacagctccacctgc

SEQ ID NO: 1153459 - DNA, 15 bp, Homo sapiens
tcacagctccacctg

SEQ ID NO: 1153460 - DNA, 15 bp, Homo sapiens
gtcacagctccacct

SEQ ID NO: 1153461 - DNA, 15 bp, Homo sapiens
ggtcacagctccacc

SEQ ID NO: 1153462 - DNA, 15 bp, Homo sapiens
tggtcacagctccac

SEQ ID NO: 1153463 - DNA, 15 bp, Homo sapiens
ctggtcacagctcca

SEQ ID NO: 1153464 - DNA, 15 bp, Homo sapiens
cctggtcacagctcc

SEQ ID NO: 1153465 - DNA, 15 bp, Homo sapiens
tcctggtcacagctc

SEQ ID NO: 1153466 - DNA, 15 bp, Homo sapiens
ttcctggtcacagct

SEQ ID NO: 1153467 - DNA, 15 bp, Homo sapiens
gttcctggtcacagc

SEQ ID NO: 1153468 - DNA, 15 bp, Homo sapiens
ggttcctggtcacag

SEQ ID NO: 1153469 - DNA, 15 bp, Homo sapiens
tggttcctggtcaca

SEQ ID NO: 1153470 - DNA, 15 bp, Homo sapiens
ctggttcctggtcac

SEQ ID NO: 1153471 - DNA, 15 bp, Homo sapiens
gctggttcctggtca

SEQ ID NO: 1153472 - DNA, 15 bp, Homo sapiens
tgctggttcctggtc

SEQ ID NO: 1153473 - DNA, 15 bp, Homo sapiens
atgctggttcctggt

SEQ ID NO: 1153474 - DNA, 15 bp, Homo sapiens
tatgctggttcctgg

SEQ ID NO: 1153475 - DNA, 15 bp, Homo sapiens
gtatgctggttcctg

SEQ ID NO: 1153476 - DNA, 15 bp, Homo sapiens
agtatgctggttcct

SEQ ID NO: 1153477 - DNA, 15 bp, Homo sapiens
gagtatgctggttcc

SEQ ID NO: 1153478 - DNA, 15 bp, Homo sapiens
tgagtatgctggttc

SEQ ID NO: 1153479 - DNA, 15 bp, Homo sapiens
atgagtatgctggtt

SEQ ID NO: 1153480 - DNA, 15 bp, Homo sapiens
aatgagtatgctggt

SEQ ID NO: 1153481 - DNA, 15 bp, Homo sapiens
aaatgagtatgctgg

SEQ ID NO: 1153482 - DNA, 15 bp, Homo sapiens
caaatgagtatgctg

SEQ ID NO: 1153483 - DNA, 15 bp, Homo sapiens
ccaaatgagtatgct

SEQ ID NO: 1153484 - DNA, 15 bp, Homo sapiens
tccaaatgagtatgc

SEQ ID NO: 1153485 - DNA, 15 bp, Homo sapiens
atccaaatgagtatg

SEQ ID NO: 1153486 - DNA, 15 bp, Homo sapiens
gatccaaatgagtat

SEQ ID NO: 1153487 - DNA, 15 bp, Homo sapiens
agatccaaatgagta

SEQ ID NO: 1153488 - DNA, 15 bp, Homo sapiens
aagatccaaatgagt

SEQ ID NO: 1153489 - DNA, 15 bp, Homo sapiens
caagatccaaatgag

SEQ ID NO: 1153490 - DNA, 15 bp, Homo sapiens
acaagatccaaatga

SEQ ID NO: 1153491 - DNA, 15 bp, Homo sapiens
aacaagatccaaatg

SEQ ID NO: 1153492 - DNA, 15 bp, Homo sapiens
aaacaagatccaaat

SEQ ID NO: 1153493 - DNA, 15 bp, Homo sapiens
gaaacaagatccaaa

SEQ ID NO: 1153494 - DNA, 15 bp, Homo sapiens
agaaacaagatccaa

SEQ ID NO: 1153495 - DNA, 15 bp, Homo sapiens
tagaaacaagatcca

SEQ ID NO: 1153496 - DNA, 15 bp, Homo sapiens
ttagaaacaagatcc

SEQ ID NO: 1153497 - DNA, 15 bp, Homo sapiens
cttagaaacaagatc

SEQ ID NO: 1153498 - DNA, 15 bp, Homo sapiens
ccttagaaacaagat

SEQ ID NO: 1153499 - DNA, 15 bp, Homo sapiens
accttagaaacaaga

SEQ ID NO: 1153500 - DNA, 15 bp, Homo sapiens
gaccttagaaacaag

SEQ ID NO: 1153501 - DNA, 15 bp, Homo sapiens
tgaccttagaaacaa

SEQ ID NO: 1153502 - DNA, 15 bp, Homo sapiens
atgaccttagaaaca

SEQ ID NO: 1153503 - DNA, 15 bp, Homo sapiens
gatgaccttagaaac

SEQ ID NO: 1153504 - DNA, 15 bp, Homo sapiens
ggatgaccttagaaa

SEQ ID NO: 1153505 - DNA, 15 bp, Homo sapiens
aggatgaccttagaa

SEQ ID NO: 1153506 - DNA, 15 bp, Homo sapiens
gaaggatgaccttag

SEQ ID NO: 1153507 - DNA, 15 bp, Homo sapiens
ggaaggatgacctta

SEQ ID NO: 1153508 - DNA, 15 bp, Homo sapiens
aggaaggatgacctt

SEQ ID NO: 1153509 - DNA, 15 bp, Homo sapiens
aaggaaggatgacct

SEQ ID NO: 1153510 - DNA, 15 bp, Homo sapiens
aaaggaaggatgacc

SEQ ID NO: 1153511 - DNA, 15 bp, Homo sapiens
taaaggaaggatgac

SEQ ID NO: 1153512 - DNA, 15 bp, Homo sapiens
gtaaaggaaggatga

SEQ ID NO: 1153513 - DNA, 15 bp, Homo sapiens
tgtaaaggaaggatg

SEQ ID NO: 1153514 - DNA, 15 bp, Homo sapiens
gtgtaaaggaaggat

SEQ ID NO: 1153515 - DNA, 15 bp, Homo sapiens
agtgtaaaggaagga

SEQ ID NO: 1153516 - DNA, 15 bp, Homo sapiens
cagtgtaaaggaagg

SEQ ID NO: 1153517 - DNA, 15 bp, Homo sapiens
gcagtgtaaaggaag

SEQ ID NO: 1153518 - DNA, 15 bp, Homo sapiens
tgcagtgtaaaggaa

SEQ ID NO: 1153519 - DNA, 15 bp, Homo sapiens
atgcagtgtaaagga

SEQ ID NO: 1153520 - DNA, 15 bp, Homo sapiens
catgcagtgtaaagg

SEQ ID NO: 1153521 - DNA, 15 bp, Homo sapiens
tcatgcagtgtaaag

SEQ ID NO: 1153522 - DNA, 15 bp, Homo sapiens
ctcatgcagtgtaaa

SEQ ID NO: 1153523 - DNA, 15 bp, Homo sapiens
gctcatgcagtgtaa

SEQ ID NO: 1153524 - DNA, 15 bp, Homo sapiens
ggctcatgcagtgta

SEQ ID NO: 1153525 - DNA, 15 bp, Homo sapiens
tggctcatgcagtgt

SEQ ID NO: 1153526 - DNA, 15 bp, Homo sapiens
ttggctcatgcagtg

SEQ ID NO: 1153527 - DNA, 15 bp, Homo sapiens
tttggctcatgcagt

SEQ ID NO: 1153528 - DNA, 15 bp, Homo sapiens
ttttggctcatgcag

SEQ ID NO: 1153529 - DNA, 15 bp, Homo sapiens
attttggctcatgca

SEQ ID NO: 1153530 - DNA, 15 bp, Homo sapiens
cattttggctcatgc

SEQ ID NO: 1153531 - DNA, 15 bp, Homo sapiens
tcattttggctcatg

SEQ ID NO: 1153532 - DNA, 15 bp, Homo sapiens
ttcattttggctcat

SEQ ID NO: 1153533 - DNA, 15 bp, Homo sapiens
attcattttggctca

SEQ ID NO: 1153534 - DNA, 15 bp, Homo sapiens
aattcattttggctc

SEQ ID NO: 1153535 - DNA, 15 bp, Homo sapiens
gaattcattttggct

SEQ ID NO: 1153536 - DNA, 15 bp, Homo sapiens
cgaattcattttggc

SEQ ID NO: 1153537 - DNA, 15 bp, Homo sapiens
acgaattcattttgg

SEQ ID NO: 1153538 - DNA, 15 bp, Homo sapiens
cacgaattcattttg

SEQ ID NO: 1153539 - DNA, 15 bp, Homo sapiens
acacgaattcatttt

SEQ ID NO: 1153540 - DNA, 15 bp, Homo sapiens
cacacgaattcattt

SEQ ID NO: 1153541 - DNA, 15 bp, Homo sapiens
acacacgaattcatt

SEQ ID NO: 1153542 - DNA, 15 bp, Homo sapiens
tacacacgaattcat

SEQ ID NO: 1153543 - DNA, 15 bp, Homo sapiens
ctacacacgaattca

SEQ ID NO: 1153544 - DNA, 15 bp, Homo sapiens
cctacacacgaattc

SEQ ID NO: 1153545 - DNA, 15 bp, Homo sapiens
tcctacacacgaatt

SEQ ID NO: 1153546 - DNA, 15 bp, Homo sapiens
gtcctacacacgaat

SEQ ID NO: 1153547 - DNA, 15 bp, Homo sapiens
agtcctacacacgaa

SEQ ID NO: 1153548 - DNA, 15 bp, Homo sapiens
aagtcctacacacga

SEQ ID NO: 1153549 - DNA, 15 bp, Homo sapiens
aaagtcctacacacg

SEQ ID NO: 1153550 - DNA, 15 bp, Homo sapiens
caaagtcctacacac

SEQ ID NO: 1153551 - DNA, 15 bp, Homo sapiens
acaaagtcctacaca

SEQ ID NO: 1153552 - DNA, 15 bp, Homo sapiens
aacaaagtcctacac

SEQ ID NO: 1153553 - DNA, 15 bp, Homo sapiens
taacaaagtcctaca

SEQ ID NO: 1153554 - DNA, 15 bp, Homo sapiens
gtaacaaagtcctac

SEQ ID NO: 1153555 - DNA, 15 bp, Homo sapiens
agtaacaaagtccta

SEQ ID NO: 1153556 - DNA, 15 bp, Homo sapiens
aagtaacaaagtcct

SEQ ID NO: 1153557 - DNA, 15 bp, Homo sapiens
gaagtaacaaagtcc

SEQ ID NO: 1153558 - DNA, 15 bp, Homo sapiens
agaagtaacaaagtc

SEQ ID NO: 1153559 - DNA, 15 bp, Homo sapiens
cagaagtaacaaagt

SEQ ID NO: 1153560 - DNA, 15 bp, Homo sapiens
acagaagtaacaaag

SEQ ID NO: 1153561 - DNA, 15 bp, Homo sapiens
tacagaagtaacaaa

SEQ ID NO: 1153562 - DNA, 15 bp, Homo sapiens
atacagaagtaacaa

SEQ ID NO: 1153563 - DNA, 15 bp, Homo sapiens
aatacagaagtaaca

SEQ ID NO: 1153564 - DNA, 15 bp, Homo sapiens
aaatacagaagtaac

SEQ ID NO: 1153565 - DNA, 15 bp, Homo sapiens
taaatacagaagtaa

SEQ ID NO: 1153566 - DNA, 15 bp, Homo sapiens
ttaaatacagaagta

SEQ ID NO: 1153567 - DNA, 15 bp, Homo sapiens
gttaaatacagaagt

SEQ ID NO: 1153568 - DNA, 15 bp, Homo sapiens
agttaaatacagaag

SEQ ID NO: 1153569 - DNA, 15 bp, Homo sapiens
cagttaaatacagaa

SEQ ID NO: 1153570 - DNA, 15 bp, Homo sapiens
ccagttaaatacaga

SEQ ID NO: 1153571 - DNA, 15 bp, Homo sapiens
accagttaaatacag

SEQ ID NO: 1153572 - DNA, 15 bp, Homo sapiens
aaccagttaaataca

SEQ ID NO: 1153573 - DNA, 15 bp, Homo sapiens
aaaccagttaaatac

SEQ ID NO: 1153574 - DNA, 15 bp, Homo sapiens
taaaccagttaaata

SEQ ID NO: 1153575 - DNA, 15 bp, Homo sapiens
ataaaccagttaaat

SEQ ID NO: 1153576 - DNA, 15 bp, Homo sapiens
aataaaccagttaaa

SEQ ID NO: 1153577 - DNA, 15 bp, Homo sapiens
caataaaccagttaa

SEQ ID NO: 1153578 - DNA, 15 bp, Homo sapiens
ccaataaaccagtta

SEQ ID NO: 1153579 - DNA, 15 bp, Homo sapiens
tccaataaaccagtt

SEQ ID NO: 1153580 - DNA, 15 bp, Homo sapiens
ttccaataaaccagt

SEQ ID NO: 1153581 - DNA, 15 bp, Homo sapiens
cttccaataaaccag

SEQ ID NO: 1153582 - DNA, 15 bp, Homo sapiens
acttccaataaacca

SEQ ID NO: 1153583 - DNA, 15 bp, Homo sapiens
tacttccaataaacc

SEQ ID NO: 1153584 - DNA, 15 bp, Homo sapiens
ctacttccaataaac

SEQ ID NO: 1153585 - DNA, 15 bp, Homo sapiens
actacttccaataaa

SEQ ID NO: 1153586 - DNA, 15 bp, Homo sapiens
tactacttccaataa

SEQ ID NO: 1153587 - DNA, 15 bp, Homo sapiens
ctactacttccaata

SEQ ID NO: 1153588 - DNA, 15 bp, Homo sapiens
cctactacttccaat

SEQ ID NO: 1153589 - DNA, 15 bp, Homo sapiens
tcctactacttccaa

SEQ ID NO: 1153590 - DNA, 15 bp, Homo sapiens
ttcctactacttcca

SEQ ID NO: 1153591 - DNA, 15 bp, Homo sapiens
gttcctactacttcc

SEQ ID NO: 1153592 - DNA, 15 bp, Homo sapiens
tgttcctactacttc

SEQ ID NO: 1153593 - DNA, 15 bp, Homo sapiens
gtgttcctactactt

SEQ ID NO: 1153594 - DNA, 15 bp, Homo sapiens
tgtgttcctactact

SEQ ID NO: 1153595 - DNA, 15 bp, Homo sapiens
gtgtgttcctactac

SEQ ID NO: 1153596 - DNA, 15 bp, Homo sapiens
agtgtgttcctacta

SEQ ID NO: 1153597 - DNA, 15 bp, Homo sapiens
cagtgtgttcctact

SEQ ID NO: 1153598 - DNA, 15 bp, Homo sapiens
tcagtgtgttcctac

SEQ ID NO: 1153599 - DNA, 15 bp, Homo sapiens
ttcagtgtgttccta

SEQ ID NO: 1153600 - DNA, 15 bp, Homo sapiens
attcagtgtgttcct

SEQ ID NO: 1153601 - DNA, 15 bp, Homo sapiens
aattcagtgtgttcc

SEQ ID NO: 1153602 - DNA, 15 bp, Homo sapiens
aaattcagtgtgttc

SEQ ID NO: 1153603 - DNA, 15 bp, Homo sapiens
aaaattcagtgtgtt

SEQ ID NO: 1153604 - DNA, 15 bp, Homo sapiens
caaaattcagtgtgt

SEQ ID NO: 1153605 - DNA, 15 bp, Homo sapiens
acaaaattcagtgtg

SEQ ID NO: 1153606 - DNA, 15 bp, Homo sapiens
tacaaaattcagtgt

SEQ ID NO: 1153607 - DNA, 15 bp, Homo sapiens
ctacaaaattcagtg

SEQ ID NO: 1153608 - DNA, 15 bp, Homo sapiens
actacaaaattcagt

SEQ ID NO: 1153609 - DNA, 15 bp, Homo sapiens
aactacaaaattcag

SEQ ID NO: 1153610 - DNA, 15 bp, Homo sapiens
taactacaaaattca

SEQ ID NO: 1153611 - DNA, 15 bp, Homo sapiens
ttaactacaaaattc

SEQ ID NO: 1153612 - DNA, 15 bp, Homo sapiens
tttaactacaaaatt

SEQ ID NO: 1153613 - DNA, 15 bp, Homo sapiens
gtttaactacaaaat

SEQ ID NO: 1153614 - DNA, 15 bp, Homo sapiens
tgtttaactacaaaa

SEQ ID NO: 1153615 - DNA, 15 bp, Homo sapiens
gtgtttaactacaaa

SEQ ID NO: 1153616 - DNA, 15 bp, Homo sapiens
tgtgtttaactacaa

SEQ ID NO: 1153617 - DNA, 15 bp, Homo sapiens
ctgtgtttaactaca

SEQ ID NO: 1153618 - DNA, 15 bp, Homo sapiens
actgtgtttaactac

SEQ ID NO: 1153619 - DNA, 15 bp, Homo sapiens
tactgtgtttaacta

SEQ ID NO: 1153620 - DNA, 15 bp, Homo sapiens
atactgtgtttaact

SEQ ID NO: 1153621 - DNA, 15 bp, Homo sapiens
gatactgtgtttaac

SEQ ID NO: 1153622 - DNA, 15 bp, Homo sapiens
agatactgtgtttaa

SEQ ID NO: 1153623 - DNA, 15 bp, Homo sapiens
aagatactgtgttta

SEQ ID NO: 1153624 - DNA, 15 bp, Homo sapiens
aaagatactgtgttt

SEQ ID NO: 1153625 - DNA, 15 bp, Homo sapiens
caaagatactgtgtt

SEQ ID NO: 1153626 - DNA, 15 bp, Homo sapiens
acaaagatactgtgt

SEQ ID NO: 1153627 - DNA, 15 bp, Homo sapiens
gacaaagatactgtg

SEQ ID NO: 1153628 - DNA, 15 bp, Homo sapiens
tgacaaagatactgt

SEQ ID NO: 1153629 - DNA, 15 bp, Homo sapiens
gtgacaaagatactg

SEQ ID NO: 1153630 - DNA, 15 bp, Homo sapiens
agtgacaaagatact

SEQ ID NO: 1153631 - DNA, 15 bp, Homo sapiens
cagtgacaaagatac

SEQ ID NO: 1153632 - DNA, 15 bp, Homo sapiens
tcagtgacaaagata

SEQ ID NO: 1153633 - DNA, 15 bp, Homo sapiens
ctcagtgacaaagat

SEQ ID NO: 1153634 - DNA, 15 bp, Homo sapiens
tctcagtgacaaaga

SEQ ID NO: 1153635 - DNA, 15 bp, Homo sapiens
atctcagtgacaaag

SEQ ID NO: 1153636 - DNA, 15 bp, Homo sapiens
catctcagtgacaaa

SEQ ID NO: 1153637 - DNA, 15 bp, Homo sapiens
acatctcagtgacaa

SEQ ID NO: 1153638 - DNA, 15 bp, Homo sapiens
aacatctcagtgaca

SEQ ID NO: 1153639 - DNA, 15 bp, Homo sapiens
caacatctcagtgac

SEQ ID NO: 1153640 - DNA, 15 bp, Homo sapiens
acaacatctcagtga

SEQ ID NO: 1153641 - DNA, 15 bp, Homo sapiens
gacaacatctcagtg

SEQ ID NO: 1153642 - DNA, 15 bp, Homo sapiens
ggacaacatctcagt

SEQ ID NO: 1153643 - DNA, 15 bp, Homo sapiens
aggacaacatctcag

SEQ ID NO: 1153644 - DNA, 15 bp, Homo sapiens
aaggacaacatctca

SEQ ID NO: 1153645 - DNA, 15 bp, Homo sapiens
gaaggacaacatctc

SEQ ID NO: 1153646 - DNA, 15 bp, Homo sapiens
tgaaggacaacatct

SEQ ID NO: 1153647 - DNA, 15 bp, Homo sapiens
tttgaaggacaacat

SEQ ID NO: 1153648 - DNA, 15 bp, Homo sapiens
ctttgaaggacaaca

SEQ ID NO: 1153649 - DNA, 15 bp, Homo sapiens
actttgaaggacaac

SEQ ID NO: 1153650 - DNA, 15 bp, Homo sapiens
aactttgaaggacaa

SEQ ID NO: 1153651 - DNA, 15 bp, Homo sapiens
aaactttgaaggaca

SEQ ID NO: 1153652 - DNA, 15 bp, Homo sapiens
aaaactttgaaggac

SEQ ID NO: 1153653 - DNA, 15 bp, Homo sapiens
caaaactttgaagga

SEQ ID NO: 1153654 - DNA, 15 bp, Homo sapiens
tcaaaactttgaagg

SEQ ID NO: 1153655 - DNA, 15 bp, Homo sapiens
ttcaaaactttgaag

SEQ ID NO: 1153656 - DNA, 15 bp, Homo sapiens
tttcaaaactttgaa

SEQ ID NO: 1153657 - DNA, 15 bp, Homo sapiens
ttttcaaaactttga

SEQ ID NO: 1153658 - DNA, 15 bp, Homo sapiens
tttttcaaaactttg

SEQ ID NO: 1153659 - DNA, 15 bp, Homo sapiens
atttttcaaaacttt

SEQ ID NO: 1153660 - DNA, 15 bp, Homo sapiens
tatttttcaaaactt

SEQ ID NO: 1153661 - DNA, 15 bp, Homo sapiens
ttatttttcaaaact

SEQ ID NO: 1153662 - DNA, 15 bp, Homo sapiens
ctccaaaagaactat

SEQ ID NO: 1153663 - DNA, 15 bp, Homo sapiens
cctccaaaagaacta

SEQ ID NO: 1153664 - DNA, 15 bp, Homo sapiens
tcctccaaaagaact

SEQ ID NO: 1153665 - DNA, 15 bp, Homo sapiens
atcctccaaaagaac

SEQ ID NO: 1153666 - DNA, 15 bp, Homo sapiens
aatcctccaaaagaa

SEQ ID NO: 1153667 - DNA, 15 bp, Homo sapiens
gaatcctccaaaaga

SEQ ID NO: 1153668 - DNA, 15 bp, Homo sapiens
tgaatcctccaaaag

SEQ ID NO: 1153669 - DNA, 15 bp, Homo sapiens
ctgaatcctccaaaa

SEQ ID NO: 1153670 - DNA, 15 bp, Homo sapiens
tctgaatcctccaaa

SEQ ID NO: 1153671 - DNA, 15 bp, Homo sapiens
ttctgaatcctccaa

SEQ ID NO: 1153672 - DNA, 15 bp, Homo sapiens
cttctgaatcctcca

SEQ ID NO: 1153673 - DNA, 15 bp, Homo sapiens
gcttctgaatcctcc

SEQ ID NO: 1153674 - DNA, 15 bp, Homo sapiens
ggcttctgaatcctc

SEQ ID NO: 1153675 - DNA, 15 bp, Homo sapiens
tggcttctgaatcct

SEQ ID NO: 1153676 - DNA, 15 bp, Homo sapiens
ttggcttctgaatcc

SEQ ID NO: 1153677 - DNA, 15 bp, Homo sapiens
attggcttctgaatc

SEQ ID NO: 1153678 - DNA, 15 bp, Homo sapiens
tattggcttctgaat

SEQ ID NO: 1153679 - DNA, 15 bp, Homo sapiens
ttattggcttctgaa

SEQ ID NO: 1153680 - DNA, 15 bp, Homo sapiens
tttattggcttctga

SEQ ID NO: 1153681 - DNA, 15 bp, Homo sapiens
ctttattggcttctg

SEQ ID NO: 1153682 - DNA, 15 bp, Homo sapiens
actttattggcttct

SEQ ID NO: 1153683 - DNA, 15 bp, Homo sapiens
tactttattggcttc

SEQ ID NO: 1153684 - DNA, 15 bp, Homo sapiens
atactttattggctt

SEQ ID NO: 1153685 - DNA, 15 bp, Homo sapiens
tatactttattggct

SEQ ID NO: 1153686 - DNA, 15 bp, Homo sapiens
ctatactttattggc

SEQ ID NO: 1153687 - DNA, 15 bp, Homo sapiens
gctatactttattgg

SEQ ID NO: 1153688 - DNA, 15 bp, Homo sapiens
tgctatactttattg

SEQ ID NO: 1153689 - DNA, 15 bp, Homo sapiens
atgctatactttatt

SEQ ID NO: 1153690 - DNA, 15 bp, Homo sapiens
catgctatactttat

SEQ ID NO: 1153691 - DNA, 15 bp, Homo sapiens
tcatgctatacttta

SEQ ID NO: 1153692 - DNA, 15 bp, Homo sapiens
ttcatgctatacttt

SEQ ID NO: 1153693 - DNA, 15 bp, Homo sapiens
cttcatgctatactt

SEQ ID NO: 1153694 - DNA, 15 bp, Homo sapiens
acttcatgctatact

SEQ ID NO: 1153695 - DNA, 15 bp, Homo sapiens
gacttcatgctatac

SEQ ID NO: 1153696 - DNA, 15 bp, Homo sapiens
tgacttcatgctata

SEQ ID NO: 1153697 - DNA, 15 bp, Homo sapiens
ttgacttcatgctat

SEQ ID NO: 1153698 - DNA, 15 bp, Homo sapiens
tttgacttcatgcta

SEQ ID NO: 1153699 - DNA, 15 bp, Homo sapiens
atttgacttcatgct

SEQ ID NO: 1153700 - DNA, 15 bp, Homo sapiens
aatttgacttcatgc

SEQ ID NO: 1153701 - DNA, 15 bp, Homo sapiens
taatttgacttcatg

SEQ ID NO: 1153702 - DNA, 15 bp, Homo sapiens
ctaatttgacttcat

SEQ ID NO: 1153703 - DNA, 15 bp, Homo sapiens
tctaatttgacttca

SEQ ID NO: 1153704 - DNA, 15 bp, Homo sapiens
ttctaatttgacttc

SEQ ID NO: 1153705 - DNA, 15 bp, Homo sapiens
tttctaatttgactt

SEQ ID NO: 1153706 - DNA, 15 bp, Homo sapiens
gtttctaatttgact

SEQ ID NO: 1153707 - DNA, 15 bp, Homo sapiens
agtttctaatttgac

SEQ ID NO: 1153708 - DNA, 15 bp, Homo sapiens
cagtttctaatttga

SEQ ID NO: 1153709 - DNA, 15 bp, Homo sapiens
acagtttctaatttg

SEQ ID NO: 1153710 - DNA, 15 bp, Homo sapiens
tacagtttctaattt

SEQ ID NO: 1153711 - DNA, 15 bp, Homo sapiens
gtacagtttctaatt

SEQ ID NO: 1153712 - DNA, 15 bp, Homo sapiens
tgtacagtttctaat

SEQ ID NO: 1153713 - DNA, 15 bp, Homo sapiens
ttgtacagtttctaa

SEQ ID NO: 1153714 - DNA, 15 bp, Homo sapiens
tttgtacagtttcta

SEQ ID NO: 1153715 - DNA, 15 bp, Homo sapiens
ttttgtacagtttct

SEQ ID NO: 1153716 - DNA, 15 bp, Homo sapiens
attttgtacagtttc

SEQ ID NO: 1153717 - DNA, 15 bp, Homo sapiens
tattttgtacagttt

SEQ ID NO: 1153718 - DNA, 15 bp, Homo sapiens
ttattttgtacagtt

SEQ ID NO: 1153719 - DNA, 15 bp, Homo sapiens
tttattttgtacagt

SEQ ID NO: 1153720 - DNA, 15 bp, Homo sapiens
atttattttgtacag

SEQ ID NO: 1153721 - DNA, 15 bp, Homo sapiens
aatttattttgtaca

SEQ ID NO: 1153722 - DNA, 15 bp, Homo sapiens
taatttattttgtac

SEQ ID NO: 1153723 - DNA, 15 bp, Homo sapiens
ataatttattttgta

SEQ ID NO: 1153724 - DNA, 15 bp, Homo sapiens
tataatttattttgt

SEQ ID NO: 1153725 - DNA, 15 bp, Homo sapiens
atataatttattttg

SEQ ID NO: 1153726 - DNA, 15 bp, Homo sapiens
tatataatttatttt

SEQ ID NO: 1153727 - DNA, 15 bp, Homo sapiens
gtatataatttattt

SEQ ID NO: 1153728 - DNA, 15 bp, Homo sapiens
tgtatataatttatt

SEQ ID NO: 1153729 - DNA, 15 bp, Homo sapiens
ctgtatataatttat

SEQ ID NO: 1153730 - DNA, 15 bp, Homo sapiens
cctgtatataattta

SEQ ID NO: 1153731 - DNA, 15 bp, Homo sapiens
ccctgtatataattt

SEQ ID NO: 1153732 - DNA, 15 bp, Homo sapiens
cccctgtatataatt

SEQ ID NO: 1153733 - DNA, 15 bp, Homo sapiens
gcccctgtatataat

SEQ ID NO: 1153734 - DNA, 15 bp, Homo sapiens
cgcccctgtatataa

SEQ ID NO: 1153735 - DNA, 15 bp, Homo sapiens
ccgcccctgtatata

SEQ ID NO: 1153736 - DNA, 15 bp, Homo sapiens
gccgcccctgtatat

SEQ ID NO: 1153737 - DNA, 15 bp, Homo sapiens
agccgcccctgtata

SEQ ID NO: 1153738 - DNA, 15 bp, Homo sapiens
cagccgcccctgtat

SEQ ID NO: 1153739 - DNA, 15 bp, Homo sapiens
ccagccgcccctgta

SEQ ID NO: 1153740 - DNA, 15 bp, Homo sapiens
gccagccgcccctgt

SEQ ID NO: 1153741 - DNA, 15 bp, Homo sapiens
tgccagccgcccctg

SEQ ID NO: 1153742 - DNA, 15 bp, Homo sapiens
ctgccagccgcccct

SEQ ID NO: 1153743 - DNA, 15 bp, Homo sapiens
cctgccagccgcccc

SEQ ID NO: 1153744 - DNA, 15 bp, Homo sapiens
tcctgccagccgccc

SEQ ID NO: 1153745 - DNA, 15 bp, Homo sapiens
atcctgccagccgcc

SEQ ID NO: 1153746 - DNA, 15 bp, Homo sapiens
gatcctgccagccgc

SEQ ID NO: 1153747 - DNA, 15 bp, Homo sapiens
agatcctgccagccg

SEQ ID NO: 1153748 - DNA, 15 bp, Homo sapiens
tagatcctgccagcc

SEQ ID NO: 1153749 - DNA, 15 bp, Homo sapiens
ctagatcctgccagc

SEQ ID NO: 1153750 - DNA, 15 bp, Homo sapiens
gctagatcctgccag

SEQ ID NO: 1153751 - DNA, 15 bp, Homo sapiens
agctagatcctgcca

SEQ ID NO: 1153752 - DNA, 15 bp, Homo sapiens
aagctagatcctgcc

SEQ ID NO: 1153753 - DNA, 15 bp, Homo sapiens
caagctagatcctgc

SEQ ID NO: 1153754 - DNA, 15 bp, Homo sapiens
ccaagctagatcctg

SEQ ID NO: 1153755 - DNA, 15 bp, Homo sapiens
cccaagctagatcct

SEQ ID NO: 1153756 - DNA, 15 bp, Homo sapiens
tcccaagctagatcc

SEQ ID NO: 1153757 - DNA, 15 bp, Homo sapiens
ttcccaagctagatc

SEQ ID NO: 1153758 - DNA, 15 bp, Homo sapiens
tttcccaagctagat

SEQ ID NO: 1153759 - DNA, 15 bp, Homo sapiens
ctttcccaagctaga

SEQ ID NO: 1153760 - DNA, 15 bp, Homo sapiens
cctttcccaagctag

SEQ ID NO: 1153761 - DNA, 15 bp, Homo sapiens
tcctttcccaagcta

SEQ ID NO: 1153762 - DNA, 15 bp, Homo sapiens
gtcctttcccaagct

SEQ ID NO: 1153763 - DNA, 15 bp, Homo sapiens
agtcctttcccaagc

SEQ ID NO: 1153764 - DNA, 15 bp, Homo sapiens
aagtcctttcccaag

SEQ ID NO: 1153765 - DNA, 15 bp, Homo sapiens
gaagtcctttcccaa

SEQ ID NO: 1153766 - DNA, 15 bp, Homo sapiens
agaagtcctttccca

SEQ ID NO: 1153767 - DNA, 15 bp, Homo sapiens
cagaagtcctttccc

SEQ ID NO: 1153768 - DNA, 15 bp, Homo sapiens
ccagaagtcctttcc

SEQ ID NO: 1153769 - DNA, 15 bp, Homo sapiens
accagaagtcctttc

SEQ ID NO: 1153770 - DNA, 15 bp, Homo sapiens
caccagaagtccttt

SEQ ID NO: 1153771 - DNA, 15 bp, Homo sapiens
acaccagaagtcctt

SEQ ID NO: 1153772 - DNA, 15 bp, Homo sapiens
tacaccagaagtcct

SEQ ID NO: 1153773 - DNA, 15 bp, Homo sapiens
atacaccagaagtcc

SEQ ID NO: 1153774 - DNA, 15 bp, Homo sapiens
tatacaccagaagtc

SEQ ID NO: 1153775 - DNA, 15 bp, Homo sapiens
atatacaccagaagt

SEQ ID NO: 1153776 - DNA, 15 bp, Homo sapiens
gatatacaccagaag

SEQ ID NO: 1153777 - DNA, 15 bp, Homo sapiens
agatatacaccagaa

SEQ ID NO: 1153778 - DNA, 15 bp, Homo sapiens
tagatatacaccaga

SEQ ID NO: 1153779 - DNA, 15 bp, Homo sapiens
atagatatacaccag

SEQ ID NO: 1153780 - DNA, 15 bp, Homo sapiens
catagatatacacca

SEQ ID NO: 1153781 - DNA, 15 bp, Homo sapiens
acatagatatacacc

SEQ ID NO: 1153782 - DNA, 15 bp, Homo sapiens
tacatagatatacac

SEQ ID NO: 1153783 - DNA, 15 bp, Homo sapiens
ttacatagatataca

SEQ ID NO: 1153784 - DNA, 15 bp, Homo sapiens
tttacatagatatac

SEQ ID NO: 1153785 - DNA, 15 bp, Homo sapiens
gtttacatagatata

SEQ ID NO: 1153786 - DNA, 15 bp, Homo sapiens
agtttacatagatat

SEQ ID NO: 1153787 - DNA, 15 bp, Homo sapiens
aagtttacatagata

SEQ ID NO: 1153788 - DNA, 15 bp, Homo sapiens
gaagtttacatagat

SEQ ID NO: 1153789 - DNA, 15 bp, Homo sapiens
tgaagtttacataga

SEQ ID NO: 1153790 - DNA, 15 bp, Homo sapiens
ctgaagtttacatag

SEQ ID NO: 1153791 - DNA, 15 bp, Homo sapiens
cctgaagtttacata

SEQ ID NO: 1153792 - DNA, 15 bp, Homo sapiens
ccctgaagtttacat

SEQ ID NO: 1153793 - DNA, 15 bp, Homo sapiens
tccctgaagtttaca

SEQ ID NO: 1153794 - DNA, 15 bp, Homo sapiens
gtccctgaagtttac

SEQ ID NO: 1153795 - DNA, 15 bp, Homo sapiens
agtccctgaagttta

SEQ ID NO: 1153796 - DNA, 15 bp, Homo sapiens
gagtccctgaagttt

SEQ ID NO: 1153797 - DNA, 15 bp, Homo sapiens
tgagtccctgaagtt

SEQ ID NO: 1153798 - DNA, 15 bp, Homo sapiens
ttgagtccctgaagt

SEQ ID NO: 1153799 - DNA, 15 bp, Homo sapiens
gttgagtccctgaag

SEQ ID NO: 1153800 - DNA, 15 bp, Homo sapiens
agttgagtccctgaa

SEQ ID NO: 1153801 - DNA, 15 bp, Homo sapiens
aagttgagtccctga

SEQ ID NO: 1153802 - DNA, 15 bp, Homo sapiens
aaagttgagtccctg

SEQ ID NO: 1153803 - DNA, 15 bp, Homo sapiens
aaaagttgagtccct

SEQ ID NO: 1153804 - DNA, 15 bp, Homo sapiens
caaaagttgagtccc

SEQ ID NO: 1153805 - DNA, 15 bp, Homo sapiens
acaaaagttgagtcc

SEQ ID NO: 1153806 - DNA, 15 bp, Homo sapiens
cacaaaagttgagtc

SEQ ID NO: 1153807 - DNA, 15 bp, Homo sapiens
tcacaaaagttgagt

SEQ ID NO: 1153808 - DNA, 15 bp, Homo sapiens
ttcacaaaagttgag

SEQ ID NO: 1153809 - DNA, 15 bp, Homo sapiens
attcacaaaagttga

SEQ ID NO: 1153810 - DNA, 15 bp, Homo sapiens
gattcacaaaagttg

SEQ ID NO: 1153811 - DNA, 15 bp, Homo sapiens
agattcacaaaagtt

SEQ ID NO: 1153812 - DNA, 15 bp, Homo sapiens
cagattcacaaaagt

SEQ ID NO: 1153813 - DNA, 15 bp, Homo sapiens
tcagattcacaaaag

SEQ ID NO: 1153814 - DNA, 15 bp, Homo sapiens
ttcagattcacaaaa

SEQ ID NO: 1153815 - DNA, 15 bp, Homo sapiens
tttcagattcacaaa

SEQ ID NO: 1153816 - DNA, 15 bp, Homo sapiens
gtttcagattcacaa

SEQ ID NO: 1153817 - DNA, 15 bp, Homo sapiens
tgtttcagattcaca

SEQ ID NO: 1153818 - DNA, 15 bp, Homo sapiens
atgtttcagattcac

SEQ ID NO: 1153819 - DNA, 15 bp, Homo sapiens
catgtttcagattca

SEQ ID NO: 1153820 - DNA, 15 bp, Homo sapiens
tcatgtttcagattc

SEQ ID NO: 1153821 - DNA, 15 bp, Homo sapiens
ttcatgtttcagatt

SEQ ID NO: 1153822 - DNA, 15 bp, Homo sapiens
attcatgtttcagat

SEQ ID NO: 1153823 - DNA, 15 bp, Homo sapiens
aattcatgtttcaga

SEQ ID NO: 1153824 - DNA, 15 bp, Homo sapiens
aaattcatgtttcag

SEQ ID NO: 1153825 - DNA, 15 bp, Homo sapiens
aaaattcatgtttca

SEQ ID NO: 1153826 - DNA, 15 bp, Homo sapiens
taaaattcatgtttc

SEQ ID NO: 1153827 - DNA, 15 bp, Homo sapiens
ttaaaattcatgttt

SEQ ID NO: 1153828 - DNA, 15 bp, Homo sapiens
gttaaaattcatgtt

SEQ ID NO: 1153829 - DNA, 15 bp, Homo sapiens
ggttaaaattcatgt

SEQ ID NO: 1153830 - DNA, 15 bp, Homo sapiens
aggttaaaattcatg

SEQ ID NO: 1153831 - DNA, 15 bp, Homo sapiens
taggttaaaattcat

SEQ ID NO: 1153832 - DNA, 15 bp, Homo sapiens
ttaggttaaaattca

SEQ ID NO: 1153833 - DNA, 15 bp, Homo sapiens
gttaggttaaaattc

SEQ ID NO: 1153834 - DNA, 15 bp, Homo sapiens
tgttaggttaaaatt

SEQ ID NO: 1153835 - DNA, 15 bp, Homo sapiens
ctgttaggttaaaat

SEQ ID NO: 1153836 - DNA, 15 bp, Homo sapiens
tctgttaggttaaaa

SEQ ID NO: 1153837 - DNA, 15 bp, Homo sapiens
ctctgttaggttaaa

SEQ ID NO: 1153838 - DNA, 15 bp, Homo sapiens
actctgttaggttaa

SEQ ID NO: 1153839 - DNA, 15 bp, Homo sapiens
tactctgttaggtta

SEQ ID NO: 1153840 - DNA, 15 bp, Homo sapiens
gtactctgttaggtt

SEQ ID NO: 1153841 - DNA, 15 bp, Homo sapiens
tgtactctgttaggt

SEQ ID NO: 1153842 - DNA, 15 bp, Homo sapiens
ttgtactctgttagg

SEQ ID NO: 1153843 - DNA, 15 bp, Homo sapiens
attgtactctgttag

SEQ ID NO: 1153844 - DNA, 15 bp, Homo sapiens
aattgtactctgtta

SEQ ID NO: 1153845 - DNA, 15 bp, Homo sapiens
taattgtactctgtt

SEQ ID NO: 1153846 - DNA, 15 bp, Homo sapiens
ctaattgtactctgt

SEQ ID NO: 1153847 - DNA, 15 bp, Homo sapiens
actaattgtactctg

SEQ ID NO: 1153848 - DNA, 15 bp, Homo sapiens
aactaattgtactct

SEQ ID NO: 1153849 - DNA, 15 bp, Homo sapiens
taactaattgtactc

SEQ ID NO: 1153850 - DNA, 15 bp, Homo sapiens
gtaactaattgtact

SEQ ID NO: 1153851 - DNA, 15 bp, Homo sapiens
tgtaactaattgtac

SEQ ID NO: 1153852 - DNA, 15 bp, Homo sapiens
ctgtaactaattgta

SEQ ID NO: 1153853 - DNA, 15 bp, Homo sapiens
cctgtaactaattgt

SEQ ID NO: 1153854 - DNA, 15 bp, Homo sapiens
tcctgtaactaattg

SEQ ID NO: 1153855 - DNA, 15 bp, Homo sapiens
ttcctgtaactaatt

SEQ ID NO: 1153856 - DNA, 15 bp, Homo sapiens
tttcctgtaactaat

SEQ ID NO: 1153857 - DNA, 15 bp, Homo sapiens
gtttcctgtaactaa

SEQ ID NO: 1153858 - DNA, 15 bp, Homo sapiens
tgtttcctgtaacta

SEQ ID NO: 1153859 - DNA, 15 bp, Homo sapiens
ttgtttcctgtaact

SEQ ID NO: 1153860 - DNA, 15 bp, Homo sapiens
gttgtttcctgtaac

SEQ ID NO: 1153861 - DNA, 15 bp, Homo sapiens
tgttgtttcctgtaa

SEQ ID NO: 1153862 - DNA, 15 bp, Homo sapiens
atgttgtttcctgta

SEQ ID NO: 1153863 - DNA, 15 bp, Homo sapiens
tatgttgtttcctgt

SEQ ID NO: 1153864 - DNA, 15 bp, Homo sapiens
ttatgttgtttcctg

SEQ ID NO: 1153865 - DNA, 15 bp, Homo sapiens
attatgttgtttcct

SEQ ID NO: 1153866 - DNA, 15 bp, Homo sapiens
tattatgttgtttcc

SEQ ID NO: 1153867 - DNA, 15 bp, Homo sapiens
ctattatgttgtttc

SEQ ID NO: 1153868 - DNA, 15 bp, Homo sapiens
actattatgttgttt

SEQ ID NO: 1153869 - DNA, 15 bp, Homo sapiens
tactattatgttgtt

SEQ ID NO: 1153870 - DNA, 15 bp, Homo sapiens
ctactattatgttgt

SEQ ID NO: 1153871 - DNA, 15 bp, Homo sapiens
actactattatgttg

SEQ ID NO: 1153872 - DNA, 15 bp, Homo sapiens
tactactattatgtt

SEQ ID NO: 1153873 - DNA, 15 bp, Homo sapiens
ttactactattatgt

SEQ ID NO: 1153874 - DNA, 15 bp, Homo sapiens
tttactactattatg

SEQ ID NO: 1153875 - DNA, 15 bp, Homo sapiens
atttactactattat

SEQ ID NO: 1153876 - DNA, 15 bp, Homo sapiens
gatttactactatta

SEQ ID NO: 1153877 - DNA, 15 bp, Homo sapiens
tgatttactactatt

SEQ ID NO: 1153878 - DNA, 15 bp, Homo sapiens
gtgatttactactat

SEQ ID NO: 1153879 - DNA, 15 bp, Homo sapiens
tgtgatttactacta

SEQ ID NO: 1153880 - DNA, 15 bp, Homo sapiens
atgtgatttactact

SEQ ID NO: 1153881 - DNA, 15 bp, Homo sapiens
aatgtgatttactac

SEQ ID NO: 1153882 - DNA, 15 bp, Homo sapiens
gaatgtgatttacta

SEQ ID NO: 1153883 - DNA, 15 bp, Homo sapiens
tgaatgtgatttact

SEQ ID NO: 1153884 - DNA, 15 bp, Homo sapiens
ctgaatgtgatttac

SEQ ID NO: 1153885 - DNA, 15 bp, Homo sapiens
tctgaatgtgattta

SEQ ID NO: 1153886 - DNA, 15 bp, Homo sapiens
atctgaatgtgattt

SEQ ID NO: 1153887 - DNA, 15 bp, Homo sapiens
tatctgaatgtgatt

SEQ ID NO: 1153888 - DNA, 15 bp, Homo sapiens
ttatctgaatgtgat

SEQ ID NO: 1153889 - DNA, 15 bp, Homo sapiens
attatctgaatgtga

SEQ ID NO: 1153890 - DNA, 15 bp, Homo sapiens
aattatctgaatgtg

SEQ ID NO: 1153891 - DNA, 15 bp, Homo sapiens
gaattatctgaatgt

SEQ ID NO: 1153892 - DNA, 15 bp, Homo sapiens
tgaattatctgaatg

SEQ ID NO: 1153893 - DNA, 15 bp, Homo sapiens
ttgaattatctgaat

SEQ ID NO: 1153894 - DNA, 15 bp, Homo sapiens
tttgaattatctgaa

SEQ ID NO: 1153895 - DNA, 15 bp, Homo sapiens
gtttgaattatctga

SEQ ID NO: 1153896 - DNA, 15 bp, Homo sapiens
agtttgaattatctg

SEQ ID NO: 1153897 - DNA, 15 bp, Homo sapiens
aagtttgaattatct

SEQ ID NO: 1153898 - DNA, 15 bp, Homo sapiens
taagtttgaattatc

SEQ ID NO: 1153899 - DNA, 15 bp, Homo sapiens
ttaagtttgaattat

SEQ ID NO: 1153900 - DNA, 15 bp, Homo sapiens
tttaagtttgaatta

SEQ ID NO: 1153901 - DNA, 15 bp, Homo sapiens
atttaagtttgaatt

SEQ ID NO: 1153902 - DNA, 15 bp, Homo sapiens
aatttaagtttgaat

SEQ ID NO: 1153903 - DNA, 15 bp, Homo sapiens
gaatttaagtttgaa

SEQ ID NO: 1153904 - DNA, 15 bp, Homo sapiens
tgaatttaagtttga

SEQ ID NO: 1153905 - DNA, 15 bp, Homo sapiens
ctgaatttaagtttg

SEQ ID NO: 1153906 - DNA, 15 bp, Homo sapiens
tctgaatttaagttt

SEQ ID NO: 1153907 - DNA, 15 bp, Homo sapiens
atctgaatttaagtt

SEQ ID NO: 1153908 - DNA, 15 bp, Homo sapiens
gatctgaatttaagt

SEQ ID NO: 1153909 - DNA, 15 bp, Homo sapiens
ggatctgaatttaag

SEQ ID NO: 1153910 - DNA, 15 bp, Homo sapiens
aggatctgaatttaa

SEQ ID NO: 1153911 - DNA, 15 bp, Homo sapiens
caggatctgaattta

SEQ ID NO: 1153912 - DNA, 15 bp, Homo sapiens
tcaggatctgaattt

SEQ ID NO: 1153913 - DNA, 15 bp, Homo sapiens
gtcaggatctgaatt

SEQ ID NO: 1153914 - DNA, 15 bp, Homo sapiens
tgtcaggatctgaat

SEQ ID NO: 1153915 - DNA, 15 bp, Homo sapiens
atgtcaggatctgaa

SEQ ID NO: 1153916 - DNA, 15 bp, Homo sapiens
aatgtcaggatctga

SEQ ID NO: 1153917 - DNA, 15 bp, Homo sapiens
aaatgtcaggatctg

SEQ ID NO: 1153918 - DNA, 15 bp, Homo sapiens
aaaatgtcaggatct

SEQ ID NO: 1153919 - DNA, 15 bp, Homo sapiens
taaaatgtcaggatc

SEQ ID NO: 1153920 - DNA, 15 bp, Homo sapiens
ctaaaatgtcaggat

SEQ ID NO: 1153921 - DNA, 15 bp, Homo sapiens
cctaaaatgtcagga

SEQ ID NO: 1153922 - DNA, 15 bp, Homo sapiens
acctaaaatgtcagg

SEQ ID NO: 1153923 - DNA, 15 bp, Homo sapiens
tacctaaaatgtcag

SEQ ID NO: 1153924 - DNA, 15 bp, Homo sapiens
atacctaaaatgtca

SEQ ID NO: 1153925 - DNA, 15 bp, Homo sapiens
aatacctaaaatgtc

SEQ ID NO: 1153926 - DNA, 15 bp, Homo sapiens
aaatacctaaaatgt

SEQ ID NO: 1153927 - DNA, 15 bp, Homo sapiens
aaaatacctaaaatg

SEQ ID NO: 1153928 - DNA, 15 bp, Homo sapiens
aaaaatacctaaaat

SEQ ID NO: 1153929 - DNA, 15 bp, Homo sapiens
caaaaatacctaaaa

SEQ ID NO: 1153930 - DNA, 15 bp, Homo sapiens
tcaaaaatacctaaa

SEQ ID NO: 1153931 - DNA, 15 bp, Homo sapiens
ttcaaaaatacctaa

SEQ ID NO: 1153932 - DNA, 15 bp, Homo sapiens
tttcaaaaataccta

SEQ ID NO: 1153933 - DNA, 15 bp, Homo sapiens
gtttcaaaaatacct

SEQ ID NO: 1153934 - DNA, 15 bp, Homo sapiens
tgtttcaaaaatacc

SEQ ID NO: 1153935 - DNA, 15 bp, Homo sapiens
ttgtttcaaaaatac

SEQ ID NO: 1153936 - DNA, 15 bp, Homo sapiens
gttgtttcaaaaata

SEQ ID NO: 1153937 - DNA, 15 bp, Homo sapiens
tgttgtttcaaaaat

SEQ ID NO: 1153938 - DNA, 15 bp, Homo sapiens
ttgttgtttcaaaaa

SEQ ID NO: 1153939 - DNA, 15 bp, Homo sapiens
gttgttgtttcaaaa

SEQ ID NO: 1153940 - DNA, 15 bp, Homo sapiens
agttgttgtttcaaa

SEQ ID NO: 1153941 - DNA, 15 bp, Homo sapiens
tagttgttgtttcaa

SEQ ID NO: 1153942 - DNA, 15 bp, Homo sapiens
atagttgttgtttca

SEQ ID NO: 1153943 - DNA, 15 bp, Homo sapiens
catagttgttgtttc

SEQ ID NO: 1153944 - DNA, 15 bp, Homo sapiens
gcatagttgttgttt

SEQ ID NO: 1153945 - DNA, 15 bp, Homo sapiens
agcatagttgttgtt

SEQ ID NO: 1153946 - DNA, 15 bp, Homo sapiens
aagcatagttgttgt

SEQ ID NO: 1153947 - DNA, 15 bp, Homo sapiens
taagcatagttgttg

SEQ ID NO: 1153948 - DNA, 15 bp, Homo sapiens
ttaagcatagttgtt

SEQ ID NO: 1153949 - DNA, 15 bp, Homo sapiens
attaagcatagttgt

SEQ ID NO: 1153950 - DNA, 15 bp, Homo sapiens
tattaagcatagttg

SEQ ID NO: 1153951 - DNA, 15 bp, Homo sapiens
ctattaagcatagtt

SEQ ID NO: 1153952 - DNA, 15 bp, Homo sapiens
cctattaagcatagt

SEQ ID NO: 1153953 - DNA, 15 bp, Homo sapiens
tcctattaagcatag

SEQ ID NO: 1153954 - DNA, 15 bp, Homo sapiens
ctcctattaagcata

SEQ ID NO: 1153955 - DNA, 15 bp, Homo sapiens
actcctattaagcat

SEQ ID NO: 1153956 - DNA, 15 bp, Homo sapiens
aactcctattaagca

SEQ ID NO: 1153957 - DNA, 15 bp, Homo sapiens
caactcctattaagc

SEQ ID NO: 1153958 - DNA, 15 bp, Homo sapiens
tcaactcctattaag

SEQ ID NO: 1153959 - DNA, 15 bp, Homo sapiens
ttcaactcctattaa

SEQ ID NO: 1153960 - DNA, 15 bp, Homo sapiens
gttcaactcctatta

SEQ ID NO: 1153961 - DNA, 15 bp, Homo sapiens
tgttcaactcctatt

SEQ ID NO: 1153962 - DNA, 15 bp, Homo sapiens
atgttcaactcctat

SEQ ID NO: 1153963 - DNA, 15 bp, Homo sapiens
aatgttcaactccta

SEQ ID NO: 1153964 - DNA, 15 bp, Homo sapiens
caatgttcaactcct

SEQ ID NO: 1153965 - DNA, 15 bp, Homo sapiens
ccaatgttcaactcc

SEQ ID NO: 1153966 - DNA, 15 bp, Homo sapiens
tccaatgttcaactc

SEQ ID NO: 1153967 - DNA, 15 bp, Homo sapiens
ctccaatgttcaact

SEQ ID NO: 1153968 - DNA, 15 bp, Homo sapiens
actccaatgttcaac

SEQ ID NO: 1153969 - DNA, 15 bp, Homo sapiens
gactccaatgttcaa

SEQ ID NO: 1153970 - DNA, 15 bp, Homo sapiens
tgactccaatgttca

SEQ ID NO: 1153971 - DNA, 15 bp, Homo sapiens
atgactccaatgttc

SEQ ID NO: 1153972 - DNA, 15 bp, Homo sapiens
gatgactccaatgtt

SEQ ID NO: 1153973 - DNA, 15 bp, Homo sapiens
tgatgactccaatgt

SEQ ID NO: 1153974 - DNA, 15 bp, Homo sapiens
ctgatgactccaatg

SEQ ID NO: 1153975 - DNA, 15 bp, Homo sapiens
tctgatgactccaat

SEQ ID NO: 1153976 - DNA, 15 bp, Homo sapiens
atctgatgactccaa

SEQ ID NO: 1153977 - DNA, 15 bp, Homo sapiens
tatctgatgactcca

SEQ ID NO: 1153978 - DNA, 15 bp, Homo sapiens
atatctgatgactcc

SEQ ID NO: 1153979 - DNA, 15 bp, Homo sapiens
aatatctgatgactc

SEQ ID NO: 1153980 - DNA, 15 bp, Homo sapiens
taatatctgatgact

SEQ ID NO: 1153981 - DNA, 15 bp, Homo sapiens
ttaatatctgatgac

SEQ ID NO: 1153982 - DNA, 15 bp, Homo sapiens
attaatatctgatga

SEQ ID NO: 1153983 - DNA, 15 bp, Homo sapiens
tattaatatctgatg

SEQ ID NO: 1153984 - DNA, 15 bp, Homo sapiens
atattaatatctgat

SEQ ID NO: 1153985 - DNA, 15 bp, Homo sapiens
catattaatatctga

SEQ ID NO: 1153986 - DNA, 15 bp, Homo sapiens
acatattaatatctg

SEQ ID NO: 1153987 - DNA, 15 bp, Homo sapiens
tacatattaatatct

SEQ ID NO: 1153988 - DNA, 15 bp, Homo sapiens
ttacatattaatatc

SEQ ID NO: 1153989 - DNA, 15 bp, Homo sapiens
attacatattaatat

SEQ ID NO: 1153990 - DNA, 15 bp, Homo sapiens
tattacatattaata

SEQ ID NO: 1153991 - DNA, 15 bp, Homo sapiens
ttattacatattaat

SEQ ID NO: 1153992 - DNA, 15 bp, Homo sapiens
attattacatattaa

SEQ ID NO: 1153993 - DNA, 15 bp, Homo sapiens
tattattacatatta

SEQ ID NO: 1153994 - DNA, 15 bp, Homo sapiens
atattattacatatt

SEQ ID NO: 1153995 - DNA, 15 bp, Homo sapiens
gatattattacatat

SEQ ID NO: 1153996 - DNA, 15 bp, Homo sapiens
tgatattattacata

SEQ ID NO: 1153997 - DNA, 15 bp, Homo sapiens
ctgatattattacat

SEQ ID NO: 1153998 - DNA, 15 bp, Homo sapiens
actgatattattaca

SEQ ID NO: 1153999 - DNA, 15 bp, Homo sapiens
aactgatattattac

SEQ ID NO: 1154000 - DNA, 15 bp, Homo sapiens
taactgatattatta

SEQ ID NO: 1154001 - DNA, 15 bp, Homo sapiens
ataactgatattatt

SEQ ID NO: 1154002 - DNA, 15 bp, Homo sapiens
gataactgatattat

SEQ ID NO: 1154003 - DNA, 15 bp, Homo sapiens
tgataactgatatta

SEQ ID NO: 1154004 - DNA, 15 bp, Homo sapiens
atgataactgatatt

SEQ ID NO: 1154005 - DNA, 15 bp, Homo sapiens
aatgataactgatat

SEQ ID NO: 1154006 - DNA, 15 bp, Homo sapiens
aaatgataactgata

SEQ ID NO: 1154007 - DNA, 15 bp, Homo sapiens
caaatgataactgat

SEQ ID NO: 1154008 - DNA, 15 bp, Homo sapiens
tcaaatgataactga

SEQ ID NO: 1154009 - DNA, 15 bp, Homo sapiens
ctcaaatgataactg

SEQ ID NO: 1154010 - DNA, 15 bp, Homo sapiens
cctcaaatgataact

SEQ ID NO: 1154011 - DNA, 15 bp, Homo sapiens
tcctcaaatgataac

SEQ ID NO: 1154012 - DNA, 15 bp, Homo sapiens
ttcctcaaatgataa

SEQ ID NO: 1154013 - DNA, 15 bp, Homo sapiens
gttcctcaaatgata

SEQ ID NO: 1154014 - DNA, 15 bp, Homo sapiens
ggttcctcaaatgat

SEQ ID NO: 1154015 - DNA, 15 bp, Homo sapiens
tggttcctcaaatga

SEQ ID NO: 1154016 - DNA, 15 bp, Homo sapiens
gtggttcctcaaatg

SEQ ID NO: 1154017 - DNA, 15 bp, Homo sapiens
agtggttcctcaaat

SEQ ID NO: 1154018 - DNA, 15 bp, Homo sapiens
tagtggttcctcaaa

SEQ ID NO: 1154019 - DNA, 15 bp, Homo sapiens
atagtggttcctcaa

SEQ ID NO: 1154020 - DNA, 15 bp, Homo sapiens
catagtggttcctca

SEQ ID NO: 1154021 - DNA, 15 bp, Homo sapiens
tcatagtggttcctc

SEQ ID NO: 1154022 - DNA, 15 bp, Homo sapiens
ttcatagtggttcct

SEQ ID NO: 1154023 - DNA, 15 bp, Homo sapiens
gttcatagtggttcc

SEQ ID NO: 1154024 - DNA, 15 bp, Homo sapiens
agttcatagtggttc

SEQ ID NO: 1154025 - DNA, 15 bp, Homo sapiens
tagttcatagtggtt

SEQ ID NO: 1154026 - DNA, 15 bp, Homo sapiens
ctagttcatagtggt

SEQ ID NO: 1154027 - DNA, 15 bp, Homo sapiens
cctagttcatagtgg

SEQ ID NO: 1154028 - DNA, 15 bp, Homo sapiens
gcctagttcatagtg

SEQ ID NO: 1154029 - DNA, 15 bp, Homo sapiens
tgcctagttcatagt

SEQ ID NO: 1154030 - DNA, 15 bp, Homo sapiens
gtgcctagttcatag

SEQ ID NO: 1154031 - DNA, 15 bp, Homo sapiens
agtgcctagttcata

SEQ ID NO: 1154032 - DNA, 15 bp, Homo sapiens
cagtgcctagttcat

SEQ ID NO: 1154033 - DNA, 15 bp, Homo sapiens
acagtgcctagttca

SEQ ID NO: 1154034 - DNA, 15 bp, Homo sapiens
cacagtgcctagttc

SEQ ID NO: 1154035 - DNA, 15 bp, Homo sapiens
gcacagtgcctagtt

SEQ ID NO: 1154036 - DNA, 15 bp, Homo sapiens
agcacagtgcctagt

SEQ ID NO: 1154037 - DNA, 15 bp, Homo sapiens
tagcacagtgcctag

SEQ ID NO: 1154038 - DNA, 15 bp, Homo sapiens
ctagcacagtgccta

SEQ ID NO: 1154039 - DNA, 15 bp, Homo sapiens
tctagcacagtgcct

SEQ ID NO: 1154040 - DNA, 15 bp, Homo sapiens
gtctagcacagtgcc

SEQ ID NO: 1154041 - DNA, 15 bp, Homo sapiens
tgtctagcacagtgc

SEQ ID NO: 1154042 - DNA, 15 bp, Homo sapiens
atgtctagcacagtg

SEQ ID NO: 1154043 - DNA, 15 bp, Homo sapiens
aatgtctagcacagt

SEQ ID NO: 1154044 - DNA, 15 bp, Homo sapiens
aaatgtctagcacag

SEQ ID NO: 1154045 - DNA, 15 bp, Homo sapiens
taaatgtctagcaca

SEQ ID NO: 1154046 - DNA, 15 bp, Homo sapiens
ataaatgtctagcac

SEQ ID NO: 1154047 - DNA, 15 bp, Homo sapiens
tataaatgtctagca

SEQ ID NO: 1154048 - DNA, 15 bp, Homo sapiens
atataaatgtctagc

SEQ ID NO: 1154049 - DNA, 15 bp, Homo sapiens
catataaatgtctag

SEQ ID NO: 1154050 - DNA, 15 bp, Homo sapiens
ccatataaatgtcta

SEQ ID NO: 1154051 - DNA, 15 bp, Homo sapiens
accatataaatgtct

SEQ ID NO: 1154052 - DNA, 15 bp, Homo sapiens
aaccatataaatgtc

SEQ ID NO: 1154053 - DNA, 15 bp, Homo sapiens
aaaccatataaatgt

SEQ ID NO: 1154054 - DNA, 15 bp, Homo sapiens
aaaaccatataaatg

SEQ ID NO: 1154055 - DNA, 15 bp, Homo sapiens
aaaaaccatataaat

SEQ ID NO: 1154056 - DNA, 15 bp, Homo sapiens
caaaaaccatataaa

SEQ ID NO: 1154057 - DNA, 15 bp, Homo sapiens
acaaaaaccatataa

SEQ ID NO: 1154058 - DNA, 15 bp, Homo sapiens
gacaaaaaccatata

SEQ ID NO: 1154059 - DNA, 15 bp, Homo sapiens
tgacaaaaaccatat

SEQ ID NO: 1154060 - DNA, 15 bp, Homo sapiens
ttgacaaaaaccata

SEQ ID NO: 1154061 - DNA, 15 bp, Homo sapiens
tttgacaaaaaccat

SEQ ID NO: 1154062 - DNA, 15 bp, Homo sapiens
ttttgacaaaaacca

SEQ ID NO: 1154063 - DNA, 15 bp, Homo sapiens
gttttgacaaaaacc

SEQ ID NO: 1154064 - DNA, 15 bp, Homo sapiens
tgttttgacaaaaac

SEQ ID NO: 1154065 - DNA, 15 bp, Homo sapiens
ttgttttgacaaaaa

SEQ ID NO: 1154066 - DNA, 15 bp, Homo sapiens
attgttttgacaaaa

SEQ ID NO: 1154067 - DNA, 15 bp, Homo sapiens
aattgttttgacaaa

SEQ ID NO: 1154068 - DNA, 15 bp, Homo sapiens
gaattgttttgacaa

SEQ ID NO: 1154069 - DNA, 15 bp, Homo sapiens
agaattgttttgaca

SEQ ID NO: 1154070 - DNA, 15 bp, Homo sapiens
cagaattgttttgac

SEQ ID NO: 1154071 - DNA, 15 bp, Homo sapiens
gcagaattgttttga

SEQ ID NO: 1154072 - DNA, 15 bp, Homo sapiens
tgcagaattgttttg

SEQ ID NO: 1154073 - DNA, 15 bp, Homo sapiens
atgcagaattgtttt

SEQ ID NO: 1154074 - DNA, 15 bp, Homo sapiens
aatgcagaattgttt

SEQ ID NO: 1154075 - DNA, 15 bp, Homo sapiens
taatgcagaattgtt

SEQ ID NO: 1154076 - DNA, 15 bp, Homo sapiens
gtaatgcagaattgt

SEQ ID NO: 1154077 - DNA, 15 bp, Homo sapiens
tgtaatgcagaattg

SEQ ID NO: 1154078 - DNA, 15 bp, Homo sapiens
ctgtaatgcagaatt

SEQ ID NO: 1154079 - DNA, 15 bp, Homo sapiens
actgtaatgcagaat

SEQ ID NO: 1154080 - DNA, 15 bp, Homo sapiens
cactgtaatgcagaa

SEQ ID NO: 1154081 - DNA, 15 bp, Homo sapiens
tcactgtaatgcaga

SEQ ID NO: 1154082 - DNA, 15 bp, Homo sapiens
atcactgtaatgcag

SEQ ID NO: 1154083 - DNA, 15 bp, Homo sapiens
aatcactgtaatgca

SEQ ID NO: 1154084 - DNA, 15 bp, Homo sapiens
taatcactgtaatgc

SEQ ID NO: 1154085 - DNA, 15 bp, Homo sapiens
ataatcactgtaatg

SEQ ID NO: 1154086 - DNA, 15 bp, Homo sapiens
aataatcactgtaat

SEQ ID NO: 1154087 - DNA, 15 bp, Homo sapiens
aaataatcactgtaa

SEQ ID NO: 1154088 - DNA, 15 bp, Homo sapiens
gaaataatcactgta

SEQ ID NO: 1154089 - DNA, 15 bp, Homo sapiens
ggaaataatcactgt

SEQ ID NO: 1154090 - DNA, 15 bp, Homo sapiens
tggaaataatcactg

SEQ ID NO: 1154091 - DNA, 15 bp, Homo sapiens
atggaaataatcact

SEQ ID NO: 1154092 - DNA, 15 bp, Homo sapiens
catggaaataatcac

SEQ ID NO: 1154093 - DNA, 15 bp, Homo sapiens
ccatggaaataatca

SEQ ID NO: 1154094 - DNA, 15 bp, Homo sapiens
accatggaaataatc

SEQ ID NO: 1154095 - DNA, 15 bp, Homo sapiens
taccatggaaataat

SEQ ID NO: 1154096 - DNA, 15 bp, Homo sapiens
ataccatggaaataa

SEQ ID NO: 1154097 - DNA, 15 bp, Homo sapiens
tataccatggaaata

SEQ ID NO: 1154098 - DNA, 15 bp, Homo sapiens
ttataccatggaaat

SEQ ID NO: 1154099 - DNA, 15 bp, Homo sapiens
tttataccatggaaa

SEQ ID NO: 1154100 - DNA, 15 bp, Homo sapiens
atttataccatggaa

SEQ ID NO: 1154101 - DNA, 15 bp, Homo sapiens
catttataccatgga

SEQ ID NO: 1154102 - DNA, 15 bp, Homo sapiens
acatttataccatgg

SEQ ID NO: 1154103 - DNA, 15 bp, Homo sapiens
aacatttataccatg

SEQ ID NO: 1154104 - DNA, 15 bp, Homo sapiens
aaacatttataccat

SEQ ID NO: 1154105 - DNA, 15 bp, Homo sapiens
taaacatttatacca

SEQ ID NO: 1154106 - DNA, 15 bp, Homo sapiens
ctaaacatttatacc

SEQ ID NO: 1154107 - DNA, 15 bp, Homo sapiens
tctaaacatttatac

SEQ ID NO: 1154108 - DNA, 15 bp, Homo sapiens
ctctaaacatttata

SEQ ID NO: 1154109 - DNA, 15 bp, Homo sapiens
tctctaaacatttat

SEQ ID NO: 1154110 - DNA, 15 bp, Homo sapiens
ttctctaaacattta

SEQ ID NO: 1154111 - DNA, 15 bp, Homo sapiens
cttctctaaacattt

SEQ ID NO: 1154112 - DNA, 15 bp, Homo sapiens
acttctctaaacatt

SEQ ID NO: 1154113 - DNA, 15 bp, Homo sapiens
aacttctctaaacat

SEQ ID NO: 1154114 - DNA, 15 bp, Homo sapiens
taacttctctaaaca

SEQ ID NO: 1154115 - DNA, 15 bp, Homo sapiens
ataacttctctaaac

SEQ ID NO: 1154116 - DNA, 15 bp, Homo sapiens
gataacttctctaaa

SEQ ID NO: 1154117 - DNA, 15 bp, Homo sapiens
tgataacttctctaa

SEQ ID NO: 1154118 - DNA, 15 bp, Homo sapiens
atgataacttctcta

SEQ ID NO: 1154119 - DNA, 15 bp, Homo sapiens
aatgataacttctct

SEQ ID NO: 1154120 - DNA, 15 bp, Homo sapiens
aaatgataacttctc

SEQ ID NO: 1154121 - DNA, 15 bp, Homo sapiens
taaatgataacttct

SEQ ID NO: 1154122 - DNA, 15 bp, Homo sapiens
gtaaatgataacttc

SEQ ID NO: 1154123 - DNA, 15 bp, Homo sapiens
ggtaaatgataactt

SEQ ID NO: 1154124 - DNA, 15 bp, Homo sapiens
gggtaaatgataact

SEQ ID NO: 1154125 - DNA, 15 bp, Homo sapiens
tgggtaaatgataac

SEQ ID NO: 1154126 - DNA, 15 bp, Homo sapiens
ttgggtaaatgataa

SEQ ID NO: 1154127 - DNA, 15 bp, Homo sapiens
tttgggtaaatgata

SEQ ID NO: 1154128 - DNA, 15 bp, Homo sapiens
gtttgggtaaatgat

SEQ ID NO: 1154129 - DNA, 15 bp, Homo sapiens
agtttgggtaaatga

SEQ ID NO: 1154130 - DNA, 15 bp, Homo sapiens
tagtttgggtaaatg

SEQ ID NO: 1154131 - DNA, 15 bp, Homo sapiens
ttagtttgggtaaat

SEQ ID NO: 1154132 - DNA, 15 bp, Homo sapiens
attagtttgggtaaa

SEQ ID NO: 1154133 - DNA, 15 bp, Homo sapiens
tattagtttgggtaa

SEQ ID NO: 1154134 - DNA, 15 bp, Homo sapiens
atattagtttgggta

SEQ ID NO: 1154135 - DNA, 15 bp, Homo sapiens
tatattagtttgggt

SEQ ID NO: 1154136 - DNA, 15 bp, Homo sapiens
ttatattagtttggg

SEQ ID NO: 1154137 - DNA, 15 bp, Homo sapiens
gttatattagtttgg

SEQ ID NO: 1154138 - DNA, 15 bp, Homo sapiens
agttatattagtttg

SEQ ID NO: 1154139 - DNA, 15 bp, Homo sapiens
cagttatattagttt

SEQ ID NO: 1154140 - DNA, 15 bp, Homo sapiens
ccagttatattagtt

SEQ ID NO: 1154141 - DNA, 15 bp, Homo sapiens
tccagttatattagt

SEQ ID NO: 1154142 - DNA, 15 bp, Homo sapiens
ctccagttatattag

SEQ ID NO: 1154143 - DNA, 15 bp, Homo sapiens
cctccagttatatta

SEQ ID NO: 1154144 - DNA, 15 bp, Homo sapiens
acctccagttatatt

SEQ ID NO: 1154145 - DNA, 15 bp, Homo sapiens
cacctccagttatat

SEQ ID NO: 1154146 - DNA, 15 bp, Homo sapiens
ccacctccagttata

SEQ ID NO: 1154147 - DNA, 15 bp, Homo sapiens
tccacctccagttat

SEQ ID NO: 1154148 - DNA, 15 bp, Homo sapiens
ttccacctccagtta

SEQ ID NO: 1154149 - DNA, 15 bp, Homo sapiens
gttccacctccagtt

SEQ ID NO: 1154150 - DNA, 15 bp, Homo sapiens
agttccacctccagt

SEQ ID NO: 1154151 - DNA, 15 bp, Homo sapiens
aagttccacctccag

SEQ ID NO: 1154152 - DNA, 15 bp, Homo sapiens
taagttccacctcca

SEQ ID NO: 1154153 - DNA, 15 bp, Homo sapiens
ttaagttccacctcc

SEQ ID NO: 1154154 - DNA, 15 bp, Homo sapiens
tttaagttccacctc

SEQ ID NO: 1154155 - DNA, 15 bp, Homo sapiens
gtttaagttccacct

SEQ ID NO: 1154156 - DNA, 15 bp, Homo sapiens
ggtttaagttccacc

SEQ ID NO: 1154157 - DNA, 15 bp, Homo sapiens
gggtttaagttccac

SEQ ID NO: 1154158 - DNA, 15 bp, Homo sapiens
tgggtttaagttcca

SEQ ID NO: 1154159 - DNA, 15 bp, Homo sapiens
gtgggtttaagttcc

SEQ ID NO: 1154160 - DNA, 15 bp, Homo sapiens
agtgggtttaagttc

SEQ ID NO: 1154161 - DNA, 15 bp, Homo sapiens
gagtgggtttaagtt

SEQ ID NO: 1154162 - DNA, 15 bp, Homo sapiens
cgagtgggtttaagt

SEQ ID NO: 1154163 - DNA, 15 bp, Homo sapiens
ccgagtgggtttaag

SEQ ID NO: 1154164 - DNA, 15 bp, Homo sapiens
gccgagtgggtttaa

SEQ ID NO: 1154165 - DNA, 15 bp, Homo sapiens
ggccgagtgggttta

SEQ ID NO: 1154166 - DNA, 15 bp, Homo sapiens
tggccgagtgggttt

SEQ ID NO: 1154167 - DNA, 15 bp, Homo sapiens
ctggccgagtgggtt

SEQ ID NO: 1154168 - DNA, 15 bp, Homo sapiens
tctggccgagtgggt

SEQ ID NO: 1154169 - DNA, 15 bp, Homo sapiens
gtctggccgagtggg

SEQ ID NO: 1154170 - DNA, 15 bp, Homo sapiens
agtctggccgagtgg

SEQ ID NO: 1154171 - DNA, 15 bp, Homo sapiens
aagtctggccgagtg

SEQ ID NO: 1154172 - DNA, 15 bp, Homo sapiens
taagtctggccgagt

SEQ ID NO: 1154173 - DNA, 15 bp, Homo sapiens
ctaagtctggccgag

SEQ ID NO: 1154174 - DNA, 15 bp, Homo sapiens
tctaagtctggccga

SEQ ID NO: 1154175 - DNA, 15 bp, Homo sapiens
ttctaagtctggccg

SEQ ID NO: 1154176 - DNA, 15 bp, Homo sapiens
cttctaagtctggcc

SEQ ID NO: 1154177 - DNA, 15 bp, Homo sapiens
gcttctaagtctggc

SEQ ID NO: 1154178 - DNA, 15 bp, Homo sapiens
ggcttctaagtctgg

SEQ ID NO: 1154179 - DNA, 15 bp, Homo sapiens
cggcttctaagtctg

SEQ ID NO: 1154180 - DNA, 15 bp, Homo sapiens
acggcttctaagtct

SEQ ID NO: 1154181 - DNA, 15 bp, Homo sapiens
cacggcttctaagtc

SEQ ID NO: 1154182 - DNA, 15 bp, Homo sapiens
gcacggcttctaagt

SEQ ID NO: 1154183 - DNA, 15 bp, Homo sapiens
agcacggcttctaag

SEQ ID NO: 1154184 - DNA, 15 bp, Homo sapiens
gagcacggcttctaa

SEQ ID NO: 1154185 - DNA, 15 bp, Homo sapiens
agagcacggcttcta

SEQ ID NO: 1154186 - DNA, 15 bp, Homo sapiens
aagagcacggcttct

SEQ ID NO: 1154187 - DNA, 15 bp, Homo sapiens
aaagagcacggcttc

SEQ ID NO: 1154188 - DNA, 15 bp, Homo sapiens
gaaagagcacggctt

SEQ ID NO: 1154189 - DNA, 15 bp, Homo sapiens
ggaaagagcacggct

SEQ ID NO: 1154190 - DNA, 15 bp, Homo sapiens
tggaaagagcacggc

SEQ ID NO: 1154191 - DNA, 15 bp, Homo sapiens
gtggaaagagcacgg

SEQ ID NO: 1154192 - DNA, 15 bp, Homo sapiens
agtggaaagagcacg

SEQ ID NO: 1154193 - DNA, 15 bp, Homo sapiens
tagtggaaagagcac

SEQ ID NO: 1154194 - DNA, 15 bp, Homo sapiens
gtagtggaaagagca

SEQ ID NO: 1154195 - DNA, 15 bp, Homo sapiens
tgtagtggaaagagc

SEQ ID NO: 1154196 - DNA, 15 bp, Homo sapiens
gtgtagtggaaagag

SEQ ID NO: 1154197 - DNA, 15 bp, Homo sapiens
tgtgtagtggaaaga

SEQ ID NO: 1154198 - DNA, 15 bp, Homo sapiens
ctgtgtagtggaaag

SEQ ID NO: 1154199 - DNA, 15 bp, Homo sapiens
gctgtgtagtggaaa

SEQ ID NO: 1154200 - DNA, 15 bp, Homo sapiens
cgctgtgtagtggaa

SEQ ID NO: 1154201 - DNA, 15 bp, Homo sapiens
gcgctgtgtagtgga

SEQ ID NO: 1154202 - DNA, 15 bp, Homo sapiens
agcgctgtgtagtgg

SEQ ID NO: 1154203 - DNA, 15 bp, Homo sapiens
tagcgctgtgtagtg

SEQ ID NO: 1154204 - DNA, 15 bp, Homo sapiens
ttagcgctgtgtagt

SEQ ID NO: 1154205 - DNA, 15 bp, Homo sapiens
tttagcgctgtgtag

SEQ ID NO: 1154206 - DNA, 15 bp, Homo sapiens
ctttagcgctgtgta

SEQ ID NO: 1154207 - DNA, 15 bp, Homo sapiens
cctttagcgctgtgt

SEQ ID NO: 1154208 - DNA, 15 bp, Homo sapiens
tcctttagcgctgtg

SEQ ID NO: 1154209 - DNA, 15 bp, Homo sapiens
ctcctttagcgctgt

SEQ ID NO: 1154210 - DNA, 15 bp, Homo sapiens
cctcctttagcgctg

SEQ ID NO: 1154211 - DNA, 15 bp, Homo sapiens
gcctcctttagcgct

SEQ ID NO: 1154212 - DNA, 15 bp, Homo sapiens
agcctcctttagcgc

SEQ ID NO: 1154213 - DNA, 15 bp, Homo sapiens
cagcctcctttagcg

SEQ ID NO: 1154214 - DNA, 15 bp, Homo sapiens
tcagcctcctttagc

SEQ ID NO: 1154215 - DNA, 15 bp, Homo sapiens
ttcagcctcctttag

SEQ ID NO: 1154216 - DNA, 15 bp, Homo sapiens
cttcagcctccttta

SEQ ID NO: 1154217 - DNA, 15 bp, Homo sapiens
tcttcagcctccttt

SEQ ID NO: 1154218 - DNA, 15 bp, Homo sapiens
ctcttcagcctcctt

SEQ ID NO: 1154219 - DNA, 15 bp, Homo sapiens
tctcttcagcctcct

SEQ ID NO: 1154220 - DNA, 15 bp, Homo sapiens
atctcttcagcctcc

SEQ ID NO: 1154221 - DNA, 15 bp, Homo sapiens
catctcttcagcctc

SEQ ID NO: 1154222 - DNA, 15 bp, Homo sapiens
ccatctcttcagcct

SEQ ID NO: 1154223 - DNA, 15 bp, Homo sapiens
accatctcttcagcc

SEQ ID NO: 1154224 - DNA, 15 bp, Homo sapiens
aaccatctcttcagc

SEQ ID NO: 1154225 - DNA, 15 bp, Homo sapiens
taaccatctcttcag

SEQ ID NO: 1154226 - DNA, 15 bp, Homo sapiens
gtaaccatctcttca

SEQ ID NO: 1154227 - DNA, 15 bp, Homo sapiens
tgtaaccatctcttc

SEQ ID NO: 1154228 - DNA, 15 bp, Homo sapiens
ttgtaaccatctctt

SEQ ID NO: 1154229 - DNA, 15 bp, Homo sapiens
cttgtaaccatctct

SEQ ID NO: 1154230 - DNA, 15 bp, Homo sapiens
acttgtaaccatctc

SEQ ID NO: 1154231 - DNA, 15 bp, Homo sapiens
tacttgtaaccatct

SEQ ID NO: 1154232 - DNA, 15 bp, Homo sapiens
atacttgtaaccatc

SEQ ID NO: 1154233 - DNA, 15 bp, Homo sapiens
tatacttgtaaccat

SEQ ID NO: 1154234 - DNA, 15 bp, Homo sapiens
gtatacttgtaacca

SEQ ID NO: 1154235 - DNA, 15 bp, Homo sapiens
agtatacttgtaacc

SEQ ID NO: 1154236 - DNA, 15 bp, Homo sapiens
cagtatacttgtaac

SEQ ID NO: 1154237 - DNA, 15 bp, Homo sapiens
tcagtatacttgtaa

SEQ ID NO: 1154238 - DNA, 15 bp, Homo sapiens
atcagtatacttgta

SEQ ID NO: 1154239 - DNA, 15 bp, Homo sapiens
aatcagtatacttgt

SEQ ID NO: 1154240 - DNA, 15 bp, Homo sapiens
aaatcagtatacttg

SEQ ID NO: 1154241 - DNA, 15 bp, Homo sapiens
caaatcagtatactt

SEQ ID NO: 1154242 - DNA, 15 bp, Homo sapiens
gcaaatcagtatact

SEQ ID NO: 1154243 - DNA, 15 bp, Homo sapiens
agcaaatcagtatac

SEQ ID NO: 1154244 - DNA, 15 bp, Homo sapiens
aagcaaatcagtata

SEQ ID NO: 1154245 - DNA, 15 bp, Homo sapiens
aaagcaaatcagtat

SEQ ID NO: 1154246 - DNA, 15 bp, Homo sapiens
aaaagcaaatcagta

SEQ ID NO: 1154247 - DNA, 15 bp, Homo sapiens
gaaaagcaaatcagt

SEQ ID NO: 1154248 - DNA, 15 bp, Homo sapiens
tgaaaagcaaatcag

SEQ ID NO: 1154249 - DNA, 15 bp, Homo sapiens
ctgaaaagcaaatca

SEQ ID NO: 1154250 - DNA, 15 bp, Homo sapiens
cctgaaaagcaaatc

SEQ ID NO: 1154251 - DNA, 15 bp, Homo sapiens
tcctgaaaagcaaat

SEQ ID NO: 1154252 - DNA, 15 bp, Homo sapiens
ttcctgaaaagcaaa

SEQ ID NO: 1154253 - DNA, 15 bp, Homo sapiens
gaattcctgaaaagc

SEQ ID NO: 1154254 - DNA, 15 bp, Homo sapiens
agaattcctgaaaag

SEQ ID NO: 1154255 - DNA, 15 bp, Homo sapiens
cagaattcctgaaaa

SEQ ID NO: 1154256 - DNA, 15 bp, Homo sapiens
acagaattcctgaaa

SEQ ID NO: 1154257 - DNA, 15 bp, Homo sapiens
cacagaattcctgaa

SEQ ID NO: 1154258 - DNA, 15 bp, Homo sapiens
gcacagaattcctga

SEQ ID NO: 1154259 - DNA, 15 bp, Homo sapiens
tgcacagaattcctg

SEQ ID NO: 1154260 - DNA, 15 bp, Homo sapiens
ctgcacagaattcct

SEQ ID NO: 1154261 - DNA, 15 bp, Homo sapiens
tctgcacagaattcc

SEQ ID NO: 1154262 - DNA, 15 bp, Homo sapiens
ttctgcacagaattc

SEQ ID NO: 1154263 - DNA, 15 bp, Homo sapiens
cttctgcacagaatt

SEQ ID NO: 1154264 - DNA, 15 bp, Homo sapiens
ccttctgcacagaat

SEQ ID NO: 1154265 - DNA, 15 bp, Homo sapiens
gccttctgcacagaa

SEQ ID NO: 1154266 - DNA, 15 bp, Homo sapiens
tgccttctgcacaga

SEQ ID NO: 1154267 - DNA, 15 bp, Homo sapiens
gtgccttctgcacag

SEQ ID NO: 1154268 - DNA, 15 bp, Homo sapiens
tgtgccttctgcaca

SEQ ID NO: 1154269 - DNA, 15 bp, Homo sapiens
gtgtgccttctgcac

SEQ ID NO: 1154270 - DNA, 15 bp, Homo sapiens
tgtgtgccttctgca

SEQ ID NO: 1154271 - DNA, 15 bp, Homo sapiens
atgtgtgccttctgc

SEQ ID NO: 1154272 - DNA, 15 bp, Homo sapiens
gatgtgtgccttctg

SEQ ID NO: 1154273 - DNA, 15 bp, Homo sapiens
agatgtgtgccttct

SEQ ID NO: 1154274 - DNA, 15 bp, Homo sapiens
tagatgtgtgccttc

SEQ ID NO: 1154275 - DNA, 15 bp, Homo sapiens
atagatgtgtgcctt

SEQ ID NO: 1154276 - DNA, 15 bp, Homo sapiens
catagatgtgtgcct

SEQ ID NO: 1154277 - DNA, 15 bp, Homo sapiens
ccatagatgtgtgcc

SEQ ID NO: 1154278 - DNA, 15 bp, Homo sapiens
tccatagatgtgtgc

SEQ ID NO: 1154279 - DNA, 15 bp, Homo sapiens
ttccatagatgtgtg

SEQ ID NO: 1154280 - DNA, 15 bp, Homo sapiens
attccatagatgtgt

SEQ ID NO: 1154281 - DNA, 15 bp, Homo sapiens
aattccatagatgtg

SEQ ID NO: 1154282 - DNA, 15 bp, Homo sapiens
taattccatagatgt

SEQ ID NO: 1154283 - DNA, 15 bp, Homo sapiens
gtaattccatagatg

SEQ ID NO: 1154284 - DNA, 15 bp, Homo sapiens
agtaattccatagat

SEQ ID NO: 1154285 - DNA, 15 bp, Homo sapiens
aagtaattccataga

SEQ ID NO: 1154286 - DNA, 15 bp, Homo sapiens
aaagtaattccatag

SEQ ID NO: 1154287 - DNA, 15 bp, Homo sapiens
aaaagtaattccata

SEQ ID NO: 1154288 - DNA, 15 bp, Homo sapiens
taaaagtaattccat

SEQ ID NO: 1154289 - DNA, 15 bp, Homo sapiens
ctaaaagtaattcca

SEQ ID NO: 1154290 - DNA, 15 bp, Homo sapiens
actaaaagtaattcc

SEQ ID NO: 1154291 - DNA, 15 bp, Homo sapiens
tactaaaagtaattc

SEQ ID NO: 1154292 - DNA, 15 bp, Homo sapiens
atactaaaagtaatt

SEQ ID NO: 1154293 - DNA, 15 bp, Homo sapiens
gatactaaaagtaat

SEQ ID NO: 1154294 - DNA, 15 bp, Homo sapiens
agatactaaaagtaa

SEQ ID NO: 1154295 - DNA, 15 bp, Homo sapiens
gagatactaaaagta

SEQ ID NO: 1154296 - DNA, 15 bp, Homo sapiens
tgagatactaaaagt

SEQ ID NO: 1154297 - DNA, 15 bp, Homo sapiens
gtgagatactaaaag

SEQ ID NO: 1154298 - DNA, 15 bp, Homo sapiens
tgtgagatactaaaa

SEQ ID NO: 1154299 - DNA, 15 bp, Homo sapiens
ttgtgagatactaaa

SEQ ID NO: 1154300 - DNA, 15 bp, Homo sapiens
cttgtgagatactaa

SEQ ID NO: 1154301 - DNA, 15 bp, Homo sapiens
gcttgtgagatacta

SEQ ID NO: 1154302 - DNA, 15 bp, Homo sapiens
tgcttgtgagatact

SEQ ID NO: 1154303 - DNA, 15 bp, Homo sapiens
atgcttgtgagatac

SEQ ID NO: 1154304 - DNA, 15 bp, Homo sapiens
aatgcttgtgagata

SEQ ID NO: 1154305 - DNA, 15 bp, Homo sapiens
aaatgcttgtgagat

SEQ ID NO: 1154306 - DNA, 15 bp, Homo sapiens
taaatgcttgtgaga

SEQ ID NO: 1154307 - DNA, 15 bp, Homo sapiens
ataaatgcttgtgag

SEQ ID NO: 1154308 - DNA, 15 bp, Homo sapiens
cataaatgcttgtga

SEQ ID NO: 1154309 - DNA, 15 bp, Homo sapiens
acataaatgcttgtg

SEQ ID NO: 1154310 - DNA, 15 bp, Homo sapiens
tacataaatgcttgt

SEQ ID NO: 1154311 - DNA, 15 bp, Homo sapiens
atacataaatgcttg

SEQ ID NO: 1154312 - DNA, 15 bp, Homo sapiens
aatacataaatgctt

SEQ ID NO: 1154313 - DNA, 15 bp, Homo sapiens
aaatacataaatgct

SEQ ID NO: 1154314 - DNA, 15 bp, Homo sapiens
aaaatacataaatgc

SEQ ID NO: 1154315 - DNA, 15 bp, Homo sapiens
aaaaatacataaatg

SEQ ID NO: 1154316 - DNA, 15 bp, Homo sapiens
gaaaaatacataaat

SEQ ID NO: 1154317 - DNA, 15 bp, Homo sapiens
ggaaaaatacataaa

SEQ ID NO: 1154318 - DNA, 15 bp, Homo sapiens
aggaaaaatacataa

SEQ ID NO: 1154319 - DNA, 15 bp, Homo sapiens
taggaaaaatacata

SEQ ID NO: 1154320 - DNA, 15 bp, Homo sapiens
ataggaaaaatacat

SEQ ID NO: 1154321 - DNA, 15 bp, Homo sapiens
cataggaaaaataca

SEQ ID NO: 1154322 - DNA, 15 bp, Homo sapiens
gcataggaaaaatac

SEQ ID NO: 1154323 - DNA, 15 bp, Homo sapiens
ggcataggaaaaata

SEQ ID NO: 1154324 - DNA, 15 bp, Homo sapiens
cggcataggaaaaat

SEQ ID NO: 1154325 - DNA, 15 bp, Homo sapiens
ccggcataggaaaaa

SEQ ID NO: 1154326 - DNA, 15 bp, Homo sapiens
accggcataggaaaa

SEQ ID NO: 1154327 - DNA, 15 bp, Homo sapiens
aaccggcataggaaa

SEQ ID NO: 1154328 - DNA, 15 bp, Homo sapiens
caaccggcataggaa

SEQ ID NO: 1154329 - DNA, 15 bp, Homo sapiens
acaaccggcatagga

SEQ ID NO: 1154330 - DNA, 15 bp, Homo sapiens
aacaaccggcatagg

SEQ ID NO: 1154331 - DNA, 15 bp, Homo sapiens
aaacaaccggcatag

SEQ ID NO: 1154332 - DNA, 15 bp, Homo sapiens
aaaacaaccggcata

SEQ ID NO: 1154333 - DNA, 15 bp, Homo sapiens
gaaaacaaccggcat

SEQ ID NO: 1154334 - DNA, 15 bp, Homo sapiens
cgaaaacaaccggca

SEQ ID NO: 1154335 - DNA, 15 bp, Homo sapiens
tcgaaaacaaccggc

SEQ ID NO: 1154336 - DNA, 15 bp, Homo sapiens
atcgaaaacaaccgg

SEQ ID NO: 1154337 - DNA, 15 bp, Homo sapiens
aatcgaaaacaaccg

SEQ ID NO: 1154338 - DNA, 15 bp, Homo sapiens
aaatcgaaaacaacc

SEQ ID NO: 1154339 - DNA, 15 bp, Homo sapiens
caaatcgaaaacaac

SEQ ID NO: 1154340 - DNA, 15 bp, Homo sapiens
ccaaatcgaaaacaa

SEQ ID NO: 1154341 - DNA, 15 bp, Homo sapiens
accaaatcgaaaaca

SEQ ID NO: 1154342 - DNA, 15 bp, Homo sapiens
caccaaatcgaaaac

SEQ ID NO: 1154343 - DNA, 15 bp, Homo sapiens
gcaccaaatcgaaaa

SEQ ID NO: 1154344 - DNA, 15 bp, Homo sapiens
tgcaccaaatcgaaa

SEQ ID NO: 1154345 - DNA, 15 bp, Homo sapiens
atgcaccaaatcgaa

SEQ ID NO: 1154346 - DNA, 15 bp, Homo sapiens
tatgcaccaaatcga

SEQ ID NO: 1154347 - DNA, 15 bp, Homo sapiens
atatgcaccaaatcg

SEQ ID NO: 1154348 - DNA, 15 bp, Homo sapiens
gatatgcaccaaatc

SEQ ID NO: 1154349 - DNA, 15 bp, Homo sapiens
agatatgcaccaaat

SEQ ID NO: 1154350 - DNA, 15 bp, Homo sapiens
gagatatgcaccaaa

SEQ ID NO: 1154351 - DNA, 15 bp, Homo sapiens
tgagatatgcaccaa

SEQ ID NO: 1154352 - DNA, 15 bp, Homo sapiens
atgagatatgcacca

SEQ ID NO: 1154353 - DNA, 15 bp, Homo sapiens
aatgagatatgcacc

SEQ ID NO: 1154354 - DNA, 15 bp, Homo sapiens
caatgagatatgcac

SEQ ID NO: 1154355 - DNA, 15 bp, Homo sapiens
acaatgagatatgca

SEQ ID NO: 1154356 - DNA, 15 bp, Homo sapiens
cacaatgagatatgc

SEQ ID NO: 1154357 - DNA, 15 bp, Homo sapiens
tcacaatgagatatg

SEQ ID NO: 1154358 - DNA, 15 bp, Homo sapiens
ttcacaatgagatat

SEQ ID NO: 1154359 - DNA, 15 bp, Homo sapiens
attcacaatgagata

SEQ ID NO: 1154360 - DNA, 15 bp, Homo sapiens
cattcacaatgagat

SEQ ID NO: 1154361 - DNA, 15 bp, Homo sapiens
ccattcacaatgaga

SEQ ID NO: 1154362 - DNA, 15 bp, Homo sapiens
tccattcacaatgag

SEQ ID NO: 1154363 - DNA, 15 bp, Homo sapiens
gtccattcacaatga

SEQ ID NO: 1154364 - DNA, 15 bp, Homo sapiens
tgtccattcacaatg

SEQ ID NO: 1154365 - DNA, 15 bp, Homo sapiens
atgtccattcacaat

SEQ ID NO: 1154366 - DNA, 15 bp, Homo sapiens
tatgtccattcacaa

SEQ ID NO: 1154367 - DNA, 15 bp, Homo sapiens
atatgtccattcaca

SEQ ID NO: 1154368 - DNA, 15 bp, Homo sapiens
catatgtccattcac

SEQ ID NO: 1154369 - DNA, 15 bp, Homo sapiens
gcatatgtccattca

SEQ ID NO: 1154370 - DNA, 15 bp, Homo sapiens
cgcatatgtccattc

SEQ ID NO: 1154371 - DNA, 15 bp, Homo sapiens
gcgcatatgtccatt

SEQ ID NO: 1154372 - DNA, 15 bp, Homo sapiens
agcgcatatgtccat

SEQ ID NO: 1154373 - DNA, 15 bp, Homo sapiens
aagcgcatatgtcca

SEQ ID NO: 1154374 - DNA, 15 bp, Homo sapiens
gaagcgcatatgtcc

SEQ ID NO: 1154375 - DNA, 15 bp, Homo sapiens
tgaagcgcatatgtc

SEQ ID NO: 1154376 - DNA, 15 bp, Homo sapiens
ctgaagcgcatatgt

SEQ ID NO: 1154377 - DNA, 15 bp, Homo sapiens
tctgaagcgcatatg

SEQ ID NO: 1154378 - DNA, 15 bp, Homo sapiens
ctctgaagcgcatat

SEQ ID NO: 1154379 - DNA, 15 bp, Homo sapiens
tctctgaagcgcata

SEQ ID NO: 1154380 - DNA, 15 bp, Homo sapiens
atctctgaagcgcat

SEQ ID NO: 1154381 - DNA, 15 bp, Homo sapiens
catctctgaagcgca

SEQ ID NO: 1154382 - DNA, 15 bp, Homo sapiens
acatctctgaagcgc

SEQ ID NO: 1154383 - DNA, 15 bp, Homo sapiens
aacatctctgaagcg

SEQ ID NO: 1154384 - DNA, 15 bp, Homo sapiens
taacatctctgaagc

SEQ ID NO: 1154385 - DNA, 15 bp, Homo sapiens
ataacatctctgaag

SEQ ID NO: 1154386 - DNA, 15 bp, Homo sapiens
aataacatctctgaa

SEQ ID NO: 1154387 - DNA, 15 bp, Homo sapiens
gaataacatctctga

SEQ ID NO: 1154388 - DNA, 15 bp, Homo sapiens
agaataacatctctg

SEQ ID NO: 1154389 - DNA, 15 bp, Homo sapiens
cagaataacatctct

SEQ ID NO: 1154390 - DNA, 15 bp, Homo sapiens
acagaataacatctc

SEQ ID NO: 1154391 - DNA, 15 bp, Homo sapiens
tacagaataacatct

SEQ ID NO: 1154392 - DNA, 15 bp, Homo sapiens
ttacagaataacatc

SEQ ID NO: 1154393 - DNA, 15 bp, Homo sapiens
cttacagaataacat

SEQ ID NO: 1154394 - DNA, 15 bp, Homo sapiens
acttacagaataaca

SEQ ID NO: 1154395 - DNA, 15 bp, Homo sapiens
tacttacagaataac

SEQ ID NO: 1154396 - DNA, 15 bp, Homo sapiens
ctacttacagaataa

SEQ ID NO: 1154397 - DNA, 15 bp, Homo sapiens
gctacttacagaata

SEQ ID NO: 1154398 - DNA, 15 bp, Homo sapiens
agctacttacagaat

SEQ ID NO: 1154399 - DNA, 15 bp, Homo sapiens
aagctacttacagaa

SEQ ID NO: 1154400 - DNA, 15 bp, Homo sapiens
aaagctacttacaga

SEQ ID NO: 1154401 - DNA, 15 bp, Homo sapiens
taaagctacttacag

SEQ ID NO: 1154402 - DNA, 15 bp, Homo sapiens
ctaaagctacttaca

SEQ ID NO: 1154403 - DNA, 15 bp, Homo sapiens
tctaaagctacttac

SEQ ID NO: 1154404 - DNA, 15 bp, Homo sapiens
ttctaaagctactta

SEQ ID NO: 1154405 - DNA, 15 bp, Homo sapiens
tttctaaagctactt

SEQ ID NO: 1154406 - DNA, 15 bp, Homo sapiens
atttctaaagctact

SEQ ID NO: 1154407 - DNA, 15 bp, Homo sapiens
tatttctaaagctac

SEQ ID NO: 1154408 - DNA, 15 bp, Homo sapiens
atatttctaaagcta

SEQ ID NO: 1154409 - DNA, 15 bp, Homo sapiens
aatatttctaaagct

SEQ ID NO: 1154410 - DNA, 15 bp, Homo sapiens
taatatttctaaagc

SEQ ID NO: 1154411 - DNA, 15 bp, Homo sapiens
ttaatatttctaaag

SEQ ID NO: 1154412 - DNA, 15 bp, Homo sapiens
cttaatatttctaaa

SEQ ID NO: 1154413 - DNA, 15 bp, Homo sapiens
tcttaatatttctaa

SEQ ID NO: 1154414 - DNA, 15 bp, Homo sapiens
atcttaatatttcta

SEQ ID NO: 1154415 - DNA, 15 bp, Homo sapiens
aatcttaatatttct

SEQ ID NO: 1154416 - DNA, 15 bp, Homo sapiens
taatcttaatatttc

SEQ ID NO: 1154417 - DNA, 15 bp, Homo sapiens
ataatcttaatattt

SEQ ID NO: 1154418 - DNA, 15 bp, Homo sapiens
aataatcttaatatt

SEQ ID NO: 1154419 - DNA, 15 bp, Homo sapiens
gaataatcttaatat

SEQ ID NO: 1154420 - DNA, 15 bp, Homo sapiens
agaataatcttaata

SEQ ID NO: 1154421 - DNA, 15 bp, Homo sapiens
tagaataatcttaat

SEQ ID NO: 1154422 - DNA, 15 bp, Homo sapiens
atagaataatcttaa

SEQ ID NO: 1154423 - DNA, 15 bp, Homo sapiens
tatagaataatctta

SEQ ID NO: 1154424 - DNA, 15 bp, Homo sapiens
ttatagaataatctt

SEQ ID NO: 1154425 - DNA, 15 bp, Homo sapiens
attatagaataatct

SEQ ID NO: 1154426 - DNA, 15 bp, Homo sapiens
tattatagaataatc

SEQ ID NO: 1154427 - DNA, 15 bp, Homo sapiens
ttattatagaataat

SEQ ID NO: 1154428 - DNA, 15 bp, Homo sapiens
cttattatagaataa

SEQ ID NO: 1154429 - DNA, 15 bp, Homo sapiens
ccttattatagaata

SEQ ID NO: 1154430 - DNA, 15 bp, Homo sapiens
accttattatagaat

SEQ ID NO: 1154431 - DNA, 15 bp, Homo sapiens
aaccttattatagaa

SEQ ID NO: 1154432 - DNA, 15 bp, Homo sapiens
aaaccttattataga

SEQ ID NO: 1154433 - DNA, 15 bp, Homo sapiens
aaaaccttattatag

SEQ ID NO: 1154434 - DNA, 15 bp, Homo sapiens
taaaaccttattata

SEQ ID NO: 1154435 - DNA, 15 bp, Homo sapiens
ctaaaaccttattat

SEQ ID NO: 1154436 - DNA, 15 bp, Homo sapiens
actaaaaccttatta

SEQ ID NO: 1154437 - DNA, 15 bp, Homo sapiens
tactaaaaccttatt

SEQ ID NO: 1154438 - DNA, 15 bp, Homo sapiens
ctactaaaaccttat

SEQ ID NO: 1154439 - DNA, 15 bp, Homo sapiens
cctactaaaacctta

SEQ ID NO: 1154440 - DNA, 15 bp, Homo sapiens
acctactaaaacctt

SEQ ID NO: 1154441 - DNA, 15 bp, Homo sapiens
aacctactaaaacct

SEQ ID NO: 1154442 - DNA, 15 bp, Homo sapiens
aaacctactaaaacc

SEQ ID NO: 1154443 - DNA, 15 bp, Homo sapiens
taaacctactaaaac

SEQ ID NO: 1154444 - DNA, 15 bp, Homo sapiens
ataaacctactaaaa

SEQ ID NO: 1154445 - DNA, 15 bp, Homo sapiens
cataaacctactaaa

SEQ ID NO: 1154446 - DNA, 15 bp, Homo sapiens
gcataaacctactaa

SEQ ID NO: 1154447 - DNA, 15 bp, Homo sapiens
tgcataaacctacta

SEQ ID NO: 1154448 - DNA, 15 bp, Homo sapiens
ttgcataaacctact

SEQ ID NO: 1154449 - DNA, 15 bp, Homo sapiens
tttgcataaacctac

SEQ ID NO: 1154450 - DNA, 15 bp, Homo sapiens
ttttgcataaaccta

SEQ ID NO: 1154451 - DNA, 15 bp, Homo sapiens
cttttgcataaacct

SEQ ID NO: 1154452 - DNA, 15 bp, Homo sapiens
acttttgcataaacc

SEQ ID NO: 1154453 - DNA, 15 bp, Homo sapiens
aacttttgcataaac

SEQ ID NO: 1154454 - DNA, 15 bp, Homo sapiens
aaacttttgcataaa

SEQ ID NO: 1154455 - DNA, 15 bp, Homo sapiens
taaacttttgcataa

SEQ ID NO: 1154456 - DNA, 15 bp, Homo sapiens
ctaaacttttgcata

SEQ ID NO: 1154457 - DNA, 15 bp, Homo sapiens
tctaaacttttgcat

SEQ ID NO: 1154458 - DNA, 15 bp, Homo sapiens
ctctaaacttttgca

SEQ ID NO: 1154459 - DNA, 15 bp, Homo sapiens
actctaaacttttgc

SEQ ID NO: 1154460 - DNA, 15 bp, Homo sapiens
tactctaaacttttg

SEQ ID NO: 1154461 - DNA, 15 bp, Homo sapiens
ctactctaaactttt

SEQ ID NO: 1154462 - DNA, 15 bp, Homo sapiens
cctactctaaacttt

SEQ ID NO: 1154463 - DNA, 15 bp, Homo sapiens
tcctactctaaactt

SEQ ID NO: 1154464 - DNA, 15 bp, Homo sapiens
ttcctactctaaact

SEQ ID NO: 1154465 - DNA, 15 bp, Homo sapiens
tttcctactctaaac

SEQ ID NO: 1154466 - DNA, 15 bp, Homo sapiens
ttttcctactctaaa

SEQ ID NO: 1154467 - DNA, 15 bp, Homo sapiens
tttttcctactctaa

SEQ ID NO: 1154468 - DNA, 15 bp, Homo sapiens
ttttttcctactcta

SEQ ID NO: 1154469 - DNA, 15 bp, Homo sapiens
tttttttcctactct

SEQ ID NO: 1154470 - DNA, 15 bp, Homo sapiens
atttttttcctactc

SEQ ID NO: 1154471 - DNA, 15 bp, Homo sapiens
catttttttcctact

SEQ ID NO: 1154472 - DNA, 15 bp, Homo sapiens
tcatttttttcctac

SEQ ID NO: 1154473 - DNA, 15 bp, Homo sapiens
gtcatttttttccta

SEQ ID NO: 1154474 - DNA, 15 bp, Homo sapiens
agtcatttttttcct

SEQ ID NO: 1154475 - DNA, 15 bp, Homo sapiens
gagtcatttttttcc

SEQ ID NO: 1154476 - DNA, 15 bp, Homo sapiens
ggagtcatttttttc

SEQ ID NO: 1154477 - DNA, 15 bp, Homo sapiens
aggagtcattttttt

SEQ ID NO: 1154478 - DNA, 15 bp, Homo sapiens
caggagtcatttttt

SEQ ID NO: 1154479 - DNA, 15 bp, Homo sapiens
acaggagtcattttt

SEQ ID NO: 1154480 - DNA, 15 bp, Homo sapiens
cacaggagtcatttt

SEQ ID NO: 1154481 - DNA, 15 bp, Homo sapiens
acacaggagtcattt

SEQ ID NO: 1154482 - DNA, 15 bp, Homo sapiens
gacacaggagtcatt

SEQ ID NO: 1154483 - DNA, 15 bp, Homo sapiens
ggacacaggagtcat

SEQ ID NO: 1154484 - DNA, 15 bp, Homo sapiens
tggacacaggagtca

SEQ ID NO: 1154485 - DNA, 15 bp, Homo sapiens
ttggacacaggagtc

SEQ ID NO: 1154486 - DNA, 15 bp, Homo sapiens
tttggacacaggagt

SEQ ID NO: 1154487 - DNA, 15 bp, Homo sapiens
ctttggacacaggag

SEQ ID NO: 1154488 - DNA, 15 bp, Homo sapiens
tctttggacacagga

SEQ ID NO: 1154489 - DNA, 15 bp, Homo sapiens
atctttggacacagg

SEQ ID NO: 1154490 - DNA, 15 bp, Homo sapiens
catctttggacacag

SEQ ID NO: 1154491 - DNA, 15 bp, Homo sapiens
tcatctttggacaca

SEQ ID NO: 1154492 - DNA, 15 bp, Homo sapiens
ctcatctttggacac

SEQ ID NO: 1154493 - DNA, 15 bp, Homo sapiens
cctcatctttggaca

SEQ ID NO: 1154494 - DNA, 15 bp, Homo sapiens
acctcatctttggac

SEQ ID NO: 1154495 - DNA, 15 bp, Homo sapiens
gacctcatctttgga

SEQ ID NO: 1154496 - DNA, 15 bp, Homo sapiens
tgacctcatctttgg

SEQ ID NO: 1154497 - DNA, 15 bp, Homo sapiens
ctgacctcatctttg

SEQ ID NO: 1154498 - DNA, 15 bp, Homo sapiens
cctgacctcatcttt

SEQ ID NO: 1154499 - DNA, 15 bp, Homo sapiens
ccctgacctcatctt

SEQ ID NO: 1154500 - DNA, 15 bp, Homo sapiens
tccctgacctcatct

SEQ ID NO: 1154501 - DNA, 15 bp, Homo sapiens
atccctgacctcatc

SEQ ID NO: 1154502 - DNA, 15 bp, Homo sapiens
aatccctgacctcat

SEQ ID NO: 1154503 - DNA, 15 bp, Homo sapiens
aaatccctgacctca

SEQ ID NO: 1154504 - DNA, 15 bp, Homo sapiens
taaatccctgacctc

SEQ ID NO: 1154505 - DNA, 15 bp, Homo sapiens
ttaaatccctgacct

SEQ ID NO: 1154506 - DNA, 15 bp, Homo sapiens
tttaaatccctgacc

SEQ ID NO: 1154507 - DNA, 15 bp, Homo sapiens
atttaaatccctgac

SEQ ID NO: 1154508 - DNA, 15 bp, Homo sapiens
aatttaaatccctga

SEQ ID NO: 1154509 - DNA, 15 bp, Homo sapiens
aaatttaaatccctg

SEQ ID NO: 1154510 - DNA, 15 bp, Homo sapiens
taaatttaaatccct

SEQ ID NO: 1154511 - DNA, 15 bp, Homo sapiens
gtaaatttaaatccc

SEQ ID NO: 1154512 - DNA, 15 bp, Homo sapiens
ggtaaatttaaatcc

SEQ ID NO: 1154513 - DNA, 15 bp, Homo sapiens
tggtaaatttaaatc

SEQ ID NO: 1154514 - DNA, 15 bp, Homo sapiens
gtggtaaatttaaat

SEQ ID NO: 1154515 - DNA, 15 bp, Homo sapiens
tgtggtaaatttaaa

SEQ ID NO: 1154516 - DNA, 15 bp, Homo sapiens
ctgtggtaaatttaa

SEQ ID NO: 1154517 - DNA, 15 bp, Homo sapiens
actgtggtaaattta

SEQ ID NO: 1154518 - DNA, 15 bp, Homo sapiens
aactgtggtaaattt

SEQ ID NO: 1154519 - DNA, 15 bp, Homo sapiens
aaactgtggtaaatt

SEQ ID NO: 1154520 - DNA, 15 bp, Homo sapiens
gaaactgtggtaaat

SEQ ID NO: 1154521 - DNA, 15 bp, Homo sapiens
ggaaactgtggtaaa

SEQ ID NO: 1154522 - DNA, 15 bp, Homo sapiens
tggaaactgtggtaa

SEQ ID NO: 1154523 - DNA, 15 bp, Homo sapiens
atggaaactgtggta

SEQ ID NO: 1154524 - DNA, 15 bp, Homo sapiens
gatggaaactgtggt

SEQ ID NO: 1154525 - DNA, 15 bp, Homo sapiens
ggatggaaactgtgg

SEQ ID NO: 1154526 - DNA, 15 bp, Homo sapiens
aggatggaaactgtg

SEQ ID NO: 1154527 - DNA, 15 bp, Homo sapiens
caggatggaaactgt

SEQ ID NO: 1154528 - DNA, 15 bp, Homo sapiens
ccaggatggaaactg

SEQ ID NO: 1154529 - DNA, 15 bp, Homo sapiens
gccaggatggaaact

SEQ ID NO: 1154530 - DNA, 15 bp, Homo sapiens
tgccaggatggaaac

SEQ ID NO: 1154531 - DNA, 15 bp, Homo sapiens
ctgccaggatggaaa

SEQ ID NO: 1154532 - DNA, 15 bp, Homo sapiens
cctgccaggatggaa

SEQ ID NO: 1154533 - DNA, 15 bp, Homo sapiens
gcctgccaggatgga

SEQ ID NO: 1154534 - DNA, 15 bp, Homo sapiens
tgcctgccaggatgg

SEQ ID NO: 1154535 - DNA, 15 bp, Homo sapiens
gtgcctgccaggatg

SEQ ID NO: 1154536 - DNA, 15 bp, Homo sapiens
tgtgcctgccaggat

SEQ ID NO: 1154537 - DNA, 15 bp, Homo sapiens
ctgtgcctgccagga

SEQ ID NO: 1154538 - DNA, 15 bp, Homo sapiens
tctgtgcctgccagg

SEQ ID NO: 1154539 - DNA, 15 bp, Homo sapiens
ctctgtgcctgccag

SEQ ID NO: 1154540 - DNA, 15 bp, Homo sapiens
tctctgtgcctgcca

SEQ ID NO: 1154541 - DNA, 15 bp, Homo sapiens
atctctgtgcctgcc

SEQ ID NO: 1154542 - DNA, 15 bp, Homo sapiens
gatctctgtgcctgc

SEQ ID NO: 1154543 - DNA, 15 bp, Homo sapiens
agatctctgtgcctg

SEQ ID NO: 1154544 - DNA, 15 bp, Homo sapiens
cagatctctgtgcct

SEQ ID NO: 1154545 - DNA, 15 bp, Homo sapiens
tcagatctctgtgcc

SEQ ID NO: 1154546 - DNA, 15 bp, Homo sapiens
atcagatctctgtgc

SEQ ID NO: 1154547 - DNA, 15 bp, Homo sapiens
gatcagatctctgtg

SEQ ID NO: 1154548 - DNA, 15 bp, Homo sapiens
agatcagatctctgt

SEQ ID NO: 1154549 - DNA, 15 bp, Homo sapiens
aagatcagatctctg

SEQ ID NO: 1154550 - DNA, 15 bp, Homo sapiens
caagatcagatctct

SEQ ID NO: 1154551 - DNA, 15 bp, Homo sapiens
acaagatcagatctc

SEQ ID NO: 1154552 - DNA, 15 bp, Homo sapiens
aacaagatcagatct

SEQ ID NO: 1154553 - DNA, 15 bp, Homo sapiens
taacaagatcagatc

SEQ ID NO: 1154554 - DNA, 15 bp, Homo sapiens
ttaacaagatcagat

SEQ ID NO: 1154555 - DNA, 15 bp, Homo sapiens
attaacaagatcaga

SEQ ID NO: 1154556 - DNA, 15 bp, Homo sapiens
tattaacaagatcag

SEQ ID NO: 1154557 - DNA, 15 bp, Homo sapiens
gtattaacaagatca

SEQ ID NO: 1154558 - DNA, 15 bp, Homo sapiens
agtattaacaagatc

SEQ ID NO: 1154559 - DNA, 15 bp, Homo sapiens
gagtattaacaagat

SEQ ID NO: 1154560 - DNA, 15 bp, Homo sapiens
ggagtattaacaaga

SEQ ID NO: 1154561 - DNA, 15 bp, Homo sapiens
tggagtattaacaag

SEQ ID NO: 1154562 - DNA, 15 bp, Homo sapiens
ttggagtattaacaa

SEQ ID NO: 1154563 - DNA, 15 bp, Homo sapiens
cttggagtattaaca

SEQ ID NO: 1154564 - DNA, 15 bp, Homo sapiens
acttggagtattaac

SEQ ID NO: 1154565 - DNA, 15 bp, Homo sapiens
cacttggagtattaa

SEQ ID NO: 1154566 - DNA, 15 bp, Homo sapiens
gcacttggagtatta

SEQ ID NO: 1154567 - DNA, 15 bp, Homo sapiens
tgcacttggagtatt

SEQ ID NO: 1154568 - DNA, 15 bp, Homo sapiens
ctgcacttggagtat

SEQ ID NO: 1154569 - DNA, 15 bp, Homo sapiens
actgcacttggagta

SEQ ID NO: 1154570 - DNA, 15 bp, Homo sapiens
aactgcacttggagt

SEQ ID NO: 1154571 - DNA, 15 bp, Homo sapiens
aaactgcacttggag

SEQ ID NO: 1154572 - DNA, 15 bp, Homo sapiens
gaaactgcacttgga

SEQ ID NO: 1154573 - DNA, 15 bp, Homo sapiens
tgaaactgcacttgg

SEQ ID NO: 1154574 - DNA, 15 bp, Homo sapiens
atgaaactgcacttg

SEQ ID NO: 1154575 - DNA, 15 bp, Homo sapiens
aatgaaactgcactt

SEQ ID NO: 1154576 - DNA, 15 bp, Homo sapiens
aaatgaaactgcact

SEQ ID NO: 1154577 - DNA, 15 bp, Homo sapiens
aaaatgaaactgcac

SEQ ID NO: 1154578 - DNA, 15 bp, Homo sapiens
caaaatgaaactgca

SEQ ID NO: 1154579 - DNA, 15 bp, Homo sapiens
gcaaaatgaaactgc

SEQ ID NO: 1154580 - DNA, 15 bp, Homo sapiens
cgcaaaatgaaactg

SEQ ID NO: 1154581 - DNA, 15 bp, Homo sapiens
ccgcaaaatgaaact

SEQ ID NO: 1154582 - DNA, 15 bp, Homo sapiens
cccgcaaaatgaaac

SEQ ID NO: 1154583 - DNA, 15 bp, Homo sapiens
gcccgcaaaatgaaa

SEQ ID NO: 1154584 - DNA, 15 bp, Homo sapiens
agcccgcaaaatgaa

SEQ ID NO: 1154585 - DNA, 15 bp, Homo sapiens
tagcccgcaaaatga

SEQ ID NO: 1154586 - DNA, 15 bp, Homo sapiens
gtagcccgcaaaatg

SEQ ID NO: 1154587 - DNA, 15 bp, Homo sapiens
tgtagcccgcaaaat

SEQ ID NO: 1154588 - DNA, 15 bp, Homo sapiens
ttgtagcccgcaaaa

SEQ ID NO: 1154589 - DNA, 15 bp, Homo sapiens
attgtagcccgcaaa

SEQ ID NO: 1154590 - DNA, 15 bp, Homo sapiens
aattgtagcccgcaa

SEQ ID NO: 1154591 - DNA, 15 bp, Homo sapiens
taattgtagcccgca

SEQ ID NO: 1154592 - DNA, 15 bp, Homo sapiens
ttaattgtagcccgc

SEQ ID NO: 1154593 - DNA, 15 bp, Homo sapiens
cttaattgtagcccg

SEQ ID NO: 1154594 - DNA, 15 bp, Homo sapiens
gcttaattgtagccc

SEQ ID NO: 1154595 - DNA, 15 bp, Homo sapiens
agcttaattgtagcc

SEQ ID NO: 1154596 - DNA, 15 bp, Homo sapiens
aagcttaattgtagc

SEQ ID NO: 1154597 - DNA, 15 bp, Homo sapiens
taagcttaattgtag

SEQ ID NO: 1154598 - DNA, 15 bp, Homo sapiens
ataagcttaattgta

SEQ ID NO: 1154599 - DNA, 15 bp, Homo sapiens
cataagcttaattgt

SEQ ID NO: 1154600 - DNA, 15 bp, Homo sapiens
tcataagcttaattg

SEQ ID NO: 1154601 - DNA, 15 bp, Homo sapiens
ttcataagcttaatt

SEQ ID NO: 1154602 - DNA, 15 bp, Homo sapiens
tttcataagcttaat

SEQ ID NO: 1154603 - DNA, 15 bp, Homo sapiens
ttttcataagcttaa

SEQ ID NO: 1154604 - DNA, 15 bp, Homo sapiens
attttcataagctta

SEQ ID NO: 1154605 - DNA, 15 bp, Homo sapiens
cattttcataagctt

SEQ ID NO: 1154606 - DNA, 15 bp, Homo sapiens
tcattttcataagct

SEQ ID NO: 1154607 - DNA, 15 bp, Homo sapiens
atcattttcataagc

SEQ ID NO: 1154608 - DNA, 15 bp, Homo sapiens
gatcattttcataag

SEQ ID NO: 1154609 - DNA, 15 bp, Homo sapiens
tgatcattttcataa

SEQ ID NO: 1154610 - DNA, 15 bp, Homo sapiens
ctgatcattttcata

SEQ ID NO: 1154611 - DNA, 15 bp, Homo sapiens
tctgatcattttcat

SEQ ID NO: 1154612 - DNA, 15 bp, Homo sapiens
ttctgatcattttca

SEQ ID NO: 1154613 - DNA, 15 bp, Homo sapiens
tttctgatcattttc

SEQ ID NO: 1154614 - DNA, 15 bp, Homo sapiens
ctttctgatcatttt

SEQ ID NO: 1154615 - DNA, 15 bp, Homo sapiens
gctttctgatcattt

SEQ ID NO: 1154616 - DNA, 15 bp, Homo sapiens
tgctttctgatcatt

SEQ ID NO: 1154617 - DNA, 15 bp, Homo sapiens
gtgctttctgatcat

SEQ ID NO: 1154618 - DNA, 15 bp, Homo sapiens
tgtgctttctgatca

SEQ ID NO: 1154619 - DNA, 15 bp, Homo sapiens
ctgtgctttctgatc

SEQ ID NO: 1154620 - DNA, 15 bp, Homo sapiens
actgtgctttctgat

SEQ ID NO: 1154621 - DNA, 15 bp, Homo sapiens
aactgtgctttctga

SEQ ID NO: 1154622 - DNA, 15 bp, Homo sapiens
aaactgtgctttctg

SEQ ID NO: 1154623 - DNA, 15 bp, Homo sapiens
aaaactgtgctttct

SEQ ID NO: 1154624 - DNA, 15 bp, Homo sapiens
taaaactgtgctttc

SEQ ID NO: 1154625 - DNA, 15 bp, Homo sapiens
ctaaaactgtgcttt

SEQ ID NO: 1154626 - DNA, 15 bp, Homo sapiens
actaaaactgtgctt

SEQ ID NO: 1154627 - DNA, 15 bp, Homo sapiens
aactaaaactgtgct

SEQ ID NO: 1154628 - DNA, 15 bp, Homo sapiens
caactaaaactgtgc

SEQ ID NO: 1154629 - DNA, 15 bp, Homo sapiens
acaactaaaactgtg

SEQ ID NO: 1154630 - DNA, 15 bp, Homo sapiens
tacaactaaaactgt

SEQ ID NO: 1154631 - DNA, 15 bp, Homo sapiens
gtacaactaaaactg

SEQ ID NO: 1154632 - DNA, 15 bp, Homo sapiens
tgtacaactaaaact

SEQ ID NO: 1154633 - DNA, 15 bp, Homo sapiens
atgtacaactaaaac

SEQ ID NO: 1154634 - DNA, 15 bp, Homo sapiens
tatgtacaactaaaa

SEQ ID NO: 1154635 - DNA, 15 bp, Homo sapiens
atatgtacaactaaa

SEQ ID NO: 1154636 - DNA, 15 bp, Homo sapiens
catatgtacaactaa

SEQ ID NO: 1154637 - DNA, 15 bp, Homo sapiens
tcatatgtacaacta

SEQ ID NO: 1154638 - DNA, 15 bp, Homo sapiens
atcatatgtacaact

SEQ ID NO: 1154639 - DNA, 15 bp, Homo sapiens
gatcatatgtacaac

SEQ ID NO: 1154640 - DNA, 15 bp, Homo sapiens
ggatcatatgtacaa

SEQ ID NO: 1154641 - DNA, 15 bp, Homo sapiens
aggatcatatgtaca

SEQ ID NO: 1154642 - DNA, 15 bp, Homo sapiens
caggatcatatgtac

SEQ ID NO: 1154643 - DNA, 15 bp, Homo sapiens
ccaggatcatatgta

SEQ ID NO: 1154644 - DNA, 15 bp, Homo sapiens
accaggatcatatgt

SEQ ID NO: 1154645 - DNA, 15 bp, Homo sapiens
gaccaggatcatatg

SEQ ID NO: 1154646 - DNA, 15 bp, Homo sapiens
tgaccaggatcatat

SEQ ID NO: 1154647 - DNA, 15 bp, Homo sapiens
ctgaccaggatcata

SEQ ID NO: 1154648 - DNA, 15 bp, Homo sapiens
cctgaccaggatcat

SEQ ID NO: 1154649 - DNA, 15 bp, Homo sapiens
tcctgaccaggatca

SEQ ID NO: 1154650 - DNA, 15 bp, Homo sapiens
atcctgaccaggatc

SEQ ID NO: 1154651 - DNA, 15 bp, Homo sapiens
catcctgaccaggat

SEQ ID NO: 1154652 - DNA, 15 bp, Homo sapiens
tcatcctgaccagga

SEQ ID NO: 1154653 - DNA, 15 bp, Homo sapiens
atcatcctgaccagg

SEQ ID NO: 1154654 - DNA, 15 bp, Homo sapiens
catcatcctgaccag

SEQ ID NO: 1154655 - DNA, 15 bp, Homo sapiens
gcatcatcctgacca

SEQ ID NO: 1154656 - DNA, 15 bp, Homo sapiens
tgcatcatcctgacc

SEQ ID NO: 1154657 - DNA, 15 bp, Homo sapiens
ttgcatcatcctgac

SEQ ID NO: 1154658 - DNA, 15 bp, Homo sapiens
tttgcatcatcctga

SEQ ID NO: 1154659 - DNA, 15 bp, Homo sapiens
atttgcatcatcctg

SEQ ID NO: 1154660 - DNA, 15 bp, Homo sapiens
aatttgcatcatcct

SEQ ID NO: 1154661 - DNA, 15 bp, Homo sapiens
aaatttgcatcatcc

SEQ ID NO: 1154662 - DNA, 15 bp, Homo sapiens
aaaatttgcatcatc

SEQ ID NO: 1154663 - DNA, 15 bp, Homo sapiens
gaaaatttgcatcat

SEQ ID NO: 1154664 - DNA, 15 bp, Homo sapiens
agaaaatttgcatca

SEQ ID NO: 1154665 - DNA, 15 bp, Homo sapiens
gagaaaatttgcatc

SEQ ID NO: 1154666 - DNA, 15 bp, Homo sapiens
tgagaaaatttgcat

SEQ ID NO: 1154667 - DNA, 15 bp, Homo sapiens
atgagaaaatttgca

SEQ ID NO: 1154668 - DNA, 15 bp, Homo sapiens
aatgagaaaatttgc

SEQ ID NO: 1154669 - DNA, 15 bp, Homo sapiens
taatgagaaaatttg

SEQ ID NO: 1154670 - DNA, 15 bp, Homo sapiens
ataatgagaaaattt

SEQ ID NO: 1154671 - DNA, 15 bp, Homo sapiens
tataatgagaaaatt

SEQ ID NO: 1154672 - DNA, 15 bp, Homo sapiens
ctataatgagaaaat

SEQ ID NO: 1154673 - DNA, 15 bp, Homo sapiens
tctataatgagaaaa

SEQ ID NO: 1154674 - DNA, 15 bp, Homo sapiens
ttctataatgagaaa

SEQ ID NO: 1154675 - DNA, 15 bp, Homo sapiens
attctataatgagaa

SEQ ID NO: 1154676 - DNA, 15 bp, Homo sapiens
tattctataatgaga

SEQ ID NO: 1154677 - DNA, 15 bp, Homo sapiens
atattctataatgag

SEQ ID NO: 1154678 - DNA, 15 bp, Homo sapiens
tatattctataatga

SEQ ID NO: 1154679 - DNA, 15 bp, Homo sapiens
ctatattctataatg

SEQ ID NO: 1154680 - DNA, 15 bp, Homo sapiens
cctatattctataat

SEQ ID NO: 1154681 - DNA, 15 bp, Homo sapiens
gcctatattctataa

SEQ ID NO: 1154682 - DNA, 15 bp, Homo sapiens
tgcctatattctata

SEQ ID NO: 1154683 - DNA, 15 bp, Homo sapiens
ctgcctatattctat

SEQ ID NO: 1154684 - DNA, 15 bp, Homo sapiens
tctgcctatattcta

SEQ ID NO: 1154685 - DNA, 15 bp, Homo sapiens
ttctgcctatattct

SEQ ID NO: 1154686 - DNA, 15 bp, Homo sapiens
tttctgcctatattc

SEQ ID NO: 1154687 - DNA, 15 bp, Homo sapiens
ttttctgcctatatt

SEQ ID NO: 1154688 - DNA, 15 bp, Homo sapiens
tttttctgcctatat

SEQ ID NO: 1154689 - DNA, 15 bp, Homo sapiens
ttttttctgcctata

SEQ ID NO: 1154690 - DNA, 15 bp, Homo sapiens
attttttctgcctat

SEQ ID NO: 1154691 - DNA, 15 bp, Homo sapiens
gattttttctgccta

SEQ ID NO: 1154692 - DNA, 15 bp, Homo sapiens
tgattttttctgcct

SEQ ID NO: 1154693 - DNA, 15 bp, Homo sapiens
atgattttttctgcc

SEQ ID NO: 1154694 - DNA, 15 bp, Homo sapiens
tatgattttttctgc

SEQ ID NO: 1154695 - DNA, 15 bp, Homo sapiens
ttatgattttttctg

SEQ ID NO: 1154696 - DNA, 15 bp, Homo sapiens
attatgattttttct

SEQ ID NO: 1154697 - DNA, 15 bp, Homo sapiens
aattatgattttttc

SEQ ID NO: 1154698 - DNA, 15 bp, Homo sapiens
taattatgatttttt

SEQ ID NO: 1154699 - DNA, 15 bp, Homo sapiens
ctaattatgattttt

SEQ ID NO: 1154700 - DNA, 15 bp, Homo sapiens
tctaattatgatttt

SEQ ID NO: 1154701 - DNA, 15 bp, Homo sapiens
ttctaattatgattt

SEQ ID NO: 1154702 - DNA, 15 bp, Homo sapiens
tttctaattatgatt

SEQ ID NO: 1154703 - DNA, 15 bp, Homo sapiens
ctttctaattatgat

SEQ ID NO: 1154704 - DNA, 15 bp, Homo sapiens
actttctaattatga

SEQ ID NO: 1154705 - DNA, 15 bp, Homo sapiens
aactttctaattatg

SEQ ID NO: 1154706 - DNA, 15 bp, Homo sapiens
caactttctaattat

SEQ ID NO: 1154707 - DNA, 15 bp, Homo sapiens
gcaactttctaatta

SEQ ID NO: 1154708 - DNA, 15 bp, Homo sapiens
agcaactttctaatt

SEQ ID NO: 1154709 - DNA, 15 bp, Homo sapiens
cagcaactttctaat

SEQ ID NO: 1154710 - DNA, 15 bp, Homo sapiens
ccagcaactttctaa

SEQ ID NO: 1154711 - DNA, 15 bp, Homo sapiens
accagcaactttcta

SEQ ID NO: 1154712 - DNA, 15 bp, Homo sapiens
caccagcaactttct

SEQ ID NO: 1154713 - DNA, 15 bp, Homo sapiens
tcaccagcaactttc

SEQ ID NO: 1154714 - DNA, 15 bp, Homo sapiens
gtcaccagcaacttt

SEQ ID NO: 1154715 - DNA, 15 bp, Homo sapiens
ggtcaccagcaactt

SEQ ID NO: 1154716 - DNA, 15 bp, Homo sapiens
tggtcaccagcaact

SEQ ID NO: 1154717 - DNA, 15 bp, Homo sapiens
atggtcaccagcaac

SEQ ID NO: 1154718 - DNA, 15 bp, Homo sapiens
catggtcaccagcaa

SEQ ID NO: 1154719 - DNA, 15 bp, Homo sapiens
ccatggtcaccagca

SEQ ID NO: 1154720 - DNA, 15 bp, Homo sapiens
tccatggtcaccagc

SEQ ID NO: 1154721 - DNA, 15 bp, Homo sapiens
gtccatggtcaccag

SEQ ID NO: 1154722 - DNA, 15 bp, Homo sapiens
agtccatggtcacca

SEQ ID NO: 1154723 - DNA, 15 bp, Homo sapiens
gagtccatggtcacc

SEQ ID NO: 1154724 - DNA, 15 bp, Homo sapiens
tgagtccatggtcac

SEQ ID NO: 1154725 - DNA, 15 bp, Homo sapiens
ttgagtccatggtca

SEQ ID NO: 1154726 - DNA, 15 bp, Homo sapiens
tttgagtccatggtc

SEQ ID NO: 1154727 - DNA, 15 bp, Homo sapiens
ttttgagtccatggt

SEQ ID NO: 1154728 - DNA, 15 bp, Homo sapiens
gttttgagtccatgg

SEQ ID NO: 1154729 - DNA, 15 bp, Homo sapiens
tgttttgagtccatg

SEQ ID NO: 1154730 - DNA, 15 bp, Homo sapiens
ctgttttgagtccat

SEQ ID NO: 1154731 - DNA, 15 bp, Homo sapiens
cctgttttgagtcca

SEQ ID NO: 1154732 - DNA, 15 bp, Homo sapiens
ccctgttttgagtcc

SEQ ID NO: 1154733 - DNA, 15 bp, Homo sapiens
accctgttttgagtc

SEQ ID NO: 1154734 - DNA, 15 bp, Homo sapiens
aaccctgttttgagt

SEQ ID NO: 1154735 - DNA, 15 bp, Homo sapiens
taaccctgttttgag

SEQ ID NO: 1154736 - DNA, 15 bp, Homo sapiens
ataaccctgttttga

SEQ ID NO: 1154737 - DNA, 15 bp, Homo sapiens
tataaccctgttttg

SEQ ID NO: 1154738 - DNA, 15 bp, Homo sapiens
atataaccctgtttt

SEQ ID NO: 1154739 - DNA, 15 bp, Homo sapiens
tatataaccctgttt

SEQ ID NO: 1154740 - DNA, 15 bp, Homo sapiens
ctatataaccctgtt

SEQ ID NO: 1154741 - DNA, 15 bp, Homo sapiens
gctatataaccctgt

SEQ ID NO: 1154742 - DNA, 15 bp, Homo sapiens
agctatataaccctg

SEQ ID NO: 1154743 - DNA, 15 bp, Homo sapiens
aagctatataaccct

SEQ ID NO: 1154744 - DNA, 15 bp, Homo sapiens
taagctatataaccc

SEQ ID NO: 1154745 - DNA, 15 bp, Homo sapiens
gtaagctatataacc

SEQ ID NO: 1154746 - DNA, 15 bp, Homo sapiens
agtaagctatataac

SEQ ID NO: 1154747 - DNA, 15 bp, Homo sapiens
tagtaagctatataa

SEQ ID NO: 1154748 - DNA, 15 bp, Homo sapiens
atagtaagctatata

SEQ ID NO: 1154749 - DNA, 15 bp, Homo sapiens
aatagtaagctatat

SEQ ID NO: 1154750 - DNA, 15 bp, Homo sapiens
taatagtaagctata

SEQ ID NO: 1154751 - DNA, 15 bp, Homo sapiens
ataatagtaagctat

SEQ ID NO: 1154752 - DNA, 15 bp, Homo sapiens
gataatagtaagcta

SEQ ID NO: 1154753 - DNA, 15 bp, Homo sapiens
agataatagtaagct

SEQ ID NO: 1154754 - DNA, 15 bp, Homo sapiens
tagataatagtaagc

SEQ ID NO: 1154755 - DNA, 15 bp, Homo sapiens
gtagataatagtaag

SEQ ID NO: 1154756 - DNA, 15 bp, Homo sapiens
tgtagataatagtaa

SEQ ID NO: 1154757 - DNA, 15 bp, Homo sapiens
ttgtagataatagta

SEQ ID NO: 1154758 - DNA, 15 bp, Homo sapiens
gttgtagataatagt

SEQ ID NO: 1154759 - DNA, 15 bp, Homo sapiens
ggttgtagataatag

SEQ ID NO: 1154760 - DNA, 15 bp, Homo sapiens
tggttgtagataata

SEQ ID NO: 1154761 - DNA, 15 bp, Homo sapiens
ttggttgtagataat

SEQ ID NO: 1154762 - DNA, 15 bp, Homo sapiens
tttggttgtagataa

SEQ ID NO: 1154763 - DNA, 15 bp, Homo sapiens
ttttggttgtagata

SEQ ID NO: 1154764 - DNA, 15 bp, Homo sapiens
gttttggttgtagat

SEQ ID NO: 1154765 - DNA, 15 bp, Homo sapiens
tgttttggttgtaga

SEQ ID NO: 1154766 - DNA, 15 bp, Homo sapiens
atgttttggttgtag

SEQ ID NO: 1154767 - DNA, 15 bp, Homo sapiens
catgttttggttgta

SEQ ID NO: 1154768 - DNA, 15 bp, Homo sapiens
ccatgttttggttgt

SEQ ID NO: 1154769 - DNA, 15 bp, Homo sapiens
gccatgttttggttg

SEQ ID NO: 1154770 - DNA, 15 bp, Homo sapiens
ggccatgttttggtt

SEQ ID NO: 1154771 - DNA, 15 bp, Homo sapiens
aggccatgttttggt

SEQ ID NO: 1154772 - DNA, 15 bp, Homo sapiens
caggccatgttttgg

SEQ ID NO: 1154773 - DNA, 15 bp, Homo sapiens
ccaggccatgttttg

SEQ ID NO: 1154774 - DNA, 15 bp, Homo sapiens
tccaggccatgtttt

SEQ ID NO: 1154775 - DNA, 15 bp, Homo sapiens
ttccaggccatgttt

SEQ ID NO: 1154776 - DNA, 15 bp, Homo sapiens
tttccaggccatgtt

SEQ ID NO: 1154777 - DNA, 15 bp, Homo sapiens
ttttccaggccatgt

SEQ ID NO: 1154778 - DNA, 15 bp, Homo sapiens
gttttccaggccatg

SEQ ID NO: 1154779 - DNA, 15 bp, Homo sapiens
tgttttccaggccat

SEQ ID NO: 1154780 - DNA, 15 bp, Homo sapiens
ttgttttccaggcca

SEQ ID NO: 1154781 - DNA, 15 bp, Homo sapiens
cttgttttccaggcc

SEQ ID NO: 1154782 - DNA, 15 bp, Homo sapiens
tcttgttttccaggc

SEQ ID NO: 1154783 - DNA, 15 bp, Homo sapiens
atcttgttttccagg

SEQ ID NO: 1154784 - DNA, 15 bp, Homo sapiens
catcttgttttccag

SEQ ID NO: 1154785 - DNA, 15 bp, Homo sapiens
ccatcttgttttcca

SEQ ID NO: 1154786 - DNA, 15 bp, Homo sapiens
cccatcttgttttcc

SEQ ID NO: 1154787 - DNA, 15 bp, Homo sapiens
tcccatcttgttttc

SEQ ID NO: 1154788 - DNA, 15 bp, Homo sapiens
ttcccatcttgtttt

SEQ ID NO: 1154789 - DNA, 15 bp, Homo sapiens
attcccatcttgttt

SEQ ID NO: 1154790 - DNA, 15 bp, Homo sapiens
tattcccatcttgtt

SEQ ID NO: 1154791 - DNA, 15 bp, Homo sapiens
gtattcccatcttgt

SEQ ID NO: 1154792 - DNA, 15 bp, Homo sapiens
agtattcccatcttg

SEQ ID NO: 1154793 - DNA, 15 bp, Homo sapiens
aagtattcccatctt

SEQ ID NO: 1154794 - DNA, 15 bp, Homo sapiens
caagtattcccatct

SEQ ID NO: 1154795 - DNA, 15 bp, Homo sapiens
acaagtattcccatc

SEQ ID NO: 1154796 - DNA, 15 bp, Homo sapiens
aacaagtattcccat

SEQ ID NO: 1154797 - DNA, 15 bp, Homo sapiens
caacaagtattccca

SEQ ID NO: 1154798 - DNA, 15 bp, Homo sapiens
ccaacaagtattccc

SEQ ID NO: 1154799 - DNA, 15 bp, Homo sapiens
tccaacaagtattcc

SEQ ID NO: 1154800 - DNA, 15 bp, Homo sapiens
ttccaacaagtattc

SEQ ID NO: 1154801 - DNA, 15 bp, Homo sapiens
cttccaacaagtatt

SEQ ID NO: 1154802 - DNA, 15 bp, Homo sapiens
acttccaacaagtat

SEQ ID NO: 1154803 - DNA, 15 bp, Homo sapiens
gacttccaacaagta

SEQ ID NO: 1154804 - DNA, 15 bp, Homo sapiens
agacttccaacaagt

SEQ ID NO: 1154805 - DNA, 15 bp, Homo sapiens
cagacttccaacaag

SEQ ID NO: 1154806 - DNA, 15 bp, Homo sapiens
ccagacttccaacaa

SEQ ID NO: 1154807 - DNA, 15 bp, Homo sapiens
gccagacttccaaca

SEQ ID NO: 1154808 - DNA, 15 bp, Homo sapiens
tgccagacttccaac

SEQ ID NO: 1154809 - DNA, 15 bp, Homo sapiens
ttgccagacttccaa

SEQ ID NO: 1154810 - DNA, 15 bp, Homo sapiens
tttgccagacttcca

SEQ ID NO: 1154811 - DNA, 15 bp, Homo sapiens
ctttgccagacttcc

SEQ ID NO: 1154812 - DNA, 15 bp, Homo sapiens
cctttgccagacttc

SEQ ID NO: 1154813 - DNA, 15 bp, Homo sapiens
gcctttgccagactt

SEQ ID NO: 1154814 - DNA, 15 bp, Homo sapiens
tgcctttgccagact

SEQ ID NO: 1154815 - DNA, 15 bp, Homo sapiens
gtgcctttgccagac

SEQ ID NO: 1154816 - DNA, 15 bp, Homo sapiens
agtgcctttgccaga

SEQ ID NO: 1154817 - DNA, 15 bp, Homo sapiens
gagtgcctttgccag

SEQ ID NO: 1154818 - DNA, 15 bp, Homo sapiens
agagtgcctttgcca

SEQ ID NO: 1154819 - DNA, 15 bp, Homo sapiens
gagagtgcctttgcc

SEQ ID NO: 1154820 - DNA, 15 bp, Homo sapiens
agagagtgcctttgc

SEQ ID NO: 1154821 - DNA, 15 bp, Homo sapiens
gagagagtgcctttg

SEQ ID NO: 1154822 - DNA, 15 bp, Homo sapiens
ggagagagtgccttt

SEQ ID NO: 1154823 - DNA, 15 bp, Homo sapiens
gggagagagtgcctt

SEQ ID NO: 1154824 - DNA, 15 bp, Homo sapiens
agggagagagtgcct

SEQ ID NO: 1154825 - DNA, 15 bp, Homo sapiens
tagggagagagtgcc

SEQ ID NO: 1154826 - DNA, 15 bp, Homo sapiens
ttagggagagagtgc

SEQ ID NO: 1154827 - DNA, 15 bp, Homo sapiens
gttagggagagagtg

SEQ ID NO: 1154828 - DNA, 15 bp, Homo sapiens
ggttagggagagagt

SEQ ID NO: 1154829 - DNA, 15 bp, Homo sapiens
tggttagggagagag

SEQ ID NO: 1154830 - DNA, 15 bp, Homo sapiens
ctggttagggagaga

SEQ ID NO: 1154831 - DNA, 15 bp, Homo sapiens
cctggttagggagag

SEQ ID NO: 1154832 - DNA, 15 bp, Homo sapiens
gcctggttagggaga

SEQ ID NO: 1154833 - DNA, 15 bp, Homo sapiens
ggcctggttagggag

SEQ ID NO: 1154834 - DNA, 15 bp, Homo sapiens
aggcctggttaggga

SEQ ID NO: 1154835 - DNA, 15 bp, Homo sapiens
caggcctggttaggg

SEQ ID NO: 1154836 - DNA, 15 bp, Homo sapiens
tcaggcctggttagg

SEQ ID NO: 1154837 - DNA, 15 bp, Homo sapiens
ctcaggcctggttag

SEQ ID NO: 1154838 - DNA, 15 bp, Homo sapiens
tctcaggcctggtta

SEQ ID NO: 1154839 - DNA, 15 bp, Homo sapiens
atctcaggcctggtt

SEQ ID NO: 1154840 - DNA, 15 bp, Homo sapiens
catctcaggcctggt

SEQ ID NO: 1154841 - DNA, 15 bp, Homo sapiens
tcatctcaggcctgg

SEQ ID NO: 1154842 - DNA, 15 bp, Homo sapiens
ctcatctcaggcctg

SEQ ID NO: 1154843 - DNA, 15 bp, Homo sapiens
tctcatctcaggcct

SEQ ID NO: 1154844 - DNA, 15 bp, Homo sapiens
gtctcatctcaggcc

SEQ ID NO: 1154845 - DNA, 15 bp, Homo sapiens
tgtctcatctcaggc

SEQ ID NO: 1154846 - DNA, 15 bp, Homo sapiens
ctgtctcatctcagg

SEQ ID NO: 1154847 - DNA, 15 bp, Homo sapiens
gctgtctcatctcag

SEQ ID NO: 1154848 - DNA, 15 bp, Homo sapiens
ggctgtctcatctca

SEQ ID NO: 1154849 - DNA, 15 bp, Homo sapiens
gggctgtctcatctc

SEQ ID NO: 1154850 - DNA, 15 bp, Homo sapiens
agggctgtctcatct

SEQ ID NO: 1154851 - DNA, 15 bp, Homo sapiens
cagggctgtctcatc

SEQ ID NO: 1154852 - DNA, 15 bp, Homo sapiens
gcagggctgtctcat

SEQ ID NO: 1154853 - DNA, 15 bp, Homo sapiens
ggcagggctgtctca

SEQ ID NO: 1154854 - DNA, 15 bp, Homo sapiens
tggcagggctgtctc

SEQ ID NO: 1154855 - DNA, 15 bp, Homo sapiens
ttggcagggctgtct

SEQ ID NO: 1154856 - DNA, 15 bp, Homo sapiens
gttggcagggctgtc

SEQ ID NO: 1154857 - DNA, 15 bp, Homo sapiens
tgttggcagggctgt

SEQ ID NO: 1154858 - DNA, 15 bp, Homo sapiens
aatgttggcagggct

SEQ ID NO: 1154859 - DNA, 15 bp, Homo sapiens
aaatgttggcagggc

SEQ ID NO: 1154860 - DNA, 15 bp, Homo sapiens
caaatgttggcaggg

SEQ ID NO: 1154861 - DNA, 15 bp, Homo sapiens
gcaaatgttggcagg

SEQ ID NO: 1154862 - DNA, 15 bp, Homo sapiens
ggcaaatgttggcag

SEQ ID NO: 1154863 - DNA, 15 bp, Homo sapiens
aggcaaatgttggca

SEQ ID NO: 1154864 - DNA, 15 bp, Homo sapiens
gaggcaaatgttggc

SEQ ID NO: 1154865 - DNA, 15 bp, Homo sapiens
agaggcaaatgttgg

SEQ ID NO: 1154866 - DNA, 15 bp, Homo sapiens
gagaggcaaatgttg

SEQ ID NO: 1154867 - DNA, 15 bp, Homo sapiens
tgagaggcaaatgtt

SEQ ID NO: 1154868 - DNA, 15 bp, Homo sapiens
ctgagaggcaaatgt

SEQ ID NO: 1154869 - DNA, 15 bp, Homo sapiens
gctgagaggcaaatg

SEQ ID NO: 1154870 - DNA, 15 bp, Homo sapiens
ggctgagaggcaaat

SEQ ID NO: 1154871 - DNA, 15 bp, Homo sapiens
aggctgagaggcaaa

SEQ ID NO: 1154872 - DNA, 15 bp, Homo sapiens
gaggctgagaggcaa

SEQ ID NO: 1154873 - DNA, 15 bp, Homo sapiens
agaggctgagaggca

SEQ ID NO: 1154874 - DNA, 15 bp, Homo sapiens
gagaggctgagaggc

SEQ ID NO: 1154875 - DNA, 15 bp, Homo sapiens
ggagaggctgagagg

SEQ ID NO: 1154876 - DNA, 15 bp, Homo sapiens
aggagaggctgagag

SEQ ID NO: 1154877 - DNA, 15 bp, Homo sapiens
aaggagaggctgaga

SEQ ID NO: 1154878 - DNA, 15 bp, Homo sapiens
aaaggagaggctgag

SEQ ID NO: 1154879 - DNA, 15 bp, Homo sapiens
aaaaggagaggctga

SEQ ID NO: 1154880 - DNA, 15 bp, Homo sapiens
aaaaaggagaggctg

SEQ ID NO: 1154881 - DNA, 15 bp, Homo sapiens
gaaaaaggagaggct

SEQ ID NO: 1154882 - DNA, 15 bp, Homo sapiens
ggaaaaaggagaggc

SEQ ID NO: 1154883 - DNA, 15 bp, Homo sapiens
aggaaaaaggagagg

SEQ ID NO: 1154884 - DNA, 15 bp, Homo sapiens
caaggaaaaaggaga

SEQ ID NO: 1154885 - DNA, 15 bp, Homo sapiens
ccaaggaaaaaggag

SEQ ID NO: 1154886 - DNA, 15 bp, Homo sapiens
accaaggaaaaagga

SEQ ID NO: 1154887 - DNA, 15 bp, Homo sapiens
aaccaaggaaaaagg

SEQ ID NO: 1154888 - DNA, 15 bp, Homo sapiens
aaaccaaggaaaaag

SEQ ID NO: 1154889 - DNA, 15 bp, Homo sapiens
gaaaccaaggaaaaa

SEQ ID NO: 1154890 - DNA, 15 bp, Homo sapiens
ggaaaccaaggaaaa

SEQ ID NO: 1154891 - DNA, 15 bp, Homo sapiens
tggaaaccaaggaaa

SEQ ID NO: 1154892 - DNA, 15 bp, Homo sapiens
ttggaaaccaaggaa

SEQ ID NO: 1154893 - DNA, 15 bp, Homo sapiens
cttggaaaccaagga

SEQ ID NO: 1154894 - DNA, 15 bp, Homo sapiens
ccttggaaaccaagg

SEQ ID NO: 1154895 - DNA, 15 bp, Homo sapiens
gccttggaaaccaag

SEQ ID NO: 1154896 - DNA, 15 bp, Homo sapiens
tgccttggaaaccaa

SEQ ID NO: 1154897 - DNA, 15 bp, Homo sapiens
ttgccttggaaacca

SEQ ID NO: 1154898 - DNA, 15 bp, Homo sapiens
tttgccttggaaacc

SEQ ID NO: 1154899 - DNA, 15 bp, Homo sapiens
gtttgccttggaaac

SEQ ID NO: 1154900 - DNA, 15 bp, Homo sapiens
agtttgccttggaaa

SEQ ID NO: 1154901 - DNA, 15 bp, Homo sapiens
tagtttgccttggaa

SEQ ID NO: 1154902 - DNA, 15 bp, Homo sapiens
gtagtttgccttgga

SEQ ID NO: 1154903 - DNA, 15 bp, Homo sapiens
agtagtttgccttgg

SEQ ID NO: 1154904 - DNA, 15 bp, Homo sapiens
cagtagtttgccttg

SEQ ID NO: 1154905 - DNA, 15 bp, Homo sapiens
ccagtagtttgcctt

SEQ ID NO: 1154906 - DNA, 15 bp, Homo sapiens
accagtagtttgcct

SEQ ID NO: 1154907 - DNA, 15 bp, Homo sapiens
gaccagtagtttgcc

SEQ ID NO: 1154908 - DNA, 15 bp, Homo sapiens
agaccagtagtttgc

SEQ ID NO: 1154909 - DNA, 15 bp, Homo sapiens
aagaccagtagtttg

SEQ ID NO: 1154910 - DNA, 15 bp, Homo sapiens
aaagaccagtagttt

SEQ ID NO: 1154911 - DNA, 15 bp, Homo sapiens
gaaagaccagtagtt

SEQ ID NO: 1154912 - DNA, 15 bp, Homo sapiens
agaaagaccagtagt

SEQ ID NO: 1154913 - DNA, 15 bp, Homo sapiens
cagaaagaccagtag

SEQ ID NO: 1154914 - DNA, 15 bp, Homo sapiens
acagaaagaccagta

SEQ ID NO: 1154915 - DNA, 15 bp, Homo sapiens
aacagaaagaccagt

SEQ ID NO: 1154916 - DNA, 15 bp, Homo sapiens
aaacagaaagaccag

SEQ ID NO: 1154917 - DNA, 15 bp, Homo sapiens
caaacagaaagacca

SEQ ID NO: 1154918 - DNA, 15 bp, Homo sapiens
tcaaacagaaagacc

SEQ ID NO: 1154919 - DNA, 15 bp, Homo sapiens
atcaaacagaaagac

SEQ ID NO: 1154920 - DNA, 15 bp, Homo sapiens
catcaaacagaaaga

SEQ ID NO: 1154921 - DNA, 15 bp, Homo sapiens
gcatcaaacagaaag

SEQ ID NO: 1154922 - DNA, 15 bp, Homo sapiens
ggcatcaaacagaaa

SEQ ID NO: 1154923 - DNA, 15 bp, Homo sapiens
aggcatcaaacagaa

SEQ ID NO: 1154924 - DNA, 15 bp, Homo sapiens
aaggcatcaaacaga

SEQ ID NO: 1154925 - DNA, 15 bp, Homo sapiens
gaaggcatcaaacag

SEQ ID NO: 1154926 - DNA, 15 bp, Homo sapiens
agaaggcatcaaaca

SEQ ID NO: 1154927 - DNA, 15 bp, Homo sapiens
aagaaggcatcaaac

SEQ ID NO: 1154928 - DNA, 15 bp, Homo sapiens
gaaagaaggcatcaa

SEQ ID NO: 1154929 - DNA, 15 bp, Homo sapiens
tgaaagaaggcatca

SEQ ID NO: 1154930 - DNA, 15 bp, Homo sapiens
atgaaagaaggcatc

SEQ ID NO: 1154931 - DNA, 15 bp, Homo sapiens
tatgaaagaaggcat

SEQ ID NO: 1154932 - DNA, 15 bp, Homo sapiens
ttatgaaagaaggca

SEQ ID NO: 1154933 - DNA, 15 bp, Homo sapiens
attatgaaagaaggc

SEQ ID NO: 1154934 - DNA, 15 bp, Homo sapiens
cattatgaaagaagg

SEQ ID NO: 1154935 - DNA, 15 bp, Homo sapiens
acattatgaaagaag

SEQ ID NO: 1154936 - DNA, 15 bp, Homo sapiens
cacattatgaaagaa

SEQ ID NO: 1154937 - DNA, 15 bp, Homo sapiens
gcacattatgaaaga

SEQ ID NO: 1154938 - DNA, 15 bp, Homo sapiens
agcacattatgaaag

SEQ ID NO: 1154939 - DNA, 15 bp, Homo sapiens
gagcacattatgaaa

SEQ ID NO: 1154940 - DNA, 15 bp, Homo sapiens
tgagcacattatgaa

SEQ ID NO: 1154941 - DNA, 15 bp, Homo sapiens
ctgagcacattatga

SEQ ID NO: 1154942 - DNA, 15 bp, Homo sapiens
gctgagcacattatg

SEQ ID NO: 1154943 - DNA, 15 bp, Homo sapiens
tgctgagcacattat

SEQ ID NO: 1154944 - DNA, 15 bp, Homo sapiens
gtgctgagcacatta

SEQ ID NO: 1154945 - DNA, 15 bp, Homo sapiens
tgtgctgagcacatt

SEQ ID NO: 1154946 - DNA, 15 bp, Homo sapiens
atgtgctgagcacat

SEQ ID NO: 1154947 - DNA, 15 bp, Homo sapiens
aatgtgctgagcaca

SEQ ID NO: 1154948 - DNA, 15 bp, Homo sapiens
gaatgtgctgagcac

SEQ ID NO: 1154949 - DNA, 15 bp, Homo sapiens
ggaatgtgctgagca

SEQ ID NO: 1154950 - DNA, 15 bp, Homo sapiens
tggaatgtgctgagc

SEQ ID NO: 1154951 - DNA, 15 bp, Homo sapiens
atggaatgtgctgag

SEQ ID NO: 1154952 - DNA, 15 bp, Homo sapiens
aatggaatgtgctga

SEQ ID NO: 1154953 - DNA, 15 bp, Homo sapiens
taatggaatgtgctg

SEQ ID NO: 1154954 - DNA, 15 bp, Homo sapiens
ctaatggaatgtgct

SEQ ID NO: 1154955 - DNA, 15 bp, Homo sapiens
cctaatggaatgtgc

SEQ ID NO: 1154956 - DNA, 15 bp, Homo sapiens
acctaatggaatgtg

SEQ ID NO: 1154957 - DNA, 15 bp, Homo sapiens
aacctaatggaatgt

SEQ ID NO: 1154958 - DNA, 15 bp, Homo sapiens
caacctaatggaatg

SEQ ID NO: 1154959 - DNA, 15 bp, Homo sapiens
gcaacctaatggaat

SEQ ID NO: 1154960 - DNA, 15 bp, Homo sapiens
tgcaacctaatggaa

SEQ ID NO: 1154961 - DNA, 15 bp, Homo sapiens
ttgcaacctaatgga

SEQ ID NO: 1154962 - DNA, 15 bp, Homo sapiens
attgcaacctaatgg

SEQ ID NO: 1154963 - DNA, 15 bp, Homo sapiens
gattgcaacctaatg

SEQ ID NO: 1154964 - DNA, 15 bp, Homo sapiens
agattgcaacctaat

SEQ ID NO: 1154965 - DNA, 15 bp, Homo sapiens
cagattgcaacctaa

SEQ ID NO: 1154966 - DNA, 15 bp, Homo sapiens
ccagattgcaaccta

SEQ ID NO: 1154967 - DNA, 15 bp, Homo sapiens
cccagattgcaacct

SEQ ID NO: 1154968 - DNA, 15 bp, Homo sapiens
gcccagattgcaacc

SEQ ID NO: 1154969 - DNA, 15 bp, Homo sapiens
agcccagattgcaac

SEQ ID NO: 1154970 - DNA, 15 bp, Homo sapiens
aagcccagattgcaa

SEQ ID NO: 1154971 - DNA, 15 bp, Homo sapiens
caagcccagattgca

SEQ ID NO: 1154972 - DNA, 15 bp, Homo sapiens
tcaagcccagattgc

SEQ ID NO: 1154973 - DNA, 15 bp, Homo sapiens
ttcaagcccagattg

SEQ ID NO: 1154974 - DNA, 15 bp, Homo sapiens
tttcaagcccagatt

SEQ ID NO: 1154975 - DNA, 15 bp, Homo sapiens
ctttcaagcccagat

SEQ ID NO: 1154976 - DNA, 15 bp, Homo sapiens
tctttcaagcccaga

SEQ ID NO: 1154977 - DNA, 15 bp, Homo sapiens
ctctttcaagcccag

SEQ ID NO: 1154978 - DNA, 15 bp, Homo sapiens
cctctttcaagccca

SEQ ID NO: 1154979 - DNA, 15 bp, Homo sapiens
ccctctttcaagccc

SEQ ID NO: 1154980 - DNA, 15 bp, Homo sapiens
tccctctttcaagcc

SEQ ID NO: 1154981 - DNA, 15 bp, Homo sapiens
ttccctctttcaagc

SEQ ID NO: 1154982 - DNA, 15 bp, Homo sapiens
cttccctctttcaag

SEQ ID NO: 1154983 - DNA, 15 bp, Homo sapiens
gcttccctctttcaa

SEQ ID NO: 1154984 - DNA, 15 bp, Homo sapiens
tgcttccctctttca

SEQ ID NO: 1154985 - DNA, 15 bp, Homo sapiens
ttgcttccctctttc

SEQ ID NO: 1154986 - DNA, 15 bp, Homo sapiens
gttgcttccctcttt

SEQ ID NO: 1154987 - DNA, 15 bp, Homo sapiens
agttgcttccctctt

SEQ ID NO: 1154988 - DNA, 15 bp, Homo sapiens
gagttgcttccctct

SEQ ID NO: 1154989 - DNA, 15 bp, Homo sapiens
agagttgcttccctc

SEQ ID NO: 1154990 - DNA, 15 bp, Homo sapiens
aagagttgcttccct

SEQ ID NO: 1154991 - DNA, 15 bp, Homo sapiens
aaagagttgcttccc

SEQ ID NO: 1154992 - DNA, 15 bp, Homo sapiens
aaaagagttgcttcc

SEQ ID NO: 1154993 - DNA, 15 bp, Homo sapiens
aaaaagagttgcttc

SEQ ID NO: 1154994 - DNA, 15 bp, Homo sapiens
taaaaagagttgctt

SEQ ID NO: 1154995 - DNA, 15 bp, Homo sapiens
ttaaaaagagttgct

SEQ ID NO: 1154996 - DNA, 15 bp, Homo sapiens
cttaaaaagagttgc

SEQ ID NO: 1154997 - DNA, 15 bp, Homo sapiens
tcttaaaaagagttg

SEQ ID NO: 1154998 - DNA, 15 bp, Homo sapiens
atcttaaaaagagtt

SEQ ID NO: 1154999 - DNA, 15 bp, Homo sapiens
gatcttaaaaagagt

SEQ ID NO: 1155000 - DNA, 15 bp, Homo sapiens
tgatcttaaaaagag

SEQ ID NO: 1155001 - DNA, 15 bp, Homo sapiens
atgatcttaaaaaga

SEQ ID NO: 1155002 - DNA, 15 bp, Homo sapiens
aatgatcttaaaaag

SEQ ID NO: 1155003 - DNA, 15 bp, Homo sapiens
aaatgatcttaaaaa

SEQ ID NO: 1155004 - DNA, 15 bp, Homo sapiens
caaatgatcttaaaa

SEQ ID NO: 1155005 - DNA, 15 bp, Homo sapiens
ccaaatgatcttaaa

SEQ ID NO: 1155006 - DNA, 15 bp, Homo sapiens
accaaatgatcttaa

SEQ ID NO: 1155007 - DNA, 15 bp, Homo sapiens
taccaaatgatctta

SEQ ID NO: 1155008 - DNA, 15 bp, Homo sapiens
ataccaaatgatctt

SEQ ID NO: 1155009 - DNA, 15 bp, Homo sapiens
cataccaaatgatct

SEQ ID NO: 1155010 - DNA, 15 bp, Homo sapiens
acataccaaatgatc

SEQ ID NO: 1155011 - DNA, 15 bp, Homo sapiens
aacataccaaatgat

SEQ ID NO: 1155012 - DNA, 15 bp, Homo sapiens
aaacataccaaatga

SEQ ID NO: 1155013 - DNA, 15 bp, Homo sapiens
gaaacataccaaatg

SEQ ID NO: 1155014 - DNA, 15 bp, Homo sapiens
agaaacataccaaat

SEQ ID NO: 1155015 - DNA, 15 bp, Homo sapiens
cagaaacataccaaa

SEQ ID NO: 1155016 - DNA, 15 bp, Homo sapiens
gcagaaacataccaa

SEQ ID NO: 1155017 - DNA, 15 bp, Homo sapiens
agcagaaacatacca

SEQ ID NO: 1155018 - DNA, 15 bp, Homo sapiens
gagcagaaacatacc

SEQ ID NO: 1155019 - DNA, 15 bp, Homo sapiens
agagcagaaacatac

SEQ ID NO: 1155020 - DNA, 15 bp, Homo sapiens
cagagcagaaacata

SEQ ID NO: 1155021 - DNA, 15 bp, Homo sapiens
ccagagcagaaacat

SEQ ID NO: 1155022 - DNA, 15 bp, Homo sapiens
accagagcagaaaca

SEQ ID NO: 1155023 - DNA, 15 bp, Homo sapiens
caccagagcagaaac

SEQ ID NO: 1155024 - DNA, 15 bp, Homo sapiens
ccaccagagcagaaa

SEQ ID NO: 1155025 - DNA, 15 bp, Homo sapiens
cccaccagagcagaa

SEQ ID NO: 1155026 - DNA, 15 bp, Homo sapiens
tcccaccagagcaga

SEQ ID NO: 1155027 - DNA, 15 bp, Homo sapiens
atcccaccagagcag

SEQ ID NO: 1155028 - DNA, 15 bp, Homo sapiens
catcccaccagagca

SEQ ID NO: 1155029 - DNA, 15 bp, Homo sapiens
tcatcccaccagagc

SEQ ID NO: 1155030 - DNA, 15 bp, Homo sapiens
atcatcccaccagag

SEQ ID NO: 1155031 - DNA, 15 bp, Homo sapiens
aatcatcccaccaga

SEQ ID NO: 1155032 - DNA, 15 bp, Homo sapiens
aaatcatcccaccag

SEQ ID NO: 1155033 - DNA, 15 bp, Homo sapiens
aaaatcatcccacca

SEQ ID NO: 1155034 - DNA, 15 bp, Homo sapiens
taaaatcatcccacc

SEQ ID NO: 1155035 - DNA, 15 bp, Homo sapiens
ttaaaatcatcccac

SEQ ID NO: 1155036 - DNA, 15 bp, Homo sapiens
tttaaaatcatccca

SEQ ID NO: 1155037 - DNA, 15 bp, Homo sapiens
ctttaaaatcatccc

SEQ ID NO: 1155038 - DNA, 15 bp, Homo sapiens
gctttaaaatcatcc

SEQ ID NO: 1155039 - DNA, 15 bp, Homo sapiens
tgctttaaaatcatc

SEQ ID NO: 1155040 - DNA, 15 bp, Homo sapiens
ctgctttaaaatcat

SEQ ID NO: 1155041 - DNA, 15 bp, Homo sapiens
actgctttaaaatca

SEQ ID NO: 1155042 - DNA, 15 bp, Homo sapiens
cactgctttaaaatc

SEQ ID NO: 1155043 - DNA, 15 bp, Homo sapiens
ccactgctttaaaat

SEQ ID NO: 1155044 - DNA, 15 bp, Homo sapiens
accactgctttaaaa

SEQ ID NO: 1155045 - DNA, 15 bp, Homo sapiens
caccactgctttaaa

SEQ ID NO: 1155046 - DNA, 15 bp, Homo sapiens
tcaccactgctttaa

SEQ ID NO: 1155047 - DNA, 15 bp, Homo sapiens
ttcaccactgcttta

SEQ ID NO: 1155048 - DNA, 15 bp, Homo sapiens
gttcaccactgcttt

SEQ ID NO: 1155049 - DNA, 15 bp, Homo sapiens
tgttcaccactgctt

SEQ ID NO: 1155050 - DNA, 15 bp, Homo sapiens
ctgttcaccactgct

SEQ ID NO: 1155051 - DNA, 15 bp, Homo sapiens
gctgttcaccactgc

SEQ ID NO: 1155052 - DNA, 15 bp, Homo sapiens
ggctgttcaccactg

SEQ ID NO: 1155053 - DNA, 15 bp, Homo sapiens
tggctgttcaccact

SEQ ID NO: 1155054 - DNA, 15 bp, Homo sapiens
atggctgttcaccac

SEQ ID NO: 1155055 - DNA, 15 bp, Homo sapiens
aatggctgttcacca

SEQ ID NO: 1155056 - DNA, 15 bp, Homo sapiens
aaatggctgttcacc

SEQ ID NO: 1155057 - DNA, 15 bp, Homo sapiens
aaaatggctgttcac

SEQ ID NO: 1155058 - DNA, 15 bp, Homo sapiens
aaaaatggctgttca

SEQ ID NO: 1155059 - DNA, 15 bp, Homo sapiens
caaaaatggctgttc

SEQ ID NO: 1155060 - DNA, 15 bp, Homo sapiens
tcaaaaatggctgtt

SEQ ID NO: 1155061 - DNA, 15 bp, Homo sapiens
ttcaaaaatggctgt

SEQ ID NO: 1155062 - DNA, 15 bp, Homo sapiens
tttcaaaaatggctg

SEQ ID NO: 1155063 - DNA, 15 bp, Homo sapiens
gtttcaaaaatggct

SEQ ID NO: 1155064 - DNA, 15 bp, Homo sapiens
tgtttcaaaaatggc

SEQ ID NO: 1155065 - DNA, 15 bp, Homo sapiens
ctgtttcaaaaatgg

SEQ ID NO: 1155066 - DNA, 15 bp, Homo sapiens
cctgtttcaaaaatg

SEQ ID NO: 1155067 - DNA, 15 bp, Homo sapiens
ccctgtttcaaaaat

SEQ ID NO: 1155068 - DNA, 15 bp, Homo sapiens
accctgtttcaaaaa

SEQ ID NO: 1155069 - DNA, 15 bp, Homo sapiens
gaccctgtttcaaaa

SEQ ID NO: 1155070 - DNA, 15 bp, Homo sapiens
tgaccctgtttcaaa

SEQ ID NO: 1155071 - DNA, 15 bp, Homo sapiens
ttgaccctgtttcaa

SEQ ID NO: 1155072 - DNA, 15 bp, Homo sapiens
cttgaccctgtttca

SEQ ID NO: 1155073 - DNA, 15 bp, Homo sapiens
tcttgaccctgtttc

SEQ ID NO: 1155074 - DNA, 15 bp, Homo sapiens
gtcttgaccctgttt

SEQ ID NO: 1155075 - DNA, 15 bp, Homo sapiens
tgtcttgaccctgtt

SEQ ID NO: 1155076 - DNA, 15 bp, Homo sapiens
ttgtcttgaccctgt

SEQ ID NO: 1155077 - DNA, 15 bp, Homo sapiens
tttgtcttgaccctg

SEQ ID NO: 1155078 - DNA, 15 bp, Homo sapiens
ttttgtcttgaccct

SEQ ID NO: 1155079 - DNA, 15 bp, Homo sapiens
tttttgtcttgaccc

SEQ ID NO: 1155080 - DNA, 15 bp, Homo sapiens
ttttttgtcttgacc

SEQ ID NO: 1155081 - DNA, 15 bp, Homo sapiens
cttttttgtcttgac

SEQ ID NO: 1155082 - DNA, 15 bp, Homo sapiens
gcttttttgtcttga

SEQ ID NO: 1155083 - DNA, 15 bp, Homo sapiens
cgcttttttgtcttg

SEQ ID NO: 1155084 - DNA, 15 bp, Homo sapiens
tcgcttttttgtctt

SEQ ID NO: 1155085 - DNA, 15 bp, Homo sapiens
ttcgcttttttgtct

SEQ ID NO: 1155086 - DNA, 15 bp, Homo sapiens
tttcgcttttttgtc

SEQ ID NO: 1155087 - DNA, 15 bp, Homo sapiens
ctttcgcttttttgt

SEQ ID NO: 1155088 - DNA, 15 bp, Homo sapiens
actttcgcttttttg

SEQ ID NO: 1155089 - DNA, 15 bp, Homo sapiens
cactttcgctttttt

SEQ ID NO: 1155090 - DNA, 15 bp, Homo sapiens
acactttcgcttttt

SEQ ID NO: 1155091 - DNA, 15 bp, Homo sapiens
cacactttcgctttt

SEQ ID NO: 1155092 - DNA, 15 bp, Homo sapiens
acacactttcgcttt

SEQ ID NO: 1155093 - DNA, 15 bp, Homo sapiens
aacacactttcgctt

SEQ ID NO: 1155094 - DNA, 15 bp, Homo sapiens
taacacactttcgct

SEQ ID NO: 1155095 - DNA, 15 bp, Homo sapiens
ttaacacactttcgc

SEQ ID NO: 1155096 - DNA, 15 bp, Homo sapiens
cttaacacactttcg

SEQ ID NO: 1155097 - DNA, 15 bp, Homo sapiens
tcttaacacactttc

SEQ ID NO: 1155098 - DNA, 15 bp, Homo sapiens
ctcttaacacacttt

SEQ ID NO: 1155099 - DNA, 15 bp, Homo sapiens
gctcttaacacactt

SEQ ID NO: 1155100 - DNA, 15 bp, Homo sapiens
agctcttaacacact

SEQ ID NO: 1155101 - DNA, 15 bp, Homo sapiens
cagctcttaacacac

SEQ ID NO: 1155102 - DNA, 15 bp, Homo sapiens
ccagctcttaacaca

SEQ ID NO: 1155103 - DNA, 15 bp, Homo sapiens
cccagctcttaacac

SEQ ID NO: 1155104 - DNA, 15 bp, Homo sapiens
acccagctcttaaca

SEQ ID NO: 1155105 - DNA, 15 bp, Homo sapiens
aacccagctcttaac

SEQ ID NO: 1155106 - DNA, 15 bp, Homo sapiens
aaacccagctcttaa

SEQ ID NO: 1155107 - DNA, 15 bp, Homo sapiens
aaaacccagctctta

SEQ ID NO: 1155108 - DNA, 15 bp, Homo sapiens
aaaaacccagctctt

SEQ ID NO: 1155109 - DNA, 15 bp, Homo sapiens
aaaaaacccagctct

SEQ ID NO: 1155110 - DNA, 15 bp, Homo sapiens
aaaaaaacccagctc

SEQ ID NO: 1155111 - DNA, 15 bp, Homo sapiens
aaaaaaaacccagct

SEQ ID NO: 1155112 - DNA, 15 bp, Homo sapiens
aaaaaaaaacccagc

SEQ ID NO: 1155113 - DNA, 15 bp, Homo sapiens
aaaaaaaaaacccag

SEQ ID NO: 1155114 - DNA, 15 bp, Homo sapiens
gaaaaaaaaaaccca

SEQ ID NO: 1155115 - DNA, 15 bp, Homo sapiens
tgaaaaaaaaaaccc

SEQ ID NO: 1155116 - DNA, 15 bp, Homo sapiens
atgaaaaaaaaaacc

SEQ ID NO: 1155117 - DNA, 15 bp, Homo sapiens
gatgaaaaaaaaaac

SEQ ID NO: 1155118 - DNA, 15 bp, Homo sapiens
ggatgaaaaaaaaaa

SEQ ID NO: 1155119 - DNA, 15 bp, Homo sapiens
tggatgaaaaaaaaa

SEQ ID NO: 1155120 - DNA, 15 bp, Homo sapiens
ttggatgaaaaaaaa

SEQ ID NO: 1155121 - DNA, 15 bp, Homo sapiens
tttggatgaaaaaaa

SEQ ID NO: 1155122 - DNA, 15 bp, Homo sapiens
ttttggatgaaaaaa

SEQ ID NO: 1155123 - DNA, 15 bp, Homo sapiens
attttggatgaaaaa

SEQ ID NO: 1155124 - DNA, 15 bp, Homo sapiens
aattttggatgaaaa

SEQ ID NO: 1155125 - DNA, 15 bp, Homo sapiens
taattttggatgaaa

SEQ ID NO: 1155126 - DNA, 15 bp, Homo sapiens
ttaattttggatgaa

SEQ ID NO: 1155127 - DNA, 15 bp, Homo sapiens
tttaattttggatga

SEQ ID NO: 1155128 - DNA, 15 bp, Homo sapiens
ttttaattttggatg

SEQ ID NO: 1155129 - DNA, 15 bp, Homo sapiens
attttaattttggat

SEQ ID NO: 1155130 - DNA, 15 bp, Homo sapiens
aattttaattttgga

SEQ ID NO: 1155131 - DNA, 15 bp, Homo sapiens
taattttaattttgg

SEQ ID NO: 1155132 - DNA, 15 bp, Homo sapiens
gtaattttaattttg

SEQ ID NO: 1155133 - DNA, 15 bp, Homo sapiens
ggtaattttaatttt

SEQ ID NO: 1155134 - DNA, 15 bp, Homo sapiens
tggtaattttaattt

SEQ ID NO: 1155135 - DNA, 15 bp, Homo sapiens
atggtaattttaatt

SEQ ID NO: 1155136 - DNA, 15 bp, Homo sapiens
catggtaattttaat

SEQ ID NO: 1155137 - DNA, 15 bp, Homo sapiens
tcatggtaattttaa

SEQ ID NO: 1155138 - DNA, 15 bp, Homo sapiens
ttcatggtaatttta

SEQ ID NO: 1155139 - DNA, 15 bp, Homo sapiens
tttcatggtaatttt

SEQ ID NO: 1155140 - DNA, 15 bp, Homo sapiens
ttttcatggtaattt

SEQ ID NO: 1155141 - DNA, 15 bp, Homo sapiens
tttttcatggtaatt

SEQ ID NO: 1155142 - DNA, 15 bp, Homo sapiens
ttttttcatggtaat

SEQ ID NO: 1155143 - DNA, 15 bp, Homo sapiens
attttttcatggtaa

SEQ ID NO: 1155144 - DNA, 15 bp, Homo sapiens
cattttttcatggta

SEQ ID NO: 1155145 - DNA, 15 bp, Homo sapiens
acattttttcatggt

SEQ ID NO: 1155146 - DNA, 15 bp, Homo sapiens
tacattttttcatgg

SEQ ID NO: 1155147 - DNA, 15 bp, Homo sapiens
atacattttttcatg

SEQ ID NO: 1155148 - DNA, 15 bp, Homo sapiens
gatacattttttcat

SEQ ID NO: 1155149 - DNA, 15 bp, Homo sapiens
agatacattttttca

SEQ ID NO: 1155150 - DNA, 15 bp, Homo sapiens
tagatacattttttc

SEQ ID NO: 1155151 - DNA, 15 bp, Homo sapiens
atagatacatttttt

SEQ ID NO: 1155152 - DNA, 15 bp, Homo sapiens
tatagatacattttt

SEQ ID NO: 1155153 - DNA, 15 bp, Homo sapiens
atatagatacatttt

SEQ ID NO: 1155154 - DNA, 15 bp, Homo sapiens
tatatagatacattt

SEQ ID NO: 1155155 - DNA, 15 bp, Homo sapiens
ttatatagatacatt

SEQ ID NO: 1155156 - DNA, 15 bp, Homo sapiens
attatatagatacat

SEQ ID NO: 1155157 - DNA, 15 bp, Homo sapiens
gattatatagataca

SEQ ID NO: 1155158 - DNA, 15 bp, Homo sapiens
agattatatagatac

SEQ ID NO: 1155159 - DNA, 15 bp, Homo sapiens
aagattatatagata

SEQ ID NO: 1155160 - DNA, 15 bp, Homo sapiens
aaagattatatagat

SEQ ID NO: 1155161 - DNA, 15 bp, Homo sapiens
caaagattatataga

SEQ ID NO: 1155162 - DNA, 15 bp, Homo sapiens
acaaagattatatag

SEQ ID NO: 1155163 - DNA, 15 bp, Homo sapiens
tacaaagattatata

SEQ ID NO: 1155164 - DNA, 15 bp, Homo sapiens
atacaaagattatat

SEQ ID NO: 1155165 - DNA, 15 bp, Homo sapiens
gatacaaagattata

SEQ ID NO: 1155166 - DNA, 15 bp, Homo sapiens
tgatacaaagattat

SEQ ID NO: 1155167 - DNA, 15 bp, Homo sapiens
ctgatacaaagatta

SEQ ID NO: 1155168 - DNA, 15 bp, Homo sapiens
cctgatacaaagatt

SEQ ID NO: 1155169 - DNA, 15 bp, Homo sapiens
tcctgatacaaagat

SEQ ID NO: 1155170 - DNA, 15 bp, Homo sapiens
atcctgatacaaaga

SEQ ID NO: 1155171 - DNA, 15 bp, Homo sapiens
gatcctgatacaaag

SEQ ID NO: 1155172 - DNA, 15 bp, Homo sapiens
ggatcctgatacaaa

SEQ ID NO: 1155173 - DNA, 15 bp, Homo sapiens
gggatcctgatacaa

SEQ ID NO: 1155174 - DNA, 15 bp, Homo sapiens
tgggatcctgataca

SEQ ID NO: 1155175 - DNA, 15 bp, Homo sapiens
ctgggatcctgatac

SEQ ID NO: 1155176 - DNA, 15 bp, Homo sapiens
gctgggatcctgata

SEQ ID NO: 1155177 - DNA, 15 bp, Homo sapiens
tgctgggatcctgat

SEQ ID NO: 1155178 - DNA, 15 bp, Homo sapiens
ctgctgggatcctga

SEQ ID NO: 1155179 - DNA, 15 bp, Homo sapiens
cctgctgggatcctg

SEQ ID NO: 1155180 - DNA, 15 bp, Homo sapiens
tcctgctgggatcct

SEQ ID NO: 1155181 - DNA, 15 bp, Homo sapiens
ttcctgctgggatcc

SEQ ID NO: 1155182 - DNA, 15 bp, Homo sapiens
tttcctgctgggatc

SEQ ID NO: 1155183 - DNA, 15 bp, Homo sapiens
gtttcctgctgggat

SEQ ID NO: 1155184 - DNA, 15 bp, Homo sapiens
tgtttcctgctggga

SEQ ID NO: 1155185 - DNA, 15 bp, Homo sapiens
ttgtttcctgctggg

SEQ ID NO: 1155186 - DNA, 15 bp, Homo sapiens
tttgtttcctgctgg

SEQ ID NO: 1155187 - DNA, 15 bp, Homo sapiens
atttgtttcctgctg

SEQ ID NO: 1155188 - DNA, 15 bp, Homo sapiens
catttgtttcctgct

SEQ ID NO: 1155189 - DNA, 15 bp, Homo sapiens
ccatttgtttcctgc

SEQ ID NO: 1155190 - DNA, 15 bp, Homo sapiens
gccatttgtttcctg

SEQ ID NO: 1155191 - DNA, 15 bp, Homo sapiens
tgccatttgtttcct

SEQ ID NO: 1155192 - DNA, 15 bp, Homo sapiens
gtgccatttgtttcc

SEQ ID NO: 1155193 - DNA, 15 bp, Homo sapiens
tgtgccatttgtttc

SEQ ID NO: 1155194 - DNA, 15 bp, Homo sapiens
ctgtgccatttgttt

SEQ ID NO: 1155195 - DNA, 15 bp, Homo sapiens
gctgtgccatttgtt

SEQ ID NO: 1155196 - DNA, 15 bp, Homo sapiens
tgctgtgccatttgt

SEQ ID NO: 1155197 - DNA, 15 bp, Homo sapiens
ttgctgtgccatttg

SEQ ID NO: 1155198 - DNA, 15 bp, Homo sapiens
tttgctgtgccattt

SEQ ID NO: 1155199 - DNA, 15 bp, Homo sapiens
atttgctgtgccatt

SEQ ID NO: 1155200 - DNA, 15 bp, Homo sapiens
catttgctgtgccat

SEQ ID NO: 1155201 - DNA, 15 bp, Homo sapiens
ccatttgctgtgcca

SEQ ID NO: 1155202 - DNA, 15 bp, Homo sapiens
cccatttgctgtgcc

SEQ ID NO: 1155203 - DNA, 15 bp, Homo sapiens
acccatttgctgtgc

SEQ ID NO: 1155204 - DNA, 15 bp, Homo sapiens
aacccatttgctgtg

SEQ ID NO: 1155205 - DNA, 15 bp, Homo sapiens
taacccatttgctgt

SEQ ID NO: 1155206 - DNA, 15 bp, Homo sapiens
ttaacccatttgctg

SEQ ID NO: 1155207 - DNA, 15 bp, Homo sapiens
attaacccatttgct

SEQ ID NO: 1155208 - DNA, 15 bp, Homo sapiens
aattaacccatttgc

SEQ ID NO: 1155209 - DNA, 15 bp, Homo sapiens
caattaacccatttg

SEQ ID NO: 1155210 - DNA, 15 bp, Homo sapiens
tcaattaacccattt

SEQ ID NO: 1155211 - DNA, 15 bp, Homo sapiens
atcaattaacccatt

SEQ ID NO: 1155212 - DNA, 15 bp, Homo sapiens
catcaattaacccat

SEQ ID NO: 1155213 - DNA, 15 bp, Homo sapiens
tcatcaattaaccca

SEQ ID NO: 1155214 - DNA, 15 bp, Homo sapiens
ctcatcaattaaccc

SEQ ID NO: 1155215 - DNA, 15 bp, Homo sapiens
actcatcaattaacc

SEQ ID NO: 1155216 - DNA, 15 bp, Homo sapiens
aactcatcaattaac

SEQ ID NO: 1155217 - DNA, 15 bp, Homo sapiens
aaactcatcaattaa

SEQ ID NO: 1155218 - DNA, 15 bp, Homo sapiens
caaactcatcaatta

SEQ ID NO: 1155219 - DNA, 15 bp, Homo sapiens
gcaaactcatcaatt

SEQ ID NO: 1155220 - DNA, 15 bp, Homo sapiens
agcaaactcatcaat

SEQ ID NO: 1155221 - DNA, 15 bp, Homo sapiens
tagcaaactcatcaa

SEQ ID NO: 1155222 - DNA, 15 bp, Homo sapiens
ttagcaaactcatca

SEQ ID NO: 1155223 - DNA, 15 bp, Homo sapiens
tttagcaaactcatc

SEQ ID NO: 1155224 - DNA, 15 bp, Homo sapiens
ctttagcaaactcat

SEQ ID NO: 1155225 - DNA, 15 bp, Homo sapiens
cctttagcaaactca

SEQ ID NO: 1155226 - DNA, 15 bp, Homo sapiens
ccctttagcaaactc

SEQ ID NO: 1155227 - DNA, 15 bp, Homo sapiens
accctttagcaaact

SEQ ID NO: 1155228 - DNA, 15 bp, Homo sapiens
gaccctttagcaaac

SEQ ID NO: 1155229 - DNA, 15 bp, Homo sapiens
agaccctttagcaaa

SEQ ID NO: 1155230 - DNA, 15 bp, Homo sapiens
tagaccctttagcaa

SEQ ID NO: 1155231 - DNA, 15 bp, Homo sapiens
atagaccctttagca

SEQ ID NO: 1155232 - DNA, 15 bp, Homo sapiens
aatagaccctttagc

SEQ ID NO: 1155233 - DNA, 15 bp, Homo sapiens
aaatagaccctttag

SEQ ID NO: 1155234 - DNA, 15 bp, Homo sapiens
taaatagacccttta

SEQ ID NO: 1155235 - DNA, 15 bp, Homo sapiens
gtaaatagacccttt

SEQ ID NO: 1155236 - DNA, 15 bp, Homo sapiens
tgtaaatagaccctt

SEQ ID NO: 1155237 - DNA, 15 bp, Homo sapiens
ttgtaaatagaccct

SEQ ID NO: 1155238 - DNA, 15 bp, Homo sapiens
tttgtaaatagaccc

SEQ ID NO: 1155239 - DNA, 15 bp, Homo sapiens
ctttgtaaatagacc

SEQ ID NO: 1155240 - DNA, 15 bp, Homo sapiens
cctttgtaaatagac

SEQ ID NO: 1155241 - DNA, 15 bp, Homo sapiens
gcctttgtaaataga

SEQ ID NO: 1155242 - DNA, 15 bp, Homo sapiens
ggcctttgtaaatag

SEQ ID NO: 1155243 - DNA, 15 bp, Homo sapiens
caggcctttgtaaat

SEQ ID NO: 1155244 - DNA, 15 bp, Homo sapiens
ccaggcctttgtaaa

SEQ ID NO: 1155245 - DNA, 15 bp, Homo sapiens
tccaggcctttgtaa

SEQ ID NO: 1155246 - DNA, 15 bp, Homo sapiens
ttccaggcctttgta

SEQ ID NO: 1155247 - DNA, 15 bp, Homo sapiens
tttccaggcctttgt

SEQ ID NO: 1155248 - DNA, 15 bp, Homo sapiens
ctttccaggcctttg

SEQ ID NO: 1155249 - DNA, 15 bp, Homo sapiens
actttccaggccttt

SEQ ID NO: 1155250 - DNA, 15 bp, Homo sapiens
cactttccaggcctt

SEQ ID NO: 1155251 - DNA, 15 bp, Homo sapiens
acactttccaggcct

SEQ ID NO: 1155252 - DNA, 15 bp, Homo sapiens
aacactttccaggcc

SEQ ID NO: 1155253 - DNA, 15 bp, Homo sapiens
taacactttccaggc

SEQ ID NO: 1155254 - DNA, 15 bp, Homo sapiens
ttaacactttccagg

SEQ ID NO: 1155255 - DNA, 15 bp, Homo sapiens
cttaacactttccag

SEQ ID NO: 1155256 - DNA, 15 bp, Homo sapiens
ccttaacactttcca

SEQ ID NO: 1155257 - DNA, 15 bp, Homo sapiens
accttaacactttcc

SEQ ID NO: 1155258 - DNA, 15 bp, Homo sapiens
taccttaacactttc

SEQ ID NO: 1155259 - DNA, 15 bp, Homo sapiens
ttaccttaacacttt

SEQ ID NO: 1155260 - DNA, 15 bp, Homo sapiens
cttaccttaacactt

SEQ ID NO: 1155261 - DNA, 15 bp, Homo sapiens
gcttaccttaacact

SEQ ID NO: 1155262 - DNA, 15 bp, Homo sapiens
tgcttaccttaacac

SEQ ID NO: 1155263 - DNA, 15 bp, Homo sapiens
ctgcttaccttaaca

SEQ ID NO: 1155264 - DNA, 15 bp, Homo sapiens
actgcttaccttaac

SEQ ID NO: 1155265 - DNA, 15 bp, Homo sapiens
tactgcttaccttaa

SEQ ID NO: 1155266 - DNA, 15 bp, Homo sapiens
gtactgcttacctta

SEQ ID NO: 1155267 - DNA, 15 bp, Homo sapiens
ggtactgcttacctt

SEQ ID NO: 1155268 - DNA, 15 bp, Homo sapiens
gggtactgcttacct

SEQ ID NO: 1155269 - DNA, 15 bp, Homo sapiens
tgggtactgcttacc

SEQ ID NO: 1155270 - DNA, 15 bp, Homo sapiens
ttgggtactgcttac

SEQ ID NO: 1155271 - DNA, 15 bp, Homo sapiens
cttgggtactgctta

SEQ ID NO: 1155272 - DNA, 15 bp, Homo sapiens
tcttgggtactgctt

SEQ ID NO: 1155273 - DNA, 15 bp, Homo sapiens
ttcttgggtactgct

SEQ ID NO: 1155274 - DNA, 15 bp, Homo sapiens
cttcttgggtactgc

SEQ ID NO: 1155275 - DNA, 15 bp, Homo sapiens
ccttcttgggtactg

SEQ ID NO: 1155276 - DNA, 15 bp, Homo sapiens
tccttcttgggtact

SEQ ID NO: 1155277 - DNA, 15 bp, Homo sapiens
ttccttcttgggtac

SEQ ID NO: 1155278 - DNA, 15 bp, Homo sapiens
cttccttcttgggta

SEQ ID NO: 1155279 - DNA, 15 bp, Homo sapiens
acttccttcttgggt

SEQ ID NO: 1155280 - DNA, 15 bp, Homo sapiens
aacttccttcttggg

SEQ ID NO: 1155281 - DNA, 15 bp, Homo sapiens
taacttccttcttgg

SEQ ID NO: 1155282 - DNA, 15 bp, Homo sapiens
ttaacttccttcttg

SEQ ID NO: 1155283 - DNA, 15 bp, Homo sapiens
gttaacttccttctt

SEQ ID NO: 1155284 - DNA, 15 bp, Homo sapiens
tgttaacttccttct

SEQ ID NO: 1155285 - DNA, 15 bp, Homo sapiens
gtgttaacttccttc

SEQ ID NO: 1155286 - DNA, 15 bp, Homo sapiens
ggtgttaacttcctt

SEQ ID NO: 1155287 - DNA, 15 bp, Homo sapiens
gggtgttaacttcct

SEQ ID NO: 1155288 - DNA, 15 bp, Homo sapiens
ggggtgttaacttcc

SEQ ID NO: 1155289 - DNA, 15 bp, Homo sapiens
tggggtgttaacttc

SEQ ID NO: 1155290 - DNA, 15 bp, Homo sapiens
ctggggtgttaactt

SEQ ID NO: 1155291 - DNA, 15 bp, Homo sapiens
gctggggtgttaact

SEQ ID NO: 1155292 - DNA, 15 bp, Homo sapiens
tgctggggtgttaac

SEQ ID NO: 1155293 - DNA, 15 bp, Homo sapiens
ttgctggggtgttaa

SEQ ID NO: 1155294 - DNA, 15 bp, Homo sapiens
attgctggggtgtta

SEQ ID NO: 1155295 - DNA, 15 bp, Homo sapiens
tattgctggggtgtt

SEQ ID NO: 1155296 - DNA, 15 bp, Homo sapiens
gtattgctggggtgt

SEQ ID NO: 1155297 - DNA, 15 bp, Homo sapiens
ggtattgctggggtg

SEQ ID NO: 1155298 - DNA, 15 bp, Homo sapiens
gggtattgctggggt

SEQ ID NO: 1155299 - DNA, 15 bp, Homo sapiens
tgggtattgctgggg

SEQ ID NO: 1155300 - DNA, 15 bp, Homo sapiens
ctgggtattgctggg

SEQ ID NO: 1155301 - DNA, 15 bp, Homo sapiens
gctgggtattgctgg

SEQ ID NO: 1155302 - DNA, 15 bp, Homo sapiens
agctgggtattgctg

SEQ ID NO: 1155303 - DNA, 15 bp, Homo sapiens
cagctgggtattgct

SEQ ID NO: 1155304 - DNA, 15 bp, Homo sapiens
ccagctgggtattgc

SEQ ID NO: 1155305 - DNA, 15 bp, Homo sapiens
tccagctgggtattg

SEQ ID NO: 1155306 - DNA, 15 bp, Homo sapiens
ttccagctgggtatt

SEQ ID NO: 1155307 - DNA, 15 bp, Homo sapiens
tttccagctgggtat

SEQ ID NO: 1155308 - DNA, 15 bp, Homo sapiens
gtttccagctgggta

SEQ ID NO: 1155309 - DNA, 15 bp, Homo sapiens
agtttccagctgggt

SEQ ID NO: 1155310 - DNA, 15 bp, Homo sapiens
cagtttccagctggg

SEQ ID NO: 1155311 - DNA, 15 bp, Homo sapiens
gcagtttccagctgg

SEQ ID NO: 1155312 - DNA, 15 bp, Homo sapiens
agcagtttccagctg

SEQ ID NO: 1155313 - DNA, 15 bp, Homo sapiens
tagcagtttccagct

SEQ ID NO: 1155314 - DNA, 15 bp, Homo sapiens
gtagcagtttccagc

SEQ ID NO: 1155315 - DNA, 15 bp, Homo sapiens
ggtagcagtttccag

SEQ ID NO: 1155316 - DNA, 15 bp, Homo sapiens
tggtagcagtttcca

SEQ ID NO: 1155317 - DNA, 15 bp, Homo sapiens
gtggtagcagtttcc

SEQ ID NO: 1155318 - DNA, 15 bp, Homo sapiens
ggtggtagcagtttc

SEQ ID NO: 1155319 - DNA, 15 bp, Homo sapiens
gggtggtagcagttt

SEQ ID NO: 1155320 - DNA, 15 bp, Homo sapiens
agggtggtagcagtt

SEQ ID NO: 1155321 - DNA, 15 bp, Homo sapiens
tagggtggtagcagt

SEQ ID NO: 1155322 - DNA, 15 bp, Homo sapiens
ttagggtggtagcag

SEQ ID NO: 1155323 - DNA, 15 bp, Homo sapiens
cttagggtggtagca

SEQ ID NO: 1155324 - DNA, 15 bp, Homo sapiens
gcttagggtggtagc

SEQ ID NO: 1155325 - DNA, 15 bp, Homo sapiens
ggcttagggtggtag

SEQ ID NO: 1155326 - DNA, 15 bp, Homo sapiens
aggcttagggtggta

SEQ ID NO: 1155327 - DNA, 15 bp, Homo sapiens
taggcttagggtggt

SEQ ID NO: 1155328 - DNA, 15 bp, Homo sapiens
ttaggcttagggtgg

SEQ ID NO: 1155329 - DNA, 15 bp, Homo sapiens
tttaggcttagggtg

SEQ ID NO: 1155330 - DNA, 15 bp, Homo sapiens
ctttaggcttagggt

SEQ ID NO: 1155331 - DNA, 15 bp, Homo sapiens
cctttaggcttaggg

SEQ ID NO: 1155332 - DNA, 15 bp, Homo sapiens
gcctttaggcttagg

SEQ ID NO: 1155333 - DNA, 15 bp, Homo sapiens
tgcctttaggcttag

SEQ ID NO: 1155334 - DNA, 15 bp, Homo sapiens
ttgcctttaggctta

SEQ ID NO: 1155335 - DNA, 15 bp, Homo sapiens
cttgcctttaggctt

SEQ ID NO: 1155336 - DNA, 15 bp, Homo sapiens
tcttgcctttaggct

SEQ ID NO: 1155337 - DNA, 15 bp, Homo sapiens
ctcttgcctttaggc

SEQ ID NO: 1155338 - DNA, 15 bp, Homo sapiens
tctcttgcctttagg

SEQ ID NO: 1155339 - DNA, 15 bp, Homo sapiens
ttctcttgcctttag

SEQ ID NO: 1155340 - DNA, 15 bp, Homo sapiens
cttctcttgccttta

SEQ ID NO: 1155341 - DNA, 15 bp, Homo sapiens
ccttctcttgccttt

SEQ ID NO: 1155342 - DNA, 15 bp, Homo sapiens
cccttctcttgcctt

SEQ ID NO: 1155343 - DNA, 15 bp, Homo sapiens
tcccttctcttgcct

SEQ ID NO: 1155344 - DNA, 15 bp, Homo sapiens
ttcccttctcttgcc

SEQ ID NO: 1155345 - DNA, 15 bp, Homo sapiens
tttcccttctcttgc

SEQ ID NO: 1155346 - DNA, 15 bp, Homo sapiens
ctttcccttctcttg

SEQ ID NO: 1155347 - DNA, 15 bp, Homo sapiens
tctttcccttctctt

SEQ ID NO: 1155348 - DNA, 15 bp, Homo sapiens
atctttcccttctct

SEQ ID NO: 1155349 - DNA, 15 bp, Homo sapiens
tatctttcccttctc

SEQ ID NO: 1155350 - DNA, 15 bp, Homo sapiens
ctatctttcccttct

SEQ ID NO: 1155351 - DNA, 15 bp, Homo sapiens
gctatctttcccttc

SEQ ID NO: 1155352 - DNA, 15 bp, Homo sapiens
ggctatctttccctt

SEQ ID NO: 1155353 - DNA, 15 bp, Homo sapiens
tggctatctttccct

SEQ ID NO: 1155354 - DNA, 15 bp, Homo sapiens
ctggctatctttccc

SEQ ID NO: 1155355 - DNA, 15 bp, Homo sapiens
tctggctatctttcc

SEQ ID NO: 1155356 - DNA, 15 bp, Homo sapiens
ttctggctatctttc

SEQ ID NO: 1155357 - DNA, 15 bp, Homo sapiens
gttctggctatcttt

SEQ ID NO: 1155358 - DNA, 15 bp, Homo sapiens
agttctggctatctt

SEQ ID NO: 1155359 - DNA, 15 bp, Homo sapiens
gagttctggctatct

SEQ ID NO: 1155360 - DNA, 15 bp, Homo sapiens
tgagttctggctatc

SEQ ID NO: 1155361 - DNA, 15 bp, Homo sapiens
ctgagttctggctat

SEQ ID NO: 1155362 - DNA, 15 bp, Homo sapiens
gctgagttctggcta

SEQ ID NO: 1155363 - DNA, 15 bp, Homo sapiens
tgctgagttctggct

SEQ ID NO: 1155364 - DNA, 15 bp, Homo sapiens
atgctgagttctggc

SEQ ID NO: 1155365 - DNA, 15 bp, Homo sapiens
tatgctgagttctgg

SEQ ID NO: 1155366 - DNA, 15 bp, Homo sapiens
ctatgctgagttctg

SEQ ID NO: 1155367 - DNA, 15 bp, Homo sapiens
cctatgctgagttct

SEQ ID NO: 1155368 - DNA, 15 bp, Homo sapiens
acctatgctgagttc

SEQ ID NO: 1155369 - DNA, 15 bp, Homo sapiens
cacctatgctgagtt

SEQ ID NO: 1155370 - DNA, 15 bp, Homo sapiens
gcacctatgctgagt

SEQ ID NO: 1155371 - DNA, 15 bp, Homo sapiens
agcacctatgctgag

SEQ ID NO: 1155372 - DNA, 15 bp, Homo sapiens
aagcacctatgctga

SEQ ID NO: 1155373 - DNA, 15 bp, Homo sapiens
aaagcacctatgctg

SEQ ID NO: 1155374 - DNA, 15 bp, Homo sapiens
gaaagcacctatgct

SEQ ID NO: 1155375 - DNA, 15 bp, Homo sapiens
agaaagcacctatgc

SEQ ID NO: 1155376 - DNA, 15 bp, Homo sapiens
cagaaagcacctatg

SEQ ID NO: 1155377 - DNA, 15 bp, Homo sapiens
acagaaagcacctat

SEQ ID NO: 1155378 - DNA, 15 bp, Homo sapiens
cacagaaagcaccta

SEQ ID NO: 1155379 - DNA, 15 bp, Homo sapiens
ccacagaaagcacct

SEQ ID NO: 1155380 - DNA, 15 bp, Homo sapiens
accacagaaagcacc

SEQ ID NO: 1155381 - DNA, 15 bp, Homo sapiens
gaccacagaaagcac

SEQ ID NO: 1155382 - DNA, 15 bp, Homo sapiens
agaccacagaaagca

SEQ ID NO: 1155383 - DNA, 15 bp, Homo sapiens
aagaccacagaaagc

SEQ ID NO: 1155384 - DNA, 15 bp, Homo sapiens
aaagaccacagaaag

SEQ ID NO: 1155385 - DNA, 15 bp, Homo sapiens
caaagaccacagaaa

SEQ ID NO: 1155386 - DNA, 15 bp, Homo sapiens
tcaaagaccacagaa

SEQ ID NO: 1155387 - DNA, 15 bp, Homo sapiens
atcaaagaccacaga

SEQ ID NO: 1155388 - DNA, 15 bp, Homo sapiens
catcaaagaccacag

SEQ ID NO: 1155389 - DNA, 15 bp, Homo sapiens
ccatcaaagaccaca

SEQ ID NO: 1155390 - DNA, 15 bp, Homo sapiens
tccatcaaagaccac

SEQ ID NO: 1155391 - DNA, 15 bp, Homo sapiens
ctccatcaaagacca

SEQ ID NO: 1155392 - DNA, 15 bp, Homo sapiens
cctccatcaaagacc

SEQ ID NO: 1155393 - DNA, 15 bp, Homo sapiens
ccctccatcaaagac

SEQ ID NO: 1155394 - DNA, 15 bp, Homo sapiens
tccctccatcaaaga

SEQ ID NO: 1155395 - DNA, 15 bp, Homo sapiens
gtccctccatcaaag

SEQ ID NO: 1155396 - DNA, 15 bp, Homo sapiens
tgtccctccatcaaa

SEQ ID NO: 1155397 - DNA, 15 bp, Homo sapiens
ctgtccctccatcaa

SEQ ID NO: 1155398 - DNA, 15 bp, Homo sapiens
gctgtccctccatca

SEQ ID NO: 1155399 - DNA, 15 bp, Homo sapiens
tgctgtccctccatc

SEQ ID NO: 1155400 - DNA, 15 bp, Homo sapiens
ttgctgtccctccat

SEQ ID NO: 1155401 - DNA, 15 bp, Homo sapiens
gttgctgtccctcca

SEQ ID NO: 1155402 - DNA, 15 bp, Homo sapiens
agttgctgtccctcc

SEQ ID NO: 1155403 - DNA, 15 bp, Homo sapiens
cagttgctgtccctc

SEQ ID NO: 1155404 - DNA, 15 bp, Homo sapiens
gcagttgctgtccct

SEQ ID NO: 1155405 - DNA, 15 bp, Homo sapiens
tgcagttgctgtccc

SEQ ID NO: 1155406 - DNA, 15 bp, Homo sapiens
gtgcagttgctgtcc

SEQ ID NO: 1155407 - DNA, 15 bp, Homo sapiens
tgtgcagttgctgtc

SEQ ID NO: 1155408 - DNA, 15 bp, Homo sapiens
ttgtgcagttgctgt

SEQ ID NO: 1155409 - DNA, 15 bp, Homo sapiens
cttgtgcagttgctg

SEQ ID NO: 1155410 - DNA, 15 bp, Homo sapiens
gcttgtgcagttgct

SEQ ID NO: 1155411 - DNA, 15 bp, Homo sapiens
tgcttgtgcagttgc

SEQ ID NO: 1155412 - DNA, 15 bp, Homo sapiens
ttgcttgtgcagttg

SEQ ID NO: 1155413 - DNA, 15 bp, Homo sapiens
attgcttgtgcagtt

SEQ ID NO: 1155414 - DNA, 15 bp, Homo sapiens
gattgcttgtgcagt

SEQ ID NO: 1155415 - DNA, 15 bp, Homo sapiens
agattgcttgtgcag

SEQ ID NO: 1155416 - DNA, 15 bp, Homo sapiens
cagattgcttgtgca

SEQ ID NO: 1155417 - DNA, 15 bp, Homo sapiens
tcagattgcttgtgc

SEQ ID NO: 1155418 - DNA, 15 bp, Homo sapiens
gtcagattgcttgtg

SEQ ID NO: 1155419 - DNA, 15 bp, Homo sapiens
tgtcagattgcttgt

SEQ ID NO: 1155420 - DNA, 15 bp, Homo sapiens
ttgtcagattgcttg

SEQ ID NO: 1155421 - DNA, 15 bp, Homo sapiens
cttgtcagattgctt

SEQ ID NO: 1155422 - DNA, 15 bp, Homo sapiens
tcttgtcagattgct

SEQ ID NO: 1155423 - DNA, 15 bp, Homo sapiens
ttcttgtcagattgc

SEQ ID NO: 1155424 - DNA, 15 bp, Homo sapiens
tttcttgtcagattg

SEQ ID NO: 1155425 - DNA, 15 bp, Homo sapiens
ctttcttgtcagatt

SEQ ID NO: 1155426 - DNA, 15 bp, Homo sapiens
tctttcttgtcagat

SEQ ID NO: 1155427 - DNA, 15 bp, Homo sapiens
ttctttcttgtcaga

SEQ ID NO: 1155428 - DNA, 15 bp, Homo sapiens
cttctttcttgtcag

SEQ ID NO: 1155429 - DNA, 15 bp, Homo sapiens
gcttctttcttgtca

SEQ ID NO: 1155430 - DNA, 15 bp, Homo sapiens
ggcttctttcttgtc

SEQ ID NO: 1155431 - DNA, 15 bp, Homo sapiens
tggcttctttcttgt

SEQ ID NO: 1155432 - DNA, 15 bp, Homo sapiens
ttggcttctttcttg

SEQ ID NO: 1155433 - DNA, 15 bp, Homo sapiens
tttggcttctttctt

SEQ ID NO: 1155434 - DNA, 15 bp, Homo sapiens
ctttggcttctttct

SEQ ID NO: 1155435 - DNA, 15 bp, Homo sapiens
tctttggcttctttc

SEQ ID NO: 1155436 - DNA, 15 bp, Homo sapiens
ttctttggcttcttt

SEQ ID NO: 1155437 - DNA, 15 bp, Homo sapiens
tttctttggcttctt

SEQ ID NO: 1155438 - DNA, 15 bp, Homo sapiens
gtttctttggcttct

SEQ ID NO: 1155439 - DNA, 15 bp, Homo sapiens
tgtttctttggcttc

SEQ ID NO: 1155440 - DNA, 15 bp, Homo sapiens
ttgtttctttggctt

SEQ ID NO: 1155441 - DNA, 15 bp, Homo sapiens
tttgtttctttggct

SEQ ID NO: 1155442 - DNA, 15 bp, Homo sapiens
atttgtttctttggc

SEQ ID NO: 1155443 - DNA, 15 bp, Homo sapiens
tatttgtttctttgg

SEQ ID NO: 1155444 - DNA, 15 bp, Homo sapiens
gtatttgtttctttg

SEQ ID NO: 1155445 - DNA, 15 bp, Homo sapiens
ggtatttgtttcttt

SEQ ID NO: 1155446 - DNA, 15 bp, Homo sapiens
aggtatttgtttctt

SEQ ID NO: 1155447 - DNA, 15 bp, Homo sapiens
aaggtatttgtttct

SEQ ID NO: 1155448 - DNA, 15 bp, Homo sapiens
caaggtatttgtttc

SEQ ID NO: 1155449 - DNA, 15 bp, Homo sapiens
ccaaggtatttgttt

SEQ ID NO: 1155450 - DNA, 15 bp, Homo sapiens
gccaaggtatttgtt

SEQ ID NO: 1155451 - DNA, 15 bp, Homo sapiens
ggccaaggtatttgt

SEQ ID NO: 1155452 - DNA, 15 bp, Homo sapiens
aggccaaggtatttg

SEQ ID NO: 1155453 - DNA, 15 bp, Homo sapiens
gaggccaaggtattt

SEQ ID NO: 1155454 - DNA, 15 bp, Homo sapiens
tgaggccaaggtatt

SEQ ID NO: 1155455 - DNA, 15 bp, Homo sapiens
gtgaggccaaggtat

SEQ ID NO: 1155456 - DNA, 15 bp, Homo sapiens
agtgaggccaaggta

SEQ ID NO: 1155457 - DNA, 15 bp, Homo sapiens
gagtgaggccaaggt

SEQ ID NO: 1155458 - DNA, 15 bp, Homo sapiens
ggagtgaggccaagg

SEQ ID NO: 1155459 - DNA, 15 bp, Homo sapiens
gggagtgaggccaag

SEQ ID NO: 1155460 - DNA, 15 bp, Homo sapiens
agggagtgaggccaa

SEQ ID NO: 1155461 - DNA, 15 bp, Homo sapiens
aagggagtgaggcca

SEQ ID NO: 1155462 - DNA, 15 bp, Homo sapiens
gaagggagtgaggcc

SEQ ID NO: 1155463 - DNA, 15 bp, Homo sapiens
ggaagggagtgaggc

SEQ ID NO: 1155464 - DNA, 15 bp, Homo sapiens
tggaagggagtgagg

SEQ ID NO: 1155465 - DNA, 15 bp, Homo sapiens
ctggaagggagtgag

SEQ ID NO: 1155466 - DNA, 15 bp, Homo sapiens
gctggaagggagtga

SEQ ID NO: 1155467 - DNA, 15 bp, Homo sapiens
ggctggaagggagtg

SEQ ID NO: 1155468 - DNA, 15 bp, Homo sapiens
aggctggaagggagt

SEQ ID NO: 1155469 - DNA, 15 bp, Homo sapiens
gaggctggaagggag

SEQ ID NO: 1155470 - DNA, 15 bp, Homo sapiens
ggaggctggaaggga

SEQ ID NO: 1155471 - DNA, 15 bp, Homo sapiens
gggaggctggaaggg

SEQ ID NO: 1155472 - DNA, 15 bp, Homo sapiens
agggaggctggaagg

SEQ ID NO: 1155473 - DNA, 15 bp, Homo sapiens
tagggaggctggaag

SEQ ID NO: 1155474 - DNA, 15 bp, Homo sapiens
atagggaggctggaa

SEQ ID NO: 1155475 - DNA, 15 bp, Homo sapiens
gatagggaggctgga

SEQ ID NO: 1155476 - DNA, 15 bp, Homo sapiens
ggatagggaggctgg

SEQ ID NO: 1155477 - DNA, 15 bp, Homo sapiens
aggatagggaggctg

SEQ ID NO: 1155478 - DNA, 15 bp, Homo sapiens
gaggatagggaggct

SEQ ID NO: 1155479 - DNA, 15 bp, Homo sapiens
agaggatagggaggc

SEQ ID NO: 1155480 - DNA, 15 bp, Homo sapiens
cagaggatagggagg

SEQ ID NO: 1155481 - DNA, 15 bp, Homo sapiens
gcagaggatagggag

SEQ ID NO: 1155482 - DNA, 15 bp, Homo sapiens
agcagaggataggga

SEQ ID NO: 1155483 - DNA, 15 bp, Homo sapiens
cagcagaggataggg

SEQ ID NO: 1155484 - DNA, 15 bp, Homo sapiens
acagcagaggatagg

SEQ ID NO: 1155485 - DNA, 15 bp, Homo sapiens
cacagcagaggatag

SEQ ID NO: 1155486 - DNA, 15 bp, Homo sapiens
gcacagcagaggata

SEQ ID NO: 1155487 - DNA, 15 bp, Homo sapiens
ggcacagcagaggat

SEQ ID NO: 1155488 - DNA, 15 bp, Homo sapiens
aggcacagcagagga

SEQ ID NO: 1155489 - DNA, 15 bp, Homo sapiens
aaggcacagcagagg

SEQ ID NO: 1155490 - DNA, 15 bp, Homo sapiens
gaaggcacagcagag

SEQ ID NO: 1155491 - DNA, 15 bp, Homo sapiens
ggaaggcacagcaga

SEQ ID NO: 1155492 - DNA, 15 bp, Homo sapiens
tggaaggcacagcag

SEQ ID NO: 1155493 - DNA, 15 bp, Homo sapiens
atggaaggcacagca

SEQ ID NO: 1155494 - DNA, 15 bp, Homo sapiens
aatggaaggcacagc

SEQ ID NO: 1155495 - DNA, 15 bp, Homo sapiens
caatggaaggcacag

SEQ ID NO: 1155496 - DNA, 15 bp, Homo sapiens
ccaatggaaggcaca

SEQ ID NO: 1155497 - DNA, 15 bp, Homo sapiens
gccaatggaaggcac

SEQ ID NO: 1155498 - DNA, 15 bp, Homo sapiens
ggccaatggaaggca

SEQ ID NO: 1155499 - DNA, 15 bp, Homo sapiens
tggccaatggaaggc

SEQ ID NO: 1155500 - DNA, 15 bp, Homo sapiens
ttggccaatggaagg

SEQ ID NO: 1155501 - DNA, 15 bp, Homo sapiens
tttggccaatggaag

SEQ ID NO: 1155502 - DNA, 15 bp, Homo sapiens
atttggccaatggaa

SEQ ID NO: 1155503 - DNA, 15 bp, Homo sapiens
gatttggccaatgga

SEQ ID NO: 1155504 - DNA, 15 bp, Homo sapiens
ggatttggccaatgg

SEQ ID NO: 1155505 - DNA, 15 bp, Homo sapiens
aggatttggccaatg

SEQ ID NO: 1155506 - DNA, 15 bp, Homo sapiens
taggatttggccaat

SEQ ID NO: 1155507 - DNA, 15 bp, Homo sapiens
ataggatttggccaa

SEQ ID NO: 1155508 - DNA, 15 bp, Homo sapiens
cataggatttggcca

SEQ ID NO: 1155509 - DNA, 15 bp, Homo sapiens
tcataggatttggcc

SEQ ID NO: 1155510 - DNA, 15 bp, Homo sapiens
ttcataggatttggc

SEQ ID NO: 1155511 - DNA, 15 bp, Homo sapiens
tttcataggatttgg

SEQ ID NO: 1155512 - DNA, 15 bp, Homo sapiens
gtttcataggatttg

SEQ ID NO: 1155513 - DNA, 15 bp, Homo sapiens
ggtttcataggattt

SEQ ID NO: 1155514 - DNA, 15 bp, Homo sapiens
tggtttcataggatt

SEQ ID NO: 1155515 - DNA, 15 bp, Homo sapiens
ctggtttcataggat

SEQ ID NO: 1155516 - DNA, 15 bp, Homo sapiens
tctggtttcatagga

SEQ ID NO: 1155517 - DNA, 15 bp, Homo sapiens
ctctggtttcatagg

SEQ ID NO: 1155518 - DNA, 15 bp, Homo sapiens
cctctggtttcatag

SEQ ID NO: 1155519 - DNA, 15 bp, Homo sapiens
tcctctggtttcata

SEQ ID NO: 1155520 - DNA, 15 bp, Homo sapiens
gtcctctggtttcat

SEQ ID NO: 1155521 - DNA, 15 bp, Homo sapiens
tgtcctctggtttca

SEQ ID NO: 1155522 - DNA, 15 bp, Homo sapiens
ttgtcctctggtttc

SEQ ID NO: 1155523 - DNA, 15 bp, Homo sapiens
cttgtcctctggttt

SEQ ID NO: 1155524 - DNA, 15 bp, Homo sapiens
tcttgtcctctggtt

SEQ ID NO: 1155525 - DNA, 15 bp, Homo sapiens
ttcttgtcctctggt

SEQ ID NO: 1155526 - DNA, 15 bp, Homo sapiens
tttcttgtcctctgg

SEQ ID NO: 1155527 - DNA, 15 bp, Homo sapiens
ttttcttgtcctctg

SEQ ID NO: 1155528 - DNA, 15 bp, Homo sapiens
gttttcttgtcctct

SEQ ID NO: 1155529 - DNA, 15 bp, Homo sapiens
ggttttcttgtcctc

SEQ ID NO: 1155530 - DNA, 15 bp, Homo sapiens
aggttttcttgtcct

SEQ ID NO: 1155531 - DNA, 15 bp, Homo sapiens
aaggttttcttgtcc

SEQ ID NO: 1155532 - DNA, 15 bp, Homo sapiens
aaaggttttcttgtc

SEQ ID NO: 1155533 - DNA, 15 bp, Homo sapiens
aaaaggttttcttgt

SEQ ID NO: 1155534 - DNA, 15 bp, Homo sapiens
caaaaggttttcttg

SEQ ID NO: 1155535 - DNA, 15 bp, Homo sapiens
tcaaaaggttttctt

SEQ ID NO: 1155536 - DNA, 15 bp, Homo sapiens
atcaaaaggttttct

SEQ ID NO: 1155537 - DNA, 15 bp, Homo sapiens
aatcaaaaggttttc

SEQ ID NO: 1155538 - DNA, 15 bp, Homo sapiens
gaatcaaaaggtttt

SEQ ID NO: 1155539 - DNA, 15 bp, Homo sapiens
tgaatcaaaaggttt

SEQ ID NO: 1155540 - DNA, 15 bp, Homo sapiens
ctgaatcaaaaggtt

SEQ ID NO: 1155541 - DNA, 15 bp, Homo sapiens
actgaatcaaaaggt

SEQ ID NO: 1155542 - DNA, 15 bp, Homo sapiens
aactgaatcaaaagg

SEQ ID NO: 1155543 - DNA, 15 bp, Homo sapiens
gaactgaatcaaaag

SEQ ID NO: 1155544 - DNA, 15 bp, Homo sapiens
tgaactgaatcaaaa

SEQ ID NO: 1155545 - DNA, 15 bp, Homo sapiens
atgaactgaatcaaa

SEQ ID NO: 1155546 - DNA, 15 bp, Homo sapiens
catgaactgaatcaa

SEQ ID NO: 1155547 - DNA, 15 bp, Homo sapiens
tcatgaactgaatca

SEQ ID NO: 1155548 - DNA, 15 bp, Homo sapiens
atcatgaactgaatc

SEQ ID NO: 1155549 - DNA, 15 bp, Homo sapiens
tatcatgaactgaat

SEQ ID NO: 1155550 - DNA, 15 bp, Homo sapiens
ctatcatgaactgaa

SEQ ID NO: 1155551 - DNA, 15 bp, Homo sapiens
actatcatgaactga

SEQ ID NO: 1155552 - DNA, 15 bp, Homo sapiens
aactatcatgaactg

SEQ ID NO: 1155553 - DNA, 15 bp, Homo sapiens
caactatcatgaact

SEQ ID NO: 1155554 - DNA, 15 bp, Homo sapiens
ccaactatcatgaac

SEQ ID NO: 1155555 - DNA, 15 bp, Homo sapiens
tccaactatcatgaa

SEQ ID NO: 1155556 - DNA, 15 bp, Homo sapiens
ttccaactatcatga

SEQ ID NO: 1155557 - DNA, 15 bp, Homo sapiens
attccaactatcatg

SEQ ID NO: 1155558 - DNA, 15 bp, Homo sapiens
gattccaactatcat

SEQ ID NO: 1155559 - DNA, 15 bp, Homo sapiens
ggattccaactatca

SEQ ID NO: 1155560 - DNA, 15 bp, Homo sapiens
gggattccaactatc

SEQ ID NO: 1155561 - DNA, 15 bp, Homo sapiens
ggggattccaactat

SEQ ID NO: 1155562 - DNA, 15 bp, Homo sapiens
tggggattccaacta

SEQ ID NO: 1155563 - DNA, 15 bp, Homo sapiens
ctggggattccaact

SEQ ID NO: 1155564 - DNA, 15 bp, Homo sapiens
tctggggattccaac

SEQ ID NO: 1155565 - DNA, 15 bp, Homo sapiens
gtctggggattccaa

SEQ ID NO: 1155566 - DNA, 15 bp, Homo sapiens
tgtctggggattcca

SEQ ID NO: 1155567 - DNA, 15 bp, Homo sapiens
atgtctggggattcc

SEQ ID NO: 1155568 - DNA, 15 bp, Homo sapiens
catgtctggggattc

SEQ ID NO: 1155569 - DNA, 15 bp, Homo sapiens
ccatgtctggggatt

SEQ ID NO: 1155570 - DNA, 15 bp, Homo sapiens
tccatgtctggggat

SEQ ID NO: 1155571 - DNA, 15 bp, Homo sapiens
ctccatgtctgggga

SEQ ID NO: 1155572 - DNA, 15 bp, Homo sapiens
actccatgtctgggg

SEQ ID NO: 1155573 - DNA, 15 bp, Homo sapiens
tactccatgtctggg

SEQ ID NO: 1155574 - DNA, 15 bp, Homo sapiens
ctactccatgtctgg

SEQ ID NO: 1155575 - DNA, 15 bp, Homo sapiens
cctactccatgtctg

SEQ ID NO: 1155576 - DNA, 15 bp, Homo sapiens
ccctactccatgtct

SEQ ID NO: 1155577 - DNA, 15 bp, Homo sapiens
cccctactccatgtc

SEQ ID NO: 1155578 - DNA, 15 bp, Homo sapiens
ccccctactccatgt

SEQ ID NO: 1155579 - DNA, 15 bp, Homo sapiens
tccccctactccatg

SEQ ID NO: 1155580 - DNA, 15 bp, Homo sapiens
atccccctactccat

SEQ ID NO: 1155581 - DNA, 15 bp, Homo sapiens
tatccccctactcca

SEQ ID NO: 1155582 - DNA, 15 bp, Homo sapiens
ctatccccctactcc

SEQ ID NO: 1155583 - DNA, 15 bp, Homo sapiens
tctatccccctactc

SEQ ID NO: 1155584 - DNA, 15 bp, Homo sapiens
ttctatccccctact

SEQ ID NO: 1155585 - DNA, 15 bp, Homo sapiens
cttctatccccctac

SEQ ID NO: 1155586 - DNA, 15 bp, Homo sapiens
ccttctatcccccta

SEQ ID NO: 1155587 - DNA, 15 bp, Homo sapiens
accttctatccccct

SEQ ID NO: 1155588 - DNA, 15 bp, Homo sapiens
taccttctatccccc

SEQ ID NO: 1155589 - DNA, 15 bp, Homo sapiens
ctaccttctatcccc

SEQ ID NO: 1155590 - DNA, 15 bp, Homo sapiens
tctaccttctatccc

SEQ ID NO: 1155591 - DNA, 15 bp, Homo sapiens
ctctaccttctatcc

SEQ ID NO: 1155592 - DNA, 15 bp, Homo sapiens
tctctaccttctatc

SEQ ID NO: 1155593 - DNA, 15 bp, Homo sapiens
atctctaccttctat

SEQ ID NO: 1155594 - DNA, 15 bp, Homo sapiens
catctctaccttcta

SEQ ID NO: 1155595 - DNA, 15 bp, Homo sapiens
ccatctctaccttct

SEQ ID NO: 1155596 - DNA, 15 bp, Homo sapiens
cccatctctaccttc

SEQ ID NO: 1155597 - DNA, 15 bp, Homo sapiens
acccatctctacctt

SEQ ID NO: 1155598 - DNA, 15 bp, Homo sapiens
tacccatctctacct

SEQ ID NO: 1155599 - DNA, 15 bp, Homo sapiens
ttacccatctctacc

SEQ ID NO: 1155600 - DNA, 15 bp, Homo sapiens
tttacccatctctac

SEQ ID NO: 1155601 - DNA, 15 bp, Homo sapiens
ttttacccatctcta

SEQ ID NO: 1155602 - DNA, 15 bp, Homo sapiens
tttttacccatctct

SEQ ID NO: 1155603 - DNA, 15 bp, Homo sapiens
ctttttacccatctc

SEQ ID NO: 1155604 - DNA, 15 bp, Homo sapiens
actttttacccatct

SEQ ID NO: 1155605 - DNA, 15 bp, Homo sapiens
cactttttacccatc

SEQ ID NO: 1155606 - DNA, 15 bp, Homo sapiens
tcactttttacccat

SEQ ID NO: 1155607 - DNA, 15 bp, Homo sapiens
ctcactttttaccca

SEQ ID NO: 1155608 - DNA, 15 bp, Homo sapiens
cctcactttttaccc

SEQ ID NO: 1155609 - DNA, 15 bp, Homo sapiens
tcctcactttttacc

SEQ ID NO: 1155610 - DNA, 15 bp, Homo sapiens
ctcctcactttttac

SEQ ID NO: 1155611 - DNA, 15 bp, Homo sapiens
actcctcacttttta

SEQ ID NO: 1155612 - DNA, 15 bp, Homo sapiens
cactcctcacttttt

SEQ ID NO: 1155613 - DNA, 15 bp, Homo sapiens
tcactcctcactttt

SEQ ID NO: 1155614 - DNA, 15 bp, Homo sapiens
atcactcctcacttt

SEQ ID NO: 1155615 - DNA, 15 bp, Homo sapiens
aatcactcctcactt

SEQ ID NO: 1155616 - DNA, 15 bp, Homo sapiens
aaatcactcctcact

SEQ ID NO: 1155617 - DNA, 15 bp, Homo sapiens
aaaatcactcctcac

SEQ ID NO: 1155618 - DNA, 15 bp, Homo sapiens
caaaatcactcctca

SEQ ID NO: 1155619 - DNA, 15 bp, Homo sapiens
ccaaaatcactcctc

SEQ ID NO: 1155620 - DNA, 15 bp, Homo sapiens
cccaaaatcactcct

SEQ ID NO: 1155621 - DNA, 15 bp, Homo sapiens
ccccaaaatcactcc

SEQ ID NO: 1155622 - DNA, 15 bp, Homo sapiens
cccccaaaatcactc

SEQ ID NO: 1155623 - DNA, 15 bp, Homo sapiens
tcccccaaaatcact

SEQ ID NO: 1155624 - DNA, 15 bp, Homo sapiens
gtcccccaaaatcac

SEQ ID NO: 1155625 - DNA, 15 bp, Homo sapiens
tgtcccccaaaatca

SEQ ID NO: 1155626 - DNA, 15 bp, Homo sapiens
ttgtcccccaaaatc

SEQ ID NO: 1155627 - DNA, 15 bp, Homo sapiens
tttgtcccccaaaat

SEQ ID NO: 1155628 - DNA, 15 bp, Homo sapiens
atttgtcccccaaaa

SEQ ID NO: 1155629 - DNA, 15 bp, Homo sapiens
catttgtcccccaaa

SEQ ID NO: 1155630 - DNA, 15 bp, Homo sapiens
ccatttgtcccccaa

SEQ ID NO: 1155631 - DNA, 15 bp, Homo sapiens
tccatttgtccccca

SEQ ID NO: 1155632 - DNA, 15 bp, Homo sapiens
ttccatttgtccccc

SEQ ID NO: 1155633 - DNA, 15 bp, Homo sapiens
gttccatttgtcccc

SEQ ID NO: 1155634 - DNA, 15 bp, Homo sapiens
agttccatttgtccc

SEQ ID NO: 1155635 - DNA, 15 bp, Homo sapiens
tagttccatttgtcc

SEQ ID NO: 1155636 - DNA, 15 bp, Homo sapiens
ctagttccatttgtc

SEQ ID NO: 1155637 - DNA, 15 bp, Homo sapiens
gctagttccatttgt

SEQ ID NO: 1155638 - DNA, 15 bp, Homo sapiens
tgctagttccatttg

SEQ ID NO: 1155639 - DNA, 15 bp, Homo sapiens
ctgctagttccattt

SEQ ID NO: 1155640 - DNA, 15 bp, Homo sapiens
gctgctagttccatt

SEQ ID NO: 1155641 - DNA, 15 bp, Homo sapiens
agctgctagttccat

SEQ ID NO: 1155642 - DNA, 15 bp, Homo sapiens
cagctgctagttcca

SEQ ID NO: 1155643 - DNA, 15 bp, Homo sapiens
ccagctgctagttcc

SEQ ID NO: 1155644 - DNA, 15 bp, Homo sapiens
cccagctgctagttc

SEQ ID NO: 1155645 - DNA, 15 bp, Homo sapiens
ccccagctgctagtt

SEQ ID NO: 1155646 - DNA, 15 bp, Homo sapiens
tccccagctgctagt

SEQ ID NO: 1155647 - DNA, 15 bp, Homo sapiens
atccccagctgctag

SEQ ID NO: 1155648 - DNA, 15 bp, Homo sapiens
aatccccagctgcta

SEQ ID NO: 1155649 - DNA, 15 bp, Homo sapiens
taatccccagctgct

SEQ ID NO: 1155650 - DNA, 15 bp, Homo sapiens
gtaatccccagctgc

SEQ ID NO: 1155651 - DNA, 15 bp, Homo sapiens
tgtaatccccagctg

SEQ ID NO: 1155652 - DNA, 15 bp, Homo sapiens
ttgtaatccccagct

SEQ ID NO: 1155653 - DNA, 15 bp, Homo sapiens
gttgtaatccccagc

SEQ ID NO: 1155654 - DNA, 15 bp, Homo sapiens
agttgtaatccccag

SEQ ID NO: 1155655 - DNA, 15 bp, Homo sapiens
aagttgtaatcccca

SEQ ID NO: 1155656 - DNA, 15 bp, Homo sapiens
taagttgtaatcccc

SEQ ID NO: 1155657 - DNA, 15 bp, Homo sapiens
ctaagttgtaatccc

SEQ ID NO: 1155658 - DNA, 15 bp, Homo sapiens
tctaagttgtaatcc

SEQ ID NO: 1155659 - DNA, 15 bp, Homo sapiens
ctctaagttgtaatc

SEQ ID NO: 1155660 - DNA, 15 bp, Homo sapiens
actctaagttgtaat

SEQ ID NO: 1155661 - DNA, 15 bp, Homo sapiens
tactctaagttgtaa

SEQ ID NO: 1155662 - DNA, 15 bp, Homo sapiens
gtactctaagttgta

SEQ ID NO: 1155663 - DNA, 15 bp, Homo sapiens
tgtactctaagttgt

SEQ ID NO: 1155664 - DNA, 15 bp, Homo sapiens
ttgtactctaagttg

SEQ ID NO: 1155665 - DNA, 15 bp, Homo sapiens
gttgtactctaagtt

SEQ ID NO: 1155666 - DNA, 15 bp, Homo sapiens
agttgtactctaagt

SEQ ID NO: 1155667 - DNA, 15 bp, Homo sapiens
tagttgtactctaag

SEQ ID NO: 1155668 - DNA, 15 bp, Homo sapiens
atagttgtactctaa

SEQ ID NO: 1155669 - DNA, 15 bp, Homo sapiens
aatagttgtactcta

SEQ ID NO: 1155670 - DNA, 15 bp, Homo sapiens
aaatagttgtactct

SEQ ID NO: 1155671 - DNA, 15 bp, Homo sapiens
taaatagttgtactc

SEQ ID NO: 1155672 - DNA, 15 bp, Homo sapiens
ataaatagttgtact

SEQ ID NO: 1155673 - DNA, 15 bp, Homo sapiens
aataaatagttgtac

SEQ ID NO: 1155674 - DNA, 15 bp, Homo sapiens
caataaatagttgta

SEQ ID NO: 1155675 - DNA, 15 bp, Homo sapiens
acaataaatagttgt

SEQ ID NO: 1155676 - DNA, 15 bp, Homo sapiens
tacaataaatagttg

SEQ ID NO: 1155677 - DNA, 15 bp, Homo sapiens
atacaataaatagtt

SEQ ID NO: 1155678 - DNA, 15 bp, Homo sapiens
tatacaataaatagt

SEQ ID NO: 1155679 - DNA, 15 bp, Homo sapiens
ttatacaataaatag

SEQ ID NO: 1155680 - DNA, 15 bp, Homo sapiens
tttatacaataaata

SEQ ID NO: 1155681 - DNA, 15 bp, Homo sapiens
ttttatacaataaat

SEQ ID NO: 1155682 - DNA, 15 bp, Homo sapiens
tttttatacaataaa

SEQ ID NO: 1155683 - DNA, 15 bp, Homo sapiens
ttttttatacaataa

SEQ ID NO: 1155684 - DNA, 15 bp, Homo sapiens
attttttatacaata

SEQ ID NO: 1155685 - DNA, 15 bp, Homo sapiens
tattttttatacaat

SEQ ID NO: 1155686 - DNA, 15 bp, Homo sapiens
atattttttatacaa

SEQ ID NO: 1155687 - DNA, 15 bp, Homo sapiens
aatattttttataca

SEQ ID NO: 1155688 - DNA, 15 bp, Homo sapiens
caatattttttatac

SEQ ID NO: 1155689 - DNA, 15 bp, Homo sapiens
tcaatattttttata

SEQ ID NO: 1155690 - DNA, 15 bp, Homo sapiens
ctcaatattttttat

SEQ ID NO: 1155691 - DNA, 15 bp, Homo sapiens
tctcaatatttttta

SEQ ID NO: 1155692 - DNA, 15 bp, Homo sapiens
ttctcaatatttttt

SEQ ID NO: 1155693 - DNA, 15 bp, Homo sapiens
gttctcaatattttt

SEQ ID NO: 1155694 - DNA, 15 bp, Homo sapiens
tgttctcaatatttt

SEQ ID NO: 1155695 - DNA, 15 bp, Homo sapiens
atgttctcaatattt

SEQ ID NO: 1155696 - DNA, 15 bp, Homo sapiens
aatgttctcaatatt

SEQ ID NO: 1155697 - DNA, 15 bp, Homo sapiens
aaatgttctcaatat

SEQ ID NO: 1155698 - DNA, 15 bp, Homo sapiens
gaaatgttctcaata

SEQ ID NO: 1155699 - DNA, 15 bp, Homo sapiens
agaaatgttctcaat

SEQ ID NO: 1155700 - DNA, 15 bp, Homo sapiens
cagaaatgttctcaa

SEQ ID NO: 1155701 - DNA, 15 bp, Homo sapiens
tcagaaatgttctca

SEQ ID NO: 1155702 - DNA, 15 bp, Homo sapiens
ttcagaaatgttctc

SEQ ID NO: 1155703 - DNA, 15 bp, Homo sapiens
tttcagaaatgttct

SEQ ID NO: 1155704 - DNA, 15 bp, Homo sapiens
ctttcagaaatgttc

SEQ ID NO: 1155705 - DNA, 15 bp, Homo sapiens
actttcagaaatgtt

SEQ ID NO: 1155706 - DNA, 15 bp, Homo sapiens
cactttcagaaatgt

SEQ ID NO: 1155707 - DNA, 15 bp, Homo sapiens
tcactttcagaaatg

SEQ ID NO: 1155708 - DNA, 15 bp, Homo sapiens
ttcactttcagaaat

SEQ ID NO: 1155709 - DNA, 15 bp, Homo sapiens
tttcactttcagaaa

SEQ ID NO: 1155710 - DNA, 15 bp, Homo sapiens
ttttcactttcagaa

SEQ ID NO: 1155711 - DNA, 15 bp, Homo sapiens
gttttcactttcaga

SEQ ID NO: 1155712 - DNA, 15 bp, Homo sapiens
ggttttcactttcag

SEQ ID NO: 1155713 - DNA, 15 bp, Homo sapiens
cggttttcactttca

SEQ ID NO: 1155714 - DNA, 15 bp, Homo sapiens
acggttttcactttc

SEQ ID NO: 1155715 - DNA, 15 bp, Homo sapiens
aacggttttcacttt

SEQ ID NO: 1155716 - DNA, 15 bp, Homo sapiens
caacggttttcactt

SEQ ID NO: 1155717 - DNA, 15 bp, Homo sapiens
ccaacggttttcact

SEQ ID NO: 1155718 - DNA, 15 bp, Homo sapiens
tccaacggttttcac

SEQ ID NO: 1155719 - DNA, 15 bp, Homo sapiens
ttccaacggttttca

SEQ ID NO: 1155720 - DNA, 15 bp, Homo sapiens
tttccaacggttttc

SEQ ID NO: 1155721 - DNA, 15 bp, Homo sapiens
ctttccaacggtttt

SEQ ID NO: 1155722 - DNA, 15 bp, Homo sapiens
actttccaacggttt

SEQ ID NO: 1155723 - DNA, 15 bp, Homo sapiens
gactttccaacggtt

SEQ ID NO: 1155724 - DNA, 15 bp, Homo sapiens
tgactttccaacggt

SEQ ID NO: 1155725 - DNA, 15 bp, Homo sapiens
gtgactttccaacgg

SEQ ID NO: 1155726 - DNA, 15 bp, Homo sapiens
tgtgactttccaacg

SEQ ID NO: 1155727 - DNA, 15 bp, Homo sapiens
atgtgactttccaac

SEQ ID NO: 1155728 - DNA, 15 bp, Homo sapiens
aatgtgactttccaa

SEQ ID NO: 1155729 - DNA, 15 bp, Homo sapiens
taatgtgactttcca

SEQ ID NO: 1155730 - DNA, 15 bp, Homo sapiens
ataatgtgactttcc

SEQ ID NO: 1155731 - DNA, 15 bp, Homo sapiens
aataatgtgactttc

SEQ ID NO: 1155732 - DNA, 15 bp, Homo sapiens
gaataatgtgacttt

SEQ ID NO: 1155733 - DNA, 15 bp, Homo sapiens
ggaataatgtgactt

SEQ ID NO: 1155734 - DNA, 15 bp, Homo sapiens
aggaataatgtgact

SEQ ID NO: 1155735 - DNA, 15 bp, Homo sapiens
caggaataatgtgac

SEQ ID NO: 1155736 - DNA, 15 bp, Homo sapiens
gcaggaataatgtga

SEQ ID NO: 1155737 - DNA, 15 bp, Homo sapiens
agcaggaataatgtg

SEQ ID NO: 1155738 - DNA, 15 bp, Homo sapiens
aagcaggaataatgt

SEQ ID NO: 1155739 - DNA, 15 bp, Homo sapiens
gaagcaggaataatg

SEQ ID NO: 1155740 - DNA, 15 bp, Homo sapiens
ggaagcaggaataat

SEQ ID NO: 1155741 - DNA, 15 bp, Homo sapiens
aggaagcaggaataa

SEQ ID NO: 1155742 - DNA, 15 bp, Homo sapiens
aaggaagcaggaata

SEQ ID NO: 1155743 - DNA, 15 bp, Homo sapiens
aaaggaagcaggaat

SEQ ID NO: 1155744 - DNA, 15 bp, Homo sapiens
gaaaggaagcaggaa

SEQ ID NO: 1155745 - DNA, 15 bp, Homo sapiens
agaaaggaagcagga

SEQ ID NO: 1155746 - DNA, 15 bp, Homo sapiens
aagaaaggaagcagg

SEQ ID NO: 1155747 - DNA, 15 bp, Homo sapiens
aaagaaaggaagcag

SEQ ID NO: 1155748 - DNA, 15 bp, Homo sapiens
aaaagaaaggaagca

SEQ ID NO: 1155749 - DNA, 15 bp, Homo sapiens
aaaaagaaaggaagc

SEQ ID NO: 1155750 - DNA, 15 bp, Homo sapiens
taaaaaagaaaggaa

SEQ ID NO: 1155751 - DNA, 15 bp, Homo sapiens
ttaaaaaagaaagga

SEQ ID NO: 1155752 - DNA, 15 bp, Homo sapiens
tttaaaaaagaaagg

SEQ ID NO: 1155753 - DNA, 15 bp, Homo sapiens
ttttaaaaaagaaag

SEQ ID NO: 1155754 - DNA, 15 bp, Homo sapiens
attttaaaaaagaaa

SEQ ID NO: 1155755 - DNA, 15 bp, Homo sapiens
gattttaaaaaagaa

SEQ ID NO: 1155756 - DNA, 15 bp, Homo sapiens
tgattttaaaaaaga

SEQ ID NO: 1155757 - DNA, 15 bp, Homo sapiens
atgattttaaaaaag

SEQ ID NO: 1155758 - DNA, 15 bp, Homo sapiens
aatgattttaaaaaa

SEQ ID NO: 1155759 - DNA, 15 bp, Homo sapiens
caatgattttaaaaa

SEQ ID NO: 1155760 - DNA, 15 bp, Homo sapiens
tcaatgattttaaaa

SEQ ID NO: 1155761 - DNA, 15 bp, Homo sapiens
ttcaatgattttaaa

SEQ ID NO: 1155762 - DNA, 15 bp, Homo sapiens
tttcaatgattttaa

SEQ ID NO: 1155763 - DNA, 15 bp, Homo sapiens
atttcaatgatttta

SEQ ID NO: 1155764 - DNA, 15 bp, Homo sapiens
catttcaatgatttt

SEQ ID NO: 1155765 - DNA, 15 bp, Homo sapiens
acatttcaatgattt

SEQ ID NO: 1155766 - DNA, 15 bp, Homo sapiens
aacatttcaatgatt

SEQ ID NO: 1155767 - DNA, 15 bp, Homo sapiens
taacatttcaatgat

SEQ ID NO: 1155768 - DNA, 15 bp, Homo sapiens
ttaacatttcaatga

SEQ ID NO: 1155769 - DNA, 15 bp, Homo sapiens
tttaacatttcaatg

SEQ ID NO: 1155770 - DNA, 15 bp, Homo sapiens
atttaacatttcaat

SEQ ID NO: 1155771 - DNA, 15 bp, Homo sapiens
aatttaacatttcaa

SEQ ID NO: 1155772 - DNA, 15 bp, Homo sapiens
taatttaacatttca

SEQ ID NO: 1155773 - DNA, 15 bp, Homo sapiens
ataatttaacatttc

SEQ ID NO: 1155774 - DNA, 15 bp, Homo sapiens
cataatttaacattt

SEQ ID NO: 1155775 - DNA, 15 bp, Homo sapiens
ccataatttaacatt

SEQ ID NO: 1155776 - DNA, 15 bp, Homo sapiens
tccataatttaacat

SEQ ID NO: 1155777 - DNA, 15 bp, Homo sapiens
ttccataatttaaca

SEQ ID NO: 1155778 - DNA, 15 bp, Homo sapiens
tttccataatttaac

SEQ ID NO: 1155779 - DNA, 15 bp, Homo sapiens
gtttccataatttaa

SEQ ID NO: 1155780 - DNA, 15 bp, Homo sapiens
ggtttccataattta

SEQ ID NO: 1155781 - DNA, 15 bp, Homo sapiens
aggtttccataattt

SEQ ID NO: 1155782 - DNA, 15 bp, Homo sapiens
taggtttccataatt

SEQ ID NO: 1155783 - DNA, 15 bp, Homo sapiens
ctaggtttccataat

SEQ ID NO: 1155784 - DNA, 15 bp, Homo sapiens
tctaggtttccataa

SEQ ID NO: 1155785 - DNA, 15 bp, Homo sapiens
ttctaggtttccata

SEQ ID NO: 1155786 - DNA, 15 bp, Homo sapiens
cttctaggtttccat

SEQ ID NO: 1155787 - DNA, 15 bp, Homo sapiens
tcttctaggtttcca

SEQ ID NO: 1155788 - DNA, 15 bp, Homo sapiens
gtcttctaggtttcc

SEQ ID NO: 1155789 - DNA, 15 bp, Homo sapiens
tgtcttctaggtttc

SEQ ID NO: 1155790 - DNA, 15 bp, Homo sapiens
ctgtcttctaggttt

SEQ ID NO: 1155791 - DNA, 15 bp, Homo sapiens
gctgtcttctaggtt

SEQ ID NO: 1155792 - DNA, 15 bp, Homo sapiens
agctgtcttctaggt

SEQ ID NO: 1155793 - DNA, 15 bp, Homo sapiens
aagctgtcttctagg

SEQ ID NO: 1155794 - DNA, 15 bp, Homo sapiens
aaagctgtcttctag

SEQ ID NO: 1155795 - DNA, 15 bp, Homo sapiens
taaagctgtcttcta

SEQ ID NO: 1155796 - DNA, 15 bp, Homo sapiens
ctaaagctgtcttct

SEQ ID NO: 1155797 - DNA, 15 bp, Homo sapiens
cctaaagctgtcttc

SEQ ID NO: 1155798 - DNA, 15 bp, Homo sapiens
gcctaaagctgtctt

SEQ ID NO: 1155799 - DNA, 15 bp, Homo sapiens
tgcctaaagctgtct

SEQ ID NO: 1155800 - DNA, 15 bp, Homo sapiens
ctgcctaaagctgtc

SEQ ID NO: 1155801 - DNA, 15 bp, Homo sapiens
actgcctaaagctgt

SEQ ID NO: 1155802 - DNA, 15 bp, Homo sapiens
tactgcctaaagctg

SEQ ID NO: 1155803 - DNA, 15 bp, Homo sapiens
gtactgcctaaagct

SEQ ID NO: 1155804 - DNA, 15 bp, Homo sapiens
tgtactgcctaaagc

SEQ ID NO: 1155805 - DNA, 15 bp, Homo sapiens
ctgtactgcctaaag

SEQ ID NO: 1155806 - DNA, 15 bp, Homo sapiens
cctgtactgcctaaa

SEQ ID NO: 1155807 - DNA, 15 bp, Homo sapiens
ccctgtactgcctaa

SEQ ID NO: 1155808 - DNA, 15 bp, Homo sapiens
tccctgtactgccta

SEQ ID NO: 1155809 - DNA, 15 bp, Homo sapiens
ttccctgtactgcct

SEQ ID NO: 1155810 - DNA, 15 bp, Homo sapiens
cttccctgtactgcc

SEQ ID NO: 1155811 - DNA, 15 bp, Homo sapiens
gcttccctgtactgc

SEQ ID NO: 1155812 - DNA, 15 bp, Homo sapiens
agcttccctgtactg

SEQ ID NO: 1155813 - DNA, 15 bp, Homo sapiens
tagcttccctgtact

SEQ ID NO: 1155814 - DNA, 15 bp, Homo sapiens
atagcttccctgtac

SEQ ID NO: 1155815 - DNA, 15 bp, Homo sapiens
catagcttccctgta

SEQ ID NO: 1155816 - DNA, 15 bp, Homo sapiens
gcatagcttccctgt

SEQ ID NO: 1155817 - DNA, 15 bp, Homo sapiens
tgcatagcttccctg

SEQ ID NO: 1155818 - DNA, 15 bp, Homo sapiens
ctgcatagcttccct

SEQ ID NO: 1155819 - DNA, 15 bp, Homo sapiens
gctgcatagcttccc

SEQ ID NO: 1155820 - DNA, 15 bp, Homo sapiens
ggctgcatagcttcc

SEQ ID NO: 1155821 - DNA, 15 bp, Homo sapiens
tggctgcatagcttc

SEQ ID NO: 1155822 - DNA, 15 bp, Homo sapiens
gtggctgcatagctt

SEQ ID NO: 1155823 - DNA, 15 bp, Homo sapiens
tgtggctgcatagct

SEQ ID NO: 1155824 - DNA, 15 bp, Homo sapiens
atgtggctgcatagc

SEQ ID NO: 1155825 - DNA, 15 bp, Homo sapiens
catgtggctgcatag

SEQ ID NO: 1155826 - DNA, 15 bp, Homo sapiens
acatgtggctgcata

SEQ ID NO: 1155827 - DNA, 15 bp, Homo sapiens
cacatgtggctgcat

SEQ ID NO: 1155828 - DNA, 15 bp, Homo sapiens
ccacatgtggctgca

SEQ ID NO: 1155829 - DNA, 15 bp, Homo sapiens
cccacatgtggctgc

SEQ ID NO: 1155830 - DNA, 15 bp, Homo sapiens
acccacatgtggctg

SEQ ID NO: 1155831 - DNA, 15 bp, Homo sapiens
aacccacatgtggct

SEQ ID NO: 1155832 - DNA, 15 bp, Homo sapiens
caacccacatgtggc

SEQ ID NO: 1155833 - DNA, 15 bp, Homo sapiens
acaacccacatgtgg

SEQ ID NO: 1155834 - DNA, 15 bp, Homo sapiens
aacaacccacatgtg

SEQ ID NO: 1155835 - DNA, 15 bp, Homo sapiens
gaacaacccacatgt

SEQ ID NO: 1155836 - DNA, 15 bp, Homo sapiens
tgaacaacccacatg

SEQ ID NO: 1155837 - DNA, 15 bp, Homo sapiens
atgaacaacccacat

SEQ ID NO: 1155838 - DNA, 15 bp, Homo sapiens
gatgaacaacccaca

SEQ ID NO: 1155839 - DNA, 15 bp, Homo sapiens
tgatgaacaacccac

SEQ ID NO: 1155840 - DNA, 15 bp, Homo sapiens
gtgatgaacaaccca

SEQ ID NO: 1155841 - DNA, 15 bp, Homo sapiens
agtgatgaacaaccc

SEQ ID NO: 1155842 - DNA, 15 bp, Homo sapiens
tagtgatgaacaacc

SEQ ID NO: 1155843 - DNA, 15 bp, Homo sapiens
atagtgatgaacaac

SEQ ID NO: 1155844 - DNA, 15 bp, Homo sapiens
aatagtgatgaacaa

SEQ ID NO: 1155845 - DNA, 15 bp, Homo sapiens
aaatagtgatgaaca

SEQ ID NO: 1155846 - DNA, 15 bp, Homo sapiens
aaaatagtgatgaac

SEQ ID NO: 1155847 - DNA, 15 bp, Homo sapiens
taaaatagtgatgaa

SEQ ID NO: 1155848 - DNA, 15 bp, Homo sapiens
ttaaaatagtgatga

SEQ ID NO: 1155849 - DNA, 15 bp, Homo sapiens
tttaaaatagtgatg

SEQ ID NO: 1155850 - DNA, 15 bp, Homo sapiens
ttttaaaatagtgat

SEQ ID NO: 1155851 - DNA, 15 bp, Homo sapiens
gttttaaaatagtga

SEQ ID NO: 1155852 - DNA, 15 bp, Homo sapiens
agttttaaaatagtg

SEQ ID NO: 1155853 - DNA, 15 bp, Homo sapiens
aagttttaaaatagt

SEQ ID NO: 1155854 - DNA, 15 bp, Homo sapiens
taagttttaaaatag

SEQ ID NO: 1155855 - DNA, 15 bp, Homo sapiens
ctaagttttaaaata

SEQ ID NO: 1155856 - DNA, 15 bp, Homo sapiens
actaagttttaaaat

SEQ ID NO: 1155857 - DNA, 15 bp, Homo sapiens
aactaagttttaaaa

SEQ ID NO: 1155858 - DNA, 15 bp, Homo sapiens
aaactaagttttaaa

SEQ ID NO: 1155859 - DNA, 15 bp, Homo sapiens
aaaactaagttttaa

SEQ ID NO: 1155860 - DNA, 15 bp, Homo sapiens
aaaaactaagtttta

SEQ ID NO: 1155861 - DNA, 15 bp, Homo sapiens
caaaaactaagtttt

SEQ ID NO: 1155862 - DNA, 15 bp, Homo sapiens
ccaaaaactaagttt

SEQ ID NO: 1155863 - DNA, 15 bp, Homo sapiens
gccaaaaactaagtt

SEQ ID NO: 1155864 - DNA, 15 bp, Homo sapiens
tgccaaaaactaagt

SEQ ID NO: 1155865 - DNA, 15 bp, Homo sapiens
ttgccaaaaactaag

SEQ ID NO: 1155866 - DNA, 15 bp, Homo sapiens
gttgccaaaaactaa

SEQ ID NO: 1155867 - DNA, 15 bp, Homo sapiens
agttgccaaaaacta

SEQ ID NO: 1155868 - DNA, 15 bp, Homo sapiens
gagttgccaaaaact

SEQ ID NO: 1155869 - DNA, 15 bp, Homo sapiens
tgagttgccaaaaac

SEQ ID NO: 1155870 - DNA, 15 bp, Homo sapiens
gtgagttgccaaaaa

SEQ ID NO: 1155871 - DNA, 15 bp, Homo sapiens
ggtgagttgccaaaa

SEQ ID NO: 1155872 - DNA, 15 bp, Homo sapiens
aggtgagttgccaaa

SEQ ID NO: 1155873 - DNA, 15 bp, Homo sapiens
aaggtgagttgccaa

SEQ ID NO: 1155874 - DNA, 15 bp, Homo sapiens
aaaggtgagttgcca

SEQ ID NO: 1155875 - DNA, 15 bp, Homo sapiens
aaaaggtgagttgcc

SEQ ID NO: 1155876 - DNA, 15 bp, Homo sapiens
gaaaaggtgagttgc

SEQ ID NO: 1155877 - DNA, 15 bp, Homo sapiens
cgaaaaggtgagttg

SEQ ID NO: 1155878 - DNA, 15 bp, Homo sapiens
acgaaaaggtgagtt

SEQ ID NO: 1155879 - DNA, 15 bp, Homo sapiens
gacgaaaaggtgagt

SEQ ID NO: 1155880 - DNA, 15 bp, Homo sapiens
tgacgaaaaggtgag

SEQ ID NO: 1155881 - DNA, 15 bp, Homo sapiens
ttgacgaaaaggtga

SEQ ID NO: 1155882 - DNA, 15 bp, Homo sapiens
cttgacgaaaaggtg

SEQ ID NO: 1155883 - DNA, 15 bp, Homo sapiens
gcttgacgaaaaggt

SEQ ID NO: 1155884 - DNA, 15 bp, Homo sapiens
tgcttgacgaaaagg

SEQ ID NO: 1155885 - DNA, 15 bp, Homo sapiens
atgcttgacgaaaag

SEQ ID NO: 1155886 - DNA, 15 bp, Homo sapiens
aatgcttgacgaaaa

SEQ ID NO: 1155887 - DNA, 15 bp, Homo sapiens
aaatgcttgacgaaa

SEQ ID NO: 1155888 - DNA, 15 bp, Homo sapiens
taaatgcttgacgaa

SEQ ID NO: 1155889 - DNA, 15 bp, Homo sapiens
ttaaatgcttgacga

SEQ ID NO: 1155890 - DNA, 15 bp, Homo sapiens
tttaaatgcttgacg

SEQ ID NO: 1155891 - DNA, 15 bp, Homo sapiens
ctttaaatgcttgac

SEQ ID NO: 1155892 - DNA, 15 bp, Homo sapiens
cctttaaatgcttga

SEQ ID NO: 1155893 - DNA, 15 bp, Homo sapiens
tcctttaaatgcttg

SEQ ID NO: 1155894 - DNA, 15 bp, Homo sapiens
ttcctttaaatgctt

SEQ ID NO: 1155895 - DNA, 15 bp, Homo sapiens
tttcctttaaatgct

SEQ ID NO: 1155896 - DNA, 15 bp, Homo sapiens
ctttcctttaaatgc

SEQ ID NO: 1155897 - DNA, 15 bp, Homo sapiens
actttcctttaaatg

SEQ ID NO: 1155898 - DNA, 15 bp, Homo sapiens
aactttcctttaaat

SEQ ID NO: 1155899 - DNA, 15 bp, Homo sapiens
aaactttcctttaaa

SEQ ID NO: 1155900 - DNA, 15 bp, Homo sapiens
aaaactttcctttaa

SEQ ID NO: 1155901 - DNA, 15 bp, Homo sapiens
taaaactttccttta

SEQ ID NO: 1155902 - DNA, 15 bp, Homo sapiens
gtaaaactttccttt

SEQ ID NO: 1155903 - DNA, 15 bp, Homo sapiens
tagtaaaactttcct

SEQ ID NO: 1155904 - DNA, 15 bp, Homo sapiens
atagtaaaactttcc

SEQ ID NO: 1155905 - DNA, 15 bp, Homo sapiens
tatagtaaaactttc

SEQ ID NO: 1155906 - DNA, 15 bp, Homo sapiens
gtatagtaaaacttt

SEQ ID NO: 1155907 - DNA, 15 bp, Homo sapiens
ggtatagtaaaactt

SEQ ID NO: 1155908 - DNA, 15 bp, Homo sapiens
aggtatagtaaaact

SEQ ID NO: 1155909 - DNA, 15 bp, Homo sapiens
gaggtatagtaaaac

SEQ ID NO: 1155910 - DNA, 15 bp, Homo sapiens
agaggtatagtaaaa

SEQ ID NO: 1155911 - DNA, 15 bp, Homo sapiens
gagaggtatagtaaa

SEQ ID NO: 1155912 - DNA, 15 bp, Homo sapiens
tgagaggtatagtaa

SEQ ID NO: 1155913 - DNA, 15 bp, Homo sapiens
atgagaggtatagta

SEQ ID NO: 1155914 - DNA, 15 bp, Homo sapiens
gatgagaggtatagt

SEQ ID NO: 1155915 - DNA, 15 bp, Homo sapiens
ggatgagaggtatag

SEQ ID NO: 1155916 - DNA, 15 bp, Homo sapiens
gggatgagaggtata

SEQ ID NO: 1155917 - DNA, 15 bp, Homo sapiens
tgggatgagaggtat

SEQ ID NO: 1155918 - DNA, 15 bp, Homo sapiens
ctgggatgagaggta

SEQ ID NO: 1155919 - DNA, 15 bp, Homo sapiens
gctgggatgagaggt

SEQ ID NO: 1155920 - DNA, 15 bp, Homo sapiens
ggctgggatgagagg

SEQ ID NO: 1155921 - DNA, 15 bp, Homo sapiens
gggctgggatgagag

SEQ ID NO: 1155922 - DNA, 15 bp, Homo sapiens
ggggctgggatgaga

SEQ ID NO: 1155923 - DNA, 15 bp, Homo sapiens
aggggctgggatgag

SEQ ID NO: 1155924 - DNA, 15 bp, Homo sapiens
taggggctgggatga

SEQ ID NO: 1155925 - DNA, 15 bp, Homo sapiens
ctaggggctgggatg

SEQ ID NO: 1155926 - DNA, 15 bp, Homo sapiens
cctaggggctgggat

SEQ ID NO: 1155927 - DNA, 15 bp, Homo sapiens
acctaggggctggga

SEQ ID NO: 1155928 - DNA, 15 bp, Homo sapiens
tacctaggggctggg

SEQ ID NO: 1155929 - DNA, 15 bp, Homo sapiens
atacctaggggctgg

SEQ ID NO: 1155930 - DNA, 15 bp, Homo sapiens
aatacctaggggctg

SEQ ID NO: 1155931 - DNA, 15 bp, Homo sapiens
taatacctaggggct

SEQ ID NO: 1155932 - DNA, 15 bp, Homo sapiens
ttaatacctaggggc

SEQ ID NO: 1155933 - DNA, 15 bp, Homo sapiens
tttaatacctagggg

SEQ ID NO: 1155934 - DNA, 15 bp, Homo sapiens
ttttaatacctaggg

SEQ ID NO: 1155935 - DNA, 15 bp, Homo sapiens
gttttaatacctagg

SEQ ID NO: 1155936 - DNA, 15 bp, Homo sapiens
ggttttaatacctag

SEQ ID NO: 1155937 - DNA, 15 bp, Homo sapiens
gggttttaataccta

SEQ ID NO: 1155938 - DNA, 15 bp, Homo sapiens
tgggttttaatacct

SEQ ID NO: 1155939 - DNA, 15 bp, Homo sapiens
atgggttttaatacc

SEQ ID NO: 1155940 - DNA, 15 bp, Homo sapiens
aatgggttttaatac

SEQ ID NO: 1155941 - DNA, 15 bp, Homo sapiens
aaatgggttttaata

SEQ ID NO: 1155942 - DNA, 15 bp, Homo sapiens
aaaatgggttttaat

SEQ ID NO: 1155943 - DNA, 15 bp, Homo sapiens
aaaaatgggttttaa

SEQ ID NO: 1155944 - DNA, 15 bp, Homo sapiens
taaaaatgggtttta

SEQ ID NO: 1155945 - DNA, 15 bp, Homo sapiens
ttaaaaatgggtttt

SEQ ID NO: 1155946 - DNA, 15 bp, Homo sapiens
attaaaaatgggttt

SEQ ID NO: 1155947 - DNA, 15 bp, Homo sapiens
tattaaaaatgggtt

SEQ ID NO: 1155948 - DNA, 15 bp, Homo sapiens
atattaaaaatgggt

SEQ ID NO: 1155949 - DNA, 15 bp, Homo sapiens
gatattaaaaatggg

SEQ ID NO: 1155950 - DNA, 15 bp, Homo sapiens
agatattaaaaatgg

SEQ ID NO: 1155951 - DNA, 15 bp, Homo sapiens
aagatattaaaaatg

SEQ ID NO: 1155952 - DNA, 15 bp, Homo sapiens
taagatattaaaaat

SEQ ID NO: 1155953 - DNA, 15 bp, Homo sapiens
ctaagatattaaaaa

SEQ ID NO: 1155954 - DNA, 15 bp, Homo sapiens
gctaagatattaaaa

SEQ ID NO: 1155955 - DNA, 15 bp, Homo sapiens
agctaagatattaaa

SEQ ID NO: 1155956 - DNA, 15 bp, Homo sapiens
aagctaagatattaa

SEQ ID NO: 1155957 - DNA, 15 bp, Homo sapiens
aaagctaagatatta

SEQ ID NO: 1155958 - DNA, 15 bp, Homo sapiens
taaagctaagatatt

SEQ ID NO: 1155959 - DNA, 15 bp, Homo sapiens
ctaaagctaagatat

SEQ ID NO: 1155960 - DNA, 15 bp, Homo sapiens
tctaaagctaagata

SEQ ID NO: 1155961 - DNA, 15 bp, Homo sapiens
ttctaaagctaagat

SEQ ID NO: 1155962 - DNA, 15 bp, Homo sapiens
tttctaaagctaaga

SEQ ID NO: 1155963 - DNA, 15 bp, Homo sapiens
atttctaaagctaag

SEQ ID NO: 1155964 - DNA, 15 bp, Homo sapiens
aatttctaaagctaa

SEQ ID NO: 1155965 - DNA, 15 bp, Homo sapiens
aaatttctaaagcta

SEQ ID NO: 1155966 - DNA, 15 bp, Homo sapiens
caaatttctaaagct

SEQ ID NO: 1155967 - DNA, 15 bp, Homo sapiens
tcaaatttctaaagc

SEQ ID NO: 1155968 - DNA, 15 bp, Homo sapiens
ttcaaatttctaaag

SEQ ID NO: 1155969 - DNA, 15 bp, Homo sapiens
cttcaaatttctaaa

SEQ ID NO: 1155970 - DNA, 15 bp, Homo sapiens
ccttcaaatttctaa

SEQ ID NO: 1155971 - DNA, 15 bp, Homo sapiens
accttcaaatttcta

SEQ ID NO: 1155972 - DNA, 15 bp, Homo sapiens
caccttcaaatttct

SEQ ID NO: 1155973 - DNA, 15 bp, Homo sapiens
tcaccttcaaatttc

SEQ ID NO: 1155974 - DNA, 15 bp, Homo sapiens
ttcaccttcaaattt

SEQ ID NO: 1155975 - DNA, 15 bp, Homo sapiens
tttcaccttcaaatt

SEQ ID NO: 1155976 - DNA, 15 bp, Homo sapiens
ttttcaccttcaaat

SEQ ID NO: 1155977 - DNA, 15 bp, Homo sapiens
gttttcaccttcaaa

SEQ ID NO: 1155978 - DNA, 15 bp, Homo sapiens
agttttcaccttcaa

SEQ ID NO: 1155979 - DNA, 15 bp, Homo sapiens
aagttttcaccttca

SEQ ID NO: 1155980 - DNA, 15 bp, Homo sapiens
taagttttcaccttc

SEQ ID NO: 1155981 - DNA, 15 bp, Homo sapiens
ttaagttttcacctt

SEQ ID NO: 1155982 - DNA, 15 bp, Homo sapiens
tttaagttttcacct

SEQ ID NO: 1155983 - DNA, 15 bp, Homo sapiens
ctttaagttttcacc

SEQ ID NO: 1155984 - DNA, 15 bp, Homo sapiens
actttaagttttcac

SEQ ID NO: 1155985 - DNA, 15 bp, Homo sapiens
aactttaagttttca

SEQ ID NO: 1155986 - DNA, 15 bp, Homo sapiens
gaactttaagttttc

SEQ ID NO: 1155987 - DNA, 15 bp, Homo sapiens
agaactttaagtttt

SEQ ID NO: 1155988 - DNA, 15 bp, Homo sapiens
gagaactttaagttt

SEQ ID NO: 1155989 - DNA, 15 bp, Homo sapiens
ggagaactttaagtt

SEQ ID NO: 1155990 - DNA, 15 bp, Homo sapiens
tggagaactttaagt

SEQ ID NO: 1155991 - DNA, 15 bp, Homo sapiens
atggagaactttaag

SEQ ID NO: 1155992 - DNA, 15 bp, Homo sapiens
aatggagaactttaa

SEQ ID NO: 1155993 - DNA, 15 bp, Homo sapiens
taatggagaacttta

SEQ ID NO: 1155994 - DNA, 15 bp, Homo sapiens
ataatggagaacttt

SEQ ID NO: 1155995 - DNA, 15 bp, Homo sapiens
aataatggagaactt

SEQ ID NO: 1155996 - DNA, 15 bp, Homo sapiens
taataatggagaact

SEQ ID NO: 1155997 - DNA, 15 bp, Homo sapiens
ctaataatggagaac

SEQ ID NO: 1155998 - DNA, 15 bp, Homo sapiens
actaataatggagaa

SEQ ID NO: 1155999 - DNA, 15 bp, Homo sapiens
tactaataatggaga

SEQ ID NO: 1156000 - DNA, 15 bp, Homo sapiens
ctactaataatggag

SEQ ID NO: 1156001 - DNA, 15 bp, Homo sapiens
tctactaataatgga

SEQ ID NO: 1156002 - DNA, 15 bp, Homo sapiens
ctctactaataatgg

SEQ ID NO: 1156003 - DNA, 15 bp, Homo sapiens
tctctactaataatg

SEQ ID NO: 1156004 - DNA, 15 bp, Homo sapiens
ttctctactaataat

SEQ ID NO: 1156005 - DNA, 15 bp, Homo sapiens
gttctctactaataa

SEQ ID NO: 1156006 - DNA, 15 bp, Homo sapiens
agttctctactaata

SEQ ID NO: 1156007 - DNA, 15 bp, Homo sapiens
gagttctctactaat

SEQ ID NO: 1156008 - DNA, 15 bp, Homo sapiens
ggagttctctactaa

SEQ ID NO: 1156009 - DNA, 15 bp, Homo sapiens
gggagttctctacta

SEQ ID NO: 1156010 - DNA, 15 bp, Homo sapiens
tgggagttctctact

SEQ ID NO: 1156011 - DNA, 15 bp, Homo sapiens
gtgggagttctctac

SEQ ID NO: 1156012 - DNA, 15 bp, Homo sapiens
agtgggagttctcta

SEQ ID NO: 1156013 - DNA, 15 bp, Homo sapiens
gagtgggagttctct

SEQ ID NO: 1156014 - DNA, 15 bp, Homo sapiens
ggagtgggagttctc

SEQ ID NO: 1156015 - DNA, 15 bp, Homo sapiens
aggagtgggagttct

SEQ ID NO: 1156016 - DNA, 15 bp, Homo sapiens
aaggagtgggagttc

SEQ ID NO: 1156017 - DNA, 15 bp, Homo sapiens
aaaggagtgggagtt

SEQ ID NO: 1156018 - DNA, 15 bp, Homo sapiens
gaaaggagtgggagt

SEQ ID NO: 1156019 - DNA, 15 bp, Homo sapiens
agaaaggagtgggag

SEQ ID NO: 1156020 - DNA, 15 bp, Homo sapiens
gagaaaggagtggga

SEQ ID NO: 1156021 - DNA, 15 bp, Homo sapiens
agagaaaggagtggg

SEQ ID NO: 1156022 - DNA, 15 bp, Homo sapiens
cagagaaaggagtgg

SEQ ID NO: 1156023 - DNA, 15 bp, Homo sapiens
ccagagaaaggagtg

SEQ ID NO: 1156024 - DNA, 15 bp, Homo sapiens
cccagagaaaggagt

SEQ ID NO: 1156025 - DNA, 15 bp, Homo sapiens
ccccagagaaaggag

SEQ ID NO: 1156026 - DNA, 15 bp, Homo sapiens
accccagagaaagga

SEQ ID NO: 1156027 - DNA, 15 bp, Homo sapiens
taccccagagaaagg

SEQ ID NO: 1156028 - DNA, 15 bp, Homo sapiens
ctaccccagagaaag

SEQ ID NO: 1156029 - DNA, 15 bp, Homo sapiens
actaccccagagaaa

SEQ ID NO: 1156030 - DNA, 15 bp, Homo sapiens
cactaccccagagaa

SEQ ID NO: 1156031 - DNA, 15 bp, Homo sapiens
gcactaccccagaga

SEQ ID NO: 1156032 - DNA, 15 bp, Homo sapiens
agcactaccccagag

SEQ ID NO: 1156033 - DNA, 15 bp, Homo sapiens
cagcactaccccaga

SEQ ID NO: 1156034 - DNA, 15 bp, Homo sapiens
ccagcactaccccag

SEQ ID NO: 1156035 - DNA, 15 bp, Homo sapiens
accagcactacccca

SEQ ID NO: 1156036 - DNA, 15 bp, Homo sapiens
taccagcactacccc

SEQ ID NO: 1156037 - DNA, 15 bp, Homo sapiens
ataccagcactaccc

SEQ ID NO: 1156038 - DNA, 15 bp, Homo sapiens
gataccagcactacc

SEQ ID NO: 1156039 - DNA, 15 bp, Homo sapiens
tgataccagcactac

SEQ ID NO: 1156040 - DNA, 15 bp, Homo sapiens
ctgataccagcacta

SEQ ID NO: 1156041 - DNA, 15 bp, Homo sapiens
tctgataccagcact

SEQ ID NO: 1156042 - DNA, 15 bp, Homo sapiens
ttctgataccagcac

SEQ ID NO: 1156043 - DNA, 15 bp, Homo sapiens
cttctgataccagca

SEQ ID NO: 1156044 - DNA, 15 bp, Homo sapiens
acttctgataccagc

SEQ ID NO: 1156045 - DNA, 15 bp, Homo sapiens
tacttctgataccag

SEQ ID NO: 1156046 - DNA, 15 bp, Homo sapiens
ttacttctgatacca

SEQ ID NO: 1156047 - DNA, 15 bp, Homo sapiens
tttacttctgatacc

SEQ ID NO: 1156048 - DNA, 15 bp, Homo sapiens
atttacttctgatac

SEQ ID NO: 1156049 - DNA, 15 bp, Homo sapiens
aatttacttctgata

SEQ ID NO: 1156050 - DNA, 15 bp, Homo sapiens
caatttacttctgat

SEQ ID NO: 1156051 - DNA, 15 bp, Homo sapiens
gcaatttacttctga

SEQ ID NO: 1156052 - DNA, 15 bp, Homo sapiens
agcaatttacttctg

SEQ ID NO: 1156053 - DNA, 15 bp, Homo sapiens
aagcaatttacttct

SEQ ID NO: 1156054 - DNA, 15 bp, Homo sapiens
aaagcaatttacttc

SEQ ID NO: 1156055 - DNA, 15 bp, Homo sapiens
caaagcaatttactt

SEQ ID NO: 1156056 - DNA, 15 bp, Homo sapiens
acaaagcaatttact

SEQ ID NO: 1156057 - DNA, 15 bp, Homo sapiens
cacaaagcaatttac

SEQ ID NO: 1156058 - DNA, 15 bp, Homo sapiens
tcacaaagcaattta

SEQ ID NO: 1156059 - DNA, 15 bp, Homo sapiens
ttcacaaagcaattt

SEQ ID NO: 1156060 - DNA, 15 bp, Homo sapiens
cttcacaaagcaatt

SEQ ID NO: 1156061 - DNA, 15 bp, Homo sapiens
acttcacaaagcaat

SEQ ID NO: 1156062 - DNA, 15 bp, Homo sapiens
aacttcacaaagcaa

SEQ ID NO: 1156063 - DNA, 15 bp, Homo sapiens
caacttcacaaagca

SEQ ID NO: 1156064 - DNA, 15 bp, Homo sapiens
acaacttcacaaagc

SEQ ID NO: 1156065 - DNA, 15 bp, Homo sapiens
tacaacttcacaaag

SEQ ID NO: 1156066 - DNA, 15 bp, Homo sapiens
ctacaacttcacaaa

SEQ ID NO: 1156067 - DNA, 15 bp, Homo sapiens
tctacaacttcacaa

SEQ ID NO: 1156068 - DNA, 15 bp, Homo sapiens
atctacaacttcaca

SEQ ID NO: 1156069 - DNA, 15 bp, Homo sapiens
gatctacaacttcac

SEQ ID NO: 1156070 - DNA, 15 bp, Homo sapiens
agatctacaacttca

SEQ ID NO: 1156071 - DNA, 15 bp, Homo sapiens
gagatctacaacttc

SEQ ID NO: 1156072 - DNA, 15 bp, Homo sapiens
tgagatctacaactt

SEQ ID NO: 1156073 - DNA, 15 bp, Homo sapiens
ctgagatctacaact

SEQ ID NO: 1156074 - DNA, 15 bp, Homo sapiens
cctgagatctacaac

SEQ ID NO: 1156075 - DNA, 15 bp, Homo sapiens
tcctgagatctacaa

SEQ ID NO: 1156076 - DNA, 15 bp, Homo sapiens
atcctgagatctaca

SEQ ID NO: 1156077 - DNA, 15 bp, Homo sapiens
gatcctgagatctac

SEQ ID NO: 1156078 - DNA, 15 bp, Homo sapiens
agatcctgagatcta

SEQ ID NO: 1156079 - DNA, 15 bp, Homo sapiens
aagatcctgagatct

SEQ ID NO: 1156080 - DNA, 15 bp, Homo sapiens
aaagatcctgagatc

SEQ ID NO: 1156081 - DNA, 15 bp, Homo sapiens
taaagatcctgagat

SEQ ID NO: 1156082 - DNA, 15 bp, Homo sapiens
ctaaagatcctgaga

SEQ ID NO: 1156083 - DNA, 15 bp, Homo sapiens
gctaaagatcctgag

SEQ ID NO: 1156084 - DNA, 15 bp, Homo sapiens
ggctaaagatcctga

SEQ ID NO: 1156085 - DNA, 15 bp, Homo sapiens
gggctaaagatcctg

SEQ ID NO: 1156086 - DNA, 15 bp, Homo sapiens
agggctaaagatcct

SEQ ID NO: 1156087 - DNA, 15 bp, Homo sapiens
aagggctaaagatcc

SEQ ID NO: 1156088 - DNA, 15 bp, Homo sapiens
gaagggctaaagatc

SEQ ID NO: 1156089 - DNA, 15 bp, Homo sapiens
ggaagggctaaagat

SEQ ID NO: 1156090 - DNA, 15 bp, Homo sapiens
aggaagggctaaaga

SEQ ID NO: 1156091 - DNA, 15 bp, Homo sapiens
taggaagggctaaag

SEQ ID NO: 1156092 - DNA, 15 bp, Homo sapiens
ttaggaagggctaaa

SEQ ID NO: 1156093 - DNA, 15 bp, Homo sapiens
tttaggaagggctaa

SEQ ID NO: 1156094 - DNA, 15 bp, Homo sapiens
ttttaggaagggcta

SEQ ID NO: 1156095 - DNA, 15 bp, Homo sapiens
cttttaggaagggct

SEQ ID NO: 1156096 - DNA, 15 bp, Homo sapiens
acttttaggaagggc

SEQ ID NO: 1156097 - DNA, 15 bp, Homo sapiens
aacttttaggaaggg

SEQ ID NO: 1156098 - DNA, 15 bp, Homo sapiens
caacttttaggaagg

SEQ ID NO: 1156099 - DNA, 15 bp, Homo sapiens
acaacttttaggaag

SEQ ID NO: 1156100 - DNA, 15 bp, Homo sapiens
gacaacttttaggaa

SEQ ID NO: 1156101 - DNA, 15 bp, Homo sapiens
tgacaacttttagga

SEQ ID NO: 1156102 - DNA, 15 bp, Homo sapiens
atgacaacttttagg

SEQ ID NO: 1156103 - DNA, 15 bp, Homo sapiens
tatgacaacttttag

SEQ ID NO: 1156104 - DNA, 15 bp, Homo sapiens
ttatgacaactttta

SEQ ID NO: 1156105 - DNA, 15 bp, Homo sapiens
attatgacaactttt

SEQ ID NO: 1156106 - DNA, 15 bp, Homo sapiens
gattatgacaacttt

SEQ ID NO: 1156107 - DNA, 15 bp, Homo sapiens
tgattatgacaactt

SEQ ID NO: 1156108 - DNA, 15 bp, Homo sapiens
ttgattatgacaact

SEQ ID NO: 1156109 - DNA, 15 bp, Homo sapiens
attgattatgacaac

SEQ ID NO: 1156110 - DNA, 15 bp, Homo sapiens
tattgattatgacaa

SEQ ID NO: 1156111 - DNA, 15 bp, Homo sapiens
atattgattatgaca

SEQ ID NO: 1156112 - DNA, 15 bp, Homo sapiens
gatattgattatgac

SEQ ID NO: 1156113 - DNA, 15 bp, Homo sapiens
ggatattgattatga

SEQ ID NO: 1156114 - DNA, 15 bp, Homo sapiens
tggatattgattatg

SEQ ID NO: 1156115 - DNA, 15 bp, Homo sapiens
atggatattgattat

SEQ ID NO: 1156116 - DNA, 15 bp, Homo sapiens
gatggatattgatta

SEQ ID NO: 1156117 - DNA, 15 bp, Homo sapiens
agatggatattgatt

SEQ ID NO: 1156118 - DNA, 15 bp, Homo sapiens
aagatggatattgat

SEQ ID NO: 1156119 - DNA, 15 bp, Homo sapiens
aaagatggatattga

SEQ ID NO: 1156120 - DNA, 15 bp, Homo sapiens
taaagatggatattg

SEQ ID NO: 1156121 - DNA, 15 bp, Homo sapiens
ttaaagatggatatt

SEQ ID NO: 1156122 - DNA, 15 bp, Homo sapiens
tttaaagatggatat

SEQ ID NO: 1156123 - DNA, 15 bp, Homo sapiens
ctttaaagatggata

SEQ ID NO: 1156124 - DNA, 15 bp, Homo sapiens
tctttaaagatggat

SEQ ID NO: 1156125 - DNA, 15 bp, Homo sapiens
ctctttaaagatgga

SEQ ID NO: 1156126 - DNA, 15 bp, Homo sapiens
gctctttaaagatgg

SEQ ID NO: 1156127 - DNA, 15 bp, Homo sapiens
tgctctttaaagatg

SEQ ID NO: 1156128 - DNA, 15 bp, Homo sapiens
atgctctttaaagat

SEQ ID NO: 1156129 - DNA, 15 bp, Homo sapiens
tatgctctttaaaga

SEQ ID NO: 1156130 - DNA, 15 bp, Homo sapiens
atatgctctttaaag

SEQ ID NO: 1156131 - DNA, 15 bp, Homo sapiens
tatatgctctttaaa

SEQ ID NO: 1156132 - DNA, 15 bp, Homo sapiens
ttatatgctctttaa

SEQ ID NO: 1156133 - DNA, 15 bp, Homo sapiens
attatatgctcttta

SEQ ID NO: 1156134 - DNA, 15 bp, Homo sapiens
aattatatgctcttt

SEQ ID NO: 1156135 - DNA, 15 bp, Homo sapiens
taattatatgctctt

SEQ ID NO: 1156136 - DNA, 15 bp, Homo sapiens
ctaattatatgctct

SEQ ID NO: 1156137 - DNA, 15 bp, Homo sapiens
tctaattatatgctc

SEQ ID NO: 1156138 - DNA, 15 bp, Homo sapiens
ttctaattatatgct

SEQ ID NO: 1156139 - DNA, 15 bp, Homo sapiens
tttctaattatatgc

SEQ ID NO: 1156140 - DNA, 15 bp, Homo sapiens
ttttctaattatatg

SEQ ID NO: 1156141 - DNA, 15 bp, Homo sapiens
attttctaattatat

SEQ ID NO: 1156142 - DNA, 15 bp, Homo sapiens
tattttctaattata

SEQ ID NO: 1156143 - DNA, 15 bp, Homo sapiens
ctattttctaattat

SEQ ID NO: 1156144 - DNA, 15 bp, Homo sapiens
tctattttctaatta

SEQ ID NO: 1156145 - DNA, 15 bp, Homo sapiens
ttctattttctaatt

SEQ ID NO: 1156146 - DNA, 15 bp, Homo sapiens
gttctattttctaat

SEQ ID NO: 1156147 - DNA, 15 bp, Homo sapiens
agttctattttctaa

SEQ ID NO: 1156148 - DNA, 15 bp, Homo sapiens
aagttctattttcta

SEQ ID NO: 1156149 - DNA, 15 bp, Homo sapiens
aaagttctattttct

SEQ ID NO: 1156150 - DNA, 15 bp, Homo sapiens
taaagttctattttc

SEQ ID NO: 1156151 - DNA, 15 bp, Homo sapiens
ctaaagttctatttt

SEQ ID NO: 1156152 - DNA, 15 bp, Homo sapiens
actaaagttctattt

SEQ ID NO: 1156153 - DNA, 15 bp, Homo sapiens
aactaaagttctatt

SEQ ID NO: 1156154 - DNA, 15 bp, Homo sapiens
aaactaaagttctat

SEQ ID NO: 1156155 - DNA, 15 bp, Homo sapiens
taaactaaagttcta

SEQ ID NO: 1156156 - DNA, 15 bp, Homo sapiens
ttaaactaaagttct

SEQ ID NO: 1156157 - DNA, 15 bp, Homo sapiens
cttaaactaaagttc

SEQ ID NO: 1156158 - DNA, 15 bp, Homo sapiens
ccttaaactaaagtt

SEQ ID NO: 1156159 - DNA, 15 bp, Homo sapiens
accttaaactaaagt

SEQ ID NO: 1156160 - DNA, 15 bp, Homo sapiens
caccttaaactaaag

SEQ ID NO: 1156161 - DNA, 15 bp, Homo sapiens
tcaccttaaactaaa

SEQ ID NO: 1156162 - DNA, 15 bp, Homo sapiens
gtcaccttaaactaa

SEQ ID NO: 1156163 - DNA, 15 bp, Homo sapiens
agtcaccttaaacta

SEQ ID NO: 1156164 - DNA, 15 bp, Homo sapiens
aagtcaccttaaact

SEQ ID NO: 1156165 - DNA, 15 bp, Homo sapiens
aaagtcaccttaaac

SEQ ID NO: 1156166 - DNA, 15 bp, Homo sapiens
aaaagtcaccttaaa

SEQ ID NO: 1156167 - DNA, 15 bp, Homo sapiens
aaaaagtcaccttaa

SEQ ID NO: 1156168 - DNA, 15 bp, Homo sapiens
aaaaaagtcacctta

SEQ ID NO: 1156169 - DNA, 15 bp, Homo sapiens
aaaaaaagtcacctt

SEQ ID NO: 1156170 - DNA, 15 bp, Homo sapiens
aaaaaaaagtcacct

SEQ ID NO: 1156171 - DNA, 15 bp, Homo sapiens
gaaaaaaaagtcacc

SEQ ID NO: 1156172 - DNA, 15 bp, Homo sapiens
ggaaaaaaaagtcac

SEQ ID NO: 1156173 - DNA, 15 bp, Homo sapiens
tggaaaaaaaagtca

SEQ ID NO: 1156174 - DNA, 15 bp, Homo sapiens
ctggaaaaaaaagtc

SEQ ID NO: 1156175 - DNA, 15 bp, Homo sapiens
tctggaaaaaaaagt

SEQ ID NO: 1156176 - DNA, 15 bp, Homo sapiens
ctctggaaaaaaaag

SEQ ID NO: 1156177 - DNA, 15 bp, Homo sapiens
actctggaaaaaaaa

SEQ ID NO: 1156178 - DNA, 15 bp, Homo sapiens
cactctggaaaaaaa

SEQ ID NO: 1156179 - DNA, 15 bp, Homo sapiens
gcactctggaaaaaa

SEQ ID NO: 1156180 - DNA, 15 bp, Homo sapiens
agcactctggaaaaa

SEQ ID NO: 1156181 - DNA, 15 bp, Homo sapiens
cagcactctggaaaa

SEQ ID NO: 1156182 - DNA, 15 bp, Homo sapiens
acagcactctggaaa

SEQ ID NO: 1156183 - DNA, 15 bp, Homo sapiens
gacagcactctggaa

SEQ ID NO: 1156184 - DNA, 15 bp, Homo sapiens
tgacagcactctgga

SEQ ID NO: 1156185 - DNA, 15 bp, Homo sapiens
ttgacagcactctgg

SEQ ID NO: 1156186 - DNA, 15 bp, Homo sapiens
attgacagcactctg

SEQ ID NO: 1156187 - DNA, 15 bp, Homo sapiens
tattgacagcactct

SEQ ID NO: 1156188 - DNA, 15 bp, Homo sapiens
ctattgacagcactc

SEQ ID NO: 1156189 - DNA, 15 bp, Homo sapiens
actattgacagcact

SEQ ID NO: 1156190 - DNA, 15 bp, Homo sapiens
aactattgacagcac

SEQ ID NO: 1156191 - DNA, 15 bp, Homo sapiens
taactattgacagca

SEQ ID NO: 1156192 - DNA, 15 bp, Homo sapiens
ataactattgacagc

SEQ ID NO: 1156193 - DNA, 15 bp, Homo sapiens
aataactattgacag

SEQ ID NO: 1156194 - DNA, 15 bp, Homo sapiens
aaataactattgaca

SEQ ID NO: 1156195 - DNA, 15 bp, Homo sapiens
aaaataactattgac

SEQ ID NO: 1156196 - DNA, 15 bp, Homo sapiens
taaaataactattga

SEQ ID NO: 1156197 - DNA, 15 bp, Homo sapiens
ttaaaataactattg

SEQ ID NO: 1156198 - DNA, 15 bp, Homo sapiens
gttaaaataactatt

SEQ ID NO: 1156199 - DNA, 15 bp, Homo sapiens
agttaaaataactat

SEQ ID NO: 1156200 - DNA, 15 bp, Homo sapiens
aagttaaaataacta

SEQ ID NO: 1156201 - DNA, 15 bp, Homo sapiens
aaagttaaaataact

SEQ ID NO: 1156202 - DNA, 15 bp, Homo sapiens
aaaagttaaaataac

SEQ ID NO: 1156203 - DNA, 15 bp, Homo sapiens
taaaagttaaaataa

SEQ ID NO: 1156204 - DNA, 15 bp, Homo sapiens
aaataaaagttaaaa

SEQ ID NO: 1156205 - DNA, 15 bp, Homo sapiens
aaaataaaagttaaa

SEQ ID NO: 1156206 - DNA, 15 bp, Homo sapiens
taaaataaaagttaa

SEQ ID NO: 1156207 - DNA, 15 bp, Homo sapiens
ctaaaataaaagtta

SEQ ID NO: 1156208 - DNA, 15 bp, Homo sapiens
cctaaaataaaagtt

SEQ ID NO: 1156209 - DNA, 15 bp, Homo sapiens
acctaaaataaaagt

SEQ ID NO: 1156210 - DNA, 15 bp, Homo sapiens
aacctaaaataaaag

SEQ ID NO: 1156211 - DNA, 15 bp, Homo sapiens
gaacctaaaataaaa

SEQ ID NO: 1156212 - DNA, 15 bp, Homo sapiens
tgaacctaaaataaa

SEQ ID NO: 1156213 - DNA, 15 bp, Homo sapiens
ctgaacctaaaataa

SEQ ID NO: 1156214 - DNA, 15 bp, Homo sapiens
cctgaacctaaaata

SEQ ID NO: 1156215 - DNA, 15 bp, Homo sapiens
ccctgaacctaaaat

SEQ ID NO: 1156216 - DNA, 15 bp, Homo sapiens
cccctgaacctaaaa

SEQ ID NO: 1156217 - DNA, 15 bp, Homo sapiens
acccctgaacctaaa

SEQ ID NO: 1156218 - DNA, 15 bp, Homo sapiens
tacccctgaacctaa

SEQ ID NO: 1156219 - DNA, 15 bp, Homo sapiens
gtacccctgaaccta

SEQ ID NO: 1156220 - DNA, 15 bp, Homo sapiens
tgtacccctgaacct

SEQ ID NO: 1156221 - DNA, 15 bp, Homo sapiens
atgtacccctgaacc

SEQ ID NO: 1156222 - DNA, 15 bp, Homo sapiens
tatgtacccctgaac

SEQ ID NO: 1156223 - DNA, 15 bp, Homo sapiens
atatgtacccctgaa

SEQ ID NO: 1156224 - DNA, 15 bp, Homo sapiens
catatgtacccctga

SEQ ID NO: 1156225 - DNA, 15 bp, Homo sapiens
gcatatgtacccctg

SEQ ID NO: 1156226 - DNA, 15 bp, Homo sapiens
tgcatatgtacccct

SEQ ID NO: 1156227 - DNA, 15 bp, Homo sapiens
atgcatatgtacccc

SEQ ID NO: 1156228 - DNA, 15 bp, Homo sapiens
catgcatatgtaccc

SEQ ID NO: 1156229 - DNA, 15 bp, Homo sapiens
acatgcatatgtacc

SEQ ID NO: 1156230 - DNA, 15 bp, Homo sapiens
aacatgcatatgtac

SEQ ID NO: 1156231 - DNA, 15 bp, Homo sapiens
gaacatgcatatgta

SEQ ID NO: 1156232 - DNA, 15 bp, Homo sapiens
cgaacatgcatatgt

SEQ ID NO: 1156233 - DNA, 15 bp, Homo sapiens
acgaacatgcatatg

SEQ ID NO: 1156234 - DNA, 15 bp, Homo sapiens
aacgaacatgcatat

SEQ ID NO: 1156235 - DNA, 15 bp, Homo sapiens
taacgaacatgcata

SEQ ID NO: 1156236 - DNA, 15 bp, Homo sapiens
ttaacgaacatgcat

SEQ ID NO: 1156237 - DNA, 15 bp, Homo sapiens
attaacgaacatgca

SEQ ID NO: 1156238 - DNA, 15 bp, Homo sapiens
tattaacgaacatgc

SEQ ID NO: 1156239 - DNA, 15 bp, Homo sapiens
gtattaacgaacatg

SEQ ID NO: 1156240 - DNA, 15 bp, Homo sapiens
tgtattaacgaacat

SEQ ID NO: 1156241 - DNA, 15 bp, Homo sapiens
ctgtattaacgaaca

SEQ ID NO: 1156242 - DNA, 15 bp, Homo sapiens
cctgtattaacgaac

SEQ ID NO: 1156243 - DNA, 15 bp, Homo sapiens
gcctgtattaacgaa

SEQ ID NO: 1156244 - DNA, 15 bp, Homo sapiens
tgcctgtattaacga

SEQ ID NO: 1156245 - DNA, 15 bp, Homo sapiens
ttgcctgtattaacg

SEQ ID NO: 1156246 - DNA, 15 bp, Homo sapiens
tttgcctgtattaac

SEQ ID NO: 1156247 - DNA, 15 bp, Homo sapiens
gtttgcctgtattaa

SEQ ID NO: 1156248 - DNA, 15 bp, Homo sapiens
agtttgcctgtatta

SEQ ID NO: 1156249 - DNA, 15 bp, Homo sapiens
gagtttgcctgtatt

SEQ ID NO: 1156250 - DNA, 15 bp, Homo sapiens
tgagtttgcctgtat

SEQ ID NO: 1156251 - DNA, 15 bp, Homo sapiens
atgagtttgcctgta

SEQ ID NO: 1156252 - DNA, 15 bp, Homo sapiens
catgagtttgcctgt

SEQ ID NO: 1156253 - DNA, 15 bp, Homo sapiens
acatgagtttgcctg

SEQ ID NO: 1156254 - DNA, 15 bp, Homo sapiens
gacatgagtttgcct

SEQ ID NO: 1156255 - DNA, 15 bp, Homo sapiens
tgacatgagtttgcc

SEQ ID NO: 1156256 - DNA, 15 bp, Homo sapiens
atgacatgagtttgc

SEQ ID NO: 1156257 - DNA, 15 bp, Homo sapiens
catgacatgagtttg

SEQ ID NO: 1156258 - DNA, 15 bp, Homo sapiens
ccatgacatgagttt

SEQ ID NO: 1156259 - DNA, 15 bp, Homo sapiens
cccatgacatgagtt

SEQ ID NO: 1156260 - DNA, 15 bp, Homo sapiens
ccccatgacatgagt

SEQ ID NO: 1156261 - DNA, 15 bp, Homo sapiens
cccccatgacatgag

SEQ ID NO: 1156262 - DNA, 15 bp, Homo sapiens
acccccatgacatga

SEQ ID NO: 1156263 - DNA, 15 bp, Homo sapiens
aacccccatgacatg

SEQ ID NO: 1156264 - DNA, 15 bp, Homo sapiens
aaacccccatgacat

SEQ ID NO: 1156265 - DNA, 15 bp, Homo sapiens
caaacccccatgaca

SEQ ID NO: 1156266 - DNA, 15 bp, Homo sapiens
ccaaacccccatgac

SEQ ID NO: 1156267 - DNA, 15 bp, Homo sapiens
accaaacccccatga

SEQ ID NO: 1156268 - DNA, 15 bp, Homo sapiens
caccaaacccccatg

SEQ ID NO: 1156269 - DNA, 15 bp, Homo sapiens
acaccaaacccccat

SEQ ID NO: 1156270 - DNA, 15 bp, Homo sapiens
tacaccaaaccccca

SEQ ID NO: 1156271 - DNA, 15 bp, Homo sapiens
gtacaccaaaccccc

SEQ ID NO: 1156272 - DNA, 15 bp, Homo sapiens
tgtacaccaaacccc

SEQ ID NO: 1156273 - DNA, 15 bp, Homo sapiens
ctgtacaccaaaccc

SEQ ID NO: 1156274 - DNA, 15 bp, Homo sapiens
tctgtacaccaaacc

SEQ ID NO: 1156275 - DNA, 15 bp, Homo sapiens
gtctgtacaccaaac

SEQ ID NO: 1156276 - DNA, 15 bp, Homo sapiens
ggtctgtacaccaaa

SEQ ID NO: 1156277 - DNA, 15 bp, Homo sapiens
tggtctgtacaccaa

SEQ ID NO: 1156278 - DNA, 15 bp, Homo sapiens
atggtctgtacacca

SEQ ID NO: 1156279 - DNA, 15 bp, Homo sapiens
catggtctgtacacc

SEQ ID NO: 1156280 - DNA, 15 bp, Homo sapiens
acatggtctgtacac

SEQ ID NO: 1156281 - DNA, 15 bp, Homo sapiens
gacatggtctgtaca

SEQ ID NO: 1156282 - DNA, 15 bp, Homo sapiens
tgacatggtctgtac

SEQ ID NO: 1156283 - DNA, 15 bp, Homo sapiens
atgacatggtctgta

SEQ ID NO: 1156284 - DNA, 15 bp, Homo sapiens
gatgacatggtctgt

SEQ ID NO: 1156285 - DNA, 15 bp, Homo sapiens
tgatgacatggtctg

SEQ ID NO: 1156286 - DNA, 15 bp, Homo sapiens
gtgatgacatggtct

SEQ ID NO: 1156287 - DNA, 15 bp, Homo sapiens
ggtgatgacatggtc

SEQ ID NO: 1156288 - DNA, 15 bp, Homo sapiens
gggtgatgacatggt

SEQ ID NO: 1156289 - DNA, 15 bp, Homo sapiens
tgggtgatgacatgg

SEQ ID NO: 1156290 - DNA, 15 bp, Homo sapiens
ctgggtgatgacatg

SEQ ID NO: 1156291 - DNA, 15 bp, Homo sapiens
tctgggtgatgacat

SEQ ID NO: 1156292 - DNA, 15 bp, Homo sapiens
atctgggtgatgaca

SEQ ID NO: 1156293 - DNA, 15 bp, Homo sapiens
tatctgggtgatgac

SEQ ID NO: 1156294 - DNA, 15 bp, Homo sapiens
gtatctgggtgatga

SEQ ID NO: 1156295 - DNA, 15 bp, Homo sapiens
agtatctgggtgatg

SEQ ID NO: 1156296 - DNA, 15 bp, Homo sapiens
tagtatctgggtgat

SEQ ID NO: 1156297 - DNA, 15 bp, Homo sapiens
ttagtatctgggtga

SEQ ID NO: 1156298 - DNA, 15 bp, Homo sapiens
cttagtatctgggtg

SEQ ID NO: 1156299 - DNA, 15 bp, Homo sapiens
gcttagtatctgggt

SEQ ID NO: 1156300 - DNA, 15 bp, Homo sapiens
tgcttagtatctggg

SEQ ID NO: 1156301 - DNA, 15 bp, Homo sapiens
atgcttagtatctgg

SEQ ID NO: 1156302 - DNA, 15 bp, Homo sapiens
tatgcttagtatctg

SEQ ID NO: 1156303 - DNA, 15 bp, Homo sapiens
ttatgcttagtatct

SEQ ID NO: 1156304 - DNA, 15 bp, Homo sapiens
attatgcttagtatc

SEQ ID NO: 1156305 - DNA, 15 bp, Homo sapiens
tattatgcttagtat

SEQ ID NO: 1156306 - DNA, 15 bp, Homo sapiens
ttattatgcttagta

SEQ ID NO: 1156307 - DNA, 15 bp, Homo sapiens
gttattatgcttagt

SEQ ID NO: 1156308 - DNA, 15 bp, Homo sapiens
agttattatgcttag

SEQ ID NO: 1156309 - DNA, 15 bp, Homo sapiens
cagttattatgctta

SEQ ID NO: 1156310 - DNA, 15 bp, Homo sapiens
tcagttattatgctt

SEQ ID NO: 1156311 - DNA, 15 bp, Homo sapiens
atcagttattatgct

SEQ ID NO: 1156312 - DNA, 15 bp, Homo sapiens
tatcagttattatgc

SEQ ID NO: 1156313 - DNA, 15 bp, Homo sapiens
ctatcagttattatg

SEQ ID NO: 1156314 - DNA, 15 bp, Homo sapiens
gctatcagttattat

SEQ ID NO: 1156315 - DNA, 15 bp, Homo sapiens
tgctatcagttatta

SEQ ID NO: 1156316 - DNA, 15 bp, Homo sapiens
atgctatcagttatt

SEQ ID NO: 1156317 - DNA, 15 bp, Homo sapiens
tatgctatcagttat

SEQ ID NO: 1156318 - DNA, 15 bp, Homo sapiens
ctatgctatcagtta

SEQ ID NO: 1156319 - DNA, 15 bp, Homo sapiens
actatgctatcagtt

SEQ ID NO: 1156320 - DNA, 15 bp, Homo sapiens
aactatgctatcagt

SEQ ID NO: 1156321 - DNA, 15 bp, Homo sapiens
taactatgctatcag

SEQ ID NO: 1156322 - DNA, 15 bp, Homo sapiens
ataactatgctatca

SEQ ID NO: 1156323 - DNA, 15 bp, Homo sapiens
aataactatgctatc

SEQ ID NO: 1156324 - DNA, 15 bp, Homo sapiens
aaataactatgctat

SEQ ID NO: 1156325 - DNA, 15 bp, Homo sapiens
aaaataactatgcta

SEQ ID NO: 1156326 - DNA, 15 bp, Homo sapiens
taaaataactatgct

SEQ ID NO: 1156327 - DNA, 15 bp, Homo sapiens
ttaaaataactatgc

SEQ ID NO: 1156328 - DNA, 15 bp, Homo sapiens
attaaaataactatg

SEQ ID NO: 1156329 - DNA, 15 bp, Homo sapiens
aattaaaataactat

SEQ ID NO: 1156330 - DNA, 15 bp, Homo sapiens
caattaaaataacta

SEQ ID NO: 1156331 - DNA, 15 bp, Homo sapiens
acaattaaaataact

SEQ ID NO: 1156332 - DNA, 15 bp, Homo sapiens
tacaattaaaataac

SEQ ID NO: 1156333 - DNA, 15 bp, Homo sapiens
ttacaattaaaataa

SEQ ID NO: 1156334 - DNA, 15 bp, Homo sapiens
tttacaattaaaata

SEQ ID NO: 1156335 - DNA, 15 bp, Homo sapiens
atttacaattaaaat

SEQ ID NO: 1156336 - DNA, 15 bp, Homo sapiens
tatttacaattaaaa

SEQ ID NO: 1156337 - DNA, 15 bp, Homo sapiens
ttatttacaattaaa

SEQ ID NO: 1156338 - DNA, 15 bp, Homo sapiens
tttatttacaattaa

SEQ ID NO: 1156339 - DNA, 15 bp, Homo sapiens
ttttatttacaatta

SEQ ID NO: 1156340 - DNA, 15 bp, Homo sapiens
tttttatttacaatt

SEQ ID NO: 1156341 - DNA, 15 bp, Homo sapiens
ctttttatttacaat

SEQ ID NO: 1156342 - DNA, 15 bp, Homo sapiens
gctttttatttacaa

SEQ ID NO: 1156343 - DNA, 15 bp, Homo sapiens
agctttttatttaca

SEQ ID NO: 1156344 - DNA, 15 bp, Homo sapiens
tagctttttatttac

SEQ ID NO: 1156345 - DNA, 15 bp, Homo sapiens
atagctttttattta

SEQ ID NO: 1156346 - DNA, 15 bp, Homo sapiens
aatagctttttattt

SEQ ID NO: 1156347 - DNA, 15 bp, Homo sapiens
aaatagctttttatt

SEQ ID NO: 1156348 - DNA, 15 bp, Homo sapiens
gaaatagctttttat

SEQ ID NO: 1156349 - DNA, 15 bp, Homo sapiens
agaaatagcttttta

SEQ ID NO: 1156350 - DNA, 15 bp, Homo sapiens
tagaaatagcttttt

SEQ ID NO: 1156351 - DNA, 15 bp, Homo sapiens
ctagaaatagctttt

SEQ ID NO: 1156352 - DNA, 15 bp, Homo sapiens
actagaaatagcttt

SEQ ID NO: 1156353 - DNA, 15 bp, Homo sapiens
tactagaaatagctt

SEQ ID NO: 1156354 - DNA, 15 bp, Homo sapiens
ttactagaaatagct

SEQ ID NO: 1156355 - DNA, 15 bp, Homo sapiens
tttactagaaatagc

SEQ ID NO: 1156356 - DNA, 15 bp, Homo sapiens
ttttactagaaatag

SEQ ID NO: 1156357 - DNA, 15 bp, Homo sapiens
cttttactagaaata

SEQ ID NO: 1156358 - DNA, 15 bp, Homo sapiens
gcttttactagaaat

SEQ ID NO: 1156359 - DNA, 15 bp, Homo sapiens
agcttttactagaaa

SEQ ID NO: 1156360 - DNA, 15 bp, Homo sapiens
aagcttttactagaa

SEQ ID NO: 1156361 - DNA, 15 bp, Homo sapiens
taagcttttactaga

SEQ ID NO: 1156362 - DNA, 15 bp, Homo sapiens
ataagcttttactag

SEQ ID NO: 1156363 - DNA, 15 bp, Homo sapiens
aataagcttttacta

SEQ ID NO: 1156364 - DNA, 15 bp, Homo sapiens
aaataagcttttact

SEQ ID NO: 1156365 - DNA, 15 bp, Homo sapiens
aaaataagcttttac

SEQ ID NO: 1156366 - DNA, 15 bp, Homo sapiens
gaaaataagctttta

SEQ ID NO: 1156367 - DNA, 15 bp, Homo sapiens
ggaaaataagctttt

SEQ ID NO: 1156368 - DNA, 15 bp, Homo sapiens
gggaaaataagcttt

SEQ ID NO: 1156369 - DNA, 15 bp, Homo sapiens
agggaaaataagctt

SEQ ID NO: 1156370 - DNA, 15 bp, Homo sapiens
tagggaaaataagct

SEQ ID NO: 1156371 - DNA, 15 bp, Homo sapiens
ttagggaaaataagc

SEQ ID NO: 1156372 - DNA, 15 bp, Homo sapiens
attagggaaaataag

SEQ ID NO: 1156373 - DNA, 15 bp, Homo sapiens
tattagggaaaataa

SEQ ID NO: 1156374 - DNA, 15 bp, Homo sapiens
ttattagggaaaata

SEQ ID NO: 1156375 - DNA, 15 bp, Homo sapiens
tttattagggaaaat

SEQ ID NO: 1156376 - DNA, 15 bp, Homo sapiens
ttttattagggaaaa

SEQ ID NO: 1156377 - DNA, 15 bp, Homo sapiens
tttttattagggaaa

SEQ ID NO: 1156378 - DNA, 15 bp, Homo sapiens
atttttattagggaa

SEQ ID NO: 1156379 - DNA, 15 bp, Homo sapiens
aatttttattaggga

SEQ ID NO: 1156380 - DNA, 15 bp, Homo sapiens
taatttttattaggg

SEQ ID NO: 1156381 - DNA, 15 bp, Homo sapiens
ataatttttattagg

SEQ ID NO: 1156382 - DNA, 15 bp, Homo sapiens
aataatttttattag

SEQ ID NO: 1156383 - DNA, 15 bp, Homo sapiens
aaataatttttatta

SEQ ID NO: 1156384 - DNA, 15 bp, Homo sapiens
taaataatttttatt

SEQ ID NO: 1156385 - DNA, 15 bp, Homo sapiens
gtaaataatttttat

SEQ ID NO: 1156386 - DNA, 15 bp, Homo sapiens
tgtaaataattttta

SEQ ID NO: 1156387 - DNA, 15 bp, Homo sapiens
ctgtaaataattttt

SEQ ID NO: 1156388 - DNA, 15 bp, Homo sapiens
actgtaaataatttt

SEQ ID NO: 1156389 - DNA, 15 bp, Homo sapiens
cactgtaaataattt

SEQ ID NO: 1156390 - DNA, 15 bp, Homo sapiens
tcactgtaaataatt

SEQ ID NO: 1156391 - DNA, 15 bp, Homo sapiens
atcactgtaaataat

SEQ ID NO: 1156392 - DNA, 15 bp, Homo sapiens
catcactgtaaataa

SEQ ID NO: 1156393 - DNA, 15 bp, Homo sapiens
tcatcactgtaaata

SEQ ID NO: 1156394 - DNA, 15 bp, Homo sapiens
atcatcactgtaaat

SEQ ID NO: 1156395 - DNA, 15 bp, Homo sapiens
catcatcactgtaaa

SEQ ID NO: 1156396 - DNA, 15 bp, Homo sapiens
tcatcatcactgtaa

SEQ ID NO: 1156397 - DNA, 15 bp, Homo sapiens
atcatcatcactgta

SEQ ID NO: 1156398 - DNA, 15 bp, Homo sapiens
aatcatcatcactgt

SEQ ID NO: 1156399 - DNA, 15 bp, Homo sapiens
taatcatcatcactg

SEQ ID NO: 1156400 - DNA, 15 bp, Homo sapiens
ataatcatcatcact

SEQ ID NO: 1156401 - DNA, 15 bp, Homo sapiens
gataatcatcatcac

SEQ ID NO: 1156402 - DNA, 15 bp, Homo sapiens
tgataatcatcatca

SEQ ID NO: 1156403 - DNA, 15 bp, Homo sapiens
atgataatcatcatc

SEQ ID NO: 1156404 - DNA, 15 bp, Homo sapiens
aatgataatcatcat

SEQ ID NO: 1156405 - DNA, 15 bp, Homo sapiens
aaatgataatcatca

SEQ ID NO: 1156406 - DNA, 15 bp, Homo sapiens
caaatgataatcatc

SEQ ID NO: 1156407 - DNA, 15 bp, Homo sapiens
acaaatgataatcat

SEQ ID NO: 1156408 - DNA, 15 bp, Homo sapiens
cacaaatgataatca

SEQ ID NO: 1156409 - DNA, 15 bp, Homo sapiens
acacaaatgataatc

SEQ ID NO: 1156410 - DNA, 15 bp, Homo sapiens
cacacaaatgataat

SEQ ID NO: 1156411 - DNA, 15 bp, Homo sapiens
ccacacaaatgataa

SEQ ID NO: 1156412 - DNA, 15 bp, Homo sapiens
accacacaaatgata

SEQ ID NO: 1156413 - DNA, 15 bp, Homo sapiens
taccacacaaatgat

SEQ ID NO: 1156414 - DNA, 15 bp, Homo sapiens
ctaccacacaaatga

SEQ ID NO: 1156415 - DNA, 15 bp, Homo sapiens
actaccacacaaatg

SEQ ID NO: 1156416 - DNA, 15 bp, Homo sapiens
tactaccacacaaat

SEQ ID NO: 1156417 - DNA, 15 bp, Homo sapiens
gtactaccacacaaa

SEQ ID NO: 1156418 - DNA, 15 bp, Homo sapiens
tgtactaccacacaa

SEQ ID NO: 1156419 - DNA, 15 bp, Homo sapiens
ctgtactaccacaca

SEQ ID NO: 1156420 - DNA, 15 bp, Homo sapiens
tctgtactaccacac

SEQ ID NO: 1156421 - DNA, 15 bp, Homo sapiens
ttctgtactaccaca

SEQ ID NO: 1156422 - DNA, 15 bp, Homo sapiens
cttctgtactaccac

SEQ ID NO: 1156423 - DNA, 15 bp, Homo sapiens
tcttctgtactacca

SEQ ID NO: 1156424 - DNA, 15 bp, Homo sapiens
ttcttctgtactacc

SEQ ID NO: 1156425 - DNA, 15 bp, Homo sapiens
tttcttctgtactac

SEQ ID NO: 1156426 - DNA, 15 bp, Homo sapiens
gtttcttctgtacta

SEQ ID NO: 1156427 - DNA, 15 bp, Homo sapiens
ggtttcttctgtact

SEQ ID NO: 1156428 - DNA, 15 bp, Homo sapiens
tggtttcttctgtac

SEQ ID NO: 1156429 - DNA, 15 bp, Homo sapiens
gtggtttcttctgta

SEQ ID NO: 1156430 - DNA, 15 bp, Homo sapiens
tgtggtttcttctgt

SEQ ID NO: 1156431 - DNA, 15 bp, Homo sapiens
ttgtggtttcttctg

SEQ ID NO: 1156432 - DNA, 15 bp, Homo sapiens
tttgtggtttcttct

SEQ ID NO: 1156433 - DNA, 15 bp, Homo sapiens
gtttgtggtttcttc

SEQ ID NO: 1156434 - DNA, 15 bp, Homo sapiens
agtttgtggtttctt

SEQ ID NO: 1156435 - DNA, 15 bp, Homo sapiens
cagtttgtggtttct

SEQ ID NO: 1156436 - DNA, 15 bp, Homo sapiens
ccagtttgtggtttc

SEQ ID NO: 1156437 - DNA, 15 bp, Homo sapiens
tccagtttgtggttt

SEQ ID NO: 1156438 - DNA, 15 bp, Homo sapiens
ttccagtttgtggtt

SEQ ID NO: 1156439 - DNA, 15 bp, Homo sapiens
cttccagtttgtggt

SEQ ID NO: 1156440 - DNA, 15 bp, Homo sapiens
acttccagtttgtgg

SEQ ID NO: 1156441 - DNA, 15 bp, Homo sapiens
gacttccagtttgtg

SEQ ID NO: 1156442 - DNA, 15 bp, Homo sapiens
tgacttccagtttgt

SEQ ID NO: 1156443 - DNA, 15 bp, Homo sapiens
ctgacttccagtttg

SEQ ID NO: 1156444 - DNA, 15 bp, Homo sapiens
cctgacttccagttt

SEQ ID NO: 1156445 - DNA, 15 bp, Homo sapiens
ccctgacttccagtt

SEQ ID NO: 1156446 - DNA, 15 bp, Homo sapiens
gccctgacttccagt

SEQ ID NO: 1156447 - DNA, 15 bp, Homo sapiens
ggccctgacttccag

SEQ ID NO: 1156448 - DNA, 15 bp, Homo sapiens
tggccctgacttcca

SEQ ID NO: 1156449 - DNA, 15 bp, Homo sapiens
ctggccctgacttcc

SEQ ID NO: 1156450 - DNA, 15 bp, Homo sapiens
tctggccctgacttc

SEQ ID NO: 1156451 - DNA, 15 bp, Homo sapiens
ctctggccctgactt

SEQ ID NO: 1156452 - DNA, 15 bp, Homo sapiens
gctctggccctgact

SEQ ID NO: 1156453 - DNA, 15 bp, Homo sapiens
agctctggccctgac

SEQ ID NO: 1156454 - DNA, 15 bp, Homo sapiens
aagctctggccctga

SEQ ID NO: 1156455 - DNA, 15 bp, Homo sapiens
aaagctctggccctg

SEQ ID NO: 1156456 - DNA, 15 bp, Homo sapiens
taaagctctggccct

SEQ ID NO: 1156457 - DNA, 15 bp, Homo sapiens
ataaagctctggccc

SEQ ID NO: 1156458 - DNA, 15 bp, Homo sapiens
gataaagctctggcc

SEQ ID NO: 1156459 - DNA, 15 bp, Homo sapiens
tgataaagctctggc

SEQ ID NO: 1156460 - DNA, 15 bp, Homo sapiens
ctgataaagctctgg

SEQ ID NO: 1156461 - DNA, 15 bp, Homo sapiens
tctgataaagctctg

SEQ ID NO: 1156462 - DNA, 15 bp, Homo sapiens
ttctgataaagctct

SEQ ID NO: 1156463 - DNA, 15 bp, Homo sapiens
tttctgataaagctc

SEQ ID NO: 1156464 - DNA, 15 bp, Homo sapiens
ttttctgataaagct

SEQ ID NO: 1156465 - DNA, 15 bp, Homo sapiens
tttttctgataaagc

SEQ ID NO: 1156466 - DNA, 15 bp, Homo sapiens
ctttttctgataaag

SEQ ID NO: 1156467 - DNA, 15 bp, Homo sapiens
gctttttctgataaa

SEQ ID NO: 1156468 - DNA, 15 bp, Homo sapiens
agctttttctgataa

SEQ ID NO: 1156469 - DNA, 15 bp, Homo sapiens
aagctttttctgata

SEQ ID NO: 1156470 - DNA, 15 bp, Homo sapiens
taagctttttctgat

SEQ ID NO: 1156471 - DNA, 15 bp, Homo sapiens
gtaagctttttctga

SEQ ID NO: 1156472 - DNA, 15 bp, Homo sapiens
agtaagctttttctg

SEQ ID NO: 1156473 - DNA, 15 bp, Homo sapiens
aagtaagctttttct

SEQ ID NO: 1156474 - DNA, 15 bp, Homo sapiens
caagtaagctttttc

SEQ ID NO: 1156475 - DNA, 15 bp, Homo sapiens
ccaagtaagcttttt

SEQ ID NO: 1156476 - DNA, 15 bp, Homo sapiens
tccaagtaagctttt

SEQ ID NO: 1156477 - DNA, 15 bp, Homo sapiens
ttccaagtaagcttt

SEQ ID NO: 1156478 - DNA, 15 bp, Homo sapiens
gttccaagtaagctt

SEQ ID NO: 1156479 - DNA, 15 bp, Homo sapiens
agttccaagtaagct

SEQ ID NO: 1156480 - DNA, 15 bp, Homo sapiens
cagttccaagtaagc

SEQ ID NO: 1156481 - DNA, 15 bp, Homo sapiens
tcagttccaagtaag

SEQ ID NO: 1156482 - DNA, 15 bp, Homo sapiens
atcagttccaagtaa

SEQ ID NO: 1156483 - DNA, 15 bp, Homo sapiens
gatcagttccaagta

SEQ ID NO: 1156484 - DNA, 15 bp, Homo sapiens
tgatcagttccaagt

SEQ ID NO: 1156485 - DNA, 15 bp, Homo sapiens
ttgatcagttccaag

SEQ ID NO: 1156486 - DNA, 15 bp, Homo sapiens
cttgatcagttccaa

SEQ ID NO: 1156487 - DNA, 15 bp, Homo sapiens
ccttgatcagttcca

SEQ ID NO: 1156488 - DNA, 15 bp, Homo sapiens
gccttgatcagttcc

SEQ ID NO: 1156489 - DNA, 15 bp, Homo sapiens
ggccttgatcagttc

SEQ ID NO: 1156490 - DNA, 15 bp, Homo sapiens
gggccttgatcagtt

SEQ ID NO: 1156491 - DNA, 15 bp, Homo sapiens
agggccttgatcagt

SEQ ID NO: 1156492 - DNA, 15 bp, Homo sapiens
aagggccttgatcag

SEQ ID NO: 1156493 - DNA, 15 bp, Homo sapiens
taagggccttgatca

SEQ ID NO: 1156494 - DNA, 15 bp, Homo sapiens
gtaagggccttgatc

SEQ ID NO: 1156495 - DNA, 15 bp, Homo sapiens
tgtaagggccttgat

SEQ ID NO: 1156496 - DNA, 15 bp, Homo sapiens
gtgtaagggccttga

SEQ ID NO: 1156497 - DNA, 15 bp, Homo sapiens
tgtgtaagggccttg

SEQ ID NO: 1156498 - DNA, 15 bp, Homo sapiens
gtgtgtaagggcctt

SEQ ID NO: 1156499 - DNA, 15 bp, Homo sapiens
agtgtgtaagggcct

SEQ ID NO: 1156500 - DNA, 15 bp, Homo sapiens
aagtgtgtaagggcc

SEQ ID NO: 1156501 - DNA, 15 bp, Homo sapiens
aaagtgtgtaagggc

SEQ ID NO: 1156502 - DNA, 15 bp, Homo sapiens
caaagtgtgtaaggg

SEQ ID NO: 1156503 - DNA, 15 bp, Homo sapiens
acaaagtgtgtaagg

SEQ ID NO: 1156504 - DNA, 15 bp, Homo sapiens
cacaaagtgtgtaag

SEQ ID NO: 1156505 - DNA, 15 bp, Homo sapiens
gcacaaagtgtgtaa

SEQ ID NO: 1156506 - DNA, 15 bp, Homo sapiens
agcacaaagtgtgta

SEQ ID NO: 1156507 - DNA, 15 bp, Homo sapiens
aagcacaaagtgtgt

SEQ ID NO: 1156508 - DNA, 15 bp, Homo sapiens
gaagcacaaagtgtg

SEQ ID NO: 1156509 - DNA, 15 bp, Homo sapiens
tgaagcacaaagtgt

SEQ ID NO: 1156510 - DNA, 15 bp, Homo sapiens
ttgaagcacaaagtg

SEQ ID NO: 1156511 - DNA, 15 bp, Homo sapiens
attgaagcacaaagt

SEQ ID NO: 1156512 - DNA, 15 bp, Homo sapiens
aattgaagcacaaag

SEQ ID NO: 1156513 - DNA, 15 bp, Homo sapiens
gaattgaagcacaaa

SEQ ID NO: 1156514 - DNA, 15 bp, Homo sapiens
ggaattgaagcacaa

SEQ ID NO: 1156515 - DNA, 15 bp, Homo sapiens
gggaattgaagcaca

SEQ ID NO: 1156516 - DNA, 15 bp, Homo sapiens
agggaattgaagcac

SEQ ID NO: 1156517 - DNA, 15 bp, Homo sapiens
gagggaattgaagca

SEQ ID NO: 1156518 - DNA, 15 bp, Homo sapiens
tgagggaattgaagc

SEQ ID NO: 1156519 - DNA, 15 bp, Homo sapiens
ttgagggaattgaag

SEQ ID NO: 1156520 - DNA, 15 bp, Homo sapiens
gttgagggaattgaa

SEQ ID NO: 1156521 - DNA, 15 bp, Homo sapiens
agttgagggaattga

SEQ ID NO: 1156522 - DNA, 15 bp, Homo sapiens
gagttgagggaattg

SEQ ID NO: 1156523 - DNA, 15 bp, Homo sapiens
agagttgagggaatt

SEQ ID NO: 1156524 - DNA, 15 bp, Homo sapiens
tagagttgagggaat

SEQ ID NO: 1156525 - DNA, 15 bp, Homo sapiens
ttagagttgagggaa

SEQ ID NO: 1156526 - DNA, 15 bp, Homo sapiens
tttagagttgaggga

SEQ ID NO: 1156527 - DNA, 15 bp, Homo sapiens
ttttagagttgaggg

SEQ ID NO: 1156528 - DNA, 15 bp, Homo sapiens
tttttagagttgagg

SEQ ID NO: 1156529 - DNA, 15 bp, Homo sapiens
ctttttagagttgag

SEQ ID NO: 1156530 - DNA, 15 bp, Homo sapiens
tctttttagagttga

SEQ ID NO: 1156531 - DNA, 15 bp, Homo sapiens
ctctttttagagttg

SEQ ID NO: 1156532 - DNA, 15 bp, Homo sapiens
actctttttagagtt

SEQ ID NO: 1156533 - DNA, 15 bp, Homo sapiens
tactctttttagagt

SEQ ID NO: 1156534 - DNA, 15 bp, Homo sapiens
atactctttttagag

SEQ ID NO: 1156535 - DNA, 15 bp, Homo sapiens
tatactctttttaga

SEQ ID NO: 1156536 - DNA, 15 bp, Homo sapiens
ttatactctttttag

SEQ ID NO: 1156537 - DNA, 15 bp, Homo sapiens
gttatactcttttta

SEQ ID NO: 1156538 - DNA, 15 bp, Homo sapiens
ggttatactcttttt

SEQ ID NO: 1156539 - DNA, 15 bp, Homo sapiens
tggttatactctttt

SEQ ID NO: 1156540 - DNA, 15 bp, Homo sapiens
ctggttatactcttt

SEQ ID NO: 1156541 - DNA, 15 bp, Homo sapiens
gctggttatactctt

SEQ ID NO: 1156542 - DNA, 15 bp, Homo sapiens
tgctggttatactct

SEQ ID NO: 1156543 - DNA, 15 bp, Homo sapiens
ttgctggttatactc

SEQ ID NO: 1156544 - DNA, 15 bp, Homo sapiens
gttgctggttatact

SEQ ID NO: 1156545 - DNA, 15 bp, Homo sapiens
agttgctggttatac

SEQ ID NO: 1156546 - DNA, 15 bp, Homo sapiens
tagttgctggttata

SEQ ID NO: 1156547 - DNA, 15 bp, Homo sapiens
ttagttgctggttat

SEQ ID NO: 1156548 - DNA, 15 bp, Homo sapiens
tttagttgctggtta

SEQ ID NO: 1156549 - DNA, 15 bp, Homo sapiens
ttttagttgctggtt

SEQ ID NO: 1156550 - DNA, 15 bp, Homo sapiens
attttagttgctggt

SEQ ID NO: 1156551 - DNA, 15 bp, Homo sapiens
aattttagttgctgg

SEQ ID NO: 1156552 - DNA, 15 bp, Homo sapiens
taattttagttgctg

SEQ ID NO: 1156553 - DNA, 15 bp, Homo sapiens
ctaattttagttgct

SEQ ID NO: 1156554 - DNA, 15 bp, Homo sapiens
gctaattttagttgc

SEQ ID NO: 1156555 - DNA, 15 bp, Homo sapiens
agctaattttagttg

SEQ ID NO: 1156556 - DNA, 15 bp, Homo sapiens
cagctaattttagtt

SEQ ID NO: 1156557 - DNA, 15 bp, Homo sapiens
tcagctaattttagt

SEQ ID NO: 1156558 - DNA, 15 bp, Homo sapiens
ctcagctaattttag

SEQ ID NO: 1156559 - DNA, 15 bp, Homo sapiens
gctcagctaatttta

SEQ ID NO: 1156560 - DNA, 15 bp, Homo sapiens
agctcagctaatttt

SEQ ID NO: 1156561 - DNA, 15 bp, Homo sapiens
gagctcagctaattt

SEQ ID NO: 1156562 - DNA, 15 bp, Homo sapiens
tgagctcagctaatt

SEQ ID NO: 1156563 - DNA, 15 bp, Homo sapiens
gtgagctcagctaat

SEQ ID NO: 1156564 - DNA, 15 bp, Homo sapiens
tgtgagctcagctaa

SEQ ID NO: 1156565 - DNA, 15 bp, Homo sapiens
ctgtgagctcagcta

SEQ ID NO: 1156566 - DNA, 15 bp, Homo sapiens
tctgtgagctcagct

SEQ ID NO: 1156567 - DNA, 15 bp, Homo sapiens
atctgtgagctcagc

SEQ ID NO: 1156568 - DNA, 15 bp, Homo sapiens
gatctgtgagctcag

SEQ ID NO: 1156569 - DNA, 15 bp, Homo sapiens
tgatctgtgagctca

SEQ ID NO: 1156570 - DNA, 15 bp, Homo sapiens
ctgatctgtgagctc

SEQ ID NO: 1156571 - DNA, 15 bp, Homo sapiens
tctgatctgtgagct

SEQ ID NO: 1156572 - DNA, 15 bp, Homo sapiens
atctgatctgtgagc

SEQ ID NO: 1156573 - DNA, 15 bp, Homo sapiens
aatctgatctgtgag

SEQ ID NO: 1156574 - DNA, 15 bp, Homo sapiens
gaatctgatctgtga

SEQ ID NO: 1156575 - DNA, 15 bp, Homo sapiens
tgaatctgatctgtg

SEQ ID NO: 1156576 - DNA, 15 bp, Homo sapiens
ctgaatctgatctgt

SEQ ID NO: 1156577 - DNA, 15 bp, Homo sapiens
actgaatctgatctg

SEQ ID NO: 1156578 - DNA, 15 bp, Homo sapiens
aactgaatctgatct

SEQ ID NO: 1156579 - DNA, 15 bp, Homo sapiens
taactgaatctgatc

SEQ ID NO: 1156580 - DNA, 15 bp, Homo sapiens
ataactgaatctgat

SEQ ID NO: 1156581 - DNA, 15 bp, Homo sapiens
tataactgaatctga

SEQ ID NO: 1156582 - DNA, 15 bp, Homo sapiens
ttataactgaatctg

SEQ ID NO: 1156583 - DNA, 15 bp, Homo sapiens
cttataactgaatct

SEQ ID NO: 1156584 - DNA, 15 bp, Homo sapiens
gcttataactgaatc

SEQ ID NO: 1156585 - DNA, 15 bp, Homo sapiens
ggcttataactgaat

SEQ ID NO: 1156586 - DNA, 15 bp, Homo sapiens
aggcttataactgaa

SEQ ID NO: 1156587 - DNA, 15 bp, Homo sapiens
gaggcttataactga

SEQ ID NO: 1156588 - DNA, 15 bp, Homo sapiens
agaggcttataactg

SEQ ID NO: 1156589 - DNA, 15 bp, Homo sapiens
aagaggcttataact

SEQ ID NO: 1156590 - DNA, 15 bp, Homo sapiens
gaagaggcttataac

SEQ ID NO: 1156591 - DNA, 15 bp, Homo sapiens
agaagaggcttataa

SEQ ID NO: 1156592 - DNA, 15 bp, Homo sapiens
aagaagaggcttata

SEQ ID NO: 1156593 - DNA, 15 bp, Homo sapiens
caagaagaggcttat

SEQ ID NO: 1156594 - DNA, 15 bp, Homo sapiens
tcaagaagaggctta

SEQ ID NO: 1156595 - DNA, 15 bp, Homo sapiens
ttcaagaagaggctt

SEQ ID NO: 1156596 - DNA, 15 bp, Homo sapiens
tttcaagaagaggct

SEQ ID NO: 1156597 - DNA, 15 bp, Homo sapiens
ctttcaagaagaggc

SEQ ID NO: 1156598 - DNA, 15 bp, Homo sapiens
actttcaagaagagg

SEQ ID NO: 1156599 - DNA, 15 bp, Homo sapiens
tactttcaagaagag

SEQ ID NO: 1156600 - DNA, 15 bp, Homo sapiens
ttactttcaagaaga

SEQ ID NO: 1156601 - DNA, 15 bp, Homo sapiens
tttactttcaagaag

SEQ ID NO: 1156602 - DNA, 15 bp, Homo sapiens
ttttactttcaagaa

SEQ ID NO: 1156603 - DNA, 15 bp, Homo sapiens
tttttactttcaaga

SEQ ID NO: 1156604 - DNA, 15 bp, Homo sapiens
gtttttactttcaag

SEQ ID NO: 1156605 - DNA, 15 bp, Homo sapiens
ggtttttactttcaa

SEQ ID NO: 1156606 - DNA, 15 bp, Homo sapiens
aggtttttactttca

SEQ ID NO: 1156607 - DNA, 15 bp, Homo sapiens
aaggtttttactttc

SEQ ID NO: 1156608 - DNA, 15 bp, Homo sapiens
aaaggtttttacttt

SEQ ID NO: 1156609 - DNA, 15 bp, Homo sapiens
caaaggtttttactt

SEQ ID NO: 1156610 - DNA, 15 bp, Homo sapiens
ccaaaggtttttact

SEQ ID NO: 1156611 - DNA, 15 bp, Homo sapiens
cccaaaggtttttac

SEQ ID NO: 1156612 - DNA, 15 bp, Homo sapiens
tcccaaaggttttta

SEQ ID NO: 1156613 - DNA, 15 bp, Homo sapiens
ttcccaaaggttttt

SEQ ID NO: 1156614 - DNA, 15 bp, Homo sapiens
cttcccaaaggtttt

SEQ ID NO: 1156615 - DNA, 15 bp, Homo sapiens
acttcccaaaggttt

SEQ ID NO: 1156616 - DNA, 15 bp, Homo sapiens
gacttcccaaaggtt

SEQ ID NO: 1156617 - DNA, 15 bp, Homo sapiens
tgacttcccaaaggt

SEQ ID NO: 1156618 - DNA, 15 bp, Homo sapiens
gtgacttcccaaagg

SEQ ID NO: 1156619 - DNA, 15 bp, Homo sapiens
tgtgacttcccaaag

SEQ ID NO: 1156620 - DNA, 15 bp, Homo sapiens
ctgtgacttcccaaa

SEQ ID NO: 1156621 - DNA, 15 bp, Homo sapiens
actgtgacttcccaa

SEQ ID NO: 1156622 - DNA, 15 bp, Homo sapiens
tactgtgacttccca

SEQ ID NO: 1156623 - DNA, 15 bp, Homo sapiens
ctactgtgacttccc

SEQ ID NO: 1156624 - DNA, 15 bp, Homo sapiens
actactgtgacttcc

SEQ ID NO: 1156625 - DNA, 15 bp, Homo sapiens
gactactgtgacttc

SEQ ID NO: 1156626 - DNA, 15 bp, Homo sapiens
ggactactgtgactt

SEQ ID NO: 1156627 - DNA, 15 bp, Homo sapiens
aggactactgtgact

SEQ ID NO: 1156628 - DNA, 15 bp, Homo sapiens
taggactactgtgac

SEQ ID NO: 1156629 - DNA, 15 bp, Homo sapiens
ttaggactactgtga

SEQ ID NO: 1156630 - DNA, 15 bp, Homo sapiens
cttaggactactgtg

SEQ ID NO: 1156631 - DNA, 15 bp, Homo sapiens
tcttaggactactgt

SEQ ID NO: 1156632 - DNA, 15 bp, Homo sapiens
ttcttaggactactg

SEQ ID NO: 1156633 - DNA, 15 bp, Homo sapiens
tttcttaggactact

SEQ ID NO: 1156634 - DNA, 15 bp, Homo sapiens
atttcttaggactac

SEQ ID NO: 1156635 - DNA, 15 bp, Homo sapiens
aatttcttaggacta

SEQ ID NO: 1156636 - DNA, 15 bp, Homo sapiens
taatttcttaggact

SEQ ID NO: 1156637 - DNA, 15 bp, Homo sapiens
ctaatttcttaggac

SEQ ID NO: 1156638 - DNA, 15 bp, Homo sapiens
cctaatttcttagga

SEQ ID NO: 1156639 - DNA, 15 bp, Homo sapiens
ccctaatttcttagg

SEQ ID NO: 1156640 - DNA, 15 bp, Homo sapiens
cccctaatttcttag

SEQ ID NO: 1156641 - DNA, 15 bp, Homo sapiens
gcccctaatttctta

SEQ ID NO: 1156642 - DNA, 15 bp, Homo sapiens
agcccctaatttctt

SEQ ID NO: 1156643 - DNA, 15 bp, Homo sapiens
tagcccctaatttct

SEQ ID NO: 1156644 - DNA, 15 bp, Homo sapiens
gtagcccctaatttc

SEQ ID NO: 1156645 - DNA, 15 bp, Homo sapiens
agtagcccctaattt

SEQ ID NO: 1156646 - DNA, 15 bp, Homo sapiens
tagtagcccctaatt

SEQ ID NO: 1156647 - DNA, 15 bp, Homo sapiens
atagtagcccctaat

SEQ ID NO: 1156648 - DNA, 15 bp, Homo sapiens
catagtagcccctaa

SEQ ID NO: 1156649 - DNA, 15 bp, Homo sapiens
gcatagtagccccta

SEQ ID NO: 1156650 - DNA, 15 bp, Homo sapiens
tgcatagtagcccct

SEQ ID NO: 1156651 - DNA, 15 bp, Homo sapiens
ttgcatagtagcccc

SEQ ID NO: 1156652 - DNA, 15 bp, Homo sapiens
tttgcatagtagccc

SEQ ID NO: 1156653 - DNA, 15 bp, Homo sapiens
ctttgcatagtagcc

SEQ ID NO: 1156654 - DNA, 15 bp, Homo sapiens
cctttgcatagtagc

SEQ ID NO: 1156655 - DNA, 15 bp, Homo sapiens
ccctttgcatagtag

SEQ ID NO: 1156656 - DNA, 15 bp, Homo sapiens
tccctttgcatagta

SEQ ID NO: 1156657 - DNA, 15 bp, Homo sapiens
ttccctttgcatagt

SEQ ID NO: 1156658 - DNA, 15 bp, Homo sapiens
cttccctttgcatag

SEQ ID NO: 1156659 - DNA, 15 bp, Homo sapiens
acttccctttgcata

SEQ ID NO: 1156660 - DNA, 15 bp, Homo sapiens
gacttccctttgcat

SEQ ID NO: 1156661 - DNA, 15 bp, Homo sapiens
tgacttccctttgca

SEQ ID NO: 1156662 - DNA, 15 bp, Homo sapiens
ctgacttccctttgc

SEQ ID NO: 1156663 - DNA, 15 bp, Homo sapiens
tctgacttccctttg

SEQ ID NO: 1156664 - DNA, 15 bp, Homo sapiens
ttctgacttcccttt

SEQ ID NO: 1156665 - DNA, 15 bp, Homo sapiens
tttctgacttccctt

SEQ ID NO: 1156666 - DNA, 15 bp, Homo sapiens
gctttctgacttccc

SEQ ID NO: 1156667 - DNA, 15 bp, Homo sapiens
tgctttctgacttcc

SEQ ID NO: 1156668 - DNA, 15 bp, Homo sapiens
ttgctttctgacttc

SEQ ID NO: 1156669 - DNA, 15 bp, Homo sapiens
cttgctttctgactt

SEQ ID NO: 1156670 - DNA, 15 bp, Homo sapiens
acttgctttctgact

SEQ ID NO: 1156671 - DNA, 15 bp, Homo sapiens
gacttgctttctgac

SEQ ID NO: 1156672 - DNA, 15 bp, Homo sapiens
cgacttgctttctga

SEQ ID NO: 1156673 - DNA, 15 bp, Homo sapiens
tcgacttgctttctg

SEQ ID NO: 1156674 - DNA, 15 bp, Homo sapiens
ctcgacttgctttct

SEQ ID NO: 1156675 - DNA, 15 bp, Homo sapiens
tctcgacttgctttc

SEQ ID NO: 1156676 - DNA, 15 bp, Homo sapiens
ttctcgacttgcttt

SEQ ID NO: 1156677 - DNA, 15 bp, Homo sapiens
tttctcgacttgctt

SEQ ID NO: 1156678 - DNA, 15 bp, Homo sapiens
ttttctcgacttgct

SEQ ID NO: 1156679 - DNA, 15 bp, Homo sapiens
cttttctcgacttgc

SEQ ID NO: 1156680 - DNA, 15 bp, Homo sapiens
ccttttctcgacttg

SEQ ID NO: 1156681 - DNA, 15 bp, Homo sapiens
accttttctcgactt

SEQ ID NO: 1156682 - DNA, 15 bp, Homo sapiens
taccttttctcgact

SEQ ID NO: 1156683 - DNA, 15 bp, Homo sapiens
ttaccttttctcgac

SEQ ID NO: 1156684 - DNA, 15 bp, Homo sapiens
tttaccttttctcga

SEQ ID NO: 1156685 - DNA, 15 bp, Homo sapiens
gtttaccttttctcg

SEQ ID NO: 1156686 - DNA, 15 bp, Homo sapiens
ggtttaccttttctc

SEQ ID NO: 1156687 - DNA, 15 bp, Homo sapiens
gggtttaccttttct

SEQ ID NO: 1156688 - DNA, 15 bp, Homo sapiens
agggtttaccttttc

SEQ ID NO: 1156689 - DNA, 15 bp, Homo sapiens
gagggtttacctttt

SEQ ID NO: 1156690 - DNA, 15 bp, Homo sapiens
tgagggtttaccttt

SEQ ID NO: 1156691 - DNA, 15 bp, Homo sapiens
ctgagggtttacctt

SEQ ID NO: 1156692 - DNA, 15 bp, Homo sapiens
cctgagggtttacct

SEQ ID NO: 1156693 - DNA, 15 bp, Homo sapiens
tcctgagggtttacc

SEQ ID NO: 1156694 - DNA, 15 bp, Homo sapiens
ttcctgagggtttac

SEQ ID NO: 1156695 - DNA, 15 bp, Homo sapiens
cttcctgagggttta

SEQ ID NO: 1156696 - DNA, 15 bp, Homo sapiens
acttcctgagggttt

SEQ ID NO: 1156697 - DNA, 15 bp, Homo sapiens
cacttcctgagggtt

SEQ ID NO: 1156698 - DNA, 15 bp, Homo sapiens
ccacttcctgagggt

SEQ ID NO: 1156699 - DNA, 15 bp, Homo sapiens
tccacttcctgaggg

SEQ ID NO: 1156700 - DNA, 15 bp, Homo sapiens
atccacttcctgagg

SEQ ID NO: 1156701 - DNA, 15 bp, Homo sapiens
gatccacttcctgag

SEQ ID NO: 1156702 - DNA, 15 bp, Homo sapiens
agatccacttcctga

SEQ ID NO: 1156703 - DNA, 15 bp, Homo sapiens
aagatccacttcctg

SEQ ID NO: 1156704 - DNA, 15 bp, Homo sapiens
caagatccacttcct

SEQ ID NO: 1156705 - DNA, 15 bp, Homo sapiens
gcaagatccacttcc

SEQ ID NO: 1156706 - DNA, 15 bp, Homo sapiens
ggcaagatccacttc

SEQ ID NO: 1156707 - DNA, 15 bp, Homo sapiens
gggcaagatccactt

SEQ ID NO: 1156708 - DNA, 15 bp, Homo sapiens
ggggcaagatccact

SEQ ID NO: 1156709 - DNA, 15 bp, Homo sapiens
aggggcaagatccac

SEQ ID NO: 1156710 - DNA, 15 bp, Homo sapiens
gaggggcaagatcca

SEQ ID NO: 1156711 - DNA, 15 bp, Homo sapiens
agaggggcaagatcc

SEQ ID NO: 1156712 - DNA, 15 bp, Homo sapiens
gagaggggcaagatc

SEQ ID NO: 1156713 - DNA, 15 bp, Homo sapiens
ggagaggggcaagat

SEQ ID NO: 1156714 - DNA, 15 bp, Homo sapiens
aggagaggggcaaga

SEQ ID NO: 1156715 - DNA, 15 bp, Homo sapiens
taggagaggggcaag

SEQ ID NO: 1156716 - DNA, 15 bp, Homo sapiens
ctaggagaggggcaa

SEQ ID NO: 1156717 - DNA, 15 bp, Homo sapiens
tctaggagaggggca

SEQ ID NO: 1156718 - DNA, 15 bp, Homo sapiens
atctaggagaggggc

SEQ ID NO: 1156719 - DNA, 15 bp, Homo sapiens
aatctaggagagggg

SEQ ID NO: 1156720 - DNA, 15 bp, Homo sapiens
aaatctaggagaggg

SEQ ID NO: 1156721 - DNA, 15 bp, Homo sapiens
gaaatctaggagagg

SEQ ID NO: 1156722 - DNA, 15 bp, Homo sapiens
agaaatctaggagag

SEQ ID NO: 1156723 - DNA, 15 bp, Homo sapiens
gagaaatctaggaga

SEQ ID NO: 1156724 - DNA, 15 bp, Homo sapiens
agagaaatctaggag

SEQ ID NO: 1156725 - DNA, 15 bp, Homo sapiens
aagagaaatctagga

SEQ ID NO: 1156726 - DNA, 15 bp, Homo sapiens
caagagaaatctagg

SEQ ID NO: 1156727 - DNA, 15 bp, Homo sapiens
acaagagaaatctag

SEQ ID NO: 1156728 - DNA, 15 bp, Homo sapiens
aacaagagaaatcta

SEQ ID NO: 1156729 - DNA, 15 bp, Homo sapiens
taacaagagaaatct

SEQ ID NO: 1156730 - DNA, 15 bp, Homo sapiens
gtaacaagagaaatc

SEQ ID NO: 1156731 - DNA, 15 bp, Homo sapiens
agtaacaagagaaat

SEQ ID NO: 1156732 - DNA, 15 bp, Homo sapiens
tagtaacaagagaaa

SEQ ID NO: 1156733 - DNA, 15 bp, Homo sapiens
ctagtaacaagagaa

SEQ ID NO: 1156734 - DNA, 15 bp, Homo sapiens
tctagtaacaagaga

SEQ ID NO: 1156735 - DNA, 15 bp, Homo sapiens
ttctagtaacaagag

SEQ ID NO: 1156736 - DNA, 15 bp, Homo sapiens
attctagtaacaaga

SEQ ID NO: 1156737 - DNA, 15 bp, Homo sapiens
aattctagtaacaag

SEQ ID NO: 1156738 - DNA, 15 bp, Homo sapiens
aaattctagtaacaa

SEQ ID NO: 1156739 - DNA, 15 bp, Homo sapiens
aaaattctagtaaca

SEQ ID NO: 1156740 - DNA, 15 bp, Homo sapiens
taaaattctagtaac

SEQ ID NO: 1156741 - DNA, 15 bp, Homo sapiens
ataaaattctagtaa

SEQ ID NO: 1156742 - DNA, 15 bp, Homo sapiens
cataaaattctagta

SEQ ID NO: 1156743 - DNA, 15 bp, Homo sapiens
tcataaaattctagt

SEQ ID NO: 1156744 - DNA, 15 bp, Homo sapiens
ttcataaaattctag

SEQ ID NO: 1156745 - DNA, 15 bp, Homo sapiens
tttcataaaattcta

SEQ ID NO: 1156746 - DNA, 15 bp, Homo sapiens
ttttcataaaattct

SEQ ID NO: 1156747 - DNA, 15 bp, Homo sapiens
attttcataaaattc

SEQ ID NO: 1156748 - DNA, 15 bp, Homo sapiens
cattttcataaaatt

SEQ ID NO: 1156749 - DNA, 15 bp, Homo sapiens
acattttcataaaat

SEQ ID NO: 1156750 - DNA, 15 bp, Homo sapiens
tacattttcataaaa

SEQ ID NO: 1156751 - DNA, 15 bp, Homo sapiens
atacattttcataaa

SEQ ID NO: 1156752 - DNA, 15 bp, Homo sapiens
catacattttcataa

SEQ ID NO: 1156753 - DNA, 15 bp, Homo sapiens
acatacattttcata

SEQ ID NO: 1156754 - DNA, 15 bp, Homo sapiens
gacatacattttcat

SEQ ID NO: 1156755 - DNA, 15 bp, Homo sapiens
cgacatacattttca

SEQ ID NO: 1156756 - DNA, 15 bp, Homo sapiens
ccgacatacattttc

SEQ ID NO: 1156757 - DNA, 15 bp, Homo sapiens
cccgacatacatttt

SEQ ID NO: 1156758 - DNA, 15 bp, Homo sapiens
ccccgacatacattt

SEQ ID NO: 1156759 - DNA, 15 bp, Homo sapiens
tccccgacatacatt

SEQ ID NO: 1156760 - DNA, 15 bp, Homo sapiens
ctccccgacatacat

SEQ ID NO: 1156761 - DNA, 15 bp, Homo sapiens
tctccccgacataca

SEQ ID NO: 1156762 - DNA, 15 bp, Homo sapiens
ttctccccgacatac

SEQ ID NO: 1156763 - DNA, 15 bp, Homo sapiens
tttctccccgacata

SEQ ID NO: 1156764 - DNA, 15 bp, Homo sapiens
ctttctccccgacat

SEQ ID NO: 1156765 - DNA, 15 bp, Homo sapiens
cctttctccccgaca

SEQ ID NO: 1156766 - DNA, 15 bp, Homo sapiens
ccctttctccccgac

SEQ ID NO: 1156767 - DNA, 15 bp, Homo sapiens
cccctttctccccga

SEQ ID NO: 1156768 - DNA, 15 bp, Homo sapiens
tcccctttctccccg

SEQ ID NO: 1156769 - DNA, 15 bp, Homo sapiens
atcccctttctcccc

SEQ ID NO: 1156770 - DNA, 15 bp, Homo sapiens
catcccctttctccc

SEQ ID NO: 1156771 - DNA, 15 bp, Homo sapiens
tcatcccctttctcc

SEQ ID NO: 1156772 - DNA, 15 bp, Homo sapiens
atcatcccctttctc

SEQ ID NO: 1156773 - DNA, 15 bp, Homo sapiens
aatcatcccctttct

SEQ ID NO: 1156774 - DNA, 15 bp, Homo sapiens
taatcatcccctttc

SEQ ID NO: 1156775 - DNA, 15 bp, Homo sapiens
ttaatcatccccttt

SEQ ID NO: 1156776 - DNA, 15 bp, Homo sapiens
cttaatcatcccctt

SEQ ID NO: 1156777 - DNA, 15 bp, Homo sapiens
ccttaatcatcccct

SEQ ID NO: 1156778 - DNA, 15 bp, Homo sapiens
tccttaatcatcccc

SEQ ID NO: 1156779 - DNA, 15 bp, Homo sapiens
ctccttaatcatccc

SEQ ID NO: 1156780 - DNA, 15 bp, Homo sapiens
actccttaatcatcc

SEQ ID NO: 1156781 - DNA, 15 bp, Homo sapiens
tactccttaatcatc

SEQ ID NO: 1156782 - DNA, 15 bp, Homo sapiens
ttactccttaatcat

SEQ ID NO: 1156783 - DNA, 15 bp, Homo sapiens
tttactccttaatca

SEQ ID NO: 1156784 - DNA, 15 bp, Homo sapiens
ctttactccttaatc

SEQ ID NO: 1156785 - DNA, 15 bp, Homo sapiens
cctttactccttaat

SEQ ID NO: 1156786 - DNA, 15 bp, Homo sapiens
ccctttactccttaa

SEQ ID NO: 1156787 - DNA, 15 bp, Homo sapiens
tccctttactcctta

SEQ ID NO: 1156788 - DNA, 15 bp, Homo sapiens
ttccctttactcctt

SEQ ID NO: 1156789 - DNA, 15 bp, Homo sapiens
tttccctttactcct

SEQ ID NO: 1156790 - DNA, 15 bp, Homo sapiens
ttttccctttactcc

SEQ ID NO: 1156791 - DNA, 15 bp, Homo sapiens
tttttccctttactc

SEQ ID NO: 1156792 - DNA, 15 bp, Homo sapiens
ttttttccctttact

SEQ ID NO: 1156793 - DNA, 15 bp, Homo sapiens
attttttccctttac

SEQ ID NO: 1156794 - DNA, 15 bp, Homo sapiens
tattttttcccttta

SEQ ID NO: 1156795 - DNA, 15 bp, Homo sapiens
gtattttttcccttt

SEQ ID NO: 1156796 - DNA, 15 bp, Homo sapiens
agtattttttccctt

SEQ ID NO: 1156797 - DNA, 15 bp, Homo sapiens
cagtattttttccct

SEQ ID NO: 1156798 - DNA, 15 bp, Homo sapiens
ccagtattttttccc

SEQ ID NO: 1156799 - DNA, 15 bp, Homo sapiens
accagtattttttcc

SEQ ID NO: 1156800 - DNA, 15 bp, Homo sapiens
taccagtattttttc

SEQ ID NO: 1156801 - DNA, 15 bp, Homo sapiens
ttaccagtatttttt

SEQ ID NO: 1156802 - DNA, 15 bp, Homo sapiens
cttaccagtattttt

SEQ ID NO: 1156803 - DNA, 15 bp, Homo sapiens
gcttaccagtatttt

SEQ ID NO: 1156804 - DNA, 15 bp, Homo sapiens
tgcttaccagtattt

SEQ ID NO: 1156805 - DNA, 15 bp, Homo sapiens
gtgcttaccagtatt

SEQ ID NO: 1156806 - DNA, 15 bp, Homo sapiens
agtgcttaccagtat

SEQ ID NO: 1156807 - DNA, 15 bp, Homo sapiens
tagtgcttaccagta

SEQ ID NO: 1156808 - DNA, 15 bp, Homo sapiens
atagtgcttaccagt

SEQ ID NO: 1156809 - DNA, 15 bp, Homo sapiens
tatagtgcttaccag

SEQ ID NO: 1156810 - DNA, 15 bp, Homo sapiens
gtatagtgcttacca

SEQ ID NO: 1156811 - DNA, 15 bp, Homo sapiens
ggtatagtgcttacc

SEQ ID NO: 1156812 - DNA, 15 bp, Homo sapiens
aggtatagtgcttac

SEQ ID NO: 1156813 - DNA, 15 bp, Homo sapiens
aaggtatagtgctta

SEQ ID NO: 1156814 - DNA, 15 bp, Homo sapiens
aaaggtatagtgctt

SEQ ID NO: 1156815 - DNA, 15 bp, Homo sapiens
taaaggtatagtgct

SEQ ID NO: 1156816 - DNA, 15 bp, Homo sapiens
ctaaaggtatagtgc

SEQ ID NO: 1156817 - DNA, 15 bp, Homo sapiens
tctaaaggtatagtg

SEQ ID NO: 1156818 - DNA, 15 bp, Homo sapiens
gtctaaaggtatagt

SEQ ID NO: 1156819 - DNA, 15 bp, Homo sapiens
agtctaaaggtatag

SEQ ID NO: 1156820 - DNA, 15 bp, Homo sapiens
aagtctaaaggtata

SEQ ID NO: 1156821 - DNA, 15 bp, Homo sapiens
aaagtctaaaggtat

SEQ ID NO: 1156822 - DNA, 15 bp, Homo sapiens
gaaagtctaaaggta

SEQ ID NO: 1156823 - DNA, 15 bp, Homo sapiens
tgaaagtctaaaggt

SEQ ID NO: 1156824 - DNA, 15 bp, Homo sapiens
ttgaaagtctaaagg

SEQ ID NO: 1156825 - DNA, 15 bp, Homo sapiens
tttgaaagtctaaag

SEQ ID NO: 1156826 - DNA, 15 bp, Homo sapiens
gtttgaaagtctaaa

SEQ ID NO: 1156827 - DNA, 15 bp, Homo sapiens
tgtttgaaagtctaa

SEQ ID NO: 1156828 - DNA, 15 bp, Homo sapiens
atgtttgaaagtcta

SEQ ID NO: 1156829 - DNA, 15 bp, Homo sapiens
gatgtttgaaagtct

SEQ ID NO: 1156830 - DNA, 15 bp, Homo sapiens
tgatgtttgaaagtc

SEQ ID NO: 1156831 - DNA, 15 bp, Homo sapiens
atgatgtttgaaagt

SEQ ID NO: 1156832 - DNA, 15 bp, Homo sapiens
catgatgtttgaaag

SEQ ID NO: 1156833 - DNA, 15 bp, Homo sapiens
ccatgatgtttgaaa

SEQ ID NO: 1156834 - DNA, 15 bp, Homo sapiens
tccatgatgtttgaa

SEQ ID NO: 1156835 - DNA, 15 bp, Homo sapiens
ctccatgatgtttga

SEQ ID NO: 1156836 - DNA, 15 bp, Homo sapiens
actccatgatgtttg

SEQ ID NO: 1156837 - DNA, 15 bp, Homo sapiens
aactccatgatgttt

SEQ ID NO: 1156838 - DNA, 15 bp, Homo sapiens
taactccatgatgtt

SEQ ID NO: 1156839 - DNA, 15 bp, Homo sapiens
ttaactccatgatgt

SEQ ID NO: 1156840 - DNA, 15 bp, Homo sapiens
attaactccatgatg

SEQ ID NO: 1156841 - DNA, 15 bp, Homo sapiens
aattaactccatgat

SEQ ID NO: 1156842 - DNA, 15 bp, Homo sapiens
taattaactccatga

SEQ ID NO: 1156843 - DNA, 15 bp, Homo sapiens
ataattaactccatg

SEQ ID NO: 1156844 - DNA, 15 bp, Homo sapiens
tataattaactccat

SEQ ID NO: 1156845 - DNA, 15 bp, Homo sapiens
ttataattaactcca

SEQ ID NO: 1156846 - DNA, 15 bp, Homo sapiens
tttataattaactcc

SEQ ID NO: 1156847 - DNA, 15 bp, Homo sapiens
ttttataattaactc

SEQ ID NO: 1156848 - DNA, 15 bp, Homo sapiens
cttttataattaact

SEQ ID NO: 1156849 - DNA, 15 bp, Homo sapiens
gcttttataattaac

SEQ ID NO: 1156850 - DNA, 15 bp, Homo sapiens
agcttttataattaa

SEQ ID NO: 1156851 - DNA, 15 bp, Homo sapiens
tagcttttataatta

SEQ ID NO: 1156852 - DNA, 15 bp, Homo sapiens
ttagcttttataatt

SEQ ID NO: 1156853 - DNA, 15 bp, Homo sapiens
attagcttttataat

SEQ ID NO: 1156854 - DNA, 15 bp, Homo sapiens
aattagcttttataa

SEQ ID NO: 1156855 - DNA, 15 bp, Homo sapiens
aaattagcttttata

SEQ ID NO: 1156856 - DNA, 15 bp, Homo sapiens
aaaattagcttttat

SEQ ID NO: 1156857 - DNA, 15 bp, Homo sapiens
aaaaattagctttta

SEQ ID NO: 1156858 - DNA, 15 bp, Homo sapiens
caaaaattagctttt

SEQ ID NO: 1156859 - DNA, 15 bp, Homo sapiens
tcaaaaattagcttt

SEQ ID NO: 1156860 - DNA, 15 bp, Homo sapiens
ttcaaaaattagctt

SEQ ID NO: 1156861 - DNA, 15 bp, Homo sapiens
attcaaaaattagct

SEQ ID NO: 1156862 - DNA, 15 bp, Homo sapiens
gaattcaaaaattag

SEQ ID NO: 1156863 - DNA, 15 bp, Homo sapiens
ggaattcaaaaatta

SEQ ID NO: 1156864 - DNA, 15 bp, Homo sapiens
aggaattcaaaaatt

SEQ ID NO: 1156865 - DNA, 15 bp, Homo sapiens
gaggaattcaaaaat

SEQ ID NO: 1156866 - DNA, 15 bp, Homo sapiens
agaggaattcaaaaa

SEQ ID NO: 1156867 - DNA, 15 bp, Homo sapiens
tagaggaattcaaaa

SEQ ID NO: 1156868 - DNA, 15 bp, Homo sapiens
gtagaggaattcaaa

SEQ ID NO: 1156869 - DNA, 15 bp, Homo sapiens
agtagaggaattcaa

SEQ ID NO: 1156870 - DNA, 15 bp, Homo sapiens
aagtagaggaattca

SEQ ID NO: 1156871 - DNA, 15 bp, Homo sapiens
gaagtagaggaattc

SEQ ID NO: 1156872 - DNA, 15 bp, Homo sapiens
agaagtagaggaatt

SEQ ID NO: 1156873 - DNA, 15 bp, Homo sapiens
cagaagtagaggaat

SEQ ID NO: 1156874 - DNA, 15 bp, Homo sapiens
acagaagtagaggaa

SEQ ID NO: 1156875 - DNA, 15 bp, Homo sapiens
gacagaagtagagga

SEQ ID NO: 1156876 - DNA, 15 bp, Homo sapiens
agacagaagtagagg

SEQ ID NO: 1156877 - DNA, 15 bp, Homo sapiens
tagacagaagtagag

SEQ ID NO: 1156878 - DNA, 15 bp, Homo sapiens
ctagacagaagtaga

SEQ ID NO: 1156879 - DNA, 15 bp, Homo sapiens
cctagacagaagtag

SEQ ID NO: 1156880 - DNA, 15 bp, Homo sapiens
ccctagacagaagta

SEQ ID NO: 1156881 - DNA, 15 bp, Homo sapiens
accctagacagaagt

SEQ ID NO: 1156882 - DNA, 15 bp, Homo sapiens
caccctagacagaag

SEQ ID NO: 1156883 - DNA, 15 bp, Homo sapiens
acaccctagacagaa

SEQ ID NO: 1156884 - DNA, 15 bp, Homo sapiens
aacaccctagacaga

SEQ ID NO: 1156885 - DNA, 15 bp, Homo sapiens
aaacaccctagacag

SEQ ID NO: 1156886 - DNA, 15 bp, Homo sapiens
aaaacaccctagaca

SEQ ID NO: 1156887 - DNA, 15 bp, Homo sapiens
gaaaacaccctagac

SEQ ID NO: 1156888 - DNA, 15 bp, Homo sapiens
agaaaacaccctaga

SEQ ID NO: 1156889 - DNA, 15 bp, Homo sapiens
cagaaaacaccctag

SEQ ID NO: 1156890 - DNA, 15 bp, Homo sapiens
gcagaaaacacccta

SEQ ID NO: 1156891 - DNA, 15 bp, Homo sapiens
tgcagaaaacaccct

SEQ ID NO: 1156892 - DNA, 15 bp, Homo sapiens
ttgcagaaaacaccc

SEQ ID NO: 1156893 - DNA, 15 bp, Homo sapiens
attgcagaaaacacc

SEQ ID NO: 1156894 - DNA, 15 bp, Homo sapiens
aattgcagaaaacac

SEQ ID NO: 1156895 - DNA, 15 bp, Homo sapiens
caattgcagaaaaca

SEQ ID NO: 1156896 - DNA, 15 bp, Homo sapiens
acaattgcagaaaac

SEQ ID NO: 1156897 - DNA, 15 bp, Homo sapiens
tacaattgcagaaaa

SEQ ID NO: 1156898 - DNA, 15 bp, Homo sapiens
atacaattgcagaaa

SEQ ID NO: 1156899 - DNA, 15 bp, Homo sapiens
aatacaattgcagaa

SEQ ID NO: 1156900 - DNA, 15 bp, Homo sapiens
aaatacaattgcaga

SEQ ID NO: 1156901 - DNA, 15 bp, Homo sapiens
caaatacaattgcag

SEQ ID NO: 1156902 - DNA, 15 bp, Homo sapiens
ccaaatacaattgca

SEQ ID NO: 1156903 - DNA, 15 bp, Homo sapiens
accaaatacaattgc

SEQ ID NO: 1156904 - DNA, 15 bp, Homo sapiens
caccaaatacaattg

SEQ ID NO: 1156905 - DNA, 15 bp, Homo sapiens
gcaccaaatacaatt

SEQ ID NO: 1156906 - DNA, 15 bp, Homo sapiens
tgcaccaaatacaat

SEQ ID NO: 1156907 - DNA, 15 bp, Homo sapiens
ctgcaccaaatacaa

SEQ ID NO: 1156908 - DNA, 15 bp, Homo sapiens
actgcaccaaataca

SEQ ID NO: 1156909 - DNA, 15 bp, Homo sapiens
cactgcaccaaatac

SEQ ID NO: 1156910 - DNA, 15 bp, Homo sapiens
ccactgcaccaaata

SEQ ID NO: 1156911 - DNA, 15 bp, Homo sapiens
gccactgcaccaaat

SEQ ID NO: 1156912 - DNA, 15 bp, Homo sapiens
agccactgcaccaaa

SEQ ID NO: 1156913 - DNA, 15 bp, Homo sapiens
gagccactgcaccaa

SEQ ID NO: 1156914 - DNA, 15 bp, Homo sapiens
agagccactgcacca

SEQ ID NO: 1156915 - DNA, 15 bp, Homo sapiens
tagagccactgcacc

SEQ ID NO: 1156916 - DNA, 15 bp, Homo sapiens
ctagagccactgcac

SEQ ID NO: 1156917 - DNA, 15 bp, Homo sapiens
cctagagccactgca

SEQ ID NO: 1156918 - DNA, 15 bp, Homo sapiens
tcctagagccactgc

SEQ ID NO: 1156919 - DNA, 15 bp, Homo sapiens
gtcctagagccactg

SEQ ID NO: 1156920 - DNA, 15 bp, Homo sapiens
tgtcctagagccact

SEQ ID NO: 1156921 - DNA, 15 bp, Homo sapiens
atgtcctagagccac

SEQ ID NO: 1156922 - DNA, 15 bp, Homo sapiens
catgtcctagagcca

SEQ ID NO: 1156923 - DNA, 15 bp, Homo sapiens
gcatgtcctagagcc

SEQ ID NO: 1156924 - DNA, 15 bp, Homo sapiens
ggcatgtcctagagc

SEQ ID NO: 1156925 - DNA, 15 bp, Homo sapiens
tggcatgtcctagag

SEQ ID NO: 1156926 - DNA, 15 bp, Homo sapiens
ctggcatgtcctaga

SEQ ID NO: 1156927 - DNA, 15 bp, Homo sapiens
actggcatgtcctag

SEQ ID NO: 1156928 - DNA, 15 bp, Homo sapiens
aactggcatgtccta

SEQ ID NO: 1156929 - DNA, 15 bp, Homo sapiens
gaactggcatgtcct

SEQ ID NO: 1156930 - DNA, 15 bp, Homo sapiens
tgaactggcatgtcc

SEQ ID NO: 1156931 - DNA, 15 bp, Homo sapiens
atgaactggcatgtc

SEQ ID NO: 1156932 - DNA, 15 bp, Homo sapiens
aatgaactggcatgt

SEQ ID NO: 1156933 - DNA, 15 bp, Homo sapiens
aaatgaactggcatg

SEQ ID NO: 1156934 - DNA, 15 bp, Homo sapiens
caaatgaactggcat

SEQ ID NO: 1156935 - DNA, 15 bp, Homo sapiens
gcaaatgaactggca

SEQ ID NO: 1156936 - DNA, 15 bp, Homo sapiens
agcaaatgaactggc

SEQ ID NO: 1156937 - DNA, 15 bp, Homo sapiens
gagcaaatgaactgg

SEQ ID NO: 1156938 - DNA, 15 bp, Homo sapiens
ggagcaaatgaactg

SEQ ID NO: 1156939 - DNA, 15 bp, Homo sapiens
tggagcaaatgaact

SEQ ID NO: 1156940 - DNA, 15 bp, Homo sapiens
ctggagcaaatgaac

SEQ ID NO: 1156941 - DNA, 15 bp, Homo sapiens
tctggagcaaatgaa

SEQ ID NO: 1156942 - DNA, 15 bp, Homo sapiens
gtctggagcaaatga

SEQ ID NO: 1156943 - DNA, 15 bp, Homo sapiens
agtctggagcaaatg

SEQ ID NO: 1156944 - DNA, 15 bp, Homo sapiens
tagtctggagcaaat

SEQ ID NO: 1156945 - DNA, 15 bp, Homo sapiens
atagtctggagcaaa

SEQ ID NO: 1156946 - DNA, 15 bp, Homo sapiens
catagtctggagcaa

SEQ ID NO: 1156947 - DNA, 15 bp, Homo sapiens
gcatagtctggagca

SEQ ID NO: 1156948 - DNA, 15 bp, Homo sapiens
agcatagtctggagc

SEQ ID NO: 1156949 - DNA, 15 bp, Homo sapiens
tagcatagtctggag

SEQ ID NO: 1156950 - DNA, 15 bp, Homo sapiens
ttagcatagtctgga

SEQ ID NO: 1156951 - DNA, 15 bp, Homo sapiens
tttagcatagtctgg

SEQ ID NO: 1156952 - DNA, 15 bp, Homo sapiens
ctttagcatagtctg

SEQ ID NO: 1156953 - DNA, 15 bp, Homo sapiens
gctttagcatagtct

SEQ ID NO: 1156954 - DNA, 15 bp, Homo sapiens
agctttagcatagtc

SEQ ID NO: 1156955 - DNA, 15 bp, Homo sapiens
tagctttagcatagt

SEQ ID NO: 1156956 - DNA, 15 bp, Homo sapiens
ttagctttagcatag

SEQ ID NO: 1156957 - DNA, 15 bp, Homo sapiens
cttagctttagcata

SEQ ID NO: 1156958 - DNA, 15 bp, Homo sapiens
gcttagctttagcat

SEQ ID NO: 1156959 - DNA, 15 bp, Homo sapiens
agcttagctttagca

SEQ ID NO: 1156960 - DNA, 15 bp, Homo sapiens
cagcttagctttagc

SEQ ID NO: 1156961 - DNA, 15 bp, Homo sapiens
acagcttagctttag

SEQ ID NO: 1156962 - DNA, 15 bp, Homo sapiens
gacagcttagcttta

SEQ ID NO: 1156963 - DNA, 15 bp, Homo sapiens
agacagcttagcttt

SEQ ID NO: 1156964 - DNA, 15 bp, Homo sapiens
cagacagcttagctt

SEQ ID NO: 1156965 - DNA, 15 bp, Homo sapiens
gcagacagcttagct

SEQ ID NO: 1156966 - DNA, 15 bp, Homo sapiens
tgcagacagcttagc

SEQ ID NO: 1156967 - DNA, 15 bp, Homo sapiens
ctgcagacagcttag

SEQ ID NO: 1156968 - DNA, 15 bp, Homo sapiens
gctgcagacagctta

SEQ ID NO: 1156969 - DNA, 15 bp, Homo sapiens
ggctgcagacagctt

SEQ ID NO: 1156970 - DNA, 15 bp, Homo sapiens
gggctgcagacagct

SEQ ID NO: 1156971 - DNA, 15 bp, Homo sapiens
tgggctgcagacagc

SEQ ID NO: 1156972 - DNA, 15 bp, Homo sapiens
gtgggctgcagacag

SEQ ID NO: 1156973 - DNA, 15 bp, Homo sapiens
agtgggctgcagaca

SEQ ID NO: 1156974 - DNA, 15 bp, Homo sapiens
aagtgggctgcagac

SEQ ID NO: 1156975 - DNA, 15 bp, Homo sapiens
taagtgggctgcaga

SEQ ID NO: 1156976 - DNA, 15 bp, Homo sapiens
ataagtgggctgcag

SEQ ID NO: 1156977 - DNA, 15 bp, Homo sapiens
aataagtgggctgca

SEQ ID NO: 1156978 - DNA, 15 bp, Homo sapiens
gaataagtgggctgc

SEQ ID NO: 1156979 - DNA, 15 bp, Homo sapiens
tgaataagtgggctg

SEQ ID NO: 1156980 - DNA, 15 bp, Homo sapiens
atgaataagtgggct

SEQ ID NO: 1156981 - DNA, 15 bp, Homo sapiens
catgaataagtgggc

SEQ ID NO: 1156982 - DNA, 15 bp, Homo sapiens
gcatgaataagtggg

SEQ ID NO: 1156983 - DNA, 15 bp, Homo sapiens
agcatgaataagtgg

SEQ ID NO: 1156984 - DNA, 15 bp, Homo sapiens
cagcatgaataagtg

SEQ ID NO: 1156985 - DNA, 15 bp, Homo sapiens
acagcatgaataagt

SEQ ID NO: 1156986 - DNA, 15 bp, Homo sapiens
aacagcatgaataag

SEQ ID NO: 1156987 - DNA, 15 bp, Homo sapiens
aaacagcatgaataa

SEQ ID NO: 1156988 - DNA, 15 bp, Homo sapiens
caaacagcatgaata

SEQ ID NO: 1156989 - DNA, 15 bp, Homo sapiens
tcaaacagcatgaat

SEQ ID NO: 1156990 - DNA, 15 bp, Homo sapiens
ttcaaacagcatgaa

SEQ ID NO: 1156991 - DNA, 15 bp, Homo sapiens
tttcaaacagcatga

SEQ ID NO: 1156992 - DNA, 15 bp, Homo sapiens
ctttcaaacagcatg

SEQ ID NO: 1156993 - DNA, 15 bp, Homo sapiens
tctttcaaacagcat

SEQ ID NO: 1156994 - DNA, 15 bp, Homo sapiens
gtctttcaaacagca

SEQ ID NO: 1156995 - DNA, 15 bp, Homo sapiens
tgtctttcaaacagc

SEQ ID NO: 1156996 - DNA, 15 bp, Homo sapiens
ttgtctttcaaacag

SEQ ID NO: 1156997 - DNA, 15 bp, Homo sapiens
gttgtctttcaaaca

SEQ ID NO: 1156998 - DNA, 15 bp, Homo sapiens
ggttgtctttcaaac

SEQ ID NO: 1156999 - DNA, 15 bp, Homo sapiens
aggttgtctttcaaa

SEQ ID NO: 1157000 - DNA, 15 bp, Homo sapiens
gaggttgtctttcaa

SEQ ID NO: 1157001 - DNA, 15 bp, Homo sapiens
agaggttgtctttca

SEQ ID NO: 1157002 - DNA, 15 bp, Homo sapiens
cagaggttgtctttc

SEQ ID NO: 1157003 - DNA, 15 bp, Homo sapiens
tcagaggttgtcttt

SEQ ID NO: 1157004 - DNA, 15 bp, Homo sapiens
atcagaggttgtctt

SEQ ID NO: 1157005 - DNA, 15 bp, Homo sapiens
aatcagaggttgtct

SEQ ID NO: 1157006 - DNA, 15 bp, Homo sapiens
caatcagaggttgtc

SEQ ID NO: 1157007 - DNA, 15 bp, Homo sapiens
tcaatcagaggttgt

SEQ ID NO: 1157008 - DNA, 15 bp, Homo sapiens
gtcaatcagaggttg

SEQ ID NO: 1157009 - DNA, 15 bp, Homo sapiens
tgtcaatcagaggtt

SEQ ID NO: 1157010 - DNA, 15 bp, Homo sapiens
ctgtcaatcagaggt

SEQ ID NO: 1157011 - DNA, 15 bp, Homo sapiens
gctgtcaatcagagg

SEQ ID NO: 1157012 - DNA, 15 bp, Homo sapiens
agctgtcaatcagag

SEQ ID NO: 1157013 - DNA, 15 bp, Homo sapiens
tagctgtcaatcaga

SEQ ID NO: 1157014 - DNA, 15 bp, Homo sapiens
gtagctgtcaatcag

SEQ ID NO: 1157015 - DNA, 15 bp, Homo sapiens
tgtagctgtcaatca

SEQ ID NO: 1157016 - DNA, 15 bp, Homo sapiens
ctgtagctgtcaatc

SEQ ID NO: 1157017 - DNA, 15 bp, Homo sapiens
actgtagctgtcaat

SEQ ID NO: 1157018 - DNA, 15 bp, Homo sapiens
cactgtagctgtcaa

SEQ ID NO: 1157019 - DNA, 15 bp, Homo sapiens
tcactgtagctgtca

SEQ ID NO: 1157020 - DNA, 15 bp, Homo sapiens
ttcactgtagctgtc

SEQ ID NO: 1157021 - DNA, 15 bp, Homo sapiens
cttcactgtagctgt

SEQ ID NO: 1157022 - DNA, 15 bp, Homo sapiens
tcttcactgtagctg

SEQ ID NO: 1157023 - DNA, 15 bp, Homo sapiens
ctcttcactgtagct

SEQ ID NO: 1157024 - DNA, 15 bp, Homo sapiens
cctcttcactgtagc

SEQ ID NO: 1157025 - DNA, 15 bp, Homo sapiens
ccctcttcactgtag

SEQ ID NO: 1157026 - DNA, 15 bp, Homo sapiens
cccctcttcactgta

SEQ ID NO: 1157027 - DNA, 15 bp, Homo sapiens
gcccctcttcactgt

SEQ ID NO: 1157028 - DNA, 15 bp, Homo sapiens
agcccctcttcactg

SEQ ID NO: 1157029 - DNA, 15 bp, Homo sapiens
cagcccctcttcact

SEQ ID NO: 1157030 - DNA, 15 bp, Homo sapiens
tcagcccctcttcac

SEQ ID NO: 1157031 - DNA, 15 bp, Homo sapiens
ttcagcccctcttca

SEQ ID NO: 1157032 - DNA, 15 bp, Homo sapiens
cttcagcccctcttc

SEQ ID NO: 1157033 - DNA, 15 bp, Homo sapiens
gcttcagcccctctt

SEQ ID NO: 1157034 - DNA, 15 bp, Homo sapiens
ggcttcagcccctct

SEQ ID NO: 1157035 - DNA, 15 bp, Homo sapiens
aggcttcagcccctc

SEQ ID NO: 1157036 - DNA, 15 bp, Homo sapiens
caggcttcagcccct

SEQ ID NO: 1157037 - DNA, 15 bp, Homo sapiens
acaggcttcagcccc

SEQ ID NO: 1157038 - DNA, 15 bp, Homo sapiens
tacaggcttcagccc

SEQ ID NO: 1157039 - DNA, 15 bp, Homo sapiens
ttacaggcttcagcc

SEQ ID NO: 1157040 - DNA, 15 bp, Homo sapiens
cttacaggcttcagc

SEQ ID NO: 1157041 - DNA, 15 bp, Homo sapiens
acttacaggcttcag

SEQ ID NO: 1157042 - DNA, 15 bp, Homo sapiens
aacttacaggcttca

SEQ ID NO: 1157043 - DNA, 15 bp, Homo sapiens
gaacttacaggcttc

SEQ ID NO: 1157044 - DNA, 15 bp, Homo sapiens
agaacttacaggctt

SEQ ID NO: 1157045 - DNA, 15 bp, Homo sapiens
gagaacttacaggct

SEQ ID NO: 1157046 - DNA, 15 bp, Homo sapiens
agagaacttacaggc

SEQ ID NO: 1157047 - DNA, 15 bp, Homo sapiens
cagagaacttacagg

SEQ ID NO: 1157048 - DNA, 15 bp, Homo sapiens
tcagagaacttacag

SEQ ID NO: 1157049 - DNA, 15 bp, Homo sapiens
atcagagaacttaca

SEQ ID NO: 1157050 - DNA, 15 bp, Homo sapiens
catcagagaacttac

SEQ ID NO: 1157051 - DNA, 15 bp, Homo sapiens
gcatcagagaactta

SEQ ID NO: 1157052 - DNA, 15 bp, Homo sapiens
ggcatcagagaactt

SEQ ID NO: 1157053 - DNA, 15 bp, Homo sapiens
aggcatcagagaact

SEQ ID NO: 1157054 - DNA, 15 bp, Homo sapiens
caggcatcagagaac

SEQ ID NO: 1157055 - DNA, 15 bp, Homo sapiens
tcaggcatcagagaa

SEQ ID NO: 1157056 - DNA, 15 bp, Homo sapiens
atcaggcatcagaga

SEQ ID NO: 1157057 - DNA, 15 bp, Homo sapiens
catcaggcatcagag

SEQ ID NO: 1157058 - DNA, 15 bp, Homo sapiens
tcatcaggcatcaga

SEQ ID NO: 1157059 - DNA, 15 bp, Homo sapiens
atcatcaggcatcag

SEQ ID NO: 1157060 - DNA, 15 bp, Homo sapiens
catcatcaggcatca

SEQ ID NO: 1157061 - DNA, 15 bp, Homo sapiens
gcatcatcaggcatc

SEQ ID NO: 1157062 - DNA, 15 bp, Homo sapiens
agcatcatcaggcat

SEQ ID NO: 1157063 - DNA, 15 bp, Homo sapiens
aagcatcatcaggca

SEQ ID NO: 1157064 - DNA, 15 bp, Homo sapiens
caagcatcatcaggc

SEQ ID NO: 1157065 - DNA, 15 bp, Homo sapiens
tcaagcatcatcagg

SEQ ID NO: 1157066 - DNA, 15 bp, Homo sapiens
atcaagcatcatcag

SEQ ID NO: 1157067 - DNA, 15 bp, Homo sapiens
gatcaagcatcatca

SEQ ID NO: 1157068 - DNA, 15 bp, Homo sapiens
tgatcaagcatcatc

SEQ ID NO: 1157069 - DNA, 15 bp, Homo sapiens
ttgatcaagcatcat

SEQ ID NO: 1157070 - DNA, 15 bp, Homo sapiens
attgatcaagcatca

SEQ ID NO: 1157071 - DNA, 15 bp, Homo sapiens
aattgatcaagcatc

SEQ ID NO: 1157072 - DNA, 15 bp, Homo sapiens
aaattgatcaagcat

SEQ ID NO: 1157073 - DNA, 15 bp, Homo sapiens
aaaattgatcaagca

SEQ ID NO: 1157074 - DNA, 15 bp, Homo sapiens
aaaaattgatcaagc

SEQ ID NO: 1157075 - DNA, 15 bp, Homo sapiens
gaaaaattgatcaag

SEQ ID NO: 1157076 - DNA, 15 bp, Homo sapiens
ggaaaaattgatcaa

SEQ ID NO: 1157077 - DNA, 15 bp, Homo sapiens
gggaaaaattgatca

SEQ ID NO: 1157078 - DNA, 15 bp, Homo sapiens
agggaaaaattgatc

SEQ ID NO: 1157079 - DNA, 15 bp, Homo sapiens
tagggaaaaattgat

SEQ ID NO: 1157080 - DNA, 15 bp, Homo sapiens
ttagggaaaaattga

SEQ ID NO: 1157081 - DNA, 15 bp, Homo sapiens
cttagggaaaaattg

SEQ ID NO: 1157082 - DNA, 15 bp, Homo sapiens
ccttagggaaaaatt

SEQ ID NO: 1157083 - DNA, 15 bp, Homo sapiens
accttagggaaaaat

SEQ ID NO: 1157084 - DNA, 15 bp, Homo sapiens
aaccttagggaaaaa

SEQ ID NO: 1157085 - DNA, 15 bp, Homo sapiens
aaaccttagggaaaa

SEQ ID NO: 1157086 - DNA, 15 bp, Homo sapiens
caaaccttagggaaa

SEQ ID NO: 1157087 - DNA, 15 bp, Homo sapiens
gcaaaccttagggaa

SEQ ID NO: 1157088 - DNA, 15 bp, Homo sapiens
agcaaaccttaggga

SEQ ID NO: 1157089 - DNA, 15 bp, Homo sapiens
cagcaaaccttaggg

SEQ ID NO: 1157090 - DNA, 15 bp, Homo sapiens
acagcaaaccttagg

SEQ ID NO: 1157091 - DNA, 15 bp, Homo sapiens
gacagcaaaccttag

SEQ ID NO: 1157092 - DNA, 15 bp, Homo sapiens
agacagcaaacctta

SEQ ID NO: 1157093 - DNA, 15 bp, Homo sapiens
cagacagcaaacctt

SEQ ID NO: 1157094 - DNA, 15 bp, Homo sapiens
gcagacagcaaacct

SEQ ID NO: 1157095 - DNA, 15 bp, Homo sapiens
agcagacagcaaacc

SEQ ID NO: 1157096 - DNA, 15 bp, Homo sapiens
tagcagacagcaaac

SEQ ID NO: 1157097 - DNA, 15 bp, Homo sapiens
ctagcagacagcaaa

SEQ ID NO: 1157098 - DNA, 15 bp, Homo sapiens
tctagcagacagcaa

SEQ ID NO: 1157099 - DNA, 15 bp, Homo sapiens
atctagcagacagca

SEQ ID NO: 1157100 - DNA, 15 bp, Homo sapiens
aatctagcagacagc

SEQ ID NO: 1157101 - DNA, 15 bp, Homo sapiens
taatctagcagacag

SEQ ID NO: 1157102 - DNA, 15 bp, Homo sapiens
ataatctagcagaca

SEQ ID NO: 1157103 - DNA, 15 bp, Homo sapiens
tataatctagcagac

SEQ ID NO: 1157104 - DNA, 15 bp, Homo sapiens
ctataatctagcaga

SEQ ID NO: 1157105 - DNA, 15 bp, Homo sapiens
gctataatctagcag

SEQ ID NO: 1157106 - DNA, 15 bp, Homo sapiens
agctataatctagca

SEQ ID NO: 1157107 - DNA, 15 bp, Homo sapiens
tagctataatctagc

SEQ ID NO: 1157108 - DNA, 15 bp, Homo sapiens
gtagctataatctag

SEQ ID NO: 1157109 - DNA, 15 bp, Homo sapiens
tgtagctataatcta

SEQ ID NO: 1157110 - DNA, 15 bp, Homo sapiens
ctgtagctataatct

SEQ ID NO: 1157111 - DNA, 15 bp, Homo sapiens
cctgtagctataatc

SEQ ID NO: 1157112 - DNA, 15 bp, Homo sapiens
tcctgtagctataat

SEQ ID NO: 1157113 - DNA, 15 bp, Homo sapiens
atcctgtagctataa

SEQ ID NO: 1157114 - DNA, 15 bp, Homo sapiens
tatcctgtagctata

SEQ ID NO: 1157115 - DNA, 15 bp, Homo sapiens
ttatcctgtagctat

SEQ ID NO: 1157116 - DNA, 15 bp, Homo sapiens
cttatcctgtagcta

SEQ ID NO: 1157117 - DNA, 15 bp, Homo sapiens
acttatcctgtagct

SEQ ID NO: 1157118 - DNA, 15 bp, Homo sapiens
aacttatcctgtagc

SEQ ID NO: 1157119 - DNA, 15 bp, Homo sapiens
aaacttatcctgtag

SEQ ID NO: 1157120 - DNA, 15 bp, Homo sapiens
caaacttatcctgta

SEQ ID NO: 1157121 - DNA, 15 bp, Homo sapiens
acaaacttatcctgt

SEQ ID NO: 1157122 - DNA, 15 bp, Homo sapiens
cacaaacttatcctg

SEQ ID NO: 1157123 - DNA, 15 bp, Homo sapiens
tcacaaacttatcct

SEQ ID NO: 1157124 - DNA, 15 bp, Homo sapiens
atcacaaacttatcc

SEQ ID NO: 1157125 - DNA, 15 bp, Homo sapiens
catcacaaacttatc

SEQ ID NO: 1157126 - DNA, 15 bp, Homo sapiens
tcatcacaaacttat

SEQ ID NO: 1157127 - DNA, 15 bp, Homo sapiens
atcatcacaaactta

SEQ ID NO: 1157128 - DNA, 15 bp, Homo sapiens
aatcatcacaaactt

SEQ ID NO: 1157129 - DNA, 15 bp, Homo sapiens
taatcatcacaaact

SEQ ID NO: 1157130 - DNA, 15 bp, Homo sapiens
gtaatcatcacaaac

SEQ ID NO: 1157131 - DNA, 15 bp, Homo sapiens
tgtaatcatcacaaa

SEQ ID NO: 1157132 - DNA, 15 bp, Homo sapiens
gtgtaatcatcacaa

SEQ ID NO: 1157133 - DNA, 15 bp, Homo sapiens
ggtgtaatcatcaca

SEQ ID NO: 1157134 - DNA, 15 bp, Homo sapiens
tggtgtaatcatcac

SEQ ID NO: 1157135 - DNA, 15 bp, Homo sapiens
ttggtgtaatcatca

SEQ ID NO: 1157136 - DNA, 15 bp, Homo sapiens
gttggtgtaatcatc

SEQ ID NO: 1157137 - DNA, 15 bp, Homo sapiens
tgttggtgtaatcat

SEQ ID NO: 1157138 - DNA, 15 bp, Homo sapiens
atgttggtgtaatca

SEQ ID NO: 1157139 - DNA, 15 bp, Homo sapiens
catgttggtgtaatc

SEQ ID NO: 1157140 - DNA, 15 bp, Homo sapiens
acatgttggtgtaat

SEQ ID NO: 1157141 - DNA, 15 bp, Homo sapiens
cacatgttggtgtaa

SEQ ID NO: 1157142 - DNA, 15 bp, Homo sapiens
acacatgttggtgta

SEQ ID NO: 1157143 - DNA, 15 bp, Homo sapiens
aacacatgttggtgt

SEQ ID NO: 1157144 - DNA, 15 bp, Homo sapiens
aaacacatgttggtg

SEQ ID NO: 1157145 - DNA, 15 bp, Homo sapiens
gaaacacatgttggt

SEQ ID NO: 1157146 - DNA, 15 bp, Homo sapiens
tgaaacacatgttgg

SEQ ID NO: 1157147 - DNA, 15 bp, Homo sapiens
atgaaacacatgttg

SEQ ID NO: 1157148 - DNA, 15 bp, Homo sapiens
aatgaaacacatgtt

SEQ ID NO: 1157149 - DNA, 15 bp, Homo sapiens
aaatgaaacacatgt

SEQ ID NO: 1157150 - DNA, 15 bp, Homo sapiens
taaatgaaacacatg

SEQ ID NO: 1157151 - DNA, 15 bp, Homo sapiens
ttaaatgaaacacat

SEQ ID NO: 1157152 - DNA, 15 bp, Homo sapiens
attaaatgaaacaca

SEQ ID NO: 1157153 - DNA, 15 bp, Homo sapiens
aaattaaatgaaaca

SEQ ID NO: 1157154 - DNA, 15 bp, Homo sapiens
caaattaaatgaaac

SEQ ID NO: 1157155 - DNA, 15 bp, Homo sapiens
acaaattaaatgaaa

SEQ ID NO: 1157156 - DNA, 15 bp, Homo sapiens
tacaaattaaatgaa

SEQ ID NO: 1157157 - DNA, 15 bp, Homo sapiens
ttacaaattaaatga

SEQ ID NO: 1157158 - DNA, 15 bp, Homo sapiens
attacaaattaaatg

SEQ ID NO: 1157159 - DNA, 15 bp, Homo sapiens
tattacaaattaaat

SEQ ID NO: 1157160 - DNA, 15 bp, Homo sapiens
atattacaaattaaa

SEQ ID NO: 1157161 - DNA, 15 bp, Homo sapiens
aatattacaaattaa

SEQ ID NO: 1157162 - DNA, 15 bp, Homo sapiens
aaatattacaaatta

SEQ ID NO: 1157163 - DNA, 15 bp, Homo sapiens
taaatattacaaatt

SEQ ID NO: 1157164 - DNA, 15 bp, Homo sapiens
ataaatattacaaat

SEQ ID NO: 1157165 - DNA, 15 bp, Homo sapiens
tataaatattacaaa

SEQ ID NO: 1157166 - DNA, 15 bp, Homo sapiens
atataaatattacaa

SEQ ID NO: 1157167 - DNA, 15 bp, Homo sapiens
tatataaatattaca

SEQ ID NO: 1157168 - DNA, 15 bp, Homo sapiens
ctatataaatattac

SEQ ID NO: 1157169 - DNA, 15 bp, Homo sapiens
gctatataaatatta

SEQ ID NO: 1157170 - DNA, 15 bp, Homo sapiens
agctatataaatatt

SEQ ID NO: 1157171 - DNA, 15 bp, Homo sapiens
tagctatataaatat

SEQ ID NO: 1157172 - DNA, 15 bp, Homo sapiens
ttagctatataaata

SEQ ID NO: 1157173 - DNA, 15 bp, Homo sapiens
attagctatataaat

SEQ ID NO: 1157174 - DNA, 15 bp, Homo sapiens
tattagctatataaa

SEQ ID NO: 1157175 - DNA, 15 bp, Homo sapiens
atattagctatataa

SEQ ID NO: 1157176 - DNA, 15 bp, Homo sapiens
aatattagctatata

SEQ ID NO: 1157177 - DNA, 15 bp, Homo sapiens
aaatattagctatat

SEQ ID NO: 1157178 - DNA, 15 bp, Homo sapiens
caaatattagctata

SEQ ID NO: 1157179 - DNA, 15 bp, Homo sapiens
ccaaatattagctat

SEQ ID NO: 1157180 - DNA, 15 bp, Homo sapiens
cccaaatattagcta

SEQ ID NO: 1157181 - DNA, 15 bp, Homo sapiens
gcccaaatattagct

SEQ ID NO: 1157182 - DNA, 15 bp, Homo sapiens
tgcccaaatattagc

SEQ ID NO: 1157183 - DNA, 15 bp, Homo sapiens
ttgcccaaatattag

SEQ ID NO: 1157184 - DNA, 15 bp, Homo sapiens
gttgcccaaatatta

SEQ ID NO: 1157185 - DNA, 15 bp, Homo sapiens
agttgcccaaatatt

SEQ ID NO: 1157186 - DNA, 15 bp, Homo sapiens
aagttgcccaaatat

SEQ ID NO: 1157187 - DNA, 15 bp, Homo sapiens
caagttgcccaaata

SEQ ID NO: 1157188 - DNA, 15 bp, Homo sapiens
tcaagttgcccaaat

SEQ ID NO: 1157189 - DNA, 15 bp, Homo sapiens
gtcaagttgcccaaa

SEQ ID NO: 1157190 - DNA, 15 bp, Homo sapiens
agtcaagttgcccaa

SEQ ID NO: 1157191 - DNA, 15 bp, Homo sapiens
cagtcaagttgccca

SEQ ID NO: 1157192 - DNA, 15 bp, Homo sapiens
tcagtcaagttgccc

SEQ ID NO: 1157193 - DNA, 15 bp, Homo sapiens
gtcagtcaagttgcc

SEQ ID NO: 1157194 - DNA, 15 bp, Homo sapiens
tgtcagtcaagttgc

SEQ ID NO: 1157195 - DNA, 15 bp, Homo sapiens
atgtcagtcaagttg

SEQ ID NO: 1157196 - DNA, 15 bp, Homo sapiens
aatgtcagtcaagtt

SEQ ID NO: 1157197 - DNA, 15 bp, Homo sapiens
aaatgtcagtcaagt

SEQ ID NO: 1157198 - DNA, 15 bp, Homo sapiens
taaatgtcagtcaag

SEQ ID NO: 1157199 - DNA, 15 bp, Homo sapiens
ttaaatgtcagtcaa

SEQ ID NO: 1157200 - DNA, 15 bp, Homo sapiens
tttaaatgtcagtca

SEQ ID NO: 1157201 - DNA, 15 bp, Homo sapiens
ttttaaatgtcagtc

SEQ ID NO: 1157202 - DNA, 15 bp, Homo sapiens
tttttaaatgtcagt

SEQ ID NO: 1157203 - DNA, 15 bp, Homo sapiens
atttttaaatgtcag

SEQ ID NO: 1157204 - DNA, 15 bp, Homo sapiens
aatttttaaatgtca

SEQ ID NO: 1157205 - DNA, 15 bp, Homo sapiens
taaaatttttaaatg

SEQ ID NO: 1157206 - DNA, 15 bp, Homo sapiens
ataaaatttttaaat

SEQ ID NO: 1157207 - DNA, 15 bp, Homo sapiens
tataaaatttttaaa

SEQ ID NO: 1157208 - DNA, 15 bp, Homo sapiens
ctataaaatttttaa

SEQ ID NO: 1157209 - DNA, 15 bp, Homo sapiens
cctataaaattttta

SEQ ID NO: 1157210 - DNA, 15 bp, Homo sapiens
acctataaaattttt

SEQ ID NO: 1157211 - DNA, 15 bp, Homo sapiens
cacctataaaatttt

SEQ ID NO: 1157212 - DNA, 15 bp, Homo sapiens
ccacctataaaattt

SEQ ID NO: 1157213 - DNA, 15 bp, Homo sapiens
accacctataaaatt

SEQ ID NO: 1157214 - DNA, 15 bp, Homo sapiens
aaccacctataaaat

SEQ ID NO: 1157215 - DNA, 15 bp, Homo sapiens
aaaccacctataaaa

SEQ ID NO: 1157216 - DNA, 15 bp, Homo sapiens
gaaaccacctataaa

SEQ ID NO: 1157217 - DNA, 15 bp, Homo sapiens
tgaaaccacctataa

SEQ ID NO: 1157218 - DNA, 15 bp, Homo sapiens
ttgaaaccacctata

SEQ ID NO: 1157219 - DNA, 15 bp, Homo sapiens
cttgaaaccacctat

SEQ ID NO: 1157220 - DNA, 15 bp, Homo sapiens
ccttgaaaccaccta

SEQ ID NO: 1157221 - DNA, 15 bp, Homo sapiens
tccttgaaaccacct

SEQ ID NO: 1157222 - DNA, 15 bp, Homo sapiens
atccttgaaaccacc

SEQ ID NO: 1157223 - DNA, 15 bp, Homo sapiens
gatccttgaaaccac

SEQ ID NO: 1157224 - DNA, 15 bp, Homo sapiens
ggatccttgaaacca

SEQ ID NO: 1157225 - DNA, 15 bp, Homo sapiens
aggatccttgaaacc

SEQ ID NO: 1157226 - DNA, 15 bp, Homo sapiens
caggatccttgaaac

SEQ ID NO: 1157227 - DNA, 15 bp, Homo sapiens
tcaggatccttgaaa

SEQ ID NO: 1157228 - DNA, 15 bp, Homo sapiens
ttcaggatccttgaa

SEQ ID NO: 1157229 - DNA, 15 bp, Homo sapiens
cttcaggatccttga

SEQ ID NO: 1157230 - DNA, 15 bp, Homo sapiens
acttcaggatccttg

SEQ ID NO: 1157231 - DNA, 15 bp, Homo sapiens
aacttcaggatcctt

SEQ ID NO: 1157232 - DNA, 15 bp, Homo sapiens
aaacttcaggatcct

SEQ ID NO: 1157233 - DNA, 15 bp, Homo sapiens
taaacttcaggatcc

SEQ ID NO: 1157234 - DNA, 15 bp, Homo sapiens
ctaaacttcaggatc

SEQ ID NO: 1157235 - DNA, 15 bp, Homo sapiens
gctaaacttcaggat

SEQ ID NO: 1157236 - DNA, 15 bp, Homo sapiens
tgctaaacttcagga

SEQ ID NO: 1157237 - DNA, 15 bp, Homo sapiens
gtgctaaacttcagg

SEQ ID NO: 1157238 - DNA, 15 bp, Homo sapiens
tgtgctaaacttcag

SEQ ID NO: 1157239 - DNA, 15 bp, Homo sapiens
atgtgctaaacttca

SEQ ID NO: 1157240 - DNA, 15 bp, Homo sapiens
gatgtgctaaacttc

SEQ ID NO: 1157241 - DNA, 15 bp, Homo sapiens
tgatgtgctaaactt

SEQ ID NO: 1157242 - DNA, 15 bp, Homo sapiens
ttgatgtgctaaact

SEQ ID NO: 1157243 - DNA, 15 bp, Homo sapiens
tttgatgtgctaaac

SEQ ID NO: 1157244 - DNA, 15 bp, Homo sapiens
ttttgatgtgctaaa

SEQ ID NO: 1157245 - DNA, 15 bp, Homo sapiens
attttgatgtgctaa

SEQ ID NO: 1157246 - DNA, 15 bp, Homo sapiens
tattttgatgtgcta

SEQ ID NO: 1157247 - DNA, 15 bp, Homo sapiens
ttattttgatgtgct

SEQ ID NO: 1157248 - DNA, 15 bp, Homo sapiens
tttattttgatgtgc

SEQ ID NO: 1157249 - DNA, 15 bp, Homo sapiens
ttttattttgatgtg

SEQ ID NO: 1157250 - DNA, 15 bp, Homo sapiens
tttttattttgatgt

SEQ ID NO: 1157251 - DNA, 15 bp, Homo sapiens
ttttttattttgatg

SEQ ID NO: 1157252 - DNA, 15 bp, Homo sapiens
tttttttattttgat

SEQ ID NO: 1157253 - DNA, 15 bp, Homo sapiens
ttttttttattttga

SEQ ID NO: 1157254 - DNA, 15 bp, Homo sapiens
tttttttttattttg

SEQ ID NO: 1157255 - DNA, 15 bp, Homo sapiens
cttttttttttattt

SEQ ID NO: 1157256 - DNA, 15 bp, Homo sapiens
ccttttttttttatt

SEQ ID NO: 1157257 - DNA, 15 bp, Homo sapiens
cccttttttttttat

SEQ ID NO: 1157258 - DNA, 15 bp, Homo sapiens
tccctttttttttta

SEQ ID NO: 1157259 - DNA, 15 bp, Homo sapiens
gttttcccttttttt

SEQ ID NO: 1157260 - DNA, 15 bp, Homo sapiens
ggttttccctttttt

SEQ ID NO: 1157261 - DNA, 15 bp, Homo sapiens
tggttttcccttttt

SEQ ID NO: 1157262 - DNA, 15 bp, Homo sapiens
ctggttttccctttt

SEQ ID NO: 1157263 - DNA, 15 bp, Homo sapiens
tctggttttcccttt

SEQ ID NO: 1157264 - DNA, 15 bp, Homo sapiens
atctggttttccctt

SEQ ID NO: 1157265 - DNA, 15 bp, Homo sapiens
tatctggttttccct

SEQ ID NO: 1157266 - DNA, 15 bp, Homo sapiens
atatctggttttccc

SEQ ID NO: 1157267 - DNA, 15 bp, Homo sapiens
tatatctggttttcc

SEQ ID NO: 1157268 - DNA, 15 bp, Homo sapiens
atatatctggttttc

SEQ ID NO: 1157269 - DNA, 15 bp, Homo sapiens
aatatatctggtttt

SEQ ID NO: 1157270 - DNA, 15 bp, Homo sapiens
taatatatctggttt

SEQ ID NO: 1157271 - DNA, 15 bp, Homo sapiens
ctaatatatctggtt

SEQ ID NO: 1157272 - DNA, 15 bp, Homo sapiens
tctaatatatctggt

SEQ ID NO: 1157273 - DNA, 15 bp, Homo sapiens
ttctaatatatctgg

SEQ ID NO: 1157274 - DNA, 15 bp, Homo sapiens
gttctaatatatctg

SEQ ID NO: 1157275 - DNA, 15 bp, Homo sapiens
agttctaatatatct

SEQ ID NO: 1157276 - DNA, 15 bp, Homo sapiens
cagttctaatatatc

SEQ ID NO: 1157277 - DNA, 15 bp, Homo sapiens
tcagttctaatatat

SEQ ID NO: 1157278 - DNA, 15 bp, Homo sapiens
ttcagttctaatata

SEQ ID NO: 1157279 - DNA, 15 bp, Homo sapiens
attcagttctaatat

SEQ ID NO: 1157280 - DNA, 15 bp, Homo sapiens
tattcagttctaata

SEQ ID NO: 1157281 - DNA, 15 bp, Homo sapiens
ctattcagttctaat

SEQ ID NO: 1157282 - DNA, 15 bp, Homo sapiens
actattcagttctaa

SEQ ID NO: 1157283 - DNA, 15 bp, Homo sapiens
aactattcagttcta

SEQ ID NO: 1157284 - DNA, 15 bp, Homo sapiens
aaactattcagttct

SEQ ID NO: 1157285 - DNA, 15 bp, Homo sapiens
gaaactattcagttc

SEQ ID NO: 1157286 - DNA, 15 bp, Homo sapiens
ggaaactattcagtt

SEQ ID NO: 1157287 - DNA, 15 bp, Homo sapiens
tggaaactattcagt

SEQ ID NO: 1157288 - DNA, 15 bp, Homo sapiens
gtggaaactattcag

SEQ ID NO: 1157289 - DNA, 15 bp, Homo sapiens
tgtggaaactattca

SEQ ID NO: 1157290 - DNA, 15 bp, Homo sapiens
ttgtggaaactattc

SEQ ID NO: 1157291 - DNA, 15 bp, Homo sapiens
tttgtggaaactatt

SEQ ID NO: 1157292 - DNA, 15 bp, Homo sapiens
ttttgtggaaactat

SEQ ID NO: 1157293 - DNA, 15 bp, Homo sapiens
tttttgtggaaacta

SEQ ID NO: 1157294 - DNA, 15 bp, Homo sapiens
atttttgtggaaact

SEQ ID NO: 1157295 - DNA, 15 bp, Homo sapiens
aatttttgtggaaac

SEQ ID NO: 1157296 - DNA, 15 bp, Homo sapiens
aaatttttgtggaaa

SEQ ID NO: 1157297 - DNA, 15 bp, Homo sapiens
taaatttttgtggaa

SEQ ID NO: 1157298 - DNA, 15 bp, Homo sapiens
ctaaatttttgtgga

SEQ ID NO: 1157299 - DNA, 15 bp, Homo sapiens
actaaatttttgtgg

SEQ ID NO: 1157300 - DNA, 15 bp, Homo sapiens
gactaaatttttgtg

SEQ ID NO: 1157301 - DNA, 15 bp, Homo sapiens
tgactaaatttttgt

SEQ ID NO: 1157302 - DNA, 15 bp, Homo sapiens
atgactaaatttttg

SEQ ID NO: 1157303 - DNA, 15 bp, Homo sapiens
aatgactaaattttt

SEQ ID NO: 1157304 - DNA, 15 bp, Homo sapiens
aaatgactaaatttt

SEQ ID NO: 1157305 - DNA, 15 bp, Homo sapiens
gaaatgactaaattt

SEQ ID NO: 1157306 - DNA, 15 bp, Homo sapiens
agaaatgactaaatt

SEQ ID NO: 1157307 - DNA, 15 bp, Homo sapiens
tagaaatgactaaat

SEQ ID NO: 1157308 - DNA, 15 bp, Homo sapiens
gtagaaatgactaaa

SEQ ID NO: 1157309 - DNA, 15 bp, Homo sapiens
tgtagaaatgactaa

SEQ ID NO: 1157310 - DNA, 15 bp, Homo sapiens
atgtagaaatgacta

SEQ ID NO: 1157311 - DNA, 15 bp, Homo sapiens
tatgtagaaatgact

SEQ ID NO: 1157312 - DNA, 15 bp, Homo sapiens
ttatgtagaaatgac

SEQ ID NO: 1157313 - DNA, 15 bp, Homo sapiens
tttatgtagaaatga

SEQ ID NO: 1157314 - DNA, 15 bp, Homo sapiens
ctttatgtagaaatg

SEQ ID NO: 1157315 - DNA, 15 bp, Homo sapiens
cctttatgtagaaat

SEQ ID NO: 1157316 - DNA, 15 bp, Homo sapiens
acctttatgtagaaa

SEQ ID NO: 1157317 - DNA, 15 bp, Homo sapiens
tacctttatgtagaa

SEQ ID NO: 1157318 - DNA, 15 bp, Homo sapiens
atacctttatgtaga

SEQ ID NO: 1157319 - DNA, 15 bp, Homo sapiens
tatacctttatgtag

SEQ ID NO: 1157320 - DNA, 15 bp, Homo sapiens
ttatacctttatgta

SEQ ID NO: 1157321 - DNA, 15 bp, Homo sapiens
attatacctttatgt

SEQ ID NO: 1157322 - DNA, 15 bp, Homo sapiens
aattatacctttatg

SEQ ID NO: 1157323 - DNA, 15 bp, Homo sapiens
gaattatacctttat

SEQ ID NO: 1157324 - DNA, 15 bp, Homo sapiens
agaattataccttta

SEQ ID NO: 1157325 - DNA, 15 bp, Homo sapiens
cagaattataccttt

SEQ ID NO: 1157326 - DNA, 15 bp, Homo sapiens
gcagaattatacctt

SEQ ID NO: 1157327 - DNA, 15 bp, Homo sapiens
ggcagaattatacct

SEQ ID NO: 1157328 - DNA, 15 bp, Homo sapiens
tggcagaattatacc

SEQ ID NO: 1157329 - DNA, 15 bp, Homo sapiens
atggcagaattatac

SEQ ID NO: 1157330 - DNA, 15 bp, Homo sapiens
catggcagaattata

SEQ ID NO: 1157331 - DNA, 15 bp, Homo sapiens
acatggcagaattat

SEQ ID NO: 1157332 - DNA, 15 bp, Homo sapiens
aacatggcagaatta

SEQ ID NO: 1157333 - DNA, 15 bp, Homo sapiens
taacatggcagaatt

SEQ ID NO: 1157334 - DNA, 15 bp, Homo sapiens
ttaacatggcagaat

SEQ ID NO: 1157335 - DNA, 15 bp, Homo sapiens
attaacatggcagaa

SEQ ID NO: 1157336 - DNA, 15 bp, Homo sapiens
cattaacatggcaga

SEQ ID NO: 1157337 - DNA, 15 bp, Homo sapiens
gcattaacatggcag

SEQ ID NO: 1157338 - DNA, 15 bp, Homo sapiens
tgcattaacatggca

SEQ ID NO: 1157339 - DNA, 15 bp, Homo sapiens
ttgcattaacatggc

SEQ ID NO: 1157340 - DNA, 15 bp, Homo sapiens
attgcattaacatgg

SEQ ID NO: 1157341 - DNA, 15 bp, Homo sapiens
aattgcattaacatg

SEQ ID NO: 1157342 - DNA, 15 bp, Homo sapiens
taattgcattaacat

SEQ ID NO: 1157343 - DNA, 15 bp, Homo sapiens
ctaattgcattaaca

SEQ ID NO: 1157344 - DNA, 15 bp, Homo sapiens
actaattgcattaac

SEQ ID NO: 1157345 - DNA, 15 bp, Homo sapiens
tactaattgcattaa

SEQ ID NO: 1157346 - DNA, 15 bp, Homo sapiens
ttactaattgcatta

SEQ ID NO: 1157347 - DNA, 15 bp, Homo sapiens
attactaattgcatt

SEQ ID NO: 1157348 - DNA, 15 bp, Homo sapiens
aattactaattgcat

SEQ ID NO: 1157349 - DNA, 15 bp, Homo sapiens
aaattactaattgca

SEQ ID NO: 1157350 - DNA, 15 bp, Homo sapiens
caaattactaattgc

SEQ ID NO: 1157351 - DNA, 15 bp, Homo sapiens
tcaaattactaattg

SEQ ID NO: 1157352 - DNA, 15 bp, Homo sapiens
gtcaaattactaatt

SEQ ID NO: 1157353 - DNA, 15 bp, Homo sapiens
agtcaaattactaat

SEQ ID NO: 1157354 - DNA, 15 bp, Homo sapiens
aagtcaaattactaa

SEQ ID NO: 1157355 - DNA, 15 bp, Homo sapiens
aaagtcaaattacta

SEQ ID NO: 1157356 - DNA, 15 bp, Homo sapiens
taaagtcaaattact

SEQ ID NO: 1157357 - DNA, 15 bp, Homo sapiens
ttaaagtcaaattac

SEQ ID NO: 1157358 - DNA, 15 bp, Homo sapiens
attaaagtcaaatta

SEQ ID NO: 1157359 - DNA, 15 bp, Homo sapiens
gattaaagtcaaatt

SEQ ID NO: 1157360 - DNA, 15 bp, Homo sapiens
tgattaaagtcaaat

SEQ ID NO: 1157361 - DNA, 15 bp, Homo sapiens
gtgattaaagtcaaa

SEQ ID NO: 1157362 - DNA, 15 bp, Homo sapiens
agtgattaaagtcaa

SEQ ID NO: 1157363 - DNA, 15 bp, Homo sapiens
aagtgattaaagtca

SEQ ID NO: 1157364 - DNA, 15 bp, Homo sapiens
aaagtgattaaagtc

SEQ ID NO: 1157365 - DNA, 15 bp, Homo sapiens
aaaagtgattaaagt

SEQ ID NO: 1157366 - DNA, 15 bp, Homo sapiens
aaaaagtgattaaag

SEQ ID NO: 1157367 - DNA, 15 bp, Homo sapiens
taaaaagtgattaaa

SEQ ID NO: 1157368 - DNA, 15 bp, Homo sapiens
ataaaaagtgattaa

SEQ ID NO: 1157369 - DNA, 15 bp, Homo sapiens
tataaaaagtgatta

SEQ ID NO: 1157370 - DNA, 15 bp, Homo sapiens
ttataaaaagtgatt

SEQ ID NO: 1157371 - DNA, 15 bp, Homo sapiens
attataaaaagtgat

SEQ ID NO: 1157372 - DNA, 15 bp, Homo sapiens
tattataaaaagtga

SEQ ID NO: 1157373 - DNA, 15 bp, Homo sapiens
ctattataaaaagtg

SEQ ID NO: 1157374 - DNA, 15 bp, Homo sapiens
actattataaaaagt

SEQ ID NO: 1157375 - DNA, 15 bp, Homo sapiens
aactattataaaaag

SEQ ID NO: 1157376 - DNA, 15 bp, Homo sapiens
taactattataaaaa

SEQ ID NO: 1157377 - DNA, 15 bp, Homo sapiens
ttaactattataaaa

SEQ ID NO: 1157378 - DNA, 15 bp, Homo sapiens
cttaactattataaa

SEQ ID NO: 1157379 - DNA, 15 bp, Homo sapiens
tcttaactattataa

SEQ ID NO: 1157380 - DNA, 15 bp, Homo sapiens
atcttaactattata

SEQ ID NO: 1157381 - DNA, 15 bp, Homo sapiens
catcttaactattat

SEQ ID NO: 1157382 - DNA, 15 bp, Homo sapiens
acatcttaactatta

SEQ ID NO: 1157383 - DNA, 15 bp, Homo sapiens
tacatcttaactatt

SEQ ID NO: 1157384 - DNA, 15 bp, Homo sapiens
ttacatcttaactat

SEQ ID NO: 1157385 - DNA, 15 bp, Homo sapiens
attacatcttaacta

SEQ ID NO: 1157386 - DNA, 15 bp, Homo sapiens
aattacatcttaact

SEQ ID NO: 1157387 - DNA, 15 bp, Homo sapiens
caattacatcttaac

SEQ ID NO: 1157388 - DNA, 15 bp, Homo sapiens
ccaattacatcttaa

SEQ ID NO: 1157389 - DNA, 15 bp, Homo sapiens
accaattacatctta

SEQ ID NO: 1157390 - DNA, 15 bp, Homo sapiens
taccaattacatctt

SEQ ID NO: 1157391 - DNA, 15 bp, Homo sapiens
ttaccaattacatct

SEQ ID NO: 1157392 - DNA, 15 bp, Homo sapiens
cttaccaattacatc

SEQ ID NO: 1157393 - DNA, 15 bp, Homo sapiens
tcttaccaattacat

SEQ ID NO: 1157394 - DNA, 15 bp, Homo sapiens
ttcttaccaattaca

SEQ ID NO: 1157395 - DNA, 15 bp, Homo sapiens
cttcttaccaattac

SEQ ID NO: 1157396 - DNA, 15 bp, Homo sapiens
ccttcttaccaatta

SEQ ID NO: 1157397 - DNA, 15 bp, Homo sapiens
cccttcttaccaatt

SEQ ID NO: 1157398 - DNA, 15 bp, Homo sapiens
gcccttcttaccaat

SEQ ID NO: 1157399 - DNA, 15 bp, Homo sapiens
tgcccttcttaccaa

SEQ ID NO: 1157400 - DNA, 15 bp, Homo sapiens
ctgcccttcttacca

SEQ ID NO: 1157401 - DNA, 15 bp, Homo sapiens
actgcccttcttacc

SEQ ID NO: 1157402 - DNA, 15 bp, Homo sapiens
aactgcccttcttac

SEQ ID NO: 1157403 - DNA, 15 bp, Homo sapiens
gaactgcccttctta

SEQ ID NO: 1157404 - DNA, 15 bp, Homo sapiens
cgaactgcccttctt

SEQ ID NO: 1157405 - DNA, 15 bp, Homo sapiens
acgaactgcccttct

SEQ ID NO: 1157406 - DNA, 15 bp, Homo sapiens
aacgaactgcccttc

SEQ ID NO: 1157407 - DNA, 15 bp, Homo sapiens
gaacgaactgccctt

SEQ ID NO: 1157408 - DNA, 15 bp, Homo sapiens
tgaacgaactgccct

SEQ ID NO: 1157409 - DNA, 15 bp, Homo sapiens
gtgaacgaactgccc

SEQ ID NO: 1157410 - DNA, 15 bp, Homo sapiens
tgtgaacgaactgcc

SEQ ID NO: 1157411 - DNA, 15 bp, Homo sapiens
ttgtgaacgaactgc

SEQ ID NO: 1157412 - DNA, 15 bp, Homo sapiens
attgtgaacgaactg

SEQ ID NO: 1157413 - DNA, 15 bp, Homo sapiens
cattgtgaacgaact

SEQ ID NO: 1157414 - DNA, 15 bp, Homo sapiens
tcattgtgaacgaac

SEQ ID NO: 1157415 - DNA, 15 bp, Homo sapiens
ctcattgtgaacgaa

SEQ ID NO: 1157416 - DNA, 15 bp, Homo sapiens
tctcattgtgaacga

SEQ ID NO: 1157417 - DNA, 15 bp, Homo sapiens
ctctcattgtgaacg

SEQ ID NO: 1157418 - DNA, 15 bp, Homo sapiens
actctcattgtgaac

SEQ ID NO: 1157419 - DNA, 15 bp, Homo sapiens
tactctcattgtgaa

SEQ ID NO: 1157420 - DNA, 15 bp, Homo sapiens
ttactctcattgtga

SEQ ID NO: 1157421 - DNA, 15 bp, Homo sapiens
attactctcattgtg

SEQ ID NO: 1157422 - DNA, 15 bp, Homo sapiens
tattactctcattgt

SEQ ID NO: 1157423 - DNA, 15 bp, Homo sapiens
ttattactctcattg

SEQ ID NO: 1157424 - DNA, 15 bp, Homo sapiens
attattactctcatt

SEQ ID NO: 1157425 - DNA, 15 bp, Homo sapiens
gattattactctcat

SEQ ID NO: 1157426 - DNA, 15 bp, Homo sapiens
ggattattactctca

SEQ ID NO: 1157427 - DNA, 15 bp, Homo sapiens
aggattattactctc

SEQ ID NO: 1157428 - DNA, 15 bp, Homo sapiens
caggattattactct

SEQ ID NO: 1157429 - DNA, 15 bp, Homo sapiens
acaggattattactc

SEQ ID NO: 1157430 - DNA, 15 bp, Homo sapiens
cacaggattattact

SEQ ID NO: 1157431 - DNA, 15 bp, Homo sapiens
gcacaggattattac

SEQ ID NO: 1157432 - DNA, 15 bp, Homo sapiens
agcacaggattatta

SEQ ID NO: 1157433 - DNA, 15 bp, Homo sapiens
aagcacaggattatt

SEQ ID NO: 1157434 - DNA, 15 bp, Homo sapiens
aaagcacaggattat

SEQ ID NO: 1157435 - DNA, 15 bp, Homo sapiens
taaagcacaggatta

SEQ ID NO: 1157436 - DNA, 15 bp, Homo sapiens
ataaagcacaggatt

SEQ ID NO: 1157437 - DNA, 15 bp, Homo sapiens
aataaagcacaggat

SEQ ID NO: 1157438 - DNA, 15 bp, Homo sapiens
taataaagcacagga

SEQ ID NO: 1157439 - DNA, 15 bp, Homo sapiens
ataataaagcacagg

SEQ ID NO: 1157440 - DNA, 15 bp, Homo sapiens
gataataaagcacag

SEQ ID NO: 1157441 - DNA, 15 bp, Homo sapiens
agataataaagcaca

SEQ ID NO: 1157442 - DNA, 15 bp, Homo sapiens
tagataataaagcac

SEQ ID NO: 1157443 - DNA, 15 bp, Homo sapiens
atagataataaagca

SEQ ID NO: 1157444 - DNA, 15 bp, Homo sapiens
tatagataataaagc

SEQ ID NO: 1157445 - DNA, 15 bp, Homo sapiens
ttatagataataaag

SEQ ID NO: 1157446 - DNA, 15 bp, Homo sapiens
tttatagataataaa

SEQ ID NO: 1157447 - DNA, 15 bp, Homo sapiens
ctttatagataataa

SEQ ID NO: 1157448 - DNA, 15 bp, Homo sapiens
cctttatagataata

SEQ ID NO: 1157449 - DNA, 15 bp, Homo sapiens
acctttatagataat

SEQ ID NO: 1157450 - DNA, 15 bp, Homo sapiens
tacctttatagataa

SEQ ID NO: 1157451 - DNA, 15 bp, Homo sapiens
ttacctttatagata

SEQ ID NO: 1157452 - DNA, 15 bp, Homo sapiens
gttacctttatagat

SEQ ID NO: 1157453 - DNA, 15 bp, Homo sapiens
agttacctttataga

SEQ ID NO: 1157454 - DNA, 15 bp, Homo sapiens
aagttacctttatag

SEQ ID NO: 1157455 - DNA, 15 bp, Homo sapiens
taagttacctttata

SEQ ID NO: 1157456 - DNA, 15 bp, Homo sapiens
ttaagttacctttat

SEQ ID NO: 1157457 - DNA, 15 bp, Homo sapiens
tttaagttaccttta

SEQ ID NO: 1157458 - DNA, 15 bp, Homo sapiens
gtttaagttaccttt

SEQ ID NO: 1157459 - DNA, 15 bp, Homo sapiens
agtttaagttacctt

SEQ ID NO: 1157460 - DNA, 15 bp, Homo sapiens
gagtttaagttacct

SEQ ID NO: 1157461 - DNA, 15 bp, Homo sapiens
tgagtttaagttacc

SEQ ID NO: 1157462 - DNA, 15 bp, Homo sapiens
gtgagtttaagttac

SEQ ID NO: 1157463 - DNA, 15 bp, Homo sapiens
tgtgagtttaagtta

SEQ ID NO: 1157464 - DNA, 15 bp, Homo sapiens
atgtgagtttaagtt

SEQ ID NO: 1157465 - DNA, 15 bp, Homo sapiens
gatgtgagtttaagt

SEQ ID NO: 1157466 - DNA, 15 bp, Homo sapiens
agatgtgagtttaag

SEQ ID NO: 1157467 - DNA, 15 bp, Homo sapiens
cagatgtgagtttaa

SEQ ID NO: 1157468 - DNA, 15 bp, Homo sapiens
tcagatgtgagttta

SEQ ID NO: 1157469 - DNA, 15 bp, Homo sapiens
ctcagatgtgagttt

SEQ ID NO: 1157470 - DNA, 15 bp, Homo sapiens
actcagatgtgagtt

SEQ ID NO: 1157471 - DNA, 15 bp, Homo sapiens
cactcagatgtgagt

SEQ ID NO: 1157472 - DNA, 15 bp, Homo sapiens
acactcagatgtgag

SEQ ID NO: 1157473 - DNA, 15 bp, Homo sapiens
aacactcagatgtga

SEQ ID NO: 1157474 - DNA, 15 bp, Homo sapiens
gaacactcagatgtg

SEQ ID NO: 1157475 - DNA, 15 bp, Homo sapiens
agaacactcagatgt

SEQ ID NO: 1157476 - DNA, 15 bp, Homo sapiens
aagaacactcagatg

SEQ ID NO: 1157477 - DNA, 15 bp, Homo sapiens
aaagaacactcagat

SEQ ID NO: 1157478 - DNA, 15 bp, Homo sapiens
caaagaacactcaga

SEQ ID NO: 1157479 - DNA, 15 bp, Homo sapiens
acaaagaacactcag

SEQ ID NO: 1157480 - DNA, 15 bp, Homo sapiens
tacaaagaacactca

SEQ ID NO: 1157481 - DNA, 15 bp, Homo sapiens
atacaaagaacactc

SEQ ID NO: 1157482 - DNA, 15 bp, Homo sapiens
catacaaagaacact

SEQ ID NO: 1157483 - DNA, 15 bp, Homo sapiens
tcatacaaagaacac

SEQ ID NO: 1157484 - DNA, 15 bp, Homo sapiens
gtcatacaaagaaca

SEQ ID NO: 1157485 - DNA, 15 bp, Homo sapiens
tgtcatacaaagaac

SEQ ID NO: 1157486 - DNA, 15 bp, Homo sapiens
gtgtcatacaaagaa

SEQ ID NO: 1157487 - DNA, 15 bp, Homo sapiens
tgtgtcatacaaaga

SEQ ID NO: 1157488 - DNA, 15 bp, Homo sapiens
ttgtgtcatacaaag

SEQ ID NO: 1157489 - DNA, 15 bp, Homo sapiens
cttgtgtcatacaaa

SEQ ID NO: 1157490 - DNA, 15 bp, Homo sapiens
tcttgtgtcatacaa

SEQ ID NO: 1157491 - DNA, 15 bp, Homo sapiens
atcttgtgtcataca

SEQ ID NO: 1157492 - DNA, 15 bp, Homo sapiens
catcttgtgtcatac

SEQ ID NO: 1157493 - DNA, 15 bp, Homo sapiens
gcatcttgtgtcata

SEQ ID NO: 1157494 - DNA, 15 bp, Homo sapiens
agcatcttgtgtcat

SEQ ID NO: 1157495 - DNA, 15 bp, Homo sapiens
tagcatcttgtgtca

SEQ ID NO: 1157496 - DNA, 15 bp, Homo sapiens
gtagcatcttgtgtc

SEQ ID NO: 1157497 - DNA, 15 bp, Homo sapiens
tgtagcatcttgtgt

SEQ ID NO: 1157498 - DNA, 15 bp, Homo sapiens
gtgtagcatcttgtg

SEQ ID NO: 1157499 - DNA, 15 bp, Homo sapiens
cgtgtagcatcttgt

SEQ ID NO: 1157500 - DNA, 15 bp, Homo sapiens
acgtgtagcatcttg

SEQ ID NO: 1157501 - DNA, 15 bp, Homo sapiens
aacgtgtagcatctt

SEQ ID NO: 1157502 - DNA, 15 bp, Homo sapiens
caacgtgtagcatct

SEQ ID NO: 1157503 - DNA, 15 bp, Homo sapiens
acaacgtgtagcatc

SEQ ID NO: 1157504 - DNA, 15 bp, Homo sapiens
tacaacgtgtagcat

SEQ ID NO: 1157505 - DNA, 15 bp, Homo sapiens
ttacaacgtgtagca

SEQ ID NO: 1157506 - DNA, 15 bp, Homo sapiens
attacaacgtgtagc

SEQ ID NO: 1157507 - DNA, 15 bp, Homo sapiens
tattacaacgtgtag

SEQ ID NO: 1157508 - DNA, 15 bp, Homo sapiens
atattacaacgtgta

SEQ ID NO: 1157509 - DNA, 15 bp, Homo sapiens
tatattacaacgtgt

SEQ ID NO: 1157510 - DNA, 15 bp, Homo sapiens
gtatattacaacgtg

SEQ ID NO: 1157511 - DNA, 15 bp, Homo sapiens
tgtatattacaacgt

SEQ ID NO: 1157512 - DNA, 15 bp, Homo sapiens
ttgtatattacaacg

SEQ ID NO: 1157513 - DNA, 15 bp, Homo sapiens
cttgtatattacaac

SEQ ID NO: 1157514 - DNA, 15 bp, Homo sapiens
gcttgtatattacaa

SEQ ID NO: 1157515 - DNA, 15 bp, Homo sapiens
tgcttgtatattaca

SEQ ID NO: 1157516 - DNA, 15 bp, Homo sapiens
ctgcttgtatattac

SEQ ID NO: 1157517 - DNA, 15 bp, Homo sapiens
gctgcttgtatatta

SEQ ID NO: 1157518 - DNA, 15 bp, Homo sapiens
agctgcttgtatatt

SEQ ID NO: 1157519 - DNA, 15 bp, Homo sapiens
cagctgcttgtatat

SEQ ID NO: 1157520 - DNA, 15 bp, Homo sapiens
acagctgcttgtata

SEQ ID NO: 1157521 - DNA, 15 bp, Homo sapiens
cacagctgcttgtat

SEQ ID NO: 1157522 - DNA, 15 bp, Homo sapiens
acacagctgcttgta

SEQ ID NO: 1157523 - DNA, 15 bp, Homo sapiens
tacacagctgcttgt

SEQ ID NO: 1157524 - DNA, 15 bp, Homo sapiens
ctacacagctgcttg

SEQ ID NO: 1157525 - DNA, 15 bp, Homo sapiens
cctacacagctgctt

SEQ ID NO: 1157526 - DNA, 15 bp, Homo sapiens
acctacacagctgct

SEQ ID NO: 1157527 - DNA, 15 bp, Homo sapiens
tacctacacagctgc

SEQ ID NO: 1157528 - DNA, 15 bp, Homo sapiens
ttacctacacagctg

SEQ ID NO: 1157529 - DNA, 15 bp, Homo sapiens
tttacctacacagct

SEQ ID NO: 1157530 - DNA, 15 bp, Homo sapiens
ctttacctacacagc

SEQ ID NO: 1157531 - DNA, 15 bp, Homo sapiens
tctttacctacacag

SEQ ID NO: 1157532 - DNA, 15 bp, Homo sapiens
ctctttacctacaca

SEQ ID NO: 1157533 - DNA, 15 bp, Homo sapiens
cctctttacctacac

SEQ ID NO: 1157534 - DNA, 15 bp, Homo sapiens
gcctctttacctaca

SEQ ID NO: 1157535 - DNA, 15 bp, Homo sapiens
agcctctttacctac

SEQ ID NO: 1157536 - DNA, 15 bp, Homo sapiens
tagcctctttaccta

SEQ ID NO: 1157537 - DNA, 15 bp, Homo sapiens
ctagcctctttacct

SEQ ID NO: 1157538 - DNA, 15 bp, Homo sapiens
cctagcctctttacc

SEQ ID NO: 1157539 - DNA, 15 bp, Homo sapiens
tcctagcctctttac

SEQ ID NO: 1157540 - DNA, 15 bp, Homo sapiens
gtcctagcctcttta

SEQ ID NO: 1157541 - DNA, 15 bp, Homo sapiens
agtcctagcctcttt

SEQ ID NO: 1157542 - DNA, 15 bp, Homo sapiens
aagtcctagcctctt

SEQ ID NO: 1157543 - DNA, 15 bp, Homo sapiens
taagtcctagcctct

SEQ ID NO: 1157544 - DNA, 15 bp, Homo sapiens
ttaagtcctagcctc

SEQ ID NO: 1157545 - DNA, 15 bp, Homo sapiens
gttaagtcctagcct

SEQ ID NO: 1157546 - DNA, 15 bp, Homo sapiens
tgttaagtcctagcc

SEQ ID NO: 1157547 - DNA, 15 bp, Homo sapiens
gtgttaagtcctagc

SEQ ID NO: 1157548 - DNA, 15 bp, Homo sapiens
tgtgttaagtcctag

SEQ ID NO: 1157549 - DNA, 15 bp, Homo sapiens
ctgtgttaagtccta

SEQ ID NO: 1157550 - DNA, 15 bp, Homo sapiens
actgtgttaagtcct

SEQ ID NO: 1157551 - DNA, 15 bp, Homo sapiens
gactgtgttaagtcc

SEQ ID NO: 1157552 - DNA, 15 bp, Homo sapiens
agactgtgttaagtc

SEQ ID NO: 1157553 - DNA, 15 bp, Homo sapiens
aagactgtgttaagt

SEQ ID NO: 1157554 - DNA, 15 bp, Homo sapiens
aaagactgtgttaag

SEQ ID NO: 1157555 - DNA, 15 bp, Homo sapiens
gaaagactgtgttaa

SEQ ID NO: 1157556 - DNA, 15 bp, Homo sapiens
ggaaagactgtgtta

SEQ ID NO: 1157557 - DNA, 15 bp, Homo sapiens
tggaaagactgtgtt

SEQ ID NO: 1157558 - DNA, 15 bp, Homo sapiens
ctggaaagactgtgt

SEQ ID NO: 1157559 - DNA, 15 bp, Homo sapiens
cctggaaagactgtg

SEQ ID NO: 1157560 - DNA, 15 bp, Homo sapiens
tcctggaaagactgt

SEQ ID NO: 1157561 - DNA, 15 bp, Homo sapiens
gtcctggaaagactg

SEQ ID NO: 1157562 - DNA, 15 bp, Homo sapiens
agtcctggaaagact

SEQ ID NO: 1157563 - DNA, 15 bp, Homo sapiens
aagtcctggaaagac

SEQ ID NO: 1157564 - DNA, 15 bp, Homo sapiens
aaagtcctggaaaga

SEQ ID NO: 1157565 - DNA, 15 bp, Homo sapiens
gaaagtcctggaaag

SEQ ID NO: 1157566 - DNA, 15 bp, Homo sapiens
ggaaagtcctggaaa

SEQ ID NO: 1157567 - DNA, 15 bp, Homo sapiens
gggaaagtcctggaa

SEQ ID NO: 1157568 - DNA, 15 bp, Homo sapiens
tgggaaagtcctgga

SEQ ID NO: 1157569 - DNA, 15 bp, Homo sapiens
ctgggaaagtcctgg

SEQ ID NO: 1157570 - DNA, 15 bp, Homo sapiens
cctgggaaagtcctg

SEQ ID NO: 1157571 - DNA, 15 bp, Homo sapiens
acctgggaaagtcct

SEQ ID NO: 1157572 - DNA, 15 bp, Homo sapiens
tacctgggaaagtcc

SEQ ID NO: 1157573 - DNA, 15 bp, Homo sapiens
atacctgggaaagtc

SEQ ID NO: 1157574 - DNA, 15 bp, Homo sapiens
aatacctgggaaagt

SEQ ID NO: 1157575 - DNA, 15 bp, Homo sapiens
aaatacctgggaaag

SEQ ID NO: 1157576 - DNA, 15 bp, Homo sapiens
gaaatacctgggaaa

SEQ ID NO: 1157577 - DNA, 15 bp, Homo sapiens
tgaaatacctgggaa

SEQ ID NO: 1157578 - DNA, 15 bp, Homo sapiens
atgaaatacctggga

SEQ ID NO: 1157579 - DNA, 15 bp, Homo sapiens
catgaaatacctggg

SEQ ID NO: 1157580 - DNA, 15 bp, Homo sapiens
acatgaaatacctgg

SEQ ID NO: 1157581 - DNA, 15 bp, Homo sapiens
aacatgaaatacctg

SEQ ID NO: 1157582 - DNA, 15 bp, Homo sapiens
gaacatgaaatacct

SEQ ID NO: 1157583 - DNA, 15 bp, Homo sapiens
agaacatgaaatacc

SEQ ID NO: 1157584 - DNA, 15 bp, Homo sapiens
cagaacatgaaatac

SEQ ID NO: 1157585 - DNA, 15 bp, Homo sapiens
tcagaacatgaaata

SEQ ID NO: 1157586 - DNA, 15 bp, Homo sapiens
atcagaacatgaaat

SEQ ID NO: 1157587 - DNA, 15 bp, Homo sapiens
tatcagaacatgaaa

SEQ ID NO: 1157588 - DNA, 15 bp, Homo sapiens
ttatcagaacatgaa

SEQ ID NO: 1157589 - DNA, 15 bp, Homo sapiens
tttatcagaacatga

SEQ ID NO: 1157590 - DNA, 15 bp, Homo sapiens
ttttatcagaacatg

SEQ ID NO: 1157591 - DNA, 15 bp, Homo sapiens
attttatcagaacat

SEQ ID NO: 1157592 - DNA, 15 bp, Homo sapiens
aattttatcagaaca

SEQ ID NO: 1157593 - DNA, 15 bp, Homo sapiens
caattttatcagaac

SEQ ID NO: 1157594 - DNA, 15 bp, Homo sapiens
gcaattttatcagaa

SEQ ID NO: 1157595 - DNA, 15 bp, Homo sapiens
agcaattttatcaga

SEQ ID NO: 1157596 - DNA, 15 bp, Homo sapiens
cagcaattttatcag

SEQ ID NO: 1157597 - DNA, 15 bp, Homo sapiens
acagcaattttatca

SEQ ID NO: 1157598 - DNA, 15 bp, Homo sapiens
cacagcaattttatc

SEQ ID NO: 1157599 - DNA, 15 bp, Homo sapiens
gcacagcaattttat

SEQ ID NO: 1157600 - DNA, 15 bp, Homo sapiens
ggcacagcaatttta

SEQ ID NO: 1157601 - DNA, 15 bp, Homo sapiens
gggcacagcaatttt

SEQ ID NO: 1157602 - DNA, 15 bp, Homo sapiens
tgggcacagcaattt

SEQ ID NO: 1157603 - DNA, 15 bp, Homo sapiens
ctgggcacagcaatt

SEQ ID NO: 1157604 - DNA, 15 bp, Homo sapiens
actgggcacagcaat

SEQ ID NO: 1157605 - DNA, 15 bp, Homo sapiens
cactgggcacagcaa

SEQ ID NO: 1157606 - DNA, 15 bp, Homo sapiens
tcactgggcacagca

SEQ ID NO: 1157607 - DNA, 15 bp, Homo sapiens
ctcactgggcacagc

SEQ ID NO: 1157608 - DNA, 15 bp, Homo sapiens
actcactgggcacag

SEQ ID NO: 1157609 - DNA, 15 bp, Homo sapiens
cactcactgggcaca

SEQ ID NO: 1157610 - DNA, 15 bp, Homo sapiens
tcactcactgggcac

SEQ ID NO: 1157611 - DNA, 15 bp, Homo sapiens
ctcactcactgggca

SEQ ID NO: 1157612 - DNA, 15 bp, Homo sapiens
tctcactcactgggc

SEQ ID NO: 1157613 - DNA, 15 bp, Homo sapiens
atctcactcactggg

SEQ ID NO: 1157614 - DNA, 15 bp, Homo sapiens
tatctcactcactgg

SEQ ID NO: 1157615 - DNA, 15 bp, Homo sapiens
ttatctcactcactg

SEQ ID NO: 1157616 - DNA, 15 bp, Homo sapiens
tttatctcactcact

SEQ ID NO: 1157617 - DNA, 15 bp, Homo sapiens
ctttatctcactcac

SEQ ID NO: 1157618 - DNA, 15 bp, Homo sapiens
tctttatctcactca

SEQ ID NO: 1157619 - DNA, 15 bp, Homo sapiens
ttctttatctcactc

SEQ ID NO: 1157620 - DNA, 15 bp, Homo sapiens
tttctttatctcact

SEQ ID NO: 1157621 - DNA, 15 bp, Homo sapiens
ctttctttatctcac

SEQ ID NO: 1157622 - DNA, 15 bp, Homo sapiens
actttctttatctca

SEQ ID NO: 1157623 - DNA, 15 bp, Homo sapiens
cactttctttatctc

SEQ ID NO: 1157624 - DNA, 15 bp, Homo sapiens
tcactttctttatct

SEQ ID NO: 1157625 - DNA, 15 bp, Homo sapiens
ttcactttctttatc

SEQ ID NO: 1157626 - DNA, 15 bp, Homo sapiens
gttcactttctttat

SEQ ID NO: 1157627 - DNA, 15 bp, Homo sapiens
agttcactttcttta

SEQ ID NO: 1157628 - DNA, 15 bp, Homo sapiens
aagttcactttcttt

SEQ ID NO: 1157629 - DNA, 15 bp, Homo sapiens
taagttcactttctt

SEQ ID NO: 1157630 - DNA, 15 bp, Homo sapiens
ttaagttcactttct

SEQ ID NO: 1157631 - DNA, 15 bp, Homo sapiens
cttaagttcactttc

SEQ ID NO: 1157632 - DNA, 15 bp, Homo sapiens
tcttaagttcacttt

SEQ ID NO: 1157633 - DNA, 15 bp, Homo sapiens
ttcttaagttcactt

SEQ ID NO: 1157634 - DNA, 15 bp, Homo sapiens
tttcttaagttcact

SEQ ID NO: 1157635 - DNA, 15 bp, Homo sapiens
gtttcttaagttcac

SEQ ID NO: 1157636 - DNA, 15 bp, Homo sapiens
agtttcttaagttca

SEQ ID NO: 1157637 - DNA, 15 bp, Homo sapiens
cagtttcttaagttc

SEQ ID NO: 1157638 - DNA, 15 bp, Homo sapiens
gcagtttcttaagtt

SEQ ID NO: 1157639 - DNA, 15 bp, Homo sapiens
ggcagtttcttaagt

SEQ ID NO: 1157640 - DNA, 15 bp, Homo sapiens
tggcagtttcttaag

SEQ ID NO: 1157641 - DNA, 15 bp, Homo sapiens
ctggcagtttcttaa

SEQ ID NO: 1157642 - DNA, 15 bp, Homo sapiens
cctggcagtttctta

SEQ ID NO: 1157643 - DNA, 15 bp, Homo sapiens
ccctggcagtttctt

SEQ ID NO: 1157644 - DNA, 15 bp, Homo sapiens
accctggcagtttct

SEQ ID NO: 1157645 - DNA, 15 bp, Homo sapiens
aaccctggcagtttc

SEQ ID NO: 1157646 - DNA, 15 bp, Homo sapiens
aaaccctggcagttt

SEQ ID NO: 1157647 - DNA, 15 bp, Homo sapiens
caaaccctggcagtt

SEQ ID NO: 1157648 - DNA, 15 bp, Homo sapiens
gcaaaccctggcagt

SEQ ID NO: 1157649 - DNA, 15 bp, Homo sapiens
ggcaaaccctggcag

SEQ ID NO: 1157650 - DNA, 15 bp, Homo sapiens
tggcaaaccctggca

SEQ ID NO: 1157651 - DNA, 15 bp, Homo sapiens
atggcaaaccctggc

SEQ ID NO: 1157652 - DNA, 15 bp, Homo sapiens
gatggcaaaccctgg

SEQ ID NO: 1157653 - DNA, 15 bp, Homo sapiens
tgatggcaaaccctg

SEQ ID NO: 1157654 - DNA, 15 bp, Homo sapiens
ctgatggcaaaccct

SEQ ID NO: 1157655 - DNA, 15 bp, Homo sapiens
cctgatggcaaaccc

SEQ ID NO: 1157656 - DNA, 15 bp, Homo sapiens
ccctgatggcaaacc

SEQ ID NO: 1157657 - DNA, 15 bp, Homo sapiens
gccctgatggcaaac

SEQ ID NO: 1157658 - DNA, 15 bp, Homo sapiens
agccctgatggcaaa

SEQ ID NO: 1157659 - DNA, 15 bp, Homo sapiens
cagccctgatggcaa

SEQ ID NO: 1157660 - DNA, 15 bp, Homo sapiens
gcagccctgatggca

SEQ ID NO: 1157661 - DNA, 15 bp, Homo sapiens
ggcagccctgatggc

SEQ ID NO: 1157662 - DNA, 15 bp, Homo sapiens
gggcagccctgatgg

SEQ ID NO: 1157663 - DNA, 15 bp, Homo sapiens
tgggcagccctgatg

SEQ ID NO: 1157664 - DNA, 15 bp, Homo sapiens
gtgggcagccctgat

SEQ ID NO: 1157665 - DNA, 15 bp, Homo sapiens
agtgggcagccctga

SEQ ID NO: 1157666 - DNA, 15 bp, Homo sapiens
cagtgggcagccctg

SEQ ID NO: 1157667 - DNA, 15 bp, Homo sapiens
tcagtgggcagccct

SEQ ID NO: 1157668 - DNA, 15 bp, Homo sapiens
ttcagtgggcagccc

SEQ ID NO: 1157669 - DNA, 15 bp, Homo sapiens
tttcagtgggcagcc

SEQ ID NO: 1157670 - DNA, 15 bp, Homo sapiens
gtttcagtgggcagc

SEQ ID NO: 1157671 - DNA, 15 bp, Homo sapiens
agtttcagtgggcag

SEQ ID NO: 1157672 - DNA, 15 bp, Homo sapiens
aagtttcagtgggca

SEQ ID NO: 1157673 - DNA, 15 bp, Homo sapiens
aaagtttcagtgggc

SEQ ID NO: 1157674 - DNA, 15 bp, Homo sapiens
caaagtttcagtggg

SEQ ID NO: 1157675 - DNA, 15 bp, Homo sapiens
ccaaagtttcagtgg

SEQ ID NO: 1157676 - DNA, 15 bp, Homo sapiens
cccaaagtttcagtg

SEQ ID NO: 1157677 - DNA, 15 bp, Homo sapiens
acccaaagtttcagt

SEQ ID NO: 1157678 - DNA, 15 bp, Homo sapiens
tacccaaagtttcag

SEQ ID NO: 1157679 - DNA, 15 bp, Homo sapiens
ctacccaaagtttca

SEQ ID NO: 1157680 - DNA, 15 bp, Homo sapiens
tctacccaaagtttc

SEQ ID NO: 1157681 - DNA, 15 bp, Homo sapiens
ttctacccaaagttt

SEQ ID NO: 1157682 - DNA, 15 bp, Homo sapiens
tttctacccaaagtt

SEQ ID NO: 1157683 - DNA, 15 bp, Homo sapiens
gtttctacccaaagt

SEQ ID NO: 1157684 - DNA, 15 bp, Homo sapiens
agtttctacccaaag

SEQ ID NO: 1157685 - DNA, 15 bp, Homo sapiens
cagtttctacccaaa

SEQ ID NO: 1157686 - DNA, 15 bp, Homo sapiens
acagtttctacccaa

SEQ ID NO: 1157687 - DNA, 15 bp, Homo sapiens
aacagtttctaccca

SEQ ID NO: 1157688 - DNA, 15 bp, Homo sapiens
caacagtttctaccc

SEQ ID NO: 1157689 - DNA, 15 bp, Homo sapiens
gcaacagtttctacc

SEQ ID NO: 1157690 - DNA, 15 bp, Homo sapiens
agcaacagtttctac

SEQ ID NO: 1157691 - DNA, 15 bp, Homo sapiens
tagcaacagtttcta

SEQ ID NO: 1157692 - DNA, 15 bp, Homo sapiens
ttagcaacagtttct

SEQ ID NO: 1157693 - DNA, 15 bp, Homo sapiens
tttagcaacagtttc

SEQ ID NO: 1157694 - DNA, 15 bp, Homo sapiens
atttagcaacagttt

SEQ ID NO: 1157695 - DNA, 15 bp, Homo sapiens
aatttagcaacagtt

SEQ ID NO: 1157696 - DNA, 15 bp, Homo sapiens
aaatttagcaacagt

SEQ ID NO: 1157697 - DNA, 15 bp, Homo sapiens
gaaatttagcaacag

SEQ ID NO: 1157698 - DNA, 15 bp, Homo sapiens
ggaaatttagcaaca

SEQ ID NO: 1157699 - DNA, 15 bp, Homo sapiens
tttctgagctagact

SEQ ID NO: 1157700 - DNA, 15 bp, Homo sapiens
ttttctgagctagac

SEQ ID NO: 1157701 - DNA, 15 bp, Homo sapiens
attttctgagctaga

SEQ ID NO: 1157702 - DNA, 15 bp, Homo sapiens
tattttctgagctag

SEQ ID NO: 1157703 - DNA, 15 bp, Homo sapiens
gtattttctgagcta

SEQ ID NO: 1157704 - DNA, 15 bp, Homo sapiens
agtattttctgagct

SEQ ID NO: 1157705 - DNA, 15 bp, Homo sapiens
cagtattttctgagc

SEQ ID NO: 1157706 - DNA, 15 bp, Homo sapiens
tcagtattttctgag

SEQ ID NO: 1157707 - DNA, 15 bp, Homo sapiens
ttcagtattttctga

SEQ ID NO: 1157708 - DNA, 15 bp, Homo sapiens
attcagtattttctg

SEQ ID NO: 1157709 - DNA, 15 bp, Homo sapiens
tattcagtattttct

SEQ ID NO: 1157710 - DNA, 15 bp, Homo sapiens
atattcagtattttc

SEQ ID NO: 1157711 - DNA, 15 bp, Homo sapiens
tatattcagtatttt

SEQ ID NO: 1157712 - DNA, 15 bp, Homo sapiens
ttatattcagtattt

SEQ ID NO: 1157713 - DNA, 15 bp, Homo sapiens
cttatattcagtatt

SEQ ID NO: 1157714 - DNA, 15 bp, Homo sapiens
acttatattcagtat

SEQ ID NO: 1157715 - DNA, 15 bp, Homo sapiens
aacttatattcagta

SEQ ID NO: 1157716 - DNA, 15 bp, Homo sapiens
aaacttatattcagt

SEQ ID NO: 1157717 - DNA, 15 bp, Homo sapiens
taaacttatattcag

SEQ ID NO: 1157718 - DNA, 15 bp, Homo sapiens
ttaaacttatattca

SEQ ID NO: 1157719 - DNA, 15 bp, Homo sapiens
attaaacttatattc

SEQ ID NO: 1157720 - DNA, 15 bp, Homo sapiens
aattaaacttatatt

SEQ ID NO: 1157721 - DNA, 15 bp, Homo sapiens
aaattaaacttatat

SEQ ID NO: 1157722 - DNA, 15 bp, Homo sapiens
aaaattaaacttata

SEQ ID NO: 1157723 - DNA, 15 bp, Homo sapiens
aaaaattaaacttat

SEQ ID NO: 1157724 - DNA, 15 bp, Homo sapiens
taaaaattaaactta

SEQ ID NO: 1157725 - DNA, 15 bp, Homo sapiens
gtaaaaattaaactt

SEQ ID NO: 1157726 - DNA, 15 bp, Homo sapiens
ggtaaaaattaaact

SEQ ID NO: 1157727 - DNA, 15 bp, Homo sapiens
gggtaaaaattaaac

SEQ ID NO: 1157728 - DNA, 15 bp, Homo sapiens
agggtaaaaattaaa

SEQ ID NO: 1157729 - DNA, 15 bp, Homo sapiens
cagggtaaaaattaa

SEQ ID NO: 1157730 - DNA, 15 bp, Homo sapiens
acagggtaaaaatta

SEQ ID NO: 1157731 - DNA, 15 bp, Homo sapiens
gacagggtaaaaatt

SEQ ID NO: 1157732 - DNA, 15 bp, Homo sapiens
tgacagggtaaaaat

SEQ ID NO: 1157733 - DNA, 15 bp, Homo sapiens
atgacagggtaaaaa

SEQ ID NO: 1157734 - DNA, 15 bp, Homo sapiens
catgacagggtaaaa

SEQ ID NO: 1157735 - DNA, 15 bp, Homo sapiens
ccatgacagggtaaa

SEQ ID NO: 1157736 - DNA, 15 bp, Homo sapiens
cccatgacagggtaa

SEQ ID NO: 1157737 - DNA, 15 bp, Homo sapiens
gcccatgacagggta

SEQ ID NO: 1157738 - DNA, 15 bp, Homo sapiens
ggcccatgacagggt

SEQ ID NO: 1157739 - DNA, 15 bp, Homo sapiens
aggcccatgacaggg

SEQ ID NO: 1157740 - DNA, 15 bp, Homo sapiens
aaggcccatgacagg

SEQ ID NO: 1157741 - DNA, 15 bp, Homo sapiens
aaaggcccatgacag

SEQ ID NO: 1157742 - DNA, 15 bp, Homo sapiens
gaaaggcccatgaca

SEQ ID NO: 1157743 - DNA, 15 bp, Homo sapiens
ggaaaggcccatgac

SEQ ID NO: 1157744 - DNA, 15 bp, Homo sapiens
tggaaaggcccatga

SEQ ID NO: 1157745 - DNA, 15 bp, Homo sapiens
ctggaaaggcccatg

SEQ ID NO: 1157746 - DNA, 15 bp, Homo sapiens
actggaaaggcccat

SEQ ID NO: 1157747 - DNA, 15 bp, Homo sapiens
gactggaaaggccca

SEQ ID NO: 1157748 - DNA, 15 bp, Homo sapiens
tgactggaaaggccc

SEQ ID NO: 1157749 - DNA, 15 bp, Homo sapiens
ctgactggaaaggcc

SEQ ID NO: 1157750 - DNA, 15 bp, Homo sapiens
actgactggaaaggc

SEQ ID NO: 1157751 - DNA, 15 bp, Homo sapiens
gactgactggaaagg

SEQ ID NO: 1157752 - DNA, 15 bp, Homo sapiens
agactgactggaaag

SEQ ID NO: 1157753 - DNA, 15 bp, Homo sapiens
cagactgactggaaa

SEQ ID NO: 1157754 - DNA, 15 bp, Homo sapiens
tcagactgactggaa

SEQ ID NO: 1157755 - DNA, 15 bp, Homo sapiens
atcagactgactgga

SEQ ID NO: 1157756 - DNA, 15 bp, Homo sapiens
aatcagactgactgg

SEQ ID NO: 1157757 - DNA, 15 bp, Homo sapiens
caatcagactgactg

SEQ ID NO: 1157758 - DNA, 15 bp, Homo sapiens
acaatcagactgact

SEQ ID NO: 1157759 - DNA, 15 bp, Homo sapiens
aacaatcagactgac

SEQ ID NO: 1157760 - DNA, 15 bp, Homo sapiens
gaacaatcagactga

SEQ ID NO: 1157761 - DNA, 15 bp, Homo sapiens
agaacaatcagactg

SEQ ID NO: 1157762 - DNA, 15 bp, Homo sapiens
tagaacaatcagact

SEQ ID NO: 1157763 - DNA, 15 bp, Homo sapiens
ttagaacaatcagac

SEQ ID NO: 1157764 - DNA, 15 bp, Homo sapiens
cttagaacaatcaga

SEQ ID NO: 1157765 - DNA, 15 bp, Homo sapiens
gcttagaacaatcag

SEQ ID NO: 1157766 - DNA, 15 bp, Homo sapiens
tgcttagaacaatca

SEQ ID NO: 1157767 - DNA, 15 bp, Homo sapiens
ttgcttagaacaatc

SEQ ID NO: 1157768 - DNA, 15 bp, Homo sapiens
tttgcttagaacaat

SEQ ID NO: 1157769 - DNA, 15 bp, Homo sapiens
atttgcttagaacaa

SEQ ID NO: 1157770 - DNA, 15 bp, Homo sapiens
tatttgcttagaaca

SEQ ID NO: 1157771 - DNA, 15 bp, Homo sapiens
gtatttgcttagaac

SEQ ID NO: 1157772 - DNA, 15 bp, Homo sapiens
cagtatttgcttaga

SEQ ID NO: 1157773 - DNA, 15 bp, Homo sapiens
tcagtatttgcttag

SEQ ID NO: 1157774 - DNA, 15 bp, Homo sapiens
gtcagtatttgctta

SEQ ID NO: 1157775 - DNA, 15 bp, Homo sapiens
agtcagtatttgctt

SEQ ID NO: 1157776 - DNA, 15 bp, Homo sapiens
aagtcagtatttgct

SEQ ID NO: 1157777 - DNA, 15 bp, Homo sapiens
taagtcagtatttgc

SEQ ID NO: 1157778 - DNA, 15 bp, Homo sapiens
gtaagtcagtatttg

SEQ ID NO: 1157779 - DNA, 15 bp, Homo sapiens
agtaagtcagtattt

SEQ ID NO: 1157780 - DNA, 15 bp, Homo sapiens
cagtaagtcagtatt

SEQ ID NO: 1157781 - DNA, 15 bp, Homo sapiens
ccagtaagtcagtat

SEQ ID NO: 1157782 - DNA, 15 bp, Homo sapiens
gccagtaagtcagta

SEQ ID NO: 1157783 - DNA, 15 bp, Homo sapiens
agccagtaagtcagt

SEQ ID NO: 1157784 - DNA, 15 bp, Homo sapiens
aagccagtaagtcag

SEQ ID NO: 1157785 - DNA, 15 bp, Homo sapiens
taagccagtaagtca

SEQ ID NO: 1157786 - DNA, 15 bp, Homo sapiens
ataagccagtaagtc

SEQ ID NO: 1157787 - DNA, 15 bp, Homo sapiens
tataagccagtaagt

SEQ ID NO: 1157788 - DNA, 15 bp, Homo sapiens
ttataagccagtaag

SEQ ID NO: 1157789 - DNA, 15 bp, Homo sapiens
tttataagccagtaa

SEQ ID NO: 1157790 - DNA, 15 bp, Homo sapiens
ctttataagccagta

SEQ ID NO: 1157791 - DNA, 15 bp, Homo sapiens
cctttataagccagt

SEQ ID NO: 1157792 - DNA, 15 bp, Homo sapiens
acctttataagccag

SEQ ID NO: 1157793 - DNA, 15 bp, Homo sapiens
cacctttataagcca

SEQ ID NO: 1157794 - DNA, 15 bp, Homo sapiens
tcacctttataagcc

SEQ ID NO: 1157795 - DNA, 15 bp, Homo sapiens
ttcacctttataagc

SEQ ID NO: 1157796 - DNA, 15 bp, Homo sapiens
gttcacctttataag

SEQ ID NO: 1157797 - DNA, 15 bp, Homo sapiens
agttcacctttataa

SEQ ID NO: 1157798 - DNA, 15 bp, Homo sapiens
tagttcacctttata

SEQ ID NO: 1157799 - DNA, 15 bp, Homo sapiens
gtagttcacctttat

SEQ ID NO: 1157800 - DNA, 15 bp, Homo sapiens
tgtagttcaccttta

SEQ ID NO: 1157801 - DNA, 15 bp, Homo sapiens
ctgtagttcaccttt

SEQ ID NO: 1157802 - DNA, 15 bp, Homo sapiens
tctgtagttcacctt

SEQ ID NO: 1157803 - DNA, 15 bp, Homo sapiens
gtctgtagttcacct

SEQ ID NO: 1157804 - DNA, 15 bp, Homo sapiens
agtctgtagttcacc

SEQ ID NO: 1157805 - DNA, 15 bp, Homo sapiens
gagtctgtagttcac

SEQ ID NO: 1157806 - DNA, 15 bp, Homo sapiens
ggagtctgtagttca

SEQ ID NO: 1157807 - DNA, 15 bp, Homo sapiens
aggagtctgtagttc

SEQ ID NO: 1157808 - DNA, 15 bp, Homo sapiens
caggagtctgtagtt

SEQ ID NO: 1157809 - DNA, 15 bp, Homo sapiens
gcaggagtctgtagt

SEQ ID NO: 1157810 - DNA, 15 bp, Homo sapiens
ggcaggagtctgtag

SEQ ID NO: 1157811 - DNA, 15 bp, Homo sapiens
gggcaggagtctgta

SEQ ID NO: 1157812 - DNA, 15 bp, Homo sapiens
tgggcaggagtctgt

SEQ ID NO: 1157813 - DNA, 15 bp, Homo sapiens
ttgggcaggagtctg

SEQ ID NO: 1157814 - DNA, 15 bp, Homo sapiens
tttgggcaggagtct

SEQ ID NO: 1157815 - DNA, 15 bp, Homo sapiens
atttgggcaggagtc

SEQ ID NO: 1157816 - DNA, 15 bp, Homo sapiens
aatttgggcaggagt

SEQ ID NO: 1157817 - DNA, 15 bp, Homo sapiens
gaatttgggcaggag

SEQ ID NO: 1157818 - DNA, 15 bp, Homo sapiens
tgaatttgggcagga

SEQ ID NO: 1157819 - DNA, 15 bp, Homo sapiens
ttgaatttgggcagg

SEQ ID NO: 1157820 - DNA, 15 bp, Homo sapiens
tttgaatttgggcag

SEQ ID NO: 1157821 - DNA, 15 bp, Homo sapiens
ctttgaatttgggca

SEQ ID NO: 1157822 - DNA, 15 bp, Homo sapiens
gctttgaatttgggc

SEQ ID NO: 1157823 - DNA, 15 bp, Homo sapiens
agctttgaatttggg

SEQ ID NO: 1157824 - DNA, 15 bp, Homo sapiens
cagctttgaatttgg

SEQ ID NO: 1157825 - DNA, 15 bp, Homo sapiens
tcagctttgaatttg

SEQ ID NO: 1157826 - DNA, 15 bp, Homo sapiens
gtcagctttgaattt

SEQ ID NO: 1157827 - DNA, 15 bp, Homo sapiens
agtcagctttgaatt

SEQ ID NO: 1157828 - DNA, 15 bp, Homo sapiens
gaagtcagctttgaa

SEQ ID NO: 1157829 - DNA, 15 bp, Homo sapiens
ggaagtcagctttga

SEQ ID NO: 1157830 - DNA, 15 bp, Homo sapiens
tggaagtcagctttg

SEQ ID NO: 1157831 - DNA, 15 bp, Homo sapiens
ttggaagtcagcttt

SEQ ID NO: 1157832 - DNA, 15 bp, Homo sapiens
tttggaagtcagctt

SEQ ID NO: 1157833 - DNA, 15 bp, Homo sapiens
ttttggaagtcagct

SEQ ID NO: 1157834 - DNA, 15 bp, Homo sapiens
gttttggaagtcagc

SEQ ID NO: 1157835 - DNA, 15 bp, Homo sapiens
tgttttggaagtcag

SEQ ID NO: 1157836 - DNA, 15 bp, Homo sapiens
ctgttttggaagtca

SEQ ID NO: 1157837 - DNA, 15 bp, Homo sapiens
cctgttttggaagtc

SEQ ID NO: 1157838 - DNA, 15 bp, Homo sapiens
ccctgttttggaagt

SEQ ID NO: 1157839 - DNA, 15 bp, Homo sapiens
accctgttttggaag

SEQ ID NO: 1157840 - DNA, 15 bp, Homo sapiens
caccctgttttggaa

SEQ ID NO: 1157841 - DNA, 15 bp, Homo sapiens
gcaccctgttttgga

SEQ ID NO: 1157842 - DNA, 15 bp, Homo sapiens
agcaccctgttttgg

SEQ ID NO: 1157843 - DNA, 15 bp, Homo sapiens
tagcaccctgttttg

SEQ ID NO: 1157844 - DNA, 15 bp, Homo sapiens
gtagcaccctgtttt

SEQ ID NO: 1157845 - DNA, 15 bp, Homo sapiens
ggtagcaccctgttt

SEQ ID NO: 1157846 - DNA, 15 bp, Homo sapiens
aggtagcaccctgtt

SEQ ID NO: 1157847 - DNA, 15 bp, Homo sapiens
caggtagcaccctgt

SEQ ID NO: 1157848 - DNA, 15 bp, Homo sapiens
gcaggtagcaccctg

SEQ ID NO: 1157849 - DNA, 15 bp, Homo sapiens
agcaggtagcaccct

SEQ ID NO: 1157850 - DNA, 15 bp, Homo sapiens
aagcaggtagcaccc

SEQ ID NO: 1157851 - DNA, 15 bp, Homo sapiens
taagcaggtagcacc

SEQ ID NO: 1157852 - DNA, 15 bp, Homo sapiens
ataagcaggtagcac

SEQ ID NO: 1157853 - DNA, 15 bp, Homo sapiens
aataagcaggtagca

SEQ ID NO: 1157854 - DNA, 15 bp, Homo sapiens
caataagcaggtagc

SEQ ID NO: 1157855 - DNA, 15 bp, Homo sapiens
gcaataagcaggtag

SEQ ID NO: 1157856 - DNA, 15 bp, Homo sapiens
ggcaataagcaggta

SEQ ID NO: 1157857 - DNA, 15 bp, Homo sapiens
aggcaataagcaggt

SEQ ID NO: 1157858 - DNA, 15 bp, Homo sapiens
gaggcaataagcagg

SEQ ID NO: 1157859 - DNA, 15 bp, Homo sapiens
ggaggcaataagcag

SEQ ID NO: 1157860 - DNA, 15 bp, Homo sapiens
gggaggcaataagca

SEQ ID NO: 1157861 - DNA, 15 bp, Homo sapiens
ggggaggcaataagc

SEQ ID NO: 1157862 - DNA, 15 bp, Homo sapiens
tggggaggcaataag

SEQ ID NO: 1157863 - DNA, 15 bp, Homo sapiens
gtggggaggcaataa

SEQ ID NO: 1157864 - DNA, 15 bp, Homo sapiens
ggtggggaggcaata

SEQ ID NO: 1157865 - DNA, 15 bp, Homo sapiens
cggtggggaggcaat

SEQ ID NO: 1157866 - DNA, 15 bp, Homo sapiens
gcggtggggaggcaa

SEQ ID NO: 1157867 - DNA, 15 bp, Homo sapiens
agcggtggggaggca

SEQ ID NO: 1157868 - DNA, 15 bp, Homo sapiens
aagcggtggggaggc

SEQ ID NO: 1157869 - DNA, 15 bp, Homo sapiens
aaagcggtggggagg

SEQ ID NO: 1157870 - DNA, 15 bp, Homo sapiens
gaaagcggtggggag

SEQ ID NO: 1157871 - DNA, 15 bp, Homo sapiens
tgaaagcggtgggga

SEQ ID NO: 1157872 - DNA, 15 bp, Homo sapiens
ctgaaagcggtgggg

SEQ ID NO: 1157873 - DNA, 15 bp, Homo sapiens
actgaaagcggtggg

SEQ ID NO: 1157874 - DNA, 15 bp, Homo sapiens
aactgaaagcggtgg

SEQ ID NO: 1157875 - DNA, 15 bp, Homo sapiens
aaactgaaagcggtg

SEQ ID NO: 1157876 - DNA, 15 bp, Homo sapiens
aaaactgaaagcggt

SEQ ID NO: 1157877 - DNA, 15 bp, Homo sapiens
caaaactgaaagcgg

SEQ ID NO: 1157878 - DNA, 15 bp, Homo sapiens
gcaaaactgaaagcg

SEQ ID NO: 1157879 - DNA, 15 bp, Homo sapiens
agcaaaactgaaagc

SEQ ID NO: 1157880 - DNA, 15 bp, Homo sapiens
cagcaaaactgaaag

SEQ ID NO: 1157881 - DNA, 15 bp, Homo sapiens
gcagcaaaactgaaa

SEQ ID NO: 1157882 - DNA, 15 bp, Homo sapiens
ggcagcaaaactgaa

SEQ ID NO: 1157883 - DNA, 15 bp, Homo sapiens
aggcagcaaaactga

SEQ ID NO: 1157884 - DNA, 15 bp, Homo sapiens
aaggcagcaaaactg

SEQ ID NO: 1157885 - DNA, 15 bp, Homo sapiens
gaaggcagcaaaact

SEQ ID NO: 1157886 - DNA, 15 bp, Homo sapiens
agaaggcagcaaaac

SEQ ID NO: 1157887 - DNA, 15 bp, Homo sapiens
gagaaggcagcaaaa

SEQ ID NO: 1157888 - DNA, 15 bp, Homo sapiens
agagaaggcagcaaa

SEQ ID NO: 1157889 - DNA, 15 bp, Homo sapiens
aagagaaggcagcaa

SEQ ID NO: 1157890 - DNA, 15 bp, Homo sapiens
taagagaaggcagca

SEQ ID NO: 1157891 - DNA, 15 bp, Homo sapiens
gtaagagaaggcagc

SEQ ID NO: 1157892 - DNA, 15 bp, Homo sapiens
ggtaagagaaggcag

SEQ ID NO: 1157893 - DNA, 15 bp, Homo sapiens
aggtaagagaaggca

SEQ ID NO: 1157894 - DNA, 15 bp, Homo sapiens
aaggtaagagaaggc

SEQ ID NO: 1157895 - DNA, 15 bp, Homo sapiens
caaggtaagagaagg

SEQ ID NO: 1157896 - DNA, 15 bp, Homo sapiens
tcaaggtaagagaag

SEQ ID NO: 1157897 - DNA, 15 bp, Homo sapiens
ttcaaggtaagagaa

SEQ ID NO: 1157898 - DNA, 15 bp, Homo sapiens
attcaaggtaagaga

SEQ ID NO: 1157899 - DNA, 15 bp, Homo sapiens
aattcaaggtaagag

SEQ ID NO: 1157900 - DNA, 15 bp, Homo sapiens
gaattcaaggtaaga

SEQ ID NO: 1157901 - DNA, 15 bp, Homo sapiens
agaattcaaggtaag

SEQ ID NO: 1157902 - DNA, 15 bp, Homo sapiens
gagaattcaaggtaa

SEQ ID NO: 1157903 - DNA, 15 bp, Homo sapiens
cgagaattcaaggta

SEQ ID NO: 1157904 - DNA, 15 bp, Homo sapiens
ccgagaattcaaggt

SEQ ID NO: 1157905 - DNA, 15 bp, Homo sapiens
gccgagaattcaagg

SEQ ID NO: 1157906 - DNA, 15 bp, Homo sapiens
agccgagaattcaag

SEQ ID NO: 1157907 - DNA, 15 bp, Homo sapiens
gagccgagaattcaa

SEQ ID NO: 1157908 - DNA, 15 bp, Homo sapiens
agagccgagaattca

SEQ ID NO: 1157909 - DNA, 15 bp, Homo sapiens
gagagccgagaattc

SEQ ID NO: 1157910 - DNA, 15 bp, Homo sapiens
cgagagccgagaatt

SEQ ID NO: 1157911 - DNA, 15 bp, Homo sapiens
tcgagagccgagaat

SEQ ID NO: 1157912 - DNA, 15 bp, Homo sapiens
ttcgagagccgagaa

SEQ ID NO: 1157913 - DNA, 15 bp, Homo sapiens
gttcgagagccgaga

SEQ ID NO: 1157914 - DNA, 15 bp, Homo sapiens
agttcgagagccgag

SEQ ID NO: 1157915 - DNA, 15 bp, Homo sapiens
aagttcgagagccga

SEQ ID NO: 1157916 - DNA, 15 bp, Homo sapiens
aaagttcgagagccg

SEQ ID NO: 1157917 - DNA, 15 bp, Homo sapiens
caaagttcgagagcc

SEQ ID NO: 1157918 - DNA, 15 bp, Homo sapiens
tcaaagttcgagagc

SEQ ID NO: 1157919 - DNA, 15 bp, Homo sapiens
gtcaaagttcgagag

SEQ ID NO: 1157920 - DNA, 15 bp, Homo sapiens
agtcaaagttcgaga

SEQ ID NO: 1157921 - DNA, 15 bp, Homo sapiens
aagtcaaagttcgag

SEQ ID NO: 1157922 - DNA, 15 bp, Homo sapiens
aaagtcaaagttcga

SEQ ID NO: 1157923 - DNA, 15 bp, Homo sapiens
caaagtcaaagttcg

SEQ ID NO: 1157924 - DNA, 15 bp, Homo sapiens
tcaaagtcaaagttc

SEQ ID NO: 1157925 - DNA, 15 bp, Homo sapiens
atcaaagtcaaagtt

SEQ ID NO: 1157926 - DNA, 15 bp, Homo sapiens
gatcaaagtcaaagt

SEQ ID NO: 1157927 - DNA, 15 bp, Homo sapiens
ggatcaaagtcaaag

SEQ ID NO: 1157928 - DNA, 15 bp, Homo sapiens
aggatcaaagtcaaa

SEQ ID NO: 1157929 - DNA, 15 bp, Homo sapiens
gaggatcaaagtcaa

SEQ ID NO: 1157930 - DNA, 15 bp, Homo sapiens
tgaggatcaaagtca

SEQ ID NO: 1157931 - DNA, 15 bp, Homo sapiens
ttgaggatcaaagtc

SEQ ID NO: 1157932 - DNA, 15 bp, Homo sapiens
gttgaggatcaaagt

SEQ ID NO: 1157933 - DNA, 15 bp, Homo sapiens
ggttgaggatcaaag

SEQ ID NO: 1157934 - DNA, 15 bp, Homo sapiens
aggttgaggatcaaa

SEQ ID NO: 1157935 - DNA, 15 bp, Homo sapiens
gaggttgaggatcaa

SEQ ID NO: 1157936 - DNA, 15 bp, Homo sapiens
ggaggttgaggatca

SEQ ID NO: 1157937 - DNA, 15 bp, Homo sapiens
tggaggttgaggatc

SEQ ID NO: 1157938 - DNA, 15 bp, Homo sapiens
ctggaggttgaggat

SEQ ID NO: 1157939 - DNA, 15 bp, Homo sapiens
gctggaggttgagga

SEQ ID NO: 1157940 - DNA, 15 bp, Homo sapiens
ggctggaggttgagg

SEQ ID NO: 1157941 - DNA, 15 bp, Homo sapiens
agggctggaggttga

SEQ ID NO: 1157942 - DNA, 15 bp, Homo sapiens
aagggctggaggttg

SEQ ID NO: 1157943 - DNA, 15 bp, Homo sapiens
aaagggctggaggtt

SEQ ID NO: 1157944 - DNA, 15 bp, Homo sapiens
gaaagggctggaggt

SEQ ID NO: 1157945 - DNA, 15 bp, Homo sapiens
tgaaagggctggagg

SEQ ID NO: 1157946 - DNA, 15 bp, Homo sapiens
atgaaagggctggag

SEQ ID NO: 1157947 - DNA, 15 bp, Homo sapiens
tatgaaagggctgga

SEQ ID NO: 1157948 - DNA, 15 bp, Homo sapiens
atatgaaagggctgg

SEQ ID NO: 1157949 - DNA, 15 bp, Homo sapiens
aatatgaaagggctg

SEQ ID NO: 1157950 - DNA, 15 bp, Homo sapiens
aaatatgaaagggct

SEQ ID NO: 1157951 - DNA, 15 bp, Homo sapiens
caaatatgaaagggc

SEQ ID NO: 1157952 - DNA, 15 bp, Homo sapiens
ccaaatatgaaaggg

SEQ ID NO: 1157953 - DNA, 15 bp, Homo sapiens
gccaaatatgaaagg

SEQ ID NO: 1157954 - DNA, 15 bp, Homo sapiens
agccaaatatgaaag

SEQ ID NO: 1157955 - DNA, 15 bp, Homo sapiens
aagccaaatatgaaa

SEQ ID NO: 1157956 - DNA, 15 bp, Homo sapiens
aaagccaaatatgaa

SEQ ID NO: 1157957 - DNA, 15 bp, Homo sapiens
aaaagccaaatatga

SEQ ID NO: 1157958 - DNA, 15 bp, Homo sapiens
caaaagccaaatatg

SEQ ID NO: 1157959 - DNA, 15 bp, Homo sapiens
acaaaagccaaatat

SEQ ID NO: 1157960 - DNA, 15 bp, Homo sapiens
gacaaaagccaaata

SEQ ID NO: 1157961 - DNA, 15 bp, Homo sapiens
tgacaaaagccaaat

SEQ ID NO: 1157962 - DNA, 15 bp, Homo sapiens
atgacaaaagccaaa

SEQ ID NO: 1157963 - DNA, 15 bp, Homo sapiens
aatgacaaaagccaa

SEQ ID NO: 1157964 - DNA, 15 bp, Homo sapiens
tcaatgacaaaagcc

SEQ ID NO: 1157965 - DNA, 15 bp, Homo sapiens
atcaatgacaaaagc

SEQ ID NO: 1157966 - DNA, 15 bp, Homo sapiens
aatcaatgacaaaag

SEQ ID NO: 1157967 - DNA, 15 bp, Homo sapiens
aaatcaatgacaaaa

SEQ ID NO: 1157968 - DNA, 15 bp, Homo sapiens
aaaatcaatgacaaa

SEQ ID NO: 1157969 - DNA, 15 bp, Homo sapiens
gaaaatcaatgacaa

SEQ ID NO: 1157970 - DNA, 15 bp, Homo sapiens
agaaaatcaatgaca

SEQ ID NO: 1157971 - DNA, 15 bp, Homo sapiens
tagaaaatcaatgac

SEQ ID NO: 1157972 - DNA, 15 bp, Homo sapiens
ctagaaaatcaatga

SEQ ID NO: 1157973 - DNA, 15 bp, Homo sapiens
gctagaaaatcaatg

SEQ ID NO: 1157974 - DNA, 15 bp, Homo sapiens
tgctagaaaatcaat

SEQ ID NO: 1157975 - DNA, 15 bp, Homo sapiens
atgctagaaaatcaa

SEQ ID NO: 1157976 - DNA, 15 bp, Homo sapiens
catgctagaaaatca

SEQ ID NO: 1157977 - DNA, 15 bp, Homo sapiens
acatgctagaaaatc

SEQ ID NO: 1157978 - DNA, 15 bp, Homo sapiens
tacatgctagaaaat

SEQ ID NO: 1157979 - DNA, 15 bp, Homo sapiens
ctacatgctagaaaa

SEQ ID NO: 1157980 - DNA, 15 bp, Homo sapiens
gctacatgctagaaa

SEQ ID NO: 1157981 - DNA, 15 bp, Homo sapiens
ggctacatgctagaa

SEQ ID NO: 1157982 - DNA, 15 bp, Homo sapiens
gggctacatgctaga

SEQ ID NO: 1157983 - DNA, 15 bp, Homo sapiens
ggggctacatgctag

SEQ ID NO: 1157984 - DNA, 15 bp, Homo sapiens
cggggctacatgcta

SEQ ID NO: 1157985 - DNA, 15 bp, Homo sapiens
acggggctacatgct

SEQ ID NO: 1157986 - DNA, 15 bp, Homo sapiens
cacggggctacatgc

SEQ ID NO: 1157987 - DNA, 15 bp, Homo sapiens
ccacggggctacatg

SEQ ID NO: 1157988 - DNA, 15 bp, Homo sapiens
gccacggggctacat

SEQ ID NO: 1157989 - DNA, 15 bp, Homo sapiens
agccacggggctaca

SEQ ID NO: 1157990 - DNA, 15 bp, Homo sapiens
gagccacggggctac

SEQ ID NO: 1157991 - DNA, 15 bp, Homo sapiens
agagccacggggcta

SEQ ID NO: 1157992 - DNA, 15 bp, Homo sapiens
gagagccacggggct

SEQ ID NO: 1157993 - DNA, 15 bp, Homo sapiens
agagagccacggggc

SEQ ID NO: 1157994 - DNA, 15 bp, Homo sapiens
aagagagccacgggg

SEQ ID NO: 1157995 - DNA, 15 bp, Homo sapiens
gaagagagccacggg

SEQ ID NO: 1157996 - DNA, 15 bp, Homo sapiens
ggaagagagccacgg

SEQ ID NO: 1157997 - DNA, 15 bp, Homo sapiens
aggaagagagccacg

SEQ ID NO: 1157998 - DNA, 15 bp, Homo sapiens
aaggaagagagccac

SEQ ID NO: 1157999 - DNA, 15 bp, Homo sapiens
caaggaagagagcca

SEQ ID NO: 1158000 - DNA, 15 bp, Homo sapiens
tcaaggaagagagcc

SEQ ID NO: 1158001 - DNA, 15 bp, Homo sapiens
ctcaaggaagagagc

SEQ ID NO: 1158002 - DNA, 15 bp, Homo sapiens
actcaaggaagagag

SEQ ID NO: 1158003 - DNA, 15 bp, Homo sapiens
cactcaaggaagaga

SEQ ID NO: 1158004 - DNA, 15 bp, Homo sapiens
tcactcaaggaagag

SEQ ID NO: 1158005 - DNA, 15 bp, Homo sapiens
ttcactcaaggaaga

SEQ ID NO: 1158006 - DNA, 15 bp, Homo sapiens
cttcactcaaggaag

SEQ ID NO: 1158007 - DNA, 15 bp, Homo sapiens
tcttcactcaaggaa

SEQ ID NO: 1158008 - DNA, 15 bp, Homo sapiens
gtcttcactcaagga

SEQ ID NO: 1158009 - DNA, 15 bp, Homo sapiens
ggtcttcactcaagg

SEQ ID NO: 1158010 - DNA, 15 bp, Homo sapiens
tggtcttcactcaag

SEQ ID NO: 1158011 - DNA, 15 bp, Homo sapiens
ttggtcttcactcaa

SEQ ID NO: 1158012 - DNA, 15 bp, Homo sapiens
gttggtcttcactca

SEQ ID NO: 1158013 - DNA, 15 bp, Homo sapiens
agttggtcttcactc

SEQ ID NO: 1158014 - DNA, 15 bp, Homo sapiens
gagttggtcttcact

SEQ ID NO: 1158015 - DNA, 15 bp, Homo sapiens
agagttggtcttcac

SEQ ID NO: 1158016 - DNA, 15 bp, Homo sapiens
aagagttggtcttca

SEQ ID NO: 1158017 - DNA, 15 bp, Homo sapiens
taagagttggtcttc

SEQ ID NO: 1158018 - DNA, 15 bp, Homo sapiens
gtaagagttggtctt

SEQ ID NO: 1158019 - DNA, 15 bp, Homo sapiens
agtaagagttggtct

SEQ ID NO: 1158020 - DNA, 15 bp, Homo sapiens
cagtaagagttggtc

SEQ ID NO: 1158021 - DNA, 15 bp, Homo sapiens
tcagtaagagttggt

SEQ ID NO: 1158022 - DNA, 15 bp, Homo sapiens
atcagtaagagttgg

SEQ ID NO: 1158023 - DNA, 15 bp, Homo sapiens
tatcagtaagagttg

SEQ ID NO: 1158024 - DNA, 15 bp, Homo sapiens
ttatcagtaagagtt

SEQ ID NO: 1158025 - DNA, 15 bp, Homo sapiens
attatcagtaagagt

SEQ ID NO: 1158026 - DNA, 15 bp, Homo sapiens
cattatcagtaagag

SEQ ID NO: 1158027 - DNA, 15 bp, Homo sapiens
gcattatcagtaaga

SEQ ID NO: 1158028 - DNA, 15 bp, Homo sapiens
agcattatcagtaag

SEQ ID NO: 1158029 - DNA, 15 bp, Homo sapiens
aagcattatcagtaa

SEQ ID NO: 1158030 - DNA, 15 bp, Homo sapiens
caagcattatcagta

SEQ ID NO: 1158031 - DNA, 15 bp, Homo sapiens
acaagcattatcagt

SEQ ID NO: 1158032 - DNA, 15 bp, Homo sapiens
tacaagcattatcag

SEQ ID NO: 1158033 - DNA, 15 bp, Homo sapiens
atacaagcattatca

SEQ ID NO: 1158034 - DNA, 15 bp, Homo sapiens
gatacaagcattatc

SEQ ID NO: 1158035 - DNA, 15 bp, Homo sapiens
agatacaagcattat

SEQ ID NO: 1158036 - DNA, 15 bp, Homo sapiens
cagatacaagcatta

SEQ ID NO: 1158037 - DNA, 15 bp, Homo sapiens
gcagatacaagcatt

SEQ ID NO: 1158038 - DNA, 15 bp, Homo sapiens
ggcagatacaagcat

SEQ ID NO: 1158039 - DNA, 15 bp, Homo sapiens
tggcagatacaagca

SEQ ID NO: 1158040 - DNA, 15 bp, Homo sapiens
atggcagatacaagc

SEQ ID NO: 1158041 - DNA, 15 bp, Homo sapiens
tatggcagatacaag

SEQ ID NO: 1158042 - DNA, 15 bp, Homo sapiens
ttatggcagatacaa

SEQ ID NO: 1158043 - DNA, 15 bp, Homo sapiens
gttatggcagataca

SEQ ID NO: 1158044 - DNA, 15 bp, Homo sapiens
ggttatggcagatac

SEQ ID NO: 1158045 - DNA, 15 bp, Homo sapiens
aggttatggcagata

SEQ ID NO: 1158046 - DNA, 15 bp, Homo sapiens
aaggttatggcagat

SEQ ID NO: 1158047 - DNA, 15 bp, Homo sapiens
caaggttatggcaga

SEQ ID NO: 1158048 - DNA, 15 bp, Homo sapiens
ccaaggttatggcag

SEQ ID NO: 1158049 - DNA, 15 bp, Homo sapiens
cccaaggttatggca

SEQ ID NO: 1158050 - DNA, 15 bp, Homo sapiens
tcccaaggttatggc

SEQ ID NO: 1158051 - DNA, 15 bp, Homo sapiens
gtcccaaggttatgg

SEQ ID NO: 1158052 - DNA, 15 bp, Homo sapiens
tgtcccaaggttatg

SEQ ID NO: 1158053 - DNA, 15 bp, Homo sapiens
ctgtcccaaggttat

SEQ ID NO: 1158054 - DNA, 15 bp, Homo sapiens
gctgtcccaaggtta

SEQ ID NO: 1158055 - DNA, 15 bp, Homo sapiens
tgctgtcccaaggtt

SEQ ID NO: 1158056 - DNA, 15 bp, Homo sapiens
gtgctgtcccaaggt

SEQ ID NO: 1158057 - DNA, 15 bp, Homo sapiens
ggtgctgtcccaagg

SEQ ID NO: 1158058 - DNA, 15 bp, Homo sapiens
gggtgctgtcccaag

SEQ ID NO: 1158059 - DNA, 15 bp, Homo sapiens
tgggtgctgtcccaa

SEQ ID NO: 1158060 - DNA, 15 bp, Homo sapiens
atgggtgctgtccca

SEQ ID NO: 1158061 - DNA, 15 bp, Homo sapiens
catgggtgctgtccc

SEQ ID NO: 1158062 - DNA, 15 bp, Homo sapiens
tcatgggtgctgtcc

SEQ ID NO: 1158063 - DNA, 15 bp, Homo sapiens
gtcatgggtgctgtc

SEQ ID NO: 1158064 - DNA, 15 bp, Homo sapiens
tgtcatgggtgctgt

SEQ ID NO: 1158065 - DNA, 15 bp, Homo sapiens
ctgtcatgggtgctg

SEQ ID NO: 1158066 - DNA, 15 bp, Homo sapiens
tctgtcatgggtgct

SEQ ID NO: 1158067 - DNA, 15 bp, Homo sapiens
ctctgtcatgggtgc

SEQ ID NO: 1158068 - DNA, 15 bp, Homo sapiens
gctctgtcatgggtg

SEQ ID NO: 1158069 - DNA, 15 bp, Homo sapiens
ggctctgtcatgggt

SEQ ID NO: 1158070 - DNA, 15 bp, Homo sapiens
gggctctgtcatggg

SEQ ID NO: 1158071 - DNA, 15 bp, Homo sapiens
agggctctgtcatgg

SEQ ID NO: 1158072 - DNA, 15 bp, Homo sapiens
cagggctctgtcatg

SEQ ID NO: 1158073 - DNA, 15 bp, Homo sapiens
ccagggctctgtcat

SEQ ID NO: 1158074 - DNA, 15 bp, Homo sapiens
cccagggctctgtca

SEQ ID NO: 1158075 - DNA, 15 bp, Homo sapiens
tcccagggctctgtc

SEQ ID NO: 1158076 - DNA, 15 bp, Homo sapiens
ctcccagggctctgt

SEQ ID NO: 1158077 - DNA, 15 bp, Homo sapiens
gctcccagggctctg

SEQ ID NO: 1158078 - DNA, 15 bp, Homo sapiens
ggctcccagggctct

SEQ ID NO: 1158079 - DNA, 15 bp, Homo sapiens
acaggctcccagggc

SEQ ID NO: 1158080 - DNA, 15 bp, Homo sapiens
gacaggctcccaggg

SEQ ID NO: 1158081 - DNA, 15 bp, Homo sapiens
ggacaggctcccagg

SEQ ID NO: 1158082 - DNA, 15 bp, Homo sapiens
gggacaggctcccag

SEQ ID NO: 1158083 - DNA, 15 bp, Homo sapiens
ggggacaggctccca

SEQ ID NO: 1158084 - DNA, 15 bp, Homo sapiens
tggggacaggctccc

SEQ ID NO: 1158085 - DNA, 15 bp, Homo sapiens
atggggacaggctcc

SEQ ID NO: 1158086 - DNA, 15 bp, Homo sapiens
aatggggacaggctc

SEQ ID NO: 1158087 - DNA, 15 bp, Homo sapiens
taatggggacaggct

SEQ ID NO: 1158088 - DNA, 15 bp, Homo sapiens
ctaatggggacaggc

SEQ ID NO: 1158089 - DNA, 15 bp, Homo sapiens
tctaatggggacagg

SEQ ID NO: 1158090 - DNA, 15 bp, Homo sapiens
gtctaatggggacag

SEQ ID NO: 1158091 - DNA, 15 bp, Homo sapiens
tgtctaatggggaca

SEQ ID NO: 1158092 - DNA, 15 bp, Homo sapiens
ctgtctaatggggac

SEQ ID NO: 1158093 - DNA, 15 bp, Homo sapiens
actgtctaatgggga

SEQ ID NO: 1158094 - DNA, 15 bp, Homo sapiens
gactgtctaatgggg

SEQ ID NO: 1158095 - DNA, 15 bp, Homo sapiens
tgactgtctaatggg

SEQ ID NO: 1158096 - DNA, 15 bp, Homo sapiens
gtgactgtctaatgg

SEQ ID NO: 1158097 - DNA, 15 bp, Homo sapiens
ggtgactgtctaatg

SEQ ID NO: 1158098 - DNA, 15 bp, Homo sapiens
tggtgactgtctaat

SEQ ID NO: 1158099 - DNA, 15 bp, Homo sapiens
ttggtgactgtctaa

SEQ ID NO: 1158100 - DNA, 15 bp, Homo sapiens
tttggtgactgtcta

SEQ ID NO: 1158101 - DNA, 15 bp, Homo sapiens
ctttggtgactgtct

SEQ ID NO: 1158102 - DNA, 15 bp, Homo sapiens
actttggtgactgtc

SEQ ID NO: 1158103 - DNA, 15 bp, Homo sapiens
cactttggtgactgt

SEQ ID NO: 1158104 - DNA, 15 bp, Homo sapiens
acactttggtgactg

SEQ ID NO: 1158105 - DNA, 15 bp, Homo sapiens
aacactttggtgact

SEQ ID NO: 1158106 - DNA, 15 bp, Homo sapiens
taacactttggtgac

SEQ ID NO: 1158107 - DNA, 15 bp, Homo sapiens
ttaacactttggtga

SEQ ID NO: 1158108 - DNA, 15 bp, Homo sapiens
cttaacactttggtg

SEQ ID NO: 1158109 - DNA, 15 bp, Homo sapiens
gcttaacactttggt

SEQ ID NO: 1158110 - DNA, 15 bp, Homo sapiens
ggcttaacactttgg

SEQ ID NO: 1158111 - DNA, 15 bp, Homo sapiens
aggcttaacactttg

SEQ ID NO: 1158112 - DNA, 15 bp, Homo sapiens
aaggcttaacacttt

SEQ ID NO: 1158113 - DNA, 15 bp, Homo sapiens
caaggcttaacactt

SEQ ID NO: 1158114 - DNA, 15 bp, Homo sapiens
acaaggcttaacact

SEQ ID NO: 1158115 - DNA, 15 bp, Homo sapiens
aacaaggcttaacac

SEQ ID NO: 1158116 - DNA, 15 bp, Homo sapiens
aaacaaggcttaaca

SEQ ID NO: 1158117 - DNA, 15 bp, Homo sapiens
gaaacaaggcttaac

SEQ ID NO: 1158118 - DNA, 15 bp, Homo sapiens
agaaacaaggcttaa

SEQ ID NO: 1158119 - DNA, 15 bp, Homo sapiens
aagaaacaaggctta

SEQ ID NO: 1158120 - DNA, 15 bp, Homo sapiens
aaagaaacaaggctt

SEQ ID NO: 1158121 - DNA, 15 bp, Homo sapiens
aaaagaaacaaggct

SEQ ID NO: 1158122 - DNA, 15 bp, Homo sapiens
taaaagaaacaaggc

SEQ ID NO: 1158123 - DNA, 15 bp, Homo sapiens
ataaaagaaacaagg

SEQ ID NO: 1158124 - DNA, 15 bp, Homo sapiens
aataaaagaaacaag

SEQ ID NO: 1158125 - DNA, 15 bp, Homo sapiens
taataaaagaaacaa

SEQ ID NO: 1158126 - DNA, 15 bp, Homo sapiens
ttaataaaagaaaca

SEQ ID NO: 1158127 - DNA, 15 bp, Homo sapiens
attaataaaagaaac

SEQ ID NO: 1158128 - DNA, 15 bp, Homo sapiens
tattaataaaagaaa

SEQ ID NO: 1158129 - DNA, 15 bp, Homo sapiens
ctattaataaaagaa

SEQ ID NO: 1158130 - DNA, 15 bp, Homo sapiens
actattaataaaaga

SEQ ID NO: 1158131 - DNA, 15 bp, Homo sapiens
aactattaataaaag

SEQ ID NO: 1158132 - DNA, 15 bp, Homo sapiens
caactattaataaaa

SEQ ID NO: 1158133 - DNA, 15 bp, Homo sapiens
acaactattaataaa

SEQ ID NO: 1158134 - DNA, 15 bp, Homo sapiens
aacaactattaataa

SEQ ID NO: 1158135 - DNA, 15 bp, Homo sapiens
taacaactattaata

SEQ ID NO: 1158136 - DNA, 15 bp, Homo sapiens
ttaacaactattaat

SEQ ID NO: 1158137 - DNA, 15 bp, Homo sapiens
cttaacaactattaa

SEQ ID NO: 1158138 - DNA, 15 bp, Homo sapiens
gcttaacaactatta

SEQ ID NO: 1158139 - DNA, 15 bp, Homo sapiens
ggcttaacaactatt

SEQ ID NO: 1158140 - DNA, 15 bp, Homo sapiens
aggcttaacaactat

SEQ ID NO: 1158141 - DNA, 15 bp, Homo sapiens
taggcttaacaacta

SEQ ID NO: 1158142 - DNA, 15 bp, Homo sapiens
ttaggcttaacaact

SEQ ID NO: 1158143 - DNA, 15 bp, Homo sapiens
tttaggcttaacaac

SEQ ID NO: 1158144 - DNA, 15 bp, Homo sapiens
atttaggcttaacaa

SEQ ID NO: 1158145 - DNA, 15 bp, Homo sapiens
gatttaggcttaaca

SEQ ID NO: 1158146 - DNA, 15 bp, Homo sapiens
tgatttaggcttaac

SEQ ID NO: 1158147 - DNA, 15 bp, Homo sapiens
ctgatttaggcttaa

SEQ ID NO: 1158148 - DNA, 15 bp, Homo sapiens
gctgatttaggctta

SEQ ID NO: 1158149 - DNA, 15 bp, Homo sapiens
ggctgatttaggctt

SEQ ID NO: 1158150 - DNA, 15 bp, Homo sapiens
aggctgatttaggct

SEQ ID NO: 1158151 - DNA, 15 bp, Homo sapiens
aaggctgatttaggc

SEQ ID NO: 1158152 - DNA, 15 bp, Homo sapiens
caaggctgatttagg

SEQ ID NO: 1158153 - DNA, 15 bp, Homo sapiens
acaaggctgatttag

SEQ ID NO: 1158154 - DNA, 15 bp, Homo sapiens
aacaaggctgattta

SEQ ID NO: 1158155 - DNA, 15 bp, Homo sapiens
taacaaggctgattt

SEQ ID NO: 1158156 - DNA, 15 bp, Homo sapiens
ttaacaaggctgatt

SEQ ID NO: 1158157 - DNA, 15 bp, Homo sapiens
cttaacaaggctgat

SEQ ID NO: 1158158 - DNA, 15 bp, Homo sapiens
gcttaacaaggctga

SEQ ID NO: 1158159 - DNA, 15 bp, Homo sapiens
ggcttaacaaggctg

SEQ ID NO: 1158160 - DNA, 15 bp, Homo sapiens
aggcttaacaaggct

SEQ ID NO: 1158161 - DNA, 15 bp, Homo sapiens
taggcttaacaaggc

SEQ ID NO: 1158162 - DNA, 15 bp, Homo sapiens
ttaggcttaacaagg

SEQ ID NO: 1158163 - DNA, 15 bp, Homo sapiens
attaggcttaacaag

SEQ ID NO: 1158164 - DNA, 15 bp, Homo sapiens
aattaggcttaacaa

SEQ ID NO: 1158165 - DNA, 15 bp, Homo sapiens
aaattaggcttaaca

SEQ ID NO: 1158166 - DNA, 15 bp, Homo sapiens
taaattaggcttaac

SEQ ID NO: 1158167 - DNA, 15 bp, Homo sapiens
ctaaattaggcttaa

SEQ ID NO: 1158168 - DNA, 15 bp, Homo sapiens
actaaattaggctta

SEQ ID NO: 1158169 - DNA, 15 bp, Homo sapiens
aactaaattaggctt

SEQ ID NO: 1158170 - DNA, 15 bp, Homo sapiens
caactaaattaggct

SEQ ID NO: 1158171 - DNA, 15 bp, Homo sapiens
acaactaaattaggc

SEQ ID NO: 1158172 - DNA, 15 bp, Homo sapiens
aacaactaaattagg

SEQ ID NO: 1158173 - DNA, 15 bp, Homo sapiens
aaacaactaaattag

SEQ ID NO: 1158174 - DNA, 15 bp, Homo sapiens
gaaacaactaaatta

SEQ ID NO: 1158175 - DNA, 15 bp, Homo sapiens
agaaacaactaaatt

SEQ ID NO: 1158176 - DNA, 15 bp, Homo sapiens
gagaaacaactaaat

SEQ ID NO: 1158177 - DNA, 15 bp, Homo sapiens
agagaaacaactaaa

SEQ ID NO: 1158178 - DNA, 15 bp, Homo sapiens
gagagaaacaactaa

SEQ ID NO: 1158179 - DNA, 15 bp, Homo sapiens
cagagagaaacaact

SEQ ID NO: 1158180 - DNA, 15 bp, Homo sapiens
ccagagagaaacaac

SEQ ID NO: 1158181 - DNA, 15 bp, Homo sapiens
tccagagagaaacaa

SEQ ID NO: 1158182 - DNA, 15 bp, Homo sapiens
ttccagagagaaaca

SEQ ID NO: 1158183 - DNA, 15 bp, Homo sapiens
tttccagagagaaac

SEQ ID NO: 1158184 - DNA, 15 bp, Homo sapiens
atttccagagagaaa

SEQ ID NO: 1158185 - DNA, 15 bp, Homo sapiens
gatttccagagagaa

SEQ ID NO: 1158186 - DNA, 15 bp, Homo sapiens
agatttccagagaga

SEQ ID NO: 1158187 - DNA, 15 bp, Homo sapiens
aagatttccagagag

SEQ ID NO: 1158188 - DNA, 15 bp, Homo sapiens
gaagatttccagaga

SEQ ID NO: 1158189 - DNA, 15 bp, Homo sapiens
agaagatttccagag

SEQ ID NO: 1158190 - DNA, 15 bp, Homo sapiens
cagaagatttccaga

SEQ ID NO: 1158191 - DNA, 15 bp, Homo sapiens
gcagaagatttccag

SEQ ID NO: 1158192 - DNA, 15 bp, Homo sapiens
agcagaagatttcca

SEQ ID NO: 1158193 - DNA, 15 bp, Homo sapiens
aagcagaagatttcc

SEQ ID NO: 1158194 - DNA, 15 bp, Homo sapiens
aaagcagaagatttc

SEQ ID NO: 1158195 - DNA, 15 bp, Homo sapiens
caaagcagaagattt

SEQ ID NO: 1158196 - DNA, 15 bp, Homo sapiens
gcaaagcagaagatt

SEQ ID NO: 1158197 - DNA, 15 bp, Homo sapiens
agcaaagcagaagat

SEQ ID NO: 1158198 - DNA, 15 bp, Homo sapiens
tagcaaagcagaaga

SEQ ID NO: 1158199 - DNA, 15 bp, Homo sapiens
atagcaaagcagaag

SEQ ID NO: 1158200 - DNA, 15 bp, Homo sapiens
aatagcaaagcagaa

SEQ ID NO: 1158201 - DNA, 15 bp, Homo sapiens
taatagcaaagcaga

SEQ ID NO: 1158202 - DNA, 15 bp, Homo sapiens
ataatagcaaagcag

SEQ ID NO: 1158203 - DNA, 15 bp, Homo sapiens
tataatagcaaagca

SEQ ID NO: 1158204 - DNA, 15 bp, Homo sapiens
ctataatagcaaagc

SEQ ID NO: 1158205 - DNA, 15 bp, Homo sapiens
gctataatagcaaag

SEQ ID NO: 1158206 - DNA, 15 bp, Homo sapiens
agctataatagcaaa

SEQ ID NO: 1158207 - DNA, 15 bp, Homo sapiens
tagctataatagcaa

SEQ ID NO: 1158208 - DNA, 15 bp, Homo sapiens
atagctataatagca

SEQ ID NO: 1158209 - DNA, 15 bp, Homo sapiens
aatagctataatagc

SEQ ID NO: 1158210 - DNA, 15 bp, Homo sapiens
gaatagctataatag

SEQ ID NO: 1158211 - DNA, 15 bp, Homo sapiens
agaatagctataata

SEQ ID NO: 1158212 - DNA, 15 bp, Homo sapiens
cagaatagctataat

SEQ ID NO: 1158213 - DNA, 15 bp, Homo sapiens
gcagaatagctataa

SEQ ID NO: 1158214 - DNA, 15 bp, Homo sapiens
tgcagaatagctata

SEQ ID NO: 1158215 - DNA, 15 bp, Homo sapiens
ctgcagaatagctat

SEQ ID NO: 1158216 - DNA, 15 bp, Homo sapiens
cctgcagaatagcta

SEQ ID NO: 1158217 - DNA, 15 bp, Homo sapiens
acctgcagaatagct

SEQ ID NO: 1158218 - DNA, 15 bp, Homo sapiens
tacctgcagaatagc

SEQ ID NO: 1158219 - DNA, 15 bp, Homo sapiens
ttacctgcagaatag

SEQ ID NO: 1158220 - DNA, 15 bp, Homo sapiens
gttacctgcagaata

SEQ ID NO: 1158221 - DNA, 15 bp, Homo sapiens
tgttacctgcagaat

SEQ ID NO: 1158222 - DNA, 15 bp, Homo sapiens
atgttacctgcagaa

SEQ ID NO: 1158223 - DNA, 15 bp, Homo sapiens
tatgttacctgcaga

SEQ ID NO: 1158224 - DNA, 15 bp, Homo sapiens
ctatgttacctgcag

SEQ ID NO: 1158225 - DNA, 15 bp, Homo sapiens
cctatgttacctgca

SEQ ID NO: 1158226 - DNA, 15 bp, Homo sapiens
gcctatgttacctgc

SEQ ID NO: 1158227 - DNA, 15 bp, Homo sapiens
tgcctatgttacctg

SEQ ID NO: 1158228 - DNA, 15 bp, Homo sapiens
ttgcctatgttacct

SEQ ID NO: 1158229 - DNA, 15 bp, Homo sapiens
tttgcctatgttacc

SEQ ID NO: 1158230 - DNA, 15 bp, Homo sapiens
gtttgcctatgttac

SEQ ID NO: 1158231 - DNA, 15 bp, Homo sapiens
ggtttgcctatgtta

SEQ ID NO: 1158232 - DNA, 15 bp, Homo sapiens
tggtttgcctatgtt

SEQ ID NO: 1158233 - DNA, 15 bp, Homo sapiens
ctggtttgcctatgt

SEQ ID NO: 1158234 - DNA, 15 bp, Homo sapiens
gctggtttgcctatg

SEQ ID NO: 1158235 - DNA, 15 bp, Homo sapiens
agctggtttgcctat

SEQ ID NO: 1158236 - DNA, 15 bp, Homo sapiens
gagctggtttgccta

SEQ ID NO: 1158237 - DNA, 15 bp, Homo sapiens
tgagctggtttgcct

SEQ ID NO: 1158238 - DNA, 15 bp, Homo sapiens
gtgagctggtttgcc

SEQ ID NO: 1158239 - DNA, 15 bp, Homo sapiens
ggtgagctggtttgc

SEQ ID NO: 1158240 - DNA, 15 bp, Homo sapiens
tggtgagctggtttg

SEQ ID NO: 1158241 - DNA, 15 bp, Homo sapiens
ttggtgagctggttt

SEQ ID NO: 1158242 - DNA, 15 bp, Homo sapiens
tttggtgagctggtt

SEQ ID NO: 1158243 - DNA, 15 bp, Homo sapiens
ttttggtgagctggt

SEQ ID NO: 1158244 - DNA, 15 bp, Homo sapiens
gttttggtgagctgg

SEQ ID NO: 1158245 - DNA, 15 bp, Homo sapiens
agttttggtgagctg

SEQ ID NO: 1158246 - DNA, 15 bp, Homo sapiens
gagttttggtgagct

SEQ ID NO: 1158247 - DNA, 15 bp, Homo sapiens
agagttttggtgagc

SEQ ID NO: 1158248 - DNA, 15 bp, Homo sapiens
cagagttttggtgag

SEQ ID NO: 1158249 - DNA, 15 bp, Homo sapiens
acagagttttggtga

SEQ ID NO: 1158250 - DNA, 15 bp, Homo sapiens
tacagagttttggtg

SEQ ID NO: 1158251 - DNA, 15 bp, Homo sapiens
ttacagagttttggt

SEQ ID NO: 1158252 - DNA, 15 bp, Homo sapiens
tttacagagttttgg

SEQ ID NO: 1158253 - DNA, 15 bp, Homo sapiens
atttacagagttttg

SEQ ID NO: 1158254 - DNA, 15 bp, Homo sapiens
tatttacagagtttt

SEQ ID NO: 1158255 - DNA, 15 bp, Homo sapiens
atatttacagagttt

SEQ ID NO: 1158256 - DNA, 15 bp, Homo sapiens
catatttacagagtt

SEQ ID NO: 1158257 - DNA, 15 bp, Homo sapiens
ccatatttacagagt

SEQ ID NO: 1158258 - DNA, 15 bp, Homo sapiens
accatatttacagag

SEQ ID NO: 1158259 - DNA, 15 bp, Homo sapiens
caccatatttacaga

SEQ ID NO: 1158260 - DNA, 15 bp, Homo sapiens
acaccatatttacag

SEQ ID NO: 1158261 - DNA, 15 bp, Homo sapiens
cacaccatatttaca

SEQ ID NO: 1158262 - DNA, 15 bp, Homo sapiens
gcacaccatatttac

SEQ ID NO: 1158263 - DNA, 15 bp, Homo sapiens
agcacaccatattta

SEQ ID NO: 1158264 - DNA, 15 bp, Homo sapiens
cagcacaccatattt

SEQ ID NO: 1158265 - DNA, 15 bp, Homo sapiens
tcagcacaccatatt

SEQ ID NO: 1158266 - DNA, 15 bp, Homo sapiens
atcagcacaccatat

SEQ ID NO: 1158267 - DNA, 15 bp, Homo sapiens
tatcagcacaccata

SEQ ID NO: 1158268 - DNA, 15 bp, Homo sapiens
gtatcagcacaccat

SEQ ID NO: 1158269 - DNA, 15 bp, Homo sapiens
cgtatcagcacacca

SEQ ID NO: 1158270 - DNA, 15 bp, Homo sapiens
tcgtatcagcacacc

SEQ ID NO: 1158271 - DNA, 15 bp, Homo sapiens
atcgtatcagcacac

SEQ ID NO: 1158272 - DNA, 15 bp, Homo sapiens
catcgtatcagcaca

SEQ ID NO: 1158273 - DNA, 15 bp, Homo sapiens
ccatcgtatcagcac

SEQ ID NO: 1158274 - DNA, 15 bp, Homo sapiens
accatcgtatcagca

SEQ ID NO: 1158275 - DNA, 15 bp, Homo sapiens
caccatcgtatcagc

SEQ ID NO: 1158276 - DNA, 15 bp, Homo sapiens
ccaccatcgtatcag

SEQ ID NO: 1158277 - DNA, 15 bp, Homo sapiens
cccaccatcgtatca

SEQ ID NO: 1158278 - DNA, 15 bp, Homo sapiens
tcccaccatcgtatc

SEQ ID NO: 1158279 - DNA, 15 bp, Homo sapiens
ttcccaccatcgtat

SEQ ID NO: 1158280 - DNA, 15 bp, Homo sapiens
attcccaccatcgta

SEQ ID NO: 1158281 - DNA, 15 bp, Homo sapiens
aattcccaccatcgt

SEQ ID NO: 1158282 - DNA, 15 bp, Homo sapiens
aaattcccaccatcg

SEQ ID NO: 1158283 - DNA, 15 bp, Homo sapiens
aaaattcccaccatc

SEQ ID NO: 1158284 - DNA, 15 bp, Homo sapiens
aaaaattcccaccat

SEQ ID NO: 1158285 - DNA, 15 bp, Homo sapiens
aaaaaattcccacca

SEQ ID NO: 1158286 - DNA, 15 bp, Homo sapiens
aaaaaaattcccacc

SEQ ID NO: 1158287 - DNA, 15 bp, Homo sapiens
gaaaaaaattcccac

SEQ ID NO: 1158288 - DNA, 15 bp, Homo sapiens
agaaaaaaattccca

SEQ ID NO: 1158289 - DNA, 15 bp, Homo sapiens
aagaaaaaaattccc

SEQ ID NO: 1158290 - DNA, 15 bp, Homo sapiens
aaagaaaaaaattcc

SEQ ID NO: 1158291 - DNA, 15 bp, Homo sapiens
taaagaaaaaaattc

SEQ ID NO: 1158292 - DNA, 15 bp, Homo sapiens
ataaagaaaaaaatt

SEQ ID NO: 1158293 - DNA, 15 bp, Homo sapiens
aataaagaaaaaaat

SEQ ID NO: 1158294 - DNA, 15 bp, Homo sapiens
caataaagaaaaaaa

SEQ ID NO: 1158295 - DNA, 15 bp, Homo sapiens
tcaataaagaaaaaa

SEQ ID NO: 1158296 - DNA, 15 bp, Homo sapiens
ctcaataaagaaaaa

SEQ ID NO: 1158297 - DNA, 15 bp, Homo sapiens
tctcaataaagaaaa

SEQ ID NO: 1158298 - DNA, 15 bp, Homo sapiens
atctcaataaagaaa

SEQ ID NO: 1158299 - DNA, 15 bp, Homo sapiens
gatctcaataaagaa

SEQ ID NO: 1158300 - DNA, 15 bp, Homo sapiens
tgatctcaataaaga

SEQ ID NO: 1158301 - DNA, 15 bp, Homo sapiens
ttgatctcaataaag

SEQ ID NO: 1158302 - DNA, 15 bp, Homo sapiens
cttgatctcaataaa

SEQ ID NO: 1158303 - DNA, 15 bp, Homo sapiens
tcttgatctcaataa

SEQ ID NO: 1158304 - DNA, 15 bp, Homo sapiens
gtcttgatctcaata

SEQ ID NO: 1158305 - DNA, 15 bp, Homo sapiens
agtcttgatctcaat

SEQ ID NO: 1158306 - DNA, 15 bp, Homo sapiens
tagtcttgatctcaa

SEQ ID NO: 1158307 - DNA, 15 bp, Homo sapiens
ctagtcttgatctca

SEQ ID NO: 1158308 - DNA, 15 bp, Homo sapiens
gctagtcttgatctc

SEQ ID NO: 1158309 - DNA, 15 bp, Homo sapiens
agctagtcttgatct

SEQ ID NO: 1158310 - DNA, 15 bp, Homo sapiens
cagctagtcttgatc

SEQ ID NO: 1158311 - DNA, 15 bp, Homo sapiens
ccagctagtcttgat

SEQ ID NO: 1158312 - DNA, 15 bp, Homo sapiens
tccagctagtcttga

SEQ ID NO: 1158313 - DNA, 15 bp, Homo sapiens
gtccagctagtcttg

SEQ ID NO: 1158314 - DNA, 15 bp, Homo sapiens
agtccagctagtctt

SEQ ID NO: 1158315 - DNA, 15 bp, Homo sapiens
aagtccagctagtct

SEQ ID NO: 1158316 - DNA, 15 bp, Homo sapiens
caagtccagctagtc

SEQ ID NO: 1158317 - DNA, 15 bp, Homo sapiens
acaagtccagctagt

SEQ ID NO: 1158318 - DNA, 15 bp, Homo sapiens
cacaagtccagctag

SEQ ID NO: 1158319 - DNA, 15 bp, Homo sapiens
acacaagtccagcta

SEQ ID NO: 1158320 - DNA, 15 bp, Homo sapiens
gacacaagtccagct

SEQ ID NO: 1158321 - DNA, 15 bp, Homo sapiens
agacacaagtccagc

SEQ ID NO: 1158322 - DNA, 15 bp, Homo sapiens
tagacacaagtccag

SEQ ID NO: 1158323 - DNA, 15 bp, Homo sapiens
atagacacaagtcca

SEQ ID NO: 1158324 - DNA, 15 bp, Homo sapiens
aatagacacaagtcc

SEQ ID NO: 1158325 - DNA, 15 bp, Homo sapiens
gaatagacacaagtc

SEQ ID NO: 1158326 - DNA, 15 bp, Homo sapiens
ggaatagacacaagt

SEQ ID NO: 1158327 - DNA, 15 bp, Homo sapiens
aggaatagacacaag

SEQ ID NO: 1158328 - DNA, 15 bp, Homo sapiens
aaggaatagacacaa

SEQ ID NO: 1158329 - DNA, 15 bp, Homo sapiens
aaaggaatagacaca

SEQ ID NO: 1158330 - DNA, 15 bp, Homo sapiens
caaaggaatagacac

SEQ ID NO: 1158331 - DNA, 15 bp, Homo sapiens
gcaaaggaatagaca

SEQ ID NO: 1158332 - DNA, 15 bp, Homo sapiens
ggcaaaggaatagac

SEQ ID NO: 1158333 - DNA, 15 bp, Homo sapiens
aggcaaaggaataga

SEQ ID NO: 1158334 - DNA, 15 bp, Homo sapiens
caggcaaaggaatag

SEQ ID NO: 1158335 - DNA, 15 bp, Homo sapiens
acaggcaaaggaata

SEQ ID NO: 1158336 - DNA, 15 bp, Homo sapiens
tacaggcaaaggaat

SEQ ID NO: 1158337 - DNA, 15 bp, Homo sapiens
ttacaggcaaaggaa

SEQ ID NO: 1158338 - DNA, 15 bp, Homo sapiens
cttacaggcaaagga

SEQ ID NO: 1158339 - DNA, 15 bp, Homo sapiens
gcttacaggcaaagg

SEQ ID NO: 1158340 - DNA, 15 bp, Homo sapiens
agcttacaggcaaag

SEQ ID NO: 1158341 - DNA, 15 bp, Homo sapiens
aagcttacaggcaaa

SEQ ID NO: 1158342 - DNA, 15 bp, Homo sapiens
aaagcttacaggcaa

SEQ ID NO: 1158343 - DNA, 15 bp, Homo sapiens
taaagcttacaggca

SEQ ID NO: 1158344 - DNA, 15 bp, Homo sapiens
gtaaagcttacaggc

SEQ ID NO: 1158345 - DNA, 15 bp, Homo sapiens
ggtaaagcttacagg

SEQ ID NO: 1158346 - DNA, 15 bp, Homo sapiens
aggtaaagcttacag

SEQ ID NO: 1158347 - DNA, 15 bp, Homo sapiens
aaggtaaagcttaca

SEQ ID NO: 1158348 - DNA, 15 bp, Homo sapiens
taaggtaaagcttac

SEQ ID NO: 1158349 - DNA, 15 bp, Homo sapiens
gtaaggtaaagctta

SEQ ID NO: 1158350 - DNA, 15 bp, Homo sapiens
tgtaaggtaaagctt

SEQ ID NO: 1158351 - DNA, 15 bp, Homo sapiens
gtgtaaggtaaagct

SEQ ID NO: 1158352 - DNA, 15 bp, Homo sapiens
cgtgtaaggtaaagc

SEQ ID NO: 1158353 - DNA, 15 bp, Homo sapiens
tcgtgtaaggtaaag

SEQ ID NO: 1158354 - DNA, 15 bp, Homo sapiens
ctcgtgtaaggtaaa

SEQ ID NO: 1158355 - DNA, 15 bp, Homo sapiens
cctcgtgtaaggtaa

SEQ ID NO: 1158356 - DNA, 15 bp, Homo sapiens
gcctcgtgtaaggta

SEQ ID NO: 1158357 - DNA, 15 bp, Homo sapiens
agcctcgtgtaaggt

SEQ ID NO: 1158358 - DNA, 15 bp, Homo sapiens
cagcctcgtgtaagg

SEQ ID NO: 1158359 - DNA, 15 bp, Homo sapiens
acagcctcgtgtaag

SEQ ID NO: 1158360 - DNA, 15 bp, Homo sapiens
tacagcctcgtgtaa

SEQ ID NO: 1158361 - DNA, 15 bp, Homo sapiens
atacagcctcgtgta

SEQ ID NO: 1158362 - DNA, 15 bp, Homo sapiens
aatacagcctcgtgt

SEQ ID NO: 1158363 - DNA, 15 bp, Homo sapiens
aaatacagcctcgtg

SEQ ID NO: 1158364 - DNA, 15 bp, Homo sapiens
aaaatacagcctcgt

SEQ ID NO: 1158365 - DNA, 15 bp, Homo sapiens
gaaaatacagcctcg

SEQ ID NO: 1158366 - DNA, 15 bp, Homo sapiens
tgaaaatacagcctc

SEQ ID NO: 1158367 - DNA, 15 bp, Homo sapiens
ttgaaaatacagcct

SEQ ID NO: 1158368 - DNA, 15 bp, Homo sapiens
cttgaaaatacagcc

SEQ ID NO: 1158369 - DNA, 15 bp, Homo sapiens
acttgaaaatacagc

SEQ ID NO: 1158370 - DNA, 15 bp, Homo sapiens
tacttgaaaatacag

SEQ ID NO: 1158371 - DNA, 15 bp, Homo sapiens
gtacttgaaaataca

SEQ ID NO: 1158372 - DNA, 15 bp, Homo sapiens
tgtacttgaaaatac

SEQ ID NO: 1158373 - DNA, 15 bp, Homo sapiens
atgtacttgaaaata

SEQ ID NO: 1158374 - DNA, 15 bp, Homo sapiens
tatgtacttgaaaat

SEQ ID NO: 1158375 - DNA, 15 bp, Homo sapiens
atatgtacttgaaaa

SEQ ID NO: 1158376 - DNA, 15 bp, Homo sapiens
aatatgtacttgaaa

SEQ ID NO: 1158377 - DNA, 15 bp, Homo sapiens
taatatgtacttgaa

SEQ ID NO: 1158378 - DNA, 15 bp, Homo sapiens
gtaatatgtacttga

SEQ ID NO: 1158379 - DNA, 15 bp, Homo sapiens
tgtaatatgtacttg

SEQ ID NO: 1158380 - DNA, 15 bp, Homo sapiens
ttgtaatatgtactt

SEQ ID NO: 1158381 - DNA, 15 bp, Homo sapiens
gttgtaatatgtact

SEQ ID NO: 1158382 - DNA, 15 bp, Homo sapiens
tgttgtaatatgtac

SEQ ID NO: 1158383 - DNA, 15 bp, Homo sapiens
gtgttgtaatatgta

SEQ ID NO: 1158384 - DNA, 15 bp, Homo sapiens
agtgttgtaatatgt

SEQ ID NO: 1158385 - DNA, 15 bp, Homo sapiens
aagtgttgtaatatg

SEQ ID NO: 1158386 - DNA, 15 bp, Homo sapiens
gaagtgttgtaatat

SEQ ID NO: 1158387 - DNA, 15 bp, Homo sapiens
ggaagtgttgtaata

SEQ ID NO: 1158388 - DNA, 15 bp, Homo sapiens
gggaagtgttgtaat

SEQ ID NO: 1158389 - DNA, 15 bp, Homo sapiens
agggaagtgttgtaa

SEQ ID NO: 1158390 - DNA, 15 bp, Homo sapiens
tagggaagtgttgta

SEQ ID NO: 1158391 - DNA, 15 bp, Homo sapiens
ctagggaagtgttgt

SEQ ID NO: 1158392 - DNA, 15 bp, Homo sapiens
cctagggaagtgttg

SEQ ID NO: 1158393 - DNA, 15 bp, Homo sapiens
tcctagggaagtgtt

SEQ ID NO: 1158394 - DNA, 15 bp, Homo sapiens
ctcctagggaagtgt

SEQ ID NO: 1158395 - DNA, 15 bp, Homo sapiens
gctcctagggaagtg

SEQ ID NO: 1158396 - DNA, 15 bp, Homo sapiens
tgctcctagggaagt

SEQ ID NO: 1158397 - DNA, 15 bp, Homo sapiens
gtgctcctagggaag

SEQ ID NO: 1158398 - DNA, 15 bp, Homo sapiens
ggtgctcctagggaa

SEQ ID NO: 1158399 - DNA, 15 bp, Homo sapiens
tggtgctcctaggga

SEQ ID NO: 1158400 - DNA, 15 bp, Homo sapiens
atggtgctcctaggg

SEQ ID NO: 1158401 - DNA, 15 bp, Homo sapiens
catggtgctcctagg

SEQ ID NO: 1158402 - DNA, 15 bp, Homo sapiens
gcatggtgctcctag

SEQ ID NO: 1158403 - DNA, 15 bp, Homo sapiens
ggcatggtgctccta

SEQ ID NO: 1158404 - DNA, 15 bp, Homo sapiens
aggcatggtgctcct

SEQ ID NO: 1158405 - DNA, 15 bp, Homo sapiens
gaggcatggtgctcc

SEQ ID NO: 1158406 - DNA, 15 bp, Homo sapiens
ggaggcatggtgctc

SEQ ID NO: 1158407 - DNA, 15 bp, Homo sapiens
aggaggcatggtgct

SEQ ID NO: 1158408 - DNA, 15 bp, Homo sapiens
caggaggcatggtgc

SEQ ID NO: 1158409 - DNA, 15 bp, Homo sapiens
gcaggaggcatggtg

SEQ ID NO: 1158410 - DNA, 15 bp, Homo sapiens
ggcaggaggcatggt

SEQ ID NO: 1158411 - DNA, 15 bp, Homo sapiens
aggcaggaggcatgg

SEQ ID NO: 1158412 - DNA, 15 bp, Homo sapiens
taggcaggaggcatg

SEQ ID NO: 1158413 - DNA, 15 bp, Homo sapiens
ataggcaggaggcat

SEQ ID NO: 1158414 - DNA, 15 bp, Homo sapiens
tataggcaggaggca

SEQ ID NO: 1158415 - DNA, 15 bp, Homo sapiens
ctataggcaggaggc

SEQ ID NO: 1158416 - DNA, 15 bp, Homo sapiens
gctataggcaggagg

SEQ ID NO: 1158417 - DNA, 15 bp, Homo sapiens
tgctataggcaggag

SEQ ID NO: 1158418 - DNA, 15 bp, Homo sapiens
ttgctataggcagga

SEQ ID NO: 1158419 - DNA, 15 bp, Homo sapiens
cttgctataggcagg

SEQ ID NO: 1158420 - DNA, 15 bp, Homo sapiens
acttgctataggcag

SEQ ID NO: 1158421 - DNA, 15 bp, Homo sapiens
tacttgctataggca

SEQ ID NO: 1158422 - DNA, 15 bp, Homo sapiens
ttacttgctataggc

SEQ ID NO: 1158423 - DNA, 15 bp, Homo sapiens
tttacttgctatagg

SEQ ID NO: 1158424 - DNA, 15 bp, Homo sapiens
ttttacttgctatag

SEQ ID NO: 1158425 - DNA, 15 bp, Homo sapiens
gttttacttgctata

SEQ ID NO: 1158426 - DNA, 15 bp, Homo sapiens
tgttttacttgctat

SEQ ID NO: 1158427 - DNA, 15 bp, Homo sapiens
ttgttttacttgcta

SEQ ID NO: 1158428 - DNA, 15 bp, Homo sapiens
tttgttttacttgct

SEQ ID NO: 1158429 - DNA, 15 bp, Homo sapiens
ttttgttttacttgc

SEQ ID NO: 1158430 - DNA, 15 bp, Homo sapiens
tttttgttttacttg

SEQ ID NO: 1158431 - DNA, 15 bp, Homo sapiens
gtttttgttttactt

SEQ ID NO: 1158432 - DNA, 15 bp, Homo sapiens
atggttttgtttttg

SEQ ID NO: 1158433 - DNA, 15 bp, Homo sapiens
gatggttttgttttt

SEQ ID NO: 1158434 - DNA, 15 bp, Homo sapiens
tgatggttttgtttt

SEQ ID NO: 1158435 - DNA, 15 bp, Homo sapiens
gtgatggttttgttt

SEQ ID NO: 1158436 - DNA, 15 bp, Homo sapiens
agtgatggttttgtt

SEQ ID NO: 1158437 - DNA, 15 bp, Homo sapiens
cagtgatggttttgt

SEQ ID NO: 1158438 - DNA, 15 bp, Homo sapiens
gcagtgatggttttg

SEQ ID NO: 1158439 - DNA, 15 bp, Homo sapiens
ggcagtgatggtttt

SEQ ID NO: 1158440 - DNA, 15 bp, Homo sapiens
tggcagtgatggttt

SEQ ID NO: 1158441 - DNA, 15 bp, Homo sapiens
ctggcagtgatggtt

SEQ ID NO: 1158442 - DNA, 15 bp, Homo sapiens
gctggcagtgatggt

SEQ ID NO: 1158443 - DNA, 15 bp, Homo sapiens
tgctggcagtgatgg

SEQ ID NO: 1158444 - DNA, 15 bp, Homo sapiens
ttgctggcagtgatg

SEQ ID NO: 1158445 - DNA, 15 bp, Homo sapiens
tttgctggcagtgat

SEQ ID NO: 1158446 - DNA, 15 bp, Homo sapiens
ttttgctggcagtga

SEQ ID NO: 1158447 - DNA, 15 bp, Homo sapiens
tttttgctggcagtg

SEQ ID NO: 1158448 - DNA, 15 bp, Homo sapiens
atttttgctggcagt

SEQ ID NO: 1158449 - DNA, 15 bp, Homo sapiens
tatttttgctggcag

SEQ ID NO: 1158450 - DNA, 15 bp, Homo sapiens
ttatttttgctggca

SEQ ID NO: 1158451 - DNA, 15 bp, Homo sapiens
attatttttgctggc

SEQ ID NO: 1158452 - DNA, 15 bp, Homo sapiens
gattatttttgctgg

SEQ ID NO: 1158453 - DNA, 15 bp, Homo sapiens
ggattatttttgctg

SEQ ID NO: 1158454 - DNA, 15 bp, Homo sapiens
aggattatttttgct

SEQ ID NO: 1158455 - DNA, 15 bp, Homo sapiens
gaggattatttttgc

SEQ ID NO: 1158456 - DNA, 15 bp, Homo sapiens
ggaggattatttttg

SEQ ID NO: 1158457 - DNA, 15 bp, Homo sapiens
gggaggattattttt

SEQ ID NO: 1158458 - DNA, 15 bp, Homo sapiens
tgggaggattatttt

SEQ ID NO: 1158459 - DNA, 15 bp, Homo sapiens
ttgggaggattattt

SEQ ID NO: 1158460 - DNA, 15 bp, Homo sapiens
tttgggaggattatt

SEQ ID NO: 1158461 - DNA, 15 bp, Homo sapiens
ctttgggaggattat

SEQ ID NO: 1158462 - DNA, 15 bp, Homo sapiens
tctttgggaggatta

SEQ ID NO: 1158463 - DNA, 15 bp, Homo sapiens
gtctttgggaggatt

SEQ ID NO: 1158464 - DNA, 15 bp, Homo sapiens
tgtctttgggaggat

SEQ ID NO: 1158465 - DNA, 15 bp, Homo sapiens
gtgtctttgggagga

SEQ ID NO: 1158466 - DNA, 15 bp, Homo sapiens
agtgtctttgggagg

SEQ ID NO: 1158467 - DNA, 15 bp, Homo sapiens
cagtgtctttgggag

SEQ ID NO: 1158468 - DNA, 15 bp, Homo sapiens
gcagtgtctttggga

SEQ ID NO: 1158469 - DNA, 15 bp, Homo sapiens
ggcagtgtctttggg

SEQ ID NO: 1158470 - DNA, 15 bp, Homo sapiens
gggcagtgtctttgg

SEQ ID NO: 1158471 - DNA, 15 bp, Homo sapiens
agggcagtgtctttg

SEQ ID NO: 1158472 - DNA, 15 bp, Homo sapiens
aagggcagtgtcttt

SEQ ID NO: 1158473 - DNA, 15 bp, Homo sapiens
aaagggcagtgtctt

SEQ ID NO: 1158474 - DNA, 15 bp, Homo sapiens
caaagggcagtgtct

SEQ ID NO: 1158475 - DNA, 15 bp, Homo sapiens
acaaagggcagtgtc

SEQ ID NO: 1158476 - DNA, 15 bp, Homo sapiens
tacaaagggcagtgt

SEQ ID NO: 1158477 - DNA, 15 bp, Homo sapiens
ttacaaagggcagtg

SEQ ID NO: 1158478 - DNA, 15 bp, Homo sapiens
gttacaaagggcagt

SEQ ID NO: 1158479 - DNA, 15 bp, Homo sapiens
agttacaaagggcag

SEQ ID NO: 1158480 - DNA, 15 bp, Homo sapiens
aagttacaaagggca

SEQ ID NO: 1158481 - DNA, 15 bp, Homo sapiens
caagttacaaagggc

SEQ ID NO: 1158482 - DNA, 15 bp, Homo sapiens
acaagttacaaaggg

SEQ ID NO: 1158483 - DNA, 15 bp, Homo sapiens
aacaagttacaaagg

SEQ ID NO: 1158484 - DNA, 15 bp, Homo sapiens
gaacaagttacaaag

SEQ ID NO: 1158485 - DNA, 15 bp, Homo sapiens
ggaacaagttacaaa

SEQ ID NO: 1158486 - DNA, 15 bp, Homo sapiens
aggaacaagttacaa

SEQ ID NO: 1158487 - DNA, 15 bp, Homo sapiens
aaggaacaagttaca

SEQ ID NO: 1158488 - DNA, 15 bp, Homo sapiens
aaaggaacaagttac

SEQ ID NO: 1158489 - DNA, 15 bp, Homo sapiens
aaaaggaacaagtta

SEQ ID NO: 1158490 - DNA, 15 bp, Homo sapiens
gaaaaggaacaagtt

SEQ ID NO: 1158491 - DNA, 15 bp, Homo sapiens
ggaaaaggaacaagt

SEQ ID NO: 1158492 - DNA, 15 bp, Homo sapiens
tggaaaaggaacaag

SEQ ID NO: 1158493 - DNA, 15 bp, Homo sapiens
atggaaaaggaacaa

SEQ ID NO: 1158494 - DNA, 15 bp, Homo sapiens
catggaaaaggaaca

SEQ ID NO: 1158495 - DNA, 15 bp, Homo sapiens
ccatggaaaaggaac

SEQ ID NO: 1158496 - DNA, 15 bp, Homo sapiens
cccatggaaaaggaa

SEQ ID NO: 1158497 - DNA, 15 bp, Homo sapiens
tcccatggaaaagga

SEQ ID NO: 1158498 - DNA, 15 bp, Homo sapiens
atcccatggaaaagg

SEQ ID NO: 1158499 - DNA, 15 bp, Homo sapiens
aatcccatggaaaag

SEQ ID NO: 1158500 - DNA, 15 bp, Homo sapiens
gaatcccatggaaaa

SEQ ID NO: 1158501 - DNA, 15 bp, Homo sapiens
agaatcccatggaaa

SEQ ID NO: 1158502 - DNA, 15 bp, Homo sapiens
aagaatcccatggaa

SEQ ID NO: 1158503 - DNA, 15 bp, Homo sapiens
caagaatcccatgga

SEQ ID NO: 1158504 - DNA, 15 bp, Homo sapiens
acaagaatcccatgg

SEQ ID NO: 1158505 - DNA, 15 bp, Homo sapiens
gacaagaatcccatg

SEQ ID NO: 1158506 - DNA, 15 bp, Homo sapiens
ggacaagaatcccat

SEQ ID NO: 1158507 - DNA, 15 bp, Homo sapiens
aggacaagaatccca

SEQ ID NO: 1158508 - DNA, 15 bp, Homo sapiens
aaggacaagaatccc

SEQ ID NO: 1158509 - DNA, 15 bp, Homo sapiens
taaggacaagaatcc

SEQ ID NO: 1158510 - DNA, 15 bp, Homo sapiens
ctaaggacaagaatc

SEQ ID NO: 1158511 - DNA, 15 bp, Homo sapiens
actaaggacaagaat

SEQ ID NO: 1158512 - DNA, 15 bp, Homo sapiens
cactaaggacaagaa

SEQ ID NO: 1158513 - DNA, 15 bp, Homo sapiens
gcactaaggacaaga

SEQ ID NO: 1158514 - DNA, 15 bp, Homo sapiens
agcactaaggacaag

SEQ ID NO: 1158515 - DNA, 15 bp, Homo sapiens
tagcactaaggacaa

SEQ ID NO: 1158516 - DNA, 15 bp, Homo sapiens
atagcactaaggaca

SEQ ID NO: 1158517 - DNA, 15 bp, Homo sapiens
gatagcactaaggac

SEQ ID NO: 1158518 - DNA, 15 bp, Homo sapiens
tgatagcactaagga

SEQ ID NO: 1158519 - DNA, 15 bp, Homo sapiens
ctgatagcactaagg

SEQ ID NO: 1158520 - DNA, 15 bp, Homo sapiens
tctgatagcactaag

SEQ ID NO: 1158521 - DNA, 15 bp, Homo sapiens
ctctgatagcactaa

SEQ ID NO: 1158522 - DNA, 15 bp, Homo sapiens
tctctgatagcacta

SEQ ID NO: 1158523 - DNA, 15 bp, Homo sapiens
ctctctgatagcact

SEQ ID NO: 1158524 - DNA, 15 bp, Homo sapiens
cctctctgatagcac

SEQ ID NO: 1158525 - DNA, 15 bp, Homo sapiens
acctctctgatagca

SEQ ID NO: 1158526 - DNA, 15 bp, Homo sapiens
cacctctctgatagc

SEQ ID NO: 1158527 - DNA, 15 bp, Homo sapiens
tcacctctctgatag

SEQ ID NO: 1158528 - DNA, 15 bp, Homo sapiens
ctcacctctctgata

SEQ ID NO: 1158529 - DNA, 15 bp, Homo sapiens
cctcacctctctgat

SEQ ID NO: 1158530 - DNA, 15 bp, Homo sapiens
ccctcacctctctga

SEQ ID NO: 1158531 - DNA, 15 bp, Homo sapiens
tccctcacctctctg

SEQ ID NO: 1158532 - DNA, 15 bp, Homo sapiens
ttccctcacctctct

SEQ ID NO: 1158533 - DNA, 15 bp, Homo sapiens
tttccctcacctctc

SEQ ID NO: 1158534 - DNA, 15 bp, Homo sapiens
ctttccctcacctct

SEQ ID NO: 1158535 - DNA, 15 bp, Homo sapiens
actttccctcacctc

SEQ ID NO: 1158536 - DNA, 15 bp, Homo sapiens
aactttccctcacct

SEQ ID NO: 1158537 - DNA, 15 bp, Homo sapiens
taactttccctcacc

SEQ ID NO: 1158538 - DNA, 15 bp, Homo sapiens
ttaactttccctcac

SEQ ID NO: 1158539 - DNA, 15 bp, Homo sapiens
cttaactttccctca

SEQ ID NO: 1158540 - DNA, 15 bp, Homo sapiens
ccttaactttccctc

SEQ ID NO: 1158541 - DNA, 15 bp, Homo sapiens
gccttaactttccct

SEQ ID NO: 1158542 - DNA, 15 bp, Homo sapiens
agccttaactttccc

SEQ ID NO: 1158543 - DNA, 15 bp, Homo sapiens
tagccttaactttcc

SEQ ID NO: 1158544 - DNA, 15 bp, Homo sapiens
ctagccttaactttc

SEQ ID NO: 1158545 - DNA, 15 bp, Homo sapiens
actagccttaacttt

SEQ ID NO: 1158546 - DNA, 15 bp, Homo sapiens
tactagccttaactt

SEQ ID NO: 1158547 - DNA, 15 bp, Homo sapiens
ctactagccttaact

SEQ ID NO: 1158548 - DNA, 15 bp, Homo sapiens
actactagccttaac

SEQ ID NO: 1158549 - DNA, 15 bp, Homo sapiens
aactactagccttaa

SEQ ID NO: 1158550 - DNA, 15 bp, Homo sapiens
aaactactagcctta

SEQ ID NO: 1158551 - DNA, 15 bp, Homo sapiens
aaaactactagcctt

SEQ ID NO: 1158552 - DNA, 15 bp, Homo sapiens
gaaaactactagcct

SEQ ID NO: 1158553 - DNA, 15 bp, Homo sapiens
tgaaaactactagcc

SEQ ID NO: 1158554 - DNA, 15 bp, Homo sapiens
ctgaaaactactagc

SEQ ID NO: 1158555 - DNA, 15 bp, Homo sapiens
cctgaaaactactag

SEQ ID NO: 1158556 - DNA, 15 bp, Homo sapiens
ccctgaaaactacta

SEQ ID NO: 1158557 - DNA, 15 bp, Homo sapiens
tccctgaaaactact

SEQ ID NO: 1158558 - DNA, 15 bp, Homo sapiens
ttccctgaaaactac

SEQ ID NO: 1158559 - DNA, 15 bp, Homo sapiens
tttccctgaaaacta

SEQ ID NO: 1158560 - DNA, 15 bp, Homo sapiens
ttttccctgaaaact

SEQ ID NO: 1158561 - DNA, 15 bp, Homo sapiens
cttttccctgaaaac

SEQ ID NO: 1158562 - DNA, 15 bp, Homo sapiens
tcttttccctgaaaa

SEQ ID NO: 1158563 - DNA, 15 bp, Homo sapiens
ctcttttccctgaaa

SEQ ID NO: 1158564 - DNA, 15 bp, Homo sapiens
tctcttttccctgaa

SEQ ID NO: 1158565 - DNA, 15 bp, Homo sapiens
ctctcttttccctga

SEQ ID NO: 1158566 - DNA, 15 bp, Homo sapiens
cctctcttttccctg

SEQ ID NO: 1158567 - DNA, 15 bp, Homo sapiens
acctctcttttccct

SEQ ID NO: 1158568 - DNA, 15 bp, Homo sapiens
tacctctcttttccc

SEQ ID NO: 1158569 - DNA, 15 bp, Homo sapiens
ctacctctcttttcc

SEQ ID NO: 1158570 - DNA, 15 bp, Homo sapiens
tctacctctcttttc

SEQ ID NO: 1158571 - DNA, 15 bp, Homo sapiens
ctctacctctctttt

SEQ ID NO: 1158572 - DNA, 15 bp, Homo sapiens
cctctacctctcttt

SEQ ID NO: 1158573 - DNA, 15 bp, Homo sapiens
acctctacctctctt

SEQ ID NO: 1158574 - DNA, 15 bp, Homo sapiens
tacctctacctctct

SEQ ID NO: 1158575 - DNA, 15 bp, Homo sapiens
ctacctctacctctc

SEQ ID NO: 1158576 - DNA, 15 bp, Homo sapiens
cctacctctacctct

SEQ ID NO: 1158577 - DNA, 15 bp, Homo sapiens
tcctacctctacctc

SEQ ID NO: 1158578 - DNA, 15 bp, Homo sapiens
gtcctacctctacct

SEQ ID NO: 1158579 - DNA, 15 bp, Homo sapiens
ggtcctacctctacc

SEQ ID NO: 1158580 - DNA, 15 bp, Homo sapiens
tggtcctacctctac

SEQ ID NO: 1158581 - DNA, 15 bp, Homo sapiens
ctggtcctacctcta

SEQ ID NO: 1158582 - DNA, 15 bp, Homo sapiens
tctggtcctacctct

SEQ ID NO: 1158583 - DNA, 15 bp, Homo sapiens
ctctggtcctacctc

SEQ ID NO: 1158584 - DNA, 15 bp, Homo sapiens
actctggtcctacct

SEQ ID NO: 1158585 - DNA, 15 bp, Homo sapiens
gactctggtcctacc

SEQ ID NO: 1158586 - DNA, 15 bp, Homo sapiens
tgactctggtcctac

SEQ ID NO: 1158587 - DNA, 15 bp, Homo sapiens
ttgactctggtccta

SEQ ID NO: 1158588 - DNA, 15 bp, Homo sapiens
gttgactctggtcct

SEQ ID NO: 1158589 - DNA, 15 bp, Homo sapiens
ggttgactctggtcc

SEQ ID NO: 1158590 - DNA, 15 bp, Homo sapiens
tggttgactctggtc

SEQ ID NO: 1158591 - DNA, 15 bp, Homo sapiens
ctggttgactctggt

SEQ ID NO: 1158592 - DNA, 15 bp, Homo sapiens
gctggttgactctgg

SEQ ID NO: 1158593 - DNA, 15 bp, Homo sapiens
agctggttgactctg

SEQ ID NO: 1158594 - DNA, 15 bp, Homo sapiens
aagctggttgactct

SEQ ID NO: 1158595 - DNA, 15 bp, Homo sapiens
aaagctggttgactc

SEQ ID NO: 1158596 - DNA, 15 bp, Homo sapiens
aaaagctggttgact

SEQ ID NO: 1158597 - DNA, 15 bp, Homo sapiens
caaaagctggttgac

SEQ ID NO: 1158598 - DNA, 15 bp, Homo sapiens
ccaaaagctggttga

SEQ ID NO: 1158599 - DNA, 15 bp, Homo sapiens
cccaaaagctggttg

SEQ ID NO: 1158600 - DNA, 15 bp, Homo sapiens
ccccaaaagctggtt

SEQ ID NO: 1158601 - DNA, 15 bp, Homo sapiens
gccccaaaagctggt

SEQ ID NO: 1158602 - DNA, 15 bp, Homo sapiens
ggccccaaaagctgg

SEQ ID NO: 1158603 - DNA, 15 bp, Homo sapiens
gggccccaaaagctg

SEQ ID NO: 1158604 - DNA, 15 bp, Homo sapiens
agggccccaaaagct

SEQ ID NO: 1158605 - DNA, 15 bp, Homo sapiens
cagggccccaaaagc

SEQ ID NO: 1158606 - DNA, 15 bp, Homo sapiens
gcagggccccaaaag

SEQ ID NO: 1158607 - DNA, 15 bp, Homo sapiens
agcagggccccaaaa

SEQ ID NO: 1158608 - DNA, 15 bp, Homo sapiens
aagcagggccccaaa

SEQ ID NO: 1158609 - DNA, 15 bp, Homo sapiens
gaagcagggccccaa

SEQ ID NO: 1158610 - DNA, 15 bp, Homo sapiens
agaagcagggcccca

SEQ ID NO: 1158611 - DNA, 15 bp, Homo sapiens
cagaagcagggcccc

SEQ ID NO: 1158612 - DNA, 15 bp, Homo sapiens
tcagaagcagggccc

SEQ ID NO: 1158613 - DNA, 15 bp, Homo sapiens
atcagaagcagggcc

SEQ ID NO: 1158614 - DNA, 15 bp, Homo sapiens
gatcagaagcagggc

SEQ ID NO: 1158615 - DNA, 15 bp, Homo sapiens
tgatcagaagcaggg

SEQ ID NO: 1158616 - DNA, 15 bp, Homo sapiens
ctgatcagaagcagg

SEQ ID NO: 1158617 - DNA, 15 bp, Homo sapiens
gctgatcagaagcag

SEQ ID NO: 1158618 - DNA, 15 bp, Homo sapiens
agctgatcagaagca

SEQ ID NO: 1158619 - DNA, 15 bp, Homo sapiens
aagctgatcagaagc

SEQ ID NO: 1158620 - DNA, 15 bp, Homo sapiens
aaagctgatcagaag

SEQ ID NO: 1158621 - DNA, 15 bp, Homo sapiens
aaaagctgatcagaa

SEQ ID NO: 1158622 - DNA, 15 bp, Homo sapiens
aaaaagctgatcaga

SEQ ID NO: 1158623 - DNA, 15 bp, Homo sapiens
gaaaaagctgatcag

SEQ ID NO: 1158624 - DNA, 15 bp, Homo sapiens
tgaaaaagctgatca

SEQ ID NO: 1158625 - DNA, 15 bp, Homo sapiens
gtgaaaaagctgatc

SEQ ID NO: 1158626 - DNA, 15 bp, Homo sapiens
agtgaaaaagctgat

SEQ ID NO: 1158627 - DNA, 15 bp, Homo sapiens
cagtgaaaaagctga

SEQ ID NO: 1158628 - DNA, 15 bp, Homo sapiens
gcagtgaaaaagctg

SEQ ID NO: 1158629 - DNA, 15 bp, Homo sapiens
agcagtgaaaaagct

SEQ ID NO: 1158630 - DNA, 15 bp, Homo sapiens
cagcagtgaaaaagc

SEQ ID NO: 1158631 - DNA, 15 bp, Homo sapiens
acagcagtgaaaaag

SEQ ID NO: 1158632 - DNA, 15 bp, Homo sapiens
cacagcagtgaaaaa

SEQ ID NO: 1158633 - DNA, 15 bp, Homo sapiens
gcacagcagtgaaaa

SEQ ID NO: 1158634 - DNA, 15 bp, Homo sapiens
tgcacagcagtgaaa

SEQ ID NO: 1158635 - DNA, 15 bp, Homo sapiens
atgcacagcagtgaa

SEQ ID NO: 1158636 - DNA, 15 bp, Homo sapiens
catgcacagcagtga

SEQ ID NO: 1158637 - DNA, 15 bp, Homo sapiens
ccatgcacagcagtg

SEQ ID NO: 1158638 - DNA, 15 bp, Homo sapiens
cccatgcacagcagt

SEQ ID NO: 1158639 - DNA, 15 bp, Homo sapiens
ccccatgcacagcag

SEQ ID NO: 1158640 - DNA, 15 bp, Homo sapiens
cccccatgcacagca

SEQ ID NO: 1158641 - DNA, 15 bp, Homo sapiens
tcccccatgcacagc

SEQ ID NO: 1158642 - DNA, 15 bp, Homo sapiens
ttcccccatgcacag

SEQ ID NO: 1158643 - DNA, 15 bp, Homo sapiens
cttcccccatgcaca

SEQ ID NO: 1158644 - DNA, 15 bp, Homo sapiens
ccttcccccatgcac

SEQ ID NO: 1158645 - DNA, 15 bp, Homo sapiens
cccttcccccatgca

SEQ ID NO: 1158646 - DNA, 15 bp, Homo sapiens
ccccttcccccatgc

SEQ ID NO: 1158647 - DNA, 15 bp, Homo sapiens
tccccttcccccatg

SEQ ID NO: 1158648 - DNA, 15 bp, Homo sapiens
ttccccttcccccat

SEQ ID NO: 1158649 - DNA, 15 bp, Homo sapiens
tttccccttccccca

SEQ ID NO: 1158650 - DNA, 15 bp, Homo sapiens
atttccccttccccc

SEQ ID NO: 1158651 - DNA, 15 bp, Homo sapiens
gatttccccttcccc

SEQ ID NO: 1158652 - DNA, 15 bp, Homo sapiens
tgatttccccttccc

SEQ ID NO: 1158653 - DNA, 15 bp, Homo sapiens
ttgatttccccttcc

SEQ ID NO: 1158654 - DNA, 15 bp, Homo sapiens
cttgatttccccttc

SEQ ID NO: 1158655 - DNA, 15 bp, Homo sapiens
acttgatttcccctt

SEQ ID NO: 1158656 - DNA, 15 bp, Homo sapiens
gacttgatttcccct

SEQ ID NO: 1158657 - DNA, 15 bp, Homo sapiens
tgacttgatttcccc

SEQ ID NO: 1158658 - DNA, 15 bp, Homo sapiens
ttgacttgatttccc

SEQ ID NO: 1158659 - DNA, 15 bp, Homo sapiens
cttgacttgatttcc

SEQ ID NO: 1158660 - DNA, 15 bp, Homo sapiens
ccttgacttgatttc

SEQ ID NO: 1158661 - DNA, 15 bp, Homo sapiens
accttgacttgattt

SEQ ID NO: 1158662 - DNA, 15 bp, Homo sapiens
caccttgacttgatt

SEQ ID NO: 1158663 - DNA, 15 bp, Homo sapiens
tcaccttgacttgat

SEQ ID NO: 1158664 - DNA, 15 bp, Homo sapiens
ttcaccttgacttga

SEQ ID NO: 1158665 - DNA, 15 bp, Homo sapiens
cttcaccttgacttg

SEQ ID NO: 1158666 - DNA, 15 bp, Homo sapiens
ccttcaccttgactt

SEQ ID NO: 1158667 - DNA, 15 bp, Homo sapiens
cccttcaccttgact

SEQ ID NO: 1158668 - DNA, 15 bp, Homo sapiens
acccttcaccttgac

SEQ ID NO: 1158669 - DNA, 15 bp, Homo sapiens
aacccttcaccttga

SEQ ID NO: 1158670 - DNA, 15 bp, Homo sapiens
taacccttcaccttg

SEQ ID NO: 1158671 - DNA, 15 bp, Homo sapiens
ctaacccttcacctt

SEQ ID NO: 1158672 - DNA, 15 bp, Homo sapiens
cctaacccttcacct

SEQ ID NO: 1158673 - DNA, 15 bp, Homo sapiens
tcctaacccttcacc

SEQ ID NO: 1158674 - DNA, 15 bp, Homo sapiens
atcctaacccttcac

SEQ ID NO: 1158675 - DNA, 15 bp, Homo sapiens
aatcctaacccttca

SEQ ID NO: 1158676 - DNA, 15 bp, Homo sapiens
taatcctaacccttc

SEQ ID NO: 1158677 - DNA, 15 bp, Homo sapiens
ataatcctaaccctt

SEQ ID NO: 1158678 - DNA, 15 bp, Homo sapiens
aataatcctaaccct

SEQ ID NO: 1158679 - DNA, 15 bp, Homo sapiens
gaataatcctaaccc

SEQ ID NO: 1158680 - DNA, 15 bp, Homo sapiens
agaataatcctaacc

SEQ ID NO: 1158681 - DNA, 15 bp, Homo sapiens
cagaataatcctaac

SEQ ID NO: 1158682 - DNA, 15 bp, Homo sapiens
ccagaataatcctaa

SEQ ID NO: 1158683 - DNA, 15 bp, Homo sapiens
cccagaataatccta

SEQ ID NO: 1158684 - DNA, 15 bp, Homo sapiens
ccccagaataatcct

SEQ ID NO: 1158685 - DNA, 15 bp, Homo sapiens
tccccagaataatcc

SEQ ID NO: 1158686 - DNA, 15 bp, Homo sapiens
gtccccagaataatc

SEQ ID NO: 1158687 - DNA, 15 bp, Homo sapiens
tgtccccagaataat

SEQ ID NO: 1158688 - DNA, 15 bp, Homo sapiens
ctgtccccagaataa

SEQ ID NO: 1158689 - DNA, 15 bp, Homo sapiens
gctgtccccagaata

SEQ ID NO: 1158690 - DNA, 15 bp, Homo sapiens
tgctgtccccagaat

SEQ ID NO: 1158691 - DNA, 15 bp, Homo sapiens
ctgctgtccccagaa

SEQ ID NO: 1158692 - DNA, 15 bp, Homo sapiens
tctgctgtccccaga

SEQ ID NO: 1158693 - DNA, 15 bp, Homo sapiens
gtctgctgtccccag

SEQ ID NO: 1158694 - DNA, 15 bp, Homo sapiens
ggtctgctgtcccca

SEQ ID NO: 1158695 - DNA, 15 bp, Homo sapiens
aggtctgctgtcccc

SEQ ID NO: 1158696 - DNA, 15 bp, Homo sapiens
caggtctgctgtccc

SEQ ID NO: 1158697 - DNA, 15 bp, Homo sapiens
tcaggtctgctgtcc

SEQ ID NO: 1158698 - DNA, 15 bp, Homo sapiens
ctcaggtctgctgtc

SEQ ID NO: 1158699 - DNA, 15 bp, Homo sapiens
actcaggtctgctgt

SEQ ID NO: 1158700 - DNA, 15 bp, Homo sapiens
cactcaggtctgctg

SEQ ID NO: 1158701 - DNA, 15 bp, Homo sapiens
ccactcaggtctgct

SEQ ID NO: 1158702 - DNA, 15 bp, Homo sapiens
cccactcaggtctgc

SEQ ID NO: 1158703 - DNA, 15 bp, Homo sapiens
tcccactcaggtctg

SEQ ID NO: 1158704 - DNA, 15 bp, Homo sapiens
gtcccactcaggtct

SEQ ID NO: 1158705 - DNA, 15 bp, Homo sapiens
tgtcccactcaggtc

SEQ ID NO: 1158706 - DNA, 15 bp, Homo sapiens
gtgtcccactcaggt

SEQ ID NO: 1158707 - DNA, 15 bp, Homo sapiens
ggtgtcccactcagg

SEQ ID NO: 1158708 - DNA, 15 bp, Homo sapiens
aggtgtcccactcag

SEQ ID NO: 1158709 - DNA, 15 bp, Homo sapiens
aaggtgtcccactca

SEQ ID NO: 1158710 - DNA, 15 bp, Homo sapiens
caaggtgtcccactc

SEQ ID NO: 1158711 - DNA, 15 bp, Homo sapiens
tcaaggtgtcccact

SEQ ID NO: 1158712 - DNA, 15 bp, Homo sapiens
atcaaggtgtcccac

SEQ ID NO: 1158713 - DNA, 15 bp, Homo sapiens
catcaaggtgtccca

SEQ ID NO: 1158714 - DNA, 15 bp, Homo sapiens
gcatcaaggtgtccc

SEQ ID NO: 1158715 - DNA, 15 bp, Homo sapiens
tgcatcaaggtgtcc

SEQ ID NO: 1158716 - DNA, 15 bp, Homo sapiens
ctgcatcaaggtgtc

SEQ ID NO: 1158717 - DNA, 15 bp, Homo sapiens
cctgcatcaaggtgt

SEQ ID NO: 1158718 - DNA, 15 bp, Homo sapiens
gcctgcatcaaggtg

SEQ ID NO: 1158719 - DNA, 15 bp, Homo sapiens
agcctgcatcaaggt

SEQ ID NO: 1158720 - DNA, 15 bp, Homo sapiens
aagcctgcatcaagg

SEQ ID NO: 1158721 - DNA, 15 bp, Homo sapiens
gaagcctgcatcaag

SEQ ID NO: 1158722 - DNA, 15 bp, Homo sapiens
agaagcctgcatcaa

SEQ ID NO: 1158723 - DNA, 15 bp, Homo sapiens
aagaagcctgcatca

SEQ ID NO: 1158724 - DNA, 15 bp, Homo sapiens
aaagaagcctgcatc

SEQ ID NO: 1158725 - DNA, 15 bp, Homo sapiens
taaagaagcctgcat

SEQ ID NO: 1158726 - DNA, 15 bp, Homo sapiens
ttaaagaagcctgca

SEQ ID NO: 1158727 - DNA, 15 bp, Homo sapiens
gttaaagaagcctgc

SEQ ID NO: 1158728 - DNA, 15 bp, Homo sapiens
cgttaaagaagcctg

SEQ ID NO: 1158729 - DNA, 15 bp, Homo sapiens
gcgttaaagaagcct

SEQ ID NO: 1158730 - DNA, 15 bp, Homo sapiens
tgcgttaaagaagcc

SEQ ID NO: 1158731 - DNA, 15 bp, Homo sapiens
ctgcgttaaagaagc

SEQ ID NO: 1158732 - DNA, 15 bp, Homo sapiens
tctgcgttaaagaag

SEQ ID NO: 1158733 - DNA, 15 bp, Homo sapiens
ctctgcgttaaagaa

SEQ ID NO: 1158734 - DNA, 15 bp, Homo sapiens
actctgcgttaaaga

SEQ ID NO: 1158735 - DNA, 15 bp, Homo sapiens
tactctgcgttaaag

SEQ ID NO: 1158736 - DNA, 15 bp, Homo sapiens
ctactctgcgttaaa

SEQ ID NO: 1158737 - DNA, 15 bp, Homo sapiens
cctactctgcgttaa

SEQ ID NO: 1158738 - DNA, 15 bp, Homo sapiens
tcctactctgcgtta

SEQ ID NO: 1158739 - DNA, 15 bp, Homo sapiens
gtcctactctgcgtt

SEQ ID NO: 1158740 - DNA, 15 bp, Homo sapiens
tgtcctactctgcgt

SEQ ID NO: 1158741 - DNA, 15 bp, Homo sapiens
gtgtcctactctgcg

SEQ ID NO: 1158742 - DNA, 15 bp, Homo sapiens
tgtgtcctactctgc

SEQ ID NO: 1158743 - DNA, 15 bp, Homo sapiens
ctgtgtcctactctg

SEQ ID NO: 1158744 - DNA, 15 bp, Homo sapiens
tctgtgtcctactct

SEQ ID NO: 1158745 - DNA, 15 bp, Homo sapiens
atctgtgtcctactc

SEQ ID NO: 1158746 - DNA, 15 bp, Homo sapiens
catctgtgtcctact

SEQ ID NO: 1158747 - DNA, 15 bp, Homo sapiens
ccatctgtgtcctac

SEQ ID NO: 1158748 - DNA, 15 bp, Homo sapiens
gccatctgtgtccta

SEQ ID NO: 1158749 - DNA, 15 bp, Homo sapiens
agccatctgtgtcct

SEQ ID NO: 1158750 - DNA, 15 bp, Homo sapiens
cagccatctgtgtcc

SEQ ID NO: 1158751 - DNA, 15 bp, Homo sapiens
ccagccatctgtgtc

SEQ ID NO: 1158752 - DNA, 15 bp, Homo sapiens
tccagccatctgtgt

SEQ ID NO: 1158753 - DNA, 15 bp, Homo sapiens
ctccagccatctgtg

SEQ ID NO: 1158754 - DNA, 15 bp, Homo sapiens
cctccagccatctgt

SEQ ID NO: 1158755 - DNA, 15 bp, Homo sapiens
tcctccagccatctg

SEQ ID NO: 1158756 - DNA, 15 bp, Homo sapiens
ctcctccagccatct

SEQ ID NO: 1158757 - DNA, 15 bp, Homo sapiens
cctcctccagccatc

SEQ ID NO: 1158758 - DNA, 15 bp, Homo sapiens
ccctcctccagccat

SEQ ID NO: 1158759 - DNA, 15 bp, Homo sapiens
gccctcctccagcca

SEQ ID NO: 1158760 - DNA, 15 bp, Homo sapiens
tgccctcctccagcc

SEQ ID NO: 1158761 - DNA, 15 bp, Homo sapiens
ctgccctcctccagc

SEQ ID NO: 1158762 - DNA, 15 bp, Homo sapiens
tctgccctcctccag

SEQ ID NO: 1158763 - DNA, 15 bp, Homo sapiens
gtctgccctcctcca

SEQ ID NO: 1158764 - DNA, 15 bp, Homo sapiens
tgtctgccctcctcc

SEQ ID NO: 1158765 - DNA, 15 bp, Homo sapiens
ttgtctgccctcctc

SEQ ID NO: 1158766 - DNA, 15 bp, Homo sapiens
cttgtctgccctcct

SEQ ID NO: 1158767 - DNA, 15 bp, Homo sapiens
ccttgtctgccctcc

SEQ ID NO: 1158768 - DNA, 15 bp, Homo sapiens
tccttgtctgccctc

SEQ ID NO: 1158769 - DNA, 15 bp, Homo sapiens
gtccttgtctgccct

SEQ ID NO: 1158770 - DNA, 15 bp, Homo sapiens
tgtccttgtctgccc

SEQ ID NO: 1158771 - DNA, 15 bp, Homo sapiens
ttgtccttgtctgcc

SEQ ID NO: 1158772 - DNA, 15 bp, Homo sapiens
tttgtccttgtctgc

SEQ ID NO: 1158773 - DNA, 15 bp, Homo sapiens
ctttgtccttgtctg

SEQ ID NO: 1158774 - DNA, 15 bp, Homo sapiens
tctttgtccttgtct

SEQ ID NO: 1158775 - DNA, 15 bp, Homo sapiens
ctctttgtccttgtc

SEQ ID NO: 1158776 - DNA, 15 bp, Homo sapiens
tctctttgtccttgt

SEQ ID NO: 1158777 - DNA, 15 bp, Homo sapiens
ttctctttgtccttg

SEQ ID NO: 1158778 - DNA, 15 bp, Homo sapiens
cttctctttgtcctt

SEQ ID NO: 1158779 - DNA, 15 bp, Homo sapiens
acttctctttgtcct

SEQ ID NO: 1158780 - DNA, 15 bp, Homo sapiens
cacttctctttgtcc

SEQ ID NO: 1158781 - DNA, 15 bp, Homo sapiens
acacttctctttgtc

SEQ ID NO: 1158782 - DNA, 15 bp, Homo sapiens
cacacttctctttgt

SEQ ID NO: 1158783 - DNA, 15 bp, Homo sapiens
tcacacttctctttg

SEQ ID NO: 1158784 - DNA, 15 bp, Homo sapiens
ttcacacttctcttt

SEQ ID NO: 1158785 - DNA, 15 bp, Homo sapiens
tttcacacttctctt

SEQ ID NO: 1158786 - DNA, 15 bp, Homo sapiens
ttttcacacttctct

SEQ ID NO: 1158787 - DNA, 15 bp, Homo sapiens
tttttcacacttctc

SEQ ID NO: 1158788 - DNA, 15 bp, Homo sapiens
ttttttcacacttct

SEQ ID NO: 1158789 - DNA, 15 bp, Homo sapiens
cttttttcacacttc

SEQ ID NO: 1158790 - DNA, 15 bp, Homo sapiens
tcttttttcacactt

SEQ ID NO: 1158791 - DNA, 15 bp, Homo sapiens
ctcttttttcacact

SEQ ID NO: 1158792 - DNA, 15 bp, Homo sapiens
cctcttttttcacac

SEQ ID NO: 1158793 - DNA, 15 bp, Homo sapiens
ccctcttttttcaca

SEQ ID NO: 1158794 - DNA, 15 bp, Homo sapiens
accctcttttttcac

SEQ ID NO: 1158795 - DNA, 15 bp, Homo sapiens
gaccctcttttttca

SEQ ID NO: 1158796 - DNA, 15 bp, Homo sapiens
tgaccctcttttttc

SEQ ID NO: 1158797 - DNA, 15 bp, Homo sapiens
ttgaccctctttttt

SEQ ID NO: 1158798 - DNA, 15 bp, Homo sapiens
tttgaccctcttttt

SEQ ID NO: 1158799 - DNA, 15 bp, Homo sapiens
atttgaccctctttt

SEQ ID NO: 1158800 - DNA, 15 bp, Homo sapiens
catttgaccctcttt

SEQ ID NO: 1158801 - DNA, 15 bp, Homo sapiens
acatttgaccctctt

SEQ ID NO: 1158802 - DNA, 15 bp, Homo sapiens
cacatttgaccctct

SEQ ID NO: 1158803 - DNA, 15 bp, Homo sapiens
gcacatttgaccctc

SEQ ID NO: 1158804 - DNA, 15 bp, Homo sapiens
agcacatttgaccct

SEQ ID NO: 1158805 - DNA, 15 bp, Homo sapiens
tagcacatttgaccc

SEQ ID NO: 1158806 - DNA, 15 bp, Homo sapiens
gtagcacatttgacc

SEQ ID NO: 1158807 - DNA, 15 bp, Homo sapiens
ggtagcacatttgac

SEQ ID NO: 1158808 - DNA, 15 bp, Homo sapiens
tggtagcacatttga

SEQ ID NO: 1158809 - DNA, 15 bp, Homo sapiens
atggtagcacatttg

SEQ ID NO: 1158810 - DNA, 15 bp, Homo sapiens
aatggtagcacattt

SEQ ID NO: 1158811 - DNA, 15 bp, Homo sapiens
aaatggtagcacatt

SEQ ID NO: 1158812 - DNA, 15 bp, Homo sapiens
aaaatggtagcacat

SEQ ID NO: 1158813 - DNA, 15 bp, Homo sapiens
caaaatggtagcaca

SEQ ID NO: 1158814 - DNA, 15 bp, Homo sapiens
gcaaaatggtagcac

SEQ ID NO: 1158815 - DNA, 15 bp, Homo sapiens
ggcaaaatggtagca

SEQ ID NO: 1158816 - DNA, 15 bp, Homo sapiens
tggcaaaatggtagc

SEQ ID NO: 1158817 - DNA, 15 bp, Homo sapiens
ctggcaaaatggtag

SEQ ID NO: 1158818 - DNA, 15 bp, Homo sapiens
actggcaaaatggta

SEQ ID NO: 1158819 - DNA, 15 bp, Homo sapiens
aactggcaaaatggt

SEQ ID NO: 1158820 - DNA, 15 bp, Homo sapiens
taactggcaaaatgg

SEQ ID NO: 1158821 - DNA, 15 bp, Homo sapiens
ctaactggcaaaatg

SEQ ID NO: 1158822 - DNA, 15 bp, Homo sapiens
tctaactggcaaaat

SEQ ID NO: 1158823 - DNA, 15 bp, Homo sapiens
gtctaactggcaaaa

SEQ ID NO: 1158824 - DNA, 15 bp, Homo sapiens
ggtctaactggcaaa

SEQ ID NO: 1158825 - DNA, 15 bp, Homo sapiens
tggtctaactggcaa

SEQ ID NO: 1158826 - DNA, 15 bp, Homo sapiens
ttggtctaactggca

SEQ ID NO: 1158827 - DNA, 15 bp, Homo sapiens
cttggtctaactggc

SEQ ID NO: 1158828 - DNA, 15 bp, Homo sapiens
tcttggtctaactgg

SEQ ID NO: 1158829 - DNA, 15 bp, Homo sapiens
atcttggtctaactg

SEQ ID NO: 1158830 - DNA, 15 bp, Homo sapiens
tatcttggtctaact

SEQ ID NO: 1158831 - DNA, 15 bp, Homo sapiens
ctatcttggtctaac

SEQ ID NO: 1158832 - DNA, 15 bp, Homo sapiens
cctatcttggtctaa

SEQ ID NO: 1158833 - DNA, 15 bp, Homo sapiens
ccctatcttggtcta

SEQ ID NO: 1158834 - DNA, 15 bp, Homo sapiens
tccctatcttggtct

SEQ ID NO: 1158835 - DNA, 15 bp, Homo sapiens
atccctatcttggtc

SEQ ID NO: 1158836 - DNA, 15 bp, Homo sapiens
catccctatcttggt

SEQ ID NO: 1158837 - DNA, 15 bp, Homo sapiens
ccatccctatcttgg

SEQ ID NO: 1158838 - DNA, 15 bp, Homo sapiens
gccatccctatcttg

SEQ ID NO: 1158839 - DNA, 15 bp, Homo sapiens
agccatccctatctt

SEQ ID NO: 1158840 - DNA, 15 bp, Homo sapiens
aagccatccctatct

SEQ ID NO: 1158841 - DNA, 15 bp, Homo sapiens
taagccatccctatc

SEQ ID NO: 1158842 - DNA, 15 bp, Homo sapiens
ttaagccatccctat

SEQ ID NO: 1158843 - DNA, 15 bp, Homo sapiens
attaagccatcccta

SEQ ID NO: 1158844 - DNA, 15 bp, Homo sapiens
gattaagccatccct

SEQ ID NO: 1158845 - DNA, 15 bp, Homo sapiens
tgattaagccatccc

SEQ ID NO: 1158846 - DNA, 15 bp, Homo sapiens
gtgattaagccatcc

SEQ ID NO: 1158847 - DNA, 15 bp, Homo sapiens
ggtgattaagccatc

SEQ ID NO: 1158848 - DNA, 15 bp, Homo sapiens
tggtgattaagccat

SEQ ID NO: 1158849 - DNA, 15 bp, Homo sapiens
atggtgattaagcca

SEQ ID NO: 1158850 - DNA, 15 bp, Homo sapiens
tatggtgattaagcc

SEQ ID NO: 1158851 - DNA, 15 bp, Homo sapiens
ttatggtgattaagc

SEQ ID NO: 1158852 - DNA, 15 bp, Homo sapiens
tttatggtgattaag

SEQ ID NO: 1158853 - DNA, 15 bp, Homo sapiens
ttttatggtgattaa

SEQ ID NO: 1158854 - DNA, 15 bp, Homo sapiens
tttttatggtgatta

SEQ ID NO: 1158855 - DNA, 15 bp, Homo sapiens
atttttatggtgatt

SEQ ID NO: 1158856 - DNA, 15 bp, Homo sapiens
gatttttatggtgat

SEQ ID NO: 1158857 - DNA, 15 bp, Homo sapiens
tgatttttatggtga

SEQ ID NO: 1158858 - DNA, 15 bp, Homo sapiens
atgatttttatggtg

SEQ ID NO: 1158859 - DNA, 15 bp, Homo sapiens
gatgatttttatggt

SEQ ID NO: 1158860 - DNA, 15 bp, Homo sapiens
tgatgatttttatgg

SEQ ID NO: 1158861 - DNA, 15 bp, Homo sapiens
atgatgatttttatg

SEQ ID NO: 1158862 - DNA, 15 bp, Homo sapiens
catgatgatttttat

SEQ ID NO: 1158863 - DNA, 15 bp, Homo sapiens
acatgatgattttta

SEQ ID NO: 1158864 - DNA, 15 bp, Homo sapiens
aacatgatgattttt

SEQ ID NO: 1158865 - DNA, 15 bp, Homo sapiens
caacatgatgatttt

SEQ ID NO: 1158866 - DNA, 15 bp, Homo sapiens
ccaacatgatgattt

SEQ ID NO: 1158867 - DNA, 15 bp, Homo sapiens
gccaacatgatgatt

SEQ ID NO: 1158868 - DNA, 15 bp, Homo sapiens
ggccaacatgatgat

SEQ ID NO: 1158869 - DNA, 15 bp, Homo sapiens
atggccaacatgatg

SEQ ID NO: 1158870 - DNA, 15 bp, Homo sapiens
catggccaacatgat

SEQ ID NO: 1158871 - DNA, 15 bp, Homo sapiens
gcatggccaacatga

SEQ ID NO: 1158872 - DNA, 15 bp, Homo sapiens
agcatggccaacatg

SEQ ID NO: 1158873 - DNA, 15 bp, Homo sapiens
cagcatggccaacat

SEQ ID NO: 1158874 - DNA, 15 bp, Homo sapiens
ccagcatggccaaca

SEQ ID NO: 1158875 - DNA, 15 bp, Homo sapiens
gccagcatggccaac

SEQ ID NO: 1158876 - DNA, 15 bp, Homo sapiens
ggccagcatggccaa

SEQ ID NO: 1158877 - DNA, 15 bp, Homo sapiens
aggccagcatggcca

SEQ ID NO: 1158878 - DNA, 15 bp, Homo sapiens
gaggccagcatggcc

SEQ ID NO: 1158879 - DNA, 15 bp, Homo sapiens
tgaggccagcatggc

SEQ ID NO: 1158880 - DNA, 15 bp, Homo sapiens
ttgaggccagcatgg

SEQ ID NO: 1158881 - DNA, 15 bp, Homo sapiens
attgaggccagcatg

SEQ ID NO: 1158882 - DNA, 15 bp, Homo sapiens
cattgaggccagcat

SEQ ID NO: 1158883 - DNA, 15 bp, Homo sapiens
ccattgaggccagca

SEQ ID NO: 1158884 - DNA, 15 bp, Homo sapiens
accattgaggccagc

SEQ ID NO: 1158885 - DNA, 15 bp, Homo sapiens
taccattgaggccag

SEQ ID NO: 1158886 - DNA, 15 bp, Homo sapiens
ataccattgaggcca

SEQ ID NO: 1158887 - DNA, 15 bp, Homo sapiens
tataccattgaggcc

SEQ ID NO: 1158888 - DNA, 15 bp, Homo sapiens
ttataccattgaggc

SEQ ID NO: 1158889 - DNA, 15 bp, Homo sapiens
cttataccattgagg

SEQ ID NO: 1158890 - DNA, 15 bp, Homo sapiens
acttataccattgag

SEQ ID NO: 1158891 - DNA, 15 bp, Homo sapiens
gacttataccattga

SEQ ID NO: 1158892 - DNA, 15 bp, Homo sapiens
agacttataccattg

SEQ ID NO: 1158893 - DNA, 15 bp, Homo sapiens
aagacttataccatt

SEQ ID NO: 1158894 - DNA, 15 bp, Homo sapiens
caagacttataccat

SEQ ID NO: 1158895 - DNA, 15 bp, Homo sapiens
ccaagacttatacca

SEQ ID NO: 1158896 - DNA, 15 bp, Homo sapiens
tccaagacttatacc

SEQ ID NO: 1158897 - DNA, 15 bp, Homo sapiens
ctccaagacttatac

SEQ ID NO: 1158898 - DNA, 15 bp, Homo sapiens
cctccaagacttata

SEQ ID NO: 1158899 - DNA, 15 bp, Homo sapiens
ccctccaagacttat

SEQ ID NO: 1158900 - DNA, 15 bp, Homo sapiens
accctccaagactta

SEQ ID NO: 1158901 - DNA, 15 bp, Homo sapiens
aaccctccaagactt

SEQ ID NO: 1158902 - DNA, 15 bp, Homo sapiens
caaccctccaagact

SEQ ID NO: 1158903 - DNA, 15 bp, Homo sapiens
acaaccctccaagac

SEQ ID NO: 1158904 - DNA, 15 bp, Homo sapiens
aacaaccctccaaga

SEQ ID NO: 1158905 - DNA, 15 bp, Homo sapiens
caacaaccctccaag

SEQ ID NO: 1158906 - DNA, 15 bp, Homo sapiens
acaacaaccctccaa

SEQ ID NO: 1158907 - DNA, 15 bp, Homo sapiens
aacaacaaccctcca

SEQ ID NO: 1158908 - DNA, 15 bp, Homo sapiens
aaacaacaaccctcc

SEQ ID NO: 1158909 - DNA, 15 bp, Homo sapiens
aaaacaacaaccctc

SEQ ID NO: 1158910 - DNA, 15 bp, Homo sapiens
caaaacaacaaccct

SEQ ID NO: 1158911 - DNA, 15 bp, Homo sapiens
tcaaaacaacaaccc

SEQ ID NO: 1158912 - DNA, 15 bp, Homo sapiens
ttcaaaacaacaacc

SEQ ID NO: 1158913 - DNA, 15 bp, Homo sapiens
cttcaaaacaacaac

SEQ ID NO: 1158914 - DNA, 15 bp, Homo sapiens
gcttcaaaacaacaa

SEQ ID NO: 1158915 - DNA, 15 bp, Homo sapiens
agcttcaaaacaaca

SEQ ID NO: 1158916 - DNA, 15 bp, Homo sapiens
cagcttcaaaacaac

SEQ ID NO: 1158917 - DNA, 15 bp, Homo sapiens
gcagcttcaaaacaa

SEQ ID NO: 1158918 - DNA, 15 bp, Homo sapiens
agcagcttcaaaaca

SEQ ID NO: 1158919 - DNA, 15 bp, Homo sapiens
cagcagcttcaaaac

SEQ ID NO: 1158920 - DNA, 15 bp, Homo sapiens
tcagcagcttcaaaa

SEQ ID NO: 1158921 - DNA, 15 bp, Homo sapiens
gtcagcagcttcaaa

SEQ ID NO: 1158922 - DNA, 15 bp, Homo sapiens
tgtcagcagcttcaa

SEQ ID NO: 1158923 - DNA, 15 bp, Homo sapiens
gtgtcagcagcttca

SEQ ID NO: 1158924 - DNA, 15 bp, Homo sapiens
ggtgtcagcagcttc

SEQ ID NO: 1158925 - DNA, 15 bp, Homo sapiens
gggtgtcagcagctt

SEQ ID NO: 1158926 - DNA, 15 bp, Homo sapiens
agggtgtcagcagct

SEQ ID NO: 1158927 - DNA, 15 bp, Homo sapiens
gagggtgtcagcagc

SEQ ID NO: 1158928 - DNA, 15 bp, Homo sapiens
tgagggtgtcagcag

SEQ ID NO: 1158929 - DNA, 15 bp, Homo sapiens
atgagggtgtcagca

SEQ ID NO: 1158930 - DNA, 15 bp, Homo sapiens
catgagggtgtcagc

SEQ ID NO: 1158931 - DNA, 15 bp, Homo sapiens
gcatgagggtgtcag

SEQ ID NO: 1158932 - DNA, 15 bp, Homo sapiens
tgcatgagggtgtca

SEQ ID NO: 1158933 - DNA, 15 bp, Homo sapiens
ttgcatgagggtgtc

SEQ ID NO: 1158934 - DNA, 15 bp, Homo sapiens
gttgcatgagggtgt

SEQ ID NO: 1158935 - DNA, 15 bp, Homo sapiens
cgttgcatgagggtg

SEQ ID NO: 1158936 - DNA, 15 bp, Homo sapiens
tcgttgcatgagggt

SEQ ID NO: 1158937 - DNA, 15 bp, Homo sapiens
atcgttgcatgaggg

SEQ ID NO: 1158938 - DNA, 15 bp, Homo sapiens
gatcgttgcatgagg

SEQ ID NO: 1158939 - DNA, 15 bp, Homo sapiens
ggatcgttgcatgag

SEQ ID NO: 1158940 - DNA, 15 bp, Homo sapiens
aggatcgttgcatga

SEQ ID NO: 1158941 - DNA, 15 bp, Homo sapiens
gaggatcgttgcatg

SEQ ID NO: 1158942 - DNA, 15 bp, Homo sapiens
ggaggatcgttgcat

SEQ ID NO: 1158943 - DNA, 15 bp, Homo sapiens
tggaggatcgttgca

SEQ ID NO: 1158944 - DNA, 15 bp, Homo sapiens
ttggaggatcgttgc

SEQ ID NO: 1158945 - DNA, 15 bp, Homo sapiens
tttggaggatcgttg

SEQ ID NO: 1158946 - DNA, 15 bp, Homo sapiens
atttggaggatcgtt

SEQ ID NO: 1158947 - DNA, 15 bp, Homo sapiens
catttggaggatcgt

SEQ ID NO: 1158948 - DNA, 15 bp, Homo sapiens
ccatttggaggatcg

SEQ ID NO: 1158949 - DNA, 15 bp, Homo sapiens
tccatttggaggatc

SEQ ID NO: 1158950 - DNA, 15 bp, Homo sapiens
gtccatttggaggat

SEQ ID NO: 1158951 - DNA, 15 bp, Homo sapiens
tgtccatttggagga

SEQ ID NO: 1158952 - DNA, 15 bp, Homo sapiens
ttgtccatttggagg

SEQ ID NO: 1158953 - DNA, 15 bp, Homo sapiens
attgtccatttggag

SEQ ID NO: 1158954 - DNA, 15 bp, Homo sapiens
gattgtccatttgga

SEQ ID NO: 1158955 - DNA, 15 bp, Homo sapiens
agattgtccatttgg

SEQ ID NO: 1158956 - DNA, 15 bp, Homo sapiens
tagattgtccatttg

SEQ ID NO: 1158957 - DNA, 15 bp, Homo sapiens
ctagattgtccattt

SEQ ID NO: 1158958 - DNA, 15 bp, Homo sapiens
actagattgtccatt

SEQ ID NO: 1158959 - DNA, 15 bp, Homo sapiens
tactagattgtccat

SEQ ID NO: 1158960 - DNA, 15 bp, Homo sapiens
ttactagattgtcca

SEQ ID NO: 1158961 - DNA, 15 bp, Homo sapiens
gttactagattgtcc

SEQ ID NO: 1158962 - DNA, 15 bp, Homo sapiens
agttactagattgtc

SEQ ID NO: 1158963 - DNA, 15 bp, Homo sapiens
aagttactagattgt

SEQ ID NO: 1158964 - DNA, 15 bp, Homo sapiens
aaagttactagattg

SEQ ID NO: 1158965 - DNA, 15 bp, Homo sapiens
aaaagttactagatt

SEQ ID NO: 1158966 - DNA, 15 bp, Homo sapiens
aaaaagttactagat

SEQ ID NO: 1158967 - DNA, 15 bp, Homo sapiens
taaaaagttactaga

SEQ ID NO: 1158968 - DNA, 15 bp, Homo sapiens
ctaaaaagttactag

SEQ ID NO: 1158969 - DNA, 15 bp, Homo sapiens
actaaaaagttacta

SEQ ID NO: 1158970 - DNA, 15 bp, Homo sapiens
aactaaaaagttact

SEQ ID NO: 1158971 - DNA, 15 bp, Homo sapiens
aaactaaaaagttac

SEQ ID NO: 1158972 - DNA, 15 bp, Homo sapiens
aaaactaaaaagtta

SEQ ID NO: 1158973 - DNA, 15 bp, Homo sapiens
aaaaactaaaaagtt

SEQ ID NO: 1158974 - DNA, 15 bp, Homo sapiens
aaaaaactaaaaagt

SEQ ID NO: 1158975 - DNA, 15 bp, Homo sapiens
aaaaaaactaaaaag

SEQ ID NO: 1158976 - DNA, 15 bp, Homo sapiens
aaaaaaaactaaaaa

SEQ ID NO: 1158977 - DNA, 15 bp, Homo sapiens
aaaaaaaaactaaaa

SEQ ID NO: 1158978 - DNA, 15 bp, Homo sapiens
gaaaaaaaaactaaa

SEQ ID NO: 1158979 - DNA, 15 bp, Homo sapiens
agaaaaaaaaactaa

SEQ ID NO: 1158980 - DNA, 15 bp, Homo sapiens
aagaaaaaaaaacta

SEQ ID NO: 1158981 - DNA, 15 bp, Homo sapiens
aaaagaaaaaaaaac

SEQ ID NO: 1158982 - DNA, 15 bp, Homo sapiens
tataaaaaagaaaaa

SEQ ID NO: 1158983 - DNA, 15 bp, Homo sapiens
gtataaaaaagaaaa

SEQ ID NO: 1158984 - DNA, 15 bp, Homo sapiens
ggtataaaaaagaaa

SEQ ID NO: 1158985 - DNA, 15 bp, Homo sapiens
gggtataaaaaagaa

SEQ ID NO: 1158986 - DNA, 15 bp, Homo sapiens
agggtataaaaaaga

SEQ ID NO: 1158987 - DNA, 15 bp, Homo sapiens
aagggtataaaaaag

SEQ ID NO: 1158988 - DNA, 15 bp, Homo sapiens
gaagggtataaaaaa

SEQ ID NO: 1158989 - DNA, 15 bp, Homo sapiens
agaagggtataaaaa

SEQ ID NO: 1158990 - DNA, 15 bp, Homo sapiens
aagaagggtataaaa

SEQ ID NO: 1158991 - DNA, 15 bp, Homo sapiens
taagaagggtataaa

SEQ ID NO: 1158992 - DNA, 15 bp, Homo sapiens
ataagaagggtataa

SEQ ID NO: 1158993 - DNA, 15 bp, Homo sapiens
tataagaagggtata

SEQ ID NO: 1158994 - DNA, 15 bp, Homo sapiens
ctataagaagggtat

SEQ ID NO: 1158995 - DNA, 15 bp, Homo sapiens
actataagaagggta

SEQ ID NO: 1158996 - DNA, 15 bp, Homo sapiens
aactataagaagggt

SEQ ID NO: 1158997 - DNA, 15 bp, Homo sapiens
aaactataagaaggg

SEQ ID NO: 1158998 - DNA, 15 bp, Homo sapiens
caaactataagaagg

SEQ ID NO: 1158999 - DNA, 15 bp, Homo sapiens
acaaactataagaag

SEQ ID NO: 1159000 - DNA, 15 bp, Homo sapiens
cacaaactataagaa

SEQ ID NO: 1159001 - DNA, 15 bp, Homo sapiens
ccacaaactataaga

SEQ ID NO: 1159002 - DNA, 15 bp, Homo sapiens
tccacaaactataag

SEQ ID NO: 1159003 - DNA, 15 bp, Homo sapiens
gtccacaaactataa

SEQ ID NO: 1159004 - DNA, 15 bp, Homo sapiens
agtccacaaactata

SEQ ID NO: 1159005 - DNA, 15 bp, Homo sapiens
aagtccacaaactat

SEQ ID NO: 1159006 - DNA, 15 bp, Homo sapiens
aaagtccacaaacta

SEQ ID NO: 1159007 - DNA, 15 bp, Homo sapiens
caaagtccacaaact

SEQ ID NO: 1159008 - DNA, 15 bp, Homo sapiens
ccaaagtccacaaac

SEQ ID NO: 1159009 - DNA, 15 bp, Homo sapiens
accaaagtccacaaa

SEQ ID NO: 1159010 - DNA, 15 bp, Homo sapiens
aaccaaagtccacaa

SEQ ID NO: 1159011 - DNA, 15 bp, Homo sapiens
aaaccaaagtccaca

SEQ ID NO: 1159012 - DNA, 15 bp, Homo sapiens
aaaaccaaagtccac

SEQ ID NO: 1159013 - DNA, 15 bp, Homo sapiens
gaaaaccaaagtcca

SEQ ID NO: 1159014 - DNA, 15 bp, Homo sapiens
tgaaaaccaaagtcc

SEQ ID NO: 1159015 - DNA, 15 bp, Homo sapiens
ctgaaaaccaaagtc

SEQ ID NO: 1159016 - DNA, 15 bp, Homo sapiens
gctgaaaaccaaagt

SEQ ID NO: 1159017 - DNA, 15 bp, Homo sapiens
agctgaaaaccaaag

SEQ ID NO: 1159018 - DNA, 15 bp, Homo sapiens
aagctgaaaaccaaa

SEQ ID NO: 1159019 - DNA, 15 bp, Homo sapiens
gaagctgaaaaccaa

SEQ ID NO: 1159020 - DNA, 15 bp, Homo sapiens
agaagctgaaaacca

SEQ ID NO: 1159021 - DNA, 15 bp, Homo sapiens
gagaagctgaaaacc

SEQ ID NO: 1159022 - DNA, 15 bp, Homo sapiens
cgagaagctgaaaac

SEQ ID NO: 1159023 - DNA, 15 bp, Homo sapiens
tcgagaagctgaaaa

SEQ ID NO: 1159024 - DNA, 15 bp, Homo sapiens
atcgagaagctgaaa

SEQ ID NO: 1159025 - DNA, 15 bp, Homo sapiens
catcgagaagctgaa

SEQ ID NO: 1159026 - DNA, 15 bp, Homo sapiens
ccatcgagaagctga

SEQ ID NO: 1159027 - DNA, 15 bp, Homo sapiens
accatcgagaagctg

SEQ ID NO: 1159028 - DNA, 15 bp, Homo sapiens
gaccatcgagaagct

SEQ ID NO: 1159029 - DNA, 15 bp, Homo sapiens
tgaccatcgagaagc

SEQ ID NO: 1159030 - DNA, 15 bp, Homo sapiens
ttgaccatcgagaag

SEQ ID NO: 1159031 - DNA, 15 bp, Homo sapiens
cttgaccatcgagaa

SEQ ID NO: 1159032 - DNA, 15 bp, Homo sapiens
tcttgaccatcgaga

SEQ ID NO: 1159033 - DNA, 15 bp, Homo sapiens
ttcttgaccatcgag

SEQ ID NO: 1159034 - DNA, 15 bp, Homo sapiens
cttcttgaccatcga

SEQ ID NO: 1159035 - DNA, 15 bp, Homo sapiens
gcttcttgaccatcg

SEQ ID NO: 1159036 - DNA, 15 bp, Homo sapiens
tgcttcttgaccatc

SEQ ID NO: 1159037 - DNA, 15 bp, Homo sapiens
ttgcttcttgaccat

SEQ ID NO: 1159038 - DNA, 15 bp, Homo sapiens
tttgcttcttgacca

SEQ ID NO: 1159039 - DNA, 15 bp, Homo sapiens
ctttgcttcttgacc

SEQ ID NO: 1159040 - DNA, 15 bp, Homo sapiens
tctttgcttcttgac

SEQ ID NO: 1159041 - DNA, 15 bp, Homo sapiens
ttctttgcttcttga

SEQ ID NO: 1159042 - DNA, 15 bp, Homo sapiens
tttctttgcttcttg

SEQ ID NO: 1159043 - DNA, 15 bp, Homo sapiens
gtttctttgcttctt

SEQ ID NO: 1159044 - DNA, 15 bp, Homo sapiens
agtttctttgcttct

SEQ ID NO: 1159045 - DNA, 15 bp, Homo sapiens
gagtttctttgcttc

SEQ ID NO: 1159046 - DNA, 15 bp, Homo sapiens
tgagtttctttgctt

SEQ ID NO: 1159047 - DNA, 15 bp, Homo sapiens
ttgagtttctttgct

SEQ ID NO: 1159048 - DNA, 15 bp, Homo sapiens
attgagtttctttgc

SEQ ID NO: 1159049 - DNA, 15 bp, Homo sapiens
cattgagtttctttg

SEQ ID NO: 1159050 - DNA, 15 bp, Homo sapiens
acattgagtttcttt

SEQ ID NO: 1159051 - DNA, 15 bp, Homo sapiens
gacattgagtttctt

SEQ ID NO: 1159052 - DNA, 15 bp, Homo sapiens
ggacattgagtttct

SEQ ID NO: 1159053 - DNA, 15 bp, Homo sapiens
tggacattgagtttc

SEQ ID NO: 1159054 - DNA, 15 bp, Homo sapiens
ctggacattgagttt

SEQ ID NO: 1159055 - DNA, 15 bp, Homo sapiens
actggacattgagtt

SEQ ID NO: 1159056 - DNA, 15 bp, Homo sapiens
cactggacattgagt

SEQ ID NO: 1159057 - DNA, 15 bp, Homo sapiens
ccactggacattgag

SEQ ID NO: 1159058 - DNA, 15 bp, Homo sapiens
gccactggacattga

SEQ ID NO: 1159059 - DNA, 15 bp, Homo sapiens
agccactggacattg

SEQ ID NO: 1159060 - DNA, 15 bp, Homo sapiens
gagccactggacatt

SEQ ID NO: 1159061 - DNA, 15 bp, Homo sapiens
tgagccactggacat

SEQ ID NO: 1159062 - DNA, 15 bp, Homo sapiens
ctgagccactggaca

SEQ ID NO: 1159063 - DNA, 15 bp, Homo sapiens
tctgagccactggac

SEQ ID NO: 1159064 - DNA, 15 bp, Homo sapiens
ctctgagccactgga

SEQ ID NO: 1159065 - DNA, 15 bp, Homo sapiens
gctctgagccactgg

SEQ ID NO: 1159066 - DNA, 15 bp, Homo sapiens
agctctgagccactg

SEQ ID NO: 1159067 - DNA, 15 bp, Homo sapiens
gagctctgagccact

SEQ ID NO: 1159068 - DNA, 15 bp, Homo sapiens
tgagctctgagccac

SEQ ID NO: 1159069 - DNA, 15 bp, Homo sapiens
ttgagctctgagcca

SEQ ID NO: 1159070 - DNA, 15 bp, Homo sapiens
gttgagctctgagcc

SEQ ID NO: 1159071 - DNA, 15 bp, Homo sapiens
agttgagctctgagc

SEQ ID NO: 1159072 - DNA, 15 bp, Homo sapiens
gagttgagctctgag

SEQ ID NO: 1159073 - DNA, 15 bp, Homo sapiens
cgagttgagctctga

SEQ ID NO: 1159074 - DNA, 15 bp, Homo sapiens
ccgagttgagctctg

SEQ ID NO: 1159075 - DNA, 15 bp, Homo sapiens
tccgagttgagctct

SEQ ID NO: 1159076 - DNA, 15 bp, Homo sapiens
ttccgagttgagctc

SEQ ID NO: 1159077 - DNA, 15 bp, Homo sapiens
attccgagttgagct

SEQ ID NO: 1159078 - DNA, 15 bp, Homo sapiens
gattccgagttgagc

SEQ ID NO: 1159079 - DNA, 15 bp, Homo sapiens
cgattccgagttgag

SEQ ID NO: 1159080 - DNA, 15 bp, Homo sapiens
acgattccgagttga

SEQ ID NO: 1159081 - DNA, 15 bp, Homo sapiens
cacgattccgagttg

SEQ ID NO: 1159082 - DNA, 15 bp, Homo sapiens
acacgattccgagtt

SEQ ID NO: 1159083 - DNA, 15 bp, Homo sapiens
gacacgattccgagt

SEQ ID NO: 1159084 - DNA, 15 bp, Homo sapiens
agacacgattccgag

SEQ ID NO: 1159085 - DNA, 15 bp, Homo sapiens
gagacacgattccga

SEQ ID NO: 1159086 - DNA, 15 bp, Homo sapiens
tgagacacgattccg

SEQ ID NO: 1159087 - DNA, 15 bp, Homo sapiens
ctgagacacgattcc

SEQ ID NO: 1159088 - DNA, 15 bp, Homo sapiens
cctgagacacgattc

SEQ ID NO: 1159089 - DNA, 15 bp, Homo sapiens
tcctgagacacgatt

SEQ ID NO: 1159090 - DNA, 15 bp, Homo sapiens
ctcctgagacacgat

SEQ ID NO: 1159091 - DNA, 15 bp, Homo sapiens
gctcctgagacacga

SEQ ID NO: 1159092 - DNA, 15 bp, Homo sapiens
ggctcctgagacacg

SEQ ID NO: 1159093 - DNA, 15 bp, Homo sapiens
aggctcctgagacac

SEQ ID NO: 1159094 - DNA, 15 bp, Homo sapiens
taggctcctgagaca

SEQ ID NO: 1159095 - DNA, 15 bp, Homo sapiens
ataggctcctgagac

SEQ ID NO: 1159096 - DNA, 15 bp, Homo sapiens
gataggctcctgaga

SEQ ID NO: 1159097 - DNA, 15 bp, Homo sapiens
ggataggctcctgag

SEQ ID NO: 1159098 - DNA, 15 bp, Homo sapiens
aggataggctcctga

SEQ ID NO: 1159099 - DNA, 15 bp, Homo sapiens
taggataggctcctg

SEQ ID NO: 1159100 - DNA, 15 bp, Homo sapiens
ataggataggctcct

SEQ ID NO: 1159101 - DNA, 15 bp, Homo sapiens
aataggataggctcc

SEQ ID NO: 1159102 - DNA, 15 bp, Homo sapiens
aaataggataggctc

SEQ ID NO: 1159103 - DNA, 15 bp, Homo sapiens
caaataggataggct

SEQ ID NO: 1159104 - DNA, 15 bp, Homo sapiens
tcaaataggataggc

SEQ ID NO: 1159105 - DNA, 15 bp, Homo sapiens
gtcaaataggatagg

SEQ ID NO: 1159106 - DNA, 15 bp, Homo sapiens
agtcaaataggatag

SEQ ID NO: 1159107 - DNA, 15 bp, Homo sapiens
cagtcaaataggata

SEQ ID NO: 1159108 - DNA, 15 bp, Homo sapiens
gcagtcaaataggat

SEQ ID NO: 1159109 - DNA, 15 bp, Homo sapiens
tgcagtcaaatagga

SEQ ID NO: 1159110 - DNA, 15 bp, Homo sapiens
ctgcagtcaaatagg

SEQ ID NO: 1159111 - DNA, 15 bp, Homo sapiens
gctgcagtcaaatag

SEQ ID NO: 1159112 - DNA, 15 bp, Homo sapiens
tgctgcagtcaaata

SEQ ID NO: 1159113 - DNA, 15 bp, Homo sapiens
atgctgcagtcaaat

SEQ ID NO: 1159114 - DNA, 15 bp, Homo sapiens
aatgctgcagtcaaa

SEQ ID NO: 1159115 - DNA, 15 bp, Homo sapiens
caatgctgcagtcaa

SEQ ID NO: 1159116 - DNA, 15 bp, Homo sapiens
gcaatgctgcagtca

SEQ ID NO: 1159117 - DNA, 15 bp, Homo sapiens
ggcaatgctgcagtc

SEQ ID NO: 1159118 - DNA, 15 bp, Homo sapiens
cggcaatgctgcagt

SEQ ID NO: 1159119 - DNA, 15 bp, Homo sapiens
tcggcaatgctgcag

SEQ ID NO: 1159120 - DNA, 15 bp, Homo sapiens
ctcggcaatgctgca

SEQ ID NO: 1159121 - DNA, 15 bp, Homo sapiens
tctcggcaatgctgc

SEQ ID NO: 1159122 - DNA, 15 bp, Homo sapiens
ttctcggcaatgctg

SEQ ID NO: 1159123 - DNA, 15 bp, Homo sapiens
attctcggcaatgct

SEQ ID NO: 1159124 - DNA, 15 bp, Homo sapiens
tattctcggcaatgc

SEQ ID NO: 1159125 - DNA, 15 bp, Homo sapiens
atattctcggcaatg

SEQ ID NO: 1159126 - DNA, 15 bp, Homo sapiens
aatattctcggcaat

SEQ ID NO: 1159127 - DNA, 15 bp, Homo sapiens
caatattctcggcaa

SEQ ID NO: 1159128 - DNA, 15 bp, Homo sapiens
gcaatattctcggca

SEQ ID NO: 1159129 - DNA, 15 bp, Homo sapiens
ggcaatattctcggc

SEQ ID NO: 1159130 - DNA, 15 bp, Homo sapiens
aggcaatattctcgg

SEQ ID NO: 1159131 - DNA, 15 bp, Homo sapiens
taggcaatattctcg

SEQ ID NO: 1159132 - DNA, 15 bp, Homo sapiens
ataggcaatattctc

SEQ ID NO: 1159133 - DNA, 15 bp, Homo sapiens
cataggcaatattct

SEQ ID NO: 1159134 - DNA, 15 bp, Homo sapiens
ccataggcaatattc

SEQ ID NO: 1159135 - DNA, 15 bp, Homo sapiens
tccataggcaatatt

SEQ ID NO: 1159136 - DNA, 15 bp, Homo sapiens
ctccataggcaatat

SEQ ID NO: 1159137 - DNA, 15 bp, Homo sapiens
tctccataggcaata

SEQ ID NO: 1159138 - DNA, 15 bp, Homo sapiens
gtctccataggcaat

SEQ ID NO: 1159139 - DNA, 15 bp, Homo sapiens
tgtctccataggcaa

SEQ ID NO: 1159140 - DNA, 15 bp, Homo sapiens
ttgtctccataggca

SEQ ID NO: 1159141 - DNA, 15 bp, Homo sapiens
gttgtctccataggc

SEQ ID NO: 1159142 - DNA, 15 bp, Homo sapiens
tgttgtctccatagg

SEQ ID NO: 1159143 - DNA, 15 bp, Homo sapiens
ctgttgtctccatag

SEQ ID NO: 1159144 - DNA, 15 bp, Homo sapiens
gctgttgtctccata

SEQ ID NO: 1159145 - DNA, 15 bp, Homo sapiens
ggctgttgtctccat

SEQ ID NO: 1159146 - DNA, 15 bp, Homo sapiens
cggctgttgtctcca

SEQ ID NO: 1159147 - DNA, 15 bp, Homo sapiens
ccggctgttgtctcc

SEQ ID NO: 1159148 - DNA, 15 bp, Homo sapiens
cccggctgttgtctc

SEQ ID NO: 1159149 - DNA, 15 bp, Homo sapiens
acccggctgttgtct

SEQ ID NO: 1159150 - DNA, 15 bp, Homo sapiens
aacccggctgttgtc

SEQ ID NO: 1159151 - DNA, 15 bp, Homo sapiens
caacccggctgttgt

SEQ ID NO: 1159152 - DNA, 15 bp, Homo sapiens
acaacccggctgttg

SEQ ID NO: 1159153 - DNA, 15 bp, Homo sapiens
tacaacccggctgtt

SEQ ID NO: 1159154 - DNA, 15 bp, Homo sapiens
atacaacccggctgt

SEQ ID NO: 1159155 - DNA, 15 bp, Homo sapiens
gatacaacccggctg

SEQ ID NO: 1159156 - DNA, 15 bp, Homo sapiens
tgatacaacccggct

SEQ ID NO: 1159157 - DNA, 15 bp, Homo sapiens
gtgatacaacccggc

SEQ ID NO: 1159158 - DNA, 15 bp, Homo sapiens
tgttgttatgtaaca

SEQ ID NO: 1159159 - DNA, 15 bp, Homo sapiens
atgttgttatgtaac

SEQ ID NO: 1159160 - DNA, 15 bp, Homo sapiens
aatgttgttatgtaa

SEQ ID NO: 1159161 - DNA, 15 bp, Homo sapiens
aaatgttgttatgta

SEQ ID NO: 1159162 - DNA, 15 bp, Homo sapiens
aaaatgttgttatgt

SEQ ID NO: 1159163 - DNA, 15 bp, Homo sapiens
caaaatgttgttatg

SEQ ID NO: 1159164 - DNA, 15 bp, Homo sapiens
ccaaaatgttgttat

SEQ ID NO: 1159165 - DNA, 15 bp, Homo sapiens
accaaaatgttgtta

SEQ ID NO: 1159166 - DNA, 15 bp, Homo sapiens
gaccaaaatgttgtt

SEQ ID NO: 1159167 - DNA, 15 bp, Homo sapiens
tgaccaaaatgttgt

SEQ ID NO: 1159168 - DNA, 15 bp, Homo sapiens
ttgaccaaaatgttg

SEQ ID NO: 1159169 - DNA, 15 bp, Homo sapiens
attgaccaaaatgtt

SEQ ID NO: 1159170 - DNA, 15 bp, Homo sapiens
cattgaccaaaatgt

SEQ ID NO: 1159171 - DNA, 15 bp, Homo sapiens
tcattgaccaaaatg

SEQ ID NO: 1159172 - DNA, 15 bp, Homo sapiens
gtcattgaccaaaat

SEQ ID NO: 1159173 - DNA, 15 bp, Homo sapiens
tgtcattgaccaaaa

SEQ ID NO: 1159174 - DNA, 15 bp, Homo sapiens
ctgtcattgaccaaa

SEQ ID NO: 1159175 - DNA, 15 bp, Homo sapiens
tctgtcattgaccaa

SEQ ID NO: 1159176 - DNA, 15 bp, Homo sapiens
gtctgtcattgacca

SEQ ID NO: 1159177 - DNA, 15 bp, Homo sapiens
agtctgtcattgacc

SEQ ID NO: 1159178 - DNA, 15 bp, Homo sapiens
cagtctgtcattgac

SEQ ID NO: 1159179 - DNA, 15 bp, Homo sapiens
gcagtctgtcattga

SEQ ID NO: 1159180 - DNA, 15 bp, Homo sapiens
cgcagtctgtcattg

SEQ ID NO: 1159181 - DNA, 15 bp, Homo sapiens
acgcagtctgtcatt

SEQ ID NO: 1159182 - DNA, 15 bp, Homo sapiens
tacgcagtctgtcat

SEQ ID NO: 1159183 - DNA, 15 bp, Homo sapiens
atacgcagtctgtca

SEQ ID NO: 1159184 - DNA, 15 bp, Homo sapiens
tatacgcagtctgtc

SEQ ID NO: 1159185 - DNA, 15 bp, Homo sapiens
gtatacgcagtctgt

SEQ ID NO: 1159186 - DNA, 15 bp, Homo sapiens
ggtatacgcagtctg

SEQ ID NO: 1159187 - DNA, 15 bp, Homo sapiens
tggtatacgcagtct

SEQ ID NO: 1159188 - DNA, 15 bp, Homo sapiens
gtggtatacgcagtc

SEQ ID NO: 1159189 - DNA, 15 bp, Homo sapiens
tgtggtatacgcagt

SEQ ID NO: 1159190 - DNA, 15 bp, Homo sapiens
ctgtggtatacgcag

SEQ ID NO: 1159191 - DNA, 15 bp, Homo sapiens
actgtggtatacgca

SEQ ID NO: 1159192 - DNA, 15 bp, Homo sapiens
cactgtggtatacgc

SEQ ID NO: 1159193 - DNA, 15 bp, Homo sapiens
ccactgtggtatacg

SEQ ID NO: 1159194 - DNA, 15 bp, Homo sapiens
accactgtggtatac

SEQ ID NO: 1159195 - DNA, 15 bp, Homo sapiens
aaccactgtggtata

SEQ ID NO: 1159196 - DNA, 15 bp, Homo sapiens
gaaccactgtggtat

SEQ ID NO: 1159197 - DNA, 15 bp, Homo sapiens
ggaaccactgtggta

SEQ ID NO: 1159198 - DNA, 15 bp, Homo sapiens
gggaaccactgtggt

SEQ ID NO: 1159199 - DNA, 15 bp, Homo sapiens
tgggaaccactgtgg

SEQ ID NO: 1159200 - DNA, 15 bp, Homo sapiens
atgggaaccactgtg

SEQ ID NO: 1159201 - DNA, 15 bp, Homo sapiens
tatgggaaccactgt

SEQ ID NO: 1159202 - DNA, 15 bp, Homo sapiens
ttatgggaaccactg

SEQ ID NO: 1159203 - DNA, 15 bp, Homo sapiens
cttatgggaaccact

SEQ ID NO: 1159204 - DNA, 15 bp, Homo sapiens
tcttatgggaaccac

SEQ ID NO: 1159205 - DNA, 15 bp, Homo sapiens
atcttatgggaacca

SEQ ID NO: 1159206 - DNA, 15 bp, Homo sapiens
aatcttatgggaacc

SEQ ID NO: 1159207 - DNA, 15 bp, Homo sapiens
taatcttatgggaac

SEQ ID NO: 1159208 - DNA, 15 bp, Homo sapiens
ataatcttatgggaa

SEQ ID NO: 1159209 - DNA, 15 bp, Homo sapiens
tataatcttatggga

SEQ ID NO: 1159210 - DNA, 15 bp, Homo sapiens
ttataatcttatggg

SEQ ID NO: 1159211 - DNA, 15 bp, Homo sapiens
attataatcttatgg

SEQ ID NO: 1159212 - DNA, 15 bp, Homo sapiens
cattataatcttatg

SEQ ID NO: 1159213 - DNA, 15 bp, Homo sapiens
ccattataatcttat

SEQ ID NO: 1159214 - DNA, 15 bp, Homo sapiens
tccattataatctta

SEQ ID NO: 1159215 - DNA, 15 bp, Homo sapiens
ttccattataatctt

SEQ ID NO: 1159216 - DNA, 15 bp, Homo sapiens
gttccattataatct

SEQ ID NO: 1159217 - DNA, 15 bp, Homo sapiens
agttccattataatc

SEQ ID NO: 1159218 - DNA, 15 bp, Homo sapiens
cagttccattataat

SEQ ID NO: 1159219 - DNA, 15 bp, Homo sapiens
tcagttccattataa

SEQ ID NO: 1159220 - DNA, 15 bp, Homo sapiens
ttcagttccattata

SEQ ID NO: 1159221 - DNA, 15 bp, Homo sapiens
tttcagttccattat

SEQ ID NO: 1159222 - DNA, 15 bp, Homo sapiens
ttttcagttccatta

SEQ ID NO: 1159223 - DNA, 15 bp, Homo sapiens
tttttcagttccatt

SEQ ID NO: 1159224 - DNA, 15 bp, Homo sapiens
atttttcagttccat

SEQ ID NO: 1159225 - DNA, 15 bp, Homo sapiens
aatttttcagttcca

SEQ ID NO: 1159226 - DNA, 15 bp, Homo sapiens
gaatttttcagttcc

SEQ ID NO: 1159227 - DNA, 15 bp, Homo sapiens
ggaatttttcagttc

SEQ ID NO: 1159228 - DNA, 15 bp, Homo sapiens
aggaatttttcagtt

SEQ ID NO: 1159229 - DNA, 15 bp, Homo sapiens
taggaatttttcagt

SEQ ID NO: 1159230 - DNA, 15 bp, Homo sapiens
ataggaatttttcag

SEQ ID NO: 1159231 - DNA, 15 bp, Homo sapiens
aataggaatttttca

SEQ ID NO: 1159232 - DNA, 15 bp, Homo sapiens
caataggaatttttc

SEQ ID NO: 1159233 - DNA, 15 bp, Homo sapiens
gcaataggaattttt

SEQ ID NO: 1159234 - DNA, 15 bp, Homo sapiens
ggcaataggaatttt

SEQ ID NO: 1159235 - DNA, 15 bp, Homo sapiens
aggcaataggaattt

SEQ ID NO: 1159236 - DNA, 15 bp, Homo sapiens
taggcaataggaatt

SEQ ID NO: 1159237 - DNA, 15 bp, Homo sapiens
ctaggcaataggaat

SEQ ID NO: 1159238 - DNA, 15 bp, Homo sapiens
actaggcaataggaa

SEQ ID NO: 1159239 - DNA, 15 bp, Homo sapiens
cactaggcaatagga

SEQ ID NO: 1159240 - DNA, 15 bp, Homo sapiens
tcactaggcaatagg

SEQ ID NO: 1159241 - DNA, 15 bp, Homo sapiens
gtcactaggcaatag

SEQ ID NO: 1159242 - DNA, 15 bp, Homo sapiens
tgtcactaggcaata

SEQ ID NO: 1159243 - DNA, 15 bp, Homo sapiens
atgtcactaggcaat

SEQ ID NO: 1159244 - DNA, 15 bp, Homo sapiens
tatgtcactaggcaa

SEQ ID NO: 1159245 - DNA, 15 bp, Homo sapiens
ctatgtcactaggca

SEQ ID NO: 1159246 - DNA, 15 bp, Homo sapiens
gctatgtcactaggc

SEQ ID NO: 1159247 - DNA, 15 bp, Homo sapiens
agctatgtcactagg

SEQ ID NO: 1159248 - DNA, 15 bp, Homo sapiens
cagctatgtcactag

SEQ ID NO: 1159249 - DNA, 15 bp, Homo sapiens
acagctatgtcacta

SEQ ID NO: 1159250 - DNA, 15 bp, Homo sapiens
gacagctatgtcact

SEQ ID NO: 1159251 - DNA, 15 bp, Homo sapiens
tgacagctatgtcac

SEQ ID NO: 1159252 - DNA, 15 bp, Homo sapiens
atgacagctatgtca

SEQ ID NO: 1159253 - DNA, 15 bp, Homo sapiens
tatgacagctatgtc

SEQ ID NO: 1159254 - DNA, 15 bp, Homo sapiens
ttatgacagctatgt

SEQ ID NO: 1159255 - DNA, 15 bp, Homo sapiens
attatgacagctatg

SEQ ID NO: 1159256 - DNA, 15 bp, Homo sapiens
tattatgacagctat

SEQ ID NO: 1159257 - DNA, 15 bp, Homo sapiens
atattatgacagcta

SEQ ID NO: 1159258 - DNA, 15 bp, Homo sapiens
gatattatgacagct

SEQ ID NO: 1159259 - DNA, 15 bp, Homo sapiens
tgatattatgacagc

SEQ ID NO: 1159260 - DNA, 15 bp, Homo sapiens
atgatattatgacag

SEQ ID NO: 1159261 - DNA, 15 bp, Homo sapiens
tatgatattatgaca

SEQ ID NO: 1159262 - DNA, 15 bp, Homo sapiens
ctatgatattatgac

SEQ ID NO: 1159263 - DNA, 15 bp, Homo sapiens
actatgatattatga

SEQ ID NO: 1159264 - DNA, 15 bp, Homo sapiens
cactatgatattatg

SEQ ID NO: 1159265 - DNA, 15 bp, Homo sapiens
gcactatgatattat

SEQ ID NO: 1159266 - DNA, 15 bp, Homo sapiens
tgcactatgatatta

SEQ ID NO: 1159267 - DNA, 15 bp, Homo sapiens
ttgcactatgatatt

SEQ ID NO: 1159268 - DNA, 15 bp, Homo sapiens
gttgcactatgatat

SEQ ID NO: 1159269 - DNA, 15 bp, Homo sapiens
tgttgcactatgata

SEQ ID NO: 1159270 - DNA, 15 bp, Homo sapiens
gtgttgcactatgat

SEQ ID NO: 1159271 - DNA, 15 bp, Homo sapiens
tgtgttgcactatga

SEQ ID NO: 1159272 - DNA, 15 bp, Homo sapiens
ttgtgttgcactatg

SEQ ID NO: 1159273 - DNA, 15 bp, Homo sapiens
tttgtgttgcactat

SEQ ID NO: 1159274 - DNA, 15 bp, Homo sapiens
ttttgtgttgcacta

SEQ ID NO: 1159275 - DNA, 15 bp, Homo sapiens
attttgtgttgcact

SEQ ID NO: 1159276 - DNA, 15 bp, Homo sapiens
aattttgtgttgcac

SEQ ID NO: 1159277 - DNA, 15 bp, Homo sapiens
gaattttgtgttgca

SEQ ID NO: 1159278 - DNA, 15 bp, Homo sapiens
tgaattttgtgttgc

SEQ ID NO: 1159279 - DNA, 15 bp, Homo sapiens
ttgaattttgtgttg

SEQ ID NO: 1159280 - DNA, 15 bp, Homo sapiens
cttgaattttgtgtt

SEQ ID NO: 1159281 - DNA, 15 bp, Homo sapiens
acttgaattttgtgt

SEQ ID NO: 1159282 - DNA, 15 bp, Homo sapiens
tacttgaattttgtg

SEQ ID NO: 1159283 - DNA, 15 bp, Homo sapiens
atacttgaattttgt

SEQ ID NO: 1159284 - DNA, 15 bp, Homo sapiens
aatacttgaattttg

SEQ ID NO: 1159285 - DNA, 15 bp, Homo sapiens
aaatacttgaatttt

SEQ ID NO: 1159286 - DNA, 15 bp, Homo sapiens
caaatacttgaattt

SEQ ID NO: 1159287 - DNA, 15 bp, Homo sapiens
acaaatacttgaatt

SEQ ID NO: 1159288 - DNA, 15 bp, Homo sapiens
cacaaatacttgaat

SEQ ID NO: 1159289 - DNA, 15 bp, Homo sapiens
ccacaaatacttgaa

SEQ ID NO: 1159290 - DNA, 15 bp, Homo sapiens
accacaaatacttga

SEQ ID NO: 1159291 - DNA, 15 bp, Homo sapiens
caccacaaatacttg

SEQ ID NO: 1159292 - DNA, 15 bp, Homo sapiens
tcaccacaaatactt

SEQ ID NO: 1159293 - DNA, 15 bp, Homo sapiens
atcaccacaaatact

SEQ ID NO: 1159294 - DNA, 15 bp, Homo sapiens
catcaccacaaatac

SEQ ID NO: 1159295 - DNA, 15 bp, Homo sapiens
gcatcaccacaaata

SEQ ID NO: 1159296 - DNA, 15 bp, Homo sapiens
agcatcaccacaaat

SEQ ID NO: 1159297 - DNA, 15 bp, Homo sapiens
cagcatcaccacaaa

SEQ ID NO: 1159298 - DNA, 15 bp, Homo sapiens
ccagcatcaccacaa

SEQ ID NO: 1159299 - DNA, 15 bp, Homo sapiens
gccagcatcaccaca

SEQ ID NO: 1159300 - DNA, 15 bp, Homo sapiens
tgccagcatcaccac

SEQ ID NO: 1159301 - DNA, 15 bp, Homo sapiens
atgccagcatcacca

SEQ ID NO: 1159302 - DNA, 15 bp, Homo sapiens
tatgccagcatcacc

SEQ ID NO: 1159303 - DNA, 15 bp, Homo sapiens
ttatgccagcatcac

SEQ ID NO: 1159304 - DNA, 15 bp, Homo sapiens
gttatgccagcatca

SEQ ID NO: 1159305 - DNA, 15 bp, Homo sapiens
tgttatgccagcatc

SEQ ID NO: 1159306 - DNA, 15 bp, Homo sapiens
ttgttatgccagcat

SEQ ID NO: 1159307 - DNA, 15 bp, Homo sapiens
tttgttatgccagca

SEQ ID NO: 1159308 - DNA, 15 bp, Homo sapiens
ctttgttatgccagc

SEQ ID NO: 1159309 - DNA, 15 bp, Homo sapiens
gctttgttatgccag

SEQ ID NO: 1159310 - DNA, 15 bp, Homo sapiens
cgctttgttatgcca

SEQ ID NO: 1159311 - DNA, 15 bp, Homo sapiens
tcgctttgttatgcc

SEQ ID NO: 1159312 - DNA, 15 bp, Homo sapiens
gtcgctttgttatgc

SEQ ID NO: 1159313 - DNA, 15 bp, Homo sapiens
agtcgctttgttatg

SEQ ID NO: 1159314 - DNA, 15 bp, Homo sapiens
cagtcgctttgttat

SEQ ID NO: 1159315 - DNA, 15 bp, Homo sapiens
gcagtcgctttgtta

SEQ ID NO: 1159316 - DNA, 15 bp, Homo sapiens
tgcagtcgctttgtt

SEQ ID NO: 1159317 - DNA, 15 bp, Homo sapiens
gtgcagtcgctttgt

SEQ ID NO: 1159318 - DNA, 15 bp, Homo sapiens
agtgcagtcgctttg

SEQ ID NO: 1159319 - DNA, 15 bp, Homo sapiens
cagtgcagtcgcttt

SEQ ID NO: 1159320 - DNA, 15 bp, Homo sapiens
gcagtgcagtcgctt

SEQ ID NO: 1159321 - DNA, 15 bp, Homo sapiens
ggcagtgcagtcgct

SEQ ID NO: 1159322 - DNA, 15 bp, Homo sapiens
tggcagtgcagtcgc

SEQ ID NO: 1159323 - DNA, 15 bp, Homo sapiens
ctggcagtgcagtcg

SEQ ID NO: 1159324 - DNA, 15 bp, Homo sapiens
actggcagtgcagtc

SEQ ID NO: 1159325 - DNA, 15 bp, Homo sapiens
aactggcagtgcagt

SEQ ID NO: 1159326 - DNA, 15 bp, Homo sapiens
caactggcagtgcag

SEQ ID NO: 1159327 - DNA, 15 bp, Homo sapiens
acaactggcagtgca

SEQ ID NO: 1159328 - DNA, 15 bp, Homo sapiens
tacaactggcagtgc

SEQ ID NO: 1159329 - DNA, 15 bp, Homo sapiens
atacaactggcagtg

SEQ ID NO: 1159330 - DNA, 15 bp, Homo sapiens
tatacaactggcagt

SEQ ID NO: 1159331 - DNA, 15 bp, Homo sapiens
ttatacaactggcag

SEQ ID NO: 1159332 - DNA, 15 bp, Homo sapiens
cttatacaactggca

SEQ ID NO: 1159333 - DNA, 15 bp, Homo sapiens
tcttatacaactggc

SEQ ID NO: 1159334 - DNA, 15 bp, Homo sapiens
ctcttatacaactgg

SEQ ID NO: 1159335 - DNA, 15 bp, Homo sapiens
actcttatacaactg

SEQ ID NO: 1159336 - DNA, 15 bp, Homo sapiens
tactcttatacaact

SEQ ID NO: 1159337 - DNA, 15 bp, Homo sapiens
atactcttatacaac

SEQ ID NO: 1159338 - DNA, 15 bp, Homo sapiens
tatactcttatacaa

SEQ ID NO: 1159339 - DNA, 15 bp, Homo sapiens
ctatactcttataca

SEQ ID NO: 1159340 - DNA, 15 bp, Homo sapiens
gctatactcttatac

SEQ ID NO: 1159341 - DNA, 15 bp, Homo sapiens
tgctatactcttata

SEQ ID NO: 1159342 - DNA, 15 bp, Homo sapiens
gtgctatactcttat

SEQ ID NO: 1159343 - DNA, 15 bp, Homo sapiens
tgtgctatactctta

SEQ ID NO: 1159344 - DNA, 15 bp, Homo sapiens
atgtgctatactctt

SEQ ID NO: 1159345 - DNA, 15 bp, Homo sapiens
tatgtgctatactct

SEQ ID NO: 1159346 - DNA, 15 bp, Homo sapiens
gtatgtgctatactc

SEQ ID NO: 1159347 - DNA, 15 bp, Homo sapiens
agtatgtgctatact

SEQ ID NO: 1159348 - DNA, 15 bp, Homo sapiens
tagtatgtgctatac

SEQ ID NO: 1159349 - DNA, 15 bp, Homo sapiens
gtagtatgtgctata

SEQ ID NO: 1159350 - DNA, 15 bp, Homo sapiens
agtagtatgtgctat

SEQ ID NO: 1159351 - DNA, 15 bp, Homo sapiens
tagtagtatgtgcta

SEQ ID NO: 1159352 - DNA, 15 bp, Homo sapiens
atagtagtatgtgct

SEQ ID NO: 1159353 - DNA, 15 bp, Homo sapiens
catagtagtatgtgc

SEQ ID NO: 1159354 - DNA, 15 bp, Homo sapiens
acatagtagtatgtg

SEQ ID NO: 1159355 - DNA, 15 bp, Homo sapiens
tacatagtagtatgt

SEQ ID NO: 1159356 - DNA, 15 bp, Homo sapiens
gtacatagtagtatg

SEQ ID NO: 1159357 - DNA, 15 bp, Homo sapiens
tgtacatagtagtat

SEQ ID NO: 1159358 - DNA, 15 bp, Homo sapiens
ctgtacatagtagta

SEQ ID NO: 1159359 - DNA, 15 bp, Homo sapiens
actgtacatagtagt

SEQ ID NO: 1159360 - DNA, 15 bp, Homo sapiens
cactgtacatagtag

SEQ ID NO: 1159361 - DNA, 15 bp, Homo sapiens
gcactgtacatagta

SEQ ID NO: 1159362 - DNA, 15 bp, Homo sapiens
tgcactgtacatagt

SEQ ID NO: 1159363 - DNA, 15 bp, Homo sapiens
atgcactgtacatag

SEQ ID NO: 1159364 - DNA, 15 bp, Homo sapiens
tatgcactgtacata

SEQ ID NO: 1159365 - DNA, 15 bp, Homo sapiens
ttatgcactgtacat

SEQ ID NO: 1159366 - DNA, 15 bp, Homo sapiens
attatgcactgtaca

SEQ ID NO: 1159367 - DNA, 15 bp, Homo sapiens
tattatgcactgtac

SEQ ID NO: 1159368 - DNA, 15 bp, Homo sapiens
gtattatgcactgta

SEQ ID NO: 1159369 - DNA, 15 bp, Homo sapiens
agtattatgcactgt

SEQ ID NO: 1159370 - DNA, 15 bp, Homo sapiens
aagtattatgcactg

SEQ ID NO: 1159371 - DNA, 15 bp, Homo sapiens
caagtattatgcact

SEQ ID NO: 1159372 - DNA, 15 bp, Homo sapiens
tcaagtattatgcac

SEQ ID NO: 1159373 - DNA, 15 bp, Homo sapiens
atcaagtattatgca

SEQ ID NO: 1159374 - DNA, 15 bp, Homo sapiens
tatcaagtattatgc

SEQ ID NO: 1159375 - DNA, 15 bp, Homo sapiens
ttatcaagtattatg

SEQ ID NO: 1159376 - DNA, 15 bp, Homo sapiens
attatcaagtattat

SEQ ID NO: 1159377 - DNA, 15 bp, Homo sapiens
cattatcaagtatta

SEQ ID NO: 1159378 - DNA, 15 bp, Homo sapiens
tcattatcaagtatt

SEQ ID NO: 1159379 - DNA, 15 bp, Homo sapiens
gtcattatcaagtat

SEQ ID NO: 1159380 - DNA, 15 bp, Homo sapiens
tgtcattatcaagta

SEQ ID NO: 1159381 - DNA, 15 bp, Homo sapiens
ttgtcattatcaagt

SEQ ID NO: 1159382 - DNA, 15 bp, Homo sapiens
gttgtcattatcaag

SEQ ID NO: 1159383 - DNA, 15 bp, Homo sapiens
tgttgtcattatcaa

SEQ ID NO: 1159384 - DNA, 15 bp, Homo sapiens
ttgttgtcattatca

SEQ ID NO: 1159385 - DNA, 15 bp, Homo sapiens
tttgttgtcattatc

SEQ ID NO: 1159386 - DNA, 15 bp, Homo sapiens
atttgttgtcattat

SEQ ID NO: 1159387 - DNA, 15 bp, Homo sapiens
catttgttgtcatta

SEQ ID NO: 1159388 - DNA, 15 bp, Homo sapiens
tcatttgttgtcatt

SEQ ID NO: 1159389 - DNA, 15 bp, Homo sapiens
gtcatttgttgtcat

SEQ ID NO: 1159390 - DNA, 15 bp, Homo sapiens
agtcatttgttgtca

SEQ ID NO: 1159391 - DNA, 15 bp, Homo sapiens
aagtcatttgttgtc

SEQ ID NO: 1159392 - DNA, 15 bp, Homo sapiens
taagtcatttgttgt

SEQ ID NO: 1159393 - DNA, 15 bp, Homo sapiens
ataagtcatttgttg

SEQ ID NO: 1159394 - DNA, 15 bp, Homo sapiens
aataagtcatttgtt

SEQ ID NO: 1159395 - DNA, 15 bp, Homo sapiens
caataagtcatttgt

SEQ ID NO: 1159396 - DNA, 15 bp, Homo sapiens
tcaataagtcatttg

SEQ ID NO: 1159397 - DNA, 15 bp, Homo sapiens
atcaataagtcattt

SEQ ID NO: 1159398 - DNA, 15 bp, Homo sapiens
aatcaataagtcatt

SEQ ID NO: 1159399 - DNA, 15 bp, Homo sapiens
gaatcaataagtcat

SEQ ID NO: 1159400 - DNA, 15 bp, Homo sapiens
tgaatcaataagtca

SEQ ID NO: 1159401 - DNA, 15 bp, Homo sapiens
atgaatcaataagtc

SEQ ID NO: 1159402 - DNA, 15 bp, Homo sapiens
tatgaatcaataagt

SEQ ID NO: 1159403 - DNA, 15 bp, Homo sapiens
atatgaatcaataag

SEQ ID NO: 1159404 - DNA, 15 bp, Homo sapiens
tatatgaatcaataa

SEQ ID NO: 1159405 - DNA, 15 bp, Homo sapiens
atatatgaatcaata

SEQ ID NO: 1159406 - DNA, 15 bp, Homo sapiens
gatatatgaatcaat

SEQ ID NO: 1159407 - DNA, 15 bp, Homo sapiens
ggatatatgaatcaa

SEQ ID NO: 1159408 - DNA, 15 bp, Homo sapiens
cggatatatgaatca

SEQ ID NO: 1159409 - DNA, 15 bp, Homo sapiens
acggatatatgaatc

SEQ ID NO: 1159410 - DNA, 15 bp, Homo sapiens
aacggatatatgaat

SEQ ID NO: 1159411 - DNA, 15 bp, Homo sapiens
taacggatatatgaa

SEQ ID NO: 1159412 - DNA, 15 bp, Homo sapiens
ataacggatatatga

SEQ ID NO: 1159413 - DNA, 15 bp, Homo sapiens
tataacggatatatg

SEQ ID NO: 1159414 - DNA, 15 bp, Homo sapiens
ctataacggatatat

SEQ ID NO: 1159415 - DNA, 15 bp, Homo sapiens
gctataacggatata

SEQ ID NO: 1159416 - DNA, 15 bp, Homo sapiens
tgctataacggatat

SEQ ID NO: 1159417 - DNA, 15 bp, Homo sapiens
atgctataacggata

SEQ ID NO: 1159418 - DNA, 15 bp, Homo sapiens
aatgctataacggat

SEQ ID NO: 1159419 - DNA, 15 bp, Homo sapiens
aaatgctataacgga

SEQ ID NO: 1159420 - DNA, 15 bp, Homo sapiens
caaatgctataacgg

SEQ ID NO: 1159421 - DNA, 15 bp, Homo sapiens
acaaatgctataacg

SEQ ID NO: 1159422 - DNA, 15 bp, Homo sapiens
aacaaatgctataac

SEQ ID NO: 1159423 - DNA, 15 bp, Homo sapiens
taacaaatgctataa

SEQ ID NO: 1159424 - DNA, 15 bp, Homo sapiens
ataacaaatgctata

SEQ ID NO: 1159425 - DNA, 15 bp, Homo sapiens
aataacaaatgctat

SEQ ID NO: 1159426 - DNA, 15 bp, Homo sapiens
aaataacaaatgcta

SEQ ID NO: 1159427 - DNA, 15 bp, Homo sapiens
aaaataacaaatgct

SEQ ID NO: 1159428 - DNA, 15 bp, Homo sapiens
taaaataacaaatgc

SEQ ID NO: 1159429 - DNA, 15 bp, Homo sapiens
ctaaaataacaaatg

SEQ ID NO: 1159430 - DNA, 15 bp, Homo sapiens
tctaaaataacaaat

SEQ ID NO: 1159431 - DNA, 15 bp, Homo sapiens
ctctaaaataacaaa

SEQ ID NO: 1159432 - DNA, 15 bp, Homo sapiens
actctaaaataacaa

SEQ ID NO: 1159433 - DNA, 15 bp, Homo sapiens
tactctaaaataaca

SEQ ID NO: 1159434 - DNA, 15 bp, Homo sapiens
atactctaaaataac

SEQ ID NO: 1159435 - DNA, 15 bp, Homo sapiens
gatactctaaaataa

SEQ ID NO: 1159436 - DNA, 15 bp, Homo sapiens
ggatactctaaaata

SEQ ID NO: 1159437 - DNA, 15 bp, Homo sapiens
aggatactctaaaat

SEQ ID NO: 1159438 - DNA, 15 bp, Homo sapiens
gaggatactctaaaa

SEQ ID NO: 1159439 - DNA, 15 bp, Homo sapiens
ggaggatactctaaa

SEQ ID NO: 1159440 - DNA, 15 bp, Homo sapiens
aggaggatactctaa

SEQ ID NO: 1159441 - DNA, 15 bp, Homo sapiens
gaggaggatactcta

SEQ ID NO: 1159442 - DNA, 15 bp, Homo sapiens
ggaggaggatactct

SEQ ID NO: 1159443 - DNA, 15 bp, Homo sapiens
aggaggaggatactc

SEQ ID NO: 1159444 - DNA, 15 bp, Homo sapiens
taggaggaggatact

SEQ ID NO: 1159445 - DNA, 15 bp, Homo sapiens
ataggaggaggatac

SEQ ID NO: 1159446 - DNA, 15 bp, Homo sapiens
aataggaggaggata

SEQ ID NO: 1159447 - DNA, 15 bp, Homo sapiens
aaataggaggaggat

SEQ ID NO: 1159448 - DNA, 15 bp, Homo sapiens
aaaataggaggagga

SEQ ID NO: 1159449 - DNA, 15 bp, Homo sapiens
taaaataggaggagg

SEQ ID NO: 1159450 - DNA, 15 bp, Homo sapiens
ttaaaataggaggag

SEQ ID NO: 1159451 - DNA, 15 bp, Homo sapiens
tttaaaataggagga

SEQ ID NO: 1159452 - DNA, 15 bp, Homo sapiens
ctttaaaataggagg

SEQ ID NO: 1159453 - DNA, 15 bp, Homo sapiens
tctttaaaataggag

SEQ ID NO: 1159454 - DNA, 15 bp, Homo sapiens
ttctttaaaatagga

SEQ ID NO: 1159455 - DNA, 15 bp, Homo sapiens
tttctttaaaatagg

SEQ ID NO: 1159456 - DNA, 15 bp, Homo sapiens
ctttctttaaaatag

SEQ ID NO: 1159457 - DNA, 15 bp, Homo sapiens
actttctttaaaata

SEQ ID NO: 1159458 - DNA, 15 bp, Homo sapiens
aactttctttaaaat

SEQ ID NO: 1159459 - DNA, 15 bp, Homo sapiens
taactttctttaaaa

SEQ ID NO: 1159460 - DNA, 15 bp, Homo sapiens
ttaactttctttaaa

SEQ ID NO: 1159461 - DNA, 15 bp, Homo sapiens
attaactttctttaa

SEQ ID NO: 1159462 - DNA, 15 bp, Homo sapiens
aattaactttcttta

SEQ ID NO: 1159463 - DNA, 15 bp, Homo sapiens
taattaactttcttt

SEQ ID NO: 1159464 - DNA, 15 bp, Homo sapiens
ataattaactttctt

SEQ ID NO: 1159465 - DNA, 15 bp, Homo sapiens
tataattaactttct

SEQ ID NO: 1159466 - DNA, 15 bp, Homo sapiens
ttataattaactttc

SEQ ID NO: 1159467 - DNA, 15 bp, Homo sapiens
cttataattaacttt

SEQ ID NO: 1159468 - DNA, 15 bp, Homo sapiens
tcttataattaactt

SEQ ID NO: 1159469 - DNA, 15 bp, Homo sapiens
atcttataattaact

SEQ ID NO: 1159470 - DNA, 15 bp, Homo sapiens
tatcttataattaac

SEQ ID NO: 1159471 - DNA, 15 bp, Homo sapiens
ctatcttataattaa

SEQ ID NO: 1159472 - DNA, 15 bp, Homo sapiens
gctatcttataatta

SEQ ID NO: 1159473 - DNA, 15 bp, Homo sapiens
ggctatcttataatt

SEQ ID NO: 1159474 - DNA, 15 bp, Homo sapiens
aggctatcttataat

SEQ ID NO: 1159475 - DNA, 15 bp, Homo sapiens
taggctatcttataa

SEQ ID NO: 1159476 - DNA, 15 bp, Homo sapiens
ataggctatcttata

SEQ ID NO: 1159477 - DNA, 15 bp, Homo sapiens
aataggctatcttat

SEQ ID NO: 1159478 - DNA, 15 bp, Homo sapiens
caataggctatctta

SEQ ID NO: 1159479 - DNA, 15 bp, Homo sapiens
acaataggctatctt

SEQ ID NO: 1159480 - DNA, 15 bp, Homo sapiens
tacaataggctatct

SEQ ID NO: 1159481 - DNA, 15 bp, Homo sapiens
ctacaataggctatc

SEQ ID NO: 1159482 - DNA, 15 bp, Homo sapiens
tctacaataggctat

SEQ ID NO: 1159483 - DNA, 15 bp, Homo sapiens
ttctacaataggcta

SEQ ID NO: 1159484 - DNA, 15 bp, Homo sapiens
attctacaataggct

SEQ ID NO: 1159485 - DNA, 15 bp, Homo sapiens
tattctacaataggc

SEQ ID NO: 1159486 - DNA, 15 bp, Homo sapiens
gtattctacaatagg

SEQ ID NO: 1159487 - DNA, 15 bp, Homo sapiens
ggtattctacaatag

SEQ ID NO: 1159488 - DNA, 15 bp, Homo sapiens
tggtattctacaata

SEQ ID NO: 1159489 - DNA, 15 bp, Homo sapiens
atggtattctacaat

SEQ ID NO: 1159490 - DNA, 15 bp, Homo sapiens
aatggtattctacaa

SEQ ID NO: 1159491 - DNA, 15 bp, Homo sapiens
caatggtattctaca

SEQ ID NO: 1159492 - DNA, 15 bp, Homo sapiens
tcaatggtattctac

SEQ ID NO: 1159493 - DNA, 15 bp, Homo sapiens
ctcaatggtattcta

SEQ ID NO: 1159494 - DNA, 15 bp, Homo sapiens
tctcaatggtattct

SEQ ID NO: 1159495 - DNA, 15 bp, Homo sapiens
ttctcaatggtattc

SEQ ID NO: 1159496 - DNA, 15 bp, Homo sapiens
attctcaatggtatt

SEQ ID NO: 1159497 - DNA, 15 bp, Homo sapiens
aattctcaatggtat

SEQ ID NO: 1159498 - DNA, 15 bp, Homo sapiens
taattctcaatggta

SEQ ID NO: 1159499 - DNA, 15 bp, Homo sapiens
ctttaattctcaatg

SEQ ID NO: 1159500 - DNA, 15 bp, Homo sapiens
actttaattctcaat

SEQ ID NO: 1159501 - DNA, 15 bp, Homo sapiens
gactttaattctcaa

SEQ ID NO: 1159502 - DNA, 15 bp, Homo sapiens
tgactttaattctca

SEQ ID NO: 1159503 - DNA, 15 bp, Homo sapiens
gtgactttaattctc

SEQ ID NO: 1159504 - DNA, 15 bp, Homo sapiens
agtgactttaattct

SEQ ID NO: 1159505 - DNA, 15 bp, Homo sapiens
tagtgactttaattc

SEQ ID NO: 1159506 - DNA, 15 bp, Homo sapiens
ctagtgactttaatt

SEQ ID NO: 1159507 - DNA, 15 bp, Homo sapiens
actagtgactttaat

SEQ ID NO: 1159508 - DNA, 15 bp, Homo sapiens
aactagtgactttaa

SEQ ID NO: 1159509 - DNA, 15 bp, Homo sapiens
aaactagtgacttta

SEQ ID NO: 1159510 - DNA, 15 bp, Homo sapiens
aaaactagtgacttt

SEQ ID NO: 1159511 - DNA, 15 bp, Homo sapiens
gaaaactagtgactt

SEQ ID NO: 1159512 - DNA, 15 bp, Homo sapiens
agaaaactagtgact

SEQ ID NO: 1159513 - DNA, 15 bp, Homo sapiens
tagaaaactagtgac

SEQ ID NO: 1159514 - DNA, 15 bp, Homo sapiens
ctagaaaactagtga

SEQ ID NO: 1159515 - DNA, 15 bp, Homo sapiens
actagaaaactagtg

SEQ ID NO: 1159516 - DNA, 15 bp, Homo sapiens
aactagaaaactagt

SEQ ID NO: 1159517 - DNA, 15 bp, Homo sapiens
aaactagaaaactag

SEQ ID NO: 1159518 - DNA, 15 bp, Homo sapiens
caaactagaaaacta

SEQ ID NO: 1159519 - DNA, 15 bp, Homo sapiens
tcaaactagaaaact

SEQ ID NO: 1159520 - DNA, 15 bp, Homo sapiens
atcaaactagaaaac

SEQ ID NO: 1159521 - DNA, 15 bp, Homo sapiens
aatcaaactagaaaa

SEQ ID NO: 1159522 - DNA, 15 bp, Homo sapiens
aaatcaaactagaaa

SEQ ID NO: 1159523 - DNA, 15 bp, Homo sapiens
aaaatcaaactagaa

SEQ ID NO: 1159524 - DNA, 15 bp, Homo sapiens
caaaatcaaactaga

SEQ ID NO: 1159525 - DNA, 15 bp, Homo sapiens
tcaaaatcaaactag

SEQ ID NO: 1159526 - DNA, 15 bp, Homo sapiens
ttcaaaatcaaacta

SEQ ID NO: 1159527 - DNA, 15 bp, Homo sapiens
tttcaaaatcaaact

SEQ ID NO: 1159528 - DNA, 15 bp, Homo sapiens
ttttcaaaatcaaac

SEQ ID NO: 1159529 - DNA, 15 bp, Homo sapiens
attttcaaaatcaaa

SEQ ID NO: 1159530 - DNA, 15 bp, Homo sapiens
tattttcaaaatcaa

SEQ ID NO: 1159531 - DNA, 15 bp, Homo sapiens
ttattttcaaaatca

SEQ ID NO: 1159532 - DNA, 15 bp, Homo sapiens
tttattttcaaaatc

SEQ ID NO: 1159533 - DNA, 15 bp, Homo sapiens
gtttattttcaaaat

SEQ ID NO: 1159534 - DNA, 15 bp, Homo sapiens
tgtttattttcaaaa

SEQ ID NO: 1159535 - DNA, 15 bp, Homo sapiens
gtgtttattttcaaa

SEQ ID NO: 1159536 - DNA, 15 bp, Homo sapiens
agtgtttattttcaa

SEQ ID NO: 1159537 - DNA, 15 bp, Homo sapiens
gagtgtttattttca

SEQ ID NO: 1159538 - DNA, 15 bp, Homo sapiens
agagtgtttattttc

SEQ ID NO: 1159539 - DNA, 15 bp, Homo sapiens
cagagtgtttatttt

SEQ ID NO: 1159540 - DNA, 15 bp, Homo sapiens
acagagtgtttattt

SEQ ID NO: 1159541 - DNA, 15 bp, Homo sapiens
aacagagtgtttatt

SEQ ID NO: 1159542 - DNA, 15 bp, Homo sapiens
taacagagtgtttat

SEQ ID NO: 1159543 - DNA, 15 bp, Homo sapiens
ttaacagagtgttta

SEQ ID NO: 1159544 - DNA, 15 bp, Homo sapiens
cttaacagagtgttt

SEQ ID NO: 1159545 - DNA, 15 bp, Homo sapiens
acttaacagagtgtt

SEQ ID NO: 1159546 - DNA, 15 bp, Homo sapiens
aacttaacagagtgt

SEQ ID NO: 1159547 - DNA, 15 bp, Homo sapiens
caacttaacagagtg

SEQ ID NO: 1159548 - DNA, 15 bp, Homo sapiens
tcaacttaacagagt

SEQ ID NO: 1159549 - DNA, 15 bp, Homo sapiens
ttcaacttaacagag

SEQ ID NO: 1159550 - DNA, 15 bp, Homo sapiens
tttcaacttaacaga

SEQ ID NO: 1159551 - DNA, 15 bp, Homo sapiens
gtttcaacttaacag

SEQ ID NO: 1159552 - DNA, 15 bp, Homo sapiens
tgtttcaacttaaca

SEQ ID NO: 1159553 - DNA, 15 bp, Homo sapiens
ttgtttcaacttaac

SEQ ID NO: 1159554 - DNA, 15 bp, Homo sapiens
gttgtttcaacttaa

SEQ ID NO: 1159555 - DNA, 15 bp, Homo sapiens
cgttgtttcaactta

SEQ ID NO: 1159556 - DNA, 15 bp, Homo sapiens
acgttgtttcaactt

SEQ ID NO: 1159557 - DNA, 15 bp, Homo sapiens
aacgttgtttcaact

SEQ ID NO: 1159558 - DNA, 15 bp, Homo sapiens
taacgttgtttcaac

SEQ ID NO: 1159559 - DNA, 15 bp, Homo sapiens
ataacgttgtttcaa

SEQ ID NO: 1159560 - DNA, 15 bp, Homo sapiens
tataacgttgtttca

SEQ ID NO: 1159561 - DNA, 15 bp, Homo sapiens
ctataacgttgtttc

SEQ ID NO: 1159562 - DNA, 15 bp, Homo sapiens
tctataacgttgttt

SEQ ID NO: 1159563 - DNA, 15 bp, Homo sapiens
ttctataacgttgtt

SEQ ID NO: 1159564 - DNA, 15 bp, Homo sapiens
tttctataacgttgt

SEQ ID NO: 1159565 - DNA, 15 bp, Homo sapiens
gtttctataacgttg

SEQ ID NO: 1159566 - DNA, 15 bp, Homo sapiens
agtttctataacgtt

SEQ ID NO: 1159567 - DNA, 15 bp, Homo sapiens
cagtttctataacgt

SEQ ID NO: 1159568 - DNA, 15 bp, Homo sapiens
acagtttctataacg

SEQ ID NO: 1159569 - DNA, 15 bp, Homo sapiens
aacagtttctataac

SEQ ID NO: 1159570 - DNA, 15 bp, Homo sapiens
taacagtttctataa

SEQ ID NO: 1159571 - DNA, 15 bp, Homo sapiens
ataacagtttctata

SEQ ID NO: 1159572 - DNA, 15 bp, Homo sapiens
aataacagtttctat

SEQ ID NO: 1159573 - DNA, 15 bp, Homo sapiens
caataacagtttcta

SEQ ID NO: 1159574 - DNA, 15 bp, Homo sapiens
tcaataacagtttct

SEQ ID NO: 1159575 - DNA, 15 bp, Homo sapiens
gtcaataacagtttc

SEQ ID NO: 1159576 - DNA, 15 bp, Homo sapiens
agtcaataacagttt

SEQ ID NO: 1159577 - DNA, 15 bp, Homo sapiens
gagtcaataacagtt

SEQ ID NO: 1159578 - DNA, 15 bp, Homo sapiens
agagtcaataacagt

SEQ ID NO: 1159579 - DNA, 15 bp, Homo sapiens
tagagtcaataacag

SEQ ID NO: 1159580 - DNA, 15 bp, Homo sapiens
ttagagtcaataaca

SEQ ID NO: 1159581 - DNA, 15 bp, Homo sapiens
tttagagtcaataac

SEQ ID NO: 1159582 - DNA, 15 bp, Homo sapiens
atttagagtcaataa

SEQ ID NO: 1159583 - DNA, 15 bp, Homo sapiens
catttagagtcaata

SEQ ID NO: 1159584 - DNA, 15 bp, Homo sapiens
acatttagagtcaat

SEQ ID NO: 1159585 - DNA, 15 bp, Homo sapiens
aacatttagagtcaa

SEQ ID NO: 1159586 - DNA, 15 bp, Homo sapiens
aaacatttagagtca

SEQ ID NO: 1159587 - DNA, 15 bp, Homo sapiens
aaaacatttagagtc

SEQ ID NO: 1159588 - DNA, 15 bp, Homo sapiens
aaaaacatttagagt

SEQ ID NO: 1159589 - DNA, 15 bp, Homo sapiens
gaaaaacatttagag

SEQ ID NO: 1159590 - DNA, 15 bp, Homo sapiens
agaaaaacatttaga

SEQ ID NO: 1159591 - DNA, 15 bp, Homo sapiens
aagaaaaacatttag

SEQ ID NO: 1159592 - DNA, 15 bp, Homo sapiens
caagaaaaacattta

SEQ ID NO: 1159593 - DNA, 15 bp, Homo sapiens
acaagaaaaacattt

SEQ ID NO: 1159594 - DNA, 15 bp, Homo sapiens
tacaagaaaaacatt

SEQ ID NO: 1159595 - DNA, 15 bp, Homo sapiens
ttacaagaaaaacat

SEQ ID NO: 1159596 - DNA, 15 bp, Homo sapiens
tttacaagaaaaaca

SEQ ID NO: 1159597 - DNA, 15 bp, Homo sapiens
atttacaagaaaaac

SEQ ID NO: 1159598 - DNA, 15 bp, Homo sapiens
tatttacaagaaaaa

SEQ ID NO: 1159599 - DNA, 15 bp, Homo sapiens
ctatttacaagaaaa

SEQ ID NO: 1159600 - DNA, 15 bp, Homo sapiens
tctatttacaagaaa

SEQ ID NO: 1159601 - DNA, 15 bp, Homo sapiens
ttctatttacaagaa

SEQ ID NO: 1159602 - DNA, 15 bp, Homo sapiens
gttctatttacaaga

SEQ ID NO: 1159603 - DNA, 15 bp, Homo sapiens
agttctatttacaag

SEQ ID NO: 1159604 - DNA, 15 bp, Homo sapiens
cagttctatttacaa

SEQ ID NO: 1159605 - DNA, 15 bp, Homo sapiens
acagttctatttaca

SEQ ID NO: 1159606 - DNA, 15 bp, Homo sapiens
gacagttctatttac

SEQ ID NO: 1159607 - DNA, 15 bp, Homo sapiens
tgacagttctattta

SEQ ID NO: 1159608 - DNA, 15 bp, Homo sapiens
ttgacagttctattt

SEQ ID NO: 1159609 - DNA, 15 bp, Homo sapiens
gttgacagttctatt

SEQ ID NO: 1159610 - DNA, 15 bp, Homo sapiens
agttgacagttctat

SEQ ID NO: 1159611 - DNA, 15 bp, Homo sapiens
cagttgacagttcta

SEQ ID NO: 1159612 - DNA, 15 bp, Homo sapiens
acagttgacagttct

SEQ ID NO: 1159613 - DNA, 15 bp, Homo sapiens
aacagttgacagttc

SEQ ID NO: 1159614 - DNA, 15 bp, Homo sapiens
taacagttgacagtt

SEQ ID NO: 1159615 - DNA, 15 bp, Homo sapiens
ttaacagttgacagt

SEQ ID NO: 1159616 - DNA, 15 bp, Homo sapiens
cttaacagttgacag

SEQ ID NO: 1159617 - DNA, 15 bp, Homo sapiens
gcttaacagttgaca

SEQ ID NO: 1159618 - DNA, 15 bp, Homo sapiens
tgcttaacagttgac

SEQ ID NO: 1159619 - DNA, 15 bp, Homo sapiens
ttgcttaacagttga

SEQ ID NO: 1159620 - DNA, 15 bp, Homo sapiens
gttgcttaacagttg

SEQ ID NO: 1159621 - DNA, 15 bp, Homo sapiens
tgttgcttaacagtt

SEQ ID NO: 1159622 - DNA, 15 bp, Homo sapiens
ctgttgcttaacagt

SEQ ID NO: 1159623 - DNA, 15 bp, Homo sapiens
actgttgcttaacag

SEQ ID NO: 1159624 - DNA, 15 bp, Homo sapiens
aactgttgcttaaca

SEQ ID NO: 1159625 - DNA, 15 bp, Homo sapiens
gaactgttgcttaac

SEQ ID NO: 1159626 - DNA, 15 bp, Homo sapiens
tgaactgttgcttaa

SEQ ID NO: 1159627 - DNA, 15 bp, Homo sapiens
atgaactgttgctta

SEQ ID NO: 1159628 - DNA, 15 bp, Homo sapiens
aatgaactgttgctt

SEQ ID NO: 1159629 - DNA, 15 bp, Homo sapiens
gaatgaactgttgct

SEQ ID NO: 1159630 - DNA, 15 bp, Homo sapiens
tgaatgaactgttgc

SEQ ID NO: 1159631 - DNA, 15 bp, Homo sapiens
ttgaatgaactgttg

SEQ ID NO: 1159632 - DNA, 15 bp, Homo sapiens
gttgaatgaactgtt

SEQ ID NO: 1159633 - DNA, 15 bp, Homo sapiens
tgttgaatgaactgt

SEQ ID NO: 1159634 - DNA, 15 bp, Homo sapiens
atgttgaatgaactg

SEQ ID NO: 1159635 - DNA, 15 bp, Homo sapiens
tatgttgaatgaact

SEQ ID NO: 1159636 - DNA, 15 bp, Homo sapiens
atatgttgaatgaac

SEQ ID NO: 1159637 - DNA, 15 bp, Homo sapiens
aatatgttgaatgaa

SEQ ID NO: 1159638 - DNA, 15 bp, Homo sapiens
aaatatgttgaatga

SEQ ID NO: 1159639 - DNA, 15 bp, Homo sapiens
taaatatgttgaatg

SEQ ID NO: 1159640 - DNA, 15 bp, Homo sapiens
ataaatatgttgaat

SEQ ID NO: 1159641 - DNA, 15 bp, Homo sapiens
tataaatatgttgaa

SEQ ID NO: 1159642 - DNA, 15 bp, Homo sapiens
ttataaatatgttga

SEQ ID NO: 1159643 - DNA, 15 bp, Homo sapiens
attataaatatgttg

SEQ ID NO: 1159644 - DNA, 15 bp, Homo sapiens
aattataaatatgtt

SEQ ID NO: 1159645 - DNA, 15 bp, Homo sapiens
aaattataaatatgt

SEQ ID NO: 1159646 - DNA, 15 bp, Homo sapiens
caaattataaatatg

SEQ ID NO: 1159647 - DNA, 15 bp, Homo sapiens
ccaaattataaatat

SEQ ID NO: 1159648 - DNA, 15 bp, Homo sapiens
accaaattataaata

SEQ ID NO: 1159649 - DNA, 15 bp, Homo sapiens
aaccaaattataaat

SEQ ID NO: 1159650 - DNA, 15 bp, Homo sapiens
taaccaaattataaa

SEQ ID NO: 1159651 - DNA, 15 bp, Homo sapiens
ttaaccaaattataa

SEQ ID NO: 1159652 - DNA, 15 bp, Homo sapiens
gttaaccaaattata

SEQ ID NO: 1159653 - DNA, 15 bp, Homo sapiens
agttaaccaaattat

SEQ ID NO: 1159654 - DNA, 15 bp, Homo sapiens
aagttaaccaaatta

SEQ ID NO: 1159655 - DNA, 15 bp, Homo sapiens
caagttaaccaaatt

SEQ ID NO: 1159656 - DNA, 15 bp, Homo sapiens
gcaagttaaccaaat

SEQ ID NO: 1159657 - DNA, 15 bp, Homo sapiens
tgcaagttaaccaaa

SEQ ID NO: 1159658 - DNA, 15 bp, Homo sapiens
ctgcaagttaaccaa

SEQ ID NO: 1159659 - DNA, 15 bp, Homo sapiens
tctgcaagttaacca

SEQ ID NO: 1159660 - DNA, 15 bp, Homo sapiens
ttctgcaagttaacc

SEQ ID NO: 1159661 - DNA, 15 bp, Homo sapiens
tttctgcaagttaac

SEQ ID NO: 1159662 - DNA, 15 bp, Homo sapiens
atttctgcaagttaa

SEQ ID NO: 1159663 - DNA, 15 bp, Homo sapiens
tatttctgcaagtta

SEQ ID NO: 1159664 - DNA, 15 bp, Homo sapiens
atatttctgcaagtt

SEQ ID NO: 1159665 - DNA, 15 bp, Homo sapiens
catatttctgcaagt

SEQ ID NO: 1159666 - DNA, 15 bp, Homo sapiens
tcatatttctgcaag

SEQ ID NO: 1159667 - DNA, 15 bp, Homo sapiens
ttcatatttctgcaa

SEQ ID NO: 1159668 - DNA, 15 bp, Homo sapiens
tttcatatttctgca

SEQ ID NO: 1159669 - DNA, 15 bp, Homo sapiens
gtttcatatttctgc

SEQ ID NO: 1159670 - DNA, 15 bp, Homo sapiens
tgtttcatatttctg

SEQ ID NO: 1159671 - DNA, 15 bp, Homo sapiens
ttgtttcatatttct

SEQ ID NO: 1159672 - DNA, 15 bp, Homo sapiens
cttgtttcatatttc

SEQ ID NO: 1159673 - DNA, 15 bp, Homo sapiens
tcttgtttcatattt

SEQ ID NO: 1159674 - DNA, 15 bp, Homo sapiens
ctcttgtttcatatt

SEQ ID NO: 1159675 - DNA, 15 bp, Homo sapiens
actcttgtttcatat

SEQ ID NO: 1159676 - DNA, 15 bp, Homo sapiens
cactcttgtttcata

SEQ ID NO: 1159677 - DNA, 15 bp, Homo sapiens
ccactcttgtttcat

SEQ ID NO: 1159678 - DNA, 15 bp, Homo sapiens
cccactcttgtttca

SEQ ID NO: 1159679 - DNA, 15 bp, Homo sapiens
tcccactcttgtttc

SEQ ID NO: 1159680 - DNA, 15 bp, Homo sapiens
ctcccactcttgttt

SEQ ID NO: 1159681 - DNA, 15 bp, Homo sapiens
tctcccactcttgtt

SEQ ID NO: 1159682 - DNA, 15 bp, Homo sapiens
atctcccactcttgt

SEQ ID NO: 1159683 - DNA, 15 bp, Homo sapiens
tatctcccactcttg

SEQ ID NO: 1159684 - DNA, 15 bp, Homo sapiens
ttatctcccactctt

SEQ ID NO: 1159685 - DNA, 15 bp, Homo sapiens
cttatctcccactct

SEQ ID NO: 1159686 - DNA, 15 bp, Homo sapiens
ccttatctcccactc

SEQ ID NO: 1159687 - DNA, 15 bp, Homo sapiens
cccttatctcccact

SEQ ID NO: 1159688 - DNA, 15 bp, Homo sapiens
ccccttatctcccac

SEQ ID NO: 1159689 - DNA, 15 bp, Homo sapiens
tccccttatctccca

SEQ ID NO: 1159690 - DNA, 15 bp, Homo sapiens
gtccccttatctccc

SEQ ID NO: 1159691 - DNA, 15 bp, Homo sapiens
agtccccttatctcc

SEQ ID NO: 1159692 - DNA, 15 bp, Homo sapiens
gagtccccttatctc

SEQ ID NO: 1159693 - DNA, 15 bp, Homo sapiens
tgagtccccttatct

SEQ ID NO: 1159694 - DNA, 15 bp, Homo sapiens
ctgagtccccttatc

SEQ ID NO: 1159695 - DNA, 15 bp, Homo sapiens
gctgagtccccttat

SEQ ID NO: 1159696 - DNA, 15 bp, Homo sapiens
agctgagtcccctta

SEQ ID NO: 1159697 - DNA, 15 bp, Homo sapiens
gagctgagtcccctt

SEQ ID NO: 1159698 - DNA, 15 bp, Homo sapiens
agagctgagtcccct

SEQ ID NO: 1159699 - DNA, 15 bp, Homo sapiens
gagagctgagtcccc

SEQ ID NO: 1159700 - DNA, 15 bp, Homo sapiens
tgagagctgagtccc

SEQ ID NO: 1159701 - DNA, 15 bp, Homo sapiens
ctgagagctgagtcc

SEQ ID NO: 1159702 - DNA, 15 bp, Homo sapiens
cctgagagctgagtc

SEQ ID NO: 1159703 - DNA, 15 bp, Homo sapiens
tcctgagagctgagt

SEQ ID NO: 1159704 - DNA, 15 bp, Homo sapiens
ctcctgagagctgag

SEQ ID NO: 1159705 - DNA, 15 bp, Homo sapiens
cctcctgagagctga

SEQ ID NO: 1159706 - DNA, 15 bp, Homo sapiens
acctcctgagagctg

SEQ ID NO: 1159707 - DNA, 15 bp, Homo sapiens
gacctcctgagagct

SEQ ID NO: 1159708 - DNA, 15 bp, Homo sapiens
tgacctcctgagagc

SEQ ID NO: 1159709 - DNA, 15 bp, Homo sapiens
ttgacctcctgagag

SEQ ID NO: 1159710 - DNA, 15 bp, Homo sapiens
tttgacctcctgaga

SEQ ID NO: 1159711 - DNA, 15 bp, Homo sapiens
ttttgacctcctgag

SEQ ID NO: 1159712 - DNA, 15 bp, Homo sapiens
tttttgacctcctga

SEQ ID NO: 1159713 - DNA, 15 bp, Homo sapiens
gtttttgacctcctg

SEQ ID NO: 1159714 - DNA, 15 bp, Homo sapiens
tgtttttgacctcct

SEQ ID NO: 1159715 - DNA, 15 bp, Homo sapiens
ctgtttttgacctcc

SEQ ID NO: 1159716 - DNA, 15 bp, Homo sapiens
tctgtttttgacctc

SEQ ID NO: 1159717 - DNA, 15 bp, Homo sapiens
ctctgtttttgacct

SEQ ID NO: 1159718 - DNA, 15 bp, Homo sapiens
cctctgtttttgacc

SEQ ID NO: 1159719 - DNA, 15 bp, Homo sapiens
tcctctgtttttgac

SEQ ID NO: 1159720 - DNA, 15 bp, Homo sapiens
atcctctgtttttga

SEQ ID NO: 1159721 - DNA, 15 bp, Homo sapiens
aatcctctgtttttg

SEQ ID NO: 1159722 - DNA, 15 bp, Homo sapiens
caatcctctgttttt

SEQ ID NO: 1159723 - DNA, 15 bp, Homo sapiens
gcaatcctctgtttt

SEQ ID NO: 1159724 - DNA, 15 bp, Homo sapiens
agcaatcctctgttt

SEQ ID NO: 1159725 - DNA, 15 bp, Homo sapiens
tagcaatcctctgtt

SEQ ID NO: 1159726 - DNA, 15 bp, Homo sapiens
atagcaatcctctgt

SEQ ID NO: 1159727 - DNA, 15 bp, Homo sapiens
aatagcaatcctctg

SEQ ID NO: 1159728 - DNA, 15 bp, Homo sapiens
caatagcaatcctct

SEQ ID NO: 1159729 - DNA, 15 bp, Homo sapiens
gcaatagcaatcctc

SEQ ID NO: 1159730 - DNA, 15 bp, Homo sapiens
ggcaatagcaatcct

SEQ ID NO: 1159731 - DNA, 15 bp, Homo sapiens
gggcaatagcaatcc

SEQ ID NO: 1159732 - DNA, 15 bp, Homo sapiens
cgggcaatagcaatc

SEQ ID NO: 1159733 - DNA, 15 bp, Homo sapiens
tcgggcaatagcaat

SEQ ID NO: 1159734 - DNA, 15 bp, Homo sapiens
ctcgggcaatagcaa

SEQ ID NO: 1159735 - DNA, 15 bp, Homo sapiens
gctcgggcaatagca

SEQ ID NO: 1159736 - DNA, 15 bp, Homo sapiens
ggctcgggcaatagc

SEQ ID NO: 1159737 - DNA, 15 bp, Homo sapiens
gggctcgggcaatag

SEQ ID NO: 1159738 - DNA, 15 bp, Homo sapiens
agggctcgggcaata

SEQ ID NO: 1159739 - DNA, 15 bp, Homo sapiens
gagggctcgggcaat

SEQ ID NO: 1159740 - DNA, 15 bp, Homo sapiens
tgagggctcgggcaa

SEQ ID NO: 1159741 - DNA, 15 bp, Homo sapiens
atgagggctcgggca

SEQ ID NO: 1159742 - DNA, 15 bp, Homo sapiens
gatgagggctcgggc

SEQ ID NO: 1159743 - DNA, 15 bp, Homo sapiens
tgatgagggctcggg

SEQ ID NO: 1159744 - DNA, 15 bp, Homo sapiens
ctgatgagggctcgg

SEQ ID NO: 1159745 - DNA, 15 bp, Homo sapiens
tctgatgagggctcg

SEQ ID NO: 1159746 - DNA, 15 bp, Homo sapiens
gtctgatgagggctc

SEQ ID NO: 1159747 - DNA, 15 bp, Homo sapiens
tgtctgatgagggct

SEQ ID NO: 1159748 - DNA, 15 bp, Homo sapiens
ttgtctgatgagggc

SEQ ID NO: 1159749 - DNA, 15 bp, Homo sapiens
gttgtctgatgaggg

SEQ ID NO: 1159750 - DNA, 15 bp, Homo sapiens
ggttgtctgatgagg

SEQ ID NO: 1159751 - DNA, 15 bp, Homo sapiens
aggttgtctgatgag

SEQ ID NO: 1159752 - DNA, 15 bp, Homo sapiens
gaggttgtctgatga

SEQ ID NO: 1159753 - DNA, 15 bp, Homo sapiens
tgaggttgtctgatg

SEQ ID NO: 1159754 - DNA, 15 bp, Homo sapiens
ttgaggttgtctgat

SEQ ID NO: 1159755 - DNA, 15 bp, Homo sapiens
tttgaggttgtctga

SEQ ID NO: 1159756 - DNA, 15 bp, Homo sapiens
atttgaggttgtctg

SEQ ID NO: 1159757 - DNA, 15 bp, Homo sapiens
gatttgaggttgtct

SEQ ID NO: 1159758 - DNA, 15 bp, Homo sapiens
ggatttgaggttgtc

SEQ ID NO: 1159759 - DNA, 15 bp, Homo sapiens
aggatttgaggttgt

SEQ ID NO: 1159760 - DNA, 15 bp, Homo sapiens
gaggatttgaggttg

SEQ ID NO: 1159761 - DNA, 15 bp, Homo sapiens
ggaggatttgaggtt

SEQ ID NO: 1159762 - DNA, 15 bp, Homo sapiens
aggaggatttgaggt

SEQ ID NO: 1159763 - DNA, 15 bp, Homo sapiens
caggaggatttgagg

SEQ ID NO: 1159764 - DNA, 15 bp, Homo sapiens
acaggaggatttgag

SEQ ID NO: 1159765 - DNA, 15 bp, Homo sapiens
aacaggaggatttga

SEQ ID NO: 1159766 - DNA, 15 bp, Homo sapiens
caacaggaggatttg

SEQ ID NO: 1159767 - DNA, 15 bp, Homo sapiens
ccaacaggaggattt

SEQ ID NO: 1159768 - DNA, 15 bp, Homo sapiens
tccaacaggaggatt

SEQ ID NO: 1159769 - DNA, 15 bp, Homo sapiens
atccaacaggaggat

SEQ ID NO: 1159770 - DNA, 15 bp, Homo sapiens
catccaacaggagga

SEQ ID NO: 1159771 - DNA, 15 bp, Homo sapiens
tcatccaacaggagg

SEQ ID NO: 1159772 - DNA, 15 bp, Homo sapiens
ttcatccaacaggag

SEQ ID NO: 1159773 - DNA, 15 bp, Homo sapiens
gcttcatccaacagg

SEQ ID NO: 1159774 - DNA, 15 bp, Homo sapiens
agcttcatccaacag

SEQ ID NO: 1159775 - DNA, 15 bp, Homo sapiens
tagcttcatccaaca

SEQ ID NO: 1159776 - DNA, 15 bp, Homo sapiens
gtagcttcatccaac

SEQ ID NO: 1159777 - DNA, 15 bp, Homo sapiens
tgtagcttcatccaa

SEQ ID NO: 1159778 - DNA, 15 bp, Homo sapiens
atgtagcttcatcca

SEQ ID NO: 1159779 - DNA, 15 bp, Homo sapiens
gatgtagcttcatcc

SEQ ID NO: 1159780 - DNA, 15 bp, Homo sapiens
tgatgtagcttcatc

SEQ ID NO: 1159781 - DNA, 15 bp, Homo sapiens
ctgatgtagcttcat

SEQ ID NO: 1159782 - DNA, 15 bp, Homo sapiens
gctgatgtagcttca

SEQ ID NO: 1159783 - DNA, 15 bp, Homo sapiens
agctgatgtagcttc

SEQ ID NO: 1159784 - DNA, 15 bp, Homo sapiens
gagctgatgtagctt

SEQ ID NO: 1159785 - DNA, 15 bp, Homo sapiens
agagctgatgtagct

SEQ ID NO: 1159786 - DNA, 15 bp, Homo sapiens
cagagctgatgtagc

SEQ ID NO: 1159787 - DNA, 15 bp, Homo sapiens
ccagagctgatgtag

SEQ ID NO: 1159788 - DNA, 15 bp, Homo sapiens
tccagagctgatgta

SEQ ID NO: 1159789 - DNA, 15 bp, Homo sapiens
atccagagctgatgt

SEQ ID NO: 1159790 - DNA, 15 bp, Homo sapiens
tatccagagctgatg

SEQ ID NO: 1159791 - DNA, 15 bp, Homo sapiens
gtatccagagctgat

SEQ ID NO: 1159792 - DNA, 15 bp, Homo sapiens
agtatccagagctga

SEQ ID NO: 1159793 - DNA, 15 bp, Homo sapiens
cagtatccagagctg

SEQ ID NO: 1159794 - DNA, 15 bp, Homo sapiens
tcagtatccagagct

SEQ ID NO: 1159795 - DNA, 15 bp, Homo sapiens
ttcagtatccagagc

SEQ ID NO: 1159796 - DNA, 15 bp, Homo sapiens
tttcagtatccagag

SEQ ID NO: 1159797 - DNA, 15 bp, Homo sapiens
ctttcagtatccaga

SEQ ID NO: 1159798 - DNA, 15 bp, Homo sapiens
actttcagtatccag

SEQ ID NO: 1159799 - DNA, 15 bp, Homo sapiens
cactttcagtatcca

SEQ ID NO: 1159800 - DNA, 15 bp, Homo sapiens
tcactttcagtatcc

SEQ ID NO: 1159801 - DNA, 15 bp, Homo sapiens
ttcactttcagtatc

SEQ ID NO: 1159802 - DNA, 15 bp, Homo sapiens
tttcactttcagtat

SEQ ID NO: 1159803 - DNA, 15 bp, Homo sapiens
ttttcactttcagta

SEQ ID NO: 1159804 - DNA, 15 bp, Homo sapiens
cttttcactttcagt

SEQ ID NO: 1159805 - DNA, 15 bp, Homo sapiens
ccttttcactttcag

SEQ ID NO: 1159806 - DNA, 15 bp, Homo sapiens
accttttcactttca

SEQ ID NO: 1159807 - DNA, 15 bp, Homo sapiens
caccttttcactttc

SEQ ID NO: 1159808 - DNA, 15 bp, Homo sapiens
acaccttttcacttt

SEQ ID NO: 1159809 - DNA, 15 bp, Homo sapiens
cacaccttttcactt

SEQ ID NO: 1159810 - DNA, 15 bp, Homo sapiens
acacaccttttcact

SEQ ID NO: 1159811 - DNA, 15 bp, Homo sapiens
cacacaccttttcac

SEQ ID NO: 1159812 - DNA, 15 bp, Homo sapiens
acacacaccttttca

SEQ ID NO: 1159813 - DNA, 15 bp, Homo sapiens
cacacacaccttttc

SEQ ID NO: 1159814 - DNA, 15 bp, Homo sapiens
ccacacacacctttt

SEQ ID NO: 1159815 - DNA, 15 bp, Homo sapiens
gccacacacaccttt

SEQ ID NO: 1159816 - DNA, 15 bp, Homo sapiens
ggccacacacacctt

SEQ ID NO: 1159817 - DNA, 15 bp, Homo sapiens
aggccacacacacct

SEQ ID NO: 1159818 - DNA, 15 bp, Homo sapiens
gaggccacacacacc

SEQ ID NO: 1159819 - DNA, 15 bp, Homo sapiens
ggaggccacacacac

SEQ ID NO: 1159820 - DNA, 15 bp, Homo sapiens
gggaggccacacaca

SEQ ID NO: 1159821 - DNA, 15 bp, Homo sapiens
tgggaggccacacac

SEQ ID NO: 1159822 - DNA, 15 bp, Homo sapiens
ttgggaggccacaca

SEQ ID NO: 1159823 - DNA, 15 bp, Homo sapiens
gttgggaggccacac

SEQ ID NO: 1159824 - DNA, 15 bp, Homo sapiens
agttgggaggccaca

SEQ ID NO: 1159825 - DNA, 15 bp, Homo sapiens
aagttgggaggccac

SEQ ID NO: 1159826 - DNA, 15 bp, Homo sapiens
taagttgggaggcca

SEQ ID NO: 1159827 - DNA, 15 bp, Homo sapiens
ataagttgggaggcc

SEQ ID NO: 1159828 - DNA, 15 bp, Homo sapiens
cataagttgggaggc

SEQ ID NO: 1159829 - DNA, 15 bp, Homo sapiens
acataagttgggagg

SEQ ID NO: 1159830 - DNA, 15 bp, Homo sapiens
gacataagttgggag

SEQ ID NO: 1159831 - DNA, 15 bp, Homo sapiens
agacataagttggga

SEQ ID NO: 1159832 - DNA, 15 bp, Homo sapiens
aagacataagttggg

SEQ ID NO: 1159833 - DNA, 15 bp, Homo sapiens
taagacataagttgg

SEQ ID NO: 1159834 - DNA, 15 bp, Homo sapiens
ataagacataagttg

SEQ ID NO: 1159835 - DNA, 15 bp, Homo sapiens
aataagacataagtt

SEQ ID NO: 1159836 - DNA, 15 bp, Homo sapiens
aaataagacataagt

SEQ ID NO: 1159837 - DNA, 15 bp, Homo sapiens
taaataagacataag

SEQ ID NO: 1159838 - DNA, 15 bp, Homo sapiens
ttaaataagacataa

SEQ ID NO: 1159839 - DNA, 15 bp, Homo sapiens
attaaataagacata

SEQ ID NO: 1159840 - DNA, 15 bp, Homo sapiens
aattaaataagacat

SEQ ID NO: 1159841 - DNA, 15 bp, Homo sapiens
aaattaaataagaca

SEQ ID NO: 1159842 - DNA, 15 bp, Homo sapiens
taaattaaataagac

SEQ ID NO: 1159843 - DNA, 15 bp, Homo sapiens
ataaattaaataaga

SEQ ID NO: 1159844 - DNA, 15 bp, Homo sapiens
cataaattaaataag

SEQ ID NO: 1159845 - DNA, 15 bp, Homo sapiens
tcataaattaaataa

SEQ ID NO: 1159846 - DNA, 15 bp, Homo sapiens
ttcataaattaaata

SEQ ID NO: 1159847 - DNA, 15 bp, Homo sapiens
tttcataaattaaat

SEQ ID NO: 1159848 - DNA, 15 bp, Homo sapiens
atttcataaattaaa

SEQ ID NO: 1159849 - DNA, 15 bp, Homo sapiens
tatttcataaattaa

SEQ ID NO: 1159850 - DNA, 15 bp, Homo sapiens
ctatttcataaatta

SEQ ID NO: 1159851 - DNA, 15 bp, Homo sapiens
tctatttcataaatt

SEQ ID NO: 1159852 - DNA, 15 bp, Homo sapiens
ttctatttcataaat

SEQ ID NO: 1159853 - DNA, 15 bp, Homo sapiens
cttctatttcataaa

SEQ ID NO: 1159854 - DNA, 15 bp, Homo sapiens
ccttctatttcataa

SEQ ID NO: 1159855 - DNA, 15 bp, Homo sapiens
cccttctatttcata

SEQ ID NO: 1159856 - DNA, 15 bp, Homo sapiens
tcccttctatttcat

SEQ ID NO: 1159857 - DNA, 15 bp, Homo sapiens
atcccttctatttca

SEQ ID NO: 1159858 - DNA, 15 bp, Homo sapiens
aatcccttctatttc

SEQ ID NO: 1159859 - DNA, 15 bp, Homo sapiens
aaatcccttctattt

SEQ ID NO: 1159860 - DNA, 15 bp, Homo sapiens
aaaatcccttctatt

SEQ ID NO: 1159861 - DNA, 15 bp, Homo sapiens
caaaatcccttctat

SEQ ID NO: 1159862 - DNA, 15 bp, Homo sapiens
gcaaaatcccttcta

SEQ ID NO: 1159863 - DNA, 15 bp, Homo sapiens
agcaaaatcccttct

SEQ ID NO: 1159864 - DNA, 15 bp, Homo sapiens
cagcaaaatcccttc

SEQ ID NO: 1159865 - DNA, 15 bp, Homo sapiens
acagcaaaatccctt

SEQ ID NO: 1159866 - DNA, 15 bp, Homo sapiens
gacagcaaaatccct

SEQ ID NO: 1159867 - DNA, 15 bp, Homo sapiens
tgacagcaaaatccc

SEQ ID NO: 1159868 - DNA, 15 bp, Homo sapiens
ttgacagcaaaatcc

SEQ ID NO: 1159869 - DNA, 15 bp, Homo sapiens
gttgacagcaaaatc

SEQ ID NO: 1159870 - DNA, 15 bp, Homo sapiens
ggttgacagcaaaat

SEQ ID NO: 1159871 - DNA, 15 bp, Homo sapiens
tggttgacagcaaaa

SEQ ID NO: 1159872 - DNA, 15 bp, Homo sapiens
atggttgacagcaaa

SEQ ID NO: 1159873 - DNA, 15 bp, Homo sapiens
catggttgacagcaa

SEQ ID NO: 1159874 - DNA, 15 bp, Homo sapiens
tcatggttgacagca

SEQ ID NO: 1159875 - DNA, 15 bp, Homo sapiens
ttcatggttgacagc

SEQ ID NO: 1159876 - DNA, 15 bp, Homo sapiens
tttcatggttgacag

SEQ ID NO: 1159877 - DNA, 15 bp, Homo sapiens
ttttcatggttgaca

SEQ ID NO: 1159878 - DNA, 15 bp, Homo sapiens
tttttcatggttgac

SEQ ID NO: 1159879 - DNA, 15 bp, Homo sapiens
ttttttcatggttga

SEQ ID NO: 1159880 - DNA, 15 bp, Homo sapiens
tttttttcatggttg

SEQ ID NO: 1159881 - DNA, 15 bp, Homo sapiens
gtttttttcatggtt

SEQ ID NO: 1159882 - DNA, 15 bp, Homo sapiens
tgtttttttcatggt

SEQ ID NO: 1159883 - DNA, 15 bp, Homo sapiens
gtgtttttttcatgg

SEQ ID NO: 1159884 - DNA, 15 bp, Homo sapiens
tgtgtttttttcatg

SEQ ID NO: 1159885 - DNA, 15 bp, Homo sapiens
gtgtgtttttttcat

SEQ ID NO: 1159886 - DNA, 15 bp, Homo sapiens
tgtgtgtttttttca

SEQ ID NO: 1159887 - DNA, 15 bp, Homo sapiens
ttgtgtgtgtttttt

SEQ ID NO: 1159888 - DNA, 15 bp, Homo sapiens
cttgtgtgtgttttt

SEQ ID NO: 1159889 - DNA, 15 bp, Homo sapiens
gcttgtgtgtgtttt

SEQ ID NO: 1159890 - DNA, 15 bp, Homo sapiens
tgcttgtgtgtgttt

SEQ ID NO: 1159891 - DNA, 15 bp, Homo sapiens
gtgcttgtgtgtgtt

SEQ ID NO: 1159892 - DNA, 15 bp, Homo sapiens
tgtgcttgtgtgtgt

SEQ ID NO: 1159893 - DNA, 15 bp, Homo sapiens
ctgtgcttgtgtgtg

SEQ ID NO: 1159894 - DNA, 15 bp, Homo sapiens
cctgtgcttgtgtgt

SEQ ID NO: 1159895 - DNA, 15 bp, Homo sapiens
ccctgtgcttgtgtg

SEQ ID NO: 1159896 - DNA, 15 bp, Homo sapiens
cccctgtgcttgtgt

SEQ ID NO: 1159897 - DNA, 15 bp, Homo sapiens
ccccctgtgcttgtg

SEQ ID NO: 1159898 - DNA, 15 bp, Homo sapiens
tccccctgtgcttgt

SEQ ID NO: 1159899 - DNA, 15 bp, Homo sapiens
ttccccctgtgcttg

SEQ ID NO: 1159900 - DNA, 15 bp, Homo sapiens
tttccccctgtgctt

SEQ ID NO: 1159901 - DNA, 15 bp, Homo sapiens
ttttccccctgtgct

SEQ ID NO: 1159902 - DNA, 15 bp, Homo sapiens
tttttccccctgtgc

SEQ ID NO: 1159903 - DNA, 15 bp, Homo sapiens
gtttttccccctgtg

SEQ ID NO: 1159904 - DNA, 15 bp, Homo sapiens
tgtttttccccctgt

SEQ ID NO: 1159905 - DNA, 15 bp, Homo sapiens
gtgtttttccccctg

SEQ ID NO: 1159906 - DNA, 15 bp, Homo sapiens
tgtgtttttccccct

SEQ ID NO: 1159907 - DNA, 15 bp, Homo sapiens
ctgtgtttttccccc

SEQ ID NO: 1159908 - DNA, 15 bp, Homo sapiens
tctgtgtttttcccc

SEQ ID NO: 1159909 - DNA, 15 bp, Homo sapiens
ttctgtgtttttccc

SEQ ID NO: 1159910 - DNA, 15 bp, Homo sapiens
gttctgtgtttttcc

SEQ ID NO: 1159911 - DNA, 15 bp, Homo sapiens
cgttctgtgtttttc

SEQ ID NO: 1159912 - DNA, 15 bp, Homo sapiens
acgttctgtgttttt

SEQ ID NO: 1159913 - DNA, 15 bp, Homo sapiens
aacgttctgtgtttt

SEQ ID NO: 1159914 - DNA, 15 bp, Homo sapiens
taacgttctgtgttt

SEQ ID NO: 1159915 - DNA, 15 bp, Homo sapiens
ctaacgttctgtgtt

SEQ ID NO: 1159916 - DNA, 15 bp, Homo sapiens
tctaacgttctgtgt

SEQ ID NO: 1159917 - DNA, 15 bp, Homo sapiens
atctaacgttctgtg

SEQ ID NO: 1159918 - DNA, 15 bp, Homo sapiens
tatctaacgttctgt

SEQ ID NO: 1159919 - DNA, 15 bp, Homo sapiens
ctatctaacgttctg

SEQ ID NO: 1159920 - DNA, 15 bp, Homo sapiens
actatctaacgttct

SEQ ID NO: 1159921 - DNA, 15 bp, Homo sapiens
cactatctaacgttc

SEQ ID NO: 1159922 - DNA, 15 bp, Homo sapiens
ccactatctaacgtt

SEQ ID NO: 1159923 - DNA, 15 bp, Homo sapiens
accactatctaacgt

SEQ ID NO: 1159924 - DNA, 15 bp, Homo sapiens
aaccactatctaacg

SEQ ID NO: 1159925 - DNA, 15 bp, Homo sapiens
aaaccactatctaac

SEQ ID NO: 1159926 - DNA, 15 bp, Homo sapiens
aaaaccactatctaa

SEQ ID NO: 1159927 - DNA, 15 bp, Homo sapiens
aaaaaccactatcta

SEQ ID NO: 1159928 - DNA, 15 bp, Homo sapiens
taaaaaccactatct

SEQ ID NO: 1159929 - DNA, 15 bp, Homo sapiens
ataaaaaccactatc

SEQ ID NO: 1159930 - DNA, 15 bp, Homo sapiens
aataaaaaccactat

SEQ ID NO: 1159931 - DNA, 15 bp, Homo sapiens
aaataaaaaccacta

SEQ ID NO: 1159932 - DNA, 15 bp, Homo sapiens
aaaataaaaaccact

SEQ ID NO: 1159933 - DNA, 15 bp, Homo sapiens
aaaaataaaaaccac

SEQ ID NO: 1159934 - DNA, 15 bp, Homo sapiens
taaaaataaaaacca

SEQ ID NO: 1159935 - DNA, 15 bp, Homo sapiens
ataaaaataaaaacc

SEQ ID NO: 1159936 - DNA, 15 bp, Homo sapiens
gtctcaaaaaaataa

SEQ ID NO: 1159937 - DNA, 15 bp, Homo sapiens
cgtctcaaaaaaata

SEQ ID NO: 1159938 - DNA, 15 bp, Homo sapiens
ccgtctcaaaaaaat

SEQ ID NO: 1159939 - DNA, 15 bp, Homo sapiens
cgagaccccgtctca

SEQ ID NO: 1159940 - DNA, 15 bp, Homo sapiens
acgagaccccgtctc

SEQ ID NO: 1159941 - DNA, 15 bp, Homo sapiens
aacgagaccccgtct

SEQ ID NO: 1159942 - DNA, 15 bp, Homo sapiens
caacgagaccccgtc

SEQ ID NO: 1159943 - DNA, 15 bp, Homo sapiens
acaacgagaccccgt

SEQ ID NO: 1159944 - DNA, 15 bp, Homo sapiens
aacaacgagaccccg

SEQ ID NO: 1159945 - DNA, 15 bp, Homo sapiens
caacaacgagacccc

SEQ ID NO: 1159946 - DNA, 15 bp, Homo sapiens
gcaacaacgagaccc

SEQ ID NO: 1159947 - DNA, 15 bp, Homo sapiens
ggcaacaacgagacc

SEQ ID NO: 1159948 - DNA, 15 bp, Homo sapiens
aggcaacaacgagac

SEQ ID NO: 1159949 - DNA, 15 bp, Homo sapiens
taggcaacaacgaga

SEQ ID NO: 1159950 - DNA, 15 bp, Homo sapiens
ctaggcaacaacgag

SEQ ID NO: 1159951 - DNA, 15 bp, Homo sapiens
cctaggcaacaacga

SEQ ID NO: 1159952 - DNA, 15 bp, Homo sapiens
gcctaggcaacaacg

SEQ ID NO: 1159953 - DNA, 15 bp, Homo sapiens
agcctaggcaacaac

SEQ ID NO: 1159954 - DNA, 15 bp, Homo sapiens
acagcctaggcaaca

SEQ ID NO: 1159955 - DNA, 15 bp, Homo sapiens
tacagcctaggcaac

SEQ ID NO: 1159956 - DNA, 15 bp, Homo sapiens
ctacagcctaggcaa

SEQ ID NO: 1159957 - DNA, 15 bp, Homo sapiens
actacagcctaggca

SEQ ID NO: 1159958 - DNA, 15 bp, Homo sapiens
cactacagcctaggc

SEQ ID NO: 1159959 - DNA, 15 bp, Homo sapiens
gcactacagcctagg

SEQ ID NO: 1159960 - DNA, 15 bp, Homo sapiens
tgcactacagcctag

SEQ ID NO: 1159961 - DNA, 15 bp, Homo sapiens
ctgcactacagccta

SEQ ID NO: 1159962 - DNA, 15 bp, Homo sapiens
tgcgccactgcacta

SEQ ID NO: 1159963 - DNA, 15 bp, Homo sapiens
ggattgcgccactgc

SEQ ID NO: 1159964 - DNA, 15 bp, Homo sapiens
tggattgcgccactg

SEQ ID NO: 1159965 - DNA, 15 bp, Homo sapiens
ctggattgcgccact

SEQ ID NO: 1159966 - DNA, 15 bp, Homo sapiens
gctggattgcgccac

SEQ ID NO: 1159967 - DNA, 15 bp, Homo sapiens
agctggattgcgcca

SEQ ID NO: 1159968 - DNA, 15 bp, Homo sapiens
gagctggattgcgcc

SEQ ID NO: 1159969 - DNA, 15 bp, Homo sapiens
tgagctggattgcgc

SEQ ID NO: 1159970 - DNA, 15 bp, Homo sapiens
gtgagctggattgcg

SEQ ID NO: 1159971 - DNA, 15 bp, Homo sapiens
agtgagctggattgc

SEQ ID NO: 1159972 - DNA, 15 bp, Homo sapiens
cagtgagctggattg

SEQ ID NO: 1159973 - DNA, 15 bp, Homo sapiens
gcagtgagctggatt

SEQ ID NO: 1159974 - DNA, 15 bp, Homo sapiens
tgcagtgagctggat

SEQ ID NO: 1159975 - DNA, 15 bp, Homo sapiens
ttgcagtgagctgga

SEQ ID NO: 1159976 - DNA, 15 bp, Homo sapiens
gttgcagtgagctgg

SEQ ID NO: 1159977 - DNA, 15 bp, Homo sapiens
tggaggcagaggttg

SEQ ID NO: 1159978 - DNA, 15 bp, Homo sapiens
ctggaggcagaggtt

SEQ ID NO: 1159979 - DNA, 15 bp, Homo sapiens
cctggaggcagaggt

SEQ ID NO: 1159980 - DNA, 15 bp, Homo sapiens
ccctggaggcagagg

SEQ ID NO: 1159981 - DNA, 15 bp, Homo sapiens
ttgaaccctggaggc

SEQ ID NO: 1159982 - DNA, 15 bp, Homo sapiens
cttgaaccctggagg

SEQ ID NO: 1159983 - DNA, 15 bp, Homo sapiens
cgcttgaaccctgga

SEQ ID NO: 1159984 - DNA, 15 bp, Homo sapiens
tcgcttgaaccctgg

SEQ ID NO: 1159985 - DNA, 15 bp, Homo sapiens
atcgcttgaaccctg

SEQ ID NO: 1159986 - DNA, 15 bp, Homo sapiens
aatcgcttgaaccct

SEQ ID NO: 1159987 - DNA, 15 bp, Homo sapiens
agagaatcgcttgaa

SEQ ID NO: 1159988 - DNA, 15 bp, Homo sapiens
aagagaatcgcttga

SEQ ID NO: 1159989 - DNA, 15 bp, Homo sapiens
caagagaatcgcttg

SEQ ID NO: 1159990 - DNA, 15 bp, Homo sapiens
gcaagagaatcgctt

SEQ ID NO: 1159991 - DNA, 15 bp, Homo sapiens
ggcaagagaatcgct

SEQ ID NO: 1159992 - DNA, 15 bp, Homo sapiens
aggcaagagaatcgc

SEQ ID NO: 1159993 - DNA, 15 bp, Homo sapiens
gaggcaagagaatcg

SEQ ID NO: 1159994 - DNA, 15 bp, Homo sapiens
tgaggcaagagaatc

SEQ ID NO: 1159995 - DNA, 15 bp, Homo sapiens
ttgaggcaagagaat

SEQ ID NO: 1159996 - DNA, 15 bp, Homo sapiens
gttgaggcaagagaa

SEQ ID NO: 1159997 - DNA, 15 bp, Homo sapiens
ggttgaggcaagaga

SEQ ID NO: 1159998 - DNA, 15 bp, Homo sapiens
aggttgaggcaagag

SEQ ID NO: 1159999 - DNA, 15 bp, Homo sapiens
gaggttgaggcaaga

SEQ ID NO: 1160000 - DNA, 15 bp, Homo sapiens
ggaggttgaggcaag

SEQ ID NO: 1160001 - DNA, 15 bp, Homo sapiens
aggaggttgaggcaa

SEQ ID NO: 1160002 - DNA, 15 bp, Homo sapiens
agtggcaggcacctg

SEQ ID NO: 1160003 - DNA, 15 bp, Homo sapiens
tagtggcaggcacct

SEQ ID NO: 1160004 - DNA, 15 bp, Homo sapiens
atagtggcaggcacc

SEQ ID NO: 1160005 - DNA, 15 bp, Homo sapiens
catagtggcaggcac

SEQ ID NO: 1160006 - DNA, 15 bp, Homo sapiens
gcatagtggcaggca

SEQ ID NO: 1160007 - DNA, 15 bp, Homo sapiens
ggcatagtggcaggc

SEQ ID NO: 1160008 - DNA, 15 bp, Homo sapiens
gggcatagtggcagg

SEQ ID NO: 1160009 - DNA, 15 bp, Homo sapiens
tgggcatagtggcag

SEQ ID NO: 1160010 - DNA, 15 bp, Homo sapiens
aatgaaaccctgtct

SEQ ID NO: 1160011 - DNA, 15 bp, Homo sapiens
taatgaaaccctgtc

SEQ ID NO: 1160012 - DNA, 15 bp, Homo sapiens
ataatgaaaccctgt

SEQ ID NO: 1160013 - DNA, 15 bp, Homo sapiens
cataatgaaaccctg

SEQ ID NO: 1160014 - DNA, 15 bp, Homo sapiens
acataatgaaaccct

SEQ ID NO: 1160015 - DNA, 15 bp, Homo sapiens
aacataatgaaaccc

SEQ ID NO: 1160016 - DNA, 15 bp, Homo sapiens
caacataatgaaacc

SEQ ID NO: 1160017 - DNA, 15 bp, Homo sapiens
ccaacataatgaaac

SEQ ID NO: 1160018 - DNA, 15 bp, Homo sapiens
gccaacataatgaaa

SEQ ID NO: 1160019 - DNA, 15 bp, Homo sapiens
ggccaacataatgaa

SEQ ID NO: 1160020 - DNA, 15 bp, Homo sapiens
tggccaacataatga

SEQ ID NO: 1160021 - DNA, 15 bp, Homo sapiens
ctggccaacataatg

SEQ ID NO: 1160022 - DNA, 15 bp, Homo sapiens
cctggccaacataat

SEQ ID NO: 1160023 - DNA, 15 bp, Homo sapiens
gcctggccaacataa

SEQ ID NO: 1160024 - DNA, 15 bp, Homo sapiens
gattcgagaccagcc

SEQ ID NO: 1160025 - DNA, 15 bp, Homo sapiens
ggattcgagaccagc

SEQ ID NO: 1160026 - DNA, 15 bp, Homo sapiens
aggattcgagaccag

SEQ ID NO: 1160027 - DNA, 15 bp, Homo sapiens
caggattcgagacca

SEQ ID NO: 1160028 - DNA, 15 bp, Homo sapiens
tcaggattcgagacc

SEQ ID NO: 1160029 - DNA, 15 bp, Homo sapiens
gtcaggattcgagac

SEQ ID NO: 1160030 - DNA, 15 bp, Homo sapiens
ggtcaggattcgaga

SEQ ID NO: 1160031 - DNA, 15 bp, Homo sapiens
aggtcaggattcgag

SEQ ID NO: 1160032 - DNA, 15 bp, Homo sapiens
aaggtcaggattcga

SEQ ID NO: 1160033 - DNA, 15 bp, Homo sapiens
caaggtcaggattcg

SEQ ID NO: 1160034 - DNA, 15 bp, Homo sapiens
acaaggtcaggattc

SEQ ID NO: 1160035 - DNA, 15 bp, Homo sapiens
cacaaggtcaggatt

SEQ ID NO: 1160036 - DNA, 15 bp, Homo sapiens
tcacaaggtcaggat

SEQ ID NO: 1160037 - DNA, 15 bp, Homo sapiens
aggcggatcacaagg

SEQ ID NO: 1160038 - DNA, 15 bp, Homo sapiens
caggcggatcacaag

SEQ ID NO: 1160039 - DNA, 15 bp, Homo sapiens
gcaggcggatcacaa

SEQ ID NO: 1160040 - DNA, 15 bp, Homo sapiens
ggcaggcggatcaca

SEQ ID NO: 1160041 - DNA, 15 bp, Homo sapiens
ggccgaggcaggcgg

SEQ ID NO: 1160042 - DNA, 15 bp, Homo sapiens
aggtggctcacgcct

SEQ ID NO: 1160043 - DNA, 15 bp, Homo sapiens
aaggtggctcacgcc

SEQ ID NO: 1160044 - DNA, 15 bp, Homo sapiens
caaggtggctcacgc

SEQ ID NO: 1160045 - DNA, 15 bp, Homo sapiens
gcaaggtggctcacg

SEQ ID NO: 1160046 - DNA, 15 bp, Homo sapiens
ggcaaggtggctcac

SEQ ID NO: 1160047 - DNA, 15 bp, Homo sapiens
agccgggcaaggtgg

SEQ ID NO: 1160048 - DNA, 15 bp, Homo sapiens
cagccgggcaaggtg

SEQ ID NO: 1160049 - DNA, 15 bp, Homo sapiens
tcagccgggcaaggt

SEQ ID NO: 1160050 - DNA, 15 bp, Homo sapiens
atcagccgggcaagg

SEQ ID NO: 1160051 - DNA, 15 bp, Homo sapiens
tatcagccgggcaag

SEQ ID NO: 1160052 - DNA, 15 bp, Homo sapiens
ctatcagccgggcaa

SEQ ID NO: 1160053 - DNA, 15 bp, Homo sapiens
actatcagccgggca

SEQ ID NO: 1160054 - DNA, 15 bp, Homo sapiens
cactatcagccgggc

SEQ ID NO: 1160055 - DNA, 15 bp, Homo sapiens
ccactatcagccggg

SEQ ID NO: 1160056 - DNA, 15 bp, Homo sapiens
accactatcagccgg

SEQ ID NO: 1160057 - DNA, 15 bp, Homo sapiens
aaccactatcagccg

SEQ ID NO: 1160058 - DNA, 15 bp, Homo sapiens
taaccactatcagcc

SEQ ID NO: 1160059 - DNA, 15 bp, Homo sapiens
ataaccactatcagc

SEQ ID NO: 1160060 - DNA, 15 bp, Homo sapiens
aataaccactatcag

SEQ ID NO: 1160061 - DNA, 15 bp, Homo sapiens
aaataaccactatca

SEQ ID NO: 1160062 - DNA, 15 bp, Homo sapiens
aaaataaccactatc

SEQ ID NO: 1160063 - DNA, 15 bp, Homo sapiens
tcaaaataaccacta

SEQ ID NO: 1160064 - DNA, 15 bp, Homo sapiens
ttcaaaataaccact

SEQ ID NO: 1160065 - DNA, 15 bp, Homo sapiens
cttcaaaataaccac

SEQ ID NO: 1160066 - DNA, 15 bp, Homo sapiens
acttcaaaataacca

SEQ ID NO: 1160067 - DNA, 15 bp, Homo sapiens
tacttcaaaataacc

SEQ ID NO: 1160068 - DNA, 15 bp, Homo sapiens
ttacttcaaaataac

SEQ ID NO: 1160069 - DNA, 15 bp, Homo sapiens
attacttcaaaataa

SEQ ID NO: 1160070 - DNA, 15 bp, Homo sapiens
cattacttcaaaata

SEQ ID NO: 1160071 - DNA, 15 bp, Homo sapiens
ccattacttcaaaat

SEQ ID NO: 1160072 - DNA, 15 bp, Homo sapiens
tccattacttcaaaa

SEQ ID NO: 1160073 - DNA, 15 bp, Homo sapiens
ttccattacttcaaa

SEQ ID NO: 1160074 - DNA, 15 bp, Homo sapiens
attccattacttcaa

SEQ ID NO: 1160075 - DNA, 15 bp, Homo sapiens
tattccattacttca

SEQ ID NO: 1160076 - DNA, 15 bp, Homo sapiens
atattccattacttc

SEQ ID NO: 1160077 - DNA, 15 bp, Homo sapiens
aatattccattactt

SEQ ID NO: 1160078 - DNA, 15 bp, Homo sapiens
aaatattccattact

SEQ ID NO: 1160079 - DNA, 15 bp, Homo sapiens
aaaatattccattac

SEQ ID NO: 1160080 - DNA, 15 bp, Homo sapiens
taaaatattccatta

SEQ ID NO: 1160081 - DNA, 15 bp, Homo sapiens
ataaaatattccatt

SEQ ID NO: 1160082 - DNA, 15 bp, Homo sapiens
aataaaatattccat

SEQ ID NO: 1160083 - DNA, 15 bp, Homo sapiens
gaataaaatattcca

SEQ ID NO: 1160084 - DNA, 15 bp, Homo sapiens
agaataaaatattcc

SEQ ID NO: 1160085 - DNA, 15 bp, Homo sapiens
ttagaataaaatatt

SEQ ID NO: 1160086 - DNA, 15 bp, Homo sapiens
tttagaataaaatat

SEQ ID NO: 1160087 - DNA, 15 bp, Homo sapiens
atttagaataaaata

SEQ ID NO: 1160088 - DNA, 15 bp, Homo sapiens
aatttagaataaaat

SEQ ID NO: 1160089 - DNA, 15 bp, Homo sapiens
aaatttagaataaaa

SEQ ID NO: 1160090 - DNA, 15 bp, Homo sapiens
aaaatttagaataaa

SEQ ID NO: 1160091 - DNA, 15 bp, Homo sapiens
gaaaatttagaataa

SEQ ID NO: 1160092 - DNA, 15 bp, Homo sapiens
agaaaatttagaata

SEQ ID NO: 1160093 - DNA, 15 bp, Homo sapiens
tagaaaatttagaat

SEQ ID NO: 1160094 - DNA, 15 bp, Homo sapiens
ttagaaaatttagaa

SEQ ID NO: 1160095 - DNA, 15 bp, Homo sapiens
tttagaaaatttaga

SEQ ID NO: 1160096 - DNA, 15 bp, Homo sapiens
cattttagaaaattt

SEQ ID NO: 1160097 - DNA, 15 bp, Homo sapiens
tcattttagaaaatt

SEQ ID NO: 1160098 - DNA, 15 bp, Homo sapiens
atcattttagaaaat

SEQ ID NO: 1160099 - DNA, 15 bp, Homo sapiens
aatcattttagaaaa

SEQ ID NO: 1160100 - DNA, 15 bp, Homo sapiens
taatcattttagaaa

SEQ ID NO: 1160101 - DNA, 15 bp, Homo sapiens
ataatcattttagaa

SEQ ID NO: 1160102 - DNA, 15 bp, Homo sapiens
tataatcattttaga

SEQ ID NO: 1160103 - DNA, 15 bp, Homo sapiens
atataatcattttag

SEQ ID NO: 1160104 - DNA, 15 bp, Homo sapiens
tatataatcatttta

SEQ ID NO: 1160105 - DNA, 15 bp, Homo sapiens
atatataatcatttt

SEQ ID NO: 1160106 - DNA, 15 bp, Homo sapiens
aatatataatcattt

SEQ ID NO: 1160107 - DNA, 15 bp, Homo sapiens
aaatatataatcatt

SEQ ID NO: 1160108 - DNA, 15 bp, Homo sapiens
aaaatatataatcat

SEQ ID NO: 1160109 - DNA, 15 bp, Homo sapiens
taaaatatataatca

SEQ ID NO: 1160110 - DNA, 15 bp, Homo sapiens
ataaaatatataatc

SEQ ID NO: 1160111 - DNA, 15 bp, Homo sapiens
ttataaaatatataa

SEQ ID NO: 1160112 - DNA, 15 bp, Homo sapiens
tttataaaatatata

SEQ ID NO: 1160113 - DNA, 15 bp, Homo sapiens
ctttataaaatatat

SEQ ID NO: 1160114 - DNA, 15 bp, Homo sapiens
actttataaaatata

SEQ ID NO: 1160115 - DNA, 15 bp, Homo sapiens
tactttataaaatat

SEQ ID NO: 1160116 - DNA, 15 bp, Homo sapiens
ttactttataaaata

SEQ ID NO: 1160117 - DNA, 15 bp, Homo sapiens
tttactttataaaat

SEQ ID NO: 1160118 - DNA, 15 bp, Homo sapiens
ctttactttataaaa

SEQ ID NO: 1160119 - DNA, 15 bp, Homo sapiens
gctttactttataaa

SEQ ID NO: 1160120 - DNA, 15 bp, Homo sapiens
tgctttactttataa

SEQ ID NO: 1160121 - DNA, 15 bp, Homo sapiens
atgctttactttata

SEQ ID NO: 1160122 - DNA, 15 bp, Homo sapiens
aatgctttactttat

SEQ ID NO: 1160123 - DNA, 15 bp, Homo sapiens
gaatgctttacttta

SEQ ID NO: 1160124 - DNA, 15 bp, Homo sapiens
tgaatgctttacttt

SEQ ID NO: 1160125 - DNA, 15 bp, Homo sapiens
ttgaatgctttactt

SEQ ID NO: 1160126 - DNA, 15 bp, Homo sapiens
tttgaatgctttact

SEQ ID NO: 1160127 - DNA, 15 bp, Homo sapiens
ttttgaatgctttac

SEQ ID NO: 1160128 - DNA, 15 bp, Homo sapiens
cttttgaatgcttta

SEQ ID NO: 1160129 - DNA, 15 bp, Homo sapiens
tcttttgaatgcttt

SEQ ID NO: 1160130 - DNA, 15 bp, Homo sapiens
ttcttttgaatgctt

SEQ ID NO: 1160131 - DNA, 15 bp, Homo sapiens
tttcttttgaatgct

SEQ ID NO: 1160132 - DNA, 15 bp, Homo sapiens
ttttcttttgaatgc

SEQ ID NO: 1160133 - DNA, 15 bp, Homo sapiens
tttttcttttgaatg

SEQ ID NO: 1160134 - DNA, 15 bp, Homo sapiens
ttttttcttttgaat

SEQ ID NO: 1160135 - DNA, 15 bp, Homo sapiens
cttttttcttttgaa

SEQ ID NO: 1160136 - DNA, 15 bp, Homo sapiens
gcttttttcttttga

SEQ ID NO: 1160137 - DNA, 15 bp, Homo sapiens
agcttttttcttttg

SEQ ID NO: 1160138 - DNA, 15 bp, Homo sapiens
cagcttttttctttt

SEQ ID NO: 1160139 - DNA, 15 bp, Homo sapiens
gcagcttttttcttt

SEQ ID NO: 1160140 - DNA, 15 bp, Homo sapiens
tgcagcttttttctt

SEQ ID NO: 1160141 - DNA, 15 bp, Homo sapiens
gtgcagcttttttct

SEQ ID NO: 1160142 - DNA, 15 bp, Homo sapiens
tgtgcagcttttttc

SEQ ID NO: 1160143 - DNA, 15 bp, Homo sapiens
ttgtgcagctttttt

SEQ ID NO: 1160144 - DNA, 15 bp, Homo sapiens
tttgtgcagcttttt

SEQ ID NO: 1160145 - DNA, 15 bp, Homo sapiens
atttgtgcagctttt

SEQ ID NO: 1160146 - DNA, 15 bp, Homo sapiens
aatttgtgcagcttt

SEQ ID NO: 1160147 - DNA, 15 bp, Homo sapiens
taatttgtgcagctt

SEQ ID NO: 1160148 - DNA, 15 bp, Homo sapiens
gtaatttgtgcagct

SEQ ID NO: 1160149 - DNA, 15 bp, Homo sapiens
tgtaatttgtgcagc

SEQ ID NO: 1160150 - DNA, 15 bp, Homo sapiens
atgtaatttgtgcag

SEQ ID NO: 1160151 - DNA, 15 bp, Homo sapiens
aatgtaatttgtgca

SEQ ID NO: 1160152 - DNA, 15 bp, Homo sapiens
aaatgtaatttgtgc

SEQ ID NO: 1160153 - DNA, 15 bp, Homo sapiens
aaaatgtaatttgtg

SEQ ID NO: 1160154 - DNA, 15 bp, Homo sapiens
aaaaatgtaatttgt

SEQ ID NO: 1160155 - DNA, 15 bp, Homo sapiens
taaaaatgtaatttg

SEQ ID NO: 1160156 - DNA, 15 bp, Homo sapiens
ctaaaaatgtaattt

SEQ ID NO: 1160157 - DNA, 15 bp, Homo sapiens
gctaaaaatgtaatt

SEQ ID NO: 1160158 - DNA, 15 bp, Homo sapiens
tgctaaaaatgtaat

SEQ ID NO: 1160159 - DNA, 15 bp, Homo sapiens
gtgctaaaaatgtaa

SEQ ID NO: 1160160 - DNA, 15 bp, Homo sapiens
tgtgctaaaaatgta

SEQ ID NO: 1160161 - DNA, 15 bp, Homo sapiens
atgtgctaaaaatgt

SEQ ID NO: 1160162 - DNA, 15 bp, Homo sapiens
aatgtgctaaaaatg

SEQ ID NO: 1160163 - DNA, 15 bp, Homo sapiens
taatgtgctaaaaat

SEQ ID NO: 1160164 - DNA, 15 bp, Homo sapiens
ctaatgtgctaaaaa

SEQ ID NO: 1160165 - DNA, 15 bp, Homo sapiens
cctaatgtgctaaaa

SEQ ID NO: 1160166 - DNA, 15 bp, Homo sapiens
tcctaatgtgctaaa

SEQ ID NO: 1160167 - DNA, 15 bp, Homo sapiens
ttcctaatgtgctaa

SEQ ID NO: 1160168 - DNA, 15 bp, Homo sapiens
attcctaatgtgcta

SEQ ID NO: 1160169 - DNA, 15 bp, Homo sapiens
cattcctaatgtgct

SEQ ID NO: 1160170 - DNA, 15 bp, Homo sapiens
tcattcctaatgtgc

SEQ ID NO: 1160171 - DNA, 15 bp, Homo sapiens
ttcattcctaatgtg

SEQ ID NO: 1160172 - DNA, 15 bp, Homo sapiens
tttcattcctaatgt

SEQ ID NO: 1160173 - DNA, 15 bp, Homo sapiens
ttttcattcctaatg

SEQ ID NO: 1160174 - DNA, 15 bp, Homo sapiens
tttttcattcctaat

SEQ ID NO: 1160175 - DNA, 15 bp, Homo sapiens
gtttttcattcctaa

SEQ ID NO: 1160176 - DNA, 15 bp, Homo sapiens
agtttttcattccta

SEQ ID NO: 1160177 - DNA, 15 bp, Homo sapiens
cagtttttcattcct

SEQ ID NO: 1160178 - DNA, 15 bp, Homo sapiens
ccagtttttcattcc

SEQ ID NO: 1160179 - DNA, 15 bp, Homo sapiens
tccagtttttcattc

SEQ ID NO: 1160180 - DNA, 15 bp, Homo sapiens
ttccagtttttcatt

SEQ ID NO: 1160181 - DNA, 15 bp, Homo sapiens
tttccagtttttcat

SEQ ID NO: 1160182 - DNA, 15 bp, Homo sapiens
ttttccagtttttca

SEQ ID NO: 1160183 - DNA, 15 bp, Homo sapiens
attttccagtttttc

SEQ ID NO: 1160184 - DNA, 15 bp, Homo sapiens
tattttccagttttt

SEQ ID NO: 1160185 - DNA, 15 bp, Homo sapiens
gtattttccagtttt

SEQ ID NO: 1160186 - DNA, 15 bp, Homo sapiens
agtattttccagttt

SEQ ID NO: 1160187 - DNA, 15 bp, Homo sapiens
gagtattttccagtt

SEQ ID NO: 1160188 - DNA, 15 bp, Homo sapiens
tgagtattttccagt

SEQ ID NO: 1160189 - DNA, 15 bp, Homo sapiens
ttgagtattttccag

SEQ ID NO: 1160190 - DNA, 15 bp, Homo sapiens
tttgagtattttcca

SEQ ID NO: 1160191 - DNA, 15 bp, Homo sapiens
ttttgagtattttcc

SEQ ID NO: 1160192 - DNA, 15 bp, Homo sapiens
cttttgagtattttc

SEQ ID NO: 1160193 - DNA, 15 bp, Homo sapiens
ccttttgagtatttt

SEQ ID NO: 1160194 - DNA, 15 bp, Homo sapiens
cccttttgagtattt

SEQ ID NO: 1160195 - DNA, 15 bp, Homo sapiens
tcccttttgagtatt

SEQ ID NO: 1160196 - DNA, 15 bp, Homo sapiens
ttcccttttgagtat

SEQ ID NO: 1160197 - DNA, 15 bp, Homo sapiens
gttcccttttgagta

SEQ ID NO: 1160198 - DNA, 15 bp, Homo sapiens
agttcccttttgagt

SEQ ID NO: 1160199 - DNA, 15 bp, Homo sapiens
tagttcccttttgag

SEQ ID NO: 1160200 - DNA, 15 bp, Homo sapiens
ctagttcccttttga

SEQ ID NO: 1160201 - DNA, 15 bp, Homo sapiens
actagttcccttttg

SEQ ID NO: 1160202 - DNA, 15 bp, Homo sapiens
aactagttccctttt

SEQ ID NO: 1160203 - DNA, 15 bp, Homo sapiens
taactagttcccttt

SEQ ID NO: 1160204 - DNA, 15 bp, Homo sapiens
ttaactagttccctt

SEQ ID NO: 1160205 - DNA, 15 bp, Homo sapiens
tttaactagttccct

SEQ ID NO: 1160206 - DNA, 15 bp, Homo sapiens
gtttaactagttccc

SEQ ID NO: 1160207 - DNA, 15 bp, Homo sapiens
tgtttaactagttcc

SEQ ID NO: 1160208 - DNA, 15 bp, Homo sapiens
ctgtttaactagttc

SEQ ID NO: 1160209 - DNA, 15 bp, Homo sapiens
tctgtttaactagtt

SEQ ID NO: 1160210 - DNA, 15 bp, Homo sapiens
ttctgtttaactagt

SEQ ID NO: 1160211 - DNA, 15 bp, Homo sapiens
cttctgtttaactag

SEQ ID NO: 1160212 - DNA, 15 bp, Homo sapiens
tcttctgtttaacta

SEQ ID NO: 1160213 - DNA, 15 bp, Homo sapiens
atcttctgtttaact

SEQ ID NO: 1160214 - DNA, 15 bp, Homo sapiens
aatcttctgtttaac

SEQ ID NO: 1160215 - DNA, 15 bp, Homo sapiens
taatcttctgtttaa

SEQ ID NO: 1160216 - DNA, 15 bp, Homo sapiens
ctaatcttctgttta

SEQ ID NO: 1160217 - DNA, 15 bp, Homo sapiens
tctaatcttctgttt

SEQ ID NO: 1160218 - DNA, 15 bp, Homo sapiens
ttctaatcttctgtt

SEQ ID NO: 1160219 - DNA, 15 bp, Homo sapiens
tttctaatcttctgt

SEQ ID NO: 1160220 - DNA, 15 bp, Homo sapiens
ttttctaatcttctg

SEQ ID NO: 1160221 - DNA, 15 bp, Homo sapiens
attttctaatcttct

SEQ ID NO: 1160222 - DNA, 15 bp, Homo sapiens
aattttctaatcttc

SEQ ID NO: 1160223 - DNA, 15 bp, Homo sapiens
aaattttctaatctt

SEQ ID NO: 1160224 - DNA, 15 bp, Homo sapiens
taaattttctaatct

SEQ ID NO: 1160225 - DNA, 15 bp, Homo sapiens
ttaaattttctaatc

SEQ ID NO: 1160226 - DNA, 15 bp, Homo sapiens
atttaaattttctaa

SEQ ID NO: 1160227 - DNA, 15 bp, Homo sapiens
tatttaaattttcta

SEQ ID NO: 1160228 - DNA, 15 bp, Homo sapiens
gtatttaaattttct

SEQ ID NO: 1160229 - DNA, 15 bp, Homo sapiens
agtatttaaattttc

SEQ ID NO: 1160230 - DNA, 15 bp, Homo sapiens
aagtatttaaatttt

SEQ ID NO: 1160231 - DNA, 15 bp, Homo sapiens
taagtatttaaattt

SEQ ID NO: 1160232 - DNA, 15 bp, Homo sapiens
ataagtatttaaatt

SEQ ID NO: 1160233 - DNA, 15 bp, Homo sapiens
cataagtatttaaat

SEQ ID NO: 1160234 - DNA, 15 bp, Homo sapiens
tcataagtatttaaa

SEQ ID NO: 1160235 - DNA, 15 bp, Homo sapiens
ttcataagtatttaa

SEQ ID NO: 1160236 - DNA, 15 bp, Homo sapiens
attcataagtattta

SEQ ID NO: 1160237 - DNA, 15 bp, Homo sapiens
aattcataagtattt

SEQ ID NO: 1160238 - DNA, 15 bp, Homo sapiens
aaattcataagtatt

SEQ ID NO: 1160239 - DNA, 15 bp, Homo sapiens
aaaattcataagtat

SEQ ID NO: 1160240 - DNA, 15 bp, Homo sapiens
aaaaattcataagta

SEQ ID NO: 1160241 - DNA, 15 bp, Homo sapiens
aaaaaattcataagt

SEQ ID NO: 1160242 - DNA, 15 bp, Homo sapiens
aaaaaaattcataag

SEQ ID NO: 1160243 - DNA, 15 bp, Homo sapiens
taaaaaaattcataa

SEQ ID NO: 1160244 - DNA, 15 bp, Homo sapiens
gtaaaaaaattcata

SEQ ID NO: 1160245 - DNA, 15 bp, Homo sapiens
tgtaaaaaaattcat

SEQ ID NO: 1160246 - DNA, 15 bp, Homo sapiens
ctgtaaaaaaattca

SEQ ID NO: 1160247 - DNA, 15 bp, Homo sapiens
gctgtaaaaaaattc

SEQ ID NO: 1160248 - DNA, 15 bp, Homo sapiens
tgctgtaaaaaaatt

SEQ ID NO: 1160249 - DNA, 15 bp, Homo sapiens
atgctgtaaaaaaat

SEQ ID NO: 1160250 - DNA, 15 bp, Homo sapiens
catgctgtaaaaaaa

SEQ ID NO: 1160251 - DNA, 15 bp, Homo sapiens
ccatgctgtaaaaaa

SEQ ID NO: 1160252 - DNA, 15 bp, Homo sapiens
cccatgctgtaaaaa

SEQ ID NO: 1160253 - DNA, 15 bp, Homo sapiens
tcccatgctgtaaaa

SEQ ID NO: 1160254 - DNA, 15 bp, Homo sapiens
ttcccatgctgtaaa

SEQ ID NO: 1160255 - DNA, 15 bp, Homo sapiens
gttcccatgctgtaa

SEQ ID NO: 1160256 - DNA, 15 bp, Homo sapiens
ggttcccatgctgta

SEQ ID NO: 1160257 - DNA, 15 bp, Homo sapiens
gggttcccatgctgt

SEQ ID NO: 1160258 - DNA, 15 bp, Homo sapiens
tgggttcccatgctg

SEQ ID NO: 1160259 - DNA, 15 bp, Homo sapiens
atgggttcccatgct

SEQ ID NO: 1160260 - DNA, 15 bp, Homo sapiens
aatgggttcccatgc

SEQ ID NO: 1160261 - DNA, 15 bp, Homo sapiens
aaatgggttcccatg

SEQ ID NO: 1160262 - DNA, 15 bp, Homo sapiens
caaatgggttcccat

SEQ ID NO: 1160263 - DNA, 15 bp, Homo sapiens
acaaatgggttccca

SEQ ID NO: 1160264 - DNA, 15 bp, Homo sapiens
cacaaatgggttccc

SEQ ID NO: 1160265 - DNA, 15 bp, Homo sapiens
acacaaatgggttcc

SEQ ID NO: 1160266 - DNA, 15 bp, Homo sapiens
aacacaaatgggttc

SEQ ID NO: 1160267 - DNA, 15 bp, Homo sapiens
taacacaaatgggtt

SEQ ID NO: 1160268 - DNA, 15 bp, Homo sapiens
ataacacaaatgggt

SEQ ID NO: 1160269 - DNA, 15 bp, Homo sapiens
tataacacaaatggg

SEQ ID NO: 1160270 - DNA, 15 bp, Homo sapiens
atataacacaaatgg

SEQ ID NO: 1160271 - DNA, 15 bp, Homo sapiens
aatataacacaaatg

SEQ ID NO: 1160272 - DNA, 15 bp, Homo sapiens
aaatataacacaaat

SEQ ID NO: 1160273 - DNA, 15 bp, Homo sapiens
taaatataacacaaa

SEQ ID NO: 1160274 - DNA, 15 bp, Homo sapiens
ttaaatataacacaa

SEQ ID NO: 1160275 - DNA, 15 bp, Homo sapiens
tttaaatataacaca

SEQ ID NO: 1160276 - DNA, 15 bp, Homo sapiens
ttttaaatataacac

SEQ ID NO: 1160277 - DNA, 15 bp, Homo sapiens
tttttaaatataaca

SEQ ID NO: 1160278 - DNA, 15 bp, Homo sapiens
ctttttaaatataac

SEQ ID NO: 1160279 - DNA, 15 bp, Homo sapiens
gctttttaaatataa

SEQ ID NO: 1160280 - DNA, 15 bp, Homo sapiens
tgctttttaaatata

SEQ ID NO: 1160281 - DNA, 15 bp, Homo sapiens
ctgctttttaaatat

SEQ ID NO: 1160282 - DNA, 15 bp, Homo sapiens
tctgctttttaaata

SEQ ID NO: 1160283 - DNA, 15 bp, Homo sapiens
ttctgctttttaaat

SEQ ID NO: 1160284 - DNA, 15 bp, Homo sapiens
tatgttctgcttttt

SEQ ID NO: 1160285 - DNA, 15 bp, Homo sapiens
ttatgttctgctttt

SEQ ID NO: 1160286 - DNA, 15 bp, Homo sapiens
gttatgttctgcttt

SEQ ID NO: 1160287 - DNA, 15 bp, Homo sapiens
agttatgttctgctt

SEQ ID NO: 1160288 - DNA, 15 bp, Homo sapiens
tagttatgttctgct

SEQ ID NO: 1160289 - DNA, 15 bp, Homo sapiens
atagttatgttctgc

SEQ ID NO: 1160290 - DNA, 15 bp, Homo sapiens
catagttatgttctg

SEQ ID NO: 1160291 - DNA, 15 bp, Homo sapiens
acatagttatgttct

SEQ ID NO: 1160292 - DNA, 15 bp, Homo sapiens
tacatagttatgttc

SEQ ID NO: 1160293 - DNA, 15 bp, Homo sapiens
ctacatagttatgtt

SEQ ID NO: 1160294 - DNA, 15 bp, Homo sapiens
tctacatagttatgt

SEQ ID NO: 1160295 - DNA, 15 bp, Homo sapiens
atctacatagttatg

SEQ ID NO: 1160296 - DNA, 15 bp, Homo sapiens
aatctacatagttat

SEQ ID NO: 1160297 - DNA, 15 bp, Homo sapiens
taatctacatagtta

SEQ ID NO: 1160298 - DNA, 15 bp, Homo sapiens
ttaatctacatagtt

SEQ ID NO: 1160299 - DNA, 15 bp, Homo sapiens
tttaatctacatagt

SEQ ID NO: 1160300 - DNA, 15 bp, Homo sapiens
atttaatctacatag

SEQ ID NO: 1160301 - DNA, 15 bp, Homo sapiens
catttaatctacata

SEQ ID NO: 1160302 - DNA, 15 bp, Homo sapiens
acatttaatctacat

SEQ ID NO: 1160303 - DNA, 15 bp, Homo sapiens
aacatttaatctaca

SEQ ID NO: 1160304 - DNA, 15 bp, Homo sapiens
caacatttaatctac

SEQ ID NO: 1160305 - DNA, 15 bp, Homo sapiens
tcaacatttaatcta

SEQ ID NO: 1160306 - DNA, 15 bp, Homo sapiens
atcaacatttaatct

SEQ ID NO: 1160307 - DNA, 15 bp, Homo sapiens
aatcaacatttaatc

SEQ ID NO: 1160308 - DNA, 15 bp, Homo sapiens
taatcaacatttaat

SEQ ID NO: 1160309 - DNA, 15 bp, Homo sapiens
ataatcaacatttaa

SEQ ID NO: 1160310 - DNA, 15 bp, Homo sapiens
tataatcaacattta

SEQ ID NO: 1160311 - DNA, 15 bp, Homo sapiens
gtataatcaacattt

SEQ ID NO: 1160312 - DNA, 15 bp, Homo sapiens
tgtataatcaacatt

SEQ ID NO: 1160313 - DNA, 15 bp, Homo sapiens
ttgtataatcaacat

SEQ ID NO: 1160314 - DNA, 15 bp, Homo sapiens
tttgtataatcaaca

SEQ ID NO: 1160315 - DNA, 15 bp, Homo sapiens
ttttgtataatcaac

SEQ ID NO: 1160316 - DNA, 15 bp, Homo sapiens
attttgtataatcaa

SEQ ID NO: 1160317 - DNA, 15 bp, Homo sapiens
tattttgtataatca

SEQ ID NO: 1160318 - DNA, 15 bp, Homo sapiens
gtattttgtataatc

SEQ ID NO: 1160319 - DNA, 15 bp, Homo sapiens
tgtattttgtataat

SEQ ID NO: 1160320 - DNA, 15 bp, Homo sapiens
gtgtattttgtataa

SEQ ID NO: 1160321 - DNA, 15 bp, Homo sapiens
tgtgtattttgtata

SEQ ID NO: 1160322 - DNA, 15 bp, Homo sapiens
atgtgtattttgtat

SEQ ID NO: 1160323 - DNA, 15 bp, Homo sapiens
catgtgtattttgta

SEQ ID NO: 1160324 - DNA, 15 bp, Homo sapiens
gcatgtgtattttgt

SEQ ID NO: 1160325 - DNA, 15 bp, Homo sapiens
tgcatgtgtattttg

SEQ ID NO: 1160326 - DNA, 15 bp, Homo sapiens
atgcatgtgtatttt

SEQ ID NO: 1160327 - DNA, 15 bp, Homo sapiens
tatgcatgtgtattt

SEQ ID NO: 1160328 - DNA, 15 bp, Homo sapiens
ttatgcatgtgtatt

SEQ ID NO: 1160329 - DNA, 15 bp, Homo sapiens
tttatgcatgtgtat

SEQ ID NO: 1160330 - DNA, 15 bp, Homo sapiens
ctttatgcatgtgta

SEQ ID NO: 1160331 - DNA, 15 bp, Homo sapiens
actttatgcatgtgt

SEQ ID NO: 1160332 - DNA, 15 bp, Homo sapiens
aactttatgcatgtg

SEQ ID NO: 1160333 - DNA, 15 bp, Homo sapiens
gaactttatgcatgt

SEQ ID NO: 1160334 - DNA, 15 bp, Homo sapiens
tgaactttatgcatg

SEQ ID NO: 1160335 - DNA, 15 bp, Homo sapiens
ttgaactttatgcat

SEQ ID NO: 1160336 - DNA, 15 bp, Homo sapiens
tttgaactttatgca

SEQ ID NO: 1160337 - DNA, 15 bp, Homo sapiens
ctttgaactttatgc

SEQ ID NO: 1160338 - DNA, 15 bp, Homo sapiens
tctttgaactttatg

SEQ ID NO: 1160339 - DNA, 15 bp, Homo sapiens
atctttgaactttat

SEQ ID NO: 1160340 - DNA, 15 bp, Homo sapiens
aatctttgaacttta

SEQ ID NO: 1160341 - DNA, 15 bp, Homo sapiens
gaatctttgaacttt

SEQ ID NO: 1160342 - DNA, 15 bp, Homo sapiens
agaatctttgaactt

SEQ ID NO: 1160343 - DNA, 15 bp, Homo sapiens
tagaatctttgaact

SEQ ID NO: 1160344 - DNA, 15 bp, Homo sapiens
ttagaatctttgaac

SEQ ID NO: 1160345 - DNA, 15 bp, Homo sapiens
cttagaatctttgaa

SEQ ID NO: 1160346 - DNA, 15 bp, Homo sapiens
tcttagaatctttga

SEQ ID NO: 1160347 - DNA, 15 bp, Homo sapiens
atcttagaatctttg

SEQ ID NO: 1160348 - DNA, 15 bp, Homo sapiens
tatcttagaatcttt

SEQ ID NO: 1160349 - DNA, 15 bp, Homo sapiens
gtatcttagaatctt

SEQ ID NO: 1160350 - DNA, 15 bp, Homo sapiens
agtatcttagaatct

SEQ ID NO: 1160351 - DNA, 15 bp, Homo sapiens
tagtatcttagaatc

SEQ ID NO: 1160352 - DNA, 15 bp, Homo sapiens
ctagtatcttagaat

SEQ ID NO: 1160353 - DNA, 15 bp, Homo sapiens
tctagtatcttagaa

SEQ ID NO: 1160354 - DNA, 15 bp, Homo sapiens
ttctagtatcttaga

SEQ ID NO: 1160355 - DNA, 15 bp, Homo sapiens
tttctagtatcttag

SEQ ID NO: 1160356 - DNA, 15 bp, Homo sapiens
atttctagtatctta

SEQ ID NO: 1160357 - DNA, 15 bp, Homo sapiens
aatttctagtatctt

SEQ ID NO: 1160358 - DNA, 15 bp, Homo sapiens
taatttctagtatct

SEQ ID NO: 1160359 - DNA, 15 bp, Homo sapiens
ttaatttctagtatc

SEQ ID NO: 1160360 - DNA, 15 bp, Homo sapiens
tttaatttctagtat

SEQ ID NO: 1160361 - DNA, 15 bp, Homo sapiens
ttttaatttctagta

SEQ ID NO: 1160362 - DNA, 15 bp, Homo sapiens
cttttaatttctagt

SEQ ID NO: 1160363 - DNA, 15 bp, Homo sapiens
acttttaatttctag

SEQ ID NO: 1160364 - DNA, 15 bp, Homo sapiens
aacttttaatttcta

SEQ ID NO: 1160365 - DNA, 15 bp, Homo sapiens
caacttttaatttct

SEQ ID NO: 1160366 - DNA, 15 bp, Homo sapiens
tcaacttttaatttc

SEQ ID NO: 1160367 - DNA, 15 bp, Homo sapiens
atcaacttttaattt

SEQ ID NO: 1160368 - DNA, 15 bp, Homo sapiens
aatcaacttttaatt

SEQ ID NO: 1160369 - DNA, 15 bp, Homo sapiens
taatcaacttttaat

SEQ ID NO: 1160370 - DNA, 15 bp, Homo sapiens
ctaatcaacttttaa

SEQ ID NO: 1160371 - DNA, 15 bp, Homo sapiens
tctaatcaactttta

SEQ ID NO: 1160372 - DNA, 15 bp, Homo sapiens
ttctaatcaactttt

SEQ ID NO: 1160373 - DNA, 15 bp, Homo sapiens
tttctaatcaacttt

SEQ ID NO: 1160374 - DNA, 15 bp, Homo sapiens
ctttctaatcaactt

SEQ ID NO: 1160375 - DNA, 15 bp, Homo sapiens
cctttctaatcaact

SEQ ID NO: 1160376 - DNA, 15 bp, Homo sapiens
acctttctaatcaac

SEQ ID NO: 1160377 - DNA, 15 bp, Homo sapiens
tacctttctaatcaa

SEQ ID NO: 1160378 - DNA, 15 bp, Homo sapiens
ttacctttctaatca

SEQ ID NO: 1160379 - DNA, 15 bp, Homo sapiens
gttacctttctaatc

SEQ ID NO: 1160380 - DNA, 15 bp, Homo sapiens
tgttacctttctaat

SEQ ID NO: 1160381 - DNA, 15 bp, Homo sapiens
atgttacctttctaa

SEQ ID NO: 1160382 - DNA, 15 bp, Homo sapiens
aatgttacctttcta

SEQ ID NO: 1160383 - DNA, 15 bp, Homo sapiens
aaatgttacctttct

SEQ ID NO: 1160384 - DNA, 15 bp, Homo sapiens
aaaatgttacctttc

SEQ ID NO: 1160385 - DNA, 15 bp, Homo sapiens
gaaaatgttaccttt

SEQ ID NO: 1160386 - DNA, 15 bp, Homo sapiens
tgaaaatgttacctt

SEQ ID NO: 1160387 - DNA, 15 bp, Homo sapiens
ttgaaaatgttacct

SEQ ID NO: 1160388 - DNA, 15 bp, Homo sapiens
tttgaaaatgttacc

SEQ ID NO: 1160389 - DNA, 15 bp, Homo sapiens
atttgaaaatgttac

SEQ ID NO: 1160390 - DNA, 15 bp, Homo sapiens
aatttgaaaatgtta

SEQ ID NO: 1160391 - DNA, 15 bp, Homo sapiens
aaatttgaaaatgtt

SEQ ID NO: 1160392 - DNA, 15 bp, Homo sapiens
taaatttgaaaatgt

SEQ ID NO: 1160393 - DNA, 15 bp, Homo sapiens
gtaaatttgaaaatg

SEQ ID NO: 1160394 - DNA, 15 bp, Homo sapiens
agtaaatttgaaaat

SEQ ID NO: 1160395 - DNA, 15 bp, Homo sapiens
aagtaaatttgaaaa

SEQ ID NO: 1160396 - DNA, 15 bp, Homo sapiens
caagtaaatttgaaa

SEQ ID NO: 1160397 - DNA, 15 bp, Homo sapiens
tcaagtaaatttgaa

SEQ ID NO: 1160398 - DNA, 15 bp, Homo sapiens
ttcaagtaaatttga

SEQ ID NO: 1160399 - DNA, 15 bp, Homo sapiens
attcaagtaaatttg

SEQ ID NO: 1160400 - DNA, 15 bp, Homo sapiens
cattcaagtaaattt

SEQ ID NO: 1160401 - DNA, 15 bp, Homo sapiens
acattcaagtaaatt

SEQ ID NO: 1160402 - DNA, 15 bp, Homo sapiens
aacattcaagtaaat

SEQ ID NO: 1160403 - DNA, 15 bp, Homo sapiens
taacattcaagtaaa

SEQ ID NO: 1160404 - DNA, 15 bp, Homo sapiens
ttaacattcaagtaa

SEQ ID NO: 1160405 - DNA, 15 bp, Homo sapiens
tttaacattcaagta

SEQ ID NO: 1160406 - DNA, 15 bp, Homo sapiens
ttttaacattcaagt

SEQ ID NO: 1160407 - DNA, 15 bp, Homo sapiens
gttttaacattcaag

SEQ ID NO: 1160408 - DNA, 15 bp, Homo sapiens
agttttaacattcaa

SEQ ID NO: 1160409 - DNA, 15 bp, Homo sapiens
tagttttaacattca

SEQ ID NO: 1160410 - DNA, 15 bp, Homo sapiens
ttagttttaacattc

SEQ ID NO: 1160411 - DNA, 15 bp, Homo sapiens
attagttttaacatt

SEQ ID NO: 1160412 - DNA, 15 bp, Homo sapiens
aattagttttaacat

SEQ ID NO: 1160413 - DNA, 15 bp, Homo sapiens
aaattagttttaaca

SEQ ID NO: 1160414 - DNA, 15 bp, Homo sapiens
taaattagttttaac

SEQ ID NO: 1160415 - DNA, 15 bp, Homo sapiens
ataaattagttttaa

SEQ ID NO: 1160416 - DNA, 15 bp, Homo sapiens
tataaattagtttta

SEQ ID NO: 1160417 - DNA, 15 bp, Homo sapiens
gtataaattagtttt

SEQ ID NO: 1160418 - DNA, 15 bp, Homo sapiens
tgtataaattagttt

SEQ ID NO: 1160419 - DNA, 15 bp, Homo sapiens
ttgtataaattagtt

SEQ ID NO: 1160420 - DNA, 15 bp, Homo sapiens
attgtataaattagt

SEQ ID NO: 1160421 - DNA, 15 bp, Homo sapiens
aattgtataaattag

SEQ ID NO: 1160422 - DNA, 15 bp, Homo sapiens
aaattgtataaatta

SEQ ID NO: 1160423 - DNA, 15 bp, Homo sapiens
aaaattgtataaatt

SEQ ID NO: 1160424 - DNA, 15 bp, Homo sapiens
aaaaattgtataaat

SEQ ID NO: 1160425 - DNA, 15 bp, Homo sapiens
caaaaattgtataaa

SEQ ID NO: 1160426 - DNA, 15 bp, Homo sapiens
ccaaaaattgtataa

SEQ ID NO: 1160427 - DNA, 15 bp, Homo sapiens
cccaaaaattgtata

SEQ ID NO: 1160428 - DNA, 15 bp, Homo sapiens
tcccaaaaattgtat

SEQ ID NO: 1160429 - DNA, 15 bp, Homo sapiens
atcccaaaaattgta

SEQ ID NO: 1160430 - DNA, 15 bp, Homo sapiens
tatcccaaaaattgt

SEQ ID NO: 1160431 - DNA, 15 bp, Homo sapiens
ttatcccaaaaattg

SEQ ID NO: 1160432 - DNA, 15 bp, Homo sapiens
cttatcccaaaaatt

SEQ ID NO: 1160433 - DNA, 15 bp, Homo sapiens
ccttatcccaaaaat

SEQ ID NO: 1160434 - DNA, 15 bp, Homo sapiens
accttatcccaaaaa

SEQ ID NO: 1160435 - DNA, 15 bp, Homo sapiens
caccttatcccaaaa

SEQ ID NO: 1160436 - DNA, 15 bp, Homo sapiens
acaccttatcccaaa

SEQ ID NO: 1160437 - DNA, 15 bp, Homo sapiens
gacaccttatcccaa

SEQ ID NO: 1160438 - DNA, 15 bp, Homo sapiens
agacaccttatccca

SEQ ID NO: 1160439 - DNA, 15 bp, Homo sapiens
cagacaccttatccc

SEQ ID NO: 1160440 - DNA, 15 bp, Homo sapiens
acagacaccttatcc

SEQ ID NO: 1160441 - DNA, 15 bp, Homo sapiens
gacagacaccttatc

SEQ ID NO: 1160442 - DNA, 15 bp, Homo sapiens
agacagacaccttat

SEQ ID NO: 1160443 - DNA, 15 bp, Homo sapiens
cagacagacacctta

SEQ ID NO: 1160444 - DNA, 15 bp, Homo sapiens
tcagacagacacctt

SEQ ID NO: 1160445 - DNA, 15 bp, Homo sapiens
atcagacagacacct

SEQ ID NO: 1160446 - DNA, 15 bp, Homo sapiens
aatcagacagacacc

SEQ ID NO: 1160447 - DNA, 15 bp, Homo sapiens
aaatcagacagacac

SEQ ID NO: 1160448 - DNA, 15 bp, Homo sapiens
taaatcagacagaca

SEQ ID NO: 1160449 - DNA, 15 bp, Homo sapiens
ataaatcagacagac

SEQ ID NO: 1160450 - DNA, 15 bp, Homo sapiens
gataaatcagacaga

SEQ ID NO: 1160451 - DNA, 15 bp, Homo sapiens
tgataaatcagacag

SEQ ID NO: 1160452 - DNA, 15 bp, Homo sapiens
ttgataaatcagaca

SEQ ID NO: 1160453 - DNA, 15 bp, Homo sapiens
attgataaatcagac

SEQ ID NO: 1160454 - DNA, 15 bp, Homo sapiens
tattgataaatcaga

SEQ ID NO: 1160455 - DNA, 15 bp, Homo sapiens
ctattgataaatcag

SEQ ID NO: 1160456 - DNA, 15 bp, Homo sapiens
cctattgataaatca

SEQ ID NO: 1160457 - DNA, 15 bp, Homo sapiens
acctattgataaatc

SEQ ID NO: 1160458 - DNA, 15 bp, Homo sapiens
aacctattgataaat

SEQ ID NO: 1160459 - DNA, 15 bp, Homo sapiens
caacctattgataaa

SEQ ID NO: 1160460 - DNA, 15 bp, Homo sapiens
acaacctattgataa

SEQ ID NO: 1160461 - DNA, 15 bp, Homo sapiens
gacaacctattgata

SEQ ID NO: 1160462 - DNA, 15 bp, Homo sapiens
ggacaacctattgat

SEQ ID NO: 1160463 - DNA, 15 bp, Homo sapiens
tggacaacctattga

SEQ ID NO: 1160464 - DNA, 15 bp, Homo sapiens
ttggacaacctattg

SEQ ID NO: 1160465 - DNA, 15 bp, Homo sapiens
cttggacaacctatt

SEQ ID NO: 1160466 - DNA, 15 bp, Homo sapiens
tcttggacaacctat

SEQ ID NO: 1160467 - DNA, 15 bp, Homo sapiens
ttcttggacaaccta

SEQ ID NO: 1160468 - DNA, 15 bp, Homo sapiens
cttcttggacaacct

SEQ ID NO: 1160469 - DNA, 15 bp, Homo sapiens
gcttcttggacaacc

SEQ ID NO: 1160470 - DNA, 15 bp, Homo sapiens
ggcttcttggacaac

SEQ ID NO: 1160471 - DNA, 15 bp, Homo sapiens
gggcttcttggacaa

SEQ ID NO: 1160472 - DNA, 15 bp, Homo sapiens
agggcttcttggaca

SEQ ID NO: 1160473 - DNA, 15 bp, Homo sapiens
cagggcttcttggac

SEQ ID NO: 1160474 - DNA, 15 bp, Homo sapiens
ccagggcttcttgga

SEQ ID NO: 1160475 - DNA, 15 bp, Homo sapiens
tccagggcttcttgg

SEQ ID NO: 1160476 - DNA, 15 bp, Homo sapiens
gtccagggcttcttg

SEQ ID NO: 1160477 - DNA, 15 bp, Homo sapiens
tgtccagggcttctt

SEQ ID NO: 1160478 - DNA, 15 bp, Homo sapiens
ttgtccagggcttct

SEQ ID NO: 1160479 - DNA, 15 bp, Homo sapiens
tttgtccagggcttc

SEQ ID NO: 1160480 - DNA, 15 bp, Homo sapiens
ctttgtccagggctt

SEQ ID NO: 1160481 - DNA, 15 bp, Homo sapiens
gctttgtccagggct

SEQ ID NO: 1160482 - DNA, 15 bp, Homo sapiens
ggctttgtccagggc

SEQ ID NO: 1160483 - DNA, 15 bp, Homo sapiens
tggctttgtccaggg

SEQ ID NO: 1160484 - DNA, 15 bp, Homo sapiens
ctggctttgtccagg

SEQ ID NO: 1160485 - DNA, 15 bp, Homo sapiens
tctggctttgtccag

SEQ ID NO: 1160486 - DNA, 15 bp, Homo sapiens
ctctggctttgtcca

SEQ ID NO: 1160487 - DNA, 15 bp, Homo sapiens
tctctggctttgtcc

SEQ ID NO: 1160488 - DNA, 15 bp, Homo sapiens
ttctctggctttgtc

SEQ ID NO: 1160489 - DNA, 15 bp, Homo sapiens
cttctctggctttgt

SEQ ID NO: 1160490 - DNA, 15 bp, Homo sapiens
ccttctctggctttg

SEQ ID NO: 1160491 - DNA, 15 bp, Homo sapiens
gccttctctggcttt

SEQ ID NO: 1160492 - DNA, 15 bp, Homo sapiens
ggccttctctggctt

SEQ ID NO: 1160493 - DNA, 15 bp, Homo sapiens
cggccttctctggct

SEQ ID NO: 1160494 - DNA, 15 bp, Homo sapiens
gcggccttctctggc

SEQ ID NO: 1160495 - DNA, 15 bp, Homo sapiens
tgcggccttctctgg

SEQ ID NO: 1160496 - DNA, 15 bp, Homo sapiens
gtgcggccttctctg

SEQ ID NO: 1160497 - DNA, 15 bp, Homo sapiens
ggtgcggccttctct

SEQ ID NO: 1160498 - DNA, 15 bp, Homo sapiens
aggtgcggccttctc

SEQ ID NO: 1160499 - DNA, 15 bp, Homo sapiens
caggtgcggccttct

SEQ ID NO: 1160500 - DNA, 15 bp, Homo sapiens
gcaggtgcggccttc

SEQ ID NO: 1160501 - DNA, 15 bp, Homo sapiens
tgcaggtgcggcctt

SEQ ID NO: 1160502 - DNA, 15 bp, Homo sapiens
atgcaggtgcggcct

SEQ ID NO: 1160503 - DNA, 15 bp, Homo sapiens
aatgcaggtgcggcc

SEQ ID NO: 1160504 - DNA, 15 bp, Homo sapiens
caatgcaggtgcggc

SEQ ID NO: 1160505 - DNA, 15 bp, Homo sapiens
acaatgcaggtgcgg

SEQ ID NO: 1160506 - DNA, 15 bp, Homo sapiens
cacaatgcaggtgcg

SEQ ID NO: 1160507 - DNA, 15 bp, Homo sapiens
tcacaatgcaggtgc

SEQ ID NO: 1160508 - DNA, 15 bp, Homo sapiens
atcacaatgcaggtg

SEQ ID NO: 1160509 - DNA, 15 bp, Homo sapiens
aatcacaatgcaggt

SEQ ID NO: 1160510 - DNA, 15 bp, Homo sapiens
caatcacaatgcagg

SEQ ID NO: 1160511 - DNA, 15 bp, Homo sapiens
gcaatcacaatgcag

SEQ ID NO: 1160512 - DNA, 15 bp, Homo sapiens
agcaatcacaatgca

SEQ ID NO: 1160513 - DNA, 15 bp, Homo sapiens
gagcaatcacaatgc

SEQ ID NO: 1160514 - DNA, 15 bp, Homo sapiens
tgagcaatcacaatg

SEQ ID NO: 1160515 - DNA, 15 bp, Homo sapiens
gtgagcaatcacaat

SEQ ID NO: 1160516 - DNA, 15 bp, Homo sapiens
ggtgagcaatcacaa

SEQ ID NO: 1160517 - DNA, 15 bp, Homo sapiens
cggtgagcaatcaca

SEQ ID NO: 1160518 - DNA, 15 bp, Homo sapiens
gcggtgagcaatcac

SEQ ID NO: 1160519 - DNA, 15 bp, Homo sapiens
ggcggtgagcaatca

SEQ ID NO: 1160520 - DNA, 15 bp, Homo sapiens
aggcggtgagcaatc

SEQ ID NO: 1160521 - DNA, 15 bp, Homo sapiens
caggcggtgagcaat

SEQ ID NO: 1160522 - DNA, 15 bp, Homo sapiens
acaggcggtgagcaa

SEQ ID NO: 1160523 - DNA, 15 bp, Homo sapiens
gacaggcggtgagca

SEQ ID NO: 1160524 - DNA, 15 bp, Homo sapiens
ggacaggcggtgagc

SEQ ID NO: 1160525 - DNA, 15 bp, Homo sapiens
tggacaggcggtgag

SEQ ID NO: 1160526 - DNA, 15 bp, Homo sapiens
gtggacaggcggtga

SEQ ID NO: 1160527 - DNA, 15 bp, Homo sapiens
ggtggacaggcggtg

SEQ ID NO: 1160528 - DNA, 15 bp, Homo sapiens
tggtggacaggcggt

SEQ ID NO: 1160529 - DNA, 15 bp, Homo sapiens
atggtggacaggcgg

SEQ ID NO: 1160530 - DNA, 15 bp, Homo sapiens
gatggtggacaggcg

SEQ ID NO: 1160531 - DNA, 15 bp, Homo sapiens
ggatggtggacaggc

SEQ ID NO: 1160532 - DNA, 15 bp, Homo sapiens
tggatggtggacagg

SEQ ID NO: 1160533 - DNA, 15 bp, Homo sapiens
ctggatggtggacag

SEQ ID NO: 1160534 - DNA, 15 bp, Homo sapiens
tctggatggtggaca

SEQ ID NO: 1160535 - DNA, 15 bp, Homo sapiens
ttctggatggtggac

SEQ ID NO: 1160536 - DNA, 15 bp, Homo sapiens
attctggatggtgga

SEQ ID NO: 1160537 - DNA, 15 bp, Homo sapiens
cattctggatggtgg

SEQ ID NO: 1160538 - DNA, 15 bp, Homo sapiens
gcattctggatggtg

SEQ ID NO: 1160539 - DNA, 15 bp, Homo sapiens
tgcattctggatggt

SEQ ID NO: 1160540 - DNA, 15 bp, Homo sapiens
ctgcattctggatgg

SEQ ID NO: 1160541 - DNA, 15 bp, Homo sapiens
tctgcattctggatg

SEQ ID NO: 1160542 - DNA, 15 bp, Homo sapiens
gtctgcattctggat

SEQ ID NO: 1160543 - DNA, 15 bp, Homo sapiens
agtctgcattctgga

SEQ ID NO: 1160544 - DNA, 15 bp, Homo sapiens
aagtctgcattctgg

SEQ ID NO: 1160545 - DNA, 15 bp, Homo sapiens
taagtctgcattctg

SEQ ID NO: 1160546 - DNA, 15 bp, Homo sapiens
ttaagtctgcattct

SEQ ID NO: 1160547 - DNA, 15 bp, Homo sapiens
attaagtctgcattc

SEQ ID NO: 1160548 - DNA, 15 bp, Homo sapiens
tattaagtctgcatt

SEQ ID NO: 1160549 - DNA, 15 bp, Homo sapiens
ctattaagtctgcat

SEQ ID NO: 1160550 - DNA, 15 bp, Homo sapiens
actattaagtctgca

SEQ ID NO: 1160551 - DNA, 15 bp, Homo sapiens
cactattaagtctgc

SEQ ID NO: 1160552 - DNA, 15 bp, Homo sapiens
ccactattaagtctg

SEQ ID NO: 1160553 - DNA, 15 bp, Homo sapiens
accactattaagtct

SEQ ID NO: 1160554 - DNA, 15 bp, Homo sapiens
caccactattaagtc

SEQ ID NO: 1160555 - DNA, 15 bp, Homo sapiens
acaccactattaagt

SEQ ID NO: 1160556 - DNA, 15 bp, Homo sapiens
aacaccactattaag

SEQ ID NO: 1160557 - DNA, 15 bp, Homo sapiens
aaacaccactattaa

SEQ ID NO: 1160558 - DNA, 15 bp, Homo sapiens
gaaacaccactatta

SEQ ID NO: 1160559 - DNA, 15 bp, Homo sapiens
tgaaacaccactatt

SEQ ID NO: 1160560 - DNA, 15 bp, Homo sapiens
ctgaaacaccactat

SEQ ID NO: 1160561 - DNA, 15 bp, Homo sapiens
tctgaaacaccacta

SEQ ID NO: 1160562 - DNA, 15 bp, Homo sapiens
ttctgaaacaccact

SEQ ID NO: 1160563 - DNA, 15 bp, Homo sapiens
attctgaaacaccac

SEQ ID NO: 1160564 - DNA, 15 bp, Homo sapiens
cattctgaaacacca

SEQ ID NO: 1160565 - DNA, 15 bp, Homo sapiens
ccattctgaaacacc

SEQ ID NO: 1160566 - DNA, 15 bp, Homo sapiens
cccattctgaaacac

SEQ ID NO: 1160567 - DNA, 15 bp, Homo sapiens
tcccattctgaaaca

SEQ ID NO: 1160568 - DNA, 15 bp, Homo sapiens
ctcccattctgaaac

SEQ ID NO: 1160569 - DNA, 15 bp, Homo sapiens
tctcccattctgaaa

SEQ ID NO: 1160570 - DNA, 15 bp, Homo sapiens
ctctcccattctgaa

SEQ ID NO: 1160571 - DNA, 15 bp, Homo sapiens
actctcccattctga

SEQ ID NO: 1160572 - DNA, 15 bp, Homo sapiens
gactctcccattctg

SEQ ID NO: 1160573 - DNA, 15 bp, Homo sapiens
tgactctcccattct

SEQ ID NO: 1160574 - DNA, 15 bp, Homo sapiens
ttgactctcccattc

SEQ ID NO: 1160575 - DNA, 15 bp, Homo sapiens
cttgactctcccatt

SEQ ID NO: 1160576 - DNA, 15 bp, Homo sapiens
ccttgactctcccat

SEQ ID NO: 1160577 - DNA, 15 bp, Homo sapiens
tccttgactctccca

SEQ ID NO: 1160578 - DNA, 15 bp, Homo sapiens
ctccttgactctccc

SEQ ID NO: 1160579 - DNA, 15 bp, Homo sapiens
gctccttgactctcc

SEQ ID NO: 1160580 - DNA, 15 bp, Homo sapiens
tgctccttgactctc

SEQ ID NO: 1160581 - DNA, 15 bp, Homo sapiens
atgctccttgactct

SEQ ID NO: 1160582 - DNA, 15 bp, Homo sapiens
catgctccttgactc

SEQ ID NO: 1160583 - DNA, 15 bp, Homo sapiens
ccatgctccttgact

SEQ ID NO: 1160584 - DNA, 15 bp, Homo sapiens
gccatgctccttgac

SEQ ID NO: 1160585 - DNA, 15 bp, Homo sapiens
tgccatgctccttga

SEQ ID NO: 1160586 - DNA, 15 bp, Homo sapiens
gtgccatgctccttg

SEQ ID NO: 1160587 - DNA, 15 bp, Homo sapiens
cgtgccatgctcctt

SEQ ID NO: 1160588 - DNA, 15 bp, Homo sapiens
gcgtgccatgctcct

SEQ ID NO: 1160589 - DNA, 15 bp, Homo sapiens
tgcgtgccatgctcc

SEQ ID NO: 1160590 - DNA, 15 bp, Homo sapiens
atgcgtgccatgctc

SEQ ID NO: 1160591 - DNA, 15 bp, Homo sapiens
gatgcgtgccatgct

SEQ ID NO: 1160592 - DNA, 15 bp, Homo sapiens
tgatgcgtgccatgc

SEQ ID NO: 1160593 - DNA, 15 bp, Homo sapiens
ctgatgcgtgccatg

SEQ ID NO: 1160594 - DNA, 15 bp, Homo sapiens
gctgatgcgtgccat

SEQ ID NO: 1160595 - DNA, 15 bp, Homo sapiens
tgctgatgcgtgcca

SEQ ID NO: 1160596 - DNA, 15 bp, Homo sapiens
ctgctgatgcgtgcc

SEQ ID NO: 1160597 - DNA, 15 bp, Homo sapiens
gctgctgatgcgtgc

SEQ ID NO: 1160598 - DNA, 15 bp, Homo sapiens
agctgctgatgcgtg

SEQ ID NO: 1160599 - DNA, 15 bp, Homo sapiens
cagctgctgatgcgt

SEQ ID NO: 1160600 - DNA, 15 bp, Homo sapiens
gcagctgctgatgcg

SEQ ID NO: 1160601 - DNA, 15 bp, Homo sapiens
agcagctgctgatgc

SEQ ID NO: 1160602 - DNA, 15 bp, Homo sapiens
cagcagctgctgatg

SEQ ID NO: 1160603 - DNA, 15 bp, Homo sapiens
ccagcagctgctgat

SEQ ID NO: 1160604 - DNA, 15 bp, Homo sapiens
gccagcagctgctga

SEQ ID NO: 1160605 - DNA, 15 bp, Homo sapiens
tgccagcagctgctg

SEQ ID NO: 1160606 - DNA, 15 bp, Homo sapiens
gtgccagcagctgct

SEQ ID NO: 1160607 - DNA, 15 bp, Homo sapiens
tgtgccagcagctgc

SEQ ID NO: 1160608 - DNA, 15 bp, Homo sapiens
ctgtgccagcagctg

SEQ ID NO: 1160609 - DNA, 15 bp, Homo sapiens
tctgtgccagcagct

SEQ ID NO: 1160610 - DNA, 15 bp, Homo sapiens
ttctgtgccagcagc

SEQ ID NO: 1160611 - DNA, 15 bp, Homo sapiens
tttctgtgccagcag

SEQ ID NO: 1160612 - DNA, 15 bp, Homo sapiens
ctttctgtgccagca

SEQ ID NO: 1160613 - DNA, 15 bp, Homo sapiens
cctttctgtgccagc

SEQ ID NO: 1160614 - DNA, 15 bp, Homo sapiens
gcctttctgtgccag

SEQ ID NO: 1160615 - DNA, 15 bp, Homo sapiens
tgcctttctgtgcca

SEQ ID NO: 1160616 - DNA, 15 bp, Homo sapiens
atgcctttctgtgcc

SEQ ID NO: 1160617 - DNA, 15 bp, Homo sapiens
gatgcctttctgtgc

SEQ ID NO: 1160618 - DNA, 15 bp, Homo sapiens
agatgcctttctgtg

SEQ ID NO: 1160619 - DNA, 15 bp, Homo sapiens
tagatgcctttctgt

SEQ ID NO: 1160620 - DNA, 15 bp, Homo sapiens
atagatgcctttctg

SEQ ID NO: 1160621 - DNA, 15 bp, Homo sapiens
aatagatgcctttct

SEQ ID NO: 1160622 - DNA, 15 bp, Homo sapiens
aaatagatgcctttc

SEQ ID NO: 1160623 - DNA, 15 bp, Homo sapiens
aaaatagatgccttt

SEQ ID NO: 1160624 - DNA, 15 bp, Homo sapiens
aaaaatagatgcctt

SEQ ID NO: 1160625 - DNA, 15 bp, Homo sapiens
gaaaaatagatgcct

SEQ ID NO: 1160626 - DNA, 15 bp, Homo sapiens
tgaaaaatagatgcc

SEQ ID NO: 1160627 - DNA, 15 bp, Homo sapiens
ttgaaaaatagatgc

SEQ ID NO: 1160628 - DNA, 15 bp, Homo sapiens
attgaaaaatagatg

SEQ ID NO: 1160629 - DNA, 15 bp, Homo sapiens
cattgaaaaatagat

SEQ ID NO: 1160630 - DNA, 15 bp, Homo sapiens
ccattgaaaaataga

SEQ ID NO: 1160631 - DNA, 15 bp, Homo sapiens
accattgaaaaatag

SEQ ID NO: 1160632 - DNA, 15 bp, Homo sapiens
gaccattgaaaaata

SEQ ID NO: 1160633 - DNA, 15 bp, Homo sapiens
tgaccattgaaaaat

SEQ ID NO: 1160634 - DNA, 15 bp, Homo sapiens
ctgaccattgaaaaa

SEQ ID NO: 1160635 - DNA, 15 bp, Homo sapiens
actgaccattgaaaa

SEQ ID NO: 1160636 - DNA, 15 bp, Homo sapiens
cactgaccattgaaa

SEQ ID NO: 1160637 - DNA, 15 bp, Homo sapiens
acactgaccattgaa

SEQ ID NO: 1160638 - DNA, 15 bp, Homo sapiens
gacactgaccattga

SEQ ID NO: 1160639 - DNA, 15 bp, Homo sapiens
ggacactgaccattg

SEQ ID NO: 1160640 - DNA, 15 bp, Homo sapiens
tggacactgaccatt

SEQ ID NO: 1160641 - DNA, 15 bp, Homo sapiens
ctggacactgaccat

SEQ ID NO: 1160642 - DNA, 15 bp, Homo sapiens
cctggacactgacca

SEQ ID NO: 1160643 - DNA, 15 bp, Homo sapiens
gcctggacactgacc

SEQ ID NO: 1160644 - DNA, 15 bp, Homo sapiens
agcctggacactgac

SEQ ID NO: 1160645 - DNA, 15 bp, Homo sapiens
cagcctggacactga

SEQ ID NO: 1160646 - DNA, 15 bp, Homo sapiens
ccagcctggacactg

SEQ ID NO: 1160647 - DNA, 15 bp, Homo sapiens
cccagcctggacact

SEQ ID NO: 1160648 - DNA, 15 bp, Homo sapiens
tcccagcctggacac

SEQ ID NO: 1160649 - DNA, 15 bp, Homo sapiens
gtcccagcctggaca

SEQ ID NO: 1160650 - DNA, 15 bp, Homo sapiens
tgtcccagcctggac

SEQ ID NO: 1160651 - DNA, 15 bp, Homo sapiens
gtgtcccagcctgga

SEQ ID NO: 1160652 - DNA, 15 bp, Homo sapiens
tgtgtcccagcctgg

SEQ ID NO: 1160653 - DNA, 15 bp, Homo sapiens
ctgtgtcccagcctg

SEQ ID NO: 1160654 - DNA, 15 bp, Homo sapiens
tctgtgtcccagcct

SEQ ID NO: 1160655 - DNA, 15 bp, Homo sapiens
ttctgtgtcccagcc

SEQ ID NO: 1160656 - DNA, 15 bp, Homo sapiens
gttctgtgtcccagc

SEQ ID NO: 1160657 - DNA, 15 bp, Homo sapiens
agttctgtgtcccag

SEQ ID NO: 1160658 - DNA, 15 bp, Homo sapiens
aagttctgtgtccca

SEQ ID NO: 1160659 - DNA, 15 bp, Homo sapiens
taagttctgtgtccc

SEQ ID NO: 1160660 - DNA, 15 bp, Homo sapiens
ataagttctgtgtcc

SEQ ID NO: 1160661 - DNA, 15 bp, Homo sapiens
cataagttctgtgtc

SEQ ID NO: 1160662 - DNA, 15 bp, Homo sapiens
tcataagttctgtgt

SEQ ID NO: 1160663 - DNA, 15 bp, Homo sapiens
ttcataagttctgtg

SEQ ID NO: 1160664 - DNA, 15 bp, Homo sapiens
gttcataagttctgt

SEQ ID NO: 1160665 - DNA, 15 bp, Homo sapiens
agttcataagttctg

SEQ ID NO: 1160666 - DNA, 15 bp, Homo sapiens
aagttcataagttct

SEQ ID NO: 1160667 - DNA, 15 bp, Homo sapiens
aaagttcataagttc

SEQ ID NO: 1160668 - DNA, 15 bp, Homo sapiens
aaaagttcataagtt

SEQ ID NO: 1160669 - DNA, 15 bp, Homo sapiens
caaaagttcataagt

SEQ ID NO: 1160670 - DNA, 15 bp, Homo sapiens
gcaaaagttcataag

SEQ ID NO: 1160671 - DNA, 15 bp, Homo sapiens
agcaaaagttcataa

SEQ ID NO: 1160672 - DNA, 15 bp, Homo sapiens
tagcaaaagttcata

SEQ ID NO: 1160673 - DNA, 15 bp, Homo sapiens
gtagcaaaagttcat

SEQ ID NO: 1160674 - DNA, 15 bp, Homo sapiens
tgtagcaaaagttca

SEQ ID NO: 1160675 - DNA, 15 bp, Homo sapiens
ctgtagcaaaagttc

SEQ ID NO: 1160676 - DNA, 15 bp, Homo sapiens
actgtagcaaaagtt

SEQ ID NO: 1160677 - DNA, 15 bp, Homo sapiens
tactgtagcaaaagt

SEQ ID NO: 1160678 - DNA, 15 bp, Homo sapiens
atactgtagcaaaag

SEQ ID NO: 1160679 - DNA, 15 bp, Homo sapiens
tatactgtagcaaaa

SEQ ID NO: 1160680 - DNA, 15 bp, Homo sapiens
atatactgtagcaaa

SEQ ID NO: 1160681 - DNA, 15 bp, Homo sapiens
aatatactgtagcaa

SEQ ID NO: 1160682 - DNA, 15 bp, Homo sapiens
aaatatactgtagca

SEQ ID NO: 1160683 - DNA, 15 bp, Homo sapiens
aaaatatactgtagc

SEQ ID NO: 1160684 - DNA, 15 bp, Homo sapiens
taaaatatactgtag

SEQ ID NO: 1160685 - DNA, 15 bp, Homo sapiens
ttaaaatatactgta

SEQ ID NO: 1160686 - DNA, 15 bp, Homo sapiens
tttaaaatatactgt

SEQ ID NO: 1160687 - DNA, 15 bp, Homo sapiens
ttttaaaatatactg

SEQ ID NO: 1160688 - DNA, 15 bp, Homo sapiens
tttttaaaatatact

SEQ ID NO: 1160689 - DNA, 15 bp, Homo sapiens
atttttaaaatatac

SEQ ID NO: 1160690 - DNA, 15 bp, Homo sapiens
tatttttaaaatata

SEQ ID NO: 1160691 - DNA, 15 bp, Homo sapiens
ttatttttaaaatat

SEQ ID NO: 1160692 - DNA, 15 bp, Homo sapiens
atttatttttaaaat

SEQ ID NO: 1160693 - DNA, 15 bp, Homo sapiens
aatttatttttaaaa

SEQ ID NO: 1160694 - DNA, 15 bp, Homo sapiens
gaatttatttttaaa

SEQ ID NO: 1160695 - DNA, 15 bp, Homo sapiens
tgaatttatttttaa

SEQ ID NO: 1160696 - DNA, 15 bp, Homo sapiens
ttgaatttattttta

SEQ ID NO: 1160697 - DNA, 15 bp, Homo sapiens
tttgaatttattttt

SEQ ID NO: 1160698 - DNA, 15 bp, Homo sapiens
atttgaatttatttt

SEQ ID NO: 1160699 - DNA, 15 bp, Homo sapiens
aatttgaatttattt

SEQ ID NO: 1160700 - DNA, 15 bp, Homo sapiens
taatttgaatttatt

SEQ ID NO: 1160701 - DNA, 15 bp, Homo sapiens
ataatttgaatttat

SEQ ID NO: 1160702 - DNA, 15 bp, Homo sapiens
aataatttgaattta

SEQ ID NO: 1160703 - DNA, 15 bp, Homo sapiens
gaataatttgaattt

SEQ ID NO: 1160704 - DNA, 15 bp, Homo sapiens
agaataatttgaatt

SEQ ID NO: 1160705 - DNA, 15 bp, Homo sapiens
tagaataatttgaat

SEQ ID NO: 1160706 - DNA, 15 bp, Homo sapiens
gtagaataatttgaa

SEQ ID NO: 1160707 - DNA, 15 bp, Homo sapiens
ggtagaataatttga

SEQ ID NO: 1160708 - DNA, 15 bp, Homo sapiens
tggtagaataatttg

SEQ ID NO: 1160709 - DNA, 15 bp, Homo sapiens
atggtagaataattt

SEQ ID NO: 1160710 - DNA, 15 bp, Homo sapiens
aatggtagaataatt

SEQ ID NO: 1160711 - DNA, 15 bp, Homo sapiens
aaatggtagaataat

SEQ ID NO: 1160712 - DNA, 15 bp, Homo sapiens
aaaatggtagaataa

SEQ ID NO: 1160713 - DNA, 15 bp, Homo sapiens
taaaatggtagaata

SEQ ID NO: 1160714 - DNA, 15 bp, Homo sapiens
ataaaatggtagaat

SEQ ID NO: 1160715 - DNA, 15 bp, Homo sapiens
gataaaatggtagaa

SEQ ID NO: 1160716 - DNA, 15 bp, Homo sapiens
agataaaatggtaga

SEQ ID NO: 1160717 - DNA, 15 bp, Homo sapiens
cagataaaatggtag

SEQ ID NO: 1160718 - DNA, 15 bp, Homo sapiens
tcagataaaatggta

SEQ ID NO: 1160719 - DNA, 15 bp, Homo sapiens
gtcagataaaatggt

SEQ ID NO: 1160720 - DNA, 15 bp, Homo sapiens
agtcagataaaatgg

SEQ ID NO: 1160721 - DNA, 15 bp, Homo sapiens
aagtcagataaaatg

SEQ ID NO: 1160722 - DNA, 15 bp, Homo sapiens
caagtcagataaaat

SEQ ID NO: 1160723 - DNA, 15 bp, Homo sapiens
acaagtcagataaaa

SEQ ID NO: 1160724 - DNA, 15 bp, Homo sapiens
tacaagtcagataaa

SEQ ID NO: 1160725 - DNA, 15 bp, Homo sapiens
ttacaagtcagataa

SEQ ID NO: 1160726 - DNA, 15 bp, Homo sapiens
tttacaagtcagata

SEQ ID NO: 1160727 - DNA, 15 bp, Homo sapiens
ttttacaagtcagat

SEQ ID NO: 1160728 - DNA, 15 bp, Homo sapiens
attttacaagtcaga

SEQ ID NO: 1160729 - DNA, 15 bp, Homo sapiens
tattttacaagtcag

SEQ ID NO: 1160730 - DNA, 15 bp, Homo sapiens
ttattttacaagtca

SEQ ID NO: 1160731 - DNA, 15 bp, Homo sapiens
cttattttacaagtc

SEQ ID NO: 1160732 - DNA, 15 bp, Homo sapiens
acttattttacaagt

SEQ ID NO: 1160733 - DNA, 15 bp, Homo sapiens
aacttattttacaag

SEQ ID NO: 1160734 - DNA, 15 bp, Homo sapiens
aaacttattttacaa

SEQ ID NO: 1160735 - DNA, 15 bp, Homo sapiens
gaaacttattttaca

SEQ ID NO: 1160736 - DNA, 15 bp, Homo sapiens
agaaacttattttac

SEQ ID NO: 1160737 - DNA, 15 bp, Homo sapiens
cagaaacttatttta

SEQ ID NO: 1160738 - DNA, 15 bp, Homo sapiens
ccagaaacttatttt

SEQ ID NO: 1160739 - DNA, 15 bp, Homo sapiens
accagaaacttattt

SEQ ID NO: 1160740 - DNA, 15 bp, Homo sapiens
aaccagaaacttatt

SEQ ID NO: 1160741 - DNA, 15 bp, Homo sapiens
aaaccagaaacttat

SEQ ID NO: 1160742 - DNA, 15 bp, Homo sapiens
caaaccagaaactta

SEQ ID NO: 1160743 - DNA, 15 bp, Homo sapiens
acaaaccagaaactt

SEQ ID NO: 1160744 - DNA, 15 bp, Homo sapiens
gacaaaccagaaact

SEQ ID NO: 1160745 - DNA, 15 bp, Homo sapiens
tgacaaaccagaaac

SEQ ID NO: 1160746 - DNA, 15 bp, Homo sapiens
atgacaaaccagaaa

SEQ ID NO: 1160747 - DNA, 15 bp, Homo sapiens
gatgacaaaccagaa

SEQ ID NO: 1160748 - DNA, 15 bp, Homo sapiens
tgatgacaaaccaga

SEQ ID NO: 1160749 - DNA, 15 bp, Homo sapiens
atgatgacaaaccag

SEQ ID NO: 1160750 - DNA, 15 bp, Homo sapiens
tatgatgacaaacca

SEQ ID NO: 1160751 - DNA, 15 bp, Homo sapiens
ttatgatgacaaacc

SEQ ID NO: 1160752 - DNA, 15 bp, Homo sapiens
tttatgatgacaaac

SEQ ID NO: 1160753 - DNA, 15 bp, Homo sapiens
ttttatgatgacaaa

SEQ ID NO: 1160754 - DNA, 15 bp, Homo sapiens
gttttatgatgacaa

SEQ ID NO: 1160755 - DNA, 15 bp, Homo sapiens
tgttttatgatgaca

SEQ ID NO: 1160756 - DNA, 15 bp, Homo sapiens
atgttttatgatgac

SEQ ID NO: 1160757 - DNA, 15 bp, Homo sapiens
tatgttttatgatga

SEQ ID NO: 1160758 - DNA, 15 bp, Homo sapiens
ctatgttttatgatg

SEQ ID NO: 1160759 - DNA, 15 bp, Homo sapiens
cctatgttttatgat

SEQ ID NO: 1160760 - DNA, 15 bp, Homo sapiens
acctatgttttatga

SEQ ID NO: 1160761 - DNA, 15 bp, Homo sapiens
tacctatgttttatg

SEQ ID NO: 1160762 - DNA, 15 bp, Homo sapiens
atacctatgttttat

SEQ ID NO: 1160763 - DNA, 15 bp, Homo sapiens
catacctatgtttta

SEQ ID NO: 1160764 - DNA, 15 bp, Homo sapiens
acatacctatgtttt

SEQ ID NO: 1160765 - DNA, 15 bp, Homo sapiens
gacatacctatgttt

SEQ ID NO: 1160766 - DNA, 15 bp, Homo sapiens
agacatacctatgtt

SEQ ID NO: 1160767 - DNA, 15 bp, Homo sapiens
cagacatacctatgt

SEQ ID NO: 1160768 - DNA, 15 bp, Homo sapiens
acagacatacctatg

SEQ ID NO: 1160769 - DNA, 15 bp, Homo sapiens
gacagacatacctat

SEQ ID NO: 1160770 - DNA, 15 bp, Homo sapiens
agacagacataccta

SEQ ID NO: 1160771 - DNA, 15 bp, Homo sapiens
gagacagacatacct

SEQ ID NO: 1160772 - DNA, 15 bp, Homo sapiens
tgagacagacatacc

SEQ ID NO: 1160773 - DNA, 15 bp, Homo sapiens
atgagacagacatac

SEQ ID NO: 1160774 - DNA, 15 bp, Homo sapiens
aatgagacagacata

SEQ ID NO: 1160775 - DNA, 15 bp, Homo sapiens
gaatgagacagacat

SEQ ID NO: 1160776 - DNA, 15 bp, Homo sapiens
agaatgagacagaca

SEQ ID NO: 1160777 - DNA, 15 bp, Homo sapiens
tagaatgagacagac

SEQ ID NO: 1160778 - DNA, 15 bp, Homo sapiens
ctagaatgagacaga

SEQ ID NO: 1160779 - DNA, 15 bp, Homo sapiens
tctagaatgagacag

SEQ ID NO: 1160780 - DNA, 15 bp, Homo sapiens
atctagaatgagaca

SEQ ID NO: 1160781 - DNA, 15 bp, Homo sapiens
gatctagaatgagac

SEQ ID NO: 1160782 - DNA, 15 bp, Homo sapiens
tgatctagaatgaga

SEQ ID NO: 1160783 - DNA, 15 bp, Homo sapiens
ttgatctagaatgag

SEQ ID NO: 1160784 - DNA, 15 bp, Homo sapiens
attgatctagaatga

SEQ ID NO: 1160785 - DNA, 15 bp, Homo sapiens
aattgatctagaatg

SEQ ID NO: 1160786 - DNA, 15 bp, Homo sapiens
aaattgatctagaat

SEQ ID NO: 1160787 - DNA, 15 bp, Homo sapiens
taaattgatctagaa

SEQ ID NO: 1160788 - DNA, 15 bp, Homo sapiens
ctaaattgatctaga

SEQ ID NO: 1160789 - DNA, 15 bp, Homo sapiens
tctaaattgatctag

SEQ ID NO: 1160790 - DNA, 15 bp, Homo sapiens
ttctaaattgatcta

SEQ ID NO: 1160791 - DNA, 15 bp, Homo sapiens
cttctaaattgatct

SEQ ID NO: 1160792 - DNA, 15 bp, Homo sapiens
tcttctaaattgatc

SEQ ID NO: 1160793 - DNA, 15 bp, Homo sapiens
gtcttctaaattgat

SEQ ID NO: 1160794 - DNA, 15 bp, Homo sapiens
ggtcttctaaattga

SEQ ID NO: 1160795 - DNA, 15 bp, Homo sapiens
gggtcttctaaattg

SEQ ID NO: 1160796 - DNA, 15 bp, Homo sapiens
tgggtcttctaaatt

SEQ ID NO: 1160797 - DNA, 15 bp, Homo sapiens
ttgggtcttctaaat

SEQ ID NO: 1160798 - DNA, 15 bp, Homo sapiens
attgggtcttctaaa

SEQ ID NO: 1160799 - DNA, 15 bp, Homo sapiens
aattgggtcttctaa

SEQ ID NO: 1160800 - DNA, 15 bp, Homo sapiens
aaattgggtcttcta

SEQ ID NO: 1160801 - DNA, 15 bp, Homo sapiens
caaattgggtcttct

SEQ ID NO: 1160802 - DNA, 15 bp, Homo sapiens
ccaaattgggtcttc

SEQ ID NO: 1160803 - DNA, 15 bp, Homo sapiens
cccaaattgggtctt

SEQ ID NO: 1160804 - DNA, 15 bp, Homo sapiens
ccccaaattgggtct

SEQ ID NO: 1160805 - DNA, 15 bp, Homo sapiens
accccaaattgggtc

SEQ ID NO: 1160806 - DNA, 15 bp, Homo sapiens
aaccccaaattgggt

SEQ ID NO: 1160807 - DNA, 15 bp, Homo sapiens
aaaccccaaattggg

SEQ ID NO: 1160808 - DNA, 15 bp, Homo sapiens
taaaccccaaattgg

SEQ ID NO: 1160809 - DNA, 15 bp, Homo sapiens
ataaaccccaaattg

SEQ ID NO: 1160810 - DNA, 15 bp, Homo sapiens
aataaaccccaaatt

SEQ ID NO: 1160811 - DNA, 15 bp, Homo sapiens
taataaaccccaaat

SEQ ID NO: 1160812 - DNA, 15 bp, Homo sapiens
gtaataaaccccaaa

SEQ ID NO: 1160813 - DNA, 15 bp, Homo sapiens
cgtaataaaccccaa

SEQ ID NO: 1160814 - DNA, 15 bp, Homo sapiens
ccgtaataaacccca

SEQ ID NO: 1160815 - DNA, 15 bp, Homo sapiens
gccgtaataaacccc

SEQ ID NO: 1160816 - DNA, 15 bp, Homo sapiens
tgccgtaataaaccc

SEQ ID NO: 1160817 - DNA, 15 bp, Homo sapiens
atgccgtaataaacc

SEQ ID NO: 1160818 - DNA, 15 bp, Homo sapiens
aatgccgtaataaac

SEQ ID NO: 1160819 - DNA, 15 bp, Homo sapiens
aaatgccgtaataaa

SEQ ID NO: 1160820 - DNA, 15 bp, Homo sapiens
caaatgccgtaataa

SEQ ID NO: 1160821 - DNA, 15 bp, Homo sapiens
tcaaatgccgtaata

SEQ ID NO: 1160822 - DNA, 15 bp, Homo sapiens
ttcaaatgccgtaat

SEQ ID NO: 1160823 - DNA, 15 bp, Homo sapiens
tttcaaatgccgtaa

SEQ ID NO: 1160824 - DNA, 15 bp, Homo sapiens
atttcaaatgccgta

SEQ ID NO: 1160825 - DNA, 15 bp, Homo sapiens
aatttcaaatgccgt

SEQ ID NO: 1160826 - DNA, 15 bp, Homo sapiens
aaatttcaaatgccg

SEQ ID NO: 1160827 - DNA, 15 bp, Homo sapiens
caaatttcaaatgcc

SEQ ID NO: 1160828 - DNA, 15 bp, Homo sapiens
tcaaatttcaaatgc

SEQ ID NO: 1160829 - DNA, 15 bp, Homo sapiens
ctcaaatttcaaatg

SEQ ID NO: 1160830 - DNA, 15 bp, Homo sapiens
tctcaaatttcaaat

SEQ ID NO: 1160831 - DNA, 15 bp, Homo sapiens
ctctcaaatttcaaa

SEQ ID NO: 1160832 - DNA, 15 bp, Homo sapiens
actctcaaatttcaa

SEQ ID NO: 1160833 - DNA, 15 bp, Homo sapiens
aactctcaaatttca

SEQ ID NO: 1160834 - DNA, 15 bp, Homo sapiens
taactctcaaatttc

SEQ ID NO: 1160835 - DNA, 15 bp, Homo sapiens
ctaactctcaaattt

SEQ ID NO: 1160836 - DNA, 15 bp, Homo sapiens
tctaactctcaaatt

SEQ ID NO: 1160837 - DNA, 15 bp, Homo sapiens
ttctaactctcaaat

SEQ ID NO: 1160838 - DNA, 15 bp, Homo sapiens
cttctaactctcaaa

SEQ ID NO: 1160839 - DNA, 15 bp, Homo sapiens
acttctaactctcaa

SEQ ID NO: 1160840 - DNA, 15 bp, Homo sapiens
cacttctaactctca

SEQ ID NO: 1160841 - DNA, 15 bp, Homo sapiens
tcacttctaactctc

SEQ ID NO: 1160842 - DNA, 15 bp, Homo sapiens
gtcacttctaactct

SEQ ID NO: 1160843 - DNA, 15 bp, Homo sapiens
tgtcacttctaactc

SEQ ID NO: 1160844 - DNA, 15 bp, Homo sapiens
gtgtcacttctaact

SEQ ID NO: 1160845 - DNA, 15 bp, Homo sapiens
ggtgtcacttctaac

SEQ ID NO: 1160846 - DNA, 15 bp, Homo sapiens
aggtgtcacttctaa

SEQ ID NO: 1160847 - DNA, 15 bp, Homo sapiens
caggtgtcacttcta

SEQ ID NO: 1160848 - DNA, 15 bp, Homo sapiens
acaggtgtcacttct

SEQ ID NO: 1160849 - DNA, 15 bp, Homo sapiens
gacaggtgtcacttc

SEQ ID NO: 1160850 - DNA, 15 bp, Homo sapiens
agacaggtgtcactt

SEQ ID NO: 1160851 - DNA, 15 bp, Homo sapiens
aagacaggtgtcact

SEQ ID NO: 1160852 - DNA, 15 bp, Homo sapiens
caagacaggtgtcac

SEQ ID NO: 1160853 - DNA, 15 bp, Homo sapiens
tcaagacaggtgtca

SEQ ID NO: 1160854 - DNA, 15 bp, Homo sapiens
atcaagacaggtgtc

SEQ ID NO: 1160855 - DNA, 15 bp, Homo sapiens
catcaagacaggtgt

SEQ ID NO: 1160856 - DNA, 15 bp, Homo sapiens
tcatcaagacaggtg

SEQ ID NO: 1160857 - DNA, 15 bp, Homo sapiens
ttcatcaagacaggt

SEQ ID NO: 1160858 - DNA, 15 bp, Homo sapiens
cttcatcaagacagg

SEQ ID NO: 1160859 - DNA, 15 bp, Homo sapiens
acttcatcaagacag

SEQ ID NO: 1160860 - DNA, 15 bp, Homo sapiens
tacttcatcaagaca

SEQ ID NO: 1160861 - DNA, 15 bp, Homo sapiens
atacttcatcaagac

SEQ ID NO: 1160862 - DNA, 15 bp, Homo sapiens
aatacttcatcaaga

SEQ ID NO: 1160863 - DNA, 15 bp, Homo sapiens
caatacttcatcaag

SEQ ID NO: 1160864 - DNA, 15 bp, Homo sapiens
tcaatacttcatcaa

SEQ ID NO: 1160865 - DNA, 15 bp, Homo sapiens
ttcaatacttcatca

SEQ ID NO: 1160866 - DNA, 15 bp, Homo sapiens
tttcaatacttcatc

SEQ ID NO: 1160867 - DNA, 15 bp, Homo sapiens
gtttcaatacttcat

SEQ ID NO: 1160868 - DNA, 15 bp, Homo sapiens
tgtttcaatacttca

SEQ ID NO: 1160869 - DNA, 15 bp, Homo sapiens
ttgtttcaatacttc

SEQ ID NO: 1160870 - DNA, 15 bp, Homo sapiens
gttgtttcaatactt

SEQ ID NO: 1160871 - DNA, 15 bp, Homo sapiens
tgttgtttcaatact

SEQ ID NO: 1160872 - DNA, 15 bp, Homo sapiens
ctgttgtttcaatac

SEQ ID NO: 1160873 - DNA, 15 bp, Homo sapiens
cctgttgtttcaata

SEQ ID NO: 1160874 - DNA, 15 bp, Homo sapiens
gcctgttgtttcaat

SEQ ID NO: 1160875 - DNA, 15 bp, Homo sapiens
agcctgttgtttcaa

SEQ ID NO: 1160876 - DNA, 15 bp, Homo sapiens
tagcctgttgtttca

SEQ ID NO: 1160877 - DNA, 15 bp, Homo sapiens
ctagcctgttgtttc

SEQ ID NO: 1160878 - DNA, 15 bp, Homo sapiens
gctagcctgttgttt

SEQ ID NO: 1160879 - DNA, 15 bp, Homo sapiens
agctagcctgttgtt

SEQ ID NO: 1160880 - DNA, 15 bp, Homo sapiens
gagctagcctgttgt

SEQ ID NO: 1160881 - DNA, 15 bp, Homo sapiens
agagctagcctgttg

SEQ ID NO: 1160882 - DNA, 15 bp, Homo sapiens
gagagctagcctgtt

SEQ ID NO: 1160883 - DNA, 15 bp, Homo sapiens
ggagagctagcctgt

SEQ ID NO: 1160884 - DNA, 15 bp, Homo sapiens
gggagagctagcctg

SEQ ID NO: 1160885 - DNA, 15 bp, Homo sapiens
agggagagctagcct

SEQ ID NO: 1160886 - DNA, 15 bp, Homo sapiens
tagggagagctagcc

SEQ ID NO: 1160887 - DNA, 15 bp, Homo sapiens
ttagggagagctagc

SEQ ID NO: 1160888 - DNA, 15 bp, Homo sapiens
cttagggagagctag

SEQ ID NO: 1160889 - DNA, 15 bp, Homo sapiens
acttagggagagcta

SEQ ID NO: 1160890 - DNA, 15 bp, Homo sapiens
aacttagggagagct

SEQ ID NO: 1160891 - DNA, 15 bp, Homo sapiens
taacttagggagagc

SEQ ID NO: 1160892 - DNA, 15 bp, Homo sapiens
ataacttagggagag

SEQ ID NO: 1160893 - DNA, 15 bp, Homo sapiens
aataacttagggaga

SEQ ID NO: 1160894 - DNA, 15 bp, Homo sapiens
taataacttagggag

SEQ ID NO: 1160895 - DNA, 15 bp, Homo sapiens
ctaataacttaggga

SEQ ID NO: 1160896 - DNA, 15 bp, Homo sapiens
tctaataacttaggg

SEQ ID NO: 1160897 - DNA, 15 bp, Homo sapiens
ttctaataacttagg

SEQ ID NO: 1160898 - DNA, 15 bp, Homo sapiens
tttctaataacttag

SEQ ID NO: 1160899 - DNA, 15 bp, Homo sapiens
gtttctaataactta

SEQ ID NO: 1160900 - DNA, 15 bp, Homo sapiens
tgtttctaataactt

SEQ ID NO: 1160901 - DNA, 15 bp, Homo sapiens
atgtttctaataact

SEQ ID NO: 1160902 - DNA, 15 bp, Homo sapiens
gatgtttctaataac

SEQ ID NO: 1160903 - DNA, 15 bp, Homo sapiens
ggatgtttctaataa

SEQ ID NO: 1160904 - DNA, 15 bp, Homo sapiens
tggatgtttctaata

SEQ ID NO: 1160905 - DNA, 15 bp, Homo sapiens
ctggatgtttctaat

SEQ ID NO: 1160906 - DNA, 15 bp, Homo sapiens
tctggatgtttctaa

SEQ ID NO: 1160907 - DNA, 15 bp, Homo sapiens
ttctggatgtttcta

SEQ ID NO: 1160908 - DNA, 15 bp, Homo sapiens
tttctggatgtttct

SEQ ID NO: 1160909 - DNA, 15 bp, Homo sapiens
ttttctggatgtttc

SEQ ID NO: 1160910 - DNA, 15 bp, Homo sapiens
tttttctggatgttt

SEQ ID NO: 1160911 - DNA, 15 bp, Homo sapiens
ctttttctggatgtt

SEQ ID NO: 1160912 - DNA, 15 bp, Homo sapiens
tctttttctggatgt

SEQ ID NO: 1160913 - DNA, 15 bp, Homo sapiens
ttctttttctggatg

SEQ ID NO: 1160914 - DNA, 15 bp, Homo sapiens
gttctttttctggat

SEQ ID NO: 1160915 - DNA, 15 bp, Homo sapiens
tgttctttttctgga

SEQ ID NO: 1160916 - DNA, 15 bp, Homo sapiens
ttgttctttttctgg

SEQ ID NO: 1160917 - DNA, 15 bp, Homo sapiens
tttgttctttttctg

SEQ ID NO: 1160918 - DNA, 15 bp, Homo sapiens
ttttgttctttttct

SEQ ID NO: 1160919 - DNA, 15 bp, Homo sapiens
attttgttctttttc

SEQ ID NO: 1160920 - DNA, 15 bp, Homo sapiens
aattttgttcttttt

SEQ ID NO: 1160921 - DNA, 15 bp, Homo sapiens
gaattttgttctttt

SEQ ID NO: 1160922 - DNA, 15 bp, Homo sapiens
tgaattttgttcttt

SEQ ID NO: 1160923 - DNA, 15 bp, Homo sapiens
ttgaattttgttctt

SEQ ID NO: 1160924 - DNA, 15 bp, Homo sapiens
ccttgaattttgttc

SEQ ID NO: 1160925 - DNA, 15 bp, Homo sapiens
accttgaattttgtt

SEQ ID NO: 1160926 - DNA, 15 bp, Homo sapiens
taccttgaattttgt

SEQ ID NO: 1160927 - DNA, 15 bp, Homo sapiens
ttaccttgaattttg

SEQ ID NO: 1160928 - DNA, 15 bp, Homo sapiens
cttaccttgaatttt

SEQ ID NO: 1160929 - DNA, 15 bp, Homo sapiens
acttaccttgaattt

SEQ ID NO: 1160930 - DNA, 15 bp, Homo sapiens
tacttaccttgaatt

SEQ ID NO: 1160931 - DNA, 15 bp, Homo sapiens
gtacttaccttgaat

SEQ ID NO: 1160932 - DNA, 15 bp, Homo sapiens
tgtacttaccttgaa

SEQ ID NO: 1160933 - DNA, 15 bp, Homo sapiens
ctgtacttaccttga

SEQ ID NO: 1160934 - DNA, 15 bp, Homo sapiens
cctgtacttaccttg

SEQ ID NO: 1160935 - DNA, 15 bp, Homo sapiens
acctgtacttacctt

SEQ ID NO: 1160936 - DNA, 15 bp, Homo sapiens
cacctgtacttacct

SEQ ID NO: 1160937 - DNA, 15 bp, Homo sapiens
acacctgtacttacc

SEQ ID NO: 1160938 - DNA, 15 bp, Homo sapiens
tacacctgtacttac

SEQ ID NO: 1160939 - DNA, 15 bp, Homo sapiens
ctacacctgtactta

SEQ ID NO: 1160940 - DNA, 15 bp, Homo sapiens
tctacacctgtactt

SEQ ID NO: 1160941 - DNA, 15 bp, Homo sapiens
ttctacacctgtact

SEQ ID NO: 1160942 - DNA, 15 bp, Homo sapiens
tttctacacctgtac

SEQ ID NO: 1160943 - DNA, 15 bp, Homo sapiens
atttctacacctgta

SEQ ID NO: 1160944 - DNA, 15 bp, Homo sapiens
tatttctacacctgt

SEQ ID NO: 1160945 - DNA, 15 bp, Homo sapiens
atatttctacacctg

SEQ ID NO: 1160946 - DNA, 15 bp, Homo sapiens
tatatttctacacct

SEQ ID NO: 1160947 - DNA, 15 bp, Homo sapiens
ctatatttctacacc

SEQ ID NO: 1160948 - DNA, 15 bp, Homo sapiens
tctatatttctacac

SEQ ID NO: 1160949 - DNA, 15 bp, Homo sapiens
ttctatatttctaca

SEQ ID NO: 1160950 - DNA, 15 bp, Homo sapiens
cttctatatttctac

SEQ ID NO: 1160951 - DNA, 15 bp, Homo sapiens
gcttctatatttcta

SEQ ID NO: 1160952 - DNA, 15 bp, Homo sapiens
ggcttctatatttct

SEQ ID NO: 1160953 - DNA, 15 bp, Homo sapiens
tggcttctatatttc

SEQ ID NO: 1160954 - DNA, 15 bp, Homo sapiens
gtggcttctatattt

SEQ ID NO: 1160955 - DNA, 15 bp, Homo sapiens
tgtggcttctatatt

SEQ ID NO: 1160956 - DNA, 15 bp, Homo sapiens
ctgtggcttctatat

SEQ ID NO: 1160957 - DNA, 15 bp, Homo sapiens
tctgtggcttctata

SEQ ID NO: 1160958 - DNA, 15 bp, Homo sapiens
gtctgtggcttctat

SEQ ID NO: 1160959 - DNA, 15 bp, Homo sapiens
tgtctgtggcttcta

SEQ ID NO: 1160960 - DNA, 15 bp, Homo sapiens
atgtctgtggcttct

SEQ ID NO: 1160961 - DNA, 15 bp, Homo sapiens
tatgtctgtggcttc

SEQ ID NO: 1160962 - DNA, 15 bp, Homo sapiens
ctatgtctgtggctt

SEQ ID NO: 1160963 - DNA, 15 bp, Homo sapiens
cctatgtctgtggct

SEQ ID NO: 1160964 - DNA, 15 bp, Homo sapiens
ccctatgtctgtggc

SEQ ID NO: 1160965 - DNA, 15 bp, Homo sapiens
tccctatgtctgtgg

SEQ ID NO: 1160966 - DNA, 15 bp, Homo sapiens
ttccctatgtctgtg

SEQ ID NO: 1160967 - DNA, 15 bp, Homo sapiens
tttccctatgtctgt

SEQ ID NO: 1160968 - DNA, 15 bp, Homo sapiens
atttccctatgtctg

SEQ ID NO: 1160969 - DNA, 15 bp, Homo sapiens
catttccctatgtct

SEQ ID NO: 1160970 - DNA, 15 bp, Homo sapiens
ccatttccctatgtc

SEQ ID NO: 1160971 - DNA, 15 bp, Homo sapiens
accatttccctatgt

SEQ ID NO: 1160972 - DNA, 15 bp, Homo sapiens
gaccatttccctatg

SEQ ID NO: 1160973 - DNA, 15 bp, Homo sapiens
agaccatttccctat

SEQ ID NO: 1160974 - DNA, 15 bp, Homo sapiens
aagaccatttcccta

SEQ ID NO: 1160975 - DNA, 15 bp, Homo sapiens
taagaccatttccct

SEQ ID NO: 1160976 - DNA, 15 bp, Homo sapiens
ataagaccatttccc

SEQ ID NO: 1160977 - DNA, 15 bp, Homo sapiens
cataagaccatttcc

SEQ ID NO: 1160978 - DNA, 15 bp, Homo sapiens
ccataagaccatttc

SEQ ID NO: 1160979 - DNA, 15 bp, Homo sapiens
accataagaccattt

SEQ ID NO: 1160980 - DNA, 15 bp, Homo sapiens
gaccataagaccatt

SEQ ID NO: 1160981 - DNA, 15 bp, Homo sapiens
ggaccataagaccat

SEQ ID NO: 1160982 - DNA, 15 bp, Homo sapiens
aggaccataagacca

SEQ ID NO: 1160983 - DNA, 15 bp, Homo sapiens
caggaccataagacc

SEQ ID NO: 1160984 - DNA, 15 bp, Homo sapiens
tcaggaccataagac

SEQ ID NO: 1160985 - DNA, 15 bp, Homo sapiens
ttcaggaccataaga

SEQ ID NO: 1160986 - DNA, 15 bp, Homo sapiens
attcaggaccataag

SEQ ID NO: 1160987 - DNA, 15 bp, Homo sapiens
cattcaggaccataa

SEQ ID NO: 1160988 - DNA, 15 bp, Homo sapiens
ccattcaggaccata

SEQ ID NO: 1160989 - DNA, 15 bp, Homo sapiens
cccattcaggaccat

SEQ ID NO: 1160990 - DNA, 15 bp, Homo sapiens
acccattcaggacca

SEQ ID NO: 1160991 - DNA, 15 bp, Homo sapiens
aacccattcaggacc

SEQ ID NO: 1160992 - DNA, 15 bp, Homo sapiens
caacccattcaggac

SEQ ID NO: 1160993 - DNA, 15 bp, Homo sapiens
ccaacccattcagga

SEQ ID NO: 1160994 - DNA, 15 bp, Homo sapiens
cccaacccattcagg

SEQ ID NO: 1160995 - DNA, 15 bp, Homo sapiens
acccaacccattcag

SEQ ID NO: 1160996 - DNA, 15 bp, Homo sapiens
tacccaacccattca

SEQ ID NO: 1160997 - DNA, 15 bp, Homo sapiens
ctacccaacccattc

SEQ ID NO: 1160998 - DNA, 15 bp, Homo sapiens
tctacccaacccatt

SEQ ID NO: 1160999 - DNA, 15 bp, Homo sapiens
gtctacccaacccat

SEQ ID NO: 1161000 - DNA, 15 bp, Homo sapiens
tgtctacccaaccca

SEQ ID NO: 1161001 - DNA, 15 bp, Homo sapiens
ctgtctacccaaccc

SEQ ID NO: 1161002 - DNA, 15 bp, Homo sapiens
cctgtctacccaacc

SEQ ID NO: 1161003 - DNA, 15 bp, Homo sapiens
tcctgtctacccaac

SEQ ID NO: 1161004 - DNA, 15 bp, Homo sapiens
ttcctgtctacccaa

SEQ ID NO: 1161005 - DNA, 15 bp, Homo sapiens
tttcctgtctaccca

SEQ ID NO: 1161006 - DNA, 15 bp, Homo sapiens
ctttcctgtctaccc

SEQ ID NO: 1161007 - DNA, 15 bp, Homo sapiens
actttcctgtctacc

SEQ ID NO: 1161008 - DNA, 15 bp, Homo sapiens
aactttcctgtctac

SEQ ID NO: 1161009 - DNA, 15 bp, Homo sapiens
aaactttcctgtcta

SEQ ID NO: 1161010 - DNA, 15 bp, Homo sapiens
caaactttcctgtct

SEQ ID NO: 1161011 - DNA, 15 bp, Homo sapiens
ccaaactttcctgtc

SEQ ID NO: 1161012 - DNA, 15 bp, Homo sapiens
cccaaactttcctgt

SEQ ID NO: 1161013 - DNA, 15 bp, Homo sapiens
tcccaaactttcctg

SEQ ID NO: 1161014 - DNA, 15 bp, Homo sapiens
ttcccaaactttcct

SEQ ID NO: 1161015 - DNA, 15 bp, Homo sapiens
attcccaaactttcc

SEQ ID NO: 1161016 - DNA, 15 bp, Homo sapiens
tattcccaaactttc

SEQ ID NO: 1161017 - DNA, 15 bp, Homo sapiens
ttattcccaaacttt

SEQ ID NO: 1161018 - DNA, 15 bp, Homo sapiens
attattcccaaactt

SEQ ID NO: 1161019 - DNA, 15 bp, Homo sapiens
aattattcccaaact

SEQ ID NO: 1161020 - DNA, 15 bp, Homo sapiens
aaattattcccaaac

SEQ ID NO: 1161021 - DNA, 15 bp, Homo sapiens
aaaattattcccaaa

SEQ ID NO: 1161022 - DNA, 15 bp, Homo sapiens
gaaaattattcccaa

SEQ ID NO: 1161023 - DNA, 15 bp, Homo sapiens
ggaaaattattccca

SEQ ID NO: 1161024 - DNA, 15 bp, Homo sapiens
gggaaaattattccc

SEQ ID NO: 1161025 - DNA, 15 bp, Homo sapiens
tgggaaaattattcc

SEQ ID NO: 1161026 - DNA, 15 bp, Homo sapiens
ttgggaaaattattc

SEQ ID NO: 1161027 - DNA, 15 bp, Homo sapiens
cttgggaaaattatt

SEQ ID NO: 1161028 - DNA, 15 bp, Homo sapiens
acttgggaaaattat

SEQ ID NO: 1161029 - DNA, 15 bp, Homo sapiens
tacttgggaaaatta

SEQ ID NO: 1161030 - DNA, 15 bp, Homo sapiens
gtacttgggaaaatt

SEQ ID NO: 1161031 - DNA, 15 bp, Homo sapiens
tgtacttgggaaaat

SEQ ID NO: 1161032 - DNA, 15 bp, Homo sapiens
ttgtacttgggaaaa

SEQ ID NO: 1161033 - DNA, 15 bp, Homo sapiens
tttgtacttgggaaa

SEQ ID NO: 1161034 - DNA, 15 bp, Homo sapiens
ttttgtacttgggaa

SEQ ID NO: 1161035 - DNA, 15 bp, Homo sapiens
cttttgtacttggga

SEQ ID NO: 1161036 - DNA, 15 bp, Homo sapiens
tcttttgtacttggg

SEQ ID NO: 1161037 - DNA, 15 bp, Homo sapiens
ttcttttgtacttgg

SEQ ID NO: 1161038 - DNA, 15 bp, Homo sapiens
tttcttttgtacttg

SEQ ID NO: 1161039 - DNA, 15 bp, Homo sapiens
ttttcttttgtactt

SEQ ID NO: 1161040 - DNA, 15 bp, Homo sapiens
tttttcttttgtact

SEQ ID NO: 1161041 - DNA, 15 bp, Homo sapiens
atttttcttttgtac

SEQ ID NO: 1161042 - DNA, 15 bp, Homo sapiens
tatttttcttttgta

SEQ ID NO: 1161043 - DNA, 15 bp, Homo sapiens
ttatttttcttttgt

SEQ ID NO: 1161044 - DNA, 15 bp, Homo sapiens
tttatttttcttttg

SEQ ID NO: 1161045 - DNA, 15 bp, Homo sapiens
atttatttttctttt

SEQ ID NO: 1161046 - DNA, 15 bp, Homo sapiens
caatttatttttctt

SEQ ID NO: 1161047 - DNA, 15 bp, Homo sapiens
acaatttatttttct

SEQ ID NO: 1161048 - DNA, 15 bp, Homo sapiens
aacaatttatttttc

SEQ ID NO: 1161049 - DNA, 15 bp, Homo sapiens
gaacaatttattttt

SEQ ID NO: 1161050 - DNA, 15 bp, Homo sapiens
tgaacaatttatttt

SEQ ID NO: 1161051 - DNA, 15 bp, Homo sapiens
ttgaacaatttattt

SEQ ID NO: 1161052 - DNA, 15 bp, Homo sapiens
attgaacaatttatt

SEQ ID NO: 1161053 - DNA, 15 bp, Homo sapiens
tattgaacaatttat

SEQ ID NO: 1161054 - DNA, 15 bp, Homo sapiens
ctattgaacaattta

SEQ ID NO: 1161055 - DNA, 15 bp, Homo sapiens
gctattgaacaattt

SEQ ID NO: 1161056 - DNA, 15 bp, Homo sapiens
ggctattgaacaatt

SEQ ID NO: 1161057 - DNA, 15 bp, Homo sapiens
aggctattgaacaat

SEQ ID NO: 1161058 - DNA, 15 bp, Homo sapiens
gaggctattgaacaa

SEQ ID NO: 1161059 - DNA, 15 bp, Homo sapiens
tgaggctattgaaca

SEQ ID NO: 1161060 - DNA, 15 bp, Homo sapiens
atgaggctattgaac

SEQ ID NO: 1161061 - DNA, 15 bp, Homo sapiens
gatgaggctattgaa

SEQ ID NO: 1161062 - DNA, 15 bp, Homo sapiens
agatgaggctattga

SEQ ID NO: 1161063 - DNA, 15 bp, Homo sapiens
gagatgaggctattg

SEQ ID NO: 1161064 - DNA, 15 bp, Homo sapiens
agagatgaggctatt

SEQ ID NO: 1161065 - DNA, 15 bp, Homo sapiens
gagagatgaggctat

SEQ ID NO: 1161066 - DNA, 15 bp, Homo sapiens
agagagatgaggcta

SEQ ID NO: 1161067 - DNA, 15 bp, Homo sapiens
aagagagatgaggct

SEQ ID NO: 1161068 - DNA, 15 bp, Homo sapiens
caagagagatgaggc

SEQ ID NO: 1161069 - DNA, 15 bp, Homo sapiens
ccaagagagatgagg

SEQ ID NO: 1161070 - DNA, 15 bp, Homo sapiens
accaagagagatgag

SEQ ID NO: 1161071 - DNA, 15 bp, Homo sapiens
taccaagagagatga

SEQ ID NO: 1161072 - DNA, 15 bp, Homo sapiens
ttaccaagagagatg

SEQ ID NO: 1161073 - DNA, 15 bp, Homo sapiens
attaccaagagagat

SEQ ID NO: 1161074 - DNA, 15 bp, Homo sapiens
aattaccaagagaga

SEQ ID NO: 1161075 - DNA, 15 bp, Homo sapiens
aaattaccaagagag

SEQ ID NO: 1161076 - DNA, 15 bp, Homo sapiens
aaaattaccaagaga

SEQ ID NO: 1161077 - DNA, 15 bp, Homo sapiens
gaaaattaccaagag

SEQ ID NO: 1161078 - DNA, 15 bp, Homo sapiens
agaaaattaccaaga

SEQ ID NO: 1161079 - DNA, 15 bp, Homo sapiens
tagaaaattaccaag

SEQ ID NO: 1161080 - DNA, 15 bp, Homo sapiens
ttagaaaattaccaa

SEQ ID NO: 1161081 - DNA, 15 bp, Homo sapiens
tttagaaaattacca

SEQ ID NO: 1161082 - DNA, 15 bp, Homo sapiens
atttagaaaattacc

SEQ ID NO: 1161083 - DNA, 15 bp, Homo sapiens
gatttagaaaattac

SEQ ID NO: 1161084 - DNA, 15 bp, Homo sapiens
tgatttagaaaatta

SEQ ID NO: 1161085 - DNA, 15 bp, Homo sapiens
atgatttagaaaatt

SEQ ID NO: 1161086 - DNA, 15 bp, Homo sapiens
aatgatttagaaaat

SEQ ID NO: 1161087 - DNA, 15 bp, Homo sapiens
gaatgatttagaaaa

SEQ ID NO: 1161088 - DNA, 15 bp, Homo sapiens
agaatgatttagaaa

SEQ ID NO: 1161089 - DNA, 15 bp, Homo sapiens
tagaatgatttagaa

SEQ ID NO: 1161090 - DNA, 15 bp, Homo sapiens
atagaatgatttaga

SEQ ID NO: 1161091 - DNA, 15 bp, Homo sapiens
aatagaatgatttag

SEQ ID NO: 1161092 - DNA, 15 bp, Homo sapiens
caatagaatgattta

SEQ ID NO: 1161093 - DNA, 15 bp, Homo sapiens
acaatagaatgattt

SEQ ID NO: 1161094 - DNA, 15 bp, Homo sapiens
cacaatagaatgatt

SEQ ID NO: 1161095 - DNA, 15 bp, Homo sapiens
ccacaatagaatgat

SEQ ID NO: 1161096 - DNA, 15 bp, Homo sapiens
tccacaatagaatga

SEQ ID NO: 1161097 - DNA, 15 bp, Homo sapiens
ttccacaatagaatg

SEQ ID NO: 1161098 - DNA, 15 bp, Homo sapiens
attccacaatagaat

SEQ ID NO: 1161099 - DNA, 15 bp, Homo sapiens
gattccacaatagaa

SEQ ID NO: 1161100 - DNA, 15 bp, Homo sapiens
tgattccacaataga

SEQ ID NO: 1161101 - DNA, 15 bp, Homo sapiens
ttgattccacaatag

SEQ ID NO: 1161102 - DNA, 15 bp, Homo sapiens
ctttgattccacaat

SEQ ID NO: 1161103 - DNA, 15 bp, Homo sapiens
actttgattccacaa

SEQ ID NO: 1161104 - DNA, 15 bp, Homo sapiens
aactttgattccaca

SEQ ID NO: 1161105 - DNA, 15 bp, Homo sapiens
aaactttgattccac

SEQ ID NO: 1161106 - DNA, 15 bp, Homo sapiens
aaaactttgattcca

SEQ ID NO: 1161107 - DNA, 15 bp, Homo sapiens
aaaaactttgattcc

SEQ ID NO: 1161108 - DNA, 15 bp, Homo sapiens
aaaaaactttgattc

SEQ ID NO: 1161109 - DNA, 15 bp, Homo sapiens
taaaaaactttgatt

SEQ ID NO: 1161110 - DNA, 15 bp, Homo sapiens
ttaaaaaactttgat

SEQ ID NO: 1161111 - DNA, 15 bp, Homo sapiens
tttaaaaaactttga

SEQ ID NO: 1161112 - DNA, 15 bp, Homo sapiens
atttaaaaaactttg

SEQ ID NO: 1161113 - DNA, 15 bp, Homo sapiens
catttaaaaaacttt

SEQ ID NO: 1161114 - DNA, 15 bp, Homo sapiens
tcatttaaaaaactt

SEQ ID NO: 1161115 - DNA, 15 bp, Homo sapiens
ttcatttaaaaaact

SEQ ID NO: 1161116 - DNA, 15 bp, Homo sapiens
attcatttaaaaaac

SEQ ID NO: 1161117 - DNA, 15 bp, Homo sapiens
cattcatttaaaaaa

SEQ ID NO: 1161118 - DNA, 15 bp, Homo sapiens
gaaattcattcattt

SEQ ID NO: 1161119 - DNA, 15 bp, Homo sapiens
ggaaattcattcatt

SEQ ID NO: 1161120 - DNA, 15 bp, Homo sapiens
tggaaattcattcat

SEQ ID NO: 1161121 - DNA, 15 bp, Homo sapiens
ctggaaattcattca

SEQ ID NO: 1161122 - DNA, 15 bp, Homo sapiens
gctggaaattcattc

SEQ ID NO: 1161123 - DNA, 15 bp, Homo sapiens
agctggaaattcatt

SEQ ID NO: 1161124 - DNA, 15 bp, Homo sapiens
aagctggaaattcat

SEQ ID NO: 1161125 - DNA, 15 bp, Homo sapiens
aaagctggaaattca

SEQ ID NO: 1161126 - DNA, 15 bp, Homo sapiens
taaagctggaaattc

SEQ ID NO: 1161127 - DNA, 15 bp, Homo sapiens
ataaagctggaaatt

SEQ ID NO: 1161128 - DNA, 15 bp, Homo sapiens
gataaagctggaaat

SEQ ID NO: 1161129 - DNA, 15 bp, Homo sapiens
tgataaagctggaaa

SEQ ID NO: 1161130 - DNA, 15 bp, Homo sapiens
atgataaagctggaa

SEQ ID NO: 1161131 - DNA, 15 bp, Homo sapiens
gatgataaagctgga

SEQ ID NO: 1161132 - DNA, 15 bp, Homo sapiens
ggatgataaagctgg

SEQ ID NO: 1161133 - DNA, 15 bp, Homo sapiens
tggatgataaagctg

SEQ ID NO: 1161134 - DNA, 15 bp, Homo sapiens
ttggatgataaagct

SEQ ID NO: 1161135 - DNA, 15 bp, Homo sapiens
gttggatgataaagc

SEQ ID NO: 1161136 - DNA, 15 bp, Homo sapiens
tgttggatgataaag

SEQ ID NO: 1161137 - DNA, 15 bp, Homo sapiens
atgttggatgataaa

SEQ ID NO: 1161138 - DNA, 15 bp, Homo sapiens
gatgttggatgataa

SEQ ID NO: 1161139 - DNA, 15 bp, Homo sapiens
tgatgttggatgata

SEQ ID NO: 1161140 - DNA, 15 bp, Homo sapiens
ttgatgttggatgat

SEQ ID NO: 1161141 - DNA, 15 bp, Homo sapiens
cttgatgttggatga

SEQ ID NO: 1161142 - DNA, 15 bp, Homo sapiens
tcttgatgttggatg

SEQ ID NO: 1161143 - DNA, 15 bp, Homo sapiens
ctcttgatgttggat

SEQ ID NO: 1161144 - DNA, 15 bp, Homo sapiens
tctcttgatgttgga

SEQ ID NO: 1161145 - DNA, 15 bp, Homo sapiens
ttctcttgatgttgg

SEQ ID NO: 1161146 - DNA, 15 bp, Homo sapiens
tttctcttgatgttg

SEQ ID NO: 1161147 - DNA, 15 bp, Homo sapiens
ttttctcttgatgtt

SEQ ID NO: 1161148 - DNA, 15 bp, Homo sapiens
attttctcttgatgt

SEQ ID NO: 1161149 - DNA, 15 bp, Homo sapiens
cattttctcttgatg

SEQ ID NO: 1161150 - DNA, 15 bp, Homo sapiens
tcattttctcttgat

SEQ ID NO: 1161151 - DNA, 15 bp, Homo sapiens
ttcattttctcttga

SEQ ID NO: 1161152 - DNA, 15 bp, Homo sapiens
tttcattttctcttg

SEQ ID NO: 1161153 - DNA, 15 bp, Homo sapiens
atttcattttctctt

SEQ ID NO: 1161154 - DNA, 15 bp, Homo sapiens
aatttcattttctct

SEQ ID NO: 1161155 - DNA, 15 bp, Homo sapiens
caatttcattttctc

SEQ ID NO: 1161156 - DNA, 15 bp, Homo sapiens
gcaatttcattttct

SEQ ID NO: 1161157 - DNA, 15 bp, Homo sapiens
ggcaatttcattttc

SEQ ID NO: 1161158 - DNA, 15 bp, Homo sapiens
gggcaatttcatttt

SEQ ID NO: 1161159 - DNA, 15 bp, Homo sapiens
agggcaatttcattt

SEQ ID NO: 1161160 - DNA, 15 bp, Homo sapiens
tagggcaatttcatt

SEQ ID NO: 1161161 - DNA, 15 bp, Homo sapiens
gtagggcaatttcat

SEQ ID NO: 1161162 - DNA, 15 bp, Homo sapiens
ggtagggcaatttca

SEQ ID NO: 1161163 - DNA, 15 bp, Homo sapiens
cggtagggcaatttc

SEQ ID NO: 1161164 - DNA, 15 bp, Homo sapiens
tcggtagggcaattt

SEQ ID NO: 1161165 - DNA, 15 bp, Homo sapiens
ctcggtagggcaatt

SEQ ID NO: 1161166 - DNA, 15 bp, Homo sapiens
gctcggtagggcaat

SEQ ID NO: 1161167 - DNA, 15 bp, Homo sapiens
agctcggtagggcaa

SEQ ID NO: 1161168 - DNA, 15 bp, Homo sapiens
tagctcggtagggca

SEQ ID NO: 1161169 - DNA, 15 bp, Homo sapiens
ttagctcggtagggc

SEQ ID NO: 1161170 - DNA, 15 bp, Homo sapiens
gttagctcggtaggg

SEQ ID NO: 1161171 - DNA, 15 bp, Homo sapiens
agttagctcggtagg

SEQ ID NO: 1161172 - DNA, 15 bp, Homo sapiens
gagttagctcggtag

SEQ ID NO: 1161173 - DNA, 15 bp, Homo sapiens
agagttagctcggta

SEQ ID NO: 1161174 - DNA, 15 bp, Homo sapiens
cagagttagctcggt

SEQ ID NO: 1161175 - DNA, 15 bp, Homo sapiens
tcagagttagctcgg

SEQ ID NO: 1161176 - DNA, 15 bp, Homo sapiens
ttcagagttagctcg

SEQ ID NO: 1161177 - DNA, 15 bp, Homo sapiens
tttcagagttagctc

SEQ ID NO: 1161178 - DNA, 15 bp, Homo sapiens
ctttcagagttagct

SEQ ID NO: 1161179 - DNA, 15 bp, Homo sapiens
gctttcagagttagc

SEQ ID NO: 1161180 - DNA, 15 bp, Homo sapiens
tgctttcagagttag

SEQ ID NO: 1161181 - DNA, 15 bp, Homo sapiens
gtgctttcagagtta

SEQ ID NO: 1161182 - DNA, 15 bp, Homo sapiens
tgtgctttcagagtt

SEQ ID NO: 1161183 - DNA, 15 bp, Homo sapiens
atgtgctttcagagt

SEQ ID NO: 1161184 - DNA, 15 bp, Homo sapiens
tatgtgctttcagag

SEQ ID NO: 1161185 - DNA, 15 bp, Homo sapiens
atatgtgctttcaga

SEQ ID NO: 1161186 - DNA, 15 bp, Homo sapiens
gatatgtgctttcag

SEQ ID NO: 1161187 - DNA, 15 bp, Homo sapiens
cgatatgtgctttca

SEQ ID NO: 1161188 - DNA, 15 bp, Homo sapiens
ccgatatgtgctttc

SEQ ID NO: 1161189 - DNA, 15 bp, Homo sapiens
accgatatgtgcttt

SEQ ID NO: 1161190 - DNA, 15 bp, Homo sapiens
aaccgatatgtgctt

SEQ ID NO: 1161191 - DNA, 15 bp, Homo sapiens
gaaccgatatgtgct

SEQ ID NO: 1161192 - DNA, 15 bp, Homo sapiens
ggaaccgatatgtgc

SEQ ID NO: 1161193 - DNA, 15 bp, Homo sapiens
tggaaccgatatgtg

SEQ ID NO: 1161194 - DNA, 15 bp, Homo sapiens
atggaaccgatatgt

SEQ ID NO: 1161195 - DNA, 15 bp, Homo sapiens
tatggaaccgatatg

SEQ ID NO: 1161196 - DNA, 15 bp, Homo sapiens
ttatggaaccgatat

SEQ ID NO: 1161197 - DNA, 15 bp, Homo sapiens
tttatggaaccgata

SEQ ID NO: 1161198 - DNA, 15 bp, Homo sapiens
ctttatggaaccgat

SEQ ID NO: 1161199 - DNA, 15 bp, Homo sapiens
gctttatggaaccga

SEQ ID NO: 1161200 - DNA, 15 bp, Homo sapiens
tgctttatggaaccg

SEQ ID NO: 1161201 - DNA, 15 bp, Homo sapiens
ttgctttatggaacc

SEQ ID NO: 1161202 - DNA, 15 bp, Homo sapiens
cttgctttatggaac

SEQ ID NO: 1161203 - DNA, 15 bp, Homo sapiens
tcttgctttatggaa

SEQ ID NO: 1161204 - DNA, 15 bp, Homo sapiens
ttcttgctttatgga

SEQ ID NO: 1161205 - DNA, 15 bp, Homo sapiens
tttcttgctttatgg

SEQ ID NO: 1161206 - DNA, 15 bp, Homo sapiens
ctttcttgctttatg

SEQ ID NO: 1161207 - DNA, 15 bp, Homo sapiens
tctttcttgctttat

SEQ ID NO: 1161208 - DNA, 15 bp, Homo sapiens
ctctttcttgcttta

SEQ ID NO: 1161209 - DNA, 15 bp, Homo sapiens
ggctctttcttgctt

SEQ ID NO: 1161210 - DNA, 15 bp, Homo sapiens
gggctctttcttgct

SEQ ID NO: 1161211 - DNA, 15 bp, Homo sapiens
agggctctttcttgc

SEQ ID NO: 1161212 - DNA, 15 bp, Homo sapiens
tagggctctttcttg

SEQ ID NO: 1161213 - DNA, 15 bp, Homo sapiens
atagggctctttctt

SEQ ID NO: 1161214 - DNA, 15 bp, Homo sapiens
gatagggctctttct

SEQ ID NO: 1161215 - DNA, 15 bp, Homo sapiens
tgatagggctctttc

SEQ ID NO: 1161216 - DNA, 15 bp, Homo sapiens
atgatagggctcttt

SEQ ID NO: 1161217 - DNA, 15 bp, Homo sapiens
aatgatagggctctt

SEQ ID NO: 1161218 - DNA, 15 bp, Homo sapiens
taatgatagggctct

SEQ ID NO: 1161219 - DNA, 15 bp, Homo sapiens
ttaatgatagggctc

SEQ ID NO: 1161220 - DNA, 15 bp, Homo sapiens
cttaatgatagggct

SEQ ID NO: 1161221 - DNA, 15 bp, Homo sapiens
acttaatgatagggc

SEQ ID NO: 1161222 - DNA, 15 bp, Homo sapiens
tacttaatgataggg

SEQ ID NO: 1161223 - DNA, 15 bp, Homo sapiens
atacttaatgatagg

SEQ ID NO: 1161224 - DNA, 15 bp, Homo sapiens
aatacttaatgatag

SEQ ID NO: 1161225 - DNA, 15 bp, Homo sapiens
aaatacttaatgata

SEQ ID NO: 1161226 - DNA, 15 bp, Homo sapiens
aaaatacttaatgat

SEQ ID NO: 1161227 - DNA, 15 bp, Homo sapiens
aaaaatacttaatga

SEQ ID NO: 1161228 - DNA, 15 bp, Homo sapiens
aaaaaatacttaatg

SEQ ID NO: 1161229 - DNA, 15 bp, Homo sapiens
aaaaaaatacttaat

SEQ ID NO: 1161230 - DNA, 15 bp, Homo sapiens
taaaaaaatacttaa

SEQ ID NO: 1161231 - DNA, 15 bp, Homo sapiens
ttaaaaaaatactta

SEQ ID NO: 1161232 - DNA, 15 bp, Homo sapiens
tttaaaaaaatactt

SEQ ID NO: 1161233 - DNA, 15 bp, Homo sapiens
ctttaaaaaaatact

SEQ ID NO: 1161234 - DNA, 15 bp, Homo sapiens
aactttaaaaaaata

SEQ ID NO: 1161235 - DNA, 15 bp, Homo sapiens
aaactttaaaaaaat

SEQ ID NO: 1161236 - DNA, 15 bp, Homo sapiens
aaaactttaaaaaaa

SEQ ID NO: 1161237 - DNA, 15 bp, Homo sapiens
taaaactttaaaaaa

SEQ ID NO: 1161238 - DNA, 15 bp, Homo sapiens
ttaaaactttaaaaa

SEQ ID NO: 1161239 - DNA, 15 bp, Homo sapiens
tttaaaactttaaaa

SEQ ID NO: 1161240 - DNA, 15 bp, Homo sapiens
gtttaaaactttaaa

SEQ ID NO: 1161241 - DNA, 15 bp, Homo sapiens
agtttaaaactttaa

SEQ ID NO: 1161242 - DNA, 15 bp, Homo sapiens
gagtttaaaacttta

SEQ ID NO: 1161243 - DNA, 15 bp, Homo sapiens
tgagtttaaaacttt

SEQ ID NO: 1161244 - DNA, 15 bp, Homo sapiens
atgagtttaaaactt

SEQ ID NO: 1161245 - DNA, 15 bp, Homo sapiens
aatgagtttaaaact

SEQ ID NO: 1161246 - DNA, 15 bp, Homo sapiens
taatgagtttaaaac

SEQ ID NO: 1161247 - DNA, 15 bp, Homo sapiens
ttaatgagtttaaaa

SEQ ID NO: 1161248 - DNA, 15 bp, Homo sapiens
attaatgagtttaaa

SEQ ID NO: 1161249 - DNA, 15 bp, Homo sapiens
aattaatgagtttaa

SEQ ID NO: 1161250 - DNA, 15 bp, Homo sapiens
aaattaatgagttta

SEQ ID NO: 1161251 - DNA, 15 bp, Homo sapiens
taaattaatgagttt

SEQ ID NO: 1161252 - DNA, 15 bp, Homo sapiens
ttaaattaatgagtt

SEQ ID NO: 1161253 - DNA, 15 bp, Homo sapiens
tttaaattaatgagt

SEQ ID NO: 1161254 - DNA, 15 bp, Homo sapiens
ttttaaattaatgag

SEQ ID NO: 1161255 - DNA, 15 bp, Homo sapiens
attttaaattaatga

SEQ ID NO: 1161256 - DNA, 15 bp, Homo sapiens
cattttaaattaatg

SEQ ID NO: 1161257 - DNA, 15 bp, Homo sapiens
acattttaaattaat

SEQ ID NO: 1161258 - DNA, 15 bp, Homo sapiens
tacattttaaattaa

SEQ ID NO: 1161259 - DNA, 15 bp, Homo sapiens
gtacattttaaatta

SEQ ID NO: 1161260 - DNA, 15 bp, Homo sapiens
tgtacattttaaatt

SEQ ID NO: 1161261 - DNA, 15 bp, Homo sapiens
ttgtacattttaaat

SEQ ID NO: 1161262 - DNA, 15 bp, Homo sapiens
ataattgtacatttt

SEQ ID NO: 1161263 - DNA, 15 bp, Homo sapiens
gataattgtacattt

SEQ ID NO: 1161264 - DNA, 15 bp, Homo sapiens
tgataattgtacatt

SEQ ID NO: 1161265 - DNA, 15 bp, Homo sapiens
ctgataattgtacat

SEQ ID NO: 1161266 - DNA, 15 bp, Homo sapiens
actgataattgtaca

SEQ ID NO: 1161267 - DNA, 15 bp, Homo sapiens
tactgataattgtac

SEQ ID NO: 1161268 - DNA, 15 bp, Homo sapiens
atactgataattgta

SEQ ID NO: 1161269 - DNA, 15 bp, Homo sapiens
tatactgataattgt

SEQ ID NO: 1161270 - DNA, 15 bp, Homo sapiens
ttatactgataattg

SEQ ID NO: 1161271 - DNA, 15 bp, Homo sapiens
attatactgataatt

SEQ ID NO: 1161272 - DNA, 15 bp, Homo sapiens
aattatactgataat

SEQ ID NO: 1161273 - DNA, 15 bp, Homo sapiens
aaattatactgataa

SEQ ID NO: 1161274 - DNA, 15 bp, Homo sapiens
gaaattatactgata

SEQ ID NO: 1161275 - DNA, 15 bp, Homo sapiens
tgaaattatactgat

SEQ ID NO: 1161276 - DNA, 15 bp, Homo sapiens
ttgaaattatactga

SEQ ID NO: 1161277 - DNA, 15 bp, Homo sapiens
tttgaaattatactg

SEQ ID NO: 1161278 - DNA, 15 bp, Homo sapiens
gtttgaaattatact

SEQ ID NO: 1161279 - DNA, 15 bp, Homo sapiens
tgtttgaaattatac

SEQ ID NO: 1161280 - DNA, 15 bp, Homo sapiens
atgtttgaaattata

SEQ ID NO: 1161281 - DNA, 15 bp, Homo sapiens
gatgtttgaaattat

SEQ ID NO: 1161282 - DNA, 15 bp, Homo sapiens
tgatgtttgaaatta

SEQ ID NO: 1161283 - DNA, 15 bp, Homo sapiens
ttgatgtttgaaatt

SEQ ID NO: 1161284 - DNA, 15 bp, Homo sapiens
tttgatgtttgaaat

SEQ ID NO: 1161285 - DNA, 15 bp, Homo sapiens
gtttgatgtttgaaa

SEQ ID NO: 1161286 - DNA, 15 bp, Homo sapiens
tgtttgatgtttgaa

SEQ ID NO: 1161287 - DNA, 15 bp, Homo sapiens
atgtttgatgtttga

SEQ ID NO: 1161288 - DNA, 15 bp, Homo sapiens
gatgtttgatgtttg

SEQ ID NO: 1161289 - DNA, 15 bp, Homo sapiens
tgatgtttgatgttt

SEQ ID NO: 1161290 - DNA, 15 bp, Homo sapiens
ttgatgtttgatgtt

SEQ ID NO: 1161291 - DNA, 15 bp, Homo sapiens
attgatgtttgatgt

SEQ ID NO: 1161292 - DNA, 15 bp, Homo sapiens
cattgatgtttgatg

SEQ ID NO: 1161293 - DNA, 15 bp, Homo sapiens
tcattgatgtttgat

SEQ ID NO: 1161294 - DNA, 15 bp, Homo sapiens
atcattgatgtttga

SEQ ID NO: 1161295 - DNA, 15 bp, Homo sapiens
tatcattgatgtttg

SEQ ID NO: 1161296 - DNA, 15 bp, Homo sapiens
gtatcattgatgttt

SEQ ID NO: 1161297 - DNA, 15 bp, Homo sapiens
tgtatcattgatgtt

SEQ ID NO: 1161298 - DNA, 15 bp, Homo sapiens
atgtatcattgatgt

SEQ ID NO: 1161299 - DNA, 15 bp, Homo sapiens
catgtatcattgatg

SEQ ID NO: 1161300 - DNA, 15 bp, Homo sapiens
gcatgtatcattgat

SEQ ID NO: 1161301 - DNA, 15 bp, Homo sapiens
agcatgtatcattga

SEQ ID NO: 1161302 - DNA, 15 bp, Homo sapiens
cagcatgtatcattg

SEQ ID NO: 1161303 - DNA, 15 bp, Homo sapiens
tcagcatgtatcatt

SEQ ID NO: 1161304 - DNA, 15 bp, Homo sapiens
ctcagcatgtatcat

SEQ ID NO: 1161305 - DNA, 15 bp, Homo sapiens
actcagcatgtatca

SEQ ID NO: 1161306 - DNA, 15 bp, Homo sapiens
aactcagcatgtatc

SEQ ID NO: 1161307 - DNA, 15 bp, Homo sapiens
aaactcagcatgtat

SEQ ID NO: 1161308 - DNA, 15 bp, Homo sapiens
gaaactcagcatgta

SEQ ID NO: 1161309 - DNA, 15 bp, Homo sapiens
agaaactcagcatgt

SEQ ID NO: 1161310 - DNA, 15 bp, Homo sapiens
tagaaactcagcatg

SEQ ID NO: 1161311 - DNA, 15 bp, Homo sapiens
atagaaactcagcat

SEQ ID NO: 1161312 - DNA, 15 bp, Homo sapiens
tatagaaactcagca

SEQ ID NO: 1161313 - DNA, 15 bp, Homo sapiens
ctatagaaactcagc

SEQ ID NO: 1161314 - DNA, 15 bp, Homo sapiens
gctatagaaactcag

SEQ ID NO: 1161315 - DNA, 15 bp, Homo sapiens
tgctatagaaactca

SEQ ID NO: 1161316 - DNA, 15 bp, Homo sapiens
ttgctatagaaactc

SEQ ID NO: 1161317 - DNA, 15 bp, Homo sapiens
gttgctatagaaact

SEQ ID NO: 1161318 - DNA, 15 bp, Homo sapiens
agttgctatagaaac

SEQ ID NO: 1161319 - DNA, 15 bp, Homo sapiens
cagttgctatagaaa

SEQ ID NO: 1161320 - DNA, 15 bp, Homo sapiens
gcagttgctatagaa

SEQ ID NO: 1161321 - DNA, 15 bp, Homo sapiens
cgcagttgctataga

SEQ ID NO: 1161322 - DNA, 15 bp, Homo sapiens
acgcagttgctatag

SEQ ID NO: 1161323 - DNA, 15 bp, Homo sapiens
aacgcagttgctata

SEQ ID NO: 1161324 - DNA, 15 bp, Homo sapiens
gaacgcagttgctat

SEQ ID NO: 1161325 - DNA, 15 bp, Homo sapiens
agaacgcagttgcta

SEQ ID NO: 1161326 - DNA, 15 bp, Homo sapiens
gagaacgcagttgct

SEQ ID NO: 1161327 - DNA, 15 bp, Homo sapiens
agagaacgcagttgc

SEQ ID NO: 1161328 - DNA, 15 bp, Homo sapiens
aagagaacgcagttg

SEQ ID NO: 1161329 - DNA, 15 bp, Homo sapiens
aaagagaacgcagtt

SEQ ID NO: 1161330 - DNA, 15 bp, Homo sapiens
aaaagagaacgcagt

SEQ ID NO: 1161331 - DNA, 15 bp, Homo sapiens
taaaagagaacgcag

SEQ ID NO: 1161332 - DNA, 15 bp, Homo sapiens
ataaaagagaacgca

SEQ ID NO: 1161333 - DNA, 15 bp, Homo sapiens
tataaaagagaacgc

SEQ ID NO: 1161334 - DNA, 15 bp, Homo sapiens
ttataaaagagaacg

SEQ ID NO: 1161335 - DNA, 15 bp, Homo sapiens
tttataaaagagaac

SEQ ID NO: 1161336 - DNA, 15 bp, Homo sapiens
atttataaaagagaa

SEQ ID NO: 1161337 - DNA, 15 bp, Homo sapiens
tatttataaaagaga

SEQ ID NO: 1161338 - DNA, 15 bp, Homo sapiens
ctatttataaaagag

SEQ ID NO: 1161339 - DNA, 15 bp, Homo sapiens
tctatttataaaaga

SEQ ID NO: 1161340 - DNA, 15 bp, Homo sapiens
gtctatttataaaag

SEQ ID NO: 1161341 - DNA, 15 bp, Homo sapiens
agtctatttataaaa

SEQ ID NO: 1161342 - DNA, 15 bp, Homo sapiens
tagtctatttataaa

SEQ ID NO: 1161343 - DNA, 15 bp, Homo sapiens
gtagtctatttataa

SEQ ID NO: 1161344 - DNA, 15 bp, Homo sapiens
agtagtctatttata

SEQ ID NO: 1161345 - DNA, 15 bp, Homo sapiens
aagtagtctatttat

SEQ ID NO: 1161346 - DNA, 15 bp, Homo sapiens
aaagtagtctattta

SEQ ID NO: 1161347 - DNA, 15 bp, Homo sapiens
aaaagtagtctattt

SEQ ID NO: 1161348 - DNA, 15 bp, Homo sapiens
gaaaagtagtctatt

SEQ ID NO: 1161349 - DNA, 15 bp, Homo sapiens
ggaaaagtagtctat

SEQ ID NO: 1161350 - DNA, 15 bp, Homo sapiens
gggaaaagtagtcta

SEQ ID NO: 1161351 - DNA, 15 bp, Homo sapiens
tgggaaaagtagtct

SEQ ID NO: 1161352 - DNA, 15 bp, Homo sapiens
ctgggaaaagtagtc

SEQ ID NO: 1161353 - DNA, 15 bp, Homo sapiens
tctgggaaaagtagt

SEQ ID NO: 1161354 - DNA, 15 bp, Homo sapiens
ttctgggaaaagtag

SEQ ID NO: 1161355 - DNA, 15 bp, Homo sapiens
tttctgggaaaagta

SEQ ID NO: 1161356 - DNA, 15 bp, Homo sapiens
ttttctgggaaaagt

SEQ ID NO: 1161357 - DNA, 15 bp, Homo sapiens
attttctgggaaaag

SEQ ID NO: 1161358 - DNA, 15 bp, Homo sapiens
gattttctgggaaaa

SEQ ID NO: 1161359 - DNA, 15 bp, Homo sapiens
ggattttctgggaaa

SEQ ID NO: 1161360 - DNA, 15 bp, Homo sapiens
cggattttctgggaa

SEQ ID NO: 1161361 - DNA, 15 bp, Homo sapiens
acggattttctggga

SEQ ID NO: 1161362 - DNA, 15 bp, Homo sapiens
aacggattttctggg

SEQ ID NO: 1161363 - DNA, 15 bp, Homo sapiens
aaacggattttctgg

SEQ ID NO: 1161364 - DNA, 15 bp, Homo sapiens
aaaacggattttctg

SEQ ID NO: 1161365 - DNA, 15 bp, Homo sapiens
aaaaacggattttct

SEQ ID NO: 1161366 - DNA, 15 bp, Homo sapiens
gaaaaacggattttc

SEQ ID NO: 1161367 - DNA, 15 bp, Homo sapiens
ggaaaaacggatttt

SEQ ID NO: 1161368 - DNA, 15 bp, Homo sapiens
aggaaaaacggattt

SEQ ID NO: 1161369 - DNA, 15 bp, Homo sapiens
taggaaaaacggatt

SEQ ID NO: 1161370 - DNA, 15 bp, Homo sapiens
gtaggaaaaacggat

SEQ ID NO: 1161371 - DNA, 15 bp, Homo sapiens
tgtaggaaaaacgga

SEQ ID NO: 1161372 - DNA, 15 bp, Homo sapiens
ttgtaggaaaaacgg

SEQ ID NO: 1161373 - DNA, 15 bp, Homo sapiens
attgtaggaaaaacg

SEQ ID NO: 1161374 - DNA, 15 bp, Homo sapiens
cattgtaggaaaaac

SEQ ID NO: 1161375 - DNA, 15 bp, Homo sapiens
tcattgtaggaaaaa

SEQ ID NO: 1161376 - DNA, 15 bp, Homo sapiens
ttcattgtaggaaaa

SEQ ID NO: 1161377 - DNA, 15 bp, Homo sapiens
tttcattgtaggaaa

SEQ ID NO: 1161378 - DNA, 15 bp, Homo sapiens
ctttcattgtaggaa

SEQ ID NO: 1161379 - DNA, 15 bp, Homo sapiens
cctttcattgtagga

SEQ ID NO: 1161380 - DNA, 15 bp, Homo sapiens
acctttcattgtagg

SEQ ID NO: 1161381 - DNA, 15 bp, Homo sapiens
tacctttcattgtag

SEQ ID NO: 1161382 - DNA, 15 bp, Homo sapiens
atacctttcattgta

SEQ ID NO: 1161383 - DNA, 15 bp, Homo sapiens
catacctttcattgt

SEQ ID NO: 1161384 - DNA, 15 bp, Homo sapiens
acatacctttcattg

SEQ ID NO: 1161385 - DNA, 15 bp, Homo sapiens
aacatacctttcatt

SEQ ID NO: 1161386 - DNA, 15 bp, Homo sapiens
aaacatacctttcat

SEQ ID NO: 1161387 - DNA, 15 bp, Homo sapiens
taaacatacctttca

SEQ ID NO: 1161388 - DNA, 15 bp, Homo sapiens
ctaaacatacctttc

SEQ ID NO: 1161389 - DNA, 15 bp, Homo sapiens
tctaaacataccttt

SEQ ID NO: 1161390 - DNA, 15 bp, Homo sapiens
atctaaacatacctt

SEQ ID NO: 1161391 - DNA, 15 bp, Homo sapiens
catctaaacatacct

SEQ ID NO: 1161392 - DNA, 15 bp, Homo sapiens
ccatctaaacatacc

SEQ ID NO: 1161393 - DNA, 15 bp, Homo sapiens
tccatctaaacatac

SEQ ID NO: 1161394 - DNA, 15 bp, Homo sapiens
ttccatctaaacata

SEQ ID NO: 1161395 - DNA, 15 bp, Homo sapiens
tttccatctaaacat

SEQ ID NO: 1161396 - DNA, 15 bp, Homo sapiens
ctttccatctaaaca

SEQ ID NO: 1161397 - DNA, 15 bp, Homo sapiens
gctttccatctaaac

SEQ ID NO: 1161398 - DNA, 15 bp, Homo sapiens
tgctttccatctaaa

SEQ ID NO: 1161399 - DNA, 15 bp, Homo sapiens
ttgctttccatctaa

SEQ ID NO: 1161400 - DNA, 15 bp, Homo sapiens
tttgctttccatcta

SEQ ID NO: 1161401 - DNA, 15 bp, Homo sapiens
ttttgctttccatct

SEQ ID NO: 1161402 - DNA, 15 bp, Homo sapiens
tttttgctttccatc

SEQ ID NO: 1161403 - DNA, 15 bp, Homo sapiens
ttttttgctttccat

SEQ ID NO: 1161404 - DNA, 15 bp, Homo sapiens
attttttgctttcca

SEQ ID NO: 1161405 - DNA, 15 bp, Homo sapiens
tattttttgctttcc

SEQ ID NO: 1161406 - DNA, 15 bp, Homo sapiens
atattttttgctttc

SEQ ID NO: 1161407 - DNA, 15 bp, Homo sapiens
tatattttttgcttt

SEQ ID NO: 1161408 - DNA, 15 bp, Homo sapiens
ctatattttttgctt

SEQ ID NO: 1161409 - DNA, 15 bp, Homo sapiens
tctatattttttgct

SEQ ID NO: 1161410 - DNA, 15 bp, Homo sapiens
gtctatattttttgc

SEQ ID NO: 1161411 - DNA, 15 bp, Homo sapiens
tgtctatattttttg

SEQ ID NO: 1161412 - DNA, 15 bp, Homo sapiens
ttgtctatatttttt

SEQ ID NO: 1161413 - DNA, 15 bp, Homo sapiens
gttgtctatattttt

SEQ ID NO: 1161414 - DNA, 15 bp, Homo sapiens
ggttgtctatatttt

SEQ ID NO: 1161415 - DNA, 15 bp, Homo sapiens
gggttgtctatattt

SEQ ID NO: 1161416 - DNA, 15 bp, Homo sapiens
ggggttgtctatatt

SEQ ID NO: 1161417 - DNA, 15 bp, Homo sapiens
aggggttgtctatat

SEQ ID NO: 1161418 - DNA, 15 bp, Homo sapiens
taggggttgtctata

SEQ ID NO: 1161419 - DNA, 15 bp, Homo sapiens
ctaggggttgtctat

SEQ ID NO: 1161420 - DNA, 15 bp, Homo sapiens
tctaggggttgtcta

SEQ ID NO: 1161421 - DNA, 15 bp, Homo sapiens
ttctaggggttgtct

SEQ ID NO: 1161422 - DNA, 15 bp, Homo sapiens
cttctaggggttgtc

SEQ ID NO: 1161423 - DNA, 15 bp, Homo sapiens
gcttctaggggttgt

SEQ ID NO: 1161424 - DNA, 15 bp, Homo sapiens
agcttctaggggttg

SEQ ID NO: 1161425 - DNA, 15 bp, Homo sapiens
tagcttctaggggtt

SEQ ID NO: 1161426 - DNA, 15 bp, Homo sapiens
ttagcttctaggggt

SEQ ID NO: 1161427 - DNA, 15 bp, Homo sapiens
gttagcttctagggg

SEQ ID NO: 1161428 - DNA, 15 bp, Homo sapiens
ggttagcttctaggg

SEQ ID NO: 1161429 - DNA, 15 bp, Homo sapiens
tggttagcttctagg

SEQ ID NO: 1161430 - DNA, 15 bp, Homo sapiens
gtggttagcttctag

SEQ ID NO: 1161431 - DNA, 15 bp, Homo sapiens
tgtggttagcttcta

SEQ ID NO: 1161432 - DNA, 15 bp, Homo sapiens
gtgtggttagcttct

SEQ ID NO: 1161433 - DNA, 15 bp, Homo sapiens
agtgtggttagcttc

SEQ ID NO: 1161434 - DNA, 15 bp, Homo sapiens
cagtgtggttagctt

SEQ ID NO: 1161435 - DNA, 15 bp, Homo sapiens
tcagtgtggttagct

SEQ ID NO: 1161436 - DNA, 15 bp, Homo sapiens
ttcagtgtggttagc

SEQ ID NO: 1161437 - DNA, 15 bp, Homo sapiens
tttcagtgtggttag

SEQ ID NO: 1161438 - DNA, 15 bp, Homo sapiens
atttcagtgtggtta

SEQ ID NO: 1161439 - DNA, 15 bp, Homo sapiens
catttcagtgtggtt

SEQ ID NO: 1161440 - DNA, 15 bp, Homo sapiens
acatttcagtgtggt

SEQ ID NO: 1161441 - DNA, 15 bp, Homo sapiens
aacatttcagtgtgg

SEQ ID NO: 1161442 - DNA, 15 bp, Homo sapiens
aaacatttcagtgtg

SEQ ID NO: 1161443 - DNA, 15 bp, Homo sapiens
gaaacatttcagtgt

SEQ ID NO: 1161444 - DNA, 15 bp, Homo sapiens
tgaaacatttcagtg

SEQ ID NO: 1161445 - DNA, 15 bp, Homo sapiens
ttgaaacatttcagt

SEQ ID NO: 1161446 - DNA, 15 bp, Homo sapiens
attgaaacatttcag

SEQ ID NO: 1161447 - DNA, 15 bp, Homo sapiens
tattgaaacatttca

SEQ ID NO: 1161448 - DNA, 15 bp, Homo sapiens
ttattgaaacatttc

SEQ ID NO: 1161449 - DNA, 15 bp, Homo sapiens
attattgaaacattt

SEQ ID NO: 1161450 - DNA, 15 bp, Homo sapiens
aattattgaaacatt

SEQ ID NO: 1161451 - DNA, 15 bp, Homo sapiens
aaattattgaaacat

SEQ ID NO: 1161452 - DNA, 15 bp, Homo sapiens
aaaattattgaaaca

SEQ ID NO: 1161453 - DNA, 15 bp, Homo sapiens
gaaaattattgaaac

SEQ ID NO: 1161454 - DNA, 15 bp, Homo sapiens
ggaaaattattgaaa

SEQ ID NO: 1161455 - DNA, 15 bp, Homo sapiens
gggaaaattattgaa

SEQ ID NO: 1161456 - DNA, 15 bp, Homo sapiens
agggaaaattattga

SEQ ID NO: 1161457 - DNA, 15 bp, Homo sapiens
aagggaaaattattg

SEQ ID NO: 1161458 - DNA, 15 bp, Homo sapiens
aaagggaaaattatt

SEQ ID NO: 1161459 - DNA, 15 bp, Homo sapiens
caaagggaaaattat

SEQ ID NO: 1161460 - DNA, 15 bp, Homo sapiens
acaaagggaaaatta

SEQ ID NO: 1161461 - DNA, 15 bp, Homo sapiens
aacaaagggaaaatt

SEQ ID NO: 1161462 - DNA, 15 bp, Homo sapiens
aaacaaagggaaaat

SEQ ID NO: 1161463 - DNA, 15 bp, Homo sapiens
aaaacaaagggaaaa

SEQ ID NO: 1161464 - DNA, 15 bp, Homo sapiens
gaaaacaaagggaaa

SEQ ID NO: 1161465 - DNA, 15 bp, Homo sapiens
agaaaacaaagggaa

SEQ ID NO: 1161466 - DNA, 15 bp, Homo sapiens
gagaaaacaaaggga

SEQ ID NO: 1161467 - DNA, 15 bp, Homo sapiens
ggagaaaacaaaggg

SEQ ID NO: 1161468 - DNA, 15 bp, Homo sapiens
tggagaaaacaaagg

SEQ ID NO: 1161469 - DNA, 15 bp, Homo sapiens
gtggagaaaacaaag

SEQ ID NO: 1161470 - DNA, 15 bp, Homo sapiens
tgtggagaaaacaaa

SEQ ID NO: 1161471 - DNA, 15 bp, Homo sapiens
ttgtggagaaaacaa

SEQ ID NO: 1161472 - DNA, 15 bp, Homo sapiens
attgtggagaaaaca

SEQ ID NO: 1161473 - DNA, 15 bp, Homo sapiens
aattgtggagaaaac

SEQ ID NO: 1161474 - DNA, 15 bp, Homo sapiens
aaattgtggagaaaa

SEQ ID NO: 1161475 - DNA, 15 bp, Homo sapiens
aaaattgtggagaaa

SEQ ID NO: 1161476 - DNA, 15 bp, Homo sapiens
gaaaattgtggagaa

SEQ ID NO: 1161477 - DNA, 15 bp, Homo sapiens
agaaaattgtggaga

SEQ ID NO: 1161478 - DNA, 15 bp, Homo sapiens
cagaaaattgtggag

SEQ ID NO: 1161479 - DNA, 15 bp, Homo sapiens
gcagaaaattgtgga

SEQ ID NO: 1161480 - DNA, 15 bp, Homo sapiens
tgcagaaaattgtgg

SEQ ID NO: 1161481 - DNA, 15 bp, Homo sapiens
ttgcagaaaattgtg

SEQ ID NO: 1161482 - DNA, 15 bp, Homo sapiens
gttgcagaaaattgt

SEQ ID NO: 1161483 - DNA, 15 bp, Homo sapiens
tgttgcagaaaattg

SEQ ID NO: 1161484 - DNA, 15 bp, Homo sapiens
ttgttgcagaaaatt

SEQ ID NO: 1161485 - DNA, 15 bp, Homo sapiens
tttgttgcagaaaat

SEQ ID NO: 1161486 - DNA, 15 bp, Homo sapiens
atttgttgcagaaaa

SEQ ID NO: 1161487 - DNA, 15 bp, Homo sapiens
aatttgttgcagaaa

SEQ ID NO: 1161488 - DNA, 15 bp, Homo sapiens
taatttgttgcagaa

SEQ ID NO: 1161489 - DNA, 15 bp, Homo sapiens
ctaatttgttgcaga

SEQ ID NO: 1161490 - DNA, 15 bp, Homo sapiens
actaatttgttgcag

SEQ ID NO: 1161491 - DNA, 15 bp, Homo sapiens
aactaatttgttgca

SEQ ID NO: 1161492 - DNA, 15 bp, Homo sapiens
gaactaatttgttgc

SEQ ID NO: 1161493 - DNA, 15 bp, Homo sapiens
agaactaatttgttg

SEQ ID NO: 1161494 - DNA, 15 bp, Homo sapiens
aagaactaatttgtt

SEQ ID NO: 1161495 - DNA, 15 bp, Homo sapiens
taagaactaatttgt

SEQ ID NO: 1161496 - DNA, 15 bp, Homo sapiens
ctaagaactaatttg

SEQ ID NO: 1161497 - DNA, 15 bp, Homo sapiens
gctaagaactaattt

SEQ ID NO: 1161498 - DNA, 15 bp, Homo sapiens
cgctaagaactaatt

SEQ ID NO: 1161499 - DNA, 15 bp, Homo sapiens
gcgctaagaactaat

SEQ ID NO: 1161500 - DNA, 15 bp, Homo sapiens
agcgctaagaactaa

SEQ ID NO: 1161501 - DNA, 15 bp, Homo sapiens
gagcgctaagaacta

SEQ ID NO: 1161502 - DNA, 15 bp, Homo sapiens
agagcgctaagaact

SEQ ID NO: 1161503 - DNA, 15 bp, Homo sapiens
tagagcgctaagaac

SEQ ID NO: 1161504 - DNA, 15 bp, Homo sapiens
atagagcgctaagaa

SEQ ID NO: 1161505 - DNA, 15 bp, Homo sapiens
gatagagcgctaaga

SEQ ID NO: 1161506 - DNA, 15 bp, Homo sapiens
tgatagagcgctaag

SEQ ID NO: 1161507 - DNA, 15 bp, Homo sapiens
ctgatagagcgctaa

SEQ ID NO: 1161508 - DNA, 15 bp, Homo sapiens
cctgatagagcgcta

SEQ ID NO: 1161509 - DNA, 15 bp, Homo sapiens
acctgatagagcgct

SEQ ID NO: 1161510 - DNA, 15 bp, Homo sapiens
aacctgatagagcgc

SEQ ID NO: 1161511 - DNA, 15 bp, Homo sapiens
caacctgatagagcg

SEQ ID NO: 1161512 - DNA, 15 bp, Homo sapiens
acaacctgatagagc

SEQ ID NO: 1161513 - DNA, 15 bp, Homo sapiens
aacaacctgatagag

SEQ ID NO: 1161514 - DNA, 15 bp, Homo sapiens
taacaacctgataga

SEQ ID NO: 1161515 - DNA, 15 bp, Homo sapiens
ttaacaacctgatag

SEQ ID NO: 1161516 - DNA, 15 bp, Homo sapiens
tttaacaacctgata

SEQ ID NO: 1161517 - DNA, 15 bp, Homo sapiens
atttaacaacctgat

SEQ ID NO: 1161518 - DNA, 15 bp, Homo sapiens
aatttaacaacctga

SEQ ID NO: 1161519 - DNA, 15 bp, Homo sapiens
gaatttaacaacctg

SEQ ID NO: 1161520 - DNA, 15 bp, Homo sapiens
tgaatttaacaacct

SEQ ID NO: 1161521 - DNA, 15 bp, Homo sapiens
ctgaatttaacaacc

SEQ ID NO: 1161522 - DNA, 15 bp, Homo sapiens
actgaatttaacaac

SEQ ID NO: 1161523 - DNA, 15 bp, Homo sapiens
tactgaatttaacaa

SEQ ID NO: 1161524 - DNA, 15 bp, Homo sapiens
ttactgaatttaaca

SEQ ID NO: 1161525 - DNA, 15 bp, Homo sapiens
tttactgaatttaac

SEQ ID NO: 1161526 - DNA, 15 bp, Homo sapiens
atttactgaatttaa

SEQ ID NO: 1161527 - DNA, 15 bp, Homo sapiens
gatttactgaattta

SEQ ID NO: 1161528 - DNA, 15 bp, Homo sapiens
tgatttactgaattt

SEQ ID NO: 1161529 - DNA, 15 bp, Homo sapiens
atgatttactgaatt

SEQ ID NO: 1161530 - DNA, 15 bp, Homo sapiens
gatgatttactgaat

SEQ ID NO: 1161531 - DNA, 15 bp, Homo sapiens
ggatgatttactgaa

SEQ ID NO: 1161532 - DNA, 15 bp, Homo sapiens
tggatgatttactga

SEQ ID NO: 1161533 - DNA, 15 bp, Homo sapiens
ttggatgatttactg

SEQ ID NO: 1161534 - DNA, 15 bp, Homo sapiens
tttggatgatttact

SEQ ID NO: 1161535 - DNA, 15 bp, Homo sapiens
ctttggatgatttac

SEQ ID NO: 1161536 - DNA, 15 bp, Homo sapiens
actttggatgattta

SEQ ID NO: 1161537 - DNA, 15 bp, Homo sapiens
aactttggatgattt

SEQ ID NO: 1161538 - DNA, 15 bp, Homo sapiens
gaactttggatgatt

SEQ ID NO: 1161539 - DNA, 15 bp, Homo sapiens
agaactttggatgat

SEQ ID NO: 1161540 - DNA, 15 bp, Homo sapiens
aagaactttggatga

SEQ ID NO: 1161541 - DNA, 15 bp, Homo sapiens
gaagaactttggatg

SEQ ID NO: 1161542 - DNA, 15 bp, Homo sapiens
agaagaactttggat

SEQ ID NO: 1161543 - DNA, 15 bp, Homo sapiens
tagaagaactttgga

SEQ ID NO: 1161544 - DNA, 15 bp, Homo sapiens
ttagaagaactttgg

SEQ ID NO: 1161545 - DNA, 15 bp, Homo sapiens
gttagaagaactttg

SEQ ID NO: 1161546 - DNA, 15 bp, Homo sapiens
agttagaagaacttt

SEQ ID NO: 1161547 - DNA, 15 bp, Homo sapiens
cagttagaagaactt

SEQ ID NO: 1161548 - DNA, 15 bp, Homo sapiens
acagttagaagaact

SEQ ID NO: 1161549 - DNA, 15 bp, Homo sapiens
tacagttagaagaac

SEQ ID NO: 1161550 - DNA, 15 bp, Homo sapiens
ttacagttagaagaa

SEQ ID NO: 1161551 - DNA, 15 bp, Homo sapiens
attacagttagaaga

SEQ ID NO: 1161552 - DNA, 15 bp, Homo sapiens
tattacagttagaag

SEQ ID NO: 1161553 - DNA, 15 bp, Homo sapiens
ttattacagttagaa

SEQ ID NO: 1161554 - DNA, 15 bp, Homo sapiens
cttattacagttaga

SEQ ID NO: 1161555 - DNA, 15 bp, Homo sapiens
gcttattacagttag

SEQ ID NO: 1161556 - DNA, 15 bp, Homo sapiens
ggcttattacagtta

SEQ ID NO: 1161557 - DNA, 15 bp, Homo sapiens
tggcttattacagtt

SEQ ID NO: 1161558 - DNA, 15 bp, Homo sapiens
atggcttattacagt

SEQ ID NO: 1161559 - DNA, 15 bp, Homo sapiens
tatggcttattacag

SEQ ID NO: 1161560 - DNA, 15 bp, Homo sapiens
atatggcttattaca

SEQ ID NO: 1161561 - DNA, 15 bp, Homo sapiens
aatatggcttattac

SEQ ID NO: 1161562 - DNA, 15 bp, Homo sapiens
taatatggcttatta

SEQ ID NO: 1161563 - DNA, 15 bp, Homo sapiens
gtaatatggcttatt

SEQ ID NO: 1161564 - DNA, 15 bp, Homo sapiens
ggtaatatggcttat

SEQ ID NO: 1161565 - DNA, 15 bp, Homo sapiens
tggtaatatggctta

SEQ ID NO: 1161566 - DNA, 15 bp, Homo sapiens
ttggtaatatggctt

SEQ ID NO: 1161567 - DNA, 15 bp, Homo sapiens
tttggtaatatggct

SEQ ID NO: 1161568 - DNA, 15 bp, Homo sapiens
ctttggtaatatggc

SEQ ID NO: 1161569 - DNA, 15 bp, Homo sapiens
tctttggtaatatgg

SEQ ID NO: 1161570 - DNA, 15 bp, Homo sapiens
ttctttggtaatatg

SEQ ID NO: 1161571 - DNA, 15 bp, Homo sapiens
attctttggtaatat

SEQ ID NO: 1161572 - DNA, 15 bp, Homo sapiens
aattctttggtaata

SEQ ID NO: 1161573 - DNA, 15 bp, Homo sapiens
aaattctttggtaat

SEQ ID NO: 1161574 - DNA, 15 bp, Homo sapiens
aaaattctttggtaa

SEQ ID NO: 1161575 - DNA, 15 bp, Homo sapiens
aaaaattctttggta

SEQ ID NO: 1161576 - DNA, 15 bp, Homo sapiens
gaaaaattctttggt

SEQ ID NO: 1161577 - DNA, 15 bp, Homo sapiens
tgaaaaattctttgg

SEQ ID NO: 1161578 - DNA, 15 bp, Homo sapiens
ttgaaaaattctttg

SEQ ID NO: 1161579 - DNA, 15 bp, Homo sapiens
tttgaaaaattcttt

SEQ ID NO: 1161580 - DNA, 15 bp, Homo sapiens
atttgaaaaattctt

SEQ ID NO: 1161581 - DNA, 15 bp, Homo sapiens
catttgaaaaattct

SEQ ID NO: 1161582 - DNA, 15 bp, Homo sapiens
acatttgaaaaattc

SEQ ID NO: 1161583 - DNA, 15 bp, Homo sapiens
cacatttgaaaaatt

SEQ ID NO: 1161584 - DNA, 15 bp, Homo sapiens
tcacatttgaaaaat

SEQ ID NO: 1161585 - DNA, 15 bp, Homo sapiens
gtcacatttgaaaaa

SEQ ID NO: 1161586 - DNA, 15 bp, Homo sapiens
ggtcacatttgaaaa

SEQ ID NO: 1161587 - DNA, 15 bp, Homo sapiens
tggtcacatttgaaa

SEQ ID NO: 1161588 - DNA, 15 bp, Homo sapiens
gtggtcacatttgaa

SEQ ID NO: 1161589 - DNA, 15 bp, Homo sapiens
agtggtcacatttga

SEQ ID NO: 1161590 - DNA, 15 bp, Homo sapiens
cagtggtcacatttg

SEQ ID NO: 1161591 - DNA, 15 bp, Homo sapiens
acagtggtcacattt

SEQ ID NO: 1161592 - DNA, 15 bp, Homo sapiens
cacagtggtcacatt

SEQ ID NO: 1161593 - DNA, 15 bp, Homo sapiens
acacagtggtcacat

SEQ ID NO: 1161594 - DNA, 15 bp, Homo sapiens
tcacacagtggtcac

SEQ ID NO: 1161595 - DNA, 15 bp, Homo sapiens
ctcacacagtggtca

SEQ ID NO: 1161596 - DNA, 15 bp, Homo sapiens
actcacacagtggtc

SEQ ID NO: 1161597 - DNA, 15 bp, Homo sapiens
cactcacacagtggt

SEQ ID NO: 1161598 - DNA, 15 bp, Homo sapiens
ccactcacacagtgg

SEQ ID NO: 1161599 - DNA, 15 bp, Homo sapiens
tccactcacacagtg

SEQ ID NO: 1161600 - DNA, 15 bp, Homo sapiens
atccactcacacagt

SEQ ID NO: 1161601 - DNA, 15 bp, Homo sapiens
gatccactcacacag

SEQ ID NO: 1161602 - DNA, 15 bp, Homo sapiens
tgatccactcacaca

SEQ ID NO: 1161603 - DNA, 15 bp, Homo sapiens
ttgatccactcacac

SEQ ID NO: 1161604 - DNA, 15 bp, Homo sapiens
cttgatccactcaca

SEQ ID NO: 1161605 - DNA, 15 bp, Homo sapiens
acttgatccactcac

SEQ ID NO: 1161606 - DNA, 15 bp, Homo sapiens
aacttgatccactca

SEQ ID NO: 1161607 - DNA, 15 bp, Homo sapiens
aaacttgatccactc

SEQ ID NO: 1161608 - DNA, 15 bp, Homo sapiens
gaaacttgatccact

SEQ ID NO: 1161609 - DNA, 15 bp, Homo sapiens
tgaaacttgatccac

SEQ ID NO: 1161610 - DNA, 15 bp, Homo sapiens
ctgaaacttgatcca

SEQ ID NO: 1161611 - DNA, 15 bp, Homo sapiens
tctgaaacttgatcc

SEQ ID NO: 1161612 - DNA, 15 bp, Homo sapiens
atctgaaacttgatc

SEQ ID NO: 1161613 - DNA, 15 bp, Homo sapiens
aatctgaaacttgat

SEQ ID NO: 1161614 - DNA, 15 bp, Homo sapiens
taatctgaaacttga

SEQ ID NO: 1161615 - DNA, 15 bp, Homo sapiens
ttaatctgaaacttg

SEQ ID NO: 1161616 - DNA, 15 bp, Homo sapiens
gttaatctgaaactt

SEQ ID NO: 1161617 - DNA, 15 bp, Homo sapiens
ggttaatctgaaact

SEQ ID NO: 1161618 - DNA, 15 bp, Homo sapiens
tggttaatctgaaac

SEQ ID NO: 1161619 - DNA, 15 bp, Homo sapiens
ttggttaatctgaaa

SEQ ID NO: 1161620 - DNA, 15 bp, Homo sapiens
cttggttaatctgaa

SEQ ID NO: 1161621 - DNA, 15 bp, Homo sapiens
tcttggttaatctga

SEQ ID NO: 1161622 - DNA, 15 bp, Homo sapiens
atcttggttaatctg

SEQ ID NO: 1161623 - DNA, 15 bp, Homo sapiens
tatcttggttaatct

SEQ ID NO: 1161624 - DNA, 15 bp, Homo sapiens
ttatcttggttaatc

SEQ ID NO: 1161625 - DNA, 15 bp, Homo sapiens
tttatcttggttaat

SEQ ID NO: 1161626 - DNA, 15 bp, Homo sapiens
ttttatcttggttaa

SEQ ID NO: 1161627 - DNA, 15 bp, Homo sapiens
cttttatcttggtta

SEQ ID NO: 1161628 - DNA, 15 bp, Homo sapiens
acttttatcttggtt

SEQ ID NO: 1161629 - DNA, 15 bp, Homo sapiens
cacttttatcttggt

SEQ ID NO: 1161630 - DNA, 15 bp, Homo sapiens
ccacttttatcttgg

SEQ ID NO: 1161631 - DNA, 15 bp, Homo sapiens
cccacttttatcttg

SEQ ID NO: 1161632 - DNA, 15 bp, Homo sapiens
ccccacttttatctt

SEQ ID NO: 1161633 - DNA, 15 bp, Homo sapiens
gccccacttttatct

SEQ ID NO: 1161634 - DNA, 15 bp, Homo sapiens
tgccccacttttatc

SEQ ID NO: 1161635 - DNA, 15 bp, Homo sapiens
ttgccccacttttat

SEQ ID NO: 1161636 - DNA, 15 bp, Homo sapiens
tttgccccactttta

SEQ ID NO: 1161637 - DNA, 15 bp, Homo sapiens
ttttgccccactttt

SEQ ID NO: 1161638 - DNA, 15 bp, Homo sapiens
tttttgccccacttt

SEQ ID NO: 1161639 - DNA, 15 bp, Homo sapiens
ctttttgccccactt

SEQ ID NO: 1161640 - DNA, 15 bp, Homo sapiens
actttttgccccact

SEQ ID NO: 1161641 - DNA, 15 bp, Homo sapiens
tactttttgccccac

SEQ ID NO: 1161642 - DNA, 15 bp, Homo sapiens
gtactttttgcccca

SEQ ID NO: 1161643 - DNA, 15 bp, Homo sapiens
tgtactttttgcccc

SEQ ID NO: 1161644 - DNA, 15 bp, Homo sapiens
atgtactttttgccc

SEQ ID NO: 1161645 - DNA, 15 bp, Homo sapiens
aatgtactttttgcc

SEQ ID NO: 1161646 - DNA, 15 bp, Homo sapiens
taatgtactttttgc

SEQ ID NO: 1161647 - DNA, 15 bp, Homo sapiens
gtaatgtactttttg

SEQ ID NO: 1161648 - DNA, 15 bp, Homo sapiens
agtaatgtacttttt

SEQ ID NO: 1161649 - DNA, 15 bp, Homo sapiens
cagtaatgtactttt

SEQ ID NO: 1161650 - DNA, 15 bp, Homo sapiens
gcagtaatgtacttt

SEQ ID NO: 1161651 - DNA, 15 bp, Homo sapiens
tgcagtaatgtactt

SEQ ID NO: 1161652 - DNA, 15 bp, Homo sapiens
ctgcagtaatgtact

SEQ ID NO: 1161653 - DNA, 15 bp, Homo sapiens
actgcagtaatgtac

SEQ ID NO: 1161654 - DNA, 15 bp, Homo sapiens
cactgcagtaatgta

SEQ ID NO: 1161655 - DNA, 15 bp, Homo sapiens
tcactgcagtaatgt

SEQ ID NO: 1161656 - DNA, 15 bp, Homo sapiens
gtcactgcagtaatg

SEQ ID NO: 1161657 - DNA, 15 bp, Homo sapiens
ggtcactgcagtaat

SEQ ID NO: 1161658 - DNA, 15 bp, Homo sapiens
gggtcactgcagtaa

SEQ ID NO: 1161659 - DNA, 15 bp, Homo sapiens
tgggtcactgcagta

SEQ ID NO: 1161660 - DNA, 15 bp, Homo sapiens
ttgggtcactgcagt

SEQ ID NO: 1161661 - DNA, 15 bp, Homo sapiens
tttgggtcactgcag

SEQ ID NO: 1161662 - DNA, 15 bp, Homo sapiens
ctttgggtcactgca

SEQ ID NO: 1161663 - DNA, 15 bp, Homo sapiens
actttgggtcactgc

SEQ ID NO: 1161664 - DNA, 15 bp, Homo sapiens
tactttgggtcactg

SEQ ID NO: 1161665 - DNA, 15 bp, Homo sapiens
ctactttgggtcact

SEQ ID NO: 1161666 - DNA, 15 bp, Homo sapiens
actactttgggtcac

SEQ ID NO: 1161667 - DNA, 15 bp, Homo sapiens
cactactttgggtca

SEQ ID NO: 1161668 - DNA, 15 bp, Homo sapiens
acactactttgggtc

SEQ ID NO: 1161669 - DNA, 15 bp, Homo sapiens
aacactactttgggt

SEQ ID NO: 1161670 - DNA, 15 bp, Homo sapiens
aaacactactttggg

SEQ ID NO: 1161671 - DNA, 15 bp, Homo sapiens
caaacactactttgg

SEQ ID NO: 1161672 - DNA, 15 bp, Homo sapiens
tcaaacactactttg

SEQ ID NO: 1161673 - DNA, 15 bp, Homo sapiens
gtcaaacactacttt

SEQ ID NO: 1161674 - DNA, 15 bp, Homo sapiens
ggtcaaacactactt

SEQ ID NO: 1161675 - DNA, 15 bp, Homo sapiens
aggtcaaacactact

SEQ ID NO: 1161676 - DNA, 15 bp, Homo sapiens
taggtcaaacactac

SEQ ID NO: 1161677 - DNA, 15 bp, Homo sapiens
ataggtcaaacacta

SEQ ID NO: 1161678 - DNA, 15 bp, Homo sapiens
aataggtcaaacact

SEQ ID NO: 1161679 - DNA, 15 bp, Homo sapiens
gaataggtcaaacac

SEQ ID NO: 1161680 - DNA, 15 bp, Homo sapiens
ggaataggtcaaaca

SEQ ID NO: 1161681 - DNA, 15 bp, Homo sapiens
aggaataggtcaaac

SEQ ID NO: 1161682 - DNA, 15 bp, Homo sapiens
caggaataggtcaaa

SEQ ID NO: 1161683 - DNA, 15 bp, Homo sapiens
acaggaataggtcaa

SEQ ID NO: 1161684 - DNA, 15 bp, Homo sapiens
tacaggaataggtca

SEQ ID NO: 1161685 - DNA, 15 bp, Homo sapiens
atacaggaataggtc

SEQ ID NO: 1161686 - DNA, 15 bp, Homo sapiens
tatacaggaataggt

SEQ ID NO: 1161687 - DNA, 15 bp, Homo sapiens
ttatacaggaatagg

SEQ ID NO: 1161688 - DNA, 15 bp, Homo sapiens
attatacaggaatag

SEQ ID NO: 1161689 - DNA, 15 bp, Homo sapiens
cattatacaggaata

SEQ ID NO: 1161690 - DNA, 15 bp, Homo sapiens
tcattatacaggaat

SEQ ID NO: 1161691 - DNA, 15 bp, Homo sapiens
atcattatacaggaa

SEQ ID NO: 1161692 - DNA, 15 bp, Homo sapiens
tatcattatacagga

SEQ ID NO: 1161693 - DNA, 15 bp, Homo sapiens
gtatcattatacagg

SEQ ID NO: 1161694 - DNA, 15 bp, Homo sapiens
ggtatcattatacag

SEQ ID NO: 1161695 - DNA, 15 bp, Homo sapiens
gggtatcattataca

SEQ ID NO: 1161696 - DNA, 15 bp, Homo sapiens
tgggtatcattatac

SEQ ID NO: 1161697 - DNA, 15 bp, Homo sapiens
ttgggtatcattata

SEQ ID NO: 1161698 - DNA, 15 bp, Homo sapiens
tttgggtatcattat

SEQ ID NO: 1161699 - DNA, 15 bp, Homo sapiens
gtttgggtatcatta

SEQ ID NO: 1161700 - DNA, 15 bp, Homo sapiens
agtttgggtatcatt

SEQ ID NO: 1161701 - DNA, 15 bp, Homo sapiens
aagtttgggtatcat

SEQ ID NO: 1161702 - DNA, 15 bp, Homo sapiens
caagtttgggtatca

SEQ ID NO: 1161703 - DNA, 15 bp, Homo sapiens
gcaagtttgggtatc

SEQ ID NO: 1161704 - DNA, 15 bp, Homo sapiens
ggcaagtttgggtat

SEQ ID NO: 1161705 - DNA, 15 bp, Homo sapiens
aggcaagtttgggta

SEQ ID NO: 1161706 - DNA, 15 bp, Homo sapiens
caggcaagtttgggt

SEQ ID NO: 1161707 - DNA, 15 bp, Homo sapiens
tcaggcaagtttggg

SEQ ID NO: 1161708 - DNA, 15 bp, Homo sapiens
atcaggcaagtttgg

SEQ ID NO: 1161709 - DNA, 15 bp, Homo sapiens
gatcaggcaagtttg

SEQ ID NO: 1161710 - DNA, 15 bp, Homo sapiens
tgatcaggcaagttt

SEQ ID NO: 1161711 - DNA, 15 bp, Homo sapiens
ctgatcaggcaagtt

SEQ ID NO: 1161712 - DNA, 15 bp, Homo sapiens
tctgatcaggcaagt

SEQ ID NO: 1161713 - DNA, 15 bp, Homo sapiens
ttctgatcaggcaag

SEQ ID NO: 1161714 - DNA, 15 bp, Homo sapiens
attctgatcaggcaa

SEQ ID NO: 1161715 - DNA, 15 bp, Homo sapiens
gattctgatcaggca

SEQ ID NO: 1161716 - DNA, 15 bp, Homo sapiens
tgattctgatcaggc

SEQ ID NO: 1161717 - DNA, 15 bp, Homo sapiens
atgattctgatcagg

SEQ ID NO: 1161718 - DNA, 15 bp, Homo sapiens
catgattctgatcag

SEQ ID NO: 1161719 - DNA, 15 bp, Homo sapiens
ccatgattctgatca

SEQ ID NO: 1161720 - DNA, 15 bp, Homo sapiens
cccatgattctgatc

SEQ ID NO: 1161721 - DNA, 15 bp, Homo sapiens
ccccatgattctgat

SEQ ID NO: 1161722 - DNA, 15 bp, Homo sapiens
gccccatgattctga

SEQ ID NO: 1161723 - DNA, 15 bp, Homo sapiens
tgccccatgattctg

SEQ ID NO: 1161724 - DNA, 15 bp, Homo sapiens
atgccccatgattct

SEQ ID NO: 1161725 - DNA, 15 bp, Homo sapiens
gatgccccatgattc

SEQ ID NO: 1161726 - DNA, 15 bp, Homo sapiens
agatgccccatgatt

SEQ ID NO: 1161727 - DNA, 15 bp, Homo sapiens
tagatgccccatgat

SEQ ID NO: 1161728 - DNA, 15 bp, Homo sapiens
atagatgccccatga

SEQ ID NO: 1161729 - DNA, 15 bp, Homo sapiens
aatagatgccccatg

SEQ ID NO: 1161730 - DNA, 15 bp, Homo sapiens
gaatagatgccccat

SEQ ID NO: 1161731 - DNA, 15 bp, Homo sapiens
cgaatagatgcccca

SEQ ID NO: 1161732 - DNA, 15 bp, Homo sapiens
acgaatagatgcccc

SEQ ID NO: 1161733 - DNA, 15 bp, Homo sapiens
tacgaatagatgccc

SEQ ID NO: 1161734 - DNA, 15 bp, Homo sapiens
ttacgaatagatgcc

SEQ ID NO: 1161735 - DNA, 15 bp, Homo sapiens
tttacgaatagatgc

SEQ ID NO: 1161736 - DNA, 15 bp, Homo sapiens
gtttacgaatagatg

SEQ ID NO: 1161737 - DNA, 15 bp, Homo sapiens
tgtttacgaatagat

SEQ ID NO: 1161738 - DNA, 15 bp, Homo sapiens
ttgtttacgaataga

SEQ ID NO: 1161739 - DNA, 15 bp, Homo sapiens
tttgtttacgaatag

SEQ ID NO: 1161740 - DNA, 15 bp, Homo sapiens
ttttgtttacgaata

SEQ ID NO: 1161741 - DNA, 15 bp, Homo sapiens
attttgtttacgaat

SEQ ID NO: 1161742 - DNA, 15 bp, Homo sapiens
tattttgtttacgaa

SEQ ID NO: 1161743 - DNA, 15 bp, Homo sapiens
ttattttgtttacga

SEQ ID NO: 1161744 - DNA, 15 bp, Homo sapiens
attattttgtttacg

SEQ ID NO: 1161745 - DNA, 15 bp, Homo sapiens
aattattttgtttac

SEQ ID NO: 1161746 - DNA, 15 bp, Homo sapiens
caattattttgttta

SEQ ID NO: 1161747 - DNA, 15 bp, Homo sapiens
tcaattattttgttt

SEQ ID NO: 1161748 - DNA, 15 bp, Homo sapiens
atcaattattttgtt

SEQ ID NO: 1161749 - DNA, 15 bp, Homo sapiens
aatcaattattttgt

SEQ ID NO: 1161750 - DNA, 15 bp, Homo sapiens
gaatcaattattttg

SEQ ID NO: 1161751 - DNA, 15 bp, Homo sapiens
tgaatcaattatttt

SEQ ID NO: 1161752 - DNA, 15 bp, Homo sapiens
ctgaatcaattattt

SEQ ID NO: 1161753 - DNA, 15 bp, Homo sapiens
actgaatcaattatt

SEQ ID NO: 1161754 - DNA, 15 bp, Homo sapiens
tactgaatcaattat

SEQ ID NO: 1161755 - DNA, 15 bp, Homo sapiens
ctactgaatcaatta

SEQ ID NO: 1161756 - DNA, 15 bp, Homo sapiens
cctactgaatcaatt

SEQ ID NO: 1161757 - DNA, 15 bp, Homo sapiens
acctactgaatcaat

SEQ ID NO: 1161758 - DNA, 15 bp, Homo sapiens
gacctactgaatcaa

SEQ ID NO: 1161759 - DNA, 15 bp, Homo sapiens
agacctactgaatca

SEQ ID NO: 1161760 - DNA, 15 bp, Homo sapiens
cagacctactgaatc

SEQ ID NO: 1161761 - DNA, 15 bp, Homo sapiens
ccagacctactgaat

SEQ ID NO: 1161762 - DNA, 15 bp, Homo sapiens
cccagacctactgaa

SEQ ID NO: 1161763 - DNA, 15 bp, Homo sapiens
acccagacctactga

SEQ ID NO: 1161764 - DNA, 15 bp, Homo sapiens
aacccagacctactg

SEQ ID NO: 1161765 - DNA, 15 bp, Homo sapiens
caacccagacctact

SEQ ID NO: 1161766 - DNA, 15 bp, Homo sapiens
tcaacccagacctac

SEQ ID NO: 1161767 - DNA, 15 bp, Homo sapiens
ctcaacccagaccta

SEQ ID NO: 1161768 - DNA, 15 bp, Homo sapiens
cctcaacccagacct

SEQ ID NO: 1161769 - DNA, 15 bp, Homo sapiens
gcctcaacccagacc

SEQ ID NO: 1161770 - DNA, 15 bp, Homo sapiens
ggcctcaacccagac

SEQ ID NO: 1161771 - DNA, 15 bp, Homo sapiens
gggcctcaacccaga

SEQ ID NO: 1161772 - DNA, 15 bp, Homo sapiens
tgggcctcaacccag

SEQ ID NO: 1161773 - DNA, 15 bp, Homo sapiens
ctgggcctcaaccca

SEQ ID NO: 1161774 - DNA, 15 bp, Homo sapiens
cctgggcctcaaccc

SEQ ID NO: 1161775 - DNA, 15 bp, Homo sapiens
tcctgggcctcaacc

SEQ ID NO: 1161776 - DNA, 15 bp, Homo sapiens
ttcctgggcctcaac

SEQ ID NO: 1161777 - DNA, 15 bp, Homo sapiens
cagattcctgggcct

SEQ ID NO: 1161778 - DNA, 15 bp, Homo sapiens
acagattcctgggcc

SEQ ID NO: 1161779 - DNA, 15 bp, Homo sapiens
aacagattcctgggc

SEQ ID NO: 1161780 - DNA, 15 bp, Homo sapiens
aaacagattcctggg

SEQ ID NO: 1161781 - DNA, 15 bp, Homo sapiens
aaaacagattcctgg

SEQ ID NO: 1161782 - DNA, 15 bp, Homo sapiens
aaaaacagattcctg

SEQ ID NO: 1161783 - DNA, 15 bp, Homo sapiens
aaaaaacagattcct

SEQ ID NO: 1161784 - DNA, 15 bp, Homo sapiens
taaaaaacagattcc

SEQ ID NO: 1161785 - DNA, 15 bp, Homo sapiens
ttaaaaaacagattc

SEQ ID NO: 1161786 - DNA, 15 bp, Homo sapiens
tttaaaaaacagatt

SEQ ID NO: 1161787 - DNA, 15 bp, Homo sapiens
ttttaaaaaacagat

SEQ ID NO: 1161788 - DNA, 15 bp, Homo sapiens
attttaaaaaacaga

SEQ ID NO: 1161789 - DNA, 15 bp, Homo sapiens
tattttaaaaaacag

SEQ ID NO: 1161790 - DNA, 15 bp, Homo sapiens
gtattttaaaaaaca

SEQ ID NO: 1161791 - DNA, 15 bp, Homo sapiens
tgtattttaaaaaac

SEQ ID NO: 1161792 - DNA, 15 bp, Homo sapiens
gtgtattttaaaaaa

SEQ ID NO: 1161793 - DNA, 15 bp, Homo sapiens
agtgtattttaaaaa

SEQ ID NO: 1161794 - DNA, 15 bp, Homo sapiens
gagtgtattttaaaa

SEQ ID NO: 1161795 - DNA, 15 bp, Homo sapiens
agagtgtattttaaa

SEQ ID NO: 1161796 - DNA, 15 bp, Homo sapiens
tagagtgtattttaa

SEQ ID NO: 1161797 - DNA, 15 bp, Homo sapiens
ctagagtgtatttta

SEQ ID NO: 1161798 - DNA, 15 bp, Homo sapiens
cctagagtgtatttt

SEQ ID NO: 1161799 - DNA, 15 bp, Homo sapiens
acctagagtgtattt

SEQ ID NO: 1161800 - DNA, 15 bp, Homo sapiens
cacctagagtgtatt

SEQ ID NO: 1161801 - DNA, 15 bp, Homo sapiens
tcacctagagtgtat

SEQ ID NO: 1161802 - DNA, 15 bp, Homo sapiens
atcacctagagtgta

SEQ ID NO: 1161803 - DNA, 15 bp, Homo sapiens
aatcacctagagtgt

SEQ ID NO: 1161804 - DNA, 15 bp, Homo sapiens
taatcacctagagtg

SEQ ID NO: 1161805 - DNA, 15 bp, Homo sapiens
ataatcacctagagt

SEQ ID NO: 1161806 - DNA, 15 bp, Homo sapiens
aataatcacctagag

SEQ ID NO: 1161807 - DNA, 15 bp, Homo sapiens
gaataatcacctaga

SEQ ID NO: 1161808 - DNA, 15 bp, Homo sapiens
tgaataatcacctag

SEQ ID NO: 1161809 - DNA, 15 bp, Homo sapiens
gtgaataatcaccta

SEQ ID NO: 1161810 - DNA, 15 bp, Homo sapiens
tgtgaataatcacct

SEQ ID NO: 1161811 - DNA, 15 bp, Homo sapiens
atgtgaataatcacc

SEQ ID NO: 1161812 - DNA, 15 bp, Homo sapiens
gatgtgaataatcac

SEQ ID NO: 1161813 - DNA, 15 bp, Homo sapiens
tgatgtgaataatca

SEQ ID NO: 1161814 - DNA, 15 bp, Homo sapiens
ctgatgtgaataatc

SEQ ID NO: 1161815 - DNA, 15 bp, Homo sapiens
cctgatgtgaataat

SEQ ID NO: 1161816 - DNA, 15 bp, Homo sapiens
gcctgatgtgaataa

SEQ ID NO: 1161817 - DNA, 15 bp, Homo sapiens
tgcctgatgtgaata

SEQ ID NO: 1161818 - DNA, 15 bp, Homo sapiens
ttgcctgatgtgaat

SEQ ID NO: 1161819 - DNA, 15 bp, Homo sapiens
cttgcctgatgtgaa

SEQ ID NO: 1161820 - DNA, 15 bp, Homo sapiens
acttgcctgatgtga

SEQ ID NO: 1161821 - DNA, 15 bp, Homo sapiens
aacttgcctgatgtg

SEQ ID NO: 1161822 - DNA, 15 bp, Homo sapiens
taacttgcctgatgt

SEQ ID NO: 1161823 - DNA, 15 bp, Homo sapiens
ctaacttgcctgatg

SEQ ID NO: 1161824 - DNA, 15 bp, Homo sapiens
cctaacttgcctgat

SEQ ID NO: 1161825 - DNA, 15 bp, Homo sapiens
tcctaacttgcctga

SEQ ID NO: 1161826 - DNA, 15 bp, Homo sapiens
ttcctaacttgcctg

SEQ ID NO: 1161827 - DNA, 15 bp, Homo sapiens
tttcctaacttgcct

SEQ ID NO: 1161828 - DNA, 15 bp, Homo sapiens
ttttcctaacttgcc

SEQ ID NO: 1161829 - DNA, 15 bp, Homo sapiens
cttttcctaacttgc

SEQ ID NO: 1161830 - DNA, 15 bp, Homo sapiens
acttttcctaacttg

SEQ ID NO: 1161831 - DNA, 15 bp, Homo sapiens
cacttttcctaactt

SEQ ID NO: 1161832 - DNA, 15 bp, Homo sapiens
ccacttttcctaact

SEQ ID NO: 1161833 - DNA, 15 bp, Homo sapiens
accacttttcctaac

SEQ ID NO: 1161834 - DNA, 15 bp, Homo sapiens
caccacttttcctaa

SEQ ID NO: 1161835 - DNA, 15 bp, Homo sapiens
tcaccacttttccta

SEQ ID NO: 1161836 - DNA, 15 bp, Homo sapiens
ttcaccacttttcct

SEQ ID NO: 1161837 - DNA, 15 bp, Homo sapiens
cttcaccacttttcc

SEQ ID NO: 1161838 - DNA, 15 bp, Homo sapiens
acttcaccacttttc

SEQ ID NO: 1161839 - DNA, 15 bp, Homo sapiens
cacttcaccactttt

SEQ ID NO: 1161840 - DNA, 15 bp, Homo sapiens
acacttcaccacttt

SEQ ID NO: 1161841 - DNA, 15 bp, Homo sapiens
cacacttcaccactt

SEQ ID NO: 1161842 - DNA, 15 bp, Homo sapiens
tcacacttcaccact

SEQ ID NO: 1161843 - DNA, 15 bp, Homo sapiens
ctcacacttcaccac

SEQ ID NO: 1161844 - DNA, 15 bp, Homo sapiens
actcacacttcacca

SEQ ID NO: 1161845 - DNA, 15 bp, Homo sapiens
cactcacacttcacc

SEQ ID NO: 1161846 - DNA, 15 bp, Homo sapiens
tcactcacacttcac

SEQ ID NO: 1161847 - DNA, 15 bp, Homo sapiens
ctcactcacacttca

SEQ ID NO: 1161848 - DNA, 15 bp, Homo sapiens
tctcactcacacttc

SEQ ID NO: 1161849 - DNA, 15 bp, Homo sapiens
ctctcactcacactt

SEQ ID NO: 1161850 - DNA, 15 bp, Homo sapiens
cctctcactcacact

SEQ ID NO: 1161851 - DNA, 15 bp, Homo sapiens
tcctctcactcacac

SEQ ID NO: 1161852 - DNA, 15 bp, Homo sapiens
ctcctctcactcaca

SEQ ID NO: 1161853 - DNA, 15 bp, Homo sapiens
cctcctctcactcac

SEQ ID NO: 1161854 - DNA, 15 bp, Homo sapiens
acctcctctcactca

SEQ ID NO: 1161855 - DNA, 15 bp, Homo sapiens
aacctcctctcactc

SEQ ID NO: 1161856 - DNA, 15 bp, Homo sapiens
aaacctcctctcact

SEQ ID NO: 1161857 - DNA, 15 bp, Homo sapiens
gaaacctcctctcac

SEQ ID NO: 1161858 - DNA, 15 bp, Homo sapiens
agaaacctcctctca

SEQ ID NO: 1161859 - DNA, 15 bp, Homo sapiens
cagaaacctcctctc

SEQ ID NO: 1161860 - DNA, 15 bp, Homo sapiens
acagaaacctcctct

SEQ ID NO: 1161861 - DNA, 15 bp, Homo sapiens
cacagaaacctcctc

SEQ ID NO: 1161862 - DNA, 15 bp, Homo sapiens
gcacagaaacctcct

SEQ ID NO: 1161863 - DNA, 15 bp, Homo sapiens
tgcacagaaacctcc

SEQ ID NO: 1161864 - DNA, 15 bp, Homo sapiens
ctgcacagaaacctc

SEQ ID NO: 1161865 - DNA, 15 bp, Homo sapiens
cctgcacagaaacct

SEQ ID NO: 1161866 - DNA, 15 bp, Homo sapiens
acctgcacagaaacc

SEQ ID NO: 1161867 - DNA, 15 bp, Homo sapiens
cacctgcacagaaac

SEQ ID NO: 1161868 - DNA, 15 bp, Homo sapiens
tcacctgcacagaaa

SEQ ID NO: 1161869 - DNA, 15 bp, Homo sapiens
atcacctgcacagaa

SEQ ID NO: 1161870 - DNA, 15 bp, Homo sapiens
catcacctgcacaga

SEQ ID NO: 1161871 - DNA, 15 bp, Homo sapiens
gcatcacctgcacag

SEQ ID NO: 1161872 - DNA, 15 bp, Homo sapiens
tgcatcacctgcaca

SEQ ID NO: 1161873 - DNA, 15 bp, Homo sapiens
ctgcatcacctgcac

SEQ ID NO: 1161874 - DNA, 15 bp, Homo sapiens
actgcatcacctgca

SEQ ID NO: 1161875 - DNA, 15 bp, Homo sapiens
gactgcatcacctgc

SEQ ID NO: 1161876 - DNA, 15 bp, Homo sapiens
agactgcatcacctg

SEQ ID NO: 1161877 - DNA, 15 bp, Homo sapiens
gagactgcatcacct

SEQ ID NO: 1161878 - DNA, 15 bp, Homo sapiens
ggagactgcatcacc

SEQ ID NO: 1161879 - DNA, 15 bp, Homo sapiens
tggagactgcatcac

SEQ ID NO: 1161880 - DNA, 15 bp, Homo sapiens
ttggagactgcatca

SEQ ID NO: 1161881 - DNA, 15 bp, Homo sapiens
tttggagactgcatc

SEQ ID NO: 1161882 - DNA, 15 bp, Homo sapiens
ttttggagactgcat

SEQ ID NO: 1161883 - DNA, 15 bp, Homo sapiens
attttggagactgca

SEQ ID NO: 1161884 - DNA, 15 bp, Homo sapiens
tattttggagactgc

SEQ ID NO: 1161885 - DNA, 15 bp, Homo sapiens
gtattttggagactg

SEQ ID NO: 1161886 - DNA, 15 bp, Homo sapiens
cgtattttggagact

SEQ ID NO: 1161887 - DNA, 15 bp, Homo sapiens
gcgtattttggagac

SEQ ID NO: 1161888 - DNA, 15 bp, Homo sapiens
tgcgtattttggaga

SEQ ID NO: 1161889 - DNA, 15 bp, Homo sapiens
ttgcgtattttggag

SEQ ID NO: 1161890 - DNA, 15 bp, Homo sapiens
gttgcgtattttgga

SEQ ID NO: 1161891 - DNA, 15 bp, Homo sapiens
agttgcgtattttgg

SEQ ID NO: 1161892 - DNA, 15 bp, Homo sapiens
gagttgcgtattttg

SEQ ID NO: 1161893 - DNA, 15 bp, Homo sapiens
tgagttgcgtatttt

SEQ ID NO: 1161894 - DNA, 15 bp, Homo sapiens
atgagttgcgtattt

SEQ ID NO: 1161895 - DNA, 15 bp, Homo sapiens
aatgagttgcgtatt

SEQ ID NO: 1161896 - DNA, 15 bp, Homo sapiens
taatgagttgcgtat

SEQ ID NO: 1161897 - DNA, 15 bp, Homo sapiens
gtaatgagttgcgta

SEQ ID NO: 1161898 - DNA, 15 bp, Homo sapiens
tgtaatgagttgcgt

SEQ ID NO: 1161899 - DNA, 15 bp, Homo sapiens
gtgtaatgagttgcg

SEQ ID NO: 1161900 - DNA, 15 bp, Homo sapiens
tgtgtaatgagttgc

SEQ ID NO: 1161901 - DNA, 15 bp, Homo sapiens
atgtgtaatgagttg

SEQ ID NO: 1161902 - DNA, 15 bp, Homo sapiens
aatgtgtaatgagtt

SEQ ID NO: 1161903 - DNA, 15 bp, Homo sapiens
taatgtgtaatgagt

SEQ ID NO: 1161904 - DNA, 15 bp, Homo sapiens
ataatgtgtaatgag

SEQ ID NO: 1161905 - DNA, 15 bp, Homo sapiens
tataatgtgtaatga

SEQ ID NO: 1161906 - DNA, 15 bp, Homo sapiens
ctataatgtgtaatg

SEQ ID NO: 1161907 - DNA, 15 bp, Homo sapiens
cctataatgtgtaat

SEQ ID NO: 1161908 - DNA, 15 bp, Homo sapiens
acctataatgtgtaa

SEQ ID NO: 1161909 - DNA, 15 bp, Homo sapiens
aacctataatgtgta

SEQ ID NO: 1161910 - DNA, 15 bp, Homo sapiens
caacctataatgtgt

SEQ ID NO: 1161911 - DNA, 15 bp, Homo sapiens
tcaacctataatgtg

SEQ ID NO: 1161912 - DNA, 15 bp, Homo sapiens
ctcaacctataatgt

SEQ ID NO: 1161913 - DNA, 15 bp, Homo sapiens
actcaacctataatg

SEQ ID NO: 1161914 - DNA, 15 bp, Homo sapiens
tactcaacctataat

SEQ ID NO: 1161915 - DNA, 15 bp, Homo sapiens
atactcaacctataa

SEQ ID NO: 1161916 - DNA, 15 bp, Homo sapiens
aatactcaacctata

SEQ ID NO: 1161917 - DNA, 15 bp, Homo sapiens
gaatactcaacctat

SEQ ID NO: 1161918 - DNA, 15 bp, Homo sapiens
agaatactcaaccta

SEQ ID NO: 1161919 - DNA, 15 bp, Homo sapiens
aagaatactcaacct

SEQ ID NO: 1161920 - DNA, 15 bp, Homo sapiens
taagaatactcaacc

SEQ ID NO: 1161921 - DNA, 15 bp, Homo sapiens
ataagaatactcaac

SEQ ID NO: 1161922 - DNA, 15 bp, Homo sapiens
gataagaatactcaa

SEQ ID NO: 1161923 - DNA, 15 bp, Homo sapiens
agataagaatactca

SEQ ID NO: 1161924 - DNA, 15 bp, Homo sapiens
tagataagaatactc

SEQ ID NO: 1161925 - DNA, 15 bp, Homo sapiens
ttagataagaatact

SEQ ID NO: 1161926 - DNA, 15 bp, Homo sapiens
tttagataagaatac

SEQ ID NO: 1161927 - DNA, 15 bp, Homo sapiens
ttttagataagaata

SEQ ID NO: 1161928 - DNA, 15 bp, Homo sapiens
attttagataagaat

SEQ ID NO: 1161929 - DNA, 15 bp, Homo sapiens
cattttagataagaa

SEQ ID NO: 1161930 - DNA, 15 bp, Homo sapiens
gcattttagataaga

SEQ ID NO: 1161931 - DNA, 15 bp, Homo sapiens
agcattttagataag

SEQ ID NO: 1161932 - DNA, 15 bp, Homo sapiens
aagcattttagataa

SEQ ID NO: 1161933 - DNA, 15 bp, Homo sapiens
caagcattttagata

SEQ ID NO: 1161934 - DNA, 15 bp, Homo sapiens
ccaagcattttagat

SEQ ID NO: 1161935 - DNA, 15 bp, Homo sapiens
cccaagcattttaga

SEQ ID NO: 1161936 - DNA, 15 bp, Homo sapiens
tcccaagcattttag

SEQ ID NO: 1161937 - DNA, 15 bp, Homo sapiens
atcccaagcatttta

SEQ ID NO: 1161938 - DNA, 15 bp, Homo sapiens
gatcccaagcatttt

SEQ ID NO: 1161939 - DNA, 15 bp, Homo sapiens
tgatcccaagcattt

SEQ ID NO: 1161940 - DNA, 15 bp, Homo sapiens
ctgatcccaagcatt

SEQ ID NO: 1161941 - DNA, 15 bp, Homo sapiens
tctgatcccaagcat

SEQ ID NO: 1161942 - DNA, 15 bp, Homo sapiens
ttctgatcccaagca

SEQ ID NO: 1161943 - DNA, 15 bp, Homo sapiens
cttctgatcccaagc

SEQ ID NO: 1161944 - DNA, 15 bp, Homo sapiens
acttctgatcccaag

SEQ ID NO: 1161945 - DNA, 15 bp, Homo sapiens
cacttctgatcccaa

SEQ ID NO: 1161946 - DNA, 15 bp, Homo sapiens
acacttctgatccca

SEQ ID NO: 1161947 - DNA, 15 bp, Homo sapiens
aacacttctgatccc

SEQ ID NO: 1161948 - DNA, 15 bp, Homo sapiens
aaacacttctgatcc

SEQ ID NO: 1161949 - DNA, 15 bp, Homo sapiens
gaaacacttctgatc

SEQ ID NO: 1161950 - DNA, 15 bp, Homo sapiens
tgaaacacttctgat

SEQ ID NO: 1161951 - DNA, 15 bp, Homo sapiens
atgaaacacttctga

SEQ ID NO: 1161952 - DNA, 15 bp, Homo sapiens
tatgaaacacttctg

SEQ ID NO: 1161953 - DNA, 15 bp, Homo sapiens
atatgaaacacttct

SEQ ID NO: 1161954 - DNA, 15 bp, Homo sapiens
aatatgaaacacttc

SEQ ID NO: 1161955 - DNA, 15 bp, Homo sapiens
aaatatgaaacactt

SEQ ID NO: 1161956 - DNA, 15 bp, Homo sapiens
gaaatatgaaacact

SEQ ID NO: 1161957 - DNA, 15 bp, Homo sapiens
tgaaatatgaaacac

SEQ ID NO: 1161958 - DNA, 15 bp, Homo sapiens
ctgaaatatgaaaca

SEQ ID NO: 1161959 - DNA, 15 bp, Homo sapiens
tctgaaatatgaaac

SEQ ID NO: 1161960 - DNA, 15 bp, Homo sapiens
ttctgaaatatgaaa

SEQ ID NO: 1161961 - DNA, 15 bp, Homo sapiens
attctgaaatatgaa

SEQ ID NO: 1161962 - DNA, 15 bp, Homo sapiens
tattctgaaatatga

SEQ ID NO: 1161963 - DNA, 15 bp, Homo sapiens
atattctgaaatatg

SEQ ID NO: 1161964 - DNA, 15 bp, Homo sapiens
aatattctgaaatat

SEQ ID NO: 1161965 - DNA, 15 bp, Homo sapiens
aaatattctgaaata

SEQ ID NO: 1161966 - DNA, 15 bp, Homo sapiens
caaatattctgaaat

SEQ ID NO: 1161967 - DNA, 15 bp, Homo sapiens
gcaaatattctgaaa

SEQ ID NO: 1161968 - DNA, 15 bp, Homo sapiens
tgcaaatattctgaa

SEQ ID NO: 1161969 - DNA, 15 bp, Homo sapiens
atgcaaatattctga

SEQ ID NO: 1161970 - DNA, 15 bp, Homo sapiens
aatgcaaatattctg

SEQ ID NO: 1161971 - DNA, 15 bp, Homo sapiens
taatgcaaatattct

SEQ ID NO: 1161972 - DNA, 15 bp, Homo sapiens
ataatgcaaatattc

SEQ ID NO: 1161973 - DNA, 15 bp, Homo sapiens
tataatgcaaatatt

SEQ ID NO: 1161974 - DNA, 15 bp, Homo sapiens
gtataatgcaaatat

SEQ ID NO: 1161975 - DNA, 15 bp, Homo sapiens
agtataatgcaaata

SEQ ID NO: 1161976 - DNA, 15 bp, Homo sapiens
gagtataatgcaaat

SEQ ID NO: 1161977 - DNA, 15 bp, Homo sapiens
tgagtataatgcaaa

SEQ ID NO: 1161978 - DNA, 15 bp, Homo sapiens
gtgagtataatgcaa

SEQ ID NO: 1161979 - DNA, 15 bp, Homo sapiens
agtgagtataatgca

SEQ ID NO: 1161980 - DNA, 15 bp, Homo sapiens
cagtgagtataatgc

SEQ ID NO: 1161981 - DNA, 15 bp, Homo sapiens
ccagtgagtataatg

SEQ ID NO: 1161982 - DNA, 15 bp, Homo sapiens
gccagtgagtataat

SEQ ID NO: 1161983 - DNA, 15 bp, Homo sapiens
agccagtgagtataa

SEQ ID NO: 1161984 - DNA, 15 bp, Homo sapiens
cagccagtgagtata

SEQ ID NO: 1161985 - DNA, 15 bp, Homo sapiens
tcagccagtgagtat

SEQ ID NO: 1161986 - DNA, 15 bp, Homo sapiens
ctcagccagtgagta

SEQ ID NO: 1161987 - DNA, 15 bp, Homo sapiens
gctcagccagtgagt

SEQ ID NO: 1161988 - DNA, 15 bp, Homo sapiens
tgctcagccagtgag

SEQ ID NO: 1161989 - DNA, 15 bp, Homo sapiens
atgctcagccagtga

SEQ ID NO: 1161990 - DNA, 15 bp, Homo sapiens
gatgctcagccagtg

SEQ ID NO: 1161991 - DNA, 15 bp, Homo sapiens
ggatgctcagccagt

SEQ ID NO: 1161992 - DNA, 15 bp, Homo sapiens
gggatgctcagccag

SEQ ID NO: 1161993 - DNA, 15 bp, Homo sapiens
tgggatgctcagcca

SEQ ID NO: 1161994 - DNA, 15 bp, Homo sapiens
ttgggatgctcagcc

SEQ ID NO: 1161995 - DNA, 15 bp, Homo sapiens
cttgggatgctcagc

SEQ ID NO: 1161996 - DNA, 15 bp, Homo sapiens
acttgggatgctcag

SEQ ID NO: 1161997 - DNA, 15 bp, Homo sapiens
gacttgggatgctca

SEQ ID NO: 1161998 - DNA, 15 bp, Homo sapiens
ggacttgggatgctc

SEQ ID NO: 1161999 - DNA, 15 bp, Homo sapiens
tggacttgggatgct

SEQ ID NO: 1162000 - DNA, 15 bp, Homo sapiens
ctggacttgggatgc

SEQ ID NO: 1162001 - DNA, 15 bp, Homo sapiens
tctggacttgggatg

SEQ ID NO: 1162002 - DNA, 15 bp, Homo sapiens
ttctggacttgggat

SEQ ID NO: 1162003 - DNA, 15 bp, Homo sapiens
tttctggacttggga

SEQ ID NO: 1162004 - DNA, 15 bp, Homo sapiens
atttctggacttggg

SEQ ID NO: 1162005 - DNA, 15 bp, Homo sapiens
gatttctggacttgg

SEQ ID NO: 1162006 - DNA, 15 bp, Homo sapiens
ggatttctggacttg

SEQ ID NO: 1162007 - DNA, 15 bp, Homo sapiens
aggatttctggactt

SEQ ID NO: 1162008 - DNA, 15 bp, Homo sapiens
taggatttctggact

SEQ ID NO: 1162009 - DNA, 15 bp, Homo sapiens
ttaggatttctggac

SEQ ID NO: 1162010 - DNA, 15 bp, Homo sapiens
tttaggatttctgga

SEQ ID NO: 1162011 - DNA, 15 bp, Homo sapiens
atttaggatttctgg

SEQ ID NO: 1162012 - DNA, 15 bp, Homo sapiens
catttaggatttctg

SEQ ID NO: 1162013 - DNA, 15 bp, Homo sapiens
acatttaggatttct

SEQ ID NO: 1162014 - DNA, 15 bp, Homo sapiens
aacatttaggatttc

SEQ ID NO: 1162015 - DNA, 15 bp, Homo sapiens
gaacatttaggattt

SEQ ID NO: 1162016 - DNA, 15 bp, Homo sapiens
ggaacatttaggatt

SEQ ID NO: 1162017 - DNA, 15 bp, Homo sapiens
tggaacatttaggat

SEQ ID NO: 1162018 - DNA, 15 bp, Homo sapiens
ttggaacatttagga

SEQ ID NO: 1162019 - DNA, 15 bp, Homo sapiens
attggaacatttagg

SEQ ID NO: 1162020 - DNA, 15 bp, Homo sapiens
cattggaacatttag

SEQ ID NO: 1162021 - DNA, 15 bp, Homo sapiens
tcattggaacattta

SEQ ID NO: 1162022 - DNA, 15 bp, Homo sapiens
ctcattggaacattt

SEQ ID NO: 1162023 - DNA, 15 bp, Homo sapiens
gctcattggaacatt

SEQ ID NO: 1162024 - DNA, 15 bp, Homo sapiens
tgctcattggaacat

SEQ ID NO: 1162025 - DNA, 15 bp, Homo sapiens
atgctcattggaaca

SEQ ID NO: 1162026 - DNA, 15 bp, Homo sapiens
aatgctcattggaac

SEQ ID NO: 1162027 - DNA, 15 bp, Homo sapiens
aaatgctcattggaa

SEQ ID NO: 1162028 - DNA, 15 bp, Homo sapiens
gaaatgctcattgga

SEQ ID NO: 1162029 - DNA, 15 bp, Homo sapiens
ggaaatgctcattgg

SEQ ID NO: 1162030 - DNA, 15 bp, Homo sapiens
aggaaatgctcattg

SEQ ID NO: 1162031 - DNA, 15 bp, Homo sapiens
aaggaaatgctcatt

SEQ ID NO: 1162032 - DNA, 15 bp, Homo sapiens
taaggaaatgctcat

SEQ ID NO: 1162033 - DNA, 15 bp, Homo sapiens
ataaggaaatgctca

SEQ ID NO: 1162034 - DNA, 15 bp, Homo sapiens
cataaggaaatgctc

SEQ ID NO: 1162035 - DNA, 15 bp, Homo sapiens
acataaggaaatgct

SEQ ID NO: 1162036 - DNA, 15 bp, Homo sapiens
gacataaggaaatgc

SEQ ID NO: 1162037 - DNA, 15 bp, Homo sapiens
tgacataaggaaatg

SEQ ID NO: 1162038 - DNA, 15 bp, Homo sapiens
ctgacataaggaaat

SEQ ID NO: 1162039 - DNA, 15 bp, Homo sapiens
gctgacataaggaaa

SEQ ID NO: 1162040 - DNA, 15 bp, Homo sapiens
tgctgacataaggaa

SEQ ID NO: 1162041 - DNA, 15 bp, Homo sapiens
gtgctgacataagga

SEQ ID NO: 1162042 - DNA, 15 bp, Homo sapiens
agtgctgacataagg

SEQ ID NO: 1162043 - DNA, 15 bp, Homo sapiens
gagtgctgacataag

SEQ ID NO: 1162044 - DNA, 15 bp, Homo sapiens
tgagtgctgacataa

SEQ ID NO: 1162045 - DNA, 15 bp, Homo sapiens
ttgagtgctgacata

SEQ ID NO: 1162046 - DNA, 15 bp, Homo sapiens
tttgagtgctgacat

SEQ ID NO: 1162047 - DNA, 15 bp, Homo sapiens
ttttgagtgctgaca

SEQ ID NO: 1162048 - DNA, 15 bp, Homo sapiens
attttgagtgctgac

SEQ ID NO: 1162049 - DNA, 15 bp, Homo sapiens
cattttgagtgctga

SEQ ID NO: 1162050 - DNA, 15 bp, Homo sapiens
acattttgagtgctg

SEQ ID NO: 1162051 - DNA, 15 bp, Homo sapiens
aacattttgagtgct

SEQ ID NO: 1162052 - DNA, 15 bp, Homo sapiens
aaacattttgagtgc

SEQ ID NO: 1162053 - DNA, 15 bp, Homo sapiens
aaaacattttgagtg

SEQ ID NO: 1162054 - DNA, 15 bp, Homo sapiens
caaaacattttgagt

SEQ ID NO: 1162055 - DNA, 15 bp, Homo sapiens
ccaaaacattttgag

SEQ ID NO: 1162056 - DNA, 15 bp, Homo sapiens
tccaaaacattttga

SEQ ID NO: 1162057 - DNA, 15 bp, Homo sapiens
atccaaaacattttg

SEQ ID NO: 1162058 - DNA, 15 bp, Homo sapiens
aatccaaaacatttt

SEQ ID NO: 1162059 - DNA, 15 bp, Homo sapiens
aaatccaaaacattt

SEQ ID NO: 1162060 - DNA, 15 bp, Homo sapiens
aaaatccaaaacatt

SEQ ID NO: 1162061 - DNA, 15 bp, Homo sapiens
caaaatccaaaacat

SEQ ID NO: 1162062 - DNA, 15 bp, Homo sapiens
ccaaaatccaaaaca

SEQ ID NO: 1162063 - DNA, 15 bp, Homo sapiens
tccaaaatccaaaac

SEQ ID NO: 1162064 - DNA, 15 bp, Homo sapiens
ctccaaaatccaaaa

SEQ ID NO: 1162065 - DNA, 15 bp, Homo sapiens
gctccaaaatccaaa

SEQ ID NO: 1162066 - DNA, 15 bp, Homo sapiens
tgctccaaaatccaa

SEQ ID NO: 1162067 - DNA, 15 bp, Homo sapiens
atgctccaaaatcca

SEQ ID NO: 1162068 - DNA, 15 bp, Homo sapiens
aatgctccaaaatcc

SEQ ID NO: 1162069 - DNA, 15 bp, Homo sapiens
aaatgctccaaaatc

SEQ ID NO: 1162070 - DNA, 15 bp, Homo sapiens
gaaatgctccaaaat

SEQ ID NO: 1162071 - DNA, 15 bp, Homo sapiens
agaaatgctccaaaa

SEQ ID NO: 1162072 - DNA, 15 bp, Homo sapiens
cagaaatgctccaaa

SEQ ID NO: 1162073 - DNA, 15 bp, Homo sapiens
ccagaaatgctccaa

SEQ ID NO: 1162074 - DNA, 15 bp, Homo sapiens
accagaaatgctcca

SEQ ID NO: 1162075 - DNA, 15 bp, Homo sapiens
caccagaaatgctcc

SEQ ID NO: 1162076 - DNA, 15 bp, Homo sapiens
acaccagaaatgctc

SEQ ID NO: 1162077 - DNA, 15 bp, Homo sapiens
aacaccagaaatgct

SEQ ID NO: 1162078 - DNA, 15 bp, Homo sapiens
gaacaccagaaatgc

SEQ ID NO: 1162079 - DNA, 15 bp, Homo sapiens
tgaacaccagaaatg

SEQ ID NO: 1162080 - DNA, 15 bp, Homo sapiens
ttgaacaccagaaat

SEQ ID NO: 1162081 - DNA, 15 bp, Homo sapiens
tttgaacaccagaaa

SEQ ID NO: 1162082 - DNA, 15 bp, Homo sapiens
atttgaacaccagaa

SEQ ID NO: 1162083 - DNA, 15 bp, Homo sapiens
aatttgaacaccaga

SEQ ID NO: 1162084 - DNA, 15 bp, Homo sapiens
aaatttgaacaccag

SEQ ID NO: 1162085 - DNA, 15 bp, Homo sapiens
caaatttgaacacca

SEQ ID NO: 1162086 - DNA, 15 bp, Homo sapiens
ccaaatttgaacacc

SEQ ID NO: 1162087 - DNA, 15 bp, Homo sapiens
tccaaatttgaacac

SEQ ID NO: 1162088 - DNA, 15 bp, Homo sapiens
ttccaaatttgaaca

SEQ ID NO: 1162089 - DNA, 15 bp, Homo sapiens
attccaaatttgaac

SEQ ID NO: 1162090 - DNA, 15 bp, Homo sapiens
cattccaaatttgaa

SEQ ID NO: 1162091 - DNA, 15 bp, Homo sapiens
acattccaaatttga

SEQ ID NO: 1162092 - DNA, 15 bp, Homo sapiens
aacattccaaatttg

SEQ ID NO: 1162093 - DNA, 15 bp, Homo sapiens
gaacattccaaattt

SEQ ID NO: 1162094 - DNA, 15 bp, Homo sapiens
tgaacattccaaatt

SEQ ID NO: 1162095 - DNA, 15 bp, Homo sapiens
ttgaacattccaaat

SEQ ID NO: 1162096 - DNA, 15 bp, Homo sapiens
gttgaacattccaaa

SEQ ID NO: 1162097 - DNA, 15 bp, Homo sapiens
ggttgaacattccaa

SEQ ID NO: 1162098 - DNA, 15 bp, Homo sapiens
aggttgaacattcca

SEQ ID NO: 1162099 - DNA, 15 bp, Homo sapiens
caggttgaacattcc

SEQ ID NO: 1162100 - DNA, 15 bp, Homo sapiens
acaggttgaacattc

SEQ ID NO: 1162101 - DNA, 15 bp, Homo sapiens
tacaggttgaacatt

SEQ ID NO: 1162102 - DNA, 15 bp, Homo sapiens
atacaggttgaacat

SEQ ID NO: 1162103 - DNA, 15 bp, Homo sapiens
aatacaggttgaaca

SEQ ID NO: 1162104 - DNA, 15 bp, Homo sapiens
aaatacaggttgaac

SEQ ID NO: 1162105 - DNA, 15 bp, Homo sapiens
taaatacaggttgaa

SEQ ID NO: 1162106 - DNA, 15 bp, Homo sapiens
ataaatacaggttga

SEQ ID NO: 1162107 - DNA, 15 bp, Homo sapiens
tataaatacaggttg

SEQ ID NO: 1162108 - DNA, 15 bp, Homo sapiens
ttataaatacaggtt

SEQ ID NO: 1162109 - DNA, 15 bp, Homo sapiens
tttataaatacaggt

SEQ ID NO: 1162110 - DNA, 15 bp, Homo sapiens
gtttataaatacagg

SEQ ID NO: 1162111 - DNA, 15 bp, Homo sapiens
ggtttataaatacag

SEQ ID NO: 1162112 - DNA, 15 bp, Homo sapiens
tggtttataaataca

SEQ ID NO: 1162113 - DNA, 15 bp, Homo sapiens
ttggtttataaatac

SEQ ID NO: 1162114 - DNA, 15 bp, Homo sapiens
gttggtttataaata

SEQ ID NO: 1162115 - DNA, 15 bp, Homo sapiens
ggttggtttataaat

SEQ ID NO: 1162116 - DNA, 15 bp, Homo sapiens
tggttggtttataaa

SEQ ID NO: 1162117 - DNA, 15 bp, Homo sapiens
ttggttggtttataa

SEQ ID NO: 1162118 - DNA, 15 bp, Homo sapiens
tttggttggtttata

SEQ ID NO: 1162119 - DNA, 15 bp, Homo sapiens
atttggttggtttat

SEQ ID NO: 1162120 - DNA, 15 bp, Homo sapiens
catttggttggttta

SEQ ID NO: 1162121 - DNA, 15 bp, Homo sapiens
tcatttggttggttt

SEQ ID NO: 1162122 - DNA, 15 bp, Homo sapiens
atcatttggttggtt

SEQ ID NO: 1162123 - DNA, 15 bp, Homo sapiens
aatcatttggttggt

SEQ ID NO: 1162124 - DNA, 15 bp, Homo sapiens
gaatcatttggttgg

SEQ ID NO: 1162125 - DNA, 15 bp, Homo sapiens
agaatcatttggttg

SEQ ID NO: 1162126 - DNA, 15 bp, Homo sapiens
tagaatcatttggtt

SEQ ID NO: 1162127 - DNA, 15 bp, Homo sapiens
ttagaatcatttggt

SEQ ID NO: 1162128 - DNA, 15 bp, Homo sapiens
tttagaatcatttgg

SEQ ID NO: 1162129 - DNA, 15 bp, Homo sapiens
atttagaatcatttg

SEQ ID NO: 1162130 - DNA, 15 bp, Homo sapiens
catttagaatcattt

SEQ ID NO: 1162131 - DNA, 15 bp, Homo sapiens
acatttagaatcatt

SEQ ID NO: 1162132 - DNA, 15 bp, Homo sapiens
gacatttagaatcat

SEQ ID NO: 1162133 - DNA, 15 bp, Homo sapiens
ggacatttagaatca

SEQ ID NO: 1162134 - DNA, 15 bp, Homo sapiens
aggacatttagaatc

SEQ ID NO: 1162135 - DNA, 15 bp, Homo sapiens
gaggacatttagaat

SEQ ID NO: 1162136 - DNA, 15 bp, Homo sapiens
cgaggacatttagaa

SEQ ID NO: 1162137 - DNA, 15 bp, Homo sapiens
gcgaggacatttaga

SEQ ID NO: 1162138 - DNA, 15 bp, Homo sapiens
agcgaggacatttag

SEQ ID NO: 1162139 - DNA, 15 bp, Homo sapiens
tagcgaggacattta

SEQ ID NO: 1162140 - DNA, 15 bp, Homo sapiens
atagcgaggacattt

SEQ ID NO: 1162141 - DNA, 15 bp, Homo sapiens
gatagcgaggacatt

SEQ ID NO: 1162142 - DNA, 15 bp, Homo sapiens
agatagcgaggacat

SEQ ID NO: 1162143 - DNA, 15 bp, Homo sapiens
tagatagcgaggaca

SEQ ID NO: 1162144 - DNA, 15 bp, Homo sapiens
ctagatagcgaggac

SEQ ID NO: 1162145 - DNA, 15 bp, Homo sapiens
actagatagcgagga

SEQ ID NO: 1162146 - DNA, 15 bp, Homo sapiens
aactagatagcgagg

SEQ ID NO: 1162147 - DNA, 15 bp, Homo sapiens
aaactagatagcgag

SEQ ID NO: 1162148 - DNA, 15 bp, Homo sapiens
taaactagatagcga

SEQ ID NO: 1162149 - DNA, 15 bp, Homo sapiens
ttaaactagatagcg

SEQ ID NO: 1162150 - DNA, 15 bp, Homo sapiens
tttaaactagatagc

SEQ ID NO: 1162151 - DNA, 15 bp, Homo sapiens
ttttaaactagatag

SEQ ID NO: 1162152 - DNA, 15 bp, Homo sapiens
gttttaaactagata

SEQ ID NO: 1162153 - DNA, 15 bp, Homo sapiens
ggttttaaactagat

SEQ ID NO: 1162154 - DNA, 15 bp, Homo sapiens
gggttttaaactaga

SEQ ID NO: 1162155 - DNA, 15 bp, Homo sapiens
agggttttaaactag

SEQ ID NO: 1162156 - DNA, 15 bp, Homo sapiens
cagggttttaaacta

SEQ ID NO: 1162157 - DNA, 15 bp, Homo sapiens
gcagggttttaaact

SEQ ID NO: 1162158 - DNA, 15 bp, Homo sapiens
tgcagggttttaaac

SEQ ID NO: 1162159 - DNA, 15 bp, Homo sapiens
atgcagggttttaaa

SEQ ID NO: 1162160 - DNA, 15 bp, Homo sapiens
aatgcagggttttaa

SEQ ID NO: 1162161 - DNA, 15 bp, Homo sapiens
taatgcagggtttta

SEQ ID NO: 1162162 - DNA, 15 bp, Homo sapiens
ctaatgcagggtttt

SEQ ID NO: 1162163 - DNA, 15 bp, Homo sapiens
tctaatgcagggttt

SEQ ID NO: 1162164 - DNA, 15 bp, Homo sapiens
ttctaatgcagggtt

SEQ ID NO: 1162165 - DNA, 15 bp, Homo sapiens
attctaatgcagggt

SEQ ID NO: 1162166 - DNA, 15 bp, Homo sapiens
cattctaatgcaggg

SEQ ID NO: 1162167 - DNA, 15 bp, Homo sapiens
tcattctaatgcagg

SEQ ID NO: 1162168 - DNA, 15 bp, Homo sapiens
ctcattctaatgcag

SEQ ID NO: 1162169 - DNA, 15 bp, Homo sapiens
cctcattctaatgca

SEQ ID NO: 1162170 - DNA, 15 bp, Homo sapiens
ccctcattctaatgc

SEQ ID NO: 1162171 - DNA, 15 bp, Homo sapiens
cccctcattctaatg

SEQ ID NO: 1162172 - DNA, 15 bp, Homo sapiens
tcccctcattctaat

SEQ ID NO: 1162173 - DNA, 15 bp, Homo sapiens
ttcccctcattctaa

SEQ ID NO: 1162174 - DNA, 15 bp, Homo sapiens
tttcccctcattcta

SEQ ID NO: 1162175 - DNA, 15 bp, Homo sapiens
ttttcccctcattct

SEQ ID NO: 1162176 - DNA, 15 bp, Homo sapiens
cttttcccctcattc

SEQ ID NO: 1162177 - DNA, 15 bp, Homo sapiens
ccttttcccctcatt

SEQ ID NO: 1162178 - DNA, 15 bp, Homo sapiens
accttttcccctcat

SEQ ID NO: 1162179 - DNA, 15 bp, Homo sapiens
aaccttttcccctca

SEQ ID NO: 1162180 - DNA, 15 bp, Homo sapiens
gaaccttttcccctc

SEQ ID NO: 1162181 - DNA, 15 bp, Homo sapiens
agaaccttttcccct

SEQ ID NO: 1162182 - DNA, 15 bp, Homo sapiens
aagaaccttttcccc

SEQ ID NO: 1162183 - DNA, 15 bp, Homo sapiens
taagaaccttttccc

SEQ ID NO: 1162184 - DNA, 15 bp, Homo sapiens
ctaagaaccttttcc

SEQ ID NO: 1162185 - DNA, 15 bp, Homo sapiens
actaagaaccttttc

SEQ ID NO: 1162186 - DNA, 15 bp, Homo sapiens
aactaagaacctttt

SEQ ID NO: 1162187 - DNA, 15 bp, Homo sapiens
gaactaagaaccttt

SEQ ID NO: 1162188 - DNA, 15 bp, Homo sapiens
tgaactaagaacctt

SEQ ID NO: 1162189 - DNA, 15 bp, Homo sapiens
ctgaactaagaacct

SEQ ID NO: 1162190 - DNA, 15 bp, Homo sapiens
tctgaactaagaacc

SEQ ID NO: 1162191 - DNA, 15 bp, Homo sapiens
atctgaactaagaac

SEQ ID NO: 1162192 - DNA, 15 bp, Homo sapiens
gatctgaactaagaa

SEQ ID NO: 1162193 - DNA, 15 bp, Homo sapiens
agatctgaactaaga

SEQ ID NO: 1162194 - DNA, 15 bp, Homo sapiens
gagatctgaactaag

SEQ ID NO: 1162195 - DNA, 15 bp, Homo sapiens
tgagatctgaactaa

SEQ ID NO: 1162196 - DNA, 15 bp, Homo sapiens
atgagatctgaacta

SEQ ID NO: 1162197 - DNA, 15 bp, Homo sapiens
gatgagatctgaact

SEQ ID NO: 1162198 - DNA, 15 bp, Homo sapiens
agatgagatctgaac

SEQ ID NO: 1162199 - DNA, 15 bp, Homo sapiens
aagatgagatctgaa

SEQ ID NO: 1162200 - DNA, 15 bp, Homo sapiens
gaagatgagatctga

SEQ ID NO: 1162201 - DNA, 15 bp, Homo sapiens
ggaagatgagatctg

SEQ ID NO: 1162202 - DNA, 15 bp, Homo sapiens
aggaagatgagatct

SEQ ID NO: 1162203 - DNA, 15 bp, Homo sapiens
aaggaagatgagatc

SEQ ID NO: 1162204 - DNA, 15 bp, Homo sapiens
aaaggaagatgagat

SEQ ID NO: 1162205 - DNA, 15 bp, Homo sapiens
aaaaggaagatgaga

SEQ ID NO: 1162206 - DNA, 15 bp, Homo sapiens
gaaaaggaagatgag

SEQ ID NO: 1162207 - DNA, 15 bp, Homo sapiens
agaaaaggaagatga

SEQ ID NO: 1162208 - DNA, 15 bp, Homo sapiens
tagaaaaggaagatg

SEQ ID NO: 1162209 - DNA, 15 bp, Homo sapiens
atagaaaaggaagat

SEQ ID NO: 1162210 - DNA, 15 bp, Homo sapiens
tatagaaaaggaaga

SEQ ID NO: 1162211 - DNA, 15 bp, Homo sapiens
gtatagaaaaggaag

SEQ ID NO: 1162212 - DNA, 15 bp, Homo sapiens
ggtatagaaaaggaa

SEQ ID NO: 1162213 - DNA, 15 bp, Homo sapiens
tggtatagaaaagga

SEQ ID NO: 1162214 - DNA, 15 bp, Homo sapiens
ttggtatagaaaagg

SEQ ID NO: 1162215 - DNA, 15 bp, Homo sapiens
gttggtatagaaaag

SEQ ID NO: 1162216 - DNA, 15 bp, Homo sapiens
agttggtatagaaaa

SEQ ID NO: 1162217 - DNA, 15 bp, Homo sapiens
cagttggtatagaaa

SEQ ID NO: 1162218 - DNA, 15 bp, Homo sapiens
acagttggtatagaa

SEQ ID NO: 1162219 - DNA, 15 bp, Homo sapiens
cacagttggtataga

SEQ ID NO: 1162220 - DNA, 15 bp, Homo sapiens
tcacagttggtatag

SEQ ID NO: 1162221 - DNA, 15 bp, Homo sapiens
ttcacagttggtata

SEQ ID NO: 1162222 - DNA, 15 bp, Homo sapiens
cttcacagttggtat

SEQ ID NO: 1162223 - DNA, 15 bp, Homo sapiens
tcttcacagttggta

SEQ ID NO: 1162224 - DNA, 15 bp, Homo sapiens
ttcttcacagttggt

SEQ ID NO: 1162225 - DNA, 15 bp, Homo sapiens
tttcttcacagttgg

SEQ ID NO: 1162226 - DNA, 15 bp, Homo sapiens
atttcttcacagttg

SEQ ID NO: 1162227 - DNA, 15 bp, Homo sapiens
catttcttcacagtt

SEQ ID NO: 1162228 - DNA, 15 bp, Homo sapiens
acatttcttcacagt

SEQ ID NO: 1162229 - DNA, 15 bp, Homo sapiens
tacatttcttcacag

SEQ ID NO: 1162230 - DNA, 15 bp, Homo sapiens
atacatttcttcaca

SEQ ID NO: 1162231 - DNA, 15 bp, Homo sapiens
gatacatttcttcac

SEQ ID NO: 1162232 - DNA, 15 bp, Homo sapiens
tgatacatttcttca

SEQ ID NO: 1162233 - DNA, 15 bp, Homo sapiens
ttgatacatttcttc

SEQ ID NO: 1162234 - DNA, 15 bp, Homo sapiens
tttgatacatttctt

SEQ ID NO: 1162235 - DNA, 15 bp, Homo sapiens
atttgatacatttct

SEQ ID NO: 1162236 - DNA, 15 bp, Homo sapiens
catttgatacatttc

SEQ ID NO: 1162237 - DNA, 15 bp, Homo sapiens
gcatttgatacattt

SEQ ID NO: 1162238 - DNA, 15 bp, Homo sapiens
agcatttgatacatt

SEQ ID NO: 1162239 - DNA, 15 bp, Homo sapiens
tagcatttgatacat

SEQ ID NO: 1162240 - DNA, 15 bp, Homo sapiens
gtagcatttgataca

SEQ ID NO: 1162241 - DNA, 15 bp, Homo sapiens
agtagcatttgatac

SEQ ID NO: 1162242 - DNA, 15 bp, Homo sapiens
cagtagcatttgata

SEQ ID NO: 1162243 - DNA, 15 bp, Homo sapiens
tcagtagcatttgat

SEQ ID NO: 1162244 - DNA, 15 bp, Homo sapiens
ttcagtagcatttga

SEQ ID NO: 1162245 - DNA, 15 bp, Homo sapiens
cttcagtagcatttg

SEQ ID NO: 1162246 - DNA, 15 bp, Homo sapiens
gcttcagtagcattt

SEQ ID NO: 1162247 - DNA, 15 bp, Homo sapiens
ggcttcagtagcatt

SEQ ID NO: 1162248 - DNA, 15 bp, Homo sapiens
tggcttcagtagcat

SEQ ID NO: 1162249 - DNA, 15 bp, Homo sapiens
ttggcttcagtagca

SEQ ID NO: 1162250 - DNA, 15 bp, Homo sapiens
gttggcttcagtagc

SEQ ID NO: 1162251 - DNA, 15 bp, Homo sapiens
agttggcttcagtag

SEQ ID NO: 1162252 - DNA, 15 bp, Homo sapiens
gagttggcttcagta

SEQ ID NO: 1162253 - DNA, 15 bp, Homo sapiens
agagttggcttcagt

SEQ ID NO: 1162254 - DNA, 15 bp, Homo sapiens
cagagttggcttcag

SEQ ID NO: 1162255 - DNA, 15 bp, Homo sapiens
tcagagttggcttca

SEQ ID NO: 1162256 - DNA, 15 bp, Homo sapiens
ttcagagttggcttc

SEQ ID NO: 1162257 - DNA, 15 bp, Homo sapiens
attcagagttggctt

SEQ ID NO: 1162258 - DNA, 15 bp, Homo sapiens
cattcagagttggct

SEQ ID NO: 1162259 - DNA, 15 bp, Homo sapiens
acattcagagttggc

SEQ ID NO: 1162260 - DNA, 15 bp, Homo sapiens
aacattcagagttgg

SEQ ID NO: 1162261 - DNA, 15 bp, Homo sapiens
aaacattcagagttg

SEQ ID NO: 1162262 - DNA, 15 bp, Homo sapiens
aaaacattcagagtt

SEQ ID NO: 1162263 - DNA, 15 bp, Homo sapiens
gaaaacattcagagt

SEQ ID NO: 1162264 - DNA, 15 bp, Homo sapiens
tgaaaacattcagag

SEQ ID NO: 1162265 - DNA, 15 bp, Homo sapiens
gtgaaaacattcaga

SEQ ID NO: 1162266 - DNA, 15 bp, Homo sapiens
tgtgaaaacattcag

SEQ ID NO: 1162267 - DNA, 15 bp, Homo sapiens
ctgtgaaaacattca

SEQ ID NO: 1162268 - DNA, 15 bp, Homo sapiens
tctgtgaaaacattc

SEQ ID NO: 1162269 - DNA, 15 bp, Homo sapiens
ctctgtgaaaacatt

SEQ ID NO: 1162270 - DNA, 15 bp, Homo sapiens
tctctgtgaaaacat

SEQ ID NO: 1162271 - DNA, 15 bp, Homo sapiens
ttctctgtgaaaaca

SEQ ID NO: 1162272 - DNA, 15 bp, Homo sapiens
tttctctgtgaaaac

SEQ ID NO: 1162273 - DNA, 15 bp, Homo sapiens
atttctctgtgaaaa

SEQ ID NO: 1162274 - DNA, 15 bp, Homo sapiens
tatttctctgtgaaa

SEQ ID NO: 1162275 - DNA, 15 bp, Homo sapiens
ctatttctctgtgaa

SEQ ID NO: 1162276 - DNA, 15 bp, Homo sapiens
actatttctctgtga

SEQ ID NO: 1162277 - DNA, 15 bp, Homo sapiens
tactatttctctgtg

SEQ ID NO: 1162278 - DNA, 15 bp, Homo sapiens
gtactatttctctgt

SEQ ID NO: 1162279 - DNA, 15 bp, Homo sapiens
agtactatttctctg

SEQ ID NO: 1162280 - DNA, 15 bp, Homo sapiens
cagtactatttctct

SEQ ID NO: 1162281 - DNA, 15 bp, Homo sapiens
tcagtactatttctc

SEQ ID NO: 1162282 - DNA, 15 bp, Homo sapiens
atcagtactatttct

SEQ ID NO: 1162283 - DNA, 15 bp, Homo sapiens
catcagtactatttc

SEQ ID NO: 1162284 - DNA, 15 bp, Homo sapiens
gcatcagtactattt

SEQ ID NO: 1162285 - DNA, 15 bp, Homo sapiens
agcatcagtactatt

SEQ ID NO: 1162286 - DNA, 15 bp, Homo sapiens
aagcatcagtactat

SEQ ID NO: 1162287 - DNA, 15 bp, Homo sapiens
aaagcatcagtacta

SEQ ID NO: 1162288 - DNA, 15 bp, Homo sapiens
aaaagcatcagtact

SEQ ID NO: 1162289 - DNA, 15 bp, Homo sapiens
gaaaagcatcagtac

SEQ ID NO: 1162290 - DNA, 15 bp, Homo sapiens
tgaaaagcatcagta

SEQ ID NO: 1162291 - DNA, 15 bp, Homo sapiens
ctgaaaagcatcagt

SEQ ID NO: 1162292 - DNA, 15 bp, Homo sapiens
cctgaaaagcatcag

SEQ ID NO: 1162293 - DNA, 15 bp, Homo sapiens
tcctgaaaagcatca

SEQ ID NO: 1162294 - DNA, 15 bp, Homo sapiens
gtcctgaaaagcatc

SEQ ID NO: 1162295 - DNA, 15 bp, Homo sapiens
tgtcctgaaaagcat

SEQ ID NO: 1162296 - DNA, 15 bp, Homo sapiens
ctgtcctgaaaagca

SEQ ID NO: 1162297 - DNA, 15 bp, Homo sapiens
tctgtcctgaaaagc

SEQ ID NO: 1162298 - DNA, 15 bp, Homo sapiens
ctctgtcctgaaaag

SEQ ID NO: 1162299 - DNA, 15 bp, Homo sapiens
cctctgtcctgaaaa

SEQ ID NO: 1162300 - DNA, 15 bp, Homo sapiens
gcctctgtcctgaaa

SEQ ID NO: 1162301 - DNA, 15 bp, Homo sapiens
agcctctgtcctgaa

SEQ ID NO: 1162302 - DNA, 15 bp, Homo sapiens
cagcctctgtcctga

SEQ ID NO: 1162303 - DNA, 15 bp, Homo sapiens
ccagcctctgtcctg

SEQ ID NO: 1162304 - DNA, 15 bp, Homo sapiens
gccagcctctgtcct

SEQ ID NO: 1162305 - DNA, 15 bp, Homo sapiens
tgccagcctctgtcc

SEQ ID NO: 1162306 - DNA, 15 bp, Homo sapiens
gtgccagcctctgtc

SEQ ID NO: 1162307 - DNA, 15 bp, Homo sapiens
tgtgccagcctctgt

SEQ ID NO: 1162308 - DNA, 15 bp, Homo sapiens
ctgtgccagcctctg

SEQ ID NO: 1162309 - DNA, 15 bp, Homo sapiens
actgtgccagcctct

SEQ ID NO: 1162310 - DNA, 15 bp, Homo sapiens
cactgtgccagcctc

SEQ ID NO: 1162311 - DNA, 15 bp, Homo sapiens
acactgtgccagcct

SEQ ID NO: 1162312 - DNA, 15 bp, Homo sapiens
tacactgtgccagcc

SEQ ID NO: 1162313 - DNA, 15 bp, Homo sapiens
ttacactgtgccagc

SEQ ID NO: 1162314 - DNA, 15 bp, Homo sapiens
tttacactgtgccag

SEQ ID NO: 1162315 - DNA, 15 bp, Homo sapiens
ctttacactgtgcca

SEQ ID NO: 1162316 - DNA, 15 bp, Homo sapiens
cctttacactgtgcc

SEQ ID NO: 1162317 - DNA, 15 bp, Homo sapiens
ccctttacactgtgc

SEQ ID NO: 1162318 - DNA, 15 bp, Homo sapiens
gccctttacactgtg

SEQ ID NO: 1162319 - DNA, 15 bp, Homo sapiens
agccctttacactgt

SEQ ID NO: 1162320 - DNA, 15 bp, Homo sapiens
aagccctttacactg

SEQ ID NO: 1162321 - DNA, 15 bp, Homo sapiens
taagccctttacact

SEQ ID NO: 1162322 - DNA, 15 bp, Homo sapiens
ttaagccctttacac

SEQ ID NO: 1162323 - DNA, 15 bp, Homo sapiens
attaagccctttaca

SEQ ID NO: 1162324 - DNA, 15 bp, Homo sapiens
aattaagccctttac

SEQ ID NO: 1162325 - DNA, 15 bp, Homo sapiens
caattaagcccttta

SEQ ID NO: 1162326 - DNA, 15 bp, Homo sapiens
acaattaagcccttt

SEQ ID NO: 1162327 - DNA, 15 bp, Homo sapiens
aacaattaagccctt

SEQ ID NO: 1162328 - DNA, 15 bp, Homo sapiens
taacaattaagccct

SEQ ID NO: 1162329 - DNA, 15 bp, Homo sapiens
ctaacaattaagccc

SEQ ID NO: 1162330 - DNA, 15 bp, Homo sapiens
gctaacaattaagcc

SEQ ID NO: 1162331 - DNA, 15 bp, Homo sapiens
tgctaacaattaagc

SEQ ID NO: 1162332 - DNA, 15 bp, Homo sapiens
ttgctaacaattaag

SEQ ID NO: 1162333 - DNA, 15 bp, Homo sapiens
attgctaacaattaa

SEQ ID NO: 1162334 - DNA, 15 bp, Homo sapiens
tattgctaacaatta

SEQ ID NO: 1162335 - DNA, 15 bp, Homo sapiens
ttattgctaacaatt

SEQ ID NO: 1162336 - DNA, 15 bp, Homo sapiens
tttattgctaacaat

SEQ ID NO: 1162337 - DNA, 15 bp, Homo sapiens
gtttattgctaacaa

SEQ ID NO: 1162338 - DNA, 15 bp, Homo sapiens
ggtttattgctaaca

SEQ ID NO: 1162339 - DNA, 15 bp, Homo sapiens
tggtttattgctaac

SEQ ID NO: 1162340 - DNA, 15 bp, Homo sapiens
ctggtttattgctaa

SEQ ID NO: 1162341 - DNA, 15 bp, Homo sapiens
actggtttattgcta

SEQ ID NO: 1162342 - DNA, 15 bp, Homo sapiens
gactggtttattgct

SEQ ID NO: 1162343 - DNA, 15 bp, Homo sapiens
agactggtttattgc

SEQ ID NO: 1162344 - DNA, 15 bp, Homo sapiens
aagactggtttattg

SEQ ID NO: 1162345 - DNA, 15 bp, Homo sapiens
taagactggtttatt

SEQ ID NO: 1162346 - DNA, 15 bp, Homo sapiens
ataagactggtttat

SEQ ID NO: 1162347 - DNA, 15 bp, Homo sapiens
gataagactggttta

SEQ ID NO: 1162348 - DNA, 15 bp, Homo sapiens
tgataagactggttt

SEQ ID NO: 1162349 - DNA, 15 bp, Homo sapiens
ttgataagactggtt

SEQ ID NO: 1162350 - DNA, 15 bp, Homo sapiens
tttgataagactggt

SEQ ID NO: 1162351 - DNA, 15 bp, Homo sapiens
atttgataagactgg

SEQ ID NO: 1162352 - DNA, 15 bp, Homo sapiens
aatttgataagactg

SEQ ID NO: 1162353 - DNA, 15 bp, Homo sapiens
gaatttgataagact

SEQ ID NO: 1162354 - DNA, 15 bp, Homo sapiens
tgaatttgataagac

SEQ ID NO: 1162355 - DNA, 15 bp, Homo sapiens
ctgaatttgataaga

SEQ ID NO: 1162356 - DNA, 15 bp, Homo sapiens
tctgaatttgataag

SEQ ID NO: 1162357 - DNA, 15 bp, Homo sapiens
ctctgaatttgataa

SEQ ID NO: 1162358 - DNA, 15 bp, Homo sapiens
gctctgaatttgata

SEQ ID NO: 1162359 - DNA, 15 bp, Homo sapiens
cgctctgaatttgat

SEQ ID NO: 1162360 - DNA, 15 bp, Homo sapiens
acgctctgaatttga

SEQ ID NO: 1162361 - DNA, 15 bp, Homo sapiens
tacgctctgaatttg

SEQ ID NO: 1162362 - DNA, 15 bp, Homo sapiens
gtacgctctgaattt

SEQ ID NO: 1162363 - DNA, 15 bp, Homo sapiens
tgtacgctctgaatt

SEQ ID NO: 1162364 - DNA, 15 bp, Homo sapiens
atgtacgctctgaat

SEQ ID NO: 1162365 - DNA, 15 bp, Homo sapiens
catgtacgctctgaa

SEQ ID NO: 1162366 - DNA, 15 bp, Homo sapiens
acatgtacgctctga

SEQ ID NO: 1162367 - DNA, 15 bp, Homo sapiens
aacatgtacgctctg

SEQ ID NO: 1162368 - DNA, 15 bp, Homo sapiens
aaacatgtacgctct

SEQ ID NO: 1162369 - DNA, 15 bp, Homo sapiens
gaaacatgtacgctc

SEQ ID NO: 1162370 - DNA, 15 bp, Homo sapiens
agaaacatgtacgct

SEQ ID NO: 1162371 - DNA, 15 bp, Homo sapiens
aagaaacatgtacgc

SEQ ID NO: 1162372 - DNA, 15 bp, Homo sapiens
taagaaacatgtacg

SEQ ID NO: 1162373 - DNA, 15 bp, Homo sapiens
ttaagaaacatgtac

SEQ ID NO: 1162374 - DNA, 15 bp, Homo sapiens
tttaagaaacatgta

SEQ ID NO: 1162375 - DNA, 15 bp, Homo sapiens
ttttaagaaacatgt

SEQ ID NO: 1162376 - DNA, 15 bp, Homo sapiens
cttttaagaaacatg

SEQ ID NO: 1162377 - DNA, 15 bp, Homo sapiens
ccttttaagaaacat

SEQ ID NO: 1162378 - DNA, 15 bp, Homo sapiens
cccttttaagaaaca

SEQ ID NO: 1162379 - DNA, 15 bp, Homo sapiens
tcccttttaagaaac

SEQ ID NO: 1162380 - DNA, 15 bp, Homo sapiens
atcccttttaagaaa

SEQ ID NO: 1162381 - DNA, 15 bp, Homo sapiens
acatcccttttaaga

SEQ ID NO: 1162382 - DNA, 15 bp, Homo sapiens
tacatcccttttaag

SEQ ID NO: 1162383 - DNA, 15 bp, Homo sapiens
atacatcccttttaa

SEQ ID NO: 1162384 - DNA, 15 bp, Homo sapiens
tatacatccctttta

SEQ ID NO: 1162385 - DNA, 15 bp, Homo sapiens
ctatacatccctttt

SEQ ID NO: 1162386 - DNA, 15 bp, Homo sapiens
tctatacatcccttt

SEQ ID NO: 1162387 - DNA, 15 bp, Homo sapiens
ttctatacatccctt

SEQ ID NO: 1162388 - DNA, 15 bp, Homo sapiens
attctatacatccct

SEQ ID NO: 1162389 - DNA, 15 bp, Homo sapiens
gattctatacatccc

SEQ ID NO: 1162390 - DNA, 15 bp, Homo sapiens
tgattctatacatcc

SEQ ID NO: 1162391 - DNA, 15 bp, Homo sapiens
ctgattctatacatc

SEQ ID NO: 1162392 - DNA, 15 bp, Homo sapiens
actgattctatacat

SEQ ID NO: 1162393 - DNA, 15 bp, Homo sapiens
tactgattctataca

SEQ ID NO: 1162394 - DNA, 15 bp, Homo sapiens
gtactgattctatac

SEQ ID NO: 1162395 - DNA, 15 bp, Homo sapiens
ggtactgattctata

SEQ ID NO: 1162396 - DNA, 15 bp, Homo sapiens
gggtactgattctat

SEQ ID NO: 1162397 - DNA, 15 bp, Homo sapiens
agggtactgattcta

SEQ ID NO: 1162398 - DNA, 15 bp, Homo sapiens
cagggtactgattct

SEQ ID NO: 1162399 - DNA, 15 bp, Homo sapiens
tcagggtactgattc

SEQ ID NO: 1162400 - DNA, 15 bp, Homo sapiens
ctcagggtactgatt

SEQ ID NO: 1162401 - DNA, 15 bp, Homo sapiens
actcagggtactgat

SEQ ID NO: 1162402 - DNA, 15 bp, Homo sapiens
tactcagggtactga

SEQ ID NO: 1162403 - DNA, 15 bp, Homo sapiens
atactcagggtactg

SEQ ID NO: 1162404 - DNA, 15 bp, Homo sapiens
catactcagggtact

SEQ ID NO: 1162405 - DNA, 15 bp, Homo sapiens
tcatactcagggtac

SEQ ID NO: 1162406 - DNA, 15 bp, Homo sapiens
atcatactcagggta

SEQ ID NO: 1162407 - DNA, 15 bp, Homo sapiens
catcatactcagggt

SEQ ID NO: 1162408 - DNA, 15 bp, Homo sapiens
acatcatactcaggg

SEQ ID NO: 1162409 - DNA, 15 bp, Homo sapiens
tacatcatactcagg

SEQ ID NO: 1162410 - DNA, 15 bp, Homo sapiens
ttacatcatactcag

SEQ ID NO: 1162411 - DNA, 15 bp, Homo sapiens
attacatcatactca

SEQ ID NO: 1162412 - DNA, 15 bp, Homo sapiens
gattacatcatactc

SEQ ID NO: 1162413 - DNA, 15 bp, Homo sapiens
agattacatcatact

SEQ ID NO: 1162414 - DNA, 15 bp, Homo sapiens
aagattacatcatac

SEQ ID NO: 1162415 - DNA, 15 bp, Homo sapiens
aaagattacatcata

SEQ ID NO: 1162416 - DNA, 15 bp, Homo sapiens
taaagattacatcat

SEQ ID NO: 1162417 - DNA, 15 bp, Homo sapiens
gtaaagattacatca

SEQ ID NO: 1162418 - DNA, 15 bp, Homo sapiens
tgtaaagattacatc

SEQ ID NO: 1162419 - DNA, 15 bp, Homo sapiens
atgtaaagattacat

SEQ ID NO: 1162420 - DNA, 15 bp, Homo sapiens
tatgtaaagattaca

SEQ ID NO: 1162421 - DNA, 15 bp, Homo sapiens
atatgtaaagattac

SEQ ID NO: 1162422 - DNA, 15 bp, Homo sapiens
tatatgtaaagatta

SEQ ID NO: 1162423 - DNA, 15 bp, Homo sapiens
atatatgtaaagatt

SEQ ID NO: 1162424 - DNA, 15 bp, Homo sapiens
aatatatgtaaagat

SEQ ID NO: 1162425 - DNA, 15 bp, Homo sapiens
taatatatgtaaaga

SEQ ID NO: 1162426 - DNA, 15 bp, Homo sapiens
ttaatatatgtaaag

SEQ ID NO: 1162427 - DNA, 15 bp, Homo sapiens
tttaatatatgtaaa

SEQ ID NO: 1162428 - DNA, 15 bp, Homo sapiens
ttttaatatatgtaa

SEQ ID NO: 1162429 - DNA, 15 bp, Homo sapiens
attttaatatatgta

SEQ ID NO: 1162430 - DNA, 15 bp, Homo sapiens
cattttaatatatgt

SEQ ID NO: 1162431 - DNA, 15 bp, Homo sapiens
acattttaatatatg

SEQ ID NO: 1162432 - DNA, 15 bp, Homo sapiens
gacattttaatatat

SEQ ID NO: 1162433 - DNA, 15 bp, Homo sapiens
agacattttaatata

SEQ ID NO: 1162434 - DNA, 15 bp, Homo sapiens
cagacattttaatat

SEQ ID NO: 1162435 - DNA, 15 bp, Homo sapiens
ccagacattttaata

SEQ ID NO: 1162436 - DNA, 15 bp, Homo sapiens
gccagacattttaat

SEQ ID NO: 1162437 - DNA, 15 bp, Homo sapiens
tgccagacattttaa

SEQ ID NO: 1162438 - DNA, 15 bp, Homo sapiens
ctgccagacatttta

SEQ ID NO: 1162439 - DNA, 15 bp, Homo sapiens
tctgccagacatttt

SEQ ID NO: 1162440 - DNA, 15 bp, Homo sapiens
atctgccagacattt

SEQ ID NO: 1162441 - DNA, 15 bp, Homo sapiens
aatctgccagacatt

SEQ ID NO: 1162442 - DNA, 15 bp, Homo sapiens
caatctgccagacat

SEQ ID NO: 1162443 - DNA, 15 bp, Homo sapiens
gcaatctgccagaca

SEQ ID NO: 1162444 - DNA, 15 bp, Homo sapiens
agcaatctgccagac

SEQ ID NO: 1162445 - DNA, 15 bp, Homo sapiens
tagcaatctgccaga

SEQ ID NO: 1162446 - DNA, 15 bp, Homo sapiens
atagcaatctgccag

SEQ ID NO: 1162447 - DNA, 15 bp, Homo sapiens
tatagcaatctgcca

SEQ ID NO: 1162448 - DNA, 15 bp, Homo sapiens
ctatagcaatctgcc

SEQ ID NO: 1162449 - DNA, 15 bp, Homo sapiens
actatagcaatctgc

SEQ ID NO: 1162450 - DNA, 15 bp, Homo sapiens
tactatagcaatctg

SEQ ID NO: 1162451 - DNA, 15 bp, Homo sapiens
gtactatagcaatct

SEQ ID NO: 1162452 - DNA, 15 bp, Homo sapiens
ggtactatagcaatc

SEQ ID NO: 1162453 - DNA, 15 bp, Homo sapiens
gggtactatagcaat

SEQ ID NO: 1162454 - DNA, 15 bp, Homo sapiens
tgggtactatagcaa

SEQ ID NO: 1162455 - DNA, 15 bp, Homo sapiens
atgggtactatagca

SEQ ID NO: 1162456 - DNA, 15 bp, Homo sapiens
tatgggtactatagc

SEQ ID NO: 1162457 - DNA, 15 bp, Homo sapiens
ttatgggtactatag

SEQ ID NO: 1162458 - DNA, 15 bp, Homo sapiens
attatgggtactata

SEQ ID NO: 1162459 - DNA, 15 bp, Homo sapiens
gattatgggtactat

SEQ ID NO: 1162460 - DNA, 15 bp, Homo sapiens
tgattatgggtacta

SEQ ID NO: 1162461 - DNA, 15 bp, Homo sapiens
atgattatgggtact

SEQ ID NO: 1162462 - DNA, 15 bp, Homo sapiens
catgattatgggtac

SEQ ID NO: 1162463 - DNA, 15 bp, Homo sapiens
gcatgattatgggta

SEQ ID NO: 1162464 - DNA, 15 bp, Homo sapiens
ggcatgattatgggt

SEQ ID NO: 1162465 - DNA, 15 bp, Homo sapiens
gggcatgattatggg

SEQ ID NO: 1162466 - DNA, 15 bp, Homo sapiens
agggcatgattatgg

SEQ ID NO: 1162467 - DNA, 15 bp, Homo sapiens
gagggcatgattatg

SEQ ID NO: 1162468 - DNA, 15 bp, Homo sapiens
agagggcatgattat

SEQ ID NO: 1162469 - DNA, 15 bp, Homo sapiens
cagagggcatgatta

SEQ ID NO: 1162470 - DNA, 15 bp, Homo sapiens
acagagggcatgatt

SEQ ID NO: 1162471 - DNA, 15 bp, Homo sapiens
cacagagggcatgat

SEQ ID NO: 1162472 - DNA, 15 bp, Homo sapiens
gcacagagggcatga

SEQ ID NO: 1162473 - DNA, 15 bp, Homo sapiens
ggcacagagggcatg

SEQ ID NO: 1162474 - DNA, 15 bp, Homo sapiens
gggcacagagggcat

SEQ ID NO: 1162475 - DNA, 15 bp, Homo sapiens
tgggcacagagggca

SEQ ID NO: 1162476 - DNA, 15 bp, Homo sapiens
gtgggcacagagggc

SEQ ID NO: 1162477 - DNA, 15 bp, Homo sapiens
agtgggcacagaggg

SEQ ID NO: 1162478 - DNA, 15 bp, Homo sapiens
gagtgggcacagagg

SEQ ID NO: 1162479 - DNA, 15 bp, Homo sapiens
agagtgggcacagag

SEQ ID NO: 1162480 - DNA, 15 bp, Homo sapiens
aagagtgggcacaga

SEQ ID NO: 1162481 - DNA, 15 bp, Homo sapiens
aaagagtgggcacag

SEQ ID NO: 1162482 - DNA, 15 bp, Homo sapiens
aaaagagtgggcaca

SEQ ID NO: 1162483 - DNA, 15 bp, Homo sapiens
taaaagagtgggcac

SEQ ID NO: 1162484 - DNA, 15 bp, Homo sapiens
gtaaaagagtgggca

SEQ ID NO: 1162485 - DNA, 15 bp, Homo sapiens
tgtaaaagagtgggc

SEQ ID NO: 1162486 - DNA, 15 bp, Homo sapiens
ttgtaaaagagtggg

SEQ ID NO: 1162487 - DNA, 15 bp, Homo sapiens
tttgtaaaagagtgg

SEQ ID NO: 1162488 - DNA, 15 bp, Homo sapiens
ctttgtaaaagagtg

SEQ ID NO: 1162489 - DNA, 15 bp, Homo sapiens
actttgtaaaagagt

SEQ ID NO: 1162490 - DNA, 15 bp, Homo sapiens
cactttgtaaaagag

SEQ ID NO: 1162491 - DNA, 15 bp, Homo sapiens
tcactttgtaaaaga

SEQ ID NO: 1162492 - DNA, 15 bp, Homo sapiens
gtcactttgtaaaag

SEQ ID NO: 1162493 - DNA, 15 bp, Homo sapiens
agtcactttgtaaaa

SEQ ID NO: 1162494 - DNA, 15 bp, Homo sapiens
aagtcactttgtaaa

SEQ ID NO: 1162495 - DNA, 15 bp, Homo sapiens
aaagtcactttgtaa

SEQ ID NO: 1162496 - DNA, 15 bp, Homo sapiens
gaaagtcactttgta

SEQ ID NO: 1162497 - DNA, 15 bp, Homo sapiens
agaaagtcactttgt

SEQ ID NO: 1162498 - DNA, 15 bp, Homo sapiens
gagaaagtcactttg

SEQ ID NO: 1162499 - DNA, 15 bp, Homo sapiens
agagaaagtcacttt

SEQ ID NO: 1162500 - DNA, 15 bp, Homo sapiens
aagagaaagtcactt

SEQ ID NO: 1162501 - DNA, 15 bp, Homo sapiens
taagagaaagtcact

SEQ ID NO: 1162502 - DNA, 15 bp, Homo sapiens
ataagagaaagtcac

SEQ ID NO: 1162503 - DNA, 15 bp, Homo sapiens
gataagagaaagtca

SEQ ID NO: 1162504 - DNA, 15 bp, Homo sapiens
tgataagagaaagtc

SEQ ID NO: 1162505 - DNA, 15 bp, Homo sapiens
ttgataagagaaagt

SEQ ID NO: 1162506 - DNA, 15 bp, Homo sapiens
cttgataagagaaag

SEQ ID NO: 1162507 - DNA, 15 bp, Homo sapiens
tcttgataagagaaa

SEQ ID NO: 1162508 - DNA, 15 bp, Homo sapiens
atcttgataagagaa

SEQ ID NO: 1162509 - DNA, 15 bp, Homo sapiens
tatcttgataagaga

SEQ ID NO: 1162510 - DNA, 15 bp, Homo sapiens
atatcttgataagag

SEQ ID NO: 1162511 - DNA, 15 bp, Homo sapiens
aatatcttgataaga

SEQ ID NO: 1162512 - DNA, 15 bp, Homo sapiens
taatatcttgataag

SEQ ID NO: 1162513 - DNA, 15 bp, Homo sapiens
gtaatatcttgataa

SEQ ID NO: 1162514 - DNA, 15 bp, Homo sapiens
agtaatatcttgata

SEQ ID NO: 1162515 - DNA, 15 bp, Homo sapiens
aagtaatatcttgat

SEQ ID NO: 1162516 - DNA, 15 bp, Homo sapiens
aaagtaatatcttga

SEQ ID NO: 1162517 - DNA, 15 bp, Homo sapiens
aaaagtaatatcttg

SEQ ID NO: 1162518 - DNA, 15 bp, Homo sapiens
aaaaagtaatatctt

SEQ ID NO: 1162519 - DNA, 15 bp, Homo sapiens
gaaaaagtaatatct

SEQ ID NO: 1162520 - DNA, 15 bp, Homo sapiens
ggaaaaagtaatatc

SEQ ID NO: 1162521 - DNA, 15 bp, Homo sapiens
gggaaaaagtaatat

SEQ ID NO: 1162522 - DNA, 15 bp, Homo sapiens
ggggaaaaagtaata

SEQ ID NO: 1162523 - DNA, 15 bp, Homo sapiens
tggggaaaaagtaat

SEQ ID NO: 1162524 - DNA, 15 bp, Homo sapiens
gtggggaaaaagtaa

SEQ ID NO: 1162525 - DNA, 15 bp, Homo sapiens
agtggggaaaaagta

SEQ ID NO: 1162526 - DNA, 15 bp, Homo sapiens
gagtggggaaaaagt

SEQ ID NO: 1162527 - DNA, 15 bp, Homo sapiens
ggagtggggaaaaag

SEQ ID NO: 1162528 - DNA, 15 bp, Homo sapiens
aggagtggggaaaaa

SEQ ID NO: 1162529 - DNA, 15 bp, Homo sapiens
aaggagtggggaaaa

SEQ ID NO: 1162530 - DNA, 15 bp, Homo sapiens
caaggagtggggaaa

SEQ ID NO: 1162531 - DNA, 15 bp, Homo sapiens
tcaaggagtggggaa

SEQ ID NO: 1162532 - DNA, 15 bp, Homo sapiens
ttcaaggagtgggga

SEQ ID NO: 1162533 - DNA, 15 bp, Homo sapiens
attcaaggagtgggg

SEQ ID NO: 1162534 - DNA, 15 bp, Homo sapiens
gattcaaggagtggg

SEQ ID NO: 1162535 - DNA, 15 bp, Homo sapiens
agattcaaggagtgg

SEQ ID NO: 1162536 - DNA, 15 bp, Homo sapiens
cagattcaaggagtg

SEQ ID NO: 1162537 - DNA, 15 bp, Homo sapiens
ccagattcaaggagt

SEQ ID NO: 1162538 - DNA, 15 bp, Homo sapiens
tccagattcaaggag

SEQ ID NO: 1162539 - DNA, 15 bp, Homo sapiens
gtccagattcaagga

SEQ ID NO: 1162540 - DNA, 15 bp, Homo sapiens
agtccagattcaagg

SEQ ID NO: 1162541 - DNA, 15 bp, Homo sapiens
aagtccagattcaag

SEQ ID NO: 1162542 - DNA, 15 bp, Homo sapiens
gaagtccagattcaa

SEQ ID NO: 1162543 - DNA, 15 bp, Homo sapiens
agaagtccagattca

SEQ ID NO: 1162544 - DNA, 15 bp, Homo sapiens
gagaagtccagattc

SEQ ID NO: 1162545 - DNA, 15 bp, Homo sapiens
agagaagtccagatt

SEQ ID NO: 1162546 - DNA, 15 bp, Homo sapiens
aagagaagtccagat

SEQ ID NO: 1162547 - DNA, 15 bp, Homo sapiens
caagagaagtccaga

SEQ ID NO: 1162548 - DNA, 15 bp, Homo sapiens
acaagagaagtccag

SEQ ID NO: 1162549 - DNA, 15 bp, Homo sapiens
cacaagagaagtcca

SEQ ID NO: 1162550 - DNA, 15 bp, Homo sapiens
tcacaagagaagtcc

SEQ ID NO: 1162551 - DNA, 15 bp, Homo sapiens
gtcacaagagaagtc

SEQ ID NO: 1162552 - DNA, 15 bp, Homo sapiens
agtcacaagagaagt

SEQ ID NO: 1162553 - DNA, 15 bp, Homo sapiens
aagtcacaagagaag

SEQ ID NO: 1162554 - DNA, 15 bp, Homo sapiens
caagtcacaagagaa

SEQ ID NO: 1162555 - DNA, 15 bp, Homo sapiens
ccaagtcacaagaga

SEQ ID NO: 1162556 - DNA, 15 bp, Homo sapiens
accaagtcacaagag

SEQ ID NO: 1162557 - DNA, 15 bp, Homo sapiens
aaccaagtcacaaga

SEQ ID NO: 1162558 - DNA, 15 bp, Homo sapiens
aaaccaagtcacaag

SEQ ID NO: 1162559 - DNA, 15 bp, Homo sapiens
taaaccaagtcacaa

SEQ ID NO: 1162560 - DNA, 15 bp, Homo sapiens
ttaaaccaagtcaca

SEQ ID NO: 1162561 - DNA, 15 bp, Homo sapiens
attaaaccaagtcac

SEQ ID NO: 1162562 - DNA, 15 bp, Homo sapiens
gattaaaccaagtca

SEQ ID NO: 1162563 - DNA, 15 bp, Homo sapiens
tgattaaaccaagtc

SEQ ID NO: 1162564 - DNA, 15 bp, Homo sapiens
ttgattaaaccaagt

SEQ ID NO: 1162565 - DNA, 15 bp, Homo sapiens
gttgattaaaccaag

SEQ ID NO: 1162566 - DNA, 15 bp, Homo sapiens
tgttgattaaaccaa

SEQ ID NO: 1162567 - DNA, 15 bp, Homo sapiens
ttgttgattaaacca

SEQ ID NO: 1162568 - DNA, 15 bp, Homo sapiens
tttgttgattaaacc

SEQ ID NO: 1162569 - DNA, 15 bp, Homo sapiens
ttttgttgattaaac

SEQ ID NO: 1162570 - DNA, 15 bp, Homo sapiens
attttgttgattaaa

SEQ ID NO: 1162571 - DNA, 15 bp, Homo sapiens
cattttgttgattaa

SEQ ID NO: 1162572 - DNA, 15 bp, Homo sapiens
gcattttgttgatta

SEQ ID NO: 1162573 - DNA, 15 bp, Homo sapiens
tgcattttgttgatt

SEQ ID NO: 1162574 - DNA, 15 bp, Homo sapiens
ctgcattttgttgat

SEQ ID NO: 1162575 - DNA, 15 bp, Homo sapiens
gctgcattttgttga

SEQ ID NO: 1162576 - DNA, 15 bp, Homo sapiens
ggctgcattttgttg

SEQ ID NO: 1162577 - DNA, 15 bp, Homo sapiens
tggctgcattttgtt

SEQ ID NO: 1162578 - DNA, 15 bp, Homo sapiens
ctggctgcattttgt

SEQ ID NO: 1162579 - DNA, 15 bp, Homo sapiens
cctggctgcattttg

SEQ ID NO: 1162580 - DNA, 15 bp, Homo sapiens
acctggctgcatttt

SEQ ID NO: 1162581 - DNA, 15 bp, Homo sapiens
cacctggctgcattt

SEQ ID NO: 1162582 - DNA, 15 bp, Homo sapiens
tcacctggctgcatt

SEQ ID NO: 1162583 - DNA, 15 bp, Homo sapiens
atcacctggctgcat

SEQ ID NO: 1162584 - DNA, 15 bp, Homo sapiens
catcacctggctgca

SEQ ID NO: 1162585 - DNA, 15 bp, Homo sapiens
ccatcacctggctgc

SEQ ID NO: 1162586 - DNA, 15 bp, Homo sapiens
gccatcacctggctg

SEQ ID NO: 1162587 - DNA, 15 bp, Homo sapiens
tgccatcacctggct

SEQ ID NO: 1162588 - DNA, 15 bp, Homo sapiens
atgccatcacctggc

SEQ ID NO: 1162589 - DNA, 15 bp, Homo sapiens
catgccatcacctgg

SEQ ID NO: 1162590 - DNA, 15 bp, Homo sapiens
acatgccatcacctg

SEQ ID NO: 1162591 - DNA, 15 bp, Homo sapiens
cacatgccatcacct

SEQ ID NO: 1162592 - DNA, 15 bp, Homo sapiens
tcacatgccatcacc

SEQ ID NO: 1162593 - DNA, 15 bp, Homo sapiens
gtcacatgccatcac

SEQ ID NO: 1162594 - DNA, 15 bp, Homo sapiens
agtcacatgccatca

SEQ ID NO: 1162595 - DNA, 15 bp, Homo sapiens
aagtcacatgccatc

SEQ ID NO: 1162596 - DNA, 15 bp, Homo sapiens
gaagtcacatgccat

SEQ ID NO: 1162597 - DNA, 15 bp, Homo sapiens
tgaagtcacatgcca

SEQ ID NO: 1162598 - DNA, 15 bp, Homo sapiens
ctgaagtcacatgcc

SEQ ID NO: 1162599 - DNA, 15 bp, Homo sapiens
cctgaagtcacatgc

SEQ ID NO: 1162600 - DNA, 15 bp, Homo sapiens
ccctgaagtcacatg

SEQ ID NO: 1162601 - DNA, 15 bp, Homo sapiens
gccctgaagtcacat

SEQ ID NO: 1162602 - DNA, 15 bp, Homo sapiens
ggccctgaagtcaca

SEQ ID NO: 1162603 - DNA, 15 bp, Homo sapiens
aggccctgaagtcac

SEQ ID NO: 1162604 - DNA, 15 bp, Homo sapiens
taggccctgaagtca

SEQ ID NO: 1162605 - DNA, 15 bp, Homo sapiens
ctaggccctgaagtc

SEQ ID NO: 1162606 - DNA, 15 bp, Homo sapiens
cctaggccctgaagt

SEQ ID NO: 1162607 - DNA, 15 bp, Homo sapiens
gcctaggccctgaag

SEQ ID NO: 1162608 - DNA, 15 bp, Homo sapiens
ggcctaggccctgaa

SEQ ID NO: 1162609 - DNA, 15 bp, Homo sapiens
aggcctaggccctga

SEQ ID NO: 1162610 - DNA, 15 bp, Homo sapiens
gaggcctaggccctg

SEQ ID NO: 1162611 - DNA, 15 bp, Homo sapiens
tgaggcctaggccct

SEQ ID NO: 1162612 - DNA, 15 bp, Homo sapiens
ttgaggcctaggccc

SEQ ID NO: 1162613 - DNA, 15 bp, Homo sapiens
cttgaggcctaggcc

SEQ ID NO: 1162614 - DNA, 15 bp, Homo sapiens
ccttgaggcctaggc

SEQ ID NO: 1162615 - DNA, 15 bp, Homo sapiens
cccttgaggcctagg

SEQ ID NO: 1162616 - DNA, 15 bp, Homo sapiens
tcccttgaggcctag

SEQ ID NO: 1162617 - DNA, 15 bp, Homo sapiens
gtcccttgaggccta

SEQ ID NO: 1162618 - DNA, 15 bp, Homo sapiens
ggtcccttgaggcct

SEQ ID NO: 1162619 - DNA, 15 bp, Homo sapiens
aggtcccttgaggcc

SEQ ID NO: 1162620 - DNA, 15 bp, Homo sapiens
aaggtcccttgaggc

SEQ ID NO: 1162621 - DNA, 15 bp, Homo sapiens
gaaggtcccttgagg

SEQ ID NO: 1162622 - DNA, 15 bp, Homo sapiens
tgaaggtcccttgag

SEQ ID NO: 1162623 - DNA, 15 bp, Homo sapiens
gtgaaggtcccttga

SEQ ID NO: 1162624 - DNA, 15 bp, Homo sapiens
ggtgaaggtcccttg

SEQ ID NO: 1162625 - DNA, 15 bp, Homo sapiens
aggtgaaggtccctt

SEQ ID NO: 1162626 - DNA, 15 bp, Homo sapiens
gaggtgaaggtccct

SEQ ID NO: 1162627 - DNA, 15 bp, Homo sapiens
agaggtgaaggtccc

SEQ ID NO: 1162628 - DNA, 15 bp, Homo sapiens
gagaggtgaaggtcc

SEQ ID NO: 1162629 - DNA, 15 bp, Homo sapiens
tgagaggtgaaggtc

SEQ ID NO: 1162630 - DNA, 15 bp, Homo sapiens
ctgagaggtgaaggt

SEQ ID NO: 1162631 - DNA, 15 bp, Homo sapiens
tctgagaggtgaagg

SEQ ID NO: 1162632 - DNA, 15 bp, Homo sapiens
ttctgagaggtgaag

SEQ ID NO: 1162633 - DNA, 15 bp, Homo sapiens
gttctgagaggtgaa

SEQ ID NO: 1162634 - DNA, 15 bp, Homo sapiens
tgttctgagaggtga

SEQ ID NO: 1162635 - DNA, 15 bp, Homo sapiens
gtgttctgagaggtg

SEQ ID NO: 1162636 - DNA, 15 bp, Homo sapiens
agtgttctgagaggt

SEQ ID NO: 1162637 - DNA, 15 bp, Homo sapiens
gagtgttctgagagg

SEQ ID NO: 1162638 - DNA, 15 bp, Homo sapiens
agagtgttctgagag

SEQ ID NO: 1162639 - DNA, 15 bp, Homo sapiens
gagagtgttctgaga

SEQ ID NO: 1162640 - DNA, 15 bp, Homo sapiens
tgagagtgttctgag

SEQ ID NO: 1162641 - DNA, 15 bp, Homo sapiens
gtgagagtgttctga

SEQ ID NO: 1162642 - DNA, 15 bp, Homo sapiens
agtgagagtgttctg

SEQ ID NO: 1162643 - DNA, 15 bp, Homo sapiens
tagtgagagtgttct

SEQ ID NO: 1162644 - DNA, 15 bp, Homo sapiens
gtagtgagagtgttc

SEQ ID NO: 1162645 - DNA, 15 bp, Homo sapiens
ggtagtgagagtgtt

SEQ ID NO: 1162646 - DNA, 15 bp, Homo sapiens
tggtagtgagagtgt

SEQ ID NO: 1162647 - DNA, 15 bp, Homo sapiens
ttggtagtgagagtg

SEQ ID NO: 1162648 - DNA, 15 bp, Homo sapiens
cttggtagtgagagt

SEQ ID NO: 1162649 - DNA, 15 bp, Homo sapiens
acttggtagtgagag

SEQ ID NO: 1162650 - DNA, 15 bp, Homo sapiens
tacttggtagtgaga

SEQ ID NO: 1162651 - DNA, 15 bp, Homo sapiens
ttacttggtagtgag

SEQ ID NO: 1162652 - DNA, 15 bp, Homo sapiens
cttacttggtagtga

SEQ ID NO: 1162653 - DNA, 15 bp, Homo sapiens
ccttacttggtagtg

SEQ ID NO: 1162654 - DNA, 15 bp, Homo sapiens
tccttacttggtagt

SEQ ID NO: 1162655 - DNA, 15 bp, Homo sapiens
ttccttacttggtag

SEQ ID NO: 1162656 - DNA, 15 bp, Homo sapiens
cttccttacttggta

SEQ ID NO: 1162657 - DNA, 15 bp, Homo sapiens
gcttccttacttggt

SEQ ID NO: 1162658 - DNA, 15 bp, Homo sapiens
agcttccttacttgg

SEQ ID NO: 1162659 - DNA, 15 bp, Homo sapiens
gagcttccttacttg

SEQ ID NO: 1162660 - DNA, 15 bp, Homo sapiens
tgagcttccttactt

SEQ ID NO: 1162661 - DNA, 15 bp, Homo sapiens
ttgagcttccttact

SEQ ID NO: 1162662 - DNA, 15 bp, Homo sapiens
attgagcttccttac

SEQ ID NO: 1162663 - DNA, 15 bp, Homo sapiens
aattgagcttcctta

SEQ ID NO: 1162664 - DNA, 15 bp, Homo sapiens
gaattgagcttcctt

SEQ ID NO: 1162665 - DNA, 15 bp, Homo sapiens
agaattgagcttcct

SEQ ID NO: 1162666 - DNA, 15 bp, Homo sapiens
cagaattgagcttcc

SEQ ID NO: 1162667 - DNA, 15 bp, Homo sapiens
tcagaattgagcttc

SEQ ID NO: 1162668 - DNA, 15 bp, Homo sapiens
ttcagaattgagctt

SEQ ID NO: 1162669 - DNA, 15 bp, Homo sapiens
attcagaattgagct

SEQ ID NO: 1162670 - DNA, 15 bp, Homo sapiens
tattcagaattgagc

SEQ ID NO: 1162671 - DNA, 15 bp, Homo sapiens
gtattcagaattgag

SEQ ID NO: 1162672 - DNA, 15 bp, Homo sapiens
agtattcagaattga

SEQ ID NO: 1162673 - DNA, 15 bp, Homo sapiens
tagtattcagaattg

SEQ ID NO: 1162674 - DNA, 15 bp, Homo sapiens
ctagtattcagaatt

SEQ ID NO: 1162675 - DNA, 15 bp, Homo sapiens
tctagtattcagaat

SEQ ID NO: 1162676 - DNA, 15 bp, Homo sapiens
atctagtattcagaa

SEQ ID NO: 1162677 - DNA, 15 bp, Homo sapiens
catctagtattcaga

SEQ ID NO: 1162678 - DNA, 15 bp, Homo sapiens
tcatctagtattcag

SEQ ID NO: 1162679 - DNA, 15 bp, Homo sapiens
atcatctagtattca

SEQ ID NO: 1162680 - DNA, 15 bp, Homo sapiens
gatcatctagtattc

SEQ ID NO: 1162681 - DNA, 15 bp, Homo sapiens
tgatcatctagtatt

SEQ ID NO: 1162682 - DNA, 15 bp, Homo sapiens
ctgatcatctagtat

SEQ ID NO: 1162683 - DNA, 15 bp, Homo sapiens
tctgatcatctagta

SEQ ID NO: 1162684 - DNA, 15 bp, Homo sapiens
ctctgatcatctagt

SEQ ID NO: 1162685 - DNA, 15 bp, Homo sapiens
tctctgatcatctag

SEQ ID NO: 1162686 - DNA, 15 bp, Homo sapiens
gtctctgatcatcta

SEQ ID NO: 1162687 - DNA, 15 bp, Homo sapiens
ggtctctgatcatct

SEQ ID NO: 1162688 - DNA, 15 bp, Homo sapiens
tggtctctgatcatc

SEQ ID NO: 1162689 - DNA, 15 bp, Homo sapiens
atggtctctgatcat

SEQ ID NO: 1162690 - DNA, 15 bp, Homo sapiens
catggtctctgatca

SEQ ID NO: 1162691 - DNA, 15 bp, Homo sapiens
acatggtctctgatc

SEQ ID NO: 1162692 - DNA, 15 bp, Homo sapiens
gacatggtctctgat

SEQ ID NO: 1162693 - DNA, 15 bp, Homo sapiens
tgacatggtctctga

SEQ ID NO: 1162694 - DNA, 15 bp, Homo sapiens
ctgacatggtctctg

SEQ ID NO: 1162695 - DNA, 15 bp, Homo sapiens
cctgacatggtctct

SEQ ID NO: 1162696 - DNA, 15 bp, Homo sapiens
tcctgacatggtctc

SEQ ID NO: 1162697 - DNA, 15 bp, Homo sapiens
ctcctgacatggtct

SEQ ID NO: 1162698 - DNA, 15 bp, Homo sapiens
tctcctgacatggtc

SEQ ID NO: 1162699 - DNA, 15 bp, Homo sapiens
ctctcctgacatggt

SEQ ID NO: 1162700 - DNA, 15 bp, Homo sapiens
tctctcctgacatgg

SEQ ID NO: 1162701 - DNA, 15 bp, Homo sapiens
gtctctcctgacatg

SEQ ID NO: 1162702 - DNA, 15 bp, Homo sapiens
tgtctctcctgacat

SEQ ID NO: 1162703 - DNA, 15 bp, Homo sapiens
ctgtctctcctgaca

SEQ ID NO: 1162704 - DNA, 15 bp, Homo sapiens
actgtctctcctgac

SEQ ID NO: 1162705 - DNA, 15 bp, Homo sapiens
gactgtctctcctga

SEQ ID NO: 1162706 - DNA, 15 bp, Homo sapiens
ggactgtctctcctg

SEQ ID NO: 1162707 - DNA, 15 bp, Homo sapiens
gggactgtctctcct

SEQ ID NO: 1162708 - DNA, 15 bp, Homo sapiens
tgggactgtctctcc

SEQ ID NO: 1162709 - DNA, 15 bp, Homo sapiens
ctgggactgtctctc

SEQ ID NO: 1162710 - DNA, 15 bp, Homo sapiens
gctgggactgtctct

SEQ ID NO: 1162711 - DNA, 15 bp, Homo sapiens
ggctgggactgtctc

SEQ ID NO: 1162712 - DNA, 15 bp, Homo sapiens
tggctgggactgtct

SEQ ID NO: 1162713 - DNA, 15 bp, Homo sapiens
gtggctgggactgtc

SEQ ID NO: 1162714 - DNA, 15 bp, Homo sapiens
ggtggctgggactgt

SEQ ID NO: 1162715 - DNA, 15 bp, Homo sapiens
tggtggctgggactg

SEQ ID NO: 1162716 - DNA, 15 bp, Homo sapiens
ttggtggctgggact

SEQ ID NO: 1162717 - DNA, 15 bp, Homo sapiens
tttggtggctgggac

SEQ ID NO: 1162718 - DNA, 15 bp, Homo sapiens
atttggtggctggga

SEQ ID NO: 1162719 - DNA, 15 bp, Homo sapiens
aatttggtggctggg

SEQ ID NO: 1162720 - DNA, 15 bp, Homo sapiens
aaatttggtggctgg

SEQ ID NO: 1162721 - DNA, 15 bp, Homo sapiens
taaatttggtggctg

SEQ ID NO: 1162722 - DNA, 15 bp, Homo sapiens
gtaaatttggtggct

SEQ ID NO: 1162723 - DNA, 15 bp, Homo sapiens
tgtaaatttggtggc

SEQ ID NO: 1162724 - DNA, 15 bp, Homo sapiens
ctgtaaatttggtgg

SEQ ID NO: 1162725 - DNA, 15 bp, Homo sapiens
tctgtaaatttggtg

SEQ ID NO: 1162726 - DNA, 15 bp, Homo sapiens
atctgtaaatttggt

SEQ ID NO: 1162727 - DNA, 15 bp, Homo sapiens
tatctgtaaatttgg

SEQ ID NO: 1162728 - DNA, 15 bp, Homo sapiens
ctatctgtaaatttg

SEQ ID NO: 1162729 - DNA, 15 bp, Homo sapiens
actatctgtaaattt

SEQ ID NO: 1162730 - DNA, 15 bp, Homo sapiens
aactatctgtaaatt

SEQ ID NO: 1162731 - DNA, 15 bp, Homo sapiens
caactatctgtaaat

SEQ ID NO: 1162732 - DNA, 15 bp, Homo sapiens
ccaactatctgtaaa

SEQ ID NO: 1162733 - DNA, 15 bp, Homo sapiens
accaactatctgtaa

SEQ ID NO: 1162734 - DNA, 15 bp, Homo sapiens
caccaactatctgta

SEQ ID NO: 1162735 - DNA, 15 bp, Homo sapiens
tcaccaactatctgt

SEQ ID NO: 1162736 - DNA, 15 bp, Homo sapiens
ctcaccaactatctg

SEQ ID NO: 1162737 - DNA, 15 bp, Homo sapiens
cctcaccaactatct

SEQ ID NO: 1162738 - DNA, 15 bp, Homo sapiens
acctcaccaactatc

SEQ ID NO: 1162739 - DNA, 15 bp, Homo sapiens
cacctcaccaactat

SEQ ID NO: 1162740 - DNA, 15 bp, Homo sapiens
tcacctcaccaacta

SEQ ID NO: 1162741 - DNA, 15 bp, Homo sapiens
atcacctcaccaact

SEQ ID NO: 1162742 - DNA, 15 bp, Homo sapiens
gatcacctcaccaac

SEQ ID NO: 1162743 - DNA, 15 bp, Homo sapiens
agatcacctcaccaa

SEQ ID NO: 1162744 - DNA, 15 bp, Homo sapiens
aagatcacctcacca

SEQ ID NO: 1162745 - DNA, 15 bp, Homo sapiens
taagatcacctcacc

SEQ ID NO: 1162746 - DNA, 15 bp, Homo sapiens
ttaagatcacctcac

SEQ ID NO: 1162747 - DNA, 15 bp, Homo sapiens
tttaagatcacctca

SEQ ID NO: 1162748 - DNA, 15 bp, Homo sapiens
gtttaagatcacctc

SEQ ID NO: 1162749 - DNA, 15 bp, Homo sapiens
agtttaagatcacct

SEQ ID NO: 1162750 - DNA, 15 bp, Homo sapiens
aagtttaagatcacc

SEQ ID NO: 1162751 - DNA, 15 bp, Homo sapiens
aaagtttaagatcac

SEQ ID NO: 1162752 - DNA, 15 bp, Homo sapiens
gaaagtttaagatca

SEQ ID NO: 1162753 - DNA, 15 bp, Homo sapiens
ggaaagtttaagatc

SEQ ID NO: 1162754 - DNA, 15 bp, Homo sapiens
tggaaagtttaagat

SEQ ID NO: 1162755 - DNA, 15 bp, Homo sapiens
ctggaaagtttaaga

SEQ ID NO: 1162756 - DNA, 15 bp, Homo sapiens
gctggaaagtttaag

SEQ ID NO: 1162757 - DNA, 15 bp, Homo sapiens
ggctggaaagtttaa

SEQ ID NO: 1162758 - DNA, 15 bp, Homo sapiens
aggctggaaagttta

SEQ ID NO: 1162759 - DNA, 15 bp, Homo sapiens
gaggctggaaagttt

SEQ ID NO: 1162760 - DNA, 15 bp, Homo sapiens
tgaggctggaaagtt

SEQ ID NO: 1162761 - DNA, 15 bp, Homo sapiens
ctgaggctggaaagt

SEQ ID NO: 1162762 - DNA, 15 bp, Homo sapiens
actgaggctggaaag

SEQ ID NO: 1162763 - DNA, 15 bp, Homo sapiens
gactgaggctggaaa

SEQ ID NO: 1162764 - DNA, 15 bp, Homo sapiens
ggactgaggctggaa

SEQ ID NO: 1162765 - DNA, 15 bp, Homo sapiens
aggactgaggctgga

SEQ ID NO: 1162766 - DNA, 15 bp, Homo sapiens
caggactgaggctgg

SEQ ID NO: 1162767 - DNA, 15 bp, Homo sapiens
ccaggactgaggctg

SEQ ID NO: 1162768 - DNA, 15 bp, Homo sapiens
accaggactgaggct

SEQ ID NO: 1162769 - DNA, 15 bp, Homo sapiens
aaccaggactgaggc

SEQ ID NO: 1162770 - DNA, 15 bp, Homo sapiens
caaccaggactgagg

SEQ ID NO: 1162771 - DNA, 15 bp, Homo sapiens
gcaaccaggactgag

SEQ ID NO: 1162772 - DNA, 15 bp, Homo sapiens
ggcaaccaggactga

SEQ ID NO: 1162773 - DNA, 15 bp, Homo sapiens
aggcaaccaggactg

SEQ ID NO: 1162774 - DNA, 15 bp, Homo sapiens
caggcaaccaggact

SEQ ID NO: 1162775 - DNA, 15 bp, Homo sapiens
tcaggcaaccaggac

SEQ ID NO: 1162776 - DNA, 15 bp, Homo sapiens
atcaggcaaccagga

SEQ ID NO: 1162777 - DNA, 15 bp, Homo sapiens
catcaggcaaccagg

SEQ ID NO: 1162778 - DNA, 15 bp, Homo sapiens
tcatcaggcaaccag

SEQ ID NO: 1162779 - DNA, 15 bp, Homo sapiens
atcatcaggcaacca

SEQ ID NO: 1162780 - DNA, 15 bp, Homo sapiens
aatcatcaggcaacc

SEQ ID NO: 1162781 - DNA, 15 bp, Homo sapiens
taatcatcaggcaac

SEQ ID NO: 1162782 - DNA, 15 bp, Homo sapiens
ataatcatcaggcaa

SEQ ID NO: 1162783 - DNA, 15 bp, Homo sapiens
tataatcatcaggca

SEQ ID NO: 1162784 - DNA, 15 bp, Homo sapiens
ctataatcatcaggc

SEQ ID NO: 1162785 - DNA, 15 bp, Homo sapiens
gctataatcatcagg

SEQ ID NO: 1162786 - DNA, 15 bp, Homo sapiens
agctataatcatcag

SEQ ID NO: 1162787 - DNA, 15 bp, Homo sapiens
cagctataatcatca

SEQ ID NO: 1162788 - DNA, 15 bp, Homo sapiens
acagctataatcatc

SEQ ID NO: 1162789 - DNA, 15 bp, Homo sapiens
tacagctataatcat

SEQ ID NO: 1162790 - DNA, 15 bp, Homo sapiens
gtacagctataatca

SEQ ID NO: 1162791 - DNA, 15 bp, Homo sapiens
tgtacagctataatc

SEQ ID NO: 1162792 - DNA, 15 bp, Homo sapiens
ttgtacagctataat

SEQ ID NO: 1162793 - DNA, 15 bp, Homo sapiens
tttgtacagctataa

SEQ ID NO: 1162794 - DNA, 15 bp, Homo sapiens
atttgtacagctata

SEQ ID NO: 1162795 - DNA, 15 bp, Homo sapiens
tatttgtacagctat

SEQ ID NO: 1162796 - DNA, 15 bp, Homo sapiens
ttatttgtacagcta

SEQ ID NO: 1162797 - DNA, 15 bp, Homo sapiens
tttatttgtacagct

SEQ ID NO: 1162798 - DNA, 15 bp, Homo sapiens
gtttatttgtacagc

SEQ ID NO: 1162799 - DNA, 15 bp, Homo sapiens
tgtttatttgtacag

SEQ ID NO: 1162800 - DNA, 15 bp, Homo sapiens
gtgtttatttgtaca

SEQ ID NO: 1162801 - DNA, 15 bp, Homo sapiens
tgtgtttatttgtac

SEQ ID NO: 1162802 - DNA, 15 bp, Homo sapiens
ctgtgtttatttgta

SEQ ID NO: 1162803 - DNA, 15 bp, Homo sapiens
cctgtgtttatttgt

SEQ ID NO: 1162804 - DNA, 15 bp, Homo sapiens
gcctgtgtttatttg

SEQ ID NO: 1162805 - DNA, 15 bp, Homo sapiens
tgcctgtgtttattt

SEQ ID NO: 1162806 - DNA, 15 bp, Homo sapiens
ttgcctgtgtttatt

SEQ ID NO: 1162807 - DNA, 15 bp, Homo sapiens
cttgcctgtgtttat

SEQ ID NO: 1162808 - DNA, 15 bp, Homo sapiens
tcttgcctgtgttta

SEQ ID NO: 1162809 - DNA, 15 bp, Homo sapiens
atcttgcctgtgttt

SEQ ID NO: 1162810 - DNA, 15 bp, Homo sapiens
catcttgcctgtgtt

SEQ ID NO: 1162811 - DNA, 15 bp, Homo sapiens
tcatcttgcctgtgt

SEQ ID NO: 1162812 - DNA, 15 bp, Homo sapiens
ctcatcttgcctgtg

SEQ ID NO: 1162813 - DNA, 15 bp, Homo sapiens
gctcatcttgcctgt

SEQ ID NO: 1162814 - DNA, 15 bp, Homo sapiens
tgctcatcttgcctg

SEQ ID NO: 1162815 - DNA, 15 bp, Homo sapiens
ctgctcatcttgcct

SEQ ID NO: 1162816 - DNA, 15 bp, Homo sapiens
tctgctcatcttgcc

SEQ ID NO: 1162817 - DNA, 15 bp, Homo sapiens
ttctgctcatcttgc

SEQ ID NO: 1162818 - DNA, 15 bp, Homo sapiens
cttctgctcatcttg

SEQ ID NO: 1162819 - DNA, 15 bp, Homo sapiens
tcttctgctcatctt

SEQ ID NO: 1162820 - DNA, 15 bp, Homo sapiens
ttcttctgctcatct

SEQ ID NO: 1162821 - DNA, 15 bp, Homo sapiens
gttcttctgctcatc

SEQ ID NO: 1162822 - DNA, 15 bp, Homo sapiens
agttcttctgctcat

SEQ ID NO: 1162823 - DNA, 15 bp, Homo sapiens
cagttcttctgctca

SEQ ID NO: 1162824 - DNA, 15 bp, Homo sapiens
acagttcttctgctc

SEQ ID NO: 1162825 - DNA, 15 bp, Homo sapiens
gacagttcttctgct

SEQ ID NO: 1162826 - DNA, 15 bp, Homo sapiens
agacagttcttctgc

SEQ ID NO: 1162827 - DNA, 15 bp, Homo sapiens
tagacagttcttctg

SEQ ID NO: 1162828 - DNA, 15 bp, Homo sapiens
ctagacagttcttct

SEQ ID NO: 1162829 - DNA, 15 bp, Homo sapiens
gctagacagttcttc

SEQ ID NO: 1162830 - DNA, 15 bp, Homo sapiens
agctagacagttctt

SEQ ID NO: 1162831 - DNA, 15 bp, Homo sapiens
cagctagacagttct

SEQ ID NO: 1162832 - DNA, 15 bp, Homo sapiens
acagctagacagttc

SEQ ID NO: 1162833 - DNA, 15 bp, Homo sapiens
aacagctagacagtt

SEQ ID NO: 1162834 - DNA, 15 bp, Homo sapiens
taacagctagacagt

SEQ ID NO: 1162835 - DNA, 15 bp, Homo sapiens
ataacagctagacag

SEQ ID NO: 1162836 - DNA, 15 bp, Homo sapiens
gataacagctagaca

SEQ ID NO: 1162837 - DNA, 15 bp, Homo sapiens
tgataacagctagac

SEQ ID NO: 1162838 - DNA, 15 bp, Homo sapiens
ttgataacagctaga

SEQ ID NO: 1162839 - DNA, 15 bp, Homo sapiens
attgataacagctag

SEQ ID NO: 1162840 - DNA, 15 bp, Homo sapiens
gattgataacagcta

SEQ ID NO: 1162841 - DNA, 15 bp, Homo sapiens
tgattgataacagct

SEQ ID NO: 1162842 - DNA, 15 bp, Homo sapiens
ttgattgataacagc

SEQ ID NO: 1162843 - DNA, 15 bp, Homo sapiens
gttgattgataacag

SEQ ID NO: 1162844 - DNA, 15 bp, Homo sapiens
agttgattgataaca

SEQ ID NO: 1162845 - DNA, 15 bp, Homo sapiens
cagttgattgataac

SEQ ID NO: 1162846 - DNA, 15 bp, Homo sapiens
tcagttgattgataa

SEQ ID NO: 1162847 - DNA, 15 bp, Homo sapiens
gtcagttgattgata

SEQ ID NO: 1162848 - DNA, 15 bp, Homo sapiens
tgtcagttgattgat

SEQ ID NO: 1162849 - DNA, 15 bp, Homo sapiens
ttgtcagttgattga

SEQ ID NO: 1162850 - DNA, 15 bp, Homo sapiens
tttgtcagttgattg

SEQ ID NO: 1162851 - DNA, 15 bp, Homo sapiens
ctttgtcagttgatt

SEQ ID NO: 1162852 - DNA, 15 bp, Homo sapiens
actttgtcagttgat

SEQ ID NO: 1162853 - DNA, 15 bp, Homo sapiens
tactttgtcagttga

SEQ ID NO: 1162854 - DNA, 15 bp, Homo sapiens
ttactttgtcagttg

SEQ ID NO: 1162855 - DNA, 15 bp, Homo sapiens
attactttgtcagtt

SEQ ID NO: 1162856 - DNA, 15 bp, Homo sapiens
cattactttgtcagt

SEQ ID NO: 1162857 - DNA, 15 bp, Homo sapiens
tcattactttgtcag

SEQ ID NO: 1162858 - DNA, 15 bp, Homo sapiens
ctcattactttgtca

SEQ ID NO: 1162859 - DNA, 15 bp, Homo sapiens
tctcattactttgtc

SEQ ID NO: 1162860 - DNA, 15 bp, Homo sapiens
ttctcattactttgt

SEQ ID NO: 1162861 - DNA, 15 bp, Homo sapiens
tttctcattactttg

SEQ ID NO: 1162862 - DNA, 15 bp, Homo sapiens
gtttctcattacttt

SEQ ID NO: 1162863 - DNA, 15 bp, Homo sapiens
tgtttctcattactt

SEQ ID NO: 1162864 - DNA, 15 bp, Homo sapiens
ttgtttctcattact

SEQ ID NO: 1162865 - DNA, 15 bp, Homo sapiens
attgtttctcattac

SEQ ID NO: 1162866 - DNA, 15 bp, Homo sapiens
tattgtttctcatta

SEQ ID NO: 1162867 - DNA, 15 bp, Homo sapiens
ttattgtttctcatt

SEQ ID NO: 1162868 - DNA, 15 bp, Homo sapiens
tttattgtttctcat

SEQ ID NO: 1162869 - DNA, 15 bp, Homo sapiens
gtttattgtttctca

SEQ ID NO: 1162870 - DNA, 15 bp, Homo sapiens
agtttattgtttctc

SEQ ID NO: 1162871 - DNA, 15 bp, Homo sapiens
cagtttattgtttct

SEQ ID NO: 1162872 - DNA, 15 bp, Homo sapiens
tcagtttattgtttc

SEQ ID NO: 1162873 - DNA, 15 bp, Homo sapiens
atcagtttattgttt

SEQ ID NO: 1162874 - DNA, 15 bp, Homo sapiens
aatcagtttattgtt

SEQ ID NO: 1162875 - DNA, 15 bp, Homo sapiens
gaatcagtttattgt

SEQ ID NO: 1162876 - DNA, 15 bp, Homo sapiens
tgaatcagtttattg

SEQ ID NO: 1162877 - DNA, 15 bp, Homo sapiens
ttgaatcagtttatt

SEQ ID NO: 1162878 - DNA, 15 bp, Homo sapiens
cttgaatcagtttat

SEQ ID NO: 1162879 - DNA, 15 bp, Homo sapiens
tcttgaatcagttta

SEQ ID NO: 1162880 - DNA, 15 bp, Homo sapiens
gtcttgaatcagttt

SEQ ID NO: 1162881 - DNA, 15 bp, Homo sapiens
tgtcttgaatcagtt

SEQ ID NO: 1162882 - DNA, 15 bp, Homo sapiens
gtgtcttgaatcagt

SEQ ID NO: 1162883 - DNA, 15 bp, Homo sapiens
agtgtcttgaatcag

SEQ ID NO: 1162884 - DNA, 15 bp, Homo sapiens
tagtgtcttgaatca

SEQ ID NO: 1162885 - DNA, 15 bp, Homo sapiens
ttagtgtcttgaatc

SEQ ID NO: 1162886 - DNA, 15 bp, Homo sapiens
cttagtgtcttgaat

SEQ ID NO: 1162887 - DNA, 15 bp, Homo sapiens
acttagtgtcttgaa

SEQ ID NO: 1162888 - DNA, 15 bp, Homo sapiens
aacttagtgtcttga

SEQ ID NO: 1162889 - DNA, 15 bp, Homo sapiens
aaacttagtgtcttg

SEQ ID NO: 1162890 - DNA, 15 bp, Homo sapiens
aaaacttagtgtctt

SEQ ID NO: 1162891 - DNA, 15 bp, Homo sapiens
caaaacttagtgtct

SEQ ID NO: 1162892 - DNA, 15 bp, Homo sapiens
ccaaaacttagtgtc

SEQ ID NO: 1162893 - DNA, 15 bp, Homo sapiens
tccaaaacttagtgt

SEQ ID NO: 1162894 - DNA, 15 bp, Homo sapiens
atccaaaacttagtg

SEQ ID NO: 1162895 - DNA, 15 bp, Homo sapiens
catccaaaacttagt

SEQ ID NO: 1162896 - DNA, 15 bp, Homo sapiens
ccatccaaaacttag

SEQ ID NO: 1162897 - DNA, 15 bp, Homo sapiens
accatccaaaactta

SEQ ID NO: 1162898 - DNA, 15 bp, Homo sapiens
aaccatccaaaactt

SEQ ID NO: 1162899 - DNA, 15 bp, Homo sapiens
taaccatccaaaact

SEQ ID NO: 1162900 - DNA, 15 bp, Homo sapiens
ttaaccatccaaaac

SEQ ID NO: 1162901 - DNA, 15 bp, Homo sapiens
attaaccatccaaaa

SEQ ID NO: 1162902 - DNA, 15 bp, Homo sapiens
aattaaccatccaaa

SEQ ID NO: 1162903 - DNA, 15 bp, Homo sapiens
taattaaccatccaa

SEQ ID NO: 1162904 - DNA, 15 bp, Homo sapiens
gtaattaaccatcca

SEQ ID NO: 1162905 - DNA, 15 bp, Homo sapiens
tgtaattaaccatcc

SEQ ID NO: 1162906 - DNA, 15 bp, Homo sapiens
gtgtaattaaccatc

SEQ ID NO: 1162907 - DNA, 15 bp, Homo sapiens
tgtgtaattaaccat

SEQ ID NO: 1162908 - DNA, 15 bp, Homo sapiens
ctgtgtaattaacca

SEQ ID NO: 1162909 - DNA, 15 bp, Homo sapiens
gctgtgtaattaacc

SEQ ID NO: 1162910 - DNA, 15 bp, Homo sapiens
tgctgtgtaattaac

SEQ ID NO: 1162911 - DNA, 15 bp, Homo sapiens
ttgctgtgtaattaa

SEQ ID NO: 1162912 - DNA, 15 bp, Homo sapiens
attgctgtgtaatta

SEQ ID NO: 1162913 - DNA, 15 bp, Homo sapiens
tattgctgtgtaatt

SEQ ID NO: 1162914 - DNA, 15 bp, Homo sapiens
atattgctgtgtaat

SEQ ID NO: 1162915 - DNA, 15 bp, Homo sapiens
tatattgctgtgtaa

SEQ ID NO: 1162916 - DNA, 15 bp, Homo sapiens
atatattgctgtgta

SEQ ID NO: 1162917 - DNA, 15 bp, Homo sapiens
tatatattgctgtgt

SEQ ID NO: 1162918 - DNA, 15 bp, Homo sapiens
ttatatattgctgtg

SEQ ID NO: 1162919 - DNA, 15 bp, Homo sapiens
gttatatattgctgt

SEQ ID NO: 1162920 - DNA, 15 bp, Homo sapiens
agttatatattgctg

SEQ ID NO: 1162921 - DNA, 15 bp, Homo sapiens
cagttatatattgct

SEQ ID NO: 1162922 - DNA, 15 bp, Homo sapiens
tcagttatatattgc

SEQ ID NO: 1162923 - DNA, 15 bp, Homo sapiens
ctcagttatatattg

SEQ ID NO: 1162924 - DNA, 15 bp, Homo sapiens
cctcagttatatatt

SEQ ID NO: 1162925 - DNA, 15 bp, Homo sapiens
acctcagttatatat

SEQ ID NO: 1162926 - DNA, 15 bp, Homo sapiens
gacctcagttatata

SEQ ID NO: 1162927 - DNA, 15 bp, Homo sapiens
tgacctcagttatat

SEQ ID NO: 1162928 - DNA, 15 bp, Homo sapiens
ttgacctcagttata

SEQ ID NO: 1162929 - DNA, 15 bp, Homo sapiens
tttgacctcagttat

SEQ ID NO: 1162930 - DNA, 15 bp, Homo sapiens
ttttgacctcagtta

SEQ ID NO: 1162931 - DNA, 15 bp, Homo sapiens
tttttgacctcagtt

SEQ ID NO: 1162932 - DNA, 15 bp, Homo sapiens
ctttttgacctcagt

SEQ ID NO: 1162933 - DNA, 15 bp, Homo sapiens
gctttttgacctcag

SEQ ID NO: 1162934 - DNA, 15 bp, Homo sapiens
tgctttttgacctca

SEQ ID NO: 1162935 - DNA, 15 bp, Homo sapiens
gtgctttttgacctc

SEQ ID NO: 1162936 - DNA, 15 bp, Homo sapiens
ggtgctttttgacct

SEQ ID NO: 1162937 - DNA, 15 bp, Homo sapiens
tggtgctttttgacc

SEQ ID NO: 1162938 - DNA, 15 bp, Homo sapiens
ctggtgctttttgac

SEQ ID NO: 1162939 - DNA, 15 bp, Homo sapiens
tctggtgctttttga

SEQ ID NO: 1162940 - DNA, 15 bp, Homo sapiens
ttctggtgctttttg

SEQ ID NO: 1162941 - DNA, 15 bp, Homo sapiens
tttctggtgcttttt

SEQ ID NO: 1162942 - DNA, 15 bp, Homo sapiens
ttttctggtgctttt

SEQ ID NO: 1162943 - DNA, 15 bp, Homo sapiens
cttttctggtgcttt

SEQ ID NO: 1162944 - DNA, 15 bp, Homo sapiens
gcttttctggtgctt

SEQ ID NO: 1162945 - DNA, 15 bp, Homo sapiens
tgcttttctggtgct

SEQ ID NO: 1162946 - DNA, 15 bp, Homo sapiens
ttgcttttctggtgc

SEQ ID NO: 1162947 - DNA, 15 bp, Homo sapiens
tttgcttttctggtg

SEQ ID NO: 1162948 - DNA, 15 bp, Homo sapiens
gtttgcttttctggt

SEQ ID NO: 1162949 - DNA, 15 bp, Homo sapiens
tgtttgcttttctgg

SEQ ID NO: 1162950 - DNA, 15 bp, Homo sapiens
cctgtttgcttttct

SEQ ID NO: 1162951 - DNA, 15 bp, Homo sapiens
tcctgtttgcttttc

SEQ ID NO: 1162952 - DNA, 15 bp, Homo sapiens
ttcctgtttgctttt

SEQ ID NO: 1162953 - DNA, 15 bp, Homo sapiens
attcctgtttgcttt

SEQ ID NO: 1162954 - DNA, 15 bp, Homo sapiens
cattcctgtttgctt

SEQ ID NO: 1162955 - DNA, 15 bp, Homo sapiens
tcattcctgtttgct

SEQ ID NO: 1162956 - DNA, 15 bp, Homo sapiens
ttcattcctgtttgc

SEQ ID NO: 1162957 - DNA, 15 bp, Homo sapiens
attcattcctgtttg

SEQ ID NO: 1162958 - DNA, 15 bp, Homo sapiens
gattcattcctgttt

SEQ ID NO: 1162959 - DNA, 15 bp, Homo sapiens
tgattcattcctgtt

SEQ ID NO: 1162960 - DNA, 15 bp, Homo sapiens
atgattcattcctgt

SEQ ID NO: 1162961 - DNA, 15 bp, Homo sapiens
aatgattcattcctg

SEQ ID NO: 1162962 - DNA, 15 bp, Homo sapiens
aaatgattcattcct

SEQ ID NO: 1162963 - DNA, 15 bp, Homo sapiens
taaatgattcattcc

SEQ ID NO: 1162964 - DNA, 15 bp, Homo sapiens
ataaatgattcattc

SEQ ID NO: 1162965 - DNA, 15 bp, Homo sapiens
aataaatgattcatt

SEQ ID NO: 1162966 - DNA, 15 bp, Homo sapiens
gaataaatgattcat

SEQ ID NO: 1162967 - DNA, 15 bp, Homo sapiens
tgaataaatgattca

SEQ ID NO: 1162968 - DNA, 15 bp, Homo sapiens
ttgaataaatgattc

SEQ ID NO: 1162969 - DNA, 15 bp, Homo sapiens
tttgaataaatgatt

SEQ ID NO: 1162970 - DNA, 15 bp, Homo sapiens
gtttgaataaatgat

SEQ ID NO: 1162971 - DNA, 15 bp, Homo sapiens
tgtttgaataaatga

SEQ ID NO: 1162972 - DNA, 15 bp, Homo sapiens
ttgtttgaataaatg

SEQ ID NO: 1162973 - DNA, 15 bp, Homo sapiens
tttgtttgaataaat

SEQ ID NO: 1162974 - DNA, 15 bp, Homo sapiens
ttttgtttgaataaa

SEQ ID NO: 1162975 - DNA, 15 bp, Homo sapiens
gttttgtttgaataa

SEQ ID NO: 1162976 - DNA, 15 bp, Homo sapiens
tgttttgtttgaata

SEQ ID NO: 1162977 - DNA, 15 bp, Homo sapiens
ttgttttgtttgaat

SEQ ID NO: 1162978 - DNA, 15 bp, Homo sapiens
tttgttttgtttgaa

SEQ ID NO: 1162979 - DNA, 15 bp, Homo sapiens
ttttgttttgtttga

SEQ ID NO: 1162980 - DNA, 15 bp, Homo sapiens
tagctttttgttttg

SEQ ID NO: 1162981 - DNA, 15 bp, Homo sapiens
atagctttttgtttt

SEQ ID NO: 1162982 - DNA, 15 bp, Homo sapiens
tatagctttttgttt

SEQ ID NO: 1162983 - DNA, 15 bp, Homo sapiens
atatagctttttgtt

SEQ ID NO: 1162984 - DNA, 15 bp, Homo sapiens
tatatagctttttgt

SEQ ID NO: 1162985 - DNA, 15 bp, Homo sapiens
ttatatagctttttg

SEQ ID NO: 1162986 - DNA, 15 bp, Homo sapiens
attatatagcttttt

SEQ ID NO: 1162987 - DNA, 15 bp, Homo sapiens
aattatatagctttt

SEQ ID NO: 1162988 - DNA, 15 bp, Homo sapiens
aaattatatagcttt

SEQ ID NO: 1162989 - DNA, 15 bp, Homo sapiens
aaaattatatagctt

SEQ ID NO: 1162990 - DNA, 15 bp, Homo sapiens
caaaattatatagct

SEQ ID NO: 1162991 - DNA, 15 bp, Homo sapiens
tcaaaattatatagc

SEQ ID NO: 1162992 - DNA, 15 bp, Homo sapiens
ctcaaaattatatag

SEQ ID NO: 1162993 - DNA, 15 bp, Homo sapiens
tctcaaaattatata

SEQ ID NO: 1162994 - DNA, 15 bp, Homo sapiens
ttctcaaaattatat

SEQ ID NO: 1162995 - DNA, 15 bp, Homo sapiens
attctcaaaattata

SEQ ID NO: 1162996 - DNA, 15 bp, Homo sapiens
aattctcaaaattat

SEQ ID NO: 1162997 - DNA, 15 bp, Homo sapiens
aaattctcaaaatta

SEQ ID NO: 1162998 - DNA, 15 bp, Homo sapiens
gaaattctcaaaatt

SEQ ID NO: 1162999 - DNA, 15 bp, Homo sapiens
tgaaattctcaaaat

SEQ ID NO: 1163000 - DNA, 15 bp, Homo sapiens
atgaaattctcaaaa

SEQ ID NO: 1163001 - DNA, 15 bp, Homo sapiens
aatgaaattctcaaa

SEQ ID NO: 1163002 - DNA, 15 bp, Homo sapiens
aaatgaaattctcaa

SEQ ID NO: 1163003 - DNA, 15 bp, Homo sapiens
aaaatgaaattctca

SEQ ID NO: 1163004 - DNA, 15 bp, Homo sapiens
aaaaatgaaattctc

SEQ ID NO: 1163005 - DNA, 15 bp, Homo sapiens
aaaaaatgaaattct

SEQ ID NO: 1163006 - DNA, 15 bp, Homo sapiens
caaaaaatgaaattc

SEQ ID NO: 1163007 - DNA, 15 bp, Homo sapiens
tcaaaaaatgaaatt

SEQ ID NO: 1163008 - DNA, 15 bp, Homo sapiens
ctcaaaaaatgaaat

SEQ ID NO: 1163009 - DNA, 15 bp, Homo sapiens
tctcaaaaaatgaaa

SEQ ID NO: 1163010 - DNA, 15 bp, Homo sapiens
ctctcaaaaaatgaa

SEQ ID NO: 1163011 - DNA, 15 bp, Homo sapiens
actctcaaaaaatga

SEQ ID NO: 1163012 - DNA, 15 bp, Homo sapiens
tactctcaaaaaatg

SEQ ID NO: 1163013 - DNA, 15 bp, Homo sapiens
ttactctcaaaaaat

SEQ ID NO: 1163014 - DNA, 15 bp, Homo sapiens
tttactctcaaaaaa

SEQ ID NO: 1163015 - DNA, 15 bp, Homo sapiens
ttttactctcaaaaa

SEQ ID NO: 1163016 - DNA, 15 bp, Homo sapiens
tttttactctcaaaa

SEQ ID NO: 1163017 - DNA, 15 bp, Homo sapiens
gtttttactctcaaa

SEQ ID NO: 1163018 - DNA, 15 bp, Homo sapiens
agtttttactctcaa

SEQ ID NO: 1163019 - DNA, 15 bp, Homo sapiens
tagtttttactctca

SEQ ID NO: 1163020 - DNA, 15 bp, Homo sapiens
gtagtttttactctc

SEQ ID NO: 1163021 - DNA, 15 bp, Homo sapiens
tgtagtttttactct

SEQ ID NO: 1163022 - DNA, 15 bp, Homo sapiens
ttgtagtttttactc

SEQ ID NO: 1163023 - DNA, 15 bp, Homo sapiens
tttgtagtttttact

SEQ ID NO: 1163024 - DNA, 15 bp, Homo sapiens
ttttgtagtttttac

SEQ ID NO: 1163025 - DNA, 15 bp, Homo sapiens
attttgtagttttta

SEQ ID NO: 1163026 - DNA, 15 bp, Homo sapiens
aattttgtagttttt

SEQ ID NO: 1163027 - DNA, 15 bp, Homo sapiens
caattttgtagtttt

SEQ ID NO: 1163028 - DNA, 15 bp, Homo sapiens
tcaattttgtagttt

SEQ ID NO: 1163029 - DNA, 15 bp, Homo sapiens
ttcaattttgtagtt

SEQ ID NO: 1163030 - DNA, 15 bp, Homo sapiens
gttcaattttgtagt

SEQ ID NO: 1163031 - DNA, 15 bp, Homo sapiens
tgttcaattttgtag

SEQ ID NO: 1163032 - DNA, 15 bp, Homo sapiens
ctgttcaattttgta

SEQ ID NO: 1163033 - DNA, 15 bp, Homo sapiens
gctgttcaattttgt

SEQ ID NO: 1163034 - DNA, 15 bp, Homo sapiens
cgctgttcaattttg

SEQ ID NO: 1163035 - DNA, 15 bp, Homo sapiens
tcgctgttcaatttt

SEQ ID NO: 1163036 - DNA, 15 bp, Homo sapiens
ctcgctgttcaattt

SEQ ID NO: 1163037 - DNA, 15 bp, Homo sapiens
cctcgctgttcaatt

SEQ ID NO: 1163038 - DNA, 15 bp, Homo sapiens
tcctcgctgttcaat

SEQ ID NO: 1163039 - DNA, 15 bp, Homo sapiens
ctcctcgctgttcaa

SEQ ID NO: 1163040 - DNA, 15 bp, Homo sapiens
cctcctcgctgttca

SEQ ID NO: 1163041 - DNA, 15 bp, Homo sapiens
tcctcctcgctgttc

SEQ ID NO: 1163042 - DNA, 15 bp, Homo sapiens
ttcctcctcgctgtt

SEQ ID NO: 1163043 - DNA, 15 bp, Homo sapiens
tttcctcctcgctgt

SEQ ID NO: 1163044 - DNA, 15 bp, Homo sapiens
ttttcctcctcgctg

SEQ ID NO: 1163045 - DNA, 15 bp, Homo sapiens
tttttcctcctcgct

SEQ ID NO: 1163046 - DNA, 15 bp, Homo sapiens
ttttttcctcctcgc

SEQ ID NO: 1163047 - DNA, 15 bp, Homo sapiens
attttttcctcctcg

SEQ ID NO: 1163048 - DNA, 15 bp, Homo sapiens
aattttttcctcctc

SEQ ID NO: 1163049 - DNA, 15 bp, Homo sapiens
gaattttttcctcct

SEQ ID NO: 1163050 - DNA, 15 bp, Homo sapiens
agaattttttcctcc

SEQ ID NO: 1163051 - DNA, 15 bp, Homo sapiens
cagaattttttcctc

SEQ ID NO: 1163052 - DNA, 15 bp, Homo sapiens
tcagaattttttcct

SEQ ID NO: 1163053 - DNA, 15 bp, Homo sapiens
gtcagaattttttcc

SEQ ID NO: 1163054 - DNA, 15 bp, Homo sapiens
tgtcagaattttttc

SEQ ID NO: 1163055 - DNA, 15 bp, Homo sapiens
ttgtcagaatttttt

SEQ ID NO: 1163056 - DNA, 15 bp, Homo sapiens
attgtcagaattttt

SEQ ID NO: 1163057 - DNA, 15 bp, Homo sapiens
cattgtcagaatttt

SEQ ID NO: 1163058 - DNA, 15 bp, Homo sapiens
acattgtcagaattt

SEQ ID NO: 1163059 - DNA, 15 bp, Homo sapiens
cacattgtcagaatt

SEQ ID NO: 1163060 - DNA, 15 bp, Homo sapiens
tcacattgtcagaat

SEQ ID NO: 1163061 - DNA, 15 bp, Homo sapiens
atcacattgtcagaa

SEQ ID NO: 1163062 - DNA, 15 bp, Homo sapiens
aatcacattgtcaga

SEQ ID NO: 1163063 - DNA, 15 bp, Homo sapiens
gaatcacattgtcag

SEQ ID NO: 1163064 - DNA, 15 bp, Homo sapiens
tgaatcacattgtca

SEQ ID NO: 1163065 - DNA, 15 bp, Homo sapiens
ttgaatcacattgtc

SEQ ID NO: 1163066 - DNA, 15 bp, Homo sapiens
gttgaatcacattgt

SEQ ID NO: 1163067 - DNA, 15 bp, Homo sapiens
tgttgaatcacattg

SEQ ID NO: 1163068 - DNA, 15 bp, Homo sapiens
atgttgaatcacatt

SEQ ID NO: 1163069 - DNA, 15 bp, Homo sapiens
aatgttgaatcacat

SEQ ID NO: 1163070 - DNA, 15 bp, Homo sapiens
taatgttgaatcaca

SEQ ID NO: 1163071 - DNA, 15 bp, Homo sapiens
ttaatgttgaatcac

SEQ ID NO: 1163072 - DNA, 15 bp, Homo sapiens
attaatgttgaatca

SEQ ID NO: 1163073 - DNA, 15 bp, Homo sapiens
gattaatgttgaatc

SEQ ID NO: 1163074 - DNA, 15 bp, Homo sapiens
ggattaatgttgaat

SEQ ID NO: 1163075 - DNA, 15 bp, Homo sapiens
aggattaatgttgaa

SEQ ID NO: 1163076 - DNA, 15 bp, Homo sapiens
aaggattaatgttga

SEQ ID NO: 1163077 - DNA, 15 bp, Homo sapiens
aaaggattaatgttg

SEQ ID NO: 1163078 - DNA, 15 bp, Homo sapiens
taaaggattaatgtt

SEQ ID NO: 1163079 - DNA, 15 bp, Homo sapiens
ttaaaggattaatgt

SEQ ID NO: 1163080 - DNA, 15 bp, Homo sapiens
tttaaaggattaatg

SEQ ID NO: 1163081 - DNA, 15 bp, Homo sapiens
ttttaaaggattaat

SEQ ID NO: 1163082 - DNA, 15 bp, Homo sapiens
cttttaaaggattaa

SEQ ID NO: 1163083 - DNA, 15 bp, Homo sapiens
acttttaaaggatta

SEQ ID NO: 1163084 - DNA, 15 bp, Homo sapiens
gacttttaaaggatt

SEQ ID NO: 1163085 - DNA, 15 bp, Homo sapiens
tgacttttaaaggat

SEQ ID NO: 1163086 - DNA, 15 bp, Homo sapiens
gtgacttttaaagga

SEQ ID NO: 1163087 - DNA, 15 bp, Homo sapiens
agtgacttttaaagg

SEQ ID NO: 1163088 - DNA, 15 bp, Homo sapiens
cagtgacttttaaag

SEQ ID NO: 1163089 - DNA, 15 bp, Homo sapiens
acagtgacttttaaa

SEQ ID NO: 1163090 - DNA, 15 bp, Homo sapiens
tacagtgacttttaa

SEQ ID NO: 1163091 - DNA, 15 bp, Homo sapiens
ttacagtgactttta

SEQ ID NO: 1163092 - DNA, 15 bp, Homo sapiens
gttacagtgactttt

SEQ ID NO: 1163093 - DNA, 15 bp, Homo sapiens
tgttacagtgacttt

SEQ ID NO: 1163094 - DNA, 15 bp, Homo sapiens
ttgttacagtgactt

SEQ ID NO: 1163095 - DNA, 15 bp, Homo sapiens
tttgttacagtgact

SEQ ID NO: 1163096 - DNA, 15 bp, Homo sapiens
atttgttacagtgac

SEQ ID NO: 1163097 - DNA, 15 bp, Homo sapiens
aatttgttacagtga

SEQ ID NO: 1163098 - DNA, 15 bp, Homo sapiens
aaatttgttacagtg

SEQ ID NO: 1163099 - DNA, 15 bp, Homo sapiens
taaatttgttacagt

SEQ ID NO: 1163100 - DNA, 15 bp, Homo sapiens
ttaaatttgttacag

SEQ ID NO: 1163101 - DNA, 15 bp, Homo sapiens
tttaaatttgttaca

SEQ ID NO: 1163102 - DNA, 15 bp, Homo sapiens
gtttaaatttgttac

SEQ ID NO: 1163103 - DNA, 15 bp, Homo sapiens
tgtttaaatttgtta

SEQ ID NO: 1163104 - DNA, 15 bp, Homo sapiens
atgtttaaatttgtt

SEQ ID NO: 1163105 - DNA, 15 bp, Homo sapiens
tatgtttaaatttgt

SEQ ID NO: 1163106 - DNA, 15 bp, Homo sapiens
ttatgtttaaatttg

SEQ ID NO: 1163107 - DNA, 15 bp, Homo sapiens
cttatgtttaaattt

SEQ ID NO: 1163108 - DNA, 15 bp, Homo sapiens
acttatgtttaaatt

SEQ ID NO: 1163109 - DNA, 15 bp, Homo sapiens
cacttatgtttaaat

SEQ ID NO: 1163110 - DNA, 15 bp, Homo sapiens
gcacttatgtttaaa

SEQ ID NO: 1163111 - DNA, 15 bp, Homo sapiens
agcacttatgtttaa

SEQ ID NO: 1163112 - DNA, 15 bp, Homo sapiens
aagcacttatgttta

SEQ ID NO: 1163113 - DNA, 15 bp, Homo sapiens
aaagcacttatgttt

SEQ ID NO: 1163114 - DNA, 15 bp, Homo sapiens
taaagcacttatgtt

SEQ ID NO: 1163115 - DNA, 15 bp, Homo sapiens
ataaagcacttatgt

SEQ ID NO: 1163116 - DNA, 15 bp, Homo sapiens
aataaagcacttatg

SEQ ID NO: 1163117 - DNA, 15 bp, Homo sapiens
aaataaagcacttat

SEQ ID NO: 1163118 - DNA, 15 bp, Homo sapiens
aaaataaagcactta

SEQ ID NO: 1163119 - DNA, 15 bp, Homo sapiens
aaaaataaagcactt

SEQ ID NO: 1163120 - DNA, 15 bp, Homo sapiens
gaaaaataaagcact

SEQ ID NO: 1163121 - DNA, 15 bp, Homo sapiens
agaaaaataaagcac

SEQ ID NO: 1163122 - DNA, 15 bp, Homo sapiens
tagaaaaataaagca

SEQ ID NO: 1163123 - DNA, 15 bp, Homo sapiens
atagaaaaataaagc

SEQ ID NO: 1163124 - DNA, 15 bp, Homo sapiens
aatagaaaaataaag

SEQ ID NO: 1163125 - DNA, 15 bp, Homo sapiens
gaatagaaaaataaa

SEQ ID NO: 1163126 - DNA, 15 bp, Homo sapiens
tgaatagaaaaataa

SEQ ID NO: 1163127 - DNA, 15 bp, Homo sapiens
gtgaatagaaaaata

SEQ ID NO: 1163128 - DNA, 15 bp, Homo sapiens
tgtgaatagaaaaat

SEQ ID NO: 1163129 - DNA, 15 bp, Homo sapiens
ttgtgaatagaaaaa

SEQ ID NO: 1163130 - DNA, 15 bp, Homo sapiens
tttgtgaatagaaaa

SEQ ID NO: 1163131 - DNA, 15 bp, Homo sapiens
ttttgtgaatagaaa

SEQ ID NO: 1163132 - DNA, 15 bp, Homo sapiens
gttttgtgaatagaa

SEQ ID NO: 1163133 - DNA, 15 bp, Homo sapiens
agttttgtgaataga

SEQ ID NO: 1163134 - DNA, 15 bp, Homo sapiens
tagttttgtgaatag

SEQ ID NO: 1163135 - DNA, 15 bp, Homo sapiens
ttagttttgtgaata

SEQ ID NO: 1163136 - DNA, 15 bp, Homo sapiens
attagttttgtgaat

SEQ ID NO: 1163137 - DNA, 15 bp, Homo sapiens
aattagttttgtgaa

SEQ ID NO: 1163138 - DNA, 15 bp, Homo sapiens
taattagttttgtga

SEQ ID NO: 1163139 - DNA, 15 bp, Homo sapiens
ataattagttttgtg

SEQ ID NO: 1163140 - DNA, 15 bp, Homo sapiens
tataattagttttgt

SEQ ID NO: 1163141 - DNA, 15 bp, Homo sapiens
ttataattagttttg

SEQ ID NO: 1163142 - DNA, 15 bp, Homo sapiens
attataattagtttt

SEQ ID NO: 1163143 - DNA, 15 bp, Homo sapiens
tattataattagttt

SEQ ID NO: 1163144 - DNA, 15 bp, Homo sapiens
gtattataattagtt

SEQ ID NO: 1163145 - DNA, 15 bp, Homo sapiens
tgtattataattagt

SEQ ID NO: 1163146 - DNA, 15 bp, Homo sapiens
gtgtattataattag

SEQ ID NO: 1163147 - DNA, 15 bp, Homo sapiens
ggtgtattataatta

SEQ ID NO: 1163148 - DNA, 15 bp, Homo sapiens
tggtgtattataatt

SEQ ID NO: 1163149 - DNA, 15 bp, Homo sapiens
gtggtgtattataat

SEQ ID NO: 1163150 - DNA, 15 bp, Homo sapiens
tgtggtgtattataa

SEQ ID NO: 1163151 - DNA, 15 bp, Homo sapiens
ttgtggtgtattata

SEQ ID NO: 1163152 - DNA, 15 bp, Homo sapiens
attgtggtgtattat

SEQ ID NO: 1163153 - DNA, 15 bp, Homo sapiens
cattgtggtgtatta

SEQ ID NO: 1163154 - DNA, 15 bp, Homo sapiens
tcattgtggtgtatt

SEQ ID NO: 1163155 - DNA, 15 bp, Homo sapiens
ttcattgtggtgtat

SEQ ID NO: 1163156 - DNA, 15 bp, Homo sapiens
attcattgtggtgta

SEQ ID NO: 1163157 - DNA, 15 bp, Homo sapiens
aattcattgtggtgt

SEQ ID NO: 1163158 - DNA, 15 bp, Homo sapiens
aaattcattgtggtg

SEQ ID NO: 1163159 - DNA, 15 bp, Homo sapiens
aaaattcattgtggt

SEQ ID NO: 1163160 - DNA, 15 bp, Homo sapiens
caaaattcattgtgg

SEQ ID NO: 1163161 - DNA, 15 bp, Homo sapiens
acaaaattcattgtg

SEQ ID NO: 1163162 - DNA, 15 bp, Homo sapiens
aacaaaattcattgt

SEQ ID NO: 1163163 - DNA, 15 bp, Homo sapiens
taacaaaattcattg

SEQ ID NO: 1163164 - DNA, 15 bp, Homo sapiens
gtaacaaaattcatt

SEQ ID NO: 1163165 - DNA, 15 bp, Homo sapiens
cgtaacaaaattcat

SEQ ID NO: 1163166 - DNA, 15 bp, Homo sapiens
ccgtaacaaaattca

SEQ ID NO: 1163167 - DNA, 15 bp, Homo sapiens
accgtaacaaaattc

SEQ ID NO: 1163168 - DNA, 15 bp, Homo sapiens
aaccgtaacaaaatt

SEQ ID NO: 1163169 - DNA, 15 bp, Homo sapiens
aaaccgtaacaaaat

SEQ ID NO: 1163170 - DNA, 15 bp, Homo sapiens
aaaaccgtaacaaaa

SEQ ID NO: 1163171 - DNA, 15 bp, Homo sapiens
taaaaccgtaacaaa

SEQ ID NO: 1163172 - DNA, 15 bp, Homo sapiens
ataaaaccgtaacaa

SEQ ID NO: 1163173 - DNA, 15 bp, Homo sapiens
cataaaaccgtaaca

SEQ ID NO: 1163174 - DNA, 15 bp, Homo sapiens
acataaaaccgtaac

SEQ ID NO: 1163175 - DNA, 15 bp, Homo sapiens
cacataaaaccgtaa

SEQ ID NO: 1163176 - DNA, 15 bp, Homo sapiens
acacataaaaccgta

SEQ ID NO: 1163177 - DNA, 15 bp, Homo sapiens
cacacataaaaccgt

SEQ ID NO: 1163178 - DNA, 15 bp, Homo sapiens
acacacataaaaccg

SEQ ID NO: 1163179 - DNA, 15 bp, Homo sapiens
tacacacataaaacc

SEQ ID NO: 1163180 - DNA, 15 bp, Homo sapiens
ttacacacataaaac

SEQ ID NO: 1163181 - DNA, 15 bp, Homo sapiens
attacacacataaaa

SEQ ID NO: 1163182 - DNA, 15 bp, Homo sapiens
tattacacacataaa

SEQ ID NO: 1163183 - DNA, 15 bp, Homo sapiens
ctattacacacataa

SEQ ID NO: 1163184 - DNA, 15 bp, Homo sapiens
tctattacacacata

SEQ ID NO: 1163185 - DNA, 15 bp, Homo sapiens
ctctattacacacat

SEQ ID NO: 1163186 - DNA, 15 bp, Homo sapiens
cctctattacacaca

SEQ ID NO: 1163187 - DNA, 15 bp, Homo sapiens
ccctctattacacac

SEQ ID NO: 1163188 - DNA, 15 bp, Homo sapiens
accctctattacaca

SEQ ID NO: 1163189 - DNA, 15 bp, Homo sapiens
taccctctattacac

SEQ ID NO: 1163190 - DNA, 15 bp, Homo sapiens
ataccctctattaca

SEQ ID NO: 1163191 - DNA, 15 bp, Homo sapiens
tataccctctattac

SEQ ID NO: 1163192 - DNA, 15 bp, Homo sapiens
gtataccctctatta

SEQ ID NO: 1163193 - DNA, 15 bp, Homo sapiens
tgtataccctctatt

SEQ ID NO: 1163194 - DNA, 15 bp, Homo sapiens
atgtataccctctat

SEQ ID NO: 1163195 - DNA, 15 bp, Homo sapiens
gatgtataccctcta

SEQ ID NO: 1163196 - DNA, 15 bp, Homo sapiens
agatgtataccctct

SEQ ID NO: 1163197 - DNA, 15 bp, Homo sapiens
gagatgtataccctc

SEQ ID NO: 1163198 - DNA, 15 bp, Homo sapiens
ggagatgtataccct

SEQ ID NO: 1163199 - DNA, 15 bp, Homo sapiens
tggagatgtataccc

SEQ ID NO: 1163200 - DNA, 15 bp, Homo sapiens
atggagatgtatacc

SEQ ID NO: 1163201 - DNA, 15 bp, Homo sapiens
tatggagatgtatac

SEQ ID NO: 1163202 - DNA, 15 bp, Homo sapiens
gtatggagatgtata

SEQ ID NO: 1163203 - DNA, 15 bp, Homo sapiens
agtatggagatgtat

SEQ ID NO: 1163204 - DNA, 15 bp, Homo sapiens
tagtatggagatgta

SEQ ID NO: 1163205 - DNA, 15 bp, Homo sapiens
gtagtatggagatgt

SEQ ID NO: 1163206 - DNA, 15 bp, Homo sapiens
agtagtatggagatg

SEQ ID NO: 1163207 - DNA, 15 bp, Homo sapiens
tagtagtatggagat

SEQ ID NO: 1163208 - DNA, 15 bp, Homo sapiens
ctagtagtatggaga

SEQ ID NO: 1163209 - DNA, 15 bp, Homo sapiens
gctagtagtatggag

SEQ ID NO: 1163210 - DNA, 15 bp, Homo sapiens
agctagtagtatgga

SEQ ID NO: 1163211 - DNA, 15 bp, Homo sapiens
tagctagtagtatgg

SEQ ID NO: 1163212 - DNA, 15 bp, Homo sapiens
ttagctagtagtatg

SEQ ID NO: 1163213 - DNA, 15 bp, Homo sapiens
attagctagtagtat

SEQ ID NO: 1163214 - DNA, 15 bp, Homo sapiens
aattagctagtagta

SEQ ID NO: 1163215 - DNA, 15 bp, Homo sapiens
aaattagctagtagt

SEQ ID NO: 1163216 - DNA, 15 bp, Homo sapiens
caaattagctagtag

SEQ ID NO: 1163217 - DNA, 15 bp, Homo sapiens
acaaattagctagta

SEQ ID NO: 1163218 - DNA, 15 bp, Homo sapiens
gacaaattagctagt

SEQ ID NO: 1163219 - DNA, 15 bp, Homo sapiens
agacaaattagctag

SEQ ID NO: 1163220 - DNA, 15 bp, Homo sapiens
cagacaaattagcta

SEQ ID NO: 1163221 - DNA, 15 bp, Homo sapiens
acagacaaattagct

SEQ ID NO: 1163222 - DNA, 15 bp, Homo sapiens
caaacagacaaatta

SEQ ID NO: 1163223 - DNA, 15 bp, Homo sapiens
acaaacagacaaatt

SEQ ID NO: 1163224 - DNA, 15 bp, Homo sapiens
aacaaacagacaaat

SEQ ID NO: 1163225 - DNA, 15 bp, Homo sapiens
gaacaaacagacaaa

SEQ ID NO: 1163226 - DNA, 15 bp, Homo sapiens
tgaacaaacagacaa

SEQ ID NO: 1163227 - DNA, 15 bp, Homo sapiens
ttgaacaaacagaca

SEQ ID NO: 1163228 - DNA, 15 bp, Homo sapiens
tttgaacaaacagac

SEQ ID NO: 1163229 - DNA, 15 bp, Homo sapiens
ttttgaacaaacaga

SEQ ID NO: 1163230 - DNA, 15 bp, Homo sapiens
cttttgaacaaacag

SEQ ID NO: 1163231 - DNA, 15 bp, Homo sapiens
tcttttgaacaaaca

SEQ ID NO: 1163232 - DNA, 15 bp, Homo sapiens
ctcttttgaacaaac

SEQ ID NO: 1163233 - DNA, 15 bp, Homo sapiens
actcttttgaacaaa

SEQ ID NO: 1163234 - DNA, 15 bp, Homo sapiens
aactcttttgaacaa

SEQ ID NO: 1163235 - DNA, 15 bp, Homo sapiens
taactcttttgaaca

SEQ ID NO: 1163236 - DNA, 15 bp, Homo sapiens
ataactcttttgaac

SEQ ID NO: 1163237 - DNA, 15 bp, Homo sapiens
aataactcttttgaa

SEQ ID NO: 1163238 - DNA, 15 bp, Homo sapiens
aaataactcttttga

SEQ ID NO: 1163239 - DNA, 15 bp, Homo sapiens
aaaataactcttttg

SEQ ID NO: 1163240 - DNA, 15 bp, Homo sapiens
aaaaataactctttt

SEQ ID NO: 1163241 - DNA, 15 bp, Homo sapiens
gaaaaataactcttt

SEQ ID NO: 1163242 - DNA, 15 bp, Homo sapiens
agaaaaataactctt

SEQ ID NO: 1163243 - DNA, 15 bp, Homo sapiens
gagaaaaataactct

SEQ ID NO: 1163244 - DNA, 15 bp, Homo sapiens
agagaaaaataactc

SEQ ID NO: 1163245 - DNA, 15 bp, Homo sapiens
aagagaaaaataact

SEQ ID NO: 1163246 - DNA, 15 bp, Homo sapiens
aaagagaaaaataac

SEQ ID NO: 1163247 - DNA, 15 bp, Homo sapiens
aaaagagaaaaataa

SEQ ID NO: 1163248 - DNA, 15 bp, Homo sapiens
aaaaagagaaaaata

SEQ ID NO: 1163249 - DNA, 15 bp, Homo sapiens
gaaaaaaagagaaaa

SEQ ID NO: 1163250 - DNA, 15 bp, Homo sapiens
gaagaaaaaaagaga

SEQ ID NO: 1163251 - DNA, 15 bp, Homo sapiens
agaagaaaaaaagag

SEQ ID NO: 1163252 - DNA, 15 bp, Homo sapiens
aagaagaaaaaaaga

SEQ ID NO: 1163253 - DNA, 15 bp, Homo sapiens
aaagaagaaaaaaag

SEQ ID NO: 1163254 - DNA, 15 bp, Homo sapiens
caaagaagaaaaaaa

SEQ ID NO: 1163255 - DNA, 15 bp, Homo sapiens
tcaaagaagaaaaaa

SEQ ID NO: 1163256 - DNA, 15 bp, Homo sapiens
ctcaaagaagaaaaa

SEQ ID NO: 1163257 - DNA, 15 bp, Homo sapiens
tctcaaagaagaaaa

SEQ ID NO: 1163258 - DNA, 15 bp, Homo sapiens
gtctcaaagaagaaa

SEQ ID NO: 1163259 - DNA, 15 bp, Homo sapiens
tgtctcaaagaagaa

SEQ ID NO: 1163260 - DNA, 15 bp, Homo sapiens
ctgtctcaaagaaga

SEQ ID NO: 1163261 - DNA, 15 bp, Homo sapiens
cctgtctcaaagaag

SEQ ID NO: 1163262 - DNA, 15 bp, Homo sapiens
cgtgagaccctgtct

SEQ ID NO: 1163263 - DNA, 15 bp, Homo sapiens
gcgtgagaccctgtc

SEQ ID NO: 1163264 - DNA, 15 bp, Homo sapiens
agcgtgagaccctgt

SEQ ID NO: 1163265 - DNA, 15 bp, Homo sapiens
gagcgtgagaccctg

SEQ ID NO: 1163266 - DNA, 15 bp, Homo sapiens
agagcgtgagaccct

SEQ ID NO: 1163267 - DNA, 15 bp, Homo sapiens
aagagcgtgagaccc

SEQ ID NO: 1163268 - DNA, 15 bp, Homo sapiens
caagagcgtgagacc

SEQ ID NO: 1163269 - DNA, 15 bp, Homo sapiens
gcaagagcgtgagac

SEQ ID NO: 1163270 - DNA, 15 bp, Homo sapiens
ggcaagagcgtgaga

SEQ ID NO: 1163271 - DNA, 15 bp, Homo sapiens
gggcaagagcgtgag

SEQ ID NO: 1163272 - DNA, 15 bp, Homo sapiens
tgggcaagagcgtga

SEQ ID NO: 1163273 - DNA, 15 bp, Homo sapiens
ctgggcaagagcgtg

SEQ ID NO: 1163274 - DNA, 15 bp, Homo sapiens
cctgggcaagagcgt

SEQ ID NO: 1163275 - DNA, 15 bp, Homo sapiens
gcctgggcaagagcg

SEQ ID NO: 1163276 - DNA, 15 bp, Homo sapiens
agcctgggcaagagc

SEQ ID NO: 1163277 - DNA, 15 bp, Homo sapiens
tagcctgggcaagag

SEQ ID NO: 1163278 - DNA, 15 bp, Homo sapiens
atagcctgggcaaga

SEQ ID NO: 1163279 - DNA, 15 bp, Homo sapiens
tatagcctgggcaag

SEQ ID NO: 1163280 - DNA, 15 bp, Homo sapiens
ctatagcctgggcaa

SEQ ID NO: 1163281 - DNA, 15 bp, Homo sapiens
gctatagcctgggca

SEQ ID NO: 1163282 - DNA, 15 bp, Homo sapiens
tgctatagcctgggc

SEQ ID NO: 1163283 - DNA, 15 bp, Homo sapiens
atgctatagcctggg

SEQ ID NO: 1163284 - DNA, 15 bp, Homo sapiens
tatgctatagcctgg

SEQ ID NO: 1163285 - DNA, 15 bp, Homo sapiens
ttatgctatagcctg

SEQ ID NO: 1163286 - DNA, 15 bp, Homo sapiens
cttatgctatagcct

SEQ ID NO: 1163287 - DNA, 15 bp, Homo sapiens
ccttatgctatagcc

SEQ ID NO: 1163288 - DNA, 15 bp, Homo sapiens
cccttatgctatagc

SEQ ID NO: 1163289 - DNA, 15 bp, Homo sapiens
gcccttatgctatag

SEQ ID NO: 1163290 - DNA, 15 bp, Homo sapiens
tgcccttatgctata

SEQ ID NO: 1163291 - DNA, 15 bp, Homo sapiens
gtgcccttatgctat

SEQ ID NO: 1163292 - DNA, 15 bp, Homo sapiens
tgtgcccttatgcta

SEQ ID NO: 1163293 - DNA, 15 bp, Homo sapiens
atgtgcccttatgct

SEQ ID NO: 1163294 - DNA, 15 bp, Homo sapiens
gatgtgcccttatgc

SEQ ID NO: 1163295 - DNA, 15 bp, Homo sapiens
tgatgtgcccttatg

SEQ ID NO: 1163296 - DNA, 15 bp, Homo sapiens
gtgatgtgcccttat

SEQ ID NO: 1163297 - DNA, 15 bp, Homo sapiens
tgtgatgtgccctta

SEQ ID NO: 1163298 - DNA, 15 bp, Homo sapiens
ctgtgatgtgccctt

SEQ ID NO: 1163299 - DNA, 15 bp, Homo sapiens
gctgtgatgtgccct

SEQ ID NO: 1163300 - DNA, 15 bp, Homo sapiens
agctgtgatgtgccc

SEQ ID NO: 1163301 - DNA, 15 bp, Homo sapiens
gagctgtgatgtgcc

SEQ ID NO: 1163302 - DNA, 15 bp, Homo sapiens
tgagctgtgatgtgc

SEQ ID NO: 1163303 - DNA, 15 bp, Homo sapiens
gtgagctgtgatgtg

SEQ ID NO: 1163304 - DNA, 15 bp, Homo sapiens
agtgagctgtgatgt

SEQ ID NO: 1163305 - DNA, 15 bp, Homo sapiens
tggctgcagtgagct

SEQ ID NO: 1163306 - DNA, 15 bp, Homo sapiens
gtggctgcagtgagc

SEQ ID NO: 1163307 - DNA, 15 bp, Homo sapiens
tgtggctgcagtgag

SEQ ID NO: 1163308 - DNA, 15 bp, Homo sapiens
ttgtggctgcagtga

SEQ ID NO: 1163309 - DNA, 15 bp, Homo sapiens
gttgtggctgcagtg

SEQ ID NO: 1163310 - DNA, 15 bp, Homo sapiens
ggttgtggctgcagt

SEQ ID NO: 1163311 - DNA, 15 bp, Homo sapiens
aggttgtggctgcag

SEQ ID NO: 1163312 - DNA, 15 bp, Homo sapiens
gaggttgtggctgca

SEQ ID NO: 1163313 - DNA, 15 bp, Homo sapiens
ggaggttgtggctgc

SEQ ID NO: 1163314 - DNA, 15 bp, Homo sapiens
aggaggttgtggctg

SEQ ID NO: 1163315 - DNA, 15 bp, Homo sapiens
caggaggttgtggct

SEQ ID NO: 1163316 - DNA, 15 bp, Homo sapiens
ccaggaggttgtggc

SEQ ID NO: 1163317 - DNA, 15 bp, Homo sapiens
cccaggaggttgtgg

SEQ ID NO: 1163318 - DNA, 15 bp, Homo sapiens
gcccaggaggttgtg

SEQ ID NO: 1163319 - DNA, 15 bp, Homo sapiens
agcccaggaggttgt

SEQ ID NO: 1163320 - DNA, 15 bp, Homo sapiens
tgagcccaggaggtt

SEQ ID NO: 1163321 - DNA, 15 bp, Homo sapiens
gttgagcccaggagg

SEQ ID NO: 1163322 - DNA, 15 bp, Homo sapiens
ggttgagcccaggag

SEQ ID NO: 1163323 - DNA, 15 bp, Homo sapiens
cggttgagcccagga

SEQ ID NO: 1163324 - DNA, 15 bp, Homo sapiens
tcggttgagcccagg

SEQ ID NO: 1163325 - DNA, 15 bp, Homo sapiens
atcggttgagcccag

SEQ ID NO: 1163326 - DNA, 15 bp, Homo sapiens
gatcggttgagccca

SEQ ID NO: 1163327 - DNA, 15 bp, Homo sapiens
ggatcggttgagccc

SEQ ID NO: 1163328 - DNA, 15 bp, Homo sapiens
aggatcggttgagcc

SEQ ID NO: 1163329 - DNA, 15 bp, Homo sapiens
gaggatcggttgagc

SEQ ID NO: 1163330 - DNA, 15 bp, Homo sapiens
ggaggatcggttgag

SEQ ID NO: 1163331 - DNA, 15 bp, Homo sapiens
aggaggatcggttga

SEQ ID NO: 1163332 - DNA, 15 bp, Homo sapiens
caggaggatcggttg

SEQ ID NO: 1163333 - DNA, 15 bp, Homo sapiens
acaggaggatcggtt

SEQ ID NO: 1163334 - DNA, 15 bp, Homo sapiens
gacaggaggatcggt

SEQ ID NO: 1163335 - DNA, 15 bp, Homo sapiens
agacaggaggatcgg

SEQ ID NO: 1163336 - DNA, 15 bp, Homo sapiens
gagacaggaggatcg

SEQ ID NO: 1163337 - DNA, 15 bp, Homo sapiens
tgagacaggaggatc

SEQ ID NO: 1163338 - DNA, 15 bp, Homo sapiens
ctgagacaggaggat

SEQ ID NO: 1163339 - DNA, 15 bp, Homo sapiens
gctgagacaggagga

SEQ ID NO: 1163340 - DNA, 15 bp, Homo sapiens
ggctgagacaggagg

SEQ ID NO: 1163341 - DNA, 15 bp, Homo sapiens
aaggctgagacagga

SEQ ID NO: 1163342 - DNA, 15 bp, Homo sapiens
gaaggctgagacagg

SEQ ID NO: 1163343 - DNA, 15 bp, Homo sapiens
tgaaggctgagacag

SEQ ID NO: 1163344 - DNA, 15 bp, Homo sapiens
ttgaaggctgagaca

SEQ ID NO: 1163345 - DNA, 15 bp, Homo sapiens
cttgaaggctgagac

SEQ ID NO: 1163346 - DNA, 15 bp, Homo sapiens
acttgaaggctgaga

SEQ ID NO: 1163347 - DNA, 15 bp, Homo sapiens
tacttgaaggctgag

SEQ ID NO: 1163348 - DNA, 15 bp, Homo sapiens
ctacttgaaggctga

SEQ ID NO: 1163349 - DNA, 15 bp, Homo sapiens
gctacttgaaggctg

SEQ ID NO: 1163350 - DNA, 15 bp, Homo sapiens
agctacttgaaggct

SEQ ID NO: 1163351 - DNA, 15 bp, Homo sapiens
aagctacttgaaggc

SEQ ID NO: 1163352 - DNA, 15 bp, Homo sapiens
caagctacttgaagg

SEQ ID NO: 1163353 - DNA, 15 bp, Homo sapiens
ccaagctacttgaag

SEQ ID NO: 1163354 - DNA, 15 bp, Homo sapiens
tccaagctacttgaa

SEQ ID NO: 1163355 - DNA, 15 bp, Homo sapiens
gtccaagctacttga

SEQ ID NO: 1163356 - DNA, 15 bp, Homo sapiens
agtccaagctacttg

SEQ ID NO: 1163357 - DNA, 15 bp, Homo sapiens
tagtccaagctactt

SEQ ID NO: 1163358 - DNA, 15 bp, Homo sapiens
gtagtccaagctact

SEQ ID NO: 1163359 - DNA, 15 bp, Homo sapiens
tgtagtccaagctac

SEQ ID NO: 1163360 - DNA, 15 bp, Homo sapiens
ctgtagtccaagcta

SEQ ID NO: 1163361 - DNA, 15 bp, Homo sapiens
cctgtagtccaagct

SEQ ID NO: 1163362 - DNA, 15 bp, Homo sapiens
gcctgtagtccaagc

SEQ ID NO: 1163363 - DNA, 15 bp, Homo sapiens
tgcctgtagtccaag

SEQ ID NO: 1163364 - DNA, 15 bp, Homo sapiens
gtgcctgtagtccaa

SEQ ID NO: 1163365 - DNA, 15 bp, Homo sapiens
tgtgcctgtagtcca

SEQ ID NO: 1163366 - DNA, 15 bp, Homo sapiens
atgtgtgcctgtagt

SEQ ID NO: 1163367 - DNA, 15 bp, Homo sapiens
catgtgtgcctgtag

SEQ ID NO: 1163368 - DNA, 15 bp, Homo sapiens
gcatgtgtgcctgta

SEQ ID NO: 1163369 - DNA, 15 bp, Homo sapiens
tgcatgtgtgcctgt

SEQ ID NO: 1163370 - DNA, 15 bp, Homo sapiens
gtgcatgtgtgcctg

SEQ ID NO: 1163371 - DNA, 15 bp, Homo sapiens
ggtgcatgtgtgcct

SEQ ID NO: 1163372 - DNA, 15 bp, Homo sapiens
tggtgcatgtgtgcc

SEQ ID NO: 1163373 - DNA, 15 bp, Homo sapiens
gtggtgcatgtgtgc

SEQ ID NO: 1163374 - DNA, 15 bp, Homo sapiens
ggtggtgcatgtgtg

SEQ ID NO: 1163375 - DNA, 15 bp, Homo sapiens
tggtggtgcatgtgt

SEQ ID NO: 1163376 - DNA, 15 bp, Homo sapiens
atggtggtgcatgtg

SEQ ID NO: 1163377 - DNA, 15 bp, Homo sapiens
tatggtggtgcatgt

SEQ ID NO: 1163378 - DNA, 15 bp, Homo sapiens
cgggtatggtggtgc

SEQ ID NO: 1163379 - DNA, 15 bp, Homo sapiens
ccgggtatggtggtg

SEQ ID NO: 1163380 - DNA, 15 bp, Homo sapiens
gccgggtatggtggt

SEQ ID NO: 1163381 - DNA, 15 bp, Homo sapiens
agccgggtatggtgg

SEQ ID NO: 1163382 - DNA, 15 bp, Homo sapiens
tagccgggtatggtg

SEQ ID NO: 1163383 - DNA, 15 bp, Homo sapiens
ttagccgggtatggt

SEQ ID NO: 1163384 - DNA, 15 bp, Homo sapiens
cttagccgggtatgg

SEQ ID NO: 1163385 - DNA, 15 bp, Homo sapiens
acttagccgggtatg

SEQ ID NO: 1163386 - DNA, 15 bp, Homo sapiens
aacttagccgggtat

SEQ ID NO: 1163387 - DNA, 15 bp, Homo sapiens
aaacttagccgggta

SEQ ID NO: 1163388 - DNA, 15 bp, Homo sapiens
aaaacttagccgggt

SEQ ID NO: 1163389 - DNA, 15 bp, Homo sapiens
aaaaacttagccggg

SEQ ID NO: 1163390 - DNA, 15 bp, Homo sapiens
caaaaacttagccgg

SEQ ID NO: 1163391 - DNA, 15 bp, Homo sapiens
tcaaaaacttagccg

SEQ ID NO: 1163392 - DNA, 15 bp, Homo sapiens
atcaaaaacttagcc

SEQ ID NO: 1163393 - DNA, 15 bp, Homo sapiens
gatcaaaaacttagc

SEQ ID NO: 1163394 - DNA, 15 bp, Homo sapiens
agatcaaaaacttag

SEQ ID NO: 1163395 - DNA, 15 bp, Homo sapiens
aagatcaaaaactta

SEQ ID NO: 1163396 - DNA, 15 bp, Homo sapiens
caagatcaaaaactt

SEQ ID NO: 1163397 - DNA, 15 bp, Homo sapiens
acaagatcaaaaact

SEQ ID NO: 1163398 - DNA, 15 bp, Homo sapiens
tacaagatcaaaaac

SEQ ID NO: 1163399 - DNA, 15 bp, Homo sapiens
ctacaagatcaaaaa

SEQ ID NO: 1163400 - DNA, 15 bp, Homo sapiens
tctacaagatcaaaa

SEQ ID NO: 1163401 - DNA, 15 bp, Homo sapiens
ctctacaagatcaaa

SEQ ID NO: 1163402 - DNA, 15 bp, Homo sapiens
tctctacaagatcaa

SEQ ID NO: 1163403 - DNA, 15 bp, Homo sapiens
gtctctacaagatca

SEQ ID NO: 1163404 - DNA, 15 bp, Homo sapiens
tgtctctacaagatc

SEQ ID NO: 1163405 - DNA, 15 bp, Homo sapiens
ctgtctctacaagat

SEQ ID NO: 1163406 - DNA, 15 bp, Homo sapiens
cctgtctctacaaga

SEQ ID NO: 1163407 - DNA, 15 bp, Homo sapiens
tcctgtctctacaag

SEQ ID NO: 1163408 - DNA, 15 bp, Homo sapiens
gtcctgtctctacaa

SEQ ID NO: 1163409 - DNA, 15 bp, Homo sapiens
ggtcctgtctctaca

SEQ ID NO: 1163410 - DNA, 15 bp, Homo sapiens
aggtcctgtctctac

SEQ ID NO: 1163411 - DNA, 15 bp, Homo sapiens
aaggtcctgtctcta

SEQ ID NO: 1163412 - DNA, 15 bp, Homo sapiens
taaggtcctgtctct

SEQ ID NO: 1163413 - DNA, 15 bp, Homo sapiens
gtaaggtcctgtctc

SEQ ID NO: 1163414 - DNA, 15 bp, Homo sapiens
ggtaaggtcctgtct

SEQ ID NO: 1163415 - DNA, 15 bp, Homo sapiens
gggtaaggtcctgtc

SEQ ID NO: 1163416 - DNA, 15 bp, Homo sapiens
agggtaaggtcctgt

SEQ ID NO: 1163417 - DNA, 15 bp, Homo sapiens
cagggtaaggtcctg

SEQ ID NO: 1163418 - DNA, 15 bp, Homo sapiens
acagggtaaggtcct

SEQ ID NO: 1163419 - DNA, 15 bp, Homo sapiens
aacagggtaaggtcc

SEQ ID NO: 1163420 - DNA, 15 bp, Homo sapiens
caacagggtaaggtc

SEQ ID NO: 1163421 - DNA, 15 bp, Homo sapiens
gcaacagggtaaggt

SEQ ID NO: 1163422 - DNA, 15 bp, Homo sapiens
ggcaacagggtaagg

SEQ ID NO: 1163423 - DNA, 15 bp, Homo sapiens
gggcaacagggtaag

SEQ ID NO: 1163424 - DNA, 15 bp, Homo sapiens
tgggcaacagggtaa

SEQ ID NO: 1163425 - DNA, 15 bp, Homo sapiens
ctgggcaacagggta

SEQ ID NO: 1163426 - DNA, 15 bp, Homo sapiens
cctgggcaacagggt

SEQ ID NO: 1163427 - DNA, 15 bp, Homo sapiens
gcctgggcaacaggg

SEQ ID NO: 1163428 - DNA, 15 bp, Homo sapiens
agcctgggcaacagg

SEQ ID NO: 1163429 - DNA, 15 bp, Homo sapiens
ctaggagtttgagac

SEQ ID NO: 1163430 - DNA, 15 bp, Homo sapiens
gctaggagtttgaga

SEQ ID NO: 1163431 - DNA, 15 bp, Homo sapiens
agctaggagtttgag

SEQ ID NO: 1163432 - DNA, 15 bp, Homo sapiens
aagctaggagtttga

SEQ ID NO: 1163433 - DNA, 15 bp, Homo sapiens
gaagctaggagtttg

SEQ ID NO: 1163434 - DNA, 15 bp, Homo sapiens
tgaagctaggagttt

SEQ ID NO: 1163435 - DNA, 15 bp, Homo sapiens
ttgaagctaggagtt

SEQ ID NO: 1163436 - DNA, 15 bp, Homo sapiens
cttgaagctaggagt

SEQ ID NO: 1163437 - DNA, 15 bp, Homo sapiens
gcttgaagctaggag

SEQ ID NO: 1163438 - DNA, 15 bp, Homo sapiens
tgcttgaagctagga

SEQ ID NO: 1163439 - DNA, 15 bp, Homo sapiens
ttgcttgaagctagg

SEQ ID NO: 1163440 - DNA, 15 bp, Homo sapiens
attgcttgaagctag

SEQ ID NO: 1163441 - DNA, 15 bp, Homo sapiens
gattgcttgaagcta

SEQ ID NO: 1163442 - DNA, 15 bp, Homo sapiens
ggattgcttgaagct

SEQ ID NO: 1163443 - DNA, 15 bp, Homo sapiens
aggattgcttgaagc

SEQ ID NO: 1163444 - DNA, 15 bp, Homo sapiens
gaggattgcttgaag

SEQ ID NO: 1163445 - DNA, 15 bp, Homo sapiens
taggaggattgcttg

SEQ ID NO: 1163446 - DNA, 15 bp, Homo sapiens
gtaggaggattgctt

SEQ ID NO: 1163447 - DNA, 15 bp, Homo sapiens
ggtaggaggattgct

SEQ ID NO: 1163448 - DNA, 15 bp, Homo sapiens
aggtaggaggattgc

SEQ ID NO: 1163449 - DNA, 15 bp, Homo sapiens
aaggtaggaggattg

SEQ ID NO: 1163450 - DNA, 15 bp, Homo sapiens
caaggtaggaggatt

SEQ ID NO: 1163451 - DNA, 15 bp, Homo sapiens
ccaaggtaggaggat

SEQ ID NO: 1163452 - DNA, 15 bp, Homo sapiens
gccaaggtaggagga

SEQ ID NO: 1163453 - DNA, 15 bp, Homo sapiens
ggccaaggtaggagg

SEQ ID NO: 1163454 - DNA, 15 bp, Homo sapiens
aggccaaggtaggag

SEQ ID NO: 1163455 - DNA, 15 bp, Homo sapiens
gaggccaaggtagga

SEQ ID NO: 1163456 - DNA, 15 bp, Homo sapiens
ggaggccaaggtagg

SEQ ID NO: 1163457 - DNA, 15 bp, Homo sapiens
gggaggccaaggtag

SEQ ID NO: 1163458 - DNA, 15 bp, Homo sapiens
ttagcactttgggag

SEQ ID NO: 1163459 - DNA, 15 bp, Homo sapiens
cttagcactttggga

SEQ ID NO: 1163460 - DNA, 15 bp, Homo sapiens
tcttagcactttggg

SEQ ID NO: 1163461 - DNA, 15 bp, Homo sapiens
atcttagcactttgg

SEQ ID NO: 1163462 - DNA, 15 bp, Homo sapiens
aatcttagcactttg

SEQ ID NO: 1163463 - DNA, 15 bp, Homo sapiens
taatcttagcacttt

SEQ ID NO: 1163464 - DNA, 15 bp, Homo sapiens
ataatcttagcactt

SEQ ID NO: 1163465 - DNA, 15 bp, Homo sapiens
tataatcttagcact

SEQ ID NO: 1163466 - DNA, 15 bp, Homo sapiens
ctataatcttagcac

SEQ ID NO: 1163467 - DNA, 15 bp, Homo sapiens
cctataatcttagca

SEQ ID NO: 1163468 - DNA, 15 bp, Homo sapiens
gcctataatcttagc

SEQ ID NO: 1163469 - DNA, 15 bp, Homo sapiens
tgcctataatcttag

SEQ ID NO: 1163470 - DNA, 15 bp, Homo sapiens
atgcctataatctta

SEQ ID NO: 1163471 - DNA, 15 bp, Homo sapiens
catgcctataatctt

SEQ ID NO: 1163472 - DNA, 15 bp, Homo sapiens
tcatgcctataatct

SEQ ID NO: 1163473 - DNA, 15 bp, Homo sapiens
ctcatgcctataatc

SEQ ID NO: 1163474 - DNA, 15 bp, Homo sapiens
tgcagtggctcatgc

SEQ ID NO: 1163475 - DNA, 15 bp, Homo sapiens
gtgcagtggctcatg

SEQ ID NO: 1163476 - DNA, 15 bp, Homo sapiens
ggtgcagtggctcat

SEQ ID NO: 1163477 - DNA, 15 bp, Homo sapiens
tgggtgcagtggctc

SEQ ID NO: 1163478 - DNA, 15 bp, Homo sapiens
ctgggtgcagtggct

SEQ ID NO: 1163479 - DNA, 15 bp, Homo sapiens
gctgggtgcagtggc

SEQ ID NO: 1163480 - DNA, 15 bp, Homo sapiens
ggctgggtgcagtgg

SEQ ID NO: 1163481 - DNA, 15 bp, Homo sapiens
gggctgggtgcagtg

SEQ ID NO: 1163482 - DNA, 15 bp, Homo sapiens
tgggctgggtgcagt

SEQ ID NO: 1163483 - DNA, 15 bp, Homo sapiens
ttgggctgggtgcag

SEQ ID NO: 1163484 - DNA, 15 bp, Homo sapiens
tttgggctgggtgca

SEQ ID NO: 1163485 - DNA, 15 bp, Homo sapiens
ttttgggctgggtgc

SEQ ID NO: 1163486 - DNA, 15 bp, Homo sapiens
tttttgggctgggtg

SEQ ID NO: 1163487 - DNA, 15 bp, Homo sapiens
ttttttgggctgggt

SEQ ID NO: 1163488 - DNA, 15 bp, Homo sapiens
cttttttgggctggg

SEQ ID NO: 1163489 - DNA, 15 bp, Homo sapiens
acttttttgggctgg

SEQ ID NO: 1163490 - DNA, 15 bp, Homo sapiens
aacttttttgggctg

SEQ ID NO: 1163491 - DNA, 15 bp, Homo sapiens
taacttttttgggct

SEQ ID NO: 1163492 - DNA, 15 bp, Homo sapiens
ataacttttttgggc

SEQ ID NO: 1163493 - DNA, 15 bp, Homo sapiens
aataacttttttggg

SEQ ID NO: 1163494 - DNA, 15 bp, Homo sapiens
aaataacttttttgg

SEQ ID NO: 1163495 - DNA, 15 bp, Homo sapiens
aaaataacttttttg

SEQ ID NO: 1163496 - DNA, 15 bp, Homo sapiens
taaaataactttttt

SEQ ID NO: 1163497 - DNA, 15 bp, Homo sapiens
ctaaaataacttttt

SEQ ID NO: 1163498 - DNA, 15 bp, Homo sapiens
tctaaaataactttt

SEQ ID NO: 1163499 - DNA, 15 bp, Homo sapiens
atctaaaataacttt

SEQ ID NO: 1163500 - DNA, 15 bp, Homo sapiens
gatctaaaataactt

SEQ ID NO: 1163501 - DNA, 15 bp, Homo sapiens
tgatctaaaataact

SEQ ID NO: 1163502 - DNA, 15 bp, Homo sapiens
gtgatctaaaataac

SEQ ID NO: 1163503 - DNA, 15 bp, Homo sapiens
ggtgatctaaaataa

SEQ ID NO: 1163504 - DNA, 15 bp, Homo sapiens
tggtgatctaaaata

SEQ ID NO: 1163505 - DNA, 15 bp, Homo sapiens
atggtgatctaaaat

SEQ ID NO: 1163506 - DNA, 15 bp, Homo sapiens
aatggtgatctaaaa

SEQ ID NO: 1163507 - DNA, 15 bp, Homo sapiens
taatggtgatctaaa

SEQ ID NO: 1163508 - DNA, 15 bp, Homo sapiens
ctaatggtgatctaa

SEQ ID NO: 1163509 - DNA, 15 bp, Homo sapiens
tctaatggtgatcta

SEQ ID NO: 1163510 - DNA, 15 bp, Homo sapiens
atctaatggtgatct

SEQ ID NO: 1163511 - DNA, 15 bp, Homo sapiens
aatctaatggtgatc

SEQ ID NO: 1163512 - DNA, 15 bp, Homo sapiens
caatctaatggtgat

SEQ ID NO: 1163513 - DNA, 15 bp, Homo sapiens
acaatctaatggtga

SEQ ID NO: 1163514 - DNA, 15 bp, Homo sapiens
tacaatctaatggtg

SEQ ID NO: 1163515 - DNA, 15 bp, Homo sapiens
ctacaatctaatggt

SEQ ID NO: 1163516 - DNA, 15 bp, Homo sapiens
actacaatctaatgg

SEQ ID NO: 1163517 - DNA, 15 bp, Homo sapiens
cactacaatctaatg

SEQ ID NO: 1163518 - DNA, 15 bp, Homo sapiens
ccactacaatctaat

SEQ ID NO: 1163519 - DNA, 15 bp, Homo sapiens
accactacaatctaa

SEQ ID NO: 1163520 - DNA, 15 bp, Homo sapiens
gaccactacaatcta

SEQ ID NO: 1163521 - DNA, 15 bp, Homo sapiens
agaccactacaatct

SEQ ID NO: 1163522 - DNA, 15 bp, Homo sapiens
aagaccactacaatc

SEQ ID NO: 1163523 - DNA, 15 bp, Homo sapiens
aaagaccactacaat

SEQ ID NO: 1163524 - DNA, 15 bp, Homo sapiens
gaaagaccactacaa

SEQ ID NO: 1163525 - DNA, 15 bp, Homo sapiens
ggaaagaccactaca

SEQ ID NO: 1163526 - DNA, 15 bp, Homo sapiens
gggaaagaccactac

SEQ ID NO: 1163527 - DNA, 15 bp, Homo sapiens
tgggaaagaccacta

SEQ ID NO: 1163528 - DNA, 15 bp, Homo sapiens
atgggaaagaccact

SEQ ID NO: 1163529 - DNA, 15 bp, Homo sapiens
gatgggaaagaccac

SEQ ID NO: 1163530 - DNA, 15 bp, Homo sapiens
tgatgggaaagacca

SEQ ID NO: 1163531 - DNA, 15 bp, Homo sapiens
ttgatgggaaagacc

SEQ ID NO: 1163532 - DNA, 15 bp, Homo sapiens
tttgatgggaaagac

SEQ ID NO: 1163533 - DNA, 15 bp, Homo sapiens
gtttgatgggaaaga

SEQ ID NO: 1163534 - DNA, 15 bp, Homo sapiens
tgtttgatgggaaag

SEQ ID NO: 1163535 - DNA, 15 bp, Homo sapiens
atgtttgatgggaaa

SEQ ID NO: 1163536 - DNA, 15 bp, Homo sapiens
tatgtttgatgggaa

SEQ ID NO: 1163537 - DNA, 15 bp, Homo sapiens
ttatgtttgatggga

SEQ ID NO: 1163538 - DNA, 15 bp, Homo sapiens
gttatgtttgatggg

SEQ ID NO: 1163539 - DNA, 15 bp, Homo sapiens
tgttatgtttgatgg

SEQ ID NO: 1163540 - DNA, 15 bp, Homo sapiens
ctgttatgtttgatg

SEQ ID NO: 1163541 - DNA, 15 bp, Homo sapiens
cctgttatgtttgat

SEQ ID NO: 1163542 - DNA, 15 bp, Homo sapiens
gcctgttatgtttga

SEQ ID NO: 1163543 - DNA, 15 bp, Homo sapiens
agcctgttatgtttg

SEQ ID NO: 1163544 - DNA, 15 bp, Homo sapiens
aagcctgttatgttt

SEQ ID NO: 1163545 - DNA, 15 bp, Homo sapiens
caagcctgttatgtt

SEQ ID NO: 1163546 - DNA, 15 bp, Homo sapiens
acaagcctgttatgt

SEQ ID NO: 1163547 - DNA, 15 bp, Homo sapiens
tacaagcctgttatg

SEQ ID NO: 1163548 - DNA, 15 bp, Homo sapiens
atacaagcctgttat

SEQ ID NO: 1163549 - DNA, 15 bp, Homo sapiens
gatacaagcctgtta

SEQ ID NO: 1163550 - DNA, 15 bp, Homo sapiens
ggatacaagcctgtt

SEQ ID NO: 1163551 - DNA, 15 bp, Homo sapiens
gggatacaagcctgt

SEQ ID NO: 1163552 - DNA, 15 bp, Homo sapiens
agggatacaagcctg

SEQ ID NO: 1163553 - DNA, 15 bp, Homo sapiens
cagggatacaagcct

SEQ ID NO: 1163554 - DNA, 15 bp, Homo sapiens
acagggatacaagcc

SEQ ID NO: 1163555 - DNA, 15 bp, Homo sapiens
cacagggatacaagc

SEQ ID NO: 1163556 - DNA, 15 bp, Homo sapiens
ccacagggatacaag

SEQ ID NO: 1163557 - DNA, 15 bp, Homo sapiens
accacagggatacaa

SEQ ID NO: 1163558 - DNA, 15 bp, Homo sapiens
caccacagggataca

SEQ ID NO: 1163559 - DNA, 15 bp, Homo sapiens
tcaccacagggatac

SEQ ID NO: 1163560 - DNA, 15 bp, Homo sapiens
ttcaccacagggata

SEQ ID NO: 1163561 - DNA, 15 bp, Homo sapiens
gttcaccacagggat

SEQ ID NO: 1163562 - DNA, 15 bp, Homo sapiens
tgttcaccacaggga

SEQ ID NO: 1163563 - DNA, 15 bp, Homo sapiens
atgttcaccacaggg

SEQ ID NO: 1163564 - DNA, 15 bp, Homo sapiens
tatgttcaccacagg

SEQ ID NO: 1163565 - DNA, 15 bp, Homo sapiens
ctatgttcaccacag

SEQ ID NO: 1163566 - DNA, 15 bp, Homo sapiens
tctatgttcaccaca

SEQ ID NO: 1163567 - DNA, 15 bp, Homo sapiens
ttctatgttcaccac

SEQ ID NO: 1163568 - DNA, 15 bp, Homo sapiens
cttctatgttcacca

SEQ ID NO: 1163569 - DNA, 15 bp, Homo sapiens
ccttctatgttcacc

SEQ ID NO: 1163570 - DNA, 15 bp, Homo sapiens
gccttctatgttcac

SEQ ID NO: 1163571 - DNA, 15 bp, Homo sapiens
tgccttctatgttca

SEQ ID NO: 1163572 - DNA, 15 bp, Homo sapiens
atgccttctatgttc

SEQ ID NO: 1163573 - DNA, 15 bp, Homo sapiens
aatgccttctatgtt

SEQ ID NO: 1163574 - DNA, 15 bp, Homo sapiens
caatgccttctatgt

SEQ ID NO: 1163575 - DNA, 15 bp, Homo sapiens
tcaatgccttctatg

SEQ ID NO: 1163576 - DNA, 15 bp, Homo sapiens
atcaatgccttctat

SEQ ID NO: 1163577 - DNA, 15 bp, Homo sapiens
aatcaatgccttcta

SEQ ID NO: 1163578 - DNA, 15 bp, Homo sapiens
aaatcaatgccttct

SEQ ID NO: 1163579 - DNA, 15 bp, Homo sapiens
gaaatcaatgccttc

SEQ ID NO: 1163580 - DNA, 15 bp, Homo sapiens
tgaaatcaatgcctt

SEQ ID NO: 1163581 - DNA, 15 bp, Homo sapiens
ctgaaatcaatgcct

SEQ ID NO: 1163582 - DNA, 15 bp, Homo sapiens
cctgaaatcaatgcc

SEQ ID NO: 1163583 - DNA, 15 bp, Homo sapiens
ccctgaaatcaatgc

SEQ ID NO: 1163584 - DNA, 15 bp, Homo sapiens
tccctgaaatcaatg

SEQ ID NO: 1163585 - DNA, 15 bp, Homo sapiens
ttccctgaaatcaat

SEQ ID NO: 1163586 - DNA, 15 bp, Homo sapiens
tttccctgaaatcaa

SEQ ID NO: 1163587 - DNA, 15 bp, Homo sapiens
atttccctgaaatca

SEQ ID NO: 1163588 - DNA, 15 bp, Homo sapiens
aatttccctgaaatc

SEQ ID NO: 1163589 - DNA, 15 bp, Homo sapiens
taatttccctgaaat

SEQ ID NO: 1163590 - DNA, 15 bp, Homo sapiens
ctaatttccctgaaa

SEQ ID NO: 1163591 - DNA, 15 bp, Homo sapiens
gctaatttccctgaa

SEQ ID NO: 1163592 - DNA, 15 bp, Homo sapiens
tgctaatttccctga

SEQ ID NO: 1163593 - DNA, 15 bp, Homo sapiens
atgctaatttccctg

SEQ ID NO: 1163594 - DNA, 15 bp, Homo sapiens
tatgctaatttccct

SEQ ID NO: 1163595 - DNA, 15 bp, Homo sapiens
gtatgctaatttccc

SEQ ID NO: 1163596 - DNA, 15 bp, Homo sapiens
tgtatgctaatttcc

SEQ ID NO: 1163597 - DNA, 15 bp, Homo sapiens
ttgtatgctaatttc

SEQ ID NO: 1163598 - DNA, 15 bp, Homo sapiens
attgtatgctaattt

SEQ ID NO: 1163599 - DNA, 15 bp, Homo sapiens
tattgtatgctaatt

SEQ ID NO: 1163600 - DNA, 15 bp, Homo sapiens
ttattgtatgctaat

SEQ ID NO: 1163601 - DNA, 15 bp, Homo sapiens
attattgtatgctaa

SEQ ID NO: 1163602 - DNA, 15 bp, Homo sapiens
cattattgtatgcta

SEQ ID NO: 1163603 - DNA, 15 bp, Homo sapiens
acattattgtatgct

SEQ ID NO: 1163604 - DNA, 15 bp, Homo sapiens
tacattattgtatgc

SEQ ID NO: 1163605 - DNA, 15 bp, Homo sapiens
ttacattattgtatg

SEQ ID NO: 1163606 - DNA, 15 bp, Homo sapiens
attacattattgtat

SEQ ID NO: 1163607 - DNA, 15 bp, Homo sapiens
aattacattattgta

SEQ ID NO: 1163608 - DNA, 15 bp, Homo sapiens
gaattacattattgt

SEQ ID NO: 1163609 - DNA, 15 bp, Homo sapiens
tgaattacattattg

SEQ ID NO: 1163610 - DNA, 15 bp, Homo sapiens
atgaattacattatt

SEQ ID NO: 1163611 - DNA, 15 bp, Homo sapiens
tatgaattacattat

SEQ ID NO: 1163612 - DNA, 15 bp, Homo sapiens
gtatgaattacatta

SEQ ID NO: 1163613 - DNA, 15 bp, Homo sapiens
ggtatgaattacatt

SEQ ID NO: 1163614 - DNA, 15 bp, Homo sapiens
gggtatgaattacat

SEQ ID NO: 1163615 - DNA, 15 bp, Homo sapiens
agggtatgaattaca

SEQ ID NO: 1163616 - DNA, 15 bp, Homo sapiens
aagggtatgaattac

SEQ ID NO: 1163617 - DNA, 15 bp, Homo sapiens
aaagggtatgaatta

SEQ ID NO: 1163618 - DNA, 15 bp, Homo sapiens
caaagggtatgaatt

SEQ ID NO: 1163619 - DNA, 15 bp, Homo sapiens
ccaaagggtatgaat

SEQ ID NO: 1163620 - DNA, 15 bp, Homo sapiens
gccaaagggtatgaa

SEQ ID NO: 1163621 - DNA, 15 bp, Homo sapiens
tgccaaagggtatga

SEQ ID NO: 1163622 - DNA, 15 bp, Homo sapiens
ctgccaaagggtatg

SEQ ID NO: 1163623 - DNA, 15 bp, Homo sapiens
gctgccaaagggtat

SEQ ID NO: 1163624 - DNA, 15 bp, Homo sapiens
agctgccaaagggta

SEQ ID NO: 1163625 - DNA, 15 bp, Homo sapiens
tagctgccaaagggt

SEQ ID NO: 1163626 - DNA, 15 bp, Homo sapiens
ttagctgccaaaggg

SEQ ID NO: 1163627 - DNA, 15 bp, Homo sapiens
tttagctgccaaagg

SEQ ID NO: 1163628 - DNA, 15 bp, Homo sapiens
ttttagctgccaaag

SEQ ID NO: 1163629 - DNA, 15 bp, Homo sapiens
tttttagctgccaaa

SEQ ID NO: 1163630 - DNA, 15 bp, Homo sapiens
ttttttagctgccaa

SEQ ID NO: 1163631 - DNA, 15 bp, Homo sapiens
tttttttagctgcca

SEQ ID NO: 1163632 - DNA, 15 bp, Homo sapiens
atttttttagctgcc

SEQ ID NO: 1163633 - DNA, 15 bp, Homo sapiens
aatttttttagctgc

SEQ ID NO: 1163634 - DNA, 15 bp, Homo sapiens
taatttttttagctg

SEQ ID NO: 1163635 - DNA, 15 bp, Homo sapiens
ttaatttttttagct

SEQ ID NO: 1163636 - DNA, 15 bp, Homo sapiens
tttaatttttttagc

SEQ ID NO: 1163637 - DNA, 15 bp, Homo sapiens
ctttaatttttttag

SEQ ID NO: 1163638 - DNA, 15 bp, Homo sapiens
actttaattttttta

SEQ ID NO: 1163639 - DNA, 15 bp, Homo sapiens
cactttaattttttt

SEQ ID NO: 1163640 - DNA, 15 bp, Homo sapiens
gcactttaatttttt

SEQ ID NO: 1163641 - DNA, 15 bp, Homo sapiens
agcactttaattttt

SEQ ID NO: 1163642 - DNA, 15 bp, Homo sapiens
aagcactttaatttt

SEQ ID NO: 1163643 - DNA, 15 bp, Homo sapiens
caagcactttaattt

SEQ ID NO: 1163644 - DNA, 15 bp, Homo sapiens
tcaagcactttaatt

SEQ ID NO: 1163645 - DNA, 15 bp, Homo sapiens
tttcaagcactttaa

SEQ ID NO: 1163646 - DNA, 15 bp, Homo sapiens
ctttcaagcacttta

SEQ ID NO: 1163647 - DNA, 15 bp, Homo sapiens
tctttcaagcacttt

SEQ ID NO: 1163648 - DNA, 15 bp, Homo sapiens
atctttcaagcactt

SEQ ID NO: 1163649 - DNA, 15 bp, Homo sapiens
catctttcaagcact

SEQ ID NO: 1163650 - DNA, 15 bp, Homo sapiens
ccatctttcaagcac

SEQ ID NO: 1163651 - DNA, 15 bp, Homo sapiens
tccatctttcaagca

SEQ ID NO: 1163652 - DNA, 15 bp, Homo sapiens
gtccatctttcaagc

SEQ ID NO: 1163653 - DNA, 15 bp, Homo sapiens
agtccatctttcaag

SEQ ID NO: 1163654 - DNA, 15 bp, Homo sapiens
gagtccatctttcaa

SEQ ID NO: 1163655 - DNA, 15 bp, Homo sapiens
agagtccatctttca

SEQ ID NO: 1163656 - DNA, 15 bp, Homo sapiens
tagagtccatctttc

SEQ ID NO: 1163657 - DNA, 15 bp, Homo sapiens
gtagagtccatcttt

SEQ ID NO: 1163658 - DNA, 15 bp, Homo sapiens
tgtagagtccatctt

SEQ ID NO: 1163659 - DNA, 15 bp, Homo sapiens
atgtagagtccatct

SEQ ID NO: 1163660 - DNA, 15 bp, Homo sapiens
aatgtagagtccatc

SEQ ID NO: 1163661 - DNA, 15 bp, Homo sapiens
caatgtagagtccat

SEQ ID NO: 1163662 - DNA, 15 bp, Homo sapiens
tcaatgtagagtcca

SEQ ID NO: 1163663 - DNA, 15 bp, Homo sapiens
atcaatgtagagtcc

SEQ ID NO: 1163664 - DNA, 15 bp, Homo sapiens
catcaatgtagagtc

SEQ ID NO: 1163665 - DNA, 15 bp, Homo sapiens
acatcaatgtagagt

SEQ ID NO: 1163666 - DNA, 15 bp, Homo sapiens
gacatcaatgtagag

SEQ ID NO: 1163667 - DNA, 15 bp, Homo sapiens
ggacatcaatgtaga

SEQ ID NO: 1163668 - DNA, 15 bp, Homo sapiens
tggacatcaatgtag

SEQ ID NO: 1163669 - DNA, 15 bp, Homo sapiens
ctggacatcaatgta

SEQ ID NO: 1163670 - DNA, 15 bp, Homo sapiens
tctggacatcaatgt

SEQ ID NO: 1163671 - DNA, 15 bp, Homo sapiens
ctctggacatcaatg

SEQ ID NO: 1163672 - DNA, 15 bp, Homo sapiens
tctctggacatcaat

SEQ ID NO: 1163673 - DNA, 15 bp, Homo sapiens
ctctctggacatcaa

SEQ ID NO: 1163674 - DNA, 15 bp, Homo sapiens
tctctctggacatca

SEQ ID NO: 1163675 - DNA, 15 bp, Homo sapiens
ctctctctggacatc

SEQ ID NO: 1163676 - DNA, 15 bp, Homo sapiens
cctctctctggacat

SEQ ID NO: 1163677 - DNA, 15 bp, Homo sapiens
tcctctctctggaca

SEQ ID NO: 1163678 - DNA, 15 bp, Homo sapiens
atcctctctctggac

SEQ ID NO: 1163679 - DNA, 15 bp, Homo sapiens
aatcctctctctgga

SEQ ID NO: 1163680 - DNA, 15 bp, Homo sapiens
aaatcctctctctgg

SEQ ID NO: 1163681 - DNA, 15 bp, Homo sapiens
taaatcctctctctg

SEQ ID NO: 1163682 - DNA, 15 bp, Homo sapiens
ataaatcctctctct

SEQ ID NO: 1163683 - DNA, 15 bp, Homo sapiens
tataaatcctctctc

SEQ ID NO: 1163684 - DNA, 15 bp, Homo sapiens
ttataaatcctctct

SEQ ID NO: 1163685 - DNA, 15 bp, Homo sapiens
gttataaatcctctc

SEQ ID NO: 1163686 - DNA, 15 bp, Homo sapiens
ggttataaatcctct

SEQ ID NO: 1163687 - DNA, 15 bp, Homo sapiens
gggttataaatcctc

SEQ ID NO: 1163688 - DNA, 15 bp, Homo sapiens
tgggttataaatcct

SEQ ID NO: 1163689 - DNA, 15 bp, Homo sapiens
atgggttataaatcc

SEQ ID NO: 1163690 - DNA, 15 bp, Homo sapiens
catgggttataaatc

SEQ ID NO: 1163691 - DNA, 15 bp, Homo sapiens
acatgggttataaat

SEQ ID NO: 1163692 - DNA, 15 bp, Homo sapiens
tacatgggttataaa

SEQ ID NO: 1163693 - DNA, 15 bp, Homo sapiens
ttacatgggttataa

SEQ ID NO: 1163694 - DNA, 15 bp, Homo sapiens
cttacatgggttata

SEQ ID NO: 1163695 - DNA, 15 bp, Homo sapiens
acttacatgggttat

SEQ ID NO: 1163696 - DNA, 15 bp, Homo sapiens
tacttacatgggtta

SEQ ID NO: 1163697 - DNA, 15 bp, Homo sapiens
gtacttacatgggtt

SEQ ID NO: 1163698 - DNA, 15 bp, Homo sapiens
ggtacttacatgggt

SEQ ID NO: 1163699 - DNA, 15 bp, Homo sapiens
tggtacttacatggg

SEQ ID NO: 1163700 - DNA, 15 bp, Homo sapiens
ttggtacttacatgg

SEQ ID NO: 1163701 - DNA, 15 bp, Homo sapiens
gttggtacttacatg

SEQ ID NO: 1163702 - DNA, 15 bp, Homo sapiens
tgttggtacttacat

SEQ ID NO: 1163703 - DNA, 15 bp, Homo sapiens
ttgttggtacttaca

SEQ ID NO: 1163704 - DNA, 15 bp, Homo sapiens
tttgttggtacttac

SEQ ID NO: 1163705 - DNA, 15 bp, Homo sapiens
ttttgttggtactta

SEQ ID NO: 1163706 - DNA, 15 bp, Homo sapiens
tttttgttggtactt

SEQ ID NO: 1163707 - DNA, 15 bp, Homo sapiens
atttttgttggtact

SEQ ID NO: 1163708 - DNA, 15 bp, Homo sapiens
tatttttgttggtac

SEQ ID NO: 1163709 - DNA, 15 bp, Homo sapiens
gtatttttgttggta

SEQ ID NO: 1163710 - DNA, 15 bp, Homo sapiens
agtatttttgttggt

SEQ ID NO: 1163711 - DNA, 15 bp, Homo sapiens
aagtatttttgttgg

SEQ ID NO: 1163712 - DNA, 15 bp, Homo sapiens
taagtatttttgttg

SEQ ID NO: 1163713 - DNA, 15 bp, Homo sapiens
ttaagtatttttgtt

SEQ ID NO: 1163714 - DNA, 15 bp, Homo sapiens
tttaagtatttttgt

SEQ ID NO: 1163715 - DNA, 15 bp, Homo sapiens
ttttaagtatttttg

SEQ ID NO: 1163716 - DNA, 15 bp, Homo sapiens
tttttaagtattttt

SEQ ID NO: 1163717 - DNA, 15 bp, Homo sapiens
atttttaagtatttt

SEQ ID NO: 1163718 - DNA, 15 bp, Homo sapiens
aatttttaagtattt

SEQ ID NO: 1163719 - DNA, 15 bp, Homo sapiens
taatttttaagtatt

SEQ ID NO: 1163720 - DNA, 15 bp, Homo sapiens
ctaatttttaagtat

SEQ ID NO: 1163721 - DNA, 15 bp, Homo sapiens
tctaatttttaagta

SEQ ID NO: 1163722 - DNA, 15 bp, Homo sapiens
ctctaatttttaagt

SEQ ID NO: 1163723 - DNA, 15 bp, Homo sapiens
actctaatttttaag

SEQ ID NO: 1163724 - DNA, 15 bp, Homo sapiens
tactctaatttttaa

SEQ ID NO: 1163725 - DNA, 15 bp, Homo sapiens
ttactctaattttta

SEQ ID NO: 1163726 - DNA, 15 bp, Homo sapiens
cttactctaattttt

SEQ ID NO: 1163727 - DNA, 15 bp, Homo sapiens
tcttactctaatttt

SEQ ID NO: 1163728 - DNA, 15 bp, Homo sapiens
gtcttactctaattt

SEQ ID NO: 1163729 - DNA, 15 bp, Homo sapiens
agtcttactctaatt

SEQ ID NO: 1163730 - DNA, 15 bp, Homo sapiens
aagtcttactctaat

SEQ ID NO: 1163731 - DNA, 15 bp, Homo sapiens
caagtcttactctaa

SEQ ID NO: 1163732 - DNA, 15 bp, Homo sapiens
gcaagtcttactcta

SEQ ID NO: 1163733 - DNA, 15 bp, Homo sapiens
tgcaagtcttactct

SEQ ID NO: 1163734 - DNA, 15 bp, Homo sapiens
atgcaagtcttactc

SEQ ID NO: 1163735 - DNA, 15 bp, Homo sapiens
aatgcaagtcttact

SEQ ID NO: 1163736 - DNA, 15 bp, Homo sapiens
caatgcaagtcttac

SEQ ID NO: 1163737 - DNA, 15 bp, Homo sapiens
acaatgcaagtctta

SEQ ID NO: 1163738 - DNA, 15 bp, Homo sapiens
aacaatgcaagtctt

SEQ ID NO: 1163739 - DNA, 15 bp, Homo sapiens
taacaatgcaagtct

SEQ ID NO: 1163740 - DNA, 15 bp, Homo sapiens
ttaacaatgcaagtc

SEQ ID NO: 1163741 - DNA, 15 bp, Homo sapiens
tttaacaatgcaagt

SEQ ID NO: 1163742 - DNA, 15 bp, Homo sapiens
ctttaacaatgcaag

SEQ ID NO: 1163743 - DNA, 15 bp, Homo sapiens
actttaacaatgcaa

SEQ ID NO: 1163744 - DNA, 15 bp, Homo sapiens
aactttaacaatgca

SEQ ID NO: 1163745 - DNA, 15 bp, Homo sapiens
aaactttaacaatgc

SEQ ID NO: 1163746 - DNA, 15 bp, Homo sapiens
caaactttaacaatg

SEQ ID NO: 1163747 - DNA, 15 bp, Homo sapiens
acaaactttaacaat

SEQ ID NO: 1163748 - DNA, 15 bp, Homo sapiens
tacaaactttaacaa

SEQ ID NO: 1163749 - DNA, 15 bp, Homo sapiens
ctacaaactttaaca

SEQ ID NO: 1163750 - DNA, 15 bp, Homo sapiens
tctacaaactttaac

SEQ ID NO: 1163751 - DNA, 15 bp, Homo sapiens
atctacaaactttaa

SEQ ID NO: 1163752 - DNA, 15 bp, Homo sapiens
aatctacaaacttta

SEQ ID NO: 1163753 - DNA, 15 bp, Homo sapiens
aaatctacaaacttt

SEQ ID NO: 1163754 - DNA, 15 bp, Homo sapiens
caaatctacaaactt

SEQ ID NO: 1163755 - DNA, 15 bp, Homo sapiens
ccaaatctacaaact

SEQ ID NO: 1163756 - DNA, 15 bp, Homo sapiens
tccaaatctacaaac

SEQ ID NO: 1163757 - DNA, 15 bp, Homo sapiens
atccaaatctacaaa

SEQ ID NO: 1163758 - DNA, 15 bp, Homo sapiens
aatccaaatctacaa

SEQ ID NO: 1163759 - DNA, 15 bp, Homo sapiens
caatccaaatctaca

SEQ ID NO: 1163760 - DNA, 15 bp, Homo sapiens
acaatccaaatctac

SEQ ID NO: 1163761 - DNA, 15 bp, Homo sapiens
aacaatccaaatcta

SEQ ID NO: 1163762 - DNA, 15 bp, Homo sapiens
caacaatccaaatct

SEQ ID NO: 1163763 - DNA, 15 bp, Homo sapiens
tcaacaatccaaatc

SEQ ID NO: 1163764 - DNA, 15 bp, Homo sapiens
ctcaacaatccaaat

SEQ ID NO: 1163765 - DNA, 15 bp, Homo sapiens
cctcaacaatccaaa

SEQ ID NO: 1163766 - DNA, 15 bp, Homo sapiens
gcctcaacaatccaa

SEQ ID NO: 1163767 - DNA, 15 bp, Homo sapiens
agcctcaacaatcca

SEQ ID NO: 1163768 - DNA, 15 bp, Homo sapiens
aagcctcaacaatcc

SEQ ID NO: 1163769 - DNA, 15 bp, Homo sapiens
taagcctcaacaatc

SEQ ID NO: 1163770 - DNA, 15 bp, Homo sapiens
ttaagcctcaacaat

SEQ ID NO: 1163771 - DNA, 15 bp, Homo sapiens
tttaagcctcaacaa

SEQ ID NO: 1163772 - DNA, 15 bp, Homo sapiens
atttaagcctcaaca

SEQ ID NO: 1163773 - DNA, 15 bp, Homo sapiens
tatttaagcctcaac

SEQ ID NO: 1163774 - DNA, 15 bp, Homo sapiens
gtatttaagcctcaa

SEQ ID NO: 1163775 - DNA, 15 bp, Homo sapiens
agtatttaagcctca

SEQ ID NO: 1163776 - DNA, 15 bp, Homo sapiens
cagtatttaagcctc

SEQ ID NO: 1163777 - DNA, 15 bp, Homo sapiens
gcagtatttaagcct

SEQ ID NO: 1163778 - DNA, 15 bp, Homo sapiens
tgcagtatttaagcc

SEQ ID NO: 1163779 - DNA, 15 bp, Homo sapiens
atgcagtatttaagc

SEQ ID NO: 1163780 - DNA, 15 bp, Homo sapiens
tatgcagtatttaag

SEQ ID NO: 1163781 - DNA, 15 bp, Homo sapiens
ctatgcagtatttaa

SEQ ID NO: 1163782 - DNA, 15 bp, Homo sapiens
actatgcagtattta

SEQ ID NO: 1163783 - DNA, 15 bp, Homo sapiens
aactatgcagtattt

SEQ ID NO: 1163784 - DNA, 15 bp, Homo sapiens
gaactatgcagtatt

SEQ ID NO: 1163785 - DNA, 15 bp, Homo sapiens
agaactatgcagtat

SEQ ID NO: 1163786 - DNA, 15 bp, Homo sapiens
tagaactatgcagta

SEQ ID NO: 1163787 - DNA, 15 bp, Homo sapiens
atagaactatgcagt

SEQ ID NO: 1163788 - DNA, 15 bp, Homo sapiens
tatagaactatgcag

SEQ ID NO: 1163789 - DNA, 15 bp, Homo sapiens
atatagaactatgca

SEQ ID NO: 1163790 - DNA, 15 bp, Homo sapiens
aatatagaactatgc

SEQ ID NO: 1163791 - DNA, 15 bp, Homo sapiens
gaatatagaactatg

SEQ ID NO: 1163792 - DNA, 15 bp, Homo sapiens
tgaatatagaactat

SEQ ID NO: 1163793 - DNA, 15 bp, Homo sapiens
gtgaatatagaacta

SEQ ID NO: 1163794 - DNA, 15 bp, Homo sapiens
agtgaatatagaact

SEQ ID NO: 1163795 - DNA, 15 bp, Homo sapiens
tagtgaatatagaac

SEQ ID NO: 1163796 - DNA, 15 bp, Homo sapiens
atagtgaatatagaa

SEQ ID NO: 1163797 - DNA, 15 bp, Homo sapiens
catagtgaatataga

SEQ ID NO: 1163798 - DNA, 15 bp, Homo sapiens
acatagtgaatatag

SEQ ID NO: 1163799 - DNA, 15 bp, Homo sapiens
gacatagtgaatata

SEQ ID NO: 1163800 - DNA, 15 bp, Homo sapiens
tgacatagtgaatat

SEQ ID NO: 1163801 - DNA, 15 bp, Homo sapiens
atgacatagtgaata

SEQ ID NO: 1163802 - DNA, 15 bp, Homo sapiens
tatgacatagtgaat

SEQ ID NO: 1163803 - DNA, 15 bp, Homo sapiens
ttatgacatagtgaa

SEQ ID NO: 1163804 - DNA, 15 bp, Homo sapiens
attatgacatagtga

SEQ ID NO: 1163805 - DNA, 15 bp, Homo sapiens
aattatgacatagtg

SEQ ID NO: 1163806 - DNA, 15 bp, Homo sapiens
aaattatgacatagt

SEQ ID NO: 1163807 - DNA, 15 bp, Homo sapiens
caaattatgacatag

SEQ ID NO: 1163808 - DNA, 15 bp, Homo sapiens
gcaaattatgacata

SEQ ID NO: 1163809 - DNA, 15 bp, Homo sapiens
tgcaaattatgacat

SEQ ID NO: 1163810 - DNA, 15 bp, Homo sapiens
atgcaaattatgaca

SEQ ID NO: 1163811 - DNA, 15 bp, Homo sapiens
aatgcaaattatgac

SEQ ID NO: 1163812 - DNA, 15 bp, Homo sapiens
caatgcaaattatga

SEQ ID NO: 1163813 - DNA, 15 bp, Homo sapiens
gcaatgcaaattatg

SEQ ID NO: 1163814 - DNA, 15 bp, Homo sapiens
agcaatgcaaattat

SEQ ID NO: 1163815 - DNA, 15 bp, Homo sapiens
cagcaatgcaaatta

SEQ ID NO: 1163816 - DNA, 15 bp, Homo sapiens
gcagcaatgcaaatt

SEQ ID NO: 1163817 - DNA, 15 bp, Homo sapiens
agcagcaatgcaaat

SEQ ID NO: 1163818 - DNA, 15 bp, Homo sapiens
cagcagcaatgcaaa

SEQ ID NO: 1163819 - DNA, 15 bp, Homo sapiens
gcagcagcaatgcaa

SEQ ID NO: 1163820 - DNA, 15 bp, Homo sapiens
tgcagcagcaatgca

SEQ ID NO: 1163821 - DNA, 15 bp, Homo sapiens
atgcagcagcaatgc

SEQ ID NO: 1163822 - DNA, 15 bp, Homo sapiens
gatgcagcagcaatg

SEQ ID NO: 1163823 - DNA, 15 bp, Homo sapiens
tgatgcagcagcaat

SEQ ID NO: 1163824 - DNA, 15 bp, Homo sapiens
ctgatgcagcagcaa

SEQ ID NO: 1163825 - DNA, 15 bp, Homo sapiens
tctgatgcagcagca

SEQ ID NO: 1163826 - DNA, 15 bp, Homo sapiens
ctctgatgcagcagc

SEQ ID NO: 1163827 - DNA, 15 bp, Homo sapiens
cctctgatgcagcag

SEQ ID NO: 1163828 - DNA, 15 bp, Homo sapiens
tcctctgatgcagca

SEQ ID NO: 1163829 - DNA, 15 bp, Homo sapiens
ctcctctgatgcagc

SEQ ID NO: 1163830 - DNA, 15 bp, Homo sapiens
gctcctctgatgcag

SEQ ID NO: 1163831 - DNA, 15 bp, Homo sapiens
agctcctctgatgca

SEQ ID NO: 1163832 - DNA, 15 bp, Homo sapiens
aagctcctctgatgc

SEQ ID NO: 1163833 - DNA, 15 bp, Homo sapiens
taagctcctctgatg

SEQ ID NO: 1163834 - DNA, 15 bp, Homo sapiens
ttaagctcctctgat

SEQ ID NO: 1163835 - DNA, 15 bp, Homo sapiens
tttaagctcctctga

SEQ ID NO: 1163836 - DNA, 15 bp, Homo sapiens
ttttaagctcctctg

SEQ ID NO: 1163837 - DNA, 15 bp, Homo sapiens
tttttaagctcctct

SEQ ID NO: 1163838 - DNA, 15 bp, Homo sapiens
atttttaagctcctc

SEQ ID NO: 1163839 - DNA, 15 bp, Homo sapiens
tatttttaagctcct

SEQ ID NO: 1163840 - DNA, 15 bp, Homo sapiens
atatttttaagctcc

SEQ ID NO: 1163841 - DNA, 15 bp, Homo sapiens
aatatttttaagctc

SEQ ID NO: 1163842 - DNA, 15 bp, Homo sapiens
aaatatttttaagct

SEQ ID NO: 1163843 - DNA, 15 bp, Homo sapiens
gaaatatttttaagc

SEQ ID NO: 1163844 - DNA, 15 bp, Homo sapiens
agaaatatttttaag

SEQ ID NO: 1163845 - DNA, 15 bp, Homo sapiens
tagaaatatttttaa

SEQ ID NO: 1163846 - DNA, 15 bp, Homo sapiens
gtagaaatattttta

SEQ ID NO: 1163847 - DNA, 15 bp, Homo sapiens
ggtagaaatattttt

SEQ ID NO: 1163848 - DNA, 15 bp, Homo sapiens
aggtagaaatatttt

SEQ ID NO: 1163849 - DNA, 15 bp, Homo sapiens
aaggtagaaatattt

SEQ ID NO: 1163850 - DNA, 15 bp, Homo sapiens
gaaggtagaaatatt

SEQ ID NO: 1163851 - DNA, 15 bp, Homo sapiens
agaaggtagaaatat

SEQ ID NO: 1163852 - DNA, 15 bp, Homo sapiens
tagaaggtagaaata

SEQ ID NO: 1163853 - DNA, 15 bp, Homo sapiens
catagaaggtagaaa

SEQ ID NO: 1163854 - DNA, 15 bp, Homo sapiens
ccatagaaggtagaa

SEQ ID NO: 1163855 - DNA, 15 bp, Homo sapiens
gccatagaaggtaga

SEQ ID NO: 1163856 - DNA, 15 bp, Homo sapiens
tgccatagaaggtag

SEQ ID NO: 1163857 - DNA, 15 bp, Homo sapiens
ctgccatagaaggta

SEQ ID NO: 1163858 - DNA, 15 bp, Homo sapiens
tctgccatagaaggt

SEQ ID NO: 1163859 - DNA, 15 bp, Homo sapiens
ttctgccatagaagg

SEQ ID NO: 1163860 - DNA, 15 bp, Homo sapiens
attctgccatagaag

SEQ ID NO: 1163861 - DNA, 15 bp, Homo sapiens
tattctgccatagaa

SEQ ID NO: 1163862 - DNA, 15 bp, Homo sapiens
ttattctgccataga

SEQ ID NO: 1163863 - DNA, 15 bp, Homo sapiens
tttattctgccatag

SEQ ID NO: 1163864 - DNA, 15 bp, Homo sapiens
atttattctgccata

SEQ ID NO: 1163865 - DNA, 15 bp, Homo sapiens
aatttattctgccat

SEQ ID NO: 1163866 - DNA, 15 bp, Homo sapiens
aaatttattctgcca

SEQ ID NO: 1163867 - DNA, 15 bp, Homo sapiens
taaatttattctgcc

SEQ ID NO: 1163868 - DNA, 15 bp, Homo sapiens
ctaaatttattctgc

SEQ ID NO: 1163869 - DNA, 15 bp, Homo sapiens
tctaaatttattctg

SEQ ID NO: 1163870 - DNA, 15 bp, Homo sapiens
ctctaaatttattct

SEQ ID NO: 1163871 - DNA, 15 bp, Homo sapiens
tctctaaatttattc

SEQ ID NO: 1163872 - DNA, 15 bp, Homo sapiens
ctctctaaatttatt

SEQ ID NO: 1163873 - DNA, 15 bp, Homo sapiens
gctctctaaatttat

SEQ ID NO: 1163874 - DNA, 15 bp, Homo sapiens
tgctctctaaattta

SEQ ID NO: 1163875 - DNA, 15 bp, Homo sapiens
atgctctctaaattt

SEQ ID NO: 1163876 - DNA, 15 bp, Homo sapiens
catgctctctaaatt

SEQ ID NO: 1163877 - DNA, 15 bp, Homo sapiens
tcatgctctctaaat

SEQ ID NO: 1163878 - DNA, 15 bp, Homo sapiens
atcatgctctctaaa

SEQ ID NO: 1163879 - DNA, 15 bp, Homo sapiens
aatcatgctctctaa

SEQ ID NO: 1163880 - DNA, 15 bp, Homo sapiens
gaatcatgctctcta

SEQ ID NO: 1163881 - DNA, 15 bp, Homo sapiens
agaatcatgctctct

SEQ ID NO: 1163882 - DNA, 15 bp, Homo sapiens
tagaatcatgctctc

SEQ ID NO: 1163883 - DNA, 15 bp, Homo sapiens
gtagaatcatgctct

SEQ ID NO: 1163884 - DNA, 15 bp, Homo sapiens
agtagaatcatgctc

SEQ ID NO: 1163885 - DNA, 15 bp, Homo sapiens
tagtagaatcatgct

SEQ ID NO: 1163886 - DNA, 15 bp, Homo sapiens
ttagtagaatcatgc

SEQ ID NO: 1163887 - DNA, 15 bp, Homo sapiens
attagtagaatcatg

SEQ ID NO: 1163888 - DNA, 15 bp, Homo sapiens
aattagtagaatcat

SEQ ID NO: 1163889 - DNA, 15 bp, Homo sapiens
aaattagtagaatca

SEQ ID NO: 1163890 - DNA, 15 bp, Homo sapiens
gaaattagtagaatc

SEQ ID NO: 1163891 - DNA, 15 bp, Homo sapiens
agaaattagtagaat

SEQ ID NO: 1163892 - DNA, 15 bp, Homo sapiens
tagaaattagtagaa

SEQ ID NO: 1163893 - DNA, 15 bp, Homo sapiens
gtagaaattagtaga

SEQ ID NO: 1163894 - DNA, 15 bp, Homo sapiens
tgtagaaattagtag

SEQ ID NO: 1163895 - DNA, 15 bp, Homo sapiens
atgtagaaattagta

SEQ ID NO: 1163896 - DNA, 15 bp, Homo sapiens
aatgtagaaattagt

SEQ ID NO: 1163897 - DNA, 15 bp, Homo sapiens
aaatgtagaaattag

SEQ ID NO: 1163898 - DNA, 15 bp, Homo sapiens
taaatgtagaaatta

SEQ ID NO: 1163899 - DNA, 15 bp, Homo sapiens
ttaaatgtagaaatt

SEQ ID NO: 1163900 - DNA, 15 bp, Homo sapiens
gttaaatgtagaaat

SEQ ID NO: 1163901 - DNA, 15 bp, Homo sapiens
tgttaaatgtagaaa

SEQ ID NO: 1163902 - DNA, 15 bp, Homo sapiens
ttgttaaatgtagaa

SEQ ID NO: 1163903 - DNA, 15 bp, Homo sapiens
cttgttaaatgtaga

SEQ ID NO: 1163904 - DNA, 15 bp, Homo sapiens
acttgttaaatgtag

SEQ ID NO: 1163905 - DNA, 15 bp, Homo sapiens
aacttgttaaatgta

SEQ ID NO: 1163906 - DNA, 15 bp, Homo sapiens
aaacttgttaaatgt

SEQ ID NO: 1163907 - DNA, 15 bp, Homo sapiens
aaaacttgttaaatg

SEQ ID NO: 1163908 - DNA, 15 bp, Homo sapiens
gaaaacttgttaaat

SEQ ID NO: 1163909 - DNA, 15 bp, Homo sapiens
agaaaacttgttaaa

SEQ ID NO: 1163910 - DNA, 15 bp, Homo sapiens
aagaaaacttgttaa

SEQ ID NO: 1163911 - DNA, 15 bp, Homo sapiens
taagaaaacttgtta

SEQ ID NO: 1163912 - DNA, 15 bp, Homo sapiens
ttaagaaaacttgtt

SEQ ID NO: 1163913 - DNA, 15 bp, Homo sapiens
gttaagaaaacttgt

SEQ ID NO: 1163914 - DNA, 15 bp, Homo sapiens
agttaagaaaacttg

SEQ ID NO: 1163915 - DNA, 15 bp, Homo sapiens
aagttaagaaaactt

SEQ ID NO: 1163916 - DNA, 15 bp, Homo sapiens
caagttaagaaaact

SEQ ID NO: 1163917 - DNA, 15 bp, Homo sapiens
acaagttaagaaaac

SEQ ID NO: 1163918 - DNA, 15 bp, Homo sapiens
aacaagttaagaaaa

SEQ ID NO: 1163919 - DNA, 15 bp, Homo sapiens
taacaagttaagaaa

SEQ ID NO: 1163920 - DNA, 15 bp, Homo sapiens
ttaacaagttaagaa

SEQ ID NO: 1163921 - DNA, 15 bp, Homo sapiens
tttaacaagttaaga

SEQ ID NO: 1163922 - DNA, 15 bp, Homo sapiens
ctttaacaagttaag

SEQ ID NO: 1163923 - DNA, 15 bp, Homo sapiens
cctttaacaagttaa

SEQ ID NO: 1163924 - DNA, 15 bp, Homo sapiens
tcctttaacaagtta

SEQ ID NO: 1163925 - DNA, 15 bp, Homo sapiens
ttcctttaacaagtt

SEQ ID NO: 1163926 - DNA, 15 bp, Homo sapiens
attcctttaacaagt

SEQ ID NO: 1163927 - DNA, 15 bp, Homo sapiens
cattcctttaacaag

SEQ ID NO: 1163928 - DNA, 15 bp, Homo sapiens
acattcctttaacaa

SEQ ID NO: 1163929 - DNA, 15 bp, Homo sapiens
aacattcctttaaca

SEQ ID NO: 1163930 - DNA, 15 bp, Homo sapiens
taacattcctttaac

SEQ ID NO: 1163931 - DNA, 15 bp, Homo sapiens
ctaacattcctttaa

SEQ ID NO: 1163932 - DNA, 15 bp, Homo sapiens
gctaacattccttta

SEQ ID NO: 1163933 - DNA, 15 bp, Homo sapiens
tgctaacattccttt

SEQ ID NO: 1163934 - DNA, 15 bp, Homo sapiens
ttgctaacattcctt

SEQ ID NO: 1163935 - DNA, 15 bp, Homo sapiens
cttgctaacattcct

SEQ ID NO: 1163936 - DNA, 15 bp, Homo sapiens
acttgctaacattcc

SEQ ID NO: 1163937 - DNA, 15 bp, Homo sapiens
gacttgctaacattc

SEQ ID NO: 1163938 - DNA, 15 bp, Homo sapiens
tgacttgctaacatt

SEQ ID NO: 1163939 - DNA, 15 bp, Homo sapiens
ttgacttgctaacat

SEQ ID NO: 1163940 - DNA, 15 bp, Homo sapiens
gttgacttgctaaca

SEQ ID NO: 1163941 - DNA, 15 bp, Homo sapiens
tgttgacttgctaac

SEQ ID NO: 1163942 - DNA, 15 bp, Homo sapiens
atgttgacttgctaa

SEQ ID NO: 1163943 - DNA, 15 bp, Homo sapiens
aatgttgacttgcta

SEQ ID NO: 1163944 - DNA, 15 bp, Homo sapiens
gaatgttgacttgct

SEQ ID NO: 1163945 - DNA, 15 bp, Homo sapiens
ggaatgttgacttgc

SEQ ID NO: 1163946 - DNA, 15 bp, Homo sapiens
aggaatgttgacttg

SEQ ID NO: 1163947 - DNA, 15 bp, Homo sapiens
aaggaatgttgactt

SEQ ID NO: 1163948 - DNA, 15 bp, Homo sapiens
gaaggaatgttgact

SEQ ID NO: 1163949 - DNA, 15 bp, Homo sapiens
ggaaggaatgttgac

SEQ ID NO: 1163950 - DNA, 15 bp, Homo sapiens
gggaaggaatgttga

SEQ ID NO: 1163951 - DNA, 15 bp, Homo sapiens
tgggaaggaatgttg

SEQ ID NO: 1163952 - DNA, 15 bp, Homo sapiens
atgggaaggaatgtt

SEQ ID NO: 1163953 - DNA, 15 bp, Homo sapiens
gatgggaaggaatgt

SEQ ID NO: 1163954 - DNA, 15 bp, Homo sapiens
agatgggaaggaatg

SEQ ID NO: 1163955 - DNA, 15 bp, Homo sapiens
gagatgggaaggaat

SEQ ID NO: 1163956 - DNA, 15 bp, Homo sapiens
tgagatgggaaggaa

SEQ ID NO: 1163957 - DNA, 15 bp, Homo sapiens
atgagatgggaagga

SEQ ID NO: 1163958 - DNA, 15 bp, Homo sapiens
tatgagatgggaagg

SEQ ID NO: 1163959 - DNA, 15 bp, Homo sapiens
atatgagatgggaag

SEQ ID NO: 1163960 - DNA, 15 bp, Homo sapiens
aatatgagatgggaa

SEQ ID NO: 1163961 - DNA, 15 bp, Homo sapiens
taatatgagatggga

SEQ ID NO: 1163962 - DNA, 15 bp, Homo sapiens
gtaatatgagatggg

SEQ ID NO: 1163963 - DNA, 15 bp, Homo sapiens
ggtaatatgagatgg

SEQ ID NO: 1163964 - DNA, 15 bp, Homo sapiens
tggtaatatgagatg

SEQ ID NO: 1163965 - DNA, 15 bp, Homo sapiens
ttggtaatatgagat

SEQ ID NO: 1163966 - DNA, 15 bp, Homo sapiens
gttggtaatatgaga

SEQ ID NO: 1163967 - DNA, 15 bp, Homo sapiens
agttggtaatatgag

SEQ ID NO: 1163968 - DNA, 15 bp, Homo sapiens
gagttggtaatatga

SEQ ID NO: 1163969 - DNA, 15 bp, Homo sapiens
tgagttggtaatatg

SEQ ID NO: 1163970 - DNA, 15 bp, Homo sapiens
gtgagttggtaatat

SEQ ID NO: 1163971 - DNA, 15 bp, Homo sapiens
agtgagttggtaata

SEQ ID NO: 1163972 - DNA, 15 bp, Homo sapiens
gagtgagttggtaat

SEQ ID NO: 1163973 - DNA, 15 bp, Homo sapiens
ggagtgagttggtaa

SEQ ID NO: 1163974 - DNA, 15 bp, Homo sapiens
gggagtgagttggta

SEQ ID NO: 1163975 - DNA, 15 bp, Homo sapiens
tgggagtgagttggt

SEQ ID NO: 1163976 - DNA, 15 bp, Homo sapiens
ctgggagtgagttgg

SEQ ID NO: 1163977 - DNA, 15 bp, Homo sapiens
gctgggagtgagttg

SEQ ID NO: 1163978 - DNA, 15 bp, Homo sapiens
tgctgggagtgagtt

SEQ ID NO: 1163979 - DNA, 15 bp, Homo sapiens
gtgctgggagtgagt

SEQ ID NO: 1163980 - DNA, 15 bp, Homo sapiens
agtgctgggagtgag

SEQ ID NO: 1163981 - DNA, 15 bp, Homo sapiens
gagtgctgggagtga

SEQ ID NO: 1163982 - DNA, 15 bp, Homo sapiens
tgagtgctgggagtg

SEQ ID NO: 1163983 - DNA, 15 bp, Homo sapiens
ctgagtgctgggagt

SEQ ID NO: 1163984 - DNA, 15 bp, Homo sapiens
actgagtgctgggag

SEQ ID NO: 1163985 - DNA, 15 bp, Homo sapiens
aactgagtgctggga

SEQ ID NO: 1163986 - DNA, 15 bp, Homo sapiens
aaactgagtgctggg

SEQ ID NO: 1163987 - DNA, 15 bp, Homo sapiens
taaactgagtgctgg

SEQ ID NO: 1163988 - DNA, 15 bp, Homo sapiens
ttaaactgagtgctg

SEQ ID NO: 1163989 - DNA, 15 bp, Homo sapiens
attaaactgagtgct

SEQ ID NO: 1163990 - DNA, 15 bp, Homo sapiens
cattaaactgagtgc

SEQ ID NO: 1163991 - DNA, 15 bp, Homo sapiens
tcattaaactgagtg

SEQ ID NO: 1163992 - DNA, 15 bp, Homo sapiens
atcattaaactgagt

SEQ ID NO: 1163993 - DNA, 15 bp, Homo sapiens
tatcattaaactgag

SEQ ID NO: 1163994 - DNA, 15 bp, Homo sapiens
atatcattaaactga

SEQ ID NO: 1163995 - DNA, 15 bp, Homo sapiens
catatcattaaactg

SEQ ID NO: 1163996 - DNA, 15 bp, Homo sapiens
acatatcattaaact

SEQ ID NO: 1163997 - DNA, 15 bp, Homo sapiens
aacatatcattaaac

SEQ ID NO: 1163998 - DNA, 15 bp, Homo sapiens
aaacatatcattaaa

SEQ ID NO: 1163999 - DNA, 15 bp, Homo sapiens
aaaacatatcattaa

SEQ ID NO: 1164000 - DNA, 15 bp, Homo sapiens
caaaacatatcatta

SEQ ID NO: 1164001 - DNA, 15 bp, Homo sapiens
ccaaaacatatcatt

SEQ ID NO: 1164002 - DNA, 15 bp, Homo sapiens
accaaaacatatcat

SEQ ID NO: 1164003 - DNA, 15 bp, Homo sapiens
taccaaaacatatca

SEQ ID NO: 1164004 - DNA, 15 bp, Homo sapiens
ttaccaaaacatatc

SEQ ID NO: 1164005 - DNA, 15 bp, Homo sapiens
acttaccaaaacata

SEQ ID NO: 1164006 - DNA, 15 bp, Homo sapiens
cacttaccaaaacat

SEQ ID NO: 1164007 - DNA, 15 bp, Homo sapiens
gcacttaccaaaaca

SEQ ID NO: 1164008 - DNA, 15 bp, Homo sapiens
agcacttaccaaaac

SEQ ID NO: 1164009 - DNA, 15 bp, Homo sapiens
aagcacttaccaaaa

SEQ ID NO: 1164010 - DNA, 15 bp, Homo sapiens
taagcacttaccaaa

SEQ ID NO: 1164011 - DNA, 15 bp, Homo sapiens
ttaagcacttaccaa

SEQ ID NO: 1164012 - DNA, 15 bp, Homo sapiens
attaagcacttacca

SEQ ID NO: 1164013 - DNA, 15 bp, Homo sapiens
tattaagcacttacc

SEQ ID NO: 1164014 - DNA, 15 bp, Homo sapiens
ctattaagcacttac

SEQ ID NO: 1164015 - DNA, 15 bp, Homo sapiens
tctattaagcactta

SEQ ID NO: 1164016 - DNA, 15 bp, Homo sapiens
atctattaagcactt

SEQ ID NO: 1164017 - DNA, 15 bp, Homo sapiens
catctattaagcact

SEQ ID NO: 1164018 - DNA, 15 bp, Homo sapiens
tcatctattaagcac

SEQ ID NO: 1164019 - DNA, 15 bp, Homo sapiens
atcatctattaagca

SEQ ID NO: 1164020 - DNA, 15 bp, Homo sapiens
aatcatctattaagc

SEQ ID NO: 1164021 - DNA, 15 bp, Homo sapiens
gaatcatctattaag

SEQ ID NO: 1164022 - DNA, 15 bp, Homo sapiens
tgaatcatctattaa

SEQ ID NO: 1164023 - DNA, 15 bp, Homo sapiens
atgaatcatctatta

SEQ ID NO: 1164024 - DNA, 15 bp, Homo sapiens
gatgaatcatctatt

SEQ ID NO: 1164025 - DNA, 15 bp, Homo sapiens
agatgaatcatctat

SEQ ID NO: 1164026 - DNA, 15 bp, Homo sapiens
gagatgaatcatcta

SEQ ID NO: 1164027 - DNA, 15 bp, Homo sapiens
agagatgaatcatct

SEQ ID NO: 1164028 - DNA, 15 bp, Homo sapiens
tagagatgaatcatc

SEQ ID NO: 1164029 - DNA, 15 bp, Homo sapiens
ttagagatgaatcat

SEQ ID NO: 1164030 - DNA, 15 bp, Homo sapiens
tttagagatgaatca

SEQ ID NO: 1164031 - DNA, 15 bp, Homo sapiens
ctttagagatgaatc

SEQ ID NO: 1164032 - DNA, 15 bp, Homo sapiens
tctttagagatgaat

SEQ ID NO: 1164033 - DNA, 15 bp, Homo sapiens
atctttagagatgaa

SEQ ID NO: 1164034 - DNA, 15 bp, Homo sapiens
catctttagagatga

SEQ ID NO: 1164035 - DNA, 15 bp, Homo sapiens
tcatctttagagatg

SEQ ID NO: 1164036 - DNA, 15 bp, Homo sapiens
ctcatctttagagat

SEQ ID NO: 1164037 - DNA, 15 bp, Homo sapiens
actcatctttagaga

SEQ ID NO: 1164038 - DNA, 15 bp, Homo sapiens
tactcatctttagag

SEQ ID NO: 1164039 - DNA, 15 bp, Homo sapiens
ctactcatctttaga

SEQ ID NO: 1164040 - DNA, 15 bp, Homo sapiens
tctactcatctttag

SEQ ID NO: 1164041 - DNA, 15 bp, Homo sapiens
ctctactcatcttta

SEQ ID NO: 1164042 - DNA, 15 bp, Homo sapiens
actctactcatcttt

SEQ ID NO: 1164043 - DNA, 15 bp, Homo sapiens
aactctactcatctt

SEQ ID NO: 1164044 - DNA, 15 bp, Homo sapiens
gaactctactcatct

SEQ ID NO: 1164045 - DNA, 15 bp, Homo sapiens
tgaactctactcatc

SEQ ID NO: 1164046 - DNA, 15 bp, Homo sapiens
atgaactctactcat

SEQ ID NO: 1164047 - DNA, 15 bp, Homo sapiens
gatgaactctactca

SEQ ID NO: 1164048 - DNA, 15 bp, Homo sapiens
tgatgaactctactc

SEQ ID NO: 1164049 - DNA, 15 bp, Homo sapiens
ctgatgaactctact

SEQ ID NO: 1164050 - DNA, 15 bp, Homo sapiens
gctgatgaactctac

SEQ ID NO: 1164051 - DNA, 15 bp, Homo sapiens
agctgatgaactcta

SEQ ID NO: 1164052 - DNA, 15 bp, Homo sapiens
cagctgatgaactct

SEQ ID NO: 1164053 - DNA, 15 bp, Homo sapiens
acagctgatgaactc

SEQ ID NO: 1164054 - DNA, 15 bp, Homo sapiens
tacagctgatgaact

SEQ ID NO: 1164055 - DNA, 15 bp, Homo sapiens
atacagctgatgaac

SEQ ID NO: 1164056 - DNA, 15 bp, Homo sapiens
gatacagctgatgaa

SEQ ID NO: 1164057 - DNA, 15 bp, Homo sapiens
tgatacagctgatga

SEQ ID NO: 1164058 - DNA, 15 bp, Homo sapiens
atgatacagctgatg

SEQ ID NO: 1164059 - DNA, 15 bp, Homo sapiens
tatgatacagctgat

SEQ ID NO: 1164060 - DNA, 15 bp, Homo sapiens
atatgatacagctga

SEQ ID NO: 1164061 - DNA, 15 bp, Homo sapiens
gatatgatacagctg

SEQ ID NO: 1164062 - DNA, 15 bp, Homo sapiens
tgatatgatacagct

SEQ ID NO: 1164063 - DNA, 15 bp, Homo sapiens
atgatatgatacagc

SEQ ID NO: 1164064 - DNA, 15 bp, Homo sapiens
catgatatgatacag

SEQ ID NO: 1164065 - DNA, 15 bp, Homo sapiens
tcatgatatgataca

SEQ ID NO: 1164066 - DNA, 15 bp, Homo sapiens
ttcatgatatgatac

SEQ ID NO: 1164067 - DNA, 15 bp, Homo sapiens
tttcatgatatgata

SEQ ID NO: 1164068 - DNA, 15 bp, Homo sapiens
ttttcatgatatgat

SEQ ID NO: 1164069 - DNA, 15 bp, Homo sapiens
cttttcatgatatga

SEQ ID NO: 1164070 - DNA, 15 bp, Homo sapiens
gcttttcatgatatg

SEQ ID NO: 1164071 - DNA, 15 bp, Homo sapiens
tgcttttcatgatat

SEQ ID NO: 1164072 - DNA, 15 bp, Homo sapiens
gtgcttttcatgata

SEQ ID NO: 1164073 - DNA, 15 bp, Homo sapiens
tgtgcttttcatgat

SEQ ID NO: 1164074 - DNA, 15 bp, Homo sapiens
ttgtgcttttcatga

SEQ ID NO: 1164075 - DNA, 15 bp, Homo sapiens
tttgtgcttttcatg

SEQ ID NO: 1164076 - DNA, 15 bp, Homo sapiens
ttttgtgcttttcat

SEQ ID NO: 1164077 - DNA, 15 bp, Homo sapiens
tttttgtgcttttca

SEQ ID NO: 1164078 - DNA, 15 bp, Homo sapiens
ctttttgtgcttttc

SEQ ID NO: 1164079 - DNA, 15 bp, Homo sapiens
actttttgtgctttt

SEQ ID NO: 1164080 - DNA, 15 bp, Homo sapiens
gactttttgtgcttt

SEQ ID NO: 1164081 - DNA, 15 bp, Homo sapiens
tgactttttgtgctt

SEQ ID NO: 1164082 - DNA, 15 bp, Homo sapiens
ctgactttttgtgct

SEQ ID NO: 1164083 - DNA, 15 bp, Homo sapiens
gctgactttttgtgc

SEQ ID NO: 1164084 - DNA, 15 bp, Homo sapiens
agctgactttttgtg

SEQ ID NO: 1164085 - DNA, 15 bp, Homo sapiens
cagctgactttttgt

SEQ ID NO: 1164086 - DNA, 15 bp, Homo sapiens
tcagctgactttttg

SEQ ID NO: 1164087 - DNA, 15 bp, Homo sapiens
ttcagctgacttttt

SEQ ID NO: 1164088 - DNA, 15 bp, Homo sapiens
gttcagctgactttt

SEQ ID NO: 1164089 - DNA, 15 bp, Homo sapiens
agttcagctgacttt

SEQ ID NO: 1164090 - DNA, 15 bp, Homo sapiens
tagttcagctgactt

SEQ ID NO: 1164091 - DNA, 15 bp, Homo sapiens
ctagttcagctgact

SEQ ID NO: 1164092 - DNA, 15 bp, Homo sapiens
gctagttcagctgac

SEQ ID NO: 1164093 - DNA, 15 bp, Homo sapiens
agctagttcagctga

SEQ ID NO: 1164094 - DNA, 15 bp, Homo sapiens
aagctagttcagctg

SEQ ID NO: 1164095 - DNA, 15 bp, Homo sapiens
aaagctagttcagct

SEQ ID NO: 1164096 - DNA, 15 bp, Homo sapiens
aaaagctagttcagc

SEQ ID NO: 1164097 - DNA, 15 bp, Homo sapiens
gaaaagctagttcag

SEQ ID NO: 1164098 - DNA, 15 bp, Homo sapiens
ggaaaagctagttca

SEQ ID NO: 1164099 - DNA, 15 bp, Homo sapiens
cggaaaagctagttc

SEQ ID NO: 1164100 - DNA, 15 bp, Homo sapiens
gcggaaaagctagtt

SEQ ID NO: 1164101 - DNA, 15 bp, Homo sapiens
tgcggaaaagctagt

SEQ ID NO: 1164102 - DNA, 15 bp, Homo sapiens
atgcggaaaagctag

SEQ ID NO: 1164103 - DNA, 15 bp, Homo sapiens
gatgcggaaaagcta

SEQ ID NO: 1164104 - DNA, 15 bp, Homo sapiens
tgatgcggaaaagct

SEQ ID NO: 1164105 - DNA, 15 bp, Homo sapiens
ctgatgcggaaaagc

SEQ ID NO: 1164106 - DNA, 15 bp, Homo sapiens
actgatgcggaaaag

SEQ ID NO: 1164107 - DNA, 15 bp, Homo sapiens
gactgatgcggaaaa

SEQ ID NO: 1164108 - DNA, 15 bp, Homo sapiens
agactgatgcggaaa

SEQ ID NO: 1164109 - DNA, 15 bp, Homo sapiens
gagactgatgcggaa

SEQ ID NO: 1164110 - DNA, 15 bp, Homo sapiens
cgagactgatgcgga

SEQ ID NO: 1164111 - DNA, 15 bp, Homo sapiens
ccgagactgatgcgg

SEQ ID NO: 1164112 - DNA, 15 bp, Homo sapiens
cccgagactgatgcg

SEQ ID NO: 1164113 - DNA, 15 bp, Homo sapiens
tcccgagactgatgc

SEQ ID NO: 1164114 - DNA, 15 bp, Homo sapiens
gtcccgagactgatg

SEQ ID NO: 1164115 - DNA, 15 bp, Homo sapiens
tgtcccgagactgat

SEQ ID NO: 1164116 - DNA, 15 bp, Homo sapiens
ctgtcccgagactga

SEQ ID NO: 1164117 - DNA, 15 bp, Homo sapiens
cctgtcccgagactg

SEQ ID NO: 1164118 - DNA, 15 bp, Homo sapiens
tcctgtcccgagact

SEQ ID NO: 1164119 - DNA, 15 bp, Homo sapiens
atcctgtcccgagac

SEQ ID NO: 1164120 - DNA, 15 bp, Homo sapiens
aatcctgtcccgaga

SEQ ID NO: 1164121 - DNA, 15 bp, Homo sapiens
aaatcctgtcccgag

SEQ ID NO: 1164122 - DNA, 15 bp, Homo sapiens
gaaatcctgtcccga

SEQ ID NO: 1164123 - DNA, 15 bp, Homo sapiens
ggaaatcctgtcccg

SEQ ID NO: 1164124 - DNA, 15 bp, Homo sapiens
tggaaatcctgtccc

SEQ ID NO: 1164125 - DNA, 15 bp, Homo sapiens
ctggaaatcctgtcc

SEQ ID NO: 1164126 - DNA, 15 bp, Homo sapiens
cctggaaatcctgtc

SEQ ID NO: 1164127 - DNA, 15 bp, Homo sapiens
gcctggaaatcctgt

SEQ ID NO: 1164128 - DNA, 15 bp, Homo sapiens
agcctggaaatcctg

SEQ ID NO: 1164129 - DNA, 15 bp, Homo sapiens
cagcctggaaatcct

SEQ ID NO: 1164130 - DNA, 15 bp, Homo sapiens
tcagcctggaaatcc

SEQ ID NO: 1164131 - DNA, 15 bp, Homo sapiens
ttcagcctggaaatc

SEQ ID NO: 1164132 - DNA, 15 bp, Homo sapiens
gttcagcctggaaat

SEQ ID NO: 1164133 - DNA, 15 bp, Homo sapiens
tgttcagcctggaaa

SEQ ID NO: 1164134 - DNA, 15 bp, Homo sapiens
ctgttcagcctggaa

SEQ ID NO: 1164135 - DNA, 15 bp, Homo sapiens
cctgttcagcctgga

SEQ ID NO: 1164136 - DNA, 15 bp, Homo sapiens
gcctgttcagcctgg

SEQ ID NO: 1164137 - DNA, 15 bp, Homo sapiens
ggcctgttcagcctg

SEQ ID NO: 1164138 - DNA, 15 bp, Homo sapiens
tggcctgttcagcct

SEQ ID NO: 1164139 - DNA, 15 bp, Homo sapiens
gtggcctgttcagcc

SEQ ID NO: 1164140 - DNA, 15 bp, Homo sapiens
tgtggcctgttcagc

SEQ ID NO: 1164141 - DNA, 15 bp, Homo sapiens
ttgtggcctgttcag

SEQ ID NO: 1164142 - DNA, 15 bp, Homo sapiens
gttgtggcctgttca

SEQ ID NO: 1164143 - DNA, 15 bp, Homo sapiens
tgttgtggcctgttc

SEQ ID NO: 1164144 - DNA, 15 bp, Homo sapiens
ttgttgtggcctgtt

SEQ ID NO: 1164145 - DNA, 15 bp, Homo sapiens
tttgttgtggcctgt

SEQ ID NO: 1164146 - DNA, 15 bp, Homo sapiens
gtttgttgtggcctg

SEQ ID NO: 1164147 - DNA, 15 bp, Homo sapiens
ggtttgttgtggcct

SEQ ID NO: 1164148 - DNA, 15 bp, Homo sapiens
aggtttgttgtggcc

SEQ ID NO: 1164149 - DNA, 15 bp, Homo sapiens
caggtttgttgtggc

SEQ ID NO: 1164150 - DNA, 15 bp, Homo sapiens
acaggtttgttgtgg

SEQ ID NO: 1164151 - DNA, 15 bp, Homo sapiens
cacaggtttgttgtg

SEQ ID NO: 1164152 - DNA, 15 bp, Homo sapiens
tcacaggtttgttgt

SEQ ID NO: 1164153 - DNA, 15 bp, Homo sapiens
ttcacaggtttgttg

SEQ ID NO: 1164154 - DNA, 15 bp, Homo sapiens
cttcacaggtttgtt

SEQ ID NO: 1164155 - DNA, 15 bp, Homo sapiens
gcttcacaggtttgt

SEQ ID NO: 1164156 - DNA, 15 bp, Homo sapiens
tgcttcacaggtttg

SEQ ID NO: 1164157 - DNA, 15 bp, Homo sapiens
atgcttcacaggttt

SEQ ID NO: 1164158 - DNA, 15 bp, Homo sapiens
tatgcttcacaggtt

SEQ ID NO: 1164159 - DNA, 15 bp, Homo sapiens
ttatgcttcacaggt

SEQ ID NO: 1164160 - DNA, 15 bp, Homo sapiens
tttatgcttcacagg

SEQ ID NO: 1164161 - DNA, 15 bp, Homo sapiens
atttatgcttcacag

SEQ ID NO: 1164162 - DNA, 15 bp, Homo sapiens
tatttatgcttcaca

SEQ ID NO: 1164163 - DNA, 15 bp, Homo sapiens
ttatttatgcttcac

SEQ ID NO: 1164164 - DNA, 15 bp, Homo sapiens
attatttatgcttca

SEQ ID NO: 1164165 - DNA, 15 bp, Homo sapiens
cattatttatgcttc

SEQ ID NO: 1164166 - DNA, 15 bp, Homo sapiens
tcattatttatgctt

SEQ ID NO: 1164167 - DNA, 15 bp, Homo sapiens
atcattatttatgct

SEQ ID NO: 1164168 - DNA, 15 bp, Homo sapiens
aatcattatttatgc

SEQ ID NO: 1164169 - DNA, 15 bp, Homo sapiens
taatcattatttatg

SEQ ID NO: 1164170 - DNA, 15 bp, Homo sapiens
ttaatcattatttat

SEQ ID NO: 1164171 - DNA, 15 bp, Homo sapiens
attaatcattattta

SEQ ID NO: 1164172 - DNA, 15 bp, Homo sapiens
cattaatcattattt

SEQ ID NO: 1164173 - DNA, 15 bp, Homo sapiens
tcattaatcattatt

SEQ ID NO: 1164174 - DNA, 15 bp, Homo sapiens
atcattaatcattat

SEQ ID NO: 1164175 - DNA, 15 bp, Homo sapiens
aatcattaatcatta

SEQ ID NO: 1164176 - DNA, 15 bp, Homo sapiens
taatcattaatcatt

SEQ ID NO: 1164177 - DNA, 15 bp, Homo sapiens
gtaatcattaatcat

SEQ ID NO: 1164178 - DNA, 15 bp, Homo sapiens
tgtaatcattaatca

SEQ ID NO: 1164179 - DNA, 15 bp, Homo sapiens
gtgtaatcattaatc

SEQ ID NO: 1164180 - DNA, 15 bp, Homo sapiens
tgtgtaatcattaat

SEQ ID NO: 1164181 - DNA, 15 bp, Homo sapiens
ttgtgtaatcattaa

SEQ ID NO: 1164182 - DNA, 15 bp, Homo sapiens
tttgtgtaatcatta

SEQ ID NO: 1164183 - DNA, 15 bp, Homo sapiens
ttttgtgtaatcatt

SEQ ID NO: 1164184 - DNA, 15 bp, Homo sapiens
cttttgtgtaatcat

SEQ ID NO: 1164185 - DNA, 15 bp, Homo sapiens
ccttttgtgtaatca

SEQ ID NO: 1164186 - DNA, 15 bp, Homo sapiens
gccttttgtgtaatc

SEQ ID NO: 1164187 - DNA, 15 bp, Homo sapiens
agccttttgtgtaat

SEQ ID NO: 1164188 - DNA, 15 bp, Homo sapiens
gagccttttgtgtaa

SEQ ID NO: 1164189 - DNA, 15 bp, Homo sapiens
ggagccttttgtgta

SEQ ID NO: 1164190 - DNA, 15 bp, Homo sapiens
tggagccttttgtgt

SEQ ID NO: 1164191 - DNA, 15 bp, Homo sapiens
ttggagccttttgtg

SEQ ID NO: 1164192 - DNA, 15 bp, Homo sapiens
tttggagccttttgt

SEQ ID NO: 1164193 - DNA, 15 bp, Homo sapiens
atttggagccttttg

SEQ ID NO: 1164194 - DNA, 15 bp, Homo sapiens
tatttggagcctttt

SEQ ID NO: 1164195 - DNA, 15 bp, Homo sapiens
ctatttggagccttt

SEQ ID NO: 1164196 - DNA, 15 bp, Homo sapiens
actatttggagcctt

SEQ ID NO: 1164197 - DNA, 15 bp, Homo sapiens
cactatttggagcct

SEQ ID NO: 1164198 - DNA, 15 bp, Homo sapiens
tcactatttggagcc

SEQ ID NO: 1164199 - DNA, 15 bp, Homo sapiens
atcactatttggagc

SEQ ID NO: 1164200 - DNA, 15 bp, Homo sapiens
catcactatttggag

SEQ ID NO: 1164201 - DNA, 15 bp, Homo sapiens
ccatcactatttgga

SEQ ID NO: 1164202 - DNA, 15 bp, Homo sapiens
accatcactatttgg

SEQ ID NO: 1164203 - DNA, 15 bp, Homo sapiens
caccatcactatttg

SEQ ID NO: 1164204 - DNA, 15 bp, Homo sapiens
tcaccatcactattt

SEQ ID NO: 1164205 - DNA, 15 bp, Homo sapiens
ttcaccatcactatt

SEQ ID NO: 1164206 - DNA, 15 bp, Homo sapiens
attcaccatcactat

SEQ ID NO: 1164207 - DNA, 15 bp, Homo sapiens
tattcaccatcacta

SEQ ID NO: 1164208 - DNA, 15 bp, Homo sapiens
gtattcaccatcact

SEQ ID NO: 1164209 - DNA, 15 bp, Homo sapiens
tgtattcaccatcac

SEQ ID NO: 1164210 - DNA, 15 bp, Homo sapiens
ttgtattcaccatca

SEQ ID NO: 1164211 - DNA, 15 bp, Homo sapiens
gttgtattcaccatc

SEQ ID NO: 1164212 - DNA, 15 bp, Homo sapiens
ggttgtattcaccat

SEQ ID NO: 1164213 - DNA, 15 bp, Homo sapiens
tggttgtattcacca

SEQ ID NO: 1164214 - DNA, 15 bp, Homo sapiens
ctggttgtattcacc

SEQ ID NO: 1164215 - DNA, 15 bp, Homo sapiens
cctggttgtattcac

SEQ ID NO: 1164216 - DNA, 15 bp, Homo sapiens
tcctggttgtattca

SEQ ID NO: 1164217 - DNA, 15 bp, Homo sapiens
gtcctggttgtattc

SEQ ID NO: 1164218 - DNA, 15 bp, Homo sapiens
agtcctggttgtatt

SEQ ID NO: 1164219 - DNA, 15 bp, Homo sapiens
aagtcctggttgtat

SEQ ID NO: 1164220 - DNA, 15 bp, Homo sapiens
aaagtcctggttgta

SEQ ID NO: 1164221 - DNA, 15 bp, Homo sapiens
taaagtcctggttgt

SEQ ID NO: 1164222 - DNA, 15 bp, Homo sapiens
ataaagtcctggttg

SEQ ID NO: 1164223 - DNA, 15 bp, Homo sapiens
aataaagtcctggtt

SEQ ID NO: 1164224 - DNA, 15 bp, Homo sapiens
aaataaagtcctggt

SEQ ID NO: 1164225 - DNA, 15 bp, Homo sapiens
gaaataaagtcctgg

SEQ ID NO: 1164226 - DNA, 15 bp, Homo sapiens
tgaaataaagtcctg

SEQ ID NO: 1164227 - DNA, 15 bp, Homo sapiens
atgaaataaagtcct

SEQ ID NO: 1164228 - DNA, 15 bp, Homo sapiens
gatgaaataaagtcc

SEQ ID NO: 1164229 - DNA, 15 bp, Homo sapiens
agatgaaataaagtc

SEQ ID NO: 1164230 - DNA, 15 bp, Homo sapiens
cagatgaaataaagt

SEQ ID NO: 1164231 - DNA, 15 bp, Homo sapiens
ccagatgaaataaag

SEQ ID NO: 1164232 - DNA, 15 bp, Homo sapiens
tccagatgaaataaa

SEQ ID NO: 1164233 - DNA, 15 bp, Homo sapiens
atccagatgaaataa

SEQ ID NO: 1164234 - DNA, 15 bp, Homo sapiens
tatccagatgaaata

SEQ ID NO: 1164235 - DNA, 15 bp, Homo sapiens
atatccagatgaaat

SEQ ID NO: 1164236 - DNA, 15 bp, Homo sapiens
aatatccagatgaaa

SEQ ID NO: 1164237 - DNA, 15 bp, Homo sapiens
gaatatccagatgaa

SEQ ID NO: 1164238 - DNA, 15 bp, Homo sapiens
tgaatatccagatga

SEQ ID NO: 1164239 - DNA, 15 bp, Homo sapiens
atgaatatccagatg

SEQ ID NO: 1164240 - DNA, 15 bp, Homo sapiens
tatgaatatccagat

SEQ ID NO: 1164241 - DNA, 15 bp, Homo sapiens
gtatgaatatccaga

SEQ ID NO: 1164242 - DNA, 15 bp, Homo sapiens
tgtatgaatatccag

SEQ ID NO: 1164243 - DNA, 15 bp, Homo sapiens
atgtatgaatatcca

SEQ ID NO: 1164244 - DNA, 15 bp, Homo sapiens
catgtatgaatatcc

SEQ ID NO: 1164245 - DNA, 15 bp, Homo sapiens
tcatgtatgaatatc

SEQ ID NO: 1164246 - DNA, 15 bp, Homo sapiens
ttcatgtatgaatat

SEQ ID NO: 1164247 - DNA, 15 bp, Homo sapiens
tttcatgtatgaata

SEQ ID NO: 1164248 - DNA, 15 bp, Homo sapiens
atttcatgtatgaat

SEQ ID NO: 1164249 - DNA, 15 bp, Homo sapiens
catttcatgtatgaa

SEQ ID NO: 1164250 - DNA, 15 bp, Homo sapiens
acatttcatgtatga

SEQ ID NO: 1164251 - DNA, 15 bp, Homo sapiens
cacatttcatgtatg

SEQ ID NO: 1164252 - DNA, 15 bp, Homo sapiens
tcacatttcatgtat

SEQ ID NO: 1164253 - DNA, 15 bp, Homo sapiens
ttcacatttcatgta

SEQ ID NO: 1164254 - DNA, 15 bp, Homo sapiens
cttcacatttcatgt

SEQ ID NO: 1164255 - DNA, 15 bp, Homo sapiens
acttcacatttcatg

SEQ ID NO: 1164256 - DNA, 15 bp, Homo sapiens
gacttcacatttcat

SEQ ID NO: 1164257 - DNA, 15 bp, Homo sapiens
agacttcacatttca

SEQ ID NO: 1164258 - DNA, 15 bp, Homo sapiens
aagacttcacatttc

SEQ ID NO: 1164259 - DNA, 15 bp, Homo sapiens
caagacttcacattt

SEQ ID NO: 1164260 - DNA, 15 bp, Homo sapiens
gcaagacttcacatt

SEQ ID NO: 1164261 - DNA, 15 bp, Homo sapiens
agcaagacttcacat

SEQ ID NO: 1164262 - DNA, 15 bp, Homo sapiens
cagcaagacttcaca

SEQ ID NO: 1164263 - DNA, 15 bp, Homo sapiens
tcagcaagacttcac

SEQ ID NO: 1164264 - DNA, 15 bp, Homo sapiens
gtcagcaagacttca

SEQ ID NO: 1164265 - DNA, 15 bp, Homo sapiens
tgtcagcaagacttc

SEQ ID NO: 1164266 - DNA, 15 bp, Homo sapiens
atgtcagcaagactt

SEQ ID NO: 1164267 - DNA, 15 bp, Homo sapiens
aatgtcagcaagact

SEQ ID NO: 1164268 - DNA, 15 bp, Homo sapiens
taatgtcagcaagac

SEQ ID NO: 1164269 - DNA, 15 bp, Homo sapiens
ctaatgtcagcaaga

SEQ ID NO: 1164270 - DNA, 15 bp, Homo sapiens
cctaatgtcagcaag

SEQ ID NO: 1164271 - DNA, 15 bp, Homo sapiens
acctaatgtcagcaa

SEQ ID NO: 1164272 - DNA, 15 bp, Homo sapiens
tacctaatgtcagca

SEQ ID NO: 1164273 - DNA, 15 bp, Homo sapiens
ttacctaatgtcagc

SEQ ID NO: 1164274 - DNA, 15 bp, Homo sapiens
tttacctaatgtcag

SEQ ID NO: 1164275 - DNA, 15 bp, Homo sapiens
atttacctaatgtca

SEQ ID NO: 1164276 - DNA, 15 bp, Homo sapiens
catttacctaatgtc

SEQ ID NO: 1164277 - DNA, 15 bp, Homo sapiens
acatttacctaatgt

SEQ ID NO: 1164278 - DNA, 15 bp, Homo sapiens
tacatttacctaatg

SEQ ID NO: 1164279 - DNA, 15 bp, Homo sapiens
ttacatttacctaat

SEQ ID NO: 1164280 - DNA, 15 bp, Homo sapiens
gttacatttacctaa

SEQ ID NO: 1164281 - DNA, 15 bp, Homo sapiens
ggttacatttaccta

SEQ ID NO: 1164282 - DNA, 15 bp, Homo sapiens
aggttacatttacct

SEQ ID NO: 1164283 - DNA, 15 bp, Homo sapiens
caggttacatttacc

SEQ ID NO: 1164284 - DNA, 15 bp, Homo sapiens
tcaggttacatttac

SEQ ID NO: 1164285 - DNA, 15 bp, Homo sapiens
gtcaggttacattta

SEQ ID NO: 1164286 - DNA, 15 bp, Homo sapiens
tgtcaggttacattt

SEQ ID NO: 1164287 - DNA, 15 bp, Homo sapiens
gtgtcaggttacatt

SEQ ID NO: 1164288 - DNA, 15 bp, Homo sapiens
tgtgtcaggttacat

SEQ ID NO: 1164289 - DNA, 15 bp, Homo sapiens
ttgtgtcaggttaca

SEQ ID NO: 1164290 - DNA, 15 bp, Homo sapiens
attgtgtcaggttac

SEQ ID NO: 1164291 - DNA, 15 bp, Homo sapiens
aattgtgtcaggtta

SEQ ID NO: 1164292 - DNA, 15 bp, Homo sapiens
caattgtgtcaggtt

SEQ ID NO: 1164293 - DNA, 15 bp, Homo sapiens
tcaattgtgtcaggt

SEQ ID NO: 1164294 - DNA, 15 bp, Homo sapiens
ttcaattgtgtcagg

SEQ ID NO: 1164295 - DNA, 15 bp, Homo sapiens
cttcaattgtgtcag

SEQ ID NO: 1164296 - DNA, 15 bp, Homo sapiens
ccttcaattgtgtca

SEQ ID NO: 1164297 - DNA, 15 bp, Homo sapiens
accttcaattgtgtc

SEQ ID NO: 1164298 - DNA, 15 bp, Homo sapiens
taccttcaattgtgt

SEQ ID NO: 1164299 - DNA, 15 bp, Homo sapiens
ttaccttcaattgtg

SEQ ID NO: 1164300 - DNA, 15 bp, Homo sapiens
tttaccttcaattgt

SEQ ID NO: 1164301 - DNA, 15 bp, Homo sapiens
ctttaccttcaattg

SEQ ID NO: 1164302 - DNA, 15 bp, Homo sapiens
gctttaccttcaatt

SEQ ID NO: 1164303 - DNA, 15 bp, Homo sapiens
ggctttaccttcaat

SEQ ID NO: 1164304 - DNA, 15 bp, Homo sapiens
tggctttaccttcaa

SEQ ID NO: 1164305 - DNA, 15 bp, Homo sapiens
atggctttaccttca

SEQ ID NO: 1164306 - DNA, 15 bp, Homo sapiens
tatggctttaccttc

SEQ ID NO: 1164307 - DNA, 15 bp, Homo sapiens
atatggctttacctt

SEQ ID NO: 1164308 - DNA, 15 bp, Homo sapiens
gatatggctttacct

SEQ ID NO: 1164309 - DNA, 15 bp, Homo sapiens
agatatggctttacc

SEQ ID NO: 1164310 - DNA, 15 bp, Homo sapiens
cagatatggctttac

SEQ ID NO: 1164311 - DNA, 15 bp, Homo sapiens
acagatatggcttta

SEQ ID NO: 1164312 - DNA, 15 bp, Homo sapiens
tacagatatggcttt

SEQ ID NO: 1164313 - DNA, 15 bp, Homo sapiens
ctacagatatggctt

SEQ ID NO: 1164314 - DNA, 15 bp, Homo sapiens
tctacagatatggct

SEQ ID NO: 1164315 - DNA, 15 bp, Homo sapiens
atctacagatatggc

SEQ ID NO: 1164316 - DNA, 15 bp, Homo sapiens
tatctacagatatgg

SEQ ID NO: 1164317 - DNA, 15 bp, Homo sapiens
ttatctacagatatg

SEQ ID NO: 1164318 - DNA, 15 bp, Homo sapiens
attatctacagatat

SEQ ID NO: 1164319 - DNA, 15 bp, Homo sapiens
cattatctacagata

SEQ ID NO: 1164320 - DNA, 15 bp, Homo sapiens
gcattatctacagat

SEQ ID NO: 1164321 - DNA, 15 bp, Homo sapiens
agcattatctacaga

SEQ ID NO: 1164322 - DNA, 15 bp, Homo sapiens
tagcattatctacag

SEQ ID NO: 1164323 - DNA, 15 bp, Homo sapiens
ttagcattatctaca

SEQ ID NO: 1164324 - DNA, 15 bp, Homo sapiens
cttagcattatctac

SEQ ID NO: 1164325 - DNA, 15 bp, Homo sapiens
tcttagcattatcta

SEQ ID NO: 1164326 - DNA, 15 bp, Homo sapiens
ttcttagcattatct

SEQ ID NO: 1164327 - DNA, 15 bp, Homo sapiens
tttcttagcattatc

SEQ ID NO: 1164328 - DNA, 15 bp, Homo sapiens
gtttcttagcattat

SEQ ID NO: 1164329 - DNA, 15 bp, Homo sapiens
tgtttcttagcatta

SEQ ID NO: 1164330 - DNA, 15 bp, Homo sapiens
gtgtttcttagcatt

SEQ ID NO: 1164331 - DNA, 15 bp, Homo sapiens
ggtgtttcttagcat

SEQ ID NO: 1164332 - DNA, 15 bp, Homo sapiens
aggtgtttcttagca

SEQ ID NO: 1164333 - DNA, 15 bp, Homo sapiens
gaggtgtttcttagc

SEQ ID NO: 1164334 - DNA, 15 bp, Homo sapiens
tgaggtgtttcttag

SEQ ID NO: 1164335 - DNA, 15 bp, Homo sapiens
atgaggtgtttctta

SEQ ID NO: 1164336 - DNA, 15 bp, Homo sapiens
aatgaggtgtttctt

SEQ ID NO: 1164337 - DNA, 15 bp, Homo sapiens
gaatgaggtgtttct

SEQ ID NO: 1164338 - DNA, 15 bp, Homo sapiens
tgaatgaggtgtttc

SEQ ID NO: 1164339 - DNA, 15 bp, Homo sapiens
atgaatgaggtgttt

SEQ ID NO: 1164340 - DNA, 15 bp, Homo sapiens
aatgaatgaggtgtt

SEQ ID NO: 1164341 - DNA, 15 bp, Homo sapiens
taatgaatgaggtgt

SEQ ID NO: 1164342 - DNA, 15 bp, Homo sapiens
ctaatgaatgaggtg

SEQ ID NO: 1164343 - DNA, 15 bp, Homo sapiens
tctaatgaatgaggt

SEQ ID NO: 1164344 - DNA, 15 bp, Homo sapiens
atctaatgaatgagg

SEQ ID NO: 1164345 - DNA, 15 bp, Homo sapiens
catctaatgaatgag

SEQ ID NO: 1164346 - DNA, 15 bp, Homo sapiens
tcatctaatgaatga

SEQ ID NO: 1164347 - DNA, 15 bp, Homo sapiens
gtcatctaatgaatg

SEQ ID NO: 1164348 - DNA, 15 bp, Homo sapiens
agtcatctaatgaat

SEQ ID NO: 1164349 - DNA, 15 bp, Homo sapiens
tagtcatctaatgaa

SEQ ID NO: 1164350 - DNA, 15 bp, Homo sapiens
ctagtcatctaatga

SEQ ID NO: 1164351 - DNA, 15 bp, Homo sapiens
gctagtcatctaatg

SEQ ID NO: 1164352 - DNA, 15 bp, Homo sapiens
tgctagtcatctaat

SEQ ID NO: 1164353 - DNA, 15 bp, Homo sapiens
gtgctagtcatctaa

SEQ ID NO: 1164354 - DNA, 15 bp, Homo sapiens
ggtgctagtcatcta

SEQ ID NO: 1164355 - DNA, 15 bp, Homo sapiens
aggtgctagtcatct

SEQ ID NO: 1164356 - DNA, 15 bp, Homo sapiens
taggtgctagtcatc

SEQ ID NO: 1164357 - DNA, 15 bp, Homo sapiens
ctaggtgctagtcat

SEQ ID NO: 1164358 - DNA, 15 bp, Homo sapiens
cctaggtgctagtca

SEQ ID NO: 1164359 - DNA, 15 bp, Homo sapiens
ccctaggtgctagtc

SEQ ID NO: 1164360 - DNA, 15 bp, Homo sapiens
tccctaggtgctagt

SEQ ID NO: 1164361 - DNA, 15 bp, Homo sapiens
gtccctaggtgctag

SEQ ID NO: 1164362 - DNA, 15 bp, Homo sapiens
tgtccctaggtgcta

SEQ ID NO: 1164363 - DNA, 15 bp, Homo sapiens
ttgtccctaggtgct

SEQ ID NO: 1164364 - DNA, 15 bp, Homo sapiens
tttgtccctaggtgc

SEQ ID NO: 1164365 - DNA, 15 bp, Homo sapiens
ctttgtccctaggtg

SEQ ID NO: 1164366 - DNA, 15 bp, Homo sapiens
cctttgtccctaggt

SEQ ID NO: 1164367 - DNA, 15 bp, Homo sapiens
ccctttgtccctagg

SEQ ID NO: 1164368 - DNA, 15 bp, Homo sapiens
cccctttgtccctag

SEQ ID NO: 1164369 - DNA, 15 bp, Homo sapiens
tcccctttgtcccta

SEQ ID NO: 1164370 - DNA, 15 bp, Homo sapiens
ttcccctttgtccct

SEQ ID NO: 1164371 - DNA, 15 bp, Homo sapiens
gttcccctttgtccc

SEQ ID NO: 1164372 - DNA, 15 bp, Homo sapiens
tgttcccctttgtcc

SEQ ID NO: 1164373 - DNA, 15 bp, Homo sapiens
ttgttcccctttgtc

SEQ ID NO: 1164374 - DNA, 15 bp, Homo sapiens
tttgttcccctttgt

SEQ ID NO: 1164375 - DNA, 15 bp, Homo sapiens
atttgttcccctttg

SEQ ID NO: 1164376 - DNA, 15 bp, Homo sapiens
aatttgttccccttt

SEQ ID NO: 1164377 - DNA, 15 bp, Homo sapiens
taatttgttcccctt

SEQ ID NO: 1164378 - DNA, 15 bp, Homo sapiens
ctaatttgttcccct

SEQ ID NO: 1164379 - DNA, 15 bp, Homo sapiens
gctaatttgttcccc

SEQ ID NO: 1164380 - DNA, 15 bp, Homo sapiens
agctaatttgttccc

SEQ ID NO: 1164381 - DNA, 15 bp, Homo sapiens
tagctaatttgttcc

SEQ ID NO: 1164382 - DNA, 15 bp, Homo sapiens
ctagctaatttgttc

SEQ ID NO: 1164383 - DNA, 15 bp, Homo sapiens
tctagctaatttgtt

SEQ ID NO: 1164384 - DNA, 15 bp, Homo sapiens
ctctagctaatttgt

SEQ ID NO: 1164385 - DNA, 15 bp, Homo sapiens
gctctagctaatttg

SEQ ID NO: 1164386 - DNA, 15 bp, Homo sapiens
ggctctagctaattt

SEQ ID NO: 1164387 - DNA, 15 bp, Homo sapiens
gggctctagctaatt

SEQ ID NO: 1164388 - DNA, 15 bp, Homo sapiens
agggctctagctaat

SEQ ID NO: 1164389 - DNA, 15 bp, Homo sapiens
tagggctctagctaa

SEQ ID NO: 1164390 - DNA, 15 bp, Homo sapiens
ctagggctctagcta

SEQ ID NO: 1164391 - DNA, 15 bp, Homo sapiens
tctagggctctagct

SEQ ID NO: 1164392 - DNA, 15 bp, Homo sapiens
ctctagggctctagc

SEQ ID NO: 1164393 - DNA, 15 bp, Homo sapiens
actctagggctctag

SEQ ID NO: 1164394 - DNA, 15 bp, Homo sapiens
cactctagggctcta

SEQ ID NO: 1164395 - DNA, 15 bp, Homo sapiens
gcactctagggctct

SEQ ID NO: 1164396 - DNA, 15 bp, Homo sapiens
agcactctagggctc

SEQ ID NO: 1164397 - DNA, 15 bp, Homo sapiens
gagcactctagggct

SEQ ID NO: 1164398 - DNA, 15 bp, Homo sapiens
agagcactctagggc

SEQ ID NO: 1164399 - DNA, 15 bp, Homo sapiens
cagagcactctaggg

SEQ ID NO: 1164400 - DNA, 15 bp, Homo sapiens
tcagagcactctagg

SEQ ID NO: 1164401 - DNA, 15 bp, Homo sapiens
ttcagagcactctag

SEQ ID NO: 1164402 - DNA, 15 bp, Homo sapiens
cttcagagcactcta

SEQ ID NO: 1164403 - DNA, 15 bp, Homo sapiens
gcttcagagcactct

SEQ ID NO: 1164404 - DNA, 15 bp, Homo sapiens
agcttcagagcactc

SEQ ID NO: 1164405 - DNA, 15 bp, Homo sapiens
tagcttcagagcact

SEQ ID NO: 1164406 - DNA, 15 bp, Homo sapiens
ctagcttcagagcac

SEQ ID NO: 1164407 - DNA, 15 bp, Homo sapiens
cctagcttcagagca

SEQ ID NO: 1164408 - DNA, 15 bp, Homo sapiens
acctagcttcagagc

SEQ ID NO: 1164409 - DNA, 15 bp, Homo sapiens
gacctagcttcagag

SEQ ID NO: 1164410 - DNA, 15 bp, Homo sapiens
agacctagcttcaga

SEQ ID NO: 1164411 - DNA, 15 bp, Homo sapiens
aagacctagcttcag

SEQ ID NO: 1164412 - DNA, 15 bp, Homo sapiens
taagacctagcttca

SEQ ID NO: 1164413 - DNA, 15 bp, Homo sapiens
gtaagacctagcttc

SEQ ID NO: 1164414 - DNA, 15 bp, Homo sapiens
agtaagacctagctt

SEQ ID NO: 1164415 - DNA, 15 bp, Homo sapiens
cagtaagacctagct

SEQ ID NO: 1164416 - DNA, 15 bp, Homo sapiens
gcagtaagacctagc

SEQ ID NO: 1164417 - DNA, 15 bp, Homo sapiens
cgcagtaagacctag

SEQ ID NO: 1164418 - DNA, 15 bp, Homo sapiens
acgcagtaagaccta

SEQ ID NO: 1164419 - DNA, 15 bp, Homo sapiens
aacgcagtaagacct

SEQ ID NO: 1164420 - DNA, 15 bp, Homo sapiens
aaacgcagtaagacc

SEQ ID NO: 1164421 - DNA, 15 bp, Homo sapiens
taaacgcagtaagac

SEQ ID NO: 1164422 - DNA, 15 bp, Homo sapiens
ttaaacgcagtaaga

SEQ ID NO: 1164423 - DNA, 15 bp, Homo sapiens
tttaaacgcagtaag

SEQ ID NO: 1164424 - DNA, 15 bp, Homo sapiens
ttttaaacgcagtaa

SEQ ID NO: 1164425 - DNA, 15 bp, Homo sapiens
gttttaaacgcagta

SEQ ID NO: 1164426 - DNA, 15 bp, Homo sapiens
tgttttaaacgcagt

SEQ ID NO: 1164427 - DNA, 15 bp, Homo sapiens
ctgttttaaacgcag

SEQ ID NO: 1164428 - DNA, 15 bp, Homo sapiens
tctgttttaaacgca

SEQ ID NO: 1164429 - DNA, 15 bp, Homo sapiens
ttctgttttaaacgc

SEQ ID NO: 1164430 - DNA, 15 bp, Homo sapiens
gttctgttttaaacg

SEQ ID NO: 1164431 - DNA, 15 bp, Homo sapiens
tgttctgttttaaac

SEQ ID NO: 1164432 - DNA, 15 bp, Homo sapiens
ttgttctgttttaaa

SEQ ID NO: 1164433 - DNA, 15 bp, Homo sapiens
tttgttctgttttaa

SEQ ID NO: 1164434 - DNA, 15 bp, Homo sapiens
ttttgttctgtttta

SEQ ID NO: 1164435 - DNA, 15 bp, Homo sapiens
tttttgttctgtttt

SEQ ID NO: 1164436 - DNA, 15 bp, Homo sapiens
ttttttgttctgttt

SEQ ID NO: 1164437 - DNA, 15 bp, Homo sapiens
gttttttgttctgtt

SEQ ID NO: 1164438 - DNA, 15 bp, Homo sapiens
ggttttttgttctgt

SEQ ID NO: 1164439 - DNA, 15 bp, Homo sapiens
aggttttttgttctg

SEQ ID NO: 1164440 - DNA, 15 bp, Homo sapiens
gaggttttttgttct

SEQ ID NO: 1164441 - DNA, 15 bp, Homo sapiens
ggaggttttttgttc

SEQ ID NO: 1164442 - DNA, 15 bp, Homo sapiens
aggaggttttttgtt

SEQ ID NO: 1164443 - DNA, 15 bp, Homo sapiens
aaggaggttttttgt

SEQ ID NO: 1164444 - DNA, 15 bp, Homo sapiens
gaaggaggttttttg

SEQ ID NO: 1164445 - DNA, 15 bp, Homo sapiens
ggaaggaggtttttt

SEQ ID NO: 1164446 - DNA, 15 bp, Homo sapiens
aggaaggaggttttt

SEQ ID NO: 1164447 - DNA, 15 bp, Homo sapiens
taggaaggaggtttt

SEQ ID NO: 1164448 - DNA, 15 bp, Homo sapiens
ctaggaaggaggttt

SEQ ID NO: 1164449 - DNA, 15 bp, Homo sapiens
tctaggaaggaggtt

SEQ ID NO: 1164450 - DNA, 15 bp, Homo sapiens
ttctaggaaggaggt

SEQ ID NO: 1164451 - DNA, 15 bp, Homo sapiens
tttctaggaaggagg

SEQ ID NO: 1164452 - DNA, 15 bp, Homo sapiens
ttttctaggaaggag

SEQ ID NO: 1164453 - DNA, 15 bp, Homo sapiens
cttttctaggaagga

SEQ ID NO: 1164454 - DNA, 15 bp, Homo sapiens
acttttctaggaagg

SEQ ID NO: 1164455 - DNA, 15 bp, Homo sapiens
gacttttctaggaag

SEQ ID NO: 1164456 - DNA, 15 bp, Homo sapiens
ggacttttctaggaa

SEQ ID NO: 1164457 - DNA, 15 bp, Homo sapiens
aggacttttctagga

SEQ ID NO: 1164458 - DNA, 15 bp, Homo sapiens
aaggacttttctagg

SEQ ID NO: 1164459 - DNA, 15 bp, Homo sapiens
gaaggacttttctag

SEQ ID NO: 1164460 - DNA, 15 bp, Homo sapiens
ggaaggacttttcta

SEQ ID NO: 1164461 - DNA, 15 bp, Homo sapiens
aggaaggacttttct

SEQ ID NO: 1164462 - DNA, 15 bp, Homo sapiens
taggaaggacttttc

SEQ ID NO: 1164463 - DNA, 15 bp, Homo sapiens
ttaggaaggactttt

SEQ ID NO: 1164464 - DNA, 15 bp, Homo sapiens
tttaggaaggacttt

SEQ ID NO: 1164465 - DNA, 15 bp, Homo sapiens
ctttaggaaggactt

SEQ ID NO: 1164466 - DNA, 15 bp, Homo sapiens
actttaggaaggact

SEQ ID NO: 1164467 - DNA, 15 bp, Homo sapiens
cactttaggaaggac

SEQ ID NO: 1164468 - DNA, 15 bp, Homo sapiens
gcactttaggaagga

SEQ ID NO: 1164469 - DNA, 15 bp, Homo sapiens
agcactttaggaagg

SEQ ID NO: 1164470 - DNA, 15 bp, Homo sapiens
tagcactttaggaag

SEQ ID NO: 1164471 - DNA, 15 bp, Homo sapiens
gtagcactttaggaa

SEQ ID NO: 1164472 - DNA, 15 bp, Homo sapiens
agtagcactttagga

SEQ ID NO: 1164473 - DNA, 15 bp, Homo sapiens
cagtagcactttagg

SEQ ID NO: 1164474 - DNA, 15 bp, Homo sapiens
ccagtagcactttag

SEQ ID NO: 1164475 - DNA, 15 bp, Homo sapiens
tccagtagcacttta

SEQ ID NO: 1164476 - DNA, 15 bp, Homo sapiens
ttccagtagcacttt

SEQ ID NO: 1164477 - DNA, 15 bp, Homo sapiens
attccagtagcactt

SEQ ID NO: 1164478 - DNA, 15 bp, Homo sapiens
cattccagtagcact

SEQ ID NO: 1164479 - DNA, 15 bp, Homo sapiens
tcattccagtagcac

SEQ ID NO: 1164480 - DNA, 15 bp, Homo sapiens
ctcattccagtagca

SEQ ID NO: 1164481 - DNA, 15 bp, Homo sapiens
actcattccagtagc

SEQ ID NO: 1164482 - DNA, 15 bp, Homo sapiens
aactcattccagtag

SEQ ID NO: 1164483 - DNA, 15 bp, Homo sapiens
caactcattccagta

SEQ ID NO: 1164484 - DNA, 15 bp, Homo sapiens
ccaactcattccagt

SEQ ID NO: 1164485 - DNA, 15 bp, Homo sapiens
tccaactcattccag

SEQ ID NO: 1164486 - DNA, 15 bp, Homo sapiens
ttccaactcattcca

SEQ ID NO: 1164487 - DNA, 15 bp, Homo sapiens
attccaactcattcc

SEQ ID NO: 1164488 - DNA, 15 bp, Homo sapiens
tattccaactcattc

SEQ ID NO: 1164489 - DNA, 15 bp, Homo sapiens
atattccaactcatt

SEQ ID NO: 1164490 - DNA, 15 bp, Homo sapiens
catattccaactcat

SEQ ID NO: 1164491 - DNA, 15 bp, Homo sapiens
tcatattccaactca

SEQ ID NO: 1164492 - DNA, 15 bp, Homo sapiens
ttcatattccaactc

SEQ ID NO: 1164493 - DNA, 15 bp, Homo sapiens
attcatattccaact

SEQ ID NO: 1164494 - DNA, 15 bp, Homo sapiens
aattcatattccaac

SEQ ID NO: 1164495 - DNA, 15 bp, Homo sapiens
gaattcatattccaa

SEQ ID NO: 1164496 - DNA, 15 bp, Homo sapiens
tgaattcatattcca

SEQ ID NO: 1164497 - DNA, 15 bp, Homo sapiens
atgaattcatattcc

SEQ ID NO: 1164498 - DNA, 15 bp, Homo sapiens
catgaattcatattc

SEQ ID NO: 1164499 - DNA, 15 bp, Homo sapiens
gcatgaattcatatt

SEQ ID NO: 1164500 - DNA, 15 bp, Homo sapiens
agcatgaattcatat

SEQ ID NO: 1164501 - DNA, 15 bp, Homo sapiens
tagcatgaattcata

SEQ ID NO: 1164502 - DNA, 15 bp, Homo sapiens
gtagcatgaattcat

SEQ ID NO: 1164503 - DNA, 15 bp, Homo sapiens
tgtagcatgaattca

SEQ ID NO: 1164504 - DNA, 15 bp, Homo sapiens
ctgtagcatgaattc

SEQ ID NO: 1164505 - DNA, 15 bp, Homo sapiens
actgtagcatgaatt

SEQ ID NO: 1164506 - DNA, 15 bp, Homo sapiens
aactgtagcatgaat

SEQ ID NO: 1164507 - DNA, 15 bp, Homo sapiens
aaactgtagcatgaa

SEQ ID NO: 1164508 - DNA, 15 bp, Homo sapiens
aaaactgtagcatga

SEQ ID NO: 1164509 - DNA, 15 bp, Homo sapiens
aaaaactgtagcatg

SEQ ID NO: 1164510 - DNA, 15 bp, Homo sapiens
taaaaactgtagcat

SEQ ID NO: 1164511 - DNA, 15 bp, Homo sapiens
ttaaaaactgtagca

SEQ ID NO: 1164512 - DNA, 15 bp, Homo sapiens
attaaaaactgtagc

SEQ ID NO: 1164513 - DNA, 15 bp, Homo sapiens
cattaaaaactgtag

SEQ ID NO: 1164514 - DNA, 15 bp, Homo sapiens
tcattaaaaactgta

SEQ ID NO: 1164515 - DNA, 15 bp, Homo sapiens
ttcattaaaaactgt

SEQ ID NO: 1164516 - DNA, 15 bp, Homo sapiens
tttcattaaaaactg

SEQ ID NO: 1164517 - DNA, 15 bp, Homo sapiens
atttcattaaaaact

SEQ ID NO: 1164518 - DNA, 15 bp, Homo sapiens
aatttcattaaaaac

SEQ ID NO: 1164519 - DNA, 15 bp, Homo sapiens
aaatttcattaaaaa

SEQ ID NO: 1164520 - DNA, 15 bp, Homo sapiens
taaatttcattaaaa

SEQ ID NO: 1164521 - DNA, 15 bp, Homo sapiens
ttaaatttcattaaa

SEQ ID NO: 1164522 - DNA, 15 bp, Homo sapiens
tttaaatttcattaa

SEQ ID NO: 1164523 - DNA, 15 bp, Homo sapiens
gtttaaatttcatta

SEQ ID NO: 1164524 - DNA, 15 bp, Homo sapiens
agtttaaatttcatt

SEQ ID NO: 1164525 - DNA, 15 bp, Homo sapiens
cagtttaaatttcat

SEQ ID NO: 1164526 - DNA, 15 bp, Homo sapiens
acagtttaaatttca

SEQ ID NO: 1164527 - DNA, 15 bp, Homo sapiens
aacagtttaaatttc

SEQ ID NO: 1164528 - DNA, 15 bp, Homo sapiens
aaacagtttaaattt

SEQ ID NO: 1164529 - DNA, 15 bp, Homo sapiens
aaaacagtttaaatt

SEQ ID NO: 1164530 - DNA, 15 bp, Homo sapiens
aaaaacagtttaaat

SEQ ID NO: 1164531 - DNA, 15 bp, Homo sapiens
taaaaacagtttaaa

SEQ ID NO: 1164532 - DNA, 15 bp, Homo sapiens
ttaaaaacagtttaa

SEQ ID NO: 1164533 - DNA, 15 bp, Homo sapiens
tttaaaaacagttta

SEQ ID NO: 1164534 - DNA, 15 bp, Homo sapiens
ctttaaaaacagttt

SEQ ID NO: 1164535 - DNA, 15 bp, Homo sapiens
tctttaaaaacagtt

SEQ ID NO: 1164536 - DNA, 15 bp, Homo sapiens
ctctttaaaaacagt

SEQ ID NO: 1164537 - DNA, 15 bp, Homo sapiens
actctttaaaaacag

SEQ ID NO: 1164538 - DNA, 15 bp, Homo sapiens
tactctttaaaaaca

SEQ ID NO: 1164539 - DNA, 15 bp, Homo sapiens
gtactctttaaaaac

SEQ ID NO: 1164540 - DNA, 15 bp, Homo sapiens
agtactctttaaaaa

SEQ ID NO: 1164541 - DNA, 15 bp, Homo sapiens
aagtactctttaaaa

SEQ ID NO: 1164542 - DNA, 15 bp, Homo sapiens
caagtactctttaaa

SEQ ID NO: 1164543 - DNA, 15 bp, Homo sapiens
tcaagtactctttaa

SEQ ID NO: 1164544 - DNA, 15 bp, Homo sapiens
ttcaagtactcttta

SEQ ID NO: 1164545 - DNA, 15 bp, Homo sapiens
cttcaagtactcttt

SEQ ID NO: 1164546 - DNA, 15 bp, Homo sapiens
tcttcaagtactctt

SEQ ID NO: 1164547 - DNA, 15 bp, Homo sapiens
ttcttcaagtactct

SEQ ID NO: 1164548 - DNA, 15 bp, Homo sapiens
tttcttcaagtactc

SEQ ID NO: 1164549 - DNA, 15 bp, Homo sapiens
ctttcttcaagtact

SEQ ID NO: 1164550 - DNA, 15 bp, Homo sapiens
actttcttcaagtac

SEQ ID NO: 1164551 - DNA, 15 bp, Homo sapiens
aactttcttcaagta

SEQ ID NO: 1164552 - DNA, 15 bp, Homo sapiens
aaactttcttcaagt

SEQ ID NO: 1164553 - DNA, 15 bp, Homo sapiens
caaactttcttcaag

SEQ ID NO: 1164554 - DNA, 15 bp, Homo sapiens
tcaaactttcttcaa

SEQ ID NO: 1164555 - DNA, 15 bp, Homo sapiens
ttcaaactttcttca

SEQ ID NO: 1164556 - DNA, 15 bp, Homo sapiens
tttcaaactttcttc

SEQ ID NO: 1164557 - DNA, 15 bp, Homo sapiens
ttttcaaactttctt

SEQ ID NO: 1164558 - DNA, 15 bp, Homo sapiens
tttttcaaactttct

SEQ ID NO: 1164559 - DNA, 15 bp, Homo sapiens
ttttttcaaactttc

SEQ ID NO: 1164560 - DNA, 15 bp, Homo sapiens
tttttttcaaacttt

SEQ ID NO: 1164561 - DNA, 15 bp, Homo sapiens
ttttttttcaaactt

SEQ ID NO: 1164562 - DNA, 15 bp, Homo sapiens
tttttttttcaaact

SEQ ID NO: 1164563 - DNA, 15 bp, Homo sapiens
ttttttttttcaaac

SEQ ID NO: 1164564 - DNA, 15 bp, Homo sapiens
ctttttttttttttc

SEQ ID NO: 1164565 - DNA, 15 bp, Homo sapiens
gcctttttttttttt

SEQ ID NO: 1164566 - DNA, 15 bp, Homo sapiens
tgccttttttttttt

SEQ ID NO: 1164567 - DNA, 15 bp, Homo sapiens
ctgcctttttttttt

SEQ ID NO: 1164568 - DNA, 15 bp, Homo sapiens
tctgccttttttttt

SEQ ID NO: 1164569 - DNA, 15 bp, Homo sapiens
ctctgcctttttttt

SEQ ID NO: 1164570 - DNA, 15 bp, Homo sapiens
tctctgccttttttt

SEQ ID NO: 1164571 - DNA, 15 bp, Homo sapiens
ttctctgcctttttt

SEQ ID NO: 1164572 - DNA, 15 bp, Homo sapiens
cttctctgccttttt

SEQ ID NO: 1164573 - DNA, 15 bp, Homo sapiens
ccttctctgcctttt

SEQ ID NO: 1164574 - DNA, 15 bp, Homo sapiens
tccttctctgccttt

SEQ ID NO: 1164575 - DNA, 15 bp, Homo sapiens
atccttctctgcctt

SEQ ID NO: 1164576 - DNA, 15 bp, Homo sapiens
catccttctctgcct

SEQ ID NO: 1164577 - DNA, 15 bp, Homo sapiens
tcatccttctctgcc

SEQ ID NO: 1164578 - DNA, 15 bp, Homo sapiens
atcatccttctctgc

SEQ ID NO: 1164579 - DNA, 15 bp, Homo sapiens
tatcatccttctctg

SEQ ID NO: 1164580 - DNA, 15 bp, Homo sapiens
ctatcatccttctct

SEQ ID NO: 1164581 - DNA, 15 bp, Homo sapiens
cctatcatccttctc

SEQ ID NO: 1164582 - DNA, 15 bp, Homo sapiens
acctatcatccttct

SEQ ID NO: 1164583 - DNA, 15 bp, Homo sapiens
cacctatcatccttc

SEQ ID NO: 1164584 - DNA, 15 bp, Homo sapiens
tcacctatcatcctt

SEQ ID NO: 1164585 - DNA, 15 bp, Homo sapiens
ctcacctatcatcct

SEQ ID NO: 1164586 - DNA, 15 bp, Homo sapiens
tctcacctatcatcc

SEQ ID NO: 1164587 - DNA, 15 bp, Homo sapiens
ttctcacctatcatc

SEQ ID NO: 1164588 - DNA, 15 bp, Homo sapiens
tttctcacctatcat

SEQ ID NO: 1164589 - DNA, 15 bp, Homo sapiens
ctttctcacctatca

SEQ ID NO: 1164590 - DNA, 15 bp, Homo sapiens
cctttctcacctatc

SEQ ID NO: 1164591 - DNA, 15 bp, Homo sapiens
gcctttctcacctat

SEQ ID NO: 1164592 - DNA, 15 bp, Homo sapiens
agcctttctcaccta

SEQ ID NO: 1164593 - DNA, 15 bp, Homo sapiens
tagcctttctcacct

SEQ ID NO: 1164594 - DNA, 15 bp, Homo sapiens
atagcctttctcacc

SEQ ID NO: 1164595 - DNA, 15 bp, Homo sapiens
aatagcctttctcac

SEQ ID NO: 1164596 - DNA, 15 bp, Homo sapiens
aaatagcctttctca

SEQ ID NO: 1164597 - DNA, 15 bp, Homo sapiens
gaaatagcctttctc

SEQ ID NO: 1164598 - DNA, 15 bp, Homo sapiens
agaaatagcctttct

SEQ ID NO: 1164599 - DNA, 15 bp, Homo sapiens
tagaaatagcctttc

SEQ ID NO: 1164600 - DNA, 15 bp, Homo sapiens
ctagaaatagccttt

SEQ ID NO: 1164601 - DNA, 15 bp, Homo sapiens
cctagaaatagcctt

SEQ ID NO: 1164602 - DNA, 15 bp, Homo sapiens
tcctagaaatagcct

SEQ ID NO: 1164603 - DNA, 15 bp, Homo sapiens
ctcctagaaatagcc

SEQ ID NO: 1164604 - DNA, 15 bp, Homo sapiens
actcctagaaatagc

SEQ ID NO: 1164605 - DNA, 15 bp, Homo sapiens
gactcctagaaatag

SEQ ID NO: 1164606 - DNA, 15 bp, Homo sapiens
tgactcctagaaata

SEQ ID NO: 1164607 - DNA, 15 bp, Homo sapiens
ttgactcctagaaat

SEQ ID NO: 1164608 - DNA, 15 bp, Homo sapiens
tttgactcctagaaa

SEQ ID NO: 1164609 - DNA, 15 bp, Homo sapiens
ttttgactcctagaa

SEQ ID NO: 1164610 - DNA, 15 bp, Homo sapiens
tttttgactcctaga

SEQ ID NO: 1164611 - DNA, 15 bp, Homo sapiens
ctttttgactcctag

SEQ ID NO: 1164612 - DNA, 15 bp, Homo sapiens
tctttttgactccta

SEQ ID NO: 1164613 - DNA, 15 bp, Homo sapiens
ctctttttgactcct

SEQ ID NO: 1164614 - DNA, 15 bp, Homo sapiens
tctctttttgactcc

SEQ ID NO: 1164615 - DNA, 15 bp, Homo sapiens
ttctctttttgactc

SEQ ID NO: 1164616 - DNA, 15 bp, Homo sapiens
tttctctttttgact

SEQ ID NO: 1164617 - DNA, 15 bp, Homo sapiens
gtttctctttttgac

SEQ ID NO: 1164618 - DNA, 15 bp, Homo sapiens
agtttctctttttga

SEQ ID NO: 1164619 - DNA, 15 bp, Homo sapiens
gagtttctctttttg

SEQ ID NO: 1164620 - DNA, 15 bp, Homo sapiens
agagtttctcttttt

SEQ ID NO: 1164621 - DNA, 15 bp, Homo sapiens
aagagtttctctttt

SEQ ID NO: 1164622 - DNA, 15 bp, Homo sapiens
caagagtttctcttt

SEQ ID NO: 1164623 - DNA, 15 bp, Homo sapiens
ccaagagtttctctt

SEQ ID NO: 1164624 - DNA, 15 bp, Homo sapiens
cccaagagtttctct

SEQ ID NO: 1164625 - DNA, 15 bp, Homo sapiens
tcccaagagtttctc

SEQ ID NO: 1164626 - DNA, 15 bp, Homo sapiens
atcccaagagtttct

SEQ ID NO: 1164627 - DNA, 15 bp, Homo sapiens
gatcccaagagtttc

SEQ ID NO: 1164628 - DNA, 15 bp, Homo sapiens
tgatcccaagagttt

SEQ ID NO: 1164629 - DNA, 15 bp, Homo sapiens
ttgatcccaagagtt

SEQ ID NO: 1164630 - DNA, 15 bp, Homo sapiens
cttgatcccaagagt

SEQ ID NO: 1164631 - DNA, 15 bp, Homo sapiens
acttgatcccaagag

SEQ ID NO: 1164632 - DNA, 15 bp, Homo sapiens
gacttgatcccaaga

SEQ ID NO: 1164633 - DNA, 15 bp, Homo sapiens
tgacttgatcccaag

SEQ ID NO: 1164634 - DNA, 15 bp, Homo sapiens
atgacttgatcccaa

SEQ ID NO: 1164635 - DNA, 15 bp, Homo sapiens
catgacttgatccca

SEQ ID NO: 1164636 - DNA, 15 bp, Homo sapiens
gcatgacttgatccc

SEQ ID NO: 1164637 - DNA, 15 bp, Homo sapiens
ggcatgacttgatcc

SEQ ID NO: 1164638 - DNA, 15 bp, Homo sapiens
aggcatgacttgatc

SEQ ID NO: 1164639 - DNA, 15 bp, Homo sapiens
aaggcatgacttgat

SEQ ID NO: 1164640 - DNA, 15 bp, Homo sapiens
gaaggcatgacttga

SEQ ID NO: 1164641 - DNA, 15 bp, Homo sapiens
ggaaggcatgacttg

SEQ ID NO: 1164642 - DNA, 15 bp, Homo sapiens
tggaaggcatgactt

SEQ ID NO: 1164643 - DNA, 15 bp, Homo sapiens
gtggaaggcatgact

SEQ ID NO: 1164644 - DNA, 15 bp, Homo sapiens
ggtggaaggcatgac

SEQ ID NO: 1164645 - DNA, 15 bp, Homo sapiens
tggtggaaggcatga

SEQ ID NO: 1164646 - DNA, 15 bp, Homo sapiens
atggtggaaggcatg

SEQ ID NO: 1164647 - DNA, 15 bp, Homo sapiens
gatggtggaaggcat

SEQ ID NO: 1164648 - DNA, 15 bp, Homo sapiens
agatggtggaaggca

SEQ ID NO: 1164649 - DNA, 15 bp, Homo sapiens
aagatggtggaaggc

SEQ ID NO: 1164650 - DNA, 15 bp, Homo sapiens
aaagatggtggaagg

SEQ ID NO: 1164651 - DNA, 15 bp, Homo sapiens
gaaagatggtggaag

SEQ ID NO: 1164652 - DNA, 15 bp, Homo sapiens
agaaagatggtggaa

SEQ ID NO: 1164653 - DNA, 15 bp, Homo sapiens
gagaaagatggtgga

SEQ ID NO: 1164654 - DNA, 15 bp, Homo sapiens
cgagaaagatggtgg

SEQ ID NO: 1164655 - DNA, 15 bp, Homo sapiens
tcgagaaagatggtg

SEQ ID NO: 1164656 - DNA, 15 bp, Homo sapiens
ctcgagaaagatggt

SEQ ID NO: 1164657 - DNA, 15 bp, Homo sapiens
tctcgagaaagatgg

SEQ ID NO: 1164658 - DNA, 15 bp, Homo sapiens
atctcgagaaagatg

SEQ ID NO: 1164659 - DNA, 15 bp, Homo sapiens
tatctcgagaaagat

SEQ ID NO: 1164660 - DNA, 15 bp, Homo sapiens
gtatctcgagaaaga

SEQ ID NO: 1164661 - DNA, 15 bp, Homo sapiens
agtatctcgagaaag

SEQ ID NO: 1164662 - DNA, 15 bp, Homo sapiens
gagtatctcgagaaa

SEQ ID NO: 1164663 - DNA, 15 bp, Homo sapiens
ggagtatctcgagaa

SEQ ID NO: 1164664 - DNA, 15 bp, Homo sapiens
aggagtatctcgaga

SEQ ID NO: 1164665 - DNA, 15 bp, Homo sapiens
taggagtatctcgag

SEQ ID NO: 1164666 - DNA, 15 bp, Homo sapiens
ttaggagtatctcga

SEQ ID NO: 1164667 - DNA, 15 bp, Homo sapiens
attaggagtatctcg

SEQ ID NO: 1164668 - DNA, 15 bp, Homo sapiens
tattaggagtatctc

SEQ ID NO: 1164669 - DNA, 15 bp, Homo sapiens
ttattaggagtatct

SEQ ID NO: 1164670 - DNA, 15 bp, Homo sapiens
cttattaggagtatc

SEQ ID NO: 1164671 - DNA, 15 bp, Homo sapiens
tcttattaggagtat

SEQ ID NO: 1164672 - DNA, 15 bp, Homo sapiens
ttcttattaggagta

SEQ ID NO: 1164673 - DNA, 15 bp, Homo sapiens
tttcttattaggagt

SEQ ID NO: 1164674 - DNA, 15 bp, Homo sapiens
atttcttattaggag

SEQ ID NO: 1164675 - DNA, 15 bp, Homo sapiens
gatttcttattagga

SEQ ID NO: 1164676 - DNA, 15 bp, Homo sapiens
ggatttcttattagg

SEQ ID NO: 1164677 - DNA, 15 bp, Homo sapiens
gggatttcttattag

SEQ ID NO: 1164678 - DNA, 15 bp, Homo sapiens
tgggatttcttatta

SEQ ID NO: 1164679 - DNA, 15 bp, Homo sapiens
ctgggatttcttatt

SEQ ID NO: 1164680 - DNA, 15 bp, Homo sapiens
tctgggatttcttat

SEQ ID NO: 1164681 - DNA, 15 bp, Homo sapiens
atctgggatttctta

SEQ ID NO: 1164682 - DNA, 15 bp, Homo sapiens
gatctgggatttctt

SEQ ID NO: 1164683 - DNA, 15 bp, Homo sapiens
agatctgggatttct

SEQ ID NO: 1164684 - DNA, 15 bp, Homo sapiens
cagatctgggatttc

SEQ ID NO: 1164685 - DNA, 15 bp, Homo sapiens
ccagatctgggattt

SEQ ID NO: 1164686 - DNA, 15 bp, Homo sapiens
gccagatctgggatt

SEQ ID NO: 1164687 - DNA, 15 bp, Homo sapiens
tgccagatctgggat

SEQ ID NO: 1164688 - DNA, 15 bp, Homo sapiens
ttgccagatctggga

SEQ ID NO: 1164689 - DNA, 15 bp, Homo sapiens
cttgccagatctggg

SEQ ID NO: 1164690 - DNA, 15 bp, Homo sapiens
acttgccagatctgg

SEQ ID NO: 1164691 - DNA, 15 bp, Homo sapiens
cacttgccagatctg

SEQ ID NO: 1164692 - DNA, 15 bp, Homo sapiens
tcacttgccagatct

SEQ ID NO: 1164693 - DNA, 15 bp, Homo sapiens
ctcacttgccagatc

SEQ ID NO: 1164694 - DNA, 15 bp, Homo sapiens
tctcacttgccagat

SEQ ID NO: 1164695 - DNA, 15 bp, Homo sapiens
ttctcacttgccaga

SEQ ID NO: 1164696 - DNA, 15 bp, Homo sapiens
tttctcacttgccag

SEQ ID NO: 1164697 - DNA, 15 bp, Homo sapiens
aggctgaggcaggga

SEQ ID NO: 1164698 - DNA, 15 bp, Homo sapiens
agcgcctgtaatccc

SEQ ID NO: 1164699 - DNA, 15 bp, Homo sapiens
tagcgcctgtaatcc

SEQ ID NO: 1164700 - DNA, 15 bp, Homo sapiens
gtagcgcctgtaatc

SEQ ID NO: 1164701 - DNA, 15 bp, Homo sapiens
ggtagcgcctgtaat

SEQ ID NO: 1164702 - DNA, 15 bp, Homo sapiens
tggtagcgcctgtaa

SEQ ID NO: 1164703 - DNA, 15 bp, Homo sapiens
atggtagcgcctgta

SEQ ID NO: 1164704 - DNA, 15 bp, Homo sapiens
catggtagcgcctgt

SEQ ID NO: 1164705 - DNA, 15 bp, Homo sapiens
gcatggtagcgcctg

SEQ ID NO: 1164706 - DNA, 15 bp, Homo sapiens
ggcatggtagcgcct

SEQ ID NO: 1164707 - DNA, 15 bp, Homo sapiens
gggcatggtagcgcc

SEQ ID NO: 1164708 - DNA, 15 bp, Homo sapiens
cgggcatggtagcgc

SEQ ID NO: 1164709 - DNA, 15 bp, Homo sapiens
ccgggcatggtagcg

SEQ ID NO: 1164710 - DNA, 15 bp, Homo sapiens
gccgggcatggtagc

SEQ ID NO: 1164711 - DNA, 15 bp, Homo sapiens
agccgggcatggtag

SEQ ID NO: 1164712 - DNA, 15 bp, Homo sapiens
tagccgggcatggta

SEQ ID NO: 1164713 - DNA, 15 bp, Homo sapiens
cgaaaccctgtctct

SEQ ID NO: 1164714 - DNA, 15 bp, Homo sapiens
gcgaaaccctgtctc

SEQ ID NO: 1164715 - DNA, 15 bp, Homo sapiens
ggcgaaaccctgtct

SEQ ID NO: 1164716 - DNA, 15 bp, Homo sapiens
tggcgaaaccctgtc

SEQ ID NO: 1164717 - DNA, 15 bp, Homo sapiens
atggcgaaaccctgt

SEQ ID NO: 1164718 - DNA, 15 bp, Homo sapiens
catggcgaaaccctg

SEQ ID NO: 1164719 - DNA, 15 bp, Homo sapiens
acatggcgaaaccct

SEQ ID NO: 1164720 - DNA, 15 bp, Homo sapiens
cgccaacatggcgaa

SEQ ID NO: 1164721 - DNA, 15 bp, Homo sapiens
tcgccaacatggcga

SEQ ID NO: 1164722 - DNA, 15 bp, Homo sapiens
ctcgccaacatggcg

SEQ ID NO: 1164723 - DNA, 15 bp, Homo sapiens
cctcgccaacatggc

SEQ ID NO: 1164724 - DNA, 15 bp, Homo sapiens
gcctcgccaacatgg

SEQ ID NO: 1164725 - DNA, 15 bp, Homo sapiens
agcctcgccaacatg

SEQ ID NO: 1164726 - DNA, 15 bp, Homo sapiens
cagcctcgccaacat

SEQ ID NO: 1164727 - DNA, 15 bp, Homo sapiens
ccagcctcgccaaca

SEQ ID NO: 1164728 - DNA, 15 bp, Homo sapiens
accagcctcgccaac

SEQ ID NO: 1164729 - DNA, 15 bp, Homo sapiens
gaccagcctcgccaa

SEQ ID NO: 1164730 - DNA, 15 bp, Homo sapiens
agaccagcctcgcca

SEQ ID NO: 1164731 - DNA, 15 bp, Homo sapiens
aagaccagcctcgcc

SEQ ID NO: 1164732 - DNA, 15 bp, Homo sapiens
caagaccagcctcgc

SEQ ID NO: 1164733 - DNA, 15 bp, Homo sapiens
tcaagaccagcctcg

SEQ ID NO: 1164734 - DNA, 15 bp, Homo sapiens
ttcaagaccagcctc

SEQ ID NO: 1164735 - DNA, 15 bp, Homo sapiens
caggcgggtagatca

SEQ ID NO: 1164736 - DNA, 15 bp, Homo sapiens
ccaggcgggtagatc

SEQ ID NO: 1164737 - DNA, 15 bp, Homo sapiens
cccaggcgggtagat

SEQ ID NO: 1164738 - DNA, 15 bp, Homo sapiens
gcccaggcgggtaga

SEQ ID NO: 1164739 - DNA, 15 bp, Homo sapiens
ggcccaggcgggtag

SEQ ID NO: 1164740 - DNA, 15 bp, Homo sapiens
aggcccaggcgggta

SEQ ID NO: 1164741 - DNA, 15 bp, Homo sapiens
gaggcccaggcgggt

SEQ ID NO: 1164742 - DNA, 15 bp, Homo sapiens
ggaggcccaggcggg

SEQ ID NO: 1164743 - DNA, 15 bp, Homo sapiens
gggaggcccaggcgg

SEQ ID NO: 1164744 - DNA, 15 bp, Homo sapiens
tgggaggcccaggcg

SEQ ID NO: 1164745 - DNA, 15 bp, Homo sapiens
tgcactttgggaggc

SEQ ID NO: 1164746 - DNA, 15 bp, Homo sapiens
atgcactttgggagg

SEQ ID NO: 1164747 - DNA, 15 bp, Homo sapiens
gatgcactttgggag

SEQ ID NO: 1164748 - DNA, 15 bp, Homo sapiens
tgatgcactttggga

SEQ ID NO: 1164749 - DNA, 15 bp, Homo sapiens
ctgatgcactttggg

SEQ ID NO: 1164750 - DNA, 15 bp, Homo sapiens
actgatgcactttgg

SEQ ID NO: 1164751 - DNA, 15 bp, Homo sapiens
cactgatgcactttg

SEQ ID NO: 1164752 - DNA, 15 bp, Homo sapiens
ccactgatgcacttt

SEQ ID NO: 1164753 - DNA, 15 bp, Homo sapiens
accactgatgcactt

SEQ ID NO: 1164754 - DNA, 15 bp, Homo sapiens
taccactgatgcact

SEQ ID NO: 1164755 - DNA, 15 bp, Homo sapiens
ataccactgatgcac

SEQ ID NO: 1164756 - DNA, 15 bp, Homo sapiens
aataccactgatgca

SEQ ID NO: 1164757 - DNA, 15 bp, Homo sapiens
aaataccactgatgc

SEQ ID NO: 1164758 - DNA, 15 bp, Homo sapiens
aaaataccactgatg

SEQ ID NO: 1164759 - DNA, 15 bp, Homo sapiens
aaaaataccactgat

SEQ ID NO: 1164760 - DNA, 15 bp, Homo sapiens
taaaaataccactga

SEQ ID NO: 1164761 - DNA, 15 bp, Homo sapiens
ttaaaaataccactg

SEQ ID NO: 1164762 - DNA, 15 bp, Homo sapiens
attaaaaataccact

SEQ ID NO: 1164763 - DNA, 15 bp, Homo sapiens
tattaaaaataccac

SEQ ID NO: 1164764 - DNA, 15 bp, Homo sapiens
gtattaaaaatacca

SEQ ID NO: 1164765 - DNA, 15 bp, Homo sapiens
agtattaaaaatacc

SEQ ID NO: 1164766 - DNA, 15 bp, Homo sapiens
gagtattaaaaatac

SEQ ID NO: 1164767 - DNA, 15 bp, Homo sapiens
agagtattaaaaata

SEQ ID NO: 1164768 - DNA, 15 bp, Homo sapiens
aagagtattaaaaat

SEQ ID NO: 1164769 - DNA, 15 bp, Homo sapiens
aaagagtattaaaaa

SEQ ID NO: 1164770 - DNA, 15 bp, Homo sapiens
aaaagagtattaaaa

SEQ ID NO: 1164771 - DNA, 15 bp, Homo sapiens
aaaaagagtattaaa

SEQ ID NO: 1164772 - DNA, 15 bp, Homo sapiens
aaaaaagagtattaa

SEQ ID NO: 1164773 - DNA, 15 bp, Homo sapiens
taaaaaagagtatta

SEQ ID NO: 1164774 - DNA, 15 bp, Homo sapiens
ttaaaaaagagtatt

SEQ ID NO: 1164775 - DNA, 15 bp, Homo sapiens
tttaaaaaagagtat

SEQ ID NO: 1164776 - DNA, 15 bp, Homo sapiens
ttttaaaaaagagta

SEQ ID NO: 1164777 - DNA, 15 bp, Homo sapiens
tttttaaaaaagagt

SEQ ID NO: 1164778 - DNA, 15 bp, Homo sapiens
ttttttaaaaaagag

SEQ ID NO: 1164779 - DNA, 15 bp, Homo sapiens
cttttttaaaaaaga

SEQ ID NO: 1164780 - DNA, 15 bp, Homo sapiens
ccttttttaaaaaag

SEQ ID NO: 1164781 - DNA, 15 bp, Homo sapiens
tccttttttaaaaaa

SEQ ID NO: 1164782 - DNA, 15 bp, Homo sapiens
atccttttttaaaaa

SEQ ID NO: 1164783 - DNA, 15 bp, Homo sapiens
aatccttttttaaaa

SEQ ID NO: 1164784 - DNA, 15 bp, Homo sapiens
gaatccttttttaaa

SEQ ID NO: 1164785 - DNA, 15 bp, Homo sapiens
tgaatccttttttaa

SEQ ID NO: 1164786 - DNA, 15 bp, Homo sapiens
gtgaatcctttttta

SEQ ID NO: 1164787 - DNA, 15 bp, Homo sapiens
ggtgaatcctttttt

SEQ ID NO: 1164788 - DNA, 15 bp, Homo sapiens
aggtgaatccttttt

SEQ ID NO: 1164789 - DNA, 15 bp, Homo sapiens
taggtgaatcctttt

SEQ ID NO: 1164790 - DNA, 15 bp, Homo sapiens
ttaggtgaatccttt

SEQ ID NO: 1164791 - DNA, 15 bp, Homo sapiens
gttaggtgaatcctt

SEQ ID NO: 1164792 - DNA, 15 bp, Homo sapiens
agttaggtgaatcct

SEQ ID NO: 1164793 - DNA, 15 bp, Homo sapiens
cagttaggtgaatcc

SEQ ID NO: 1164794 - DNA, 15 bp, Homo sapiens
tcagttaggtgaatc

SEQ ID NO: 1164795 - DNA, 15 bp, Homo sapiens
ctcagttaggtgaat

SEQ ID NO: 1164796 - DNA, 15 bp, Homo sapiens
cctcagttaggtgaa

SEQ ID NO: 1164797 - DNA, 15 bp, Homo sapiens
ccctcagttaggtga

SEQ ID NO: 1164798 - DNA, 15 bp, Homo sapiens
accctcagttaggtg

SEQ ID NO: 1164799 - DNA, 15 bp, Homo sapiens
caccctcagttaggt

SEQ ID NO: 1164800 - DNA, 15 bp, Homo sapiens
ccaccctcagttagg

SEQ ID NO: 1164801 - DNA, 15 bp, Homo sapiens
tccaccctcagttag

SEQ ID NO: 1164802 - DNA, 15 bp, Homo sapiens
ctccaccctcagtta

SEQ ID NO: 1164803 - DNA, 15 bp, Homo sapiens
cctccaccctcagtt

SEQ ID NO: 1164804 - DNA, 15 bp, Homo sapiens
tcctccaccctcagt

SEQ ID NO: 1164805 - DNA, 15 bp, Homo sapiens
atcctccaccctcag

SEQ ID NO: 1164806 - DNA, 15 bp, Homo sapiens
catcctccaccctca

SEQ ID NO: 1164807 - DNA, 15 bp, Homo sapiens
ccatcctccaccctc

SEQ ID NO: 1164808 - DNA, 15 bp, Homo sapiens
cccatcctccaccct

SEQ ID NO: 1164809 - DNA, 15 bp, Homo sapiens
tcccatcctccaccc

SEQ ID NO: 1164810 - DNA, 15 bp, Homo sapiens
ctcccatcctccacc

SEQ ID NO: 1164811 - DNA, 15 bp, Homo sapiens
cctcccatcctccac

SEQ ID NO: 1164812 - DNA, 15 bp, Homo sapiens
tcctcccatcctcca

SEQ ID NO: 1164813 - DNA, 15 bp, Homo sapiens
ctcctcccatcctcc

SEQ ID NO: 1164814 - DNA, 15 bp, Homo sapiens
cctcctcccatcctc

SEQ ID NO: 1164815 - DNA, 15 bp, Homo sapiens
tccctcctcccatcc

SEQ ID NO: 1164816 - DNA, 15 bp, Homo sapiens
ctccctcctcccatc

SEQ ID NO: 1164817 - DNA, 15 bp, Homo sapiens
tctccctcctcccat

SEQ ID NO: 1164818 - DNA, 15 bp, Homo sapiens
ctctccctcctccca

SEQ ID NO: 1164819 - DNA, 15 bp, Homo sapiens
gctctccctcctccc

SEQ ID NO: 1164820 - DNA, 15 bp, Homo sapiens
tgctctccctcctcc

SEQ ID NO: 1164821 - DNA, 15 bp, Homo sapiens
ctgctctccctcctc

SEQ ID NO: 1164822 - DNA, 15 bp, Homo sapiens
cctgctctccctcct

SEQ ID NO: 1164823 - DNA, 15 bp, Homo sapiens
tcctgctctccctcc

SEQ ID NO: 1164824 - DNA, 15 bp, Homo sapiens
ttcctgctctccctc

SEQ ID NO: 1164825 - DNA, 15 bp, Homo sapiens
tttcctgctctccct

SEQ ID NO: 1164826 - DNA, 15 bp, Homo sapiens
ttttcctgctctccc

SEQ ID NO: 1164827 - DNA, 15 bp, Homo sapiens
tttttcctgctctcc

SEQ ID NO: 1164828 - DNA, 15 bp, Homo sapiens
ttttttcctgctctc

SEQ ID NO: 1164829 - DNA, 15 bp, Homo sapiens
gttttttcctgctct

SEQ ID NO: 1164830 - DNA, 15 bp, Homo sapiens
tgttttttcctgctc

SEQ ID NO: 1164831 - DNA, 15 bp, Homo sapiens
gtgttttttcctgct

SEQ ID NO: 1164832 - DNA, 15 bp, Homo sapiens
agtgttttttcctgc

SEQ ID NO: 1164833 - DNA, 15 bp, Homo sapiens
aagtgttttttcctg

SEQ ID NO: 1164834 - DNA, 15 bp, Homo sapiens
caagtgttttttcct

SEQ ID NO: 1164835 - DNA, 15 bp, Homo sapiens
ccaagtgttttttcc

SEQ ID NO: 1164836 - DNA, 15 bp, Homo sapiens
cccaagtgttttttc

SEQ ID NO: 1164837 - DNA, 15 bp, Homo sapiens
acccaagtgtttttt

SEQ ID NO: 1164838 - DNA, 15 bp, Homo sapiens
tacccaagtgttttt

SEQ ID NO: 1164839 - DNA, 15 bp, Homo sapiens
gtacccaagtgtttt

SEQ ID NO: 1164840 - DNA, 15 bp, Homo sapiens
tgtacccaagtgttt

SEQ ID NO: 1164841 - DNA, 15 bp, Homo sapiens
ttgtacccaagtgtt

SEQ ID NO: 1164842 - DNA, 15 bp, Homo sapiens
tttgtacccaagtgt

SEQ ID NO: 1164843 - DNA, 15 bp, Homo sapiens
ctttgtacccaagtg

SEQ ID NO: 1164844 - DNA, 15 bp, Homo sapiens
gctttgtacccaagt

SEQ ID NO: 1164845 - DNA, 15 bp, Homo sapiens
agctttgtacccaag

SEQ ID NO: 1164846 - DNA, 15 bp, Homo sapiens
aagctttgtacccaa

SEQ ID NO: 1164847 - DNA, 15 bp, Homo sapiens
taagctttgtaccca

SEQ ID NO: 1164848 - DNA, 15 bp, Homo sapiens
gtaagctttgtaccc

SEQ ID NO: 1164849 - DNA, 15 bp, Homo sapiens
agtaagctttgtacc

SEQ ID NO: 1164850 - DNA, 15 bp, Homo sapiens
tagtaagctttgtac

SEQ ID NO: 1164851 - DNA, 15 bp, Homo sapiens
gtagtaagctttgta

SEQ ID NO: 1164852 - DNA, 15 bp, Homo sapiens
ggtagtaagctttgt

SEQ ID NO: 1164853 - DNA, 15 bp, Homo sapiens
aggtagtaagctttg

SEQ ID NO: 1164854 - DNA, 15 bp, Homo sapiens
caggtagtaagcttt

SEQ ID NO: 1164855 - DNA, 15 bp, Homo sapiens
ccaggtagtaagctt

SEQ ID NO: 1164856 - DNA, 15 bp, Homo sapiens
cccaggtagtaagct

SEQ ID NO: 1164857 - DNA, 15 bp, Homo sapiens
acccaggtagtaagc

SEQ ID NO: 1164858 - DNA, 15 bp, Homo sapiens
cacccaggtagtaag

SEQ ID NO: 1164859 - DNA, 15 bp, Homo sapiens
tcacccaggtagtaa

SEQ ID NO: 1164860 - DNA, 15 bp, Homo sapiens
atcacccaggtagta

SEQ ID NO: 1164861 - DNA, 15 bp, Homo sapiens
aatcacccaggtagt

SEQ ID NO: 1164862 - DNA, 15 bp, Homo sapiens
taatcacccaggtag

SEQ ID NO: 1164863 - DNA, 15 bp, Homo sapiens
ttaatcacccaggta

SEQ ID NO: 1164864 - DNA, 15 bp, Homo sapiens
tttaatcacccaggt

SEQ ID NO: 1164865 - DNA, 15 bp, Homo sapiens
atttaatcacccagg

SEQ ID NO: 1164866 - DNA, 15 bp, Homo sapiens
tatttaatcacccag

SEQ ID NO: 1164867 - DNA, 15 bp, Homo sapiens
ttatttaatcaccca

SEQ ID NO: 1164868 - DNA, 15 bp, Homo sapiens
attatttaatcaccc

SEQ ID NO: 1164869 - DNA, 15 bp, Homo sapiens
gattatttaatcacc

SEQ ID NO: 1164870 - DNA, 15 bp, Homo sapiens
agattatttaatcac

SEQ ID NO: 1164871 - DNA, 15 bp, Homo sapiens
cagattatttaatca

SEQ ID NO: 1164872 - DNA, 15 bp, Homo sapiens
acagattatttaatc

SEQ ID NO: 1164873 - DNA, 15 bp, Homo sapiens
tacagattatttaat

SEQ ID NO: 1164874 - DNA, 15 bp, Homo sapiens
gtacagattatttaa

SEQ ID NO: 1164875 - DNA, 15 bp, Homo sapiens
tgtacagattattta

SEQ ID NO: 1164876 - DNA, 15 bp, Homo sapiens
ttgtacagattattt

SEQ ID NO: 1164877 - DNA, 15 bp, Homo sapiens
gttgtacagattatt

SEQ ID NO: 1164878 - DNA, 15 bp, Homo sapiens
tgttgtacagattat

SEQ ID NO: 1164879 - DNA, 15 bp, Homo sapiens
ttgttgtacagatta

SEQ ID NO: 1164880 - DNA, 15 bp, Homo sapiens
tttgttgtacagatt

SEQ ID NO: 1164881 - DNA, 15 bp, Homo sapiens
ttttgttgtacagat

SEQ ID NO: 1164882 - DNA, 15 bp, Homo sapiens
gttttgttgtacaga

SEQ ID NO: 1164883 - DNA, 15 bp, Homo sapiens
ggttttgttgtacag

SEQ ID NO: 1164884 - DNA, 15 bp, Homo sapiens
gggttttgttgtaca

SEQ ID NO: 1164885 - DNA, 15 bp, Homo sapiens
ggggttttgttgtac

SEQ ID NO: 1164886 - DNA, 15 bp, Homo sapiens
cggggttttgttgta

SEQ ID NO: 1164887 - DNA, 15 bp, Homo sapiens
acggggttttgttgt

SEQ ID NO: 1164888 - DNA, 15 bp, Homo sapiens
cacggggttttgttg

SEQ ID NO: 1164889 - DNA, 15 bp, Homo sapiens
tcacggggttttgtt

SEQ ID NO: 1164890 - DNA, 15 bp, Homo sapiens
gtcacggggttttgt

SEQ ID NO: 1164891 - DNA, 15 bp, Homo sapiens
tgtcacggggttttg

SEQ ID NO: 1164892 - DNA, 15 bp, Homo sapiens
gtgtcacggggtttt

SEQ ID NO: 1164893 - DNA, 15 bp, Homo sapiens
agtgtcacggggttt

SEQ ID NO: 1164894 - DNA, 15 bp, Homo sapiens
tagtgtcacggggtt

SEQ ID NO: 1164895 - DNA, 15 bp, Homo sapiens
ctagtgtcacggggt

SEQ ID NO: 1164896 - DNA, 15 bp, Homo sapiens
actagtgtcacgggg

SEQ ID NO: 1164897 - DNA, 15 bp, Homo sapiens
aactagtgtcacggg

SEQ ID NO: 1164898 - DNA, 15 bp, Homo sapiens
aaactagtgtcacgg

SEQ ID NO: 1164899 - DNA, 15 bp, Homo sapiens
taaactagtgtcacg

SEQ ID NO: 1164900 - DNA, 15 bp, Homo sapiens
gtaaactagtgtcac

SEQ ID NO: 1164901 - DNA, 15 bp, Homo sapiens
ggtaaactagtgtca

SEQ ID NO: 1164902 - DNA, 15 bp, Homo sapiens
aggtaaactagtgtc

SEQ ID NO: 1164903 - DNA, 15 bp, Homo sapiens
taggtaaactagtgt

SEQ ID NO: 1164904 - DNA, 15 bp, Homo sapiens
ataggtaaactagtg

SEQ ID NO: 1164905 - DNA, 15 bp, Homo sapiens
tataggtaaactagt

SEQ ID NO: 1164906 - DNA, 15 bp, Homo sapiens
atataggtaaactag

SEQ ID NO: 1164907 - DNA, 15 bp, Homo sapiens
tatataggtaaacta

SEQ ID NO: 1164908 - DNA, 15 bp, Homo sapiens
ttatataggtaaact

SEQ ID NO: 1164909 - DNA, 15 bp, Homo sapiens
gttatataggtaaac

SEQ ID NO: 1164910 - DNA, 15 bp, Homo sapiens
tgttatataggtaaa

SEQ ID NO: 1164911 - DNA, 15 bp, Homo sapiens
ttgttatataggtaa

SEQ ID NO: 1164912 - DNA, 15 bp, Homo sapiens
tttgttatataggta

SEQ ID NO: 1164913 - DNA, 15 bp, Homo sapiens
gtttgttatataggt

SEQ ID NO: 1164914 - DNA, 15 bp, Homo sapiens
ggtttgttatatagg

SEQ ID NO: 1164915 - DNA, 15 bp, Homo sapiens
taggtttgttatata

SEQ ID NO: 1164916 - DNA, 15 bp, Homo sapiens
gtaggtttgttatat

SEQ ID NO: 1164917 - DNA, 15 bp, Homo sapiens
agtaggtttgttata

SEQ ID NO: 1164918 - DNA, 15 bp, Homo sapiens
aagtaggtttgttat

SEQ ID NO: 1164919 - DNA, 15 bp, Homo sapiens
caagtaggtttgtta

SEQ ID NO: 1164920 - DNA, 15 bp, Homo sapiens
acaagtaggtttgtt

SEQ ID NO: 1164921 - DNA, 15 bp, Homo sapiens
cacaagtaggtttgt

SEQ ID NO: 1164922 - DNA, 15 bp, Homo sapiens
gcacaagtaggtttg

SEQ ID NO: 1164923 - DNA, 15 bp, Homo sapiens
tgcacaagtaggttt

SEQ ID NO: 1164924 - DNA, 15 bp, Homo sapiens
atgcacaagtaggtt

SEQ ID NO: 1164925 - DNA, 15 bp, Homo sapiens
gatgcacaagtaggt

SEQ ID NO: 1164926 - DNA, 15 bp, Homo sapiens
ggatgcacaagtagg

SEQ ID NO: 1164927 - DNA, 15 bp, Homo sapiens
gggatgcacaagtag

SEQ ID NO: 1164928 - DNA, 15 bp, Homo sapiens
ggggatgcacaagta

SEQ ID NO: 1164929 - DNA, 15 bp, Homo sapiens
tggggatgcacaagt

SEQ ID NO: 1164930 - DNA, 15 bp, Homo sapiens
ttggggatgcacaag

SEQ ID NO: 1164931 - DNA, 15 bp, Homo sapiens
tttggggatgcacaa

SEQ ID NO: 1164932 - DNA, 15 bp, Homo sapiens
gtttggggatgcaca

SEQ ID NO: 1164933 - DNA, 15 bp, Homo sapiens
ggtttggggatgcac

SEQ ID NO: 1164934 - DNA, 15 bp, Homo sapiens
aggtttggggatgca

SEQ ID NO: 1164935 - DNA, 15 bp, Homo sapiens
taggtttggggatgc

SEQ ID NO: 1164936 - DNA, 15 bp, Homo sapiens
ttaggtttggggatg

SEQ ID NO: 1164937 - DNA, 15 bp, Homo sapiens
tttaggtttggggat

SEQ ID NO: 1164938 - DNA, 15 bp, Homo sapiens
ttttaggtttgggga

SEQ ID NO: 1164939 - DNA, 15 bp, Homo sapiens
attttaggtttgggg

SEQ ID NO: 1164940 - DNA, 15 bp, Homo sapiens
tattttaggtttggg

SEQ ID NO: 1164941 - DNA, 15 bp, Homo sapiens
ttattttaggtttgg

SEQ ID NO: 1164942 - DNA, 15 bp, Homo sapiens
tttattttaggtttg

SEQ ID NO: 1164943 - DNA, 15 bp, Homo sapiens
ttttattttaggttt

SEQ ID NO: 1164944 - DNA, 15 bp, Homo sapiens
cttttattttaggtt

SEQ ID NO: 1164945 - DNA, 15 bp, Homo sapiens
acttttattttaggt

SEQ ID NO: 1164946 - DNA, 15 bp, Homo sapiens
aacttttattttagg

SEQ ID NO: 1164947 - DNA, 15 bp, Homo sapiens
taacttttattttag

SEQ ID NO: 1164948 - DNA, 15 bp, Homo sapiens
ttaacttttatttta

SEQ ID NO: 1164949 - DNA, 15 bp, Homo sapiens
tttaacttttatttt

SEQ ID NO: 1164950 - DNA, 15 bp, Homo sapiens
ttttaacttttattt

SEQ ID NO: 1164951 - DNA, 15 bp, Homo sapiens
tttttaacttttatt

SEQ ID NO: 1164952 - DNA, 15 bp, Homo sapiens
ttttttaacttttat

SEQ ID NO: 1164953 - DNA, 15 bp, Homo sapiens
tttttttaactttta

SEQ ID NO: 1164954 - DNA, 15 bp, Homo sapiens
ctttttttaactttt

SEQ ID NO: 1164955 - DNA, 15 bp, Homo sapiens
tctttttttaacttt

SEQ ID NO: 1164956 - DNA, 15 bp, Homo sapiens
atctttttttaactt

SEQ ID NO: 1164957 - DNA, 15 bp, Homo sapiens
aatctttttttaact

SEQ ID NO: 1164958 - DNA, 15 bp, Homo sapiens
gaatctttttttaac

SEQ ID NO: 1164959 - DNA, 15 bp, Homo sapiens
tgaatctttttttaa

SEQ ID NO: 1164960 - DNA, 15 bp, Homo sapiens
atgaatcttttttta

SEQ ID NO: 1164961 - DNA, 15 bp, Homo sapiens
aatgaatcttttttt

SEQ ID NO: 1164962 - DNA, 15 bp, Homo sapiens
caatgaatctttttt

SEQ ID NO: 1164963 - DNA, 15 bp, Homo sapiens
gcaatgaatcttttt

SEQ ID NO: 1164964 - DNA, 15 bp, Homo sapiens
tgcaatgaatctttt

SEQ ID NO: 1164965 - DNA, 15 bp, Homo sapiens
gtgcaatgaatcttt

SEQ ID NO: 1164966 - DNA, 15 bp, Homo sapiens
agtgcaatgaatctt

SEQ ID NO: 1164967 - DNA, 15 bp, Homo sapiens
gagtgcaatgaatct

SEQ ID NO: 1164968 - DNA, 15 bp, Homo sapiens
tgagtgcaatgaatc

SEQ ID NO: 1164969 - DNA, 15 bp, Homo sapiens
ttgagtgcaatgaat

SEQ ID NO: 1164970 - DNA, 15 bp, Homo sapiens
cttgagtgcaatgaa

SEQ ID NO: 1164971 - DNA, 15 bp, Homo sapiens
acttgagtgcaatga

SEQ ID NO: 1164972 - DNA, 15 bp, Homo sapiens
aacttgagtgcaatg

SEQ ID NO: 1164973 - DNA, 15 bp, Homo sapiens
taacttgagtgcaat

SEQ ID NO: 1164974 - DNA, 15 bp, Homo sapiens
ttaacttgagtgcaa

SEQ ID NO: 1164975 - DNA, 15 bp, Homo sapiens
gttaacttgagtgca

SEQ ID NO: 1164976 - DNA, 15 bp, Homo sapiens
tgttaacttgagtgc

SEQ ID NO: 1164977 - DNA, 15 bp, Homo sapiens
ctgttaacttgagtg

SEQ ID NO: 1164978 - DNA, 15 bp, Homo sapiens
gctgttaacttgagt

SEQ ID NO: 1164979 - DNA, 15 bp, Homo sapiens
tgctgttaacttgag

SEQ ID NO: 1164980 - DNA, 15 bp, Homo sapiens
gtgctgttaacttga

SEQ ID NO: 1164981 - DNA, 15 bp, Homo sapiens
ggtgctgttaacttg

SEQ ID NO: 1164982 - DNA, 15 bp, Homo sapiens
gggtgctgttaactt

SEQ ID NO: 1164983 - DNA, 15 bp, Homo sapiens
agggtgctgttaact

SEQ ID NO: 1164984 - DNA, 15 bp, Homo sapiens
gagggtgctgttaac

SEQ ID NO: 1164985 - DNA, 15 bp, Homo sapiens
agagggtgctgttaa

SEQ ID NO: 1164986 - DNA, 15 bp, Homo sapiens
aagagggtgctgtta

SEQ ID NO: 1164987 - DNA, 15 bp, Homo sapiens
gaagagggtgctgtt

SEQ ID NO: 1164988 - DNA, 15 bp, Homo sapiens
agaagagggtgctgt

SEQ ID NO: 1164989 - DNA, 15 bp, Homo sapiens
cagaagagggtgctg

SEQ ID NO: 1164990 - DNA, 15 bp, Homo sapiens
tcagaagagggtgct

SEQ ID NO: 1164991 - DNA, 15 bp, Homo sapiens
ttcagaagagggtgc

SEQ ID NO: 1164992 - DNA, 15 bp, Homo sapiens
attcagaagagggtg

SEQ ID NO: 1164993 - DNA, 15 bp, Homo sapiens
cattcagaagagggt

SEQ ID NO: 1164994 - DNA, 15 bp, Homo sapiens
tcattcagaagaggg

SEQ ID NO: 1164995 - DNA, 15 bp, Homo sapiens
atcattcagaagagg

SEQ ID NO: 1164996 - DNA, 15 bp, Homo sapiens
catcattcagaagag

SEQ ID NO: 1164997 - DNA, 15 bp, Homo sapiens
acatcattcagaaga

SEQ ID NO: 1164998 - DNA, 15 bp, Homo sapiens
tacatcattcagaag

SEQ ID NO: 1164999 - DNA, 15 bp, Homo sapiens
gtacatcattcagaa

SEQ ID NO: 1165000 - DNA, 15 bp, Homo sapiens
agtacatcattcaga

SEQ ID NO: 1165001 - DNA, 15 bp, Homo sapiens
tagtacatcattcag

SEQ ID NO: 1165002 - DNA, 15 bp, Homo sapiens
ttagtacatcattca

SEQ ID NO: 1165003 - DNA, 15 bp, Homo sapiens
attagtacatcattc

SEQ ID NO: 1165004 - DNA, 15 bp, Homo sapiens
aattagtacatcatt

SEQ ID NO: 1165005 - DNA, 15 bp, Homo sapiens
taattagtacatcat

SEQ ID NO: 1165006 - DNA, 15 bp, Homo sapiens
ataattagtacatca

SEQ ID NO: 1165007 - DNA, 15 bp, Homo sapiens
aataattagtacatc

SEQ ID NO: 1165008 - DNA, 15 bp, Homo sapiens
taataattagtacat

SEQ ID NO: 1165009 - DNA, 15 bp, Homo sapiens
ataataattagtaca

SEQ ID NO: 1165010 - DNA, 15 bp, Homo sapiens
aataataattagtac

SEQ ID NO: 1165011 - DNA, 15 bp, Homo sapiens
caataataattagta

SEQ ID NO: 1165012 - DNA, 15 bp, Homo sapiens
tcaataataattagt

SEQ ID NO: 1165013 - DNA, 15 bp, Homo sapiens
atcaataataattag

SEQ ID NO: 1165014 - DNA, 15 bp, Homo sapiens
aatcaataataatta

SEQ ID NO: 1165015 - DNA, 15 bp, Homo sapiens
aaatcaataataatt

SEQ ID NO: 1165016 - DNA, 15 bp, Homo sapiens
caaatcaataataat

SEQ ID NO: 1165017 - DNA, 15 bp, Homo sapiens
tcaaatcaataataa

SEQ ID NO: 1165018 - DNA, 15 bp, Homo sapiens
ctcaaatcaataata

SEQ ID NO: 1165019 - DNA, 15 bp, Homo sapiens
tctcaaatcaataat

SEQ ID NO: 1165020 - DNA, 15 bp, Homo sapiens
ttctcaaatcaataa

SEQ ID NO: 1165021 - DNA, 15 bp, Homo sapiens
tttctcaaatcaata

SEQ ID NO: 1165022 - DNA, 15 bp, Homo sapiens
ctttctcaaatcaat

SEQ ID NO: 1165023 - DNA, 15 bp, Homo sapiens
actttctcaaatcaa

SEQ ID NO: 1165024 - DNA, 15 bp, Homo sapiens
tactttctcaaatca

SEQ ID NO: 1165025 - DNA, 15 bp, Homo sapiens
ttactttctcaaatc

SEQ ID NO: 1165026 - DNA, 15 bp, Homo sapiens
cttactttctcaaat

SEQ ID NO: 1165027 - DNA, 15 bp, Homo sapiens
gcttactttctcaaa

SEQ ID NO: 1165028 - DNA, 15 bp, Homo sapiens
tgcttactttctcaa

SEQ ID NO: 1165029 - DNA, 15 bp, Homo sapiens
atgcttactttctca

SEQ ID NO: 1165030 - DNA, 15 bp, Homo sapiens
gatgcttactttctc

SEQ ID NO: 1165031 - DNA, 15 bp, Homo sapiens
tgatgcttactttct

SEQ ID NO: 1165032 - DNA, 15 bp, Homo sapiens
ctgatgcttactttc

SEQ ID NO: 1165033 - DNA, 15 bp, Homo sapiens
tctgatgcttacttt

SEQ ID NO: 1165034 - DNA, 15 bp, Homo sapiens
atctgatgcttactt

SEQ ID NO: 1165035 - DNA, 15 bp, Homo sapiens
aatctgatgcttact

SEQ ID NO: 1165036 - DNA, 15 bp, Homo sapiens
caatctgatgcttac

SEQ ID NO: 1165037 - DNA, 15 bp, Homo sapiens
ccaatctgatgctta

SEQ ID NO: 1165038 - DNA, 15 bp, Homo sapiens
tccaatctgatgctt

SEQ ID NO: 1165039 - DNA, 15 bp, Homo sapiens
atccaatctgatgct

SEQ ID NO: 1165040 - DNA, 15 bp, Homo sapiens
gatccaatctgatgc

SEQ ID NO: 1165041 - DNA, 15 bp, Homo sapiens
ggatccaatctgatg

SEQ ID NO: 1165042 - DNA, 15 bp, Homo sapiens
tggatccaatctgat

SEQ ID NO: 1165043 - DNA, 15 bp, Homo sapiens
ctggatccaatctga

SEQ ID NO: 1165044 - DNA, 15 bp, Homo sapiens
actggatccaatctg

SEQ ID NO: 1165045 - DNA, 15 bp, Homo sapiens
aactggatccaatct

SEQ ID NO: 1165046 - DNA, 15 bp, Homo sapiens
aaactggatccaatc

SEQ ID NO: 1165047 - DNA, 15 bp, Homo sapiens
gaaactggatccaat

SEQ ID NO: 1165048 - DNA, 15 bp, Homo sapiens
ggaaactggatccaa

SEQ ID NO: 1165049 - DNA, 15 bp, Homo sapiens
tggaaactggatcca

SEQ ID NO: 1165050 - DNA, 15 bp, Homo sapiens
ttggaaactggatcc

SEQ ID NO: 1165051 - DNA, 15 bp, Homo sapiens
tttggaaactggatc

SEQ ID NO: 1165052 - DNA, 15 bp, Homo sapiens
ttttggaaactggat

SEQ ID NO: 1165053 - DNA, 15 bp, Homo sapiens
tttttggaaactgga

SEQ ID NO: 1165054 - DNA, 15 bp, Homo sapiens
gtttttggaaactgg

SEQ ID NO: 1165055 - DNA, 15 bp, Homo sapiens
agtttttggaaactg

SEQ ID NO: 1165056 - DNA, 15 bp, Homo sapiens
aagtttttggaaact

SEQ ID NO: 1165057 - DNA, 15 bp, Homo sapiens
aaagtttttggaaac

SEQ ID NO: 1165058 - DNA, 15 bp, Homo sapiens
gaaagtttttggaaa

SEQ ID NO: 1165059 - DNA, 15 bp, Homo sapiens
cgaaagtttttggaa

SEQ ID NO: 1165060 - DNA, 15 bp, Homo sapiens
ccgaaagtttttgga

SEQ ID NO: 1165061 - DNA, 15 bp, Homo sapiens
accgaaagtttttgg

SEQ ID NO: 1165062 - DNA, 15 bp, Homo sapiens
caccgaaagtttttg

SEQ ID NO: 1165063 - DNA, 15 bp, Homo sapiens
tcaccgaaagttttt

SEQ ID NO: 1165064 - DNA, 15 bp, Homo sapiens
ctcaccgaaagtttt

SEQ ID NO: 1165065 - DNA, 15 bp, Homo sapiens
gctcaccgaaagttt

SEQ ID NO: 1165066 - DNA, 15 bp, Homo sapiens
ggctcaccgaaagtt

SEQ ID NO: 1165067 - DNA, 15 bp, Homo sapiens
aggctcaccgaaagt

SEQ ID NO: 1165068 - DNA, 15 bp, Homo sapiens
gaggctcaccgaaag

SEQ ID NO: 1165069 - DNA, 15 bp, Homo sapiens
agaggctcaccgaaa

SEQ ID NO: 1165070 - DNA, 15 bp, Homo sapiens
cagaggctcaccgaa

SEQ ID NO: 1165071 - DNA, 15 bp, Homo sapiens
acagaggctcaccga

SEQ ID NO: 1165072 - DNA, 15 bp, Homo sapiens
gacagaggctcaccg

SEQ ID NO: 1165073 - DNA, 15 bp, Homo sapiens
agacagaggctcacc

SEQ ID NO: 1165074 - DNA, 15 bp, Homo sapiens
cagacagaggctcac

SEQ ID NO: 1165075 - DNA, 15 bp, Homo sapiens
acagacagaggctca

SEQ ID NO: 1165076 - DNA, 15 bp, Homo sapiens
cacagacagaggctc

SEQ ID NO: 1165077 - DNA, 15 bp, Homo sapiens
tcacagacagaggct

SEQ ID NO: 1165078 - DNA, 15 bp, Homo sapiens
gtcacagacagaggc

SEQ ID NO: 1165079 - DNA, 15 bp, Homo sapiens
tgtcacagacagagg

SEQ ID NO: 1165080 - DNA, 15 bp, Homo sapiens
ctgtcacagacagag

SEQ ID NO: 1165081 - DNA, 15 bp, Homo sapiens
gctgtcacagacaga

SEQ ID NO: 1165082 - DNA, 15 bp, Homo sapiens
agctgtcacagacag

SEQ ID NO: 1165083 - DNA, 15 bp, Homo sapiens
cagctgtcacagaca

SEQ ID NO: 1165084 - DNA, 15 bp, Homo sapiens
acagctgtcacagac

SEQ ID NO: 1165085 - DNA, 15 bp, Homo sapiens
aacagctgtcacaga

SEQ ID NO: 1165086 - DNA, 15 bp, Homo sapiens
gaacagctgtcacag

SEQ ID NO: 1165087 - DNA, 15 bp, Homo sapiens
tgaacagctgtcaca

SEQ ID NO: 1165088 - DNA, 15 bp, Homo sapiens
ttgaacagctgtcac

SEQ ID NO: 1165089 - DNA, 15 bp, Homo sapiens
cttgaacagctgtca

SEQ ID NO: 1165090 - DNA, 15 bp, Homo sapiens
gcttgaacagctgtc

SEQ ID NO: 1165091 - DNA, 15 bp, Homo sapiens
agcttgaacagctgt

SEQ ID NO: 1165092 - DNA, 15 bp, Homo sapiens
tagcttgaacagctg

SEQ ID NO: 1165093 - DNA, 15 bp, Homo sapiens
atagcttgaacagct

SEQ ID NO: 1165094 - DNA, 15 bp, Homo sapiens
catagcttgaacagc

SEQ ID NO: 1165095 - DNA, 15 bp, Homo sapiens
tcatagcttgaacag

SEQ ID NO: 1165096 - DNA, 15 bp, Homo sapiens
ttcatagcttgaaca

SEQ ID NO: 1165097 - DNA, 15 bp, Homo sapiens
attcatagcttgaac

SEQ ID NO: 1165098 - DNA, 15 bp, Homo sapiens
cattcatagcttgaa

SEQ ID NO: 1165099 - DNA, 15 bp, Homo sapiens
gcattcatagcttga

SEQ ID NO: 1165100 - DNA, 15 bp, Homo sapiens
cgcattcatagcttg

SEQ ID NO: 1165101 - DNA, 15 bp, Homo sapiens
ccgcattcatagctt

SEQ ID NO: 1165102 - DNA, 15 bp, Homo sapiens
tccgcattcatagct

SEQ ID NO: 1165103 - DNA, 15 bp, Homo sapiens
atccgcattcatagc

SEQ ID NO: 1165104 - DNA, 15 bp, Homo sapiens
aatccgcattcatag

SEQ ID NO: 1165105 - DNA, 15 bp, Homo sapiens
caatccgcattcata

SEQ ID NO: 1165106 - DNA, 15 bp, Homo sapiens
ccaatccgcattcat

SEQ ID NO: 1165107 - DNA, 15 bp, Homo sapiens
cccaatccgcattca

SEQ ID NO: 1165108 - DNA, 15 bp, Homo sapiens
gcccaatccgcattc

SEQ ID NO: 1165109 - DNA, 15 bp, Homo sapiens
agcccaatccgcatt

SEQ ID NO: 1165110 - DNA, 15 bp, Homo sapiens
gagcccaatccgcat

SEQ ID NO: 1165111 - DNA, 15 bp, Homo sapiens
tgagcccaatccgca

SEQ ID NO: 1165112 - DNA, 15 bp, Homo sapiens
ctgagcccaatccgc

SEQ ID NO: 1165113 - DNA, 15 bp, Homo sapiens
cctgagcccaatccg

SEQ ID NO: 1165114 - DNA, 15 bp, Homo sapiens
gcctgagcccaatcc

SEQ ID NO: 1165115 - DNA, 15 bp, Homo sapiens
agcctgagcccaatc

SEQ ID NO: 1165116 - DNA, 15 bp, Homo sapiens
gagcctgagcccaat

SEQ ID NO: 1165117 - DNA, 15 bp, Homo sapiens
tgagcctgagcccaa

SEQ ID NO: 1165118 - DNA, 15 bp, Homo sapiens
ctgagcctgagccca

SEQ ID NO: 1165119 - DNA, 15 bp, Homo sapiens
tctgagcctgagccc

SEQ ID NO: 1165120 - DNA, 15 bp, Homo sapiens
ttctgagcctgagcc

SEQ ID NO: 1165121 - DNA, 15 bp, Homo sapiens
gttctgagcctgagc

SEQ ID NO: 1165122 - DNA, 15 bp, Homo sapiens
tgttctgagcctgag

SEQ ID NO: 1165123 - DNA, 15 bp, Homo sapiens
atgttctgagcctga

SEQ ID NO: 1165124 - DNA, 15 bp, Homo sapiens
gatgttctgagcctg

SEQ ID NO: 1165125 - DNA, 15 bp, Homo sapiens
agatgttctgagcct

SEQ ID NO: 1165126 - DNA, 15 bp, Homo sapiens
aagatgttctgagcc

SEQ ID NO: 1165127 - DNA, 15 bp, Homo sapiens
gaagatgttctgagc

SEQ ID NO: 1165128 - DNA, 15 bp, Homo sapiens
ggaagatgttctgag

SEQ ID NO: 1165129 - DNA, 15 bp, Homo sapiens
aggaagatgttctga

SEQ ID NO: 1165130 - DNA, 15 bp, Homo sapiens
taggaagatgttctg

SEQ ID NO: 1165131 - DNA, 15 bp, Homo sapiens
gtaggaagatgttct

SEQ ID NO: 1165132 - DNA, 15 bp, Homo sapiens
ggtaggaagatgttc

SEQ ID NO: 1165133 - DNA, 15 bp, Homo sapiens
cggtaggaagatgtt

SEQ ID NO: 1165134 - DNA, 15 bp, Homo sapiens
acggtaggaagatgt

SEQ ID NO: 1165135 - DNA, 15 bp, Homo sapiens
cacggtaggaagatg

SEQ ID NO: 1165136 - DNA, 15 bp, Homo sapiens
ccacggtaggaagat

SEQ ID NO: 1165137 - DNA, 15 bp, Homo sapiens
tccacggtaggaaga

SEQ ID NO: 1165138 - DNA, 15 bp, Homo sapiens
ctccacggtaggaag

SEQ ID NO: 1165139 - DNA, 15 bp, Homo sapiens
gctccacggtaggaa

SEQ ID NO: 1165140 - DNA, 15 bp, Homo sapiens
agctccacggtagga

SEQ ID NO: 1165141 - DNA, 15 bp, Homo sapiens
tagctccacggtagg

SEQ ID NO: 1165142 - DNA, 15 bp, Homo sapiens
ctagctccacggtag

SEQ ID NO: 1165143 - DNA, 15 bp, Homo sapiens
cctagctccacggta

SEQ ID NO: 1165144 - DNA, 15 bp, Homo sapiens
tcctagctccacggt

SEQ ID NO: 1165145 - DNA, 15 bp, Homo sapiens
ttcctagctccacgg

SEQ ID NO: 1165146 - DNA, 15 bp, Homo sapiens
attcctagctccacg

SEQ ID NO: 1165147 - DNA, 15 bp, Homo sapiens
cattcctagctccac

SEQ ID NO: 1165148 - DNA, 15 bp, Homo sapiens
tcattcctagctcca

SEQ ID NO: 1165149 - DNA, 15 bp, Homo sapiens
ctcattcctagctcc

SEQ ID NO: 1165150 - DNA, 15 bp, Homo sapiens
gctcattcctagctc

SEQ ID NO: 1165151 - DNA, 15 bp, Homo sapiens
agctcattcctagct

SEQ ID NO: 1165152 - DNA, 15 bp, Homo sapiens
gagctcattcctagc

SEQ ID NO: 1165153 - DNA, 15 bp, Homo sapiens
agagctcattcctag

SEQ ID NO: 1165154 - DNA, 15 bp, Homo sapiens
aagagctcattccta

SEQ ID NO: 1165155 - DNA, 15 bp, Homo sapiens
aaagagctcattcct

SEQ ID NO: 1165156 - DNA, 15 bp, Homo sapiens
gaaagagctcattcc

SEQ ID NO: 1165157 - DNA, 15 bp, Homo sapiens
ggaaagagctcattc

SEQ ID NO: 1165158 - DNA, 15 bp, Homo sapiens
tggaaagagctcatt

SEQ ID NO: 1165159 - DNA, 15 bp, Homo sapiens
gtggaaagagctcat

SEQ ID NO: 1165160 - DNA, 15 bp, Homo sapiens
agtggaaagagctca

SEQ ID NO: 1165161 - DNA, 15 bp, Homo sapiens
gagtggaaagagctc

SEQ ID NO: 1165162 - DNA, 15 bp, Homo sapiens
ggagtggaaagagct

SEQ ID NO: 1165163 - DNA, 15 bp, Homo sapiens
gggagtggaaagagc

SEQ ID NO: 1165164 - DNA, 15 bp, Homo sapiens
cgggagtggaaagag

SEQ ID NO: 1165165 - DNA, 15 bp, Homo sapiens
gcgggagtggaaaga

SEQ ID NO: 1165166 - DNA, 15 bp, Homo sapiens
tgcgggagtggaaag

SEQ ID NO: 1165167 - DNA, 15 bp, Homo sapiens
ctgcgggagtggaaa

SEQ ID NO: 1165168 - DNA, 15 bp, Homo sapiens
tctgcgggagtggaa

SEQ ID NO: 1165169 - DNA, 15 bp, Homo sapiens
atctgcgggagtgga

SEQ ID NO: 1165170 - DNA, 15 bp, Homo sapiens
catctgcgggagtgg

SEQ ID NO: 1165171 - DNA, 15 bp, Homo sapiens
ccatctgcgggagtg

SEQ ID NO: 1165172 - DNA, 15 bp, Homo sapiens
tccatctgcgggagt

SEQ ID NO: 1165173 - DNA, 15 bp, Homo sapiens
ctccatctgcgggag

SEQ ID NO: 1165174 - DNA, 15 bp, Homo sapiens
actccatctgcggga

SEQ ID NO: 1165175 - DNA, 15 bp, Homo sapiens
cactccatctgcggg

SEQ ID NO: 1165176 - DNA, 15 bp, Homo sapiens
acactccatctgcgg

SEQ ID NO: 1165177 - DNA, 15 bp, Homo sapiens
aacactccatctgcg

SEQ ID NO: 1165178 - DNA, 15 bp, Homo sapiens
aaacactccatctgc

SEQ ID NO: 1165179 - DNA, 15 bp, Homo sapiens
aaaacactccatctg

SEQ ID NO: 1165180 - DNA, 15 bp, Homo sapiens
gaaaacactccatct

SEQ ID NO: 1165181 - DNA, 15 bp, Homo sapiens
agaaaacactccatc

SEQ ID NO: 1165182 - DNA, 15 bp, Homo sapiens
cagaaaacactccat

SEQ ID NO: 1165183 - DNA, 15 bp, Homo sapiens
gcagaaaacactcca

SEQ ID NO: 1165184 - DNA, 15 bp, Homo sapiens
agcagaaaacactcc

SEQ ID NO: 1165185 - DNA, 15 bp, Homo sapiens
aagcagaaaacactc

SEQ ID NO: 1165186 - DNA, 15 bp, Homo sapiens
caagcagaaaacact

SEQ ID NO: 1165187 - DNA, 15 bp, Homo sapiens
acaagcagaaaacac

SEQ ID NO: 1165188 - DNA, 15 bp, Homo sapiens
aacaagcagaaaaca

SEQ ID NO: 1165189 - DNA, 15 bp, Homo sapiens
aaacaagcagaaaac

SEQ ID NO: 1165190 - DNA, 15 bp, Homo sapiens
caaacaagcagaaaa

SEQ ID NO: 1165191 - DNA, 15 bp, Homo sapiens
gcaaacaagcagaaa

SEQ ID NO: 1165192 - DNA, 15 bp, Homo sapiens
agcaaacaagcagaa

SEQ ID NO: 1165193 - DNA, 15 bp, Homo sapiens
aagcaaacaagcaga

SEQ ID NO: 1165194 - DNA, 15 bp, Homo sapiens
caagcaaacaagcag

SEQ ID NO: 1165195 - DNA, 15 bp, Homo sapiens
acaagcaaacaagca

SEQ ID NO: 1165196 - DNA, 15 bp, Homo sapiens
aacaagcaaacaagc

SEQ ID NO: 1165197 - DNA, 15 bp, Homo sapiens
aaacaagcaaacaag

SEQ ID NO: 1165198 - DNA, 15 bp, Homo sapiens
caaacaagcaaacaa

SEQ ID NO: 1165199 - DNA, 15 bp, Homo sapiens
acaaacaagcaaaca

SEQ ID NO: 1165200 - DNA, 15 bp, Homo sapiens
aacaaacaagcaaac

SEQ ID NO: 1165201 - DNA, 15 bp, Homo sapiens
aaacaaacaagcaaa

SEQ ID NO: 1165202 - DNA, 15 bp, Homo sapiens
aaaacaaacaagcaa

SEQ ID NO: 1165203 - DNA, 15 bp, Homo sapiens
caaaacaaacaagca

SEQ ID NO: 1165204 - DNA, 15 bp, Homo sapiens
ccaaaacaaacaagc

SEQ ID NO: 1165205 - DNA, 15 bp, Homo sapiens
tccaaaacaaacaag

SEQ ID NO: 1165206 - DNA, 15 bp, Homo sapiens
ctccaaaacaaacaa

SEQ ID NO: 1165207 - DNA, 15 bp, Homo sapiens
tctccaaaacaaaca

SEQ ID NO: 1165208 - DNA, 15 bp, Homo sapiens
atctccaaaacaaac

SEQ ID NO: 1165209 - DNA, 15 bp, Homo sapiens
catctccaaaacaaa

SEQ ID NO: 1165210 - DNA, 15 bp, Homo sapiens
ccatctccaaaacaa

SEQ ID NO: 1165211 - DNA, 15 bp, Homo sapiens
cccatctccaaaaca

SEQ ID NO: 1165212 - DNA, 15 bp, Homo sapiens
ccccatctccaaaac

SEQ ID NO: 1165213 - DNA, 15 bp, Homo sapiens
accccatctccaaaa

SEQ ID NO: 1165214 - DNA, 15 bp, Homo sapiens
gaccccatctccaaa

SEQ ID NO: 1165215 - DNA, 15 bp, Homo sapiens
agaccccatctccaa

SEQ ID NO: 1165216 - DNA, 15 bp, Homo sapiens
gagaccccatctcca

SEQ ID NO: 1165217 - DNA, 15 bp, Homo sapiens
ggagaccccatctcc

SEQ ID NO: 1165218 - DNA, 15 bp, Homo sapiens
gggagaccccatctc

SEQ ID NO: 1165219 - DNA, 15 bp, Homo sapiens
agggagaccccatct

SEQ ID NO: 1165220 - DNA, 15 bp, Homo sapiens
gagggagaccccatc

SEQ ID NO: 1165221 - DNA, 15 bp, Homo sapiens
agagggagaccccat

SEQ ID NO: 1165222 - DNA, 15 bp, Homo sapiens
cagagggagacccca

SEQ ID NO: 1165223 - DNA, 15 bp, Homo sapiens
acagagggagacccc

SEQ ID NO: 1165224 - DNA, 15 bp, Homo sapiens
cacagagggagaccc

SEQ ID NO: 1165225 - DNA, 15 bp, Homo sapiens
ccacagagggagacc

SEQ ID NO: 1165226 - DNA, 15 bp, Homo sapiens
gccacagagggagac

SEQ ID NO: 1165227 - DNA, 15 bp, Homo sapiens
ggccacagagggaga

SEQ ID NO: 1165228 - DNA, 15 bp, Homo sapiens
gggccacagagggag

SEQ ID NO: 1165229 - DNA, 15 bp, Homo sapiens
tgggccacagaggga

SEQ ID NO: 1165230 - DNA, 15 bp, Homo sapiens
ctgggccacagaggg

SEQ ID NO: 1165231 - DNA, 15 bp, Homo sapiens
cctgggccacagagg

SEQ ID NO: 1165232 - DNA, 15 bp, Homo sapiens
gctccagcctgggcc

SEQ ID NO: 1165233 - DNA, 15 bp, Homo sapiens
gtgctccagcctggg

SEQ ID NO: 1165234 - DNA, 15 bp, Homo sapiens
agtgctccagcctgg

SEQ ID NO: 1165235 - DNA, 15 bp, Homo sapiens
cagtgctccagcctg

SEQ ID NO: 1165236 - DNA, 15 bp, Homo sapiens
gcagtgctccagcct

SEQ ID NO: 1165237 - DNA, 15 bp, Homo sapiens
tgcagtgctccagcc

SEQ ID NO: 1165238 - DNA, 15 bp, Homo sapiens
ctgcagtgctccagc

SEQ ID NO: 1165239 - DNA, 15 bp, Homo sapiens
gctgcagtgctccag

SEQ ID NO: 1165240 - DNA, 15 bp, Homo sapiens
ggctgcagtgctcca

SEQ ID NO: 1165241 - DNA, 15 bp, Homo sapiens
aggctgcagtgctcc

SEQ ID NO: 1165242 - DNA, 15 bp, Homo sapiens
gaggctgcagtgctc

SEQ ID NO: 1165243 - DNA, 15 bp, Homo sapiens
agaggctgcagtgct

SEQ ID NO: 1165244 - DNA, 15 bp, Homo sapiens
tagaggctgcagtgc

SEQ ID NO: 1165245 - DNA, 15 bp, Homo sapiens
gtagaggctgcagtg

SEQ ID NO: 1165246 - DNA, 15 bp, Homo sapiens
ggtagaggctgcagt

SEQ ID NO: 1165247 - DNA, 15 bp, Homo sapiens
tggtagaggctgcag

SEQ ID NO: 1165248 - DNA, 15 bp, Homo sapiens
atggtagaggctgca

SEQ ID NO: 1165249 - DNA, 15 bp, Homo sapiens
gatggtagaggctgc

SEQ ID NO: 1165250 - DNA, 15 bp, Homo sapiens
ggatggtagaggctg

SEQ ID NO: 1165251 - DNA, 15 bp, Homo sapiens
tggatggtagaggct

SEQ ID NO: 1165252 - DNA, 15 bp, Homo sapiens
ctggatggtagaggc

SEQ ID NO: 1165253 - DNA, 15 bp, Homo sapiens
cctggatggtagagg

SEQ ID NO: 1165254 - DNA, 15 bp, Homo sapiens
acctggatggtagag

SEQ ID NO: 1165255 - DNA, 15 bp, Homo sapiens
aacctggatggtaga

SEQ ID NO: 1165256 - DNA, 15 bp, Homo sapiens
gaacctggatggtag

SEQ ID NO: 1165257 - DNA, 15 bp, Homo sapiens
tgaacctggatggta

SEQ ID NO: 1165258 - DNA, 15 bp, Homo sapiens
ttgaacctggatggt

SEQ ID NO: 1165259 - DNA, 15 bp, Homo sapiens
cttgaacctggatgg

SEQ ID NO: 1165260 - DNA, 15 bp, Homo sapiens
tcttgaacctggatg

SEQ ID NO: 1165261 - DNA, 15 bp, Homo sapiens
ctcttgaacctggat

SEQ ID NO: 1165262 - DNA, 15 bp, Homo sapiens
tctcttgaacctgga

SEQ ID NO: 1165263 - DNA, 15 bp, Homo sapiens
gaatctcttgaacct

SEQ ID NO: 1165264 - DNA, 15 bp, Homo sapiens
ggaatctcttgaacc

SEQ ID NO: 1165265 - DNA, 15 bp, Homo sapiens
gggaatctcttgaac

SEQ ID NO: 1165266 - DNA, 15 bp, Homo sapiens
ggggaatctcttgaa

SEQ ID NO: 1165267 - DNA, 15 bp, Homo sapiens
aggggaatctcttga

SEQ ID NO: 1165268 - DNA, 15 bp, Homo sapiens
caggggaatctcttg

SEQ ID NO: 1165269 - DNA, 15 bp, Homo sapiens
gcaggggaatctctt

SEQ ID NO: 1165270 - DNA, 15 bp, Homo sapiens
ggcaggggaatctct

SEQ ID NO: 1165271 - DNA, 15 bp, Homo sapiens
aggcaggggaatctc

SEQ ID NO: 1165272 - DNA, 15 bp, Homo sapiens
gaggcaggggaatct

SEQ ID NO: 1165273 - DNA, 15 bp, Homo sapiens
gcaggcatggtggca

SEQ ID NO: 1165274 - DNA, 15 bp, Homo sapiens
tggcaggcatggtgg

SEQ ID NO: 1165275 - DNA, 15 bp, Homo sapiens
gtggcaggcatggtg

SEQ ID NO: 1165276 - DNA, 15 bp, Homo sapiens
ggtggcaggcatggt

SEQ ID NO: 1165277 - DNA, 15 bp, Homo sapiens
tggtggcaggcatgg

SEQ ID NO: 1165278 - DNA, 15 bp, Homo sapiens
gtggtggcaggcatg

SEQ ID NO: 1165279 - DNA, 15 bp, Homo sapiens
tgtggtggcaggcat

SEQ ID NO: 1165280 - DNA, 15 bp, Homo sapiens
cgggtgtggtggcag

SEQ ID NO: 1165281 - DNA, 15 bp, Homo sapiens
gcgggtgtggtggca

SEQ ID NO: 1165282 - DNA, 15 bp, Homo sapiens
ggcgggtgtggtggc

SEQ ID NO: 1165283 - DNA, 15 bp, Homo sapiens
tggcgggtgtggtgg

SEQ ID NO: 1165284 - DNA, 15 bp, Homo sapiens
gtggcgggtgtggtg

SEQ ID NO: 1165285 - DNA, 15 bp, Homo sapiens
ggtggcgggtgtggt

SEQ ID NO: 1165286 - DNA, 15 bp, Homo sapiens
tggtggcgggtgtgg

SEQ ID NO: 1165287 - DNA, 15 bp, Homo sapiens
gtggtggcgggtgtg

SEQ ID NO: 1165288 - DNA, 15 bp, Homo sapiens
tgtggtggcgggtgt

SEQ ID NO: 1165289 - DNA, 15 bp, Homo sapiens
gtgtggtggcgggtg

SEQ ID NO: 1165290 - DNA, 15 bp, Homo sapiens
ggtgtggtggcgggt

SEQ ID NO: 1165291 - DNA, 15 bp, Homo sapiens
gctaaaaatacaaaa

SEQ ID NO: 1165292 - DNA, 15 bp, Homo sapiens
tgctaaaaatacaaa

SEQ ID NO: 1165293 - DNA, 15 bp, Homo sapiens
ctgctaaaaatacaa

SEQ ID NO: 1165294 - DNA, 15 bp, Homo sapiens
gctgctaaaaataca

SEQ ID NO: 1165295 - DNA, 15 bp, Homo sapiens
cgctgctaaaaatac

SEQ ID NO: 1165296 - DNA, 15 bp, Homo sapiens
tcgctgctaaaaata

SEQ ID NO: 1165297 - DNA, 15 bp, Homo sapiens
gtcgctgctaaaaat

SEQ ID NO: 1165298 - DNA, 15 bp, Homo sapiens
cgtcgctgctaaaaa

SEQ ID NO: 1165299 - DNA, 15 bp, Homo sapiens
ccgtcgctgctaaaa

SEQ ID NO: 1165300 - DNA, 15 bp, Homo sapiens
cccgtcgctgctaaa

SEQ ID NO: 1165301 - DNA, 15 bp, Homo sapiens
ccccgtcgctgctaa

SEQ ID NO: 1165302 - DNA, 15 bp, Homo sapiens
accccgtcgctgcta

SEQ ID NO: 1165303 - DNA, 15 bp, Homo sapiens
aaccccgtcgctgct

SEQ ID NO: 1165304 - DNA, 15 bp, Homo sapiens
aaaccccgtcgctgc

SEQ ID NO: 1165305 - DNA, 15 bp, Homo sapiens
gaaaccccgtcgctg

SEQ ID NO: 1165306 - DNA, 15 bp, Homo sapiens
tgaaaccccgtcgct

SEQ ID NO: 1165307 - DNA, 15 bp, Homo sapiens
gtgaaaccccgtcgc

SEQ ID NO: 1165308 - DNA, 15 bp, Homo sapiens
ggtgaaaccccgtcg

SEQ ID NO: 1165309 - DNA, 15 bp, Homo sapiens
ggtcaggggttcgag

SEQ ID NO: 1165310 - DNA, 15 bp, Homo sapiens
aggtcaggggttcga

SEQ ID NO: 1165311 - DNA, 15 bp, Homo sapiens
gaggtcaggggttcg

SEQ ID NO: 1165312 - DNA, 15 bp, Homo sapiens
tgaggtcaggggttc

SEQ ID NO: 1165313 - DNA, 15 bp, Homo sapiens
ctgaggtcaggggtt

SEQ ID NO: 1165314 - DNA, 15 bp, Homo sapiens
cctgaggtcaggggt

SEQ ID NO: 1165315 - DNA, 15 bp, Homo sapiens
acctgaggtcagggg

SEQ ID NO: 1165316 - DNA, 15 bp, Homo sapiens
cacctgaggtcaggg

SEQ ID NO: 1165317 - DNA, 15 bp, Homo sapiens
ggccgaggcaggcgg

SEQ ID NO: 1165318 - DNA, 15 bp, Homo sapiens
aggccgaggcaggcg

SEQ ID NO: 1165319 - DNA, 15 bp, Homo sapiens
catcccagcactttg

SEQ ID NO: 1165320 - DNA, 15 bp, Homo sapiens
tctgtcatcccagca

SEQ ID NO: 1165321 - DNA, 15 bp, Homo sapiens
gtctgtcatcccagc

SEQ ID NO: 1165322 - DNA, 15 bp, Homo sapiens
cgtctgtcatcccag

SEQ ID NO: 1165323 - DNA, 15 bp, Homo sapiens
acgtctgtcatccca

SEQ ID NO: 1165324 - DNA, 15 bp, Homo sapiens
cacgtctgtcatccc

SEQ ID NO: 1165325 - DNA, 15 bp, Homo sapiens
tcacgtctgtcatcc

SEQ ID NO: 1165326 - DNA, 15 bp, Homo sapiens
ctcacgtctgtcatc

SEQ ID NO: 1165327 - DNA, 15 bp, Homo sapiens
gctcacgtctgtcat

SEQ ID NO: 1165328 - DNA, 15 bp, Homo sapiens
ggctcacgtctgtca

SEQ ID NO: 1165329 - DNA, 15 bp, Homo sapiens
tggctcacgtctgtc

SEQ ID NO: 1165330 - DNA, 15 bp, Homo sapiens
gtggctcacgtctgt

SEQ ID NO: 1165331 - DNA, 15 bp, Homo sapiens
acggtggctcacgtc

SEQ ID NO: 1165332 - DNA, 15 bp, Homo sapiens
cgggcacggtggctc

SEQ ID NO: 1165333 - DNA, 15 bp, Homo sapiens
ccgggcacggtggct

SEQ ID NO: 1165334 - DNA, 15 bp, Homo sapiens
gccgggcacggtggc

SEQ ID NO: 1165335 - DNA, 15 bp, Homo sapiens
ggccgggcacggtgg

SEQ ID NO: 1165336 - DNA, 15 bp, Homo sapiens
gggccgggcacggtg

SEQ ID NO: 1165337 - DNA, 15 bp, Homo sapiens
ggggccgggcacggt

SEQ ID NO: 1165338 - DNA, 15 bp, Homo sapiens
tggggccgggcacgg

SEQ ID NO: 1165339 - DNA, 15 bp, Homo sapiens
ctggggccgggcacg

SEQ ID NO: 1165340 - DNA, 15 bp, Homo sapiens
tctggggccgggcac

SEQ ID NO: 1165341 - DNA, 15 bp, Homo sapiens
atctggggccgggca

SEQ ID NO: 1165342 - DNA, 15 bp, Homo sapiens
catctggggccgggc

SEQ ID NO: 1165343 - DNA, 15 bp, Homo sapiens
ccatctggggccggg

SEQ ID NO: 1165344 - DNA, 15 bp, Homo sapiens
tccatctggggccgg

SEQ ID NO: 1165345 - DNA, 15 bp, Homo sapiens
ctccatctggggccg

SEQ ID NO: 1165346 - DNA, 15 bp, Homo sapiens
actccatctggggcc

SEQ ID NO: 1165347 - DNA, 15 bp, Homo sapiens
aactccatctggggc

SEQ ID NO: 1165348 - DNA, 15 bp, Homo sapiens
aaactccatctgggg

SEQ ID NO: 1165349 - DNA, 15 bp, Homo sapiens
aaaactccatctggg

SEQ ID NO: 1165350 - DNA, 15 bp, Homo sapiens
caaaactccatctgg

SEQ ID NO: 1165351 - DNA, 15 bp, Homo sapiens
tcaaaactccatctg

SEQ ID NO: 1165352 - DNA, 15 bp, Homo sapiens
atcaaaactccatct

SEQ ID NO: 1165353 - DNA, 15 bp, Homo sapiens
gatcaaaactccatc

SEQ ID NO: 1165354 - DNA, 15 bp, Homo sapiens
agatcaaaactccat

SEQ ID NO: 1165355 - DNA, 15 bp, Homo sapiens
gagatcaaaactcca

SEQ ID NO: 1165356 - DNA, 15 bp, Homo sapiens
ggagatcaaaactcc

SEQ ID NO: 1165357 - DNA, 15 bp, Homo sapiens
tggagatcaaaactc

SEQ ID NO: 1165358 - DNA, 15 bp, Homo sapiens
ttggagatcaaaact

SEQ ID NO: 1165359 - DNA, 15 bp, Homo sapiens
tttggagatcaaaac

SEQ ID NO: 1165360 - DNA, 15 bp, Homo sapiens
ttttggagatcaaaa

SEQ ID NO: 1165361 - DNA, 15 bp, Homo sapiens
tttttggagatcaaa

SEQ ID NO: 1165362 - DNA, 15 bp, Homo sapiens
gtttttggagatcaa

SEQ ID NO: 1165363 - DNA, 15 bp, Homo sapiens
ggtttttggagatca

SEQ ID NO: 1165364 - DNA, 15 bp, Homo sapiens
tggtttttggagatc

SEQ ID NO: 1165365 - DNA, 15 bp, Homo sapiens
ttggtttttggagat

SEQ ID NO: 1165366 - DNA, 15 bp, Homo sapiens
cttggtttttggaga

SEQ ID NO: 1165367 - DNA, 15 bp, Homo sapiens
tcttggtttttggag

SEQ ID NO: 1165368 - DNA, 15 bp, Homo sapiens
ttcttggtttttgga

SEQ ID NO: 1165369 - DNA, 15 bp, Homo sapiens
cttcttggtttttgg

SEQ ID NO: 1165370 - DNA, 15 bp, Homo sapiens
gcttcttggtttttg

SEQ ID NO: 1165371 - DNA, 15 bp, Homo sapiens
agcttcttggttttt

SEQ ID NO: 1165372 - DNA, 15 bp, Homo sapiens
aagcttcttggtttt

SEQ ID NO: 1165373 - DNA, 15 bp, Homo sapiens
gaagcttcttggttt

SEQ ID NO: 1165374 - DNA, 15 bp, Homo sapiens
agaagcttcttggtt

SEQ ID NO: 1165375 - DNA, 15 bp, Homo sapiens
aagaagcttcttggt

SEQ ID NO: 1165376 - DNA, 15 bp, Homo sapiens
gaagaagcttcttgg

SEQ ID NO: 1165377 - DNA, 15 bp, Homo sapiens
tgaagaagcttcttg

SEQ ID NO: 1165378 - DNA, 15 bp, Homo sapiens
gtgaagaagcttctt

SEQ ID NO: 1165379 - DNA, 15 bp, Homo sapiens
tgtgaagaagcttct

SEQ ID NO: 1165380 - DNA, 15 bp, Homo sapiens
atgtgaagaagcttc

SEQ ID NO: 1165381 - DNA, 15 bp, Homo sapiens
catgtgaagaagctt

SEQ ID NO: 1165382 - DNA, 15 bp, Homo sapiens
tcatgtgaagaagct

SEQ ID NO: 1165383 - DNA, 15 bp, Homo sapiens
atcatgtgaagaagc

SEQ ID NO: 1165384 - DNA, 15 bp, Homo sapiens
gatcatgtgaagaag

SEQ ID NO: 1165385 - DNA, 15 bp, Homo sapiens
agatcatgtgaagaa

SEQ ID NO: 1165386 - DNA, 15 bp, Homo sapiens
aagatcatgtgaaga

SEQ ID NO: 1165387 - DNA, 15 bp, Homo sapiens
aaagatcatgtgaag

SEQ ID NO: 1165388 - DNA, 15 bp, Homo sapiens
gaaagatcatgtgaa

SEQ ID NO: 1165389 - DNA, 15 bp, Homo sapiens
agaaagatcatgtga

SEQ ID NO: 1165390 - DNA, 15 bp, Homo sapiens
cagaaagatcatgtg

SEQ ID NO: 1165391 - DNA, 15 bp, Homo sapiens
ccagaaagatcatgt

SEQ ID NO: 1165392 - DNA, 15 bp, Homo sapiens
accagaaagatcatg

SEQ ID NO: 1165393 - DNA, 15 bp, Homo sapiens
aaccagaaagatcat

SEQ ID NO: 1165394 - DNA, 15 bp, Homo sapiens
taaccagaaagatca

SEQ ID NO: 1165395 - DNA, 15 bp, Homo sapiens
gtaaccagaaagatc

SEQ ID NO: 1165396 - DNA, 15 bp, Homo sapiens
agtaaccagaaagat

SEQ ID NO: 1165397 - DNA, 15 bp, Homo sapiens
cagtaaccagaaaga

SEQ ID NO: 1165398 - DNA, 15 bp, Homo sapiens
acagtaaccagaaag

SEQ ID NO: 1165399 - DNA, 15 bp, Homo sapiens
cacagtaaccagaaa

SEQ ID NO: 1165400 - DNA, 15 bp, Homo sapiens
gcacagtaaccagaa

SEQ ID NO: 1165401 - DNA, 15 bp, Homo sapiens
tgcacagtaaccaga

SEQ ID NO: 1165402 - DNA, 15 bp, Homo sapiens
ctgcacagtaaccag

SEQ ID NO: 1165403 - DNA, 15 bp, Homo sapiens
tctgcacagtaacca

SEQ ID NO: 1165404 - DNA, 15 bp, Homo sapiens
ctctgcacagtaacc

SEQ ID NO: 1165405 - DNA, 15 bp, Homo sapiens
cctctgcacagtaac

SEQ ID NO: 1165406 - DNA, 15 bp, Homo sapiens
gcctctgcacagtaa

SEQ ID NO: 1165407 - DNA, 15 bp, Homo sapiens
agcctctgcacagta

SEQ ID NO: 1165408 - DNA, 15 bp, Homo sapiens
gagcctctgcacagt

SEQ ID NO: 1165409 - DNA, 15 bp, Homo sapiens
agagcctctgcacag

SEQ ID NO: 1165410 - DNA, 15 bp, Homo sapiens
gagagcctctgcaca

SEQ ID NO: 1165411 - DNA, 15 bp, Homo sapiens
tgagagcctctgcac

SEQ ID NO: 1165412 - DNA, 15 bp, Homo sapiens
ctgagagcctctgca

SEQ ID NO: 1165413 - DNA, 15 bp, Homo sapiens
cctgagagcctctgc

SEQ ID NO: 1165414 - DNA, 15 bp, Homo sapiens
ccctgagagcctctg

SEQ ID NO: 1165415 - DNA, 15 bp, Homo sapiens
accctgagagcctct

SEQ ID NO: 1165416 - DNA, 15 bp, Homo sapiens
taccctgagagcctc

SEQ ID NO: 1165417 - DNA, 15 bp, Homo sapiens
ctaccctgagagcct

SEQ ID NO: 1165418 - DNA, 15 bp, Homo sapiens
tctaccctgagagcc

SEQ ID NO: 1165419 - DNA, 15 bp, Homo sapiens
ttctaccctgagagc

SEQ ID NO: 1165420 - DNA, 15 bp, Homo sapiens
cttctaccctgagag

SEQ ID NO: 1165421 - DNA, 15 bp, Homo sapiens
ccttctaccctgaga

SEQ ID NO: 1165422 - DNA, 15 bp, Homo sapiens
cccttctaccctgag

SEQ ID NO: 1165423 - DNA, 15 bp, Homo sapiens
ccccttctaccctga

SEQ ID NO: 1165424 - DNA, 15 bp, Homo sapiens
gccccttctaccctg

SEQ ID NO: 1165425 - DNA, 15 bp, Homo sapiens
ggccccttctaccct

SEQ ID NO: 1165426 - DNA, 15 bp, Homo sapiens
aggccccttctaccc

SEQ ID NO: 1165427 - DNA, 15 bp, Homo sapiens
caggccccttctacc

SEQ ID NO: 1165428 - DNA, 15 bp, Homo sapiens
acaggccccttctac

SEQ ID NO: 1165429 - DNA, 15 bp, Homo sapiens
cacaggccccttcta

SEQ ID NO: 1165430 - DNA, 15 bp, Homo sapiens
gcacaggccccttct

SEQ ID NO: 1165431 - DNA, 15 bp, Homo sapiens
tgcacaggccccttc

SEQ ID NO: 1165432 - DNA, 15 bp, Homo sapiens
gtgcacaggcccctt

SEQ ID NO: 1165433 - DNA, 15 bp, Homo sapiens
ggtgcacaggcccct

SEQ ID NO: 1165434 - DNA, 15 bp, Homo sapiens
tggtgcacaggcccc

SEQ ID NO: 1165435 - DNA, 15 bp, Homo sapiens
gtggtgcacaggccc

SEQ ID NO: 1165436 - DNA, 15 bp, Homo sapiens
ggtggtgcacaggcc

SEQ ID NO: 1165437 - DNA, 15 bp, Homo sapiens
aggtggtgcacaggc

SEQ ID NO: 1165438 - DNA, 15 bp, Homo sapiens
gaggtggtgcacagg

SEQ ID NO: 1165439 - DNA, 15 bp, Homo sapiens
agaggtggtgcacag

SEQ ID NO: 1165440 - DNA, 15 bp, Homo sapiens
cagaggtggtgcaca

SEQ ID NO: 1165441 - DNA, 15 bp, Homo sapiens
ccagaggtggtgcac

SEQ ID NO: 1165442 - DNA, 15 bp, Homo sapiens
cccagaggtggtgca

SEQ ID NO: 1165443 - DNA, 15 bp, Homo sapiens
acccagaggtggtgc

SEQ ID NO: 1165444 - DNA, 15 bp, Homo sapiens
cacccagaggtggtg

SEQ ID NO: 1165445 - DNA, 15 bp, Homo sapiens
acacccagaggtggt

SEQ ID NO: 1165446 - DNA, 15 bp, Homo sapiens
tacacccagaggtgg

SEQ ID NO: 1165447 - DNA, 15 bp, Homo sapiens
gtacacccagaggtg

SEQ ID NO: 1165448 - DNA, 15 bp, Homo sapiens
ggtacacccagaggt

SEQ ID NO: 1165449 - DNA, 15 bp, Homo sapiens
aggtacacccagagg

SEQ ID NO: 1165450 - DNA, 15 bp, Homo sapiens
gaggtacacccagag

SEQ ID NO: 1165451 - DNA, 15 bp, Homo sapiens
tgaggtacacccaga

SEQ ID NO: 1165452 - DNA, 15 bp, Homo sapiens
atgaggtacacccag

SEQ ID NO: 1165453 - DNA, 15 bp, Homo sapiens
aatgaggtacaccca

SEQ ID NO: 1165454 - DNA, 15 bp, Homo sapiens
aaatgaggtacaccc

SEQ ID NO: 1165455 - DNA, 15 bp, Homo sapiens
taaatgaggtacacc

SEQ ID NO: 1165456 - DNA, 15 bp, Homo sapiens
ttaaatgaggtacac

SEQ ID NO: 1165457 - DNA, 15 bp, Homo sapiens
cttaaatgaggtaca

SEQ ID NO: 1165458 - DNA, 15 bp, Homo sapiens
tcttaaatgaggtac

SEQ ID NO: 1165459 - DNA, 15 bp, Homo sapiens
atcttaaatgaggta

SEQ ID NO: 1165460 - DNA, 15 bp, Homo sapiens
gatcttaaatgaggt

SEQ ID NO: 1165461 - DNA, 15 bp, Homo sapiens
ggatcttaaatgagg

SEQ ID NO: 1165462 - DNA, 15 bp, Homo sapiens
gggatcttaaatgag

SEQ ID NO: 1165463 - DNA, 15 bp, Homo sapiens
agggatcttaaatga

SEQ ID NO: 1165464 - DNA, 15 bp, Homo sapiens
cagggatcttaaatg

SEQ ID NO: 1165465 - DNA, 15 bp, Homo sapiens
tcagggatcttaaat

SEQ ID NO: 1165466 - DNA, 15 bp, Homo sapiens
ctcagggatcttaaa

SEQ ID NO: 1165467 - DNA, 15 bp, Homo sapiens
tctcagggatcttaa

SEQ ID NO: 1165468 - DNA, 15 bp, Homo sapiens
ttctcagggatctta

SEQ ID NO: 1165469 - DNA, 15 bp, Homo sapiens
gttctcagggatctt

SEQ ID NO: 1165470 - DNA, 15 bp, Homo sapiens
tgttctcagggatct

SEQ ID NO: 1165471 - DNA, 15 bp, Homo sapiens
atgttctcagggatc

SEQ ID NO: 1165472 - DNA, 15 bp, Homo sapiens
aggttcatcaactac

SEQ ID NO: 1165473 - DNA, 15 bp, Homo sapiens
aaggttcatcaacta

SEQ ID NO: 1165474 - DNA, 15 bp, Homo sapiens
aaaggttcatcaact

SEQ ID NO: 1165475 - DNA, 15 bp, Homo sapiens
gaaaggttcatcaac

SEQ ID NO: 1165476 - DNA, 15 bp, Homo sapiens
agaaaggttcatcaa

SEQ ID NO: 1165477 - DNA, 15 bp, Homo sapiens
tagaaaggttcatca

SEQ ID NO: 1165478 - DNA, 15 bp, Homo sapiens
ttagaaaggttcatc

SEQ ID NO: 1165479 - DNA, 15 bp, Homo sapiens
attagaaaggttcat

SEQ ID NO: 1165480 - DNA, 15 bp, Homo sapiens
tattagaaaggttca

SEQ ID NO: 1165481 - DNA, 15 bp, Homo sapiens
ttattagaaaggttc

SEQ ID NO: 1165482 - DNA, 15 bp, Homo sapiens
tttattagaaaggtt

SEQ ID NO: 1165483 - DNA, 15 bp, Homo sapiens
atttattagaaaggt

SEQ ID NO: 1165484 - DNA, 15 bp, Homo sapiens
gatttattagaaagg

SEQ ID NO: 1165485 - DNA, 15 bp, Homo sapiens
tgatttattagaaag

SEQ ID NO: 1165486 - DNA, 15 bp, Homo sapiens
atgatttattagaaa

SEQ ID NO: 1165487 - DNA, 15 bp, Homo sapiens
aatgatttattagaa

SEQ ID NO: 1165488 - DNA, 15 bp, Homo sapiens
aaatgatttattaga

SEQ ID NO: 1165489 - DNA, 15 bp, Homo sapiens
aaaatgatttattag

SEQ ID NO: 1165490 - DNA, 15 bp, Homo sapiens
taaaatgatttatta

SEQ ID NO: 1165491 - DNA, 15 bp, Homo sapiens
ttaaaatgatttatt

SEQ ID NO: 1165492 - DNA, 15 bp, Homo sapiens
attaaaatgatttat

SEQ ID NO: 1165493 - DNA, 15 bp, Homo sapiens
tattaaaatgattta

SEQ ID NO: 1165494 - DNA, 15 bp, Homo sapiens
ttattaaaatgattt

SEQ ID NO: 1165495 - DNA, 15 bp, Homo sapiens
attattaaaatgatt

SEQ ID NO: 1165496 - DNA, 15 bp, Homo sapiens
aattattaaaatgat

SEQ ID NO: 1165497 - DNA, 15 bp, Homo sapiens
aaattattaaaatga

SEQ ID NO: 1165498 - DNA, 15 bp, Homo sapiens
gaaattattaaaatg

SEQ ID NO: 1165499 - DNA, 15 bp, Homo sapiens
tgaaattattaaaat

SEQ ID NO: 1165500 - DNA, 15 bp, Homo sapiens
ctgaaattattaaaa

SEQ ID NO: 1165501 - DNA, 15 bp, Homo sapiens
gctgaaattattaaa

SEQ ID NO: 1165502 - DNA, 15 bp, Homo sapiens
agctgaaattattaa

SEQ ID NO: 1165503 - DNA, 15 bp, Homo sapiens
cagctgaaattatta

SEQ ID NO: 1165504 - DNA, 15 bp, Homo sapiens
gcagctgaaattatt

SEQ ID NO: 1165505 - DNA, 15 bp, Homo sapiens
agcagctgaaattat

SEQ ID NO: 1165506 - DNA, 15 bp, Homo sapiens
gagcagctgaaatta

SEQ ID NO: 1165507 - DNA, 15 bp, Homo sapiens
tgagcagctgaaatt

SEQ ID NO: 1165508 - DNA, 15 bp, Homo sapiens
ctgagcagctgaaat

SEQ ID NO: 1165509 - DNA, 15 bp, Homo sapiens
actgagcagctgaaa

SEQ ID NO: 1165510 - DNA, 15 bp, Homo sapiens
aactgagcagctgaa

SEQ ID NO: 1165511 - DNA, 15 bp, Homo sapiens
taactgagcagctga

SEQ ID NO: 1165512 - DNA, 15 bp, Homo sapiens
ttaactgagcagctg

SEQ ID NO: 1165513 - DNA, 15 bp, Homo sapiens
tttaactgagcagct

SEQ ID NO: 1165514 - DNA, 15 bp, Homo sapiens
gtttaactgagcagc

SEQ ID NO: 1165515 - DNA, 15 bp, Homo sapiens
agtttaactgagcag

SEQ ID NO: 1165516 - DNA, 15 bp, Homo sapiens
tagtttaactgagca

SEQ ID NO: 1165517 - DNA, 15 bp, Homo sapiens
ttagtttaactgagc

SEQ ID NO: 1165518 - DNA, 15 bp, Homo sapiens
tttagtttaactgag

SEQ ID NO: 1165519 - DNA, 15 bp, Homo sapiens
atttagtttaactga

SEQ ID NO: 1165520 - DNA, 15 bp, Homo sapiens
aatttagtttaactg

SEQ ID NO: 1165521 - DNA, 15 bp, Homo sapiens
aaatttagtttaact

SEQ ID NO: 1165522 - DNA, 15 bp, Homo sapiens
caaatttagtttaac

SEQ ID NO: 1165523 - DNA, 15 bp, Homo sapiens
ccaaatttagtttaa

SEQ ID NO: 1165524 - DNA, 15 bp, Homo sapiens
gccaaatttagttta

SEQ ID NO: 1165525 - DNA, 15 bp, Homo sapiens
ggccaaatttagttt

SEQ ID NO: 1165526 - DNA, 15 bp, Homo sapiens
aggccaaatttagtt

SEQ ID NO: 1165527 - DNA, 15 bp, Homo sapiens
caggccaaatttagt

SEQ ID NO: 1165528 - DNA, 15 bp, Homo sapiens
tcaggccaaatttag

SEQ ID NO: 1165529 - DNA, 15 bp, Homo sapiens
ctcaggccaaattta

SEQ ID NO: 1165530 - DNA, 15 bp, Homo sapiens
cctcaggccaaattt

SEQ ID NO: 1165531 - DNA, 15 bp, Homo sapiens
gcctcaggccaaatt

SEQ ID NO: 1165532 - DNA, 15 bp, Homo sapiens
agcctcaggccaaat

SEQ ID NO: 1165533 - DNA, 15 bp, Homo sapiens
cagcctcaggccaaa

SEQ ID NO: 1165534 - DNA, 15 bp, Homo sapiens
gcagcctcaggccaa

SEQ ID NO: 1165535 - DNA, 15 bp, Homo sapiens
ggcagcctcaggcca

SEQ ID NO: 1165536 - DNA, 15 bp, Homo sapiens
aggcagcctcaggcc

SEQ ID NO: 1165537 - DNA, 15 bp, Homo sapiens
caggcagcctcaggc

SEQ ID NO: 1165538 - DNA, 15 bp, Homo sapiens
gcaggcagcctcagg

SEQ ID NO: 1165539 - DNA, 15 bp, Homo sapiens
tgcaggcagcctcag

SEQ ID NO: 1165540 - DNA, 15 bp, Homo sapiens
atgcaggcagcctca

SEQ ID NO: 1165541 - DNA, 15 bp, Homo sapiens
tatgcaggcagcctc

SEQ ID NO: 1165542 - DNA, 15 bp, Homo sapiens
gtatgcaggcagcct

SEQ ID NO: 1165543 - DNA, 15 bp, Homo sapiens
agtatgcaggcagcc

SEQ ID NO: 1165544 - DNA, 15 bp, Homo sapiens
aagtatgcaggcagc

SEQ ID NO: 1165545 - DNA, 15 bp, Homo sapiens
aaagtatgcaggcag

SEQ ID NO: 1165546 - DNA, 15 bp, Homo sapiens
caaagtatgcaggca

SEQ ID NO: 1165547 - DNA, 15 bp, Homo sapiens
tcaaagtatgcaggc

SEQ ID NO: 1165548 - DNA, 15 bp, Homo sapiens
ctcaaagtatgcagg

SEQ ID NO: 1165549 - DNA, 15 bp, Homo sapiens
actcaaagtatgcag

SEQ ID NO: 1165550 - DNA, 15 bp, Homo sapiens
aactcaaagtatgca

SEQ ID NO: 1165551 - DNA, 15 bp, Homo sapiens
gaactcaaagtatgc

SEQ ID NO: 1165552 - DNA, 15 bp, Homo sapiens
ggaactcaaagtatg

SEQ ID NO: 1165553 - DNA, 15 bp, Homo sapiens
gggaactcaaagtat

SEQ ID NO: 1165554 - DNA, 15 bp, Homo sapiens
tgggaactcaaagta

SEQ ID NO: 1165555 - DNA, 15 bp, Homo sapiens
gtgggaactcaaagt

SEQ ID NO: 1165556 - DNA, 15 bp, Homo sapiens
tgtgggaactcaaag

SEQ ID NO: 1165557 - DNA, 15 bp, Homo sapiens
ctgtgggaactcaaa

SEQ ID NO: 1165558 - DNA, 15 bp, Homo sapiens
tctgtgggaactcaa

SEQ ID NO: 1165559 - DNA, 15 bp, Homo sapiens
ctctgtgggaactca

SEQ ID NO: 1165560 - DNA, 15 bp, Homo sapiens
gctctgtgggaactc

SEQ ID NO: 1165561 - DNA, 15 bp, Homo sapiens
tgctctgtgggaact

SEQ ID NO: 1165562 - DNA, 15 bp, Homo sapiens
ttgctctgtgggaac

SEQ ID NO: 1165563 - DNA, 15 bp, Homo sapiens
tttgctctgtgggaa

SEQ ID NO: 1165564 - DNA, 15 bp, Homo sapiens
gtttgctctgtggga

SEQ ID NO: 1165565 - DNA, 15 bp, Homo sapiens
agtttgctctgtggg

SEQ ID NO: 1165566 - DNA, 15 bp, Homo sapiens
cagtttgctctgtgg

SEQ ID NO: 1165567 - DNA, 15 bp, Homo sapiens
gcagtttgctctgtg

SEQ ID NO: 1165568 - DNA, 15 bp, Homo sapiens
tgcagtttgctctgt

SEQ ID NO: 1165569 - DNA, 15 bp, Homo sapiens
ttgcagtttgctctg

SEQ ID NO: 1165570 - DNA, 15 bp, Homo sapiens
cttgcagtttgctct

SEQ ID NO: 1165571 - DNA, 15 bp, Homo sapiens
gcttgcagtttgctc

SEQ ID NO: 1165572 - DNA, 15 bp, Homo sapiens
tgcttgcagtttgct

SEQ ID NO: 1165573 - DNA, 15 bp, Homo sapiens
ttgcttgcagtttgc

SEQ ID NO: 1165574 - DNA, 15 bp, Homo sapiens
tttgcttgcagtttg

SEQ ID NO: 1165575 - DNA, 15 bp, Homo sapiens
gtttgcttgcagttt

SEQ ID NO: 1165576 - DNA, 15 bp, Homo sapiens
agtttgcttgcagtt

SEQ ID NO: 1165577 - DNA, 15 bp, Homo sapiens
aagtttgcttgcagt

SEQ ID NO: 1165578 - DNA, 15 bp, Homo sapiens
taagtttgcttgcag

SEQ ID NO: 1165579 - DNA, 15 bp, Homo sapiens
ctaagtttgcttgca

SEQ ID NO: 1165580 - DNA, 15 bp, Homo sapiens
actaagtttgcttgc

SEQ ID NO: 1165581 - DNA, 15 bp, Homo sapiens
tactaagtttgcttg

SEQ ID NO: 1165582 - DNA, 15 bp, Homo sapiens
atactaagtttgctt

SEQ ID NO: 1165583 - DNA, 15 bp, Homo sapiens
catactaagtttgct

SEQ ID NO: 1165584 - DNA, 15 bp, Homo sapiens
acatactaagtttgc

SEQ ID NO: 1165585 - DNA, 15 bp, Homo sapiens
tacatactaagtttg

SEQ ID NO: 1165586 - DNA, 15 bp, Homo sapiens
ttacatactaagttt

SEQ ID NO: 1165587 - DNA, 15 bp, Homo sapiens
tttacatactaagtt

SEQ ID NO: 1165588 - DNA, 15 bp, Homo sapiens
gtttacatactaagt

SEQ ID NO: 1165589 - DNA, 15 bp, Homo sapiens
tgtttacatactaag

SEQ ID NO: 1165590 - DNA, 15 bp, Homo sapiens
ttgtttacatactaa

SEQ ID NO: 1165591 - DNA, 15 bp, Homo sapiens
tttgtttacatacta

SEQ ID NO: 1165592 - DNA, 15 bp, Homo sapiens
gtttgtttacatact

SEQ ID NO: 1165593 - DNA, 15 bp, Homo sapiens
agtttgtttacatac

SEQ ID NO: 1165594 - DNA, 15 bp, Homo sapiens
cagtttgtttacata

SEQ ID NO: 1165595 - DNA, 15 bp, Homo sapiens
gcagtttgtttacat

SEQ ID NO: 1165596 - DNA, 15 bp, Homo sapiens
tgcagtttgtttaca

SEQ ID NO: 1165597 - DNA, 15 bp, Homo sapiens
ttgcagtttgtttac

SEQ ID NO: 1165598 - DNA, 15 bp, Homo sapiens
gttgcagtttgttta

SEQ ID NO: 1165599 - DNA, 15 bp, Homo sapiens
agttgcagtttgttt

SEQ ID NO: 1165600 - DNA, 15 bp, Homo sapiens
aagttgcagtttgtt

SEQ ID NO: 1165601 - DNA, 15 bp, Homo sapiens
taagttgcagtttgt

SEQ ID NO: 1165602 - DNA, 15 bp, Homo sapiens
ataagttgcagtttg

SEQ ID NO: 1165603 - DNA, 15 bp, Homo sapiens
gataagttgcagttt

SEQ ID NO: 1165604 - DNA, 15 bp, Homo sapiens
agataagttgcagtt

SEQ ID NO: 1165605 - DNA, 15 bp, Homo sapiens
aagataagttgcagt

SEQ ID NO: 1165606 - DNA, 15 bp, Homo sapiens
taagataagttgcag

SEQ ID NO: 1165607 - DNA, 15 bp, Homo sapiens
ctaagataagttgca

SEQ ID NO: 1165608 - DNA, 15 bp, Homo sapiens
gctaagataagttgc

SEQ ID NO: 1165609 - DNA, 15 bp, Homo sapiens
tgctaagataagttg

SEQ ID NO: 1165610 - DNA, 15 bp, Homo sapiens
ctgctaagataagtt

SEQ ID NO: 1165611 - DNA, 15 bp, Homo sapiens
actgctaagataagt

SEQ ID NO: 1165612 - DNA, 15 bp, Homo sapiens
tactgctaagataag

SEQ ID NO: 1165613 - DNA, 15 bp, Homo sapiens
atactgctaagataa

SEQ ID NO: 1165614 - DNA, 15 bp, Homo sapiens
tatactgctaagata

SEQ ID NO: 1165615 - DNA, 15 bp, Homo sapiens
atatactgctaagat

SEQ ID NO: 1165616 - DNA, 15 bp, Homo sapiens
aatatactgctaaga

SEQ ID NO: 1165617 - DNA, 15 bp, Homo sapiens
gaatatactgctaag

SEQ ID NO: 1165618 - DNA, 15 bp, Homo sapiens
agaatatactgctaa

SEQ ID NO: 1165619 - DNA, 15 bp, Homo sapiens
gagaatatactgcta

SEQ ID NO: 1165620 - DNA, 15 bp, Homo sapiens
agagaatatactgct

SEQ ID NO: 1165621 - DNA, 15 bp, Homo sapiens
aagagaatatactgc

SEQ ID NO: 1165622 - DNA, 15 bp, Homo sapiens
taagagaatatactg

SEQ ID NO: 1165623 - DNA, 15 bp, Homo sapiens
ttaagagaatatact

SEQ ID NO: 1165624 - DNA, 15 bp, Homo sapiens
cttaagagaatatac

SEQ ID NO: 1165625 - DNA, 15 bp, Homo sapiens
tcttaagagaatata

SEQ ID NO: 1165626 - DNA, 15 bp, Homo sapiens
gtcttaagagaatat

SEQ ID NO: 1165627 - DNA, 15 bp, Homo sapiens
tgtcttaagagaata

SEQ ID NO: 1165628 - DNA, 15 bp, Homo sapiens
ctgtcttaagagaat

SEQ ID NO: 1165629 - DNA, 15 bp, Homo sapiens
tctgtcttaagagaa

SEQ ID NO: 1165630 - DNA, 15 bp, Homo sapiens
ctctgtcttaagaga

SEQ ID NO: 1165631 - DNA, 15 bp, Homo sapiens
tctctgtcttaagag

SEQ ID NO: 1165632 - DNA, 15 bp, Homo sapiens
gtctctgtcttaaga

SEQ ID NO: 1165633 - DNA, 15 bp, Homo sapiens
agtctctgtcttaag

SEQ ID NO: 1165634 - DNA, 15 bp, Homo sapiens
cagtctctgtcttaa

SEQ ID NO: 1165635 - DNA, 15 bp, Homo sapiens
ccagtctctgtctta

SEQ ID NO: 1165636 - DNA, 15 bp, Homo sapiens
gccagtctctgtctt

SEQ ID NO: 1165637 - DNA, 15 bp, Homo sapiens
agccagtctctgtct

SEQ ID NO: 1165638 - DNA, 15 bp, Homo sapiens
cagccagtctctgtc

SEQ ID NO: 1165639 - DNA, 15 bp, Homo sapiens
tcagccagtctctgt

SEQ ID NO: 1165640 - DNA, 15 bp, Homo sapiens
ctcagccagtctctg

SEQ ID NO: 1165641 - DNA, 15 bp, Homo sapiens
tctcagccagtctct

SEQ ID NO: 1165642 - DNA, 15 bp, Homo sapiens
gtctcagccagtctc

SEQ ID NO: 1165643 - DNA, 15 bp, Homo sapiens
tgtctcagccagtct

SEQ ID NO: 1165644 - DNA, 15 bp, Homo sapiens
ttgtctcagccagtc

SEQ ID NO: 1165645 - DNA, 15 bp, Homo sapiens
cttgtctcagccagt

SEQ ID NO: 1165646 - DNA, 15 bp, Homo sapiens
acttgtctcagccag

SEQ ID NO: 1165647 - DNA, 15 bp, Homo sapiens
aacttgtctcagcca

SEQ ID NO: 1165648 - DNA, 15 bp, Homo sapiens
caacttgtctcagcc

SEQ ID NO: 1165649 - DNA, 15 bp, Homo sapiens
gcaacttgtctcagc

SEQ ID NO: 1165650 - DNA, 15 bp, Homo sapiens
agcaacttgtctcag

SEQ ID NO: 1165651 - DNA, 15 bp, Homo sapiens
cagcaacttgtctca

SEQ ID NO: 1165652 - DNA, 15 bp, Homo sapiens
tcagcaacttgtctc

SEQ ID NO: 1165653 - DNA, 15 bp, Homo sapiens
ctcagcaacttgtct

SEQ ID NO: 1165654 - DNA, 15 bp, Homo sapiens
actcagcaacttgtc

SEQ ID NO: 1165655 - DNA, 15 bp, Homo sapiens
gactcagcaacttgt

SEQ ID NO: 1165656 - DNA, 15 bp, Homo sapiens
agactcagcaacttg

SEQ ID NO: 1165657 - DNA, 15 bp, Homo sapiens
gagactcagcaactt

SEQ ID NO: 1165658 - DNA, 15 bp, Homo sapiens
tgagactcagcaact

SEQ ID NO: 1165659 - DNA, 15 bp, Homo sapiens
ctgagactcagcaac

SEQ ID NO: 1165660 - DNA, 15 bp, Homo sapiens
gctgagactcagcaa

SEQ ID NO: 1165661 - DNA, 15 bp, Homo sapiens
ggctgagactcagca

SEQ ID NO: 1165662 - DNA, 15 bp, Homo sapiens
tggctgagactcagc

SEQ ID NO: 1165663 - DNA, 15 bp, Homo sapiens
ttggctgagactcag

SEQ ID NO: 1165664 - DNA, 15 bp, Homo sapiens
attggctgagactca

SEQ ID NO: 1165665 - DNA, 15 bp, Homo sapiens
gattggctgagactc

SEQ ID NO: 1165666 - DNA, 15 bp, Homo sapiens
tgattggctgagact

SEQ ID NO: 1165667 - DNA, 15 bp, Homo sapiens
atgattggctgagac

SEQ ID NO: 1165668 - DNA, 15 bp, Homo sapiens
catgattggctgaga

SEQ ID NO: 1165669 - DNA, 15 bp, Homo sapiens
ccatgattggctgag

SEQ ID NO: 1165670 - DNA, 15 bp, Homo sapiens
gccatgattggctga

SEQ ID NO: 1165671 - DNA, 15 bp, Homo sapiens
tgccatgattggctg

SEQ ID NO: 1165672 - DNA, 15 bp, Homo sapiens
ctgccatgattggct

SEQ ID NO: 1165673 - DNA, 15 bp, Homo sapiens
gctgccatgattggc

SEQ ID NO: 1165674 - DNA, 15 bp, Homo sapiens
ggctgccatgattgg

SEQ ID NO: 1165675 - DNA, 15 bp, Homo sapiens
tggctgccatgattg

SEQ ID NO: 1165676 - DNA, 15 bp, Homo sapiens
ttggctgccatgatt

SEQ ID NO: 1165677 - DNA, 15 bp, Homo sapiens
cttggctgccatgat

SEQ ID NO: 1165678 - DNA, 15 bp, Homo sapiens
gcttggctgccatga

SEQ ID NO: 1165679 - DNA, 15 bp, Homo sapiens
tgcttggctgccatg

SEQ ID NO: 1165680 - DNA, 15 bp, Homo sapiens
atgcttggctgccat

SEQ ID NO: 1165681 - DNA, 15 bp, Homo sapiens
gatgcttggctgcca

SEQ ID NO: 1165682 - DNA, 15 bp, Homo sapiens
tgatgcttggctgcc

SEQ ID NO: 1165683 - DNA, 15 bp, Homo sapiens
ctgatgcttggctgc

SEQ ID NO: 1165684 - DNA, 15 bp, Homo sapiens
gctgatgcttggctg

SEQ ID NO: 1165685 - DNA, 15 bp, Homo sapiens
ggctgatgcttggct

SEQ ID NO: 1165686 - DNA, 15 bp, Homo sapiens
tggctgatgcttggc

SEQ ID NO: 1165687 - DNA, 15 bp, Homo sapiens
ttggctgatgcttgg

SEQ ID NO: 1165688 - DNA, 15 bp, Homo sapiens
attggctgatgcttg

SEQ ID NO: 1165689 - DNA, 15 bp, Homo sapiens
gattggctgatgctt

SEQ ID NO: 1165690 - DNA, 15 bp, Homo sapiens
tgattggctgatgct

SEQ ID NO: 1165691 - DNA, 15 bp, Homo sapiens
gtgattggctgatgc

SEQ ID NO: 1165692 - DNA, 15 bp, Homo sapiens
tgtgattggctgatg

SEQ ID NO: 1165693 - DNA, 15 bp, Homo sapiens
ctgtgattggctgat

SEQ ID NO: 1165694 - DNA, 15 bp, Homo sapiens
cctgtgattggctga

SEQ ID NO: 1165695 - DNA, 15 bp, Homo sapiens
gcctgtgattggctg

SEQ ID NO: 1165696 - DNA, 15 bp, Homo sapiens
agcctgtgattggct

SEQ ID NO: 1165697 - DNA, 15 bp, Homo sapiens
tagcctgtgattggc

SEQ ID NO: 1165698 - DNA, 15 bp, Homo sapiens
gtagcctgtgattgg

SEQ ID NO: 1165699 - DNA, 15 bp, Homo sapiens
ggtagcctgtgattg

SEQ ID NO: 1165700 - DNA, 15 bp, Homo sapiens
cggtagcctgtgatt

SEQ ID NO: 1165701 - DNA, 15 bp, Homo sapiens
tcggtagcctgtgat

SEQ ID NO: 1165702 - DNA, 15 bp, Homo sapiens
gtcggtagcctgtga

SEQ ID NO: 1165703 - DNA, 15 bp, Homo sapiens
agtcggtagcctgtg

SEQ ID NO: 1165704 - DNA, 15 bp, Homo sapiens
cagtcggtagcctgt

SEQ ID NO: 1165705 - DNA, 15 bp, Homo sapiens
tcagtcggtagcctg

SEQ ID NO: 1165706 - DNA, 15 bp, Homo sapiens
atcagtcggtagcct

SEQ ID NO: 1165707 - DNA, 15 bp, Homo sapiens
catcagtcggtagcc

SEQ ID NO: 1165708 - DNA, 15 bp, Homo sapiens
tcatcagtcggtagc

SEQ ID NO: 1165709 - DNA, 15 bp, Homo sapiens
ctcatcagtcggtag

SEQ ID NO: 1165710 - DNA, 15 bp, Homo sapiens
gctcatcagtcggta

SEQ ID NO: 1165711 - DNA, 15 bp, Homo sapiens
agctcatcagtcggt

SEQ ID NO: 1165712 - DNA, 15 bp, Homo sapiens
gagctcatcagtcgg

SEQ ID NO: 1165713 - DNA, 15 bp, Homo sapiens
ggagctcatcagtcg

SEQ ID NO: 1165714 - DNA, 15 bp, Homo sapiens
aggagctcatcagtc

SEQ ID NO: 1165715 - DNA, 15 bp, Homo sapiens
caggagctcatcagt

SEQ ID NO: 1165716 - DNA, 15 bp, Homo sapiens
acaggagctcatcag

SEQ ID NO: 1165717 - DNA, 15 bp, Homo sapiens
gacaggagctcatca

SEQ ID NO: 1165718 - DNA, 15 bp, Homo sapiens
ggacaggagctcatc

SEQ ID NO: 1165719 - DNA, 15 bp, Homo sapiens
tggacaggagctcat

SEQ ID NO: 1165720 - DNA, 15 bp, Homo sapiens
atggacaggagctca

SEQ ID NO: 1165721 - DNA, 15 bp, Homo sapiens
tatggacaggagctc

SEQ ID NO: 1165722 - DNA, 15 bp, Homo sapiens
gtatggacaggagct

SEQ ID NO: 1165723 - DNA, 15 bp, Homo sapiens
ggtatggacaggagc

SEQ ID NO: 1165724 - DNA, 15 bp, Homo sapiens
gggtatggacaggag

SEQ ID NO: 1165725 - DNA, 15 bp, Homo sapiens
tgggtatggacagga

SEQ ID NO: 1165726 - DNA, 15 bp, Homo sapiens
ttgggtatggacagg

SEQ ID NO: 1165727 - DNA, 15 bp, Homo sapiens
gttgggtatggacag

SEQ ID NO: 1165728 - DNA, 15 bp, Homo sapiens
tgttgggtatggaca

SEQ ID NO: 1165729 - DNA, 15 bp, Homo sapiens
gtgttgggtatggac

SEQ ID NO: 1165730 - DNA, 15 bp, Homo sapiens
ggtgttgggtatgga

SEQ ID NO: 1165731 - DNA, 15 bp, Homo sapiens
aggtgttgggtatgg

SEQ ID NO: 1165732 - DNA, 15 bp, Homo sapiens
caggtgttgggtatg

SEQ ID NO: 1165733 - DNA, 15 bp, Homo sapiens
tcaggtgttgggtat

SEQ ID NO: 1165734 - DNA, 15 bp, Homo sapiens
atcaggtgttgggta

SEQ ID NO: 1165735 - DNA, 15 bp, Homo sapiens
gatcaggtgttgggt

SEQ ID NO: 1165736 - DNA, 15 bp, Homo sapiens
tgatcaggtgttggg

SEQ ID NO: 1165737 - DNA, 15 bp, Homo sapiens
gtgatcaggtgttgg

SEQ ID NO: 1165738 - DNA, 15 bp, Homo sapiens
tgtgatcaggtgttg

SEQ ID NO: 1165739 - DNA, 15 bp, Homo sapiens
atgtgatcaggtgtt

SEQ ID NO: 1165740 - DNA, 15 bp, Homo sapiens
gatgtgatcaggtgt

SEQ ID NO: 1165741 - DNA, 15 bp, Homo sapiens
tgatgtgatcaggtg

SEQ ID NO: 1165742 - DNA, 15 bp, Homo sapiens
gtgatgtgatcaggt

SEQ ID NO: 1165743 - DNA, 15 bp, Homo sapiens
ggtgatgtgatcagg

SEQ ID NO: 1165744 - DNA, 15 bp, Homo sapiens
gggtgatgtgatcag

SEQ ID NO: 1165745 - DNA, 15 bp, Homo sapiens
agggtgatgtgatca

SEQ ID NO: 1165746 - DNA, 15 bp, Homo sapiens
gagggtgatgtgatc

SEQ ID NO: 1165747 - DNA, 15 bp, Homo sapiens
tgagggtgatgtgat

SEQ ID NO: 1165748 - DNA, 15 bp, Homo sapiens
ttgagggtgatgtga

SEQ ID NO: 1165749 - DNA, 15 bp, Homo sapiens
tttgagggtgatgtg

SEQ ID NO: 1165750 - DNA, 15 bp, Homo sapiens
atttgagggtgatgt

SEQ ID NO: 1165751 - DNA, 15 bp, Homo sapiens
tatttgagggtgatg

SEQ ID NO: 1165752 - DNA, 15 bp, Homo sapiens
ttatttgagggtgat

SEQ ID NO: 1165753 - DNA, 15 bp, Homo sapiens
tttatttgagggtga

SEQ ID NO: 1165754 - DNA, 15 bp, Homo sapiens
atttatttgagggtg

SEQ ID NO: 1165755 - DNA, 15 bp, Homo sapiens
tatttatttgagggt

SEQ ID NO: 1165756 - DNA, 15 bp, Homo sapiens
ttatttatttgaggg

SEQ ID NO: 1165757 - DNA, 15 bp, Homo sapiens
cttatttatttgagg

SEQ ID NO: 1165758 - DNA, 15 bp, Homo sapiens
ccttatttatttgag

SEQ ID NO: 1165759 - DNA, 15 bp, Homo sapiens
accttatttatttga

SEQ ID NO: 1165760 - DNA, 15 bp, Homo sapiens
caccttatttatttg

SEQ ID NO: 1165761 - DNA, 15 bp, Homo sapiens
tcaccttatttattt

SEQ ID NO: 1165762 - DNA, 15 bp, Homo sapiens
ttcaccttatttatt

SEQ ID NO: 1165763 - DNA, 15 bp, Homo sapiens
gttcaccttatttat

SEQ ID NO: 1165764 - DNA, 15 bp, Homo sapiens
tgttcaccttattta

SEQ ID NO: 1165765 - DNA, 15 bp, Homo sapiens
gtgttcaccttattt

SEQ ID NO: 1165766 - DNA, 15 bp, Homo sapiens
ggtgttcaccttatt

SEQ ID NO: 1165767 - DNA, 15 bp, Homo sapiens
gggtgttcaccttat

SEQ ID NO: 1165768 - DNA, 15 bp, Homo sapiens
tgggtgttcacctta

SEQ ID NO: 1165769 - DNA, 15 bp, Homo sapiens
ttgggtgttcacctt

SEQ ID NO: 1165770 - DNA, 15 bp, Homo sapiens
gttgggtgttcacct

SEQ ID NO: 1165771 - DNA, 15 bp, Homo sapiens
agttgggtgttcacc

SEQ ID NO: 1165772 - DNA, 15 bp, Homo sapiens
cagttgggtgttcac

SEQ ID NO: 1165773 - DNA, 15 bp, Homo sapiens
acagttgggtgttca

SEQ ID NO: 1165774 - DNA, 15 bp, Homo sapiens
tacagttgggtgttc

SEQ ID NO: 1165775 - DNA, 15 bp, Homo sapiens
ttacagttgggtgtt

SEQ ID NO: 1165776 - DNA, 15 bp, Homo sapiens
gttacagttgggtgt

SEQ ID NO: 1165777 - DNA, 15 bp, Homo sapiens
ggttacagttgggtg

SEQ ID NO: 1165778 - DNA, 15 bp, Homo sapiens
tggttacagttgggt

SEQ ID NO: 1165779 - DNA, 15 bp, Homo sapiens
ttggttacagttggg

SEQ ID NO: 1165780 - DNA, 15 bp, Homo sapiens
attggttacagttgg

SEQ ID NO: 1165781 - DNA, 15 bp, Homo sapiens
gattggttacagttg

SEQ ID NO: 1165782 - DNA, 15 bp, Homo sapiens
tgattggttacagtt

SEQ ID NO: 1165783 - DNA, 15 bp, Homo sapiens
ctgattggttacagt

SEQ ID NO: 1165784 - DNA, 15 bp, Homo sapiens
gctgattggttacag

SEQ ID NO: 1165785 - DNA, 15 bp, Homo sapiens
agctgattggttaca

SEQ ID NO: 1165786 - DNA, 15 bp, Homo sapiens
tagctgattggttac

SEQ ID NO: 1165787 - DNA, 15 bp, Homo sapiens
atagctgattggtta

SEQ ID NO: 1165788 - DNA, 15 bp, Homo sapiens
aatagctgattggtt

SEQ ID NO: 1165789 - DNA, 15 bp, Homo sapiens
aaatagctgattggt

SEQ ID NO: 1165790 - DNA, 15 bp, Homo sapiens
gaaatagctgattgg

SEQ ID NO: 1165791 - DNA, 15 bp, Homo sapiens
agaaatagctgattg

SEQ ID NO: 1165792 - DNA, 15 bp, Homo sapiens
cagaaatagctgatt

SEQ ID NO: 1165793 - DNA, 15 bp, Homo sapiens
acagaaatagctgat

SEQ ID NO: 1165794 - DNA, 15 bp, Homo sapiens
tacagaaatagctga

SEQ ID NO: 1165795 - DNA, 15 bp, Homo sapiens
ctacagaaatagctg

SEQ ID NO: 1165796 - DNA, 15 bp, Homo sapiens
cctacagaaatagct

SEQ ID NO: 1165797 - DNA, 15 bp, Homo sapiens
ccctacagaaatagc

SEQ ID NO: 1165798 - DNA, 15 bp, Homo sapiens
gccctacagaaatag

SEQ ID NO: 1165799 - DNA, 15 bp, Homo sapiens
tgccctacagaaata

SEQ ID NO: 1165800 - DNA, 15 bp, Homo sapiens
gtgccctacagaaat

SEQ ID NO: 1165801 - DNA, 15 bp, Homo sapiens
agtgccctacagaaa

SEQ ID NO: 1165802 - DNA, 15 bp, Homo sapiens
aagtgccctacagaa

SEQ ID NO: 1165803 - DNA, 15 bp, Homo sapiens
gaagtgccctacaga

SEQ ID NO: 1165804 - DNA, 15 bp, Homo sapiens
ggaagtgccctacag

SEQ ID NO: 1165805 - DNA, 15 bp, Homo sapiens
aggaagtgccctaca

SEQ ID NO: 1165806 - DNA, 15 bp, Homo sapiens
aaggaagtgccctac

SEQ ID NO: 1165807 - DNA, 15 bp, Homo sapiens
aaaggaagtgcccta

SEQ ID NO: 1165808 - DNA, 15 bp, Homo sapiens
aaaaggaagtgccct

SEQ ID NO: 1165809 - DNA, 15 bp, Homo sapiens
aaaaaggaagtgccc

SEQ ID NO: 1165810 - DNA, 15 bp, Homo sapiens
gaaaaaggaagtgcc

SEQ ID NO: 1165811 - DNA, 15 bp, Homo sapiens
agaaaaaggaagtgc

SEQ ID NO: 1165812 - DNA, 15 bp, Homo sapiens
cagaaaaaggaagtg

SEQ ID NO: 1165813 - DNA, 15 bp, Homo sapiens
acagaaaaaggaagt

SEQ ID NO: 1165814 - DNA, 15 bp, Homo sapiens
gacagaaaaaggaag

SEQ ID NO: 1165815 - DNA, 15 bp, Homo sapiens
agacagaaaaaggaa

SEQ ID NO: 1165816 - DNA, 15 bp, Homo sapiens
tagacagaaaaagga

SEQ ID NO: 1165817 - DNA, 15 bp, Homo sapiens
atagacagaaaaagg

SEQ ID NO: 1165818 - DNA, 15 bp, Homo sapiens
tatagacagaaaaag

SEQ ID NO: 1165819 - DNA, 15 bp, Homo sapiens
ttatagacagaaaaa

SEQ ID NO: 1165820 - DNA, 15 bp, Homo sapiens
tttatagacagaaaa

SEQ ID NO: 1165821 - DNA, 15 bp, Homo sapiens
atttatagacagaaa

SEQ ID NO: 1165822 - DNA, 15 bp, Homo sapiens
tatttatagacagaa

SEQ ID NO: 1165823 - DNA, 15 bp, Homo sapiens
gtatttatagacaga

SEQ ID NO: 1165824 - DNA, 15 bp, Homo sapiens
agtatttatagacag

SEQ ID NO: 1165825 - DNA, 15 bp, Homo sapiens
cagtatttatagaca

SEQ ID NO: 1165826 - DNA, 15 bp, Homo sapiens
gcagtatttatagac

SEQ ID NO: 1165827 - DNA, 15 bp, Homo sapiens
ggcagtatttataga

SEQ ID NO: 1165828 - DNA, 15 bp, Homo sapiens
aggcagtatttatag

SEQ ID NO: 1165829 - DNA, 15 bp, Homo sapiens
caggcagtatttata

SEQ ID NO: 1165830 - DNA, 15 bp, Homo sapiens
tcaggcagtatttat

SEQ ID NO: 1165831 - DNA, 15 bp, Homo sapiens
gtcaggcagtattta

SEQ ID NO: 1165832 - DNA, 15 bp, Homo sapiens
ggtcaggcagtattt

SEQ ID NO: 1165833 - DNA, 15 bp, Homo sapiens
tggtcaggcagtatt

SEQ ID NO: 1165834 - DNA, 15 bp, Homo sapiens
ttggtcaggcagtat

SEQ ID NO: 1165835 - DNA, 15 bp, Homo sapiens
tttggtcaggcagta

SEQ ID NO: 1165836 - DNA, 15 bp, Homo sapiens
atttggtcaggcagt

SEQ ID NO: 1165837 - DNA, 15 bp, Homo sapiens
aatttggtcaggcag

SEQ ID NO: 1165838 - DNA, 15 bp, Homo sapiens
caatttggtcaggca

SEQ ID NO: 1165839 - DNA, 15 bp, Homo sapiens
gcaatttggtcaggc

SEQ ID NO: 1165840 - DNA, 15 bp, Homo sapiens
agcaatttggtcagg

SEQ ID NO: 1165841 - DNA, 15 bp, Homo sapiens
aagcaatttggtcag

SEQ ID NO: 1165842 - DNA, 15 bp, Homo sapiens
caagcaatttggtca

SEQ ID NO: 1165843 - DNA, 15 bp, Homo sapiens
ccaagcaatttggtc

SEQ ID NO: 1165844 - DNA, 15 bp, Homo sapiens
cccaagcaatttggt

SEQ ID NO: 1165845 - DNA, 15 bp, Homo sapiens
ccccaagcaatttgg

SEQ ID NO: 1165846 - DNA, 15 bp, Homo sapiens
cccccaagcaatttg

SEQ ID NO: 1165847 - DNA, 15 bp, Homo sapiens
tcccccaagcaattt

SEQ ID NO: 1165848 - DNA, 15 bp, Homo sapiens
ctcccccaagcaatt

SEQ ID NO: 1165849 - DNA, 15 bp, Homo sapiens
gctcccccaagcaat

SEQ ID NO: 1165850 - DNA, 15 bp, Homo sapiens
aggctcccccaagca

SEQ ID NO: 1165851 - DNA, 15 bp, Homo sapiens
gaggctcccccaagc

SEQ ID NO: 1165852 - DNA, 15 bp, Homo sapiens
agaggctcccccaag

SEQ ID NO: 1165853 - DNA, 15 bp, Homo sapiens
cagaggctcccccaa

SEQ ID NO: 1165854 - DNA, 15 bp, Homo sapiens
tcagaggctccccca

SEQ ID NO: 1165855 - DNA, 15 bp, Homo sapiens
ttcagaggctccccc

SEQ ID NO: 1165856 - DNA, 15 bp, Homo sapiens
gttcagaggctcccc

SEQ ID NO: 1165857 - DNA, 15 bp, Homo sapiens
agttcagaggctccc

SEQ ID NO: 1165858 - DNA, 15 bp, Homo sapiens
cagttcagaggctcc

SEQ ID NO: 1165859 - DNA, 15 bp, Homo sapiens
ccagttcagaggctc

SEQ ID NO: 1165860 - DNA, 15 bp, Homo sapiens
accagttcagaggct

SEQ ID NO: 1165861 - DNA, 15 bp, Homo sapiens
gaccagttcagaggc

SEQ ID NO: 1165862 - DNA, 15 bp, Homo sapiens
ggaccagttcagagg

SEQ ID NO: 1165863 - DNA, 15 bp, Homo sapiens
aggaccagttcagag

SEQ ID NO: 1165864 - DNA, 15 bp, Homo sapiens
caggaccagttcaga

SEQ ID NO: 1165865 - DNA, 15 bp, Homo sapiens
acaggaccagttcag

SEQ ID NO: 1165866 - DNA, 15 bp, Homo sapiens
aacaggaccagttca

SEQ ID NO: 1165867 - DNA, 15 bp, Homo sapiens
aaacaggaccagttc

SEQ ID NO: 1165868 - DNA, 15 bp, Homo sapiens
aaaacaggaccagtt

SEQ ID NO: 1165869 - DNA, 15 bp, Homo sapiens
aaaaacaggaccagt

SEQ ID NO: 1165870 - DNA, 15 bp, Homo sapiens
caaaaacaggaccag

SEQ ID NO: 1165871 - DNA, 15 bp, Homo sapiens
tcaaaaacaggacca

SEQ ID NO: 1165872 - DNA, 15 bp, Homo sapiens
ctcaaaaacaggacc

SEQ ID NO: 1165873 - DNA, 15 bp, Homo sapiens
actcaaaaacaggac

SEQ ID NO: 1165874 - DNA, 15 bp, Homo sapiens
cactcaaaaacagga

SEQ ID NO: 1165875 - DNA, 15 bp, Homo sapiens
gcactcaaaaacagg

SEQ ID NO: 1165876 - DNA, 15 bp, Homo sapiens
agcactcaaaaacag

SEQ ID NO: 1165877 - DNA, 15 bp, Homo sapiens
cagcactcaaaaaca

SEQ ID NO: 1165878 - DNA, 15 bp, Homo sapiens
gcagcactcaaaaac

SEQ ID NO: 1165879 - DNA, 15 bp, Homo sapiens
ggcagcactcaaaaa

SEQ ID NO: 1165880 - DNA, 15 bp, Homo sapiens
tggcagcactcaaaa

SEQ ID NO: 1165881 - DNA, 15 bp, Homo sapiens
ctggcagcactcaaa

SEQ ID NO: 1165882 - DNA, 15 bp, Homo sapiens
atctggcagcactca

SEQ ID NO: 1165883 - DNA, 15 bp, Homo sapiens
aatctggcagcactc

SEQ ID NO: 1165884 - DNA, 15 bp, Homo sapiens
gaatctggcagcact

SEQ ID NO: 1165885 - DNA, 15 bp, Homo sapiens
tgaatctggcagcac

SEQ ID NO: 1165886 - DNA, 15 bp, Homo sapiens
atgaatctggcagca

SEQ ID NO: 1165887 - DNA, 15 bp, Homo sapiens
aatgaatctggcagc

SEQ ID NO: 1165888 - DNA, 15 bp, Homo sapiens
taatgaatctggcag

SEQ ID NO: 1165889 - DNA, 15 bp, Homo sapiens
ttaatgaatctggca

SEQ ID NO: 1165890 - DNA, 15 bp, Homo sapiens
attaatgaatctggc

SEQ ID NO: 1165891 - DNA, 15 bp, Homo sapiens
gattaatgaatctgg

SEQ ID NO: 1165892 - DNA, 15 bp, Homo sapiens
tgattaatgaatctg

SEQ ID NO: 1165893 - DNA, 15 bp, Homo sapiens
gtgattaatgaatct

SEQ ID NO: 1165894 - DNA, 15 bp, Homo sapiens
agtgattaatgaatc

SEQ ID NO: 1165895 - DNA, 15 bp, Homo sapiens
tagtgattaatgaat

SEQ ID NO: 1165896 - DNA, 15 bp, Homo sapiens
atagtgattaatgaa

SEQ ID NO: 1165897 - DNA, 15 bp, Homo sapiens
aatagtgattaatga

SEQ ID NO: 1165898 - DNA, 15 bp, Homo sapiens
aaatagtgattaatg

SEQ ID NO: 1165899 - DNA, 15 bp, Homo sapiens
caaatagtgattaat

SEQ ID NO: 1165900 - DNA, 15 bp, Homo sapiens
gcaaatagtgattaa

SEQ ID NO: 1165901 - DNA, 15 bp, Homo sapiens
agcaaatagtgatta

SEQ ID NO: 1165902 - DNA, 15 bp, Homo sapiens
gagcaaatagtgatt

SEQ ID NO: 1165903 - DNA, 15 bp, Homo sapiens
tgagcaaatagtgat

SEQ ID NO: 1165904 - DNA, 15 bp, Homo sapiens
ctgagcaaatagtga

SEQ ID NO: 1165905 - DNA, 15 bp, Homo sapiens
tctgagcaaatagtg

SEQ ID NO: 1165906 - DNA, 15 bp, Homo sapiens
gtctgagcaaatagt

SEQ ID NO: 1165907 - DNA, 15 bp, Homo sapiens
tgtctgagcaaatag

SEQ ID NO: 1165908 - DNA, 15 bp, Homo sapiens
ttgtctgagcaaata

SEQ ID NO: 1165909 - DNA, 15 bp, Homo sapiens
gttgtctgagcaaat

SEQ ID NO: 1165910 - DNA, 15 bp, Homo sapiens
agttgtctgagcaaa

SEQ ID NO: 1165911 - DNA, 15 bp, Homo sapiens
gagttgtctgagcaa

SEQ ID NO: 1165912 - DNA, 15 bp, Homo sapiens
agagttgtctgagca

SEQ ID NO: 1165913 - DNA, 15 bp, Homo sapiens
tagagttgtctgagc

SEQ ID NO: 1165914 - DNA, 15 bp, Homo sapiens
gtagagttgtctgag

SEQ ID NO: 1165915 - DNA, 15 bp, Homo sapiens
agtagagttgtctga

SEQ ID NO: 1165916 - DNA, 15 bp, Homo sapiens
tagtagagttgtctg

SEQ ID NO: 1165917 - DNA, 15 bp, Homo sapiens
atagtagagttgtct

SEQ ID NO: 1165918 - DNA, 15 bp, Homo sapiens
aatagtagagttgtc

SEQ ID NO: 1165919 - DNA, 15 bp, Homo sapiens
aaatagtagagttgt

SEQ ID NO: 1165920 - DNA, 15 bp, Homo sapiens
taaatagtagagttg

SEQ ID NO: 1165921 - DNA, 15 bp, Homo sapiens
ataaatagtagagtt

SEQ ID NO: 1165922 - DNA, 15 bp, Homo sapiens
aataaatagtagagt

SEQ ID NO: 1165923 - DNA, 15 bp, Homo sapiens
aaataaatagtagag

SEQ ID NO: 1165924 - DNA, 15 bp, Homo sapiens
caaataaatagtaga

SEQ ID NO: 1165925 - DNA, 15 bp, Homo sapiens
acaaataaatagtag

SEQ ID NO: 1165926 - DNA, 15 bp, Homo sapiens
gacaaataaatagta

SEQ ID NO: 1165927 - DNA, 15 bp, Homo sapiens
agacaaataaatagt

SEQ ID NO: 1165928 - DNA, 15 bp, Homo sapiens
tagacaaataaatag

SEQ ID NO: 1165929 - DNA, 15 bp, Homo sapiens
ttagacaaataaata

SEQ ID NO: 1165930 - DNA, 15 bp, Homo sapiens
tttagacaaataaat

SEQ ID NO: 1165931 - DNA, 15 bp, Homo sapiens
ctttagacaaataaa

SEQ ID NO: 1165932 - DNA, 15 bp, Homo sapiens
actttagacaaataa

SEQ ID NO: 1165933 - DNA, 15 bp, Homo sapiens
aactttagacaaata

SEQ ID NO: 1165934 - DNA, 15 bp, Homo sapiens
caactttagacaaat

SEQ ID NO: 1165935 - DNA, 15 bp, Homo sapiens
acaactttagacaaa

SEQ ID NO: 1165936 - DNA, 15 bp, Homo sapiens
aacaactttagacaa

SEQ ID NO: 1165937 - DNA, 15 bp, Homo sapiens
aaacaactttagaca

SEQ ID NO: 1165938 - DNA, 15 bp, Homo sapiens
caaacaactttagac

SEQ ID NO: 1165939 - DNA, 15 bp, Homo sapiens
acaaacaactttaga

SEQ ID NO: 1165940 - DNA, 15 bp, Homo sapiens
aacaaacaactttag

SEQ ID NO: 1165941 - DNA, 15 bp, Homo sapiens
caacaaacaacttta

SEQ ID NO: 1165942 - DNA, 15 bp, Homo sapiens
acaacaaacaacttt

SEQ ID NO: 1165943 - DNA, 15 bp, Homo sapiens
aacaacaaacaactt

SEQ ID NO: 1165944 - DNA, 15 bp, Homo sapiens
caacaacaaacaact

SEQ ID NO: 1165945 - DNA, 15 bp, Homo sapiens
aaacaacaacaaaca

SEQ ID NO: 1165946 - DNA, 15 bp, Homo sapiens
aaaacaacaacaaac

SEQ ID NO: 1165947 - DNA, 15 bp, Homo sapiens
caaaacaacaacaaa

SEQ ID NO: 1165948 - DNA, 15 bp, Homo sapiens
caaaaaacaaaacaa

SEQ ID NO: 1165949 - DNA, 15 bp, Homo sapiens
acaaaaaacaaaaca

SEQ ID NO: 1165950 - DNA, 15 bp, Homo sapiens
aacaaaaaacaaaac

SEQ ID NO: 1165951 - DNA, 15 bp, Homo sapiens
caaaaacaaaaaaca

SEQ ID NO: 1165952 - DNA, 15 bp, Homo sapiens
acaaaaacaaaaaac

SEQ ID NO: 1165953 - DNA, 15 bp, Homo sapiens
taaaaaaaacaaaaa

SEQ ID NO: 1165954 - DNA, 15 bp, Homo sapiens
gtaaaaaaaacaaaa

SEQ ID NO: 1165955 - DNA, 15 bp, Homo sapiens
tgtaaaaaaaacaaa

SEQ ID NO: 1165956 - DNA, 15 bp, Homo sapiens
gtgtaaaaaaaacaa

SEQ ID NO: 1165957 - DNA, 15 bp, Homo sapiens
tgtgtaaaaaaaaca

SEQ ID NO: 1165958 - DNA, 15 bp, Homo sapiens
ctgtgtaaaaaaaac

SEQ ID NO: 1165959 - DNA, 15 bp, Homo sapiens
cctgtgtaaaaaaaa

SEQ ID NO: 1165960 - DNA, 15 bp, Homo sapiens
gcctgtgtaaaaaaa

SEQ ID NO: 1165961 - DNA, 15 bp, Homo sapiens
tgcctgtgtaaaaaa

SEQ ID NO: 1165962 - DNA, 15 bp, Homo sapiens
ttgcctgtgtaaaaa

SEQ ID NO: 1165963 - DNA, 15 bp, Homo sapiens
cttgcctgtgtaaaa

SEQ ID NO: 1165964 - DNA, 15 bp, Homo sapiens
acttgcctgtgtaaa

SEQ ID NO: 1165965 - DNA, 15 bp, Homo sapiens
tacttgcctgtgtaa

SEQ ID NO: 1165966 - DNA, 15 bp, Homo sapiens
ttacttgcctgtgta

SEQ ID NO: 1165967 - DNA, 15 bp, Homo sapiens
tttacttgcctgtgt

SEQ ID NO: 1165968 - DNA, 15 bp, Homo sapiens
gtttacttgcctgtg

SEQ ID NO: 1165969 - DNA, 15 bp, Homo sapiens
ggtttacttgcctgt

SEQ ID NO: 1165970 - DNA, 15 bp, Homo sapiens
aggtttacttgcctg

SEQ ID NO: 1165971 - DNA, 15 bp, Homo sapiens
caggtttacttgcct

SEQ ID NO: 1165972 - DNA, 15 bp, Homo sapiens
tcaggtttacttgcc

SEQ ID NO: 1165973 - DNA, 15 bp, Homo sapiens
ttcaggtttacttgc

SEQ ID NO: 1165974 - DNA, 15 bp, Homo sapiens
cttcaggtttacttg

SEQ ID NO: 1165975 - DNA, 15 bp, Homo sapiens
gcttcaggtttactt

SEQ ID NO: 1165976 - DNA, 15 bp, Homo sapiens
ggcttcaggtttact

SEQ ID NO: 1165977 - DNA, 15 bp, Homo sapiens
tggcttcaggtttac

SEQ ID NO: 1165978 - DNA, 15 bp, Homo sapiens
ttggcttcaggttta

SEQ ID NO: 1165979 - DNA, 15 bp, Homo sapiens
tttggcttcaggttt

SEQ ID NO: 1165980 - DNA, 15 bp, Homo sapiens
gtttggcttcaggtt

SEQ ID NO: 1165981 - DNA, 15 bp, Homo sapiens
tgtttggcttcaggt

SEQ ID NO: 1165982 - DNA, 15 bp, Homo sapiens
ttgtttggcttcagg

SEQ ID NO: 1165983 - DNA, 15 bp, Homo sapiens
gttgtttggcttcag

SEQ ID NO: 1165984 - DNA, 15 bp, Homo sapiens
tgttgtttggcttca

SEQ ID NO: 1165985 - DNA, 15 bp, Homo sapiens
gtgttgtttggcttc

SEQ ID NO: 1165986 - DNA, 15 bp, Homo sapiens
agtgttgtttggctt

SEQ ID NO: 1165987 - DNA, 15 bp, Homo sapiens
cagtgttgtttggct

SEQ ID NO: 1165988 - DNA, 15 bp, Homo sapiens
tcagtgttgtttggc

SEQ ID NO: 1165989 - DNA, 15 bp, Homo sapiens
ttcagtgttgtttgg

SEQ ID NO: 1165990 - DNA, 15 bp, Homo sapiens
attcagtgttgtttg

SEQ ID NO: 1165991 - DNA, 15 bp, Homo sapiens
gattcagtgttgttt

SEQ ID NO: 1165992 - DNA, 15 bp, Homo sapiens
agattcagtgttgtt

SEQ ID NO: 1165993 - DNA, 15 bp, Homo sapiens
tagattcagtgttgt

SEQ ID NO: 1165994 - DNA, 15 bp, Homo sapiens
atagattcagtgttg

SEQ ID NO: 1165995 - DNA, 15 bp, Homo sapiens
tatagattcagtgtt

SEQ ID NO: 1165996 - DNA, 15 bp, Homo sapiens
ttatagattcagtgt

SEQ ID NO: 1165997 - DNA, 15 bp, Homo sapiens
tttatagattcagtg

SEQ ID NO: 1165998 - DNA, 15 bp, Homo sapiens
gtttatagattcagt

SEQ ID NO: 1165999 - DNA, 15 bp, Homo sapiens
tgtttatagattcag

SEQ ID NO: 1166000 - DNA, 15 bp, Homo sapiens
ttgtttatagattca

SEQ ID NO: 1166001 - DNA, 15 bp, Homo sapiens
gttgtttatagattc

SEQ ID NO: 1166002 - DNA, 15 bp, Homo sapiens
ggttgtttatagatt

SEQ ID NO: 1166003 - DNA, 15 bp, Homo sapiens
tggttgtttatagat

SEQ ID NO: 1166004 - DNA, 15 bp, Homo sapiens
ctggttgtttataga

SEQ ID NO: 1166005 - DNA, 15 bp, Homo sapiens
cctggttgtttatag

SEQ ID NO: 1166006 - DNA, 15 bp, Homo sapiens
tcctggttgtttata

SEQ ID NO: 1166007 - DNA, 15 bp, Homo sapiens
ctcctggttgtttat

SEQ ID NO: 1166008 - DNA, 15 bp, Homo sapiens
tctcctggttgttta

SEQ ID NO: 1166009 - DNA, 15 bp, Homo sapiens
atctcctggttgttt

SEQ ID NO: 1166010 - DNA, 15 bp, Homo sapiens
catctcctggttgtt

SEQ ID NO: 1166011 - DNA, 15 bp, Homo sapiens
gcatctcctggttgt

SEQ ID NO: 1166012 - DNA, 15 bp, Homo sapiens
agcatctcctggttg

SEQ ID NO: 1166013 - DNA, 15 bp, Homo sapiens
gagcatctcctggtt

SEQ ID NO: 1166014 - DNA, 15 bp, Homo sapiens
cgagcatctcctggt

SEQ ID NO: 1166015 - DNA, 15 bp, Homo sapiens
ccgagcatctcctgg

SEQ ID NO: 1166016 - DNA, 15 bp, Homo sapiens
accgagcatctcctg

SEQ ID NO: 1166017 - DNA, 15 bp, Homo sapiens
caccgagcatctcct

SEQ ID NO: 1166018 - DNA, 15 bp, Homo sapiens
gcaccgagcatctcc

SEQ ID NO: 1166019 - DNA, 15 bp, Homo sapiens
tgcaccgagcatctc

SEQ ID NO: 1166020 - DNA, 15 bp, Homo sapiens
ctgcaccgagcatct

SEQ ID NO: 1166021 - DNA, 15 bp, Homo sapiens
actgcaccgagcatc

SEQ ID NO: 1166022 - DNA, 15 bp, Homo sapiens
cactgcaccgagcat

SEQ ID NO: 1166023 - DNA, 15 bp, Homo sapiens
tcactgcaccgagca

SEQ ID NO: 1166024 - DNA, 15 bp, Homo sapiens
gtcactgcaccgagc

SEQ ID NO: 1166025 - DNA, 15 bp, Homo sapiens
agtcactgcaccgag

SEQ ID NO: 1166026 - DNA, 15 bp, Homo sapiens
gagtcactgcaccga

SEQ ID NO: 1166027 - DNA, 15 bp, Homo sapiens
tgagtcactgcaccg

SEQ ID NO: 1166028 - DNA, 15 bp, Homo sapiens
atgagtcactgcacc

SEQ ID NO: 1166029 - DNA, 15 bp, Homo sapiens
catgagtcactgcac

SEQ ID NO: 1166030 - DNA, 15 bp, Homo sapiens
gcatgagtcactgca

SEQ ID NO: 1166031 - DNA, 15 bp, Homo sapiens
ggcatgagtcactgc

SEQ ID NO: 1166032 - DNA, 15 bp, Homo sapiens
aggcatgagtcactg

SEQ ID NO: 1166033 - DNA, 15 bp, Homo sapiens
caggcatgagtcact

SEQ ID NO: 1166034 - DNA, 15 bp, Homo sapiens
tggcctctcaaagtg

SEQ ID NO: 1166035 - DNA, 15 bp, Homo sapiens
ttggcctctcaaagt

SEQ ID NO: 1166036 - DNA, 15 bp, Homo sapiens
cttggcctctcaaag

SEQ ID NO: 1166037 - DNA, 15 bp, Homo sapiens
ccttggcctctcaaa

SEQ ID NO: 1166038 - DNA, 15 bp, Homo sapiens
gccttggcctctcaa

SEQ ID NO: 1166039 - DNA, 15 bp, Homo sapiens
tgccttggcctctca

SEQ ID NO: 1166040 - DNA, 15 bp, Homo sapiens
ttgccttggcctctc

SEQ ID NO: 1166041 - DNA, 15 bp, Homo sapiens
cttgccttggcctct

SEQ ID NO: 1166042 - DNA, 15 bp, Homo sapiens
gcctcaggtgatctg

SEQ ID NO: 1166043 - DNA, 15 bp, Homo sapiens
ggcctcaggtgatct

SEQ ID NO: 1166044 - DNA, 15 bp, Homo sapiens
tggcctcaggtgatc

SEQ ID NO: 1166045 - DNA, 15 bp, Homo sapiens
ctggcctcaggtgat

SEQ ID NO: 1166046 - DNA, 15 bp, Homo sapiens
cctggcctcaggtga

SEQ ID NO: 1166047 - DNA, 15 bp, Homo sapiens
tcctggcctcaggtg

SEQ ID NO: 1166048 - DNA, 15 bp, Homo sapiens
ctcctggcctcaggt

SEQ ID NO: 1166049 - DNA, 15 bp, Homo sapiens
actcctggcctcagg

SEQ ID NO: 1166050 - DNA, 15 bp, Homo sapiens
aactcctggcctcag

SEQ ID NO: 1166051 - DNA, 15 bp, Homo sapiens
caactcctggcctca

SEQ ID NO: 1166052 - DNA, 15 bp, Homo sapiens
ccaactcctggcctc

SEQ ID NO: 1166053 - DNA, 15 bp, Homo sapiens
tccaactcctggcct

SEQ ID NO: 1166054 - DNA, 15 bp, Homo sapiens
ctccaactcctggcc

SEQ ID NO: 1166055 - DNA, 15 bp, Homo sapiens
tctccaactcctggc

SEQ ID NO: 1166056 - DNA, 15 bp, Homo sapiens
atctccaactcctgg

SEQ ID NO: 1166057 - DNA, 15 bp, Homo sapiens
gatctccaactcctg

SEQ ID NO: 1166058 - DNA, 15 bp, Homo sapiens
tgatctccaactcct

SEQ ID NO: 1166059 - DNA, 15 bp, Homo sapiens
ctgatctccaactcc

SEQ ID NO: 1166060 - DNA, 15 bp, Homo sapiens
gctgatctccaactc

SEQ ID NO: 1166061 - DNA, 15 bp, Homo sapiens
ggctgatctccaact

SEQ ID NO: 1166062 - DNA, 15 bp, Homo sapiens
aggctgatctccaac

SEQ ID NO: 1166063 - DNA, 15 bp, Homo sapiens
caggctgatctccaa

SEQ ID NO: 1166064 - DNA, 15 bp, Homo sapiens
ccaggctgatctcca

SEQ ID NO: 1166065 - DNA, 15 bp, Homo sapiens
gccaggctgatctcc

SEQ ID NO: 1166066 - DNA, 15 bp, Homo sapiens
ggccaggctgatctc

SEQ ID NO: 1166067 - DNA, 15 bp, Homo sapiens
tggccaggctgatct

SEQ ID NO: 1166068 - DNA, 15 bp, Homo sapiens
gtggccaggctgatc

SEQ ID NO: 1166069 - DNA, 15 bp, Homo sapiens
ggtggccaggctgat

SEQ ID NO: 1166070 - DNA, 15 bp, Homo sapiens
tggtggccaggctga

SEQ ID NO: 1166071 - DNA, 15 bp, Homo sapiens
atggtggccaggctg

SEQ ID NO: 1166072 - DNA, 15 bp, Homo sapiens
catggtggccaggct

SEQ ID NO: 1166073 - DNA, 15 bp, Homo sapiens
ccatggtggccaggc

SEQ ID NO: 1166074 - DNA, 15 bp, Homo sapiens
gccatggtggccagg

SEQ ID NO: 1166075 - DNA, 15 bp, Homo sapiens
tgccatggtggccag

SEQ ID NO: 1166076 - DNA, 15 bp, Homo sapiens
ttgccatggtggcca

SEQ ID NO: 1166077 - DNA, 15 bp, Homo sapiens
tttgccatggtggcc

SEQ ID NO: 1166078 - DNA, 15 bp, Homo sapiens
ttttgccatggtggc

SEQ ID NO: 1166079 - DNA, 15 bp, Homo sapiens
gttttgccatggtgg

SEQ ID NO: 1166080 - DNA, 15 bp, Homo sapiens
ggttttgccatggtg

SEQ ID NO: 1166081 - DNA, 15 bp, Homo sapiens
tggttttgccatggt

SEQ ID NO: 1166082 - DNA, 15 bp, Homo sapiens
atggttttgccatgg

SEQ ID NO: 1166083 - DNA, 15 bp, Homo sapiens
tatggttttgccatg

SEQ ID NO: 1166084 - DNA, 15 bp, Homo sapiens
atatggttttgccat

SEQ ID NO: 1166085 - DNA, 15 bp, Homo sapiens
gatatggttttgcca

SEQ ID NO: 1166086 - DNA, 15 bp, Homo sapiens
agatatggttttgcc

SEQ ID NO: 1166087 - DNA, 15 bp, Homo sapiens
gagatatggttttgc

SEQ ID NO: 1166088 - DNA, 15 bp, Homo sapiens
agagatatggttttg

SEQ ID NO: 1166089 - DNA, 15 bp, Homo sapiens
tagagatatggtttt

SEQ ID NO: 1166090 - DNA, 15 bp, Homo sapiens
gtagagatatggttt

SEQ ID NO: 1166091 - DNA, 15 bp, Homo sapiens
tgtagagatatggtt

SEQ ID NO: 1166092 - DNA, 15 bp, Homo sapiens
gtattttttgtagag

SEQ ID NO: 1166093 - DNA, 15 bp, Homo sapiens
tgtattttttgtaga

SEQ ID NO: 1166094 - DNA, 15 bp, Homo sapiens
ttgtattttttgtag

SEQ ID NO: 1166095 - DNA, 15 bp, Homo sapiens
atttttttttgtatt

SEQ ID NO: 1166096 - DNA, 15 bp, Homo sapiens
catttttttttgtat

SEQ ID NO: 1166097 - DNA, 15 bp, Homo sapiens
tcatttttttttgta

SEQ ID NO: 1166098 - DNA, 15 bp, Homo sapiens
ctcatttttttttgt

SEQ ID NO: 1166099 - DNA, 15 bp, Homo sapiens
gctcatttttttttg

SEQ ID NO: 1166100 - DNA, 15 bp, Homo sapiens
ggctcattttttttt

SEQ ID NO: 1166101 - DNA, 15 bp, Homo sapiens
tggctcatttttttt

SEQ ID NO: 1166102 - DNA, 15 bp, Homo sapiens
ctggctcattttttt

SEQ ID NO: 1166103 - DNA, 15 bp, Homo sapiens
cctggctcatttttt

SEQ ID NO: 1166104 - DNA, 15 bp, Homo sapiens
gcctggctcattttt

SEQ ID NO: 1166105 - DNA, 15 bp, Homo sapiens
tgcctggctcatttt

SEQ ID NO: 1166106 - DNA, 15 bp, Homo sapiens
atgcctggctcattt

SEQ ID NO: 1166107 - DNA, 15 bp, Homo sapiens
tatgcctggctcatt

SEQ ID NO: 1166108 - DNA, 15 bp, Homo sapiens
ctatgcctggctcat

SEQ ID NO: 1166109 - DNA, 15 bp, Homo sapiens
actatgcctggctca

SEQ ID NO: 1166110 - DNA, 15 bp, Homo sapiens
cactatgcctggctc

SEQ ID NO: 1166111 - DNA, 15 bp, Homo sapiens
ccactatgcctggct

SEQ ID NO: 1166112 - DNA, 15 bp, Homo sapiens
gccactatgcctggc

SEQ ID NO: 1166113 - DNA, 15 bp, Homo sapiens
tgccactatgcctgg

SEQ ID NO: 1166114 - DNA, 15 bp, Homo sapiens
gtgccactatgcctg

SEQ ID NO: 1166115 - DNA, 15 bp, Homo sapiens
ggtgccactatgcct

SEQ ID NO: 1166116 - DNA, 15 bp, Homo sapiens
gggtgccactatgcc

SEQ ID NO: 1166117 - DNA, 15 bp, Homo sapiens
tgggtgccactatgc

SEQ ID NO: 1166118 - DNA, 15 bp, Homo sapiens
gtgggtgccactatg

SEQ ID NO: 1166119 - DNA, 15 bp, Homo sapiens
ggtgggtgccactat

SEQ ID NO: 1166120 - DNA, 15 bp, Homo sapiens
aggtgggtgccacta

SEQ ID NO: 1166121 - DNA, 15 bp, Homo sapiens
caggtgggtgccact

SEQ ID NO: 1166122 - DNA, 15 bp, Homo sapiens
acaggtgggtgccac

SEQ ID NO: 1166123 - DNA, 15 bp, Homo sapiens
tacaggtgggtgcca

SEQ ID NO: 1166124 - DNA, 15 bp, Homo sapiens
ttacaggtgggtgcc

SEQ ID NO: 1166125 - DNA, 15 bp, Homo sapiens
attacaggtgggtgc

SEQ ID NO: 1166126 - DNA, 15 bp, Homo sapiens
gattacaggtgggtg

SEQ ID NO: 1166127 - DNA, 15 bp, Homo sapiens
ggattacaggtgggt

SEQ ID NO: 1166128 - DNA, 15 bp, Homo sapiens
gggattacaggtggg

SEQ ID NO: 1166129 - DNA, 15 bp, Homo sapiens
tgggattacaggtgg

SEQ ID NO: 1166130 - DNA, 15 bp, Homo sapiens
gtctcagcctcccaa

SEQ ID NO: 1166131 - DNA, 15 bp, Homo sapiens
tgtctcagcctccca

SEQ ID NO: 1166132 - DNA, 15 bp, Homo sapiens
atgtctcagcctccc

SEQ ID NO: 1166133 - DNA, 15 bp, Homo sapiens
catgtctcagcctcc

SEQ ID NO: 1166134 - DNA, 15 bp, Homo sapiens
tcatgtctcagcctc

SEQ ID NO: 1166135 - DNA, 15 bp, Homo sapiens
ctcatgtctcagcct

SEQ ID NO: 1166136 - DNA, 15 bp, Homo sapiens
tctcatgtctcagcc

SEQ ID NO: 1166137 - DNA, 15 bp, Homo sapiens
gtctcatgtctcagc

SEQ ID NO: 1166138 - DNA, 15 bp, Homo sapiens
agtctcatgtctcag

SEQ ID NO: 1166139 - DNA, 15 bp, Homo sapiens
gagtctcatgtctca

SEQ ID NO: 1166140 - DNA, 15 bp, Homo sapiens
cgagtctcatgtctc

SEQ ID NO: 1166141 - DNA, 15 bp, Homo sapiens
gcgagtctcatgtct

SEQ ID NO: 1166142 - DNA, 15 bp, Homo sapiens
agcgagtctcatgtc

SEQ ID NO: 1166143 - DNA, 15 bp, Homo sapiens
aagcgagtctcatgt

SEQ ID NO: 1166144 - DNA, 15 bp, Homo sapiens
caagcgagtctcatg

SEQ ID NO: 1166145 - DNA, 15 bp, Homo sapiens
tcaagcgagtctcat

SEQ ID NO: 1166146 - DNA, 15 bp, Homo sapiens
ttcaagcgagtctca

SEQ ID NO: 1166147 - DNA, 15 bp, Homo sapiens
gttcaagcgagtctc

SEQ ID NO: 1166148 - DNA, 15 bp, Homo sapiens
ggttcaagcgagtct

SEQ ID NO: 1166149 - DNA, 15 bp, Homo sapiens
gggttcaagcgagtc

SEQ ID NO: 1166150 - DNA, 15 bp, Homo sapiens
tgggttcaagcgagt

SEQ ID NO: 1166151 - DNA, 15 bp, Homo sapiens
ctgggttcaagcgag

SEQ ID NO: 1166152 - DNA, 15 bp, Homo sapiens
tcctcctgggttcaa

SEQ ID NO: 1166153 - DNA, 15 bp, Homo sapiens
ctcctcctgggttca

SEQ ID NO: 1166154 - DNA, 15 bp, Homo sapiens
gctcctcctgggttc

SEQ ID NO: 1166155 - DNA, 15 bp, Homo sapiens
cgctcctcctgggtt

SEQ ID NO: 1166156 - DNA, 15 bp, Homo sapiens
ccgctcctcctgggt

SEQ ID NO: 1166157 - DNA, 15 bp, Homo sapiens
cccgctcctcctggg

SEQ ID NO: 1166158 - DNA, 15 bp, Homo sapiens
acccgctcctcctgg

SEQ ID NO: 1166159 - DNA, 15 bp, Homo sapiens
aacccgctcctcctg

SEQ ID NO: 1166160 - DNA, 15 bp, Homo sapiens
caacccgctcctcct

SEQ ID NO: 1166161 - DNA, 15 bp, Homo sapiens
gcaacccgctcctcc

SEQ ID NO: 1166162 - DNA, 15 bp, Homo sapiens
tgcaacccgctcctc

SEQ ID NO: 1166163 - DNA, 15 bp, Homo sapiens
ctgcaacccgctcct

SEQ ID NO: 1166164 - DNA, 15 bp, Homo sapiens
actgcaacccgctcc

SEQ ID NO: 1166165 - DNA, 15 bp, Homo sapiens
cactgcaacccgctc

SEQ ID NO: 1166166 - DNA, 15 bp, Homo sapiens
tcactgcaacccgct

SEQ ID NO: 1166167 - DNA, 15 bp, Homo sapiens
ctcactgcaacccgc

SEQ ID NO: 1166168 - DNA, 15 bp, Homo sapiens
gctcactgcaacccg

SEQ ID NO: 1166169 - DNA, 15 bp, Homo sapiens
ggattgcagtggtgt

SEQ ID NO: 1166170 - DNA, 15 bp, Homo sapiens
tggattgcagtggtg

SEQ ID NO: 1166171 - DNA, 15 bp, Homo sapiens
ctggattgcagtggt

SEQ ID NO: 1166172 - DNA, 15 bp, Homo sapiens
gctggattgcagtgg

SEQ ID NO: 1166173 - DNA, 15 bp, Homo sapiens
ggctggattgcagtg

SEQ ID NO: 1166174 - DNA, 15 bp, Homo sapiens
aggctggattgcagt

SEQ ID NO: 1166175 - DNA, 15 bp, Homo sapiens
taggctggattgcag

SEQ ID NO: 1166176 - DNA, 15 bp, Homo sapiens
ctaggctggattgca

SEQ ID NO: 1166177 - DNA, 15 bp, Homo sapiens
cctaggctggattgc

SEQ ID NO: 1166178 - DNA, 15 bp, Homo sapiens
gcctaggctggattg

SEQ ID NO: 1166179 - DNA, 15 bp, Homo sapiens
tgcctaggctggatt

SEQ ID NO: 1166180 - DNA, 15 bp, Homo sapiens
ttgcctaggctggat

SEQ ID NO: 1166181 - DNA, 15 bp, Homo sapiens
gttgcctaggctgga

SEQ ID NO: 1166182 - DNA, 15 bp, Homo sapiens
tgttgcctaggctgg

SEQ ID NO: 1166183 - DNA, 15 bp, Homo sapiens
ctgttgcctaggctg

SEQ ID NO: 1166184 - DNA, 15 bp, Homo sapiens
tctgttgcctaggct

SEQ ID NO: 1166185 - DNA, 15 bp, Homo sapiens
ctctgttgcctaggc

SEQ ID NO: 1166186 - DNA, 15 bp, Homo sapiens
tctctgttgcctagg

SEQ ID NO: 1166187 - DNA, 15 bp, Homo sapiens
ctctctgttgcctag

SEQ ID NO: 1166188 - DNA, 15 bp, Homo sapiens
tctctctgttgccta

SEQ ID NO: 1166189 - DNA, 15 bp, Homo sapiens
ctctctctgttgcct

SEQ ID NO: 1166190 - DNA, 15 bp, Homo sapiens
tctctctctgttgcc

SEQ ID NO: 1166191 - DNA, 15 bp, Homo sapiens
gtctctctctgttgc

SEQ ID NO: 1166192 - DNA, 15 bp, Homo sapiens
cagtctctctctgtt

SEQ ID NO: 1166193 - DNA, 15 bp, Homo sapiens
gcagtctctctctgt

SEQ ID NO: 1166194 - DNA, 15 bp, Homo sapiens
ggcagtctctctctg

SEQ ID NO: 1166195 - DNA, 15 bp, Homo sapiens
aggcagtctctctct

SEQ ID NO: 1166196 - DNA, 15 bp, Homo sapiens
gaggcagtctctctc

SEQ ID NO: 1166197 - DNA, 15 bp, Homo sapiens
tgaggcagtctctct

SEQ ID NO: 1166198 - DNA, 15 bp, Homo sapiens
ttgaggcagtctctc

SEQ ID NO: 1166199 - DNA, 15 bp, Homo sapiens
tttgaggcagtctct

SEQ ID NO: 1166200 - DNA, 15 bp, Homo sapiens
ttttgaggcagtctc

SEQ ID NO: 1166201 - DNA, 15 bp, Homo sapiens
tttttgaggcagtct

SEQ ID NO: 1166202 - DNA, 15 bp, Homo sapiens
ttttttgaggcagtc

SEQ ID NO: 1166203 - DNA, 15 bp, Homo sapiens
tttttttgaggcagt

SEQ ID NO: 1166204 - DNA, 15 bp, Homo sapiens
gtttttttgaggcag

SEQ ID NO: 1166205 - DNA, 15 bp, Homo sapiens
tgtttttttgaggca

SEQ ID NO: 1166206 - DNA, 15 bp, Homo sapiens
ttgtttttttgaggc

SEQ ID NO: 1166207 - DNA, 15 bp, Homo sapiens
tttgtttttttgagg

SEQ ID NO: 1166208 - DNA, 15 bp, Homo sapiens
ttttgtttttttgag

SEQ ID NO: 1166209 - DNA, 15 bp, Homo sapiens
gttttgtttttttga

SEQ ID NO: 1166210 - DNA, 15 bp, Homo sapiens
tgttttgtttttttg

SEQ ID NO: 1166211 - DNA, 15 bp, Homo sapiens
gttgttgttgttttg

SEQ ID NO: 1166212 - DNA, 15 bp, Homo sapiens
ttgttgttgttgttt

SEQ ID NO: 1166213 - DNA, 15 bp, Homo sapiens
tttttttgttgttgt

SEQ ID NO: 1166214 - DNA, 15 bp, Homo sapiens
ttttttttgttgttg

SEQ ID NO: 1166215 - DNA, 15 bp, Homo sapiens
gttttttttgttgtt

SEQ ID NO: 1166216 - DNA, 15 bp, Homo sapiens
tgttttttttgttgt

SEQ ID NO: 1166217 - DNA, 15 bp, Homo sapiens
ttgttttttttgttg

SEQ ID NO: 1166218 - DNA, 15 bp, Homo sapiens
tttgttttttttgtt

SEQ ID NO: 1166219 - DNA, 15 bp, Homo sapiens
ttttgttttttttgt

SEQ ID NO: 1166220 - DNA, 15 bp, Homo sapiens
gttttgttttttttg

SEQ ID NO: 1166221 - DNA, 15 bp, Homo sapiens
tcctgttttgttttt

SEQ ID NO: 1166222 - DNA, 15 bp, Homo sapiens
ctcctgttttgtttt

SEQ ID NO: 1166223 - DNA, 15 bp, Homo sapiens
tctcctgttttgttt

SEQ ID NO: 1166224 - DNA, 15 bp, Homo sapiens
gtctcctgttttgtt

SEQ ID NO: 1166225 - DNA, 15 bp, Homo sapiens
agtctcctgttttgt

SEQ ID NO: 1166226 - DNA, 15 bp, Homo sapiens
tagtctcctgttttg

SEQ ID NO: 1166227 - DNA, 15 bp, Homo sapiens
atagtctcctgtttt

SEQ ID NO: 1166228 - DNA, 15 bp, Homo sapiens
aatagtctcctgttt

SEQ ID NO: 1166229 - DNA, 15 bp, Homo sapiens
gaatagtctcctgtt

SEQ ID NO: 1166230 - DNA, 15 bp, Homo sapiens
tgaatagtctcctgt

SEQ ID NO: 1166231 - DNA, 15 bp, Homo sapiens
ctgaatagtctcctg

SEQ ID NO: 1166232 - DNA, 15 bp, Homo sapiens
actgaatagtctcct

SEQ ID NO: 1166233 - DNA, 15 bp, Homo sapiens
cactgaatagtctcc

SEQ ID NO: 1166234 - DNA, 15 bp, Homo sapiens
acactgaatagtctc

SEQ ID NO: 1166235 - DNA, 15 bp, Homo sapiens
tacactgaatagtct

SEQ ID NO: 1166236 - DNA, 15 bp, Homo sapiens
ttacactgaatagtc

SEQ ID NO: 1166237 - DNA, 15 bp, Homo sapiens
attacactgaatagt

SEQ ID NO: 1166238 - DNA, 15 bp, Homo sapiens
aattacactgaatag

SEQ ID NO: 1166239 - DNA, 15 bp, Homo sapiens
aaattacactgaata

SEQ ID NO: 1166240 - DNA, 15 bp, Homo sapiens
taaattacactgaat

SEQ ID NO: 1166241 - DNA, 15 bp, Homo sapiens
ataaattacactgaa

SEQ ID NO: 1166242 - DNA, 15 bp, Homo sapiens
aataaattacactga

SEQ ID NO: 1166243 - DNA, 15 bp, Homo sapiens
gaataaattacactg

SEQ ID NO: 1166244 - DNA, 15 bp, Homo sapiens
tgaataaattacact

SEQ ID NO: 1166245 - DNA, 15 bp, Homo sapiens
atgaataaattacac

SEQ ID NO: 1166246 - DNA, 15 bp, Homo sapiens
aatgaataaattaca

SEQ ID NO: 1166247 - DNA, 15 bp, Homo sapiens
gaatgaataaattac

SEQ ID NO: 1166248 - DNA, 15 bp, Homo sapiens
ggaatgaataaatta

SEQ ID NO: 1166249 - DNA, 15 bp, Homo sapiens
aggaatgaataaatt

SEQ ID NO: 1166250 - DNA, 15 bp, Homo sapiens
aaggaatgaataaat

SEQ ID NO: 1166251 - DNA, 15 bp, Homo sapiens
aaaggaatgaataaa

SEQ ID NO: 1166252 - DNA, 15 bp, Homo sapiens
gaaaggaatgaataa

SEQ ID NO: 1166253 - DNA, 15 bp, Homo sapiens
agaaaggaatgaata

SEQ ID NO: 1166254 - DNA, 15 bp, Homo sapiens
tagaaaggaatgaat

SEQ ID NO: 1166255 - DNA, 15 bp, Homo sapiens
ttagaaaggaatgaa

SEQ ID NO: 1166256 - DNA, 15 bp, Homo sapiens
cttagaaaggaatga

SEQ ID NO: 1166257 - DNA, 15 bp, Homo sapiens
tcttagaaaggaatg

SEQ ID NO: 1166258 - DNA, 15 bp, Homo sapiens
ctcttagaaaggaat

SEQ ID NO: 1166259 - DNA, 15 bp, Homo sapiens
tctcttagaaaggaa

SEQ ID NO: 1166260 - DNA, 15 bp, Homo sapiens
gtctcttagaaagga

SEQ ID NO: 1166261 - DNA, 15 bp, Homo sapiens
cgtctcttagaaagg

SEQ ID NO: 1166262 - DNA, 15 bp, Homo sapiens
ccgtctcttagaaag

SEQ ID NO: 1166263 - DNA, 15 bp, Homo sapiens
cccgtctcttagaaa

SEQ ID NO: 1166264 - DNA, 15 bp, Homo sapiens
tcccgtctcttagaa

SEQ ID NO: 1166265 - DNA, 15 bp, Homo sapiens
atcccgtctcttaga

SEQ ID NO: 1166266 - DNA, 15 bp, Homo sapiens
gatcccgtctcttag

SEQ ID NO: 1166267 - DNA, 15 bp, Homo sapiens
cgatcccgtctctta

SEQ ID NO: 1166268 - DNA, 15 bp, Homo sapiens
acgatcccgtctctt

SEQ ID NO: 1166269 - DNA, 15 bp, Homo sapiens
cacgatcccgtctct

SEQ ID NO: 1166270 - DNA, 15 bp, Homo sapiens
gcacgatcccgtctc

SEQ ID NO: 1166271 - DNA, 15 bp, Homo sapiens
agcacgatcccgtct

SEQ ID NO: 1166272 - DNA, 15 bp, Homo sapiens
gagcacgatcccgtc

SEQ ID NO: 1166273 - DNA, 15 bp, Homo sapiens
agagcacgatcccgt

SEQ ID NO: 1166274 - DNA, 15 bp, Homo sapiens
cagagcacgatcccg

SEQ ID NO: 1166275 - DNA, 15 bp, Homo sapiens
acagagcacgatccc

SEQ ID NO: 1166276 - DNA, 15 bp, Homo sapiens
aacagagcacgatcc

SEQ ID NO: 1166277 - DNA, 15 bp, Homo sapiens
caacagagcacgatc

SEQ ID NO: 1166278 - DNA, 15 bp, Homo sapiens
gcaacagagcacgat

SEQ ID NO: 1166279 - DNA, 15 bp, Homo sapiens
ggcaacagagcacga

SEQ ID NO: 1166280 - DNA, 15 bp, Homo sapiens
gggcaacagagcacg

SEQ ID NO: 1166281 - DNA, 15 bp, Homo sapiens
tgggcaacagagcac

SEQ ID NO: 1166282 - DNA, 15 bp, Homo sapiens
cgcgccactgcactc

SEQ ID NO: 1166283 - DNA, 15 bp, Homo sapiens
tcgcgccactgcact

SEQ ID NO: 1166284 - DNA, 15 bp, Homo sapiens
atcgcgccactgcac

SEQ ID NO: 1166285 - DNA, 15 bp, Homo sapiens
gatcgcgccactgca

SEQ ID NO: 1166286 - DNA, 15 bp, Homo sapiens
agatcgcgccactgc

SEQ ID NO: 1166287 - DNA, 15 bp, Homo sapiens
gagatcgcgccactg

SEQ ID NO: 1166288 - DNA, 15 bp, Homo sapiens
tcgagatcgcgccac

SEQ ID NO: 1166289 - DNA, 15 bp, Homo sapiens
gtcgagatcgcgcca

SEQ ID NO: 1166290 - DNA, 15 bp, Homo sapiens
agtcgagatcgcgcc

SEQ ID NO: 1166291 - DNA, 15 bp, Homo sapiens
gagtcgagatcgcgc

SEQ ID NO: 1166292 - DNA, 15 bp, Homo sapiens
tgagtcgagatcgcg

SEQ ID NO: 1166293 - DNA, 15 bp, Homo sapiens
gtgagtcgagatcgc

SEQ ID NO: 1166294 - DNA, 15 bp, Homo sapiens
agtgagtcgagatcg

SEQ ID NO: 1166295 - DNA, 15 bp, Homo sapiens
cagtgagtcgagatc

SEQ ID NO: 1166296 - DNA, 15 bp, Homo sapiens
gcagtgagtcgagat

SEQ ID NO: 1166297 - DNA, 15 bp, Homo sapiens
tgcagtgagtcgaga

SEQ ID NO: 1166298 - DNA, 15 bp, Homo sapiens
ttgcagtgagtcgag

SEQ ID NO: 1166299 - DNA, 15 bp, Homo sapiens
cttgcagtgagtcga

SEQ ID NO: 1166300 - DNA, 15 bp, Homo sapiens
gcttgcagtgagtcg

SEQ ID NO: 1166301 - DNA, 15 bp, Homo sapiens
agcttgcagtgagtc

SEQ ID NO: 1166302 - DNA, 15 bp, Homo sapiens
gagcttgcagtgagt

SEQ ID NO: 1166303 - DNA, 15 bp, Homo sapiens
gaggtggagcttgca

SEQ ID NO: 1166304 - DNA, 15 bp, Homo sapiens
ggaggtggagcttgc

SEQ ID NO: 1166305 - DNA, 15 bp, Homo sapiens
gggaggtggagcttg

SEQ ID NO: 1166306 - DNA, 15 bp, Homo sapiens
tgggaggtggagctt

SEQ ID NO: 1166307 - DNA, 15 bp, Homo sapiens
ctgggaggtggagct

SEQ ID NO: 1166308 - DNA, 15 bp, Homo sapiens
cctgggaggtggagc

SEQ ID NO: 1166309 - DNA, 15 bp, Homo sapiens
gtgaacctgggaggt

SEQ ID NO: 1166310 - DNA, 15 bp, Homo sapiens
gttgaggcaggagaa

SEQ ID NO: 1166311 - DNA, 15 bp, Homo sapiens
tgggaggttgaggca

SEQ ID NO: 1166312 - DNA, 15 bp, Homo sapiens
cttgggaggttgagg

SEQ ID NO: 1166313 - DNA, 15 bp, Homo sapiens
acttgggaggttgag

SEQ ID NO: 1166314 - DNA, 15 bp, Homo sapiens
tacttgggaggttga

SEQ ID NO: 1166315 - DNA, 15 bp, Homo sapiens
ctacttgggaggttg

SEQ ID NO: 1166316 - DNA, 15 bp, Homo sapiens
gctacttgggaggtt

SEQ ID NO: 1166317 - DNA, 15 bp, Homo sapiens
agctacttgggaggt

SEQ ID NO: 1166318 - DNA, 15 bp, Homo sapiens
cgtggtgggtgcctg

SEQ ID NO: 1166319 - DNA, 15 bp, Homo sapiens
tcgtggtgggtgcct

SEQ ID NO: 1166320 - DNA, 15 bp, Homo sapiens
gtcgtggtgggtgcc

SEQ ID NO: 1166321 - DNA, 15 bp, Homo sapiens
tgtcgtggtgggtgc

SEQ ID NO: 1166322 - DNA, 15 bp, Homo sapiens
gtgtcgtggtgggtg

SEQ ID NO: 1166323 - DNA, 15 bp, Homo sapiens
ggtgtcgtggtgggt

SEQ ID NO: 1166324 - DNA, 15 bp, Homo sapiens
gggtgtcgtggtggg

SEQ ID NO: 1166325 - DNA, 15 bp, Homo sapiens
tgggtgtcgtggtgg

SEQ ID NO: 1166326 - DNA, 15 bp, Homo sapiens
ctgggtgtcgtggtg

SEQ ID NO: 1166327 - DNA, 15 bp, Homo sapiens
gctgggtgtcgtggt

SEQ ID NO: 1166328 - DNA, 15 bp, Homo sapiens
agctgggtgtcgtgg

SEQ ID NO: 1166329 - DNA, 15 bp, Homo sapiens
tagctgggtgtcgtg

SEQ ID NO: 1166330 - DNA, 15 bp, Homo sapiens
ttagctgggtgtcgt

SEQ ID NO: 1166331 - DNA, 15 bp, Homo sapiens
attagctgggtgtcg

SEQ ID NO: 1166332 - DNA, 15 bp, Homo sapiens
aattagctgggtgtc

SEQ ID NO: 1166333 - DNA, 15 bp, Homo sapiens
tcacggtgaaacccc

SEQ ID NO: 1166334 - DNA, 15 bp, Homo sapiens
atcacggtgaaaccc

SEQ ID NO: 1166335 - DNA, 15 bp, Homo sapiens
tatcacggtgaaacc

SEQ ID NO: 1166336 - DNA, 15 bp, Homo sapiens
ctatcacggtgaaac

SEQ ID NO: 1166337 - DNA, 15 bp, Homo sapiens
gctatcacggtgaaa

SEQ ID NO: 1166338 - DNA, 15 bp, Homo sapiens
ggctatcacggtgaa

SEQ ID NO: 1166339 - DNA, 15 bp, Homo sapiens
tggctatcacggtga

SEQ ID NO: 1166340 - DNA, 15 bp, Homo sapiens
ctggctatcacggtg

SEQ ID NO: 1166341 - DNA, 15 bp, Homo sapiens
cctggctatcacggt

SEQ ID NO: 1166342 - DNA, 15 bp, Homo sapiens
tcctggctatcacgg

SEQ ID NO: 1166343 - DNA, 15 bp, Homo sapiens
gtcctggctatcacg

SEQ ID NO: 1166344 - DNA, 15 bp, Homo sapiens
cgtcctggctatcac

SEQ ID NO: 1166345 - DNA, 15 bp, Homo sapiens
ccgtcctggctatca

SEQ ID NO: 1166346 - DNA, 15 bp, Homo sapiens
accgtcctggctatc

SEQ ID NO: 1166347 - DNA, 15 bp, Homo sapiens
gaccgtcctggctat

SEQ ID NO: 1166348 - DNA, 15 bp, Homo sapiens
agaccgtcctggcta

SEQ ID NO: 1166349 - DNA, 15 bp, Homo sapiens
gagaccgtcctggct

SEQ ID NO: 1166350 - DNA, 15 bp, Homo sapiens
cgagaccgtcctggc

SEQ ID NO: 1166351 - DNA, 15 bp, Homo sapiens
tcgagaccgtcctgg

SEQ ID NO: 1166352 - DNA, 15 bp, Homo sapiens
atcgagaccgtcctg

SEQ ID NO: 1166353 - DNA, 15 bp, Homo sapiens
gatcgagaccgtcct

SEQ ID NO: 1166354 - DNA, 15 bp, Homo sapiens
agatcgagaccgtcc

SEQ ID NO: 1166355 - DNA, 15 bp, Homo sapiens
gagatcgagaccgtc

SEQ ID NO: 1166356 - DNA, 15 bp, Homo sapiens
ggagatcgagaccgt

SEQ ID NO: 1166357 - DNA, 15 bp, Homo sapiens
aggagatcgagaccg

SEQ ID NO: 1166358 - DNA, 15 bp, Homo sapiens
cagatcacgaggtca

SEQ ID NO: 1166359 - DNA, 15 bp, Homo sapiens
gcagatcacgaggtc

SEQ ID NO: 1166360 - DNA, 15 bp, Homo sapiens
ggcagatcacgaggt

SEQ ID NO: 1166361 - DNA, 15 bp, Homo sapiens
cgggcagatcacgag

SEQ ID NO: 1166362 - DNA, 15 bp, Homo sapiens
gcgggcagatcacga

SEQ ID NO: 1166363 - DNA, 15 bp, Homo sapiens
tagcactttgggagg

SEQ ID NO: 1166364 - DNA, 15 bp, Homo sapiens
ctagcactttgggag

SEQ ID NO: 1166365 - DNA, 15 bp, Homo sapiens
cctagcactttggga

SEQ ID NO: 1166366 - DNA, 15 bp, Homo sapiens
acctgtaatcctagc

SEQ ID NO: 1166367 - DNA, 15 bp, Homo sapiens
tacctgtaatcctag

SEQ ID NO: 1166368 - DNA, 15 bp, Homo sapiens
atacctgtaatccta

SEQ ID NO: 1166369 - DNA, 15 bp, Homo sapiens
catacctgtaatcct

SEQ ID NO: 1166370 - DNA, 15 bp, Homo sapiens
agtggctcatacctg

SEQ ID NO: 1166371 - DNA, 15 bp, Homo sapiens
cagtggctcatacct

SEQ ID NO: 1166372 - DNA, 15 bp, Homo sapiens
acagtggctcatacc

SEQ ID NO: 1166373 - DNA, 15 bp, Homo sapiens
cacagtggctcatac

SEQ ID NO: 1166374 - DNA, 15 bp, Homo sapiens
gcacagtggctcata

SEQ ID NO: 1166375 - DNA, 15 bp, Homo sapiens
tcccggccaggcaca

SEQ ID NO: 1166376 - DNA, 15 bp, Homo sapiens
atcccggccaggcac

SEQ ID NO: 1166377 - DNA, 15 bp, Homo sapiens
gatcccggccaggca

SEQ ID NO: 1166378 - DNA, 15 bp, Homo sapiens
agatcccggccaggc

SEQ ID NO: 1166379 - DNA, 15 bp, Homo sapiens
tagatcccggccagg

SEQ ID NO: 1166380 - DNA, 15 bp, Homo sapiens
gtagatcccggccag

SEQ ID NO: 1166381 - DNA, 15 bp, Homo sapiens
agtagatcccggcca

SEQ ID NO: 1166382 - DNA, 15 bp, Homo sapiens
aagtagatcccggcc

SEQ ID NO: 1166383 - DNA, 15 bp, Homo sapiens
aaagtagatcccggc

SEQ ID NO: 1166384 - DNA, 15 bp, Homo sapiens
aaaagtagatcccgg

SEQ ID NO: 1166385 - DNA, 15 bp, Homo sapiens
aaaaagtagatcccg

SEQ ID NO: 1166386 - DNA, 15 bp, Homo sapiens
aaaaaagtagatccc

SEQ ID NO: 1166387 - DNA, 15 bp, Homo sapiens
gaaaaaagtagatcc

SEQ ID NO: 1166388 - DNA, 15 bp, Homo sapiens
agaaaaaagtagatc

SEQ ID NO: 1166389 - DNA, 15 bp, Homo sapiens
aagaaaaaagtagat

SEQ ID NO: 1166390 - DNA, 15 bp, Homo sapiens
taagaaaaaagtaga

SEQ ID NO: 1166391 - DNA, 15 bp, Homo sapiens
ataagaaaaaagtag

SEQ ID NO: 1166392 - DNA, 15 bp, Homo sapiens
aataagaaaaaagta

SEQ ID NO: 1166393 - DNA, 15 bp, Homo sapiens
aaataagaaaaaagt

SEQ ID NO: 1166394 - DNA, 15 bp, Homo sapiens
taaataagaaaaaag

SEQ ID NO: 1166395 - DNA, 15 bp, Homo sapiens
ctaaataagaaaaaa

SEQ ID NO: 1166396 - DNA, 15 bp, Homo sapiens
cctaaataagaaaaa

SEQ ID NO: 1166397 - DNA, 15 bp, Homo sapiens
acctaaataagaaaa

SEQ ID NO: 1166398 - DNA, 15 bp, Homo sapiens
gacctaaataagaaa

SEQ ID NO: 1166399 - DNA, 15 bp, Homo sapiens
tgacctaaataagaa

SEQ ID NO: 1166400 - DNA, 15 bp, Homo sapiens
ctgacctaaataaga

SEQ ID NO: 1166401 - DNA, 15 bp, Homo sapiens
cctgacctaaataag

SEQ ID NO: 1166402 - DNA, 15 bp, Homo sapiens
tcctgacctaaataa

SEQ ID NO: 1166403 - DNA, 15 bp, Homo sapiens
atcctgacctaaata

SEQ ID NO: 1166404 - DNA, 15 bp, Homo sapiens
aatcctgacctaaat

SEQ ID NO: 1166405 - DNA, 15 bp, Homo sapiens
caatcctgacctaaa

SEQ ID NO: 1166406 - DNA, 15 bp, Homo sapiens
gcaatcctgacctaa

SEQ ID NO: 1166407 - DNA, 15 bp, Homo sapiens
tgcaatcctgaccta

SEQ ID NO: 1166408 - DNA, 15 bp, Homo sapiens
ctgcaatcctgacct

SEQ ID NO: 1166409 - DNA, 15 bp, Homo sapiens
cctgcaatcctgacc

SEQ ID NO: 1166410 - DNA, 15 bp, Homo sapiens
ccctgcaatcctgac

SEQ ID NO: 1166411 - DNA, 15 bp, Homo sapiens
tccctgcaatcctga

SEQ ID NO: 1166412 - DNA, 15 bp, Homo sapiens
gtccctgcaatcctg

SEQ ID NO: 1166413 - DNA, 15 bp, Homo sapiens
tgtccctgcaatcct

SEQ ID NO: 1166414 - DNA, 15 bp, Homo sapiens
ctgtccctgcaatcc

SEQ ID NO: 1166415 - DNA, 15 bp, Homo sapiens
cctgtccctgcaatc

SEQ ID NO: 1166416 - DNA, 15 bp, Homo sapiens
ccctgtccctgcaat

SEQ ID NO: 1166417 - DNA, 15 bp, Homo sapiens
tccctgtccctgcaa

SEQ ID NO: 1166418 - DNA, 15 bp, Homo sapiens
gtccctgtccctgca

SEQ ID NO: 1166419 - DNA, 15 bp, Homo sapiens
tgtccctgtccctgc

SEQ ID NO: 1166420 - DNA, 15 bp, Homo sapiens
ctgtccctgtccctg

SEQ ID NO: 1166421 - DNA, 15 bp, Homo sapiens
tctgtccctgtccct

SEQ ID NO: 1166422 - DNA, 15 bp, Homo sapiens
ctctgtccctgtccc

SEQ ID NO: 1166423 - DNA, 15 bp, Homo sapiens
actctgtccctgtcc

SEQ ID NO: 1166424 - DNA, 15 bp, Homo sapiens
cactctgtccctgtc

SEQ ID NO: 1166425 - DNA, 15 bp, Homo sapiens
tcactctgtccctgt

SEQ ID NO: 1166426 - DNA, 15 bp, Homo sapiens
ctcactctgtccctg

SEQ ID NO: 1166427 - DNA, 15 bp, Homo sapiens
ctctcactctgtccc

SEQ ID NO: 1166428 - DNA, 15 bp, Homo sapiens
cctctcactctgtcc

SEQ ID NO: 1166429 - DNA, 15 bp, Homo sapiens
ccctctcactctgtc

SEQ ID NO: 1166430 - DNA, 15 bp, Homo sapiens
tccctctcactctgt

SEQ ID NO: 1166431 - DNA, 15 bp, Homo sapiens
gtccctctcactctg

SEQ ID NO: 1166432 - DNA, 15 bp, Homo sapiens
agtccctctcactct

SEQ ID NO: 1166433 - DNA, 15 bp, Homo sapiens
aagtccctctcactc

SEQ ID NO: 1166434 - DNA, 15 bp, Homo sapiens
gaagtccctctcact

SEQ ID NO: 1166435 - DNA, 15 bp, Homo sapiens
tgaagtccctctcac

SEQ ID NO: 1166436 - DNA, 15 bp, Homo sapiens
atgaagtccctctca

SEQ ID NO: 1166437 - DNA, 15 bp, Homo sapiens
catgaagtccctctc

SEQ ID NO: 1166438 - DNA, 15 bp, Homo sapiens
tcatgaagtccctct

SEQ ID NO: 1166439 - DNA, 15 bp, Homo sapiens
gtcatgaagtccctc

SEQ ID NO: 1166440 - DNA, 15 bp, Homo sapiens
agtcatgaagtccct

SEQ ID NO: 1166441 - DNA, 15 bp, Homo sapiens
cagtcatgaagtccc

SEQ ID NO: 1166442 - DNA, 15 bp, Homo sapiens
acagtcatgaagtcc

SEQ ID NO: 1166443 - DNA, 15 bp, Homo sapiens
cacagtcatgaagtc

SEQ ID NO: 1166444 - DNA, 15 bp, Homo sapiens
tcacagtcatgaagt

SEQ ID NO: 1166445 - DNA, 15 bp, Homo sapiens
atcacagtcatgaag

SEQ ID NO: 1166446 - DNA, 15 bp, Homo sapiens
catcacagtcatgaa

SEQ ID NO: 1166447 - DNA, 15 bp, Homo sapiens
gcatcacagtcatga

SEQ ID NO: 1166448 - DNA, 15 bp, Homo sapiens
agcatcacagtcatg

SEQ ID NO: 1166449 - DNA, 15 bp, Homo sapiens
cagcatcacagtcat

SEQ ID NO: 1166450 - DNA, 15 bp, Homo sapiens
acagcatcacagtca

SEQ ID NO: 1166451 - DNA, 15 bp, Homo sapiens
aacagcatcacagtc

SEQ ID NO: 1166452 - DNA, 15 bp, Homo sapiens
aaacagcatcacagt

SEQ ID NO: 1166453 - DNA, 15 bp, Homo sapiens
gaaacagcatcacag

SEQ ID NO: 1166454 - DNA, 15 bp, Homo sapiens
tgaaacagcatcaca

SEQ ID NO: 1166455 - DNA, 15 bp, Homo sapiens
ctgaaacagcatcac

SEQ ID NO: 1166456 - DNA, 15 bp, Homo sapiens
actgaaacagcatca

SEQ ID NO: 1166457 - DNA, 15 bp, Homo sapiens
aactgaaacagcatc

SEQ ID NO: 1166458 - DNA, 15 bp, Homo sapiens
taactgaaacagcat

SEQ ID NO: 1166459 - DNA, 15 bp, Homo sapiens
gtaactgaaacagca

SEQ ID NO: 1166460 - DNA, 15 bp, Homo sapiens
tgtaactgaaacagc

SEQ ID NO: 1166461 - DNA, 15 bp, Homo sapiens
ttgtaactgaaacag

SEQ ID NO: 1166462 - DNA, 15 bp, Homo sapiens
tttgtaactgaaaca

SEQ ID NO: 1166463 - DNA, 15 bp, Homo sapiens
ctttgtaactgaaac

SEQ ID NO: 1166464 - DNA, 15 bp, Homo sapiens
actttgtaactgaaa

SEQ ID NO: 1166465 - DNA, 15 bp, Homo sapiens
cactttgtaactgaa

SEQ ID NO: 1166466 - DNA, 15 bp, Homo sapiens
gcactttgtaactga

SEQ ID NO: 1166467 - DNA, 15 bp, Homo sapiens
tgcactttgtaactg

SEQ ID NO: 1166468 - DNA, 15 bp, Homo sapiens
atgcactttgtaact

SEQ ID NO: 1166469 - DNA, 15 bp, Homo sapiens
aatgcactttgtaac

SEQ ID NO: 1166470 - DNA, 15 bp, Homo sapiens
aaatgcactttgtaa

SEQ ID NO: 1166471 - DNA, 15 bp, Homo sapiens
taaatgcactttgta

SEQ ID NO: 1166472 - DNA, 15 bp, Homo sapiens
ataaatgcactttgt

SEQ ID NO: 1166473 - DNA, 15 bp, Homo sapiens
tataaatgcactttg

SEQ ID NO: 1166474 - DNA, 15 bp, Homo sapiens
gtataaatgcacttt

SEQ ID NO: 1166475 - DNA, 15 bp, Homo sapiens
tgtataaatgcactt

SEQ ID NO: 1166476 - DNA, 15 bp, Homo sapiens
atgtataaatgcact

SEQ ID NO: 1166477 - DNA, 15 bp, Homo sapiens
tatgtataaatgcac

SEQ ID NO: 1166478 - DNA, 15 bp, Homo sapiens
ttatgtataaatgca

SEQ ID NO: 1166479 - DNA, 15 bp, Homo sapiens
cttatgtataaatgc

SEQ ID NO: 1166480 - DNA, 15 bp, Homo sapiens
tcttatgtataaatg

SEQ ID NO: 1166481 - DNA, 15 bp, Homo sapiens
atcttatgtataaat

SEQ ID NO: 1166482 - DNA, 15 bp, Homo sapiens
aatcttatgtataaa

SEQ ID NO: 1166483 - DNA, 15 bp, Homo sapiens
aaatcttatgtataa

SEQ ID NO: 1166484 - DNA, 15 bp, Homo sapiens
gaaatcttatgtata

SEQ ID NO: 1166485 - DNA, 15 bp, Homo sapiens
tgaaatcttatgtat

SEQ ID NO: 1166486 - DNA, 15 bp, Homo sapiens
atgaaatcttatgta

SEQ ID NO: 1166487 - DNA, 15 bp, Homo sapiens
aatgaaatcttatgt

SEQ ID NO: 1166488 - DNA, 15 bp, Homo sapiens
aaatgaaatcttatg

SEQ ID NO: 1166489 - DNA, 15 bp, Homo sapiens
caaatgaaatcttat

SEQ ID NO: 1166490 - DNA, 15 bp, Homo sapiens
tcaaatgaaatctta

SEQ ID NO: 1166491 - DNA, 15 bp, Homo sapiens
atcaaatgaaatctt

SEQ ID NO: 1166492 - DNA, 15 bp, Homo sapiens
gatcaaatgaaatct

SEQ ID NO: 1166493 - DNA, 15 bp, Homo sapiens
agatcaaatgaaatc

SEQ ID NO: 1166494 - DNA, 15 bp, Homo sapiens
aagatcaaatgaaat

SEQ ID NO: 1166495 - DNA, 15 bp, Homo sapiens
aaagatcaaatgaaa

SEQ ID NO: 1166496 - DNA, 15 bp, Homo sapiens
caaagatcaaatgaa

SEQ ID NO: 1166497 - DNA, 15 bp, Homo sapiens
ccaaagatcaaatga

SEQ ID NO: 1166498 - DNA, 15 bp, Homo sapiens
accaaagatcaaatg

SEQ ID NO: 1166499 - DNA, 15 bp, Homo sapiens
aaccaaagatcaaat

SEQ ID NO: 1166500 - DNA, 15 bp, Homo sapiens
taaccaaagatcaaa

SEQ ID NO: 1166501 - DNA, 15 bp, Homo sapiens
ataaccaaagatcaa

SEQ ID NO: 1166502 - DNA, 15 bp, Homo sapiens
tataaccaaagatca

SEQ ID NO: 1166503 - DNA, 15 bp, Homo sapiens
gtataaccaaagatc

SEQ ID NO: 1166504 - DNA, 15 bp, Homo sapiens
cgtataaccaaagat

SEQ ID NO: 1166505 - DNA, 15 bp, Homo sapiens
ccgtataaccaaaga

SEQ ID NO: 1166506 - DNA, 15 bp, Homo sapiens
accgtataaccaaag

SEQ ID NO: 1166507 - DNA, 15 bp, Homo sapiens
taccgtataaccaaa

SEQ ID NO: 1166508 - DNA, 15 bp, Homo sapiens
ttaccgtataaccaa

SEQ ID NO: 1166509 - DNA, 15 bp, Homo sapiens
tttaccgtataacca

SEQ ID NO: 1166510 - DNA, 15 bp, Homo sapiens
gtttaccgtataacc

SEQ ID NO: 1166511 - DNA, 15 bp, Homo sapiens
tgtttaccgtataac

SEQ ID NO: 1166512 - DNA, 15 bp, Homo sapiens
ctgtttaccgtataa

SEQ ID NO: 1166513 - DNA, 15 bp, Homo sapiens
tctgtttaccgtata

SEQ ID NO: 1166514 - DNA, 15 bp, Homo sapiens
ttctgtttaccgtat

SEQ ID NO: 1166515 - DNA, 15 bp, Homo sapiens
gttctgtttaccgta

SEQ ID NO: 1166516 - DNA, 15 bp, Homo sapiens
agttctgtttaccgt

SEQ ID NO: 1166517 - DNA, 15 bp, Homo sapiens
aagttctgtttaccg

SEQ ID NO: 1166518 - DNA, 15 bp, Homo sapiens
taagttctgtttacc

SEQ ID NO: 1166519 - DNA, 15 bp, Homo sapiens
ataagttctgtttac

SEQ ID NO: 1166520 - DNA, 15 bp, Homo sapiens
gataagttctgttta

SEQ ID NO: 1166521 - DNA, 15 bp, Homo sapiens
agataagttctgttt

SEQ ID NO: 1166522 - DNA, 15 bp, Homo sapiens
tagataagttctgtt

SEQ ID NO: 1166523 - DNA, 15 bp, Homo sapiens
gtagataagttctgt

SEQ ID NO: 1166524 - DNA, 15 bp, Homo sapiens
ggtagataagttctg

SEQ ID NO: 1166525 - DNA, 15 bp, Homo sapiens
tggtagataagttct

SEQ ID NO: 1166526 - DNA, 15 bp, Homo sapiens
ctggtagataagttc

SEQ ID NO: 1166527 - DNA, 15 bp, Homo sapiens
tctggtagataagtt

SEQ ID NO: 1166528 - DNA, 15 bp, Homo sapiens
gtctggtagataagt

SEQ ID NO: 1166529 - DNA, 15 bp, Homo sapiens
cgtctggtagataag

SEQ ID NO: 1166530 - DNA, 15 bp, Homo sapiens
ccgtctggtagataa

SEQ ID NO: 1166531 - DNA, 15 bp, Homo sapiens
cccgtctggtagata

SEQ ID NO: 1166532 - DNA, 15 bp, Homo sapiens
acccgtctggtagat

SEQ ID NO: 1166533 - DNA, 15 bp, Homo sapiens
cacccgtctggtaga

SEQ ID NO: 1166534 - DNA, 15 bp, Homo sapiens
acacccgtctggtag

SEQ ID NO: 1166535 - DNA, 15 bp, Homo sapiens
tacacccgtctggta

SEQ ID NO: 1166536 - DNA, 15 bp, Homo sapiens
ttacacccgtctggt

SEQ ID NO: 1166537 - DNA, 15 bp, Homo sapiens
tttacacccgtctgg

SEQ ID NO: 1166538 - DNA, 15 bp, Homo sapiens
ttttacacccgtctg

SEQ ID NO: 1166539 - DNA, 15 bp, Homo sapiens
cttttacacccgtct

SEQ ID NO: 1166540 - DNA, 15 bp, Homo sapiens
acttttacacccgtc

SEQ ID NO: 1166541 - DNA, 15 bp, Homo sapiens
aacttttacacccgt

SEQ ID NO: 1166542 - DNA, 15 bp, Homo sapiens
aaacttttacacccg

SEQ ID NO: 1166543 - DNA, 15 bp, Homo sapiens
caaacttttacaccc

SEQ ID NO: 1166544 - DNA, 15 bp, Homo sapiens
ccaaacttttacacc

SEQ ID NO: 1166545 - DNA, 15 bp, Homo sapiens
tccaaacttttacac

SEQ ID NO: 1166546 - DNA, 15 bp, Homo sapiens
ctccaaacttttaca

SEQ ID NO: 1166547 - DNA, 15 bp, Homo sapiens
gctccaaacttttac

SEQ ID NO: 1166548 - DNA, 15 bp, Homo sapiens
tgctccaaactttta

SEQ ID NO: 1166549 - DNA, 15 bp, Homo sapiens
ctgctccaaactttt

SEQ ID NO: 1166550 - DNA, 15 bp, Homo sapiens
tctgctccaaacttt

SEQ ID NO: 1166551 - DNA, 15 bp, Homo sapiens
ttctgctccaaactt

SEQ ID NO: 1166552 - DNA, 15 bp, Homo sapiens
attctgctccaaact

SEQ ID NO: 1166553 - DNA, 15 bp, Homo sapiens
cattctgctccaaac

SEQ ID NO: 1166554 - DNA, 15 bp, Homo sapiens
acattctgctccaaa

SEQ ID NO: 1166555 - DNA, 15 bp, Homo sapiens
aacattctgctccaa

SEQ ID NO: 1166556 - DNA, 15 bp, Homo sapiens
aaacattctgctcca

SEQ ID NO: 1166557 - DNA, 15 bp, Homo sapiens
taaacattctgctcc

SEQ ID NO: 1166558 - DNA, 15 bp, Homo sapiens
ttaaacattctgctc

SEQ ID NO: 1166559 - DNA, 15 bp, Homo sapiens
tttaaacattctgct

SEQ ID NO: 1166560 - DNA, 15 bp, Homo sapiens
ttttaaacattctgc

SEQ ID NO: 1166561 - DNA, 15 bp, Homo sapiens
tttttaaacattctg

SEQ ID NO: 1166562 - DNA, 15 bp, Homo sapiens
ttttttaaacattct

SEQ ID NO: 1166563 - DNA, 15 bp, Homo sapiens
attttttaaacattc

SEQ ID NO: 1166564 - DNA, 15 bp, Homo sapiens
aattttttaaacatt

SEQ ID NO: 1166565 - DNA, 15 bp, Homo sapiens
caattttttaaacat

SEQ ID NO: 1166566 - DNA, 15 bp, Homo sapiens
tcaattttttaaaca

SEQ ID NO: 1166567 - DNA, 15 bp, Homo sapiens
ctcaattttttaaac

SEQ ID NO: 1166568 - DNA, 15 bp, Homo sapiens
actcaattttttaaa

SEQ ID NO: 1166569 - DNA, 15 bp, Homo sapiens
tactcaattttttaa

SEQ ID NO: 1166570 - DNA, 15 bp, Homo sapiens
ttactcaatttttta

SEQ ID NO: 1166571 - DNA, 15 bp, Homo sapiens
attactcaatttttt

SEQ ID NO: 1166572 - DNA, 15 bp, Homo sapiens
gattactcaattttt

SEQ ID NO: 1166573 - DNA, 15 bp, Homo sapiens
agattactcaatttt

SEQ ID NO: 1166574 - DNA, 15 bp, Homo sapiens
gagattactcaattt

SEQ ID NO: 1166575 - DNA, 15 bp, Homo sapiens
agagattactcaatt

SEQ ID NO: 1166576 - DNA, 15 bp, Homo sapiens
tagagattactcaat

SEQ ID NO: 1166577 - DNA, 15 bp, Homo sapiens
gtagagattactcaa

SEQ ID NO: 1166578 - DNA, 15 bp, Homo sapiens
ggtagagattactca

SEQ ID NO: 1166579 - DNA, 15 bp, Homo sapiens
aggtagagattactc

SEQ ID NO: 1166580 - DNA, 15 bp, Homo sapiens
gaggtagagattact

SEQ ID NO: 1166581 - DNA, 15 bp, Homo sapiens
agaggtagagattac

SEQ ID NO: 1166582 - DNA, 15 bp, Homo sapiens
cagaggtagagatta

SEQ ID NO: 1166583 - DNA, 15 bp, Homo sapiens
ccagaggtagagatt

SEQ ID NO: 1166584 - DNA, 15 bp, Homo sapiens
tccagaggtagagat

SEQ ID NO: 1166585 - DNA, 15 bp, Homo sapiens
ttccagaggtagaga

SEQ ID NO: 1166586 - DNA, 15 bp, Homo sapiens
tttccagaggtagag

SEQ ID NO: 1166587 - DNA, 15 bp, Homo sapiens
atttccagaggtaga

SEQ ID NO: 1166588 - DNA, 15 bp, Homo sapiens
catttccagaggtag

SEQ ID NO: 1166589 - DNA, 15 bp, Homo sapiens
tcatttccagaggta

SEQ ID NO: 1166590 - DNA, 15 bp, Homo sapiens
atcatttccagaggt

SEQ ID NO: 1166591 - DNA, 15 bp, Homo sapiens
aatcatttccagagg

SEQ ID NO: 1166592 - DNA, 15 bp, Homo sapiens
taatcatttccagag

SEQ ID NO: 1166593 - DNA, 15 bp, Homo sapiens
ttaatcatttccaga

SEQ ID NO: 1166594 - DNA, 15 bp, Homo sapiens
attaatcatttccag

SEQ ID NO: 1166595 - DNA, 15 bp, Homo sapiens
aattaatcatttcca

SEQ ID NO: 1166596 - DNA, 15 bp, Homo sapiens
taattaatcatttcc

SEQ ID NO: 1166597 - DNA, 15 bp, Homo sapiens
ttaattaatcatttc

SEQ ID NO: 1166598 - DNA, 15 bp, Homo sapiens
tttaattaatcattt

SEQ ID NO: 1166599 - DNA, 15 bp, Homo sapiens
ttttaattaatcatt

SEQ ID NO: 1166600 - DNA, 15 bp, Homo sapiens
cttttaattaatcat

SEQ ID NO: 1166601 - DNA, 15 bp, Homo sapiens
tcttttaattaatca

SEQ ID NO: 1166602 - DNA, 15 bp, Homo sapiens
atcttttaattaatc

SEQ ID NO: 1166603 - DNA, 15 bp, Homo sapiens
tatcttttaattaat

SEQ ID NO: 1166604 - DNA, 15 bp, Homo sapiens
atatcttttaattaa

SEQ ID NO: 1166605 - DNA, 15 bp, Homo sapiens
tatatcttttaatta

SEQ ID NO: 1166606 - DNA, 15 bp, Homo sapiens
ttatatcttttaatt

SEQ ID NO: 1166607 - DNA, 15 bp, Homo sapiens
tttatatcttttaat

SEQ ID NO: 1166608 - DNA, 15 bp, Homo sapiens
ttttatatcttttaa

SEQ ID NO: 1166609 - DNA, 15 bp, Homo sapiens
attttatatctttta

SEQ ID NO: 1166610 - DNA, 15 bp, Homo sapiens
cattttatatctttt

SEQ ID NO: 1166611 - DNA, 15 bp, Homo sapiens
gcattttatatcttt

SEQ ID NO: 1166612 - DNA, 15 bp, Homo sapiens
agcattttatatctt

SEQ ID NO: 1166613 - DNA, 15 bp, Homo sapiens
gagcattttatatct

SEQ ID NO: 1166614 - DNA, 15 bp, Homo sapiens
agagcattttatatc

SEQ ID NO: 1166615 - DNA, 15 bp, Homo sapiens
gagagcattttatat

SEQ ID NO: 1166616 - DNA, 15 bp, Homo sapiens
agagagcattttata

SEQ ID NO: 1166617 - DNA, 15 bp, Homo sapiens
gagagagcattttat

SEQ ID NO: 1166618 - DNA, 15 bp, Homo sapiens
ggagagagcatttta

SEQ ID NO: 1166619 - DNA, 15 bp, Homo sapiens
tggagagagcatttt

SEQ ID NO: 1166620 - DNA, 15 bp, Homo sapiens
ctggagagagcattt

SEQ ID NO: 1166621 - DNA, 15 bp, Homo sapiens
gctggagagagcatt

SEQ ID NO: 1166622 - DNA, 15 bp, Homo sapiens
tgctggagagagcat

SEQ ID NO: 1166623 - DNA, 15 bp, Homo sapiens
gtgctggagagagca

SEQ ID NO: 1166624 - DNA, 15 bp, Homo sapiens
agtgctggagagagc

SEQ ID NO: 1166625 - DNA, 15 bp, Homo sapiens
tagtgctggagagag

SEQ ID NO: 1166626 - DNA, 15 bp, Homo sapiens
atagtgctggagaga

SEQ ID NO: 1166627 - DNA, 15 bp, Homo sapiens
catagtgctggagag

SEQ ID NO: 1166628 - DNA, 15 bp, Homo sapiens
acatagtgctggaga

SEQ ID NO: 1166629 - DNA, 15 bp, Homo sapiens
tacatagtgctggag

SEQ ID NO: 1166630 - DNA, 15 bp, Homo sapiens
ttacatagtgctgga

SEQ ID NO: 1166631 - DNA, 15 bp, Homo sapiens
cttacatagtgctgg

SEQ ID NO: 1166632 - DNA, 15 bp, Homo sapiens
ccttacatagtgctg

SEQ ID NO: 1166633 - DNA, 15 bp, Homo sapiens
cccttacatagtgct

SEQ ID NO: 1166634 - DNA, 15 bp, Homo sapiens
acccttacatagtgc

SEQ ID NO: 1166635 - DNA, 15 bp, Homo sapiens
cacccttacatagtg

SEQ ID NO: 1166636 - DNA, 15 bp, Homo sapiens
acacccttacatagt

SEQ ID NO: 1166637 - DNA, 15 bp, Homo sapiens
gacacccttacatag

SEQ ID NO: 1166638 - DNA, 15 bp, Homo sapiens
ggacacccttacata

SEQ ID NO: 1166639 - DNA, 15 bp, Homo sapiens
gggacacccttacat

SEQ ID NO: 1166640 - DNA, 15 bp, Homo sapiens
tgggacacccttaca

SEQ ID NO: 1166641 - DNA, 15 bp, Homo sapiens
ctgggacacccttac

SEQ ID NO: 1166642 - DNA, 15 bp, Homo sapiens
cctgggacaccctta

SEQ ID NO: 1166643 - DNA, 15 bp, Homo sapiens
ccctgggacaccctt

SEQ ID NO: 1166644 - DNA, 15 bp, Homo sapiens
tccctgggacaccct

SEQ ID NO: 1166645 - DNA, 15 bp, Homo sapiens
ctccctgggacaccc

SEQ ID NO: 1166646 - DNA, 15 bp, Homo sapiens
tctccctgggacacc

SEQ ID NO: 1166647 - DNA, 15 bp, Homo sapiens
ttctccctgggacac

SEQ ID NO: 1166648 - DNA, 15 bp, Homo sapiens
tttctccctgggaca

SEQ ID NO: 1166649 - DNA, 15 bp, Homo sapiens
atttctccctgggac

SEQ ID NO: 1166650 - DNA, 15 bp, Homo sapiens
catttctccctggga

SEQ ID NO: 1166651 - DNA, 15 bp, Homo sapiens
acatttctccctggg

SEQ ID NO: 1166652 - DNA, 15 bp, Homo sapiens
gacatttctccctgg

SEQ ID NO: 1166653 - DNA, 15 bp, Homo sapiens
agacatttctccctg

SEQ ID NO: 1166654 - DNA, 15 bp, Homo sapiens
aagacatttctccct

SEQ ID NO: 1166655 - DNA, 15 bp, Homo sapiens
caagacatttctccc

SEQ ID NO: 1166656 - DNA, 15 bp, Homo sapiens
tcaagacatttctcc

SEQ ID NO: 1166657 - DNA, 15 bp, Homo sapiens
atcaagacatttctc

SEQ ID NO: 1166658 - DNA, 15 bp, Homo sapiens
gatcaagacatttct

SEQ ID NO: 1166659 - DNA, 15 bp, Homo sapiens
ggatcaagacatttc

SEQ ID NO: 1166660 - DNA, 15 bp, Homo sapiens
cggatcaagacattt

SEQ ID NO: 1166661 - DNA, 15 bp, Homo sapiens
tcggatcaagacatt

SEQ ID NO: 1166662 - DNA, 15 bp, Homo sapiens
ctcggatcaagacat

SEQ ID NO: 1166663 - DNA, 15 bp, Homo sapiens
tctcggatcaagaca

SEQ ID NO: 1166664 - DNA, 15 bp, Homo sapiens
ttctcggatcaagac

SEQ ID NO: 1166665 - DNA, 15 bp, Homo sapiens
attctcggatcaaga

SEQ ID NO: 1166666 - DNA, 15 bp, Homo sapiens
cattctcggatcaag

SEQ ID NO: 1166667 - DNA, 15 bp, Homo sapiens
tcattctcggatcaa

SEQ ID NO: 1166668 - DNA, 15 bp, Homo sapiens
atcattctcggatca

SEQ ID NO: 1166669 - DNA, 15 bp, Homo sapiens
catcattctcggatc

SEQ ID NO: 1166670 - DNA, 15 bp, Homo sapiens
tcatcattctcggat

SEQ ID NO: 1166671 - DNA, 15 bp, Homo sapiens
ttcatcattctcgga

SEQ ID NO: 1166672 - DNA, 15 bp, Homo sapiens
tttcatcattctcgg

SEQ ID NO: 1166673 - DNA, 15 bp, Homo sapiens
gtttcatcattctcg

SEQ ID NO: 1166674 - DNA, 15 bp, Homo sapiens
ggtttcatcattctc

SEQ ID NO: 1166675 - DNA, 15 bp, Homo sapiens
tggtttcatcattct

SEQ ID NO: 1166676 - DNA, 15 bp, Homo sapiens
ttggtttcatcattc

SEQ ID NO: 1166677 - DNA, 15 bp, Homo sapiens
tttggtttcatcatt

SEQ ID NO: 1166678 - DNA, 15 bp, Homo sapiens
ctttggtttcatcat

SEQ ID NO: 1166679 - DNA, 15 bp, Homo sapiens
actttggtttcatca

SEQ ID NO: 1166680 - DNA, 15 bp, Homo sapiens
aactttggtttcatc

SEQ ID NO: 1166681 - DNA, 15 bp, Homo sapiens
gaactttggtttcat

SEQ ID NO: 1166682 - DNA, 15 bp, Homo sapiens
agaactttggtttca

SEQ ID NO: 1166683 - DNA, 15 bp, Homo sapiens
tagaactttggtttc

SEQ ID NO: 1166684 - DNA, 15 bp, Homo sapiens
ctagaactttggttt

SEQ ID NO: 1166685 - DNA, 15 bp, Homo sapiens
actagaactttggtt

SEQ ID NO: 1166686 - DNA, 15 bp, Homo sapiens
aactagaactttggt

SEQ ID NO: 1166687 - DNA, 15 bp, Homo sapiens
gaactagaactttgg

SEQ ID NO: 1166688 - DNA, 15 bp, Homo sapiens
agaactagaactttg

SEQ ID NO: 1166689 - DNA, 15 bp, Homo sapiens
tagaactagaacttt

SEQ ID NO: 1166690 - DNA, 15 bp, Homo sapiens
ctagaactagaactt

SEQ ID NO: 1166691 - DNA, 15 bp, Homo sapiens
gctagaactagaact

SEQ ID NO: 1166692 - DNA, 15 bp, Homo sapiens
agctagaactagaac

SEQ ID NO: 1166693 - DNA, 15 bp, Homo sapiens
gagctagaactagaa

SEQ ID NO: 1166694 - DNA, 15 bp, Homo sapiens
agagctagaactaga

SEQ ID NO: 1166695 - DNA, 15 bp, Homo sapiens
cagagctagaactag

SEQ ID NO: 1166696 - DNA, 15 bp, Homo sapiens
gcagagctagaacta

SEQ ID NO: 1166697 - DNA, 15 bp, Homo sapiens
tgcagagctagaact

SEQ ID NO: 1166698 - DNA, 15 bp, Homo sapiens
atgcagagctagaac

SEQ ID NO: 1166699 - DNA, 15 bp, Homo sapiens
aatgcagagctagaa

SEQ ID NO: 1166700 - DNA, 15 bp, Homo sapiens
taatgcagagctaga

SEQ ID NO: 1166701 - DNA, 15 bp, Homo sapiens
ttaatgcagagctag

SEQ ID NO: 1166702 - DNA, 15 bp, Homo sapiens
tttaatgcagagcta

SEQ ID NO: 1166703 - DNA, 15 bp, Homo sapiens
atttaatgcagagct

SEQ ID NO: 1166704 - DNA, 15 bp, Homo sapiens
tatttaatgcagagc

SEQ ID NO: 1166705 - DNA, 15 bp, Homo sapiens
atatttaatgcagag

SEQ ID NO: 1166706 - DNA, 15 bp, Homo sapiens
catatttaatgcaga

SEQ ID NO: 1166707 - DNA, 15 bp, Homo sapiens
acatatttaatgcag

SEQ ID NO: 1166708 - DNA, 15 bp, Homo sapiens
cacatatttaatgca

SEQ ID NO: 1166709 - DNA, 15 bp, Homo sapiens
acacatatttaatgc

SEQ ID NO: 1166710 - DNA, 15 bp, Homo sapiens
gacacatatttaatg

SEQ ID NO: 1166711 - DNA, 15 bp, Homo sapiens
ggacacatatttaat

SEQ ID NO: 1166712 - DNA, 15 bp, Homo sapiens
aggacacatatttaa

SEQ ID NO: 1166713 - DNA, 15 bp, Homo sapiens
aaggacacatattta

SEQ ID NO: 1166714 - DNA, 15 bp, Homo sapiens
taaggacacatattt

SEQ ID NO: 1166715 - DNA, 15 bp, Homo sapiens
gtaaggacacatatt

SEQ ID NO: 1166716 - DNA, 15 bp, Homo sapiens
cgtaaggacacatat

SEQ ID NO: 1166717 - DNA, 15 bp, Homo sapiens
tcgtaaggacacata

SEQ ID NO: 1166718 - DNA, 15 bp, Homo sapiens
ctcgtaaggacacat

SEQ ID NO: 1166719 - DNA, 15 bp, Homo sapiens
tctcgtaaggacaca

SEQ ID NO: 1166720 - DNA, 15 bp, Homo sapiens
ttctcgtaaggacac

SEQ ID NO: 1166721 - DNA, 15 bp, Homo sapiens
attctcgtaaggaca

SEQ ID NO: 1166722 - DNA, 15 bp, Homo sapiens
gattctcgtaaggac

SEQ ID NO: 1166723 - DNA, 15 bp, Homo sapiens
ggattctcgtaagga

SEQ ID NO: 1166724 - DNA, 15 bp, Homo sapiens
gggattctcgtaagg

SEQ ID NO: 1166725 - DNA, 15 bp, Homo sapiens
agggattctcgtaag

SEQ ID NO: 1166726 - DNA, 15 bp, Homo sapiens
gagggattctcgtaa

SEQ ID NO: 1166727 - DNA, 15 bp, Homo sapiens
tgagggattctcgta

SEQ ID NO: 1166728 - DNA, 15 bp, Homo sapiens
ttgagggattctcgt

SEQ ID NO: 1166729 - DNA, 15 bp, Homo sapiens
attgagggattctcg

SEQ ID NO: 1166730 - DNA, 15 bp, Homo sapiens
aattgagggattctc

SEQ ID NO: 1166731 - DNA, 15 bp, Homo sapiens
aaattgagggattct

SEQ ID NO: 1166732 - DNA, 15 bp, Homo sapiens
gaaattgagggattc

SEQ ID NO: 1166733 - DNA, 15 bp, Homo sapiens
agaaattgagggatt

SEQ ID NO: 1166734 - DNA, 15 bp, Homo sapiens
aagaaattgagggat

SEQ ID NO: 1166735 - DNA, 15 bp, Homo sapiens
aaagaaattgaggga

SEQ ID NO: 1166736 - DNA, 15 bp, Homo sapiens
caaagaaattgaggg

SEQ ID NO: 1166737 - DNA, 15 bp, Homo sapiens
ccaaagaaattgagg

SEQ ID NO: 1166738 - DNA, 15 bp, Homo sapiens
tccaaagaaattgag

SEQ ID NO: 1166739 - DNA, 15 bp, Homo sapiens
atccaaagaaattga

SEQ ID NO: 1166740 - DNA, 15 bp, Homo sapiens
aatccaaagaaattg

SEQ ID NO: 1166741 - DNA, 15 bp, Homo sapiens
aaatccaaagaaatt

SEQ ID NO: 1166742 - DNA, 15 bp, Homo sapiens
caaatccaaagaaat

SEQ ID NO: 1166743 - DNA, 15 bp, Homo sapiens
tcaaatccaaagaaa

SEQ ID NO: 1166744 - DNA, 15 bp, Homo sapiens
ctcaaatccaaagaa

SEQ ID NO: 1166745 - DNA, 15 bp, Homo sapiens
actcaaatccaaaga

SEQ ID NO: 1166746 - DNA, 15 bp, Homo sapiens
gactcaaatccaaag

SEQ ID NO: 1166747 - DNA, 15 bp, Homo sapiens
agactcaaatccaaa

SEQ ID NO: 1166748 - DNA, 15 bp, Homo sapiens
gagactcaaatccaa

SEQ ID NO: 1166749 - DNA, 15 bp, Homo sapiens
ggagactcaaatcca

SEQ ID NO: 1166750 - DNA, 15 bp, Homo sapiens
aggagactcaaatcc

SEQ ID NO: 1166751 - DNA, 15 bp, Homo sapiens
gaggagactcaaatc

SEQ ID NO: 1166752 - DNA, 15 bp, Homo sapiens
tgaggagactcaaat

SEQ ID NO: 1166753 - DNA, 15 bp, Homo sapiens
atgaggagactcaaa

SEQ ID NO: 1166754 - DNA, 15 bp, Homo sapiens
gatgaggagactcaa

SEQ ID NO: 1166755 - DNA, 15 bp, Homo sapiens
agatgaggagactca

SEQ ID NO: 1166756 - DNA, 15 bp, Homo sapiens
cagatgaggagactc

SEQ ID NO: 1166757 - DNA, 15 bp, Homo sapiens
acagatgaggagact

SEQ ID NO: 1166758 - DNA, 15 bp, Homo sapiens
gacagatgaggagac

SEQ ID NO: 1166759 - DNA, 15 bp, Homo sapiens
tgacagatgaggaga

SEQ ID NO: 1166760 - DNA, 15 bp, Homo sapiens
ttgacagatgaggag

SEQ ID NO: 1166761 - DNA, 15 bp, Homo sapiens
tccatttgacagatg

SEQ ID NO: 1166762 - DNA, 15 bp, Homo sapiens
ctccatttgacagat

SEQ ID NO: 1166763 - DNA, 15 bp, Homo sapiens
cctccatttgacaga

SEQ ID NO: 1166764 - DNA, 15 bp, Homo sapiens
ccctccatttgacag

SEQ ID NO: 1166765 - DNA, 15 bp, Homo sapiens
cccctccatttgaca

SEQ ID NO: 1166766 - DNA, 15 bp, Homo sapiens
tcccctccatttgac

SEQ ID NO: 1166767 - DNA, 15 bp, Homo sapiens
ctcccctccatttga

SEQ ID NO: 1166768 - DNA, 15 bp, Homo sapiens
actcccctccatttg

SEQ ID NO: 1166769 - DNA, 15 bp, Homo sapiens
cactcccctccattt

SEQ ID NO: 1166770 - DNA, 15 bp, Homo sapiens
acactcccctccatt

SEQ ID NO: 1166771 - DNA, 15 bp, Homo sapiens
cacactcccctccat

SEQ ID NO: 1166772 - DNA, 15 bp, Homo sapiens
acacactcccctcca

SEQ ID NO: 1166773 - DNA, 15 bp, Homo sapiens
cacacactcccctcc

SEQ ID NO: 1166774 - DNA, 15 bp, Homo sapiens
acacacactcccctc

SEQ ID NO: 1166775 - DNA, 15 bp, Homo sapiens
cacacacactcccct

SEQ ID NO: 1166776 - DNA, 15 bp, Homo sapiens
acacacacactcccc

SEQ ID NO: 1166777 - DNA, 15 bp, Homo sapiens
gcgcgcgtgcacaca

SEQ ID NO: 1166778 - DNA, 15 bp, Homo sapiens
cgcgcgcgtgcacac

SEQ ID NO: 1166779 - DNA, 15 bp, Homo sapiens
acgcgcgcgtgcaca

SEQ ID NO: 1166780 - DNA, 15 bp, Homo sapiens
cacgcgcgcgtgcac

SEQ ID NO: 1166781 - DNA, 15 bp, Homo sapiens
ctgcacgcgcgcgtg

SEQ ID NO: 1166782 - DNA, 15 bp, Homo sapiens
cctgcacgcgcgcgt

SEQ ID NO: 1166783 - DNA, 15 bp, Homo sapiens
tcctgcacgcgcgcg

SEQ ID NO: 1166784 - DNA, 15 bp, Homo sapiens
ctcctgcacgcgcgc

SEQ ID NO: 1166785 - DNA, 15 bp, Homo sapiens
cctcctgcacgcgcg

SEQ ID NO: 1166786 - DNA, 15 bp, Homo sapiens
tcctcctgcacgcgc

SEQ ID NO: 1166787 - DNA, 15 bp, Homo sapiens
atcctcctgcacgcg

SEQ ID NO: 1166788 - DNA, 15 bp, Homo sapiens
tatcctcctgcacgc

SEQ ID NO: 1166789 - DNA, 15 bp, Homo sapiens
gtatcctcctgcacg

SEQ ID NO: 1166790 - DNA, 15 bp, Homo sapiens
agtatcctcctgcac

SEQ ID NO: 1166791 - DNA, 15 bp, Homo sapiens
gagtatcctcctgca

SEQ ID NO: 1166792 - DNA, 15 bp, Homo sapiens
agagtatcctcctgc

SEQ ID NO: 1166793 - DNA, 15 bp, Homo sapiens
tagagtatcctcctg

SEQ ID NO: 1166794 - DNA, 15 bp, Homo sapiens
ctagagtatcctcct

SEQ ID NO: 1166795 - DNA, 15 bp, Homo sapiens
tctagagtatcctcc

SEQ ID NO: 1166796 - DNA, 15 bp, Homo sapiens
gtctagagtatcctc

SEQ ID NO: 1166797 - DNA, 15 bp, Homo sapiens
tgtctagagtatcct

SEQ ID NO: 1166798 - DNA, 15 bp, Homo sapiens
gtgtctagagtatcc

SEQ ID NO: 1166799 - DNA, 15 bp, Homo sapiens
tgtgtctagagtatc

SEQ ID NO: 1166800 - DNA, 15 bp, Homo sapiens
gtgtgtctagagtat

SEQ ID NO: 1166801 - DNA, 15 bp, Homo sapiens
agtgtgtctagagta

SEQ ID NO: 1166802 - DNA, 15 bp, Homo sapiens
cagtgtgtctagagt

SEQ ID NO: 1166803 - DNA, 15 bp, Homo sapiens
tcagtgtgtctagag

SEQ ID NO: 1166804 - DNA, 15 bp, Homo sapiens
ctcagtgtgtctaga

SEQ ID NO: 1166805 - DNA, 15 bp, Homo sapiens
cctcagtgtgtctag

SEQ ID NO: 1166806 - DNA, 15 bp, Homo sapiens
tcctcagtgtgtcta

SEQ ID NO: 1166807 - DNA, 15 bp, Homo sapiens
ctcctcagtgtgtct

SEQ ID NO: 1166808 - DNA, 15 bp, Homo sapiens
actcctcagtgtgtc

SEQ ID NO: 1166809 - DNA, 15 bp, Homo sapiens
tactcctcagtgtgt

SEQ ID NO: 1166810 - DNA, 15 bp, Homo sapiens
ctactcctcagtgtg

SEQ ID NO: 1166811 - DNA, 15 bp, Homo sapiens
cctactcctcagtgt

SEQ ID NO: 1166812 - DNA, 15 bp, Homo sapiens
ccctactcctcagtg

SEQ ID NO: 1166813 - DNA, 15 bp, Homo sapiens
tccctactcctcagt

SEQ ID NO: 1166814 - DNA, 15 bp, Homo sapiens
ctccctactcctcag

SEQ ID NO: 1166815 - DNA, 15 bp, Homo sapiens
actccctactcctca

SEQ ID NO: 1166816 - DNA, 15 bp, Homo sapiens
aactccctactcctc

SEQ ID NO: 1166817 - DNA, 15 bp, Homo sapiens
aaactccctactcct

SEQ ID NO: 1166818 - DNA, 15 bp, Homo sapiens
caaactccctactcc

SEQ ID NO: 1166819 - DNA, 15 bp, Homo sapiens
tcaaactccctactc

SEQ ID NO: 1166820 - DNA, 15 bp, Homo sapiens
ttcaaactccctact

SEQ ID NO: 1166821 - DNA, 15 bp, Homo sapiens
gttcaaactccctac

SEQ ID NO: 1166822 - DNA, 15 bp, Homo sapiens
tgttcaaactcccta

SEQ ID NO: 1166823 - DNA, 15 bp, Homo sapiens
gtgttcaaactccct

SEQ ID NO: 1166824 - DNA, 15 bp, Homo sapiens
ggtgttcaaactccc

SEQ ID NO: 1166825 - DNA, 15 bp, Homo sapiens
aggtgttcaaactcc

SEQ ID NO: 1166826 - DNA, 15 bp, Homo sapiens
aaggtgttcaaactc

SEQ ID NO: 1166827 - DNA, 15 bp, Homo sapiens
gaaggtgttcaaact

SEQ ID NO: 1166828 - DNA, 15 bp, Homo sapiens
ggaaggtgttcaaac

SEQ ID NO: 1166829 - DNA, 15 bp, Homo sapiens
aggaaggtgttcaaa

SEQ ID NO: 1166830 - DNA, 15 bp, Homo sapiens
gaggaaggtgttcaa

SEQ ID NO: 1166831 - DNA, 15 bp, Homo sapiens
agaggaaggtgttca

SEQ ID NO: 1166832 - DNA, 15 bp, Homo sapiens
cagaggaaggtgttc

SEQ ID NO: 1166833 - DNA, 15 bp, Homo sapiens
tcagaggaaggtgtt

SEQ ID NO: 1166834 - DNA, 15 bp, Homo sapiens
ttcagaggaaggtgt

SEQ ID NO: 1166835 - DNA, 15 bp, Homo sapiens
tttcagaggaaggtg

SEQ ID NO: 1166836 - DNA, 15 bp, Homo sapiens
ttttcagaggaaggt

SEQ ID NO: 1166837 - DNA, 15 bp, Homo sapiens
attttcagaggaagg

SEQ ID NO: 1166838 - DNA, 15 bp, Homo sapiens
cattttcagaggaag

SEQ ID NO: 1166839 - DNA, 15 bp, Homo sapiens
gcattttcagaggaa

SEQ ID NO: 1166840 - DNA, 15 bp, Homo sapiens
agcattttcagagga

SEQ ID NO: 1166841 - DNA, 15 bp, Homo sapiens
aagcattttcagagg

SEQ ID NO: 1166842 - DNA, 15 bp, Homo sapiens
gaagcattttcagag

SEQ ID NO: 1166843 - DNA, 15 bp, Homo sapiens
ggaagcattttcaga

SEQ ID NO: 1166844 - DNA, 15 bp, Homo sapiens
tggaagcattttcag

SEQ ID NO: 1166845 - DNA, 15 bp, Homo sapiens
ttggaagcattttca

SEQ ID NO: 1166846 - DNA, 15 bp, Homo sapiens
tttggaagcattttc

SEQ ID NO: 1166847 - DNA, 15 bp, Homo sapiens
gtttggaagcatttt

SEQ ID NO: 1166848 - DNA, 15 bp, Homo sapiens
agtttggaagcattt

SEQ ID NO: 1166849 - DNA, 15 bp, Homo sapiens
cagtttggaagcatt

SEQ ID NO: 1166850 - DNA, 15 bp, Homo sapiens
ccagtttggaagcat

SEQ ID NO: 1166851 - DNA, 15 bp, Homo sapiens
accagtttggaagca

SEQ ID NO: 1166852 - DNA, 15 bp, Homo sapiens
taccagtttggaagc

SEQ ID NO: 1166853 - DNA, 15 bp, Homo sapiens
ctaccagtttggaag

SEQ ID NO: 1166854 - DNA, 15 bp, Homo sapiens
cctaccagtttggaa

SEQ ID NO: 1166855 - DNA, 15 bp, Homo sapiens
ccctaccagtttgga

SEQ ID NO: 1166856 - DNA, 15 bp, Homo sapiens
tccctaccagtttgg

SEQ ID NO: 1166857 - DNA, 15 bp, Homo sapiens
ctccctaccagtttg

SEQ ID NO: 1166858 - DNA, 15 bp, Homo sapiens
tctccctaccagttt

SEQ ID NO: 1166859 - DNA, 15 bp, Homo sapiens
ttctccctaccagtt

SEQ ID NO: 1166860 - DNA, 15 bp, Homo sapiens
tttctccctaccagt

SEQ ID NO: 1166861 - DNA, 15 bp, Homo sapiens
ctttctccctaccag

SEQ ID NO: 1166862 - DNA, 15 bp, Homo sapiens
tctttctccctacca

SEQ ID NO: 1166863 - DNA, 15 bp, Homo sapiens
ttctttctccctacc

SEQ ID NO: 1166864 - DNA, 15 bp, Homo sapiens
tttctttctccctac

SEQ ID NO: 1166865 - DNA, 15 bp, Homo sapiens
ctttctttctcccta

SEQ ID NO: 1166866 - DNA, 15 bp, Homo sapiens
cctttctttctccct

SEQ ID NO: 1166867 - DNA, 15 bp, Homo sapiens
acctttctttctccc

SEQ ID NO: 1166868 - DNA, 15 bp, Homo sapiens
cacctttctttctcc

SEQ ID NO: 1166869 - DNA, 15 bp, Homo sapiens
ccacctttctttctc

SEQ ID NO: 1166870 - DNA, 15 bp, Homo sapiens
tccacctttctttct

SEQ ID NO: 1166871 - DNA, 15 bp, Homo sapiens
ttccacctttctttc

SEQ ID NO: 1166872 - DNA, 15 bp, Homo sapiens
gttccacctttcttt

SEQ ID NO: 1166873 - DNA, 15 bp, Homo sapiens
tgttccacctttctt

SEQ ID NO: 1166874 - DNA, 15 bp, Homo sapiens
atgttccacctttct

SEQ ID NO: 1166875 - DNA, 15 bp, Homo sapiens
catgttccacctttc

SEQ ID NO: 1166876 - DNA, 15 bp, Homo sapiens
tcatgttccaccttt

SEQ ID NO: 1166877 - DNA, 15 bp, Homo sapiens
atcatgttccacctt

SEQ ID NO: 1166878 - DNA, 15 bp, Homo sapiens
catcatgttccacct

SEQ ID NO: 1166879 - DNA, 15 bp, Homo sapiens
tcatcatgttccacc

SEQ ID NO: 1166880 - DNA, 15 bp, Homo sapiens
ctcatcatgttccac

SEQ ID NO: 1166881 - DNA, 15 bp, Homo sapiens
tctcatcatgttcca

SEQ ID NO: 1166882 - DNA, 15 bp, Homo sapiens
ttctcatcatgttcc

SEQ ID NO: 1166883 - DNA, 15 bp, Homo sapiens
attctcatcatgttc

SEQ ID NO: 1166884 - DNA, 15 bp, Homo sapiens
cattctcatcatgtt

SEQ ID NO: 1166885 - DNA, 15 bp, Homo sapiens
tcattctcatcatgt

SEQ ID NO: 1166886 - DNA, 15 bp, Homo sapiens
gtcattctcatcatg

SEQ ID NO: 1166887 - DNA, 15 bp, Homo sapiens
ggtcattctcatcat

SEQ ID NO: 1166888 - DNA, 15 bp, Homo sapiens
aggtcattctcatca

SEQ ID NO: 1166889 - DNA, 15 bp, Homo sapiens
gaggtcattctcatc

SEQ ID NO: 1166890 - DNA, 15 bp, Homo sapiens
agaggtcattctcat

SEQ ID NO: 1166891 - DNA, 15 bp, Homo sapiens
cagaggtcattctca

SEQ ID NO: 1166892 - DNA, 15 bp, Homo sapiens
acagaggtcattctc

SEQ ID NO: 1166893 - DNA, 15 bp, Homo sapiens
aacagaggtcattct

SEQ ID NO: 1166894 - DNA, 15 bp, Homo sapiens
gaacagaggtcattc

SEQ ID NO: 1166895 - DNA, 15 bp, Homo sapiens
ggaacagaggtcatt

SEQ ID NO: 1166896 - DNA, 15 bp, Homo sapiens
gggaacagaggtcat

SEQ ID NO: 1166897 - DNA, 15 bp, Homo sapiens
ggggaacagaggtca

SEQ ID NO: 1166898 - DNA, 15 bp, Homo sapiens
tggggaacagaggtc

SEQ ID NO: 1166899 - DNA, 15 bp, Homo sapiens
ttggggaacagaggt

SEQ ID NO: 1166900 - DNA, 15 bp, Homo sapiens
cttggggaacagagg

SEQ ID NO: 1166901 - DNA, 15 bp, Homo sapiens
gcttggggaacagag

SEQ ID NO: 1166902 - DNA, 15 bp, Homo sapiens
ggcttggggaacaga

SEQ ID NO: 1166903 - DNA, 15 bp, Homo sapiens
gggcttggggaacag

SEQ ID NO: 1166904 - DNA, 15 bp, Homo sapiens
ggggcttggggaaca

SEQ ID NO: 1166905 - DNA, 15 bp, Homo sapiens
gggggcttggggaac

SEQ ID NO: 1166906 - DNA, 15 bp, Homo sapiens
agggggcttggggaa

SEQ ID NO: 1166907 - DNA, 15 bp, Homo sapiens
aagggggcttgggga

SEQ ID NO: 1166908 - DNA, 15 bp, Homo sapiens
aaagggggcttgggg

SEQ ID NO: 1166909 - DNA, 15 bp, Homo sapiens
gaaagggggcttggg

SEQ ID NO: 1166910 - DNA, 15 bp, Homo sapiens
tgaaagggggcttgg

SEQ ID NO: 1166911 - DNA, 15 bp, Homo sapiens
ctgaaagggggcttg

SEQ ID NO: 1166912 - DNA, 15 bp, Homo sapiens
gctgaaagggggctt

SEQ ID NO: 1166913 - DNA, 15 bp, Homo sapiens
agctgaaagggggct

SEQ ID NO: 1166914 - DNA, 15 bp, Homo sapiens
gagctgaaagggggc

SEQ ID NO: 1166915 - DNA, 15 bp, Homo sapiens
tgagctgaaaggggg

SEQ ID NO: 1166916 - DNA, 15 bp, Homo sapiens
ctgagctgaaagggg

SEQ ID NO: 1166917 - DNA, 15 bp, Homo sapiens
tctgagctgaaaggg

SEQ ID NO: 1166918 - DNA, 15 bp, Homo sapiens
gtctgagctgaaagg

SEQ ID NO: 1166919 - DNA, 15 bp, Homo sapiens
tgtctgagctgaaag

SEQ ID NO: 1166920 - DNA, 15 bp, Homo sapiens
atgtctgagctgaaa

SEQ ID NO: 1166921 - DNA, 15 bp, Homo sapiens
aatgtctgagctgaa

SEQ ID NO: 1166922 - DNA, 15 bp, Homo sapiens
gaatgtctgagctga

SEQ ID NO: 1166923 - DNA, 15 bp, Homo sapiens
agaatgtctgagctg

SEQ ID NO: 1166924 - DNA, 15 bp, Homo sapiens
gagaatgtctgagct

SEQ ID NO: 1166925 - DNA, 15 bp, Homo sapiens
agagaatgtctgagc

SEQ ID NO: 1166926 - DNA, 15 bp, Homo sapiens
gagagaatgtctgag

SEQ ID NO: 1166927 - DNA, 15 bp, Homo sapiens
tgagagaatgtctga

SEQ ID NO: 1166928 - DNA, 15 bp, Homo sapiens
atgagagaatgtctg

SEQ ID NO: 1166929 - DNA, 15 bp, Homo sapiens
aatgagagaatgtct

SEQ ID NO: 1166930 - DNA, 15 bp, Homo sapiens
aaatgagagaatgtc

SEQ ID NO: 1166931 - DNA, 15 bp, Homo sapiens
aaaatgagagaatgt

SEQ ID NO: 1166932 - DNA, 15 bp, Homo sapiens
taaaatgagagaatg

SEQ ID NO: 1166933 - DNA, 15 bp, Homo sapiens
ttaaaatgagagaat

SEQ ID NO: 1166934 - DNA, 15 bp, Homo sapiens
tttaaaatgagagaa

SEQ ID NO: 1166935 - DNA, 15 bp, Homo sapiens
atttaaaatgagaga

SEQ ID NO: 1166936 - DNA, 15 bp, Homo sapiens
aatttaaaatgagag

SEQ ID NO: 1166937 - DNA, 15 bp, Homo sapiens
aaatttaaaatgaga

SEQ ID NO: 1166938 - DNA, 15 bp, Homo sapiens
caaatttaaaatgag

SEQ ID NO: 1166939 - DNA, 15 bp, Homo sapiens
ccaaatttaaaatga

SEQ ID NO: 1166940 - DNA, 15 bp, Homo sapiens
gccaaatttaaaatg

SEQ ID NO: 1166941 - DNA, 15 bp, Homo sapiens
ggccaaatttaaaat

SEQ ID NO: 1166942 - DNA, 15 bp, Homo sapiens
tggccaaatttaaaa

SEQ ID NO: 1166943 - DNA, 15 bp, Homo sapiens
atggccaaatttaaa

SEQ ID NO: 1166944 - DNA, 15 bp, Homo sapiens
catggccaaatttaa

SEQ ID NO: 1166945 - DNA, 15 bp, Homo sapiens
ccatggccaaattta

SEQ ID NO: 1166946 - DNA, 15 bp, Homo sapiens
tccatggccaaattt

SEQ ID NO: 1166947 - DNA, 15 bp, Homo sapiens
ttccatggccaaatt

SEQ ID NO: 1166948 - DNA, 15 bp, Homo sapiens
tttccatggccaaat

SEQ ID NO: 1166949 - DNA, 15 bp, Homo sapiens
atttccatggccaaa

SEQ ID NO: 1166950 - DNA, 15 bp, Homo sapiens
catttccatggccaa

SEQ ID NO: 1166951 - DNA, 15 bp, Homo sapiens
tcatttccatggcca

SEQ ID NO: 1166952 - DNA, 15 bp, Homo sapiens
gtcatttccatggcc

SEQ ID NO: 1166953 - DNA, 15 bp, Homo sapiens
tgtcatttccatggc

SEQ ID NO: 1166954 - DNA, 15 bp, Homo sapiens
ttgtcatttccatgg

SEQ ID NO: 1166955 - DNA, 15 bp, Homo sapiens
attgtcatttccatg

SEQ ID NO: 1166956 - DNA, 15 bp, Homo sapiens
aattgtcatttccat

SEQ ID NO: 1166957 - DNA, 15 bp, Homo sapiens
aaattgtcatttcca

SEQ ID NO: 1166958 - DNA, 15 bp, Homo sapiens
caaattgtcatttcc

SEQ ID NO: 1166959 - DNA, 15 bp, Homo sapiens
ctcaaattgtcattt

SEQ ID NO: 1166960 - DNA, 15 bp, Homo sapiens
cctcaaattgtcatt

SEQ ID NO: 1166961 - DNA, 15 bp, Homo sapiens
gcctcaaattgtcat

SEQ ID NO: 1166962 - DNA, 15 bp, Homo sapiens
tgcctcaaattgtca

SEQ ID NO: 1166963 - DNA, 15 bp, Homo sapiens
gtgcctcaaattgtc

SEQ ID NO: 1166964 - DNA, 15 bp, Homo sapiens
agtgcctcaaattgt

SEQ ID NO: 1166965 - DNA, 15 bp, Homo sapiens
gagtgcctcaaattg

SEQ ID NO: 1166966 - DNA, 15 bp, Homo sapiens
ggagtgcctcaaatt

SEQ ID NO: 1166967 - DNA, 15 bp, Homo sapiens
tggagtgcctcaaat

SEQ ID NO: 1166968 - DNA, 15 bp, Homo sapiens
ttggagtgcctcaaa

SEQ ID NO: 1166969 - DNA, 15 bp, Homo sapiens
cttggagtgcctcaa

SEQ ID NO: 1166970 - DNA, 15 bp, Homo sapiens
tcttggagtgcctca

SEQ ID NO: 1166971 - DNA, 15 bp, Homo sapiens
ttcttggagtgcctc

SEQ ID NO: 1166972 - DNA, 15 bp, Homo sapiens
gttcttggagtgcct

SEQ ID NO: 1166973 - DNA, 15 bp, Homo sapiens
ggttcttggagtgcc

SEQ ID NO: 1166974 - DNA, 15 bp, Homo sapiens
aggttcttggagtgc

SEQ ID NO: 1166975 - DNA, 15 bp, Homo sapiens
caggttcttggagtg

SEQ ID NO: 1166976 - DNA, 15 bp, Homo sapiens
ccaggttcttggagt

SEQ ID NO: 1166977 - DNA, 15 bp, Homo sapiens
gccaggttcttggag

SEQ ID NO: 1166978 - DNA, 15 bp, Homo sapiens
agccaggttcttgga

SEQ ID NO: 1166979 - DNA, 15 bp, Homo sapiens
gagccaggttcttgg

SEQ ID NO: 1166980 - DNA, 15 bp, Homo sapiens
agagccaggttcttg

SEQ ID NO: 1166981 - DNA, 15 bp, Homo sapiens
aagagccaggttctt

SEQ ID NO: 1166982 - DNA, 15 bp, Homo sapiens
aaagagccaggttct

SEQ ID NO: 1166983 - DNA, 15 bp, Homo sapiens
caaagagccaggttc

SEQ ID NO: 1166984 - DNA, 15 bp, Homo sapiens
gcaaagagccaggtt

SEQ ID NO: 1166985 - DNA, 15 bp, Homo sapiens
tgcaaagagccaggt

SEQ ID NO: 1166986 - DNA, 15 bp, Homo sapiens
ctgcaaagagccagg

SEQ ID NO: 1166987 - DNA, 15 bp, Homo sapiens
tctgcaaagagccag

SEQ ID NO: 1166988 - DNA, 15 bp, Homo sapiens
atctgcaaagagcca

SEQ ID NO: 1166989 - DNA, 15 bp, Homo sapiens
catctgcaaagagcc

SEQ ID NO: 1166990 - DNA, 15 bp, Homo sapiens
tcatctgcaaagagc

SEQ ID NO: 1166991 - DNA, 15 bp, Homo sapiens
ctcatctgcaaagag

SEQ ID NO: 1166992 - DNA, 15 bp, Homo sapiens
actcatctgcaaaga

SEQ ID NO: 1166993 - DNA, 15 bp, Homo sapiens
cactcatctgcaaag

SEQ ID NO: 1166994 - DNA, 15 bp, Homo sapiens
tcactcatctgcaaa

SEQ ID NO: 1166995 - DNA, 15 bp, Homo sapiens
ttcactcatctgcaa

SEQ ID NO: 1166996 - DNA, 15 bp, Homo sapiens
tttcactcatctgca

SEQ ID NO: 1166997 - DNA, 15 bp, Homo sapiens
ctttcactcatctgc

SEQ ID NO: 1166998 - DNA, 15 bp, Homo sapiens
actttcactcatctg

SEQ ID NO: 1166999 - DNA, 15 bp, Homo sapiens
aactttcactcatct

SEQ ID NO: 1167000 - DNA, 15 bp, Homo sapiens
caactttcactcatc

SEQ ID NO: 1167001 - DNA, 15 bp, Homo sapiens
acaactttcactcat

SEQ ID NO: 1167002 - DNA, 15 bp, Homo sapiens
cacaactttcactca

SEQ ID NO: 1167003 - DNA, 15 bp, Homo sapiens
gcacaactttcactc

SEQ ID NO: 1167004 - DNA, 15 bp, Homo sapiens
agcacaactttcact

SEQ ID NO: 1167005 - DNA, 15 bp, Homo sapiens
tagcacaactttcac

SEQ ID NO: 1167006 - DNA, 15 bp, Homo sapiens
ttagcacaactttca

SEQ ID NO: 1167007 - DNA, 15 bp, Homo sapiens
cttagcacaactttc

SEQ ID NO: 1167008 - DNA, 15 bp, Homo sapiens
acttagcacaacttt

SEQ ID NO: 1167009 - DNA, 15 bp, Homo sapiens
tacttagcacaactt

SEQ ID NO: 1167010 - DNA, 15 bp, Homo sapiens
ttacttagcacaact

SEQ ID NO: 1167011 - DNA, 15 bp, Homo sapiens
cttacttagcacaac

SEQ ID NO: 1167012 - DNA, 15 bp, Homo sapiens
tcttacttagcacaa

SEQ ID NO: 1167013 - DNA, 15 bp, Homo sapiens
gtcttacttagcaca

SEQ ID NO: 1167014 - DNA, 15 bp, Homo sapiens
tgtcttacttagcac

SEQ ID NO: 1167015 - DNA, 15 bp, Homo sapiens
gtgtcttacttagca

SEQ ID NO: 1167016 - DNA, 15 bp, Homo sapiens
agtgtcttacttagc

SEQ ID NO: 1167017 - DNA, 15 bp, Homo sapiens
cagtgtcttacttag

SEQ ID NO: 1167018 - DNA, 15 bp, Homo sapiens
ccagtgtcttactta

SEQ ID NO: 1167019 - DNA, 15 bp, Homo sapiens
tccagtgtcttactt

SEQ ID NO: 1167020 - DNA, 15 bp, Homo sapiens
ctccagtgtcttact

SEQ ID NO: 1167021 - DNA, 15 bp, Homo sapiens
tctccagtgtcttac

SEQ ID NO: 1167022 - DNA, 15 bp, Homo sapiens
ctctccagtgtctta

SEQ ID NO: 1167023 - DNA, 15 bp, Homo sapiens
cctctccagtgtctt

SEQ ID NO: 1167024 - DNA, 15 bp, Homo sapiens
gcctctccagtgtct

SEQ ID NO: 1167025 - DNA, 15 bp, Homo sapiens
agcctctccagtgtc

SEQ ID NO: 1167026 - DNA, 15 bp, Homo sapiens
cagcctctccagtgt

SEQ ID NO: 1167027 - DNA, 15 bp, Homo sapiens
acagcctctccagtg

SEQ ID NO: 1167028 - DNA, 15 bp, Homo sapiens
gacagcctctccagt

SEQ ID NO: 1167029 - DNA, 15 bp, Homo sapiens
agacagcctctccag

SEQ ID NO: 1167030 - DNA, 15 bp, Homo sapiens
cagacagcctctcca

SEQ ID NO: 1167031 - DNA, 15 bp, Homo sapiens
tcagacagcctctcc

SEQ ID NO: 1167032 - DNA, 15 bp, Homo sapiens
ctcagacagcctctc

SEQ ID NO: 1167033 - DNA, 15 bp, Homo sapiens
tctcagacagcctct

SEQ ID NO: 1167034 - DNA, 15 bp, Homo sapiens
ctctcagacagcctc

SEQ ID NO: 1167035 - DNA, 15 bp, Homo sapiens
cctctcagacagcct

SEQ ID NO: 1167036 - DNA, 15 bp, Homo sapiens
acctctcagacagcc

SEQ ID NO: 1167037 - DNA, 15 bp, Homo sapiens
cacctctcagacagc

SEQ ID NO: 1167038 - DNA, 15 bp, Homo sapiens
tcacctctcagacag

SEQ ID NO: 1167039 - DNA, 15 bp, Homo sapiens
ctcacctctcagaca

SEQ ID NO: 1167040 - DNA, 15 bp, Homo sapiens
tctcacctctcagac

SEQ ID NO: 1167041 - DNA, 15 bp, Homo sapiens
ctctcacctctcaga

SEQ ID NO: 1167042 - DNA, 15 bp, Homo sapiens
actctcacctctcag

SEQ ID NO: 1167043 - DNA, 15 bp, Homo sapiens
acactctcacctctc

SEQ ID NO: 1167044 - DNA, 15 bp, Homo sapiens
cacactctcacctct

SEQ ID NO: 1167045 - DNA, 15 bp, Homo sapiens
ccacactctcacctc

SEQ ID NO: 1167046 - DNA, 15 bp, Homo sapiens
tgccacactctcacc

SEQ ID NO: 1167047 - DNA, 15 bp, Homo sapiens
ctgccacactctcac

SEQ ID NO: 1167048 - DNA, 15 bp, Homo sapiens
cctgccacactctca

SEQ ID NO: 1167049 - DNA, 15 bp, Homo sapiens
ccctgccacactctc

SEQ ID NO: 1167050 - DNA, 15 bp, Homo sapiens
cccctgccacactct

SEQ ID NO: 1167051 - DNA, 15 bp, Homo sapiens
gcccctgccacactc

SEQ ID NO: 1167052 - DNA, 15 bp, Homo sapiens
agcccctgccacact

SEQ ID NO: 1167053 - DNA, 15 bp, Homo sapiens
cagcccctgccacac

SEQ ID NO: 1167054 - DNA, 15 bp, Homo sapiens
acagcccctgccaca

SEQ ID NO: 1167055 - DNA, 15 bp, Homo sapiens
gacagcccctgccac

SEQ ID NO: 1167056 - DNA, 15 bp, Homo sapiens
agacagcccctgcca

SEQ ID NO: 1167057 - DNA, 15 bp, Homo sapiens
cagacagcccctgcc

SEQ ID NO: 1167058 - DNA, 15 bp, Homo sapiens
ccagacagcccctgc

SEQ ID NO: 1167059 - DNA, 15 bp, Homo sapiens
gccagacagcccctg

SEQ ID NO: 1167060 - DNA, 15 bp, Homo sapiens
ggccagacagcccct

SEQ ID NO: 1167061 - DNA, 15 bp, Homo sapiens
tggccagacagcccc

SEQ ID NO: 1167062 - DNA, 15 bp, Homo sapiens
atggccagacagccc

SEQ ID NO: 1167063 - DNA, 15 bp, Homo sapiens
tatggccagacagcc

SEQ ID NO: 1167064 - DNA, 15 bp, Homo sapiens
ttatggccagacagc

SEQ ID NO: 1167065 - DNA, 15 bp, Homo sapiens
attatggccagacag

SEQ ID NO: 1167066 - DNA, 15 bp, Homo sapiens
gattatggccagaca

SEQ ID NO: 1167067 - DNA, 15 bp, Homo sapiens
tgattatggccagac

SEQ ID NO: 1167068 - DNA, 15 bp, Homo sapiens
ctgattatggccaga

SEQ ID NO: 1167069 - DNA, 15 bp, Homo sapiens
tctgattatggccag

SEQ ID NO: 1167070 - DNA, 15 bp, Homo sapiens
ttctgattatggcca

SEQ ID NO: 1167071 - DNA, 15 bp, Homo sapiens
attctgattatggcc

SEQ ID NO: 1167072 - DNA, 15 bp, Homo sapiens
cattctgattatggc

SEQ ID NO: 1167073 - DNA, 15 bp, Homo sapiens
acattctgattatgg

SEQ ID NO: 1167074 - DNA, 15 bp, Homo sapiens
cacattctgattatg

SEQ ID NO: 1167075 - DNA, 15 bp, Homo sapiens
tcacattctgattat

SEQ ID NO: 1167076 - DNA, 15 bp, Homo sapiens
atcacattctgatta

SEQ ID NO: 1167077 - DNA, 15 bp, Homo sapiens
aatcacattctgatt

SEQ ID NO: 1167078 - DNA, 15 bp, Homo sapiens
caatcacattctgat

SEQ ID NO: 1167079 - DNA, 15 bp, Homo sapiens
acaatcacattctga

SEQ ID NO: 1167080 - DNA, 15 bp, Homo sapiens
cacaatcacattctg

SEQ ID NO: 1167081 - DNA, 15 bp, Homo sapiens
ccacaatcacattct

SEQ ID NO: 1167082 - DNA, 15 bp, Homo sapiens
tccacaatcacattc

SEQ ID NO: 1167083 - DNA, 15 bp, Homo sapiens
ctccacaatcacatt

SEQ ID NO: 1167084 - DNA, 15 bp, Homo sapiens
cctccacaatcacat

SEQ ID NO: 1167085 - DNA, 15 bp, Homo sapiens
tcctccacaatcaca

SEQ ID NO: 1167086 - DNA, 15 bp, Homo sapiens
ttcctccacaatcac

SEQ ID NO: 1167087 - DNA, 15 bp, Homo sapiens
gttcctccacaatca

SEQ ID NO: 1167088 - DNA, 15 bp, Homo sapiens
tgttcctccacaatc

SEQ ID NO: 1167089 - DNA, 15 bp, Homo sapiens
ttgttcctccacaat

SEQ ID NO: 1167090 - DNA, 15 bp, Homo sapiens
gttgttcctccacaa

SEQ ID NO: 1167091 - DNA, 15 bp, Homo sapiens
ggttgttcctccaca

SEQ ID NO: 1167092 - DNA, 15 bp, Homo sapiens
aggttgttcctccac

SEQ ID NO: 1167093 - DNA, 15 bp, Homo sapiens
caggttgttcctcca

SEQ ID NO: 1167094 - DNA, 15 bp, Homo sapiens
tcaggttgttcctcc

SEQ ID NO: 1167095 - DNA, 15 bp, Homo sapiens
ttcaggttgttcctc

SEQ ID NO: 1167096 - DNA, 15 bp, Homo sapiens
gttcaggttgttcct

SEQ ID NO: 1167097 - DNA, 15 bp, Homo sapiens
ggttcaggttgttcc

SEQ ID NO: 1167098 - DNA, 15 bp, Homo sapiens
tggttcaggttgttc

SEQ ID NO: 1167099 - DNA, 15 bp, Homo sapiens
ttggttcaggttgtt

SEQ ID NO: 1167100 - DNA, 15 bp, Homo sapiens
attggttcaggttgt

SEQ ID NO: 1167101 - DNA, 15 bp, Homo sapiens
cattggttcaggttg

SEQ ID NO: 1167102 - DNA, 15 bp, Homo sapiens
gcattggttcaggtt

SEQ ID NO: 1167103 - DNA, 15 bp, Homo sapiens
ggcattggttcaggt

SEQ ID NO: 1167104 - DNA, 15 bp, Homo sapiens
gggcattggttcagg

SEQ ID NO: 1167105 - DNA, 15 bp, Homo sapiens
ggggcattggttcag

SEQ ID NO: 1167106 - DNA, 15 bp, Homo sapiens
aggggcattggttca

SEQ ID NO: 1167107 - DNA, 15 bp, Homo sapiens
gaggggcattggttc

SEQ ID NO: 1167108 - DNA, 15 bp, Homo sapiens
tgaggggcattggtt

SEQ ID NO: 1167109 - DNA, 15 bp, Homo sapiens
atgaggggcattggt

SEQ ID NO: 1167110 - DNA, 15 bp, Homo sapiens
catgaggggcattgg

SEQ ID NO: 1167111 - DNA, 15 bp, Homo sapiens
ccatgaggggcattg

SEQ ID NO: 1167112 - DNA, 15 bp, Homo sapiens
gccatgaggggcatt

SEQ ID NO: 1167113 - DNA, 15 bp, Homo sapiens
agccatgaggggcat

SEQ ID NO: 1167114 - DNA, 15 bp, Homo sapiens
cagccatgaggggca

SEQ ID NO: 1167115 - DNA, 15 bp, Homo sapiens
ccagccatgaggggc

SEQ ID NO: 1167116 - DNA, 15 bp, Homo sapiens
tccagccatgagggg

SEQ ID NO: 1167117 - DNA, 15 bp, Homo sapiens
ctccagccatgaggg

SEQ ID NO: 1167118 - DNA, 15 bp, Homo sapiens
cctccagccatgagg

SEQ ID NO: 1167119 - DNA, 15 bp, Homo sapiens
tcctccagccatgag

SEQ ID NO: 1167120 - DNA, 15 bp, Homo sapiens
ctcctccagccatga

SEQ ID NO: 1167121 - DNA, 15 bp, Homo sapiens
actcctccagccatg

SEQ ID NO: 1167122 - DNA, 15 bp, Homo sapiens
gactcctccagccat

SEQ ID NO: 1167123 - DNA, 15 bp, Homo sapiens
agactcctccagcca

SEQ ID NO: 1167124 - DNA, 15 bp, Homo sapiens
cagactcctccagcc

SEQ ID NO: 1167125 - DNA, 15 bp, Homo sapiens
tcagactcctccagc

SEQ ID NO: 1167126 - DNA, 15 bp, Homo sapiens
ttcagactcctccag

SEQ ID NO: 1167127 - DNA, 15 bp, Homo sapiens
tttcagactcctcca

SEQ ID NO: 1167128 - DNA, 15 bp, Homo sapiens
ttttcagactcctcc

SEQ ID NO: 1167129 - DNA, 15 bp, Homo sapiens
cttttcagactcctc

SEQ ID NO: 1167130 - DNA, 15 bp, Homo sapiens
tcttttcagactcct

SEQ ID NO: 1167131 - DNA, 15 bp, Homo sapiens
ttcttttcagactcc

SEQ ID NO: 1167132 - DNA, 15 bp, Homo sapiens
gttcttttcagactc

SEQ ID NO: 1167133 - DNA, 15 bp, Homo sapiens
tgttcttttcagact

SEQ ID NO: 1167134 - DNA, 15 bp, Homo sapiens
atgttcttttcagac

SEQ ID NO: 1167135 - DNA, 15 bp, Homo sapiens
aatgttcttttcaga

SEQ ID NO: 1167136 - DNA, 15 bp, Homo sapiens
taatgttcttttcag

SEQ ID NO: 1167137 - DNA, 15 bp, Homo sapiens
gtaatgttcttttca

SEQ ID NO: 1167138 - DNA, 15 bp, Homo sapiens
tgtaatgttcttttc

SEQ ID NO: 1167139 - DNA, 15 bp, Homo sapiens
atgtaatgttctttt

SEQ ID NO: 1167140 - DNA, 15 bp, Homo sapiens
catgtaatgttcttt

SEQ ID NO: 1167141 - DNA, 15 bp, Homo sapiens
gcatgtaatgttctt

SEQ ID NO: 1167142 - DNA, 15 bp, Homo sapiens
agcatgtaatgttct

SEQ ID NO: 1167143 - DNA, 15 bp, Homo sapiens
cagcatgtaatgttc

SEQ ID NO: 1167144 - DNA, 15 bp, Homo sapiens
ccagcatgtaatgtt

SEQ ID NO: 1167145 - DNA, 15 bp, Homo sapiens
tccagcatgtaatgt

SEQ ID NO: 1167146 - DNA, 15 bp, Homo sapiens
ctccagcatgtaatg

SEQ ID NO: 1167147 - DNA, 15 bp, Homo sapiens
gctccagcatgtaat

SEQ ID NO: 1167148 - DNA, 15 bp, Homo sapiens
agctccagcatgtaa

SEQ ID NO: 1167149 - DNA, 15 bp, Homo sapiens
cagctccagcatgta

SEQ ID NO: 1167150 - DNA, 15 bp, Homo sapiens
acagctccagcatgt

SEQ ID NO: 1167151 - DNA, 15 bp, Homo sapiens
aacagctccagcatg

SEQ ID NO: 1167152 - DNA, 15 bp, Homo sapiens
aaacagctccagcat

SEQ ID NO: 1167153 - DNA, 15 bp, Homo sapiens
caaacagctccagca

SEQ ID NO: 1167154 - DNA, 15 bp, Homo sapiens
gcaaacagctccagc

SEQ ID NO: 1167155 - DNA, 15 bp, Homo sapiens
agcaaacagctccag

SEQ ID NO: 1167156 - DNA, 15 bp, Homo sapiens
cagcaaacagctcca

SEQ ID NO: 1167157 - DNA, 15 bp, Homo sapiens
tcagcaaacagctcc

SEQ ID NO: 1167158 - DNA, 15 bp, Homo sapiens
atcagcaaacagctc

SEQ ID NO: 1167159 - DNA, 15 bp, Homo sapiens
gatcagcaaacagct

SEQ ID NO: 1167160 - DNA, 15 bp, Homo sapiens
agatcagcaaacagc

SEQ ID NO: 1167161 - DNA, 15 bp, Homo sapiens
gagatcagcaaacag

SEQ ID NO: 1167162 - DNA, 15 bp, Homo sapiens
agagatcagcaaaca

SEQ ID NO: 1167163 - DNA, 15 bp, Homo sapiens
gagagatcagcaaac

SEQ ID NO: 1167164 - DNA, 15 bp, Homo sapiens
ggagagatcagcaaa

SEQ ID NO: 1167165 - DNA, 15 bp, Homo sapiens
cggagagatcagcaa

SEQ ID NO: 1167166 - DNA, 15 bp, Homo sapiens
acggagagatcagca

SEQ ID NO: 1167167 - DNA, 15 bp, Homo sapiens
gacggagagatcagc

SEQ ID NO: 1167168 - DNA, 15 bp, Homo sapiens
ggacggagagatcag

SEQ ID NO: 1167169 - DNA, 15 bp, Homo sapiens
tggacggagagatca

SEQ ID NO: 1167170 - DNA, 15 bp, Homo sapiens
ctggacggagagatc

SEQ ID NO: 1167171 - DNA, 15 bp, Homo sapiens
cctggacggagagat

SEQ ID NO: 1167172 - DNA, 15 bp, Homo sapiens
acctggacggagaga

SEQ ID NO: 1167173 - DNA, 15 bp, Homo sapiens
cacctggacggagag

SEQ ID NO: 1167174 - DNA, 15 bp, Homo sapiens
acacctggacggaga

SEQ ID NO: 1167175 - DNA, 15 bp, Homo sapiens
aacacctggacggag

SEQ ID NO: 1167176 - DNA, 15 bp, Homo sapiens
taacacctggacgga

SEQ ID NO: 1167177 - DNA, 15 bp, Homo sapiens
ctaacacctggacgg

SEQ ID NO: 1167178 - DNA, 15 bp, Homo sapiens
gctaacacctggacg

SEQ ID NO: 1167179 - DNA, 15 bp, Homo sapiens
ggctaacacctggac

SEQ ID NO: 1167180 - DNA, 15 bp, Homo sapiens
tggctaacacctgga

SEQ ID NO: 1167181 - DNA, 15 bp, Homo sapiens
ttggctaacacctgg

SEQ ID NO: 1167182 - DNA, 15 bp, Homo sapiens
tttggctaacacctg

SEQ ID NO: 1167183 - DNA, 15 bp, Homo sapiens
ctttggctaacacct

SEQ ID NO: 1167184 - DNA, 15 bp, Homo sapiens
actttggctaacacc

SEQ ID NO: 1167185 - DNA, 15 bp, Homo sapiens
gactttggctaacac

SEQ ID NO: 1167186 - DNA, 15 bp, Homo sapiens
tgactttggctaaca

SEQ ID NO: 1167187 - DNA, 15 bp, Homo sapiens
ctgactttggctaac

SEQ ID NO: 1167188 - DNA, 15 bp, Homo sapiens
tctgactttggctaa

SEQ ID NO: 1167189 - DNA, 15 bp, Homo sapiens
atctgactttggcta

SEQ ID NO: 1167190 - DNA, 15 bp, Homo sapiens
catctgactttggct

SEQ ID NO: 1167191 - DNA, 15 bp, Homo sapiens
gcatctgactttggc

SEQ ID NO: 1167192 - DNA, 15 bp, Homo sapiens
agcatctgactttgg

SEQ ID NO: 1167193 - DNA, 15 bp, Homo sapiens
gagcatctgactttg

SEQ ID NO: 1167194 - DNA, 15 bp, Homo sapiens
agagcatctgacttt

SEQ ID NO: 1167195 - DNA, 15 bp, Homo sapiens
cagagcatctgactt

SEQ ID NO: 1167196 - DNA, 15 bp, Homo sapiens
ccagagcatctgact

SEQ ID NO: 1167197 - DNA, 15 bp, Homo sapiens
gccagagcatctgac

SEQ ID NO: 1167198 - DNA, 15 bp, Homo sapiens
ggccagagcatctga

SEQ ID NO: 1167199 - DNA, 15 bp, Homo sapiens
tggccagagcatctg

SEQ ID NO: 1167200 - DNA, 15 bp, Homo sapiens
gtggccagagcatct

SEQ ID NO: 1167201 - DNA, 15 bp, Homo sapiens
tgtggccagagcatc

SEQ ID NO: 1167202 - DNA, 15 bp, Homo sapiens
ctgtggccagagcat

SEQ ID NO: 1167203 - DNA, 15 bp, Homo sapiens
gctgtggccagagca

SEQ ID NO: 1167204 - DNA, 15 bp, Homo sapiens
ggctgtggccagagc

SEQ ID NO: 1167205 - DNA, 15 bp, Homo sapiens
aggctgtggccagag

SEQ ID NO: 1167206 - DNA, 15 bp, Homo sapiens
gaggctgtggccaga

SEQ ID NO: 1167207 - DNA, 15 bp, Homo sapiens
cgaggctgtggccag

SEQ ID NO: 1167208 - DNA, 15 bp, Homo sapiens
ccgaggctgtggcca

SEQ ID NO: 1167209 - DNA, 15 bp, Homo sapiens
cccgaggctgtggcc

SEQ ID NO: 1167210 - DNA, 15 bp, Homo sapiens
acccgaggctgtggc

SEQ ID NO: 1167211 - DNA, 15 bp, Homo sapiens
cacccgaggctgtgg

SEQ ID NO: 1167212 - DNA, 15 bp, Homo sapiens
ccacccgaggctgtg

SEQ ID NO: 1167213 - DNA, 15 bp, Homo sapiens
tccacccgaggctgt

SEQ ID NO: 1167214 - DNA, 15 bp, Homo sapiens
gtccacccgaggctg

SEQ ID NO: 1167215 - DNA, 15 bp, Homo sapiens
tgtccacccgaggct

SEQ ID NO: 1167216 - DNA, 15 bp, Homo sapiens
ttgtccacccgaggc

SEQ ID NO: 1167217 - DNA, 15 bp, Homo sapiens
cttgtccacccgagg

SEQ ID NO: 1167218 - DNA, 15 bp, Homo sapiens
tcttgtccacccgag

SEQ ID NO: 1167219 - DNA, 15 bp, Homo sapiens
ctcttgtccacccga

SEQ ID NO: 1167220 - DNA, 15 bp, Homo sapiens
cctcttgtccacccg

SEQ ID NO: 1167221 - DNA, 15 bp, Homo sapiens
gcctcttgtccaccc

SEQ ID NO: 1167222 - DNA, 15 bp, Homo sapiens
cgcctcttgtccacc

SEQ ID NO: 1167223 - DNA, 15 bp, Homo sapiens
gcgcctcttgtccac

SEQ ID NO: 1167224 - DNA, 15 bp, Homo sapiens
tgcgcctcttgtcca

SEQ ID NO: 1167225 - DNA, 15 bp, Homo sapiens
gtgcgcctcttgtcc

SEQ ID NO: 1167226 - DNA, 15 bp, Homo sapiens
agtgcgcctcttgtc

SEQ ID NO: 1167227 - DNA, 15 bp, Homo sapiens
gagtgcgcctcttgt

SEQ ID NO: 1167228 - DNA, 15 bp, Homo sapiens
tgagtgcgcctcttg

SEQ ID NO: 1167229 - DNA, 15 bp, Homo sapiens
atgagtgcgcctctt

SEQ ID NO: 1167230 - DNA, 15 bp, Homo sapiens
catgagtgcgcctct

SEQ ID NO: 1167231 - DNA, 15 bp, Homo sapiens
tcatgagtgcgcctc

SEQ ID NO: 1167232 - DNA, 15 bp, Homo sapiens
gtcatgagtgcgcct

SEQ ID NO: 1167233 - DNA, 15 bp, Homo sapiens
agtcatgagtgcgcc

SEQ ID NO: 1167234 - DNA, 15 bp, Homo sapiens
gagtcatgagtgcgc

SEQ ID NO: 1167235 - DNA, 15 bp, Homo sapiens
agagtcatgagtgcg

SEQ ID NO: 1167236 - DNA, 15 bp, Homo sapiens
aagagtcatgagtgc

SEQ ID NO: 1167237 - DNA, 15 bp, Homo sapiens
taagagtcatgagtg

SEQ ID NO: 1167238 - DNA, 15 bp, Homo sapiens
ttaagagtcatgagt

SEQ ID NO: 1167239 - DNA, 15 bp, Homo sapiens
gttaagagtcatgag

SEQ ID NO: 1167240 - DNA, 15 bp, Homo sapiens
tgttaagagtcatga

SEQ ID NO: 1167241 - DNA, 15 bp, Homo sapiens
ttgttaagagtcatg

SEQ ID NO: 1167242 - DNA, 15 bp, Homo sapiens
gttgttaagagtcat

SEQ ID NO: 1167243 - DNA, 15 bp, Homo sapiens
tgttgttaagagtca

SEQ ID NO: 1167244 - DNA, 15 bp, Homo sapiens
ctgttgttaagagtc

SEQ ID NO: 1167245 - DNA, 15 bp, Homo sapiens
gctgttgttaagagt

SEQ ID NO: 1167246 - DNA, 15 bp, Homo sapiens
tgctgttgttaagag

SEQ ID NO: 1167247 - DNA, 15 bp, Homo sapiens
gtgctgttgttaaga

SEQ ID NO: 1167248 - DNA, 15 bp, Homo sapiens
ggtgctgttgttaag

SEQ ID NO: 1167249 - DNA, 15 bp, Homo sapiens
aggtgctgttgttaa

SEQ ID NO: 1167250 - DNA, 15 bp, Homo sapiens
taggtgctgttgtta

SEQ ID NO: 1167251 - DNA, 15 bp, Homo sapiens
gtaggtgctgttgtt

SEQ ID NO: 1167252 - DNA, 15 bp, Homo sapiens
ggtaggtgctgttgt

SEQ ID NO: 1167253 - DNA, 15 bp, Homo sapiens
gggtaggtgctgttg

SEQ ID NO: 1167254 - DNA, 15 bp, Homo sapiens
agggtaggtgctgtt

SEQ ID NO: 1167255 - DNA, 15 bp, Homo sapiens
gagggtaggtgctgt

SEQ ID NO: 1167256 - DNA, 15 bp, Homo sapiens
tgagggtaggtgctg

SEQ ID NO: 1167257 - DNA, 15 bp, Homo sapiens
ttgagggtaggtgct

SEQ ID NO: 1167258 - DNA, 15 bp, Homo sapiens
cttgagggtaggtgc

SEQ ID NO: 1167259 - DNA, 15 bp, Homo sapiens
gcttgagggtaggtg

SEQ ID NO: 1167260 - DNA, 15 bp, Homo sapiens
ggcttgagggtaggt

SEQ ID NO: 1167261 - DNA, 15 bp, Homo sapiens
tggcttgagggtagg

SEQ ID NO: 1167262 - DNA, 15 bp, Homo sapiens
ctggcttgagggtag

SEQ ID NO: 1167263 - DNA, 15 bp, Homo sapiens
gctggcttgagggta

SEQ ID NO: 1167264 - DNA, 15 bp, Homo sapiens
tgctggcttgagggt

SEQ ID NO: 1167265 - DNA, 15 bp, Homo sapiens
ttgctggcttgaggg

SEQ ID NO: 1167266 - DNA, 15 bp, Homo sapiens
tttgctggcttgagg

SEQ ID NO: 1167267 - DNA, 15 bp, Homo sapiens
atttgctggcttgag

SEQ ID NO: 1167268 - DNA, 15 bp, Homo sapiens
catttgctggcttga

SEQ ID NO: 1167269 - DNA, 15 bp, Homo sapiens
ccatttgctggcttg

SEQ ID NO: 1167270 - DNA, 15 bp, Homo sapiens
tccatttgctggctt

SEQ ID NO: 1167271 - DNA, 15 bp, Homo sapiens
ctccatttgctggct

SEQ ID NO: 1167272 - DNA, 15 bp, Homo sapiens
cctccatttgctggc

SEQ ID NO: 1167273 - DNA, 15 bp, Homo sapiens
tcctccatttgctgg

SEQ ID NO: 1167274 - DNA, 15 bp, Homo sapiens
ctcctccatttgctg

SEQ ID NO: 1167275 - DNA, 15 bp, Homo sapiens
gctcctccatttgct

SEQ ID NO: 1167276 - DNA, 15 bp, Homo sapiens
ggctcctccatttgc

SEQ ID NO: 1167277 - DNA, 15 bp, Homo sapiens
tggctcctccatttg

SEQ ID NO: 1167278 - DNA, 15 bp, Homo sapiens
ctggctcctccattt

SEQ ID NO: 1167279 - DNA, 15 bp, Homo sapiens
cctggctcctccatt

SEQ ID NO: 1167280 - DNA, 15 bp, Homo sapiens
tcctggctcctccat

SEQ ID NO: 1167281 - DNA, 15 bp, Homo sapiens
atcctggctcctcca

SEQ ID NO: 1167282 - DNA, 15 bp, Homo sapiens
aatcctggctcctcc

SEQ ID NO: 1167283 - DNA, 15 bp, Homo sapiens
aaatcctggctcctc

SEQ ID NO: 1167284 - DNA, 15 bp, Homo sapiens
caaatcctggctcct

SEQ ID NO: 1167285 - DNA, 15 bp, Homo sapiens
tcaaatcctggctcc

SEQ ID NO: 1167286 - DNA, 15 bp, Homo sapiens
ctcaaatcctggctc

SEQ ID NO: 1167287 - DNA, 15 bp, Homo sapiens
gctcaaatcctggct

SEQ ID NO: 1167288 - DNA, 15 bp, Homo sapiens
ggctcaaatcctggc

SEQ ID NO: 1167289 - DNA, 15 bp, Homo sapiens
gggctcaaatcctgg

SEQ ID NO: 1167290 - DNA, 15 bp, Homo sapiens
tgggctcaaatcctg

SEQ ID NO: 1167291 - DNA, 15 bp, Homo sapiens
ctgggctcaaatcct

SEQ ID NO: 1167292 - DNA, 15 bp, Homo sapiens
cctgggctcaaatcc

SEQ ID NO: 1167293 - DNA, 15 bp, Homo sapiens
acctgggctcaaatc

SEQ ID NO: 1167294 - DNA, 15 bp, Homo sapiens
gacctgggctcaaat

SEQ ID NO: 1167295 - DNA, 15 bp, Homo sapiens
agacctgggctcaaa

SEQ ID NO: 1167296 - DNA, 15 bp, Homo sapiens
cagacctgggctcaa

SEQ ID NO: 1167297 - DNA, 15 bp, Homo sapiens
acagacctgggctca

SEQ ID NO: 1167298 - DNA, 15 bp, Homo sapiens
gacagacctgggctc

SEQ ID NO: 1167299 - DNA, 15 bp, Homo sapiens
agacagacctgggct

SEQ ID NO: 1167300 - DNA, 15 bp, Homo sapiens
cagacagacctgggc

SEQ ID NO: 1167301 - DNA, 15 bp, Homo sapiens
tcagacagacctggg

SEQ ID NO: 1167302 - DNA, 15 bp, Homo sapiens
gtcagacagacctgg

SEQ ID NO: 1167303 - DNA, 15 bp, Homo sapiens
ggtcagacagacctg

SEQ ID NO: 1167304 - DNA, 15 bp, Homo sapiens
gggtcagacagacct

SEQ ID NO: 1167305 - DNA, 15 bp, Homo sapiens
tgggtcagacagacc

SEQ ID NO: 1167306 - DNA, 15 bp, Homo sapiens
ctgggtcagacagac

SEQ ID NO: 1167307 - DNA, 15 bp, Homo sapiens
tctgggtcagacaga

SEQ ID NO: 1167308 - DNA, 15 bp, Homo sapiens
ttctgggtcagacag

SEQ ID NO: 1167309 - DNA, 15 bp, Homo sapiens
gttctgggtcagaca

SEQ ID NO: 1167310 - DNA, 15 bp, Homo sapiens
ggttctgggtcagac

SEQ ID NO: 1167311 - DNA, 15 bp, Homo sapiens
aggttctgggtcaga

SEQ ID NO: 1167312 - DNA, 15 bp, Homo sapiens
caggttctgggtcag

SEQ ID NO: 1167313 - DNA, 15 bp, Homo sapiens
acaggttctgggtca

SEQ ID NO: 1167314 - DNA, 15 bp, Homo sapiens
cacaggttctgggtc

SEQ ID NO: 1167315 - DNA, 15 bp, Homo sapiens
acacaggttctgggt

SEQ ID NO: 1167316 - DNA, 15 bp, Homo sapiens
aacacaggttctggg

SEQ ID NO: 1167317 - DNA, 15 bp, Homo sapiens
gaacacaggttctgg

SEQ ID NO: 1167318 - DNA, 15 bp, Homo sapiens
agaacacaggttctg

SEQ ID NO: 1167319 - DNA, 15 bp, Homo sapiens
gagaacacaggttct

SEQ ID NO: 1167320 - DNA, 15 bp, Homo sapiens
tgagaacacaggttc

SEQ ID NO: 1167321 - DNA, 15 bp, Homo sapiens
ctgagaacacaggtt

SEQ ID NO: 1167322 - DNA, 15 bp, Homo sapiens
gctgagaacacaggt

SEQ ID NO: 1167323 - DNA, 15 bp, Homo sapiens
ggctgagaacacagg

SEQ ID NO: 1167324 - DNA, 15 bp, Homo sapiens
tggctgagaacacag

SEQ ID NO: 1167325 - DNA, 15 bp, Homo sapiens
atggctgagaacaca

SEQ ID NO: 1167326 - DNA, 15 bp, Homo sapiens
aatggctgagaacac

SEQ ID NO: 1167327 - DNA, 15 bp, Homo sapiens
gaatggctgagaaca

SEQ ID NO: 1167328 - DNA, 15 bp, Homo sapiens
agaatggctgagaac

SEQ ID NO: 1167329 - DNA, 15 bp, Homo sapiens
cagaatggctgagaa

SEQ ID NO: 1167330 - DNA, 15 bp, Homo sapiens
gcagaatggctgaga

SEQ ID NO: 1167331 - DNA, 15 bp, Homo sapiens
agcagaatggctgag

SEQ ID NO: 1167332 - DNA, 15 bp, Homo sapiens
cagcagaatggctga

SEQ ID NO: 1167333 - DNA, 15 bp, Homo sapiens
acagcagaatggctg

SEQ ID NO: 1167334 - DNA, 15 bp, Homo sapiens
tacagcagaatggct

SEQ ID NO: 1167335 - DNA, 15 bp, Homo sapiens
atacagcagaatggc

SEQ ID NO: 1167336 - DNA, 15 bp, Homo sapiens
aatacagcagaatgg

SEQ ID NO: 1167337 - DNA, 15 bp, Homo sapiens
taatacagcagaatg

SEQ ID NO: 1167338 - DNA, 15 bp, Homo sapiens
ataatacagcagaat

SEQ ID NO: 1167339 - DNA, 15 bp, Homo sapiens
aataatacagcagaa

SEQ ID NO: 1167340 - DNA, 15 bp, Homo sapiens
gaataatacagcaga

SEQ ID NO: 1167341 - DNA, 15 bp, Homo sapiens
agaataatacagcag

SEQ ID NO: 1167342 - DNA, 15 bp, Homo sapiens
tagaataatacagca

SEQ ID NO: 1167343 - DNA, 15 bp, Homo sapiens
gtagaataatacagc

SEQ ID NO: 1167344 - DNA, 15 bp, Homo sapiens
agtagaataatacag

SEQ ID NO: 1167345 - DNA, 15 bp, Homo sapiens
tagtagaataataca

SEQ ID NO: 1167346 - DNA, 15 bp, Homo sapiens
ctagtagaataatac

SEQ ID NO: 1167347 - DNA, 15 bp, Homo sapiens
actagtagaataata

SEQ ID NO: 1167348 - DNA, 15 bp, Homo sapiens
gactagtagaataat

SEQ ID NO: 1167349 - DNA, 15 bp, Homo sapiens
tgactagtagaataa

SEQ ID NO: 1167350 - DNA, 15 bp, Homo sapiens
ctgactagtagaata

SEQ ID NO: 1167351 - DNA, 15 bp, Homo sapiens
gctgactagtagaat

SEQ ID NO: 1167352 - DNA, 15 bp, Homo sapiens
tgctgactagtagaa

SEQ ID NO: 1167353 - DNA, 15 bp, Homo sapiens
ttgctgactagtaga

SEQ ID NO: 1167354 - DNA, 15 bp, Homo sapiens
tttgctgactagtag

SEQ ID NO: 1167355 - DNA, 15 bp, Homo sapiens
ctttgctgactagta

SEQ ID NO: 1167356 - DNA, 15 bp, Homo sapiens
tctttgctgactagt

SEQ ID NO: 1167357 - DNA, 15 bp, Homo sapiens
ctctttgctgactag

SEQ ID NO: 1167358 - DNA, 15 bp, Homo sapiens
gctctttgctgacta

SEQ ID NO: 1167359 - DNA, 15 bp, Homo sapiens
agctctttgctgact

SEQ ID NO: 1167360 - DNA, 15 bp, Homo sapiens
gagctctttgctgac

SEQ ID NO: 1167361 - DNA, 15 bp, Homo sapiens
ggagctctttgctga

SEQ ID NO: 1167362 - DNA, 15 bp, Homo sapiens
tggagctctttgctg

SEQ ID NO: 1167363 - DNA, 15 bp, Homo sapiens
atggagctctttgct

SEQ ID NO: 1167364 - DNA, 15 bp, Homo sapiens
tatggagctctttgc

SEQ ID NO: 1167365 - DNA, 15 bp, Homo sapiens
ttatggagctctttg

SEQ ID NO: 1167366 - DNA, 15 bp, Homo sapiens
cttatggagctcttt

SEQ ID NO: 1167367 - DNA, 15 bp, Homo sapiens
tcttatggagctctt

SEQ ID NO: 1167368 - DNA, 15 bp, Homo sapiens
ttcttatggagctct

SEQ ID NO: 1167369 - DNA, 15 bp, Homo sapiens
cttcttatggagctc

SEQ ID NO: 1167370 - DNA, 15 bp, Homo sapiens
gcttcttatggagct

SEQ ID NO: 1167371 - DNA, 15 bp, Homo sapiens
tgcttcttatggagc

SEQ ID NO: 1167372 - DNA, 15 bp, Homo sapiens
atgcttcttatggag

SEQ ID NO: 1167373 - DNA, 15 bp, Homo sapiens
gatgcttcttatgga

SEQ ID NO: 1167374 - DNA, 15 bp, Homo sapiens
ggatgcttcttatgg

SEQ ID NO: 1167375 - DNA, 15 bp, Homo sapiens
tggatgcttcttatg

SEQ ID NO: 1167376 - DNA, 15 bp, Homo sapiens
atggatgcttcttat

SEQ ID NO: 1167377 - DNA, 15 bp, Homo sapiens
aatggatgcttctta

SEQ ID NO: 1167378 - DNA, 15 bp, Homo sapiens
aaatggatgcttctt

SEQ ID NO: 1167379 - DNA, 15 bp, Homo sapiens
caaatggatgcttct

SEQ ID NO: 1167380 - DNA, 15 bp, Homo sapiens
acaaatggatgcttc

SEQ ID NO: 1167381 - DNA, 15 bp, Homo sapiens
gacaaatggatgctt

SEQ ID NO: 1167382 - DNA, 15 bp, Homo sapiens
ggacaaatggatgct

SEQ ID NO: 1167383 - DNA, 15 bp, Homo sapiens
tggacaaatggatgc

SEQ ID NO: 1167384 - DNA, 15 bp, Homo sapiens
ttggacaaatggatg

SEQ ID NO: 1167385 - DNA, 15 bp, Homo sapiens
tttggacaaatggat

SEQ ID NO: 1167386 - DNA, 15 bp, Homo sapiens
ctttggacaaatgga

SEQ ID NO: 1167387 - DNA, 15 bp, Homo sapiens
cctttggacaaatgg

SEQ ID NO: 1167388 - DNA, 15 bp, Homo sapiens
tcctttggacaaatg

SEQ ID NO: 1167389 - DNA, 15 bp, Homo sapiens
gtcctttggacaaat

SEQ ID NO: 1167390 - DNA, 15 bp, Homo sapiens
ggtcctttggacaaa

SEQ ID NO: 1167391 - DNA, 15 bp, Homo sapiens
tggtcctttggacaa

SEQ ID NO: 1167392 - DNA, 15 bp, Homo sapiens
atggtcctttggaca

SEQ ID NO: 1167393 - DNA, 15 bp, Homo sapiens
aatggtcctttggac

SEQ ID NO: 1167394 - DNA, 15 bp, Homo sapiens
gaatggtcctttgga

SEQ ID NO: 1167395 - DNA, 15 bp, Homo sapiens
agaatggtcctttgg

SEQ ID NO: 1167396 - DNA, 15 bp, Homo sapiens
cagaatggtcctttg

SEQ ID NO: 1167397 - DNA, 15 bp, Homo sapiens
acagaatggtccttt

SEQ ID NO: 1167398 - DNA, 15 bp, Homo sapiens
tacagaatggtcctt

SEQ ID NO: 1167399 - DNA, 15 bp, Homo sapiens
atacagaatggtcct

SEQ ID NO: 1167400 - DNA, 15 bp, Homo sapiens
gatacagaatggtcc

SEQ ID NO: 1167401 - DNA, 15 bp, Homo sapiens
ggatacagaatggtc

SEQ ID NO: 1167402 - DNA, 15 bp, Homo sapiens
gggatacagaatggt

SEQ ID NO: 1167403 - DNA, 15 bp, Homo sapiens
tgggatacagaatgg

SEQ ID NO: 1167404 - DNA, 15 bp, Homo sapiens
ctgggatacagaatg

SEQ ID NO: 1167405 - DNA, 15 bp, Homo sapiens
cctgggatacagaat

SEQ ID NO: 1167406 - DNA, 15 bp, Homo sapiens
tcctgggatacagaa

SEQ ID NO: 1167407 - DNA, 15 bp, Homo sapiens
ctcctgggatacaga

SEQ ID NO: 1167408 - DNA, 15 bp, Homo sapiens
tctcctgggatacag

SEQ ID NO: 1167409 - DNA, 15 bp, Homo sapiens
ctctcctgggataca

SEQ ID NO: 1167410 - DNA, 15 bp, Homo sapiens
tctctcctgggatac

SEQ ID NO: 1167411 - DNA, 15 bp, Homo sapiens
ttctctcctgggata

SEQ ID NO: 1167412 - DNA, 15 bp, Homo sapiens
tttctctcctgggat

SEQ ID NO: 1167413 - DNA, 15 bp, Homo sapiens
gtttctctcctggga

SEQ ID NO: 1167414 - DNA, 15 bp, Homo sapiens
ggtttctctcctggg

SEQ ID NO: 1167415 - DNA, 15 bp, Homo sapiens
tggtttctctcctgg

SEQ ID NO: 1167416 - DNA, 15 bp, Homo sapiens
atggtttctctcctg

SEQ ID NO: 1167417 - DNA, 15 bp, Homo sapiens
aatggtttctctcct

SEQ ID NO: 1167418 - DNA, 15 bp, Homo sapiens
caatggtttctctcc

SEQ ID NO: 1167419 - DNA, 15 bp, Homo sapiens
gcaatggtttctctc

SEQ ID NO: 1167420 - DNA, 15 bp, Homo sapiens
ggcaatggtttctct

SEQ ID NO: 1167421 - DNA, 15 bp, Homo sapiens
gggcaatggtttctc

SEQ ID NO: 1167422 - DNA, 15 bp, Homo sapiens
tgggcaatggtttct

SEQ ID NO: 1167423 - DNA, 15 bp, Homo sapiens
ctgggcaatggtttc

SEQ ID NO: 1167424 - DNA, 15 bp, Homo sapiens
gctgggcaatggttt

SEQ ID NO: 1167425 - DNA, 15 bp, Homo sapiens
cgctgggcaatggtt

SEQ ID NO: 1167426 - DNA, 15 bp, Homo sapiens
tcgctgggcaatggt

SEQ ID NO: 1167427 - DNA, 15 bp, Homo sapiens
atcgctgggcaatgg

SEQ ID NO: 1167428 - DNA, 15 bp, Homo sapiens
aatcgctgggcaatg

SEQ ID NO: 1167429 - DNA, 15 bp, Homo sapiens
aaatcgctgggcaat

SEQ ID NO: 1167430 - DNA, 15 bp, Homo sapiens
caaatcgctgggcaa

SEQ ID NO: 1167431 - DNA, 15 bp, Homo sapiens
gcaaatcgctgggca

SEQ ID NO: 1167432 - DNA, 15 bp, Homo sapiens
ggcaaatcgctgggc

SEQ ID NO: 1167433 - DNA, 15 bp, Homo sapiens
aggcaaatcgctggg

SEQ ID NO: 1167434 - DNA, 15 bp, Homo sapiens
aaggcaaatcgctgg

SEQ ID NO: 1167435 - DNA, 15 bp, Homo sapiens
aaaggcaaatcgctg

SEQ ID NO: 1167436 - DNA, 15 bp, Homo sapiens
gaaaggcaaatcgct

SEQ ID NO: 1167437 - DNA, 15 bp, Homo sapiens
ggaaaggcaaatcgc

SEQ ID NO: 1167438 - DNA, 15 bp, Homo sapiens
cggaaaggcaaatcg

SEQ ID NO: 1167439 - DNA, 15 bp, Homo sapiens
ccggaaaggcaaatc

SEQ ID NO: 1167440 - DNA, 15 bp, Homo sapiens
accggaaaggcaaat

SEQ ID NO: 1167441 - DNA, 15 bp, Homo sapiens
taccggaaaggcaaa

SEQ ID NO: 1167442 - DNA, 15 bp, Homo sapiens
gtaccggaaaggcaa

SEQ ID NO: 1167443 - DNA, 15 bp, Homo sapiens
ggtaccggaaaggca

SEQ ID NO: 1167444 - DNA, 15 bp, Homo sapiens
aggtaccggaaaggc

SEQ ID NO: 1167445 - DNA, 15 bp, Homo sapiens
caggtaccggaaagg

SEQ ID NO: 1167446 - DNA, 15 bp, Homo sapiens
tcaggtaccggaaag

SEQ ID NO: 1167447 - DNA, 15 bp, Homo sapiens
ctcaggtaccggaaa

SEQ ID NO: 1167448 - DNA, 15 bp, Homo sapiens
gctcaggtaccggaa

SEQ ID NO: 1167449 - DNA, 15 bp, Homo sapiens
agctcaggtaccgga

SEQ ID NO: 1167450 - DNA, 15 bp, Homo sapiens
gagctcaggtaccgg

SEQ ID NO: 1167451 - DNA, 15 bp, Homo sapiens
ggagctcaggtaccg

SEQ ID NO: 1167452 - DNA, 15 bp, Homo sapiens
gggagctcaggtacc

SEQ ID NO: 1167453 - DNA, 15 bp, Homo sapiens
agggagctcaggtac

SEQ ID NO: 1167454 - DNA, 15 bp, Homo sapiens
tagggagctcaggta

SEQ ID NO: 1167455 - DNA, 15 bp, Homo sapiens
atagggagctcaggt

SEQ ID NO: 1167456 - DNA, 15 bp, Homo sapiens
catagggagctcagg

SEQ ID NO: 1167457 - DNA, 15 bp, Homo sapiens
tcatagggagctcag

SEQ ID NO: 1167458 - DNA, 15 bp, Homo sapiens
atcatagggagctca

SEQ ID NO: 1167459 - DNA, 15 bp, Homo sapiens
catcatagggagctc

SEQ ID NO: 1167460 - DNA, 15 bp, Homo sapiens
ccatcatagggagct

SEQ ID NO: 1167461 - DNA, 15 bp, Homo sapiens
gccatcatagggagc

SEQ ID NO: 1167462 - DNA, 15 bp, Homo sapiens
ggccatcatagggag

SEQ ID NO: 1167463 - DNA, 15 bp, Homo sapiens
tggccatcataggga

SEQ ID NO: 1167464 - DNA, 15 bp, Homo sapiens
ctggccatcataggg

SEQ ID NO: 1167465 - DNA, 15 bp, Homo sapiens
gctggccatcatagg

SEQ ID NO: 1167466 - DNA, 15 bp, Homo sapiens
tgctggccatcatag

SEQ ID NO: 1167467 - DNA, 15 bp, Homo sapiens
atgctggccatcata

SEQ ID NO: 1167468 - DNA, 15 bp, Homo sapiens
gatgctggccatcat

SEQ ID NO: 1167469 - DNA, 15 bp, Homo sapiens
agatgctggccatca

SEQ ID NO: 1167470 - DNA, 15 bp, Homo sapiens
cagatgctggccatc

SEQ ID NO: 1167471 - DNA, 15 bp, Homo sapiens
gcagatgctggccat

SEQ ID NO: 1167472 - DNA, 15 bp, Homo sapiens
ggcagatgctggcca

SEQ ID NO: 1167473 - DNA, 15 bp, Homo sapiens
gggcagatgctggcc

SEQ ID NO: 1167474 - DNA, 15 bp, Homo sapiens
tgggcagatgctggc

SEQ ID NO: 1167475 - DNA, 15 bp, Homo sapiens
gtgggcagatgctgg

SEQ ID NO: 1167476 - DNA, 15 bp, Homo sapiens
agtgggcagatgctg

SEQ ID NO: 1167477 - DNA, 15 bp, Homo sapiens
aagtgggcagatgct

SEQ ID NO: 1167478 - DNA, 15 bp, Homo sapiens
gaagtgggcagatgc

SEQ ID NO: 1167479 - DNA, 15 bp, Homo sapiens
agaagtgggcagatg

SEQ ID NO: 1167480 - DNA, 15 bp, Homo sapiens
gagaagtgggcagat

SEQ ID NO: 1167481 - DNA, 15 bp, Homo sapiens
tgagaagtgggcaga

SEQ ID NO: 1167482 - DNA, 15 bp, Homo sapiens
gtgagaagtgggcag

SEQ ID NO: 1167483 - DNA, 15 bp, Homo sapiens
agtgagaagtgggca

SEQ ID NO: 1167484 - DNA, 15 bp, Homo sapiens
aagtgagaagtgggc

SEQ ID NO: 1167485 - DNA, 15 bp, Homo sapiens
aaagtgagaagtggg

SEQ ID NO: 1167486 - DNA, 15 bp, Homo sapiens
caaagtgagaagtgg

SEQ ID NO: 1167487 - DNA, 15 bp, Homo sapiens
tcaaagtgagaagtg

SEQ ID NO: 1167488 - DNA, 15 bp, Homo sapiens
ttcaaagtgagaagt

SEQ ID NO: 1167489 - DNA, 15 bp, Homo sapiens
cttcaaagtgagaag

SEQ ID NO: 1167490 - DNA, 15 bp, Homo sapiens
gcttcaaagtgagaa

SEQ ID NO: 1167491 - DNA, 15 bp, Homo sapiens
agcttcaaagtgaga

SEQ ID NO: 1167492 - DNA, 15 bp, Homo sapiens
aagcttcaaagtgag

SEQ ID NO: 1167493 - DNA, 15 bp, Homo sapiens
taagcttcaaagtga

SEQ ID NO: 1167494 - DNA, 15 bp, Homo sapiens
ctaagcttcaaagtg

SEQ ID NO: 1167495 - DNA, 15 bp, Homo sapiens
cctaagcttcaaagt

SEQ ID NO: 1167496 - DNA, 15 bp, Homo sapiens
acctaagcttcaaag

SEQ ID NO: 1167497 - DNA, 15 bp, Homo sapiens
aacctaagcttcaaa

SEQ ID NO: 1167498 - DNA, 15 bp, Homo sapiens
gaacctaagcttcaa

SEQ ID NO: 1167499 - DNA, 15 bp, Homo sapiens
agaacctaagcttca

SEQ ID NO: 1167500 - DNA, 15 bp, Homo sapiens
cagaacctaagcttc

SEQ ID NO: 1167501 - DNA, 15 bp, Homo sapiens
ccagaacctaagctt

SEQ ID NO: 1167502 - DNA, 15 bp, Homo sapiens
tccagaacctaagct

SEQ ID NO: 1167503 - DNA, 15 bp, Homo sapiens
atccagaacctaagc

SEQ ID NO: 1167504 - DNA, 15 bp, Homo sapiens
catccagaacctaag

SEQ ID NO: 1167505 - DNA, 15 bp, Homo sapiens
gcatccagaacctaa

SEQ ID NO: 1167506 - DNA, 15 bp, Homo sapiens
ggcatccagaaccta

SEQ ID NO: 1167507 - DNA, 15 bp, Homo sapiens
gggcatccagaacct

SEQ ID NO: 1167508 - DNA, 15 bp, Homo sapiens
tgggcatccagaacc

SEQ ID NO: 1167509 - DNA, 15 bp, Homo sapiens
ctgggcatccagaac

SEQ ID NO: 1167510 - DNA, 15 bp, Homo sapiens
gctgggcatccagaa

SEQ ID NO: 1167511 - DNA, 15 bp, Homo sapiens
agctgggcatccaga

SEQ ID NO: 1167512 - DNA, 15 bp, Homo sapiens
gagctgggcatccag

SEQ ID NO: 1167513 - DNA, 15 bp, Homo sapiens
tgagctgggcatcca

SEQ ID NO: 1167514 - DNA, 15 bp, Homo sapiens
gtgagctgggcatcc

SEQ ID NO: 1167515 - DNA, 15 bp, Homo sapiens
tgtgagctgggcatc

SEQ ID NO: 1167516 - DNA, 15 bp, Homo sapiens
ttgtgagctgggcat

SEQ ID NO: 1167517 - DNA, 15 bp, Homo sapiens
cttgtgagctgggca

SEQ ID NO: 1167518 - DNA, 15 bp, Homo sapiens
tcttgtgagctgggc

SEQ ID NO: 1167519 - DNA, 15 bp, Homo sapiens
ttcttgtgagctggg

SEQ ID NO: 1167520 - DNA, 15 bp, Homo sapiens
attcttgtgagctgg

SEQ ID NO: 1167521 - DNA, 15 bp, Homo sapiens
aattcttgtgagctg

SEQ ID NO: 1167522 - DNA, 15 bp, Homo sapiens
gaattcttgtgagct

SEQ ID NO: 1167523 - DNA, 15 bp, Homo sapiens
agaattcttgtgagc

SEQ ID NO: 1167524 - DNA, 15 bp, Homo sapiens
cagaattcttgtgag

SEQ ID NO: 1167525 - DNA, 15 bp, Homo sapiens
ccagaattcttgtga

SEQ ID NO: 1167526 - DNA, 15 bp, Homo sapiens
gccagaattcttgtg

SEQ ID NO: 1167527 - DNA, 15 bp, Homo sapiens
tgccagaattcttgt

SEQ ID NO: 1167528 - DNA, 15 bp, Homo sapiens
ctgccagaattcttg

SEQ ID NO: 1167529 - DNA, 15 bp, Homo sapiens
gctgccagaattctt

SEQ ID NO: 1167530 - DNA, 15 bp, Homo sapiens
agctgccagaattct

SEQ ID NO: 1167531 - DNA, 15 bp, Homo sapiens
cagctgccagaattc

SEQ ID NO: 1167532 - DNA, 15 bp, Homo sapiens
ccagctgccagaatt

SEQ ID NO: 1167533 - DNA, 15 bp, Homo sapiens
cccagctgccagaat

SEQ ID NO: 1167534 - DNA, 15 bp, Homo sapiens
tcccagctgccagaa

SEQ ID NO: 1167535 - DNA, 15 bp, Homo sapiens
ctcccagctgccaga

SEQ ID NO: 1167536 - DNA, 15 bp, Homo sapiens
tctcccagctgccag

SEQ ID NO: 1167537 - DNA, 15 bp, Homo sapiens
atctcccagctgcca

SEQ ID NO: 1167538 - DNA, 15 bp, Homo sapiens
catctcccagctgcc

SEQ ID NO: 1167539 - DNA, 15 bp, Homo sapiens
acatctcccagctgc

SEQ ID NO: 1167540 - DNA, 15 bp, Homo sapiens
gacatctcccagctg

SEQ ID NO: 1167541 - DNA, 15 bp, Homo sapiens
ggacatctcccagct

SEQ ID NO: 1167542 - DNA, 15 bp, Homo sapiens
tggacatctcccagc

SEQ ID NO: 1167543 - DNA, 15 bp, Homo sapiens
ctggacatctcccag

SEQ ID NO: 1167544 - DNA, 15 bp, Homo sapiens
cctggacatctccca

SEQ ID NO: 1167545 - DNA, 15 bp, Homo sapiens
ccctggacatctccc

SEQ ID NO: 1167546 - DNA, 15 bp, Homo sapiens
gccctggacatctcc

SEQ ID NO: 1167547 - DNA, 15 bp, Homo sapiens
tgccctggacatctc

SEQ ID NO: 1167548 - DNA, 15 bp, Homo sapiens
atgccctggacatct

SEQ ID NO: 1167549 - DNA, 15 bp, Homo sapiens
gatgccctggacatc

SEQ ID NO: 1167550 - DNA, 15 bp, Homo sapiens
agatgccctggacat

SEQ ID NO: 1167551 - DNA, 15 bp, Homo sapiens
aagatgccctggaca

SEQ ID NO: 1167552 - DNA, 15 bp, Homo sapiens
caagatgccctggac

SEQ ID NO: 1167553 - DNA, 15 bp, Homo sapiens
tcaagatgccctgga

SEQ ID NO: 1167554 - DNA, 15 bp, Homo sapiens
ttcaagatgccctgg

SEQ ID NO: 1167555 - DNA, 15 bp, Homo sapiens
gttcaagatgccctg

SEQ ID NO: 1167556 - DNA, 15 bp, Homo sapiens
agttcaagatgccct

SEQ ID NO: 1167557 - DNA, 15 bp, Homo sapiens
cagttcaagatgccc

SEQ ID NO: 1167558 - DNA, 15 bp, Homo sapiens
tcagttcaagatgcc

SEQ ID NO: 1167559 - DNA, 15 bp, Homo sapiens
ctcagttcaagatgc

SEQ ID NO: 1167560 - DNA, 15 bp, Homo sapiens
gctcagttcaagatg

SEQ ID NO: 1167561 - DNA, 15 bp, Homo sapiens
ggctcagttcaagat

SEQ ID NO: 1167562 - DNA, 15 bp, Homo sapiens
tggctcagttcaaga

SEQ ID NO: 1167563 - DNA, 15 bp, Homo sapiens
ctggctcagttcaag

SEQ ID NO: 1167564 - DNA, 15 bp, Homo sapiens
gctggctcagttcaa

SEQ ID NO: 1167565 - DNA, 15 bp, Homo sapiens
agctggctcagttca

SEQ ID NO: 1167566 - DNA, 15 bp, Homo sapiens
cagctggctcagttc

SEQ ID NO: 1167567 - DNA, 15 bp, Homo sapiens
gcagctggctcagtt

SEQ ID NO: 1167568 - DNA, 15 bp, Homo sapiens
agcagctggctcagt

SEQ ID NO: 1167569 - DNA, 15 bp, Homo sapiens
gagcagctggctcag

SEQ ID NO: 1167570 - DNA, 15 bp, Homo sapiens
tgagcagctggctca

SEQ ID NO: 1167571 - DNA, 15 bp, Homo sapiens
ttgagcagctggctc

SEQ ID NO: 1167572 - DNA, 15 bp, Homo sapiens
tttgagcagctggct

SEQ ID NO: 1167573 - DNA, 15 bp, Homo sapiens
gtttgagcagctggc

SEQ ID NO: 1167574 - DNA, 15 bp, Homo sapiens
ggtttgagcagctgg

SEQ ID NO: 1167575 - DNA, 15 bp, Homo sapiens
tggtttgagcagctg

SEQ ID NO: 1167576 - DNA, 15 bp, Homo sapiens
ttggtttgagcagct

SEQ ID NO: 1167577 - DNA, 15 bp, Homo sapiens
cttggtttgagcagc

SEQ ID NO: 1167578 - DNA, 15 bp, Homo sapiens
ccttggtttgagcag

SEQ ID NO: 1167579 - DNA, 15 bp, Homo sapiens
cccttggtttgagca

SEQ ID NO: 1167580 - DNA, 15 bp, Homo sapiens
tcccttggtttgagc

SEQ ID NO: 1167581 - DNA, 15 bp, Homo sapiens
gtcccttggtttgag

SEQ ID NO: 1167582 - DNA, 15 bp, Homo sapiens
ggtcccttggtttga

SEQ ID NO: 1167583 - DNA, 15 bp, Homo sapiens
aggtcccttggtttg

SEQ ID NO: 1167584 - DNA, 15 bp, Homo sapiens
caggtcccttggttt

SEQ ID NO: 1167585 - DNA, 15 bp, Homo sapiens
tcaggtcccttggtt

SEQ ID NO: 1167586 - DNA, 15 bp, Homo sapiens
ctcaggtcccttggt

SEQ ID NO: 1167587 - DNA, 15 bp, Homo sapiens
tctcaggtcccttgg

SEQ ID NO: 1167588 - DNA, 15 bp, Homo sapiens
ctctcaggtcccttg

SEQ ID NO: 1167589 - DNA, 15 bp, Homo sapiens
cctctcaggtccctt

SEQ ID NO: 1167590 - DNA, 15 bp, Homo sapiens
gcctctcaggtccct

SEQ ID NO: 1167591 - DNA, 15 bp, Homo sapiens
ggcctctcaggtccc

SEQ ID NO: 1167592 - DNA, 15 bp, Homo sapiens
tggcctctcaggtcc

SEQ ID NO: 1167593 - DNA, 15 bp, Homo sapiens
ctggcctctcaggtc

SEQ ID NO: 1167594 - DNA, 15 bp, Homo sapiens
cctggcctctcaggt

SEQ ID NO: 1167595 - DNA, 15 bp, Homo sapiens
acctggcctctcagg

SEQ ID NO: 1167596 - DNA, 15 bp, Homo sapiens
gacctggcctctcag

SEQ ID NO: 1167597 - DNA, 15 bp, Homo sapiens
ggacctggcctctca

SEQ ID NO: 1167598 - DNA, 15 bp, Homo sapiens
tggacctggcctctc

SEQ ID NO: 1167599 - DNA, 15 bp, Homo sapiens
gtggacctggcctct

SEQ ID NO: 1167600 - DNA, 15 bp, Homo sapiens
ggtggacctggcctc

SEQ ID NO: 1167601 - DNA, 15 bp, Homo sapiens
aggtggacctggcct

SEQ ID NO: 1167602 - DNA, 15 bp, Homo sapiens
caggtggacctggcc

SEQ ID NO: 1167603 - DNA, 15 bp, Homo sapiens
acaggtggacctggc

SEQ ID NO: 1167604 - DNA, 15 bp, Homo sapiens
cacaggtggacctgg

SEQ ID NO: 1167605 - DNA, 15 bp, Homo sapiens
ccacaggtggacctg

SEQ ID NO: 1167606 - DNA, 15 bp, Homo sapiens
cccacaggtggacct

SEQ ID NO: 1167607 - DNA, 15 bp, Homo sapiens
ccccacaggtggacc

SEQ ID NO: 1167608 - DNA, 15 bp, Homo sapiens
tccccacaggtggac

SEQ ID NO: 1167609 - DNA, 15 bp, Homo sapiens
ctccccacaggtgga

SEQ ID NO: 1167610 - DNA, 15 bp, Homo sapiens
tctccccacaggtgg

SEQ ID NO: 1167611 - DNA, 15 bp, Homo sapiens
atctccccacaggtg

SEQ ID NO: 1167612 - DNA, 15 bp, Homo sapiens
tatctccccacaggt

SEQ ID NO: 1167613 - DNA, 15 bp, Homo sapiens
atatctccccacagg

SEQ ID NO: 1167614 - DNA, 15 bp, Homo sapiens
gatatctccccacag

SEQ ID NO: 1167615 - DNA, 15 bp, Homo sapiens
tgatatctccccaca

SEQ ID NO: 1167616 - DNA, 15 bp, Homo sapiens
ctgatatctccccac

SEQ ID NO: 1167617 - DNA, 15 bp, Homo sapiens
tctgatatctcccca

SEQ ID NO: 1167618 - DNA, 15 bp, Homo sapiens
ttctgatatctcccc

SEQ ID NO: 1167619 - DNA, 15 bp, Homo sapiens
cttctgatatctccc

SEQ ID NO: 1167620 - DNA, 15 bp, Homo sapiens
ccttctgatatctcc

SEQ ID NO: 1167621 - DNA, 15 bp, Homo sapiens
accttctgatatctc

SEQ ID NO: 1167622 - DNA, 15 bp, Homo sapiens
aaccttctgatatct

SEQ ID NO: 1167623 - DNA, 15 bp, Homo sapiens
gaaccttctgatatc

SEQ ID NO: 1167624 - DNA, 15 bp, Homo sapiens
ggaaccttctgatat

SEQ ID NO: 1167625 - DNA, 15 bp, Homo sapiens
aggaaccttctgata

SEQ ID NO: 1167626 - DNA, 15 bp, Homo sapiens
aaggaaccttctgat

SEQ ID NO: 1167627 - DNA, 15 bp, Homo sapiens
taaggaaccttctga

SEQ ID NO: 1167628 - DNA, 15 bp, Homo sapiens
ctaaggaaccttctg

SEQ ID NO: 1167629 - DNA, 15 bp, Homo sapiens
tctaaggaaccttct

SEQ ID NO: 1167630 - DNA, 15 bp, Homo sapiens
ctctaaggaaccttc

SEQ ID NO: 1167631 - DNA, 15 bp, Homo sapiens
tctctaaggaacctt

SEQ ID NO: 1167632 - DNA, 15 bp, Homo sapiens
ctctctaaggaacct

SEQ ID NO: 1167633 - DNA, 15 bp, Homo sapiens
gctctctaaggaacc

SEQ ID NO: 1167634 - DNA, 15 bp, Homo sapiens
agctctctaaggaac

SEQ ID NO: 1167635 - DNA, 15 bp, Homo sapiens
cagctctctaaggaa

SEQ ID NO: 1167636 - DNA, 15 bp, Homo sapiens
tcagctctctaagga

SEQ ID NO: 1167637 - DNA, 15 bp, Homo sapiens
ttcagctctctaagg

SEQ ID NO: 1167638 - DNA, 15 bp, Homo sapiens
attcagctctctaag

SEQ ID NO: 1167639 - DNA, 15 bp, Homo sapiens
cattcagctctctaa

SEQ ID NO: 1167640 - DNA, 15 bp, Homo sapiens
ccattcagctctcta

SEQ ID NO: 1167641 - DNA, 15 bp, Homo sapiens
accattcagctctct

SEQ ID NO: 1167642 - DNA, 15 bp, Homo sapiens
aaccattcagctctc

SEQ ID NO: 1167643 - DNA, 15 bp, Homo sapiens
gaaccattcagctct

SEQ ID NO: 1167644 - DNA, 15 bp, Homo sapiens
tgaaccattcagctc

SEQ ID NO: 1167645 - DNA, 15 bp, Homo sapiens
ctgaaccattcagct

SEQ ID NO: 1167646 - DNA, 15 bp, Homo sapiens
tctgaaccattcagc

SEQ ID NO: 1167647 - DNA, 15 bp, Homo sapiens
ctctgaaccattcag

SEQ ID NO: 1167648 - DNA, 15 bp, Homo sapiens
cctctgaaccattca

SEQ ID NO: 1167649 - DNA, 15 bp, Homo sapiens
ccctctgaaccattc

SEQ ID NO: 1167650 - DNA, 15 bp, Homo sapiens
gccctctgaaccatt

SEQ ID NO: 1167651 - DNA, 15 bp, Homo sapiens
agccctctgaaccat

SEQ ID NO: 1167652 - DNA, 15 bp, Homo sapiens
aagccctctgaacca

SEQ ID NO: 1167653 - DNA, 15 bp, Homo sapiens
gaagccctctgaacc

SEQ ID NO: 1167654 - DNA, 15 bp, Homo sapiens
tgaagccctctgaac

SEQ ID NO: 1167655 - DNA, 15 bp, Homo sapiens
ctgaagccctctgaa

SEQ ID NO: 1167656 - DNA, 15 bp, Homo sapiens
gctgaagccctctga

SEQ ID NO: 1167657 - DNA, 15 bp, Homo sapiens
tgctgaagccctctg

SEQ ID NO: 1167658 - DNA, 15 bp, Homo sapiens
ttgctgaagccctct

SEQ ID NO: 1167659 - DNA, 15 bp, Homo sapiens
gttgctgaagccctc

SEQ ID NO: 1167660 - DNA, 15 bp, Homo sapiens
agttgctgaagccct

SEQ ID NO: 1167661 - DNA, 15 bp, Homo sapiens
aagttgctgaagccc

SEQ ID NO: 1167662 - DNA, 15 bp, Homo sapiens
gaagttgctgaagcc

SEQ ID NO: 1167663 - DNA, 15 bp, Homo sapiens
agaagttgctgaagc

SEQ ID NO: 1167664 - DNA, 15 bp, Homo sapiens
cagaagttgctgaag

SEQ ID NO: 1167665 - DNA, 15 bp, Homo sapiens
acagaagttgctgaa

SEQ ID NO: 1167666 - DNA, 15 bp, Homo sapiens
aacagaagttgctga

SEQ ID NO: 1167667 - DNA, 15 bp, Homo sapiens
gaacagaagttgctg

SEQ ID NO: 1167668 - DNA, 15 bp, Homo sapiens
tgaacagaagttgct

SEQ ID NO: 1167669 - DNA, 15 bp, Homo sapiens
ctgaacagaagttgc

SEQ ID NO: 1167670 - DNA, 15 bp, Homo sapiens
gctgaacagaagttg

SEQ ID NO: 1167671 - DNA, 15 bp, Homo sapiens
tgctgaacagaagtt

SEQ ID NO: 1167672 - DNA, 15 bp, Homo sapiens
atgctgaacagaagt

SEQ ID NO: 1167673 - DNA, 15 bp, Homo sapiens
gatgctgaacagaag

SEQ ID NO: 1167674 - DNA, 15 bp, Homo sapiens
agatgctgaacagaa

SEQ ID NO: 1167675 - DNA, 15 bp, Homo sapiens
aagatgctgaacaga

SEQ ID NO: 1167676 - DNA, 15 bp, Homo sapiens
gaagatgctgaacag

SEQ ID NO: 1167677 - DNA, 15 bp, Homo sapiens
cgaagatgctgaaca

SEQ ID NO: 1167678 - DNA, 15 bp, Homo sapiens
acgaagatgctgaac

SEQ ID NO: 1167679 - DNA, 15 bp, Homo sapiens
aacgaagatgctgaa

SEQ ID NO: 1167680 - DNA, 15 bp, Homo sapiens
gaacgaagatgctga

SEQ ID NO: 1167681 - DNA, 15 bp, Homo sapiens
ggaacgaagatgctg

SEQ ID NO: 1167682 - DNA, 15 bp, Homo sapiens
gggaacgaagatgct

SEQ ID NO: 1167683 - DNA, 15 bp, Homo sapiens
ggggaacgaagatgc

SEQ ID NO: 1167684 - DNA, 15 bp, Homo sapiens
tggggaacgaagatg

SEQ ID NO: 1167685 - DNA, 15 bp, Homo sapiens
ctggggaacgaagat

SEQ ID NO: 1167686 - DNA, 15 bp, Homo sapiens
cctggggaacgaaga

SEQ ID NO: 1167687 - DNA, 15 bp, Homo sapiens
acctggggaacgaag

SEQ ID NO: 1167688 - DNA, 15 bp, Homo sapiens
cacctggggaacgaa

SEQ ID NO: 1167689 - DNA, 15 bp, Homo sapiens
ccacctggggaacga

SEQ ID NO: 1167690 - DNA, 15 bp, Homo sapiens
gccacctggggaacg

SEQ ID NO: 1167691 - DNA, 15 bp, Homo sapiens
ggccacctggggaac

SEQ ID NO: 1167692 - DNA, 15 bp, Homo sapiens
gggccacctggggaa

SEQ ID NO: 1167693 - DNA, 15 bp, Homo sapiens
ggggccacctgggga

SEQ ID NO: 1167694 - DNA, 15 bp, Homo sapiens
aggggccacctgggg

SEQ ID NO: 1167695 - DNA, 15 bp, Homo sapiens
gaggggccacctggg

SEQ ID NO: 1167696 - DNA, 15 bp, Homo sapiens
agaggggccacctgg

SEQ ID NO: 1167697 - DNA, 15 bp, Homo sapiens
gagaggggccacctg

SEQ ID NO: 1167698 - DNA, 15 bp, Homo sapiens
ggagaggggccacct

SEQ ID NO: 1167699 - DNA, 15 bp, Homo sapiens
tggagaggggccacc

SEQ ID NO: 1167700 - DNA, 15 bp, Homo sapiens
gtggagaggggccac

SEQ ID NO: 1167701 - DNA, 15 bp, Homo sapiens
tgtggagaggggcca

SEQ ID NO: 1167702 - DNA, 15 bp, Homo sapiens
ctgtggagaggggcc

SEQ ID NO: 1167703 - DNA, 15 bp, Homo sapiens
tctgtggagaggggc

SEQ ID NO: 1167704 - DNA, 15 bp, Homo sapiens
ctctgtggagagggg

SEQ ID NO: 1167705 - DNA, 15 bp, Homo sapiens
cctctgtggagaggg

SEQ ID NO: 1167706 - DNA, 15 bp, Homo sapiens
tcctctgtggagagg

SEQ ID NO: 1167707 - DNA, 15 bp, Homo sapiens
atcctctgtggagag

SEQ ID NO: 1167708 - DNA, 15 bp, Homo sapiens
tatcctctgtggaga

SEQ ID NO: 1167709 - DNA, 15 bp, Homo sapiens
atatcctctgtggag

SEQ ID NO: 1167710 - DNA, 15 bp, Homo sapiens
catatcctctgtgga

SEQ ID NO: 1167711 - DNA, 15 bp, Homo sapiens
acatatcctctgtgg

SEQ ID NO: 1167712 - DNA, 15 bp, Homo sapiens
gacatatcctctgtg

SEQ ID NO: 1167713 - DNA, 15 bp, Homo sapiens
ggacatatcctctgt

SEQ ID NO: 1167714 - DNA, 15 bp, Homo sapiens
aggacatatcctctg

SEQ ID NO: 1167715 - DNA, 15 bp, Homo sapiens
gaggacatatcctct

SEQ ID NO: 1167716 - DNA, 15 bp, Homo sapiens
tgaggacatatcctc

SEQ ID NO: 1167717 - DNA, 15 bp, Homo sapiens
gtgaggacatatcct

SEQ ID NO: 1167718 - DNA, 15 bp, Homo sapiens
ggtgaggacatatcc

SEQ ID NO: 1167719 - DNA, 15 bp, Homo sapiens
aggtgaggacatatc

SEQ ID NO: 1167720 - DNA, 15 bp, Homo sapiens
taggtgaggacatat

SEQ ID NO: 1167721 - DNA, 15 bp, Homo sapiens
gtaggtgaggacata

SEQ ID NO: 1167722 - DNA, 15 bp, Homo sapiens
tgtaggtgaggacat

SEQ ID NO: 1167723 - DNA, 15 bp, Homo sapiens
gtgtaggtgaggaca

SEQ ID NO: 1167724 - DNA, 15 bp, Homo sapiens
tgtgtaggtgaggac

SEQ ID NO: 1167725 - DNA, 15 bp, Homo sapiens
gtgtgtaggtgagga

SEQ ID NO: 1167726 - DNA, 15 bp, Homo sapiens
tgtgtgtaggtgagg

SEQ ID NO: 1167727 - DNA, 15 bp, Homo sapiens
ttgtgtgtaggtgag

SEQ ID NO: 1167728 - DNA, 15 bp, Homo sapiens
attgtgtgtaggtga

SEQ ID NO: 1167729 - DNA, 15 bp, Homo sapiens
tattgtgtgtaggtg

SEQ ID NO: 1167730 - DNA, 15 bp, Homo sapiens
ctattgtgtgtaggt

SEQ ID NO: 1167731 - DNA, 15 bp, Homo sapiens
cctattgtgtgtagg

SEQ ID NO: 1167732 - DNA, 15 bp, Homo sapiens
gcctattgtgtgtag

SEQ ID NO: 1167733 - DNA, 15 bp, Homo sapiens
ggcctattgtgtgta

SEQ ID NO: 1167734 - DNA, 15 bp, Homo sapiens
gggcctattgtgtgt

SEQ ID NO: 1167735 - DNA, 15 bp, Homo sapiens
ggggcctattgtgtg

SEQ ID NO: 1167736 - DNA, 15 bp, Homo sapiens
tggggcctattgtgt

SEQ ID NO: 1167737 - DNA, 15 bp, Homo sapiens
ttggggcctattgtg

SEQ ID NO: 1167738 - DNA, 15 bp, Homo sapiens
gttggggcctattgt

SEQ ID NO: 1167739 - DNA, 15 bp, Homo sapiens
ggttggggcctattg

SEQ ID NO: 1167740 - DNA, 15 bp, Homo sapiens
gggttggggcctatt

SEQ ID NO: 1167741 - DNA, 15 bp, Homo sapiens
tgggttggggcctat

SEQ ID NO: 1167742 - DNA, 15 bp, Homo sapiens
ctgggttggggccta

SEQ ID NO: 1167743 - DNA, 15 bp, Homo sapiens
cctgggttggggcct

SEQ ID NO: 1167744 - DNA, 15 bp, Homo sapiens
acctgggttggggcc

SEQ ID NO: 1167745 - DNA, 15 bp, Homo sapiens
aacctgggttggggc

SEQ ID NO: 1167746 - DNA, 15 bp, Homo sapiens
gaacctgggttgggg

SEQ ID NO: 1167747 - DNA, 15 bp, Homo sapiens
agaacctgggttggg

SEQ ID NO: 1167748 - DNA, 15 bp, Homo sapiens
tagaacctgggttgg

SEQ ID NO: 1167749 - DNA, 15 bp, Homo sapiens
gtagaacctgggttg

SEQ ID NO: 1167750 - DNA, 15 bp, Homo sapiens
ggtagaacctgggtt

SEQ ID NO: 1167751 - DNA, 15 bp, Homo sapiens
tggtagaacctgggt

SEQ ID NO: 1167752 - DNA, 15 bp, Homo sapiens
ttggtagaacctggg

SEQ ID NO: 1167753 - DNA, 15 bp, Homo sapiens
tttggtagaacctgg

SEQ ID NO: 1167754 - DNA, 15 bp, Homo sapiens
gtttggtagaacctg

SEQ ID NO: 1167755 - DNA, 15 bp, Homo sapiens
tgtttggtagaacct

SEQ ID NO: 1167756 - DNA, 15 bp, Homo sapiens
gtgtttggtagaacc

SEQ ID NO: 1167757 - DNA, 15 bp, Homo sapiens
cgtgtttggtagaac

SEQ ID NO: 1167758 - DNA, 15 bp, Homo sapiens
ccgtgtttggtagaa

SEQ ID NO: 1167759 - DNA, 15 bp, Homo sapiens
tccgtgtttggtaga

SEQ ID NO: 1167760 - DNA, 15 bp, Homo sapiens
ttccgtgtttggtag

SEQ ID NO: 1167761 - DNA, 15 bp, Homo sapiens
cttccgtgtttggta

SEQ ID NO: 1167762 - DNA, 15 bp, Homo sapiens
gcttccgtgtttggt

SEQ ID NO: 1167763 - DNA, 15 bp, Homo sapiens
tgcttccgtgtttgg

SEQ ID NO: 1167764 - DNA, 15 bp, Homo sapiens
ctgcttccgtgtttg

SEQ ID NO: 1167765 - DNA, 15 bp, Homo sapiens
cctgcttccgtgttt

SEQ ID NO: 1167766 - DNA, 15 bp, Homo sapiens
tcctgcttccgtgtt

SEQ ID NO: 1167767 - DNA, 15 bp, Homo sapiens
gtcctgcttccgtgt

SEQ ID NO: 1167768 - DNA, 15 bp, Homo sapiens
ggtcctgcttccgtg

SEQ ID NO: 1167769 - DNA, 15 bp, Homo sapiens
gggtcctgcttccgt

SEQ ID NO: 1167770 - DNA, 15 bp, Homo sapiens
tgggtcctgcttccg

SEQ ID NO: 1167771 - DNA, 15 bp, Homo sapiens
atgggtcctgcttcc

SEQ ID NO: 1167772 - DNA, 15 bp, Homo sapiens
catgggtcctgcttc

SEQ ID NO: 1167773 - DNA, 15 bp, Homo sapiens
gcatgggtcctgctt

SEQ ID NO: 1167774 - DNA, 15 bp, Homo sapiens
agcatgggtcctgct

SEQ ID NO: 1167775 - DNA, 15 bp, Homo sapiens
cagcatgggtcctgc

SEQ ID NO: 1167776 - DNA, 15 bp, Homo sapiens
tcagcatgggtcctg

SEQ ID NO: 1167777 - DNA, 15 bp, Homo sapiens
ctcagcatgggtcct

SEQ ID NO: 1167778 - DNA, 15 bp, Homo sapiens
tctcagcatgggtcc

SEQ ID NO: 1167779 - DNA, 15 bp, Homo sapiens
ttctcagcatgggtc

SEQ ID NO: 1167780 - DNA, 15 bp, Homo sapiens
gttctcagcatgggt

SEQ ID NO: 1167781 - DNA, 15 bp, Homo sapiens
ggttctcagcatggg

SEQ ID NO: 1167782 - DNA, 15 bp, Homo sapiens
aggttctcagcatgg

SEQ ID NO: 1167783 - DNA, 15 bp, Homo sapiens
caggttctcagcatg

SEQ ID NO: 1167784 - DNA, 15 bp, Homo sapiens
acaggttctcagcat

SEQ ID NO: 1167785 - DNA, 15 bp, Homo sapiens
tacaggttctcagca

SEQ ID NO: 1167786 - DNA, 15 bp, Homo sapiens
ctacaggttctcagc

SEQ ID NO: 1167787 - DNA, 15 bp, Homo sapiens
gctacaggttctcag

SEQ ID NO: 1167788 - DNA, 15 bp, Homo sapiens
agctacaggttctca

SEQ ID NO: 1167789 - DNA, 15 bp, Homo sapiens
cagctacaggttctc

SEQ ID NO: 1167790 - DNA, 15 bp, Homo sapiens
gcagctacaggttct

SEQ ID NO: 1167791 - DNA, 15 bp, Homo sapiens
agcagctacaggttc

SEQ ID NO: 1167792 - DNA, 15 bp, Homo sapiens
cagcagctacaggtt

SEQ ID NO: 1167793 - DNA, 15 bp, Homo sapiens
acagcagctacaggt

SEQ ID NO: 1167794 - DNA, 15 bp, Homo sapiens
aacagcagctacagg

SEQ ID NO: 1167795 - DNA, 15 bp, Homo sapiens
aaacagcagctacag

SEQ ID NO: 1167796 - DNA, 15 bp, Homo sapiens
gaaacagcagctaca

SEQ ID NO: 1167797 - DNA, 15 bp, Homo sapiens
agaaacagcagctac

SEQ ID NO: 1167798 - DNA, 15 bp, Homo sapiens
tagaaacagcagcta

SEQ ID NO: 1167799 - DNA, 15 bp, Homo sapiens
ctagaaacagcagct

SEQ ID NO: 1167800 - DNA, 15 bp, Homo sapiens
cctagaaacagcagc

SEQ ID NO: 1167801 - DNA, 15 bp, Homo sapiens
acctagaaacagcag

SEQ ID NO: 1167802 - DNA, 15 bp, Homo sapiens
gacctagaaacagca

SEQ ID NO: 1167803 - DNA, 15 bp, Homo sapiens
agacctagaaacagc

SEQ ID NO: 1167804 - DNA, 15 bp, Homo sapiens
cagacctagaaacag

SEQ ID NO: 1167805 - DNA, 15 bp, Homo sapiens
tcagacctagaaaca

SEQ ID NO: 1167806 - DNA, 15 bp, Homo sapiens
ttcagacctagaaac

SEQ ID NO: 1167807 - DNA, 15 bp, Homo sapiens
cttcagacctagaaa

SEQ ID NO: 1167808 - DNA, 15 bp, Homo sapiens
tcttcagacctagaa

SEQ ID NO: 1167809 - DNA, 15 bp, Homo sapiens
atcttcagacctaga

SEQ ID NO: 1167810 - DNA, 15 bp, Homo sapiens
tatcttcagacctag

SEQ ID NO: 1167811 - DNA, 15 bp, Homo sapiens
ttatcttcagaccta

SEQ ID NO: 1167812 - DNA, 15 bp, Homo sapiens
cttatcttcagacct

SEQ ID NO: 1167813 - DNA, 15 bp, Homo sapiens
tcttatcttcagacc

SEQ ID NO: 1167814 - DNA, 15 bp, Homo sapiens
ttcttatcttcagac

SEQ ID NO: 1167815 - DNA, 15 bp, Homo sapiens
cttcttatcttcaga

SEQ ID NO: 1167816 - DNA, 15 bp, Homo sapiens
tcttcttatcttcag

SEQ ID NO: 1167817 - DNA, 15 bp, Homo sapiens
ttcttcttatcttca

SEQ ID NO: 1167818 - DNA, 15 bp, Homo sapiens
attcttcttatcttc

SEQ ID NO: 1167819 - DNA, 15 bp, Homo sapiens
cattcttcttatctt

SEQ ID NO: 1167820 - DNA, 15 bp, Homo sapiens
tcattcttcttatct

SEQ ID NO: 1167821 - DNA, 15 bp, Homo sapiens
ttcattcttcttatc

SEQ ID NO: 1167822 - DNA, 15 bp, Homo sapiens
tttcattcttcttat

SEQ ID NO: 1167823 - DNA, 15 bp, Homo sapiens
ttttcattcttctta

SEQ ID NO: 1167824 - DNA, 15 bp, Homo sapiens
cttttcattcttctt

SEQ ID NO: 1167825 - DNA, 15 bp, Homo sapiens
gcttttcattcttct

SEQ ID NO: 1167826 - DNA, 15 bp, Homo sapiens
tgcttttcattcttc

SEQ ID NO: 1167827 - DNA, 15 bp, Homo sapiens
atgcttttcattctt

SEQ ID NO: 1167828 - DNA, 15 bp, Homo sapiens
catgcttttcattct

SEQ ID NO: 1167829 - DNA, 15 bp, Homo sapiens
acatgcttttcattc

SEQ ID NO: 1167830 - DNA, 15 bp, Homo sapiens
tacatgcttttcatt

SEQ ID NO: 1167831 - DNA, 15 bp, Homo sapiens
gtacatgcttttcat

SEQ ID NO: 1167832 - DNA, 15 bp, Homo sapiens
tgtacatgcttttca

SEQ ID NO: 1167833 - DNA, 15 bp, Homo sapiens
ctgtacatgcttttc

SEQ ID NO: 1167834 - DNA, 15 bp, Homo sapiens
cctgtacatgctttt

SEQ ID NO: 1167835 - DNA, 15 bp, Homo sapiens
gcctgtacatgcttt

SEQ ID NO: 1167836 - DNA, 15 bp, Homo sapiens
ggcctgtacatgctt

SEQ ID NO: 1167837 - DNA, 15 bp, Homo sapiens
tggcctgtacatgct

SEQ ID NO: 1167838 - DNA, 15 bp, Homo sapiens
ctggcctgtacatgc

SEQ ID NO: 1167839 - DNA, 15 bp, Homo sapiens
cctggcctgtacatg

SEQ ID NO: 1167840 - DNA, 15 bp, Homo sapiens
gcctggcctgtacat

SEQ ID NO: 1167841 - DNA, 15 bp, Homo sapiens
tgcctggcctgtaca

SEQ ID NO: 1167842 - DNA, 15 bp, Homo sapiens
atgcctggcctgtac

SEQ ID NO: 1167843 - DNA, 15 bp, Homo sapiens
catgcctggcctgta

SEQ ID NO: 1167844 - DNA, 15 bp, Homo sapiens
tccaaagtgctgaga

SEQ ID NO: 1167845 - DNA, 15 bp, Homo sapiens
ttccaaagtgctgag

SEQ ID NO: 1167846 - DNA, 15 bp, Homo sapiens
cttccaaagtgctga

SEQ ID NO: 1167847 - DNA, 15 bp, Homo sapiens
gccttccaaagtgct

SEQ ID NO: 1167848 - DNA, 15 bp, Homo sapiens
agccttccaaagtgc

SEQ ID NO: 1167849 - DNA, 15 bp, Homo sapiens
acctgcctcagcctt

SEQ ID NO: 1167850 - DNA, 15 bp, Homo sapiens
cacctgcctcagcct

SEQ ID NO: 1167851 - DNA, 15 bp, Homo sapiens
ccacctgcctcagcc

SEQ ID NO: 1167852 - DNA, 15 bp, Homo sapiens
tccacctgcctcagc

SEQ ID NO: 1167853 - DNA, 15 bp, Homo sapiens
atccacctgcctcag

SEQ ID NO: 1167854 - DNA, 15 bp, Homo sapiens
gatccacctgcctca

SEQ ID NO: 1167855 - DNA, 15 bp, Homo sapiens
taccatgttggccag

SEQ ID NO: 1167856 - DNA, 15 bp, Homo sapiens
ttaccatgttggcca

SEQ ID NO: 1167857 - DNA, 15 bp, Homo sapiens
accaccaccatgcct

SEQ ID NO: 1167858 - DNA, 15 bp, Homo sapiens
aaccaccaccatgcc

SEQ ID NO: 1167859 - DNA, 15 bp, Homo sapiens
caaccaccaccatgc

SEQ ID NO: 1167860 - DNA, 15 bp, Homo sapiens
gcaaccaccaccatg

SEQ ID NO: 1167861 - DNA, 15 bp, Homo sapiens
ggcaaccaccaccat

SEQ ID NO: 1167862 - DNA, 15 bp, Homo sapiens
aggcaaccaccacca

SEQ ID NO: 1167863 - DNA, 15 bp, Homo sapiens
caggcaaccaccacc

SEQ ID NO: 1167864 - DNA, 15 bp, Homo sapiens
acaggcaaccaccac

SEQ ID NO: 1167865 - DNA, 15 bp, Homo sapiens
tacaggcaaccacca

SEQ ID NO: 1167866 - DNA, 15 bp, Homo sapiens
ttacaggcaaccacc

SEQ ID NO: 1167867 - DNA, 15 bp, Homo sapiens
attacaggcaaccac

SEQ ID NO: 1167868 - DNA, 15 bp, Homo sapiens
gattacaggcaacca

SEQ ID NO: 1167869 - DNA, 15 bp, Homo sapiens
ggattacaggcaacc

SEQ ID NO: 1167870 - DNA, 15 bp, Homo sapiens
gggattacaggcaac

SEQ ID NO: 1167871 - DNA, 15 bp, Homo sapiens
aattcaagtgattct

SEQ ID NO: 1167872 - DNA, 15 bp, Homo sapiens
aaattcaagtgattc

SEQ ID NO: 1167873 - DNA, 15 bp, Homo sapiens
caaattcaagtgatt

SEQ ID NO: 1167874 - DNA, 15 bp, Homo sapiens
ccaaattcaagtgat

SEQ ID NO: 1167875 - DNA, 15 bp, Homo sapiens
cccaaattcaagtga

SEQ ID NO: 1167876 - DNA, 15 bp, Homo sapiens
tcccaaattcaagtg

SEQ ID NO: 1167877 - DNA, 15 bp, Homo sapiens
ctcccaaattcaagt

SEQ ID NO: 1167878 - DNA, 15 bp, Homo sapiens
cctcccaaattcaag

SEQ ID NO: 1167879 - DNA, 15 bp, Homo sapiens
gcctcccaaattcaa

SEQ ID NO: 1167880 - DNA, 15 bp, Homo sapiens
tgcctcccaaattca

SEQ ID NO: 1167881 - DNA, 15 bp, Homo sapiens
ctgcctcccaaattc

SEQ ID NO: 1167882 - DNA, 15 bp, Homo sapiens
tctgcctcccaaatt

SEQ ID NO: 1167883 - DNA, 15 bp, Homo sapiens
ctctgcctcccaaat

SEQ ID NO: 1167884 - DNA, 15 bp, Homo sapiens
tctctgcctcccaaa

SEQ ID NO: 1167885 - DNA, 15 bp, Homo sapiens
atctctgcctcccaa

SEQ ID NO: 1167886 - DNA, 15 bp, Homo sapiens
aatctctgcctccca

SEQ ID NO: 1167887 - DNA, 15 bp, Homo sapiens
caatctctgcctccc

SEQ ID NO: 1167888 - DNA, 15 bp, Homo sapiens
gcaatctctgcctcc

SEQ ID NO: 1167889 - DNA, 15 bp, Homo sapiens
tgcaatctctgcctc

SEQ ID NO: 1167890 - DNA, 15 bp, Homo sapiens
ctgcaatctctgcct

SEQ ID NO: 1167891 - DNA, 15 bp, Homo sapiens
actgcaatctctgcc

SEQ ID NO: 1167892 - DNA, 15 bp, Homo sapiens
gactgcaatctctgc

SEQ ID NO: 1167893 - DNA, 15 bp, Homo sapiens
tgactgcaatctctg

SEQ ID NO: 1167894 - DNA, 15 bp, Homo sapiens
ctgactgcaatctct

SEQ ID NO: 1167895 - DNA, 15 bp, Homo sapiens
gctgactgcaatctc

SEQ ID NO: 1167896 - DNA, 15 bp, Homo sapiens
ggctgactgcaatct

SEQ ID NO: 1167897 - DNA, 15 bp, Homo sapiens
tggctgactgcaatc

SEQ ID NO: 1167898 - DNA, 15 bp, Homo sapiens
ttggctgactgcaat

SEQ ID NO: 1167899 - DNA, 15 bp, Homo sapiens
cttggctgactgcaa

SEQ ID NO: 1167900 - DNA, 15 bp, Homo sapiens
tcttggctgactgca

SEQ ID NO: 1167901 - DNA, 15 bp, Homo sapiens
atcttggctgactgc

SEQ ID NO: 1167902 - DNA, 15 bp, Homo sapiens
aatcttggctgactg

SEQ ID NO: 1167903 - DNA, 15 bp, Homo sapiens
caatcttggctgact

SEQ ID NO: 1167904 - DNA, 15 bp, Homo sapiens
gcaatcttggctgac

SEQ ID NO: 1167905 - DNA, 15 bp, Homo sapiens
tgcaatcttggctga

SEQ ID NO: 1167906 - DNA, 15 bp, Homo sapiens
gtgcaatcttggctg

SEQ ID NO: 1167907 - DNA, 15 bp, Homo sapiens
ggtgcaatcttggct

SEQ ID NO: 1167908 - DNA, 15 bp, Homo sapiens
tggtgcaatcttggc

SEQ ID NO: 1167909 - DNA, 15 bp, Homo sapiens
gtggtgcaatcttgg

SEQ ID NO: 1167910 - DNA, 15 bp, Homo sapiens
agtggtgcaatcttg

SEQ ID NO: 1167911 - DNA, 15 bp, Homo sapiens
cagtggtgcaatctt

SEQ ID NO: 1167912 - DNA, 15 bp, Homo sapiens
atgcagtggtgcaat

SEQ ID NO: 1167913 - DNA, 15 bp, Homo sapiens
gatgcagtggtgcaa

SEQ ID NO: 1167914 - DNA, 15 bp, Homo sapiens
ggatgcagtggtgca

SEQ ID NO: 1167915 - DNA, 15 bp, Homo sapiens
gggatgcagtggtgc

SEQ ID NO: 1167916 - DNA, 15 bp, Homo sapiens
tgggatgcagtggtg

SEQ ID NO: 1167917 - DNA, 15 bp, Homo sapiens
ctgggatgcagtggt

SEQ ID NO: 1167918 - DNA, 15 bp, Homo sapiens
gctgggatgcagtgg

SEQ ID NO: 1167919 - DNA, 15 bp, Homo sapiens
ggctgggatgcagtg

SEQ ID NO: 1167920 - DNA, 15 bp, Homo sapiens
aggctgggatgcagt

SEQ ID NO: 1167921 - DNA, 15 bp, Homo sapiens
caggctgggatgcag

SEQ ID NO: 1167922 - DNA, 15 bp, Homo sapiens
ccaggctgggatgca

SEQ ID NO: 1167923 - DNA, 15 bp, Homo sapiens
cccaggctgggatgc

SEQ ID NO: 1167924 - DNA, 15 bp, Homo sapiens
acccaggctgggatg

SEQ ID NO: 1167925 - DNA, 15 bp, Homo sapiens
cacccaggctgggat

SEQ ID NO: 1167926 - DNA, 15 bp, Homo sapiens
tcacccaggctggga

SEQ ID NO: 1167927 - DNA, 15 bp, Homo sapiens
agtctcattctgtca

SEQ ID NO: 1167928 - DNA, 15 bp, Homo sapiens
gagtctcattctgtc

SEQ ID NO: 1167929 - DNA, 15 bp, Homo sapiens
ggagtctcattctgt

SEQ ID NO: 1167930 - DNA, 15 bp, Homo sapiens
tggagtctcattctg

SEQ ID NO: 1167931 - DNA, 15 bp, Homo sapiens
atggagtctcattct

SEQ ID NO: 1167932 - DNA, 15 bp, Homo sapiens
gatggagtctcattc

SEQ ID NO: 1167933 - DNA, 15 bp, Homo sapiens
agatggagtctcatt

SEQ ID NO: 1167934 - DNA, 15 bp, Homo sapiens
gagatggagtctcat

SEQ ID NO: 1167935 - DNA, 15 bp, Homo sapiens
ttacttttttttttg

SEQ ID NO: 1167936 - DNA, 15 bp, Homo sapiens
cttactttttttttt

SEQ ID NO: 1167937 - DNA, 15 bp, Homo sapiens
ccttacttttttttt

SEQ ID NO: 1167938 - DNA, 15 bp, Homo sapiens
tccttactttttttt

SEQ ID NO: 1167939 - DNA, 15 bp, Homo sapiens
ttccttacttttttt

SEQ ID NO: 1167940 - DNA, 15 bp, Homo sapiens
tttccttactttttt

SEQ ID NO: 1167941 - DNA, 15 bp, Homo sapiens
ttttccttacttttt

SEQ ID NO: 1167942 - DNA, 15 bp, Homo sapiens
tttttccttactttt

SEQ ID NO: 1167943 - DNA, 15 bp, Homo sapiens
ttttttccttacttt

SEQ ID NO: 1167944 - DNA, 15 bp, Homo sapiens
cttttttccttactt

SEQ ID NO: 1167945 - DNA, 15 bp, Homo sapiens
tcttttttccttact

SEQ ID NO: 1167946 - DNA, 15 bp, Homo sapiens
ttcttttttccttac

SEQ ID NO: 1167947 - DNA, 15 bp, Homo sapiens
tttcttttttcctta

SEQ ID NO: 1167948 - DNA, 15 bp, Homo sapiens
ttttcttttttcctt

SEQ ID NO: 1167949 - DNA, 15 bp, Homo sapiens
tgattttcttttttc

SEQ ID NO: 1167950 - DNA, 15 bp, Homo sapiens
atgattttctttttt

SEQ ID NO: 1167951 - DNA, 15 bp, Homo sapiens
catgattttcttttt

SEQ ID NO: 1167952 - DNA, 15 bp, Homo sapiens
acatgattttctttt

SEQ ID NO: 1167953 - DNA, 15 bp, Homo sapiens
cacatgattttcttt

SEQ ID NO: 1167954 - DNA, 15 bp, Homo sapiens
gcacatgattttctt

SEQ ID NO: 1167955 - DNA, 15 bp, Homo sapiens
tgcacatgattttct

SEQ ID NO: 1167956 - DNA, 15 bp, Homo sapiens
ttgcacatgattttc

SEQ ID NO: 1167957 - DNA, 15 bp, Homo sapiens
attgcacatgatttt

SEQ ID NO: 1167958 - DNA, 15 bp, Homo sapiens
tattgcacatgattt

SEQ ID NO: 1167959 - DNA, 15 bp, Homo sapiens
ctattgcacatgatt

SEQ ID NO: 1167960 - DNA, 15 bp, Homo sapiens
actattgcacatgat

SEQ ID NO: 1167961 - DNA, 15 bp, Homo sapiens
cactattgcacatga

SEQ ID NO: 1167962 - DNA, 15 bp, Homo sapiens
ccactattgcacatg

SEQ ID NO: 1167963 - DNA, 15 bp, Homo sapiens
accactattgcacat

SEQ ID NO: 1167964 - DNA, 15 bp, Homo sapiens
taccactattgcaca

SEQ ID NO: 1167965 - DNA, 15 bp, Homo sapiens
gtaccactattgcac

SEQ ID NO: 1167966 - DNA, 15 bp, Homo sapiens
tgtaccactattgca

SEQ ID NO: 1167967 - DNA, 15 bp, Homo sapiens
ctgtaccactattgc

SEQ ID NO: 1167968 - DNA, 15 bp, Homo sapiens
tctgtaccactattg

SEQ ID NO: 1167969 - DNA, 15 bp, Homo sapiens
ttctgtaccactatt

SEQ ID NO: 1167970 - DNA, 15 bp, Homo sapiens
tttctgtaccactat

SEQ ID NO: 1167971 - DNA, 15 bp, Homo sapiens
atttctgtaccacta

SEQ ID NO: 1167972 - DNA, 15 bp, Homo sapiens
tatttctgtaccact

SEQ ID NO: 1167973 - DNA, 15 bp, Homo sapiens
ttatttctgtaccac

SEQ ID NO: 1167974 - DNA, 15 bp, Homo sapiens
tttatttctgtacca

SEQ ID NO: 1167975 - DNA, 15 bp, Homo sapiens
ttttatttctgtacc

SEQ ID NO: 1167976 - DNA, 15 bp, Homo sapiens
tttttatttctgtac

SEQ ID NO: 1167977 - DNA, 15 bp, Homo sapiens
atttttatttctgta

SEQ ID NO: 1167978 - DNA, 15 bp, Homo sapiens
tatttttatttctgt

SEQ ID NO: 1167979 - DNA, 15 bp, Homo sapiens
ttatttttatttctg

SEQ ID NO: 1167980 - DNA, 15 bp, Homo sapiens
tttatttttatttct

SEQ ID NO: 1167981 - DNA, 15 bp, Homo sapiens
ttttatttttatttc

SEQ ID NO: 1167982 - DNA, 15 bp, Homo sapiens
gttttatttttattt

SEQ ID NO: 1167983 - DNA, 15 bp, Homo sapiens
tgttttatttttatt

SEQ ID NO: 1167984 - DNA, 15 bp, Homo sapiens
gtgttttatttttat

SEQ ID NO: 1167985 - DNA, 15 bp, Homo sapiens
cgtgttttattttta

SEQ ID NO: 1167986 - DNA, 15 bp, Homo sapiens
tcgtgttttattttt

SEQ ID NO: 1167987 - DNA, 15 bp, Homo sapiens
ttcgtgttttatttt

SEQ ID NO: 1167988 - DNA, 15 bp, Homo sapiens
cttcgtgttttattt

SEQ ID NO: 1167989 - DNA, 15 bp, Homo sapiens
gcttcgtgttttatt

SEQ ID NO: 1167990 - DNA, 15 bp, Homo sapiens
tgcttcgtgttttat

SEQ ID NO: 1167991 - DNA, 15 bp, Homo sapiens
ttgcttcgtgtttta

SEQ ID NO: 1167992 - DNA, 15 bp, Homo sapiens
tttgcttcgtgtttt

SEQ ID NO: 1167993 - DNA, 15 bp, Homo sapiens
ttttgcttcgtgttt

SEQ ID NO: 1167994 - DNA, 15 bp, Homo sapiens
attttgcttcgtgtt

SEQ ID NO: 1167995 - DNA, 15 bp, Homo sapiens
cattttgcttcgtgt

SEQ ID NO: 1167996 - DNA, 15 bp, Homo sapiens
acattttgcttcgtg

SEQ ID NO: 1167997 - DNA, 15 bp, Homo sapiens
gacattttgcttcgt

SEQ ID NO: 1167998 - DNA, 15 bp, Homo sapiens
agacattttgcttcg

SEQ ID NO: 1167999 - DNA, 15 bp, Homo sapiens
aagacattttgcttc

SEQ ID NO: 1168000 - DNA, 15 bp, Homo sapiens
gaagacattttgctt

SEQ ID NO: 1168001 - DNA, 15 bp, Homo sapiens
tgaagacattttgct

SEQ ID NO: 1168002 - DNA, 15 bp, Homo sapiens
gtgaagacattttgc

SEQ ID NO: 1168003 - DNA, 15 bp, Homo sapiens
agtgaagacattttg

SEQ ID NO: 1168004 - DNA, 15 bp, Homo sapiens
aagtgaagacatttt

SEQ ID NO: 1168005 - DNA, 15 bp, Homo sapiens
caagtgaagacattt

SEQ ID NO: 1168006 - DNA, 15 bp, Homo sapiens
tcaagtgaagacatt

SEQ ID NO: 1168007 - DNA, 15 bp, Homo sapiens
atcaagtgaagacat

SEQ ID NO: 1168008 - DNA, 15 bp, Homo sapiens
tatcaagtgaagaca

SEQ ID NO: 1168009 - DNA, 15 bp, Homo sapiens
gtatcaagtgaagac

SEQ ID NO: 1168010 - DNA, 15 bp, Homo sapiens
agtatcaagtgaaga

SEQ ID NO: 1168011 - DNA, 15 bp, Homo sapiens
tagtatcaagtgaag

SEQ ID NO: 1168012 - DNA, 15 bp, Homo sapiens
ctagtatcaagtgaa

SEQ ID NO: 1168013 - DNA, 15 bp, Homo sapiens
actagtatcaagtga

SEQ ID NO: 1168014 - DNA, 15 bp, Homo sapiens
tactagtatcaagtg

SEQ ID NO: 1168015 - DNA, 15 bp, Homo sapiens
ttactagtatcaagt

SEQ ID NO: 1168016 - DNA, 15 bp, Homo sapiens
attactagtatcaag

SEQ ID NO: 1168017 - DNA, 15 bp, Homo sapiens
aattactagtatcaa

SEQ ID NO: 1168018 - DNA, 15 bp, Homo sapiens
aaattactagtatca

SEQ ID NO: 1168019 - DNA, 15 bp, Homo sapiens
taaattactagtatc

SEQ ID NO: 1168020 - DNA, 15 bp, Homo sapiens
gtaaattactagtat

SEQ ID NO: 1168021 - DNA, 15 bp, Homo sapiens
agtaaattactagta

SEQ ID NO: 1168022 - DNA, 15 bp, Homo sapiens
tagtaaattactagt

SEQ ID NO: 1168023 - DNA, 15 bp, Homo sapiens
ttagtaaattactag

SEQ ID NO: 1168024 - DNA, 15 bp, Homo sapiens
attagtaaattacta

SEQ ID NO: 1168025 - DNA, 15 bp, Homo sapiens
tattagtaaattact

SEQ ID NO: 1168026 - DNA, 15 bp, Homo sapiens
ttattagtaaattac

SEQ ID NO: 1168027 - DNA, 15 bp, Homo sapiens
attattagtaaatta

SEQ ID NO: 1168028 - DNA, 15 bp, Homo sapiens
aattattagtaaatt

SEQ ID NO: 1168029 - DNA, 15 bp, Homo sapiens
aaattattagtaaat

SEQ ID NO: 1168030 - DNA, 15 bp, Homo sapiens
taaattattagtaaa

SEQ ID NO: 1168031 - DNA, 15 bp, Homo sapiens
ataaattattagtaa

SEQ ID NO: 1168032 - DNA, 15 bp, Homo sapiens
gataaattattagta

SEQ ID NO: 1168033 - DNA, 15 bp, Homo sapiens
tgataaattattagt

SEQ ID NO: 1168034 - DNA, 15 bp, Homo sapiens
ctgataaattattag

SEQ ID NO: 1168035 - DNA, 15 bp, Homo sapiens
tctgataaattatta

SEQ ID NO: 1168036 - DNA, 15 bp, Homo sapiens
atctgataaattatt

SEQ ID NO: 1168037 - DNA, 15 bp, Homo sapiens
catctgataaattat

SEQ ID NO: 1168038 - DNA, 15 bp, Homo sapiens
acatctgataaatta

SEQ ID NO: 1168039 - DNA, 15 bp, Homo sapiens
aacatctgataaatt

SEQ ID NO: 1168040 - DNA, 15 bp, Homo sapiens
aaacatctgataaat

SEQ ID NO: 1168041 - DNA, 15 bp, Homo sapiens
taaacatctgataaa

SEQ ID NO: 1168042 - DNA, 15 bp, Homo sapiens
gtaaacatctgataa

SEQ ID NO: 1168043 - DNA, 15 bp, Homo sapiens
agtaaacatctgata

SEQ ID NO: 1168044 - DNA, 15 bp, Homo sapiens
tagtaaacatctgat

SEQ ID NO: 1168045 - DNA, 15 bp, Homo sapiens
atagtaaacatctga

SEQ ID NO: 1168046 - DNA, 15 bp, Homo sapiens
catagtaaacatctg

SEQ ID NO: 1168047 - DNA, 15 bp, Homo sapiens
acatagtaaacatct

SEQ ID NO: 1168048 - DNA, 15 bp, Homo sapiens
cacatagtaaacatc

SEQ ID NO: 1168049 - DNA, 15 bp, Homo sapiens
gcacatagtaaacat

SEQ ID NO: 1168050 - DNA, 15 bp, Homo sapiens
tgcacatagtaaaca

SEQ ID NO: 1168051 - DNA, 15 bp, Homo sapiens
ttgcacatagtaaac

SEQ ID NO: 1168052 - DNA, 15 bp, Homo sapiens
cttgcacatagtaaa

SEQ ID NO: 1168053 - DNA, 15 bp, Homo sapiens
tcttgcacatagtaa

SEQ ID NO: 1168054 - DNA, 15 bp, Homo sapiens
gtcttgcacatagta

SEQ ID NO: 1168055 - DNA, 15 bp, Homo sapiens
tgtcttgcacatagt

SEQ ID NO: 1168056 - DNA, 15 bp, Homo sapiens
atgtcttgcacatag

SEQ ID NO: 1168057 - DNA, 15 bp, Homo sapiens
aatgtcttgcacata

SEQ ID NO: 1168058 - DNA, 15 bp, Homo sapiens
caatgtcttgcacat

SEQ ID NO: 1168059 - DNA, 15 bp, Homo sapiens
acaatgtcttgcaca

SEQ ID NO: 1168060 - DNA, 15 bp, Homo sapiens
cacaatgtcttgcac

SEQ ID NO: 1168061 - DNA, 15 bp, Homo sapiens
acacaatgtcttgca

SEQ ID NO: 1168062 - DNA, 15 bp, Homo sapiens
aacacaatgtcttgc

SEQ ID NO: 1168063 - DNA, 15 bp, Homo sapiens
taacacaatgtcttg

SEQ ID NO: 1168064 - DNA, 15 bp, Homo sapiens
ttaacacaatgtctt

SEQ ID NO: 1168065 - DNA, 15 bp, Homo sapiens
attaacacaatgtct

SEQ ID NO: 1168066 - DNA, 15 bp, Homo sapiens
gattaacacaatgtc

SEQ ID NO: 1168067 - DNA, 15 bp, Homo sapiens
tgattaacacaatgt

SEQ ID NO: 1168068 - DNA, 15 bp, Homo sapiens
gtgattaacacaatg

SEQ ID NO: 1168069 - DNA, 15 bp, Homo sapiens
agtgattaacacaat

SEQ ID NO: 1168070 - DNA, 15 bp, Homo sapiens
aagtgattaacacaa

SEQ ID NO: 1168071 - DNA, 15 bp, Homo sapiens
taagtgattaacaca

SEQ ID NO: 1168072 - DNA, 15 bp, Homo sapiens
ttaagtgattaacac

SEQ ID NO: 1168073 - DNA, 15 bp, Homo sapiens
gttaagtgattaaca

SEQ ID NO: 1168074 - DNA, 15 bp, Homo sapiens
tgttaagtgattaac

SEQ ID NO: 1168075 - DNA, 15 bp, Homo sapiens
atgttaagtgattaa

SEQ ID NO: 1168076 - DNA, 15 bp, Homo sapiens
gatgttaagtgatta

SEQ ID NO: 1168077 - DNA, 15 bp, Homo sapiens
ggatgttaagtgatt

SEQ ID NO: 1168078 - DNA, 15 bp, Homo sapiens
tggatgttaagtgat

SEQ ID NO: 1168079 - DNA, 15 bp, Homo sapiens
atggatgttaagtga

SEQ ID NO: 1168080 - DNA, 15 bp, Homo sapiens
gatggatgttaagtg

SEQ ID NO: 1168081 - DNA, 15 bp, Homo sapiens
tgatggatgttaagt

SEQ ID NO: 1168082 - DNA, 15 bp, Homo sapiens
gtgatggatgttaag

SEQ ID NO: 1168083 - DNA, 15 bp, Homo sapiens
ggtgatggatgttaa

SEQ ID NO: 1168084 - DNA, 15 bp, Homo sapiens
aggtgatggatgtta

SEQ ID NO: 1168085 - DNA, 15 bp, Homo sapiens
aaggtgatggatgtt

SEQ ID NO: 1168086 - DNA, 15 bp, Homo sapiens
taaggtgatggatgt

SEQ ID NO: 1168087 - DNA, 15 bp, Homo sapiens
ataaggtgatggatg

SEQ ID NO: 1168088 - DNA, 15 bp, Homo sapiens
aataaggtgatggat

SEQ ID NO: 1168089 - DNA, 15 bp, Homo sapiens
gaataaggtgatgga

SEQ ID NO: 1168090 - DNA, 15 bp, Homo sapiens
tgaataaggtgatgg

SEQ ID NO: 1168091 - DNA, 15 bp, Homo sapiens
ttgaataaggtgatg

SEQ ID NO: 1168092 - DNA, 15 bp, Homo sapiens
attgaataaggtgat

SEQ ID NO: 1168093 - DNA, 15 bp, Homo sapiens
gattgaataaggtga

SEQ ID NO: 1168094 - DNA, 15 bp, Homo sapiens
ggattgaataaggtg

SEQ ID NO: 1168095 - DNA, 15 bp, Homo sapiens
aggattgaataaggt

SEQ ID NO: 1168096 - DNA, 15 bp, Homo sapiens
gaggattgaataagg

SEQ ID NO: 1168097 - DNA, 15 bp, Homo sapiens
tgaggattgaataag

SEQ ID NO: 1168098 - DNA, 15 bp, Homo sapiens
gtgaggattgaataa

SEQ ID NO: 1168099 - DNA, 15 bp, Homo sapiens
agtgaggattgaata

SEQ ID NO: 1168100 - DNA, 15 bp, Homo sapiens
cagtgaggattgaat

SEQ ID NO: 1168101 - DNA, 15 bp, Homo sapiens
gcagtgaggattgaa

SEQ ID NO: 1168102 - DNA, 15 bp, Homo sapiens
tgcagtgaggattga

SEQ ID NO: 1168103 - DNA, 15 bp, Homo sapiens
ttgcagtgaggattg

SEQ ID NO: 1168104 - DNA, 15 bp, Homo sapiens
tttgcagtgaggatt

SEQ ID NO: 1168105 - DNA, 15 bp, Homo sapiens
atttgcagtgaggat

SEQ ID NO: 1168106 - DNA, 15 bp, Homo sapiens
gatttgcagtgagga

SEQ ID NO: 1168107 - DNA, 15 bp, Homo sapiens
agatttgcagtgagg

SEQ ID NO: 1168108 - DNA, 15 bp, Homo sapiens
tagatttgcagtgag

SEQ ID NO: 1168109 - DNA, 15 bp, Homo sapiens
atagatttgcagtga

SEQ ID NO: 1168110 - DNA, 15 bp, Homo sapiens
tatagatttgcagtg

SEQ ID NO: 1168111 - DNA, 15 bp, Homo sapiens
ttatagatttgcagt

SEQ ID NO: 1168112 - DNA, 15 bp, Homo sapiens
gttatagatttgcag

SEQ ID NO: 1168113 - DNA, 15 bp, Homo sapiens
tgttatagatttgca

SEQ ID NO: 1168114 - DNA, 15 bp, Homo sapiens
atgttatagatttgc

SEQ ID NO: 1168115 - DNA, 15 bp, Homo sapiens
tatgttatagatttg

SEQ ID NO: 1168116 - DNA, 15 bp, Homo sapiens
ctatgttatagattt

SEQ ID NO: 1168117 - DNA, 15 bp, Homo sapiens
tctatgttatagatt

SEQ ID NO: 1168118 - DNA, 15 bp, Homo sapiens
atctatgttatagat

SEQ ID NO: 1168119 - DNA, 15 bp, Homo sapiens
tatctatgttataga

SEQ ID NO: 1168120 - DNA, 15 bp, Homo sapiens
atatctatgttatag

SEQ ID NO: 1168121 - DNA, 15 bp, Homo sapiens
catatctatgttata

SEQ ID NO: 1168122 - DNA, 15 bp, Homo sapiens
gcatatctatgttat

SEQ ID NO: 1168123 - DNA, 15 bp, Homo sapiens
agcatatctatgtta

SEQ ID NO: 1168124 - DNA, 15 bp, Homo sapiens
gagcatatctatgtt

SEQ ID NO: 1168125 - DNA, 15 bp, Homo sapiens
tgagcatatctatgt

SEQ ID NO: 1168126 - DNA, 15 bp, Homo sapiens
ctgagcatatctatg

SEQ ID NO: 1168127 - DNA, 15 bp, Homo sapiens
tctgagcatatctat

SEQ ID NO: 1168128 - DNA, 15 bp, Homo sapiens
ttctgagcatatcta

SEQ ID NO: 1168129 - DNA, 15 bp, Homo sapiens
attctgagcatatct

SEQ ID NO: 1168130 - DNA, 15 bp, Homo sapiens
gattctgagcatatc

SEQ ID NO: 1168131 - DNA, 15 bp, Homo sapiens
ggattctgagcatat

SEQ ID NO: 1168132 - DNA, 15 bp, Homo sapiens
aggattctgagcata

SEQ ID NO: 1168133 - DNA, 15 bp, Homo sapiens
aaggattctgagcat

SEQ ID NO: 1168134 - DNA, 15 bp, Homo sapiens
caaggattctgagca

SEQ ID NO: 1168135 - DNA, 15 bp, Homo sapiens
acaaggattctgagc

SEQ ID NO: 1168136 - DNA, 15 bp, Homo sapiens
aacaaggattctgag

SEQ ID NO: 1168137 - DNA, 15 bp, Homo sapiens
aaacaaggattctga

SEQ ID NO: 1168138 - DNA, 15 bp, Homo sapiens
aaaacaaggattctg

SEQ ID NO: 1168139 - DNA, 15 bp, Homo sapiens
taaaacaaggattct

SEQ ID NO: 1168140 - DNA, 15 bp, Homo sapiens
gtaaaacaaggattc

SEQ ID NO: 1168141 - DNA, 15 bp, Homo sapiens
tgtaaaacaaggatt

SEQ ID NO: 1168142 - DNA, 15 bp, Homo sapiens
ctgtaaaacaaggat

SEQ ID NO: 1168143 - DNA, 15 bp, Homo sapiens
tctgtaaaacaagga

SEQ ID NO: 1168144 - DNA, 15 bp, Homo sapiens
atctgtaaaacaagg

SEQ ID NO: 1168145 - DNA, 15 bp, Homo sapiens
catctgtaaaacaag

SEQ ID NO: 1168146 - DNA, 15 bp, Homo sapiens
tcatctgtaaaacaa

SEQ ID NO: 1168147 - DNA, 15 bp, Homo sapiens
ctcatctgtaaaaca

SEQ ID NO: 1168148 - DNA, 15 bp, Homo sapiens
cctcatctgtaaaac

SEQ ID NO: 1168149 - DNA, 15 bp, Homo sapiens
gcctcatctgtaaaa

SEQ ID NO: 1168150 - DNA, 15 bp, Homo sapiens
agcctcatctgtaaa

SEQ ID NO: 1168151 - DNA, 15 bp, Homo sapiens
gagcctcatctgtaa

SEQ ID NO: 1168152 - DNA, 15 bp, Homo sapiens
tgagcctcatctgta

SEQ ID NO: 1168153 - DNA, 15 bp, Homo sapiens
ctgagcctcatctgt

SEQ ID NO: 1168154 - DNA, 15 bp, Homo sapiens
cctgagcctcatctg

SEQ ID NO: 1168155 - DNA, 15 bp, Homo sapiens
ccctgagcctcatct

SEQ ID NO: 1168156 - DNA, 15 bp, Homo sapiens
gccctgagcctcatc

SEQ ID NO: 1168157 - DNA, 15 bp, Homo sapiens
tgccctgagcctcat

SEQ ID NO: 1168158 - DNA, 15 bp, Homo sapiens
ctgccctgagcctca

SEQ ID NO: 1168159 - DNA, 15 bp, Homo sapiens
actgccctgagcctc

SEQ ID NO: 1168160 - DNA, 15 bp, Homo sapiens
aactgccctgagcct

SEQ ID NO: 1168161 - DNA, 15 bp, Homo sapiens
taactgccctgagcc

SEQ ID NO: 1168162 - DNA, 15 bp, Homo sapiens
ttaactgccctgagc

SEQ ID NO: 1168163 - DNA, 15 bp, Homo sapiens
cttaactgccctgag

SEQ ID NO: 1168164 - DNA, 15 bp, Homo sapiens
gcttaactgccctga

SEQ ID NO: 1168165 - DNA, 15 bp, Homo sapiens
tgcttaactgccctg

SEQ ID NO: 1168166 - DNA, 15 bp, Homo sapiens
ttgcttaactgccct

SEQ ID NO: 1168167 - DNA, 15 bp, Homo sapiens
gttgcttaactgccc

SEQ ID NO: 1168168 - DNA, 15 bp, Homo sapiens
agttgcttaactgcc

SEQ ID NO: 1168169 - DNA, 15 bp, Homo sapiens
aagttgcttaactgc

SEQ ID NO: 1168170 - DNA, 15 bp, Homo sapiens
caagttgcttaactg

SEQ ID NO: 1168171 - DNA, 15 bp, Homo sapiens
gcaagttgcttaact

SEQ ID NO: 1168172 - DNA, 15 bp, Homo sapiens
agcaagttgcttaac

SEQ ID NO: 1168173 - DNA, 15 bp, Homo sapiens
gagcaagttgcttaa

SEQ ID NO: 1168174 - DNA, 15 bp, Homo sapiens
tgagcaagttgctta

SEQ ID NO: 1168175 - DNA, 15 bp, Homo sapiens
ttgagcaagttgctt

SEQ ID NO: 1168176 - DNA, 15 bp, Homo sapiens
cttgagcaagttgct

SEQ ID NO: 1168177 - DNA, 15 bp, Homo sapiens
ccttgagcaagttgc

SEQ ID NO: 1168178 - DNA, 15 bp, Homo sapiens
accttgagcaagttg

SEQ ID NO: 1168179 - DNA, 15 bp, Homo sapiens
gaccttgagcaagtt

SEQ ID NO: 1168180 - DNA, 15 bp, Homo sapiens
gtgtgaccttgagca

SEQ ID NO: 1168181 - DNA, 15 bp, Homo sapiens
tgtgtgaccttgagc

SEQ ID NO: 1168182 - DNA, 15 bp, Homo sapiens
cagctgtgtgacctt

SEQ ID NO: 1168183 - DNA, 15 bp, Homo sapiens
ccagctgtgtgacct

SEQ ID NO: 1168184 - DNA, 15 bp, Homo sapiens
accagctgtgtgacc

SEQ ID NO: 1168185 - DNA, 15 bp, Homo sapiens
taccagctgtgtgac

SEQ ID NO: 1168186 - DNA, 15 bp, Homo sapiens
ttaccagctgtgtga

SEQ ID NO: 1168187 - DNA, 15 bp, Homo sapiens
cttaccagctgtgtg

SEQ ID NO: 1168188 - DNA, 15 bp, Homo sapiens
acttaccagctgtgt

SEQ ID NO: 1168189 - DNA, 15 bp, Homo sapiens
cacttaccagctgtg

SEQ ID NO: 1168190 - DNA, 15 bp, Homo sapiens
ccacttaccagctgt

SEQ ID NO: 1168191 - DNA, 15 bp, Homo sapiens
gccacttaccagctg

SEQ ID NO: 1168192 - DNA, 15 bp, Homo sapiens
tgccacttaccagct

SEQ ID NO: 1168193 - DNA, 15 bp, Homo sapiens
ctgccacttaccagc

SEQ ID NO: 1168194 - DNA, 15 bp, Homo sapiens
tctgccacttaccag

SEQ ID NO: 1168195 - DNA, 15 bp, Homo sapiens
ctctgccacttacca

SEQ ID NO: 1168196 - DNA, 15 bp, Homo sapiens
gctctgccacttacc

SEQ ID NO: 1168197 - DNA, 15 bp, Homo sapiens
tgctctgccacttac

SEQ ID NO: 1168198 - DNA, 15 bp, Homo sapiens
ctgctctgccactta

SEQ ID NO: 1168199 - DNA, 15 bp, Homo sapiens
tctgctctgccactt

SEQ ID NO: 1168200 - DNA, 15 bp, Homo sapiens
ctctgctctgccact

SEQ ID NO: 1168201 - DNA, 15 bp, Homo sapiens
tctctgctctgccac

SEQ ID NO: 1168202 - DNA, 15 bp, Homo sapiens
ttctctgctctgcca

SEQ ID NO: 1168203 - DNA, 15 bp, Homo sapiens
tttctctgctctgcc

SEQ ID NO: 1168204 - DNA, 15 bp, Homo sapiens
ctttctctgctctgc

SEQ ID NO: 1168205 - DNA, 15 bp, Homo sapiens
cctttctctgctctg

SEQ ID NO: 1168206 - DNA, 15 bp, Homo sapiens
gcctttctctgctct

SEQ ID NO: 1168207 - DNA, 15 bp, Homo sapiens
agcctttctctgctc

SEQ ID NO: 1168208 - DNA, 15 bp, Homo sapiens
gagcctttctctgct

SEQ ID NO: 1168209 - DNA, 15 bp, Homo sapiens
tgagcctttctctgc

SEQ ID NO: 1168210 - DNA, 15 bp, Homo sapiens
atgagcctttctctg

SEQ ID NO: 1168211 - DNA, 15 bp, Homo sapiens
aatgagcctttctct

SEQ ID NO: 1168212 - DNA, 15 bp, Homo sapiens
caatgagcctttctc

SEQ ID NO: 1168213 - DNA, 15 bp, Homo sapiens
ccaatgagcctttct

SEQ ID NO: 1168214 - DNA, 15 bp, Homo sapiens
gccaatgagcctttc

SEQ ID NO: 1168215 - DNA, 15 bp, Homo sapiens
agccaatgagccttt

SEQ ID NO: 1168216 - DNA, 15 bp, Homo sapiens
aagccaatgagcctt

SEQ ID NO: 1168217 - DNA, 15 bp, Homo sapiens
caagccaatgagcct

SEQ ID NO: 1168218 - DNA, 15 bp, Homo sapiens
acaagccaatgagcc

SEQ ID NO: 1168219 - DNA, 15 bp, Homo sapiens
gacaagccaatgagc

SEQ ID NO: 1168220 - DNA, 15 bp, Homo sapiens
ggacaagccaatgag

SEQ ID NO: 1168221 - DNA, 15 bp, Homo sapiens
gggacaagccaatga

SEQ ID NO: 1168222 - DNA, 15 bp, Homo sapiens
tgggacaagccaatg

SEQ ID NO: 1168223 - DNA, 15 bp, Homo sapiens
ttgggacaagccaat

SEQ ID NO: 1168224 - DNA, 15 bp, Homo sapiens
gttgggacaagccaa

SEQ ID NO: 1168225 - DNA, 15 bp, Homo sapiens
agttgggacaagcca

SEQ ID NO: 1168226 - DNA, 15 bp, Homo sapiens
gagttgggacaagcc

SEQ ID NO: 1168227 - DNA, 15 bp, Homo sapiens
tgagttgggacaagc

SEQ ID NO: 1168228 - DNA, 15 bp, Homo sapiens
gtgagttgggacaag

SEQ ID NO: 1168229 - DNA, 15 bp, Homo sapiens
tgtgagttgggacaa

SEQ ID NO: 1168230 - DNA, 15 bp, Homo sapiens
gtgtgagttgggaca

SEQ ID NO: 1168231 - DNA, 15 bp, Homo sapiens
ggtgtgagttgggac

SEQ ID NO: 1168232 - DNA, 15 bp, Homo sapiens
gggtgtgagttggga

SEQ ID NO: 1168233 - DNA, 15 bp, Homo sapiens
tgggtgtgagttggg

SEQ ID NO: 1168234 - DNA, 15 bp, Homo sapiens
gtgggtgtgagttgg

SEQ ID NO: 1168235 - DNA, 15 bp, Homo sapiens
tgtgggtgtgagttg

SEQ ID NO: 1168236 - DNA, 15 bp, Homo sapiens
ctgtgggtgtgagtt

SEQ ID NO: 1168237 - DNA, 15 bp, Homo sapiens
cctgtgggtgtgagt

SEQ ID NO: 1168238 - DNA, 15 bp, Homo sapiens
tcctgtgggtgtgag

SEQ ID NO: 1168239 - DNA, 15 bp, Homo sapiens
ttcctgtgggtgtga

SEQ ID NO: 1168240 - DNA, 15 bp, Homo sapiens
cttcctgtgggtgtg

SEQ ID NO: 1168241 - DNA, 15 bp, Homo sapiens
gcttcctgtgggtgt

SEQ ID NO: 1168242 - DNA, 15 bp, Homo sapiens
ggcttcctgtgggtg

SEQ ID NO: 1168243 - DNA, 15 bp, Homo sapiens
tggcttcctgtgggt

SEQ ID NO: 1168244 - DNA, 15 bp, Homo sapiens
ctggcttcctgtggg

SEQ ID NO: 1168245 - DNA, 15 bp, Homo sapiens
tctggcttcctgtgg

SEQ ID NO: 1168246 - DNA, 15 bp, Homo sapiens
gtctggcttcctgtg

SEQ ID NO: 1168247 - DNA, 15 bp, Homo sapiens
agtctggcttcctgt

SEQ ID NO: 1168248 - DNA, 15 bp, Homo sapiens
gagtctggcttcctg

SEQ ID NO: 1168249 - DNA, 15 bp, Homo sapiens
tgagtctggcttcct

SEQ ID NO: 1168250 - DNA, 15 bp, Homo sapiens
ctgagtctggcttcc

SEQ ID NO: 1168251 - DNA, 15 bp, Homo sapiens
cctgagtctggcttc

SEQ ID NO: 1168252 - DNA, 15 bp, Homo sapiens
gcctgagtctggctt

SEQ ID NO: 1168253 - DNA, 15 bp, Homo sapiens
ggcctgagtctggct

SEQ ID NO: 1168254 - DNA, 15 bp, Homo sapiens
aggcctgagtctggc

SEQ ID NO: 1168255 - DNA, 15 bp, Homo sapiens
gaggcctgagtctgg

SEQ ID NO: 1168256 - DNA, 15 bp, Homo sapiens
agaggcctgagtctg

SEQ ID NO: 1168257 - DNA, 15 bp, Homo sapiens
cagaggcctgagtct

SEQ ID NO: 1168258 - DNA, 15 bp, Homo sapiens
tcagaggcctgagtc

SEQ ID NO: 1168259 - DNA, 15 bp, Homo sapiens
ttcagaggcctgagt

SEQ ID NO: 1168260 - DNA, 15 bp, Homo sapiens
cttcagaggcctgag

SEQ ID NO: 1168261 - DNA, 15 bp, Homo sapiens
acttcagaggcctga

SEQ ID NO: 1168262 - DNA, 15 bp, Homo sapiens
aacttcagaggcctg

SEQ ID NO: 1168263 - DNA, 15 bp, Homo sapiens
gaacttcagaggcct

SEQ ID NO: 1168264 - DNA, 15 bp, Homo sapiens
tgaacttcagaggcc

SEQ ID NO: 1168265 - DNA, 15 bp, Homo sapiens
gtgaacttcagaggc

SEQ ID NO: 1168266 - DNA, 15 bp, Homo sapiens
ggtgaacttcagagg

SEQ ID NO: 1168267 - DNA, 15 bp, Homo sapiens
tggtgaacttcagag

SEQ ID NO: 1168268 - DNA, 15 bp, Homo sapiens
atggtgaacttcaga

SEQ ID NO: 1168269 - DNA, 15 bp, Homo sapiens
gatggtgaacttcag

SEQ ID NO: 1168270 - DNA, 15 bp, Homo sapiens
ggatggtgaacttca

SEQ ID NO: 1168271 - DNA, 15 bp, Homo sapiens
gggatggtgaacttc

SEQ ID NO: 1168272 - DNA, 15 bp, Homo sapiens
tgggatggtgaactt

SEQ ID NO: 1168273 - DNA, 15 bp, Homo sapiens
ctgggatggtgaact

SEQ ID NO: 1168274 - DNA, 15 bp, Homo sapiens
tctgggatggtgaac

SEQ ID NO: 1168275 - DNA, 15 bp, Homo sapiens
gtctgggatggtgaa

SEQ ID NO: 1168276 - DNA, 15 bp, Homo sapiens
ggtctgggatggtga

SEQ ID NO: 1168277 - DNA, 15 bp, Homo sapiens
gggtctgggatggtg

SEQ ID NO: 1168278 - DNA, 15 bp, Homo sapiens
ggggtctgggatggt

SEQ ID NO: 1168279 - DNA, 15 bp, Homo sapiens
tggggtctgggatgg

SEQ ID NO: 1168280 - DNA, 15 bp, Homo sapiens
gtggggtctgggatg

SEQ ID NO: 1168281 - DNA, 15 bp, Homo sapiens
ggtggggtctgggat

SEQ ID NO: 1168282 - DNA, 15 bp, Homo sapiens
tggtggggtctggga

SEQ ID NO: 1168283 - DNA, 15 bp, Homo sapiens
atggtggggtctggg

SEQ ID NO: 1168284 - DNA, 15 bp, Homo sapiens
catggtggggtctgg

SEQ ID NO: 1168285 - DNA, 15 bp, Homo sapiens
acatggtggggtctg

SEQ ID NO: 1168286 - DNA, 15 bp, Homo sapiens
gacatggtggggtct

SEQ ID NO: 1168287 - DNA, 15 bp, Homo sapiens
ggacatggtggggtc

SEQ ID NO: 1168288 - DNA, 15 bp, Homo sapiens
gggacatggtggggt

SEQ ID NO: 1168289 - DNA, 15 bp, Homo sapiens
tgggacatggtgggg

SEQ ID NO: 1168290 - DNA, 15 bp, Homo sapiens
atgggacatggtggg

SEQ ID NO: 1168291 - DNA, 15 bp, Homo sapiens
gatgggacatggtgg

SEQ ID NO: 1168292 - DNA, 15 bp, Homo sapiens
agatgggacatggtg

SEQ ID NO: 1168293 - DNA, 15 bp, Homo sapiens
cagatgggacatggt

SEQ ID NO: 1168294 - DNA, 15 bp, Homo sapiens
ccagatgggacatgg

SEQ ID NO: 1168295 - DNA, 15 bp, Homo sapiens
cccagatgggacatg

SEQ ID NO: 1168296 - DNA, 15 bp, Homo sapiens
acccagatgggacat

SEQ ID NO: 1168297 - DNA, 15 bp, Homo sapiens
gacccagatgggaca

SEQ ID NO: 1168298 - DNA, 15 bp, Homo sapiens
ggacccagatgggac

SEQ ID NO: 1168299 - DNA, 15 bp, Homo sapiens
gggacccagatggga

SEQ ID NO: 1168300 - DNA, 15 bp, Homo sapiens
agggacccagatggg

SEQ ID NO: 1168301 - DNA, 15 bp, Homo sapiens
cagggacccagatgg

SEQ ID NO: 1168302 - DNA, 15 bp, Homo sapiens
ccagggacccagatg

SEQ ID NO: 1168303 - DNA, 15 bp, Homo sapiens
cccagggacccagat

SEQ ID NO: 1168304 - DNA, 15 bp, Homo sapiens
ccccagggacccaga

SEQ ID NO: 1168305 - DNA, 15 bp, Homo sapiens
tccccagggacccag

SEQ ID NO: 1168306 - DNA, 15 bp, Homo sapiens
ctccccagggaccca

SEQ ID NO: 1168307 - DNA, 15 bp, Homo sapiens
gctccccagggaccc

SEQ ID NO: 1168308 - DNA, 15 bp, Homo sapiens
agctccccagggacc

SEQ ID NO: 1168309 - DNA, 15 bp, Homo sapiens
cagctccccagggac

SEQ ID NO: 1168310 - DNA, 15 bp, Homo sapiens
acagctccccaggga

SEQ ID NO: 1168311 - DNA, 15 bp, Homo sapiens
cacagctccccaggg

SEQ ID NO: 1168312 - DNA, 15 bp, Homo sapiens
ccacagctccccagg

SEQ ID NO: 1168313 - DNA, 15 bp, Homo sapiens
cccacagctccccag

SEQ ID NO: 1168314 - DNA, 15 bp, Homo sapiens
tcccacagctcccca

SEQ ID NO: 1168315 - DNA, 15 bp, Homo sapiens
ttcccacagctcccc

SEQ ID NO: 1168316 - DNA, 15 bp, Homo sapiens
attcccacagctccc

SEQ ID NO: 1168317 - DNA, 15 bp, Homo sapiens
tattcccacagctcc

SEQ ID NO: 1168318 - DNA, 15 bp, Homo sapiens
atattcccacagctc

SEQ ID NO: 1168319 - DNA, 15 bp, Homo sapiens
catattcccacagct

SEQ ID NO: 1168320 - DNA, 15 bp, Homo sapiens
ccatattcccacagc

SEQ ID NO: 1168321 - DNA, 15 bp, Homo sapiens
tccatattcccacag

SEQ ID NO: 1168322 - DNA, 15 bp, Homo sapiens
atccatattcccaca

SEQ ID NO: 1168323 - DNA, 15 bp, Homo sapiens
gatccatattcccac

SEQ ID NO: 1168324 - DNA, 15 bp, Homo sapiens
ggatccatattccca

SEQ ID NO: 1168325 - DNA, 15 bp, Homo sapiens
aggatccatattccc

SEQ ID NO: 1168326 - DNA, 15 bp, Homo sapiens
aaggatccatattcc

SEQ ID NO: 1168327 - DNA, 15 bp, Homo sapiens
caaggatccatattc

SEQ ID NO: 1168328 - DNA, 15 bp, Homo sapiens
tcaaggatccatatt

SEQ ID NO: 1168329 - DNA, 15 bp, Homo sapiens
ttcaaggatccatat

SEQ ID NO: 1168330 - DNA, 15 bp, Homo sapiens
attcaaggatccata

SEQ ID NO: 1168331 - DNA, 15 bp, Homo sapiens
gattcaaggatccat

SEQ ID NO: 1168332 - DNA, 15 bp, Homo sapiens
agattcaaggatcca

SEQ ID NO: 1168333 - DNA, 15 bp, Homo sapiens
cagattcaaggatcc

SEQ ID NO: 1168334 - DNA, 15 bp, Homo sapiens
tcagattcaaggatc

SEQ ID NO: 1168335 - DNA, 15 bp, Homo sapiens
gtcagattcaaggat

SEQ ID NO: 1168336 - DNA, 15 bp, Homo sapiens
ggtcagattcaagga

SEQ ID NO: 1168337 - DNA, 15 bp, Homo sapiens
tggtcagattcaagg

SEQ ID NO: 1168338 - DNA, 15 bp, Homo sapiens
ctggtcagattcaag

SEQ ID NO: 1168339 - DNA, 15 bp, Homo sapiens
cctggtcagattcaa

SEQ ID NO: 1168340 - DNA, 15 bp, Homo sapiens
ccctggtcagattca

SEQ ID NO: 1168341 - DNA, 15 bp, Homo sapiens
cccctggtcagattc

SEQ ID NO: 1168342 - DNA, 15 bp, Homo sapiens
ccccctggtcagatt

SEQ ID NO: 1168343 - DNA, 15 bp, Homo sapiens
accccctggtcagat

SEQ ID NO: 1168344 - DNA, 15 bp, Homo sapiens
aaccccctggtcaga

SEQ ID NO: 1168345 - DNA, 15 bp, Homo sapiens
gaaccccctggtcag

SEQ ID NO: 1168346 - DNA, 15 bp, Homo sapiens
ggaaccccctggtca

SEQ ID NO: 1168347 - DNA, 15 bp, Homo sapiens
aggaaccccctggtc

SEQ ID NO: 1168348 - DNA, 15 bp, Homo sapiens
caggaaccccctggt

SEQ ID NO: 1168349 - DNA, 15 bp, Homo sapiens
ccaggaaccccctgg

SEQ ID NO: 1168350 - DNA, 15 bp, Homo sapiens
cccaggaaccccctg

SEQ ID NO: 1168351 - DNA, 15 bp, Homo sapiens
acccaggaaccccct

SEQ ID NO: 1168352 - DNA, 15 bp, Homo sapiens
cacccaggaaccccc

SEQ ID NO: 1168353 - DNA, 15 bp, Homo sapiens
gcacccaggaacccc

SEQ ID NO: 1168354 - DNA, 15 bp, Homo sapiens
ggcacccaggaaccc

SEQ ID NO: 1168355 - DNA, 15 bp, Homo sapiens
aggcacccaggaacc

SEQ ID NO: 1168356 - DNA, 15 bp, Homo sapiens
gaggcacccaggaac

SEQ ID NO: 1168357 - DNA, 15 bp, Homo sapiens
agaggcacccaggaa

SEQ ID NO: 1168358 - DNA, 15 bp, Homo sapiens
cagaggcacccagga

SEQ ID NO: 1168359 - DNA, 15 bp, Homo sapiens
tcagaggcacccagg

SEQ ID NO: 1168360 - DNA, 15 bp, Homo sapiens
ttcagaggcacccag

SEQ ID NO: 1168361 - DNA, 15 bp, Homo sapiens
tttcagaggcaccca

SEQ ID NO: 1168362 - DNA, 15 bp, Homo sapiens
ctttcagaggcaccc

SEQ ID NO: 1168363 - DNA, 15 bp, Homo sapiens
cctttcagaggcacc

SEQ ID NO: 1168364 - DNA, 15 bp, Homo sapiens
acctttcagaggcac

SEQ ID NO: 1168365 - DNA, 15 bp, Homo sapiens
gacctttcagaggca

SEQ ID NO: 1168366 - DNA, 15 bp, Homo sapiens
tgacctttcagaggc

SEQ ID NO: 1168367 - DNA, 15 bp, Homo sapiens
ctgacctttcagagg

SEQ ID NO: 1168368 - DNA, 15 bp, Homo sapiens
actgacctttcagag

SEQ ID NO: 1168369 - DNA, 15 bp, Homo sapiens
gactgacctttcaga

SEQ ID NO: 1168370 - DNA, 15 bp, Homo sapiens
tgactgacctttcag

SEQ ID NO: 1168371 - DNA, 15 bp, Homo sapiens
atgactgacctttca

SEQ ID NO: 1168372 - DNA, 15 bp, Homo sapiens
aatgactgacctttc

SEQ ID NO: 1168373 - DNA, 15 bp, Homo sapiens
caatgactgaccttt

SEQ ID NO: 1168374 - DNA, 15 bp, Homo sapiens
acaatgactgacctt

SEQ ID NO: 1168375 - DNA, 15 bp, Homo sapiens
gacaatgactgacct

SEQ ID NO: 1168376 - DNA, 15 bp, Homo sapiens
agacaatgactgacc

SEQ ID NO: 1168377 - DNA, 15 bp, Homo sapiens
aagacaatgactgac

SEQ ID NO: 1168378 - DNA, 15 bp, Homo sapiens
aaagacaatgactga

SEQ ID NO: 1168379 - DNA, 15 bp, Homo sapiens
caaagacaatgactg

SEQ ID NO: 1168380 - DNA, 15 bp, Homo sapiens
gcaaagacaatgact

SEQ ID NO: 1168381 - DNA, 15 bp, Homo sapiens
tgcaaagacaatgac

SEQ ID NO: 1168382 - DNA, 15 bp, Homo sapiens
gtgcaaagacaatga

SEQ ID NO: 1168383 - DNA, 15 bp, Homo sapiens
agtgcaaagacaatg

SEQ ID NO: 1168384 - DNA, 15 bp, Homo sapiens
gagtgcaaagacaat

SEQ ID NO: 1168385 - DNA, 15 bp, Homo sapiens
agagtgcaaagacaa

SEQ ID NO: 1168386 - DNA, 15 bp, Homo sapiens
cagagtgcaaagaca

SEQ ID NO: 1168387 - DNA, 15 bp, Homo sapiens
ccagagtgcaaagac

SEQ ID NO: 1168388 - DNA, 15 bp, Homo sapiens
tccagagtgcaaaga

SEQ ID NO: 1168389 - DNA, 15 bp, Homo sapiens
atccagagtgcaaag

SEQ ID NO: 1168390 - DNA, 15 bp, Homo sapiens
catccagagtgcaaa

SEQ ID NO: 1168391 - DNA, 15 bp, Homo sapiens
acatccagagtgcaa

SEQ ID NO: 1168392 - DNA, 15 bp, Homo sapiens
aacatccagagtgca

SEQ ID NO: 1168393 - DNA, 15 bp, Homo sapiens
aaacatccagagtgc

SEQ ID NO: 1168394 - DNA, 15 bp, Homo sapiens
aaaacatccagagtg

SEQ ID NO: 1168395 - DNA, 15 bp, Homo sapiens
taaaacatccagagt

SEQ ID NO: 1168396 - DNA, 15 bp, Homo sapiens
ataaaacatccagag

SEQ ID NO: 1168397 - DNA, 15 bp, Homo sapiens
tataaaacatccaga

SEQ ID NO: 1168398 - DNA, 15 bp, Homo sapiens
ttataaaacatccag

SEQ ID NO: 1168399 - DNA, 15 bp, Homo sapiens
cttataaaacatcca

SEQ ID NO: 1168400 - DNA, 15 bp, Homo sapiens
gcttataaaacatcc

SEQ ID NO: 1168401 - DNA, 15 bp, Homo sapiens
agcttataaaacatc

SEQ ID NO: 1168402 - DNA, 15 bp, Homo sapiens
gagcttataaaacat

SEQ ID NO: 1168403 - DNA, 15 bp, Homo sapiens
ggagcttataaaaca

SEQ ID NO: 1168404 - DNA, 15 bp, Homo sapiens
tggagcttataaaac

SEQ ID NO: 1168405 - DNA, 15 bp, Homo sapiens
ctggagcttataaaa

SEQ ID NO: 1168406 - DNA, 15 bp, Homo sapiens
cctggagcttataaa

SEQ ID NO: 1168407 - DNA, 15 bp, Homo sapiens
ccctggagcttataa

SEQ ID NO: 1168408 - DNA, 15 bp, Homo sapiens
tccctggagcttata

SEQ ID NO: 1168409 - DNA, 15 bp, Homo sapiens
atccctggagcttat

SEQ ID NO: 1168410 - DNA, 15 bp, Homo sapiens
tatccctggagctta

SEQ ID NO: 1168411 - DNA, 15 bp, Homo sapiens
ctatccctggagctt

SEQ ID NO: 1168412 - DNA, 15 bp, Homo sapiens
actatccctggagct

SEQ ID NO: 1168413 - DNA, 15 bp, Homo sapiens
tactatccctggagc

SEQ ID NO: 1168414 - DNA, 15 bp, Homo sapiens
gtactatccctggag

SEQ ID NO: 1168415 - DNA, 15 bp, Homo sapiens
tgtactatccctgga

SEQ ID NO: 1168416 - DNA, 15 bp, Homo sapiens
atgtactatccctgg

SEQ ID NO: 1168417 - DNA, 15 bp, Homo sapiens
aatgtactatccctg

SEQ ID NO: 1168418 - DNA, 15 bp, Homo sapiens
aaatgtactatccct

SEQ ID NO: 1168419 - DNA, 15 bp, Homo sapiens
aaaatgtactatccc

SEQ ID NO: 1168420 - DNA, 15 bp, Homo sapiens
taaaatgtactatcc

SEQ ID NO: 1168421 - DNA, 15 bp, Homo sapiens
gtaaaatgtactatc

SEQ ID NO: 1168422 - DNA, 15 bp, Homo sapiens
tgtaaaatgtactat

SEQ ID NO: 1168423 - DNA, 15 bp, Homo sapiens
ttgtaaaatgtacta

SEQ ID NO: 1168424 - DNA, 15 bp, Homo sapiens
tttgtaaaatgtact

SEQ ID NO: 1168425 - DNA, 15 bp, Homo sapiens
ttttgtaaaatgtac

SEQ ID NO: 1168426 - DNA, 15 bp, Homo sapiens
tttttgtaaaatgta

SEQ ID NO: 1168427 - DNA, 15 bp, Homo sapiens
ttttttgtaaaatgt

SEQ ID NO: 1168428 - DNA, 15 bp, Homo sapiens
tttttttgtaaaatg

SEQ ID NO: 1168429 - DNA, 15 bp, Homo sapiens
ttttttttgtaaaat

SEQ ID NO: 1168430 - DNA, 15 bp, Homo sapiens
attttttttttgtaa

SEQ ID NO: 1168431 - DNA, 15 bp, Homo sapiens
aattttttttttgta

SEQ ID NO: 1168432 - DNA, 15 bp, Homo sapiens
taattttttttttgt

SEQ ID NO: 1168433 - DNA, 15 bp, Homo sapiens
ataattttttttttg

SEQ ID NO: 1168434 - DNA, 15 bp, Homo sapiens
atataattttttttt

SEQ ID NO: 1168435 - DNA, 15 bp, Homo sapiens
tatataatttttttt

SEQ ID NO: 1168436 - DNA, 15 bp, Homo sapiens
atatataattttttt

SEQ ID NO: 1168437 - DNA, 15 bp, Homo sapiens
tatatataatttttt

SEQ ID NO: 1168438 - DNA, 15 bp, Homo sapiens
atatatataattttt

SEQ ID NO: 1168439 - DNA, 15 bp, Homo sapiens
tatatatataatttt

SEQ ID NO: 1168440 - DNA, 15 bp, Homo sapiens
atatatatataattt

SEQ ID NO: 1168441 - DNA, 15 bp, Homo sapiens
tatatatatatataa

SEQ ID NO: 1168442 - DNA, 15 bp, Homo sapiens
gtatatatatatata

SEQ ID NO: 1168443 - DNA, 15 bp, Homo sapiens
tgtatatatatatat

SEQ ID NO: 1168444 - DNA, 15 bp, Homo sapiens
gtgtatatatatata

SEQ ID NO: 1168445 - DNA, 15 bp, Homo sapiens
tgtgtatatatatat

SEQ ID NO: 1168446 - DNA, 15 bp, Homo sapiens
gtgtgtatatatata

SEQ ID NO: 1168447 - DNA, 15 bp, Homo sapiens
tgtgtgtgtatatat

SEQ ID NO: 1168448 - DNA, 15 bp, Homo sapiens
atatatgtgtgtgtg

SEQ ID NO: 1168449 - DNA, 15 bp, Homo sapiens
tatatatgtgtgtgt

SEQ ID NO: 1168450 - DNA, 15 bp, Homo sapiens
atatatatgtgtgtg

SEQ ID NO: 1168451 - DNA, 15 bp, Homo sapiens
tatatatatgtgtgt

SEQ ID NO: 1168452 - DNA, 15 bp, Homo sapiens
atatatatatgtgtg

SEQ ID NO: 1168453 - DNA, 15 bp, Homo sapiens
tatatatatatgtgt

SEQ ID NO: 1168454 - DNA, 15 bp, Homo sapiens
ttatatatatatgtg

SEQ ID NO: 1168455 - DNA, 15 bp, Homo sapiens
gttatatatatatgt

SEQ ID NO: 1168456 - DNA, 15 bp, Homo sapiens
agttatatatatatg

SEQ ID NO: 1168457 - DNA, 15 bp, Homo sapiens
ttagttatatatata

SEQ ID NO: 1168458 - DNA, 15 bp, Homo sapiens
attagttatatatat

SEQ ID NO: 1168459 - DNA, 15 bp, Homo sapiens
cattagttatatata

SEQ ID NO: 1168460 - DNA, 15 bp, Homo sapiens
tcattagttatatat

SEQ ID NO: 1168461 - DNA, 15 bp, Homo sapiens
ttcattagttatata

SEQ ID NO: 1168462 - DNA, 15 bp, Homo sapiens
tttcattagttatat

SEQ ID NO: 1168463 - DNA, 15 bp, Homo sapiens
atttcattagttata

SEQ ID NO: 1168464 - DNA, 15 bp, Homo sapiens
gatttcattagttat

SEQ ID NO: 1168465 - DNA, 15 bp, Homo sapiens
agatttcattagtta

SEQ ID NO: 1168466 - DNA, 15 bp, Homo sapiens
cagatttcattagtt

SEQ ID NO: 1168467 - DNA, 15 bp, Homo sapiens
tcagatttcattagt

SEQ ID NO: 1168468 - DNA, 15 bp, Homo sapiens
ttcagatttcattag

SEQ ID NO: 1168469 - DNA, 15 bp, Homo sapiens
attcagatttcatta

SEQ ID NO: 1168470 - DNA, 15 bp, Homo sapiens
tattcagatttcatt

SEQ ID NO: 1168471 - DNA, 15 bp, Homo sapiens
ttattcagatttcat

SEQ ID NO: 1168472 - DNA, 15 bp, Homo sapiens
tttattcagatttca

SEQ ID NO: 1168473 - DNA, 15 bp, Homo sapiens
ctttattcagatttc

SEQ ID NO: 1168474 - DNA, 15 bp, Homo sapiens
actttattcagattt

SEQ ID NO: 1168475 - DNA, 15 bp, Homo sapiens
gactttattcagatt

SEQ ID NO: 1168476 - DNA, 15 bp, Homo sapiens
agactttattcagat

SEQ ID NO: 1168477 - DNA, 15 bp, Homo sapiens
cagactttattcaga

SEQ ID NO: 1168478 - DNA, 15 bp, Homo sapiens
acagactttattcag

SEQ ID NO: 1168479 - DNA, 15 bp, Homo sapiens
tacagactttattca

SEQ ID NO: 1168480 - DNA, 15 bp, Homo sapiens
ctacagactttattc

SEQ ID NO: 1168481 - DNA, 15 bp, Homo sapiens
actacagactttatt

SEQ ID NO: 1168482 - DNA, 15 bp, Homo sapiens
aactacagactttat

SEQ ID NO: 1168483 - DNA, 15 bp, Homo sapiens
taactacagacttta

SEQ ID NO: 1168484 - DNA, 15 bp, Homo sapiens
ttaactacagacttt

SEQ ID NO: 1168485 - DNA, 15 bp, Homo sapiens
attaactacagactt

SEQ ID NO: 1168486 - DNA, 15 bp, Homo sapiens
tattaactacagact

SEQ ID NO: 1168487 - DNA, 15 bp, Homo sapiens
ctattaactacagac

SEQ ID NO: 1168488 - DNA, 15 bp, Homo sapiens
gctattaactacaga

SEQ ID NO: 1168489 - DNA, 15 bp, Homo sapiens
tgctattaactacag

SEQ ID NO: 1168490 - DNA, 15 bp, Homo sapiens
atgctattaactaca

SEQ ID NO: 1168491 - DNA, 15 bp, Homo sapiens
aatgctattaactac

SEQ ID NO: 1168492 - DNA, 15 bp, Homo sapiens
caatgctattaacta

SEQ ID NO: 1168493 - DNA, 15 bp, Homo sapiens
acaatgctattaact

SEQ ID NO: 1168494 - DNA, 15 bp, Homo sapiens
tacaatgctattaac

SEQ ID NO: 1168495 - DNA, 15 bp, Homo sapiens
gtacaatgctattaa

SEQ ID NO: 1168496 - DNA, 15 bp, Homo sapiens
tgtacaatgctatta

SEQ ID NO: 1168497 - DNA, 15 bp, Homo sapiens
atgtacaatgctatt

SEQ ID NO: 1168498 - DNA, 15 bp, Homo sapiens
aatgtacaatgctat

SEQ ID NO: 1168499 - DNA, 15 bp, Homo sapiens
caatgtacaatgcta

SEQ ID NO: 1168500 - DNA, 15 bp, Homo sapiens
acaatgtacaatgct

SEQ ID NO: 1168501 - DNA, 15 bp, Homo sapiens
aacaatgtacaatgc

SEQ ID NO: 1168502 - DNA, 15 bp, Homo sapiens
gaacaatgtacaatg

SEQ ID NO: 1168503 - DNA, 15 bp, Homo sapiens
tgaacaatgtacaat

SEQ ID NO: 1168504 - DNA, 15 bp, Homo sapiens
atgaacaatgtacaa

SEQ ID NO: 1168505 - DNA, 15 bp, Homo sapiens
aatgaacaatgtaca

SEQ ID NO: 1168506 - DNA, 15 bp, Homo sapiens
aaatgaacaatgtac

SEQ ID NO: 1168507 - DNA, 15 bp, Homo sapiens
gaaatgaacaatgta

SEQ ID NO: 1168508 - DNA, 15 bp, Homo sapiens
agaaatgaacaatgt

SEQ ID NO: 1168509 - DNA, 15 bp, Homo sapiens
aagaaatgaacaatg

SEQ ID NO: 1168510 - DNA, 15 bp, Homo sapiens
taagaaatgaacaat

SEQ ID NO: 1168511 - DNA, 15 bp, Homo sapiens
ctaagaaatgaacaa

SEQ ID NO: 1168512 - DNA, 15 bp, Homo sapiens
actaagaaatgaaca

SEQ ID NO: 1168513 - DNA, 15 bp, Homo sapiens
cactaagaaatgaac

SEQ ID NO: 1168514 - DNA, 15 bp, Homo sapiens
acactaagaaatgaa

SEQ ID NO: 1168515 - DNA, 15 bp, Homo sapiens
aacactaagaaatga

SEQ ID NO: 1168516 - DNA, 15 bp, Homo sapiens
gaacactaagaaatg

SEQ ID NO: 1168517 - DNA, 15 bp, Homo sapiens
tgaacactaagaaat

SEQ ID NO: 1168518 - DNA, 15 bp, Homo sapiens
atgaacactaagaaa

SEQ ID NO: 1168519 - DNA, 15 bp, Homo sapiens
tatgaacactaagaa

SEQ ID NO: 1168520 - DNA, 15 bp, Homo sapiens
ttatgaacactaaga

SEQ ID NO: 1168521 - DNA, 15 bp, Homo sapiens
attatgaacactaag

SEQ ID NO: 1168522 - DNA, 15 bp, Homo sapiens
aattatgaacactaa

SEQ ID NO: 1168523 - DNA, 15 bp, Homo sapiens
taattatgaacacta

SEQ ID NO: 1168524 - DNA, 15 bp, Homo sapiens
ataattatgaacact

SEQ ID NO: 1168525 - DNA, 15 bp, Homo sapiens
tataattatgaacac

SEQ ID NO: 1168526 - DNA, 15 bp, Homo sapiens
gtataattatgaaca

SEQ ID NO: 1168527 - DNA, 15 bp, Homo sapiens
agtataattatgaac

SEQ ID NO: 1168528 - DNA, 15 bp, Homo sapiens
tagtataattatgaa

SEQ ID NO: 1168529 - DNA, 15 bp, Homo sapiens
atagtataattatga

SEQ ID NO: 1168530 - DNA, 15 bp, Homo sapiens
catagtataattatg

SEQ ID NO: 1168531 - DNA, 15 bp, Homo sapiens
ccatagtataattat

SEQ ID NO: 1168532 - DNA, 15 bp, Homo sapiens
cccatagtataatta

SEQ ID NO: 1168533 - DNA, 15 bp, Homo sapiens
acccatagtataatt

SEQ ID NO: 1168534 - DNA, 15 bp, Homo sapiens
tacccatagtataat

SEQ ID NO: 1168535 - DNA, 15 bp, Homo sapiens
atacccatagtataa

SEQ ID NO: 1168536 - DNA, 15 bp, Homo sapiens
catacccatagtata

SEQ ID NO: 1168537 - DNA, 15 bp, Homo sapiens
gcatacccatagtat

SEQ ID NO: 1168538 - DNA, 15 bp, Homo sapiens
tgcatacccatagta

SEQ ID NO: 1168539 - DNA, 15 bp, Homo sapiens
ttgcatacccatagt

SEQ ID NO: 1168540 - DNA, 15 bp, Homo sapiens
cttgcatacccatag

SEQ ID NO: 1168541 - DNA, 15 bp, Homo sapiens
tcttgcatacccata

SEQ ID NO: 1168542 - DNA, 15 bp, Homo sapiens
atcttgcatacccat

SEQ ID NO: 1168543 - DNA, 15 bp, Homo sapiens
catcttgcataccca

SEQ ID NO: 1168544 - DNA, 15 bp, Homo sapiens
acatcttgcataccc

SEQ ID NO: 1168545 - DNA, 15 bp, Homo sapiens
aacatcttgcatacc

SEQ ID NO: 1168546 - DNA, 15 bp, Homo sapiens
taacatcttgcatac

SEQ ID NO: 1168547 - DNA, 15 bp, Homo sapiens
ttaacatcttgcata

SEQ ID NO: 1168548 - DNA, 15 bp, Homo sapiens
gttaacatcttgcat

SEQ ID NO: 1168549 - DNA, 15 bp, Homo sapiens
tgttaacatcttgca

SEQ ID NO: 1168550 - DNA, 15 bp, Homo sapiens
atgttaacatcttgc

SEQ ID NO: 1168551 - DNA, 15 bp, Homo sapiens
aatgttaacatcttg

SEQ ID NO: 1168552 - DNA, 15 bp, Homo sapiens
taatgttaacatctt

SEQ ID NO: 1168553 - DNA, 15 bp, Homo sapiens
ctaatgttaacatct

SEQ ID NO: 1168554 - DNA, 15 bp, Homo sapiens
cctaatgttaacatc

SEQ ID NO: 1168555 - DNA, 15 bp, Homo sapiens
ccctaatgttaacat

SEQ ID NO: 1168556 - DNA, 15 bp, Homo sapiens
cccctaatgttaaca

SEQ ID NO: 1168557 - DNA, 15 bp, Homo sapiens
tcccctaatgttaac

SEQ ID NO: 1168558 - DNA, 15 bp, Homo sapiens
ttcccctaatgttaa

SEQ ID NO: 1168559 - DNA, 15 bp, Homo sapiens
cttcccctaatgtta

SEQ ID NO: 1168560 - DNA, 15 bp, Homo sapiens
gcttcccctaatgtt

SEQ ID NO: 1168561 - DNA, 15 bp, Homo sapiens
agcttcccctaatgt

SEQ ID NO: 1168562 - DNA, 15 bp, Homo sapiens
cagcttcccctaatg

SEQ ID NO: 1168563 - DNA, 15 bp, Homo sapiens
ccagcttcccctaat

SEQ ID NO: 1168564 - DNA, 15 bp, Homo sapiens
tccagcttcccctaa

SEQ ID NO: 1168565 - DNA, 15 bp, Homo sapiens
gtccagcttccccta

SEQ ID NO: 1168566 - DNA, 15 bp, Homo sapiens
tgtccagcttcccct

SEQ ID NO: 1168567 - DNA, 15 bp, Homo sapiens
ttgtccagcttcccc

SEQ ID NO: 1168568 - DNA, 15 bp, Homo sapiens
attgtccagcttccc

SEQ ID NO: 1168569 - DNA, 15 bp, Homo sapiens
cattgtccagcttcc

SEQ ID NO: 1168570 - DNA, 15 bp, Homo sapiens
ccattgtccagcttc

SEQ ID NO: 1168571 - DNA, 15 bp, Homo sapiens
cccattgtccagctt

SEQ ID NO: 1168572 - DNA, 15 bp, Homo sapiens
acccattgtccagct

SEQ ID NO: 1168573 - DNA, 15 bp, Homo sapiens
tacccattgtccagc

SEQ ID NO: 1168574 - DNA, 15 bp, Homo sapiens
atacccattgtccag

SEQ ID NO: 1168575 - DNA, 15 bp, Homo sapiens
tatacccattgtcca

SEQ ID NO: 1168576 - DNA, 15 bp, Homo sapiens
atatacccattgtcc

SEQ ID NO: 1168577 - DNA, 15 bp, Homo sapiens
catatacccattgtc

SEQ ID NO: 1168578 - DNA, 15 bp, Homo sapiens
ccatatacccattgt

SEQ ID NO: 1168579 - DNA, 15 bp, Homo sapiens
tccatatacccattg

SEQ ID NO: 1168580 - DNA, 15 bp, Homo sapiens
ttccatatacccatt

SEQ ID NO: 1168581 - DNA, 15 bp, Homo sapiens
tttccatatacccat

SEQ ID NO: 1168582 - DNA, 15 bp, Homo sapiens
gtttccatataccca

SEQ ID NO: 1168583 - DNA, 15 bp, Homo sapiens
tgtttccatataccc

SEQ ID NO: 1168584 - DNA, 15 bp, Homo sapiens
gtgtttccatatacc

SEQ ID NO: 1168585 - DNA, 15 bp, Homo sapiens
agtgtttccatatac

SEQ ID NO: 1168586 - DNA, 15 bp, Homo sapiens
cagtgtttccatata

SEQ ID NO: 1168587 - DNA, 15 bp, Homo sapiens
acagtgtttccatat

SEQ ID NO: 1168588 - DNA, 15 bp, Homo sapiens
cacagtgtttccata

SEQ ID NO: 1168589 - DNA, 15 bp, Homo sapiens
acacagtgtttccat

SEQ ID NO: 1168590 - DNA, 15 bp, Homo sapiens
aacacagtgtttcca

SEQ ID NO: 1168591 - DNA, 15 bp, Homo sapiens
taacacagtgtttcc

SEQ ID NO: 1168592 - DNA, 15 bp, Homo sapiens
ataacacagtgtttc

SEQ ID NO: 1168593 - DNA, 15 bp, Homo sapiens
aataacacagtgttt

SEQ ID NO: 1168594 - DNA, 15 bp, Homo sapiens
aaataacacagtgtt

SEQ ID NO: 1168595 - DNA, 15 bp, Homo sapiens
aaaataacacagtgt

SEQ ID NO: 1168596 - DNA, 15 bp, Homo sapiens
aaaaataacacagtg

SEQ ID NO: 1168597 - DNA, 15 bp, Homo sapiens
caaaaataacacagt

SEQ ID NO: 1168598 - DNA, 15 bp, Homo sapiens
gcaaaaataacacag

SEQ ID NO: 1168599 - DNA, 15 bp, Homo sapiens
tgcaaaaataacaca

SEQ ID NO: 1168600 - DNA, 15 bp, Homo sapiens
ttgcaaaaataacac

SEQ ID NO: 1168601 - DNA, 15 bp, Homo sapiens
attgcaaaaataaca

SEQ ID NO: 1168602 - DNA, 15 bp, Homo sapiens
aattgcaaaaataac

SEQ ID NO: 1168603 - DNA, 15 bp, Homo sapiens
aaattgcaaaaataa

SEQ ID NO: 1168604 - DNA, 15 bp, Homo sapiens
aaaattgcaaaaata

SEQ ID NO: 1168605 - DNA, 15 bp, Homo sapiens
aaaaattgcaaaaat

SEQ ID NO: 1168606 - DNA, 15 bp, Homo sapiens
aaaaaattgcaaaaa

SEQ ID NO: 1168607 - DNA, 15 bp, Homo sapiens
gaaaaaattgcaaaa

SEQ ID NO: 1168608 - DNA, 15 bp, Homo sapiens
ggaaaaaattgcaaa

SEQ ID NO: 1168609 - DNA, 15 bp, Homo sapiens
tggaaaaaattgcaa

SEQ ID NO: 1168610 - DNA, 15 bp, Homo sapiens
ttggaaaaaattgca

SEQ ID NO: 1168611 - DNA, 15 bp, Homo sapiens
gattttggaaaaaat

SEQ ID NO: 1168612 - DNA, 15 bp, Homo sapiens
agattttggaaaaaa

SEQ ID NO: 1168613 - DNA, 15 bp, Homo sapiens
tagattttggaaaaa

SEQ ID NO: 1168614 - DNA, 15 bp, Homo sapiens
ttagattttggaaaa

SEQ ID NO: 1168615 - DNA, 15 bp, Homo sapiens
tttagattttggaaa

SEQ ID NO: 1168616 - DNA, 15 bp, Homo sapiens
ctttagattttggaa

SEQ ID NO: 1168617 - DNA, 15 bp, Homo sapiens
actttagattttgga

SEQ ID NO: 1168618 - DNA, 15 bp, Homo sapiens
aactttagattttgg

SEQ ID NO: 1168619 - DNA, 15 bp, Homo sapiens
taactttagattttg

SEQ ID NO: 1168620 - DNA, 15 bp, Homo sapiens
ataactttagatttt

SEQ ID NO: 1168621 - DNA, 15 bp, Homo sapiens
aataactttagattt

SEQ ID NO: 1168622 - DNA, 15 bp, Homo sapiens
aaataactttagatt

SEQ ID NO: 1168623 - DNA, 15 bp, Homo sapiens
gaaataactttagat

SEQ ID NO: 1168624 - DNA, 15 bp, Homo sapiens
tgaaataactttaga

SEQ ID NO: 1168625 - DNA, 15 bp, Homo sapiens
ttgaaataactttag

SEQ ID NO: 1168626 - DNA, 15 bp, Homo sapiens
tttgaaataacttta

SEQ ID NO: 1168627 - DNA, 15 bp, Homo sapiens
ttttgaaataacttt

SEQ ID NO: 1168628 - DNA, 15 bp, Homo sapiens
attttgaaataactt

SEQ ID NO: 1168629 - DNA, 15 bp, Homo sapiens
tattttgaaataact

SEQ ID NO: 1168630 - DNA, 15 bp, Homo sapiens
atattttgaaataac

SEQ ID NO: 1168631 - DNA, 15 bp, Homo sapiens
tatattttgaaataa

SEQ ID NO: 1168632 - DNA, 15 bp, Homo sapiens
ctatattttgaaata

SEQ ID NO: 1168633 - DNA, 15 bp, Homo sapiens
actatattttgaaat

SEQ ID NO: 1168634 - DNA, 15 bp, Homo sapiens
aactatattttgaaa

SEQ ID NO: 1168635 - DNA, 15 bp, Homo sapiens
aaactatattttgaa

SEQ ID NO: 1168636 - DNA, 15 bp, Homo sapiens
taaactatattttga

SEQ ID NO: 1168637 - DNA, 15 bp, Homo sapiens
ttaaactatattttg

SEQ ID NO: 1168638 - DNA, 15 bp, Homo sapiens
tttaaactatatttt

SEQ ID NO: 1168639 - DNA, 15 bp, Homo sapiens
ttttaaactatattt

SEQ ID NO: 1168640 - DNA, 15 bp, Homo sapiens
tttttaaactatatt

SEQ ID NO: 1168641 - DNA, 15 bp, Homo sapiens
ctttttaaactatat

SEQ ID NO: 1168642 - DNA, 15 bp, Homo sapiens
tctttttaaactata

SEQ ID NO: 1168643 - DNA, 15 bp, Homo sapiens
ctctttttaaactat

SEQ ID NO: 1168644 - DNA, 15 bp, Homo sapiens
actctttttaaacta

SEQ ID NO: 1168645 - DNA, 15 bp, Homo sapiens
gactctttttaaact

SEQ ID NO: 1168646 - DNA, 15 bp, Homo sapiens
ggactctttttaaac

SEQ ID NO: 1168647 - DNA, 15 bp, Homo sapiens
gggactctttttaaa

SEQ ID NO: 1168648 - DNA, 15 bp, Homo sapiens
tgggactctttttaa

SEQ ID NO: 1168649 - DNA, 15 bp, Homo sapiens
ctgggactcttttta

SEQ ID NO: 1168650 - DNA, 15 bp, Homo sapiens
tctgggactcttttt

SEQ ID NO: 1168651 - DNA, 15 bp, Homo sapiens
ctctgggactctttt

SEQ ID NO: 1168652 - DNA, 15 bp, Homo sapiens
tctctgggactcttt

SEQ ID NO: 1168653 - DNA, 15 bp, Homo sapiens
gtctctgggactctt

SEQ ID NO: 1168654 - DNA, 15 bp, Homo sapiens
tgtctctgggactct

SEQ ID NO: 1168655 - DNA, 15 bp, Homo sapiens
atgtctctgggactc

SEQ ID NO: 1168656 - DNA, 15 bp, Homo sapiens
aatgtctctgggact

SEQ ID NO: 1168657 - DNA, 15 bp, Homo sapiens
aaatgtctctgggac

SEQ ID NO: 1168658 - DNA, 15 bp, Homo sapiens
aaaatgtctctggga

SEQ ID NO: 1168659 - DNA, 15 bp, Homo sapiens
aaaaatgtctctggg

SEQ ID NO: 1168660 - DNA, 15 bp, Homo sapiens
gaaaaatgtctctgg

SEQ ID NO: 1168661 - DNA, 15 bp, Homo sapiens
agaaaaatgtctctg

SEQ ID NO: 1168662 - DNA, 15 bp, Homo sapiens
tagaaaaatgtctct

SEQ ID NO: 1168663 - DNA, 15 bp, Homo sapiens
atagaaaaatgtctc

SEQ ID NO: 1168664 - DNA, 15 bp, Homo sapiens
tatagaaaaatgtct

SEQ ID NO: 1168665 - DNA, 15 bp, Homo sapiens
ctatagaaaaatgtc

SEQ ID NO: 1168666 - DNA, 15 bp, Homo sapiens
cctatagaaaaatgt

SEQ ID NO: 1168667 - DNA, 15 bp, Homo sapiens
acctatagaaaaatg

SEQ ID NO: 1168668 - DNA, 15 bp, Homo sapiens
aacctatagaaaaat

SEQ ID NO: 1168669 - DNA, 15 bp, Homo sapiens
gaacctatagaaaaa

SEQ ID NO: 1168670 - DNA, 15 bp, Homo sapiens
tgaacctatagaaaa

SEQ ID NO: 1168671 - DNA, 15 bp, Homo sapiens
gtgaacctatagaaa

SEQ ID NO: 1168672 - DNA, 15 bp, Homo sapiens
cgtgaacctatagaa

SEQ ID NO: 1168673 - DNA, 15 bp, Homo sapiens
gcgtgaacctataga

SEQ ID NO: 1168674 - DNA, 15 bp, Homo sapiens
tgcgtgaacctatag

SEQ ID NO: 1168675 - DNA, 15 bp, Homo sapiens
atgcgtgaacctata

SEQ ID NO: 1168676 - DNA, 15 bp, Homo sapiens
aatgcgtgaacctat

SEQ ID NO: 1168677 - DNA, 15 bp, Homo sapiens
aaatgcgtgaaccta

SEQ ID NO: 1168678 - DNA, 15 bp, Homo sapiens
aaaatgcgtgaacct

SEQ ID NO: 1168679 - DNA, 15 bp, Homo sapiens
caaaatgcgtgaacc

SEQ ID NO: 1168680 - DNA, 15 bp, Homo sapiens
acaaaatgcgtgaac

SEQ ID NO: 1168681 - DNA, 15 bp, Homo sapiens
aacaaaatgcgtgaa

SEQ ID NO: 1168682 - DNA, 15 bp, Homo sapiens
aaacaaaatgcgtga

SEQ ID NO: 1168683 - DNA, 15 bp, Homo sapiens
aaaacaaaatgcgtg

SEQ ID NO: 1168684 - DNA, 15 bp, Homo sapiens
taaaacaaaatgcgt

SEQ ID NO: 1168685 - DNA, 15 bp, Homo sapiens
ataaaacaaaatgcg

SEQ ID NO: 1168686 - DNA, 15 bp, Homo sapiens
cataaaacaaaatgc

SEQ ID NO: 1168687 - DNA, 15 bp, Homo sapiens
acataaaacaaaatg

SEQ ID NO: 1168688 - DNA, 15 bp, Homo sapiens
aacataaaacaaaat

SEQ ID NO: 1168689 - DNA, 15 bp, Homo sapiens
aaacataaaacaaaa

SEQ ID NO: 1168690 - DNA, 15 bp, Homo sapiens
taaacataaaacaaa

SEQ ID NO: 1168691 - DNA, 15 bp, Homo sapiens
ataaacataaaacaa

SEQ ID NO: 1168692 - DNA, 15 bp, Homo sapiens
tataaacataaaaca

SEQ ID NO: 1168693 - DNA, 15 bp, Homo sapiens
gtataaacataaaac

SEQ ID NO: 1168694 - DNA, 15 bp, Homo sapiens
tgtataaacataaaa

SEQ ID NO: 1168695 - DNA, 15 bp, Homo sapiens
ttgtataaacataaa

SEQ ID NO: 1168696 - DNA, 15 bp, Homo sapiens
gttgtataaacataa

SEQ ID NO: 1168697 - DNA, 15 bp, Homo sapiens
tgttgtataaacata

SEQ ID NO: 1168698 - DNA, 15 bp, Homo sapiens
ctgttgtataaacat

SEQ ID NO: 1168699 - DNA, 15 bp, Homo sapiens
actgttgtataaaca

SEQ ID NO: 1168700 - DNA, 15 bp, Homo sapiens
aactgttgtataaac

SEQ ID NO: 1168701 - DNA, 15 bp, Homo sapiens
aaactgttgtataaa

SEQ ID NO: 1168702 - DNA, 15 bp, Homo sapiens
aaaactgttgtataa

SEQ ID NO: 1168703 - DNA, 15 bp, Homo sapiens
taaaactgttgtata

SEQ ID NO: 1168704 - DNA, 15 bp, Homo sapiens
ataaaactgttgtat

SEQ ID NO: 1168705 - DNA, 15 bp, Homo sapiens
aataaaactgttgta

SEQ ID NO: 1168706 - DNA, 15 bp, Homo sapiens
gaataaaactgttgt

SEQ ID NO: 1168707 - DNA, 15 bp, Homo sapiens
agaataaaactgttg

SEQ ID NO: 1168708 - DNA, 15 bp, Homo sapiens
gagaataaaactgtt

SEQ ID NO: 1168709 - DNA, 15 bp, Homo sapiens
agagaataaaactgt

SEQ ID NO: 1168710 - DNA, 15 bp, Homo sapiens
aagagaataaaactg

SEQ ID NO: 1168711 - DNA, 15 bp, Homo sapiens
aaaagagaataaaac

SEQ ID NO: 1168712 - DNA, 15 bp, Homo sapiens
gaaaagagaataaaa

SEQ ID NO: 1168713 - DNA, 15 bp, Homo sapiens
tgaaaagagaataaa

SEQ ID NO: 1168714 - DNA, 15 bp, Homo sapiens
ttgaaaagagaataa

SEQ ID NO: 1168715 - DNA, 15 bp, Homo sapiens
cttgaaaagagaata

SEQ ID NO: 1168716 - DNA, 15 bp, Homo sapiens
gcttgaaaagagaat

SEQ ID NO: 1168717 - DNA, 15 bp, Homo sapiens
ggcttgaaaagagaa

SEQ ID NO: 1168718 - DNA, 15 bp, Homo sapiens
aggcttgaaaagaga

SEQ ID NO: 1168719 - DNA, 15 bp, Homo sapiens
gaggcttgaaaagag

SEQ ID NO: 1168720 - DNA, 15 bp, Homo sapiens
agaggcttgaaaaga

SEQ ID NO: 1168721 - DNA, 15 bp, Homo sapiens
gagaggcttgaaaag

SEQ ID NO: 1168722 - DNA, 15 bp, Homo sapiens
tgagaggcttgaaaa

SEQ ID NO: 1168723 - DNA, 15 bp, Homo sapiens
ttgagaggcttgaaa

SEQ ID NO: 1168724 - DNA, 15 bp, Homo sapiens
gttgagaggcttgaa

SEQ ID NO: 1168725 - DNA, 15 bp, Homo sapiens
ggttgagaggcttga

SEQ ID NO: 1168726 - DNA, 15 bp, Homo sapiens
aggttgagaggcttg

SEQ ID NO: 1168727 - DNA, 15 bp, Homo sapiens
gaggttgagaggctt

SEQ ID NO: 1168728 - DNA, 15 bp, Homo sapiens
ggaggttgagaggct

SEQ ID NO: 1168729 - DNA, 15 bp, Homo sapiens
tggaggttgagaggc

SEQ ID NO: 1168730 - DNA, 15 bp, Homo sapiens
ctggaggttgagagg

SEQ ID NO: 1168731 - DNA, 15 bp, Homo sapiens
gctggaggttgagag

SEQ ID NO: 1168732 - DNA, 15 bp, Homo sapiens
agctggaggttgaga

SEQ ID NO: 1168733 - DNA, 15 bp, Homo sapiens
gagctggaggttgag

SEQ ID NO: 1168734 - DNA, 15 bp, Homo sapiens
agagctggaggttga

SEQ ID NO: 1168735 - DNA, 15 bp, Homo sapiens
cagagctggaggttg

SEQ ID NO: 1168736 - DNA, 15 bp, Homo sapiens
tcagagctggaggtt

SEQ ID NO: 1168737 - DNA, 15 bp, Homo sapiens
atcagagctggaggt

SEQ ID NO: 1168738 - DNA, 15 bp, Homo sapiens
tatcagagctggagg

SEQ ID NO: 1168739 - DNA, 15 bp, Homo sapiens
atatcagagctggag

SEQ ID NO: 1168740 - DNA, 15 bp, Homo sapiens
tatatcagagctgga

SEQ ID NO: 1168741 - DNA, 15 bp, Homo sapiens
atatatcagagctgg

SEQ ID NO: 1168742 - DNA, 15 bp, Homo sapiens
catatatcagagctg

SEQ ID NO: 1168743 - DNA, 15 bp, Homo sapiens
gcatatatcagagct

SEQ ID NO: 1168744 - DNA, 15 bp, Homo sapiens
ggcatatatcagagc

SEQ ID NO: 1168745 - DNA, 15 bp, Homo sapiens
tggcatatatcagag

SEQ ID NO: 1168746 - DNA, 15 bp, Homo sapiens
atggcatatatcaga

SEQ ID NO: 1168747 - DNA, 15 bp, Homo sapiens
aatggcatatatcag

SEQ ID NO: 1168748 - DNA, 15 bp, Homo sapiens
caatggcatatatca

SEQ ID NO: 1168749 - DNA, 15 bp, Homo sapiens
tcaatggcatatatc

SEQ ID NO: 1168750 - DNA, 15 bp, Homo sapiens
atcaatggcatatat

SEQ ID NO: 1168751 - DNA, 15 bp, Homo sapiens
catcaatggcatata

SEQ ID NO: 1168752 - DNA, 15 bp, Homo sapiens
tcatcaatggcatat

SEQ ID NO: 1168753 - DNA, 15 bp, Homo sapiens
gtcatcaatggcata

SEQ ID NO: 1168754 - DNA, 15 bp, Homo sapiens
tgtcatcaatggcat

SEQ ID NO: 1168755 - DNA, 15 bp, Homo sapiens
gtgtcatcaatggca

SEQ ID NO: 1168756 - DNA, 15 bp, Homo sapiens
ggtgtcatcaatggc

SEQ ID NO: 1168757 - DNA, 15 bp, Homo sapiens
aggtgtcatcaatgg

SEQ ID NO: 1168758 - DNA, 15 bp, Homo sapiens
taggtgtcatcaatg

SEQ ID NO: 1168759 - DNA, 15 bp, Homo sapiens
ataggtgtcatcaat

SEQ ID NO: 1168760 - DNA, 15 bp, Homo sapiens
aataggtgtcatcaa

SEQ ID NO: 1168761 - DNA, 15 bp, Homo sapiens
caataggtgtcatca

SEQ ID NO: 1168762 - DNA, 15 bp, Homo sapiens
gcaataggtgtcatc

SEQ ID NO: 1168763 - DNA, 15 bp, Homo sapiens
tgcaataggtgtcat

SEQ ID NO: 1168764 - DNA, 15 bp, Homo sapiens
gtgcaataggtgtca

SEQ ID NO: 1168765 - DNA, 15 bp, Homo sapiens
ggtgcaataggtgtc

SEQ ID NO: 1168766 - DNA, 15 bp, Homo sapiens
aggtgcaataggtgt

SEQ ID NO: 1168767 - DNA, 15 bp, Homo sapiens
caggtgcaataggtg

SEQ ID NO: 1168768 - DNA, 15 bp, Homo sapiens
tcaggtgcaataggt

SEQ ID NO: 1168769 - DNA, 15 bp, Homo sapiens
gtcaggtgcaatagg

SEQ ID NO: 1168770 - DNA, 15 bp, Homo sapiens
tgtcaggtgcaatag

SEQ ID NO: 1168771 - DNA, 15 bp, Homo sapiens
gtgtcaggtgcaata

SEQ ID NO: 1168772 - DNA, 15 bp, Homo sapiens
cgtgtcaggtgcaat

SEQ ID NO: 1168773 - DNA, 15 bp, Homo sapiens
acgtgtcaggtgcaa

SEQ ID NO: 1168774 - DNA, 15 bp, Homo sapiens
cacgtgtcaggtgca

SEQ ID NO: 1168775 - DNA, 15 bp, Homo sapiens
tcacgtgtcaggtgc

SEQ ID NO: 1168776 - DNA, 15 bp, Homo sapiens
ctcacgtgtcaggtg

SEQ ID NO: 1168777 - DNA, 15 bp, Homo sapiens
cctcacgtgtcaggt

SEQ ID NO: 1168778 - DNA, 15 bp, Homo sapiens
gcctcacgtgtcagg

SEQ ID NO: 1168779 - DNA, 15 bp, Homo sapiens
tgcctcacgtgtcag

SEQ ID NO: 1168780 - DNA, 15 bp, Homo sapiens
atgcctcacgtgtca

SEQ ID NO: 1168781 - DNA, 15 bp, Homo sapiens
gatgcctcacgtgtc

SEQ ID NO: 1168782 - DNA, 15 bp, Homo sapiens
tgatgcctcacgtgt

SEQ ID NO: 1168783 - DNA, 15 bp, Homo sapiens
ttgatgcctcacgtg

SEQ ID NO: 1168784 - DNA, 15 bp, Homo sapiens
attgatgcctcacgt

SEQ ID NO: 1168785 - DNA, 15 bp, Homo sapiens
cattgatgcctcacg

SEQ ID NO: 1168786 - DNA, 15 bp, Homo sapiens
acattgatgcctcac

SEQ ID NO: 1168787 - DNA, 15 bp, Homo sapiens
cacattgatgcctca

SEQ ID NO: 1168788 - DNA, 15 bp, Homo sapiens
ccacattgatgcctc

SEQ ID NO: 1168789 - DNA, 15 bp, Homo sapiens
tccacattgatgcct

SEQ ID NO: 1168790 - DNA, 15 bp, Homo sapiens
gtccacattgatgcc

SEQ ID NO: 1168791 - DNA, 15 bp, Homo sapiens
agtccacattgatgc

SEQ ID NO: 1168792 - DNA, 15 bp, Homo sapiens
cagtccacattgatg

SEQ ID NO: 1168793 - DNA, 15 bp, Homo sapiens
ccagtccacattgat

SEQ ID NO: 1168794 - DNA, 15 bp, Homo sapiens
tccagtccacattga

SEQ ID NO: 1168795 - DNA, 15 bp, Homo sapiens
gtccagtccacattg

SEQ ID NO: 1168796 - DNA, 15 bp, Homo sapiens
agtccagtccacatt

SEQ ID NO: 1168797 - DNA, 15 bp, Homo sapiens
gagtccagtccacat

SEQ ID NO: 1168798 - DNA, 15 bp, Homo sapiens
agagtccagtccaca

SEQ ID NO: 1168799 - DNA, 15 bp, Homo sapiens
cagagtccagtccac

SEQ ID NO: 1168800 - DNA, 15 bp, Homo sapiens
acagagtccagtcca

SEQ ID NO: 1168801 - DNA, 15 bp, Homo sapiens
gacagagtccagtcc

SEQ ID NO: 1168802 - DNA, 15 bp, Homo sapiens
ggacagagtccagtc

SEQ ID NO: 1168803 - DNA, 15 bp, Homo sapiens
aggacagagtccagt

SEQ ID NO: 1168804 - DNA, 15 bp, Homo sapiens
aaggacagagtccag

SEQ ID NO: 1168805 - DNA, 15 bp, Homo sapiens
caaggacagagtcca

SEQ ID NO: 1168806 - DNA, 15 bp, Homo sapiens
gcaaggacagagtcc

SEQ ID NO: 1168807 - DNA, 15 bp, Homo sapiens
cgcaaggacagagtc

SEQ ID NO: 1168808 - DNA, 15 bp, Homo sapiens
ccgcaaggacagagt

SEQ ID NO: 1168809 - DNA, 15 bp, Homo sapiens
cccgcaaggacagag

SEQ ID NO: 1168810 - DNA, 15 bp, Homo sapiens
gcccgcaaggacaga

SEQ ID NO: 1168811 - DNA, 15 bp, Homo sapiens
tgcccgcaaggacag

SEQ ID NO: 1168812 - DNA, 15 bp, Homo sapiens
ctgcccgcaaggaca

SEQ ID NO: 1168813 - DNA, 15 bp, Homo sapiens
tctgcccgcaaggac

SEQ ID NO: 1168814 - DNA, 15 bp, Homo sapiens
ctctgcccgcaagga

SEQ ID NO: 1168815 - DNA, 15 bp, Homo sapiens
cctctgcccgcaagg

SEQ ID NO: 1168816 - DNA, 15 bp, Homo sapiens
ccctctgcccgcaag

SEQ ID NO: 1168817 - DNA, 15 bp, Homo sapiens
gccctctgcccgcaa

SEQ ID NO: 1168818 - DNA, 15 bp, Homo sapiens
ggccctctgcccgca

SEQ ID NO: 1168819 - DNA, 15 bp, Homo sapiens
aggccctctgcccgc

SEQ ID NO: 1168820 - DNA, 15 bp, Homo sapiens
caggccctctgcccg

SEQ ID NO: 1168821 - DNA, 15 bp, Homo sapiens
gcaggccctctgccc

SEQ ID NO: 1168822 - DNA, 15 bp, Homo sapiens
tgcaggccctctgcc

SEQ ID NO: 1168823 - DNA, 15 bp, Homo sapiens
ttgcaggccctctgc

SEQ ID NO: 1168824 - DNA, 15 bp, Homo sapiens
cttgcaggccctctg

SEQ ID NO: 1168825 - DNA, 15 bp, Homo sapiens
acttgcaggccctct

SEQ ID NO: 1168826 - DNA, 15 bp, Homo sapiens
aacttgcaggccctc

SEQ ID NO: 1168827 - DNA, 15 bp, Homo sapiens
caacttgcaggccct

SEQ ID NO: 1168828 - DNA, 15 bp, Homo sapiens
ccaacttgcaggccc

SEQ ID NO: 1168829 - DNA, 15 bp, Homo sapiens
cccaacttgcaggcc

SEQ ID NO: 1168830 - DNA, 15 bp, Homo sapiens
gcccaacttgcaggc

SEQ ID NO: 1168831 - DNA, 15 bp, Homo sapiens
ggcccaacttgcagg

SEQ ID NO: 1168832 - DNA, 15 bp, Homo sapiens
gggcccaacttgcag

SEQ ID NO: 1168833 - DNA, 15 bp, Homo sapiens
tgggcccaacttgca

SEQ ID NO: 1168834 - DNA, 15 bp, Homo sapiens
gtgggcccaacttgc

SEQ ID NO: 1168835 - DNA, 15 bp, Homo sapiens
ggtgggcccaacttg

SEQ ID NO: 1168836 - DNA, 15 bp, Homo sapiens
gggtgggcccaactt

SEQ ID NO: 1168837 - DNA, 15 bp, Homo sapiens
agggtgggcccaact

SEQ ID NO: 1168838 - DNA, 15 bp, Homo sapiens
aagggtgggcccaac

SEQ ID NO: 1168839 - DNA, 15 bp, Homo sapiens
aaagggtgggcccaa

SEQ ID NO: 1168840 - DNA, 15 bp, Homo sapiens
aaaagggtgggccca

SEQ ID NO: 1168841 - DNA, 15 bp, Homo sapiens
taaaagggtgggccc

SEQ ID NO: 1168842 - DNA, 15 bp, Homo sapiens
ataaaagggtgggcc

SEQ ID NO: 1168843 - DNA, 15 bp, Homo sapiens
aataaaagggtgggc

SEQ ID NO: 1168844 - DNA, 15 bp, Homo sapiens
aaataaaagggtggg

SEQ ID NO: 1168845 - DNA, 15 bp, Homo sapiens
gaaataaaagggtgg

SEQ ID NO: 1168846 - DNA, 15 bp, Homo sapiens
ggaaataaaagggtg

SEQ ID NO: 1168847 - DNA, 15 bp, Homo sapiens
tggaaataaaagggt

SEQ ID NO: 1168848 - DNA, 15 bp, Homo sapiens
gtggaaataaaaggg

SEQ ID NO: 1168849 - DNA, 15 bp, Homo sapiens
ggtggaaataaaagg

SEQ ID NO: 1168850 - DNA, 15 bp, Homo sapiens
gggtggaaataaaag

SEQ ID NO: 1168851 - DNA, 15 bp, Homo sapiens
cgggtggaaataaaa

SEQ ID NO: 1168852 - DNA, 15 bp, Homo sapiens
ccgggtggaaataaa

SEQ ID NO: 1168853 - DNA, 15 bp, Homo sapiens
cccgggtggaaataa

SEQ ID NO: 1168854 - DNA, 15 bp, Homo sapiens
ccccgggtggaaata

SEQ ID NO: 1168855 - DNA, 15 bp, Homo sapiens
tccccgggtggaaat

SEQ ID NO: 1168856 - DNA, 15 bp, Homo sapiens
ttccccgggtggaaa

SEQ ID NO: 1168857 - DNA, 15 bp, Homo sapiens
attccccgggtggaa

SEQ ID NO: 1168858 - DNA, 15 bp, Homo sapiens
aattccccgggtgga

SEQ ID NO: 1168859 - DNA, 15 bp, Homo sapiens
aaattccccgggtgg

SEQ ID NO: 1168860 - DNA, 15 bp, Homo sapiens
gaaattccccgggtg

SEQ ID NO: 1168861 - DNA, 15 bp, Homo sapiens
ggaaattccccgggt

SEQ ID NO: 1168862 - DNA, 15 bp, Homo sapiens
aggaaattccccggg

SEQ ID NO: 1168863 - DNA, 15 bp, Homo sapiens
caggaaattccccgg

SEQ ID NO: 1168864 - DNA, 15 bp, Homo sapiens
ccaggaaattccccg

SEQ ID NO: 1168865 - DNA, 15 bp, Homo sapiens
gccaggaaattcccc

SEQ ID NO: 1168866 - DNA, 15 bp, Homo sapiens
agccaggaaattccc

SEQ ID NO: 1168867 - DNA, 15 bp, Homo sapiens
cagccaggaaattcc

SEQ ID NO: 1168868 - DNA, 15 bp, Homo sapiens
acagccaggaaattc

SEQ ID NO: 1168869 - DNA, 15 bp, Homo sapiens
gacagccaggaaatt

SEQ ID NO: 1168870 - DNA, 15 bp, Homo sapiens
ggacagccaggaaat

SEQ ID NO: 1168871 - DNA, 15 bp, Homo sapiens
gggacagccaggaaa

SEQ ID NO: 1168872 - DNA, 15 bp, Homo sapiens
agggacagccaggaa

SEQ ID NO: 1168873 - DNA, 15 bp, Homo sapiens
cagggacagccagga

SEQ ID NO: 1168874 - DNA, 15 bp, Homo sapiens
gcagggacagccagg

SEQ ID NO: 1168875 - DNA, 15 bp, Homo sapiens
ggcagggacagccag

SEQ ID NO: 1168876 - DNA, 15 bp, Homo sapiens
aggcagggacagcca

SEQ ID NO: 1168877 - DNA, 15 bp, Homo sapiens
caggcagggacagcc

SEQ ID NO: 1168878 - DNA, 15 bp, Homo sapiens
gcaggcagggacagc

SEQ ID NO: 1168879 - DNA, 15 bp, Homo sapiens
agcaggcagggacag

SEQ ID NO: 1168880 - DNA, 15 bp, Homo sapiens
gagcaggcagggaca

SEQ ID NO: 1168881 - DNA, 15 bp, Homo sapiens
ggagcaggcagggac

SEQ ID NO: 1168882 - DNA, 15 bp, Homo sapiens
aggagcaggcaggga

SEQ ID NO: 1168883 - DNA, 15 bp, Homo sapiens
gaggagcaggcaggg

SEQ ID NO: 1168884 - DNA, 15 bp, Homo sapiens
agaggagcaggcagg

SEQ ID NO: 1168885 - DNA, 15 bp, Homo sapiens
gagaggagcaggcag

SEQ ID NO: 1168886 - DNA, 15 bp, Homo sapiens
ggagaggagcaggca

SEQ ID NO: 1168887 - DNA, 15 bp, Homo sapiens
gggagaggagcaggc

SEQ ID NO: 1168888 - DNA, 15 bp, Homo sapiens
ggggagaggagcagg

SEQ ID NO: 1168889 - DNA, 15 bp, Homo sapiens
aggggagaggagcag

SEQ ID NO: 1168890 - DNA, 15 bp, Homo sapiens
aaggggagaggagca

SEQ ID NO: 1168891 - DNA, 15 bp, Homo sapiens
caaggggagaggagc

SEQ ID NO: 1168892 - DNA, 15 bp, Homo sapiens
tcaaggggagaggag

SEQ ID NO: 1168893 - DNA, 15 bp, Homo sapiens
ttcaaggggagagga

SEQ ID NO: 1168894 - DNA, 15 bp, Homo sapiens
gttcaaggggagagg

SEQ ID NO: 1168895 - DNA, 15 bp, Homo sapiens
ggttcaaggggagag

SEQ ID NO: 1168896 - DNA, 15 bp, Homo sapiens
gggttcaaggggaga

SEQ ID NO: 1168897 - DNA, 15 bp, Homo sapiens
tgggttcaaggggag

SEQ ID NO: 1168898 - DNA, 15 bp, Homo sapiens
ctgggttcaagggga

SEQ ID NO: 1168899 - DNA, 15 bp, Homo sapiens
cctgggttcaagggg

SEQ ID NO: 1168900 - DNA, 15 bp, Homo sapiens
gcctgggttcaaggg

SEQ ID NO: 1168901 - DNA, 15 bp, Homo sapiens
cgcctgggttcaagg

SEQ ID NO: 1168902 - DNA, 15 bp, Homo sapiens
acgcctgggttcaag

SEQ ID NO: 1168903 - DNA, 15 bp, Homo sapiens
cacgcctgggttcaa

SEQ ID NO: 1168904 - DNA, 15 bp, Homo sapiens
gcacgcctgggttca

SEQ ID NO: 1168905 - DNA, 15 bp, Homo sapiens
ggcacgcctgggttc

SEQ ID NO: 1168906 - DNA, 15 bp, Homo sapiens
aggcacgcctgggtt

SEQ ID NO: 1168907 - DNA, 15 bp, Homo sapiens
gaggcacgcctgggt

SEQ ID NO: 1168908 - DNA, 15 bp, Homo sapiens
agaggcacgcctggg

SEQ ID NO: 1168909 - DNA, 15 bp, Homo sapiens
tagaggcacgcctgg

SEQ ID NO: 1168910 - DNA, 15 bp, Homo sapiens
gtagaggcacgcctg

SEQ ID NO: 1168911 - DNA, 15 bp, Homo sapiens
ggtagaggcacgcct

SEQ ID NO: 1168912 - DNA, 15 bp, Homo sapiens
aggtagaggcacgcc

SEQ ID NO: 1168913 - DNA, 15 bp, Homo sapiens
caggtagaggcacgc

SEQ ID NO: 1168914 - DNA, 15 bp, Homo sapiens
ccaggtagaggcacg

SEQ ID NO: 1168915 - DNA, 15 bp, Homo sapiens
accaggtagaggcac

SEQ ID NO: 1168916 - DNA, 15 bp, Homo sapiens
taccaggtagaggca

SEQ ID NO: 1168917 - DNA, 15 bp, Homo sapiens
ctaccaggtagaggc

SEQ ID NO: 1168918 - DNA, 15 bp, Homo sapiens
actaccaggtagagg

SEQ ID NO: 1168919 - DNA, 15 bp, Homo sapiens
aactaccaggtagag

SEQ ID NO: 1168920 - DNA, 15 bp, Homo sapiens
caactaccaggtaga

SEQ ID NO: 1168921 - DNA, 15 bp, Homo sapiens
tcaactaccaggtag

SEQ ID NO: 1168922 - DNA, 15 bp, Homo sapiens
ctcaactaccaggta

SEQ ID NO: 1168923 - DNA, 15 bp, Homo sapiens
cctcaactaccaggt

SEQ ID NO: 1168924 - DNA, 15 bp, Homo sapiens
acctcaactaccagg

SEQ ID NO: 1168925 - DNA, 15 bp, Homo sapiens
gacctcaactaccag

SEQ ID NO: 1168926 - DNA, 15 bp, Homo sapiens
agacctcaactacca

SEQ ID NO: 1168927 - DNA, 15 bp, Homo sapiens
gagacctcaactacc

SEQ ID NO: 1168928 - DNA, 15 bp, Homo sapiens
agagacctcaactac

SEQ ID NO: 1168929 - DNA, 15 bp, Homo sapiens
cagagacctcaacta

SEQ ID NO: 1168930 - DNA, 15 bp, Homo sapiens
tcagagacctcaact

SEQ ID NO: 1168931 - DNA, 15 bp, Homo sapiens
gtcagagacctcaac

SEQ ID NO: 1168932 - DNA, 15 bp, Homo sapiens
ggtcagagacctcaa

SEQ ID NO: 1168933 - DNA, 15 bp, Homo sapiens
aggtcagagacctca

SEQ ID NO: 1168934 - DNA, 15 bp, Homo sapiens
gaggtcagagacctc

SEQ ID NO: 1168935 - DNA, 15 bp, Homo sapiens
ggaggtcagagacct

SEQ ID NO: 1168936 - DNA, 15 bp, Homo sapiens
tggaggtcagagacc

SEQ ID NO: 1168937 - DNA, 15 bp, Homo sapiens
ctggaggtcagagac

SEQ ID NO: 1168938 - DNA, 15 bp, Homo sapiens
cctggaggtcagaga

SEQ ID NO: 1168939 - DNA, 15 bp, Homo sapiens
ccctggaggtcagag

SEQ ID NO: 1168940 - DNA, 15 bp, Homo sapiens
accctggaggtcaga

SEQ ID NO: 1168941 - DNA, 15 bp, Homo sapiens
caccctggaggtcag

SEQ ID NO: 1168942 - DNA, 15 bp, Homo sapiens
acaccctggaggtca

SEQ ID NO: 1168943 - DNA, 15 bp, Homo sapiens
aacaccctggaggtc

SEQ ID NO: 1168944 - DNA, 15 bp, Homo sapiens
caacaccctggaggt

SEQ ID NO: 1168945 - DNA, 15 bp, Homo sapiens
ccaacaccctggagg

SEQ ID NO: 1168946 - DNA, 15 bp, Homo sapiens
cccaacaccctggag

SEQ ID NO: 1168947 - DNA, 15 bp, Homo sapiens
gcccaacaccctgga

SEQ ID NO: 1168948 - DNA, 15 bp, Homo sapiens
agcccaacaccctgg

SEQ ID NO: 1168949 - DNA, 15 bp, Homo sapiens
cagcccaacaccctg

SEQ ID NO: 1168950 - DNA, 15 bp, Homo sapiens
ccagcccaacaccct

SEQ ID NO: 1168951 - DNA, 15 bp, Homo sapiens
gccagcccaacaccc

SEQ ID NO: 1168952 - DNA, 15 bp, Homo sapiens
ggccagcccaacacc

SEQ ID NO: 1168953 - DNA, 15 bp, Homo sapiens
tggccagcccaacac

SEQ ID NO: 1168954 - DNA, 15 bp, Homo sapiens
gtggccagcccaaca

SEQ ID NO: 1168955 - DNA, 15 bp, Homo sapiens
cgtcggctctaagaa

SEQ ID NO: 1168956 - DNA, 15 bp, Homo sapiens
acgtcggctctaaga

SEQ ID NO: 1168957 - DNA, 15 bp, Homo sapiens
cacgtcggctctaag

SEQ ID NO: 1168958 - DNA, 15 bp, Homo sapiens
ccacgtcggctctaa

SEQ ID NO: 1168959 - DNA, 15 bp, Homo sapiens
accacgtcggctcta

SEQ ID NO: 1168960 - DNA, 15 bp, Homo sapiens
aaccacgtcggctct

SEQ ID NO: 1168961 - DNA, 15 bp, Homo sapiens
taaccacgtcggctc

SEQ ID NO: 1168962 - DNA, 15 bp, Homo sapiens
ttaaccacgtcggct

SEQ ID NO: 1168963 - DNA, 15 bp, Homo sapiens
tttaaccacgtcggc

SEQ ID NO: 1168964 - DNA, 15 bp, Homo sapiens
atttaaccacgtcgg

SEQ ID NO: 1168965 - DNA, 15 bp, Homo sapiens
gatttaaccacgtcg

SEQ ID NO: 1168966 - DNA, 15 bp, Homo sapiens
agatttaaccacgtc

SEQ ID NO: 1168967 - DNA, 15 bp, Homo sapiens
gagatttaaccacgt

SEQ ID NO: 1168968 - DNA, 15 bp, Homo sapiens
tgagatttaaccacg

SEQ ID NO: 1168969 - DNA, 15 bp, Homo sapiens
ttgagatttaaccac

SEQ ID NO: 1168970 - DNA, 15 bp, Homo sapiens
tttgagatttaacca

SEQ ID NO: 1168971 - DNA, 15 bp, Homo sapiens
atttgagatttaacc

SEQ ID NO: 1168972 - DNA, 15 bp, Homo sapiens
aatttgagatttaac

SEQ ID NO: 1168973 - DNA, 15 bp, Homo sapiens
caatttgagatttaa

SEQ ID NO: 1168974 - DNA, 15 bp, Homo sapiens
ccaatttgagattta

SEQ ID NO: 1168975 - DNA, 15 bp, Homo sapiens
gccaatttgagattt

SEQ ID NO: 1168976 - DNA, 15 bp, Homo sapiens
tgccaatttgagatt

SEQ ID NO: 1168977 - DNA, 15 bp, Homo sapiens
ttgccaatttgagat

SEQ ID NO: 1168978 - DNA, 15 bp, Homo sapiens
gttgccaatttgaga

SEQ ID NO: 1168979 - DNA, 15 bp, Homo sapiens
tgttgccaatttgag

SEQ ID NO: 1168980 - DNA, 15 bp, Homo sapiens
ctgttgccaatttga

SEQ ID NO: 1168981 - DNA, 15 bp, Homo sapiens
tctgttgccaatttg

SEQ ID NO: 1168982 - DNA, 15 bp, Homo sapiens
atctgttgccaattt

SEQ ID NO: 1168983 - DNA, 15 bp, Homo sapiens
catctgttgccaatt

SEQ ID NO: 1168984 - DNA, 15 bp, Homo sapiens
ccatctgttgccaat

SEQ ID NO: 1168985 - DNA, 15 bp, Homo sapiens
cccatctgttgccaa

SEQ ID NO: 1168986 - DNA, 15 bp, Homo sapiens
tcccatctgttgcca

SEQ ID NO: 1168987 - DNA, 15 bp, Homo sapiens
atcccatctgttgcc

SEQ ID NO: 1168988 - DNA, 15 bp, Homo sapiens
aatcccatctgttgc

SEQ ID NO: 1168989 - DNA, 15 bp, Homo sapiens
caatcccatctgttg

SEQ ID NO: 1168990 - DNA, 15 bp, Homo sapiens
gcaatcccatctgtt

SEQ ID NO: 1168991 - DNA, 15 bp, Homo sapiens
tgcaatcccatctgt

SEQ ID NO: 1168992 - DNA, 15 bp, Homo sapiens
gtgcaatcccatctg

SEQ ID NO: 1168993 - DNA, 15 bp, Homo sapiens
tgtgcaatcccatct

SEQ ID NO: 1168994 - DNA, 15 bp, Homo sapiens
ctgtgcaatcccatc

SEQ ID NO: 1168995 - DNA, 15 bp, Homo sapiens
cctgtgcaatcccat

SEQ ID NO: 1168996 - DNA, 15 bp, Homo sapiens
acctgtgcaatccca

SEQ ID NO: 1168997 - DNA, 15 bp, Homo sapiens
cacctgtgcaatccc

SEQ ID NO: 1168998 - DNA, 15 bp, Homo sapiens
ccacctgtgcaatcc

SEQ ID NO: 1168999 - DNA, 15 bp, Homo sapiens
tccacctgtgcaatc

SEQ ID NO: 1169000 - DNA, 15 bp, Homo sapiens
ttccacctgtgcaat

SEQ ID NO: 1169001 - DNA, 15 bp, Homo sapiens
gttccacctgtgcaa

SEQ ID NO: 1169002 - DNA, 15 bp, Homo sapiens
ggttccacctgtgca

SEQ ID NO: 1169003 - DNA, 15 bp, Homo sapiens
aggttccacctgtgc

SEQ ID NO: 1169004 - DNA, 15 bp, Homo sapiens
gaggttccacctgtg

SEQ ID NO: 1169005 - DNA, 15 bp, Homo sapiens
tgaggttccacctgt

SEQ ID NO: 1169006 - DNA, 15 bp, Homo sapiens
ctgaggttccacctg

SEQ ID NO: 1169007 - DNA, 15 bp, Homo sapiens
cctgaggttccacct

SEQ ID NO: 1169008 - DNA, 15 bp, Homo sapiens
ccctgaggttccacc

SEQ ID NO: 1169009 - DNA, 15 bp, Homo sapiens
gccctgaggttccac

SEQ ID NO: 1169010 - DNA, 15 bp, Homo sapiens
agccctgaggttcca

SEQ ID NO: 1169011 - DNA, 15 bp, Homo sapiens
aagccctgaggttcc

SEQ ID NO: 1169012 - DNA, 15 bp, Homo sapiens
aaagccctgaggttc

SEQ ID NO: 1169013 - DNA, 15 bp, Homo sapiens
caaagccctgaggtt

SEQ ID NO: 1169014 - DNA, 15 bp, Homo sapiens
ccaaagccctgaggt

SEQ ID NO: 1169015 - DNA, 15 bp, Homo sapiens
cccaaagccctgagg

SEQ ID NO: 1169016 - DNA, 15 bp, Homo sapiens
tcccaaagccctgag

SEQ ID NO: 1169017 - DNA, 15 bp, Homo sapiens
ttcccaaagccctga

SEQ ID NO: 1169018 - DNA, 15 bp, Homo sapiens
tttcccaaagccctg

SEQ ID NO: 1169019 - DNA, 15 bp, Homo sapiens
ttttcccaaagccct

SEQ ID NO: 1169020 - DNA, 15 bp, Homo sapiens
attttcccaaagccc

SEQ ID NO: 1169021 - DNA, 15 bp, Homo sapiens
tattttcccaaagcc

SEQ ID NO: 1169022 - DNA, 15 bp, Homo sapiens
ctattttcccaaagc

SEQ ID NO: 1169023 - DNA, 15 bp, Homo sapiens
cctattttcccaaag

SEQ ID NO: 1169024 - DNA, 15 bp, Homo sapiens
tcctattttcccaaa

SEQ ID NO: 1169025 - DNA, 15 bp, Homo sapiens
ctcctattttcccaa

SEQ ID NO: 1169026 - DNA, 15 bp, Homo sapiens
actcctattttccca

SEQ ID NO: 1169027 - DNA, 15 bp, Homo sapiens
cactcctattttccc

SEQ ID NO: 1169028 - DNA, 15 bp, Homo sapiens
gcactcctattttcc

SEQ ID NO: 1169029 - DNA, 15 bp, Homo sapiens
agcactcctattttc

SEQ ID NO: 1169030 - DNA, 15 bp, Homo sapiens
cagcactcctatttt

SEQ ID NO: 1169031 - DNA, 15 bp, Homo sapiens
tcagcactcctattt

SEQ ID NO: 1169032 - DNA, 15 bp, Homo sapiens
gtcagcactcctatt

SEQ ID NO: 1169033 - DNA, 15 bp, Homo sapiens
tgtcagcactcctat

SEQ ID NO: 1169034 - DNA, 15 bp, Homo sapiens
ttgtcagcactccta

SEQ ID NO: 1169035 - DNA, 15 bp, Homo sapiens
cttgtcagcactcct

SEQ ID NO: 1169036 - DNA, 15 bp, Homo sapiens
ccttgtcagcactcc

SEQ ID NO: 1169037 - DNA, 15 bp, Homo sapiens
cccttgtcagcactc

SEQ ID NO: 1169038 - DNA, 15 bp, Homo sapiens
gcccttgtcagcact

SEQ ID NO: 1169039 - DNA, 15 bp, Homo sapiens
ggcccttgtcagcac

SEQ ID NO: 1169040 - DNA, 15 bp, Homo sapiens
gggcccttgtcagca

SEQ ID NO: 1169041 - DNA, 15 bp, Homo sapiens
tgggcccttgtcagc

SEQ ID NO: 1169042 - DNA, 15 bp, Homo sapiens
atgggcccttgtcag

SEQ ID NO: 1169043 - DNA, 15 bp, Homo sapiens
gatgggcccttgtca

SEQ ID NO: 1169044 - DNA, 15 bp, Homo sapiens
agatgggcccttgtc

SEQ ID NO: 1169045 - DNA, 15 bp, Homo sapiens
gagatgggcccttgt

SEQ ID NO: 1169046 - DNA, 15 bp, Homo sapiens
ggagatgggcccttg

SEQ ID NO: 1169047 - DNA, 15 bp, Homo sapiens
aggagatgggccctt

SEQ ID NO: 1169048 - DNA, 15 bp, Homo sapiens
gaggagatgggccct

SEQ ID NO: 1169049 - DNA, 15 bp, Homo sapiens
agaggagatgggccc

SEQ ID NO: 1169050 - DNA, 15 bp, Homo sapiens
aagaggagatgggcc

SEQ ID NO: 1169051 - DNA, 15 bp, Homo sapiens
gaagaggagatgggc

SEQ ID NO: 1169052 - DNA, 15 bp, Homo sapiens
ggaagaggagatggg

SEQ ID NO: 1169053 - DNA, 15 bp, Homo sapiens
gggaagaggagatgg

SEQ ID NO: 1169054 - DNA, 15 bp, Homo sapiens
agggaagaggagatg

SEQ ID NO: 1169055 - DNA, 15 bp, Homo sapiens
aagggaagaggagat

SEQ ID NO: 1169056 - DNA, 15 bp, Homo sapiens
gaagggaagaggaga

SEQ ID NO: 1169057 - DNA, 15 bp, Homo sapiens
tgaagggaagaggag

SEQ ID NO: 1169058 - DNA, 15 bp, Homo sapiens
ctgaagggaagagga

SEQ ID NO: 1169059 - DNA, 15 bp, Homo sapiens
tctgaagggaagagg

SEQ ID NO: 1169060 - DNA, 15 bp, Homo sapiens
ctctgaagggaagag

SEQ ID NO: 1169061 - DNA, 15 bp, Homo sapiens
tctctgaagggaaga

SEQ ID NO: 1169062 - DNA, 15 bp, Homo sapiens
ctctctgaagggaag

SEQ ID NO: 1169063 - DNA, 15 bp, Homo sapiens
tctctctgaagggaa

SEQ ID NO: 1169064 - DNA, 15 bp, Homo sapiens
ctctctctgaaggga

SEQ ID NO: 1169065 - DNA, 15 bp, Homo sapiens
cctctctctgaaggg

SEQ ID NO: 1169066 - DNA, 15 bp, Homo sapiens
acctctctctgaagg

SEQ ID NO: 1169067 - DNA, 15 bp, Homo sapiens
aacctctctctgaag

SEQ ID NO: 1169068 - DNA, 15 bp, Homo sapiens
aaacctctctctgaa

SEQ ID NO: 1169069 - DNA, 15 bp, Homo sapiens
caaacctctctctga

SEQ ID NO: 1169070 - DNA, 15 bp, Homo sapiens
ccaaacctctctctg

SEQ ID NO: 1169071 - DNA, 15 bp, Homo sapiens
cccaaacctctctct

SEQ ID NO: 1169072 - DNA, 15 bp, Homo sapiens
ccccaaacctctctc

SEQ ID NO: 1169073 - DNA, 15 bp, Homo sapiens
gccccaaacctctct

SEQ ID NO: 1169074 - DNA, 15 bp, Homo sapiens
agccccaaacctctc

SEQ ID NO: 1169075 - DNA, 15 bp, Homo sapiens
aagccccaaacctct

SEQ ID NO: 1169076 - DNA, 15 bp, Homo sapiens
gaagccccaaacctc

SEQ ID NO: 1169077 - DNA, 15 bp, Homo sapiens
agaagccccaaacct

SEQ ID NO: 1169078 - DNA, 15 bp, Homo sapiens
gagaagccccaaacc

SEQ ID NO: 1169079 - DNA, 15 bp, Homo sapiens
ggagaagccccaaac

SEQ ID NO: 1169080 - DNA, 15 bp, Homo sapiens
gggagaagccccaaa

SEQ ID NO: 1169081 - DNA, 15 bp, Homo sapiens
cgggagaagccccaa

SEQ ID NO: 1169082 - DNA, 15 bp, Homo sapiens
ccgggagaagcccca

SEQ ID NO: 1169083 - DNA, 15 bp, Homo sapiens
cccgggagaagcccc

SEQ ID NO: 1169084 - DNA, 15 bp, Homo sapiens
ccccgggagaagccc

SEQ ID NO: 1169085 - DNA, 15 bp, Homo sapiens
gccccgggagaagcc

SEQ ID NO: 1169086 - DNA, 15 bp, Homo sapiens
tgccccgggagaagc

SEQ ID NO: 1169087 - DNA, 15 bp, Homo sapiens
gtgccccgggagaag

SEQ ID NO: 1169088 - DNA, 15 bp, Homo sapiens
ggtgccccgggagaa

SEQ ID NO: 1169089 - DNA, 15 bp, Homo sapiens
aggtgccccgggaga

SEQ ID NO: 1169090 - DNA, 15 bp, Homo sapiens
aaggtgccccgggag

SEQ ID NO: 1169091 - DNA, 15 bp, Homo sapiens
gaaggtgccccggga

SEQ ID NO: 1169092 - DNA, 15 bp, Homo sapiens
ggaaggtgccccggg

SEQ ID NO: 1169093 - DNA, 15 bp, Homo sapiens
gggaaggtgccccgg

SEQ ID NO: 1169094 - DNA, 15 bp, Homo sapiens
tgggaaggtgccccg

SEQ ID NO: 1169095 - DNA, 15 bp, Homo sapiens
ctgggaaggtgcccc

SEQ ID NO: 1169096 - DNA, 15 bp, Homo sapiens
tctgggaaggtgccc

SEQ ID NO: 1169097 - DNA, 15 bp, Homo sapiens
ctctgggaaggtgcc

SEQ ID NO: 1169098 - DNA, 15 bp, Homo sapiens
tctctgggaaggtgc

SEQ ID NO: 1169099 - DNA, 15 bp, Homo sapiens
ttctctgggaaggtg

SEQ ID NO: 1169100 - DNA, 15 bp, Homo sapiens
gttctctgggaaggt

SEQ ID NO: 1169101 - DNA, 15 bp, Homo sapiens
ggttctctgggaagg

SEQ ID NO: 1169102 - DNA, 15 bp, Homo sapiens
aggttctctgggaag

SEQ ID NO: 1169103 - DNA, 15 bp, Homo sapiens
gaggttctctgggaa

SEQ ID NO: 1169104 - DNA, 15 bp, Homo sapiens
tgaggttctctggga

SEQ ID NO: 1169105 - DNA, 15 bp, Homo sapiens
ttgaggttctctggg

SEQ ID NO: 1169106 - DNA, 15 bp, Homo sapiens
gttgaggttctctgg

SEQ ID NO: 1169107 - DNA, 15 bp, Homo sapiens
ggttgaggttctctg

SEQ ID NO: 1169108 - DNA, 15 bp, Homo sapiens
aggttgaggttctct

SEQ ID NO: 1169109 - DNA, 15 bp, Homo sapiens
gaggttgaggttctc

SEQ ID NO: 1169110 - DNA, 15 bp, Homo sapiens
tgaggttgaggttct

SEQ ID NO: 1169111 - DNA, 15 bp, Homo sapiens
ctgaggttgaggttc

SEQ ID NO: 1169112 - DNA, 15 bp, Homo sapiens
cctgaggttgaggtt

SEQ ID NO: 1169113 - DNA, 15 bp, Homo sapiens
gcctgaggttgaggt

SEQ ID NO: 1169114 - DNA, 15 bp, Homo sapiens
agcctgaggttgagg

SEQ ID NO: 1169115 - DNA, 15 bp, Homo sapiens
cagcctgaggttgag

SEQ ID NO: 1169116 - DNA, 15 bp, Homo sapiens
ccagcctgaggttga

SEQ ID NO: 1169117 - DNA, 15 bp, Homo sapiens
accagcctgaggttg

SEQ ID NO: 1169118 - DNA, 15 bp, Homo sapiens
caccagcctgaggtt

SEQ ID NO: 1169119 - DNA, 15 bp, Homo sapiens
ccaccagcctgaggt

SEQ ID NO: 1169120 - DNA, 15 bp, Homo sapiens
tccaccagcctgagg

SEQ ID NO: 1169121 - DNA, 15 bp, Homo sapiens
ctccaccagcctgag

SEQ ID NO: 1169122 - DNA, 15 bp, Homo sapiens
gctccaccagcctga

SEQ ID NO: 1169123 - DNA, 15 bp, Homo sapiens
ggctccaccagcctg

SEQ ID NO: 1169124 - DNA, 15 bp, Homo sapiens
aggctccaccagcct

SEQ ID NO: 1169125 - DNA, 15 bp, Homo sapiens
caggctccaccagcc

SEQ ID NO: 1169126 - DNA, 15 bp, Homo sapiens
tcaggctccaccagc

SEQ ID NO: 1169127 - DNA, 15 bp, Homo sapiens
ttcaggctccaccag

SEQ ID NO: 1169128 - DNA, 15 bp, Homo sapiens
cttcaggctccacca

SEQ ID NO: 1169129 - DNA, 15 bp, Homo sapiens
gcttcaggctccacc

SEQ ID NO: 1169130 - DNA, 15 bp, Homo sapiens
ggcttcaggctccac

SEQ ID NO: 1169131 - DNA, 15 bp, Homo sapiens
tggcttcaggctcca

SEQ ID NO: 1169132 - DNA, 15 bp, Homo sapiens
ttggcttcaggctcc

SEQ ID NO: 1169133 - DNA, 15 bp, Homo sapiens
cttggcttcaggctc

SEQ ID NO: 1169134 - DNA, 15 bp, Homo sapiens
gcttggcttcaggct

SEQ ID NO: 1169135 - DNA, 15 bp, Homo sapiens
tgcttggcttcaggc

SEQ ID NO: 1169136 - DNA, 15 bp, Homo sapiens
ctgcttggcttcagg

SEQ ID NO: 1169137 - DNA, 15 bp, Homo sapiens
gctgcttggcttcag

SEQ ID NO: 1169138 - DNA, 15 bp, Homo sapiens
agctgcttggcttca

SEQ ID NO: 1169139 - DNA, 15 bp, Homo sapiens
aagctgcttggcttc

SEQ ID NO: 1169140 - DNA, 15 bp, Homo sapiens
gaagctgcttggctt

SEQ ID NO: 1169141 - DNA, 15 bp, Homo sapiens
agaagctgcttggct

SEQ ID NO: 1169142 - DNA, 15 bp, Homo sapiens
cagaagctgcttggc

SEQ ID NO: 1169143 - DNA, 15 bp, Homo sapiens
ccagaagctgcttgg

SEQ ID NO: 1169144 - DNA, 15 bp, Homo sapiens
accagaagctgcttg

SEQ ID NO: 1169145 - DNA, 15 bp, Homo sapiens
taccagaagctgctt

SEQ ID NO: 1169146 - DNA, 15 bp, Homo sapiens
ttaccagaagctgct

SEQ ID NO: 1169147 - DNA, 15 bp, Homo sapiens
tttaccagaagctgc

SEQ ID NO: 1169148 - DNA, 15 bp, Homo sapiens
ctttaccagaagctg

SEQ ID NO: 1169149 - DNA, 15 bp, Homo sapiens
tctttaccagaagct

SEQ ID NO: 1169150 - DNA, 15 bp, Homo sapiens
ctctttaccagaagc

SEQ ID NO: 1169151 - DNA, 15 bp, Homo sapiens
tctctttaccagaag

SEQ ID NO: 1169152 - DNA, 15 bp, Homo sapiens
gtctctttaccagaa

SEQ ID NO: 1169153 - DNA, 15 bp, Homo sapiens
ggtctctttaccaga

SEQ ID NO: 1169154 - DNA, 15 bp, Homo sapiens
gggtctctttaccag

SEQ ID NO: 1169155 - DNA, 15 bp, Homo sapiens
tgggtctctttacca

SEQ ID NO: 1169156 - DNA, 15 bp, Homo sapiens
ctgggtctctttacc

SEQ ID NO: 1169157 - DNA, 15 bp, Homo sapiens
tctgggtctctttac

SEQ ID NO: 1169158 - DNA, 15 bp, Homo sapiens
gtctgggtctcttta

SEQ ID NO: 1169159 - DNA, 15 bp, Homo sapiens
agtctgggtctcttt

SEQ ID NO: 1169160 - DNA, 15 bp, Homo sapiens
gagtctgggtctctt

SEQ ID NO: 1169161 - DNA, 15 bp, Homo sapiens
agagtctgggtctct

SEQ ID NO: 1169162 - DNA, 15 bp, Homo sapiens
cagagtctgggtctc

SEQ ID NO: 1169163 - DNA, 15 bp, Homo sapiens
ccagagtctgggtct

SEQ ID NO: 1169164 - DNA, 15 bp, Homo sapiens
tccagagtctgggtc

SEQ ID NO: 1169165 - DNA, 15 bp, Homo sapiens
gtccagagtctgggt

SEQ ID NO: 1169166 - DNA, 15 bp, Homo sapiens
ggtccagagtctggg

SEQ ID NO: 1169167 - DNA, 15 bp, Homo sapiens
cggtccagagtctgg

SEQ ID NO: 1169168 - DNA, 15 bp, Homo sapiens
ccggtccagagtctg

SEQ ID NO: 1169169 - DNA, 15 bp, Homo sapiens
tccggtccagagtct

SEQ ID NO: 1169170 - DNA, 15 bp, Homo sapiens
ctccggtccagagtc

SEQ ID NO: 1169171 - DNA, 15 bp, Homo sapiens
tctccggtccagagt

SEQ ID NO: 1169172 - DNA, 15 bp, Homo sapiens
ctctccggtccagag

SEQ ID NO: 1169173 - DNA, 15 bp, Homo sapiens
tctctccggtccaga

SEQ ID NO: 1169174 - DNA, 15 bp, Homo sapiens
ctctctccggtccag

SEQ ID NO: 1169175 - DNA, 15 bp, Homo sapiens
actctctccggtcca

SEQ ID NO: 1169176 - DNA, 15 bp, Homo sapiens
aactctctccggtcc

SEQ ID NO: 1169177 - DNA, 15 bp, Homo sapiens
gaactctctccggtc

SEQ ID NO: 1169178 - DNA, 15 bp, Homo sapiens
agaactctctccggt

SEQ ID NO: 1169179 - DNA, 15 bp, Homo sapiens
tagaactctctccgg

SEQ ID NO: 1169180 - DNA, 15 bp, Homo sapiens
atagaactctctccg

SEQ ID NO: 1169181 - DNA, 15 bp, Homo sapiens
tatagaactctctcc

SEQ ID NO: 1169182 - DNA, 15 bp, Homo sapiens
ttatagaactctctc

SEQ ID NO: 1169183 - DNA, 15 bp, Homo sapiens
tttatagaactctct

SEQ ID NO: 1169184 - DNA, 15 bp, Homo sapiens
ttttatagaactctc

SEQ ID NO: 1169185 - DNA, 15 bp, Homo sapiens
tttttatagaactct

SEQ ID NO: 1169186 - DNA, 15 bp, Homo sapiens
ttttttatagaactc

SEQ ID NO: 1169187 - DNA, 15 bp, Homo sapiens
tttttttatagaact

SEQ ID NO: 1169188 - DNA, 15 bp, Homo sapiens
gtttttttatagaac

SEQ ID NO: 1169189 - DNA, 15 bp, Homo sapiens
ggtttttttatagaa

SEQ ID NO: 1169190 - DNA, 15 bp, Homo sapiens
aggtttttttataga

SEQ ID NO: 1169191 - DNA, 15 bp, Homo sapiens
gaggtttttttatag

SEQ ID NO: 1169192 - DNA, 15 bp, Homo sapiens
agaggtttttttata

SEQ ID NO: 1169193 - DNA, 15 bp, Homo sapiens
cagaggtttttttat

SEQ ID NO: 1169194 - DNA, 15 bp, Homo sapiens
acagaggttttttta

SEQ ID NO: 1169195 - DNA, 15 bp, Homo sapiens
cacagaggttttttt

SEQ ID NO: 1169196 - DNA, 15 bp, Homo sapiens
gcacagaggtttttt

SEQ ID NO: 1169197 - DNA, 15 bp, Homo sapiens
agcacagaggttttt

SEQ ID NO: 1169198 - DNA, 15 bp, Homo sapiens
gagcacagaggtttt

SEQ ID NO: 1169199 - DNA, 15 bp, Homo sapiens
agagcacagaggttt

SEQ ID NO: 1169200 - DNA, 15 bp, Homo sapiens
cagagcacagaggtt

SEQ ID NO: 1169201 - DNA, 15 bp, Homo sapiens
tcagagcacagaggt

SEQ ID NO: 1169202 - DNA, 15 bp, Homo sapiens
ctcagagcacagagg

SEQ ID NO: 1169203 - DNA, 15 bp, Homo sapiens
tctcagagcacagag

SEQ ID NO: 1169204 - DNA, 15 bp, Homo sapiens
ttctcagagcacaga

SEQ ID NO: 1169205 - DNA, 15 bp, Homo sapiens
cttctcagagcacag

SEQ ID NO: 1169206 - DNA, 15 bp, Homo sapiens
tcttctcagagcaca

SEQ ID NO: 1169207 - DNA, 15 bp, Homo sapiens
gtcttctcagagcac

SEQ ID NO: 1169208 - DNA, 15 bp, Homo sapiens
ggtcttctcagagca

SEQ ID NO: 1169209 - DNA, 15 bp, Homo sapiens
aggtcttctcagagc

SEQ ID NO: 1169210 - DNA, 15 bp, Homo sapiens
caggtcttctcagag

SEQ ID NO: 1169211 - DNA, 15 bp, Homo sapiens
tcaggtcttctcaga

SEQ ID NO: 1169212 - DNA, 15 bp, Homo sapiens
gtcaggtcttctcag

SEQ ID NO: 1169213 - DNA, 15 bp, Homo sapiens
agtcaggtcttctca

SEQ ID NO: 1169214 - DNA, 15 bp, Homo sapiens
cagtcaggtcttctc

SEQ ID NO: 1169215 - DNA, 15 bp, Homo sapiens
ccagtcaggtcttct

SEQ ID NO: 1169216 - DNA, 15 bp, Homo sapiens
tccagtcaggtcttc

SEQ ID NO: 1169217 - DNA, 15 bp, Homo sapiens
ctccagtcaggtctt

SEQ ID NO: 1169218 - DNA, 15 bp, Homo sapiens
actccagtcaggtct

SEQ ID NO: 1169219 - DNA, 15 bp, Homo sapiens
cactccagtcaggtc

SEQ ID NO: 1169220 - DNA, 15 bp, Homo sapiens
ccactccagtcaggt

SEQ ID NO: 1169221 - DNA, 15 bp, Homo sapiens
cccactccagtcagg

SEQ ID NO: 1169222 - DNA, 15 bp, Homo sapiens
gcccactccagtcag

SEQ ID NO: 1169223 - DNA, 15 bp, Homo sapiens
tgcccactccagtca

SEQ ID NO: 1169224 - DNA, 15 bp, Homo sapiens
ttgcccactccagtc

SEQ ID NO: 1169225 - DNA, 15 bp, Homo sapiens
tttgcccactccagt

SEQ ID NO: 1169226 - DNA, 15 bp, Homo sapiens
gtttgcccactccag

SEQ ID NO: 1169227 - DNA, 15 bp, Homo sapiens
agtttgcccactcca

SEQ ID NO: 1169228 - DNA, 15 bp, Homo sapiens
gagtttgcccactcc

SEQ ID NO: 1169229 - DNA, 15 bp, Homo sapiens
agagtttgcccactc

SEQ ID NO: 1169230 - DNA, 15 bp, Homo sapiens
aagagtttgcccact

SEQ ID NO: 1169231 - DNA, 15 bp, Homo sapiens
aaagagtttgcccac

SEQ ID NO: 1169232 - DNA, 15 bp, Homo sapiens
caaagagtttgccca

SEQ ID NO: 1169233 - DNA, 15 bp, Homo sapiens
gcaaagagtttgccc

SEQ ID NO: 1169234 - DNA, 15 bp, Homo sapiens
ggcaaagagtttgcc

SEQ ID NO: 1169235 - DNA, 15 bp, Homo sapiens
aggcaaagagtttgc

SEQ ID NO: 1169236 - DNA, 15 bp, Homo sapiens
aaggcaaagagtttg

SEQ ID NO: 1169237 - DNA, 15 bp, Homo sapiens
aaaggcaaagagttt

SEQ ID NO: 1169238 - DNA, 15 bp, Homo sapiens
taaaggcaaagagtt

SEQ ID NO: 1169239 - DNA, 15 bp, Homo sapiens
ttaaaggcaaagagt

SEQ ID NO: 1169240 - DNA, 15 bp, Homo sapiens
gttaaaggcaaagag

SEQ ID NO: 1169241 - DNA, 15 bp, Homo sapiens
agttaaaggcaaaga

SEQ ID NO: 1169242 - DNA, 15 bp, Homo sapiens
aagttaaaggcaaag

SEQ ID NO: 1169243 - DNA, 15 bp, Homo sapiens
aaagttaaaggcaaa

SEQ ID NO: 1169244 - DNA, 15 bp, Homo sapiens
gaaagttaaaggcaa

SEQ ID NO: 1169245 - DNA, 15 bp, Homo sapiens
agaaagttaaaggca

SEQ ID NO: 1169246 - DNA, 15 bp, Homo sapiens
gagaaagttaaaggc

SEQ ID NO: 1169247 - DNA, 15 bp, Homo sapiens
agagaaagttaaagg

SEQ ID NO: 1169248 - DNA, 15 bp, Homo sapiens
aagagaaagttaaag

SEQ ID NO: 1169249 - DNA, 15 bp, Homo sapiens
gaagagaaagttaaa

SEQ ID NO: 1169250 - DNA, 15 bp, Homo sapiens
ggaagagaaagttaa

SEQ ID NO: 1169251 - DNA, 15 bp, Homo sapiens
gggaagagaaagtta

SEQ ID NO: 1169252 - DNA, 15 bp, Homo sapiens
agggaagagaaagtt

SEQ ID NO: 1169253 - DNA, 15 bp, Homo sapiens
cagggaagagaaagt

SEQ ID NO: 1169254 - DNA, 15 bp, Homo sapiens
gcagggaagagaaag

SEQ ID NO: 1169255 - DNA, 15 bp, Homo sapiens
tgcagggaagagaaa

SEQ ID NO: 1169256 - DNA, 15 bp, Homo sapiens
ctgcagggaagagaa

SEQ ID NO: 1169257 - DNA, 15 bp, Homo sapiens
gctgcagggaagaga

SEQ ID NO: 1169258 - DNA, 15 bp, Homo sapiens
agctgcagggaagag

SEQ ID NO: 1169259 - DNA, 15 bp, Homo sapiens
cagctgcagggaaga

SEQ ID NO: 1169260 - DNA, 15 bp, Homo sapiens
ccagctgcagggaag

SEQ ID NO: 1169261 - DNA, 15 bp, Homo sapiens
gccagctgcagggaa

SEQ ID NO: 1169262 - DNA, 15 bp, Homo sapiens
agccagctgcaggga

SEQ ID NO: 1169263 - DNA, 15 bp, Homo sapiens
aagccagctgcaggg

SEQ ID NO: 1169264 - DNA, 15 bp, Homo sapiens
taagccagctgcagg

SEQ ID NO: 1169265 - DNA, 15 bp, Homo sapiens
ttaagccagctgcag

SEQ ID NO: 1169266 - DNA, 15 bp, Homo sapiens
attaagccagctgca

SEQ ID NO: 1169267 - DNA, 15 bp, Homo sapiens
tattaagccagctgc

SEQ ID NO: 1169268 - DNA, 15 bp, Homo sapiens
atattaagccagctg

SEQ ID NO: 1169269 - DNA, 15 bp, Homo sapiens
gatattaagccagct

SEQ ID NO: 1169270 - DNA, 15 bp, Homo sapiens
agatattaagccagc

SEQ ID NO: 1169271 - DNA, 15 bp, Homo sapiens
gagatattaagccag

SEQ ID NO: 1169272 - DNA, 15 bp, Homo sapiens
ggagatattaagcca

SEQ ID NO: 1169273 - DNA, 15 bp, Homo sapiens
aggagatattaagcc

SEQ ID NO: 1169274 - DNA, 15 bp, Homo sapiens
caggagatattaagc

SEQ ID NO: 1169275 - DNA, 15 bp, Homo sapiens
tcaggagatattaag

SEQ ID NO: 1169276 - DNA, 15 bp, Homo sapiens
ctcaggagatattaa

SEQ ID NO: 1169277 - DNA, 15 bp, Homo sapiens
cctcaggagatatta

SEQ ID NO: 1169278 - DNA, 15 bp, Homo sapiens
gcctcaggagatatt

SEQ ID NO: 1169279 - DNA, 15 bp, Homo sapiens
ggcctcaggagatat

SEQ ID NO: 1169280 - DNA, 15 bp, Homo sapiens
tggcctcaggagata

SEQ ID NO: 1169281 - DNA, 15 bp, Homo sapiens
ttggcctcaggagat

SEQ ID NO: 1169282 - DNA, 15 bp, Homo sapiens
tttggcctcaggaga

SEQ ID NO: 1169283 - DNA, 15 bp, Homo sapiens
gtttggcctcaggag

SEQ ID NO: 1169284 - DNA, 15 bp, Homo sapiens
tgtttggcctcagga

SEQ ID NO: 1169285 - DNA, 15 bp, Homo sapiens
ctgtttggcctcagg

SEQ ID NO: 1169286 - DNA, 15 bp, Homo sapiens
tctgtttggcctcag

SEQ ID NO: 1169287 - DNA, 15 bp, Homo sapiens
gtctgtttggcctca

SEQ ID NO: 1169288 - DNA, 15 bp, Homo sapiens
tgtctgtttggcctc

SEQ ID NO: 1169289 - DNA, 15 bp, Homo sapiens
atgtctgtttggcct

SEQ ID NO: 1169290 - DNA, 15 bp, Homo sapiens
catgtctgtttggcc

SEQ ID NO: 1169291 - DNA, 15 bp, Homo sapiens
tcatgtctgtttggc

SEQ ID NO: 1169292 - DNA, 15 bp, Homo sapiens
gtcatgtctgtttgg

SEQ ID NO: 1169293 - DNA, 15 bp, Homo sapiens
tgtcatgtctgtttg

SEQ ID NO: 1169294 - DNA, 15 bp, Homo sapiens
gtgtcatgtctgttt

SEQ ID NO: 1169295 - DNA, 15 bp, Homo sapiens
agtgtcatgtctgtt

SEQ ID NO: 1169296 - DNA, 15 bp, Homo sapiens
aagtgtcatgtctgt

SEQ ID NO: 1169297 - DNA, 15 bp, Homo sapiens
caagtgtcatgtctg

SEQ ID NO: 1169298 - DNA, 15 bp, Homo sapiens
gcaagtgtcatgtct

SEQ ID NO: 1169299 - DNA, 15 bp, Homo sapiens
tgcaagtgtcatgtc

SEQ ID NO: 1169300 - DNA, 15 bp, Homo sapiens
ctgcaagtgtcatgt

SEQ ID NO: 1169301 - DNA, 15 bp, Homo sapiens
gctgcaagtgtcatg

SEQ ID NO: 1169302 - DNA, 15 bp, Homo sapiens
tgctgcaagtgtcat

SEQ ID NO: 1169303 - DNA, 15 bp, Homo sapiens
atgctgcaagtgtca

SEQ ID NO: 1169304 - DNA, 15 bp, Homo sapiens
catgctgcaagtgtc

SEQ ID NO: 1169305 - DNA, 15 bp, Homo sapiens
acatgctgcaagtgt

SEQ ID NO: 1169306 - DNA, 15 bp, Homo sapiens
cacatgctgcaagtg

SEQ ID NO: 1169307 - DNA, 15 bp, Homo sapiens
tcacatgctgcaagt

SEQ ID NO: 1169308 - DNA, 15 bp, Homo sapiens
ctcacatgctgcaag

SEQ ID NO: 1169309 - DNA, 15 bp, Homo sapiens
tctcacatgctgcaa

SEQ ID NO: 1169310 - DNA, 15 bp, Homo sapiens
ctctcacatgctgca

SEQ ID NO: 1169311 - DNA, 15 bp, Homo sapiens
cctctcacatgctgc

SEQ ID NO: 1169312 - DNA, 15 bp, Homo sapiens
ccctctcacatgctg

SEQ ID NO: 1169313 - DNA, 15 bp, Homo sapiens
tccctctcacatgct

SEQ ID NO: 1169314 - DNA, 15 bp, Homo sapiens
ttccctctcacatgc

SEQ ID NO: 1169315 - DNA, 15 bp, Homo sapiens
cttccctctcacatg

SEQ ID NO: 1169316 - DNA, 15 bp, Homo sapiens
gcttccctctcacat

SEQ ID NO: 1169317 - DNA, 15 bp, Homo sapiens
tgcttccctctcaca

SEQ ID NO: 1169318 - DNA, 15 bp, Homo sapiens
ctgcttccctctcac

SEQ ID NO: 1169319 - DNA, 15 bp, Homo sapiens
gctgcttccctctca

SEQ ID NO: 1169320 - DNA, 15 bp, Homo sapiens
agctgcttccctctc

SEQ ID NO: 1169321 - DNA, 15 bp, Homo sapiens
cagctgcttccctct

SEQ ID NO: 1169322 - DNA, 15 bp, Homo sapiens
acagctgcttccctc

SEQ ID NO: 1169323 - DNA, 15 bp, Homo sapiens
aacagctgcttccct

SEQ ID NO: 1169324 - DNA, 15 bp, Homo sapiens
caacagctgcttccc

SEQ ID NO: 1169325 - DNA, 15 bp, Homo sapiens
tcaacagctgcttcc

SEQ ID NO: 1169326 - DNA, 15 bp, Homo sapiens
ctcaacagctgcttc

SEQ ID NO: 1169327 - DNA, 15 bp, Homo sapiens
tctcaacagctgctt

SEQ ID NO: 1169328 - DNA, 15 bp, Homo sapiens
ctctcaacagctgct

SEQ ID NO: 1169329 - DNA, 15 bp, Homo sapiens
actctcaacagctgc

SEQ ID NO: 1169330 - DNA, 15 bp, Homo sapiens
aactctcaacagctg

SEQ ID NO: 1169331 - DNA, 15 bp, Homo sapiens
taactctcaacagct

SEQ ID NO: 1169332 - DNA, 15 bp, Homo sapiens
ttaactctcaacagc

SEQ ID NO: 1169333 - DNA, 15 bp, Homo sapiens
attaactctcaacag

SEQ ID NO: 1169334 - DNA, 15 bp, Homo sapiens
cattaactctcaaca

SEQ ID NO: 1169335 - DNA, 15 bp, Homo sapiens
gcattaactctcaac

SEQ ID NO: 1169336 - DNA, 15 bp, Homo sapiens
ggcattaactctcaa

SEQ ID NO: 1169337 - DNA, 15 bp, Homo sapiens
gggcattaactctca

SEQ ID NO: 1169338 - DNA, 15 bp, Homo sapiens
tgggcattaactctc

SEQ ID NO: 1169339 - DNA, 15 bp, Homo sapiens
ttgggcattaactct

SEQ ID NO: 1169340 - DNA, 15 bp, Homo sapiens
tattgggcattaact

SEQ ID NO: 1169341 - DNA, 15 bp, Homo sapiens
atattgggcattaac

SEQ ID NO: 1169342 - DNA, 15 bp, Homo sapiens
aatattgggcattaa

SEQ ID NO: 1169343 - DNA, 15 bp, Homo sapiens
gaatattgggcatta

SEQ ID NO: 1169344 - DNA, 15 bp, Homo sapiens
tgaatattgggcatt

SEQ ID NO: 1169345 - DNA, 15 bp, Homo sapiens
atgaatattgggcat

SEQ ID NO: 1169346 - DNA, 15 bp, Homo sapiens
catgaatattgggca

SEQ ID NO: 1169347 - DNA, 15 bp, Homo sapiens
tcatgaatattgggc

SEQ ID NO: 1169348 - DNA, 15 bp, Homo sapiens
ttcatgaatattggg

SEQ ID NO: 1169349 - DNA, 15 bp, Homo sapiens
cttcatgaatattgg

SEQ ID NO: 1169350 - DNA, 15 bp, Homo sapiens
tcttcatgaatattg

SEQ ID NO: 1169351 - DNA, 15 bp, Homo sapiens
atcttcatgaatatt

SEQ ID NO: 1169352 - DNA, 15 bp, Homo sapiens
tatcttcatgaatat

SEQ ID NO: 1169353 - DNA, 15 bp, Homo sapiens
gtatcttcatgaata

SEQ ID NO: 1169354 - DNA, 15 bp, Homo sapiens
ggtatcttcatgaat

SEQ ID NO: 1169355 - DNA, 15 bp, Homo sapiens
tggtatcttcatgaa

SEQ ID NO: 1169356 - DNA, 15 bp, Homo sapiens
gtggtatcttcatga

SEQ ID NO: 1169357 - DNA, 15 bp, Homo sapiens
ggtggtatcttcatg

SEQ ID NO: 1169358 - DNA, 15 bp, Homo sapiens
gggtggtatcttcat

SEQ ID NO: 1169359 - DNA, 15 bp, Homo sapiens
agggtggtatcttca

SEQ ID NO: 1169360 - DNA, 15 bp, Homo sapiens
cagggtggtatcttc

SEQ ID NO: 1169361 - DNA, 15 bp, Homo sapiens
tcagggtggtatctt

SEQ ID NO: 1169362 - DNA, 15 bp, Homo sapiens
ctcagggtggtatct

SEQ ID NO: 1169363 - DNA, 15 bp, Homo sapiens
tctcagggtggtatc

SEQ ID NO: 1169364 - DNA, 15 bp, Homo sapiens
ttctcagggtggtat

SEQ ID NO: 1169365 - DNA, 15 bp, Homo sapiens
tttctcagggtggta

SEQ ID NO: 1169366 - DNA, 15 bp, Homo sapiens
ttttctcagggtggt

SEQ ID NO: 1169367 - DNA, 15 bp, Homo sapiens
tttttctcagggtgg

SEQ ID NO: 1169368 - DNA, 15 bp, Homo sapiens
atttttctcagggtg

SEQ ID NO: 1169369 - DNA, 15 bp, Homo sapiens
aatttttctcagggt

SEQ ID NO: 1169370 - DNA, 15 bp, Homo sapiens
gaatttttctcaggg

SEQ ID NO: 1169371 - DNA, 15 bp, Homo sapiens
agaatttttctcagg

SEQ ID NO: 1169372 - DNA, 15 bp, Homo sapiens
tagaatttttctcag

SEQ ID NO: 1169373 - DNA, 15 bp, Homo sapiens
ttagaatttttctca

SEQ ID NO: 1169374 - DNA, 15 bp, Homo sapiens
gttagaatttttctc

SEQ ID NO: 1169375 - DNA, 15 bp, Homo sapiens
ggttagaatttttct

SEQ ID NO: 1169376 - DNA, 15 bp, Homo sapiens
tggttagaatttttc

SEQ ID NO: 1169377 - DNA, 15 bp, Homo sapiens
ttggttagaattttt

SEQ ID NO: 1169378 - DNA, 15 bp, Homo sapiens
gttggttagaatttt

SEQ ID NO: 1169379 - DNA, 15 bp, Homo sapiens
tgttggttagaattt

SEQ ID NO: 1169380 - DNA, 15 bp, Homo sapiens
atgttggttagaatt

SEQ ID NO: 1169381 - DNA, 15 bp, Homo sapiens
gatgttggttagaat

SEQ ID NO: 1169382 - DNA, 15 bp, Homo sapiens
agatgttggttagaa

SEQ ID NO: 1169383 - DNA, 15 bp, Homo sapiens
aagatgttggttaga

SEQ ID NO: 1169384 - DNA, 15 bp, Homo sapiens
taagatgttggttag

SEQ ID NO: 1169385 - DNA, 15 bp, Homo sapiens
ctaagatgttggtta

SEQ ID NO: 1169386 - DNA, 15 bp, Homo sapiens
actaagatgttggtt

SEQ ID NO: 1169387 - DNA, 15 bp, Homo sapiens
gactaagatgttggt

SEQ ID NO: 1169388 - DNA, 15 bp, Homo sapiens
ggactaagatgttgg

SEQ ID NO: 1169389 - DNA, 15 bp, Homo sapiens
aggactaagatgttg

SEQ ID NO: 1169390 - DNA, 15 bp, Homo sapiens
gaggactaagatgtt

SEQ ID NO: 1169391 - DNA, 15 bp, Homo sapiens
tgaggactaagatgt

SEQ ID NO: 1169392 - DNA, 15 bp, Homo sapiens
gtgaggactaagatg

SEQ ID NO: 1169393 - DNA, 15 bp, Homo sapiens
agtgaggactaagat

SEQ ID NO: 1169394 - DNA, 15 bp, Homo sapiens
tagtgaggactaaga

SEQ ID NO: 1169395 - DNA, 15 bp, Homo sapiens
ttagtgaggactaag

SEQ ID NO: 1169396 - DNA, 15 bp, Homo sapiens
gttagtgaggactaa

SEQ ID NO: 1169397 - DNA, 15 bp, Homo sapiens
tgttagtgaggacta

SEQ ID NO: 1169398 - DNA, 15 bp, Homo sapiens
atgttagtgaggact

SEQ ID NO: 1169399 - DNA, 15 bp, Homo sapiens
gatgttagtgaggac

SEQ ID NO: 1169400 - DNA, 15 bp, Homo sapiens
agatgttagtgagga

SEQ ID NO: 1169401 - DNA, 15 bp, Homo sapiens
cagatgttagtgagg

SEQ ID NO: 1169402 - DNA, 15 bp, Homo sapiens
ccagatgttagtgag

SEQ ID NO: 1169403 - DNA, 15 bp, Homo sapiens
gccagatgttagtga

SEQ ID NO: 1169404 - DNA, 15 bp, Homo sapiens
tgccagatgttagtg

SEQ ID NO: 1169405 - DNA, 15 bp, Homo sapiens
atgccagatgttagt

SEQ ID NO: 1169406 - DNA, 15 bp, Homo sapiens
tatgccagatgttag

SEQ ID NO: 1169407 - DNA, 15 bp, Homo sapiens
gtatgccagatgtta

SEQ ID NO: 1169408 - DNA, 15 bp, Homo sapiens
agtatgccagatgtt

SEQ ID NO: 1169409 - DNA, 15 bp, Homo sapiens
aagtatgccagatgt

SEQ ID NO: 1169410 - DNA, 15 bp, Homo sapiens
gaagtatgccagatg

SEQ ID NO: 1169411 - DNA, 15 bp, Homo sapiens
agaagtatgccagat

SEQ ID NO: 1169412 - DNA, 15 bp, Homo sapiens
gagaagtatgccaga

SEQ ID NO: 1169413 - DNA, 15 bp, Homo sapiens
ggagaagtatgccag

SEQ ID NO: 1169414 - DNA, 15 bp, Homo sapiens
aggagaagtatgcca

SEQ ID NO: 1169415 - DNA, 15 bp, Homo sapiens
gaggagaagtatgcc

SEQ ID NO: 1169416 - DNA, 15 bp, Homo sapiens
tgaggagaagtatgc

SEQ ID NO: 1169417 - DNA, 15 bp, Homo sapiens
atgaggagaagtatg

SEQ ID NO: 1169418 - DNA, 15 bp, Homo sapiens
tatgaggagaagtat

SEQ ID NO: 1169419 - DNA, 15 bp, Homo sapiens
atatgaggagaagta

SEQ ID NO: 1169420 - DNA, 15 bp, Homo sapiens
gatatgaggagaagt

SEQ ID NO: 1169421 - DNA, 15 bp, Homo sapiens
agatatgaggagaag

SEQ ID NO: 1169422 - DNA, 15 bp, Homo sapiens
cagatatgaggagaa

SEQ ID NO: 1169423 - DNA, 15 bp, Homo sapiens
tcagatatgaggaga

SEQ ID NO: 1169424 - DNA, 15 bp, Homo sapiens
atcagatatgaggag

SEQ ID NO: 1169425 - DNA, 15 bp, Homo sapiens
aatcagatatgagga

SEQ ID NO: 1169426 - DNA, 15 bp, Homo sapiens
aaatcagatatgagg

SEQ ID NO: 1169427 - DNA, 15 bp, Homo sapiens
aaaatcagatatgag

SEQ ID NO: 1169428 - DNA, 15 bp, Homo sapiens
caaaatcagatatga

SEQ ID NO: 1169429 - DNA, 15 bp, Homo sapiens
tcaaaatcagatatg

SEQ ID NO: 1169430 - DNA, 15 bp, Homo sapiens
atcaaaatcagatat

SEQ ID NO: 1169431 - DNA, 15 bp, Homo sapiens
catcaaaatcagata

SEQ ID NO: 1169432 - DNA, 15 bp, Homo sapiens
tcatcaaaatcagat

SEQ ID NO: 1169433 - DNA, 15 bp, Homo sapiens
ttcatcaaaatcaga

SEQ ID NO: 1169434 - DNA, 15 bp, Homo sapiens
cttcatcaaaatcag

SEQ ID NO: 1169435 - DNA, 15 bp, Homo sapiens
tcttcatcaaaatca

SEQ ID NO: 1169436 - DNA, 15 bp, Homo sapiens
ctcttcatcaaaatc

SEQ ID NO: 1169437 - DNA, 15 bp, Homo sapiens
actcttcatcaaaat

SEQ ID NO: 1169438 - DNA, 15 bp, Homo sapiens
aactcttcatcaaaa

SEQ ID NO: 1169439 - DNA, 15 bp, Homo sapiens
gaactcttcatcaaa

SEQ ID NO: 1169440 - DNA, 15 bp, Homo sapiens
tgaactcttcatcaa

SEQ ID NO: 1169441 - DNA, 15 bp, Homo sapiens
atgaactcttcatca

SEQ ID NO: 1169442 - DNA, 15 bp, Homo sapiens
catgaactcttcatc

SEQ ID NO: 1169443 - DNA, 15 bp, Homo sapiens
gcatgaactcttcat

SEQ ID NO: 1169444 - DNA, 15 bp, Homo sapiens
tgcatgaactcttca

SEQ ID NO: 1169445 - DNA, 15 bp, Homo sapiens
ttgcatgaactcttc

SEQ ID NO: 1169446 - DNA, 15 bp, Homo sapiens
gttgcatgaactctt

SEQ ID NO: 1169447 - DNA, 15 bp, Homo sapiens
tgttgcatgaactct

SEQ ID NO: 1169448 - DNA, 15 bp, Homo sapiens
ttgttgcatgaactc

SEQ ID NO: 1169449 - DNA, 15 bp, Homo sapiens
tttgttgcatgaact

SEQ ID NO: 1169450 - DNA, 15 bp, Homo sapiens
ctttgttgcatgaac

SEQ ID NO: 1169451 - DNA, 15 bp, Homo sapiens
actttgttgcatgaa

SEQ ID NO: 1169452 - DNA, 15 bp, Homo sapiens
cactttgttgcatga

SEQ ID NO: 1169453 - DNA, 15 bp, Homo sapiens
tcactttgttgcatg

SEQ ID NO: 1169454 - DNA, 15 bp, Homo sapiens
atcactttgttgcat

SEQ ID NO: 1169455 - DNA, 15 bp, Homo sapiens
catcactttgttgca

SEQ ID NO: 1169456 - DNA, 15 bp, Homo sapiens
ccatcactttgttgc

SEQ ID NO: 1169457 - DNA, 15 bp, Homo sapiens
tccatcactttgttg

SEQ ID NO: 1169458 - DNA, 15 bp, Homo sapiens
ttccatcactttgtt

SEQ ID NO: 1169459 - DNA, 15 bp, Homo sapiens
tttccatcactttgt

SEQ ID NO: 1169460 - DNA, 15 bp, Homo sapiens
ttttccatcactttg

SEQ ID NO: 1169461 - DNA, 15 bp, Homo sapiens
attttccatcacttt

SEQ ID NO: 1169462 - DNA, 15 bp, Homo sapiens
cattttccatcactt

SEQ ID NO: 1169463 - DNA, 15 bp, Homo sapiens
gcattttccatcact

SEQ ID NO: 1169464 - DNA, 15 bp, Homo sapiens
agcattttccatcac

SEQ ID NO: 1169465 - DNA, 15 bp, Homo sapiens
cagcattttccatca

SEQ ID NO: 1169466 - DNA, 15 bp, Homo sapiens
gcagcattttccatc

SEQ ID NO: 1169467 - DNA, 15 bp, Homo sapiens
agcagcattttccat

SEQ ID NO: 1169468 - DNA, 15 bp, Homo sapiens
cagcagcattttcca

SEQ ID NO: 1169469 - DNA, 15 bp, Homo sapiens
ccagcagcattttcc

SEQ ID NO: 1169470 - DNA, 15 bp, Homo sapiens
cccagcagcattttc

SEQ ID NO: 1169471 - DNA, 15 bp, Homo sapiens
tcccagcagcatttt

SEQ ID NO: 1169472 - DNA, 15 bp, Homo sapiens
ctcccagcagcattt

SEQ ID NO: 1169473 - DNA, 15 bp, Homo sapiens
gctcccagcagcatt

SEQ ID NO: 1169474 - DNA, 15 bp, Homo sapiens
agctcccagcagcat

SEQ ID NO: 1169475 - DNA, 15 bp, Homo sapiens
aagctcccagcagca

SEQ ID NO: 1169476 - DNA, 15 bp, Homo sapiens
aaagctcccagcagc

SEQ ID NO: 1169477 - DNA, 15 bp, Homo sapiens
caaagctcccagcag

SEQ ID NO: 1169478 - DNA, 15 bp, Homo sapiens
tcaaagctcccagca

SEQ ID NO: 1169479 - DNA, 15 bp, Homo sapiens
ctcaaagctcccagc

SEQ ID NO: 1169480 - DNA, 15 bp, Homo sapiens
tctcaaagctcccag

SEQ ID NO: 1169481 - DNA, 15 bp, Homo sapiens
ctctcaaagctccca

SEQ ID NO: 1169482 - DNA, 15 bp, Homo sapiens
cctctcaaagctccc

SEQ ID NO: 1169483 - DNA, 15 bp, Homo sapiens
tcctctcaaagctcc

SEQ ID NO: 1169484 - DNA, 15 bp, Homo sapiens
ttcctctcaaagctc

SEQ ID NO: 1169485 - DNA, 15 bp, Homo sapiens
cttcctctcaaagct

SEQ ID NO: 1169486 - DNA, 15 bp, Homo sapiens
acttcctctcaaagc

SEQ ID NO: 1169487 - DNA, 15 bp, Homo sapiens
gacttcctctcaaag

SEQ ID NO: 1169488 - DNA, 15 bp, Homo sapiens
ggacttcctctcaaa

SEQ ID NO: 1169489 - DNA, 15 bp, Homo sapiens
gggacttcctctcaa

SEQ ID NO: 1169490 - DNA, 15 bp, Homo sapiens
agggacttcctctca

SEQ ID NO: 1169491 - DNA, 15 bp, Homo sapiens
gagggacttcctctc

SEQ ID NO: 1169492 - DNA, 15 bp, Homo sapiens
agagggacttcctct

SEQ ID NO: 1169493 - DNA, 15 bp, Homo sapiens
gagagggacttcctc

SEQ ID NO: 1169494 - DNA, 15 bp, Homo sapiens
tgagagggacttcct

SEQ ID NO: 1169495 - DNA, 15 bp, Homo sapiens
atgagagggacttcc

SEQ ID NO: 1169496 - DNA, 15 bp, Homo sapiens
gatgagagggacttc

SEQ ID NO: 1169497 - DNA, 15 bp, Homo sapiens
tgatgagagggactt

SEQ ID NO: 1169498 - DNA, 15 bp, Homo sapiens
atgatgagagggact

SEQ ID NO: 1169499 - DNA, 15 bp, Homo sapiens
gatgatgagagggac

SEQ ID NO: 1169500 - DNA, 15 bp, Homo sapiens
tgatgatgagaggga

SEQ ID NO: 1169501 - DNA, 15 bp, Homo sapiens
atgatgatgagaggg

SEQ ID NO: 1169502 - DNA, 15 bp, Homo sapiens
gatgatgatgagagg

SEQ ID NO: 1169503 - DNA, 15 bp, Homo sapiens
tgatgatgatgagag

SEQ ID NO: 1169504 - DNA, 15 bp, Homo sapiens
atgatgatgatgaga

SEQ ID NO: 1169505 - DNA, 15 bp, Homo sapiens
gatgatgatgatgag

SEQ ID NO: 1169506 - DNA, 15 bp, Homo sapiens
acatgatgatgatga

SEQ ID NO: 1169507 - DNA, 15 bp, Homo sapiens
aacatgatgatgatg

SEQ ID NO: 1169508 - DNA, 15 bp, Homo sapiens
caacatgatgatgat

SEQ ID NO: 1169509 - DNA, 15 bp, Homo sapiens
acaacatgatgatga

SEQ ID NO: 1169510 - DNA, 15 bp, Homo sapiens
aacaacatgatgatg

SEQ ID NO: 1169511 - DNA, 15 bp, Homo sapiens
caacaacatgatgat

SEQ ID NO: 1169512 - DNA, 15 bp, Homo sapiens
acaacaacatgatga

SEQ ID NO: 1169513 - DNA, 15 bp, Homo sapiens
aacaacaacatgatg

SEQ ID NO: 1169514 - DNA, 15 bp, Homo sapiens
taacaacaacatgat

SEQ ID NO: 1169515 - DNA, 15 bp, Homo sapiens
ataacaacaacatga

SEQ ID NO: 1169516 - DNA, 15 bp, Homo sapiens
aataacaacaacatg

SEQ ID NO: 1169517 - DNA, 15 bp, Homo sapiens
caataacaacaacat

SEQ ID NO: 1169518 - DNA, 15 bp, Homo sapiens
acaataacaacaaca

SEQ ID NO: 1169519 - DNA, 15 bp, Homo sapiens
gacaataacaacaac

SEQ ID NO: 1169520 - DNA, 15 bp, Homo sapiens
cgacaataacaacaa

SEQ ID NO: 1169521 - DNA, 15 bp, Homo sapiens
tcgacaataacaaca

SEQ ID NO: 1169522 - DNA, 15 bp, Homo sapiens
ttcgacaataacaac

SEQ ID NO: 1169523 - DNA, 15 bp, Homo sapiens
cttcgacaataacaa

SEQ ID NO: 1169524 - DNA, 15 bp, Homo sapiens
acttcgacaataaca

SEQ ID NO: 1169525 - DNA, 15 bp, Homo sapiens
cacttcgacaataac

SEQ ID NO: 1169526 - DNA, 15 bp, Homo sapiens
ccacttcgacaataa

SEQ ID NO: 1169527 - DNA, 15 bp, Homo sapiens
accacttcgacaata

SEQ ID NO: 1169528 - DNA, 15 bp, Homo sapiens
caccacttcgacaat

SEQ ID NO: 1169529 - DNA, 15 bp, Homo sapiens
ccaccacttcgacaa

SEQ ID NO: 1169530 - DNA, 15 bp, Homo sapiens
accaccacttcgaca

SEQ ID NO: 1169531 - DNA, 15 bp, Homo sapiens
taccaccacttcgac

SEQ ID NO: 1169532 - DNA, 15 bp, Homo sapiens
ataccaccacttcga

SEQ ID NO: 1169533 - DNA, 15 bp, Homo sapiens
tataccaccacttcg

SEQ ID NO: 1169534 - DNA, 15 bp, Homo sapiens
atataccaccacttc

SEQ ID NO: 1169535 - DNA, 15 bp, Homo sapiens
aatataccaccactt

SEQ ID NO: 1169536 - DNA, 15 bp, Homo sapiens
aaatataccaccact

SEQ ID NO: 1169537 - DNA, 15 bp, Homo sapiens
caaatataccaccac

SEQ ID NO: 1169538 - DNA, 15 bp, Homo sapiens
tcaaatataccacca

SEQ ID NO: 1169539 - DNA, 15 bp, Homo sapiens
ttcaaatataccacc

SEQ ID NO: 1169540 - DNA, 15 bp, Homo sapiens
attcaaatataccac

SEQ ID NO: 1169541 - DNA, 15 bp, Homo sapiens
cattcaaatatacca

SEQ ID NO: 1169542 - DNA, 15 bp, Homo sapiens
acattcaaatatacc

SEQ ID NO: 1169543 - DNA, 15 bp, Homo sapiens
tacattcaaatatac

SEQ ID NO: 1169544 - DNA, 15 bp, Homo sapiens
gtacattcaaatata

SEQ ID NO: 1169545 - DNA, 15 bp, Homo sapiens
tgtacattcaaatat

SEQ ID NO: 1169546 - DNA, 15 bp, Homo sapiens
atgtacattcaaata

SEQ ID NO: 1169547 - DNA, 15 bp, Homo sapiens
aatgtacattcaaat

SEQ ID NO: 1169548 - DNA, 15 bp, Homo sapiens
taatgtacattcaaa

SEQ ID NO: 1169549 - DNA, 15 bp, Homo sapiens
ttaatgtacattcaa

SEQ ID NO: 1169550 - DNA, 15 bp, Homo sapiens
tttaatgtacattca

SEQ ID NO: 1169551 - DNA, 15 bp, Homo sapiens
ttttaatgtacattc

SEQ ID NO: 1169552 - DNA, 15 bp, Homo sapiens
tttttaatgtacatt

SEQ ID NO: 1169553 - DNA, 15 bp, Homo sapiens
ttttttaatgtacat

SEQ ID NO: 1169554 - DNA, 15 bp, Homo sapiens
attttttaatgtaca

SEQ ID NO: 1169555 - DNA, 15 bp, Homo sapiens
gattttttaatgtac

SEQ ID NO: 1169556 - DNA, 15 bp, Homo sapiens
tgattttttaatgta

SEQ ID NO: 1169557 - DNA, 15 bp, Homo sapiens
ttgattttttaatgt

SEQ ID NO: 1169558 - DNA, 15 bp, Homo sapiens
attgattttttaatg

SEQ ID NO: 1169559 - DNA, 15 bp, Homo sapiens
cattgattttttaat

SEQ ID NO: 1169560 - DNA, 15 bp, Homo sapiens
acattgattttttaa

SEQ ID NO: 1169561 - DNA, 15 bp, Homo sapiens
aacattgatttttta

SEQ ID NO: 1169562 - DNA, 15 bp, Homo sapiens
aaacattgatttttt

SEQ ID NO: 1169563 - DNA, 15 bp, Homo sapiens
gaaacattgattttt

SEQ ID NO: 1169564 - DNA, 15 bp, Homo sapiens
tgaaacattgatttt

SEQ ID NO: 1169565 - DNA, 15 bp, Homo sapiens
atgaaacattgattt

SEQ ID NO: 1169566 - DNA, 15 bp, Homo sapiens
catgaaacattgatt

SEQ ID NO: 1169567 - DNA, 15 bp, Homo sapiens
ccatgaaacattgat

SEQ ID NO: 1169568 - DNA, 15 bp, Homo sapiens
accatgaaacattga

SEQ ID NO: 1169569 - DNA, 15 bp, Homo sapiens
caccatgaaacattg

SEQ ID NO: 1169570 - DNA, 15 bp, Homo sapiens
acaccatgaaacatt

SEQ ID NO: 1169571 - DNA, 15 bp, Homo sapiens
gacaccatgaaacat

SEQ ID NO: 1169572 - DNA, 15 bp, Homo sapiens
cgacaccatgaaaca

SEQ ID NO: 1169573 - DNA, 15 bp, Homo sapiens
ccgacaccatgaaac

SEQ ID NO: 1169574 - DNA, 15 bp, Homo sapiens
gccgacaccatgaaa

SEQ ID NO: 1169575 - DNA, 15 bp, Homo sapiens
agccgacaccatgaa

SEQ ID NO: 1169576 - DNA, 15 bp, Homo sapiens
cagccgacaccatga

SEQ ID NO: 1169577 - DNA, 15 bp, Homo sapiens
tcagccgacaccatg

SEQ ID NO: 1169578 - DNA, 15 bp, Homo sapiens
atcagccgacaccat

SEQ ID NO: 1169579 - DNA, 15 bp, Homo sapiens
tatcagccgacacca

SEQ ID NO: 1169580 - DNA, 15 bp, Homo sapiens
gtatcagccgacacc

SEQ ID NO: 1169581 - DNA, 15 bp, Homo sapiens
ggtatcagccgacac

SEQ ID NO: 1169582 - DNA, 15 bp, Homo sapiens
aggtatcagccgaca

SEQ ID NO: 1169583 - DNA, 15 bp, Homo sapiens
aaggtatcagccgac

SEQ ID NO: 1169584 - DNA, 15 bp, Homo sapiens
aaaggtatcagccga

SEQ ID NO: 1169585 - DNA, 15 bp, Homo sapiens
caaaggtatcagccg

SEQ ID NO: 1169586 - DNA, 15 bp, Homo sapiens
tcaaaggtatcagcc

SEQ ID NO: 1169587 - DNA, 15 bp, Homo sapiens
ttcaaaggtatcagc

SEQ ID NO: 1169588 - DNA, 15 bp, Homo sapiens
attcaaaggtatcag

SEQ ID NO: 1169589 - DNA, 15 bp, Homo sapiens
cattcaaaggtatca

SEQ ID NO: 1169590 - DNA, 15 bp, Homo sapiens
ccattcaaaggtatc

SEQ ID NO: 1169591 - DNA, 15 bp, Homo sapiens
accattcaaaggtat

SEQ ID NO: 1169592 - DNA, 15 bp, Homo sapiens
taccattcaaaggta

SEQ ID NO: 1169593 - DNA, 15 bp, Homo sapiens
ataccattcaaaggt

SEQ ID NO: 1169594 - DNA, 15 bp, Homo sapiens
aataccattcaaagg

SEQ ID NO: 1169595 - DNA, 15 bp, Homo sapiens
taataccattcaaag

SEQ ID NO: 1169596 - DNA, 15 bp, Homo sapiens
ttaataccattcaaa

SEQ ID NO: 1169597 - DNA, 15 bp, Homo sapiens
gttaataccattcaa

SEQ ID NO: 1169598 - DNA, 15 bp, Homo sapiens
ggttaataccattca

SEQ ID NO: 1169599 - DNA, 15 bp, Homo sapiens
tggttaataccattc

SEQ ID NO: 1169600 - DNA, 15 bp, Homo sapiens
atggttaataccatt

SEQ ID NO: 1169601 - DNA, 15 bp, Homo sapiens
gatggttaataccat

SEQ ID NO: 1169602 - DNA, 15 bp, Homo sapiens
agatggttaatacca

SEQ ID NO: 1169603 - DNA, 15 bp, Homo sapiens
cagatggttaatacc

SEQ ID NO: 1169604 - DNA, 15 bp, Homo sapiens
gcagatggttaatac

SEQ ID NO: 1169605 - DNA, 15 bp, Homo sapiens
tgcagatggttaata

SEQ ID NO: 1169606 - DNA, 15 bp, Homo sapiens
ctgcagatggttaat

SEQ ID NO: 1169607 - DNA, 15 bp, Homo sapiens
tctgcagatggttaa

SEQ ID NO: 1169608 - DNA, 15 bp, Homo sapiens
atctgcagatggtta

SEQ ID NO: 1169609 - DNA, 15 bp, Homo sapiens
gatctgcagatggtt

SEQ ID NO: 1169610 - DNA, 15 bp, Homo sapiens
agatctgcagatggt

SEQ ID NO: 1169611 - DNA, 15 bp, Homo sapiens
gagatctgcagatgg

SEQ ID NO: 1169612 - DNA, 15 bp, Homo sapiens
tgagatctgcagatg

SEQ ID NO: 1169613 - DNA, 15 bp, Homo sapiens
ttgagatctgcagat

SEQ ID NO: 1169614 - DNA, 15 bp, Homo sapiens
attgagatctgcaga

SEQ ID NO: 1169615 - DNA, 15 bp, Homo sapiens
aattgagatctgcag

SEQ ID NO: 1169616 - DNA, 15 bp, Homo sapiens
gaattgagatctgca

SEQ ID NO: 1169617 - DNA, 15 bp, Homo sapiens
ggaattgagatctgc

SEQ ID NO: 1169618 - DNA, 15 bp, Homo sapiens
aggaattgagatctg

SEQ ID NO: 1169619 - DNA, 15 bp, Homo sapiens
gaggaattgagatct

SEQ ID NO: 1169620 - DNA, 15 bp, Homo sapiens
ggaggaattgagatc

SEQ ID NO: 1169621 - DNA, 15 bp, Homo sapiens
aggaggaattgagat

SEQ ID NO: 1169622 - DNA, 15 bp, Homo sapiens
taggaggaattgaga

SEQ ID NO: 1169623 - DNA, 15 bp, Homo sapiens
ataggaggaattgag

SEQ ID NO: 1169624 - DNA, 15 bp, Homo sapiens
aataggaggaattga

SEQ ID NO: 1169625 - DNA, 15 bp, Homo sapiens
aaataggaggaattg

SEQ ID NO: 1169626 - DNA, 15 bp, Homo sapiens
aaaataggaggaatt

SEQ ID NO: 1169627 - DNA, 15 bp, Homo sapiens
caaaataggaggaat

SEQ ID NO: 1169628 - DNA, 15 bp, Homo sapiens
tcaaaataggaggaa

SEQ ID NO: 1169629 - DNA, 15 bp, Homo sapiens
gtcaaaataggagga

SEQ ID NO: 1169630 - DNA, 15 bp, Homo sapiens
tgtcaaaataggagg

SEQ ID NO: 1169631 - DNA, 15 bp, Homo sapiens
ttgtcaaaataggag

SEQ ID NO: 1169632 - DNA, 15 bp, Homo sapiens
attgtcaaaatagga

SEQ ID NO: 1169633 - DNA, 15 bp, Homo sapiens
aattgtcaaaatagg

SEQ ID NO: 1169634 - DNA, 15 bp, Homo sapiens
gaattgtcaaaatag

SEQ ID NO: 1169635 - DNA, 15 bp, Homo sapiens
tgaattgtcaaaata

SEQ ID NO: 1169636 - DNA, 15 bp, Homo sapiens
ttgaattgtcaaaat

SEQ ID NO: 1169637 - DNA, 15 bp, Homo sapiens
attgaattgtcaaaa

SEQ ID NO: 1169638 - DNA, 15 bp, Homo sapiens
gattgaattgtcaaa

SEQ ID NO: 1169639 - DNA, 15 bp, Homo sapiens
tgattgaattgtcaa

SEQ ID NO: 1169640 - DNA, 15 bp, Homo sapiens
atgattgaattgtca

SEQ ID NO: 1169641 - DNA, 15 bp, Homo sapiens
aatgattgaattgtc

SEQ ID NO: 1169642 - DNA, 15 bp, Homo sapiens
aaatgattgaattgt

SEQ ID NO: 1169643 - DNA, 15 bp, Homo sapiens
taaatgattgaattg

SEQ ID NO: 1169644 - DNA, 15 bp, Homo sapiens
ttaaatgattgaatt

SEQ ID NO: 1169645 - DNA, 15 bp, Homo sapiens
tttaaatgattgaat

SEQ ID NO: 1169646 - DNA, 15 bp, Homo sapiens
gtttaaatgattgaa

SEQ ID NO: 1169647 - DNA, 15 bp, Homo sapiens
ggtttaaatgattga

SEQ ID NO: 1169648 - DNA, 15 bp, Homo sapiens
tggtttaaatgattg

SEQ ID NO: 1169649 - DNA, 15 bp, Homo sapiens
atggtttaaatgatt

SEQ ID NO: 1169650 - DNA, 15 bp, Homo sapiens
aatggtttaaatgat

SEQ ID NO: 1169651 - DNA, 15 bp, Homo sapiens
caatggtttaaatga

SEQ ID NO: 1169652 - DNA, 15 bp, Homo sapiens
tcaatggtttaaatg

SEQ ID NO: 1169653 - DNA, 15 bp, Homo sapiens
ctcaatggtttaaat

SEQ ID NO: 1169654 - DNA, 15 bp, Homo sapiens
cctcaatggtttaaa

SEQ ID NO: 1169655 - DNA, 15 bp, Homo sapiens
gcctcaatggtttaa

SEQ ID NO: 1169656 - DNA, 15 bp, Homo sapiens
ggcctcaatggttta

SEQ ID NO: 1169657 - DNA, 15 bp, Homo sapiens
gggcctcaatggttt

SEQ ID NO: 1169658 - DNA, 15 bp, Homo sapiens
tgggcctcaatggtt

SEQ ID NO: 1169659 - DNA, 15 bp, Homo sapiens
ttgggcctcaatggt

SEQ ID NO: 1169660 - DNA, 15 bp, Homo sapiens
tttgggcctcaatgg

SEQ ID NO: 1169661 - DNA, 15 bp, Homo sapiens
gtttgggcctcaatg

SEQ ID NO: 1169662 - DNA, 15 bp, Homo sapiens
tgtttgggcctcaat

SEQ ID NO: 1169663 - DNA, 15 bp, Homo sapiens
ttgtttgggcctcaa

SEQ ID NO: 1169664 - DNA, 15 bp, Homo sapiens
tttgtttgggcctca

SEQ ID NO: 1169665 - DNA, 15 bp, Homo sapiens
ctttgtttgggcctc

SEQ ID NO: 1169666 - DNA, 15 bp, Homo sapiens
tctttgtttgggcct

SEQ ID NO: 1169667 - DNA, 15 bp, Homo sapiens
ttctttgtttgggcc

SEQ ID NO: 1169668 - DNA, 15 bp, Homo sapiens
cttctttgtttgggc

SEQ ID NO: 1169669 - DNA, 15 bp, Homo sapiens
gcttctttgtttggg

SEQ ID NO: 1169670 - DNA, 15 bp, Homo sapiens
tgcttctttgtttgg

SEQ ID NO: 1169671 - DNA, 15 bp, Homo sapiens
ttgcttctttgtttg

SEQ ID NO: 1169672 - DNA, 15 bp, Homo sapiens
gttgcttctttgttt

SEQ ID NO: 1169673 - DNA, 15 bp, Homo sapiens
tgttgcttctttgtt

SEQ ID NO: 1169674 - DNA, 15 bp, Homo sapiens
ctgttgcttctttgt

SEQ ID NO: 1169675 - DNA, 15 bp, Homo sapiens
cctgttgcttctttg

SEQ ID NO: 1169676 - DNA, 15 bp, Homo sapiens
tcctgttgcttcttt

SEQ ID NO: 1169677 - DNA, 15 bp, Homo sapiens
ttcctgttgcttctt

SEQ ID NO: 1169678 - DNA, 15 bp, Homo sapiens
cttcctgttgcttct

SEQ ID NO: 1169679 - DNA, 15 bp, Homo sapiens
acttcctgttgcttc

SEQ ID NO: 1169680 - DNA, 15 bp, Homo sapiens
gacttcctgttgctt

SEQ ID NO: 1169681 - DNA, 15 bp, Homo sapiens
ggacttcctgttgct

SEQ ID NO: 1169682 - DNA, 15 bp, Homo sapiens
gggacttcctgttgc

SEQ ID NO: 1169683 - DNA, 15 bp, Homo sapiens
ggggacttcctgttg

SEQ ID NO: 1169684 - DNA, 15 bp, Homo sapiens
gggggacttcctgtt

SEQ ID NO: 1169685 - DNA, 15 bp, Homo sapiens
tgggggacttcctgt

SEQ ID NO: 1169686 - DNA, 15 bp, Homo sapiens
atgggggacttcctg

SEQ ID NO: 1169687 - DNA, 15 bp, Homo sapiens
gatgggggacttcct

SEQ ID NO: 1169688 - DNA, 15 bp, Homo sapiens
tgatgggggacttcc

SEQ ID NO: 1169689 - DNA, 15 bp, Homo sapiens
atgatgggggacttc

SEQ ID NO: 1169690 - DNA, 15 bp, Homo sapiens
aatgatgggggactt

SEQ ID NO: 1169691 - DNA, 15 bp, Homo sapiens
aaatgatgggggact

SEQ ID NO: 1169692 - DNA, 15 bp, Homo sapiens
gaaatgatgggggac

SEQ ID NO: 1169693 - DNA, 15 bp, Homo sapiens
agaaatgatggggga

SEQ ID NO: 1169694 - DNA, 15 bp, Homo sapiens
aagaaatgatggggg

SEQ ID NO: 1169695 - DNA, 15 bp, Homo sapiens
aaagaaatgatgggg

SEQ ID NO: 1169696 - DNA, 15 bp, Homo sapiens
aaaagaaatgatggg

SEQ ID NO: 1169697 - DNA, 15 bp, Homo sapiens
aaaaagaaatgatgg

SEQ ID NO: 1169698 - DNA, 15 bp, Homo sapiens
gaaaaagaaatgatg

SEQ ID NO: 1169699 - DNA, 15 bp, Homo sapiens
agaaaaagaaatgat

SEQ ID NO: 1169700 - DNA, 15 bp, Homo sapiens
aagaaaaagaaatga

SEQ ID NO: 1169701 - DNA, 15 bp, Homo sapiens
aaagaaaaagaaatg

SEQ ID NO: 1169702 - DNA, 15 bp, Homo sapiens
caaagaaaaagaaat

SEQ ID NO: 1169703 - DNA, 15 bp, Homo sapiens
ccaaagaaaaagaaa

SEQ ID NO: 1169704 - DNA, 15 bp, Homo sapiens
tccaaagaaaaagaa

SEQ ID NO: 1169705 - DNA, 15 bp, Homo sapiens
atccaaagaaaaaga

SEQ ID NO: 1169706 - DNA, 15 bp, Homo sapiens
aatccaaagaaaaag

SEQ ID NO: 1169707 - DNA, 15 bp, Homo sapiens
caatccaaagaaaaa

SEQ ID NO: 1169708 - DNA, 15 bp, Homo sapiens
ccaatccaaagaaaa

SEQ ID NO: 1169709 - DNA, 15 bp, Homo sapiens
cccaatccaaagaaa

SEQ ID NO: 1169710 - DNA, 15 bp, Homo sapiens
acccaatccaaagaa

SEQ ID NO: 1169711 - DNA, 15 bp, Homo sapiens
gacccaatccaaaga

SEQ ID NO: 1169712 - DNA, 15 bp, Homo sapiens
agacccaatccaaag

SEQ ID NO: 1169713 - DNA, 15 bp, Homo sapiens
gagacccaatccaaa

SEQ ID NO: 1169714 - DNA, 15 bp, Homo sapiens
cgagacccaatccaa

SEQ ID NO: 1169715 - DNA, 15 bp, Homo sapiens
gcgagacccaatcca

SEQ ID NO: 1169716 - DNA, 15 bp, Homo sapiens
agcgagacccaatcc

SEQ ID NO: 1169717 - DNA, 15 bp, Homo sapiens
gagcgagacccaatc

SEQ ID NO: 1169718 - DNA, 15 bp, Homo sapiens
agagcgagacccaat

SEQ ID NO: 1169719 - DNA, 15 bp, Homo sapiens
tagagcgagacccaa

SEQ ID NO: 1169720 - DNA, 15 bp, Homo sapiens
atagagcgagaccca

SEQ ID NO: 1169721 - DNA, 15 bp, Homo sapiens
gatagagcgagaccc

SEQ ID NO: 1169722 - DNA, 15 bp, Homo sapiens
tgatagagcgagacc

SEQ ID NO: 1169723 - DNA, 15 bp, Homo sapiens
gtgatagagcgagac

SEQ ID NO: 1169724 - DNA, 15 bp, Homo sapiens
ggtgatagagcgaga

SEQ ID NO: 1169725 - DNA, 15 bp, Homo sapiens
gggtgatagagcgag

SEQ ID NO: 1169726 - DNA, 15 bp, Homo sapiens
tgggtgatagagcga

SEQ ID NO: 1169727 - DNA, 15 bp, Homo sapiens
ctgggtgatagagcg

SEQ ID NO: 1169728 - DNA, 15 bp, Homo sapiens
cctgggtgatagagc

SEQ ID NO: 1169729 - DNA, 15 bp, Homo sapiens
tcctgggtgatagag

SEQ ID NO: 1169730 - DNA, 15 bp, Homo sapiens
atcctgggtgataga

SEQ ID NO: 1169731 - DNA, 15 bp, Homo sapiens
catcctgggtgatag

SEQ ID NO: 1169732 - DNA, 15 bp, Homo sapiens
ccatcctgggtgata

SEQ ID NO: 1169733 - DNA, 15 bp, Homo sapiens
tccatcctgggtgat

SEQ ID NO: 1169734 - DNA, 15 bp, Homo sapiens
ctccatcctgggtga

SEQ ID NO: 1169735 - DNA, 15 bp, Homo sapiens
actccatcctgggtg

SEQ ID NO: 1169736 - DNA, 15 bp, Homo sapiens
cactccatcctgggt

SEQ ID NO: 1169737 - DNA, 15 bp, Homo sapiens
gcactccatcctggg

SEQ ID NO: 1169738 - DNA, 15 bp, Homo sapiens
tgcactccatcctgg

SEQ ID NO: 1169739 - DNA, 15 bp, Homo sapiens
ctgcactccatcctg

SEQ ID NO: 1169740 - DNA, 15 bp, Homo sapiens
actgcactccatcct

SEQ ID NO: 1169741 - DNA, 15 bp, Homo sapiens
cactgcactccatcc

SEQ ID NO: 1169742 - DNA, 15 bp, Homo sapiens
tcactgcactccatc

SEQ ID NO: 1169743 - DNA, 15 bp, Homo sapiens
gtcactgcactccat

SEQ ID NO: 1169744 - DNA, 15 bp, Homo sapiens
atgtcactgcactcc

SEQ ID NO: 1169745 - DNA, 15 bp, Homo sapiens
catgtcactgcactc

SEQ ID NO: 1169746 - DNA, 15 bp, Homo sapiens
tgatcatgtcactgc

SEQ ID NO: 1169747 - DNA, 15 bp, Homo sapiens
gtgatcatgtcactg

SEQ ID NO: 1169748 - DNA, 15 bp, Homo sapiens
tgtgatcatgtcact

SEQ ID NO: 1169749 - DNA, 15 bp, Homo sapiens
ctgtgatcatgtcac

SEQ ID NO: 1169750 - DNA, 15 bp, Homo sapiens
gctgtgatcatgtca

SEQ ID NO: 1169751 - DNA, 15 bp, Homo sapiens
agctgtgatcatgtc

SEQ ID NO: 1169752 - DNA, 15 bp, Homo sapiens
gagctgtgatcatgt

SEQ ID NO: 1169753 - DNA, 15 bp, Homo sapiens
atgcagtgagctgtg

SEQ ID NO: 1169754 - DNA, 15 bp, Homo sapiens
gatgcagtgagctgt

SEQ ID NO: 1169755 - DNA, 15 bp, Homo sapiens
ggatgcagtgagctg

SEQ ID NO: 1169756 - DNA, 15 bp, Homo sapiens
aggatgcagtgagct

SEQ ID NO: 1169757 - DNA, 15 bp, Homo sapiens
gaggatgcagtgagc

SEQ ID NO: 1169758 - DNA, 15 bp, Homo sapiens
tgaggatgcagtgag

SEQ ID NO: 1169759 - DNA, 15 bp, Homo sapiens
ttgaggatgcagtga

SEQ ID NO: 1169760 - DNA, 15 bp, Homo sapiens
gttgaggatgcagtg

SEQ ID NO: 1169761 - DNA, 15 bp, Homo sapiens
ggttgaggatgcagt

SEQ ID NO: 1169762 - DNA, 15 bp, Homo sapiens
aggttgaggatgcag

SEQ ID NO: 1169763 - DNA, 15 bp, Homo sapiens
gaggttgaggatgca

SEQ ID NO: 1169764 - DNA, 15 bp, Homo sapiens
agaggttgaggatgc

SEQ ID NO: 1169765 - DNA, 15 bp, Homo sapiens
gagaggttgaggatg

SEQ ID NO: 1169766 - DNA, 15 bp, Homo sapiens
tgagaggttgaggat

SEQ ID NO: 1169767 - DNA, 15 bp, Homo sapiens
ctgagaggttgagga

SEQ ID NO: 1169768 - DNA, 15 bp, Homo sapiens
cctgagaggttgagg

SEQ ID NO: 1169769 - DNA, 15 bp, Homo sapiens
gcctgagaggttgag

SEQ ID NO: 1169770 - DNA, 15 bp, Homo sapiens
agcctgagaggttga

SEQ ID NO: 1169771 - DNA, 15 bp, Homo sapiens
gagcctgagaggttg

SEQ ID NO: 1169772 - DNA, 15 bp, Homo sapiens
tgagcctgagaggtt

SEQ ID NO: 1169773 - DNA, 15 bp, Homo sapiens
ttgagcctgagaggt

SEQ ID NO: 1169774 - DNA, 15 bp, Homo sapiens
cttgagcctgagagg

SEQ ID NO: 1169775 - DNA, 15 bp, Homo sapiens
gcttgagcctgagag

SEQ ID NO: 1169776 - DNA, 15 bp, Homo sapiens
tgcttgagcctgaga

SEQ ID NO: 1169777 - DNA, 15 bp, Homo sapiens
ttgcttgagcctgag

SEQ ID NO: 1169778 - DNA, 15 bp, Homo sapiens
attgcttgagcctga

SEQ ID NO: 1169779 - DNA, 15 bp, Homo sapiens
gattgcttgagcctg

SEQ ID NO: 1169780 - DNA, 15 bp, Homo sapiens
ggggaggctgaggtg

SEQ ID NO: 1169781 - DNA, 15 bp, Homo sapiens
tggggaggctgaggt

SEQ ID NO: 1169782 - DNA, 15 bp, Homo sapiens
gtggggaggctgagg

SEQ ID NO: 1169783 - DNA, 15 bp, Homo sapiens
ggtggggaggctgag

SEQ ID NO: 1169784 - DNA, 15 bp, Homo sapiens
tggtggggaggctga

SEQ ID NO: 1169785 - DNA, 15 bp, Homo sapiens
gtggtggggaggctg

SEQ ID NO: 1169786 - DNA, 15 bp, Homo sapiens
tgtggtggggaggct

SEQ ID NO: 1169787 - DNA, 15 bp, Homo sapiens
gtgtggtggggaggc

SEQ ID NO: 1169788 - DNA, 15 bp, Homo sapiens
ggtgtggtggggagg

SEQ ID NO: 1169789 - DNA, 15 bp, Homo sapiens
gggtgtggtggggag

SEQ ID NO: 1169790 - DNA, 15 bp, Homo sapiens
tgggtgtggtgggga

SEQ ID NO: 1169791 - DNA, 15 bp, Homo sapiens
ctgggtgtggtgggg

SEQ ID NO: 1169792 - DNA, 15 bp, Homo sapiens
gctgggtgtggtggg

SEQ ID NO: 1169793 - DNA, 15 bp, Homo sapiens
aaccctgtctctaca

SEQ ID NO: 1169794 - DNA, 15 bp, Homo sapiens
agaccaacatggtga

SEQ ID NO: 1169795 - DNA, 15 bp, Homo sapiens
gagaccaacatggtg

SEQ ID NO: 1169796 - DNA, 15 bp, Homo sapiens
tgagaccaacatggt

SEQ ID NO: 1169797 - DNA, 15 bp, Homo sapiens
ttgagaccaacatgg

SEQ ID NO: 1169798 - DNA, 15 bp, Homo sapiens
tttgagaccaacatg

SEQ ID NO: 1169799 - DNA, 15 bp, Homo sapiens
gtttgagaccaacat

SEQ ID NO: 1169800 - DNA, 15 bp, Homo sapiens
agtttgagaccaaca

SEQ ID NO: 1169801 - DNA, 15 bp, Homo sapiens
gagtttgagaccaac

SEQ ID NO: 1169802 - DNA, 15 bp, Homo sapiens
ggagtttgagaccaa

SEQ ID NO: 1169803 - DNA, 15 bp, Homo sapiens
tggatcacttgagcc

SEQ ID NO: 1169804 - DNA, 15 bp, Homo sapiens
gtggatcacttgagc

SEQ ID NO: 1169805 - DNA, 15 bp, Homo sapiens
tgggtggatcacttg

SEQ ID NO: 1169806 - DNA, 15 bp, Homo sapiens
gtgggtggatcactt

SEQ ID NO: 1169807 - DNA, 15 bp, Homo sapiens
ggtgggtggatcact

SEQ ID NO: 1169808 - DNA, 15 bp, Homo sapiens
tgctgaggtgggtgg

SEQ ID NO: 1169809 - DNA, 15 bp, Homo sapiens
atgctgaggtgggtg

SEQ ID NO: 1169810 - DNA, 15 bp, Homo sapiens
gatgctgaggtgggt

SEQ ID NO: 1169811 - DNA, 15 bp, Homo sapiens
ggatgctgaggtggg

SEQ ID NO: 1169812 - DNA, 15 bp, Homo sapiens
gggatgctgaggtgg

SEQ ID NO: 1169813 - DNA, 15 bp, Homo sapiens
tgggatgctgaggtg

SEQ ID NO: 1169814 - DNA, 15 bp, Homo sapiens
ttgggatgctgaggt

SEQ ID NO: 1169815 - DNA, 15 bp, Homo sapiens
tttgggatgctgagg

SEQ ID NO: 1169816 - DNA, 15 bp, Homo sapiens
ctttgggatgctgag

SEQ ID NO: 1169817 - DNA, 15 bp, Homo sapiens
actttgggatgctga

SEQ ID NO: 1169818 - DNA, 15 bp, Homo sapiens
cactttgggatgctg

SEQ ID NO: 1169819 - DNA, 15 bp, Homo sapiens
gcactttgggatgct

SEQ ID NO: 1169820 - DNA, 15 bp, Homo sapiens
agcactttgggatgc

SEQ ID NO: 1169821 - DNA, 15 bp, Homo sapiens
cagcactttgggatg

SEQ ID NO: 1169822 - DNA, 15 bp, Homo sapiens
acagcactttgggat

SEQ ID NO: 1169823 - DNA, 15 bp, Homo sapiens
cacagcactttggga

SEQ ID NO: 1169824 - DNA, 15 bp, Homo sapiens
tcacagcactttggg

SEQ ID NO: 1169825 - DNA, 15 bp, Homo sapiens
atcacagcactttgg

SEQ ID NO: 1169826 - DNA, 15 bp, Homo sapiens
aatcacagcactttg

SEQ ID NO: 1169827 - DNA, 15 bp, Homo sapiens
taatcacagcacttt

SEQ ID NO: 1169828 - DNA, 15 bp, Homo sapiens
gtaatcacagcactt

SEQ ID NO: 1169829 - DNA, 15 bp, Homo sapiens
tgtaatcacagcact

SEQ ID NO: 1169830 - DNA, 15 bp, Homo sapiens
ttgtaatcacagcac

SEQ ID NO: 1169831 - DNA, 15 bp, Homo sapiens
cttgtaatcacagca

SEQ ID NO: 1169832 - DNA, 15 bp, Homo sapiens
ccttgtaatcacagc

SEQ ID NO: 1169833 - DNA, 15 bp, Homo sapiens
cccttgtaatcacag

SEQ ID NO: 1169834 - DNA, 15 bp, Homo sapiens
acccttgtaatcaca

SEQ ID NO: 1169835 - DNA, 15 bp, Homo sapiens
cacccttgtaatcac

SEQ ID NO: 1169836 - DNA, 15 bp, Homo sapiens
tcacccttgtaatca

SEQ ID NO: 1169837 - DNA, 15 bp, Homo sapiens
ttcacccttgtaatc

SEQ ID NO: 1169838 - DNA, 15 bp, Homo sapiens
gttcacccttgtaat

SEQ ID NO: 1169839 - DNA, 15 bp, Homo sapiens
ggttcacccttgtaa

SEQ ID NO: 1169840 - DNA, 15 bp, Homo sapiens
tggttcacccttgta

SEQ ID NO: 1169841 - DNA, 15 bp, Homo sapiens
gtggttcacccttgt

SEQ ID NO: 1169842 - DNA, 15 bp, Homo sapiens
ggtggttcacccttg

SEQ ID NO: 1169843 - DNA, 15 bp, Homo sapiens
aggtggttcaccctt

SEQ ID NO: 1169844 - DNA, 15 bp, Homo sapiens
gaggtggttcaccct

SEQ ID NO: 1169845 - DNA, 15 bp, Homo sapiens
cgaggtggttcaccc

SEQ ID NO: 1169846 - DNA, 15 bp, Homo sapiens
acgaggtggttcacc

SEQ ID NO: 1169847 - DNA, 15 bp, Homo sapiens
gacgaggtggttcac

SEQ ID NO: 1169848 - DNA, 15 bp, Homo sapiens
agacgaggtggttca

SEQ ID NO: 1169849 - DNA, 15 bp, Homo sapiens
cagacgaggtggttc

SEQ ID NO: 1169850 - DNA, 15 bp, Homo sapiens
tcagacgaggtggtt

SEQ ID NO: 1169851 - DNA, 15 bp, Homo sapiens
gtcagacgaggtggt

SEQ ID NO: 1169852 - DNA, 15 bp, Homo sapiens
ggtcagacgaggtgg

SEQ ID NO: 1169853 - DNA, 15 bp, Homo sapiens
aggtcagacgaggtg

SEQ ID NO: 1169854 - DNA, 15 bp, Homo sapiens
gaggtcagacgaggt

SEQ ID NO: 1169855 - DNA, 15 bp, Homo sapiens
ggaggtcagacgagg

SEQ ID NO: 1169856 - DNA, 15 bp, Homo sapiens
tggaggtcagacgag

SEQ ID NO: 1169857 - DNA, 15 bp, Homo sapiens
atggaggtcagacga

SEQ ID NO: 1169858 - DNA, 15 bp, Homo sapiens
aatggaggtcagacg

SEQ ID NO: 1169859 - DNA, 15 bp, Homo sapiens
aaatggaggtcagac

SEQ ID NO: 1169860 - DNA, 15 bp, Homo sapiens
aaaatggaggtcaga

SEQ ID NO: 1169861 - DNA, 15 bp, Homo sapiens
aaaaatggaggtcag

SEQ ID NO: 1169862 - DNA, 15 bp, Homo sapiens
aaaaaatggaggtca

SEQ ID NO: 1169863 - DNA, 15 bp, Homo sapiens
taaaaaatggaggtc

SEQ ID NO: 1169864 - DNA, 15 bp, Homo sapiens
gtaaaaaatggaggt

SEQ ID NO: 1169865 - DNA, 15 bp, Homo sapiens
agtaaaaaatggagg

SEQ ID NO: 1169866 - DNA, 15 bp, Homo sapiens
cagtaaaaaatggag

SEQ ID NO: 1169867 - DNA, 15 bp, Homo sapiens
gcagtaaaaaatgga

SEQ ID NO: 1169868 - DNA, 15 bp, Homo sapiens
tgcagtaaaaaatgg

SEQ ID NO: 1169869 - DNA, 15 bp, Homo sapiens
atgcagtaaaaaatg

SEQ ID NO: 1169870 - DNA, 15 bp, Homo sapiens
aatgcagtaaaaaat

SEQ ID NO: 1169871 - DNA, 15 bp, Homo sapiens
gaatgcagtaaaaaa

SEQ ID NO: 1169872 - DNA, 15 bp, Homo sapiens
tgaatgcagtaaaaa

SEQ ID NO: 1169873 - DNA, 15 bp, Homo sapiens
ttgaatgcagtaaaa

SEQ ID NO: 1169874 - DNA, 15 bp, Homo sapiens
attgaatgcagtaaa

SEQ ID NO: 1169875 - DNA, 15 bp, Homo sapiens
aattgaatgcagtaa

SEQ ID NO: 1169876 - DNA, 15 bp, Homo sapiens
aaattgaatgcagta

SEQ ID NO: 1169877 - DNA, 15 bp, Homo sapiens
aaaattgaatgcagt

SEQ ID NO: 1169878 - DNA, 15 bp, Homo sapiens
aaaaattgaatgcag

SEQ ID NO: 1169879 - DNA, 15 bp, Homo sapiens
gaaaaattgaatgca

SEQ ID NO: 1169880 - DNA, 15 bp, Homo sapiens
agaaaaattgaatgc

SEQ ID NO: 1169881 - DNA, 15 bp, Homo sapiens
aagaaaaattgaatg

SEQ ID NO: 1169882 - DNA, 15 bp, Homo sapiens
taagaaaaattgaat

SEQ ID NO: 1169883 - DNA, 15 bp, Homo sapiens
gtaagaaaaattgaa

SEQ ID NO: 1169884 - DNA, 15 bp, Homo sapiens
tgtaagaaaaattga

SEQ ID NO: 1169885 - DNA, 15 bp, Homo sapiens
atgtaagaaaaattg

SEQ ID NO: 1169886 - DNA, 15 bp, Homo sapiens
aatgtaagaaaaatt

SEQ ID NO: 1169887 - DNA, 15 bp, Homo sapiens
aaatgtaagaaaaat

SEQ ID NO: 1169888 - DNA, 15 bp, Homo sapiens
gaaatgtaagaaaaa

SEQ ID NO: 1169889 - DNA, 15 bp, Homo sapiens
agaaatgtaagaaaa

SEQ ID NO: 1169890 - DNA, 15 bp, Homo sapiens
cagaaatgtaagaaa

SEQ ID NO: 1169891 - DNA, 15 bp, Homo sapiens
acagaaatgtaagaa

SEQ ID NO: 1169892 - DNA, 15 bp, Homo sapiens
gacagaaatgtaaga

SEQ ID NO: 1169893 - DNA, 15 bp, Homo sapiens
tgacagaaatgtaag

SEQ ID NO: 1169894 - DNA, 15 bp, Homo sapiens
ctgacagaaatgtaa

SEQ ID NO: 1169895 - DNA, 15 bp, Homo sapiens
cctgacagaaatgta

SEQ ID NO: 1169896 - DNA, 15 bp, Homo sapiens
gcctgacagaaatgt

SEQ ID NO: 1169897 - DNA, 15 bp, Homo sapiens
tgcctgacagaaatg

SEQ ID NO: 1169898 - DNA, 15 bp, Homo sapiens
ctgcctgacagaaat

SEQ ID NO: 1169899 - DNA, 15 bp, Homo sapiens
cctgcctgacagaaa

SEQ ID NO: 1169900 - DNA, 15 bp, Homo sapiens
tcctgcctgacagaa

SEQ ID NO: 1169901 - DNA, 15 bp, Homo sapiens
ttcctgcctgacaga

SEQ ID NO: 1169902 - DNA, 15 bp, Homo sapiens
gttcctgcctgacag

SEQ ID NO: 1169903 - DNA, 15 bp, Homo sapiens
tgttcctgcctgaca

SEQ ID NO: 1169904 - DNA, 15 bp, Homo sapiens
ttgttcctgcctgac

SEQ ID NO: 1169905 - DNA, 15 bp, Homo sapiens
cttgttcctgcctga

SEQ ID NO: 1169906 - DNA, 15 bp, Homo sapiens
acttgttcctgcctg

SEQ ID NO: 1169907 - DNA, 15 bp, Homo sapiens
tacttgttcctgcct

SEQ ID NO: 1169908 - DNA, 15 bp, Homo sapiens
gtacttgttcctgcc

SEQ ID NO: 1169909 - DNA, 15 bp, Homo sapiens
tgtacttgttcctgc

SEQ ID NO: 1169910 - DNA, 15 bp, Homo sapiens
gtgtacttgttcctg

SEQ ID NO: 1169911 - DNA, 15 bp, Homo sapiens
agtgtacttgttcct

SEQ ID NO: 1169912 - DNA, 15 bp, Homo sapiens
aagtgtacttgttcc

SEQ ID NO: 1169913 - DNA, 15 bp, Homo sapiens
aaagtgtacttgttc

SEQ ID NO: 1169914 - DNA, 15 bp, Homo sapiens
gaaagtgtacttgtt

SEQ ID NO: 1169915 - DNA, 15 bp, Homo sapiens
tgaaagtgtacttgt

SEQ ID NO: 1169916 - DNA, 15 bp, Homo sapiens
atgaaagtgtacttg

SEQ ID NO: 1169917 - DNA, 15 bp, Homo sapiens
aatgaaagtgtactt

SEQ ID NO: 1169918 - DNA, 15 bp, Homo sapiens
taatgaaagtgtact

SEQ ID NO: 1169919 - DNA, 15 bp, Homo sapiens
ttaatgaaagtgtac

SEQ ID NO: 1169920 - DNA, 15 bp, Homo sapiens
gttaatgaaagtgta

SEQ ID NO: 1169921 - DNA, 15 bp, Homo sapiens
tgttaatgaaagtgt

SEQ ID NO: 1169922 - DNA, 15 bp, Homo sapiens
ttgttaatgaaagtg

SEQ ID NO: 1169923 - DNA, 15 bp, Homo sapiens
cttgttaatgaaagt

SEQ ID NO: 1169924 - DNA, 15 bp, Homo sapiens
acttgttaatgaaag

SEQ ID NO: 1169925 - DNA, 15 bp, Homo sapiens
aacttgttaatgaaa

SEQ ID NO: 1169926 - DNA, 15 bp, Homo sapiens
gaacttgttaatgaa

SEQ ID NO: 1169927 - DNA, 15 bp, Homo sapiens
ggaacttgttaatga

SEQ ID NO: 1169928 - DNA, 15 bp, Homo sapiens
gggaacttgttaatg

SEQ ID NO: 1169929 - DNA, 15 bp, Homo sapiens
tgggaacttgttaat

SEQ ID NO: 1169930 - DNA, 15 bp, Homo sapiens
atgggaacttgttaa

SEQ ID NO: 1169931 - DNA, 15 bp, Homo sapiens
tatgggaacttgtta

SEQ ID NO: 1169932 - DNA, 15 bp, Homo sapiens
ctatgggaacttgtt

SEQ ID NO: 1169933 - DNA, 15 bp, Homo sapiens
tctatgggaacttgt

SEQ ID NO: 1169934 - DNA, 15 bp, Homo sapiens
gtctatgggaacttg

SEQ ID NO: 1169935 - DNA, 15 bp, Homo sapiens
agtctatgggaactt

SEQ ID NO: 1169936 - DNA, 15 bp, Homo sapiens
aagtctatgggaact

SEQ ID NO: 1169937 - DNA, 15 bp, Homo sapiens
aaagtctatgggaac

SEQ ID NO: 1169938 - DNA, 15 bp, Homo sapiens
gaaagtctatgggaa

SEQ ID NO: 1169939 - DNA, 15 bp, Homo sapiens
ggaaagtctatggga

SEQ ID NO: 1169940 - DNA, 15 bp, Homo sapiens
aggaaagtctatggg

SEQ ID NO: 1169941 - DNA, 15 bp, Homo sapiens
gaggaaagtctatgg

SEQ ID NO: 1169942 - DNA, 15 bp, Homo sapiens
ggaggaaagtctatg

SEQ ID NO: 1169943 - DNA, 15 bp, Homo sapiens
aggaggaaagtctat

SEQ ID NO: 1169944 - DNA, 15 bp, Homo sapiens
gaggaggaaagtcta

SEQ ID NO: 1169945 - DNA, 15 bp, Homo sapiens
tgaggaggaaagtct

SEQ ID NO: 1169946 - DNA, 15 bp, Homo sapiens
ttgaggaggaaagtc

SEQ ID NO: 1169947 - DNA, 15 bp, Homo sapiens
cttgaggaggaaagt

SEQ ID NO: 1169948 - DNA, 15 bp, Homo sapiens
gcttgaggaggaaag

SEQ ID NO: 1169949 - DNA, 15 bp, Homo sapiens
agcttgaggaggaaa

SEQ ID NO: 1169950 - DNA, 15 bp, Homo sapiens
tagcttgaggaggaa

SEQ ID NO: 1169951 - DNA, 15 bp, Homo sapiens
gtagcttgaggagga

SEQ ID NO: 1169952 - DNA, 15 bp, Homo sapiens
ggtagcttgaggagg

SEQ ID NO: 1169953 - DNA, 15 bp, Homo sapiens
tggtagcttgaggag

SEQ ID NO: 1169954 - DNA, 15 bp, Homo sapiens
atggtagcttgagga

SEQ ID NO: 1169955 - DNA, 15 bp, Homo sapiens
aatggtagcttgagg

SEQ ID NO: 1169956 - DNA, 15 bp, Homo sapiens
gaatggtagcttgag

SEQ ID NO: 1169957 - DNA, 15 bp, Homo sapiens
agaatggtagcttga

SEQ ID NO: 1169958 - DNA, 15 bp, Homo sapiens
gagaatggtagcttg

SEQ ID NO: 1169959 - DNA, 15 bp, Homo sapiens
tgagaatggtagctt

SEQ ID NO: 1169960 - DNA, 15 bp, Homo sapiens
gtgagaatggtagct

SEQ ID NO: 1169961 - DNA, 15 bp, Homo sapiens
tgtgagaatggtagc

SEQ ID NO: 1169962 - DNA, 15 bp, Homo sapiens
gtgtgagaatggtag

SEQ ID NO: 1169963 - DNA, 15 bp, Homo sapiens
agtgtgagaatggta

SEQ ID NO: 1169964 - DNA, 15 bp, Homo sapiens
tagtgtgagaatggt

SEQ ID NO: 1169965 - DNA, 15 bp, Homo sapiens
atagtgtgagaatgg

SEQ ID NO: 1169966 - DNA, 15 bp, Homo sapiens
tatagtgtgagaatg

SEQ ID NO: 1169967 - DNA, 15 bp, Homo sapiens
gtatagtgtgagaat

SEQ ID NO: 1169968 - DNA, 15 bp, Homo sapiens
tgtatagtgtgagaa

SEQ ID NO: 1169969 - DNA, 15 bp, Homo sapiens
atgtatagtgtgaga

SEQ ID NO: 1169970 - DNA, 15 bp, Homo sapiens
aatgtatagtgtgag

SEQ ID NO: 1169971 - DNA, 15 bp, Homo sapiens
gaatgtatagtgtga

SEQ ID NO: 1169972 - DNA, 15 bp, Homo sapiens
ggaatgtatagtgtg

SEQ ID NO: 1169973 - DNA, 15 bp, Homo sapiens
aggaatgtatagtgt

SEQ ID NO: 1169974 - DNA, 15 bp, Homo sapiens
aaggaatgtatagtg

SEQ ID NO: 1169975 - DNA, 15 bp, Homo sapiens
gaaggaatgtatagt

SEQ ID NO: 1169976 - DNA, 15 bp, Homo sapiens
tgaaggaatgtatag

SEQ ID NO: 1169977 - DNA, 15 bp, Homo sapiens
ttgaaggaatgtata

SEQ ID NO: 1169978 - DNA, 15 bp, Homo sapiens
attgaaggaatgtat

SEQ ID NO: 1169979 - DNA, 15 bp, Homo sapiens
gattgaaggaatgta

SEQ ID NO: 1169980 - DNA, 15 bp, Homo sapiens
tgattgaaggaatgt

SEQ ID NO: 1169981 - DNA, 15 bp, Homo sapiens
ttgattgaaggaatg

SEQ ID NO: 1169982 - DNA, 15 bp, Homo sapiens
gttgattgaaggaat

SEQ ID NO: 1169983 - DNA, 15 bp, Homo sapiens
ggttgattgaaggaa

SEQ ID NO: 1169984 - DNA, 15 bp, Homo sapiens
tggttgattgaagga

SEQ ID NO: 1169985 - DNA, 15 bp, Homo sapiens
atggttgattgaagg

SEQ ID NO: 1169986 - DNA, 15 bp, Homo sapiens
catggttgattgaag

SEQ ID NO: 1169987 - DNA, 15 bp, Homo sapiens
gcatggttgattgaa

SEQ ID NO: 1169988 - DNA, 15 bp, Homo sapiens
tgcatggttgattga

SEQ ID NO: 1169989 - DNA, 15 bp, Homo sapiens
gtgcatggttgattg

SEQ ID NO: 1169990 - DNA, 15 bp, Homo sapiens
ggtgcatggttgatt

SEQ ID NO: 1169991 - DNA, 15 bp, Homo sapiens
gggtgcatggttgat

SEQ ID NO: 1169992 - DNA, 15 bp, Homo sapiens
tgggtgcatggttga

SEQ ID NO: 1169993 - DNA, 15 bp, Homo sapiens
ttgggtgcatggttg

SEQ ID NO: 1169994 - DNA, 15 bp, Homo sapiens
gttgggtgcatggtt

SEQ ID NO: 1169995 - DNA, 15 bp, Homo sapiens
tgttgggtgcatggt

SEQ ID NO: 1169996 - DNA, 15 bp, Homo sapiens
ttgttgggtgcatgg

SEQ ID NO: 1169997 - DNA, 15 bp, Homo sapiens
tttgttgggtgcatg

SEQ ID NO: 1169998 - DNA, 15 bp, Homo sapiens
gtttgttgggtgcat

SEQ ID NO: 1169999 - DNA, 15 bp, Homo sapiens
tgtttgttgggtgca

SEQ ID NO: 1170000 - DNA, 15 bp, Homo sapiens
gtgtttgttgggtgc

SEQ ID NO: 1170001 - DNA, 15 bp, Homo sapiens
agtgtttgttgggtg

SEQ ID NO: 1170002 - DNA, 15 bp, Homo sapiens
aagtgtttgttgggt

SEQ ID NO: 1170003 - DNA, 15 bp, Homo sapiens
taagtgtttgttggg

SEQ ID NO: 1170004 - DNA, 15 bp, Homo sapiens
ataagtgtttgttgg

SEQ ID NO: 1170005 - DNA, 15 bp, Homo sapiens
cataagtgtttgttg

SEQ ID NO: 1170006 - DNA, 15 bp, Homo sapiens
ccataagtgtttgtt

SEQ ID NO: 1170007 - DNA, 15 bp, Homo sapiens
cccataagtgtttgt

SEQ ID NO: 1170008 - DNA, 15 bp, Homo sapiens
ccccataagtgtttg

SEQ ID NO: 1170009 - DNA, 15 bp, Homo sapiens
tccccataagtgttt

SEQ ID NO: 1170010 - DNA, 15 bp, Homo sapiens
ctccccataagtgtt

SEQ ID NO: 1170011 - DNA, 15 bp, Homo sapiens
gctccccataagtgt

SEQ ID NO: 1170012 - DNA, 15 bp, Homo sapiens
ggctccccataagtg

SEQ ID NO: 1170013 - DNA, 15 bp, Homo sapiens
gggctccccataagt

SEQ ID NO: 1170014 - DNA, 15 bp, Homo sapiens
tgggctccccataag

SEQ ID NO: 1170015 - DNA, 15 bp, Homo sapiens
ctgggctccccataa

SEQ ID NO: 1170016 - DNA, 15 bp, Homo sapiens
tctgggctccccata

SEQ ID NO: 1170017 - DNA, 15 bp, Homo sapiens
ttctgggctccccat

SEQ ID NO: 1170018 - DNA, 15 bp, Homo sapiens
gttctgggctcccca

SEQ ID NO: 1170019 - DNA, 15 bp, Homo sapiens
tgttctgggctcccc

SEQ ID NO: 1170020 - DNA, 15 bp, Homo sapiens
gtgttctgggctccc

SEQ ID NO: 1170021 - DNA, 15 bp, Homo sapiens
ggtgttctgggctcc

SEQ ID NO: 1170022 - DNA, 15 bp, Homo sapiens
gggtgttctgggctc

SEQ ID NO: 1170023 - DNA, 15 bp, Homo sapiens
agggtgttctgggct

SEQ ID NO: 1170024 - DNA, 15 bp, Homo sapiens
aagggtgttctgggc

SEQ ID NO: 1170025 - DNA, 15 bp, Homo sapiens
gaagggtgttctggg

SEQ ID NO: 1170026 - DNA, 15 bp, Homo sapiens
tgaagggtgttctgg

SEQ ID NO: 1170027 - DNA, 15 bp, Homo sapiens
ctgaagggtgttctg

SEQ ID NO: 1170028 - DNA, 15 bp, Homo sapiens
cctgaagggtgttct

SEQ ID NO: 1170029 - DNA, 15 bp, Homo sapiens
gcctgaagggtgttc

SEQ ID NO: 1170030 - DNA, 15 bp, Homo sapiens
agcctgaagggtgtt

SEQ ID NO: 1170031 - DNA, 15 bp, Homo sapiens
aagcctgaagggtgt

SEQ ID NO: 1170032 - DNA, 15 bp, Homo sapiens
caagcctgaagggtg

SEQ ID NO: 1170033 - DNA, 15 bp, Homo sapiens
ccaagcctgaagggt

SEQ ID NO: 1170034 - DNA, 15 bp, Homo sapiens
tccaagcctgaaggg

SEQ ID NO: 1170035 - DNA, 15 bp, Homo sapiens
ttccaagcctgaagg

SEQ ID NO: 1170036 - DNA, 15 bp, Homo sapiens
attccaagcctgaag

SEQ ID NO: 1170037 - DNA, 15 bp, Homo sapiens
aattccaagcctgaa

SEQ ID NO: 1170038 - DNA, 15 bp, Homo sapiens
aaattccaagcctga

SEQ ID NO: 1170039 - DNA, 15 bp, Homo sapiens
caaattccaagcctg

SEQ ID NO: 1170040 - DNA, 15 bp, Homo sapiens
ccaaattccaagcct

SEQ ID NO: 1170041 - DNA, 15 bp, Homo sapiens
cccaaattccaagcc

SEQ ID NO: 1170042 - DNA, 15 bp, Homo sapiens
tcccaaattccaagc

SEQ ID NO: 1170043 - DNA, 15 bp, Homo sapiens
atcccaaattccaag

SEQ ID NO: 1170044 - DNA, 15 bp, Homo sapiens
catcccaaattccaa

SEQ ID NO: 1170045 - DNA, 15 bp, Homo sapiens
acatcccaaattcca

SEQ ID NO: 1170046 - DNA, 15 bp, Homo sapiens
cacatcccaaattcc

SEQ ID NO: 1170047 - DNA, 15 bp, Homo sapiens
tcacatcccaaattc

SEQ ID NO: 1170048 - DNA, 15 bp, Homo sapiens
gtcacatcccaaatt

SEQ ID NO: 1170049 - DNA, 15 bp, Homo sapiens
tgtcacatcccaaat

SEQ ID NO: 1170050 - DNA, 15 bp, Homo sapiens
ttgtcacatcccaaa

SEQ ID NO: 1170051 - DNA, 15 bp, Homo sapiens
attgtcacatcccaa

SEQ ID NO: 1170052 - DNA, 15 bp, Homo sapiens
cattgtcacatccca

SEQ ID NO: 1170053 - DNA, 15 bp, Homo sapiens
tcattgtcacatccc

SEQ ID NO: 1170054 - DNA, 15 bp, Homo sapiens
ttcattgtcacatcc

SEQ ID NO: 1170055 - DNA, 15 bp, Homo sapiens
tttcattgtcacatc

SEQ ID NO: 1170056 - DNA, 15 bp, Homo sapiens
ttttcattgtcacat

SEQ ID NO: 1170057 - DNA, 15 bp, Homo sapiens
cttttcattgtcaca

SEQ ID NO: 1170058 - DNA, 15 bp, Homo sapiens
ccttttcattgtcac

SEQ ID NO: 1170059 - DNA, 15 bp, Homo sapiens
gccttttcattgtca

SEQ ID NO: 1170060 - DNA, 15 bp, Homo sapiens
ggccttttcattgtc

SEQ ID NO: 1170061 - DNA, 15 bp, Homo sapiens
cggccttttcattgt

SEQ ID NO: 1170062 - DNA, 15 bp, Homo sapiens
acggccttttcattg

SEQ ID NO: 1170063 - DNA, 15 bp, Homo sapiens
aacggccttttcatt

SEQ ID NO: 1170064 - DNA, 15 bp, Homo sapiens
caacggccttttcat

SEQ ID NO: 1170065 - DNA, 15 bp, Homo sapiens
tcaacggccttttca

SEQ ID NO: 1170066 - DNA, 15 bp, Homo sapiens
ttcaacggccttttc

SEQ ID NO: 1170067 - DNA, 15 bp, Homo sapiens
tttcaacggcctttt

SEQ ID NO: 1170068 - DNA, 15 bp, Homo sapiens
ttttcaacggccttt

SEQ ID NO: 1170069 - DNA, 15 bp, Homo sapiens
cttttcaacggcctt

SEQ ID NO: 1170070 - DNA, 15 bp, Homo sapiens
gcttttcaacggcct

SEQ ID NO: 1170071 - DNA, 15 bp, Homo sapiens
agcttttcaacggcc

SEQ ID NO: 1170072 - DNA, 15 bp, Homo sapiens
aagcttttcaacggc

SEQ ID NO: 1170073 - DNA, 15 bp, Homo sapiens
taagcttttcaacgg

SEQ ID NO: 1170074 - DNA, 15 bp, Homo sapiens
ctaagcttttcaacg

SEQ ID NO: 1170075 - DNA, 15 bp, Homo sapiens
tctaagcttttcaac

SEQ ID NO: 1170076 - DNA, 15 bp, Homo sapiens
atctaagcttttcaa

SEQ ID NO: 1170077 - DNA, 15 bp, Homo sapiens
aatctaagcttttca

SEQ ID NO: 1170078 - DNA, 15 bp, Homo sapiens
aaatctaagcttttc

SEQ ID NO: 1170079 - DNA, 15 bp, Homo sapiens
aaaatctaagctttt

SEQ ID NO: 1170080 - DNA, 15 bp, Homo sapiens
caaaatctaagcttt

SEQ ID NO: 1170081 - DNA, 15 bp, Homo sapiens
ccaaaatctaagctt

SEQ ID NO: 1170082 - DNA, 15 bp, Homo sapiens
gccaaaatctaagct

SEQ ID NO: 1170083 - DNA, 15 bp, Homo sapiens
tgccaaaatctaagc

SEQ ID NO: 1170084 - DNA, 15 bp, Homo sapiens
ctgccaaaatctaag

SEQ ID NO: 1170085 - DNA, 15 bp, Homo sapiens
tctgccaaaatctaa

SEQ ID NO: 1170086 - DNA, 15 bp, Homo sapiens
atctgccaaaatcta

SEQ ID NO: 1170087 - DNA, 15 bp, Homo sapiens
catctgccaaaatct

SEQ ID NO: 1170088 - DNA, 15 bp, Homo sapiens
tcatctgccaaaatc

SEQ ID NO: 1170089 - DNA, 15 bp, Homo sapiens
ctcatctgccaaaat

SEQ ID NO: 1170090 - DNA, 15 bp, Homo sapiens
tctcatctgccaaaa

SEQ ID NO: 1170091 - DNA, 15 bp, Homo sapiens
gtctcatctgccaaa

SEQ ID NO: 1170092 - DNA, 15 bp, Homo sapiens
tgtctcatctgccaa

SEQ ID NO: 1170093 - DNA, 15 bp, Homo sapiens
ctgtctcatctgcca

SEQ ID NO: 1170094 - DNA, 15 bp, Homo sapiens
cctgtctcatctgcc

SEQ ID NO: 1170095 - DNA, 15 bp, Homo sapiens
acctgtctcatctgc

SEQ ID NO: 1170096 - DNA, 15 bp, Homo sapiens
cacctgtctcatctg

SEQ ID NO: 1170097 - DNA, 15 bp, Homo sapiens
tcacctgtctcatct

SEQ ID NO: 1170098 - DNA, 15 bp, Homo sapiens
atcacctgtctcatc

SEQ ID NO: 1170099 - DNA, 15 bp, Homo sapiens
aatcacctgtctcat

SEQ ID NO: 1170100 - DNA, 15 bp, Homo sapiens
taatcacctgtctca

SEQ ID NO: 1170101 - DNA, 15 bp, Homo sapiens
gtaatcacctgtctc

SEQ ID NO: 1170102 - DNA, 15 bp, Homo sapiens
cgtaatcacctgtct

SEQ ID NO: 1170103 - DNA, 15 bp, Homo sapiens
tcgtaatcacctgtc

SEQ ID NO: 1170104 - DNA, 15 bp, Homo sapiens
atcgtaatcacctgt

SEQ ID NO: 1170105 - DNA, 15 bp, Homo sapiens
catcgtaatcacctg

SEQ ID NO: 1170106 - DNA, 15 bp, Homo sapiens
ccatcgtaatcacct

SEQ ID NO: 1170107 - DNA, 15 bp, Homo sapiens
tccatcgtaatcacc

SEQ ID NO: 1170108 - DNA, 15 bp, Homo sapiens
ctccatcgtaatcac

SEQ ID NO: 1170109 - DNA, 15 bp, Homo sapiens
gctccatcgtaatca

SEQ ID NO: 1170110 - DNA, 15 bp, Homo sapiens
cgctccatcgtaatc

SEQ ID NO: 1170111 - DNA, 15 bp, Homo sapiens
tcgctccatcgtaat

SEQ ID NO: 1170112 - DNA, 15 bp, Homo sapiens
ctcgctccatcgtaa

SEQ ID NO: 1170113 - DNA, 15 bp, Homo sapiens
tctcgctccatcgta

SEQ ID NO: 1170114 - DNA, 15 bp, Homo sapiens
gtctcgctccatcgt

SEQ ID NO: 1170115 - DNA, 15 bp, Homo sapiens
tgtctcgctccatcg

SEQ ID NO: 1170116 - DNA, 15 bp, Homo sapiens
ctgtctcgctccatc

SEQ ID NO: 1170117 - DNA, 15 bp, Homo sapiens
tctgtctcgctccat

SEQ ID NO: 1170118 - DNA, 15 bp, Homo sapiens
gtctgtctcgctcca

SEQ ID NO: 1170119 - DNA, 15 bp, Homo sapiens
ggtctgtctcgctcc

SEQ ID NO: 1170120 - DNA, 15 bp, Homo sapiens
tggtctgtctcgctc

SEQ ID NO: 1170121 - DNA, 15 bp, Homo sapiens
ctggtctgtctcgct

SEQ ID NO: 1170122 - DNA, 15 bp, Homo sapiens
cctggtctgtctcgc

SEQ ID NO: 1170123 - DNA, 15 bp, Homo sapiens
gcctggtctgtctcg

SEQ ID NO: 1170124 - DNA, 15 bp, Homo sapiens
tgcctggtctgtctc

SEQ ID NO: 1170125 - DNA, 15 bp, Homo sapiens
ctgcctggtctgtct

SEQ ID NO: 1170126 - DNA, 15 bp, Homo sapiens
tctgcctggtctgtc

SEQ ID NO: 1170127 - DNA, 15 bp, Homo sapiens
ctctgcctggtctgt

SEQ ID NO: 1170128 - DNA, 15 bp, Homo sapiens
tctctgcctggtctg

SEQ ID NO: 1170129 - DNA, 15 bp, Homo sapiens
ctctctgcctggtct

SEQ ID NO: 1170130 - DNA, 15 bp, Homo sapiens
cctctctgcctggtc

SEQ ID NO: 1170131 - DNA, 15 bp, Homo sapiens
ccctctctgcctggt

SEQ ID NO: 1170132 - DNA, 15 bp, Homo sapiens
tccctctctgcctgg

SEQ ID NO: 1170133 - DNA, 15 bp, Homo sapiens
ctccctctctgcctg

SEQ ID NO: 1170134 - DNA, 15 bp, Homo sapiens
cctccctctctgcct

SEQ ID NO: 1170135 - DNA, 15 bp, Homo sapiens
gcctccctctctgcc

SEQ ID NO: 1170136 - DNA, 15 bp, Homo sapiens
agcctccctctctgc

SEQ ID NO: 1170137 - DNA, 15 bp, Homo sapiens
cagcctccctctctg

SEQ ID NO: 1170138 - DNA, 15 bp, Homo sapiens
tcagcctccctctct

SEQ ID NO: 1170139 - DNA, 15 bp, Homo sapiens
gtcagcctccctctc

SEQ ID NO: 1170140 - DNA, 15 bp, Homo sapiens
ggtcagcctccctct

SEQ ID NO: 1170141 - DNA, 15 bp, Homo sapiens
aggtcagcctccctc

SEQ ID NO: 1170142 - DNA, 15 bp, Homo sapiens
gaggtcagcctccct

SEQ ID NO: 1170143 - DNA, 15 bp, Homo sapiens
tgaggtcagcctccc

SEQ ID NO: 1170144 - DNA, 15 bp, Homo sapiens
ttgaggtcagcctcc

SEQ ID NO: 1170145 - DNA, 15 bp, Homo sapiens
cttgaggtcagcctc

SEQ ID NO: 1170146 - DNA, 15 bp, Homo sapiens
gcttgaggtcagcct

SEQ ID NO: 1170147 - DNA, 15 bp, Homo sapiens
tgcttgaggtcagcc

SEQ ID NO: 1170148 - DNA, 15 bp, Homo sapiens
atgcttgaggtcagc

SEQ ID NO: 1170149 - DNA, 15 bp, Homo sapiens
gatgcttgaggtcag

SEQ ID NO: 1170150 - DNA, 15 bp, Homo sapiens
agatgcttgaggtca

SEQ ID NO: 1170151 - DNA, 15 bp, Homo sapiens
cagatgcttgaggtc

SEQ ID NO: 1170152 - DNA, 15 bp, Homo sapiens
tcagatgcttgaggt

SEQ ID NO: 1170153 - DNA, 15 bp, Homo sapiens
gtcagatgcttgagg

SEQ ID NO: 1170154 - DNA, 15 bp, Homo sapiens
ggtcagatgcttgag

SEQ ID NO: 1170155 - DNA, 15 bp, Homo sapiens
tggtcagatgcttga

SEQ ID NO: 1170156 - DNA, 15 bp, Homo sapiens
ctggtcagatgcttg

SEQ ID NO: 1170157 - DNA, 15 bp, Homo sapiens
cctggtcagatgctt

SEQ ID NO: 1170158 - DNA, 15 bp, Homo sapiens
ccctggtcagatgct

SEQ ID NO: 1170159 - DNA, 15 bp, Homo sapiens
accctggtcagatgc

SEQ ID NO: 1170160 - DNA, 15 bp, Homo sapiens
aaccctggtcagatg

SEQ ID NO: 1170161 - DNA, 15 bp, Homo sapiens
aaaccctggtcagat

SEQ ID NO: 1170162 - DNA, 15 bp, Homo sapiens
taaaccctggtcaga

SEQ ID NO: 1170163 - DNA, 15 bp, Homo sapiens
ataaaccctggtcag

SEQ ID NO: 1170164 - DNA, 15 bp, Homo sapiens
aataaaccctggtca

SEQ ID NO: 1170165 - DNA, 15 bp, Homo sapiens
aaataaaccctggtc

SEQ ID NO: 1170166 - DNA, 15 bp, Homo sapiens
aaaataaaccctggt

SEQ ID NO: 1170167 - DNA, 15 bp, Homo sapiens
gaaaataaaccctgg

SEQ ID NO: 1170168 - DNA, 15 bp, Homo sapiens
tgaaaataaaccctg

SEQ ID NO: 1170169 - DNA, 15 bp, Homo sapiens
gtgaaaataaaccct

SEQ ID NO: 1170170 - DNA, 15 bp, Homo sapiens
agtgaaaataaaccc

SEQ ID NO: 1170171 - DNA, 15 bp, Homo sapiens
tagtgaaaataaacc

SEQ ID NO: 1170172 - DNA, 15 bp, Homo sapiens
atagtgaaaataaac

SEQ ID NO: 1170173 - DNA, 15 bp, Homo sapiens
catagtgaaaataaa

SEQ ID NO: 1170174 - DNA, 15 bp, Homo sapiens
acatagtgaaaataa

SEQ ID NO: 1170175 - DNA, 15 bp, Homo sapiens
tacatagtgaaaata

SEQ ID NO: 1170176 - DNA, 15 bp, Homo sapiens
gtacatagtgaaaat

SEQ ID NO: 1170177 - DNA, 15 bp, Homo sapiens
tgtacatagtgaaaa

SEQ ID NO: 1170178 - DNA, 15 bp, Homo sapiens
gtgtacatagtgaaa

SEQ ID NO: 1170179 - DNA, 15 bp, Homo sapiens
tgtgtacatagtgaa

SEQ ID NO: 1170180 - DNA, 15 bp, Homo sapiens
ttgtgtacatagtga

SEQ ID NO: 1170181 - DNA, 15 bp, Homo sapiens
attgtgtacatagtg

SEQ ID NO: 1170182 - DNA, 15 bp, Homo sapiens
cattgtgtacatagt

SEQ ID NO: 1170183 - DNA, 15 bp, Homo sapiens
gcattgtgtacatag

SEQ ID NO: 1170184 - DNA, 15 bp, Homo sapiens
tgcattgtgtacata

SEQ ID NO: 1170185 - DNA, 15 bp, Homo sapiens
gtgcattgtgtacat

SEQ ID NO: 1170186 - DNA, 15 bp, Homo sapiens
cgtgcattgtgtaca

SEQ ID NO: 1170187 - DNA, 15 bp, Homo sapiens
gcgtgcattgtgtac

SEQ ID NO: 1170188 - DNA, 15 bp, Homo sapiens
tgcgtgcattgtgta

SEQ ID NO: 1170189 - DNA, 15 bp, Homo sapiens
gtgcgtgcattgtgt

SEQ ID NO: 1170190 - DNA, 15 bp, Homo sapiens
tgtgcgtgcattgtg

SEQ ID NO: 1170191 - DNA, 15 bp, Homo sapiens
atgtgcgtgcattgt

SEQ ID NO: 1170192 - DNA, 15 bp, Homo sapiens
catgtgcgtgcattg

SEQ ID NO: 1170193 - DNA, 15 bp, Homo sapiens
gcatgtgcgtgcatt

SEQ ID NO: 1170194 - DNA, 15 bp, Homo sapiens
agcatgtgcgtgcat

SEQ ID NO: 1170195 - DNA, 15 bp, Homo sapiens
cagcatgtgcgtgca

SEQ ID NO: 1170196 - DNA, 15 bp, Homo sapiens
acagcatgtgcgtgc

SEQ ID NO: 1170197 - DNA, 15 bp, Homo sapiens
tacagcatgtgcgtg

SEQ ID NO: 1170198 - DNA, 15 bp, Homo sapiens
ctacagcatgtgcgt

SEQ ID NO: 1170199 - DNA, 15 bp, Homo sapiens
cctacagcatgtgcg

SEQ ID NO: 1170200 - DNA, 15 bp, Homo sapiens
acctacagcatgtgc

SEQ ID NO: 1170201 - DNA, 15 bp, Homo sapiens
cacctacagcatgtg

SEQ ID NO: 1170202 - DNA, 15 bp, Homo sapiens
tcacctacagcatgt

SEQ ID NO: 1170203 - DNA, 15 bp, Homo sapiens
ttcacctacagcatg

SEQ ID NO: 1170204 - DNA, 15 bp, Homo sapiens
tttcacctacagcat

SEQ ID NO: 1170205 - DNA, 15 bp, Homo sapiens
gtttcacctacagca

SEQ ID NO: 1170206 - DNA, 15 bp, Homo sapiens
agtttcacctacagc

SEQ ID NO: 1170207 - DNA, 15 bp, Homo sapiens
tagtttcacctacag

SEQ ID NO: 1170208 - DNA, 15 bp, Homo sapiens
ttagtttcacctaca

SEQ ID NO: 1170209 - DNA, 15 bp, Homo sapiens
gttagtttcacctac

SEQ ID NO: 1170210 - DNA, 15 bp, Homo sapiens
tgttagtttcaccta

SEQ ID NO: 1170211 - DNA, 15 bp, Homo sapiens
atgttagtttcacct

SEQ ID NO: 1170212 - DNA, 15 bp, Homo sapiens
catgttagtttcacc

SEQ ID NO: 1170213 - DNA, 15 bp, Homo sapiens
tcatgttagtttcac

SEQ ID NO: 1170214 - DNA, 15 bp, Homo sapiens
gtcatgttagtttca

SEQ ID NO: 1170215 - DNA, 15 bp, Homo sapiens
agtcatgttagtttc

SEQ ID NO: 1170216 - DNA, 15 bp, Homo sapiens
aagtcatgttagttt

SEQ ID NO: 1170217 - DNA, 15 bp, Homo sapiens
taagtcatgttagtt

SEQ ID NO: 1170218 - DNA, 15 bp, Homo sapiens
ataagtcatgttagt

SEQ ID NO: 1170219 - DNA, 15 bp, Homo sapiens
cataagtcatgttag

SEQ ID NO: 1170220 - DNA, 15 bp, Homo sapiens
gcataagtcatgtta

SEQ ID NO: 1170221 - DNA, 15 bp, Homo sapiens
ggcataagtcatgtt

SEQ ID NO: 1170222 - DNA, 15 bp, Homo sapiens
aggcataagtcatgt

SEQ ID NO: 1170223 - DNA, 15 bp, Homo sapiens
aaggcataagtcatg

SEQ ID NO: 1170224 - DNA, 15 bp, Homo sapiens
taaggcataagtcat

SEQ ID NO: 1170225 - DNA, 15 bp, Homo sapiens
gtaaggcataagtca

SEQ ID NO: 1170226 - DNA, 15 bp, Homo sapiens
cgtaaggcataagtc

SEQ ID NO: 1170227 - DNA, 15 bp, Homo sapiens
acgtaaggcataagt

SEQ ID NO: 1170228 - DNA, 15 bp, Homo sapiens
cacgtaaggcataag

SEQ ID NO: 1170229 - DNA, 15 bp, Homo sapiens
tcacgtaaggcataa

SEQ ID NO: 1170230 - DNA, 15 bp, Homo sapiens
ttcacgtaaggcata

SEQ ID NO: 1170231 - DNA, 15 bp, Homo sapiens
tttcacgtaaggcat

SEQ ID NO: 1170232 - DNA, 15 bp, Homo sapiens
ttttcacgtaaggca

SEQ ID NO: 1170233 - DNA, 15 bp, Homo sapiens
attttcacgtaaggc

SEQ ID NO: 1170234 - DNA, 15 bp, Homo sapiens
tattttcacgtaagg

SEQ ID NO: 1170235 - DNA, 15 bp, Homo sapiens
ttattttcacgtaag

SEQ ID NO: 1170236 - DNA, 15 bp, Homo sapiens
gttattttcacgtaa

SEQ ID NO: 1170237 - DNA, 15 bp, Homo sapiens
tgttattttcacgta

SEQ ID NO: 1170238 - DNA, 15 bp, Homo sapiens
ttgttattttcacgt

SEQ ID NO: 1170239 - DNA, 15 bp, Homo sapiens
tttgttattttcacg

SEQ ID NO: 1170240 - DNA, 15 bp, Homo sapiens
atttgttattttcac

SEQ ID NO: 1170241 - DNA, 15 bp, Homo sapiens
tatttgttattttca

SEQ ID NO: 1170242 - DNA, 15 bp, Homo sapiens
ttatttgttattttc

SEQ ID NO: 1170243 - DNA, 15 bp, Homo sapiens
gttatttgttatttt

SEQ ID NO: 1170244 - DNA, 15 bp, Homo sapiens
tgttatttgttattt

SEQ ID NO: 1170245 - DNA, 15 bp, Homo sapiens
atgttatttgttatt

SEQ ID NO: 1170246 - DNA, 15 bp, Homo sapiens
tatgttatttgttat

SEQ ID NO: 1170247 - DNA, 15 bp, Homo sapiens
gtatgttatttgtta

SEQ ID NO: 1170248 - DNA, 15 bp, Homo sapiens
tgtatgttatttgtt

SEQ ID NO: 1170249 - DNA, 15 bp, Homo sapiens
ctgtatgttatttgt

SEQ ID NO: 1170250 - DNA, 15 bp, Homo sapiens
gctgtatgttatttg

SEQ ID NO: 1170251 - DNA, 15 bp, Homo sapiens
tgctgtatgttattt

SEQ ID NO: 1170252 - DNA, 15 bp, Homo sapiens
ctgctgtatgttatt

SEQ ID NO: 1170253 - DNA, 15 bp, Homo sapiens
actgctgtatgttat

SEQ ID NO: 1170254 - DNA, 15 bp, Homo sapiens
gactgctgtatgtta

SEQ ID NO: 1170255 - DNA, 15 bp, Homo sapiens
agactgctgtatgtt

SEQ ID NO: 1170256 - DNA, 15 bp, Homo sapiens
aagactgctgtatgt

SEQ ID NO: 1170257 - DNA, 15 bp, Homo sapiens
gaagactgctgtatg

SEQ ID NO: 1170258 - DNA, 15 bp, Homo sapiens
agaagactgctgtat

SEQ ID NO: 1170259 - DNA, 15 bp, Homo sapiens
aagaagactgctgta

SEQ ID NO: 1170260 - DNA, 15 bp, Homo sapiens
caagaagactgctgt

SEQ ID NO: 1170261 - DNA, 15 bp, Homo sapiens
acaagaagactgctg

SEQ ID NO: 1170262 - DNA, 15 bp, Homo sapiens
gacaagaagactgct

SEQ ID NO: 1170263 - DNA, 15 bp, Homo sapiens
tgacaagaagactgc

SEQ ID NO: 1170264 - DNA, 15 bp, Homo sapiens
ttgacaagaagactg

SEQ ID NO: 1170265 - DNA, 15 bp, Homo sapiens
tttgacaagaagact

SEQ ID NO: 1170266 - DNA, 15 bp, Homo sapiens
ctttgacaagaagac

SEQ ID NO: 1170267 - DNA, 15 bp, Homo sapiens
actttgacaagaaga

SEQ ID NO: 1170268 - DNA, 15 bp, Homo sapiens
tactttgacaagaag

SEQ ID NO: 1170269 - DNA, 15 bp, Homo sapiens
gtactttgacaagaa

SEQ ID NO: 1170270 - DNA, 15 bp, Homo sapiens
ggtactttgacaaga

SEQ ID NO: 1170271 - DNA, 15 bp, Homo sapiens
gggtactttgacaag

SEQ ID NO: 1170272 - DNA, 15 bp, Homo sapiens
ggggtactttgacaa

SEQ ID NO: 1170273 - DNA, 15 bp, Homo sapiens
aggggtactttgaca

SEQ ID NO: 1170274 - DNA, 15 bp, Homo sapiens
caggggtactttgac

SEQ ID NO: 1170275 - DNA, 15 bp, Homo sapiens
gcaggggtactttga

SEQ ID NO: 1170276 - DNA, 15 bp, Homo sapiens
tgcaggggtactttg

SEQ ID NO: 1170277 - DNA, 15 bp, Homo sapiens
ttgcaggggtacttt

SEQ ID NO: 1170278 - DNA, 15 bp, Homo sapiens
attgcaggggtactt

SEQ ID NO: 1170279 - DNA, 15 bp, Homo sapiens
cattgcaggggtact

SEQ ID NO: 1170280 - DNA, 15 bp, Homo sapiens
tcattgcaggggtac

SEQ ID NO: 1170281 - DNA, 15 bp, Homo sapiens
atcattgcaggggta

SEQ ID NO: 1170282 - DNA, 15 bp, Homo sapiens
catcattgcaggggt

SEQ ID NO: 1170283 - DNA, 15 bp, Homo sapiens
ccatcattgcagggg

SEQ ID NO: 1170284 - DNA, 15 bp, Homo sapiens
cccatcattgcaggg

SEQ ID NO: 1170285 - DNA, 15 bp, Homo sapiens
ccccatcattgcagg

SEQ ID NO: 1170286 - DNA, 15 bp, Homo sapiens
cccccatcattgcag

SEQ ID NO: 1170287 - DNA, 15 bp, Homo sapiens
gcccccatcattgca

SEQ ID NO: 1170288 - DNA, 15 bp, Homo sapiens
ggcccccatcattgc

SEQ ID NO: 1170289 - DNA, 15 bp, Homo sapiens
tggcccccatcattg

SEQ ID NO: 1170290 - DNA, 15 bp, Homo sapiens
ctggcccccatcatt

SEQ ID NO: 1170291 - DNA, 15 bp, Homo sapiens
tctggcccccatcat

SEQ ID NO: 1170292 - DNA, 15 bp, Homo sapiens
ttctggcccccatca

SEQ ID NO: 1170293 - DNA, 15 bp, Homo sapiens
cttctggcccccatc

SEQ ID NO: 1170294 - DNA, 15 bp, Homo sapiens
acttctggcccccat

SEQ ID NO: 1170295 - DNA, 15 bp, Homo sapiens
aacttctggccccca

SEQ ID NO: 1170296 - DNA, 15 bp, Homo sapiens
gaacttctggccccc

SEQ ID NO: 1170297 - DNA, 15 bp, Homo sapiens
agaacttctggcccc

SEQ ID NO: 1170298 - DNA, 15 bp, Homo sapiens
gagaacttctggccc

SEQ ID NO: 1170299 - DNA, 15 bp, Homo sapiens
cgagaacttctggcc

SEQ ID NO: 1170300 - DNA, 15 bp, Homo sapiens
ccgagaacttctggc

SEQ ID NO: 1170301 - DNA, 15 bp, Homo sapiens
tccgagaacttctgg

SEQ ID NO: 1170302 - DNA, 15 bp, Homo sapiens
ttccgagaacttctg

SEQ ID NO: 1170303 - DNA, 15 bp, Homo sapiens
tttccgagaacttct

SEQ ID NO: 1170304 - DNA, 15 bp, Homo sapiens
ctttccgagaacttc

SEQ ID NO: 1170305 - DNA, 15 bp, Homo sapiens
tctttccgagaactt

SEQ ID NO: 1170306 - DNA, 15 bp, Homo sapiens
ttctttccgagaact

SEQ ID NO: 1170307 - DNA, 15 bp, Homo sapiens
gttctttccgagaac

SEQ ID NO: 1170308 - DNA, 15 bp, Homo sapiens
tgttctttccgagaa

SEQ ID NO: 1170309 - DNA, 15 bp, Homo sapiens
atgttctttccgaga

SEQ ID NO: 1170310 - DNA, 15 bp, Homo sapiens
aatgttctttccgag

SEQ ID NO: 1170311 - DNA, 15 bp, Homo sapiens
gaatgttctttccga

SEQ ID NO: 1170312 - DNA, 15 bp, Homo sapiens
ggaatgttctttccg

SEQ ID NO: 1170313 - DNA, 15 bp, Homo sapiens
tggaatgttctttcc

SEQ ID NO: 1170314 - DNA, 15 bp, Homo sapiens
ctggaatgttctttc

SEQ ID NO: 1170315 - DNA, 15 bp, Homo sapiens
cctggaatgttcttt

SEQ ID NO: 1170316 - DNA, 15 bp, Homo sapiens
acctggaatgttctt

SEQ ID NO: 1170317 - DNA, 15 bp, Homo sapiens
gacctggaatgttct

SEQ ID NO: 1170318 - DNA, 15 bp, Homo sapiens
tgacctggaatgttc

SEQ ID NO: 1170319 - DNA, 15 bp, Homo sapiens
ctgacctggaatgtt

SEQ ID NO: 1170320 - DNA, 15 bp, Homo sapiens
actgacctggaatgt

SEQ ID NO: 1170321 - DNA, 15 bp, Homo sapiens
cactgacctggaatg

SEQ ID NO: 1170322 - DNA, 15 bp, Homo sapiens
ccactgacctggaat

SEQ ID NO: 1170323 - DNA, 15 bp, Homo sapiens
tccactgacctggaa

SEQ ID NO: 1170324 - DNA, 15 bp, Homo sapiens
ctccactgacctgga

SEQ ID NO: 1170325 - DNA, 15 bp, Homo sapiens
cctccactgacctgg

SEQ ID NO: 1170326 - DNA, 15 bp, Homo sapiens
acctccactgacctg

SEQ ID NO: 1170327 - DNA, 15 bp, Homo sapiens
cacctccactgacct

SEQ ID NO: 1170328 - DNA, 15 bp, Homo sapiens
ccacctccactgacc

SEQ ID NO: 1170329 - DNA, 15 bp, Homo sapiens
tccacctccactgac

SEQ ID NO: 1170330 - DNA, 15 bp, Homo sapiens
ctccacctccactga

SEQ ID NO: 1170331 - DNA, 15 bp, Homo sapiens
cctccacctccactg

SEQ ID NO: 1170332 - DNA, 15 bp, Homo sapiens
ccctccacctccact

SEQ ID NO: 1170333 - DNA, 15 bp, Homo sapiens
tccctccacctccac

SEQ ID NO: 1170334 - DNA, 15 bp, Homo sapiens
ttccctccacctcca

SEQ ID NO: 1170335 - DNA, 15 bp, Homo sapiens
tttccctccacctcc

SEQ ID NO: 1170336 - DNA, 15 bp, Homo sapiens
ctttccctccacctc

SEQ ID NO: 1170337 - DNA, 15 bp, Homo sapiens
tctttccctccacct

SEQ ID NO: 1170338 - DNA, 15 bp, Homo sapiens
ttctttccctccacc

SEQ ID NO: 1170339 - DNA, 15 bp, Homo sapiens
tttctttccctccac

SEQ ID NO: 1170340 - DNA, 15 bp, Homo sapiens
atttctttccctcca

SEQ ID NO: 1170341 - DNA, 15 bp, Homo sapiens
aatttctttccctcc

SEQ ID NO: 1170342 - DNA, 15 bp, Homo sapiens
gaatttctttccctc

SEQ ID NO: 1170343 - DNA, 15 bp, Homo sapiens
cgaatttctttccct

SEQ ID NO: 1170344 - DNA, 15 bp, Homo sapiens
ccgaatttctttccc

SEQ ID NO: 1170345 - DNA, 15 bp, Homo sapiens
accgaatttctttcc

SEQ ID NO: 1170346 - DNA, 15 bp, Homo sapiens
caccgaatttctttc

SEQ ID NO: 1170347 - DNA, 15 bp, Homo sapiens
tcaccgaatttcttt

SEQ ID NO: 1170348 - DNA, 15 bp, Homo sapiens
gtcaccgaatttctt

SEQ ID NO: 1170349 - DNA, 15 bp, Homo sapiens
tgtcaccgaatttct

SEQ ID NO: 1170350 - DNA, 15 bp, Homo sapiens
ctgtcaccgaatttc

SEQ ID NO: 1170351 - DNA, 15 bp, Homo sapiens
actgtcaccgaattt

SEQ ID NO: 1170352 - DNA, 15 bp, Homo sapiens
tactgtcaccgaatt

SEQ ID NO: 1170353 - DNA, 15 bp, Homo sapiens
atactgtcaccgaat

SEQ ID NO: 1170354 - DNA, 15 bp, Homo sapiens
catactgtcaccgaa

SEQ ID NO: 1170355 - DNA, 15 bp, Homo sapiens
gcatactgtcaccga

SEQ ID NO: 1170356 - DNA, 15 bp, Homo sapiens
ggcatactgtcaccg

SEQ ID NO: 1170357 - DNA, 15 bp, Homo sapiens
cggcatactgtcacc

SEQ ID NO: 1170358 - DNA, 15 bp, Homo sapiens
gcggcatactgtcac

SEQ ID NO: 1170359 - DNA, 15 bp, Homo sapiens
tgcggcatactgtca

SEQ ID NO: 1170360 - DNA, 15 bp, Homo sapiens
ctgcggcatactgtc

SEQ ID NO: 1170361 - DNA, 15 bp, Homo sapiens
cctgcggcatactgt

SEQ ID NO: 1170362 - DNA, 15 bp, Homo sapiens
gcctgcggcatactg

SEQ ID NO: 1170363 - DNA, 15 bp, Homo sapiens
cgcctgcggcatact

SEQ ID NO: 1170364 - DNA, 15 bp, Homo sapiens
acgcctgcggcatac

SEQ ID NO: 1170365 - DNA, 15 bp, Homo sapiens
cacgcctgcggcata

SEQ ID NO: 1170366 - DNA, 15 bp, Homo sapiens
gcacgcctgcggcat

SEQ ID NO: 1170367 - DNA, 15 bp, Homo sapiens
agcacgcctgcggca

SEQ ID NO: 1170368 - DNA, 15 bp, Homo sapiens
cagcacgcctgcggc

SEQ ID NO: 1170369 - DNA, 15 bp, Homo sapiens
acagcacgcctgcgg

SEQ ID NO: 1170370 - DNA, 15 bp, Homo sapiens
cacagcacgcctgcg

SEQ ID NO: 1170371 - DNA, 15 bp, Homo sapiens
ccacagcacgcctgc

SEQ ID NO: 1170372 - DNA, 15 bp, Homo sapiens
cccacagcacgcctg

SEQ ID NO: 1170373 - DNA, 15 bp, Homo sapiens
ccccacagcacgcct

SEQ ID NO: 1170374 - DNA, 15 bp, Homo sapiens
tccccacagcacgcc

SEQ ID NO: 1170375 - DNA, 15 bp, Homo sapiens
ttccccacagcacgc

SEQ ID NO: 1170376 - DNA, 15 bp, Homo sapiens
gttccccacagcacg

SEQ ID NO: 1170377 - DNA, 15 bp, Homo sapiens
ggttccccacagcac

SEQ ID NO: 1170378 - DNA, 15 bp, Homo sapiens
gggttccccacagca

SEQ ID NO: 1170379 - DNA, 15 bp, Homo sapiens
agggttccccacagc

SEQ ID NO: 1170380 - DNA, 15 bp, Homo sapiens
aagggttccccacag

SEQ ID NO: 1170381 - DNA, 15 bp, Homo sapiens
taagggttccccaca

SEQ ID NO: 1170382 - DNA, 15 bp, Homo sapiens
ctaagggttccccac

SEQ ID NO: 1170383 - DNA, 15 bp, Homo sapiens
tctaagggttcccca

SEQ ID NO: 1170384 - DNA, 15 bp, Homo sapiens
ctctaagggttcccc

SEQ ID NO: 1170385 - DNA, 15 bp, Homo sapiens
actctaagggttccc

SEQ ID NO: 1170386 - DNA, 15 bp, Homo sapiens
aactctaagggttcc

SEQ ID NO: 1170387 - DNA, 15 bp, Homo sapiens
gaactctaagggttc

SEQ ID NO: 1170388 - DNA, 15 bp, Homo sapiens
agaactctaagggtt

SEQ ID NO: 1170389 - DNA, 15 bp, Homo sapiens
cagaactctaagggt

SEQ ID NO: 1170390 - DNA, 15 bp, Homo sapiens
ccagaactctaaggg

SEQ ID NO: 1170391 - DNA, 15 bp, Homo sapiens
cccagaactctaagg

SEQ ID NO: 1170392 - DNA, 15 bp, Homo sapiens
tcccagaactctaag

SEQ ID NO: 1170393 - DNA, 15 bp, Homo sapiens
ctcccagaactctaa

SEQ ID NO: 1170394 - DNA, 15 bp, Homo sapiens
tctcccagaactcta

SEQ ID NO: 1170395 - DNA, 15 bp, Homo sapiens
ctctcccagaactct

SEQ ID NO: 1170396 - DNA, 15 bp, Homo sapiens
actctcccagaactc

SEQ ID NO: 1170397 - DNA, 15 bp, Homo sapiens
tactctcccagaact

SEQ ID NO: 1170398 - DNA, 15 bp, Homo sapiens
atactctcccagaac

SEQ ID NO: 1170399 - DNA, 15 bp, Homo sapiens
catactctcccagaa

SEQ ID NO: 1170400 - DNA, 15 bp, Homo sapiens
tcatactctcccaga

SEQ ID NO: 1170401 - DNA, 15 bp, Homo sapiens
ttcatactctcccag

SEQ ID NO: 1170402 - DNA, 15 bp, Homo sapiens
tttcatactctccca

SEQ ID NO: 1170403 - DNA, 15 bp, Homo sapiens
ttttcatactctccc

SEQ ID NO: 1170404 - DNA, 15 bp, Homo sapiens
tttttcatactctcc

SEQ ID NO: 1170405 - DNA, 15 bp, Homo sapiens
gtttttcatactctc

SEQ ID NO: 1170406 - DNA, 15 bp, Homo sapiens
tgtttttcatactct

SEQ ID NO: 1170407 - DNA, 15 bp, Homo sapiens
ctgtttttcatactc

SEQ ID NO: 1170408 - DNA, 15 bp, Homo sapiens
gctgtttttcatact

SEQ ID NO: 1170409 - DNA, 15 bp, Homo sapiens
tgctgtttttcatac

SEQ ID NO: 1170410 - DNA, 15 bp, Homo sapiens
ctgctgtttttcata

SEQ ID NO: 1170411 - DNA, 15 bp, Homo sapiens
tctgctgtttttcat

SEQ ID NO: 1170412 - DNA, 15 bp, Homo sapiens
gtctgctgtttttca

SEQ ID NO: 1170413 - DNA, 15 bp, Homo sapiens
cgtctgctgtttttc

SEQ ID NO: 1170414 - DNA, 15 bp, Homo sapiens
tcgtctgctgttttt

SEQ ID NO: 1170415 - DNA, 15 bp, Homo sapiens
ttcgtctgctgtttt

SEQ ID NO: 1170416 - DNA, 15 bp, Homo sapiens
tttcgtctgctgttt

SEQ ID NO: 1170417 - DNA, 15 bp, Homo sapiens
ctttcgtctgctgtt

SEQ ID NO: 1170418 - DNA, 15 bp, Homo sapiens
actttcgtctgctgt

SEQ ID NO: 1170419 - DNA, 15 bp, Homo sapiens
cactttcgtctgctg

SEQ ID NO: 1170420 - DNA, 15 bp, Homo sapiens
tcactttcgtctgct

SEQ ID NO: 1170421 - DNA, 15 bp, Homo sapiens
gtcactttcgtctgc

SEQ ID NO: 1170422 - DNA, 15 bp, Homo sapiens
agtcactttcgtctg

SEQ ID NO: 1170423 - DNA, 15 bp, Homo sapiens
aagtcactttcgtct

SEQ ID NO: 1170424 - DNA, 15 bp, Homo sapiens
gaagtcactttcgtc

SEQ ID NO: 1170425 - DNA, 15 bp, Homo sapiens
ggaagtcactttcgt

SEQ ID NO: 1170426 - DNA, 15 bp, Homo sapiens
tggaagtcactttcg

SEQ ID NO: 1170427 - DNA, 15 bp, Homo sapiens
atggaagtcactttc

SEQ ID NO: 1170428 - DNA, 15 bp, Homo sapiens
aatggaagtcacttt

SEQ ID NO: 1170429 - DNA, 15 bp, Homo sapiens
caatggaagtcactt

SEQ ID NO: 1170430 - DNA, 15 bp, Homo sapiens
gcaatggaagtcact

SEQ ID NO: 1170431 - DNA, 15 bp, Homo sapiens
agcaatggaagtcac

SEQ ID NO: 1170432 - DNA, 15 bp, Homo sapiens
aagcaatggaagtca

SEQ ID NO: 1170433 - DNA, 15 bp, Homo sapiens
taagcaatggaagtc

SEQ ID NO: 1170434 - DNA, 15 bp, Homo sapiens
ttaagcaatggaagt

SEQ ID NO: 1170435 - DNA, 15 bp, Homo sapiens
attaagcaatggaag

SEQ ID NO: 1170436 - DNA, 15 bp, Homo sapiens
cattaagcaatggaa

SEQ ID NO: 1170437 - DNA, 15 bp, Homo sapiens
acattaagcaatgga

SEQ ID NO: 1170438 - DNA, 15 bp, Homo sapiens
aacattaagcaatgg

SEQ ID NO: 1170439 - DNA, 15 bp, Homo sapiens
aaacattaagcaatg

SEQ ID NO: 1170440 - DNA, 15 bp, Homo sapiens
caaacattaagcaat

SEQ ID NO: 1170441 - DNA, 15 bp, Homo sapiens
tcaaacattaagcaa

SEQ ID NO: 1170442 - DNA, 15 bp, Homo sapiens
ttcaaacattaagca

SEQ ID NO: 1170443 - DNA, 15 bp, Homo sapiens
attcaaacattaagc

SEQ ID NO: 1170444 - DNA, 15 bp, Homo sapiens
aattcaaacattaag

SEQ ID NO: 1170445 - DNA, 15 bp, Homo sapiens
taattcaaacattaa

SEQ ID NO: 1170446 - DNA, 15 bp, Homo sapiens
ataattcaaacatta

SEQ ID NO: 1170447 - DNA, 15 bp, Homo sapiens
gataattcaaacatt

SEQ ID NO: 1170448 - DNA, 15 bp, Homo sapiens
tgataattcaaacat

SEQ ID NO: 1170449 - DNA, 15 bp, Homo sapiens
gtgataattcaaaca

SEQ ID NO: 1170450 - DNA, 15 bp, Homo sapiens
ggtgataattcaaac

SEQ ID NO: 1170451 - DNA, 15 bp, Homo sapiens
tggtgataattcaaa

SEQ ID NO: 1170452 - DNA, 15 bp, Homo sapiens
atggtgataattcaa

SEQ ID NO: 1170453 - DNA, 15 bp, Homo sapiens
tatggtgataattca

SEQ ID NO: 1170454 - DNA, 15 bp, Homo sapiens
ttatggtgataattc

SEQ ID NO: 1170455 - DNA, 15 bp, Homo sapiens
tttatggtgataatt

SEQ ID NO: 1170456 - DNA, 15 bp, Homo sapiens
ctttatggtgataat

SEQ ID NO: 1170457 - DNA, 15 bp, Homo sapiens
tctttatggtgataa

SEQ ID NO: 1170458 - DNA, 15 bp, Homo sapiens
gtctttatggtgata

SEQ ID NO: 1170459 - DNA, 15 bp, Homo sapiens
ggtctttatggtgat

SEQ ID NO: 1170460 - DNA, 15 bp, Homo sapiens
gggtctttatggtga

SEQ ID NO: 1170461 - DNA, 15 bp, Homo sapiens
tgggtctttatggtg

SEQ ID NO: 1170462 - DNA, 15 bp, Homo sapiens
ttgggtctttatggt

SEQ ID NO: 1170463 - DNA, 15 bp, Homo sapiens
tttgggtctttatgg

SEQ ID NO: 1170464 - DNA, 15 bp, Homo sapiens
ttttgggtctttatg

SEQ ID NO: 1170465 - DNA, 15 bp, Homo sapiens
attttgggtctttat

SEQ ID NO: 1170466 - DNA, 15 bp, Homo sapiens
aattttgggtcttta

SEQ ID NO: 1170467 - DNA, 15 bp, Homo sapiens
taattttgggtcttt

SEQ ID NO: 1170468 - DNA, 15 bp, Homo sapiens
ataattttgggtctt

SEQ ID NO: 1170469 - DNA, 15 bp, Homo sapiens
tataattttgggtct

SEQ ID NO: 1170470 - DNA, 15 bp, Homo sapiens
gtataattttgggtc

SEQ ID NO: 1170471 - DNA, 15 bp, Homo sapiens
tgtataattttgggt

SEQ ID NO: 1170472 - DNA, 15 bp, Homo sapiens
ctgtataattttggg

SEQ ID NO: 1170473 - DNA, 15 bp, Homo sapiens
tctgtataattttgg

SEQ ID NO: 1170474 - DNA, 15 bp, Homo sapiens
ttctgtataattttg

SEQ ID NO: 1170475 - DNA, 15 bp, Homo sapiens
tttctgtataatttt

SEQ ID NO: 1170476 - DNA, 15 bp, Homo sapiens
ttttctgtataattt

SEQ ID NO: 1170477 - DNA, 15 bp, Homo sapiens
tttttctgtataatt

SEQ ID NO: 1170478 - DNA, 15 bp, Homo sapiens
ttttttctgtataat

SEQ ID NO: 1170479 - DNA, 15 bp, Homo sapiens
tttttttctgtataa

SEQ ID NO: 1170480 - DNA, 15 bp, Homo sapiens
atttttttctgtata

SEQ ID NO: 1170481 - DNA, 15 bp, Homo sapiens
catttttttctgtat

SEQ ID NO: 1170482 - DNA, 15 bp, Homo sapiens
ccatttttttctgta

SEQ ID NO: 1170483 - DNA, 15 bp, Homo sapiens
cccatttttttctgt

SEQ ID NO: 1170484 - DNA, 15 bp, Homo sapiens
tcccatttttttctg

SEQ ID NO: 1170485 - DNA, 15 bp, Homo sapiens
ttcccatttttttct

SEQ ID NO: 1170486 - DNA, 15 bp, Homo sapiens
tttcccatttttttc

SEQ ID NO: 1170487 - DNA, 15 bp, Homo sapiens
ctttcccattttttt

SEQ ID NO: 1170488 - DNA, 15 bp, Homo sapiens
tctttcccatttttt

SEQ ID NO: 1170489 - DNA, 15 bp, Homo sapiens
atctttcccattttt

SEQ ID NO: 1170490 - DNA, 15 bp, Homo sapiens
tatctttcccatttt

SEQ ID NO: 1170491 - DNA, 15 bp, Homo sapiens
ttatctttcccattt

SEQ ID NO: 1170492 - DNA, 15 bp, Homo sapiens
tttatctttcccatt

SEQ ID NO: 1170493 - DNA, 15 bp, Homo sapiens
gtttatctttcccat

SEQ ID NO: 1170494 - DNA, 15 bp, Homo sapiens
tgtttatctttccca

SEQ ID NO: 1170495 - DNA, 15 bp, Homo sapiens
gtgtttatctttccc

SEQ ID NO: 1170496 - DNA, 15 bp, Homo sapiens
ggtgtttatctttcc

SEQ ID NO: 1170497 - DNA, 15 bp, Homo sapiens
aggtgtttatctttc

SEQ ID NO: 1170498 - DNA, 15 bp, Homo sapiens
taggtgtttatcttt

SEQ ID NO: 1170499 - DNA, 15 bp, Homo sapiens
ttaggtgtttatctt

SEQ ID NO: 1170500 - DNA, 15 bp, Homo sapiens
attaggtgtttatct

SEQ ID NO: 1170501 - DNA, 15 bp, Homo sapiens
aattaggtgtttatc

SEQ ID NO: 1170502 - DNA, 15 bp, Homo sapiens
gaattaggtgtttat

SEQ ID NO: 1170503 - DNA, 15 bp, Homo sapiens
tgaattaggtgttta

SEQ ID NO: 1170504 - DNA, 15 bp, Homo sapiens
ctgaattaggtgttt

SEQ ID NO: 1170505 - DNA, 15 bp, Homo sapiens
cctgaattaggtgtt

SEQ ID NO: 1170506 - DNA, 15 bp, Homo sapiens
tcctgaattaggtgt

SEQ ID NO: 1170507 - DNA, 15 bp, Homo sapiens
ctcctgaattaggtg

SEQ ID NO: 1170508 - DNA, 15 bp, Homo sapiens
tctcctgaattaggt

SEQ ID NO: 1170509 - DNA, 15 bp, Homo sapiens
ctctcctgaattagg

SEQ ID NO: 1170510 - DNA, 15 bp, Homo sapiens
cctctcctgaattag

SEQ ID NO: 1170511 - DNA, 15 bp, Homo sapiens
ccctctcctgaatta

SEQ ID NO: 1170512 - DNA, 15 bp, Homo sapiens
cccctctcctgaatt

SEQ ID NO: 1170513 - DNA, 15 bp, Homo sapiens
acccctctcctgaat

SEQ ID NO: 1170514 - DNA, 15 bp, Homo sapiens
aacccctctcctgaa

SEQ ID NO: 1170515 - DNA, 15 bp, Homo sapiens
taacccctctcctga

SEQ ID NO: 1170516 - DNA, 15 bp, Homo sapiens
ataacccctctcctg

SEQ ID NO: 1170517 - DNA, 15 bp, Homo sapiens
gataacccctctcct

SEQ ID NO: 1170518 - DNA, 15 bp, Homo sapiens
agataacccctctcc

SEQ ID NO: 1170519 - DNA, 15 bp, Homo sapiens
gagataacccctctc

SEQ ID NO: 1170520 - DNA, 15 bp, Homo sapiens
agagataacccctct

SEQ ID NO: 1170521 - DNA, 15 bp, Homo sapiens
cagagataacccctc

SEQ ID NO: 1170522 - DNA, 15 bp, Homo sapiens
ccagagataacccct

SEQ ID NO: 1170523 - DNA, 15 bp, Homo sapiens
cccagagataacccc

SEQ ID NO: 1170524 - DNA, 15 bp, Homo sapiens
ccccagagataaccc

SEQ ID NO: 1170525 - DNA, 15 bp, Homo sapiens
tccccagagataacc

SEQ ID NO: 1170526 - DNA, 15 bp, Homo sapiens
ctccccagagataac

SEQ ID NO: 1170527 - DNA, 15 bp, Homo sapiens
gctccccagagataa

SEQ ID NO: 1170528 - DNA, 15 bp, Homo sapiens
cgctccccagagata

SEQ ID NO: 1170529 - DNA, 15 bp, Homo sapiens
ccgctccccagagat

SEQ ID NO: 1170530 - DNA, 15 bp, Homo sapiens
cccgctccccagaga

SEQ ID NO: 1170531 - DNA, 15 bp, Homo sapiens
ccccgctccccagag

SEQ ID NO: 1170532 - DNA, 15 bp, Homo sapiens
tccccgctccccaga

SEQ ID NO: 1170533 - DNA, 15 bp, Homo sapiens
ctccccgctccccag

SEQ ID NO: 1170534 - DNA, 15 bp, Homo sapiens
tctccccgctcccca

SEQ ID NO: 1170535 - DNA, 15 bp, Homo sapiens
tctctccccgctccc

SEQ ID NO: 1170536 - DNA, 15 bp, Homo sapiens
atctctccccgctcc

SEQ ID NO: 1170537 - DNA, 15 bp, Homo sapiens
catctctccccgctc

SEQ ID NO: 1170538 - DNA, 15 bp, Homo sapiens
tcatctctccccgct

SEQ ID NO: 1170539 - DNA, 15 bp, Homo sapiens
ttcatctctccccgc

SEQ ID NO: 1170540 - DNA, 15 bp, Homo sapiens
tttcatctctccccg

SEQ ID NO: 1170541 - DNA, 15 bp, Homo sapiens
ctttcatctctcccc

SEQ ID NO: 1170542 - DNA, 15 bp, Homo sapiens
cctttcatctctccc

SEQ ID NO: 1170543 - DNA, 15 bp, Homo sapiens
tcctttcatctctcc

SEQ ID NO: 1170544 - DNA, 15 bp, Homo sapiens
ctcctttcatctctc

SEQ ID NO: 1170545 - DNA, 15 bp, Homo sapiens
tctcctttcatctct

SEQ ID NO: 1170546 - DNA, 15 bp, Homo sapiens
ttctcctttcatctc

SEQ ID NO: 1170547 - DNA, 15 bp, Homo sapiens
tttctcctttcatct

SEQ ID NO: 1170548 - DNA, 15 bp, Homo sapiens
ctttctcctttcatc

SEQ ID NO: 1170549 - DNA, 15 bp, Homo sapiens
cctttctcctttcat

SEQ ID NO: 1170550 - DNA, 15 bp, Homo sapiens
ccctttctcctttca

SEQ ID NO: 1170551 - DNA, 15 bp, Homo sapiens
cccctttctcctttc

SEQ ID NO: 1170552 - DNA, 15 bp, Homo sapiens
tcccctttctccttt

SEQ ID NO: 1170553 - DNA, 15 bp, Homo sapiens
gtcccctttctcctt

SEQ ID NO: 1170554 - DNA, 15 bp, Homo sapiens
tgtcccctttctcct

SEQ ID NO: 1170555 - DNA, 15 bp, Homo sapiens
gtgtcccctttctcc

SEQ ID NO: 1170556 - DNA, 15 bp, Homo sapiens
tgtgtcccctttctc

SEQ ID NO: 1170557 - DNA, 15 bp, Homo sapiens
ctgtgtcccctttct

SEQ ID NO: 1170558 - DNA, 15 bp, Homo sapiens
actgtgtcccctttc

SEQ ID NO: 1170559 - DNA, 15 bp, Homo sapiens
tactgtgtccccttt

SEQ ID NO: 1170560 - DNA, 15 bp, Homo sapiens
ctactgtgtcccctt

SEQ ID NO: 1170561 - DNA, 15 bp, Homo sapiens
cctactgtgtcccct

SEQ ID NO: 1170562 - DNA, 15 bp, Homo sapiens
tcctactgtgtcccc

SEQ ID NO: 1170563 - DNA, 15 bp, Homo sapiens
ctcctactgtgtccc

SEQ ID NO: 1170564 - DNA, 15 bp, Homo sapiens
actcctactgtgtcc

SEQ ID NO: 1170565 - DNA, 15 bp, Homo sapiens
cactcctactgtgtc

SEQ ID NO: 1170566 - DNA, 15 bp, Homo sapiens
gcactcctactgtgt

SEQ ID NO: 1170567 - DNA, 15 bp, Homo sapiens
cgcactcctactgtg

SEQ ID NO: 1170568 - DNA, 15 bp, Homo sapiens
ccgcactcctactgt

SEQ ID NO: 1170569 - DNA, 15 bp, Homo sapiens
cccgcactcctactg

SEQ ID NO: 1170570 - DNA, 15 bp, Homo sapiens
ccccgcactcctact

SEQ ID NO: 1170571 - DNA, 15 bp, Homo sapiens
tccccgcactcctac

SEQ ID NO: 1170572 - DNA, 15 bp, Homo sapiens
atccccgcactccta

SEQ ID NO: 1170573 - DNA, 15 bp, Homo sapiens
gatccccgcactcct

SEQ ID NO: 1170574 - DNA, 15 bp, Homo sapiens
tgatccccgcactcc

SEQ ID NO: 1170575 - DNA, 15 bp, Homo sapiens
ttgatccccgcactc

SEQ ID NO: 1170576 - DNA, 15 bp, Homo sapiens
cttgatccccgcact

SEQ ID NO: 1170577 - DNA, 15 bp, Homo sapiens
gcttgatccccgcac

SEQ ID NO: 1170578 - DNA, 15 bp, Homo sapiens
agcttgatccccgca

SEQ ID NO: 1170579 - DNA, 15 bp, Homo sapiens
aagcttgatccccgc

SEQ ID NO: 1170580 - DNA, 15 bp, Homo sapiens
gaagcttgatccccg

SEQ ID NO: 1170581 - DNA, 15 bp, Homo sapiens
tgaagcttgatcccc

SEQ ID NO: 1170582 - DNA, 15 bp, Homo sapiens
ttgaagcttgatccc

SEQ ID NO: 1170583 - DNA, 15 bp, Homo sapiens
tttgaagcttgatcc

SEQ ID NO: 1170584 - DNA, 15 bp, Homo sapiens
ctttgaagcttgatc

SEQ ID NO: 1170585 - DNA, 15 bp, Homo sapiens
gctttgaagcttgat

SEQ ID NO: 1170586 - DNA, 15 bp, Homo sapiens
agctttgaagcttga

SEQ ID NO: 1170587 - DNA, 15 bp, Homo sapiens
aagctttgaagcttg

SEQ ID NO: 1170588 - DNA, 15 bp, Homo sapiens
aaagctttgaagctt

SEQ ID NO: 1170589 - DNA, 15 bp, Homo sapiens
aaaagctttgaagct

SEQ ID NO: 1170590 - DNA, 15 bp, Homo sapiens
caaaagctttgaagc

SEQ ID NO: 1170591 - DNA, 15 bp, Homo sapiens
ccaaaagctttgaag

SEQ ID NO: 1170592 - DNA, 15 bp, Homo sapiens
accaaaagctttgaa

SEQ ID NO: 1170593 - DNA, 15 bp, Homo sapiens
taccaaaagctttga

SEQ ID NO: 1170594 - DNA, 15 bp, Homo sapiens
ttaccaaaagctttg

SEQ ID NO: 1170595 - DNA, 15 bp, Homo sapiens
attaccaaaagcttt

SEQ ID NO: 1170596 - DNA, 15 bp, Homo sapiens
aattaccaaaagctt

SEQ ID NO: 1170597 - DNA, 15 bp, Homo sapiens
caattaccaaaagct

SEQ ID NO: 1170598 - DNA, 15 bp, Homo sapiens
ccaattaccaaaagc

SEQ ID NO: 1170599 - DNA, 15 bp, Homo sapiens
accaattaccaaaag

SEQ ID NO: 1170600 - DNA, 15 bp, Homo sapiens
caccaattaccaaaa

SEQ ID NO: 1170601 - DNA, 15 bp, Homo sapiens
ccaccaattaccaaa

SEQ ID NO: 1170602 - DNA, 15 bp, Homo sapiens
accaccaattaccaa

SEQ ID NO: 1170603 - DNA, 15 bp, Homo sapiens
caccaccaattacca

SEQ ID NO: 1170604 - DNA, 15 bp, Homo sapiens
acaccaccaattacc

SEQ ID NO: 1170605 - DNA, 15 bp, Homo sapiens
cacaccaccaattac

SEQ ID NO: 1170606 - DNA, 15 bp, Homo sapiens
acacaccaccaatta

SEQ ID NO: 1170607 - DNA, 15 bp, Homo sapiens
tacacaccaccaatt

SEQ ID NO: 1170608 - DNA, 15 bp, Homo sapiens
gtacacaccaccaat

SEQ ID NO: 1170609 - DNA, 15 bp, Homo sapiens
tgtacacaccaccaa

SEQ ID NO: 1170610 - DNA, 15 bp, Homo sapiens
atgtacacaccacca

SEQ ID NO: 1170611 - DNA, 15 bp, Homo sapiens
catgtacacaccacc

SEQ ID NO: 1170612 - DNA, 15 bp, Homo sapiens
tcatgtacacaccac

SEQ ID NO: 1170613 - DNA, 15 bp, Homo sapiens
ctcatgtacacacca

SEQ ID NO: 1170614 - DNA, 15 bp, Homo sapiens
tctcatgtacacacc

SEQ ID NO: 1170615 - DNA, 15 bp, Homo sapiens
ctctcatgtacacac

SEQ ID NO: 1170616 - DNA, 15 bp, Homo sapiens
actctcatgtacaca

SEQ ID NO: 1170617 - DNA, 15 bp, Homo sapiens
aactctcatgtacac

SEQ ID NO: 1170618 - DNA, 15 bp, Homo sapiens
gaactctcatgtaca

SEQ ID NO: 1170619 - DNA, 15 bp, Homo sapiens
agaactctcatgtac

SEQ ID NO: 1170620 - DNA, 15 bp, Homo sapiens
aagaactctcatgta

SEQ ID NO: 1170621 - DNA, 15 bp, Homo sapiens
aaagaactctcatgt

SEQ ID NO: 1170622 - DNA, 15 bp, Homo sapiens
taaagaactctcatg

SEQ ID NO: 1170623 - DNA, 15 bp, Homo sapiens
ttaaagaactctcat

SEQ ID NO: 1170624 - DNA, 15 bp, Homo sapiens
cttaaagaactctca

SEQ ID NO: 1170625 - DNA, 15 bp, Homo sapiens
gcttaaagaactctc

SEQ ID NO: 1170626 - DNA, 15 bp, Homo sapiens
agcttaaagaactct

SEQ ID NO: 1170627 - DNA, 15 bp, Homo sapiens
cagcttaaagaactc

SEQ ID NO: 1170628 - DNA, 15 bp, Homo sapiens
tcagcttaaagaact

SEQ ID NO: 1170629 - DNA, 15 bp, Homo sapiens
atcagcttaaagaac

SEQ ID NO: 1170630 - DNA, 15 bp, Homo sapiens
aatcagcttaaagaa

SEQ ID NO: 1170631 - DNA, 15 bp, Homo sapiens
aaatcagcttaaaga

SEQ ID NO: 1170632 - DNA, 15 bp, Homo sapiens
caaatcagcttaaag

SEQ ID NO: 1170633 - DNA, 15 bp, Homo sapiens
acaaatcagcttaaa

SEQ ID NO: 1170634 - DNA, 15 bp, Homo sapiens
cacaaatcagcttaa

SEQ ID NO: 1170635 - DNA, 15 bp, Homo sapiens
acacaaatcagctta

SEQ ID NO: 1170636 - DNA, 15 bp, Homo sapiens
tacacaaatcagctt

SEQ ID NO: 1170637 - DNA, 15 bp, Homo sapiens
gtacacaaatcagct

SEQ ID NO: 1170638 - DNA, 15 bp, Homo sapiens
cgtacacaaatcagc

SEQ ID NO: 1170639 - DNA, 15 bp, Homo sapiens
tcgtacacaaatcag

SEQ ID NO: 1170640 - DNA, 15 bp, Homo sapiens
atcgtacacaaatca

SEQ ID NO: 1170641 - DNA, 15 bp, Homo sapiens
tatcgtacacaaatc

SEQ ID NO: 1170642 - DNA, 15 bp, Homo sapiens
atatcgtacacaaat

SEQ ID NO: 1170643 - DNA, 15 bp, Homo sapiens
aatatcgtacacaaa

SEQ ID NO: 1170644 - DNA, 15 bp, Homo sapiens
aaatatcgtacacaa

SEQ ID NO: 1170645 - DNA, 15 bp, Homo sapiens
gaaatatcgtacaca

SEQ ID NO: 1170646 - DNA, 15 bp, Homo sapiens
tgaaatatcgtacac

SEQ ID NO: 1170647 - DNA, 15 bp, Homo sapiens
gtgaaatatcgtaca

SEQ ID NO: 1170648 - DNA, 15 bp, Homo sapiens
tgtgaaatatcgtac

SEQ ID NO: 1170649 - DNA, 15 bp, Homo sapiens
ttgtgaaatatcgta

SEQ ID NO: 1170650 - DNA, 15 bp, Homo sapiens
attgtgaaatatcgt

SEQ ID NO: 1170651 - DNA, 15 bp, Homo sapiens
tattgtgaaatatcg

SEQ ID NO: 1170652 - DNA, 15 bp, Homo sapiens
atattgtgaaatatc

SEQ ID NO: 1170653 - DNA, 15 bp, Homo sapiens
catattgtgaaatat

SEQ ID NO: 1170654 - DNA, 15 bp, Homo sapiens
acatattgtgaaata

SEQ ID NO: 1170655 - DNA, 15 bp, Homo sapiens
aacatattgtgaaat

SEQ ID NO: 1170656 - DNA, 15 bp, Homo sapiens
caacatattgtgaaa

SEQ ID NO: 1170657 - DNA, 15 bp, Homo sapiens
acaacatattgtgaa

SEQ ID NO: 1170658 - DNA, 15 bp, Homo sapiens
gacaacatattgtga

SEQ ID NO: 1170659 - DNA, 15 bp, Homo sapiens
tgacaacatattgtg

SEQ ID NO: 1170660 - DNA, 15 bp, Homo sapiens
ttgacaacatattgt

SEQ ID NO: 1170661 - DNA, 15 bp, Homo sapiens
tttgacaacatattg

SEQ ID NO: 1170662 - DNA, 15 bp, Homo sapiens
atttgacaacatatt

SEQ ID NO: 1170663 - DNA, 15 bp, Homo sapiens
aatttgacaacatat

SEQ ID NO: 1170664 - DNA, 15 bp, Homo sapiens
caatttgacaacata

SEQ ID NO: 1170665 - DNA, 15 bp, Homo sapiens
tcaatttgacaacat

SEQ ID NO: 1170666 - DNA, 15 bp, Homo sapiens
ctcaatttgacaaca

SEQ ID NO: 1170667 - DNA, 15 bp, Homo sapiens
tctcaatttgacaac

SEQ ID NO: 1170668 - DNA, 15 bp, Homo sapiens
ctctcaatttgacaa

SEQ ID NO: 1170669 - DNA, 15 bp, Homo sapiens
tctctcaatttgaca

SEQ ID NO: 1170670 - DNA, 15 bp, Homo sapiens
ctctctcaatttgac

SEQ ID NO: 1170671 - DNA, 15 bp, Homo sapiens
gctctctcaatttga

SEQ ID NO: 1170672 - DNA, 15 bp, Homo sapiens
tgctctctcaatttg

SEQ ID NO: 1170673 - DNA, 15 bp, Homo sapiens
ttgctctctcaattt

SEQ ID NO: 1170674 - DNA, 15 bp, Homo sapiens
cttgctctctcaatt

SEQ ID NO: 1170675 - DNA, 15 bp, Homo sapiens
gcttgctctctcaat

SEQ ID NO: 1170676 - DNA, 15 bp, Homo sapiens
ggcttgctctctcaa

SEQ ID NO: 1170677 - DNA, 15 bp, Homo sapiens
tggcttgctctctca

SEQ ID NO: 1170678 - DNA, 15 bp, Homo sapiens
ctggcttgctctctc

SEQ ID NO: 1170679 - DNA, 15 bp, Homo sapiens
actggcttgctctct

SEQ ID NO: 1170680 - DNA, 15 bp, Homo sapiens
cactggcttgctctc

SEQ ID NO: 1170681 - DNA, 15 bp, Homo sapiens
tcactggcttgctct

SEQ ID NO: 1170682 - DNA, 15 bp, Homo sapiens
ctcactggcttgctc

SEQ ID NO: 1170683 - DNA, 15 bp, Homo sapiens
actcactggcttgct

SEQ ID NO: 1170684 - DNA, 15 bp, Homo sapiens
tactcactggcttgc

SEQ ID NO: 1170685 - DNA, 15 bp, Homo sapiens
ctactcactggcttg

SEQ ID NO: 1170686 - DNA, 15 bp, Homo sapiens
tctactcactggctt

SEQ ID NO: 1170687 - DNA, 15 bp, Homo sapiens
ttctactcactggct

SEQ ID NO: 1170688 - DNA, 15 bp, Homo sapiens
gttctactcactggc

SEQ ID NO: 1170689 - DNA, 15 bp, Homo sapiens
agttctactcactgg

SEQ ID NO: 1170690 - DNA, 15 bp, Homo sapiens
gagttctactcactg

SEQ ID NO: 1170691 - DNA, 15 bp, Homo sapiens
ggagttctactcact

SEQ ID NO: 1170692 - DNA, 15 bp, Homo sapiens
tggagttctactcac

SEQ ID NO: 1170693 - DNA, 15 bp, Homo sapiens
ctggagttctactca

SEQ ID NO: 1170694 - DNA, 15 bp, Homo sapiens
tctggagttctactc

SEQ ID NO: 1170695 - DNA, 15 bp, Homo sapiens
ctctggagttctact

SEQ ID NO: 1170696 - DNA, 15 bp, Homo sapiens
actctggagttctac

SEQ ID NO: 1170697 - DNA, 15 bp, Homo sapiens
aactctggagttcta

SEQ ID NO: 1170698 - DNA, 15 bp, Homo sapiens
gaactctggagttct

SEQ ID NO: 1170699 - DNA, 15 bp, Homo sapiens
ggaactctggagttc

SEQ ID NO: 1170700 - DNA, 15 bp, Homo sapiens
tggaactctggagtt

SEQ ID NO: 1170701 - DNA, 15 bp, Homo sapiens
atggaactctggagt

SEQ ID NO: 1170702 - DNA, 15 bp, Homo sapiens
aatggaactctggag

SEQ ID NO: 1170703 - DNA, 15 bp, Homo sapiens
gaatggaactctgga

SEQ ID NO: 1170704 - DNA, 15 bp, Homo sapiens
ggaatggaactctgg

SEQ ID NO: 1170705 - DNA, 15 bp, Homo sapiens
gggaatggaactctg

SEQ ID NO: 1170706 - DNA, 15 bp, Homo sapiens
tgggaatggaactct

SEQ ID NO: 1170707 - DNA, 15 bp, Homo sapiens
gtgggaatggaactc

SEQ ID NO: 1170708 - DNA, 15 bp, Homo sapiens
ggtgggaatggaact

SEQ ID NO: 1170709 - DNA, 15 bp, Homo sapiens
aggtgggaatggaac

SEQ ID NO: 1170710 - DNA, 15 bp, Homo sapiens
gaggtgggaatggaa

SEQ ID NO: 1170711 - DNA, 15 bp, Homo sapiens
tgaggtgggaatgga

SEQ ID NO: 1170712 - DNA, 15 bp, Homo sapiens
ttgaggtgggaatgg

SEQ ID NO: 1170713 - DNA, 15 bp, Homo sapiens
gttgaggtgggaatg

SEQ ID NO: 1170714 - DNA, 15 bp, Homo sapiens
ggttgaggtgggaat

SEQ ID NO: 1170715 - DNA, 15 bp, Homo sapiens
gggttgaggtgggaa

SEQ ID NO: 1170716 - DNA, 15 bp, Homo sapiens
ggggttgaggtggga

SEQ ID NO: 1170717 - DNA, 15 bp, Homo sapiens
tggggttgaggtggg

SEQ ID NO: 1170718 - DNA, 15 bp, Homo sapiens
ctggggttgaggtgg

SEQ ID NO: 1170719 - DNA, 15 bp, Homo sapiens
actggggttgaggtg

SEQ ID NO: 1170720 - DNA, 15 bp, Homo sapiens
aactggggttgaggt

SEQ ID NO: 1170721 - DNA, 15 bp, Homo sapiens
caactggggttgagg

SEQ ID NO: 1170722 - DNA, 15 bp, Homo sapiens
gcaactggggttgag

SEQ ID NO: 1170723 - DNA, 15 bp, Homo sapiens
ggcaactggggttga

SEQ ID NO: 1170724 - DNA, 15 bp, Homo sapiens
tggcaactggggttg

SEQ ID NO: 1170725 - DNA, 15 bp, Homo sapiens
ttggcaactggggtt

SEQ ID NO: 1170726 - DNA, 15 bp, Homo sapiens
tttggcaactggggt

SEQ ID NO: 1170727 - DNA, 15 bp, Homo sapiens
ctttggcaactgggg

SEQ ID NO: 1170728 - DNA, 15 bp, Homo sapiens
gctttggcaactggg

SEQ ID NO: 1170729 - DNA, 15 bp, Homo sapiens
ggctttggcaactgg

SEQ ID NO: 1170730 - DNA, 15 bp, Homo sapiens
gggctttggcaactg

SEQ ID NO: 1170731 - DNA, 15 bp, Homo sapiens
ggggctttggcaact

SEQ ID NO: 1170732 - DNA, 15 bp, Homo sapiens
gggggctttggcaac

SEQ ID NO: 1170733 - DNA, 15 bp, Homo sapiens
tgggggctttggcaa

SEQ ID NO: 1170734 - DNA, 15 bp, Homo sapiens
ttgggggctttggca

SEQ ID NO: 1170735 - DNA, 15 bp, Homo sapiens
cttgggggctttggc

SEQ ID NO: 1170736 - DNA, 15 bp, Homo sapiens
gcttgggggctttgg

SEQ ID NO: 1170737 - DNA, 15 bp, Homo sapiens
tgcttgggggctttg

SEQ ID NO: 1170738 - DNA, 15 bp, Homo sapiens
ctgcttgggggcttt

SEQ ID NO: 1170739 - DNA, 15 bp, Homo sapiens
cctgcttgggggctt

SEQ ID NO: 1170740 - DNA, 15 bp, Homo sapiens
tcctgcttgggggct

SEQ ID NO: 1170741 - DNA, 15 bp, Homo sapiens
ctcctgcttgggggc

SEQ ID NO: 1170742 - DNA, 15 bp, Homo sapiens
cctcctgcttggggg

SEQ ID NO: 1170743 - DNA, 15 bp, Homo sapiens
ccctcctgcttgggg

SEQ ID NO: 1170744 - DNA, 15 bp, Homo sapiens
tccctcctgcttggg

SEQ ID NO: 1170745 - DNA, 15 bp, Homo sapiens
ctccctcctgcttgg

SEQ ID NO: 1170746 - DNA, 15 bp, Homo sapiens
cctccctcctgcttg

SEQ ID NO: 1170747 - DNA, 15 bp, Homo sapiens
acctccctcctgctt

SEQ ID NO: 1170748 - DNA, 15 bp, Homo sapiens
aacctccctcctgct

SEQ ID NO: 1170749 - DNA, 15 bp, Homo sapiens
caacctccctcctgc

SEQ ID NO: 1170750 - DNA, 15 bp, Homo sapiens
tcaacctccctcctg

SEQ ID NO: 1170751 - DNA, 15 bp, Homo sapiens
ctcaacctccctcct

SEQ ID NO: 1170752 - DNA, 15 bp, Homo sapiens
cctcaacctccctcc

SEQ ID NO: 1170753 - DNA, 15 bp, Homo sapiens
ccctcaacctccctc

SEQ ID NO: 1170754 - DNA, 15 bp, Homo sapiens
tccctcaacctccct

SEQ ID NO: 1170755 - DNA, 15 bp, Homo sapiens
ctccctcaacctccc

SEQ ID NO: 1170756 - DNA, 15 bp, Homo sapiens
tctccctcaacctcc

SEQ ID NO: 1170757 - DNA, 15 bp, Homo sapiens
ctctccctcaacctc

SEQ ID NO: 1170758 - DNA, 15 bp, Homo sapiens
cctctccctcaacct

SEQ ID NO: 1170759 - DNA, 15 bp, Homo sapiens
tcctctccctcaacc

SEQ ID NO: 1170760 - DNA, 15 bp, Homo sapiens
ctcctctccctcaac

SEQ ID NO: 1170761 - DNA, 15 bp, Homo sapiens
cctcctctccctcaa

SEQ ID NO: 1170762 - DNA, 15 bp, Homo sapiens
acctcctctccctca

SEQ ID NO: 1170763 - DNA, 15 bp, Homo sapiens
tacctcctctccctc

SEQ ID NO: 1170764 - DNA, 15 bp, Homo sapiens
ttacctcctctccct

SEQ ID NO: 1170765 - DNA, 15 bp, Homo sapiens
cttacctcctctccc

SEQ ID NO: 1170766 - DNA, 15 bp, Homo sapiens
tcttacctcctctcc

SEQ ID NO: 1170767 - DNA, 15 bp, Homo sapiens
ttcttacctcctctc

SEQ ID NO: 1170768 - DNA, 15 bp, Homo sapiens
cttcttacctcctct

SEQ ID NO: 1170769 - DNA, 15 bp, Homo sapiens
ccttcttacctcctc

SEQ ID NO: 1170770 - DNA, 15 bp, Homo sapiens
accttcttacctcct

SEQ ID NO: 1170771 - DNA, 15 bp, Homo sapiens
gaccttcttacctcc

SEQ ID NO: 1170772 - DNA, 15 bp, Homo sapiens
agaccttcttacctc

SEQ ID NO: 1170773 - DNA, 15 bp, Homo sapiens
cagaccttcttacct

SEQ ID NO: 1170774 - DNA, 15 bp, Homo sapiens
acagaccttcttacc

SEQ ID NO: 1170775 - DNA, 15 bp, Homo sapiens
cacagaccttcttac

SEQ ID NO: 1170776 - DNA, 15 bp, Homo sapiens
gcacagaccttctta

SEQ ID NO: 1170777 - DNA, 15 bp, Homo sapiens
ggcacagaccttctt

SEQ ID NO: 1170778 - DNA, 15 bp, Homo sapiens
gggcacagaccttct

SEQ ID NO: 1170779 - DNA, 15 bp, Homo sapiens
ggggcacagaccttc

SEQ ID NO: 1170780 - DNA, 15 bp, Homo sapiens
tggggcacagacctt

SEQ ID NO: 1170781 - DNA, 15 bp, Homo sapiens
ttggggcacagacct

SEQ ID NO: 1170782 - DNA, 15 bp, Homo sapiens
cttggggcacagacc

SEQ ID NO: 1170783 - DNA, 15 bp, Homo sapiens
gcttggggcacagac

SEQ ID NO: 1170784 - DNA, 15 bp, Homo sapiens
agcttggggcacaga

SEQ ID NO: 1170785 - DNA, 15 bp, Homo sapiens
gagcttggggcacag

SEQ ID NO: 1170786 - DNA, 15 bp, Homo sapiens
ggagcttggggcaca

SEQ ID NO: 1170787 - DNA, 15 bp, Homo sapiens
aggagcttggggcac

SEQ ID NO: 1170788 - DNA, 15 bp, Homo sapiens
caggagcttggggca

SEQ ID NO: 1170789 - DNA, 15 bp, Homo sapiens
tcaggagcttggggc

SEQ ID NO: 1170790 - DNA, 15 bp, Homo sapiens
ctcaggagcttgggg

SEQ ID NO: 1170791 - DNA, 15 bp, Homo sapiens
cctcaggagcttggg

SEQ ID NO: 1170792 - DNA, 15 bp, Homo sapiens
tcctcaggagcttgg

SEQ ID NO: 1170793 - DNA, 15 bp, Homo sapiens
ctcctcaggagcttg

SEQ ID NO: 1170794 - DNA, 15 bp, Homo sapiens
tctcctcaggagctt

SEQ ID NO: 1170795 - DNA, 15 bp, Homo sapiens
atctcctcaggagct

SEQ ID NO: 1170796 - DNA, 15 bp, Homo sapiens
aatctcctcaggagc

SEQ ID NO: 1170797 - DNA, 15 bp, Homo sapiens
caatctcctcaggag

SEQ ID NO: 1170798 - DNA, 15 bp, Homo sapiens
tcaatctcctcagga

SEQ ID NO: 1170799 - DNA, 15 bp, Homo sapiens
ttcaatctcctcagg

SEQ ID NO: 1170800 - DNA, 15 bp, Homo sapiens
tttcaatctcctcag

SEQ ID NO: 1170801 - DNA, 15 bp, Homo sapiens
ctttcaatctcctca

SEQ ID NO: 1170802 - DNA, 15 bp, Homo sapiens
gctttcaatctcctc

SEQ ID NO: 1170803 - DNA, 15 bp, Homo sapiens
tgctttcaatctcct

SEQ ID NO: 1170804 - DNA, 15 bp, Homo sapiens
ctgctttcaatctcc

SEQ ID NO: 1170805 - DNA, 15 bp, Homo sapiens
gctgctttcaatctc

SEQ ID NO: 1170806 - DNA, 15 bp, Homo sapiens
agctgctttcaatct

SEQ ID NO: 1170807 - DNA, 15 bp, Homo sapiens
gagctgctttcaatc

SEQ ID NO: 1170808 - DNA, 15 bp, Homo sapiens
cgagctgctttcaat

SEQ ID NO: 1170809 - DNA, 15 bp, Homo sapiens
ccgagctgctttcaa

SEQ ID NO: 1170810 - DNA, 15 bp, Homo sapiens
tccgagctgctttca

SEQ ID NO: 1170811 - DNA, 15 bp, Homo sapiens
gtccgagctgctttc

SEQ ID NO: 1170812 - DNA, 15 bp, Homo sapiens
tgtccgagctgcttt

SEQ ID NO: 1170813 - DNA, 15 bp, Homo sapiens
ctgtccgagctgctt

SEQ ID NO: 1170814 - DNA, 15 bp, Homo sapiens
tctgtccgagctgct

SEQ ID NO: 1170815 - DNA, 15 bp, Homo sapiens
atctgtccgagctgc

SEQ ID NO: 1170816 - DNA, 15 bp, Homo sapiens
catctgtccgagctg

SEQ ID NO: 1170817 - DNA, 15 bp, Homo sapiens
gcatctgtccgagct

SEQ ID NO: 1170818 - DNA, 15 bp, Homo sapiens
agcatctgtccgagc

SEQ ID NO: 1170819 - DNA, 15 bp, Homo sapiens
cagcatctgtccgag

SEQ ID NO: 1170820 - DNA, 15 bp, Homo sapiens
ccagcatctgtccga

SEQ ID NO: 1170821 - DNA, 15 bp, Homo sapiens
tccagcatctgtccg

SEQ ID NO: 1170822 - DNA, 15 bp, Homo sapiens
gtccagcatctgtcc

SEQ ID NO: 1170823 - DNA, 15 bp, Homo sapiens
agtccagcatctgtc

SEQ ID NO: 1170824 - DNA, 15 bp, Homo sapiens
gagtccagcatctgt

SEQ ID NO: 1170825 - DNA, 15 bp, Homo sapiens
ggagtccagcatctg

SEQ ID NO: 1170826 - DNA, 15 bp, Homo sapiens
aggagtccagcatct

SEQ ID NO: 1170827 - DNA, 15 bp, Homo sapiens
caggagtccagcatc

SEQ ID NO: 1170828 - DNA, 15 bp, Homo sapiens
ccaggagtccagcat

SEQ ID NO: 1170829 - DNA, 15 bp, Homo sapiens
gccaggagtccagca

SEQ ID NO: 1170830 - DNA, 15 bp, Homo sapiens
tgccaggagtccagc

SEQ ID NO: 1170831 - DNA, 15 bp, Homo sapiens
ctgccaggagtccag

SEQ ID NO: 1170832 - DNA, 15 bp, Homo sapiens
tctgccaggagtcca

SEQ ID NO: 1170833 - DNA, 15 bp, Homo sapiens
atctgccaggagtcc

SEQ ID NO: 1170834 - DNA, 15 bp, Homo sapiens
gatctgccaggagtc

SEQ ID NO: 1170835 - DNA, 15 bp, Homo sapiens
tgatctgccaggagt

SEQ ID NO: 1170836 - DNA, 15 bp, Homo sapiens
ctgatctgccaggag

SEQ ID NO: 1170837 - DNA, 15 bp, Homo sapiens
gctgatctgccagga

SEQ ID NO: 1170838 - DNA, 15 bp, Homo sapiens
ggctgatctgccagg

SEQ ID NO: 1170839 - DNA, 15 bp, Homo sapiens
gggctgatctgccag

SEQ ID NO: 1170840 - DNA, 15 bp, Homo sapiens
agggctgatctgcca

SEQ ID NO: 1170841 - DNA, 15 bp, Homo sapiens
aagggctgatctgcc

SEQ ID NO: 1170842 - DNA, 15 bp, Homo sapiens
gaagggctgatctgc

SEQ ID NO: 1170843 - DNA, 15 bp, Homo sapiens
cgaagggctgatctg

SEQ ID NO: 1170844 - DNA, 15 bp, Homo sapiens
ccgaagggctgatct

SEQ ID NO: 1170845 - DNA, 15 bp, Homo sapiens
gccgaagggctgatc

SEQ ID NO: 1170846 - DNA, 15 bp, Homo sapiens
ggccgaagggctgat

SEQ ID NO: 1170847 - DNA, 15 bp, Homo sapiens
aggccgaagggctga

SEQ ID NO: 1170848 - DNA, 15 bp, Homo sapiens
aaggccgaagggctg

SEQ ID NO: 1170849 - DNA, 15 bp, Homo sapiens
caaggccgaagggct

SEQ ID NO: 1170850 - DNA, 15 bp, Homo sapiens
gcaaggccgaagggc

SEQ ID NO: 1170851 - DNA, 15 bp, Homo sapiens
ggcaaggccgaaggg

SEQ ID NO: 1170852 - DNA, 15 bp, Homo sapiens
gggcaaggccgaagg

SEQ ID NO: 1170853 - DNA, 15 bp, Homo sapiens
ggggcaaggccgaag

SEQ ID NO: 1170854 - DNA, 15 bp, Homo sapiens
aggggcaaggccgaa

SEQ ID NO: 1170855 - DNA, 15 bp, Homo sapiens
gaggggcaaggccga

SEQ ID NO: 1170856 - DNA, 15 bp, Homo sapiens
tgaggggcaaggccg

SEQ ID NO: 1170857 - DNA, 15 bp, Homo sapiens
gtgaggggcaaggcc

SEQ ID NO: 1170858 - DNA, 15 bp, Homo sapiens
agtgaggggcaaggc

SEQ ID NO: 1170859 - DNA, 15 bp, Homo sapiens
gagtgaggggcaagg

SEQ ID NO: 1170860 - DNA, 15 bp, Homo sapiens
cgagtgaggggcaag

SEQ ID NO: 1170861 - DNA, 15 bp, Homo sapiens
gcgagtgaggggcaa

SEQ ID NO: 1170862 - DNA, 15 bp, Homo sapiens
ggcgagtgaggggca

SEQ ID NO: 1170863 - DNA, 15 bp, Homo sapiens
gggcgagtgaggggc

SEQ ID NO: 1170864 - DNA, 15 bp, Homo sapiens
agggcgagtgagggg

SEQ ID NO: 1170865 - DNA, 15 bp, Homo sapiens
gagggcgagtgaggg

SEQ ID NO: 1170866 - DNA, 15 bp, Homo sapiens
agagggcgagtgagg

SEQ ID NO: 1170867 - DNA, 15 bp, Homo sapiens
gagagggcgagtgag

SEQ ID NO: 1170868 - DNA, 15 bp, Homo sapiens
ggagagggcgagtga

SEQ ID NO: 1170869 - DNA, 15 bp, Homo sapiens
cggagagggcgagtg

SEQ ID NO: 1170870 - DNA, 15 bp, Homo sapiens
gcggagagggcgagt

SEQ ID NO: 1170871 - DNA, 15 bp, Homo sapiens
agcggagagggcgag

SEQ ID NO: 1170872 - DNA, 15 bp, Homo sapiens
cagcggagagggcga

SEQ ID NO: 1170873 - DNA, 15 bp, Homo sapiens
acagcggagagggcg

SEQ ID NO: 1170874 - DNA, 15 bp, Homo sapiens
gacagcggagagggc

SEQ ID NO: 1170875 - DNA, 15 bp, Homo sapiens
tgacagcggagaggg

SEQ ID NO: 1170876 - DNA, 15 bp, Homo sapiens
gtgacagcggagagg

SEQ ID NO: 1170877 - DNA, 15 bp, Homo sapiens
agtgacagcggagag

SEQ ID NO: 1170878 - DNA, 15 bp, Homo sapiens
cagtgacagcggaga

SEQ ID NO: 1170879 - DNA, 15 bp, Homo sapiens
acagtgacagcggag

SEQ ID NO: 1170880 - DNA, 15 bp, Homo sapiens
cacagtgacagcgga

SEQ ID NO: 1170881 - DNA, 15 bp, Homo sapiens
gcacagtgacagcgg

SEQ ID NO: 1170882 - DNA, 15 bp, Homo sapiens
tgcacagtgacagcg

SEQ ID NO: 1170883 - DNA, 15 bp, Homo sapiens
gtgcacagtgacagc

SEQ ID NO: 1170884 - DNA, 15 bp, Homo sapiens
tgtgcacagtgacag

SEQ ID NO: 1170885 - DNA, 15 bp, Homo sapiens
atgtgcacagtgaca

SEQ ID NO: 1170886 - DNA, 15 bp, Homo sapiens
aatgtgcacagtgac

SEQ ID NO: 1170887 - DNA, 15 bp, Homo sapiens
caatgtgcacagtga

SEQ ID NO: 1170888 - DNA, 15 bp, Homo sapiens
gcaatgtgcacagtg

SEQ ID NO: 1170889 - DNA, 15 bp, Homo sapiens
agcaatgtgcacagt

SEQ ID NO: 1170890 - DNA, 15 bp, Homo sapiens
aagcaatgtgcacag

SEQ ID NO: 1170891 - DNA, 15 bp, Homo sapiens
gaagcaatgtgcaca

SEQ ID NO: 1170892 - DNA, 15 bp, Homo sapiens
tgaagcaatgtgcac

SEQ ID NO: 1170893 - DNA, 15 bp, Homo sapiens
atgaagcaatgtgca

SEQ ID NO: 1170894 - DNA, 15 bp, Homo sapiens
aatgaagcaatgtgc

SEQ ID NO: 1170895 - DNA, 15 bp, Homo sapiens
caatgaagcaatgtg

SEQ ID NO: 1170896 - DNA, 15 bp, Homo sapiens
acaatgaagcaatgt

SEQ ID NO: 1170897 - DNA, 15 bp, Homo sapiens
gacaatgaagcaatg

SEQ ID NO: 1170898 - DNA, 15 bp, Homo sapiens
ggacaatgaagcaat

SEQ ID NO: 1170899 - DNA, 15 bp, Homo sapiens
gggacaatgaagcaa

SEQ ID NO: 1170900 - DNA, 15 bp, Homo sapiens
tgggacaatgaagca

SEQ ID NO: 1170901 - DNA, 15 bp, Homo sapiens
atgggacaatgaagc

SEQ ID NO: 1170902 - DNA, 15 bp, Homo sapiens
aatgggacaatgaag

SEQ ID NO: 1170903 - DNA, 15 bp, Homo sapiens
aaatgggacaatgaa

SEQ ID NO: 1170904 - DNA, 15 bp, Homo sapiens
aaaatgggacaatga

SEQ ID NO: 1170905 - DNA, 15 bp, Homo sapiens
aaaaatgggacaatg

SEQ ID NO: 1170906 - DNA, 15 bp, Homo sapiens
caaaaatgggacaat

SEQ ID NO: 1170907 - DNA, 15 bp, Homo sapiens
acaaaaatgggacaa

SEQ ID NO: 1170908 - DNA, 15 bp, Homo sapiens
aacaaaaatgggaca

SEQ ID NO: 1170909 - DNA, 15 bp, Homo sapiens
caacaaaaatgggac

SEQ ID NO: 1170910 - DNA, 15 bp, Homo sapiens
acaacaaaaatggga

SEQ ID NO: 1170911 - DNA, 15 bp, Homo sapiens
aacaacaaaaatggg

SEQ ID NO: 1170912 - DNA, 15 bp, Homo sapiens
caacaacaaaaatgg

SEQ ID NO: 1170913 - DNA, 15 bp, Homo sapiens
acaacaacaaaaatg

SEQ ID NO: 1170914 - DNA, 15 bp, Homo sapiens
aacaacaacaaaaat

SEQ ID NO: 1170915 - DNA, 15 bp, Homo sapiens
caacaacaacaacaa

SEQ ID NO: 1170916 - DNA, 15 bp, Homo sapiens
tcaacaacaacaaca

SEQ ID NO: 1170917 - DNA, 15 bp, Homo sapiens
ttcaacaacaacaac

SEQ ID NO: 1170918 - DNA, 15 bp, Homo sapiens
gattcaacaacaaca

SEQ ID NO: 1170919 - DNA, 15 bp, Homo sapiens
tgattcaacaacaac

SEQ ID NO: 1170920 - DNA, 15 bp, Homo sapiens
atgattcaacaacaa

SEQ ID NO: 1170921 - DNA, 15 bp, Homo sapiens
gatgattcaacaaca

SEQ ID NO: 1170922 - DNA, 15 bp, Homo sapiens
tgatgattcaacaac

SEQ ID NO: 1170923 - DNA, 15 bp, Homo sapiens
ttgatgattcaacaa

SEQ ID NO: 1170924 - DNA, 15 bp, Homo sapiens
tttgatgattcaaca

SEQ ID NO: 1170925 - DNA, 15 bp, Homo sapiens
ttttgatgattcaac

SEQ ID NO: 1170926 - DNA, 15 bp, Homo sapiens
tttttgatgattcaa

SEQ ID NO: 1170927 - DNA, 15 bp, Homo sapiens
ttttttgatgattca

SEQ ID NO: 1170928 - DNA, 15 bp, Homo sapiens
attttttgatgattc

SEQ ID NO: 1170929 - DNA, 15 bp, Homo sapiens
gattttttgatgatt

SEQ ID NO: 1170930 - DNA, 15 bp, Homo sapiens
agattttttgatgat

SEQ ID NO: 1170931 - DNA, 15 bp, Homo sapiens
aagattttttgatga

SEQ ID NO: 1170932 - DNA, 15 bp, Homo sapiens
taagattttttgatg

SEQ ID NO: 1170933 - DNA, 15 bp, Homo sapiens
ctaagattttttgat

SEQ ID NO: 1170934 - DNA, 15 bp, Homo sapiens
gctaagattttttga

SEQ ID NO: 1170935 - DNA, 15 bp, Homo sapiens
ggctaagattttttg

SEQ ID NO: 1170936 - DNA, 15 bp, Homo sapiens
tggctaagatttttt

SEQ ID NO: 1170937 - DNA, 15 bp, Homo sapiens
atggctaagattttt

SEQ ID NO: 1170938 - DNA, 15 bp, Homo sapiens
aatggctaagatttt

SEQ ID NO: 1170939 - DNA, 15 bp, Homo sapiens
caatggctaagattt

SEQ ID NO: 1170940 - DNA, 15 bp, Homo sapiens
gcaatggctaagatt

SEQ ID NO: 1170941 - DNA, 15 bp, Homo sapiens
ggcaatggctaagat

SEQ ID NO: 1170942 - DNA, 15 bp, Homo sapiens
tggcaatggctaaga

SEQ ID NO: 1170943 - DNA, 15 bp, Homo sapiens
ctggcaatggctaag

SEQ ID NO: 1170944 - DNA, 15 bp, Homo sapiens
gctggcaatggctaa

SEQ ID NO: 1170945 - DNA, 15 bp, Homo sapiens
agctggcaatggcta

SEQ ID NO: 1170946 - DNA, 15 bp, Homo sapiens
cagctggcaatggct

SEQ ID NO: 1170947 - DNA, 15 bp, Homo sapiens
acagctggcaatggc

SEQ ID NO: 1170948 - DNA, 15 bp, Homo sapiens
cacagctggcaatgg

SEQ ID NO: 1170949 - DNA, 15 bp, Homo sapiens
gcacagctggcaatg

SEQ ID NO: 1170950 - DNA, 15 bp, Homo sapiens
cgcacagctggcaat

SEQ ID NO: 1170951 - DNA, 15 bp, Homo sapiens
gcgcacagctggcaa

SEQ ID NO: 1170952 - DNA, 15 bp, Homo sapiens
tgcgcacagctggca

SEQ ID NO: 1170953 - DNA, 15 bp, Homo sapiens
ctgcgcacagctggc

SEQ ID NO: 1170954 - DNA, 15 bp, Homo sapiens
actgcgcacagctgg

SEQ ID NO: 1170955 - DNA, 15 bp, Homo sapiens
cactgcgcacagctg

SEQ ID NO: 1170956 - DNA, 15 bp, Homo sapiens
ccactgcgcacagct

SEQ ID NO: 1170957 - DNA, 15 bp, Homo sapiens
gccactgcgcacagc

SEQ ID NO: 1170958 - DNA, 15 bp, Homo sapiens
agccactgcgcacag

SEQ ID NO: 1170959 - DNA, 15 bp, Homo sapiens
gagccactgcgcaca

SEQ ID NO: 1170960 - DNA, 15 bp, Homo sapiens
tgagccactgcgcac

SEQ ID NO: 1170961 - DNA, 15 bp, Homo sapiens
atgagccactgcgca

SEQ ID NO: 1170962 - DNA, 15 bp, Homo sapiens
tcctcagcttcccaa

SEQ ID NO: 1170963 - DNA, 15 bp, Homo sapiens
ctcctcagcttccca

SEQ ID NO: 1170964 - DNA, 15 bp, Homo sapiens
ccctcctcagcttcc

SEQ ID NO: 1170965 - DNA, 15 bp, Homo sapiens
gccctcctcagcttc

SEQ ID NO: 1170966 - DNA, 15 bp, Homo sapiens
tgccctcctcagctt

SEQ ID NO: 1170967 - DNA, 15 bp, Homo sapiens
ctgccctcctcagct

SEQ ID NO: 1170968 - DNA, 15 bp, Homo sapiens
tctgccctcctcagc

SEQ ID NO: 1170969 - DNA, 15 bp, Homo sapiens
atctgccctcctcag

SEQ ID NO: 1170970 - DNA, 15 bp, Homo sapiens
gatctgccctcctca

SEQ ID NO: 1170971 - DNA, 15 bp, Homo sapiens
tgatctgccctcctc

SEQ ID NO: 1170972 - DNA, 15 bp, Homo sapiens
gtgatctgccctcct

SEQ ID NO: 1170973 - DNA, 15 bp, Homo sapiens
ggtgatctgccctcc

SEQ ID NO: 1170974 - DNA, 15 bp, Homo sapiens
aggtgatctgccctc

SEQ ID NO: 1170975 - DNA, 15 bp, Homo sapiens
caggtgatctgccct

SEQ ID NO: 1170976 - DNA, 15 bp, Homo sapiens
ctcaggtgatctgcc

SEQ ID NO: 1170977 - DNA, 15 bp, Homo sapiens
tttggccaagctggt

SEQ ID NO: 1170978 - DNA, 15 bp, Homo sapiens
ttttggccaagctgg

SEQ ID NO: 1170979 - DNA, 15 bp, Homo sapiens
gttttggccaagctg

SEQ ID NO: 1170980 - DNA, 15 bp, Homo sapiens
tgttttggccaagct

SEQ ID NO: 1170981 - DNA, 15 bp, Homo sapiens
ctgttttggccaagc

SEQ ID NO: 1170982 - DNA, 15 bp, Homo sapiens
actgttttggccaag

SEQ ID NO: 1170983 - DNA, 15 bp, Homo sapiens
cactgttttggccaa

SEQ ID NO: 1170984 - DNA, 15 bp, Homo sapiens
tcactgttttggcca

SEQ ID NO: 1170985 - DNA, 15 bp, Homo sapiens
ttcactgttttggcc

SEQ ID NO: 1170986 - DNA, 15 bp, Homo sapiens
tttcactgttttggc

SEQ ID NO: 1170987 - DNA, 15 bp, Homo sapiens
gtttcactgttttgg

SEQ ID NO: 1170988 - DNA, 15 bp, Homo sapiens
ggtttcactgttttg

SEQ ID NO: 1170989 - DNA, 15 bp, Homo sapiens
gggtttcactgtttt

SEQ ID NO: 1170990 - DNA, 15 bp, Homo sapiens
agggtttcactgttt

SEQ ID NO: 1170991 - DNA, 15 bp, Homo sapiens
cagggtttcactgtt

SEQ ID NO: 1170992 - DNA, 15 bp, Homo sapiens
acagggtttcactgt

SEQ ID NO: 1170993 - DNA, 15 bp, Homo sapiens
gacagggtttcactg

SEQ ID NO: 1170994 - DNA, 15 bp, Homo sapiens
aatttttttttgtat

SEQ ID NO: 1170995 - DNA, 15 bp, Homo sapiens
caatttttttttgta

SEQ ID NO: 1170996 - DNA, 15 bp, Homo sapiens
gcaatttttttttgt

SEQ ID NO: 1170997 - DNA, 15 bp, Homo sapiens
ggcaatttttttttg

SEQ ID NO: 1170998 - DNA, 15 bp, Homo sapiens
cggcaattttttttt

SEQ ID NO: 1170999 - DNA, 15 bp, Homo sapiens
ccggcaatttttttt

SEQ ID NO: 1171000 - DNA, 15 bp, Homo sapiens
cccggcaattttttt

SEQ ID NO: 1171001 - DNA, 15 bp, Homo sapiens
gcccggcaatttttt

SEQ ID NO: 1171002 - DNA, 15 bp, Homo sapiens
tgcccggcaattttt

SEQ ID NO: 1171003 - DNA, 15 bp, Homo sapiens
atgcccggcaatttt

SEQ ID NO: 1171004 - DNA, 15 bp, Homo sapiens
catgcccggcaattt

SEQ ID NO: 1171005 - DNA, 15 bp, Homo sapiens
ccatgcccggcaatt

SEQ ID NO: 1171006 - DNA, 15 bp, Homo sapiens
accatgcccggcaat

SEQ ID NO: 1171007 - DNA, 15 bp, Homo sapiens
caccatgcccggcaa

SEQ ID NO: 1171008 - DNA, 15 bp, Homo sapiens
ccaccatgcccggca

SEQ ID NO: 1171009 - DNA, 15 bp, Homo sapiens
ggtgtgccaccatgc

SEQ ID NO: 1171010 - DNA, 15 bp, Homo sapiens
gggtgtgccaccatg

SEQ ID NO: 1171011 - DNA, 15 bp, Homo sapiens
ggggtgtgccaccat

SEQ ID NO: 1171012 - DNA, 15 bp, Homo sapiens
aggggtgtgccacca

SEQ ID NO: 1171013 - DNA, 15 bp, Homo sapiens
taggggtgtgccacc

SEQ ID NO: 1171014 - DNA, 15 bp, Homo sapiens
ataggggtgtgccac

SEQ ID NO: 1171015 - DNA, 15 bp, Homo sapiens
tataggggtgtgcca

SEQ ID NO: 1171016 - DNA, 15 bp, Homo sapiens
ctataggggtgtgcc

SEQ ID NO: 1171017 - DNA, 15 bp, Homo sapiens
actataggggtgtgc

SEQ ID NO: 1171018 - DNA, 15 bp, Homo sapiens
gactataggggtgtg

SEQ ID NO: 1171019 - DNA, 15 bp, Homo sapiens
ggactataggggtgt

SEQ ID NO: 1171020 - DNA, 15 bp, Homo sapiens
gggactataggggtg

SEQ ID NO: 1171021 - DNA, 15 bp, Homo sapiens
tgggactataggggt

SEQ ID NO: 1171022 - DNA, 15 bp, Homo sapiens
ctgggactatagggg

SEQ ID NO: 1171023 - DNA, 15 bp, Homo sapiens
gctgggactataggg

SEQ ID NO: 1171024 - DNA, 15 bp, Homo sapiens
agggtagctgggact

SEQ ID NO: 1171025 - DNA, 15 bp, Homo sapiens
tagggtagctgggac

SEQ ID NO: 1171026 - DNA, 15 bp, Homo sapiens
gtagggtagctggga

SEQ ID NO: 1171027 - DNA, 15 bp, Homo sapiens
agtagggtagctggg

SEQ ID NO: 1171028 - DNA, 15 bp, Homo sapiens
gagtagggtagctgg

SEQ ID NO: 1171029 - DNA, 15 bp, Homo sapiens
tgagtagggtagctg

SEQ ID NO: 1171030 - DNA, 15 bp, Homo sapiens
ttgagtagggtagct

SEQ ID NO: 1171031 - DNA, 15 bp, Homo sapiens
cttgagtagggtagc

SEQ ID NO: 1171032 - DNA, 15 bp, Homo sapiens
tcttgagtagggtag

SEQ ID NO: 1171033 - DNA, 15 bp, Homo sapiens
ctcttgagtagggta

SEQ ID NO: 1171034 - DNA, 15 bp, Homo sapiens
cctcttgagtagggt

SEQ ID NO: 1171035 - DNA, 15 bp, Homo sapiens
acctcttgagtaggg

SEQ ID NO: 1171036 - DNA, 15 bp, Homo sapiens
aacctcttgagtagg

SEQ ID NO: 1171037 - DNA, 15 bp, Homo sapiens
caacctcttgagtag

SEQ ID NO: 1171038 - DNA, 15 bp, Homo sapiens
tcaacctcttgagta

SEQ ID NO: 1171039 - DNA, 15 bp, Homo sapiens
ctcaacctcttgagt

SEQ ID NO: 1171040 - DNA, 15 bp, Homo sapiens
cctcaacctcttgag

SEQ ID NO: 1171041 - DNA, 15 bp, Homo sapiens
gcctcaacctcttga

SEQ ID NO: 1171042 - DNA, 15 bp, Homo sapiens
tgcctcaacctcttg

SEQ ID NO: 1171043 - DNA, 15 bp, Homo sapiens
ctgcctcaacctctt

SEQ ID NO: 1171044 - DNA, 15 bp, Homo sapiens
cctgcctcaacctct

SEQ ID NO: 1171045 - DNA, 15 bp, Homo sapiens
cggttcaagtgattc

SEQ ID NO: 1171046 - DNA, 15 bp, Homo sapiens
ccggttcaagtgatt

SEQ ID NO: 1171047 - DNA, 15 bp, Homo sapiens
gccggttcaagtgat

SEQ ID NO: 1171048 - DNA, 15 bp, Homo sapiens
tgccggttcaagtga

SEQ ID NO: 1171049 - DNA, 15 bp, Homo sapiens
ctgccggttcaagtg

SEQ ID NO: 1171050 - DNA, 15 bp, Homo sapiens
cctgccggttcaagt

SEQ ID NO: 1171051 - DNA, 15 bp, Homo sapiens
acctgccggttcaag

SEQ ID NO: 1171052 - DNA, 15 bp, Homo sapiens
cacctgccggttcaa

SEQ ID NO: 1171053 - DNA, 15 bp, Homo sapiens
ccacctgccggttca

SEQ ID NO: 1171054 - DNA, 15 bp, Homo sapiens
tccacctgccggttc

SEQ ID NO: 1171055 - DNA, 15 bp, Homo sapiens
ctccacctgccggtt

SEQ ID NO: 1171056 - DNA, 15 bp, Homo sapiens
cctccacctgccggt

SEQ ID NO: 1171057 - DNA, 15 bp, Homo sapiens
acctccacctgccgg

SEQ ID NO: 1171058 - DNA, 15 bp, Homo sapiens
cacctccacctgccg

SEQ ID NO: 1171059 - DNA, 15 bp, Homo sapiens
gcacctccacctgcc

SEQ ID NO: 1171060 - DNA, 15 bp, Homo sapiens
tgcacctccacctgc

SEQ ID NO: 1171061 - DNA, 15 bp, Homo sapiens
ctgcacctccacctg

SEQ ID NO: 1171062 - DNA, 15 bp, Homo sapiens
cctgcacctccacct

SEQ ID NO: 1171063 - DNA, 15 bp, Homo sapiens
ccctgcacctccacc

SEQ ID NO: 1171064 - DNA, 15 bp, Homo sapiens
tccctgcacctccac

SEQ ID NO: 1171065 - DNA, 15 bp, Homo sapiens
ctccctgcacctcca

SEQ ID NO: 1171066 - DNA, 15 bp, Homo sapiens
gctccctgcacctcc

SEQ ID NO: 1171067 - DNA, 15 bp, Homo sapiens
ggctccctgcacctc

SEQ ID NO: 1171068 - DNA, 15 bp, Homo sapiens
cggctccctgcacct

SEQ ID NO: 1171069 - DNA, 15 bp, Homo sapiens
tcggctccctgcacc

SEQ ID NO: 1171070 - DNA, 15 bp, Homo sapiens
ctcggctccctgcac

SEQ ID NO: 1171071 - DNA, 15 bp, Homo sapiens
tctcggctccctgca

SEQ ID NO: 1171072 - DNA, 15 bp, Homo sapiens
atctcggctccctgc

SEQ ID NO: 1171073 - DNA, 15 bp, Homo sapiens
gatctcggctccctg

SEQ ID NO: 1171074 - DNA, 15 bp, Homo sapiens
cgatctcggctccct

SEQ ID NO: 1171075 - DNA, 15 bp, Homo sapiens
acgatctcggctccc

SEQ ID NO: 1171076 - DNA, 15 bp, Homo sapiens
cacgatctcggctcc

SEQ ID NO: 1171077 - DNA, 15 bp, Homo sapiens
aggcacgatctcggc

SEQ ID NO: 1171078 - DNA, 15 bp, Homo sapiens
gaggcacgatctcgg

SEQ ID NO: 1171079 - DNA, 15 bp, Homo sapiens
agaggcacgatctcg

SEQ ID NO: 1171080 - DNA, 15 bp, Homo sapiens
cagaggcacgatctc

SEQ ID NO: 1171081 - DNA, 15 bp, Homo sapiens
gcagaggcacgatct

SEQ ID NO: 1171082 - DNA, 15 bp, Homo sapiens
tgcagaggcacgatc

SEQ ID NO: 1171083 - DNA, 15 bp, Homo sapiens
gtgcagaggcacgat

SEQ ID NO: 1171084 - DNA, 15 bp, Homo sapiens
agtgcagaggcacga

SEQ ID NO: 1171085 - DNA, 15 bp, Homo sapiens
gagtgcagaggcacg

SEQ ID NO: 1171086 - DNA, 15 bp, Homo sapiens
ggagtgcagaggcac

SEQ ID NO: 1171087 - DNA, 15 bp, Homo sapiens
tggagtgcagaggca

SEQ ID NO: 1171088 - DNA, 15 bp, Homo sapiens
ctggagtgcagaggc

SEQ ID NO: 1171089 - DNA, 15 bp, Homo sapiens
gctggagtgcagagg

SEQ ID NO: 1171090 - DNA, 15 bp, Homo sapiens
ggctggagtgcagag

SEQ ID NO: 1171091 - DNA, 15 bp, Homo sapiens
aggctggagtgcaga

SEQ ID NO: 1171092 - DNA, 15 bp, Homo sapiens
ggcccaggctggagt

SEQ ID NO: 1171093 - DNA, 15 bp, Homo sapiens
tggcccaggctggag

SEQ ID NO: 1171094 - DNA, 15 bp, Homo sapiens
ctgtggcccaggctg

SEQ ID NO: 1171095 - DNA, 15 bp, Homo sapiens
gctgtggcccaggct

SEQ ID NO: 1171096 - DNA, 15 bp, Homo sapiens
cgctgtggcccaggc

SEQ ID NO: 1171097 - DNA, 15 bp, Homo sapiens
acgctgtggcccagg

SEQ ID NO: 1171098 - DNA, 15 bp, Homo sapiens
cacgctgtggcccag

SEQ ID NO: 1171099 - DNA, 15 bp, Homo sapiens
tcacgctgtggccca

SEQ ID NO: 1171100 - DNA, 15 bp, Homo sapiens
ctcacgctgtggccc

SEQ ID NO: 1171101 - DNA, 15 bp, Homo sapiens
tctcacgctgtggcc

SEQ ID NO: 1171102 - DNA, 15 bp, Homo sapiens
gtctcacgctgtggc

SEQ ID NO: 1171103 - DNA, 15 bp, Homo sapiens
agtctcacgctgtgg

SEQ ID NO: 1171104 - DNA, 15 bp, Homo sapiens
gagtctcacgctgtg

SEQ ID NO: 1171105 - DNA, 15 bp, Homo sapiens
agagtctcacgctgt

SEQ ID NO: 1171106 - DNA, 15 bp, Homo sapiens
cagagtctcacgctg

SEQ ID NO: 1171107 - DNA, 15 bp, Homo sapiens
acagagtctcacgct

SEQ ID NO: 1171108 - DNA, 15 bp, Homo sapiens
gacagagtctcacgc

SEQ ID NO: 1171109 - DNA, 15 bp, Homo sapiens
tgacagagtctcacg

SEQ ID NO: 1171110 - DNA, 15 bp, Homo sapiens
ttgacagagtctcac

SEQ ID NO: 1171111 - DNA, 15 bp, Homo sapiens
tttgacagagtctca

SEQ ID NO: 1171112 - DNA, 15 bp, Homo sapiens
ttttgacagagtctc

SEQ ID NO: 1171113 - DNA, 15 bp, Homo sapiens
tttttgacagagtct

SEQ ID NO: 1171114 - DNA, 15 bp, Homo sapiens
ttttttgacagagtc

SEQ ID NO: 1171115 - DNA, 15 bp, Homo sapiens
tttttttgacagagt

SEQ ID NO: 1171116 - DNA, 15 bp, Homo sapiens
ttttttttgacagag

SEQ ID NO: 1171117 - DNA, 15 bp, Homo sapiens
tttttttttgacaga

SEQ ID NO: 1171118 - DNA, 15 bp, Homo sapiens
ttttttttttgacag

SEQ ID NO: 1171119 - DNA, 15 bp, Homo sapiens
tttttttttttgaca

SEQ ID NO: 1171120 - DNA, 15 bp, Homo sapiens
ttttttttttttgac

SEQ ID NO: 1171121 - DNA, 15 bp, Homo sapiens
aagattttttttttt

SEQ ID NO: 1171122 - DNA, 15 bp, Homo sapiens
taagatttttttttt

SEQ ID NO: 1171123 - DNA, 15 bp, Homo sapiens
ataagattttttttt

SEQ ID NO: 1171124 - DNA, 15 bp, Homo sapiens
gataagatttttttt

SEQ ID NO: 1171125 - DNA, 15 bp, Homo sapiens
ggataagattttttt

SEQ ID NO: 1171126 - DNA, 15 bp, Homo sapiens
tggataagatttttt

SEQ ID NO: 1171127 - DNA, 15 bp, Homo sapiens
atggataagattttt

SEQ ID NO: 1171128 - DNA, 15 bp, Homo sapiens
aatggataagatttt

SEQ ID NO: 1171129 - DNA, 15 bp, Homo sapiens
aaatggataagattt

SEQ ID NO: 1171130 - DNA, 15 bp, Homo sapiens
gaaatggataagatt

SEQ ID NO: 1171131 - DNA, 15 bp, Homo sapiens
agaaatggataagat

SEQ ID NO: 1171132 - DNA, 15 bp, Homo sapiens
tagaaatggataaga

SEQ ID NO: 1171133 - DNA, 15 bp, Homo sapiens
ttagaaatggataag

SEQ ID NO: 1171134 - DNA, 15 bp, Homo sapiens
cttagaaatggataa

SEQ ID NO: 1171135 - DNA, 15 bp, Homo sapiens
tcttagaaatggata

SEQ ID NO: 1171136 - DNA, 15 bp, Homo sapiens
ctcttagaaatggat

SEQ ID NO: 1171137 - DNA, 15 bp, Homo sapiens
tctcttagaaatgga

SEQ ID NO: 1171138 - DNA, 15 bp, Homo sapiens
gtctcttagaaatgg

SEQ ID NO: 1171139 - DNA, 15 bp, Homo sapiens
agtctcttagaaatg

SEQ ID NO: 1171140 - DNA, 15 bp, Homo sapiens
gagtctcttagaaat

SEQ ID NO: 1171141 - DNA, 15 bp, Homo sapiens
tgagtctcttagaaa

SEQ ID NO: 1171142 - DNA, 15 bp, Homo sapiens
atgagtctcttagaa

SEQ ID NO: 1171143 - DNA, 15 bp, Homo sapiens
catgagtctcttaga

SEQ ID NO: 1171144 - DNA, 15 bp, Homo sapiens
acatgagtctcttag

SEQ ID NO: 1171145 - DNA, 15 bp, Homo sapiens
cacatgagtctctta

SEQ ID NO: 1171146 - DNA, 15 bp, Homo sapiens
ccacatgagtctctt

SEQ ID NO: 1171147 - DNA, 15 bp, Homo sapiens
cccacatgagtctct

SEQ ID NO: 1171148 - DNA, 15 bp, Homo sapiens
gcccacatgagtctc

SEQ ID NO: 1171149 - DNA, 15 bp, Homo sapiens
agcccacatgagtct

SEQ ID NO: 1171150 - DNA, 15 bp, Homo sapiens
tagcccacatgagtc

SEQ ID NO: 1171151 - DNA, 15 bp, Homo sapiens
ttagcccacatgagt

SEQ ID NO: 1171152 - DNA, 15 bp, Homo sapiens
gttagcccacatgag

SEQ ID NO: 1171153 - DNA, 15 bp, Homo sapiens
tgttagcccacatga

SEQ ID NO: 1171154 - DNA, 15 bp, Homo sapiens
atgttagcccacatg

SEQ ID NO: 1171155 - DNA, 15 bp, Homo sapiens
catgttagcccacat

SEQ ID NO: 1171156 - DNA, 15 bp, Homo sapiens
gcatgttagcccaca

SEQ ID NO: 1171157 - DNA, 15 bp, Homo sapiens
tgcatgttagcccac

SEQ ID NO: 1171158 - DNA, 15 bp, Homo sapiens
atgcatgttagccca

SEQ ID NO: 1171159 - DNA, 15 bp, Homo sapiens
gatgcatgttagccc

SEQ ID NO: 1171160 - DNA, 15 bp, Homo sapiens
agatgcatgttagcc

SEQ ID NO: 1171161 - DNA, 15 bp, Homo sapiens
aagatgcatgttagc

SEQ ID NO: 1171162 - DNA, 15 bp, Homo sapiens
caagatgcatgttag

SEQ ID NO: 1171163 - DNA, 15 bp, Homo sapiens
gcaagatgcatgtta

SEQ ID NO: 1171164 - DNA, 15 bp, Homo sapiens
agcaagatgcatgtt

SEQ ID NO: 1171165 - DNA, 15 bp, Homo sapiens
cagcaagatgcatgt

SEQ ID NO: 1171166 - DNA, 15 bp, Homo sapiens
acagcaagatgcatg

SEQ ID NO: 1171167 - DNA, 15 bp, Homo sapiens
aacagcaagatgcat

SEQ ID NO: 1171168 - DNA, 15 bp, Homo sapiens
caacagcaagatgca

SEQ ID NO: 1171169 - DNA, 15 bp, Homo sapiens
acaacagcaagatgc

SEQ ID NO: 1171170 - DNA, 15 bp, Homo sapiens
aacaacagcaagatg

SEQ ID NO: 1171171 - DNA, 15 bp, Homo sapiens
caacaacagcaagat

SEQ ID NO: 1171172 - DNA, 15 bp, Homo sapiens
acaacaacagcaaga

SEQ ID NO: 1171173 - DNA, 15 bp, Homo sapiens
aacaacaacagcaag

SEQ ID NO: 1171174 - DNA, 15 bp, Homo sapiens
aaacaacaacagcaa

SEQ ID NO: 1171175 - DNA, 15 bp, Homo sapiens
aaaacaacaacagca

SEQ ID NO: 1171176 - DNA, 15 bp, Homo sapiens
aaaaacaacaacagc

SEQ ID NO: 1171177 - DNA, 15 bp, Homo sapiens
taaaaacaacaacag

SEQ ID NO: 1171178 - DNA, 15 bp, Homo sapiens
ttaaaaacaacaaca

SEQ ID NO: 1171179 - DNA, 15 bp, Homo sapiens
tttaaaaacaacaac

SEQ ID NO: 1171180 - DNA, 15 bp, Homo sapiens
ttttaaaaacaacaa

SEQ ID NO: 1171181 - DNA, 15 bp, Homo sapiens
gttttaaaaacaaca

SEQ ID NO: 1171182 - DNA, 15 bp, Homo sapiens
tgttttaaaaacaac

SEQ ID NO: 1171183 - DNA, 15 bp, Homo sapiens
ttgttttaaaaacaa

SEQ ID NO: 1171184 - DNA, 15 bp, Homo sapiens
tttgttttaaaaaca

SEQ ID NO: 1171185 - DNA, 15 bp, Homo sapiens
atttgttttaaaaac

SEQ ID NO: 1171186 - DNA, 15 bp, Homo sapiens
tatttgttttaaaaa

SEQ ID NO: 1171187 - DNA, 15 bp, Homo sapiens
atatttgttttaaaa

SEQ ID NO: 1171188 - DNA, 15 bp, Homo sapiens
gatatttgttttaaa

SEQ ID NO: 1171189 - DNA, 15 bp, Homo sapiens
agatatttgttttaa

SEQ ID NO: 1171190 - DNA, 15 bp, Homo sapiens
cagatatttgtttta

SEQ ID NO: 1171191 - DNA, 15 bp, Homo sapiens
gcagatatttgtttt

SEQ ID NO: 1171192 - DNA, 15 bp, Homo sapiens
tgcagatatttgttt

SEQ ID NO: 1171193 - DNA, 15 bp, Homo sapiens
ctgcagatatttgtt

SEQ ID NO: 1171194 - DNA, 15 bp, Homo sapiens
cctgcagatatttgt

SEQ ID NO: 1171195 - DNA, 15 bp, Homo sapiens
tcctgcagatatttg

SEQ ID NO: 1171196 - DNA, 15 bp, Homo sapiens
ctcctgcagatattt

SEQ ID NO: 1171197 - DNA, 15 bp, Homo sapiens
cctcctgcagatatt

SEQ ID NO: 1171198 - DNA, 15 bp, Homo sapiens
ccctcctgcagatat

SEQ ID NO: 1171199 - DNA, 15 bp, Homo sapiens
tccctcctgcagata

SEQ ID NO: 1171200 - DNA, 15 bp, Homo sapiens
atccctcctgcagat

SEQ ID NO: 1171201 - DNA, 15 bp, Homo sapiens
tatccctcctgcaga

SEQ ID NO: 1171202 - DNA, 15 bp, Homo sapiens
atatccctcctgcag

SEQ ID NO: 1171203 - DNA, 15 bp, Homo sapiens
aatatccctcctgca

SEQ ID NO: 1171204 - DNA, 15 bp, Homo sapiens
taatatccctcctgc

SEQ ID NO: 1171205 - DNA, 15 bp, Homo sapiens
ctaatatccctcctg

SEQ ID NO: 1171206 - DNA, 15 bp, Homo sapiens
tctaatatccctcct

SEQ ID NO: 1171207 - DNA, 15 bp, Homo sapiens
gtctaatatccctcc

SEQ ID NO: 1171208 - DNA, 15 bp, Homo sapiens
tgtctaatatccctc

SEQ ID NO: 1171209 - DNA, 15 bp, Homo sapiens
ttgtctaatatccct

SEQ ID NO: 1171210 - DNA, 15 bp, Homo sapiens
attgtctaatatccc

SEQ ID NO: 1171211 - DNA, 15 bp, Homo sapiens
cattgtctaatatcc

SEQ ID NO: 1171212 - DNA, 15 bp, Homo sapiens
acattgtctaatatc

SEQ ID NO: 1171213 - DNA, 15 bp, Homo sapiens
tacattgtctaatat

SEQ ID NO: 1171214 - DNA, 15 bp, Homo sapiens
ttacattgtctaata

SEQ ID NO: 1171215 - DNA, 15 bp, Homo sapiens
tttacattgtctaat

SEQ ID NO: 1171216 - DNA, 15 bp, Homo sapiens
atttacattgtctaa

SEQ ID NO: 1171217 - DNA, 15 bp, Homo sapiens
catttacattgtcta

SEQ ID NO: 1171218 - DNA, 15 bp, Homo sapiens
tcatttacattgtct

SEQ ID NO: 1171219 - DNA, 15 bp, Homo sapiens
ctcatttacattgtc

SEQ ID NO: 1171220 - DNA, 15 bp, Homo sapiens
gctcatttacattgt

SEQ ID NO: 1171221 - DNA, 15 bp, Homo sapiens
agctcatttacattg

SEQ ID NO: 1171222 - DNA, 15 bp, Homo sapiens
cagctcatttacatt

SEQ ID NO: 1171223 - DNA, 15 bp, Homo sapiens
tcagctcatttacat

SEQ ID NO: 1171224 - DNA, 15 bp, Homo sapiens
ctcagctcatttaca

SEQ ID NO: 1171225 - DNA, 15 bp, Homo sapiens
tctcagctcatttac

SEQ ID NO: 1171226 - DNA, 15 bp, Homo sapiens
ttctcagctcattta

SEQ ID NO: 1171227 - DNA, 15 bp, Homo sapiens
tttctcagctcattt

SEQ ID NO: 1171228 - DNA, 15 bp, Homo sapiens
atttctcagctcatt

SEQ ID NO: 1171229 - DNA, 15 bp, Homo sapiens
aatttctcagctcat

SEQ ID NO: 1171230 - DNA, 15 bp, Homo sapiens
taatttctcagctca

SEQ ID NO: 1171231 - DNA, 15 bp, Homo sapiens
gtaatttctcagctc

SEQ ID NO: 1171232 - DNA, 15 bp, Homo sapiens
agtaatttctcagct

SEQ ID NO: 1171233 - DNA, 15 bp, Homo sapiens
aagtaatttctcagc

SEQ ID NO: 1171234 - DNA, 15 bp, Homo sapiens
gaagtaatttctcag

SEQ ID NO: 1171235 - DNA, 15 bp, Homo sapiens
agaagtaatttctca

SEQ ID NO: 1171236 - DNA, 15 bp, Homo sapiens
cagaagtaatttctc

SEQ ID NO: 1171237 - DNA, 15 bp, Homo sapiens
gcagaagtaatttct

SEQ ID NO: 1171238 - DNA, 15 bp, Homo sapiens
agcagaagtaatttc

SEQ ID NO: 1171239 - DNA, 15 bp, Homo sapiens
cagcagaagtaattt

SEQ ID NO: 1171240 - DNA, 15 bp, Homo sapiens
ccagcagaagtaatt

SEQ ID NO: 1171241 - DNA, 15 bp, Homo sapiens
gccagcagaagtaat

SEQ ID NO: 1171242 - DNA, 15 bp, Homo sapiens
ggccagcagaagtaa

SEQ ID NO: 1171243 - DNA, 15 bp, Homo sapiens
tggccagcagaagta

SEQ ID NO: 1171244 - DNA, 15 bp, Homo sapiens
ttggccagcagaagt

SEQ ID NO: 1171245 - DNA, 15 bp, Homo sapiens
tttggccagcagaag

SEQ ID NO: 1171246 - DNA, 15 bp, Homo sapiens
ttttggccagcagaa

SEQ ID NO: 1171247 - DNA, 15 bp, Homo sapiens
gttttggccagcaga

SEQ ID NO: 1171248 - DNA, 15 bp, Homo sapiens
tgttttggccagcag

SEQ ID NO: 1171249 - DNA, 15 bp, Homo sapiens
atgttttggccagca

SEQ ID NO: 1171250 - DNA, 15 bp, Homo sapiens
gatgttttggccagc

SEQ ID NO: 1171251 - DNA, 15 bp, Homo sapiens
ggatgttttggccag

SEQ ID NO: 1171252 - DNA, 15 bp, Homo sapiens
gggatgttttggcca

SEQ ID NO: 1171253 - DNA, 15 bp, Homo sapiens
ggggatgttttggcc

SEQ ID NO: 1171254 - DNA, 15 bp, Homo sapiens
tggggatgttttggc

SEQ ID NO: 1171255 - DNA, 15 bp, Homo sapiens
ctggggatgttttgg

SEQ ID NO: 1171256 - DNA, 15 bp, Homo sapiens
cctggggatgttttg

SEQ ID NO: 1171257 - DNA, 15 bp, Homo sapiens
acctggggatgtttt

SEQ ID NO: 1171258 - DNA, 15 bp, Homo sapiens
gacctggggatgttt

SEQ ID NO: 1171259 - DNA, 15 bp, Homo sapiens
cgacctggggatgtt

SEQ ID NO: 1171260 - DNA, 15 bp, Homo sapiens
ccgacctggggatgt

SEQ ID NO: 1171261 - DNA, 15 bp, Homo sapiens
tccgacctggggatg

SEQ ID NO: 1171262 - DNA, 15 bp, Homo sapiens
atccgacctggggat

SEQ ID NO: 1171263 - DNA, 15 bp, Homo sapiens
aatccgacctgggga

SEQ ID NO: 1171264 - DNA, 15 bp, Homo sapiens
aaatccgacctgggg

SEQ ID NO: 1171265 - DNA, 15 bp, Homo sapiens
taaatccgacctggg

SEQ ID NO: 1171266 - DNA, 15 bp, Homo sapiens
ctaaatccgacctgg

SEQ ID NO: 1171267 - DNA, 15 bp, Homo sapiens
cctaaatccgacctg

SEQ ID NO: 1171268 - DNA, 15 bp, Homo sapiens
gcctaaatccgacct

SEQ ID NO: 1171269 - DNA, 15 bp, Homo sapiens
tgcctaaatccgacc

SEQ ID NO: 1171270 - DNA, 15 bp, Homo sapiens
atgcctaaatccgac

SEQ ID NO: 1171271 - DNA, 15 bp, Homo sapiens
catgcctaaatccga

SEQ ID NO: 1171272 - DNA, 15 bp, Homo sapiens
ccatgcctaaatccg

SEQ ID NO: 1171273 - DNA, 15 bp, Homo sapiens
tccatgcctaaatcc

SEQ ID NO: 1171274 - DNA, 15 bp, Homo sapiens
ctccatgcctaaatc

SEQ ID NO: 1171275 - DNA, 15 bp, Homo sapiens
cctccatgcctaaat

SEQ ID NO: 1171276 - DNA, 15 bp, Homo sapiens
tcctccatgcctaaa

SEQ ID NO: 1171277 - DNA, 15 bp, Homo sapiens
ctcctccatgcctaa

SEQ ID NO: 1171278 - DNA, 15 bp, Homo sapiens
cctcctccatgccta

SEQ ID NO: 1171279 - DNA, 15 bp, Homo sapiens
gcctcctccatgcct

SEQ ID NO: 1171280 - DNA, 15 bp, Homo sapiens
cgcctcctccatgcc

SEQ ID NO: 1171281 - DNA, 15 bp, Homo sapiens
gcgcctcctccatgc

SEQ ID NO: 1171282 - DNA, 15 bp, Homo sapiens
agcgcctcctccatg

SEQ ID NO: 1171283 - DNA, 15 bp, Homo sapiens
cagcgcctcctccat

SEQ ID NO: 1171284 - DNA, 15 bp, Homo sapiens
tcagcgcctcctcca

SEQ ID NO: 1171285 - DNA, 15 bp, Homo sapiens
ctcagcgcctcctcc

SEQ ID NO: 1171286 - DNA, 15 bp, Homo sapiens
cctcagcgcctcctc

SEQ ID NO: 1171287 - DNA, 15 bp, Homo sapiens
tcctcagcgcctcct

SEQ ID NO: 1171288 - DNA, 15 bp, Homo sapiens
ttcctcagcgcctcc

SEQ ID NO: 1171289 - DNA, 15 bp, Homo sapiens
cttcctcagcgcctc

SEQ ID NO: 1171290 - DNA, 15 bp, Homo sapiens
ccttcctcagcgcct

SEQ ID NO: 1171291 - DNA, 15 bp, Homo sapiens
tccttcctcagcgcc

SEQ ID NO: 1171292 - DNA, 15 bp, Homo sapiens
ttccttcctcagcgc

SEQ ID NO: 1171293 - DNA, 15 bp, Homo sapiens
cttccttcctcagcg

SEQ ID NO: 1171294 - DNA, 15 bp, Homo sapiens
ccttccttcctcagc

SEQ ID NO: 1171295 - DNA, 15 bp, Homo sapiens
accttccttcctcag

SEQ ID NO: 1171296 - DNA, 15 bp, Homo sapiens
gaccttccttcctca

SEQ ID NO: 1171297 - DNA, 15 bp, Homo sapiens
tgaccttccttcctc

SEQ ID NO: 1171298 - DNA, 15 bp, Homo sapiens
ctgaccttccttcct

SEQ ID NO: 1171299 - DNA, 15 bp, Homo sapiens
tctgaccttccttcc

SEQ ID NO: 1171300 - DNA, 15 bp, Homo sapiens
gtctgaccttccttc

SEQ ID NO: 1171301 - DNA, 15 bp, Homo sapiens
tgtctgaccttcctt

SEQ ID NO: 1171302 - DNA, 15 bp, Homo sapiens
atgtctgaccttcct

SEQ ID NO: 1171303 - DNA, 15 bp, Homo sapiens
aatgtctgaccttcc

SEQ ID NO: 1171304 - DNA, 15 bp, Homo sapiens
aaatgtctgaccttc

SEQ ID NO: 1171305 - DNA, 15 bp, Homo sapiens
caaatgtctgacctt

SEQ ID NO: 1171306 - DNA, 15 bp, Homo sapiens
ccaaatgtctgacct

SEQ ID NO: 1171307 - DNA, 15 bp, Homo sapiens
tccaaatgtctgacc

SEQ ID NO: 1171308 - DNA, 15 bp, Homo sapiens
ctccaaatgtctgac

SEQ ID NO: 1171309 - DNA, 15 bp, Homo sapiens
actccaaatgtctga

SEQ ID NO: 1171310 - DNA, 15 bp, Homo sapiens
gactccaaatgtctg

SEQ ID NO: 1171311 - DNA, 15 bp, Homo sapiens
agactccaaatgtct

SEQ ID NO: 1171312 - DNA, 15 bp, Homo sapiens
cagactccaaatgtc

SEQ ID NO: 1171313 - DNA, 15 bp, Homo sapiens
ccagactccaaatgt

SEQ ID NO: 1171314 - DNA, 15 bp, Homo sapiens
tccagactccaaatg

SEQ ID NO: 1171315 - DNA, 15 bp, Homo sapiens
ctccagactccaaat

SEQ ID NO: 1171316 - DNA, 15 bp, Homo sapiens
gctccagactccaaa

SEQ ID NO: 1171317 - DNA, 15 bp, Homo sapiens
tgctccagactccaa

SEQ ID NO: 1171318 - DNA, 15 bp, Homo sapiens
ttgctccagactcca

SEQ ID NO: 1171319 - DNA, 15 bp, Homo sapiens
attgctccagactcc

SEQ ID NO: 1171320 - DNA, 15 bp, Homo sapiens
cattgctccagactc

SEQ ID NO: 1171321 - DNA, 15 bp, Homo sapiens
acattgctccagact

SEQ ID NO: 1171322 - DNA, 15 bp, Homo sapiens
cacattgctccagac

SEQ ID NO: 1171323 - DNA, 15 bp, Homo sapiens
acacattgctccaga

SEQ ID NO: 1171324 - DNA, 15 bp, Homo sapiens
cacacattgctccag

SEQ ID NO: 1171325 - DNA, 15 bp, Homo sapiens
ccacacattgctcca

SEQ ID NO: 1171326 - DNA, 15 bp, Homo sapiens
tccacacattgctcc

SEQ ID NO: 1171327 - DNA, 15 bp, Homo sapiens
ctccacacattgctc

SEQ ID NO: 1171328 - DNA, 15 bp, Homo sapiens
cctccacacattgct

SEQ ID NO: 1171329 - DNA, 15 bp, Homo sapiens
acctccacacattgc

SEQ ID NO: 1171330 - DNA, 15 bp, Homo sapiens
tacctccacacattg

SEQ ID NO: 1171331 - DNA, 15 bp, Homo sapiens
ttacctccacacatt

SEQ ID NO: 1171332 - DNA, 15 bp, Homo sapiens
gttacctccacacat

SEQ ID NO: 1171333 - DNA, 15 bp, Homo sapiens
ggttacctccacaca

SEQ ID NO: 1171334 - DNA, 15 bp, Homo sapiens
aggttacctccacac

SEQ ID NO: 1171335 - DNA, 15 bp, Homo sapiens
caggttacctccaca

SEQ ID NO: 1171336 - DNA, 15 bp, Homo sapiens
gcaggttacctccac

SEQ ID NO: 1171337 - DNA, 15 bp, Homo sapiens
tgcaggttacctcca

SEQ ID NO: 1171338 - DNA, 15 bp, Homo sapiens
ctgcaggttacctcc

SEQ ID NO: 1171339 - DNA, 15 bp, Homo sapiens
gctgcaggttacctc

SEQ ID NO: 1171340 - DNA, 15 bp, Homo sapiens
ggctgcaggttacct

SEQ ID NO: 1171341 - DNA, 15 bp, Homo sapiens
gggctgcaggttacc

SEQ ID NO: 1171342 - DNA, 15 bp, Homo sapiens
tgggctgcaggttac

SEQ ID NO: 1171343 - DNA, 15 bp, Homo sapiens
ttgggctgcaggtta

SEQ ID NO: 1171344 - DNA, 15 bp, Homo sapiens
gttgggctgcaggtt

SEQ ID NO: 1171345 - DNA, 15 bp, Homo sapiens
agttgggctgcaggt

SEQ ID NO: 1171346 - DNA, 15 bp, Homo sapiens
cagttgggctgcagg

SEQ ID NO: 1171347 - DNA, 15 bp, Homo sapiens
ccagttgggctgcag

SEQ ID NO: 1171348 - DNA, 15 bp, Homo sapiens
cccagttgggctgca

SEQ ID NO: 1171349 - DNA, 15 bp, Homo sapiens
acccagttgggctgc

SEQ ID NO: 1171350 - DNA, 15 bp, Homo sapiens
aacccagttgggctg

SEQ ID NO: 1171351 - DNA, 15 bp, Homo sapiens
gaacccagttgggct

SEQ ID NO: 1171352 - DNA, 15 bp, Homo sapiens
ggaacccagttgggc

SEQ ID NO: 1171353 - DNA, 15 bp, Homo sapiens
tggaacccagttggg

SEQ ID NO: 1171354 - DNA, 15 bp, Homo sapiens
gtggaacccagttgg

SEQ ID NO: 1171355 - DNA, 15 bp, Homo sapiens
agtggaacccagttg

SEQ ID NO: 1171356 - DNA, 15 bp, Homo sapiens
cagtggaacccagtt

SEQ ID NO: 1171357 - DNA, 15 bp, Homo sapiens
acagtggaacccagt

SEQ ID NO: 1171358 - DNA, 15 bp, Homo sapiens
cacagtggaacccag

SEQ ID NO: 1171359 - DNA, 15 bp, Homo sapiens
acacagtggaaccca

SEQ ID NO: 1171360 - DNA, 15 bp, Homo sapiens
cacacagtggaaccc

SEQ ID NO: 1171361 - DNA, 15 bp, Homo sapiens
ccacacagtggaacc

SEQ ID NO: 1171362 - DNA, 15 bp, Homo sapiens
accacacagtggaac

SEQ ID NO: 1171363 - DNA, 15 bp, Homo sapiens
caccacacagtggaa

SEQ ID NO: 1171364 - DNA, 15 bp, Homo sapiens
gcaccacacagtgga

SEQ ID NO: 1171365 - DNA, 15 bp, Homo sapiens
agcaccacacagtgg

SEQ ID NO: 1171366 - DNA, 15 bp, Homo sapiens
aagcaccacacagtg

SEQ ID NO: 1171367 - DNA, 15 bp, Homo sapiens
aaagcaccacacagt

SEQ ID NO: 1171368 - DNA, 15 bp, Homo sapiens
caaagcaccacacag

SEQ ID NO: 1171369 - DNA, 15 bp, Homo sapiens
tcaaagcaccacaca

SEQ ID NO: 1171370 - DNA, 15 bp, Homo sapiens
ctcaaagcaccacac

SEQ ID NO: 1171371 - DNA, 15 bp, Homo sapiens
tctcaaagcaccaca

SEQ ID NO: 1171372 - DNA, 15 bp, Homo sapiens
ttctcaaagcaccac

SEQ ID NO: 1171373 - DNA, 15 bp, Homo sapiens
cttctcaaagcacca

SEQ ID NO: 1171374 - DNA, 15 bp, Homo sapiens
ccttctcaaagcacc

SEQ ID NO: 1171375 - DNA, 15 bp, Homo sapiens
cccttctcaaagcac

SEQ ID NO: 1171376 - DNA, 15 bp, Homo sapiens
ccccttctcaaagca

SEQ ID NO: 1171377 - DNA, 15 bp, Homo sapiens
tccccttctcaaagc

SEQ ID NO: 1171378 - DNA, 15 bp, Homo sapiens
ctccccttctcaaag

SEQ ID NO: 1171379 - DNA, 15 bp, Homo sapiens
cctccccttctcaaa

SEQ ID NO: 1171380 - DNA, 15 bp, Homo sapiens
ccctccccttctcaa

SEQ ID NO: 1171381 - DNA, 15 bp, Homo sapiens
tccctccccttctca

SEQ ID NO: 1171382 - DNA, 15 bp, Homo sapiens
ctccctccccttctc

SEQ ID NO: 1171383 - DNA, 15 bp, Homo sapiens
gctccctccccttct

SEQ ID NO: 1171384 - DNA, 15 bp, Homo sapiens
agctccctccccttc

SEQ ID NO: 1171385 - DNA, 15 bp, Homo sapiens
cagctccctcccctt

SEQ ID NO: 1171386 - DNA, 15 bp, Homo sapiens
ccagctccctcccct

SEQ ID NO: 1171387 - DNA, 15 bp, Homo sapiens
gccagctccctcccc

SEQ ID NO: 1171388 - DNA, 15 bp, Homo sapiens
tgccagctccctccc

SEQ ID NO: 1171389 - DNA, 15 bp, Homo sapiens
ctgccagctccctcc

SEQ ID NO: 1171390 - DNA, 15 bp, Homo sapiens
tctgccagctccctc

SEQ ID NO: 1171391 - DNA, 15 bp, Homo sapiens
gtctgccagctccct

SEQ ID NO: 1171392 - DNA, 15 bp, Homo sapiens
tgtctgccagctccc

SEQ ID NO: 1171393 - DNA, 15 bp, Homo sapiens
ctgtctgccagctcc

SEQ ID NO: 1171394 - DNA, 15 bp, Homo sapiens
tctgtctgccagctc

SEQ ID NO: 1171395 - DNA, 15 bp, Homo sapiens
ctctgtctgccagct

SEQ ID NO: 1171396 - DNA, 15 bp, Homo sapiens
cctctgtctgccagc

SEQ ID NO: 1171397 - DNA, 15 bp, Homo sapiens
tcctctgtctgccag

SEQ ID NO: 1171398 - DNA, 15 bp, Homo sapiens
ctcctctgtctgcca

SEQ ID NO: 1171399 - DNA, 15 bp, Homo sapiens
cctcctctgtctgcc

SEQ ID NO: 1171400 - DNA, 15 bp, Homo sapiens
gcctcctctgtctgc

SEQ ID NO: 1171401 - DNA, 15 bp, Homo sapiens
tgcctcctctgtctg

SEQ ID NO: 1171402 - DNA, 15 bp, Homo sapiens
ctgcctcctctgtct

SEQ ID NO: 1171403 - DNA, 15 bp, Homo sapiens
tctgcctcctctgtc

SEQ ID NO: 1171404 - DNA, 15 bp, Homo sapiens
ctctgcctcctctgt

SEQ ID NO: 1171405 - DNA, 15 bp, Homo sapiens
gctctgcctcctctg

SEQ ID NO: 1171406 - DNA, 15 bp, Homo sapiens
tgctctgcctcctct

SEQ ID NO: 1171407 - DNA, 15 bp, Homo sapiens
ctgctctgcctcctc

SEQ ID NO: 1171408 - DNA, 15 bp, Homo sapiens
tctgctctgcctcct

SEQ ID NO: 1171409 - DNA, 15 bp, Homo sapiens
ttctgctctgcctcc

SEQ ID NO: 1171410 - DNA, 15 bp, Homo sapiens
tttctgctctgcctc

SEQ ID NO: 1171411 - DNA, 15 bp, Homo sapiens
gtttctgctctgcct

SEQ ID NO: 1171412 - DNA, 15 bp, Homo sapiens
agtttctgctctgcc

SEQ ID NO: 1171413 - DNA, 15 bp, Homo sapiens
cagtttctgctctgc

SEQ ID NO: 1171414 - DNA, 15 bp, Homo sapiens
ccagtttctgctctg

SEQ ID NO: 1171415 - DNA, 15 bp, Homo sapiens
cccagtttctgctct

SEQ ID NO: 1171416 - DNA, 15 bp, Homo sapiens
acccagtttctgctc

SEQ ID NO: 1171417 - DNA, 15 bp, Homo sapiens
tacccagtttctgct

SEQ ID NO: 1171418 - DNA, 15 bp, Homo sapiens
ttacccagtttctgc

SEQ ID NO: 1171419 - DNA, 15 bp, Homo sapiens
cttacccagtttctg

SEQ ID NO: 1171420 - DNA, 15 bp, Homo sapiens
tcttacccagtttct

SEQ ID NO: 1171421 - DNA, 15 bp, Homo sapiens
ctcttacccagtttc

SEQ ID NO: 1171422 - DNA, 15 bp, Homo sapiens
cctcttacccagttt

SEQ ID NO: 1171423 - DNA, 15 bp, Homo sapiens
tcctcttacccagtt

SEQ ID NO: 1171424 - DNA, 15 bp, Homo sapiens
ttcctcttacccagt

SEQ ID NO: 1171425 - DNA, 15 bp, Homo sapiens
cttcctcttacccag

SEQ ID NO: 1171426 - DNA, 15 bp, Homo sapiens
ccttcctcttaccca

SEQ ID NO: 1171427 - DNA, 15 bp, Homo sapiens
cccttcctcttaccc

SEQ ID NO: 1171428 - DNA, 15 bp, Homo sapiens
ccccttcctcttacc

SEQ ID NO: 1171429 - DNA, 15 bp, Homo sapiens
tccccttcctcttac

SEQ ID NO: 1171430 - DNA, 15 bp, Homo sapiens
ctccccttcctctta

SEQ ID NO: 1171431 - DNA, 15 bp, Homo sapiens
tctccccttcctctt

SEQ ID NO: 1171432 - DNA, 15 bp, Homo sapiens
ctctccccttcctct

SEQ ID NO: 1171433 - DNA, 15 bp, Homo sapiens
cctctccccttcctc

SEQ ID NO: 1171434 - DNA, 15 bp, Homo sapiens
acctctccccttcct

SEQ ID NO: 1171435 - DNA, 15 bp, Homo sapiens
gcacctctccccttc

SEQ ID NO: 1171436 - DNA, 15 bp, Homo sapiens
ggcacctctcccctt

SEQ ID NO: 1171437 - DNA, 15 bp, Homo sapiens
aggcacctctcccct

SEQ ID NO: 1171438 - DNA, 15 bp, Homo sapiens
caggcacctctcccc

SEQ ID NO: 1171439 - DNA, 15 bp, Homo sapiens
ccaggcacctctccc

SEQ ID NO: 1171440 - DNA, 15 bp, Homo sapiens
accaggcacctctcc

SEQ ID NO: 1171441 - DNA, 15 bp, Homo sapiens
aaccaggcacctctc

SEQ ID NO: 1171442 - DNA, 15 bp, Homo sapiens
caaccaggcacctct

SEQ ID NO: 1171443 - DNA, 15 bp, Homo sapiens
gcaaccaggcacctc

SEQ ID NO: 1171444 - DNA, 15 bp, Homo sapiens
agcaaccaggcacct

SEQ ID NO: 1171445 - DNA, 15 bp, Homo sapiens
aagcaaccaggcacc

SEQ ID NO: 1171446 - DNA, 15 bp, Homo sapiens
caagcaaccaggcac

SEQ ID NO: 1171447 - DNA, 15 bp, Homo sapiens
acaagcaaccaggca

SEQ ID NO: 1171448 - DNA, 15 bp, Homo sapiens
aacaagcaaccaggc

SEQ ID NO: 1171449 - DNA, 15 bp, Homo sapiens
gaacaagcaaccagg

SEQ ID NO: 1171450 - DNA, 15 bp, Homo sapiens
ggaacaagcaaccag

SEQ ID NO: 1171451 - DNA, 15 bp, Homo sapiens
tggaacaagcaacca

SEQ ID NO: 1171452 - DNA, 15 bp, Homo sapiens
ttggaacaagcaacc

SEQ ID NO: 1171453 - DNA, 15 bp, Homo sapiens
cttggaacaagcaac

SEQ ID NO: 1171454 - DNA, 15 bp, Homo sapiens
ccttggaacaagcaa

SEQ ID NO: 1171455 - DNA, 15 bp, Homo sapiens
gccttggaacaagca

SEQ ID NO: 1171456 - DNA, 15 bp, Homo sapiens
agccttggaacaagc

SEQ ID NO: 1171457 - DNA, 15 bp, Homo sapiens
gagccttggaacaag

SEQ ID NO: 1171458 - DNA, 15 bp, Homo sapiens
tgagccttggaacaa

SEQ ID NO: 1171459 - DNA, 15 bp, Homo sapiens
gtgagccttggaaca

SEQ ID NO: 1171460 - DNA, 15 bp, Homo sapiens
ggtgagccttggaac

SEQ ID NO: 1171461 - DNA, 15 bp, Homo sapiens
gggtgagccttggaa

SEQ ID NO: 1171462 - DNA, 15 bp, Homo sapiens
ggggtgagccttgga

SEQ ID NO: 1171463 - DNA, 15 bp, Homo sapiens
ttggggtgagccttg

SEQ ID NO: 1171464 - DNA, 15 bp, Homo sapiens
cttggggtgagcctt

SEQ ID NO: 1171465 - DNA, 15 bp, Homo sapiens
gcttggggtgagcct

SEQ ID NO: 1171466 - DNA, 15 bp, Homo sapiens
ggcttggggtgagcc

SEQ ID NO: 1171467 - DNA, 15 bp, Homo sapiens
gggcttggggtgagc

SEQ ID NO: 1171468 - DNA, 15 bp, Homo sapiens
ggggcttggggtgag

SEQ ID NO: 1171469 - DNA, 15 bp, Homo sapiens
aggggcttggggtga

SEQ ID NO: 1171470 - DNA, 15 bp, Homo sapiens
aaggggcttggggtg

SEQ ID NO: 1171471 - DNA, 15 bp, Homo sapiens
gaaggggcttggggt

SEQ ID NO: 1171472 - DNA, 15 bp, Homo sapiens
tgaaggggcttgggg

SEQ ID NO: 1171473 - DNA, 15 bp, Homo sapiens
gtgaaggggcttggg

SEQ ID NO: 1171474 - DNA, 15 bp, Homo sapiens
agtgaaggggcttgg

SEQ ID NO: 1171475 - DNA, 15 bp, Homo sapiens
cagtgaaggggcttg

SEQ ID NO: 1171476 - DNA, 15 bp, Homo sapiens
acagtgaaggggctt

SEQ ID NO: 1171477 - DNA, 15 bp, Homo sapiens
cacagtgaaggggct

SEQ ID NO: 1171478 - DNA, 15 bp, Homo sapiens
ccacagtgaaggggc

SEQ ID NO: 1171479 - DNA, 15 bp, Homo sapiens
gccacagtgaagggg

SEQ ID NO: 1171480 - DNA, 15 bp, Homo sapiens
ggccacagtgaaggg

SEQ ID NO: 1171481 - DNA, 15 bp, Homo sapiens
aggccacagtgaagg

SEQ ID NO: 1171482 - DNA, 15 bp, Homo sapiens
caggccacagtgaag

SEQ ID NO: 1171483 - DNA, 15 bp, Homo sapiens
ccaggccacagtgaa

SEQ ID NO: 1171484 - DNA, 15 bp, Homo sapiens
cccaggccacagtga

SEQ ID NO: 1171485 - DNA, 15 bp, Homo sapiens
tcccaggccacagtg

SEQ ID NO: 1171486 - DNA, 15 bp, Homo sapiens
ttcccaggccacagt

SEQ ID NO: 1171487 - DNA, 15 bp, Homo sapiens
cttcccaggccacag

SEQ ID NO: 1171488 - DNA, 15 bp, Homo sapiens
ccttcccaggccaca

SEQ ID NO: 1171489 - DNA, 15 bp, Homo sapiens
gccttcccaggccac

SEQ ID NO: 1171490 - DNA, 15 bp, Homo sapiens
tgccttcccaggcca

SEQ ID NO: 1171491 - DNA, 15 bp, Homo sapiens
ctgccttcccaggcc

SEQ ID NO: 1171492 - DNA, 15 bp, Homo sapiens
cctgccttcccaggc

SEQ ID NO: 1171493 - DNA, 15 bp, Homo sapiens
acctgccttcccagg

SEQ ID NO: 1171494 - DNA, 15 bp, Homo sapiens
cacctgccttcccag

SEQ ID NO: 1171495 - DNA, 15 bp, Homo sapiens
acacctgccttccca

SEQ ID NO: 1171496 - DNA, 15 bp, Homo sapiens
cacacctgccttccc

SEQ ID NO: 1171497 - DNA, 15 bp, Homo sapiens
ccacacctgccttcc

SEQ ID NO: 1171498 - DNA, 15 bp, Homo sapiens
cccacacctgccttc

SEQ ID NO: 1171499 - DNA, 15 bp, Homo sapiens
gcccacacctgcctt

SEQ ID NO: 1171500 - DNA, 15 bp, Homo sapiens
ggcccacacctgcct

SEQ ID NO: 1171501 - DNA, 15 bp, Homo sapiens
tggcccacacctgcc

SEQ ID NO: 1171502 - DNA, 15 bp, Homo sapiens
ctggcccacacctgc

SEQ ID NO: 1171503 - DNA, 15 bp, Homo sapiens
gctggcccacacctg

SEQ ID NO: 1171504 - DNA, 15 bp, Homo sapiens
ggctggcccacacct

SEQ ID NO: 1171505 - DNA, 15 bp, Homo sapiens
gggctggcccacacc

SEQ ID NO: 1171506 - DNA, 15 bp, Homo sapiens
agggctggcccacac

SEQ ID NO: 1171507 - DNA, 15 bp, Homo sapiens
cagggctggcccaca

SEQ ID NO: 1171508 - DNA, 15 bp, Homo sapiens
tcagggctggcccac

SEQ ID NO: 1171509 - DNA, 15 bp, Homo sapiens
gtcagggctggccca

SEQ ID NO: 1171510 - DNA, 15 bp, Homo sapiens
agtcagggctggccc

SEQ ID NO: 1171511 - DNA, 15 bp, Homo sapiens
gagtcagggctggcc

SEQ ID NO: 1171512 - DNA, 15 bp, Homo sapiens
ggagtcagggctggc

SEQ ID NO: 1171513 - DNA, 15 bp, Homo sapiens
tggagtcagggctgg

SEQ ID NO: 1171514 - DNA, 15 bp, Homo sapiens
ttggagtcagggctg

SEQ ID NO: 1171515 - DNA, 15 bp, Homo sapiens
gttggagtcagggct

SEQ ID NO: 1171516 - DNA, 15 bp, Homo sapiens
ggttggagtcagggc

SEQ ID NO: 1171517 - DNA, 15 bp, Homo sapiens
tggttggagtcaggg

SEQ ID NO: 1171518 - DNA, 15 bp, Homo sapiens
gtggttggagtcagg

SEQ ID NO: 1171519 - DNA, 15 bp, Homo sapiens
ggtggttggagtcag

SEQ ID NO: 1171520 - DNA, 15 bp, Homo sapiens
tggtggttggagtca

SEQ ID NO: 1171521 - DNA, 15 bp, Homo sapiens
atggtggttggagtc

SEQ ID NO: 1171522 - DNA, 15 bp, Homo sapiens
aatggtggttggagt

SEQ ID NO: 1171523 - DNA, 15 bp, Homo sapiens
caatggtggttggag

SEQ ID NO: 1171524 - DNA, 15 bp, Homo sapiens
tcaatggtggttgga

SEQ ID NO: 1171525 - DNA, 15 bp, Homo sapiens
ctcaatggtggttgg

SEQ ID NO: 1171526 - DNA, 15 bp, Homo sapiens
cctcaatggtggttg

SEQ ID NO: 1171527 - DNA, 15 bp, Homo sapiens
ccctcaatggtggtt

SEQ ID NO: 1171528 - DNA, 15 bp, Homo sapiens
tccctcaatggtggt

SEQ ID NO: 1171529 - DNA, 15 bp, Homo sapiens
atccctcaatggtgg

SEQ ID NO: 1171530 - DNA, 15 bp, Homo sapiens
aatccctcaatggtg

SEQ ID NO: 1171531 - DNA, 15 bp, Homo sapiens
caatccctcaatggt

SEQ ID NO: 1171532 - DNA, 15 bp, Homo sapiens
acaatccctcaatgg

SEQ ID NO: 1171533 - DNA, 15 bp, Homo sapiens
cacaatccctcaatg

SEQ ID NO: 1171534 - DNA, 15 bp, Homo sapiens
gcacaatccctcaat

SEQ ID NO: 1171535 - DNA, 15 bp, Homo sapiens
ggcacaatccctcaa

SEQ ID NO: 1171536 - DNA, 15 bp, Homo sapiens
aggcacaatccctca

SEQ ID NO: 1171537 - DNA, 15 bp, Homo sapiens
aaggcacaatccctc

SEQ ID NO: 1171538 - DNA, 15 bp, Homo sapiens
gaaggcacaatccct

SEQ ID NO: 1171539 - DNA, 15 bp, Homo sapiens
ggaaggcacaatccc

SEQ ID NO: 1171540 - DNA, 15 bp, Homo sapiens
tggaaggcacaatcc

SEQ ID NO: 1171541 - DNA, 15 bp, Homo sapiens
ctggaaggcacaatc

SEQ ID NO: 1171542 - DNA, 15 bp, Homo sapiens
cctggaaggcacaat

SEQ ID NO: 1171543 - DNA, 15 bp, Homo sapiens
tcctggaaggcacaa

SEQ ID NO: 1171544 - DNA, 15 bp, Homo sapiens
ctcctggaaggcaca

SEQ ID NO: 1171545 - DNA, 15 bp, Homo sapiens
actcctggaaggcac

SEQ ID NO: 1171546 - DNA, 15 bp, Homo sapiens
aactcctggaaggca

SEQ ID NO: 1171547 - DNA, 15 bp, Homo sapiens
caactcctggaaggc

SEQ ID NO: 1171548 - DNA, 15 bp, Homo sapiens
gcaactcctggaagg

SEQ ID NO: 1171549 - DNA, 15 bp, Homo sapiens
tgcaactcctggaag

SEQ ID NO: 1171550 - DNA, 15 bp, Homo sapiens
gtgcaactcctggaa

SEQ ID NO: 1171551 - DNA, 15 bp, Homo sapiens
tgtgcaactcctgga

SEQ ID NO: 1171552 - DNA, 15 bp, Homo sapiens
ctgtgcaactcctgg

SEQ ID NO: 1171553 - DNA, 15 bp, Homo sapiens
cctgtgcaactcctg

SEQ ID NO: 1171554 - DNA, 15 bp, Homo sapiens
gcctgtgcaactcct

SEQ ID NO: 1171555 - DNA, 15 bp, Homo sapiens
tgcctgtgcaactcc

SEQ ID NO: 1171556 - DNA, 15 bp, Homo sapiens
ctgcctgtgcaactc

SEQ ID NO: 1171557 - DNA, 15 bp, Homo sapiens
gctgcctgtgcaact

SEQ ID NO: 1171558 - DNA, 15 bp, Homo sapiens
agctgcctgtgcaac

SEQ ID NO: 1171559 - DNA, 15 bp, Homo sapiens
gagctgcctgtgcaa

SEQ ID NO: 1171560 - DNA, 15 bp, Homo sapiens
tgagctgcctgtgca

SEQ ID NO: 1171561 - DNA, 15 bp, Homo sapiens
atgagctgcctgtgc

SEQ ID NO: 1171562 - DNA, 15 bp, Homo sapiens
gatgagctgcctgtg

SEQ ID NO: 1171563 - DNA, 15 bp, Homo sapiens
agatgagctgcctgt

SEQ ID NO: 1171564 - DNA, 15 bp, Homo sapiens
aagatgagctgcctg

SEQ ID NO: 1171565 - DNA, 15 bp, Homo sapiens
aaagatgagctgcct

SEQ ID NO: 1171566 - DNA, 15 bp, Homo sapiens
gaaagatgagctgcc

SEQ ID NO: 1171567 - DNA, 15 bp, Homo sapiens
cgaaagatgagctgc

SEQ ID NO: 1171568 - DNA, 15 bp, Homo sapiens
ccgaaagatgagctg

SEQ ID NO: 1171569 - DNA, 15 bp, Homo sapiens
tccgaaagatgagct

SEQ ID NO: 1171570 - DNA, 15 bp, Homo sapiens
ctccgaaagatgagc

SEQ ID NO: 1171571 - DNA, 15 bp, Homo sapiens
cctccgaaagatgag

SEQ ID NO: 1171572 - DNA, 15 bp, Homo sapiens
tcctccgaaagatga

SEQ ID NO: 1171573 - DNA, 15 bp, Homo sapiens
ttcctccgaaagatg

SEQ ID NO: 1171574 - DNA, 15 bp, Homo sapiens
cttcctccgaaagat

SEQ ID NO: 1171575 - DNA, 15 bp, Homo sapiens
tcttcctccgaaaga

SEQ ID NO: 1171576 - DNA, 15 bp, Homo sapiens
ttcttcctccgaaag

SEQ ID NO: 1171577 - DNA, 15 bp, Homo sapiens
tttcttcctccgaaa

SEQ ID NO: 1171578 - DNA, 15 bp, Homo sapiens
ttttcttcctccgaa

SEQ ID NO: 1171579 - DNA, 15 bp, Homo sapiens
attttcttcctccga

SEQ ID NO: 1171580 - DNA, 15 bp, Homo sapiens
aattttcttcctccg

SEQ ID NO: 1171581 - DNA, 15 bp, Homo sapiens
gaattttcttcctcc

SEQ ID NO: 1171582 - DNA, 15 bp, Homo sapiens
cgaattttcttcctc

SEQ ID NO: 1171583 - DNA, 15 bp, Homo sapiens
acgaattttcttcct

SEQ ID NO: 1171584 - DNA, 15 bp, Homo sapiens
cacgaattttcttcc

SEQ ID NO: 1171585 - DNA, 15 bp, Homo sapiens
gcacgaattttcttc

SEQ ID NO: 1171586 - DNA, 15 bp, Homo sapiens
ggcacgaattttctt

SEQ ID NO: 1171587 - DNA, 15 bp, Homo sapiens
aggcacgaattttct

SEQ ID NO: 1171588 - DNA, 15 bp, Homo sapiens
caggcacgaattttc

SEQ ID NO: 1171589 - DNA, 15 bp, Homo sapiens
ccaggcacgaatttt

SEQ ID NO: 1171590 - DNA, 15 bp, Homo sapiens
cccaggcacgaattt

SEQ ID NO: 1171591 - DNA, 15 bp, Homo sapiens
acccaggcacgaatt

SEQ ID NO: 1171592 - DNA, 15 bp, Homo sapiens
aacccaggcacgaat

SEQ ID NO: 1171593 - DNA, 15 bp, Homo sapiens
caacccaggcacgaa

SEQ ID NO: 1171594 - DNA, 15 bp, Homo sapiens
ccaacccaggcacga

SEQ ID NO: 1171595 - DNA, 15 bp, Homo sapiens
cccaacccaggcacg

SEQ ID NO: 1171596 - DNA, 15 bp, Homo sapiens
ccccaacccaggcac

SEQ ID NO: 1171597 - DNA, 15 bp, Homo sapiens
tccccaacccaggca

SEQ ID NO: 1171598 - DNA, 15 bp, Homo sapiens
gtccccaacccaggc

SEQ ID NO: 1171599 - DNA, 15 bp, Homo sapiens
cgtccccaacccagg

SEQ ID NO: 1171600 - DNA, 15 bp, Homo sapiens
tcgtccccaacccag

SEQ ID NO: 1171601 - DNA, 15 bp, Homo sapiens
gtcgtccccaaccca

SEQ ID NO: 1171602 - DNA, 15 bp, Homo sapiens
ggtcgtccccaaccc

SEQ ID NO: 1171603 - DNA, 15 bp, Homo sapiens
aggtcgtccccaacc

SEQ ID NO: 1171604 - DNA, 15 bp, Homo sapiens
gaggtcgtccccaac

SEQ ID NO: 1171605 - DNA, 15 bp, Homo sapiens
agaggtcgtccccaa

SEQ ID NO: 1171606 - DNA, 15 bp, Homo sapiens
cagaggtcgtcccca

SEQ ID NO: 1171607 - DNA, 15 bp, Homo sapiens
acagaggtcgtcccc

SEQ ID NO: 1171608 - DNA, 15 bp, Homo sapiens
aacagaggtcgtccc

SEQ ID NO: 1171609 - DNA, 15 bp, Homo sapiens
gaacagaggtcgtcc

SEQ ID NO: 1171610 - DNA, 15 bp, Homo sapiens
ggaacagaggtcgtc

SEQ ID NO: 1171611 - DNA, 15 bp, Homo sapiens
tggaacagaggtcgt

SEQ ID NO: 1171612 - DNA, 15 bp, Homo sapiens
atggaacagaggtcg

SEQ ID NO: 1171613 - DNA, 15 bp, Homo sapiens
aatggaacagaggtc

SEQ ID NO: 1171614 - DNA, 15 bp, Homo sapiens
aaatggaacagaggt

SEQ ID NO: 1171615 - DNA, 15 bp, Homo sapiens
aaaatggaacagagg

SEQ ID NO: 1171616 - DNA, 15 bp, Homo sapiens
taaaatggaacagag

SEQ ID NO: 1171617 - DNA, 15 bp, Homo sapiens
ttaaaatggaacaga

SEQ ID NO: 1171618 - DNA, 15 bp, Homo sapiens
tttaaaatggaacag

SEQ ID NO: 1171619 - DNA, 15 bp, Homo sapiens
ttttaaaatggaaca

SEQ ID NO: 1171620 - DNA, 15 bp, Homo sapiens
attttaaaatggaac

SEQ ID NO: 1171621 - DNA, 15 bp, Homo sapiens
tattttaaaatggaa

SEQ ID NO: 1171622 - DNA, 15 bp, Homo sapiens
atattttaaaatgga

SEQ ID NO: 1171623 - DNA, 15 bp, Homo sapiens
aatattttaaaatgg

SEQ ID NO: 1171624 - DNA, 15 bp, Homo sapiens
aaatattttaaaatg

SEQ ID NO: 1171625 - DNA, 15 bp, Homo sapiens
aaaatattttaaaat

SEQ ID NO: 1171626 - DNA, 15 bp, Homo sapiens
gaaaatattttaaaa

SEQ ID NO: 1171627 - DNA, 15 bp, Homo sapiens
ggaaaatattttaaa

SEQ ID NO: 1171628 - DNA, 15 bp, Homo sapiens
aggaaaatattttaa

SEQ ID NO: 1171629 - DNA, 15 bp, Homo sapiens
aaggaaaatatttta

SEQ ID NO: 1171630 - DNA, 15 bp, Homo sapiens
caaggaaaatatttt

SEQ ID NO: 1171631 - DNA, 15 bp, Homo sapiens
ccaaggaaaatattt

SEQ ID NO: 1171632 - DNA, 15 bp, Homo sapiens
gccaaggaaaatatt

SEQ ID NO: 1171633 - DNA, 15 bp, Homo sapiens
agccaaggaaaatat

SEQ ID NO: 1171634 - DNA, 15 bp, Homo sapiens
gagccaaggaaaata

SEQ ID NO: 1171635 - DNA, 15 bp, Homo sapiens
ggagccaaggaaaat

SEQ ID NO: 1171636 - DNA, 15 bp, Homo sapiens
gggagccaaggaaaa

SEQ ID NO: 1171637 - DNA, 15 bp, Homo sapiens
tgggagccaaggaaa

SEQ ID NO: 1171638 - DNA, 15 bp, Homo sapiens
ctgggagccaaggaa

SEQ ID NO: 1171639 - DNA, 15 bp, Homo sapiens
cctgggagccaagga

SEQ ID NO: 1171640 - DNA, 15 bp, Homo sapiens
tcctgggagccaagg

SEQ ID NO: 1171641 - DNA, 15 bp, Homo sapiens
ttcctgggagccaag

SEQ ID NO: 1171642 - DNA, 15 bp, Homo sapiens
cttcctgggagccaa

SEQ ID NO: 1171643 - DNA, 15 bp, Homo sapiens
ccttcctgggagcca

SEQ ID NO: 1171644 - DNA, 15 bp, Homo sapiens
tccttcctgggagcc

SEQ ID NO: 1171645 - DNA, 15 bp, Homo sapiens
atccttcctgggagc

SEQ ID NO: 1171646 - DNA, 15 bp, Homo sapiens
aatccttcctgggag

SEQ ID NO: 1171647 - DNA, 15 bp, Homo sapiens
aaatccttcctggga

SEQ ID NO: 1171648 - DNA, 15 bp, Homo sapiens
caaatccttcctggg

SEQ ID NO: 1171649 - DNA, 15 bp, Homo sapiens
acaaatccttcctgg

SEQ ID NO: 1171650 - DNA, 15 bp, Homo sapiens
aacaaatccttcctg

SEQ ID NO: 1171651 - DNA, 15 bp, Homo sapiens
taacaaatccttcct

SEQ ID NO: 1171652 - DNA, 15 bp, Homo sapiens
ctaacaaatccttcc

SEQ ID NO: 1171653 - DNA, 15 bp, Homo sapiens
tctaacaaatccttc

SEQ ID NO: 1171654 - DNA, 15 bp, Homo sapiens
gtctaacaaatcctt

SEQ ID NO: 1171655 - DNA, 15 bp, Homo sapiens
agtctaacaaatcct

SEQ ID NO: 1171656 - DNA, 15 bp, Homo sapiens
gagtctaacaaatcc

SEQ ID NO: 1171657 - DNA, 15 bp, Homo sapiens
agagtctaacaaatc

SEQ ID NO: 1171658 - DNA, 15 bp, Homo sapiens
aagagtctaacaaat

SEQ ID NO: 1171659 - DNA, 15 bp, Homo sapiens
gaagagtctaacaaa

SEQ ID NO: 1171660 - DNA, 15 bp, Homo sapiens
ggaagagtctaacaa

SEQ ID NO: 1171661 - DNA, 15 bp, Homo sapiens
aggaagagtctaaca

SEQ ID NO: 1171662 - DNA, 15 bp, Homo sapiens
caggaagagtctaac

SEQ ID NO: 1171663 - DNA, 15 bp, Homo sapiens
tcaggaagagtctaa

SEQ ID NO: 1171664 - DNA, 15 bp, Homo sapiens
ctcaggaagagtcta

SEQ ID NO: 1171665 - DNA, 15 bp, Homo sapiens
cctcaggaagagtct

SEQ ID NO: 1171666 - DNA, 15 bp, Homo sapiens
acctcaggaagagtc

SEQ ID NO: 1171667 - DNA, 15 bp, Homo sapiens
aacctcaggaagagt

SEQ ID NO: 1171668 - DNA, 15 bp, Homo sapiens
aaacctcaggaagag

SEQ ID NO: 1171669 - DNA, 15 bp, Homo sapiens
aaaacctcaggaaga

SEQ ID NO: 1171670 - DNA, 15 bp, Homo sapiens
caaaacctcaggaag

SEQ ID NO: 1171671 - DNA, 15 bp, Homo sapiens
tcaaaacctcaggaa

SEQ ID NO: 1171672 - DNA, 15 bp, Homo sapiens
gtcaaaacctcagga

SEQ ID NO: 1171673 - DNA, 15 bp, Homo sapiens
tgtcaaaacctcagg

SEQ ID NO: 1171674 - DNA, 15 bp, Homo sapiens
ttgtcaaaacctcag

SEQ ID NO: 1171675 - DNA, 15 bp, Homo sapiens
tttgtcaaaacctca

SEQ ID NO: 1171676 - DNA, 15 bp, Homo sapiens
gtttgtcaaaacctc

SEQ ID NO: 1171677 - DNA, 15 bp, Homo sapiens
agtttgtcaaaacct

SEQ ID NO: 1171678 - DNA, 15 bp, Homo sapiens
gagtttgtcaaaacc

SEQ ID NO: 1171679 - DNA, 15 bp, Homo sapiens
agagtttgtcaaaac

SEQ ID NO: 1171680 - DNA, 15 bp, Homo sapiens
gagagtttgtcaaaa

SEQ ID NO: 1171681 - DNA, 15 bp, Homo sapiens
agagagtttgtcaaa

SEQ ID NO: 1171682 - DNA, 15 bp, Homo sapiens
cagagagtttgtcaa

SEQ ID NO: 1171683 - DNA, 15 bp, Homo sapiens
acagagagtttgtca

SEQ ID NO: 1171684 - DNA, 15 bp, Homo sapiens
tacagagagtttgtc

SEQ ID NO: 1171685 - DNA, 15 bp, Homo sapiens
atacagagagtttgt

SEQ ID NO: 1171686 - DNA, 15 bp, Homo sapiens
aatacagagagtttg

SEQ ID NO: 1171687 - DNA, 15 bp, Homo sapiens
aaatacagagagttt

SEQ ID NO: 1171688 - DNA, 15 bp, Homo sapiens
aaaatacagagagtt

SEQ ID NO: 1171689 - DNA, 15 bp, Homo sapiens
aaaaatacagagagt

SEQ ID NO: 1171690 - DNA, 15 bp, Homo sapiens
gaaaaatacagagag

SEQ ID NO: 1171691 - DNA, 15 bp, Homo sapiens
tgaaaaatacagaga

SEQ ID NO: 1171692 - DNA, 15 bp, Homo sapiens
ttgaaaaatacagag

SEQ ID NO: 1171693 - DNA, 15 bp, Homo sapiens
tttgaaaaatacaga

SEQ ID NO: 1171694 - DNA, 15 bp, Homo sapiens
atttgaaaaatacag

SEQ ID NO: 1171695 - DNA, 15 bp, Homo sapiens
tatttgaaaaataca

SEQ ID NO: 1171696 - DNA, 15 bp, Homo sapiens
gtatttgaaaaatac

SEQ ID NO: 1171697 - DNA, 15 bp, Homo sapiens
agtatttgaaaaata

SEQ ID NO: 1171698 - DNA, 15 bp, Homo sapiens
aagtatttgaaaaat

SEQ ID NO: 1171699 - DNA, 15 bp, Homo sapiens
taagtatttgaaaaa

SEQ ID NO: 1171700 - DNA, 15 bp, Homo sapiens
ttaagtatttgaaaa

SEQ ID NO: 1171701 - DNA, 15 bp, Homo sapiens
cttaagtatttgaaa

SEQ ID NO: 1171702 - DNA, 15 bp, Homo sapiens
acttaagtatttgaa

SEQ ID NO: 1171703 - DNA, 15 bp, Homo sapiens
tacttaagtatttga

SEQ ID NO: 1171704 - DNA, 15 bp, Homo sapiens
atacttaagtatttg

SEQ ID NO: 1171705 - DNA, 15 bp, Homo sapiens
gatacttaagtattt

SEQ ID NO: 1171706 - DNA, 15 bp, Homo sapiens
agatacttaagtatt

SEQ ID NO: 1171707 - DNA, 15 bp, Homo sapiens
tagatacttaagtat

SEQ ID NO: 1171708 - DNA, 15 bp, Homo sapiens
atagatacttaagta

SEQ ID NO: 1171709 - DNA, 15 bp, Homo sapiens
aatagatacttaagt

SEQ ID NO: 1171710 - DNA, 15 bp, Homo sapiens
gaatagatacttaag

SEQ ID NO: 1171711 - DNA, 15 bp, Homo sapiens
cgaatagatacttaa

SEQ ID NO: 1171712 - DNA, 15 bp, Homo sapiens
ccgaatagatactta

SEQ ID NO: 1171713 - DNA, 15 bp, Homo sapiens
gccgaatagatactt

SEQ ID NO: 1171714 - DNA, 15 bp, Homo sapiens
agccgaatagatact

SEQ ID NO: 1171715 - DNA, 15 bp, Homo sapiens
cagccgaatagatac

SEQ ID NO: 1171716 - DNA, 15 bp, Homo sapiens
tcagccgaatagata

SEQ ID NO: 1171717 - DNA, 15 bp, Homo sapiens
gtcagccgaatagat

SEQ ID NO: 1171718 - DNA, 15 bp, Homo sapiens
tgtcagccgaataga

SEQ ID NO: 1171719 - DNA, 15 bp, Homo sapiens
atgtcagccgaatag

SEQ ID NO: 1171720 - DNA, 15 bp, Homo sapiens
gatgtcagccgaata

SEQ ID NO: 1171721 - DNA, 15 bp, Homo sapiens
agatgtcagccgaat

SEQ ID NO: 1171722 - DNA, 15 bp, Homo sapiens
aagatgtcagccgaa

SEQ ID NO: 1171723 - DNA, 15 bp, Homo sapiens
taagatgtcagccga

SEQ ID NO: 1171724 - DNA, 15 bp, Homo sapiens
ttaagatgtcagccg

SEQ ID NO: 1171725 - DNA, 15 bp, Homo sapiens
attaagatgtcagcc

SEQ ID NO: 1171726 - DNA, 15 bp, Homo sapiens
gattaagatgtcagc

SEQ ID NO: 1171727 - DNA, 15 bp, Homo sapiens
tgattaagatgtcag

SEQ ID NO: 1171728 - DNA, 15 bp, Homo sapiens
ctgattaagatgtca

SEQ ID NO: 1171729 - DNA, 15 bp, Homo sapiens
actgattaagatgtc

SEQ ID NO: 1171730 - DNA, 15 bp, Homo sapiens
tactgattaagatgt

SEQ ID NO: 1171731 - DNA, 15 bp, Homo sapiens
gtactgattaagatg

SEQ ID NO: 1171732 - DNA, 15 bp, Homo sapiens
cgtactgattaagat

SEQ ID NO: 1171733 - DNA, 15 bp, Homo sapiens
tcgtactgattaaga

SEQ ID NO: 1171734 - DNA, 15 bp, Homo sapiens
gtcgtactgattaag

SEQ ID NO: 1171735 - DNA, 15 bp, Homo sapiens
agtcgtactgattaa

SEQ ID NO: 1171736 - DNA, 15 bp, Homo sapiens
cagtcgtactgatta

SEQ ID NO: 1171737 - DNA, 15 bp, Homo sapiens
acagtcgtactgatt

SEQ ID NO: 1171738 - DNA, 15 bp, Homo sapiens
gacagtcgtactgat

SEQ ID NO: 1171739 - DNA, 15 bp, Homo sapiens
tgacagtcgtactga

SEQ ID NO: 1171740 - DNA, 15 bp, Homo sapiens
ctgacagtcgtactg

SEQ ID NO: 1171741 - DNA, 15 bp, Homo sapiens
tctgacagtcgtact

SEQ ID NO: 1171742 - DNA, 15 bp, Homo sapiens
ttctgacagtcgtac

SEQ ID NO: 1171743 - DNA, 15 bp, Homo sapiens
gttctgacagtcgta

SEQ ID NO: 1171744 - DNA, 15 bp, Homo sapiens
tgttctgacagtcgt

SEQ ID NO: 1171745 - DNA, 15 bp, Homo sapiens
atgttctgacagtcg

SEQ ID NO: 1171746 - DNA, 15 bp, Homo sapiens
gatgttctgacagtc

SEQ ID NO: 1171747 - DNA, 15 bp, Homo sapiens
tgatgttctgacagt

SEQ ID NO: 1171748 - DNA, 15 bp, Homo sapiens
gtgatgttctgacag

SEQ ID NO: 1171749 - DNA, 15 bp, Homo sapiens
agtgatgttctgaca

SEQ ID NO: 1171750 - DNA, 15 bp, Homo sapiens
aagtgatgttctgac

SEQ ID NO: 1171751 - DNA, 15 bp, Homo sapiens
caagtgatgttctga

SEQ ID NO: 1171752 - DNA, 15 bp, Homo sapiens
tcaagtgatgttctg

SEQ ID NO: 1171753 - DNA, 15 bp, Homo sapiens
ttcaagtgatgttct

SEQ ID NO: 1171754 - DNA, 15 bp, Homo sapiens
attcaagtgatgttc

SEQ ID NO: 1171755 - DNA, 15 bp, Homo sapiens
aattcaagtgatgtt

SEQ ID NO: 1171756 - DNA, 15 bp, Homo sapiens
aaattcaagtgatgt

SEQ ID NO: 1171757 - DNA, 15 bp, Homo sapiens
gaaattcaagtgatg

SEQ ID NO: 1171758 - DNA, 15 bp, Homo sapiens
agaaattcaagtgat

SEQ ID NO: 1171759 - DNA, 15 bp, Homo sapiens
cagaaattcaagtga

SEQ ID NO: 1171760 - DNA, 15 bp, Homo sapiens
tcagaaattcaagtg

SEQ ID NO: 1171761 - DNA, 15 bp, Homo sapiens
gtcagaaattcaagt

SEQ ID NO: 1171762 - DNA, 15 bp, Homo sapiens
tgtcagaaattcaag

SEQ ID NO: 1171763 - DNA, 15 bp, Homo sapiens
ctgtcagaaattcaa

SEQ ID NO: 1171764 - DNA, 15 bp, Homo sapiens
cctgtcagaaattca

SEQ ID NO: 1171765 - DNA, 15 bp, Homo sapiens
acctgtcagaaattc

SEQ ID NO: 1171766 - DNA, 15 bp, Homo sapiens
cacctgtcagaaatt

SEQ ID NO: 1171767 - DNA, 15 bp, Homo sapiens
tcacctgtcagaaat

SEQ ID NO: 1171768 - DNA, 15 bp, Homo sapiens
gtcacctgtcagaaa

SEQ ID NO: 1171769 - DNA, 15 bp, Homo sapiens
tgtcacctgtcagaa

SEQ ID NO: 1171770 - DNA, 15 bp, Homo sapiens
gtgtcacctgtcaga

SEQ ID NO: 1171771 - DNA, 15 bp, Homo sapiens
ggtgtcacctgtcag

SEQ ID NO: 1171772 - DNA, 15 bp, Homo sapiens
gggtgtcacctgtca

SEQ ID NO: 1171773 - DNA, 15 bp, Homo sapiens
tgggtgtcacctgtc

SEQ ID NO: 1171774 - DNA, 15 bp, Homo sapiens
ttgggtgtcacctgt

SEQ ID NO: 1171775 - DNA, 15 bp, Homo sapiens
tttgggtgtcacctg

SEQ ID NO: 1171776 - DNA, 15 bp, Homo sapiens
ttttgggtgtcacct

SEQ ID NO: 1171777 - DNA, 15 bp, Homo sapiens
tttttgggtgtcacc

SEQ ID NO: 1171778 - DNA, 15 bp, Homo sapiens
ttttttgggtgtcac

SEQ ID NO: 1171779 - DNA, 15 bp, Homo sapiens
cttttttgggtgtca

SEQ ID NO: 1171780 - DNA, 15 bp, Homo sapiens
gcttttttgggtgtc

SEQ ID NO: 1171781 - DNA, 15 bp, Homo sapiens
tgcttttttgggtgt

SEQ ID NO: 1171782 - DNA, 15 bp, Homo sapiens
ttgcttttttgggtg

SEQ ID NO: 1171783 - DNA, 15 bp, Homo sapiens
tttgcttttttgggt

SEQ ID NO: 1171784 - DNA, 15 bp, Homo sapiens
ttttgcttttttggg

SEQ ID NO: 1171785 - DNA, 15 bp, Homo sapiens
cttttgcttttttgg

SEQ ID NO: 1171786 - DNA, 15 bp, Homo sapiens
gcttttgcttttttg

SEQ ID NO: 1171787 - DNA, 15 bp, Homo sapiens
tgcttttgctttttt

SEQ ID NO: 1171788 - DNA, 15 bp, Homo sapiens
ctgcttttgcttttt

SEQ ID NO: 1171789 - DNA, 15 bp, Homo sapiens
cctgcttttgctttt

SEQ ID NO: 1171790 - DNA, 15 bp, Homo sapiens
acctgcttttgcttt

SEQ ID NO: 1171791 - DNA, 15 bp, Homo sapiens
aacctgcttttgctt

SEQ ID NO: 1171792 - DNA, 15 bp, Homo sapiens
aaacctgcttttgct

SEQ ID NO: 1171793 - DNA, 15 bp, Homo sapiens
taaacctgcttttgc

SEQ ID NO: 1171794 - DNA, 15 bp, Homo sapiens
ataaacctgcttttg

SEQ ID NO: 1171795 - DNA, 15 bp, Homo sapiens
aataaacctgctttt

SEQ ID NO: 1171796 - DNA, 15 bp, Homo sapiens
aaataaacctgcttt

SEQ ID NO: 1171797 - DNA, 15 bp, Homo sapiens
caaataaacctgctt

SEQ ID NO: 1171798 - DNA, 15 bp, Homo sapiens
acaaataaacctgct

SEQ ID NO: 1171799 - DNA, 15 bp, Homo sapiens
tacaaataaacctgc

SEQ ID NO: 1171800 - DNA, 15 bp, Homo sapiens
ctacaaataaacctg

SEQ ID NO: 1171801 - DNA, 15 bp, Homo sapiens
cctacaaataaacct

SEQ ID NO: 1171802 - DNA, 15 bp, Homo sapiens
acctacaaataaacc

SEQ ID NO: 1171803 - DNA, 15 bp, Homo sapiens
tacctacaaataaac

SEQ ID NO: 1171804 - DNA, 15 bp, Homo sapiens
ttacctacaaataaa

SEQ ID NO: 1171805 - DNA, 15 bp, Homo sapiens
gttacctacaaataa

SEQ ID NO: 1171806 - DNA, 15 bp, Homo sapiens
ggttacctacaaata

SEQ ID NO: 1171807 - DNA, 15 bp, Homo sapiens
tggttacctacaaat

SEQ ID NO: 1171808 - DNA, 15 bp, Homo sapiens
ctggttacctacaaa

SEQ ID NO: 1171809 - DNA, 15 bp, Homo sapiens
gctggttacctacaa

SEQ ID NO: 1171810 - DNA, 15 bp, Homo sapiens
agctggttacctaca

SEQ ID NO: 1171811 - DNA, 15 bp, Homo sapiens
gagctggttacctac

SEQ ID NO: 1171812 - DNA, 15 bp, Homo sapiens
agagctggttaccta

SEQ ID NO: 1171813 - DNA, 15 bp, Homo sapiens
cagagctggttacct

SEQ ID NO: 1171814 - DNA, 15 bp, Homo sapiens
gcagagctggttacc

SEQ ID NO: 1171815 - DNA, 15 bp, Homo sapiens
agcagagctggttac

SEQ ID NO: 1171816 - DNA, 15 bp, Homo sapiens
gagcagagctggtta

SEQ ID NO: 1171817 - DNA, 15 bp, Homo sapiens
tgagcagagctggtt

SEQ ID NO: 1171818 - DNA, 15 bp, Homo sapiens
atgagcagagctggt

SEQ ID NO: 1171819 - DNA, 15 bp, Homo sapiens
catgagcagagctgg

SEQ ID NO: 1171820 - DNA, 15 bp, Homo sapiens
gcatgagcagagctg

SEQ ID NO: 1171821 - DNA, 15 bp, Homo sapiens
agcatgagcagagct

SEQ ID NO: 1171822 - DNA, 15 bp, Homo sapiens
cagcatgagcagagc

SEQ ID NO: 1171823 - DNA, 15 bp, Homo sapiens
ccagcatgagcagag

SEQ ID NO: 1171824 - DNA, 15 bp, Homo sapiens
cccagcatgagcaga

SEQ ID NO: 1171825 - DNA, 15 bp, Homo sapiens
gcccagcatgagcag

SEQ ID NO: 1171826 - DNA, 15 bp, Homo sapiens
agcccagcatgagca

SEQ ID NO: 1171827 - DNA, 15 bp, Homo sapiens
tagcccagcatgagc

SEQ ID NO: 1171828 - DNA, 15 bp, Homo sapiens
gtagcccagcatgag

SEQ ID NO: 1171829 - DNA, 15 bp, Homo sapiens
tgtagcccagcatga

SEQ ID NO: 1171830 - DNA, 15 bp, Homo sapiens
atgtagcccagcatg

SEQ ID NO: 1171831 - DNA, 15 bp, Homo sapiens
aatgtagcccagcat

SEQ ID NO: 1171832 - DNA, 15 bp, Homo sapiens
caatgtagcccagca

SEQ ID NO: 1171833 - DNA, 15 bp, Homo sapiens
acaatgtagcccagc

SEQ ID NO: 1171834 - DNA, 15 bp, Homo sapiens
tacaatgtagcccag

SEQ ID NO: 1171835 - DNA, 15 bp, Homo sapiens
ttacaatgtagccca

SEQ ID NO: 1171836 - DNA, 15 bp, Homo sapiens
attacaatgtagccc

SEQ ID NO: 1171837 - DNA, 15 bp, Homo sapiens
aattacaatgtagcc

SEQ ID NO: 1171838 - DNA, 15 bp, Homo sapiens
aaattacaatgtagc

SEQ ID NO: 1171839 - DNA, 15 bp, Homo sapiens
gaaattacaatgtag

SEQ ID NO: 1171840 - DNA, 15 bp, Homo sapiens
agaaattacaatgta

SEQ ID NO: 1171841 - DNA, 15 bp, Homo sapiens
gagaaattacaatgt

SEQ ID NO: 1171842 - DNA, 15 bp, Homo sapiens
ggagaaattacaatg

SEQ ID NO: 1171843 - DNA, 15 bp, Homo sapiens
aggagaaattacaat

SEQ ID NO: 1171844 - DNA, 15 bp, Homo sapiens
gaggagaaattacaa

SEQ ID NO: 1171845 - DNA, 15 bp, Homo sapiens
cgaggagaaattaca

SEQ ID NO: 1171846 - DNA, 15 bp, Homo sapiens
acgaggagaaattac

SEQ ID NO: 1171847 - DNA, 15 bp, Homo sapiens
tacgaggagaaatta

SEQ ID NO: 1171848 - DNA, 15 bp, Homo sapiens
atacgaggagaaatt

SEQ ID NO: 1171849 - DNA, 15 bp, Homo sapiens
aatacgaggagaaat

SEQ ID NO: 1171850 - DNA, 15 bp, Homo sapiens
taatacgaggagaaa

SEQ ID NO: 1171851 - DNA, 15 bp, Homo sapiens
ttaatacgaggagaa

SEQ ID NO: 1171852 - DNA, 15 bp, Homo sapiens
gttaatacgaggaga

SEQ ID NO: 1171853 - DNA, 15 bp, Homo sapiens
agttaatacgaggag

SEQ ID NO: 1171854 - DNA, 15 bp, Homo sapiens
aagttaatacgagga

SEQ ID NO: 1171855 - DNA, 15 bp, Homo sapiens
gaagttaatacgagg

SEQ ID NO: 1171856 - DNA, 15 bp, Homo sapiens
agaagttaatacgag

SEQ ID NO: 1171857 - DNA, 15 bp, Homo sapiens
cagaagttaatacga

SEQ ID NO: 1171858 - DNA, 15 bp, Homo sapiens
tcagaagttaatacg

SEQ ID NO: 1171859 - DNA, 15 bp, Homo sapiens
atcagaagttaatac

SEQ ID NO: 1171860 - DNA, 15 bp, Homo sapiens
gatcagaagttaata

SEQ ID NO: 1171861 - DNA, 15 bp, Homo sapiens
tgatcagaagttaat

SEQ ID NO: 1171862 - DNA, 15 bp, Homo sapiens
ttgatcagaagttaa

SEQ ID NO: 1171863 - DNA, 15 bp, Homo sapiens
tttgatcagaagtta

SEQ ID NO: 1171864 - DNA, 15 bp, Homo sapiens
atttgatcagaagtt

SEQ ID NO: 1171865 - DNA, 15 bp, Homo sapiens
aatttgatcagaagt

SEQ ID NO: 1171866 - DNA, 15 bp, Homo sapiens
gaatttgatcagaag

SEQ ID NO: 1171867 - DNA, 15 bp, Homo sapiens
ggaatttgatcagaa

SEQ ID NO: 1171868 - DNA, 15 bp, Homo sapiens
aggaatttgatcaga

SEQ ID NO: 1171869 - DNA, 15 bp, Homo sapiens
caggaatttgatcag

SEQ ID NO: 1171870 - DNA, 15 bp, Homo sapiens
tcaggaatttgatca

SEQ ID NO: 1171871 - DNA, 15 bp, Homo sapiens
ctcaggaatttgatc

SEQ ID NO: 1171872 - DNA, 15 bp, Homo sapiens
actcaggaatttgat

SEQ ID NO: 1171873 - DNA, 15 bp, Homo sapiens
gactcaggaatttga

SEQ ID NO: 1171874 - DNA, 15 bp, Homo sapiens
tgactcaggaatttg

SEQ ID NO: 1171875 - DNA, 15 bp, Homo sapiens
ctgactcaggaattt

SEQ ID NO: 1171876 - DNA, 15 bp, Homo sapiens
tctgactcaggaatt

SEQ ID NO: 1171877 - DNA, 15 bp, Homo sapiens
atctgactcaggaat

SEQ ID NO: 1171878 - DNA, 15 bp, Homo sapiens
catctgactcaggaa

SEQ ID NO: 1171879 - DNA, 15 bp, Homo sapiens
gcatctgactcagga

SEQ ID NO: 1171880 - DNA, 15 bp, Homo sapiens
ggcatctgactcagg

SEQ ID NO: 1171881 - DNA, 15 bp, Homo sapiens
aggcatctgactcag

SEQ ID NO: 1171882 - DNA, 15 bp, Homo sapiens
taggcatctgactca

SEQ ID NO: 1171883 - DNA, 15 bp, Homo sapiens
ctaggcatctgactc

SEQ ID NO: 1171884 - DNA, 15 bp, Homo sapiens
cctaggcatctgact

SEQ ID NO: 1171885 - DNA, 15 bp, Homo sapiens
gcctaggcatctgac

SEQ ID NO: 1171886 - DNA, 15 bp, Homo sapiens
tgcctaggcatctga

SEQ ID NO: 1171887 - DNA, 15 bp, Homo sapiens
ttgcctaggcatctg

SEQ ID NO: 1171888 - DNA, 15 bp, Homo sapiens
cttgcctaggcatct

SEQ ID NO: 1171889 - DNA, 15 bp, Homo sapiens
tcttgcctaggcatc

SEQ ID NO: 1171890 - DNA, 15 bp, Homo sapiens
ttcttgcctaggcat

SEQ ID NO: 1171891 - DNA, 15 bp, Homo sapiens
cttcttgcctaggca

SEQ ID NO: 1171892 - DNA, 15 bp, Homo sapiens
ccttcttgcctaggc

SEQ ID NO: 1171893 - DNA, 15 bp, Homo sapiens
tccttcttgcctagg

SEQ ID NO: 1171894 - DNA, 15 bp, Homo sapiens
ttccttcttgcctag

SEQ ID NO: 1171895 - DNA, 15 bp, Homo sapiens
tttccttcttgccta

SEQ ID NO: 1171896 - DNA, 15 bp, Homo sapiens
gtttccttcttgcct

SEQ ID NO: 1171897 - DNA, 15 bp, Homo sapiens
agtttccttcttgcc

SEQ ID NO: 1171898 - DNA, 15 bp, Homo sapiens
gagtttccttcttgc

SEQ ID NO: 1171899 - DNA, 15 bp, Homo sapiens
tgagtttccttcttg

SEQ ID NO: 1171900 - DNA, 15 bp, Homo sapiens
gtgagtttccttctt

SEQ ID NO: 1171901 - DNA, 15 bp, Homo sapiens
tgtgagtttccttct

SEQ ID NO: 1171902 - DNA, 15 bp, Homo sapiens
ctgtgagtttccttc

SEQ ID NO: 1171903 - DNA, 15 bp, Homo sapiens
tctgtgagtttcctt

SEQ ID NO: 1171904 - DNA, 15 bp, Homo sapiens
ctctgtgagtttcct

SEQ ID NO: 1171905 - DNA, 15 bp, Homo sapiens
gctctgtgagtttcc

SEQ ID NO: 1171906 - DNA, 15 bp, Homo sapiens
tgctctgtgagtttc

SEQ ID NO: 1171907 - DNA, 15 bp, Homo sapiens
gtgctctgtgagttt

SEQ ID NO: 1171908 - DNA, 15 bp, Homo sapiens
tgtgctctgtgagtt

SEQ ID NO: 1171909 - DNA, 15 bp, Homo sapiens
atgtgctctgtgagt

SEQ ID NO: 1171910 - DNA, 15 bp, Homo sapiens
catgtgctctgtgag

SEQ ID NO: 1171911 - DNA, 15 bp, Homo sapiens
acatgtgctctgtga

SEQ ID NO: 1171912 - DNA, 15 bp, Homo sapiens
aacatgtgctctgtg

SEQ ID NO: 1171913 - DNA, 15 bp, Homo sapiens
aaacatgtgctctgt

SEQ ID NO: 1171914 - DNA, 15 bp, Homo sapiens
gaaacatgtgctctg

SEQ ID NO: 1171915 - DNA, 15 bp, Homo sapiens
agaaacatgtgctct

SEQ ID NO: 1171916 - DNA, 15 bp, Homo sapiens
tagaaacatgtgctc

SEQ ID NO: 1171917 - DNA, 15 bp, Homo sapiens
ctagaaacatgtgct

SEQ ID NO: 1171918 - DNA, 15 bp, Homo sapiens
actagaaacatgtgc

SEQ ID NO: 1171919 - DNA, 15 bp, Homo sapiens
aactagaaacatgtg

SEQ ID NO: 1171920 - DNA, 15 bp, Homo sapiens
gaactagaaacatgt

SEQ ID NO: 1171921 - DNA, 15 bp, Homo sapiens
agaactagaaacatg

SEQ ID NO: 1171922 - DNA, 15 bp, Homo sapiens
cagaactagaaacat

SEQ ID NO: 1171923 - DNA, 15 bp, Homo sapiens
tcagaactagaaaca

SEQ ID NO: 1171924 - DNA, 15 bp, Homo sapiens
ctcagaactagaaac

SEQ ID NO: 1171925 - DNA, 15 bp, Homo sapiens
tctcagaactagaaa

SEQ ID NO: 1171926 - DNA, 15 bp, Homo sapiens
atctcagaactagaa

SEQ ID NO: 1171927 - DNA, 15 bp, Homo sapiens
catctcagaactaga

SEQ ID NO: 1171928 - DNA, 15 bp, Homo sapiens
tcatctcagaactag

SEQ ID NO: 1171929 - DNA, 15 bp, Homo sapiens
ctcatctcagaacta

SEQ ID NO: 1171930 - DNA, 15 bp, Homo sapiens
cctcatctcagaact

SEQ ID NO: 1171931 - DNA, 15 bp, Homo sapiens
tcctcatctcagaac

SEQ ID NO: 1171932 - DNA, 15 bp, Homo sapiens
ctcctcatctcagaa

SEQ ID NO: 1171933 - DNA, 15 bp, Homo sapiens
gctcctcatctcaga

SEQ ID NO: 1171934 - DNA, 15 bp, Homo sapiens
ggctcctcatctcag

SEQ ID NO: 1171935 - DNA, 15 bp, Homo sapiens
aggctcctcatctca

SEQ ID NO: 1171936 - DNA, 15 bp, Homo sapiens
taggctcctcatctc

SEQ ID NO: 1171937 - DNA, 15 bp, Homo sapiens
ataggctcctcatct

SEQ ID NO: 1171938 - DNA, 15 bp, Homo sapiens
cataggctcctcatc

SEQ ID NO: 1171939 - DNA, 15 bp, Homo sapiens
gcataggctcctcat

SEQ ID NO: 1171940 - DNA, 15 bp, Homo sapiens
ggcataggctcctca

SEQ ID NO: 1171941 - DNA, 15 bp, Homo sapiens
gggcataggctcctc

SEQ ID NO: 1171942 - DNA, 15 bp, Homo sapiens
ggggcataggctcct

SEQ ID NO: 1171943 - DNA, 15 bp, Homo sapiens
cggggcataggctcc

SEQ ID NO: 1171944 - DNA, 15 bp, Homo sapiens
ccggggcataggctc

SEQ ID NO: 1171945 - DNA, 15 bp, Homo sapiens
cccggggcataggct

SEQ ID NO: 1171946 - DNA, 15 bp, Homo sapiens
ccccggggcataggc

SEQ ID NO: 1171947 - DNA, 15 bp, Homo sapiens
cccccggggcatagg

SEQ ID NO: 1171948 - DNA, 15 bp, Homo sapiens
ccccccggggcatag

SEQ ID NO: 1171949 - DNA, 15 bp, Homo sapiens
tccccccggggcata

SEQ ID NO: 1171950 - DNA, 15 bp, Homo sapiens
ctccccccggggcat

SEQ ID NO: 1171951 - DNA, 15 bp, Homo sapiens
actccccccggggca

SEQ ID NO: 1171952 - DNA, 15 bp, Homo sapiens
cactccccccggggc

SEQ ID NO: 1171953 - DNA, 15 bp, Homo sapiens
tcactccccccgggg

SEQ ID NO: 1171954 - DNA, 15 bp, Homo sapiens
atcactccccccggg

SEQ ID NO: 1171955 - DNA, 15 bp, Homo sapiens
catcactccccccgg

SEQ ID NO: 1171956 - DNA, 15 bp, Homo sapiens
acatcactccccccg

SEQ ID NO: 1171957 - DNA, 15 bp, Homo sapiens
cacatcactcccccc

SEQ ID NO: 1171958 - DNA, 15 bp, Homo sapiens
gcacatcactccccc

SEQ ID NO: 1171959 - DNA, 15 bp, Homo sapiens
agcacatcactcccc

SEQ ID NO: 1171960 - DNA, 15 bp, Homo sapiens
cagcacatcactccc

SEQ ID NO: 1171961 - DNA, 15 bp, Homo sapiens
tcagcacatcactcc

SEQ ID NO: 1171962 - DNA, 15 bp, Homo sapiens
gtcagcacatcactc

SEQ ID NO: 1171963 - DNA, 15 bp, Homo sapiens
tgtcagcacatcact

SEQ ID NO: 1171964 - DNA, 15 bp, Homo sapiens
gtgtcagcacatcac

SEQ ID NO: 1171965 - DNA, 15 bp, Homo sapiens
agtgtcagcacatca

SEQ ID NO: 1171966 - DNA, 15 bp, Homo sapiens
gagtgtcagcacatc

SEQ ID NO: 1171967 - DNA, 15 bp, Homo sapiens
tgagtgtcagcacat

SEQ ID NO: 1171968 - DNA, 15 bp, Homo sapiens
gtgagtgtcagcaca

SEQ ID NO: 1171969 - DNA, 15 bp, Homo sapiens
cgtgagtgtcagcac

SEQ ID NO: 1171970 - DNA, 15 bp, Homo sapiens
ccgtgagtgtcagca

SEQ ID NO: 1171971 - DNA, 15 bp, Homo sapiens
gccgtgagtgtcagc

SEQ ID NO: 1171972 - DNA, 15 bp, Homo sapiens
agccgtgagtgtcag

SEQ ID NO: 1171973 - DNA, 15 bp, Homo sapiens
cagccgtgagtgtca

SEQ ID NO: 1171974 - DNA, 15 bp, Homo sapiens
ccagccgtgagtgtc

SEQ ID NO: 1171975 - DNA, 15 bp, Homo sapiens
tccagccgtgagtgt

SEQ ID NO: 1171976 - DNA, 15 bp, Homo sapiens
ctccagccgtgagtg

SEQ ID NO: 1171977 - DNA, 15 bp, Homo sapiens
cctccagccgtgagt

SEQ ID NO: 1171978 - DNA, 15 bp, Homo sapiens
ccctccagccgtgag

SEQ ID NO: 1171979 - DNA, 15 bp, Homo sapiens
accctccagccgtga

SEQ ID NO: 1171980 - DNA, 15 bp, Homo sapiens
aaccctccagccgtg

SEQ ID NO: 1171981 - DNA, 15 bp, Homo sapiens
caaccctccagccgt

SEQ ID NO: 1171982 - DNA, 15 bp, Homo sapiens
ccaaccctccagccg

SEQ ID NO: 1171983 - DNA, 15 bp, Homo sapiens
gccaaccctccagcc

SEQ ID NO: 1171984 - DNA, 15 bp, Homo sapiens
tgccaaccctccagc

SEQ ID NO: 1171985 - DNA, 15 bp, Homo sapiens
ttgccaaccctccag

SEQ ID NO: 1171986 - DNA, 15 bp, Homo sapiens
cttgccaaccctcca

SEQ ID NO: 1171987 - DNA, 15 bp, Homo sapiens
tcttgccaaccctcc

SEQ ID NO: 1171988 - DNA, 15 bp, Homo sapiens
ctcttgccaaccctc

SEQ ID NO: 1171989 - DNA, 15 bp, Homo sapiens
cctcttgccaaccct

SEQ ID NO: 1171990 - DNA, 15 bp, Homo sapiens
tcctcttgccaaccc

SEQ ID NO: 1171991 - DNA, 15 bp, Homo sapiens
gtcctcttgccaacc

SEQ ID NO: 1171992 - DNA, 15 bp, Homo sapiens
tgtcctcttgccaac

SEQ ID NO: 1171993 - DNA, 15 bp, Homo sapiens
gtgtcctcttgccaa

SEQ ID NO: 1171994 - DNA, 15 bp, Homo sapiens
cgtgtcctcttgcca

SEQ ID NO: 1171995 - DNA, 15 bp, Homo sapiens
gcgtgtcctcttgcc

SEQ ID NO: 1171996 - DNA, 15 bp, Homo sapiens
tgcgtgtcctcttgc

SEQ ID NO: 1171997 - DNA, 15 bp, Homo sapiens
ctgcgtgtcctcttg

SEQ ID NO: 1171998 - DNA, 15 bp, Homo sapiens
cctgcgtgtcctctt

SEQ ID NO: 1171999 - DNA, 15 bp, Homo sapiens
tcctgcgtgtcctct

SEQ ID NO: 1172000 - DNA, 15 bp, Homo sapiens
gtcctgcgtgtcctc

SEQ ID NO: 1172001 - DNA, 15 bp, Homo sapiens
agtcctgcgtgtcct

SEQ ID NO: 1172002 - DNA, 15 bp, Homo sapiens
aagtcctgcgtgtcc

SEQ ID NO: 1172003 - DNA, 15 bp, Homo sapiens
caagtcctgcgtgtc

SEQ ID NO: 1172004 - DNA, 15 bp, Homo sapiens
acaagtcctgcgtgt

SEQ ID NO: 1172005 - DNA, 15 bp, Homo sapiens
aacaagtcctgcgtg

SEQ ID NO: 1172006 - DNA, 15 bp, Homo sapiens
gaacaagtcctgcgt

SEQ ID NO: 1172007 - DNA, 15 bp, Homo sapiens
ggaacaagtcctgcg

SEQ ID NO: 1172008 - DNA, 15 bp, Homo sapiens
aggaacaagtcctgc

SEQ ID NO: 1172009 - DNA, 15 bp, Homo sapiens
caggaacaagtcctg

SEQ ID NO: 1172010 - DNA, 15 bp, Homo sapiens
ccaggaacaagtcct

SEQ ID NO: 1172011 - DNA, 15 bp, Homo sapiens
gccaggaacaagtcc

SEQ ID NO: 1172012 - DNA, 15 bp, Homo sapiens
agccaggaacaagtc

SEQ ID NO: 1172013 - DNA, 15 bp, Homo sapiens
cagccaggaacaagt

SEQ ID NO: 1172014 - DNA, 15 bp, Homo sapiens
tcagccaggaacaag

SEQ ID NO: 1172015 - DNA, 15 bp, Homo sapiens
ttcagccaggaacaa

SEQ ID NO: 1172016 - DNA, 15 bp, Homo sapiens
cttcagccaggaaca

SEQ ID NO: 1172017 - DNA, 15 bp, Homo sapiens
tcttcagccaggaac

SEQ ID NO: 1172018 - DNA, 15 bp, Homo sapiens
ttcttcagccaggaa

SEQ ID NO: 1172019 - DNA, 15 bp, Homo sapiens
tttcttcagccagga

SEQ ID NO: 1172020 - DNA, 15 bp, Homo sapiens
atttcttcagccagg

SEQ ID NO: 1172021 - DNA, 15 bp, Homo sapiens
aatttcttcagccag

SEQ ID NO: 1172022 - DNA, 15 bp, Homo sapiens
aaatttcttcagcca

SEQ ID NO: 1172023 - DNA, 15 bp, Homo sapiens
aaaatttcttcagcc

SEQ ID NO: 1172024 - DNA, 15 bp, Homo sapiens
taaaatttcttcagc

SEQ ID NO: 1172025 - DNA, 15 bp, Homo sapiens
ataaaatttcttcag

SEQ ID NO: 1172026 - DNA, 15 bp, Homo sapiens
gataaaatttcttca

SEQ ID NO: 1172027 - DNA, 15 bp, Homo sapiens
cgataaaatttcttc

SEQ ID NO: 1172028 - DNA, 15 bp, Homo sapiens
tcgataaaatttctt

SEQ ID NO: 1172029 - DNA, 15 bp, Homo sapiens
ttcgataaaatttct

SEQ ID NO: 1172030 - DNA, 15 bp, Homo sapiens
tttcgataaaatttc

SEQ ID NO: 1172031 - DNA, 15 bp, Homo sapiens
gtttcgataaaattt

SEQ ID NO: 1172032 - DNA, 15 bp, Homo sapiens
tgtttcgataaaatt

SEQ ID NO: 1172033 - DNA, 15 bp, Homo sapiens
atgtttcgataaaat

SEQ ID NO: 1172034 - DNA, 15 bp, Homo sapiens
aatgtttcgataaaa

SEQ ID NO: 1172035 - DNA, 15 bp, Homo sapiens
gaatgtttcgataaa

SEQ ID NO: 1172036 - DNA, 15 bp, Homo sapiens
tgaatgtttcgataa

SEQ ID NO: 1172037 - DNA, 15 bp, Homo sapiens
ctgaatgtttcgata

SEQ ID NO: 1172038 - DNA, 15 bp, Homo sapiens
gctgaatgtttcgat

SEQ ID NO: 1172039 - DNA, 15 bp, Homo sapiens
ggctgaatgtttcga

SEQ ID NO: 1172040 - DNA, 15 bp, Homo sapiens
aggctgaatgtttcg

SEQ ID NO: 1172041 - DNA, 15 bp, Homo sapiens
taggctgaatgtttc

SEQ ID NO: 1172042 - DNA, 15 bp, Homo sapiens
ctaggctgaatgttt

SEQ ID NO: 1172043 - DNA, 15 bp, Homo sapiens
cctaggctgaatgtt

SEQ ID NO: 1172044 - DNA, 15 bp, Homo sapiens
acctaggctgaatgt

SEQ ID NO: 1172045 - DNA, 15 bp, Homo sapiens
gacctaggctgaatg

SEQ ID NO: 1172046 - DNA, 15 bp, Homo sapiens
tgacctaggctgaat

SEQ ID NO: 1172047 - DNA, 15 bp, Homo sapiens
gtgacctaggctgaa

SEQ ID NO: 1172048 - DNA, 15 bp, Homo sapiens
tgtgacctaggctga

SEQ ID NO: 1172049 - DNA, 15 bp, Homo sapiens
gtgtgacctaggctg

SEQ ID NO: 1172050 - DNA, 15 bp, Homo sapiens
tgtgtgacctaggct

SEQ ID NO: 1172051 - DNA, 15 bp, Homo sapiens
gtgtgtgacctaggc

SEQ ID NO: 1172052 - DNA, 15 bp, Homo sapiens
tgtgtgtgacctagg

SEQ ID NO: 1172053 - DNA, 15 bp, Homo sapiens
ctgtgtgtgacctag

SEQ ID NO: 1172054 - DNA, 15 bp, Homo sapiens
gctgtgtgtgaccta

SEQ ID NO: 1172055 - DNA, 15 bp, Homo sapiens
agctgtgtgtgacct

SEQ ID NO: 1172056 - DNA, 15 bp, Homo sapiens
gagctgtgtgtgacc

SEQ ID NO: 1172057 - DNA, 15 bp, Homo sapiens
agagctgtgtgtgac

SEQ ID NO: 1172058 - DNA, 15 bp, Homo sapiens
cagagctgtgtgtga

SEQ ID NO: 1172059 - DNA, 15 bp, Homo sapiens
gcagagctgtgtgtg

SEQ ID NO: 1172060 - DNA, 15 bp, Homo sapiens
ggcagagctgtgtgt

SEQ ID NO: 1172061 - DNA, 15 bp, Homo sapiens
aggcagagctgtgtg

SEQ ID NO: 1172062 - DNA, 15 bp, Homo sapiens
caggcagagctgtgt

SEQ ID NO: 1172063 - DNA, 15 bp, Homo sapiens
gcaggcagagctgtg

SEQ ID NO: 1172064 - DNA, 15 bp, Homo sapiens
agcaggcagagctgt

SEQ ID NO: 1172065 - DNA, 15 bp, Homo sapiens
cagcaggcagagctg

SEQ ID NO: 1172066 - DNA, 15 bp, Homo sapiens
gcagcaggcagagct

SEQ ID NO: 1172067 - DNA, 15 bp, Homo sapiens
ggcagcaggcagagc

SEQ ID NO: 1172068 - DNA, 15 bp, Homo sapiens
tggcagcaggcagag

SEQ ID NO: 1172069 - DNA, 15 bp, Homo sapiens
ctggcagcaggcaga

SEQ ID NO: 1172070 - DNA, 15 bp, Homo sapiens
cctggcagcaggcag

SEQ ID NO: 1172071 - DNA, 15 bp, Homo sapiens
ccctggcagcaggca

SEQ ID NO: 1172072 - DNA, 15 bp, Homo sapiens
accctggcagcaggc

SEQ ID NO: 1172073 - DNA, 15 bp, Homo sapiens
aaccctggcagcagg

SEQ ID NO: 1172074 - DNA, 15 bp, Homo sapiens
aaaccctggcagcag

SEQ ID NO: 1172075 - DNA, 15 bp, Homo sapiens
gaaaccctggcagca

SEQ ID NO: 1172076 - DNA, 15 bp, Homo sapiens
agaaaccctggcagc

SEQ ID NO: 1172077 - DNA, 15 bp, Homo sapiens
gagaaaccctggcag

SEQ ID NO: 1172078 - DNA, 15 bp, Homo sapiens
agagaaaccctggca

SEQ ID NO: 1172079 - DNA, 15 bp, Homo sapiens
aagagaaaccctggc

SEQ ID NO: 1172080 - DNA, 15 bp, Homo sapiens
caagagaaaccctgg

SEQ ID NO: 1172081 - DNA, 15 bp, Homo sapiens
acaagagaaaccctg

SEQ ID NO: 1172082 - DNA, 15 bp, Homo sapiens
gacaagagaaaccct

SEQ ID NO: 1172083 - DNA, 15 bp, Homo sapiens
ggacaagagaaaccc

SEQ ID NO: 1172084 - DNA, 15 bp, Homo sapiens
aggacaagagaaacc

SEQ ID NO: 1172085 - DNA, 15 bp, Homo sapiens
aaggacaagagaaac

SEQ ID NO: 1172086 - DNA, 15 bp, Homo sapiens
gaaggacaagagaaa

SEQ ID NO: 1172087 - DNA, 15 bp, Homo sapiens
agaaggacaagagaa

SEQ ID NO: 1172088 - DNA, 15 bp, Homo sapiens
gagaaggacaagaga

SEQ ID NO: 1172089 - DNA, 15 bp, Homo sapiens
agagaaggacaagag

SEQ ID NO: 1172090 - DNA, 15 bp, Homo sapiens
cagagaaggacaaga

SEQ ID NO: 1172091 - DNA, 15 bp, Homo sapiens
acagagaaggacaag

SEQ ID NO: 1172092 - DNA, 15 bp, Homo sapiens
aacagagaaggacaa

SEQ ID NO: 1172093 - DNA, 15 bp, Homo sapiens
caacagagaaggaca

SEQ ID NO: 1172094 - DNA, 15 bp, Homo sapiens
gcaacagagaaggac

SEQ ID NO: 1172095 - DNA, 15 bp, Homo sapiens
agcaacagagaagga

SEQ ID NO: 1172096 - DNA, 15 bp, Homo sapiens
cagcaacagagaagg

SEQ ID NO: 1172097 - DNA, 15 bp, Homo sapiens
gcagcaacagagaag

SEQ ID NO: 1172098 - DNA, 15 bp, Homo sapiens
agcagcaacagagaa

SEQ ID NO: 1172099 - DNA, 15 bp, Homo sapiens
gagcagcaacagaga

SEQ ID NO: 1172100 - DNA, 15 bp, Homo sapiens
ggagcagcaacagag

SEQ ID NO: 1172101 - DNA, 15 bp, Homo sapiens
aggagcagcaacaga

SEQ ID NO: 1172102 - DNA, 15 bp, Homo sapiens
caggagcagcaacag

SEQ ID NO: 1172103 - DNA, 15 bp, Homo sapiens
gcaggagcagcaaca

SEQ ID NO: 1172104 - DNA, 15 bp, Homo sapiens
ggcaggagcagcaac

SEQ ID NO: 1172105 - DNA, 15 bp, Homo sapiens
gggcaggagcagcaa

SEQ ID NO: 1172106 - DNA, 15 bp, Homo sapiens
tgggcaggagcagca

SEQ ID NO: 1172107 - DNA, 15 bp, Homo sapiens
atgggcaggagcagc

SEQ ID NO: 1172108 - DNA, 15 bp, Homo sapiens
catgggcaggagcag

SEQ ID NO: 1172109 - DNA, 15 bp, Homo sapiens
ccatgggcaggagca

SEQ ID NO: 1172110 - DNA, 15 bp, Homo sapiens
gccatgggcaggagc

SEQ ID NO: 1172111 - DNA, 15 bp, Homo sapiens
tgccatgggcaggag

SEQ ID NO: 1172112 - DNA, 15 bp, Homo sapiens
atgccatgggcagga

SEQ ID NO: 1172113 - DNA, 15 bp, Homo sapiens
catgccatgggcagg

SEQ ID NO: 1172114 - DNA, 15 bp, Homo sapiens
tcatgccatgggcag

SEQ ID NO: 1172115 - DNA, 15 bp, Homo sapiens
ctcatgccatgggca

SEQ ID NO: 1172116 - DNA, 15 bp, Homo sapiens
cctcatgccatgggc

SEQ ID NO: 1172117 - DNA, 15 bp, Homo sapiens
tcctcatgccatggg

SEQ ID NO: 1172118 - DNA, 15 bp, Homo sapiens
ctcctcatgccatgg

SEQ ID NO: 1172119 - DNA, 15 bp, Homo sapiens
actcctcatgccatg

SEQ ID NO: 1172120 - DNA, 15 bp, Homo sapiens
aactcctcatgccat

SEQ ID NO: 1172121 - DNA, 15 bp, Homo sapiens
aaactcctcatgcca

SEQ ID NO: 1172122 - DNA, 15 bp, Homo sapiens
caaactcctcatgcc

SEQ ID NO: 1172123 - DNA, 15 bp, Homo sapiens
acaaactcctcatgc

SEQ ID NO: 1172124 - DNA, 15 bp, Homo sapiens
cacaaactcctcatg

SEQ ID NO: 1172125 - DNA, 15 bp, Homo sapiens
ccacaaactcctcat

SEQ ID NO: 1172126 - DNA, 15 bp, Homo sapiens
cccacaaactcctca

SEQ ID NO: 1172127 - DNA, 15 bp, Homo sapiens
acccacaaactcctc

SEQ ID NO: 1172128 - DNA, 15 bp, Homo sapiens
aacccacaaactcct

SEQ ID NO: 1172129 - DNA, 15 bp, Homo sapiens
taacccacaaactcc

SEQ ID NO: 1172130 - DNA, 15 bp, Homo sapiens
ttaacccacaaactc

SEQ ID NO: 1172131 - DNA, 15 bp, Homo sapiens
cttaacccacaaact

SEQ ID NO: 1172132 - DNA, 15 bp, Homo sapiens
ccttaacccacaaac

SEQ ID NO: 1172133 - DNA, 15 bp, Homo sapiens
cccttaacccacaaa

SEQ ID NO: 1172134 - DNA, 15 bp, Homo sapiens
gcccttaacccacaa

SEQ ID NO: 1172135 - DNA, 15 bp, Homo sapiens
tgcccttaacccaca

SEQ ID NO: 1172136 - DNA, 15 bp, Homo sapiens
gtgcccttaacccac

SEQ ID NO: 1172137 - DNA, 15 bp, Homo sapiens
agtgcccttaaccca

SEQ ID NO: 1172138 - DNA, 15 bp, Homo sapiens
aagtgcccttaaccc

SEQ ID NO: 1172139 - DNA, 15 bp, Homo sapiens
caagtgcccttaacc

SEQ ID NO: 1172140 - DNA, 15 bp, Homo sapiens
gcaagtgcccttaac

SEQ ID NO: 1172141 - DNA, 15 bp, Homo sapiens
ggcaagtgcccttaa

SEQ ID NO: 1172142 - DNA, 15 bp, Homo sapiens
tggcaagtgccctta

SEQ ID NO: 1172143 - DNA, 15 bp, Homo sapiens
gtggcaagtgccctt

SEQ ID NO: 1172144 - DNA, 15 bp, Homo sapiens
agtggcaagtgccct

SEQ ID NO: 1172145 - DNA, 15 bp, Homo sapiens
gagtggcaagtgccc

SEQ ID NO: 1172146 - DNA, 15 bp, Homo sapiens
ggagtggcaagtgcc

SEQ ID NO: 1172147 - DNA, 15 bp, Homo sapiens
tggagtggcaagtgc

SEQ ID NO: 1172148 - DNA, 15 bp, Homo sapiens
ctggagtggcaagtg

SEQ ID NO: 1172149 - DNA, 15 bp, Homo sapiens
cctggagtggcaagt

SEQ ID NO: 1172150 - DNA, 15 bp, Homo sapiens
acctggagtggcaag

SEQ ID NO: 1172151 - DNA, 15 bp, Homo sapiens
cacctggagtggcaa

SEQ ID NO: 1172152 - DNA, 15 bp, Homo sapiens
gcacctggagtggca

SEQ ID NO: 1172153 - DNA, 15 bp, Homo sapiens
ggcacctggagtggc

SEQ ID NO: 1172154 - DNA, 15 bp, Homo sapiens
gggcacctggagtgg

SEQ ID NO: 1172155 - DNA, 15 bp, Homo sapiens
tgggcacctggagtg

SEQ ID NO: 1172156 - DNA, 15 bp, Homo sapiens
ttgggcacctggagt

SEQ ID NO: 1172157 - DNA, 15 bp, Homo sapiens
cttgggcacctggag

SEQ ID NO: 1172158 - DNA, 15 bp, Homo sapiens
tcttgggcacctgga

SEQ ID NO: 1172159 - DNA, 15 bp, Homo sapiens
atcttgggcacctgg

SEQ ID NO: 1172160 - DNA, 15 bp, Homo sapiens
catcttgggcacctg

SEQ ID NO: 1172161 - DNA, 15 bp, Homo sapiens
gcatcttgggcacct

SEQ ID NO: 1172162 - DNA, 15 bp, Homo sapiens
ggcatcttgggcacc

SEQ ID NO: 1172163 - DNA, 15 bp, Homo sapiens
tggcatcttgggcac

SEQ ID NO: 1172164 - DNA, 15 bp, Homo sapiens
ctggcatcttgggca

SEQ ID NO: 1172165 - DNA, 15 bp, Homo sapiens
tctggcatcttgggc

SEQ ID NO: 1172166 - DNA, 15 bp, Homo sapiens
atctggcatcttggg

SEQ ID NO: 1172167 - DNA, 15 bp, Homo sapiens
tatctggcatcttgg

SEQ ID NO: 1172168 - DNA, 15 bp, Homo sapiens
atatctggcatcttg

SEQ ID NO: 1172169 - DNA, 15 bp, Homo sapiens
aatatctggcatctt

SEQ ID NO: 1172170 - DNA, 15 bp, Homo sapiens
gaatatctggcatct

SEQ ID NO: 1172171 - DNA, 15 bp, Homo sapiens
agaatatctggcatc

SEQ ID NO: 1172172 - DNA, 15 bp, Homo sapiens
gagaatatctggcat

SEQ ID NO: 1172173 - DNA, 15 bp, Homo sapiens
agagaatatctggca

SEQ ID NO: 1172174 - DNA, 15 bp, Homo sapiens
cagagaatatctggc

SEQ ID NO: 1172175 - DNA, 15 bp, Homo sapiens
acagagaatatctgg

SEQ ID NO: 1172176 - DNA, 15 bp, Homo sapiens
cacagagaatatctg

SEQ ID NO: 1172177 - DNA, 15 bp, Homo sapiens
gcacagagaatatct

SEQ ID NO: 1172178 - DNA, 15 bp, Homo sapiens
tgcacagagaatatc

SEQ ID NO: 1172179 - DNA, 15 bp, Homo sapiens
ttgcacagagaatat

SEQ ID NO: 1172180 - DNA, 15 bp, Homo sapiens
tttgcacagagaata

SEQ ID NO: 1172181 - DNA, 15 bp, Homo sapiens
atttgcacagagaat

SEQ ID NO: 1172182 - DNA, 15 bp, Homo sapiens
catttgcacagagaa

SEQ ID NO: 1172183 - DNA, 15 bp, Homo sapiens
ccatttgcacagaga

SEQ ID NO: 1172184 - DNA, 15 bp, Homo sapiens
gccatttgcacagag

SEQ ID NO: 1172185 - DNA, 15 bp, Homo sapiens
ggccatttgcacaga

SEQ ID NO: 1172186 - DNA, 15 bp, Homo sapiens
gggccatttgcacag

SEQ ID NO: 1172187 - DNA, 15 bp, Homo sapiens
ggggccatttgcaca

SEQ ID NO: 1172188 - DNA, 15 bp, Homo sapiens
tggggccatttgcac

SEQ ID NO: 1172189 - DNA, 15 bp, Homo sapiens
ttggggccatttgca

SEQ ID NO: 1172190 - DNA, 15 bp, Homo sapiens
cttggggccatttgc

SEQ ID NO: 1172191 - DNA, 15 bp, Homo sapiens
acttggggccatttg

SEQ ID NO: 1172192 - DNA, 15 bp, Homo sapiens
gacttggggccattt

SEQ ID NO: 1172193 - DNA, 15 bp, Homo sapiens
ggacttggggccatt

SEQ ID NO: 1172194 - DNA, 15 bp, Homo sapiens
tggacttggggccat

SEQ ID NO: 1172195 - DNA, 15 bp, Homo sapiens
atggacttggggcca

SEQ ID NO: 1172196 - DNA, 15 bp, Homo sapiens
gatggacttggggcc

SEQ ID NO: 1172197 - DNA, 15 bp, Homo sapiens
ggatggacttggggc

SEQ ID NO: 1172198 - DNA, 15 bp, Homo sapiens
gggatggacttgggg

SEQ ID NO: 1172199 - DNA, 15 bp, Homo sapiens
ggggatggacttggg

SEQ ID NO: 1172200 - DNA, 15 bp, Homo sapiens
tggggatggacttgg

SEQ ID NO: 1172201 - DNA, 15 bp, Homo sapiens
ctggggatggacttg

SEQ ID NO: 1172202 - DNA, 15 bp, Homo sapiens
cctggggatggactt

SEQ ID NO: 1172203 - DNA, 15 bp, Homo sapiens
ccctggggatggact

SEQ ID NO: 1172204 - DNA, 15 bp, Homo sapiens
accctggggatggac

SEQ ID NO: 1172205 - DNA, 15 bp, Homo sapiens
gaccctggggatgga

SEQ ID NO: 1172206 - DNA, 15 bp, Homo sapiens
agaccctggggatgg

SEQ ID NO: 1172207 - DNA, 15 bp, Homo sapiens
cagaccctggggatg

SEQ ID NO: 1172208 - DNA, 15 bp, Homo sapiens
acagaccctggggat

SEQ ID NO: 1172209 - DNA, 15 bp, Homo sapiens
tacagaccctgggga

SEQ ID NO: 1172210 - DNA, 15 bp, Homo sapiens
gtacagaccctgggg

SEQ ID NO: 1172211 - DNA, 15 bp, Homo sapiens
tgtacagaccctggg

SEQ ID NO: 1172212 - DNA, 15 bp, Homo sapiens
gtgtacagaccctgg

SEQ ID NO: 1172213 - DNA, 15 bp, Homo sapiens
ggtgtacagaccctg

SEQ ID NO: 1172214 - DNA, 15 bp, Homo sapiens
aggtgtacagaccct

SEQ ID NO: 1172215 - DNA, 15 bp, Homo sapiens
gaggtgtacagaccc

SEQ ID NO: 1172216 - DNA, 15 bp, Homo sapiens
agaggtgtacagacc

SEQ ID NO: 1172217 - DNA, 15 bp, Homo sapiens
aagaggtgtacagac

SEQ ID NO: 1172218 - DNA, 15 bp, Homo sapiens
gaagaggtgtacaga

SEQ ID NO: 1172219 - DNA, 15 bp, Homo sapiens
ggaagaggtgtacag

SEQ ID NO: 1172220 - DNA, 15 bp, Homo sapiens
gggaagaggtgtaca

SEQ ID NO: 1172221 - DNA, 15 bp, Homo sapiens
tgggaagaggtgtac

SEQ ID NO: 1172222 - DNA, 15 bp, Homo sapiens
ctgggaagaggtgta

SEQ ID NO: 1172223 - DNA, 15 bp, Homo sapiens
cctgggaagaggtgt

SEQ ID NO: 1172224 - DNA, 15 bp, Homo sapiens
gcctgggaagaggtg

SEQ ID NO: 1172225 - DNA, 15 bp, Homo sapiens
ggcctgggaagaggt

SEQ ID NO: 1172226 - DNA, 15 bp, Homo sapiens
gggcctgggaagagg

SEQ ID NO: 1172227 - DNA, 15 bp, Homo sapiens
tgggcctgggaagag

SEQ ID NO: 1172228 - DNA, 15 bp, Homo sapiens
ttgggcctgggaaga

SEQ ID NO: 1172229 - DNA, 15 bp, Homo sapiens
gttgggcctgggaag

SEQ ID NO: 1172230 - DNA, 15 bp, Homo sapiens
ggttgggcctgggaa

SEQ ID NO: 1172231 - DNA, 15 bp, Homo sapiens
aggttgggcctggga

SEQ ID NO: 1172232 - DNA, 15 bp, Homo sapiens
gaggttgggcctggg

SEQ ID NO: 1172233 - DNA, 15 bp, Homo sapiens
ggaggttgggcctgg

SEQ ID NO: 1172234 - DNA, 15 bp, Homo sapiens
aggaggttgggcctg

SEQ ID NO: 1172235 - DNA, 15 bp, Homo sapiens
caggaggttgggcct

SEQ ID NO: 1172236 - DNA, 15 bp, Homo sapiens
tcaggaggttgggcc

SEQ ID NO: 1172237 - DNA, 15 bp, Homo sapiens
ctcaggaggttgggc

SEQ ID NO: 1172238 - DNA, 15 bp, Homo sapiens
cctcaggaggttggg

SEQ ID NO: 1172239 - DNA, 15 bp, Homo sapiens
tcctcaggaggttgg

SEQ ID NO: 1172240 - DNA, 15 bp, Homo sapiens
gtcctcaggaggttg

SEQ ID NO: 1172241 - DNA, 15 bp, Homo sapiens
agtcctcaggaggtt

SEQ ID NO: 1172242 - DNA, 15 bp, Homo sapiens
aagtcctcaggaggt

SEQ ID NO: 1172243 - DNA, 15 bp, Homo sapiens
aaagtcctcaggagg

SEQ ID NO: 1172244 - DNA, 15 bp, Homo sapiens
aaaagtcctcaggag

SEQ ID NO: 1172245 - DNA, 15 bp, Homo sapiens
taaaagtcctcagga

SEQ ID NO: 1172246 - DNA, 15 bp, Homo sapiens
ctaaaagtcctcagg

SEQ ID NO: 1172247 - DNA, 15 bp, Homo sapiens
cctaaaagtcctcag

SEQ ID NO: 1172248 - DNA, 15 bp, Homo sapiens
gcctaaaagtcctca

SEQ ID NO: 1172249 - DNA, 15 bp, Homo sapiens
ggcctaaaagtcctc

SEQ ID NO: 1172250 - DNA, 15 bp, Homo sapiens
tggcctaaaagtcct

SEQ ID NO: 1172251 - DNA, 15 bp, Homo sapiens
ctggcctaaaagtcc

SEQ ID NO: 1172252 - DNA, 15 bp, Homo sapiens
tctggcctaaaagtc

SEQ ID NO: 1172253 - DNA, 15 bp, Homo sapiens
ctctggcctaaaagt

SEQ ID NO: 1172254 - DNA, 15 bp, Homo sapiens
tctctggcctaaaag

SEQ ID NO: 1172255 - DNA, 15 bp, Homo sapiens
ttctctggcctaaaa

SEQ ID NO: 1172256 - DNA, 15 bp, Homo sapiens
cttctctggcctaaa

SEQ ID NO: 1172257 - DNA, 15 bp, Homo sapiens
acttctctggcctaa

SEQ ID NO: 1172258 - DNA, 15 bp, Homo sapiens
tacttctctggccta

SEQ ID NO: 1172259 - DNA, 15 bp, Homo sapiens
atacttctctggcct

SEQ ID NO: 1172260 - DNA, 15 bp, Homo sapiens
tatacttctctggcc

SEQ ID NO: 1172261 - DNA, 15 bp, Homo sapiens
atatacttctctggc

SEQ ID NO: 1172262 - DNA, 15 bp, Homo sapiens
catatacttctctgg

SEQ ID NO: 1172263 - DNA, 15 bp, Homo sapiens
acatatacttctctg

SEQ ID NO: 1172264 - DNA, 15 bp, Homo sapiens
gacatatacttctct

SEQ ID NO: 1172265 - DNA, 15 bp, Homo sapiens
agacatatacttctc

SEQ ID NO: 1172266 - DNA, 15 bp, Homo sapiens
cagacatatacttct

SEQ ID NO: 1172267 - DNA, 15 bp, Homo sapiens
acagacatatacttc

SEQ ID NO: 1172268 - DNA, 15 bp, Homo sapiens
cacagacatatactt

SEQ ID NO: 1172269 - DNA, 15 bp, Homo sapiens
gcacagacatatact

SEQ ID NO: 1172270 - DNA, 15 bp, Homo sapiens
tgcacagacatatac

SEQ ID NO: 1172271 - DNA, 15 bp, Homo sapiens
ctgcacagacatata

SEQ ID NO: 1172272 - DNA, 15 bp, Homo sapiens
cctgcacagacatat

SEQ ID NO: 1172273 - DNA, 15 bp, Homo sapiens
ccctgcacagacata

SEQ ID NO: 1172274 - DNA, 15 bp, Homo sapiens
gccctgcacagacat

SEQ ID NO: 1172275 - DNA, 15 bp, Homo sapiens
tgccctgcacagaca

SEQ ID NO: 1172276 - DNA, 15 bp, Homo sapiens
ctgccctgcacagac

SEQ ID NO: 1172277 - DNA, 15 bp, Homo sapiens
cctgccctgcacaga

SEQ ID NO: 1172278 - DNA, 15 bp, Homo sapiens
ccctgccctgcacag

SEQ ID NO: 1172279 - DNA, 15 bp, Homo sapiens
gccctgccctgcaca

SEQ ID NO: 1172280 - DNA, 15 bp, Homo sapiens
agccctgccctgcac

SEQ ID NO: 1172281 - DNA, 15 bp, Homo sapiens
cagccctgccctgca

SEQ ID NO: 1172282 - DNA, 15 bp, Homo sapiens
gcagccctgccctgc

SEQ ID NO: 1172283 - DNA, 15 bp, Homo sapiens
tgcagccctgccctg

SEQ ID NO: 1172284 - DNA, 15 bp, Homo sapiens
ttgcagccctgccct

SEQ ID NO: 1172285 - DNA, 15 bp, Homo sapiens
attgcagccctgccc

SEQ ID NO: 1172286 - DNA, 15 bp, Homo sapiens
cattgcagccctgcc

SEQ ID NO: 1172287 - DNA, 15 bp, Homo sapiens
gcattgcagccctgc

SEQ ID NO: 1172288 - DNA, 15 bp, Homo sapiens
tgcattgcagccctg

SEQ ID NO: 1172289 - DNA, 15 bp, Homo sapiens
ctgcattgcagccct

SEQ ID NO: 1172290 - DNA, 15 bp, Homo sapiens
cctgcattgcagccc

SEQ ID NO: 1172291 - DNA, 15 bp, Homo sapiens
acctgcattgcagcc

SEQ ID NO: 1172292 - DNA, 15 bp, Homo sapiens
tacctgcattgcagc

SEQ ID NO: 1172293 - DNA, 15 bp, Homo sapiens
ctacctgcattgcag

SEQ ID NO: 1172294 - DNA, 15 bp, Homo sapiens
cctacctgcattgca

SEQ ID NO: 1172295 - DNA, 15 bp, Homo sapiens
gcctacctgcattgc

SEQ ID NO: 1172296 - DNA, 15 bp, Homo sapiens
tgcctacctgcattg

SEQ ID NO: 1172297 - DNA, 15 bp, Homo sapiens
ctgcctacctgcatt

SEQ ID NO: 1172298 - DNA, 15 bp, Homo sapiens
cctgcctacctgcat

SEQ ID NO: 1172299 - DNA, 15 bp, Homo sapiens
tcctgcctacctgca

SEQ ID NO: 1172300 - DNA, 15 bp, Homo sapiens
ctcctgcctacctgc

SEQ ID NO: 1172301 - DNA, 15 bp, Homo sapiens
cctcctgcctacctg

SEQ ID NO: 1172302 - DNA, 15 bp, Homo sapiens
ccctcctgcctacct

SEQ ID NO: 1172303 - DNA, 15 bp, Homo sapiens
accctcctgcctacc

SEQ ID NO: 1172304 - DNA, 15 bp, Homo sapiens
caccctcctgcctac

SEQ ID NO: 1172305 - DNA, 15 bp, Homo sapiens
tcaccctcctgccta

SEQ ID NO: 1172306 - DNA, 15 bp, Homo sapiens
gtcaccctcctgcct

SEQ ID NO: 1172307 - DNA, 15 bp, Homo sapiens
ggtcaccctcctgcc

SEQ ID NO: 1172308 - DNA, 15 bp, Homo sapiens
tggtcaccctcctgc

SEQ ID NO: 1172309 - DNA, 15 bp, Homo sapiens
atggtcaccctcctg

SEQ ID NO: 1172310 - DNA, 15 bp, Homo sapiens
gatggtcaccctcct

SEQ ID NO: 1172311 - DNA, 15 bp, Homo sapiens
ggatggtcaccctcc

SEQ ID NO: 1172312 - DNA, 15 bp, Homo sapiens
tggatggtcaccctc

SEQ ID NO: 1172313 - DNA, 15 bp, Homo sapiens
ctggatggtcaccct

SEQ ID NO: 1172314 - DNA, 15 bp, Homo sapiens
cctggatggtcaccc

SEQ ID NO: 1172315 - DNA, 15 bp, Homo sapiens
ccctggatggtcacc

SEQ ID NO: 1172316 - DNA, 15 bp, Homo sapiens
accctggatggtcac

SEQ ID NO: 1172317 - DNA, 15 bp, Homo sapiens
caccctggatggtca

SEQ ID NO: 1172318 - DNA, 15 bp, Homo sapiens
acaccctggatggtc

SEQ ID NO: 1172319 - DNA, 15 bp, Homo sapiens
aacaccctggatggt

SEQ ID NO: 1172320 - DNA, 15 bp, Homo sapiens
caacaccctggatgg

SEQ ID NO: 1172321 - DNA, 15 bp, Homo sapiens
tcaacaccctggatg

SEQ ID NO: 1172322 - DNA, 15 bp, Homo sapiens
ctcaacaccctggat

SEQ ID NO: 1172323 - DNA, 15 bp, Homo sapiens
cctcaacaccctgga

SEQ ID NO: 1172324 - DNA, 15 bp, Homo sapiens
ccctcaacaccctgg

SEQ ID NO: 1172325 - DNA, 15 bp, Homo sapiens
gccctcaacaccctg

SEQ ID NO: 1172326 - DNA, 15 bp, Homo sapiens
ggccctcaacaccct

SEQ ID NO: 1172327 - DNA, 15 bp, Homo sapiens
gggccctcaacaccc

SEQ ID NO: 1172328 - DNA, 15 bp, Homo sapiens
ggggccctcaacacc

SEQ ID NO: 1172329 - DNA, 15 bp, Homo sapiens
tggggccctcaacac

SEQ ID NO: 1172330 - DNA, 15 bp, Homo sapiens
atggggccctcaaca

SEQ ID NO: 1172331 - DNA, 15 bp, Homo sapiens
catggggccctcaac

SEQ ID NO: 1172332 - DNA, 15 bp, Homo sapiens
ccatggggccctcaa

SEQ ID NO: 1172333 - DNA, 15 bp, Homo sapiens
tccatggggccctca

SEQ ID NO: 1172334 - DNA, 15 bp, Homo sapiens
ctccatggggccctc

SEQ ID NO: 1172335 - DNA, 15 bp, Homo sapiens
actccatggggccct

SEQ ID NO: 1172336 - DNA, 15 bp, Homo sapiens
cactccatggggccc

SEQ ID NO: 1172337 - DNA, 15 bp, Homo sapiens
ccactccatggggcc

SEQ ID NO: 1172338 - DNA, 15 bp, Homo sapiens
cccactccatggggc

SEQ ID NO: 1172339 - DNA, 15 bp, Homo sapiens
tcccactccatgggg

SEQ ID NO: 1172340 - DNA, 15 bp, Homo sapiens
atcccactccatggg

SEQ ID NO: 1172341 - DNA, 15 bp, Homo sapiens
catcccactccatgg

SEQ ID NO: 1172342 - DNA, 15 bp, Homo sapiens
ccatcccactccatg

SEQ ID NO: 1172343 - DNA, 15 bp, Homo sapiens
tccatcccactccat

SEQ ID NO: 1172344 - DNA, 15 bp, Homo sapiens
ctccatcccactcca

SEQ ID NO: 1172345 - DNA, 15 bp, Homo sapiens
gctccatcccactcc

SEQ ID NO: 1172346 - DNA, 15 bp, Homo sapiens
agctccatcccactc

SEQ ID NO: 1172347 - DNA, 15 bp, Homo sapiens
cagctccatcccact

SEQ ID NO: 1172348 - DNA, 15 bp, Homo sapiens
tcagctccatcccac

SEQ ID NO: 1172349 - DNA, 15 bp, Homo sapiens
ctcagctccatccca

SEQ ID NO: 1172350 - DNA, 15 bp, Homo sapiens
cctcagctccatccc

SEQ ID NO: 1172351 - DNA, 15 bp, Homo sapiens
ccctcagctccatcc

SEQ ID NO: 1172352 - DNA, 15 bp, Homo sapiens
cccctcagctccatc

SEQ ID NO: 1172353 - DNA, 15 bp, Homo sapiens
ccccctcagctccat

SEQ ID NO: 1172354 - DNA, 15 bp, Homo sapiens
gccccctcagctcca

SEQ ID NO: 1172355 - DNA, 15 bp, Homo sapiens
ggccccctcagctcc

SEQ ID NO: 1172356 - DNA, 15 bp, Homo sapiens
tggccccctcagctc

SEQ ID NO: 1172357 - DNA, 15 bp, Homo sapiens
ctggccccctcagct

SEQ ID NO: 1172358 - DNA, 15 bp, Homo sapiens
tctggccccctcagc

SEQ ID NO: 1172359 - DNA, 15 bp, Homo sapiens
ttctggccccctcag

SEQ ID NO: 1172360 - DNA, 15 bp, Homo sapiens
tttctggccccctca

SEQ ID NO: 1172361 - DNA, 15 bp, Homo sapiens
ttttctggccccctc

SEQ ID NO: 1172362 - DNA, 15 bp, Homo sapiens
cttttctggccccct

SEQ ID NO: 1172363 - DNA, 15 bp, Homo sapiens
cccttttctggcccc

SEQ ID NO: 1172364 - DNA, 15 bp, Homo sapiens
ccccttttctggccc

SEQ ID NO: 1172365 - DNA, 15 bp, Homo sapiens
cccccttttctggcc

SEQ ID NO: 1172366 - DNA, 15 bp, Homo sapiens
tcccccttttctggc

SEQ ID NO: 1172367 - DNA, 15 bp, Homo sapiens
gtcccccttttctgg

SEQ ID NO: 1172368 - DNA, 15 bp, Homo sapiens
tgtcccccttttctg

SEQ ID NO: 1172369 - DNA, 15 bp, Homo sapiens
ctgtcccccttttct

SEQ ID NO: 1172370 - DNA, 15 bp, Homo sapiens
cctgtcccccttttc

SEQ ID NO: 1172371 - DNA, 15 bp, Homo sapiens
acctgtccccctttt

SEQ ID NO: 1172372 - DNA, 15 bp, Homo sapiens
aacctgtcccccttt

SEQ ID NO: 1172373 - DNA, 15 bp, Homo sapiens
caacctgtccccctt

SEQ ID NO: 1172374 - DNA, 15 bp, Homo sapiens
acaacctgtccccct

SEQ ID NO: 1172375 - DNA, 15 bp, Homo sapiens
cacaacctgtccccc

SEQ ID NO: 1172376 - DNA, 15 bp, Homo sapiens
ccacaacctgtcccc

SEQ ID NO: 1172377 - DNA, 15 bp, Homo sapiens
gccacaacctgtccc

SEQ ID NO: 1172378 - DNA, 15 bp, Homo sapiens
agccacaacctgtcc

SEQ ID NO: 1172379 - DNA, 15 bp, Homo sapiens
gagccacaacctgtc

SEQ ID NO: 1172380 - DNA, 15 bp, Homo sapiens
cgagccacaacctgt

SEQ ID NO: 1172381 - DNA, 15 bp, Homo sapiens
ccgagccacaacctg

SEQ ID NO: 1172382 - DNA, 15 bp, Homo sapiens
cccgagccacaacct

SEQ ID NO: 1172383 - DNA, 15 bp, Homo sapiens
gcccgagccacaacc

SEQ ID NO: 1172384 - DNA, 15 bp, Homo sapiens
agcccgagccacaac

SEQ ID NO: 1172385 - DNA, 15 bp, Homo sapiens
cagcccgagccacaa

SEQ ID NO: 1172386 - DNA, 15 bp, Homo sapiens
ccagcccgagccaca

SEQ ID NO: 1172387 - DNA, 15 bp, Homo sapiens
tccagcccgagccac

SEQ ID NO: 1172388 - DNA, 15 bp, Homo sapiens
ttccagcccgagcca

SEQ ID NO: 1172389 - DNA, 15 bp, Homo sapiens
cttccagcccgagcc

SEQ ID NO: 1172390 - DNA, 15 bp, Homo sapiens
acttccagcccgagc

SEQ ID NO: 1172391 - DNA, 15 bp, Homo sapiens
cacttccagcccgag

SEQ ID NO: 1172392 - DNA, 15 bp, Homo sapiens
ccacttccagcccga

SEQ ID NO: 1172393 - DNA, 15 bp, Homo sapiens
gccacttccagcccg

SEQ ID NO: 1172394 - DNA, 15 bp, Homo sapiens
agccacttccagccc

SEQ ID NO: 1172395 - DNA, 15 bp, Homo sapiens
gagccacttccagcc

SEQ ID NO: 1172396 - DNA, 15 bp, Homo sapiens
ggagccacttccagc

SEQ ID NO: 1172397 - DNA, 15 bp, Homo sapiens
gggagccacttccag

SEQ ID NO: 1172398 - DNA, 15 bp, Homo sapiens
ggggagccacttcca

SEQ ID NO: 1172399 - DNA, 15 bp, Homo sapiens
gggggagccacttcc

SEQ ID NO: 1172400 - DNA, 15 bp, Homo sapiens
cgggggagccacttc

SEQ ID NO: 1172401 - DNA, 15 bp, Homo sapiens
acgggggagccactt

SEQ ID NO: 1172402 - DNA, 15 bp, Homo sapiens
tacgggggagccact

SEQ ID NO: 1172403 - DNA, 15 bp, Homo sapiens
gtacgggggagccac

SEQ ID NO: 1172404 - DNA, 15 bp, Homo sapiens
ggtacgggggagcca

SEQ ID NO: 1172405 - DNA, 15 bp, Homo sapiens
tggtacgggggagcc

SEQ ID NO: 1172406 - DNA, 15 bp, Homo sapiens
ctggtacgggggagc

SEQ ID NO: 1172407 - DNA, 15 bp, Homo sapiens
gctggtacgggggag

SEQ ID NO: 1172408 - DNA, 15 bp, Homo sapiens
cgctggtacggggga

SEQ ID NO: 1172409 - DNA, 15 bp, Homo sapiens
gcgctggtacggggg

SEQ ID NO: 1172410 - DNA, 15 bp, Homo sapiens
tgcgctggtacgggg

SEQ ID NO: 1172411 - DNA, 15 bp, Homo sapiens
atgcgctggtacggg

SEQ ID NO: 1172412 - DNA, 15 bp, Homo sapiens
aatgcgctggtacgg

SEQ ID NO: 1172413 - DNA, 15 bp, Homo sapiens
gaatgcgctggtacg

SEQ ID NO: 1172414 - DNA, 15 bp, Homo sapiens
agaatgcgctggtac

SEQ ID NO: 1172415 - DNA, 15 bp, Homo sapiens
tagaatgcgctggta

SEQ ID NO: 1172416 - DNA, 15 bp, Homo sapiens
ctagaatgcgctggt

SEQ ID NO: 1172417 - DNA, 15 bp, Homo sapiens
gctagaatgcgctgg

SEQ ID NO: 1172418 - DNA, 15 bp, Homo sapiens
ggctagaatgcgctg

SEQ ID NO: 1172419 - DNA, 15 bp, Homo sapiens
tggctagaatgcgct

SEQ ID NO: 1172420 - DNA, 15 bp, Homo sapiens
ttggctagaatgcgc

SEQ ID NO: 1172421 - DNA, 15 bp, Homo sapiens
cttggctagaatgcg

SEQ ID NO: 1172422 - DNA, 15 bp, Homo sapiens
acttggctagaatgc

SEQ ID NO: 1172423 - DNA, 15 bp, Homo sapiens
aacttggctagaatg

SEQ ID NO: 1172424 - DNA, 15 bp, Homo sapiens
caacttggctagaat

SEQ ID NO: 1172425 - DNA, 15 bp, Homo sapiens
gcaacttggctagaa

SEQ ID NO: 1172426 - DNA, 15 bp, Homo sapiens
ggcaacttggctaga

SEQ ID NO: 1172427 - DNA, 15 bp, Homo sapiens
aggcaacttggctag

SEQ ID NO: 1172428 - DNA, 15 bp, Homo sapiens
aaggcaacttggcta

SEQ ID NO: 1172429 - DNA, 15 bp, Homo sapiens
taaggcaacttggct

SEQ ID NO: 1172430 - DNA, 15 bp, Homo sapiens
ctaaggcaacttggc

SEQ ID NO: 1172431 - DNA, 15 bp, Homo sapiens
tctaaggcaacttgg

SEQ ID NO: 1172432 - DNA, 15 bp, Homo sapiens
ttctaaggcaacttg

SEQ ID NO: 1172433 - DNA, 15 bp, Homo sapiens
attctaaggcaactt

SEQ ID NO: 1172434 - DNA, 15 bp, Homo sapiens
aattctaaggcaact

SEQ ID NO: 1172435 - DNA, 15 bp, Homo sapiens
aaattctaaggcaac

SEQ ID NO: 1172436 - DNA, 15 bp, Homo sapiens
gaaattctaaggcaa

SEQ ID NO: 1172437 - DNA, 15 bp, Homo sapiens
agaaattctaaggca

SEQ ID NO: 1172438 - DNA, 15 bp, Homo sapiens
gagaaattctaaggc

SEQ ID NO: 1172439 - DNA, 15 bp, Homo sapiens
tgagaaattctaagg

SEQ ID NO: 1172440 - DNA, 15 bp, Homo sapiens
ttgagaaattctaag

SEQ ID NO: 1172441 - DNA, 15 bp, Homo sapiens
attgagaaattctaa

SEQ ID NO: 1172442 - DNA, 15 bp, Homo sapiens
aattgagaaattcta

SEQ ID NO: 1172443 - DNA, 15 bp, Homo sapiens
aaattgagaaattct

SEQ ID NO: 1172444 - DNA, 15 bp, Homo sapiens
taaattgagaaattc

SEQ ID NO: 1172445 - DNA, 15 bp, Homo sapiens
gtaaattgagaaatt

SEQ ID NO: 1172446 - DNA, 15 bp, Homo sapiens
tgtaaattgagaaat

SEQ ID NO: 1172447 - DNA, 15 bp, Homo sapiens
gtgtaaattgagaaa

SEQ ID NO: 1172448 - DNA, 15 bp, Homo sapiens
tgtgtaaattgagaa

SEQ ID NO: 1172449 - DNA, 15 bp, Homo sapiens
atgtgtaaattgaga

SEQ ID NO: 1172450 - DNA, 15 bp, Homo sapiens
catgtgtaaattgag

SEQ ID NO: 1172451 - DNA, 15 bp, Homo sapiens
ccatgtgtaaattga

SEQ ID NO: 1172452 - DNA, 15 bp, Homo sapiens
gccatgtgtaaattg

SEQ ID NO: 1172453 - DNA, 15 bp, Homo sapiens
ggccatgtgtaaatt

SEQ ID NO: 1172454 - DNA, 15 bp, Homo sapiens
aggccatgtgtaaat

SEQ ID NO: 1172455 - DNA, 15 bp, Homo sapiens
aaggccatgtgtaaa

SEQ ID NO: 1172456 - DNA, 15 bp, Homo sapiens
aaaggccatgtgtaa

SEQ ID NO: 1172457 - DNA, 15 bp, Homo sapiens
gaaaggccatgtgta

SEQ ID NO: 1172458 - DNA, 15 bp, Homo sapiens
tgaaaggccatgtgt

SEQ ID NO: 1172459 - DNA, 15 bp, Homo sapiens
ctgaaaggccatgtg

SEQ ID NO: 1172460 - DNA, 15 bp, Homo sapiens
cctgaaaggccatgt

SEQ ID NO: 1172461 - DNA, 15 bp, Homo sapiens
acctgaaaggccatg

SEQ ID NO: 1172462 - DNA, 15 bp, Homo sapiens
aacctgaaaggccat

SEQ ID NO: 1172463 - DNA, 15 bp, Homo sapiens
caacctgaaaggcca

SEQ ID NO: 1172464 - DNA, 15 bp, Homo sapiens
acaacctgaaaggcc

SEQ ID NO: 1172465 - DNA, 15 bp, Homo sapiens
cacaacctgaaaggc

SEQ ID NO: 1172466 - DNA, 15 bp, Homo sapiens
tcacaacctgaaagg

SEQ ID NO: 1172467 - DNA, 15 bp, Homo sapiens
ctcacaacctgaaag

SEQ ID NO: 1172468 - DNA, 15 bp, Homo sapiens
cctcacaacctgaaa

SEQ ID NO: 1172469 - DNA, 15 bp, Homo sapiens
tcctcacaacctgaa

SEQ ID NO: 1172470 - DNA, 15 bp, Homo sapiens
ttcctcacaacctga

SEQ ID NO: 1172471 - DNA, 15 bp, Homo sapiens
cttcctcacaacctg

SEQ ID NO: 1172472 - DNA, 15 bp, Homo sapiens
tcttcctcacaacct

SEQ ID NO: 1172473 - DNA, 15 bp, Homo sapiens
atcttcctcacaacc

SEQ ID NO: 1172474 - DNA, 15 bp, Homo sapiens
tatcttcctcacaac

SEQ ID NO: 1172475 - DNA, 15 bp, Homo sapiens
atatcttcctcacaa

SEQ ID NO: 1172476 - DNA, 15 bp, Homo sapiens
catatcttcctcaca

SEQ ID NO: 1172477 - DNA, 15 bp, Homo sapiens
acatatcttcctcac

SEQ ID NO: 1172478 - DNA, 15 bp, Homo sapiens
gacatatcttcctca

SEQ ID NO: 1172479 - DNA, 15 bp, Homo sapiens
tgacatatcttcctc

SEQ ID NO: 1172480 - DNA, 15 bp, Homo sapiens
ttgacatatcttcct

SEQ ID NO: 1172481 - DNA, 15 bp, Homo sapiens
cttgacatatcttcc

SEQ ID NO: 1172482 - DNA, 15 bp, Homo sapiens
tcttgacatatcttc

SEQ ID NO: 1172483 - DNA, 15 bp, Homo sapiens
atcttgacatatctt

SEQ ID NO: 1172484 - DNA, 15 bp, Homo sapiens
tatcttgacatatct

SEQ ID NO: 1172485 - DNA, 15 bp, Homo sapiens
ttatcttgacatatc

SEQ ID NO: 1172486 - DNA, 15 bp, Homo sapiens
cttatcttgacatat

SEQ ID NO: 1172487 - DNA, 15 bp, Homo sapiens
tcttatcttgacata

SEQ ID NO: 1172488 - DNA, 15 bp, Homo sapiens
ctcttatcttgacat

SEQ ID NO: 1172489 - DNA, 15 bp, Homo sapiens
cctcttatcttgaca

SEQ ID NO: 1172490 - DNA, 15 bp, Homo sapiens
tcctcttatcttgac

SEQ ID NO: 1172491 - DNA, 15 bp, Homo sapiens
atcctcttatcttga

SEQ ID NO: 1172492 - DNA, 15 bp, Homo sapiens
tatcctcttatcttg

SEQ ID NO: 1172493 - DNA, 15 bp, Homo sapiens
ctatcctcttatctt

SEQ ID NO: 1172494 - DNA, 15 bp, Homo sapiens
tctatcctcttatct

SEQ ID NO: 1172495 - DNA, 15 bp, Homo sapiens
ttctatcctcttatc

SEQ ID NO: 1172496 - DNA, 15 bp, Homo sapiens
tttctatcctcttat

SEQ ID NO: 1172497 - DNA, 15 bp, Homo sapiens
gtttctatcctctta

SEQ ID NO: 1172498 - DNA, 15 bp, Homo sapiens
agtttctatcctctt

SEQ ID NO: 1172499 - DNA, 15 bp, Homo sapiens
tagtttctatcctct

SEQ ID NO: 1172500 - DNA, 15 bp, Homo sapiens
atagtttctatcctc

SEQ ID NO: 1172501 - DNA, 15 bp, Homo sapiens
aatagtttctatcct

SEQ ID NO: 1172502 - DNA, 15 bp, Homo sapiens
aaatagtttctatcc

SEQ ID NO: 1172503 - DNA, 15 bp, Homo sapiens
aaaatagtttctatc

SEQ ID NO: 1172504 - DNA, 15 bp, Homo sapiens
taaaatagtttctat

SEQ ID NO: 1172505 - DNA, 15 bp, Homo sapiens
ataaaatagtttcta

SEQ ID NO: 1172506 - DNA, 15 bp, Homo sapiens
aataaaatagtttct

SEQ ID NO: 1172507 - DNA, 15 bp, Homo sapiens
aaataaaatagtttc

SEQ ID NO: 1172508 - DNA, 15 bp, Homo sapiens
taaataaaatagttt

SEQ ID NO: 1172509 - DNA, 15 bp, Homo sapiens
ttaaataaaatagtt

SEQ ID NO: 1172510 - DNA, 15 bp, Homo sapiens
gttaaataaaatagt

SEQ ID NO: 1172511 - DNA, 15 bp, Homo sapiens
agttaaataaaatag

SEQ ID NO: 1172512 - DNA, 15 bp, Homo sapiens
cagttaaataaaata

SEQ ID NO: 1172513 - DNA, 15 bp, Homo sapiens
acagttaaataaaat

SEQ ID NO: 1172514 - DNA, 15 bp, Homo sapiens
aacagttaaataaaa

SEQ ID NO: 1172515 - DNA, 15 bp, Homo sapiens
gaacagttaaataaa

SEQ ID NO: 1172516 - DNA, 15 bp, Homo sapiens
agaacagttaaataa

SEQ ID NO: 1172517 - DNA, 15 bp, Homo sapiens
aagaacagttaaata

SEQ ID NO: 1172518 - DNA, 15 bp, Homo sapiens
taagaacagttaaat

SEQ ID NO: 1172519 - DNA, 15 bp, Homo sapiens
ataagaacagttaaa

SEQ ID NO: 1172520 - DNA, 15 bp, Homo sapiens
tataagaacagttaa

SEQ ID NO: 1172521 - DNA, 15 bp, Homo sapiens
ctataagaacagtta

SEQ ID NO: 1172522 - DNA, 15 bp, Homo sapiens
gctataagaacagtt

SEQ ID NO: 1172523 - DNA, 15 bp, Homo sapiens
agctataagaacagt

SEQ ID NO: 1172524 - DNA, 15 bp, Homo sapiens
aagctataagaacag

SEQ ID NO: 1172525 - DNA, 15 bp, Homo sapiens
caagctataagaaca

SEQ ID NO: 1172526 - DNA, 15 bp, Homo sapiens
tcaagctataagaac

SEQ ID NO: 1172527 - DNA, 15 bp, Homo sapiens
gtcaagctataagaa

SEQ ID NO: 1172528 - DNA, 15 bp, Homo sapiens
agtcaagctataaga

SEQ ID NO: 1172529 - DNA, 15 bp, Homo sapiens
cagtcaagctataag

SEQ ID NO: 1172530 - DNA, 15 bp, Homo sapiens
tcagtcaagctataa

SEQ ID NO: 1172531 - DNA, 15 bp, Homo sapiens
atcagtcaagctata

SEQ ID NO: 1172532 - DNA, 15 bp, Homo sapiens
catcagtcaagctat

SEQ ID NO: 1172533 - DNA, 15 bp, Homo sapiens
tcatcagtcaagcta

SEQ ID NO: 1172534 - DNA, 15 bp, Homo sapiens
gtcatcagtcaagct

SEQ ID NO: 1172535 - DNA, 15 bp, Homo sapiens
agtcatcagtcaagc

SEQ ID NO: 1172536 - DNA, 15 bp, Homo sapiens
aagtcatcagtcaag

SEQ ID NO: 1172537 - DNA, 15 bp, Homo sapiens
aaagtcatcagtcaa

SEQ ID NO: 1172538 - DNA, 15 bp, Homo sapiens
aaaagtcatcagtca

SEQ ID NO: 1172539 - DNA, 15 bp, Homo sapiens
taaaagtcatcagtc

SEQ ID NO: 1172540 - DNA, 15 bp, Homo sapiens
ataaaagtcatcagt

SEQ ID NO: 1172541 - DNA, 15 bp, Homo sapiens
tataaaagtcatcag

SEQ ID NO: 1172542 - DNA, 15 bp, Homo sapiens
atataaaagtcatca

SEQ ID NO: 1172543 - DNA, 15 bp, Homo sapiens
tatataaaagtcatc

SEQ ID NO: 1172544 - DNA, 15 bp, Homo sapiens
atatataaaagtcat

SEQ ID NO: 1172545 - DNA, 15 bp, Homo sapiens
gatatataaaagtca

SEQ ID NO: 1172546 - DNA, 15 bp, Homo sapiens
agatatataaaagtc

SEQ ID NO: 1172547 - DNA, 15 bp, Homo sapiens
tagatatataaaagt

SEQ ID NO: 1172548 - DNA, 15 bp, Homo sapiens
ctagatatataaaag

SEQ ID NO: 1172549 - DNA, 15 bp, Homo sapiens
tctagatatataaaa

SEQ ID NO: 1172550 - DNA, 15 bp, Homo sapiens
gtctagatatataaa

SEQ ID NO: 1172551 - DNA, 15 bp, Homo sapiens
tgtctagatatataa

SEQ ID NO: 1172552 - DNA, 15 bp, Homo sapiens
atgtctagatatata

SEQ ID NO: 1172553 - DNA, 15 bp, Homo sapiens
tatgtctagatatat

SEQ ID NO: 1172554 - DNA, 15 bp, Homo sapiens
ctatgtctagatata

SEQ ID NO: 1172555 - DNA, 15 bp, Homo sapiens
cctatgtctagatat

SEQ ID NO: 1172556 - DNA, 15 bp, Homo sapiens
tcctatgtctagata

SEQ ID NO: 1172557 - DNA, 15 bp, Homo sapiens
ttcctatgtctagat

SEQ ID NO: 1172558 - DNA, 15 bp, Homo sapiens
tttcctatgtctaga

SEQ ID NO: 1172559 - DNA, 15 bp, Homo sapiens
atttcctatgtctag

SEQ ID NO: 1172560 - DNA, 15 bp, Homo sapiens
catttcctatgtcta

SEQ ID NO: 1172561 - DNA, 15 bp, Homo sapiens
acatttcctatgtct

SEQ ID NO: 1172562 - DNA, 15 bp, Homo sapiens
cacatttcctatgtc

SEQ ID NO: 1172563 - DNA, 15 bp, Homo sapiens
tcacatttcctatgt

SEQ ID NO: 1172564 - DNA, 15 bp, Homo sapiens
gtcacatttcctatg

SEQ ID NO: 1172565 - DNA, 15 bp, Homo sapiens
ggtcacatttcctat

SEQ ID NO: 1172566 - DNA, 15 bp, Homo sapiens
gggtcacatttccta

SEQ ID NO: 1172567 - DNA, 15 bp, Homo sapiens
agggtcacatttcct

SEQ ID NO: 1172568 - DNA, 15 bp, Homo sapiens
gagggtcacatttcc

SEQ ID NO: 1172569 - DNA, 15 bp, Homo sapiens
tgagggtcacatttc

SEQ ID NO: 1172570 - DNA, 15 bp, Homo sapiens
atgagggtcacattt

SEQ ID NO: 1172571 - DNA, 15 bp, Homo sapiens
gatgagggtcacatt

SEQ ID NO: 1172572 - DNA, 15 bp, Homo sapiens
ggatgagggtcacat

SEQ ID NO: 1172573 - DNA, 15 bp, Homo sapiens
aggatgagggtcaca

SEQ ID NO: 1172574 - DNA, 15 bp, Homo sapiens
gaggatgagggtcac

SEQ ID NO: 1172575 - DNA, 15 bp, Homo sapiens
agaggatgagggtca

SEQ ID NO: 1172576 - DNA, 15 bp, Homo sapiens
aagaggatgagggtc

SEQ ID NO: 1172577 - DNA, 15 bp, Homo sapiens
caagaggatgagggt

SEQ ID NO: 1172578 - DNA, 15 bp, Homo sapiens
acaagaggatgaggg

SEQ ID NO: 1172579 - DNA, 15 bp, Homo sapiens
aacaagaggatgagg

SEQ ID NO: 1172580 - DNA, 15 bp, Homo sapiens
gaacaagaggatgag

SEQ ID NO: 1172581 - DNA, 15 bp, Homo sapiens
ggaacaagaggatga

SEQ ID NO: 1172582 - DNA, 15 bp, Homo sapiens
tggaacaagaggatg

SEQ ID NO: 1172583 - DNA, 15 bp, Homo sapiens
ttggaacaagaggat

SEQ ID NO: 1172584 - DNA, 15 bp, Homo sapiens
cttggaacaagagga

SEQ ID NO: 1172585 - DNA, 15 bp, Homo sapiens
tcttggaacaagagg

SEQ ID NO: 1172586 - DNA, 15 bp, Homo sapiens
gtcttggaacaagag

SEQ ID NO: 1172587 - DNA, 15 bp, Homo sapiens
ggtcttggaacaaga

SEQ ID NO: 1172588 - DNA, 15 bp, Homo sapiens
gggtcttggaacaag

SEQ ID NO: 1172589 - DNA, 15 bp, Homo sapiens
tgggtcttggaacaa

SEQ ID NO: 1172590 - DNA, 15 bp, Homo sapiens
gtgggtcttggaaca

SEQ ID NO: 1172591 - DNA, 15 bp, Homo sapiens
tgtgggtcttggaac

SEQ ID NO: 1172592 - DNA, 15 bp, Homo sapiens
ctgtgggtcttggaa

SEQ ID NO: 1172593 - DNA, 15 bp, Homo sapiens
cctgtgggtcttgga

SEQ ID NO: 1172594 - DNA, 15 bp, Homo sapiens
acctgtgggtcttgg

SEQ ID NO: 1172595 - DNA, 15 bp, Homo sapiens
cacctgtgggtcttg

SEQ ID NO: 1172596 - DNA, 15 bp, Homo sapiens
acacctgtgggtctt

SEQ ID NO: 1172597 - DNA, 15 bp, Homo sapiens
aacacctgtgggtct

SEQ ID NO: 1172598 - DNA, 15 bp, Homo sapiens
taacacctgtgggtc

SEQ ID NO: 1172599 - DNA, 15 bp, Homo sapiens
gtaacacctgtgggt

SEQ ID NO: 1172600 - DNA, 15 bp, Homo sapiens
cgtaacacctgtggg

SEQ ID NO: 1172601 - DNA, 15 bp, Homo sapiens
ccgtaacacctgtgg

SEQ ID NO: 1172602 - DNA, 15 bp, Homo sapiens
cccgtaacacctgtg

SEQ ID NO: 1172603 - DNA, 15 bp, Homo sapiens
gcccgtaacacctgt

SEQ ID NO: 1172604 - DNA, 15 bp, Homo sapiens
tgcccgtaacacctg

SEQ ID NO: 1172605 - DNA, 15 bp, Homo sapiens
ctgcccgtaacacct

SEQ ID NO: 1172606 - DNA, 15 bp, Homo sapiens
tctgcccgtaacacc

SEQ ID NO: 1172607 - DNA, 15 bp, Homo sapiens
gtctgcccgtaacac

SEQ ID NO: 1172608 - DNA, 15 bp, Homo sapiens
ggtctgcccgtaaca

SEQ ID NO: 1172609 - DNA, 15 bp, Homo sapiens
cggtctgcccgtaac

SEQ ID NO: 1172610 - DNA, 15 bp, Homo sapiens
acggtctgcccgtaa

SEQ ID NO: 1172611 - DNA, 15 bp, Homo sapiens
gacggtctgcccgta

SEQ ID NO: 1172612 - DNA, 15 bp, Homo sapiens
tgacggtctgcccgt

SEQ ID NO: 1172613 - DNA, 15 bp, Homo sapiens
gtgacggtctgcccg

SEQ ID NO: 1172614 - DNA, 15 bp, Homo sapiens
agtgacggtctgccc

SEQ ID NO: 1172615 - DNA, 15 bp, Homo sapiens
gagtgacggtctgcc

SEQ ID NO: 1172616 - DNA, 15 bp, Homo sapiens
tgagtgacggtctgc

SEQ ID NO: 1172617 - DNA, 15 bp, Homo sapiens
ctgagtgacggtctg

SEQ ID NO: 1172618 - DNA, 15 bp, Homo sapiens
gctgagtgacggtct

SEQ ID NO: 1172619 - DNA, 15 bp, Homo sapiens
tgctgagtgacggtc

SEQ ID NO: 1172620 - DNA, 15 bp, Homo sapiens
gtgctgagtgacggt

SEQ ID NO: 1172621 - DNA, 15 bp, Homo sapiens
ggtgctgagtgacgg

SEQ ID NO: 1172622 - DNA, 15 bp, Homo sapiens
aggtgctgagtgacg

SEQ ID NO: 1172623 - DNA, 15 bp, Homo sapiens
caggtgctgagtgac

SEQ ID NO: 1172624 - DNA, 15 bp, Homo sapiens
ccaggtgctgagtga

SEQ ID NO: 1172625 - DNA, 15 bp, Homo sapiens
tccaggtgctgagtg

SEQ ID NO: 1172626 - DNA, 15 bp, Homo sapiens
ctccaggtgctgagt

SEQ ID NO: 1172627 - DNA, 15 bp, Homo sapiens
actccaggtgctgag

SEQ ID NO: 1172628 - DNA, 15 bp, Homo sapiens
cactccaggtgctga

SEQ ID NO: 1172629 - DNA, 15 bp, Homo sapiens
tcactccaggtgctg

SEQ ID NO: 1172630 - DNA, 15 bp, Homo sapiens
gtcactccaggtgct

SEQ ID NO: 1172631 - DNA, 15 bp, Homo sapiens
tgtcactccaggtgc

SEQ ID NO: 1172632 - DNA, 15 bp, Homo sapiens
ctgtcactccaggtg

SEQ ID NO: 1172633 - DNA, 15 bp, Homo sapiens
cctgtcactccaggt

SEQ ID NO: 1172634 - DNA, 15 bp, Homo sapiens
tcctgtcactccagg

SEQ ID NO: 1172635 - DNA, 15 bp, Homo sapiens
atcctgtcactccag

SEQ ID NO: 1172636 - DNA, 15 bp, Homo sapiens
gatcctgtcactcca

SEQ ID NO: 1172637 - DNA, 15 bp, Homo sapiens
cgatcctgtcactcc

SEQ ID NO: 1172638 - DNA, 15 bp, Homo sapiens
ccgatcctgtcactc

SEQ ID NO: 1172639 - DNA, 15 bp, Homo sapiens
tccgatcctgtcact

SEQ ID NO: 1172640 - DNA, 15 bp, Homo sapiens
gtccgatcctgtcac

SEQ ID NO: 1172641 - DNA, 15 bp, Homo sapiens
tgtccgatcctgtca

SEQ ID NO: 1172642 - DNA, 15 bp, Homo sapiens
ctgtccgatcctgtc

SEQ ID NO: 1172643 - DNA, 15 bp, Homo sapiens
tctgtccgatcctgt

SEQ ID NO: 1172644 - DNA, 15 bp, Homo sapiens
ttctgtccgatcctg

SEQ ID NO: 1172645 - DNA, 15 bp, Homo sapiens
cttctgtccgatcct

SEQ ID NO: 1172646 - DNA, 15 bp, Homo sapiens
ccttctgtccgatcc

SEQ ID NO: 1172647 - DNA, 15 bp, Homo sapiens
cccttctgtccgatc

SEQ ID NO: 1172648 - DNA, 15 bp, Homo sapiens
tcccttctgtccgat

SEQ ID NO: 1172649 - DNA, 15 bp, Homo sapiens
ttcccttctgtccga

SEQ ID NO: 1172650 - DNA, 15 bp, Homo sapiens
cttcccttctgtccg

SEQ ID NO: 1172651 - DNA, 15 bp, Homo sapiens
gcttcccttctgtcc

SEQ ID NO: 1172652 - DNA, 15 bp, Homo sapiens
tgcttcccttctgtc

SEQ ID NO: 1172653 - DNA, 15 bp, Homo sapiens
ctgcttcccttctgt

SEQ ID NO: 1172654 - DNA, 15 bp, Homo sapiens
tctgcttcccttctg

SEQ ID NO: 1172655 - DNA, 15 bp, Homo sapiens
ttctgcttcccttct

SEQ ID NO: 1172656 - DNA, 15 bp, Homo sapiens
tttctgcttcccttc

SEQ ID NO: 1172657 - DNA, 15 bp, Homo sapiens
atttctgcttccctt

SEQ ID NO: 1172658 - DNA, 15 bp, Homo sapiens
catttctgcttccct

SEQ ID NO: 1172659 - DNA, 15 bp, Homo sapiens
ccatttctgcttccc

SEQ ID NO: 1172660 - DNA, 15 bp, Homo sapiens
gccatttctgcttcc

SEQ ID NO: 1172661 - DNA, 15 bp, Homo sapiens
tgccatttctgcttc

SEQ ID NO: 1172662 - DNA, 15 bp, Homo sapiens
ctgccatttctgctt

SEQ ID NO: 1172663 - DNA, 15 bp, Homo sapiens
cctgccatttctgct

SEQ ID NO: 1172664 - DNA, 15 bp, Homo sapiens
ccctgccatttctgc

SEQ ID NO: 1172665 - DNA, 15 bp, Homo sapiens
gccctgccatttctg

SEQ ID NO: 1172666 - DNA, 15 bp, Homo sapiens
ggccctgccatttct

SEQ ID NO: 1172667 - DNA, 15 bp, Homo sapiens
aggccctgccatttc

SEQ ID NO: 1172668 - DNA, 15 bp, Homo sapiens
caggccctgccattt

SEQ ID NO: 1172669 - DNA, 15 bp, Homo sapiens
gcaggccctgccatt

SEQ ID NO: 1172670 - DNA, 15 bp, Homo sapiens
cgcaggccctgccat

SEQ ID NO: 1172671 - DNA, 15 bp, Homo sapiens
acgcaggccctgcca

SEQ ID NO: 1172672 - DNA, 15 bp, Homo sapiens
cacgcaggccctgcc

SEQ ID NO: 1172673 - DNA, 15 bp, Homo sapiens
gcacgcaggccctgc

SEQ ID NO: 1172674 - DNA, 15 bp, Homo sapiens
tgcacgcaggccctg

SEQ ID NO: 1172675 - DNA, 15 bp, Homo sapiens
atgcacgcaggccct

SEQ ID NO: 1172676 - DNA, 15 bp, Homo sapiens
aatgcacgcaggccc

SEQ ID NO: 1172677 - DNA, 15 bp, Homo sapiens
aaatgcacgcaggcc

SEQ ID NO: 1172678 - DNA, 15 bp, Homo sapiens
gaaatgcacgcaggc

SEQ ID NO: 1172679 - DNA, 15 bp, Homo sapiens
agaaatgcacgcagg

SEQ ID NO: 1172680 - DNA, 15 bp, Homo sapiens
cagaaatgcacgcag

SEQ ID NO: 1172681 - DNA, 15 bp, Homo sapiens
ccagaaatgcacgca

SEQ ID NO: 1172682 - DNA, 15 bp, Homo sapiens
accagaaatgcacgc

SEQ ID NO: 1172683 - DNA, 15 bp, Homo sapiens
caccagaaatgcacg

SEQ ID NO: 1172684 - DNA, 15 bp, Homo sapiens
acaccagaaatgcac

SEQ ID NO: 1172685 - DNA, 15 bp, Homo sapiens
cacaccagaaatgca

SEQ ID NO: 1172686 - DNA, 15 bp, Homo sapiens
ccacaccagaaatgc

SEQ ID NO: 1172687 - DNA, 15 bp, Homo sapiens
accacaccagaaatg

SEQ ID NO: 1172688 - DNA, 15 bp, Homo sapiens
gaccacaccagaaat

SEQ ID NO: 1172689 - DNA, 15 bp, Homo sapiens
ggaccacaccagaaa

SEQ ID NO: 1172690 - DNA, 15 bp, Homo sapiens
aggaccacaccagaa

SEQ ID NO: 1172691 - DNA, 15 bp, Homo sapiens
taggaccacaccaga

SEQ ID NO: 1172692 - DNA, 15 bp, Homo sapiens
ctaggaccacaccag

SEQ ID NO: 1172693 - DNA, 15 bp, Homo sapiens
gctaggaccacacca

SEQ ID NO: 1172694 - DNA, 15 bp, Homo sapiens
tgctaggaccacacc

SEQ ID NO: 1172695 - DNA, 15 bp, Homo sapiens
atgctaggaccacac

SEQ ID NO: 1172696 - DNA, 15 bp, Homo sapiens
aatgctaggaccaca

SEQ ID NO: 1172697 - DNA, 15 bp, Homo sapiens
aaatgctaggaccac

SEQ ID NO: 1172698 - DNA, 15 bp, Homo sapiens
gaaatgctaggacca

SEQ ID NO: 1172699 - DNA, 15 bp, Homo sapiens
agaaatgctaggacc

SEQ ID NO: 1172700 - DNA, 15 bp, Homo sapiens
aagaaatgctaggac

SEQ ID NO: 1172701 - DNA, 15 bp, Homo sapiens
aaagaaatgctagga

SEQ ID NO: 1172702 - DNA, 15 bp, Homo sapiens
caaagaaatgctagg

SEQ ID NO: 1172703 - DNA, 15 bp, Homo sapiens
gcaaagaaatgctag

SEQ ID NO: 1172704 - DNA, 15 bp, Homo sapiens
ggcaaagaaatgcta

SEQ ID NO: 1172705 - DNA, 15 bp, Homo sapiens
aggcaaagaaatgct

SEQ ID NO: 1172706 - DNA, 15 bp, Homo sapiens
gaggcaaagaaatgc

SEQ ID NO: 1172707 - DNA, 15 bp, Homo sapiens
agaggcaaagaaatg

SEQ ID NO: 1172708 - DNA, 15 bp, Homo sapiens
gagaggcaaagaaat

SEQ ID NO: 1172709 - DNA, 15 bp, Homo sapiens
tgagaggcaaagaaa

SEQ ID NO: 1172710 - DNA, 15 bp, Homo sapiens
ttgagaggcaaagaa

SEQ ID NO: 1172711 - DNA, 15 bp, Homo sapiens
cttgagaggcaaaga

SEQ ID NO: 1172712 - DNA, 15 bp, Homo sapiens
gcttgagaggcaaag

SEQ ID NO: 1172713 - DNA, 15 bp, Homo sapiens
agcttgagaggcaaa

SEQ ID NO: 1172714 - DNA, 15 bp, Homo sapiens
cagcttgagaggcaa

SEQ ID NO: 1172715 - DNA, 15 bp, Homo sapiens
acagcttgagaggca

SEQ ID NO: 1172716 - DNA, 15 bp, Homo sapiens
cacagcttgagaggc

SEQ ID NO: 1172717 - DNA, 15 bp, Homo sapiens
ccacagcttgagagg

SEQ ID NO: 1172718 - DNA, 15 bp, Homo sapiens
accacagcttgagag

SEQ ID NO: 1172719 - DNA, 15 bp, Homo sapiens
caccacagcttgaga

SEQ ID NO: 1172720 - DNA, 15 bp, Homo sapiens
ccaccacagcttgag

SEQ ID NO: 1172721 - DNA, 15 bp, Homo sapiens
gccaccacagcttga

SEQ ID NO: 1172722 - DNA, 15 bp, Homo sapiens
agccaccacagcttg

SEQ ID NO: 1172723 - DNA, 15 bp, Homo sapiens
cagccaccacagctt

SEQ ID NO: 1172724 - DNA, 15 bp, Homo sapiens
tcagccaccacagct

SEQ ID NO: 1172725 - DNA, 15 bp, Homo sapiens
ttcagccaccacagc

SEQ ID NO: 1172726 - DNA, 15 bp, Homo sapiens
attcagccaccacag

SEQ ID NO: 1172727 - DNA, 15 bp, Homo sapiens
gattcagccaccaca

SEQ ID NO: 1172728 - DNA, 15 bp, Homo sapiens
cgattcagccaccac

SEQ ID NO: 1172729 - DNA, 15 bp, Homo sapiens
acgattcagccacca

SEQ ID NO: 1172730 - DNA, 15 bp, Homo sapiens
gacgattcagccacc

SEQ ID NO: 1172731 - DNA, 15 bp, Homo sapiens
tgacgattcagccac

SEQ ID NO: 1172732 - DNA, 15 bp, Homo sapiens
ctgacgattcagcca

SEQ ID NO: 1172733 - DNA, 15 bp, Homo sapiens
gctgacgattcagcc

SEQ ID NO: 1172734 - DNA, 15 bp, Homo sapiens
ggctgacgattcagc

SEQ ID NO: 1172735 - DNA, 15 bp, Homo sapiens
gggctgacgattcag

SEQ ID NO: 1172736 - DNA, 15 bp, Homo sapiens
agggctgacgattca

SEQ ID NO: 1172737 - DNA, 15 bp, Homo sapiens
gagggctgacgattc

SEQ ID NO: 1172738 - DNA, 15 bp, Homo sapiens
ggagggctgacgatt

SEQ ID NO: 1172739 - DNA, 15 bp, Homo sapiens
gggagggctgacgat

SEQ ID NO: 1172740 - DNA, 15 bp, Homo sapiens
tgggagggctgacga

SEQ ID NO: 1172741 - DNA, 15 bp, Homo sapiens
ctgggagggctgacg

SEQ ID NO: 1172742 - DNA, 15 bp, Homo sapiens
cctgggagggctgac

SEQ ID NO: 1172743 - DNA, 15 bp, Homo sapiens
gcctgggagggctga

SEQ ID NO: 1172744 - DNA, 15 bp, Homo sapiens
tgcctgggagggctg

SEQ ID NO: 1172745 - DNA, 15 bp, Homo sapiens
ctgcctgggagggct

SEQ ID NO: 1172746 - DNA, 15 bp, Homo sapiens
cctgcctgggagggc

SEQ ID NO: 1172747 - DNA, 15 bp, Homo sapiens
tcctgcctgggaggg

SEQ ID NO: 1172748 - DNA, 15 bp, Homo sapiens
ttcctgcctgggagg

SEQ ID NO: 1172749 - DNA, 15 bp, Homo sapiens
cttcctgcctgggag

SEQ ID NO: 1172750 - DNA, 15 bp, Homo sapiens
acttcctgcctggga

SEQ ID NO: 1172751 - DNA, 15 bp, Homo sapiens
cacttcctgcctggg

SEQ ID NO: 1172752 - DNA, 15 bp, Homo sapiens
acacttcctgcctgg

SEQ ID NO: 1172753 - DNA, 15 bp, Homo sapiens
aacacttcctgcctg

SEQ ID NO: 1172754 - DNA, 15 bp, Homo sapiens
gaacacttcctgcct

SEQ ID NO: 1172755 - DNA, 15 bp, Homo sapiens
ggaacacttcctgcc

SEQ ID NO: 1172756 - DNA, 15 bp, Homo sapiens
gggaacacttcctgc

SEQ ID NO: 1172757 - DNA, 15 bp, Homo sapiens
tgggaacacttcctg

SEQ ID NO: 1172758 - DNA, 15 bp, Homo sapiens
ttgggaacacttcct

SEQ ID NO: 1172759 - DNA, 15 bp, Homo sapiens
tttgggaacacttcc

SEQ ID NO: 1172760 - DNA, 15 bp, Homo sapiens
ctttgggaacacttc

SEQ ID NO: 1172761 - DNA, 15 bp, Homo sapiens
actttgggaacactt

SEQ ID NO: 1172762 - DNA, 15 bp, Homo sapiens
gactttgggaacact

SEQ ID NO: 1172763 - DNA, 15 bp, Homo sapiens
ggactttgggaacac

SEQ ID NO: 1172764 - DNA, 15 bp, Homo sapiens
gggactttgggaaca

SEQ ID NO: 1172765 - DNA, 15 bp, Homo sapiens
cgggactttgggaac

SEQ ID NO: 1172766 - DNA, 15 bp, Homo sapiens
gcgggactttgggaa

SEQ ID NO: 1172767 - DNA, 15 bp, Homo sapiens
agcgggactttggga

SEQ ID NO: 1172768 - DNA, 15 bp, Homo sapiens
cagcgggactttggg

SEQ ID NO: 1172769 - DNA, 15 bp, Homo sapiens
tcagcgggactttgg

SEQ ID NO: 1172770 - DNA, 15 bp, Homo sapiens
gtcagcgggactttg

SEQ ID NO: 1172771 - DNA, 15 bp, Homo sapiens
agtcagcgggacttt

SEQ ID NO: 1172772 - DNA, 15 bp, Homo sapiens
aagtcagcgggactt

SEQ ID NO: 1172773 - DNA, 15 bp, Homo sapiens
aaagtcagcgggact

SEQ ID NO: 1172774 - DNA, 15 bp, Homo sapiens
gaaagtcagcgggac

SEQ ID NO: 1172775 - DNA, 15 bp, Homo sapiens
agaaagtcagcggga

SEQ ID NO: 1172776 - DNA, 15 bp, Homo sapiens
tagaaagtcagcggg

SEQ ID NO: 1172777 - DNA, 15 bp, Homo sapiens
atagaaagtcagcgg

SEQ ID NO: 1172778 - DNA, 15 bp, Homo sapiens
aatagaaagtcagcg

SEQ ID NO: 1172779 - DNA, 15 bp, Homo sapiens
gaatagaaagtcagc

SEQ ID NO: 1172780 - DNA, 15 bp, Homo sapiens
agaatagaaagtcag

SEQ ID NO: 1172781 - DNA, 15 bp, Homo sapiens
tagaatagaaagtca

SEQ ID NO: 1172782 - DNA, 15 bp, Homo sapiens
atagaatagaaagtc

SEQ ID NO: 1172783 - DNA, 15 bp, Homo sapiens
aatagaatagaaagt

SEQ ID NO: 1172784 - DNA, 15 bp, Homo sapiens
gaatagaatagaaag

SEQ ID NO: 1172785 - DNA, 15 bp, Homo sapiens
tgaatagaatagaaa

SEQ ID NO: 1172786 - DNA, 15 bp, Homo sapiens
tttatgcccaggccc

SEQ ID NO: 1172787 - DNA, 15 bp, Homo sapiens
gtttatgcccaggcc

SEQ ID NO: 1172788 - DNA, 15 bp, Homo sapiens
tgtttatgcccaggc

SEQ ID NO: 1172789 - DNA, 15 bp, Homo sapiens
ttgtttatgcccagg

SEQ ID NO: 1172790 - DNA, 15 bp, Homo sapiens
tttgtttatgcccag

SEQ ID NO: 1172791 - DNA, 15 bp, Homo sapiens
ctttgtttatgccca

SEQ ID NO: 1172792 - DNA, 15 bp, Homo sapiens
actttgtttatgccc

SEQ ID NO: 1172793 - DNA, 15 bp, Homo sapiens
cactttgtttatgcc

SEQ ID NO: 1172794 - DNA, 15 bp, Homo sapiens
ccactttgtttatgc

SEQ ID NO: 1172795 - DNA, 15 bp, Homo sapiens
gccactttgtttatg

SEQ ID NO: 1172796 - DNA, 15 bp, Homo sapiens
tgccactttgtttat

SEQ ID NO: 1172797 - DNA, 15 bp, Homo sapiens
ctgccactttgttta

SEQ ID NO: 1172798 - DNA, 15 bp, Homo sapiens
gctgccactttgttt

SEQ ID NO: 1172799 - DNA, 15 bp, Homo sapiens
tgctgccactttgtt

SEQ ID NO: 1172800 - DNA, 15 bp, Homo sapiens
ctgctgccactttgt

SEQ ID NO: 1172801 - DNA, 15 bp, Homo sapiens
actgctgccactttg

SEQ ID NO: 1172802 - DNA, 15 bp, Homo sapiens
cactgctgccacttt

SEQ ID NO: 1172803 - DNA, 15 bp, Homo sapiens
gcactgctgccactt

SEQ ID NO: 1172804 - DNA, 15 bp, Homo sapiens
ggcactgctgccact

SEQ ID NO: 1172805 - DNA, 15 bp, Homo sapiens
gggcactgctgccac

SEQ ID NO: 1172806 - DNA, 15 bp, Homo sapiens
agggcactgctgcca

SEQ ID NO: 1172807 - DNA, 15 bp, Homo sapiens
cagggcactgctgcc

SEQ ID NO: 1172808 - DNA, 15 bp, Homo sapiens
gcagggcactgctgc

SEQ ID NO: 1172809 - DNA, 15 bp, Homo sapiens
ggcagggcactgctg

SEQ ID NO: 1172810 - DNA, 15 bp, Homo sapiens
tggcagggcactgct

SEQ ID NO: 1172811 - DNA, 15 bp, Homo sapiens
ttggcagggcactgc

SEQ ID NO: 1172812 - DNA, 15 bp, Homo sapiens
gttggcagggcactg

SEQ ID NO: 1172813 - DNA, 15 bp, Homo sapiens
ggttggcagggcact

SEQ ID NO: 1172814 - DNA, 15 bp, Homo sapiens
gggttggcagggcac

SEQ ID NO: 1172815 - DNA, 15 bp, Homo sapiens
tgggttggcagggca

SEQ ID NO: 1172816 - DNA, 15 bp, Homo sapiens
ctgggttggcagggc

SEQ ID NO: 1172817 - DNA, 15 bp, Homo sapiens
actgggttggcaggg

SEQ ID NO: 1172818 - DNA, 15 bp, Homo sapiens
cactgggttggcagg

SEQ ID NO: 1172819 - DNA, 15 bp, Homo sapiens
acactgggttggcag

SEQ ID NO: 1172820 - DNA, 15 bp, Homo sapiens
gacactgggttggca

SEQ ID NO: 1172821 - DNA, 15 bp, Homo sapiens
agacactgggttggc

SEQ ID NO: 1172822 - DNA, 15 bp, Homo sapiens
tagacactgggttgg

SEQ ID NO: 1172823 - DNA, 15 bp, Homo sapiens
gtagacactgggttg

SEQ ID NO: 1172824 - DNA, 15 bp, Homo sapiens
cgtagacactgggtt

SEQ ID NO: 1172825 - DNA, 15 bp, Homo sapiens
ccgtagacactgggt

SEQ ID NO: 1172826 - DNA, 15 bp, Homo sapiens
gccgtagacactggg

SEQ ID NO: 1172827 - DNA, 15 bp, Homo sapiens
ggccgtagacactgg

SEQ ID NO: 1172828 - DNA, 15 bp, Homo sapiens
aggccgtagacactg

SEQ ID NO: 1172829 - DNA, 15 bp, Homo sapiens
caggccgtagacact

SEQ ID NO: 1172830 - DNA, 15 bp, Homo sapiens
gcaggccgtagacac

SEQ ID NO: 1172831 - DNA, 15 bp, Homo sapiens
ggcaggccgtagaca

SEQ ID NO: 1172832 - DNA, 15 bp, Homo sapiens
gggcaggccgtagac

SEQ ID NO: 1172833 - DNA, 15 bp, Homo sapiens
agggcaggccgtaga

SEQ ID NO: 1172834 - DNA, 15 bp, Homo sapiens
gagggcaggccgtag

SEQ ID NO: 1172835 - DNA, 15 bp, Homo sapiens
agagggcaggccgta

SEQ ID NO: 1172836 - DNA, 15 bp, Homo sapiens
cagagggcaggccgt

SEQ ID NO: 1172837 - DNA, 15 bp, Homo sapiens
acagagggcaggccg

SEQ ID NO: 1172838 - DNA, 15 bp, Homo sapiens
cacagagggcaggcc

SEQ ID NO: 1172839 - DNA, 15 bp, Homo sapiens
ccacagagggcaggc

SEQ ID NO: 1172840 - DNA, 15 bp, Homo sapiens
tccacagagggcagg

SEQ ID NO: 1172841 - DNA, 15 bp, Homo sapiens
atccacagagggcag

SEQ ID NO: 1172842 - DNA, 15 bp, Homo sapiens
catccacagagggca

SEQ ID NO: 1172843 - DNA, 15 bp, Homo sapiens
ccatccacagagggc

SEQ ID NO: 1172844 - DNA, 15 bp, Homo sapiens
cccatccacagaggg

SEQ ID NO: 1172845 - DNA, 15 bp, Homo sapiens
tcccatccacagagg

SEQ ID NO: 1172846 - DNA, 15 bp, Homo sapiens
ttcccatccacagag

SEQ ID NO: 1172847 - DNA, 15 bp, Homo sapiens
attcccatccacaga

SEQ ID NO: 1172848 - DNA, 15 bp, Homo sapiens
cattcccatccacag

SEQ ID NO: 1172849 - DNA, 15 bp, Homo sapiens
ccattcccatccaca

SEQ ID NO: 1172850 - DNA, 15 bp, Homo sapiens
cccattcccatccac

SEQ ID NO: 1172851 - DNA, 15 bp, Homo sapiens
ccccattcccatcca

SEQ ID NO: 1172852 - DNA, 15 bp, Homo sapiens
cccccattcccatcc

SEQ ID NO: 1172853 - DNA, 15 bp, Homo sapiens
acccccattcccatc

SEQ ID NO: 1172854 - DNA, 15 bp, Homo sapiens
tacccccattcccat

SEQ ID NO: 1172855 - DNA, 15 bp, Homo sapiens
gtacccccattccca

SEQ ID NO: 1172856 - DNA, 15 bp, Homo sapiens
agtacccccattccc

SEQ ID NO: 1172857 - DNA, 15 bp, Homo sapiens
cagtacccccattcc

SEQ ID NO: 1172858 - DNA, 15 bp, Homo sapiens
gcagtacccccattc

SEQ ID NO: 1172859 - DNA, 15 bp, Homo sapiens
cgcagtacccccatt

SEQ ID NO: 1172860 - DNA, 15 bp, Homo sapiens
tcgcagtacccccat

SEQ ID NO: 1172861 - DNA, 15 bp, Homo sapiens
ttcgcagtaccccca

SEQ ID NO: 1172862 - DNA, 15 bp, Homo sapiens
attcgcagtaccccc

SEQ ID NO: 1172863 - DNA, 15 bp, Homo sapiens
cattcgcagtacccc

SEQ ID NO: 1172864 - DNA, 15 bp, Homo sapiens
gcattcgcagtaccc

SEQ ID NO: 1172865 - DNA, 15 bp, Homo sapiens
tgcattcgcagtacc

SEQ ID NO: 1172866 - DNA, 15 bp, Homo sapiens
ttgcattcgcagtac

SEQ ID NO: 1172867 - DNA, 15 bp, Homo sapiens
cttgcattcgcagta

SEQ ID NO: 1172868 - DNA, 15 bp, Homo sapiens
ccttgcattcgcagt

SEQ ID NO: 1172869 - DNA, 15 bp, Homo sapiens
tccttgcattcgcag

SEQ ID NO: 1172870 - DNA, 15 bp, Homo sapiens
ctccttgcattcgca

SEQ ID NO: 1172871 - DNA, 15 bp, Homo sapiens
actccttgcattcgc

SEQ ID NO: 1172872 - DNA, 15 bp, Homo sapiens
gactccttgcattcg

SEQ ID NO: 1172873 - DNA, 15 bp, Homo sapiens
agactccttgcattc

SEQ ID NO: 1172874 - DNA, 15 bp, Homo sapiens
aagactccttgcatt

SEQ ID NO: 1172875 - DNA, 15 bp, Homo sapiens
caagactccttgcat

SEQ ID NO: 1172876 - DNA, 15 bp, Homo sapiens
tcaagactccttgca

SEQ ID NO: 1172877 - DNA, 15 bp, Homo sapiens
ttcaagactccttgc

SEQ ID NO: 1172878 - DNA, 15 bp, Homo sapiens
tttcaagactccttg

SEQ ID NO: 1172879 - DNA, 15 bp, Homo sapiens
gtttcaagactcctt

SEQ ID NO: 1172880 - DNA, 15 bp, Homo sapiens
ggtttcaagactcct

SEQ ID NO: 1172881 - DNA, 15 bp, Homo sapiens
aggtttcaagactcc

SEQ ID NO: 1172882 - DNA, 15 bp, Homo sapiens
caggtttcaagactc

SEQ ID NO: 1172883 - DNA, 15 bp, Homo sapiens
ccaggtttcaagact

SEQ ID NO: 1172884 - DNA, 15 bp, Homo sapiens
accaggtttcaagac

SEQ ID NO: 1172885 - DNA, 15 bp, Homo sapiens
caccaggtttcaaga

SEQ ID NO: 1172886 - DNA, 15 bp, Homo sapiens
tcaccaggtttcaag

SEQ ID NO: 1172887 - DNA, 15 bp, Homo sapiens
ttcaccaggtttcaa

SEQ ID NO: 1172888 - DNA, 15 bp, Homo sapiens
tttcaccaggtttca

SEQ ID NO: 1172889 - DNA, 15 bp, Homo sapiens
ctttcaccaggtttc

SEQ ID NO: 1172890 - DNA, 15 bp, Homo sapiens
tctttcaccaggttt

SEQ ID NO: 1172891 - DNA, 15 bp, Homo sapiens
ttctttcaccaggtt

SEQ ID NO: 1172892 - DNA, 15 bp, Homo sapiens
attctttcaccaggt

SEQ ID NO: 1172893 - DNA, 15 bp, Homo sapiens
cattctttcaccagg

SEQ ID NO: 1172894 - DNA, 15 bp, Homo sapiens
gcattctttcaccag

SEQ ID NO: 1172895 - DNA, 15 bp, Homo sapiens
tgcattctttcacca

SEQ ID NO: 1172896 - DNA, 15 bp, Homo sapiens
ctgcattctttcacc

SEQ ID NO: 1172897 - DNA, 15 bp, Homo sapiens
cctgcattctttcac

SEQ ID NO: 1172898 - DNA, 15 bp, Homo sapiens
ccctgcattctttca

SEQ ID NO: 1172899 - DNA, 15 bp, Homo sapiens
tccctgcattctttc

SEQ ID NO: 1172900 - DNA, 15 bp, Homo sapiens
gtccctgcattcttt

SEQ ID NO: 1172901 - DNA, 15 bp, Homo sapiens
tgtccctgcattctt

SEQ ID NO: 1172902 - DNA, 15 bp, Homo sapiens
ctgtccctgcattct

SEQ ID NO: 1172903 - DNA, 15 bp, Homo sapiens
gctgtccctgcattc

SEQ ID NO: 1172904 - DNA, 15 bp, Homo sapiens
ggctgtccctgcatt

SEQ ID NO: 1172905 - DNA, 15 bp, Homo sapiens
tggctgtccctgcat

SEQ ID NO: 1172906 - DNA, 15 bp, Homo sapiens
gtggctgtccctgca

SEQ ID NO: 1172907 - DNA, 15 bp, Homo sapiens
ggtggctgtccctgc

SEQ ID NO: 1172908 - DNA, 15 bp, Homo sapiens
aggtggctgtccctg

SEQ ID NO: 1172909 - DNA, 15 bp, Homo sapiens
gaggtggctgtccct

SEQ ID NO: 1172910 - DNA, 15 bp, Homo sapiens
cgaggtggctgtccc

SEQ ID NO: 1172911 - DNA, 15 bp, Homo sapiens
gcgaggtggctgtcc

SEQ ID NO: 1172912 - DNA, 15 bp, Homo sapiens
tgcgaggtggctgtc

SEQ ID NO: 1172913 - DNA, 15 bp, Homo sapiens
ctgcgaggtggctgt

SEQ ID NO: 1172914 - DNA, 15 bp, Homo sapiens
gctgcgaggtggctg

SEQ ID NO: 1172915 - DNA, 15 bp, Homo sapiens
ggctgcgaggtggct

SEQ ID NO: 1172916 - DNA, 15 bp, Homo sapiens
tggctgcgaggtggc

SEQ ID NO: 1172917 - DNA, 15 bp, Homo sapiens
ttggctgcgaggtgg

SEQ ID NO: 1172918 - DNA, 15 bp, Homo sapiens
tttggctgcgaggtg

SEQ ID NO: 1172919 - DNA, 15 bp, Homo sapiens
gtttggctgcgaggt

SEQ ID NO: 1172920 - DNA, 15 bp, Homo sapiens
cgtttggctgcgagg

SEQ ID NO: 1172921 - DNA, 15 bp, Homo sapiens
ccgtttggctgcgag

SEQ ID NO: 1172922 - DNA, 15 bp, Homo sapiens
tccgtttggctgcga

SEQ ID NO: 1172923 - DNA, 15 bp, Homo sapiens
gtccgtttggctgcg

SEQ ID NO: 1172924 - DNA, 15 bp, Homo sapiens
tgtccgtttggctgc

SEQ ID NO: 1172925 - DNA, 15 bp, Homo sapiens
ctgtccgtttggctg

SEQ ID NO: 1172926 - DNA, 15 bp, Homo sapiens
cctgtccgtttggct

SEQ ID NO: 1172927 - DNA, 15 bp, Homo sapiens
tcctgtccgtttggc

SEQ ID NO: 1172928 - DNA, 15 bp, Homo sapiens
gtcctgtccgtttgg

SEQ ID NO: 1172929 - DNA, 15 bp, Homo sapiens
tgtcctgtccgtttg

SEQ ID NO: 1172930 - DNA, 15 bp, Homo sapiens
atgtcctgtccgttt

SEQ ID NO: 1172931 - DNA, 15 bp, Homo sapiens
aatgtcctgtccgtt

SEQ ID NO: 1172932 - DNA, 15 bp, Homo sapiens
gaatgtcctgtccgt

SEQ ID NO: 1172933 - DNA, 15 bp, Homo sapiens
tgaatgtcctgtccg

SEQ ID NO: 1172934 - DNA, 15 bp, Homo sapiens
ctgaatgtcctgtcc

SEQ ID NO: 1172935 - DNA, 15 bp, Homo sapiens
tctgaatgtcctgtc

SEQ ID NO: 1172936 - DNA, 15 bp, Homo sapiens
ctctgaatgtcctgt

SEQ ID NO: 1172937 - DNA, 15 bp, Homo sapiens
gctctgaatgtcctg

SEQ ID NO: 1172938 - DNA, 15 bp, Homo sapiens
tgctctgaatgtcct

SEQ ID NO: 1172939 - DNA, 15 bp, Homo sapiens
ttgctctgaatgtcc

SEQ ID NO: 1172940 - DNA, 15 bp, Homo sapiens
gttgctctgaatgtc

SEQ ID NO: 1172941 - DNA, 15 bp, Homo sapiens
agttgctctgaatgt

SEQ ID NO: 1172942 - DNA, 15 bp, Homo sapiens
gagttgctctgaatg

SEQ ID NO: 1172943 - DNA, 15 bp, Homo sapiens
ggagttgctctgaat

SEQ ID NO: 1172944 - DNA, 15 bp, Homo sapiens
tggagttgctctgaa

SEQ ID NO: 1172945 - DNA, 15 bp, Homo sapiens
ctggagttgctctga

SEQ ID NO: 1172946 - DNA, 15 bp, Homo sapiens
gctggagttgctctg

SEQ ID NO: 1172947 - DNA, 15 bp, Homo sapiens
tgctggagttgctct

SEQ ID NO: 1172948 - DNA, 15 bp, Homo sapiens
gtgctggagttgctc

SEQ ID NO: 1172949 - DNA, 15 bp, Homo sapiens
tgtgctggagttgct

SEQ ID NO: 1172950 - DNA, 15 bp, Homo sapiens
ctgtgctggagttgc

SEQ ID NO: 1172951 - DNA, 15 bp, Homo sapiens
cctgtgctggagttg

SEQ ID NO: 1172952 - DNA, 15 bp, Homo sapiens
gcctgtgctggagtt

SEQ ID NO: 1172953 - DNA, 15 bp, Homo sapiens
ggcctgtgctggagt

SEQ ID NO: 1172954 - DNA, 15 bp, Homo sapiens
gggcctgtgctggag

SEQ ID NO: 1172955 - DNA, 15 bp, Homo sapiens
ggggcctgtgctgga

SEQ ID NO: 1172956 - DNA, 15 bp, Homo sapiens
gggggcctgtgctgg

SEQ ID NO: 1172957 - DNA, 15 bp, Homo sapiens
agggggcctgtgctg

SEQ ID NO: 1172958 - DNA, 15 bp, Homo sapiens
gagggggcctgtgct

SEQ ID NO: 1172959 - DNA, 15 bp, Homo sapiens
ggagggggcctgtgc

SEQ ID NO: 1172960 - DNA, 15 bp, Homo sapiens
gggagggggcctgtg

SEQ ID NO: 1172961 - DNA, 15 bp, Homo sapiens
agggagggggcctgt

SEQ ID NO: 1172962 - DNA, 15 bp, Homo sapiens
tagggagggggcctg

SEQ ID NO: 1172963 - DNA, 15 bp, Homo sapiens
gtagggagggggcct

SEQ ID NO: 1172964 - DNA, 15 bp, Homo sapiens
cgtagggagggggcc

SEQ ID NO: 1172965 - DNA, 15 bp, Homo sapiens
acgtagggagggggc

SEQ ID NO: 1172966 - DNA, 15 bp, Homo sapiens
cacgtagggaggggg

SEQ ID NO: 1172967 - DNA, 15 bp, Homo sapiens
ccacgtagggagggg

SEQ ID NO: 1172968 - DNA, 15 bp, Homo sapiens
gccacgtagggaggg

SEQ ID NO: 1172969 - DNA, 15 bp, Homo sapiens
tgccacgtagggagg

SEQ ID NO: 1172970 - DNA, 15 bp, Homo sapiens
ctgccacgtagggag

SEQ ID NO: 1172971 - DNA, 15 bp, Homo sapiens
tctgccacgtaggga

SEQ ID NO: 1172972 - DNA, 15 bp, Homo sapiens
gtctgccacgtaggg

SEQ ID NO: 1172973 - DNA, 15 bp, Homo sapiens
tgtctgccacgtagg

SEQ ID NO: 1172974 - DNA, 15 bp, Homo sapiens
ctgtctgccacgtag

SEQ ID NO: 1172975 - DNA, 15 bp, Homo sapiens
gctgtctgccacgta

SEQ ID NO: 1172976 - DNA, 15 bp, Homo sapiens
ggctgtctgccacgt

SEQ ID NO: 1172977 - DNA, 15 bp, Homo sapiens
aggctgtctgccacg

SEQ ID NO: 1172978 - DNA, 15 bp, Homo sapiens
gaggctgtctgccac

SEQ ID NO: 1172979 - DNA, 15 bp, Homo sapiens
tgaggctgtctgcca

SEQ ID NO: 1172980 - DNA, 15 bp, Homo sapiens
ctgaggctgtctgcc

SEQ ID NO: 1172981 - DNA, 15 bp, Homo sapiens
actgaggctgtctgc

SEQ ID NO: 1172982 - DNA, 15 bp, Homo sapiens
gactgaggctgtctg

SEQ ID NO: 1172983 - DNA, 15 bp, Homo sapiens
cgactgaggctgtct

SEQ ID NO: 1172984 - DNA, 15 bp, Homo sapiens
gcgactgaggctgtc

SEQ ID NO: 1172985 - DNA, 15 bp, Homo sapiens
agcgactgaggctgt

SEQ ID NO: 1172986 - DNA, 15 bp, Homo sapiens
tagcgactgaggctg

SEQ ID NO: 1172987 - DNA, 15 bp, Homo sapiens
atagcgactgaggct

SEQ ID NO: 1172988 - DNA, 15 bp, Homo sapiens
gatagcgactgaggc

SEQ ID NO: 1172989 - DNA, 15 bp, Homo sapiens
agatagcgactgagg

SEQ ID NO: 1172990 - DNA, 15 bp, Homo sapiens
cagatagcgactgag

SEQ ID NO: 1172991 - DNA, 15 bp, Homo sapiens
gcagatagcgactga

SEQ ID NO: 1172992 - DNA, 15 bp, Homo sapiens
ggcagatagcgactg

SEQ ID NO: 1172993 - DNA, 15 bp, Homo sapiens
tggcagatagcgact

SEQ ID NO: 1172994 - DNA, 15 bp, Homo sapiens
ctggcagatagcgac

SEQ ID NO: 1172995 - DNA, 15 bp, Homo sapiens
cctggcagatagcga

SEQ ID NO: 1172996 - DNA, 15 bp, Homo sapiens
acctggcagatagcg

SEQ ID NO: 1172997 - DNA, 15 bp, Homo sapiens
aacctggcagatagc

SEQ ID NO: 1172998 - DNA, 15 bp, Homo sapiens
gaacctggcagatag

SEQ ID NO: 1172999 - DNA, 15 bp, Homo sapiens
agaacctggcagata

SEQ ID NO: 1173000 - DNA, 15 bp, Homo sapiens
tagaacctggcagat

SEQ ID NO: 1173001 - DNA, 15 bp, Homo sapiens
gtagaacctggcaga

SEQ ID NO: 1173002 - DNA, 15 bp, Homo sapiens
tgtagaacctggcag

SEQ ID NO: 1173003 - DNA, 15 bp, Homo sapiens
ctgtagaacctggca

SEQ ID NO: 1173004 - DNA, 15 bp, Homo sapiens
tctgtagaacctggc

SEQ ID NO: 1173005 - DNA, 15 bp, Homo sapiens
ctctgtagaacctgg

SEQ ID NO: 1173006 - DNA, 15 bp, Homo sapiens
cctctgtagaacctg

SEQ ID NO: 1173007 - DNA, 15 bp, Homo sapiens
tcctctgtagaacct

SEQ ID NO: 1173008 - DNA, 15 bp, Homo sapiens
ctcctctgtagaacc

SEQ ID NO: 1173009 - DNA, 15 bp, Homo sapiens
cctcctctgtagaac

SEQ ID NO: 1173010 - DNA, 15 bp, Homo sapiens
ccctcctctgtagaa

SEQ ID NO: 1173011 - DNA, 15 bp, Homo sapiens
gccctcctctgtaga

SEQ ID NO: 1173012 - DNA, 15 bp, Homo sapiens
cgccctcctctgtag

SEQ ID NO: 1173013 - DNA, 15 bp, Homo sapiens
gcgccctcctctgta

SEQ ID NO: 1173014 - DNA, 15 bp, Homo sapiens
tgcgccctcctctgt

SEQ ID NO: 1173015 - DNA, 15 bp, Homo sapiens
ctgcgccctcctctg

SEQ ID NO: 1173016 - DNA, 15 bp, Homo sapiens
tctgcgccctcctct

SEQ ID NO: 1173017 - DNA, 15 bp, Homo sapiens
ctctgcgccctcctc

SEQ ID NO: 1173018 - DNA, 15 bp, Homo sapiens
tctctgcgccctcct

SEQ ID NO: 1173019 - DNA, 15 bp, Homo sapiens
gtctctgcgccctcc

SEQ ID NO: 1173020 - DNA, 15 bp, Homo sapiens
agtctctgcgccctc

SEQ ID NO: 1173021 - DNA, 15 bp, Homo sapiens
cagtctctgcgccct

SEQ ID NO: 1173022 - DNA, 15 bp, Homo sapiens
tcagtctctgcgccc

SEQ ID NO: 1173023 - DNA, 15 bp, Homo sapiens
ttcagtctctgcgcc

SEQ ID NO: 1173024 - DNA, 15 bp, Homo sapiens
tttcagtctctgcgc

SEQ ID NO: 1173025 - DNA, 15 bp, Homo sapiens
gtttcagtctctgcg

SEQ ID NO: 1173026 - DNA, 15 bp, Homo sapiens
tgtttcagtctctgc

SEQ ID NO: 1173027 - DNA, 15 bp, Homo sapiens
gtgtttcagtctctg

SEQ ID NO: 1173028 - DNA, 15 bp, Homo sapiens
cgtgtttcagtctct

SEQ ID NO: 1173029 - DNA, 15 bp, Homo sapiens
acgtgtttcagtctc

SEQ ID NO: 1173030 - DNA, 15 bp, Homo sapiens
aacgtgtttcagtct

SEQ ID NO: 1173031 - DNA, 15 bp, Homo sapiens
taacgtgtttcagtc

SEQ ID NO: 1173032 - DNA, 15 bp, Homo sapiens
ctaacgtgtttcagt

SEQ ID NO: 1173033 - DNA, 15 bp, Homo sapiens
cctaacgtgtttcag

SEQ ID NO: 1173034 - DNA, 15 bp, Homo sapiens
tcctaacgtgtttca

SEQ ID NO: 1173035 - DNA, 15 bp, Homo sapiens
ctcctaacgtgtttc

SEQ ID NO: 1173036 - DNA, 15 bp, Homo sapiens
gctcctaacgtgttt

SEQ ID NO: 1173037 - DNA, 15 bp, Homo sapiens
ggctcctaacgtgtt

SEQ ID NO: 1173038 - DNA, 15 bp, Homo sapiens
aggctcctaacgtgt

SEQ ID NO: 1173039 - DNA, 15 bp, Homo sapiens
caggctcctaacgtg

SEQ ID NO: 1173040 - DNA, 15 bp, Homo sapiens
acaggctcctaacgt

SEQ ID NO: 1173041 - DNA, 15 bp, Homo sapiens
gacaggctcctaacg

SEQ ID NO: 1173042 - DNA, 15 bp, Homo sapiens
ggacaggctcctaac

SEQ ID NO: 1173043 - DNA, 15 bp, Homo sapiens
cggacaggctcctaa

SEQ ID NO: 1173044 - DNA, 15 bp, Homo sapiens
ccggacaggctccta

SEQ ID NO: 1173045 - DNA, 15 bp, Homo sapiens
tccggacaggctcct

SEQ ID NO: 1173046 - DNA, 15 bp, Homo sapiens
ctccggacaggctcc

SEQ ID NO: 1173047 - DNA, 15 bp, Homo sapiens
tctccggacaggctc

SEQ ID NO: 1173048 - DNA, 15 bp, Homo sapiens
gtctccggacaggct

SEQ ID NO: 1173049 - DNA, 15 bp, Homo sapiens
agtctccggacaggc

SEQ ID NO: 1173050 - DNA, 15 bp, Homo sapiens
tagtctccggacagg

SEQ ID NO: 1173051 - DNA, 15 bp, Homo sapiens
gtagtctccggacag

SEQ ID NO: 1173052 - DNA, 15 bp, Homo sapiens
agtagtctccggaca

SEQ ID NO: 1173053 - DNA, 15 bp, Homo sapiens
cagtagtctccggac

SEQ ID NO: 1173054 - DNA, 15 bp, Homo sapiens
ccagtagtctccgga

SEQ ID NO: 1173055 - DNA, 15 bp, Homo sapiens
cccagtagtctccgg

SEQ ID NO: 1173056 - DNA, 15 bp, Homo sapiens
ccccagtagtctccg

SEQ ID NO: 1173057 - DNA, 15 bp, Homo sapiens
accccagtagtctcc

SEQ ID NO: 1173058 - DNA, 15 bp, Homo sapiens
caccccagtagtctc

SEQ ID NO: 1173059 - DNA, 15 bp, Homo sapiens
ccaccccagtagtct

SEQ ID NO: 1173060 - DNA, 15 bp, Homo sapiens
cccaccccagtagtc

SEQ ID NO: 1173061 - DNA, 15 bp, Homo sapiens
ccccaccccagtagt

SEQ ID NO: 1173062 - DNA, 15 bp, Homo sapiens
gccccaccccagtag

SEQ ID NO: 1173063 - DNA, 15 bp, Homo sapiens
tgccccaccccagta

SEQ ID NO: 1173064 - DNA, 15 bp, Homo sapiens
gtgccccaccccagt

SEQ ID NO: 1173065 - DNA, 15 bp, Homo sapiens
tgtgccccaccccag

SEQ ID NO: 1173066 - DNA, 15 bp, Homo sapiens
ctgtgccccacccca

SEQ ID NO: 1173067 - DNA, 15 bp, Homo sapiens
cctgtgccccacccc

SEQ ID NO: 1173068 - DNA, 15 bp, Homo sapiens
acctgtgccccaccc

SEQ ID NO: 1173069 - DNA, 15 bp, Homo sapiens
tacctgtgccccacc

SEQ ID NO: 1173070 - DNA, 15 bp, Homo sapiens
ctacctgtgccccac

SEQ ID NO: 1173071 - DNA, 15 bp, Homo sapiens
cctacctgtgcccca

SEQ ID NO: 1173072 - DNA, 15 bp, Homo sapiens
tcctacctgtgcccc

SEQ ID NO: 1173073 - DNA, 15 bp, Homo sapiens
atcctacctgtgccc

SEQ ID NO: 1173074 - DNA, 15 bp, Homo sapiens
gatcctacctgtgcc

SEQ ID NO: 1173075 - DNA, 15 bp, Homo sapiens
tgatcctacctgtgc

SEQ ID NO: 1173076 - DNA, 15 bp, Homo sapiens
ttgatcctacctgtg

SEQ ID NO: 1173077 - DNA, 15 bp, Homo sapiens
attgatcctacctgt

SEQ ID NO: 1173078 - DNA, 15 bp, Homo sapiens
cattgatcctacctg

SEQ ID NO: 1173079 - DNA, 15 bp, Homo sapiens
gcattgatcctacct

SEQ ID NO: 1173080 - DNA, 15 bp, Homo sapiens
agcattgatcctacc

SEQ ID NO: 1173081 - DNA, 15 bp, Homo sapiens
cagcattgatcctac

SEQ ID NO: 1173082 - DNA, 15 bp, Homo sapiens
ccagcattgatccta

SEQ ID NO: 1173083 - DNA, 15 bp, Homo sapiens
cccagcattgatcct

SEQ ID NO: 1173084 - DNA, 15 bp, Homo sapiens
ccccagcattgatcc

SEQ ID NO: 1173085 - DNA, 15 bp, Homo sapiens
tccccagcattgatc

SEQ ID NO: 1173086 - DNA, 15 bp, Homo sapiens
gtccccagcattgat

SEQ ID NO: 1173087 - DNA, 15 bp, Homo sapiens
ggtccccagcattga

SEQ ID NO: 1173088 - DNA, 15 bp, Homo sapiens
aggtccccagcattg

SEQ ID NO: 1173089 - DNA, 15 bp, Homo sapiens
caggtccccagcatt

SEQ ID NO: 1173090 - DNA, 15 bp, Homo sapiens
ccaggtccccagcat

SEQ ID NO: 1173091 - DNA, 15 bp, Homo sapiens
cccaggtccccagca

SEQ ID NO: 1173092 - DNA, 15 bp, Homo sapiens
acccaggtccccagc

SEQ ID NO: 1173093 - DNA, 15 bp, Homo sapiens
cacccaggtccccag

SEQ ID NO: 1173094 - DNA, 15 bp, Homo sapiens
acacccaggtcccca

SEQ ID NO: 1173095 - DNA, 15 bp, Homo sapiens
cacacccaggtcccc

SEQ ID NO: 1173096 - DNA, 15 bp, Homo sapiens
ccacacccaggtccc

SEQ ID NO: 1173097 - DNA, 15 bp, Homo sapiens
gccacacccaggtcc

SEQ ID NO: 1173098 - DNA, 15 bp, Homo sapiens
ggccacacccaggtc

SEQ ID NO: 1173099 - DNA, 15 bp, Homo sapiens
gggccacacccaggt

SEQ ID NO: 1173100 - DNA, 15 bp, Homo sapiens
ggggccacacccagg

SEQ ID NO: 1173101 - DNA, 15 bp, Homo sapiens
aggggccacacccag

SEQ ID NO: 1173102 - DNA, 15 bp, Homo sapiens
aaggggccacaccca

SEQ ID NO: 1173103 - DNA, 15 bp, Homo sapiens
gaaggggccacaccc

SEQ ID NO: 1173104 - DNA, 15 bp, Homo sapiens
ggaaggggccacacc

SEQ ID NO: 1173105 - DNA, 15 bp, Homo sapiens
tggaaggggccacac

SEQ ID NO: 1173106 - DNA, 15 bp, Homo sapiens
ctggaaggggccaca

SEQ ID NO: 1173107 - DNA, 15 bp, Homo sapiens
cctggaaggggccac

SEQ ID NO: 1173108 - DNA, 15 bp, Homo sapiens
ccctggaaggggcca

SEQ ID NO: 1173109 - DNA, 15 bp, Homo sapiens
gccctggaaggggcc

SEQ ID NO: 1173110 - DNA, 15 bp, Homo sapiens
ggccctggaaggggc

SEQ ID NO: 1173111 - DNA, 15 bp, Homo sapiens
gggccctggaagggg

SEQ ID NO: 1173112 - DNA, 15 bp, Homo sapiens
ggggccctggaaggg

SEQ ID NO: 1173113 - DNA, 15 bp, Homo sapiens
tggggccctggaagg

SEQ ID NO: 1173114 - DNA, 15 bp, Homo sapiens
ttggggccctggaag

SEQ ID NO: 1173115 - DNA, 15 bp, Homo sapiens
cttggggccctggaa

SEQ ID NO: 1173116 - DNA, 15 bp, Homo sapiens
gcttggggccctgga

SEQ ID NO: 1173117 - DNA, 15 bp, Homo sapiens
agcttggggccctgg

SEQ ID NO: 1173118 - DNA, 15 bp, Homo sapiens
cagcttggggccctg

SEQ ID NO: 1173119 - DNA, 15 bp, Homo sapiens
gcagcttggggccct

SEQ ID NO: 1173120 - DNA, 15 bp, Homo sapiens
ggcagcttggggccc

SEQ ID NO: 1173121 - DNA, 15 bp, Homo sapiens
aggcagcttggggcc

SEQ ID NO: 1173122 - DNA, 15 bp, Homo sapiens
aaggcagcttggggc

SEQ ID NO: 1173123 - DNA, 15 bp, Homo sapiens
aaaggcagcttgggg

SEQ ID NO: 1173124 - DNA, 15 bp, Homo sapiens
caaaggcagcttggg

SEQ ID NO: 1173125 - DNA, 15 bp, Homo sapiens
gcaaaggcagcttgg

SEQ ID NO: 1173126 - DNA, 15 bp, Homo sapiens
ggcaaaggcagcttg

SEQ ID NO: 1173127 - DNA, 15 bp, Homo sapiens
aggcaaaggcagctt

SEQ ID NO: 1173128 - DNA, 15 bp, Homo sapiens
aaggcaaaggcagct

SEQ ID NO: 1173129 - DNA, 15 bp, Homo sapiens
gaaggcaaaggcagc

SEQ ID NO: 1173130 - DNA, 15 bp, Homo sapiens
ggaaggcaaaggcag

SEQ ID NO: 1173131 - DNA, 15 bp, Homo sapiens
aggaaggcaaaggca

SEQ ID NO: 1173132 - DNA, 15 bp, Homo sapiens
caggaaggcaaaggc

SEQ ID NO: 1173133 - DNA, 15 bp, Homo sapiens
ccaggaaggcaaagg

SEQ ID NO: 1173134 - DNA, 15 bp, Homo sapiens
cccaggaaggcaaag

SEQ ID NO: 1173135 - DNA, 15 bp, Homo sapiens
ccccaggaaggcaaa

SEQ ID NO: 1173136 - DNA, 15 bp, Homo sapiens
accccaggaaggcaa

SEQ ID NO: 1173137 - DNA, 15 bp, Homo sapiens
aaccccaggaaggca

SEQ ID NO: 1173138 - DNA, 15 bp, Homo sapiens
aaaccccaggaaggc

SEQ ID NO: 1173139 - DNA, 15 bp, Homo sapiens
gaaaccccaggaagg

SEQ ID NO: 1173140 - DNA, 15 bp, Homo sapiens
ggaaaccccaggaag

SEQ ID NO: 1173141 - DNA, 15 bp, Homo sapiens
aggaaaccccaggaa

SEQ ID NO: 1173142 - DNA, 15 bp, Homo sapiens
aaggaaaccccagga

SEQ ID NO: 1173143 - DNA, 15 bp, Homo sapiens
aaaggaaaccccagg

SEQ ID NO: 1173144 - DNA, 15 bp, Homo sapiens
taaaggaaaccccag

SEQ ID NO: 1173145 - DNA, 15 bp, Homo sapiens
ttaaaggaaacccca

SEQ ID NO: 1173146 - DNA, 15 bp, Homo sapiens
tttaaaggaaacccc

SEQ ID NO: 1173147 - DNA, 15 bp, Homo sapiens
ctttaaaggaaaccc

SEQ ID NO: 1173148 - DNA, 15 bp, Homo sapiens
gctttaaaggaaacc

SEQ ID NO: 1173149 - DNA, 15 bp, Homo sapiens
ggctttaaaggaaac

SEQ ID NO: 1173150 - DNA, 15 bp, Homo sapiens
tggctttaaaggaaa

SEQ ID NO: 1173151 - DNA, 15 bp, Homo sapiens
gtggctttaaaggaa

SEQ ID NO: 1173152 - DNA, 15 bp, Homo sapiens
ggtggctttaaagga

SEQ ID NO: 1173153 - DNA, 15 bp, Homo sapiens
cggtggctttaaagg

SEQ ID NO: 1173154 - DNA, 15 bp, Homo sapiens
gcggtggctttaaag

SEQ ID NO: 1173155 - DNA, 15 bp, Homo sapiens
cgcggtggctttaaa

SEQ ID NO: 1173156 - DNA, 15 bp, Homo sapiens
acgcggtggctttaa

SEQ ID NO: 1173157 - DNA, 15 bp, Homo sapiens
cacgcggtggcttta

SEQ ID NO: 1173158 - DNA, 15 bp, Homo sapiens
tcacgcggtggcttt

SEQ ID NO: 1173159 - DNA, 15 bp, Homo sapiens
ctcacgcggtggctt

SEQ ID NO: 1173160 - DNA, 15 bp, Homo sapiens
cctcacgcggtggct

SEQ ID NO: 1173161 - DNA, 15 bp, Homo sapiens
gcctcacgcggtggc

SEQ ID NO: 1173162 - DNA, 15 bp, Homo sapiens
ggcctcacgcggtgg

SEQ ID NO: 1173163 - DNA, 15 bp, Homo sapiens
gggcctcacgcggtg

SEQ ID NO: 1173164 - DNA, 15 bp, Homo sapiens
agggcctcacgcggt

SEQ ID NO: 1173165 - DNA, 15 bp, Homo sapiens
cagggcctcacgcgg

SEQ ID NO: 1173166 - DNA, 15 bp, Homo sapiens
ccagggcctcacgcg

SEQ ID NO: 1173167 - DNA, 15 bp, Homo sapiens
accagggcctcacgc

SEQ ID NO: 1173168 - DNA, 15 bp, Homo sapiens
caccagggcctcacg

SEQ ID NO: 1173169 - DNA, 15 bp, Homo sapiens
ccaccagggcctcac

SEQ ID NO: 1173170 - DNA, 15 bp, Homo sapiens
cccaccagggcctca

SEQ ID NO: 1173171 - DNA, 15 bp, Homo sapiens
tcccaccagggcctc

SEQ ID NO: 1173172 - DNA, 15 bp, Homo sapiens
gtcccaccagggcct

SEQ ID NO: 1173173 - DNA, 15 bp, Homo sapiens
tgtcccaccagggcc

SEQ ID NO: 1173174 - DNA, 15 bp, Homo sapiens
atgtcccaccagggc

SEQ ID NO: 1173175 - DNA, 15 bp, Homo sapiens
gatgtcccaccaggg

SEQ ID NO: 1173176 - DNA, 15 bp, Homo sapiens
tgatgtcccaccagg

SEQ ID NO: 1173177 - DNA, 15 bp, Homo sapiens
gtgatgtcccaccag

SEQ ID NO: 1173178 - DNA, 15 bp, Homo sapiens
tgtgatgtcccacca

SEQ ID NO: 1173179 - DNA, 15 bp, Homo sapiens
atgtgatgtcccacc

SEQ ID NO: 1173180 - DNA, 15 bp, Homo sapiens
gatgtgatgtcccac

SEQ ID NO: 1173181 - DNA, 15 bp, Homo sapiens
agatgtgatgtccca

SEQ ID NO: 1173182 - DNA, 15 bp, Homo sapiens
aagatgtgatgtccc

SEQ ID NO: 1173183 - DNA, 15 bp, Homo sapiens
caagatgtgatgtcc

SEQ ID NO: 1173184 - DNA, 15 bp, Homo sapiens
gcaagatgtgatgtc

SEQ ID NO: 1173185 - DNA, 15 bp, Homo sapiens
ggcaagatgtgatgt

SEQ ID NO: 1173186 - DNA, 15 bp, Homo sapiens
cggcaagatgtgatg

SEQ ID NO: 1173187 - DNA, 15 bp, Homo sapiens
ccggcaagatgtgat

SEQ ID NO: 1173188 - DNA, 15 bp, Homo sapiens
gccggcaagatgtga

SEQ ID NO: 1173189 - DNA, 15 bp, Homo sapiens
tgccggcaagatgtg

SEQ ID NO: 1173190 - DNA, 15 bp, Homo sapiens
ctgccggcaagatgt

SEQ ID NO: 1173191 - DNA, 15 bp, Homo sapiens
gctgccggcaagatg

SEQ ID NO: 1173192 - DNA, 15 bp, Homo sapiens
tgctgccggcaagat

SEQ ID NO: 1173193 - DNA, 15 bp, Homo sapiens
ctgctgccggcaaga

SEQ ID NO: 1173194 - DNA, 15 bp, Homo sapiens
actgctgccggcaag

SEQ ID NO: 1173195 - DNA, 15 bp, Homo sapiens
cactgctgccggcaa

SEQ ID NO: 1173196 - DNA, 15 bp, Homo sapiens
ccactgctgccggca

SEQ ID NO: 1173197 - DNA, 15 bp, Homo sapiens
tccactgctgccggc

SEQ ID NO: 1173198 - DNA, 15 bp, Homo sapiens
gtccactgctgccgg

SEQ ID NO: 1173199 - DNA, 15 bp, Homo sapiens
ggtccactgctgccg

SEQ ID NO: 1173200 - DNA, 15 bp, Homo sapiens
tggtccactgctgcc

SEQ ID NO: 1173201 - DNA, 15 bp, Homo sapiens
ctggtccactgctgc

SEQ ID NO: 1173202 - DNA, 15 bp, Homo sapiens
cctggtccactgctg

SEQ ID NO: 1173203 - DNA, 15 bp, Homo sapiens
gcctggtccactgct

SEQ ID NO: 1173204 - DNA, 15 bp, Homo sapiens
tgcctggtccactgc

SEQ ID NO: 1173205 - DNA, 15 bp, Homo sapiens
ctgcctggtccactg

SEQ ID NO: 1173206 - DNA, 15 bp, Homo sapiens
tctgcctggtccact

SEQ ID NO: 1173207 - DNA, 15 bp, Homo sapiens
atctgcctggtccac

SEQ ID NO: 1173208 - DNA, 15 bp, Homo sapiens
gatctgcctggtcca

SEQ ID NO: 1173209 - DNA, 15 bp, Homo sapiens
ggatctgcctggtcc

SEQ ID NO: 1173210 - DNA, 15 bp, Homo sapiens
aggatctgcctggtc

SEQ ID NO: 1173211 - DNA, 15 bp, Homo sapiens
gaggatctgcctggt

SEQ ID NO: 1173212 - DNA, 15 bp, Homo sapiens
tgaggatctgcctgg

SEQ ID NO: 1173213 - DNA, 15 bp, Homo sapiens
ttgaggatctgcctg

SEQ ID NO: 1173214 - DNA, 15 bp, Homo sapiens
tttgaggatctgcct

SEQ ID NO: 1173215 - DNA, 15 bp, Homo sapiens
ctttgaggatctgcc

SEQ ID NO: 1173216 - DNA, 15 bp, Homo sapiens
tctttgaggatctgc

SEQ ID NO: 1173217 - DNA, 15 bp, Homo sapiens
atctttgaggatctg

SEQ ID NO: 1173218 - DNA, 15 bp, Homo sapiens
catctttgaggatct

SEQ ID NO: 1173219 - DNA, 15 bp, Homo sapiens
acatctttgaggatc

SEQ ID NO: 1173220 - DNA, 15 bp, Homo sapiens
gacatctttgaggat

SEQ ID NO: 1173221 - DNA, 15 bp, Homo sapiens
agacatctttgagga

SEQ ID NO: 1173222 - DNA, 15 bp, Homo sapiens
gagacatctttgagg

SEQ ID NO: 1173223 - DNA, 15 bp, Homo sapiens
ggagacatctttgag

SEQ ID NO: 1173224 - DNA, 15 bp, Homo sapiens
aggagacatctttga

SEQ ID NO: 1173225 - DNA, 15 bp, Homo sapiens
aaggagacatctttg

SEQ ID NO: 1173226 - DNA, 15 bp, Homo sapiens
caaggagacatcttt

SEQ ID NO: 1173227 - DNA, 15 bp, Homo sapiens
acaaggagacatctt

SEQ ID NO: 1173228 - DNA, 15 bp, Homo sapiens
tacaaggagacatct

SEQ ID NO: 1173229 - DNA, 15 bp, Homo sapiens
gtacaaggagacatc

SEQ ID NO: 1173230 - DNA, 15 bp, Homo sapiens
cgtacaaggagacat

SEQ ID NO: 1173231 - DNA, 15 bp, Homo sapiens
acgtacaaggagaca

SEQ ID NO: 1173232 - DNA, 15 bp, Homo sapiens
cacgtacaaggagac

SEQ ID NO: 1173233 - DNA, 15 bp, Homo sapiens
ccacgtacaaggaga

SEQ ID NO: 1173234 - DNA, 15 bp, Homo sapiens
tccacgtacaaggag

SEQ ID NO: 1173235 - DNA, 15 bp, Homo sapiens
ctccacgtacaagga

SEQ ID NO: 1173236 - DNA, 15 bp, Homo sapiens
tctccacgtacaagg

SEQ ID NO: 1173237 - DNA, 15 bp, Homo sapiens
ctctccacgtacaag

SEQ ID NO: 1173238 - DNA, 15 bp, Homo sapiens
gctctccacgtacaa

SEQ ID NO: 1173239 - DNA, 15 bp, Homo sapiens
cgctctccacgtaca

SEQ ID NO: 1173240 - DNA, 15 bp, Homo sapiens
ccgctctccacgtac

SEQ ID NO: 1173241 - DNA, 15 bp, Homo sapiens
cccgctctccacgta

SEQ ID NO: 1173242 - DNA, 15 bp, Homo sapiens
gcccgctctccacgt

SEQ ID NO: 1173243 - DNA, 15 bp, Homo sapiens
tgcccgctctccacg

SEQ ID NO: 1173244 - DNA, 15 bp, Homo sapiens
ctgcccgctctccac

SEQ ID NO: 1173245 - DNA, 15 bp, Homo sapiens
tctgcccgctctcca

SEQ ID NO: 1173246 - DNA, 15 bp, Homo sapiens
atctgcccgctctcc

SEQ ID NO: 1173247 - DNA, 15 bp, Homo sapiens
gatctgcccgctctc

SEQ ID NO: 1173248 - DNA, 15 bp, Homo sapiens
tgatctgcccgctct

SEQ ID NO: 1173249 - DNA, 15 bp, Homo sapiens
atgatctgcccgctc

SEQ ID NO: 1173250 - DNA, 15 bp, Homo sapiens
catgatctgcccgct

SEQ ID NO: 1173251 - DNA, 15 bp, Homo sapiens
acatgatctgcccgc

SEQ ID NO: 1173252 - DNA, 15 bp, Homo sapiens
cacatgatctgcccg

SEQ ID NO: 1173253 - DNA, 15 bp, Homo sapiens
gcacatgatctgccc

SEQ ID NO: 1173254 - DNA, 15 bp, Homo sapiens
tgcacatgatctgcc

SEQ ID NO: 1173255 - DNA, 15 bp, Homo sapiens
atgcacatgatctgc

SEQ ID NO: 1173256 - DNA, 15 bp, Homo sapiens
gatgcacatgatctg

SEQ ID NO: 1173257 - DNA, 15 bp, Homo sapiens
ggatgcacatgatct

SEQ ID NO: 1173258 - DNA, 15 bp, Homo sapiens
aggatgcacatgatc

SEQ ID NO: 1173259 - DNA, 15 bp, Homo sapiens
taggatgcacatgat

SEQ ID NO: 1173260 - DNA, 15 bp, Homo sapiens
ctaggatgcacatga

SEQ ID NO: 1173261 - DNA, 15 bp, Homo sapiens
cctaggatgcacatg

SEQ ID NO: 1173262 - DNA, 15 bp, Homo sapiens
tcctaggatgcacat

SEQ ID NO: 1173263 - DNA, 15 bp, Homo sapiens
ttcctaggatgcaca

SEQ ID NO: 1173264 - DNA, 15 bp, Homo sapiens
cttcctaggatgcac

SEQ ID NO: 1173265 - DNA, 15 bp, Homo sapiens
gcttcctaggatgca

SEQ ID NO: 1173266 - DNA, 15 bp, Homo sapiens
agcttcctaggatgc

SEQ ID NO: 1173267 - DNA, 15 bp, Homo sapiens
gagcttcctaggatg

SEQ ID NO: 1173268 - DNA, 15 bp, Homo sapiens
tgagcttcctaggat

SEQ ID NO: 1173269 - DNA, 15 bp, Homo sapiens
ctgagcttcctagga

SEQ ID NO: 1173270 - DNA, 15 bp, Homo sapiens
cctgagcttcctagg

SEQ ID NO: 1173271 - DNA, 15 bp, Homo sapiens
acctgagcttcctag

SEQ ID NO: 1173272 - DNA, 15 bp, Homo sapiens
tacctgagcttccta

SEQ ID NO: 1173273 - DNA, 15 bp, Homo sapiens
ttacctgagcttcct

SEQ ID NO: 1173274 - DNA, 15 bp, Homo sapiens
cttacctgagcttcc

SEQ ID NO: 1173275 - DNA, 15 bp, Homo sapiens
gcttacctgagcttc

SEQ ID NO: 1173276 - DNA, 15 bp, Homo sapiens
agcttacctgagctt

SEQ ID NO: 1173277 - DNA, 15 bp, Homo sapiens
aagcttacctgagct

SEQ ID NO: 1173278 - DNA, 15 bp, Homo sapiens
caagcttacctgagc

SEQ ID NO: 1173279 - DNA, 15 bp, Homo sapiens
ccaagcttacctgag

SEQ ID NO: 1173280 - DNA, 15 bp, Homo sapiens
cccaagcttacctga

SEQ ID NO: 1173281 - DNA, 15 bp, Homo sapiens
tcccaagcttacctg

SEQ ID NO: 1173282 - DNA, 15 bp, Homo sapiens
ttcccaagcttacct

SEQ ID NO: 1173283 - DNA, 15 bp, Homo sapiens
cttcccaagcttacc

SEQ ID NO: 1173284 - DNA, 15 bp, Homo sapiens
ccttcccaagcttac

SEQ ID NO: 1173285 - DNA, 15 bp, Homo sapiens
tccttcccaagctta

SEQ ID NO: 1173286 - DNA, 15 bp, Homo sapiens
ctccttcccaagctt

SEQ ID NO: 1173287 - DNA, 15 bp, Homo sapiens
cctccttcccaagct

SEQ ID NO: 1173288 - DNA, 15 bp, Homo sapiens
tcctccttcccaagc

SEQ ID NO: 1173289 - DNA, 15 bp, Homo sapiens
atcctccttcccaag

SEQ ID NO: 1173290 - DNA, 15 bp, Homo sapiens
aatcctccttcccaa

SEQ ID NO: 1173291 - DNA, 15 bp, Homo sapiens
gaatcctccttccca

SEQ ID NO: 1173292 - DNA, 15 bp, Homo sapiens
agaatcctccttccc

SEQ ID NO: 1173293 - DNA, 15 bp, Homo sapiens
tagaatcctccttcc

SEQ ID NO: 1173294 - DNA, 15 bp, Homo sapiens
ttagaatcctccttc

SEQ ID NO: 1173295 - DNA, 15 bp, Homo sapiens
tttagaatcctcctt

SEQ ID NO: 1173296 - DNA, 15 bp, Homo sapiens
ttttagaatcctcct

SEQ ID NO: 1173297 - DNA, 15 bp, Homo sapiens
tttttagaatcctcc

SEQ ID NO: 1173298 - DNA, 15 bp, Homo sapiens
ctttttagaatcctc

SEQ ID NO: 1173299 - DNA, 15 bp, Homo sapiens
cctttttagaatcct

SEQ ID NO: 1173300 - DNA, 15 bp, Homo sapiens
tcctttttagaatcc

SEQ ID NO: 1173301 - DNA, 15 bp, Homo sapiens
atcctttttagaatc

SEQ ID NO: 1173302 - DNA, 15 bp, Homo sapiens
aatcctttttagaat

SEQ ID NO: 1173303 - DNA, 15 bp, Homo sapiens
aaatcctttttagaa

SEQ ID NO: 1173304 - DNA, 15 bp, Homo sapiens
caaatcctttttaga

SEQ ID NO: 1173305 - DNA, 15 bp, Homo sapiens
ccaaatcctttttag

SEQ ID NO: 1173306 - DNA, 15 bp, Homo sapiens
gccaaatccttttta

SEQ ID NO: 1173307 - DNA, 15 bp, Homo sapiens
agccaaatccttttt

SEQ ID NO: 1173308 - DNA, 15 bp, Homo sapiens
aagccaaatcctttt

SEQ ID NO: 1173309 - DNA, 15 bp, Homo sapiens
caagccaaatccttt

SEQ ID NO: 1173310 - DNA, 15 bp, Homo sapiens
tcaagccaaatcctt

SEQ ID NO: 1173311 - DNA, 15 bp, Homo sapiens
ctcaagccaaatcct

SEQ ID NO: 1173312 - DNA, 15 bp, Homo sapiens
actcaagccaaatcc

SEQ ID NO: 1173313 - DNA, 15 bp, Homo sapiens
aactcaagccaaatc

SEQ ID NO: 1173314 - DNA, 15 bp, Homo sapiens
taactcaagccaaat

SEQ ID NO: 1173315 - DNA, 15 bp, Homo sapiens
ttaactcaagccaaa

SEQ ID NO: 1173316 - DNA, 15 bp, Homo sapiens
tttaactcaagccaa

SEQ ID NO: 1173317 - DNA, 15 bp, Homo sapiens
gtttaactcaagcca

SEQ ID NO: 1173318 - DNA, 15 bp, Homo sapiens
agtttaactcaagcc

SEQ ID NO: 1173319 - DNA, 15 bp, Homo sapiens
gagtttaactcaagc

SEQ ID NO: 1173320 - DNA, 15 bp, Homo sapiens
ggagtttaactcaag

SEQ ID NO: 1173321 - DNA, 15 bp, Homo sapiens
tggagtttaactcaa

SEQ ID NO: 1173322 - DNA, 15 bp, Homo sapiens
gtggagtttaactca

SEQ ID NO: 1173323 - DNA, 15 bp, Homo sapiens
tgtggagtttaactc

SEQ ID NO: 1173324 - DNA, 15 bp, Homo sapiens
atgtggagtttaact

SEQ ID NO: 1173325 - DNA, 15 bp, Homo sapiens
aatgtggagtttaac

SEQ ID NO: 1173326 - DNA, 15 bp, Homo sapiens
caatgtggagtttaa

SEQ ID NO: 1173327 - DNA, 15 bp, Homo sapiens
tcaatgtggagttta

SEQ ID NO: 1173328 - DNA, 15 bp, Homo sapiens
ttcaatgtggagttt

SEQ ID NO: 1173329 - DNA, 15 bp, Homo sapiens
cttcaatgtggagtt

SEQ ID NO: 1173330 - DNA, 15 bp, Homo sapiens
tcttcaatgtggagt

SEQ ID NO: 1173331 - DNA, 15 bp, Homo sapiens
ttcttcaatgtggag

SEQ ID NO: 1173332 - DNA, 15 bp, Homo sapiens
tttcttcaatgtgga

SEQ ID NO: 1173333 - DNA, 15 bp, Homo sapiens
gtttcttcaatgtgg

SEQ ID NO: 1173334 - DNA, 15 bp, Homo sapiens
tgtttcttcaatgtg

SEQ ID NO: 1173335 - DNA, 15 bp, Homo sapiens
ctgtttcttcaatgt

SEQ ID NO: 1173336 - DNA, 15 bp, Homo sapiens
tctgtttcttcaatg

SEQ ID NO: 1173337 - DNA, 15 bp, Homo sapiens
atctgtttcttcaat

SEQ ID NO: 1173338 - DNA, 15 bp, Homo sapiens
aatctgtttcttcaa

SEQ ID NO: 1173339 - DNA, 15 bp, Homo sapiens
taatctgtttcttca

SEQ ID NO: 1173340 - DNA, 15 bp, Homo sapiens
ttaatctgtttcttc

SEQ ID NO: 1173341 - DNA, 15 bp, Homo sapiens
acttaatctgtttct

SEQ ID NO: 1173342 - DNA, 15 bp, Homo sapiens
aacttaatctgtttc

SEQ ID NO: 1173343 - DNA, 15 bp, Homo sapiens
caacttaatctgttt

SEQ ID NO: 1173344 - DNA, 15 bp, Homo sapiens
acaacttaatctgtt

SEQ ID NO: 1173345 - DNA, 15 bp, Homo sapiens
tacaacttaatctgt

SEQ ID NO: 1173346 - DNA, 15 bp, Homo sapiens
ttacaacttaatctg

SEQ ID NO: 1173347 - DNA, 15 bp, Homo sapiens
gttacaacttaatct

SEQ ID NO: 1173348 - DNA, 15 bp, Homo sapiens
tgttacaacttaatc

SEQ ID NO: 1173349 - DNA, 15 bp, Homo sapiens
ttgttacaacttaat

SEQ ID NO: 1173350 - DNA, 15 bp, Homo sapiens
cttgttacaacttaa

SEQ ID NO: 1173351 - DNA, 15 bp, Homo sapiens
tcttgttacaactta

SEQ ID NO: 1173352 - DNA, 15 bp, Homo sapiens
ttcttgttacaactt

SEQ ID NO: 1173353 - DNA, 15 bp, Homo sapiens
tttcttgttacaact

SEQ ID NO: 1173354 - DNA, 15 bp, Homo sapiens
ctttcttgttacaac

SEQ ID NO: 1173355 - DNA, 15 bp, Homo sapiens
gctttcttgttacaa

SEQ ID NO: 1173356 - DNA, 15 bp, Homo sapiens
ggctttcttgttaca

SEQ ID NO: 1173357 - DNA, 15 bp, Homo sapiens
tggctttcttgttac

SEQ ID NO: 1173358 - DNA, 15 bp, Homo sapiens
gtggctttcttgtta

SEQ ID NO: 1173359 - DNA, 15 bp, Homo sapiens
tgtggctttcttgtt

SEQ ID NO: 1173360 - DNA, 15 bp, Homo sapiens
ctgtggctttcttgt

SEQ ID NO: 1173361 - DNA, 15 bp, Homo sapiens
cctgtggctttcttg

SEQ ID NO: 1173362 - DNA, 15 bp, Homo sapiens
acctgtggctttctt

SEQ ID NO: 1173363 - DNA, 15 bp, Homo sapiens
aacctgtggctttct

SEQ ID NO: 1173364 - DNA, 15 bp, Homo sapiens
aaacctgtggctttc

SEQ ID NO: 1173365 - DNA, 15 bp, Homo sapiens
caaacctgtggcttt

SEQ ID NO: 1173366 - DNA, 15 bp, Homo sapiens
tcaaacctgtggctt

SEQ ID NO: 1173367 - DNA, 15 bp, Homo sapiens
atcaaacctgtggct

SEQ ID NO: 1173368 - DNA, 15 bp, Homo sapiens
tatcaaacctgtggc

SEQ ID NO: 1173369 - DNA, 15 bp, Homo sapiens
atatcaaacctgtgg

SEQ ID NO: 1173370 - DNA, 15 bp, Homo sapiens
aatatcaaacctgtg

SEQ ID NO: 1173371 - DNA, 15 bp, Homo sapiens
taatatcaaacctgt

SEQ ID NO: 1173372 - DNA, 15 bp, Homo sapiens
ctaatatcaaacctg

SEQ ID NO: 1173373 - DNA, 15 bp, Homo sapiens
tctaatatcaaacct

SEQ ID NO: 1173374 - DNA, 15 bp, Homo sapiens
ttctaatatcaaacc

SEQ ID NO: 1173375 - DNA, 15 bp, Homo sapiens
attctaatatcaaac

SEQ ID NO: 1173376 - DNA, 15 bp, Homo sapiens
cattctaatatcaaa

SEQ ID NO: 1173377 - DNA, 15 bp, Homo sapiens
tcattctaatatcaa

SEQ ID NO: 1173378 - DNA, 15 bp, Homo sapiens
ttcattctaatatca

SEQ ID NO: 1173379 - DNA, 15 bp, Homo sapiens
attcattctaatatc

SEQ ID NO: 1173380 - DNA, 15 bp, Homo sapiens
aattcattctaatat

SEQ ID NO: 1173381 - DNA, 15 bp, Homo sapiens
gaattcattctaata

SEQ ID NO: 1173382 - DNA, 15 bp, Homo sapiens
agaattcattctaat

SEQ ID NO: 1173383 - DNA, 15 bp, Homo sapiens
tagaattcattctaa

SEQ ID NO: 1173384 - DNA, 15 bp, Homo sapiens
atagaattcattcta

SEQ ID NO: 1173385 - DNA, 15 bp, Homo sapiens
aatagaattcattct

SEQ ID NO: 1173386 - DNA, 15 bp, Homo sapiens
caatagaattcattc

SEQ ID NO: 1173387 - DNA, 15 bp, Homo sapiens
tcaatagaattcatt

SEQ ID NO: 1173388 - DNA, 15 bp, Homo sapiens
atcaatagaattcat

SEQ ID NO: 1173389 - DNA, 15 bp, Homo sapiens
tatcaatagaattca

SEQ ID NO: 1173390 - DNA, 15 bp, Homo sapiens
atatcaatagaattc

SEQ ID NO: 1173391 - DNA, 15 bp, Homo sapiens
gatatcaatagaatt

SEQ ID NO: 1173392 - DNA, 15 bp, Homo sapiens
agatatcaatagaat

SEQ ID NO: 1173393 - DNA, 15 bp, Homo sapiens
cagatatcaatagaa

SEQ ID NO: 1173394 - DNA, 15 bp, Homo sapiens
tcagatatcaataga

SEQ ID NO: 1173395 - DNA, 15 bp, Homo sapiens
gtcagatatcaatag

SEQ ID NO: 1173396 - DNA, 15 bp, Homo sapiens
agtcagatatcaata

SEQ ID NO: 1173397 - DNA, 15 bp, Homo sapiens
cagtcagatatcaat

SEQ ID NO: 1173398 - DNA, 15 bp, Homo sapiens
acagtcagatatcaa

SEQ ID NO: 1173399 - DNA, 15 bp, Homo sapiens
cacagtcagatatca

SEQ ID NO: 1173400 - DNA, 15 bp, Homo sapiens
tcacagtcagatatc

SEQ ID NO: 1173401 - DNA, 15 bp, Homo sapiens
ttcacagtcagatat

SEQ ID NO: 1173402 - DNA, 15 bp, Homo sapiens
attcacagtcagata

SEQ ID NO: 1173403 - DNA, 15 bp, Homo sapiens
cattcacagtcagat

SEQ ID NO: 1173404 - DNA, 15 bp, Homo sapiens
ccattcacagtcaga

SEQ ID NO: 1173405 - DNA, 15 bp, Homo sapiens
tccattcacagtcag

SEQ ID NO: 1173406 - DNA, 15 bp, Homo sapiens
ttccattcacagtca

SEQ ID NO: 1173407 - DNA, 15 bp, Homo sapiens
gttccattcacagtc

SEQ ID NO: 1173408 - DNA, 15 bp, Homo sapiens
agttccattcacagt

SEQ ID NO: 1173409 - DNA, 15 bp, Homo sapiens
cagttccattcacag

SEQ ID NO: 1173410 - DNA, 15 bp, Homo sapiens
gcagttccattcaca

SEQ ID NO: 1173411 - DNA, 15 bp, Homo sapiens
agcagttccattcac

SEQ ID NO: 1173412 - DNA, 15 bp, Homo sapiens
tagcagttccattca

SEQ ID NO: 1173413 - DNA, 15 bp, Homo sapiens
gtagcagttccattc

SEQ ID NO: 1173414 - DNA, 15 bp, Homo sapiens
ggtagcagttccatt

SEQ ID NO: 1173415 - DNA, 15 bp, Homo sapiens
tggtagcagttccat

SEQ ID NO: 1173416 - DNA, 15 bp, Homo sapiens
ttggtagcagttcca

SEQ ID NO: 1173417 - DNA, 15 bp, Homo sapiens
attggtagcagttcc

SEQ ID NO: 1173418 - DNA, 15 bp, Homo sapiens
cattggtagcagttc

SEQ ID NO: 1173419 - DNA, 15 bp, Homo sapiens
acattggtagcagtt

SEQ ID NO: 1173420 - DNA, 15 bp, Homo sapiens
cacattggtagcagt

SEQ ID NO: 1173421 - DNA, 15 bp, Homo sapiens
tcacattggtagcag

SEQ ID NO: 1173422 - DNA, 15 bp, Homo sapiens
ttcacattggtagca

SEQ ID NO: 1173423 - DNA, 15 bp, Homo sapiens
tttcacattggtagc

SEQ ID NO: 1173424 - DNA, 15 bp, Homo sapiens
atttcacattggtag

SEQ ID NO: 1173425 - DNA, 15 bp, Homo sapiens
gatttcacattggta

SEQ ID NO: 1173426 - DNA, 15 bp, Homo sapiens
agatttcacattggt

SEQ ID NO: 1173427 - DNA, 15 bp, Homo sapiens
aagatttcacattgg

SEQ ID NO: 1173428 - DNA, 15 bp, Homo sapiens
aaagatttcacattg

SEQ ID NO: 1173429 - DNA, 15 bp, Homo sapiens
taaagatttcacatt

SEQ ID NO: 1173430 - DNA, 15 bp, Homo sapiens
ctaaagatttcacat

SEQ ID NO: 1173431 - DNA, 15 bp, Homo sapiens
tctaaagatttcaca

SEQ ID NO: 1173432 - DNA, 15 bp, Homo sapiens
ttctaaagatttcac

SEQ ID NO: 1173433 - DNA, 15 bp, Homo sapiens
tttctaaagatttca

SEQ ID NO: 1173434 - DNA, 15 bp, Homo sapiens
ctttctaaagatttc

SEQ ID NO: 1173435 - DNA, 15 bp, Homo sapiens
tctttctaaagattt

SEQ ID NO: 1173436 - DNA, 15 bp, Homo sapiens
atctttctaaagatt

SEQ ID NO: 1173437 - DNA, 15 bp, Homo sapiens
gatctttctaaagat

SEQ ID NO: 1173438 - DNA, 15 bp, Homo sapiens
ggatctttctaaaga

SEQ ID NO: 1173439 - DNA, 15 bp, Homo sapiens
aggatctttctaaag

SEQ ID NO: 1173440 - DNA, 15 bp, Homo sapiens
aaggatctttctaaa

SEQ ID NO: 1173441 - DNA, 15 bp, Homo sapiens
caaggatctttctaa

SEQ ID NO: 1173442 - DNA, 15 bp, Homo sapiens
tcaaggatctttcta

SEQ ID NO: 1173443 - DNA, 15 bp, Homo sapiens
ttcaaggatctttct

SEQ ID NO: 1173444 - DNA, 15 bp, Homo sapiens
tttcaaggatctttc

SEQ ID NO: 1173445 - DNA, 15 bp, Homo sapiens
ctttcaaggatcttt

SEQ ID NO: 1173446 - DNA, 15 bp, Homo sapiens
tctttcaaggatctt

SEQ ID NO: 1173447 - DNA, 15 bp, Homo sapiens
ctctttcaaggatct

SEQ ID NO: 1173448 - DNA, 15 bp, Homo sapiens
actctttcaaggatc

SEQ ID NO: 1173449 - DNA, 15 bp, Homo sapiens
tactctttcaaggat

SEQ ID NO: 1173450 - DNA, 15 bp, Homo sapiens
atactctttcaagga

SEQ ID NO: 1173451 - DNA, 15 bp, Homo sapiens
tatactctttcaagg

SEQ ID NO: 1173452 - DNA, 15 bp, Homo sapiens
ttatactctttcaag

SEQ ID NO: 1173453 - DNA, 15 bp, Homo sapiens
tttatactctttcaa

SEQ ID NO: 1173454 - DNA, 15 bp, Homo sapiens
ttttatactctttca

SEQ ID NO: 1173455 - DNA, 15 bp, Homo sapiens
attttatactctttc

SEQ ID NO: 1173456 - DNA, 15 bp, Homo sapiens
aattttatactcttt

SEQ ID NO: 1173457 - DNA, 15 bp, Homo sapiens
gaattttatactctt

SEQ ID NO: 1173458 - DNA, 15 bp, Homo sapiens
agaattttatactct

SEQ ID NO: 1173459 - DNA, 15 bp, Homo sapiens
cagaattttatactc

SEQ ID NO: 1173460 - DNA, 15 bp, Homo sapiens
gcagaattttatact

SEQ ID NO: 1173461 - DNA, 15 bp, Homo sapiens
ggcagaattttatac

SEQ ID NO: 1173462 - DNA, 15 bp, Homo sapiens
aggcagaattttata

SEQ ID NO: 1173463 - DNA, 15 bp, Homo sapiens
taggcagaattttat

SEQ ID NO: 1173464 - DNA, 15 bp, Homo sapiens
ttaggcagaatttta

SEQ ID NO: 1173465 - DNA, 15 bp, Homo sapiens
gttaggcagaatttt

SEQ ID NO: 1173466 - DNA, 15 bp, Homo sapiens
tgttaggcagaattt

SEQ ID NO: 1173467 - DNA, 15 bp, Homo sapiens
atgttaggcagaatt

SEQ ID NO: 1173468 - DNA, 15 bp, Homo sapiens
catgttaggcagaat

SEQ ID NO: 1173469 - DNA, 15 bp, Homo sapiens
acatgttaggcagaa

SEQ ID NO: 1173470 - DNA, 15 bp, Homo sapiens
tacatgttaggcaga

SEQ ID NO: 1173471 - DNA, 15 bp, Homo sapiens
gtacatgttaggcag

SEQ ID NO: 1173472 - DNA, 15 bp, Homo sapiens
cgtacatgttaggca

SEQ ID NO: 1173473 - DNA, 15 bp, Homo sapiens
acgtacatgttaggc

SEQ ID NO: 1173474 - DNA, 15 bp, Homo sapiens
cacgtacatgttagg

SEQ ID NO: 1173475 - DNA, 15 bp, Homo sapiens
tcacgtacatgttag

SEQ ID NO: 1173476 - DNA, 15 bp, Homo sapiens
ttcacgtacatgtta

SEQ ID NO: 1173477 - DNA, 15 bp, Homo sapiens
attcacgtacatgtt

SEQ ID NO: 1173478 - DNA, 15 bp, Homo sapiens
aattcacgtacatgt

SEQ ID NO: 1173479 - DNA, 15 bp, Homo sapiens
gaattcacgtacatg

SEQ ID NO: 1173480 - DNA, 15 bp, Homo sapiens
tgaattcacgtacat

SEQ ID NO: 1173481 - DNA, 15 bp, Homo sapiens
atgaattcacgtaca

SEQ ID NO: 1173482 - DNA, 15 bp, Homo sapiens
tatgaattcacgtac

SEQ ID NO: 1173483 - DNA, 15 bp, Homo sapiens
atatgaattcacgta

SEQ ID NO: 1173484 - DNA, 15 bp, Homo sapiens
aatatgaattcacgt

SEQ ID NO: 1173485 - DNA, 15 bp, Homo sapiens
aaatatgaattcacg

SEQ ID NO: 1173486 - DNA, 15 bp, Homo sapiens
gaaatatgaattcac

SEQ ID NO: 1173487 - DNA, 15 bp, Homo sapiens
tgaaatatgaattca

SEQ ID NO: 1173488 - DNA, 15 bp, Homo sapiens
ttgaaatatgaattc

SEQ ID NO: 1173489 - DNA, 15 bp, Homo sapiens
tttgaaatatgaatt

SEQ ID NO: 1173490 - DNA, 15 bp, Homo sapiens
ttttgaaatatgaat

SEQ ID NO: 1173491 - DNA, 15 bp, Homo sapiens
attttgaaatatgaa

SEQ ID NO: 1173492 - DNA, 15 bp, Homo sapiens
tattttgaaatatga

SEQ ID NO: 1173493 - DNA, 15 bp, Homo sapiens
atattttgaaatatg

SEQ ID NO: 1173494 - DNA, 15 bp, Homo sapiens
tatattttgaaatat

SEQ ID NO: 1173495 - DNA, 15 bp, Homo sapiens
ttatattttgaaata

SEQ ID NO: 1173496 - DNA, 15 bp, Homo sapiens
tttatattttgaaat

SEQ ID NO: 1173497 - DNA, 15 bp, Homo sapiens
ttttatattttgaaa

SEQ ID NO: 1173498 - DNA, 15 bp, Homo sapiens
gctttttatattttg

SEQ ID NO: 1173499 - DNA, 15 bp, Homo sapiens
ggctttttatatttt

SEQ ID NO: 1173500 - DNA, 15 bp, Homo sapiens
gggctttttatattt

SEQ ID NO: 1173501 - DNA, 15 bp, Homo sapiens
ggggctttttatatt

SEQ ID NO: 1173502 - DNA, 15 bp, Homo sapiens
gggggctttttatat

SEQ ID NO: 1173503 - DNA, 15 bp, Homo sapiens
tgggggctttttata

SEQ ID NO: 1173504 - DNA, 15 bp, Homo sapiens
gtgggggctttttat

SEQ ID NO: 1173505 - DNA, 15 bp, Homo sapiens
tgtgggggcttttta

SEQ ID NO: 1173506 - DNA, 15 bp, Homo sapiens
ctgtgggggcttttt

SEQ ID NO: 1173507 - DNA, 15 bp, Homo sapiens
actgtgggggctttt

SEQ ID NO: 1173508 - DNA, 15 bp, Homo sapiens
aactgtgggggcttt

SEQ ID NO: 1173509 - DNA, 15 bp, Homo sapiens
gaactgtgggggctt

SEQ ID NO: 1173510 - DNA, 15 bp, Homo sapiens
ggaactgtgggggct

SEQ ID NO: 1173511 - DNA, 15 bp, Homo sapiens
tggaactgtgggggc

SEQ ID NO: 1173512 - DNA, 15 bp, Homo sapiens
atggaactgtggggg

SEQ ID NO: 1173513 - DNA, 15 bp, Homo sapiens
catggaactgtgggg

SEQ ID NO: 1173514 - DNA, 15 bp, Homo sapiens
ccatggaactgtggg

SEQ ID NO: 1173515 - DNA, 15 bp, Homo sapiens
gccatggaactgtgg

SEQ ID NO: 1173516 - DNA, 15 bp, Homo sapiens
tgccatggaactgtg

SEQ ID NO: 1173517 - DNA, 15 bp, Homo sapiens
atgccatggaactgt

SEQ ID NO: 1173518 - DNA, 15 bp, Homo sapiens
tatgccatggaactg

SEQ ID NO: 1173519 - DNA, 15 bp, Homo sapiens
atatgccatggaact

SEQ ID NO: 1173520 - DNA, 15 bp, Homo sapiens
tatatgccatggaac

SEQ ID NO: 1173521 - DNA, 15 bp, Homo sapiens
ttatatgccatggaa

SEQ ID NO: 1173522 - DNA, 15 bp, Homo sapiens
tttatatgccatgga

SEQ ID NO: 1173523 - DNA, 15 bp, Homo sapiens
ttttatatgccatgg

SEQ ID NO: 1173524 - DNA, 15 bp, Homo sapiens
cttttatatgccatg

SEQ ID NO: 1173525 - DNA, 15 bp, Homo sapiens
acttttatatgccat

SEQ ID NO: 1173526 - DNA, 15 bp, Homo sapiens
tacttttatatgcca

SEQ ID NO: 1173527 - DNA, 15 bp, Homo sapiens
gtacttttatatgcc

SEQ ID NO: 1173528 - DNA, 15 bp, Homo sapiens
agtacttttatatgc

SEQ ID NO: 1173529 - DNA, 15 bp, Homo sapiens
gagtacttttatatg

SEQ ID NO: 1173530 - DNA, 15 bp, Homo sapiens
tgagtacttttatat

SEQ ID NO: 1173531 - DNA, 15 bp, Homo sapiens
ctgagtacttttata

SEQ ID NO: 1173532 - DNA, 15 bp, Homo sapiens
cctgagtacttttat

SEQ ID NO: 1173533 - DNA, 15 bp, Homo sapiens
tcctgagtactttta

SEQ ID NO: 1173534 - DNA, 15 bp, Homo sapiens
ttcctgagtactttt

SEQ ID NO: 1173535 - DNA, 15 bp, Homo sapiens
tttcctgagtacttt

SEQ ID NO: 1173536 - DNA, 15 bp, Homo sapiens
gtttcctgagtactt

SEQ ID NO: 1173537 - DNA, 15 bp, Homo sapiens
tgtttcctgagtact

SEQ ID NO: 1173538 - DNA, 15 bp, Homo sapiens
gtgtttcctgagtac

SEQ ID NO: 1173539 - DNA, 15 bp, Homo sapiens
tgtgtttcctgagta

SEQ ID NO: 1173540 - DNA, 15 bp, Homo sapiens
ttgtgtttcctgagt

SEQ ID NO: 1173541 - DNA, 15 bp, Homo sapiens
attgtgtttcctgag

SEQ ID NO: 1173542 - DNA, 15 bp, Homo sapiens
aattgtgtttcctga

SEQ ID NO: 1173543 - DNA, 15 bp, Homo sapiens
aaattgtgtttcctg

SEQ ID NO: 1173544 - DNA, 15 bp, Homo sapiens
gaaattgtgtttcct

SEQ ID NO: 1173545 - DNA, 15 bp, Homo sapiens
ggaaattgtgtttcc

SEQ ID NO: 1173546 - DNA, 15 bp, Homo sapiens
gggaaattgtgtttc

SEQ ID NO: 1173547 - DNA, 15 bp, Homo sapiens
ggggaaattgtgttt

SEQ ID NO: 1173548 - DNA, 15 bp, Homo sapiens
aggggaaattgtgtt

SEQ ID NO: 1173549 - DNA, 15 bp, Homo sapiens
taggggaaattgtgt

SEQ ID NO: 1173550 - DNA, 15 bp, Homo sapiens
ataggggaaattgtg

SEQ ID NO: 1173551 - DNA, 15 bp, Homo sapiens
gataggggaaattgt

SEQ ID NO: 1173552 - DNA, 15 bp, Homo sapiens
agataggggaaattg

SEQ ID NO: 1173553 - DNA, 15 bp, Homo sapiens
cagataggggaaatt

SEQ ID NO: 1173554 - DNA, 15 bp, Homo sapiens
acagataggggaaat

SEQ ID NO: 1173555 - DNA, 15 bp, Homo sapiens
tacagataggggaaa

SEQ ID NO: 1173556 - DNA, 15 bp, Homo sapiens
gtacagataggggaa

SEQ ID NO: 1173557 - DNA, 15 bp, Homo sapiens
tgtacagatagggga

SEQ ID NO: 1173558 - DNA, 15 bp, Homo sapiens
gtgtacagatagggg

SEQ ID NO: 1173559 - DNA, 15 bp, Homo sapiens
agtgtacagataggg

SEQ ID NO: 1173560 - DNA, 15 bp, Homo sapiens
cagtgtacagatagg

SEQ ID NO: 1173561 - DNA, 15 bp, Homo sapiens
gcagtgtacagatag

SEQ ID NO: 1173562 - DNA, 15 bp, Homo sapiens
ggcagtgtacagata

SEQ ID NO: 1173563 - DNA, 15 bp, Homo sapiens
aggcagtgtacagat

SEQ ID NO: 1173564 - DNA, 15 bp, Homo sapiens
taggcagtgtacaga

SEQ ID NO: 1173565 - DNA, 15 bp, Homo sapiens
ctaggcagtgtacag

SEQ ID NO: 1173566 - DNA, 15 bp, Homo sapiens
tctaggcagtgtaca

SEQ ID NO: 1173567 - DNA, 15 bp, Homo sapiens
ctctaggcagtgtac

SEQ ID NO: 1173568 - DNA, 15 bp, Homo sapiens
tctctaggcagtgta

SEQ ID NO: 1173569 - DNA, 15 bp, Homo sapiens
gtctctaggcagtgt

SEQ ID NO: 1173570 - DNA, 15 bp, Homo sapiens
tgtctctaggcagtg

SEQ ID NO: 1173571 - DNA, 15 bp, Homo sapiens
ctgtctctaggcagt

SEQ ID NO: 1173572 - DNA, 15 bp, Homo sapiens
cctgtctctaggcag

SEQ ID NO: 1173573 - DNA, 15 bp, Homo sapiens
tcctgtctctaggca

SEQ ID NO: 1173574 - DNA, 15 bp, Homo sapiens
ttcctgtctctaggc

SEQ ID NO: 1173575 - DNA, 15 bp, Homo sapiens
tttcctgtctctagg

SEQ ID NO: 1173576 - DNA, 15 bp, Homo sapiens
ttttcctgtctctag

SEQ ID NO: 1173577 - DNA, 15 bp, Homo sapiens
cttttcctgtctcta

SEQ ID NO: 1173578 - DNA, 15 bp, Homo sapiens
ccttttcctgtctct

SEQ ID NO: 1173579 - DNA, 15 bp, Homo sapiens
tccttttcctgtctc

SEQ ID NO: 1173580 - DNA, 15 bp, Homo sapiens
atccttttcctgtct

SEQ ID NO: 1173581 - DNA, 15 bp, Homo sapiens
aatccttttcctgtc

SEQ ID NO: 1173582 - DNA, 15 bp, Homo sapiens
taatccttttcctgt

SEQ ID NO: 1173583 - DNA, 15 bp, Homo sapiens
ttaatccttttcctg

SEQ ID NO: 1173584 - DNA, 15 bp, Homo sapiens
tttaatccttttcct

SEQ ID NO: 1173585 - DNA, 15 bp, Homo sapiens
atttaatccttttcc

SEQ ID NO: 1173586 - DNA, 15 bp, Homo sapiens
tatttaatccttttc

SEQ ID NO: 1173587 - DNA, 15 bp, Homo sapiens
ttatttaatcctttt

SEQ ID NO: 1173588 - DNA, 15 bp, Homo sapiens
cttatttaatccttt

SEQ ID NO: 1173589 - DNA, 15 bp, Homo sapiens
gcttatttaatcctt

SEQ ID NO: 1173590 - DNA, 15 bp, Homo sapiens
tgcttatttaatcct

SEQ ID NO: 1173591 - DNA, 15 bp, Homo sapiens
gtgcttatttaatcc

SEQ ID NO: 1173592 - DNA, 15 bp, Homo sapiens
tgtgcttatttaatc

SEQ ID NO: 1173593 - DNA, 15 bp, Homo sapiens
ttgtgcttatttaat

SEQ ID NO: 1173594 - DNA, 15 bp, Homo sapiens
tttgtgcttatttaa

SEQ ID NO: 1173595 - DNA, 15 bp, Homo sapiens
ttttgtgcttattta

SEQ ID NO: 1173596 - DNA, 15 bp, Homo sapiens
tttttgtgcttattt

SEQ ID NO: 1173597 - DNA, 15 bp, Homo sapiens
atttttgtgcttatt

SEQ ID NO: 1173598 - DNA, 15 bp, Homo sapiens
catttttgtgcttat

SEQ ID NO: 1173599 - DNA, 15 bp, Homo sapiens
gcatttttgtgctta

SEQ ID NO: 1173600 - DNA, 15 bp, Homo sapiens
ggcatttttgtgctt

SEQ ID NO: 1173601 - DNA, 15 bp, Homo sapiens
gggcatttttgtgct

SEQ ID NO: 1173602 - DNA, 15 bp, Homo sapiens
tgggcatttttgtgc

SEQ ID NO: 1173603 - DNA, 15 bp, Homo sapiens
atgggcatttttgtg

SEQ ID NO: 1173604 - DNA, 15 bp, Homo sapiens
taatgggcatttttg

SEQ ID NO: 1173605 - DNA, 15 bp, Homo sapiens
ttaatgggcattttt

SEQ ID NO: 1173606 - DNA, 15 bp, Homo sapiens
cttaatgggcatttt

SEQ ID NO: 1173607 - DNA, 15 bp, Homo sapiens
gcttaatgggcattt

SEQ ID NO: 1173608 - DNA, 15 bp, Homo sapiens
ggcttaatgggcatt

SEQ ID NO: 1173609 - DNA, 15 bp, Homo sapiens
gggcttaatgggcat

SEQ ID NO: 1173610 - DNA, 15 bp, Homo sapiens
ggggcttaatgggca

SEQ ID NO: 1173611 - DNA, 15 bp, Homo sapiens
aggggcttaatgggc

SEQ ID NO: 1173612 - DNA, 15 bp, Homo sapiens
taggggcttaatggg

SEQ ID NO: 1173613 - DNA, 15 bp, Homo sapiens
ataggggcttaatgg

SEQ ID NO: 1173614 - DNA, 15 bp, Homo sapiens
gataggggcttaatg

SEQ ID NO: 1173615 - DNA, 15 bp, Homo sapiens
agataggggcttaat

SEQ ID NO: 1173616 - DNA, 15 bp, Homo sapiens
aagataggggcttaa

SEQ ID NO: 1173617 - DNA, 15 bp, Homo sapiens
aaagataggggctta

SEQ ID NO: 1173618 - DNA, 15 bp, Homo sapiens
caaagataggggctt

SEQ ID NO: 1173619 - DNA, 15 bp, Homo sapiens
tcaaagataggggct

SEQ ID NO: 1173620 - DNA, 15 bp, Homo sapiens
atcaaagataggggc

SEQ ID NO: 1173621 - DNA, 15 bp, Homo sapiens
aatcaaagatagggg

SEQ ID NO: 1173622 - DNA, 15 bp, Homo sapiens
gaatcaaagataggg

SEQ ID NO: 1173623 - DNA, 15 bp, Homo sapiens
ggaatcaaagatagg

SEQ ID NO: 1173624 - DNA, 15 bp, Homo sapiens
tggaatcaaagatag

SEQ ID NO: 1173625 - DNA, 15 bp, Homo sapiens
ctggaatcaaagata

SEQ ID NO: 1173626 - DNA, 15 bp, Homo sapiens
actggaatcaaagat

SEQ ID NO: 1173627 - DNA, 15 bp, Homo sapiens
cactggaatcaaaga

SEQ ID NO: 1173628 - DNA, 15 bp, Homo sapiens
ccactggaatcaaag

SEQ ID NO: 1173629 - DNA, 15 bp, Homo sapiens
accactggaatcaaa

SEQ ID NO: 1173630 - DNA, 15 bp, Homo sapiens
caccactggaatcaa

SEQ ID NO: 1173631 - DNA, 15 bp, Homo sapiens
gcaccactggaatca

SEQ ID NO: 1173632 - DNA, 15 bp, Homo sapiens
agcaccactggaatc

SEQ ID NO: 1173633 - DNA, 15 bp, Homo sapiens
aagcaccactggaat

SEQ ID NO: 1173634 - DNA, 15 bp, Homo sapiens
aaagcaccactggaa

SEQ ID NO: 1173635 - DNA, 15 bp, Homo sapiens
aaaagcaccactgga

SEQ ID NO: 1173636 - DNA, 15 bp, Homo sapiens
aaaaagcaccactgg

SEQ ID NO: 1173637 - DNA, 15 bp, Homo sapiens
aaaaaagcaccactg

SEQ ID NO: 1173638 - DNA, 15 bp, Homo sapiens
taaaaaagcaccact

SEQ ID NO: 1173639 - DNA, 15 bp, Homo sapiens
ataaaaaagcaccac

SEQ ID NO: 1173640 - DNA, 15 bp, Homo sapiens
cataaaaaagcacca

SEQ ID NO: 1173641 - DNA, 15 bp, Homo sapiens
tcataaaaaagcacc

SEQ ID NO: 1173642 - DNA, 15 bp, Homo sapiens
atcataaaaaagcac

SEQ ID NO: 1173643 - DNA, 15 bp, Homo sapiens
catcataaaaaagca

SEQ ID NO: 1173644 - DNA, 15 bp, Homo sapiens
ccatcataaaaaagc

SEQ ID NO: 1173645 - DNA, 15 bp, Homo sapiens
accatcataaaaaag

SEQ ID NO: 1173646 - DNA, 15 bp, Homo sapiens
taccatcataaaaaa

SEQ ID NO: 1173647 - DNA, 15 bp, Homo sapiens
ataccatcataaaaa

SEQ ID NO: 1173648 - DNA, 15 bp, Homo sapiens
tataccatcataaaa

SEQ ID NO: 1173649 - DNA, 15 bp, Homo sapiens
atataccatcataaa

SEQ ID NO: 1173650 - DNA, 15 bp, Homo sapiens
aatataccatcataa

SEQ ID NO: 1173651 - DNA, 15 bp, Homo sapiens
aaatataccatcata

SEQ ID NO: 1173652 - DNA, 15 bp, Homo sapiens
aaaatataccatcat

SEQ ID NO: 1173653 - DNA, 15 bp, Homo sapiens
caaaatataccatca

SEQ ID NO: 1173654 - DNA, 15 bp, Homo sapiens
ccaaaatataccatc

SEQ ID NO: 1173655 - DNA, 15 bp, Homo sapiens
tccaaaatataccat

SEQ ID NO: 1173656 - DNA, 15 bp, Homo sapiens
gtccaaaatatacca

SEQ ID NO: 1173657 - DNA, 15 bp, Homo sapiens
tgtccaaaatatacc

SEQ ID NO: 1173658 - DNA, 15 bp, Homo sapiens
atgtccaaaatatac

SEQ ID NO: 1173659 - DNA, 15 bp, Homo sapiens
tatgtccaaaatata

SEQ ID NO: 1173660 - DNA, 15 bp, Homo sapiens
gtatgtccaaaatat

SEQ ID NO: 1173661 - DNA, 15 bp, Homo sapiens
tgtatgtccaaaata

SEQ ID NO: 1173662 - DNA, 15 bp, Homo sapiens
ttgtatgtccaaaat

SEQ ID NO: 1173663 - DNA, 15 bp, Homo sapiens
attgtatgtccaaaa

SEQ ID NO: 1173664 - DNA, 15 bp, Homo sapiens
gattgtatgtccaaa

SEQ ID NO: 1173665 - DNA, 15 bp, Homo sapiens
tgattgtatgtccaa

SEQ ID NO: 1173666 - DNA, 15 bp, Homo sapiens
ttgattgtatgtcca

SEQ ID NO: 1173667 - DNA, 15 bp, Homo sapiens
cttgattgtatgtcc

SEQ ID NO: 1173668 - DNA, 15 bp, Homo sapiens
tcttgattgtatgtc

SEQ ID NO: 1173669 - DNA, 15 bp, Homo sapiens
ttcttgattgtatgt

SEQ ID NO: 1173670 - DNA, 15 bp, Homo sapiens
attcttgattgtatg

SEQ ID NO: 1173671 - DNA, 15 bp, Homo sapiens
tattcttgattgtat

SEQ ID NO: 1173672 - DNA, 15 bp, Homo sapiens
ctattcttgattgta

SEQ ID NO: 1173673 - DNA, 15 bp, Homo sapiens
tctattcttgattgt

SEQ ID NO: 1173674 - DNA, 15 bp, Homo sapiens
ctctattcttgattg

SEQ ID NO: 1173675 - DNA, 15 bp, Homo sapiens
tctctattcttgatt

SEQ ID NO: 1173676 - DNA, 15 bp, Homo sapiens
ttctctattcttgat

SEQ ID NO: 1173677 - DNA, 15 bp, Homo sapiens
attctctattcttga

SEQ ID NO: 1173678 - DNA, 15 bp, Homo sapiens
tattctctattcttg

SEQ ID NO: 1173679 - DNA, 15 bp, Homo sapiens
ctattctctattctt

SEQ ID NO: 1173680 - DNA, 15 bp, Homo sapiens
cctattctctattct

SEQ ID NO: 1173681 - DNA, 15 bp, Homo sapiens
gcctattctctattc

SEQ ID NO: 1173682 - DNA, 15 bp, Homo sapiens
agcctattctctatt

SEQ ID NO: 1173683 - DNA, 15 bp, Homo sapiens
cagcctattctctat

SEQ ID NO: 1173684 - DNA, 15 bp, Homo sapiens
ccagcctattctcta

SEQ ID NO: 1173685 - DNA, 15 bp, Homo sapiens
accagcctattctct

SEQ ID NO: 1173686 - DNA, 15 bp, Homo sapiens
gaccagcctattctc

SEQ ID NO: 1173687 - DNA, 15 bp, Homo sapiens
tgaccagcctattct

SEQ ID NO: 1173688 - DNA, 15 bp, Homo sapiens
gtgaccagcctattc

SEQ ID NO: 1173689 - DNA, 15 bp, Homo sapiens
tgtgaccagcctatt

SEQ ID NO: 1173690 - DNA, 15 bp, Homo sapiens
ctgtgaccagcctat

SEQ ID NO: 1173691 - DNA, 15 bp, Homo sapiens
actgtgaccagccta

SEQ ID NO: 1173692 - DNA, 15 bp, Homo sapiens
cactgtgaccagcct

SEQ ID NO: 1173693 - DNA, 15 bp, Homo sapiens
ccactgtgaccagcc

SEQ ID NO: 1173694 - DNA, 15 bp, Homo sapiens
gccactgtgaccagc

SEQ ID NO: 1173695 - DNA, 15 bp, Homo sapiens
agccactgtgaccag

SEQ ID NO: 1173696 - DNA, 15 bp, Homo sapiens
aagccactgtgacca

SEQ ID NO: 1173697 - DNA, 15 bp, Homo sapiens
taagccactgtgacc

SEQ ID NO: 1173698 - DNA, 15 bp, Homo sapiens
ataagccactgtgac

SEQ ID NO: 1173699 - DNA, 15 bp, Homo sapiens
cataagccactgtga

SEQ ID NO: 1173700 - DNA, 15 bp, Homo sapiens
tcataagccactgtg

SEQ ID NO: 1173701 - DNA, 15 bp, Homo sapiens
gtcataagccactgt

SEQ ID NO: 1173702 - DNA, 15 bp, Homo sapiens
agtcataagccactg

SEQ ID NO: 1173703 - DNA, 15 bp, Homo sapiens
cagtcataagccact

SEQ ID NO: 1173704 - DNA, 15 bp, Homo sapiens
acagtcataagccac

SEQ ID NO: 1173705 - DNA, 15 bp, Homo sapiens
tacagtcataagcca

SEQ ID NO: 1173706 - DNA, 15 bp, Homo sapiens
ttacagtcataagcc

SEQ ID NO: 1173707 - DNA, 15 bp, Homo sapiens
attacagtcataagc

SEQ ID NO: 1173708 - DNA, 15 bp, Homo sapiens
gattacagtcataag

SEQ ID NO: 1173709 - DNA, 15 bp, Homo sapiens
ggattacagtcataa

SEQ ID NO: 1173710 - DNA, 15 bp, Homo sapiens
gggattacagtcata

SEQ ID NO: 1173711 - DNA, 15 bp, Homo sapiens
gctgctgggattaca

SEQ ID NO: 1173712 - DNA, 15 bp, Homo sapiens
agctgctgggattac

SEQ ID NO: 1173713 - DNA, 15 bp, Homo sapiens
aagctgctgggatta

SEQ ID NO: 1173714 - DNA, 15 bp, Homo sapiens
caagctgctgggatt

SEQ ID NO: 1173715 - DNA, 15 bp, Homo sapiens
tcaagctgctgggat

SEQ ID NO: 1173716 - DNA, 15 bp, Homo sapiens
ctcaagctgctggga

SEQ ID NO: 1173717 - DNA, 15 bp, Homo sapiens
tctcaagctgctggg

SEQ ID NO: 1173718 - DNA, 15 bp, Homo sapiens
ctctcaagctgctgg

SEQ ID NO: 1173719 - DNA, 15 bp, Homo sapiens
cctctcaagctgctg

SEQ ID NO: 1173720 - DNA, 15 bp, Homo sapiens
gcctctcaagctgct

SEQ ID NO: 1173721 - DNA, 15 bp, Homo sapiens
agcctctcaagctgc

SEQ ID NO: 1173722 - DNA, 15 bp, Homo sapiens
cagcctctcaagctg

SEQ ID NO: 1173723 - DNA, 15 bp, Homo sapiens
tcagcctctcaagct

SEQ ID NO: 1173724 - DNA, 15 bp, Homo sapiens
ctcagcctctcaagc

SEQ ID NO: 1173725 - DNA, 15 bp, Homo sapiens
tcacctcagcctctc

SEQ ID NO: 1173726 - DNA, 15 bp, Homo sapiens
ctcacctcagcctct

SEQ ID NO: 1173727 - DNA, 15 bp, Homo sapiens
aatcctctcacctca

SEQ ID NO: 1173728 - DNA, 15 bp, Homo sapiens
caatcctctcacctc

SEQ ID NO: 1173729 - DNA, 15 bp, Homo sapiens
agcaatcctctcacc

SEQ ID NO: 1173730 - DNA, 15 bp, Homo sapiens
aagcaatcctctcac

SEQ ID NO: 1173731 - DNA, 15 bp, Homo sapiens
caagcaatcctctca

SEQ ID NO: 1173732 - DNA, 15 bp, Homo sapiens
ctctcgaactcctgg

SEQ ID NO: 1173733 - DNA, 15 bp, Homo sapiens
gctctcgaactcctg

SEQ ID NO: 1173734 - DNA, 15 bp, Homo sapiens
tgctctcgaactcct

SEQ ID NO: 1173735 - DNA, 15 bp, Homo sapiens
ttgctctcgaactcc

SEQ ID NO: 1173736 - DNA, 15 bp, Homo sapiens
gttgctctcgaactc

SEQ ID NO: 1173737 - DNA, 15 bp, Homo sapiens
ggttgctctcgaact

SEQ ID NO: 1173738 - DNA, 15 bp, Homo sapiens
aggttgctctcgaac

SEQ ID NO: 1173739 - DNA, 15 bp, Homo sapiens
taggttgctctcgaa

SEQ ID NO: 1173740 - DNA, 15 bp, Homo sapiens
ttaggttgctctcga

SEQ ID NO: 1173741 - DNA, 15 bp, Homo sapiens
cttaggttgctctcg

SEQ ID NO: 1173742 - DNA, 15 bp, Homo sapiens
gcttaggttgctctc

SEQ ID NO: 1173743 - DNA, 15 bp, Homo sapiens
tgcttaggttgctct

SEQ ID NO: 1173744 - DNA, 15 bp, Homo sapiens
ttgcttaggttgctc

SEQ ID NO: 1173745 - DNA, 15 bp, Homo sapiens
gttgcttaggttgct

SEQ ID NO: 1173746 - DNA, 15 bp, Homo sapiens
tgttgcttaggttgc

SEQ ID NO: 1173747 - DNA, 15 bp, Homo sapiens
atgttgcttaggttg

SEQ ID NO: 1173748 - DNA, 15 bp, Homo sapiens
tatgttgcttaggtt

SEQ ID NO: 1173749 - DNA, 15 bp, Homo sapiens
ctatgttgcttaggt

SEQ ID NO: 1173750 - DNA, 15 bp, Homo sapiens
actatgttgcttagg

SEQ ID NO: 1173751 - DNA, 15 bp, Homo sapiens
cactatgttgcttag

SEQ ID NO: 1173752 - DNA, 15 bp, Homo sapiens
ccactatgttgctta

SEQ ID NO: 1173753 - DNA, 15 bp, Homo sapiens
cccactatgttgctt

SEQ ID NO: 1173754 - DNA, 15 bp, Homo sapiens
tcccactatgttgct

SEQ ID NO: 1173755 - DNA, 15 bp, Homo sapiens
gtcccactatgttgc

SEQ ID NO: 1173756 - DNA, 15 bp, Homo sapiens
ggtcccactatgttg

SEQ ID NO: 1173757 - DNA, 15 bp, Homo sapiens
gggtcccactatgtt

SEQ ID NO: 1173758 - DNA, 15 bp, Homo sapiens
ggggtcccactatgt

SEQ ID NO: 1173759 - DNA, 15 bp, Homo sapiens
tggggtcccactatg

SEQ ID NO: 1173760 - DNA, 15 bp, Homo sapiens
atggggtcccactat

SEQ ID NO: 1173761 - DNA, 15 bp, Homo sapiens
gatggggtcccacta

SEQ ID NO: 1173762 - DNA, 15 bp, Homo sapiens
agatggggtcccact

SEQ ID NO: 1173763 - DNA, 15 bp, Homo sapiens
gagatggggtcccac

SEQ ID NO: 1173764 - DNA, 15 bp, Homo sapiens
agagatggggtccca

SEQ ID NO: 1173765 - DNA, 15 bp, Homo sapiens
gtttttgtagagatg

SEQ ID NO: 1173766 - DNA, 15 bp, Homo sapiens
tgtttttgtagagat

SEQ ID NO: 1173767 - DNA, 15 bp, Homo sapiens
atgtttttgtagaga

SEQ ID NO: 1173768 - DNA, 15 bp, Homo sapiens
tatgtttttgtagag

SEQ ID NO: 1173769 - DNA, 15 bp, Homo sapiens
gtatgtttttgtaga

SEQ ID NO: 1173770 - DNA, 15 bp, Homo sapiens
tgtatgtttttgtag

SEQ ID NO: 1173771 - DNA, 15 bp, Homo sapiens
ttgtatgtttttgta

SEQ ID NO: 1173772 - DNA, 15 bp, Homo sapiens
tttgtatgtttttgt

SEQ ID NO: 1173773 - DNA, 15 bp, Homo sapiens
ttttgtatgtttttg

SEQ ID NO: 1173774 - DNA, 15 bp, Homo sapiens
cttttgtatgttttt

SEQ ID NO: 1173775 - DNA, 15 bp, Homo sapiens
acttttgtatgtttt

SEQ ID NO: 1173776 - DNA, 15 bp, Homo sapiens
aacttttgtatgttt

SEQ ID NO: 1173777 - DNA, 15 bp, Homo sapiens
taacttttgtatgtt

SEQ ID NO: 1173778 - DNA, 15 bp, Homo sapiens
ctaacttttgtatgt

SEQ ID NO: 1173779 - DNA, 15 bp, Homo sapiens
gctaacttttgtatg

SEQ ID NO: 1173780 - DNA, 15 bp, Homo sapiens
acatgcaccaccatg

SEQ ID NO: 1173781 - DNA, 15 bp, Homo sapiens
gacatgcaccaccat

SEQ ID NO: 1173782 - DNA, 15 bp, Homo sapiens
agacatgcaccacca

SEQ ID NO: 1173783 - DNA, 15 bp, Homo sapiens
cagacatgcaccacc

SEQ ID NO: 1173784 - DNA, 15 bp, Homo sapiens
gcagacatgcaccac

SEQ ID NO: 1173785 - DNA, 15 bp, Homo sapiens
cgcagacatgcacca

SEQ ID NO: 1173786 - DNA, 15 bp, Homo sapiens
ccgcagacatgcacc

SEQ ID NO: 1173787 - DNA, 15 bp, Homo sapiens
accgcagacatgcac

SEQ ID NO: 1173788 - DNA, 15 bp, Homo sapiens
gaccgcagacatgca

SEQ ID NO: 1173789 - DNA, 15 bp, Homo sapiens
ggaccgcagacatgc

SEQ ID NO: 1173790 - DNA, 15 bp, Homo sapiens
gggaccgcagacatg

SEQ ID NO: 1173791 - DNA, 15 bp, Homo sapiens
tgggaccgcagacat

SEQ ID NO: 1173792 - DNA, 15 bp, Homo sapiens
ctgggaccgcagaca

SEQ ID NO: 1173793 - DNA, 15 bp, Homo sapiens
gctgggaccgcagac

SEQ ID NO: 1173794 - DNA, 15 bp, Homo sapiens
agctgggaccgcaga

SEQ ID NO: 1173795 - DNA, 15 bp, Homo sapiens
tagctgggaccgcag

SEQ ID NO: 1173796 - DNA, 15 bp, Homo sapiens
gtagctgggaccgca

SEQ ID NO: 1173797 - DNA, 15 bp, Homo sapiens
agtagctgggaccgc

SEQ ID NO: 1173798 - DNA, 15 bp, Homo sapiens
aagtagctgggaccg

SEQ ID NO: 1173799 - DNA, 15 bp, Homo sapiens
caagtagctgggacc

SEQ ID NO: 1173800 - DNA, 15 bp, Homo sapiens
aatctcctgggctca

SEQ ID NO: 1173801 - DNA, 15 bp, Homo sapiens
taatctcctgggctc

SEQ ID NO: 1173802 - DNA, 15 bp, Homo sapiens
ttaatctcctgggct

SEQ ID NO: 1173803 - DNA, 15 bp, Homo sapiens
cttaatctcctgggc

SEQ ID NO: 1173804 - DNA, 15 bp, Homo sapiens
tcttaatctcctggg

SEQ ID NO: 1173805 - DNA, 15 bp, Homo sapiens
gtcttaatctcctgg

SEQ ID NO: 1173806 - DNA, 15 bp, Homo sapiens
agtcttaatctcctg

SEQ ID NO: 1173807 - DNA, 15 bp, Homo sapiens
aagtcttaatctcct

SEQ ID NO: 1173808 - DNA, 15 bp, Homo sapiens
gaagtcttaatctcc

SEQ ID NO: 1173809 - DNA, 15 bp, Homo sapiens
tgaagtcttaatctc

SEQ ID NO: 1173810 - DNA, 15 bp, Homo sapiens
ctgaagtcttaatct

SEQ ID NO: 1173811 - DNA, 15 bp, Homo sapiens
actgaagtcttaatc

SEQ ID NO: 1173812 - DNA, 15 bp, Homo sapiens
cactgaagtcttaat

SEQ ID NO: 1173813 - DNA, 15 bp, Homo sapiens
tcactgaagtcttaa

SEQ ID NO: 1173814 - DNA, 15 bp, Homo sapiens
ctcactgaagtctta

SEQ ID NO: 1173815 - DNA, 15 bp, Homo sapiens
gctcactgaagtctt

SEQ ID NO: 1173816 - DNA, 15 bp, Homo sapiens
agctcactgaagtct

SEQ ID NO: 1173817 - DNA, 15 bp, Homo sapiens
cagctcactgaagtc

SEQ ID NO: 1173818 - DNA, 15 bp, Homo sapiens
tcagctcactgaagt

SEQ ID NO: 1173819 - DNA, 15 bp, Homo sapiens
ctcagctcactgaag

SEQ ID NO: 1173820 - DNA, 15 bp, Homo sapiens
tctcagctcactgaa

SEQ ID NO: 1173821 - DNA, 15 bp, Homo sapiens
atctcagctcactga

SEQ ID NO: 1173822 - DNA, 15 bp, Homo sapiens
tatctcagctcactg

SEQ ID NO: 1173823 - DNA, 15 bp, Homo sapiens
ctatctcagctcact

SEQ ID NO: 1173824 - DNA, 15 bp, Homo sapiens
actatctcagctcac

SEQ ID NO: 1173825 - DNA, 15 bp, Homo sapiens
cactatctcagctca

SEQ ID NO: 1173826 - DNA, 15 bp, Homo sapiens
gcactatctcagctc

SEQ ID NO: 1173827 - DNA, 15 bp, Homo sapiens
ggcactatctcagct

SEQ ID NO: 1173828 - DNA, 15 bp, Homo sapiens
tggcactatctcagc

SEQ ID NO: 1173829 - DNA, 15 bp, Homo sapiens
gtggcactatctcag

SEQ ID NO: 1173830 - DNA, 15 bp, Homo sapiens
agtggcactatctca

SEQ ID NO: 1173831 - DNA, 15 bp, Homo sapiens
cagtggcactatctc

SEQ ID NO: 1173832 - DNA, 15 bp, Homo sapiens
agagtgcagtggcac

SEQ ID NO: 1173833 - DNA, 15 bp, Homo sapiens
tagagtgcagtggca

SEQ ID NO: 1173834 - DNA, 15 bp, Homo sapiens
ctagagtgcagtggc

SEQ ID NO: 1173835 - DNA, 15 bp, Homo sapiens
ggtcttgctctgttg

SEQ ID NO: 1173836 - DNA, 15 bp, Homo sapiens
gggtcttgctctgtt

SEQ ID NO: 1173837 - DNA, 15 bp, Homo sapiens
cagtctttttttttt

SEQ ID NO: 1173838 - DNA, 15 bp, Homo sapiens
ccagtcttttttttt

SEQ ID NO: 1173839 - DNA, 15 bp, Homo sapiens
tccagtctttttttt

SEQ ID NO: 1173840 - DNA, 15 bp, Homo sapiens
ctccagtcttttttt

SEQ ID NO: 1173841 - DNA, 15 bp, Homo sapiens
tctccagtctttttt

SEQ ID NO: 1173842 - DNA, 15 bp, Homo sapiens
ttctccagtcttttt

SEQ ID NO: 1173843 - DNA, 15 bp, Homo sapiens
attctccagtctttt

SEQ ID NO: 1173844 - DNA, 15 bp, Homo sapiens
tattctccagtcttt

SEQ ID NO: 1173845 - DNA, 15 bp, Homo sapiens
ttattctccagtctt

SEQ ID NO: 1173846 - DNA, 15 bp, Homo sapiens
attattctccagtct

SEQ ID NO: 1173847 - DNA, 15 bp, Homo sapiens
tattattctccagtc

SEQ ID NO: 1173848 - DNA, 15 bp, Homo sapiens
atattattctccagt

SEQ ID NO: 1173849 - DNA, 15 bp, Homo sapiens
aatattattctccag

SEQ ID NO: 1173850 - DNA, 15 bp, Homo sapiens
aaatattattctcca

SEQ ID NO: 1173851 - DNA, 15 bp, Homo sapiens
taaatattattctcc

SEQ ID NO: 1173852 - DNA, 15 bp, Homo sapiens
ttaaatattattctc

SEQ ID NO: 1173853 - DNA, 15 bp, Homo sapiens
tttaaatattattct

SEQ ID NO: 1173854 - DNA, 15 bp, Homo sapiens
ttttaaatattattc

SEQ ID NO: 1173855 - DNA, 15 bp, Homo sapiens
cttttaaatattatt

SEQ ID NO: 1173856 - DNA, 15 bp, Homo sapiens
acttttaaatattat

SEQ ID NO: 1173857 - DNA, 15 bp, Homo sapiens
aacttttaaatatta

SEQ ID NO: 1173858 - DNA, 15 bp, Homo sapiens
gaacttttaaatatt

SEQ ID NO: 1173859 - DNA, 15 bp, Homo sapiens
tgaacttttaaatat

SEQ ID NO: 1173860 - DNA, 15 bp, Homo sapiens
atgaacttttaaata

SEQ ID NO: 1173861 - DNA, 15 bp, Homo sapiens
catgaacttttaaat

SEQ ID NO: 1173862 - DNA, 15 bp, Homo sapiens
acatgaacttttaaa

SEQ ID NO: 1173863 - DNA, 15 bp, Homo sapiens
tacatgaacttttaa

SEQ ID NO: 1173864 - DNA, 15 bp, Homo sapiens
atacatgaactttta

SEQ ID NO: 1173865 - DNA, 15 bp, Homo sapiens
aatacatgaactttt

SEQ ID NO: 1173866 - DNA, 15 bp, Homo sapiens
taatacatgaacttt

SEQ ID NO: 1173867 - DNA, 15 bp, Homo sapiens
ttaatacatgaactt

SEQ ID NO: 1173868 - DNA, 15 bp, Homo sapiens
gttaatacatgaact

SEQ ID NO: 1173869 - DNA, 15 bp, Homo sapiens
tgttaatacatgaac

SEQ ID NO: 1173870 - DNA, 15 bp, Homo sapiens
atgttaatacatgaa

SEQ ID NO: 1173871 - DNA, 15 bp, Homo sapiens
gatgttaatacatga

SEQ ID NO: 1173872 - DNA, 15 bp, Homo sapiens
cgatgttaatacatg

SEQ ID NO: 1173873 - DNA, 15 bp, Homo sapiens
ccgatgttaatacat

SEQ ID NO: 1173874 - DNA, 15 bp, Homo sapiens
cccgatgttaataca

SEQ ID NO: 1173875 - DNA, 15 bp, Homo sapiens
gcccgatgttaatac

SEQ ID NO: 1173876 - DNA, 15 bp, Homo sapiens
ggcccgatgttaata

SEQ ID NO: 1173877 - DNA, 15 bp, Homo sapiens
aggcccgatgttaat

SEQ ID NO: 1173878 - DNA, 15 bp, Homo sapiens
aaggcccgatgttaa

SEQ ID NO: 1173879 - DNA, 15 bp, Homo sapiens
taaggcccgatgtta

SEQ ID NO: 1173880 - DNA, 15 bp, Homo sapiens
ataaggcccgatgtt

SEQ ID NO: 1173881 - DNA, 15 bp, Homo sapiens
gataaggcccgatgt

SEQ ID NO: 1173882 - DNA, 15 bp, Homo sapiens
tgataaggcccgatg

SEQ ID NO: 1173883 - DNA, 15 bp, Homo sapiens
ctgataaggcccgat

SEQ ID NO: 1173884 - DNA, 15 bp, Homo sapiens
tctgataaggcccga

SEQ ID NO: 1173885 - DNA, 15 bp, Homo sapiens
atctgataaggcccg

SEQ ID NO: 1173886 - DNA, 15 bp, Homo sapiens
gatctgataaggccc

SEQ ID NO: 1173887 - DNA, 15 bp, Homo sapiens
agatctgataaggcc

SEQ ID NO: 1173888 - DNA, 15 bp, Homo sapiens
aagatctgataaggc

SEQ ID NO: 1173889 - DNA, 15 bp, Homo sapiens
taagatctgataagg

SEQ ID NO: 1173890 - DNA, 15 bp, Homo sapiens
ataagatctgataag

SEQ ID NO: 1173891 - DNA, 15 bp, Homo sapiens
gataagatctgataa

SEQ ID NO: 1173892 - DNA, 15 bp, Homo sapiens
agataagatctgata

SEQ ID NO: 1173893 - DNA, 15 bp, Homo sapiens
cagataagatctgat

SEQ ID NO: 1173894 - DNA, 15 bp, Homo sapiens
ccagataagatctga

SEQ ID NO: 1173895 - DNA, 15 bp, Homo sapiens
accagataagatctg

SEQ ID NO: 1173896 - DNA, 15 bp, Homo sapiens
gaccagataagatct

SEQ ID NO: 1173897 - DNA, 15 bp, Homo sapiens
cgaccagataagatc

SEQ ID NO: 1173898 - DNA, 15 bp, Homo sapiens
acgaccagataagat

SEQ ID NO: 1173899 - DNA, 15 bp, Homo sapiens
aacgaccagataaga

SEQ ID NO: 1173900 - DNA, 15 bp, Homo sapiens
aaacgaccagataag

SEQ ID NO: 1173901 - DNA, 15 bp, Homo sapiens
aaaacgaccagataa

SEQ ID NO: 1173902 - DNA, 15 bp, Homo sapiens
aaaaacgaccagata

SEQ ID NO: 1173903 - DNA, 15 bp, Homo sapiens
gaaaaacgaccagat

SEQ ID NO: 1173904 - DNA, 15 bp, Homo sapiens
agaaaaacgaccaga

SEQ ID NO: 1173905 - DNA, 15 bp, Homo sapiens
aagaaaaacgaccag

SEQ ID NO: 1173906 - DNA, 15 bp, Homo sapiens
aaagaaaaacgacca

SEQ ID NO: 1173907 - DNA, 15 bp, Homo sapiens
aaaagaaaaacgacc

SEQ ID NO: 1173908 - DNA, 15 bp, Homo sapiens
gaaaagaaaaacgac

SEQ ID NO: 1173909 - DNA, 15 bp, Homo sapiens
agaaaagaaaaacga

SEQ ID NO: 1173910 - DNA, 15 bp, Homo sapiens
aagaaaagaaaaacg

SEQ ID NO: 1173911 - DNA, 15 bp, Homo sapiens
aaagaaaagaaaaac

SEQ ID NO: 1173912 - DNA, 15 bp, Homo sapiens
gaaaaaaaaagaaaa

SEQ ID NO: 1173913 - DNA, 15 bp, Homo sapiens
agaaaaaaaaagaaa

SEQ ID NO: 1173914 - DNA, 15 bp, Homo sapiens
aagaaaaaaaaagaa

SEQ ID NO: 1173915 - DNA, 15 bp, Homo sapiens
aaagaaaaaaaaaga

SEQ ID NO: 1173916 - DNA, 15 bp, Homo sapiens
aaaagaaaaaaaaag

SEQ ID NO: 1173917 - DNA, 15 bp, Homo sapiens
tctgtctcaaaaaag

SEQ ID NO: 1173918 - DNA, 15 bp, Homo sapiens
agtgacagagtgaga

SEQ ID NO: 1173919 - DNA, 15 bp, Homo sapiens
aagtgacagagtgag

SEQ ID NO: 1173920 - DNA, 15 bp, Homo sapiens
taagtgacagagtga

SEQ ID NO: 1173921 - DNA, 15 bp, Homo sapiens
ctaagtgacagagtg

SEQ ID NO: 1173922 - DNA, 15 bp, Homo sapiens
cctaagtgacagagt

SEQ ID NO: 1173923 - DNA, 15 bp, Homo sapiens
gcctaagtgacagag

SEQ ID NO: 1173924 - DNA, 15 bp, Homo sapiens
agcctaagtgacaga

SEQ ID NO: 1173925 - DNA, 15 bp, Homo sapiens
cagcctaagtgacag

SEQ ID NO: 1173926 - DNA, 15 bp, Homo sapiens
ccagcctaagtgaca

SEQ ID NO: 1173927 - DNA, 15 bp, Homo sapiens
tccagcctaagtgac

SEQ ID NO: 1173928 - DNA, 15 bp, Homo sapiens
ctccagcctaagtga

SEQ ID NO: 1173929 - DNA, 15 bp, Homo sapiens
actccagcctaagtg

SEQ ID NO: 1173930 - DNA, 15 bp, Homo sapiens
cactccagcctaagt

SEQ ID NO: 1173931 - DNA, 15 bp, Homo sapiens
gcactccagcctaag

SEQ ID NO: 1173932 - DNA, 15 bp, Homo sapiens
tgcactccagcctaa

SEQ ID NO: 1173933 - DNA, 15 bp, Homo sapiens
atgcagtgagccaag

SEQ ID NO: 1173934 - DNA, 15 bp, Homo sapiens
gatgcagtgagccaa

SEQ ID NO: 1173935 - DNA, 15 bp, Homo sapiens
ggatgcagtgagcca

SEQ ID NO: 1173936 - DNA, 15 bp, Homo sapiens
aggatgcagtgagcc

SEQ ID NO: 1173937 - DNA, 15 bp, Homo sapiens
aaggatgcagtgagc

SEQ ID NO: 1173938 - DNA, 15 bp, Homo sapiens
taaggatgcagtgag

SEQ ID NO: 1173939 - DNA, 15 bp, Homo sapiens
ttaaggatgcagtga

SEQ ID NO: 1173940 - DNA, 15 bp, Homo sapiens
gttaaggatgcagtg

SEQ ID NO: 1173941 - DNA, 15 bp, Homo sapiens
ggttaaggatgcagt

SEQ ID NO: 1173942 - DNA, 15 bp, Homo sapiens
aggttaaggatgcag

SEQ ID NO: 1173943 - DNA, 15 bp, Homo sapiens
gaggttaaggatgca

SEQ ID NO: 1173944 - DNA, 15 bp, Homo sapiens
ggaggttaaggatgc

SEQ ID NO: 1173945 - DNA, 15 bp, Homo sapiens
aggaggttaaggatg

SEQ ID NO: 1173946 - DNA, 15 bp, Homo sapiens
caggaggttaaggat

SEQ ID NO: 1173947 - DNA, 15 bp, Homo sapiens
tcaggaggttaagga

SEQ ID NO: 1173948 - DNA, 15 bp, Homo sapiens
ctcaggaggttaagg

SEQ ID NO: 1173949 - DNA, 15 bp, Homo sapiens
gctcaggaggttaag

SEQ ID NO: 1173950 - DNA, 15 bp, Homo sapiens
agctcaggaggttaa

SEQ ID NO: 1173951 - DNA, 15 bp, Homo sapiens
gagctcaggaggtta

SEQ ID NO: 1173952 - DNA, 15 bp, Homo sapiens
tgagctcaggaggtt

SEQ ID NO: 1173953 - DNA, 15 bp, Homo sapiens
ttgagctcaggaggt

SEQ ID NO: 1173954 - DNA, 15 bp, Homo sapiens
cttgagctcaggagg

SEQ ID NO: 1173955 - DNA, 15 bp, Homo sapiens
cagctgaggtgggag

SEQ ID NO: 1173956 - DNA, 15 bp, Homo sapiens
ccagctgaggtggga

SEQ ID NO: 1173957 - DNA, 15 bp, Homo sapiens
cccagctgaggtggg

SEQ ID NO: 1173958 - DNA, 15 bp, Homo sapiens
tcccagctgaggtgg

SEQ ID NO: 1173959 - DNA, 15 bp, Homo sapiens
gtcccagctgaggtg

SEQ ID NO: 1173960 - DNA, 15 bp, Homo sapiens
agtcccagctgaggt

SEQ ID NO: 1173961 - DNA, 15 bp, Homo sapiens
tagtcccagctgagg

SEQ ID NO: 1173962 - DNA, 15 bp, Homo sapiens
gtagtcccagctgag

SEQ ID NO: 1173963 - DNA, 15 bp, Homo sapiens
tgtagtcccagctga

SEQ ID NO: 1173964 - DNA, 15 bp, Homo sapiens
gtgcacctgtagtcc

SEQ ID NO: 1173965 - DNA, 15 bp, Homo sapiens
tgtgcacctgtagtc

SEQ ID NO: 1173966 - DNA, 15 bp, Homo sapiens
gtgtgcacctgtagt

SEQ ID NO: 1173967 - DNA, 15 bp, Homo sapiens
ggtgtgcacctgtag

SEQ ID NO: 1173968 - DNA, 15 bp, Homo sapiens
tggtgtgcacctgta

SEQ ID NO: 1173969 - DNA, 15 bp, Homo sapiens
acatggtggtgtgca

SEQ ID NO: 1173970 - DNA, 15 bp, Homo sapiens
gacatggtggtgtgc

SEQ ID NO: 1173971 - DNA, 15 bp, Homo sapiens
ggacatggtggtgtg

SEQ ID NO: 1173972 - DNA, 15 bp, Homo sapiens
cggacatggtggtgt

SEQ ID NO: 1173973 - DNA, 15 bp, Homo sapiens
ccggacatggtggtg

SEQ ID NO: 1173974 - DNA, 15 bp, Homo sapiens
gccggacatggtggt

SEQ ID NO: 1173975 - DNA, 15 bp, Homo sapiens
agccggacatggtgg

SEQ ID NO: 1173976 - DNA, 15 bp, Homo sapiens
tagccggacatggtg

SEQ ID NO: 1173977 - DNA, 15 bp, Homo sapiens
ttagccggacatggt

SEQ ID NO: 1173978 - DNA, 15 bp, Homo sapiens
attagccggacatgg

SEQ ID NO: 1173979 - DNA, 15 bp, Homo sapiens
aattagccggacatg

SEQ ID NO: 1173980 - DNA, 15 bp, Homo sapiens
aaattagccggacat

SEQ ID NO: 1173981 - DNA, 15 bp, Homo sapiens
taaattagccggaca

SEQ ID NO: 1173982 - DNA, 15 bp, Homo sapiens
ataaattagccggac

SEQ ID NO: 1173983 - DNA, 15 bp, Homo sapiens
aataaattagccgga

SEQ ID NO: 1173984 - DNA, 15 bp, Homo sapiens
aaataaattagccgg

SEQ ID NO: 1173985 - DNA, 15 bp, Homo sapiens
aaaataaattagccg

SEQ ID NO: 1173986 - DNA, 15 bp, Homo sapiens
aaaaataaattagcc

SEQ ID NO: 1173987 - DNA, 15 bp, Homo sapiens
taaaaataaattagc

SEQ ID NO: 1173988 - DNA, 15 bp, Homo sapiens
ataaaaataaattag

SEQ ID NO: 1173989 - DNA, 15 bp, Homo sapiens
aataaaaataaatta

SEQ ID NO: 1173990 - DNA, 15 bp, Homo sapiens
aaataaaaataaatt

SEQ ID NO: 1173991 - DNA, 15 bp, Homo sapiens
aaagataaaaataaa

SEQ ID NO: 1173992 - DNA, 15 bp, Homo sapiens
aaaagataaaaataa

SEQ ID NO: 1173993 - DNA, 15 bp, Homo sapiens
aaaaagataaaaata

SEQ ID NO: 1173994 - DNA, 15 bp, Homo sapiens
aaaaaagataaaaat

SEQ ID NO: 1173995 - DNA, 15 bp, Homo sapiens
aaaaaaagataaaaa

SEQ ID NO: 1173996 - DNA, 15 bp, Homo sapiens
caaaaaaagataaaa

SEQ ID NO: 1173997 - DNA, 15 bp, Homo sapiens
acaaaaaaagataaa

SEQ ID NO: 1173998 - DNA, 15 bp, Homo sapiens
tacaaaaaaagataa

SEQ ID NO: 1173999 - DNA, 15 bp, Homo sapiens
ctacaaaaaaagata

SEQ ID NO: 1174000 - DNA, 15 bp, Homo sapiens
tctacaaaaaaagat

SEQ ID NO: 1174001 - DNA, 15 bp, Homo sapiens
ctctacaaaaaaaga

SEQ ID NO: 1174002 - DNA, 15 bp, Homo sapiens
gctgtctctacaaaa

SEQ ID NO: 1174003 - DNA, 15 bp, Homo sapiens
cgctgtctctacaaa

SEQ ID NO: 1174004 - DNA, 15 bp, Homo sapiens
acgctgtctctacaa

SEQ ID NO: 1174005 - DNA, 15 bp, Homo sapiens
aacgctgtctctaca

SEQ ID NO: 1174006 - DNA, 15 bp, Homo sapiens
gaacgctgtctctac

SEQ ID NO: 1174007 - DNA, 15 bp, Homo sapiens
agaacgctgtctcta

SEQ ID NO: 1174008 - DNA, 15 bp, Homo sapiens
aagaacgctgtctct

SEQ ID NO: 1174009 - DNA, 15 bp, Homo sapiens
caagaacgctgtctc

SEQ ID NO: 1174010 - DNA, 15 bp, Homo sapiens
gcaagaacgctgtct

SEQ ID NO: 1174011 - DNA, 15 bp, Homo sapiens
agcaagaacgctgtc

SEQ ID NO: 1174012 - DNA, 15 bp, Homo sapiens
tagcaagaacgctgt

SEQ ID NO: 1174013 - DNA, 15 bp, Homo sapiens
atagcaagaacgctg

SEQ ID NO: 1174014 - DNA, 15 bp, Homo sapiens
catagcaagaacgct

SEQ ID NO: 1174015 - DNA, 15 bp, Homo sapiens
acatagcaagaacgc

SEQ ID NO: 1174016 - DNA, 15 bp, Homo sapiens
aacatagcaagaacg

SEQ ID NO: 1174017 - DNA, 15 bp, Homo sapiens
aaacatagcaagaac

SEQ ID NO: 1174018 - DNA, 15 bp, Homo sapiens
gaaacatagcaagaa

SEQ ID NO: 1174019 - DNA, 15 bp, Homo sapiens
ggaaacatagcaaga

SEQ ID NO: 1174020 - DNA, 15 bp, Homo sapiens
gggaaacatagcaag

SEQ ID NO: 1174021 - DNA, 15 bp, Homo sapiens
tgggaaacatagcaa

SEQ ID NO: 1174022 - DNA, 15 bp, Homo sapiens
ctgggaaacatagca

SEQ ID NO: 1174023 - DNA, 15 bp, Homo sapiens
tctgggaaacatagc

SEQ ID NO: 1174024 - DNA, 15 bp, Homo sapiens
gtctgggaaacatag

SEQ ID NO: 1174025 - DNA, 15 bp, Homo sapiens
agtctgggaaacata

SEQ ID NO: 1174026 - DNA, 15 bp, Homo sapiens
gagtctgggaaacat

SEQ ID NO: 1174027 - DNA, 15 bp, Homo sapiens
agagtctgggaaaca

SEQ ID NO: 1174028 - DNA, 15 bp, Homo sapiens
aagagtctgggaaac

SEQ ID NO: 1174029 - DNA, 15 bp, Homo sapiens
aaagagtctgggaaa

SEQ ID NO: 1174030 - DNA, 15 bp, Homo sapiens
aaaagagtctgggaa

SEQ ID NO: 1174031 - DNA, 15 bp, Homo sapiens
aaaaagagtctggga

SEQ ID NO: 1174032 - DNA, 15 bp, Homo sapiens
gaaaaagagtctggg

SEQ ID NO: 1174033 - DNA, 15 bp, Homo sapiens
agaaaaagagtctgg

SEQ ID NO: 1174034 - DNA, 15 bp, Homo sapiens
aagaaaaagagtctg

SEQ ID NO: 1174035 - DNA, 15 bp, Homo sapiens
aaagaaaaagagtct

SEQ ID NO: 1174036 - DNA, 15 bp, Homo sapiens
aaaagaaaaagagtc

SEQ ID NO: 1174037 - DNA, 15 bp, Homo sapiens
aaaaagaaaaagagt

SEQ ID NO: 1174038 - DNA, 15 bp, Homo sapiens
aaaaaagaaaaagag

SEQ ID NO: 1174039 - DNA, 15 bp, Homo sapiens
taaaaaagaaaaaga

SEQ ID NO: 1174040 - DNA, 15 bp, Homo sapiens
ttaaaaaagaaaaag

SEQ ID NO: 1174041 - DNA, 15 bp, Homo sapiens
cttaaaaaagaaaaa

SEQ ID NO: 1174042 - DNA, 15 bp, Homo sapiens
ccttaaaaaagaaaa

SEQ ID NO: 1174043 - DNA, 15 bp, Homo sapiens
tccttaaaaaagaaa

SEQ ID NO: 1174044 - DNA, 15 bp, Homo sapiens
ttccttaaaaaagaa

SEQ ID NO: 1174045 - DNA, 15 bp, Homo sapiens
attccttaaaaaaga

SEQ ID NO: 1174046 - DNA, 15 bp, Homo sapiens
aattccttaaaaaag

SEQ ID NO: 1174047 - DNA, 15 bp, Homo sapiens
taattccttaaaaaa

SEQ ID NO: 1174048 - DNA, 15 bp, Homo sapiens
ttaattccttaaaaa

SEQ ID NO: 1174049 - DNA, 15 bp, Homo sapiens
tttaattccttaaaa

SEQ ID NO: 1174050 - DNA, 15 bp, Homo sapiens
gtttaattccttaaa

SEQ ID NO: 1174051 - DNA, 15 bp, Homo sapiens
tgtttaattccttaa

SEQ ID NO: 1174052 - DNA, 15 bp, Homo sapiens
atgtttaattcctta

SEQ ID NO: 1174053 - DNA, 15 bp, Homo sapiens
aatgtttaattcctt

SEQ ID NO: 1174054 - DNA, 15 bp, Homo sapiens
taatgtttaattcct

SEQ ID NO: 1174055 - DNA, 15 bp, Homo sapiens
gtaatgtttaattcc

SEQ ID NO: 1174056 - DNA, 15 bp, Homo sapiens
tgtaatgtttaattc

SEQ ID NO: 1174057 - DNA, 15 bp, Homo sapiens
ttgtaatgtttaatt

SEQ ID NO: 1174058 - DNA, 15 bp, Homo sapiens
tttgtaatgtttaat

SEQ ID NO: 1174059 - DNA, 15 bp, Homo sapiens
atttgtaatgtttaa

SEQ ID NO: 1174060 - DNA, 15 bp, Homo sapiens
aatttgtaatgttta

SEQ ID NO: 1174061 - DNA, 15 bp, Homo sapiens
caatttgtaatgttt

SEQ ID NO: 1174062 - DNA, 15 bp, Homo sapiens
gcaatttgtaatgtt

SEQ ID NO: 1174063 - DNA, 15 bp, Homo sapiens
tgcaatttgtaatgt

SEQ ID NO: 1174064 - DNA, 15 bp, Homo sapiens
gtgcaatttgtaatg

SEQ ID NO: 1174065 - DNA, 15 bp, Homo sapiens
agtgcaatttgtaat

SEQ ID NO: 1174066 - DNA, 15 bp, Homo sapiens
cagtgcaatttgtaa

SEQ ID NO: 1174067 - DNA, 15 bp, Homo sapiens
tcagtgcaatttgta

SEQ ID NO: 1174068 - DNA, 15 bp, Homo sapiens
ctcagtgcaatttgt

SEQ ID NO: 1174069 - DNA, 15 bp, Homo sapiens
cctcagtgcaatttg

SEQ ID NO: 1174070 - DNA, 15 bp, Homo sapiens
acctcagtgcaattt

SEQ ID NO: 1174071 - DNA, 15 bp, Homo sapiens
gacctcagtgcaatt

SEQ ID NO: 1174072 - DNA, 15 bp, Homo sapiens
tgacctcagtgcaat

SEQ ID NO: 1174073 - DNA, 15 bp, Homo sapiens
atgacctcagtgcaa

SEQ ID NO: 1174074 - DNA, 15 bp, Homo sapiens
gatgacctcagtgca

SEQ ID NO: 1174075 - DNA, 15 bp, Homo sapiens
ggatgacctcagtgc

SEQ ID NO: 1174076 - DNA, 15 bp, Homo sapiens
tggatgacctcagtg

SEQ ID NO: 1174077 - DNA, 15 bp, Homo sapiens
gtggatgacctcagt

SEQ ID NO: 1174078 - DNA, 15 bp, Homo sapiens
agtggatgacctcag

SEQ ID NO: 1174079 - DNA, 15 bp, Homo sapiens
cagtggatgacctca

SEQ ID NO: 1174080 - DNA, 15 bp, Homo sapiens
ggcagtggatgacct

SEQ ID NO: 1174081 - DNA, 15 bp, Homo sapiens
gggcagtggatgacc

SEQ ID NO: 1174082 - DNA, 15 bp, Homo sapiens
cgggcagtggatgac

SEQ ID NO: 1174083 - DNA, 15 bp, Homo sapiens
acgggcagtggatga

SEQ ID NO: 1174084 - DNA, 15 bp, Homo sapiens
aacgggcagtggatg

SEQ ID NO: 1174085 - DNA, 15 bp, Homo sapiens
gaacgggcagtggat

SEQ ID NO: 1174086 - DNA, 15 bp, Homo sapiens
agaacgggcagtgga

SEQ ID NO: 1174087 - DNA, 15 bp, Homo sapiens
gagaacgggcagtgg

SEQ ID NO: 1174088 - DNA, 15 bp, Homo sapiens
ggagaacgggcagtg

SEQ ID NO: 1174089 - DNA, 15 bp, Homo sapiens
tggagaacgggcagt

SEQ ID NO: 1174090 - DNA, 15 bp, Homo sapiens
gtggagaacgggcag

SEQ ID NO: 1174091 - DNA, 15 bp, Homo sapiens
tgtggagaacgggca

SEQ ID NO: 1174092 - DNA, 15 bp, Homo sapiens
atgtggagaacgggc

SEQ ID NO: 1174093 - DNA, 15 bp, Homo sapiens
gatgtggagaacggg

SEQ ID NO: 1174094 - DNA, 15 bp, Homo sapiens
tgatgtggagaacgg

SEQ ID NO: 1174095 - DNA, 15 bp, Homo sapiens
atgatgtggagaacg

SEQ ID NO: 1174096 - DNA, 15 bp, Homo sapiens
gatgatgtggagaac

SEQ ID NO: 1174097 - DNA, 15 bp, Homo sapiens
ggatgatgtggagaa

SEQ ID NO: 1174098 - DNA, 15 bp, Homo sapiens
aggatgatgtggaga

SEQ ID NO: 1174099 - DNA, 15 bp, Homo sapiens
aaggatgatgtggag

SEQ ID NO: 1174100 - DNA, 15 bp, Homo sapiens
gaaggatgatgtgga

SEQ ID NO: 1174101 - DNA, 15 bp, Homo sapiens
agaaggatgatgtgg

SEQ ID NO: 1174102 - DNA, 15 bp, Homo sapiens
gagaaggatgatgtg

SEQ ID NO: 1174103 - DNA, 15 bp, Homo sapiens
ggagaaggatgatgt

SEQ ID NO: 1174104 - DNA, 15 bp, Homo sapiens
aggagaaggatgatg

SEQ ID NO: 1174105 - DNA, 15 bp, Homo sapiens
gaggagaaggatgat

SEQ ID NO: 1174106 - DNA, 15 bp, Homo sapiens
ggaggagaaggatga

SEQ ID NO: 1174107 - DNA, 15 bp, Homo sapiens
aggaggagaaggatg

SEQ ID NO: 1174108 - DNA, 15 bp, Homo sapiens
gaggaggagaaggat

SEQ ID NO: 1174109 - DNA, 15 bp, Homo sapiens
agaggaggagaagga

SEQ ID NO: 1174110 - DNA, 15 bp, Homo sapiens
aagaggaggagaagg

SEQ ID NO: 1174111 - DNA, 15 bp, Homo sapiens
aaagaggaggagaag

SEQ ID NO: 1174112 - DNA, 15 bp, Homo sapiens
gaaagaggaggagaa

SEQ ID NO: 1174113 - DNA, 15 bp, Homo sapiens
ggaaagaggaggaga

SEQ ID NO: 1174114 - DNA, 15 bp, Homo sapiens
gggaaagaggaggag

SEQ ID NO: 1174115 - DNA, 15 bp, Homo sapiens
tgggaaagaggagga

SEQ ID NO: 1174116 - DNA, 15 bp, Homo sapiens
ctgggaaagaggagg

SEQ ID NO: 1174117 - DNA, 15 bp, Homo sapiens
cctgggaaagaggag

SEQ ID NO: 1174118 - DNA, 15 bp, Homo sapiens
ccctgggaaagagga

SEQ ID NO: 1174119 - DNA, 15 bp, Homo sapiens
accctgggaaagagg

SEQ ID NO: 1174120 - DNA, 15 bp, Homo sapiens
taccctgggaaagag

SEQ ID NO: 1174121 - DNA, 15 bp, Homo sapiens
ctaccctgggaaaga

SEQ ID NO: 1174122 - DNA, 15 bp, Homo sapiens
gctaccctgggaaag

SEQ ID NO: 1174123 - DNA, 15 bp, Homo sapiens
agctaccctgggaaa

SEQ ID NO: 1174124 - DNA, 15 bp, Homo sapiens
cagctaccctgggaa

SEQ ID NO: 1174125 - DNA, 15 bp, Homo sapiens
gcagctaccctggga

SEQ ID NO: 1174126 - DNA, 15 bp, Homo sapiens
tgcagctaccctggg

SEQ ID NO: 1174127 - DNA, 15 bp, Homo sapiens
atgcagctaccctgg

SEQ ID NO: 1174128 - DNA, 15 bp, Homo sapiens
aatgcagctaccctg

SEQ ID NO: 1174129 - DNA, 15 bp, Homo sapiens
aaatgcagctaccct

SEQ ID NO: 1174130 - DNA, 15 bp, Homo sapiens
caaatgcagctaccc

SEQ ID NO: 1174131 - DNA, 15 bp, Homo sapiens
tcaaatgcagctacc

SEQ ID NO: 1174132 - DNA, 15 bp, Homo sapiens
ctcaaatgcagctac

SEQ ID NO: 1174133 - DNA, 15 bp, Homo sapiens
gctcaaatgcagcta

SEQ ID NO: 1174134 - DNA, 15 bp, Homo sapiens
ggctcaaatgcagct

SEQ ID NO: 1174135 - DNA, 15 bp, Homo sapiens
aggctcaaatgcagc

SEQ ID NO: 1174136 - DNA, 15 bp, Homo sapiens
taggctcaaatgcag

SEQ ID NO: 1174137 - DNA, 15 bp, Homo sapiens
gtaggctcaaatgca

SEQ ID NO: 1174138 - DNA, 15 bp, Homo sapiens
tgtaggctcaaatgc

SEQ ID NO: 1174139 - DNA, 15 bp, Homo sapiens
ctgtaggctcaaatg

SEQ ID NO: 1174140 - DNA, 15 bp, Homo sapiens
actgtaggctcaaat

SEQ ID NO: 1174141 - DNA, 15 bp, Homo sapiens
gactgtaggctcaaa

SEQ ID NO: 1174142 - DNA, 15 bp, Homo sapiens
cgactgtaggctcaa

SEQ ID NO: 1174143 - DNA, 15 bp, Homo sapiens
ccgactgtaggctca

SEQ ID NO: 1174144 - DNA, 15 bp, Homo sapiens
accgactgtaggctc

SEQ ID NO: 1174145 - DNA, 15 bp, Homo sapiens
caccgactgtaggct

SEQ ID NO: 1174146 - DNA, 15 bp, Homo sapiens
acaccgactgtaggc

SEQ ID NO: 1174147 - DNA, 15 bp, Homo sapiens
aacaccgactgtagg

SEQ ID NO: 1174148 - DNA, 15 bp, Homo sapiens
aaacaccgactgtag

SEQ ID NO: 1174149 - DNA, 15 bp, Homo sapiens
caaacaccgactgta

SEQ ID NO: 1174150 - DNA, 15 bp, Homo sapiens
acaaacaccgactgt

SEQ ID NO: 1174151 - DNA, 15 bp, Homo sapiens
cacaaacaccgactg

SEQ ID NO: 1174152 - DNA, 15 bp, Homo sapiens
gcacaaacaccgact

SEQ ID NO: 1174153 - DNA, 15 bp, Homo sapiens
ggcacaaacaccgac

SEQ ID NO: 1174154 - DNA, 15 bp, Homo sapiens
gggcacaaacaccga

SEQ ID NO: 1174155 - DNA, 15 bp, Homo sapiens
ggggcacaaacaccg

SEQ ID NO: 1174156 - DNA, 15 bp, Homo sapiens
aggggcacaaacacc

SEQ ID NO: 1174157 - DNA, 15 bp, Homo sapiens
caggggcacaaacac

SEQ ID NO: 1174158 - DNA, 15 bp, Homo sapiens
gcaggggcacaaaca

SEQ ID NO: 1174159 - DNA, 15 bp, Homo sapiens
tgcaggggcacaaac

SEQ ID NO: 1174160 - DNA, 15 bp, Homo sapiens
atgcaggggcacaaa

SEQ ID NO: 1174161 - DNA, 15 bp, Homo sapiens
gatgcaggggcacaa

SEQ ID NO: 1174162 - DNA, 15 bp, Homo sapiens
tgatgcaggggcaca

SEQ ID NO: 1174163 - DNA, 15 bp, Homo sapiens
ctgatgcaggggcac

SEQ ID NO: 1174164 - DNA, 15 bp, Homo sapiens
gctgatgcaggggca

SEQ ID NO: 1174165 - DNA, 15 bp, Homo sapiens
ggctgatgcaggggc

SEQ ID NO: 1174166 - DNA, 15 bp, Homo sapiens
tggctgatgcagggg

SEQ ID NO: 1174167 - DNA, 15 bp, Homo sapiens
ctggctgatgcaggg

SEQ ID NO: 1174168 - DNA, 15 bp, Homo sapiens
actggctgatgcagg

SEQ ID NO: 1174169 - DNA, 15 bp, Homo sapiens
gactggctgatgcag

SEQ ID NO: 1174170 - DNA, 15 bp, Homo sapiens
tgactggctgatgca

SEQ ID NO: 1174171 - DNA, 15 bp, Homo sapiens
atgactggctgatgc

SEQ ID NO: 1174172 - DNA, 15 bp, Homo sapiens
aatgactggctgatg

SEQ ID NO: 1174173 - DNA, 15 bp, Homo sapiens
caatgactggctgat

SEQ ID NO: 1174174 - DNA, 15 bp, Homo sapiens
gcaatgactggctga

SEQ ID NO: 1174175 - DNA, 15 bp, Homo sapiens
ggcaatgactggctg

SEQ ID NO: 1174176 - DNA, 15 bp, Homo sapiens
gggcaatgactggct

SEQ ID NO: 1174177 - DNA, 15 bp, Homo sapiens
ggggcaatgactggc

SEQ ID NO: 1174178 - DNA, 15 bp, Homo sapiens
tggggcaatgactgg

SEQ ID NO: 1174179 - DNA, 15 bp, Homo sapiens
ctggggcaatgactg

SEQ ID NO: 1174180 - DNA, 15 bp, Homo sapiens
tctggggcaatgact

SEQ ID NO: 1174181 - DNA, 15 bp, Homo sapiens
ctctggggcaatgac

SEQ ID NO: 1174182 - DNA, 15 bp, Homo sapiens
tctctggggcaatga

SEQ ID NO: 1174183 - DNA, 15 bp, Homo sapiens
ctctctggggcaatg

SEQ ID NO: 1174184 - DNA, 15 bp, Homo sapiens
actctctggggcaat

SEQ ID NO: 1174185 - DNA, 15 bp, Homo sapiens
gactctctggggcaa

SEQ ID NO: 1174186 - DNA, 15 bp, Homo sapiens
agactctctggggca

SEQ ID NO: 1174187 - DNA, 15 bp, Homo sapiens
tagactctctggggc

SEQ ID NO: 1174188 - DNA, 15 bp, Homo sapiens
ctagactctctgggg

SEQ ID NO: 1174189 - DNA, 15 bp, Homo sapiens
gctagactctctggg

SEQ ID NO: 1174190 - DNA, 15 bp, Homo sapiens
ggctagactctctgg

SEQ ID NO: 1174191 - DNA, 15 bp, Homo sapiens
aggctagactctctg

SEQ ID NO: 1174192 - DNA, 15 bp, Homo sapiens
aaggctagactctct

SEQ ID NO: 1174193 - DNA, 15 bp, Homo sapiens
aaaggctagactctc

SEQ ID NO: 1174194 - DNA, 15 bp, Homo sapiens
caaaggctagactct

SEQ ID NO: 1174195 - DNA, 15 bp, Homo sapiens
ccaaaggctagactc

SEQ ID NO: 1174196 - DNA, 15 bp, Homo sapiens
accaaaggctagact

SEQ ID NO: 1174197 - DNA, 15 bp, Homo sapiens
caccaaaggctagac

SEQ ID NO: 1174198 - DNA, 15 bp, Homo sapiens
tcaccaaaggctaga

SEQ ID NO: 1174199 - DNA, 15 bp, Homo sapiens
ctcaccaaaggctag

SEQ ID NO: 1174200 - DNA, 15 bp, Homo sapiens
tctcaccaaaggcta

SEQ ID NO: 1174201 - DNA, 15 bp, Homo sapiens
gtctcaccaaaggct

SEQ ID NO: 1174202 - DNA, 15 bp, Homo sapiens
tgtctcaccaaaggc

SEQ ID NO: 1174203 - DNA, 15 bp, Homo sapiens
ctgtctcaccaaagg

SEQ ID NO: 1174204 - DNA, 15 bp, Homo sapiens
gctgtctcaccaaag

SEQ ID NO: 1174205 - DNA, 15 bp, Homo sapiens
agctgtctcaccaaa

SEQ ID NO: 1174206 - DNA, 15 bp, Homo sapiens
gagctgtctcaccaa

SEQ ID NO: 1174207 - DNA, 15 bp, Homo sapiens
ggagctgtctcacca

SEQ ID NO: 1174208 - DNA, 15 bp, Homo sapiens
aggagctgtctcacc

SEQ ID NO: 1174209 - DNA, 15 bp, Homo sapiens
aaggagctgtctcac

SEQ ID NO: 1174210 - DNA, 15 bp, Homo sapiens
caaggagctgtctca

SEQ ID NO: 1174211 - DNA, 15 bp, Homo sapiens
acaaggagctgtctc

SEQ ID NO: 1174212 - DNA, 15 bp, Homo sapiens
cacaaggagctgtct

SEQ ID NO: 1174213 - DNA, 15 bp, Homo sapiens
ccacaaggagctgtc

SEQ ID NO: 1174214 - DNA, 15 bp, Homo sapiens
gccacaaggagctgt

SEQ ID NO: 1174215 - DNA, 15 bp, Homo sapiens
ggccacaaggagctg

SEQ ID NO: 1174216 - DNA, 15 bp, Homo sapiens
cggccacaaggagct

SEQ ID NO: 1174217 - DNA, 15 bp, Homo sapiens
tcggccacaaggagc

SEQ ID NO: 1174218 - DNA, 15 bp, Homo sapiens
ctcggccacaaggag

SEQ ID NO: 1174219 - DNA, 15 bp, Homo sapiens
cctcggccacaagga

SEQ ID NO: 1174220 - DNA, 15 bp, Homo sapiens
ccctcggccacaagg

SEQ ID NO: 1174221 - DNA, 15 bp, Homo sapiens
gccctcggccacaag

SEQ ID NO: 1174222 - DNA, 15 bp, Homo sapiens
tgccctcggccacaa

SEQ ID NO: 1174223 - DNA, 15 bp, Homo sapiens
ttgccctcggccaca

SEQ ID NO: 1174224 - DNA, 15 bp, Homo sapiens
attgccctcggccac

SEQ ID NO: 1174225 - DNA, 15 bp, Homo sapiens
aattgccctcggcca

SEQ ID NO: 1174226 - DNA, 15 bp, Homo sapiens
gaattgccctcggcc

SEQ ID NO: 1174227 - DNA, 15 bp, Homo sapiens
ggaattgccctcggc

SEQ ID NO: 1174228 - DNA, 15 bp, Homo sapiens
gggaattgccctcgg

SEQ ID NO: 1174229 - DNA, 15 bp, Homo sapiens
agggaattgccctcg

SEQ ID NO: 1174230 - DNA, 15 bp, Homo sapiens
cagggaattgccctc

SEQ ID NO: 1174231 - DNA, 15 bp, Homo sapiens
ccagggaattgccct

SEQ ID NO: 1174232 - DNA, 15 bp, Homo sapiens
cccagggaattgccc

SEQ ID NO: 1174233 - DNA, 15 bp, Homo sapiens
tcccagggaattgcc

SEQ ID NO: 1174234 - DNA, 15 bp, Homo sapiens
ctcccagggaattgc

SEQ ID NO: 1174235 - DNA, 15 bp, Homo sapiens
cctcccagggaattg

SEQ ID NO: 1174236 - DNA, 15 bp, Homo sapiens
ccctcccagggaatt

SEQ ID NO: 1174237 - DNA, 15 bp, Homo sapiens
accctcccagggaat

SEQ ID NO: 1174238 - DNA, 15 bp, Homo sapiens
gaccctcccagggaa

SEQ ID NO: 1174239 - DNA, 15 bp, Homo sapiens
ggaccctcccaggga

SEQ ID NO: 1174240 - DNA, 15 bp, Homo sapiens
gggaccctcccaggg

SEQ ID NO: 1174241 - DNA, 15 bp, Homo sapiens
agggaccctcccagg

SEQ ID NO: 1174242 - DNA, 15 bp, Homo sapiens
cagggaccctcccag

SEQ ID NO: 1174243 - DNA, 15 bp, Homo sapiens
acagggaccctccca

SEQ ID NO: 1174244 - DNA, 15 bp, Homo sapiens
cacagggaccctccc

SEQ ID NO: 1174245 - DNA, 15 bp, Homo sapiens
ccacagggaccctcc

SEQ ID NO: 1174246 - DNA, 15 bp, Homo sapiens
accacagggaccctc

SEQ ID NO: 1174247 - DNA, 15 bp, Homo sapiens
caccacagggaccct

SEQ ID NO: 1174248 - DNA, 15 bp, Homo sapiens
tcaccacagggaccc

SEQ ID NO: 1174249 - DNA, 15 bp, Homo sapiens
ttcaccacagggacc

SEQ ID NO: 1174250 - DNA, 15 bp, Homo sapiens
attcaccacagggac

SEQ ID NO: 1174251 - DNA, 15 bp, Homo sapiens
gattcaccacaggga

SEQ ID NO: 1174252 - DNA, 15 bp, Homo sapiens
agattcaccacaggg

SEQ ID NO: 1174253 - DNA, 15 bp, Homo sapiens
aagattcaccacagg

SEQ ID NO: 1174254 - DNA, 15 bp, Homo sapiens
gaagattcaccacag

SEQ ID NO: 1174255 - DNA, 15 bp, Homo sapiens
agaagattcaccaca

SEQ ID NO: 1174256 - DNA, 15 bp, Homo sapiens
cagaagattcaccac

SEQ ID NO: 1174257 - DNA, 15 bp, Homo sapiens
gcagaagattcacca

SEQ ID NO: 1174258 - DNA, 15 bp, Homo sapiens
tgcagaagattcacc

SEQ ID NO: 1174259 - DNA, 15 bp, Homo sapiens
ctgcagaagattcac

SEQ ID NO: 1174260 - DNA, 15 bp, Homo sapiens
gctgcagaagattca

SEQ ID NO: 1174261 - DNA, 15 bp, Homo sapiens
agctgcagaagattc

SEQ ID NO: 1174262 - DNA, 15 bp, Homo sapiens
cagctgcagaagatt

SEQ ID NO: 1174263 - DNA, 15 bp, Homo sapiens
tcagctgcagaagat

SEQ ID NO: 1174264 - DNA, 15 bp, Homo sapiens
gtcagctgcagaaga

SEQ ID NO: 1174265 - DNA, 15 bp, Homo sapiens
cgtcagctgcagaag

SEQ ID NO: 1174266 - DNA, 15 bp, Homo sapiens
acgtcagctgcagaa

SEQ ID NO: 1174267 - DNA, 15 bp, Homo sapiens
aacgtcagctgcaga

SEQ ID NO: 1174268 - DNA, 15 bp, Homo sapiens
gaacgtcagctgcag

SEQ ID NO: 1174269 - DNA, 15 bp, Homo sapiens
agaacgtcagctgca

SEQ ID NO: 1174270 - DNA, 15 bp, Homo sapiens
gagaacgtcagctgc

SEQ ID NO: 1174271 - DNA, 15 bp, Homo sapiens
tgagaacgtcagctg

SEQ ID NO: 1174272 - DNA, 15 bp, Homo sapiens
ctgagaacgtcagct

SEQ ID NO: 1174273 - DNA, 15 bp, Homo sapiens
gctgagaacgtcagc

SEQ ID NO: 1174274 - DNA, 15 bp, Homo sapiens
tgctgagaacgtcag

SEQ ID NO: 1174275 - DNA, 15 bp, Homo sapiens
ctgctgagaacgtca

SEQ ID NO: 1174276 - DNA, 15 bp, Homo sapiens
gctgctgagaacgtc

SEQ ID NO: 1174277 - DNA, 15 bp, Homo sapiens
agctgctgagaacgt

SEQ ID NO: 1174278 - DNA, 15 bp, Homo sapiens
cagctgctgagaacg

SEQ ID NO: 1174279 - DNA, 15 bp, Homo sapiens
ccagctgctgagaac

SEQ ID NO: 1174280 - DNA, 15 bp, Homo sapiens
cccagctgctgagaa

SEQ ID NO: 1174281 - DNA, 15 bp, Homo sapiens
ccccagctgctgaga

SEQ ID NO: 1174282 - DNA, 15 bp, Homo sapiens
cccccagctgctgag

SEQ ID NO: 1174283 - DNA, 15 bp, Homo sapiens
tcccccagctgctga

SEQ ID NO: 1174284 - DNA, 15 bp, Homo sapiens
atcccccagctgctg

SEQ ID NO: 1174285 - DNA, 15 bp, Homo sapiens
catcccccagctgct

SEQ ID NO: 1174286 - DNA, 15 bp, Homo sapiens
ccatcccccagctgc

SEQ ID NO: 1174287 - DNA, 15 bp, Homo sapiens
gccatcccccagctg

SEQ ID NO: 1174288 - DNA, 15 bp, Homo sapiens
agccatcccccagct

SEQ ID NO: 1174289 - DNA, 15 bp, Homo sapiens
cagccatcccccagc

SEQ ID NO: 1174290 - DNA, 15 bp, Homo sapiens
gcagccatcccccag

SEQ ID NO: 1174291 - DNA, 15 bp, Homo sapiens
tgcagccatccccca

SEQ ID NO: 1174292 - DNA, 15 bp, Homo sapiens
atgcagccatccccc

SEQ ID NO: 1174293 - DNA, 15 bp, Homo sapiens
aatgcagccatcccc

SEQ ID NO: 1174294 - DNA, 15 bp, Homo sapiens
caatgcagccatccc

SEQ ID NO: 1174295 - DNA, 15 bp, Homo sapiens
ccaatgcagccatcc

SEQ ID NO: 1174296 - DNA, 15 bp, Homo sapiens
gccaatgcagccatc

SEQ ID NO: 1174297 - DNA, 15 bp, Homo sapiens
ggccaatgcagccat

SEQ ID NO: 1174298 - DNA, 15 bp, Homo sapiens
gggccaatgcagcca

SEQ ID NO: 1174299 - DNA, 15 bp, Homo sapiens
agggccaatgcagcc

SEQ ID NO: 1174300 - DNA, 15 bp, Homo sapiens
cagggccaatgcagc

SEQ ID NO: 1174301 - DNA, 15 bp, Homo sapiens
tcagggccaatgcag

SEQ ID NO: 1174302 - DNA, 15 bp, Homo sapiens
ttcagggccaatgca

SEQ ID NO: 1174303 - DNA, 15 bp, Homo sapiens
cttcagggccaatgc

SEQ ID NO: 1174304 - DNA, 15 bp, Homo sapiens
tcttcagggccaatg

SEQ ID NO: 1174305 - DNA, 15 bp, Homo sapiens
ctcttcagggccaat

SEQ ID NO: 1174306 - DNA, 15 bp, Homo sapiens
cctcttcagggccaa

SEQ ID NO: 1174307 - DNA, 15 bp, Homo sapiens
ccctcttcagggcca

SEQ ID NO: 1174308 - DNA, 15 bp, Homo sapiens
cccctcttcagggcc

SEQ ID NO: 1174309 - DNA, 15 bp, Homo sapiens
acccctcttcagggc

SEQ ID NO: 1174310 - DNA, 15 bp, Homo sapiens
aacccctcttcaggg

SEQ ID NO: 1174311 - DNA, 15 bp, Homo sapiens
gaacccctcttcagg

SEQ ID NO: 1174312 - DNA, 15 bp, Homo sapiens
agaacccctcttcag

SEQ ID NO: 1174313 - DNA, 15 bp, Homo sapiens
cagaacccctcttca

SEQ ID NO: 1174314 - DNA, 15 bp, Homo sapiens
acagaacccctcttc

SEQ ID NO: 1174315 - DNA, 15 bp, Homo sapiens
cacagaacccctctt

SEQ ID NO: 1174316 - DNA, 15 bp, Homo sapiens
acacagaacccctct

SEQ ID NO: 1174317 - DNA, 15 bp, Homo sapiens
cacacagaacccctc

SEQ ID NO: 1174318 - DNA, 15 bp, Homo sapiens
ccacacagaacccct

SEQ ID NO: 1174319 - DNA, 15 bp, Homo sapiens
gccacacagaacccc

SEQ ID NO: 1174320 - DNA, 15 bp, Homo sapiens
tgccacacagaaccc

SEQ ID NO: 1174321 - DNA, 15 bp, Homo sapiens
gtgccacacagaacc

SEQ ID NO: 1174322 - DNA, 15 bp, Homo sapiens
tgtgccacacagaac

SEQ ID NO: 1174323 - DNA, 15 bp, Homo sapiens
gtgtgccacacagaa

SEQ ID NO: 1174324 - DNA, 15 bp, Homo sapiens
ggtgtgccacacaga

SEQ ID NO: 1174325 - DNA, 15 bp, Homo sapiens
tggtgtgccacacag

SEQ ID NO: 1174326 - DNA, 15 bp, Homo sapiens
gtggtgtgccacaca

SEQ ID NO: 1174327 - DNA, 15 bp, Homo sapiens
tgtggtgtgccacac

SEQ ID NO: 1174328 - DNA, 15 bp, Homo sapiens
ctgtggtgtgccaca

SEQ ID NO: 1174329 - DNA, 15 bp, Homo sapiens
actgtggtgtgccac

SEQ ID NO: 1174330 - DNA, 15 bp, Homo sapiens
cactgtggtgtgcca

SEQ ID NO: 1174331 - DNA, 15 bp, Homo sapiens
acactgtggtgtgcc

SEQ ID NO: 1174332 - DNA, 15 bp, Homo sapiens
gacactgtggtgtgc

SEQ ID NO: 1174333 - DNA, 15 bp, Homo sapiens
agacactgtggtgtg

SEQ ID NO: 1174334 - DNA, 15 bp, Homo sapiens
cagacactgtggtgt

SEQ ID NO: 1174335 - DNA, 15 bp, Homo sapiens
gcagacactgtggtg

SEQ ID NO: 1174336 - DNA, 15 bp, Homo sapiens
agcagacactgtggt

SEQ ID NO: 1174337 - DNA, 15 bp, Homo sapiens
tagcagacactgtgg

SEQ ID NO: 1174338 - DNA, 15 bp, Homo sapiens
gtagcagacactgtg

SEQ ID NO: 1174339 - DNA, 15 bp, Homo sapiens
tgtagcagacactgt

SEQ ID NO: 1174340 - DNA, 15 bp, Homo sapiens
gtgtagcagacactg

SEQ ID NO: 1174341 - DNA, 15 bp, Homo sapiens
agtgtagcagacact

SEQ ID NO: 1174342 - DNA, 15 bp, Homo sapiens
cagtgtagcagacac

SEQ ID NO: 1174343 - DNA, 15 bp, Homo sapiens
ccagtgtagcagaca

SEQ ID NO: 1174344 - DNA, 15 bp, Homo sapiens
tccagtgtagcagac

SEQ ID NO: 1174345 - DNA, 15 bp, Homo sapiens
atccagtgtagcaga

SEQ ID NO: 1174346 - DNA, 15 bp, Homo sapiens
aatccagtgtagcag

SEQ ID NO: 1174347 - DNA, 15 bp, Homo sapiens
taatccagtgtagca

SEQ ID NO: 1174348 - DNA, 15 bp, Homo sapiens
gtaatccagtgtagc

SEQ ID NO: 1174349 - DNA, 15 bp, Homo sapiens
ggtaatccagtgtag

SEQ ID NO: 1174350 - DNA, 15 bp, Homo sapiens
tggtaatccagtgta

SEQ ID NO: 1174351 - DNA, 15 bp, Homo sapiens
atggtaatccagtgt

SEQ ID NO: 1174352 - DNA, 15 bp, Homo sapiens
gatggtaatccagtg

SEQ ID NO: 1174353 - DNA, 15 bp, Homo sapiens
agatggtaatccagt

SEQ ID NO: 1174354 - DNA, 15 bp, Homo sapiens
tagatggtaatccag

SEQ ID NO: 1174355 - DNA, 15 bp, Homo sapiens
gtagatggtaatcca

SEQ ID NO: 1174356 - DNA, 15 bp, Homo sapiens
tgtagatggtaatcc

SEQ ID NO: 1174357 - DNA, 15 bp, Homo sapiens
atgtagatggtaatc

SEQ ID NO: 1174358 - DNA, 15 bp, Homo sapiens
aatgtagatggtaat

SEQ ID NO: 1174359 - DNA, 15 bp, Homo sapiens
aaatgtagatggtaa

SEQ ID NO: 1174360 - DNA, 15 bp, Homo sapiens
aaaatgtagatggta

SEQ ID NO: 1174361 - DNA, 15 bp, Homo sapiens
taaaatgtagatggt

SEQ ID NO: 1174362 - DNA, 15 bp, Homo sapiens
ttaaaatgtagatgg

SEQ ID NO: 1174363 - DNA, 15 bp, Homo sapiens
cttaaaatgtagatg

SEQ ID NO: 1174364 - DNA, 15 bp, Homo sapiens
ccttaaaatgtagat

SEQ ID NO: 1174365 - DNA, 15 bp, Homo sapiens
accttaaaatgtaga

SEQ ID NO: 1174366 - DNA, 15 bp, Homo sapiens
aaccttaaaatgtag

SEQ ID NO: 1174367 - DNA, 15 bp, Homo sapiens
taaccttaaaatgta

SEQ ID NO: 1174368 - DNA, 15 bp, Homo sapiens
ttaaccttaaaatgt

SEQ ID NO: 1174369 - DNA, 15 bp, Homo sapiens
tttaaccttaaaatg

SEQ ID NO: 1174370 - DNA, 15 bp, Homo sapiens
ttttaaccttaaaat

SEQ ID NO: 1174371 - DNA, 15 bp, Homo sapiens
cttttaaccttaaaa

SEQ ID NO: 1174372 - DNA, 15 bp, Homo sapiens
gcttttaaccttaaa

SEQ ID NO: 1174373 - DNA, 15 bp, Homo sapiens
agcttttaaccttaa

SEQ ID NO: 1174374 - DNA, 15 bp, Homo sapiens
aagcttttaacctta

SEQ ID NO: 1174375 - DNA, 15 bp, Homo sapiens
gaagcttttaacctt

SEQ ID NO: 1174376 - DNA, 15 bp, Homo sapiens
agaagcttttaacct

SEQ ID NO: 1174377 - DNA, 15 bp, Homo sapiens
cagaagcttttaacc

SEQ ID NO: 1174378 - DNA, 15 bp, Homo sapiens
tcagaagcttttaac

SEQ ID NO: 1174379 - DNA, 15 bp, Homo sapiens
gtcagaagcttttaa

SEQ ID NO: 1174380 - DNA, 15 bp, Homo sapiens
tgtcagaagctttta

SEQ ID NO: 1174381 - DNA, 15 bp, Homo sapiens
ttgtcagaagctttt

SEQ ID NO: 1174382 - DNA, 15 bp, Homo sapiens
tttgtcagaagcttt

SEQ ID NO: 1174383 - DNA, 15 bp, Homo sapiens
atttgtcagaagctt

SEQ ID NO: 1174384 - DNA, 15 bp, Homo sapiens
aatttgtcagaagct

SEQ ID NO: 1174385 - DNA, 15 bp, Homo sapiens
caatttgtcagaagc

SEQ ID NO: 1174386 - DNA, 15 bp, Homo sapiens
ccaatttgtcagaag

SEQ ID NO: 1174387 - DNA, 15 bp, Homo sapiens
gccaatttgtcagaa

SEQ ID NO: 1174388 - DNA, 15 bp, Homo sapiens
agccaatttgtcaga

SEQ ID NO: 1174389 - DNA, 15 bp, Homo sapiens
gagccaatttgtcag

SEQ ID NO: 1174390 - DNA, 15 bp, Homo sapiens
ggagccaatttgtca

SEQ ID NO: 1174391 - DNA, 15 bp, Homo sapiens
tggagccaatttgtc

SEQ ID NO: 1174392 - DNA, 15 bp, Homo sapiens
gtggagccaatttgt

SEQ ID NO: 1174393 - DNA, 15 bp, Homo sapiens
tgtggagccaatttg

SEQ ID NO: 1174394 - DNA, 15 bp, Homo sapiens
ctgtggagccaattt

SEQ ID NO: 1174395 - DNA, 15 bp, Homo sapiens
tctgtggagccaatt

SEQ ID NO: 1174396 - DNA, 15 bp, Homo sapiens
ttctgtggagccaat

SEQ ID NO: 1174397 - DNA, 15 bp, Homo sapiens
cttctgtggagccaa

SEQ ID NO: 1174398 - DNA, 15 bp, Homo sapiens
gcttctgtggagcca

SEQ ID NO: 1174399 - DNA, 15 bp, Homo sapiens
ggcttctgtggagcc

SEQ ID NO: 1174400 - DNA, 15 bp, Homo sapiens
aggcttctgtggagc

SEQ ID NO: 1174401 - DNA, 15 bp, Homo sapiens
gaggcttctgtggag

SEQ ID NO: 1174402 - DNA, 15 bp, Homo sapiens
agaggcttctgtgga

SEQ ID NO: 1174403 - DNA, 15 bp, Homo sapiens
aagaggcttctgtgg

SEQ ID NO: 1174404 - DNA, 15 bp, Homo sapiens
caagaggcttctgtg

SEQ ID NO: 1174405 - DNA, 15 bp, Homo sapiens
tcaagaggcttctgt

SEQ ID NO: 1174406 - DNA, 15 bp, Homo sapiens
atcaagaggcttctg

SEQ ID NO: 1174407 - DNA, 15 bp, Homo sapiens
aatcaagaggcttct

SEQ ID NO: 1174408 - DNA, 15 bp, Homo sapiens
caatcaagaggcttc

SEQ ID NO: 1174409 - DNA, 15 bp, Homo sapiens
tcaatcaagaggctt

SEQ ID NO: 1174410 - DNA, 15 bp, Homo sapiens
ctcaatcaagaggct

SEQ ID NO: 1174411 - DNA, 15 bp, Homo sapiens
gctcaatcaagaggc

SEQ ID NO: 1174412 - DNA, 15 bp, Homo sapiens
agctcaatcaagagg

SEQ ID NO: 1174413 - DNA, 15 bp, Homo sapiens
tagctcaatcaagag

SEQ ID NO: 1174414 - DNA, 15 bp, Homo sapiens
atagctcaatcaaga

SEQ ID NO: 1174415 - DNA, 15 bp, Homo sapiens
aatagctcaatcaag

SEQ ID NO: 1174416 - DNA, 15 bp, Homo sapiens
caatagctcaatcaa

SEQ ID NO: 1174417 - DNA, 15 bp, Homo sapiens
gcaatagctcaatca

SEQ ID NO: 1174418 - DNA, 15 bp, Homo sapiens
agcaatagctcaatc

SEQ ID NO: 1174419 - DNA, 15 bp, Homo sapiens
aagcaatagctcaat

SEQ ID NO: 1174420 - DNA, 15 bp, Homo sapiens
caagcaatagctcaa

SEQ ID NO: 1174421 - DNA, 15 bp, Homo sapiens
gcaagcaatagctca

SEQ ID NO: 1174422 - DNA, 15 bp, Homo sapiens
tgcaagcaatagctc

SEQ ID NO: 1174423 - DNA, 15 bp, Homo sapiens
ttgcaagcaatagct

SEQ ID NO: 1174424 - DNA, 15 bp, Homo sapiens
tttgcaagcaatagc

SEQ ID NO: 1174425 - DNA, 15 bp, Homo sapiens
atttgcaagcaatag

SEQ ID NO: 1174426 - DNA, 15 bp, Homo sapiens
aatttgcaagcaata

SEQ ID NO: 1174427 - DNA, 15 bp, Homo sapiens
caatttgcaagcaat

SEQ ID NO: 1174428 - DNA, 15 bp, Homo sapiens
acaatttgcaagcaa

SEQ ID NO: 1174429 - DNA, 15 bp, Homo sapiens
aacaatttgcaagca

SEQ ID NO: 1174430 - DNA, 15 bp, Homo sapiens
caacaatttgcaagc

SEQ ID NO: 1174431 - DNA, 15 bp, Homo sapiens
tcaacaatttgcaag

SEQ ID NO: 1174432 - DNA, 15 bp, Homo sapiens
gtcaacaatttgcaa

SEQ ID NO: 1174433 - DNA, 15 bp, Homo sapiens
tgtcaacaatttgca

SEQ ID NO: 1174434 - DNA, 15 bp, Homo sapiens
atgtcaacaatttgc

SEQ ID NO: 1174435 - DNA, 15 bp, Homo sapiens
aatgtcaacaatttg

SEQ ID NO: 1174436 - DNA, 15 bp, Homo sapiens
gaatgtcaacaattt

SEQ ID NO: 1174437 - DNA, 15 bp, Homo sapiens
tgaatgtcaacaatt

SEQ ID NO: 1174438 - DNA, 15 bp, Homo sapiens
gtgaatgtcaacaat

SEQ ID NO: 1174439 - DNA, 15 bp, Homo sapiens
agtgaatgtcaacaa

SEQ ID NO: 1174440 - DNA, 15 bp, Homo sapiens
cagtgaatgtcaaca

SEQ ID NO: 1174441 - DNA, 15 bp, Homo sapiens
gcagtgaatgtcaac

SEQ ID NO: 1174442 - DNA, 15 bp, Homo sapiens
ggcagtgaatgtcaa

SEQ ID NO: 1174443 - DNA, 15 bp, Homo sapiens
tggcagtgaatgtca

SEQ ID NO: 1174444 - DNA, 15 bp, Homo sapiens
gtggcagtgaatgtc

SEQ ID NO: 1174445 - DNA, 15 bp, Homo sapiens
agtggcagtgaatgt

SEQ ID NO: 1174446 - DNA, 15 bp, Homo sapiens
gagtggcagtgaatg

SEQ ID NO: 1174447 - DNA, 15 bp, Homo sapiens
agagtggcagtgaat

SEQ ID NO: 1174448 - DNA, 15 bp, Homo sapiens
gagagtggcagtgaa

SEQ ID NO: 1174449 - DNA, 15 bp, Homo sapiens
agagagtggcagtga

SEQ ID NO: 1174450 - DNA, 15 bp, Homo sapiens
tagagagtggcagtg

SEQ ID NO: 1174451 - DNA, 15 bp, Homo sapiens
gtagagagtggcagt

SEQ ID NO: 1174452 - DNA, 15 bp, Homo sapiens
agtagagagtggcag

SEQ ID NO: 1174453 - DNA, 15 bp, Homo sapiens
aagtagagagtggca

SEQ ID NO: 1174454 - DNA, 15 bp, Homo sapiens
caagtagagagtggc

SEQ ID NO: 1174455 - DNA, 15 bp, Homo sapiens
acaagtagagagtgg

SEQ ID NO: 1174456 - DNA, 15 bp, Homo sapiens
cacaagtagagagtg

SEQ ID NO: 1174457 - DNA, 15 bp, Homo sapiens
acacaagtagagagt

SEQ ID NO: 1174458 - DNA, 15 bp, Homo sapiens
aacacaagtagagag

SEQ ID NO: 1174459 - DNA, 15 bp, Homo sapiens
taacacaagtagaga

SEQ ID NO: 1174460 - DNA, 15 bp, Homo sapiens
ataacacaagtagag

SEQ ID NO: 1174461 - DNA, 15 bp, Homo sapiens
aataacacaagtaga

SEQ ID NO: 1174462 - DNA, 15 bp, Homo sapiens
gaataacacaagtag

SEQ ID NO: 1174463 - DNA, 15 bp, Homo sapiens
agaataacacaagta

SEQ ID NO: 1174464 - DNA, 15 bp, Homo sapiens
gagaataacacaagt

SEQ ID NO: 1174465 - DNA, 15 bp, Homo sapiens
agagaataacacaag

SEQ ID NO: 1174466 - DNA, 15 bp, Homo sapiens
aagagaataacacaa

SEQ ID NO: 1174467 - DNA, 15 bp, Homo sapiens
gaagagaataacaca

SEQ ID NO: 1174468 - DNA, 15 bp, Homo sapiens
tgaagagaataacac

SEQ ID NO: 1174469 - DNA, 15 bp, Homo sapiens
ttgaagagaataaca

SEQ ID NO: 1174470 - DNA, 15 bp, Homo sapiens
attgaagagaataac

SEQ ID NO: 1174471 - DNA, 15 bp, Homo sapiens
cattgaagagaataa

SEQ ID NO: 1174472 - DNA, 15 bp, Homo sapiens
ccattgaagagaata

SEQ ID NO: 1174473 - DNA, 15 bp, Homo sapiens
tccattgaagagaat

SEQ ID NO: 1174474 - DNA, 15 bp, Homo sapiens
ctccattgaagagaa

SEQ ID NO: 1174475 - DNA, 15 bp, Homo sapiens
tctccattgaagaga

SEQ ID NO: 1174476 - DNA, 15 bp, Homo sapiens
atctccattgaagag

SEQ ID NO: 1174477 - DNA, 15 bp, Homo sapiens
catctccattgaaga

SEQ ID NO: 1174478 - DNA, 15 bp, Homo sapiens
ccatctccattgaag

SEQ ID NO: 1174479 - DNA, 15 bp, Homo sapiens
cccatctccattgaa

SEQ ID NO: 1174480 - DNA, 15 bp, Homo sapiens
ccccatctccattga

SEQ ID NO: 1174481 - DNA, 15 bp, Homo sapiens
tccccatctccattg

SEQ ID NO: 1174482 - DNA, 15 bp, Homo sapiens
gtccccatctccatt

SEQ ID NO: 1174483 - DNA, 15 bp, Homo sapiens
agtccccatctccat

SEQ ID NO: 1174484 - DNA, 15 bp, Homo sapiens
gagtccccatctcca

SEQ ID NO: 1174485 - DNA, 15 bp, Homo sapiens
ggagtccccatctcc

SEQ ID NO: 1174486 - DNA, 15 bp, Homo sapiens
tggagtccccatctc

SEQ ID NO: 1174487 - DNA, 15 bp, Homo sapiens
atggagtccccatct

SEQ ID NO: 1174488 - DNA, 15 bp, Homo sapiens
aatggagtccccatc

SEQ ID NO: 1174489 - DNA, 15 bp, Homo sapiens
caatggagtccccat

SEQ ID NO: 1174490 - DNA, 15 bp, Homo sapiens
tcaatggagtcccca

SEQ ID NO: 1174491 - DNA, 15 bp, Homo sapiens
ttcaatggagtcccc

SEQ ID NO: 1174492 - DNA, 15 bp, Homo sapiens
cttcaatggagtccc

SEQ ID NO: 1174493 - DNA, 15 bp, Homo sapiens
acttcaatggagtcc

SEQ ID NO: 1174494 - DNA, 15 bp, Homo sapiens
gacttcaatggagtc

SEQ ID NO: 1174495 - DNA, 15 bp, Homo sapiens
agacttcaatggagt

SEQ ID NO: 1174496 - DNA, 15 bp, Homo sapiens
tagacttcaatggag

SEQ ID NO: 1174497 - DNA, 15 bp, Homo sapiens
atagacttcaatgga

SEQ ID NO: 1174498 - DNA, 15 bp, Homo sapiens
catagacttcaatgg

SEQ ID NO: 1174499 - DNA, 15 bp, Homo sapiens
tcatagacttcaatg

SEQ ID NO: 1174500 - DNA, 15 bp, Homo sapiens
gtcatagacttcaat

SEQ ID NO: 1174501 - DNA, 15 bp, Homo sapiens
ggtcatagacttcaa

SEQ ID NO: 1174502 - DNA, 15 bp, Homo sapiens
tggtcatagacttca

SEQ ID NO: 1174503 - DNA, 15 bp, Homo sapiens
ttggtcatagacttc

SEQ ID NO: 1174504 - DNA, 15 bp, Homo sapiens
tttggtcatagactt

SEQ ID NO: 1174505 - DNA, 15 bp, Homo sapiens
atttggtcatagact

SEQ ID NO: 1174506 - DNA, 15 bp, Homo sapiens
catttggtcatagac

SEQ ID NO: 1174507 - DNA, 15 bp, Homo sapiens
acatttggtcataga

SEQ ID NO: 1174508 - DNA, 15 bp, Homo sapiens
tacatttggtcatag

SEQ ID NO: 1174509 - DNA, 15 bp, Homo sapiens
ctacatttggtcata

SEQ ID NO: 1174510 - DNA, 15 bp, Homo sapiens
cctacatttggtcat

SEQ ID NO: 1174511 - DNA, 15 bp, Homo sapiens
gcctacatttggtca

SEQ ID NO: 1174512 - DNA, 15 bp, Homo sapiens
tgcctacatttggtc

SEQ ID NO: 1174513 - DNA, 15 bp, Homo sapiens
atgcctacatttggt

SEQ ID NO: 1174514 - DNA, 15 bp, Homo sapiens
catgcctacatttgg

SEQ ID NO: 1174515 - DNA, 15 bp, Homo sapiens
ccatgcctacatttg

SEQ ID NO: 1174516 - DNA, 15 bp, Homo sapiens
accatgcctacattt

SEQ ID NO: 1174517 - DNA, 15 bp, Homo sapiens
gaccatgcctacatt

SEQ ID NO: 1174518 - DNA, 15 bp, Homo sapiens
tgaccatgcctacat

SEQ ID NO: 1174519 - DNA, 15 bp, Homo sapiens
ctgaccatgcctaca

SEQ ID NO: 1174520 - DNA, 15 bp, Homo sapiens
gctgaccatgcctac

SEQ ID NO: 1174521 - DNA, 15 bp, Homo sapiens
ggctgaccatgccta

SEQ ID NO: 1174522 - DNA, 15 bp, Homo sapiens
aggctgaccatgcct

SEQ ID NO: 1174523 - DNA, 15 bp, Homo sapiens
gaggctgaccatgcc

SEQ ID NO: 1174524 - DNA, 15 bp, Homo sapiens
ggaggctgaccatgc

SEQ ID NO: 1174525 - DNA, 15 bp, Homo sapiens
aggaggctgaccatg

SEQ ID NO: 1174526 - DNA, 15 bp, Homo sapiens
aaggaggctgaccat

SEQ ID NO: 1174527 - DNA, 15 bp, Homo sapiens
taaggaggctgacca

SEQ ID NO: 1174528 - DNA, 15 bp, Homo sapiens
ctaaggaggctgacc

SEQ ID NO: 1174529 - DNA, 15 bp, Homo sapiens
tctaaggaggctgac

SEQ ID NO: 1174530 - DNA, 15 bp, Homo sapiens
gtctaaggaggctga

SEQ ID NO: 1174531 - DNA, 15 bp, Homo sapiens
agtctaaggaggctg

SEQ ID NO: 1174532 - DNA, 15 bp, Homo sapiens
gagtctaaggaggct

SEQ ID NO: 1174533 - DNA, 15 bp, Homo sapiens
tgagtctaaggaggc

SEQ ID NO: 1174534 - DNA, 15 bp, Homo sapiens
ctgagtctaaggagg

SEQ ID NO: 1174535 - DNA, 15 bp, Homo sapiens
cctgagtctaaggag

SEQ ID NO: 1174536 - DNA, 15 bp, Homo sapiens
ccctgagtctaagga

SEQ ID NO: 1174537 - DNA, 15 bp, Homo sapiens
tccctgagtctaagg

SEQ ID NO: 1174538 - DNA, 15 bp, Homo sapiens
ttccctgagtctaag

SEQ ID NO: 1174539 - DNA, 15 bp, Homo sapiens
attccctgagtctaa

SEQ ID NO: 1174540 - DNA, 15 bp, Homo sapiens
aattccctgagtcta

SEQ ID NO: 1174541 - DNA, 15 bp, Homo sapiens
caattccctgagtct

SEQ ID NO: 1174542 - DNA, 15 bp, Homo sapiens
tcaattccctgagtc

SEQ ID NO: 1174543 - DNA, 15 bp, Homo sapiens
ttcaattccctgagt

SEQ ID NO: 1174544 - DNA, 15 bp, Homo sapiens
attcaattccctgag

SEQ ID NO: 1174545 - DNA, 15 bp, Homo sapiens
gattcaattccctga

SEQ ID NO: 1174546 - DNA, 15 bp, Homo sapiens
ggattcaattccctg

SEQ ID NO: 1174547 - DNA, 15 bp, Homo sapiens
tggattcaattccct

SEQ ID NO: 1174548 - DNA, 15 bp, Homo sapiens
atggattcaattccc

SEQ ID NO: 1174549 - DNA, 15 bp, Homo sapiens
catggattcaattcc

SEQ ID NO: 1174550 - DNA, 15 bp, Homo sapiens
ccatggattcaattc

SEQ ID NO: 1174551 - DNA, 15 bp, Homo sapiens
gccatggattcaatt

SEQ ID NO: 1174552 - DNA, 15 bp, Homo sapiens
agccatggattcaat

SEQ ID NO: 1174553 - DNA, 15 bp, Homo sapiens
tagccatggattcaa

SEQ ID NO: 1174554 - DNA, 15 bp, Homo sapiens
atagccatggattca

SEQ ID NO: 1174555 - DNA, 15 bp, Homo sapiens
aatagccatggattc

SEQ ID NO: 1174556 - DNA, 15 bp, Homo sapiens
gaatagccatggatt

SEQ ID NO: 1174557 - DNA, 15 bp, Homo sapiens
tgaatagccatggat

SEQ ID NO: 1174558 - DNA, 15 bp, Homo sapiens
gtgaatagccatgga

SEQ ID NO: 1174559 - DNA, 15 bp, Homo sapiens
ggtgaatagccatgg

SEQ ID NO: 1174560 - DNA, 15 bp, Homo sapiens
aggtgaatagccatg

SEQ ID NO: 1174561 - DNA, 15 bp, Homo sapiens
caggtgaatagccat

SEQ ID NO: 1174562 - DNA, 15 bp, Homo sapiens
gcaggtgaatagcca

SEQ ID NO: 1174563 - DNA, 15 bp, Homo sapiens
agcaggtgaatagcc

SEQ ID NO: 1174564 - DNA, 15 bp, Homo sapiens
tagcaggtgaatagc

SEQ ID NO: 1174565 - DNA, 15 bp, Homo sapiens
gtagcaggtgaatag

SEQ ID NO: 1174566 - DNA, 15 bp, Homo sapiens
tgtagcaggtgaata

SEQ ID NO: 1174567 - DNA, 15 bp, Homo sapiens
ctgtagcaggtgaat

SEQ ID NO: 1174568 - DNA, 15 bp, Homo sapiens
gctgtagcaggtgaa

SEQ ID NO: 1174569 - DNA, 15 bp, Homo sapiens
tgctgtagcaggtga

SEQ ID NO: 1174570 - DNA, 15 bp, Homo sapiens
ctgctgtagcaggtg

SEQ ID NO: 1174571 - DNA, 15 bp, Homo sapiens
cctgctgtagcaggt

SEQ ID NO: 1174572 - DNA, 15 bp, Homo sapiens
acctgctgtagcagg

SEQ ID NO: 1174573 - DNA, 15 bp, Homo sapiens
cacctgctgtagcag

SEQ ID NO: 1174574 - DNA, 15 bp, Homo sapiens
gcacctgctgtagca

SEQ ID NO: 1174575 - DNA, 15 bp, Homo sapiens
tgcacctgctgtagc

SEQ ID NO: 1174576 - DNA, 15 bp, Homo sapiens
gtgcacctgctgtag

SEQ ID NO: 1174577 - DNA, 15 bp, Homo sapiens
tgtgcacctgctgta

SEQ ID NO: 1174578 - DNA, 15 bp, Homo sapiens
ttgtgcacctgctgt

SEQ ID NO: 1174579 - DNA, 15 bp, Homo sapiens
gttgtgcacctgctg

SEQ ID NO: 1174580 - DNA, 15 bp, Homo sapiens
ggttgtgcacctgct

SEQ ID NO: 1174581 - DNA, 15 bp, Homo sapiens
tggttgtgcacctgc

SEQ ID NO: 1174582 - DNA, 15 bp, Homo sapiens
ctggttgtgcacctg

SEQ ID NO: 1174583 - DNA, 15 bp, Homo sapiens
tctggttgtgcacct

SEQ ID NO: 1174584 - DNA, 15 bp, Homo sapiens
atctggttgtgcacc

SEQ ID NO: 1174585 - DNA, 15 bp, Homo sapiens
catctggttgtgcac

SEQ ID NO: 1174586 - DNA, 15 bp, Homo sapiens
gcatctggttgtgca

SEQ ID NO: 1174587 - DNA, 15 bp, Homo sapiens
ggcatctggttgtgc

SEQ ID NO: 1174588 - DNA, 15 bp, Homo sapiens
tggcatctggttgtg

SEQ ID NO: 1174589 - DNA, 15 bp, Homo sapiens
ttggcatctggttgt

SEQ ID NO: 1174590 - DNA, 15 bp, Homo sapiens
gttggcatctggttg

SEQ ID NO: 1174591 - DNA, 15 bp, Homo sapiens
tgttggcatctggtt

SEQ ID NO: 1174592 - DNA, 15 bp, Homo sapiens
ctgttggcatctggt

SEQ ID NO: 1174593 - DNA, 15 bp, Homo sapiens
actgttggcatctgg

SEQ ID NO: 1174594 - DNA, 15 bp, Homo sapiens
tactgttggcatctg

SEQ ID NO: 1174595 - DNA, 15 bp, Homo sapiens
ctactgttggcatct

SEQ ID NO: 1174596 - DNA, 15 bp, Homo sapiens
actactgttggcatc

SEQ ID NO: 1174597 - DNA, 15 bp, Homo sapiens
cactactgttggcat

SEQ ID NO: 1174598 - DNA, 15 bp, Homo sapiens
acactactgttggca

SEQ ID NO: 1174599 - DNA, 15 bp, Homo sapiens
aacactactgttggc

SEQ ID NO: 1174600 - DNA, 15 bp, Homo sapiens
caacactactgttgg

SEQ ID NO: 1174601 - DNA, 15 bp, Homo sapiens
acaacactactgttg

SEQ ID NO: 1174602 - DNA, 15 bp, Homo sapiens
aacaacactactgtt

SEQ ID NO: 1174603 - DNA, 15 bp, Homo sapiens
taacaacactactgt

SEQ ID NO: 1174604 - DNA, 15 bp, Homo sapiens
ttaacaacactactg

SEQ ID NO: 1174605 - DNA, 15 bp, Homo sapiens
cttaacaacactact

SEQ ID NO: 1174606 - DNA, 15 bp, Homo sapiens
tcttaacaacactac

SEQ ID NO: 1174607 - DNA, 15 bp, Homo sapiens
ctcttaacaacacta

SEQ ID NO: 1174608 - DNA, 15 bp, Homo sapiens
cctcttaacaacact

SEQ ID NO: 1174609 - DNA, 15 bp, Homo sapiens
tcctcttaacaacac

SEQ ID NO: 1174610 - DNA, 15 bp, Homo sapiens
ttcctcttaacaaca

SEQ ID NO: 1174611 - DNA, 15 bp, Homo sapiens
attcctcttaacaac

SEQ ID NO: 1174612 - DNA, 15 bp, Homo sapiens
aattcctcttaacaa

SEQ ID NO: 1174613 - DNA, 15 bp, Homo sapiens
gaattcctcttaaca

SEQ ID NO: 1174614 - DNA, 15 bp, Homo sapiens
ggaattcctcttaac

SEQ ID NO: 1174615 - DNA, 15 bp, Homo sapiens
gggaattcctcttaa

SEQ ID NO: 1174616 - DNA, 15 bp, Homo sapiens
tgggaattcctctta

SEQ ID NO: 1174617 - DNA, 15 bp, Homo sapiens
ctgggaattcctctt

SEQ ID NO: 1174618 - DNA, 15 bp, Homo sapiens
cctgggaattcctct

SEQ ID NO: 1174619 - DNA, 15 bp, Homo sapiens
gcctgggaattcctc

SEQ ID NO: 1174620 - DNA, 15 bp, Homo sapiens
ggcctgggaattcct

SEQ ID NO: 1174621 - DNA, 15 bp, Homo sapiens
cggcctgggaattcc

SEQ ID NO: 1174622 - DNA, 15 bp, Homo sapiens
ccggcctgggaattc

SEQ ID NO: 1174623 - DNA, 15 bp, Homo sapiens
cccggcctgggaatt

SEQ ID NO: 1174624 - DNA, 15 bp, Homo sapiens
gcccggcctgggaat

SEQ ID NO: 1174625 - DNA, 15 bp, Homo sapiens
tgcccggcctgggaa

SEQ ID NO: 1174626 - DNA, 15 bp, Homo sapiens
gtgcccggcctggga

SEQ ID NO: 1174627 - DNA, 15 bp, Homo sapiens
cgtgcccggcctggg

SEQ ID NO: 1174628 - DNA, 15 bp, Homo sapiens
ccgtgcccggcctgg

SEQ ID NO: 1174629 - DNA, 15 bp, Homo sapiens
accgtgcccggcctg

SEQ ID NO: 1174630 - DNA, 15 bp, Homo sapiens
caccgtgcccggcct

SEQ ID NO: 1174631 - DNA, 15 bp, Homo sapiens
tgcctcccaaagtgc

SEQ ID NO: 1174632 - DNA, 15 bp, Homo sapiens
ctgcctcccaaagtg

SEQ ID NO: 1174633 - DNA, 15 bp, Homo sapiens
tctgcctcccaaagt

SEQ ID NO: 1174634 - DNA, 15 bp, Homo sapiens
ctctgcctcccaaag

SEQ ID NO: 1174635 - DNA, 15 bp, Homo sapiens
cctctgcctcccaaa

SEQ ID NO: 1174636 - DNA, 15 bp, Homo sapiens
gcctctgcctcccaa

SEQ ID NO: 1174637 - DNA, 15 bp, Homo sapiens
cgcctctgcctccca

SEQ ID NO: 1174638 - DNA, 15 bp, Homo sapiens
ccgcctctgcctccc

SEQ ID NO: 1174639 - DNA, 15 bp, Homo sapiens
cccgcctctgcctcc

SEQ ID NO: 1174640 - DNA, 15 bp, Homo sapiens
gcccgcctctgcctc

SEQ ID NO: 1174641 - DNA, 15 bp, Homo sapiens
cgcccgcctctgcct

SEQ ID NO: 1174642 - DNA, 15 bp, Homo sapiens
ccgcccgcctctgcc

SEQ ID NO: 1174643 - DNA, 15 bp, Homo sapiens
tccgcccgcctctgc

SEQ ID NO: 1174644 - DNA, 15 bp, Homo sapiens
atccgcccgcctctg

SEQ ID NO: 1174645 - DNA, 15 bp, Homo sapiens
gatccgcccgcctct

SEQ ID NO: 1174646 - DNA, 15 bp, Homo sapiens
agtgatccgcccgcc

SEQ ID NO: 1174647 - DNA, 15 bp, Homo sapiens
aagtgatccgcccgc

SEQ ID NO: 1174648 - DNA, 15 bp, Homo sapiens
caagtgatccgcccg

SEQ ID NO: 1174649 - DNA, 15 bp, Homo sapiens
ttcctgacctcaagt

SEQ ID NO: 1174650 - DNA, 15 bp, Homo sapiens
attcctgacctcaag

SEQ ID NO: 1174651 - DNA, 15 bp, Homo sapiens
aattcctgacctcaa

SEQ ID NO: 1174652 - DNA, 15 bp, Homo sapiens
gaattcctgacctca

SEQ ID NO: 1174653 - DNA, 15 bp, Homo sapiens
cgaattcctgacctc

SEQ ID NO: 1174654 - DNA, 15 bp, Homo sapiens
tcgaattcctgacct

SEQ ID NO: 1174655 - DNA, 15 bp, Homo sapiens
ctcgaattcctgacc

SEQ ID NO: 1174656 - DNA, 15 bp, Homo sapiens
tctcgaattcctgac

SEQ ID NO: 1174657 - DNA, 15 bp, Homo sapiens
agccaggctggtctc

SEQ ID NO: 1174658 - DNA, 15 bp, Homo sapiens
catgttagccaggct

SEQ ID NO: 1174659 - DNA, 15 bp, Homo sapiens
ccatgttagccaggc

SEQ ID NO: 1174660 - DNA, 15 bp, Homo sapiens
gccatgttagccagg

SEQ ID NO: 1174661 - DNA, 15 bp, Homo sapiens
tgccatgttagccag

SEQ ID NO: 1174662 - DNA, 15 bp, Homo sapiens
ttgccatgttagcca

SEQ ID NO: 1174663 - DNA, 15 bp, Homo sapiens
tttgccatgttagcc

SEQ ID NO: 1174664 - DNA, 15 bp, Homo sapiens
ttttgccatgttagc

SEQ ID NO: 1174665 - DNA, 15 bp, Homo sapiens
gttttgccatgttag

SEQ ID NO: 1174666 - DNA, 15 bp, Homo sapiens
ggttttgccatgtta

SEQ ID NO: 1174667 - DNA, 15 bp, Homo sapiens
cgggttttgccatgt

SEQ ID NO: 1174668 - DNA, 15 bp, Homo sapiens
acgggttttgccatg

SEQ ID NO: 1174669 - DNA, 15 bp, Homo sapiens
gacgggttttgccat

SEQ ID NO: 1174670 - DNA, 15 bp, Homo sapiens
agacgggttttgcca

SEQ ID NO: 1174671 - DNA, 15 bp, Homo sapiens
gagacgggttttgcc

SEQ ID NO: 1174672 - DNA, 15 bp, Homo sapiens
agagacgggttttgc

SEQ ID NO: 1174673 - DNA, 15 bp, Homo sapiens
tagagacgggttttg

SEQ ID NO: 1174674 - DNA, 15 bp, Homo sapiens
gtagagacgggtttt

SEQ ID NO: 1174675 - DNA, 15 bp, Homo sapiens
agtagagacgggttt

SEQ ID NO: 1174676 - DNA, 15 bp, Homo sapiens
tagtagagacgggtt

SEQ ID NO: 1174677 - DNA, 15 bp, Homo sapiens
ttagtagagacgggt

SEQ ID NO: 1174678 - DNA, 15 bp, Homo sapiens
tttttgcatttttag

SEQ ID NO: 1174679 - DNA, 15 bp, Homo sapiens
ttttttgcattttta

SEQ ID NO: 1174680 - DNA, 15 bp, Homo sapiens
tttttttgcattttt

SEQ ID NO: 1174681 - DNA, 15 bp, Homo sapiens
ttttttttgcatttt

SEQ ID NO: 1174682 - DNA, 15 bp, Homo sapiens
tttttttttgcattt

SEQ ID NO: 1174683 - DNA, 15 bp, Homo sapiens
ttttttttttgcatt

SEQ ID NO: 1174684 - DNA, 15 bp, Homo sapiens
attttttttttgcat

SEQ ID NO: 1174685 - DNA, 15 bp, Homo sapiens
aattttttttttgca

SEQ ID NO: 1174686 - DNA, 15 bp, Homo sapiens
taattttttttttgc

SEQ ID NO: 1174687 - DNA, 15 bp, Homo sapiens
ctaattttttttttg

SEQ ID NO: 1174688 - DNA, 15 bp, Homo sapiens
gctaatttttttttt

SEQ ID NO: 1174689 - DNA, 15 bp, Homo sapiens
ggctaattttttttt

SEQ ID NO: 1174690 - DNA, 15 bp, Homo sapiens
tggctaatttttttt

SEQ ID NO: 1174691 - DNA, 15 bp, Homo sapiens
ctggctaattttttt

SEQ ID NO: 1174692 - DNA, 15 bp, Homo sapiens
ggcctggctaatttt

SEQ ID NO: 1174693 - DNA, 15 bp, Homo sapiens
aggcctggctaattt

SEQ ID NO: 1174694 - DNA, 15 bp, Homo sapiens
caggcctggctaatt

SEQ ID NO: 1174695 - DNA, 15 bp, Homo sapiens
ccaggcctggctaat

SEQ ID NO: 1174696 - DNA, 15 bp, Homo sapiens
accaggcctggctaa

SEQ ID NO: 1174697 - DNA, 15 bp, Homo sapiens
gccaccaggcctggc

SEQ ID NO: 1174698 - DNA, 15 bp, Homo sapiens
tgccaccaggcctgg

SEQ ID NO: 1174699 - DNA, 15 bp, Homo sapiens
ctgccaccaggcctg

SEQ ID NO: 1174700 - DNA, 15 bp, Homo sapiens
cctgccaccaggcct

SEQ ID NO: 1174701 - DNA, 15 bp, Homo sapiens
acctgccaccaggcc

SEQ ID NO: 1174702 - DNA, 15 bp, Homo sapiens
cacctgccaccaggc

SEQ ID NO: 1174703 - DNA, 15 bp, Homo sapiens
gcacctgccaccagg

SEQ ID NO: 1174704 - DNA, 15 bp, Homo sapiens
ggcacctgccaccag

SEQ ID NO: 1174705 - DNA, 15 bp, Homo sapiens
ggattacaggcacct

SEQ ID NO: 1174706 - DNA, 15 bp, Homo sapiens
ggattctcctgcctc

SEQ ID NO: 1174707 - DNA, 15 bp, Homo sapiens
gggattctcctgcct

SEQ ID NO: 1174708 - DNA, 15 bp, Homo sapiens
agggattctcctgcc

SEQ ID NO: 1174709 - DNA, 15 bp, Homo sapiens
aagggattctcctgc

SEQ ID NO: 1174710 - DNA, 15 bp, Homo sapiens
caagggattctcctg

SEQ ID NO: 1174711 - DNA, 15 bp, Homo sapiens
aggttcaagggattc

SEQ ID NO: 1174712 - DNA, 15 bp, Homo sapiens
caggttcaagggatt

SEQ ID NO: 1174713 - DNA, 15 bp, Homo sapiens
ccaggttcaagggat

SEQ ID NO: 1174714 - DNA, 15 bp, Homo sapiens
cccaggttcaaggga

SEQ ID NO: 1174715 - DNA, 15 bp, Homo sapiens
tcccaggttcaaggg

SEQ ID NO: 1174716 - DNA, 15 bp, Homo sapiens
acaacctccacctcc

SEQ ID NO: 1174717 - DNA, 15 bp, Homo sapiens
tacaacctccacctc

SEQ ID NO: 1174718 - DNA, 15 bp, Homo sapiens
ctacaacctccacct

SEQ ID NO: 1174719 - DNA, 15 bp, Homo sapiens
actacaacctccacc

SEQ ID NO: 1174720 - DNA, 15 bp, Homo sapiens
cactacaacctccac

SEQ ID NO: 1174721 - DNA, 15 bp, Homo sapiens
tcactacaacctcca

SEQ ID NO: 1174722 - DNA, 15 bp, Homo sapiens
ctcactacaacctcc

SEQ ID NO: 1174723 - DNA, 15 bp, Homo sapiens
tggctcactacaacc

SEQ ID NO: 1174724 - DNA, 15 bp, Homo sapiens
ttggctcactacaac

SEQ ID NO: 1174725 - DNA, 15 bp, Homo sapiens
cttggctcactacaa

SEQ ID NO: 1174726 - DNA, 15 bp, Homo sapiens
tcttggctcactaca

SEQ ID NO: 1174727 - DNA, 15 bp, Homo sapiens
atcttggctcactac

SEQ ID NO: 1174728 - DNA, 15 bp, Homo sapiens
aatcttggctcacta

SEQ ID NO: 1174729 - DNA, 15 bp, Homo sapiens
ctgcccaggctagag

SEQ ID NO: 1174730 - DNA, 15 bp, Homo sapiens
gctgcccaggctaga

SEQ ID NO: 1174731 - DNA, 15 bp, Homo sapiens
ctgctgcccaggcta

SEQ ID NO: 1174732 - DNA, 15 bp, Homo sapiens
actgctgcccaggct

SEQ ID NO: 1174733 - DNA, 15 bp, Homo sapiens
cactgctgcccaggc

SEQ ID NO: 1174734 - DNA, 15 bp, Homo sapiens
tcactgctgcccagg

SEQ ID NO: 1174735 - DNA, 15 bp, Homo sapiens
ctcactgctgcccag

SEQ ID NO: 1174736 - DNA, 15 bp, Homo sapiens
tctcactgctgccca

SEQ ID NO: 1174737 - DNA, 15 bp, Homo sapiens
gtctcactgctgccc

SEQ ID NO: 1174738 - DNA, 15 bp, Homo sapiens
agtctcactgctgcc

SEQ ID NO: 1174739 - DNA, 15 bp, Homo sapiens
gagtctcactgctgc

SEQ ID NO: 1174740 - DNA, 15 bp, Homo sapiens
ggagtctcactgctg

SEQ ID NO: 1174741 - DNA, 15 bp, Homo sapiens
tggagtctcactgct

SEQ ID NO: 1174742 - DNA, 15 bp, Homo sapiens
atggagtctcactgc

SEQ ID NO: 1174743 - DNA, 15 bp, Homo sapiens
aagatggagtctcac

SEQ ID NO: 1174744 - DNA, 15 bp, Homo sapiens
taagatggagtctca

SEQ ID NO: 1174745 - DNA, 15 bp, Homo sapiens
ctcttcttttttttt

SEQ ID NO: 1174746 - DNA, 15 bp, Homo sapiens
cctcttctttttttt

SEQ ID NO: 1174747 - DNA, 15 bp, Homo sapiens
tcctcttcttttttt

SEQ ID NO: 1174748 - DNA, 15 bp, Homo sapiens
ttcctcttctttttt

SEQ ID NO: 1174749 - DNA, 15 bp, Homo sapiens
attcctcttcttttt

SEQ ID NO: 1174750 - DNA, 15 bp, Homo sapiens
aattcctcttctttt

SEQ ID NO: 1174751 - DNA, 15 bp, Homo sapiens
gaattcctcttcttt

SEQ ID NO: 1174752 - DNA, 15 bp, Homo sapiens
ggaattcctcttctt

SEQ ID NO: 1174753 - DNA, 15 bp, Homo sapiens
gggaattcctcttct

SEQ ID NO: 1174754 - DNA, 15 bp, Homo sapiens
tgggaattcctcttc

SEQ ID NO: 1174755 - DNA, 15 bp, Homo sapiens
tctgggaattcctct

SEQ ID NO: 1174756 - DNA, 15 bp, Homo sapiens
gtctgggaattcctc

SEQ ID NO: 1174757 - DNA, 15 bp, Homo sapiens
agtctgggaattcct

SEQ ID NO: 1174758 - DNA, 15 bp, Homo sapiens
cagtctgggaattcc

SEQ ID NO: 1174759 - DNA, 15 bp, Homo sapiens
acagtctgggaattc

SEQ ID NO: 1174760 - DNA, 15 bp, Homo sapiens
gacagtctgggaatt

SEQ ID NO: 1174761 - DNA, 15 bp, Homo sapiens
agacagtctgggaat

SEQ ID NO: 1174762 - DNA, 15 bp, Homo sapiens
gagacagtctgggaa

SEQ ID NO: 1174763 - DNA, 15 bp, Homo sapiens
tgagacagtctggga

SEQ ID NO: 1174764 - DNA, 15 bp, Homo sapiens
ctgagacagtctggg

SEQ ID NO: 1174765 - DNA, 15 bp, Homo sapiens
actgagacagtctgg

SEQ ID NO: 1174766 - DNA, 15 bp, Homo sapiens
gactgagacagtctg

SEQ ID NO: 1174767 - DNA, 15 bp, Homo sapiens
ggactgagacagtct

SEQ ID NO: 1174768 - DNA, 15 bp, Homo sapiens
tggactgagacagtc

SEQ ID NO: 1174769 - DNA, 15 bp, Homo sapiens
gtggactgagacagt

SEQ ID NO: 1174770 - DNA, 15 bp, Homo sapiens
agtggactgagacag

SEQ ID NO: 1174771 - DNA, 15 bp, Homo sapiens
gagtggactgagaca

SEQ ID NO: 1174772 - DNA, 15 bp, Homo sapiens
tgagtggactgagac

SEQ ID NO: 1174773 - DNA, 15 bp, Homo sapiens
ctgagtggactgaga

SEQ ID NO: 1174774 - DNA, 15 bp, Homo sapiens
cctgagtggactgag

SEQ ID NO: 1174775 - DNA, 15 bp, Homo sapiens
gcctgagtggactga

SEQ ID NO: 1174776 - DNA, 15 bp, Homo sapiens
agcctgagtggactg

SEQ ID NO: 1174777 - DNA, 15 bp, Homo sapiens
cagcctgagtggact

SEQ ID NO: 1174778 - DNA, 15 bp, Homo sapiens
gcagcctgagtggac

SEQ ID NO: 1174779 - DNA, 15 bp, Homo sapiens
agcagcctgagtgga

SEQ ID NO: 1174780 - DNA, 15 bp, Homo sapiens
tagcagcctgagtgg

SEQ ID NO: 1174781 - DNA, 15 bp, Homo sapiens
gtagcagcctgagtg

SEQ ID NO: 1174782 - DNA, 15 bp, Homo sapiens
tgtagcagcctgagt

SEQ ID NO: 1174783 - DNA, 15 bp, Homo sapiens
ttgtagcagcctgag

SEQ ID NO: 1174784 - DNA, 15 bp, Homo sapiens
gttgtagcagcctga

SEQ ID NO: 1174785 - DNA, 15 bp, Homo sapiens
tgttgtagcagcctg

SEQ ID NO: 1174786 - DNA, 15 bp, Homo sapiens
ttgttgtagcagcct

SEQ ID NO: 1174787 - DNA, 15 bp, Homo sapiens
tttgttgtagcagcc

SEQ ID NO: 1174788 - DNA, 15 bp, Homo sapiens
ttttgttgtagcagc

SEQ ID NO: 1174789 - DNA, 15 bp, Homo sapiens
attttgttgtagcag

SEQ ID NO: 1174790 - DNA, 15 bp, Homo sapiens
tattttgttgtagca

SEQ ID NO: 1174791 - DNA, 15 bp, Homo sapiens
gtattttgttgtagc

SEQ ID NO: 1174792 - DNA, 15 bp, Homo sapiens
ggtattttgttgtag

SEQ ID NO: 1174793 - DNA, 15 bp, Homo sapiens
tggtattttgttgta

SEQ ID NO: 1174794 - DNA, 15 bp, Homo sapiens
atggtattttgttgt

SEQ ID NO: 1174795 - DNA, 15 bp, Homo sapiens
tatggtattttgttg

SEQ ID NO: 1174796 - DNA, 15 bp, Homo sapiens
gtctatggtattttg

SEQ ID NO: 1174797 - DNA, 15 bp, Homo sapiens
agtctatggtatttt

SEQ ID NO: 1174798 - DNA, 15 bp, Homo sapiens
cagtctatggtattt

SEQ ID NO: 1174799 - DNA, 15 bp, Homo sapiens
ccagtctatggtatt

SEQ ID NO: 1174800 - DNA, 15 bp, Homo sapiens
cccagtctatggtat

SEQ ID NO: 1174801 - DNA, 15 bp, Homo sapiens
acccagtctatggta

SEQ ID NO: 1174802 - DNA, 15 bp, Homo sapiens
cacccagtctatggt

SEQ ID NO: 1174803 - DNA, 15 bp, Homo sapiens
ccacccagtctatgg

SEQ ID NO: 1174804 - DNA, 15 bp, Homo sapiens
gccacccagtctatg

SEQ ID NO: 1174805 - DNA, 15 bp, Homo sapiens
agccacccagtctat

SEQ ID NO: 1174806 - DNA, 15 bp, Homo sapiens
aagccacccagtcta

SEQ ID NO: 1174807 - DNA, 15 bp, Homo sapiens
taagccacccagtct

SEQ ID NO: 1174808 - DNA, 15 bp, Homo sapiens
ataagccacccagtc

SEQ ID NO: 1174809 - DNA, 15 bp, Homo sapiens
tataagccacccagt

SEQ ID NO: 1174810 - DNA, 15 bp, Homo sapiens
ttataagccacccag

SEQ ID NO: 1174811 - DNA, 15 bp, Homo sapiens
tttataagccaccca

SEQ ID NO: 1174812 - DNA, 15 bp, Homo sapiens
ttttataagccaccc

SEQ ID NO: 1174813 - DNA, 15 bp, Homo sapiens
tttttataagccacc

SEQ ID NO: 1174814 - DNA, 15 bp, Homo sapiens
ctttttataagccac

SEQ ID NO: 1174815 - DNA, 15 bp, Homo sapiens
gctttttataagcca

SEQ ID NO: 1174816 - DNA, 15 bp, Homo sapiens
tgctttttataagcc

SEQ ID NO: 1174817 - DNA, 15 bp, Homo sapiens
ctgctttttataagc

SEQ ID NO: 1174818 - DNA, 15 bp, Homo sapiens
tctgctttttataag

SEQ ID NO: 1174819 - DNA, 15 bp, Homo sapiens
ttctgctttttataa

SEQ ID NO: 1174820 - DNA, 15 bp, Homo sapiens
tttctgctttttata

SEQ ID NO: 1174821 - DNA, 15 bp, Homo sapiens
atttctgctttttat

SEQ ID NO: 1174822 - DNA, 15 bp, Homo sapiens
aatttctgcttttta

SEQ ID NO: 1174823 - DNA, 15 bp, Homo sapiens
aaatttctgcttttt

SEQ ID NO: 1174824 - DNA, 15 bp, Homo sapiens
aaaatttctgctttt

SEQ ID NO: 1174825 - DNA, 15 bp, Homo sapiens
aaaaatttctgcttt

SEQ ID NO: 1174826 - DNA, 15 bp, Homo sapiens
aaaaaatttctgctt

SEQ ID NO: 1174827 - DNA, 15 bp, Homo sapiens
aaaaaaatttctgct

SEQ ID NO: 1174828 - DNA, 15 bp, Homo sapiens
gaaaaaaatttctgc

SEQ ID NO: 1174829 - DNA, 15 bp, Homo sapiens
agaaaaaaatttctg

SEQ ID NO: 1174830 - DNA, 15 bp, Homo sapiens
gagaaaaaaatttct

SEQ ID NO: 1174831 - DNA, 15 bp, Homo sapiens
tgagaaaaaaatttc

SEQ ID NO: 1174832 - DNA, 15 bp, Homo sapiens
gtgagaaaaaaattt

SEQ ID NO: 1174833 - DNA, 15 bp, Homo sapiens
tgtgagaaaaaaatt

SEQ ID NO: 1174834 - DNA, 15 bp, Homo sapiens
ctgtgagaaaaaaat

SEQ ID NO: 1174835 - DNA, 15 bp, Homo sapiens
actgtgagaaaaaaa

SEQ ID NO: 1174836 - DNA, 15 bp, Homo sapiens
aactgtgagaaaaaa

SEQ ID NO: 1174837 - DNA, 15 bp, Homo sapiens
gaactgtgagaaaaa

SEQ ID NO: 1174838 - DNA, 15 bp, Homo sapiens
agaactgtgagaaaa

SEQ ID NO: 1174839 - DNA, 15 bp, Homo sapiens
tagaactgtgagaaa

SEQ ID NO: 1174840 - DNA, 15 bp, Homo sapiens
ctagaactgtgagaa

SEQ ID NO: 1174841 - DNA, 15 bp, Homo sapiens
cctagaactgtgaga

SEQ ID NO: 1174842 - DNA, 15 bp, Homo sapiens
ccctagaactgtgag

SEQ ID NO: 1174843 - DNA, 15 bp, Homo sapiens
cccctagaactgtga

SEQ ID NO: 1174844 - DNA, 15 bp, Homo sapiens
gcccctagaactgtg

SEQ ID NO: 1174845 - DNA, 15 bp, Homo sapiens
agcccctagaactgt

SEQ ID NO: 1174846 - DNA, 15 bp, Homo sapiens
cagcccctagaactg

SEQ ID NO: 1174847 - DNA, 15 bp, Homo sapiens
ccagcccctagaact

SEQ ID NO: 1174848 - DNA, 15 bp, Homo sapiens
cccagcccctagaac

SEQ ID NO: 1174849 - DNA, 15 bp, Homo sapiens
tcccagcccctagaa

SEQ ID NO: 1174850 - DNA, 15 bp, Homo sapiens
ttcccagcccctaga

SEQ ID NO: 1174851 - DNA, 15 bp, Homo sapiens
cttcccagcccctag

SEQ ID NO: 1174852 - DNA, 15 bp, Homo sapiens
acttcccagccccta

SEQ ID NO: 1174853 - DNA, 15 bp, Homo sapiens
gacttcccagcccct

SEQ ID NO: 1174854 - DNA, 15 bp, Homo sapiens
ggacttcccagcccc

SEQ ID NO: 1174855 - DNA, 15 bp, Homo sapiens
cggacttcccagccc

SEQ ID NO: 1174856 - DNA, 15 bp, Homo sapiens
tcggacttcccagcc

SEQ ID NO: 1174857 - DNA, 15 bp, Homo sapiens
ctcggacttcccagc

SEQ ID NO: 1174858 - DNA, 15 bp, Homo sapiens
tctcggacttcccag

SEQ ID NO: 1174859 - DNA, 15 bp, Homo sapiens
atctcggacttccca

SEQ ID NO: 1174860 - DNA, 15 bp, Homo sapiens
gatctcggacttccc

SEQ ID NO: 1174861 - DNA, 15 bp, Homo sapiens
tgatctcggacttcc

SEQ ID NO: 1174862 - DNA, 15 bp, Homo sapiens
ttgatctcggacttc

SEQ ID NO: 1174863 - DNA, 15 bp, Homo sapiens
cttgatctcggactt

SEQ ID NO: 1174864 - DNA, 15 bp, Homo sapiens
ccttgatctcggact

SEQ ID NO: 1174865 - DNA, 15 bp, Homo sapiens
cccttgatctcggac

SEQ ID NO: 1174866 - DNA, 15 bp, Homo sapiens
ccccttgatctcgga

SEQ ID NO: 1174867 - DNA, 15 bp, Homo sapiens
cccccttgatctcgg

SEQ ID NO: 1174868 - DNA, 15 bp, Homo sapiens
acccccttgatctcg

SEQ ID NO: 1174869 - DNA, 15 bp, Homo sapiens
gacccccttgatctc

SEQ ID NO: 1174870 - DNA, 15 bp, Homo sapiens
tgacccccttgatct

SEQ ID NO: 1174871 - DNA, 15 bp, Homo sapiens
ttgacccccttgatc

SEQ ID NO: 1174872 - DNA, 15 bp, Homo sapiens
gttgacccccttgat

SEQ ID NO: 1174873 - DNA, 15 bp, Homo sapiens
tgttgacccccttga

SEQ ID NO: 1174874 - DNA, 15 bp, Homo sapiens
ctgttgacccccttg

SEQ ID NO: 1174875 - DNA, 15 bp, Homo sapiens
tctgttgaccccctt

SEQ ID NO: 1174876 - DNA, 15 bp, Homo sapiens
atctgttgaccccct

SEQ ID NO: 1174877 - DNA, 15 bp, Homo sapiens
aatctgttgaccccc

SEQ ID NO: 1174878 - DNA, 15 bp, Homo sapiens
gaatctgttgacccc

SEQ ID NO: 1174879 - DNA, 15 bp, Homo sapiens
tgaatctgttgaccc

SEQ ID NO: 1174880 - DNA, 15 bp, Homo sapiens
ctgaatctgttgacc

SEQ ID NO: 1174881 - DNA, 15 bp, Homo sapiens
actgaatctgttgac

SEQ ID NO: 1174882 - DNA, 15 bp, Homo sapiens
cactgaatctgttga

SEQ ID NO: 1174883 - DNA, 15 bp, Homo sapiens
acactgaatctgttg

SEQ ID NO: 1174884 - DNA, 15 bp, Homo sapiens
gacactgaatctgtt

SEQ ID NO: 1174885 - DNA, 15 bp, Homo sapiens
agacactgaatctgt

SEQ ID NO: 1174886 - DNA, 15 bp, Homo sapiens
cagacactgaatctg

SEQ ID NO: 1174887 - DNA, 15 bp, Homo sapiens
ccagacactgaatct

SEQ ID NO: 1174888 - DNA, 15 bp, Homo sapiens
accagacactgaatc

SEQ ID NO: 1174889 - DNA, 15 bp, Homo sapiens
caccagacactgaat

SEQ ID NO: 1174890 - DNA, 15 bp, Homo sapiens
tcaccagacactgaa

SEQ ID NO: 1174891 - DNA, 15 bp, Homo sapiens
ctcaccagacactga

SEQ ID NO: 1174892 - DNA, 15 bp, Homo sapiens
cctcaccagacactg

SEQ ID NO: 1174893 - DNA, 15 bp, Homo sapiens
ccctcaccagacact

SEQ ID NO: 1174894 - DNA, 15 bp, Homo sapiens
tccctcaccagacac

SEQ ID NO: 1174895 - DNA, 15 bp, Homo sapiens
ctccctcaccagaca

SEQ ID NO: 1174896 - DNA, 15 bp, Homo sapiens
tctccctcaccagac

SEQ ID NO: 1174897 - DNA, 15 bp, Homo sapiens
gtctccctcaccaga

SEQ ID NO: 1174898 - DNA, 15 bp, Homo sapiens
agtctccctcaccag

SEQ ID NO: 1174899 - DNA, 15 bp, Homo sapiens
aagtctccctcacca

SEQ ID NO: 1174900 - DNA, 15 bp, Homo sapiens
gaagtctccctcacc

SEQ ID NO: 1174901 - DNA, 15 bp, Homo sapiens
ggaagtctccctcac

SEQ ID NO: 1174902 - DNA, 15 bp, Homo sapiens
aggaagtctccctca

SEQ ID NO: 1174903 - DNA, 15 bp, Homo sapiens
gaggaagtctccctc

SEQ ID NO: 1174904 - DNA, 15 bp, Homo sapiens
ggaggaagtctccct

SEQ ID NO: 1174905 - DNA, 15 bp, Homo sapiens
aggaggaagtctccc

SEQ ID NO: 1174906 - DNA, 15 bp, Homo sapiens
taggaggaagtctcc

SEQ ID NO: 1174907 - DNA, 15 bp, Homo sapiens
ctaggaggaagtctc

SEQ ID NO: 1174908 - DNA, 15 bp, Homo sapiens
tctaggaggaagtct

SEQ ID NO: 1174909 - DNA, 15 bp, Homo sapiens
gtctaggaggaagtc

SEQ ID NO: 1174910 - DNA, 15 bp, Homo sapiens
tgtctaggaggaagt

SEQ ID NO: 1174911 - DNA, 15 bp, Homo sapiens
ctgtctaggaggaag

SEQ ID NO: 1174912 - DNA, 15 bp, Homo sapiens
gctgtctaggaggaa

SEQ ID NO: 1174913 - DNA, 15 bp, Homo sapiens
ggctgtctaggagga

SEQ ID NO: 1174914 - DNA, 15 bp, Homo sapiens
tggctgtctaggagg

SEQ ID NO: 1174915 - DNA, 15 bp, Homo sapiens
atggctgtctaggag

SEQ ID NO: 1174916 - DNA, 15 bp, Homo sapiens
aatggctgtctagga

SEQ ID NO: 1174917 - DNA, 15 bp, Homo sapiens
aaatggctgtctagg

SEQ ID NO: 1174918 - DNA, 15 bp, Homo sapiens
aaaatggctgtctag

SEQ ID NO: 1174919 - DNA, 15 bp, Homo sapiens
gaaaatggctgtcta

SEQ ID NO: 1174920 - DNA, 15 bp, Homo sapiens
agaaaatggctgtct

SEQ ID NO: 1174921 - DNA, 15 bp, Homo sapiens
gagaaaatggctgtc

SEQ ID NO: 1174922 - DNA, 15 bp, Homo sapiens
tgagaaaatggctgt

SEQ ID NO: 1174923 - DNA, 15 bp, Homo sapiens
gtgagaaaatggctg

SEQ ID NO: 1174924 - DNA, 15 bp, Homo sapiens
ggtgagaaaatggct

SEQ ID NO: 1174925 - DNA, 15 bp, Homo sapiens
gggtgagaaaatggc

SEQ ID NO: 1174926 - DNA, 15 bp, Homo sapiens
agggtgagaaaatgg

SEQ ID NO: 1174927 - DNA, 15 bp, Homo sapiens
tagggtgagaaaatg

SEQ ID NO: 1174928 - DNA, 15 bp, Homo sapiens
ttagggtgagaaaat

SEQ ID NO: 1174929 - DNA, 15 bp, Homo sapiens
gttagggtgagaaaa

SEQ ID NO: 1174930 - DNA, 15 bp, Homo sapiens
ggttagggtgagaaa

SEQ ID NO: 1174931 - DNA, 15 bp, Homo sapiens
aggttagggtgagaa

SEQ ID NO: 1174932 - DNA, 15 bp, Homo sapiens
aaggttagggtgaga

SEQ ID NO: 1174933 - DNA, 15 bp, Homo sapiens
caaggttagggtgag

SEQ ID NO: 1174934 - DNA, 15 bp, Homo sapiens
gcaaggttagggtga

SEQ ID NO: 1174935 - DNA, 15 bp, Homo sapiens
tgcaaggttagggtg

SEQ ID NO: 1174936 - DNA, 15 bp, Homo sapiens
atgcaaggttagggt

SEQ ID NO: 1174937 - DNA, 15 bp, Homo sapiens
catgcaaggttaggg

SEQ ID NO: 1174938 - DNA, 15 bp, Homo sapiens
ccatgcaaggttagg

SEQ ID NO: 1174939 - DNA, 15 bp, Homo sapiens
gccatgcaaggttag

SEQ ID NO: 1174940 - DNA, 15 bp, Homo sapiens
tgccatgcaaggtta

SEQ ID NO: 1174941 - DNA, 15 bp, Homo sapiens
ctgccatgcaaggtt

SEQ ID NO: 1174942 - DNA, 15 bp, Homo sapiens
tctgccatgcaaggt

SEQ ID NO: 1174943 - DNA, 15 bp, Homo sapiens
ttctgccatgcaagg

SEQ ID NO: 1174944 - DNA, 15 bp, Homo sapiens
cttctgccatgcaag

SEQ ID NO: 1174945 - DNA, 15 bp, Homo sapiens
acttctgccatgcaa

SEQ ID NO: 1174946 - DNA, 15 bp, Homo sapiens
cacttctgccatgca

SEQ ID NO: 1174947 - DNA, 15 bp, Homo sapiens
ccacttctgccatgc

SEQ ID NO: 1174948 - DNA, 15 bp, Homo sapiens
cccacttctgccatg

SEQ ID NO: 1174949 - DNA, 15 bp, Homo sapiens
ccccacttctgccat

SEQ ID NO: 1174950 - DNA, 15 bp, Homo sapiens
tccccacttctgcca

SEQ ID NO: 1174951 - DNA, 15 bp, Homo sapiens
ctccccacttctgcc

SEQ ID NO: 1174952 - DNA, 15 bp, Homo sapiens
cctccccacttctgc

SEQ ID NO: 1174953 - DNA, 15 bp, Homo sapiens
ccctccccacttctg

SEQ ID NO: 1174954 - DNA, 15 bp, Homo sapiens
cccctccccacttct

SEQ ID NO: 1174955 - DNA, 15 bp, Homo sapiens
acccctccccacttc

SEQ ID NO: 1174956 - DNA, 15 bp, Homo sapiens
gacccctccccactt

SEQ ID NO: 1174957 - DNA, 15 bp, Homo sapiens
agacccctccccact

SEQ ID NO: 1174958 - DNA, 15 bp, Homo sapiens
gagacccctccccac

SEQ ID NO: 1174959 - DNA, 15 bp, Homo sapiens
agagacccctcccca

SEQ ID NO: 1174960 - DNA, 15 bp, Homo sapiens
cagagacccctcccc

SEQ ID NO: 1174961 - DNA, 15 bp, Homo sapiens
tcagagacccctccc

SEQ ID NO: 1174962 - DNA, 15 bp, Homo sapiens
ctcagagacccctcc

SEQ ID NO: 1174963 - DNA, 15 bp, Homo sapiens
cctcagagacccctc

SEQ ID NO: 1174964 - DNA, 15 bp, Homo sapiens
gcctcagagacccct

SEQ ID NO: 1174965 - DNA, 15 bp, Homo sapiens
tgcctcagagacccc

SEQ ID NO: 1174966 - DNA, 15 bp, Homo sapiens
atgcctcagagaccc

SEQ ID NO: 1174967 - DNA, 15 bp, Homo sapiens
aatgcctcagagacc

SEQ ID NO: 1174968 - DNA, 15 bp, Homo sapiens
gaatgcctcagagac

SEQ ID NO: 1174969 - DNA, 15 bp, Homo sapiens
tgaatgcctcagaga

SEQ ID NO: 1174970 - DNA, 15 bp, Homo sapiens
atgaatgcctcagag

SEQ ID NO: 1174971 - DNA, 15 bp, Homo sapiens
gatgaatgcctcaga

SEQ ID NO: 1174972 - DNA, 15 bp, Homo sapiens
agatgaatgcctcag

SEQ ID NO: 1174973 - DNA, 15 bp, Homo sapiens
cagatgaatgcctca

SEQ ID NO: 1174974 - DNA, 15 bp, Homo sapiens
tcagatgaatgcctc

SEQ ID NO: 1174975 - DNA, 15 bp, Homo sapiens
ttcagatgaatgcct

SEQ ID NO: 1174976 - DNA, 15 bp, Homo sapiens
attcagatgaatgcc

SEQ ID NO: 1174977 - DNA, 15 bp, Homo sapiens
aattcagatgaatgc

SEQ ID NO: 1174978 - DNA, 15 bp, Homo sapiens
caattcagatgaatg

SEQ ID NO: 1174979 - DNA, 15 bp, Homo sapiens
acaattcagatgaat

SEQ ID NO: 1174980 - DNA, 15 bp, Homo sapiens
tacaattcagatgaa

SEQ ID NO: 1174981 - DNA, 15 bp, Homo sapiens
ttacaattcagatga

SEQ ID NO: 1174982 - DNA, 15 bp, Homo sapiens
cttacaattcagatg

SEQ ID NO: 1174983 - DNA, 15 bp, Homo sapiens
tcttacaattcagat

SEQ ID NO: 1174984 - DNA, 15 bp, Homo sapiens
ctcttacaattcaga

SEQ ID NO: 1174985 - DNA, 15 bp, Homo sapiens
gctcttacaattcag

SEQ ID NO: 1174986 - DNA, 15 bp, Homo sapiens
agctcttacaattca

SEQ ID NO: 1174987 - DNA, 15 bp, Homo sapiens
gagctcttacaattc

SEQ ID NO: 1174988 - DNA, 15 bp, Homo sapiens
agagctcttacaatt

SEQ ID NO: 1174989 - DNA, 15 bp, Homo sapiens
gagagctcttacaat

SEQ ID NO: 1174990 - DNA, 15 bp, Homo sapiens
ggagagctcttacaa

SEQ ID NO: 1174991 - DNA, 15 bp, Homo sapiens
tggagagctcttaca

SEQ ID NO: 1174992 - DNA, 15 bp, Homo sapiens
atggagagctcttac

SEQ ID NO: 1174993 - DNA, 15 bp, Homo sapiens
tatggagagctctta

SEQ ID NO: 1174994 - DNA, 15 bp, Homo sapiens
ttatggagagctctt

SEQ ID NO: 1174995 - DNA, 15 bp, Homo sapiens
gttatggagagctct

SEQ ID NO: 1174996 - DNA, 15 bp, Homo sapiens
ggttatggagagctc

SEQ ID NO: 1174997 - DNA, 15 bp, Homo sapiens
aggttatggagagct

SEQ ID NO: 1174998 - DNA, 15 bp, Homo sapiens
taggttatggagagc

SEQ ID NO: 1174999 - DNA, 15 bp, Homo sapiens
ttaggttatggagag

SEQ ID NO: 1175000 - DNA, 15 bp, Homo sapiens
attaggttatggaga

SEQ ID NO: 1175001 - DNA, 15 bp, Homo sapiens
gattaggttatggag

SEQ ID NO: 1175002 - DNA, 15 bp, Homo sapiens
tgattaggttatgga

SEQ ID NO: 1175003 - DNA, 15 bp, Homo sapiens
atgattaggttatgg

SEQ ID NO: 1175004 - DNA, 15 bp, Homo sapiens
gatgattaggttatg

SEQ ID NO: 1175005 - DNA, 15 bp, Homo sapiens
agatgattaggttat

SEQ ID NO: 1175006 - DNA, 15 bp, Homo sapiens
gagatgattaggtta

SEQ ID NO: 1175007 - DNA, 15 bp, Homo sapiens
ggagatgattaggtt

SEQ ID NO: 1175008 - DNA, 15 bp, Homo sapiens
gggagatgattaggt

SEQ ID NO: 1175009 - DNA, 15 bp, Homo sapiens
tgggagatgattagg

SEQ ID NO: 1175010 - DNA, 15 bp, Homo sapiens
ttgggagatgattag

SEQ ID NO: 1175011 - DNA, 15 bp, Homo sapiens
attgggagatgatta

SEQ ID NO: 1175012 - DNA, 15 bp, Homo sapiens
tattgggagatgatt

SEQ ID NO: 1175013 - DNA, 15 bp, Homo sapiens
atattgggagatgat

SEQ ID NO: 1175014 - DNA, 15 bp, Homo sapiens
gatattgggagatga

SEQ ID NO: 1175015 - DNA, 15 bp, Homo sapiens
tgatattgggagatg

SEQ ID NO: 1175016 - DNA, 15 bp, Homo sapiens
gtgatattgggagat

SEQ ID NO: 1175017 - DNA, 15 bp, Homo sapiens
ggtgatattgggaga

SEQ ID NO: 1175018 - DNA, 15 bp, Homo sapiens
aggtgatattgggag

SEQ ID NO: 1175019 - DNA, 15 bp, Homo sapiens
gaggtgatattggga

SEQ ID NO: 1175020 - DNA, 15 bp, Homo sapiens
ggaggtgatattggg

SEQ ID NO: 1175021 - DNA, 15 bp, Homo sapiens
aggaggtgatattgg

SEQ ID NO: 1175022 - DNA, 15 bp, Homo sapiens
aaggaggtgatattg

SEQ ID NO: 1175023 - DNA, 15 bp, Homo sapiens
caaggaggtgatatt

SEQ ID NO: 1175024 - DNA, 15 bp, Homo sapiens
gcaaggaggtgatat

SEQ ID NO: 1175025 - DNA, 15 bp, Homo sapiens
tgcaaggaggtgata

SEQ ID NO: 1175026 - DNA, 15 bp, Homo sapiens
atgcaaggaggtgat

SEQ ID NO: 1175027 - DNA, 15 bp, Homo sapiens
catgcaaggaggtga

SEQ ID NO: 1175028 - DNA, 15 bp, Homo sapiens
gcatgcaaggaggtg

SEQ ID NO: 1175029 - DNA, 15 bp, Homo sapiens
ggcatgcaaggaggt

SEQ ID NO: 1175030 - DNA, 15 bp, Homo sapiens
gggcatgcaaggagg

SEQ ID NO: 1175031 - DNA, 15 bp, Homo sapiens
ggggcatgcaaggag

SEQ ID NO: 1175032 - DNA, 15 bp, Homo sapiens
tggggcatgcaagga

SEQ ID NO: 1175033 - DNA, 15 bp, Homo sapiens
gtggggcatgcaagg

SEQ ID NO: 1175034 - DNA, 15 bp, Homo sapiens
ggtggggcatgcaag

SEQ ID NO: 1175035 - DNA, 15 bp, Homo sapiens
aggtggggcatgcaa

SEQ ID NO: 1175036 - DNA, 15 bp, Homo sapiens
gaggtggggcatgca

SEQ ID NO: 1175037 - DNA, 15 bp, Homo sapiens
cgaggtggggcatgc

SEQ ID NO: 1175038 - DNA, 15 bp, Homo sapiens
acgaggtggggcatg

SEQ ID NO: 1175039 - DNA, 15 bp, Homo sapiens
tacgaggtggggcat

SEQ ID NO: 1175040 - DNA, 15 bp, Homo sapiens
ttacgaggtggggca

SEQ ID NO: 1175041 - DNA, 15 bp, Homo sapiens
attacgaggtggggc

SEQ ID NO: 1175042 - DNA, 15 bp, Homo sapiens
tattacgaggtgggg

SEQ ID NO: 1175043 - DNA, 15 bp, Homo sapiens
atattacgaggtggg

SEQ ID NO: 1175044 - DNA, 15 bp, Homo sapiens
gatattacgaggtgg

SEQ ID NO: 1175045 - DNA, 15 bp, Homo sapiens
tgatattacgaggtg

SEQ ID NO: 1175046 - DNA, 15 bp, Homo sapiens
atgatattacgaggt

SEQ ID NO: 1175047 - DNA, 15 bp, Homo sapiens
tatgatattacgagg

SEQ ID NO: 1175048 - DNA, 15 bp, Homo sapiens
ttatgatattacgag

SEQ ID NO: 1175049 - DNA, 15 bp, Homo sapiens
attatgatattacga

SEQ ID NO: 1175050 - DNA, 15 bp, Homo sapiens
gattatgatattacg

SEQ ID NO: 1175051 - DNA, 15 bp, Homo sapiens
agattatgatattac

SEQ ID NO: 1175052 - DNA, 15 bp, Homo sapiens
aagattatgatatta

SEQ ID NO: 1175053 - DNA, 15 bp, Homo sapiens
ccaagattatgatat

SEQ ID NO: 1175054 - DNA, 15 bp, Homo sapiens
cccaagattatgata

SEQ ID NO: 1175055 - DNA, 15 bp, Homo sapiens
acccaagattatgat

SEQ ID NO: 1175056 - DNA, 15 bp, Homo sapiens
cacccaagattatga

SEQ ID NO: 1175057 - DNA, 15 bp, Homo sapiens
acacccaagattatg

SEQ ID NO: 1175058 - DNA, 15 bp, Homo sapiens
cacacccaagattat

SEQ ID NO: 1175059 - DNA, 15 bp, Homo sapiens
tcacacccaagatta

SEQ ID NO: 1175060 - DNA, 15 bp, Homo sapiens
ttcacacccaagatt

SEQ ID NO: 1175061 - DNA, 15 bp, Homo sapiens
cttcacacccaagat

SEQ ID NO: 1175062 - DNA, 15 bp, Homo sapiens
tcttcacacccaaga

SEQ ID NO: 1175063 - DNA, 15 bp, Homo sapiens
atcttcacacccaag

SEQ ID NO: 1175064 - DNA, 15 bp, Homo sapiens
aatcttcacacccaa

SEQ ID NO: 1175065 - DNA, 15 bp, Homo sapiens
aaatcttcacaccca

SEQ ID NO: 1175066 - DNA, 15 bp, Homo sapiens
gaaatcttcacaccc

SEQ ID NO: 1175067 - DNA, 15 bp, Homo sapiens
tgaaatcttcacacc

SEQ ID NO: 1175068 - DNA, 15 bp, Homo sapiens
ttgaaatcttcacac

SEQ ID NO: 1175069 - DNA, 15 bp, Homo sapiens
gttgaaatcttcaca

SEQ ID NO: 1175070 - DNA, 15 bp, Homo sapiens
tgttgaaatcttcac

SEQ ID NO: 1175071 - DNA, 15 bp, Homo sapiens
atgttgaaatcttca

SEQ ID NO: 1175072 - DNA, 15 bp, Homo sapiens
tatgttgaaatcttc

SEQ ID NO: 1175073 - DNA, 15 bp, Homo sapiens
atatgttgaaatctt

SEQ ID NO: 1175074 - DNA, 15 bp, Homo sapiens
catatgttgaaatct

SEQ ID NO: 1175075 - DNA, 15 bp, Homo sapiens
tcatatgttgaaatc

SEQ ID NO: 1175076 - DNA, 15 bp, Homo sapiens
ttcatatgttgaaat

SEQ ID NO: 1175077 - DNA, 15 bp, Homo sapiens
attcatatgttgaaa

SEQ ID NO: 1175078 - DNA, 15 bp, Homo sapiens
aattcatatgttgaa

SEQ ID NO: 1175079 - DNA, 15 bp, Homo sapiens
aaattcatatgttga

SEQ ID NO: 1175080 - DNA, 15 bp, Homo sapiens
aaaattcatatgttg

SEQ ID NO: 1175081 - DNA, 15 bp, Homo sapiens
taaaattcatatgtt

SEQ ID NO: 1175082 - DNA, 15 bp, Homo sapiens
ctaaaattcatatgt

SEQ ID NO: 1175083 - DNA, 15 bp, Homo sapiens
cctaaaattcatatg

SEQ ID NO: 1175084 - DNA, 15 bp, Homo sapiens
ccctaaaattcatat

SEQ ID NO: 1175085 - DNA, 15 bp, Homo sapiens
tccctaaaattcata

SEQ ID NO: 1175086 - DNA, 15 bp, Homo sapiens
ctccctaaaattcat

SEQ ID NO: 1175087 - DNA, 15 bp, Homo sapiens
tctccctaaaattca

SEQ ID NO: 1175088 - DNA, 15 bp, Homo sapiens
gtctccctaaaattc

SEQ ID NO: 1175089 - DNA, 15 bp, Homo sapiens
tgtctccctaaaatt

SEQ ID NO: 1175090 - DNA, 15 bp, Homo sapiens
atgtctccctaaaat

SEQ ID NO: 1175091 - DNA, 15 bp, Homo sapiens
tatgtctccctaaaa

SEQ ID NO: 1175092 - DNA, 15 bp, Homo sapiens
ttatgtctccctaaa

SEQ ID NO: 1175093 - DNA, 15 bp, Homo sapiens
tttatgtctccctaa

SEQ ID NO: 1175094 - DNA, 15 bp, Homo sapiens
gtttatgtctcccta

SEQ ID NO: 1175095 - DNA, 15 bp, Homo sapiens
tgtttatgtctccct

SEQ ID NO: 1175096 - DNA, 15 bp, Homo sapiens
atgtttatgtctccc

SEQ ID NO: 1175097 - DNA, 15 bp, Homo sapiens
aatgtttatgtctcc

SEQ ID NO: 1175098 - DNA, 15 bp, Homo sapiens
caatgtttatgtctc

SEQ ID NO: 1175099 - DNA, 15 bp, Homo sapiens
tcaatgtttatgtct

SEQ ID NO: 1175100 - DNA, 15 bp, Homo sapiens
ctcaatgtttatgtc

SEQ ID NO: 1175101 - DNA, 15 bp, Homo sapiens
tctcaatgtttatgt

SEQ ID NO: 1175102 - DNA, 15 bp, Homo sapiens
gtctcaatgtttatg

SEQ ID NO: 1175103 - DNA, 15 bp, Homo sapiens
agtctcaatgtttat

SEQ ID NO: 1175104 - DNA, 15 bp, Homo sapiens
tagtctcaatgttta

SEQ ID NO: 1175105 - DNA, 15 bp, Homo sapiens
atagtctcaatgttt

SEQ ID NO: 1175106 - DNA, 15 bp, Homo sapiens
tatagtctcaatgtt

SEQ ID NO: 1175107 - DNA, 15 bp, Homo sapiens
ctatagtctcaatgt

SEQ ID NO: 1175108 - DNA, 15 bp, Homo sapiens
gctatagtctcaatg

SEQ ID NO: 1175109 - DNA, 15 bp, Homo sapiens
tgctatagtctcaat

SEQ ID NO: 1175110 - DNA, 15 bp, Homo sapiens
gtgctatagtctcaa

SEQ ID NO: 1175111 - DNA, 15 bp, Homo sapiens
agtgctatagtctca

SEQ ID NO: 1175112 - DNA, 15 bp, Homo sapiens
cagtgctatagtctc

SEQ ID NO: 1175113 - DNA, 15 bp, Homo sapiens
tcagtgctatagtct

SEQ ID NO: 1175114 - DNA, 15 bp, Homo sapiens
gtcagtgctatagtc

SEQ ID NO: 1175115 - DNA, 15 bp, Homo sapiens
agtcagtgctatagt

SEQ ID NO: 1175116 - DNA, 15 bp, Homo sapiens
tagtcagtgctatag

SEQ ID NO: 1175117 - DNA, 15 bp, Homo sapiens
ttagtcagtgctata

SEQ ID NO: 1175118 - DNA, 15 bp, Homo sapiens
tttagtcagtgctat

SEQ ID NO: 1175119 - DNA, 15 bp, Homo sapiens
ctttagtcagtgcta

SEQ ID NO: 1175120 - DNA, 15 bp, Homo sapiens
gctttagtcagtgct

SEQ ID NO: 1175121 - DNA, 15 bp, Homo sapiens
agctttagtcagtgc

SEQ ID NO: 1175122 - DNA, 15 bp, Homo sapiens
cagctttagtcagtg

SEQ ID NO: 1175123 - DNA, 15 bp, Homo sapiens
acagctttagtcagt

SEQ ID NO: 1175124 - DNA, 15 bp, Homo sapiens
aacagctttagtcag

SEQ ID NO: 1175125 - DNA, 15 bp, Homo sapiens
taacagctttagtca

SEQ ID NO: 1175126 - DNA, 15 bp, Homo sapiens
gtaacagctttagtc

SEQ ID NO: 1175127 - DNA, 15 bp, Homo sapiens
tgtaacagctttagt

SEQ ID NO: 1175128 - DNA, 15 bp, Homo sapiens
gtgtaacagctttag

SEQ ID NO: 1175129 - DNA, 15 bp, Homo sapiens
agtgtaacagcttta

SEQ ID NO: 1175130 - DNA, 15 bp, Homo sapiens
aagtgtaacagcttt

SEQ ID NO: 1175131 - DNA, 15 bp, Homo sapiens
aaagtgtaacagctt

SEQ ID NO: 1175132 - DNA, 15 bp, Homo sapiens
aaaagtgtaacagct

SEQ ID NO: 1175133 - DNA, 15 bp, Homo sapiens
gaaaagtgtaacagc

SEQ ID NO: 1175134 - DNA, 15 bp, Homo sapiens
tgaaaagtgtaacag

SEQ ID NO: 1175135 - DNA, 15 bp, Homo sapiens
ttgaaaagtgtaaca

SEQ ID NO: 1175136 - DNA, 15 bp, Homo sapiens
tttgaaaagtgtaac

SEQ ID NO: 1175137 - DNA, 15 bp, Homo sapiens
ctttgaaaagtgtaa

SEQ ID NO: 1175138 - DNA, 15 bp, Homo sapiens
tctttgaaaagtgta

SEQ ID NO: 1175139 - DNA, 15 bp, Homo sapiens
gtctttgaaaagtgt

SEQ ID NO: 1175140 - DNA, 15 bp, Homo sapiens
agtctttgaaaagtg

SEQ ID NO: 1175141 - DNA, 15 bp, Homo sapiens
aagtctttgaaaagt

SEQ ID NO: 1175142 - DNA, 15 bp, Homo sapiens
aaagtctttgaaaag

SEQ ID NO: 1175143 - DNA, 15 bp, Homo sapiens
caaagtctttgaaaa

SEQ ID NO: 1175144 - DNA, 15 bp, Homo sapiens
acaaagtctttgaaa

SEQ ID NO: 1175145 - DNA, 15 bp, Homo sapiens
gacaaagtctttgaa

SEQ ID NO: 1175146 - DNA, 15 bp, Homo sapiens
tgacaaagtctttga

SEQ ID NO: 1175147 - DNA, 15 bp, Homo sapiens
ctgacaaagtctttg

SEQ ID NO: 1175148 - DNA, 15 bp, Homo sapiens
actgacaaagtcttt

SEQ ID NO: 1175149 - DNA, 15 bp, Homo sapiens
aactgacaaagtctt

SEQ ID NO: 1175150 - DNA, 15 bp, Homo sapiens
gaactgacaaagtct

SEQ ID NO: 1175151 - DNA, 15 bp, Homo sapiens
agaactgacaaagtc

SEQ ID NO: 1175152 - DNA, 15 bp, Homo sapiens
aagaactgacaaagt

SEQ ID NO: 1175153 - DNA, 15 bp, Homo sapiens
taagaactgacaaag

SEQ ID NO: 1175154 - DNA, 15 bp, Homo sapiens
ataagaactgacaaa

SEQ ID NO: 1175155 - DNA, 15 bp, Homo sapiens
aataagaactgacaa

SEQ ID NO: 1175156 - DNA, 15 bp, Homo sapiens
aaataagaactgaca

SEQ ID NO: 1175157 - DNA, 15 bp, Homo sapiens
gaaataagaactgac

SEQ ID NO: 1175158 - DNA, 15 bp, Homo sapiens
ggaaataagaactga

SEQ ID NO: 1175159 - DNA, 15 bp, Homo sapiens
tggaaataagaactg

SEQ ID NO: 1175160 - DNA, 15 bp, Homo sapiens
atggaaataagaact

SEQ ID NO: 1175161 - DNA, 15 bp, Homo sapiens
aatggaaataagaac

SEQ ID NO: 1175162 - DNA, 15 bp, Homo sapiens
aaatggaaataagaa

SEQ ID NO: 1175163 - DNA, 15 bp, Homo sapiens
aaaatggaaataaga

SEQ ID NO: 1175164 - DNA, 15 bp, Homo sapiens
aaaaatggaaataag

SEQ ID NO: 1175165 - DNA, 15 bp, Homo sapiens
taaaaatggaaataa

SEQ ID NO: 1175166 - DNA, 15 bp, Homo sapiens
ttaaaaatggaaata

SEQ ID NO: 1175167 - DNA, 15 bp, Homo sapiens
gttaaaaatggaaat

SEQ ID NO: 1175168 - DNA, 15 bp, Homo sapiens
ggttaaaaatggaaa

SEQ ID NO: 1175169 - DNA, 15 bp, Homo sapiens
tggttaaaaatggaa

SEQ ID NO: 1175170 - DNA, 15 bp, Homo sapiens
ttggttaaaaatgga

SEQ ID NO: 1175171 - DNA, 15 bp, Homo sapiens
gttggttaaaaatgg

SEQ ID NO: 1175172 - DNA, 15 bp, Homo sapiens
tgttggttaaaaatg

SEQ ID NO: 1175173 - DNA, 15 bp, Homo sapiens
atgttggttaaaaat

SEQ ID NO: 1175174 - DNA, 15 bp, Homo sapiens
gatgttggttaaaaa

SEQ ID NO: 1175175 - DNA, 15 bp, Homo sapiens
agatgttggttaaaa

SEQ ID NO: 1175176 - DNA, 15 bp, Homo sapiens
tagatgttggttaaa

SEQ ID NO: 1175177 - DNA, 15 bp, Homo sapiens
ctagatgttggttaa

SEQ ID NO: 1175178 - DNA, 15 bp, Homo sapiens
gctagatgttggtta

SEQ ID NO: 1175179 - DNA, 15 bp, Homo sapiens
agctagatgttggtt

SEQ ID NO: 1175180 - DNA, 15 bp, Homo sapiens
tagctagatgttggt

SEQ ID NO: 1175181 - DNA, 15 bp, Homo sapiens
atagctagatgttgg

SEQ ID NO: 1175182 - DNA, 15 bp, Homo sapiens
tatagctagatgttg

SEQ ID NO: 1175183 - DNA, 15 bp, Homo sapiens
gtatagctagatgtt

SEQ ID NO: 1175184 - DNA, 15 bp, Homo sapiens
tgtatagctagatgt

SEQ ID NO: 1175185 - DNA, 15 bp, Homo sapiens
gtgtatagctagatg

SEQ ID NO: 1175186 - DNA, 15 bp, Homo sapiens
tgtgtatagctagat

SEQ ID NO: 1175187 - DNA, 15 bp, Homo sapiens
atgtgtatagctaga

SEQ ID NO: 1175188 - DNA, 15 bp, Homo sapiens
catgtgtatagctag

SEQ ID NO: 1175189 - DNA, 15 bp, Homo sapiens
acatgtgtatagcta

SEQ ID NO: 1175190 - DNA, 15 bp, Homo sapiens
tacatgtgtatagct

SEQ ID NO: 1175191 - DNA, 15 bp, Homo sapiens
gtacatgtgtatagc

SEQ ID NO: 1175192 - DNA, 15 bp, Homo sapiens
ggtacatgtgtatag

SEQ ID NO: 1175193 - DNA, 15 bp, Homo sapiens
cggtacatgtgtata

SEQ ID NO: 1175194 - DNA, 15 bp, Homo sapiens
acggtacatgtgtat

SEQ ID NO: 1175195 - DNA, 15 bp, Homo sapiens
tacggtacatgtgta

SEQ ID NO: 1175196 - DNA, 15 bp, Homo sapiens
ttacggtacatgtgt

SEQ ID NO: 1175197 - DNA, 15 bp, Homo sapiens
gttacggtacatgtg

SEQ ID NO: 1175198 - DNA, 15 bp, Homo sapiens
tgttacggtacatgt

SEQ ID NO: 1175199 - DNA, 15 bp, Homo sapiens
atgttacggtacatg

SEQ ID NO: 1175200 - DNA, 15 bp, Homo sapiens
gatgttacggtacat

SEQ ID NO: 1175201 - DNA, 15 bp, Homo sapiens
ggatgttacggtaca

SEQ ID NO: 1175202 - DNA, 15 bp, Homo sapiens
tggatgttacggtac

SEQ ID NO: 1175203 - DNA, 15 bp, Homo sapiens
ctggatgttacggta

SEQ ID NO: 1175204 - DNA, 15 bp, Homo sapiens
cctggatgttacggt

SEQ ID NO: 1175205 - DNA, 15 bp, Homo sapiens
ccctggatgttacgg

SEQ ID NO: 1175206 - DNA, 15 bp, Homo sapiens
accctggatgttacg

SEQ ID NO: 1175207 - DNA, 15 bp, Homo sapiens
gaccctggatgttac

SEQ ID NO: 1175208 - DNA, 15 bp, Homo sapiens
tgaccctggatgtta

SEQ ID NO: 1175209 - DNA, 15 bp, Homo sapiens
atgaccctggatgtt

SEQ ID NO: 1175210 - DNA, 15 bp, Homo sapiens
aatgaccctggatgt

SEQ ID NO: 1175211 - DNA, 15 bp, Homo sapiens
gaatgaccctggatg

SEQ ID NO: 1175212 - DNA, 15 bp, Homo sapiens
agaatgaccctggat

SEQ ID NO: 1175213 - DNA, 15 bp, Homo sapiens
gagaatgaccctgga

SEQ ID NO: 1175214 - DNA, 15 bp, Homo sapiens
tgagaatgaccctgg

SEQ ID NO: 1175215 - DNA, 15 bp, Homo sapiens
ctgagaatgaccctg

SEQ ID NO: 1175216 - DNA, 15 bp, Homo sapiens
gctgagaatgaccct

SEQ ID NO: 1175217 - DNA, 15 bp, Homo sapiens
agctgagaatgaccc

SEQ ID NO: 1175218 - DNA, 15 bp, Homo sapiens
aagctgagaatgacc

SEQ ID NO: 1175219 - DNA, 15 bp, Homo sapiens
gaagctgagaatgac

SEQ ID NO: 1175220 - DNA, 15 bp, Homo sapiens
ggaagctgagaatga

SEQ ID NO: 1175221 - DNA, 15 bp, Homo sapiens
aggaagctgagaatg

SEQ ID NO: 1175222 - DNA, 15 bp, Homo sapiens
aaggaagctgagaat

SEQ ID NO: 1175223 - DNA, 15 bp, Homo sapiens
aaaggaagctgagaa

SEQ ID NO: 1175224 - DNA, 15 bp, Homo sapiens
aaaaggaagctgaga

SEQ ID NO: 1175225 - DNA, 15 bp, Homo sapiens
caaaaggaagctgag

SEQ ID NO: 1175226 - DNA, 15 bp, Homo sapiens
tcaaaaggaagctga

SEQ ID NO: 1175227 - DNA, 15 bp, Homo sapiens
atcaaaaggaagctg

SEQ ID NO: 1175228 - DNA, 15 bp, Homo sapiens
tatcaaaaggaagct

SEQ ID NO: 1175229 - DNA, 15 bp, Homo sapiens
ttatcaaaaggaagc

SEQ ID NO: 1175230 - DNA, 15 bp, Homo sapiens
tttatcaaaaggaag

SEQ ID NO: 1175231 - DNA, 15 bp, Homo sapiens
atttatcaaaaggaa

SEQ ID NO: 1175232 - DNA, 15 bp, Homo sapiens
tatttatcaaaagga

SEQ ID NO: 1175233 - DNA, 15 bp, Homo sapiens
gtatttatcaaaagg

SEQ ID NO: 1175234 - DNA, 15 bp, Homo sapiens
tgtatttatcaaaag

SEQ ID NO: 1175235 - DNA, 15 bp, Homo sapiens
ctgtatttatcaaaa

SEQ ID NO: 1175236 - DNA, 15 bp, Homo sapiens
actgtatttatcaaa

SEQ ID NO: 1175237 - DNA, 15 bp, Homo sapiens
cactgtatttatcaa

SEQ ID NO: 1175238 - DNA, 15 bp, Homo sapiens
acactgtatttatca

SEQ ID NO: 1175239 - DNA, 15 bp, Homo sapiens
cacactgtatttatc

SEQ ID NO: 1175240 - DNA, 15 bp, Homo sapiens
gcacactgtatttat

SEQ ID NO: 1175241 - DNA, 15 bp, Homo sapiens
agcacactgtattta

SEQ ID NO: 1175242 - DNA, 15 bp, Homo sapiens
aagcacactgtattt

SEQ ID NO: 1175243 - DNA, 15 bp, Homo sapiens
gaagcacactgtatt

SEQ ID NO: 1175244 - DNA, 15 bp, Homo sapiens
agaagcacactgtat

SEQ ID NO: 1175245 - DNA, 15 bp, Homo sapiens
aagaagcacactgta

SEQ ID NO: 1175246 - DNA, 15 bp, Homo sapiens
aaagaagcacactgt

SEQ ID NO: 1175247 - DNA, 15 bp, Homo sapiens
taaagaagcacactg

SEQ ID NO: 1175248 - DNA, 15 bp, Homo sapiens
ttaaagaagcacact

SEQ ID NO: 1175249 - DNA, 15 bp, Homo sapiens
tttaaagaagcacac

SEQ ID NO: 1175250 - DNA, 15 bp, Homo sapiens
ttttaaagaagcaca

SEQ ID NO: 1175251 - DNA, 15 bp, Homo sapiens
tttttaaagaagcac

SEQ ID NO: 1175252 - DNA, 15 bp, Homo sapiens
ctttttaaagaagca

SEQ ID NO: 1175253 - DNA, 15 bp, Homo sapiens
tctttttaaagaagc

SEQ ID NO: 1175254 - DNA, 15 bp, Homo sapiens
ttctttttaaagaag

SEQ ID NO: 1175255 - DNA, 15 bp, Homo sapiens
tttctttttaaagaa

SEQ ID NO: 1175256 - DNA, 15 bp, Homo sapiens
ttttctttttaaaga

SEQ ID NO: 1175257 - DNA, 15 bp, Homo sapiens
tttttctttttaaag

SEQ ID NO: 1175258 - DNA, 15 bp, Homo sapiens
ttttttctttttaaa

SEQ ID NO: 1175259 - DNA, 15 bp, Homo sapiens
tttttttctttttaa

SEQ ID NO: 1175260 - DNA, 15 bp, Homo sapiens
ttttttttcttttta

SEQ ID NO: 1175261 - DNA, 15 bp, Homo sapiens
cagttttttttcttt

SEQ ID NO: 1175262 - DNA, 15 bp, Homo sapiens
gcagttttttttctt

SEQ ID NO: 1175263 - DNA, 15 bp, Homo sapiens
ggcagttttttttct

SEQ ID NO: 1175264 - DNA, 15 bp, Homo sapiens
aggcagttttttttc

SEQ ID NO: 1175265 - DNA, 15 bp, Homo sapiens
gaggcagtttttttt

SEQ ID NO: 1175266 - DNA, 15 bp, Homo sapiens
agaggcagttttttt

SEQ ID NO: 1175267 - DNA, 15 bp, Homo sapiens
aagaggcagtttttt

SEQ ID NO: 1175268 - DNA, 15 bp, Homo sapiens
gaagaggcagttttt

SEQ ID NO: 1175269 - DNA, 15 bp, Homo sapiens
agaagaggcagtttt

SEQ ID NO: 1175270 - DNA, 15 bp, Homo sapiens
gagaagaggcagttt

SEQ ID NO: 1175271 - DNA, 15 bp, Homo sapiens
ggagaagaggcagtt

SEQ ID NO: 1175272 - DNA, 15 bp, Homo sapiens
aggagaagaggcagt

SEQ ID NO: 1175273 - DNA, 15 bp, Homo sapiens
aaggagaagaggcag

SEQ ID NO: 1175274 - DNA, 15 bp, Homo sapiens
aaaggagaagaggca

SEQ ID NO: 1175275 - DNA, 15 bp, Homo sapiens
taaaggagaagaggc

SEQ ID NO: 1175276 - DNA, 15 bp, Homo sapiens
ttaaaggagaagagg

SEQ ID NO: 1175277 - DNA, 15 bp, Homo sapiens
gttaaaggagaagag

SEQ ID NO: 1175278 - DNA, 15 bp, Homo sapiens
tgttaaaggagaaga

SEQ ID NO: 1175279 - DNA, 15 bp, Homo sapiens
ttgttaaaggagaag

SEQ ID NO: 1175280 - DNA, 15 bp, Homo sapiens
tttgttaaaggagaa

SEQ ID NO: 1175281 - DNA, 15 bp, Homo sapiens
aatttgttaaaggag

SEQ ID NO: 1175282 - DNA, 15 bp, Homo sapiens
aaatttgttaaagga

SEQ ID NO: 1175283 - DNA, 15 bp, Homo sapiens
aaaatttgttaaagg

SEQ ID NO: 1175284 - DNA, 15 bp, Homo sapiens
gaaaatttgttaaag

SEQ ID NO: 1175285 - DNA, 15 bp, Homo sapiens
tgaaaatttgttaaa

SEQ ID NO: 1175286 - DNA, 15 bp, Homo sapiens
gtgaaaatttgttaa

SEQ ID NO: 1175287 - DNA, 15 bp, Homo sapiens
ggtgaaaatttgtta

SEQ ID NO: 1175288 - DNA, 15 bp, Homo sapiens
aggtgaaaatttgtt

SEQ ID NO: 1175289 - DNA, 15 bp, Homo sapiens
caggtgaaaatttgt

SEQ ID NO: 1175290 - DNA, 15 bp, Homo sapiens
acaggtgaaaatttg

SEQ ID NO: 1175291 - DNA, 15 bp, Homo sapiens
aacaggtgaaaattt

SEQ ID NO: 1175292 - DNA, 15 bp, Homo sapiens
caacaggtgaaaatt

SEQ ID NO: 1175293 - DNA, 15 bp, Homo sapiens
gcaacaggtgaaaat

SEQ ID NO: 1175294 - DNA, 15 bp, Homo sapiens
tgcaacaggtgaaaa

SEQ ID NO: 1175295 - DNA, 15 bp, Homo sapiens
ctgcaacaggtgaaa

SEQ ID NO: 1175296 - DNA, 15 bp, Homo sapiens
actgcaacaggtgaa

SEQ ID NO: 1175297 - DNA, 15 bp, Homo sapiens
gactgcaacaggtga

SEQ ID NO: 1175298 - DNA, 15 bp, Homo sapiens
ggactgcaacaggtg

SEQ ID NO: 1175299 - DNA, 15 bp, Homo sapiens
aggactgcaacaggt

SEQ ID NO: 1175300 - DNA, 15 bp, Homo sapiens
aaggactgcaacagg

SEQ ID NO: 1175301 - DNA, 15 bp, Homo sapiens
taaggactgcaacag

SEQ ID NO: 1175302 - DNA, 15 bp, Homo sapiens
ataaggactgcaaca

SEQ ID NO: 1175303 - DNA, 15 bp, Homo sapiens
tataaggactgcaac

SEQ ID NO: 1175304 - DNA, 15 bp, Homo sapiens
ttataaggactgcaa

SEQ ID NO: 1175305 - DNA, 15 bp, Homo sapiens
tttataaggactgca

SEQ ID NO: 1175306 - DNA, 15 bp, Homo sapiens
ctttataaggactgc

SEQ ID NO: 1175307 - DNA, 15 bp, Homo sapiens
tctttataaggactg

SEQ ID NO: 1175308 - DNA, 15 bp, Homo sapiens
ttctttataaggact

SEQ ID NO: 1175309 - DNA, 15 bp, Homo sapiens
cttctttataaggac

SEQ ID NO: 1175310 - DNA, 15 bp, Homo sapiens
acttctttataagga

SEQ ID NO: 1175311 - DNA, 15 bp, Homo sapiens
tacttctttataagg

SEQ ID NO: 1175312 - DNA, 15 bp, Homo sapiens
ttacttctttataag

SEQ ID NO: 1175313 - DNA, 15 bp, Homo sapiens
tttacttctttataa

SEQ ID NO: 1175314 - DNA, 15 bp, Homo sapiens
gtttacttctttata

SEQ ID NO: 1175315 - DNA, 15 bp, Homo sapiens
tgtttacttctttat

SEQ ID NO: 1175316 - DNA, 15 bp, Homo sapiens
ttgtttacttcttta

SEQ ID NO: 1175317 - DNA, 15 bp, Homo sapiens
cttgtttacttcttt

SEQ ID NO: 1175318 - DNA, 15 bp, Homo sapiens
ccttgtttacttctt

SEQ ID NO: 1175319 - DNA, 15 bp, Homo sapiens
accttgtttacttct

SEQ ID NO: 1175320 - DNA, 15 bp, Homo sapiens
caccttgtttacttc

SEQ ID NO: 1175321 - DNA, 15 bp, Homo sapiens
ccaccttgtttactt

SEQ ID NO: 1175322 - DNA, 15 bp, Homo sapiens
gccaccttgtttact

SEQ ID NO: 1175323 - DNA, 15 bp, Homo sapiens
tgccaccttgtttac

SEQ ID NO: 1175324 - DNA, 15 bp, Homo sapiens
atgccaccttgttta

SEQ ID NO: 1175325 - DNA, 15 bp, Homo sapiens
aatgccaccttgttt

SEQ ID NO: 1175326 - DNA, 15 bp, Homo sapiens
aaatgccaccttgtt

SEQ ID NO: 1175327 - DNA, 15 bp, Homo sapiens
taaatgccaccttgt

SEQ ID NO: 1175328 - DNA, 15 bp, Homo sapiens
ctaaatgccaccttg

SEQ ID NO: 1175329 - DNA, 15 bp, Homo sapiens
gctaaatgccacctt

SEQ ID NO: 1175330 - DNA, 15 bp, Homo sapiens
tgctaaatgccacct

SEQ ID NO: 1175331 - DNA, 15 bp, Homo sapiens
gtgctaaatgccacc

SEQ ID NO: 1175332 - DNA, 15 bp, Homo sapiens
ggtgctaaatgccac

SEQ ID NO: 1175333 - DNA, 15 bp, Homo sapiens
gggtgctaaatgcca

SEQ ID NO: 1175334 - DNA, 15 bp, Homo sapiens
agggtgctaaatgcc

SEQ ID NO: 1175335 - DNA, 15 bp, Homo sapiens
aagggtgctaaatgc

SEQ ID NO: 1175336 - DNA, 15 bp, Homo sapiens
gaagggtgctaaatg

SEQ ID NO: 1175337 - DNA, 15 bp, Homo sapiens
agaagggtgctaaat

SEQ ID NO: 1175338 - DNA, 15 bp, Homo sapiens
gagaagggtgctaaa

SEQ ID NO: 1175339 - DNA, 15 bp, Homo sapiens
tgagaagggtgctaa

SEQ ID NO: 1175340 - DNA, 15 bp, Homo sapiens
ctgagaagggtgcta

SEQ ID NO: 1175341 - DNA, 15 bp, Homo sapiens
tctgagaagggtgct

SEQ ID NO: 1175342 - DNA, 15 bp, Homo sapiens
ttctgagaagggtgc

SEQ ID NO: 1175343 - DNA, 15 bp, Homo sapiens
cttctgagaagggtg

SEQ ID NO: 1175344 - DNA, 15 bp, Homo sapiens
acttctgagaagggt

SEQ ID NO: 1175345 - DNA, 15 bp, Homo sapiens
cacttctgagaaggg

SEQ ID NO: 1175346 - DNA, 15 bp, Homo sapiens
acacttctgagaagg

SEQ ID NO: 1175347 - DNA, 15 bp, Homo sapiens
cacacttctgagaag

SEQ ID NO: 1175348 - DNA, 15 bp, Homo sapiens
acacacttctgagaa

SEQ ID NO: 1175349 - DNA, 15 bp, Homo sapiens
gacacacttctgaga

SEQ ID NO: 1175350 - DNA, 15 bp, Homo sapiens
ggacacacttctgag

SEQ ID NO: 1175351 - DNA, 15 bp, Homo sapiens
gggacacacttctga

SEQ ID NO: 1175352 - DNA, 15 bp, Homo sapiens
tgggacacacttctg

SEQ ID NO: 1175353 - DNA, 15 bp, Homo sapiens
gtgggacacacttct

SEQ ID NO: 1175354 - DNA, 15 bp, Homo sapiens
agtgggacacacttc

SEQ ID NO: 1175355 - DNA, 15 bp, Homo sapiens
aagtgggacacactt

SEQ ID NO: 1175356 - DNA, 15 bp, Homo sapiens
gaagtgggacacact

SEQ ID NO: 1175357 - DNA, 15 bp, Homo sapiens
agaagtgggacacac

SEQ ID NO: 1175358 - DNA, 15 bp, Homo sapiens
tagaagtgggacaca

SEQ ID NO: 1175359 - DNA, 15 bp, Homo sapiens
ttagaagtgggacac

SEQ ID NO: 1175360 - DNA, 15 bp, Homo sapiens
cttagaagtgggaca

SEQ ID NO: 1175361 - DNA, 15 bp, Homo sapiens
tcttagaagtgggac

SEQ ID NO: 1175362 - DNA, 15 bp, Homo sapiens
ttcttagaagtggga

SEQ ID NO: 1175363 - DNA, 15 bp, Homo sapiens
gttcttagaagtggg

SEQ ID NO: 1175364 - DNA, 15 bp, Homo sapiens
tgttcttagaagtgg

SEQ ID NO: 1175365 - DNA, 15 bp, Homo sapiens
ttgttcttagaagtg

SEQ ID NO: 1175366 - DNA, 15 bp, Homo sapiens
gttgttcttagaagt

SEQ ID NO: 1175367 - DNA, 15 bp, Homo sapiens
tgttgttcttagaag

SEQ ID NO: 1175368 - DNA, 15 bp, Homo sapiens
ttgttgttcttagaa

SEQ ID NO: 1175369 - DNA, 15 bp, Homo sapiens
cttgttgttcttaga

SEQ ID NO: 1175370 - DNA, 15 bp, Homo sapiens
tcttgttgttcttag

SEQ ID NO: 1175371 - DNA, 15 bp, Homo sapiens
ttcttgttgttctta

SEQ ID NO: 1175372 - DNA, 15 bp, Homo sapiens
tttcttgttgttctt

SEQ ID NO: 1175373 - DNA, 15 bp, Homo sapiens
atttcttgttgttct

SEQ ID NO: 1175374 - DNA, 15 bp, Homo sapiens
catttcttgttgttc

SEQ ID NO: 1175375 - DNA, 15 bp, Homo sapiens
ccatttcttgttgtt

SEQ ID NO: 1175376 - DNA, 15 bp, Homo sapiens
tccatttcttgttgt

SEQ ID NO: 1175377 - DNA, 15 bp, Homo sapiens
ttccatttcttgttg

SEQ ID NO: 1175378 - DNA, 15 bp, Homo sapiens
gttccatttcttgtt

SEQ ID NO: 1175379 - DNA, 15 bp, Homo sapiens
ggttccatttcttgt

SEQ ID NO: 1175380 - DNA, 15 bp, Homo sapiens
gggttccatttcttg

SEQ ID NO: 1175381 - DNA, 15 bp, Homo sapiens
ggggttccatttctt

SEQ ID NO: 1175382 - DNA, 15 bp, Homo sapiens
gggggttccatttct

SEQ ID NO: 1175383 - DNA, 15 bp, Homo sapiens
ggggggttccatttc

SEQ ID NO: 1175384 - DNA, 15 bp, Homo sapiens
tggggggttccattt

SEQ ID NO: 1175385 - DNA, 15 bp, Homo sapiens
atggggggttccatt

SEQ ID NO: 1175386 - DNA, 15 bp, Homo sapiens
gatggggggttccat

SEQ ID NO: 1175387 - DNA, 15 bp, Homo sapiens
agatggggggttcca

SEQ ID NO: 1175388 - DNA, 15 bp, Homo sapiens
gagatggggggttcc

SEQ ID NO: 1175389 - DNA, 15 bp, Homo sapiens
tgagatggggggttc

SEQ ID NO: 1175390 - DNA, 15 bp, Homo sapiens
ctgagatggggggtt

SEQ ID NO: 1175391 - DNA, 15 bp, Homo sapiens
tctgagatggggggt

SEQ ID NO: 1175392 - DNA, 15 bp, Homo sapiens
ttctgagatgggggg

SEQ ID NO: 1175393 - DNA, 15 bp, Homo sapiens
cttctgagatggggg

SEQ ID NO: 1175394 - DNA, 15 bp, Homo sapiens
acttctgagatgggg

SEQ ID NO: 1175395 - DNA, 15 bp, Homo sapiens
cacttctgagatggg

SEQ ID NO: 1175396 - DNA, 15 bp, Homo sapiens
gcacttctgagatgg

SEQ ID NO: 1175397 - DNA, 15 bp, Homo sapiens
tgcacttctgagatg

SEQ ID NO: 1175398 - DNA, 15 bp, Homo sapiens
gtgcacttctgagat

SEQ ID NO: 1175399 - DNA, 15 bp, Homo sapiens
ggtgcacttctgaga

SEQ ID NO: 1175400 - DNA, 15 bp, Homo sapiens
gggtgcacttctgag

SEQ ID NO: 1175401 - DNA, 15 bp, Homo sapiens
ggggtgcacttctga

SEQ ID NO: 1175402 - DNA, 15 bp, Homo sapiens
tggggtgcacttctg

SEQ ID NO: 1175403 - DNA, 15 bp, Homo sapiens
ttggggtgcacttct

SEQ ID NO: 1175404 - DNA, 15 bp, Homo sapiens
tttggggtgcacttc

SEQ ID NO: 1175405 - DNA, 15 bp, Homo sapiens
ctttggggtgcactt

SEQ ID NO: 1175406 - DNA, 15 bp, Homo sapiens
cctttggggtgcact

SEQ ID NO: 1175407 - DNA, 15 bp, Homo sapiens
gcctttggggtgcac

SEQ ID NO: 1175408 - DNA, 15 bp, Homo sapiens
ggcctttggggtgca

SEQ ID NO: 1175409 - DNA, 15 bp, Homo sapiens
tggcctttggggtgc

SEQ ID NO: 1175410 - DNA, 15 bp, Homo sapiens
ttggcctttggggtg

SEQ ID NO: 1175411 - DNA, 15 bp, Homo sapiens
attggcctttggggt

SEQ ID NO: 1175412 - DNA, 15 bp, Homo sapiens
cattggcctttgggg

SEQ ID NO: 1175413 - DNA, 15 bp, Homo sapiens
gcattggcctttggg

SEQ ID NO: 1175414 - DNA, 15 bp, Homo sapiens
agcattggcctttgg

SEQ ID NO: 1175415 - DNA, 15 bp, Homo sapiens
gagcattggcctttg

SEQ ID NO: 1175416 - DNA, 15 bp, Homo sapiens
tgagcattggccttt

SEQ ID NO: 1175417 - DNA, 15 bp, Homo sapiens
ctgagcattggcctt

SEQ ID NO: 1175418 - DNA, 15 bp, Homo sapiens
tctgagcattggcct

SEQ ID NO: 1175419 - DNA, 15 bp, Homo sapiens
ttctgagcattggcc

SEQ ID NO: 1175420 - DNA, 15 bp, Homo sapiens
cttctgagcattggc

SEQ ID NO: 1175421 - DNA, 15 bp, Homo sapiens
acttctgagcattgg

SEQ ID NO: 1175422 - DNA, 15 bp, Homo sapiens
cacttctgagcattg

SEQ ID NO: 1175423 - DNA, 15 bp, Homo sapiens
gcacttctgagcatt

SEQ ID NO: 1175424 - DNA, 15 bp, Homo sapiens
tgcacttctgagcat

SEQ ID NO: 1175425 - DNA, 15 bp, Homo sapiens
gtgcacttctgagca

SEQ ID NO: 1175426 - DNA, 15 bp, Homo sapiens
ggtgcacttctgagc

SEQ ID NO: 1175427 - DNA, 15 bp, Homo sapiens
acattggcctttggg

SEQ ID NO: 1175428 - DNA, 15 bp, Homo sapiens
aacattggcctttgg

SEQ ID NO: 1175429 - DNA, 15 bp, Homo sapiens
caacattggcctttg

SEQ ID NO: 1175430 - DNA, 15 bp, Homo sapiens
acaacattggccttt

SEQ ID NO: 1175431 - DNA, 15 bp, Homo sapiens
cacaacattggcctt

SEQ ID NO: 1175432 - DNA, 15 bp, Homo sapiens
acacaacattggcct

SEQ ID NO: 1175433 - DNA, 15 bp, Homo sapiens
aacacaacattggcc

SEQ ID NO: 1175434 - DNA, 15 bp, Homo sapiens
aaacacaacattggc

SEQ ID NO: 1175435 - DNA, 15 bp, Homo sapiens
gaaacacaacattgg

SEQ ID NO: 1175436 - DNA, 15 bp, Homo sapiens
tgaaacacaacattg

SEQ ID NO: 1175437 - DNA, 15 bp, Homo sapiens
atgaaacacaacatt

SEQ ID NO: 1175438 - DNA, 15 bp, Homo sapiens
catgaaacacaacat

SEQ ID NO: 1175439 - DNA, 15 bp, Homo sapiens
gcatgaaacacaaca

SEQ ID NO: 1175440 - DNA, 15 bp, Homo sapiens
tgcatgaaacacaac

SEQ ID NO: 1175441 - DNA, 15 bp, Homo sapiens
gtgcatgaaacacaa

SEQ ID NO: 1175442 - DNA, 15 bp, Homo sapiens
tgtgcatgaaacaca

SEQ ID NO: 1175443 - DNA, 15 bp, Homo sapiens
atgtgcatgaaacac

SEQ ID NO: 1175444 - DNA, 15 bp, Homo sapiens
gtatgtgcatgaaac

SEQ ID NO: 1175445 - DNA, 15 bp, Homo sapiens
tgtatgtgcatgaaa

SEQ ID NO: 1175446 - DNA, 15 bp, Homo sapiens
ctgtatgtgcatgaa

SEQ ID NO: 1175447 - DNA, 15 bp, Homo sapiens
gctgtatgtgcatga

SEQ ID NO: 1175448 - DNA, 15 bp, Homo sapiens
tgctgtatgtgcatg

SEQ ID NO: 1175449 - DNA, 15 bp, Homo sapiens
ctgctgtatgtgcat

SEQ ID NO: 1175450 - DNA, 15 bp, Homo sapiens
cctgctgtatgtgca

SEQ ID NO: 1175451 - DNA, 15 bp, Homo sapiens
tcctgctgtatgtgc

SEQ ID NO: 1175452 - DNA, 15 bp, Homo sapiens
gtcctgctgtatgtg

SEQ ID NO: 1175453 - DNA, 15 bp, Homo sapiens
tgtcctgctgtatgt

SEQ ID NO: 1175454 - DNA, 15 bp, Homo sapiens
ctgtcctgctgtatg

SEQ ID NO: 1175455 - DNA, 15 bp, Homo sapiens
gctgtcctgctgtat

SEQ ID NO: 1175456 - DNA, 15 bp, Homo sapiens
tgctgtcctgctgta

SEQ ID NO: 1175457 - DNA, 15 bp, Homo sapiens
ctgctgtcctgctgt

SEQ ID NO: 1175458 - DNA, 15 bp, Homo sapiens
cctgctgtcctgctg

SEQ ID NO: 1175459 - DNA, 15 bp, Homo sapiens
tcctgctgtcctgct

SEQ ID NO: 1175460 - DNA, 15 bp, Homo sapiens
ctcctgctgtcctgc

SEQ ID NO: 1175461 - DNA, 15 bp, Homo sapiens
cctcctgctgtcctg

SEQ ID NO: 1175462 - DNA, 15 bp, Homo sapiens
ccctcctgctgtcct

SEQ ID NO: 1175463 - DNA, 15 bp, Homo sapiens
cccctcctgctgtcc

SEQ ID NO: 1175464 - DNA, 15 bp, Homo sapiens
gcccctcctgctgtc

SEQ ID NO: 1175465 - DNA, 15 bp, Homo sapiens
agcccctcctgctgt

SEQ ID NO: 1175466 - DNA, 15 bp, Homo sapiens
gagcccctcctgctg

SEQ ID NO: 1175467 - DNA, 15 bp, Homo sapiens
agagcccctcctgct

SEQ ID NO: 1175468 - DNA, 15 bp, Homo sapiens
aagagcccctcctgc

SEQ ID NO: 1175469 - DNA, 15 bp, Homo sapiens
caagagcccctcctg

SEQ ID NO: 1175470 - DNA, 15 bp, Homo sapiens
tcaagagcccctcct

SEQ ID NO: 1175471 - DNA, 15 bp, Homo sapiens
atcaagagcccctcc

SEQ ID NO: 1175472 - DNA, 15 bp, Homo sapiens
aatcaagagcccctc

SEQ ID NO: 1175473 - DNA, 15 bp, Homo sapiens
caatcaagagcccct

SEQ ID NO: 1175474 - DNA, 15 bp, Homo sapiens
ccaatcaagagcccc

SEQ ID NO: 1175475 - DNA, 15 bp, Homo sapiens
cccaatcaagagccc

SEQ ID NO: 1175476 - DNA, 15 bp, Homo sapiens
ccccaatcaagagcc

SEQ ID NO: 1175477 - DNA, 15 bp, Homo sapiens
accccaatcaagagc

SEQ ID NO: 1175478 - DNA, 15 bp, Homo sapiens
caccccaatcaagag

SEQ ID NO: 1175479 - DNA, 15 bp, Homo sapiens
ccaccccaatcaaga

SEQ ID NO: 1175480 - DNA, 15 bp, Homo sapiens
cccaccccaatcaag

SEQ ID NO: 1175481 - DNA, 15 bp, Homo sapiens
ccccaccccaatcaa

SEQ ID NO: 1175482 - DNA, 15 bp, Homo sapiens
cccccaccccaatca

SEQ ID NO: 1175483 - DNA, 15 bp, Homo sapiens
tcccccaccccaatc

SEQ ID NO: 1175484 - DNA, 15 bp, Homo sapiens
ctcccccaccccaat

SEQ ID NO: 1175485 - DNA, 15 bp, Homo sapiens
actcccccaccccaa

SEQ ID NO: 1175486 - DNA, 15 bp, Homo sapiens
cactcccccacccca

SEQ ID NO: 1175487 - DNA, 15 bp, Homo sapiens
ccactcccccacccc

SEQ ID NO: 1175488 - DNA, 15 bp, Homo sapiens
cccactcccccaccc

SEQ ID NO: 1175489 - DNA, 15 bp, Homo sapiens
gcccactcccccacc

SEQ ID NO: 1175490 - DNA, 15 bp, Homo sapiens
agcccactcccccac

SEQ ID NO: 1175491 - DNA, 15 bp, Homo sapiens
cagcccactccccca

SEQ ID NO: 1175492 - DNA, 15 bp, Homo sapiens
tcagcccactccccc

SEQ ID NO: 1175493 - DNA, 15 bp, Homo sapiens
atcagcccactcccc

SEQ ID NO: 1175494 - DNA, 15 bp, Homo sapiens
aatcagcccactccc

SEQ ID NO: 1175495 - DNA, 15 bp, Homo sapiens
aaatcagcccactcc

SEQ ID NO: 1175496 - DNA, 15 bp, Homo sapiens
gaaatcagcccactc

SEQ ID NO: 1175497 - DNA, 15 bp, Homo sapiens
agaaatcagcccact

SEQ ID NO: 1175498 - DNA, 15 bp, Homo sapiens
cagaaatcagcccac

SEQ ID NO: 1175499 - DNA, 15 bp, Homo sapiens
tcagaaatcagccca

SEQ ID NO: 1175500 - DNA, 15 bp, Homo sapiens
atcagaaatcagccc

SEQ ID NO: 1175501 - DNA, 15 bp, Homo sapiens
catcagaaatcagcc

SEQ ID NO: 1175502 - DNA, 15 bp, Homo sapiens
tcatcagaaatcagc

SEQ ID NO: 1175503 - DNA, 15 bp, Homo sapiens
ctcatcagaaatcag

SEQ ID NO: 1175504 - DNA, 15 bp, Homo sapiens
tctcatcagaaatca

SEQ ID NO: 1175505 - DNA, 15 bp, Homo sapiens
atctcatcagaaatc

SEQ ID NO: 1175506 - DNA, 15 bp, Homo sapiens
catctcatcagaaat

SEQ ID NO: 1175507 - DNA, 15 bp, Homo sapiens
gcatctcatcagaaa

SEQ ID NO: 1175508 - DNA, 15 bp, Homo sapiens
ggcatctcatcagaa

SEQ ID NO: 1175509 - DNA, 15 bp, Homo sapiens
aggcatctcatcaga

SEQ ID NO: 1175510 - DNA, 15 bp, Homo sapiens
taggcatctcatcag

SEQ ID NO: 1175511 - DNA, 15 bp, Homo sapiens
ttaggcatctcatca

SEQ ID NO: 1175512 - DNA, 15 bp, Homo sapiens
attaggcatctcatc

SEQ ID NO: 1175513 - DNA, 15 bp, Homo sapiens
aattaggcatctcat

SEQ ID NO: 1175514 - DNA, 15 bp, Homo sapiens
taattaggcatctca

SEQ ID NO: 1175515 - DNA, 15 bp, Homo sapiens
gtaattaggcatctc

SEQ ID NO: 1175516 - DNA, 15 bp, Homo sapiens
cgtaattaggcatct

SEQ ID NO: 1175517 - DNA, 15 bp, Homo sapiens
ccgtaattaggcatc

SEQ ID NO: 1175518 - DNA, 15 bp, Homo sapiens
gccgtaattaggcat

SEQ ID NO: 1175519 - DNA, 15 bp, Homo sapiens
agccgtaattaggca

SEQ ID NO: 1175520 - DNA, 15 bp, Homo sapiens
aagccgtaattaggc

SEQ ID NO: 1175521 - DNA, 15 bp, Homo sapiens
aaagccgtaattagg

SEQ ID NO: 1175522 - DNA, 15 bp, Homo sapiens
caaagccgtaattag

SEQ ID NO: 1175523 - DNA, 15 bp, Homo sapiens
ccaaagccgtaatta

SEQ ID NO: 1175524 - DNA, 15 bp, Homo sapiens
cccaaagccgtaatt

SEQ ID NO: 1175525 - DNA, 15 bp, Homo sapiens
tcccaaagccgtaat

SEQ ID NO: 1175526 - DNA, 15 bp, Homo sapiens
gtcccaaagccgtaa

SEQ ID NO: 1175527 - DNA, 15 bp, Homo sapiens
tgtcccaaagccgta

SEQ ID NO: 1175528 - DNA, 15 bp, Homo sapiens
ttgtcccaaagccgt

SEQ ID NO: 1175529 - DNA, 15 bp, Homo sapiens
attgtcccaaagccg

SEQ ID NO: 1175530 - DNA, 15 bp, Homo sapiens
cattgtcccaaagcc

SEQ ID NO: 1175531 - DNA, 15 bp, Homo sapiens
gcattgtcccaaagc

SEQ ID NO: 1175532 - DNA, 15 bp, Homo sapiens
ggcattgtcccaaag

SEQ ID NO: 1175533 - DNA, 15 bp, Homo sapiens
aggcattgtcccaaa

SEQ ID NO: 1175534 - DNA, 15 bp, Homo sapiens
taggcattgtcccaa

SEQ ID NO: 1175535 - DNA, 15 bp, Homo sapiens
gtaggcattgtccca

SEQ ID NO: 1175536 - DNA, 15 bp, Homo sapiens
tgtaggcattgtccc

SEQ ID NO: 1175537 - DNA, 15 bp, Homo sapiens
gtgtaggcattgtcc

SEQ ID NO: 1175538 - DNA, 15 bp, Homo sapiens
agtgtaggcattgtc

SEQ ID NO: 1175539 - DNA, 15 bp, Homo sapiens
aagtgtaggcattgt

SEQ ID NO: 1175540 - DNA, 15 bp, Homo sapiens
aaagtgtaggcattg

SEQ ID NO: 1175541 - DNA, 15 bp, Homo sapiens
taaagtgtaggcatt

SEQ ID NO: 1175542 - DNA, 15 bp, Homo sapiens
ataaagtgtaggcat

SEQ ID NO: 1175543 - DNA, 15 bp, Homo sapiens
tataaagtgtaggca

SEQ ID NO: 1175544 - DNA, 15 bp, Homo sapiens
gtataaagtgtaggc

SEQ ID NO: 1175545 - DNA, 15 bp, Homo sapiens
agtataaagtgtagg

SEQ ID NO: 1175546 - DNA, 15 bp, Homo sapiens
cagtataaagtgtag

SEQ ID NO: 1175547 - DNA, 15 bp, Homo sapiens
tcagtataaagtgta

SEQ ID NO: 1175548 - DNA, 15 bp, Homo sapiens
ttcagtataaagtgt

SEQ ID NO: 1175549 - DNA, 15 bp, Homo sapiens
tttcagtataaagtg

SEQ ID NO: 1175550 - DNA, 15 bp, Homo sapiens
atttcagtataaagt

SEQ ID NO: 1175551 - DNA, 15 bp, Homo sapiens
catttcagtataaag

SEQ ID NO: 1175552 - DNA, 15 bp, Homo sapiens
tcatttcagtataaa

SEQ ID NO: 1175553 - DNA, 15 bp, Homo sapiens
ttcatttcagtataa

SEQ ID NO: 1175554 - DNA, 15 bp, Homo sapiens
attcatttcagtata

SEQ ID NO: 1175555 - DNA, 15 bp, Homo sapiens
gattcatttcagtat

SEQ ID NO: 1175556 - DNA, 15 bp, Homo sapiens
ggattcatttcagta

SEQ ID NO: 1175557 - DNA, 15 bp, Homo sapiens
tggattcatttcagt

SEQ ID NO: 1175558 - DNA, 15 bp, Homo sapiens
gtggattcatttcag

SEQ ID NO: 1175559 - DNA, 15 bp, Homo sapiens
tgtggattcatttca

SEQ ID NO: 1175560 - DNA, 15 bp, Homo sapiens
ctgtggattcatttc

SEQ ID NO: 1175561 - DNA, 15 bp, Homo sapiens
actgtggattcattt

SEQ ID NO: 1175562 - DNA, 15 bp, Homo sapiens
cactgtggattcatt

SEQ ID NO: 1175563 - DNA, 15 bp, Homo sapiens
ccactgtggattcat

SEQ ID NO: 1175564 - DNA, 15 bp, Homo sapiens
cccactgtggattca

SEQ ID NO: 1175565 - DNA, 15 bp, Homo sapiens
gcccactgtggattc

SEQ ID NO: 1175566 - DNA, 15 bp, Homo sapiens
agcccactgtggatt

SEQ ID NO: 1175567 - DNA, 15 bp, Homo sapiens
cagcccactgtggat

SEQ ID NO: 1175568 - DNA, 15 bp, Homo sapiens
gcagcccactgtgga

SEQ ID NO: 1175569 - DNA, 15 bp, Homo sapiens
tgcagcccactgtgg

SEQ ID NO: 1175570 - DNA, 15 bp, Homo sapiens
ttgcagcccactgtg

SEQ ID NO: 1175571 - DNA, 15 bp, Homo sapiens
cttgcagcccactgt

SEQ ID NO: 1175572 - DNA, 15 bp, Homo sapiens
acttgcagcccactg

SEQ ID NO: 1175573 - DNA, 15 bp, Homo sapiens
aacttgcagcccact

SEQ ID NO: 1175574 - DNA, 15 bp, Homo sapiens
gaacttgcagcccac

SEQ ID NO: 1175575 - DNA, 15 bp, Homo sapiens
agaacttgcagccca

SEQ ID NO: 1175576 - DNA, 15 bp, Homo sapiens
tagaacttgcagccc

SEQ ID NO: 1175577 - DNA, 15 bp, Homo sapiens
gtagaacttgcagcc

SEQ ID NO: 1175578 - DNA, 15 bp, Homo sapiens
tgtagaacttgcagc

SEQ ID NO: 1175579 - DNA, 15 bp, Homo sapiens
ttgtagaacttgcag

SEQ ID NO: 1175580 - DNA, 15 bp, Homo sapiens
cttgtagaacttgca

SEQ ID NO: 1175581 - DNA, 15 bp, Homo sapiens
ccttgtagaacttgc

SEQ ID NO: 1175582 - DNA, 15 bp, Homo sapiens
cccttgtagaacttg

SEQ ID NO: 1175583 - DNA, 15 bp, Homo sapiens
gcccttgtagaactt

SEQ ID NO: 1175584 - DNA, 15 bp, Homo sapiens
tgcccttgtagaact

SEQ ID NO: 1175585 - DNA, 15 bp, Homo sapiens
ctgcccttgtagaac

SEQ ID NO: 1175586 - DNA, 15 bp, Homo sapiens
cctgcccttgtagaa

SEQ ID NO: 1175587 - DNA, 15 bp, Homo sapiens
ccctgcccttgtaga

SEQ ID NO: 1175588 - DNA, 15 bp, Homo sapiens
tccctgcccttgtag

SEQ ID NO: 1175589 - DNA, 15 bp, Homo sapiens
gtccctgcccttgta

SEQ ID NO: 1175590 - DNA, 15 bp, Homo sapiens
agtccctgcccttgt

SEQ ID NO: 1175591 - DNA, 15 bp, Homo sapiens
cagtccctgcccttg

SEQ ID NO: 1175592 - DNA, 15 bp, Homo sapiens
acagtccctgccctt

SEQ ID NO: 1175593 - DNA, 15 bp, Homo sapiens
tacagtccctgccct

SEQ ID NO: 1175594 - DNA, 15 bp, Homo sapiens
atacagtccctgccc

SEQ ID NO: 1175595 - DNA, 15 bp, Homo sapiens
aatacagtccctgcc

SEQ ID NO: 1175596 - DNA, 15 bp, Homo sapiens
gaatacagtccctgc

SEQ ID NO: 1175597 - DNA, 15 bp, Homo sapiens
agaatacagtccctg

SEQ ID NO: 1175598 - DNA, 15 bp, Homo sapiens
tagaatacagtccct

SEQ ID NO: 1175599 - DNA, 15 bp, Homo sapiens
gtagaatacagtccc

SEQ ID NO: 1175600 - DNA, 15 bp, Homo sapiens
agtagaatacagtcc

SEQ ID NO: 1175601 - DNA, 15 bp, Homo sapiens
cagtagaatacagtc

SEQ ID NO: 1175602 - DNA, 15 bp, Homo sapiens
acagtagaatacagt

SEQ ID NO: 1175603 - DNA, 15 bp, Homo sapiens
tacagtagaatacag

SEQ ID NO: 1175604 - DNA, 15 bp, Homo sapiens
atacagtagaataca

SEQ ID NO: 1175605 - DNA, 15 bp, Homo sapiens
gatacagtagaatac

SEQ ID NO: 1175606 - DNA, 15 bp, Homo sapiens
ggatacagtagaata

SEQ ID NO: 1175607 - DNA, 15 bp, Homo sapiens
aggatacagtagaat

SEQ ID NO: 1175608 - DNA, 15 bp, Homo sapiens
aaggatacagtagaa

SEQ ID NO: 1175609 - DNA, 15 bp, Homo sapiens
taaggatacagtaga

SEQ ID NO: 1175610 - DNA, 15 bp, Homo sapiens
ataaggatacagtag

SEQ ID NO: 1175611 - DNA, 15 bp, Homo sapiens
gataaggatacagta

SEQ ID NO: 1175612 - DNA, 15 bp, Homo sapiens
tgataaggatacagt

SEQ ID NO: 1175613 - DNA, 15 bp, Homo sapiens
gtgataaggatacag

SEQ ID NO: 1175614 - DNA, 15 bp, Homo sapiens
ggtgataaggataca

SEQ ID NO: 1175615 - DNA, 15 bp, Homo sapiens
aggtgataaggatac

SEQ ID NO: 1175616 - DNA, 15 bp, Homo sapiens
taggtgataaggata

SEQ ID NO: 1175617 - DNA, 15 bp, Homo sapiens
ctaggtgataaggat

SEQ ID NO: 1175618 - DNA, 15 bp, Homo sapiens
tctaggtgataagga

SEQ ID NO: 1175619 - DNA, 15 bp, Homo sapiens
ttctaggtgataagg

SEQ ID NO: 1175620 - DNA, 15 bp, Homo sapiens
gttctaggtgataag

SEQ ID NO: 1175621 - DNA, 15 bp, Homo sapiens
tgttctaggtgataa

SEQ ID NO: 1175622 - DNA, 15 bp, Homo sapiens
ctgttctaggtgata

SEQ ID NO: 1175623 - DNA, 15 bp, Homo sapiens
cctgttctaggtgat

SEQ ID NO: 1175624 - DNA, 15 bp, Homo sapiens
ccctgttctaggtga

SEQ ID NO: 1175625 - DNA, 15 bp, Homo sapiens
accctgttctaggtg

SEQ ID NO: 1175626 - DNA, 15 bp, Homo sapiens
gaccctgttctaggt

SEQ ID NO: 1175627 - DNA, 15 bp, Homo sapiens
cgaccctgttctagg

SEQ ID NO: 1175628 - DNA, 15 bp, Homo sapiens
ccgaccctgttctag

SEQ ID NO: 1175629 - DNA, 15 bp, Homo sapiens
accgaccctgttcta

SEQ ID NO: 1175630 - DNA, 15 bp, Homo sapiens
gaccgaccctgttct

SEQ ID NO: 1175631 - DNA, 15 bp, Homo sapiens
tgaccgaccctgttc

SEQ ID NO: 1175632 - DNA, 15 bp, Homo sapiens
gtgaccgaccctgtt

SEQ ID NO: 1175633 - DNA, 15 bp, Homo sapiens
cgtgaccgaccctgt

SEQ ID NO: 1175634 - DNA, 15 bp, Homo sapiens
acgtgaccgaccctg

SEQ ID NO: 1175635 - DNA, 15 bp, Homo sapiens
tacgtgaccgaccct

SEQ ID NO: 1175636 - DNA, 15 bp, Homo sapiens
ctacgtgaccgaccc

SEQ ID NO: 1175637 - DNA, 15 bp, Homo sapiens
actacgtgaccgacc

SEQ ID NO: 1175638 - DNA, 15 bp, Homo sapiens
cactacgtgaccgac

SEQ ID NO: 1175639 - DNA, 15 bp, Homo sapiens
ccactacgtgaccga

SEQ ID NO: 1175640 - DNA, 15 bp, Homo sapiens
cccactacgtgaccg

SEQ ID NO: 1175641 - DNA, 15 bp, Homo sapiens
acccactacgtgacc

SEQ ID NO: 1175642 - DNA, 15 bp, Homo sapiens
cacccactacgtgac

SEQ ID NO: 1175643 - DNA, 15 bp, Homo sapiens
gcacccactacgtga

SEQ ID NO: 1175644 - DNA, 15 bp, Homo sapiens
agcacccactacgtg

SEQ ID NO: 1175645 - DNA, 15 bp, Homo sapiens
aagcacccactacgt

SEQ ID NO: 1175646 - DNA, 15 bp, Homo sapiens
taagcacccactacg

SEQ ID NO: 1175647 - DNA, 15 bp, Homo sapiens
ttaagcacccactac

SEQ ID NO: 1175648 - DNA, 15 bp, Homo sapiens
attaagcacccacta

SEQ ID NO: 1175649 - DNA, 15 bp, Homo sapiens
tattaagcacccact

SEQ ID NO: 1175650 - DNA, 15 bp, Homo sapiens
ttattaagcacccac

SEQ ID NO: 1175651 - DNA, 15 bp, Homo sapiens
tttattaagcaccca

SEQ ID NO: 1175652 - DNA, 15 bp, Homo sapiens
atttattaagcaccc

SEQ ID NO: 1175653 - DNA, 15 bp, Homo sapiens
tatttattaagcacc

SEQ ID NO: 1175654 - DNA, 15 bp, Homo sapiens
atatttattaagcac

SEQ ID NO: 1175655 - DNA, 15 bp, Homo sapiens
aatatttattaagca

SEQ ID NO: 1175656 - DNA, 15 bp, Homo sapiens
aaatatttattaagc

SEQ ID NO: 1175657 - DNA, 15 bp, Homo sapiens
caaatatttattaag

SEQ ID NO: 1175658 - DNA, 15 bp, Homo sapiens
acaaatatttattaa

SEQ ID NO: 1175659 - DNA, 15 bp, Homo sapiens
aacaaatatttatta

SEQ ID NO: 1175660 - DNA, 15 bp, Homo sapiens
caacaaatatttatt

SEQ ID NO: 1175661 - DNA, 15 bp, Homo sapiens
tcaacaaatatttat

SEQ ID NO: 1175662 - DNA, 15 bp, Homo sapiens
ttcaacaaatattta

SEQ ID NO: 1175663 - DNA, 15 bp, Homo sapiens
tttattcaacaaata

SEQ ID NO: 1175664 - DNA, 15 bp, Homo sapiens
ctttattcaacaaat

SEQ ID NO: 1175665 - DNA, 15 bp, Homo sapiens
cctttattcaacaaa

SEQ ID NO: 1175666 - DNA, 15 bp, Homo sapiens
tcctttattcaacaa

SEQ ID NO: 1175667 - DNA, 15 bp, Homo sapiens
ctcctttattcaaca

SEQ ID NO: 1175668 - DNA, 15 bp, Homo sapiens
actcctttattcaac

SEQ ID NO: 1175669 - DNA, 15 bp, Homo sapiens
tactcctttattcaa

SEQ ID NO: 1175670 - DNA, 15 bp, Homo sapiens
ttactcctttattca

SEQ ID NO: 1175671 - DNA, 15 bp, Homo sapiens
tttactcctttattc

SEQ ID NO: 1175672 - DNA, 15 bp, Homo sapiens
ttttactcctttatt

SEQ ID NO: 1175673 - DNA, 15 bp, Homo sapiens
attttactcctttat

SEQ ID NO: 1175674 - DNA, 15 bp, Homo sapiens
tattttactccttta

SEQ ID NO: 1175675 - DNA, 15 bp, Homo sapiens
ttattttactccttt

SEQ ID NO: 1175676 - DNA, 15 bp, Homo sapiens
attattttactcctt

SEQ ID NO: 1175677 - DNA, 15 bp, Homo sapiens
aattattttactcct

SEQ ID NO: 1175678 - DNA, 15 bp, Homo sapiens
aaattattttactcc

SEQ ID NO: 1175679 - DNA, 15 bp, Homo sapiens
aaaattattttactc

SEQ ID NO: 1175680 - DNA, 15 bp, Homo sapiens
taaaattattttact

SEQ ID NO: 1175681 - DNA, 15 bp, Homo sapiens
ataaaattattttac

SEQ ID NO: 1175682 - DNA, 15 bp, Homo sapiens
cataaaattatttta

SEQ ID NO: 1175683 - DNA, 15 bp, Homo sapiens
tcataaaattatttt

SEQ ID NO: 1175684 - DNA, 15 bp, Homo sapiens
ttcataaaattattt

SEQ ID NO: 1175685 - DNA, 15 bp, Homo sapiens
attcataaaattatt

SEQ ID NO: 1175686 - DNA, 15 bp, Homo sapiens
aattcataaaattat

SEQ ID NO: 1175687 - DNA, 15 bp, Homo sapiens
taattcataaaatta

SEQ ID NO: 1175688 - DNA, 15 bp, Homo sapiens
gtaattcataaaatt

SEQ ID NO: 1175689 - DNA, 15 bp, Homo sapiens
agtaattcataaaat

SEQ ID NO: 1175690 - DNA, 15 bp, Homo sapiens
gagtaattcataaaa

SEQ ID NO: 1175691 - DNA, 15 bp, Homo sapiens
ggagtaattcataaa

SEQ ID NO: 1175692 - DNA, 15 bp, Homo sapiens
tggagtaattcataa

SEQ ID NO: 1175693 - DNA, 15 bp, Homo sapiens
atggagtaattcata

SEQ ID NO: 1175694 - DNA, 15 bp, Homo sapiens
tatggagtaattcat

SEQ ID NO: 1175695 - DNA, 15 bp, Homo sapiens
ctatggagtaattca

SEQ ID NO: 1175696 - DNA, 15 bp, Homo sapiens
actatggagtaattc

SEQ ID NO: 1175697 - DNA, 15 bp, Homo sapiens
tactatggagtaatt

SEQ ID NO: 1175698 - DNA, 15 bp, Homo sapiens
atactatggagtaat

SEQ ID NO: 1175699 - DNA, 15 bp, Homo sapiens
aatactatggagtaa

SEQ ID NO: 1175700 - DNA, 15 bp, Homo sapiens
caatactatggagta

SEQ ID NO: 1175701 - DNA, 15 bp, Homo sapiens
gcaatactatggagt

SEQ ID NO: 1175702 - DNA, 15 bp, Homo sapiens
tgcaatactatggag

SEQ ID NO: 1175703 - DNA, 15 bp, Homo sapiens
atgcaatactatgga

SEQ ID NO: 1175704 - DNA, 15 bp, Homo sapiens
tatgcaatactatgg

SEQ ID NO: 1175705 - DNA, 15 bp, Homo sapiens
ttatgcaatactatg

SEQ ID NO: 1175706 - DNA, 15 bp, Homo sapiens
tttatgcaatactat

SEQ ID NO: 1175707 - DNA, 15 bp, Homo sapiens
ttttatgcaatacta

SEQ ID NO: 1175708 - DNA, 15 bp, Homo sapiens
attttatgcaatact

SEQ ID NO: 1175709 - DNA, 15 bp, Homo sapiens
cattttatgcaatac

SEQ ID NO: 1175710 - DNA, 15 bp, Homo sapiens
tcattttatgcaata

SEQ ID NO: 1175711 - DNA, 15 bp, Homo sapiens
gtcattttatgcaat

SEQ ID NO: 1175712 - DNA, 15 bp, Homo sapiens
tgtcattttatgcaa

SEQ ID NO: 1175713 - DNA, 15 bp, Homo sapiens
ttgtcattttatgca

SEQ ID NO: 1175714 - DNA, 15 bp, Homo sapiens
attgtcattttatgc

SEQ ID NO: 1175715 - DNA, 15 bp, Homo sapiens
aattgtcattttatg

SEQ ID NO: 1175716 - DNA, 15 bp, Homo sapiens
aaattgtcattttat

SEQ ID NO: 1175717 - DNA, 15 bp, Homo sapiens
gaaattgtcatttta

SEQ ID NO: 1175718 - DNA, 15 bp, Homo sapiens
tgaaattgtcatttt

SEQ ID NO: 1175719 - DNA, 15 bp, Homo sapiens
atgaaattgtcattt

SEQ ID NO: 1175720 - DNA, 15 bp, Homo sapiens
aatgaaattgtcatt

SEQ ID NO: 1175721 - DNA, 15 bp, Homo sapiens
caatgaaattgtcat

SEQ ID NO: 1175722 - DNA, 15 bp, Homo sapiens
ccaatgaaattgtca

SEQ ID NO: 1175723 - DNA, 15 bp, Homo sapiens
accaatgaaattgtc

SEQ ID NO: 1175724 - DNA, 15 bp, Homo sapiens
caccaatgaaattgt

SEQ ID NO: 1175725 - DNA, 15 bp, Homo sapiens
acaccaatgaaattg

SEQ ID NO: 1175726 - DNA, 15 bp, Homo sapiens
gacaccaatgaaatt

SEQ ID NO: 1175727 - DNA, 15 bp, Homo sapiens
agacaccaatgaaat

SEQ ID NO: 1175728 - DNA, 15 bp, Homo sapiens
aagacaccaatgaaa

SEQ ID NO: 1175729 - DNA, 15 bp, Homo sapiens
taagacaccaatgaa

SEQ ID NO: 1175730 - DNA, 15 bp, Homo sapiens
ataagacaccaatga

SEQ ID NO: 1175731 - DNA, 15 bp, Homo sapiens
gataagacaccaatg

SEQ ID NO: 1175732 - DNA, 15 bp, Homo sapiens
agataagacaccaat

SEQ ID NO: 1175733 - DNA, 15 bp, Homo sapiens
gagataagacaccaa

SEQ ID NO: 1175734 - DNA, 15 bp, Homo sapiens
tgagataagacacca

SEQ ID NO: 1175735 - DNA, 15 bp, Homo sapiens
ttgagataagacacc

SEQ ID NO: 1175736 - DNA, 15 bp, Homo sapiens
cttgagataagacac

SEQ ID NO: 1175737 - DNA, 15 bp, Homo sapiens
gcttgagataagaca

SEQ ID NO: 1175738 - DNA, 15 bp, Homo sapiens
tgcttgagataagac

SEQ ID NO: 1175739 - DNA, 15 bp, Homo sapiens
ctgcttgagataaga

SEQ ID NO: 1175740 - DNA, 15 bp, Homo sapiens
actgcttgagataag

SEQ ID NO: 1175741 - DNA, 15 bp, Homo sapiens
tactgcttgagataa

SEQ ID NO: 1175742 - DNA, 15 bp, Homo sapiens
atactgcttgagata

SEQ ID NO: 1175743 - DNA, 15 bp, Homo sapiens
aatactgcttgagat

SEQ ID NO: 1175744 - DNA, 15 bp, Homo sapiens
taatactgcttgaga

SEQ ID NO: 1175745 - DNA, 15 bp, Homo sapiens
ataatactgcttgag

SEQ ID NO: 1175746 - DNA, 15 bp, Homo sapiens
gataatactgcttga

SEQ ID NO: 1175747 - DNA, 15 bp, Homo sapiens
agataatactgcttg

SEQ ID NO: 1175748 - DNA, 15 bp, Homo sapiens
tagataatactgctt

SEQ ID NO: 1175749 - DNA, 15 bp, Homo sapiens
atagataatactgct

SEQ ID NO: 1175750 - DNA, 15 bp, Homo sapiens
gatagataatactgc

SEQ ID NO: 1175751 - DNA, 15 bp, Homo sapiens
tgatagataatactg

SEQ ID NO: 1175752 - DNA, 15 bp, Homo sapiens
ttgatagataatact

SEQ ID NO: 1175753 - DNA, 15 bp, Homo sapiens
tttgatagataatac

SEQ ID NO: 1175754 - DNA, 15 bp, Homo sapiens
atttgatagataata

SEQ ID NO: 1175755 - DNA, 15 bp, Homo sapiens
gatttgatagataat

SEQ ID NO: 1175756 - DNA, 15 bp, Homo sapiens
agatttgatagataa

SEQ ID NO: 1175757 - DNA, 15 bp, Homo sapiens
aagatttgatagata

SEQ ID NO: 1175758 - DNA, 15 bp, Homo sapiens
gaagatttgatagat

SEQ ID NO: 1175759 - DNA, 15 bp, Homo sapiens
tgaagatttgataga

SEQ ID NO: 1175760 - DNA, 15 bp, Homo sapiens
atgaagatttgatag

SEQ ID NO: 1175761 - DNA, 15 bp, Homo sapiens
aatgaagatttgata

SEQ ID NO: 1175762 - DNA, 15 bp, Homo sapiens
taatgaagatttgat

SEQ ID NO: 1175763 - DNA, 15 bp, Homo sapiens
ctaatgaagatttga

SEQ ID NO: 1175764 - DNA, 15 bp, Homo sapiens
gctaatgaagatttg

SEQ ID NO: 1175765 - DNA, 15 bp, Homo sapiens
cgctaatgaagattt

SEQ ID NO: 1175766 - DNA, 15 bp, Homo sapiens
tcgctaatgaagatt

SEQ ID NO: 1175767 - DNA, 15 bp, Homo sapiens
ctcgctaatgaagat

SEQ ID NO: 1175768 - DNA, 15 bp, Homo sapiens
cctcgctaatgaaga

SEQ ID NO: 1175769 - DNA, 15 bp, Homo sapiens
gcctcgctaatgaag

SEQ ID NO: 1175770 - DNA, 15 bp, Homo sapiens
tgcctcgctaatgaa

SEQ ID NO: 1175771 - DNA, 15 bp, Homo sapiens
ttgcctcgctaatga

SEQ ID NO: 1175772 - DNA, 15 bp, Homo sapiens
tttgcctcgctaatg

SEQ ID NO: 1175773 - DNA, 15 bp, Homo sapiens
ttttgcctcgctaat

SEQ ID NO: 1175774 - DNA, 15 bp, Homo sapiens
cttttgcctcgctaa

SEQ ID NO: 1175775 - DNA, 15 bp, Homo sapiens
tcttttgcctcgcta

SEQ ID NO: 1175776 - DNA, 15 bp, Homo sapiens
atcttttgcctcgct

SEQ ID NO: 1175777 - DNA, 15 bp, Homo sapiens
catcttttgcctcgc

SEQ ID NO: 1175778 - DNA, 15 bp, Homo sapiens
tcatcttttgcctcg

SEQ ID NO: 1175779 - DNA, 15 bp, Homo sapiens
atcatcttttgcctc

SEQ ID NO: 1175780 - DNA, 15 bp, Homo sapiens
catcatcttttgcct

SEQ ID NO: 1175781 - DNA, 15 bp, Homo sapiens
tcatcatcttttgcc

SEQ ID NO: 1175782 - DNA, 15 bp, Homo sapiens
gtcatcatcttttgc

SEQ ID NO: 1175783 - DNA, 15 bp, Homo sapiens
tgtcatcatcttttg

SEQ ID NO: 1175784 - DNA, 15 bp, Homo sapiens
atgtcatcatctttt

SEQ ID NO: 1175785 - DNA, 15 bp, Homo sapiens
tatgtcatcatcttt

SEQ ID NO: 1175786 - DNA, 15 bp, Homo sapiens
atatgtcatcatctt

SEQ ID NO: 1175787 - DNA, 15 bp, Homo sapiens
tatatgtcatcatct

SEQ ID NO: 1175788 - DNA, 15 bp, Homo sapiens
gtatatgtcatcatc

SEQ ID NO: 1175789 - DNA, 15 bp, Homo sapiens
cgtatatgtcatcat

SEQ ID NO: 1175790 - DNA, 15 bp, Homo sapiens
acgtatatgtcatca

SEQ ID NO: 1175791 - DNA, 15 bp, Homo sapiens
aacgtatatgtcatc

SEQ ID NO: 1175792 - DNA, 15 bp, Homo sapiens
gaacgtatatgtcat

SEQ ID NO: 1175793 - DNA, 15 bp, Homo sapiens
tgaacgtatatgtca

SEQ ID NO: 1175794 - DNA, 15 bp, Homo sapiens
ttgaacgtatatgtc

SEQ ID NO: 1175795 - DNA, 15 bp, Homo sapiens
tttgaacgtatatgt

SEQ ID NO: 1175796 - DNA, 15 bp, Homo sapiens
ctttgaacgtatatg

SEQ ID NO: 1175797 - DNA, 15 bp, Homo sapiens
actttgaacgtatat

SEQ ID NO: 1175798 - DNA, 15 bp, Homo sapiens
gactttgaacgtata

SEQ ID NO: 1175799 - DNA, 15 bp, Homo sapiens
agactttgaacgtat

SEQ ID NO: 1175800 - DNA, 15 bp, Homo sapiens
gagactttgaacgta

SEQ ID NO: 1175801 - DNA, 15 bp, Homo sapiens
tgagactttgaacgt

SEQ ID NO: 1175802 - DNA, 15 bp, Homo sapiens
gtgagactttgaacg

SEQ ID NO: 1175803 - DNA, 15 bp, Homo sapiens
agtgagactttgaac

SEQ ID NO: 1175804 - DNA, 15 bp, Homo sapiens
tagtgagactttgaa

SEQ ID NO: 1175805 - DNA, 15 bp, Homo sapiens
ctagtgagactttga

SEQ ID NO: 1175806 - DNA, 15 bp, Homo sapiens
tctagtgagactttg

SEQ ID NO: 1175807 - DNA, 15 bp, Homo sapiens
ctctagtgagacttt

SEQ ID NO: 1175808 - DNA, 15 bp, Homo sapiens
actctagtgagactt

SEQ ID NO: 1175809 - DNA, 15 bp, Homo sapiens
tactctagtgagact

SEQ ID NO: 1175810 - DNA, 15 bp, Homo sapiens
atactctagtgagac

SEQ ID NO: 1175811 - DNA, 15 bp, Homo sapiens
tatactctagtgaga

SEQ ID NO: 1175812 - DNA, 15 bp, Homo sapiens
ctatactctagtgag

SEQ ID NO: 1175813 - DNA, 15 bp, Homo sapiens
actatactctagtga

SEQ ID NO: 1175814 - DNA, 15 bp, Homo sapiens
gactatactctagtg

SEQ ID NO: 1175815 - DNA, 15 bp, Homo sapiens
agactatactctagt

SEQ ID NO: 1175816 - DNA, 15 bp, Homo sapiens
tagactatactctag

SEQ ID NO: 1175817 - DNA, 15 bp, Homo sapiens
ttagactatactcta

SEQ ID NO: 1175818 - DNA, 15 bp, Homo sapiens
tttagactatactct

SEQ ID NO: 1175819 - DNA, 15 bp, Homo sapiens
ctttagactatactc

SEQ ID NO: 1175820 - DNA, 15 bp, Homo sapiens
gctttagactatact

SEQ ID NO: 1175821 - DNA, 15 bp, Homo sapiens
tgctttagactatac

SEQ ID NO: 1175822 - DNA, 15 bp, Homo sapiens
ttgctttagactata

SEQ ID NO: 1175823 - DNA, 15 bp, Homo sapiens
cttgctttagactat

SEQ ID NO: 1175824 - DNA, 15 bp, Homo sapiens
gcttgctttagacta

SEQ ID NO: 1175825 - DNA, 15 bp, Homo sapiens
ggcttgctttagact

SEQ ID NO: 1175826 - DNA, 15 bp, Homo sapiens
aggcttgctttagac

SEQ ID NO: 1175827 - DNA, 15 bp, Homo sapiens
caggcttgctttaga

SEQ ID NO: 1175828 - DNA, 15 bp, Homo sapiens
gcaggcttgctttag

SEQ ID NO: 1175829 - DNA, 15 bp, Homo sapiens
tgcaggcttgcttta

SEQ ID NO: 1175830 - DNA, 15 bp, Homo sapiens
gtgcaggcttgcttt

SEQ ID NO: 1175831 - DNA, 15 bp, Homo sapiens
tgtgcaggcttgctt

SEQ ID NO: 1175832 - DNA, 15 bp, Homo sapiens
ctgtgcaggcttgct

SEQ ID NO: 1175833 - DNA, 15 bp, Homo sapiens
tctgtgcaggcttgc

SEQ ID NO: 1175834 - DNA, 15 bp, Homo sapiens
ctctgtgcaggcttg

SEQ ID NO: 1175835 - DNA, 15 bp, Homo sapiens
gctctgtgcaggctt

SEQ ID NO: 1175836 - DNA, 15 bp, Homo sapiens
ggctctgtgcaggct

SEQ ID NO: 1175837 - DNA, 15 bp, Homo sapiens
tggctctgtgcaggc

SEQ ID NO: 1175838 - DNA, 15 bp, Homo sapiens
atggctctgtgcagg

SEQ ID NO: 1175839 - DNA, 15 bp, Homo sapiens
gatggctctgtgcag

SEQ ID NO: 1175840 - DNA, 15 bp, Homo sapiens
ggatggctctgtgca

SEQ ID NO: 1175841 - DNA, 15 bp, Homo sapiens
tggatggctctgtgc

SEQ ID NO: 1175842 - DNA, 15 bp, Homo sapiens
ttggatggctctgtg

SEQ ID NO: 1175843 - DNA, 15 bp, Homo sapiens
gttggatggctctgt

SEQ ID NO: 1175844 - DNA, 15 bp, Homo sapiens
agttggatggctctg

SEQ ID NO: 1175845 - DNA, 15 bp, Homo sapiens
gagttggatggctct

SEQ ID NO: 1175846 - DNA, 15 bp, Homo sapiens
ggagttggatggctc

SEQ ID NO: 1175847 - DNA, 15 bp, Homo sapiens
tggagttggatggct

SEQ ID NO: 1175848 - DNA, 15 bp, Homo sapiens
ctggagttggatggc

SEQ ID NO: 1175849 - DNA, 15 bp, Homo sapiens
cctggagttggatgg

SEQ ID NO: 1175850 - DNA, 15 bp, Homo sapiens
ccctggagttggatg

SEQ ID NO: 1175851 - DNA, 15 bp, Homo sapiens
cccctggagttggat

SEQ ID NO: 1175852 - DNA, 15 bp, Homo sapiens
tcccctggagttgga

SEQ ID NO: 1175853 - DNA, 15 bp, Homo sapiens
ttcccctggagttgg

SEQ ID NO: 1175854 - DNA, 15 bp, Homo sapiens
gttcccctggagttg

SEQ ID NO: 1175855 - DNA, 15 bp, Homo sapiens
agttcccctggagtt

SEQ ID NO: 1175856 - DNA, 15 bp, Homo sapiens
gagttcccctggagt

SEQ ID NO: 1175857 - DNA, 15 bp, Homo sapiens
ggagttcccctggag

SEQ ID NO: 1175858 - DNA, 15 bp, Homo sapiens
tggagttcccctgga

SEQ ID NO: 1175859 - DNA, 15 bp, Homo sapiens
ttggagttcccctgg

SEQ ID NO: 1175860 - DNA, 15 bp, Homo sapiens
gttggagttcccctg

SEQ ID NO: 1175861 - DNA, 15 bp, Homo sapiens
agttggagttcccct

SEQ ID NO: 1175862 - DNA, 15 bp, Homo sapiens
aagttggagttcccc

SEQ ID NO: 1175863 - DNA, 15 bp, Homo sapiens
taagttggagttccc

SEQ ID NO: 1175864 - DNA, 15 bp, Homo sapiens
ataagttggagttcc

SEQ ID NO: 1175865 - DNA, 15 bp, Homo sapiens
aataagttggagttc

SEQ ID NO: 1175866 - DNA, 15 bp, Homo sapiens
aaataagttggagtt

SEQ ID NO: 1175867 - DNA, 15 bp, Homo sapiens
caaataagttggagt

SEQ ID NO: 1175868 - DNA, 15 bp, Homo sapiens
tcaaataagttggag

SEQ ID NO: 1175869 - DNA, 15 bp, Homo sapiens
ttcaaataagttgga

SEQ ID NO: 1175870 - DNA, 15 bp, Homo sapiens
attcaaataagttgg

SEQ ID NO: 1175871 - DNA, 15 bp, Homo sapiens
aattcaaataagttg

SEQ ID NO: 1175872 - DNA, 15 bp, Homo sapiens
caattcaaataagtt

SEQ ID NO: 1175873 - DNA, 15 bp, Homo sapiens
acaattcaaataagt

SEQ ID NO: 1175874 - DNA, 15 bp, Homo sapiens
aacaattcaaataag

SEQ ID NO: 1175875 - DNA, 15 bp, Homo sapiens
taacaattcaaataa

SEQ ID NO: 1175876 - DNA, 15 bp, Homo sapiens
ataacaattcaaata

SEQ ID NO: 1175877 - DNA, 15 bp, Homo sapiens
aataacaattcaaat

SEQ ID NO: 1175878 - DNA, 15 bp, Homo sapiens
aaataacaattcaaa

SEQ ID NO: 1175879 - DNA, 15 bp, Homo sapiens
caaataacaattcaa

SEQ ID NO: 1175880 - DNA, 15 bp, Homo sapiens
gcaaataacaattca

SEQ ID NO: 1175881 - DNA, 15 bp, Homo sapiens
agcaaataacaattc

SEQ ID NO: 1175882 - DNA, 15 bp, Homo sapiens
cagcaaataacaatt

SEQ ID NO: 1175883 - DNA, 15 bp, Homo sapiens
acagcaaataacaat

SEQ ID NO: 1175884 - DNA, 15 bp, Homo sapiens
aacagcaaataacaa

SEQ ID NO: 1175885 - DNA, 15 bp, Homo sapiens
caacagcaaataaca

SEQ ID NO: 1175886 - DNA, 15 bp, Homo sapiens
tcaacagcaaataac

SEQ ID NO: 1175887 - DNA, 15 bp, Homo sapiens
ctcaacagcaaataa

SEQ ID NO: 1175888 - DNA, 15 bp, Homo sapiens
cctcaacagcaaata

SEQ ID NO: 1175889 - DNA, 15 bp, Homo sapiens
tcctcaacagcaaat

SEQ ID NO: 1175890 - DNA, 15 bp, Homo sapiens
ctcctcaacagcaaa

SEQ ID NO: 1175891 - DNA, 15 bp, Homo sapiens
cctcctcaacagcaa

SEQ ID NO: 1175892 - DNA, 15 bp, Homo sapiens
ccctcctcaacagca

SEQ ID NO: 1175893 - DNA, 15 bp, Homo sapiens
gccctcctcaacagc

SEQ ID NO: 1175894 - DNA, 15 bp, Homo sapiens
cgccctcctcaacag

SEQ ID NO: 1175895 - DNA, 15 bp, Homo sapiens
acgccctcctcaaca

SEQ ID NO: 1175896 - DNA, 15 bp, Homo sapiens
tacgccctcctcaac

SEQ ID NO: 1175897 - DNA, 15 bp, Homo sapiens
ctacgccctcctcaa

SEQ ID NO: 1175898 - DNA, 15 bp, Homo sapiens
tctacgccctcctca

SEQ ID NO: 1175899 - DNA, 15 bp, Homo sapiens
gtctacgccctcctc

SEQ ID NO: 1175900 - DNA, 15 bp, Homo sapiens
agtctacgccctcct

SEQ ID NO: 1175901 - DNA, 15 bp, Homo sapiens
gagtctacgccctcc

SEQ ID NO: 1175902 - DNA, 15 bp, Homo sapiens
agagtctacgccctc

SEQ ID NO: 1175903 - DNA, 15 bp, Homo sapiens
cagagtctacgccct

SEQ ID NO: 1175904 - DNA, 15 bp, Homo sapiens
ccagagtctacgccc

SEQ ID NO: 1175905 - DNA, 15 bp, Homo sapiens
cccagagtctacgcc

SEQ ID NO: 1175906 - DNA, 15 bp, Homo sapiens
acccagagtctacgc

SEQ ID NO: 1175907 - DNA, 15 bp, Homo sapiens
aacccagagtctacg

SEQ ID NO: 1175908 - DNA, 15 bp, Homo sapiens
taacccagagtctac

SEQ ID NO: 1175909 - DNA, 15 bp, Homo sapiens
ctaacccagagtcta

SEQ ID NO: 1175910 - DNA, 15 bp, Homo sapiens
tctaacccagagtct

SEQ ID NO: 1175911 - DNA, 15 bp, Homo sapiens
atctaacccagagtc

SEQ ID NO: 1175912 - DNA, 15 bp, Homo sapiens
catctaacccagagt

SEQ ID NO: 1175913 - DNA, 15 bp, Homo sapiens
gcatctaacccagag

SEQ ID NO: 1175914 - DNA, 15 bp, Homo sapiens
agcatctaacccaga

SEQ ID NO: 1175915 - DNA, 15 bp, Homo sapiens
aagcatctaacccag

SEQ ID NO: 1175916 - DNA, 15 bp, Homo sapiens
gaagcatctaaccca

SEQ ID NO: 1175917 - DNA, 15 bp, Homo sapiens
agaagcatctaaccc

SEQ ID NO: 1175918 - DNA, 15 bp, Homo sapiens
aagaagcatctaacc

SEQ ID NO: 1175919 - DNA, 15 bp, Homo sapiens
aaagaagcatctaac

SEQ ID NO: 1175920 - DNA, 15 bp, Homo sapiens
caaagaagcatctaa

SEQ ID NO: 1175921 - DNA, 15 bp, Homo sapiens
gcaaagaagcatcta

SEQ ID NO: 1175922 - DNA, 15 bp, Homo sapiens
tgcaaagaagcatct

SEQ ID NO: 1175923 - DNA, 15 bp, Homo sapiens
ctgcaaagaagcatc

SEQ ID NO: 1175924 - DNA, 15 bp, Homo sapiens
tctgcaaagaagcat

SEQ ID NO: 1175925 - DNA, 15 bp, Homo sapiens
atctgcaaagaagca

SEQ ID NO: 1175926 - DNA, 15 bp, Homo sapiens
aatctgcaaagaagc

SEQ ID NO: 1175927 - DNA, 15 bp, Homo sapiens
taatctgcaaagaag

SEQ ID NO: 1175928 - DNA, 15 bp, Homo sapiens
ataatctgcaaagaa

SEQ ID NO: 1175929 - DNA, 15 bp, Homo sapiens
aataatctgcaaaga

SEQ ID NO: 1175930 - DNA, 15 bp, Homo sapiens
aaataatctgcaaag

SEQ ID NO: 1175931 - DNA, 15 bp, Homo sapiens
taaataatctgcaaa

SEQ ID NO: 1175932 - DNA, 15 bp, Homo sapiens
ctaaataatctgcaa

SEQ ID NO: 1175933 - DNA, 15 bp, Homo sapiens
actaaataatctgca

SEQ ID NO: 1175934 - DNA, 15 bp, Homo sapiens
aactaaataatctgc

SEQ ID NO: 1175935 - DNA, 15 bp, Homo sapiens
caactaaataatctg

SEQ ID NO: 1175936 - DNA, 15 bp, Homo sapiens
gcaactaaataatct

SEQ ID NO: 1175937 - DNA, 15 bp, Homo sapiens
tgcaactaaataatc

SEQ ID NO: 1175938 - DNA, 15 bp, Homo sapiens
ttgcaactaaataat

SEQ ID NO: 1175939 - DNA, 15 bp, Homo sapiens
tttgcaactaaataa

SEQ ID NO: 1175940 - DNA, 15 bp, Homo sapiens
atttgcaactaaata

SEQ ID NO: 1175941 - DNA, 15 bp, Homo sapiens
catttgcaactaaat

SEQ ID NO: 1175942 - DNA, 15 bp, Homo sapiens
acatttgcaactaaa

SEQ ID NO: 1175943 - DNA, 15 bp, Homo sapiens
gacatttgcaactaa

SEQ ID NO: 1175944 - DNA, 15 bp, Homo sapiens
tgacatttgcaacta

SEQ ID NO: 1175945 - DNA, 15 bp, Homo sapiens
atgacatttgcaact

SEQ ID NO: 1175946 - DNA, 15 bp, Homo sapiens
tatgacatttgcaac

SEQ ID NO: 1175947 - DNA, 15 bp, Homo sapiens
ctatgacatttgcaa

SEQ ID NO: 1175948 - DNA, 15 bp, Homo sapiens
actatgacatttgca

SEQ ID NO: 1175949 - DNA, 15 bp, Homo sapiens
aactatgacatttgc

SEQ ID NO: 1175950 - DNA, 15 bp, Homo sapiens
aaactatgacatttg

SEQ ID NO: 1175951 - DNA, 15 bp, Homo sapiens
aaaactatgacattt

SEQ ID NO: 1175952 - DNA, 15 bp, Homo sapiens
taaaactatgacatt

SEQ ID NO: 1175953 - DNA, 15 bp, Homo sapiens
ataaaactatgacat

SEQ ID NO: 1175954 - DNA, 15 bp, Homo sapiens
gataaaactatgaca

SEQ ID NO: 1175955 - DNA, 15 bp, Homo sapiens
cgataaaactatgac

SEQ ID NO: 1175956 - DNA, 15 bp, Homo sapiens
gcgataaaactatga

SEQ ID NO: 1175957 - DNA, 15 bp, Homo sapiens
ggcgataaaactatg

SEQ ID NO: 1175958 - DNA, 15 bp, Homo sapiens
gggcgataaaactat

SEQ ID NO: 1175959 - DNA, 15 bp, Homo sapiens
agggcgataaaacta

SEQ ID NO: 1175960 - DNA, 15 bp, Homo sapiens
aagggcgataaaact

SEQ ID NO: 1175961 - DNA, 15 bp, Homo sapiens
aaagggcgataaaac

SEQ ID NO: 1175962 - DNA, 15 bp, Homo sapiens
taaagggcgataaaa

SEQ ID NO: 1175963 - DNA, 15 bp, Homo sapiens
ctaaagggcgataaa

SEQ ID NO: 1175964 - DNA, 15 bp, Homo sapiens
cctaaagggcgataa

SEQ ID NO: 1175965 - DNA, 15 bp, Homo sapiens
ccctaaagggcgata

SEQ ID NO: 1175966 - DNA, 15 bp, Homo sapiens
gccctaaagggcgat

SEQ ID NO: 1175967 - DNA, 15 bp, Homo sapiens
tgccctaaagggcga

SEQ ID NO: 1175968 - DNA, 15 bp, Homo sapiens
atgccctaaagggcg

SEQ ID NO: 1175969 - DNA, 15 bp, Homo sapiens
aatgccctaaagggc

SEQ ID NO: 1175970 - DNA, 15 bp, Homo sapiens
taatgccctaaaggg

SEQ ID NO: 1175971 - DNA, 15 bp, Homo sapiens
ttaatgccctaaagg

SEQ ID NO: 1175972 - DNA, 15 bp, Homo sapiens
gttaatgccctaaag

SEQ ID NO: 1175973 - DNA, 15 bp, Homo sapiens
ggttaatgccctaaa

SEQ ID NO: 1175974 - DNA, 15 bp, Homo sapiens
aggttaatgccctaa

SEQ ID NO: 1175975 - DNA, 15 bp, Homo sapiens
aaggttaatgcccta

SEQ ID NO: 1175976 - DNA, 15 bp, Homo sapiens
taaggttaatgccct

SEQ ID NO: 1175977 - DNA, 15 bp, Homo sapiens
ataaggttaatgccc

SEQ ID NO: 1175978 - DNA, 15 bp, Homo sapiens
cataaggttaatgcc

SEQ ID NO: 1175979 - DNA, 15 bp, Homo sapiens
tcataaggttaatgc

SEQ ID NO: 1175980 - DNA, 15 bp, Homo sapiens
atcataaggttaatg

SEQ ID NO: 1175981 - DNA, 15 bp, Homo sapiens
gatcataaggttaat

SEQ ID NO: 1175982 - DNA, 15 bp, Homo sapiens
ggatcataaggttaa

SEQ ID NO: 1175983 - DNA, 15 bp, Homo sapiens
tggatcataaggtta

SEQ ID NO: 1175984 - DNA, 15 bp, Homo sapiens
atggatcataaggtt

SEQ ID NO: 1175985 - DNA, 15 bp, Homo sapiens
gatggatcataaggt

SEQ ID NO: 1175986 - DNA, 15 bp, Homo sapiens
ggatggatcataagg

SEQ ID NO: 1175987 - DNA, 15 bp, Homo sapiens
cggatggatcataag

SEQ ID NO: 1175988 - DNA, 15 bp, Homo sapiens
gcggatggatcataa

SEQ ID NO: 1175989 - DNA, 15 bp, Homo sapiens
ggcggatggatcata

SEQ ID NO: 1175990 - DNA, 15 bp, Homo sapiens
aggcggatggatcat

SEQ ID NO: 1175991 - DNA, 15 bp, Homo sapiens
gcgtggtggctcatg

SEQ ID NO: 1175992 - DNA, 15 bp, Homo sapiens
ggcgtggtggctcat

SEQ ID NO: 1175993 - DNA, 15 bp, Homo sapiens
tgggcgtggtggctc

SEQ ID NO: 1175994 - DNA, 15 bp, Homo sapiens
ctgggcgtggtggct

SEQ ID NO: 1175995 - DNA, 15 bp, Homo sapiens
ggctgggcgtggtgg

SEQ ID NO: 1175996 - DNA, 15 bp, Homo sapiens
aggctgggcgtggtg

SEQ ID NO: 1175997 - DNA, 15 bp, Homo sapiens
gaggctgggcgtggt

SEQ ID NO: 1175998 - DNA, 15 bp, Homo sapiens
agaggctgggcgtgg

SEQ ID NO: 1175999 - DNA, 15 bp, Homo sapiens
gagaggctgggcgtg

SEQ ID NO: 1176000 - DNA, 15 bp, Homo sapiens
tgagaggctgggcgt

SEQ ID NO: 1176001 - DNA, 15 bp, Homo sapiens
atgagaggctgggcg

SEQ ID NO: 1176002 - DNA, 15 bp, Homo sapiens
tatgagaggctgggc

SEQ ID NO: 1176003 - DNA, 15 bp, Homo sapiens
atatgagaggctggg

SEQ ID NO: 1176004 - DNA, 15 bp, Homo sapiens
gatatgagaggctgg

SEQ ID NO: 1176005 - DNA, 15 bp, Homo sapiens
ggatatgagaggctg

SEQ ID NO: 1176006 - DNA, 15 bp, Homo sapiens
aggatatgagaggct

SEQ ID NO: 1176007 - DNA, 15 bp, Homo sapiens
gaggatatgagaggc

SEQ ID NO: 1176008 - DNA, 15 bp, Homo sapiens
agaggatatgagagg

SEQ ID NO: 1176009 - DNA, 15 bp, Homo sapiens
aagaggatatgagag

SEQ ID NO: 1176010 - DNA, 15 bp, Homo sapiens
aaaagaggatatgag

SEQ ID NO: 1176011 - DNA, 15 bp, Homo sapiens
caaaagaggatatga

SEQ ID NO: 1176012 - DNA, 15 bp, Homo sapiens
tcaaaagaggatatg

SEQ ID NO: 1176013 - DNA, 15 bp, Homo sapiens
ttcaaaagaggatat

SEQ ID NO: 1176014 - DNA, 15 bp, Homo sapiens
attcaaaagaggata

SEQ ID NO: 1176015 - DNA, 15 bp, Homo sapiens
cattcaaaagaggat

SEQ ID NO: 1176016 - DNA, 15 bp, Homo sapiens
tcattcaaaagagga

SEQ ID NO: 1176017 - DNA, 15 bp, Homo sapiens
ctcattcaaaagagg

SEQ ID NO: 1176018 - DNA, 15 bp, Homo sapiens
gctcattcaaaagag

SEQ ID NO: 1176019 - DNA, 15 bp, Homo sapiens
agctcattcaaaaga

SEQ ID NO: 1176020 - DNA, 15 bp, Homo sapiens
aagctcattcaaaag

SEQ ID NO: 1176021 - DNA, 15 bp, Homo sapiens
aaagctcattcaaaa

SEQ ID NO: 1176022 - DNA, 15 bp, Homo sapiens
caaagctcattcaaa

SEQ ID NO: 1176023 - DNA, 15 bp, Homo sapiens
acaaagctcattcaa

SEQ ID NO: 1176024 - DNA, 15 bp, Homo sapiens
gacaaagctcattca

SEQ ID NO: 1176025 - DNA, 15 bp, Homo sapiens
tgacaaagctcattc

SEQ ID NO: 1176026 - DNA, 15 bp, Homo sapiens
atgacaaagctcatt

SEQ ID NO: 1176027 - DNA, 15 bp, Homo sapiens
gatgacaaagctcat

SEQ ID NO: 1176028 - DNA, 15 bp, Homo sapiens
agatgacaaagctca

SEQ ID NO: 1176029 - DNA, 15 bp, Homo sapiens
aagatgacaaagctc

SEQ ID NO: 1176030 - DNA, 15 bp, Homo sapiens
caagatgacaaagct

SEQ ID NO: 1176031 - DNA, 15 bp, Homo sapiens
gcaagatgacaaagc

SEQ ID NO: 1176032 - DNA, 15 bp, Homo sapiens
agcaagatgacaaag

SEQ ID NO: 1176033 - DNA, 15 bp, Homo sapiens
cagcaagatgacaaa

SEQ ID NO: 1176034 - DNA, 15 bp, Homo sapiens
ccagcaagatgacaa

SEQ ID NO: 1176035 - DNA, 15 bp, Homo sapiens
accagcaagatgaca

SEQ ID NO: 1176036 - DNA, 15 bp, Homo sapiens
aaccagcaagatgac

SEQ ID NO: 1176037 - DNA, 15 bp, Homo sapiens
gaaccagcaagatga

SEQ ID NO: 1176038 - DNA, 15 bp, Homo sapiens
ggaaccagcaagatg

SEQ ID NO: 1176039 - DNA, 15 bp, Homo sapiens
gggaaccagcaagat

SEQ ID NO: 1176040 - DNA, 15 bp, Homo sapiens
agggaaccagcaaga

SEQ ID NO: 1176041 - DNA, 15 bp, Homo sapiens
gagggaaccagcaag

SEQ ID NO: 1176042 - DNA, 15 bp, Homo sapiens
tgagggaaccagcaa

SEQ ID NO: 1176043 - DNA, 15 bp, Homo sapiens
atgagggaaccagca

SEQ ID NO: 1176044 - DNA, 15 bp, Homo sapiens
aatgagggaaccagc

SEQ ID NO: 1176045 - DNA, 15 bp, Homo sapiens
taatgagggaaccag

SEQ ID NO: 1176046 - DNA, 15 bp, Homo sapiens
ttaatgagggaacca

SEQ ID NO: 1176047 - DNA, 15 bp, Homo sapiens
attaatgagggaacc

SEQ ID NO: 1176048 - DNA, 15 bp, Homo sapiens
cattaatgagggaac

SEQ ID NO: 1176049 - DNA, 15 bp, Homo sapiens
tcattaatgagggaa

SEQ ID NO: 1176050 - DNA, 15 bp, Homo sapiens
ctcattaatgaggga

SEQ ID NO: 1176051 - DNA, 15 bp, Homo sapiens
actcattaatgaggg

SEQ ID NO: 1176052 - DNA, 15 bp, Homo sapiens
aactcattaatgagg

SEQ ID NO: 1176053 - DNA, 15 bp, Homo sapiens
taactcattaatgag

SEQ ID NO: 1176054 - DNA, 15 bp, Homo sapiens
ttaactcattaatga

SEQ ID NO: 1176055 - DNA, 15 bp, Homo sapiens
gttaactcattaatg

SEQ ID NO: 1176056 - DNA, 15 bp, Homo sapiens
tgttaactcattaat

SEQ ID NO: 1176057 - DNA, 15 bp, Homo sapiens
ttgttaactcattaa

SEQ ID NO: 1176058 - DNA, 15 bp, Homo sapiens
tttgttaactcatta

SEQ ID NO: 1176059 - DNA, 15 bp, Homo sapiens
atttgttaactcatt

SEQ ID NO: 1176060 - DNA, 15 bp, Homo sapiens
tatttgttaactcat

SEQ ID NO: 1176061 - DNA, 15 bp, Homo sapiens
gtatttgttaactca

SEQ ID NO: 1176062 - DNA, 15 bp, Homo sapiens
agtatttgttaactc

SEQ ID NO: 1176063 - DNA, 15 bp, Homo sapiens
aagtatttgttaact

SEQ ID NO: 1176064 - DNA, 15 bp, Homo sapiens
caagtatttgttaac

SEQ ID NO: 1176065 - DNA, 15 bp, Homo sapiens
tcaagtatttgttaa

SEQ ID NO: 1176066 - DNA, 15 bp, Homo sapiens
gtcaagtatttgtta

SEQ ID NO: 1176067 - DNA, 15 bp, Homo sapiens
tgtcaagtatttgtt

SEQ ID NO: 1176068 - DNA, 15 bp, Homo sapiens
gtgtcaagtatttgt

SEQ ID NO: 1176069 - DNA, 15 bp, Homo sapiens
tgtgtcaagtatttg

SEQ ID NO: 1176070 - DNA, 15 bp, Homo sapiens
atgtgtcaagtattt

SEQ ID NO: 1176071 - DNA, 15 bp, Homo sapiens
aatgtgtcaagtatt

SEQ ID NO: 1176072 - DNA, 15 bp, Homo sapiens
aaatgtgtcaagtat

SEQ ID NO: 1176073 - DNA, 15 bp, Homo sapiens
aaaatgtgtcaagta

SEQ ID NO: 1176074 - DNA, 15 bp, Homo sapiens
aaaaatgtgtcaagt

SEQ ID NO: 1176075 - DNA, 15 bp, Homo sapiens
aaaaaatgtgtcaag

SEQ ID NO: 1176076 - DNA, 15 bp, Homo sapiens
aaaaaaatgtgtcaa

SEQ ID NO: 1176077 - DNA, 15 bp, Homo sapiens
taaaaaaatgtgtca

SEQ ID NO: 1176078 - DNA, 15 bp, Homo sapiens
ttaaaaaaatgtgtc

SEQ ID NO: 1176079 - DNA, 15 bp, Homo sapiens
tttaaaaaaatgtgt

SEQ ID NO: 1176080 - DNA, 15 bp, Homo sapiens
ttttaaaaaaatgtg

SEQ ID NO: 1176081 - DNA, 15 bp, Homo sapiens
tttttaaaaaaatgt

SEQ ID NO: 1176082 - DNA, 15 bp, Homo sapiens
ttttttaaaaaaatg

SEQ ID NO: 1176083 - DNA, 15 bp, Homo sapiens
gttttttaaaaaaat

SEQ ID NO: 1176084 - DNA, 15 bp, Homo sapiens
agttttttaaaaaaa

SEQ ID NO: 1176085 - DNA, 15 bp, Homo sapiens
tagttttttaaaaaa

SEQ ID NO: 1176086 - DNA, 15 bp, Homo sapiens
ttagttttttaaaaa

SEQ ID NO: 1176087 - DNA, 15 bp, Homo sapiens
tttagttttttaaaa

SEQ ID NO: 1176088 - DNA, 15 bp, Homo sapiens
atttagttttttaaa

SEQ ID NO: 1176089 - DNA, 15 bp, Homo sapiens
aatttagttttttaa

SEQ ID NO: 1176090 - DNA, 15 bp, Homo sapiens
gaatttagtttttta

SEQ ID NO: 1176091 - DNA, 15 bp, Homo sapiens
tgaatttagtttttt

SEQ ID NO: 1176092 - DNA, 15 bp, Homo sapiens
atgaatttagttttt

SEQ ID NO: 1176093 - DNA, 15 bp, Homo sapiens
aatgaatttagtttt

SEQ ID NO: 1176094 - DNA, 15 bp, Homo sapiens
taatgaatttagttt

SEQ ID NO: 1176095 - DNA, 15 bp, Homo sapiens
ataatgaatttagtt

SEQ ID NO: 1176096 - DNA, 15 bp, Homo sapiens
aataatgaatttagt

SEQ ID NO: 1176097 - DNA, 15 bp, Homo sapiens
taataatgaatttag

SEQ ID NO: 1176098 - DNA, 15 bp, Homo sapiens
ataataatgaattta

SEQ ID NO: 1176099 - DNA, 15 bp, Homo sapiens
tataataatgaattt

SEQ ID NO: 1176100 - DNA, 15 bp, Homo sapiens
ttataataatgaatt

SEQ ID NO: 1176101 - DNA, 15 bp, Homo sapiens
tttataataatgaat

SEQ ID NO: 1176102 - DNA, 15 bp, Homo sapiens
ttttataataatgaa

SEQ ID NO: 1176103 - DNA, 15 bp, Homo sapiens
tttttataataatga

SEQ ID NO: 1176104 - DNA, 15 bp, Homo sapiens
ttttttataataatg

SEQ ID NO: 1176105 - DNA, 15 bp, Homo sapiens
tttttttataataat

SEQ ID NO: 1176106 - DNA, 15 bp, Homo sapiens
ttttttttataataa

SEQ ID NO: 1176107 - DNA, 15 bp, Homo sapiens
tttttttttataata

SEQ ID NO: 1176108 - DNA, 15 bp, Homo sapiens
ttttttttttataat

SEQ ID NO: 1176109 - DNA, 15 bp, Homo sapiens
cttttttttttataa

SEQ ID NO: 1176110 - DNA, 15 bp, Homo sapiens
acttttttttttata

SEQ ID NO: 1176111 - DNA, 15 bp, Homo sapiens
tacttttttttttat

SEQ ID NO: 1176112 - DNA, 15 bp, Homo sapiens
atactttttttttta

SEQ ID NO: 1176113 - DNA, 15 bp, Homo sapiens
gatactttttttttt

SEQ ID NO: 1176114 - DNA, 15 bp, Homo sapiens
ggatacttttttttt

SEQ ID NO: 1176115 - DNA, 15 bp, Homo sapiens
gggatactttttttt

SEQ ID NO: 1176116 - DNA, 15 bp, Homo sapiens
tgggatacttttttt

SEQ ID NO: 1176117 - DNA, 15 bp, Homo sapiens
ttgggatactttttt

SEQ ID NO: 1176118 - DNA, 15 bp, Homo sapiens
tttgggatacttttt

SEQ ID NO: 1176119 - DNA, 15 bp, Homo sapiens
ttttgggatactttt

SEQ ID NO: 1176120 - DNA, 15 bp, Homo sapiens
attttgggatacttt

SEQ ID NO: 1176121 - DNA, 15 bp, Homo sapiens
aattttgggatactt

SEQ ID NO: 1176122 - DNA, 15 bp, Homo sapiens
aaattttgggatact

SEQ ID NO: 1176123 - DNA, 15 bp, Homo sapiens
taaattttgggatac

SEQ ID NO: 1176124 - DNA, 15 bp, Homo sapiens
ctaaattttgggata

SEQ ID NO: 1176125 - DNA, 15 bp, Homo sapiens
actaaattttgggat

SEQ ID NO: 1176126 - DNA, 15 bp, Homo sapiens
cactaaattttggga

SEQ ID NO: 1176127 - DNA, 15 bp, Homo sapiens
ccactaaattttggg

SEQ ID NO: 1176128 - DNA, 15 bp, Homo sapiens
gccactaaattttgg

SEQ ID NO: 1176129 - DNA, 15 bp, Homo sapiens
agccactaaattttg

SEQ ID NO: 1176130 - DNA, 15 bp, Homo sapiens
aagccactaaatttt

SEQ ID NO: 1176131 - DNA, 15 bp, Homo sapiens
taagccactaaattt

SEQ ID NO: 1176132 - DNA, 15 bp, Homo sapiens
ttaagccactaaatt

SEQ ID NO: 1176133 - DNA, 15 bp, Homo sapiens
tttaagccactaaat

SEQ ID NO: 1176134 - DNA, 15 bp, Homo sapiens
ttttaagccactaaa

SEQ ID NO: 1176135 - DNA, 15 bp, Homo sapiens
gttttaagccactaa

SEQ ID NO: 1176136 - DNA, 15 bp, Homo sapiens
tgttttaagccacta

SEQ ID NO: 1176137 - DNA, 15 bp, Homo sapiens
ttgttttaagccact

SEQ ID NO: 1176138 - DNA, 15 bp, Homo sapiens
gttgttttaagccac

SEQ ID NO: 1176139 - DNA, 15 bp, Homo sapiens
tgttgttttaagcca

SEQ ID NO: 1176140 - DNA, 15 bp, Homo sapiens
gtgttgttttaagcc

SEQ ID NO: 1176141 - DNA, 15 bp, Homo sapiens
ggtgttgttttaagc

SEQ ID NO: 1176142 - DNA, 15 bp, Homo sapiens
tggtgttgttttaag

SEQ ID NO: 1176143 - DNA, 15 bp, Homo sapiens
atggtgttgttttaa

SEQ ID NO: 1176144 - DNA, 15 bp, Homo sapiens
aatggtgttgtttta

SEQ ID NO: 1176145 - DNA, 15 bp, Homo sapiens
gaatggtgttgtttt

SEQ ID NO: 1176146 - DNA, 15 bp, Homo sapiens
tgaatggtgttgttt

SEQ ID NO: 1176147 - DNA, 15 bp, Homo sapiens
atgaatggtgttgtt

SEQ ID NO: 1176148 - DNA, 15 bp, Homo sapiens
catgaatggtgttgt

SEQ ID NO: 1176149 - DNA, 15 bp, Homo sapiens
tcatgaatggtgttg

SEQ ID NO: 1176150 - DNA, 15 bp, Homo sapiens
atcatgaatggtgtt

SEQ ID NO: 1176151 - DNA, 15 bp, Homo sapiens
gatcatgaatggtgt

SEQ ID NO: 1176152 - DNA, 15 bp, Homo sapiens
agatcatgaatggtg

SEQ ID NO: 1176153 - DNA, 15 bp, Homo sapiens
gagatcatgaatggt

SEQ ID NO: 1176154 - DNA, 15 bp, Homo sapiens
agagatcatgaatgg

SEQ ID NO: 1176155 - DNA, 15 bp, Homo sapiens
gagagatcatgaatg

SEQ ID NO: 1176156 - DNA, 15 bp, Homo sapiens
tgagagatcatgaat

SEQ ID NO: 1176157 - DNA, 15 bp, Homo sapiens
ctgagagatcatgaa

SEQ ID NO: 1176158 - DNA, 15 bp, Homo sapiens
tctgagagatcatga

SEQ ID NO: 1176159 - DNA, 15 bp, Homo sapiens
ttctgagagatcatg

SEQ ID NO: 1176160 - DNA, 15 bp, Homo sapiens
attctgagagatcat

SEQ ID NO: 1176161 - DNA, 15 bp, Homo sapiens
cattctgagagatca

SEQ ID NO: 1176162 - DNA, 15 bp, Homo sapiens
acattctgagagatc

SEQ ID NO: 1176163 - DNA, 15 bp, Homo sapiens
gacattctgagagat

SEQ ID NO: 1176164 - DNA, 15 bp, Homo sapiens
agacattctgagaga

SEQ ID NO: 1176165 - DNA, 15 bp, Homo sapiens
tagacattctgagag

SEQ ID NO: 1176166 - DNA, 15 bp, Homo sapiens
atagacattctgaga

SEQ ID NO: 1176167 - DNA, 15 bp, Homo sapiens
catagacattctgag

SEQ ID NO: 1176168 - DNA, 15 bp, Homo sapiens
ccatagacattctga

SEQ ID NO: 1176169 - DNA, 15 bp, Homo sapiens
tccatagacattctg

SEQ ID NO: 1176170 - DNA, 15 bp, Homo sapiens
atccatagacattct

SEQ ID NO: 1176171 - DNA, 15 bp, Homo sapiens
gatccatagacattc

SEQ ID NO: 1176172 - DNA, 15 bp, Homo sapiens
tgatccatagacatt

SEQ ID NO: 1176173 - DNA, 15 bp, Homo sapiens
ctgatccatagacat

SEQ ID NO: 1176174 - DNA, 15 bp, Homo sapiens
tctgatccatagaca

SEQ ID NO: 1176175 - DNA, 15 bp, Homo sapiens
ttctgatccatagac

SEQ ID NO: 1176176 - DNA, 15 bp, Homo sapiens
gttctgatccataga

SEQ ID NO: 1176177 - DNA, 15 bp, Homo sapiens
agttctgatccatag

SEQ ID NO: 1176178 - DNA, 15 bp, Homo sapiens
gagttctgatccata

SEQ ID NO: 1176179 - DNA, 15 bp, Homo sapiens
agagttctgatccat

SEQ ID NO: 1176180 - DNA, 15 bp, Homo sapiens
cagagttctgatcca

SEQ ID NO: 1176181 - DNA, 15 bp, Homo sapiens
ccagagttctgatcc

SEQ ID NO: 1176182 - DNA, 15 bp, Homo sapiens
tccagagttctgatc

SEQ ID NO: 1176183 - DNA, 15 bp, Homo sapiens
ttccagagttctgat

SEQ ID NO: 1176184 - DNA, 15 bp, Homo sapiens
cttccagagttctga

SEQ ID NO: 1176185 - DNA, 15 bp, Homo sapiens
acttccagagttctg

SEQ ID NO: 1176186 - DNA, 15 bp, Homo sapiens
cacttccagagttct

SEQ ID NO: 1176187 - DNA, 15 bp, Homo sapiens
tcacttccagagttc

SEQ ID NO: 1176188 - DNA, 15 bp, Homo sapiens
gtcacttccagagtt

SEQ ID NO: 1176189 - DNA, 15 bp, Homo sapiens
agtcacttccagagt

SEQ ID NO: 1176190 - DNA, 15 bp, Homo sapiens
aagtcacttccagag

SEQ ID NO: 1176191 - DNA, 15 bp, Homo sapiens
caagtcacttccaga

SEQ ID NO: 1176192 - DNA, 15 bp, Homo sapiens
ccaagtcacttccag

SEQ ID NO: 1176193 - DNA, 15 bp, Homo sapiens
accaagtcacttcca

SEQ ID NO: 1176194 - DNA, 15 bp, Homo sapiens
aaccaagtcacttcc

SEQ ID NO: 1176195 - DNA, 15 bp, Homo sapiens
caaccaagtcacttc

SEQ ID NO: 1176196 - DNA, 15 bp, Homo sapiens
ccaaccaagtcactt

SEQ ID NO: 1176197 - DNA, 15 bp, Homo sapiens
cccaaccaagtcact

SEQ ID NO: 1176198 - DNA, 15 bp, Homo sapiens
acccaaccaagtcac

SEQ ID NO: 1176199 - DNA, 15 bp, Homo sapiens
tacccaaccaagtca

SEQ ID NO: 1176200 - DNA, 15 bp, Homo sapiens
ctacccaaccaagtc

SEQ ID NO: 1176201 - DNA, 15 bp, Homo sapiens
actacccaaccaagt

SEQ ID NO: 1176202 - DNA, 15 bp, Homo sapiens
gactacccaaccaag

SEQ ID NO: 1176203 - DNA, 15 bp, Homo sapiens
ggactacccaaccaa

SEQ ID NO: 1176204 - DNA, 15 bp, Homo sapiens
aggactacccaacca

SEQ ID NO: 1176205 - DNA, 15 bp, Homo sapiens
caggactacccaacc

SEQ ID NO: 1176206 - DNA, 15 bp, Homo sapiens
acaggactacccaac

SEQ ID NO: 1176207 - DNA, 15 bp, Homo sapiens
gacaggactacccaa

SEQ ID NO: 1176208 - DNA, 15 bp, Homo sapiens
agacaggactaccca

SEQ ID NO: 1176209 - DNA, 15 bp, Homo sapiens
aagacaggactaccc

SEQ ID NO: 1176210 - DNA, 15 bp, Homo sapiens
caagacaggactacc

SEQ ID NO: 1176211 - DNA, 15 bp, Homo sapiens
ccaagacaggactac

SEQ ID NO: 1176212 - DNA, 15 bp, Homo sapiens
cccaagacaggacta

SEQ ID NO: 1176213 - DNA, 15 bp, Homo sapiens
tcccaagacaggact

SEQ ID NO: 1176214 - DNA, 15 bp, Homo sapiens
atcccaagacaggac

SEQ ID NO: 1176215 - DNA, 15 bp, Homo sapiens
gatcccaagacagga

SEQ ID NO: 1176216 - DNA, 15 bp, Homo sapiens
ggatcccaagacagg

SEQ ID NO: 1176217 - DNA, 15 bp, Homo sapiens
gggatcccaagacag

SEQ ID NO: 1176218 - DNA, 15 bp, Homo sapiens
agggatcccaagaca

SEQ ID NO: 1176219 - DNA, 15 bp, Homo sapiens
gagggatcccaagac

SEQ ID NO: 1176220 - DNA, 15 bp, Homo sapiens
ggagggatcccaaga

SEQ ID NO: 1176221 - DNA, 15 bp, Homo sapiens
gggagggatcccaag

SEQ ID NO: 1176222 - DNA, 15 bp, Homo sapiens
tgggagggatcccaa

SEQ ID NO: 1176223 - DNA, 15 bp, Homo sapiens
ctgggagggatccca

SEQ ID NO: 1176224 - DNA, 15 bp, Homo sapiens
tctgggagggatccc

SEQ ID NO: 1176225 - DNA, 15 bp, Homo sapiens
ctctgggagggatcc

SEQ ID NO: 1176226 - DNA, 15 bp, Homo sapiens
tctctgggagggatc

SEQ ID NO: 1176227 - DNA, 15 bp, Homo sapiens
ttctctgggagggat

SEQ ID NO: 1176228 - DNA, 15 bp, Homo sapiens
cttctctgggaggga

SEQ ID NO: 1176229 - DNA, 15 bp, Homo sapiens
acttctctgggaggg

SEQ ID NO: 1176230 - DNA, 15 bp, Homo sapiens
tacttctctgggagg

SEQ ID NO: 1176231 - DNA, 15 bp, Homo sapiens
atacttctctgggag

SEQ ID NO: 1176232 - DNA, 15 bp, Homo sapiens
tatacttctctggga

SEQ ID NO: 1176233 - DNA, 15 bp, Homo sapiens
gtatacttctctggg

SEQ ID NO: 1176234 - DNA, 15 bp, Homo sapiens
tgtatacttctctgg

SEQ ID NO: 1176235 - DNA, 15 bp, Homo sapiens
gtgtatacttctctg

SEQ ID NO: 1176236 - DNA, 15 bp, Homo sapiens
agtgtatacttctct

SEQ ID NO: 1176237 - DNA, 15 bp, Homo sapiens
cagtgtatacttctc

SEQ ID NO: 1176238 - DNA, 15 bp, Homo sapiens
ccagtgtatacttct

SEQ ID NO: 1176239 - DNA, 15 bp, Homo sapiens
tccagtgtatacttc

SEQ ID NO: 1176240 - DNA, 15 bp, Homo sapiens
atccagtgtatactt

SEQ ID NO: 1176241 - DNA, 15 bp, Homo sapiens
aatccagtgtatact

SEQ ID NO: 1176242 - DNA, 15 bp, Homo sapiens
aaatccagtgtatac

SEQ ID NO: 1176243 - DNA, 15 bp, Homo sapiens
caaatccagtgtata

SEQ ID NO: 1176244 - DNA, 15 bp, Homo sapiens
ccaaatccagtgtat

SEQ ID NO: 1176245 - DNA, 15 bp, Homo sapiens
gccaaatccagtgta

SEQ ID NO: 1176246 - DNA, 15 bp, Homo sapiens
tgccaaatccagtgt

SEQ ID NO: 1176247 - DNA, 15 bp, Homo sapiens
ttgccaaatccagtg

SEQ ID NO: 1176248 - DNA, 15 bp, Homo sapiens
gttgccaaatccagt

SEQ ID NO: 1176249 - DNA, 15 bp, Homo sapiens
tgttgccaaatccag

SEQ ID NO: 1176250 - DNA, 15 bp, Homo sapiens
ttgttgccaaatcca

SEQ ID NO: 1176251 - DNA, 15 bp, Homo sapiens
attgttgccaaatcc

SEQ ID NO: 1176252 - DNA, 15 bp, Homo sapiens
tattgttgccaaatc

SEQ ID NO: 1176253 - DNA, 15 bp, Homo sapiens
ttattgttgccaaat

SEQ ID NO: 1176254 - DNA, 15 bp, Homo sapiens
tttattgttgccaaa

SEQ ID NO: 1176255 - DNA, 15 bp, Homo sapiens
ctttattgttgccaa

SEQ ID NO: 1176256 - DNA, 15 bp, Homo sapiens
actttattgttgcca

SEQ ID NO: 1176257 - DNA, 15 bp, Homo sapiens
cactttattgttgcc

SEQ ID NO: 1176258 - DNA, 15 bp, Homo sapiens
ccactttattgttgc

SEQ ID NO: 1176259 - DNA, 15 bp, Homo sapiens
gccactttattgttg

SEQ ID NO: 1176260 - DNA, 15 bp, Homo sapiens
agccactttattgtt

SEQ ID NO: 1176261 - DNA, 15 bp, Homo sapiens
aagccactttattgt

SEQ ID NO: 1176262 - DNA, 15 bp, Homo sapiens
aaagccactttattg

SEQ ID NO: 1176263 - DNA, 15 bp, Homo sapiens
taaagccactttatt

SEQ ID NO: 1176264 - DNA, 15 bp, Homo sapiens
ttaaagccactttat

SEQ ID NO: 1176265 - DNA, 15 bp, Homo sapiens
attaaagccacttta

SEQ ID NO: 1176266 - DNA, 15 bp, Homo sapiens
tattaaagccacttt

SEQ ID NO: 1176267 - DNA, 15 bp, Homo sapiens
atattaaagccactt

SEQ ID NO: 1176268 - DNA, 15 bp, Homo sapiens
gatattaaagccact

SEQ ID NO: 1176269 - DNA, 15 bp, Homo sapiens
ggatattaaagccac

SEQ ID NO: 1176270 - DNA, 15 bp, Homo sapiens
gggatattaaagcca

SEQ ID NO: 1176271 - DNA, 15 bp, Homo sapiens
agggatattaaagcc

SEQ ID NO: 1176272 - DNA, 15 bp, Homo sapiens
cagggatattaaagc

SEQ ID NO: 1176273 - DNA, 15 bp, Homo sapiens
ccagggatattaaag

SEQ ID NO: 1176274 - DNA, 15 bp, Homo sapiens
cccagggatattaaa

SEQ ID NO: 1176275 - DNA, 15 bp, Homo sapiens
ccccagggatattaa

SEQ ID NO: 1176276 - DNA, 15 bp, Homo sapiens
tccccagggatatta

SEQ ID NO: 1176277 - DNA, 15 bp, Homo sapiens
ctccccagggatatt

SEQ ID NO: 1176278 - DNA, 15 bp, Homo sapiens
cctccccagggatat

SEQ ID NO: 1176279 - DNA, 15 bp, Homo sapiens
gcctccccagggata

SEQ ID NO: 1176280 - DNA, 15 bp, Homo sapiens
ggcctccccagggat

SEQ ID NO: 1176281 - DNA, 15 bp, Homo sapiens
tggcctccccaggga

SEQ ID NO: 1176282 - DNA, 15 bp, Homo sapiens
ctggcctccccaggg

SEQ ID NO: 1176283 - DNA, 15 bp, Homo sapiens
actggcctccccagg

SEQ ID NO: 1176284 - DNA, 15 bp, Homo sapiens
aactggcctccccag

SEQ ID NO: 1176285 - DNA, 15 bp, Homo sapiens
aaactggcctcccca

SEQ ID NO: 1176286 - DNA, 15 bp, Homo sapiens
aaaactggcctcccc

SEQ ID NO: 1176287 - DNA, 15 bp, Homo sapiens
caaaactggcctccc

SEQ ID NO: 1176288 - DNA, 15 bp, Homo sapiens
tcaaaactggcctcc

SEQ ID NO: 1176289 - DNA, 15 bp, Homo sapiens
atcaaaactggcctc

SEQ ID NO: 1176290 - DNA, 15 bp, Homo sapiens
catcaaaactggcct

SEQ ID NO: 1176291 - DNA, 15 bp, Homo sapiens
tcatcaaaactggcc

SEQ ID NO: 1176292 - DNA, 15 bp, Homo sapiens
ttcatcaaaactggc

SEQ ID NO: 1176293 - DNA, 15 bp, Homo sapiens
cttcatcaaaactgg

SEQ ID NO: 1176294 - DNA, 15 bp, Homo sapiens
acttcatcaaaactg

SEQ ID NO: 1176295 - DNA, 15 bp, Homo sapiens
cacttcatcaaaact

SEQ ID NO: 1176296 - DNA, 15 bp, Homo sapiens
ccacttcatcaaaac

SEQ ID NO: 1176297 - DNA, 15 bp, Homo sapiens
accacttcatcaaaa

SEQ ID NO: 1176298 - DNA, 15 bp, Homo sapiens
caccacttcatcaaa

SEQ ID NO: 1176299 - DNA, 15 bp, Homo sapiens
ccaccacttcatcaa

SEQ ID NO: 1176300 - DNA, 15 bp, Homo sapiens
cccaccacttcatca

SEQ ID NO: 1176301 - DNA, 15 bp, Homo sapiens
ccccaccacttcatc

SEQ ID NO: 1176302 - DNA, 15 bp, Homo sapiens
gccccaccacttcat

SEQ ID NO: 1176303 - DNA, 15 bp, Homo sapiens
agccccaccacttca

SEQ ID NO: 1176304 - DNA, 15 bp, Homo sapiens
cagccccaccacttc

SEQ ID NO: 1176305 - DNA, 15 bp, Homo sapiens
ccagccccaccactt

SEQ ID NO: 1176306 - DNA, 15 bp, Homo sapiens
cccagccccaccact

SEQ ID NO: 1176307 - DNA, 15 bp, Homo sapiens
ggtcccagccccacc

SEQ ID NO: 1176308 - DNA, 15 bp, Homo sapiens
gggtcccagccccac

SEQ ID NO: 1176309 - DNA, 15 bp, Homo sapiens
tgggtcccagcccca

SEQ ID NO: 1176310 - DNA, 15 bp, Homo sapiens
ctgggtcccagcccc

SEQ ID NO: 1176311 - DNA, 15 bp, Homo sapiens
cctgggtcccagccc

SEQ ID NO: 1176312 - DNA, 15 bp, Homo sapiens
gcctgggtcccagcc

SEQ ID NO: 1176313 - DNA, 15 bp, Homo sapiens
agcctgggtcccagc

SEQ ID NO: 1176314 - DNA, 15 bp, Homo sapiens
cagcctgggtcccag

SEQ ID NO: 1176315 - DNA, 15 bp, Homo sapiens
gcagcctgggtccca

SEQ ID NO: 1176316 - DNA, 15 bp, Homo sapiens
tgcagcctgggtccc

SEQ ID NO: 1176317 - DNA, 15 bp, Homo sapiens
ctgcagcctgggtcc

SEQ ID NO: 1176318 - DNA, 15 bp, Homo sapiens
cctgcagcctgggtc

SEQ ID NO: 1176319 - DNA, 15 bp, Homo sapiens
tcctgcagcctgggt

SEQ ID NO: 1176320 - DNA, 15 bp, Homo sapiens
atcctgcagcctggg

SEQ ID NO: 1176321 - DNA, 15 bp, Homo sapiens
tatcctgcagcctgg

SEQ ID NO: 1176322 - DNA, 15 bp, Homo sapiens
atatcctgcagcctg

SEQ ID NO: 1176323 - DNA, 15 bp, Homo sapiens
aatatcctgcagcct

SEQ ID NO: 1176324 - DNA, 15 bp, Homo sapiens
aaatatcctgcagcc

SEQ ID NO: 1176325 - DNA, 15 bp, Homo sapiens
caaatatcctgcagc

SEQ ID NO: 1176326 - DNA, 15 bp, Homo sapiens
gcaaatatcctgcag

SEQ ID NO: 1176327 - DNA, 15 bp, Homo sapiens
tgcaaatatcctgca

SEQ ID NO: 1176328 - DNA, 15 bp, Homo sapiens
ctgcaaatatcctgc

SEQ ID NO: 1176329 - DNA, 15 bp, Homo sapiens
gctgcaaatatcctg

SEQ ID NO: 1176330 - DNA, 15 bp, Homo sapiens
agctgcaaatatcct

SEQ ID NO: 1176331 - DNA, 15 bp, Homo sapiens
aagctgcaaatatcc

SEQ ID NO: 1176332 - DNA, 15 bp, Homo sapiens
gaagctgcaaatatc

SEQ ID NO: 1176333 - DNA, 15 bp, Homo sapiens
agaagctgcaaatat

SEQ ID NO: 1176334 - DNA, 15 bp, Homo sapiens
cagaagctgcaaata

SEQ ID NO: 1176335 - DNA, 15 bp, Homo sapiens
gcagaagctgcaaat

SEQ ID NO: 1176336 - DNA, 15 bp, Homo sapiens
ggcagaagctgcaaa

SEQ ID NO: 1176337 - DNA, 15 bp, Homo sapiens
tggcagaagctgcaa

SEQ ID NO: 1176338 - DNA, 15 bp, Homo sapiens
ctggcagaagctgca

SEQ ID NO: 1176339 - DNA, 15 bp, Homo sapiens
tctggcagaagctgc

SEQ ID NO: 1176340 - DNA, 15 bp, Homo sapiens
ctctggcagaagctg

SEQ ID NO: 1176341 - DNA, 15 bp, Homo sapiens
actctggcagaagct

SEQ ID NO: 1176342 - DNA, 15 bp, Homo sapiens
aactctggcagaagc

SEQ ID NO: 1176343 - DNA, 15 bp, Homo sapiens
gaactctggcagaag

SEQ ID NO: 1176344 - DNA, 15 bp, Homo sapiens
tgaactctggcagaa

SEQ ID NO: 1176345 - DNA, 15 bp, Homo sapiens
ctgaactctggcaga

SEQ ID NO: 1176346 - DNA, 15 bp, Homo sapiens
tctgaactctggcag

SEQ ID NO: 1176347 - DNA, 15 bp, Homo sapiens
atctgaactctggca

SEQ ID NO: 1176348 - DNA, 15 bp, Homo sapiens
aatctgaactctggc

SEQ ID NO: 1176349 - DNA, 15 bp, Homo sapiens
caatctgaactctgg

SEQ ID NO: 1176350 - DNA, 15 bp, Homo sapiens
ccaatctgaactctg

SEQ ID NO: 1176351 - DNA, 15 bp, Homo sapiens
tccaatctgaactct

SEQ ID NO: 1176352 - DNA, 15 bp, Homo sapiens
atccaatctgaactc

SEQ ID NO: 1176353 - DNA, 15 bp, Homo sapiens
gatccaatctgaact

SEQ ID NO: 1176354 - DNA, 15 bp, Homo sapiens
ggatccaatctgaac

SEQ ID NO: 1176355 - DNA, 15 bp, Homo sapiens
tggatccaatctgaa

SEQ ID NO: 1176356 - DNA, 15 bp, Homo sapiens
ttggatccaatctga

SEQ ID NO: 1176357 - DNA, 15 bp, Homo sapiens
tttggatccaatctg

SEQ ID NO: 1176358 - DNA, 15 bp, Homo sapiens
ttttggatccaatct

SEQ ID NO: 1176359 - DNA, 15 bp, Homo sapiens
tttttggatccaatc

SEQ ID NO: 1176360 - DNA, 15 bp, Homo sapiens
ttttttggatccaat

SEQ ID NO: 1176361 - DNA, 15 bp, Homo sapiens
attttttggatccaa

SEQ ID NO: 1176362 - DNA, 15 bp, Homo sapiens
cattttttggatcca

SEQ ID NO: 1176363 - DNA, 15 bp, Homo sapiens
acattttttggatcc

SEQ ID NO: 1176364 - DNA, 15 bp, Homo sapiens
tacattttttggatc

SEQ ID NO: 1176365 - DNA, 15 bp, Homo sapiens
ttacattttttggat

SEQ ID NO: 1176366 - DNA, 15 bp, Homo sapiens
tttacattttttgga

SEQ ID NO: 1176367 - DNA, 15 bp, Homo sapiens
ctttacattttttgg

SEQ ID NO: 1176368 - DNA, 15 bp, Homo sapiens
gctttacattttttg

SEQ ID NO: 1176369 - DNA, 15 bp, Homo sapiens
ggctttacatttttt

SEQ ID NO: 1176370 - DNA, 15 bp, Homo sapiens
tggctttacattttt

SEQ ID NO: 1176371 - DNA, 15 bp, Homo sapiens
ctggctttacatttt

SEQ ID NO: 1176372 - DNA, 15 bp, Homo sapiens
cctggctttacattt

SEQ ID NO: 1176373 - DNA, 15 bp, Homo sapiens
tcctggctttacatt

SEQ ID NO: 1176374 - DNA, 15 bp, Homo sapiens
atcctggctttacat

SEQ ID NO: 1176375 - DNA, 15 bp, Homo sapiens
catcctggctttaca

SEQ ID NO: 1176376 - DNA, 15 bp, Homo sapiens
ccatcctggctttac

SEQ ID NO: 1176377 - DNA, 15 bp, Homo sapiens
gccatcctggcttta

SEQ ID NO: 1176378 - DNA, 15 bp, Homo sapiens
agccatcctggcttt

SEQ ID NO: 1176379 - DNA, 15 bp, Homo sapiens
gagccatcctggctt

SEQ ID NO: 1176380 - DNA, 15 bp, Homo sapiens
agagccatcctggct

SEQ ID NO: 1176381 - DNA, 15 bp, Homo sapiens
cagagccatcctggc

SEQ ID NO: 1176382 - DNA, 15 bp, Homo sapiens
ccagagccatcctgg

SEQ ID NO: 1176383 - DNA, 15 bp, Homo sapiens
accagagccatcctg

SEQ ID NO: 1176384 - DNA, 15 bp, Homo sapiens
aaccagagccatcct

SEQ ID NO: 1176385 - DNA, 15 bp, Homo sapiens
taaccagagccatcc

SEQ ID NO: 1176386 - DNA, 15 bp, Homo sapiens
ctaaccagagccatc

SEQ ID NO: 1176387 - DNA, 15 bp, Homo sapiens
tctaaccagagccat

SEQ ID NO: 1176388 - DNA, 15 bp, Homo sapiens
ttctaaccagagcca

SEQ ID NO: 1176389 - DNA, 15 bp, Homo sapiens
cttctaaccagagcc

SEQ ID NO: 1176390 - DNA, 15 bp, Homo sapiens
tcttctaaccagagc

SEQ ID NO: 1176391 - DNA, 15 bp, Homo sapiens
ttcttctaaccagag

SEQ ID NO: 1176392 - DNA, 15 bp, Homo sapiens
gttcttctaaccaga

SEQ ID NO: 1176393 - DNA, 15 bp, Homo sapiens
ggttcttctaaccag

SEQ ID NO: 1176394 - DNA, 15 bp, Homo sapiens
tggttcttctaacca

SEQ ID NO: 1176395 - DNA, 15 bp, Homo sapiens
gtggttcttctaacc

SEQ ID NO: 1176396 - DNA, 15 bp, Homo sapiens
tgtggttcttctaac

SEQ ID NO: 1176397 - DNA, 15 bp, Homo sapiens
gtgtggttcttctaa

SEQ ID NO: 1176398 - DNA, 15 bp, Homo sapiens
cgtgtggttcttcta

SEQ ID NO: 1176399 - DNA, 15 bp, Homo sapiens
tcgtgtggttcttct

SEQ ID NO: 1176400 - DNA, 15 bp, Homo sapiens
gtcgtgtggttcttc

SEQ ID NO: 1176401 - DNA, 15 bp, Homo sapiens
agtcgtgtggttctt

SEQ ID NO: 1176402 - DNA, 15 bp, Homo sapiens
cagtcgtgtggttct

SEQ ID NO: 1176403 - DNA, 15 bp, Homo sapiens
ccagtcgtgtggttc

SEQ ID NO: 1176404 - DNA, 15 bp, Homo sapiens
cccagtcgtgtggtt

SEQ ID NO: 1176405 - DNA, 15 bp, Homo sapiens
tcccagtcgtgtggt

SEQ ID NO: 1176406 - DNA, 15 bp, Homo sapiens
ttcccagtcgtgtgg

SEQ ID NO: 1176407 - DNA, 15 bp, Homo sapiens
tttcccagtcgtgtg

SEQ ID NO: 1176408 - DNA, 15 bp, Homo sapiens
atttcccagtcgtgt

SEQ ID NO: 1176409 - DNA, 15 bp, Homo sapiens
aatttcccagtcgtg

SEQ ID NO: 1176410 - DNA, 15 bp, Homo sapiens
taatttcccagtcgt

SEQ ID NO: 1176411 - DNA, 15 bp, Homo sapiens
gtaatttcccagtcg

SEQ ID NO: 1176412 - DNA, 15 bp, Homo sapiens
tgtaatttcccagtc

SEQ ID NO: 1176413 - DNA, 15 bp, Homo sapiens
ctgtaatttcccagt

SEQ ID NO: 1176414 - DNA, 15 bp, Homo sapiens
cctgtaatttcccag

SEQ ID NO: 1176415 - DNA, 15 bp, Homo sapiens
ccctgtaatttccca

SEQ ID NO: 1176416 - DNA, 15 bp, Homo sapiens
gccctgtaatttccc

SEQ ID NO: 1176417 - DNA, 15 bp, Homo sapiens
tgccctgtaatttcc

SEQ ID NO: 1176418 - DNA, 15 bp, Homo sapiens
gtgccctgtaatttc

SEQ ID NO: 1176419 - DNA, 15 bp, Homo sapiens
tgtgccctgtaattt

SEQ ID NO: 1176420 - DNA, 15 bp, Homo sapiens
atgtgccctgtaatt

SEQ ID NO: 1176421 - DNA, 15 bp, Homo sapiens
aatgtgccctgtaat

SEQ ID NO: 1176422 - DNA, 15 bp, Homo sapiens
aaatgtgccctgtaa

SEQ ID NO: 1176423 - DNA, 15 bp, Homo sapiens
aaaatgtgccctgta

SEQ ID NO: 1176424 - DNA, 15 bp, Homo sapiens
caaaatgtgccctgt

SEQ ID NO: 1176425 - DNA, 15 bp, Homo sapiens
tcaaaatgtgccctg

SEQ ID NO: 1176426 - DNA, 15 bp, Homo sapiens
ttcaaaatgtgccct

SEQ ID NO: 1176427 - DNA, 15 bp, Homo sapiens
tttcaaaatgtgccc

SEQ ID NO: 1176428 - DNA, 15 bp, Homo sapiens
ctttcaaaatgtgcc

SEQ ID NO: 1176429 - DNA, 15 bp, Homo sapiens
tctttcaaaatgtgc

SEQ ID NO: 1176430 - DNA, 15 bp, Homo sapiens
gtctttcaaaatgtg

SEQ ID NO: 1176431 - DNA, 15 bp, Homo sapiens
tgtctttcaaaatgt

SEQ ID NO: 1176432 - DNA, 15 bp, Homo sapiens
ttgtctttcaaaatg

SEQ ID NO: 1176433 - DNA, 15 bp, Homo sapiens
attgtctttcaaaat

SEQ ID NO: 1176434 - DNA, 15 bp, Homo sapiens
gattgtctttcaaaa

SEQ ID NO: 1176435 - DNA, 15 bp, Homo sapiens
ggattgtctttcaaa

SEQ ID NO: 1176436 - DNA, 15 bp, Homo sapiens
gggattgtctttcaa

SEQ ID NO: 1176437 - DNA, 15 bp, Homo sapiens
tgggattgtctttca

SEQ ID NO: 1176438 - DNA, 15 bp, Homo sapiens
ttgggattgtctttc

SEQ ID NO: 1176439 - DNA, 15 bp, Homo sapiens
attgggattgtcttt

SEQ ID NO: 1176440 - DNA, 15 bp, Homo sapiens
cattgggattgtctt

SEQ ID NO: 1176441 - DNA, 15 bp, Homo sapiens
tcattgggattgtct

SEQ ID NO: 1176442 - DNA, 15 bp, Homo sapiens
ttcattgggattgtc

SEQ ID NO: 1176443 - DNA, 15 bp, Homo sapiens
cttcattgggattgt

SEQ ID NO: 1176444 - DNA, 15 bp, Homo sapiens
acttcattgggattg

SEQ ID NO: 1176445 - DNA, 15 bp, Homo sapiens
gacttcattgggatt

SEQ ID NO: 1176446 - DNA, 15 bp, Homo sapiens
tgacttcattgggat

SEQ ID NO: 1176447 - DNA, 15 bp, Homo sapiens
gtgacttcattggga

SEQ ID NO: 1176448 - DNA, 15 bp, Homo sapiens
tgtgacttcattggg

SEQ ID NO: 1176449 - DNA, 15 bp, Homo sapiens
atgtgacttcattgg

SEQ ID NO: 1176450 - DNA, 15 bp, Homo sapiens
aatgtgacttcattg

SEQ ID NO: 1176451 - DNA, 15 bp, Homo sapiens
aaatgtgacttcatt

SEQ ID NO: 1176452 - DNA, 15 bp, Homo sapiens
aaaatgtgacttcat

SEQ ID NO: 1176453 - DNA, 15 bp, Homo sapiens
caaaatgtgacttca

SEQ ID NO: 1176454 - DNA, 15 bp, Homo sapiens
acaaaatgtgacttc

SEQ ID NO: 1176455 - DNA, 15 bp, Homo sapiens
aacaaaatgtgactt

SEQ ID NO: 1176456 - DNA, 15 bp, Homo sapiens
aaacaaaatgtgact

SEQ ID NO: 1176457 - DNA, 15 bp, Homo sapiens
gaaacaaaatgtgac

SEQ ID NO: 1176458 - DNA, 15 bp, Homo sapiens
agaaacaaaatgtga

SEQ ID NO: 1176459 - DNA, 15 bp, Homo sapiens
aagaaacaaaatgtg

SEQ ID NO: 1176460 - DNA, 15 bp, Homo sapiens
aaagaaacaaaatgt

SEQ ID NO: 1176461 - DNA, 15 bp, Homo sapiens
taaagaaacaaaatg

SEQ ID NO: 1176462 - DNA, 15 bp, Homo sapiens
ataaagaaacaaaat

SEQ ID NO: 1176463 - DNA, 15 bp, Homo sapiens
tataaagaaacaaaa

SEQ ID NO: 1176464 - DNA, 15 bp, Homo sapiens
ttataaagaaacaaa

SEQ ID NO: 1176465 - DNA, 15 bp, Homo sapiens
attataaagaaacaa

SEQ ID NO: 1176466 - DNA, 15 bp, Homo sapiens
cattataaagaaaca

SEQ ID NO: 1176467 - DNA, 15 bp, Homo sapiens
ccattataaagaaac

SEQ ID NO: 1176468 - DNA, 15 bp, Homo sapiens
cccattataaagaaa

SEQ ID NO: 1176469 - DNA, 15 bp, Homo sapiens
acccattataaagaa

SEQ ID NO: 1176470 - DNA, 15 bp, Homo sapiens
aacccattataaaga

SEQ ID NO: 1176471 - DNA, 15 bp, Homo sapiens
aaacccattataaag

SEQ ID NO: 1176472 - DNA, 15 bp, Homo sapiens
aaaacccattataaa

SEQ ID NO: 1176473 - DNA, 15 bp, Homo sapiens
gaaaacccattataa

SEQ ID NO: 1176474 - DNA, 15 bp, Homo sapiens
ggaaaacccattata

SEQ ID NO: 1176475 - DNA, 15 bp, Homo sapiens
aggaaaacccattat

SEQ ID NO: 1176476 - DNA, 15 bp, Homo sapiens
gaggaaaacccatta

SEQ ID NO: 1176477 - DNA, 15 bp, Homo sapiens
agaggaaaacccatt

SEQ ID NO: 1176478 - DNA, 15 bp, Homo sapiens
gagaggaaaacccat

SEQ ID NO: 1176479 - DNA, 15 bp, Homo sapiens
agagaggaaaaccca

SEQ ID NO: 1176480 - DNA, 15 bp, Homo sapiens
aagagaggaaaaccc

SEQ ID NO: 1176481 - DNA, 15 bp, Homo sapiens
aaagagaggaaaacc

SEQ ID NO: 1176482 - DNA, 15 bp, Homo sapiens
gaaagagaggaaaac

SEQ ID NO: 1176483 - DNA, 15 bp, Homo sapiens
ggaaagagaggaaaa

SEQ ID NO: 1176484 - DNA, 15 bp, Homo sapiens
gggaaagagaggaaa

SEQ ID NO: 1176485 - DNA, 15 bp, Homo sapiens
ggggaaagagaggaa

SEQ ID NO: 1176486 - DNA, 15 bp, Homo sapiens
tggggaaagagagga

SEQ ID NO: 1176487 - DNA, 15 bp, Homo sapiens
gtggggaaagagagg

SEQ ID NO: 1176488 - DNA, 15 bp, Homo sapiens
agtggggaaagagag

SEQ ID NO: 1176489 - DNA, 15 bp, Homo sapiens
gagtggggaaagaga

SEQ ID NO: 1176490 - DNA, 15 bp, Homo sapiens
agagtggggaaagag

SEQ ID NO: 1176491 - DNA, 15 bp, Homo sapiens
cagagtggggaaaga

SEQ ID NO: 1176492 - DNA, 15 bp, Homo sapiens
acagagtggggaaag

SEQ ID NO: 1176493 - DNA, 15 bp, Homo sapiens
gacagagtggggaaa

SEQ ID NO: 1176494 - DNA, 15 bp, Homo sapiens
ggacagagtggggaa

SEQ ID NO: 1176495 - DNA, 15 bp, Homo sapiens
tggacagagtgggga

SEQ ID NO: 1176496 - DNA, 15 bp, Homo sapiens
gtggacagagtgggg

SEQ ID NO: 1176497 - DNA, 15 bp, Homo sapiens
ggtggacagagtggg

SEQ ID NO: 1176498 - DNA, 15 bp, Homo sapiens
aggtggacagagtgg

SEQ ID NO: 1176499 - DNA, 15 bp, Homo sapiens
gaggtggacagagtg

SEQ ID NO: 1176500 - DNA, 15 bp, Homo sapiens
ggaggtggacagagt

SEQ ID NO: 1176501 - DNA, 15 bp, Homo sapiens
aggaggtggacagag

SEQ ID NO: 1176502 - DNA, 15 bp, Homo sapiens
caggaggtggacaga

SEQ ID NO: 1176503 - DNA, 15 bp, Homo sapiens
tcaggaggtggacag

SEQ ID NO: 1176504 - DNA, 15 bp, Homo sapiens
ttcaggaggtggaca

SEQ ID NO: 1176505 - DNA, 15 bp, Homo sapiens
gttcaggaggtggac

SEQ ID NO: 1176506 - DNA, 15 bp, Homo sapiens
tgttcaggaggtgga

SEQ ID NO: 1176507 - DNA, 15 bp, Homo sapiens
gtgttcaggaggtgg

SEQ ID NO: 1176508 - DNA, 15 bp, Homo sapiens
cgtgttcaggaggtg

SEQ ID NO: 1176509 - DNA, 15 bp, Homo sapiens
gcgtgttcaggaggt

SEQ ID NO: 1176510 - DNA, 15 bp, Homo sapiens
tgcgtgttcaggagg

SEQ ID NO: 1176511 - DNA, 15 bp, Homo sapiens
ctgcgtgttcaggag

SEQ ID NO: 1176512 - DNA, 15 bp, Homo sapiens
cctgcgtgttcagga

SEQ ID NO: 1176513 - DNA, 15 bp, Homo sapiens
ccctgcgtgttcagg

SEQ ID NO: 1176514 - DNA, 15 bp, Homo sapiens
cccctgcgtgttcag

SEQ ID NO: 1176515 - DNA, 15 bp, Homo sapiens
gcccctgcgtgttca

SEQ ID NO: 1176516 - DNA, 15 bp, Homo sapiens
agcccctgcgtgttc

SEQ ID NO: 1176517 - DNA, 15 bp, Homo sapiens
tagcccctgcgtgtt

SEQ ID NO: 1176518 - DNA, 15 bp, Homo sapiens
atagcccctgcgtgt

SEQ ID NO: 1176519 - DNA, 15 bp, Homo sapiens
aatagcccctgcgtg

SEQ ID NO: 1176520 - DNA, 15 bp, Homo sapiens
aaatagcccctgcgt

SEQ ID NO: 1176521 - DNA, 15 bp, Homo sapiens
gaaatagcccctgcg

SEQ ID NO: 1176522 - DNA, 15 bp, Homo sapiens
agaaatagcccctgc

SEQ ID NO: 1176523 - DNA, 15 bp, Homo sapiens
cagaaatagcccctg

SEQ ID NO: 1176524 - DNA, 15 bp, Homo sapiens
tcagaaatagcccct

SEQ ID NO: 1176525 - DNA, 15 bp, Homo sapiens
ctcagaaatagcccc

SEQ ID NO: 1176526 - DNA, 15 bp, Homo sapiens
actcagaaatagccc

SEQ ID NO: 1176527 - DNA, 15 bp, Homo sapiens
aactcagaaatagcc

SEQ ID NO: 1176528 - DNA, 15 bp, Homo sapiens
aaactcagaaatagc

SEQ ID NO: 1176529 - DNA, 15 bp, Homo sapiens
aaaactcagaaatag

SEQ ID NO: 1176530 - DNA, 15 bp, Homo sapiens
caaaactcagaaata

SEQ ID NO: 1176531 - DNA, 15 bp, Homo sapiens
acaaaactcagaaat

SEQ ID NO: 1176532 - DNA, 15 bp, Homo sapiens
gacaaaactcagaaa

SEQ ID NO: 1176533 - DNA, 15 bp, Homo sapiens
ttgacaaaactcaga

SEQ ID NO: 1176534 - DNA, 15 bp, Homo sapiens
attgacaaaactcag

SEQ ID NO: 1176535 - DNA, 15 bp, Homo sapiens
cattgacaaaactca

SEQ ID NO: 1176536 - DNA, 15 bp, Homo sapiens
tcattgacaaaactc

SEQ ID NO: 1176537 - DNA, 15 bp, Homo sapiens
atcattgacaaaact

SEQ ID NO: 1176538 - DNA, 15 bp, Homo sapiens
catcattgacaaaac

SEQ ID NO: 1176539 - DNA, 15 bp, Homo sapiens
gcatcattgacaaaa

SEQ ID NO: 1176540 - DNA, 15 bp, Homo sapiens
tgcatcattgacaaa

SEQ ID NO: 1176541 - DNA, 15 bp, Homo sapiens
atgcatcattgacaa

SEQ ID NO: 1176542 - DNA, 15 bp, Homo sapiens
aatgcatcattgaca

SEQ ID NO: 1176543 - DNA, 15 bp, Homo sapiens
taatgcatcattgac

SEQ ID NO: 1176544 - DNA, 15 bp, Homo sapiens
ctaatgcatcattga

SEQ ID NO: 1176545 - DNA, 15 bp, Homo sapiens
tctaatgcatcattg

SEQ ID NO: 1176546 - DNA, 15 bp, Homo sapiens
ttctaatgcatcatt

SEQ ID NO: 1176547 - DNA, 15 bp, Homo sapiens
tttctaatgcatcat

SEQ ID NO: 1176548 - DNA, 15 bp, Homo sapiens
ttttctaatgcatca

SEQ ID NO: 1176549 - DNA, 15 bp, Homo sapiens
cttttctaatgcatc

SEQ ID NO: 1176550 - DNA, 15 bp, Homo sapiens
tcttttctaatgcat

SEQ ID NO: 1176551 - DNA, 15 bp, Homo sapiens
ttcttttctaatgca

SEQ ID NO: 1176552 - DNA, 15 bp, Homo sapiens
cttcttttctaatgc

SEQ ID NO: 1176553 - DNA, 15 bp, Homo sapiens
tcttcttttctaatg

SEQ ID NO: 1176554 - DNA, 15 bp, Homo sapiens
gtcttcttttctaat

SEQ ID NO: 1176555 - DNA, 15 bp, Homo sapiens
tgtcttcttttctaa

SEQ ID NO: 1176556 - DNA, 15 bp, Homo sapiens
ttgtcttcttttcta

SEQ ID NO: 1176557 - DNA, 15 bp, Homo sapiens
gttgtcttcttttct

SEQ ID NO: 1176558 - DNA, 15 bp, Homo sapiens
agttgtcttcttttc

SEQ ID NO: 1176559 - DNA, 15 bp, Homo sapiens
cagttgtcttctttt

SEQ ID NO: 1176560 - DNA, 15 bp, Homo sapiens
gcagttgtcttcttt

SEQ ID NO: 1176561 - DNA, 15 bp, Homo sapiens
agcagttgtcttctt

SEQ ID NO: 1176562 - DNA, 15 bp, Homo sapiens
tagcagttgtcttct

SEQ ID NO: 1176563 - DNA, 15 bp, Homo sapiens
ttagcagttgtcttc

SEQ ID NO: 1176564 - DNA, 15 bp, Homo sapiens
cttagcagttgtctt

SEQ ID NO: 1176565 - DNA, 15 bp, Homo sapiens
ccttagcagttgtct

SEQ ID NO: 1176566 - DNA, 15 bp, Homo sapiens
cccttagcagttgtc

SEQ ID NO: 1176567 - DNA, 15 bp, Homo sapiens
tcccttagcagttgt

SEQ ID NO: 1176568 - DNA, 15 bp, Homo sapiens
ctcccttagcagttg

SEQ ID NO: 1176569 - DNA, 15 bp, Homo sapiens
actcccttagcagtt

SEQ ID NO: 1176570 - DNA, 15 bp, Homo sapiens
aactcccttagcagt

SEQ ID NO: 1176571 - DNA, 15 bp, Homo sapiens
caactcccttagcag

SEQ ID NO: 1176572 - DNA, 15 bp, Homo sapiens
tcaactcccttagca

SEQ ID NO: 1176573 - DNA, 15 bp, Homo sapiens
atcaactcccttagc

SEQ ID NO: 1176574 - DNA, 15 bp, Homo sapiens
aatcaactcccttag

SEQ ID NO: 1176575 - DNA, 15 bp, Homo sapiens
gaatcaactccctta

SEQ ID NO: 1176576 - DNA, 15 bp, Homo sapiens
tgaatcaactccctt

SEQ ID NO: 1176577 - DNA, 15 bp, Homo sapiens
atgaatcaactccct

SEQ ID NO: 1176578 - DNA, 15 bp, Homo sapiens
gatgaatcaactccc

SEQ ID NO: 1176579 - DNA, 15 bp, Homo sapiens
agatgaatcaactcc

SEQ ID NO: 1176580 - DNA, 15 bp, Homo sapiens
aagatgaatcaactc

SEQ ID NO: 1176581 - DNA, 15 bp, Homo sapiens
aaagatgaatcaact

SEQ ID NO: 1176582 - DNA, 15 bp, Homo sapiens
caaagatgaatcaac

SEQ ID NO: 1176583 - DNA, 15 bp, Homo sapiens
acaaagatgaatcaa

SEQ ID NO: 1176584 - DNA, 15 bp, Homo sapiens
tacaaagatgaatca

SEQ ID NO: 1176585 - DNA, 15 bp, Homo sapiens
gtacaaagatgaatc

SEQ ID NO: 1176586 - DNA, 15 bp, Homo sapiens
ggtacaaagatgaat

SEQ ID NO: 1176587 - DNA, 15 bp, Homo sapiens
aggtacaaagatgaa

SEQ ID NO: 1176588 - DNA, 15 bp, Homo sapiens
gaggtacaaagatga

SEQ ID NO: 1176589 - DNA, 15 bp, Homo sapiens
agaggtacaaagatg

SEQ ID NO: 1176590 - DNA, 15 bp, Homo sapiens
gagaggtacaaagat

SEQ ID NO: 1176591 - DNA, 15 bp, Homo sapiens
tgagaggtacaaaga

SEQ ID NO: 1176592 - DNA, 15 bp, Homo sapiens
gtgagaggtacaaag

SEQ ID NO: 1176593 - DNA, 15 bp, Homo sapiens
tgtgagaggtacaaa

SEQ ID NO: 1176594 - DNA, 15 bp, Homo sapiens
ctgtgagaggtacaa

SEQ ID NO: 1176595 - DNA, 15 bp, Homo sapiens
gctgtgagaggtaca

SEQ ID NO: 1176596 - DNA, 15 bp, Homo sapiens
tgctgtgagaggtac

SEQ ID NO: 1176597 - DNA, 15 bp, Homo sapiens
ttgctgtgagaggta

SEQ ID NO: 1176598 - DNA, 15 bp, Homo sapiens
gttgctgtgagaggt

SEQ ID NO: 1176599 - DNA, 15 bp, Homo sapiens
tgttgctgtgagagg

SEQ ID NO: 1176600 - DNA, 15 bp, Homo sapiens
ttgttgctgtgagag

SEQ ID NO: 1176601 - DNA, 15 bp, Homo sapiens
cttgttgctgtgaga

SEQ ID NO: 1176602 - DNA, 15 bp, Homo sapiens
gcttgttgctgtgag

SEQ ID NO: 1176603 - DNA, 15 bp, Homo sapiens
tgcttgttgctgtga

SEQ ID NO: 1176604 - DNA, 15 bp, Homo sapiens
ttgcttgttgctgtg

SEQ ID NO: 1176605 - DNA, 15 bp, Homo sapiens
cttgcttgttgctgt

SEQ ID NO: 1176606 - DNA, 15 bp, Homo sapiens
acttgcttgttgctg

SEQ ID NO: 1176607 - DNA, 15 bp, Homo sapiens
aacttgcttgttgct

SEQ ID NO: 1176608 - DNA, 15 bp, Homo sapiens
aaacttgcttgttgc

SEQ ID NO: 1176609 - DNA, 15 bp, Homo sapiens
gaaacttgcttgttg

SEQ ID NO: 1176610 - DNA, 15 bp, Homo sapiens
agaaacttgcttgtt

SEQ ID NO: 1176611 - DNA, 15 bp, Homo sapiens
aagaaacttgcttgt

SEQ ID NO: 1176612 - DNA, 15 bp, Homo sapiens
aaagaaacttgcttg

SEQ ID NO: 1176613 - DNA, 15 bp, Homo sapiens
taaagaaacttgctt

SEQ ID NO: 1176614 - DNA, 15 bp, Homo sapiens
ttaaagaaacttgct

SEQ ID NO: 1176615 - DNA, 15 bp, Homo sapiens
tttaaagaaacttgc

SEQ ID NO: 1176616 - DNA, 15 bp, Homo sapiens
ttttaaagaaacttg

SEQ ID NO: 1176617 - DNA, 15 bp, Homo sapiens
attttaaagaaactt

SEQ ID NO: 1176618 - DNA, 15 bp, Homo sapiens
tattttaaagaaact

SEQ ID NO: 1176619 - DNA, 15 bp, Homo sapiens
atattttaaagaaac

SEQ ID NO: 1176620 - DNA, 15 bp, Homo sapiens
aatattttaaagaaa

SEQ ID NO: 1176621 - DNA, 15 bp, Homo sapiens
aaatattttaaagaa

SEQ ID NO: 1176622 - DNA, 15 bp, Homo sapiens
gaaatattttaaaga

SEQ ID NO: 1176623 - DNA, 15 bp, Homo sapiens
tgaaatattttaaag

SEQ ID NO: 1176624 - DNA, 15 bp, Homo sapiens
ttgaaatattttaaa

SEQ ID NO: 1176625 - DNA, 15 bp, Homo sapiens
gttgaaatattttaa

SEQ ID NO: 1176626 - DNA, 15 bp, Homo sapiens
tgttgaaatatttta

SEQ ID NO: 1176627 - DNA, 15 bp, Homo sapiens
ttgttgaaatatttt

SEQ ID NO: 1176628 - DNA, 15 bp, Homo sapiens
cttgttgaaatattt

SEQ ID NO: 1176629 - DNA, 15 bp, Homo sapiens
ccttgttgaaatatt

SEQ ID NO: 1176630 - DNA, 15 bp, Homo sapiens
cccttgttgaaatat

SEQ ID NO: 1176631 - DNA, 15 bp, Homo sapiens
gcccttgttgaaata

SEQ ID NO: 1176632 - DNA, 15 bp, Homo sapiens
ggcccttgttgaaat

SEQ ID NO: 1176633 - DNA, 15 bp, Homo sapiens
tggcccttgttgaaa

SEQ ID NO: 1176634 - DNA, 15 bp, Homo sapiens
ctggcccttgttgaa

SEQ ID NO: 1176635 - DNA, 15 bp, Homo sapiens
cctggcccttgttga

SEQ ID NO: 1176636 - DNA, 15 bp, Homo sapiens
acctggcccttgttg

SEQ ID NO: 1176637 - DNA, 15 bp, Homo sapiens
cacctggcccttgtt

SEQ ID NO: 1176638 - DNA, 15 bp, Homo sapiens
gcacctggcccttgt

SEQ ID NO: 1176639 - DNA, 15 bp, Homo sapiens
cgcacctggcccttg

SEQ ID NO: 1176640 - DNA, 15 bp, Homo sapiens
ccgcacctggccctt

SEQ ID NO: 1176641 - DNA, 15 bp, Homo sapiens
gaccgcacctggccc

SEQ ID NO: 1176642 - DNA, 15 bp, Homo sapiens
cgaccgcacctggcc

SEQ ID NO: 1176643 - DNA, 15 bp, Homo sapiens
gcgaccgcacctggc

SEQ ID NO: 1176644 - DNA, 15 bp, Homo sapiens
agcgaccgcacctgg

SEQ ID NO: 1176645 - DNA, 15 bp, Homo sapiens
gagcgaccgcacctg

SEQ ID NO: 1176646 - DNA, 15 bp, Homo sapiens
tgagcgaccgcacct

SEQ ID NO: 1176647 - DNA, 15 bp, Homo sapiens
gtgagcgaccgcacc

SEQ ID NO: 1176648 - DNA, 15 bp, Homo sapiens
tgtgagcgaccgcac

SEQ ID NO: 1176649 - DNA, 15 bp, Homo sapiens
gtgtgagcgaccgca

SEQ ID NO: 1176650 - DNA, 15 bp, Homo sapiens
ggtgtgagcgaccgc

SEQ ID NO: 1176651 - DNA, 15 bp, Homo sapiens
aggtgtgagcgaccg

SEQ ID NO: 1176652 - DNA, 15 bp, Homo sapiens
caggtgtgagcgacc

SEQ ID NO: 1176653 - DNA, 15 bp, Homo sapiens
acaggtgtgagcgac

SEQ ID NO: 1176654 - DNA, 15 bp, Homo sapiens
tacaggtgtgagcga

SEQ ID NO: 1176655 - DNA, 15 bp, Homo sapiens
ttacaggtgtgagcg

SEQ ID NO: 1176656 - DNA, 15 bp, Homo sapiens
ggtgatccgcccgcc

SEQ ID NO: 1176657 - DNA, 15 bp, Homo sapiens
aggtgatccgcccgc

SEQ ID NO: 1176658 - DNA, 15 bp, Homo sapiens
caggtgatccgcccg

SEQ ID NO: 1176659 - DNA, 15 bp, Homo sapiens
acaggtgatccgccc

SEQ ID NO: 1176660 - DNA, 15 bp, Homo sapiens
cacaggtgatccgcc

SEQ ID NO: 1176661 - DNA, 15 bp, Homo sapiens
ccacaggtgatccgc

SEQ ID NO: 1176662 - DNA, 15 bp, Homo sapiens
accacaggtgatccg

SEQ ID NO: 1176663 - DNA, 15 bp, Homo sapiens
gaccacaggtgatcc

SEQ ID NO: 1176664 - DNA, 15 bp, Homo sapiens
tgaccacaggtgatc

SEQ ID NO: 1176665 - DNA, 15 bp, Homo sapiens
ctgaccacaggtgat

SEQ ID NO: 1176666 - DNA, 15 bp, Homo sapiens
cctgaccacaggtga

SEQ ID NO: 1176667 - DNA, 15 bp, Homo sapiens
tcctgaccacaggtg

SEQ ID NO: 1176668 - DNA, 15 bp, Homo sapiens
ctcctgaccacaggt

SEQ ID NO: 1176669 - DNA, 15 bp, Homo sapiens
actcctgaccacagg

SEQ ID NO: 1176670 - DNA, 15 bp, Homo sapiens
aactcctgaccacag

SEQ ID NO: 1176671 - DNA, 15 bp, Homo sapiens
gaactcctgaccaca

SEQ ID NO: 1176672 - DNA, 15 bp, Homo sapiens
tgaactcctgaccac

SEQ ID NO: 1176673 - DNA, 15 bp, Homo sapiens
ttgaactcctgacca

SEQ ID NO: 1176674 - DNA, 15 bp, Homo sapiens
cgttggccaggctgg

SEQ ID NO: 1176675 - DNA, 15 bp, Homo sapiens
acgttggccaggctg

SEQ ID NO: 1176676 - DNA, 15 bp, Homo sapiens
cacgttggccaggct

SEQ ID NO: 1176677 - DNA, 15 bp, Homo sapiens
ccacgttggccaggc

SEQ ID NO: 1176678 - DNA, 15 bp, Homo sapiens
accacgttggccagg

SEQ ID NO: 1176679 - DNA, 15 bp, Homo sapiens
caccacgttggccag

SEQ ID NO: 1176680 - DNA, 15 bp, Homo sapiens
tcaccacgttggcca

SEQ ID NO: 1176681 - DNA, 15 bp, Homo sapiens
ttcaccacgttggcc

SEQ ID NO: 1176682 - DNA, 15 bp, Homo sapiens
tttcaccacgttggc

SEQ ID NO: 1176683 - DNA, 15 bp, Homo sapiens
gtttcaccacgttgg

SEQ ID NO: 1176684 - DNA, 15 bp, Homo sapiens
ggtttcaccacgttg

SEQ ID NO: 1176685 - DNA, 15 bp, Homo sapiens
gggtttcaccacgtt

SEQ ID NO: 1176686 - DNA, 15 bp, Homo sapiens
ggggtttcaccacgt

SEQ ID NO: 1176687 - DNA, 15 bp, Homo sapiens
cggggtttcaccacg

SEQ ID NO: 1176688 - DNA, 15 bp, Homo sapiens
tgtagagacggggtt

SEQ ID NO: 1176689 - DNA, 15 bp, Homo sapiens
atttttgtagagacg

SEQ ID NO: 1176690 - DNA, 15 bp, Homo sapiens
tatttttgtagagac

SEQ ID NO: 1176691 - DNA, 15 bp, Homo sapiens
aattacaggcgtgtg

SEQ ID NO: 1176692 - DNA, 15 bp, Homo sapiens
gaattacaggcgtgt

SEQ ID NO: 1176693 - DNA, 15 bp, Homo sapiens
atagctggaattaca

SEQ ID NO: 1176694 - DNA, 15 bp, Homo sapiens
aatagctggaattac

SEQ ID NO: 1176695 - DNA, 15 bp, Homo sapiens
gaatagctggaatta

SEQ ID NO: 1176696 - DNA, 15 bp, Homo sapiens
cgaatagctggaatt

SEQ ID NO: 1176697 - DNA, 15 bp, Homo sapiens
ccgaatagctggaat

SEQ ID NO: 1176698 - DNA, 15 bp, Homo sapiens
tctcccgaatagctg

SEQ ID NO: 1176699 - DNA, 15 bp, Homo sapiens
gtctcccgaatagct

SEQ ID NO: 1176700 - DNA, 15 bp, Homo sapiens
agtctcccgaatagc

SEQ ID NO: 1176701 - DNA, 15 bp, Homo sapiens
cagtctcccgaatag

SEQ ID NO: 1176702 - DNA, 15 bp, Homo sapiens
tcagtctcccgaata

SEQ ID NO: 1176703 - DNA, 15 bp, Homo sapiens
ctcagtctcccgaat

SEQ ID NO: 1176704 - DNA, 15 bp, Homo sapiens
cctcagtctcccgaa

SEQ ID NO: 1176705 - DNA, 15 bp, Homo sapiens
gcctcagtctcccga

SEQ ID NO: 1176706 - DNA, 15 bp, Homo sapiens
tgcctcagtctcccg

SEQ ID NO: 1176707 - DNA, 15 bp, Homo sapiens
ttgcctcagtctccc

SEQ ID NO: 1176708 - DNA, 15 bp, Homo sapiens
cttgcctcagtctcc

SEQ ID NO: 1176709 - DNA, 15 bp, Homo sapiens
tcttgcctcagtctc

SEQ ID NO: 1176710 - DNA, 15 bp, Homo sapiens
atcttgcctcagtct

SEQ ID NO: 1176711 - DNA, 15 bp, Homo sapiens
tatcttgcctcagtc

SEQ ID NO: 1176712 - DNA, 15 bp, Homo sapiens
ttatcttgcctcagt

SEQ ID NO: 1176713 - DNA, 15 bp, Homo sapiens
attatcttgcctcag

SEQ ID NO: 1176714 - DNA, 15 bp, Homo sapiens
aattatcttgcctca

SEQ ID NO: 1176715 - DNA, 15 bp, Homo sapiens
acaattatcttgcct

SEQ ID NO: 1176716 - DNA, 15 bp, Homo sapiens
aacaattatcttgcc

SEQ ID NO: 1176717 - DNA, 15 bp, Homo sapiens
aaacaattatcttgc

SEQ ID NO: 1176718 - DNA, 15 bp, Homo sapiens
caaacaattatcttg

SEQ ID NO: 1176719 - DNA, 15 bp, Homo sapiens
tcaaacaattatctt

SEQ ID NO: 1176720 - DNA, 15 bp, Homo sapiens
ttcaaacaattatct

SEQ ID NO: 1176721 - DNA, 15 bp, Homo sapiens
gttcaaacaattatc

SEQ ID NO: 1176722 - DNA, 15 bp, Homo sapiens
ggttcaaacaattat

SEQ ID NO: 1176723 - DNA, 15 bp, Homo sapiens
aggttcaaacaatta

SEQ ID NO: 1176724 - DNA, 15 bp, Homo sapiens
caggttcaaacaatt

SEQ ID NO: 1176725 - DNA, 15 bp, Homo sapiens
ccaggttcaaacaat

SEQ ID NO: 1176726 - DNA, 15 bp, Homo sapiens
cccaggttcaaacaa

SEQ ID NO: 1176727 - DNA, 15 bp, Homo sapiens
tcccaggttcaaaca

SEQ ID NO: 1176728 - DNA, 15 bp, Homo sapiens
tctcccaggttcaaa

SEQ ID NO: 1176729 - DNA, 15 bp, Homo sapiens
gctgtctcccaggtt

SEQ ID NO: 1176730 - DNA, 15 bp, Homo sapiens
cgctgtctcccaggt

SEQ ID NO: 1176731 - DNA, 15 bp, Homo sapiens
ccgctgtctcccagg

SEQ ID NO: 1176732 - DNA, 15 bp, Homo sapiens
accgctgtctcccag

SEQ ID NO: 1176733 - DNA, 15 bp, Homo sapiens
aaccgctgtctccca

SEQ ID NO: 1176734 - DNA, 15 bp, Homo sapiens
caaccgctgtctccc

SEQ ID NO: 1176735 - DNA, 15 bp, Homo sapiens
gcaaccgctgtctcc

SEQ ID NO: 1176736 - DNA, 15 bp, Homo sapiens
tgcaaccgctgtctc

SEQ ID NO: 1176737 - DNA, 15 bp, Homo sapiens
ctgcaaccgctgtct

SEQ ID NO: 1176738 - DNA, 15 bp, Homo sapiens
actgcaaccgctgtc

SEQ ID NO: 1176739 - DNA, 15 bp, Homo sapiens
cactgcaaccgctgt

SEQ ID NO: 1176740 - DNA, 15 bp, Homo sapiens
tcactgcaaccgctg

SEQ ID NO: 1176741 - DNA, 15 bp, Homo sapiens
ctcactgcaaccgct

SEQ ID NO: 1176742 - DNA, 15 bp, Homo sapiens
gctcactgcaaccgc

SEQ ID NO: 1176743 - DNA, 15 bp, Homo sapiens
agctcactgcaaccg

SEQ ID NO: 1176744 - DNA, 15 bp, Homo sapiens
agatctcagctcact

SEQ ID NO: 1176745 - DNA, 15 bp, Homo sapiens
aagatctcagctcac

SEQ ID NO: 1176746 - DNA, 15 bp, Homo sapiens
caagatctcagctca

SEQ ID NO: 1176747 - DNA, 15 bp, Homo sapiens
gcaagatctcagctc

SEQ ID NO: 1176748 - DNA, 15 bp, Homo sapiens
ggcaagatctcagct

SEQ ID NO: 1176749 - DNA, 15 bp, Homo sapiens
tggcaagatctcagc

SEQ ID NO: 1176750 - DNA, 15 bp, Homo sapiens
gtggcaagatctcag

SEQ ID NO: 1176751 - DNA, 15 bp, Homo sapiens
agtggcaagatctca

SEQ ID NO: 1176752 - DNA, 15 bp, Homo sapiens
cagtggcaagatctc

SEQ ID NO: 1176753 - DNA, 15 bp, Homo sapiens
acagtggcaagatct

SEQ ID NO: 1176754 - DNA, 15 bp, Homo sapiens
tacagtggcaagatc

SEQ ID NO: 1176755 - DNA, 15 bp, Homo sapiens
gtacagtggcaagat

SEQ ID NO: 1176756 - DNA, 15 bp, Homo sapiens
agtacagtggcaaga

SEQ ID NO: 1176757 - DNA, 15 bp, Homo sapiens
gagtacagtggcaag

SEQ ID NO: 1176758 - DNA, 15 bp, Homo sapiens
ggagtacagtggcaa

SEQ ID NO: 1176759 - DNA, 15 bp, Homo sapiens
attgcccaggctgga

SEQ ID NO: 1176760 - DNA, 15 bp, Homo sapiens
ctattgcccaggctg

SEQ ID NO: 1176761 - DNA, 15 bp, Homo sapiens
tctattgcccaggct

SEQ ID NO: 1176762 - DNA, 15 bp, Homo sapiens
ctctattgcccaggc

SEQ ID NO: 1176763 - DNA, 15 bp, Homo sapiens
actctattgcccagg

SEQ ID NO: 1176764 - DNA, 15 bp, Homo sapiens
cactctattgcccag

SEQ ID NO: 1176765 - DNA, 15 bp, Homo sapiens
tcactctattgccca

SEQ ID NO: 1176766 - DNA, 15 bp, Homo sapiens
ctcactctattgccc

SEQ ID NO: 1176767 - DNA, 15 bp, Homo sapiens
tctcactctattgcc

SEQ ID NO: 1176768 - DNA, 15 bp, Homo sapiens
gtctcactctattgc

SEQ ID NO: 1176769 - DNA, 15 bp, Homo sapiens
agtctcactctattg

SEQ ID NO: 1176770 - DNA, 15 bp, Homo sapiens
attgagatggagtct

SEQ ID NO: 1176771 - DNA, 15 bp, Homo sapiens
tattgagatggagtc

SEQ ID NO: 1176772 - DNA, 15 bp, Homo sapiens
ttattgagatggagt

SEQ ID NO: 1176773 - DNA, 15 bp, Homo sapiens
tttattgagatggag

SEQ ID NO: 1176774 - DNA, 15 bp, Homo sapiens
atttattgagatgga

SEQ ID NO: 1176775 - DNA, 15 bp, Homo sapiens
tatttattgagatgg

SEQ ID NO: 1176776 - DNA, 15 bp, Homo sapiens
ttatttattgagatg

SEQ ID NO: 1176777 - DNA, 15 bp, Homo sapiens
tttatttattgagat

SEQ ID NO: 1176778 - DNA, 15 bp, Homo sapiens
atttatttattgaga

SEQ ID NO: 1176779 - DNA, 15 bp, Homo sapiens
tatttatttattgag

SEQ ID NO: 1176780 - DNA, 15 bp, Homo sapiens
ttatttatttattga

SEQ ID NO: 1176781 - DNA, 15 bp, Homo sapiens
tttatttatttattg

SEQ ID NO: 1176782 - DNA, 15 bp, Homo sapiens
ccctttatttattta

SEQ ID NO: 1176783 - DNA, 15 bp, Homo sapiens
gccctttatttattt

SEQ ID NO: 1176784 - DNA, 15 bp, Homo sapiens
agccctttatttatt

SEQ ID NO: 1176785 - DNA, 15 bp, Homo sapiens
cagccctttatttat

SEQ ID NO: 1176786 - DNA, 15 bp, Homo sapiens
ccagccctttattta

SEQ ID NO: 1176787 - DNA, 15 bp, Homo sapiens
cccagccctttattt

SEQ ID NO: 1176788 - DNA, 15 bp, Homo sapiens
gcccagccctttatt

SEQ ID NO: 1176789 - DNA, 15 bp, Homo sapiens
ggcccagccctttat

SEQ ID NO: 1176790 - DNA, 15 bp, Homo sapiens
gggcccagcccttta

SEQ ID NO: 1176791 - DNA, 15 bp, Homo sapiens
cgggcccagcccttt

SEQ ID NO: 1176792 - DNA, 15 bp, Homo sapiens
ccgggcccagccctt

SEQ ID NO: 1176793 - DNA, 15 bp, Homo sapiens
accgggcccagccct

SEQ ID NO: 1176794 - DNA, 15 bp, Homo sapiens
caccgggcccagccc

SEQ ID NO: 1176795 - DNA, 15 bp, Homo sapiens
ccaccgggcccagcc

SEQ ID NO: 1176796 - DNA, 15 bp, Homo sapiens
gccaccgggcccagc

SEQ ID NO: 1176797 - DNA, 15 bp, Homo sapiens
agccaccgggcccag

SEQ ID NO: 1176798 - DNA, 15 bp, Homo sapiens
gagccaccgggccca

SEQ ID NO: 1176799 - DNA, 15 bp, Homo sapiens
tgagccaccgggccc

SEQ ID NO: 1176800 - DNA, 15 bp, Homo sapiens
gtgagccaccgggcc

SEQ ID NO: 1176801 - DNA, 15 bp, Homo sapiens
cgtgagccaccgggc

SEQ ID NO: 1176802 - DNA, 15 bp, Homo sapiens
gcgtgagccaccggg

SEQ ID NO: 1176803 - DNA, 15 bp, Homo sapiens
ggcgtgagccaccgg

SEQ ID NO: 1176804 - DNA, 15 bp, Homo sapiens
cgcctcaacctccca

SEQ ID NO: 1176805 - DNA, 15 bp, Homo sapiens
ccgcctcaacctccc

SEQ ID NO: 1176806 - DNA, 15 bp, Homo sapiens
cccgcctcaacctcc

SEQ ID NO: 1176807 - DNA, 15 bp, Homo sapiens
gcccgcctcaacctc

SEQ ID NO: 1176808 - DNA, 15 bp, Homo sapiens
tgcccgcctcaacct

SEQ ID NO: 1176809 - DNA, 15 bp, Homo sapiens
ctgcccgcctcaacc

SEQ ID NO: 1176810 - DNA, 15 bp, Homo sapiens
tctgcccgcctcaac

SEQ ID NO: 1176811 - DNA, 15 bp, Homo sapiens
atctgcccgcctcaa

SEQ ID NO: 1176812 - DNA, 15 bp, Homo sapiens
aatctcctgacctcg

SEQ ID NO: 1176813 - DNA, 15 bp, Homo sapiens
caatctcctgacctc

SEQ ID NO: 1176814 - DNA, 15 bp, Homo sapiens
acaatctcctgacct

SEQ ID NO: 1176815 - DNA, 15 bp, Homo sapiens
cacaatctcctgacc

SEQ ID NO: 1176816 - DNA, 15 bp, Homo sapiens
tcacaatctcctgac

SEQ ID NO: 1176817 - DNA, 15 bp, Homo sapiens
gtcacaatctcctga

SEQ ID NO: 1176818 - DNA, 15 bp, Homo sapiens
ggtcacaatctcctg

SEQ ID NO: 1176819 - DNA, 15 bp, Homo sapiens
tggtcacaatctcct

SEQ ID NO: 1176820 - DNA, 15 bp, Homo sapiens
atggtcacaatctcc

SEQ ID NO: 1176821 - DNA, 15 bp, Homo sapiens
gatggtcacaatctc

SEQ ID NO: 1176822 - DNA, 15 bp, Homo sapiens
ggatggtcacaatct

SEQ ID NO: 1176823 - DNA, 15 bp, Homo sapiens
aggatggtcacaatc

SEQ ID NO: 1176824 - DNA, 15 bp, Homo sapiens
caggatggtcacaat

SEQ ID NO: 1176825 - DNA, 15 bp, Homo sapiens
ccaggatggtcacaa

SEQ ID NO: 1176826 - DNA, 15 bp, Homo sapiens
gccaggatggtcaca

SEQ ID NO: 1176827 - DNA, 15 bp, Homo sapiens
agccaggatggtcac

SEQ ID NO: 1176828 - DNA, 15 bp, Homo sapiens
tagccaggatggtca

SEQ ID NO: 1176829 - DNA, 15 bp, Homo sapiens
attagccaggatggt

SEQ ID NO: 1176830 - DNA, 15 bp, Homo sapiens
cattagccaggatgg

SEQ ID NO: 1176831 - DNA, 15 bp, Homo sapiens
gcattagccaggatg

SEQ ID NO: 1176832 - DNA, 15 bp, Homo sapiens
tgcattagccaggat

SEQ ID NO: 1176833 - DNA, 15 bp, Homo sapiens
ctgcattagccagga

SEQ ID NO: 1176834 - DNA, 15 bp, Homo sapiens
actgcattagccagg

SEQ ID NO: 1176835 - DNA, 15 bp, Homo sapiens
cactgcattagccag

SEQ ID NO: 1176836 - DNA, 15 bp, Homo sapiens
tcactgcattagcca

SEQ ID NO: 1176837 - DNA, 15 bp, Homo sapiens
ttcactgcattagcc

SEQ ID NO: 1176838 - DNA, 15 bp, Homo sapiens
tttcactgcattagc

SEQ ID NO: 1176839 - DNA, 15 bp, Homo sapiens
gtttcactgcattag

SEQ ID NO: 1176840 - DNA, 15 bp, Homo sapiens
ggtttcactgcatta

SEQ ID NO: 1176841 - DNA, 15 bp, Homo sapiens
gggtttcactgcatt

SEQ ID NO: 1176842 - DNA, 15 bp, Homo sapiens
ggggtttcactgcat

SEQ ID NO: 1176843 - DNA, 15 bp, Homo sapiens
tggggtttcactgca

SEQ ID NO: 1176844 - DNA, 15 bp, Homo sapiens
atggggtttcactgc

SEQ ID NO: 1176845 - DNA, 15 bp, Homo sapiens
actaattttttttgt

SEQ ID NO: 1176846 - DNA, 15 bp, Homo sapiens
aactaattttttttg

SEQ ID NO: 1176847 - DNA, 15 bp, Homo sapiens
caactaatttttttt

SEQ ID NO: 1176848 - DNA, 15 bp, Homo sapiens
ccaactaattttttt

SEQ ID NO: 1176849 - DNA, 15 bp, Homo sapiens
cccaactaatttttt

SEQ ID NO: 1176850 - DNA, 15 bp, Homo sapiens
gcccaactaattttt

SEQ ID NO: 1176851 - DNA, 15 bp, Homo sapiens
tgcccaactaatttt

SEQ ID NO: 1176852 - DNA, 15 bp, Homo sapiens
atgcccaactaattt

SEQ ID NO: 1176853 - DNA, 15 bp, Homo sapiens
catgcccaactaatt

SEQ ID NO: 1176854 - DNA, 15 bp, Homo sapiens
ccatgcccaactaat

SEQ ID NO: 1176855 - DNA, 15 bp, Homo sapiens
accatgcccaactaa

SEQ ID NO: 1176856 - DNA, 15 bp, Homo sapiens
caccatgcccaacta

SEQ ID NO: 1176857 - DNA, 15 bp, Homo sapiens
ccaccatgcccaact

SEQ ID NO: 1176858 - DNA, 15 bp, Homo sapiens
gccaccatgcccaac

SEQ ID NO: 1176859 - DNA, 15 bp, Homo sapiens
ggccaccatgcccaa

SEQ ID NO: 1176860 - DNA, 15 bp, Homo sapiens
cgccggccaccatgc

SEQ ID NO: 1176861 - DNA, 15 bp, Homo sapiens
gcgccggccaccatg

SEQ ID NO: 1176862 - DNA, 15 bp, Homo sapiens
ggcgccggccaccat

SEQ ID NO: 1176863 - DNA, 15 bp, Homo sapiens
aggcgccggccacca

SEQ ID NO: 1176864 - DNA, 15 bp, Homo sapiens
caggcgccggccacc

SEQ ID NO: 1176865 - DNA, 15 bp, Homo sapiens
gcaggcgccggccac

SEQ ID NO: 1176866 - DNA, 15 bp, Homo sapiens
tgcaggcgccggcca

SEQ ID NO: 1176867 - DNA, 15 bp, Homo sapiens
ctgcaggcgccggcc

SEQ ID NO: 1176868 - DNA, 15 bp, Homo sapiens
actgcaggcgccggc

SEQ ID NO: 1176869 - DNA, 15 bp, Homo sapiens
gactgcaggcgccgg

SEQ ID NO: 1176870 - DNA, 15 bp, Homo sapiens
ggactgcaggcgccg

SEQ ID NO: 1176871 - DNA, 15 bp, Homo sapiens
gggactgcaggcgcc

SEQ ID NO: 1176872 - DNA, 15 bp, Homo sapiens
tgggactgcaggcgc

SEQ ID NO: 1176873 - DNA, 15 bp, Homo sapiens
ctgggactgcaggcg

SEQ ID NO: 1176874 - DNA, 15 bp, Homo sapiens
ttcctgagtagctgg

SEQ ID NO: 1176875 - DNA, 15 bp, Homo sapiens
cttcctgagtagctg

SEQ ID NO: 1176876 - DNA, 15 bp, Homo sapiens
gcttcctgagtagct

SEQ ID NO: 1176877 - DNA, 15 bp, Homo sapiens
agcttcctgagtagc

SEQ ID NO: 1176878 - DNA, 15 bp, Homo sapiens
cagcttcctgagtag

SEQ ID NO: 1176879 - DNA, 15 bp, Homo sapiens
tcagcttcctgagta

SEQ ID NO: 1176880 - DNA, 15 bp, Homo sapiens
ctcagcttcctgagt

SEQ ID NO: 1176881 - DNA, 15 bp, Homo sapiens
cctcagcttcctgag

SEQ ID NO: 1176882 - DNA, 15 bp, Homo sapiens
gcctcagcttcctga

SEQ ID NO: 1176883 - DNA, 15 bp, Homo sapiens
tgcctcagcttcctg

SEQ ID NO: 1176884 - DNA, 15 bp, Homo sapiens
ctgcctcagcttcct

SEQ ID NO: 1176885 - DNA, 15 bp, Homo sapiens
atcctgcctcagctt

SEQ ID NO: 1176886 - DNA, 15 bp, Homo sapiens
tatcctgcctcagct

SEQ ID NO: 1176887 - DNA, 15 bp, Homo sapiens
atgccattatcctgc

SEQ ID NO: 1176888 - DNA, 15 bp, Homo sapiens
catgccattatcctg

SEQ ID NO: 1176889 - DNA, 15 bp, Homo sapiens
tcatgccattatcct

SEQ ID NO: 1176890 - DNA, 15 bp, Homo sapiens
ttcatgccattatcc

SEQ ID NO: 1176891 - DNA, 15 bp, Homo sapiens
gttcatgccattatc

SEQ ID NO: 1176892 - DNA, 15 bp, Homo sapiens
ggttcatgccattat

SEQ ID NO: 1176893 - DNA, 15 bp, Homo sapiens
aggttcatgccatta

SEQ ID NO: 1176894 - DNA, 15 bp, Homo sapiens
caggttcatgccatt

SEQ ID NO: 1176895 - DNA, 15 bp, Homo sapiens
ccaggttcatgccat

SEQ ID NO: 1176896 - DNA, 15 bp, Homo sapiens
cccaggttcatgcca

SEQ ID NO: 1176897 - DNA, 15 bp, Homo sapiens
tcccaggttcatgcc

SEQ ID NO: 1176898 - DNA, 15 bp, Homo sapiens
ctcccaggttcatgc

SEQ ID NO: 1176899 - DNA, 15 bp, Homo sapiens
cctcccaggttcatg

SEQ ID NO: 1176900 - DNA, 15 bp, Homo sapiens
acctcccaggttcat

SEQ ID NO: 1176901 - DNA, 15 bp, Homo sapiens
ctcactgcaacctcc

SEQ ID NO: 1176902 - DNA, 15 bp, Homo sapiens
agtctcggctcactg

SEQ ID NO: 1176903 - DNA, 15 bp, Homo sapiens
cagtctcggctcact

SEQ ID NO: 1176904 - DNA, 15 bp, Homo sapiens
gcagtctcggctcac

SEQ ID NO: 1176905 - DNA, 15 bp, Homo sapiens
cgcagtctcggctca

SEQ ID NO: 1176906 - DNA, 15 bp, Homo sapiens
gcgcagtctcggctc

SEQ ID NO: 1176907 - DNA, 15 bp, Homo sapiens
ggcgcagtctcggct

SEQ ID NO: 1176908 - DNA, 15 bp, Homo sapiens
tggcgcagtctcggc

SEQ ID NO: 1176909 - DNA, 15 bp, Homo sapiens
gtggcgcagtctcgg

SEQ ID NO: 1176910 - DNA, 15 bp, Homo sapiens
agtggcgcagtctcg

SEQ ID NO: 1176911 - DNA, 15 bp, Homo sapiens
cagtggcgcagtctc

SEQ ID NO: 1176912 - DNA, 15 bp, Homo sapiens
gcagtggcgcagtct

SEQ ID NO: 1176913 - DNA, 15 bp, Homo sapiens
tgcagtggcgcagtc

SEQ ID NO: 1176914 - DNA, 15 bp, Homo sapiens
gtgcagtggcgcagt

SEQ ID NO: 1176915 - DNA, 15 bp, Homo sapiens
agtgcagtggcgcag

SEQ ID NO: 1176916 - DNA, 15 bp, Homo sapiens
atcgctctgttgccc

SEQ ID NO: 1176917 - DNA, 15 bp, Homo sapiens
tatcgctctgttgcc

SEQ ID NO: 1176918 - DNA, 15 bp, Homo sapiens
gtatcgctctgttgc

SEQ ID NO: 1176919 - DNA, 15 bp, Homo sapiens
agtatcgctctgttg

SEQ ID NO: 1176920 - DNA, 15 bp, Homo sapiens
aagtatcgctctgtt

SEQ ID NO: 1176921 - DNA, 15 bp, Homo sapiens
gaagtatcgctctgt

SEQ ID NO: 1176922 - DNA, 15 bp, Homo sapiens
cgaagtatcgctctg

SEQ ID NO: 1176923 - DNA, 15 bp, Homo sapiens
acgaagtatcgctct

SEQ ID NO: 1176924 - DNA, 15 bp, Homo sapiens
gacgaagtatcgctc

SEQ ID NO: 1176925 - DNA, 15 bp, Homo sapiens
agacgaagtatcgct

SEQ ID NO: 1176926 - DNA, 15 bp, Homo sapiens
gagacgaagtatcgc

SEQ ID NO: 1176927 - DNA, 15 bp, Homo sapiens
tgagacgaagtatcg

SEQ ID NO: 1176928 - DNA, 15 bp, Homo sapiens
ttgagacgaagtatc

SEQ ID NO: 1176929 - DNA, 15 bp, Homo sapiens
attgagacgaagtat

SEQ ID NO: 1176930 - DNA, 15 bp, Homo sapiens
tattgagacgaagta

SEQ ID NO: 1176931 - DNA, 15 bp, Homo sapiens
ttattgagacgaagt

SEQ ID NO: 1176932 - DNA, 15 bp, Homo sapiens
attattgagacgaag

SEQ ID NO: 1176933 - DNA, 15 bp, Homo sapiens
tattattgagacgaa

SEQ ID NO: 1176934 - DNA, 15 bp, Homo sapiens
ttattattgagacga

SEQ ID NO: 1176935 - DNA, 15 bp, Homo sapiens
attattattgagacg

SEQ ID NO: 1176936 - DNA, 15 bp, Homo sapiens
tattattattgagac

SEQ ID NO: 1176937 - DNA, 15 bp, Homo sapiens
ttattattattgaga

SEQ ID NO: 1176938 - DNA, 15 bp, Homo sapiens
attattattattgag

SEQ ID NO: 1176939 - DNA, 15 bp, Homo sapiens
tattattattattga

SEQ ID NO: 1176940 - DNA, 15 bp, Homo sapiens
aaatattattattat

SEQ ID NO: 1176941 - DNA, 15 bp, Homo sapiens
gaaatattattatta

SEQ ID NO: 1176942 - DNA, 15 bp, Homo sapiens
tgaaatattattatt

SEQ ID NO: 1176943 - DNA, 15 bp, Homo sapiens
ttgaaatattattat

SEQ ID NO: 1176944 - DNA, 15 bp, Homo sapiens
gttgaaatattatta

SEQ ID NO: 1176945 - DNA, 15 bp, Homo sapiens
tgttgaaatattatt

SEQ ID NO: 1176946 - DNA, 15 bp, Homo sapiens
ttgttgaaatattat

SEQ ID NO: 1176947 - DNA, 15 bp, Homo sapiens
tttgttgaaatatta

SEQ ID NO: 1176948 - DNA, 15 bp, Homo sapiens
ttttgttgaaatatt

SEQ ID NO: 1176949 - DNA, 15 bp, Homo sapiens
cttttgttgaaatat

SEQ ID NO: 1176950 - DNA, 15 bp, Homo sapiens
tcttttgttgaaata

SEQ ID NO: 1176951 - DNA, 15 bp, Homo sapiens
atcttttgttgaaat

SEQ ID NO: 1176952 - DNA, 15 bp, Homo sapiens
gatcttttgttgaaa

SEQ ID NO: 1176953 - DNA, 15 bp, Homo sapiens
agatcttttgttgaa

SEQ ID NO: 1176954 - DNA, 15 bp, Homo sapiens
gagatcttttgttga

SEQ ID NO: 1176955 - DNA, 15 bp, Homo sapiens
agagatcttttgttg

SEQ ID NO: 1176956 - DNA, 15 bp, Homo sapiens
aagagatcttttgtt

SEQ ID NO: 1176957 - DNA, 15 bp, Homo sapiens
aaagagatcttttgt

SEQ ID NO: 1176958 - DNA, 15 bp, Homo sapiens
caaagagatcttttg

SEQ ID NO: 1176959 - DNA, 15 bp, Homo sapiens
ccaaagagatctttt

SEQ ID NO: 1176960 - DNA, 15 bp, Homo sapiens
gccaaagagatcttt

SEQ ID NO: 1176961 - DNA, 15 bp, Homo sapiens
agccaaagagatctt

SEQ ID NO: 1176962 - DNA, 15 bp, Homo sapiens
gagccaaagagatct

SEQ ID NO: 1176963 - DNA, 15 bp, Homo sapiens
agagccaaagagatc

SEQ ID NO: 1176964 - DNA, 15 bp, Homo sapiens
cagagccaaagagat

SEQ ID NO: 1176965 - DNA, 15 bp, Homo sapiens
gcagagccaaagaga

SEQ ID NO: 1176966 - DNA, 15 bp, Homo sapiens
tgcagagccaaagag

SEQ ID NO: 1176967 - DNA, 15 bp, Homo sapiens
gtgcagagccaaaga

SEQ ID NO: 1176968 - DNA, 15 bp, Homo sapiens
tgtgcagagccaaag

SEQ ID NO: 1176969 - DNA, 15 bp, Homo sapiens
ttgtgcagagccaaa

SEQ ID NO: 1176970 - DNA, 15 bp, Homo sapiens
cttgtgcagagccaa

SEQ ID NO: 1176971 - DNA, 15 bp, Homo sapiens
gcttgtgcagagcca

SEQ ID NO: 1176972 - DNA, 15 bp, Homo sapiens
ggcttgtgcagagcc

SEQ ID NO: 1176973 - DNA, 15 bp, Homo sapiens
tggcttgtgcagagc

SEQ ID NO: 1176974 - DNA, 15 bp, Homo sapiens
atggcttgtgcagag

SEQ ID NO: 1176975 - DNA, 15 bp, Homo sapiens
gatggcttgtgcaga

SEQ ID NO: 1176976 - DNA, 15 bp, Homo sapiens
agatggcttgtgcag

SEQ ID NO: 1176977 - DNA, 15 bp, Homo sapiens
gagatggcttgtgca

SEQ ID NO: 1176978 - DNA, 15 bp, Homo sapiens
tgagatggcttgtgc

SEQ ID NO: 1176979 - DNA, 15 bp, Homo sapiens
atgagatggcttgtg

SEQ ID NO: 1176980 - DNA, 15 bp, Homo sapiens
gatgagatggcttgt

SEQ ID NO: 1176981 - DNA, 15 bp, Homo sapiens
tgatgagatggcttg

SEQ ID NO: 1176982 - DNA, 15 bp, Homo sapiens
ctgatgagatggctt

SEQ ID NO: 1176983 - DNA, 15 bp, Homo sapiens
actgatgagatggct

SEQ ID NO: 1176984 - DNA, 15 bp, Homo sapiens
tactgatgagatggc

SEQ ID NO: 1176985 - DNA, 15 bp, Homo sapiens
ctactgatgagatgg

SEQ ID NO: 1176986 - DNA, 15 bp, Homo sapiens
tctactgatgagatg

SEQ ID NO: 1176987 - DNA, 15 bp, Homo sapiens
atctactgatgagat

SEQ ID NO: 1176988 - DNA, 15 bp, Homo sapiens
aatctactgatgaga

SEQ ID NO: 1176989 - DNA, 15 bp, Homo sapiens
aaatctactgatgag

SEQ ID NO: 1176990 - DNA, 15 bp, Homo sapiens
gaaatctactgatga

SEQ ID NO: 1176991 - DNA, 15 bp, Homo sapiens
agaaatctactgatg

SEQ ID NO: 1176992 - DNA, 15 bp, Homo sapiens
gagaaatctactgat

SEQ ID NO: 1176993 - DNA, 15 bp, Homo sapiens
agagaaatctactga

SEQ ID NO: 1176994 - DNA, 15 bp, Homo sapiens
aagagaaatctactg

SEQ ID NO: 1176995 - DNA, 15 bp, Homo sapiens
caagagaaatctact

SEQ ID NO: 1176996 - DNA, 15 bp, Homo sapiens
gcaagagaaatctac

SEQ ID NO: 1176997 - DNA, 15 bp, Homo sapiens
agcaagagaaatcta

SEQ ID NO: 1176998 - DNA, 15 bp, Homo sapiens
tagcaagagaaatct

SEQ ID NO: 1176999 - DNA, 15 bp, Homo sapiens
atagcaagagaaatc

SEQ ID NO: 1177000 - DNA, 15 bp, Homo sapiens
gatagcaagagaaat

SEQ ID NO: 1177001 - DNA, 15 bp, Homo sapiens
agatagcaagagaaa

SEQ ID NO: 1177002 - DNA, 15 bp, Homo sapiens
aagatagcaagagaa

SEQ ID NO: 1177003 - DNA, 15 bp, Homo sapiens
gaagatagcaagaga

SEQ ID NO: 1177004 - DNA, 15 bp, Homo sapiens
ggaagatagcaagag

SEQ ID NO: 1177005 - DNA, 15 bp, Homo sapiens
gggaagatagcaaga

SEQ ID NO: 1177006 - DNA, 15 bp, Homo sapiens
tgggaagatagcaag

SEQ ID NO: 1177007 - DNA, 15 bp, Homo sapiens
ctgggaagatagcaa

SEQ ID NO: 1177008 - DNA, 15 bp, Homo sapiens
tctgggaagatagca

SEQ ID NO: 1177009 - DNA, 15 bp, Homo sapiens
atctgggaagatagc

SEQ ID NO: 1177010 - DNA, 15 bp, Homo sapiens
tatctgggaagatag

SEQ ID NO: 1177011 - DNA, 15 bp, Homo sapiens
ctatctgggaagata

SEQ ID NO: 1177012 - DNA, 15 bp, Homo sapiens
actatctgggaagat

SEQ ID NO: 1177013 - DNA, 15 bp, Homo sapiens
aactatctgggaaga

SEQ ID NO: 1177014 - DNA, 15 bp, Homo sapiens
gaactatctgggaag

SEQ ID NO: 1177015 - DNA, 15 bp, Homo sapiens
tgaactatctgggaa

SEQ ID NO: 1177016 - DNA, 15 bp, Homo sapiens
ctgaactatctggga

SEQ ID NO: 1177017 - DNA, 15 bp, Homo sapiens
tctgaactatctggg

SEQ ID NO: 1177018 - DNA, 15 bp, Homo sapiens
ttctgaactatctgg

SEQ ID NO: 1177019 - DNA, 15 bp, Homo sapiens
gttctgaactatctg

SEQ ID NO: 1177020 - DNA, 15 bp, Homo sapiens
agttctgaactatct

SEQ ID NO: 1177021 - DNA, 15 bp, Homo sapiens
aagttctgaactatc

SEQ ID NO: 1177022 - DNA, 15 bp, Homo sapiens
gaagttctgaactat

SEQ ID NO: 1177023 - DNA, 15 bp, Homo sapiens
ggaagttctgaacta

SEQ ID NO: 1177024 - DNA, 15 bp, Homo sapiens
aggaagttctgaact

SEQ ID NO: 1177025 - DNA, 15 bp, Homo sapiens
caggaagttctgaac

SEQ ID NO: 1177026 - DNA, 15 bp, Homo sapiens
gcaggaagttctgaa

SEQ ID NO: 1177027 - DNA, 15 bp, Homo sapiens
ggcaggaagttctga

SEQ ID NO: 1177028 - DNA, 15 bp, Homo sapiens
aggcaggaagttctg

SEQ ID NO: 1177029 - DNA, 15 bp, Homo sapiens
taggcaggaagttct

SEQ ID NO: 1177030 - DNA, 15 bp, Homo sapiens
ataggcaggaagttc

SEQ ID NO: 1177031 - DNA, 15 bp, Homo sapiens
aataggcaggaagtt

SEQ ID NO: 1177032 - DNA, 15 bp, Homo sapiens
aaataggcaggaagt

SEQ ID NO: 1177033 - DNA, 15 bp, Homo sapiens
gaaataggcaggaag

SEQ ID NO: 1177034 - DNA, 15 bp, Homo sapiens
agaaataggcaggaa

SEQ ID NO: 1177035 - DNA, 15 bp, Homo sapiens
gagaaataggcagga

SEQ ID NO: 1177036 - DNA, 15 bp, Homo sapiens
agagaaataggcagg

SEQ ID NO: 1177037 - DNA, 15 bp, Homo sapiens
cagagaaataggcag

SEQ ID NO: 1177038 - DNA, 15 bp, Homo sapiens
acagagaaataggca

SEQ ID NO: 1177039 - DNA, 15 bp, Homo sapiens
aacagagaaataggc

SEQ ID NO: 1177040 - DNA, 15 bp, Homo sapiens
taacagagaaatagg

SEQ ID NO: 1177041 - DNA, 15 bp, Homo sapiens
ataacagagaaatag

SEQ ID NO: 1177042 - DNA, 15 bp, Homo sapiens
cataacagagaaata

SEQ ID NO: 1177043 - DNA, 15 bp, Homo sapiens
tcataacagagaaat

SEQ ID NO: 1177044 - DNA, 15 bp, Homo sapiens
ctcataacagagaaa

SEQ ID NO: 1177045 - DNA, 15 bp, Homo sapiens
actcataacagagaa

SEQ ID NO: 1177046 - DNA, 15 bp, Homo sapiens
gactcataacagaga

SEQ ID NO: 1177047 - DNA, 15 bp, Homo sapiens
ggactcataacagag

SEQ ID NO: 1177048 - DNA, 15 bp, Homo sapiens
gggactcataacaga

SEQ ID NO: 1177049 - DNA, 15 bp, Homo sapiens
tgggactcataacag

SEQ ID NO: 1177050 - DNA, 15 bp, Homo sapiens
ttgggactcataaca

SEQ ID NO: 1177051 - DNA, 15 bp, Homo sapiens
gttgggactcataac

SEQ ID NO: 1177052 - DNA, 15 bp, Homo sapiens
agttgggactcataa

SEQ ID NO: 1177053 - DNA, 15 bp, Homo sapiens
aagttgggactcata

SEQ ID NO: 1177054 - DNA, 15 bp, Homo sapiens
gaagttgggactcat

SEQ ID NO: 1177055 - DNA, 15 bp, Homo sapiens
agaagttgggactca

SEQ ID NO: 1177056 - DNA, 15 bp, Homo sapiens
gagaagttgggactc

SEQ ID NO: 1177057 - DNA, 15 bp, Homo sapiens
tgagaagttgggact

SEQ ID NO: 1177058 - DNA, 15 bp, Homo sapiens
ctgagaagttgggac

SEQ ID NO: 1177059 - DNA, 15 bp, Homo sapiens
gctgagaagttggga

SEQ ID NO: 1177060 - DNA, 15 bp, Homo sapiens
ggctgagaagttggg

SEQ ID NO: 1177061 - DNA, 15 bp, Homo sapiens
aggctgagaagttgg

SEQ ID NO: 1177062 - DNA, 15 bp, Homo sapiens
gaggctgagaagttg

SEQ ID NO: 1177063 - DNA, 15 bp, Homo sapiens
ggaggctgagaagtt

SEQ ID NO: 1177064 - DNA, 15 bp, Homo sapiens
aggaggctgagaagt

SEQ ID NO: 1177065 - DNA, 15 bp, Homo sapiens
aaggaggctgagaag

SEQ ID NO: 1177066 - DNA, 15 bp, Homo sapiens
caaggaggctgagaa

SEQ ID NO: 1177067 - DNA, 15 bp, Homo sapiens
ccaaggaggctgaga

SEQ ID NO: 1177068 - DNA, 15 bp, Homo sapiens
tccaaggaggctgag

SEQ ID NO: 1177069 - DNA, 15 bp, Homo sapiens
atccaaggaggctga

SEQ ID NO: 1177070 - DNA, 15 bp, Homo sapiens
tatccaaggaggctg

SEQ ID NO: 1177071 - DNA, 15 bp, Homo sapiens
ctatccaaggaggct

SEQ ID NO: 1177072 - DNA, 15 bp, Homo sapiens
cctatccaaggaggc

SEQ ID NO: 1177073 - DNA, 15 bp, Homo sapiens
tcctatccaaggagg

SEQ ID NO: 1177074 - DNA, 15 bp, Homo sapiens
ttcctatccaaggag

SEQ ID NO: 1177075 - DNA, 15 bp, Homo sapiens
tttcctatccaagga

SEQ ID NO: 1177076 - DNA, 15 bp, Homo sapiens
ctttcctatccaagg

SEQ ID NO: 1177077 - DNA, 15 bp, Homo sapiens
cctttcctatccaag

SEQ ID NO: 1177078 - DNA, 15 bp, Homo sapiens
gcctttcctatccaa

SEQ ID NO: 1177079 - DNA, 15 bp, Homo sapiens
ggcctttcctatcca

SEQ ID NO: 1177080 - DNA, 15 bp, Homo sapiens
aggcctttcctatcc

SEQ ID NO: 1177081 - DNA, 15 bp, Homo sapiens
caggcctttcctatc

SEQ ID NO: 1177082 - DNA, 15 bp, Homo sapiens
ccaggcctttcctat

SEQ ID NO: 1177083 - DNA, 15 bp, Homo sapiens
cccaggcctttccta

SEQ ID NO: 1177084 - DNA, 15 bp, Homo sapiens
tcccaggcctttcct

SEQ ID NO: 1177085 - DNA, 15 bp, Homo sapiens
ctcccaggcctttcc

SEQ ID NO: 1177086 - DNA, 15 bp, Homo sapiens
cctcccaggcctttc

SEQ ID NO: 1177087 - DNA, 15 bp, Homo sapiens
acctcccaggccttt

SEQ ID NO: 1177088 - DNA, 15 bp, Homo sapiens
gacctcccaggcctt

SEQ ID NO: 1177089 - DNA, 15 bp, Homo sapiens
agacctcccaggcct

SEQ ID NO: 1177090 - DNA, 15 bp, Homo sapiens
tagacctcccaggcc

SEQ ID NO: 1177091 - DNA, 15 bp, Homo sapiens
atagacctcccaggc

SEQ ID NO: 1177092 - DNA, 15 bp, Homo sapiens
aatagacctcccagg

SEQ ID NO: 1177093 - DNA, 15 bp, Homo sapiens
gaatagacctcccag

SEQ ID NO: 1177094 - DNA, 15 bp, Homo sapiens
agaatagacctccca

SEQ ID NO: 1177095 - DNA, 15 bp, Homo sapiens
cagaatagacctccc

SEQ ID NO: 1177096 - DNA, 15 bp, Homo sapiens
acagaatagacctcc

SEQ ID NO: 1177097 - DNA, 15 bp, Homo sapiens
gacagaatagacctc

SEQ ID NO: 1177098 - DNA, 15 bp, Homo sapiens
agacagaatagacct

SEQ ID NO: 1177099 - DNA, 15 bp, Homo sapiens
gagacagaatagacc

SEQ ID NO: 1177100 - DNA, 15 bp, Homo sapiens
ggagacagaatagac

SEQ ID NO: 1177101 - DNA, 15 bp, Homo sapiens
tggagacagaataga

SEQ ID NO: 1177102 - DNA, 15 bp, Homo sapiens
atggagacagaatag

SEQ ID NO: 1177103 - DNA, 15 bp, Homo sapiens
catggagacagaata

SEQ ID NO: 1177104 - DNA, 15 bp, Homo sapiens
tcatggagacagaat

SEQ ID NO: 1177105 - DNA, 15 bp, Homo sapiens
ttcatggagacagaa

SEQ ID NO: 1177106 - DNA, 15 bp, Homo sapiens
gttcatggagacaga

SEQ ID NO: 1177107 - DNA, 15 bp, Homo sapiens
agttcatggagacag

SEQ ID NO: 1177108 - DNA, 15 bp, Homo sapiens
gagttcatggagaca

SEQ ID NO: 1177109 - DNA, 15 bp, Homo sapiens
agagttcatggagac

SEQ ID NO: 1177110 - DNA, 15 bp, Homo sapiens
cagagttcatggaga

SEQ ID NO: 1177111 - DNA, 15 bp, Homo sapiens
ccagagttcatggag

SEQ ID NO: 1177112 - DNA, 15 bp, Homo sapiens
cccagagttcatgga

SEQ ID NO: 1177113 - DNA, 15 bp, Homo sapiens
gcccagagttcatgg

SEQ ID NO: 1177114 - DNA, 15 bp, Homo sapiens
ggcccagagttcatg

SEQ ID NO: 1177115 - DNA, 15 bp, Homo sapiens
aggcccagagttcat

SEQ ID NO: 1177116 - DNA, 15 bp, Homo sapiens
taggcccagagttca

SEQ ID NO: 1177117 - DNA, 15 bp, Homo sapiens
ataggcccagagttc

SEQ ID NO: 1177118 - DNA, 15 bp, Homo sapiens
cataggcccagagtt

SEQ ID NO: 1177119 - DNA, 15 bp, Homo sapiens
ccataggcccagagt

SEQ ID NO: 1177120 - DNA, 15 bp, Homo sapiens
accataggcccagag

SEQ ID NO: 1177121 - DNA, 15 bp, Homo sapiens
taccataggcccaga

SEQ ID NO: 1177122 - DNA, 15 bp, Homo sapiens
ttaccataggcccag

SEQ ID NO: 1177123 - DNA, 15 bp, Homo sapiens
tttaccataggccca

SEQ ID NO: 1177124 - DNA, 15 bp, Homo sapiens
gtttaccataggccc

SEQ ID NO: 1177125 - DNA, 15 bp, Homo sapiens
agtttaccataggcc

SEQ ID NO: 1177126 - DNA, 15 bp, Homo sapiens
aagtttaccataggc

SEQ ID NO: 1177127 - DNA, 15 bp, Homo sapiens
caagtttaccatagg

SEQ ID NO: 1177128 - DNA, 15 bp, Homo sapiens
acaagtttaccatag

SEQ ID NO: 1177129 - DNA, 15 bp, Homo sapiens
cacaagtttaccata

SEQ ID NO: 1177130 - DNA, 15 bp, Homo sapiens
acacaagtttaccat

SEQ ID NO: 1177131 - DNA, 15 bp, Homo sapiens
gacacaagtttacca

SEQ ID NO: 1177132 - DNA, 15 bp, Homo sapiens
ggacacaagtttacc

SEQ ID NO: 1177133 - DNA, 15 bp, Homo sapiens
tggacacaagtttac

SEQ ID NO: 1177134 - DNA, 15 bp, Homo sapiens
ttggacacaagttta

SEQ ID NO: 1177135 - DNA, 15 bp, Homo sapiens
attggacacaagttt

SEQ ID NO: 1177136 - DNA, 15 bp, Homo sapiens
tattggacacaagtt

SEQ ID NO: 1177137 - DNA, 15 bp, Homo sapiens
atattggacacaagt

SEQ ID NO: 1177138 - DNA, 15 bp, Homo sapiens
catattggacacaag

SEQ ID NO: 1177139 - DNA, 15 bp, Homo sapiens
tcatattggacacaa

SEQ ID NO: 1177140 - DNA, 15 bp, Homo sapiens
gtcatattggacaca

SEQ ID NO: 1177141 - DNA, 15 bp, Homo sapiens
agtcatattggacac

SEQ ID NO: 1177142 - DNA, 15 bp, Homo sapiens
cagtcatattggaca

SEQ ID NO: 1177143 - DNA, 15 bp, Homo sapiens
tcagtcatattggac

SEQ ID NO: 1177144 - DNA, 15 bp, Homo sapiens
ctcagtcatattgga

SEQ ID NO: 1177145 - DNA, 15 bp, Homo sapiens
cctcagtcatattgg

SEQ ID NO: 1177146 - DNA, 15 bp, Homo sapiens
ccctcagtcatattg

SEQ ID NO: 1177147 - DNA, 15 bp, Homo sapiens
cccctcagtcatatt

SEQ ID NO: 1177148 - DNA, 15 bp, Homo sapiens
gcccctcagtcatat

SEQ ID NO: 1177149 - DNA, 15 bp, Homo sapiens
ggcccctcagtcata

SEQ ID NO: 1177150 - DNA, 15 bp, Homo sapiens
tggcccctcagtcat

SEQ ID NO: 1177151 - DNA, 15 bp, Homo sapiens
atggcccctcagtca

SEQ ID NO: 1177152 - DNA, 15 bp, Homo sapiens
gatggcccctcagtc

SEQ ID NO: 1177153 - DNA, 15 bp, Homo sapiens
tgatggcccctcagt

SEQ ID NO: 1177154 - DNA, 15 bp, Homo sapiens
ctgatggcccctcag

SEQ ID NO: 1177155 - DNA, 15 bp, Homo sapiens
cctgatggcccctca

SEQ ID NO: 1177156 - DNA, 15 bp, Homo sapiens
acctgatggcccctc

SEQ ID NO: 1177157 - DNA, 15 bp, Homo sapiens
aacctgatggcccct

SEQ ID NO: 1177158 - DNA, 15 bp, Homo sapiens
gaacctgatggcccc

SEQ ID NO: 1177159 - DNA, 15 bp, Homo sapiens
agaacctgatggccc

SEQ ID NO: 1177160 - DNA, 15 bp, Homo sapiens
aagaacctgatggcc

SEQ ID NO: 1177161 - DNA, 15 bp, Homo sapiens
caagaacctgatggc

SEQ ID NO: 1177162 - DNA, 15 bp, Homo sapiens
acaagaacctgatgg

SEQ ID NO: 1177163 - DNA, 15 bp, Homo sapiens
gacaagaacctgatg

SEQ ID NO: 1177164 - DNA, 15 bp, Homo sapiens
ggacaagaacctgat

SEQ ID NO: 1177165 - DNA, 15 bp, Homo sapiens
aggacaagaacctga

SEQ ID NO: 1177166 - DNA, 15 bp, Homo sapiens
taggacaagaacctg

SEQ ID NO: 1177167 - DNA, 15 bp, Homo sapiens
ttaggacaagaacct

SEQ ID NO: 1177168 - DNA, 15 bp, Homo sapiens
tttaggacaagaacc

SEQ ID NO: 1177169 - DNA, 15 bp, Homo sapiens
ctttaggacaagaac

SEQ ID NO: 1177170 - DNA, 15 bp, Homo sapiens
cctttaggacaagaa

SEQ ID NO: 1177171 - DNA, 15 bp, Homo sapiens
gcctttaggacaaga

SEQ ID NO: 1177172 - DNA, 15 bp, Homo sapiens
tgcctttaggacaag

SEQ ID NO: 1177173 - DNA, 15 bp, Homo sapiens
atgcctttaggacaa

SEQ ID NO: 1177174 - DNA, 15 bp, Homo sapiens
gatgcctttaggaca

SEQ ID NO: 1177175 - DNA, 15 bp, Homo sapiens
tgatgcctttaggac

SEQ ID NO: 1177176 - DNA, 15 bp, Homo sapiens
gtgatgcctttagga

SEQ ID NO: 1177177 - DNA, 15 bp, Homo sapiens
ggtgatgcctttagg

SEQ ID NO: 1177178 - DNA, 15 bp, Homo sapiens
aggtgatgcctttag

SEQ ID NO: 1177179 - DNA, 15 bp, Homo sapiens
taggtgatgccttta

SEQ ID NO: 1177180 - DNA, 15 bp, Homo sapiens
ttaggtgatgccttt

SEQ ID NO: 1177181 - DNA, 15 bp, Homo sapiens
gttaggtgatgcctt

SEQ ID NO: 1177182 - DNA, 15 bp, Homo sapiens
ggttaggtgatgcct

SEQ ID NO: 1177183 - DNA, 15 bp, Homo sapiens
aggttaggtgatgcc

SEQ ID NO: 1177184 - DNA, 15 bp, Homo sapiens
aaggttaggtgatgc

SEQ ID NO: 1177185 - DNA, 15 bp, Homo sapiens
aaaggttaggtgatg

SEQ ID NO: 1177186 - DNA, 15 bp, Homo sapiens
taaaggttaggtgat

SEQ ID NO: 1177187 - DNA, 15 bp, Homo sapiens
ttaaaggttaggtga

SEQ ID NO: 1177188 - DNA, 15 bp, Homo sapiens
gttaaaggttaggtg

SEQ ID NO: 1177189 - DNA, 15 bp, Homo sapiens
ggttaaaggttaggt

SEQ ID NO: 1177190 - DNA, 15 bp, Homo sapiens
aggttaaaggttagg

SEQ ID NO: 1177191 - DNA, 15 bp, Homo sapiens
aaggttaaaggttag

SEQ ID NO: 1177192 - DNA, 15 bp, Homo sapiens
taaggttaaaggtta

SEQ ID NO: 1177193 - DNA, 15 bp, Homo sapiens
ctaaggttaaaggtt

SEQ ID NO: 1177194 - DNA, 15 bp, Homo sapiens
tctaaggttaaaggt

SEQ ID NO: 1177195 - DNA, 15 bp, Homo sapiens
ttctaaggttaaagg

SEQ ID NO: 1177196 - DNA, 15 bp, Homo sapiens
tttctaaggttaaag

SEQ ID NO: 1177197 - DNA, 15 bp, Homo sapiens
ttttctaaggttaaa

SEQ ID NO: 1177198 - DNA, 15 bp, Homo sapiens
tttttctaaggttaa

SEQ ID NO: 1177199 - DNA, 15 bp, Homo sapiens
ttttttctaaggtta

SEQ ID NO: 1177200 - DNA, 15 bp, Homo sapiens
cttttttctaaggtt

SEQ ID NO: 1177201 - DNA, 15 bp, Homo sapiens
gcttttttctaaggt

SEQ ID NO: 1177202 - DNA, 15 bp, Homo sapiens
tgcttttttctaagg

SEQ ID NO: 1177203 - DNA, 15 bp, Homo sapiens
ctgcttttttctaag

SEQ ID NO: 1177204 - DNA, 15 bp, Homo sapiens
actgcttttttctaa

SEQ ID NO: 1177205 - DNA, 15 bp, Homo sapiens
cactgcttttttcta

SEQ ID NO: 1177206 - DNA, 15 bp, Homo sapiens
ccactgcttttttct

SEQ ID NO: 1177207 - DNA, 15 bp, Homo sapiens
gccactgcttttttc

SEQ ID NO: 1177208 - DNA, 15 bp, Homo sapiens
agccactgctttttt

SEQ ID NO: 1177209 - DNA, 15 bp, Homo sapiens
gagccactgcttttt

SEQ ID NO: 1177210 - DNA, 15 bp, Homo sapiens
tgagccactgctttt

SEQ ID NO: 1177211 - DNA, 15 bp, Homo sapiens
gtgagccactgcttt

SEQ ID NO: 1177212 - DNA, 15 bp, Homo sapiens
cgtgagccactgctt

SEQ ID NO: 1177213 - DNA, 15 bp, Homo sapiens
gcgtgagccactgct

SEQ ID NO: 1177214 - DNA, 15 bp, Homo sapiens
ggcgtgagccactgc

SEQ ID NO: 1177215 - DNA, 15 bp, Homo sapiens
aggcgtgagccactg

SEQ ID NO: 1177216 - DNA, 15 bp, Homo sapiens
ggtgatcctcccgcc

SEQ ID NO: 1177217 - DNA, 15 bp, Homo sapiens
aggtgatcctcccgc

SEQ ID NO: 1177218 - DNA, 15 bp, Homo sapiens
caggtgatcctcccg

SEQ ID NO: 1177219 - DNA, 15 bp, Homo sapiens
cctcctgacctcagg

SEQ ID NO: 1177220 - DNA, 15 bp, Homo sapiens
acctcctgacctcag

SEQ ID NO: 1177221 - DNA, 15 bp, Homo sapiens
gacctcctgacctca

SEQ ID NO: 1177222 - DNA, 15 bp, Homo sapiens
cgacctcctgacctc

SEQ ID NO: 1177223 - DNA, 15 bp, Homo sapiens
tcgacctcctgacct

SEQ ID NO: 1177224 - DNA, 15 bp, Homo sapiens
ctcgacctcctgacc

SEQ ID NO: 1177225 - DNA, 15 bp, Homo sapiens
tctcgacctcctgac

SEQ ID NO: 1177226 - DNA, 15 bp, Homo sapiens
gtctcgacctcctga

SEQ ID NO: 1177227 - DNA, 15 bp, Homo sapiens
ggtctcgacctcctg

SEQ ID NO: 1177228 - DNA, 15 bp, Homo sapiens
tggtctcgacctcct

SEQ ID NO: 1177229 - DNA, 15 bp, Homo sapiens
ctggtctcgacctcc

SEQ ID NO: 1177230 - DNA, 15 bp, Homo sapiens
gctggtctcgacctc

SEQ ID NO: 1177231 - DNA, 15 bp, Homo sapiens
ggctggtctcgacct

SEQ ID NO: 1177232 - DNA, 15 bp, Homo sapiens
aggctggtctcgacc

SEQ ID NO: 1177233 - DNA, 15 bp, Homo sapiens
caggctggtctcgac

SEQ ID NO: 1177234 - DNA, 15 bp, Homo sapiens
cgtatttttagtaga

SEQ ID NO: 1177235 - DNA, 15 bp, Homo sapiens
tcgtatttttagtag

SEQ ID NO: 1177236 - DNA, 15 bp, Homo sapiens
ttcgtatttttagta

SEQ ID NO: 1177237 - DNA, 15 bp, Homo sapiens
tttcgtatttttagt

SEQ ID NO: 1177238 - DNA, 15 bp, Homo sapiens
ttttcgtatttttag

SEQ ID NO: 1177239 - DNA, 15 bp, Homo sapiens
attttcgtattttta

SEQ ID NO: 1177240 - DNA, 15 bp, Homo sapiens
aattttcgtattttt

SEQ ID NO: 1177241 - DNA, 15 bp, Homo sapiens
taattttcgtatttt

SEQ ID NO: 1177242 - DNA, 15 bp, Homo sapiens
ctaattttcgtattt

SEQ ID NO: 1177243 - DNA, 15 bp, Homo sapiens
gctaattttcgtatt

SEQ ID NO: 1177244 - DNA, 15 bp, Homo sapiens
ggctaattttcgtat

SEQ ID NO: 1177245 - DNA, 15 bp, Homo sapiens
cggctaattttcgta

SEQ ID NO: 1177246 - DNA, 15 bp, Homo sapiens
ccggctaattttcgt

SEQ ID NO: 1177247 - DNA, 15 bp, Homo sapiens
cccggctaattttcg

SEQ ID NO: 1177248 - DNA, 15 bp, Homo sapiens
acccggctaattttc

SEQ ID NO: 1177249 - DNA, 15 bp, Homo sapiens
gcaccactacacccg

SEQ ID NO: 1177250 - DNA, 15 bp, Homo sapiens
tgcaccactacaccc

SEQ ID NO: 1177251 - DNA, 15 bp, Homo sapiens
atgcaccactacacc

SEQ ID NO: 1177252 - DNA, 15 bp, Homo sapiens
catgcaccactacac

SEQ ID NO: 1177253 - DNA, 15 bp, Homo sapiens
gcatgcaccactaca

SEQ ID NO: 1177254 - DNA, 15 bp, Homo sapiens
ggcatgcaccactac

SEQ ID NO: 1177255 - DNA, 15 bp, Homo sapiens
aggcatgcaccacta

SEQ ID NO: 1177256 - DNA, 15 bp, Homo sapiens
caggcatgcaccact

SEQ ID NO: 1177257 - DNA, 15 bp, Homo sapiens
tcaggttcaagccat

SEQ ID NO: 1177258 - DNA, 15 bp, Homo sapiens
ctcaggttcaagcca

SEQ ID NO: 1177259 - DNA, 15 bp, Homo sapiens
tctcaggttcaagcc

SEQ ID NO: 1177260 - DNA, 15 bp, Homo sapiens
cctctcaggttcaag

SEQ ID NO: 1177261 - DNA, 15 bp, Homo sapiens
gcctctcaggttcaa

SEQ ID NO: 1177262 - DNA, 15 bp, Homo sapiens
cgcctctcaggttca

SEQ ID NO: 1177263 - DNA, 15 bp, Homo sapiens
ccgcctctcaggttc

SEQ ID NO: 1177264 - DNA, 15 bp, Homo sapiens
tccgcctctcaggtt

SEQ ID NO: 1177265 - DNA, 15 bp, Homo sapiens
ctccgcctctcaggt

SEQ ID NO: 1177266 - DNA, 15 bp, Homo sapiens
cctccgcctctcagg

SEQ ID NO: 1177267 - DNA, 15 bp, Homo sapiens
acctccgcctctcag

SEQ ID NO: 1177268 - DNA, 15 bp, Homo sapiens
aacctccgcctctca

SEQ ID NO: 1177269 - DNA, 15 bp, Homo sapiens
caacctccgcctctc

SEQ ID NO: 1177270 - DNA, 15 bp, Homo sapiens
gcaacctccgcctct

SEQ ID NO: 1177271 - DNA, 15 bp, Homo sapiens
acactgcaacctccg

SEQ ID NO: 1177272 - DNA, 15 bp, Homo sapiens
cacactgcaacctcc

SEQ ID NO: 1177273 - DNA, 15 bp, Homo sapiens
agcacactgcaacct

SEQ ID NO: 1177274 - DNA, 15 bp, Homo sapiens
cagcacactgcaacc

SEQ ID NO: 1177275 - DNA, 15 bp, Homo sapiens
tcagcacactgcaac

SEQ ID NO: 1177276 - DNA, 15 bp, Homo sapiens
ctcagcacactgcaa

SEQ ID NO: 1177277 - DNA, 15 bp, Homo sapiens
tctcagcacactgca

SEQ ID NO: 1177278 - DNA, 15 bp, Homo sapiens
atctcagcacactgc

SEQ ID NO: 1177279 - DNA, 15 bp, Homo sapiens
aatctcagcacactg

SEQ ID NO: 1177280 - DNA, 15 bp, Homo sapiens
caatctcagcacact

SEQ ID NO: 1177281 - DNA, 15 bp, Homo sapiens
acaatctcagcacac

SEQ ID NO: 1177282 - DNA, 15 bp, Homo sapiens
cacaatctcagcaca

SEQ ID NO: 1177283 - DNA, 15 bp, Homo sapiens
gcacaatctcagcac

SEQ ID NO: 1177284 - DNA, 15 bp, Homo sapiens
ggcacaatctcagca

SEQ ID NO: 1177285 - DNA, 15 bp, Homo sapiens
tggcacaatctcagc

SEQ ID NO: 1177286 - DNA, 15 bp, Homo sapiens
gtggcacaatctcag

SEQ ID NO: 1177287 - DNA, 15 bp, Homo sapiens
agtggcacaatctca

SEQ ID NO: 1177288 - DNA, 15 bp, Homo sapiens
cagtggcacaatctc

SEQ ID NO: 1177289 - DNA, 15 bp, Homo sapiens
agtgtcactctgtca

SEQ ID NO: 1177290 - DNA, 15 bp, Homo sapiens
gagtgtcactctgtc

SEQ ID NO: 1177291 - DNA, 15 bp, Homo sapiens
tgagtgtcactctgt

SEQ ID NO: 1177292 - DNA, 15 bp, Homo sapiens
ctgagtgtcactctg

SEQ ID NO: 1177293 - DNA, 15 bp, Homo sapiens
actgagtgtcactct

SEQ ID NO: 1177294 - DNA, 15 bp, Homo sapiens
gactgagtgtcactc

SEQ ID NO: 1177295 - DNA, 15 bp, Homo sapiens
agactgagtgtcact

SEQ ID NO: 1177296 - DNA, 15 bp, Homo sapiens
gagactgagtgtcac

SEQ ID NO: 1177297 - DNA, 15 bp, Homo sapiens
tgagactgagtgtca

SEQ ID NO: 1177298 - DNA, 15 bp, Homo sapiens
gtgagactgagtgtc

SEQ ID NO: 1177299 - DNA, 15 bp, Homo sapiens
agtgagactgagtgt

SEQ ID NO: 1177300 - DNA, 15 bp, Homo sapiens
gagtgagactgagtg

SEQ ID NO: 1177301 - DNA, 15 bp, Homo sapiens
tgagtgagactgagt

SEQ ID NO: 1177302 - DNA, 15 bp, Homo sapiens
ttgagtgagactgag

SEQ ID NO: 1177303 - DNA, 15 bp, Homo sapiens
cttgagtgagactga

SEQ ID NO: 1177304 - DNA, 15 bp, Homo sapiens
tcttgagtgagactg

SEQ ID NO: 1177305 - DNA, 15 bp, Homo sapiens
ttcttgagtgagact

SEQ ID NO: 1177306 - DNA, 15 bp, Homo sapiens
tttcttgagtgagac

SEQ ID NO: 1177307 - DNA, 15 bp, Homo sapiens
ttttcttgagtgaga

SEQ ID NO: 1177308 - DNA, 15 bp, Homo sapiens
tttttcttgagtgag

SEQ ID NO: 1177309 - DNA, 15 bp, Homo sapiens
ttttttcttgagtga

SEQ ID NO: 1177310 - DNA, 15 bp, Homo sapiens
cttttttcttgagtg

SEQ ID NO: 1177311 - DNA, 15 bp, Homo sapiens
gcttttttcttgagt

SEQ ID NO: 1177312 - DNA, 15 bp, Homo sapiens
tgcttttttcttgag

SEQ ID NO: 1177313 - DNA, 15 bp, Homo sapiens
ttgcttttttcttga

SEQ ID NO: 1177314 - DNA, 15 bp, Homo sapiens
tttgcttttttcttg

SEQ ID NO: 1177315 - DNA, 15 bp, Homo sapiens
gtttgcttttttctt

SEQ ID NO: 1177316 - DNA, 15 bp, Homo sapiens
ggtttgcttttttct

SEQ ID NO: 1177317 - DNA, 15 bp, Homo sapiens
tggtttgcttttttc

SEQ ID NO: 1177318 - DNA, 15 bp, Homo sapiens
ttggtttgctttttt

SEQ ID NO: 1177319 - DNA, 15 bp, Homo sapiens
cttggtttgcttttt

SEQ ID NO: 1177320 - DNA, 15 bp, Homo sapiens
ccttggtttgctttt

SEQ ID NO: 1177321 - DNA, 15 bp, Homo sapiens
cccttggtttgcttt

SEQ ID NO: 1177322 - DNA, 15 bp, Homo sapiens
tcccttggtttgctt

SEQ ID NO: 1177323 - DNA, 15 bp, Homo sapiens
ttcccttggtttgct

SEQ ID NO: 1177324 - DNA, 15 bp, Homo sapiens
cttcccttggtttgc

SEQ ID NO: 1177325 - DNA, 15 bp, Homo sapiens
gcttcccttggtttg

SEQ ID NO: 1177326 - DNA, 15 bp, Homo sapiens
tgcttcccttggttt

SEQ ID NO: 1177327 - DNA, 15 bp, Homo sapiens
atgcttcccttggtt

SEQ ID NO: 1177328 - DNA, 15 bp, Homo sapiens
gatgcttcccttggt

SEQ ID NO: 1177329 - DNA, 15 bp, Homo sapiens
tgatgcttcccttgg

SEQ ID NO: 1177330 - DNA, 15 bp, Homo sapiens
atgatgcttcccttg

SEQ ID NO: 1177331 - DNA, 15 bp, Homo sapiens
gatgatgcttccctt

SEQ ID NO: 1177332 - DNA, 15 bp, Homo sapiens
ggatgatgcttccct

SEQ ID NO: 1177333 - DNA, 15 bp, Homo sapiens
gggatgatgcttccc

SEQ ID NO: 1177334 - DNA, 15 bp, Homo sapiens
ggggatgatgcttcc

SEQ ID NO: 1177335 - DNA, 15 bp, Homo sapiens
gggggatgatgcttc

SEQ ID NO: 1177336 - DNA, 15 bp, Homo sapiens
tgggggatgatgctt

SEQ ID NO: 1177337 - DNA, 15 bp, Homo sapiens
ctgggggatgatgct

SEQ ID NO: 1177338 - DNA, 15 bp, Homo sapiens
actgggggatgatgc

SEQ ID NO: 1177339 - DNA, 15 bp, Homo sapiens
gactgggggatgatg

SEQ ID NO: 1177340 - DNA, 15 bp, Homo sapiens
tgactgggggatgat

SEQ ID NO: 1177341 - DNA, 15 bp, Homo sapiens
gtgactgggggatga

SEQ ID NO: 1177342 - DNA, 15 bp, Homo sapiens
ggtgactgggggatg

SEQ ID NO: 1177343 - DNA, 15 bp, Homo sapiens
aggtgactgggggat

SEQ ID NO: 1177344 - DNA, 15 bp, Homo sapiens
gaggtgactggggga

SEQ ID NO: 1177345 - DNA, 15 bp, Homo sapiens
ggaggtgactggggg

SEQ ID NO: 1177346 - DNA, 15 bp, Homo sapiens
tggaggtgactgggg

SEQ ID NO: 1177347 - DNA, 15 bp, Homo sapiens
ctggaggtgactggg

SEQ ID NO: 1177348 - DNA, 15 bp, Homo sapiens
gctggaggtgactgg

SEQ ID NO: 1177349 - DNA, 15 bp, Homo sapiens
tgctggaggtgactg

SEQ ID NO: 1177350 - DNA, 15 bp, Homo sapiens
ctgctggaggtgact

SEQ ID NO: 1177351 - DNA, 15 bp, Homo sapiens
cctgctggaggtgac

SEQ ID NO: 1177352 - DNA, 15 bp, Homo sapiens
gcctgctggaggtga

SEQ ID NO: 1177353 - DNA, 15 bp, Homo sapiens
tgcctgctggaggtg

SEQ ID NO: 1177354 - DNA, 15 bp, Homo sapiens
ctgcctgctggaggt

SEQ ID NO: 1177355 - DNA, 15 bp, Homo sapiens
actgcctgctggagg

SEQ ID NO: 1177356 - DNA, 15 bp, Homo sapiens
aactgcctgctggag

SEQ ID NO: 1177357 - DNA, 15 bp, Homo sapiens
taactgcctgctgga

SEQ ID NO: 1177358 - DNA, 15 bp, Homo sapiens
ctaactgcctgctgg

SEQ ID NO: 1177359 - DNA, 15 bp, Homo sapiens
actaactgcctgctg

SEQ ID NO: 1177360 - DNA, 15 bp, Homo sapiens
aactaactgcctgct

SEQ ID NO: 1177361 - DNA, 15 bp, Homo sapiens
gaactaactgcctgc

SEQ ID NO: 1177362 - DNA, 15 bp, Homo sapiens
tgaactaactgcctg

SEQ ID NO: 1177363 - DNA, 15 bp, Homo sapiens
gtgaactaactgcct

SEQ ID NO: 1177364 - DNA, 15 bp, Homo sapiens
ggtgaactaactgcc

SEQ ID NO: 1177365 - DNA, 15 bp, Homo sapiens
tggtgaactaactgc

SEQ ID NO: 1177366 - DNA, 15 bp, Homo sapiens
gtggtgaactaactg

SEQ ID NO: 1177367 - DNA, 15 bp, Homo sapiens
tgtggtgaactaact

SEQ ID NO: 1177368 - DNA, 15 bp, Homo sapiens
ttgtggtgaactaac

SEQ ID NO: 1177369 - DNA, 15 bp, Homo sapiens
gttgtggtgaactaa

SEQ ID NO: 1177370 - DNA, 15 bp, Homo sapiens
ggttgtggtgaacta

SEQ ID NO: 1177371 - DNA, 15 bp, Homo sapiens
gggttgtggtgaact

SEQ ID NO: 1177372 - DNA, 15 bp, Homo sapiens
ggggttgtggtgaac

SEQ ID NO: 1177373 - DNA, 15 bp, Homo sapiens
aggggttgtggtgaa

SEQ ID NO: 1177374 - DNA, 15 bp, Homo sapiens
gaggggttgtggtga

SEQ ID NO: 1177375 - DNA, 15 bp, Homo sapiens
agaggggttgtggtg

SEQ ID NO: 1177376 - DNA, 15 bp, Homo sapiens
cagaggggttgtggt

SEQ ID NO: 1177377 - DNA, 15 bp, Homo sapiens
acagaggggttgtgg

SEQ ID NO: 1177378 - DNA, 15 bp, Homo sapiens
cacagaggggttgtg

SEQ ID NO: 1177379 - DNA, 15 bp, Homo sapiens
ccacagaggggttgt

SEQ ID NO: 1177380 - DNA, 15 bp, Homo sapiens
cccacagaggggttg

SEQ ID NO: 1177381 - DNA, 15 bp, Homo sapiens
tcccacagaggggtt

SEQ ID NO: 1177382 - DNA, 15 bp, Homo sapiens
ttcccacagaggggt

SEQ ID NO: 1177383 - DNA, 15 bp, Homo sapiens
gttcccacagagggg

SEQ ID NO: 1177384 - DNA, 15 bp, Homo sapiens
agttcccacagaggg

SEQ ID NO: 1177385 - DNA, 15 bp, Homo sapiens
aagttcccacagagg

SEQ ID NO: 1177386 - DNA, 15 bp, Homo sapiens
gaagttcccacagag

SEQ ID NO: 1177387 - DNA, 15 bp, Homo sapiens
ggaagttcccacaga

SEQ ID NO: 1177388 - DNA, 15 bp, Homo sapiens
aggaagttcccacag

SEQ ID NO: 1177389 - DNA, 15 bp, Homo sapiens
taggaagttcccaca

SEQ ID NO: 1177390 - DNA, 15 bp, Homo sapiens
ctaggaagttcccac

SEQ ID NO: 1177391 - DNA, 15 bp, Homo sapiens
actaggaagttccca

SEQ ID NO: 1177392 - DNA, 15 bp, Homo sapiens
cactaggaagttccc

SEQ ID NO: 1177393 - DNA, 15 bp, Homo sapiens
tcactaggaagttcc

SEQ ID NO: 1177394 - DNA, 15 bp, Homo sapiens
gtcactaggaagttc

SEQ ID NO: 1177395 - DNA, 15 bp, Homo sapiens
tgtcactaggaagtt

SEQ ID NO: 1177396 - DNA, 15 bp, Homo sapiens
atgtcactaggaagt

SEQ ID NO: 1177397 - DNA, 15 bp, Homo sapiens
gatgtcactaggaag

SEQ ID NO: 1177398 - DNA, 15 bp, Homo sapiens
ggatgtcactaggaa

SEQ ID NO: 1177399 - DNA, 15 bp, Homo sapiens
tggatgtcactagga

SEQ ID NO: 1177400 - DNA, 15 bp, Homo sapiens
ctggatgtcactagg

SEQ ID NO: 1177401 - DNA, 15 bp, Homo sapiens
gctggatgtcactag

SEQ ID NO: 1177402 - DNA, 15 bp, Homo sapiens
agctggatgtcacta

SEQ ID NO: 1177403 - DNA, 15 bp, Homo sapiens
tagctggatgtcact

SEQ ID NO: 1177404 - DNA, 15 bp, Homo sapiens
ctagctggatgtcac

SEQ ID NO: 1177405 - DNA, 15 bp, Homo sapiens
cctagctggatgtca

SEQ ID NO: 1177406 - DNA, 15 bp, Homo sapiens
gcctagctggatgtc

SEQ ID NO: 1177407 - DNA, 15 bp, Homo sapiens
agcctagctggatgt

SEQ ID NO: 1177408 - DNA, 15 bp, Homo sapiens
tagcctagctggatg

SEQ ID NO: 1177409 - DNA, 15 bp, Homo sapiens
atagcctagctggat

SEQ ID NO: 1177410 - DNA, 15 bp, Homo sapiens
catagcctagctgga

SEQ ID NO: 1177411 - DNA, 15 bp, Homo sapiens
gcatagcctagctgg

SEQ ID NO: 1177412 - DNA, 15 bp, Homo sapiens
ggcatagcctagctg

SEQ ID NO: 1177413 - DNA, 15 bp, Homo sapiens
gggcatagcctagct

SEQ ID NO: 1177414 - DNA, 15 bp, Homo sapiens
ggggcatagcctagc

SEQ ID NO: 1177415 - DNA, 15 bp, Homo sapiens
tggggcatagcctag

SEQ ID NO: 1177416 - DNA, 15 bp, Homo sapiens
ctggggcatagccta

SEQ ID NO: 1177417 - DNA, 15 bp, Homo sapiens
cctggggcatagcct

SEQ ID NO: 1177418 - DNA, 15 bp, Homo sapiens
gcctggggcatagcc

SEQ ID NO: 1177419 - DNA, 15 bp, Homo sapiens
agcctggggcatagc

SEQ ID NO: 1177420 - DNA, 15 bp, Homo sapiens
gagcctggggcatag

SEQ ID NO: 1177421 - DNA, 15 bp, Homo sapiens
agagcctggggcata

SEQ ID NO: 1177422 - DNA, 15 bp, Homo sapiens
tagagcctggggcat

SEQ ID NO: 1177423 - DNA, 15 bp, Homo sapiens
ctagagcctggggca

SEQ ID NO: 1177424 - DNA, 15 bp, Homo sapiens
actagagcctggggc

SEQ ID NO: 1177425 - DNA, 15 bp, Homo sapiens
cactagagcctgggg

SEQ ID NO: 1177426 - DNA, 15 bp, Homo sapiens
gcactagagcctggg

SEQ ID NO: 1177427 - DNA, 15 bp, Homo sapiens
tgcactagagcctgg

SEQ ID NO: 1177428 - DNA, 15 bp, Homo sapiens
ctgcactagagcctg

SEQ ID NO: 1177429 - DNA, 15 bp, Homo sapiens
cctgcactagagcct

SEQ ID NO: 1177430 - DNA, 15 bp, Homo sapiens
gcctgcactagagcc

SEQ ID NO: 1177431 - DNA, 15 bp, Homo sapiens
agcctgcactagagc

SEQ ID NO: 1177432 - DNA, 15 bp, Homo sapiens
cagcctgcactagag

SEQ ID NO: 1177433 - DNA, 15 bp, Homo sapiens
acagcctgcactaga

SEQ ID NO: 1177434 - DNA, 15 bp, Homo sapiens
cacagcctgcactag

SEQ ID NO: 1177435 - DNA, 15 bp, Homo sapiens
ccacagcctgcacta

SEQ ID NO: 1177436 - DNA, 15 bp, Homo sapiens
gccacagcctgcact

SEQ ID NO: 1177437 - DNA, 15 bp, Homo sapiens
ggccacagcctgcac

SEQ ID NO: 1177438 - DNA, 15 bp, Homo sapiens
tggccacagcctgca

SEQ ID NO: 1177439 - DNA, 15 bp, Homo sapiens
ttggccacagcctgc

SEQ ID NO: 1177440 - DNA, 15 bp, Homo sapiens
gttggccacagcctg

SEQ ID NO: 1177441 - DNA, 15 bp, Homo sapiens
agttggccacagcct

SEQ ID NO: 1177442 - DNA, 15 bp, Homo sapiens
aagttggccacagcc

SEQ ID NO: 1177443 - DNA, 15 bp, Homo sapiens
caagttggccacagc

SEQ ID NO: 1177444 - DNA, 15 bp, Homo sapiens
ccaagttggccacag

SEQ ID NO: 1177445 - DNA, 15 bp, Homo sapiens
accaagttggccaca

SEQ ID NO: 1177446 - DNA, 15 bp, Homo sapiens
gaccaagttggccac

SEQ ID NO: 1177447 - DNA, 15 bp, Homo sapiens
agaccaagttggcca

SEQ ID NO: 1177448 - DNA, 15 bp, Homo sapiens
aagaccaagttggcc

SEQ ID NO: 1177449 - DNA, 15 bp, Homo sapiens
taagaccaagttggc

SEQ ID NO: 1177450 - DNA, 15 bp, Homo sapiens
gtaagaccaagttgg

SEQ ID NO: 1177451 - DNA, 15 bp, Homo sapiens
ggtaagaccaagttg

SEQ ID NO: 1177452 - DNA, 15 bp, Homo sapiens
tggtaagaccaagtt

SEQ ID NO: 1177453 - DNA, 15 bp, Homo sapiens
ttggtaagaccaagt

SEQ ID NO: 1177454 - DNA, 15 bp, Homo sapiens
tttggtaagaccaag

SEQ ID NO: 1177455 - DNA, 15 bp, Homo sapiens
ctttggtaagaccaa

SEQ ID NO: 1177456 - DNA, 15 bp, Homo sapiens
cctttggtaagacca

SEQ ID NO: 1177457 - DNA, 15 bp, Homo sapiens
tcctttggtaagacc

SEQ ID NO: 1177458 - DNA, 15 bp, Homo sapiens
gtcctttggtaagac

SEQ ID NO: 1177459 - DNA, 15 bp, Homo sapiens
agtcctttggtaaga

SEQ ID NO: 1177460 - DNA, 15 bp, Homo sapiens
aagtcctttggtaag

SEQ ID NO: 1177461 - DNA, 15 bp, Homo sapiens
taagtcctttggtaa

SEQ ID NO: 1177462 - DNA, 15 bp, Homo sapiens
gtaagtcctttggta

SEQ ID NO: 1177463 - DNA, 15 bp, Homo sapiens
ggtaagtcctttggt

SEQ ID NO: 1177464 - DNA, 15 bp, Homo sapiens
tggtaagtcctttgg

SEQ ID NO: 1177465 - DNA, 15 bp, Homo sapiens
ttggtaagtcctttg

SEQ ID NO: 1177466 - DNA, 15 bp, Homo sapiens
cttggtaagtccttt

SEQ ID NO: 1177467 - DNA, 15 bp, Homo sapiens
gcttggtaagtcctt

SEQ ID NO: 1177468 - DNA, 15 bp, Homo sapiens
ggcttggtaagtcct

SEQ ID NO: 1177469 - DNA, 15 bp, Homo sapiens
tggcttggtaagtcc

SEQ ID NO: 1177470 - DNA, 15 bp, Homo sapiens
ctggcttggtaagtc

SEQ ID NO: 1177471 - DNA, 15 bp, Homo sapiens
actggcttggtaagt

SEQ ID NO: 1177472 - DNA, 15 bp, Homo sapiens
cactggcttggtaag

SEQ ID NO: 1177473 - DNA, 15 bp, Homo sapiens
gcactggcttggtaa

SEQ ID NO: 1177474 - DNA, 15 bp, Homo sapiens
agcactggcttggta

SEQ ID NO: 1177475 - DNA, 15 bp, Homo sapiens
aagcactggcttggt

SEQ ID NO: 1177476 - DNA, 15 bp, Homo sapiens
gaagcactggcttgg

SEQ ID NO: 1177477 - DNA, 15 bp, Homo sapiens
agaagcactggcttg

SEQ ID NO: 1177478 - DNA, 15 bp, Homo sapiens
gagaagcactggctt

SEQ ID NO: 1177479 - DNA, 15 bp, Homo sapiens
tgagaagcactggct

SEQ ID NO: 1177480 - DNA, 15 bp, Homo sapiens
ttgagaagcactggc

SEQ ID NO: 1177481 - DNA, 15 bp, Homo sapiens
tttgagaagcactgg

SEQ ID NO: 1177482 - DNA, 15 bp, Homo sapiens
gtttgagaagcactg

SEQ ID NO: 1177483 - DNA, 15 bp, Homo sapiens
agtttgagaagcact

SEQ ID NO: 1177484 - DNA, 15 bp, Homo sapiens
gagtttgagaagcac

SEQ ID NO: 1177485 - DNA, 15 bp, Homo sapiens
cgagtttgagaagca

SEQ ID NO: 1177486 - DNA, 15 bp, Homo sapiens
tcgagtttgagaagc

SEQ ID NO: 1177487 - DNA, 15 bp, Homo sapiens
gtcgagtttgagaag

SEQ ID NO: 1177488 - DNA, 15 bp, Homo sapiens
agtcgagtttgagaa

SEQ ID NO: 1177489 - DNA, 15 bp, Homo sapiens
cagtcgagtttgaga

SEQ ID NO: 1177490 - DNA, 15 bp, Homo sapiens
tcagtcgagtttgag

SEQ ID NO: 1177491 - DNA, 15 bp, Homo sapiens
ttcagtcgagtttga

SEQ ID NO: 1177492 - DNA, 15 bp, Homo sapiens
cttcagtcgagtttg

SEQ ID NO: 1177493 - DNA, 15 bp, Homo sapiens
gcttcagtcgagttt

SEQ ID NO: 1177494 - DNA, 15 bp, Homo sapiens
tgcttcagtcgagtt

SEQ ID NO: 1177495 - DNA, 15 bp, Homo sapiens
ctgcttcagtcgagt

SEQ ID NO: 1177496 - DNA, 15 bp, Homo sapiens
tctgcttcagtcgag

SEQ ID NO: 1177497 - DNA, 15 bp, Homo sapiens
ctctgcttcagtcga

SEQ ID NO: 1177498 - DNA, 15 bp, Homo sapiens
gctctgcttcagtcg

SEQ ID NO: 1177499 - DNA, 15 bp, Homo sapiens
agctctgcttcagtc

SEQ ID NO: 1177500 - DNA, 15 bp, Homo sapiens
cagctctgcttcagt

SEQ ID NO: 1177501 - DNA, 15 bp, Homo sapiens
tcagctctgcttcag

SEQ ID NO: 1177502 - DNA, 15 bp, Homo sapiens
gtcagctctgcttca

SEQ ID NO: 1177503 - DNA, 15 bp, Homo sapiens
agtcagctctgcttc

SEQ ID NO: 1177504 - DNA, 15 bp, Homo sapiens
gagtcagctctgctt

SEQ ID NO: 1177505 - DNA, 15 bp, Homo sapiens
tgagtcagctctgct

SEQ ID NO: 1177506 - DNA, 15 bp, Homo sapiens
ctgagtcagctctgc

SEQ ID NO: 1177507 - DNA, 15 bp, Homo sapiens
gctgagtcagctctg

SEQ ID NO: 1177508 - DNA, 15 bp, Homo sapiens
tgctgagtcagctct

SEQ ID NO: 1177509 - DNA, 15 bp, Homo sapiens
ctgctgagtcagctc

SEQ ID NO: 1177510 - DNA, 15 bp, Homo sapiens
cctgctgagtcagct

SEQ ID NO: 1177511 - DNA, 15 bp, Homo sapiens
acctgctgagtcagc

SEQ ID NO: 1177512 - DNA, 15 bp, Homo sapiens
gacctgctgagtcag

SEQ ID NO: 1177513 - DNA, 15 bp, Homo sapiens
agacctgctgagtca

SEQ ID NO: 1177514 - DNA, 15 bp, Homo sapiens
aagacctgctgagtc

SEQ ID NO: 1177515 - DNA, 15 bp, Homo sapiens
acccaagacctgctg

SEQ ID NO: 1177516 - DNA, 15 bp, Homo sapiens
cacccaagacctgct

SEQ ID NO: 1177517 - DNA, 15 bp, Homo sapiens
gcacccaagacctgc

SEQ ID NO: 1177518 - DNA, 15 bp, Homo sapiens
cgcacccaagacctg

SEQ ID NO: 1177519 - DNA, 15 bp, Homo sapiens
ccgcacccaagacct

SEQ ID NO: 1177520 - DNA, 15 bp, Homo sapiens
gccgcacccaagacc

SEQ ID NO: 1177521 - DNA, 15 bp, Homo sapiens
agccgcacccaagac

SEQ ID NO: 1177522 - DNA, 15 bp, Homo sapiens
aagccgcacccaaga

SEQ ID NO: 1177523 - DNA, 15 bp, Homo sapiens
caagccgcacccaag

SEQ ID NO: 1177524 - DNA, 15 bp, Homo sapiens
tcaagccgcacccaa

SEQ ID NO: 1177525 - DNA, 15 bp, Homo sapiens
ctcaagccgcaccca

SEQ ID NO: 1177526 - DNA, 15 bp, Homo sapiens
cctcaagccgcaccc

SEQ ID NO: 1177527 - DNA, 15 bp, Homo sapiens
gcctcaagccgcacc

SEQ ID NO: 1177528 - DNA, 15 bp, Homo sapiens
agcctcaagccgcac

SEQ ID NO: 1177529 - DNA, 15 bp, Homo sapiens
gagcctcaagccgca

SEQ ID NO: 1177530 - DNA, 15 bp, Homo sapiens
agagcctcaagccgc

SEQ ID NO: 1177531 - DNA, 15 bp, Homo sapiens
cagagcctcaagccg

SEQ ID NO: 1177532 - DNA, 15 bp, Homo sapiens
gcagagcctcaagcc

SEQ ID NO: 1177533 - DNA, 15 bp, Homo sapiens
tgcagagcctcaagc

SEQ ID NO: 1177534 - DNA, 15 bp, Homo sapiens
atgcagagcctcaag

SEQ ID NO: 1177535 - DNA, 15 bp, Homo sapiens
aatgcagagcctcaa

SEQ ID NO: 1177536 - DNA, 15 bp, Homo sapiens
aaatgcagagcctca

SEQ ID NO: 1177537 - DNA, 15 bp, Homo sapiens
gaaatgcagagcctc

SEQ ID NO: 1177538 - DNA, 15 bp, Homo sapiens
agaaatgcagagcct

SEQ ID NO: 1177539 - DNA, 15 bp, Homo sapiens
cagaaatgcagagcc

SEQ ID NO: 1177540 - DNA, 15 bp, Homo sapiens
ccagaaatgcagagc

SEQ ID NO: 1177541 - DNA, 15 bp, Homo sapiens
gccagaaatgcagag

SEQ ID NO: 1177542 - DNA, 15 bp, Homo sapiens
tgccagaaatgcaga

SEQ ID NO: 1177543 - DNA, 15 bp, Homo sapiens
ttgccagaaatgcag

SEQ ID NO: 1177544 - DNA, 15 bp, Homo sapiens
cttgccagaaatgca

SEQ ID NO: 1177545 - DNA, 15 bp, Homo sapiens
gcttgccagaaatgc

SEQ ID NO: 1177546 - DNA, 15 bp, Homo sapiens
agcttgccagaaatg

SEQ ID NO: 1177547 - DNA, 15 bp, Homo sapiens
gagcttgccagaaat

SEQ ID NO: 1177548 - DNA, 15 bp, Homo sapiens
agagcttgccagaaa

SEQ ID NO: 1177549 - DNA, 15 bp, Homo sapiens
gagagcttgccagaa

SEQ ID NO: 1177550 - DNA, 15 bp, Homo sapiens
tgagagcttgccaga

SEQ ID NO: 1177551 - DNA, 15 bp, Homo sapiens
ctgagagcttgccag

SEQ ID NO: 1177552 - DNA, 15 bp, Homo sapiens
cctgagagcttgcca

SEQ ID NO: 1177553 - DNA, 15 bp, Homo sapiens
ccctgagagcttgcc

SEQ ID NO: 1177554 - DNA, 15 bp, Homo sapiens
cccctgagagcttgc

SEQ ID NO: 1177555 - DNA, 15 bp, Homo sapiens
acccctgagagcttg

SEQ ID NO: 1177556 - DNA, 15 bp, Homo sapiens
aacccctgagagctt

SEQ ID NO: 1177557 - DNA, 15 bp, Homo sapiens
caacccctgagagct

SEQ ID NO: 1177558 - DNA, 15 bp, Homo sapiens
gcaacccctgagagc

SEQ ID NO: 1177559 - DNA, 15 bp, Homo sapiens
agcaacccctgagag

SEQ ID NO: 1177560 - DNA, 15 bp, Homo sapiens
cagcaacccctgaga

SEQ ID NO: 1177561 - DNA, 15 bp, Homo sapiens
tcagcaacccctgag

SEQ ID NO: 1177562 - DNA, 15 bp, Homo sapiens
atcagcaacccctga

SEQ ID NO: 1177563 - DNA, 15 bp, Homo sapiens
catcagcaacccctg

SEQ ID NO: 1177564 - DNA, 15 bp, Homo sapiens
gcatcagcaacccct

SEQ ID NO: 1177565 - DNA, 15 bp, Homo sapiens
agcatcagcaacccc

SEQ ID NO: 1177566 - DNA, 15 bp, Homo sapiens
cagcatcagcaaccc

SEQ ID NO: 1177567 - DNA, 15 bp, Homo sapiens
gcagcatcagcaacc

SEQ ID NO: 1177568 - DNA, 15 bp, Homo sapiens
agcagcatcagcaac

SEQ ID NO: 1177569 - DNA, 15 bp, Homo sapiens
aagcagcatcagcaa

SEQ ID NO: 1177570 - DNA, 15 bp, Homo sapiens
caagcagcatcagca

SEQ ID NO: 1177571 - DNA, 15 bp, Homo sapiens
gcaagcagcatcagc

SEQ ID NO: 1177572 - DNA, 15 bp, Homo sapiens
agcaagcagcatcag

SEQ ID NO: 1177573 - DNA, 15 bp, Homo sapiens
aagcaagcagcatca

SEQ ID NO: 1177574 - DNA, 15 bp, Homo sapiens
aaagcaagcagcatc

SEQ ID NO: 1177575 - DNA, 15 bp, Homo sapiens
caaagcaagcagcat

SEQ ID NO: 1177576 - DNA, 15 bp, Homo sapiens
acaaagcaagcagca

SEQ ID NO: 1177577 - DNA, 15 bp, Homo sapiens
cacaaagcaagcagc

SEQ ID NO: 1177578 - DNA, 15 bp, Homo sapiens
tcacaaagcaagcag

SEQ ID NO: 1177579 - DNA, 15 bp, Homo sapiens
ctcacaaagcaagca

SEQ ID NO: 1177580 - DNA, 15 bp, Homo sapiens
gctcacaaagcaagc

SEQ ID NO: 1177581 - DNA, 15 bp, Homo sapiens
tgctcacaaagcaag

SEQ ID NO: 1177582 - DNA, 15 bp, Homo sapiens
ttgctcacaaagcaa

SEQ ID NO: 1177583 - DNA, 15 bp, Homo sapiens
cttgctcacaaagca

SEQ ID NO: 1177584 - DNA, 15 bp, Homo sapiens
ccttgctcacaaagc

SEQ ID NO: 1177585 - DNA, 15 bp, Homo sapiens
gccttgctcacaaag

SEQ ID NO: 1177586 - DNA, 15 bp, Homo sapiens
agccttgctcacaaa

SEQ ID NO: 1177587 - DNA, 15 bp, Homo sapiens
gagccttgctcacaa

SEQ ID NO: 1177588 - DNA, 15 bp, Homo sapiens
agagccttgctcaca

SEQ ID NO: 1177589 - DNA, 15 bp, Homo sapiens
tagagccttgctcac

SEQ ID NO: 1177590 - DNA, 15 bp, Homo sapiens
ctagagccttgctca

SEQ ID NO: 1177591 - DNA, 15 bp, Homo sapiens
tctagagccttgctc

SEQ ID NO: 1177592 - DNA, 15 bp, Homo sapiens
gtctagagccttgct

SEQ ID NO: 1177593 - DNA, 15 bp, Homo sapiens
tgtctagagccttgc

SEQ ID NO: 1177594 - DNA, 15 bp, Homo sapiens
ttgtctagagccttg

SEQ ID NO: 1177595 - DNA, 15 bp, Homo sapiens
attgtctagagcctt

SEQ ID NO: 1177596 - DNA, 15 bp, Homo sapiens
cattgtctagagcct

SEQ ID NO: 1177597 - DNA, 15 bp, Homo sapiens
acattgtctagagcc

SEQ ID NO: 1177598 - DNA, 15 bp, Homo sapiens
gacattgtctagagc

SEQ ID NO: 1177599 - DNA, 15 bp, Homo sapiens
tgacattgtctagag

SEQ ID NO: 1177600 - DNA, 15 bp, Homo sapiens
gtgacattgtctaga

SEQ ID NO: 1177601 - DNA, 15 bp, Homo sapiens
ggtgacattgtctag

SEQ ID NO: 1177602 - DNA, 15 bp, Homo sapiens
aggtgacattgtcta

SEQ ID NO: 1177603 - DNA, 15 bp, Homo sapiens
taggtgacattgtct

SEQ ID NO: 1177604 - DNA, 15 bp, Homo sapiens
gtaggtgacattgtc

SEQ ID NO: 1177605 - DNA, 15 bp, Homo sapiens
tgtaggtgacattgt

SEQ ID NO: 1177606 - DNA, 15 bp, Homo sapiens
atgtaggtgacattg

SEQ ID NO: 1177607 - DNA, 15 bp, Homo sapiens
gatgtaggtgacatt

SEQ ID NO: 1177608 - DNA, 15 bp, Homo sapiens
ggatgtaggtgacat

SEQ ID NO: 1177609 - DNA, 15 bp, Homo sapiens
tggatgtaggtgaca

SEQ ID NO: 1177610 - DNA, 15 bp, Homo sapiens
ctggatgtaggtgac

SEQ ID NO: 1177611 - DNA, 15 bp, Homo sapiens
cctggatgtaggtga

SEQ ID NO: 1177612 - DNA, 15 bp, Homo sapiens
acctggatgtaggtg

SEQ ID NO: 1177613 - DNA, 15 bp, Homo sapiens
tacctggatgtaggt

SEQ ID NO: 1177614 - DNA, 15 bp, Homo sapiens
gtacctggatgtagg

SEQ ID NO: 1177615 - DNA, 15 bp, Homo sapiens
tgtacctggatgtag

SEQ ID NO: 1177616 - DNA, 15 bp, Homo sapiens
ttgtacctggatgta

SEQ ID NO: 1177617 - DNA, 15 bp, Homo sapiens
gttgtacctggatgt

SEQ ID NO: 1177618 - DNA, 15 bp, Homo sapiens
ggttgtacctggatg

SEQ ID NO: 1177619 - DNA, 15 bp, Homo sapiens
tggttgtacctggat

SEQ ID NO: 1177620 - DNA, 15 bp, Homo sapiens
ctggttgtacctgga

SEQ ID NO: 1177621 - DNA, 15 bp, Homo sapiens
tctggttgtacctgg

SEQ ID NO: 1177622 - DNA, 15 bp, Homo sapiens
gtctggttgtacctg

SEQ ID NO: 1177623 - DNA, 15 bp, Homo sapiens
ggtctggttgtacct

SEQ ID NO: 1177624 - DNA, 15 bp, Homo sapiens
tggtctggttgtacc

SEQ ID NO: 1177625 - DNA, 15 bp, Homo sapiens
gtggtctggttgtac

SEQ ID NO: 1177626 - DNA, 15 bp, Homo sapiens
ggtggtctggttgta

SEQ ID NO: 1177627 - DNA, 15 bp, Homo sapiens
gggtggtctggttgt

SEQ ID NO: 1177628 - DNA, 15 bp, Homo sapiens
ggggtggtctggttg

SEQ ID NO: 1177629 - DNA, 15 bp, Homo sapiens
tggggtggtctggtt

SEQ ID NO: 1177630 - DNA, 15 bp, Homo sapiens
ctggggtggtctggt

SEQ ID NO: 1177631 - DNA, 15 bp, Homo sapiens
cctggggtggtctgg

SEQ ID NO: 1177632 - DNA, 15 bp, Homo sapiens
ccctggggtggtctg

SEQ ID NO: 1177633 - DNA, 15 bp, Homo sapiens
cccctggggtggtct

SEQ ID NO: 1177634 - DNA, 15 bp, Homo sapiens
ccccctggggtggtc

SEQ ID NO: 1177635 - DNA, 15 bp, Homo sapiens
cccccctggggtggt

SEQ ID NO: 1177636 - DNA, 15 bp, Homo sapiens
gcccccctggggtgg

SEQ ID NO: 1177637 - DNA, 15 bp, Homo sapiens
tgcccccctggggtg

SEQ ID NO: 1177638 - DNA, 15 bp, Homo sapiens
gtgcccccctggggt

SEQ ID NO: 1177639 - DNA, 15 bp, Homo sapiens
tgtgcccccctgggg

SEQ ID NO: 1177640 - DNA, 15 bp, Homo sapiens
ttgtgcccccctggg

SEQ ID NO: 1177641 - DNA, 15 bp, Homo sapiens
tttgtgcccccctgg

SEQ ID NO: 1177642 - DNA, 15 bp, Homo sapiens
ttttgtgcccccctg

SEQ ID NO: 1177643 - DNA, 15 bp, Homo sapiens
tttttgtgcccccct

SEQ ID NO: 1177644 - DNA, 15 bp, Homo sapiens
ctttttgtgcccccc

SEQ ID NO: 1177645 - DNA, 15 bp, Homo sapiens
tctttttgtgccccc

SEQ ID NO: 1177646 - DNA, 15 bp, Homo sapiens
ttctttttgtgcccc

SEQ ID NO: 1177647 - DNA, 15 bp, Homo sapiens
tttctttttgtgccc

SEQ ID NO: 1177648 - DNA, 15 bp, Homo sapiens
atttctttttgtgcc

SEQ ID NO: 1177649 - DNA, 15 bp, Homo sapiens
gatttctttttgtgc

SEQ ID NO: 1177650 - DNA, 15 bp, Homo sapiens
ggatttctttttgtg

SEQ ID NO: 1177651 - DNA, 15 bp, Homo sapiens
cggatttctttttgt

SEQ ID NO: 1177652 - DNA, 15 bp, Homo sapiens
acggatttctttttg

SEQ ID NO: 1177653 - DNA, 15 bp, Homo sapiens
gacggatttcttttt

SEQ ID NO: 1177654 - DNA, 15 bp, Homo sapiens
ggacggatttctttt

SEQ ID NO: 1177655 - DNA, 15 bp, Homo sapiens
aggacggatttcttt

SEQ ID NO: 1177656 - DNA, 15 bp, Homo sapiens
taggacggatttctt

SEQ ID NO: 1177657 - DNA, 15 bp, Homo sapiens
ctaggacggatttct

SEQ ID NO: 1177658 - DNA, 15 bp, Homo sapiens
cctaggacggatttc

SEQ ID NO: 1177659 - DNA, 15 bp, Homo sapiens
tcctaggacggattt

SEQ ID NO: 1177660 - DNA, 15 bp, Homo sapiens
atcctaggacggatt

SEQ ID NO: 1177661 - DNA, 15 bp, Homo sapiens
gatcctaggacggat

SEQ ID NO: 1177662 - DNA, 15 bp, Homo sapiens
ggatcctaggacgga

SEQ ID NO: 1177663 - DNA, 15 bp, Homo sapiens
tggatcctaggacgg

SEQ ID NO: 1177664 - DNA, 15 bp, Homo sapiens
ttggatcctaggacg

SEQ ID NO: 1177665 - DNA, 15 bp, Homo sapiens
tttggatcctaggac

SEQ ID NO: 1177666 - DNA, 15 bp, Homo sapiens
gtttggatcctagga

SEQ ID NO: 1177667 - DNA, 15 bp, Homo sapiens
cgtttggatcctagg

SEQ ID NO: 1177668 - DNA, 15 bp, Homo sapiens
acgtttggatcctag

SEQ ID NO: 1177669 - DNA, 15 bp, Homo sapiens
aacgtttggatccta

SEQ ID NO: 1177670 - DNA, 15 bp, Homo sapiens
aaacgtttggatcct

SEQ ID NO: 1177671 - DNA, 15 bp, Homo sapiens
gaaacgtttggatcc

SEQ ID NO: 1177672 - DNA, 15 bp, Homo sapiens
ggaaacgtttggatc

SEQ ID NO: 1177673 - DNA, 15 bp, Homo sapiens
tggaaacgtttggat

SEQ ID NO: 1177674 - DNA, 15 bp, Homo sapiens
ttggaaacgtttgga

SEQ ID NO: 1177675 - DNA, 15 bp, Homo sapiens
cttggaaacgtttgg

SEQ ID NO: 1177676 - DNA, 15 bp, Homo sapiens
tcttggaaacgtttg

SEQ ID NO: 1177677 - DNA, 15 bp, Homo sapiens
ctcttggaaacgttt

SEQ ID NO: 1177678 - DNA, 15 bp, Homo sapiens
actcttggaaacgtt

SEQ ID NO: 1177679 - DNA, 15 bp, Homo sapiens
gactcttggaaacgt

SEQ ID NO: 1177680 - DNA, 15 bp, Homo sapiens
agactcttggaaacg

SEQ ID NO: 1177681 - DNA, 15 bp, Homo sapiens
aagactcttggaaac

SEQ ID NO: 1177682 - DNA, 15 bp, Homo sapiens
caagactcttggaaa

SEQ ID NO: 1177683 - DNA, 15 bp, Homo sapiens
ccaagactcttggaa

SEQ ID NO: 1177684 - DNA, 15 bp, Homo sapiens
gccaagactcttgga

SEQ ID NO: 1177685 - DNA, 15 bp, Homo sapiens
agccaagactcttgg

SEQ ID NO: 1177686 - DNA, 15 bp, Homo sapiens
aagccaagactcttg

SEQ ID NO: 1177687 - DNA, 15 bp, Homo sapiens
aaagccaagactctt

SEQ ID NO: 1177688 - DNA, 15 bp, Homo sapiens
gaaagccaagactct

SEQ ID NO: 1177689 - DNA, 15 bp, Homo sapiens
ggaaagccaagactc

SEQ ID NO: 1177690 - DNA, 15 bp, Homo sapiens
aggaaagccaagact

SEQ ID NO: 1177691 - DNA, 15 bp, Homo sapiens
gaggaaagccaagac

SEQ ID NO: 1177692 - DNA, 15 bp, Homo sapiens
agaggaaagccaaga

SEQ ID NO: 1177693 - DNA, 15 bp, Homo sapiens
aagaggaaagccaag

SEQ ID NO: 1177694 - DNA, 15 bp, Homo sapiens
taagaggaaagccaa

SEQ ID NO: 1177695 - DNA, 15 bp, Homo sapiens
ataagaggaaagcca

SEQ ID NO: 1177696 - DNA, 15 bp, Homo sapiens
aataagaggaaagcc

SEQ ID NO: 1177697 - DNA, 15 bp, Homo sapiens
gaataagaggaaagc

SEQ ID NO: 1177698 - DNA, 15 bp, Homo sapiens
agaataagaggaaag

SEQ ID NO: 1177699 - DNA, 15 bp, Homo sapiens
cagaataagaggaaa

SEQ ID NO: 1177700 - DNA, 15 bp, Homo sapiens
tcagaataagaggaa

SEQ ID NO: 1177701 - DNA, 15 bp, Homo sapiens
atcagaataagagga

SEQ ID NO: 1177702 - DNA, 15 bp, Homo sapiens
tatcagaataagagg

SEQ ID NO: 1177703 - DNA, 15 bp, Homo sapiens
gtatcagaataagag

SEQ ID NO: 1177704 - DNA, 15 bp, Homo sapiens
ggtatcagaataaga

SEQ ID NO: 1177705 - DNA, 15 bp, Homo sapiens
aggtatcagaataag

SEQ ID NO: 1177706 - DNA, 15 bp, Homo sapiens
taggtatcagaataa

SEQ ID NO: 1177707 - DNA, 15 bp, Homo sapiens
ataggtatcagaata

SEQ ID NO: 1177708 - DNA, 15 bp, Homo sapiens
tataggtatcagaat

SEQ ID NO: 1177709 - DNA, 15 bp, Homo sapiens
ttataggtatcagaa

SEQ ID NO: 1177710 - DNA, 15 bp, Homo sapiens
cttataggtatcaga

SEQ ID NO: 1177711 - DNA, 15 bp, Homo sapiens
acttataggtatcag

SEQ ID NO: 1177712 - DNA, 15 bp, Homo sapiens
tacttataggtatca

SEQ ID NO: 1177713 - DNA, 15 bp, Homo sapiens
atacttataggtatc

SEQ ID NO: 1177714 - DNA, 15 bp, Homo sapiens
aatacttataggtat

SEQ ID NO: 1177715 - DNA, 15 bp, Homo sapiens
aaatacttataggta

SEQ ID NO: 1177716 - DNA, 15 bp, Homo sapiens
aaaatacttataggt

SEQ ID NO: 1177717 - DNA, 15 bp, Homo sapiens
caaaatacttatagg

SEQ ID NO: 1177718 - DNA, 15 bp, Homo sapiens
acaaaatacttatag

SEQ ID NO: 1177719 - DNA, 15 bp, Homo sapiens
aacaaaatacttata

SEQ ID NO: 1177720 - DNA, 15 bp, Homo sapiens
aaacaaaatacttat

SEQ ID NO: 1177721 - DNA, 15 bp, Homo sapiens
aaaacaaaatactta

SEQ ID NO: 1177722 - DNA, 15 bp, Homo sapiens
aaaaacaaaatactt

SEQ ID NO: 1177723 - DNA, 15 bp, Homo sapiens
gaaaaacaaaatact

SEQ ID NO: 1177724 - DNA, 15 bp, Homo sapiens
tgaaaaacaaaatac

SEQ ID NO: 1177725 - DNA, 15 bp, Homo sapiens
ttgaaaaacaaaata

SEQ ID NO: 1177726 - DNA, 15 bp, Homo sapiens
attgaaaaacaaaat

SEQ ID NO: 1177727 - DNA, 15 bp, Homo sapiens
gattgaaaaacaaaa

SEQ ID NO: 1177728 - DNA, 15 bp, Homo sapiens
ggattgaaaaacaaa

SEQ ID NO: 1177729 - DNA, 15 bp, Homo sapiens
tggattgaaaaacaa

SEQ ID NO: 1177730 - DNA, 15 bp, Homo sapiens
ttggattgaaaaaca

SEQ ID NO: 1177731 - DNA, 15 bp, Homo sapiens
tttggattgaaaaac

SEQ ID NO: 1177732 - DNA, 15 bp, Homo sapiens
ttttggattgaaaaa

SEQ ID NO: 1177733 - DNA, 15 bp, Homo sapiens
gttttggattgaaaa

SEQ ID NO: 1177734 - DNA, 15 bp, Homo sapiens
tgttttggattgaaa

SEQ ID NO: 1177735 - DNA, 15 bp, Homo sapiens
ctgttttggattgaa

SEQ ID NO: 1177736 - DNA, 15 bp, Homo sapiens
actgttttggattga

SEQ ID NO: 1177737 - DNA, 15 bp, Homo sapiens
aactgttttggattg

SEQ ID NO: 1177738 - DNA, 15 bp, Homo sapiens
aaactgttttggatt

SEQ ID NO: 1177739 - DNA, 15 bp, Homo sapiens
aaaactgttttggat

SEQ ID NO: 1177740 - DNA, 15 bp, Homo sapiens
taaaactgttttgga

SEQ ID NO: 1177741 - DNA, 15 bp, Homo sapiens
ttaaaactgttttgg

SEQ ID NO: 1177742 - DNA, 15 bp, Homo sapiens
tttaaaactgttttg

SEQ ID NO: 1177743 - DNA, 15 bp, Homo sapiens
ctttaaaactgtttt

SEQ ID NO: 1177744 - DNA, 15 bp, Homo sapiens
tctttaaaactgttt

SEQ ID NO: 1177745 - DNA, 15 bp, Homo sapiens
gtctttaaaactgtt

SEQ ID NO: 1177746 - DNA, 15 bp, Homo sapiens
tgtctttaaaactgt

SEQ ID NO: 1177747 - DNA, 15 bp, Homo sapiens
ttgtctttaaaactg

SEQ ID NO: 1177748 - DNA, 15 bp, Homo sapiens
tttgtctttaaaact

SEQ ID NO: 1177749 - DNA, 15 bp, Homo sapiens
atttgtctttaaaac

SEQ ID NO: 1177750 - DNA, 15 bp, Homo sapiens
tatttgtctttaaaa

SEQ ID NO: 1177751 - DNA, 15 bp, Homo sapiens
ttatttgtctttaaa

SEQ ID NO: 1177752 - DNA, 15 bp, Homo sapiens
tttatttgtctttaa

SEQ ID NO: 1177753 - DNA, 15 bp, Homo sapiens
gtttatttgtcttta

SEQ ID NO: 1177754 - DNA, 15 bp, Homo sapiens
tgtttatttgtcttt

SEQ ID NO: 1177755 - DNA, 15 bp, Homo sapiens
ttgtttatttgtctt

SEQ ID NO: 1177756 - DNA, 15 bp, Homo sapiens
cttgtttatttgtct

SEQ ID NO: 1177757 - DNA, 15 bp, Homo sapiens
gcttgtttatttgtc

SEQ ID NO: 1177758 - DNA, 15 bp, Homo sapiens
tgcttgtttatttgt

SEQ ID NO: 1177759 - DNA, 15 bp, Homo sapiens
ctgcttgtttatttg

SEQ ID NO: 1177760 - DNA, 15 bp, Homo sapiens
tctgcttgtttattt

SEQ ID NO: 1177761 - DNA, 15 bp, Homo sapiens
ctctgcttgtttatt

SEQ ID NO: 1177762 - DNA, 15 bp, Homo sapiens
tctctgcttgtttat

SEQ ID NO: 1177763 - DNA, 15 bp, Homo sapiens
ttctctgcttgttta

SEQ ID NO: 1177764 - DNA, 15 bp, Homo sapiens
tttctctgcttgttt

SEQ ID NO: 1177765 - DNA, 15 bp, Homo sapiens
ctttctctgcttgtt

SEQ ID NO: 1177766 - DNA, 15 bp, Homo sapiens
gctttctctgcttgt

SEQ ID NO: 1177767 - DNA, 15 bp, Homo sapiens
tgctttctctgcttg

SEQ ID NO: 1177768 - DNA, 15 bp, Homo sapiens
gtgctttctctgctt

SEQ ID NO: 1177769 - DNA, 15 bp, Homo sapiens
cgtgctttctctgct

SEQ ID NO: 1177770 - DNA, 15 bp, Homo sapiens
acgtgctttctctgc

SEQ ID NO: 1177771 - DNA, 15 bp, Homo sapiens
aacgtgctttctctg

SEQ ID NO: 1177772 - DNA, 15 bp, Homo sapiens
gaacgtgctttctct

SEQ ID NO: 1177773 - DNA, 15 bp, Homo sapiens
cgaacgtgctttctc

SEQ ID NO: 1177774 - DNA, 15 bp, Homo sapiens
ccgaacgtgctttct

SEQ ID NO: 1177775 - DNA, 15 bp, Homo sapiens
accgaacgtgctttc

SEQ ID NO: 1177776 - DNA, 15 bp, Homo sapiens
gaccgaacgtgcttt

SEQ ID NO: 1177777 - DNA, 15 bp, Homo sapiens
agaccgaacgtgctt

SEQ ID NO: 1177778 - DNA, 15 bp, Homo sapiens
aagaccgaacgtgct

SEQ ID NO: 1177779 - DNA, 15 bp, Homo sapiens
caagaccgaacgtgc

SEQ ID NO: 1177780 - DNA, 15 bp, Homo sapiens
tcaagaccgaacgtg

SEQ ID NO: 1177781 - DNA, 15 bp, Homo sapiens
gtcaagaccgaacgt

SEQ ID NO: 1177782 - DNA, 15 bp, Homo sapiens
ggtcaagaccgaacg

SEQ ID NO: 1177783 - DNA, 15 bp, Homo sapiens
gggtcaagaccgaac

SEQ ID NO: 1177784 - DNA, 15 bp, Homo sapiens
tgggtcaagaccgaa

SEQ ID NO: 1177785 - DNA, 15 bp, Homo sapiens
ctgggtcaagaccga

SEQ ID NO: 1177786 - DNA, 15 bp, Homo sapiens
tctgggtcaagaccg

SEQ ID NO: 1177787 - DNA, 15 bp, Homo sapiens
atctgggtcaagacc

SEQ ID NO: 1177788 - DNA, 15 bp, Homo sapiens
catctgggtcaagac

SEQ ID NO: 1177789 - DNA, 15 bp, Homo sapiens
tcatctgggtcaaga

SEQ ID NO: 1177790 - DNA, 15 bp, Homo sapiens
ctcatctgggtcaag

SEQ ID NO: 1177791 - DNA, 15 bp, Homo sapiens
tctcatctgggtcaa

SEQ ID NO: 1177792 - DNA, 15 bp, Homo sapiens
ctctcatctgggtca

SEQ ID NO: 1177793 - DNA, 15 bp, Homo sapiens
tctctcatctgggtc

SEQ ID NO: 1177794 - DNA, 15 bp, Homo sapiens
ttctctcatctgggt

SEQ ID NO: 1177795 - DNA, 15 bp, Homo sapiens
tttctctcatctggg

SEQ ID NO: 1177796 - DNA, 15 bp, Homo sapiens
atttctctcatctgg

SEQ ID NO: 1177797 - DNA, 15 bp, Homo sapiens
catttctctcatctg

SEQ ID NO: 1177798 - DNA, 15 bp, Homo sapiens
ccatttctctcatct

SEQ ID NO: 1177799 - DNA, 15 bp, Homo sapiens
gccatttctctcatc

SEQ ID NO: 1177800 - DNA, 15 bp, Homo sapiens
tgccatttctctcat

SEQ ID NO: 1177801 - DNA, 15 bp, Homo sapiens
atgccatttctctca

SEQ ID NO: 1177802 - DNA, 15 bp, Homo sapiens
catgccatttctctc

SEQ ID NO: 1177803 - DNA, 15 bp, Homo sapiens
acatgccatttctct

SEQ ID NO: 1177804 - DNA, 15 bp, Homo sapiens
gacatgccatttctc

SEQ ID NO: 1177805 - DNA, 15 bp, Homo sapiens
ggacatgccatttct

SEQ ID NO: 1177806 - DNA, 15 bp, Homo sapiens
gggacatgccatttc

SEQ ID NO: 1177807 - DNA, 15 bp, Homo sapiens
ggggacatgccattt

SEQ ID NO: 1177808 - DNA, 15 bp, Homo sapiens
aggggacatgccatt

SEQ ID NO: 1177809 - DNA, 15 bp, Homo sapiens
gaggggacatgccat

SEQ ID NO: 1177810 - DNA, 15 bp, Homo sapiens
agaggggacatgcca

SEQ ID NO: 1177811 - DNA, 15 bp, Homo sapiens
gagaggggacatgcc

SEQ ID NO: 1177812 - DNA, 15 bp, Homo sapiens
tgagaggggacatgc

SEQ ID NO: 1177813 - DNA, 15 bp, Homo sapiens
gtgagaggggacatg

SEQ ID NO: 1177814 - DNA, 15 bp, Homo sapiens
agtgagaggggacat

SEQ ID NO: 1177815 - DNA, 15 bp, Homo sapiens
gagtgagaggggaca

SEQ ID NO: 1177816 - DNA, 15 bp, Homo sapiens
tgagtgagaggggac

SEQ ID NO: 1177817 - DNA, 15 bp, Homo sapiens
ctgagtgagagggga

SEQ ID NO: 1177818 - DNA, 15 bp, Homo sapiens
cctgagtgagagggg

SEQ ID NO: 1177819 - DNA, 15 bp, Homo sapiens
ccctgagtgagaggg

SEQ ID NO: 1177820 - DNA, 15 bp, Homo sapiens
cccctgagtgagagg

SEQ ID NO: 1177821 - DNA, 15 bp, Homo sapiens
tcccctgagtgagag

SEQ ID NO: 1177822 - DNA, 15 bp, Homo sapiens
gtcccctgagtgaga

SEQ ID NO: 1177823 - DNA, 15 bp, Homo sapiens
tgtcccctgagtgag

SEQ ID NO: 1177824 - DNA, 15 bp, Homo sapiens
ttgtcccctgagtga

SEQ ID NO: 1177825 - DNA, 15 bp, Homo sapiens
attgtcccctgagtg

SEQ ID NO: 1177826 - DNA, 15 bp, Homo sapiens
gattgtcccctgagt

SEQ ID NO: 1177827 - DNA, 15 bp, Homo sapiens
ggattgtcccctgag

SEQ ID NO: 1177828 - DNA, 15 bp, Homo sapiens
tggattgtcccctga

SEQ ID NO: 1177829 - DNA, 15 bp, Homo sapiens
ctggattgtcccctg

SEQ ID NO: 1177830 - DNA, 15 bp, Homo sapiens
tctggattgtcccct

SEQ ID NO: 1177831 - DNA, 15 bp, Homo sapiens
ctctggattgtcccc

SEQ ID NO: 1177832 - DNA, 15 bp, Homo sapiens
tctctggattgtccc

SEQ ID NO: 1177833 - DNA, 15 bp, Homo sapiens
gtctctggattgtcc

SEQ ID NO: 1177834 - DNA, 15 bp, Homo sapiens
agtctctggattgtc

SEQ ID NO: 1177835 - DNA, 15 bp, Homo sapiens
gagtctctggattgt

SEQ ID NO: 1177836 - DNA, 15 bp, Homo sapiens
tgagtctctggattg

SEQ ID NO: 1177837 - DNA, 15 bp, Homo sapiens
gtgagtctctggatt

SEQ ID NO: 1177838 - DNA, 15 bp, Homo sapiens
agtgagtctctggat

SEQ ID NO: 1177839 - DNA, 15 bp, Homo sapiens
aagtgagtctctgga

SEQ ID NO: 1177840 - DNA, 15 bp, Homo sapiens
caagtgagtctctgg

SEQ ID NO: 1177841 - DNA, 15 bp, Homo sapiens
gcaagtgagtctctg

SEQ ID NO: 1177842 - DNA, 15 bp, Homo sapiens
cgcaagtgagtctct

SEQ ID NO: 1177843 - DNA, 15 bp, Homo sapiens
gcgcaagtgagtctc

SEQ ID NO: 1177844 - DNA, 15 bp, Homo sapiens
cgcgcaagtgagtct

SEQ ID NO: 1177845 - DNA, 15 bp, Homo sapiens
acgcgcaagtgagtc

SEQ ID NO: 1177846 - DNA, 15 bp, Homo sapiens
cacgcgcaagtgagt

SEQ ID NO: 1177847 - DNA, 15 bp, Homo sapiens
tcacgcgcaagtgag

SEQ ID NO: 1177848 - DNA, 15 bp, Homo sapiens
ctcacgcgcaagtga

SEQ ID NO: 1177849 - DNA, 15 bp, Homo sapiens
tctcacgcgcaagtg

SEQ ID NO: 1177850 - DNA, 15 bp, Homo sapiens
gtctcacgcgcaagt

SEQ ID NO: 1177851 - DNA, 15 bp, Homo sapiens
agtctcacgcgcaag

SEQ ID NO: 1177852 - DNA, 15 bp, Homo sapiens
cagtctcacgcgcaa

SEQ ID NO: 1177853 - DNA, 15 bp, Homo sapiens
gcagtctcacgcgca

SEQ ID NO: 1177854 - DNA, 15 bp, Homo sapiens
agcagtctcacgcgc

SEQ ID NO: 1177855 - DNA, 15 bp, Homo sapiens
cagcagtctcacgcg

SEQ ID NO: 1177856 - DNA, 15 bp, Homo sapiens
gcagcagtctcacgc

SEQ ID NO: 1177857 - DNA, 15 bp, Homo sapiens
tgcagcagtctcacg

SEQ ID NO: 1177858 - DNA, 15 bp, Homo sapiens
gtgcagcagtctcac

SEQ ID NO: 1177859 - DNA, 15 bp, Homo sapiens
cgtgcagcagtctca

SEQ ID NO: 1177860 - DNA, 15 bp, Homo sapiens
gcgtgcagcagtctc

SEQ ID NO: 1177861 - DNA, 15 bp, Homo sapiens
tgcgtgcagcagtct

SEQ ID NO: 1177862 - DNA, 15 bp, Homo sapiens
gtgcgtgcagcagtc

SEQ ID NO: 1177863 - DNA, 15 bp, Homo sapiens
tgtgcgtgcagcagt

SEQ ID NO: 1177864 - DNA, 15 bp, Homo sapiens
ctgtgcgtgcagcag

SEQ ID NO: 1177865 - DNA, 15 bp, Homo sapiens
actgtgcgtgcagca

SEQ ID NO: 1177866 - DNA, 15 bp, Homo sapiens
cactgtgcgtgcagc

SEQ ID NO: 1177867 - DNA, 15 bp, Homo sapiens
gcactgtgcgtgcag

SEQ ID NO: 1177868 - DNA, 15 bp, Homo sapiens
cgcactgtgcgtgca

SEQ ID NO: 1177869 - DNA, 15 bp, Homo sapiens
gcgcactgtgcgtgc

SEQ ID NO: 1177870 - DNA, 15 bp, Homo sapiens
cgcgcactgtgcgtg

SEQ ID NO: 1177871 - DNA, 15 bp, Homo sapiens
acgcgcactgtgcgt

SEQ ID NO: 1177872 - DNA, 15 bp, Homo sapiens
aacgcgcactgtgcg

SEQ ID NO: 1177873 - DNA, 15 bp, Homo sapiens
gaacgcgcactgtgc

SEQ ID NO: 1177874 - DNA, 15 bp, Homo sapiens
ggaacgcgcactgtg

SEQ ID NO: 1177875 - DNA, 15 bp, Homo sapiens
tggaacgcgcactgt

SEQ ID NO: 1177876 - DNA, 15 bp, Homo sapiens
atggaacgcgcactg

SEQ ID NO: 1177877 - DNA, 15 bp, Homo sapiens
tatggaacgcgcact

SEQ ID NO: 1177878 - DNA, 15 bp, Homo sapiens
ctatggaacgcgcac

SEQ ID NO: 1177879 - DNA, 15 bp, Homo sapiens
cctatggaacgcgca

SEQ ID NO: 1177880 - DNA, 15 bp, Homo sapiens
ccctatggaacgcgc

SEQ ID NO: 1177881 - DNA, 15 bp, Homo sapiens
gccctatggaacgcg

SEQ ID NO: 1177882 - DNA, 15 bp, Homo sapiens
tgccctatggaacgc

SEQ ID NO: 1177883 - DNA, 15 bp, Homo sapiens
ctgccctatggaacg

SEQ ID NO: 1177884 - DNA, 15 bp, Homo sapiens
cctgccctatggaac

SEQ ID NO: 1177885 - DNA, 15 bp, Homo sapiens
ccctgccctatggaa

SEQ ID NO: 1177886 - DNA, 15 bp, Homo sapiens
gccctgccctatgga

SEQ ID NO: 1177887 - DNA, 15 bp, Homo sapiens
ggccctgccctatgg

SEQ ID NO: 1177888 - DNA, 15 bp, Homo sapiens
aggccctgccctatg

SEQ ID NO: 1177889 - DNA, 15 bp, Homo sapiens
caggccctgccctat

SEQ ID NO: 1177890 - DNA, 15 bp, Homo sapiens
acaggccctgcccta

SEQ ID NO: 1177891 - DNA, 15 bp, Homo sapiens
tacaggccctgccct

SEQ ID NO: 1177892 - DNA, 15 bp, Homo sapiens
atacaggccctgccc

SEQ ID NO: 1177893 - DNA, 15 bp, Homo sapiens
gatacaggccctgcc

SEQ ID NO: 1177894 - DNA, 15 bp, Homo sapiens
ggatacaggccctgc

SEQ ID NO: 1177895 - DNA, 15 bp, Homo sapiens
aggatacaggccctg

SEQ ID NO: 1177896 - DNA, 15 bp, Homo sapiens
caggatacaggccct

SEQ ID NO: 1177897 - DNA, 15 bp, Homo sapiens
gcaggatacaggccc

SEQ ID NO: 1177898 - DNA, 15 bp, Homo sapiens
agcaggatacaggcc

SEQ ID NO: 1177899 - DNA, 15 bp, Homo sapiens
cagcaggatacaggc

SEQ ID NO: 1177900 - DNA, 15 bp, Homo sapiens
acagcaggatacagg

SEQ ID NO: 1177901 - DNA, 15 bp, Homo sapiens
cacagcaggatacag

SEQ ID NO: 1177902 - DNA, 15 bp, Homo sapiens
acacagcaggataca

SEQ ID NO: 1177903 - DNA, 15 bp, Homo sapiens
gacacagcaggatac

SEQ ID NO: 1177904 - DNA, 15 bp, Homo sapiens
ggacacagcaggata

SEQ ID NO: 1177905 - DNA, 15 bp, Homo sapiens
aggacacagcaggat

SEQ ID NO: 1177906 - DNA, 15 bp, Homo sapiens
aaggacacagcagga

SEQ ID NO: 1177907 - DNA, 15 bp, Homo sapiens
taaggacacagcagg

SEQ ID NO: 1177908 - DNA, 15 bp, Homo sapiens
ttaaggacacagcag

SEQ ID NO: 1177909 - DNA, 15 bp, Homo sapiens
gttaaggacacagca

SEQ ID NO: 1177910 - DNA, 15 bp, Homo sapiens
tgttaaggacacagc

SEQ ID NO: 1177911 - DNA, 15 bp, Homo sapiens
gtgttaaggacacag

SEQ ID NO: 1177912 - DNA, 15 bp, Homo sapiens
ggtgttaaggacaca

SEQ ID NO: 1177913 - DNA, 15 bp, Homo sapiens
aggtgttaaggacac

SEQ ID NO: 1177914 - DNA, 15 bp, Homo sapiens
taggtgttaaggaca

SEQ ID NO: 1177915 - DNA, 15 bp, Homo sapiens
ctaggtgttaaggac

SEQ ID NO: 1177916 - DNA, 15 bp, Homo sapiens
tctaggtgttaagga

SEQ ID NO: 1177917 - DNA, 15 bp, Homo sapiens
ttctaggtgttaagg

SEQ ID NO: 1177918 - DNA, 15 bp, Homo sapiens
gttctaggtgttaag

SEQ ID NO: 1177919 - DNA, 15 bp, Homo sapiens
tgttctaggtgttaa

SEQ ID NO: 1177920 - DNA, 15 bp, Homo sapiens
ctgttctaggtgtta

SEQ ID NO: 1177921 - DNA, 15 bp, Homo sapiens
cctgttctaggtgtt

SEQ ID NO: 1177922 - DNA, 15 bp, Homo sapiens
ccctgttctaggtgt

SEQ ID NO: 1177923 - DNA, 15 bp, Homo sapiens
ggaccctgttctagg

SEQ ID NO: 1177924 - DNA, 15 bp, Homo sapiens
cggaccctgttctag

SEQ ID NO: 1177925 - DNA, 15 bp, Homo sapiens
acggaccctgttcta

SEQ ID NO: 1177926 - DNA, 15 bp, Homo sapiens
gacggaccctgttct

SEQ ID NO: 1177927 - DNA, 15 bp, Homo sapiens
tgacggaccctgttc

SEQ ID NO: 1177928 - DNA, 15 bp, Homo sapiens
atgacggaccctgtt

SEQ ID NO: 1177929 - DNA, 15 bp, Homo sapiens
catgacggaccctgt

SEQ ID NO: 1177930 - DNA, 15 bp, Homo sapiens
acatgacggaccctg

SEQ ID NO: 1177931 - DNA, 15 bp, Homo sapiens
tacatgacggaccct

SEQ ID NO: 1177932 - DNA, 15 bp, Homo sapiens
ctacatgacggaccc

SEQ ID NO: 1177933 - DNA, 15 bp, Homo sapiens
gctacatgacggacc

SEQ ID NO: 1177934 - DNA, 15 bp, Homo sapiens
tgctacatgacggac

SEQ ID NO: 1177935 - DNA, 15 bp, Homo sapiens
gtgctacatgacgga

SEQ ID NO: 1177936 - DNA, 15 bp, Homo sapiens
agtgctacatgacgg

SEQ ID NO: 1177937 - DNA, 15 bp, Homo sapiens
gagtgctacatgacg

SEQ ID NO: 1177938 - DNA, 15 bp, Homo sapiens
tgagtgctacatgac

SEQ ID NO: 1177939 - DNA, 15 bp, Homo sapiens
atgagtgctacatga

SEQ ID NO: 1177940 - DNA, 15 bp, Homo sapiens
catgagtgctacatg

SEQ ID NO: 1177941 - DNA, 15 bp, Homo sapiens
ccatgagtgctacat

SEQ ID NO: 1177942 - DNA, 15 bp, Homo sapiens
gccatgagtgctaca

SEQ ID NO: 1177943 - DNA, 15 bp, Homo sapiens
ggccatgagtgctac

SEQ ID NO: 1177944 - DNA, 15 bp, Homo sapiens
gggccatgagtgcta

SEQ ID NO: 1177945 - DNA, 15 bp, Homo sapiens
cgggccatgagtgct

SEQ ID NO: 1177946 - DNA, 15 bp, Homo sapiens
gcgggccatgagtgc

SEQ ID NO: 1177947 - DNA, 15 bp, Homo sapiens
cgcgggccatgagtg

SEQ ID NO: 1177948 - DNA, 15 bp, Homo sapiens
ccgcgggccatgagt

SEQ ID NO: 1177949 - DNA, 15 bp, Homo sapiens
cccgcgggccatgag

SEQ ID NO: 1177950 - DNA, 15 bp, Homo sapiens
ccccgcgggccatga

SEQ ID NO: 1177951 - DNA, 15 bp, Homo sapiens
accccgcgggccatg

SEQ ID NO: 1177952 - DNA, 15 bp, Homo sapiens
gaccccgcgggccat

SEQ ID NO: 1177953 - DNA, 15 bp, Homo sapiens
tgaccccgcgggcca

SEQ ID NO: 1177954 - DNA, 15 bp, Homo sapiens
atgaccccgcgggcc

SEQ ID NO: 1177955 - DNA, 15 bp, Homo sapiens
catgaccccgcgggc

SEQ ID NO: 1177956 - DNA, 15 bp, Homo sapiens
gcatgaccccgcggg

SEQ ID NO: 1177957 - DNA, 15 bp, Homo sapiens
ggcatgaccccgcgg

SEQ ID NO: 1177958 - DNA, 15 bp, Homo sapiens
aggcatgaccccgcg

SEQ ID NO: 1177959 - DNA, 15 bp, Homo sapiens
caggcatgaccccgc

SEQ ID NO: 1177960 - DNA, 15 bp, Homo sapiens
gcaggcatgaccccg

SEQ ID NO: 1177961 - DNA, 15 bp, Homo sapiens
tgcaggcatgacccc

SEQ ID NO: 1177962 - DNA, 15 bp, Homo sapiens
gtgcaggcatgaccc

SEQ ID NO: 1177963 - DNA, 15 bp, Homo sapiens
tgtgcaggcatgacc

SEQ ID NO: 1177964 - DNA, 15 bp, Homo sapiens
ctgtgcaggcatgac

SEQ ID NO: 1177965 - DNA, 15 bp, Homo sapiens
tctgtgcaggcatga

SEQ ID NO: 1177966 - DNA, 15 bp, Homo sapiens
ctctgtgcaggcatg

SEQ ID NO: 1177967 - DNA, 15 bp, Homo sapiens
cctctgtgcaggcat

SEQ ID NO: 1177968 - DNA, 15 bp, Homo sapiens
ccctctgtgcaggca

SEQ ID NO: 1177969 - DNA, 15 bp, Homo sapiens
accctctgtgcaggc

SEQ ID NO: 1177970 - DNA, 15 bp, Homo sapiens
gaccctctgtgcagg

SEQ ID NO: 1177971 - DNA, 15 bp, Homo sapiens
agaccctctgtgcag

SEQ ID NO: 1177972 - DNA, 15 bp, Homo sapiens
gagaccctctgtgca

SEQ ID NO: 1177973 - DNA, 15 bp, Homo sapiens
cgagaccctctgtgc

SEQ ID NO: 1177974 - DNA, 15 bp, Homo sapiens
ccgagaccctctgtg

SEQ ID NO: 1177975 - DNA, 15 bp, Homo sapiens
cccgagaccctctgt

SEQ ID NO: 1177976 - DNA, 15 bp, Homo sapiens
tcccgagaccctctg

SEQ ID NO: 1177977 - DNA, 15 bp, Homo sapiens
ttcccgagaccctct

SEQ ID NO: 1177978 - DNA, 15 bp, Homo sapiens
cttcccgagaccctc

SEQ ID NO: 1177979 - DNA, 15 bp, Homo sapiens
gcttcccgagaccct

SEQ ID NO: 1177980 - DNA, 15 bp, Homo sapiens
agcttcccgagaccc

SEQ ID NO: 1177981 - DNA, 15 bp, Homo sapiens
gagcttcccgagacc

SEQ ID NO: 1177982 - DNA, 15 bp, Homo sapiens
ggagcttcccgagac

SEQ ID NO: 1177983 - DNA, 15 bp, Homo sapiens
aggagcttcccgaga

SEQ ID NO: 1177984 - DNA, 15 bp, Homo sapiens
gaggagcttcccgag

SEQ ID NO: 1177985 - DNA, 15 bp, Homo sapiens
ggaggagcttcccga

SEQ ID NO: 1177986 - DNA, 15 bp, Homo sapiens
tggaggagcttcccg

SEQ ID NO: 1177987 - DNA, 15 bp, Homo sapiens
ttggaggagcttccc

SEQ ID NO: 1177988 - DNA, 15 bp, Homo sapiens
cttggaggagcttcc

SEQ ID NO: 1177989 - DNA, 15 bp, Homo sapiens
ccttggaggagcttc

SEQ ID NO: 1177990 - DNA, 15 bp, Homo sapiens
gccttggaggagctt

SEQ ID NO: 1177991 - DNA, 15 bp, Homo sapiens
ggccttggaggagct

SEQ ID NO: 1177992 - DNA, 15 bp, Homo sapiens
cggccttggaggagc

SEQ ID NO: 1177993 - DNA, 15 bp, Homo sapiens
ccggccttggaggag

SEQ ID NO: 1177994 - DNA, 15 bp, Homo sapiens
gccggccttggagga

SEQ ID NO: 1177995 - DNA, 15 bp, Homo sapiens
tgccggccttggagg

SEQ ID NO: 1177996 - DNA, 15 bp, Homo sapiens
gtgccggccttggag

SEQ ID NO: 1177997 - DNA, 15 bp, Homo sapiens
tgtgccggccttgga

SEQ ID NO: 1177998 - DNA, 15 bp, Homo sapiens
ctgtgccggccttgg

SEQ ID NO: 1177999 - DNA, 15 bp, Homo sapiens
tctgtgccggccttg

SEQ ID NO: 1178000 - DNA, 15 bp, Homo sapiens
ctctgtgccggcctt

SEQ ID NO: 1178001 - DNA, 15 bp, Homo sapiens
actctgtgccggcct

SEQ ID NO: 1178002 - DNA, 15 bp, Homo sapiens
cactctgtgccggcc

SEQ ID NO: 1178003 - DNA, 15 bp, Homo sapiens
ccactctgtgccggc

SEQ ID NO: 1178004 - DNA, 15 bp, Homo sapiens
accactctgtgccgg

SEQ ID NO: 1178005 - DNA, 15 bp, Homo sapiens
aaccactctgtgccg

SEQ ID NO: 1178006 - DNA, 15 bp, Homo sapiens
gaaccactctgtgcc

SEQ ID NO: 1178007 - DNA, 15 bp, Homo sapiens
ggaaccactctgtgc

SEQ ID NO: 1178008 - DNA, 15 bp, Homo sapiens
aggaaccactctgtg

SEQ ID NO: 1178009 - DNA, 15 bp, Homo sapiens
gaggaaccactctgt

SEQ ID NO: 1178010 - DNA, 15 bp, Homo sapiens
agaggaaccactctg

SEQ ID NO: 1178011 - DNA, 15 bp, Homo sapiens
tagaggaaccactct

SEQ ID NO: 1178012 - DNA, 15 bp, Homo sapiens
ctagaggaaccactc

SEQ ID NO: 1178013 - DNA, 15 bp, Homo sapiens
cctagaggaaccact

SEQ ID NO: 1178014 - DNA, 15 bp, Homo sapiens
ccctagaggaaccac

SEQ ID NO: 1178015 - DNA, 15 bp, Homo sapiens
gccctagaggaacca

SEQ ID NO: 1178016 - DNA, 15 bp, Homo sapiens
ggccctagaggaacc

SEQ ID NO: 1178017 - DNA, 15 bp, Homo sapiens
aggccctagaggaac

SEQ ID NO: 1178018 - DNA, 15 bp, Homo sapiens
aaggccctagaggaa

SEQ ID NO: 1178019 - DNA, 15 bp, Homo sapiens
gaaggccctagagga

SEQ ID NO: 1178020 - DNA, 15 bp, Homo sapiens
agaaggccctagagg

SEQ ID NO: 1178021 - DNA, 15 bp, Homo sapiens
cagaaggccctagag

SEQ ID NO: 1178022 - DNA, 15 bp, Homo sapiens
acagaaggccctaga

SEQ ID NO: 1178023 - DNA, 15 bp, Homo sapiens
aacagaaggccctag

SEQ ID NO: 1178024 - DNA, 15 bp, Homo sapiens
caacagaaggcccta

SEQ ID NO: 1178025 - DNA, 15 bp, Homo sapiens
acaacagaaggccct

SEQ ID NO: 1178026 - DNA, 15 bp, Homo sapiens
gacaacagaaggccc

SEQ ID NO: 1178027 - DNA, 15 bp, Homo sapiens
cgacaacagaaggcc

SEQ ID NO: 1178028 - DNA, 15 bp, Homo sapiens
gcgacaacagaaggc

SEQ ID NO: 1178029 - DNA, 15 bp, Homo sapiens
ggcgacaacagaagg

SEQ ID NO: 1178030 - DNA, 15 bp, Homo sapiens
gggcgacaacagaag

SEQ ID NO: 1178031 - DNA, 15 bp, Homo sapiens
ggggcgacaacagaa

SEQ ID NO: 1178032 - DNA, 15 bp, Homo sapiens
cggggcgacaacaga

SEQ ID NO: 1178033 - DNA, 15 bp, Homo sapiens
gcggggcgacaacag

SEQ ID NO: 1178034 - DNA, 15 bp, Homo sapiens
tgcggggcgacaaca

SEQ ID NO: 1178035 - DNA, 15 bp, Homo sapiens
ctgcggggcgacaac

SEQ ID NO: 1178036 - DNA, 15 bp, Homo sapiens
cctgcggggcgacaa

SEQ ID NO: 1178037 - DNA, 15 bp, Homo sapiens
gcctgcggggcgaca

SEQ ID NO: 1178038 - DNA, 15 bp, Homo sapiens
agcctgcggggcgac

SEQ ID NO: 1178039 - DNA, 15 bp, Homo sapiens
gagcctgcggggcga

SEQ ID NO: 1178040 - DNA, 15 bp, Homo sapiens
ggagcctgcggggcg

SEQ ID NO: 1178041 - DNA, 15 bp, Homo sapiens
cggagcctgcggggc

SEQ ID NO: 1178042 - DNA, 15 bp, Homo sapiens
ccggagcctgcgggg

SEQ ID NO: 1178043 - DNA, 15 bp, Homo sapiens
cccggagcctgcggg

SEQ ID NO: 1178044 - DNA, 15 bp, Homo sapiens
tcccggagcctgcgg

SEQ ID NO: 1178045 - DNA, 15 bp, Homo sapiens
ttcccggagcctgcg

SEQ ID NO: 1178046 - DNA, 15 bp, Homo sapiens
tttcccggagcctgc

SEQ ID NO: 1178047 - DNA, 15 bp, Homo sapiens
ttttcccggagcctg

SEQ ID NO: 1178048 - DNA, 15 bp, Homo sapiens
gttttcccggagcct

SEQ ID NO: 1178049 - DNA, 15 bp, Homo sapiens
ggttttcccggagcc

SEQ ID NO: 1178050 - DNA, 15 bp, Homo sapiens
tggttttcccggagc

SEQ ID NO: 1178051 - DNA, 15 bp, Homo sapiens
gtggttttcccggag

SEQ ID NO: 1178052 - DNA, 15 bp, Homo sapiens
cgtggttttcccgga

SEQ ID NO: 1178053 - DNA, 15 bp, Homo sapiens
gcgtggttttcccgg

SEQ ID NO: 1178054 - DNA, 15 bp, Homo sapiens
agcgtggttttcccg

SEQ ID NO: 1178055 - DNA, 15 bp, Homo sapiens
cagcgtggttttccc

SEQ ID NO: 1178056 - DNA, 15 bp, Homo sapiens
gcagcgtggttttcc

SEQ ID NO: 1178057 - DNA, 15 bp, Homo sapiens
agcagcgtggttttc

SEQ ID NO: 1178058 - DNA, 15 bp, Homo sapiens
cagcagcgtggtttt

SEQ ID NO: 1178059 - DNA, 15 bp, Homo sapiens
ccagcagcgtggttt

SEQ ID NO: 1178060 - DNA, 15 bp, Homo sapiens
tccagcagcgtggtt

SEQ ID NO: 1178061 - DNA, 15 bp, Homo sapiens
gtccagcagcgtggt

SEQ ID NO: 1178062 - DNA, 15 bp, Homo sapiens
cgtccagcagcgtgg

SEQ ID NO: 1178063 - DNA, 15 bp, Homo sapiens
gcgtccagcagcgtg

SEQ ID NO: 1178064 - DNA, 15 bp, Homo sapiens
ggcgtccagcagcgt

SEQ ID NO: 1178065 - DNA, 15 bp, Homo sapiens
tggcgtccagcagcg

SEQ ID NO: 1178066 - DNA, 15 bp, Homo sapiens
atggcgtccagcagc

SEQ ID NO: 1178067 - DNA, 15 bp, Homo sapiens
catggcgtccagcag

SEQ ID NO: 1178068 - DNA, 15 bp, Homo sapiens
acatggcgtccagca

SEQ ID NO: 1178069 - DNA, 15 bp, Homo sapiens
gacatggcgtccagc

SEQ ID NO: 1178070 - DNA, 15 bp, Homo sapiens
ggacatggcgtccag

SEQ ID NO: 1178071 - DNA, 15 bp, Homo sapiens
cggacatggcgtcca

SEQ ID NO: 1178072 - DNA, 15 bp, Homo sapiens
ccggacatggcgtcc

SEQ ID NO: 1178073 - DNA, 15 bp, Homo sapiens
cccggacatggcgtc

SEQ ID NO: 1178074 - DNA, 15 bp, Homo sapiens
tcccggacatggcgt

SEQ ID NO: 1178075 - DNA, 15 bp, Homo sapiens
ctcccggacatggcg

SEQ ID NO: 1178076 - DNA, 15 bp, Homo sapiens
cctcccggacatggc

SEQ ID NO: 1178077 - DNA, 15 bp, Homo sapiens
gcctcccggacatgg

SEQ ID NO: 1178078 - DNA, 15 bp, Homo sapiens
agcctcccggacatg

SEQ ID NO: 1178079 - DNA, 15 bp, Homo sapiens
cagcctcccggacat

SEQ ID NO: 1178080 - DNA, 15 bp, Homo sapiens
ccagcctcccggaca

SEQ ID NO: 1178081 - DNA, 15 bp, Homo sapiens
cccagcctcccggac

SEQ ID NO: 1178082 - DNA, 15 bp, Homo sapiens
ccccagcctcccgga

SEQ ID NO: 1178083 - DNA, 15 bp, Homo sapiens
gccccagcctcccgg

SEQ ID NO: 1178084 - DNA, 15 bp, Homo sapiens
cgccccagcctcccg

SEQ ID NO: 1178085 - DNA, 15 bp, Homo sapiens
gcgccccagcctccc

SEQ ID NO: 1178086 - DNA, 15 bp, Homo sapiens
cgcgccccagcctcc

SEQ ID NO: 1178087 - DNA, 15 bp, Homo sapiens
gcgcgccccagcctc

SEQ ID NO: 1178088 - DNA, 15 bp, Homo sapiens
cgcgcgccccagcct

SEQ ID NO: 1178089 - DNA, 15 bp, Homo sapiens
ccgcgcgccccagcc

SEQ ID NO: 1178090 - DNA, 15 bp, Homo sapiens
cccgcgcgccccagc

SEQ ID NO: 1178091 - DNA, 15 bp, Homo sapiens
ccccgcgcgccccag

SEQ ID NO: 1178092 - DNA, 15 bp, Homo sapiens
tccccgcgcgcccca

SEQ ID NO: 1178093 - DNA, 15 bp, Homo sapiens
gtccccgcgcgcccc

SEQ ID NO: 1178094 - DNA, 15 bp, Homo sapiens
ggtccccgcgcgccc

SEQ ID NO: 1178095 - DNA, 15 bp, Homo sapiens
aggtccccgcgcgcc

SEQ ID NO: 1178096 - DNA, 15 bp, Homo sapiens
aaggtccccgcgcgc

SEQ ID NO: 1178097 - DNA, 15 bp, Homo sapiens
gaaggtccccgcgcg

SEQ ID NO: 1178098 - DNA, 15 bp, Homo sapiens
ggaaggtccccgcgc

SEQ ID NO: 1178099 - DNA, 15 bp, Homo sapiens
aggaaggtccccgcg

SEQ ID NO: 1178100 - DNA, 15 bp, Homo sapiens
caggaaggtccccgc

SEQ ID NO: 1178101 - DNA, 15 bp, Homo sapiens
ccaggaaggtccccg

SEQ ID NO: 1178102 - DNA, 15 bp, Homo sapiens
cccaggaaggtcccc

SEQ ID NO: 1178103 - DNA, 15 bp, Homo sapiens
ccccaggaaggtccc

SEQ ID NO: 1178104 - DNA, 15 bp, Homo sapiens
cccccaggaaggtcc

SEQ ID NO: 1178105 - DNA, 15 bp, Homo sapiens
tcccccaggaaggtc

SEQ ID NO: 1178106 - DNA, 15 bp, Homo sapiens
ctcccccaggaaggt

SEQ ID NO: 1178107 - DNA, 15 bp, Homo sapiens
cctcccccaggaagg

SEQ ID NO: 1178108 - DNA, 15 bp, Homo sapiens
acctcccccaggaag

SEQ ID NO: 1178109 - DNA, 15 bp, Homo sapiens
cacctcccccaggaa

SEQ ID NO: 1178110 - DNA, 15 bp, Homo sapiens
acacctcccccagga

SEQ ID NO: 1178111 - DNA, 15 bp, Homo sapiens
tacacctcccccagg

SEQ ID NO: 1178112 - DNA, 15 bp, Homo sapiens
atacacctcccccag

SEQ ID NO: 1178113 - DNA, 15 bp, Homo sapiens
catacacctccccca

SEQ ID NO: 1178114 - DNA, 15 bp, Homo sapiens
acatacacctccccc

SEQ ID NO: 1178115 - DNA, 15 bp, Homo sapiens
cacatacacctcccc

SEQ ID NO: 1178116 - DNA, 15 bp, Homo sapiens
tcacatacacctccc

SEQ ID NO: 1178117 - DNA, 15 bp, Homo sapiens
ttcacatacacctcc

SEQ ID NO: 1178118 - DNA, 15 bp, Homo sapiens
gttcacatacacctc

SEQ ID NO: 1178119 - DNA, 15 bp, Homo sapiens
cgttcacatacacct

SEQ ID NO: 1178120 - DNA, 15 bp, Homo sapiens
ccgttcacatacacc

SEQ ID NO: 1178121 - DNA, 15 bp, Homo sapiens
gccgttcacatacac

SEQ ID NO: 1178122 - DNA, 15 bp, Homo sapiens
ggccgttcacataca

SEQ ID NO: 1178123 - DNA, 15 bp, Homo sapiens
cggccgttcacatac

SEQ ID NO: 1178124 - DNA, 15 bp, Homo sapiens
ccggccgttcacata

SEQ ID NO: 1178125 - DNA, 15 bp, Homo sapiens
cccggccgttcacat

SEQ ID NO: 1178126 - DNA, 15 bp, Homo sapiens
gcccggccgttcaca

SEQ ID NO: 1178127 - DNA, 15 bp, Homo sapiens
cgcccggccgttcac

SEQ ID NO: 1178128 - DNA, 15 bp, Homo sapiens
gcgcccggccgttca

SEQ ID NO: 1178129 - DNA, 15 bp, Homo sapiens
agcgcccggccgttc

SEQ ID NO: 1178130 - DNA, 15 bp, Homo sapiens
cagcgcccggccgtt

SEQ ID NO: 1178131 - DNA, 15 bp, Homo sapiens
gcagcgcccggccgt

SEQ ID NO: 1178132 - DNA, 15 bp, Homo sapiens
cgcagcgcccggccg

SEQ ID NO: 1178133 - DNA, 15 bp, Homo sapiens
gcgcagcgcccggcc

SEQ ID NO: 1178134 - DNA, 15 bp, Homo sapiens
ggcgcagcgcccggc

SEQ ID NO: 1178135 - DNA, 15 bp, Homo sapiens
cggcgcagcgcccgg

SEQ ID NO: 1178136 - DNA, 15 bp, Homo sapiens
ccggcgcagcgcccg

SEQ ID NO: 1178137 - DNA, 15 bp, Homo sapiens
cccggcgcagcgccc

SEQ ID NO: 1178138 - DNA, 15 bp, Homo sapiens
tcccggcgcagcgcc

SEQ ID NO: 1178139 - DNA, 15 bp, Homo sapiens
ctcccggcgcagcgc

SEQ ID NO: 1178140 - DNA, 15 bp, Homo sapiens
gctcccggcgcagcg

SEQ ID NO: 1178141 - DNA, 15 bp, Homo sapiens
tgctcccggcgcagc

SEQ ID NO: 1178142 - DNA, 15 bp, Homo sapiens
ctgctcccggcgcag

SEQ ID NO: 1178143 - DNA, 15 bp, Homo sapiens
actgctcccggcgca

SEQ ID NO: 1178144 - DNA, 15 bp, Homo sapiens
aactgctcccggcgc

SEQ ID NO: 1178145 - DNA, 15 bp, Homo sapiens
gaactgctcccggcg

SEQ ID NO: 1178146 - DNA, 15 bp, Homo sapiens
ggaactgctcccggc

SEQ ID NO: 1178147 - DNA, 15 bp, Homo sapiens
tggaactgctcccgg

SEQ ID NO: 1178148 - DNA, 15 bp, Homo sapiens
ctggaactgctcccg

SEQ ID NO: 1178149 - DNA, 15 bp, Homo sapiens
cctggaactgctccc

SEQ ID NO: 1178150 - DNA, 15 bp, Homo sapiens
tcctggaactgctcc

SEQ ID NO: 1178151 - DNA, 15 bp, Homo sapiens
gtcctggaactgctc

SEQ ID NO: 1178152 - DNA, 15 bp, Homo sapiens
agtcctggaactgct

SEQ ID NO: 1178153 - DNA, 15 bp, Homo sapiens
cagtcctggaactgc

SEQ ID NO: 1178154 - DNA, 15 bp, Homo sapiens
gcagtcctggaactg

SEQ ID NO: 1178155 - DNA, 15 bp, Homo sapiens
agcagtcctggaact

SEQ ID NO: 1178156 - DNA, 15 bp, Homo sapiens
aagcagtcctggaac

SEQ ID NO: 1178157 - DNA, 15 bp, Homo sapiens
gaagcagtcctggaa

SEQ ID NO: 1178158 - DNA, 15 bp, Homo sapiens
agaagcagtcctgga

SEQ ID NO: 1178159 - DNA, 15 bp, Homo sapiens
gagaagcagtcctgg

SEQ ID NO: 1178160 - DNA, 15 bp, Homo sapiens
ggagaagcagtcctg

SEQ ID NO: 1178161 - DNA, 15 bp, Homo sapiens
aggagaagcagtcct

SEQ ID NO: 1178162 - DNA, 15 bp, Homo sapiens
taggagaagcagtcc

SEQ ID NO: 1178163 - DNA, 15 bp, Homo sapiens
gtaggagaagcagtc

SEQ ID NO: 1178164 - DNA, 15 bp, Homo sapiens
cgtaggagaagcagt

SEQ ID NO: 1178165 - DNA, 15 bp, Homo sapiens
acgtaggagaagcag

SEQ ID NO: 1178166 - DNA, 15 bp, Homo sapiens
gacgtaggagaagca

SEQ ID NO: 1178167 - DNA, 15 bp, Homo sapiens
ggacgtaggagaagc

SEQ ID NO: 1178168 - DNA, 15 bp, Homo sapiens
aggacgtaggagaag

SEQ ID NO: 1178169 - DNA, 15 bp, Homo sapiens
caggacgtaggagaa

SEQ ID NO: 1178170 - DNA, 15 bp, Homo sapiens
gcaggacgtaggaga

SEQ ID NO: 1178171 - DNA, 15 bp, Homo sapiens
tgcaggacgtaggag

SEQ ID NO: 1178172 - DNA, 15 bp, Homo sapiens
ctgcaggacgtagga

SEQ ID NO: 1178173 - DNA, 15 bp, Homo sapiens
cctgcaggacgtagg

SEQ ID NO: 1178174 - DNA, 15 bp, Homo sapiens
acctgcaggacgtag

SEQ ID NO: 1178175 - DNA, 15 bp, Homo sapiens
cacctgcaggacgta

SEQ ID NO: 1178176 - DNA, 15 bp, Homo sapiens
ccacctgcaggacgt

SEQ ID NO: 1178177 - DNA, 15 bp, Homo sapiens
cccacctgcaggacg

SEQ ID NO: 1178178 - DNA, 15 bp, Homo sapiens
gcccacctgcaggac

SEQ ID NO: 1178179 - DNA, 15 bp, Homo sapiens
cgcccacctgcagga

SEQ ID NO: 1178180 - DNA, 15 bp, Homo sapiens
gcgcccacctgcagg

SEQ ID NO: 1178181 - DNA, 15 bp, Homo sapiens
cgcgcccacctgcag

SEQ ID NO: 1178182 - DNA, 15 bp, Homo sapiens
acgcgcccacctgca

SEQ ID NO: 1178183 - DNA, 15 bp, Homo sapiens
gacgcgcccacctgc

SEQ ID NO: 1178184 - DNA, 15 bp, Homo sapiens
ggacgcgcccacctg

SEQ ID NO: 1178185 - DNA, 15 bp, Homo sapiens
gggacgcgcccacct

SEQ ID NO: 1178186 - DNA, 15 bp, Homo sapiens
ggggacgcgcccacc

SEQ ID NO: 1178187 - DNA, 15 bp, Homo sapiens
gggggacgcgcccac

SEQ ID NO: 1178188 - DNA, 15 bp, Homo sapiens
tgggggacgcgccca

SEQ ID NO: 1178189 - DNA, 15 bp, Homo sapiens
gtgggggacgcgccc

SEQ ID NO: 1178190 - DNA, 15 bp, Homo sapiens
tgtgggggacgcgcc

SEQ ID NO: 1178191 - DNA, 15 bp, Homo sapiens
gtgtgggggacgcgc

SEQ ID NO: 1178192 - DNA, 15 bp, Homo sapiens
ggtgtgggggacgcg

SEQ ID NO: 1178193 - DNA, 15 bp, Homo sapiens
gggtgtgggggacgc

SEQ ID NO: 1178194 - DNA, 15 bp, Homo sapiens
ggggtgtgggggacg

SEQ ID NO: 1178195 - DNA, 15 bp, Homo sapiens
aggggtgtgggggac

SEQ ID NO: 1178196 - DNA, 15 bp, Homo sapiens
caggggtgtggggga

SEQ ID NO: 1178197 - DNA, 15 bp, Homo sapiens
ccaggggtgtggggg

SEQ ID NO: 1178198 - DNA, 15 bp, Homo sapiens
gccaggggtgtgggg

SEQ ID NO: 1178199 - DNA, 15 bp, Homo sapiens
ggccaggggtgtggg

SEQ ID NO: 1178200 - DNA, 15 bp, Homo sapiens
gggccaggggtgtgg

SEQ ID NO: 1178201 - DNA, 15 bp, Homo sapiens
ggggccaggggtgtg

SEQ ID NO: 1178202 - DNA, 15 bp, Homo sapiens
gggggccaggggtgt

SEQ ID NO: 1178203 - DNA, 15 bp, Homo sapiens
ggggggccaggggtg

SEQ ID NO: 1178204 - DNA, 15 bp, Homo sapiens
gggggggccaggggt

SEQ ID NO: 1178205 - DNA, 15 bp, Homo sapiens
cgggggggccagggg

SEQ ID NO: 1178206 - DNA, 15 bp, Homo sapiens
gcgggggggccaggg

SEQ ID NO: 1178207 - DNA, 15 bp, Homo sapiens
ggcgggggggccagg

SEQ ID NO: 1178208 - DNA, 15 bp, Homo sapiens
gggcgggggggccag

SEQ ID NO: 1178209 - DNA, 15 bp, Homo sapiens
cgggcgggggggcca

SEQ ID NO: 1178210 - DNA, 15 bp, Homo sapiens
gcgggcgggggggcc

SEQ ID NO: 1178211 - DNA, 15 bp, Homo sapiens
ggcgggcgggggggc

SEQ ID NO: 1178212 - DNA, 15 bp, Homo sapiens
gggcgggcggggggg

SEQ ID NO: 1178213 - DNA, 15 bp, Homo sapiens
ggggcgggcgggggg

SEQ ID NO: 1178214 - DNA, 15 bp, Homo sapiens
cggggcgggcggggg

SEQ ID NO: 1178215 - DNA, 15 bp, Homo sapiens
ccggggcgggcgggg

SEQ ID NO: 1178216 - DNA, 15 bp, Homo sapiens
cccggggcgggcggg

SEQ ID NO: 1178217 - DNA, 15 bp, Homo sapiens
ccccggggcgggcgg

SEQ ID NO: 1178218 - DNA, 15 bp, Homo sapiens
cccccggggcgggcg

SEQ ID NO: 1178219 - DNA, 15 bp, Homo sapiens
gcccccggggcgggc

SEQ ID NO: 1178220 - DNA, 15 bp, Homo sapiens
agcccccggggcggg

SEQ ID NO: 1178221 - DNA, 15 bp, Homo sapiens
aagcccccggggcgg

SEQ ID NO: 1178222 - DNA, 15 bp, Homo sapiens
taagcccccggggcg

SEQ ID NO: 1178223 - DNA, 15 bp, Homo sapiens
ctaagcccccggggc

SEQ ID NO: 1178224 - DNA, 15 bp, Homo sapiens
cctaagcccccgggg

SEQ ID NO: 1178225 - DNA, 15 bp, Homo sapiens
gcctaagcccccggg

SEQ ID NO: 1178226 - DNA, 15 bp, Homo sapiens
agcctaagcccccgg

SEQ ID NO: 1178227 - DNA, 15 bp, Homo sapiens
tagcctaagcccccg

SEQ ID NO: 1178228 - DNA, 15 bp, Homo sapiens
gtagcctaagccccc

SEQ ID NO: 1178229 - DNA, 15 bp, Homo sapiens
tgtagcctaagcccc

SEQ ID NO: 1178230 - DNA, 15 bp, Homo sapiens
gtgtagcctaagccc

SEQ ID NO: 1178231 - DNA, 15 bp, Homo sapiens
agtgtagcctaagcc

SEQ ID NO: 1178232 - DNA, 15 bp, Homo sapiens
cagtgtagcctaagc

SEQ ID NO: 1178233 - DNA, 15 bp, Homo sapiens
tcagtgtagcctaag

SEQ ID NO: 1178234 - DNA, 15 bp, Homo sapiens
gtcagtgtagcctaa

SEQ ID NO: 1178235 - DNA, 15 bp, Homo sapiens
cgtcagtgtagccta

SEQ ID NO: 1178236 - DNA, 15 bp, Homo sapiens
gcgtcagtgtagcct

SEQ ID NO: 1178237 - DNA, 15 bp, Homo sapiens
ggcgtcagtgtagcc

SEQ ID NO: 1178238 - DNA, 15 bp, Homo sapiens
gggcgtcagtgtagc

SEQ ID NO: 1178239 - DNA, 15 bp, Homo sapiens
cgggcgtcagtgtag

SEQ ID NO: 1178240 - DNA, 15 bp, Homo sapiens
tcgggcgtcagtgta

SEQ ID NO: 1178241 - DNA, 15 bp, Homo sapiens
ctcgggcgtcagtgt

SEQ ID NO: 1178242 - DNA, 15 bp, Homo sapiens
actcgggcgtcagtg

SEQ ID NO: 1178243 - DNA, 15 bp, Homo sapiens
gactcgggcgtcagt

SEQ ID NO: 1178244 - DNA, 15 bp, Homo sapiens
agactcgggcgtcag

SEQ ID NO: 1178245 - DNA, 15 bp, Homo sapiens
gagactcgggcgtca

SEQ ID NO: 1178246 - DNA, 15 bp, Homo sapiens
ggagactcgggcgtc

SEQ ID NO: 1178247 - DNA, 15 bp, Homo sapiens
aggagactcgggcgt

SEQ ID NO: 1178248 - DNA, 15 bp, Homo sapiens
caggagactcgggcg

SEQ ID NO: 1178249 - DNA, 15 bp, Homo sapiens
gcaggagactcgggc

SEQ ID NO: 1178250 - DNA, 15 bp, Homo sapiens
tgcaggagactcggg

SEQ ID NO: 1178251 - DNA, 15 bp, Homo sapiens
ctgcaggagactcgg

SEQ ID NO: 1178252 - DNA, 15 bp, Homo sapiens
tctgcaggagactcg

SEQ ID NO: 1178253 - DNA, 15 bp, Homo sapiens
ctctgcaggagactc

SEQ ID NO: 1178254 - DNA, 15 bp, Homo sapiens
gctctgcaggagact

SEQ ID NO: 1178255 - DNA, 15 bp, Homo sapiens
cgctctgcaggagac

SEQ ID NO: 1178256 - DNA, 15 bp, Homo sapiens
tcgctctgcaggaga

SEQ ID NO: 1178257 - DNA, 15 bp, Homo sapiens
gtcgctctgcaggag

SEQ ID NO: 1178258 - DNA, 15 bp, Homo sapiens
tgtcgctctgcagga

SEQ ID NO: 1178259 - DNA, 15 bp, Homo sapiens
gtgtcgctctgcagg

SEQ ID NO: 1178260 - DNA, 15 bp, Homo sapiens
ggtgtcgctctgcag

SEQ ID NO: 1178261 - DNA, 15 bp, Homo sapiens
gggtgtcgctctgca

SEQ ID NO: 1178262 - DNA, 15 bp, Homo sapiens
agggtgtcgctctgc

SEQ ID NO: 1178263 - DNA, 15 bp, Homo sapiens
cagggtgtcgctctg

SEQ ID NO: 1178264 - DNA, 15 bp, Homo sapiens
gcagggtgtcgctct

SEQ ID NO: 1178265 - DNA, 15 bp, Homo sapiens
agcagggtgtcgctc

SEQ ID NO: 1178266 - DNA, 15 bp, Homo sapiens
cagcagggtgtcgct

SEQ ID NO: 1178267 - DNA, 15 bp, Homo sapiens
tcagcagggtgtcgc

SEQ ID NO: 1178268 - DNA, 15 bp, Homo sapiens
ctcagcagggtgtcg

SEQ ID NO: 1178269 - DNA, 15 bp, Homo sapiens
gctcagcagggtgtc

SEQ ID NO: 1178270 - DNA, 15 bp, Homo sapiens
tgctcagcagggtgt

SEQ ID NO: 1178271 - DNA, 15 bp, Homo sapiens
ctgctcagcagggtg

SEQ ID NO: 1178272 - DNA, 15 bp, Homo sapiens
gctgctcagcagggt

SEQ ID NO: 1178273 - DNA, 15 bp, Homo sapiens
ggctgctcagcaggg

SEQ ID NO: 1178274 - DNA, 15 bp, Homo sapiens
aggctgctcagcagg

SEQ ID NO: 1178275 - DNA, 15 bp, Homo sapiens
gaggctgctcagcag

SEQ ID NO: 1178276 - DNA, 15 bp, Homo sapiens
tgaggctgctcagca

SEQ ID NO: 1178277 - DNA, 15 bp, Homo sapiens
gtgaggctgctcagc

SEQ ID NO: 1178278 - DNA, 15 bp, Homo sapiens
ggtgaggctgctcag

SEQ ID NO: 1178279 - DNA, 15 bp, Homo sapiens
cggtgaggctgctca

SEQ ID NO: 1178280 - DNA, 15 bp, Homo sapiens
acggtgaggctgctc

SEQ ID NO: 1178281 - DNA, 15 bp, Homo sapiens
cacggtgaggctgct

SEQ ID NO: 1178282 - DNA, 15 bp, Homo sapiens
gcacggtgaggctgc

SEQ ID NO: 1178283 - DNA, 15 bp, Homo sapiens
cgcacggtgaggctg

SEQ ID NO: 1178284 - DNA, 15 bp, Homo sapiens
gcgcacggtgaggct

SEQ ID NO: 1178285 - DNA, 15 bp, Homo sapiens
cgcgcacggtgaggc

SEQ ID NO: 1178286 - DNA, 15 bp, Homo sapiens
tcgcgcacggtgagg

SEQ ID NO: 1178287 - DNA, 15 bp, Homo sapiens
ctcgcgcacggtgag

SEQ ID NO: 1178288 - DNA, 15 bp, Homo sapiens
tctcgcgcacggtga

SEQ ID NO: 1178289 - DNA, 15 bp, Homo sapiens
gtctcgcgcacggtg

SEQ ID NO: 1178290 - DNA, 15 bp, Homo sapiens
cgtctcgcgcacggt

SEQ ID NO: 1178291 - DNA, 15 bp, Homo sapiens
gcgtctcgcgcacgg

SEQ ID NO: 1178292 - DNA, 15 bp, Homo sapiens
agcgtctcgcgcacg

SEQ ID NO: 1178293 - DNA, 15 bp, Homo sapiens
cagcgtctcgcgcac

SEQ ID NO: 1178294 - DNA, 15 bp, Homo sapiens
gcagcgtctcgcgca

SEQ ID NO: 1178295 - DNA, 15 bp, Homo sapiens
tgcagcgtctcgcgc

SEQ ID NO: 1178296 - DNA, 15 bp, Homo sapiens
gtgcagcgtctcgcg

SEQ ID NO: 1178297 - DNA, 15 bp, Homo sapiens
agtgcagcgtctcgc

SEQ ID NO: 1178298 - DNA, 15 bp, Homo sapiens
tagtgcagcgtctcg

SEQ ID NO: 1178299 - DNA, 15 bp, Homo sapiens
gtagtgcagcgtctc

SEQ ID NO: 1178300 - DNA, 15 bp, Homo sapiens
tgtagtgcagcgtct

SEQ ID NO: 1178301 - DNA, 15 bp, Homo sapiens
gtgtagtgcagcgtc

SEQ ID NO: 1178302 - DNA, 15 bp, Homo sapiens
ggtgtagtgcagcgt

SEQ ID NO: 1178303 - DNA, 15 bp, Homo sapiens
cggtgtagtgcagcg

SEQ ID NO: 1178304 - DNA, 15 bp, Homo sapiens
gcggtgtagtgcagc

SEQ ID NO: 1178305 - DNA, 15 bp, Homo sapiens
cgcggtgtagtgcag

SEQ ID NO: 1178306 - DNA, 15 bp, Homo sapiens
gcgcggtgtagtgca

SEQ ID NO: 1178307 - DNA, 15 bp, Homo sapiens
agcgcggtgtagtgc

SEQ ID NO: 1178308 - DNA, 15 bp, Homo sapiens
cagcgcggtgtagtg

SEQ ID NO: 1178309 - DNA, 15 bp, Homo sapiens
gcagcgcggtgtagt

SEQ ID NO: 1178310 - DNA, 15 bp, Homo sapiens
agcagcgcggtgtag

SEQ ID NO: 1178311 - DNA, 15 bp, Homo sapiens
cagcagcgcggtgta

SEQ ID NO: 1178312 - DNA, 15 bp, Homo sapiens
ccagcagcgcggtgt

SEQ ID NO: 1178313 - DNA, 15 bp, Homo sapiens
gccagcagcgcggtg

SEQ ID NO: 1178314 - DNA, 15 bp, Homo sapiens
ggccagcagcgcggt

SEQ ID NO: 1178315 - DNA, 15 bp, Homo sapiens
tggccagcagcgcgg

SEQ ID NO: 1178316 - DNA, 15 bp, Homo sapiens
atggccagcagcgcg

SEQ ID NO: 1178317 - DNA, 15 bp, Homo sapiens
gatggccagcagcgc

SEQ ID NO: 1178318 - DNA, 15 bp, Homo sapiens
ggatggccagcagcg

SEQ ID NO: 1178319 - DNA, 15 bp, Homo sapiens
cggatggccagcagc

SEQ ID NO: 1178320 - DNA, 15 bp, Homo sapiens
gcggatggccagcag

SEQ ID NO: 1178321 - DNA, 15 bp, Homo sapiens
ggcggatggccagca

SEQ ID NO: 1178322 - DNA, 15 bp, Homo sapiens
cggcggatggccagc

SEQ ID NO: 1178323 - DNA, 15 bp, Homo sapiens
gcggcggatggccag

SEQ ID NO: 1178324 - DNA, 15 bp, Homo sapiens
cgcggcggatggcca

SEQ ID NO: 1178325 - DNA, 15 bp, Homo sapiens
ccgcggcggatggcc

SEQ ID NO: 1178326 - DNA, 15 bp, Homo sapiens
gccgcggcggatggc

SEQ ID NO: 1178327 - DNA, 15 bp, Homo sapiens
tgccgcggcggatgg

SEQ ID NO: 1178328 - DNA, 15 bp, Homo sapiens
ttgccgcggcggatg

SEQ ID NO: 1178329 - DNA, 15 bp, Homo sapiens
attgccgcggcggat

SEQ ID NO: 1178330 - DNA, 15 bp, Homo sapiens
gattgccgcggcgga

SEQ ID NO: 1178331 - DNA, 15 bp, Homo sapiens
ggattgccgcggcgg

SEQ ID NO: 1178332 - DNA, 15 bp, Homo sapiens
gggattgccgcggcg

SEQ ID NO: 1178333 - DNA, 15 bp, Homo sapiens
cgggattgccgcggc

SEQ ID NO: 1178334 - DNA, 15 bp, Homo sapiens
ccgggattgccgcgg

SEQ ID NO: 1178335 - DNA, 15 bp, Homo sapiens
gccgggattgccgcg

SEQ ID NO: 1178336 - DNA, 15 bp, Homo sapiens
agccgggattgccgc

SEQ ID NO: 1178337 - DNA, 15 bp, Homo sapiens
gagccgggattgccg

SEQ ID NO: 1178338 - DNA, 15 bp, Homo sapiens
ggagccgggattgcc

SEQ ID NO: 1178339 - DNA, 15 bp, Homo sapiens
aggagccgggattgc

SEQ ID NO: 1178340 - DNA, 15 bp, Homo sapiens
aaggagccgggattg

SEQ ID NO: 1178341 - DNA, 15 bp, Homo sapiens
gaaggagccgggatt

SEQ ID NO: 1178342 - DNA, 15 bp, Homo sapiens
ggaaggagccgggat

SEQ ID NO: 1178343 - DNA, 15 bp, Homo sapiens
tggaaggagccggga

SEQ ID NO: 1178344 - DNA, 15 bp, Homo sapiens
ctggaaggagccggg

SEQ ID NO: 1178345 - DNA, 15 bp, Homo sapiens
tctggaaggagccgg

SEQ ID NO: 1178346 - DNA, 15 bp, Homo sapiens
ttctggaaggagccg

SEQ ID NO: 1178347 - DNA, 15 bp, Homo sapiens
cttctggaaggagcc

SEQ ID NO: 1178348 - DNA, 15 bp, Homo sapiens
tcttctggaaggagc

SEQ ID NO: 1178349 - DNA, 15 bp, Homo sapiens
ttcttctggaaggag

SEQ ID NO: 1178350 - DNA, 15 bp, Homo sapiens
cttcttctggaagga

SEQ ID NO: 1178351 - DNA, 15 bp, Homo sapiens
ccttcttctggaagg

SEQ ID NO: 1178352 - DNA, 15 bp, Homo sapiens
accttcttctggaag

SEQ ID NO: 1178353 - DNA, 15 bp, Homo sapiens
caccttcttctggaa

SEQ ID NO: 1178354 - DNA, 15 bp, Homo sapiens
ccaccttcttctgga

SEQ ID NO: 1178355 - DNA, 15 bp, Homo sapiens
cccaccttcttctgg

SEQ ID NO: 1178356 - DNA, 15 bp, Homo sapiens
acccaccttcttctg

SEQ ID NO: 1178357 - DNA, 15 bp, Homo sapiens
cacccaccttcttct

SEQ ID NO: 1178358 - DNA, 15 bp, Homo sapiens
gcacccaccttcttc

SEQ ID NO: 1178359 - DNA, 15 bp, Homo sapiens
tgcacccaccttctt

SEQ ID NO: 1178360 - DNA, 15 bp, Homo sapiens
ctgcacccaccttct

SEQ ID NO: 1178361 - DNA, 15 bp, Homo sapiens
gctgcacccaccttc

SEQ ID NO: 1178362 - DNA, 15 bp, Homo sapiens
ggctgcacccacctt

SEQ ID NO: 1178363 - DNA, 15 bp, Homo sapiens
gggctgcacccacct

SEQ ID NO: 1178364 - DNA, 15 bp, Homo sapiens
ggggctgcacccacc

SEQ ID NO: 1178365 - DNA, 15 bp, Homo sapiens
gggggctgcacccac

SEQ ID NO: 1178366 - DNA, 15 bp, Homo sapiens
ggggggctgcaccca

SEQ ID NO: 1178367 - DNA, 15 bp, Homo sapiens
cggggggctgcaccc

SEQ ID NO: 1178368 - DNA, 15 bp, Homo sapiens
gcggggggctgcacc

SEQ ID NO: 1178369 - DNA, 15 bp, Homo sapiens
agcggggggctgcac

SEQ ID NO: 1178370 - DNA, 15 bp, Homo sapiens
gagcggggggctgca

SEQ ID NO: 1178371 - DNA, 15 bp, Homo sapiens
tgagcggggggctgc

SEQ ID NO: 1178372 - DNA, 15 bp, Homo sapiens
gtgagcggggggctg

SEQ ID NO: 1178373 - DNA, 15 bp, Homo sapiens
tgtgagcggggggct

SEQ ID NO: 1178374 - DNA, 15 bp, Homo sapiens
ctgtgagcggggggc

SEQ ID NO: 1178375 - DNA, 15 bp, Homo sapiens
tctgtgagcgggggg

SEQ ID NO: 1178376 - DNA, 15 bp, Homo sapiens
ctctgtgagcggggg

SEQ ID NO: 1178377 - DNA, 15 bp, Homo sapiens
cctctgtgagcgggg

SEQ ID NO: 1178378 - DNA, 15 bp, Homo sapiens
ccctctgtgagcggg

SEQ ID NO: 1178379 - DNA, 15 bp, Homo sapiens
gccctctgtgagcgg

SEQ ID NO: 1178380 - DNA, 15 bp, Homo sapiens
tgccctctgtgagcg

SEQ ID NO: 1178381 - DNA, 15 bp, Homo sapiens
ttgccctctgtgagc

SEQ ID NO: 1178382 - DNA, 15 bp, Homo sapiens
tttgccctctgtgag

SEQ ID NO: 1178383 - DNA, 15 bp, Homo sapiens
gtttgccctctgtga

SEQ ID NO: 1178384 - DNA, 15 bp, Homo sapiens
agtttgccctctgtg

SEQ ID NO: 1178385 - DNA, 15 bp, Homo sapiens
cagtttgccctctgt

SEQ ID NO: 1178386 - DNA, 15 bp, Homo sapiens
tcagtttgccctctg

SEQ ID NO: 1178387 - DNA, 15 bp, Homo sapiens
ctcagtttgccctct

SEQ ID NO: 1178388 - DNA, 15 bp, Homo sapiens
actcagtttgccctc

SEQ ID NO: 1178389 - DNA, 15 bp, Homo sapiens
tactcagtttgccct

SEQ ID NO: 1178390 - DNA, 15 bp, Homo sapiens
gtactcagtttgccc

SEQ ID NO: 1178391 - DNA, 15 bp, Homo sapiens
ggtactcagtttgcc

SEQ ID NO: 1178392 - DNA, 15 bp, Homo sapiens
aggtactcagtttgc

SEQ ID NO: 1178393 - DNA, 15 bp, Homo sapiens
aaggtactcagtttg

SEQ ID NO: 1178394 - DNA, 15 bp, Homo sapiens
aaaggtactcagttt

SEQ ID NO: 1178395 - DNA, 15 bp, Homo sapiens
caaaggtactcagtt

SEQ ID NO: 1178396 - DNA, 15 bp, Homo sapiens
gcaaaggtactcagt

SEQ ID NO: 1178397 - DNA, 15 bp, Homo sapiens
tgcaaaggtactcag

SEQ ID NO: 1178398 - DNA, 15 bp, Homo sapiens
gtgcaaaggtactca

SEQ ID NO: 1178399 - DNA, 15 bp, Homo sapiens
ggtgcaaaggtactc

SEQ ID NO: 1178400 - DNA, 15 bp, Homo sapiens
gggtgcaaaggtact

SEQ ID NO: 1178401 - DNA, 15 bp, Homo sapiens
ggggtgcaaaggtac

SEQ ID NO: 1178402 - DNA, 15 bp, Homo sapiens
gggggtgcaaaggta

SEQ ID NO: 1178403 - DNA, 15 bp, Homo sapiens
ggggggtgcaaaggt

SEQ ID NO: 1178404 - DNA, 15 bp, Homo sapiens
cggggggtgcaaagg

SEQ ID NO: 1178405 - DNA, 15 bp, Homo sapiens
gcggggggtgcaaag

SEQ ID NO: 1178406 - DNA, 15 bp, Homo sapiens
agcggggggtgcaaa

SEQ ID NO: 1178407 - DNA, 15 bp, Homo sapiens
cagcggggggtgcaa

SEQ ID NO: 1178408 - DNA, 15 bp, Homo sapiens
gcagcggggggtgca

SEQ ID NO: 1178409 - DNA, 15 bp, Homo sapiens
ggcagcggggggtgc

SEQ ID NO: 1178410 - DNA, 15 bp, Homo sapiens
gggcagcggggggtg

SEQ ID NO: 1178411 - DNA, 15 bp, Homo sapiens
agggcagcggggggt

SEQ ID NO: 1178412 - DNA, 15 bp, Homo sapiens
gagggcagcgggggg

SEQ ID NO: 1178413 - DNA, 15 bp, Homo sapiens
ggagggcagcggggg

SEQ ID NO: 1178414 - DNA, 15 bp, Homo sapiens
aggagggcagcgggg

SEQ ID NO: 1178415 - DNA, 15 bp, Homo sapiens
gaggagggcagcggg

SEQ ID NO: 1178416 - DNA, 15 bp, Homo sapiens
agaggagggcagcgg

SEQ ID NO: 1178417 - DNA, 15 bp, Homo sapiens
gagaggagggcagcg

SEQ ID NO: 1178418 - DNA, 15 bp, Homo sapiens
agagaggagggcagc

SEQ ID NO: 1178419 - DNA, 15 bp, Homo sapiens
aagagaggagggcag

SEQ ID NO: 1178420 - DNA, 15 bp, Homo sapiens
gaagagaggagggca

SEQ ID NO: 1178421 - DNA, 15 bp, Homo sapiens
cgaagagaggagggc

SEQ ID NO: 1178422 - DNA, 15 bp, Homo sapiens
gcgaagagaggaggg

SEQ ID NO: 1178423 - DNA, 15 bp, Homo sapiens
ggcgaagagaggagg

SEQ ID NO: 1178424 - DNA, 15 bp, Homo sapiens
aggcgaagagaggag

SEQ ID NO: 1178425 - DNA, 15 bp, Homo sapiens
taggcgaagagagga

SEQ ID NO: 1178426 - DNA, 15 bp, Homo sapiens
gtaggcgaagagagg

SEQ ID NO: 1178427 - DNA, 15 bp, Homo sapiens
cgtaggcgaagagag

SEQ ID NO: 1178428 - DNA, 15 bp, Homo sapiens
gcgtaggcgaagaga

SEQ ID NO: 1178429 - DNA, 15 bp, Homo sapiens
agcgtaggcgaagag

SEQ ID NO: 1178430 - DNA, 15 bp, Homo sapiens
aagcgtaggcgaaga

SEQ ID NO: 1178431 - DNA, 15 bp, Homo sapiens
caagcgtaggcgaag

SEQ ID NO: 1178432 - DNA, 15 bp, Homo sapiens
gcaagcgtaggcgaa

SEQ ID NO: 1178433 - DNA, 15 bp, Homo sapiens
ggcaagcgtaggcga

SEQ ID NO: 1178434 - DNA, 15 bp, Homo sapiens
gggcaagcgtaggcg

SEQ ID NO: 1178435 - DNA, 15 bp, Homo sapiens
tgggcaagcgtaggc

SEQ ID NO: 1178436 - DNA, 15 bp, Homo sapiens
atgggcaagcgtagg

SEQ ID NO: 1178437 - DNA, 15 bp, Homo sapiens
aatgggcaagcgtag

SEQ ID NO: 1178438 - DNA, 15 bp, Homo sapiens
gaatgggcaagcgta

SEQ ID NO: 1178439 - DNA, 15 bp, Homo sapiens
ggaatgggcaagcgt

SEQ ID NO: 1178440 - DNA, 15 bp, Homo sapiens
aggaatgggcaagcg

SEQ ID NO: 1178441 - DNA, 15 bp, Homo sapiens
aaggaatgggcaagc

SEQ ID NO: 1178442 - DNA, 15 bp, Homo sapiens
gaaggaatgggcaag

SEQ ID NO: 1178443 - DNA, 15 bp, Homo sapiens
ggaaggaatgggcaa

SEQ ID NO: 1178444 - DNA, 15 bp, Homo sapiens
gggaaggaatgggca

SEQ ID NO: 1178445 - DNA, 15 bp, Homo sapiens
agggaaggaatgggc

SEQ ID NO: 1178446 - DNA, 15 bp, Homo sapiens
aagggaaggaatggg

SEQ ID NO: 1178447 - DNA, 15 bp, Homo sapiens
aaagggaaggaatgg

SEQ ID NO: 1178448 - DNA, 15 bp, Homo sapiens
caaagggaaggaatg

SEQ ID NO: 1178449 - DNA, 15 bp, Homo sapiens
gcaaagggaaggaat

SEQ ID NO: 1178450 - DNA, 15 bp, Homo sapiens
agcaaagggaaggaa

SEQ ID NO: 1178451 - DNA, 15 bp, Homo sapiens
gagcaaagggaagga

SEQ ID NO: 1178452 - DNA, 15 bp, Homo sapiens
cgagcaaagggaagg

SEQ ID NO: 1178453 - DNA, 15 bp, Homo sapiens
acgagcaaagggaag

SEQ ID NO: 1178454 - DNA, 15 bp, Homo sapiens
gacgagcaaagggaa

SEQ ID NO: 1178455 - DNA, 15 bp, Homo sapiens
tgacgagcaaaggga

SEQ ID NO: 1178456 - DNA, 15 bp, Homo sapiens
gtgacgagcaaaggg

SEQ ID NO: 1178457 - DNA, 15 bp, Homo sapiens
agtgacgagcaaagg

SEQ ID NO: 1178458 - DNA, 15 bp, Homo sapiens
gagtgacgagcaaag

SEQ ID NO: 1178459 - DNA, 15 bp, Homo sapiens
ggagtgacgagcaaa

SEQ ID NO: 1178460 - DNA, 15 bp, Homo sapiens
aggagtgacgagcaa

SEQ ID NO: 1178461 - DNA, 15 bp, Homo sapiens
aaggagtgacgagca

SEQ ID NO: 1178462 - DNA, 15 bp, Homo sapiens
gaaggagtgacgagc

SEQ ID NO: 1178463 - DNA, 15 bp, Homo sapiens
tgaaggagtgacgag

SEQ ID NO: 1178464 - DNA, 15 bp, Homo sapiens
gtgaaggagtgacga

SEQ ID NO: 1178465 - DNA, 15 bp, Homo sapiens
agtgaaggagtgacg

SEQ ID NO: 1178466 - DNA, 15 bp, Homo sapiens
gagtgaaggagtgac

SEQ ID NO: 1178467 - DNA, 15 bp, Homo sapiens
agagtgaaggagtga

SEQ ID NO: 1178468 - DNA, 15 bp, Homo sapiens
tagagtgaaggagtg

SEQ ID NO: 1178469 - DNA, 15 bp, Homo sapiens
ctagagtgaaggagt

SEQ ID NO: 1178470 - DNA, 15 bp, Homo sapiens
tctagagtgaaggag

SEQ ID NO: 1178471 - DNA, 15 bp, Homo sapiens
ctctagagtgaagga

SEQ ID NO: 1178472 - DNA, 15 bp, Homo sapiens
gctctagagtgaagg

SEQ ID NO: 1178473 - DNA, 15 bp, Homo sapiens
cgctctagagtgaag

SEQ ID NO: 1178474 - DNA, 15 bp, Homo sapiens
gcgctctagagtgaa

SEQ ID NO: 1178475 - DNA, 15 bp, Homo sapiens
cgcgctctagagtga

SEQ ID NO: 1178476 - DNA, 15 bp, Homo sapiens
gcgcgctctagagtg

SEQ ID NO: 1178477 - DNA, 15 bp, Homo sapiens
ggcgcgctctagagt

SEQ ID NO: 1178478 - DNA, 15 bp, Homo sapiens
gggcgcgctctagag

SEQ ID NO: 1178479 - DNA, 15 bp, Homo sapiens
agggcgcgctctaga

SEQ ID NO: 1178480 - DNA, 15 bp, Homo sapiens
cagggcgcgctctag

SEQ ID NO: 1178481 - DNA, 15 bp, Homo sapiens
gcagggcgcgctcta

SEQ ID NO: 1178482 - DNA, 15 bp, Homo sapiens
cgcagggcgcgctct

SEQ ID NO: 1178483 - DNA, 15 bp, Homo sapiens
acgcagggcgcgctc

SEQ ID NO: 1178484 - DNA, 15 bp, Homo sapiens
gacgcagggcgcgct

SEQ ID NO: 1178485 - DNA, 15 bp, Homo sapiens
ggacgcagggcgcgc

SEQ ID NO: 1178486 - DNA, 15 bp, Homo sapiens
aggacgcagggcgcg

SEQ ID NO: 1178487 - DNA, 15 bp, Homo sapiens
caggacgcagggcgc

SEQ ID NO: 1178488 - DNA, 15 bp, Homo sapiens
gcaggacgcagggcg

SEQ ID NO: 1178489 - DNA, 15 bp, Homo sapiens
tgcaggacgcagggc

SEQ ID NO: 1178490 - DNA, 15 bp, Homo sapiens
gtgcaggacgcaggg

SEQ ID NO: 1178491 - DNA, 15 bp, Homo sapiens
ggtgcaggacgcagg

SEQ ID NO: 1178492 - DNA, 15 bp, Homo sapiens
cggtgcaggacgcag

SEQ ID NO: 1178493 - DNA, 15 bp, Homo sapiens
acggtgcaggacgca

SEQ ID NO: 1178494 - DNA, 15 bp, Homo sapiens
cacggtgcaggacgc

SEQ ID NO: 1178495 - DNA, 15 bp, Homo sapiens
gcacggtgcaggacg

SEQ ID NO: 1178496 - DNA, 15 bp, Homo sapiens
tgcacggtgcaggac

SEQ ID NO: 1178497 - DNA, 15 bp, Homo sapiens
gtgcacggtgcagga

SEQ ID NO: 1178498 - DNA, 15 bp, Homo sapiens
ggtgcacggtgcagg

SEQ ID NO: 1178499 - DNA, 15 bp, Homo sapiens
gggtgcacggtgcag

SEQ ID NO: 1178500 - DNA, 15 bp, Homo sapiens
agggtgcacggtgca

SEQ ID NO: 1178501 - DNA, 15 bp, Homo sapiens
cagggtgcacggtgc

SEQ ID NO: 1178502 - DNA, 15 bp, Homo sapiens
acagggtgcacggtg

SEQ ID NO: 1178503 - DNA, 15 bp, Homo sapiens
cacagggtgcacggt

SEQ ID NO: 1178504 - DNA, 15 bp, Homo sapiens
gcacagggtgcacgg

SEQ ID NO: 1178505 - DNA, 15 bp, Homo sapiens
agcacagggtgcacg

SEQ ID NO: 1178506 - DNA, 15 bp, Homo sapiens
cagcacagggtgcac

SEQ ID NO: 1178507 - DNA, 15 bp, Homo sapiens
gcagcacagggtgca

SEQ ID NO: 1178508 - DNA, 15 bp, Homo sapiens
ggcagcacagggtgc

SEQ ID NO: 1178509 - DNA, 15 bp, Homo sapiens
gggcagcacagggtg

SEQ ID NO: 1178510 - DNA, 15 bp, Homo sapiens
ggggcagcacagggt

SEQ ID NO: 1178511 - DNA, 15 bp, Homo sapiens
aggggcagcacaggg

SEQ ID NO: 1178512 - DNA, 15 bp, Homo sapiens
taggggcagcacagg

SEQ ID NO: 1178513 - DNA, 15 bp, Homo sapiens
ctaggggcagcacag

SEQ ID NO: 1178514 - DNA, 15 bp, Homo sapiens
actaggggcagcaca

SEQ ID NO: 1178515 - DNA, 15 bp, Homo sapiens
gactaggggcagcac

SEQ ID NO: 1178516 - DNA, 15 bp, Homo sapiens
tgactaggggcagca

SEQ ID NO: 1178517 - DNA, 15 bp, Homo sapiens
gtgactaggggcagc

SEQ ID NO: 1178518 - DNA, 15 bp, Homo sapiens
tgtgactaggggcag

SEQ ID NO: 1178519 - DNA, 15 bp, Homo sapiens
atgtgactaggggca

SEQ ID NO: 1178520 - DNA, 15 bp, Homo sapiens
catgtgactaggggc

SEQ ID NO: 1178521 - DNA, 15 bp, Homo sapiens
acatgtgactagggg

SEQ ID NO: 1178522 - DNA, 15 bp, Homo sapiens
cacatgtgactaggg

SEQ ID NO: 1178523 - DNA, 15 bp, Homo sapiens
gcacatgtgactagg

SEQ ID NO: 1178524 - DNA, 15 bp, Homo sapiens
ggcacatgtgactag

SEQ ID NO: 1178525 - DNA, 15 bp, Homo sapiens
aggcacatgtgacta

SEQ ID NO: 1178526 - DNA, 15 bp, Homo sapiens
aaggcacatgtgact

SEQ ID NO: 1178527 - DNA, 15 bp, Homo sapiens
aaaggcacatgtgac

SEQ ID NO: 1178528 - DNA, 15 bp, Homo sapiens
caaaggcacatgtga

SEQ ID NO: 1178529 - DNA, 15 bp, Homo sapiens
ccaaaggcacatgtg

SEQ ID NO: 1178530 - DNA, 15 bp, Homo sapiens
tccaaaggcacatgt

SEQ ID NO: 1178531 - DNA, 15 bp, Homo sapiens
ctccaaaggcacatg

SEQ ID NO: 1178532 - DNA, 15 bp, Homo sapiens
tctccaaaggcacat

SEQ ID NO: 1178533 - DNA, 15 bp, Homo sapiens
gtctccaaaggcaca

SEQ ID NO: 1178534 - DNA, 15 bp, Homo sapiens
agtctccaaaggcac

SEQ ID NO: 1178535 - DNA, 15 bp, Homo sapiens
aagtctccaaaggca

SEQ ID NO: 1178536 - DNA, 15 bp, Homo sapiens
caagtctccaaaggc

SEQ ID NO: 1178537 - DNA, 15 bp, Homo sapiens
tcaagtctccaaagg

SEQ ID NO: 1178538 - DNA, 15 bp, Homo sapiens
ttcaagtctccaaag

SEQ ID NO: 1178539 - DNA, 15 bp, Homo sapiens
tttcaagtctccaaa

SEQ ID NO: 1178540 - DNA, 15 bp, Homo sapiens
atttcaagtctccaa

SEQ ID NO: 1178541 - DNA, 15 bp, Homo sapiens
catttcaagtctcca

SEQ ID NO: 1178542 - DNA, 15 bp, Homo sapiens
acatttcaagtctcc

SEQ ID NO: 1178543 - DNA, 15 bp, Homo sapiens
gacatttcaagtctc

SEQ ID NO: 1178544 - DNA, 15 bp, Homo sapiens
tgacatttcaagtct

SEQ ID NO: 1178545 - DNA, 15 bp, Homo sapiens
gtgacatttcaagtc

SEQ ID NO: 1178546 - DNA, 15 bp, Homo sapiens
agtgacatttcaagt

SEQ ID NO: 1178547 - DNA, 15 bp, Homo sapiens
tagtgacatttcaag

SEQ ID NO: 1178548 - DNA, 15 bp, Homo sapiens
ctagtgacatttcaa

SEQ ID NO: 1178549 - DNA, 15 bp, Homo sapiens
actagtgacatttca

SEQ ID NO: 1178550 - DNA, 15 bp, Homo sapiens
gactagtgacatttc

SEQ ID NO: 1178551 - DNA, 15 bp, Homo sapiens
ggactagtgacattt

SEQ ID NO: 1178552 - DNA, 15 bp, Homo sapiens
tggactagtgacatt

SEQ ID NO: 1178553 - DNA, 15 bp, Homo sapiens
ctggactagtgacat

SEQ ID NO: 1178554 - DNA, 15 bp, Homo sapiens
tctggactagtgaca

SEQ ID NO: 1178555 - DNA, 15 bp, Homo sapiens
gtctggactagtgac

SEQ ID NO: 1178556 - DNA, 15 bp, Homo sapiens
agtctggactagtga

SEQ ID NO: 1178557 - DNA, 15 bp, Homo sapiens
cagtctggactagtg

SEQ ID NO: 1178558 - DNA, 15 bp, Homo sapiens
tcagtctggactagt

SEQ ID NO: 1178559 - DNA, 15 bp, Homo sapiens
ttcagtctggactag

SEQ ID NO: 1178560 - DNA, 15 bp, Homo sapiens
tttcagtctggacta

SEQ ID NO: 1178561 - DNA, 15 bp, Homo sapiens
gtttcagtctggact

SEQ ID NO: 1178562 - DNA, 15 bp, Homo sapiens
cgtttcagtctggac

SEQ ID NO: 1178563 - DNA, 15 bp, Homo sapiens
acgtttcagtctgga

SEQ ID NO: 1178564 - DNA, 15 bp, Homo sapiens
cacgtttcagtctgg

SEQ ID NO: 1178565 - DNA, 15 bp, Homo sapiens
gcacgtttcagtctg

SEQ ID NO: 1178566 - DNA, 15 bp, Homo sapiens
agcacgtttcagtct

SEQ ID NO: 1178567 - DNA, 15 bp, Homo sapiens
gagcacgtttcagtc

SEQ ID NO: 1178568 - DNA, 15 bp, Homo sapiens
agagcacgtttcagt

SEQ ID NO: 1178569 - DNA, 15 bp, Homo sapiens
cagagcacgtttcag

SEQ ID NO: 1178570 - DNA, 15 bp, Homo sapiens
tcagagcacgtttca

SEQ ID NO: 1178571 - DNA, 15 bp, Homo sapiens
ctcagagcacgtttc

SEQ ID NO: 1178572 - DNA, 15 bp, Homo sapiens
gctcagagcacgttt

SEQ ID NO: 1178573 - DNA, 15 bp, Homo sapiens
cgctcagagcacgtt

SEQ ID NO: 1178574 - DNA, 15 bp, Homo sapiens
gcgctcagagcacgt

SEQ ID NO: 1178575 - DNA, 15 bp, Homo sapiens
tgcgctcagagcacg

SEQ ID NO: 1178576 - DNA, 15 bp, Homo sapiens
ttgcgctcagagcac

SEQ ID NO: 1178577 - DNA, 15 bp, Homo sapiens
tttgcgctcagagca

SEQ ID NO: 1178578 - DNA, 15 bp, Homo sapiens
ttttgcgctcagagc

SEQ ID NO: 1178579 - DNA, 15 bp, Homo sapiens
attttgcgctcagag

SEQ ID NO: 1178580 - DNA, 15 bp, Homo sapiens
tattttgcgctcaga

SEQ ID NO: 1178581 - DNA, 15 bp, Homo sapiens
gtattttgcgctcag

SEQ ID NO: 1178582 - DNA, 15 bp, Homo sapiens
tgtattttgcgctca

SEQ ID NO: 1178583 - DNA, 15 bp, Homo sapiens
gtgtattttgcgctc

SEQ ID NO: 1178584 - DNA, 15 bp, Homo sapiens
tgtgtattttgcgct

SEQ ID NO: 1178585 - DNA, 15 bp, Homo sapiens
atgtgtattttgcgc

SEQ ID NO: 1178586 - DNA, 15 bp, Homo sapiens
gatgtgtattttgcg

SEQ ID NO: 1178587 - DNA, 15 bp, Homo sapiens
tgatgtgtattttgc

SEQ ID NO: 1178588 - DNA, 15 bp, Homo sapiens
ttgatgtgtattttg

SEQ ID NO: 1178589 - DNA, 15 bp, Homo sapiens
tttgatgtgtatttt

SEQ ID NO: 1178590 - DNA, 15 bp, Homo sapiens
atttgatgtgtattt

SEQ ID NO: 1178591 - DNA, 15 bp, Homo sapiens
aatttgatgtgtatt

SEQ ID NO: 1178592 - DNA, 15 bp, Homo sapiens
aaatttgatgtgtat

SEQ ID NO: 1178593 - DNA, 15 bp, Homo sapiens
gaaatttgatgtgta

SEQ ID NO: 1178594 - DNA, 15 bp, Homo sapiens
tgaaatttgatgtgt

SEQ ID NO: 1178595 - DNA, 15 bp, Homo sapiens
ctgaaatttgatgtg

SEQ ID NO: 1178596 - DNA, 15 bp, Homo sapiens
tctgaaatttgatgt

SEQ ID NO: 1178597 - DNA, 15 bp, Homo sapiens
gtctgaaatttgatg

SEQ ID NO: 1178598 - DNA, 15 bp, Homo sapiens
agtctgaaatttgat

SEQ ID NO: 1178599 - DNA, 15 bp, Homo sapiens
gagtctgaaatttga

SEQ ID NO: 1178600 - DNA, 15 bp, Homo sapiens
agagtctgaaatttg

SEQ ID NO: 1178601 - DNA, 15 bp, Homo sapiens
aagagtctgaaattt

SEQ ID NO: 1178602 - DNA, 15 bp, Homo sapiens
taagagtctgaaatt

SEQ ID NO: 1178603 - DNA, 15 bp, Homo sapiens
ctaagagtctgaaat

SEQ ID NO: 1178604 - DNA, 15 bp, Homo sapiens
actaagagtctgaaa

SEQ ID NO: 1178605 - DNA, 15 bp, Homo sapiens
gactaagagtctgaa

SEQ ID NO: 1178606 - DNA, 15 bp, Homo sapiens
agactaagagtctga

SEQ ID NO: 1178607 - DNA, 15 bp, Homo sapiens
cagactaagagtctg

SEQ ID NO: 1178608 - DNA, 15 bp, Homo sapiens
tcagactaagagtct

SEQ ID NO: 1178609 - DNA, 15 bp, Homo sapiens
ctcagactaagagtc

SEQ ID NO: 1178610 - DNA, 15 bp, Homo sapiens
cctcagactaagagt

SEQ ID NO: 1178611 - DNA, 15 bp, Homo sapiens
tcctcagactaagag

SEQ ID NO: 1178612 - DNA, 15 bp, Homo sapiens
ttcctcagactaaga

SEQ ID NO: 1178613 - DNA, 15 bp, Homo sapiens
tttcctcagactaag

SEQ ID NO: 1178614 - DNA, 15 bp, Homo sapiens
ttttcctcagactaa

SEQ ID NO: 1178615 - DNA, 15 bp, Homo sapiens
gttttcctcagacta

SEQ ID NO: 1178616 - DNA, 15 bp, Homo sapiens
tgttttcctcagact

SEQ ID NO: 1178617 - DNA, 15 bp, Homo sapiens
ctgttttcctcagac

SEQ ID NO: 1178618 - DNA, 15 bp, Homo sapiens
tctgttttcctcaga

SEQ ID NO: 1178619 - DNA, 15 bp, Homo sapiens
ttctgttttcctcag

SEQ ID NO: 1178620 - DNA, 15 bp, Homo sapiens
gttctgttttcctca

SEQ ID NO: 1178621 - DNA, 15 bp, Homo sapiens
cgttctgttttcctc

SEQ ID NO: 1178622 - DNA, 15 bp, Homo sapiens
acgttctgttttcct

SEQ ID NO: 1178623 - DNA, 15 bp, Homo sapiens
cacgttctgttttcc

SEQ ID NO: 1178624 - DNA, 15 bp, Homo sapiens
tcacgttctgttttc

SEQ ID NO: 1178625 - DNA, 15 bp, Homo sapiens
ttcacgttctgtttt

SEQ ID NO: 1178626 - DNA, 15 bp, Homo sapiens
tttcacgttctgttt

SEQ ID NO: 1178627 - DNA, 15 bp, Homo sapiens
ttttcacgttctgtt

SEQ ID NO: 1178628 - DNA, 15 bp, Homo sapiens
tttttcacgttctgt

SEQ ID NO: 1178629 - DNA, 15 bp, Homo sapiens
ctttttcacgttctg

SEQ ID NO: 1178630 - DNA, 15 bp, Homo sapiens
gctttttcacgttct

SEQ ID NO: 1178631 - DNA, 15 bp, Homo sapiens
ggctttttcacgttc

SEQ ID NO: 1178632 - DNA, 15 bp, Homo sapiens
gggctttttcacgtt

SEQ ID NO: 1178633 - DNA, 15 bp, Homo sapiens
tgggctttttcacgt

SEQ ID NO: 1178634 - DNA, 15 bp, Homo sapiens
atgggctttttcacg

SEQ ID NO: 1178635 - DNA, 15 bp, Homo sapiens
aatgggctttttcac

SEQ ID NO: 1178636 - DNA, 15 bp, Homo sapiens
taatgggctttttca

SEQ ID NO: 1178637 - DNA, 15 bp, Homo sapiens
ttaatgggctttttc

SEQ ID NO: 1178638 - DNA, 15 bp, Homo sapiens
cttaatgggcttttt

SEQ ID NO: 1178639 - DNA, 15 bp, Homo sapiens
tcttaatgggctttt

SEQ ID NO: 1178640 - DNA, 15 bp, Homo sapiens
ttcttaatgggcttt

SEQ ID NO: 1178641 - DNA, 15 bp, Homo sapiens
attcttaatgggctt

SEQ ID NO: 1178642 - DNA, 15 bp, Homo sapiens
aattcttaatgggct

SEQ ID NO: 1178643 - DNA, 15 bp, Homo sapiens
aaattcttaatgggc

SEQ ID NO: 1178644 - DNA, 15 bp, Homo sapiens
aaaattcttaatggg

SEQ ID NO: 1178645 - DNA, 15 bp, Homo sapiens
aaaaattcttaatgg

SEQ ID NO: 1178646 - DNA, 15 bp, Homo sapiens
taaaaattcttaatg

SEQ ID NO: 1178647 - DNA, 15 bp, Homo sapiens
ctaaaaattcttaat

SEQ ID NO: 1178648 - DNA, 15 bp, Homo sapiens
cctaaaaattcttaa

SEQ ID NO: 1178649 - DNA, 15 bp, Homo sapiens
acctaaaaattctta

SEQ ID NO: 1178650 - DNA, 15 bp, Homo sapiens
gacctaaaaattctt

SEQ ID NO: 1178651 - DNA, 15 bp, Homo sapiens
cgacctaaaaattct

SEQ ID NO: 1178652 - DNA, 15 bp, Homo sapiens
ccgacctaaaaattc

SEQ ID NO: 1178653 - DNA, 15 bp, Homo sapiens
cccgacctaaaaatt

SEQ ID NO: 1178654 - DNA, 15 bp, Homo sapiens
gcccgacctaaaaat

SEQ ID NO: 1178655 - DNA, 15 bp, Homo sapiens
tgcccgacctaaaaa

SEQ ID NO: 1178656 - DNA, 15 bp, Homo sapiens
ctgcccgacctaaaa

SEQ ID NO: 1178657 - DNA, 15 bp, Homo sapiens
cctgcccgacctaaa

SEQ ID NO: 1178658 - DNA, 15 bp, Homo sapiens
ccctgcccgacctaa

SEQ ID NO: 1178659 - DNA, 15 bp, Homo sapiens
accctgcccgaccta

SEQ ID NO: 1178660 - DNA, 15 bp, Homo sapiens
caccctgcccgacct

SEQ ID NO: 1178661 - DNA, 15 bp, Homo sapiens
ccaccctgcccgacc

SEQ ID NO: 1178662 - DNA, 15 bp, Homo sapiens
gccaccctgcccgac

SEQ ID NO: 1178663 - DNA, 15 bp, Homo sapiens
agccaccctgcccga

SEQ ID NO: 1178664 - DNA, 15 bp, Homo sapiens
gagccaccctgcccg

SEQ ID NO: 1178665 - DNA, 15 bp, Homo sapiens
atgagccaccctgcc

SEQ ID NO: 1178666 - DNA, 15 bp, Homo sapiens
tatgagccaccctgc

SEQ ID NO: 1178667 - DNA, 15 bp, Homo sapiens
gtatgagccaccctg

SEQ ID NO: 1178668 - DNA, 15 bp, Homo sapiens
ggtatgagccaccct

SEQ ID NO: 1178669 - DNA, 15 bp, Homo sapiens
aggtatgagccaccc

SEQ ID NO: 1178670 - DNA, 15 bp, Homo sapiens
caggtatgagccacc

SEQ ID NO: 1178671 - DNA, 15 bp, Homo sapiens
gggattacaggtatg

SEQ ID NO: 1178672 - DNA, 15 bp, Homo sapiens
tgggattacaggtat

SEQ ID NO: 1178673 - DNA, 15 bp, Homo sapiens
ctgggattacaggta

SEQ ID NO: 1178674 - DNA, 15 bp, Homo sapiens
ggccttccaaagtgc

SEQ ID NO: 1178675 - DNA, 15 bp, Homo sapiens
tggccttccaaagtg

SEQ ID NO: 1178676 - DNA, 15 bp, Homo sapiens
ttggccttccaaagt

SEQ ID NO: 1178677 - DNA, 15 bp, Homo sapiens
cttggccttccaaag

SEQ ID NO: 1178678 - DNA, 15 bp, Homo sapiens
tcttggccttccaaa

SEQ ID NO: 1178679 - DNA, 15 bp, Homo sapiens
atcttggccttccaa

SEQ ID NO: 1178680 - DNA, 15 bp, Homo sapiens
catcttggccttcca

SEQ ID NO: 1178681 - DNA, 15 bp, Homo sapiens
ccatcttggccttcc

SEQ ID NO: 1178682 - DNA, 15 bp, Homo sapiens
cccatcttggccttc

SEQ ID NO: 1178683 - DNA, 15 bp, Homo sapiens
tcccatcttggcctt

SEQ ID NO: 1178684 - DNA, 15 bp, Homo sapiens
ctcccatcttggcct

SEQ ID NO: 1178685 - DNA, 15 bp, Homo sapiens
cctcccatcttggcc

SEQ ID NO: 1178686 - DNA, 15 bp, Homo sapiens
tcctcccatcttggc

SEQ ID NO: 1178687 - DNA, 15 bp, Homo sapiens
atcctcccatcttgg

SEQ ID NO: 1178688 - DNA, 15 bp, Homo sapiens
aatcctcccatcttg

SEQ ID NO: 1178689 - DNA, 15 bp, Homo sapiens
caatcctcccatctt

SEQ ID NO: 1178690 - DNA, 15 bp, Homo sapiens
gcaatcctcccatct

SEQ ID NO: 1178691 - DNA, 15 bp, Homo sapiens
agcaatcctcccatc

SEQ ID NO: 1178692 - DNA, 15 bp, Homo sapiens
aagcaatcctcccat

SEQ ID NO: 1178693 - DNA, 15 bp, Homo sapiens
actcaagcaatcctc

SEQ ID NO: 1178694 - DNA, 15 bp, Homo sapiens
gactcaagcaatcct

SEQ ID NO: 1178695 - DNA, 15 bp, Homo sapiens
agactcaagcaatcc

SEQ ID NO: 1178696 - DNA, 15 bp, Homo sapiens
tagactcaagcaatc

SEQ ID NO: 1178697 - DNA, 15 bp, Homo sapiens
ctagactcaagcaat

SEQ ID NO: 1178698 - DNA, 15 bp, Homo sapiens
tctagactcaagcaa

SEQ ID NO: 1178699 - DNA, 15 bp, Homo sapiens
ttctagactcaagca

SEQ ID NO: 1178700 - DNA, 15 bp, Homo sapiens
cttctagactcaagc

SEQ ID NO: 1178701 - DNA, 15 bp, Homo sapiens
acttctagactcaag

SEQ ID NO: 1178702 - DNA, 15 bp, Homo sapiens
aacttctagactcaa

SEQ ID NO: 1178703 - DNA, 15 bp, Homo sapiens
aaacttctagactca

SEQ ID NO: 1178704 - DNA, 15 bp, Homo sapiens
caaacttctagactc

SEQ ID NO: 1178705 - DNA, 15 bp, Homo sapiens
tcaaacttctagact

SEQ ID NO: 1178706 - DNA, 15 bp, Homo sapiens
ctcaaacttctagac

SEQ ID NO: 1178707 - DNA, 15 bp, Homo sapiens
tctcaaacttctaga

SEQ ID NO: 1178708 - DNA, 15 bp, Homo sapiens
gtctcaaacttctag

SEQ ID NO: 1178709 - DNA, 15 bp, Homo sapiens
ggtctcaaacttcta

SEQ ID NO: 1178710 - DNA, 15 bp, Homo sapiens
tggtctcaaacttct

SEQ ID NO: 1178711 - DNA, 15 bp, Homo sapiens
ctggtctcaaacttc

SEQ ID NO: 1178712 - DNA, 15 bp, Homo sapiens
gctggtctcaaactt

SEQ ID NO: 1178713 - DNA, 15 bp, Homo sapiens
ctcgctatgttgccc

SEQ ID NO: 1178714 - DNA, 15 bp, Homo sapiens
tctcgctatgttgcc

SEQ ID NO: 1178715 - DNA, 15 bp, Homo sapiens
gtctcgctatgttgc

SEQ ID NO: 1178716 - DNA, 15 bp, Homo sapiens
agtctcgctatgttg

SEQ ID NO: 1178717 - DNA, 15 bp, Homo sapiens
gagtctcgctatgtt

SEQ ID NO: 1178718 - DNA, 15 bp, Homo sapiens
tgagtctcgctatgt

SEQ ID NO: 1178719 - DNA, 15 bp, Homo sapiens
ctgagtctcgctatg

SEQ ID NO: 1178720 - DNA, 15 bp, Homo sapiens
actgagtctcgctat

SEQ ID NO: 1178721 - DNA, 15 bp, Homo sapiens
gactgagtctcgcta

SEQ ID NO: 1178722 - DNA, 15 bp, Homo sapiens
agactgagtctcgct

SEQ ID NO: 1178723 - DNA, 15 bp, Homo sapiens
gagactgagtctcgc

SEQ ID NO: 1178724 - DNA, 15 bp, Homo sapiens
agagactgagtctcg

SEQ ID NO: 1178725 - DNA, 15 bp, Homo sapiens
tagagactgagtctc

SEQ ID NO: 1178726 - DNA, 15 bp, Homo sapiens
atagagactgagtct

SEQ ID NO: 1178727 - DNA, 15 bp, Homo sapiens
tatagagactgagtc

SEQ ID NO: 1178728 - DNA, 15 bp, Homo sapiens
ttatagagactgagt

SEQ ID NO: 1178729 - DNA, 15 bp, Homo sapiens
tttatagagactgag

SEQ ID NO: 1178730 - DNA, 15 bp, Homo sapiens
ttttatagagactga

SEQ ID NO: 1178731 - DNA, 15 bp, Homo sapiens
tttttatagagactg

SEQ ID NO: 1178732 - DNA, 15 bp, Homo sapiens
ttttttatagagact

SEQ ID NO: 1178733 - DNA, 15 bp, Homo sapiens
attttttatagagac

SEQ ID NO: 1178734 - DNA, 15 bp, Homo sapiens
tattttttatagaga

SEQ ID NO: 1178735 - DNA, 15 bp, Homo sapiens
gtattttttatagag

SEQ ID NO: 1178736 - DNA, 15 bp, Homo sapiens
tgtattttttataga

SEQ ID NO: 1178737 - DNA, 15 bp, Homo sapiens
ttgtattttttatag

SEQ ID NO: 1178738 - DNA, 15 bp, Homo sapiens
tttgtattttttata

SEQ ID NO: 1178739 - DNA, 15 bp, Homo sapiens
actaatttttgtatt

SEQ ID NO: 1178740 - DNA, 15 bp, Homo sapiens
aactaatttttgtat

SEQ ID NO: 1178741 - DNA, 15 bp, Homo sapiens
caactaatttttgta

SEQ ID NO: 1178742 - DNA, 15 bp, Homo sapiens
ccaactaatttttgt

SEQ ID NO: 1178743 - DNA, 15 bp, Homo sapiens
tccaactaatttttg

SEQ ID NO: 1178744 - DNA, 15 bp, Homo sapiens
gtccaactaattttt

SEQ ID NO: 1178745 - DNA, 15 bp, Homo sapiens
cgtccaactaatttt

SEQ ID NO: 1178746 - DNA, 15 bp, Homo sapiens
acgtccaactaattt

SEQ ID NO: 1178747 - DNA, 15 bp, Homo sapiens
cacgtccaactaatt

SEQ ID NO: 1178748 - DNA, 15 bp, Homo sapiens
ccacgtccaactaat

SEQ ID NO: 1178749 - DNA, 15 bp, Homo sapiens
accacgtccaactaa

SEQ ID NO: 1178750 - DNA, 15 bp, Homo sapiens
caccacgtccaacta

SEQ ID NO: 1178751 - DNA, 15 bp, Homo sapiens
tcaccacgtccaact

SEQ ID NO: 1178752 - DNA, 15 bp, Homo sapiens
atcaccacgtccaac

SEQ ID NO: 1178753 - DNA, 15 bp, Homo sapiens
catcaccacgtccaa

SEQ ID NO: 1178754 - DNA, 15 bp, Homo sapiens
acatcaccacgtcca

SEQ ID NO: 1178755 - DNA, 15 bp, Homo sapiens
cacatcaccacgtcc

SEQ ID NO: 1178756 - DNA, 15 bp, Homo sapiens
gcacatcaccacgtc

SEQ ID NO: 1178757 - DNA, 15 bp, Homo sapiens
cgcacatcaccacgt

SEQ ID NO: 1178758 - DNA, 15 bp, Homo sapiens
gcgcacatcaccacg

SEQ ID NO: 1178759 - DNA, 15 bp, Homo sapiens
ggcgcacatcaccac

SEQ ID NO: 1178760 - DNA, 15 bp, Homo sapiens
aggcgcacatcacca

SEQ ID NO: 1178761 - DNA, 15 bp, Homo sapiens
caggcgcacatcacc

SEQ ID NO: 1178762 - DNA, 15 bp, Homo sapiens
gcaggcgcacatcac

SEQ ID NO: 1178763 - DNA, 15 bp, Homo sapiens
tgcaggcgcacatca

SEQ ID NO: 1178764 - DNA, 15 bp, Homo sapiens
gtgcaggcgcacatc

SEQ ID NO: 1178765 - DNA, 15 bp, Homo sapiens
agtgcaggcgcacat

SEQ ID NO: 1178766 - DNA, 15 bp, Homo sapiens
gagtgcaggcgcaca

SEQ ID NO: 1178767 - DNA, 15 bp, Homo sapiens
ggagtgcaggcgcac

SEQ ID NO: 1178768 - DNA, 15 bp, Homo sapiens
gggagtgcaggcgca

SEQ ID NO: 1178769 - DNA, 15 bp, Homo sapiens
tgggagtgcaggcgc

SEQ ID NO: 1178770 - DNA, 15 bp, Homo sapiens
ctgggagtgcaggcg

SEQ ID NO: 1178771 - DNA, 15 bp, Homo sapiens
gctgggagtgcaggc

SEQ ID NO: 1178772 - DNA, 15 bp, Homo sapiens
agctgggagtgcagg

SEQ ID NO: 1178773 - DNA, 15 bp, Homo sapiens
cagctgggagtgcag

SEQ ID NO: 1178774 - DNA, 15 bp, Homo sapiens
gcagctgggagtgca

SEQ ID NO: 1178775 - DNA, 15 bp, Homo sapiens
agcagctgggagtgc

SEQ ID NO: 1178776 - DNA, 15 bp, Homo sapiens
tagcagctgggagtg

SEQ ID NO: 1178777 - DNA, 15 bp, Homo sapiens
ttagcagctgggagt

SEQ ID NO: 1178778 - DNA, 15 bp, Homo sapiens
cttagcagctgggag

SEQ ID NO: 1178779 - DNA, 15 bp, Homo sapiens
ccttagcagctggga

SEQ ID NO: 1178780 - DNA, 15 bp, Homo sapiens
tccttagcagctggg

SEQ ID NO: 1178781 - DNA, 15 bp, Homo sapiens
ctccttagcagctgg

SEQ ID NO: 1178782 - DNA, 15 bp, Homo sapiens
cctccttagcagctg

SEQ ID NO: 1178783 - DNA, 15 bp, Homo sapiens
gcctccttagcagct

SEQ ID NO: 1178784 - DNA, 15 bp, Homo sapiens
agcctccttagcagc

SEQ ID NO: 1178785 - DNA, 15 bp, Homo sapiens
cagcctccttagcag

SEQ ID NO: 1178786 - DNA, 15 bp, Homo sapiens
tcagcctccttagca

SEQ ID NO: 1178787 - DNA, 15 bp, Homo sapiens
ctcagcctccttagc

SEQ ID NO: 1178788 - DNA, 15 bp, Homo sapiens
cctcagcctccttag

SEQ ID NO: 1178789 - DNA, 15 bp, Homo sapiens
gcctcagcctcctta

SEQ ID NO: 1178790 - DNA, 15 bp, Homo sapiens
tgcctcagcctcctt

SEQ ID NO: 1178791 - DNA, 15 bp, Homo sapiens
agatcctcctgcctc

SEQ ID NO: 1178792 - DNA, 15 bp, Homo sapiens
gagatcctcctgcct

SEQ ID NO: 1178793 - DNA, 15 bp, Homo sapiens
agagatcctcctgcc

SEQ ID NO: 1178794 - DNA, 15 bp, Homo sapiens
aagagatcctcctgc

SEQ ID NO: 1178795 - DNA, 15 bp, Homo sapiens
caagagatcctcctg

SEQ ID NO: 1178796 - DNA, 15 bp, Homo sapiens
tcaagagatcctcct

SEQ ID NO: 1178797 - DNA, 15 bp, Homo sapiens
ttcaagagatcctcc

SEQ ID NO: 1178798 - DNA, 15 bp, Homo sapiens
gttcaagagatcctc

SEQ ID NO: 1178799 - DNA, 15 bp, Homo sapiens
ggttcaagagatcct

SEQ ID NO: 1178800 - DNA, 15 bp, Homo sapiens
gggttcaagagatcc

SEQ ID NO: 1178801 - DNA, 15 bp, Homo sapiens
tgggttcaagagatc

SEQ ID NO: 1178802 - DNA, 15 bp, Homo sapiens
ctgggttcaagagat

SEQ ID NO: 1178803 - DNA, 15 bp, Homo sapiens
cctgggttcaagaga

SEQ ID NO: 1178804 - DNA, 15 bp, Homo sapiens
tcctgggttcaagag

SEQ ID NO: 1178805 - DNA, 15 bp, Homo sapiens
gacctcctgggttca

SEQ ID NO: 1178806 - DNA, 15 bp, Homo sapiens
cgacctcctgggttc

SEQ ID NO: 1178807 - DNA, 15 bp, Homo sapiens
tcgacctcctgggtt

SEQ ID NO: 1178808 - DNA, 15 bp, Homo sapiens
ctcgacctcctgggt

SEQ ID NO: 1178809 - DNA, 15 bp, Homo sapiens
gctgcagcctcgacc

SEQ ID NO: 1178810 - DNA, 15 bp, Homo sapiens
cgctgcagcctcgac

SEQ ID NO: 1178811 - DNA, 15 bp, Homo sapiens
tcgctgcagcctcga

SEQ ID NO: 1178812 - DNA, 15 bp, Homo sapiens
ctcgctgcagcctcg

SEQ ID NO: 1178813 - DNA, 15 bp, Homo sapiens
gctcgctgcagcctc

SEQ ID NO: 1178814 - DNA, 15 bp, Homo sapiens
ggctcgctgcagcct

SEQ ID NO: 1178815 - DNA, 15 bp, Homo sapiens
tggctcgctgcagcc

SEQ ID NO: 1178816 - DNA, 15 bp, Homo sapiens
atggctcgctgcagc

SEQ ID NO: 1178817 - DNA, 15 bp, Homo sapiens
catggctcgctgcag

SEQ ID NO: 1178818 - DNA, 15 bp, Homo sapiens
tcatggctcgctgca

SEQ ID NO: 1178819 - DNA, 15 bp, Homo sapiens
atcatggctcgctgc

SEQ ID NO: 1178820 - DNA, 15 bp, Homo sapiens
aatcatggctcgctg

SEQ ID NO: 1178821 - DNA, 15 bp, Homo sapiens
caatcatggctcgct

SEQ ID NO: 1178822 - DNA, 15 bp, Homo sapiens
gcaatcatggctcgc

SEQ ID NO: 1178823 - DNA, 15 bp, Homo sapiens
tgcaatcatggctcg

SEQ ID NO: 1178824 - DNA, 15 bp, Homo sapiens
gtgcaatcatggctc

SEQ ID NO: 1178825 - DNA, 15 bp, Homo sapiens
ggtgcaatcatggct

SEQ ID NO: 1178826 - DNA, 15 bp, Homo sapiens
tggtgcaatcatggc

SEQ ID NO: 1178827 - DNA, 15 bp, Homo sapiens
atggtgcaatcatgg

SEQ ID NO: 1178828 - DNA, 15 bp, Homo sapiens
aatggtgcaatcatg

SEQ ID NO: 1178829 - DNA, 15 bp, Homo sapiens
caatggtgcaatcat

SEQ ID NO: 1178830 - DNA, 15 bp, Homo sapiens
gcaatggtgcaatca

SEQ ID NO: 1178831 - DNA, 15 bp, Homo sapiens
ttcaggctggagtgc

SEQ ID NO: 1178832 - DNA, 15 bp, Homo sapiens
cttcaggctggagtg

SEQ ID NO: 1178833 - DNA, 15 bp, Homo sapiens
ccttcaggctggagt

SEQ ID NO: 1178834 - DNA, 15 bp, Homo sapiens
tccttcaggctggag

SEQ ID NO: 1178835 - DNA, 15 bp, Homo sapiens
gtccttcaggctgga

SEQ ID NO: 1178836 - DNA, 15 bp, Homo sapiens
tgtccttcaggctgg

SEQ ID NO: 1178837 - DNA, 15 bp, Homo sapiens
ttgtccttcaggctg

SEQ ID NO: 1178838 - DNA, 15 bp, Homo sapiens
tttgtccttcaggct

SEQ ID NO: 1178839 - DNA, 15 bp, Homo sapiens
ttttgtccttcaggc

SEQ ID NO: 1178840 - DNA, 15 bp, Homo sapiens
tttttgtccttcagg

SEQ ID NO: 1178841 - DNA, 15 bp, Homo sapiens
ctttttgtccttcag

SEQ ID NO: 1178842 - DNA, 15 bp, Homo sapiens
tctttttgtccttca

SEQ ID NO: 1178843 - DNA, 15 bp, Homo sapiens
tctctttttgtcctt

SEQ ID NO: 1178844 - DNA, 15 bp, Homo sapiens
gtctctttttgtcct

SEQ ID NO: 1178845 - DNA, 15 bp, Homo sapiens
agtctctttttgtcc

SEQ ID NO: 1178846 - DNA, 15 bp, Homo sapiens
gagtctctttttgtc

SEQ ID NO: 1178847 - DNA, 15 bp, Homo sapiens
agagtctctttttgt

SEQ ID NO: 1178848 - DNA, 15 bp, Homo sapiens
cagagtctctttttg

SEQ ID NO: 1178849 - DNA, 15 bp, Homo sapiens
acagagtctcttttt

SEQ ID NO: 1178850 - DNA, 15 bp, Homo sapiens
gacagagtctctttt

SEQ ID NO: 1178851 - DNA, 15 bp, Homo sapiens
agacagagtctcttt

SEQ ID NO: 1178852 - DNA, 15 bp, Homo sapiens
gagacagagtctctt

SEQ ID NO: 1178853 - DNA, 15 bp, Homo sapiens
agagacagagtctct

SEQ ID NO: 1178854 - DNA, 15 bp, Homo sapiens
gagagacagagtctc

SEQ ID NO: 1178855 - DNA, 15 bp, Homo sapiens
ggagagacagagtct

SEQ ID NO: 1178856 - DNA, 15 bp, Homo sapiens
gggagagacagagtc

SEQ ID NO: 1178857 - DNA, 15 bp, Homo sapiens
tgggagagacagagt

SEQ ID NO: 1178858 - DNA, 15 bp, Homo sapiens
ttgggagagacagag

SEQ ID NO: 1178859 - DNA, 15 bp, Homo sapiens
gttgggagagacaga

SEQ ID NO: 1178860 - DNA, 15 bp, Homo sapiens
ggttgggagagacag

SEQ ID NO: 1178861 - DNA, 15 bp, Homo sapiens
tggttgggagagaca

SEQ ID NO: 1178862 - DNA, 15 bp, Homo sapiens
ttggttgggagagac

SEQ ID NO: 1178863 - DNA, 15 bp, Homo sapiens
tttggttgggagaga

SEQ ID NO: 1178864 - DNA, 15 bp, Homo sapiens
atttggttgggagag

SEQ ID NO: 1178865 - DNA, 15 bp, Homo sapiens
tatttggttgggaga

SEQ ID NO: 1178866 - DNA, 15 bp, Homo sapiens
ttatttggttgggag

SEQ ID NO: 1178867 - DNA, 15 bp, Homo sapiens
tttatttggttggga

SEQ ID NO: 1178868 - DNA, 15 bp, Homo sapiens
atttatttggttggg

SEQ ID NO: 1178869 - DNA, 15 bp, Homo sapiens
tatttatttggttgg

SEQ ID NO: 1178870 - DNA, 15 bp, Homo sapiens
ttatttatttggttg

SEQ ID NO: 1178871 - DNA, 15 bp, Homo sapiens
tttatttatttggtt

SEQ ID NO: 1178872 - DNA, 15 bp, Homo sapiens
atttatttatttggt

SEQ ID NO: 1178873 - DNA, 15 bp, Homo sapiens
tatttatttatttgg

SEQ ID NO: 1178874 - DNA, 15 bp, Homo sapiens
aatttatttatttat

SEQ ID NO: 1178875 - DNA, 15 bp, Homo sapiens
aaatttatttattta

SEQ ID NO: 1178876 - DNA, 15 bp, Homo sapiens
gaaatttatttattt

SEQ ID NO: 1178877 - DNA, 15 bp, Homo sapiens
tgaaatttatttatt

SEQ ID NO: 1178878 - DNA, 15 bp, Homo sapiens
ttgaaatttatttat

SEQ ID NO: 1178879 - DNA, 15 bp, Homo sapiens
tttgaaatttattta

SEQ ID NO: 1178880 - DNA, 15 bp, Homo sapiens
ttttgaaatttattt

SEQ ID NO: 1178881 - DNA, 15 bp, Homo sapiens
tttttgaaatttatt

SEQ ID NO: 1178882 - DNA, 15 bp, Homo sapiens
ctttttgaaatttat

SEQ ID NO: 1178883 - DNA, 15 bp, Homo sapiens
actttttgaaattta

SEQ ID NO: 1178884 - DNA, 15 bp, Homo sapiens
tactttttgaaattt

SEQ ID NO: 1178885 - DNA, 15 bp, Homo sapiens
atactttttgaaatt

SEQ ID NO: 1178886 - DNA, 15 bp, Homo sapiens
aatactttttgaaat

SEQ ID NO: 1178887 - DNA, 15 bp, Homo sapiens
caatactttttgaaa

SEQ ID NO: 1178888 - DNA, 15 bp, Homo sapiens
tcaatactttttgaa

SEQ ID NO: 1178889 - DNA, 15 bp, Homo sapiens
atcaatactttttga

SEQ ID NO: 1178890 - DNA, 15 bp, Homo sapiens
aatcaatactttttg

SEQ ID NO: 1178891 - DNA, 15 bp, Homo sapiens
taatcaatacttttt

SEQ ID NO: 1178892 - DNA, 15 bp, Homo sapiens
gtaatcaatactttt

SEQ ID NO: 1178893 - DNA, 15 bp, Homo sapiens
tgtaatcaatacttt

SEQ ID NO: 1178894 - DNA, 15 bp, Homo sapiens
ctgtaatcaatactt

SEQ ID NO: 1178895 - DNA, 15 bp, Homo sapiens
cctgtaatcaatact

SEQ ID NO: 1178896 - DNA, 15 bp, Homo sapiens
acctgtaatcaatac

SEQ ID NO: 1178897 - DNA, 15 bp, Homo sapiens
aacctgtaatcaata

SEQ ID NO: 1178898 - DNA, 15 bp, Homo sapiens
caacctgtaatcaat

SEQ ID NO: 1178899 - DNA, 15 bp, Homo sapiens
tcaacctgtaatcaa

SEQ ID NO: 1178900 - DNA, 15 bp, Homo sapiens
ttcaacctgtaatca

SEQ ID NO: 1178901 - DNA, 15 bp, Homo sapiens
tttcaacctgtaatc

SEQ ID NO: 1178902 - DNA, 15 bp, Homo sapiens
atttcaacctgtaat

SEQ ID NO: 1178903 - DNA, 15 bp, Homo sapiens
catttcaacctgtaa

SEQ ID NO: 1178904 - DNA, 15 bp, Homo sapiens
ccatttcaacctgta

SEQ ID NO: 1178905 - DNA, 15 bp, Homo sapiens
accatttcaacctgt

SEQ ID NO: 1178906 - DNA, 15 bp, Homo sapiens
taccatttcaacctg

SEQ ID NO: 1178907 - DNA, 15 bp, Homo sapiens
ataccatttcaacct

SEQ ID NO: 1178908 - DNA, 15 bp, Homo sapiens
aataccatttcaacc

SEQ ID NO: 1178909 - DNA, 15 bp, Homo sapiens
aaataccatttcaac

SEQ ID NO: 1178910 - DNA, 15 bp, Homo sapiens
aaaataccatttcaa

SEQ ID NO: 1178911 - DNA, 15 bp, Homo sapiens
aaaaataccatttca

SEQ ID NO: 1178912 - DNA, 15 bp, Homo sapiens
caaaaataccatttc

SEQ ID NO: 1178913 - DNA, 15 bp, Homo sapiens
ccaaaaataccattt

SEQ ID NO: 1178914 - DNA, 15 bp, Homo sapiens
gccaaaaataccatt

SEQ ID NO: 1178915 - DNA, 15 bp, Homo sapiens
agccaaaaataccat

SEQ ID NO: 1178916 - DNA, 15 bp, Homo sapiens
cagccaaaaatacca

SEQ ID NO: 1178917 - DNA, 15 bp, Homo sapiens
acagccaaaaatacc

SEQ ID NO: 1178918 - DNA, 15 bp, Homo sapiens
tacagccaaaaatac

SEQ ID NO: 1178919 - DNA, 15 bp, Homo sapiens
ttacagccaaaaata

SEQ ID NO: 1178920 - DNA, 15 bp, Homo sapiens
tttacagccaaaaat

SEQ ID NO: 1178921 - DNA, 15 bp, Homo sapiens
atttacagccaaaaa

SEQ ID NO: 1178922 - DNA, 15 bp, Homo sapiens
tatttacagccaaaa

SEQ ID NO: 1178923 - DNA, 15 bp, Homo sapiens
ttatttacagccaaa

SEQ ID NO: 1178924 - DNA, 15 bp, Homo sapiens
attatttacagccaa

SEQ ID NO: 1178925 - DNA, 15 bp, Homo sapiens
tattatttacagcca

SEQ ID NO: 1178926 - DNA, 15 bp, Homo sapiens
atattatttacagcc

SEQ ID NO: 1178927 - DNA, 15 bp, Homo sapiens
catattatttacagc

SEQ ID NO: 1178928 - DNA, 15 bp, Homo sapiens
acatattatttacag

SEQ ID NO: 1178929 - DNA, 15 bp, Homo sapiens
aacatattatttaca

SEQ ID NO: 1178930 - DNA, 15 bp, Homo sapiens
taacatattatttac

SEQ ID NO: 1178931 - DNA, 15 bp, Homo sapiens
ataacatattattta

SEQ ID NO: 1178932 - DNA, 15 bp, Homo sapiens
aataacatattattt

SEQ ID NO: 1178933 - DNA, 15 bp, Homo sapiens
taataacatattatt

SEQ ID NO: 1178934 - DNA, 15 bp, Homo sapiens
ttaataacatattat

SEQ ID NO: 1178935 - DNA, 15 bp, Homo sapiens
tttaataacatatta

SEQ ID NO: 1178936 - DNA, 15 bp, Homo sapiens
ttttaataacatatt

SEQ ID NO: 1178937 - DNA, 15 bp, Homo sapiens
attttaataacatat

SEQ ID NO: 1178938 - DNA, 15 bp, Homo sapiens
aattttaataacata

SEQ ID NO: 1178939 - DNA, 15 bp, Homo sapiens
taattttaataacat

SEQ ID NO: 1178940 - DNA, 15 bp, Homo sapiens
ttaattttaataaca

SEQ ID NO: 1178941 - DNA, 15 bp, Homo sapiens
attaattttaataac

SEQ ID NO: 1178942 - DNA, 15 bp, Homo sapiens
ggtgaaattaatttt

SEQ ID NO: 1178943 - DNA, 15 bp, Homo sapiens
aggtgaaattaattt

SEQ ID NO: 1178944 - DNA, 15 bp, Homo sapiens
caggtgaaattaatt

SEQ ID NO: 1178945 - DNA, 15 bp, Homo sapiens
acaggtgaaattaat

SEQ ID NO: 1178946 - DNA, 15 bp, Homo sapiens
aacaggtgaaattaa

SEQ ID NO: 1178947 - DNA, 15 bp, Homo sapiens
aaacaggtgaaatta

SEQ ID NO: 1178948 - DNA, 15 bp, Homo sapiens
gaaacaggtgaaatt

SEQ ID NO: 1178949 - DNA, 15 bp, Homo sapiens
agaaacaggtgaaat

SEQ ID NO: 1178950 - DNA, 15 bp, Homo sapiens
aagaaacaggtgaaa

SEQ ID NO: 1178951 - DNA, 15 bp, Homo sapiens
aaagaaacaggtgaa

SEQ ID NO: 1178952 - DNA, 15 bp, Homo sapiens
aaaagaaacaggtga

SEQ ID NO: 1178953 - DNA, 15 bp, Homo sapiens
taaaaagaaacaggt

SEQ ID NO: 1178954 - DNA, 15 bp, Homo sapiens
gtaaaaagaaacagg

SEQ ID NO: 1178955 - DNA, 15 bp, Homo sapiens
agtaaaaagaaacag

SEQ ID NO: 1178956 - DNA, 15 bp, Homo sapiens
aagtaaaaagaaaca

SEQ ID NO: 1178957 - DNA, 15 bp, Homo sapiens
aaagtaaaaagaaac

SEQ ID NO: 1178958 - DNA, 15 bp, Homo sapiens
tgaaaagtaaaaaga

SEQ ID NO: 1178959 - DNA, 15 bp, Homo sapiens
ttgaaaagtaaaaag

SEQ ID NO: 1178960 - DNA, 15 bp, Homo sapiens
tttgaaaagtaaaaa

SEQ ID NO: 1178961 - DNA, 15 bp, Homo sapiens
ttttgaaaagtaaaa

SEQ ID NO: 1178962 - DNA, 15 bp, Homo sapiens
attttgaaaagtaaa

SEQ ID NO: 1178963 - DNA, 15 bp, Homo sapiens
aattttgaaaagtaa

SEQ ID NO: 1178964 - DNA, 15 bp, Homo sapiens
aaattttgaaaagta

SEQ ID NO: 1178965 - DNA, 15 bp, Homo sapiens
caaattttgaaaagt

SEQ ID NO: 1178966 - DNA, 15 bp, Homo sapiens
ccaaattttgaaaag

SEQ ID NO: 1178967 - DNA, 15 bp, Homo sapiens
gccaaattttgaaaa

SEQ ID NO: 1178968 - DNA, 15 bp, Homo sapiens
agccaaattttgaaa

SEQ ID NO: 1178969 - DNA, 15 bp, Homo sapiens
tagccaaattttgaa

SEQ ID NO: 1178970 - DNA, 15 bp, Homo sapiens
gtagccaaattttga

SEQ ID NO: 1178971 - DNA, 15 bp, Homo sapiens
agtagccaaattttg

SEQ ID NO: 1178972 - DNA, 15 bp, Homo sapiens
tagtagccaaatttt

SEQ ID NO: 1178973 - DNA, 15 bp, Homo sapiens
ttagtagccaaattt

SEQ ID NO: 1178974 - DNA, 15 bp, Homo sapiens
tttagtagccaaatt

SEQ ID NO: 1178975 - DNA, 15 bp, Homo sapiens
ttttagtagccaaat

SEQ ID NO: 1178976 - DNA, 15 bp, Homo sapiens
attttagtagccaaa

SEQ ID NO: 1178977 - DNA, 15 bp, Homo sapiens
aattttagtagccaa

SEQ ID NO: 1178978 - DNA, 15 bp, Homo sapiens
aaattttagtagcca

SEQ ID NO: 1178979 - DNA, 15 bp, Homo sapiens
gaaattttagtagcc

SEQ ID NO: 1178980 - DNA, 15 bp, Homo sapiens
tgaaattttagtagc

SEQ ID NO: 1178981 - DNA, 15 bp, Homo sapiens
gtgaaattttagtag

SEQ ID NO: 1178982 - DNA, 15 bp, Homo sapiens
agtgaaattttagta

SEQ ID NO: 1178983 - DNA, 15 bp, Homo sapiens
aagtgaaattttagt

SEQ ID NO: 1178984 - DNA, 15 bp, Homo sapiens
gaagtgaaattttag

SEQ ID NO: 1178985 - DNA, 15 bp, Homo sapiens
agaagtgaaatttta

SEQ ID NO: 1178986 - DNA, 15 bp, Homo sapiens
cagaagtgaaatttt

SEQ ID NO: 1178987 - DNA, 15 bp, Homo sapiens
acagaagtgaaattt

SEQ ID NO: 1178988 - DNA, 15 bp, Homo sapiens
gacagaagtgaaatt

SEQ ID NO: 1178989 - DNA, 15 bp, Homo sapiens
agacagaagtgaaat

SEQ ID NO: 1178990 - DNA, 15 bp, Homo sapiens
cagacagaagtgaaa

SEQ ID NO: 1178991 - DNA, 15 bp, Homo sapiens
acagacagaagtgaa

SEQ ID NO: 1178992 - DNA, 15 bp, Homo sapiens
cacagacagaagtga

SEQ ID NO: 1178993 - DNA, 15 bp, Homo sapiens
ccacagacagaagtg

SEQ ID NO: 1178994 - DNA, 15 bp, Homo sapiens
gccacagacagaagt

SEQ ID NO: 1178995 - DNA, 15 bp, Homo sapiens
agccacagacagaag

SEQ ID NO: 1178996 - DNA, 15 bp, Homo sapiens
aagccacagacagaa

SEQ ID NO: 1178997 - DNA, 15 bp, Homo sapiens
caagccacagacaga

SEQ ID NO: 1178998 - DNA, 15 bp, Homo sapiens
gcaagccacagacag

SEQ ID NO: 1178999 - DNA, 15 bp, Homo sapiens
tgcaagccacagaca

SEQ ID NO: 1179000 - DNA, 15 bp, Homo sapiens
atgcaagccacagac

SEQ ID NO: 1179001 - DNA, 15 bp, Homo sapiens
aatgcaagccacaga

SEQ ID NO: 1179002 - DNA, 15 bp, Homo sapiens
taatgcaagccacag

SEQ ID NO: 1179003 - DNA, 15 bp, Homo sapiens
gtaatgcaagccaca

SEQ ID NO: 1179004 - DNA, 15 bp, Homo sapiens
ggtaatgcaagccac

SEQ ID NO: 1179005 - DNA, 15 bp, Homo sapiens
gggtaatgcaagcca

SEQ ID NO: 1179006 - DNA, 15 bp, Homo sapiens
agggtaatgcaagcc

SEQ ID NO: 1179007 - DNA, 15 bp, Homo sapiens
aagggtaatgcaagc

SEQ ID NO: 1179008 - DNA, 15 bp, Homo sapiens
gaagggtaatgcaag

SEQ ID NO: 1179009 - DNA, 15 bp, Homo sapiens
agaagggtaatgcaa

SEQ ID NO: 1179010 - DNA, 15 bp, Homo sapiens
gagaagggtaatgca

SEQ ID NO: 1179011 - DNA, 15 bp, Homo sapiens
agagaagggtaatgc

SEQ ID NO: 1179012 - DNA, 15 bp, Homo sapiens
cagagaagggtaatg

SEQ ID NO: 1179013 - DNA, 15 bp, Homo sapiens
ccagagaagggtaat

SEQ ID NO: 1179014 - DNA, 15 bp, Homo sapiens
cccagagaagggtaa

SEQ ID NO: 1179015 - DNA, 15 bp, Homo sapiens
tcccagagaagggta

SEQ ID NO: 1179016 - DNA, 15 bp, Homo sapiens
gtcccagagaagggt

SEQ ID NO: 1179017 - DNA, 15 bp, Homo sapiens
ggtcccagagaaggg

SEQ ID NO: 1179018 - DNA, 15 bp, Homo sapiens
tggtcccagagaagg

SEQ ID NO: 1179019 - DNA, 15 bp, Homo sapiens
atggtcccagagaag

SEQ ID NO: 1179020 - DNA, 15 bp, Homo sapiens
catggtcccagagaa

SEQ ID NO: 1179021 - DNA, 15 bp, Homo sapiens
gcatggtcccagaga

SEQ ID NO: 1179022 - DNA, 15 bp, Homo sapiens
agcatggtcccagag

SEQ ID NO: 1179023 - DNA, 15 bp, Homo sapiens
cagcatggtcccaga

SEQ ID NO: 1179024 - DNA, 15 bp, Homo sapiens
acagcatggtcccag

SEQ ID NO: 1179025 - DNA, 15 bp, Homo sapiens
aacagcatggtccca

SEQ ID NO: 1179026 - DNA, 15 bp, Homo sapiens
gaacagcatggtccc

SEQ ID NO: 1179027 - DNA, 15 bp, Homo sapiens
agaacagcatggtcc

SEQ ID NO: 1179028 - DNA, 15 bp, Homo sapiens
tagaacagcatggtc

SEQ ID NO: 1179029 - DNA, 15 bp, Homo sapiens
gtagaacagcatggt

SEQ ID NO: 1179030 - DNA, 15 bp, Homo sapiens
tgtagaacagcatgg

SEQ ID NO: 1179031 - DNA, 15 bp, Homo sapiens
ttgtagaacagcatg

SEQ ID NO: 1179032 - DNA, 15 bp, Homo sapiens
cttgtagaacagcat

SEQ ID NO: 1179033 - DNA, 15 bp, Homo sapiens
acttgtagaacagca

SEQ ID NO: 1179034 - DNA, 15 bp, Homo sapiens
aacttgtagaacagc

SEQ ID NO: 1179035 - DNA, 15 bp, Homo sapiens
gaacttgtagaacag

SEQ ID NO: 1179036 - DNA, 15 bp, Homo sapiens
ggaacttgtagaaca

SEQ ID NO: 1179037 - DNA, 15 bp, Homo sapiens
gggaacttgtagaac

SEQ ID NO: 1179038 - DNA, 15 bp, Homo sapiens
agggaacttgtagaa

SEQ ID NO: 1179039 - DNA, 15 bp, Homo sapiens
cagggaacttgtaga

SEQ ID NO: 1179040 - DNA, 15 bp, Homo sapiens
acagggaacttgtag

SEQ ID NO: 1179041 - DNA, 15 bp, Homo sapiens
aacagggaacttgta

SEQ ID NO: 1179042 - DNA, 15 bp, Homo sapiens
aaacagggaacttgt

SEQ ID NO: 1179043 - DNA, 15 bp, Homo sapiens
caaacagggaacttg

SEQ ID NO: 1179044 - DNA, 15 bp, Homo sapiens
tcaaacagggaactt

SEQ ID NO: 1179045 - DNA, 15 bp, Homo sapiens
ttcaaacagggaact

SEQ ID NO: 1179046 - DNA, 15 bp, Homo sapiens
gttcaaacagggaac

SEQ ID NO: 1179047 - DNA, 15 bp, Homo sapiens
tgttcaaacagggaa

SEQ ID NO: 1179048 - DNA, 15 bp, Homo sapiens
ctgttcaaacaggga

SEQ ID NO: 1179049 - DNA, 15 bp, Homo sapiens
tctgttcaaacaggg

SEQ ID NO: 1179050 - DNA, 15 bp, Homo sapiens
gtctgttcaaacagg

SEQ ID NO: 1179051 - DNA, 15 bp, Homo sapiens
tgtctgttcaaacag

SEQ ID NO: 1179052 - DNA, 15 bp, Homo sapiens
atgtctgttcaaaca

SEQ ID NO: 1179053 - DNA, 15 bp, Homo sapiens
tatgtctgttcaaac

SEQ ID NO: 1179054 - DNA, 15 bp, Homo sapiens
ctatgtctgttcaaa

SEQ ID NO: 1179055 - DNA, 15 bp, Homo sapiens
actatgtctgttcaa

SEQ ID NO: 1179056 - DNA, 15 bp, Homo sapiens
aactatgtctgttca

SEQ ID NO: 1179057 - DNA, 15 bp, Homo sapiens
taactatgtctgttc

SEQ ID NO: 1179058 - DNA, 15 bp, Homo sapiens
ataactatgtctgtt

SEQ ID NO: 1179059 - DNA, 15 bp, Homo sapiens
aataactatgtctgt

SEQ ID NO: 1179060 - DNA, 15 bp, Homo sapiens
aaataactatgtctg

SEQ ID NO: 1179061 - DNA, 15 bp, Homo sapiens
aaaataactatgtct

SEQ ID NO: 1179062 - DNA, 15 bp, Homo sapiens
aaaaataactatgtc

SEQ ID NO: 1179063 - DNA, 15 bp, Homo sapiens
caaaaataactatgt

SEQ ID NO: 1179064 - DNA, 15 bp, Homo sapiens
gcaaaaataactatg

SEQ ID NO: 1179065 - DNA, 15 bp, Homo sapiens
ggcaaaaataactat

SEQ ID NO: 1179066 - DNA, 15 bp, Homo sapiens
tggcaaaaataacta

SEQ ID NO: 1179067 - DNA, 15 bp, Homo sapiens
gtggcaaaaataact

SEQ ID NO: 1179068 - DNA, 15 bp, Homo sapiens
agtggcaaaaataac

SEQ ID NO: 1179069 - DNA, 15 bp, Homo sapiens
cagtggcaaaaataa

SEQ ID NO: 1179070 - DNA, 15 bp, Homo sapiens
tcagtggcaaaaata

SEQ ID NO: 1179071 - DNA, 15 bp, Homo sapiens
atcagtggcaaaaat

SEQ ID NO: 1179072 - DNA, 15 bp, Homo sapiens
aatcagtggcaaaaa

SEQ ID NO: 1179073 - DNA, 15 bp, Homo sapiens
aaatcagtggcaaaa

SEQ ID NO: 1179074 - DNA, 15 bp, Homo sapiens
aaaatcagtggcaaa

SEQ ID NO: 1179075 - DNA, 15 bp, Homo sapiens
aaaaatcagtggcaa

SEQ ID NO: 1179076 - DNA, 15 bp, Homo sapiens
gaaaaatcagtggca

SEQ ID NO: 1179077 - DNA, 15 bp, Homo sapiens
agaaaaatcagtggc

SEQ ID NO: 1179078 - DNA, 15 bp, Homo sapiens
gagaaaaatcagtgg

SEQ ID NO: 1179079 - DNA, 15 bp, Homo sapiens
tgagaaaaatcagtg

SEQ ID NO: 1179080 - DNA, 15 bp, Homo sapiens
ctgagaaaaatcagt

SEQ ID NO: 1179081 - DNA, 15 bp, Homo sapiens
gctgagaaaaatcag

SEQ ID NO: 1179082 - DNA, 15 bp, Homo sapiens
agctgagaaaaatca

SEQ ID NO: 1179083 - DNA, 15 bp, Homo sapiens
aagctgagaaaaatc

SEQ ID NO: 1179084 - DNA, 15 bp, Homo sapiens
caagctgagaaaaat

SEQ ID NO: 1179085 - DNA, 15 bp, Homo sapiens
gcaagctgagaaaaa

SEQ ID NO: 1179086 - DNA, 15 bp, Homo sapiens
agcaagctgagaaaa

SEQ ID NO: 1179087 - DNA, 15 bp, Homo sapiens
aagcaagctgagaaa

SEQ ID NO: 1179088 - DNA, 15 bp, Homo sapiens
caagcaagctgagaa

SEQ ID NO: 1179089 - DNA, 15 bp, Homo sapiens
ccaagcaagctgaga

SEQ ID NO: 1179090 - DNA, 15 bp, Homo sapiens
tccaagcaagctgag

SEQ ID NO: 1179091 - DNA, 15 bp, Homo sapiens
ctccaagcaagctga

SEQ ID NO: 1179092 - DNA, 15 bp, Homo sapiens
cctccaagcaagctg

SEQ ID NO: 1179093 - DNA, 15 bp, Homo sapiens
gcctccaagcaagct

SEQ ID NO: 1179094 - DNA, 15 bp, Homo sapiens
tgcctccaagcaagc

SEQ ID NO: 1179095 - DNA, 15 bp, Homo sapiens
atgcctccaagcaag

SEQ ID NO: 1179096 - DNA, 15 bp, Homo sapiens
gatgcctccaagcaa

SEQ ID NO: 1179097 - DNA, 15 bp, Homo sapiens
agatgcctccaagca

SEQ ID NO: 1179098 - DNA, 15 bp, Homo sapiens
aagatgcctccaagc

SEQ ID NO: 1179099 - DNA, 15 bp, Homo sapiens
caagatgcctccaag

SEQ ID NO: 1179100 - DNA, 15 bp, Homo sapiens
tcaagatgcctccaa

SEQ ID NO: 1179101 - DNA, 15 bp, Homo sapiens
ttcaagatgcctcca

SEQ ID NO: 1179102 - DNA, 15 bp, Homo sapiens
attcaagatgcctcc

SEQ ID NO: 1179103 - DNA, 15 bp, Homo sapiens
cattcaagatgcctc

SEQ ID NO: 1179104 - DNA, 15 bp, Homo sapiens
acattcaagatgcct

SEQ ID NO: 1179105 - DNA, 15 bp, Homo sapiens
cacattcaagatgcc

SEQ ID NO: 1179106 - DNA, 15 bp, Homo sapiens
gcacattcaagatgc

SEQ ID NO: 1179107 - DNA, 15 bp, Homo sapiens
ggcacattcaagatg

SEQ ID NO: 1179108 - DNA, 15 bp, Homo sapiens
aggcacattcaagat

SEQ ID NO: 1179109 - DNA, 15 bp, Homo sapiens
gaggcacattcaaga

SEQ ID NO: 1179110 - DNA, 15 bp, Homo sapiens
tgaggcacattcaag

SEQ ID NO: 1179111 - DNA, 15 bp, Homo sapiens
atgaggcacattcaa

SEQ ID NO: 1179112 - DNA, 15 bp, Homo sapiens
gatgaggcacattca

SEQ ID NO: 1179113 - DNA, 15 bp, Homo sapiens
ggatgaggcacattc

SEQ ID NO: 1179114 - DNA, 15 bp, Homo sapiens
tggatgaggcacatt

SEQ ID NO: 1179115 - DNA, 15 bp, Homo sapiens
ttggatgaggcacat

SEQ ID NO: 1179116 - DNA, 15 bp, Homo sapiens
tttggatgaggcaca

SEQ ID NO: 1179117 - DNA, 15 bp, Homo sapiens
gtttggatgaggcac

SEQ ID NO: 1179118 - DNA, 15 bp, Homo sapiens
agtttggatgaggca

SEQ ID NO: 1179119 - DNA, 15 bp, Homo sapiens
cagtttggatgaggc

SEQ ID NO: 1179120 - DNA, 15 bp, Homo sapiens
ccagtttggatgagg

SEQ ID NO: 1179121 - DNA, 15 bp, Homo sapiens
tccagtttggatgag

SEQ ID NO: 1179122 - DNA, 15 bp, Homo sapiens
gtccagtttggatga

SEQ ID NO: 1179123 - DNA, 15 bp, Homo sapiens
agtccagtttggatg

SEQ ID NO: 1179124 - DNA, 15 bp, Homo sapiens
cagtccagtttggat

SEQ ID NO: 1179125 - DNA, 15 bp, Homo sapiens
tcagtccagtttgga

SEQ ID NO: 1179126 - DNA, 15 bp, Homo sapiens
ctcagtccagtttgg

SEQ ID NO: 1179127 - DNA, 15 bp, Homo sapiens
actcagtccagtttg

SEQ ID NO: 1179128 - DNA, 15 bp, Homo sapiens
aactcagtccagttt

SEQ ID NO: 1179129 - DNA, 15 bp, Homo sapiens
taactcagtccagtt

SEQ ID NO: 1179130 - DNA, 15 bp, Homo sapiens
ttaactcagtccagt

SEQ ID NO: 1179131 - DNA, 15 bp, Homo sapiens
attaactcagtccag

SEQ ID NO: 1179132 - DNA, 15 bp, Homo sapiens
cattaactcagtcca

SEQ ID NO: 1179133 - DNA, 15 bp, Homo sapiens
tcattaactcagtcc

SEQ ID NO: 1179134 - DNA, 15 bp, Homo sapiens
ttcattaactcagtc

SEQ ID NO: 1179135 - DNA, 15 bp, Homo sapiens
cttcattaactcagt

SEQ ID NO: 1179136 - DNA, 15 bp, Homo sapiens
ccttcattaactcag

SEQ ID NO: 1179137 - DNA, 15 bp, Homo sapiens
tccttcattaactca

SEQ ID NO: 1179138 - DNA, 15 bp, Homo sapiens
ttccttcattaactc

SEQ ID NO: 1179139 - DNA, 15 bp, Homo sapiens
cttccttcattaact

SEQ ID NO: 1179140 - DNA, 15 bp, Homo sapiens
tcttccttcattaac

SEQ ID NO: 1179141 - DNA, 15 bp, Homo sapiens
ttcttccttcattaa

SEQ ID NO: 1179142 - DNA, 15 bp, Homo sapiens
tttcttccttcatta

SEQ ID NO: 1179143 - DNA, 15 bp, Homo sapiens
atttcttccttcatt

SEQ ID NO: 1179144 - DNA, 15 bp, Homo sapiens
catttcttccttcat

SEQ ID NO: 1179145 - DNA, 15 bp, Homo sapiens
tcatttcttccttca

SEQ ID NO: 1179146 - DNA, 15 bp, Homo sapiens
atcatttcttccttc

SEQ ID NO: 1179147 - DNA, 15 bp, Homo sapiens
aatcatttcttcctt

SEQ ID NO: 1179148 - DNA, 15 bp, Homo sapiens
caatcatttcttcct

SEQ ID NO: 1179149 - DNA, 15 bp, Homo sapiens
tcaatcatttcttcc

SEQ ID NO: 1179150 - DNA, 15 bp, Homo sapiens
ttcaatcatttcttc

SEQ ID NO: 1179151 - DNA, 15 bp, Homo sapiens
attcaatcatttctt

SEQ ID NO: 1179152 - DNA, 15 bp, Homo sapiens
aattcaatcatttct

SEQ ID NO: 1179153 - DNA, 15 bp, Homo sapiens
caattcaatcatttc

SEQ ID NO: 1179154 - DNA, 15 bp, Homo sapiens
acaattcaatcattt

SEQ ID NO: 1179155 - DNA, 15 bp, Homo sapiens
gacaattcaatcatt

SEQ ID NO: 1179156 - DNA, 15 bp, Homo sapiens
tgacaattcaatcat

SEQ ID NO: 1179157 - DNA, 15 bp, Homo sapiens
ttgacaattcaatca

SEQ ID NO: 1179158 - DNA, 15 bp, Homo sapiens
gttgacaattcaatc

SEQ ID NO: 1179159 - DNA, 15 bp, Homo sapiens
agttgacaattcaat

SEQ ID NO: 1179160 - DNA, 15 bp, Homo sapiens
gagttgacaattcaa

SEQ ID NO: 1179161 - DNA, 15 bp, Homo sapiens
ggagttgacaattca

SEQ ID NO: 1179162 - DNA, 15 bp, Homo sapiens
aggagttgacaattc

SEQ ID NO: 1179163 - DNA, 15 bp, Homo sapiens
aaggagttgacaatt

SEQ ID NO: 1179164 - DNA, 15 bp, Homo sapiens
gaaggagttgacaat

SEQ ID NO: 1179165 - DNA, 15 bp, Homo sapiens
agaaggagttgacaa

SEQ ID NO: 1179166 - DNA, 15 bp, Homo sapiens
tagaaggagttgaca

SEQ ID NO: 1179167 - DNA, 15 bp, Homo sapiens
ctagaaggagttgac

SEQ ID NO: 1179168 - DNA, 15 bp, Homo sapiens
cctagaaggagttga

SEQ ID NO: 1179169 - DNA, 15 bp, Homo sapiens
acctagaaggagttg

SEQ ID NO: 1179170 - DNA, 15 bp, Homo sapiens
aacctagaaggagtt

SEQ ID NO: 1179171 - DNA, 15 bp, Homo sapiens
gaacctagaaggagt

SEQ ID NO: 1179172 - DNA, 15 bp, Homo sapiens
ggaacctagaaggag

SEQ ID NO: 1179173 - DNA, 15 bp, Homo sapiens
tggaacctagaagga

SEQ ID NO: 1179174 - DNA, 15 bp, Homo sapiens
ttggaacctagaagg

SEQ ID NO: 1179175 - DNA, 15 bp, Homo sapiens
attggaacctagaag

SEQ ID NO: 1179176 - DNA, 15 bp, Homo sapiens
gattggaacctagaa

SEQ ID NO: 1179177 - DNA, 15 bp, Homo sapiens
agattggaacctaga

SEQ ID NO: 1179178 - DNA, 15 bp, Homo sapiens
gagattggaacctag

SEQ ID NO: 1179179 - DNA, 15 bp, Homo sapiens
agagattggaaccta

SEQ ID NO: 1179180 - DNA, 15 bp, Homo sapiens
aagagattggaacct

SEQ ID NO: 1179181 - DNA, 15 bp, Homo sapiens
aaagagattggaacc

SEQ ID NO: 1179182 - DNA, 15 bp, Homo sapiens
gaaagagattggaac

SEQ ID NO: 1179183 - DNA, 15 bp, Homo sapiens
agaaagagattggaa

SEQ ID NO: 1179184 - DNA, 15 bp, Homo sapiens
aagaaagagattgga

SEQ ID NO: 1179185 - DNA, 15 bp, Homo sapiens
taagaaagagattgg

SEQ ID NO: 1179186 - DNA, 15 bp, Homo sapiens
ttaagaaagagattg

SEQ ID NO: 1179187 - DNA, 15 bp, Homo sapiens
attaagaaagagatt

SEQ ID NO: 1179188 - DNA, 15 bp, Homo sapiens
aattaagaaagagat

SEQ ID NO: 1179189 - DNA, 15 bp, Homo sapiens
caattaagaaagaga

SEQ ID NO: 1179190 - DNA, 15 bp, Homo sapiens
acaattaagaaagag

SEQ ID NO: 1179191 - DNA, 15 bp, Homo sapiens
gacaattaagaaaga

SEQ ID NO: 1179192 - DNA, 15 bp, Homo sapiens
agacaattaagaaag

SEQ ID NO: 1179193 - DNA, 15 bp, Homo sapiens
gagacaattaagaaa

SEQ ID NO: 1179194 - DNA, 15 bp, Homo sapiens
ggagacaattaagaa

SEQ ID NO: 1179195 - DNA, 15 bp, Homo sapiens
tggagacaattaaga

SEQ ID NO: 1179196 - DNA, 15 bp, Homo sapiens
ctggagacaattaag

SEQ ID NO: 1179197 - DNA, 15 bp, Homo sapiens
actggagacaattaa

SEQ ID NO: 1179198 - DNA, 15 bp, Homo sapiens
aactggagacaatta

SEQ ID NO: 1179199 - DNA, 15 bp, Homo sapiens
aaactggagacaatt

SEQ ID NO: 1179200 - DNA, 15 bp, Homo sapiens
caaactggagacaat

SEQ ID NO: 1179201 - DNA, 15 bp, Homo sapiens
ccaaactggagacaa

SEQ ID NO: 1179202 - DNA, 15 bp, Homo sapiens
tccaaactggagaca

SEQ ID NO: 1179203 - DNA, 15 bp, Homo sapiens
ttccaaactggagac

SEQ ID NO: 1179204 - DNA, 15 bp, Homo sapiens
cttccaaactggaga

SEQ ID NO: 1179205 - DNA, 15 bp, Homo sapiens
acttccaaactggag

SEQ ID NO: 1179206 - DNA, 15 bp, Homo sapiens
tacttccaaactgga

SEQ ID NO: 1179207 - DNA, 15 bp, Homo sapiens
ctacttccaaactgg

SEQ ID NO: 1179208 - DNA, 15 bp, Homo sapiens
gctacttccaaactg

SEQ ID NO: 1179209 - DNA, 15 bp, Homo sapiens
ggctacttccaaact

SEQ ID NO: 1179210 - DNA, 15 bp, Homo sapiens
tggctacttccaaac

SEQ ID NO: 1179211 - DNA, 15 bp, Homo sapiens
gtggctacttccaaa

SEQ ID NO: 1179212 - DNA, 15 bp, Homo sapiens
tgtggctacttccaa

SEQ ID NO: 1179213 - DNA, 15 bp, Homo sapiens
ctgtggctacttcca

SEQ ID NO: 1179214 - DNA, 15 bp, Homo sapiens
cctgtggctacttcc

SEQ ID NO: 1179215 - DNA, 15 bp, Homo sapiens
acctgtggctacttc

SEQ ID NO: 1179216 - DNA, 15 bp, Homo sapiens
tacctgtggctactt

SEQ ID NO: 1179217 - DNA, 15 bp, Homo sapiens
ttacctgtggctact

SEQ ID NO: 1179218 - DNA, 15 bp, Homo sapiens
tttacctgtggctac

SEQ ID NO: 1179219 - DNA, 15 bp, Homo sapiens
gtttacctgtggcta

SEQ ID NO: 1179220 - DNA, 15 bp, Homo sapiens
ggtttacctgtggct

SEQ ID NO: 1179221 - DNA, 15 bp, Homo sapiens
gggtttacctgtggc

SEQ ID NO: 1179222 - DNA, 15 bp, Homo sapiens
tgggtttacctgtgg

SEQ ID NO: 1179223 - DNA, 15 bp, Homo sapiens
gtgggtttacctgtg

SEQ ID NO: 1179224 - DNA, 15 bp, Homo sapiens
ggtgggtttacctgt

SEQ ID NO: 1179225 - DNA, 15 bp, Homo sapiens
cggtgggtttacctg

SEQ ID NO: 1179226 - DNA, 15 bp, Homo sapiens
ccggtgggtttacct

SEQ ID NO: 1179227 - DNA, 15 bp, Homo sapiens
cccggtgggtttacc

SEQ ID NO: 1179228 - DNA, 15 bp, Homo sapiens
ccccggtgggtttac

SEQ ID NO: 1179229 - DNA, 15 bp, Homo sapiens
tccccggtgggttta

SEQ ID NO: 1179230 - DNA, 15 bp, Homo sapiens
gtccccggtgggttt

SEQ ID NO: 1179231 - DNA, 15 bp, Homo sapiens
ggtccccggtgggtt

SEQ ID NO: 1179232 - DNA, 15 bp, Homo sapiens
aggtccccggtgggt

SEQ ID NO: 1179233 - DNA, 15 bp, Homo sapiens
aaggtccccggtggg

SEQ ID NO: 1179234 - DNA, 15 bp, Homo sapiens
taaggtccccggtgg

SEQ ID NO: 1179235 - DNA, 15 bp, Homo sapiens
gtaaggtccccggtg

SEQ ID NO: 1179236 - DNA, 15 bp, Homo sapiens
ggtaaggtccccggt

SEQ ID NO: 1179237 - DNA, 15 bp, Homo sapiens
aggtaaggtccccgg

SEQ ID NO: 1179238 - DNA, 15 bp, Homo sapiens
caggtaaggtccccg

SEQ ID NO: 1179239 - DNA, 15 bp, Homo sapiens
ccaggtaaggtcccc

SEQ ID NO: 1179240 - DNA, 15 bp, Homo sapiens
tccaggtaaggtccc

SEQ ID NO: 1179241 - DNA, 15 bp, Homo sapiens
ttccaggtaaggtcc

SEQ ID NO: 1179242 - DNA, 15 bp, Homo sapiens
tttccaggtaaggtc

SEQ ID NO: 1179243 - DNA, 15 bp, Homo sapiens
gtttccaggtaaggt

SEQ ID NO: 1179244 - DNA, 15 bp, Homo sapiens
agtttccaggtaagg

SEQ ID NO: 1179245 - DNA, 15 bp, Homo sapiens
cagtttccaggtaag

SEQ ID NO: 1179246 - DNA, 15 bp, Homo sapiens
gcagtttccaggtaa

SEQ ID NO: 1179247 - DNA, 15 bp, Homo sapiens
agcagtttccaggta

SEQ ID NO: 1179248 - DNA, 15 bp, Homo sapiens
aagcagtttccaggt

SEQ ID NO: 1179249 - DNA, 15 bp, Homo sapiens
gaagcagtttccagg

SEQ ID NO: 1179250 - DNA, 15 bp, Homo sapiens
tgaagcagtttccag

SEQ ID NO: 1179251 - DNA, 15 bp, Homo sapiens
atgaagcagtttcca

SEQ ID NO: 1179252 - DNA, 15 bp, Homo sapiens
aatgaagcagtttcc

SEQ ID NO: 1179253 - DNA, 15 bp, Homo sapiens
aaatgaagcagtttc

SEQ ID NO: 1179254 - DNA, 15 bp, Homo sapiens
gaaatgaagcagttt

SEQ ID NO: 1179255 - DNA, 15 bp, Homo sapiens
agaaatgaagcagtt

SEQ ID NO: 1179256 - DNA, 15 bp, Homo sapiens
gagaaatgaagcagt

SEQ ID NO: 1179257 - DNA, 15 bp, Homo sapiens
agagaaatgaagcag

SEQ ID NO: 1179258 - DNA, 15 bp, Homo sapiens
gagagaaatgaagca

SEQ ID NO: 1179259 - DNA, 15 bp, Homo sapiens
agagagaaatgaagc

SEQ ID NO: 1179260 - DNA, 15 bp, Homo sapiens
tagagagaaatgaag

SEQ ID NO: 1179261 - DNA, 15 bp, Homo sapiens
ctagagagaaatgaa

SEQ ID NO: 1179262 - DNA, 15 bp, Homo sapiens
tctagagagaaatga

SEQ ID NO: 1179263 - DNA, 15 bp, Homo sapiens
gtctagagagaaatg

SEQ ID NO: 1179264 - DNA, 15 bp, Homo sapiens
agtctagagagaaat

SEQ ID NO: 1179265 - DNA, 15 bp, Homo sapiens
cagtctagagagaaa

SEQ ID NO: 1179266 - DNA, 15 bp, Homo sapiens
ccagtctagagagaa

SEQ ID NO: 1179267 - DNA, 15 bp, Homo sapiens
cccagtctagagaga

SEQ ID NO: 1179268 - DNA, 15 bp, Homo sapiens
tcccagtctagagag

SEQ ID NO: 1179269 - DNA, 15 bp, Homo sapiens
ttcccagtctagaga

SEQ ID NO: 1179270 - DNA, 15 bp, Homo sapiens
cttcccagtctagag

SEQ ID NO: 1179271 - DNA, 15 bp, Homo sapiens
ccttcccagtctaga

SEQ ID NO: 1179272 - DNA, 15 bp, Homo sapiens
gccttcccagtctag

SEQ ID NO: 1179273 - DNA, 15 bp, Homo sapiens
ggccttcccagtcta

SEQ ID NO: 1179274 - DNA, 15 bp, Homo sapiens
gggccttcccagtct

SEQ ID NO: 1179275 - DNA, 15 bp, Homo sapiens
tgggccttcccagtc

SEQ ID NO: 1179276 - DNA, 15 bp, Homo sapiens
gtgggccttcccagt

SEQ ID NO: 1179277 - DNA, 15 bp, Homo sapiens
tgtgggccttcccag

SEQ ID NO: 1179278 - DNA, 15 bp, Homo sapiens
ttgtgggccttccca

SEQ ID NO: 1179279 - DNA, 15 bp, Homo sapiens
cttgtgggccttccc

SEQ ID NO: 1179280 - DNA, 15 bp, Homo sapiens
gcttgtgggccttcc

SEQ ID NO: 1179281 - DNA, 15 bp, Homo sapiens
tgcttgtgggccttc

SEQ ID NO: 1179282 - DNA, 15 bp, Homo sapiens
gtgcttgtgggcctt

SEQ ID NO: 1179283 - DNA, 15 bp, Homo sapiens
ggtgcttgtgggcct

SEQ ID NO: 1179284 - DNA, 15 bp, Homo sapiens
gggtgcttgtgggcc

SEQ ID NO: 1179285 - DNA, 15 bp, Homo sapiens
tgggtgcttgtgggc

SEQ ID NO: 1179286 - DNA, 15 bp, Homo sapiens
ctgggtgcttgtggg

SEQ ID NO: 1179287 - DNA, 15 bp, Homo sapiens
cctgggtgcttgtgg

SEQ ID NO: 1179288 - DNA, 15 bp, Homo sapiens
ccctgggtgcttgtg

SEQ ID NO: 1179289 - DNA, 15 bp, Homo sapiens
tccctgggtgcttgt

SEQ ID NO: 1179290 - DNA, 15 bp, Homo sapiens
ttccctgggtgcttg

SEQ ID NO: 1179291 - DNA, 15 bp, Homo sapiens
gttccctgggtgctt

SEQ ID NO: 1179292 - DNA, 15 bp, Homo sapiens
ggttccctgggtgct

SEQ ID NO: 1179293 - DNA, 15 bp, Homo sapiens
tggttccctgggtgc

SEQ ID NO: 1179294 - DNA, 15 bp, Homo sapiens
ttggttccctgggtg

SEQ ID NO: 1179295 - DNA, 15 bp, Homo sapiens
attggttccctgggt

SEQ ID NO: 1179296 - DNA, 15 bp, Homo sapiens
cattggttccctggg

SEQ ID NO: 1179297 - DNA, 15 bp, Homo sapiens
tcattggttccctgg

SEQ ID NO: 1179298 - DNA, 15 bp, Homo sapiens
gtcattggttccctg

SEQ ID NO: 1179299 - DNA, 15 bp, Homo sapiens
tgtcattggttccct

SEQ ID NO: 1179300 - DNA, 15 bp, Homo sapiens
ctgtcattggttccc

SEQ ID NO: 1179301 - DNA, 15 bp, Homo sapiens
cctgtcattggttcc

SEQ ID NO: 1179302 - DNA, 15 bp, Homo sapiens
acctgtcattggttc

SEQ ID NO: 1179303 - DNA, 15 bp, Homo sapiens
cacctgtcattggtt

SEQ ID NO: 1179304 - DNA, 15 bp, Homo sapiens
ccacctgtcattggt

SEQ ID NO: 1179305 - DNA, 15 bp, Homo sapiens
tccacctgtcattgg

SEQ ID NO: 1179306 - DNA, 15 bp, Homo sapiens
gtccacctgtcattg

SEQ ID NO: 1179307 - DNA, 15 bp, Homo sapiens
tgtccacctgtcatt

SEQ ID NO: 1179308 - DNA, 15 bp, Homo sapiens
atgtccacctgtcat

SEQ ID NO: 1179309 - DNA, 15 bp, Homo sapiens
catgtccacctgtca

SEQ ID NO: 1179310 - DNA, 15 bp, Homo sapiens
gcatgtccacctgtc

SEQ ID NO: 1179311 - DNA, 15 bp, Homo sapiens
ggcatgtccacctgt

SEQ ID NO: 1179312 - DNA, 15 bp, Homo sapiens
aggcatgtccacctg

SEQ ID NO: 1179313 - DNA, 15 bp, Homo sapiens
gaggcatgtccacct

SEQ ID NO: 1179314 - DNA, 15 bp, Homo sapiens
ggaggcatgtccacc

SEQ ID NO: 1179315 - DNA, 15 bp, Homo sapiens
aggaggcatgtccac

SEQ ID NO: 1179316 - DNA, 15 bp, Homo sapiens
aaggaggcatgtcca

SEQ ID NO: 1179317 - DNA, 15 bp, Homo sapiens
gaaggaggcatgtcc

SEQ ID NO: 1179318 - DNA, 15 bp, Homo sapiens
tgaaggaggcatgtc

SEQ ID NO: 1179319 - DNA, 15 bp, Homo sapiens
ttgaaggaggcatgt

SEQ ID NO: 1179320 - DNA, 15 bp, Homo sapiens
cttgaaggaggcatg

SEQ ID NO: 1179321 - DNA, 15 bp, Homo sapiens
ccttgaaggaggcat

SEQ ID NO: 1179322 - DNA, 15 bp, Homo sapiens
cccttgaaggaggca

SEQ ID NO: 1179323 - DNA, 15 bp, Homo sapiens
ccccttgaaggaggc

SEQ ID NO: 1179324 - DNA, 15 bp, Homo sapiens
gccccttgaaggagg

SEQ ID NO: 1179325 - DNA, 15 bp, Homo sapiens
tgccccttgaaggag

SEQ ID NO: 1179326 - DNA, 15 bp, Homo sapiens
gtgccccttgaagga

SEQ ID NO: 1179327 - DNA, 15 bp, Homo sapiens
tgtgccccttgaagg

SEQ ID NO: 1179328 - DNA, 15 bp, Homo sapiens
ctgtgccccttgaag

SEQ ID NO: 1179329 - DNA, 15 bp, Homo sapiens
gctgtgccccttgaa

SEQ ID NO: 1179330 - DNA, 15 bp, Homo sapiens
agctgtgccccttga

SEQ ID NO: 1179331 - DNA, 15 bp, Homo sapiens
gagctgtgccccttg

SEQ ID NO: 1179332 - DNA, 15 bp, Homo sapiens
ggagctgtgcccctt

SEQ ID NO: 1179333 - DNA, 15 bp, Homo sapiens
gggagctgtgcccct

SEQ ID NO: 1179334 - DNA, 15 bp, Homo sapiens
agggagctgtgcccc

SEQ ID NO: 1179335 - DNA, 15 bp, Homo sapiens
cagggagctgtgccc

SEQ ID NO: 1179336 - DNA, 15 bp, Homo sapiens
ccagggagctgtgcc

SEQ ID NO: 1179337 - DNA, 15 bp, Homo sapiens
cccagggagctgtgc

SEQ ID NO: 1179338 - DNA, 15 bp, Homo sapiens
tcccagggagctgtg

SEQ ID NO: 1179339 - DNA, 15 bp, Homo sapiens
ctcccagggagctgt

SEQ ID NO: 1179340 - DNA, 15 bp, Homo sapiens
gctcccagggagctg

SEQ ID NO: 1179341 - DNA, 15 bp, Homo sapiens
tgctcccagggagct

SEQ ID NO: 1179342 - DNA, 15 bp, Homo sapiens
ctgctcccagggagc

SEQ ID NO: 1179343 - DNA, 15 bp, Homo sapiens
cctgctcccagggag

SEQ ID NO: 1179344 - DNA, 15 bp, Homo sapiens
tcctgctcccaggga

SEQ ID NO: 1179345 - DNA, 15 bp, Homo sapiens
ctcctgctcccaggg

SEQ ID NO: 1179346 - DNA, 15 bp, Homo sapiens
tctcctgctcccagg

SEQ ID NO: 1179347 - DNA, 15 bp, Homo sapiens
ttctcctgctcccag

SEQ ID NO: 1179348 - DNA, 15 bp, Homo sapiens
gttctcctgctccca

SEQ ID NO: 1179349 - DNA, 15 bp, Homo sapiens
agttctcctgctccc

SEQ ID NO: 1179350 - DNA, 15 bp, Homo sapiens
gagttctcctgctcc

SEQ ID NO: 1179351 - DNA, 15 bp, Homo sapiens
ggagttctcctgctc

SEQ ID NO: 1179352 - DNA, 15 bp, Homo sapiens
gggagttctcctgct

SEQ ID NO: 1179353 - DNA, 15 bp, Homo sapiens
cgggagttctcctgc

SEQ ID NO: 1179354 - DNA, 15 bp, Homo sapiens
tcgggagttctcctg

SEQ ID NO: 1179355 - DNA, 15 bp, Homo sapiens
atcgggagttctcct

SEQ ID NO: 1179356 - DNA, 15 bp, Homo sapiens
tatcgggagttctcc

SEQ ID NO: 1179357 - DNA, 15 bp, Homo sapiens
ctatcgggagttctc

SEQ ID NO: 1179358 - DNA, 15 bp, Homo sapiens
gctatcgggagttct

SEQ ID NO: 1179359 - DNA, 15 bp, Homo sapiens
tgctatcgggagttc

SEQ ID NO: 1179360 - DNA, 15 bp, Homo sapiens
ctgctatcgggagtt

SEQ ID NO: 1179361 - DNA, 15 bp, Homo sapiens
tctgctatcgggagt

SEQ ID NO: 1179362 - DNA, 15 bp, Homo sapiens
ctctgctatcgggag

SEQ ID NO: 1179363 - DNA, 15 bp, Homo sapiens
actctgctatcggga

SEQ ID NO: 1179364 - DNA, 15 bp, Homo sapiens
aactctgctatcggg

SEQ ID NO: 1179365 - DNA, 15 bp, Homo sapiens
gaactctgctatcgg

SEQ ID NO: 1179366 - DNA, 15 bp, Homo sapiens
agaactctgctatcg

SEQ ID NO: 1179367 - DNA, 15 bp, Homo sapiens
gagaactctgctatc

SEQ ID NO: 1179368 - DNA, 15 bp, Homo sapiens
agagaactctgctat

SEQ ID NO: 1179369 - DNA, 15 bp, Homo sapiens
gagagaactctgcta

SEQ ID NO: 1179370 - DNA, 15 bp, Homo sapiens
ggagagaactctgct

SEQ ID NO: 1179371 - DNA, 15 bp, Homo sapiens
tggagagaactctgc

SEQ ID NO: 1179372 - DNA, 15 bp, Homo sapiens
ttggagagaactctg

SEQ ID NO: 1179373 - DNA, 15 bp, Homo sapiens
attggagagaactct

SEQ ID NO: 1179374 - DNA, 15 bp, Homo sapiens
aattggagagaactc

SEQ ID NO: 1179375 - DNA, 15 bp, Homo sapiens
caattggagagaact

SEQ ID NO: 1179376 - DNA, 15 bp, Homo sapiens
tcaattggagagaac

SEQ ID NO: 1179377 - DNA, 15 bp, Homo sapiens
ctcaattggagagaa

SEQ ID NO: 1179378 - DNA, 15 bp, Homo sapiens
tctcaattggagaga

SEQ ID NO: 1179379 - DNA, 15 bp, Homo sapiens
ctctcaattggagag

SEQ ID NO: 1179380 - DNA, 15 bp, Homo sapiens
actctcaattggaga

SEQ ID NO: 1179381 - DNA, 15 bp, Homo sapiens
gactctcaattggag

SEQ ID NO: 1179382 - DNA, 15 bp, Homo sapiens
tgactctcaattgga

SEQ ID NO: 1179383 - DNA, 15 bp, Homo sapiens
atgactctcaattgg

SEQ ID NO: 1179384 - DNA, 15 bp, Homo sapiens
aatgactctcaattg

SEQ ID NO: 1179385 - DNA, 15 bp, Homo sapiens
aaatgactctcaatt

SEQ ID NO: 1179386 - DNA, 15 bp, Homo sapiens
gaaatgactctcaat

SEQ ID NO: 1179387 - DNA, 15 bp, Homo sapiens
agaaatgactctcaa

SEQ ID NO: 1179388 - DNA, 15 bp, Homo sapiens
cagaaatgactctca

SEQ ID NO: 1179389 - DNA, 15 bp, Homo sapiens
tcagaaatgactctc

SEQ ID NO: 1179390 - DNA, 15 bp, Homo sapiens
ctcagaaatgactct

SEQ ID NO: 1179391 - DNA, 15 bp, Homo sapiens
gctcagaaatgactc

SEQ ID NO: 1179392 - DNA, 15 bp, Homo sapiens
tgctcagaaatgact

SEQ ID NO: 1179393 - DNA, 15 bp, Homo sapiens
ttgctcagaaatgac

SEQ ID NO: 1179394 - DNA, 15 bp, Homo sapiens
tttgctcagaaatga

SEQ ID NO: 1179395 - DNA, 15 bp, Homo sapiens
atttgctcagaaatg

SEQ ID NO: 1179396 - DNA, 15 bp, Homo sapiens
gatttgctcagaaat

SEQ ID NO: 1179397 - DNA, 15 bp, Homo sapiens
ggatttgctcagaaa

SEQ ID NO: 1179398 - DNA, 15 bp, Homo sapiens
tggatttgctcagaa

SEQ ID NO: 1179399 - DNA, 15 bp, Homo sapiens
ctggatttgctcaga

SEQ ID NO: 1179400 - DNA, 15 bp, Homo sapiens
gctggatttgctcag

SEQ ID NO: 1179401 - DNA, 15 bp, Homo sapiens
ggctggatttgctca

SEQ ID NO: 1179402 - DNA, 15 bp, Homo sapiens
gggctggatttgctc

SEQ ID NO: 1179403 - DNA, 15 bp, Homo sapiens
tgggctggatttgct

SEQ ID NO: 1179404 - DNA, 15 bp, Homo sapiens
gtgggctggatttgc

SEQ ID NO: 1179405 - DNA, 15 bp, Homo sapiens
tgtgggctggatttg

SEQ ID NO: 1179406 - DNA, 15 bp, Homo sapiens
ctgtgggctggattt

SEQ ID NO: 1179407 - DNA, 15 bp, Homo sapiens
gctgtgggctggatt

SEQ ID NO: 1179408 - DNA, 15 bp, Homo sapiens
cgctgtgggctggat

SEQ ID NO: 1179409 - DNA, 15 bp, Homo sapiens
acgctgtgggctgga

SEQ ID NO: 1179410 - DNA, 15 bp, Homo sapiens
cacgctgtgggctgg

SEQ ID NO: 1179411 - DNA, 15 bp, Homo sapiens
acacgctgtgggctg

SEQ ID NO: 1179412 - DNA, 15 bp, Homo sapiens
tacacgctgtgggct

SEQ ID NO: 1179413 - DNA, 15 bp, Homo sapiens
ttacacgctgtgggc

SEQ ID NO: 1179414 - DNA, 15 bp, Homo sapiens
tttacacgctgtggg

SEQ ID NO: 1179415 - DNA, 15 bp, Homo sapiens
ttttacacgctgtgg

SEQ ID NO: 1179416 - DNA, 15 bp, Homo sapiens
attttacacgctgtg

SEQ ID NO: 1179417 - DNA, 15 bp, Homo sapiens
gattttacacgctgt

SEQ ID NO: 1179418 - DNA, 15 bp, Homo sapiens
ggattttacacgctg

SEQ ID NO: 1179419 - DNA, 15 bp, Homo sapiens
aggattttacacgct

SEQ ID NO: 1179420 - DNA, 15 bp, Homo sapiens
caggattttacacgc

SEQ ID NO: 1179421 - DNA, 15 bp, Homo sapiens
tcaggattttacacg

SEQ ID NO: 1179422 - DNA, 15 bp, Homo sapiens
atcaggattttacac

SEQ ID NO: 1179423 - DNA, 15 bp, Homo sapiens
tatcaggattttaca

SEQ ID NO: 1179424 - DNA, 15 bp, Homo sapiens
ttatcaggattttac

SEQ ID NO: 1179425 - DNA, 15 bp, Homo sapiens
cttatcaggatttta

SEQ ID NO: 1179426 - DNA, 15 bp, Homo sapiens
acttatcaggatttt

SEQ ID NO: 1179427 - DNA, 15 bp, Homo sapiens
tacttatcaggattt

SEQ ID NO: 1179428 - DNA, 15 bp, Homo sapiens
ttacttatcaggatt

SEQ ID NO: 1179429 - DNA, 15 bp, Homo sapiens
attacttatcaggat

SEQ ID NO: 1179430 - DNA, 15 bp, Homo sapiens
aattacttatcagga

SEQ ID NO: 1179431 - DNA, 15 bp, Homo sapiens
gaattacttatcagg

SEQ ID NO: 1179432 - DNA, 15 bp, Homo sapiens
tgaattacttatcag

SEQ ID NO: 1179433 - DNA, 15 bp, Homo sapiens
ctgaattacttatca

SEQ ID NO: 1179434 - DNA, 15 bp, Homo sapiens
actgaattacttatc

SEQ ID NO: 1179435 - DNA, 15 bp, Homo sapiens
cactgaattacttat

SEQ ID NO: 1179436 - DNA, 15 bp, Homo sapiens
ccactgaattactta

SEQ ID NO: 1179437 - DNA, 15 bp, Homo sapiens
cccactgaattactt

SEQ ID NO: 1179438 - DNA, 15 bp, Homo sapiens
tcccactgaattact

SEQ ID NO: 1179439 - DNA, 15 bp, Homo sapiens
ttcccactgaattac

SEQ ID NO: 1179440 - DNA, 15 bp, Homo sapiens
cttcccactgaatta

SEQ ID NO: 1179441 - DNA, 15 bp, Homo sapiens
ccttcccactgaatt

SEQ ID NO: 1179442 - DNA, 15 bp, Homo sapiens
tccttcccactgaat

SEQ ID NO: 1179443 - DNA, 15 bp, Homo sapiens
ttccttcccactgaa

SEQ ID NO: 1179444 - DNA, 15 bp, Homo sapiens
cttccttcccactga

SEQ ID NO: 1179445 - DNA, 15 bp, Homo sapiens
acttccttcccactg

SEQ ID NO: 1179446 - DNA, 15 bp, Homo sapiens
cacttccttcccact

SEQ ID NO: 1179447 - DNA, 15 bp, Homo sapiens
gcacttccttcccac

SEQ ID NO: 1179448 - DNA, 15 bp, Homo sapiens
agcacttccttccca

SEQ ID NO: 1179449 - DNA, 15 bp, Homo sapiens
cagcacttccttccc

SEQ ID NO: 1179450 - DNA, 15 bp, Homo sapiens
tcagcacttccttcc

SEQ ID NO: 1179451 - DNA, 15 bp, Homo sapiens
atcagcacttccttc

SEQ ID NO: 1179452 - DNA, 15 bp, Homo sapiens
catcagcacttcctt

SEQ ID NO: 1179453 - DNA, 15 bp, Homo sapiens
tcatcagcacttcct

SEQ ID NO: 1179454 - DNA, 15 bp, Homo sapiens
atcatcagcacttcc

SEQ ID NO: 1179455 - DNA, 15 bp, Homo sapiens
tatcatcagcacttc

SEQ ID NO: 1179456 - DNA, 15 bp, Homo sapiens
ttatcatcagcactt

SEQ ID NO: 1179457 - DNA, 15 bp, Homo sapiens
attatcatcagcact

SEQ ID NO: 1179458 - DNA, 15 bp, Homo sapiens
tattatcatcagcac

SEQ ID NO: 1179459 - DNA, 15 bp, Homo sapiens
ttattatcatcagca

SEQ ID NO: 1179460 - DNA, 15 bp, Homo sapiens
tttattatcatcagc

SEQ ID NO: 1179461 - DNA, 15 bp, Homo sapiens
ctttattatcatcag

SEQ ID NO: 1179462 - DNA, 15 bp, Homo sapiens
cctttattatcatca

SEQ ID NO: 1179463 - DNA, 15 bp, Homo sapiens
tcctttattatcatc

SEQ ID NO: 1179464 - DNA, 15 bp, Homo sapiens
ctcctttattatcat

SEQ ID NO: 1179465 - DNA, 15 bp, Homo sapiens
tctcctttattatca

SEQ ID NO: 1179466 - DNA, 15 bp, Homo sapiens
atctcctttattatc

SEQ ID NO: 1179467 - DNA, 15 bp, Homo sapiens
tatctcctttattat

SEQ ID NO: 1179468 - DNA, 15 bp, Homo sapiens
ctatctcctttatta

SEQ ID NO: 1179469 - DNA, 15 bp, Homo sapiens
gctatctcctttatt

SEQ ID NO: 1179470 - DNA, 15 bp, Homo sapiens
tgctatctcctttat

SEQ ID NO: 1179471 - DNA, 15 bp, Homo sapiens
atgctatctccttta

SEQ ID NO: 1179472 - DNA, 15 bp, Homo sapiens
catgctatctccttt

SEQ ID NO: 1179473 - DNA, 15 bp, Homo sapiens
ccatgctatctcctt

SEQ ID NO: 1179474 - DNA, 15 bp, Homo sapiens
gccatgctatctcct

SEQ ID NO: 1179475 - DNA, 15 bp, Homo sapiens
tgccatgctatctcc

SEQ ID NO: 1179476 - DNA, 15 bp, Homo sapiens
ctgccatgctatctc

SEQ ID NO: 1179477 - DNA, 15 bp, Homo sapiens
tctgccatgctatct

SEQ ID NO: 1179478 - DNA, 15 bp, Homo sapiens
atctgccatgctatc

SEQ ID NO: 1179479 - DNA, 15 bp, Homo sapiens
gatctgccatgctat

SEQ ID NO: 1179480 - DNA, 15 bp, Homo sapiens
agatctgccatgcta

SEQ ID NO: 1179481 - DNA, 15 bp, Homo sapiens
cagatctgccatgct

SEQ ID NO: 1179482 - DNA, 15 bp, Homo sapiens
gcagatctgccatgc

SEQ ID NO: 1179483 - DNA, 15 bp, Homo sapiens
agcagatctgccatg

SEQ ID NO: 1179484 - DNA, 15 bp, Homo sapiens
aagcagatctgccat

SEQ ID NO: 1179485 - DNA, 15 bp, Homo sapiens
gaagcagatctgcca

SEQ ID NO: 1179486 - DNA, 15 bp, Homo sapiens
agaagcagatctgcc

SEQ ID NO: 1179487 - DNA, 15 bp, Homo sapiens
cagaagcagatctgc

SEQ ID NO: 1179488 - DNA, 15 bp, Homo sapiens
acagaagcagatctg

SEQ ID NO: 1179489 - DNA, 15 bp, Homo sapiens
gacagaagcagatct

SEQ ID NO: 1179490 - DNA, 15 bp, Homo sapiens
ggacagaagcagatc

SEQ ID NO: 1179491 - DNA, 15 bp, Homo sapiens
aggacagaagcagat

SEQ ID NO: 1179492 - DNA, 15 bp, Homo sapiens
aaggacagaagcaga

SEQ ID NO: 1179493 - DNA, 15 bp, Homo sapiens
caaggacagaagcag

SEQ ID NO: 1179494 - DNA, 15 bp, Homo sapiens
ccaaggacagaagca

SEQ ID NO: 1179495 - DNA, 15 bp, Homo sapiens
tccaaggacagaagc

SEQ ID NO: 1179496 - DNA, 15 bp, Homo sapiens
ttccaaggacagaag

SEQ ID NO: 1179497 - DNA, 15 bp, Homo sapiens
cttccaaggacagaa

SEQ ID NO: 1179498 - DNA, 15 bp, Homo sapiens
tcttccaaggacaga

SEQ ID NO: 1179499 - DNA, 15 bp, Homo sapiens
ttcttccaaggacag

SEQ ID NO: 1179500 - DNA, 15 bp, Homo sapiens
gttcttccaaggaca

SEQ ID NO: 1179501 - DNA, 15 bp, Homo sapiens
ggttcttccaaggac

SEQ ID NO: 1179502 - DNA, 15 bp, Homo sapiens
aggttcttccaagga

SEQ ID NO: 1179503 - DNA, 15 bp, Homo sapiens
caggttcttccaagg

SEQ ID NO: 1179504 - DNA, 15 bp, Homo sapiens
ccaggttcttccaag

SEQ ID NO: 1179505 - DNA, 15 bp, Homo sapiens
tccaggttcttccaa

SEQ ID NO: 1179506 - DNA, 15 bp, Homo sapiens
ttccaggttcttcca

SEQ ID NO: 1179507 - DNA, 15 bp, Homo sapiens
tttccaggttcttcc

SEQ ID NO: 1179508 - DNA, 15 bp, Homo sapiens
atttccaggttcttc

SEQ ID NO: 1179509 - DNA, 15 bp, Homo sapiens
tatttccaggttctt

SEQ ID NO: 1179510 - DNA, 15 bp, Homo sapiens
tttatttccaggttc

SEQ ID NO: 1179511 - DNA, 15 bp, Homo sapiens
ctttatttccaggtt

SEQ ID NO: 1179512 - DNA, 15 bp, Homo sapiens
gctttatttccaggt

SEQ ID NO: 1179513 - DNA, 15 bp, Homo sapiens
tgctttatttccagg

SEQ ID NO: 1179514 - DNA, 15 bp, Homo sapiens
ttgctttatttccag

SEQ ID NO: 1179515 - DNA, 15 bp, Homo sapiens
cttgctttatttcca

SEQ ID NO: 1179516 - DNA, 15 bp, Homo sapiens
ccttgctttatttcc

SEQ ID NO: 1179517 - DNA, 15 bp, Homo sapiens
gccttgctttatttc

SEQ ID NO: 1179518 - DNA, 15 bp, Homo sapiens
ggccttgctttattt

SEQ ID NO: 1179519 - DNA, 15 bp, Homo sapiens
tggccttgctttatt

SEQ ID NO: 1179520 - DNA, 15 bp, Homo sapiens
ttggccttgctttat

SEQ ID NO: 1179521 - DNA, 15 bp, Homo sapiens
attggccttgcttta

SEQ ID NO: 1179522 - DNA, 15 bp, Homo sapiens
cattggccttgcttt

SEQ ID NO: 1179523 - DNA, 15 bp, Homo sapiens
acattggccttgctt

SEQ ID NO: 1179524 - DNA, 15 bp, Homo sapiens
cacattggccttgct

SEQ ID NO: 1179525 - DNA, 15 bp, Homo sapiens
tcacattggccttgc

SEQ ID NO: 1179526 - DNA, 15 bp, Homo sapiens
ctcacattggccttg

SEQ ID NO: 1179527 - DNA, 15 bp, Homo sapiens
gctcacattggcctt

SEQ ID NO: 1179528 - DNA, 15 bp, Homo sapiens
tgctcacattggcct

SEQ ID NO: 1179529 - DNA, 15 bp, Homo sapiens
ctgctcacattggcc

SEQ ID NO: 1179530 - DNA, 15 bp, Homo sapiens
cctgctcacattggc

SEQ ID NO: 1179531 - DNA, 15 bp, Homo sapiens
gcctgctcacattgg

SEQ ID NO: 1179532 - DNA, 15 bp, Homo sapiens
agcctgctcacattg

SEQ ID NO: 1179533 - DNA, 15 bp, Homo sapiens
tagcctgctcacatt

SEQ ID NO: 1179534 - DNA, 15 bp, Homo sapiens
atagcctgctcacat

SEQ ID NO: 1179535 - DNA, 15 bp, Homo sapiens
catagcctgctcaca

SEQ ID NO: 1179536 - DNA, 15 bp, Homo sapiens
acatagcctgctcac

SEQ ID NO: 1179537 - DNA, 15 bp, Homo sapiens
gacatagcctgctca

SEQ ID NO: 1179538 - DNA, 15 bp, Homo sapiens
agacatagcctgctc

SEQ ID NO: 1179539 - DNA, 15 bp, Homo sapiens
cagacatagcctgct

SEQ ID NO: 1179540 - DNA, 15 bp, Homo sapiens
gcagacatagcctgc

SEQ ID NO: 1179541 - DNA, 15 bp, Homo sapiens
cgcagacatagcctg

SEQ ID NO: 1179542 - DNA, 15 bp, Homo sapiens
ccgcagacatagcct

SEQ ID NO: 1179543 - DNA, 15 bp, Homo sapiens
cccgcagacatagcc

SEQ ID NO: 1179544 - DNA, 15 bp, Homo sapiens
ccccgcagacatagc

SEQ ID NO: 1179545 - DNA, 15 bp, Homo sapiens
gccccgcagacatag

SEQ ID NO: 1179546 - DNA, 15 bp, Homo sapiens
agccccgcagacata

SEQ ID NO: 1179547 - DNA, 15 bp, Homo sapiens
cagccccgcagacat

SEQ ID NO: 1179548 - DNA, 15 bp, Homo sapiens
acagccccgcagaca

SEQ ID NO: 1179549 - DNA, 15 bp, Homo sapiens
aacagccccgcagac

SEQ ID NO: 1179550 - DNA, 15 bp, Homo sapiens
caacagccccgcaga

SEQ ID NO: 1179551 - DNA, 15 bp, Homo sapiens
ccaacagccccgcag

SEQ ID NO: 1179552 - DNA, 15 bp, Homo sapiens
gccaacagccccgca

SEQ ID NO: 1179553 - DNA, 15 bp, Homo sapiens
agccaacagccccgc

SEQ ID NO: 1179554 - DNA, 15 bp, Homo sapiens
tagccaacagccccg

SEQ ID NO: 1179555 - DNA, 15 bp, Homo sapiens
ttagccaacagcccc

SEQ ID NO: 1179556 - DNA, 15 bp, Homo sapiens
cttagccaacagccc

SEQ ID NO: 1179557 - DNA, 15 bp, Homo sapiens
ccttagccaacagcc

SEQ ID NO: 1179558 - DNA, 15 bp, Homo sapiens
gccttagccaacagc

SEQ ID NO: 1179559 - DNA, 15 bp, Homo sapiens
agccttagccaacag

SEQ ID NO: 1179560 - DNA, 15 bp, Homo sapiens
gagccttagccaaca

SEQ ID NO: 1179561 - DNA, 15 bp, Homo sapiens
tgagccttagccaac

SEQ ID NO: 1179562 - DNA, 15 bp, Homo sapiens
ctgagccttagccaa

SEQ ID NO: 1179563 - DNA, 15 bp, Homo sapiens
cctgagccttagcca

SEQ ID NO: 1179564 - DNA, 15 bp, Homo sapiens
gcctgagccttagcc

SEQ ID NO: 1179565 - DNA, 15 bp, Homo sapiens
agcctgagccttagc

SEQ ID NO: 1179566 - DNA, 15 bp, Homo sapiens
aagcctgagccttag

SEQ ID NO: 1179567 - DNA, 15 bp, Homo sapiens
gaagcctgagcctta

SEQ ID NO: 1179568 - DNA, 15 bp, Homo sapiens
ggaagcctgagcctt

SEQ ID NO: 1179569 - DNA, 15 bp, Homo sapiens
aggaagcctgagcct

SEQ ID NO: 1179570 - DNA, 15 bp, Homo sapiens
caggaagcctgagcc

SEQ ID NO: 1179571 - DNA, 15 bp, Homo sapiens
ccaggaagcctgagc

SEQ ID NO: 1179572 - DNA, 15 bp, Homo sapiens
tccaggaagcctgag

SEQ ID NO: 1179573 - DNA, 15 bp, Homo sapiens
gtccaggaagcctga

SEQ ID NO: 1179574 - DNA, 15 bp, Homo sapiens
ggtccaggaagcctg

SEQ ID NO: 1179575 - DNA, 15 bp, Homo sapiens
tggtccaggaagcct

SEQ ID NO: 1179576 - DNA, 15 bp, Homo sapiens
gtggtccaggaagcc

SEQ ID NO: 1179577 - DNA, 15 bp, Homo sapiens
agtggtccaggaagc

SEQ ID NO: 1179578 - DNA, 15 bp, Homo sapiens
aagtggtccaggaag

SEQ ID NO: 1179579 - DNA, 15 bp, Homo sapiens
tgaagtggtccagga

SEQ ID NO: 1179580 - DNA, 15 bp, Homo sapiens
ctgaagtggtccagg

SEQ ID NO: 1179581 - DNA, 15 bp, Homo sapiens
tctgaagtggtccag

SEQ ID NO: 1179582 - DNA, 15 bp, Homo sapiens
ctctgaagtggtcca

SEQ ID NO: 1179583 - DNA, 15 bp, Homo sapiens
tctctgaagtggtcc

SEQ ID NO: 1179584 - DNA, 15 bp, Homo sapiens
ctctctgaagtggtc

SEQ ID NO: 1179585 - DNA, 15 bp, Homo sapiens
gctctctgaagtggt

SEQ ID NO: 1179586 - DNA, 15 bp, Homo sapiens
ggctctctgaagtgg

SEQ ID NO: 1179587 - DNA, 15 bp, Homo sapiens
gggctctctgaagtg

SEQ ID NO: 1179588 - DNA, 15 bp, Homo sapiens
tgggctctctgaagt

SEQ ID NO: 1179589 - DNA, 15 bp, Homo sapiens
ctgggctctctgaag

SEQ ID NO: 1179590 - DNA, 15 bp, Homo sapiens
tctgggctctctgaa

SEQ ID NO: 1179591 - DNA, 15 bp, Homo sapiens
ctctgggctctctga

SEQ ID NO: 1179592 - DNA, 15 bp, Homo sapiens
tctctgggctctctg

SEQ ID NO: 1179593 - DNA, 15 bp, Homo sapiens
ctctctgggctctct

SEQ ID NO: 1179594 - DNA, 15 bp, Homo sapiens
actctctgggctctc

SEQ ID NO: 1179595 - DNA, 15 bp, Homo sapiens
gactctctgggctct

SEQ ID NO: 1179596 - DNA, 15 bp, Homo sapiens
ggactctctgggctc

SEQ ID NO: 1179597 - DNA, 15 bp, Homo sapiens
aggactctctgggct

SEQ ID NO: 1179598 - DNA, 15 bp, Homo sapiens
gaggactctctgggc

SEQ ID NO: 1179599 - DNA, 15 bp, Homo sapiens
agaggactctctggg

SEQ ID NO: 1179600 - DNA, 15 bp, Homo sapiens
gagaggactctctgg

SEQ ID NO: 1179601 - DNA, 15 bp, Homo sapiens
tgagaggactctctg

SEQ ID NO: 1179602 - DNA, 15 bp, Homo sapiens
ttgagaggactctct

SEQ ID NO: 1179603 - DNA, 15 bp, Homo sapiens
attgagaggactctc

SEQ ID NO: 1179604 - DNA, 15 bp, Homo sapiens
gattgagaggactct

SEQ ID NO: 1179605 - DNA, 15 bp, Homo sapiens
ggattgagaggactc

SEQ ID NO: 1179606 - DNA, 15 bp, Homo sapiens
aggattgagaggact

SEQ ID NO: 1179607 - DNA, 15 bp, Homo sapiens
caggattgagaggac

SEQ ID NO: 1179608 - DNA, 15 bp, Homo sapiens
ccaggattgagagga

SEQ ID NO: 1179609 - DNA, 15 bp, Homo sapiens
gccaggattgagagg

SEQ ID NO: 1179610 - DNA, 15 bp, Homo sapiens
ggccaggattgagag

SEQ ID NO: 1179611 - DNA, 15 bp, Homo sapiens
gggccaggattgaga

SEQ ID NO: 1179612 - DNA, 15 bp, Homo sapiens
agggccaggattgag

SEQ ID NO: 1179613 - DNA, 15 bp, Homo sapiens
cagggccaggattga

SEQ ID NO: 1179614 - DNA, 15 bp, Homo sapiens
gcagggccaggattg

SEQ ID NO: 1179615 - DNA, 15 bp, Homo sapiens
ggcagggccaggatt

SEQ ID NO: 1179616 - DNA, 15 bp, Homo sapiens
tggcagggccaggat

SEQ ID NO: 1179617 - DNA, 15 bp, Homo sapiens
atggcagggccagga

SEQ ID NO: 1179618 - DNA, 15 bp, Homo sapiens
aatggcagggccagg

SEQ ID NO: 1179619 - DNA, 15 bp, Homo sapiens
aaatggcagggccag

SEQ ID NO: 1179620 - DNA, 15 bp, Homo sapiens
caaatggcagggcca

SEQ ID NO: 1179621 - DNA, 15 bp, Homo sapiens
gcaaatggcagggcc

SEQ ID NO: 1179622 - DNA, 15 bp, Homo sapiens
agcaaatggcagggc

SEQ ID NO: 1179623 - DNA, 15 bp, Homo sapiens
tagcaaatggcaggg

SEQ ID NO: 1179624 - DNA, 15 bp, Homo sapiens
ttagcaaatggcagg

SEQ ID NO: 1179625 - DNA, 15 bp, Homo sapiens
attagcaaatggcag

SEQ ID NO: 1179626 - DNA, 15 bp, Homo sapiens
cattagcaaatggca

SEQ ID NO: 1179627 - DNA, 15 bp, Homo sapiens
ccattagcaaatggc

SEQ ID NO: 1179628 - DNA, 15 bp, Homo sapiens
gccattagcaaatgg

SEQ ID NO: 1179629 - DNA, 15 bp, Homo sapiens
tgccattagcaaatg

SEQ ID NO: 1179630 - DNA, 15 bp, Homo sapiens
atgccattagcaaat

SEQ ID NO: 1179631 - DNA, 15 bp, Homo sapiens
aatgccattagcaaa

SEQ ID NO: 1179632 - DNA, 15 bp, Homo sapiens
taatgccattagcaa

SEQ ID NO: 1179633 - DNA, 15 bp, Homo sapiens
ataatgccattagca

SEQ ID NO: 1179634 - DNA, 15 bp, Homo sapiens
gataatgccattagc

SEQ ID NO: 1179635 - DNA, 15 bp, Homo sapiens
agataatgccattag

SEQ ID NO: 1179636 - DNA, 15 bp, Homo sapiens
aagataatgccatta

SEQ ID NO: 1179637 - DNA, 15 bp, Homo sapiens
caagataatgccatt

SEQ ID NO: 1179638 - DNA, 15 bp, Homo sapiens
ccaagataatgccat

SEQ ID NO: 1179639 - DNA, 15 bp, Homo sapiens
cccaagataatgcca

SEQ ID NO: 1179640 - DNA, 15 bp, Homo sapiens
gcccaagataatgcc

SEQ ID NO: 1179641 - DNA, 15 bp, Homo sapiens
tgcccaagataatgc

SEQ ID NO: 1179642 - DNA, 15 bp, Homo sapiens
ttgcccaagataatg

SEQ ID NO: 1179643 - DNA, 15 bp, Homo sapiens
cttgcccaagataat

SEQ ID NO: 1179644 - DNA, 15 bp, Homo sapiens
acttgcccaagataa

SEQ ID NO: 1179645 - DNA, 15 bp, Homo sapiens
aacttgcccaagata

SEQ ID NO: 1179646 - DNA, 15 bp, Homo sapiens
ataacttgcccaaga

SEQ ID NO: 1179647 - DNA, 15 bp, Homo sapiens
cataacttgcccaag

SEQ ID NO: 1179648 - DNA, 15 bp, Homo sapiens
ccataacttgcccaa

SEQ ID NO: 1179649 - DNA, 15 bp, Homo sapiens
tccataacttgccca

SEQ ID NO: 1179650 - DNA, 15 bp, Homo sapiens
ttccataacttgccc

SEQ ID NO: 1179651 - DNA, 15 bp, Homo sapiens
gttccataacttgcc

SEQ ID NO: 1179652 - DNA, 15 bp, Homo sapiens
agttccataacttgc

SEQ ID NO: 1179653 - DNA, 15 bp, Homo sapiens
aagttccataacttg

SEQ ID NO: 1179654 - DNA, 15 bp, Homo sapiens
aaagttccataactt

SEQ ID NO: 1179655 - DNA, 15 bp, Homo sapiens
caaagttccataact

SEQ ID NO: 1179656 - DNA, 15 bp, Homo sapiens
acaaagttccataac

SEQ ID NO: 1179657 - DNA, 15 bp, Homo sapiens
aacaaagttccataa

SEQ ID NO: 1179658 - DNA, 15 bp, Homo sapiens
aaacaaagttccata

SEQ ID NO: 1179659 - DNA, 15 bp, Homo sapiens
aaaacaaagttccat

SEQ ID NO: 1179660 - DNA, 15 bp, Homo sapiens
gaaaacaaagttcca

SEQ ID NO: 1179661 - DNA, 15 bp, Homo sapiens
agaaaacaaagttcc

SEQ ID NO: 1179662 - DNA, 15 bp, Homo sapiens
gagaaaacaaagttc

SEQ ID NO: 1179663 - DNA, 15 bp, Homo sapiens
ggagaaaacaaagtt

SEQ ID NO: 1179664 - DNA, 15 bp, Homo sapiens
aggagaaaacaaagt

SEQ ID NO: 1179665 - DNA, 15 bp, Homo sapiens
gaggagaaaacaaag

SEQ ID NO: 1179666 - DNA, 15 bp, Homo sapiens
agaggagaaaacaaa

SEQ ID NO: 1179667 - DNA, 15 bp, Homo sapiens
tagaggagaaaacaa

SEQ ID NO: 1179668 - DNA, 15 bp, Homo sapiens
atagaggagaaaaca

SEQ ID NO: 1179669 - DNA, 15 bp, Homo sapiens
tatagaggagaaaac

SEQ ID NO: 1179670 - DNA, 15 bp, Homo sapiens
ttatagaggagaaaa

SEQ ID NO: 1179671 - DNA, 15 bp, Homo sapiens
tttatagaggagaaa

SEQ ID NO: 1179672 - DNA, 15 bp, Homo sapiens
ttttatagaggagaa

SEQ ID NO: 1179673 - DNA, 15 bp, Homo sapiens
tttttatagaggaga

SEQ ID NO: 1179674 - DNA, 15 bp, Homo sapiens
ttttttatagaggag

SEQ ID NO: 1179675 - DNA, 15 bp, Homo sapiens
attttttatagagga

SEQ ID NO: 1179676 - DNA, 15 bp, Homo sapiens
tattttttatagagg

SEQ ID NO: 1179677 - DNA, 15 bp, Homo sapiens
attgtattttttata

SEQ ID NO: 1179678 - DNA, 15 bp, Homo sapiens
tattgtattttttat

SEQ ID NO: 1179679 - DNA, 15 bp, Homo sapiens
ttattgtatttttta

SEQ ID NO: 1179680 - DNA, 15 bp, Homo sapiens
cttattgtatttttt

SEQ ID NO: 1179681 - DNA, 15 bp, Homo sapiens
tcttattgtattttt

SEQ ID NO: 1179682 - DNA, 15 bp, Homo sapiens
ttcttattgtatttt

SEQ ID NO: 1179683 - DNA, 15 bp, Homo sapiens
attcttattgtattt

SEQ ID NO: 1179684 - DNA, 15 bp, Homo sapiens
cattcttattgtatt

SEQ ID NO: 1179685 - DNA, 15 bp, Homo sapiens
gcattcttattgtat

SEQ ID NO: 1179686 - DNA, 15 bp, Homo sapiens
tgcattcttattgta

SEQ ID NO: 1179687 - DNA, 15 bp, Homo sapiens
atgcattcttattgt

SEQ ID NO: 1179688 - DNA, 15 bp, Homo sapiens
aatgcattcttattg

SEQ ID NO: 1179689 - DNA, 15 bp, Homo sapiens
aaatgcattcttatt

SEQ ID NO: 1179690 - DNA, 15 bp, Homo sapiens
gaaatgcattcttat

SEQ ID NO: 1179691 - DNA, 15 bp, Homo sapiens
agaaatgcattctta

SEQ ID NO: 1179692 - DNA, 15 bp, Homo sapiens
gagaaatgcattctt

SEQ ID NO: 1179693 - DNA, 15 bp, Homo sapiens
ggagaaatgcattct

SEQ ID NO: 1179694 - DNA, 15 bp, Homo sapiens
aggagaaatgcattc

SEQ ID NO: 1179695 - DNA, 15 bp, Homo sapiens
caggagaaatgcatt

SEQ ID NO: 1179696 - DNA, 15 bp, Homo sapiens
ccaggagaaatgcat

SEQ ID NO: 1179697 - DNA, 15 bp, Homo sapiens
cccaggagaaatgca

SEQ ID NO: 1179698 - DNA, 15 bp, Homo sapiens
acccaggagaaatgc

SEQ ID NO: 1179699 - DNA, 15 bp, Homo sapiens
aacccaggagaaatg

SEQ ID NO: 1179700 - DNA, 15 bp, Homo sapiens
aaacccaggagaaat

SEQ ID NO: 1179701 - DNA, 15 bp, Homo sapiens
caaacccaggagaaa

SEQ ID NO: 1179702 - DNA, 15 bp, Homo sapiens
tcaaacccaggagaa

SEQ ID NO: 1179703 - DNA, 15 bp, Homo sapiens
atcaaacccaggaga

SEQ ID NO: 1179704 - DNA, 15 bp, Homo sapiens
catcaaacccaggag

SEQ ID NO: 1179705 - DNA, 15 bp, Homo sapiens
acatcaaacccagga

SEQ ID NO: 1179706 - DNA, 15 bp, Homo sapiens
cacatcaaacccagg

SEQ ID NO: 1179707 - DNA, 15 bp, Homo sapiens
tcacatcaaacccag

SEQ ID NO: 1179708 - DNA, 15 bp, Homo sapiens
ttcacatcaaaccca

SEQ ID NO: 1179709 - DNA, 15 bp, Homo sapiens
cttcacatcaaaccc

SEQ ID NO: 1179710 - DNA, 15 bp, Homo sapiens
tcttcacatcaaacc

SEQ ID NO: 1179711 - DNA, 15 bp, Homo sapiens
ttcttcacatcaaac

SEQ ID NO: 1179712 - DNA, 15 bp, Homo sapiens
attcttcacatcaaa

SEQ ID NO: 1179713 - DNA, 15 bp, Homo sapiens
tattcttcacatcaa

SEQ ID NO: 1179714 - DNA, 15 bp, Homo sapiens
gtattcttcacatca

SEQ ID NO: 1179715 - DNA, 15 bp, Homo sapiens
tgtattcttcacatc

SEQ ID NO: 1179716 - DNA, 15 bp, Homo sapiens
atgtattcttcacat

SEQ ID NO: 1179717 - DNA, 15 bp, Homo sapiens
gatgtattcttcaca

SEQ ID NO: 1179718 - DNA, 15 bp, Homo sapiens
tgatgtattcttcac

SEQ ID NO: 1179719 - DNA, 15 bp, Homo sapiens
ctgatgtattcttca

SEQ ID NO: 1179720 - DNA, 15 bp, Homo sapiens
tctgatgtattcttc

SEQ ID NO: 1179721 - DNA, 15 bp, Homo sapiens
atctgatgtattctt

SEQ ID NO: 1179722 - DNA, 15 bp, Homo sapiens
aatctgatgtattct

SEQ ID NO: 1179723 - DNA, 15 bp, Homo sapiens
taatctgatgtattc

SEQ ID NO: 1179724 - DNA, 15 bp, Homo sapiens
gtaatctgatgtatt

SEQ ID NO: 1179725 - DNA, 15 bp, Homo sapiens
cgtaatctgatgtat

SEQ ID NO: 1179726 - DNA, 15 bp, Homo sapiens
acgtaatctgatgta

SEQ ID NO: 1179727 - DNA, 15 bp, Homo sapiens
cacgtaatctgatgt

SEQ ID NO: 1179728 - DNA, 15 bp, Homo sapiens
tcacgtaatctgatg

SEQ ID NO: 1179729 - DNA, 15 bp, Homo sapiens
ttcacgtaatctgat

SEQ ID NO: 1179730 - DNA, 15 bp, Homo sapiens
tttcacgtaatctga

SEQ ID NO: 1179731 - DNA, 15 bp, Homo sapiens
ctttcacgtaatctg

SEQ ID NO: 1179732 - DNA, 15 bp, Homo sapiens
gctttcacgtaatct

SEQ ID NO: 1179733 - DNA, 15 bp, Homo sapiens
tgctttcacgtaatc

SEQ ID NO: 1179734 - DNA, 15 bp, Homo sapiens
gtgctttcacgtaat

SEQ ID NO: 1179735 - DNA, 15 bp, Homo sapiens
tgtgctttcacgtaa

SEQ ID NO: 1179736 - DNA, 15 bp, Homo sapiens
ctgtgctttcacgta

SEQ ID NO: 1179737 - DNA, 15 bp, Homo sapiens
tctgtgctttcacgt

SEQ ID NO: 1179738 - DNA, 15 bp, Homo sapiens
ctctgtgctttcacg

SEQ ID NO: 1179739 - DNA, 15 bp, Homo sapiens
gctctgtgctttcac

SEQ ID NO: 1179740 - DNA, 15 bp, Homo sapiens
tgctctgtgctttca

SEQ ID NO: 1179741 - DNA, 15 bp, Homo sapiens
atgctctgtgctttc

SEQ ID NO: 1179742 - DNA, 15 bp, Homo sapiens
catgctctgtgcttt

SEQ ID NO: 1179743 - DNA, 15 bp, Homo sapiens
ccatgctctgtgctt

SEQ ID NO: 1179744 - DNA, 15 bp, Homo sapiens
tccatgctctgtgct

SEQ ID NO: 1179745 - DNA, 15 bp, Homo sapiens
ctccatgctctgtgc

SEQ ID NO: 1179746 - DNA, 15 bp, Homo sapiens
cctccatgctctgtg

SEQ ID NO: 1179747 - DNA, 15 bp, Homo sapiens
ccctccatgctctgt

SEQ ID NO: 1179748 - DNA, 15 bp, Homo sapiens
accctccatgctctg

SEQ ID NO: 1179749 - DNA, 15 bp, Homo sapiens
aaccctccatgctct

SEQ ID NO: 1179750 - DNA, 15 bp, Homo sapiens
caaccctccatgctc

SEQ ID NO: 1179751 - DNA, 15 bp, Homo sapiens
ccaaccctccatgct

SEQ ID NO: 1179752 - DNA, 15 bp, Homo sapiens
tccaaccctccatgc

SEQ ID NO: 1179753 - DNA, 15 bp, Homo sapiens
gtccaaccctccatg

SEQ ID NO: 1179754 - DNA, 15 bp, Homo sapiens
agtccaaccctccat

SEQ ID NO: 1179755 - DNA, 15 bp, Homo sapiens
aagtccaaccctcca

SEQ ID NO: 1179756 - DNA, 15 bp, Homo sapiens
caagtccaaccctcc

SEQ ID NO: 1179757 - DNA, 15 bp, Homo sapiens
gcaagtccaaccctc

SEQ ID NO: 1179758 - DNA, 15 bp, Homo sapiens
agcaagtccaaccct

SEQ ID NO: 1179759 - DNA, 15 bp, Homo sapiens
gagcaagtccaaccc

SEQ ID NO: 1179760 - DNA, 15 bp, Homo sapiens
tgagcaagtccaacc

SEQ ID NO: 1179761 - DNA, 15 bp, Homo sapiens
atgagcaagtccaac

SEQ ID NO: 1179762 - DNA, 15 bp, Homo sapiens
gatgagcaagtccaa

SEQ ID NO: 1179763 - DNA, 15 bp, Homo sapiens
ggatgagcaagtcca

SEQ ID NO: 1179764 - DNA, 15 bp, Homo sapiens
gggatgagcaagtcc

SEQ ID NO: 1179765 - DNA, 15 bp, Homo sapiens
tgggatgagcaagtc

SEQ ID NO: 1179766 - DNA, 15 bp, Homo sapiens
ttgggatgagcaagt

SEQ ID NO: 1179767 - DNA, 15 bp, Homo sapiens
attgggatgagcaag

SEQ ID NO: 1179768 - DNA, 15 bp, Homo sapiens
tattgggatgagcaa

SEQ ID NO: 1179769 - DNA, 15 bp, Homo sapiens
ctattgggatgagca

SEQ ID NO: 1179770 - DNA, 15 bp, Homo sapiens
actattgggatgagc

SEQ ID NO: 1179771 - DNA, 15 bp, Homo sapiens
gactattgggatgag

SEQ ID NO: 1179772 - DNA, 15 bp, Homo sapiens
ggactattgggatga

SEQ ID NO: 1179773 - DNA, 15 bp, Homo sapiens
aggactattgggatg

SEQ ID NO: 1179774 - DNA, 15 bp, Homo sapiens
aaggactattgggat

SEQ ID NO: 1179775 - DNA, 15 bp, Homo sapiens
gaaggactattggga

SEQ ID NO: 1179776 - DNA, 15 bp, Homo sapiens
ggaaggactattggg

SEQ ID NO: 1179777 - DNA, 15 bp, Homo sapiens
tggaaggactattgg

SEQ ID NO: 1179778 - DNA, 15 bp, Homo sapiens
ctggaaggactattg

SEQ ID NO: 1179779 - DNA, 15 bp, Homo sapiens
cctggaaggactatt

SEQ ID NO: 1179780 - DNA, 15 bp, Homo sapiens
ccctggaaggactat

SEQ ID NO: 1179781 - DNA, 15 bp, Homo sapiens
tccctggaaggacta

SEQ ID NO: 1179782 - DNA, 15 bp, Homo sapiens
gtccctggaaggact

SEQ ID NO: 1179783 - DNA, 15 bp, Homo sapiens
agtccctggaaggac

SEQ ID NO: 1179784 - DNA, 15 bp, Homo sapiens
gagtccctggaagga

SEQ ID NO: 1179785 - DNA, 15 bp, Homo sapiens
agagtccctggaagg

SEQ ID NO: 1179786 - DNA, 15 bp, Homo sapiens
cagagtccctggaag

SEQ ID NO: 1179787 - DNA, 15 bp, Homo sapiens
tcagagtccctggaa

SEQ ID NO: 1179788 - DNA, 15 bp, Homo sapiens
ttcagagtccctgga

SEQ ID NO: 1179789 - DNA, 15 bp, Homo sapiens
attcagagtccctgg

SEQ ID NO: 1179790 - DNA, 15 bp, Homo sapiens
aattcagagtccctg

SEQ ID NO: 1179791 - DNA, 15 bp, Homo sapiens
gaattcagagtccct

SEQ ID NO: 1179792 - DNA, 15 bp, Homo sapiens
ggaattcagagtccc

SEQ ID NO: 1179793 - DNA, 15 bp, Homo sapiens
tggaattcagagtcc

SEQ ID NO: 1179794 - DNA, 15 bp, Homo sapiens
atggaattcagagtc

SEQ ID NO: 1179795 - DNA, 15 bp, Homo sapiens
aatggaattcagagt

SEQ ID NO: 1179796 - DNA, 15 bp, Homo sapiens
aaatggaattcagag

SEQ ID NO: 1179797 - DNA, 15 bp, Homo sapiens
gaaatggaattcaga

SEQ ID NO: 1179798 - DNA, 15 bp, Homo sapiens
ggaaatggaattcag

SEQ ID NO: 1179799 - DNA, 15 bp, Homo sapiens
tggaaatggaattca

SEQ ID NO: 1179800 - DNA, 15 bp, Homo sapiens
ttggaaatggaattc

SEQ ID NO: 1179801 - DNA, 15 bp, Homo sapiens
tttggaaatggaatt

SEQ ID NO: 1179802 - DNA, 15 bp, Homo sapiens
ttttggaaatggaat

SEQ ID NO: 1179803 - DNA, 15 bp, Homo sapiens
attttggaaatggaa

SEQ ID NO: 1179804 - DNA, 15 bp, Homo sapiens
aattttggaaatgga

SEQ ID NO: 1179805 - DNA, 15 bp, Homo sapiens
aaattttggaaatgg

SEQ ID NO: 1179806 - DNA, 15 bp, Homo sapiens
caaattttggaaatg

SEQ ID NO: 1179807 - DNA, 15 bp, Homo sapiens
acaaattttggaaat

SEQ ID NO: 1179808 - DNA, 15 bp, Homo sapiens
aacaaattttggaaa

SEQ ID NO: 1179809 - DNA, 15 bp, Homo sapiens
aaacaaattttggaa

SEQ ID NO: 1179810 - DNA, 15 bp, Homo sapiens
gaaacaaattttgga

SEQ ID NO: 1179811 - DNA, 15 bp, Homo sapiens
ggaaacaaattttgg

SEQ ID NO: 1179812 - DNA, 15 bp, Homo sapiens
tggaaacaaattttg

SEQ ID NO: 1179813 - DNA, 15 bp, Homo sapiens
ttggaaacaaatttt

SEQ ID NO: 1179814 - DNA, 15 bp, Homo sapiens
tttggaaacaaattt

SEQ ID NO: 1179815 - DNA, 15 bp, Homo sapiens
ttttggaaacaaatt

SEQ ID NO: 1179816 - DNA, 15 bp, Homo sapiens
attttggaaacaaat

SEQ ID NO: 1179817 - DNA, 15 bp, Homo sapiens
cattttggaaacaaa

SEQ ID NO: 1179818 - DNA, 15 bp, Homo sapiens
acattttggaaacaa

SEQ ID NO: 1179819 - DNA, 15 bp, Homo sapiens
cacattttggaaaca

SEQ ID NO: 1179820 - DNA, 15 bp, Homo sapiens
ccacattttggaaac

SEQ ID NO: 1179821 - DNA, 15 bp, Homo sapiens
cccacattttggaaa

SEQ ID NO: 1179822 - DNA, 15 bp, Homo sapiens
tcccacattttggaa

SEQ ID NO: 1179823 - DNA, 15 bp, Homo sapiens
ctcccacattttgga

SEQ ID NO: 1179824 - DNA, 15 bp, Homo sapiens
tctcccacattttgg

SEQ ID NO: 1179825 - DNA, 15 bp, Homo sapiens
ctctcccacattttg

SEQ ID NO: 1179826 - DNA, 15 bp, Homo sapiens
gctctcccacatttt

SEQ ID NO: 1179827 - DNA, 15 bp, Homo sapiens
tgctctcccacattt

SEQ ID NO: 1179828 - DNA, 15 bp, Homo sapiens
atgctctcccacatt

SEQ ID NO: 1179829 - DNA, 15 bp, Homo sapiens
aatgctctcccacat

SEQ ID NO: 1179830 - DNA, 15 bp, Homo sapiens
gaatgctctcccaca

SEQ ID NO: 1179831 - DNA, 15 bp, Homo sapiens
ggaatgctctcccac

SEQ ID NO: 1179832 - DNA, 15 bp, Homo sapiens
aggaatgctctccca

SEQ ID NO: 1179833 - DNA, 15 bp, Homo sapiens
caggaatgctctccc

SEQ ID NO: 1179834 - DNA, 15 bp, Homo sapiens
gcaggaatgctctcc

SEQ ID NO: 1179835 - DNA, 15 bp, Homo sapiens
agcaggaatgctctc

SEQ ID NO: 1179836 - DNA, 15 bp, Homo sapiens
cagcaggaatgctct

SEQ ID NO: 1179837 - DNA, 15 bp, Homo sapiens
ccagcaggaatgctc

SEQ ID NO: 1179838 - DNA, 15 bp, Homo sapiens
cccagcaggaatgct

SEQ ID NO: 1179839 - DNA, 15 bp, Homo sapiens
ccccagcaggaatgc

SEQ ID NO: 1179840 - DNA, 15 bp, Homo sapiens
accccagcaggaatg

SEQ ID NO: 1179841 - DNA, 15 bp, Homo sapiens
caccccagcaggaat

SEQ ID NO: 1179842 - DNA, 15 bp, Homo sapiens
acaccccagcaggaa

SEQ ID NO: 1179843 - DNA, 15 bp, Homo sapiens
cacaccccagcagga

SEQ ID NO: 1179844 - DNA, 15 bp, Homo sapiens
tcacaccccagcagg

SEQ ID NO: 1179845 - DNA, 15 bp, Homo sapiens
ttcacaccccagcag

SEQ ID NO: 1179846 - DNA, 15 bp, Homo sapiens
tttcacaccccagca

SEQ ID NO: 1179847 - DNA, 15 bp, Homo sapiens
gtttcacaccccagc

SEQ ID NO: 1179848 - DNA, 15 bp, Homo sapiens
ggtttcacaccccag

SEQ ID NO: 1179849 - DNA, 15 bp, Homo sapiens
aggtttcacacccca

SEQ ID NO: 1179850 - DNA, 15 bp, Homo sapiens
gaggtttcacacccc

SEQ ID NO: 1179851 - DNA, 15 bp, Homo sapiens
agaggtttcacaccc

SEQ ID NO: 1179852 - DNA, 15 bp, Homo sapiens
cagaggtttcacacc

SEQ ID NO: 1179853 - DNA, 15 bp, Homo sapiens
tcagaggtttcacac

SEQ ID NO: 1179854 - DNA, 15 bp, Homo sapiens
ctcagaggtttcaca

SEQ ID NO: 1179855 - DNA, 15 bp, Homo sapiens
tctcagaggtttcac

SEQ ID NO: 1179856 - DNA, 15 bp, Homo sapiens
gtctcagaggtttca

SEQ ID NO: 1179857 - DNA, 15 bp, Homo sapiens
tgtctcagaggtttc

SEQ ID NO: 1179858 - DNA, 15 bp, Homo sapiens
ttgtctcagaggttt

SEQ ID NO: 1179859 - DNA, 15 bp, Homo sapiens
tttgtctcagaggtt

SEQ ID NO: 1179860 - DNA, 15 bp, Homo sapiens
atttgtctcagaggt

SEQ ID NO: 1179861 - DNA, 15 bp, Homo sapiens
aatttgtctcagagg

SEQ ID NO: 1179862 - DNA, 15 bp, Homo sapiens
taatttgtctcagag

SEQ ID NO: 1179863 - DNA, 15 bp, Homo sapiens
ttaatttgtctcaga

SEQ ID NO: 1179864 - DNA, 15 bp, Homo sapiens
cttaatttgtctcag

SEQ ID NO: 1179865 - DNA, 15 bp, Homo sapiens
acttaatttgtctca

SEQ ID NO: 1179866 - DNA, 15 bp, Homo sapiens
tacttaatttgtctc

SEQ ID NO: 1179867 - DNA, 15 bp, Homo sapiens
ttacttaatttgtct

SEQ ID NO: 1179868 - DNA, 15 bp, Homo sapiens
tttacttaatttgtc

SEQ ID NO: 1179869 - DNA, 15 bp, Homo sapiens
atttacttaatttgt

SEQ ID NO: 1179870 - DNA, 15 bp, Homo sapiens
catttacttaatttg

SEQ ID NO: 1179871 - DNA, 15 bp, Homo sapiens
acatttacttaattt

SEQ ID NO: 1179872 - DNA, 15 bp, Homo sapiens
gacatttacttaatt

SEQ ID NO: 1179873 - DNA, 15 bp, Homo sapiens
agacatttacttaat

SEQ ID NO: 1179874 - DNA, 15 bp, Homo sapiens
aagacatttacttaa

SEQ ID NO: 1179875 - DNA, 15 bp, Homo sapiens
gaagacatttactta

SEQ ID NO: 1179876 - DNA, 15 bp, Homo sapiens
agaagacatttactt

SEQ ID NO: 1179877 - DNA, 15 bp, Homo sapiens
gagaagacatttact

SEQ ID NO: 1179878 - DNA, 15 bp, Homo sapiens
agagaagacatttac

SEQ ID NO: 1179879 - DNA, 15 bp, Homo sapiens
cagagaagacattta

SEQ ID NO: 1179880 - DNA, 15 bp, Homo sapiens
acagagaagacattt

SEQ ID NO: 1179881 - DNA, 15 bp, Homo sapiens
gacagagaagacatt

SEQ ID NO: 1179882 - DNA, 15 bp, Homo sapiens
ggacagagaagacat

SEQ ID NO: 1179883 - DNA, 15 bp, Homo sapiens
tggacagagaagaca

SEQ ID NO: 1179884 - DNA, 15 bp, Homo sapiens
atggacagagaagac

SEQ ID NO: 1179885 - DNA, 15 bp, Homo sapiens
gatggacagagaaga

SEQ ID NO: 1179886 - DNA, 15 bp, Homo sapiens
agatggacagagaag

SEQ ID NO: 1179887 - DNA, 15 bp, Homo sapiens
gagatggacagagaa

SEQ ID NO: 1179888 - DNA, 15 bp, Homo sapiens
agagatggacagaga

SEQ ID NO: 1179889 - DNA, 15 bp, Homo sapiens
aagagatggacagag

SEQ ID NO: 1179890 - DNA, 15 bp, Homo sapiens
gaagagatggacaga

SEQ ID NO: 1179891 - DNA, 15 bp, Homo sapiens
ggaagagatggacag

SEQ ID NO: 1179892 - DNA, 15 bp, Homo sapiens
tggaagagatggaca

SEQ ID NO: 1179893 - DNA, 15 bp, Homo sapiens
ttggaagagatggac

SEQ ID NO: 1179894 - DNA, 15 bp, Homo sapiens
cttggaagagatgga

SEQ ID NO: 1179895 - DNA, 15 bp, Homo sapiens
gcttggaagagatgg

SEQ ID NO: 1179896 - DNA, 15 bp, Homo sapiens
ggcttggaagagatg

SEQ ID NO: 1179897 - DNA, 15 bp, Homo sapiens
tggcttggaagagat

SEQ ID NO: 1179898 - DNA, 15 bp, Homo sapiens
ctggcttggaagaga

SEQ ID NO: 1179899 - DNA, 15 bp, Homo sapiens
cctggcttggaagag

SEQ ID NO: 1179900 - DNA, 15 bp, Homo sapiens
tcctggcttggaaga

SEQ ID NO: 1179901 - DNA, 15 bp, Homo sapiens
ctcctggcttggaag

SEQ ID NO: 1179902 - DNA, 15 bp, Homo sapiens
cctcctggcttggaa

SEQ ID NO: 1179903 - DNA, 15 bp, Homo sapiens
ccctcctggcttgga

SEQ ID NO: 1179904 - DNA, 15 bp, Homo sapiens
cccctcctggcttgg

SEQ ID NO: 1179905 - DNA, 15 bp, Homo sapiens
gcccctcctggcttg

SEQ ID NO: 1179906 - DNA, 15 bp, Homo sapiens
tgcccctcctggctt

SEQ ID NO: 1179907 - DNA, 15 bp, Homo sapiens
ttgcccctcctggct

SEQ ID NO: 1179908 - DNA, 15 bp, Homo sapiens
cttgcccctcctggc

SEQ ID NO: 1179909 - DNA, 15 bp, Homo sapiens
gcttgcccctcctgg

SEQ ID NO: 1179910 - DNA, 15 bp, Homo sapiens
agcttgcccctcctg

SEQ ID NO: 1179911 - DNA, 15 bp, Homo sapiens
aagcttgcccctcct

SEQ ID NO: 1179912 - DNA, 15 bp, Homo sapiens
taagcttgcccctcc

SEQ ID NO: 1179913 - DNA, 15 bp, Homo sapiens
gtaagcttgcccctc

SEQ ID NO: 1179914 - DNA, 15 bp, Homo sapiens
agtaagcttgcccct

SEQ ID NO: 1179915 - DNA, 15 bp, Homo sapiens
gagtaagcttgcccc

SEQ ID NO: 1179916 - DNA, 15 bp, Homo sapiens
ggagtaagcttgccc

SEQ ID NO: 1179917 - DNA, 15 bp, Homo sapiens
aggagtaagcttgcc

SEQ ID NO: 1179918 - DNA, 15 bp, Homo sapiens
aaggagtaagcttgc

SEQ ID NO: 1179919 - DNA, 15 bp, Homo sapiens
taaggagtaagcttg

SEQ ID NO: 1179920 - DNA, 15 bp, Homo sapiens
ataaggagtaagctt

SEQ ID NO: 1179921 - DNA, 15 bp, Homo sapiens
cataaggagtaagct

SEQ ID NO: 1179922 - DNA, 15 bp, Homo sapiens
tcataaggagtaagc

SEQ ID NO: 1179923 - DNA, 15 bp, Homo sapiens
atcataaggagtaag

SEQ ID NO: 1179924 - DNA, 15 bp, Homo sapiens
catcataaggagtaa

SEQ ID NO: 1179925 - DNA, 15 bp, Homo sapiens
acatcataaggagta

SEQ ID NO: 1179926 - DNA, 15 bp, Homo sapiens
aacatcataaggagt

SEQ ID NO: 1179927 - DNA, 15 bp, Homo sapiens
taacatcataaggag

SEQ ID NO: 1179928 - DNA, 15 bp, Homo sapiens
gtaacatcataagga

SEQ ID NO: 1179929 - DNA, 15 bp, Homo sapiens
tgtaacatcataagg

SEQ ID NO: 1179930 - DNA, 15 bp, Homo sapiens
ctgtaacatcataag

SEQ ID NO: 1179931 - DNA, 15 bp, Homo sapiens
tctgtaacatcataa

SEQ ID NO: 1179932 - DNA, 15 bp, Homo sapiens
ctctgtaacatcata

SEQ ID NO: 1179933 - DNA, 15 bp, Homo sapiens
tctctgtaacatcat

SEQ ID NO: 1179934 - DNA, 15 bp, Homo sapiens
atctctgtaacatca

SEQ ID NO: 1179935 - DNA, 15 bp, Homo sapiens
catctctgtaacatc

SEQ ID NO: 1179936 - DNA, 15 bp, Homo sapiens
tcatctctgtaacat

SEQ ID NO: 1179937 - DNA, 15 bp, Homo sapiens
ctcatctctgtaaca

SEQ ID NO: 1179938 - DNA, 15 bp, Homo sapiens
tctcatctctgtaac

SEQ ID NO: 1179939 - DNA, 15 bp, Homo sapiens
ttctcatctctgtaa

SEQ ID NO: 1179940 - DNA, 15 bp, Homo sapiens
cttctcatctctgta

SEQ ID NO: 1179941 - DNA, 15 bp, Homo sapiens
ccttctcatctctgt

SEQ ID NO: 1179942 - DNA, 15 bp, Homo sapiens
tccttctcatctctg

SEQ ID NO: 1179943 - DNA, 15 bp, Homo sapiens
ctccttctcatctct

SEQ ID NO: 1179944 - DNA, 15 bp, Homo sapiens
cctccttctcatctc

SEQ ID NO: 1179945 - DNA, 15 bp, Homo sapiens
gcctccttctcatct

SEQ ID NO: 1179946 - DNA, 15 bp, Homo sapiens
agcctccttctcatc

SEQ ID NO: 1179947 - DNA, 15 bp, Homo sapiens
gagcctccttctcat

SEQ ID NO: 1179948 - DNA, 15 bp, Homo sapiens
cgagcctccttctca

SEQ ID NO: 1179949 - DNA, 15 bp, Homo sapiens
ccgagcctccttctc

SEQ ID NO: 1179950 - DNA, 15 bp, Homo sapiens
cccgagcctccttct

SEQ ID NO: 1179951 - DNA, 15 bp, Homo sapiens
tcccgagcctccttc

SEQ ID NO: 1179952 - DNA, 15 bp, Homo sapiens
ttcccgagcctcctt

SEQ ID NO: 1179953 - DNA, 15 bp, Homo sapiens
attcccgagcctcct

SEQ ID NO: 1179954 - DNA, 15 bp, Homo sapiens
gattcccgagcctcc

SEQ ID NO: 1179955 - DNA, 15 bp, Homo sapiens
agattcccgagcctc

SEQ ID NO: 1179956 - DNA, 15 bp, Homo sapiens
tagattcccgagcct

SEQ ID NO: 1179957 - DNA, 15 bp, Homo sapiens
gtagattcccgagcc

SEQ ID NO: 1179958 - DNA, 15 bp, Homo sapiens
ggtagattcccgagc

SEQ ID NO: 1179959 - DNA, 15 bp, Homo sapiens
gggtagattcccgag

SEQ ID NO: 1179960 - DNA, 15 bp, Homo sapiens
agggtagattcccga

SEQ ID NO: 1179961 - DNA, 15 bp, Homo sapiens
cagggtagattcccg

SEQ ID NO: 1179962 - DNA, 15 bp, Homo sapiens
ccagggtagattccc

SEQ ID NO: 1179963 - DNA, 15 bp, Homo sapiens
gccagggtagattcc

SEQ ID NO: 1179964 - DNA, 15 bp, Homo sapiens
agccagggtagattc

SEQ ID NO: 1179965 - DNA, 15 bp, Homo sapiens
cagccagggtagatt

SEQ ID NO: 1179966 - DNA, 15 bp, Homo sapiens
ccagccagggtagat

SEQ ID NO: 1179967 - DNA, 15 bp, Homo sapiens
accagccagggtaga

SEQ ID NO: 1179968 - DNA, 15 bp, Homo sapiens
gaccagccagggtag

SEQ ID NO: 1179969 - DNA, 15 bp, Homo sapiens
tgaccagccagggta

SEQ ID NO: 1179970 - DNA, 15 bp, Homo sapiens
ctgaccagccagggt

SEQ ID NO: 1179971 - DNA, 15 bp, Homo sapiens
gctgaccagccaggg

SEQ ID NO: 1179972 - DNA, 15 bp, Homo sapiens
tgctgaccagccagg

SEQ ID NO: 1179973 - DNA, 15 bp, Homo sapiens
gtgctgaccagccag

SEQ ID NO: 1179974 - DNA, 15 bp, Homo sapiens
tgtgctgaccagcca

SEQ ID NO: 1179975 - DNA, 15 bp, Homo sapiens
ctgtgctgaccagcc

SEQ ID NO: 1179976 - DNA, 15 bp, Homo sapiens
tctgtgctgaccagc

SEQ ID NO: 1179977 - DNA, 15 bp, Homo sapiens
ttctgtgctgaccag

SEQ ID NO: 1179978 - DNA, 15 bp, Homo sapiens
tttctgtgctgacca

SEQ ID NO: 1179979 - DNA, 15 bp, Homo sapiens
atttctgtgctgacc

SEQ ID NO: 1179980 - DNA, 15 bp, Homo sapiens
gatttctgtgctgac

SEQ ID NO: 1179981 - DNA, 15 bp, Homo sapiens
agatttctgtgctga

SEQ ID NO: 1179982 - DNA, 15 bp, Homo sapiens
gagatttctgtgctg

SEQ ID NO: 1179983 - DNA, 15 bp, Homo sapiens
tgagatttctgtgct

SEQ ID NO: 1179984 - DNA, 15 bp, Homo sapiens
gtgagatttctgtgc

SEQ ID NO: 1179985 - DNA, 15 bp, Homo sapiens
agtgagatttctgtg

SEQ ID NO: 1179986 - DNA, 15 bp, Homo sapiens
cagtgagatttctgt

SEQ ID NO: 1179987 - DNA, 15 bp, Homo sapiens
acagtgagatttctg

SEQ ID NO: 1179988 - DNA, 15 bp, Homo sapiens
cacagtgagatttct

SEQ ID NO: 1179989 - DNA, 15 bp, Homo sapiens
acacagtgagatttc

SEQ ID NO: 1179990 - DNA, 15 bp, Homo sapiens
gacacagtgagattt

SEQ ID NO: 1179991 - DNA, 15 bp, Homo sapiens
tgacacagtgagatt

SEQ ID NO: 1179992 - DNA, 15 bp, Homo sapiens
ttgacacagtgagat

SEQ ID NO: 1179993 - DNA, 15 bp, Homo sapiens
cttgacacagtgaga

SEQ ID NO: 1179994 - DNA, 15 bp, Homo sapiens
gcttgacacagtgag

SEQ ID NO: 1179995 - DNA, 15 bp, Homo sapiens
tgcttgacacagtga

SEQ ID NO: 1179996 - DNA, 15 bp, Homo sapiens
ttgcttgacacagtg

SEQ ID NO: 1179997 - DNA, 15 bp, Homo sapiens
tttgcttgacacagt

SEQ ID NO: 1179998 - DNA, 15 bp, Homo sapiens
ctttgcttgacacag

SEQ ID NO: 1179999 - DNA, 15 bp, Homo sapiens
gctttgcttgacaca

SEQ ID NO: 1180000 - DNA, 15 bp, Homo sapiens
agctttgcttgacac

SEQ ID NO: 1180001 - DNA, 15 bp, Homo sapiens
aagctttgcttgaca

SEQ ID NO: 1180002 - DNA, 15 bp, Homo sapiens
taagctttgcttgac

SEQ ID NO: 1180003 - DNA, 15 bp, Homo sapiens
ttaagctttgcttga

SEQ ID NO: 1180004 - DNA, 15 bp, Homo sapiens
attaagctttgcttg

SEQ ID NO: 1180005 - DNA, 15 bp, Homo sapiens
aattaagctttgctt

SEQ ID NO: 1180006 - DNA, 15 bp, Homo sapiens
gaattaagctttgct

SEQ ID NO: 1180007 - DNA, 15 bp, Homo sapiens
agaattaagctttgc

SEQ ID NO: 1180008 - DNA, 15 bp, Homo sapiens
tagaattaagctttg

SEQ ID NO: 1180009 - DNA, 15 bp, Homo sapiens
ctagaattaagcttt

SEQ ID NO: 1180010 - DNA, 15 bp, Homo sapiens
cctagaattaagctt

SEQ ID NO: 1180011 - DNA, 15 bp, Homo sapiens
tcctagaattaagct

SEQ ID NO: 1180012 - DNA, 15 bp, Homo sapiens
atcctagaattaagc

SEQ ID NO: 1180013 - DNA, 15 bp, Homo sapiens
gatcctagaattaag

SEQ ID NO: 1180014 - DNA, 15 bp, Homo sapiens
ggatcctagaattaa

SEQ ID NO: 1180015 - DNA, 15 bp, Homo sapiens
aggatcctagaatta

SEQ ID NO: 1180016 - DNA, 15 bp, Homo sapiens
aaggatcctagaatt

SEQ ID NO: 1180017 - DNA, 15 bp, Homo sapiens
gaaggatcctagaat

SEQ ID NO: 1180018 - DNA, 15 bp, Homo sapiens
agaaggatcctagaa

SEQ ID NO: 1180019 - DNA, 15 bp, Homo sapiens
tagaaggatcctaga

SEQ ID NO: 1180020 - DNA, 15 bp, Homo sapiens
gtagaaggatcctag

SEQ ID NO: 1180021 - DNA, 15 bp, Homo sapiens
ggtagaaggatccta

SEQ ID NO: 1180022 - DNA, 15 bp, Homo sapiens
gggtagaaggatcct

SEQ ID NO: 1180023 - DNA, 15 bp, Homo sapiens
agggtagaaggatcc

SEQ ID NO: 1180024 - DNA, 15 bp, Homo sapiens
cagggtagaaggatc

SEQ ID NO: 1180025 - DNA, 15 bp, Homo sapiens
tcagggtagaaggat

SEQ ID NO: 1180026 - DNA, 15 bp, Homo sapiens
atcagggtagaagga

SEQ ID NO: 1180027 - DNA, 15 bp, Homo sapiens
catcagggtagaagg

SEQ ID NO: 1180028 - DNA, 15 bp, Homo sapiens
ccatcagggtagaag

SEQ ID NO: 1180029 - DNA, 15 bp, Homo sapiens
gccatcagggtagaa

SEQ ID NO: 1180030 - DNA, 15 bp, Homo sapiens
tgccatcagggtaga

SEQ ID NO: 1180031 - DNA, 15 bp, Homo sapiens
ttgccatcagggtag

SEQ ID NO: 1180032 - DNA, 15 bp, Homo sapiens
cttgccatcagggta

SEQ ID NO: 1180033 - DNA, 15 bp, Homo sapiens
tcttgccatcagggt

SEQ ID NO: 1180034 - DNA, 15 bp, Homo sapiens
ctcttgccatcaggg

SEQ ID NO: 1180035 - DNA, 15 bp, Homo sapiens
tctcttgccatcagg

SEQ ID NO: 1180036 - DNA, 15 bp, Homo sapiens
ttctcttgccatcag

SEQ ID NO: 1180037 - DNA, 15 bp, Homo sapiens
cttctcttgccatca

SEQ ID NO: 1180038 - DNA, 15 bp, Homo sapiens
tcttctcttgccatc

SEQ ID NO: 1180039 - DNA, 15 bp, Homo sapiens
ctcttctcttgccat

SEQ ID NO: 1180040 - DNA, 15 bp, Homo sapiens
gctcttctcttgcca

SEQ ID NO: 1180041 - DNA, 15 bp, Homo sapiens
agctcttctcttgcc

SEQ ID NO: 1180042 - DNA, 15 bp, Homo sapiens
aagctcttctcttgc

SEQ ID NO: 1180043 - DNA, 15 bp, Homo sapiens
aaagctcttctcttg

SEQ ID NO: 1180044 - DNA, 15 bp, Homo sapiens
gaaagctcttctctt

SEQ ID NO: 1180045 - DNA, 15 bp, Homo sapiens
agaaagctcttctct

SEQ ID NO: 1180046 - DNA, 15 bp, Homo sapiens
aagaaagctcttctc

SEQ ID NO: 1180047 - DNA, 15 bp, Homo sapiens
aaagaaagctcttct

SEQ ID NO: 1180048 - DNA, 15 bp, Homo sapiens
aaaagaaagctcttc

SEQ ID NO: 1180049 - DNA, 15 bp, Homo sapiens
caaaagaaagctctt

SEQ ID NO: 1180050 - DNA, 15 bp, Homo sapiens
acaaaagaaagctct

SEQ ID NO: 1180051 - DNA, 15 bp, Homo sapiens
aacaaaagaaagctc

SEQ ID NO: 1180052 - DNA, 15 bp, Homo sapiens
gaacaaaagaaagct

SEQ ID NO: 1180053 - DNA, 15 bp, Homo sapiens
ggaacaaaagaaagc

SEQ ID NO: 1180054 - DNA, 15 bp, Homo sapiens
tggaacaaaagaaag

SEQ ID NO: 1180055 - DNA, 15 bp, Homo sapiens
ctggaacaaaagaaa

SEQ ID NO: 1180056 - DNA, 15 bp, Homo sapiens
tctggaacaaaagaa

SEQ ID NO: 1180057 - DNA, 15 bp, Homo sapiens
ttctggaacaaaaga

SEQ ID NO: 1180058 - DNA, 15 bp, Homo sapiens
attctggaacaaaag

SEQ ID NO: 1180059 - DNA, 15 bp, Homo sapiens
tattctggaacaaaa

SEQ ID NO: 1180060 - DNA, 15 bp, Homo sapiens
atattctggaacaaa

SEQ ID NO: 1180061 - DNA, 15 bp, Homo sapiens
tatattctggaacaa

SEQ ID NO: 1180062 - DNA, 15 bp, Homo sapiens
atatattctggaaca

SEQ ID NO: 1180063 - DNA, 15 bp, Homo sapiens
gatatattctggaac

SEQ ID NO: 1180064 - DNA, 15 bp, Homo sapiens
agatatattctggaa

SEQ ID NO: 1180065 - DNA, 15 bp, Homo sapiens
tagatatattctgga

SEQ ID NO: 1180066 - DNA, 15 bp, Homo sapiens
atagatatattctgg

SEQ ID NO: 1180067 - DNA, 15 bp, Homo sapiens
tatagatatattctg

SEQ ID NO: 1180068 - DNA, 15 bp, Homo sapiens
atatagatatattct

SEQ ID NO: 1180069 - DNA, 15 bp, Homo sapiens
gatatagatatattc

SEQ ID NO: 1180070 - DNA, 15 bp, Homo sapiens
agatatagatatatt

SEQ ID NO: 1180071 - DNA, 15 bp, Homo sapiens
tagatatagatatat

SEQ ID NO: 1180072 - DNA, 15 bp, Homo sapiens
ctagatatagatata

SEQ ID NO: 1180073 - DNA, 15 bp, Homo sapiens
actagatatagatat

SEQ ID NO: 1180074 - DNA, 15 bp, Homo sapiens
aactagatatagata

SEQ ID NO: 1180075 - DNA, 15 bp, Homo sapiens
aaactagatatagat

SEQ ID NO: 1180076 - DNA, 15 bp, Homo sapiens
taaactagatataga

SEQ ID NO: 1180077 - DNA, 15 bp, Homo sapiens
ataaactagatatag

SEQ ID NO: 1180078 - DNA, 15 bp, Homo sapiens
aataaactagatata

SEQ ID NO: 1180079 - DNA, 15 bp, Homo sapiens
aaataaactagatat

SEQ ID NO: 1180080 - DNA, 15 bp, Homo sapiens
taaataaactagata

SEQ ID NO: 1180081 - DNA, 15 bp, Homo sapiens
ataaataaactagat

SEQ ID NO: 1180082 - DNA, 15 bp, Homo sapiens
cataaataaactaga

SEQ ID NO: 1180083 - DNA, 15 bp, Homo sapiens
gcataaataaactag

SEQ ID NO: 1180084 - DNA, 15 bp, Homo sapiens
tgcataaataaacta

SEQ ID NO: 1180085 - DNA, 15 bp, Homo sapiens
atgcataaataaact

SEQ ID NO: 1180086 - DNA, 15 bp, Homo sapiens
aatgcataaataaac

SEQ ID NO: 1180087 - DNA, 15 bp, Homo sapiens
aaatgcataaataaa

SEQ ID NO: 1180088 - DNA, 15 bp, Homo sapiens
aaaatgcataaataa

SEQ ID NO: 1180089 - DNA, 15 bp, Homo sapiens
aaaaatgcataaata

SEQ ID NO: 1180090 - DNA, 15 bp, Homo sapiens
taaaaatgcataaat

SEQ ID NO: 1180091 - DNA, 15 bp, Homo sapiens
gtaaaaatgcataaa

SEQ ID NO: 1180092 - DNA, 15 bp, Homo sapiens
ggtaaaaatgcataa

SEQ ID NO: 1180093 - DNA, 15 bp, Homo sapiens
aggtaaaaatgcata

SEQ ID NO: 1180094 - DNA, 15 bp, Homo sapiens
aaggtaaaaatgcat

SEQ ID NO: 1180095 - DNA, 15 bp, Homo sapiens
gaaggtaaaaatgca

SEQ ID NO: 1180096 - DNA, 15 bp, Homo sapiens
agaaggtaaaaatgc

SEQ ID NO: 1180097 - DNA, 15 bp, Homo sapiens
gagaaggtaaaaatg

SEQ ID NO: 1180098 - DNA, 15 bp, Homo sapiens
tgagaaggtaaaaat

SEQ ID NO: 1180099 - DNA, 15 bp, Homo sapiens
atgagaaggtaaaaa

SEQ ID NO: 1180100 - DNA, 15 bp, Homo sapiens
aatgagaaggtaaaa

SEQ ID NO: 1180101 - DNA, 15 bp, Homo sapiens
taatgagaaggtaaa

SEQ ID NO: 1180102 - DNA, 15 bp, Homo sapiens
ataatgagaaggtaa

SEQ ID NO: 1180103 - DNA, 15 bp, Homo sapiens
aataatgagaaggta

SEQ ID NO: 1180104 - DNA, 15 bp, Homo sapiens
gaataatgagaaggt

SEQ ID NO: 1180105 - DNA, 15 bp, Homo sapiens
ggaataatgagaagg

SEQ ID NO: 1180106 - DNA, 15 bp, Homo sapiens
aggaataatgagaag

SEQ ID NO: 1180107 - DNA, 15 bp, Homo sapiens
aaggaataatgagaa

SEQ ID NO: 1180108 - DNA, 15 bp, Homo sapiens
aaaggaataatgaga

SEQ ID NO: 1180109 - DNA, 15 bp, Homo sapiens
caaaggaataatgag

SEQ ID NO: 1180110 - DNA, 15 bp, Homo sapiens
acaaaggaataatga

SEQ ID NO: 1180111 - DNA, 15 bp, Homo sapiens
tacaaaggaataatg

SEQ ID NO: 1180112 - DNA, 15 bp, Homo sapiens
gtacaaaggaataat

SEQ ID NO: 1180113 - DNA, 15 bp, Homo sapiens
ggtacaaaggaataa

SEQ ID NO: 1180114 - DNA, 15 bp, Homo sapiens
aggtacaaaggaata

SEQ ID NO: 1180115 - DNA, 15 bp, Homo sapiens
taggtacaaaggaat

SEQ ID NO: 1180116 - DNA, 15 bp, Homo sapiens
ataggtacaaaggaa

SEQ ID NO: 1180117 - DNA, 15 bp, Homo sapiens
aataggtacaaagga

SEQ ID NO: 1180118 - DNA, 15 bp, Homo sapiens
aaataggtacaaagg

SEQ ID NO: 1180119 - DNA, 15 bp, Homo sapiens
gaaataggtacaaag

SEQ ID NO: 1180120 - DNA, 15 bp, Homo sapiens
tgaaataggtacaaa

SEQ ID NO: 1180121 - DNA, 15 bp, Homo sapiens
ctgaaataggtacaa

SEQ ID NO: 1180122 - DNA, 15 bp, Homo sapiens
tctgaaataggtaca

SEQ ID NO: 1180123 - DNA, 15 bp, Homo sapiens
atctgaaataggtac

SEQ ID NO: 1180124 - DNA, 15 bp, Homo sapiens
tatctgaaataggta

SEQ ID NO: 1180125 - DNA, 15 bp, Homo sapiens
atatctgaaataggt

SEQ ID NO: 1180126 - DNA, 15 bp, Homo sapiens
catatctgaaatagg

SEQ ID NO: 1180127 - DNA, 15 bp, Homo sapiens
acatatctgaaatag

SEQ ID NO: 1180128 - DNA, 15 bp, Homo sapiens
gacatatctgaaata

SEQ ID NO: 1180129 - DNA, 15 bp, Homo sapiens
ggacatatctgaaat

SEQ ID NO: 1180130 - DNA, 15 bp, Homo sapiens
tggacatatctgaaa

SEQ ID NO: 1180131 - DNA, 15 bp, Homo sapiens
atggacatatctgaa

SEQ ID NO: 1180132 - DNA, 15 bp, Homo sapiens
aatggacatatctga

SEQ ID NO: 1180133 - DNA, 15 bp, Homo sapiens
gaatggacatatctg

SEQ ID NO: 1180134 - DNA, 15 bp, Homo sapiens
agaatggacatatct

SEQ ID NO: 1180135 - DNA, 15 bp, Homo sapiens
aagaatggacatatc

SEQ ID NO: 1180136 - DNA, 15 bp, Homo sapiens
aaagaatggacatat

SEQ ID NO: 1180137 - DNA, 15 bp, Homo sapiens
caaagaatggacata

SEQ ID NO: 1180138 - DNA, 15 bp, Homo sapiens
ccaaagaatggacat

SEQ ID NO: 1180139 - DNA, 15 bp, Homo sapiens
cccaaagaatggaca

SEQ ID NO: 1180140 - DNA, 15 bp, Homo sapiens
acccaaagaatggac

SEQ ID NO: 1180141 - DNA, 15 bp, Homo sapiens
cacccaaagaatgga

SEQ ID NO: 1180142 - DNA, 15 bp, Homo sapiens
ccacccaaagaatgg

SEQ ID NO: 1180143 - DNA, 15 bp, Homo sapiens
cccacccaaagaatg

SEQ ID NO: 1180144 - DNA, 15 bp, Homo sapiens
acccacccaaagaat

SEQ ID NO: 1180145 - DNA, 15 bp, Homo sapiens
gacccacccaaagaa

SEQ ID NO: 1180146 - DNA, 15 bp, Homo sapiens
tgacccacccaaaga

SEQ ID NO: 1180147 - DNA, 15 bp, Homo sapiens
ttgacccacccaaag

SEQ ID NO: 1180148 - DNA, 15 bp, Homo sapiens
tttgacccacccaaa

SEQ ID NO: 1180149 - DNA, 15 bp, Homo sapiens
ctttgacccacccaa

SEQ ID NO: 1180150 - DNA, 15 bp, Homo sapiens
gctttgacccaccca

SEQ ID NO: 1180151 - DNA, 15 bp, Homo sapiens
agctttgacccaccc

SEQ ID NO: 1180152 - DNA, 15 bp, Homo sapiens
tagctttgacccacc

SEQ ID NO: 1180153 - DNA, 15 bp, Homo sapiens
gtagctttgacccac

SEQ ID NO: 1180154 - DNA, 15 bp, Homo sapiens
tgtagctttgaccca

SEQ ID NO: 1180155 - DNA, 15 bp, Homo sapiens
atgtagctttgaccc

SEQ ID NO: 1180156 - DNA, 15 bp, Homo sapiens
gatgtagctttgacc

SEQ ID NO: 1180157 - DNA, 15 bp, Homo sapiens
agatgtagctttgac

SEQ ID NO: 1180158 - DNA, 15 bp, Homo sapiens
tagatgtagctttga

SEQ ID NO: 1180159 - DNA, 15 bp, Homo sapiens
atagatgtagctttg

SEQ ID NO: 1180160 - DNA, 15 bp, Homo sapiens
catagatgtagcttt

SEQ ID NO: 1180161 - DNA, 15 bp, Homo sapiens
gcatagatgtagctt

SEQ ID NO: 1180162 - DNA, 15 bp, Homo sapiens
ggcatagatgtagct

SEQ ID NO: 1180163 - DNA, 15 bp, Homo sapiens
cggcatagatgtagc

SEQ ID NO: 1180164 - DNA, 15 bp, Homo sapiens
acggcatagatgtag

SEQ ID NO: 1180165 - DNA, 15 bp, Homo sapiens
gacggcatagatgta

SEQ ID NO: 1180166 - DNA, 15 bp, Homo sapiens
tgacggcatagatgt

SEQ ID NO: 1180167 - DNA, 15 bp, Homo sapiens
ttgacggcatagatg

SEQ ID NO: 1180168 - DNA, 15 bp, Homo sapiens
gttgacggcatagat

SEQ ID NO: 1180169 - DNA, 15 bp, Homo sapiens
ggttgacggcataga

SEQ ID NO: 1180170 - DNA, 15 bp, Homo sapiens
gggttgacggcatag

SEQ ID NO: 1180171 - DNA, 15 bp, Homo sapiens
ggggttgacggcata

SEQ ID NO: 1180172 - DNA, 15 bp, Homo sapiens
tggggttgacggcat

SEQ ID NO: 1180173 - DNA, 15 bp, Homo sapiens
gtggggttgacggca

SEQ ID NO: 1180174 - DNA, 15 bp, Homo sapiens
agtggggttgacggc

SEQ ID NO: 1180175 - DNA, 15 bp, Homo sapiens
gagtggggttgacgg

SEQ ID NO: 1180176 - DNA, 15 bp, Homo sapiens
ggagtggggttgacg

SEQ ID NO: 1180177 - DNA, 15 bp, Homo sapiens
gggagtggggttgac

SEQ ID NO: 1180178 - DNA, 15 bp, Homo sapiens
agggagtggggttga

SEQ ID NO: 1180179 - DNA, 15 bp, Homo sapiens
cagggagtggggttg

SEQ ID NO: 1180180 - DNA, 15 bp, Homo sapiens
tcagggagtggggtt

SEQ ID NO: 1180181 - DNA, 15 bp, Homo sapiens
gtcagggagtggggt

SEQ ID NO: 1180182 - DNA, 15 bp, Homo sapiens
agtcagggagtgggg

SEQ ID NO: 1180183 - DNA, 15 bp, Homo sapiens
gagtcagggagtggg

SEQ ID NO: 1180184 - DNA, 15 bp, Homo sapiens
ggagtcagggagtgg

SEQ ID NO: 1180185 - DNA, 15 bp, Homo sapiens
aggagtcagggagtg

SEQ ID NO: 1180186 - DNA, 15 bp, Homo sapiens
gaggagtcagggagt

SEQ ID NO: 1180187 - DNA, 15 bp, Homo sapiens
agaggagtcagggag

SEQ ID NO: 1180188 - DNA, 15 bp, Homo sapiens
aagaggagtcaggga

SEQ ID NO: 1180189 - DNA, 15 bp, Homo sapiens
caagaggagtcaggg

SEQ ID NO: 1180190 - DNA, 15 bp, Homo sapiens
tcaagaggagtcagg

SEQ ID NO: 1180191 - DNA, 15 bp, Homo sapiens
ttcaagaggagtcag

SEQ ID NO: 1180192 - DNA, 15 bp, Homo sapiens
attcaagaggagtca

SEQ ID NO: 1180193 - DNA, 15 bp, Homo sapiens
cattcaagaggagtc

SEQ ID NO: 1180194 - DNA, 15 bp, Homo sapiens
acattcaagaggagt

SEQ ID NO: 1180195 - DNA, 15 bp, Homo sapiens
aacattcaagaggag

SEQ ID NO: 1180196 - DNA, 15 bp, Homo sapiens
caacattcaagagga

SEQ ID NO: 1180197 - DNA, 15 bp, Homo sapiens
ccaacattcaagagg

SEQ ID NO: 1180198 - DNA, 15 bp, Homo sapiens
accaacattcaagag

SEQ ID NO: 1180199 - DNA, 15 bp, Homo sapiens
gaccaacattcaaga

SEQ ID NO: 1180200 - DNA, 15 bp, Homo sapiens
ggaccaacattcaag

SEQ ID NO: 1180201 - DNA, 15 bp, Homo sapiens
tggaccaacattcaa

SEQ ID NO: 1180202 - DNA, 15 bp, Homo sapiens
gtggaccaacattca

SEQ ID NO: 1180203 - DNA, 15 bp, Homo sapiens
tgtggaccaacattc

SEQ ID NO: 1180204 - DNA, 15 bp, Homo sapiens
ttgtggaccaacatt

SEQ ID NO: 1180205 - DNA, 15 bp, Homo sapiens
cttgtggaccaacat

SEQ ID NO: 1180206 - DNA, 15 bp, Homo sapiens
acttgtggaccaaca

SEQ ID NO: 1180207 - DNA, 15 bp, Homo sapiens
gacttgtggaccaac

SEQ ID NO: 1180208 - DNA, 15 bp, Homo sapiens
tgacttgtggaccaa

SEQ ID NO: 1180209 - DNA, 15 bp, Homo sapiens
atgacttgtggacca

SEQ ID NO: 1180210 - DNA, 15 bp, Homo sapiens
aatgacttgtggacc

SEQ ID NO: 1180211 - DNA, 15 bp, Homo sapiens
gaatgacttgtggac

SEQ ID NO: 1180212 - DNA, 15 bp, Homo sapiens
ggaatgacttgtgga

SEQ ID NO: 1180213 - DNA, 15 bp, Homo sapiens
gggaatgacttgtgg

SEQ ID NO: 1180214 - DNA, 15 bp, Homo sapiens
agggaatgacttgtg

SEQ ID NO: 1180215 - DNA, 15 bp, Homo sapiens
gagggaatgacttgt

SEQ ID NO: 1180216 - DNA, 15 bp, Homo sapiens
agagggaatgacttg

SEQ ID NO: 1180217 - DNA, 15 bp, Homo sapiens
aagagggaatgactt

SEQ ID NO: 1180218 - DNA, 15 bp, Homo sapiens
gaagagggaatgact

SEQ ID NO: 1180219 - DNA, 15 bp, Homo sapiens
agaagagggaatgac

SEQ ID NO: 1180220 - DNA, 15 bp, Homo sapiens
aagaagagggaatga

SEQ ID NO: 1180221 - DNA, 15 bp, Homo sapiens
gaagaagagggaatg

SEQ ID NO: 1180222 - DNA, 15 bp, Homo sapiens
agaagaagagggaat

SEQ ID NO: 1180223 - DNA, 15 bp, Homo sapiens
cagaagaagagggaa

SEQ ID NO: 1180224 - DNA, 15 bp, Homo sapiens
gcagaagaagaggga

SEQ ID NO: 1180225 - DNA, 15 bp, Homo sapiens
tgcagaagaagaggg

SEQ ID NO: 1180226 - DNA, 15 bp, Homo sapiens
ttgcagaagaagagg

SEQ ID NO: 1180227 - DNA, 15 bp, Homo sapiens
attgcagaagaagag

SEQ ID NO: 1180228 - DNA, 15 bp, Homo sapiens
gattgcagaagaaga

SEQ ID NO: 1180229 - DNA, 15 bp, Homo sapiens
agattgcagaagaag

SEQ ID NO: 1180230 - DNA, 15 bp, Homo sapiens
tagattgcagaagaa

SEQ ID NO: 1180231 - DNA, 15 bp, Homo sapiens
ctagattgcagaaga

SEQ ID NO: 1180232 - DNA, 15 bp, Homo sapiens
gctagattgcagaag

SEQ ID NO: 1180233 - DNA, 15 bp, Homo sapiens
agctagattgcagaa

SEQ ID NO: 1180234 - DNA, 15 bp, Homo sapiens
aagctagattgcaga

SEQ ID NO: 1180235 - DNA, 15 bp, Homo sapiens
taagctagattgcag

SEQ ID NO: 1180236 - DNA, 15 bp, Homo sapiens
ataagctagattgca

SEQ ID NO: 1180237 - DNA, 15 bp, Homo sapiens
aataagctagattgc

SEQ ID NO: 1180238 - DNA, 15 bp, Homo sapiens
caataagctagattg

SEQ ID NO: 1180239 - DNA, 15 bp, Homo sapiens
acaataagctagatt

SEQ ID NO: 1180240 - DNA, 15 bp, Homo sapiens
aacaataagctagat

SEQ ID NO: 1180241 - DNA, 15 bp, Homo sapiens
aaacaataagctaga

SEQ ID NO: 1180242 - DNA, 15 bp, Homo sapiens
aaaacaataagctag

SEQ ID NO: 1180243 - DNA, 15 bp, Homo sapiens
aaaaacaataagcta

SEQ ID NO: 1180244 - DNA, 15 bp, Homo sapiens
aaaaaacaataagct

SEQ ID NO: 1180245 - DNA, 15 bp, Homo sapiens
taaaaaacaataagc

SEQ ID NO: 1180246 - DNA, 15 bp, Homo sapiens
ttaaaaaacaataag

SEQ ID NO: 1180247 - DNA, 15 bp, Homo sapiens
attaaaaaacaataa

SEQ ID NO: 1180248 - DNA, 15 bp, Homo sapiens
cattaaaaaacaata

SEQ ID NO: 1180249 - DNA, 15 bp, Homo sapiens
gcattaaaaaacaat

SEQ ID NO: 1180250 - DNA, 15 bp, Homo sapiens
tgcattaaaaaacaa

SEQ ID NO: 1180251 - DNA, 15 bp, Homo sapiens
ttgcattaaaaaaca

SEQ ID NO: 1180252 - DNA, 15 bp, Homo sapiens
attgcattaaaaaac

SEQ ID NO: 1180253 - DNA, 15 bp, Homo sapiens
cattgcattaaaaaa

SEQ ID NO: 1180254 - DNA, 15 bp, Homo sapiens
ccattgcattaaaaa

SEQ ID NO: 1180255 - DNA, 15 bp, Homo sapiens
accattgcattaaaa

SEQ ID NO: 1180256 - DNA, 15 bp, Homo sapiens
aaccattgcattaaa

SEQ ID NO: 1180257 - DNA, 15 bp, Homo sapiens
aaaccattgcattaa

SEQ ID NO: 1180258 - DNA, 15 bp, Homo sapiens
aaaaccattgcatta

SEQ ID NO: 1180259 - DNA, 15 bp, Homo sapiens
caaaaccattgcatt

SEQ ID NO: 1180260 - DNA, 15 bp, Homo sapiens
acaaaaccattgcat

SEQ ID NO: 1180261 - DNA, 15 bp, Homo sapiens
aacaaaaccattgca

SEQ ID NO: 1180262 - DNA, 15 bp, Homo sapiens
aaacaaaaccattgc

SEQ ID NO: 1180263 - DNA, 15 bp, Homo sapiens
gaaacaaaaccattg

SEQ ID NO: 1180264 - DNA, 15 bp, Homo sapiens
ggaaacaaaaccatt

SEQ ID NO: 1180265 - DNA, 15 bp, Homo sapiens
tggaaacaaaaccat

SEQ ID NO: 1180266 - DNA, 15 bp, Homo sapiens
atggaaacaaaacca

SEQ ID NO: 1180267 - DNA, 15 bp, Homo sapiens
aatggaaacaaaacc

SEQ ID NO: 1180268 - DNA, 15 bp, Homo sapiens
aaatggaaacaaaac

SEQ ID NO: 1180269 - DNA, 15 bp, Homo sapiens
aaaatggaaacaaaa

SEQ ID NO: 1180270 - DNA, 15 bp, Homo sapiens
gaaaatggaaacaaa

SEQ ID NO: 1180271 - DNA, 15 bp, Homo sapiens
tgaaaatggaaacaa

SEQ ID NO: 1180272 - DNA, 15 bp, Homo sapiens
atgaaaatggaaaca

SEQ ID NO: 1180273 - DNA, 15 bp, Homo sapiens
tatgaaaatggaaac

SEQ ID NO: 1180274 - DNA, 15 bp, Homo sapiens
ttatgaaaatggaaa

SEQ ID NO: 1180275 - DNA, 15 bp, Homo sapiens
gttatgaaaatggaa

SEQ ID NO: 1180276 - DNA, 15 bp, Homo sapiens
tgttatgaaaatgga

SEQ ID NO: 1180277 - DNA, 15 bp, Homo sapiens
gtgttatgaaaatgg

SEQ ID NO: 1180278 - DNA, 15 bp, Homo sapiens
cgtgttatgaaaatg

SEQ ID NO: 1180279 - DNA, 15 bp, Homo sapiens
ccgtgttatgaaaat

SEQ ID NO: 1180280 - DNA, 15 bp, Homo sapiens
gccgtgttatgaaaa

SEQ ID NO: 1180281 - DNA, 15 bp, Homo sapiens
ggccgtgttatgaaa

SEQ ID NO: 1180282 - DNA, 15 bp, Homo sapiens
aggccgtgttatgaa

SEQ ID NO: 1180283 - DNA, 15 bp, Homo sapiens
aaggccgtgttatga

SEQ ID NO: 1180284 - DNA, 15 bp, Homo sapiens
taaggccgtgttatg

SEQ ID NO: 1180285 - DNA, 15 bp, Homo sapiens
ataaggccgtgttat

SEQ ID NO: 1180286 - DNA, 15 bp, Homo sapiens
aataaggccgtgtta

SEQ ID NO: 1180287 - DNA, 15 bp, Homo sapiens
taataaggccgtgtt

SEQ ID NO: 1180288 - DNA, 15 bp, Homo sapiens
ctaataaggccgtgt

SEQ ID NO: 1180289 - DNA, 15 bp, Homo sapiens
cctaataaggccgtg

SEQ ID NO: 1180290 - DNA, 15 bp, Homo sapiens
ccctaataaggccgt

SEQ ID NO: 1180291 - DNA, 15 bp, Homo sapiens
cccctaataaggccg

SEQ ID NO: 1180292 - DNA, 15 bp, Homo sapiens
acccctaataaggcc

SEQ ID NO: 1180293 - DNA, 15 bp, Homo sapiens
cacccctaataaggc

SEQ ID NO: 1180294 - DNA, 15 bp, Homo sapiens
acacccctaataagg

SEQ ID NO: 1180295 - DNA, 15 bp, Homo sapiens
gacacccctaataag

SEQ ID NO: 1180296 - DNA, 15 bp, Homo sapiens
agacacccctaataa

SEQ ID NO: 1180297 - DNA, 15 bp, Homo sapiens
cagacacccctaata

SEQ ID NO: 1180298 - DNA, 15 bp, Homo sapiens
ccagacacccctaat

SEQ ID NO: 1180299 - DNA, 15 bp, Homo sapiens
tccagacacccctaa

SEQ ID NO: 1180300 - DNA, 15 bp, Homo sapiens
ttccagacaccccta

SEQ ID NO: 1180301 - DNA, 15 bp, Homo sapiens
tttccagacacccct

SEQ ID NO: 1180302 - DNA, 15 bp, Homo sapiens
gtttccagacacccc

SEQ ID NO: 1180303 - DNA, 15 bp, Homo sapiens
tgtttccagacaccc

SEQ ID NO: 1180304 - DNA, 15 bp, Homo sapiens
ttgtttccagacacc

SEQ ID NO: 1180305 - DNA, 15 bp, Homo sapiens
tttgtttccagacac

SEQ ID NO: 1180306 - DNA, 15 bp, Homo sapiens
ttttgtttccagaca

SEQ ID NO: 1180307 - DNA, 15 bp, Homo sapiens
gttttgtttccagac

SEQ ID NO: 1180308 - DNA, 15 bp, Homo sapiens
agttttgtttccaga

SEQ ID NO: 1180309 - DNA, 15 bp, Homo sapiens
aagttttgtttccag

SEQ ID NO: 1180310 - DNA, 15 bp, Homo sapiens
taagttttgtttcca

SEQ ID NO: 1180311 - DNA, 15 bp, Homo sapiens
ataagttttgtttcc

SEQ ID NO: 1180312 - DNA, 15 bp, Homo sapiens
aataagttttgtttc

SEQ ID NO: 1180313 - DNA, 15 bp, Homo sapiens
taataagttttgttt

SEQ ID NO: 1180314 - DNA, 15 bp, Homo sapiens
gtaataagttttgtt

SEQ ID NO: 1180315 - DNA, 15 bp, Homo sapiens
ggtaataagttttgt

SEQ ID NO: 1180316 - DNA, 15 bp, Homo sapiens
tggtaataagttttg

SEQ ID NO: 1180317 - DNA, 15 bp, Homo sapiens
atggtaataagtttt

SEQ ID NO: 1180318 - DNA, 15 bp, Homo sapiens
tatggtaataagttt

SEQ ID NO: 1180319 - DNA, 15 bp, Homo sapiens
atatggtaataagtt

SEQ ID NO: 1180320 - DNA, 15 bp, Homo sapiens
catatggtaataagt

SEQ ID NO: 1180321 - DNA, 15 bp, Homo sapiens
tcatatggtaataag

SEQ ID NO: 1180322 - DNA, 15 bp, Homo sapiens
ctcatatggtaataa

SEQ ID NO: 1180323 - DNA, 15 bp, Homo sapiens
actcatatggtaata

SEQ ID NO: 1180324 - DNA, 15 bp, Homo sapiens
tactcatatggtaat

SEQ ID NO: 1180325 - DNA, 15 bp, Homo sapiens
atactcatatggtaa

SEQ ID NO: 1180326 - DNA, 15 bp, Homo sapiens
gatactcatatggta

SEQ ID NO: 1180327 - DNA, 15 bp, Homo sapiens
agatactcatatggt

SEQ ID NO: 1180328 - DNA, 15 bp, Homo sapiens
aagatactcatatgg

SEQ ID NO: 1180329 - DNA, 15 bp, Homo sapiens
gaagatactcatatg

SEQ ID NO: 1180330 - DNA, 15 bp, Homo sapiens
agaagatactcatat

SEQ ID NO: 1180331 - DNA, 15 bp, Homo sapiens
cagaagatactcata

SEQ ID NO: 1180332 - DNA, 15 bp, Homo sapiens
acagaagatactcat

SEQ ID NO: 1180333 - DNA, 15 bp, Homo sapiens
gacagaagatactca

SEQ ID NO: 1180334 - DNA, 15 bp, Homo sapiens
agacagaagatactc

SEQ ID NO: 1180335 - DNA, 15 bp, Homo sapiens
gagacagaagatact

SEQ ID NO: 1180336 - DNA, 15 bp, Homo sapiens
agagacagaagatac

SEQ ID NO: 1180337 - DNA, 15 bp, Homo sapiens
aagagacagaagata

SEQ ID NO: 1180338 - DNA, 15 bp, Homo sapiens
aaagagacagaagat

SEQ ID NO: 1180339 - DNA, 15 bp, Homo sapiens
gaaagagacagaaga

SEQ ID NO: 1180340 - DNA, 15 bp, Homo sapiens
agaaagagacagaag

SEQ ID NO: 1180341 - DNA, 15 bp, Homo sapiens
cagaaagagacagaa

SEQ ID NO: 1180342 - DNA, 15 bp, Homo sapiens
gcagaaagagacaga

SEQ ID NO: 1180343 - DNA, 15 bp, Homo sapiens
agcagaaagagacag

SEQ ID NO: 1180344 - DNA, 15 bp, Homo sapiens
aagcagaaagagaca

SEQ ID NO: 1180345 - DNA, 15 bp, Homo sapiens
aaagcagaaagagac

SEQ ID NO: 1180346 - DNA, 15 bp, Homo sapiens
gaaagcagaaagaga

SEQ ID NO: 1180347 - DNA, 15 bp, Homo sapiens
ggaaagcagaaagag

SEQ ID NO: 1180348 - DNA, 15 bp, Homo sapiens
gggaaagcagaaaga

SEQ ID NO: 1180349 - DNA, 15 bp, Homo sapiens
ggggaaagcagaaag

SEQ ID NO: 1180350 - DNA, 15 bp, Homo sapiens
gggggaaagcagaaa

SEQ ID NO: 1180351 - DNA, 15 bp, Homo sapiens
agggggaaagcagaa

SEQ ID NO: 1180352 - DNA, 15 bp, Homo sapiens
cagggggaaagcaga

SEQ ID NO: 1180353 - DNA, 15 bp, Homo sapiens
ccagggggaaagcag

SEQ ID NO: 1180354 - DNA, 15 bp, Homo sapiens
cccagggggaaagca

SEQ ID NO: 1180355 - DNA, 15 bp, Homo sapiens
ccccagggggaaagc

SEQ ID NO: 1180356 - DNA, 15 bp, Homo sapiens
accccagggggaaag

SEQ ID NO: 1180357 - DNA, 15 bp, Homo sapiens
aaccccagggggaaa

SEQ ID NO: 1180358 - DNA, 15 bp, Homo sapiens
aaaccccagggggaa

SEQ ID NO: 1180359 - DNA, 15 bp, Homo sapiens
gaaaccccaggggga

SEQ ID NO: 1180360 - DNA, 15 bp, Homo sapiens
agaaaccccaggggg

SEQ ID NO: 1180361 - DNA, 15 bp, Homo sapiens
cagaaaccccagggg

SEQ ID NO: 1180362 - DNA, 15 bp, Homo sapiens
gcagaaaccccaggg

SEQ ID NO: 1180363 - DNA, 15 bp, Homo sapiens
tgcagaaaccccagg

SEQ ID NO: 1180364 - DNA, 15 bp, Homo sapiens
ctgcagaaaccccag

SEQ ID NO: 1180365 - DNA, 15 bp, Homo sapiens
actgcagaaacccca

SEQ ID NO: 1180366 - DNA, 15 bp, Homo sapiens
aactgcagaaacccc

SEQ ID NO: 1180367 - DNA, 15 bp, Homo sapiens
taactgcagaaaccc

SEQ ID NO: 1180368 - DNA, 15 bp, Homo sapiens
ctaactgcagaaacc

SEQ ID NO: 1180369 - DNA, 15 bp, Homo sapiens
tctaactgcagaaac

SEQ ID NO: 1180370 - DNA, 15 bp, Homo sapiens
ctctaactgcagaaa

SEQ ID NO: 1180371 - DNA, 15 bp, Homo sapiens
cctctaactgcagaa

SEQ ID NO: 1180372 - DNA, 15 bp, Homo sapiens
acctctaactgcaga

SEQ ID NO: 1180373 - DNA, 15 bp, Homo sapiens
tacctctaactgcag

SEQ ID NO: 1180374 - DNA, 15 bp, Homo sapiens
ttacctctaactgca

SEQ ID NO: 1180375 - DNA, 15 bp, Homo sapiens
attacctctaactgc

SEQ ID NO: 1180376 - DNA, 15 bp, Homo sapiens
gattacctctaactg

SEQ ID NO: 1180377 - DNA, 15 bp, Homo sapiens
tgattacctctaact

SEQ ID NO: 1180378 - DNA, 15 bp, Homo sapiens
ctgattacctctaac

SEQ ID NO: 1180379 - DNA, 15 bp, Homo sapiens
actgattacctctaa

SEQ ID NO: 1180380 - DNA, 15 bp, Homo sapiens
tactgattacctcta

SEQ ID NO: 1180381 - DNA, 15 bp, Homo sapiens
gtactgattacctct

SEQ ID NO: 1180382 - DNA, 15 bp, Homo sapiens
tgtactgattacctc

SEQ ID NO: 1180383 - DNA, 15 bp, Homo sapiens
ctgtactgattacct

SEQ ID NO: 1180384 - DNA, 15 bp, Homo sapiens
cctgtactgattacc

SEQ ID NO: 1180385 - DNA, 15 bp, Homo sapiens
ccctgtactgattac

SEQ ID NO: 1180386 - DNA, 15 bp, Homo sapiens
cccctgtactgatta

SEQ ID NO: 1180387 - DNA, 15 bp, Homo sapiens
ccccctgtactgatt

SEQ ID NO: 1180388 - DNA, 15 bp, Homo sapiens
tccccctgtactgat

SEQ ID NO: 1180389 - DNA, 15 bp, Homo sapiens
gtccccctgtactga

SEQ ID NO: 1180390 - DNA, 15 bp, Homo sapiens
tgtccccctgtactg

SEQ ID NO: 1180391 - DNA, 15 bp, Homo sapiens
ctgtccccctgtact

SEQ ID NO: 1180392 - DNA, 15 bp, Homo sapiens
tctgtccccctgtac

SEQ ID NO: 1180393 - DNA, 15 bp, Homo sapiens
ttctgtccccctgta

SEQ ID NO: 1180394 - DNA, 15 bp, Homo sapiens
tttctgtccccctgt

SEQ ID NO: 1180395 - DNA, 15 bp, Homo sapiens
gtttctgtccccctg

SEQ ID NO: 1180396 - DNA, 15 bp, Homo sapiens
tgtttctgtccccct

SEQ ID NO: 1180397 - DNA, 15 bp, Homo sapiens
ctgtttctgtccccc

SEQ ID NO: 1180398 - DNA, 15 bp, Homo sapiens
tctgtttctgtcccc

SEQ ID NO: 1180399 - DNA, 15 bp, Homo sapiens
atctgtttctgtccc

SEQ ID NO: 1180400 - DNA, 15 bp, Homo sapiens
aatctgtttctgtcc

SEQ ID NO: 1180401 - DNA, 15 bp, Homo sapiens
aaatctgtttctgtc

SEQ ID NO: 1180402 - DNA, 15 bp, Homo sapiens
caaatctgtttctgt

SEQ ID NO: 1180403 - DNA, 15 bp, Homo sapiens
acaaatctgtttctg

SEQ ID NO: 1180404 - DNA, 15 bp, Homo sapiens
cacaaatctgtttct

SEQ ID NO: 1180405 - DNA, 15 bp, Homo sapiens
tcacaaatctgtttc

SEQ ID NO: 1180406 - DNA, 15 bp, Homo sapiens
ttcacaaatctgttt

SEQ ID NO: 1180407 - DNA, 15 bp, Homo sapiens
gttcacaaatctgtt

SEQ ID NO: 1180408 - DNA, 15 bp, Homo sapiens
tgttcacaaatctgt

SEQ ID NO: 1180409 - DNA, 15 bp, Homo sapiens
ctgttcacaaatctg

SEQ ID NO: 1180410 - DNA, 15 bp, Homo sapiens
cctgttcacaaatct

SEQ ID NO: 1180411 - DNA, 15 bp, Homo sapiens
acctgttcacaaatc

SEQ ID NO: 1180412 - DNA, 15 bp, Homo sapiens
gacctgttcacaaat

SEQ ID NO: 1180413 - DNA, 15 bp, Homo sapiens
agacctgttcacaaa

SEQ ID NO: 1180414 - DNA, 15 bp, Homo sapiens
gagacctgttcacaa

SEQ ID NO: 1180415 - DNA, 15 bp, Homo sapiens
agagacctgttcaca

SEQ ID NO: 1180416 - DNA, 15 bp, Homo sapiens
cagagacctgttcac

SEQ ID NO: 1180417 - DNA, 15 bp, Homo sapiens
ccagagacctgttca

SEQ ID NO: 1180418 - DNA, 15 bp, Homo sapiens
tccagagacctgttc

SEQ ID NO: 1180419 - DNA, 15 bp, Homo sapiens
ctccagagacctgtt

SEQ ID NO: 1180420 - DNA, 15 bp, Homo sapiens
tctccagagacctgt

SEQ ID NO: 1180421 - DNA, 15 bp, Homo sapiens
ctctccagagacctg

SEQ ID NO: 1180422 - DNA, 15 bp, Homo sapiens
cctctccagagacct

SEQ ID NO: 1180423 - DNA, 15 bp, Homo sapiens
tcctctccagagacc

SEQ ID NO: 1180424 - DNA, 15 bp, Homo sapiens
ctcctctccagagac

SEQ ID NO: 1180425 - DNA, 15 bp, Homo sapiens
tctcctctccagaga

SEQ ID NO: 1180426 - DNA, 15 bp, Homo sapiens
atctcctctccagag

SEQ ID NO: 1180427 - DNA, 15 bp, Homo sapiens
tatctcctctccaga

SEQ ID NO: 1180428 - DNA, 15 bp, Homo sapiens
ttatctcctctccag

SEQ ID NO: 1180429 - DNA, 15 bp, Homo sapiens
cttatctcctctcca

SEQ ID NO: 1180430 - DNA, 15 bp, Homo sapiens
gcttatctcctctcc

SEQ ID NO: 1180431 - DNA, 15 bp, Homo sapiens
agcttatctcctctc

SEQ ID NO: 1180432 - DNA, 15 bp, Homo sapiens
cagcttatctcctct

SEQ ID NO: 1180433 - DNA, 15 bp, Homo sapiens
tcagcttatctcctc

SEQ ID NO: 1180434 - DNA, 15 bp, Homo sapiens
ctcagcttatctcct

SEQ ID NO: 1180435 - DNA, 15 bp, Homo sapiens
cctcagcttatctcc

SEQ ID NO: 1180436 - DNA, 15 bp, Homo sapiens
tcctcagcttatctc

SEQ ID NO: 1180437 - DNA, 15 bp, Homo sapiens
ttcctcagcttatct

SEQ ID NO: 1180438 - DNA, 15 bp, Homo sapiens
cttcctcagcttatc

SEQ ID NO: 1180439 - DNA, 15 bp, Homo sapiens
ccttcctcagcttat

SEQ ID NO: 1180440 - DNA, 15 bp, Homo sapiens
tccttcctcagctta

SEQ ID NO: 1180441 - DNA, 15 bp, Homo sapiens
ttccttcctcagctt

SEQ ID NO: 1180442 - DNA, 15 bp, Homo sapiens
tttccttcctcagct

SEQ ID NO: 1180443 - DNA, 15 bp, Homo sapiens
ctttccttcctcagc

SEQ ID NO: 1180444 - DNA, 15 bp, Homo sapiens
tctttccttcctcag

SEQ ID NO: 1180445 - DNA, 15 bp, Homo sapiens
gtctttccttcctca

SEQ ID NO: 1180446 - DNA, 15 bp, Homo sapiens
tgtctttccttcctc

SEQ ID NO: 1180447 - DNA, 15 bp, Homo sapiens
ctgtctttccttcct

SEQ ID NO: 1180448 - DNA, 15 bp, Homo sapiens
actgtctttccttcc

SEQ ID NO: 1180449 - DNA, 15 bp, Homo sapiens
cactgtctttccttc

SEQ ID NO: 1180450 - DNA, 15 bp, Homo sapiens
tcactgtctttcctt

SEQ ID NO: 1180451 - DNA, 15 bp, Homo sapiens
ctcactgtctttcct

SEQ ID NO: 1180452 - DNA, 15 bp, Homo sapiens
cctcactgtctttcc

SEQ ID NO: 1180453 - DNA, 15 bp, Homo sapiens
ccctcactgtctttc

SEQ ID NO: 1180454 - DNA, 15 bp, Homo sapiens
tccctcactgtcttt

SEQ ID NO: 1180455 - DNA, 15 bp, Homo sapiens
ctccctcactgtctt

SEQ ID NO: 1180456 - DNA, 15 bp, Homo sapiens
cctccctcactgtct

SEQ ID NO: 1180457 - DNA, 15 bp, Homo sapiens
tcctccctcactgtc

SEQ ID NO: 1180458 - DNA, 15 bp, Homo sapiens
ttcctccctcactgt

SEQ ID NO: 1180459 - DNA, 15 bp, Homo sapiens
tttcctccctcactg

SEQ ID NO: 1180460 - DNA, 15 bp, Homo sapiens
ttttcctccctcact

SEQ ID NO: 1180461 - DNA, 15 bp, Homo sapiens
tttttcctccctcac

SEQ ID NO: 1180462 - DNA, 15 bp, Homo sapiens
ttttttcctccctca

SEQ ID NO: 1180463 - DNA, 15 bp, Homo sapiens
cttttttcctccctc

SEQ ID NO: 1180464 - DNA, 15 bp, Homo sapiens
gcttttttcctccct

SEQ ID NO: 1180465 - DNA, 15 bp, Homo sapiens
ggcttttttcctccc

SEQ ID NO: 1180466 - DNA, 15 bp, Homo sapiens
tggcttttttcctcc

SEQ ID NO: 1180467 - DNA, 15 bp, Homo sapiens
ttggcttttttcctc

SEQ ID NO: 1180468 - DNA, 15 bp, Homo sapiens
cttggcttttttcct

SEQ ID NO: 1180469 - DNA, 15 bp, Homo sapiens
gcttggcttttttcc

SEQ ID NO: 1180470 - DNA, 15 bp, Homo sapiens
agcttggcttttttc

SEQ ID NO: 1180471 - DNA, 15 bp, Homo sapiens
aagcttggctttttt

SEQ ID NO: 1180472 - DNA, 15 bp, Homo sapiens
gaagcttggcttttt

SEQ ID NO: 1180473 - DNA, 15 bp, Homo sapiens
agaagcttggctttt

SEQ ID NO: 1180474 - DNA, 15 bp, Homo sapiens
aagaagcttggcttt

SEQ ID NO: 1180475 - DNA, 15 bp, Homo sapiens
caagaagcttggctt

SEQ ID NO: 1180476 - DNA, 15 bp, Homo sapiens
tcaagaagcttggct

SEQ ID NO: 1180477 - DNA, 15 bp, Homo sapiens
atcaagaagcttggc

SEQ ID NO: 1180478 - DNA, 15 bp, Homo sapiens
aatcaagaagcttgg

SEQ ID NO: 1180479 - DNA, 15 bp, Homo sapiens
taatcaagaagcttg

SEQ ID NO: 1180480 - DNA, 15 bp, Homo sapiens
ctaatcaagaagctt

SEQ ID NO: 1180481 - DNA, 15 bp, Homo sapiens
tctaatcaagaagct

SEQ ID NO: 1180482 - DNA, 15 bp, Homo sapiens
ttctaatcaagaagc

SEQ ID NO: 1180483 - DNA, 15 bp, Homo sapiens
tttctaatcaagaag

SEQ ID NO: 1180484 - DNA, 15 bp, Homo sapiens
atttctaatcaagaa

SEQ ID NO: 1180485 - DNA, 15 bp, Homo sapiens
aatttctaatcaaga

SEQ ID NO: 1180486 - DNA, 15 bp, Homo sapiens
gaatttctaatcaag

SEQ ID NO: 1180487 - DNA, 15 bp, Homo sapiens
tgaatttctaatcaa

SEQ ID NO: 1180488 - DNA, 15 bp, Homo sapiens
ctgaatttctaatca

SEQ ID NO: 1180489 - DNA, 15 bp, Homo sapiens
actgaatttctaatc

SEQ ID NO: 1180490 - DNA, 15 bp, Homo sapiens
tactgaatttctaat

SEQ ID NO: 1180491 - DNA, 15 bp, Homo sapiens
ttactgaatttctaa

SEQ ID NO: 1180492 - DNA, 15 bp, Homo sapiens
tttactgaatttcta

SEQ ID NO: 1180493 - DNA, 15 bp, Homo sapiens
ctttactgaatttct

SEQ ID NO: 1180494 - DNA, 15 bp, Homo sapiens
tctttactgaatttc

SEQ ID NO: 1180495 - DNA, 15 bp, Homo sapiens
ttctttactgaattt

SEQ ID NO: 1180496 - DNA, 15 bp, Homo sapiens
attctttactgaatt

SEQ ID NO: 1180497 - DNA, 15 bp, Homo sapiens
aattctttactgaat

SEQ ID NO: 1180498 - DNA, 15 bp, Homo sapiens
aaattctttactgaa

SEQ ID NO: 1180499 - DNA, 15 bp, Homo sapiens
aaaattctttactga

SEQ ID NO: 1180500 - DNA, 15 bp, Homo sapiens
aaaaattctttactg

SEQ ID NO: 1180501 - DNA, 15 bp, Homo sapiens
aaaaaattctttact

SEQ ID NO: 1180502 - DNA, 15 bp, Homo sapiens
aaaaaaattctttac

SEQ ID NO: 1180503 - DNA, 15 bp, Homo sapiens
aaaaaaaattcttta

SEQ ID NO: 1180504 - DNA, 15 bp, Homo sapiens
taaaaaaaattcttt

SEQ ID NO: 1180505 - DNA, 15 bp, Homo sapiens
ctaaaaaaaattctt

SEQ ID NO: 1180506 - DNA, 15 bp, Homo sapiens
actaaaaaaaattct

SEQ ID NO: 1180507 - DNA, 15 bp, Homo sapiens
gactaaaaaaaattc

SEQ ID NO: 1180508 - DNA, 15 bp, Homo sapiens
cgactaaaaaaaatt

SEQ ID NO: 1180509 - DNA, 15 bp, Homo sapiens
acgactaaaaaaaat

SEQ ID NO: 1180510 - DNA, 15 bp, Homo sapiens
aacgactaaaaaaaa

SEQ ID NO: 1180511 - DNA, 15 bp, Homo sapiens
taacgactaaaaaaa

SEQ ID NO: 1180512 - DNA, 15 bp, Homo sapiens
ataacgactaaaaaa

SEQ ID NO: 1180513 - DNA, 15 bp, Homo sapiens
aataacgactaaaaa

SEQ ID NO: 1180514 - DNA, 15 bp, Homo sapiens
caataacgactaaaa

SEQ ID NO: 1180515 - DNA, 15 bp, Homo sapiens
acaataacgactaaa

SEQ ID NO: 1180516 - DNA, 15 bp, Homo sapiens
aacaataacgactaa

SEQ ID NO: 1180517 - DNA, 15 bp, Homo sapiens
aaacaataacgacta

SEQ ID NO: 1180518 - DNA, 15 bp, Homo sapiens
aaaacaataacgact

SEQ ID NO: 1180519 - DNA, 15 bp, Homo sapiens
caaaacaataacgac

SEQ ID NO: 1180520 - DNA, 15 bp, Homo sapiens
ccaaaacaataacga

SEQ ID NO: 1180521 - DNA, 15 bp, Homo sapiens
cccaaaacaataacg

SEQ ID NO: 1180522 - DNA, 15 bp, Homo sapiens
tcccaaaacaataac

SEQ ID NO: 1180523 - DNA, 15 bp, Homo sapiens
ctcccaaaacaataa

SEQ ID NO: 1180524 - DNA, 15 bp, Homo sapiens
tctcccaaaacaata

SEQ ID NO: 1180525 - DNA, 15 bp, Homo sapiens
ctctcccaaaacaat

SEQ ID NO: 1180526 - DNA, 15 bp, Homo sapiens
actctcccaaaacaa

SEQ ID NO: 1180527 - DNA, 15 bp, Homo sapiens
aactctcccaaaaca

SEQ ID NO: 1180528 - DNA, 15 bp, Homo sapiens
caactctcccaaaac

SEQ ID NO: 1180529 - DNA, 15 bp, Homo sapiens
tcaactctcccaaaa

SEQ ID NO: 1180530 - DNA, 15 bp, Homo sapiens
ctcaactctcccaaa

SEQ ID NO: 1180531 - DNA, 15 bp, Homo sapiens
tctcaactctcccaa

SEQ ID NO: 1180532 - DNA, 15 bp, Homo sapiens
ttctcaactctccca

SEQ ID NO: 1180533 - DNA, 15 bp, Homo sapiens
attctcaactctccc

SEQ ID NO: 1180534 - DNA, 15 bp, Homo sapiens
cattctcaactctcc

SEQ ID NO: 1180535 - DNA, 15 bp, Homo sapiens
tcattctcaactctc

SEQ ID NO: 1180536 - DNA, 15 bp, Homo sapiens
ctcattctcaactct

SEQ ID NO: 1180537 - DNA, 15 bp, Homo sapiens
cctcattctcaactc

SEQ ID NO: 1180538 - DNA, 15 bp, Homo sapiens
tcctcattctcaact

SEQ ID NO: 1180539 - DNA, 15 bp, Homo sapiens
ctcctcattctcaac

SEQ ID NO: 1180540 - DNA, 15 bp, Homo sapiens
cctcctcattctcaa

SEQ ID NO: 1180541 - DNA, 15 bp, Homo sapiens
tcctcctcattctca

SEQ ID NO: 1180542 - DNA, 15 bp, Homo sapiens
ttcctcctcattctc

SEQ ID NO: 1180543 - DNA, 15 bp, Homo sapiens
tttcctcctcattct

SEQ ID NO: 1180544 - DNA, 15 bp, Homo sapiens
ttttcctcctcattc

SEQ ID NO: 1180545 - DNA, 15 bp, Homo sapiens
tttttcctcctcatt

SEQ ID NO: 1180546 - DNA, 15 bp, Homo sapiens
gtttttcctcctcat

SEQ ID NO: 1180547 - DNA, 15 bp, Homo sapiens
cgtttttcctcctca

SEQ ID NO: 1180548 - DNA, 15 bp, Homo sapiens
ccgtttttcctcctc

SEQ ID NO: 1180549 - DNA, 15 bp, Homo sapiens
accgtttttcctcct

SEQ ID NO: 1180550 - DNA, 15 bp, Homo sapiens
aaccgtttttcctcc

SEQ ID NO: 1180551 - DNA, 15 bp, Homo sapiens
aaaccgtttttcctc

SEQ ID NO: 1180552 - DNA, 15 bp, Homo sapiens
gaaaccgtttttcct

SEQ ID NO: 1180553 - DNA, 15 bp, Homo sapiens
tgaaaccgtttttcc

SEQ ID NO: 1180554 - DNA, 15 bp, Homo sapiens
ctgaaaccgtttttc

SEQ ID NO: 1180555 - DNA, 15 bp, Homo sapiens
cctgaaaccgttttt

SEQ ID NO: 1180556 - DNA, 15 bp, Homo sapiens
ccctgaaaccgtttt

SEQ ID NO: 1180557 - DNA, 15 bp, Homo sapiens
tccctgaaaccgttt

SEQ ID NO: 1180558 - DNA, 15 bp, Homo sapiens
ctccctgaaaccgtt

SEQ ID NO: 1180559 - DNA, 15 bp, Homo sapiens
actccctgaaaccgt

SEQ ID NO: 1180560 - DNA, 15 bp, Homo sapiens
aactccctgaaaccg

SEQ ID NO: 1180561 - DNA, 15 bp, Homo sapiens
taactccctgaaacc

SEQ ID NO: 1180562 - DNA, 15 bp, Homo sapiens
gtaactccctgaaac

SEQ ID NO: 1180563 - DNA, 15 bp, Homo sapiens
tgtaactccctgaaa

SEQ ID NO: 1180564 - DNA, 15 bp, Homo sapiens
ctgtaactccctgaa

SEQ ID NO: 1180565 - DNA, 15 bp, Homo sapiens
cctgtaactccctga

SEQ ID NO: 1180566 - DNA, 15 bp, Homo sapiens
gcctgtaactccctg

SEQ ID NO: 1180567 - DNA, 15 bp, Homo sapiens
agcctgtaactccct

SEQ ID NO: 1180568 - DNA, 15 bp, Homo sapiens
aagcctgtaactccc

SEQ ID NO: 1180569 - DNA, 15 bp, Homo sapiens
aaagcctgtaactcc

SEQ ID NO: 1180570 - DNA, 15 bp, Homo sapiens
taaagcctgtaactc

SEQ ID NO: 1180571 - DNA, 15 bp, Homo sapiens
ttaaagcctgtaact

SEQ ID NO: 1180572 - DNA, 15 bp, Homo sapiens
cttaaagcctgtaac

SEQ ID NO: 1180573 - DNA, 15 bp, Homo sapiens
acttaaagcctgtaa

SEQ ID NO: 1180574 - DNA, 15 bp, Homo sapiens
tacttaaagcctgta

SEQ ID NO: 1180575 - DNA, 15 bp, Homo sapiens
gtacttaaagcctgt

SEQ ID NO: 1180576 - DNA, 15 bp, Homo sapiens
tgtacttaaagcctg

SEQ ID NO: 1180577 - DNA, 15 bp, Homo sapiens
ctgtacttaaagcct

SEQ ID NO: 1180578 - DNA, 15 bp, Homo sapiens
gctgtacttaaagcc

SEQ ID NO: 1180579 - DNA, 15 bp, Homo sapiens
cgctgtacttaaagc

SEQ ID NO: 1180580 - DNA, 15 bp, Homo sapiens
tcgctgtacttaaag

SEQ ID NO: 1180581 - DNA, 15 bp, Homo sapiens
ttcgctgtacttaaa

SEQ ID NO: 1180582 - DNA, 15 bp, Homo sapiens
cttcgctgtacttaa

SEQ ID NO: 1180583 - DNA, 15 bp, Homo sapiens
tcttcgctgtactta

SEQ ID NO: 1180584 - DNA, 15 bp, Homo sapiens
ctcttcgctgtactt

SEQ ID NO: 1180585 - DNA, 15 bp, Homo sapiens
tctcttcgctgtact

SEQ ID NO: 1180586 - DNA, 15 bp, Homo sapiens
ttctcttcgctgtac

SEQ ID NO: 1180587 - DNA, 15 bp, Homo sapiens
attctcttcgctgta

SEQ ID NO: 1180588 - DNA, 15 bp, Homo sapiens
aattctcttcgctgt

SEQ ID NO: 1180589 - DNA, 15 bp, Homo sapiens
caattctcttcgctg

SEQ ID NO: 1180590 - DNA, 15 bp, Homo sapiens
ccaattctcttcgct

SEQ ID NO: 1180591 - DNA, 15 bp, Homo sapiens
tccaattctcttcgc

SEQ ID NO: 1180592 - DNA, 15 bp, Homo sapiens
ttccaattctcttcg

SEQ ID NO: 1180593 - DNA, 15 bp, Homo sapiens
cttccaattctcttc

SEQ ID NO: 1180594 - DNA, 15 bp, Homo sapiens
tcttccaattctctt

SEQ ID NO: 1180595 - DNA, 15 bp, Homo sapiens
ttcttccaattctct

SEQ ID NO: 1180596 - DNA, 15 bp, Homo sapiens
tttcttccaattctc

SEQ ID NO: 1180597 - DNA, 15 bp, Homo sapiens
ctttcttccaattct

SEQ ID NO: 1180598 - DNA, 15 bp, Homo sapiens
cctttcttccaattc

SEQ ID NO: 1180599 - DNA, 15 bp, Homo sapiens
ccctttcttccaatt

SEQ ID NO: 1180600 - DNA, 15 bp, Homo sapiens
tccctttcttccaat

SEQ ID NO: 1180601 - DNA, 15 bp, Homo sapiens
ttccctttcttccaa

SEQ ID NO: 1180602 - DNA, 15 bp, Homo sapiens
attccctttcttcca

SEQ ID NO: 1180603 - DNA, 15 bp, Homo sapiens
aattccctttcttcc

SEQ ID NO: 1180604 - DNA, 15 bp, Homo sapiens
aaattccctttcttc

SEQ ID NO: 1180605 - DNA, 15 bp, Homo sapiens
aaaattccctttctt

SEQ ID NO: 1180606 - DNA, 15 bp, Homo sapiens
taaaattccctttct

SEQ ID NO: 1180607 - DNA, 15 bp, Homo sapiens
ttaaaattccctttc

SEQ ID NO: 1180608 - DNA, 15 bp, Homo sapiens
tttaaaattcccttt

SEQ ID NO: 1180609 - DNA, 15 bp, Homo sapiens
atttaaaattccctt

SEQ ID NO: 1180610 - DNA, 15 bp, Homo sapiens
catttaaaattccct

SEQ ID NO: 1180611 - DNA, 15 bp, Homo sapiens
acatttaaaattccc

SEQ ID NO: 1180612 - DNA, 15 bp, Homo sapiens
cacatttaaaattcc

SEQ ID NO: 1180613 - DNA, 15 bp, Homo sapiens
ccacatttaaaattc

SEQ ID NO: 1180614 - DNA, 15 bp, Homo sapiens
gccacatttaaaatt

SEQ ID NO: 1180615 - DNA, 15 bp, Homo sapiens
agccacatttaaaat

SEQ ID NO: 1180616 - DNA, 15 bp, Homo sapiens
cagccacatttaaaa

SEQ ID NO: 1180617 - DNA, 15 bp, Homo sapiens
ccagccacatttaaa

SEQ ID NO: 1180618 - DNA, 15 bp, Homo sapiens
cccagccacatttaa

SEQ ID NO: 1180619 - DNA, 15 bp, Homo sapiens
ccccagccacattta

SEQ ID NO: 1180620 - DNA, 15 bp, Homo sapiens
cccccagccacattt

SEQ ID NO: 1180621 - DNA, 15 bp, Homo sapiens
acccccagccacatt

SEQ ID NO: 1180622 - DNA, 15 bp, Homo sapiens
aacccccagccacat

SEQ ID NO: 1180623 - DNA, 15 bp, Homo sapiens
taacccccagccaca

SEQ ID NO: 1180624 - DNA, 15 bp, Homo sapiens
ataacccccagccac

SEQ ID NO: 1180625 - DNA, 15 bp, Homo sapiens
tataacccccagcca

SEQ ID NO: 1180626 - DNA, 15 bp, Homo sapiens
ttataacccccagcc

SEQ ID NO: 1180627 - DNA, 15 bp, Homo sapiens
tttataacccccagc

SEQ ID NO: 1180628 - DNA, 15 bp, Homo sapiens
atttataacccccag

SEQ ID NO: 1180629 - DNA, 15 bp, Homo sapiens
aatttataaccccca

SEQ ID NO: 1180630 - DNA, 15 bp, Homo sapiens
caatttataaccccc

SEQ ID NO: 1180631 - DNA, 15 bp, Homo sapiens
ccaatttataacccc

SEQ ID NO: 1180632 - DNA, 15 bp, Homo sapiens
cccaatttataaccc

SEQ ID NO: 1180633 - DNA, 15 bp, Homo sapiens
acccaatttataacc

SEQ ID NO: 1180634 - DNA, 15 bp, Homo sapiens
gacccaatttataac

SEQ ID NO: 1180635 - DNA, 15 bp, Homo sapiens
ggacccaatttataa

SEQ ID NO: 1180636 - DNA, 15 bp, Homo sapiens
gggacccaatttata

SEQ ID NO: 1180637 - DNA, 15 bp, Homo sapiens
ggggacccaatttat

SEQ ID NO: 1180638 - DNA, 15 bp, Homo sapiens
tggggacccaattta

SEQ ID NO: 1180639 - DNA, 15 bp, Homo sapiens
atggggacccaattt

SEQ ID NO: 1180640 - DNA, 15 bp, Homo sapiens
aatggggacccaatt

SEQ ID NO: 1180641 - DNA, 15 bp, Homo sapiens
taatggggacccaat

SEQ ID NO: 1180642 - DNA, 15 bp, Homo sapiens
ttaatggggacccaa

SEQ ID NO: 1180643 - DNA, 15 bp, Homo sapiens
tttaatggggaccca

SEQ ID NO: 1180644 - DNA, 15 bp, Homo sapiens
ctttaatggggaccc

SEQ ID NO: 1180645 - DNA, 15 bp, Homo sapiens
actttaatggggacc

SEQ ID NO: 1180646 - DNA, 15 bp, Homo sapiens
gactttaatggggac

SEQ ID NO: 1180647 - DNA, 15 bp, Homo sapiens
ggactttaatgggga

SEQ ID NO: 1180648 - DNA, 15 bp, Homo sapiens
aggactttaatgggg

SEQ ID NO: 1180649 - DNA, 15 bp, Homo sapiens
aaggactttaatggg

SEQ ID NO: 1180650 - DNA, 15 bp, Homo sapiens
taaggactttaatgg

SEQ ID NO: 1180651 - DNA, 15 bp, Homo sapiens
ttaaggactttaatg

SEQ ID NO: 1180652 - DNA, 15 bp, Homo sapiens
tttaaggactttaat

SEQ ID NO: 1180653 - DNA, 15 bp, Homo sapiens
ctttaaggactttaa

SEQ ID NO: 1180654 - DNA, 15 bp, Homo sapiens
tctttaaggacttta

SEQ ID NO: 1180655 - DNA, 15 bp, Homo sapiens
ttctttaaggacttt

SEQ ID NO: 1180656 - DNA, 15 bp, Homo sapiens
tttctttaaggactt

SEQ ID NO: 1180657 - DNA, 15 bp, Homo sapiens
atttctttaaggact

SEQ ID NO: 1180658 - DNA, 15 bp, Homo sapiens
aatttctttaaggac

SEQ ID NO: 1180659 - DNA, 15 bp, Homo sapiens
gaatttctttaagga

SEQ ID NO: 1180660 - DNA, 15 bp, Homo sapiens
tgaatttctttaagg

SEQ ID NO: 1180661 - DNA, 15 bp, Homo sapiens
ttgaatttctttaag

SEQ ID NO: 1180662 - DNA, 15 bp, Homo sapiens
cttgaatttctttaa

SEQ ID NO: 1180663 - DNA, 15 bp, Homo sapiens
acttgaatttcttta

SEQ ID NO: 1180664 - DNA, 15 bp, Homo sapiens
tacttgaatttcttt

SEQ ID NO: 1180665 - DNA, 15 bp, Homo sapiens
ttacttgaatttctt

SEQ ID NO: 1180666 - DNA, 15 bp, Homo sapiens
tttacttgaatttct

SEQ ID NO: 1180667 - DNA, 15 bp, Homo sapiens
ctttacttgaatttc

SEQ ID NO: 1180668 - DNA, 15 bp, Homo sapiens
tctttacttgaattt

SEQ ID NO: 1180669 - DNA, 15 bp, Homo sapiens
atctttacttgaatt

SEQ ID NO: 1180670 - DNA, 15 bp, Homo sapiens
aatctttacttgaat

SEQ ID NO: 1180671 - DNA, 15 bp, Homo sapiens
caatctttacttgaa

SEQ ID NO: 1180672 - DNA, 15 bp, Homo sapiens
ccaatctttacttga

SEQ ID NO: 1180673 - DNA, 15 bp, Homo sapiens
tccaatctttacttg

SEQ ID NO: 1180674 - DNA, 15 bp, Homo sapiens
ttccaatctttactt

SEQ ID NO: 1180675 - DNA, 15 bp, Homo sapiens
attccaatctttact

SEQ ID NO: 1180676 - DNA, 15 bp, Homo sapiens
aattccaatctttac

SEQ ID NO: 1180677 - DNA, 15 bp, Homo sapiens
taattccaatcttta

SEQ ID NO: 1180678 - DNA, 15 bp, Homo sapiens
ataattccaatcttt

SEQ ID NO: 1180679 - DNA, 15 bp, Homo sapiens
aataattccaatctt

SEQ ID NO: 1180680 - DNA, 15 bp, Homo sapiens
aaataattccaatct

SEQ ID NO: 1180681 - DNA, 15 bp, Homo sapiens
aaaataattccaatc

SEQ ID NO: 1180682 - DNA, 15 bp, Homo sapiens
aaaaataattccaat

SEQ ID NO: 1180683 - DNA, 15 bp, Homo sapiens
taaaaataattccaa

SEQ ID NO: 1180684 - DNA, 15 bp, Homo sapiens
ttaaaaataattcca

SEQ ID NO: 1180685 - DNA, 15 bp, Homo sapiens
attaaaaataattcc

SEQ ID NO: 1180686 - DNA, 15 bp, Homo sapiens
aattaaaaataattc

SEQ ID NO: 1180687 - DNA, 15 bp, Homo sapiens
taattaaaaataatt

SEQ ID NO: 1180688 - DNA, 15 bp, Homo sapiens
gtaattaaaaataat

SEQ ID NO: 1180689 - DNA, 15 bp, Homo sapiens
agtaattaaaaataa

SEQ ID NO: 1180690 - DNA, 15 bp, Homo sapiens
aagtaattaaaaata

SEQ ID NO: 1180691 - DNA, 15 bp, Homo sapiens
gaagtaattaaaaat

SEQ ID NO: 1180692 - DNA, 15 bp, Homo sapiens
agaagtaattaaaaa

SEQ ID NO: 1180693 - DNA, 15 bp, Homo sapiens
cagaagtaattaaaa

SEQ ID NO: 1180694 - DNA, 15 bp, Homo sapiens
tcagaagtaattaaa

SEQ ID NO: 1180695 - DNA, 15 bp, Homo sapiens
ttcagaagtaattaa

SEQ ID NO: 1180696 - DNA, 15 bp, Homo sapiens
cttcagaagtaatta

SEQ ID NO: 1180697 - DNA, 15 bp, Homo sapiens
ccttcagaagtaatt

SEQ ID NO: 1180698 - DNA, 15 bp, Homo sapiens
gccttcagaagtaat

SEQ ID NO: 1180699 - DNA, 15 bp, Homo sapiens
agccttcagaagtaa

SEQ ID NO: 1180700 - DNA, 15 bp, Homo sapiens
cagccttcagaagta

SEQ ID NO: 1180701 - DNA, 15 bp, Homo sapiens
ccagccttcagaagt

SEQ ID NO: 1180702 - DNA, 15 bp, Homo sapiens
tccagccttcagaag

SEQ ID NO: 1180703 - DNA, 15 bp, Homo sapiens
atccagccttcagaa

SEQ ID NO: 1180704 - DNA, 15 bp, Homo sapiens
aatccagccttcaga

SEQ ID NO: 1180705 - DNA, 15 bp, Homo sapiens
taatccagccttcag

SEQ ID NO: 1180706 - DNA, 15 bp, Homo sapiens
ataatccagccttca

SEQ ID NO: 1180707 - DNA, 15 bp, Homo sapiens
tataatccagccttc

SEQ ID NO: 1180708 - DNA, 15 bp, Homo sapiens
atataatccagcctt

SEQ ID NO: 1180709 - DNA, 15 bp, Homo sapiens
catataatccagcct

SEQ ID NO: 1180710 - DNA, 15 bp, Homo sapiens
acatataatccagcc

SEQ ID NO: 1180711 - DNA, 15 bp, Homo sapiens
gacatataatccagc

SEQ ID NO: 1180712 - DNA, 15 bp, Homo sapiens
agacatataatccag

SEQ ID NO: 1180713 - DNA, 15 bp, Homo sapiens
aagacatataatcca

SEQ ID NO: 1180714 - DNA, 15 bp, Homo sapiens
aaagacatataatcc

SEQ ID NO: 1180715 - DNA, 15 bp, Homo sapiens
caaagacatataatc

SEQ ID NO: 1180716 - DNA, 15 bp, Homo sapiens
tcaaagacatataat

SEQ ID NO: 1180717 - DNA, 15 bp, Homo sapiens
atcaaagacatataa

SEQ ID NO: 1180718 - DNA, 15 bp, Homo sapiens
catcaaagacatata

SEQ ID NO: 1180719 - DNA, 15 bp, Homo sapiens
acatcaaagacatat

SEQ ID NO: 1180720 - DNA, 15 bp, Homo sapiens
cacatcaaagacata

SEQ ID NO: 1180721 - DNA, 15 bp, Homo sapiens
ccacatcaaagacat

SEQ ID NO: 1180722 - DNA, 15 bp, Homo sapiens
tccacatcaaagaca

SEQ ID NO: 1180723 - DNA, 15 bp, Homo sapiens
gtccacatcaaagac

SEQ ID NO: 1180724 - DNA, 15 bp, Homo sapiens
agtccacatcaaaga

SEQ ID NO: 1180725 - DNA, 15 bp, Homo sapiens
gagtccacatcaaag

SEQ ID NO: 1180726 - DNA, 15 bp, Homo sapiens
tgagtccacatcaaa

SEQ ID NO: 1180727 - DNA, 15 bp, Homo sapiens
gtgagtccacatcaa

SEQ ID NO: 1180728 - DNA, 15 bp, Homo sapiens
tgtgagtccacatca

SEQ ID NO: 1180729 - DNA, 15 bp, Homo sapiens
gtgtgagtccacatc

SEQ ID NO: 1180730 - DNA, 15 bp, Homo sapiens
agtgtgagtccacat

SEQ ID NO: 1180731 - DNA, 15 bp, Homo sapiens
cagtgtgagtccaca

SEQ ID NO: 1180732 - DNA, 15 bp, Homo sapiens
tcagtgtgagtccac

SEQ ID NO: 1180733 - DNA, 15 bp, Homo sapiens
ctcagtgtgagtcca

SEQ ID NO: 1180734 - DNA, 15 bp, Homo sapiens
tctcagtgtgagtcc

SEQ ID NO: 1180735 - DNA, 15 bp, Homo sapiens
atctcagtgtgagtc

SEQ ID NO: 1180736 - DNA, 15 bp, Homo sapiens
aatctcagtgtgagt

SEQ ID NO: 1180737 - DNA, 15 bp, Homo sapiens
caatctcagtgtgag

SEQ ID NO: 1180738 - DNA, 15 bp, Homo sapiens
acaatctcagtgtga

SEQ ID NO: 1180739 - DNA, 15 bp, Homo sapiens
tacaatctcagtgtg

SEQ ID NO: 1180740 - DNA, 15 bp, Homo sapiens
gtacaatctcagtgt

SEQ ID NO: 1180741 - DNA, 15 bp, Homo sapiens
ggtacaatctcagtg

SEQ ID NO: 1180742 - DNA, 15 bp, Homo sapiens
tggtacaatctcagt

SEQ ID NO: 1180743 - DNA, 15 bp, Homo sapiens
gtggtacaatctcag

SEQ ID NO: 1180744 - DNA, 15 bp, Homo sapiens
tgtggtacaatctca

SEQ ID NO: 1180745 - DNA, 15 bp, Homo sapiens
atgtggtacaatctc

SEQ ID NO: 1180746 - DNA, 15 bp, Homo sapiens
catgtggtacaatct

SEQ ID NO: 1180747 - DNA, 15 bp, Homo sapiens
ccatgtggtacaatc

SEQ ID NO: 1180748 - DNA, 15 bp, Homo sapiens
cccatgtggtacaat

SEQ ID NO: 1180749 - DNA, 15 bp, Homo sapiens
tcccatgtggtacaa

SEQ ID NO: 1180750 - DNA, 15 bp, Homo sapiens
gtcccatgtggtaca

SEQ ID NO: 1180751 - DNA, 15 bp, Homo sapiens
ggtcccatgtggtac

SEQ ID NO: 1180752 - DNA, 15 bp, Homo sapiens
gggtcccatgtggta

SEQ ID NO: 1180753 - DNA, 15 bp, Homo sapiens
ggggtcccatgtggt

SEQ ID NO: 1180754 - DNA, 15 bp, Homo sapiens
tggggtcccatgtgg

SEQ ID NO: 1180755 - DNA, 15 bp, Homo sapiens
ctggggtcccatgtg

SEQ ID NO: 1180756 - DNA, 15 bp, Homo sapiens
gctggggtcccatgt

SEQ ID NO: 1180757 - DNA, 15 bp, Homo sapiens
tgctggggtcccatg

SEQ ID NO: 1180758 - DNA, 15 bp, Homo sapiens
gtgctggggtcccat

SEQ ID NO: 1180759 - DNA, 15 bp, Homo sapiens
agtgctggggtccca

SEQ ID NO: 1180760 - DNA, 15 bp, Homo sapiens
aagtgctggggtccc

SEQ ID NO: 1180761 - DNA, 15 bp, Homo sapiens
taagtgctggggtcc

SEQ ID NO: 1180762 - DNA, 15 bp, Homo sapiens
ataagtgctggggtc

SEQ ID NO: 1180763 - DNA, 15 bp, Homo sapiens
aataagtgctggggt

SEQ ID NO: 1180764 - DNA, 15 bp, Homo sapiens
aaataagtgctgggg

SEQ ID NO: 1180765 - DNA, 15 bp, Homo sapiens
caaataagtgctggg

SEQ ID NO: 1180766 - DNA, 15 bp, Homo sapiens
ccaaataagtgctgg

SEQ ID NO: 1180767 - DNA, 15 bp, Homo sapiens
cccaaataagtgctg

SEQ ID NO: 1180768 - DNA, 15 bp, Homo sapiens
acccaaataagtgct

SEQ ID NO: 1180769 - DNA, 15 bp, Homo sapiens
aacccaaataagtgc

SEQ ID NO: 1180770 - DNA, 15 bp, Homo sapiens
taacccaaataagtg

SEQ ID NO: 1180771 - DNA, 15 bp, Homo sapiens
ataacccaaataagt

SEQ ID NO: 1180772 - DNA, 15 bp, Homo sapiens
tataacccaaataag

SEQ ID NO: 1180773 - DNA, 15 bp, Homo sapiens
gtataacccaaataa

SEQ ID NO: 1180774 - DNA, 15 bp, Homo sapiens
tgtataacccaaata

SEQ ID NO: 1180775 - DNA, 15 bp, Homo sapiens
ctgtataacccaaat

SEQ ID NO: 1180776 - DNA, 15 bp, Homo sapiens
actgtataacccaaa

SEQ ID NO: 1180777 - DNA, 15 bp, Homo sapiens
cactgtataacccaa

SEQ ID NO: 1180778 - DNA, 15 bp, Homo sapiens
ccactgtataaccca

SEQ ID NO: 1180779 - DNA, 15 bp, Homo sapiens
cccactgtataaccc

SEQ ID NO: 1180780 - DNA, 15 bp, Homo sapiens
tcccactgtataacc

SEQ ID NO: 1180781 - DNA, 15 bp, Homo sapiens
ttcccactgtataac

SEQ ID NO: 1180782 - DNA, 15 bp, Homo sapiens
tttcccactgtataa

SEQ ID NO: 1180783 - DNA, 15 bp, Homo sapiens
gtttcccactgtata

SEQ ID NO: 1180784 - DNA, 15 bp, Homo sapiens
tgtttcccactgtat

SEQ ID NO: 1180785 - DNA, 15 bp, Homo sapiens
ctgtttcccactgta

SEQ ID NO: 1180786 - DNA, 15 bp, Homo sapiens
cctgtttcccactgt

SEQ ID NO: 1180787 - DNA, 15 bp, Homo sapiens
acctgtttcccactg

SEQ ID NO: 1180788 - DNA, 15 bp, Homo sapiens
aacctgtttcccact

SEQ ID NO: 1180789 - DNA, 15 bp, Homo sapiens
aaacctgtttcccac

SEQ ID NO: 1180790 - DNA, 15 bp, Homo sapiens
taaacctgtttccca

SEQ ID NO: 1180791 - DNA, 15 bp, Homo sapiens
ctaaacctgtttccc

SEQ ID NO: 1180792 - DNA, 15 bp, Homo sapiens
actaaacctgtttcc

SEQ ID NO: 1180793 - DNA, 15 bp, Homo sapiens
aactaaacctgtttc

SEQ ID NO: 1180794 - DNA, 15 bp, Homo sapiens
gaactaaacctgttt

SEQ ID NO: 1180795 - DNA, 15 bp, Homo sapiens
tgaactaaacctgtt

SEQ ID NO: 1180796 - DNA, 15 bp, Homo sapiens
ttgaactaaacctgt

SEQ ID NO: 1180797 - DNA, 15 bp, Homo sapiens
tttgaactaaacctg

SEQ ID NO: 1180798 - DNA, 15 bp, Homo sapiens
atttgaactaaacct

SEQ ID NO: 1180799 - DNA, 15 bp, Homo sapiens
gatttgaactaaacc

SEQ ID NO: 1180800 - DNA, 15 bp, Homo sapiens
tgatttgaactaaac

SEQ ID NO: 1180801 - DNA, 15 bp, Homo sapiens
ctgatttgaactaaa

SEQ ID NO: 1180802 - DNA, 15 bp, Homo sapiens
cctgatttgaactaa

SEQ ID NO: 1180803 - DNA, 15 bp, Homo sapiens
acctgatttgaacta

SEQ ID NO: 1180804 - DNA, 15 bp, Homo sapiens
aacctgatttgaact

SEQ ID NO: 1180805 - DNA, 15 bp, Homo sapiens
caacctgatttgaac

SEQ ID NO: 1180806 - DNA, 15 bp, Homo sapiens
ccaacctgatttgaa

SEQ ID NO: 1180807 - DNA, 15 bp, Homo sapiens
tccaacctgatttga

SEQ ID NO: 1180808 - DNA, 15 bp, Homo sapiens
atccaacctgatttg

SEQ ID NO: 1180809 - DNA, 15 bp, Homo sapiens
aatccaacctgattt

SEQ ID NO: 1180810 - DNA, 15 bp, Homo sapiens
aaatccaacctgatt

SEQ ID NO: 1180811 - DNA, 15 bp, Homo sapiens
aaaatccaacctgat

SEQ ID NO: 1180812 - DNA, 15 bp, Homo sapiens
aaaaatccaacctga

SEQ ID NO: 1180813 - DNA, 15 bp, Homo sapiens
caaaaatccaacctg

SEQ ID NO: 1180814 - DNA, 15 bp, Homo sapiens
acaaaaatccaacct

SEQ ID NO: 1180815 - DNA, 15 bp, Homo sapiens
tacaaaaatccaacc

SEQ ID NO: 1180816 - DNA, 15 bp, Homo sapiens
ttacaaaaatccaac

SEQ ID NO: 1180817 - DNA, 15 bp, Homo sapiens
tttacaaaaatccaa

SEQ ID NO: 1180818 - DNA, 15 bp, Homo sapiens
gtttacaaaaatcca

SEQ ID NO: 1180819 - DNA, 15 bp, Homo sapiens
tgtttacaaaaatcc

SEQ ID NO: 1180820 - DNA, 15 bp, Homo sapiens
gtgtttacaaaaatc

SEQ ID NO: 1180821 - DNA, 15 bp, Homo sapiens
tgtgtttacaaaaat

SEQ ID NO: 1180822 - DNA, 15 bp, Homo sapiens
atgtgtttacaaaaa

SEQ ID NO: 1180823 - DNA, 15 bp, Homo sapiens
tatgtgtttacaaaa

SEQ ID NO: 1180824 - DNA, 15 bp, Homo sapiens
ttatgtgtttacaaa

SEQ ID NO: 1180825 - DNA, 15 bp, Homo sapiens
tttatgtgtttacaa

SEQ ID NO: 1180826 - DNA, 15 bp, Homo sapiens
ctttatgtgtttaca

SEQ ID NO: 1180827 - DNA, 15 bp, Homo sapiens
gctttatgtgtttac

SEQ ID NO: 1180828 - DNA, 15 bp, Homo sapiens
tgctttatgtgttta

SEQ ID NO: 1180829 - DNA, 15 bp, Homo sapiens
atgctttatgtgttt

SEQ ID NO: 1180830 - DNA, 15 bp, Homo sapiens
aatgctttatgtgtt

SEQ ID NO: 1180831 - DNA, 15 bp, Homo sapiens
aaatgctttatgtgt

SEQ ID NO: 1180832 - DNA, 15 bp, Homo sapiens
taaatgctttatgtg

SEQ ID NO: 1180833 - DNA, 15 bp, Homo sapiens
ataaatgctttatgt

SEQ ID NO: 1180834 - DNA, 15 bp, Homo sapiens
cataaatgctttatg

SEQ ID NO: 1180835 - DNA, 15 bp, Homo sapiens
tcataaatgctttat

SEQ ID NO: 1180836 - DNA, 15 bp, Homo sapiens
atcataaatgcttta

SEQ ID NO: 1180837 - DNA, 15 bp, Homo sapiens
tatcataaatgcttt

SEQ ID NO: 1180838 - DNA, 15 bp, Homo sapiens
ttatcataaatgctt

SEQ ID NO: 1180839 - DNA, 15 bp, Homo sapiens
attatcataaatgct

SEQ ID NO: 1180840 - DNA, 15 bp, Homo sapiens
tattatcataaatgc

SEQ ID NO: 1180841 - DNA, 15 bp, Homo sapiens
ttattatcataaatg

SEQ ID NO: 1180842 - DNA, 15 bp, Homo sapiens
tttattatcataaat

SEQ ID NO: 1180843 - DNA, 15 bp, Homo sapiens
aaattttattatcat

SEQ ID NO: 1180844 - DNA, 15 bp, Homo sapiens
gaaattttattatca

SEQ ID NO: 1180845 - DNA, 15 bp, Homo sapiens
tgaaattttattatc

SEQ ID NO: 1180846 - DNA, 15 bp, Homo sapiens
ttgaaattttattat

SEQ ID NO: 1180847 - DNA, 15 bp, Homo sapiens
tttgaaattttatta

SEQ ID NO: 1180848 - DNA, 15 bp, Homo sapiens
ttttgaaattttatt

SEQ ID NO: 1180849 - DNA, 15 bp, Homo sapiens
gttttgaaattttat

SEQ ID NO: 1180850 - DNA, 15 bp, Homo sapiens
ggttttgaaatttta

SEQ ID NO: 1180851 - DNA, 15 bp, Homo sapiens
gggttttgaaatttt

SEQ ID NO: 1180852 - DNA, 15 bp, Homo sapiens
tgggttttgaaattt

SEQ ID NO: 1180853 - DNA, 15 bp, Homo sapiens
ttgggttttgaaatt

SEQ ID NO: 1180854 - DNA, 15 bp, Homo sapiens
tttgggttttgaaat

SEQ ID NO: 1180855 - DNA, 15 bp, Homo sapiens
gtttgggttttgaaa

SEQ ID NO: 1180856 - DNA, 15 bp, Homo sapiens
tgtttgggttttgaa

SEQ ID NO: 1180857 - DNA, 15 bp, Homo sapiens
gtgtttgggttttga

SEQ ID NO: 1180858 - DNA, 15 bp, Homo sapiens
agtgtttgggttttg

SEQ ID NO: 1180859 - DNA, 15 bp, Homo sapiens
aagtgtttgggtttt

SEQ ID NO: 1180860 - DNA, 15 bp, Homo sapiens
taagtgtttgggttt

SEQ ID NO: 1180861 - DNA, 15 bp, Homo sapiens
ataagtgtttgggtt

SEQ ID NO: 1180862 - DNA, 15 bp, Homo sapiens
cataagtgtttgggt

SEQ ID NO: 1180863 - DNA, 15 bp, Homo sapiens
tcataagtgtttggg

SEQ ID NO: 1180864 - DNA, 15 bp, Homo sapiens
ttcataagtgtttgg

SEQ ID NO: 1180865 - DNA, 15 bp, Homo sapiens
tttcataagtgtttg

SEQ ID NO: 1180866 - DNA, 15 bp, Homo sapiens
ctttcataagtgttt

SEQ ID NO: 1180867 - DNA, 15 bp, Homo sapiens
actttcataagtgtt

SEQ ID NO: 1180868 - DNA, 15 bp, Homo sapiens
tactttcataagtgt

SEQ ID NO: 1180869 - DNA, 15 bp, Homo sapiens
ttactttcataagtg

SEQ ID NO: 1180870 - DNA, 15 bp, Homo sapiens
cttactttcataagt

SEQ ID NO: 1180871 - DNA, 15 bp, Homo sapiens
gcttactttcataag

SEQ ID NO: 1180872 - DNA, 15 bp, Homo sapiens
cgcttactttcataa

SEQ ID NO: 1180873 - DNA, 15 bp, Homo sapiens
tcgcttactttcata

SEQ ID NO: 1180874 - DNA, 15 bp, Homo sapiens
atcgcttactttcat

SEQ ID NO: 1180875 - DNA, 15 bp, Homo sapiens
tatcgcttactttca

SEQ ID NO: 1180876 - DNA, 15 bp, Homo sapiens
atatcgcttactttc

SEQ ID NO: 1180877 - DNA, 15 bp, Homo sapiens
aatatcgcttacttt

SEQ ID NO: 1180878 - DNA, 15 bp, Homo sapiens
caatatcgcttactt

SEQ ID NO: 1180879 - DNA, 15 bp, Homo sapiens
acaatatcgcttact

SEQ ID NO: 1180880 - DNA, 15 bp, Homo sapiens
tacaatatcgcttac

SEQ ID NO: 1180881 - DNA, 15 bp, Homo sapiens
ttacaatatcgctta

SEQ ID NO: 1180882 - DNA, 15 bp, Homo sapiens
attacaatatcgctt

SEQ ID NO: 1180883 - DNA, 15 bp, Homo sapiens
gattacaatatcgct

SEQ ID NO: 1180884 - DNA, 15 bp, Homo sapiens
tgattacaatatcgc

SEQ ID NO: 1180885 - DNA, 15 bp, Homo sapiens
atgattacaatatcg

SEQ ID NO: 1180886 - DNA, 15 bp, Homo sapiens
catgattacaatatc

SEQ ID NO: 1180887 - DNA, 15 bp, Homo sapiens
tcatgattacaatat

SEQ ID NO: 1180888 - DNA, 15 bp, Homo sapiens
ttcatgattacaata

SEQ ID NO: 1180889 - DNA, 15 bp, Homo sapiens
attcatgattacaat

SEQ ID NO: 1180890 - DNA, 15 bp, Homo sapiens
aattcatgattacaa

SEQ ID NO: 1180891 - DNA, 15 bp, Homo sapiens
aaattcatgattaca

SEQ ID NO: 1180892 - DNA, 15 bp, Homo sapiens
caaattcatgattac

SEQ ID NO: 1180893 - DNA, 15 bp, Homo sapiens
ccaaattcatgatta

SEQ ID NO: 1180894 - DNA, 15 bp, Homo sapiens
cccaaattcatgatt

SEQ ID NO: 1180895 - DNA, 15 bp, Homo sapiens
ccccaaattcatgat

SEQ ID NO: 1180896 - DNA, 15 bp, Homo sapiens
cccccaaattcatga

SEQ ID NO: 1180897 - DNA, 15 bp, Homo sapiens
tcccccaaattcatg

SEQ ID NO: 1180898 - DNA, 15 bp, Homo sapiens
atcccccaaattcat

SEQ ID NO: 1180899 - DNA, 15 bp, Homo sapiens
aatcccccaaattca

SEQ ID NO: 1180900 - DNA, 15 bp, Homo sapiens
aaatcccccaaattc

SEQ ID NO: 1180901 - DNA, 15 bp, Homo sapiens
aaaatcccccaaatt

SEQ ID NO: 1180902 - DNA, 15 bp, Homo sapiens
gaaaaatcccccaaa

SEQ ID NO: 1180903 - DNA, 15 bp, Homo sapiens
agaaaaatcccccaa

SEQ ID NO: 1180904 - DNA, 15 bp, Homo sapiens
cagaaaaatccccca

SEQ ID NO: 1180905 - DNA, 15 bp, Homo sapiens
acagaaaaatccccc

SEQ ID NO: 1180906 - DNA, 15 bp, Homo sapiens
tacagaaaaatcccc

SEQ ID NO: 1180907 - DNA, 15 bp, Homo sapiens
atacagaaaaatccc

SEQ ID NO: 1180908 - DNA, 15 bp, Homo sapiens
catacagaaaaatcc

SEQ ID NO: 1180909 - DNA, 15 bp, Homo sapiens
ccatacagaaaaatc

SEQ ID NO: 1180910 - DNA, 15 bp, Homo sapiens
cccatacagaaaaat

SEQ ID NO: 1180911 - DNA, 15 bp, Homo sapiens
gcccatacagaaaaa

SEQ ID NO: 1180912 - DNA, 15 bp, Homo sapiens
agcccatacagaaaa

SEQ ID NO: 1180913 - DNA, 15 bp, Homo sapiens
cagcccatacagaaa

SEQ ID NO: 1180914 - DNA, 15 bp, Homo sapiens
gcagcccatacagaa

SEQ ID NO: 1180915 - DNA, 15 bp, Homo sapiens
tgcagcccatacaga

SEQ ID NO: 1180916 - DNA, 15 bp, Homo sapiens
ctgcagcccatacag

SEQ ID NO: 1180917 - DNA, 15 bp, Homo sapiens
actgcagcccataca

SEQ ID NO: 1180918 - DNA, 15 bp, Homo sapiens
cactgcagcccatac

SEQ ID NO: 1180919 - DNA, 15 bp, Homo sapiens
tcactgcagcccata

SEQ ID NO: 1180920 - DNA, 15 bp, Homo sapiens
gtcactgcagcccat

SEQ ID NO: 1180921 - DNA, 15 bp, Homo sapiens
agtcactgcagccca

SEQ ID NO: 1180922 - DNA, 15 bp, Homo sapiens
tagtcactgcagccc

SEQ ID NO: 1180923 - DNA, 15 bp, Homo sapiens
atagtcactgcagcc

SEQ ID NO: 1180924 - DNA, 15 bp, Homo sapiens
catagtcactgcagc

SEQ ID NO: 1180925 - DNA, 15 bp, Homo sapiens
ccatagtcactgcag

SEQ ID NO: 1180926 - DNA, 15 bp, Homo sapiens
gccatagtcactgca

SEQ ID NO: 1180927 - DNA, 15 bp, Homo sapiens
agccatagtcactgc

SEQ ID NO: 1180928 - DNA, 15 bp, Homo sapiens
gagccatagtcactg

SEQ ID NO: 1180929 - DNA, 15 bp, Homo sapiens
ggagccatagtcact

SEQ ID NO: 1180930 - DNA, 15 bp, Homo sapiens
aggagccatagtcac

SEQ ID NO: 1180931 - DNA, 15 bp, Homo sapiens
caggagccatagtca

SEQ ID NO: 1180932 - DNA, 15 bp, Homo sapiens
gcaggagccatagtc

SEQ ID NO: 1180933 - DNA, 15 bp, Homo sapiens
tgcaggagccatagt

SEQ ID NO: 1180934 - DNA, 15 bp, Homo sapiens
ttgcaggagccatag

SEQ ID NO: 1180935 - DNA, 15 bp, Homo sapiens
tttgcaggagccata

SEQ ID NO: 1180936 - DNA, 15 bp, Homo sapiens
atttgcaggagccat

SEQ ID NO: 1180937 - DNA, 15 bp, Homo sapiens
tatttgcaggagcca

SEQ ID NO: 1180938 - DNA, 15 bp, Homo sapiens
ctatttgcaggagcc

SEQ ID NO: 1180939 - DNA, 15 bp, Homo sapiens
cctatttgcaggagc

SEQ ID NO: 1180940 - DNA, 15 bp, Homo sapiens
tcctatttgcaggag

SEQ ID NO: 1180941 - DNA, 15 bp, Homo sapiens
ctcctatttgcagga

SEQ ID NO: 1180942 - DNA, 15 bp, Homo sapiens
actcctatttgcagg

SEQ ID NO: 1180943 - DNA, 15 bp, Homo sapiens
aactcctatttgcag

SEQ ID NO: 1180944 - DNA, 15 bp, Homo sapiens
aaactcctatttgca

SEQ ID NO: 1180945 - DNA, 15 bp, Homo sapiens
taaactcctatttgc

SEQ ID NO: 1180946 - DNA, 15 bp, Homo sapiens
ttaaactcctatttg

SEQ ID NO: 1180947 - DNA, 15 bp, Homo sapiens
attaaactcctattt

SEQ ID NO: 1180948 - DNA, 15 bp, Homo sapiens
cattaaactcctatt

SEQ ID NO: 1180949 - DNA, 15 bp, Homo sapiens
tcattaaactcctat

SEQ ID NO: 1180950 - DNA, 15 bp, Homo sapiens
ttcattaaactccta

SEQ ID NO: 1180951 - DNA, 15 bp, Homo sapiens
cttcattaaactcct

SEQ ID NO: 1180952 - DNA, 15 bp, Homo sapiens
acttcattaaactcc

SEQ ID NO: 1180953 - DNA, 15 bp, Homo sapiens
tacttcattaaactc

SEQ ID NO: 1180954 - DNA, 15 bp, Homo sapiens
atacttcattaaact

SEQ ID NO: 1180955 - DNA, 15 bp, Homo sapiens
gatacttcattaaac

SEQ ID NO: 1180956 - DNA, 15 bp, Homo sapiens
agatacttcattaaa

SEQ ID NO: 1180957 - DNA, 15 bp, Homo sapiens
cagatacttcattaa

SEQ ID NO: 1180958 - DNA, 15 bp, Homo sapiens
acagatacttcatta

SEQ ID NO: 1180959 - DNA, 15 bp, Homo sapiens
aacagatacttcatt

SEQ ID NO: 1180960 - DNA, 15 bp, Homo sapiens
caacagatacttcat

SEQ ID NO: 1180961 - DNA, 15 bp, Homo sapiens
acaacagatacttca

SEQ ID NO: 1180962 - DNA, 15 bp, Homo sapiens
aacaacagatacttc

SEQ ID NO: 1180963 - DNA, 15 bp, Homo sapiens
aaacaacagatactt

SEQ ID NO: 1180964 - DNA, 15 bp, Homo sapiens
gaaacaacagatact

SEQ ID NO: 1180965 - DNA, 15 bp, Homo sapiens
ggaaacaacagatac

SEQ ID NO: 1180966 - DNA, 15 bp, Homo sapiens
aggaaacaacagata

SEQ ID NO: 1180967 - DNA, 15 bp, Homo sapiens
caggaaacaacagat

SEQ ID NO: 1180968 - DNA, 15 bp, Homo sapiens
ccaggaaacaacaga

SEQ ID NO: 1180969 - DNA, 15 bp, Homo sapiens
accaggaaacaacag

SEQ ID NO: 1180970 - DNA, 15 bp, Homo sapiens
aaccaggaaacaaca

SEQ ID NO: 1180971 - DNA, 15 bp, Homo sapiens
taaccaggaaacaac

SEQ ID NO: 1180972 - DNA, 15 bp, Homo sapiens
ttaaccaggaaacaa

SEQ ID NO: 1180973 - DNA, 15 bp, Homo sapiens
attaaccaggaaaca

SEQ ID NO: 1180974 - DNA, 15 bp, Homo sapiens
aattaaccaggaaac

SEQ ID NO: 1180975 - DNA, 15 bp, Homo sapiens
aaattaaccaggaaa

SEQ ID NO: 1180976 - DNA, 15 bp, Homo sapiens
aaaattaaccaggaa

SEQ ID NO: 1180977 - DNA, 15 bp, Homo sapiens
gaaaattaaccagga

SEQ ID NO: 1180978 - DNA, 15 bp, Homo sapiens
ggaaaattaaccagg

SEQ ID NO: 1180979 - DNA, 15 bp, Homo sapiens
aggaaaattaaccag

SEQ ID NO: 1180980 - DNA, 15 bp, Homo sapiens
caggaaaattaacca

SEQ ID NO: 1180981 - DNA, 15 bp, Homo sapiens
tcaggaaaattaacc

SEQ ID NO: 1180982 - DNA, 15 bp, Homo sapiens
ttcaggaaaattaac

SEQ ID NO: 1180983 - DNA, 15 bp, Homo sapiens
cttcaggaaaattaa

SEQ ID NO: 1180984 - DNA, 15 bp, Homo sapiens
gcttcaggaaaatta

SEQ ID NO: 1180985 - DNA, 15 bp, Homo sapiens
tgcttcaggaaaatt

SEQ ID NO: 1180986 - DNA, 15 bp, Homo sapiens
ttgcttcaggaaaat

SEQ ID NO: 1180987 - DNA, 15 bp, Homo sapiens
cttgcttcaggaaaa

SEQ ID NO: 1180988 - DNA, 15 bp, Homo sapiens
acttgcttcaggaaa

SEQ ID NO: 1180989 - DNA, 15 bp, Homo sapiens
cacttgcttcaggaa

SEQ ID NO: 1180990 - DNA, 15 bp, Homo sapiens
acacttgcttcagga

SEQ ID NO: 1180991 - DNA, 15 bp, Homo sapiens
tacacttgcttcagg

SEQ ID NO: 1180992 - DNA, 15 bp, Homo sapiens
ttacacttgcttcag

SEQ ID NO: 1180993 - DNA, 15 bp, Homo sapiens
cttacacttgcttca

SEQ ID NO: 1180994 - DNA, 15 bp, Homo sapiens
gcttacacttgcttc

SEQ ID NO: 1180995 - DNA, 15 bp, Homo sapiens
tgcttacacttgctt

SEQ ID NO: 1180996 - DNA, 15 bp, Homo sapiens
ctgcttacacttgct

SEQ ID NO: 1180997 - DNA, 15 bp, Homo sapiens
actgcttacacttgc

SEQ ID NO: 1180998 - DNA, 15 bp, Homo sapiens
aactgcttacacttg

SEQ ID NO: 1180999 - DNA, 15 bp, Homo sapiens
aaactgcttacactt

SEQ ID NO: 1181000 - DNA, 15 bp, Homo sapiens
caaactgcttacact

SEQ ID NO: 1181001 - DNA, 15 bp, Homo sapiens
acaaactgcttacac

SEQ ID NO: 1181002 - DNA, 15 bp, Homo sapiens
cacaaactgcttaca

SEQ ID NO: 1181003 - DNA, 15 bp, Homo sapiens
acacaaactgcttac

SEQ ID NO: 1181004 - DNA, 15 bp, Homo sapiens
aacacaaactgctta

SEQ ID NO: 1181005 - DNA, 15 bp, Homo sapiens
gaacacaaactgctt

SEQ ID NO: 1181006 - DNA, 15 bp, Homo sapiens
agaacacaaactgct

SEQ ID NO: 1181007 - DNA, 15 bp, Homo sapiens
tagaacacaaactgc

SEQ ID NO: 1181008 - DNA, 15 bp, Homo sapiens
ctagaacacaaactg

SEQ ID NO: 1181009 - DNA, 15 bp, Homo sapiens
cctagaacacaaact

SEQ ID NO: 1181010 - DNA, 15 bp, Homo sapiens
ccctagaacacaaac

SEQ ID NO: 1181011 - DNA, 15 bp, Homo sapiens
tccctagaacacaaa

SEQ ID NO: 1181012 - DNA, 15 bp, Homo sapiens
ttccctagaacacaa

SEQ ID NO: 1181013 - DNA, 15 bp, Homo sapiens
attccctagaacaca

SEQ ID NO: 1181014 - DNA, 15 bp, Homo sapiens
gattccctagaacac

SEQ ID NO: 1181015 - DNA, 15 bp, Homo sapiens
agattccctagaaca

SEQ ID NO: 1181016 - DNA, 15 bp, Homo sapiens
aagattccctagaac

SEQ ID NO: 1181017 - DNA, 15 bp, Homo sapiens
taagattccctagaa

SEQ ID NO: 1181018 - DNA, 15 bp, Homo sapiens
ataagattccctaga

SEQ ID NO: 1181019 - DNA, 15 bp, Homo sapiens
aataagattccctag

SEQ ID NO: 1181020 - DNA, 15 bp, Homo sapiens
aaataagattcccta

SEQ ID NO: 1181021 - DNA, 15 bp, Homo sapiens
aaaataagattccct

SEQ ID NO: 1181022 - DNA, 15 bp, Homo sapiens
taaaataagattccc

SEQ ID NO: 1181023 - DNA, 15 bp, Homo sapiens
ataaaataagattcc

SEQ ID NO: 1181024 - DNA, 15 bp, Homo sapiens
aataaaataagattc

SEQ ID NO: 1181025 - DNA, 15 bp, Homo sapiens
aaataaaataagatt

SEQ ID NO: 1181026 - DNA, 15 bp, Homo sapiens
aaaataaaataagat

SEQ ID NO: 1181027 - DNA, 15 bp, Homo sapiens
taaaataaaataaga

SEQ ID NO: 1181028 - DNA, 15 bp, Homo sapiens
ataaaataaaataag

SEQ ID NO: 1181029 - DNA, 15 bp, Homo sapiens
caaataaaataaaat

SEQ ID NO: 1181030 - DNA, 15 bp, Homo sapiens
acaaataaaataaaa

SEQ ID NO: 1181031 - DNA, 15 bp, Homo sapiens
aacaaataaaataaa

SEQ ID NO: 1181032 - DNA, 15 bp, Homo sapiens
aaacaaataaaataa

SEQ ID NO: 1181033 - DNA, 15 bp, Homo sapiens
taaacaaataaaata

SEQ ID NO: 1181034 - DNA, 15 bp, Homo sapiens
ataaacaaataaaat

SEQ ID NO: 1181035 - DNA, 15 bp, Homo sapiens
taaataaataaacaa

SEQ ID NO: 1181036 - DNA, 15 bp, Homo sapiens
ataaataaataaaca

SEQ ID NO: 1181037 - DNA, 15 bp, Homo sapiens
aataaataaataaac

SEQ ID NO: 1181038 - DNA, 15 bp, Homo sapiens
taataaataaataaa

SEQ ID NO: 1181039 - DNA, 15 bp, Homo sapiens
ataataaataaataa

SEQ ID NO: 1181040 - DNA, 15 bp, Homo sapiens
aataataaataaata

SEQ ID NO: 1181041 - DNA, 15 bp, Homo sapiens
taataataaataaat

SEQ ID NO: 1181042 - DNA, 15 bp, Homo sapiens
ataataataaataaa

SEQ ID NO: 1181043 - DNA, 15 bp, Homo sapiens
ttcaaaaaaaataat

SEQ ID NO: 1181044 - DNA, 15 bp, Homo sapiens
attcaaaaaaaataa

SEQ ID NO: 1181045 - DNA, 15 bp, Homo sapiens
gattcaaaaaaaata

SEQ ID NO: 1181046 - DNA, 15 bp, Homo sapiens
cgattcaaaaaaaat

SEQ ID NO: 1181047 - DNA, 15 bp, Homo sapiens
ccgattcaaaaaaaa

SEQ ID NO: 1181048 - DNA, 15 bp, Homo sapiens
tccgattcaaaaaaa

SEQ ID NO: 1181049 - DNA, 15 bp, Homo sapiens
ctccgattcaaaaaa

SEQ ID NO: 1181050 - DNA, 15 bp, Homo sapiens
actccgattcaaaaa

SEQ ID NO: 1181051 - DNA, 15 bp, Homo sapiens
gactccgattcaaaa

SEQ ID NO: 1181052 - DNA, 15 bp, Homo sapiens
agactccgattcaaa

SEQ ID NO: 1181053 - DNA, 15 bp, Homo sapiens
gagactccgattcaa

SEQ ID NO: 1181054 - DNA, 15 bp, Homo sapiens
cgagactccgattca

SEQ ID NO: 1181055 - DNA, 15 bp, Homo sapiens
gcgagactccgattc

SEQ ID NO: 1181056 - DNA, 15 bp, Homo sapiens
agcgagactccgatt

SEQ ID NO: 1181057 - DNA, 15 bp, Homo sapiens
gagcgagactccgat

SEQ ID NO: 1181058 - DNA, 15 bp, Homo sapiens
agagcgagactccga

SEQ ID NO: 1181059 - DNA, 15 bp, Homo sapiens
acctgggtgacagag

SEQ ID NO: 1181060 - DNA, 15 bp, Homo sapiens
aacctgggtgacaga

SEQ ID NO: 1181061 - DNA, 15 bp, Homo sapiens
caacctgggtgacag

SEQ ID NO: 1181062 - DNA, 15 bp, Homo sapiens
ccaacctgggtgaca

SEQ ID NO: 1181063 - DNA, 15 bp, Homo sapiens
tccaacctgggtgac

SEQ ID NO: 1181064 - DNA, 15 bp, Homo sapiens
ctccaacctgggtga

SEQ ID NO: 1181065 - DNA, 15 bp, Homo sapiens
actccaacctgggtg

SEQ ID NO: 1181066 - DNA, 15 bp, Homo sapiens
cactccaacctgggt

SEQ ID NO: 1181067 - DNA, 15 bp, Homo sapiens
gcactccaacctggg

SEQ ID NO: 1181068 - DNA, 15 bp, Homo sapiens
tgcactccaacctgg

SEQ ID NO: 1181069 - DNA, 15 bp, Homo sapiens
accactgcactccaa

SEQ ID NO: 1181070 - DNA, 15 bp, Homo sapiens
ggcaccactgcactc

SEQ ID NO: 1181071 - DNA, 15 bp, Homo sapiens
tggcaccactgcact

SEQ ID NO: 1181072 - DNA, 15 bp, Homo sapiens
atggcaccactgcac

SEQ ID NO: 1181073 - DNA, 15 bp, Homo sapiens
gcaagatggcaccac

SEQ ID NO: 1181074 - DNA, 15 bp, Homo sapiens
ggcaagatggcacca

SEQ ID NO: 1181075 - DNA, 15 bp, Homo sapiens
aggcaagatggcacc

SEQ ID NO: 1181076 - DNA, 15 bp, Homo sapiens
gaggcaagatggcac

SEQ ID NO: 1181077 - DNA, 15 bp, Homo sapiens
tgaggcaagatggca

SEQ ID NO: 1181078 - DNA, 15 bp, Homo sapiens
gtgaggcaagatggc

SEQ ID NO: 1181079 - DNA, 15 bp, Homo sapiens
agtgaggcaagatgg

SEQ ID NO: 1181080 - DNA, 15 bp, Homo sapiens
cagtgaggcaagatg

SEQ ID NO: 1181081 - DNA, 15 bp, Homo sapiens
gcagtgaggcaagat

SEQ ID NO: 1181082 - DNA, 15 bp, Homo sapiens
tgcagtgaggcaaga

SEQ ID NO: 1181083 - DNA, 15 bp, Homo sapiens
ttgcagtgaggcaag

SEQ ID NO: 1181084 - DNA, 15 bp, Homo sapiens
gttgcagtgaggcaa

SEQ ID NO: 1181085 - DNA, 15 bp, Homo sapiens
ggttgcagtgaggca

SEQ ID NO: 1181086 - DNA, 15 bp, Homo sapiens
aggttgcagtgaggc

SEQ ID NO: 1181087 - DNA, 15 bp, Homo sapiens
aaggttgcagtgagg

SEQ ID NO: 1181088 - DNA, 15 bp, Homo sapiens
caaggttgcagtgag

SEQ ID NO: 1181089 - DNA, 15 bp, Homo sapiens
ccaaggttgcagtga

SEQ ID NO: 1181090 - DNA, 15 bp, Homo sapiens
gccaaggttgcagtg

SEQ ID NO: 1181091 - DNA, 15 bp, Homo sapiens
ggccaaggttgcagt

SEQ ID NO: 1181092 - DNA, 15 bp, Homo sapiens
aggccaaggttgcag

SEQ ID NO: 1181093 - DNA, 15 bp, Homo sapiens
gaggccaaggttgca

SEQ ID NO: 1181094 - DNA, 15 bp, Homo sapiens
ggaggccaaggttgc

SEQ ID NO: 1181095 - DNA, 15 bp, Homo sapiens
cgggaggccaaggtt

SEQ ID NO: 1181096 - DNA, 15 bp, Homo sapiens
ccgggaggccaaggt

SEQ ID NO: 1181097 - DNA, 15 bp, Homo sapiens
cccgggaggccaagg

SEQ ID NO: 1181098 - DNA, 15 bp, Homo sapiens
acccgggaggccaag

SEQ ID NO: 1181099 - DNA, 15 bp, Homo sapiens
aacccgggaggccaa

SEQ ID NO: 1181100 - DNA, 15 bp, Homo sapiens
gaacccgggaggcca

SEQ ID NO: 1181101 - DNA, 15 bp, Homo sapiens
tgaacccgggaggcc

SEQ ID NO: 1181102 - DNA, 15 bp, Homo sapiens
aaggcaggagaattg

SEQ ID NO: 1181103 - DNA, 15 bp, Homo sapiens
taaggcaggagaatt

SEQ ID NO: 1181104 - DNA, 15 bp, Homo sapiens
cggaggctaaggcag

SEQ ID NO: 1181105 - DNA, 15 bp, Homo sapiens
tcggaggctaaggca

SEQ ID NO: 1181106 - DNA, 15 bp, Homo sapiens
ctcggaggctaaggc

SEQ ID NO: 1181107 - DNA, 15 bp, Homo sapiens
actcggaggctaagg

SEQ ID NO: 1181108 - DNA, 15 bp, Homo sapiens
tactcggaggctaag

SEQ ID NO: 1181109 - DNA, 15 bp, Homo sapiens
ctactcggaggctaa

SEQ ID NO: 1181110 - DNA, 15 bp, Homo sapiens
gctactcggaggcta

SEQ ID NO: 1181111 - DNA, 15 bp, Homo sapiens
agctactcggaggct

SEQ ID NO: 1181112 - DNA, 15 bp, Homo sapiens
cagctactcggaggc

SEQ ID NO: 1181113 - DNA, 15 bp, Homo sapiens
ccagctactcggagg

SEQ ID NO: 1181114 - DNA, 15 bp, Homo sapiens
cccagctactcggag

SEQ ID NO: 1181115 - DNA, 15 bp, Homo sapiens
ggtaatcccagctac

SEQ ID NO: 1181116 - DNA, 15 bp, Homo sapiens
tggtaatcccagcta

SEQ ID NO: 1181117 - DNA, 15 bp, Homo sapiens
ctggtaatcccagct

SEQ ID NO: 1181118 - DNA, 15 bp, Homo sapiens
actggtaatcccagc

SEQ ID NO: 1181119 - DNA, 15 bp, Homo sapiens
cactggtaatcccag

SEQ ID NO: 1181120 - DNA, 15 bp, Homo sapiens
gcactggtaatccca

SEQ ID NO: 1181121 - DNA, 15 bp, Homo sapiens
ggcactggtaatccc

SEQ ID NO: 1181122 - DNA, 15 bp, Homo sapiens
aggcactggtaatcc

SEQ ID NO: 1181123 - DNA, 15 bp, Homo sapiens
caggcactggtaatc

SEQ ID NO: 1181124 - DNA, 15 bp, Homo sapiens
gcaggcactggtaat

SEQ ID NO: 1181125 - DNA, 15 bp, Homo sapiens
ggcaggcactggtaa

SEQ ID NO: 1181126 - DNA, 15 bp, Homo sapiens
tggcaggcactggta

SEQ ID NO: 1181127 - DNA, 15 bp, Homo sapiens
gtggcaggcactggt

SEQ ID NO: 1181128 - DNA, 15 bp, Homo sapiens
ggtggcaggcactgg

SEQ ID NO: 1181129 - DNA, 15 bp, Homo sapiens
tggtggcaggcactg

SEQ ID NO: 1181130 - DNA, 15 bp, Homo sapiens
gtggtggcaggcact

SEQ ID NO: 1181131 - DNA, 15 bp, Homo sapiens
agtggtggcaggcac

SEQ ID NO: 1181132 - DNA, 15 bp, Homo sapiens
gagtggtggcaggca

SEQ ID NO: 1181133 - DNA, 15 bp, Homo sapiens
gggagtggtggcagg

SEQ ID NO: 1181134 - DNA, 15 bp, Homo sapiens
tgggagtggtggcag

SEQ ID NO: 1181135 - DNA, 15 bp, Homo sapiens
ctgggagtggtggca

SEQ ID NO: 1181136 - DNA, 15 bp, Homo sapiens
gctgggagtggtggc

SEQ ID NO: 1181137 - DNA, 15 bp, Homo sapiens
agctgggagtggtgg

SEQ ID NO: 1181138 - DNA, 15 bp, Homo sapiens
gagctgggagtggtg

SEQ ID NO: 1181139 - DNA, 15 bp, Homo sapiens
tgagctgggagtggt

SEQ ID NO: 1181140 - DNA, 15 bp, Homo sapiens
atgagctgggagtgg

SEQ ID NO: 1181141 - DNA, 15 bp, Homo sapiens
aatgagctgggagtg

SEQ ID NO: 1181142 - DNA, 15 bp, Homo sapiens
aaatgagctgggagt

SEQ ID NO: 1181143 - DNA, 15 bp, Homo sapiens
gaaatgagctgggag

SEQ ID NO: 1181144 - DNA, 15 bp, Homo sapiens
agaaatgagctggga

SEQ ID NO: 1181145 - DNA, 15 bp, Homo sapiens
cagaaatgagctggg

SEQ ID NO: 1181146 - DNA, 15 bp, Homo sapiens
acagaaatgagctgg

SEQ ID NO: 1181147 - DNA, 15 bp, Homo sapiens
tacagaaatgagctg

SEQ ID NO: 1181148 - DNA, 15 bp, Homo sapiens
atacagaaatgagct

SEQ ID NO: 1181149 - DNA, 15 bp, Homo sapiens
aatacagaaatgagc

SEQ ID NO: 1181150 - DNA, 15 bp, Homo sapiens
aaatacagaaatgag

SEQ ID NO: 1181151 - DNA, 15 bp, Homo sapiens
aaaatacagaaatga

SEQ ID NO: 1181152 - DNA, 15 bp, Homo sapiens
aaaaatacagaaatg

SEQ ID NO: 1181153 - DNA, 15 bp, Homo sapiens
taaaaatacagaaat

SEQ ID NO: 1181154 - DNA, 15 bp, Homo sapiens
ctaaaaatacagaaa

SEQ ID NO: 1181155 - DNA, 15 bp, Homo sapiens
tctaaaaatacagaa

SEQ ID NO: 1181156 - DNA, 15 bp, Homo sapiens
ttctaaaaatacaga

SEQ ID NO: 1181157 - DNA, 15 bp, Homo sapiens
gttctaaaaatacag

SEQ ID NO: 1181158 - DNA, 15 bp, Homo sapiens
tgttctaaaaataca

SEQ ID NO: 1181159 - DNA, 15 bp, Homo sapiens
ctgttctaaaaatac

SEQ ID NO: 1181160 - DNA, 15 bp, Homo sapiens
tctgttctaaaaata

SEQ ID NO: 1181161 - DNA, 15 bp, Homo sapiens
gtctgttctaaaaat

SEQ ID NO: 1181162 - DNA, 15 bp, Homo sapiens
tgtctgttctaaaaa

SEQ ID NO: 1181163 - DNA, 15 bp, Homo sapiens
ctgtctgttctaaaa

SEQ ID NO: 1181164 - DNA, 15 bp, Homo sapiens
cctgtctgttctaaa

SEQ ID NO: 1181165 - DNA, 15 bp, Homo sapiens
ccctgtctgttctaa

SEQ ID NO: 1181166 - DNA, 15 bp, Homo sapiens
accctgtctgttcta

SEQ ID NO: 1181167 - DNA, 15 bp, Homo sapiens
aaccctgtctgttct

SEQ ID NO: 1181168 - DNA, 15 bp, Homo sapiens
aaaccctgtctgttc

SEQ ID NO: 1181169 - DNA, 15 bp, Homo sapiens
gaaaccctgtctgtt

SEQ ID NO: 1181170 - DNA, 15 bp, Homo sapiens
agccaacacggtgaa

SEQ ID NO: 1181171 - DNA, 15 bp, Homo sapiens
tagccaacacggtga

SEQ ID NO: 1181172 - DNA, 15 bp, Homo sapiens
ctagccaacacggtg

SEQ ID NO: 1181173 - DNA, 15 bp, Homo sapiens
cctagccaacacggt

SEQ ID NO: 1181174 - DNA, 15 bp, Homo sapiens
gcctagccaacacgg

SEQ ID NO: 1181175 - DNA, 15 bp, Homo sapiens
agcctagccaacacg

SEQ ID NO: 1181176 - DNA, 15 bp, Homo sapiens
tagcctagccaacac

SEQ ID NO: 1181177 - DNA, 15 bp, Homo sapiens
ctagcctagccaaca

SEQ ID NO: 1181178 - DNA, 15 bp, Homo sapiens
actagcctagccaac

SEQ ID NO: 1181179 - DNA, 15 bp, Homo sapiens
gactagcctagccaa

SEQ ID NO: 1181180 - DNA, 15 bp, Homo sapiens
agactagcctagcca

SEQ ID NO: 1181181 - DNA, 15 bp, Homo sapiens
gagactagcctagcc

SEQ ID NO: 1181182 - DNA, 15 bp, Homo sapiens
cgagactagcctagc

SEQ ID NO: 1181183 - DNA, 15 bp, Homo sapiens
tcgaggtgggtggat

SEQ ID NO: 1181184 - DNA, 15 bp, Homo sapiens
gtcgaggtgggtgga

SEQ ID NO: 1181185 - DNA, 15 bp, Homo sapiens
ggtcgaggtgggtgg

SEQ ID NO: 1181186 - DNA, 15 bp, Homo sapiens
aggtcgaggtgggtg

SEQ ID NO: 1181187 - DNA, 15 bp, Homo sapiens
gaggtcgaggtgggt

SEQ ID NO: 1181188 - DNA, 15 bp, Homo sapiens
ggaggtcgaggtggg

SEQ ID NO: 1181189 - DNA, 15 bp, Homo sapiens
gggaggtcgaggtgg

SEQ ID NO: 1181190 - DNA, 15 bp, Homo sapiens
tgggaggtcgaggtg

SEQ ID NO: 1181191 - DNA, 15 bp, Homo sapiens
ttgggaggtcgaggt

SEQ ID NO: 1181192 - DNA, 15 bp, Homo sapiens
cggcttatgcctgta

SEQ ID NO: 1181193 - DNA, 15 bp, Homo sapiens
gcggcttatgcctgt

SEQ ID NO: 1181194 - DNA, 15 bp, Homo sapiens
ggcggcttatgcctg

SEQ ID NO: 1181195 - DNA, 15 bp, Homo sapiens
tggcggcttatgcct

SEQ ID NO: 1181196 - DNA, 15 bp, Homo sapiens
atggcggcttatgcc

SEQ ID NO: 1181197 - DNA, 15 bp, Homo sapiens
catggcggcttatgc

SEQ ID NO: 1181198 - DNA, 15 bp, Homo sapiens
gcatggcggcttatg

SEQ ID NO: 1181199 - DNA, 15 bp, Homo sapiens
ggcatggcggcttat

SEQ ID NO: 1181200 - DNA, 15 bp, Homo sapiens
tggcatggcggctta

SEQ ID NO: 1181201 - DNA, 15 bp, Homo sapiens
ctggcatggcggctt

SEQ ID NO: 1181202 - DNA, 15 bp, Homo sapiens
cctggcatggcggct

SEQ ID NO: 1181203 - DNA, 15 bp, Homo sapiens
gcctggcatggcggc

SEQ ID NO: 1181204 - DNA, 15 bp, Homo sapiens
ggcctggcatggcgg

SEQ ID NO: 1181205 - DNA, 15 bp, Homo sapiens
gggcctggcatggcg

SEQ ID NO: 1181206 - DNA, 15 bp, Homo sapiens
tgggcctggcatggc

SEQ ID NO: 1181207 - DNA, 15 bp, Homo sapiens
atgggcctggcatgg

SEQ ID NO: 1181208 - DNA, 15 bp, Homo sapiens
aatgggcctggcatg

SEQ ID NO: 1181209 - DNA, 15 bp, Homo sapiens
aaatgggcctggcat

SEQ ID NO: 1181210 - DNA, 15 bp, Homo sapiens
aaaatgggcctggca

SEQ ID NO: 1181211 - DNA, 15 bp, Homo sapiens
taaaatgggcctggc

SEQ ID NO: 1181212 - DNA, 15 bp, Homo sapiens
ataaaatgggcctgg

SEQ ID NO: 1181213 - DNA, 15 bp, Homo sapiens
aataaaatgggcctg

SEQ ID NO: 1181214 - DNA, 15 bp, Homo sapiens
aaataaaatgggcct

SEQ ID NO: 1181215 - DNA, 15 bp, Homo sapiens
aaaataaaatgggcc

SEQ ID NO: 1181216 - DNA, 15 bp, Homo sapiens
taaaataaaatgggc

SEQ ID NO: 1181217 - DNA, 15 bp, Homo sapiens
ataaaataaaatggg

SEQ ID NO: 1181218 - DNA, 15 bp, Homo sapiens
aataaaataaaatgg

SEQ ID NO: 1181219 - DNA, 15 bp, Homo sapiens
aaataaaataaaatg

SEQ ID NO: 1181220 - DNA, 15 bp, Homo sapiens
ctaaaataaaataaa

SEQ ID NO: 1181221 - DNA, 15 bp, Homo sapiens
tctaaaataaaataa

SEQ ID NO: 1181222 - DNA, 15 bp, Homo sapiens
ctctaaaataaaata

SEQ ID NO: 1181223 - DNA, 15 bp, Homo sapiens
tctctaaaataaaat

SEQ ID NO: 1181224 - DNA, 15 bp, Homo sapiens
gtctctaaaataaaa

SEQ ID NO: 1181225 - DNA, 15 bp, Homo sapiens
tgtctctaaaataaa

SEQ ID NO: 1181226 - DNA, 15 bp, Homo sapiens
ctgtctctaaaataa

SEQ ID NO: 1181227 - DNA, 15 bp, Homo sapiens
cctgtctctaaaata

SEQ ID NO: 1181228 - DNA, 15 bp, Homo sapiens
ccctgtctctaaaat

SEQ ID NO: 1181229 - DNA, 15 bp, Homo sapiens
gacagagcaagaccc

SEQ ID NO: 1181230 - DNA, 15 bp, Homo sapiens
tgacagagcaagacc

SEQ ID NO: 1181231 - DNA, 15 bp, Homo sapiens
tgatggcaccactgc

SEQ ID NO: 1181232 - DNA, 15 bp, Homo sapiens
atgatggcaccactg

SEQ ID NO: 1181233 - DNA, 15 bp, Homo sapiens
catgatggcaccact

SEQ ID NO: 1181234 - DNA, 15 bp, Homo sapiens
ccatgatggcaccac

SEQ ID NO: 1181235 - DNA, 15 bp, Homo sapiens
gccatgatggcacca

SEQ ID NO: 1181236 - DNA, 15 bp, Homo sapiens
agccatgatggcacc

SEQ ID NO: 1181237 - DNA, 15 bp, Homo sapiens
tagccatgatggcac

SEQ ID NO: 1181238 - DNA, 15 bp, Homo sapiens
ttagccatgatggca

SEQ ID NO: 1181239 - DNA, 15 bp, Homo sapiens
gttagccatgatggc

SEQ ID NO: 1181240 - DNA, 15 bp, Homo sapiens
agttagccatgatgg

SEQ ID NO: 1181241 - DNA, 15 bp, Homo sapiens
cagttagccatgatg

SEQ ID NO: 1181242 - DNA, 15 bp, Homo sapiens
acagttagccatgat

SEQ ID NO: 1181243 - DNA, 15 bp, Homo sapiens
cacagttagccatga

SEQ ID NO: 1181244 - DNA, 15 bp, Homo sapiens
ccacagttagccatg

SEQ ID NO: 1181245 - DNA, 15 bp, Homo sapiens
accacagttagccat

SEQ ID NO: 1181246 - DNA, 15 bp, Homo sapiens
gaccacagttagcca

SEQ ID NO: 1181247 - DNA, 15 bp, Homo sapiens
agaccacagttagcc

SEQ ID NO: 1181248 - DNA, 15 bp, Homo sapiens
gagaccacagttagc

SEQ ID NO: 1181249 - DNA, 15 bp, Homo sapiens
tgagaccacagttag

SEQ ID NO: 1181250 - DNA, 15 bp, Homo sapiens
ttgagaccacagtta

SEQ ID NO: 1181251 - DNA, 15 bp, Homo sapiens
gttgagaccacagtt

SEQ ID NO: 1181252 - DNA, 15 bp, Homo sapiens
cgttgagaccacagt

SEQ ID NO: 1181253 - DNA, 15 bp, Homo sapiens
acgttgagaccacag

SEQ ID NO: 1181254 - DNA, 15 bp, Homo sapiens
gacgttgagaccaca

SEQ ID NO: 1181255 - DNA, 15 bp, Homo sapiens
ggacgttgagaccac

SEQ ID NO: 1181256 - DNA, 15 bp, Homo sapiens
aggacgttgagacca

SEQ ID NO: 1181257 - DNA, 15 bp, Homo sapiens
caggacgttgagacc

SEQ ID NO: 1181258 - DNA, 15 bp, Homo sapiens
ccaggacgttgagac

SEQ ID NO: 1181259 - DNA, 15 bp, Homo sapiens
cccaggacgttgaga

SEQ ID NO: 1181260 - DNA, 15 bp, Homo sapiens
tcccaggacgttgag

SEQ ID NO: 1181261 - DNA, 15 bp, Homo sapiens
atcccaggacgttga

SEQ ID NO: 1181262 - DNA, 15 bp, Homo sapiens
gatcccaggacgttg

SEQ ID NO: 1181263 - DNA, 15 bp, Homo sapiens
tgatcccaggacgtt

SEQ ID NO: 1181264 - DNA, 15 bp, Homo sapiens
ttgatcccaggacgt

SEQ ID NO: 1181265 - DNA, 15 bp, Homo sapiens
cttgatcccaggacg

SEQ ID NO: 1181266 - DNA, 15 bp, Homo sapiens
gcttgatcccaggac

SEQ ID NO: 1181267 - DNA, 15 bp, Homo sapiens
cgcttgatcccagga

SEQ ID NO: 1181268 - DNA, 15 bp, Homo sapiens
tcgcttgatcccagg

SEQ ID NO: 1181269 - DNA, 15 bp, Homo sapiens
atcgcttgatcccag

SEQ ID NO: 1181270 - DNA, 15 bp, Homo sapiens
gatcgcttgatccca

SEQ ID NO: 1181271 - DNA, 15 bp, Homo sapiens
ggatcgcttgatccc

SEQ ID NO: 1181272 - DNA, 15 bp, Homo sapiens
aggatcgcttgatcc

SEQ ID NO: 1181273 - DNA, 15 bp, Homo sapiens
gaggatcgcttgatc

SEQ ID NO: 1181274 - DNA, 15 bp, Homo sapiens
ggaggatcgcttgat

SEQ ID NO: 1181275 - DNA, 15 bp, Homo sapiens
taggcaggaggatcg

SEQ ID NO: 1181276 - DNA, 15 bp, Homo sapiens
ttaggcaggaggatc

SEQ ID NO: 1181277 - DNA, 15 bp, Homo sapiens
cttaggcaggaggat

SEQ ID NO: 1181278 - DNA, 15 bp, Homo sapiens
gcttaggcaggagga

SEQ ID NO: 1181279 - DNA, 15 bp, Homo sapiens
tgcttaggcaggagg

SEQ ID NO: 1181280 - DNA, 15 bp, Homo sapiens
atgcttaggcaggag

SEQ ID NO: 1181281 - DNA, 15 bp, Homo sapiens
gatgcttaggcagga

SEQ ID NO: 1181282 - DNA, 15 bp, Homo sapiens
ggatgcttaggcagg

SEQ ID NO: 1181283 - DNA, 15 bp, Homo sapiens
aggatgcttaggcag

SEQ ID NO: 1181284 - DNA, 15 bp, Homo sapiens
caggatgcttaggca

SEQ ID NO: 1181285 - DNA, 15 bp, Homo sapiens
tcaggatgcttaggc

SEQ ID NO: 1181286 - DNA, 15 bp, Homo sapiens
ctcaggatgcttagg

SEQ ID NO: 1181287 - DNA, 15 bp, Homo sapiens
actcaggatgcttag

SEQ ID NO: 1181288 - DNA, 15 bp, Homo sapiens
tactcaggatgctta

SEQ ID NO: 1181289 - DNA, 15 bp, Homo sapiens
ctactcaggatgctt

SEQ ID NO: 1181290 - DNA, 15 bp, Homo sapiens
gctactcaggatgct

SEQ ID NO: 1181291 - DNA, 15 bp, Homo sapiens
agctactcaggatgc

SEQ ID NO: 1181292 - DNA, 15 bp, Homo sapiens
cagctactcaggatg

SEQ ID NO: 1181293 - DNA, 15 bp, Homo sapiens
ccagctactcaggat

SEQ ID NO: 1181294 - DNA, 15 bp, Homo sapiens
cacgtgcctgtagtc

SEQ ID NO: 1181295 - DNA, 15 bp, Homo sapiens
gcacgtgcctgtagt

SEQ ID NO: 1181296 - DNA, 15 bp, Homo sapiens
ggcacgtgcctgtag

SEQ ID NO: 1181297 - DNA, 15 bp, Homo sapiens
ctggcacgtgcctgt

SEQ ID NO: 1181298 - DNA, 15 bp, Homo sapiens
gctggcacgtgcctg

SEQ ID NO: 1181299 - DNA, 15 bp, Homo sapiens
tgctggcacgtgcct

SEQ ID NO: 1181300 - DNA, 15 bp, Homo sapiens
atgctggcacgtgcc

SEQ ID NO: 1181301 - DNA, 15 bp, Homo sapiens
tatgctggcacgtgc

SEQ ID NO: 1181302 - DNA, 15 bp, Homo sapiens
gtatgctggcacgtg

SEQ ID NO: 1181303 - DNA, 15 bp, Homo sapiens
ggtatgctggcacgt

SEQ ID NO: 1181304 - DNA, 15 bp, Homo sapiens
gggtatgctggcacg

SEQ ID NO: 1181305 - DNA, 15 bp, Homo sapiens
cgggtatgctggcac

SEQ ID NO: 1181306 - DNA, 15 bp, Homo sapiens
ccgggtatgctggca

SEQ ID NO: 1181307 - DNA, 15 bp, Homo sapiens
gccgggtatgctggc

SEQ ID NO: 1181308 - DNA, 15 bp, Homo sapiens
agccgggtatgctgg

SEQ ID NO: 1181309 - DNA, 15 bp, Homo sapiens
tagccgggtatgctg

SEQ ID NO: 1181310 - DNA, 15 bp, Homo sapiens
ttagccgggtatgct

SEQ ID NO: 1181311 - DNA, 15 bp, Homo sapiens
attagccgggtatgc

SEQ ID NO: 1181312 - DNA, 15 bp, Homo sapiens
aattagccgggtatg

SEQ ID NO: 1181313 - DNA, 15 bp, Homo sapiens
aaattagccgggtat

SEQ ID NO: 1181314 - DNA, 15 bp, Homo sapiens
taaattagccgggta

SEQ ID NO: 1181315 - DNA, 15 bp, Homo sapiens
ataaattagccgggt

SEQ ID NO: 1181316 - DNA, 15 bp, Homo sapiens
aataaattagccggg

SEQ ID NO: 1181317 - DNA, 15 bp, Homo sapiens
caataaattagccgg

SEQ ID NO: 1181318 - DNA, 15 bp, Homo sapiens
acaataaattagccg

SEQ ID NO: 1181319 - DNA, 15 bp, Homo sapiens
aacaataaattagcc

SEQ ID NO: 1181320 - DNA, 15 bp, Homo sapiens
aaacaataaattagc

SEQ ID NO: 1181321 - DNA, 15 bp, Homo sapiens
aaaacaataaattag

SEQ ID NO: 1181322 - DNA, 15 bp, Homo sapiens
aaaaacaataaatta

SEQ ID NO: 1181323 - DNA, 15 bp, Homo sapiens
aaaaaacaataaatt

SEQ ID NO: 1181324 - DNA, 15 bp, Homo sapiens
aaaaaaacaataaat

SEQ ID NO: 1181325 - DNA, 15 bp, Homo sapiens
gaaaaaaacaataaa

SEQ ID NO: 1181326 - DNA, 15 bp, Homo sapiens
agaaaaaaacaataa

SEQ ID NO: 1181327 - DNA, 15 bp, Homo sapiens
aagaaaaaaacaata

SEQ ID NO: 1181328 - DNA, 15 bp, Homo sapiens
aaagaaaaaaacaat

SEQ ID NO: 1181329 - DNA, 15 bp, Homo sapiens
gaaagaaaaaaacaa

SEQ ID NO: 1181330 - DNA, 15 bp, Homo sapiens
agaaagaaaaaaaca

SEQ ID NO: 1181331 - DNA, 15 bp, Homo sapiens
aagaaagaaaaaaac

SEQ ID NO: 1181332 - DNA, 15 bp, Homo sapiens
agagaccctgtctct

SEQ ID NO: 1181333 - DNA, 15 bp, Homo sapiens
gagagaccctgtctc

SEQ ID NO: 1181334 - DNA, 15 bp, Homo sapiens
agagagaccctgtct

SEQ ID NO: 1181335 - DNA, 15 bp, Homo sapiens
aagagagaccctgtc

SEQ ID NO: 1181336 - DNA, 15 bp, Homo sapiens
aaagagagaccctgt

SEQ ID NO: 1181337 - DNA, 15 bp, Homo sapiens
caaagagagaccctg

SEQ ID NO: 1181338 - DNA, 15 bp, Homo sapiens
acaaagagagaccct

SEQ ID NO: 1181339 - DNA, 15 bp, Homo sapiens
aacaaagagagaccc

SEQ ID NO: 1181340 - DNA, 15 bp, Homo sapiens
caacaaagagagacc

SEQ ID NO: 1181341 - DNA, 15 bp, Homo sapiens
gcaacaaagagagac

SEQ ID NO: 1181342 - DNA, 15 bp, Homo sapiens
ggcaacaaagagaga

SEQ ID NO: 1181343 - DNA, 15 bp, Homo sapiens
gggcaacaaagagag

SEQ ID NO: 1181344 - DNA, 15 bp, Homo sapiens
tgggcaacaaagaga

SEQ ID NO: 1181345 - DNA, 15 bp, Homo sapiens
ttgggcaacaaagag

SEQ ID NO: 1181346 - DNA, 15 bp, Homo sapiens
cttgggcaacaaaga

SEQ ID NO: 1181347 - DNA, 15 bp, Homo sapiens
gcttgggcaacaaag

SEQ ID NO: 1181348 - DNA, 15 bp, Homo sapiens
agcttgggcaacaaa

SEQ ID NO: 1181349 - DNA, 15 bp, Homo sapiens
accagcttgggcaac

SEQ ID NO: 1181350 - DNA, 15 bp, Homo sapiens
gaccagcttgggcaa

SEQ ID NO: 1181351 - DNA, 15 bp, Homo sapiens
agaccagcttgggca

SEQ ID NO: 1181352 - DNA, 15 bp, Homo sapiens
gagaccagcttgggc

SEQ ID NO: 1181353 - DNA, 15 bp, Homo sapiens
tgagaccagcttggg

SEQ ID NO: 1181354 - DNA, 15 bp, Homo sapiens
ttgagaccagcttgg

SEQ ID NO: 1181355 - DNA, 15 bp, Homo sapiens
aattgcttgaggcca

SEQ ID NO: 1181356 - DNA, 15 bp, Homo sapiens
gaattgcttgaggcc

SEQ ID NO: 1181357 - DNA, 15 bp, Homo sapiens
agaattgcttgaggc

SEQ ID NO: 1181358 - DNA, 15 bp, Homo sapiens
gagaattgcttgagg

SEQ ID NO: 1181359 - DNA, 15 bp, Homo sapiens
agggagaattgcttg

SEQ ID NO: 1181360 - DNA, 15 bp, Homo sapiens
gagggagaattgctt

SEQ ID NO: 1181361 - DNA, 15 bp, Homo sapiens
ggagggagaattgct

SEQ ID NO: 1181362 - DNA, 15 bp, Homo sapiens
aggagggagaattgc

SEQ ID NO: 1181363 - DNA, 15 bp, Homo sapiens
gaggagggagaattg

SEQ ID NO: 1181364 - DNA, 15 bp, Homo sapiens
tgaggagggagaatt

SEQ ID NO: 1181365 - DNA, 15 bp, Homo sapiens
ctgaggagggagaat

SEQ ID NO: 1181366 - DNA, 15 bp, Homo sapiens
gctgaggagggagaa

SEQ ID NO: 1181367 - DNA, 15 bp, Homo sapiens
ggctgaggagggaga

SEQ ID NO: 1181368 - DNA, 15 bp, Homo sapiens
aggctgaggagggag

SEQ ID NO: 1181369 - DNA, 15 bp, Homo sapiens
aaggctgaggaggga

SEQ ID NO: 1181370 - DNA, 15 bp, Homo sapiens
gaaggctgaggaggg

SEQ ID NO: 1181371 - DNA, 15 bp, Homo sapiens
ggaaggctgaggagg

SEQ ID NO: 1181372 - DNA, 15 bp, Homo sapiens
tggaaggctgaggag

SEQ ID NO: 1181373 - DNA, 15 bp, Homo sapiens
ttggaaggctgagga

SEQ ID NO: 1181374 - DNA, 15 bp, Homo sapiens
tactttggaaggctg

SEQ ID NO: 1181375 - DNA, 15 bp, Homo sapiens
atactttggaaggct

SEQ ID NO: 1181376 - DNA, 15 bp, Homo sapiens
aatactttggaaggc

SEQ ID NO: 1181377 - DNA, 15 bp, Homo sapiens
caatactttggaagg

SEQ ID NO: 1181378 - DNA, 15 bp, Homo sapiens
ccaatactttggaag

SEQ ID NO: 1181379 - DNA, 15 bp, Homo sapiens
cccaatactttggaa

SEQ ID NO: 1181380 - DNA, 15 bp, Homo sapiens
tcccaatactttgga

SEQ ID NO: 1181381 - DNA, 15 bp, Homo sapiens
atcccaatactttgg

SEQ ID NO: 1181382 - DNA, 15 bp, Homo sapiens
aatcccaatactttg

SEQ ID NO: 1181383 - DNA, 15 bp, Homo sapiens
taatcccaatacttt

SEQ ID NO: 1181384 - DNA, 15 bp, Homo sapiens
gtaatcccaatactt

SEQ ID NO: 1181385 - DNA, 15 bp, Homo sapiens
tgtaatcccaatact

SEQ ID NO: 1181386 - DNA, 15 bp, Homo sapiens
ctgtaatcccaatac

SEQ ID NO: 1181387 - DNA, 15 bp, Homo sapiens
cctgtaatcccaata

SEQ ID NO: 1181388 - DNA, 15 bp, Homo sapiens
gcctgtaatcccaat

SEQ ID NO: 1181389 - DNA, 15 bp, Homo sapiens
tgcagtggctcatgc

SEQ ID NO: 1181390 - DNA, 15 bp, Homo sapiens
gtgcagtggctcatg

SEQ ID NO: 1181391 - DNA, 15 bp, Homo sapiens
ggtgcagtggctcat

SEQ ID NO: 1181392 - DNA, 15 bp, Homo sapiens
tgggtgcagtggctc

SEQ ID NO: 1181393 - DNA, 15 bp, Homo sapiens
ctgggtgcagtggct

SEQ ID NO: 1181394 - DNA, 15 bp, Homo sapiens
gctgggtgcagtggc

SEQ ID NO: 1181395 - DNA, 15 bp, Homo sapiens
ggctgggtgcagtgg

SEQ ID NO: 1181396 - DNA, 15 bp, Homo sapiens
aggctgggtgcagtg

SEQ ID NO: 1181397 - DNA, 15 bp, Homo sapiens
gaggctgggtgcagt

SEQ ID NO: 1181398 - DNA, 15 bp, Homo sapiens
agaggctgggtgcag

SEQ ID NO: 1181399 - DNA, 15 bp, Homo sapiens
cagaggctgggtgca

SEQ ID NO: 1181400 - DNA, 15 bp, Homo sapiens
ccagaggctgggtgc

SEQ ID NO: 1181401 - DNA, 15 bp, Homo sapiens
cccagaggctgggtg

SEQ ID NO: 1181402 - DNA, 15 bp, Homo sapiens
ccccagaggctgggt

SEQ ID NO: 1181403 - DNA, 15 bp, Homo sapiens
tccccagaggctggg

SEQ ID NO: 1181404 - DNA, 15 bp, Homo sapiens
gtccccagaggctgg

SEQ ID NO: 1181405 - DNA, 15 bp, Homo sapiens
cgtccccagaggctg

SEQ ID NO: 1181406 - DNA, 15 bp, Homo sapiens
acgtccccagaggct

SEQ ID NO: 1181407 - DNA, 15 bp, Homo sapiens
aacgtccccagaggc

SEQ ID NO: 1181408 - DNA, 15 bp, Homo sapiens
aaacgtccccagagg

SEQ ID NO: 1181409 - DNA, 15 bp, Homo sapiens
aaaacgtccccagag

SEQ ID NO: 1181410 - DNA, 15 bp, Homo sapiens
taaaacgtccccaga

SEQ ID NO: 1181411 - DNA, 15 bp, Homo sapiens
ttaaaacgtccccag

SEQ ID NO: 1181412 - DNA, 15 bp, Homo sapiens
tttaaaacgtcccca

SEQ ID NO: 1181413 - DNA, 15 bp, Homo sapiens
ttttaaaacgtcccc

SEQ ID NO: 1181414 - DNA, 15 bp, Homo sapiens
tttttaaaacgtccc

SEQ ID NO: 1181415 - DNA, 15 bp, Homo sapiens
ttttttaaaacgtcc

SEQ ID NO: 1181416 - DNA, 15 bp, Homo sapiens
attttttaaaacgtc

SEQ ID NO: 1181417 - DNA, 15 bp, Homo sapiens
aattttttaaaacgt

SEQ ID NO: 1181418 - DNA, 15 bp, Homo sapiens
gaattttttaaaacg

SEQ ID NO: 1181419 - DNA, 15 bp, Homo sapiens
tgaattttttaaaac

SEQ ID NO: 1181420 - DNA, 15 bp, Homo sapiens
atgaattttttaaaa

SEQ ID NO: 1181421 - DNA, 15 bp, Homo sapiens
tatgaattttttaaa

SEQ ID NO: 1181422 - DNA, 15 bp, Homo sapiens
atatgaattttttaa

SEQ ID NO: 1181423 - DNA, 15 bp, Homo sapiens
aatatgaatttttta

SEQ ID NO: 1181424 - DNA, 15 bp, Homo sapiens
taatatgaatttttt

SEQ ID NO: 1181425 - DNA, 15 bp, Homo sapiens
ataatatgaattttt

SEQ ID NO: 1181426 - DNA, 15 bp, Homo sapiens
aataatatgaatttt

SEQ ID NO: 1181427 - DNA, 15 bp, Homo sapiens
aaataatatgaattt

SEQ ID NO: 1181428 - DNA, 15 bp, Homo sapiens
taaataatatgaatt

SEQ ID NO: 1181429 - DNA, 15 bp, Homo sapiens
ataaataatatgaat

SEQ ID NO: 1181430 - DNA, 15 bp, Homo sapiens
aataaataatatgaa

SEQ ID NO: 1181431 - DNA, 15 bp, Homo sapiens
aaataaataatatga

SEQ ID NO: 1181432 - DNA, 15 bp, Homo sapiens
taaataaataatatg

SEQ ID NO: 1181433 - DNA, 15 bp, Homo sapiens
ttaaataaataatat

SEQ ID NO: 1181434 - DNA, 15 bp, Homo sapiens
tttaaataaataata

SEQ ID NO: 1181435 - DNA, 15 bp, Homo sapiens
atttaaataaataat

SEQ ID NO: 1181436 - DNA, 15 bp, Homo sapiens
gatttaaataaataa

SEQ ID NO: 1181437 - DNA, 15 bp, Homo sapiens
agatttaaataaata

SEQ ID NO: 1181438 - DNA, 15 bp, Homo sapiens
cagatttaaataaat

SEQ ID NO: 1181439 - DNA, 15 bp, Homo sapiens
tcagatttaaataaa

SEQ ID NO: 1181440 - DNA, 15 bp, Homo sapiens
gtcagatttaaataa

SEQ ID NO: 1181441 - DNA, 15 bp, Homo sapiens
tgtcagatttaaata

SEQ ID NO: 1181442 - DNA, 15 bp, Homo sapiens
gtgtcagatttaaat

SEQ ID NO: 1181443 - DNA, 15 bp, Homo sapiens
tgtgtcagatttaaa

SEQ ID NO: 1181444 - DNA, 15 bp, Homo sapiens
atgtgtcagatttaa

SEQ ID NO: 1181445 - DNA, 15 bp, Homo sapiens
catgtgtcagattta

SEQ ID NO: 1181446 - DNA, 15 bp, Homo sapiens
acatgtgtcagattt

SEQ ID NO: 1181447 - DNA, 15 bp, Homo sapiens
tacatgtgtcagatt

SEQ ID NO: 1181448 - DNA, 15 bp, Homo sapiens
atacatgtgtcagat

SEQ ID NO: 1181449 - DNA, 15 bp, Homo sapiens
aatacatgtgtcaga

SEQ ID NO: 1181450 - DNA, 15 bp, Homo sapiens
taatacatgtgtcag

SEQ ID NO: 1181451 - DNA, 15 bp, Homo sapiens
gtaatacatgtgtca

SEQ ID NO: 1181452 - DNA, 15 bp, Homo sapiens
cgtaatacatgtgtc

SEQ ID NO: 1181453 - DNA, 15 bp, Homo sapiens
tcgtaatacatgtgt

SEQ ID NO: 1181454 - DNA, 15 bp, Homo sapiens
atcgtaatacatgtg

SEQ ID NO: 1181455 - DNA, 15 bp, Homo sapiens
aatcgtaatacatgt

SEQ ID NO: 1181456 - DNA, 15 bp, Homo sapiens
aaatcgtaatacatg

SEQ ID NO: 1181457 - DNA, 15 bp, Homo sapiens
taaatcgtaatacat

SEQ ID NO: 1181458 - DNA, 15 bp, Homo sapiens
ttaaatcgtaataca

SEQ ID NO: 1181459 - DNA, 15 bp, Homo sapiens
cttaaatcgtaatac

SEQ ID NO: 1181460 - DNA, 15 bp, Homo sapiens
gcttaaatcgtaata

SEQ ID NO: 1181461 - DNA, 15 bp, Homo sapiens
ggcttaaatcgtaat

SEQ ID NO: 1181462 - DNA, 15 bp, Homo sapiens
cggcttaaatcgtaa

SEQ ID NO: 1181463 - DNA, 15 bp, Homo sapiens
tcggcttaaatcgta

SEQ ID NO: 1181464 - DNA, 15 bp, Homo sapiens
ttcggcttaaatcgt

SEQ ID NO: 1181465 - DNA, 15 bp, Homo sapiens
attcggcttaaatcg

SEQ ID NO: 1181466 - DNA, 15 bp, Homo sapiens
aattcggcttaaatc

SEQ ID NO: 1181467 - DNA, 15 bp, Homo sapiens
caattcggcttaaat

SEQ ID NO: 1181468 - DNA, 15 bp, Homo sapiens
ccaattcggcttaaa

SEQ ID NO: 1181469 - DNA, 15 bp, Homo sapiens
tccaattcggcttaa

SEQ ID NO: 1181470 - DNA, 15 bp, Homo sapiens
atccaattcggctta

SEQ ID NO: 1181471 - DNA, 15 bp, Homo sapiens
gatccaattcggctt

SEQ ID NO: 1181472 - DNA, 15 bp, Homo sapiens
tgatccaattcggct

SEQ ID NO: 1181473 - DNA, 15 bp, Homo sapiens
atgatccaattcggc

SEQ ID NO: 1181474 - DNA, 15 bp, Homo sapiens
tatgatccaattcgg

SEQ ID NO: 1181475 - DNA, 15 bp, Homo sapiens
atatgatccaattcg

SEQ ID NO: 1181476 - DNA, 15 bp, Homo sapiens
aatatgatccaattc

SEQ ID NO: 1181477 - DNA, 15 bp, Homo sapiens
taatatgatccaatt

SEQ ID NO: 1181478 - DNA, 15 bp, Homo sapiens
ataatatgatccaat

SEQ ID NO: 1181479 - DNA, 15 bp, Homo sapiens
aataatatgatccaa

SEQ ID NO: 1181480 - DNA, 15 bp, Homo sapiens
taataatatgatcca

SEQ ID NO: 1181481 - DNA, 15 bp, Homo sapiens
ataataatatgatcc

SEQ ID NO: 1181482 - DNA, 15 bp, Homo sapiens
gataataatatgatc

SEQ ID NO: 1181483 - DNA, 15 bp, Homo sapiens
tgataataatatgat

SEQ ID NO: 1181484 - DNA, 15 bp, Homo sapiens
ttgataataatatga

SEQ ID NO: 1181485 - DNA, 15 bp, Homo sapiens
tttgataataatatg

SEQ ID NO: 1181486 - DNA, 15 bp, Homo sapiens
ctttgataataatat

SEQ ID NO: 1181487 - DNA, 15 bp, Homo sapiens
tctttgataataata

SEQ ID NO: 1181488 - DNA, 15 bp, Homo sapiens
gtctttgataataat

SEQ ID NO: 1181489 - DNA, 15 bp, Homo sapiens
tgtctttgataataa

SEQ ID NO: 1181490 - DNA, 15 bp, Homo sapiens
atgtctttgataata

SEQ ID NO: 1181491 - DNA, 15 bp, Homo sapiens
catgtctttgataat

SEQ ID NO: 1181492 - DNA, 15 bp, Homo sapiens
gcatgtctttgataa

SEQ ID NO: 1181493 - DNA, 15 bp, Homo sapiens
agcatgtctttgata

SEQ ID NO: 1181494 - DNA, 15 bp, Homo sapiens
aagcatgtctttgat

SEQ ID NO: 1181495 - DNA, 15 bp, Homo sapiens
aaagcatgtctttga

SEQ ID NO: 1181496 - DNA, 15 bp, Homo sapiens
gaaagcatgtctttg

SEQ ID NO: 1181497 - DNA, 15 bp, Homo sapiens
ggaaagcatgtcttt

SEQ ID NO: 1181498 - DNA, 15 bp, Homo sapiens
gggaaagcatgtctt

SEQ ID NO: 1181499 - DNA, 15 bp, Homo sapiens
ggggaaagcatgtct

SEQ ID NO: 1181500 - DNA, 15 bp, Homo sapiens
tggggaaagcatgtc

SEQ ID NO: 1181501 - DNA, 15 bp, Homo sapiens
ctggggaaagcatgt

SEQ ID NO: 1181502 - DNA, 15 bp, Homo sapiens
cctggggaaagcatg

SEQ ID NO: 1181503 - DNA, 15 bp, Homo sapiens
ccctggggaaagcat

SEQ ID NO: 1181504 - DNA, 15 bp, Homo sapiens
accctggggaaagca

SEQ ID NO: 1181505 - DNA, 15 bp, Homo sapiens
caccctggggaaagc

SEQ ID NO: 1181506 - DNA, 15 bp, Homo sapiens
acaccctggggaaag

SEQ ID NO: 1181507 - DNA, 15 bp, Homo sapiens
cacaccctggggaaa

SEQ ID NO: 1181508 - DNA, 15 bp, Homo sapiens
ccacaccctggggaa

SEQ ID NO: 1181509 - DNA, 15 bp, Homo sapiens
accacaccctgggga

SEQ ID NO: 1181510 - DNA, 15 bp, Homo sapiens
caccacaccctgggg

SEQ ID NO: 1181511 - DNA, 15 bp, Homo sapiens
tcaccacaccctggg

SEQ ID NO: 1181512 - DNA, 15 bp, Homo sapiens
ctcaccacaccctgg

SEQ ID NO: 1181513 - DNA, 15 bp, Homo sapiens
actcaccacaccctg

SEQ ID NO: 1181514 - DNA, 15 bp, Homo sapiens
gactcaccacaccct

SEQ ID NO: 1181515 - DNA, 15 bp, Homo sapiens
agactcaccacaccc

SEQ ID NO: 1181516 - DNA, 15 bp, Homo sapiens
cagactcaccacacc

SEQ ID NO: 1181517 - DNA, 15 bp, Homo sapiens
ccagactcaccacac

SEQ ID NO: 1181518 - DNA, 15 bp, Homo sapiens
tccagactcaccaca

SEQ ID NO: 1181519 - DNA, 15 bp, Homo sapiens
ttccagactcaccac

SEQ ID NO: 1181520 - DNA, 15 bp, Homo sapiens
cttccagactcacca

SEQ ID NO: 1181521 - DNA, 15 bp, Homo sapiens
acttccagactcacc

SEQ ID NO: 1181522 - DNA, 15 bp, Homo sapiens
cacttccagactcac

SEQ ID NO: 1181523 - DNA, 15 bp, Homo sapiens
ccacttccagactca

SEQ ID NO: 1181524 - DNA, 15 bp, Homo sapiens
gccacttccagactc

SEQ ID NO: 1181525 - DNA, 15 bp, Homo sapiens
ggccacttccagact

SEQ ID NO: 1181526 - DNA, 15 bp, Homo sapiens
gggccacttccagac

SEQ ID NO: 1181527 - DNA, 15 bp, Homo sapiens
agggccacttccaga

SEQ ID NO: 1181528 - DNA, 15 bp, Homo sapiens
aagggccacttccag

SEQ ID NO: 1181529 - DNA, 15 bp, Homo sapiens
caagggccacttcca

SEQ ID NO: 1181530 - DNA, 15 bp, Homo sapiens
ccaagggccacttcc

SEQ ID NO: 1181531 - DNA, 15 bp, Homo sapiens
tccaagggccacttc

SEQ ID NO: 1181532 - DNA, 15 bp, Homo sapiens
atccaagggccactt

SEQ ID NO: 1181533 - DNA, 15 bp, Homo sapiens
aatccaagggccact

SEQ ID NO: 1181534 - DNA, 15 bp, Homo sapiens
gaatccaagggccac

SEQ ID NO: 1181535 - DNA, 15 bp, Homo sapiens
agaatccaagggcca

SEQ ID NO: 1181536 - DNA, 15 bp, Homo sapiens
aagaatccaagggcc

SEQ ID NO: 1181537 - DNA, 15 bp, Homo sapiens
caagaatccaagggc

SEQ ID NO: 1181538 - DNA, 15 bp, Homo sapiens
ccaagaatccaaggg

SEQ ID NO: 1181539 - DNA, 15 bp, Homo sapiens
cccaagaatccaagg

SEQ ID NO: 1181540 - DNA, 15 bp, Homo sapiens
gcccaagaatccaag

SEQ ID NO: 1181541 - DNA, 15 bp, Homo sapiens
cgcccaagaatccaa

SEQ ID NO: 1181542 - DNA, 15 bp, Homo sapiens
ccgcccaagaatcca

SEQ ID NO: 1181543 - DNA, 15 bp, Homo sapiens
accgcccaagaatcc

SEQ ID NO: 1181544 - DNA, 15 bp, Homo sapiens
caccgcccaagaatc

SEQ ID NO: 1181545 - DNA, 15 bp, Homo sapiens
acaccgcccaagaat

SEQ ID NO: 1181546 - DNA, 15 bp, Homo sapiens
cacaccgcccaagaa

SEQ ID NO: 1181547 - DNA, 15 bp, Homo sapiens
gcacaccgcccaaga

SEQ ID NO: 1181548 - DNA, 15 bp, Homo sapiens
agcacaccgcccaag

SEQ ID NO: 1181549 - DNA, 15 bp, Homo sapiens
cagcacaccgcccaa

SEQ ID NO: 1181550 - DNA, 15 bp, Homo sapiens
gcagcacaccgccca

SEQ ID NO: 1181551 - DNA, 15 bp, Homo sapiens
ggcagcacaccgccc

SEQ ID NO: 1181552 - DNA, 15 bp, Homo sapiens
aggcagcacaccgcc

SEQ ID NO: 1181553 - DNA, 15 bp, Homo sapiens
gaggcagcacaccgc

SEQ ID NO: 1181554 - DNA, 15 bp, Homo sapiens
agaggcagcacaccg

SEQ ID NO: 1181555 - DNA, 15 bp, Homo sapiens
aagaggcagcacacc

SEQ ID NO: 1181556 - DNA, 15 bp, Homo sapiens
aaagaggcagcacac

SEQ ID NO: 1181557 - DNA, 15 bp, Homo sapiens
gaaagaggcagcaca

SEQ ID NO: 1181558 - DNA, 15 bp, Homo sapiens
tgaaagaggcagcac

SEQ ID NO: 1181559 - DNA, 15 bp, Homo sapiens
atgaaagaggcagca

SEQ ID NO: 1181560 - DNA, 15 bp, Homo sapiens
catgaaagaggcagc

SEQ ID NO: 1181561 - DNA, 15 bp, Homo sapiens
acatgaaagaggcag

SEQ ID NO: 1181562 - DNA, 15 bp, Homo sapiens
gacatgaaagaggca

SEQ ID NO: 1181563 - DNA, 15 bp, Homo sapiens
ggacatgaaagaggc

SEQ ID NO: 1181564 - DNA, 15 bp, Homo sapiens
aggacatgaaagagg

SEQ ID NO: 1181565 - DNA, 15 bp, Homo sapiens
gaggacatgaaagag

SEQ ID NO: 1181566 - DNA, 15 bp, Homo sapiens
ggaggacatgaaaga

SEQ ID NO: 1181567 - DNA, 15 bp, Homo sapiens
gggaggacatgaaag

SEQ ID NO: 1181568 - DNA, 15 bp, Homo sapiens
ggggaggacatgaaa

SEQ ID NO: 1181569 - DNA, 15 bp, Homo sapiens
tggggaggacatgaa

SEQ ID NO: 1181570 - DNA, 15 bp, Homo sapiens
ctggggaggacatga

SEQ ID NO: 1181571 - DNA, 15 bp, Homo sapiens
gctggggaggacatg

SEQ ID NO: 1181572 - DNA, 15 bp, Homo sapiens
ggctggggaggacat

SEQ ID NO: 1181573 - DNA, 15 bp, Homo sapiens
gggctggggaggaca

SEQ ID NO: 1181574 - DNA, 15 bp, Homo sapiens
tgggctggggaggac

SEQ ID NO: 1181575 - DNA, 15 bp, Homo sapiens
atgggctggggagga

SEQ ID NO: 1181576 - DNA, 15 bp, Homo sapiens
catgggctggggagg

SEQ ID NO: 1181577 - DNA, 15 bp, Homo sapiens
tcatgggctggggag

SEQ ID NO: 1181578 - DNA, 15 bp, Homo sapiens
ttcatgggctgggga

SEQ ID NO: 1181579 - DNA, 15 bp, Homo sapiens
attcatgggctgggg

SEQ ID NO: 1181580 - DNA, 15 bp, Homo sapiens
aattcatgggctggg

SEQ ID NO: 1181581 - DNA, 15 bp, Homo sapiens
caattcatgggctgg

SEQ ID NO: 1181582 - DNA, 15 bp, Homo sapiens
tcaattcatgggctg

SEQ ID NO: 1181583 - DNA, 15 bp, Homo sapiens
ttcaattcatgggct

SEQ ID NO: 1181584 - DNA, 15 bp, Homo sapiens
tttcaattcatgggc

SEQ ID NO: 1181585 - DNA, 15 bp, Homo sapiens
atttcaattcatggg

SEQ ID NO: 1181586 - DNA, 15 bp, Homo sapiens
tatttcaattcatgg

SEQ ID NO: 1181587 - DNA, 15 bp, Homo sapiens
ctatttcaattcatg

SEQ ID NO: 1181588 - DNA, 15 bp, Homo sapiens
gctatttcaattcat

SEQ ID NO: 1181589 - DNA, 15 bp, Homo sapiens
tgctatttcaattca

SEQ ID NO: 1181590 - DNA, 15 bp, Homo sapiens
ctgctatttcaattc

SEQ ID NO: 1181591 - DNA, 15 bp, Homo sapiens
gctgctatttcaatt

SEQ ID NO: 1181592 - DNA, 15 bp, Homo sapiens
ggctgctatttcaat

SEQ ID NO: 1181593 - DNA, 15 bp, Homo sapiens
tggctgctatttcaa

SEQ ID NO: 1181594 - DNA, 15 bp, Homo sapiens
gtggctgctatttca

SEQ ID NO: 1181595 - DNA, 15 bp, Homo sapiens
tgtggctgctatttc

SEQ ID NO: 1181596 - DNA, 15 bp, Homo sapiens
ctgtggctgctattt

SEQ ID NO: 1181597 - DNA, 15 bp, Homo sapiens
tctgtggctgctatt

SEQ ID NO: 1181598 - DNA, 15 bp, Homo sapiens
ctctgtggctgctat

SEQ ID NO: 1181599 - DNA, 15 bp, Homo sapiens
tctctgtggctgcta

SEQ ID NO: 1181600 - DNA, 15 bp, Homo sapiens
gtctctgtggctgct

SEQ ID NO: 1181601 - DNA, 15 bp, Homo sapiens
agtctctgtggctgc

SEQ ID NO: 1181602 - DNA, 15 bp, Homo sapiens
gagtctctgtggctg

SEQ ID NO: 1181603 - DNA, 15 bp, Homo sapiens
ggagtctctgtggct

SEQ ID NO: 1181604 - DNA, 15 bp, Homo sapiens
gggagtctctgtggc

SEQ ID NO: 1181605 - DNA, 15 bp, Homo sapiens
tgggagtctctgtgg

SEQ ID NO: 1181606 - DNA, 15 bp, Homo sapiens
ctgggagtctctgtg

SEQ ID NO: 1181607 - DNA, 15 bp, Homo sapiens
gctgggagtctctgt

SEQ ID NO: 1181608 - DNA, 15 bp, Homo sapiens
ggctgggagtctctg

SEQ ID NO: 1181609 - DNA, 15 bp, Homo sapiens
aggctgggagtctct

SEQ ID NO: 1181610 - DNA, 15 bp, Homo sapiens
aaggctgggagtctc

SEQ ID NO: 1181611 - DNA, 15 bp, Homo sapiens
gaaggctgggagtct

SEQ ID NO: 1181612 - DNA, 15 bp, Homo sapiens
ggaaggctgggagtc

SEQ ID NO: 1181613 - DNA, 15 bp, Homo sapiens
aggaaggctgggagt

SEQ ID NO: 1181614 - DNA, 15 bp, Homo sapiens
caggaaggctgggag

SEQ ID NO: 1181615 - DNA, 15 bp, Homo sapiens
acaggaaggctggga

SEQ ID NO: 1181616 - DNA, 15 bp, Homo sapiens
tacaggaaggctggg

SEQ ID NO: 1181617 - DNA, 15 bp, Homo sapiens
ttacaggaaggctgg

SEQ ID NO: 1181618 - DNA, 15 bp, Homo sapiens
attacaggaaggctg

SEQ ID NO: 1181619 - DNA, 15 bp, Homo sapiens
aattacaggaaggct

SEQ ID NO: 1181620 - DNA, 15 bp, Homo sapiens
aaattacaggaaggc

SEQ ID NO: 1181621 - DNA, 15 bp, Homo sapiens
caaattacaggaagg

SEQ ID NO: 1181622 - DNA, 15 bp, Homo sapiens
acaaattacaggaag

SEQ ID NO: 1181623 - DNA, 15 bp, Homo sapiens
cacaaattacaggaa

SEQ ID NO: 1181624 - DNA, 15 bp, Homo sapiens
acacaaattacagga

SEQ ID NO: 1181625 - DNA, 15 bp, Homo sapiens
gacacaaattacagg

SEQ ID NO: 1181626 - DNA, 15 bp, Homo sapiens
agacacaaattacag

SEQ ID NO: 1181627 - DNA, 15 bp, Homo sapiens
gagacacaaattaca

SEQ ID NO: 1181628 - DNA, 15 bp, Homo sapiens
ggagacacaaattac

SEQ ID NO: 1181629 - DNA, 15 bp, Homo sapiens
aggagacacaaatta

SEQ ID NO: 1181630 - DNA, 15 bp, Homo sapiens
caggagacacaaatt

SEQ ID NO: 1181631 - DNA, 15 bp, Homo sapiens
gcaggagacacaaat

SEQ ID NO: 1181632 - DNA, 15 bp, Homo sapiens
tgcaggagacacaaa

SEQ ID NO: 1181633 - DNA, 15 bp, Homo sapiens
ctgcaggagacacaa

SEQ ID NO: 1181634 - DNA, 15 bp, Homo sapiens
cctgcaggagacaca

SEQ ID NO: 1181635 - DNA, 15 bp, Homo sapiens
acctgcaggagacac

SEQ ID NO: 1181636 - DNA, 15 bp, Homo sapiens
cacctgcaggagaca

SEQ ID NO: 1181637 - DNA, 15 bp, Homo sapiens
ccacctgcaggagac

SEQ ID NO: 1181638 - DNA, 15 bp, Homo sapiens
tccacctgcaggaga

SEQ ID NO: 1181639 - DNA, 15 bp, Homo sapiens
ctccacctgcaggag

SEQ ID NO: 1181640 - DNA, 15 bp, Homo sapiens
cctccacctgcagga

SEQ ID NO: 1181641 - DNA, 15 bp, Homo sapiens
gcctccacctgcagg

SEQ ID NO: 1181642 - DNA, 15 bp, Homo sapiens
ggcctccacctgcag

SEQ ID NO: 1181643 - DNA, 15 bp, Homo sapiens
cggcctccacctgca

SEQ ID NO: 1181644 - DNA, 15 bp, Homo sapiens
acggcctccacctgc

SEQ ID NO: 1181645 - DNA, 15 bp, Homo sapiens
gacggcctccacctg

SEQ ID NO: 1181646 - DNA, 15 bp, Homo sapiens
tgacggcctccacct

SEQ ID NO: 1181647 - DNA, 15 bp, Homo sapiens
atgacggcctccacc

SEQ ID NO: 1181648 - DNA, 15 bp, Homo sapiens
catgacggcctccac

SEQ ID NO: 1181649 - DNA, 15 bp, Homo sapiens
ccatgacggcctcca

SEQ ID NO: 1181650 - DNA, 15 bp, Homo sapiens
gccatgacggcctcc

SEQ ID NO: 1181651 - DNA, 15 bp, Homo sapiens
tgccatgacggcctc

SEQ ID NO: 1181652 - DNA, 15 bp, Homo sapiens
ctgccatgacggcct

SEQ ID NO: 1181653 - DNA, 15 bp, Homo sapiens
tctgccatgacggcc

SEQ ID NO: 1181654 - DNA, 15 bp, Homo sapiens
ctctgccatgacggc

SEQ ID NO: 1181655 - DNA, 15 bp, Homo sapiens
gctctgccatgacgg

SEQ ID NO: 1181656 - DNA, 15 bp, Homo sapiens
agctctgccatgacg

SEQ ID NO: 1181657 - DNA, 15 bp, Homo sapiens
cagctctgccatgac

SEQ ID NO: 1181658 - DNA, 15 bp, Homo sapiens
tcagctctgccatga

SEQ ID NO: 1181659 - DNA, 15 bp, Homo sapiens
ctcagctctgccatg

SEQ ID NO: 1181660 - DNA, 15 bp, Homo sapiens
actcagctctgccat

SEQ ID NO: 1181661 - DNA, 15 bp, Homo sapiens
gactcagctctgcca

SEQ ID NO: 1181662 - DNA, 15 bp, Homo sapiens
agactcagctctgcc

SEQ ID NO: 1181663 - DNA, 15 bp, Homo sapiens
cagactcagctctgc

SEQ ID NO: 1181664 - DNA, 15 bp, Homo sapiens
tcagactcagctctg

SEQ ID NO: 1181665 - DNA, 15 bp, Homo sapiens
ctcagactcagctct

SEQ ID NO: 1181666 - DNA, 15 bp, Homo sapiens
gctcagactcagctc

SEQ ID NO: 1181667 - DNA, 15 bp, Homo sapiens
ggctcagactcagct

SEQ ID NO: 1181668 - DNA, 15 bp, Homo sapiens
tggctcagactcagc

SEQ ID NO: 1181669 - DNA, 15 bp, Homo sapiens
atggctcagactcag

SEQ ID NO: 1181670 - DNA, 15 bp, Homo sapiens
catggctcagactca

SEQ ID NO: 1181671 - DNA, 15 bp, Homo sapiens
acatggctcagactc

SEQ ID NO: 1181672 - DNA, 15 bp, Homo sapiens
cacatggctcagact

SEQ ID NO: 1181673 - DNA, 15 bp, Homo sapiens
ccacatggctcagac

SEQ ID NO: 1181674 - DNA, 15 bp, Homo sapiens
gccacatggctcaga

SEQ ID NO: 1181675 - DNA, 15 bp, Homo sapiens
tgccacatggctcag

SEQ ID NO: 1181676 - DNA, 15 bp, Homo sapiens
ctgccacatggctca

SEQ ID NO: 1181677 - DNA, 15 bp, Homo sapiens
tctgccacatggctc

SEQ ID NO: 1181678 - DNA, 15 bp, Homo sapiens
gtctgccacatggct

SEQ ID NO: 1181679 - DNA, 15 bp, Homo sapiens
ggtctgccacatggc

SEQ ID NO: 1181680 - DNA, 15 bp, Homo sapiens
cggtctgccacatgg

SEQ ID NO: 1181681 - DNA, 15 bp, Homo sapiens
tcggtctgccacatg

SEQ ID NO: 1181682 - DNA, 15 bp, Homo sapiens
gtcggtctgccacat

SEQ ID NO: 1181683 - DNA, 15 bp, Homo sapiens
agtcggtctgccaca

SEQ ID NO: 1181684 - DNA, 15 bp, Homo sapiens
cagtcggtctgccac

SEQ ID NO: 1181685 - DNA, 15 bp, Homo sapiens
tcagtcggtctgcca

SEQ ID NO: 1181686 - DNA, 15 bp, Homo sapiens
atcagtcggtctgcc

SEQ ID NO: 1181687 - DNA, 15 bp, Homo sapiens
aatcagtcggtctgc

SEQ ID NO: 1181688 - DNA, 15 bp, Homo sapiens
caatcagtcggtctg

SEQ ID NO: 1181689 - DNA, 15 bp, Homo sapiens
ccaatcagtcggtct

SEQ ID NO: 1181690 - DNA, 15 bp, Homo sapiens
gccaatcagtcggtc

SEQ ID NO: 1181691 - DNA, 15 bp, Homo sapiens
tgccaatcagtcggt

SEQ ID NO: 1181692 - DNA, 15 bp, Homo sapiens
ttgccaatcagtcgg

SEQ ID NO: 1181693 - DNA, 15 bp, Homo sapiens
gttgccaatcagtcg

SEQ ID NO: 1181694 - DNA, 15 bp, Homo sapiens
agttgccaatcagtc

SEQ ID NO: 1181695 - DNA, 15 bp, Homo sapiens
tagttgccaatcagt

SEQ ID NO: 1181696 - DNA, 15 bp, Homo sapiens
gtagttgccaatcag

SEQ ID NO: 1181697 - DNA, 15 bp, Homo sapiens
tgtagttgccaatca

SEQ ID NO: 1181698 - DNA, 15 bp, Homo sapiens
ctgtagttgccaatc

SEQ ID NO: 1181699 - DNA, 15 bp, Homo sapiens
gctgtagttgccaat

SEQ ID NO: 1181700 - DNA, 15 bp, Homo sapiens
agctgtagttgccaa

SEQ ID NO: 1181701 - DNA, 15 bp, Homo sapiens
aagctgtagttgcca

SEQ ID NO: 1181702 - DNA, 15 bp, Homo sapiens
caagctgtagttgcc

SEQ ID NO: 1181703 - DNA, 15 bp, Homo sapiens
ccaagctgtagttgc

SEQ ID NO: 1181704 - DNA, 15 bp, Homo sapiens
cccaagctgtagttg

SEQ ID NO: 1181705 - DNA, 15 bp, Homo sapiens
ccccaagctgtagtt

SEQ ID NO: 1181706 - DNA, 15 bp, Homo sapiens
cccccaagctgtagt

SEQ ID NO: 1181707 - DNA, 15 bp, Homo sapiens
ccccccaagctgtag

SEQ ID NO: 1181708 - DNA, 15 bp, Homo sapiens
gccccccaagctgta

SEQ ID NO: 1181709 - DNA, 15 bp, Homo sapiens
tgccccccaagctgt

SEQ ID NO: 1181710 - DNA, 15 bp, Homo sapiens
atgccccccaagctg

SEQ ID NO: 1181711 - DNA, 15 bp, Homo sapiens
aatgccccccaagct

SEQ ID NO: 1181712 - DNA, 15 bp, Homo sapiens
aaatgccccccaagc

SEQ ID NO: 1181713 - DNA, 15 bp, Homo sapiens
gaaatgccccccaag

SEQ ID NO: 1181714 - DNA, 15 bp, Homo sapiens
ggaaatgccccccaa

SEQ ID NO: 1181715 - DNA, 15 bp, Homo sapiens
tggaaatgcccccca

SEQ ID NO: 1181716 - DNA, 15 bp, Homo sapiens
gtggaaatgcccccc

SEQ ID NO: 1181717 - DNA, 15 bp, Homo sapiens
cgtggaaatgccccc

SEQ ID NO: 1181718 - DNA, 15 bp, Homo sapiens
ccgtggaaatgcccc

SEQ ID NO: 1181719 - DNA, 15 bp, Homo sapiens
cccgtggaaatgccc

SEQ ID NO: 1181720 - DNA, 15 bp, Homo sapiens
acccgtggaaatgcc

SEQ ID NO: 1181721 - DNA, 15 bp, Homo sapiens
cacccgtggaaatgc

SEQ ID NO: 1181722 - DNA, 15 bp, Homo sapiens
tcacccgtggaaatg

SEQ ID NO: 1181723 - DNA, 15 bp, Homo sapiens
ctcacccgtggaaat

SEQ ID NO: 1181724 - DNA, 15 bp, Homo sapiens
gctcacccgtggaaa

SEQ ID NO: 1181725 - DNA, 15 bp, Homo sapiens
cgctcacccgtggaa

SEQ ID NO: 1181726 - DNA, 15 bp, Homo sapiens
ccgctcacccgtgga

SEQ ID NO: 1181727 - DNA, 15 bp, Homo sapiens
gccgctcacccgtgg

SEQ ID NO: 1181728 - DNA, 15 bp, Homo sapiens
cgccgctcacccgtg

SEQ ID NO: 1181729 - DNA, 15 bp, Homo sapiens
gcgccgctcacccgt

SEQ ID NO: 1181730 - DNA, 15 bp, Homo sapiens
ggcgccgctcacccg

SEQ ID NO: 1181731 - DNA, 15 bp, Homo sapiens
cggcgccgctcaccc

SEQ ID NO: 1181732 - DNA, 15 bp, Homo sapiens
ccggcgccgctcacc

SEQ ID NO: 1181733 - DNA, 15 bp, Homo sapiens
cccggcgccgctcac

SEQ ID NO: 1181734 - DNA, 15 bp, Homo sapiens
acccggcgccgctca

SEQ ID NO: 1181735 - DNA, 15 bp, Homo sapiens
gacccggcgccgctc

SEQ ID NO: 1181736 - DNA, 15 bp, Homo sapiens
agacccggcgccgct

SEQ ID NO: 1181737 - DNA, 15 bp, Homo sapiens
gagacccggcgccgc

SEQ ID NO: 1181738 - DNA, 15 bp, Homo sapiens
ggagacccggcgccg

SEQ ID NO: 1181739 - DNA, 15 bp, Homo sapiens
tggagacccggcgcc

SEQ ID NO: 1181740 - DNA, 15 bp, Homo sapiens
atggagacccggcgc

SEQ ID NO: 1181741 - DNA, 15 bp, Homo sapiens
gatggagacccggcg

SEQ ID NO: 1181742 - DNA, 15 bp, Homo sapiens
cgatggagacccggc

SEQ ID NO: 1181743 - DNA, 15 bp, Homo sapiens
gcgatggagacccgg

SEQ ID NO: 1181744 - DNA, 15 bp, Homo sapiens
tgcgatggagacccg

SEQ ID NO: 1181745 - DNA, 15 bp, Homo sapiens
ctgcgatggagaccc

SEQ ID NO: 1181746 - DNA, 15 bp, Homo sapiens
gctgcgatggagacc

SEQ ID NO: 1181747 - DNA, 15 bp, Homo sapiens
ggctgcgatggagac

SEQ ID NO: 1181748 - DNA, 15 bp, Homo sapiens
gggctgcgatggaga

SEQ ID NO: 1181749 - DNA, 15 bp, Homo sapiens
tgggctgcgatggag

SEQ ID NO: 1181750 - DNA, 15 bp, Homo sapiens
ctgggctgcgatgga

SEQ ID NO: 1181751 - DNA, 15 bp, Homo sapiens
gctgggctgcgatgg

SEQ ID NO: 1181752 - DNA, 15 bp, Homo sapiens
agctgggctgcgatg

SEQ ID NO: 1181753 - DNA, 15 bp, Homo sapiens
cagctgggctgcgat

SEQ ID NO: 1181754 - DNA, 15 bp, Homo sapiens
gcagctgggctgcga

SEQ ID NO: 1181755 - DNA, 15 bp, Homo sapiens
agcagctgggctgcg

SEQ ID NO: 1181756 - DNA, 15 bp, Homo sapiens
gagcagctgggctgc

SEQ ID NO: 1181757 - DNA, 15 bp, Homo sapiens
ggagcagctgggctg

SEQ ID NO: 1181758 - DNA, 15 bp, Homo sapiens
tggagcagctgggct

SEQ ID NO: 1181759 - DNA, 15 bp, Homo sapiens
ctggagcagctgggc

SEQ ID NO: 1181760 - DNA, 15 bp, Homo sapiens
cctggagcagctggg

SEQ ID NO: 1181761 - DNA, 15 bp, Homo sapiens
tcctggagcagctgg

SEQ ID NO: 1181762 - DNA, 15 bp, Homo sapiens
atcctggagcagctg

SEQ ID NO: 1181763 - DNA, 15 bp, Homo sapiens
gatcctggagcagct

SEQ ID NO: 1181764 - DNA, 15 bp, Homo sapiens
ggatcctggagcagc

SEQ ID NO: 1181765 - DNA, 15 bp, Homo sapiens
aggatcctggagcag

SEQ ID NO: 1181766 - DNA, 15 bp, Homo sapiens
taggatcctggagca

SEQ ID NO: 1181767 - DNA, 15 bp, Homo sapiens
ctaggatcctggagc

SEQ ID NO: 1181768 - DNA, 15 bp, Homo sapiens
actaggatcctggag

SEQ ID NO: 1181769 - DNA, 15 bp, Homo sapiens
tactaggatcctgga

SEQ ID NO: 1181770 - DNA, 15 bp, Homo sapiens
ttactaggatcctgg

SEQ ID NO: 1181771 - DNA, 15 bp, Homo sapiens
cttactaggatcctg

SEQ ID NO: 1181772 - DNA, 15 bp, Homo sapiens
acttactaggatcct

SEQ ID NO: 1181773 - DNA, 15 bp, Homo sapiens
cacttactaggatcc

SEQ ID NO: 1181774 - DNA, 15 bp, Homo sapiens
ccacttactaggatc

SEQ ID NO: 1181775 - DNA, 15 bp, Homo sapiens
gccacttactaggat

SEQ ID NO: 1181776 - DNA, 15 bp, Homo sapiens
tgccacttactagga

SEQ ID NO: 1181777 - DNA, 15 bp, Homo sapiens
gtgccacttactagg

SEQ ID NO: 1181778 - DNA, 15 bp, Homo sapiens
ggtgccacttactag

SEQ ID NO: 1181779 - DNA, 15 bp, Homo sapiens
gggtgccacttacta

SEQ ID NO: 1181780 - DNA, 15 bp, Homo sapiens
tgggtgccacttact

SEQ ID NO: 1181781 - DNA, 15 bp, Homo sapiens
ctgggtgccacttac

SEQ ID NO: 1181782 - DNA, 15 bp, Homo sapiens
tctgggtgccactta

SEQ ID NO: 1181783 - DNA, 15 bp, Homo sapiens
ttctgggtgccactt

SEQ ID NO: 1181784 - DNA, 15 bp, Homo sapiens
gttctgggtgccact

SEQ ID NO: 1181785 - DNA, 15 bp, Homo sapiens
agttctgggtgccac

SEQ ID NO: 1181786 - DNA, 15 bp, Homo sapiens
cagttctgggtgcca

SEQ ID NO: 1181787 - DNA, 15 bp, Homo sapiens
acagttctgggtgcc

SEQ ID NO: 1181788 - DNA, 15 bp, Homo sapiens
aacagttctgggtgc

SEQ ID NO: 1181789 - DNA, 15 bp, Homo sapiens
taacagttctgggtg

SEQ ID NO: 1181790 - DNA, 15 bp, Homo sapiens
gtaacagttctgggt

SEQ ID NO: 1181791 - DNA, 15 bp, Homo sapiens
agtaacagttctggg

SEQ ID NO: 1181792 - DNA, 15 bp, Homo sapiens
tagtaacagttctgg

SEQ ID NO: 1181793 - DNA, 15 bp, Homo sapiens
ctagtaacagttctg

SEQ ID NO: 1181794 - DNA, 15 bp, Homo sapiens
gctagtaacagttct

SEQ ID NO: 1181795 - DNA, 15 bp, Homo sapiens
agctagtaacagttc

SEQ ID NO: 1181796 - DNA, 15 bp, Homo sapiens
cagctagtaacagtt

SEQ ID NO: 1181797 - DNA, 15 bp, Homo sapiens
gcagctagtaacagt

SEQ ID NO: 1181798 - DNA, 15 bp, Homo sapiens
agcagctagtaacag

SEQ ID NO: 1181799 - DNA, 15 bp, Homo sapiens
cagcagctagtaaca

SEQ ID NO: 1181800 - DNA, 15 bp, Homo sapiens
acagcagctagtaac

SEQ ID NO: 1181801 - DNA, 15 bp, Homo sapiens
gacagcagctagtaa

SEQ ID NO: 1181802 - DNA, 15 bp, Homo sapiens
agacagcagctagta

SEQ ID NO: 1181803 - DNA, 15 bp, Homo sapiens
cagacagcagctagt

SEQ ID NO: 1181804 - DNA, 15 bp, Homo sapiens
ccagacagcagctag

SEQ ID NO: 1181805 - DNA, 15 bp, Homo sapiens
cccagacagcagcta

SEQ ID NO: 1181806 - DNA, 15 bp, Homo sapiens
gcccagacagcagct

SEQ ID NO: 1181807 - DNA, 15 bp, Homo sapiens
tgcccagacagcagc

SEQ ID NO: 1181808 - DNA, 15 bp, Homo sapiens
atgcccagacagcag

SEQ ID NO: 1181809 - DNA, 15 bp, Homo sapiens
gatgcccagacagca

SEQ ID NO: 1181810 - DNA, 15 bp, Homo sapiens
aagatgcccagacag

SEQ ID NO: 1181811 - DNA, 15 bp, Homo sapiens
gaagatgcccagaca

SEQ ID NO: 1181812 - DNA, 15 bp, Homo sapiens
agaagatgcccagac

SEQ ID NO: 1181813 - DNA, 15 bp, Homo sapiens
cagaagatgcccaga

SEQ ID NO: 1181814 - DNA, 15 bp, Homo sapiens
acagaagatgcccag

SEQ ID NO: 1181815 - DNA, 15 bp, Homo sapiens
cacagaagatgccca

SEQ ID NO: 1181816 - DNA, 15 bp, Homo sapiens
acacagaagatgccc

SEQ ID NO: 1181817 - DNA, 15 bp, Homo sapiens
cacacagaagatgcc

SEQ ID NO: 1181818 - DNA, 15 bp, Homo sapiens
acacacagaagatgc

SEQ ID NO: 1181819 - DNA, 15 bp, Homo sapiens
cacacacagaagatg

SEQ ID NO: 1181820 - DNA, 15 bp, Homo sapiens
acacacacagaagat

SEQ ID NO: 1181821 - DNA, 15 bp, Homo sapiens
cacacacacagaaga

SEQ ID NO: 1181822 - DNA, 15 bp, Homo sapiens
gcacacacacagaag

SEQ ID NO: 1181823 - DNA, 15 bp, Homo sapiens
tgcacacacacagaa

SEQ ID NO: 1181824 - DNA, 15 bp, Homo sapiens
ctgcacacacacaga

SEQ ID NO: 1181825 - DNA, 15 bp, Homo sapiens
tctgcacacacacag

SEQ ID NO: 1181826 - DNA, 15 bp, Homo sapiens
atctgcacacacaca

SEQ ID NO: 1181827 - DNA, 15 bp, Homo sapiens
tatctgcacacacac

SEQ ID NO: 1181828 - DNA, 15 bp, Homo sapiens
gtatctgcacacaca

SEQ ID NO: 1181829 - DNA, 15 bp, Homo sapiens
agtatctgcacacac

SEQ ID NO: 1181830 - DNA, 15 bp, Homo sapiens
aagtatctgcacaca

SEQ ID NO: 1181831 - DNA, 15 bp, Homo sapiens
aaagtatctgcacac

SEQ ID NO: 1181832 - DNA, 15 bp, Homo sapiens
caaagtatctgcaca

SEQ ID NO: 1181833 - DNA, 15 bp, Homo sapiens
ccaaagtatctgcac

SEQ ID NO: 1181834 - DNA, 15 bp, Homo sapiens
cccaaagtatctgca

SEQ ID NO: 1181835 - DNA, 15 bp, Homo sapiens
gcccaaagtatctgc

SEQ ID NO: 1181836 - DNA, 15 bp, Homo sapiens
ggcccaaagtatctg

SEQ ID NO: 1181837 - DNA, 15 bp, Homo sapiens
gggcccaaagtatct

SEQ ID NO: 1181838 - DNA, 15 bp, Homo sapiens
agggcccaaagtatc

SEQ ID NO: 1181839 - DNA, 15 bp, Homo sapiens
aagggcccaaagtat

SEQ ID NO: 1181840 - DNA, 15 bp, Homo sapiens
aaagggcccaaagta

SEQ ID NO: 1181841 - DNA, 15 bp, Homo sapiens
gaaagggcccaaagt

SEQ ID NO: 1181842 - DNA, 15 bp, Homo sapiens
agaaagggcccaaag

SEQ ID NO: 1181843 - DNA, 15 bp, Homo sapiens
aagaaagggcccaaa

SEQ ID NO: 1181844 - DNA, 15 bp, Homo sapiens
gaagaaagggcccaa

SEQ ID NO: 1181845 - DNA, 15 bp, Homo sapiens
tgaagaaagggccca

SEQ ID NO: 1181846 - DNA, 15 bp, Homo sapiens
gtgaagaaagggccc

SEQ ID NO: 1181847 - DNA, 15 bp, Homo sapiens
cgtgaagaaagggcc

SEQ ID NO: 1181848 - DNA, 15 bp, Homo sapiens
ccgtgaagaaagggc

SEQ ID NO: 1181849 - DNA, 15 bp, Homo sapiens
accgtgaagaaaggg

SEQ ID NO: 1181850 - DNA, 15 bp, Homo sapiens
gaccgtgaagaaagg

SEQ ID NO: 1181851 - DNA, 15 bp, Homo sapiens
ggaccgtgaagaaag

SEQ ID NO: 1181852 - DNA, 15 bp, Homo sapiens
aggaccgtgaagaaa

SEQ ID NO: 1181853 - DNA, 15 bp, Homo sapiens
gaggaccgtgaagaa

SEQ ID NO: 1181854 - DNA, 15 bp, Homo sapiens
tgaggaccgtgaaga

SEQ ID NO: 1181855 - DNA, 15 bp, Homo sapiens
atgaggaccgtgaag

SEQ ID NO: 1181856 - DNA, 15 bp, Homo sapiens
aatgaggaccgtgaa

SEQ ID NO: 1181857 - DNA, 15 bp, Homo sapiens
aaatgaggaccgtga

SEQ ID NO: 1181858 - DNA, 15 bp, Homo sapiens
caaatgaggaccgtg

SEQ ID NO: 1181859 - DNA, 15 bp, Homo sapiens
ccaaatgaggaccgt

SEQ ID NO: 1181860 - DNA, 15 bp, Homo sapiens
tccaaatgaggaccg

SEQ ID NO: 1181861 - DNA, 15 bp, Homo sapiens
ttccaaatgaggacc

SEQ ID NO: 1181862 - DNA, 15 bp, Homo sapiens
tttccaaatgaggac

SEQ ID NO: 1181863 - DNA, 15 bp, Homo sapiens
ctttccaaatgagga

SEQ ID NO: 1181864 - DNA, 15 bp, Homo sapiens
cctttccaaatgagg

SEQ ID NO: 1181865 - DNA, 15 bp, Homo sapiens
ccctttccaaatgag

SEQ ID NO: 1181866 - DNA, 15 bp, Homo sapiens
cccctttccaaatga

SEQ ID NO: 1181867 - DNA, 15 bp, Homo sapiens
acccctttccaaatg

SEQ ID NO: 1181868 - DNA, 15 bp, Homo sapiens
aacccctttccaaat

SEQ ID NO: 1181869 - DNA, 15 bp, Homo sapiens
aaacccctttccaaa

SEQ ID NO: 1181870 - DNA, 15 bp, Homo sapiens
caaacccctttccaa

SEQ ID NO: 1181871 - DNA, 15 bp, Homo sapiens
acaaacccctttcca

SEQ ID NO: 1181872 - DNA, 15 bp, Homo sapiens
cacaaacccctttcc

SEQ ID NO: 1181873 - DNA, 15 bp, Homo sapiens
acacaaacccctttc

SEQ ID NO: 1181874 - DNA, 15 bp, Homo sapiens
tacacaaaccccttt

SEQ ID NO: 1181875 - DNA, 15 bp, Homo sapiens
gtacacaaacccctt

SEQ ID NO: 1181876 - DNA, 15 bp, Homo sapiens
tgtacacaaacccct

SEQ ID NO: 1181877 - DNA, 15 bp, Homo sapiens
ttgtacacaaacccc

SEQ ID NO: 1181878 - DNA, 15 bp, Homo sapiens
gttgtacacaaaccc

SEQ ID NO: 1181879 - DNA, 15 bp, Homo sapiens
agttgtacacaaacc

SEQ ID NO: 1181880 - DNA, 15 bp, Homo sapiens
cagttgtacacaaac

SEQ ID NO: 1181881 - DNA, 15 bp, Homo sapiens
tcagttgtacacaaa

SEQ ID NO: 1181882 - DNA, 15 bp, Homo sapiens
ttcagttgtacacaa

SEQ ID NO: 1181883 - DNA, 15 bp, Homo sapiens
tttcagttgtacaca

SEQ ID NO: 1181884 - DNA, 15 bp, Homo sapiens
atttcagttgtacac

SEQ ID NO: 1181885 - DNA, 15 bp, Homo sapiens
gatttcagttgtaca

SEQ ID NO: 1181886 - DNA, 15 bp, Homo sapiens
tgatttcagttgtac

SEQ ID NO: 1181887 - DNA, 15 bp, Homo sapiens
gtgatttcagttgta

SEQ ID NO: 1181888 - DNA, 15 bp, Homo sapiens
tgtgatttcagttgt

SEQ ID NO: 1181889 - DNA, 15 bp, Homo sapiens
ctgtgatttcagttg

SEQ ID NO: 1181890 - DNA, 15 bp, Homo sapiens
cctgtgatttcagtt

SEQ ID NO: 1181891 - DNA, 15 bp, Homo sapiens
acctgtgatttcagt

SEQ ID NO: 1181892 - DNA, 15 bp, Homo sapiens
aacctgtgatttcag

SEQ ID NO: 1181893 - DNA, 15 bp, Homo sapiens
aaacctgtgatttca

SEQ ID NO: 1181894 - DNA, 15 bp, Homo sapiens
aaaacctgtgatttc

SEQ ID NO: 1181895 - DNA, 15 bp, Homo sapiens
aaaaacctgtgattt

SEQ ID NO: 1181896 - DNA, 15 bp, Homo sapiens
gaaaaacctgtgatt

SEQ ID NO: 1181897 - DNA, 15 bp, Homo sapiens
tgaaaaacctgtgat

SEQ ID NO: 1181898 - DNA, 15 bp, Homo sapiens
ttgaaaaacctgtga

SEQ ID NO: 1181899 - DNA, 15 bp, Homo sapiens
tttgaaaaacctgtg

SEQ ID NO: 1181900 - DNA, 15 bp, Homo sapiens
gtttgaaaaacctgt

SEQ ID NO: 1181901 - DNA, 15 bp, Homo sapiens
agtttgaaaaacctg

SEQ ID NO: 1181902 - DNA, 15 bp, Homo sapiens
cagtttgaaaaacct

SEQ ID NO: 1181903 - DNA, 15 bp, Homo sapiens
tcagtttgaaaaacc

SEQ ID NO: 1181904 - DNA, 15 bp, Homo sapiens
ctcagtttgaaaaac

SEQ ID NO: 1181905 - DNA, 15 bp, Homo sapiens
cctcagtttgaaaaa

SEQ ID NO: 1181906 - DNA, 15 bp, Homo sapiens
tcctcagtttgaaaa

SEQ ID NO: 1181907 - DNA, 15 bp, Homo sapiens
gtcctcagtttgaaa

SEQ ID NO: 1181908 - DNA, 15 bp, Homo sapiens
ggtcctcagtttgaa

SEQ ID NO: 1181909 - DNA, 15 bp, Homo sapiens
gggtcctcagtttga

SEQ ID NO: 1181910 - DNA, 15 bp, Homo sapiens
tgggtcctcagtttg

SEQ ID NO: 1181911 - DNA, 15 bp, Homo sapiens
ctgggtcctcagttt

SEQ ID NO: 1181912 - DNA, 15 bp, Homo sapiens
actgggtcctcagtt

SEQ ID NO: 1181913 - DNA, 15 bp, Homo sapiens
aactgggtcctcagt

SEQ ID NO: 1181914 - DNA, 15 bp, Homo sapiens
aaactgggtcctcag

SEQ ID NO: 1181915 - DNA, 15 bp, Homo sapiens
aaaactgggtcctca

SEQ ID NO: 1181916 - DNA, 15 bp, Homo sapiens
aaaaactgggtcctc

SEQ ID NO: 1181917 - DNA, 15 bp, Homo sapiens
aaaaaactgggtcct

SEQ ID NO: 1181918 - DNA, 15 bp, Homo sapiens
aaaaaaactgggtcc

SEQ ID NO: 1181919 - DNA, 15 bp, Homo sapiens
caaaaaaactgggtc

SEQ ID NO: 1181920 - DNA, 15 bp, Homo sapiens
ccaaaaaaactgggt

SEQ ID NO: 1181921 - DNA, 15 bp, Homo sapiens
tccaaaaaaactggg

SEQ ID NO: 1181922 - DNA, 15 bp, Homo sapiens
ttccaaaaaaactgg

SEQ ID NO: 1181923 - DNA, 15 bp, Homo sapiens
tttccaaaaaaactg

SEQ ID NO: 1181924 - DNA, 15 bp, Homo sapiens
atttccaaaaaaact

SEQ ID NO: 1181925 - DNA, 15 bp, Homo sapiens
catttccaaaaaaac

SEQ ID NO: 1181926 - DNA, 15 bp, Homo sapiens
gcatttccaaaaaaa

SEQ ID NO: 1181927 - DNA, 15 bp, Homo sapiens
agcatttccaaaaaa

SEQ ID NO: 1181928 - DNA, 15 bp, Homo sapiens
cagcatttccaaaaa

SEQ ID NO: 1181929 - DNA, 15 bp, Homo sapiens
acagcatttccaaaa

SEQ ID NO: 1181930 - DNA, 15 bp, Homo sapiens
tacagcatttccaaa

SEQ ID NO: 1181931 - DNA, 15 bp, Homo sapiens
gtacagcatttccaa

SEQ ID NO: 1181932 - DNA, 15 bp, Homo sapiens
tgtacagcatttcca

SEQ ID NO: 1181933 - DNA, 15 bp, Homo sapiens
ctgtacagcatttcc

SEQ ID NO: 1181934 - DNA, 15 bp, Homo sapiens
actgtacagcatttc

SEQ ID NO: 1181935 - DNA, 15 bp, Homo sapiens
aactgtacagcattt

SEQ ID NO: 1181936 - DNA, 15 bp, Homo sapiens
gaactgtacagcatt

SEQ ID NO: 1181937 - DNA, 15 bp, Homo sapiens
tgaactgtacagcat

SEQ ID NO: 1181938 - DNA, 15 bp, Homo sapiens
atgaactgtacagca

SEQ ID NO: 1181939 - DNA, 15 bp, Homo sapiens
aatgaactgtacagc

SEQ ID NO: 1181940 - DNA, 15 bp, Homo sapiens
aaatgaactgtacag

SEQ ID NO: 1181941 - DNA, 15 bp, Homo sapiens
gaaatgaactgtaca

SEQ ID NO: 1181942 - DNA, 15 bp, Homo sapiens
ggaaatgaactgtac

SEQ ID NO: 1181943 - DNA, 15 bp, Homo sapiens
aggaaatgaactgta

SEQ ID NO: 1181944 - DNA, 15 bp, Homo sapiens
caggaaatgaactgt

SEQ ID NO: 1181945 - DNA, 15 bp, Homo sapiens
tcaggaaatgaactg

SEQ ID NO: 1181946 - DNA, 15 bp, Homo sapiens
atcaggaaatgaact

SEQ ID NO: 1181947 - DNA, 15 bp, Homo sapiens
catcaggaaatgaac

SEQ ID NO: 1181948 - DNA, 15 bp, Homo sapiens
gcatcaggaaatgaa

SEQ ID NO: 1181949 - DNA, 15 bp, Homo sapiens
cgcatcaggaaatga

SEQ ID NO: 1181950 - DNA, 15 bp, Homo sapiens
tcgcatcaggaaatg

SEQ ID NO: 1181951 - DNA, 15 bp, Homo sapiens
atcgcatcaggaaat

SEQ ID NO: 1181952 - DNA, 15 bp, Homo sapiens
aatcgcatcaggaaa

SEQ ID NO: 1181953 - DNA, 15 bp, Homo sapiens
gaatcgcatcaggaa

SEQ ID NO: 1181954 - DNA, 15 bp, Homo sapiens
ggaatcgcatcagga

SEQ ID NO: 1181955 - DNA, 15 bp, Homo sapiens
tggaatcgcatcagg

SEQ ID NO: 1181956 - DNA, 15 bp, Homo sapiens
atggaatcgcatcag

SEQ ID NO: 1181957 - DNA, 15 bp, Homo sapiens
gatggaatcgcatca

SEQ ID NO: 1181958 - DNA, 15 bp, Homo sapiens
tgatggaatcgcatc

SEQ ID NO: 1181959 - DNA, 15 bp, Homo sapiens
atgatggaatcgcat

SEQ ID NO: 1181960 - DNA, 15 bp, Homo sapiens
gatgatggaatcgca

SEQ ID NO: 1181961 - DNA, 15 bp, Homo sapiens
ggatgatggaatcgc

SEQ ID NO: 1181962 - DNA, 15 bp, Homo sapiens
tggatgatggaatcg

SEQ ID NO: 1181963 - DNA, 15 bp, Homo sapiens
ttggatgatggaatc

SEQ ID NO: 1181964 - DNA, 15 bp, Homo sapiens
tttggatgatggaat

SEQ ID NO: 1181965 - DNA, 15 bp, Homo sapiens
gtttggatgatggaa

SEQ ID NO: 1181966 - DNA, 15 bp, Homo sapiens
tgtttggatgatgga

SEQ ID NO: 1181967 - DNA, 15 bp, Homo sapiens
ttgtttggatgatgg

SEQ ID NO: 1181968 - DNA, 15 bp, Homo sapiens
tttgtttggatgatg

SEQ ID NO: 1181969 - DNA, 15 bp, Homo sapiens
ttttgtttggatgat

SEQ ID NO: 1181970 - DNA, 15 bp, Homo sapiens
gttttgtttggatga

SEQ ID NO: 1181971 - DNA, 15 bp, Homo sapiens
tgttttgtttggatg

SEQ ID NO: 1181972 - DNA, 15 bp, Homo sapiens
ctgttttgtttggat

SEQ ID NO: 1181973 - DNA, 15 bp, Homo sapiens
gctgttttgtttgga

SEQ ID NO: 1181974 - DNA, 15 bp, Homo sapiens
agctgttttgtttgg

SEQ ID NO: 1181975 - DNA, 15 bp, Homo sapiens
gagctgttttgtttg

SEQ ID NO: 1181976 - DNA, 15 bp, Homo sapiens
ggagctgttttgttt

SEQ ID NO: 1181977 - DNA, 15 bp, Homo sapiens
aggagctgttttgtt

SEQ ID NO: 1181978 - DNA, 15 bp, Homo sapiens
caggagctgttttgt

SEQ ID NO: 1181979 - DNA, 15 bp, Homo sapiens
ccaggagctgttttg

SEQ ID NO: 1181980 - DNA, 15 bp, Homo sapiens
tccaggagctgtttt

SEQ ID NO: 1181981 - DNA, 15 bp, Homo sapiens
gtccaggagctgttt

SEQ ID NO: 1181982 - DNA, 15 bp, Homo sapiens
ggtccaggagctgtt

SEQ ID NO: 1181983 - DNA, 15 bp, Homo sapiens
gggtccaggagctgt

SEQ ID NO: 1181984 - DNA, 15 bp, Homo sapiens
cgggtccaggagctg

SEQ ID NO: 1181985 - DNA, 15 bp, Homo sapiens
ccgggtccaggagct

SEQ ID NO: 1181986 - DNA, 15 bp, Homo sapiens
tccgggtccaggagc

SEQ ID NO: 1181987 - DNA, 15 bp, Homo sapiens
ttccgggtccaggag

SEQ ID NO: 1181988 - DNA, 15 bp, Homo sapiens
cttccgggtccagga

SEQ ID NO: 1181989 - DNA, 15 bp, Homo sapiens
gcttccgggtccagg

SEQ ID NO: 1181990 - DNA, 15 bp, Homo sapiens
cgcttccgggtccag

SEQ ID NO: 1181991 - DNA, 15 bp, Homo sapiens
acgcttccgggtcca

SEQ ID NO: 1181992 - DNA, 15 bp, Homo sapiens
aacgcttccgggtcc

SEQ ID NO: 1181993 - DNA, 15 bp, Homo sapiens
caacgcttccgggtc

SEQ ID NO: 1181994 - DNA, 15 bp, Homo sapiens
gcaacgcttccgggt

SEQ ID NO: 1181995 - DNA, 15 bp, Homo sapiens
tgcaacgcttccggg

SEQ ID NO: 1181996 - DNA, 15 bp, Homo sapiens
atgcaacgcttccgg

SEQ ID NO: 1181997 - DNA, 15 bp, Homo sapiens
aatgcaacgcttccg

SEQ ID NO: 1181998 - DNA, 15 bp, Homo sapiens
caatgcaacgcttcc

SEQ ID NO: 1181999 - DNA, 15 bp, Homo sapiens
ccaatgcaacgcttc

SEQ ID NO: 1182000 - DNA, 15 bp, Homo sapiens
accaatgcaacgctt

SEQ ID NO: 1182001 - DNA, 15 bp, Homo sapiens
caccaatgcaacgct

SEQ ID NO: 1182002 - DNA, 15 bp, Homo sapiens
acaccaatgcaacgc

SEQ ID NO: 1182003 - DNA, 15 bp, Homo sapiens
aacaccaatgcaacg

SEQ ID NO: 1182004 - DNA, 15 bp, Homo sapiens
caacaccaatgcaac

SEQ ID NO: 1182005 - DNA, 15 bp, Homo sapiens
tcaacaccaatgcaa

SEQ ID NO: 1182006 - DNA, 15 bp, Homo sapiens
ttcaacaccaatgca

SEQ ID NO: 1182007 - DNA, 15 bp, Homo sapiens
cttcaacaccaatgc

SEQ ID NO: 1182008 - DNA, 15 bp, Homo sapiens
acttcaacaccaatg

SEQ ID NO: 1182009 - DNA, 15 bp, Homo sapiens
cacttcaacaccaat

SEQ ID NO: 1182010 - DNA, 15 bp, Homo sapiens
acacttcaacaccaa

SEQ ID NO: 1182011 - DNA, 15 bp, Homo sapiens
aacacttcaacacca

SEQ ID NO: 1182012 - DNA, 15 bp, Homo sapiens
gaacacttcaacacc

SEQ ID NO: 1182013 - DNA, 15 bp, Homo sapiens
ggaacacttcaacac

SEQ ID NO: 1182014 - DNA, 15 bp, Homo sapiens
tggaacacttcaaca

SEQ ID NO: 1182015 - DNA, 15 bp, Homo sapiens
atggaacacttcaac

SEQ ID NO: 1182016 - DNA, 15 bp, Homo sapiens
aatggaacacttcaa

SEQ ID NO: 1182017 - DNA, 15 bp, Homo sapiens
caatggaacacttca

SEQ ID NO: 1182018 - DNA, 15 bp, Homo sapiens
ccaatggaacacttc

SEQ ID NO: 1182019 - DNA, 15 bp, Homo sapiens
cccaatggaacactt

SEQ ID NO: 1182020 - DNA, 15 bp, Homo sapiens
ccccaatggaacact

SEQ ID NO: 1182021 - DNA, 15 bp, Homo sapiens
accccaatggaacac

SEQ ID NO: 1182022 - DNA, 15 bp, Homo sapiens
aaccccaatggaaca

SEQ ID NO: 1182023 - DNA, 15 bp, Homo sapiens
aaaccccaatggaac

SEQ ID NO: 1182024 - DNA, 15 bp, Homo sapiens
aaaaccccaatggaa

SEQ ID NO: 1182025 - DNA, 15 bp, Homo sapiens
gaaaaccccaatgga

SEQ ID NO: 1182026 - DNA, 15 bp, Homo sapiens
ggaaaaccccaatgg

SEQ ID NO: 1182027 - DNA, 15 bp, Homo sapiens
aggaaaaccccaatg

SEQ ID NO: 1182028 - DNA, 15 bp, Homo sapiens
aaggaaaaccccaat

SEQ ID NO: 1182029 - DNA, 15 bp, Homo sapiens
caaggaaaaccccaa

SEQ ID NO: 1182030 - DNA, 15 bp, Homo sapiens
tcaaggaaaacccca

SEQ ID NO: 1182031 - DNA, 15 bp, Homo sapiens
ttcaaggaaaacccc

SEQ ID NO: 1182032 - DNA, 15 bp, Homo sapiens
attcaaggaaaaccc

SEQ ID NO: 1182033 - DNA, 15 bp, Homo sapiens
tattcaaggaaaacc

SEQ ID NO: 1182034 - DNA, 15 bp, Homo sapiens
atattcaaggaaaac

SEQ ID NO: 1182035 - DNA, 15 bp, Homo sapiens
catattcaaggaaaa

SEQ ID NO: 1182036 - DNA, 15 bp, Homo sapiens
ccatattcaaggaaa

SEQ ID NO: 1182037 - DNA, 15 bp, Homo sapiens
tccatattcaaggaa

SEQ ID NO: 1182038 - DNA, 15 bp, Homo sapiens
ctccatattcaagga

SEQ ID NO: 1182039 - DNA, 15 bp, Homo sapiens
gctccatattcaagg

SEQ ID NO: 1182040 - DNA, 15 bp, Homo sapiens
ggctccatattcaag

SEQ ID NO: 1182041 - DNA, 15 bp, Homo sapiens
aggctccatattcaa

SEQ ID NO: 1182042 - DNA, 15 bp, Homo sapiens
aaggctccatattca

SEQ ID NO: 1182043 - DNA, 15 bp, Homo sapiens
caaggctccatattc

SEQ ID NO: 1182044 - DNA, 15 bp, Homo sapiens
gcaaggctccatatt

SEQ ID NO: 1182045 - DNA, 15 bp, Homo sapiens
ggcaaggctccatat

SEQ ID NO: 1182046 - DNA, 15 bp, Homo sapiens
gggcaaggctccata

SEQ ID NO: 1182047 - DNA, 15 bp, Homo sapiens
agggcaaggctccat

SEQ ID NO: 1182048 - DNA, 15 bp, Homo sapiens
cagggcaaggctcca

SEQ ID NO: 1182049 - DNA, 15 bp, Homo sapiens
gcagggcaaggctcc

SEQ ID NO: 1182050 - DNA, 15 bp, Homo sapiens
ggcagggcaaggctc

SEQ ID NO: 1182051 - DNA, 15 bp, Homo sapiens
tggcagggcaaggct

SEQ ID NO: 1182052 - DNA, 15 bp, Homo sapiens
ttggcagggcaaggc

SEQ ID NO: 1182053 - DNA, 15 bp, Homo sapiens
attggcagggcaagg

SEQ ID NO: 1182054 - DNA, 15 bp, Homo sapiens
gattggcagggcaag

SEQ ID NO: 1182055 - DNA, 15 bp, Homo sapiens
tgattggcagggcaa

SEQ ID NO: 1182056 - DNA, 15 bp, Homo sapiens
atgattggcagggca

SEQ ID NO: 1182057 - DNA, 15 bp, Homo sapiens
aatgattggcagggc

SEQ ID NO: 1182058 - DNA, 15 bp, Homo sapiens
aaatgattggcaggg

SEQ ID NO: 1182059 - DNA, 15 bp, Homo sapiens
gaaatgattggcagg

SEQ ID NO: 1182060 - DNA, 15 bp, Homo sapiens
agaaatgattggcag

SEQ ID NO: 1182061 - DNA, 15 bp, Homo sapiens
aagaaatgattggca

SEQ ID NO: 1182062 - DNA, 15 bp, Homo sapiens
gaagaaatgattggc

SEQ ID NO: 1182063 - DNA, 15 bp, Homo sapiens
agaagaaatgattgg

SEQ ID NO: 1182064 - DNA, 15 bp, Homo sapiens
gagaagaaatgattg

SEQ ID NO: 1182065 - DNA, 15 bp, Homo sapiens
tgagaagaaatgatt

SEQ ID NO: 1182066 - DNA, 15 bp, Homo sapiens
gtgagaagaaatgat

SEQ ID NO: 1182067 - DNA, 15 bp, Homo sapiens
ggtgagaagaaatga

SEQ ID NO: 1182068 - DNA, 15 bp, Homo sapiens
tggtgagaagaaatg

SEQ ID NO: 1182069 - DNA, 15 bp, Homo sapiens
ctggtgagaagaaat

SEQ ID NO: 1182070 - DNA, 15 bp, Homo sapiens
cctggtgagaagaaa

SEQ ID NO: 1182071 - DNA, 15 bp, Homo sapiens
ccctggtgagaagaa

SEQ ID NO: 1182072 - DNA, 15 bp, Homo sapiens
gccctggtgagaaga

SEQ ID NO: 1182073 - DNA, 15 bp, Homo sapiens
tgccctggtgagaag

SEQ ID NO: 1182074 - DNA, 15 bp, Homo sapiens
ttgccctggtgagaa

SEQ ID NO: 1182075 - DNA, 15 bp, Homo sapiens
attgccctggtgaga

SEQ ID NO: 1182076 - DNA, 15 bp, Homo sapiens
tattgccctggtgag

SEQ ID NO: 1182077 - DNA, 15 bp, Homo sapiens
gtattgccctggtga

SEQ ID NO: 1182078 - DNA, 15 bp, Homo sapiens
ggtattgccctggtg

SEQ ID NO: 1182079 - DNA, 15 bp, Homo sapiens
tggtattgccctggt

SEQ ID NO: 1182080 - DNA, 15 bp, Homo sapiens
gtggtattgccctgg

SEQ ID NO: 1182081 - DNA, 15 bp, Homo sapiens
agtggtattgccctg

SEQ ID NO: 1182082 - DNA, 15 bp, Homo sapiens
cagtggtattgccct

SEQ ID NO: 1182083 - DNA, 15 bp, Homo sapiens
acagtggtattgccc

SEQ ID NO: 1182084 - DNA, 15 bp, Homo sapiens
cacagtggtattgcc

SEQ ID NO: 1182085 - DNA, 15 bp, Homo sapiens
acacagtggtattgc

SEQ ID NO: 1182086 - DNA, 15 bp, Homo sapiens
cacacagtggtattg

SEQ ID NO: 1182087 - DNA, 15 bp, Homo sapiens
ccacacagtggtatt

SEQ ID NO: 1182088 - DNA, 15 bp, Homo sapiens
cccacacagtggtat

SEQ ID NO: 1182089 - DNA, 15 bp, Homo sapiens
gcccacacagtggta

SEQ ID NO: 1182090 - DNA, 15 bp, Homo sapiens
agcccacacagtggt

SEQ ID NO: 1182091 - DNA, 15 bp, Homo sapiens
cagcccacacagtgg

SEQ ID NO: 1182092 - DNA, 15 bp, Homo sapiens
ccagcccacacagtg

SEQ ID NO: 1182093 - DNA, 15 bp, Homo sapiens
cccagcccacacagt

SEQ ID NO: 1182094 - DNA, 15 bp, Homo sapiens
ccccagcccacacag

SEQ ID NO: 1182095 - DNA, 15 bp, Homo sapiens
tccccagcccacaca

SEQ ID NO: 1182096 - DNA, 15 bp, Homo sapiens
ttccccagcccacac

SEQ ID NO: 1182097 - DNA, 15 bp, Homo sapiens
tttccccagcccaca

SEQ ID NO: 1182098 - DNA, 15 bp, Homo sapiens
ctttccccagcccac

SEQ ID NO: 1182099 - DNA, 15 bp, Homo sapiens
gctttccccagccca

SEQ ID NO: 1182100 - DNA, 15 bp, Homo sapiens
ggctttccccagccc

SEQ ID NO: 1182101 - DNA, 15 bp, Homo sapiens
tggctttccccagcc

SEQ ID NO: 1182102 - DNA, 15 bp, Homo sapiens
ttggctttccccagc

SEQ ID NO: 1182103 - DNA, 15 bp, Homo sapiens
attggctttccccag

SEQ ID NO: 1182104 - DNA, 15 bp, Homo sapiens
cattggctttcccca

SEQ ID NO: 1182105 - DNA, 15 bp, Homo sapiens
tcattggctttcccc

SEQ ID NO: 1182106 - DNA, 15 bp, Homo sapiens
ctcattggctttccc

SEQ ID NO: 1182107 - DNA, 15 bp, Homo sapiens
actcattggctttcc

SEQ ID NO: 1182108 - DNA, 15 bp, Homo sapiens
aactcattggctttc

SEQ ID NO: 1182109 - DNA, 15 bp, Homo sapiens
aaactcattggcttt

SEQ ID NO: 1182110 - DNA, 15 bp, Homo sapiens
aaaactcattggctt

SEQ ID NO: 1182111 - DNA, 15 bp, Homo sapiens
caaaactcattggct

SEQ ID NO: 1182112 - DNA, 15 bp, Homo sapiens
tcaaaactcattggc

SEQ ID NO: 1182113 - DNA, 15 bp, Homo sapiens
atcaaaactcattgg

SEQ ID NO: 1182114 - DNA, 15 bp, Homo sapiens
tatcaaaactcattg

SEQ ID NO: 1182115 - DNA, 15 bp, Homo sapiens
atatcaaaactcatt

SEQ ID NO: 1182116 - DNA, 15 bp, Homo sapiens
catatcaaaactcat

SEQ ID NO: 1182117 - DNA, 15 bp, Homo sapiens
tcatatcaaaactca

SEQ ID NO: 1182118 - DNA, 15 bp, Homo sapiens
gtcatatcaaaactc

SEQ ID NO: 1182119 - DNA, 15 bp, Homo sapiens
ggtcatatcaaaact

SEQ ID NO: 1182120 - DNA, 15 bp, Homo sapiens
tggtcatatcaaaac

SEQ ID NO: 1182121 - DNA, 15 bp, Homo sapiens
gtggtcatatcaaaa

SEQ ID NO: 1182122 - DNA, 15 bp, Homo sapiens
ctgtggtcatatcaa

SEQ ID NO: 1182123 - DNA, 15 bp, Homo sapiens
cctgtggtcatatca

SEQ ID NO: 1182124 - DNA, 15 bp, Homo sapiens
acctgtggtcatatc

SEQ ID NO: 1182125 - DNA, 15 bp, Homo sapiens
cacctgtggtcatat

SEQ ID NO: 1182126 - DNA, 15 bp, Homo sapiens
acacctgtggtcata

SEQ ID NO: 1182127 - DNA, 15 bp, Homo sapiens
aacacctgtggtcat

SEQ ID NO: 1182128 - DNA, 15 bp, Homo sapiens
gaacacctgtggtca

SEQ ID NO: 1182129 - DNA, 15 bp, Homo sapiens
tgaacacctgtggtc

SEQ ID NO: 1182130 - DNA, 15 bp, Homo sapiens
atgaacacctgtggt

SEQ ID NO: 1182131 - DNA, 15 bp, Homo sapiens
catgaacacctgtgg

SEQ ID NO: 1182132 - DNA, 15 bp, Homo sapiens
tcatgaacacctgtg

SEQ ID NO: 1182133 - DNA, 15 bp, Homo sapiens
ttcatgaacacctgt

SEQ ID NO: 1182134 - DNA, 15 bp, Homo sapiens
tttcatgaacacctg

SEQ ID NO: 1182135 - DNA, 15 bp, Homo sapiens
atttcatgaacacct

SEQ ID NO: 1182136 - DNA, 15 bp, Homo sapiens
catttcatgaacacc

SEQ ID NO: 1182137 - DNA, 15 bp, Homo sapiens
ccatttcatgaacac

SEQ ID NO: 1182138 - DNA, 15 bp, Homo sapiens
gccatttcatgaaca

SEQ ID NO: 1182139 - DNA, 15 bp, Homo sapiens
tgccatttcatgaac

SEQ ID NO: 1182140 - DNA, 15 bp, Homo sapiens
ctgccatttcatgaa

SEQ ID NO: 1182141 - DNA, 15 bp, Homo sapiens
cctgccatttcatga

SEQ ID NO: 1182142 - DNA, 15 bp, Homo sapiens
tcctgccatttcatg

SEQ ID NO: 1182143 - DNA, 15 bp, Homo sapiens
ttcctgccatttcat

SEQ ID NO: 1182144 - DNA, 15 bp, Homo sapiens
attcctgccatttca

SEQ ID NO: 1182145 - DNA, 15 bp, Homo sapiens
aattcctgccatttc

SEQ ID NO: 1182146 - DNA, 15 bp, Homo sapiens
taattcctgccattt

SEQ ID NO: 1182147 - DNA, 15 bp, Homo sapiens
ttaattcctgccatt

SEQ ID NO: 1182148 - DNA, 15 bp, Homo sapiens
tttaattcctgccat

SEQ ID NO: 1182149 - DNA, 15 bp, Homo sapiens
ttttaattcctgcca

SEQ ID NO: 1182150 - DNA, 15 bp, Homo sapiens
attttaattcctgcc

SEQ ID NO: 1182151 - DNA, 15 bp, Homo sapiens
tattttaattcctgc

SEQ ID NO: 1182152 - DNA, 15 bp, Homo sapiens
ctattttaattcctg

SEQ ID NO: 1182153 - DNA, 15 bp, Homo sapiens
cctattttaattcct

SEQ ID NO: 1182154 - DNA, 15 bp, Homo sapiens
tcctattttaattcc

SEQ ID NO: 1182155 - DNA, 15 bp, Homo sapiens
ttcctattttaattc

SEQ ID NO: 1182156 - DNA, 15 bp, Homo sapiens
attcctattttaatt

SEQ ID NO: 1182157 - DNA, 15 bp, Homo sapiens
aattcctattttaat

SEQ ID NO: 1182158 - DNA, 15 bp, Homo sapiens
aaattcctattttaa

SEQ ID NO: 1182159 - DNA, 15 bp, Homo sapiens
caaattcctatttta

SEQ ID NO: 1182160 - DNA, 15 bp, Homo sapiens
tcaaattcctatttt

SEQ ID NO: 1182161 - DNA, 15 bp, Homo sapiens
ttcaaattcctattt

SEQ ID NO: 1182162 - DNA, 15 bp, Homo sapiens
attcaaattcctatt

SEQ ID NO: 1182163 - DNA, 15 bp, Homo sapiens
cattcaaattcctat

SEQ ID NO: 1182164 - DNA, 15 bp, Homo sapiens
tcattcaaattccta

SEQ ID NO: 1182165 - DNA, 15 bp, Homo sapiens
atcattcaaattcct

SEQ ID NO: 1182166 - DNA, 15 bp, Homo sapiens
tatcattcaaattcc

SEQ ID NO: 1182167 - DNA, 15 bp, Homo sapiens
ttatcattcaaattc

SEQ ID NO: 1182168 - DNA, 15 bp, Homo sapiens
tttatcattcaaatt

SEQ ID NO: 1182169 - DNA, 15 bp, Homo sapiens
gtttatcattcaaat

SEQ ID NO: 1182170 - DNA, 15 bp, Homo sapiens
agtttatcattcaaa

SEQ ID NO: 1182171 - DNA, 15 bp, Homo sapiens
gagtttatcattcaa

SEQ ID NO: 1182172 - DNA, 15 bp, Homo sapiens
tgagtttatcattca

SEQ ID NO: 1182173 - DNA, 15 bp, Homo sapiens
ttgagtttatcattc

SEQ ID NO: 1182174 - DNA, 15 bp, Homo sapiens
tttgagtttatcatt

SEQ ID NO: 1182175 - DNA, 15 bp, Homo sapiens
ttttgagtttatcat

SEQ ID NO: 1182176 - DNA, 15 bp, Homo sapiens
cttttgagtttatca

SEQ ID NO: 1182177 - DNA, 15 bp, Homo sapiens
acttttgagtttatc

SEQ ID NO: 1182178 - DNA, 15 bp, Homo sapiens
cacttttgagtttat

SEQ ID NO: 1182179 - DNA, 15 bp, Homo sapiens
acacttttgagttta

SEQ ID NO: 1182180 - DNA, 15 bp, Homo sapiens
tacacttttgagttt

SEQ ID NO: 1182181 - DNA, 15 bp, Homo sapiens
atacacttttgagtt

SEQ ID NO: 1182182 - DNA, 15 bp, Homo sapiens
tatacacttttgagt

SEQ ID NO: 1182183 - DNA, 15 bp, Homo sapiens
atatacacttttgag

SEQ ID NO: 1182184 - DNA, 15 bp, Homo sapiens
catatacacttttga

SEQ ID NO: 1182185 - DNA, 15 bp, Homo sapiens
acatatacacttttg

SEQ ID NO: 1182186 - DNA, 15 bp, Homo sapiens
aacatatacactttt

SEQ ID NO: 1182187 - DNA, 15 bp, Homo sapiens
caacatatacacttt

SEQ ID NO: 1182188 - DNA, 15 bp, Homo sapiens
acaacatatacactt

SEQ ID NO: 1182189 - DNA, 15 bp, Homo sapiens
cacaacatatacact

SEQ ID NO: 1182190 - DNA, 15 bp, Homo sapiens
ccacaacatatacac

SEQ ID NO: 1182191 - DNA, 15 bp, Homo sapiens
cccacaacatataca

SEQ ID NO: 1182192 - DNA, 15 bp, Homo sapiens
ccccacaacatatac

SEQ ID NO: 1182193 - DNA, 15 bp, Homo sapiens
tccccacaacatata

SEQ ID NO: 1182194 - DNA, 15 bp, Homo sapiens
ttccccacaacatat

SEQ ID NO: 1182195 - DNA, 15 bp, Homo sapiens
cttccccacaacata

SEQ ID NO: 1182196 - DNA, 15 bp, Homo sapiens
ccttccccacaacat

SEQ ID NO: 1182197 - DNA, 15 bp, Homo sapiens
cccttccccacaaca

SEQ ID NO: 1182198 - DNA, 15 bp, Homo sapiens
actcccttccccaca

SEQ ID NO: 1182199 - DNA, 15 bp, Homo sapiens
tactcccttccccac

SEQ ID NO: 1182200 - DNA, 15 bp, Homo sapiens
atactcccttcccca

SEQ ID NO: 1182201 - DNA, 15 bp, Homo sapiens
gatactcccttcccc

SEQ ID NO: 1182202 - DNA, 15 bp, Homo sapiens
tgatactcccttccc

SEQ ID NO: 1182203 - DNA, 15 bp, Homo sapiens
ttgatactcccttcc

SEQ ID NO: 1182204 - DNA, 15 bp, Homo sapiens
tttgatactcccttc

SEQ ID NO: 1182205 - DNA, 15 bp, Homo sapiens
ttttgatactccctt

SEQ ID NO: 1182206 - DNA, 15 bp, Homo sapiens
gttttgatactccct

SEQ ID NO: 1182207 - DNA, 15 bp, Homo sapiens
tgttttgatactccc

SEQ ID NO: 1182208 - DNA, 15 bp, Homo sapiens
ctgttttgatactcc

SEQ ID NO: 1182209 - DNA, 15 bp, Homo sapiens
tctgttttgatactc

SEQ ID NO: 1182210 - DNA, 15 bp, Homo sapiens
ctctgttttgatact

SEQ ID NO: 1182211 - DNA, 15 bp, Homo sapiens
actctgttttgatac

SEQ ID NO: 1182212 - DNA, 15 bp, Homo sapiens
tactctgttttgata

SEQ ID NO: 1182213 - DNA, 15 bp, Homo sapiens
ctactctgttttgat

SEQ ID NO: 1182214 - DNA, 15 bp, Homo sapiens
actactctgttttga

SEQ ID NO: 1182215 - DNA, 15 bp, Homo sapiens
gactactctgttttg

SEQ ID NO: 1182216 - DNA, 15 bp, Homo sapiens
tgactactctgtttt

SEQ ID NO: 1182217 - DNA, 15 bp, Homo sapiens
ctgactactctgttt

SEQ ID NO: 1182218 - DNA, 15 bp, Homo sapiens
actgactactctgtt

SEQ ID NO: 1182219 - DNA, 15 bp, Homo sapiens
gactgactactctgt

SEQ ID NO: 1182220 - DNA, 15 bp, Homo sapiens
ggactgactactctg

SEQ ID NO: 1182221 - DNA, 15 bp, Homo sapiens
aggactgactactct

SEQ ID NO: 1182222 - DNA, 15 bp, Homo sapiens
gaggactgactactc

SEQ ID NO: 1182223 - DNA, 15 bp, Homo sapiens
agaggactgactact

SEQ ID NO: 1182224 - DNA, 15 bp, Homo sapiens
cagaggactgactac

SEQ ID NO: 1182225 - DNA, 15 bp, Homo sapiens
gcagaggactgacta

SEQ ID NO: 1182226 - DNA, 15 bp, Homo sapiens
ggcagaggactgact

SEQ ID NO: 1182227 - DNA, 15 bp, Homo sapiens
tggcagaggactgac

SEQ ID NO: 1182228 - DNA, 15 bp, Homo sapiens
ctggcagaggactga

SEQ ID NO: 1182229 - DNA, 15 bp, Homo sapiens
cctggcagaggactg

SEQ ID NO: 1182230 - DNA, 15 bp, Homo sapiens
acctggcagaggact

SEQ ID NO: 1182231 - DNA, 15 bp, Homo sapiens
aacctggcagaggac

SEQ ID NO: 1182232 - DNA, 15 bp, Homo sapiens
aaacctggcagagga

SEQ ID NO: 1182233 - DNA, 15 bp, Homo sapiens
caaacctggcagagg

SEQ ID NO: 1182234 - DNA, 15 bp, Homo sapiens
ccaaacctggcagag

SEQ ID NO: 1182235 - DNA, 15 bp, Homo sapiens
accaaacctggcaga

SEQ ID NO: 1182236 - DNA, 15 bp, Homo sapiens
gaccaaacctggcag

SEQ ID NO: 1182237 - DNA, 15 bp, Homo sapiens
tgaccaaacctggca

SEQ ID NO: 1182238 - DNA, 15 bp, Homo sapiens
atgaccaaacctggc

SEQ ID NO: 1182239 - DNA, 15 bp, Homo sapiens
aatgaccaaacctgg

SEQ ID NO: 1182240 - DNA, 15 bp, Homo sapiens
aaatgaccaaacctg

SEQ ID NO: 1182241 - DNA, 15 bp, Homo sapiens
aaaatgaccaaacct

SEQ ID NO: 1182242 - DNA, 15 bp, Homo sapiens
gaaaatgaccaaacc

SEQ ID NO: 1182243 - DNA, 15 bp, Homo sapiens
ggaaaatgaccaaac

SEQ ID NO: 1182244 - DNA, 15 bp, Homo sapiens
gggaaaatgaccaaa

SEQ ID NO: 1182245 - DNA, 15 bp, Homo sapiens
ggggaaaatgaccaa

SEQ ID NO: 1182246 - DNA, 15 bp, Homo sapiens
tggggaaaatgacca

SEQ ID NO: 1182247 - DNA, 15 bp, Homo sapiens
atggggaaaatgacc

SEQ ID NO: 1182248 - DNA, 15 bp, Homo sapiens
gatggggaaaatgac

SEQ ID NO: 1182249 - DNA, 15 bp, Homo sapiens
tgatggggaaaatga

SEQ ID NO: 1182250 - DNA, 15 bp, Homo sapiens
gtgatggggaaaatg

SEQ ID NO: 1182251 - DNA, 15 bp, Homo sapiens
ggtgatggggaaaat

SEQ ID NO: 1182252 - DNA, 15 bp, Homo sapiens
aggtgatggggaaaa

SEQ ID NO: 1182253 - DNA, 15 bp, Homo sapiens
caggtgatggggaaa

SEQ ID NO: 1182254 - DNA, 15 bp, Homo sapiens
ccaggtgatggggaa

SEQ ID NO: 1182255 - DNA, 15 bp, Homo sapiens
cccaggtgatgggga

SEQ ID NO: 1182256 - DNA, 15 bp, Homo sapiens
ccccaggtgatgggg

SEQ ID NO: 1182257 - DNA, 15 bp, Homo sapiens
tccccaggtgatggg

SEQ ID NO: 1182258 - DNA, 15 bp, Homo sapiens
ttccccaggtgatgg

SEQ ID NO: 1182259 - DNA, 15 bp, Homo sapiens
tttccccaggtgatg

SEQ ID NO: 1182260 - DNA, 15 bp, Homo sapiens
gtttccccaggtgat

SEQ ID NO: 1182261 - DNA, 15 bp, Homo sapiens
ggtttccccaggtga

SEQ ID NO: 1182262 - DNA, 15 bp, Homo sapiens
aggtttccccaggtg

SEQ ID NO: 1182263 - DNA, 15 bp, Homo sapiens
gaggtttccccaggt

SEQ ID NO: 1182264 - DNA, 15 bp, Homo sapiens
cgaggtttccccagg

SEQ ID NO: 1182265 - DNA, 15 bp, Homo sapiens
gcgaggtttccccag

SEQ ID NO: 1182266 - DNA, 15 bp, Homo sapiens
ggcgaggtttcccca

SEQ ID NO: 1182267 - DNA, 15 bp, Homo sapiens
tggcgaggtttcccc

SEQ ID NO: 1182268 - DNA, 15 bp, Homo sapiens
gtggcgaggtttccc

SEQ ID NO: 1182269 - DNA, 15 bp, Homo sapiens
agtggcgaggtttcc

SEQ ID NO: 1182270 - DNA, 15 bp, Homo sapiens
gagtggcgaggtttc

SEQ ID NO: 1182271 - DNA, 15 bp, Homo sapiens
tgagtggcgaggttt

SEQ ID NO: 1182272 - DNA, 15 bp, Homo sapiens
atgagtggcgaggtt

SEQ ID NO: 1182273 - DNA, 15 bp, Homo sapiens
catgagtggcgaggt

SEQ ID NO: 1182274 - DNA, 15 bp, Homo sapiens
gcatgagtggcgagg

SEQ ID NO: 1182275 - DNA, 15 bp, Homo sapiens
tgcatgagtggcgag

SEQ ID NO: 1182276 - DNA, 15 bp, Homo sapiens
ctgcatgagtggcga

SEQ ID NO: 1182277 - DNA, 15 bp, Homo sapiens
gctgcatgagtggcg

SEQ ID NO: 1182278 - DNA, 15 bp, Homo sapiens
agctgcatgagtggc

SEQ ID NO: 1182279 - DNA, 15 bp, Homo sapiens
cagctgcatgagtgg

SEQ ID NO: 1182280 - DNA, 15 bp, Homo sapiens
ccagctgcatgagtg

SEQ ID NO: 1182281 - DNA, 15 bp, Homo sapiens
tccagctgcatgagt

SEQ ID NO: 1182282 - DNA, 15 bp, Homo sapiens
ctccagctgcatgag

SEQ ID NO: 1182283 - DNA, 15 bp, Homo sapiens
tctccagctgcatga

SEQ ID NO: 1182284 - DNA, 15 bp, Homo sapiens
ctctccagctgcatg

SEQ ID NO: 1182285 - DNA, 15 bp, Homo sapiens
cctctccagctgcat

SEQ ID NO: 1182286 - DNA, 15 bp, Homo sapiens
tcctctccagctgca

SEQ ID NO: 1182287 - DNA, 15 bp, Homo sapiens
gtcctctccagctgc

SEQ ID NO: 1182288 - DNA, 15 bp, Homo sapiens
tgtcctctccagctg

SEQ ID NO: 1182289 - DNA, 15 bp, Homo sapiens
ttgtcctctccagct

SEQ ID NO: 1182290 - DNA, 15 bp, Homo sapiens
tttgtcctctccagc

SEQ ID NO: 1182291 - DNA, 15 bp, Homo sapiens
gtttgtcctctccag

SEQ ID NO: 1182292 - DNA, 15 bp, Homo sapiens
agtttgtcctctcca

SEQ ID NO: 1182293 - DNA, 15 bp, Homo sapiens
cagtttgtcctctcc

SEQ ID NO: 1182294 - DNA, 15 bp, Homo sapiens
gcagtttgtcctctc

SEQ ID NO: 1182295 - DNA, 15 bp, Homo sapiens
tgcagtttgtcctct

SEQ ID NO: 1182296 - DNA, 15 bp, Homo sapiens
atgcagtttgtcctc

SEQ ID NO: 1182297 - DNA, 15 bp, Homo sapiens
gatgcagtttgtcct

SEQ ID NO: 1182298 - DNA, 15 bp, Homo sapiens
agatgcagtttgtcc

SEQ ID NO: 1182299 - DNA, 15 bp, Homo sapiens
cagatgcagtttgtc

SEQ ID NO: 1182300 - DNA, 15 bp, Homo sapiens
ccagatgcagtttgt

SEQ ID NO: 1182301 - DNA, 15 bp, Homo sapiens
tccagatgcagtttg

SEQ ID NO: 1182302 - DNA, 15 bp, Homo sapiens
atccagatgcagttt

SEQ ID NO: 1182303 - DNA, 15 bp, Homo sapiens
gatccagatgcagtt

SEQ ID NO: 1182304 - DNA, 15 bp, Homo sapiens
ggatccagatgcagt

SEQ ID NO: 1182305 - DNA, 15 bp, Homo sapiens
aggatccagatgcag

SEQ ID NO: 1182306 - DNA, 15 bp, Homo sapiens
aaggatccagatgca

SEQ ID NO: 1182307 - DNA, 15 bp, Homo sapiens
aaaggatccagatgc

SEQ ID NO: 1182308 - DNA, 15 bp, Homo sapiens
gaaaggatccagatg

SEQ ID NO: 1182309 - DNA, 15 bp, Homo sapiens
agaaaggatccagat

SEQ ID NO: 1182310 - DNA, 15 bp, Homo sapiens
aagaaaggatccaga

SEQ ID NO: 1182311 - DNA, 15 bp, Homo sapiens
aaagaaaggatccag

SEQ ID NO: 1182312 - DNA, 15 bp, Homo sapiens
caaagaaaggatcca

SEQ ID NO: 1182313 - DNA, 15 bp, Homo sapiens
gcaaagaaaggatcc

SEQ ID NO: 1182314 - DNA, 15 bp, Homo sapiens
tgcaaagaaaggatc

SEQ ID NO: 1182315 - DNA, 15 bp, Homo sapiens
gtgcaaagaaaggat

SEQ ID NO: 1182316 - DNA, 15 bp, Homo sapiens
agtgcaaagaaagga

SEQ ID NO: 1182317 - DNA, 15 bp, Homo sapiens
cagtgcaaagaaagg

SEQ ID NO: 1182318 - DNA, 15 bp, Homo sapiens
acagtgcaaagaaag

SEQ ID NO: 1182319 - DNA, 15 bp, Homo sapiens
cacagtgcaaagaaa

SEQ ID NO: 1182320 - DNA, 15 bp, Homo sapiens
ccacagtgcaaagaa

SEQ ID NO: 1182321 - DNA, 15 bp, Homo sapiens
accacagtgcaaaga

SEQ ID NO: 1182322 - DNA, 15 bp, Homo sapiens
taccacagtgcaaag

SEQ ID NO: 1182323 - DNA, 15 bp, Homo sapiens
ctaccacagtgcaaa

SEQ ID NO: 1182324 - DNA, 15 bp, Homo sapiens
tctaccacagtgcaa

SEQ ID NO: 1182325 - DNA, 15 bp, Homo sapiens
gtctaccacagtgca

SEQ ID NO: 1182326 - DNA, 15 bp, Homo sapiens
ggtctaccacagtgc

SEQ ID NO: 1182327 - DNA, 15 bp, Homo sapiens
tggtctaccacagtg

SEQ ID NO: 1182328 - DNA, 15 bp, Homo sapiens
ctggtctaccacagt

SEQ ID NO: 1182329 - DNA, 15 bp, Homo sapiens
cctggtctaccacag

SEQ ID NO: 1182330 - DNA, 15 bp, Homo sapiens
tcctggtctaccaca

SEQ ID NO: 1182331 - DNA, 15 bp, Homo sapiens
gtcctggtctaccac

SEQ ID NO: 1182332 - DNA, 15 bp, Homo sapiens
cgtcctggtctacca

SEQ ID NO: 1182333 - DNA, 15 bp, Homo sapiens
ccgtcctggtctacc

SEQ ID NO: 1182334 - DNA, 15 bp, Homo sapiens
gccgtcctggtctac

SEQ ID NO: 1182335 - DNA, 15 bp, Homo sapiens
ggccgtcctggtcta

SEQ ID NO: 1182336 - DNA, 15 bp, Homo sapiens
aggccgtcctggtct

SEQ ID NO: 1182337 - DNA, 15 bp, Homo sapiens
caggccgtcctggtc

SEQ ID NO: 1182338 - DNA, 15 bp, Homo sapiens
acaggccgtcctggt

SEQ ID NO: 1182339 - DNA, 15 bp, Homo sapiens
aacaggccgtcctgg

SEQ ID NO: 1182340 - DNA, 15 bp, Homo sapiens
gaacaggccgtcctg

SEQ ID NO: 1182341 - DNA, 15 bp, Homo sapiens
agaacaggccgtcct

SEQ ID NO: 1182342 - DNA, 15 bp, Homo sapiens
aagaacaggccgtcc

SEQ ID NO: 1182343 - DNA, 15 bp, Homo sapiens
gaagaacaggccgtc

SEQ ID NO: 1182344 - DNA, 15 bp, Homo sapiens
tgaagaacaggccgt

SEQ ID NO: 1182345 - DNA, 15 bp, Homo sapiens
ttgaagaacaggccg

SEQ ID NO: 1182346 - DNA, 15 bp, Homo sapiens
tttgaagaacaggcc

SEQ ID NO: 1182347 - DNA, 15 bp, Homo sapiens
atttgaagaacaggc

SEQ ID NO: 1182348 - DNA, 15 bp, Homo sapiens
catttgaagaacagg

SEQ ID NO: 1182349 - DNA, 15 bp, Homo sapiens
ccatttgaagaacag

SEQ ID NO: 1182350 - DNA, 15 bp, Homo sapiens
accatttgaagaaca

SEQ ID NO: 1182351 - DNA, 15 bp, Homo sapiens
caccatttgaagaac

SEQ ID NO: 1182352 - DNA, 15 bp, Homo sapiens
gcaccatttgaagaa

SEQ ID NO: 1182353 - DNA, 15 bp, Homo sapiens
agcaccatttgaaga

SEQ ID NO: 1182354 - DNA, 15 bp, Homo sapiens
aagcaccatttgaag

SEQ ID NO: 1182355 - DNA, 15 bp, Homo sapiens
caagcaccatttgaa

SEQ ID NO: 1182356 - DNA, 15 bp, Homo sapiens
ccaagcaccatttga

SEQ ID NO: 1182357 - DNA, 15 bp, Homo sapiens
accaagcaccatttg

SEQ ID NO: 1182358 - DNA, 15 bp, Homo sapiens
gaccaagcaccattt

SEQ ID NO: 1182359 - DNA, 15 bp, Homo sapiens
tgaccaagcaccatt

SEQ ID NO: 1182360 - DNA, 15 bp, Homo sapiens
gtgaccaagcaccat

SEQ ID NO: 1182361 - DNA, 15 bp, Homo sapiens
agtgaccaagcacca

SEQ ID NO: 1182362 - DNA, 15 bp, Homo sapiens
tagtgaccaagcacc

SEQ ID NO: 1182363 - DNA, 15 bp, Homo sapiens
ctagtgaccaagcac

SEQ ID NO: 1182364 - DNA, 15 bp, Homo sapiens
tctagtgaccaagca

SEQ ID NO: 1182365 - DNA, 15 bp, Homo sapiens
ttctagtgaccaagc

SEQ ID NO: 1182366 - DNA, 15 bp, Homo sapiens
cttctagtgaccaag

SEQ ID NO: 1182367 - DNA, 15 bp, Homo sapiens
ccttctagtgaccaa

SEQ ID NO: 1182368 - DNA, 15 bp, Homo sapiens
gccttctagtgacca

SEQ ID NO: 1182369 - DNA, 15 bp, Homo sapiens
tgccttctagtgacc

SEQ ID NO: 1182370 - DNA, 15 bp, Homo sapiens
ttgccttctagtgac

SEQ ID NO: 1182371 - DNA, 15 bp, Homo sapiens
tttgccttctagtga

SEQ ID NO: 1182372 - DNA, 15 bp, Homo sapiens
atttgccttctagtg

SEQ ID NO: 1182373 - DNA, 15 bp, Homo sapiens
tatttgccttctagt

SEQ ID NO: 1182374 - DNA, 15 bp, Homo sapiens
ttatttgccttctag

SEQ ID NO: 1182375 - DNA, 15 bp, Homo sapiens
cttatttgccttcta

SEQ ID NO: 1182376 - DNA, 15 bp, Homo sapiens
tcttatttgccttct

SEQ ID NO: 1182377 - DNA, 15 bp, Homo sapiens
ctcttatttgccttc

SEQ ID NO: 1182378 - DNA, 15 bp, Homo sapiens
tctcttatttgcctt

SEQ ID NO: 1182379 - DNA, 15 bp, Homo sapiens
ctctcttatttgcct

SEQ ID NO: 1182380 - DNA, 15 bp, Homo sapiens
tctctcttatttgcc

SEQ ID NO: 1182381 - DNA, 15 bp, Homo sapiens
atctctcttatttgc

SEQ ID NO: 1182382 - DNA, 15 bp, Homo sapiens
catctctcttatttg

SEQ ID NO: 1182383 - DNA, 15 bp, Homo sapiens
acatctctcttattt

SEQ ID NO: 1182384 - DNA, 15 bp, Homo sapiens
aacatctctcttatt

SEQ ID NO: 1182385 - DNA, 15 bp, Homo sapiens
aaacatctctcttat

SEQ ID NO: 1182386 - DNA, 15 bp, Homo sapiens
aaaacatctctctta

SEQ ID NO: 1182387 - DNA, 15 bp, Homo sapiens
aaaaacatctctctt

SEQ ID NO: 1182388 - DNA, 15 bp, Homo sapiens
taaaaacatctctct

SEQ ID NO: 1182389 - DNA, 15 bp, Homo sapiens
ttaaaaacatctctc

SEQ ID NO: 1182390 - DNA, 15 bp, Homo sapiens
gttaaaaacatctct

SEQ ID NO: 1182391 - DNA, 15 bp, Homo sapiens
tgttaaaaacatctc

SEQ ID NO: 1182392 - DNA, 15 bp, Homo sapiens
ctgttaaaaacatct

SEQ ID NO: 1182393 - DNA, 15 bp, Homo sapiens
gctgttaaaaacatc

SEQ ID NO: 1182394 - DNA, 15 bp, Homo sapiens
agctgttaaaaacat

SEQ ID NO: 1182395 - DNA, 15 bp, Homo sapiens
gagctgttaaaaaca

SEQ ID NO: 1182396 - DNA, 15 bp, Homo sapiens
agagctgttaaaaac

SEQ ID NO: 1182397 - DNA, 15 bp, Homo sapiens
aagagctgttaaaaa

SEQ ID NO: 1182398 - DNA, 15 bp, Homo sapiens
caagagctgttaaaa

SEQ ID NO: 1182399 - DNA, 15 bp, Homo sapiens
acaagagctgttaaa

SEQ ID NO: 1182400 - DNA, 15 bp, Homo sapiens
gacaagagctgttaa

SEQ ID NO: 1182401 - DNA, 15 bp, Homo sapiens
tgacaagagctgtta

SEQ ID NO: 1182402 - DNA, 15 bp, Homo sapiens
gtgacaagagctgtt

SEQ ID NO: 1182403 - DNA, 15 bp, Homo sapiens
agtgacaagagctgt

SEQ ID NO: 1182404 - DNA, 15 bp, Homo sapiens
aagtgacaagagctg

SEQ ID NO: 1182405 - DNA, 15 bp, Homo sapiens
aaagtgacaagagct

SEQ ID NO: 1182406 - DNA, 15 bp, Homo sapiens
aaaagtgacaagagc

SEQ ID NO: 1182407 - DNA, 15 bp, Homo sapiens
aaaaagtgacaagag

SEQ ID NO: 1182408 - DNA, 15 bp, Homo sapiens
aaaaaagtgacaaga

SEQ ID NO: 1182409 - DNA, 15 bp, Homo sapiens
aaaaaaagtgacaag

SEQ ID NO: 1182410 - DNA, 15 bp, Homo sapiens
aaaaaaaagtgacaa

SEQ ID NO: 1182411 - DNA, 15 bp, Homo sapiens
aaaaaaaaagtgaca

SEQ ID NO: 1182412 - DNA, 15 bp, Homo sapiens
aaaaaaaaaagtgac

SEQ ID NO: 1182413 - DNA, 15 bp, Homo sapiens
caacctgggaggtgg

SEQ ID NO: 1182414 - DNA, 15 bp, Homo sapiens
tcaacctgggaggtg

SEQ ID NO: 1182415 - DNA, 15 bp, Homo sapiens
ttcaacctgggaggt

SEQ ID NO: 1182416 - DNA, 15 bp, Homo sapiens
cttcaacctgggagg

SEQ ID NO: 1182417 - DNA, 15 bp, Homo sapiens
gcttcaacctgggag

SEQ ID NO: 1182418 - DNA, 15 bp, Homo sapiens
cgcttcaacctggga

SEQ ID NO: 1182419 - DNA, 15 bp, Homo sapiens
tcgcttcaacctggg

SEQ ID NO: 1182420 - DNA, 15 bp, Homo sapiens
atcgcttcaacctgg

SEQ ID NO: 1182421 - DNA, 15 bp, Homo sapiens
aatcgcttcaacctg

SEQ ID NO: 1182422 - DNA, 15 bp, Homo sapiens
gaatcgcttcaacct

SEQ ID NO: 1182423 - DNA, 15 bp, Homo sapiens
agaatcgcttcaacc

SEQ ID NO: 1182424 - DNA, 15 bp, Homo sapiens
gagaatcgcttcaac

SEQ ID NO: 1182425 - DNA, 15 bp, Homo sapiens
ggagaatcgcttcaa

SEQ ID NO: 1182426 - DNA, 15 bp, Homo sapiens
aggagaatcgcttca

SEQ ID NO: 1182427 - DNA, 15 bp, Homo sapiens
caggagaatcgcttc

SEQ ID NO: 1182428 - DNA, 15 bp, Homo sapiens
ccgggtgtggtggca

SEQ ID NO: 1182429 - DNA, 15 bp, Homo sapiens
aacaaaaattagccg

SEQ ID NO: 1182430 - DNA, 15 bp, Homo sapiens
gaacaaaaattagcc

SEQ ID NO: 1182431 - DNA, 15 bp, Homo sapiens
agaacaaaaattagc

SEQ ID NO: 1182432 - DNA, 15 bp, Homo sapiens
aagaacaaaaattag

SEQ ID NO: 1182433 - DNA, 15 bp, Homo sapiens
aaagaacaaaaatta

SEQ ID NO: 1182434 - DNA, 15 bp, Homo sapiens
aaaagaacaaaaatt

SEQ ID NO: 1182435 - DNA, 15 bp, Homo sapiens
taaaagaacaaaaat

SEQ ID NO: 1182436 - DNA, 15 bp, Homo sapiens
ctaaaagaacaaaaa

SEQ ID NO: 1182437 - DNA, 15 bp, Homo sapiens
actaaaagaacaaaa

SEQ ID NO: 1182438 - DNA, 15 bp, Homo sapiens
tactaaaagaacaaa

SEQ ID NO: 1182439 - DNA, 15 bp, Homo sapiens
ctactaaaagaacaa

SEQ ID NO: 1182440 - DNA, 15 bp, Homo sapiens
tctactaaaagaaca

SEQ ID NO: 1182441 - DNA, 15 bp, Homo sapiens
ctctactaaaagaac

SEQ ID NO: 1182442 - DNA, 15 bp, Homo sapiens
tctctactaaaagaa

SEQ ID NO: 1182443 - DNA, 15 bp, Homo sapiens
ccctggccaacatgg

SEQ ID NO: 1182444 - DNA, 15 bp, Homo sapiens
accctggccaacatg

SEQ ID NO: 1182445 - DNA, 15 bp, Homo sapiens
caccctggccaacat

SEQ ID NO: 1182446 - DNA, 15 bp, Homo sapiens
ccaccctggccaaca

SEQ ID NO: 1182447 - DNA, 15 bp, Homo sapiens
accaccctggccaac

SEQ ID NO: 1182448 - DNA, 15 bp, Homo sapiens
gaccaccctggccaa

SEQ ID NO: 1182449 - DNA, 15 bp, Homo sapiens
agaccaccctggcca

SEQ ID NO: 1182450 - DNA, 15 bp, Homo sapiens
gagaccaccctggcc

SEQ ID NO: 1182451 - DNA, 15 bp, Homo sapiens
cgagaccaccctggc

SEQ ID NO: 1182452 - DNA, 15 bp, Homo sapiens
tcgagaccaccctgg

SEQ ID NO: 1182453 - DNA, 15 bp, Homo sapiens
ttcgagaccaccctg

SEQ ID NO: 1182454 - DNA, 15 bp, Homo sapiens
gttcgagaccaccct

SEQ ID NO: 1182455 - DNA, 15 bp, Homo sapiens
agttcgagaccaccc

SEQ ID NO: 1182456 - DNA, 15 bp, Homo sapiens
gagttcgagaccacc

SEQ ID NO: 1182457 - DNA, 15 bp, Homo sapiens
ggagttcgagaccac

SEQ ID NO: 1182458 - DNA, 15 bp, Homo sapiens
tcaaggcaggcagat

SEQ ID NO: 1182459 - DNA, 15 bp, Homo sapiens
gtcaaggcaggcaga

SEQ ID NO: 1182460 - DNA, 15 bp, Homo sapiens
ggtcaaggcaggcag

SEQ ID NO: 1182461 - DNA, 15 bp, Homo sapiens
aggtcaaggcaggca

SEQ ID NO: 1182462 - DNA, 15 bp, Homo sapiens
gaggtcaaggcaggc

SEQ ID NO: 1182463 - DNA, 15 bp, Homo sapiens
ggaggtcaaggcagg

SEQ ID NO: 1182464 - DNA, 15 bp, Homo sapiens
gggaggtcaaggcag

SEQ ID NO: 1182465 - DNA, 15 bp, Homo sapiens
tgggaggtcaaggca

SEQ ID NO: 1182466 - DNA, 15 bp, Homo sapiens
ttgggaggtcaaggc

SEQ ID NO: 1182467 - DNA, 15 bp, Homo sapiens
tttgggaggtcaagg

SEQ ID NO: 1182468 - DNA, 15 bp, Homo sapiens
ctttgggaggtcaag

SEQ ID NO: 1182469 - DNA, 15 bp, Homo sapiens
actttgggaggtcaa

SEQ ID NO: 1182470 - DNA, 15 bp, Homo sapiens
cactttgggaggtca

SEQ ID NO: 1182471 - DNA, 15 bp, Homo sapiens
acactttgggaggtc

SEQ ID NO: 1182472 - DNA, 15 bp, Homo sapiens
taatgccaacacttt

SEQ ID NO: 1182473 - DNA, 15 bp, Homo sapiens
gtaatgccaacactt

SEQ ID NO: 1182474 - DNA, 15 bp, Homo sapiens
tgtaatgccaacact

SEQ ID NO: 1182475 - DNA, 15 bp, Homo sapiens
ctgtaatgccaacac

SEQ ID NO: 1182476 - DNA, 15 bp, Homo sapiens
cctgtaatgccaaca

SEQ ID NO: 1182477 - DNA, 15 bp, Homo sapiens
gcctgtaatgccaac

SEQ ID NO: 1182478 - DNA, 15 bp, Homo sapiens
cgcctgtaatgccaa

SEQ ID NO: 1182479 - DNA, 15 bp, Homo sapiens
ggggccgggcgcggt

SEQ ID NO: 1182480 - DNA, 15 bp, Homo sapiens
gggggccgggcgcgg

SEQ ID NO: 1182481 - DNA, 15 bp, Homo sapiens
agggggccgggcgcg

SEQ ID NO: 1182482 - DNA, 15 bp, Homo sapiens
aagggggccgggcgc

SEQ ID NO: 1182483 - DNA, 15 bp, Homo sapiens
caagggggccgggcg

SEQ ID NO: 1182484 - DNA, 15 bp, Homo sapiens
acaagggggccgggc

SEQ ID NO: 1182485 - DNA, 15 bp, Homo sapiens
gacaagggggccggg

SEQ ID NO: 1182486 - DNA, 15 bp, Homo sapiens
tgacaagggggccgg

SEQ ID NO: 1182487 - DNA, 15 bp, Homo sapiens
gtgacaagggggccg

SEQ ID NO: 1182488 - DNA, 15 bp, Homo sapiens
agtgacaagggggcc

SEQ ID NO: 1182489 - DNA, 15 bp, Homo sapiens
aagtgacaagggggc

SEQ ID NO: 1182490 - DNA, 15 bp, Homo sapiens
aaagtgacaaggggg

SEQ ID NO: 1182491 - DNA, 15 bp, Homo sapiens
aaaagtgacaagggg

SEQ ID NO: 1182492 - DNA, 15 bp, Homo sapiens
aaaaagtgacaaggg

SEQ ID NO: 1182493 - DNA, 15 bp, Homo sapiens
taaaaagtgacaagg

SEQ ID NO: 1182494 - DNA, 15 bp, Homo sapiens
ctaaaaagtgacaag

SEQ ID NO: 1182495 - DNA, 15 bp, Homo sapiens
cctaaaaagtgacaa

SEQ ID NO: 1182496 - DNA, 15 bp, Homo sapiens
tcctaaaaagtgaca

SEQ ID NO: 1182497 - DNA, 15 bp, Homo sapiens
ttcctaaaaagtgac

SEQ ID NO: 1182498 - DNA, 15 bp, Homo sapiens
cttcctaaaaagtga

SEQ ID NO: 1182499 - DNA, 15 bp, Homo sapiens
tcttcctaaaaagtg

SEQ ID NO: 1182500 - DNA, 15 bp, Homo sapiens
ttcttcctaaaaagt

SEQ ID NO: 1182501 - DNA, 15 bp, Homo sapiens
tttcttcctaaaaag

SEQ ID NO: 1182502 - DNA, 15 bp, Homo sapiens
atttcttcctaaaaa

SEQ ID NO: 1182503 - DNA, 15 bp, Homo sapiens
tatttcttcctaaaa

SEQ ID NO: 1182504 - DNA, 15 bp, Homo sapiens
ttatttcttcctaaa

SEQ ID NO: 1182505 - DNA, 15 bp, Homo sapiens
cttatttcttcctaa

SEQ ID NO: 1182506 - DNA, 15 bp, Homo sapiens
acttatttcttccta

SEQ ID NO: 1182507 - DNA, 15 bp, Homo sapiens
aacttatttcttcct

SEQ ID NO: 1182508 - DNA, 15 bp, Homo sapiens
taacttatttcttcc

SEQ ID NO: 1182509 - DNA, 15 bp, Homo sapiens
gtaacttatttcttc

SEQ ID NO: 1182510 - DNA, 15 bp, Homo sapiens
agtaacttatttctt

SEQ ID NO: 1182511 - DNA, 15 bp, Homo sapiens
aagtaacttatttct

SEQ ID NO: 1182512 - DNA, 15 bp, Homo sapiens
aaagtaacttatttc

SEQ ID NO: 1182513 - DNA, 15 bp, Homo sapiens
taaagtaacttattt

SEQ ID NO: 1182514 - DNA, 15 bp, Homo sapiens
ttaaagtaacttatt

SEQ ID NO: 1182515 - DNA, 15 bp, Homo sapiens
tttaaagtaacttat

SEQ ID NO: 1182516 - DNA, 15 bp, Homo sapiens
gtttaaagtaactta

SEQ ID NO: 1182517 - DNA, 15 bp, Homo sapiens
ggtttaaagtaactt

SEQ ID NO: 1182518 - DNA, 15 bp, Homo sapiens
gggtttaaagtaact

SEQ ID NO: 1182519 - DNA, 15 bp, Homo sapiens
agggtttaaagtaac

SEQ ID NO: 1182520 - DNA, 15 bp, Homo sapiens
gagggtttaaagtaa

SEQ ID NO: 1182521 - DNA, 15 bp, Homo sapiens
agagggtttaaagta

SEQ ID NO: 1182522 - DNA, 15 bp, Homo sapiens
tagagggtttaaagt

SEQ ID NO: 1182523 - DNA, 15 bp, Homo sapiens
ttagagggtttaaag

SEQ ID NO: 1182524 - DNA, 15 bp, Homo sapiens
tttagagggtttaaa

SEQ ID NO: 1182525 - DNA, 15 bp, Homo sapiens
ctttagagggtttaa

SEQ ID NO: 1182526 - DNA, 15 bp, Homo sapiens
tctttagagggttta

SEQ ID NO: 1182527 - DNA, 15 bp, Homo sapiens
ttctttagagggttt

SEQ ID NO: 1182528 - DNA, 15 bp, Homo sapiens
gttctttagagggtt

SEQ ID NO: 1182529 - DNA, 15 bp, Homo sapiens
ggttctttagagggt

SEQ ID NO: 1182530 - DNA, 15 bp, Homo sapiens
gggttctttagaggg

SEQ ID NO: 1182531 - DNA, 15 bp, Homo sapiens
tgggttctttagagg

SEQ ID NO: 1182532 - DNA, 15 bp, Homo sapiens
ttgggttctttagag

SEQ ID NO: 1182533 - DNA, 15 bp, Homo sapiens
tttgggttctttaga

SEQ ID NO: 1182534 - DNA, 15 bp, Homo sapiens
atttgggttctttag

SEQ ID NO: 1182535 - DNA, 15 bp, Homo sapiens
catttgggttcttta

SEQ ID NO: 1182536 - DNA, 15 bp, Homo sapiens
gcatttgggttcttt

SEQ ID NO: 1182537 - DNA, 15 bp, Homo sapiens
ggcatttgggttctt

SEQ ID NO: 1182538 - DNA, 15 bp, Homo sapiens
aggcatttgggttct

SEQ ID NO: 1182539 - DNA, 15 bp, Homo sapiens
caggcatttgggttc

SEQ ID NO: 1182540 - DNA, 15 bp, Homo sapiens
gcaggcatttgggtt

SEQ ID NO: 1182541 - DNA, 15 bp, Homo sapiens
ggcaggcatttgggt

SEQ ID NO: 1182542 - DNA, 15 bp, Homo sapiens
tggcaggcatttggg

SEQ ID NO: 1182543 - DNA, 15 bp, Homo sapiens
gtggcaggcatttgg

SEQ ID NO: 1182544 - DNA, 15 bp, Homo sapiens
tgtggcaggcatttg

SEQ ID NO: 1182545 - DNA, 15 bp, Homo sapiens
gtgtggcaggcattt

SEQ ID NO: 1182546 - DNA, 15 bp, Homo sapiens
agtgtggcaggcatt

SEQ ID NO: 1182547 - DNA, 15 bp, Homo sapiens
aagtgtggcaggcat

SEQ ID NO: 1182548 - DNA, 15 bp, Homo sapiens
gaagtgtggcaggca

SEQ ID NO: 1182549 - DNA, 15 bp, Homo sapiens
tgaagtgtggcaggc

SEQ ID NO: 1182550 - DNA, 15 bp, Homo sapiens
ctgaagtgtggcagg

SEQ ID NO: 1182551 - DNA, 15 bp, Homo sapiens
cctgaagtgtggcag

SEQ ID NO: 1182552 - DNA, 15 bp, Homo sapiens
gcctgaagtgtggca

SEQ ID NO: 1182553 - DNA, 15 bp, Homo sapiens
ggcctgaagtgtggc

SEQ ID NO: 1182554 - DNA, 15 bp, Homo sapiens
aggcctgaagtgtgg

SEQ ID NO: 1182555 - DNA, 15 bp, Homo sapiens
aaggcctgaagtgtg

SEQ ID NO: 1182556 - DNA, 15 bp, Homo sapiens
caaggcctgaagtgt

SEQ ID NO: 1182557 - DNA, 15 bp, Homo sapiens
acaaggcctgaagtg

SEQ ID NO: 1182558 - DNA, 15 bp, Homo sapiens
aacaaggcctgaagt

SEQ ID NO: 1182559 - DNA, 15 bp, Homo sapiens
aaacaaggcctgaag

SEQ ID NO: 1182560 - DNA, 15 bp, Homo sapiens
aaaacaaggcctgaa

SEQ ID NO: 1182561 - DNA, 15 bp, Homo sapiens
taaaacaaggcctga

SEQ ID NO: 1182562 - DNA, 15 bp, Homo sapiens
ataaaacaaggcctg

SEQ ID NO: 1182563 - DNA, 15 bp, Homo sapiens
aataaaacaaggcct

SEQ ID NO: 1182564 - DNA, 15 bp, Homo sapiens
gaataaaacaaggcc

SEQ ID NO: 1182565 - DNA, 15 bp, Homo sapiens
cgaataaaacaaggc

SEQ ID NO: 1182566 - DNA, 15 bp, Homo sapiens
acgaataaaacaagg

SEQ ID NO: 1182567 - DNA, 15 bp, Homo sapiens
gacgaataaaacaag

SEQ ID NO: 1182568 - DNA, 15 bp, Homo sapiens
tgacgaataaaacaa

SEQ ID NO: 1182569 - DNA, 15 bp, Homo sapiens
ctgacgaataaaaca

SEQ ID NO: 1182570 - DNA, 15 bp, Homo sapiens
tctgacgaataaaac

SEQ ID NO: 1182571 - DNA, 15 bp, Homo sapiens
atctgacgaataaaa

SEQ ID NO: 1182572 - DNA, 15 bp, Homo sapiens
aatctgacgaataaa

SEQ ID NO: 1182573 - DNA, 15 bp, Homo sapiens
aaatctgacgaataa

SEQ ID NO: 1182574 - DNA, 15 bp, Homo sapiens
aaaatctgacgaata

SEQ ID NO: 1182575 - DNA, 15 bp, Homo sapiens
aaaaatctgacgaat

SEQ ID NO: 1182576 - DNA, 15 bp, Homo sapiens
aaaaaatctgacgaa

SEQ ID NO: 1182577 - DNA, 15 bp, Homo sapiens
aaaaaaatctgacga

SEQ ID NO: 1182578 - DNA, 15 bp, Homo sapiens
gaaaaaaatctgacg

SEQ ID NO: 1182579 - DNA, 15 bp, Homo sapiens
agaaaaaaatctgac

SEQ ID NO: 1182580 - DNA, 15 bp, Homo sapiens
aagaaaaaaatctga

SEQ ID NO: 1182581 - DNA, 15 bp, Homo sapiens
aaagaaaaaaatctg

SEQ ID NO: 1182582 - DNA, 15 bp, Homo sapiens
gaaaagaaaaaaatc

SEQ ID NO: 1182583 - DNA, 15 bp, Homo sapiens
agaaaagaaaaaaat

SEQ ID NO: 1182584 - DNA, 15 bp, Homo sapiens
cagaaaagaaaaaaa

SEQ ID NO: 1182585 - DNA, 15 bp, Homo sapiens
acagaaaagaaaaaa

SEQ ID NO: 1182586 - DNA, 15 bp, Homo sapiens
cacagaaaagaaaaa

SEQ ID NO: 1182587 - DNA, 15 bp, Homo sapiens
gcacagaaaagaaaa

SEQ ID NO: 1182588 - DNA, 15 bp, Homo sapiens
tgcacagaaaagaaa

SEQ ID NO: 1182589 - DNA, 15 bp, Homo sapiens
ttgcacagaaaagaa

SEQ ID NO: 1182590 - DNA, 15 bp, Homo sapiens
tttgcacagaaaaga

SEQ ID NO: 1182591 - DNA, 15 bp, Homo sapiens
ctttgcacagaaaag

SEQ ID NO: 1182592 - DNA, 15 bp, Homo sapiens
tctttgcacagaaaa

SEQ ID NO: 1182593 - DNA, 15 bp, Homo sapiens
gtctttgcacagaaa

SEQ ID NO: 1182594 - DNA, 15 bp, Homo sapiens
ggtctttgcacagaa

SEQ ID NO: 1182595 - DNA, 15 bp, Homo sapiens
gggtctttgcacaga

SEQ ID NO: 1182596 - DNA, 15 bp, Homo sapiens
agggtctttgcacag

SEQ ID NO: 1182597 - DNA, 15 bp, Homo sapiens
cagggtctttgcaca

SEQ ID NO: 1182598 - DNA, 15 bp, Homo sapiens
gcagggtctttgcac

SEQ ID NO: 1182599 - DNA, 15 bp, Homo sapiens
agcagggtctttgca

SEQ ID NO: 1182600 - DNA, 15 bp, Homo sapiens
cagcagggtctttgc

SEQ ID NO: 1182601 - DNA, 15 bp, Homo sapiens
ccagcagggtctttg

SEQ ID NO: 1182602 - DNA, 15 bp, Homo sapiens
accagcagggtcttt

SEQ ID NO: 1182603 - DNA, 15 bp, Homo sapiens
caccagcagggtctt

SEQ ID NO: 1182604 - DNA, 15 bp, Homo sapiens
acaccagcagggtct

SEQ ID NO: 1182605 - DNA, 15 bp, Homo sapiens
aacaccagcagggtc

SEQ ID NO: 1182606 - DNA, 15 bp, Homo sapiens
caacaccagcagggt

SEQ ID NO: 1182607 - DNA, 15 bp, Homo sapiens
ccaacaccagcaggg

SEQ ID NO: 1182608 - DNA, 15 bp, Homo sapiens
tccaacaccagcagg

SEQ ID NO: 1182609 - DNA, 15 bp, Homo sapiens
ttccaacaccagcag

SEQ ID NO: 1182610 - DNA, 15 bp, Homo sapiens
tttccaacaccagca

SEQ ID NO: 1182611 - DNA, 15 bp, Homo sapiens
ctttccaacaccagc

SEQ ID NO: 1182612 - DNA, 15 bp, Homo sapiens
actttccaacaccag

SEQ ID NO: 1182613 - DNA, 15 bp, Homo sapiens
cactttccaacacca

SEQ ID NO: 1182614 - DNA, 15 bp, Homo sapiens
acactttccaacacc

SEQ ID NO: 1182615 - DNA, 15 bp, Homo sapiens
aacactttccaacac

SEQ ID NO: 1182616 - DNA, 15 bp, Homo sapiens
taacactttccaaca

SEQ ID NO: 1182617 - DNA, 15 bp, Homo sapiens
gtaacactttccaac

SEQ ID NO: 1182618 - DNA, 15 bp, Homo sapiens
tgtaacactttccaa

SEQ ID NO: 1182619 - DNA, 15 bp, Homo sapiens
ctgtaacactttcca

SEQ ID NO: 1182620 - DNA, 15 bp, Homo sapiens
tctgtaacactttcc

SEQ ID NO: 1182621 - DNA, 15 bp, Homo sapiens
gtctgtaacactttc

SEQ ID NO: 1182622 - DNA, 15 bp, Homo sapiens
tgtctgtaacacttt

SEQ ID NO: 1182623 - DNA, 15 bp, Homo sapiens
atgtctgtaacactt

SEQ ID NO: 1182624 - DNA, 15 bp, Homo sapiens
catgtctgtaacact

SEQ ID NO: 1182625 - DNA, 15 bp, Homo sapiens
tcatgtctgtaacac

SEQ ID NO: 1182626 - DNA, 15 bp, Homo sapiens
ttcatgtctgtaaca

SEQ ID NO: 1182627 - DNA, 15 bp, Homo sapiens
tttcatgtctgtaac

SEQ ID NO: 1182628 - DNA, 15 bp, Homo sapiens
atttcatgtctgtaa

SEQ ID NO: 1182629 - DNA, 15 bp, Homo sapiens
catttcatgtctgta

SEQ ID NO: 1182630 - DNA, 15 bp, Homo sapiens
ccatttcatgtctgt

SEQ ID NO: 1182631 - DNA, 15 bp, Homo sapiens
cccatttcatgtctg

SEQ ID NO: 1182632 - DNA, 15 bp, Homo sapiens
ccccatttcatgtct

SEQ ID NO: 1182633 - DNA, 15 bp, Homo sapiens
accccatttcatgtc

SEQ ID NO: 1182634 - DNA, 15 bp, Homo sapiens
aaccccatttcatgt

SEQ ID NO: 1182635 - DNA, 15 bp, Homo sapiens
caaccccatttcatg

SEQ ID NO: 1182636 - DNA, 15 bp, Homo sapiens
acaaccccatttcat

SEQ ID NO: 1182637 - DNA, 15 bp, Homo sapiens
gacaaccccatttca

SEQ ID NO: 1182638 - DNA, 15 bp, Homo sapiens
agacaaccccatttc

SEQ ID NO: 1182639 - DNA, 15 bp, Homo sapiens
aagacaaccccattt

SEQ ID NO: 1182640 - DNA, 15 bp, Homo sapiens
aaagacaaccccatt

SEQ ID NO: 1182641 - DNA, 15 bp, Homo sapiens
aaaagacaaccccat

SEQ ID NO: 1182642 - DNA, 15 bp, Homo sapiens
aaaaagacaacccca

SEQ ID NO: 1182643 - DNA, 15 bp, Homo sapiens
caaaaagacaacccc

SEQ ID NO: 1182644 - DNA, 15 bp, Homo sapiens
tcaaaaagacaaccc

SEQ ID NO: 1182645 - DNA, 15 bp, Homo sapiens
gtcaaaaagacaacc

SEQ ID NO: 1182646 - DNA, 15 bp, Homo sapiens
ggtcaaaaagacaac

SEQ ID NO: 1182647 - DNA, 15 bp, Homo sapiens
tggtcaaaaagacaa

SEQ ID NO: 1182648 - DNA, 15 bp, Homo sapiens
ctggtcaaaaagaca

SEQ ID NO: 1182649 - DNA, 15 bp, Homo sapiens
gctggtcaaaaagac

SEQ ID NO: 1182650 - DNA, 15 bp, Homo sapiens
ggctggtcaaaaaga

SEQ ID NO: 1182651 - DNA, 15 bp, Homo sapiens
aggctggtcaaaaag

SEQ ID NO: 1182652 - DNA, 15 bp, Homo sapiens
aaggctggtcaaaaa

SEQ ID NO: 1182653 - DNA, 15 bp, Homo sapiens
gaaggctggtcaaaa

SEQ ID NO: 1182654 - DNA, 15 bp, Homo sapiens
agaaggctggtcaaa

SEQ ID NO: 1182655 - DNA, 15 bp, Homo sapiens
gagaaggctggtcaa

SEQ ID NO: 1182656 - DNA, 15 bp, Homo sapiens
agagaaggctggtca

SEQ ID NO: 1182657 - DNA, 15 bp, Homo sapiens
gagagaaggctggtc

SEQ ID NO: 1182658 - DNA, 15 bp, Homo sapiens
tgagagaaggctggt

SEQ ID NO: 1182659 - DNA, 15 bp, Homo sapiens
ctgagagaaggctgg

SEQ ID NO: 1182660 - DNA, 15 bp, Homo sapiens
actgagagaaggctg

SEQ ID NO: 1182661 - DNA, 15 bp, Homo sapiens
gactgagagaaggct

SEQ ID NO: 1182662 - DNA, 15 bp, Homo sapiens
agactgagagaaggc

SEQ ID NO: 1182663 - DNA, 15 bp, Homo sapiens
aagactgagagaagg

SEQ ID NO: 1182664 - DNA, 15 bp, Homo sapiens
caagactgagagaag

SEQ ID NO: 1182665 - DNA, 15 bp, Homo sapiens
acaagactgagagaa

SEQ ID NO: 1182666 - DNA, 15 bp, Homo sapiens
aacaagactgagaga

SEQ ID NO: 1182667 - DNA, 15 bp, Homo sapiens
aaacaagactgagag

SEQ ID NO: 1182668 - DNA, 15 bp, Homo sapiens
aaaacaagactgaga

SEQ ID NO: 1182669 - DNA, 15 bp, Homo sapiens
taaaacaagactgag

SEQ ID NO: 1182670 - DNA, 15 bp, Homo sapiens
ttaaaacaagactga

SEQ ID NO: 1182671 - DNA, 15 bp, Homo sapiens
tttaaaacaagactg

SEQ ID NO: 1182672 - DNA, 15 bp, Homo sapiens
ttttaaaacaagact

SEQ ID NO: 1182673 - DNA, 15 bp, Homo sapiens
gttttaaaacaagac

SEQ ID NO: 1182674 - DNA, 15 bp, Homo sapiens
tgttttaaaacaaga

SEQ ID NO: 1182675 - DNA, 15 bp, Homo sapiens
ttgttttaaaacaag

SEQ ID NO: 1182676 - DNA, 15 bp, Homo sapiens
gttgttttaaaacaa

SEQ ID NO: 1182677 - DNA, 15 bp, Homo sapiens
agttgttttaaaaca

SEQ ID NO: 1182678 - DNA, 15 bp, Homo sapiens
aagttgttttaaaac

SEQ ID NO: 1182679 - DNA, 15 bp, Homo sapiens
caagttgttttaaaa

SEQ ID NO: 1182680 - DNA, 15 bp, Homo sapiens
tcaagttgttttaaa

SEQ ID NO: 1182681 - DNA, 15 bp, Homo sapiens
atcaagttgttttaa

SEQ ID NO: 1182682 - DNA, 15 bp, Homo sapiens
catcaagttgtttta

SEQ ID NO: 1182683 - DNA, 15 bp, Homo sapiens
gcatcaagttgtttt

SEQ ID NO: 1182684 - DNA, 15 bp, Homo sapiens
ggcatcaagttgttt

SEQ ID NO: 1182685 - DNA, 15 bp, Homo sapiens
tggcatcaagttgtt

SEQ ID NO: 1182686 - DNA, 15 bp, Homo sapiens
ctggcatcaagttgt

SEQ ID NO: 1182687 - DNA, 15 bp, Homo sapiens
gctggcatcaagttg

SEQ ID NO: 1182688 - DNA, 15 bp, Homo sapiens
ggctggcatcaagtt

SEQ ID NO: 1182689 - DNA, 15 bp, Homo sapiens
aggctggcatcaagt

SEQ ID NO: 1182690 - DNA, 15 bp, Homo sapiens
caggctggcatcaag

SEQ ID NO: 1182691 - DNA, 15 bp, Homo sapiens
gcaggctggcatcaa

SEQ ID NO: 1182692 - DNA, 15 bp, Homo sapiens
ggcaggctggcatca

SEQ ID NO: 1182693 - DNA, 15 bp, Homo sapiens
tggcaggctggcatc

SEQ ID NO: 1182694 - DNA, 15 bp, Homo sapiens
ctggcaggctggcat

SEQ ID NO: 1182695 - DNA, 15 bp, Homo sapiens
gctggcaggctggca

SEQ ID NO: 1182696 - DNA, 15 bp, Homo sapiens
ggctggcaggctggc

SEQ ID NO: 1182697 - DNA, 15 bp, Homo sapiens
gggctggcaggctgg

SEQ ID NO: 1182698 - DNA, 15 bp, Homo sapiens
agggctggcaggctg

SEQ ID NO: 1182699 - DNA, 15 bp, Homo sapiens
aagggctggcaggct

SEQ ID NO: 1182700 - DNA, 15 bp, Homo sapiens
caagggctggcaggc

SEQ ID NO: 1182701 - DNA, 15 bp, Homo sapiens
acaagggctggcagg

SEQ ID NO: 1182702 - DNA, 15 bp, Homo sapiens
aacaagggctggcag

SEQ ID NO: 1182703 - DNA, 15 bp, Homo sapiens
gaacaagggctggca

SEQ ID NO: 1182704 - DNA, 15 bp, Homo sapiens
ggaacaagggctggc

SEQ ID NO: 1182705 - DNA, 15 bp, Homo sapiens
gggaacaagggctgg

SEQ ID NO: 1182706 - DNA, 15 bp, Homo sapiens
agggaacaagggctg

SEQ ID NO: 1182707 - DNA, 15 bp, Homo sapiens
cagggaacaagggct

SEQ ID NO: 1182708 - DNA, 15 bp, Homo sapiens
tcagggaacaagggc

SEQ ID NO: 1182709 - DNA, 15 bp, Homo sapiens
gtcagggaacaaggg

SEQ ID NO: 1182710 - DNA, 15 bp, Homo sapiens
tgtcagggaacaagg

SEQ ID NO: 1182711 - DNA, 15 bp, Homo sapiens
ctgtcagggaacaag

SEQ ID NO: 1182712 - DNA, 15 bp, Homo sapiens
cctgtcagggaacaa

SEQ ID NO: 1182713 - DNA, 15 bp, Homo sapiens
ccctgtcagggaaca

SEQ ID NO: 1182714 - DNA, 15 bp, Homo sapiens
accctgtcagggaac

SEQ ID NO: 1182715 - DNA, 15 bp, Homo sapiens
caccctgtcagggaa

SEQ ID NO: 1182716 - DNA, 15 bp, Homo sapiens
gcaccctgtcaggga

SEQ ID NO: 1182717 - DNA, 15 bp, Homo sapiens
ggcaccctgtcaggg

SEQ ID NO: 1182718 - DNA, 15 bp, Homo sapiens
gggcaccctgtcagg

SEQ ID NO: 1182719 - DNA, 15 bp, Homo sapiens
agggcaccctgtcag

SEQ ID NO: 1182720 - DNA, 15 bp, Homo sapiens
cagggcaccctgtca

SEQ ID NO: 1182721 - DNA, 15 bp, Homo sapiens
tcagggcaccctgtc

SEQ ID NO: 1182722 - DNA, 15 bp, Homo sapiens
ctcagggcaccctgt

SEQ ID NO: 1182723 - DNA, 15 bp, Homo sapiens
gctcagggcaccctg

SEQ ID NO: 1182724 - DNA, 15 bp, Homo sapiens
tgctcagggcaccct

SEQ ID NO: 1182725 - DNA, 15 bp, Homo sapiens
ctgctcagggcaccc

SEQ ID NO: 1182726 - DNA, 15 bp, Homo sapiens
tctgctcagggcacc

SEQ ID NO: 1182727 - DNA, 15 bp, Homo sapiens
ctctgctcagggcac

SEQ ID NO: 1182728 - DNA, 15 bp, Homo sapiens
gctctgctcagggca

SEQ ID NO: 1182729 - DNA, 15 bp, Homo sapiens
ggctctgctcagggc

SEQ ID NO: 1182730 - DNA, 15 bp, Homo sapiens
gggctctgctcaggg

SEQ ID NO: 1182731 - DNA, 15 bp, Homo sapiens
tgggctctgctcagg

SEQ ID NO: 1182732 - DNA, 15 bp, Homo sapiens
ctgggctctgctcag

SEQ ID NO: 1182733 - DNA, 15 bp, Homo sapiens
tctgggctctgctca

SEQ ID NO: 1182734 - DNA, 15 bp, Homo sapiens
atctgggctctgctc

SEQ ID NO: 1182735 - DNA, 15 bp, Homo sapiens
catctgggctctgct

SEQ ID NO: 1182736 - DNA, 15 bp, Homo sapiens
ccatctgggctctgc

SEQ ID NO: 1182737 - DNA, 15 bp, Homo sapiens
gccatctgggctctg

SEQ ID NO: 1182738 - DNA, 15 bp, Homo sapiens
ggccatctgggctct

SEQ ID NO: 1182739 - DNA, 15 bp, Homo sapiens
gggccatctgggctc

SEQ ID NO: 1182740 - DNA, 15 bp, Homo sapiens
cgggccatctgggct

SEQ ID NO: 1182741 - DNA, 15 bp, Homo sapiens
acgggccatctgggc

SEQ ID NO: 1182742 - DNA, 15 bp, Homo sapiens
tacgggccatctggg

SEQ ID NO: 1182743 - DNA, 15 bp, Homo sapiens
ttacgggccatctgg

SEQ ID NO: 1182744 - DNA, 15 bp, Homo sapiens
cttacgggccatctg

SEQ ID NO: 1182745 - DNA, 15 bp, Homo sapiens
tcttacgggccatct

SEQ ID NO: 1182746 - DNA, 15 bp, Homo sapiens
ctcttacgggccatc

SEQ ID NO: 1182747 - DNA, 15 bp, Homo sapiens
cctcttacgggccat

SEQ ID NO: 1182748 - DNA, 15 bp, Homo sapiens
gcctcttacgggcca

SEQ ID NO: 1182749 - DNA, 15 bp, Homo sapiens
ggcctcttacgggcc

SEQ ID NO: 1182750 - DNA, 15 bp, Homo sapiens
aggcctcttacgggc

SEQ ID NO: 1182751 - DNA, 15 bp, Homo sapiens
caggcctcttacggg

SEQ ID NO: 1182752 - DNA, 15 bp, Homo sapiens
tcaggcctcttacgg

SEQ ID NO: 1182753 - DNA, 15 bp, Homo sapiens
atcaggcctcttacg

SEQ ID NO: 1182754 - DNA, 15 bp, Homo sapiens
gatcaggcctcttac

SEQ ID NO: 1182755 - DNA, 15 bp, Homo sapiens
agatcaggcctctta

SEQ ID NO: 1182756 - DNA, 15 bp, Homo sapiens
gagatcaggcctctt

SEQ ID NO: 1182757 - DNA, 15 bp, Homo sapiens
ggagatcaggcctct

SEQ ID NO: 1182758 - DNA, 15 bp, Homo sapiens
aggagatcaggcctc

SEQ ID NO: 1182759 - DNA, 15 bp, Homo sapiens
aaggagatcaggcct

SEQ ID NO: 1182760 - DNA, 15 bp, Homo sapiens
taaggagatcaggcc

SEQ ID NO: 1182761 - DNA, 15 bp, Homo sapiens
gtaaggagatcaggc

SEQ ID NO: 1182762 - DNA, 15 bp, Homo sapiens
agtaaggagatcagg

SEQ ID NO: 1182763 - DNA, 15 bp, Homo sapiens
gagtaaggagatcag

SEQ ID NO: 1182764 - DNA, 15 bp, Homo sapiens
ggagtaaggagatca

SEQ ID NO: 1182765 - DNA, 15 bp, Homo sapiens
gggagtaaggagatc

SEQ ID NO: 1182766 - DNA, 15 bp, Homo sapiens
agggagtaaggagat

SEQ ID NO: 1182767 - DNA, 15 bp, Homo sapiens
cagggagtaaggaga

SEQ ID NO: 1182768 - DNA, 15 bp, Homo sapiens
acagggagtaaggag

SEQ ID NO: 1182769 - DNA, 15 bp, Homo sapiens
cacagggagtaagga

SEQ ID NO: 1182770 - DNA, 15 bp, Homo sapiens
gcacagggagtaagg

SEQ ID NO: 1182771 - DNA, 15 bp, Homo sapiens
ggcacagggagtaag

SEQ ID NO: 1182772 - DNA, 15 bp, Homo sapiens
gggcacagggagtaa

SEQ ID NO: 1182773 - DNA, 15 bp, Homo sapiens
agggcacagggagta

SEQ ID NO: 1182774 - DNA, 15 bp, Homo sapiens
cagggcacagggagt

SEQ ID NO: 1182775 - DNA, 15 bp, Homo sapiens
ccagggcacagggag

SEQ ID NO: 1182776 - DNA, 15 bp, Homo sapiens
tccagggcacaggga

SEQ ID NO: 1182777 - DNA, 15 bp, Homo sapiens
ctccagggcacaggg

SEQ ID NO: 1182778 - DNA, 15 bp, Homo sapiens
cctccagggcacagg

SEQ ID NO: 1182779 - DNA, 15 bp, Homo sapiens
tcctccagggcacag

SEQ ID NO: 1182780 - DNA, 15 bp, Homo sapiens
atcctccagggcaca

SEQ ID NO: 1182781 - DNA, 15 bp, Homo sapiens
aatcctccagggcac

SEQ ID NO: 1182782 - DNA, 15 bp, Homo sapiens
aaatcctccagggca

SEQ ID NO: 1182783 - DNA, 15 bp, Homo sapiens
caaatcctccagggc

SEQ ID NO: 1182784 - DNA, 15 bp, Homo sapiens
tcaaatcctccaggg

SEQ ID NO: 1182785 - DNA, 15 bp, Homo sapiens
ctcaaatcctccagg

SEQ ID NO: 1182786 - DNA, 15 bp, Homo sapiens
gctcaaatcctccag

SEQ ID NO: 1182787 - DNA, 15 bp, Homo sapiens
ggctcaaatcctcca

SEQ ID NO: 1182788 - DNA, 15 bp, Homo sapiens
gggctcaaatcctcc

SEQ ID NO: 1182789 - DNA, 15 bp, Homo sapiens
tgggctcaaatcctc

SEQ ID NO: 1182790 - DNA, 15 bp, Homo sapiens
gtgggctcaaatcct

SEQ ID NO: 1182791 - DNA, 15 bp, Homo sapiens
tgtgggctcaaatcc

SEQ ID NO: 1182792 - DNA, 15 bp, Homo sapiens
atgtgggctcaaatc

SEQ ID NO: 1182793 - DNA, 15 bp, Homo sapiens
catgtgggctcaaat

SEQ ID NO: 1182794 - DNA, 15 bp, Homo sapiens
acatgtgggctcaaa

SEQ ID NO: 1182795 - DNA, 15 bp, Homo sapiens
cacatgtgggctcaa

SEQ ID NO: 1182796 - DNA, 15 bp, Homo sapiens
gcacatgtgggctca

SEQ ID NO: 1182797 - DNA, 15 bp, Homo sapiens
agcacatgtgggctc

SEQ ID NO: 1182798 - DNA, 15 bp, Homo sapiens
gagcacatgtgggct

SEQ ID NO: 1182799 - DNA, 15 bp, Homo sapiens
ggagcacatgtgggc

SEQ ID NO: 1182800 - DNA, 15 bp, Homo sapiens
tggagcacatgtggg

SEQ ID NO: 1182801 - DNA, 15 bp, Homo sapiens
ctggagcacatgtgg

SEQ ID NO: 1182802 - DNA, 15 bp, Homo sapiens
tctggagcacatgtg

SEQ ID NO: 1182803 - DNA, 15 bp, Homo sapiens
ctctggagcacatgt

SEQ ID NO: 1182804 - DNA, 15 bp, Homo sapiens
gctctggagcacatg

SEQ ID NO: 1182805 - DNA, 15 bp, Homo sapiens
agctctggagcacat

SEQ ID NO: 1182806 - DNA, 15 bp, Homo sapiens
cagctctggagcaca

SEQ ID NO: 1182807 - DNA, 15 bp, Homo sapiens
ccagctctggagcac

SEQ ID NO: 1182808 - DNA, 15 bp, Homo sapiens
cccagctctggagca

SEQ ID NO: 1182809 - DNA, 15 bp, Homo sapiens
tcccagctctggagc

SEQ ID NO: 1182810 - DNA, 15 bp, Homo sapiens
ttcccagctctggag

SEQ ID NO: 1182811 - DNA, 15 bp, Homo sapiens
gttcccagctctgga

SEQ ID NO: 1182812 - DNA, 15 bp, Homo sapiens
agttcccagctctgg

SEQ ID NO: 1182813 - DNA, 15 bp, Homo sapiens
tagttcccagctctg

SEQ ID NO: 1182814 - DNA, 15 bp, Homo sapiens
ctagttcccagctct

SEQ ID NO: 1182815 - DNA, 15 bp, Homo sapiens
cctagttcccagctc

SEQ ID NO: 1182816 - DNA, 15 bp, Homo sapiens
gcctagttcccagct

SEQ ID NO: 1182817 - DNA, 15 bp, Homo sapiens
ggcctagttcccagc

SEQ ID NO: 1182818 - DNA, 15 bp, Homo sapiens
gggcctagttcccag

SEQ ID NO: 1182819 - DNA, 15 bp, Homo sapiens
agggcctagttccca

SEQ ID NO: 1182820 - DNA, 15 bp, Homo sapiens
aagggcctagttccc

SEQ ID NO: 1182821 - DNA, 15 bp, Homo sapiens
gaagggcctagttcc

SEQ ID NO: 1182822 - DNA, 15 bp, Homo sapiens
ggaagggcctagttc

SEQ ID NO: 1182823 - DNA, 15 bp, Homo sapiens
tggaagggcctagtt

SEQ ID NO: 1182824 - DNA, 15 bp, Homo sapiens
gtggaagggcctagt

SEQ ID NO: 1182825 - DNA, 15 bp, Homo sapiens
tgtggaagggcctag

SEQ ID NO: 1182826 - DNA, 15 bp, Homo sapiens
atgtggaagggccta

SEQ ID NO: 1182827 - DNA, 15 bp, Homo sapiens
gatgtggaagggcct

SEQ ID NO: 1182828 - DNA, 15 bp, Homo sapiens
tgatgtggaagggcc

SEQ ID NO: 1182829 - DNA, 15 bp, Homo sapiens
ctgatgtggaagggc

SEQ ID NO: 1182830 - DNA, 15 bp, Homo sapiens
cctgatgtggaaggg

SEQ ID NO: 1182831 - DNA, 15 bp, Homo sapiens
acctgatgtggaagg

SEQ ID NO: 1182832 - DNA, 15 bp, Homo sapiens
gacctgatgtggaag

SEQ ID NO: 1182833 - DNA, 15 bp, Homo sapiens
ggacctgatgtggaa

SEQ ID NO: 1182834 - DNA, 15 bp, Homo sapiens
aggacctgatgtgga

SEQ ID NO: 1182835 - DNA, 15 bp, Homo sapiens
aaggacctgatgtgg

SEQ ID NO: 1182836 - DNA, 15 bp, Homo sapiens
aaaggacctgatgtg

SEQ ID NO: 1182837 - DNA, 15 bp, Homo sapiens
gaaaggacctgatgt

SEQ ID NO: 1182838 - DNA, 15 bp, Homo sapiens
agaaaggacctgatg

SEQ ID NO: 1182839 - DNA, 15 bp, Homo sapiens
gagaaaggacctgat

SEQ ID NO: 1182840 - DNA, 15 bp, Homo sapiens
ggagaaaggacctga

SEQ ID NO: 1182841 - DNA, 15 bp, Homo sapiens
aggagaaaggacctg

SEQ ID NO: 1182842 - DNA, 15 bp, Homo sapiens
caggagaaaggacct

SEQ ID NO: 1182843 - DNA, 15 bp, Homo sapiens
tcaggagaaaggacc

SEQ ID NO: 1182844 - DNA, 15 bp, Homo sapiens
ctcaggagaaaggac

SEQ ID NO: 1182845 - DNA, 15 bp, Homo sapiens
gctcaggagaaagga

SEQ ID NO: 1182846 - DNA, 15 bp, Homo sapiens
agctcaggagaaagg

SEQ ID NO: 1182847 - DNA, 15 bp, Homo sapiens
gagctcaggagaaag

SEQ ID NO: 1182848 - DNA, 15 bp, Homo sapiens
tgagctcaggagaaa

SEQ ID NO: 1182849 - DNA, 15 bp, Homo sapiens
ctgagctcaggagaa

SEQ ID NO: 1182850 - DNA, 15 bp, Homo sapiens
cctgagctcaggaga

SEQ ID NO: 1182851 - DNA, 15 bp, Homo sapiens
gcctgagctcaggag

SEQ ID NO: 1182852 - DNA, 15 bp, Homo sapiens
agcctgagctcagga

SEQ ID NO: 1182853 - DNA, 15 bp, Homo sapiens
cagcctgagctcagg

SEQ ID NO: 1182854 - DNA, 15 bp, Homo sapiens
tcagcctgagctcag

SEQ ID NO: 1182855 - DNA, 15 bp, Homo sapiens
ttcagcctgagctca

SEQ ID NO: 1182856 - DNA, 15 bp, Homo sapiens
tttcagcctgagctc

SEQ ID NO: 1182857 - DNA, 15 bp, Homo sapiens
ctttcagcctgagct

SEQ ID NO: 1182858 - DNA, 15 bp, Homo sapiens
gctttcagcctgagc

SEQ ID NO: 1182859 - DNA, 15 bp, Homo sapiens
ggctttcagcctgag

SEQ ID NO: 1182860 - DNA, 15 bp, Homo sapiens
tggctttcagcctga

SEQ ID NO: 1182861 - DNA, 15 bp, Homo sapiens
ctggctttcagcctg

SEQ ID NO: 1182862 - DNA, 15 bp, Homo sapiens
actggctttcagcct

SEQ ID NO: 1182863 - DNA, 15 bp, Homo sapiens
aactggctttcagcc

SEQ ID NO: 1182864 - DNA, 15 bp, Homo sapiens
aaactggctttcagc

SEQ ID NO: 1182865 - DNA, 15 bp, Homo sapiens
taaactggctttcag

SEQ ID NO: 1182866 - DNA, 15 bp, Homo sapiens
gtaaactggctttca

SEQ ID NO: 1182867 - DNA, 15 bp, Homo sapiens
tgtaaactggctttc

SEQ ID NO: 1182868 - DNA, 15 bp, Homo sapiens
atgtaaactggcttt

SEQ ID NO: 1182869 - DNA, 15 bp, Homo sapiens
catgtaaactggctt

SEQ ID NO: 1182870 - DNA, 15 bp, Homo sapiens
acatgtaaactggct

SEQ ID NO: 1182871 - DNA, 15 bp, Homo sapiens
aacatgtaaactggc

SEQ ID NO: 1182872 - DNA, 15 bp, Homo sapiens
aaacatgtaaactgg

SEQ ID NO: 1182873 - DNA, 15 bp, Homo sapiens
taaacatgtaaactg

SEQ ID NO: 1182874 - DNA, 15 bp, Homo sapiens
gtaaacatgtaaact

SEQ ID NO: 1182875 - DNA, 15 bp, Homo sapiens
agtaaacatgtaaac

SEQ ID NO: 1182876 - DNA, 15 bp, Homo sapiens
aagtaaacatgtaaa

SEQ ID NO: 1182877 - DNA, 15 bp, Homo sapiens
gaagtaaacatgtaa

SEQ ID NO: 1182878 - DNA, 15 bp, Homo sapiens
ggaagtaaacatgta

SEQ ID NO: 1182879 - DNA, 15 bp, Homo sapiens
gggaagtaaacatgt

SEQ ID NO: 1182880 - DNA, 15 bp, Homo sapiens
tgggaagtaaacatg

SEQ ID NO: 1182881 - DNA, 15 bp, Homo sapiens
gtgggaagtaaacat

SEQ ID NO: 1182882 - DNA, 15 bp, Homo sapiens
ggtgggaagtaaaca

SEQ ID NO: 1182883 - DNA, 15 bp, Homo sapiens
cggtgggaagtaaac

SEQ ID NO: 1182884 - DNA, 15 bp, Homo sapiens
gcggtgggaagtaaa

SEQ ID NO: 1182885 - DNA, 15 bp, Homo sapiens
tgcggtgggaagtaa

SEQ ID NO: 1182886 - DNA, 15 bp, Homo sapiens
gtgcggtgggaagta

SEQ ID NO: 1182887 - DNA, 15 bp, Homo sapiens
tgtgcggtgggaagt

SEQ ID NO: 1182888 - DNA, 15 bp, Homo sapiens
gtgtgcggtgggaag

SEQ ID NO: 1182889 - DNA, 15 bp, Homo sapiens
agtgtgcggtgggaa

SEQ ID NO: 1182890 - DNA, 15 bp, Homo sapiens
cagtgtgcggtggga

SEQ ID NO: 1182891 - DNA, 15 bp, Homo sapiens
acagtgtgcggtggg

SEQ ID NO: 1182892 - DNA, 15 bp, Homo sapiens
aacagtgtgcggtgg

SEQ ID NO: 1182893 - DNA, 15 bp, Homo sapiens
aaacagtgtgcggtg

SEQ ID NO: 1182894 - DNA, 15 bp, Homo sapiens
caaacagtgtgcggt

SEQ ID NO: 1182895 - DNA, 15 bp, Homo sapiens
tcaaacagtgtgcgg

SEQ ID NO: 1182896 - DNA, 15 bp, Homo sapiens
ttcaaacagtgtgcg

SEQ ID NO: 1182897 - DNA, 15 bp, Homo sapiens
attcaaacagtgtgc

SEQ ID NO: 1182898 - DNA, 15 bp, Homo sapiens
cattcaaacagtgtg

SEQ ID NO: 1182899 - DNA, 15 bp, Homo sapiens
ccattcaaacagtgt

SEQ ID NO: 1182900 - DNA, 15 bp, Homo sapiens
cccattcaaacagtg

SEQ ID NO: 1182901 - DNA, 15 bp, Homo sapiens
ccccattcaaacagt

SEQ ID NO: 1182902 - DNA, 15 bp, Homo sapiens
accccattcaaacag

SEQ ID NO: 1182903 - DNA, 15 bp, Homo sapiens
taccccattcaaaca

SEQ ID NO: 1182904 - DNA, 15 bp, Homo sapiens
gtaccccattcaaac

SEQ ID NO: 1182905 - DNA, 15 bp, Homo sapiens
tgtaccccattcaaa

SEQ ID NO: 1182906 - DNA, 15 bp, Homo sapiens
ttgtaccccattcaa

SEQ ID NO: 1182907 - DNA, 15 bp, Homo sapiens
tttgtaccccattca

SEQ ID NO: 1182908 - DNA, 15 bp, Homo sapiens
gtttgtaccccattc

SEQ ID NO: 1182909 - DNA, 15 bp, Homo sapiens
agtttgtaccccatt

SEQ ID NO: 1182910 - DNA, 15 bp, Homo sapiens
gagtttgtaccccat

SEQ ID NO: 1182911 - DNA, 15 bp, Homo sapiens
tgagtttgtacccca

SEQ ID NO: 1182912 - DNA, 15 bp, Homo sapiens
ttgagtttgtacccc

SEQ ID NO: 1182913 - DNA, 15 bp, Homo sapiens
attgagtttgtaccc

SEQ ID NO: 1182914 - DNA, 15 bp, Homo sapiens
tattgagtttgtacc

SEQ ID NO: 1182915 - DNA, 15 bp, Homo sapiens
ttattgagtttgtac

SEQ ID NO: 1182916 - DNA, 15 bp, Homo sapiens
cttattgagtttgta

SEQ ID NO: 1182917 - DNA, 15 bp, Homo sapiens
ccttattgagtttgt

SEQ ID NO: 1182918 - DNA, 15 bp, Homo sapiens
tccttattgagtttg

SEQ ID NO: 1182919 - DNA, 15 bp, Homo sapiens
ttccttattgagttt

SEQ ID NO: 1182920 - DNA, 15 bp, Homo sapiens
gttccttattgagtt

SEQ ID NO: 1182921 - DNA, 15 bp, Homo sapiens
tgttccttattgagt

SEQ ID NO: 1182922 - DNA, 15 bp, Homo sapiens
ctgttccttattgag

SEQ ID NO: 1182923 - DNA, 15 bp, Homo sapiens
actgttccttattga

SEQ ID NO: 1182924 - DNA, 15 bp, Homo sapiens
aactgttccttattg

SEQ ID NO: 1182925 - DNA, 15 bp, Homo sapiens
gaactgttccttatt

SEQ ID NO: 1182926 - DNA, 15 bp, Homo sapiens
tgaactgttccttat

SEQ ID NO: 1182927 - DNA, 15 bp, Homo sapiens
ctgaactgttcctta

SEQ ID NO: 1182928 - DNA, 15 bp, Homo sapiens
tctgaactgttcctt

SEQ ID NO: 1182929 - DNA, 15 bp, Homo sapiens
ttctgaactgttcct

SEQ ID NO: 1182930 - DNA, 15 bp, Homo sapiens
gttctgaactgttcc

SEQ ID NO: 1182931 - DNA, 15 bp, Homo sapiens
agttctgaactgttc

SEQ ID NO: 1182932 - DNA, 15 bp, Homo sapiens
gagttctgaactgtt

SEQ ID NO: 1182933 - DNA, 15 bp, Homo sapiens
agagttctgaactgt

SEQ ID NO: 1182934 - DNA, 15 bp, Homo sapiens
cagagttctgaactg

SEQ ID NO: 1182935 - DNA, 15 bp, Homo sapiens
tcagagttctgaact

SEQ ID NO: 1182936 - DNA, 15 bp, Homo sapiens
ctcagagttctgaac

SEQ ID NO: 1182937 - DNA, 15 bp, Homo sapiens
actcagagttctgaa

SEQ ID NO: 1182938 - DNA, 15 bp, Homo sapiens
aactcagagttctga

SEQ ID NO: 1182939 - DNA, 15 bp, Homo sapiens
aaactcagagttctg

SEQ ID NO: 1182940 - DNA, 15 bp, Homo sapiens
aaaactcagagttct

SEQ ID NO: 1182941 - DNA, 15 bp, Homo sapiens
taaaactcagagttc

SEQ ID NO: 1182942 - DNA, 15 bp, Homo sapiens
ttaaaactcagagtt

SEQ ID NO: 1182943 - DNA, 15 bp, Homo sapiens
cttaaaactcagagt

SEQ ID NO: 1182944 - DNA, 15 bp, Homo sapiens
gcttaaaactcagag

SEQ ID NO: 1182945 - DNA, 15 bp, Homo sapiens
tgcttaaaactcaga

SEQ ID NO: 1182946 - DNA, 15 bp, Homo sapiens
gtgcttaaaactcag

SEQ ID NO: 1182947 - DNA, 15 bp, Homo sapiens
tgtgcttaaaactca

SEQ ID NO: 1182948 - DNA, 15 bp, Homo sapiens
ctgtgcttaaaactc

SEQ ID NO: 1182949 - DNA, 15 bp, Homo sapiens
tctgtgcttaaaact

SEQ ID NO: 1182950 - DNA, 15 bp, Homo sapiens
ctctgtgcttaaaac

SEQ ID NO: 1182951 - DNA, 15 bp, Homo sapiens
gctctgtgcttaaaa

SEQ ID NO: 1182952 - DNA, 15 bp, Homo sapiens
ggctctgtgcttaaa

SEQ ID NO: 1182953 - DNA, 15 bp, Homo sapiens
aggctctgtgcttaa

SEQ ID NO: 1182954 - DNA, 15 bp, Homo sapiens
caggctctgtgctta

SEQ ID NO: 1182955 - DNA, 15 bp, Homo sapiens
ccaggctctgtgctt

SEQ ID NO: 1182956 - DNA, 15 bp, Homo sapiens
cccaggctctgtgct

SEQ ID NO: 1182957 - DNA, 15 bp, Homo sapiens
gcccaggctctgtgc

SEQ ID NO: 1182958 - DNA, 15 bp, Homo sapiens
agcccaggctctgtg

SEQ ID NO: 1182959 - DNA, 15 bp, Homo sapiens
gagcccaggctctgt

SEQ ID NO: 1182960 - DNA, 15 bp, Homo sapiens
agagcccaggctctg

SEQ ID NO: 1182961 - DNA, 15 bp, Homo sapiens
gcagagcccaggctc

SEQ ID NO: 1182962 - DNA, 15 bp, Homo sapiens
tgcagagcccaggct

SEQ ID NO: 1182963 - DNA, 15 bp, Homo sapiens
gtgcagagcccaggc

SEQ ID NO: 1182964 - DNA, 15 bp, Homo sapiens
agtgcagagcccagg

SEQ ID NO: 1182965 - DNA, 15 bp, Homo sapiens
tagtgcagagcccag

SEQ ID NO: 1182966 - DNA, 15 bp, Homo sapiens
gtagtgcagagccca

SEQ ID NO: 1182967 - DNA, 15 bp, Homo sapiens
ggtagtgcagagccc

SEQ ID NO: 1182968 - DNA, 15 bp, Homo sapiens
aggtagtgcagagcc

SEQ ID NO: 1182969 - DNA, 15 bp, Homo sapiens
aaggtagtgcagagc

SEQ ID NO: 1182970 - DNA, 15 bp, Homo sapiens
taaggtagtgcagag

SEQ ID NO: 1182971 - DNA, 15 bp, Homo sapiens
ctaaggtagtgcaga

SEQ ID NO: 1182972 - DNA, 15 bp, Homo sapiens
tctaaggtagtgcag

SEQ ID NO: 1182973 - DNA, 15 bp, Homo sapiens
ttctaaggtagtgca

SEQ ID NO: 1182974 - DNA, 15 bp, Homo sapiens
cttctaaggtagtgc

SEQ ID NO: 1182975 - DNA, 15 bp, Homo sapiens
acttctaaggtagtg

SEQ ID NO: 1182976 - DNA, 15 bp, Homo sapiens
gacttctaaggtagt

SEQ ID NO: 1182977 - DNA, 15 bp, Homo sapiens
agacttctaaggtag

SEQ ID NO: 1182978 - DNA, 15 bp, Homo sapiens
cagacttctaaggta

SEQ ID NO: 1182979 - DNA, 15 bp, Homo sapiens
ccagacttctaaggt

SEQ ID NO: 1182980 - DNA, 15 bp, Homo sapiens
gccagacttctaagg

SEQ ID NO: 1182981 - DNA, 15 bp, Homo sapiens
ggccagacttctaag

SEQ ID NO: 1182982 - DNA, 15 bp, Homo sapiens
gggccagacttctaa

SEQ ID NO: 1182983 - DNA, 15 bp, Homo sapiens
agggccagacttcta

SEQ ID NO: 1182984 - DNA, 15 bp, Homo sapiens
aagggccagacttct

SEQ ID NO: 1182985 - DNA, 15 bp, Homo sapiens
gaagggccagacttc

SEQ ID NO: 1182986 - DNA, 15 bp, Homo sapiens
agaagggccagactt

SEQ ID NO: 1182987 - DNA, 15 bp, Homo sapiens
aagaagggccagact

SEQ ID NO: 1182988 - DNA, 15 bp, Homo sapiens
aaagaagggccagac

SEQ ID NO: 1182989 - DNA, 15 bp, Homo sapiens
caaagaagggccaga

SEQ ID NO: 1182990 - DNA, 15 bp, Homo sapiens
gcaaagaagggccag

SEQ ID NO: 1182991 - DNA, 15 bp, Homo sapiens
agcaaagaagggcca

SEQ ID NO: 1182992 - DNA, 15 bp, Homo sapiens
cagcaaagaagggcc

SEQ ID NO: 1182993 - DNA, 15 bp, Homo sapiens
ccagcaaagaagggc

SEQ ID NO: 1182994 - DNA, 15 bp, Homo sapiens
gccagcaaagaaggg

SEQ ID NO: 1182995 - DNA, 15 bp, Homo sapiens
tgccagcaaagaagg

SEQ ID NO: 1182996 - DNA, 15 bp, Homo sapiens
ctgccagcaaagaag

SEQ ID NO: 1182997 - DNA, 15 bp, Homo sapiens
tctgccagcaaagaa

SEQ ID NO: 1182998 - DNA, 15 bp, Homo sapiens
ctctgccagcaaaga

SEQ ID NO: 1182999 - DNA, 15 bp, Homo sapiens
cctctgccagcaaag

SEQ ID NO: 1183000 - DNA, 15 bp, Homo sapiens
acctctgccagcaaa

SEQ ID NO: 1183001 - DNA, 15 bp, Homo sapiens
gacctctgccagcaa

SEQ ID NO: 1183002 - DNA, 15 bp, Homo sapiens
tgacctctgccagca

SEQ ID NO: 1183003 - DNA, 15 bp, Homo sapiens
atgacctctgccagc

SEQ ID NO: 1183004 - DNA, 15 bp, Homo sapiens
catgacctctgccag

SEQ ID NO: 1183005 - DNA, 15 bp, Homo sapiens
gcatgacctctgcca

SEQ ID NO: 1183006 - DNA, 15 bp, Homo sapiens
agcatgacctctgcc

SEQ ID NO: 1183007 - DNA, 15 bp, Homo sapiens
cagcatgacctctgc

SEQ ID NO: 1183008 - DNA, 15 bp, Homo sapiens
acagcatgacctctg

SEQ ID NO: 1183009 - DNA, 15 bp, Homo sapiens
aacagcatgacctct

SEQ ID NO: 1183010 - DNA, 15 bp, Homo sapiens
aaacagcatgacctc

SEQ ID NO: 1183011 - DNA, 15 bp, Homo sapiens
caaacagcatgacct

SEQ ID NO: 1183012 - DNA, 15 bp, Homo sapiens
tcaaacagcatgacc

SEQ ID NO: 1183013 - DNA, 15 bp, Homo sapiens
atcaaacagcatgac

SEQ ID NO: 1183014 - DNA, 15 bp, Homo sapiens
catcaaacagcatga

SEQ ID NO: 1183015 - DNA, 15 bp, Homo sapiens
tcatcaaacagcatg

SEQ ID NO: 1183016 - DNA, 15 bp, Homo sapiens
ctcatcaaacagcat

SEQ ID NO: 1183017 - DNA, 15 bp, Homo sapiens
gctcatcaaacagca

SEQ ID NO: 1183018 - DNA, 15 bp, Homo sapiens
ggctcatcaaacagc

SEQ ID NO: 1183019 - DNA, 15 bp, Homo sapiens
tggctcatcaaacag

SEQ ID NO: 1183020 - DNA, 15 bp, Homo sapiens
ttggctcatcaaaca

SEQ ID NO: 1183021 - DNA, 15 bp, Homo sapiens
gttggctcatcaaac

SEQ ID NO: 1183022 - DNA, 15 bp, Homo sapiens
ggttggctcatcaaa

SEQ ID NO: 1183023 - DNA, 15 bp, Homo sapiens
tggttggctcatcaa

SEQ ID NO: 1183024 - DNA, 15 bp, Homo sapiens
gtggttggctcatca

SEQ ID NO: 1183025 - DNA, 15 bp, Homo sapiens
tgtggttggctcatc

SEQ ID NO: 1183026 - DNA, 15 bp, Homo sapiens
ctgtggttggctcat

SEQ ID NO: 1183027 - DNA, 15 bp, Homo sapiens
cctgtggttggctca

SEQ ID NO: 1183028 - DNA, 15 bp, Homo sapiens
gcctgtggttggctc

SEQ ID NO: 1183029 - DNA, 15 bp, Homo sapiens
ggcctgtggttggct

SEQ ID NO: 1183030 - DNA, 15 bp, Homo sapiens
aggcctgtggttggc

SEQ ID NO: 1183031 - DNA, 15 bp, Homo sapiens
caggcctgtggttgg

SEQ ID NO: 1183032 - DNA, 15 bp, Homo sapiens
ccaggcctgtggttg

SEQ ID NO: 1183033 - DNA, 15 bp, Homo sapiens
tccaggcctgtggtt

SEQ ID NO: 1183034 - DNA, 15 bp, Homo sapiens
gtccaggcctgtggt

SEQ ID NO: 1183035 - DNA, 15 bp, Homo sapiens
agtccaggcctgtgg

SEQ ID NO: 1183036 - DNA, 15 bp, Homo sapiens
cagtccaggcctgtg

SEQ ID NO: 1183037 - DNA, 15 bp, Homo sapiens
gcagtccaggcctgt

SEQ ID NO: 1183038 - DNA, 15 bp, Homo sapiens
tgcagtccaggcctg

SEQ ID NO: 1183039 - DNA, 15 bp, Homo sapiens
atgcagtccaggcct

SEQ ID NO: 1183040 - DNA, 15 bp, Homo sapiens
catgcagtccaggcc

SEQ ID NO: 1183041 - DNA, 15 bp, Homo sapiens
tcatgcagtccaggc

SEQ ID NO: 1183042 - DNA, 15 bp, Homo sapiens
gtcatgcagtccagg

SEQ ID NO: 1183043 - DNA, 15 bp, Homo sapiens
agtcatgcagtccag

SEQ ID NO: 1183044 - DNA, 15 bp, Homo sapiens
cagtcatgcagtcca

SEQ ID NO: 1183045 - DNA, 15 bp, Homo sapiens
gcagtcatgcagtcc

SEQ ID NO: 1183046 - DNA, 15 bp, Homo sapiens
agcagtcatgcagtc

SEQ ID NO: 1183047 - DNA, 15 bp, Homo sapiens
tagcagtcatgcagt

SEQ ID NO: 1183048 - DNA, 15 bp, Homo sapiens
ttagcagtcatgcag

SEQ ID NO: 1183049 - DNA, 15 bp, Homo sapiens
attagcagtcatgca

SEQ ID NO: 1183050 - DNA, 15 bp, Homo sapiens
gattagcagtcatgc

SEQ ID NO: 1183051 - DNA, 15 bp, Homo sapiens
tgattagcagtcatg

SEQ ID NO: 1183052 - DNA, 15 bp, Homo sapiens
ctgattagcagtcat

SEQ ID NO: 1183053 - DNA, 15 bp, Homo sapiens
tctgattagcagtca

SEQ ID NO: 1183054 - DNA, 15 bp, Homo sapiens
atctgattagcagtc

SEQ ID NO: 1183055 - DNA, 15 bp, Homo sapiens
aatctgattagcagt

SEQ ID NO: 1183056 - DNA, 15 bp, Homo sapiens
caatctgattagcag

SEQ ID NO: 1183057 - DNA, 15 bp, Homo sapiens
acaatctgattagca

SEQ ID NO: 1183058 - DNA, 15 bp, Homo sapiens
gacaatctgattagc

SEQ ID NO: 1183059 - DNA, 15 bp, Homo sapiens
cgacaatctgattag

SEQ ID NO: 1183060 - DNA, 15 bp, Homo sapiens
acgacaatctgatta

SEQ ID NO: 1183061 - DNA, 15 bp, Homo sapiens
gacgacaatctgatt

SEQ ID NO: 1183062 - DNA, 15 bp, Homo sapiens
ggacgacaatctgat

SEQ ID NO: 1183063 - DNA, 15 bp, Homo sapiens
aggacgacaatctga

SEQ ID NO: 1183064 - DNA, 15 bp, Homo sapiens
gaggacgacaatctg

SEQ ID NO: 1183065 - DNA, 15 bp, Homo sapiens
ggaggacgacaatct

SEQ ID NO: 1183066 - DNA, 15 bp, Homo sapiens
aggaggacgacaatc

SEQ ID NO: 1183067 - DNA, 15 bp, Homo sapiens
caggaggacgacaat

SEQ ID NO: 1183068 - DNA, 15 bp, Homo sapiens
ccaggaggacgacaa

SEQ ID NO: 1183069 - DNA, 15 bp, Homo sapiens
accaggaggacgaca

SEQ ID NO: 1183070 - DNA, 15 bp, Homo sapiens
caccaggaggacgac

SEQ ID NO: 1183071 - DNA, 15 bp, Homo sapiens
ccaccaggaggacga

SEQ ID NO: 1183072 - DNA, 15 bp, Homo sapiens
tccaccaggaggacg

SEQ ID NO: 1183073 - DNA, 15 bp, Homo sapiens
ttccaccaggaggac

SEQ ID NO: 1183074 - DNA, 15 bp, Homo sapiens
gttccaccaggagga

SEQ ID NO: 1183075 - DNA, 15 bp, Homo sapiens
agttccaccaggagg

SEQ ID NO: 1183076 - DNA, 15 bp, Homo sapiens
cagttccaccaggag

SEQ ID NO: 1183077 - DNA, 15 bp, Homo sapiens
ccagttccaccagga

SEQ ID NO: 1183078 - DNA, 15 bp, Homo sapiens
gccagttccaccagg

SEQ ID NO: 1183079 - DNA, 15 bp, Homo sapiens
agccagttccaccag

SEQ ID NO: 1183080 - DNA, 15 bp, Homo sapiens
gagccagttccacca

SEQ ID NO: 1183081 - DNA, 15 bp, Homo sapiens
cgagccagttccacc

SEQ ID NO: 1183082 - DNA, 15 bp, Homo sapiens
gcgagccagttccac

SEQ ID NO: 1183083 - DNA, 15 bp, Homo sapiens
tgcgagccagttcca

SEQ ID NO: 1183084 - DNA, 15 bp, Homo sapiens
ctgcgagccagttcc

SEQ ID NO: 1183085 - DNA, 15 bp, Homo sapiens
cctgcgagccagttc

SEQ ID NO: 1183086 - DNA, 15 bp, Homo sapiens
tcctgcgagccagtt

SEQ ID NO: 1183087 - DNA, 15 bp, Homo sapiens
ttcctgcgagccagt

SEQ ID NO: 1183088 - DNA, 15 bp, Homo sapiens
gttcctgcgagccag

SEQ ID NO: 1183089 - DNA, 15 bp, Homo sapiens
ggttcctgcgagcca

SEQ ID NO: 1183090 - DNA, 15 bp, Homo sapiens
cggttcctgcgagcc

SEQ ID NO: 1183091 - DNA, 15 bp, Homo sapiens
tcggttcctgcgagc

SEQ ID NO: 1183092 - DNA, 15 bp, Homo sapiens
ttcggttcctgcgag

SEQ ID NO: 1183093 - DNA, 15 bp, Homo sapiens
attcggttcctgcga

SEQ ID NO: 1183094 - DNA, 15 bp, Homo sapiens
aattcggttcctgcg

SEQ ID NO: 1183095 - DNA, 15 bp, Homo sapiens
caattcggttcctgc

SEQ ID NO: 1183096 - DNA, 15 bp, Homo sapiens
acaattcggttcctg

SEQ ID NO: 1183097 - DNA, 15 bp, Homo sapiens
cacaattcggttcct

SEQ ID NO: 1183098 - DNA, 15 bp, Homo sapiens
ccacaattcggttcc

SEQ ID NO: 1183099 - DNA, 15 bp, Homo sapiens
accacaattcggttc

SEQ ID NO: 1183100 - DNA, 15 bp, Homo sapiens
aaccacaattcggtt

SEQ ID NO: 1183101 - DNA, 15 bp, Homo sapiens
gaaccacaattcggt

SEQ ID NO: 1183102 - DNA, 15 bp, Homo sapiens
agaaccacaattcgg

SEQ ID NO: 1183103 - DNA, 15 bp, Homo sapiens
gagaaccacaattcg

SEQ ID NO: 1183104 - DNA, 15 bp, Homo sapiens
tgagaaccacaattc

SEQ ID NO: 1183105 - DNA, 15 bp, Homo sapiens
gtgagaaccacaatt

SEQ ID NO: 1183106 - DNA, 15 bp, Homo sapiens
ggtgagaaccacaat

SEQ ID NO: 1183107 - DNA, 15 bp, Homo sapiens
tggtgagaaccacaa

SEQ ID NO: 1183108 - DNA, 15 bp, Homo sapiens
atggtgagaaccaca

SEQ ID NO: 1183109 - DNA, 15 bp, Homo sapiens
aatggtgagaaccac

SEQ ID NO: 1183110 - DNA, 15 bp, Homo sapiens
gaatggtgagaacca

SEQ ID NO: 1183111 - DNA, 15 bp, Homo sapiens
tgaatggtgagaacc

SEQ ID NO: 1183112 - DNA, 15 bp, Homo sapiens
gtgaatggtgagaac

SEQ ID NO: 1183113 - DNA, 15 bp, Homo sapiens
ggtgaatggtgagaa

SEQ ID NO: 1183114 - DNA, 15 bp, Homo sapiens
tggtgaatggtgaga

SEQ ID NO: 1183115 - DNA, 15 bp, Homo sapiens
ctggtgaatggtgag

SEQ ID NO: 1183116 - DNA, 15 bp, Homo sapiens
gctggtgaatggtga

SEQ ID NO: 1183117 - DNA, 15 bp, Homo sapiens
ggctggtgaatggtg

SEQ ID NO: 1183118 - DNA, 15 bp, Homo sapiens
gggctggtgaatggt

SEQ ID NO: 1183119 - DNA, 15 bp, Homo sapiens
ggggctggtgaatgg

SEQ ID NO: 1183120 - DNA, 15 bp, Homo sapiens
cggggctggtgaatg

SEQ ID NO: 1183121 - DNA, 15 bp, Homo sapiens
acggggctggtgaat

SEQ ID NO: 1183122 - DNA, 15 bp, Homo sapiens
aacggggctggtgaa

SEQ ID NO: 1183123 - DNA, 15 bp, Homo sapiens
gaacggggctggtga

SEQ ID NO: 1183124 - DNA, 15 bp, Homo sapiens
agaacggggctggtg

SEQ ID NO: 1183125 - DNA, 15 bp, Homo sapiens
cagaacggggctggt

SEQ ID NO: 1183126 - DNA, 15 bp, Homo sapiens
tcagaacggggctgg

SEQ ID NO: 1183127 - DNA, 15 bp, Homo sapiens
ctcagaacggggctg

SEQ ID NO: 1183128 - DNA, 15 bp, Homo sapiens
gctcagaacggggct

SEQ ID NO: 1183129 - DNA, 15 bp, Homo sapiens
agctcagaacggggc

SEQ ID NO: 1183130 - DNA, 15 bp, Homo sapiens
aagctcagaacgggg

SEQ ID NO: 1183131 - DNA, 15 bp, Homo sapiens
aaagctcagaacggg

SEQ ID NO: 1183132 - DNA, 15 bp, Homo sapiens
aaaagctcagaacgg

SEQ ID NO: 1183133 - DNA, 15 bp, Homo sapiens
aaaaagctcagaacg

SEQ ID NO: 1183134 - DNA, 15 bp, Homo sapiens
gaaaaagctcagaac

SEQ ID NO: 1183135 - DNA, 15 bp, Homo sapiens
tgaaaaagctcagaa

SEQ ID NO: 1183136 - DNA, 15 bp, Homo sapiens
ctgaaaaagctcaga

SEQ ID NO: 1183137 - DNA, 15 bp, Homo sapiens
cctgaaaaagctcag

SEQ ID NO: 1183138 - DNA, 15 bp, Homo sapiens
acctgaaaaagctca

SEQ ID NO: 1183139 - DNA, 15 bp, Homo sapiens
tacctgaaaaagctc

SEQ ID NO: 1183140 - DNA, 15 bp, Homo sapiens
ttacctgaaaaagct

SEQ ID NO: 1183141 - DNA, 15 bp, Homo sapiens
cttacctgaaaaagc

SEQ ID NO: 1183142 - DNA, 15 bp, Homo sapiens
tcttacctgaaaaag

SEQ ID NO: 1183143 - DNA, 15 bp, Homo sapiens
ctcttacctgaaaaa

SEQ ID NO: 1183144 - DNA, 15 bp, Homo sapiens
cctcttacctgaaaa

SEQ ID NO: 1183145 - DNA, 15 bp, Homo sapiens
acctcttacctgaaa

SEQ ID NO: 1183146 - DNA, 15 bp, Homo sapiens
aacctcttacctgaa

SEQ ID NO: 1183147 - DNA, 15 bp, Homo sapiens
gaacctcttacctga

SEQ ID NO: 1183148 - DNA, 15 bp, Homo sapiens
tgaacctcttacctg

SEQ ID NO: 1183149 - DNA, 15 bp, Homo sapiens
ttgaacctcttacct

SEQ ID NO: 1183150 - DNA, 15 bp, Homo sapiens
gttgaacctcttacc

SEQ ID NO: 1183151 - DNA, 15 bp, Homo sapiens
agttgaacctcttac

SEQ ID NO: 1183152 - DNA, 15 bp, Homo sapiens
gagttgaacctctta

SEQ ID NO: 1183153 - DNA, 15 bp, Homo sapiens
cgagttgaacctctt

SEQ ID NO: 1183154 - DNA, 15 bp, Homo sapiens
acgagttgaacctct

SEQ ID NO: 1183155 - DNA, 15 bp, Homo sapiens
tacgagttgaacctc

SEQ ID NO: 1183156 - DNA, 15 bp, Homo sapiens
ttacgagttgaacct

SEQ ID NO: 1183157 - DNA, 15 bp, Homo sapiens
tttacgagttgaacc

SEQ ID NO: 1183158 - DNA, 15 bp, Homo sapiens
ctttacgagttgaac

SEQ ID NO: 1183159 - DNA, 15 bp, Homo sapiens
cctttacgagttgaa

SEQ ID NO: 1183160 - DNA, 15 bp, Homo sapiens
gcctttacgagttga

SEQ ID NO: 1183161 - DNA, 15 bp, Homo sapiens
ggcctttacgagttg

SEQ ID NO: 1183162 - DNA, 15 bp, Homo sapiens
cggcctttacgagtt

SEQ ID NO: 1183163 - DNA, 15 bp, Homo sapiens
ccggcctttacgagt

SEQ ID NO: 1183164 - DNA, 15 bp, Homo sapiens
cccggcctttacgag

SEQ ID NO: 1183165 - DNA, 15 bp, Homo sapiens
acccggcctttacga

SEQ ID NO: 1183166 - DNA, 15 bp, Homo sapiens
gacccggcctttacg

SEQ ID NO: 1183167 - DNA, 15 bp, Homo sapiens
agacccggcctttac

SEQ ID NO: 1183168 - DNA, 15 bp, Homo sapiens
tagacccggccttta

SEQ ID NO: 1183169 - DNA, 15 bp, Homo sapiens
atagacccggccttt

SEQ ID NO: 1183170 - DNA, 15 bp, Homo sapiens
catagacccggcctt

SEQ ID NO: 1183171 - DNA, 15 bp, Homo sapiens
ccatagacccggcct

SEQ ID NO: 1183172 - DNA, 15 bp, Homo sapiens
accatagacccggcc

SEQ ID NO: 1183173 - DNA, 15 bp, Homo sapiens
caccatagacccggc

SEQ ID NO: 1183174 - DNA, 15 bp, Homo sapiens
acaccatagacccgg

SEQ ID NO: 1183175 - DNA, 15 bp, Homo sapiens
cacaccatagacccg

SEQ ID NO: 1183176 - DNA, 15 bp, Homo sapiens
acacaccatagaccc

SEQ ID NO: 1183177 - DNA, 15 bp, Homo sapiens
aacacaccatagacc

SEQ ID NO: 1183178 - DNA, 15 bp, Homo sapiens
caacacaccatagac

SEQ ID NO: 1183179 - DNA, 15 bp, Homo sapiens
tcaacacaccataga

SEQ ID NO: 1183180 - DNA, 15 bp, Homo sapiens
ctcaacacaccatag

SEQ ID NO: 1183181 - DNA, 15 bp, Homo sapiens
gctcaacacaccata

SEQ ID NO: 1183182 - DNA, 15 bp, Homo sapiens
agctcaacacaccat

SEQ ID NO: 1183183 - DNA, 15 bp, Homo sapiens
cagctcaacacacca

SEQ ID NO: 1183184 - DNA, 15 bp, Homo sapiens
ccagctcaacacacc

SEQ ID NO: 1183185 - DNA, 15 bp, Homo sapiens
cccagctcaacacac

SEQ ID NO: 1183186 - DNA, 15 bp, Homo sapiens
tcccagctcaacaca

SEQ ID NO: 1183187 - DNA, 15 bp, Homo sapiens
ttcccagctcaacac

SEQ ID NO: 1183188 - DNA, 15 bp, Homo sapiens
attcccagctcaaca

SEQ ID NO: 1183189 - DNA, 15 bp, Homo sapiens
gattcccagctcaac

SEQ ID NO: 1183190 - DNA, 15 bp, Homo sapiens
tgattcccagctcaa

SEQ ID NO: 1183191 - DNA, 15 bp, Homo sapiens
gtgattcccagctca

SEQ ID NO: 1183192 - DNA, 15 bp, Homo sapiens
tgtgattcccagctc

SEQ ID NO: 1183193 - DNA, 15 bp, Homo sapiens
ctgtgattcccagct

SEQ ID NO: 1183194 - DNA, 15 bp, Homo sapiens
cctgtgattcccagc

SEQ ID NO: 1183195 - DNA, 15 bp, Homo sapiens
ccctgtgattcccag

SEQ ID NO: 1183196 - DNA, 15 bp, Homo sapiens
cccctgtgattccca

SEQ ID NO: 1183197 - DNA, 15 bp, Homo sapiens
gcccctgtgattccc

SEQ ID NO: 1183198 - DNA, 15 bp, Homo sapiens
tgcccctgtgattcc

SEQ ID NO: 1183199 - DNA, 15 bp, Homo sapiens
ctgcccctgtgattc

SEQ ID NO: 1183200 - DNA, 15 bp, Homo sapiens
cctgcccctgtgatt

SEQ ID NO: 1183201 - DNA, 15 bp, Homo sapiens
ccctgcccctgtgat

SEQ ID NO: 1183202 - DNA, 15 bp, Homo sapiens
cccctgcccctgtga

SEQ ID NO: 1183203 - DNA, 15 bp, Homo sapiens
gcccctgcccctgtg

SEQ ID NO: 1183204 - DNA, 15 bp, Homo sapiens
tgcccctgcccctgt

SEQ ID NO: 1183205 - DNA, 15 bp, Homo sapiens
ttgcccctgcccctg

SEQ ID NO: 1183206 - DNA, 15 bp, Homo sapiens
cttgcccctgcccct

SEQ ID NO: 1183207 - DNA, 15 bp, Homo sapiens
tcttgcccctgcccc

SEQ ID NO: 1183208 - DNA, 15 bp, Homo sapiens
atcttgcccctgccc

SEQ ID NO: 1183209 - DNA, 15 bp, Homo sapiens
aatcttgcccctgcc

SEQ ID NO: 1183210 - DNA, 15 bp, Homo sapiens
aaatcttgcccctgc

SEQ ID NO: 1183211 - DNA, 15 bp, Homo sapiens
caaatcttgcccctg

SEQ ID NO: 1183212 - DNA, 15 bp, Homo sapiens
acaaatcttgcccct

SEQ ID NO: 1183213 - DNA, 15 bp, Homo sapiens
tacaaatcttgcccc

SEQ ID NO: 1183214 - DNA, 15 bp, Homo sapiens
gtacaaatcttgccc

SEQ ID NO: 1183215 - DNA, 15 bp, Homo sapiens
ggtacaaatcttgcc

SEQ ID NO: 1183216 - DNA, 15 bp, Homo sapiens
tggtacaaatcttgc

SEQ ID NO: 1183217 - DNA, 15 bp, Homo sapiens
ctggtacaaatcttg

SEQ ID NO: 1183218 - DNA, 15 bp, Homo sapiens
actggtacaaatctt

SEQ ID NO: 1183219 - DNA, 15 bp, Homo sapiens
cactggtacaaatct

SEQ ID NO: 1183220 - DNA, 15 bp, Homo sapiens
ccactggtacaaatc

SEQ ID NO: 1183221 - DNA, 15 bp, Homo sapiens
gccactggtacaaat

SEQ ID NO: 1183222 - DNA, 15 bp, Homo sapiens
ggccactggtacaaa

SEQ ID NO: 1183223 - DNA, 15 bp, Homo sapiens
tggccactggtacaa

SEQ ID NO: 1183224 - DNA, 15 bp, Homo sapiens
ctggccactggtaca

SEQ ID NO: 1183225 - DNA, 15 bp, Homo sapiens
cctggccactggtac

SEQ ID NO: 1183226 - DNA, 15 bp, Homo sapiens
gcctggccactggta

SEQ ID NO: 1183227 - DNA, 15 bp, Homo sapiens
tgcctggccactggt

SEQ ID NO: 1183228 - DNA, 15 bp, Homo sapiens
gtgcctggccactgg

SEQ ID NO: 1183229 - DNA, 15 bp, Homo sapiens
tgtgcctggccactg

SEQ ID NO: 1183230 - DNA, 15 bp, Homo sapiens
ctgtgcctggccact

SEQ ID NO: 1183231 - DNA, 15 bp, Homo sapiens
actgtgcctggccac

SEQ ID NO: 1183232 - DNA, 15 bp, Homo sapiens
cactgtgcctggcca

SEQ ID NO: 1183233 - DNA, 15 bp, Homo sapiens
agtgtgagccactgt

SEQ ID NO: 1183234 - DNA, 15 bp, Homo sapiens
aagtgtgagccactg

SEQ ID NO: 1183235 - DNA, 15 bp, Homo sapiens
caagtgtgagccact

SEQ ID NO: 1183236 - DNA, 15 bp, Homo sapiens
acaagtgtgagccac

SEQ ID NO: 1183237 - DNA, 15 bp, Homo sapiens
tacaagtgtgagcca

SEQ ID NO: 1183238 - DNA, 15 bp, Homo sapiens
ttacaagtgtgagcc

SEQ ID NO: 1183239 - DNA, 15 bp, Homo sapiens
attacaagtgtgagc

SEQ ID NO: 1183240 - DNA, 15 bp, Homo sapiens
aattacaagtgtgag

SEQ ID NO: 1183241 - DNA, 15 bp, Homo sapiens
gaattacaagtgtga

SEQ ID NO: 1183242 - DNA, 15 bp, Homo sapiens
ggaattacaagtgtg

SEQ ID NO: 1183243 - DNA, 15 bp, Homo sapiens
tggaattacaagtgt

SEQ ID NO: 1183244 - DNA, 15 bp, Homo sapiens
ctggaattacaagtg

SEQ ID NO: 1183245 - DNA, 15 bp, Homo sapiens
gctggaattacaagt

SEQ ID NO: 1183246 - DNA, 15 bp, Homo sapiens
tgctggaattacaag

SEQ ID NO: 1183247 - DNA, 15 bp, Homo sapiens
gtgctggaattacaa

SEQ ID NO: 1183248 - DNA, 15 bp, Homo sapiens
ctcctcctgcctcag

SEQ ID NO: 1183249 - DNA, 15 bp, Homo sapiens
gctcctcctgcctca

SEQ ID NO: 1183250 - DNA, 15 bp, Homo sapiens
tgctcctcctgcctc

SEQ ID NO: 1183251 - DNA, 15 bp, Homo sapiens
gtgctcctcctgcct

SEQ ID NO: 1183252 - DNA, 15 bp, Homo sapiens
agtgctcctcctgcc

SEQ ID NO: 1183253 - DNA, 15 bp, Homo sapiens
aagtgctcctcctgc

SEQ ID NO: 1183254 - DNA, 15 bp, Homo sapiens
caagtgctcctcctg

SEQ ID NO: 1183255 - DNA, 15 bp, Homo sapiens
tcaagtgctcctcct

SEQ ID NO: 1183256 - DNA, 15 bp, Homo sapiens
ctcaagtgctcctcc

SEQ ID NO: 1183257 - DNA, 15 bp, Homo sapiens
cctcaagtgctcctc

SEQ ID NO: 1183258 - DNA, 15 bp, Homo sapiens
gcctcaagtgctcct

SEQ ID NO: 1183259 - DNA, 15 bp, Homo sapiens
ggcctcaagtgctcc

SEQ ID NO: 1183260 - DNA, 15 bp, Homo sapiens
tggcctcaagtgctc

SEQ ID NO: 1183261 - DNA, 15 bp, Homo sapiens
ctggcctcaagtgct

SEQ ID NO: 1183262 - DNA, 15 bp, Homo sapiens
cctggcctcaagtgc

SEQ ID NO: 1183263 - DNA, 15 bp, Homo sapiens
actcaaactcctggc

SEQ ID NO: 1183264 - DNA, 15 bp, Homo sapiens
gactcaaactcctgg

SEQ ID NO: 1183265 - DNA, 15 bp, Homo sapiens
ggactcaaactcctg

SEQ ID NO: 1183266 - DNA, 15 bp, Homo sapiens
tggactcaaactcct

SEQ ID NO: 1183267 - DNA, 15 bp, Homo sapiens
atggactcaaactcc

SEQ ID NO: 1183268 - DNA, 15 bp, Homo sapiens
gatggactcaaactc

SEQ ID NO: 1183269 - DNA, 15 bp, Homo sapiens
ggatggactcaaact

SEQ ID NO: 1183270 - DNA, 15 bp, Homo sapiens
aggatggactcaaac

SEQ ID NO: 1183271 - DNA, 15 bp, Homo sapiens
caggatggactcaaa

SEQ ID NO: 1183272 - DNA, 15 bp, Homo sapiens
tcaggatggactcaa

SEQ ID NO: 1183273 - DNA, 15 bp, Homo sapiens
ctcaggatggactca

SEQ ID NO: 1183274 - DNA, 15 bp, Homo sapiens
gctcaggatggactc

SEQ ID NO: 1183275 - DNA, 15 bp, Homo sapiens
tgctcaggatggact

SEQ ID NO: 1183276 - DNA, 15 bp, Homo sapiens
ttgctcaggatggac

SEQ ID NO: 1183277 - DNA, 15 bp, Homo sapiens
attgctcaggatgga

SEQ ID NO: 1183278 - DNA, 15 bp, Homo sapiens
tattgctcaggatgg

SEQ ID NO: 1183279 - DNA, 15 bp, Homo sapiens
ttattgctcaggatg

SEQ ID NO: 1183280 - DNA, 15 bp, Homo sapiens
tttattgctcaggat

SEQ ID NO: 1183281 - DNA, 15 bp, Homo sapiens
ctttattgctcagga

SEQ ID NO: 1183282 - DNA, 15 bp, Homo sapiens
actttattgctcagg

SEQ ID NO: 1183283 - DNA, 15 bp, Homo sapiens
cactttattgctcag

SEQ ID NO: 1183284 - DNA, 15 bp, Homo sapiens
tcactttattgctca

SEQ ID NO: 1183285 - DNA, 15 bp, Homo sapiens
ctcactttattgctc

SEQ ID NO: 1183286 - DNA, 15 bp, Homo sapiens
tctcactttattgct

SEQ ID NO: 1183287 - DNA, 15 bp, Homo sapiens
gtctcactttattgc

SEQ ID NO: 1183288 - DNA, 15 bp, Homo sapiens
agtctcactttattg

SEQ ID NO: 1183289 - DNA, 15 bp, Homo sapiens
gagtctcactttatt

SEQ ID NO: 1183290 - DNA, 15 bp, Homo sapiens
ggagtctcactttat

SEQ ID NO: 1183291 - DNA, 15 bp, Homo sapiens
gggagtctcacttta

SEQ ID NO: 1183292 - DNA, 15 bp, Homo sapiens
ggggagtctcacttt

SEQ ID NO: 1183293 - DNA, 15 bp, Homo sapiens
tggggagtctcactt

SEQ ID NO: 1183294 - DNA, 15 bp, Homo sapiens
atggggagtctcact

SEQ ID NO: 1183295 - DNA, 15 bp, Homo sapiens
gatggggagtctcac

SEQ ID NO: 1183296 - DNA, 15 bp, Homo sapiens
agatggggagtctca

SEQ ID NO: 1183297 - DNA, 15 bp, Homo sapiens
gagatggggagtctc

SEQ ID NO: 1183298 - DNA, 15 bp, Homo sapiens
agagatggggagtct

SEQ ID NO: 1183299 - DNA, 15 bp, Homo sapiens
tagagatggggagtc

SEQ ID NO: 1183300 - DNA, 15 bp, Homo sapiens
ttagagatggggagt

SEQ ID NO: 1183301 - DNA, 15 bp, Homo sapiens
tttagagatggggag

SEQ ID NO: 1183302 - DNA, 15 bp, Homo sapiens
ttttagagatgggga

SEQ ID NO: 1183303 - DNA, 15 bp, Homo sapiens
ctttttctttctttc

SEQ ID NO: 1183304 - DNA, 15 bp, Homo sapiens
tctttttctttcttt

SEQ ID NO: 1183305 - DNA, 15 bp, Homo sapiens
ttctttttctttctt

SEQ ID NO: 1183306 - DNA, 15 bp, Homo sapiens
atttttctttttctt

SEQ ID NO: 1183307 - DNA, 15 bp, Homo sapiens
aatttttctttttct

SEQ ID NO: 1183308 - DNA, 15 bp, Homo sapiens
taatttttctttttc

SEQ ID NO: 1183309 - DNA, 15 bp, Homo sapiens
ctaatttttcttttt

SEQ ID NO: 1183310 - DNA, 15 bp, Homo sapiens
gctaatttttctttt

SEQ ID NO: 1183311 - DNA, 15 bp, Homo sapiens
ggctaatttttcttt

SEQ ID NO: 1183312 - DNA, 15 bp, Homo sapiens
tggctaatttttctt

SEQ ID NO: 1183313 - DNA, 15 bp, Homo sapiens
ctggctaatttttct

SEQ ID NO: 1183314 - DNA, 15 bp, Homo sapiens
cctggctaatttttc

SEQ ID NO: 1183315 - DNA, 15 bp, Homo sapiens
tatgcaccaccatgc

SEQ ID NO: 1183316 - DNA, 15 bp, Homo sapiens
atatgcaccaccatg

SEQ ID NO: 1183317 - DNA, 15 bp, Homo sapiens
gatatgcaccaccat

SEQ ID NO: 1183318 - DNA, 15 bp, Homo sapiens
agatatgcaccacca

SEQ ID NO: 1183319 - DNA, 15 bp, Homo sapiens
cagatatgcaccacc

SEQ ID NO: 1183320 - DNA, 15 bp, Homo sapiens
acagatatgcaccac

SEQ ID NO: 1183321 - DNA, 15 bp, Homo sapiens
cacagatatgcacca

SEQ ID NO: 1183322 - DNA, 15 bp, Homo sapiens
ccacagatatgcacc

SEQ ID NO: 1183323 - DNA, 15 bp, Homo sapiens
accacagatatgcac

SEQ ID NO: 1183324 - DNA, 15 bp, Homo sapiens
gaccacagatatgca

SEQ ID NO: 1183325 - DNA, 15 bp, Homo sapiens
ggaccacagatatgc

SEQ ID NO: 1183326 - DNA, 15 bp, Homo sapiens
gggaccacagatatg

SEQ ID NO: 1183327 - DNA, 15 bp, Homo sapiens
tgggaccacagatat

SEQ ID NO: 1183328 - DNA, 15 bp, Homo sapiens
ctgggaccacagata

SEQ ID NO: 1183329 - DNA, 15 bp, Homo sapiens
agctgggaccacaga

SEQ ID NO: 1183330 - DNA, 15 bp, Homo sapiens
aagtagctgggacca

SEQ ID NO: 1183331 - DNA, 15 bp, Homo sapiens
acctcagccttccaa

SEQ ID NO: 1183332 - DNA, 15 bp, Homo sapiens
cacctcagccttcca

SEQ ID NO: 1183333 - DNA, 15 bp, Homo sapiens
tcacctcagccttcc

SEQ ID NO: 1183334 - DNA, 15 bp, Homo sapiens
ctcacctcagccttc

SEQ ID NO: 1183335 - DNA, 15 bp, Homo sapiens
tctcacctcagcctt

SEQ ID NO: 1183336 - DNA, 15 bp, Homo sapiens
agcgatcctctcacc

SEQ ID NO: 1183337 - DNA, 15 bp, Homo sapiens
aagcgatcctctcac

SEQ ID NO: 1183338 - DNA, 15 bp, Homo sapiens
caagcgatcctctca

SEQ ID NO: 1183339 - DNA, 15 bp, Homo sapiens
tcaagcgatcctctc

SEQ ID NO: 1183340 - DNA, 15 bp, Homo sapiens
ctcaagcgatcctct

SEQ ID NO: 1183341 - DNA, 15 bp, Homo sapiens
actgggctcaagcga

SEQ ID NO: 1183342 - DNA, 15 bp, Homo sapiens
tactgggctcaagcg

SEQ ID NO: 1183343 - DNA, 15 bp, Homo sapiens
ctactgggctcaagc

SEQ ID NO: 1183344 - DNA, 15 bp, Homo sapiens
cctactgggctcaag

SEQ ID NO: 1183345 - DNA, 15 bp, Homo sapiens
acctactgggctcaa

SEQ ID NO: 1183346 - DNA, 15 bp, Homo sapiens
gacctactgggctca

SEQ ID NO: 1183347 - DNA, 15 bp, Homo sapiens
tgacctactgggctc

SEQ ID NO: 1183348 - DNA, 15 bp, Homo sapiens
ttgacctactgggct

SEQ ID NO: 1183349 - DNA, 15 bp, Homo sapiens
cttgacctactgggc

SEQ ID NO: 1183350 - DNA, 15 bp, Homo sapiens
ccttgacctactggg

SEQ ID NO: 1183351 - DNA, 15 bp, Homo sapiens
gccttgacctactgg

SEQ ID NO: 1183352 - DNA, 15 bp, Homo sapiens
agccttgacctactg

SEQ ID NO: 1183353 - DNA, 15 bp, Homo sapiens
cagccttgacctact

SEQ ID NO: 1183354 - DNA, 15 bp, Homo sapiens
gcagccttgacctac

SEQ ID NO: 1183355 - DNA, 15 bp, Homo sapiens
tgcagccttgaccta

SEQ ID NO: 1183356 - DNA, 15 bp, Homo sapiens
ctgcagccttgacct

SEQ ID NO: 1183357 - DNA, 15 bp, Homo sapiens
cctgcagccttgacc

SEQ ID NO: 1183358 - DNA, 15 bp, Homo sapiens
ccctgcagccttgac

SEQ ID NO: 1183359 - DNA, 15 bp, Homo sapiens
tccctgcagccttga

SEQ ID NO: 1183360 - DNA, 15 bp, Homo sapiens
ctccctgcagccttg

SEQ ID NO: 1183361 - DNA, 15 bp, Homo sapiens
actccctgcagcctt

SEQ ID NO: 1183362 - DNA, 15 bp, Homo sapiens
gactccctgcagcct

SEQ ID NO: 1183363 - DNA, 15 bp, Homo sapiens
cgactccctgcagcc

SEQ ID NO: 1183364 - DNA, 15 bp, Homo sapiens
acgactccctgcagc

SEQ ID NO: 1183365 - DNA, 15 bp, Homo sapiens
cacgactccctgcag

SEQ ID NO: 1183366 - DNA, 15 bp, Homo sapiens
tcacgactccctgca

SEQ ID NO: 1183367 - DNA, 15 bp, Homo sapiens
atcacgactccctgc

SEQ ID NO: 1183368 - DNA, 15 bp, Homo sapiens
gatcacgactccctg

SEQ ID NO: 1183369 - DNA, 15 bp, Homo sapiens
tgatcacgactccct

SEQ ID NO: 1183370 - DNA, 15 bp, Homo sapiens
atgatcacgactccc

SEQ ID NO: 1183371 - DNA, 15 bp, Homo sapiens
catgatcacgactcc

SEQ ID NO: 1183372 - DNA, 15 bp, Homo sapiens
gcatgatcacgactc

SEQ ID NO: 1183373 - DNA, 15 bp, Homo sapiens
ggcatgatcacgact

SEQ ID NO: 1183374 - DNA, 15 bp, Homo sapiens
tggcatgatcacgac

SEQ ID NO: 1183375 - DNA, 15 bp, Homo sapiens
atggcatgatcacga

SEQ ID NO: 1183376 - DNA, 15 bp, Homo sapiens
aatggcatgatcacg

SEQ ID NO: 1183377 - DNA, 15 bp, Homo sapiens
caatggcatgatcac

SEQ ID NO: 1183378 - DNA, 15 bp, Homo sapiens
gcaatggcatgatca

SEQ ID NO: 1183379 - DNA, 15 bp, Homo sapiens
agtgcaatggcatga

SEQ ID NO: 1183380 - DNA, 15 bp, Homo sapiens
gagtgcaatggcatg

SEQ ID NO: 1183381 - DNA, 15 bp, Homo sapiens
agagtgcaatggcat

SEQ ID NO: 1183382 - DNA, 15 bp, Homo sapiens
tagagtgcaatggca

SEQ ID NO: 1183383 - DNA, 15 bp, Homo sapiens
ctagagtgcaatggc

SEQ ID NO: 1183384 - DNA, 15 bp, Homo sapiens
gctagagtgcaatgg

SEQ ID NO: 1183385 - DNA, 15 bp, Homo sapiens
ggctagagtgcaatg

SEQ ID NO: 1183386 - DNA, 15 bp, Homo sapiens
aggctagagtgcaat

SEQ ID NO: 1183387 - DNA, 15 bp, Homo sapiens
caggctagagtgcaa

SEQ ID NO: 1183388 - DNA, 15 bp, Homo sapiens
acccaggctagagtg

SEQ ID NO: 1183389 - DNA, 15 bp, Homo sapiens
cacccaggctagagt

SEQ ID NO: 1183390 - DNA, 15 bp, Homo sapiens
tcacccaggctagag

SEQ ID NO: 1183391 - DNA, 15 bp, Homo sapiens
gtcacccaggctaga

SEQ ID NO: 1183392 - DNA, 15 bp, Homo sapiens
tgtcacccaggctag

SEQ ID NO: 1183393 - DNA, 15 bp, Homo sapiens
cctctgtcacccagg

SEQ ID NO: 1183394 - DNA, 15 bp, Homo sapiens
tcctctgtcacccag

SEQ ID NO: 1183395 - DNA, 15 bp, Homo sapiens
ttcctctgtcaccca

SEQ ID NO: 1183396 - DNA, 15 bp, Homo sapiens
cttcctctgtcaccc

SEQ ID NO: 1183397 - DNA, 15 bp, Homo sapiens
tcttcctctgtcacc

SEQ ID NO: 1183398 - DNA, 15 bp, Homo sapiens
gtcttcctctgtcac

SEQ ID NO: 1183399 - DNA, 15 bp, Homo sapiens
ggtcttcctctgtca

SEQ ID NO: 1183400 - DNA, 15 bp, Homo sapiens
aggtcttcctctgtc

SEQ ID NO: 1183401 - DNA, 15 bp, Homo sapiens
gaggtcttcctctgt

SEQ ID NO: 1183402 - DNA, 15 bp, Homo sapiens
tgaggtcttcctctg

SEQ ID NO: 1183403 - DNA, 15 bp, Homo sapiens
atgaggtcttcctct

SEQ ID NO: 1183404 - DNA, 15 bp, Homo sapiens
gatgaggtcttcctc

SEQ ID NO: 1183405 - DNA, 15 bp, Homo sapiens
agatgaggtcttcct

SEQ ID NO: 1183406 - DNA, 15 bp, Homo sapiens
gagatgaggtcttcc

SEQ ID NO: 1183407 - DNA, 15 bp, Homo sapiens
tgagatgaggtcttc

SEQ ID NO: 1183408 - DNA, 15 bp, Homo sapiens
ttgagatgaggtctt

SEQ ID NO: 1183409 - DNA, 15 bp, Homo sapiens
tttgagatgaggtct

SEQ ID NO: 1183410 - DNA, 15 bp, Homo sapiens
gtttgagatgaggtc

SEQ ID NO: 1183411 - DNA, 15 bp, Homo sapiens
tgtttgagatgaggt

SEQ ID NO: 1183412 - DNA, 15 bp, Homo sapiens
ttgtttgagatgagg

SEQ ID NO: 1183413 - DNA, 15 bp, Homo sapiens
tttgtttgagatgag

SEQ ID NO: 1183414 - DNA, 15 bp, Homo sapiens
gtttgtttgagatga

SEQ ID NO: 1183415 - DNA, 15 bp, Homo sapiens
tgtttgtttgagatg

SEQ ID NO: 1183416 - DNA, 15 bp, Homo sapiens
ttgtttgtttgagat

SEQ ID NO: 1183417 - DNA, 15 bp, Homo sapiens
tttgtttgtttgaga

SEQ ID NO: 1183418 - DNA, 15 bp, Homo sapiens
gtttgtttgtttgag

SEQ ID NO: 1183419 - DNA, 15 bp, Homo sapiens
tgtttgtttgtttga

SEQ ID NO: 1183420 - DNA, 15 bp, Homo sapiens
gttttttgtttgttt

SEQ ID NO: 1183421 - DNA, 15 bp, Homo sapiens
ggttttttgtttgtt

SEQ ID NO: 1183422 - DNA, 15 bp, Homo sapiens
cggttttttgtttgt

SEQ ID NO: 1183423 - DNA, 15 bp, Homo sapiens
acggttttttgtttg

SEQ ID NO: 1183424 - DNA, 15 bp, Homo sapiens
aacggttttttgttt

SEQ ID NO: 1183425 - DNA, 15 bp, Homo sapiens
taacggttttttgtt

SEQ ID NO: 1183426 - DNA, 15 bp, Homo sapiens
ctaacggttttttgt

SEQ ID NO: 1183427 - DNA, 15 bp, Homo sapiens
actaacggttttttg

SEQ ID NO: 1183428 - DNA, 15 bp, Homo sapiens
cactaacggtttttt

SEQ ID NO: 1183429 - DNA, 15 bp, Homo sapiens
gcactaacggttttt

SEQ ID NO: 1183430 - DNA, 15 bp, Homo sapiens
agcactaacggtttt

SEQ ID NO: 1183431 - DNA, 15 bp, Homo sapiens
tagcactaacggttt

SEQ ID NO: 1183432 - DNA, 15 bp, Homo sapiens
ctagcactaacggtt

SEQ ID NO: 1183433 - DNA, 15 bp, Homo sapiens
tctagcactaacggt

SEQ ID NO: 1183434 - DNA, 15 bp, Homo sapiens
ctctagcactaacgg

SEQ ID NO: 1183435 - DNA, 15 bp, Homo sapiens
tctctagcactaacg

SEQ ID NO: 1183436 - DNA, 15 bp, Homo sapiens
ttctctagcactaac

SEQ ID NO: 1183437 - DNA, 15 bp, Homo sapiens
attctctagcactaa

SEQ ID NO: 1183438 - DNA, 15 bp, Homo sapiens
aattctctagcacta

SEQ ID NO: 1183439 - DNA, 15 bp, Homo sapiens
caattctctagcact

SEQ ID NO: 1183440 - DNA, 15 bp, Homo sapiens
ccaattctctagcac

SEQ ID NO: 1183441 - DNA, 15 bp, Homo sapiens
tccaattctctagca

SEQ ID NO: 1183442 - DNA, 15 bp, Homo sapiens
ctccaattctctagc

SEQ ID NO: 1183443 - DNA, 15 bp, Homo sapiens
gctccaattctctag

SEQ ID NO: 1183444 - DNA, 15 bp, Homo sapiens
ggctccaattctcta

SEQ ID NO: 1183445 - DNA, 15 bp, Homo sapiens
tggctccaattctct

SEQ ID NO: 1183446 - DNA, 15 bp, Homo sapiens
ttggctccaattctc

SEQ ID NO: 1183447 - DNA, 15 bp, Homo sapiens
gttggctccaattct

SEQ ID NO: 1183448 - DNA, 15 bp, Homo sapiens
tgttggctccaattc

SEQ ID NO: 1183449 - DNA, 15 bp, Homo sapiens
ctgttggctccaatt

SEQ ID NO: 1183450 - DNA, 15 bp, Homo sapiens
gctgttggctccaat

SEQ ID NO: 1183451 - DNA, 15 bp, Homo sapiens
agctgttggctccaa

SEQ ID NO: 1183452 - DNA, 15 bp, Homo sapiens
gagctgttggctcca

SEQ ID NO: 1183453 - DNA, 15 bp, Homo sapiens
ggagctgttggctcc

SEQ ID NO: 1183454 - DNA, 15 bp, Homo sapiens
aggagctgttggctc

SEQ ID NO: 1183455 - DNA, 15 bp, Homo sapiens
caggagctgttggct

SEQ ID NO: 1183456 - DNA, 15 bp, Homo sapiens
tcaggagctgttggc

SEQ ID NO: 1183457 - DNA, 15 bp, Homo sapiens
ctcaggagctgttgg

SEQ ID NO: 1183458 - DNA, 15 bp, Homo sapiens
tctcaggagctgttg

SEQ ID NO: 1183459 - DNA, 15 bp, Homo sapiens
ctctcaggagctgtt

SEQ ID NO: 1183460 - DNA, 15 bp, Homo sapiens
cctctcaggagctgt

SEQ ID NO: 1183461 - DNA, 15 bp, Homo sapiens
ccctctcaggagctg

SEQ ID NO: 1183462 - DNA, 15 bp, Homo sapiens
cccctctcaggagct

SEQ ID NO: 1183463 - DNA, 15 bp, Homo sapiens
tcccctctcaggagc

SEQ ID NO: 1183464 - DNA, 15 bp, Homo sapiens
ttcccctctcaggag

SEQ ID NO: 1183465 - DNA, 15 bp, Homo sapiens
cttcccctctcagga

SEQ ID NO: 1183466 - DNA, 15 bp, Homo sapiens
tcttcccctctcagg

SEQ ID NO: 1183467 - DNA, 15 bp, Homo sapiens
gctcttcccctctca

SEQ ID NO: 1183468 - DNA, 15 bp, Homo sapiens
tgctcttcccctctc

SEQ ID NO: 1183469 - DNA, 15 bp, Homo sapiens
ttgctcttcccctct

SEQ ID NO: 1183470 - DNA, 15 bp, Homo sapiens
tttgctcttcccctc

SEQ ID NO: 1183471 - DNA, 15 bp, Homo sapiens
ctttgctcttcccct

SEQ ID NO: 1183472 - DNA, 15 bp, Homo sapiens
cctttgctcttcccc

SEQ ID NO: 1183473 - DNA, 15 bp, Homo sapiens
tcctttgctcttccc

SEQ ID NO: 1183474 - DNA, 15 bp, Homo sapiens
atcctttgctcttcc

SEQ ID NO: 1183475 - DNA, 15 bp, Homo sapiens
catcctttgctcttc

SEQ ID NO: 1183476 - DNA, 15 bp, Homo sapiens
tcatcctttgctctt

SEQ ID NO: 1183477 - DNA, 15 bp, Homo sapiens
ttcatcctttgctct

SEQ ID NO: 1183478 - DNA, 15 bp, Homo sapiens
tttcatcctttgctc

SEQ ID NO: 1183479 - DNA, 15 bp, Homo sapiens
ttttcatcctttgct

SEQ ID NO: 1183480 - DNA, 15 bp, Homo sapiens
gttttcatcctttgc

SEQ ID NO: 1183481 - DNA, 15 bp, Homo sapiens
agttttcatcctttg

SEQ ID NO: 1183482 - DNA, 15 bp, Homo sapiens
gagttttcatccttt

SEQ ID NO: 1183483 - DNA, 15 bp, Homo sapiens
tgagttttcatcctt

SEQ ID NO: 1183484 - DNA, 15 bp, Homo sapiens
gtgagttttcatcct

SEQ ID NO: 1183485 - DNA, 15 bp, Homo sapiens
agtgagttttcatcc

SEQ ID NO: 1183486 - DNA, 15 bp, Homo sapiens
aagtgagttttcatc

SEQ ID NO: 1183487 - DNA, 15 bp, Homo sapiens
gaagtgagttttcat

SEQ ID NO: 1183488 - DNA, 15 bp, Homo sapiens
agaagtgagttttca

SEQ ID NO: 1183489 - DNA, 15 bp, Homo sapiens
aagaagtgagttttc

SEQ ID NO: 1183490 - DNA, 15 bp, Homo sapiens
aaagaagtgagtttt

SEQ ID NO: 1183491 - DNA, 15 bp, Homo sapiens
gaaagaagtgagttt

SEQ ID NO: 1183492 - DNA, 15 bp, Homo sapiens
tgaaagaagtgagtt

SEQ ID NO: 1183493 - DNA, 15 bp, Homo sapiens
ctgaaagaagtgagt

SEQ ID NO: 1183494 - DNA, 15 bp, Homo sapiens
gctgaaagaagtgag

SEQ ID NO: 1183495 - DNA, 15 bp, Homo sapiens
tgctgaaagaagtga

SEQ ID NO: 1183496 - DNA, 15 bp, Homo sapiens
gtgctgaaagaagtg

SEQ ID NO: 1183497 - DNA, 15 bp, Homo sapiens
ggtgctgaaagaagt

SEQ ID NO: 1183498 - DNA, 15 bp, Homo sapiens
aggtgctgaaagaag

SEQ ID NO: 1183499 - DNA, 15 bp, Homo sapiens
taggtgctgaaagaa

SEQ ID NO: 1183500 - DNA, 15 bp, Homo sapiens
gtaggtgctgaaaga

SEQ ID NO: 1183501 - DNA, 15 bp, Homo sapiens
ggtaggtgctgaaag

SEQ ID NO: 1183502 - DNA, 15 bp, Homo sapiens
tggtaggtgctgaaa

SEQ ID NO: 1183503 - DNA, 15 bp, Homo sapiens
atggtaggtgctgaa

SEQ ID NO: 1183504 - DNA, 15 bp, Homo sapiens
catggtaggtgctga

SEQ ID NO: 1183505 - DNA, 15 bp, Homo sapiens
acatggtaggtgctg

SEQ ID NO: 1183506 - DNA, 15 bp, Homo sapiens
aacatggtaggtgct

SEQ ID NO: 1183507 - DNA, 15 bp, Homo sapiens
gaacatggtaggtgc

SEQ ID NO: 1183508 - DNA, 15 bp, Homo sapiens
ggaacatggtaggtg

SEQ ID NO: 1183509 - DNA, 15 bp, Homo sapiens
tggaacatggtaggt

SEQ ID NO: 1183510 - DNA, 15 bp, Homo sapiens
ttggaacatggtagg

SEQ ID NO: 1183511 - DNA, 15 bp, Homo sapiens
tttggaacatggtag

SEQ ID NO: 1183512 - DNA, 15 bp, Homo sapiens
atttggaacatggta

SEQ ID NO: 1183513 - DNA, 15 bp, Homo sapiens
tatttggaacatggt

SEQ ID NO: 1183514 - DNA, 15 bp, Homo sapiens
gtatttggaacatgg

SEQ ID NO: 1183515 - DNA, 15 bp, Homo sapiens
agtatttggaacatg

SEQ ID NO: 1183516 - DNA, 15 bp, Homo sapiens
aagtatttggaacat

SEQ ID NO: 1183517 - DNA, 15 bp, Homo sapiens
aaagtatttggaaca

SEQ ID NO: 1183518 - DNA, 15 bp, Homo sapiens
gaaagtatttggaac

SEQ ID NO: 1183519 - DNA, 15 bp, Homo sapiens
cagaaagtatttgga

SEQ ID NO: 1183520 - DNA, 15 bp, Homo sapiens
acagaaagtatttgg

SEQ ID NO: 1183521 - DNA, 15 bp, Homo sapiens
tacagaaagtatttg

SEQ ID NO: 1183522 - DNA, 15 bp, Homo sapiens
gtacagaaagtattt

SEQ ID NO: 1183523 - DNA, 15 bp, Homo sapiens
tgtacagaaagtatt

SEQ ID NO: 1183524 - DNA, 15 bp, Homo sapiens
atgtacagaaagtat

SEQ ID NO: 1183525 - DNA, 15 bp, Homo sapiens
tatgtacagaaagta

SEQ ID NO: 1183526 - DNA, 15 bp, Homo sapiens
ctatgtacagaaagt

SEQ ID NO: 1183527 - DNA, 15 bp, Homo sapiens
gctatgtacagaaag

SEQ ID NO: 1183528 - DNA, 15 bp, Homo sapiens
agctatgtacagaaa

SEQ ID NO: 1183529 - DNA, 15 bp, Homo sapiens
gagctatgtacagaa

SEQ ID NO: 1183530 - DNA, 15 bp, Homo sapiens
tgagctatgtacaga

SEQ ID NO: 1183531 - DNA, 15 bp, Homo sapiens
atgagctatgtacag

SEQ ID NO: 1183532 - DNA, 15 bp, Homo sapiens
aatgagctatgtaca

SEQ ID NO: 1183533 - DNA, 15 bp, Homo sapiens
aaatgagctatgtac

SEQ ID NO: 1183534 - DNA, 15 bp, Homo sapiens
gaaatgagctatgta

SEQ ID NO: 1183535 - DNA, 15 bp, Homo sapiens
tgaaatgagctatgt

SEQ ID NO: 1183536 - DNA, 15 bp, Homo sapiens
atgaaatgagctatg

SEQ ID NO: 1183537 - DNA, 15 bp, Homo sapiens
gatgaaatgagctat

SEQ ID NO: 1183538 - DNA, 15 bp, Homo sapiens
agatgaaatgagcta

SEQ ID NO: 1183539 - DNA, 15 bp, Homo sapiens
cagatgaaatgagct

SEQ ID NO: 1183540 - DNA, 15 bp, Homo sapiens
gcagatgaaatgagc

SEQ ID NO: 1183541 - DNA, 15 bp, Homo sapiens
tgcagatgaaatgag

SEQ ID NO: 1183542 - DNA, 15 bp, Homo sapiens
gtgcagatgaaatga

SEQ ID NO: 1183543 - DNA, 15 bp, Homo sapiens
tgtgcagatgaaatg

SEQ ID NO: 1183544 - DNA, 15 bp, Homo sapiens
ttgtgcagatgaaat

SEQ ID NO: 1183545 - DNA, 15 bp, Homo sapiens
gttgtgcagatgaaa

SEQ ID NO: 1183546 - DNA, 15 bp, Homo sapiens
tgttgtgcagatgaa

SEQ ID NO: 1183547 - DNA, 15 bp, Homo sapiens
gtgttgtgcagatga

SEQ ID NO: 1183548 - DNA, 15 bp, Homo sapiens
agtgttgtgcagatg

SEQ ID NO: 1183549 - DNA, 15 bp, Homo sapiens
gagtgttgtgcagat

SEQ ID NO: 1183550 - DNA, 15 bp, Homo sapiens
ggagtgttgtgcaga

SEQ ID NO: 1183551 - DNA, 15 bp, Homo sapiens
aggagtgttgtgcag

SEQ ID NO: 1183552 - DNA, 15 bp, Homo sapiens
taggagtgttgtgca

SEQ ID NO: 1183553 - DNA, 15 bp, Homo sapiens
ataggagtgttgtgc

SEQ ID NO: 1183554 - DNA, 15 bp, Homo sapiens
cataggagtgttgtg

SEQ ID NO: 1183555 - DNA, 15 bp, Homo sapiens
tcataggagtgttgt

SEQ ID NO: 1183556 - DNA, 15 bp, Homo sapiens
ctcataggagtgttg

SEQ ID NO: 1183557 - DNA, 15 bp, Homo sapiens
cctcataggagtgtt

SEQ ID NO: 1183558 - DNA, 15 bp, Homo sapiens
acctcataggagtgt

SEQ ID NO: 1183559 - DNA, 15 bp, Homo sapiens
cacctcataggagtg

SEQ ID NO: 1183560 - DNA, 15 bp, Homo sapiens
acacctcataggagt

SEQ ID NO: 1183561 - DNA, 15 bp, Homo sapiens
cacacctcataggag

SEQ ID NO: 1183562 - DNA, 15 bp, Homo sapiens
acacacctcatagga

SEQ ID NO: 1183563 - DNA, 15 bp, Homo sapiens
aacacacctcatagg

SEQ ID NO: 1183564 - DNA, 15 bp, Homo sapiens
aaacacacctcatag

SEQ ID NO: 1183565 - DNA, 15 bp, Homo sapiens
gaaacacacctcata

SEQ ID NO: 1183566 - DNA, 15 bp, Homo sapiens
tgaaacacacctcat

SEQ ID NO: 1183567 - DNA, 15 bp, Homo sapiens
ctgaaacacacctca

SEQ ID NO: 1183568 - DNA, 15 bp, Homo sapiens
actgaaacacacctc

SEQ ID NO: 1183569 - DNA, 15 bp, Homo sapiens
cactgaaacacacct

SEQ ID NO: 1183570 - DNA, 15 bp, Homo sapiens
acactgaaacacacc

SEQ ID NO: 1183571 - DNA, 15 bp, Homo sapiens
tacactgaaacacac

SEQ ID NO: 1183572 - DNA, 15 bp, Homo sapiens
atacactgaaacaca

SEQ ID NO: 1183573 - DNA, 15 bp, Homo sapiens
aatacactgaaacac

SEQ ID NO: 1183574 - DNA, 15 bp, Homo sapiens
gaatacactgaaaca

SEQ ID NO: 1183575 - DNA, 15 bp, Homo sapiens
tgaatacactgaaac

SEQ ID NO: 1183576 - DNA, 15 bp, Homo sapiens
gtgaatacactgaaa

SEQ ID NO: 1183577 - DNA, 15 bp, Homo sapiens
ggtgaatacactgaa

SEQ ID NO: 1183578 - DNA, 15 bp, Homo sapiens
aggtgaatacactga

SEQ ID NO: 1183579 - DNA, 15 bp, Homo sapiens
aaggtgaatacactg

SEQ ID NO: 1183580 - DNA, 15 bp, Homo sapiens
taaggtgaatacact

SEQ ID NO: 1183581 - DNA, 15 bp, Homo sapiens
gtaaggtgaatacac

SEQ ID NO: 1183582 - DNA, 15 bp, Homo sapiens
tgtaaggtgaataca

SEQ ID NO: 1183583 - DNA, 15 bp, Homo sapiens
ctgtaaggtgaatac

SEQ ID NO: 1183584 - DNA, 15 bp, Homo sapiens
tctgtaaggtgaata

SEQ ID NO: 1183585 - DNA, 15 bp, Homo sapiens
ctctgtaaggtgaat

SEQ ID NO: 1183586 - DNA, 15 bp, Homo sapiens
cctctgtaaggtgaa

SEQ ID NO: 1183587 - DNA, 15 bp, Homo sapiens
tcctctgtaaggtga

SEQ ID NO: 1183588 - DNA, 15 bp, Homo sapiens
ttcctctgtaaggtg

SEQ ID NO: 1183589 - DNA, 15 bp, Homo sapiens
tttcctctgtaaggt

SEQ ID NO: 1183590 - DNA, 15 bp, Homo sapiens
ttttcctctgtaagg

SEQ ID NO: 1183591 - DNA, 15 bp, Homo sapiens
cttttcctctgtaag

SEQ ID NO: 1183592 - DNA, 15 bp, Homo sapiens
tcttttcctctgtaa

SEQ ID NO: 1183593 - DNA, 15 bp, Homo sapiens
ctcttttcctctgta

SEQ ID NO: 1183594 - DNA, 15 bp, Homo sapiens
actcttttcctctgt

SEQ ID NO: 1183595 - DNA, 15 bp, Homo sapiens
cactcttttcctctg

SEQ ID NO: 1183596 - DNA, 15 bp, Homo sapiens
tcactcttttcctct

SEQ ID NO: 1183597 - DNA, 15 bp, Homo sapiens
ttcactcttttcctc

SEQ ID NO: 1183598 - DNA, 15 bp, Homo sapiens
tttcactcttttcct

SEQ ID NO: 1183599 - DNA, 15 bp, Homo sapiens
gtttcactcttttcc

SEQ ID NO: 1183600 - DNA, 15 bp, Homo sapiens
agtttcactcttttc

SEQ ID NO: 1183601 - DNA, 15 bp, Homo sapiens
aagtttcactctttt

SEQ ID NO: 1183602 - DNA, 15 bp, Homo sapiens
taagtttcactcttt

SEQ ID NO: 1183603 - DNA, 15 bp, Homo sapiens
ctaagtttcactctt

SEQ ID NO: 1183604 - DNA, 15 bp, Homo sapiens
gctaagtttcactct

SEQ ID NO: 1183605 - DNA, 15 bp, Homo sapiens
tgctaagtttcactc

SEQ ID NO: 1183606 - DNA, 15 bp, Homo sapiens
ttgctaagtttcact

SEQ ID NO: 1183607 - DNA, 15 bp, Homo sapiens
attgctaagtttcac

SEQ ID NO: 1183608 - DNA, 15 bp, Homo sapiens
cattgctaagtttca

SEQ ID NO: 1183609 - DNA, 15 bp, Homo sapiens
tcattgctaagtttc

SEQ ID NO: 1183610 - DNA, 15 bp, Homo sapiens
atcattgctaagttt

SEQ ID NO: 1183611 - DNA, 15 bp, Homo sapiens
aatcattgctaagtt

SEQ ID NO: 1183612 - DNA, 15 bp, Homo sapiens
gaatcattgctaagt

SEQ ID NO: 1183613 - DNA, 15 bp, Homo sapiens
tgaatcattgctaag

SEQ ID NO: 1183614 - DNA, 15 bp, Homo sapiens
ttgaatcattgctaa

SEQ ID NO: 1183615 - DNA, 15 bp, Homo sapiens
tttgaatcattgcta

SEQ ID NO: 1183616 - DNA, 15 bp, Homo sapiens
ttttgaatcattgct

SEQ ID NO: 1183617 - DNA, 15 bp, Homo sapiens
attttgaatcattgc

SEQ ID NO: 1183618 - DNA, 15 bp, Homo sapiens
aattttgaatcattg

SEQ ID NO: 1183619 - DNA, 15 bp, Homo sapiens
caattttgaatcatt

SEQ ID NO: 1183620 - DNA, 15 bp, Homo sapiens
tcaattttgaatcat

SEQ ID NO: 1183621 - DNA, 15 bp, Homo sapiens
atcaattttgaatca

SEQ ID NO: 1183622 - DNA, 15 bp, Homo sapiens
tatcaattttgaatc

SEQ ID NO: 1183623 - DNA, 15 bp, Homo sapiens
ctatcaattttgaat

SEQ ID NO: 1183624 - DNA, 15 bp, Homo sapiens
actatcaattttgaa

SEQ ID NO: 1183625 - DNA, 15 bp, Homo sapiens
aactatcaattttga

SEQ ID NO: 1183626 - DNA, 15 bp, Homo sapiens
caactatcaattttg

SEQ ID NO: 1183627 - DNA, 15 bp, Homo sapiens
ccaactatcaatttt

SEQ ID NO: 1183628 - DNA, 15 bp, Homo sapiens
cccaactatcaattt

SEQ ID NO: 1183629 - DNA, 15 bp, Homo sapiens
gcccaactatcaatt

SEQ ID NO: 1183630 - DNA, 15 bp, Homo sapiens
cgcccaactatcaat

SEQ ID NO: 1183631 - DNA, 15 bp, Homo sapiens
acgcccaactatcaa

SEQ ID NO: 1183632 - DNA, 15 bp, Homo sapiens
cacgcccaactatca

SEQ ID NO: 1183633 - DNA, 15 bp, Homo sapiens
ccacgcccaactatc

SEQ ID NO: 1183634 - DNA, 15 bp, Homo sapiens
accacgcccaactat

SEQ ID NO: 1183635 - DNA, 15 bp, Homo sapiens
accaccacgcccaac

SEQ ID NO: 1183636 - DNA, 15 bp, Homo sapiens
caccaccacgcccaa

SEQ ID NO: 1183637 - DNA, 15 bp, Homo sapiens
acaccaccacgccca

SEQ ID NO: 1183638 - DNA, 15 bp, Homo sapiens
cacaccaccacgccc

SEQ ID NO: 1183639 - DNA, 15 bp, Homo sapiens
gcacaccaccacgcc

SEQ ID NO: 1183640 - DNA, 15 bp, Homo sapiens
cgcacaccaccacgc

SEQ ID NO: 1183641 - DNA, 15 bp, Homo sapiens
gcgcacaccaccacg

SEQ ID NO: 1183642 - DNA, 15 bp, Homo sapiens
ggcgcacaccaccac

SEQ ID NO: 1183643 - DNA, 15 bp, Homo sapiens
aggcgcacaccacca

SEQ ID NO: 1183644 - DNA, 15 bp, Homo sapiens
caggcgcacaccacc

SEQ ID NO: 1183645 - DNA, 15 bp, Homo sapiens
acaggcgcacaccac

SEQ ID NO: 1183646 - DNA, 15 bp, Homo sapiens
tacaggcgcacacca

SEQ ID NO: 1183647 - DNA, 15 bp, Homo sapiens
ttacaggcgcacacc

SEQ ID NO: 1183648 - DNA, 15 bp, Homo sapiens
attacaggcgcacac

SEQ ID NO: 1183649 - DNA, 15 bp, Homo sapiens
gattacaggcgcaca

SEQ ID NO: 1183650 - DNA, 15 bp, Homo sapiens
ggattacaggcgcac

SEQ ID NO: 1183651 - DNA, 15 bp, Homo sapiens
gggattacaggcgca

SEQ ID NO: 1183652 - DNA, 15 bp, Homo sapiens
ttcccgaatagctgg

SEQ ID NO: 1183653 - DNA, 15 bp, Homo sapiens
cttcccgaatagctg

SEQ ID NO: 1183654 - DNA, 15 bp, Homo sapiens
gcttcccgaatagct

SEQ ID NO: 1183655 - DNA, 15 bp, Homo sapiens
agcttcccgaatagc

SEQ ID NO: 1183656 - DNA, 15 bp, Homo sapiens
cagcttcccgaatag

SEQ ID NO: 1183657 - DNA, 15 bp, Homo sapiens
tcagcttcccgaata

SEQ ID NO: 1183658 - DNA, 15 bp, Homo sapiens
ctcagcttcccgaat

SEQ ID NO: 1183659 - DNA, 15 bp, Homo sapiens
cctcagcttcccgaa

SEQ ID NO: 1183660 - DNA, 15 bp, Homo sapiens
gcctcagcttcccga

SEQ ID NO: 1183661 - DNA, 15 bp, Homo sapiens
tgcctcagcttcccg

SEQ ID NO: 1183662 - DNA, 15 bp, Homo sapiens
ctgcctcagcttccc

SEQ ID NO: 1183663 - DNA, 15 bp, Homo sapiens
ctcctgcctcagctt

SEQ ID NO: 1183664 - DNA, 15 bp, Homo sapiens
aacctcctgggttca

SEQ ID NO: 1183665 - DNA, 15 bp, Homo sapiens
caacctcctgggttc

SEQ ID NO: 1183666 - DNA, 15 bp, Homo sapiens
gcaacctcctgggtt

SEQ ID NO: 1183667 - DNA, 15 bp, Homo sapiens
tgcaacctcctgggt

SEQ ID NO: 1183668 - DNA, 15 bp, Homo sapiens
ctgcaacctcctggg

SEQ ID NO: 1183669 - DNA, 15 bp, Homo sapiens
tctgcaacctcctgg

SEQ ID NO: 1183670 - DNA, 15 bp, Homo sapiens
ctctgcaacctcctg

SEQ ID NO: 1183671 - DNA, 15 bp, Homo sapiens
tctctgcaacctcct

SEQ ID NO: 1183672 - DNA, 15 bp, Homo sapiens
ctctctgcaacctcc

SEQ ID NO: 1183673 - DNA, 15 bp, Homo sapiens
gctctctgcaacctc

SEQ ID NO: 1183674 - DNA, 15 bp, Homo sapiens
agctctctgcaacct

SEQ ID NO: 1183675 - DNA, 15 bp, Homo sapiens
cagctctctgcaacc

SEQ ID NO: 1183676 - DNA, 15 bp, Homo sapiens
ccagctctctgcaac

SEQ ID NO: 1183677 - DNA, 15 bp, Homo sapiens
cccagctctctgcaa

SEQ ID NO: 1183678 - DNA, 15 bp, Homo sapiens
tcccagctctctgca

SEQ ID NO: 1183679 - DNA, 15 bp, Homo sapiens
atcccagctctctgc

SEQ ID NO: 1183680 - DNA, 15 bp, Homo sapiens
aatcccagctctctg

SEQ ID NO: 1183681 - DNA, 15 bp, Homo sapiens
caatcccagctctct

SEQ ID NO: 1183682 - DNA, 15 bp, Homo sapiens
acaatcccagctctc

SEQ ID NO: 1183683 - DNA, 15 bp, Homo sapiens
cacaatcccagctct

SEQ ID NO: 1183684 - DNA, 15 bp, Homo sapiens
gcacaatcccagctc

SEQ ID NO: 1183685 - DNA, 15 bp, Homo sapiens
ggcacaatcccagct

SEQ ID NO: 1183686 - DNA, 15 bp, Homo sapiens
tggcacaatcccagc

SEQ ID NO: 1183687 - DNA, 15 bp, Homo sapiens
gtggcacaatcccag

SEQ ID NO: 1183688 - DNA, 15 bp, Homo sapiens
agtggcacaatccca

SEQ ID NO: 1183689 - DNA, 15 bp, Homo sapiens
cagtggcacaatccc

SEQ ID NO: 1183690 - DNA, 15 bp, Homo sapiens
gcagtggcacaatcc

SEQ ID NO: 1183691 - DNA, 15 bp, Homo sapiens
atctcactctgtcac

SEQ ID NO: 1183692 - DNA, 15 bp, Homo sapiens
aatctcactctgtca

SEQ ID NO: 1183693 - DNA, 15 bp, Homo sapiens
gaatctcactctgtc

SEQ ID NO: 1183694 - DNA, 15 bp, Homo sapiens
cgaatctcactctgt

SEQ ID NO: 1183695 - DNA, 15 bp, Homo sapiens
ccgaatctcactctg

SEQ ID NO: 1183696 - DNA, 15 bp, Homo sapiens
accgaatctcactct

SEQ ID NO: 1183697 - DNA, 15 bp, Homo sapiens
gaccgaatctcactc

SEQ ID NO: 1183698 - DNA, 15 bp, Homo sapiens
agaccgaatctcact

SEQ ID NO: 1183699 - DNA, 15 bp, Homo sapiens
gagaccgaatctcac

SEQ ID NO: 1183700 - DNA, 15 bp, Homo sapiens
tgagaccgaatctca

SEQ ID NO: 1183701 - DNA, 15 bp, Homo sapiens
ctgagaccgaatctc

SEQ ID NO: 1183702 - DNA, 15 bp, Homo sapiens
tctgagaccgaatct

SEQ ID NO: 1183703 - DNA, 15 bp, Homo sapiens
ttctgagaccgaatc

SEQ ID NO: 1183704 - DNA, 15 bp, Homo sapiens
tttctgagaccgaat

SEQ ID NO: 1183705 - DNA, 15 bp, Homo sapiens
gtttctgagaccgaa

SEQ ID NO: 1183706 - DNA, 15 bp, Homo sapiens
tgtttctgagaccga

SEQ ID NO: 1183707 - DNA, 15 bp, Homo sapiens
ttgtttctgagaccg

SEQ ID NO: 1183708 - DNA, 15 bp, Homo sapiens
gttgtttctgagacc

SEQ ID NO: 1183709 - DNA, 15 bp, Homo sapiens
tgttgtttctgagac

SEQ ID NO: 1183710 - DNA, 15 bp, Homo sapiens
ttgttgtttctgaga

SEQ ID NO: 1183711 - DNA, 15 bp, Homo sapiens
gttgttgtttctgag

SEQ ID NO: 1183712 - DNA, 15 bp, Homo sapiens
tgttgttgtttctga

SEQ ID NO: 1183713 - DNA, 15 bp, Homo sapiens
ttgttgttgtttctg

SEQ ID NO: 1183714 - DNA, 15 bp, Homo sapiens
gttgttgttgtttct

SEQ ID NO: 1183715 - DNA, 15 bp, Homo sapiens
tgttgttgttgtttc

SEQ ID NO: 1183716 - DNA, 15 bp, Homo sapiens
gttgttgttgttgtt

SEQ ID NO: 1183717 - DNA, 15 bp, Homo sapiens
tgttgttgttgttgt

SEQ ID NO: 1183718 - DNA, 15 bp, Homo sapiens
attgttgttgttgtt

SEQ ID NO: 1183719 - DNA, 15 bp, Homo sapiens
tattgttgttgttgt

SEQ ID NO: 1183720 - DNA, 15 bp, Homo sapiens
ttattgttgttgttg

SEQ ID NO: 1183721 - DNA, 15 bp, Homo sapiens
gttattgttgttgtt

SEQ ID NO: 1183722 - DNA, 15 bp, Homo sapiens
tgttattgttgttgt

SEQ ID NO: 1183723 - DNA, 15 bp, Homo sapiens
ttgttattgttgttg

SEQ ID NO: 1183724 - DNA, 15 bp, Homo sapiens
gttgttattgttgtt

SEQ ID NO: 1183725 - DNA, 15 bp, Homo sapiens
tgttgttattgttgt

SEQ ID NO: 1183726 - DNA, 15 bp, Homo sapiens
ttgttgttattgttg

SEQ ID NO: 1183727 - DNA, 15 bp, Homo sapiens
tttgttgttattgtt

SEQ ID NO: 1183728 - DNA, 15 bp, Homo sapiens
ttttgttgttattgt

SEQ ID NO: 1183729 - DNA, 15 bp, Homo sapiens
gttttgttgttattg

SEQ ID NO: 1183730 - DNA, 15 bp, Homo sapiens
tgttttgttgttatt

SEQ ID NO: 1183731 - DNA, 15 bp, Homo sapiens
ttgttttgttgttat

SEQ ID NO: 1183732 - DNA, 15 bp, Homo sapiens
ttgttgttttgttgt

SEQ ID NO: 1183733 - DNA, 15 bp, Homo sapiens
gttgttgttttgttg

SEQ ID NO: 1183734 - DNA, 15 bp, Homo sapiens
atttgttgttgtttt

SEQ ID NO: 1183735 - DNA, 15 bp, Homo sapiens
aatttgttgttgttt

SEQ ID NO: 1183736 - DNA, 15 bp, Homo sapiens
taatttgttgttgtt

SEQ ID NO: 1183737 - DNA, 15 bp, Homo sapiens
ttaatttgttgttgt

SEQ ID NO: 1183738 - DNA, 15 bp, Homo sapiens
cttaatttgttgttg

SEQ ID NO: 1183739 - DNA, 15 bp, Homo sapiens
gcttaatttgttgtt

SEQ ID NO: 1183740 - DNA, 15 bp, Homo sapiens
ggcttaatttgttgt

SEQ ID NO: 1183741 - DNA, 15 bp, Homo sapiens
tggcttaatttgttg

SEQ ID NO: 1183742 - DNA, 15 bp, Homo sapiens
ttggcttaatttgtt

SEQ ID NO: 1183743 - DNA, 15 bp, Homo sapiens
cttggcttaatttgt

SEQ ID NO: 1183744 - DNA, 15 bp, Homo sapiens
tcttggcttaatttg

SEQ ID NO: 1183745 - DNA, 15 bp, Homo sapiens
atcttggcttaattt

SEQ ID NO: 1183746 - DNA, 15 bp, Homo sapiens
gatcttggcttaatt

SEQ ID NO: 1183747 - DNA, 15 bp, Homo sapiens
tgatcttggcttaat

SEQ ID NO: 1183748 - DNA, 15 bp, Homo sapiens
gtgatcttggcttaa

SEQ ID NO: 1183749 - DNA, 15 bp, Homo sapiens
tgtgatcttggctta

SEQ ID NO: 1183750 - DNA, 15 bp, Homo sapiens
gtgtgatcttggctt

SEQ ID NO: 1183751 - DNA, 15 bp, Homo sapiens
tgtgtgatcttggct

SEQ ID NO: 1183752 - DNA, 15 bp, Homo sapiens
ctgtgtgatcttggc

SEQ ID NO: 1183753 - DNA, 15 bp, Homo sapiens
actgtgtgatcttgg

SEQ ID NO: 1183754 - DNA, 15 bp, Homo sapiens
aactgtgtgatcttg

SEQ ID NO: 1183755 - DNA, 15 bp, Homo sapiens
caactgtgtgatctt

SEQ ID NO: 1183756 - DNA, 15 bp, Homo sapiens
acaactgtgtgatct

SEQ ID NO: 1183757 - DNA, 15 bp, Homo sapiens
aacaactgtgtgatc

SEQ ID NO: 1183758 - DNA, 15 bp, Homo sapiens
taacaactgtgtgat

SEQ ID NO: 1183759 - DNA, 15 bp, Homo sapiens
ttaacaactgtgtga

SEQ ID NO: 1183760 - DNA, 15 bp, Homo sapiens
attaacaactgtgtg

SEQ ID NO: 1183761 - DNA, 15 bp, Homo sapiens
tattaacaactgtgt

SEQ ID NO: 1183762 - DNA, 15 bp, Homo sapiens
ctattaacaactgtg

SEQ ID NO: 1183763 - DNA, 15 bp, Homo sapiens
actattaacaactgt

SEQ ID NO: 1183764 - DNA, 15 bp, Homo sapiens
tactattaacaactg

SEQ ID NO: 1183765 - DNA, 15 bp, Homo sapiens
ttactattaacaact

SEQ ID NO: 1183766 - DNA, 15 bp, Homo sapiens
tttactattaacaac

SEQ ID NO: 1183767 - DNA, 15 bp, Homo sapiens
ttttactattaacaa

SEQ ID NO: 1183768 - DNA, 15 bp, Homo sapiens
tttttactattaaca

SEQ ID NO: 1183769 - DNA, 15 bp, Homo sapiens
ctttttactattaac

SEQ ID NO: 1183770 - DNA, 15 bp, Homo sapiens
gctttttactattaa

SEQ ID NO: 1183771 - DNA, 15 bp, Homo sapiens
agctttttactatta

SEQ ID NO: 1183772 - DNA, 15 bp, Homo sapiens
tagctttttactatt

SEQ ID NO: 1183773 - DNA, 15 bp, Homo sapiens
ctagctttttactat

SEQ ID NO: 1183774 - DNA, 15 bp, Homo sapiens
gctagctttttacta

SEQ ID NO: 1183775 - DNA, 15 bp, Homo sapiens
tgctagctttttact

SEQ ID NO: 1183776 - DNA, 15 bp, Homo sapiens
atgctagctttttac

SEQ ID NO: 1183777 - DNA, 15 bp, Homo sapiens
aatgctagcttttta

SEQ ID NO: 1183778 - DNA, 15 bp, Homo sapiens
taatgctagcttttt

SEQ ID NO: 1183779 - DNA, 15 bp, Homo sapiens
ctaatgctagctttt

SEQ ID NO: 1183780 - DNA, 15 bp, Homo sapiens
gctaatgctagcttt

SEQ ID NO: 1183781 - DNA, 15 bp, Homo sapiens
ggctaatgctagctt

SEQ ID NO: 1183782 - DNA, 15 bp, Homo sapiens
aggctaatgctagct

SEQ ID NO: 1183783 - DNA, 15 bp, Homo sapiens
aaggctaatgctagc

SEQ ID NO: 1183784 - DNA, 15 bp, Homo sapiens
aaaggctaatgctag

SEQ ID NO: 1183785 - DNA, 15 bp, Homo sapiens
gaaaggctaatgcta

SEQ ID NO: 1183786 - DNA, 15 bp, Homo sapiens
tgaaaggctaatgct

SEQ ID NO: 1183787 - DNA, 15 bp, Homo sapiens
gtgaaaggctaatgc

SEQ ID NO: 1183788 - DNA, 15 bp, Homo sapiens
tgtgaaaggctaatg

SEQ ID NO: 1183789 - DNA, 15 bp, Homo sapiens
ctgtgaaaggctaat

SEQ ID NO: 1183790 - DNA, 15 bp, Homo sapiens
gctgtgaaaggctaa

SEQ ID NO: 1183791 - DNA, 15 bp, Homo sapiens
ggctgtgaaaggcta

SEQ ID NO: 1183792 - DNA, 15 bp, Homo sapiens
tggctgtgaaaggct

SEQ ID NO: 1183793 - DNA, 15 bp, Homo sapiens
ttggctgtgaaaggc

SEQ ID NO: 1183794 - DNA, 15 bp, Homo sapiens
cttggctgtgaaagg

SEQ ID NO: 1183795 - DNA, 15 bp, Homo sapiens
acttggctgtgaaag

SEQ ID NO: 1183796 - DNA, 15 bp, Homo sapiens
aacttggctgtgaaa

SEQ ID NO: 1183797 - DNA, 15 bp, Homo sapiens
caacttggctgtgaa

SEQ ID NO: 1183798 - DNA, 15 bp, Homo sapiens
ccaacttggctgtga

SEQ ID NO: 1183799 - DNA, 15 bp, Homo sapiens
gccaacttggctgtg

SEQ ID NO: 1183800 - DNA, 15 bp, Homo sapiens
agccaacttggctgt

SEQ ID NO: 1183801 - DNA, 15 bp, Homo sapiens
aagccaacttggctg

SEQ ID NO: 1183802 - DNA, 15 bp, Homo sapiens
gaagccaacttggct

SEQ ID NO: 1183803 - DNA, 15 bp, Homo sapiens
tgaagccaacttggc

SEQ ID NO: 1183804 - DNA, 15 bp, Homo sapiens
ttgaagccaacttgg

SEQ ID NO: 1183805 - DNA, 15 bp, Homo sapiens
tttgaagccaacttg

SEQ ID NO: 1183806 - DNA, 15 bp, Homo sapiens
ctttgaagccaactt

SEQ ID NO: 1183807 - DNA, 15 bp, Homo sapiens
cctttgaagccaact

SEQ ID NO: 1183808 - DNA, 15 bp, Homo sapiens
gcctttgaagccaac

SEQ ID NO: 1183809 - DNA, 15 bp, Homo sapiens
agcctttgaagccaa

SEQ ID NO: 1183810 - DNA, 15 bp, Homo sapiens
cagcctttgaagcca

SEQ ID NO: 1183811 - DNA, 15 bp, Homo sapiens
acagcctttgaagcc

SEQ ID NO: 1183812 - DNA, 15 bp, Homo sapiens
cacagcctttgaagc

SEQ ID NO: 1183813 - DNA, 15 bp, Homo sapiens
acacagcctttgaag

SEQ ID NO: 1183814 - DNA, 15 bp, Homo sapiens
aacacagcctttgaa

SEQ ID NO: 1183815 - DNA, 15 bp, Homo sapiens
aaacacagcctttga

SEQ ID NO: 1183816 - DNA, 15 bp, Homo sapiens
aaaacacagcctttg

SEQ ID NO: 1183817 - DNA, 15 bp, Homo sapiens
aaaaacacagccttt

SEQ ID NO: 1183818 - DNA, 15 bp, Homo sapiens
gaaaaacacagcctt

SEQ ID NO: 1183819 - DNA, 15 bp, Homo sapiens
ggaaaaacacagcct

SEQ ID NO: 1183820 - DNA, 15 bp, Homo sapiens
tggaaaaacacagcc

SEQ ID NO: 1183821 - DNA, 15 bp, Homo sapiens
gtggaaaaacacagc

SEQ ID NO: 1183822 - DNA, 15 bp, Homo sapiens
cgtggaaaaacacag

SEQ ID NO: 1183823 - DNA, 15 bp, Homo sapiens
tcgtggaaaaacaca

SEQ ID NO: 1183824 - DNA, 15 bp, Homo sapiens
ttcgtggaaaaacac

SEQ ID NO: 1183825 - DNA, 15 bp, Homo sapiens
tttcgtggaaaaaca

SEQ ID NO: 1183826 - DNA, 15 bp, Homo sapiens
atttcgtggaaaaac

SEQ ID NO: 1183827 - DNA, 15 bp, Homo sapiens
gatttcgtggaaaaa

SEQ ID NO: 1183828 - DNA, 15 bp, Homo sapiens
tgatttcgtggaaaa

SEQ ID NO: 1183829 - DNA, 15 bp, Homo sapiens
atgatttcgtggaaa

SEQ ID NO: 1183830 - DNA, 15 bp, Homo sapiens
tatgatttcgtggaa

SEQ ID NO: 1183831 - DNA, 15 bp, Homo sapiens
gtatgatttcgtgga

SEQ ID NO: 1183832 - DNA, 15 bp, Homo sapiens
agtatgatttcgtgg

SEQ ID NO: 1183833 - DNA, 15 bp, Homo sapiens
cagtatgatttcgtg

SEQ ID NO: 1183834 - DNA, 15 bp, Homo sapiens
tcagtatgatttcgt

SEQ ID NO: 1183835 - DNA, 15 bp, Homo sapiens
atcagtatgatttcg

SEQ ID NO: 1183836 - DNA, 15 bp, Homo sapiens
aatcagtatgatttc

SEQ ID NO: 1183837 - DNA, 15 bp, Homo sapiens
aaatcagtatgattt

SEQ ID NO: 1183838 - DNA, 15 bp, Homo sapiens
gaaatcagtatgatt

SEQ ID NO: 1183839 - DNA, 15 bp, Homo sapiens
ggaaatcagtatgat

SEQ ID NO: 1183840 - DNA, 15 bp, Homo sapiens
aggaaatcagtatga

SEQ ID NO: 1183841 - DNA, 15 bp, Homo sapiens
aaggaaatcagtatg

SEQ ID NO: 1183842 - DNA, 15 bp, Homo sapiens
gaaggaaatcagtat

SEQ ID NO: 1183843 - DNA, 15 bp, Homo sapiens
ggaaggaaatcagta

SEQ ID NO: 1183844 - DNA, 15 bp, Homo sapiens
tggaaggaaatcagt

SEQ ID NO: 1183845 - DNA, 15 bp, Homo sapiens
ttggaaggaaatcag

SEQ ID NO: 1183846 - DNA, 15 bp, Homo sapiens
tttggaaggaaatca

SEQ ID NO: 1183847 - DNA, 15 bp, Homo sapiens
ttttggaaggaaatc

SEQ ID NO: 1183848 - DNA, 15 bp, Homo sapiens
tttttggaaggaaat

SEQ ID NO: 1183849 - DNA, 15 bp, Homo sapiens
ttttttggaaggaaa

SEQ ID NO: 1183850 - DNA, 15 bp, Homo sapiens
tttttttggaaggaa

SEQ ID NO: 1183851 - DNA, 15 bp, Homo sapiens
gtttttttggaagga

SEQ ID NO: 1183852 - DNA, 15 bp, Homo sapiens
agtttttttggaagg

SEQ ID NO: 1183853 - DNA, 15 bp, Homo sapiens
gagtttttttggaag

SEQ ID NO: 1183854 - DNA, 15 bp, Homo sapiens
tgagtttttttggaa

SEQ ID NO: 1183855 - DNA, 15 bp, Homo sapiens
gtgagtttttttgga

SEQ ID NO: 1183856 - DNA, 15 bp, Homo sapiens
agtgagtttttttgg

SEQ ID NO: 1183857 - DNA, 15 bp, Homo sapiens
aagtgagtttttttg

SEQ ID NO: 1183858 - DNA, 15 bp, Homo sapiens
aaagtgagttttttt

SEQ ID NO: 1183859 - DNA, 15 bp, Homo sapiens
gaaagtgagtttttt

SEQ ID NO: 1183860 - DNA, 15 bp, Homo sapiens
agaaagtgagttttt

SEQ ID NO: 1183861 - DNA, 15 bp, Homo sapiens
gagaaagtgagtttt

SEQ ID NO: 1183862 - DNA, 15 bp, Homo sapiens
ggagaaagtgagttt

SEQ ID NO: 1183863 - DNA, 15 bp, Homo sapiens
cggagaaagtgagtt

SEQ ID NO: 1183864 - DNA, 15 bp, Homo sapiens
gcggagaaagtgagt

SEQ ID NO: 1183865 - DNA, 15 bp, Homo sapiens
ggcggagaaagtgag

SEQ ID NO: 1183866 - DNA, 15 bp, Homo sapiens
gggcggagaaagtga

SEQ ID NO: 1183867 - DNA, 15 bp, Homo sapiens
tgggcggagaaagtg

SEQ ID NO: 1183868 - DNA, 15 bp, Homo sapiens
ctgggcggagaaagt

SEQ ID NO: 1183869 - DNA, 15 bp, Homo sapiens
actgggcggagaaag

SEQ ID NO: 1183870 - DNA, 15 bp, Homo sapiens
tactgggcggagaaa

SEQ ID NO: 1183871 - DNA, 15 bp, Homo sapiens
atactgggcggagaa

SEQ ID NO: 1183872 - DNA, 15 bp, Homo sapiens
gatactgggcggaga

SEQ ID NO: 1183873 - DNA, 15 bp, Homo sapiens
ggatactgggcggag

SEQ ID NO: 1183874 - DNA, 15 bp, Homo sapiens
gggatactgggcgga

SEQ ID NO: 1183875 - DNA, 15 bp, Homo sapiens
agggatactgggcgg

SEQ ID NO: 1183876 - DNA, 15 bp, Homo sapiens
aagggatactgggcg

SEQ ID NO: 1183877 - DNA, 15 bp, Homo sapiens
aaagggatactgggc

SEQ ID NO: 1183878 - DNA, 15 bp, Homo sapiens
taaagggatactggg

SEQ ID NO: 1183879 - DNA, 15 bp, Homo sapiens
ctaaagggatactgg

SEQ ID NO: 1183880 - DNA, 15 bp, Homo sapiens
actaaagggatactg

SEQ ID NO: 1183881 - DNA, 15 bp, Homo sapiens
aactaaagggatact

SEQ ID NO: 1183882 - DNA, 15 bp, Homo sapiens
taactaaagggatac

SEQ ID NO: 1183883 - DNA, 15 bp, Homo sapiens
ctaactaaagggata

SEQ ID NO: 1183884 - DNA, 15 bp, Homo sapiens
gctaactaaagggat

SEQ ID NO: 1183885 - DNA, 15 bp, Homo sapiens
agctaactaaaggga

SEQ ID NO: 1183886 - DNA, 15 bp, Homo sapiens
tagctaactaaaggg

SEQ ID NO: 1183887 - DNA, 15 bp, Homo sapiens
atagctaactaaagg

SEQ ID NO: 1183888 - DNA, 15 bp, Homo sapiens
aatagctaactaaag

SEQ ID NO: 1183889 - DNA, 15 bp, Homo sapiens
taatagctaactaaa

SEQ ID NO: 1183890 - DNA, 15 bp, Homo sapiens
ataatagctaactaa

SEQ ID NO: 1183891 - DNA, 15 bp, Homo sapiens
aaataatagctaact

SEQ ID NO: 1183892 - DNA, 15 bp, Homo sapiens
caaataatagctaac

SEQ ID NO: 1183893 - DNA, 15 bp, Homo sapiens
gcaaataatagctaa

SEQ ID NO: 1183894 - DNA, 15 bp, Homo sapiens
agcaaataatagcta

SEQ ID NO: 1183895 - DNA, 15 bp, Homo sapiens
aagcaaataatagct

SEQ ID NO: 1183896 - DNA, 15 bp, Homo sapiens
aaagcaaataatagc

SEQ ID NO: 1183897 - DNA, 15 bp, Homo sapiens
aaaagcaaataatag

SEQ ID NO: 1183898 - DNA, 15 bp, Homo sapiens
aaaaagcaaataata

SEQ ID NO: 1183899 - DNA, 15 bp, Homo sapiens
taaaaagcaaataat

SEQ ID NO: 1183900 - DNA, 15 bp, Homo sapiens
gtaaaaagcaaataa

SEQ ID NO: 1183901 - DNA, 15 bp, Homo sapiens
tgtaaaaagcaaata

SEQ ID NO: 1183902 - DNA, 15 bp, Homo sapiens
ctgtaaaaagcaaat

SEQ ID NO: 1183903 - DNA, 15 bp, Homo sapiens
tctgtaaaaagcaaa

SEQ ID NO: 1183904 - DNA, 15 bp, Homo sapiens
ctctgtaaaaagcaa

SEQ ID NO: 1183905 - DNA, 15 bp, Homo sapiens
cctctgtaaaaagca

SEQ ID NO: 1183906 - DNA, 15 bp, Homo sapiens
tcctctgtaaaaagc

SEQ ID NO: 1183907 - DNA, 15 bp, Homo sapiens
ctcctctgtaaaaag

SEQ ID NO: 1183908 - DNA, 15 bp, Homo sapiens
cctcctctgtaaaaa

SEQ ID NO: 1183909 - DNA, 15 bp, Homo sapiens
tcctcctctgtaaaa

SEQ ID NO: 1183910 - DNA, 15 bp, Homo sapiens
ctcctcctctgtaaa

SEQ ID NO: 1183911 - DNA, 15 bp, Homo sapiens
gctcctcctctgtaa

SEQ ID NO: 1183912 - DNA, 15 bp, Homo sapiens
agctcctcctctgta

SEQ ID NO: 1183913 - DNA, 15 bp, Homo sapiens
cagctcctcctctgt

SEQ ID NO: 1183914 - DNA, 15 bp, Homo sapiens
tcagctcctcctctg

SEQ ID NO: 1183915 - DNA, 15 bp, Homo sapiens
ctcagctcctcctct

SEQ ID NO: 1183916 - DNA, 15 bp, Homo sapiens
tctcagctcctcctc

SEQ ID NO: 1183917 - DNA, 15 bp, Homo sapiens
atctcagctcctcct

SEQ ID NO: 1183918 - DNA, 15 bp, Homo sapiens
aatctcagctcctcc

SEQ ID NO: 1183919 - DNA, 15 bp, Homo sapiens
aaatctcagctcctc

SEQ ID NO: 1183920 - DNA, 15 bp, Homo sapiens
taaatctcagctcct

SEQ ID NO: 1183921 - DNA, 15 bp, Homo sapiens
ttaaatctcagctcc

SEQ ID NO: 1183922 - DNA, 15 bp, Homo sapiens
tttaaatctcagctc

SEQ ID NO: 1183923 - DNA, 15 bp, Homo sapiens
ttttaaatctcagct

SEQ ID NO: 1183924 - DNA, 15 bp, Homo sapiens
attttaaatctcagc

SEQ ID NO: 1183925 - DNA, 15 bp, Homo sapiens
cattttaaatctcag

SEQ ID NO: 1183926 - DNA, 15 bp, Homo sapiens
tcattttaaatctca

SEQ ID NO: 1183927 - DNA, 15 bp, Homo sapiens
ttcattttaaatctc

SEQ ID NO: 1183928 - DNA, 15 bp, Homo sapiens
tttcattttaaatct

SEQ ID NO: 1183929 - DNA, 15 bp, Homo sapiens
ttttcattttaaatc

SEQ ID NO: 1183930 - DNA, 15 bp, Homo sapiens
gttttcattttaaat

SEQ ID NO: 1183931 - DNA, 15 bp, Homo sapiens
tgttttcattttaaa

SEQ ID NO: 1183932 - DNA, 15 bp, Homo sapiens
ttgttttcattttaa

SEQ ID NO: 1183933 - DNA, 15 bp, Homo sapiens
tttgttttcatttta

SEQ ID NO: 1183934 - DNA, 15 bp, Homo sapiens
ttttttgttttcatt

SEQ ID NO: 1183935 - DNA, 15 bp, Homo sapiens
tttttttgttttcat

SEQ ID NO: 1183936 - DNA, 15 bp, Homo sapiens
gtttttttgttttca

SEQ ID NO: 1183937 - DNA, 15 bp, Homo sapiens
tgtttttttgttttc

SEQ ID NO: 1183938 - DNA, 15 bp, Homo sapiens
ttgtttttttgtttt

SEQ ID NO: 1183939 - DNA, 15 bp, Homo sapiens
tttgtttttttgttt

SEQ ID NO: 1183940 - DNA, 15 bp, Homo sapiens
gtttgtttttttgtt

SEQ ID NO: 1183941 - DNA, 15 bp, Homo sapiens
agtttgtttttttgt

SEQ ID NO: 1183942 - DNA, 15 bp, Homo sapiens
tagtttgtttttttg

SEQ ID NO: 1183943 - DNA, 15 bp, Homo sapiens
ttagtttgttttttt

SEQ ID NO: 1183944 - DNA, 15 bp, Homo sapiens
cttagtttgtttttt

SEQ ID NO: 1183945 - DNA, 15 bp, Homo sapiens
tcttagtttgttttt

SEQ ID NO: 1183946 - DNA, 15 bp, Homo sapiens
gtcttagtttgtttt

SEQ ID NO: 1183947 - DNA, 15 bp, Homo sapiens
ggtcttagtttgttt

SEQ ID NO: 1183948 - DNA, 15 bp, Homo sapiens
gggtcttagtttgtt

SEQ ID NO: 1183949 - DNA, 15 bp, Homo sapiens
tgggtcttagtttgt

SEQ ID NO: 1183950 - DNA, 15 bp, Homo sapiens
gtgggtcttagtttg

SEQ ID NO: 1183951 - DNA, 15 bp, Homo sapiens
ggtgggtcttagttt

SEQ ID NO: 1183952 - DNA, 15 bp, Homo sapiens
gggtgggtcttagtt

SEQ ID NO: 1183953 - DNA, 15 bp, Homo sapiens
ggggtgggtcttagt

SEQ ID NO: 1183954 - DNA, 15 bp, Homo sapiens
aggggtgggtcttag

SEQ ID NO: 1183955 - DNA, 15 bp, Homo sapiens
caggggtgggtctta

SEQ ID NO: 1183956 - DNA, 15 bp, Homo sapiens
gcaggggtgggtctt

SEQ ID NO: 1183957 - DNA, 15 bp, Homo sapiens
agcaggggtgggtct

SEQ ID NO: 1183958 - DNA, 15 bp, Homo sapiens
gagcaggggtgggtc

SEQ ID NO: 1183959 - DNA, 15 bp, Homo sapiens
cgagcaggggtgggt

SEQ ID NO: 1183960 - DNA, 15 bp, Homo sapiens
gcgagcaggggtggg

SEQ ID NO: 1183961 - DNA, 15 bp, Homo sapiens
ggcgagcaggggtgg

SEQ ID NO: 1183962 - DNA, 15 bp, Homo sapiens
gggcgagcaggggtg

SEQ ID NO: 1183963 - DNA, 15 bp, Homo sapiens
cgggcgagcaggggt

SEQ ID NO: 1183964 - DNA, 15 bp, Homo sapiens
tcgggcgagcagggg

SEQ ID NO: 1183965 - DNA, 15 bp, Homo sapiens
ctcgggcgagcaggg

SEQ ID NO: 1183966 - DNA, 15 bp, Homo sapiens
cctcgggcgagcagg

SEQ ID NO: 1183967 - DNA, 15 bp, Homo sapiens
acctcgggcgagcag

SEQ ID NO: 1183968 - DNA, 15 bp, Homo sapiens
gacctcgggcgagca

SEQ ID NO: 1183969 - DNA, 15 bp, Homo sapiens
tgacctcgggcgagc

SEQ ID NO: 1183970 - DNA, 15 bp, Homo sapiens
gtgacctcgggcgag

SEQ ID NO: 1183971 - DNA, 15 bp, Homo sapiens
agtgacctcgggcga

SEQ ID NO: 1183972 - DNA, 15 bp, Homo sapiens
gagtgacctcgggcg

SEQ ID NO: 1183973 - DNA, 15 bp, Homo sapiens
tgagtgacctcgggc

SEQ ID NO: 1183974 - DNA, 15 bp, Homo sapiens
gtgagtgacctcggg

SEQ ID NO: 1183975 - DNA, 15 bp, Homo sapiens
agtgagtgacctcgg

SEQ ID NO: 1183976 - DNA, 15 bp, Homo sapiens
aagtgagtgacctcg

SEQ ID NO: 1183977 - DNA, 15 bp, Homo sapiens
caagtgagtgacctc

SEQ ID NO: 1183978 - DNA, 15 bp, Homo sapiens
ccaagtgagtgacct

SEQ ID NO: 1183979 - DNA, 15 bp, Homo sapiens
gccaagtgagtgacc

SEQ ID NO: 1183980 - DNA, 15 bp, Homo sapiens
agccaagtgagtgac

SEQ ID NO: 1183981 - DNA, 15 bp, Homo sapiens
aagccaagtgagtga

SEQ ID NO: 1183982 - DNA, 15 bp, Homo sapiens
caagccaagtgagtg

SEQ ID NO: 1183983 - DNA, 15 bp, Homo sapiens
ccaagccaagtgagt

SEQ ID NO: 1183984 - DNA, 15 bp, Homo sapiens
gccaagccaagtgag

SEQ ID NO: 1183985 - DNA, 15 bp, Homo sapiens
agccaagccaagtga

SEQ ID NO: 1183986 - DNA, 15 bp, Homo sapiens
cagccaagccaagtg

SEQ ID NO: 1183987 - DNA, 15 bp, Homo sapiens
ccagccaagccaagt

SEQ ID NO: 1183988 - DNA, 15 bp, Homo sapiens
cccagccaagccaag

SEQ ID NO: 1183989 - DNA, 15 bp, Homo sapiens
tcccagccaagccaa

SEQ ID NO: 1183990 - DNA, 15 bp, Homo sapiens
gtcccagccaagcca

SEQ ID NO: 1183991 - DNA, 15 bp, Homo sapiens
agtcccagccaagcc

SEQ ID NO: 1183992 - DNA, 15 bp, Homo sapiens
aagtcccagccaagc

SEQ ID NO: 1183993 - DNA, 15 bp, Homo sapiens
taagtcccagccaag

SEQ ID NO: 1183994 - DNA, 15 bp, Homo sapiens
gtaagtcccagccaa

SEQ ID NO: 1183995 - DNA, 15 bp, Homo sapiens
cgtaagtcccagcca

SEQ ID NO: 1183996 - DNA, 15 bp, Homo sapiens
gcgtaagtcccagcc

SEQ ID NO: 1183997 - DNA, 15 bp, Homo sapiens
ggcgtaagtcccagc

SEQ ID NO: 1183998 - DNA, 15 bp, Homo sapiens
gggcgtaagtcccag

SEQ ID NO: 1183999 - DNA, 15 bp, Homo sapiens
tgggcgtaagtccca

SEQ ID NO: 1184000 - DNA, 15 bp, Homo sapiens
ctgggcgtaagtccc

SEQ ID NO: 1184001 - DNA, 15 bp, Homo sapiens
cctgggcgtaagtcc

SEQ ID NO: 1184002 - DNA, 15 bp, Homo sapiens
acctgggcgtaagtc

SEQ ID NO: 1184003 - DNA, 15 bp, Homo sapiens
gacctgggcgtaagt

SEQ ID NO: 1184004 - DNA, 15 bp, Homo sapiens
ggacctgggcgtaag

SEQ ID NO: 1184005 - DNA, 15 bp, Homo sapiens
tggacctgggcgtaa

SEQ ID NO: 1184006 - DNA, 15 bp, Homo sapiens
ctggacctgggcgta

SEQ ID NO: 1184007 - DNA, 15 bp, Homo sapiens
actggacctgggcgt

SEQ ID NO: 1184008 - DNA, 15 bp, Homo sapiens
gactggacctgggcg

SEQ ID NO: 1184009 - DNA, 15 bp, Homo sapiens
tgactggacctgggc

SEQ ID NO: 1184010 - DNA, 15 bp, Homo sapiens
atgactggacctggg

SEQ ID NO: 1184011 - DNA, 15 bp, Homo sapiens
catgactggacctgg

SEQ ID NO: 1184012 - DNA, 15 bp, Homo sapiens
gcatgactggacctg

SEQ ID NO: 1184013 - DNA, 15 bp, Homo sapiens
agcatgactggacct

SEQ ID NO: 1184014 - DNA, 15 bp, Homo sapiens
aagcatgactggacc

SEQ ID NO: 1184015 - DNA, 15 bp, Homo sapiens
caagcatgactggac

SEQ ID NO: 1184016 - DNA, 15 bp, Homo sapiens
acaagcatgactgga

SEQ ID NO: 1184017 - DNA, 15 bp, Homo sapiens
gacaagcatgactgg

SEQ ID NO: 1184018 - DNA, 15 bp, Homo sapiens
agacaagcatgactg

SEQ ID NO: 1184019 - DNA, 15 bp, Homo sapiens
tagacaagcatgact

SEQ ID NO: 1184020 - DNA, 15 bp, Homo sapiens
atagacaagcatgac

SEQ ID NO: 1184021 - DNA, 15 bp, Homo sapiens
gatagacaagcatga

SEQ ID NO: 1184022 - DNA, 15 bp, Homo sapiens
ggatagacaagcatg

SEQ ID NO: 1184023 - DNA, 15 bp, Homo sapiens
gggatagacaagcat

SEQ ID NO: 1184024 - DNA, 15 bp, Homo sapiens
tgggatagacaagca

SEQ ID NO: 1184025 - DNA, 15 bp, Homo sapiens
ctgggatagacaagc

SEQ ID NO: 1184026 - DNA, 15 bp, Homo sapiens
tctgggatagacaag

SEQ ID NO: 1184027 - DNA, 15 bp, Homo sapiens
atctgggatagacaa

SEQ ID NO: 1184028 - DNA, 15 bp, Homo sapiens
tatctgggatagaca

SEQ ID NO: 1184029 - DNA, 15 bp, Homo sapiens
atatctgggatagac

SEQ ID NO: 1184030 - DNA, 15 bp, Homo sapiens
catatctgggataga

SEQ ID NO: 1184031 - DNA, 15 bp, Homo sapiens
tcatatctgggatag

SEQ ID NO: 1184032 - DNA, 15 bp, Homo sapiens
ttcatatctgggata

SEQ ID NO: 1184033 - DNA, 15 bp, Homo sapiens
cttcatatctgggat

SEQ ID NO: 1184034 - DNA, 15 bp, Homo sapiens
gcttcatatctggga

SEQ ID NO: 1184035 - DNA, 15 bp, Homo sapiens
agcttcatatctggg

SEQ ID NO: 1184036 - DNA, 15 bp, Homo sapiens
cagcttcatatctgg

SEQ ID NO: 1184037 - DNA, 15 bp, Homo sapiens
ccagcttcatatctg

SEQ ID NO: 1184038 - DNA, 15 bp, Homo sapiens
cccagcttcatatct

SEQ ID NO: 1184039 - DNA, 15 bp, Homo sapiens
gcccagcttcatatc

SEQ ID NO: 1184040 - DNA, 15 bp, Homo sapiens
cgcccagcttcatat

SEQ ID NO: 1184041 - DNA, 15 bp, Homo sapiens
acgcccagcttcata

SEQ ID NO: 1184042 - DNA, 15 bp, Homo sapiens
gacgcccagcttcat

SEQ ID NO: 1184043 - DNA, 15 bp, Homo sapiens
tgacgcccagcttca

SEQ ID NO: 1184044 - DNA, 15 bp, Homo sapiens
ctgacgcccagcttc

SEQ ID NO: 1184045 - DNA, 15 bp, Homo sapiens
cctgacgcccagctt

SEQ ID NO: 1184046 - DNA, 15 bp, Homo sapiens
tcctgacgcccagct

SEQ ID NO: 1184047 - DNA, 15 bp, Homo sapiens
atcctgacgcccagc

SEQ ID NO: 1184048 - DNA, 15 bp, Homo sapiens
catcctgacgcccag

SEQ ID NO: 1184049 - DNA, 15 bp, Homo sapiens
ccatcctgacgccca

SEQ ID NO: 1184050 - DNA, 15 bp, Homo sapiens
cccatcctgacgccc

SEQ ID NO: 1184051 - DNA, 15 bp, Homo sapiens
tcccatcctgacgcc

SEQ ID NO: 1184052 - DNA, 15 bp, Homo sapiens
ctcccatcctgacgc

SEQ ID NO: 1184053 - DNA, 15 bp, Homo sapiens
cctcccatcctgacg

SEQ ID NO: 1184054 - DNA, 15 bp, Homo sapiens
gcctcccatcctgac

SEQ ID NO: 1184055 - DNA, 15 bp, Homo sapiens
tgcctcccatcctga

SEQ ID NO: 1184056 - DNA, 15 bp, Homo sapiens
ctgcctcccatcctg

SEQ ID NO: 1184057 - DNA, 15 bp, Homo sapiens
gctgcctcccatcct

SEQ ID NO: 1184058 - DNA, 15 bp, Homo sapiens
tgctgcctcccatcc

SEQ ID NO: 1184059 - DNA, 15 bp, Homo sapiens
atgctgcctcccatc

SEQ ID NO: 1184060 - DNA, 15 bp, Homo sapiens
catgctgcctcccat

SEQ ID NO: 1184061 - DNA, 15 bp, Homo sapiens
tcatgctgcctccca

SEQ ID NO: 1184062 - DNA, 15 bp, Homo sapiens
ggtcatgctgcctcc

SEQ ID NO: 1184063 - DNA, 15 bp, Homo sapiens
gggtcatgctgcctc

SEQ ID NO: 1184064 - DNA, 15 bp, Homo sapiens
tgggtcatgctgcct

SEQ ID NO: 1184065 - DNA, 15 bp, Homo sapiens
gtgggtcatgctgcc

SEQ ID NO: 1184066 - DNA, 15 bp, Homo sapiens
tgtgggtcatgctgc

SEQ ID NO: 1184067 - DNA, 15 bp, Homo sapiens
ctgtgggtcatgctg

SEQ ID NO: 1184068 - DNA, 15 bp, Homo sapiens
actgtgggtcatgct

SEQ ID NO: 1184069 - DNA, 15 bp, Homo sapiens
cactgtgggtcatgc

SEQ ID NO: 1184070 - DNA, 15 bp, Homo sapiens
ccactgtgggtcatg

SEQ ID NO: 1184071 - DNA, 15 bp, Homo sapiens
accactgtgggtcat

SEQ ID NO: 1184072 - DNA, 15 bp, Homo sapiens
taccactgtgggtca

SEQ ID NO: 1184073 - DNA, 15 bp, Homo sapiens
ctaccactgtgggtc

SEQ ID NO: 1184074 - DNA, 15 bp, Homo sapiens
gctaccactgtgggt

SEQ ID NO: 1184075 - DNA, 15 bp, Homo sapiens
ggctaccactgtggg

SEQ ID NO: 1184076 - DNA, 15 bp, Homo sapiens
aggctaccactgtgg

SEQ ID NO: 1184077 - DNA, 15 bp, Homo sapiens
taggctaccactgtg

SEQ ID NO: 1184078 - DNA, 15 bp, Homo sapiens
ctaggctaccactgt

SEQ ID NO: 1184079 - DNA, 15 bp, Homo sapiens
cctaggctaccactg

SEQ ID NO: 1184080 - DNA, 15 bp, Homo sapiens
gcctaggctaccact

SEQ ID NO: 1184081 - DNA, 15 bp, Homo sapiens
agcctaggctaccac

SEQ ID NO: 1184082 - DNA, 15 bp, Homo sapiens
gagcctaggctacca

SEQ ID NO: 1184083 - DNA, 15 bp, Homo sapiens
tgagcctaggctacc

SEQ ID NO: 1184084 - DNA, 15 bp, Homo sapiens
gtgagcctaggctac

SEQ ID NO: 1184085 - DNA, 15 bp, Homo sapiens
tgtgagcctaggcta

SEQ ID NO: 1184086 - DNA, 15 bp, Homo sapiens
ttgtgagcctaggct

SEQ ID NO: 1184087 - DNA, 15 bp, Homo sapiens
cttgtgagcctaggc

SEQ ID NO: 1184088 - DNA, 15 bp, Homo sapiens
ccttgtgagcctagg

SEQ ID NO: 1184089 - DNA, 15 bp, Homo sapiens
cccttgtgagcctag

SEQ ID NO: 1184090 - DNA, 15 bp, Homo sapiens
acccttgtgagccta

SEQ ID NO: 1184091 - DNA, 15 bp, Homo sapiens
tacccttgtgagcct

SEQ ID NO: 1184092 - DNA, 15 bp, Homo sapiens
ctacccttgtgagcc

SEQ ID NO: 1184093 - DNA, 15 bp, Homo sapiens
cctacccttgtgagc

SEQ ID NO: 1184094 - DNA, 15 bp, Homo sapiens
ccctacccttgtgag

SEQ ID NO: 1184095 - DNA, 15 bp, Homo sapiens
tccctacccttgtga

SEQ ID NO: 1184096 - DNA, 15 bp, Homo sapiens
atccctacccttgtg

SEQ ID NO: 1184097 - DNA, 15 bp, Homo sapiens
catccctacccttgt

SEQ ID NO: 1184098 - DNA, 15 bp, Homo sapiens
gcatccctacccttg

SEQ ID NO: 1184099 - DNA, 15 bp, Homo sapiens
tgcatccctaccctt

SEQ ID NO: 1184100 - DNA, 15 bp, Homo sapiens
atgcatccctaccct

SEQ ID NO: 1184101 - DNA, 15 bp, Homo sapiens
aatgcatccctaccc

SEQ ID NO: 1184102 - DNA, 15 bp, Homo sapiens
aaatgcatccctacc

SEQ ID NO: 1184103 - DNA, 15 bp, Homo sapiens
gaaatgcatccctac

SEQ ID NO: 1184104 - DNA, 15 bp, Homo sapiens
cgaaatgcatcccta

SEQ ID NO: 1184105 - DNA, 15 bp, Homo sapiens
tcgaaatgcatccct

SEQ ID NO: 1184106 - DNA, 15 bp, Homo sapiens
ttcgaaatgcatccc

SEQ ID NO: 1184107 - DNA, 15 bp, Homo sapiens
attcgaaatgcatcc

SEQ ID NO: 1184108 - DNA, 15 bp, Homo sapiens
cattcgaaatgcatc

SEQ ID NO: 1184109 - DNA, 15 bp, Homo sapiens
acattcgaaatgcat

SEQ ID NO: 1184110 - DNA, 15 bp, Homo sapiens
gacattcgaaatgca

SEQ ID NO: 1184111 - DNA, 15 bp, Homo sapiens
agacattcgaaatgc

SEQ ID NO: 1184112 - DNA, 15 bp, Homo sapiens
gagacattcgaaatg

SEQ ID NO: 1184113 - DNA, 15 bp, Homo sapiens
ggagacattcgaaat

SEQ ID NO: 1184114 - DNA, 15 bp, Homo sapiens
tggagacattcgaaa

SEQ ID NO: 1184115 - DNA, 15 bp, Homo sapiens
ttggagacattcgaa

SEQ ID NO: 1184116 - DNA, 15 bp, Homo sapiens
cttggagacattcga

SEQ ID NO: 1184117 - DNA, 15 bp, Homo sapiens
tcttggagacattcg

SEQ ID NO: 1184118 - DNA, 15 bp, Homo sapiens
ttcttggagacattc

SEQ ID NO: 1184119 - DNA, 15 bp, Homo sapiens
attcttggagacatt

SEQ ID NO: 1184120 - DNA, 15 bp, Homo sapiens
tattcttggagacat

SEQ ID NO: 1184121 - DNA, 15 bp, Homo sapiens
gtattcttggagaca

SEQ ID NO: 1184122 - DNA, 15 bp, Homo sapiens
agtattcttggagac

SEQ ID NO: 1184123 - DNA, 15 bp, Homo sapiens
cagtattcttggaga

SEQ ID NO: 1184124 - DNA, 15 bp, Homo sapiens
tcagtattcttggag

SEQ ID NO: 1184125 - DNA, 15 bp, Homo sapiens
atcagtattcttgga

SEQ ID NO: 1184126 - DNA, 15 bp, Homo sapiens
catcagtattcttgg

SEQ ID NO: 1184127 - DNA, 15 bp, Homo sapiens
gcatcagtattcttg

SEQ ID NO: 1184128 - DNA, 15 bp, Homo sapiens
tgcatcagtattctt

SEQ ID NO: 1184129 - DNA, 15 bp, Homo sapiens
ctgcatcagtattct

SEQ ID NO: 1184130 - DNA, 15 bp, Homo sapiens
cctgcatcagtattc

SEQ ID NO: 1184131 - DNA, 15 bp, Homo sapiens
ccctgcatcagtatt

SEQ ID NO: 1184132 - DNA, 15 bp, Homo sapiens
gccctgcatcagtat

SEQ ID NO: 1184133 - DNA, 15 bp, Homo sapiens
ggccctgcatcagta

SEQ ID NO: 1184134 - DNA, 15 bp, Homo sapiens
tggccctgcatcagt

SEQ ID NO: 1184135 - DNA, 15 bp, Homo sapiens
ttggccctgcatcag

SEQ ID NO: 1184136 - DNA, 15 bp, Homo sapiens
cttggccctgcatca

SEQ ID NO: 1184137 - DNA, 15 bp, Homo sapiens
ccttggccctgcatc

SEQ ID NO: 1184138 - DNA, 15 bp, Homo sapiens
accttggccctgcat

SEQ ID NO: 1184139 - DNA, 15 bp, Homo sapiens
gaccttggccctgca

SEQ ID NO: 1184140 - DNA, 15 bp, Homo sapiens
tgaccttggccctgc

SEQ ID NO: 1184141 - DNA, 15 bp, Homo sapiens
atgaccttggccctg

SEQ ID NO: 1184142 - DNA, 15 bp, Homo sapiens
gatgaccttggccct

SEQ ID NO: 1184143 - DNA, 15 bp, Homo sapiens
cgatgaccttggccc

SEQ ID NO: 1184144 - DNA, 15 bp, Homo sapiens
tcgatgaccttggcc

SEQ ID NO: 1184145 - DNA, 15 bp, Homo sapiens
ttcgatgaccttggc

SEQ ID NO: 1184146 - DNA, 15 bp, Homo sapiens
cttcgatgaccttgg

SEQ ID NO: 1184147 - DNA, 15 bp, Homo sapiens
ccttcgatgaccttg

SEQ ID NO: 1184148 - DNA, 15 bp, Homo sapiens
tccttcgatgacctt

SEQ ID NO: 1184149 - DNA, 15 bp, Homo sapiens
gtccttcgatgacct

SEQ ID NO: 1184150 - DNA, 15 bp, Homo sapiens
agtccttcgatgacc

SEQ ID NO: 1184151 - DNA, 15 bp, Homo sapiens
cagtccttcgatgac

SEQ ID NO: 1184152 - DNA, 15 bp, Homo sapiens
tcagtccttcgatga

SEQ ID NO: 1184153 - DNA, 15 bp, Homo sapiens
gtcagtccttcgatg

SEQ ID NO: 1184154 - DNA, 15 bp, Homo sapiens
agtcagtccttcgat

SEQ ID NO: 1184155 - DNA, 15 bp, Homo sapiens
cagtcagtccttcga

SEQ ID NO: 1184156 - DNA, 15 bp, Homo sapiens
gcagtcagtccttcg

SEQ ID NO: 1184157 - DNA, 15 bp, Homo sapiens
agcagtcagtccttc

SEQ ID NO: 1184158 - DNA, 15 bp, Homo sapiens
aagcagtcagtcctt

SEQ ID NO: 1184159 - DNA, 15 bp, Homo sapiens
taagcagtcagtcct

SEQ ID NO: 1184160 - DNA, 15 bp, Homo sapiens
ataagcagtcagtcc

SEQ ID NO: 1184161 - DNA, 15 bp, Homo sapiens
cataagcagtcagtc

SEQ ID NO: 1184162 - DNA, 15 bp, Homo sapiens
ccataagcagtcagt

SEQ ID NO: 1184163 - DNA, 15 bp, Homo sapiens
cccataagcagtcag

SEQ ID NO: 1184164 - DNA, 15 bp, Homo sapiens
tcccataagcagtca

SEQ ID NO: 1184165 - DNA, 15 bp, Homo sapiens
ttcccataagcagtc

SEQ ID NO: 1184166 - DNA, 15 bp, Homo sapiens
tttcccataagcagt

SEQ ID NO: 1184167 - DNA, 15 bp, Homo sapiens
atttcccataagcag

SEQ ID NO: 1184168 - DNA, 15 bp, Homo sapiens
catttcccataagca

SEQ ID NO: 1184169 - DNA, 15 bp, Homo sapiens
gcatttcccataagc

SEQ ID NO: 1184170 - DNA, 15 bp, Homo sapiens
tgcatttcccataag

SEQ ID NO: 1184171 - DNA, 15 bp, Homo sapiens
atgcatttcccataa

SEQ ID NO: 1184172 - DNA, 15 bp, Homo sapiens
aatgcatttcccata

SEQ ID NO: 1184173 - DNA, 15 bp, Homo sapiens
aaatgcatttcccat

SEQ ID NO: 1184174 - DNA, 15 bp, Homo sapiens
gaaatgcatttccca

SEQ ID NO: 1184175 - DNA, 15 bp, Homo sapiens
ggaaatgcatttccc

SEQ ID NO: 1184176 - DNA, 15 bp, Homo sapiens
gggaaatgcatttcc

SEQ ID NO: 1184177 - DNA, 15 bp, Homo sapiens
tgggaaatgcatttc

SEQ ID NO: 1184178 - DNA, 15 bp, Homo sapiens
atgggaaatgcattt

SEQ ID NO: 1184179 - DNA, 15 bp, Homo sapiens
tatgggaaatgcatt

SEQ ID NO: 1184180 - DNA, 15 bp, Homo sapiens
ttatgggaaatgcat

SEQ ID NO: 1184181 - DNA, 15 bp, Homo sapiens
cttatgggaaatgca

SEQ ID NO: 1184182 - DNA, 15 bp, Homo sapiens
ccttatgggaaatgc

SEQ ID NO: 1184183 - DNA, 15 bp, Homo sapiens
tccttatgggaaatg

SEQ ID NO: 1184184 - DNA, 15 bp, Homo sapiens
gtccttatgggaaat

SEQ ID NO: 1184185 - DNA, 15 bp, Homo sapiens
agtccttatgggaaa

SEQ ID NO: 1184186 - DNA, 15 bp, Homo sapiens
aagtccttatgggaa

SEQ ID NO: 1184187 - DNA, 15 bp, Homo sapiens
caagtccttatggga

SEQ ID NO: 1184188 - DNA, 15 bp, Homo sapiens
ccaagtccttatggg

SEQ ID NO: 1184189 - DNA, 15 bp, Homo sapiens
accaagtccttatgg

SEQ ID NO: 1184190 - DNA, 15 bp, Homo sapiens
caccaagtccttatg

SEQ ID NO: 1184191 - DNA, 15 bp, Homo sapiens
tcaccaagtccttat

SEQ ID NO: 1184192 - DNA, 15 bp, Homo sapiens
gtcaccaagtcctta

SEQ ID NO: 1184193 - DNA, 15 bp, Homo sapiens
ggtcaccaagtcctt

SEQ ID NO: 1184194 - DNA, 15 bp, Homo sapiens
tggtcaccaagtcct

SEQ ID NO: 1184195 - DNA, 15 bp, Homo sapiens
atggtcaccaagtcc

SEQ ID NO: 1184196 - DNA, 15 bp, Homo sapiens
tatggtcaccaagtc

SEQ ID NO: 1184197 - DNA, 15 bp, Homo sapiens
ttatggtcaccaagt

SEQ ID NO: 1184198 - DNA, 15 bp, Homo sapiens
cttatggtcaccaag

SEQ ID NO: 1184199 - DNA, 15 bp, Homo sapiens
ccttatggtcaccaa

SEQ ID NO: 1184200 - DNA, 15 bp, Homo sapiens
tccttatggtcacca

SEQ ID NO: 1184201 - DNA, 15 bp, Homo sapiens
ttccttatggtcacc

SEQ ID NO: 1184202 - DNA, 15 bp, Homo sapiens
attccttatggtcac

SEQ ID NO: 1184203 - DNA, 15 bp, Homo sapiens
tattccttatggtca

SEQ ID NO: 1184204 - DNA, 15 bp, Homo sapiens
gtattccttatggtc

SEQ ID NO: 1184205 - DNA, 15 bp, Homo sapiens
ggtattccttatggt

SEQ ID NO: 1184206 - DNA, 15 bp, Homo sapiens
aggtattccttatgg

SEQ ID NO: 1184207 - DNA, 15 bp, Homo sapiens
caggtattccttatg

SEQ ID NO: 1184208 - DNA, 15 bp, Homo sapiens
tcaggtattccttat

SEQ ID NO: 1184209 - DNA, 15 bp, Homo sapiens
gtcaggtattcctta

SEQ ID NO: 1184210 - DNA, 15 bp, Homo sapiens
ggtcaggtattcctt

SEQ ID NO: 1184211 - DNA, 15 bp, Homo sapiens
aggtcaggtattcct

SEQ ID NO: 1184212 - DNA, 15 bp, Homo sapiens
aaggtcaggtattcc

SEQ ID NO: 1184213 - DNA, 15 bp, Homo sapiens
caaggtcaggtattc

SEQ ID NO: 1184214 - DNA, 15 bp, Homo sapiens
ccaaggtcaggtatt

SEQ ID NO: 1184215 - DNA, 15 bp, Homo sapiens
gccaaggtcaggtat

SEQ ID NO: 1184216 - DNA, 15 bp, Homo sapiens
ggccaaggtcaggta

SEQ ID NO: 1184217 - DNA, 15 bp, Homo sapiens
gggccaaggtcaggt

SEQ ID NO: 1184218 - DNA, 15 bp, Homo sapiens
agggccaaggtcagg

SEQ ID NO: 1184219 - DNA, 15 bp, Homo sapiens
cagggccaaggtcag

SEQ ID NO: 1184220 - DNA, 15 bp, Homo sapiens
gcagggccaaggtca

SEQ ID NO: 1184221 - DNA, 15 bp, Homo sapiens
tgcagggccaaggtc

SEQ ID NO: 1184222 - DNA, 15 bp, Homo sapiens
atgcagggccaaggt

SEQ ID NO: 1184223 - DNA, 15 bp, Homo sapiens
gatgcagggccaagg

SEQ ID NO: 1184224 - DNA, 15 bp, Homo sapiens
tgatgcagggccaag

SEQ ID NO: 1184225 - DNA, 15 bp, Homo sapiens
ctgatgcagggccaa

SEQ ID NO: 1184226 - DNA, 15 bp, Homo sapiens
actgatgcagggcca

SEQ ID NO: 1184227 - DNA, 15 bp, Homo sapiens
cactgatgcagggcc

SEQ ID NO: 1184228 - DNA, 15 bp, Homo sapiens
acactgatgcagggc

SEQ ID NO: 1184229 - DNA, 15 bp, Homo sapiens
aacactgatgcaggg

SEQ ID NO: 1184230 - DNA, 15 bp, Homo sapiens
gaacactgatgcagg

SEQ ID NO: 1184231 - DNA, 15 bp, Homo sapiens
ggaacactgatgcag

SEQ ID NO: 1184232 - DNA, 15 bp, Homo sapiens
gggaacactgatgca

SEQ ID NO: 1184233 - DNA, 15 bp, Homo sapiens
tgggaacactgatgc

SEQ ID NO: 1184234 - DNA, 15 bp, Homo sapiens
ctgggaacactgatg

SEQ ID NO: 1184235 - DNA, 15 bp, Homo sapiens
tctgggaacactgat

SEQ ID NO: 1184236 - DNA, 15 bp, Homo sapiens
ctctgggaacactga

SEQ ID NO: 1184237 - DNA, 15 bp, Homo sapiens
tctctgggaacactg

SEQ ID NO: 1184238 - DNA, 15 bp, Homo sapiens
gtctctgggaacact

SEQ ID NO: 1184239 - DNA, 15 bp, Homo sapiens
tgtctctgggaacac

SEQ ID NO: 1184240 - DNA, 15 bp, Homo sapiens
atgtctctgggaaca

SEQ ID NO: 1184241 - DNA, 15 bp, Homo sapiens
aatgtctctgggaac

SEQ ID NO: 1184242 - DNA, 15 bp, Homo sapiens
gaatgtctctgggaa

SEQ ID NO: 1184243 - DNA, 15 bp, Homo sapiens
tgaatgtctctggga

SEQ ID NO: 1184244 - DNA, 15 bp, Homo sapiens
ttgaatgtctctggg

SEQ ID NO: 1184245 - DNA, 15 bp, Homo sapiens
tttgaatgtctctgg

SEQ ID NO: 1184246 - DNA, 15 bp, Homo sapiens
ctttgaatgtctctg

SEQ ID NO: 1184247 - DNA, 15 bp, Homo sapiens
actttgaatgtctct

SEQ ID NO: 1184248 - DNA, 15 bp, Homo sapiens
cactttgaatgtctc

SEQ ID NO: 1184249 - DNA, 15 bp, Homo sapiens
gcactttgaatgtct

SEQ ID NO: 1184250 - DNA, 15 bp, Homo sapiens
tgcactttgaatgtc

SEQ ID NO: 1184251 - DNA, 15 bp, Homo sapiens
atgcactttgaatgt

SEQ ID NO: 1184252 - DNA, 15 bp, Homo sapiens
gatgcactttgaatg

SEQ ID NO: 1184253 - DNA, 15 bp, Homo sapiens
cgatgcactttgaat

SEQ ID NO: 1184254 - DNA, 15 bp, Homo sapiens
gcgatgcactttgaa

SEQ ID NO: 1184255 - DNA, 15 bp, Homo sapiens
agcgatgcactttga

SEQ ID NO: 1184256 - DNA, 15 bp, Homo sapiens
tagcgatgcactttg

SEQ ID NO: 1184257 - DNA, 15 bp, Homo sapiens
gtagcgatgcacttt

SEQ ID NO: 1184258 - DNA, 15 bp, Homo sapiens
ggtagcgatgcactt

SEQ ID NO: 1184259 - DNA, 15 bp, Homo sapiens
gggtagcgatgcact

SEQ ID NO: 1184260 - DNA, 15 bp, Homo sapiens
agggtagcgatgcac

SEQ ID NO: 1184261 - DNA, 15 bp, Homo sapiens
aagggtagcgatgca

SEQ ID NO: 1184262 - DNA, 15 bp, Homo sapiens
caagggtagcgatgc

SEQ ID NO: 1184263 - DNA, 15 bp, Homo sapiens
acaagggtagcgatg

SEQ ID NO: 1184264 - DNA, 15 bp, Homo sapiens
cacaagggtagcgat

SEQ ID NO: 1184265 - DNA, 15 bp, Homo sapiens
tcacaagggtagcga

SEQ ID NO: 1184266 - DNA, 15 bp, Homo sapiens
atcacaagggtagcg

SEQ ID NO: 1184267 - DNA, 15 bp, Homo sapiens
gatcacaagggtagc

SEQ ID NO: 1184268 - DNA, 15 bp, Homo sapiens
tgatcacaagggtag

SEQ ID NO: 1184269 - DNA, 15 bp, Homo sapiens
gtgatcacaagggta

SEQ ID NO: 1184270 - DNA, 15 bp, Homo sapiens
tgtgatcacaagggt

SEQ ID NO: 1184271 - DNA, 15 bp, Homo sapiens
gtgtgatcacaaggg

SEQ ID NO: 1184272 - DNA, 15 bp, Homo sapiens
tgtgtgatcacaagg

SEQ ID NO: 1184273 - DNA, 15 bp, Homo sapiens
gtgtgtgatcacaag

SEQ ID NO: 1184274 - DNA, 15 bp, Homo sapiens
agtgtgtgatcacaa

SEQ ID NO: 1184275 - DNA, 15 bp, Homo sapiens
tagtgtgtgatcaca

SEQ ID NO: 1184276 - DNA, 15 bp, Homo sapiens
ttagtgtgtgatcac

SEQ ID NO: 1184277 - DNA, 15 bp, Homo sapiens
gttagtgtgtgatca

SEQ ID NO: 1184278 - DNA, 15 bp, Homo sapiens
agttagtgtgtgatc

SEQ ID NO: 1184279 - DNA, 15 bp, Homo sapiens
tagttagtgtgtgat

SEQ ID NO: 1184280 - DNA, 15 bp, Homo sapiens
gtagttagtgtgtga

SEQ ID NO: 1184281 - DNA, 15 bp, Homo sapiens
cgtagttagtgtgtg

SEQ ID NO: 1184282 - DNA, 15 bp, Homo sapiens
acgtagttagtgtgt

SEQ ID NO: 1184283 - DNA, 15 bp, Homo sapiens
gacgtagttagtgtg

SEQ ID NO: 1184284 - DNA, 15 bp, Homo sapiens
agacgtagttagtgt

SEQ ID NO: 1184285 - DNA, 15 bp, Homo sapiens
cagacgtagttagtg

SEQ ID NO: 1184286 - DNA, 15 bp, Homo sapiens
acagacgtagttagt

SEQ ID NO: 1184287 - DNA, 15 bp, Homo sapiens
aacagacgtagttag

SEQ ID NO: 1184288 - DNA, 15 bp, Homo sapiens
caacagacgtagtta

SEQ ID NO: 1184289 - DNA, 15 bp, Homo sapiens
acaacagacgtagtt

SEQ ID NO: 1184290 - DNA, 15 bp, Homo sapiens
gacaacagacgtagt

SEQ ID NO: 1184291 - DNA, 15 bp, Homo sapiens
agacaacagacgtag

SEQ ID NO: 1184292 - DNA, 15 bp, Homo sapiens
cagacaacagacgta

SEQ ID NO: 1184293 - DNA, 15 bp, Homo sapiens
ccagacaacagacgt

SEQ ID NO: 1184294 - DNA, 15 bp, Homo sapiens
accagacaacagacg

SEQ ID NO: 1184295 - DNA, 15 bp, Homo sapiens
gaccagacaacagac

SEQ ID NO: 1184296 - DNA, 15 bp, Homo sapiens
tgaccagacaacaga

SEQ ID NO: 1184297 - DNA, 15 bp, Homo sapiens
ctgaccagacaacag

SEQ ID NO: 1184298 - DNA, 15 bp, Homo sapiens
gctgaccagacaaca

SEQ ID NO: 1184299 - DNA, 15 bp, Homo sapiens
agctgaccagacaac

SEQ ID NO: 1184300 - DNA, 15 bp, Homo sapiens
gagctgaccagacaa

SEQ ID NO: 1184301 - DNA, 15 bp, Homo sapiens
agagctgaccagaca

SEQ ID NO: 1184302 - DNA, 15 bp, Homo sapiens
aagagctgaccagac

SEQ ID NO: 1184303 - DNA, 15 bp, Homo sapiens
aaagagctgaccaga

SEQ ID NO: 1184304 - DNA, 15 bp, Homo sapiens
caaagagctgaccag

SEQ ID NO: 1184305 - DNA, 15 bp, Homo sapiens
tcaaagagctgacca

SEQ ID NO: 1184306 - DNA, 15 bp, Homo sapiens
gtcaaagagctgacc

SEQ ID NO: 1184307 - DNA, 15 bp, Homo sapiens
tgtcaaagagctgac

SEQ ID NO: 1184308 - DNA, 15 bp, Homo sapiens
ttgtcaaagagctga

SEQ ID NO: 1184309 - DNA, 15 bp, Homo sapiens
tttgtcaaagagctg

SEQ ID NO: 1184310 - DNA, 15 bp, Homo sapiens
ttttgtcaaagagct

SEQ ID NO: 1184311 - DNA, 15 bp, Homo sapiens
attttgtcaaagagc

SEQ ID NO: 1184312 - DNA, 15 bp, Homo sapiens
aattttgtcaaagag

SEQ ID NO: 1184313 - DNA, 15 bp, Homo sapiens
caattttgtcaaaga

SEQ ID NO: 1184314 - DNA, 15 bp, Homo sapiens
gcaattttgtcaaag

SEQ ID NO: 1184315 - DNA, 15 bp, Homo sapiens
ggcaattttgtcaaa

SEQ ID NO: 1184316 - DNA, 15 bp, Homo sapiens
tggcaattttgtcaa

SEQ ID NO: 1184317 - DNA, 15 bp, Homo sapiens
atggcaattttgtca

SEQ ID NO: 1184318 - DNA, 15 bp, Homo sapiens
gatggcaattttgtc

SEQ ID NO: 1184319 - DNA, 15 bp, Homo sapiens
ggatggcaattttgt

SEQ ID NO: 1184320 - DNA, 15 bp, Homo sapiens
aggatggcaattttg

SEQ ID NO: 1184321 - DNA, 15 bp, Homo sapiens
caggatggcaatttt

SEQ ID NO: 1184322 - DNA, 15 bp, Homo sapiens
tcaggatggcaattt

SEQ ID NO: 1184323 - DNA, 15 bp, Homo sapiens
ctcaggatggcaatt

SEQ ID NO: 1184324 - DNA, 15 bp, Homo sapiens
gctcaggatggcaat

SEQ ID NO: 1184325 - DNA, 15 bp, Homo sapiens
agctcaggatggcaa

SEQ ID NO: 1184326 - DNA, 15 bp, Homo sapiens
aagctcaggatggca

SEQ ID NO: 1184327 - DNA, 15 bp, Homo sapiens
gaagctcaggatggc

SEQ ID NO: 1184328 - DNA, 15 bp, Homo sapiens
cgaagctcaggatgg

SEQ ID NO: 1184329 - DNA, 15 bp, Homo sapiens
ccgaagctcaggatg

SEQ ID NO: 1184330 - DNA, 15 bp, Homo sapiens
tccgaagctcaggat

SEQ ID NO: 1184331 - DNA, 15 bp, Homo sapiens
ctccgaagctcagga

SEQ ID NO: 1184332 - DNA, 15 bp, Homo sapiens
tctccgaagctcagg

SEQ ID NO: 1184333 - DNA, 15 bp, Homo sapiens
ctctccgaagctcag

SEQ ID NO: 1184334 - DNA, 15 bp, Homo sapiens
gctctccgaagctca

SEQ ID NO: 1184335 - DNA, 15 bp, Homo sapiens
agctctccgaagctc

SEQ ID NO: 1184336 - DNA, 15 bp, Homo sapiens
cagctctccgaagct

SEQ ID NO: 1184337 - DNA, 15 bp, Homo sapiens
tcagctctccgaagc

SEQ ID NO: 1184338 - DNA, 15 bp, Homo sapiens
atcagctctccgaag

SEQ ID NO: 1184339 - DNA, 15 bp, Homo sapiens
aatcagctctccgaa

SEQ ID NO: 1184340 - DNA, 15 bp, Homo sapiens
aaatcagctctccga

SEQ ID NO: 1184341 - DNA, 15 bp, Homo sapiens
aaaatcagctctccg

SEQ ID NO: 1184342 - DNA, 15 bp, Homo sapiens
gaaaatcagctctcc

SEQ ID NO: 1184343 - DNA, 15 bp, Homo sapiens
agaaaatcagctctc

SEQ ID NO: 1184344 - DNA, 15 bp, Homo sapiens
cagaaaatcagctct

SEQ ID NO: 1184345 - DNA, 15 bp, Homo sapiens
acagaaaatcagctc

SEQ ID NO: 1184346 - DNA, 15 bp, Homo sapiens
cacagaaaatcagct

SEQ ID NO: 1184347 - DNA, 15 bp, Homo sapiens
ccacagaaaatcagc

SEQ ID NO: 1184348 - DNA, 15 bp, Homo sapiens
gccacagaaaatcag

SEQ ID NO: 1184349 - DNA, 15 bp, Homo sapiens
tgccacagaaaatca

SEQ ID NO: 1184350 - DNA, 15 bp, Homo sapiens
gtgccacagaaaatc

SEQ ID NO: 1184351 - DNA, 15 bp, Homo sapiens
cgtgccacagaaaat

SEQ ID NO: 1184352 - DNA, 15 bp, Homo sapiens
gcgtgccacagaaaa

SEQ ID NO: 1184353 - DNA, 15 bp, Homo sapiens
ggcgtgccacagaaa

SEQ ID NO: 1184354 - DNA, 15 bp, Homo sapiens
tggcgtgccacagaa

SEQ ID NO: 1184355 - DNA, 15 bp, Homo sapiens
ctggcgtgccacaga

SEQ ID NO: 1184356 - DNA, 15 bp, Homo sapiens
gctggcgtgccacag

SEQ ID NO: 1184357 - DNA, 15 bp, Homo sapiens
cgctggcgtgccaca

SEQ ID NO: 1184358 - DNA, 15 bp, Homo sapiens
ccgctggcgtgccac

SEQ ID NO: 1184359 - DNA, 15 bp, Homo sapiens
tccgctggcgtgcca

SEQ ID NO: 1184360 - DNA, 15 bp, Homo sapiens
ttccgctggcgtgcc

SEQ ID NO: 1184361 - DNA, 15 bp, Homo sapiens
tttccgctggcgtgc

SEQ ID NO: 1184362 - DNA, 15 bp, Homo sapiens
atttccgctggcgtg

SEQ ID NO: 1184363 - DNA, 15 bp, Homo sapiens
catttccgctggcgt

SEQ ID NO: 1184364 - DNA, 15 bp, Homo sapiens
gcatttccgctggcg

SEQ ID NO: 1184365 - DNA, 15 bp, Homo sapiens
agcatttccgctggc

SEQ ID NO: 1184366 - DNA, 15 bp, Homo sapiens
aagcatttccgctgg

SEQ ID NO: 1184367 - DNA, 15 bp, Homo sapiens
caagcatttccgctg

SEQ ID NO: 1184368 - DNA, 15 bp, Homo sapiens
tcaagcatttccgct

SEQ ID NO: 1184369 - DNA, 15 bp, Homo sapiens
atcaagcatttccgc

SEQ ID NO: 1184370 - DNA, 15 bp, Homo sapiens
aatcaagcatttccg

SEQ ID NO: 1184371 - DNA, 15 bp, Homo sapiens
aaatcaagcatttcc

SEQ ID NO: 1184372 - DNA, 15 bp, Homo sapiens
gaaatcaagcatttc

SEQ ID NO: 1184373 - DNA, 15 bp, Homo sapiens
agaaatcaagcattt

SEQ ID NO: 1184374 - DNA, 15 bp, Homo sapiens
aagaaatcaagcatt

SEQ ID NO: 1184375 - DNA, 15 bp, Homo sapiens
gaagaaatcaagcat

SEQ ID NO: 1184376 - DNA, 15 bp, Homo sapiens
tgaagaaatcaagca

SEQ ID NO: 1184377 - DNA, 15 bp, Homo sapiens
ttgaagaaatcaagc

SEQ ID NO: 1184378 - DNA, 15 bp, Homo sapiens
attgaagaaatcaag

SEQ ID NO: 1184379 - DNA, 15 bp, Homo sapiens
cattgaagaaatcaa

SEQ ID NO: 1184380 - DNA, 15 bp, Homo sapiens
tcattgaagaaatca

SEQ ID NO: 1184381 - DNA, 15 bp, Homo sapiens
gtcattgaagaaatc

SEQ ID NO: 1184382 - DNA, 15 bp, Homo sapiens
agtcattgaagaaat

SEQ ID NO: 1184383 - DNA, 15 bp, Homo sapiens
cagtcattgaagaaa

SEQ ID NO: 1184384 - DNA, 15 bp, Homo sapiens
gcagtcattgaagaa

SEQ ID NO: 1184385 - DNA, 15 bp, Homo sapiens
cgcagtcattgaaga

SEQ ID NO: 1184386 - DNA, 15 bp, Homo sapiens
ccgcagtcattgaag

SEQ ID NO: 1184387 - DNA, 15 bp, Homo sapiens
accgcagtcattgaa

SEQ ID NO: 1184388 - DNA, 15 bp, Homo sapiens
aaccgcagtcattga

SEQ ID NO: 1184389 - DNA, 15 bp, Homo sapiens
taaccgcagtcattg

SEQ ID NO: 1184390 - DNA, 15 bp, Homo sapiens
gtaaccgcagtcatt

SEQ ID NO: 1184391 - DNA, 15 bp, Homo sapiens
ggtaaccgcagtcat

SEQ ID NO: 1184392 - DNA, 15 bp, Homo sapiens
gggtaaccgcagtca

SEQ ID NO: 1184393 - DNA, 15 bp, Homo sapiens
agggtaaccgcagtc

SEQ ID NO: 1184394 - DNA, 15 bp, Homo sapiens
aagggtaaccgcagt

SEQ ID NO: 1184395 - DNA, 15 bp, Homo sapiens
caagggtaaccgcag

SEQ ID NO: 1184396 - DNA, 15 bp, Homo sapiens
acaagggtaaccgca

SEQ ID NO: 1184397 - DNA, 15 bp, Homo sapiens
gacaagggtaaccgc

SEQ ID NO: 1184398 - DNA, 15 bp, Homo sapiens
ggacaagggtaaccg

SEQ ID NO: 1184399 - DNA, 15 bp, Homo sapiens
aggacaagggtaacc

SEQ ID NO: 1184400 - DNA, 15 bp, Homo sapiens
caggacaagggtaac

SEQ ID NO: 1184401 - DNA, 15 bp, Homo sapiens
tcaggacaagggtaa

SEQ ID NO: 1184402 - DNA, 15 bp, Homo sapiens
ttcaggacaagggta

SEQ ID NO: 1184403 - DNA, 15 bp, Homo sapiens
gttcaggacaagggt

SEQ ID NO: 1184404 - DNA, 15 bp, Homo sapiens
tgttcaggacaaggg

SEQ ID NO: 1184405 - DNA, 15 bp, Homo sapiens
atgttcaggacaagg

SEQ ID NO: 1184406 - DNA, 15 bp, Homo sapiens
aatgttcaggacaag

SEQ ID NO: 1184407 - DNA, 15 bp, Homo sapiens
gaatgttcaggacaa

SEQ ID NO: 1184408 - DNA, 15 bp, Homo sapiens
tgaatgttcaggaca

SEQ ID NO: 1184409 - DNA, 15 bp, Homo sapiens
ttgaatgttcaggac

SEQ ID NO: 1184410 - DNA, 15 bp, Homo sapiens
tttgaatgttcagga

SEQ ID NO: 1184411 - DNA, 15 bp, Homo sapiens
gtttgaatgttcagg

SEQ ID NO: 1184412 - DNA, 15 bp, Homo sapiens
ggtttgaatgttcag

SEQ ID NO: 1184413 - DNA, 15 bp, Homo sapiens
gggtttgaatgttca

SEQ ID NO: 1184414 - DNA, 15 bp, Homo sapiens
agggtttgaatgttc

SEQ ID NO: 1184415 - DNA, 15 bp, Homo sapiens
aagggtttgaatgtt

SEQ ID NO: 1184416 - DNA, 15 bp, Homo sapiens
aaagggtttgaatgt

SEQ ID NO: 1184417 - DNA, 15 bp, Homo sapiens
aaaagggtttgaatg

SEQ ID NO: 1184418 - DNA, 15 bp, Homo sapiens
caaaagggtttgaat

SEQ ID NO: 1184419 - DNA, 15 bp, Homo sapiens
tcaaaagggtttgaa

SEQ ID NO: 1184420 - DNA, 15 bp, Homo sapiens
gtcaaaagggtttga

SEQ ID NO: 1184421 - DNA, 15 bp, Homo sapiens
agtcaaaagggtttg

SEQ ID NO: 1184422 - DNA, 15 bp, Homo sapiens
aagtcaaaagggttt

SEQ ID NO: 1184423 - DNA, 15 bp, Homo sapiens
gaagtcaaaagggtt

SEQ ID NO: 1184424 - DNA, 15 bp, Homo sapiens
agaagtcaaaagggt

SEQ ID NO: 1184425 - DNA, 15 bp, Homo sapiens
tagaagtcaaaaggg

SEQ ID NO: 1184426 - DNA, 15 bp, Homo sapiens
atagaagtcaaaagg

SEQ ID NO: 1184427 - DNA, 15 bp, Homo sapiens
tatagaagtcaaaag

SEQ ID NO: 1184428 - DNA, 15 bp, Homo sapiens
ctatagaagtcaaaa

SEQ ID NO: 1184429 - DNA, 15 bp, Homo sapiens
actatagaagtcaaa

SEQ ID NO: 1184430 - DNA, 15 bp, Homo sapiens
tactatagaagtcaa

SEQ ID NO: 1184431 - DNA, 15 bp, Homo sapiens
ttactatagaagtca

SEQ ID NO: 1184432 - DNA, 15 bp, Homo sapiens
cttactatagaagtc

SEQ ID NO: 1184433 - DNA, 15 bp, Homo sapiens
acttactatagaagt

SEQ ID NO: 1184434 - DNA, 15 bp, Homo sapiens
aacttactatagaag

SEQ ID NO: 1184435 - DNA, 15 bp, Homo sapiens
aaacttactatagaa

SEQ ID NO: 1184436 - DNA, 15 bp, Homo sapiens
aaaacttactataga

SEQ ID NO: 1184437 - DNA, 15 bp, Homo sapiens
aaaaacttactatag

SEQ ID NO: 1184438 - DNA, 15 bp, Homo sapiens
gaaaaacttactata

SEQ ID NO: 1184439 - DNA, 15 bp, Homo sapiens
agaaaaacttactat

SEQ ID NO: 1184440 - DNA, 15 bp, Homo sapiens
aagaaaaacttacta

SEQ ID NO: 1184441 - DNA, 15 bp, Homo sapiens
aaagaaaaacttact

SEQ ID NO: 1184442 - DNA, 15 bp, Homo sapiens
gaaagaaaaacttac

SEQ ID NO: 1184443 - DNA, 15 bp, Homo sapiens
tgaaagaaaaactta

SEQ ID NO: 1184444 - DNA, 15 bp, Homo sapiens
gtgaaagaaaaactt

SEQ ID NO: 1184445 - DNA, 15 bp, Homo sapiens
tgtgaaagaaaaact

SEQ ID NO: 1184446 - DNA, 15 bp, Homo sapiens
atgtgaaagaaaaac

SEQ ID NO: 1184447 - DNA, 15 bp, Homo sapiens
aatgtgaaagaaaaa

SEQ ID NO: 1184448 - DNA, 15 bp, Homo sapiens
gaatgtgaaagaaaa

SEQ ID NO: 1184449 - DNA, 15 bp, Homo sapiens
ggaatgtgaaagaaa

SEQ ID NO: 1184450 - DNA, 15 bp, Homo sapiens
gggaatgtgaaagaa

SEQ ID NO: 1184451 - DNA, 15 bp, Homo sapiens
ggggaatgtgaaaga

SEQ ID NO: 1184452 - DNA, 15 bp, Homo sapiens
tggggaatgtgaaag

SEQ ID NO: 1184453 - DNA, 15 bp, Homo sapiens
atggggaatgtgaaa

SEQ ID NO: 1184454 - DNA, 15 bp, Homo sapiens
gatggggaatgtgaa

SEQ ID NO: 1184455 - DNA, 15 bp, Homo sapiens
tgatggggaatgtga

SEQ ID NO: 1184456 - DNA, 15 bp, Homo sapiens
atgatggggaatgtg

SEQ ID NO: 1184457 - DNA, 15 bp, Homo sapiens
catgatggggaatgt

SEQ ID NO: 1184458 - DNA, 15 bp, Homo sapiens
tcatgatggggaatg

SEQ ID NO: 1184459 - DNA, 15 bp, Homo sapiens
ttcatgatggggaat

SEQ ID NO: 1184460 - DNA, 15 bp, Homo sapiens
attcatgatggggaa

SEQ ID NO: 1184461 - DNA, 15 bp, Homo sapiens
cattcatgatgggga

SEQ ID NO: 1184462 - DNA, 15 bp, Homo sapiens
acattcatgatgggg

SEQ ID NO: 1184463 - DNA, 15 bp, Homo sapiens
aacattcatgatggg

SEQ ID NO: 1184464 - DNA, 15 bp, Homo sapiens
aaacattcatgatgg

SEQ ID NO: 1184465 - DNA, 15 bp, Homo sapiens
aaaacattcatgatg

SEQ ID NO: 1184466 - DNA, 15 bp, Homo sapiens
aaaaacattcatgat

SEQ ID NO: 1184467 - DNA, 15 bp, Homo sapiens
aaaaaacattcatga

SEQ ID NO: 1184468 - DNA, 15 bp, Homo sapiens
taaaaaacattcatg

SEQ ID NO: 1184469 - DNA, 15 bp, Homo sapiens
ttaaaaaacattcat

SEQ ID NO: 1184470 - DNA, 15 bp, Homo sapiens
tttaaaaaacattca

SEQ ID NO: 1184471 - DNA, 15 bp, Homo sapiens
gtttaaaaaacattc

SEQ ID NO: 1184472 - DNA, 15 bp, Homo sapiens
agtttaaaaaacatt

SEQ ID NO: 1184473 - DNA, 15 bp, Homo sapiens
aagtttaaaaaacat

SEQ ID NO: 1184474 - DNA, 15 bp, Homo sapiens
aaagtttaaaaaaca

SEQ ID NO: 1184475 - DNA, 15 bp, Homo sapiens
gaaagtttaaaaaac

SEQ ID NO: 1184476 - DNA, 15 bp, Homo sapiens
gagaaagtttaaaaa

SEQ ID NO: 1184477 - DNA, 15 bp, Homo sapiens
tgagaaagtttaaaa

SEQ ID NO: 1184478 - DNA, 15 bp, Homo sapiens
atgagaaagtttaaa

SEQ ID NO: 1184479 - DNA, 15 bp, Homo sapiens
gatgagaaagtttaa

SEQ ID NO: 1184480 - DNA, 15 bp, Homo sapiens
agatgagaaagttta

SEQ ID NO: 1184481 - DNA, 15 bp, Homo sapiens
gagatgagaaagttt

SEQ ID NO: 1184482 - DNA, 15 bp, Homo sapiens
tgagatgagaaagtt

SEQ ID NO: 1184483 - DNA, 15 bp, Homo sapiens
ctgagatgagaaagt

SEQ ID NO: 1184484 - DNA, 15 bp, Homo sapiens
tctgagatgagaaag

SEQ ID NO: 1184485 - DNA, 15 bp, Homo sapiens
gtctgagatgagaaa

SEQ ID NO: 1184486 - DNA, 15 bp, Homo sapiens
agtctgagatgagaa

SEQ ID NO: 1184487 - DNA, 15 bp, Homo sapiens
aagtctgagatgaga

SEQ ID NO: 1184488 - DNA, 15 bp, Homo sapiens
gaagtctgagatgag

SEQ ID NO: 1184489 - DNA, 15 bp, Homo sapiens
agaagtctgagatga

SEQ ID NO: 1184490 - DNA, 15 bp, Homo sapiens
cagaagtctgagatg

SEQ ID NO: 1184491 - DNA, 15 bp, Homo sapiens
gcagaagtctgagat

SEQ ID NO: 1184492 - DNA, 15 bp, Homo sapiens
ggcagaagtctgaga

SEQ ID NO: 1184493 - DNA, 15 bp, Homo sapiens
aggcagaagtctgag

SEQ ID NO: 1184494 - DNA, 15 bp, Homo sapiens
caggcagaagtctga

SEQ ID NO: 1184495 - DNA, 15 bp, Homo sapiens
ccaggcagaagtctg

SEQ ID NO: 1184496 - DNA, 15 bp, Homo sapiens
tccaggcagaagtct

SEQ ID NO: 1184497 - DNA, 15 bp, Homo sapiens
atccaggcagaagtc

SEQ ID NO: 1184498 - DNA, 15 bp, Homo sapiens
catccaggcagaagt

SEQ ID NO: 1184499 - DNA, 15 bp, Homo sapiens
tcatccaggcagaag

SEQ ID NO: 1184500 - DNA, 15 bp, Homo sapiens
gtcatccaggcagaa

SEQ ID NO: 1184501 - DNA, 15 bp, Homo sapiens
tgtcatccaggcaga

SEQ ID NO: 1184502 - DNA, 15 bp, Homo sapiens
gtgtcatccaggcag

SEQ ID NO: 1184503 - DNA, 15 bp, Homo sapiens
ggtgtcatccaggca

SEQ ID NO: 1184504 - DNA, 15 bp, Homo sapiens
tggtgtcatccaggc

SEQ ID NO: 1184505 - DNA, 15 bp, Homo sapiens
ctggtgtcatccagg

SEQ ID NO: 1184506 - DNA, 15 bp, Homo sapiens
actggtgtcatccag

SEQ ID NO: 1184507 - DNA, 15 bp, Homo sapiens
gactggtgtcatcca

SEQ ID NO: 1184508 - DNA, 15 bp, Homo sapiens
agactggtgtcatcc

SEQ ID NO: 1184509 - DNA, 15 bp, Homo sapiens
tagactggtgtcatc

SEQ ID NO: 1184510 - DNA, 15 bp, Homo sapiens
ctagactggtgtcat

SEQ ID NO: 1184511 - DNA, 15 bp, Homo sapiens
actagactggtgtca

SEQ ID NO: 1184512 - DNA, 15 bp, Homo sapiens
cactagactggtgtc

SEQ ID NO: 1184513 - DNA, 15 bp, Homo sapiens
ccactagactggtgt

SEQ ID NO: 1184514 - DNA, 15 bp, Homo sapiens
tccactagactggtg

SEQ ID NO: 1184515 - DNA, 15 bp, Homo sapiens
atccactagactggt

SEQ ID NO: 1184516 - DNA, 15 bp, Homo sapiens
aatccactagactgg

SEQ ID NO: 1184517 - DNA, 15 bp, Homo sapiens
aaatccactagactg

SEQ ID NO: 1184518 - DNA, 15 bp, Homo sapiens
caaatccactagact

SEQ ID NO: 1184519 - DNA, 15 bp, Homo sapiens
tcaaatccactagac

SEQ ID NO: 1184520 - DNA, 15 bp, Homo sapiens
atcaaatccactaga

SEQ ID NO: 1184521 - DNA, 15 bp, Homo sapiens
aatcaaatccactag

SEQ ID NO: 1184522 - DNA, 15 bp, Homo sapiens
aaatcaaatccacta

SEQ ID NO: 1184523 - DNA, 15 bp, Homo sapiens
aaaatcaaatccact

SEQ ID NO: 1184524 - DNA, 15 bp, Homo sapiens
aaaaatcaaatccac

SEQ ID NO: 1184525 - DNA, 15 bp, Homo sapiens
caaaaatcaaatcca

SEQ ID NO: 1184526 - DNA, 15 bp, Homo sapiens
gcaaaaatcaaatcc

SEQ ID NO: 1184527 - DNA, 15 bp, Homo sapiens
agcaaaaatcaaatc

SEQ ID NO: 1184528 - DNA, 15 bp, Homo sapiens
aagcaaaaatcaaat

SEQ ID NO: 1184529 - DNA, 15 bp, Homo sapiens
aaagcaaaaatcaaa

SEQ ID NO: 1184530 - DNA, 15 bp, Homo sapiens
aaaagcaaaaatcaa

SEQ ID NO: 1184531 - DNA, 15 bp, Homo sapiens
caaaagcaaaaatca

SEQ ID NO: 1184532 - DNA, 15 bp, Homo sapiens
acaaaagcaaaaatc

SEQ ID NO: 1184533 - DNA, 15 bp, Homo sapiens
aacaaaagcaaaaat

SEQ ID NO: 1184534 - DNA, 15 bp, Homo sapiens
aaacaaaagcaaaaa

SEQ ID NO: 1184535 - DNA, 15 bp, Homo sapiens
aaaacaaaagcaaaa

SEQ ID NO: 1184536 - DNA, 15 bp, Homo sapiens
aaaaacaaaagcaaa

SEQ ID NO: 1184537 - DNA, 15 bp, Homo sapiens
caaaaacaaaagcaa

SEQ ID NO: 1184538 - DNA, 15 bp, Homo sapiens
acaaaaacaaaagca

SEQ ID NO: 1184539 - DNA, 15 bp, Homo sapiens
cacaaaaacaaaagc

SEQ ID NO: 1184540 - DNA, 15 bp, Homo sapiens
acacaaaaacaaaag

SEQ ID NO: 1184541 - DNA, 15 bp, Homo sapiens
taaaacacaaaaaca

SEQ ID NO: 1184542 - DNA, 15 bp, Homo sapiens
ataaaacacaaaaac

SEQ ID NO: 1184543 - DNA, 15 bp, Homo sapiens
tataaaacacaaaaa

SEQ ID NO: 1184544 - DNA, 15 bp, Homo sapiens
gtataaaacacaaaa

SEQ ID NO: 1184545 - DNA, 15 bp, Homo sapiens
agtataaaacacaaa

SEQ ID NO: 1184546 - DNA, 15 bp, Homo sapiens
gagtataaaacacaa

SEQ ID NO: 1184547 - DNA, 15 bp, Homo sapiens
agagtataaaacaca

SEQ ID NO: 1184548 - DNA, 15 bp, Homo sapiens
aagagtataaaacac

SEQ ID NO: 1184549 - DNA, 15 bp, Homo sapiens
gaagagtataaaaca

SEQ ID NO: 1184550 - DNA, 15 bp, Homo sapiens
tgaagagtataaaac

SEQ ID NO: 1184551 - DNA, 15 bp, Homo sapiens
ttgaagagtataaaa

SEQ ID NO: 1184552 - DNA, 15 bp, Homo sapiens
cttgaagagtataaa

SEQ ID NO: 1184553 - DNA, 15 bp, Homo sapiens
ccttgaagagtataa

SEQ ID NO: 1184554 - DNA, 15 bp, Homo sapiens
tccttgaagagtata

SEQ ID NO: 1184555 - DNA, 15 bp, Homo sapiens
ttccttgaagagtat

SEQ ID NO: 1184556 - DNA, 15 bp, Homo sapiens
attccttgaagagta

SEQ ID NO: 1184557 - DNA, 15 bp, Homo sapiens
gattccttgaagagt

SEQ ID NO: 1184558 - DNA, 15 bp, Homo sapiens
tgattccttgaagag

SEQ ID NO: 1184559 - DNA, 15 bp, Homo sapiens
ttgattccttgaaga

SEQ ID NO: 1184560 - DNA, 15 bp, Homo sapiens
attgattccttgaag

SEQ ID NO: 1184561 - DNA, 15 bp, Homo sapiens
aattgattccttgaa

SEQ ID NO: 1184562 - DNA, 15 bp, Homo sapiens
aaattgattccttga

SEQ ID NO: 1184563 - DNA, 15 bp, Homo sapiens
caaattgattccttg

SEQ ID NO: 1184564 - DNA, 15 bp, Homo sapiens
ccaaattgattcctt

SEQ ID NO: 1184565 - DNA, 15 bp, Homo sapiens
gccaaattgattcct

SEQ ID NO: 1184566 - DNA, 15 bp, Homo sapiens
ggccaaattgattcc

SEQ ID NO: 1184567 - DNA, 15 bp, Homo sapiens
cggccaaattgattc

SEQ ID NO: 1184568 - DNA, 15 bp, Homo sapiens
ccggccaaattgatt

SEQ ID NO: 1184569 - DNA, 15 bp, Homo sapiens
cccggccaaattgat

SEQ ID NO: 1184570 - DNA, 15 bp, Homo sapiens
acccggccaaattga

SEQ ID NO: 1184571 - DNA, 15 bp, Homo sapiens
gacccggccaaattg

SEQ ID NO: 1184572 - DNA, 15 bp, Homo sapiens
tgacccggccaaatt

SEQ ID NO: 1184573 - DNA, 15 bp, Homo sapiens
ttgacccggccaaat

SEQ ID NO: 1184574 - DNA, 15 bp, Homo sapiens
attgacccggccaaa

SEQ ID NO: 1184575 - DNA, 15 bp, Homo sapiens
cattgacccggccaa

SEQ ID NO: 1184576 - DNA, 15 bp, Homo sapiens
tcattgacccggcca

SEQ ID NO: 1184577 - DNA, 15 bp, Homo sapiens
ttcattgacccggcc

SEQ ID NO: 1184578 - DNA, 15 bp, Homo sapiens
gttcattgacccggc

SEQ ID NO: 1184579 - DNA, 15 bp, Homo sapiens
agttcattgacccgg

SEQ ID NO: 1184580 - DNA, 15 bp, Homo sapiens
aagttcattgacccg

SEQ ID NO: 1184581 - DNA, 15 bp, Homo sapiens
caagttcattgaccc

SEQ ID NO: 1184582 - DNA, 15 bp, Homo sapiens
gcaagttcattgacc

SEQ ID NO: 1184583 - DNA, 15 bp, Homo sapiens
ggcaagttcattgac

SEQ ID NO: 1184584 - DNA, 15 bp, Homo sapiens
tggcaagttcattga

SEQ ID NO: 1184585 - DNA, 15 bp, Homo sapiens
ctggcaagttcattg

SEQ ID NO: 1184586 - DNA, 15 bp, Homo sapiens
tctggcaagttcatt

SEQ ID NO: 1184587 - DNA, 15 bp, Homo sapiens
ctctggcaagttcat

SEQ ID NO: 1184588 - DNA, 15 bp, Homo sapiens
tctctggcaagttca

SEQ ID NO: 1184589 - DNA, 15 bp, Homo sapiens
atctctggcaagttc

SEQ ID NO: 1184590 - DNA, 15 bp, Homo sapiens
catctctggcaagtt

SEQ ID NO: 1184591 - DNA, 15 bp, Homo sapiens
tcatctctggcaagt

SEQ ID NO: 1184592 - DNA, 15 bp, Homo sapiens
gtcatctctggcaag

SEQ ID NO: 1184593 - DNA, 15 bp, Homo sapiens
agtcatctctggcaa

SEQ ID NO: 1184594 - DNA, 15 bp, Homo sapiens
tagtcatctctggca

SEQ ID NO: 1184595 - DNA, 15 bp, Homo sapiens
atagtcatctctggc

SEQ ID NO: 1184596 - DNA, 15 bp, Homo sapiens
gatagtcatctctgg

SEQ ID NO: 1184597 - DNA, 15 bp, Homo sapiens
tgatagtcatctctg

SEQ ID NO: 1184598 - DNA, 15 bp, Homo sapiens
ctgatagtcatctct

SEQ ID NO: 1184599 - DNA, 15 bp, Homo sapiens
tctgatagtcatctc

SEQ ID NO: 1184600 - DNA, 15 bp, Homo sapiens
ttctgatagtcatct

SEQ ID NO: 1184601 - DNA, 15 bp, Homo sapiens
attctgatagtcatc

SEQ ID NO: 1184602 - DNA, 15 bp, Homo sapiens
cattctgatagtcat

SEQ ID NO: 1184603 - DNA, 15 bp, Homo sapiens
tcattctgatagtca

SEQ ID NO: 1184604 - DNA, 15 bp, Homo sapiens
ctcattctgatagtc

SEQ ID NO: 1184605 - DNA, 15 bp, Homo sapiens
cctcattctgatagt

SEQ ID NO: 1184606 - DNA, 15 bp, Homo sapiens
acctcattctgatag

SEQ ID NO: 1184607 - DNA, 15 bp, Homo sapiens
gacctcattctgata

SEQ ID NO: 1184608 - DNA, 15 bp, Homo sapiens
tgacctcattctgat

SEQ ID NO: 1184609 - DNA, 15 bp, Homo sapiens
ctgacctcattctga

SEQ ID NO: 1184610 - DNA, 15 bp, Homo sapiens
cctgacctcattctg

SEQ ID NO: 1184611 - DNA, 15 bp, Homo sapiens
tccctgacctcattc

SEQ ID NO: 1184612 - DNA, 15 bp, Homo sapiens
atccctgacctcatt

SEQ ID NO: 1184613 - DNA, 15 bp, Homo sapiens
gatccctgacctcat

SEQ ID NO: 1184614 - DNA, 15 bp, Homo sapiens
agatccctgacctca

SEQ ID NO: 1184615 - DNA, 15 bp, Homo sapiens
gagatccctgacctc

SEQ ID NO: 1184616 - DNA, 15 bp, Homo sapiens
agagatccctgacct

SEQ ID NO: 1184617 - DNA, 15 bp, Homo sapiens
gagagatccctgacc

SEQ ID NO: 1184618 - DNA, 15 bp, Homo sapiens
agagagatccctgac

SEQ ID NO: 1184619 - DNA, 15 bp, Homo sapiens
gagagagatccctga

SEQ ID NO: 1184620 - DNA, 15 bp, Homo sapiens
tgagagagatccctg

SEQ ID NO: 1184621 - DNA, 15 bp, Homo sapiens
ttgagagagatccct

SEQ ID NO: 1184622 - DNA, 15 bp, Homo sapiens
tttgagagagatccc

SEQ ID NO: 1184623 - DNA, 15 bp, Homo sapiens
gtttgagagagatcc

SEQ ID NO: 1184624 - DNA, 15 bp, Homo sapiens
tgtttgagagagatc

SEQ ID NO: 1184625 - DNA, 15 bp, Homo sapiens
ttgtttgagagagat

SEQ ID NO: 1184626 - DNA, 15 bp, Homo sapiens
tttgtttgagagaga

SEQ ID NO: 1184627 - DNA, 15 bp, Homo sapiens
gtttgtttgagagag

SEQ ID NO: 1184628 - DNA, 15 bp, Homo sapiens
agtttgtttgagaga

SEQ ID NO: 1184629 - DNA, 15 bp, Homo sapiens
cagtttgtttgagag

SEQ ID NO: 1184630 - DNA, 15 bp, Homo sapiens
ccagtttgtttgaga

SEQ ID NO: 1184631 - DNA, 15 bp, Homo sapiens
gccagtttgtttgag

SEQ ID NO: 1184632 - DNA, 15 bp, Homo sapiens
cgccagtttgtttga

SEQ ID NO: 1184633 - DNA, 15 bp, Homo sapiens
gcgccagtttgtttg

SEQ ID NO: 1184634 - DNA, 15 bp, Homo sapiens
tgcgccagtttgttt

SEQ ID NO: 1184635 - DNA, 15 bp, Homo sapiens
gtgcgccagtttgtt

SEQ ID NO: 1184636 - DNA, 15 bp, Homo sapiens
agtgcgccagtttgt

SEQ ID NO: 1184637 - DNA, 15 bp, Homo sapiens
cagtgcgccagtttg

SEQ ID NO: 1184638 - DNA, 15 bp, Homo sapiens
gcagtgcgccagttt

SEQ ID NO: 1184639 - DNA, 15 bp, Homo sapiens
agcagtgcgccagtt

SEQ ID NO: 1184640 - DNA, 15 bp, Homo sapiens
tagcagtgcgccagt

SEQ ID NO: 1184641 - DNA, 15 bp, Homo sapiens
gtagcagtgcgccag

SEQ ID NO: 1184642 - DNA, 15 bp, Homo sapiens
agtagcagtgcgcca

SEQ ID NO: 1184643 - DNA, 15 bp, Homo sapiens
tagtagcagtgcgcc

SEQ ID NO: 1184644 - DNA, 15 bp, Homo sapiens
gtagtagcagtgcgc

SEQ ID NO: 1184645 - DNA, 15 bp, Homo sapiens
agtagtagcagtgcg

SEQ ID NO: 1184646 - DNA, 15 bp, Homo sapiens
aagtagtagcagtgc

SEQ ID NO: 1184647 - DNA, 15 bp, Homo sapiens
aaagtagtagcagtg

SEQ ID NO: 1184648 - DNA, 15 bp, Homo sapiens
taaagtagtagcagt

SEQ ID NO: 1184649 - DNA, 15 bp, Homo sapiens
ataaagtagtagcag

SEQ ID NO: 1184650 - DNA, 15 bp, Homo sapiens
gataaagtagtagca

SEQ ID NO: 1184651 - DNA, 15 bp, Homo sapiens
tgataaagtagtagc

SEQ ID NO: 1184652 - DNA, 15 bp, Homo sapiens
ctgataaagtagtag

SEQ ID NO: 1184653 - DNA, 15 bp, Homo sapiens
tctgataaagtagta

SEQ ID NO: 1184654 - DNA, 15 bp, Homo sapiens
ctctgataaagtagt

SEQ ID NO: 1184655 - DNA, 15 bp, Homo sapiens
gctctgataaagtag

SEQ ID NO: 1184656 - DNA, 15 bp, Homo sapiens
tgctctgataaagta

SEQ ID NO: 1184657 - DNA, 15 bp, Homo sapiens
atgctctgataaagt

SEQ ID NO: 1184658 - DNA, 15 bp, Homo sapiens
tatgctctgataaag

SEQ ID NO: 1184659 - DNA, 15 bp, Homo sapiens
ttatgctctgataaa

SEQ ID NO: 1184660 - DNA, 15 bp, Homo sapiens
attatgctctgataa

SEQ ID NO: 1184661 - DNA, 15 bp, Homo sapiens
aattatgctctgata

SEQ ID NO: 1184662 - DNA, 15 bp, Homo sapiens
taattatgctctgat

SEQ ID NO: 1184663 - DNA, 15 bp, Homo sapiens
ctaattatgctctga

SEQ ID NO: 1184664 - DNA, 15 bp, Homo sapiens
gctaattatgctctg

SEQ ID NO: 1184665 - DNA, 15 bp, Homo sapiens
agctaattatgctct

SEQ ID NO: 1184666 - DNA, 15 bp, Homo sapiens
cagctaattatgctc

SEQ ID NO: 1184667 - DNA, 15 bp, Homo sapiens
tcagctaattatgct

SEQ ID NO: 1184668 - DNA, 15 bp, Homo sapiens
ctcagctaattatgc

SEQ ID NO: 1184669 - DNA, 15 bp, Homo sapiens
gctcagctaattatg

SEQ ID NO: 1184670 - DNA, 15 bp, Homo sapiens
agctcagctaattat

SEQ ID NO: 1184671 - DNA, 15 bp, Homo sapiens
aagctcagctaatta

SEQ ID NO: 1184672 - DNA, 15 bp, Homo sapiens
gaagctcagctaatt

SEQ ID NO: 1184673 - DNA, 15 bp, Homo sapiens
agaagctcagctaat

SEQ ID NO: 1184674 - DNA, 15 bp, Homo sapiens
cagaagctcagctaa

SEQ ID NO: 1184675 - DNA, 15 bp, Homo sapiens
tcagaagctcagcta

SEQ ID NO: 1184676 - DNA, 15 bp, Homo sapiens
ttcagaagctcagct

SEQ ID NO: 1184677 - DNA, 15 bp, Homo sapiens
attcagaagctcagc

SEQ ID NO: 1184678 - DNA, 15 bp, Homo sapiens
aattcagaagctcag

SEQ ID NO: 1184679 - DNA, 15 bp, Homo sapiens
gaattcagaagctca

SEQ ID NO: 1184680 - DNA, 15 bp, Homo sapiens
agaattcagaagctc

SEQ ID NO: 1184681 - DNA, 15 bp, Homo sapiens
gagaattcagaagct

SEQ ID NO: 1184682 - DNA, 15 bp, Homo sapiens
ggagaattcagaagc

SEQ ID NO: 1184683 - DNA, 15 bp, Homo sapiens
gggagaattcagaag

SEQ ID NO: 1184684 - DNA, 15 bp, Homo sapiens
tgggagaattcagaa

SEQ ID NO: 1184685 - DNA, 15 bp, Homo sapiens
ctgggagaattcaga

SEQ ID NO: 1184686 - DNA, 15 bp, Homo sapiens
tctgggagaattcag

SEQ ID NO: 1184687 - DNA, 15 bp, Homo sapiens
gtctgggagaattca

SEQ ID NO: 1184688 - DNA, 15 bp, Homo sapiens
tgtctgggagaattc

SEQ ID NO: 1184689 - DNA, 15 bp, Homo sapiens
ttgtctgggagaatt

SEQ ID NO: 1184690 - DNA, 15 bp, Homo sapiens
attgtctgggagaat

SEQ ID NO: 1184691 - DNA, 15 bp, Homo sapiens
gattgtctgggagaa

SEQ ID NO: 1184692 - DNA, 15 bp, Homo sapiens
ggattgtctgggaga

SEQ ID NO: 1184693 - DNA, 15 bp, Homo sapiens
gggattgtctgggag

SEQ ID NO: 1184694 - DNA, 15 bp, Homo sapiens
tgggattgtctggga

SEQ ID NO: 1184695 - DNA, 15 bp, Homo sapiens
ttgggattgtctggg

SEQ ID NO: 1184696 - DNA, 15 bp, Homo sapiens
attgggattgtctgg

SEQ ID NO: 1184697 - DNA, 15 bp, Homo sapiens
cattgggattgtctg

SEQ ID NO: 1184698 - DNA, 15 bp, Homo sapiens
ccattgggattgtct

SEQ ID NO: 1184699 - DNA, 15 bp, Homo sapiens
cccattgggattgtc

SEQ ID NO: 1184700 - DNA, 15 bp, Homo sapiens
tcccattgggattgt

SEQ ID NO: 1184701 - DNA, 15 bp, Homo sapiens
atcccattgggattg

SEQ ID NO: 1184702 - DNA, 15 bp, Homo sapiens
gatcccattgggatt

SEQ ID NO: 1184703 - DNA, 15 bp, Homo sapiens
ggatcccattgggat

SEQ ID NO: 1184704 - DNA, 15 bp, Homo sapiens
aggatcccattggga

SEQ ID NO: 1184705 - DNA, 15 bp, Homo sapiens
gaggatcccattggg

SEQ ID NO: 1184706 - DNA, 15 bp, Homo sapiens
tgaggatcccattgg

SEQ ID NO: 1184707 - DNA, 15 bp, Homo sapiens
ttgaggatcccattg

SEQ ID NO: 1184708 - DNA, 15 bp, Homo sapiens
cttgaggatcccatt

SEQ ID NO: 1184709 - DNA, 15 bp, Homo sapiens
ccttgaggatcccat

SEQ ID NO: 1184710 - DNA, 15 bp, Homo sapiens
gccttgaggatccca

SEQ ID NO: 1184711 - DNA, 15 bp, Homo sapiens
ggccttgaggatccc

SEQ ID NO: 1184712 - DNA, 15 bp, Homo sapiens
gggccttgaggatcc

SEQ ID NO: 1184713 - DNA, 15 bp, Homo sapiens
agggccttgaggatc

SEQ ID NO: 1184714 - DNA, 15 bp, Homo sapiens
cagggccttgaggat

SEQ ID NO: 1184715 - DNA, 15 bp, Homo sapiens
gcagggccttgagga

SEQ ID NO: 1184716 - DNA, 15 bp, Homo sapiens
agcagggccttgagg

SEQ ID NO: 1184717 - DNA, 15 bp, Homo sapiens
cagcagggccttgag

SEQ ID NO: 1184718 - DNA, 15 bp, Homo sapiens
ccagcagggccttga

SEQ ID NO: 1184719 - DNA, 15 bp, Homo sapiens
cccagcagggccttg

SEQ ID NO: 1184720 - DNA, 15 bp, Homo sapiens
tcccagcagggcctt

SEQ ID NO: 1184721 - DNA, 15 bp, Homo sapiens
atcccagcagggcct

SEQ ID NO: 1184722 - DNA, 15 bp, Homo sapiens
catcccagcagggcc

SEQ ID NO: 1184723 - DNA, 15 bp, Homo sapiens
gcatcccagcagggc

SEQ ID NO: 1184724 - DNA, 15 bp, Homo sapiens
agcatcccagcaggg

SEQ ID NO: 1184725 - DNA, 15 bp, Homo sapiens
aagcatcccagcagg

SEQ ID NO: 1184726 - DNA, 15 bp, Homo sapiens
aaagcatcccagcag

SEQ ID NO: 1184727 - DNA, 15 bp, Homo sapiens
taaagcatcccagca

SEQ ID NO: 1184728 - DNA, 15 bp, Homo sapiens
ttaaagcatcccagc

SEQ ID NO: 1184729 - DNA, 15 bp, Homo sapiens
tttaaagcatcccag

SEQ ID NO: 1184730 - DNA, 15 bp, Homo sapiens
ctttaaagcatccca

SEQ ID NO: 1184731 - DNA, 15 bp, Homo sapiens
actttaaagcatccc

SEQ ID NO: 1184732 - DNA, 15 bp, Homo sapiens
tactttaaagcatcc

SEQ ID NO: 1184733 - DNA, 15 bp, Homo sapiens
atactttaaagcatc

SEQ ID NO: 1184734 - DNA, 15 bp, Homo sapiens
aatactttaaagcat

SEQ ID NO: 1184735 - DNA, 15 bp, Homo sapiens
gaatactttaaagca

SEQ ID NO: 1184736 - DNA, 15 bp, Homo sapiens
agaatactttaaagc

SEQ ID NO: 1184737 - DNA, 15 bp, Homo sapiens
cagaatactttaaag

SEQ ID NO: 1184738 - DNA, 15 bp, Homo sapiens
tcagaatactttaaa

SEQ ID NO: 1184739 - DNA, 15 bp, Homo sapiens
atcagaatactttaa

SEQ ID NO: 1184740 - DNA, 15 bp, Homo sapiens
aatcagaatacttta

SEQ ID NO: 1184741 - DNA, 15 bp, Homo sapiens
aaatcagaatacttt

SEQ ID NO: 1184742 - DNA, 15 bp, Homo sapiens
aaaatcagaatactt

SEQ ID NO: 1184743 - DNA, 15 bp, Homo sapiens
taaaatcagaatact

SEQ ID NO: 1184744 - DNA, 15 bp, Homo sapiens
ataaaatcagaatac

SEQ ID NO: 1184745 - DNA, 15 bp, Homo sapiens
tataaaatcagaata

SEQ ID NO: 1184746 - DNA, 15 bp, Homo sapiens
ctataaaatcagaat

SEQ ID NO: 1184747 - DNA, 15 bp, Homo sapiens
cctataaaatcagaa

SEQ ID NO: 1184748 - DNA, 15 bp, Homo sapiens
acctataaaatcaga

SEQ ID NO: 1184749 - DNA, 15 bp, Homo sapiens
cacctataaaatcag

SEQ ID NO: 1184750 - DNA, 15 bp, Homo sapiens
ccacctataaaatca

SEQ ID NO: 1184751 - DNA, 15 bp, Homo sapiens
cccacctataaaatc

SEQ ID NO: 1184752 - DNA, 15 bp, Homo sapiens
gcccacctataaaat

SEQ ID NO: 1184753 - DNA, 15 bp, Homo sapiens
tgcccacctataaaa

SEQ ID NO: 1184754 - DNA, 15 bp, Homo sapiens
atgcccacctataaa

SEQ ID NO: 1184755 - DNA, 15 bp, Homo sapiens
aatgcccacctataa

SEQ ID NO: 1184756 - DNA, 15 bp, Homo sapiens
taatgcccacctata

SEQ ID NO: 1184757 - DNA, 15 bp, Homo sapiens
ttaatgcccacctat

SEQ ID NO: 1184758 - DNA, 15 bp, Homo sapiens
gttaatgcccaccta

SEQ ID NO: 1184759 - DNA, 15 bp, Homo sapiens
ggttaatgcccacct

SEQ ID NO: 1184760 - DNA, 15 bp, Homo sapiens
tggttaatgcccacc

SEQ ID NO: 1184761 - DNA, 15 bp, Homo sapiens
gtggttaatgcccac

SEQ ID NO: 1184762 - DNA, 15 bp, Homo sapiens
tgtggttaatgccca

SEQ ID NO: 1184763 - DNA, 15 bp, Homo sapiens
ttgtggttaatgccc

SEQ ID NO: 1184764 - DNA, 15 bp, Homo sapiens
tttgtggttaatgcc

SEQ ID NO: 1184765 - DNA, 15 bp, Homo sapiens
atttgtggttaatgc

SEQ ID NO: 1184766 - DNA, 15 bp, Homo sapiens
aatttgtggttaatg

SEQ ID NO: 1184767 - DNA, 15 bp, Homo sapiens
aaatttgtggttaat

SEQ ID NO: 1184768 - DNA, 15 bp, Homo sapiens
aaaatttgtggttaa

SEQ ID NO: 1184769 - DNA, 15 bp, Homo sapiens
taaaatttgtggtta

SEQ ID NO: 1184770 - DNA, 15 bp, Homo sapiens
ataaaatttgtggtt

SEQ ID NO: 1184771 - DNA, 15 bp, Homo sapiens
gataaaatttgtggt

SEQ ID NO: 1184772 - DNA, 15 bp, Homo sapiens
agataaaatttgtgg

SEQ ID NO: 1184773 - DNA, 15 bp, Homo sapiens
aagataaaatttgtg

SEQ ID NO: 1184774 - DNA, 15 bp, Homo sapiens
caagataaaatttgt

SEQ ID NO: 1184775 - DNA, 15 bp, Homo sapiens
tcaagataaaatttg

SEQ ID NO: 1184776 - DNA, 15 bp, Homo sapiens
atcaagataaaattt

SEQ ID NO: 1184777 - DNA, 15 bp, Homo sapiens
catcaagataaaatt

SEQ ID NO: 1184778 - DNA, 15 bp, Homo sapiens
ccatcaagataaaat

SEQ ID NO: 1184779 - DNA, 15 bp, Homo sapiens
cccatcaagataaaa

SEQ ID NO: 1184780 - DNA, 15 bp, Homo sapiens
tcccatcaagataaa

SEQ ID NO: 1184781 - DNA, 15 bp, Homo sapiens
atcccatcaagataa

SEQ ID NO: 1184782 - DNA, 15 bp, Homo sapiens
catcccatcaagata

SEQ ID NO: 1184783 - DNA, 15 bp, Homo sapiens
tcatcccatcaagat

SEQ ID NO: 1184784 - DNA, 15 bp, Homo sapiens
ctcatcccatcaaga

SEQ ID NO: 1184785 - DNA, 15 bp, Homo sapiens
cctcatcccatcaag

SEQ ID NO: 1184786 - DNA, 15 bp, Homo sapiens
acctcatcccatcaa

SEQ ID NO: 1184787 - DNA, 15 bp, Homo sapiens
tacctcatcccatca

SEQ ID NO: 1184788 - DNA, 15 bp, Homo sapiens
atacctcatcccatc

SEQ ID NO: 1184789 - DNA, 15 bp, Homo sapiens
aatacctcatcccat

SEQ ID NO: 1184790 - DNA, 15 bp, Homo sapiens
taatacctcatccca

SEQ ID NO: 1184791 - DNA, 15 bp, Homo sapiens
ataatacctcatccc

SEQ ID NO: 1184792 - DNA, 15 bp, Homo sapiens
cataatacctcatcc

SEQ ID NO: 1184793 - DNA, 15 bp, Homo sapiens
ccataatacctcatc

SEQ ID NO: 1184794 - DNA, 15 bp, Homo sapiens
gccataatacctcat

SEQ ID NO: 1184795 - DNA, 15 bp, Homo sapiens
ggccataatacctca

SEQ ID NO: 1184796 - DNA, 15 bp, Homo sapiens
tggccataatacctc

SEQ ID NO: 1184797 - DNA, 15 bp, Homo sapiens
ctggccataatacct

SEQ ID NO: 1184798 - DNA, 15 bp, Homo sapiens
actggccataatacc

SEQ ID NO: 1184799 - DNA, 15 bp, Homo sapiens
tactggccataatac

SEQ ID NO: 1184800 - DNA, 15 bp, Homo sapiens
gtactggccataata

SEQ ID NO: 1184801 - DNA, 15 bp, Homo sapiens
agtactggccataat

SEQ ID NO: 1184802 - DNA, 15 bp, Homo sapiens
gagtactggccataa

SEQ ID NO: 1184803 - DNA, 15 bp, Homo sapiens
ggagtactggccata

SEQ ID NO: 1184804 - DNA, 15 bp, Homo sapiens
aggagtactggccat

SEQ ID NO: 1184805 - DNA, 15 bp, Homo sapiens
caggagtactggcca

SEQ ID NO: 1184806 - DNA, 15 bp, Homo sapiens
acaggagtactggcc

SEQ ID NO: 1184807 - DNA, 15 bp, Homo sapiens
tacaggagtactggc

SEQ ID NO: 1184808 - DNA, 15 bp, Homo sapiens
gtacaggagtactgg

SEQ ID NO: 1184809 - DNA, 15 bp, Homo sapiens
ggtacaggagtactg

SEQ ID NO: 1184810 - DNA, 15 bp, Homo sapiens
tggtacaggagtact

SEQ ID NO: 1184811 - DNA, 15 bp, Homo sapiens
ttggtacaggagtac

SEQ ID NO: 1184812 - DNA, 15 bp, Homo sapiens
attggtacaggagta

SEQ ID NO: 1184813 - DNA, 15 bp, Homo sapiens
aattggtacaggagt

SEQ ID NO: 1184814 - DNA, 15 bp, Homo sapiens
caattggtacaggag

SEQ ID NO: 1184815 - DNA, 15 bp, Homo sapiens
acaattggtacagga

SEQ ID NO: 1184816 - DNA, 15 bp, Homo sapiens
tacaattggtacagg

SEQ ID NO: 1184817 - DNA, 15 bp, Homo sapiens
atacaattggtacag

SEQ ID NO: 1184818 - DNA, 15 bp, Homo sapiens
tatacaattggtaca

SEQ ID NO: 1184819 - DNA, 15 bp, Homo sapiens
atatacaattggtac

SEQ ID NO: 1184820 - DNA, 15 bp, Homo sapiens
gatatacaattggta

SEQ ID NO: 1184821 - DNA, 15 bp, Homo sapiens
ggatatacaattggt

SEQ ID NO: 1184822 - DNA, 15 bp, Homo sapiens
tggatatacaattgg

SEQ ID NO: 1184823 - DNA, 15 bp, Homo sapiens
atggatatacaattg

SEQ ID NO: 1184824 - DNA, 15 bp, Homo sapiens
catggatatacaatt

SEQ ID NO: 1184825 - DNA, 15 bp, Homo sapiens
acatggatatacaat

SEQ ID NO: 1184826 - DNA, 15 bp, Homo sapiens
tacatggatatacaa

SEQ ID NO: 1184827 - DNA, 15 bp, Homo sapiens
gtacatggatataca

SEQ ID NO: 1184828 - DNA, 15 bp, Homo sapiens
tgtacatggatatac

SEQ ID NO: 1184829 - DNA, 15 bp, Homo sapiens
atgtacatggatata

SEQ ID NO: 1184830 - DNA, 15 bp, Homo sapiens
tatgtacatggatat

SEQ ID NO: 1184831 - DNA, 15 bp, Homo sapiens
gtatgtacatggata

SEQ ID NO: 1184832 - DNA, 15 bp, Homo sapiens
tgtatgtacatggat

SEQ ID NO: 1184833 - DNA, 15 bp, Homo sapiens
atgtatgtacatgga

SEQ ID NO: 1184834 - DNA, 15 bp, Homo sapiens
catgtatgtacatgg

SEQ ID NO: 1184835 - DNA, 15 bp, Homo sapiens
gcatgtatgtacatg

SEQ ID NO: 1184836 - DNA, 15 bp, Homo sapiens
tgcatgtatgtacat

SEQ ID NO: 1184837 - DNA, 15 bp, Homo sapiens
atgcatgtatgtaca

SEQ ID NO: 1184838 - DNA, 15 bp, Homo sapiens
aatgcatgtatgtac

SEQ ID NO: 1184839 - DNA, 15 bp, Homo sapiens
aaatgcatgtatgta

SEQ ID NO: 1184840 - DNA, 15 bp, Homo sapiens
taaatgcatgtatgt

SEQ ID NO: 1184841 - DNA, 15 bp, Homo sapiens
ttaaatgcatgtatg

SEQ ID NO: 1184842 - DNA, 15 bp, Homo sapiens
tttaaatgcatgtat

SEQ ID NO: 1184843 - DNA, 15 bp, Homo sapiens
ttttaaatgcatgta

SEQ ID NO: 1184844 - DNA, 15 bp, Homo sapiens
tttttaaatgcatgt

SEQ ID NO: 1184845 - DNA, 15 bp, Homo sapiens
gtttttaaatgcatg

SEQ ID NO: 1184846 - DNA, 15 bp, Homo sapiens
gtgtttttaaatgca

SEQ ID NO: 1184847 - DNA, 15 bp, Homo sapiens
tgtgtttttaaatgc

SEQ ID NO: 1184848 - DNA, 15 bp, Homo sapiens
atgtgtttttaaatg

SEQ ID NO: 1184849 - DNA, 15 bp, Homo sapiens
catgtgtttttaaat

SEQ ID NO: 1184850 - DNA, 15 bp, Homo sapiens
ccatgtgtttttaaa

SEQ ID NO: 1184851 - DNA, 15 bp, Homo sapiens
cccatgtgtttttaa

SEQ ID NO: 1184852 - DNA, 15 bp, Homo sapiens
acccatgtgttttta

SEQ ID NO: 1184853 - DNA, 15 bp, Homo sapiens
cacccatgtgttttt

SEQ ID NO: 1184854 - DNA, 15 bp, Homo sapiens
tcacccatgtgtttt

SEQ ID NO: 1184855 - DNA, 15 bp, Homo sapiens
gtcacccatgtgttt

SEQ ID NO: 1184856 - DNA, 15 bp, Homo sapiens
tgtcacccatgtgtt

SEQ ID NO: 1184857 - DNA, 15 bp, Homo sapiens
atgtcacccatgtgt

SEQ ID NO: 1184858 - DNA, 15 bp, Homo sapiens
gatgtcacccatgtg

SEQ ID NO: 1184859 - DNA, 15 bp, Homo sapiens
agatgtcacccatgt

SEQ ID NO: 1184860 - DNA, 15 bp, Homo sapiens
aagatgtcacccatg

SEQ ID NO: 1184861 - DNA, 15 bp, Homo sapiens
aaagatgtcacccat

SEQ ID NO: 1184862 - DNA, 15 bp, Homo sapiens
aaaagatgtcaccca

SEQ ID NO: 1184863 - DNA, 15 bp, Homo sapiens
ccaaaagatgtcacc

SEQ ID NO: 1184864 - DNA, 15 bp, Homo sapiens
cccaaaagatgtcac

SEQ ID NO: 1184865 - DNA, 15 bp, Homo sapiens
tcccaaaagatgtca

SEQ ID NO: 1184866 - DNA, 15 bp, Homo sapiens
ttcccaaaagatgtc

SEQ ID NO: 1184867 - DNA, 15 bp, Homo sapiens
tttcccaaaagatgt

SEQ ID NO: 1184868 - DNA, 15 bp, Homo sapiens
ttttcccaaaagatg

SEQ ID NO: 1184869 - DNA, 15 bp, Homo sapiens
tttttcccaaaagat

SEQ ID NO: 1184870 - DNA, 15 bp, Homo sapiens
gtttttcccaaaaga

SEQ ID NO: 1184871 - DNA, 15 bp, Homo sapiens
agtttttcccaaaag

SEQ ID NO: 1184872 - DNA, 15 bp, Homo sapiens
aagtttttcccaaaa

SEQ ID NO: 1184873 - DNA, 15 bp, Homo sapiens
aaagtttttcccaaa

SEQ ID NO: 1184874 - DNA, 15 bp, Homo sapiens
aaaagtttttcccaa

SEQ ID NO: 1184875 - DNA, 15 bp, Homo sapiens
taaaagtttttccca

SEQ ID NO: 1184876 - DNA, 15 bp, Homo sapiens
ctaaaagtttttccc

SEQ ID NO: 1184877 - DNA, 15 bp, Homo sapiens
actaaaagtttttcc

SEQ ID NO: 1184878 - DNA, 15 bp, Homo sapiens
cactaaaagtttttc

SEQ ID NO: 1184879 - DNA, 15 bp, Homo sapiens
ccactaaaagttttt

SEQ ID NO: 1184880 - DNA, 15 bp, Homo sapiens
tccactaaaagtttt

SEQ ID NO: 1184881 - DNA, 15 bp, Homo sapiens
gtccactaaaagttt

SEQ ID NO: 1184882 - DNA, 15 bp, Homo sapiens
ggtccactaaaagtt

SEQ ID NO: 1184883 - DNA, 15 bp, Homo sapiens
aggtccactaaaagt

SEQ ID NO: 1184884 - DNA, 15 bp, Homo sapiens
caggtccactaaaag

SEQ ID NO: 1184885 - DNA, 15 bp, Homo sapiens
tcaggtccactaaaa

SEQ ID NO: 1184886 - DNA, 15 bp, Homo sapiens
gtcaggtccactaaa

SEQ ID NO: 1184887 - DNA, 15 bp, Homo sapiens
cgtcaggtccactaa

SEQ ID NO: 1184888 - DNA, 15 bp, Homo sapiens
acgtcaggtccacta

SEQ ID NO: 1184889 - DNA, 15 bp, Homo sapiens
gacgtcaggtccact

SEQ ID NO: 1184890 - DNA, 15 bp, Homo sapiens
tgacgtcaggtccac

SEQ ID NO: 1184891 - DNA, 15 bp, Homo sapiens
ctgacgtcaggtcca

SEQ ID NO: 1184892 - DNA, 15 bp, Homo sapiens
actgacgtcaggtcc

SEQ ID NO: 1184893 - DNA, 15 bp, Homo sapiens
cactgacgtcaggtc

SEQ ID NO: 1184894 - DNA, 15 bp, Homo sapiens
ccactgacgtcaggt

SEQ ID NO: 1184895 - DNA, 15 bp, Homo sapiens
tccactgacgtcagg

SEQ ID NO: 1184896 - DNA, 15 bp, Homo sapiens
atccactgacgtcag

SEQ ID NO: 1184897 - DNA, 15 bp, Homo sapiens
tatccactgacgtca

SEQ ID NO: 1184898 - DNA, 15 bp, Homo sapiens
gtatccactgacgtc

SEQ ID NO: 1184899 - DNA, 15 bp, Homo sapiens
ggtatccactgacgt

SEQ ID NO: 1184900 - DNA, 15 bp, Homo sapiens
gggtatccactgacg

SEQ ID NO: 1184901 - DNA, 15 bp, Homo sapiens
tgggtatccactgac

SEQ ID NO: 1184902 - DNA, 15 bp, Homo sapiens
ttgggtatccactga

SEQ ID NO: 1184903 - DNA, 15 bp, Homo sapiens
tttgggtatccactg

SEQ ID NO: 1184904 - DNA, 15 bp, Homo sapiens
ctttgggtatccact

SEQ ID NO: 1184905 - DNA, 15 bp, Homo sapiens
gctttgggtatccac

SEQ ID NO: 1184906 - DNA, 15 bp, Homo sapiens
tgctttgggtatcca

SEQ ID NO: 1184907 - DNA, 15 bp, Homo sapiens
ttgctttgggtatcc

SEQ ID NO: 1184908 - DNA, 15 bp, Homo sapiens
cttgctttgggtatc

SEQ ID NO: 1184909 - DNA, 15 bp, Homo sapiens
ccttgctttgggtat

SEQ ID NO: 1184910 - DNA, 15 bp, Homo sapiens
tccttgctttgggta

SEQ ID NO: 1184911 - DNA, 15 bp, Homo sapiens
ttccttgctttgggt

SEQ ID NO: 1184912 - DNA, 15 bp, Homo sapiens
gttccttgctttggg

SEQ ID NO: 1184913 - DNA, 15 bp, Homo sapiens
cgttccttgctttgg

SEQ ID NO: 1184914 - DNA, 15 bp, Homo sapiens
ccgttccttgctttg

SEQ ID NO: 1184915 - DNA, 15 bp, Homo sapiens
cccgttccttgcttt

SEQ ID NO: 1184916 - DNA, 15 bp, Homo sapiens
tcccgttccttgctt

SEQ ID NO: 1184917 - DNA, 15 bp, Homo sapiens
ttcccgttccttgct

SEQ ID NO: 1184918 - DNA, 15 bp, Homo sapiens
tttcccgttccttgc

SEQ ID NO: 1184919 - DNA, 15 bp, Homo sapiens
atttcccgttccttg

SEQ ID NO: 1184920 - DNA, 15 bp, Homo sapiens
tatttcccgttcctt

SEQ ID NO: 1184921 - DNA, 15 bp, Homo sapiens
ctatttcccgttcct

SEQ ID NO: 1184922 - DNA, 15 bp, Homo sapiens
tctatttcccgttcc

SEQ ID NO: 1184923 - DNA, 15 bp, Homo sapiens
ttctatttcccgttc

SEQ ID NO: 1184924 - DNA, 15 bp, Homo sapiens
tttctatttcccgtt

SEQ ID NO: 1184925 - DNA, 15 bp, Homo sapiens
gtttctatttcccgt

SEQ ID NO: 1184926 - DNA, 15 bp, Homo sapiens
ggtttctatttcccg

SEQ ID NO: 1184927 - DNA, 15 bp, Homo sapiens
aggtttctatttccc

SEQ ID NO: 1184928 - DNA, 15 bp, Homo sapiens
gaggtttctatttcc

SEQ ID NO: 1184929 - DNA, 15 bp, Homo sapiens
ggaggtttctatttc

SEQ ID NO: 1184930 - DNA, 15 bp, Homo sapiens
tggaggtttctattt

SEQ ID NO: 1184931 - DNA, 15 bp, Homo sapiens
ttggaggtttctatt

SEQ ID NO: 1184932 - DNA, 15 bp, Homo sapiens
cttggaggtttctat

SEQ ID NO: 1184933 - DNA, 15 bp, Homo sapiens
tcttggaggtttcta

SEQ ID NO: 1184934 - DNA, 15 bp, Homo sapiens
ctcttggaggtttct

SEQ ID NO: 1184935 - DNA, 15 bp, Homo sapiens
tctcttggaggtttc

SEQ ID NO: 1184936 - DNA, 15 bp, Homo sapiens
ctctcttggaggttt

SEQ ID NO: 1184937 - DNA, 15 bp, Homo sapiens
actctcttggaggtt

SEQ ID NO: 1184938 - DNA, 15 bp, Homo sapiens
gactctcttggaggt

SEQ ID NO: 1184939 - DNA, 15 bp, Homo sapiens
ggactctcttggagg

SEQ ID NO: 1184940 - DNA, 15 bp, Homo sapiens
tggactctcttggag

SEQ ID NO: 1184941 - DNA, 15 bp, Homo sapiens
ctggactctcttgga

SEQ ID NO: 1184942 - DNA, 15 bp, Homo sapiens
tctggactctcttgg

SEQ ID NO: 1184943 - DNA, 15 bp, Homo sapiens
atctggactctcttg

SEQ ID NO: 1184944 - DNA, 15 bp, Homo sapiens
catctggactctctt

SEQ ID NO: 1184945 - DNA, 15 bp, Homo sapiens
tcatctggactctct

SEQ ID NO: 1184946 - DNA, 15 bp, Homo sapiens
atcatctggactctc

SEQ ID NO: 1184947 - DNA, 15 bp, Homo sapiens
tatcatctggactct

SEQ ID NO: 1184948 - DNA, 15 bp, Homo sapiens
ctatcatctggactc

SEQ ID NO: 1184949 - DNA, 15 bp, Homo sapiens
tctatcatctggact

SEQ ID NO: 1184950 - DNA, 15 bp, Homo sapiens
ttctatcatctggac

SEQ ID NO: 1184951 - DNA, 15 bp, Homo sapiens
attctatcatctgga

SEQ ID NO: 1184952 - DNA, 15 bp, Homo sapiens
gattctatcatctgg

SEQ ID NO: 1184953 - DNA, 15 bp, Homo sapiens
agattctatcatctg

SEQ ID NO: 1184954 - DNA, 15 bp, Homo sapiens
cagattctatcatct

SEQ ID NO: 1184955 - DNA, 15 bp, Homo sapiens
gcagattctatcatc

SEQ ID NO: 1184956 - DNA, 15 bp, Homo sapiens
ggcagattctatcat

SEQ ID NO: 1184957 - DNA, 15 bp, Homo sapiens
aggcagattctatca

SEQ ID NO: 1184958 - DNA, 15 bp, Homo sapiens
taggcagattctatc

SEQ ID NO: 1184959 - DNA, 15 bp, Homo sapiens
gtaggcagattctat

SEQ ID NO: 1184960 - DNA, 15 bp, Homo sapiens
tgtaggcagattcta

SEQ ID NO: 1184961 - DNA, 15 bp, Homo sapiens
ttgtaggcagattct

SEQ ID NO: 1184962 - DNA, 15 bp, Homo sapiens
cttgtaggcagattc

SEQ ID NO: 1184963 - DNA, 15 bp, Homo sapiens
tcttgtaggcagatt

SEQ ID NO: 1184964 - DNA, 15 bp, Homo sapiens
ttcttgtaggcagat

SEQ ID NO: 1184965 - DNA, 15 bp, Homo sapiens
tttcttgtaggcaga

SEQ ID NO: 1184966 - DNA, 15 bp, Homo sapiens
atttcttgtaggcag

SEQ ID NO: 1184967 - DNA, 15 bp, Homo sapiens
gatttcttgtaggca

SEQ ID NO: 1184968 - DNA, 15 bp, Homo sapiens
tgatttcttgtaggc

SEQ ID NO: 1184969 - DNA, 15 bp, Homo sapiens
ctgatttcttgtagg

SEQ ID NO: 1184970 - DNA, 15 bp, Homo sapiens
gctgatttcttgtag

SEQ ID NO: 1184971 - DNA, 15 bp, Homo sapiens
tgctgatttcttgta

SEQ ID NO: 1184972 - DNA, 15 bp, Homo sapiens
ttgctgatttcttgt

SEQ ID NO: 1184973 - DNA, 15 bp, Homo sapiens
attgctgatttcttg

SEQ ID NO: 1184974 - DNA, 15 bp, Homo sapiens
aattgctgatttctt

SEQ ID NO: 1184975 - DNA, 15 bp, Homo sapiens
aaattgctgatttct

SEQ ID NO: 1184976 - DNA, 15 bp, Homo sapiens
caaattgctgatttc

SEQ ID NO: 1184977 - DNA, 15 bp, Homo sapiens
gacaaattgctgatt

SEQ ID NO: 1184978 - DNA, 15 bp, Homo sapiens
tgacaaattgctgat

SEQ ID NO: 1184979 - DNA, 15 bp, Homo sapiens
atgacaaattgctga

SEQ ID NO: 1184980 - DNA, 15 bp, Homo sapiens
tatgacaaattgctg

SEQ ID NO: 1184981 - DNA, 15 bp, Homo sapiens
ttatgacaaattgct

SEQ ID NO: 1184982 - DNA, 15 bp, Homo sapiens
tttatgacaaattgc

SEQ ID NO: 1184983 - DNA, 15 bp, Homo sapiens
ttttatgacaaattg

SEQ ID NO: 1184984 - DNA, 15 bp, Homo sapiens
gttttatgacaaatt

SEQ ID NO: 1184985 - DNA, 15 bp, Homo sapiens
agttttatgacaaat

SEQ ID NO: 1184986 - DNA, 15 bp, Homo sapiens
aagttttatgacaaa

SEQ ID NO: 1184987 - DNA, 15 bp, Homo sapiens
aaagttttatgacaa

SEQ ID NO: 1184988 - DNA, 15 bp, Homo sapiens
caaagttttatgaca

SEQ ID NO: 1184989 - DNA, 15 bp, Homo sapiens
tcaaagttttatgac

SEQ ID NO: 1184990 - DNA, 15 bp, Homo sapiens
ttcaaagttttatga

SEQ ID NO: 1184991 - DNA, 15 bp, Homo sapiens
cttcaaagttttatg

SEQ ID NO: 1184992 - DNA, 15 bp, Homo sapiens
tcttcaaagttttat

SEQ ID NO: 1184993 - DNA, 15 bp, Homo sapiens
ttcttcaaagtttta

SEQ ID NO: 1184994 - DNA, 15 bp, Homo sapiens
attcttcaaagtttt

SEQ ID NO: 1184995 - DNA, 15 bp, Homo sapiens
tattcttcaaagttt

SEQ ID NO: 1184996 - DNA, 15 bp, Homo sapiens
atattcttcaaagtt

SEQ ID NO: 1184997 - DNA, 15 bp, Homo sapiens
aatattcttcaaagt

SEQ ID NO: 1184998 - DNA, 15 bp, Homo sapiens
caatattcttcaaag

SEQ ID NO: 1184999 - DNA, 15 bp, Homo sapiens
tcaatattcttcaaa

SEQ ID NO: 1185000 - DNA, 15 bp, Homo sapiens
ttcaatattcttcaa

SEQ ID NO: 1185001 - DNA, 15 bp, Homo sapiens
tttcaatattcttca

SEQ ID NO: 1185002 - DNA, 15 bp, Homo sapiens
ctttcaatattcttc

SEQ ID NO: 1185003 - DNA, 15 bp, Homo sapiens
tctttcaatattctt

SEQ ID NO: 1185004 - DNA, 15 bp, Homo sapiens
ttctttcaatattct

SEQ ID NO: 1185005 - DNA, 15 bp, Homo sapiens
attctttcaatattc

SEQ ID NO: 1185006 - DNA, 15 bp, Homo sapiens
cattctttcaatatt

SEQ ID NO: 1185007 - DNA, 15 bp, Homo sapiens
tcattctttcaatat

SEQ ID NO: 1185008 - DNA, 15 bp, Homo sapiens
ttcattctttcaata

SEQ ID NO: 1185009 - DNA, 15 bp, Homo sapiens
tttcattctttcaat

SEQ ID NO: 1185010 - DNA, 15 bp, Homo sapiens
gtttcattctttcaa

SEQ ID NO: 1185011 - DNA, 15 bp, Homo sapiens
tgtttcattctttca

SEQ ID NO: 1185012 - DNA, 15 bp, Homo sapiens
gtgtttcattctttc

SEQ ID NO: 1185013 - DNA, 15 bp, Homo sapiens
ggtgtttcattcttt

SEQ ID NO: 1185014 - DNA, 15 bp, Homo sapiens
aggtgtttcattctt

SEQ ID NO: 1185015 - DNA, 15 bp, Homo sapiens
caggtgtttcattct

SEQ ID NO: 1185016 - DNA, 15 bp, Homo sapiens
tcaggtgtttcattc

SEQ ID NO: 1185017 - DNA, 15 bp, Homo sapiens
ttcaggtgtttcatt

SEQ ID NO: 1185018 - DNA, 15 bp, Homo sapiens
tttcaggtgtttcat

SEQ ID NO: 1185019 - DNA, 15 bp, Homo sapiens
ttttcaggtgtttca

SEQ ID NO: 1185020 - DNA, 15 bp, Homo sapiens
gttttcaggtgtttc

SEQ ID NO: 1185021 - DNA, 15 bp, Homo sapiens
cgttttcaggtgttt

SEQ ID NO: 1185022 - DNA, 15 bp, Homo sapiens
acgttttcaggtgtt

SEQ ID NO: 1185023 - DNA, 15 bp, Homo sapiens
aacgttttcaggtgt

SEQ ID NO: 1185024 - DNA, 15 bp, Homo sapiens
taacgttttcaggtg

SEQ ID NO: 1185025 - DNA, 15 bp, Homo sapiens
gtaacgttttcaggt

SEQ ID NO: 1185026 - DNA, 15 bp, Homo sapiens
ggtaacgttttcagg

SEQ ID NO: 1185027 - DNA, 15 bp, Homo sapiens
tggtaacgttttcag

SEQ ID NO: 1185028 - DNA, 15 bp, Homo sapiens
ttggtaacgttttca

SEQ ID NO: 1185029 - DNA, 15 bp, Homo sapiens
attggtaacgttttc

SEQ ID NO: 1185030 - DNA, 15 bp, Homo sapiens
cattggtaacgtttt

SEQ ID NO: 1185031 - DNA, 15 bp, Homo sapiens
ccattggtaacgttt

SEQ ID NO: 1185032 - DNA, 15 bp, Homo sapiens
accattggtaacgtt

SEQ ID NO: 1185033 - DNA, 15 bp, Homo sapiens
aaccattggtaacgt

SEQ ID NO: 1185034 - DNA, 15 bp, Homo sapiens
gaaccattggtaacg

SEQ ID NO: 1185035 - DNA, 15 bp, Homo sapiens
ggaaccattggtaac

SEQ ID NO: 1185036 - DNA, 15 bp, Homo sapiens
aggaaccattggtaa

SEQ ID NO: 1185037 - DNA, 15 bp, Homo sapiens
aaggaaccattggta

SEQ ID NO: 1185038 - DNA, 15 bp, Homo sapiens
aaaggaaccattggt

SEQ ID NO: 1185039 - DNA, 15 bp, Homo sapiens
gaaaggaaccattgg

SEQ ID NO: 1185040 - DNA, 15 bp, Homo sapiens
tgaaaggaaccattg

SEQ ID NO: 1185041 - DNA, 15 bp, Homo sapiens
ttgaaaggaaccatt

SEQ ID NO: 1185042 - DNA, 15 bp, Homo sapiens
tttgaaaggaaccat

SEQ ID NO: 1185043 - DNA, 15 bp, Homo sapiens
ttttgaaaggaacca

SEQ ID NO: 1185044 - DNA, 15 bp, Homo sapiens
gttttgaaaggaacc

SEQ ID NO: 1185045 - DNA, 15 bp, Homo sapiens
ggttttgaaaggaac

SEQ ID NO: 1185046 - DNA, 15 bp, Homo sapiens
tggttttgaaaggaa

SEQ ID NO: 1185047 - DNA, 15 bp, Homo sapiens
ttggttttgaaagga

SEQ ID NO: 1185048 - DNA, 15 bp, Homo sapiens
tttggttttgaaagg

SEQ ID NO: 1185049 - DNA, 15 bp, Homo sapiens
ctttggttttgaaag

SEQ ID NO: 1185050 - DNA, 15 bp, Homo sapiens
tctttggttttgaaa

SEQ ID NO: 1185051 - DNA, 15 bp, Homo sapiens
atctttggttttgaa

SEQ ID NO: 1185052 - DNA, 15 bp, Homo sapiens
aatctttggttttga

SEQ ID NO: 1185053 - DNA, 15 bp, Homo sapiens
gaatctttggttttg

SEQ ID NO: 1185054 - DNA, 15 bp, Homo sapiens
agaatctttggtttt

SEQ ID NO: 1185055 - DNA, 15 bp, Homo sapiens
gagaatctttggttt

SEQ ID NO: 1185056 - DNA, 15 bp, Homo sapiens
ggagaatctttggtt

SEQ ID NO: 1185057 - DNA, 15 bp, Homo sapiens
aggagaatctttggt

SEQ ID NO: 1185058 - DNA, 15 bp, Homo sapiens
caggagaatctttgg

SEQ ID NO: 1185059 - DNA, 15 bp, Homo sapiens
ccaggagaatctttg

SEQ ID NO: 1185060 - DNA, 15 bp, Homo sapiens
tccaggagaatcttt

SEQ ID NO: 1185061 - DNA, 15 bp, Homo sapiens
ctccaggagaatctt

SEQ ID NO: 1185062 - DNA, 15 bp, Homo sapiens
actccaggagaatct

SEQ ID NO: 1185063 - DNA, 15 bp, Homo sapiens
aactccaggagaatc

SEQ ID NO: 1185064 - DNA, 15 bp, Homo sapiens
aaactccaggagaat

SEQ ID NO: 1185065 - DNA, 15 bp, Homo sapiens
aaaactccaggagaa

SEQ ID NO: 1185066 - DNA, 15 bp, Homo sapiens
gaaaactccaggaga

SEQ ID NO: 1185067 - DNA, 15 bp, Homo sapiens
agaaaactccaggag

SEQ ID NO: 1185068 - DNA, 15 bp, Homo sapiens
gagaaaactccagga

SEQ ID NO: 1185069 - DNA, 15 bp, Homo sapiens
agagaaaactccagg

SEQ ID NO: 1185070 - DNA, 15 bp, Homo sapiens
tagagaaaactccag

SEQ ID NO: 1185071 - DNA, 15 bp, Homo sapiens
ttagagaaaactcca

SEQ ID NO: 1185072 - DNA, 15 bp, Homo sapiens
tttagagaaaactcc

SEQ ID NO: 1185073 - DNA, 15 bp, Homo sapiens
gtttagagaaaactc

SEQ ID NO: 1185074 - DNA, 15 bp, Homo sapiens
agtttagagaaaact

SEQ ID NO: 1185075 - DNA, 15 bp, Homo sapiens
cagtttagagaaaac

SEQ ID NO: 1185076 - DNA, 15 bp, Homo sapiens
ccagtttagagaaaa

SEQ ID NO: 1185077 - DNA, 15 bp, Homo sapiens
cccagtttagagaaa

SEQ ID NO: 1185078 - DNA, 15 bp, Homo sapiens
acccagtttagagaa

SEQ ID NO: 1185079 - DNA, 15 bp, Homo sapiens
cacccagtttagaga

SEQ ID NO: 1185080 - DNA, 15 bp, Homo sapiens
acacccagtttagag

SEQ ID NO: 1185081 - DNA, 15 bp, Homo sapiens
aacacccagtttaga

SEQ ID NO: 1185082 - DNA, 15 bp, Homo sapiens
gaacacccagtttag

SEQ ID NO: 1185083 - DNA, 15 bp, Homo sapiens
agaacacccagttta

SEQ ID NO: 1185084 - DNA, 15 bp, Homo sapiens
gagaacacccagttt

SEQ ID NO: 1185085 - DNA, 15 bp, Homo sapiens
ggagaacacccagtt

SEQ ID NO: 1185086 - DNA, 15 bp, Homo sapiens
aggagaacacccagt

SEQ ID NO: 1185087 - DNA, 15 bp, Homo sapiens
caggagaacacccag

SEQ ID NO: 1185088 - DNA, 15 bp, Homo sapiens
tcaggagaacaccca

SEQ ID NO: 1185089 - DNA, 15 bp, Homo sapiens
ctcaggagaacaccc

SEQ ID NO: 1185090 - DNA, 15 bp, Homo sapiens
cctcaggagaacacc

SEQ ID NO: 1185091 - DNA, 15 bp, Homo sapiens
acctcaggagaacac

SEQ ID NO: 1185092 - DNA, 15 bp, Homo sapiens
tacctcaggagaaca

SEQ ID NO: 1185093 - DNA, 15 bp, Homo sapiens
ttacctcaggagaac

SEQ ID NO: 1185094 - DNA, 15 bp, Homo sapiens
cttacctcaggagaa

SEQ ID NO: 1185095 - DNA, 15 bp, Homo sapiens
tcttacctcaggaga

SEQ ID NO: 1185096 - DNA, 15 bp, Homo sapiens
ctcttacctcaggag

SEQ ID NO: 1185097 - DNA, 15 bp, Homo sapiens
cctcttacctcagga

SEQ ID NO: 1185098 - DNA, 15 bp, Homo sapiens
gcctcttacctcagg

SEQ ID NO: 1185099 - DNA, 15 bp, Homo sapiens
agcctcttacctcag

SEQ ID NO: 1185100 - DNA, 15 bp, Homo sapiens
gagcctcttacctca

SEQ ID NO: 1185101 - DNA, 15 bp, Homo sapiens
tgagcctcttacctc

SEQ ID NO: 1185102 - DNA, 15 bp, Homo sapiens
gtgagcctcttacct

SEQ ID NO: 1185103 - DNA, 15 bp, Homo sapiens
tgtgagcctcttacc

SEQ ID NO: 1185104 - DNA, 15 bp, Homo sapiens
ttgtgagcctcttac

SEQ ID NO: 1185105 - DNA, 15 bp, Homo sapiens
tttgtgagcctctta

SEQ ID NO: 1185106 - DNA, 15 bp, Homo sapiens
atttgtgagcctctt

SEQ ID NO: 1185107 - DNA, 15 bp, Homo sapiens
catttgtgagcctct

SEQ ID NO: 1185108 - DNA, 15 bp, Homo sapiens
acatttgtgagcctc

SEQ ID NO: 1185109 - DNA, 15 bp, Homo sapiens
cacatttgtgagcct

SEQ ID NO: 1185110 - DNA, 15 bp, Homo sapiens
tcacatttgtgagcc

SEQ ID NO: 1185111 - DNA, 15 bp, Homo sapiens
ctcacatttgtgagc

SEQ ID NO: 1185112 - DNA, 15 bp, Homo sapiens
tctcacatttgtgag

SEQ ID NO: 1185113 - DNA, 15 bp, Homo sapiens
ttctcacatttgtga

SEQ ID NO: 1185114 - DNA, 15 bp, Homo sapiens
tttctcacatttgtg

SEQ ID NO: 1185115 - DNA, 15 bp, Homo sapiens
atttctcacatttgt

SEQ ID NO: 1185116 - DNA, 15 bp, Homo sapiens
catttctcacatttg

SEQ ID NO: 1185117 - DNA, 15 bp, Homo sapiens
gcatttctcacattt

SEQ ID NO: 1185118 - DNA, 15 bp, Homo sapiens
ggcatttctcacatt

SEQ ID NO: 1185119 - DNA, 15 bp, Homo sapiens
aggcatttctcacat

SEQ ID NO: 1185120 - DNA, 15 bp, Homo sapiens
caggcatttctcaca

SEQ ID NO: 1185121 - DNA, 15 bp, Homo sapiens
acaggcatttctcac

SEQ ID NO: 1185122 - DNA, 15 bp, Homo sapiens
aacaggcatttctca

SEQ ID NO: 1185123 - DNA, 15 bp, Homo sapiens
taacaggcatttctc

SEQ ID NO: 1185124 - DNA, 15 bp, Homo sapiens
ctaacaggcatttct

SEQ ID NO: 1185125 - DNA, 15 bp, Homo sapiens
tctaacaggcatttc

SEQ ID NO: 1185126 - DNA, 15 bp, Homo sapiens
ctctaacaggcattt

SEQ ID NO: 1185127 - DNA, 15 bp, Homo sapiens
cctctaacaggcatt

SEQ ID NO: 1185128 - DNA, 15 bp, Homo sapiens
acctctaacaggcat

SEQ ID NO: 1185129 - DNA, 15 bp, Homo sapiens
gacctctaacaggca

SEQ ID NO: 1185130 - DNA, 15 bp, Homo sapiens
agacctctaacaggc

SEQ ID NO: 1185131 - DNA, 15 bp, Homo sapiens
aagacctctaacagg

SEQ ID NO: 1185132 - DNA, 15 bp, Homo sapiens
aaagacctctaacag

SEQ ID NO: 1185133 - DNA, 15 bp, Homo sapiens
taaagacctctaaca

SEQ ID NO: 1185134 - DNA, 15 bp, Homo sapiens
ctaaagacctctaac

SEQ ID NO: 1185135 - DNA, 15 bp, Homo sapiens
gctaaagacctctaa

SEQ ID NO: 1185136 - DNA, 15 bp, Homo sapiens
ggctaaagacctcta

SEQ ID NO: 1185137 - DNA, 15 bp, Homo sapiens
tggctaaagacctct

SEQ ID NO: 1185138 - DNA, 15 bp, Homo sapiens
atggctaaagacctc

SEQ ID NO: 1185139 - DNA, 15 bp, Homo sapiens
gatggctaaagacct

SEQ ID NO: 1185140 - DNA, 15 bp, Homo sapiens
ggatggctaaagacc

SEQ ID NO: 1185141 - DNA, 15 bp, Homo sapiens
gggatggctaaagac

SEQ ID NO: 1185142 - DNA, 15 bp, Homo sapiens
ggggatggctaaaga

SEQ ID NO: 1185143 - DNA, 15 bp, Homo sapiens
gggggatggctaaag

SEQ ID NO: 1185144 - DNA, 15 bp, Homo sapiens
tgggggatggctaaa

SEQ ID NO: 1185145 - DNA, 15 bp, Homo sapiens
ttgggggatggctaa

SEQ ID NO: 1185146 - DNA, 15 bp, Homo sapiens
attgggggatggcta

SEQ ID NO: 1185147 - DNA, 15 bp, Homo sapiens
tattgggggatggct

SEQ ID NO: 1185148 - DNA, 15 bp, Homo sapiens
ttattgggggatggc

SEQ ID NO: 1185149 - DNA, 15 bp, Homo sapiens
gttattgggggatgg

SEQ ID NO: 1185150 - DNA, 15 bp, Homo sapiens
tgttattgggggatg

SEQ ID NO: 1185151 - DNA, 15 bp, Homo sapiens
ttgttattgggggat

SEQ ID NO: 1185152 - DNA, 15 bp, Homo sapiens
attgttattggggga

SEQ ID NO: 1185153 - DNA, 15 bp, Homo sapiens
aattgttattggggg

SEQ ID NO: 1185154 - DNA, 15 bp, Homo sapiens
gaattgttattgggg

SEQ ID NO: 1185155 - DNA, 15 bp, Homo sapiens
agaattgttattggg

SEQ ID NO: 1185156 - DNA, 15 bp, Homo sapiens
cagaattgttattgg

SEQ ID NO: 1185157 - DNA, 15 bp, Homo sapiens
tcagaattgttattg

SEQ ID NO: 1185158 - DNA, 15 bp, Homo sapiens
ttcagaattgttatt

SEQ ID NO: 1185159 - DNA, 15 bp, Homo sapiens
tttcagaattgttat

SEQ ID NO: 1185160 - DNA, 15 bp, Homo sapiens
ttttcagaattgtta

SEQ ID NO: 1185161 - DNA, 15 bp, Homo sapiens
cttttcagaattgtt

SEQ ID NO: 1185162 - DNA, 15 bp, Homo sapiens
ccttttcagaattgt

SEQ ID NO: 1185163 - DNA, 15 bp, Homo sapiens
tccttttcagaattg

SEQ ID NO: 1185164 - DNA, 15 bp, Homo sapiens
ttccttttcagaatt

SEQ ID NO: 1185165 - DNA, 15 bp, Homo sapiens
attccttttcagaat

SEQ ID NO: 1185166 - DNA, 15 bp, Homo sapiens
aattccttttcagaa

SEQ ID NO: 1185167 - DNA, 15 bp, Homo sapiens
taattccttttcaga

SEQ ID NO: 1185168 - DNA, 15 bp, Homo sapiens
ttaattccttttcag

SEQ ID NO: 1185169 - DNA, 15 bp, Homo sapiens
tttaattccttttca

SEQ ID NO: 1185170 - DNA, 15 bp, Homo sapiens
ttttaattccttttc

SEQ ID NO: 1185171 - DNA, 15 bp, Homo sapiens
gttttaattcctttt

SEQ ID NO: 1185172 - DNA, 15 bp, Homo sapiens
tgttttaattccttt

SEQ ID NO: 1185173 - DNA, 15 bp, Homo sapiens
ctgttttaattcctt

SEQ ID NO: 1185174 - DNA, 15 bp, Homo sapiens
cctgttttaattcct

SEQ ID NO: 1185175 - DNA, 15 bp, Homo sapiens
ccctgttttaattcc

SEQ ID NO: 1185176 - DNA, 15 bp, Homo sapiens
accctgttttaattc

SEQ ID NO: 1185177 - DNA, 15 bp, Homo sapiens
aaccctgttttaatt

SEQ ID NO: 1185178 - DNA, 15 bp, Homo sapiens
caaccctgttttaat

SEQ ID NO: 1185179 - DNA, 15 bp, Homo sapiens
acaaccctgttttaa

SEQ ID NO: 1185180 - DNA, 15 bp, Homo sapiens
aacaaccctgtttta

SEQ ID NO: 1185181 - DNA, 15 bp, Homo sapiens
aaacaaccctgtttt

SEQ ID NO: 1185182 - DNA, 15 bp, Homo sapiens
caaacaaccctgttt

SEQ ID NO: 1185183 - DNA, 15 bp, Homo sapiens
acaaacaaccctgtt

SEQ ID NO: 1185184 - DNA, 15 bp, Homo sapiens
aacaaacaaccctgt

SEQ ID NO: 1185185 - DNA, 15 bp, Homo sapiens
aaacaaacaaccctg

SEQ ID NO: 1185186 - DNA, 15 bp, Homo sapiens
aaaacaaacaaccct

SEQ ID NO: 1185187 - DNA, 15 bp, Homo sapiens
gaaaacaaacaaccc

SEQ ID NO: 1185188 - DNA, 15 bp, Homo sapiens
tgaaaacaaacaacc

SEQ ID NO: 1185189 - DNA, 15 bp, Homo sapiens
ctgaaaacaaacaac

SEQ ID NO: 1185190 - DNA, 15 bp, Homo sapiens
cctgaaaacaaacaa

SEQ ID NO: 1185191 - DNA, 15 bp, Homo sapiens
tcctgaaaacaaaca

SEQ ID NO: 1185192 - DNA, 15 bp, Homo sapiens
ctcctgaaaacaaac

SEQ ID NO: 1185193 - DNA, 15 bp, Homo sapiens
tctcctgaaaacaaa

SEQ ID NO: 1185194 - DNA, 15 bp, Homo sapiens
ctctcctgaaaacaa

SEQ ID NO: 1185195 - DNA, 15 bp, Homo sapiens
actctcctgaaaaca

SEQ ID NO: 1185196 - DNA, 15 bp, Homo sapiens
cactctcctgaaaac

SEQ ID NO: 1185197 - DNA, 15 bp, Homo sapiens
tcactctcctgaaaa

SEQ ID NO: 1185198 - DNA, 15 bp, Homo sapiens
gtcactctcctgaaa

SEQ ID NO: 1185199 - DNA, 15 bp, Homo sapiens
tgtcactctcctgaa

SEQ ID NO: 1185200 - DNA, 15 bp, Homo sapiens
ttgtcactctcctga

SEQ ID NO: 1185201 - DNA, 15 bp, Homo sapiens
cttgtcactctcctg

SEQ ID NO: 1185202 - DNA, 15 bp, Homo sapiens
tcttgtcactctcct

SEQ ID NO: 1185203 - DNA, 15 bp, Homo sapiens
ttcttgtcactctcc

SEQ ID NO: 1185204 - DNA, 15 bp, Homo sapiens
tttcttgtcactctc

SEQ ID NO: 1185205 - DNA, 15 bp, Homo sapiens
gtttcttgtcactct

SEQ ID NO: 1185206 - DNA, 15 bp, Homo sapiens
agtttcttgtcactc

SEQ ID NO: 1185207 - DNA, 15 bp, Homo sapiens
aagtttcttgtcact

SEQ ID NO: 1185208 - DNA, 15 bp, Homo sapiens
caagtttcttgtcac

SEQ ID NO: 1185209 - DNA, 15 bp, Homo sapiens
ccaagtttcttgtca

SEQ ID NO: 1185210 - DNA, 15 bp, Homo sapiens
accaagtttcttgtc

SEQ ID NO: 1185211 - DNA, 15 bp, Homo sapiens
caccaagtttcttgt

SEQ ID NO: 1185212 - DNA, 15 bp, Homo sapiens
tcaccaagtttcttg

SEQ ID NO: 1185213 - DNA, 15 bp, Homo sapiens
ctcaccaagtttctt

SEQ ID NO: 1185214 - DNA, 15 bp, Homo sapiens
tctcaccaagtttct

SEQ ID NO: 1185215 - DNA, 15 bp, Homo sapiens
ttctcaccaagtttc

SEQ ID NO: 1185216 - DNA, 15 bp, Homo sapiens
tttctcaccaagttt

SEQ ID NO: 1185217 - DNA, 15 bp, Homo sapiens
atttctcaccaagtt

SEQ ID NO: 1185218 - DNA, 15 bp, Homo sapiens
tatttctcaccaagt

SEQ ID NO: 1185219 - DNA, 15 bp, Homo sapiens
ttatttctcaccaag

SEQ ID NO: 1185220 - DNA, 15 bp, Homo sapiens
cttatttctcaccaa

SEQ ID NO: 1185221 - DNA, 15 bp, Homo sapiens
gcttatttctcacca

SEQ ID NO: 1185222 - DNA, 15 bp, Homo sapiens
agcttatttctcacc

SEQ ID NO: 1185223 - DNA, 15 bp, Homo sapiens
cagcttatttctcac

SEQ ID NO: 1185224 - DNA, 15 bp, Homo sapiens
ccagcttatttctca

SEQ ID NO: 1185225 - DNA, 15 bp, Homo sapiens
gccagcttatttctc

SEQ ID NO: 1185226 - DNA, 15 bp, Homo sapiens
tgccagcttatttct

SEQ ID NO: 1185227 - DNA, 15 bp, Homo sapiens
ctgccagcttatttc

SEQ ID NO: 1185228 - DNA, 15 bp, Homo sapiens
actgccagcttattt

SEQ ID NO: 1185229 - DNA, 15 bp, Homo sapiens
cactgccagcttatt

SEQ ID NO: 1185230 - DNA, 15 bp, Homo sapiens
tcactgccagcttat

SEQ ID NO: 1185231 - DNA, 15 bp, Homo sapiens
atcactgccagctta

SEQ ID NO: 1185232 - DNA, 15 bp, Homo sapiens
aatcactgccagctt

SEQ ID NO: 1185233 - DNA, 15 bp, Homo sapiens
taatcactgccagct

SEQ ID NO: 1185234 - DNA, 15 bp, Homo sapiens
gtaatcactgccagc

SEQ ID NO: 1185235 - DNA, 15 bp, Homo sapiens
cgtaatcactgccag

SEQ ID NO: 1185236 - DNA, 15 bp, Homo sapiens
gcgtaatcactgcca

SEQ ID NO: 1185237 - DNA, 15 bp, Homo sapiens
cgcgtaatcactgcc

SEQ ID NO: 1185238 - DNA, 15 bp, Homo sapiens
acgcgtaatcactgc

SEQ ID NO: 1185239 - DNA, 15 bp, Homo sapiens
gacgcgtaatcactg

SEQ ID NO: 1185240 - DNA, 15 bp, Homo sapiens
agacgcgtaatcact

SEQ ID NO: 1185241 - DNA, 15 bp, Homo sapiens
gagacgcgtaatcac

SEQ ID NO: 1185242 - DNA, 15 bp, Homo sapiens
ggagacgcgtaatca

SEQ ID NO: 1185243 - DNA, 15 bp, Homo sapiens
aggagacgcgtaatc

SEQ ID NO: 1185244 - DNA, 15 bp, Homo sapiens
aaggagacgcgtaat

SEQ ID NO: 1185245 - DNA, 15 bp, Homo sapiens
gaaggagacgcgtaa

SEQ ID NO: 1185246 - DNA, 15 bp, Homo sapiens
tgaaggagacgcgta

SEQ ID NO: 1185247 - DNA, 15 bp, Homo sapiens
ctgaaggagacgcgt

SEQ ID NO: 1185248 - DNA, 15 bp, Homo sapiens
tctgaaggagacgcg

SEQ ID NO: 1185249 - DNA, 15 bp, Homo sapiens
ttctgaaggagacgc

SEQ ID NO: 1185250 - DNA, 15 bp, Homo sapiens
attctgaaggagacg

SEQ ID NO: 1185251 - DNA, 15 bp, Homo sapiens
gattctgaaggagac

SEQ ID NO: 1185252 - DNA, 15 bp, Homo sapiens
agattctgaaggaga

SEQ ID NO: 1185253 - DNA, 15 bp, Homo sapiens
cagattctgaaggag

SEQ ID NO: 1185254 - DNA, 15 bp, Homo sapiens
tcagattctgaagga

SEQ ID NO: 1185255 - DNA, 15 bp, Homo sapiens
atcagattctgaagg

SEQ ID NO: 1185256 - DNA, 15 bp, Homo sapiens
gatcagattctgaag

SEQ ID NO: 1185257 - DNA, 15 bp, Homo sapiens
tgatcagattctgaa

SEQ ID NO: 1185258 - DNA, 15 bp, Homo sapiens
atgatcagattctga

SEQ ID NO: 1185259 - DNA, 15 bp, Homo sapiens
catgatcagattctg

SEQ ID NO: 1185260 - DNA, 15 bp, Homo sapiens
ccatgatcagattct

SEQ ID NO: 1185261 - DNA, 15 bp, Homo sapiens
cccatgatcagattc

SEQ ID NO: 1185262 - DNA, 15 bp, Homo sapiens
acccatgatcagatt

SEQ ID NO: 1185263 - DNA, 15 bp, Homo sapiens
aacccatgatcagat

SEQ ID NO: 1185264 - DNA, 15 bp, Homo sapiens
aaacccatgatcaga

SEQ ID NO: 1185265 - DNA, 15 bp, Homo sapiens
caaacccatgatcag

SEQ ID NO: 1185266 - DNA, 15 bp, Homo sapiens
acaaacccatgatca

SEQ ID NO: 1185267 - DNA, 15 bp, Homo sapiens
aacaaacccatgatc

SEQ ID NO: 1185268 - DNA, 15 bp, Homo sapiens
gaacaaacccatgat

SEQ ID NO: 1185269 - DNA, 15 bp, Homo sapiens
ggaacaaacccatga

SEQ ID NO: 1185270 - DNA, 15 bp, Homo sapiens
aggaacaaacccatg

SEQ ID NO: 1185271 - DNA, 15 bp, Homo sapiens
gaggaacaaacccat

SEQ ID NO: 1185272 - DNA, 15 bp, Homo sapiens
ggaggaacaaaccca

SEQ ID NO: 1185273 - DNA, 15 bp, Homo sapiens
aggaggaacaaaccc

SEQ ID NO: 1185274 - DNA, 15 bp, Homo sapiens
aaggaggaacaaacc

SEQ ID NO: 1185275 - DNA, 15 bp, Homo sapiens
aaaggaggaacaaac

SEQ ID NO: 1185276 - DNA, 15 bp, Homo sapiens
aaaaggaggaacaaa

SEQ ID NO: 1185277 - DNA, 15 bp, Homo sapiens
gaaaaggaggaacaa

SEQ ID NO: 1185278 - DNA, 15 bp, Homo sapiens
agaaaaggaggaaca

SEQ ID NO: 1185279 - DNA, 15 bp, Homo sapiens
aagaaaaggaggaac

SEQ ID NO: 1185280 - DNA, 15 bp, Homo sapiens
gaagaaaaggaggaa

SEQ ID NO: 1185281 - DNA, 15 bp, Homo sapiens
cgaagaaaaggagga

SEQ ID NO: 1185282 - DNA, 15 bp, Homo sapiens
acgaagaaaaggagg

SEQ ID NO: 1185283 - DNA, 15 bp, Homo sapiens
aacgaagaaaaggag

SEQ ID NO: 1185284 - DNA, 15 bp, Homo sapiens
gaacgaagaaaagga

SEQ ID NO: 1185285 - DNA, 15 bp, Homo sapiens
agaacgaagaaaagg

SEQ ID NO: 1185286 - DNA, 15 bp, Homo sapiens
cagaacgaagaaaag

SEQ ID NO: 1185287 - DNA, 15 bp, Homo sapiens
gcagaacgaagaaaa

SEQ ID NO: 1185288 - DNA, 15 bp, Homo sapiens
cgcagaacgaagaaa

SEQ ID NO: 1185289 - DNA, 15 bp, Homo sapiens
ccgcagaacgaagaa

SEQ ID NO: 1185290 - DNA, 15 bp, Homo sapiens
cccgcagaacgaaga

SEQ ID NO: 1185291 - DNA, 15 bp, Homo sapiens
acccgcagaacgaag

SEQ ID NO: 1185292 - DNA, 15 bp, Homo sapiens
gacccgcagaacgaa

SEQ ID NO: 1185293 - DNA, 15 bp, Homo sapiens
ggacccgcagaacga

SEQ ID NO: 1185294 - DNA, 15 bp, Homo sapiens
cggacccgcagaacg

SEQ ID NO: 1185295 - DNA, 15 bp, Homo sapiens
tcggacccgcagaac

SEQ ID NO: 1185296 - DNA, 15 bp, Homo sapiens
ttcggacccgcagaa

SEQ ID NO: 1185297 - DNA, 15 bp, Homo sapiens
cttcggacccgcaga

SEQ ID NO: 1185298 - DNA, 15 bp, Homo sapiens
gcttcggacccgcag

SEQ ID NO: 1185299 - DNA, 15 bp, Homo sapiens
tgcttcggacccgca

SEQ ID NO: 1185300 - DNA, 15 bp, Homo sapiens
ttgcttcggacccgc

SEQ ID NO: 1185301 - DNA, 15 bp, Homo sapiens
attgcttcggacccg

SEQ ID NO: 1185302 - DNA, 15 bp, Homo sapiens
cattgcttcggaccc

SEQ ID NO: 1185303 - DNA, 15 bp, Homo sapiens
acattgcttcggacc

SEQ ID NO: 1185304 - DNA, 15 bp, Homo sapiens
cacattgcttcggac

SEQ ID NO: 1185305 - DNA, 15 bp, Homo sapiens
gcacattgcttcgga

SEQ ID NO: 1185306 - DNA, 15 bp, Homo sapiens
agcacattgcttcgg

SEQ ID NO: 1185307 - DNA, 15 bp, Homo sapiens
tagcacattgcttcg

SEQ ID NO: 1185308 - DNA, 15 bp, Homo sapiens
ttagcacattgcttc

SEQ ID NO: 1185309 - DNA, 15 bp, Homo sapiens
tttagcacattgctt

SEQ ID NO: 1185310 - DNA, 15 bp, Homo sapiens
ctttagcacattgct

SEQ ID NO: 1185311 - DNA, 15 bp, Homo sapiens
cctttagcacattgc

SEQ ID NO: 1185312 - DNA, 15 bp, Homo sapiens
ccctttagcacattg

SEQ ID NO: 1185313 - DNA, 15 bp, Homo sapiens
accctttagcacatt

SEQ ID NO: 1185314 - DNA, 15 bp, Homo sapiens
caccctttagcacat

SEQ ID NO: 1185315 - DNA, 15 bp, Homo sapiens
gcaccctttagcaca

SEQ ID NO: 1185316 - DNA, 15 bp, Homo sapiens
agcaccctttagcac

SEQ ID NO: 1185317 - DNA, 15 bp, Homo sapiens
tagcaccctttagca

SEQ ID NO: 1185318 - DNA, 15 bp, Homo sapiens
atagcaccctttagc

SEQ ID NO: 1185319 - DNA, 15 bp, Homo sapiens
gatagcaccctttag

SEQ ID NO: 1185320 - DNA, 15 bp, Homo sapiens
ggatagcacccttta

SEQ ID NO: 1185321 - DNA, 15 bp, Homo sapiens
tggatagcacccttt

SEQ ID NO: 1185322 - DNA, 15 bp, Homo sapiens
ctggatagcaccctt

SEQ ID NO: 1185323 - DNA, 15 bp, Homo sapiens
cctggatagcaccct

SEQ ID NO: 1185324 - DNA, 15 bp, Homo sapiens
tcctggatagcaccc

SEQ ID NO: 1185325 - DNA, 15 bp, Homo sapiens
gtcctggatagcacc

SEQ ID NO: 1185326 - DNA, 15 bp, Homo sapiens
ggtcctggatagcac

SEQ ID NO: 1185327 - DNA, 15 bp, Homo sapiens
cggtcctggatagca

SEQ ID NO: 1185328 - DNA, 15 bp, Homo sapiens
gcggtcctggatagc

SEQ ID NO: 1185329 - DNA, 15 bp, Homo sapiens
cgcggtcctggatag

SEQ ID NO: 1185330 - DNA, 15 bp, Homo sapiens
acgcggtcctggata

SEQ ID NO: 1185331 - DNA, 15 bp, Homo sapiens
tacgcggtcctggat

SEQ ID NO: 1185332 - DNA, 15 bp, Homo sapiens
ctacgcggtcctgga

SEQ ID NO: 1185333 - DNA, 15 bp, Homo sapiens
cctacgcggtcctgg

SEQ ID NO: 1185334 - DNA, 15 bp, Homo sapiens
acctacgcggtcctg

SEQ ID NO: 1185335 - DNA, 15 bp, Homo sapiens
gacctacgcggtcct

SEQ ID NO: 1185336 - DNA, 15 bp, Homo sapiens
agacctacgcggtcc

SEQ ID NO: 1185337 - DNA, 15 bp, Homo sapiens
gagacctacgcggtc

SEQ ID NO: 1185338 - DNA, 15 bp, Homo sapiens
ggagacctacgcggt

SEQ ID NO: 1185339 - DNA, 15 bp, Homo sapiens
aggagacctacgcgg

SEQ ID NO: 1185340 - DNA, 15 bp, Homo sapiens
aaggagacctacgcg

SEQ ID NO: 1185341 - DNA, 15 bp, Homo sapiens
aaaggagacctacgc

SEQ ID NO: 1185342 - DNA, 15 bp, Homo sapiens
taaaggagacctacg

SEQ ID NO: 1185343 - DNA, 15 bp, Homo sapiens
gtaaaggagacctac

SEQ ID NO: 1185344 - DNA, 15 bp, Homo sapiens
ggtaaaggagaccta

SEQ ID NO: 1185345 - DNA, 15 bp, Homo sapiens
tggtaaaggagacct

SEQ ID NO: 1185346 - DNA, 15 bp, Homo sapiens
ctggtaaaggagacc

SEQ ID NO: 1185347 - DNA, 15 bp, Homo sapiens
actggtaaaggagac

SEQ ID NO: 1185348 - DNA, 15 bp, Homo sapiens
aactggtaaaggaga

SEQ ID NO: 1185349 - DNA, 15 bp, Homo sapiens
aaactggtaaaggag

SEQ ID NO: 1185350 - DNA, 15 bp, Homo sapiens
caaactggtaaagga

SEQ ID NO: 1185351 - DNA, 15 bp, Homo sapiens
acaaactggtaaagg

SEQ ID NO: 1185352 - DNA, 15 bp, Homo sapiens
cacaaactggtaaag

SEQ ID NO: 1185353 - DNA, 15 bp, Homo sapiens
ccacaaactggtaaa

SEQ ID NO: 1185354 - DNA, 15 bp, Homo sapiens
cccacaaactggtaa

SEQ ID NO: 1185355 - DNA, 15 bp, Homo sapiens
gcccacaaactggta

SEQ ID NO: 1185356 - DNA, 15 bp, Homo sapiens
cgcccacaaactggt

SEQ ID NO: 1185357 - DNA, 15 bp, Homo sapiens
gcgcccacaaactgg

SEQ ID NO: 1185358 - DNA, 15 bp, Homo sapiens
ggcgcccacaaactg

SEQ ID NO: 1185359 - DNA, 15 bp, Homo sapiens
tggcgcccacaaact

SEQ ID NO: 1185360 - DNA, 15 bp, Homo sapiens
gtggcgcccacaaac

SEQ ID NO: 1185361 - DNA, 15 bp, Homo sapiens
ggtggcgcccacaaa

SEQ ID NO: 1185362 - DNA, 15 bp, Homo sapiens
gggtggcgcccacaa

SEQ ID NO: 1185363 - DNA, 15 bp, Homo sapiens
ggggtggcgcccaca

SEQ ID NO: 1185364 - DNA, 15 bp, Homo sapiens
cggggtggcgcccac

SEQ ID NO: 1185365 - DNA, 15 bp, Homo sapiens
acggggtggcgccca

SEQ ID NO: 1185366 - DNA, 15 bp, Homo sapiens
tacggggtggcgccc

SEQ ID NO: 1185367 - DNA, 15 bp, Homo sapiens
gtacggggtggcgcc

SEQ ID NO: 1185368 - DNA, 15 bp, Homo sapiens
tgtacggggtggcgc

SEQ ID NO: 1185369 - DNA, 15 bp, Homo sapiens
gtgtacggggtggcg

SEQ ID NO: 1185370 - DNA, 15 bp, Homo sapiens
tgtgtacggggtggc

SEQ ID NO: 1185371 - DNA, 15 bp, Homo sapiens
ctgtgtacggggtgg

SEQ ID NO: 1185372 - DNA, 15 bp, Homo sapiens
cctgtgtacggggtg

SEQ ID NO: 1185373 - DNA, 15 bp, Homo sapiens
gcctgtgtacggggt

SEQ ID NO: 1185374 - DNA, 15 bp, Homo sapiens
tgcctgtgtacgggg

SEQ ID NO: 1185375 - DNA, 15 bp, Homo sapiens
atgcctgtgtacggg

SEQ ID NO: 1185376 - DNA, 15 bp, Homo sapiens
catgcctgtgtacgg

SEQ ID NO: 1185377 - DNA, 15 bp, Homo sapiens
gcatgcctgtgtacg

SEQ ID NO: 1185378 - DNA, 15 bp, Homo sapiens
agcatgcctgtgtac

SEQ ID NO: 1185379 - DNA, 15 bp, Homo sapiens
cagcatgcctgtgta

SEQ ID NO: 1185380 - DNA, 15 bp, Homo sapiens
tcagcatgcctgtgt

SEQ ID NO: 1185381 - DNA, 15 bp, Homo sapiens
ttcagcatgcctgtg

SEQ ID NO: 1185382 - DNA, 15 bp, Homo sapiens
gttcagcatgcctgt

SEQ ID NO: 1185383 - DNA, 15 bp, Homo sapiens
cgttcagcatgcctg

SEQ ID NO: 1185384 - DNA, 15 bp, Homo sapiens
gcgttcagcatgcct

SEQ ID NO: 1185385 - DNA, 15 bp, Homo sapiens
agcgttcagcatgcc

SEQ ID NO: 1185386 - DNA, 15 bp, Homo sapiens
cagcgttcagcatgc

SEQ ID NO: 1185387 - DNA, 15 bp, Homo sapiens
acagcgttcagcatg

SEQ ID NO: 1185388 - DNA, 15 bp, Homo sapiens
cacagcgttcagcat

SEQ ID NO: 1185389 - DNA, 15 bp, Homo sapiens
tcacagcgttcagca

SEQ ID NO: 1185390 - DNA, 15 bp, Homo sapiens
ttcacagcgttcagc

SEQ ID NO: 1185391 - DNA, 15 bp, Homo sapiens
attcacagcgttcag

SEQ ID NO: 1185392 - DNA, 15 bp, Homo sapiens
gattcacagcgttca

SEQ ID NO: 1185393 - DNA, 15 bp, Homo sapiens
agattcacagcgttc

SEQ ID NO: 1185394 - DNA, 15 bp, Homo sapiens
cagattcacagcgtt

SEQ ID NO: 1185395 - DNA, 15 bp, Homo sapiens
acagattcacagcgt

SEQ ID NO: 1185396 - DNA, 15 bp, Homo sapiens
cacagattcacagcg

SEQ ID NO: 1185397 - DNA, 15 bp, Homo sapiens
acacagattcacagc

SEQ ID NO: 1185398 - DNA, 15 bp, Homo sapiens
tacacagattcacag

SEQ ID NO: 1185399 - DNA, 15 bp, Homo sapiens
ttacacagattcaca

SEQ ID NO: 1185400 - DNA, 15 bp, Homo sapiens
cttacacagattcac

SEQ ID NO: 1185401 - DNA, 15 bp, Homo sapiens
acttacacagattca

SEQ ID NO: 1185402 - DNA, 15 bp, Homo sapiens
cacttacacagattc

SEQ ID NO: 1185403 - DNA, 15 bp, Homo sapiens
gcacttacacagatt

SEQ ID NO: 1185404 - DNA, 15 bp, Homo sapiens
ggcacttacacagat

SEQ ID NO: 1185405 - DNA, 15 bp, Homo sapiens
gggcacttacacaga

SEQ ID NO: 1185406 - DNA, 15 bp, Homo sapiens
tgggcacttacacag

SEQ ID NO: 1185407 - DNA, 15 bp, Homo sapiens
gtgggcacttacaca

SEQ ID NO: 1185408 - DNA, 15 bp, Homo sapiens
cgtgggcacttacac

SEQ ID NO: 1185409 - DNA, 15 bp, Homo sapiens
acgtgggcacttaca

SEQ ID NO: 1185410 - DNA, 15 bp, Homo sapiens
cacgtgggcacttac

SEQ ID NO: 1185411 - DNA, 15 bp, Homo sapiens
gcacgtgggcactta

SEQ ID NO: 1185412 - DNA, 15 bp, Homo sapiens
agcacgtgggcactt

SEQ ID NO: 1185413 - DNA, 15 bp, Homo sapiens
cagcacgtgggcact

SEQ ID NO: 1185414 - DNA, 15 bp, Homo sapiens
ccagcacgtgggcac

SEQ ID NO: 1185415 - DNA, 15 bp, Homo sapiens
tccagcacgtgggca

SEQ ID NO: 1185416 - DNA, 15 bp, Homo sapiens
ctccagcacgtgggc

SEQ ID NO: 1185417 - DNA, 15 bp, Homo sapiens
cctccagcacgtggg

SEQ ID NO: 1185418 - DNA, 15 bp, Homo sapiens
acctccagcacgtgg

SEQ ID NO: 1185419 - DNA, 15 bp, Homo sapiens
cacctccagcacgtg

SEQ ID NO: 1185420 - DNA, 15 bp, Homo sapiens
gcacctccagcacgt

SEQ ID NO: 1185421 - DNA, 15 bp, Homo sapiens
tgcacctccagcacg

SEQ ID NO: 1185422 - DNA, 15 bp, Homo sapiens
gtgcacctccagcac

SEQ ID NO: 1185423 - DNA, 15 bp, Homo sapiens
ggtgcacctccagca

SEQ ID NO: 1185424 - DNA, 15 bp, Homo sapiens
aggtgcacctccagc

SEQ ID NO: 1185425 - DNA, 15 bp, Homo sapiens
gaggtgcacctccag

SEQ ID NO: 1185426 - DNA, 15 bp, Homo sapiens
agaggtgcacctcca

SEQ ID NO: 1185427 - DNA, 15 bp, Homo sapiens
aagaggtgcacctcc

SEQ ID NO: 1185428 - DNA, 15 bp, Homo sapiens
aaagaggtgcacctc

SEQ ID NO: 1185429 - DNA, 15 bp, Homo sapiens
gaaagaggtgcacct

SEQ ID NO: 1185430 - DNA, 15 bp, Homo sapiens
agaaagaggtgcacc

SEQ ID NO: 1185431 - DNA, 15 bp, Homo sapiens
gagaaagaggtgcac

SEQ ID NO: 1185432 - DNA, 15 bp, Homo sapiens
ggagaaagaggtgca

SEQ ID NO: 1185433 - DNA, 15 bp, Homo sapiens
gggagaaagaggtgc

SEQ ID NO: 1185434 - DNA, 15 bp, Homo sapiens
agggagaaagaggtg

SEQ ID NO: 1185435 - DNA, 15 bp, Homo sapiens
tagggagaaagaggt

SEQ ID NO: 1185436 - DNA, 15 bp, Homo sapiens
ttagggagaaagagg

SEQ ID NO: 1185437 - DNA, 15 bp, Homo sapiens
tttagggagaaagag

SEQ ID NO: 1185438 - DNA, 15 bp, Homo sapiens
atttagggagaaaga

SEQ ID NO: 1185439 - DNA, 15 bp, Homo sapiens
tatttagggagaaag

SEQ ID NO: 1185440 - DNA, 15 bp, Homo sapiens
gtatttagggagaaa

SEQ ID NO: 1185441 - DNA, 15 bp, Homo sapiens
ggtatttagggagaa

SEQ ID NO: 1185442 - DNA, 15 bp, Homo sapiens
aggtatttagggaga

SEQ ID NO: 1185443 - DNA, 15 bp, Homo sapiens
gaggtatttagggag

SEQ ID NO: 1185444 - DNA, 15 bp, Homo sapiens
ggaggtatttaggga

SEQ ID NO: 1185445 - DNA, 15 bp, Homo sapiens
gggaggtatttaggg

SEQ ID NO: 1185446 - DNA, 15 bp, Homo sapiens
agggaggtatttagg

SEQ ID NO: 1185447 - DNA, 15 bp, Homo sapiens
aagggaggtatttag

SEQ ID NO: 1185448 - DNA, 15 bp, Homo sapiens
gaagggaggtattta

SEQ ID NO: 1185449 - DNA, 15 bp, Homo sapiens
agaagggaggtattt

SEQ ID NO: 1185450 - DNA, 15 bp, Homo sapiens
gagaagggaggtatt

SEQ ID NO: 1185451 - DNA, 15 bp, Homo sapiens
ggagaagggaggtat

SEQ ID NO: 1185452 - DNA, 15 bp, Homo sapiens
tggagaagggaggta

SEQ ID NO: 1185453 - DNA, 15 bp, Homo sapiens
ctggagaagggaggt

SEQ ID NO: 1185454 - DNA, 15 bp, Homo sapiens
gctggagaagggagg

SEQ ID NO: 1185455 - DNA, 15 bp, Homo sapiens
agctggagaagggag

SEQ ID NO: 1185456 - DNA, 15 bp, Homo sapiens
cagctggagaaggga

SEQ ID NO: 1185457 - DNA, 15 bp, Homo sapiens
acagctggagaaggg

SEQ ID NO: 1185458 - DNA, 15 bp, Homo sapiens
tacagctggagaagg

SEQ ID NO: 1185459 - DNA, 15 bp, Homo sapiens
ttacagctggagaag

SEQ ID NO: 1185460 - DNA, 15 bp, Homo sapiens
gttacagctggagaa

SEQ ID NO: 1185461 - DNA, 15 bp, Homo sapiens
ggttacagctggaga

SEQ ID NO: 1185462 - DNA, 15 bp, Homo sapiens
aggttacagctggag

SEQ ID NO: 1185463 - DNA, 15 bp, Homo sapiens
aaggttacagctgga

SEQ ID NO: 1185464 - DNA, 15 bp, Homo sapiens
taaggttacagctgg

SEQ ID NO: 1185465 - DNA, 15 bp, Homo sapiens
gtaaggttacagctg

SEQ ID NO: 1185466 - DNA, 15 bp, Homo sapiens
tgtaaggttacagct

SEQ ID NO: 1185467 - DNA, 15 bp, Homo sapiens
ttgtaaggttacagc

SEQ ID NO: 1185468 - DNA, 15 bp, Homo sapiens
tttgtaaggttacag

SEQ ID NO: 1185469 - DNA, 15 bp, Homo sapiens
ttttgtaaggttaca

SEQ ID NO: 1185470 - DNA, 15 bp, Homo sapiens
cttttgtaaggttac

SEQ ID NO: 1185471 - DNA, 15 bp, Homo sapiens
acttttgtaaggtta

SEQ ID NO: 1185472 - DNA, 15 bp, Homo sapiens
gacttttgtaaggtt

SEQ ID NO: 1185473 - DNA, 15 bp, Homo sapiens
agacttttgtaaggt

SEQ ID NO: 1185474 - DNA, 15 bp, Homo sapiens
tagacttttgtaagg

SEQ ID NO: 1185475 - DNA, 15 bp, Homo sapiens
gtagacttttgtaag

SEQ ID NO: 1185476 - DNA, 15 bp, Homo sapiens
ggtagacttttgtaa

SEQ ID NO: 1185477 - DNA, 15 bp, Homo sapiens
tggtagacttttgta

SEQ ID NO: 1185478 - DNA, 15 bp, Homo sapiens
atggtagacttttgt

SEQ ID NO: 1185479 - DNA, 15 bp, Homo sapiens
aatggtagacttttg

SEQ ID NO: 1185480 - DNA, 15 bp, Homo sapiens
taatggtagactttt

SEQ ID NO: 1185481 - DNA, 15 bp, Homo sapiens
ataatggtagacttt

SEQ ID NO: 1185482 - DNA, 15 bp, Homo sapiens
tataatggtagactt

SEQ ID NO: 1185483 - DNA, 15 bp, Homo sapiens
ttataatggtagact

SEQ ID NO: 1185484 - DNA, 15 bp, Homo sapiens
cttataatggtagac

SEQ ID NO: 1185485 - DNA, 15 bp, Homo sapiens
ccttataatggtaga

SEQ ID NO: 1185486 - DNA, 15 bp, Homo sapiens
cccttataatggtag

SEQ ID NO: 1185487 - DNA, 15 bp, Homo sapiens
acccttataatggta

SEQ ID NO: 1185488 - DNA, 15 bp, Homo sapiens
aacccttataatggt

SEQ ID NO: 1185489 - DNA, 15 bp, Homo sapiens
aaacccttataatgg

SEQ ID NO: 1185490 - DNA, 15 bp, Homo sapiens
aaaacccttataatg

SEQ ID NO: 1185491 - DNA, 15 bp, Homo sapiens
aaaaacccttataat

SEQ ID NO: 1185492 - DNA, 15 bp, Homo sapiens
gaaaaacccttataa

SEQ ID NO: 1185493 - DNA, 15 bp, Homo sapiens
agaaaaacccttata

SEQ ID NO: 1185494 - DNA, 15 bp, Homo sapiens
gagaaaaacccttat

SEQ ID NO: 1185495 - DNA, 15 bp, Homo sapiens
agagaaaaaccctta

SEQ ID NO: 1185496 - DNA, 15 bp, Homo sapiens
cagagaaaaaccctt

SEQ ID NO: 1185497 - DNA, 15 bp, Homo sapiens
tcagagaaaaaccct

SEQ ID NO: 1185498 - DNA, 15 bp, Homo sapiens
ctcagagaaaaaccc

SEQ ID NO: 1185499 - DNA, 15 bp, Homo sapiens
gctcagagaaaaacc

SEQ ID NO: 1185500 - DNA, 15 bp, Homo sapiens
agctcagagaaaaac

SEQ ID NO: 1185501 - DNA, 15 bp, Homo sapiens
tagctcagagaaaaa

SEQ ID NO: 1185502 - DNA, 15 bp, Homo sapiens
ttagctcagagaaaa

SEQ ID NO: 1185503 - DNA, 15 bp, Homo sapiens
tttagctcagagaaa

SEQ ID NO: 1185504 - DNA, 15 bp, Homo sapiens
gtttagctcagagaa

SEQ ID NO: 1185505 - DNA, 15 bp, Homo sapiens
ggtttagctcagaga

SEQ ID NO: 1185506 - DNA, 15 bp, Homo sapiens
gggtttagctcagag

SEQ ID NO: 1185507 - DNA, 15 bp, Homo sapiens
tgggtttagctcaga

SEQ ID NO: 1185508 - DNA, 15 bp, Homo sapiens
ctgggtttagctcag

SEQ ID NO: 1185509 - DNA, 15 bp, Homo sapiens
gctgggtttagctca

SEQ ID NO: 1185510 - DNA, 15 bp, Homo sapiens
ggctgggtttagctc

SEQ ID NO: 1185511 - DNA, 15 bp, Homo sapiens
gggctgggtttagct

SEQ ID NO: 1185512 - DNA, 15 bp, Homo sapiens
agggctgggtttagc

SEQ ID NO: 1185513 - DNA, 15 bp, Homo sapiens
gagggctgggtttag

SEQ ID NO: 1185514 - DNA, 15 bp, Homo sapiens
agagggctgggttta

SEQ ID NO: 1185515 - DNA, 15 bp, Homo sapiens
gagagggctgggttt

SEQ ID NO: 1185516 - DNA, 15 bp, Homo sapiens
ggagagggctgggtt

SEQ ID NO: 1185517 - DNA, 15 bp, Homo sapiens
tggagagggctgggt

SEQ ID NO: 1185518 - DNA, 15 bp, Homo sapiens
ctggagagggctggg

SEQ ID NO: 1185519 - DNA, 15 bp, Homo sapiens
cctggagagggctgg

SEQ ID NO: 1185520 - DNA, 15 bp, Homo sapiens
acctggagagggctg

SEQ ID NO: 1185521 - DNA, 15 bp, Homo sapiens
aacctggagagggct

SEQ ID NO: 1185522 - DNA, 15 bp, Homo sapiens
gaacctggagagggc

SEQ ID NO: 1185523 - DNA, 15 bp, Homo sapiens
ggaacctggagaggg

SEQ ID NO: 1185524 - DNA, 15 bp, Homo sapiens
gggaacctggagagg

SEQ ID NO: 1185525 - DNA, 15 bp, Homo sapiens
agggaacctggagag

SEQ ID NO: 1185526 - DNA, 15 bp, Homo sapiens
gagggaacctggaga

SEQ ID NO: 1185527 - DNA, 15 bp, Homo sapiens
agagggaacctggag

SEQ ID NO: 1185528 - DNA, 15 bp, Homo sapiens
gagagggaacctgga

SEQ ID NO: 1185529 - DNA, 15 bp, Homo sapiens
agagagggaacctgg

SEQ ID NO: 1185530 - DNA, 15 bp, Homo sapiens
cagagagggaacctg

SEQ ID NO: 1185531 - DNA, 15 bp, Homo sapiens
ccagagagggaacct

SEQ ID NO: 1185532 - DNA, 15 bp, Homo sapiens
cccagagagggaacc

SEQ ID NO: 1185533 - DNA, 15 bp, Homo sapiens
ccccagagagggaac

SEQ ID NO: 1185534 - DNA, 15 bp, Homo sapiens
tccccagagagggaa

SEQ ID NO: 1185535 - DNA, 15 bp, Homo sapiens
ttccccagagaggga

SEQ ID NO: 1185536 - DNA, 15 bp, Homo sapiens
tttccccagagaggg

SEQ ID NO: 1185537 - DNA, 15 bp, Homo sapiens
ctttccccagagagg

SEQ ID NO: 1185538 - DNA, 15 bp, Homo sapiens
cctttccccagagag

SEQ ID NO: 1185539 - DNA, 15 bp, Homo sapiens
gcctttccccagaga

SEQ ID NO: 1185540 - DNA, 15 bp, Homo sapiens
tgcctttccccagag

SEQ ID NO: 1185541 - DNA, 15 bp, Homo sapiens
ttgcctttccccaga

SEQ ID NO: 1185542 - DNA, 15 bp, Homo sapiens
gttgcctttccccag

SEQ ID NO: 1185543 - DNA, 15 bp, Homo sapiens
agttgcctttcccca

SEQ ID NO: 1185544 - DNA, 15 bp, Homo sapiens
tagttgcctttcccc

SEQ ID NO: 1185545 - DNA, 15 bp, Homo sapiens
atagttgcctttccc

SEQ ID NO: 1185546 - DNA, 15 bp, Homo sapiens
aatagttgcctttcc

SEQ ID NO: 1185547 - DNA, 15 bp, Homo sapiens
caatagttgcctttc

SEQ ID NO: 1185548 - DNA, 15 bp, Homo sapiens
tcaatagttgccttt

SEQ ID NO: 1185549 - DNA, 15 bp, Homo sapiens
ctcaatagttgcctt

SEQ ID NO: 1185550 - DNA, 15 bp, Homo sapiens
actcaatagttgcct

SEQ ID NO: 1185551 - DNA, 15 bp, Homo sapiens
aactcaatagttgcc

SEQ ID NO: 1185552 - DNA, 15 bp, Homo sapiens
taactcaatagttgc

SEQ ID NO: 1185553 - DNA, 15 bp, Homo sapiens
gtaactcaatagttg

SEQ ID NO: 1185554 - DNA, 15 bp, Homo sapiens
ggtaactcaatagtt

SEQ ID NO: 1185555 - DNA, 15 bp, Homo sapiens
tggtaactcaatagt

SEQ ID NO: 1185556 - DNA, 15 bp, Homo sapiens
ttggtaactcaatag

SEQ ID NO: 1185557 - DNA, 15 bp, Homo sapiens
gttggtaactcaata

SEQ ID NO: 1185558 - DNA, 15 bp, Homo sapiens
tgttggtaactcaat

SEQ ID NO: 1185559 - DNA, 15 bp, Homo sapiens
gtgttggtaactcaa

SEQ ID NO: 1185560 - DNA, 15 bp, Homo sapiens
cgtgttggtaactca

SEQ ID NO: 1185561 - DNA, 15 bp, Homo sapiens
acgtgttggtaactc

SEQ ID NO: 1185562 - DNA, 15 bp, Homo sapiens
aacgtgttggtaact

SEQ ID NO: 1185563 - DNA, 15 bp, Homo sapiens
taacgtgttggtaac

SEQ ID NO: 1185564 - DNA, 15 bp, Homo sapiens
ttaacgtgttggtaa

SEQ ID NO: 1185565 - DNA, 15 bp, Homo sapiens
attaacgtgttggta

SEQ ID NO: 1185566 - DNA, 15 bp, Homo sapiens
tattaacgtgttggt

SEQ ID NO: 1185567 - DNA, 15 bp, Homo sapiens
atattaacgtgttgg

SEQ ID NO: 1185568 - DNA, 15 bp, Homo sapiens
catattaacgtgttg

SEQ ID NO: 1185569 - DNA, 15 bp, Homo sapiens
tcatattaacgtgtt

SEQ ID NO: 1185570 - DNA, 15 bp, Homo sapiens
ttcatattaacgtgt

SEQ ID NO: 1185571 - DNA, 15 bp, Homo sapiens
attcatattaacgtg

SEQ ID NO: 1185572 - DNA, 15 bp, Homo sapiens
cattcatattaacgt

SEQ ID NO: 1185573 - DNA, 15 bp, Homo sapiens
tcattcatattaacg

SEQ ID NO: 1185574 - DNA, 15 bp, Homo sapiens
ctcattcatattaac

SEQ ID NO: 1185575 - DNA, 15 bp, Homo sapiens
gctcattcatattaa

SEQ ID NO: 1185576 - DNA, 15 bp, Homo sapiens
agctcattcatatta

SEQ ID NO: 1185577 - DNA, 15 bp, Homo sapiens
gagctcattcatatt

SEQ ID NO: 1185578 - DNA, 15 bp, Homo sapiens
tgagctcattcatat

SEQ ID NO: 1185579 - DNA, 15 bp, Homo sapiens
gtgagctcattcata

SEQ ID NO: 1185580 - DNA, 15 bp, Homo sapiens
ggtgagctcattcat

SEQ ID NO: 1185581 - DNA, 15 bp, Homo sapiens
tggtgagctcattca

SEQ ID NO: 1185582 - DNA, 15 bp, Homo sapiens
ctggtgagctcattc

SEQ ID NO: 1185583 - DNA, 15 bp, Homo sapiens
cctggtgagctcatt

SEQ ID NO: 1185584 - DNA, 15 bp, Homo sapiens
acctggtgagctcat

SEQ ID NO: 1185585 - DNA, 15 bp, Homo sapiens
cacctggtgagctca

SEQ ID NO: 1185586 - DNA, 15 bp, Homo sapiens
ccacctggtgagctc

SEQ ID NO: 1185587 - DNA, 15 bp, Homo sapiens
tccacctggtgagct

SEQ ID NO: 1185588 - DNA, 15 bp, Homo sapiens
atccacctggtgagc

SEQ ID NO: 1185589 - DNA, 15 bp, Homo sapiens
gatccacctggtgag

SEQ ID NO: 1185590 - DNA, 15 bp, Homo sapiens
agatccacctggtga

SEQ ID NO: 1185591 - DNA, 15 bp, Homo sapiens
gagatccacctggtg

SEQ ID NO: 1185592 - DNA, 15 bp, Homo sapiens
agagatccacctggt

SEQ ID NO: 1185593 - DNA, 15 bp, Homo sapiens
gagagatccacctgg

SEQ ID NO: 1185594 - DNA, 15 bp, Homo sapiens
agagagatccacctg

SEQ ID NO: 1185595 - DNA, 15 bp, Homo sapiens
cagagagatccacct

SEQ ID NO: 1185596 - DNA, 15 bp, Homo sapiens
tcagagagatccacc

SEQ ID NO: 1185597 - DNA, 15 bp, Homo sapiens
ctcagagagatccac

SEQ ID NO: 1185598 - DNA, 15 bp, Homo sapiens
cctcagagagatcca

SEQ ID NO: 1185599 - DNA, 15 bp, Homo sapiens
ccctcagagagatcc

SEQ ID NO: 1185600 - DNA, 15 bp, Homo sapiens
gccctcagagagatc

SEQ ID NO: 1185601 - DNA, 15 bp, Homo sapiens
agccctcagagagat

SEQ ID NO: 1185602 - DNA, 15 bp, Homo sapiens
tagccctcagagaga

SEQ ID NO: 1185603 - DNA, 15 bp, Homo sapiens
ttagccctcagagag

SEQ ID NO: 1185604 - DNA, 15 bp, Homo sapiens
cttagccctcagaga

SEQ ID NO: 1185605 - DNA, 15 bp, Homo sapiens
ccttagccctcagag

SEQ ID NO: 1185606 - DNA, 15 bp, Homo sapiens
tccttagccctcaga

SEQ ID NO: 1185607 - DNA, 15 bp, Homo sapiens
atccttagccctcag

SEQ ID NO: 1185608 - DNA, 15 bp, Homo sapiens
gatccttagccctca

SEQ ID NO: 1185609 - DNA, 15 bp, Homo sapiens
ggatccttagccctc

SEQ ID NO: 1185610 - DNA, 15 bp, Homo sapiens
tggatccttagccct

SEQ ID NO: 1185611 - DNA, 15 bp, Homo sapiens
ctggatccttagccc

SEQ ID NO: 1185612 - DNA, 15 bp, Homo sapiens
cctggatccttagcc

SEQ ID NO: 1185613 - DNA, 15 bp, Homo sapiens
ccctggatccttagc

SEQ ID NO: 1185614 - DNA, 15 bp, Homo sapiens
tccctggatccttag

SEQ ID NO: 1185615 - DNA, 15 bp, Homo sapiens
ttccctggatcctta

SEQ ID NO: 1185616 - DNA, 15 bp, Homo sapiens
tttccctggatcctt

SEQ ID NO: 1185617 - DNA, 15 bp, Homo sapiens
gtttccctggatcct

SEQ ID NO: 1185618 - DNA, 15 bp, Homo sapiens
tgtttccctggatcc

SEQ ID NO: 1185619 - DNA, 15 bp, Homo sapiens
atgtttccctggatc

SEQ ID NO: 1185620 - DNA, 15 bp, Homo sapiens
catgtttccctggat

SEQ ID NO: 1185621 - DNA, 15 bp, Homo sapiens
tcatgtttccctgga

SEQ ID NO: 1185622 - DNA, 15 bp, Homo sapiens
ttcatgtttccctgg

SEQ ID NO: 1185623 - DNA, 15 bp, Homo sapiens
cttcatgtttccctg

SEQ ID NO: 1185624 - DNA, 15 bp, Homo sapiens
acttcatgtttccct

SEQ ID NO: 1185625 - DNA, 15 bp, Homo sapiens
cacttcatgtttccc

SEQ ID NO: 1185626 - DNA, 15 bp, Homo sapiens
tcacttcatgtttcc

SEQ ID NO: 1185627 - DNA, 15 bp, Homo sapiens
gtcacttcatgtttc

SEQ ID NO: 1185628 - DNA, 15 bp, Homo sapiens
tgtcacttcatgttt

SEQ ID NO: 1185629 - DNA, 15 bp, Homo sapiens
ttgtcacttcatgtt

SEQ ID NO: 1185630 - DNA, 15 bp, Homo sapiens
attgtcacttcatgt

SEQ ID NO: 1185631 - DNA, 15 bp, Homo sapiens
cattgtcacttcatg

SEQ ID NO: 1185632 - DNA, 15 bp, Homo sapiens
acattgtcacttcat

SEQ ID NO: 1185633 - DNA, 15 bp, Homo sapiens
tacattgtcacttca

SEQ ID NO: 1185634 - DNA, 15 bp, Homo sapiens
gtacattgtcacttc

SEQ ID NO: 1185635 - DNA, 15 bp, Homo sapiens
agtacattgtcactt

SEQ ID NO: 1185636 - DNA, 15 bp, Homo sapiens
cagtacattgtcact

SEQ ID NO: 1185637 - DNA, 15 bp, Homo sapiens
ccagtacattgtcac

SEQ ID NO: 1185638 - DNA, 15 bp, Homo sapiens
accagtacattgtca

SEQ ID NO: 1185639 - DNA, 15 bp, Homo sapiens
caccagtacattgtc

SEQ ID NO: 1185640 - DNA, 15 bp, Homo sapiens
ccaccagtacattgt

SEQ ID NO: 1185641 - DNA, 15 bp, Homo sapiens
cccaccagtacattg

SEQ ID NO: 1185642 - DNA, 15 bp, Homo sapiens
ccccaccagtacatt

SEQ ID NO: 1185643 - DNA, 15 bp, Homo sapiens
tccccaccagtacat

SEQ ID NO: 1185644 - DNA, 15 bp, Homo sapiens
ctccccaccagtaca

SEQ ID NO: 1185645 - DNA, 15 bp, Homo sapiens
tctccccaccagtac

SEQ ID NO: 1185646 - DNA, 15 bp, Homo sapiens
ctctccccaccagta

SEQ ID NO: 1185647 - DNA, 15 bp, Homo sapiens
actctccccaccagt

SEQ ID NO: 1185648 - DNA, 15 bp, Homo sapiens
aactctccccaccag

SEQ ID NO: 1185649 - DNA, 15 bp, Homo sapiens
aaactctccccacca

SEQ ID NO: 1185650 - DNA, 15 bp, Homo sapiens
caaactctccccacc

SEQ ID NO: 1185651 - DNA, 15 bp, Homo sapiens
tcaaactctccccac

SEQ ID NO: 1185652 - DNA, 15 bp, Homo sapiens
ctcaaactctcccca

SEQ ID NO: 1185653 - DNA, 15 bp, Homo sapiens
cctcaaactctcccc

SEQ ID NO: 1185654 - DNA, 15 bp, Homo sapiens
tcctcaaactctccc

SEQ ID NO: 1185655 - DNA, 15 bp, Homo sapiens
ctcctcaaactctcc

SEQ ID NO: 1185656 - DNA, 15 bp, Homo sapiens
actcctcaaactctc

SEQ ID NO: 1185657 - DNA, 15 bp, Homo sapiens
aactcctcaaactct

SEQ ID NO: 1185658 - DNA, 15 bp, Homo sapiens
aaactcctcaaactc

SEQ ID NO: 1185659 - DNA, 15 bp, Homo sapiens
aaaactcctcaaact

SEQ ID NO: 1185660 - DNA, 15 bp, Homo sapiens
aaaaactcctcaaac

SEQ ID NO: 1185661 - DNA, 15 bp, Homo sapiens
gaaaaactcctcaaa

SEQ ID NO: 1185662 - DNA, 15 bp, Homo sapiens
tgaaaaactcctcaa

SEQ ID NO: 1185663 - DNA, 15 bp, Homo sapiens
ttgaaaaactcctca

SEQ ID NO: 1185664 - DNA, 15 bp, Homo sapiens
tttgaaaaactcctc

SEQ ID NO: 1185665 - DNA, 15 bp, Homo sapiens
ttttgaaaaactcct

SEQ ID NO: 1185666 - DNA, 15 bp, Homo sapiens
cttttgaaaaactcc

SEQ ID NO: 1185667 - DNA, 15 bp, Homo sapiens
tcttttgaaaaactc

SEQ ID NO: 1185668 - DNA, 15 bp, Homo sapiens
atcttttgaaaaact

SEQ ID NO: 1185669 - DNA, 15 bp, Homo sapiens
gatcttttgaaaaac

SEQ ID NO: 1185670 - DNA, 15 bp, Homo sapiens
tgatcttttgaaaaa

SEQ ID NO: 1185671 - DNA, 15 bp, Homo sapiens
atgatcttttgaaaa

SEQ ID NO: 1185672 - DNA, 15 bp, Homo sapiens
aatgatcttttgaaa

SEQ ID NO: 1185673 - DNA, 15 bp, Homo sapiens
gaatgatcttttgaa

SEQ ID NO: 1185674 - DNA, 15 bp, Homo sapiens
ggaatgatcttttga

SEQ ID NO: 1185675 - DNA, 15 bp, Homo sapiens
aggaatgatcttttg

SEQ ID NO: 1185676 - DNA, 15 bp, Homo sapiens
gaggaatgatctttt

SEQ ID NO: 1185677 - DNA, 15 bp, Homo sapiens
ggaggaatgatcttt

SEQ ID NO: 1185678 - DNA, 15 bp, Homo sapiens
aggaggaatgatctt

SEQ ID NO: 1185679 - DNA, 15 bp, Homo sapiens
taggaggaatgatct

SEQ ID NO: 1185680 - DNA, 15 bp, Homo sapiens
ataggaggaatgatc

SEQ ID NO: 1185681 - DNA, 15 bp, Homo sapiens
gataggaggaatgat

SEQ ID NO: 1185682 - DNA, 15 bp, Homo sapiens
agataggaggaatga

SEQ ID NO: 1185683 - DNA, 15 bp, Homo sapiens
gagataggaggaatg

SEQ ID NO: 1185684 - DNA, 15 bp, Homo sapiens
tgagataggaggaat

SEQ ID NO: 1185685 - DNA, 15 bp, Homo sapiens
atgagataggaggaa

SEQ ID NO: 1185686 - DNA, 15 bp, Homo sapiens
gatgagataggagga

SEQ ID NO: 1185687 - DNA, 15 bp, Homo sapiens
agatgagataggagg

SEQ ID NO: 1185688 - DNA, 15 bp, Homo sapiens
aagatgagataggag

SEQ ID NO: 1185689 - DNA, 15 bp, Homo sapiens
caagatgagatagga

SEQ ID NO: 1185690 - DNA, 15 bp, Homo sapiens
ccaagatgagatagg

SEQ ID NO: 1185691 - DNA, 15 bp, Homo sapiens
gccaagatgagatag

SEQ ID NO: 1185692 - DNA, 15 bp, Homo sapiens
ggccaagatgagata

SEQ ID NO: 1185693 - DNA, 15 bp, Homo sapiens
tggccaagatgagat

SEQ ID NO: 1185694 - DNA, 15 bp, Homo sapiens
atggccaagatgaga

SEQ ID NO: 1185695 - DNA, 15 bp, Homo sapiens
gatggccaagatgag

SEQ ID NO: 1185696 - DNA, 15 bp, Homo sapiens
agatggccaagatga

SEQ ID NO: 1185697 - DNA, 15 bp, Homo sapiens
gagatggccaagatg

SEQ ID NO: 1185698 - DNA, 15 bp, Homo sapiens
tgagatggccaagat

SEQ ID NO: 1185699 - DNA, 15 bp, Homo sapiens
ctgagatggccaaga

SEQ ID NO: 1185700 - DNA, 15 bp, Homo sapiens
tctgagatggccaag

SEQ ID NO: 1185701 - DNA, 15 bp, Homo sapiens
atctgagatggccaa

SEQ ID NO: 1185702 - DNA, 15 bp, Homo sapiens
catctgagatggcca

SEQ ID NO: 1185703 - DNA, 15 bp, Homo sapiens
gcatctgagatggcc

SEQ ID NO: 1185704 - DNA, 15 bp, Homo sapiens
tgcatctgagatggc

SEQ ID NO: 1185705 - DNA, 15 bp, Homo sapiens
gtgcatctgagatgg

SEQ ID NO: 1185706 - DNA, 15 bp, Homo sapiens
tgtgcatctgagatg

SEQ ID NO: 1185707 - DNA, 15 bp, Homo sapiens
ctgtgcatctgagat

SEQ ID NO: 1185708 - DNA, 15 bp, Homo sapiens
gctgtgcatctgaga

SEQ ID NO: 1185709 - DNA, 15 bp, Homo sapiens
ggctgtgcatctgag

SEQ ID NO: 1185710 - DNA, 15 bp, Homo sapiens
gggctgtgcatctga

SEQ ID NO: 1185711 - DNA, 15 bp, Homo sapiens
tgggctgtgcatctg

SEQ ID NO: 1185712 - DNA, 15 bp, Homo sapiens
atgggctgtgcatct

SEQ ID NO: 1185713 - DNA, 15 bp, Homo sapiens
catgggctgtgcatc

SEQ ID NO: 1185714 - DNA, 15 bp, Homo sapiens
ccatgggctgtgcat

SEQ ID NO: 1185715 - DNA, 15 bp, Homo sapiens
cccatgggctgtgca

SEQ ID NO: 1185716 - DNA, 15 bp, Homo sapiens
ccccatgggctgtgc

SEQ ID NO: 1185717 - DNA, 15 bp, Homo sapiens
accccatgggctgtg

SEQ ID NO: 1185718 - DNA, 15 bp, Homo sapiens
caccccatgggctgt

SEQ ID NO: 1185719 - DNA, 15 bp, Homo sapiens
gcaccccatgggctg

SEQ ID NO: 1185720 - DNA, 15 bp, Homo sapiens
agcaccccatgggct

SEQ ID NO: 1185721 - DNA, 15 bp, Homo sapiens
gagcaccccatgggc

SEQ ID NO: 1185722 - DNA, 15 bp, Homo sapiens
tgagcaccccatggg

SEQ ID NO: 1185723 - DNA, 15 bp, Homo sapiens
ctgagcaccccatgg

SEQ ID NO: 1185724 - DNA, 15 bp, Homo sapiens
gctgagcaccccatg

SEQ ID NO: 1185725 - DNA, 15 bp, Homo sapiens
cgctgagcaccccat

SEQ ID NO: 1185726 - DNA, 15 bp, Homo sapiens
tcgctgagcacccca

SEQ ID NO: 1185727 - DNA, 15 bp, Homo sapiens
gtcgctgagcacccc

SEQ ID NO: 1185728 - DNA, 15 bp, Homo sapiens
ggtcgctgagcaccc

SEQ ID NO: 1185729 - DNA, 15 bp, Homo sapiens
tggtcgctgagcacc

SEQ ID NO: 1185730 - DNA, 15 bp, Homo sapiens
ctggtcgctgagcac

SEQ ID NO: 1185731 - DNA, 15 bp, Homo sapiens
cctggtcgctgagca

SEQ ID NO: 1185732 - DNA, 15 bp, Homo sapiens
gcctggtcgctgagc

SEQ ID NO: 1185733 - DNA, 15 bp, Homo sapiens
ggcctggtcgctgag

SEQ ID NO: 1185734 - DNA, 15 bp, Homo sapiens
tggcctggtcgctga

SEQ ID NO: 1185735 - DNA, 15 bp, Homo sapiens
ttggcctggtcgctg

SEQ ID NO: 1185736 - DNA, 15 bp, Homo sapiens
gttggcctggtcgct

SEQ ID NO: 1185737 - DNA, 15 bp, Homo sapiens
agttggcctggtcgc

SEQ ID NO: 1185738 - DNA, 15 bp, Homo sapiens
aagttggcctggtcg

SEQ ID NO: 1185739 - DNA, 15 bp, Homo sapiens
aaagttggcctggtc

SEQ ID NO: 1185740 - DNA, 15 bp, Homo sapiens
caaagttggcctggt

SEQ ID NO: 1185741 - DNA, 15 bp, Homo sapiens
acaaagttggcctgg

SEQ ID NO: 1185742 - DNA, 15 bp, Homo sapiens
tacaaagttggcctg

SEQ ID NO: 1185743 - DNA, 15 bp, Homo sapiens
gtacaaagttggcct

SEQ ID NO: 1185744 - DNA, 15 bp, Homo sapiens
ggtacaaagttggcc

SEQ ID NO: 1185745 - DNA, 15 bp, Homo sapiens
cggtacaaagttggc

SEQ ID NO: 1185746 - DNA, 15 bp, Homo sapiens
acggtacaaagttgg

SEQ ID NO: 1185747 - DNA, 15 bp, Homo sapiens
aacggtacaaagttg

SEQ ID NO: 1185748 - DNA, 15 bp, Homo sapiens
taacggtacaaagtt

SEQ ID NO: 1185749 - DNA, 15 bp, Homo sapiens
ctaacggtacaaagt

SEQ ID NO: 1185750 - DNA, 15 bp, Homo sapiens
gctaacggtacaaag

SEQ ID NO: 1185751 - DNA, 15 bp, Homo sapiens
agctaacggtacaaa

SEQ ID NO: 1185752 - DNA, 15 bp, Homo sapiens
aagctaacggtacaa

SEQ ID NO: 1185753 - DNA, 15 bp, Homo sapiens
gaagctaacggtaca

SEQ ID NO: 1185754 - DNA, 15 bp, Homo sapiens
agaagctaacggtac

SEQ ID NO: 1185755 - DNA, 15 bp, Homo sapiens
gagaagctaacggta

SEQ ID NO: 1185756 - DNA, 15 bp, Homo sapiens
agagaagctaacggt

SEQ ID NO: 1185757 - DNA, 15 bp, Homo sapiens
aagagaagctaacgg

SEQ ID NO: 1185758 - DNA, 15 bp, Homo sapiens
aaagagaagctaacg

SEQ ID NO: 1185759 - DNA, 15 bp, Homo sapiens
caaagagaagctaac

SEQ ID NO: 1185760 - DNA, 15 bp, Homo sapiens
ccaaagagaagctaa

SEQ ID NO: 1185761 - DNA, 15 bp, Homo sapiens
tccaaagagaagcta

SEQ ID NO: 1185762 - DNA, 15 bp, Homo sapiens
ctccaaagagaagct

SEQ ID NO: 1185763 - DNA, 15 bp, Homo sapiens
gctccaaagagaagc

SEQ ID NO: 1185764 - DNA, 15 bp, Homo sapiens
agctccaaagagaag

SEQ ID NO: 1185765 - DNA, 15 bp, Homo sapiens
cagctccaaagagaa

SEQ ID NO: 1185766 - DNA, 15 bp, Homo sapiens
tcagctccaaagaga

SEQ ID NO: 1185767 - DNA, 15 bp, Homo sapiens
atcagctccaaagag

SEQ ID NO: 1185768 - DNA, 15 bp, Homo sapiens
aatcagctccaaaga

SEQ ID NO: 1185769 - DNA, 15 bp, Homo sapiens
aaatcagctccaaag

SEQ ID NO: 1185770 - DNA, 15 bp, Homo sapiens
aaaatcagctccaaa

SEQ ID NO: 1185771 - DNA, 15 bp, Homo sapiens
taaaatcagctccaa

SEQ ID NO: 1185772 - DNA, 15 bp, Homo sapiens
ctaaaatcagctcca

SEQ ID NO: 1185773 - DNA, 15 bp, Homo sapiens
cctaaaatcagctcc

SEQ ID NO: 1185774 - DNA, 15 bp, Homo sapiens
tcctaaaatcagctc

SEQ ID NO: 1185775 - DNA, 15 bp, Homo sapiens
gtcctaaaatcagct

SEQ ID NO: 1185776 - DNA, 15 bp, Homo sapiens
tgtcctaaaatcagc

SEQ ID NO: 1185777 - DNA, 15 bp, Homo sapiens
ctgtcctaaaatcag

SEQ ID NO: 1185778 - DNA, 15 bp, Homo sapiens
gctgtcctaaaatca

SEQ ID NO: 1185779 - DNA, 15 bp, Homo sapiens
ggctgtcctaaaatc

SEQ ID NO: 1185780 - DNA, 15 bp, Homo sapiens
tggctgtcctaaaat

SEQ ID NO: 1185781 - DNA, 15 bp, Homo sapiens
ctggctgtcctaaaa

SEQ ID NO: 1185782 - DNA, 15 bp, Homo sapiens
gctggctgtcctaaa

SEQ ID NO: 1185783 - DNA, 15 bp, Homo sapiens
tgctggctgtcctaa

SEQ ID NO: 1185784 - DNA, 15 bp, Homo sapiens
gtgctggctgtccta

SEQ ID NO: 1185785 - DNA, 15 bp, Homo sapiens
ggtgctggctgtcct

SEQ ID NO: 1185786 - DNA, 15 bp, Homo sapiens
aggtgctggctgtcc

SEQ ID NO: 1185787 - DNA, 15 bp, Homo sapiens
taggtgctggctgtc

SEQ ID NO: 1185788 - DNA, 15 bp, Homo sapiens
ttaggtgctggctgt

SEQ ID NO: 1185789 - DNA, 15 bp, Homo sapiens
attaggtgctggctg

SEQ ID NO: 1185790 - DNA, 15 bp, Homo sapiens
aattaggtgctggct

SEQ ID NO: 1185791 - DNA, 15 bp, Homo sapiens
aaattaggtgctggc

SEQ ID NO: 1185792 - DNA, 15 bp, Homo sapiens
aaaattaggtgctgg

SEQ ID NO: 1185793 - DNA, 15 bp, Homo sapiens
gaaaattaggtgctg

SEQ ID NO: 1185794 - DNA, 15 bp, Homo sapiens
tgaaaattaggtgct

SEQ ID NO: 1185795 - DNA, 15 bp, Homo sapiens
ttgaaaattaggtgc

SEQ ID NO: 1185796 - DNA, 15 bp, Homo sapiens
tttgaaaattaggtg

SEQ ID NO: 1185797 - DNA, 15 bp, Homo sapiens
atttgaaaattaggt

SEQ ID NO: 1185798 - DNA, 15 bp, Homo sapiens
aatttgaaaattagg

SEQ ID NO: 1185799 - DNA, 15 bp, Homo sapiens
gaatttgaaaattag

SEQ ID NO: 1185800 - DNA, 15 bp, Homo sapiens
tgaatttgaaaatta

SEQ ID NO: 1185801 - DNA, 15 bp, Homo sapiens
ctgaatttgaaaatt

SEQ ID NO: 1185802 - DNA, 15 bp, Homo sapiens
actgaatttgaaaat

SEQ ID NO: 1185803 - DNA, 15 bp, Homo sapiens
cactgaatttgaaaa

SEQ ID NO: 1185804 - DNA, 15 bp, Homo sapiens
ccactgaatttgaaa

SEQ ID NO: 1185805 - DNA, 15 bp, Homo sapiens
tccactgaatttgaa

SEQ ID NO: 1185806 - DNA, 15 bp, Homo sapiens
ttccactgaatttga

SEQ ID NO: 1185807 - DNA, 15 bp, Homo sapiens
attccactgaatttg

SEQ ID NO: 1185808 - DNA, 15 bp, Homo sapiens
aattccactgaattt

SEQ ID NO: 1185809 - DNA, 15 bp, Homo sapiens
gaattccactgaatt

SEQ ID NO: 1185810 - DNA, 15 bp, Homo sapiens
ggaattccactgaat

SEQ ID NO: 1185811 - DNA, 15 bp, Homo sapiens
tggaattccactgaa

SEQ ID NO: 1185812 - DNA, 15 bp, Homo sapiens
ctggaattccactga

SEQ ID NO: 1185813 - DNA, 15 bp, Homo sapiens
tctggaattccactg

SEQ ID NO: 1185814 - DNA, 15 bp, Homo sapiens
ctctggaattccact

SEQ ID NO: 1185815 - DNA, 15 bp, Homo sapiens
tctctggaattccac

SEQ ID NO: 1185816 - DNA, 15 bp, Homo sapiens
gtctctggaattcca

SEQ ID NO: 1185817 - DNA, 15 bp, Homo sapiens
tgtctctggaattcc

SEQ ID NO: 1185818 - DNA, 15 bp, Homo sapiens
ttgtctctggaattc

SEQ ID NO: 1185819 - DNA, 15 bp, Homo sapiens
tttgtctctggaatt

SEQ ID NO: 1185820 - DNA, 15 bp, Homo sapiens
ttttgtctctggaat

SEQ ID NO: 1185821 - DNA, 15 bp, Homo sapiens
gttttgtctctggaa

SEQ ID NO: 1185822 - DNA, 15 bp, Homo sapiens
ggttttgtctctgga

SEQ ID NO: 1185823 - DNA, 15 bp, Homo sapiens
aggttttgtctctgg

SEQ ID NO: 1185824 - DNA, 15 bp, Homo sapiens
caggttttgtctctg

SEQ ID NO: 1185825 - DNA, 15 bp, Homo sapiens
ccaggttttgtctct

SEQ ID NO: 1185826 - DNA, 15 bp, Homo sapiens
accaggttttgtctc

SEQ ID NO: 1185827 - DNA, 15 bp, Homo sapiens
aaccaggttttgtct

SEQ ID NO: 1185828 - DNA, 15 bp, Homo sapiens
caaccaggttttgtc

SEQ ID NO: 1185829 - DNA, 15 bp, Homo sapiens
gcaaccaggttttgt

SEQ ID NO: 1185830 - DNA, 15 bp, Homo sapiens
ggcaaccaggttttg

SEQ ID NO: 1185831 - DNA, 15 bp, Homo sapiens
aggcaaccaggtttt

SEQ ID NO: 1185832 - DNA, 15 bp, Homo sapiens
taggcaaccaggttt

SEQ ID NO: 1185833 - DNA, 15 bp, Homo sapiens
ttaggcaaccaggtt

SEQ ID NO: 1185834 - DNA, 15 bp, Homo sapiens
gttaggcaaccaggt

SEQ ID NO: 1185835 - DNA, 15 bp, Homo sapiens
cgttaggcaaccagg

SEQ ID NO: 1185836 - DNA, 15 bp, Homo sapiens
acgttaggcaaccag

SEQ ID NO: 1185837 - DNA, 15 bp, Homo sapiens
aacgttaggcaacca

SEQ ID NO: 1185838 - DNA, 15 bp, Homo sapiens
caacgttaggcaacc

SEQ ID NO: 1185839 - DNA, 15 bp, Homo sapiens
gcaacgttaggcaac

SEQ ID NO: 1185840 - DNA, 15 bp, Homo sapiens
tgcaacgttaggcaa

SEQ ID NO: 1185841 - DNA, 15 bp, Homo sapiens
ctgcaacgttaggca

SEQ ID NO: 1185842 - DNA, 15 bp, Homo sapiens
cctgcaacgttaggc

SEQ ID NO: 1185843 - DNA, 15 bp, Homo sapiens
tcctgcaacgttagg

SEQ ID NO: 1185844 - DNA, 15 bp, Homo sapiens
ttcctgcaacgttag

SEQ ID NO: 1185845 - DNA, 15 bp, Homo sapiens
cttcctgcaacgtta

SEQ ID NO: 1185846 - DNA, 15 bp, Homo sapiens
gcttcctgcaacgtt

SEQ ID NO: 1185847 - DNA, 15 bp, Homo sapiens
tgcttcctgcaacgt

SEQ ID NO: 1185848 - DNA, 15 bp, Homo sapiens
ctgcttcctgcaacg

SEQ ID NO: 1185849 - DNA, 15 bp, Homo sapiens
cctgcttcctgcaac

SEQ ID NO: 1185850 - DNA, 15 bp, Homo sapiens
acctgcttcctgcaa

SEQ ID NO: 1185851 - DNA, 15 bp, Homo sapiens
cacctgcttcctgca

SEQ ID NO: 1185852 - DNA, 15 bp, Homo sapiens
acacctgcttcctgc

SEQ ID NO: 1185853 - DNA, 15 bp, Homo sapiens
aacacctgcttcctg

SEQ ID NO: 1185854 - DNA, 15 bp, Homo sapiens
taacacctgcttcct

SEQ ID NO: 1185855 - DNA, 15 bp, Homo sapiens
ctaacacctgcttcc

SEQ ID NO: 1185856 - DNA, 15 bp, Homo sapiens
tctaacacctgcttc

SEQ ID NO: 1185857 - DNA, 15 bp, Homo sapiens
ctctaacacctgctt

SEQ ID NO: 1185858 - DNA, 15 bp, Homo sapiens
cctctaacacctgct

SEQ ID NO: 1185859 - DNA, 15 bp, Homo sapiens
ccctctaacacctgc

SEQ ID NO: 1185860 - DNA, 15 bp, Homo sapiens
tccctctaacacctg

SEQ ID NO: 1185861 - DNA, 15 bp, Homo sapiens
atccctctaacacct

SEQ ID NO: 1185862 - DNA, 15 bp, Homo sapiens
aatccctctaacacc

SEQ ID NO: 1185863 - DNA, 15 bp, Homo sapiens
gaatccctctaacac

SEQ ID NO: 1185864 - DNA, 15 bp, Homo sapiens
ggaatccctctaaca

SEQ ID NO: 1185865 - DNA, 15 bp, Homo sapiens
gggaatccctctaac

SEQ ID NO: 1185866 - DNA, 15 bp, Homo sapiens
ggggaatccctctaa

SEQ ID NO: 1185867 - DNA, 15 bp, Homo sapiens
tggggaatccctcta

SEQ ID NO: 1185868 - DNA, 15 bp, Homo sapiens
ttggggaatccctct

SEQ ID NO: 1185869 - DNA, 15 bp, Homo sapiens
tttggggaatccctc

SEQ ID NO: 1185870 - DNA, 15 bp, Homo sapiens
ctttggggaatccct

SEQ ID NO: 1185871 - DNA, 15 bp, Homo sapiens
cctttggggaatccc

SEQ ID NO: 1185872 - DNA, 15 bp, Homo sapiens
gcctttggggaatcc

SEQ ID NO: 1185873 - DNA, 15 bp, Homo sapiens
tgcctttggggaatc

SEQ ID NO: 1185874 - DNA, 15 bp, Homo sapiens
ttgcctttggggaat

SEQ ID NO: 1185875 - DNA, 15 bp, Homo sapiens
gttgcctttggggaa

SEQ ID NO: 1185876 - DNA, 15 bp, Homo sapiens
tgttgcctttgggga

SEQ ID NO: 1185877 - DNA, 15 bp, Homo sapiens
gtgttgcctttgggg

SEQ ID NO: 1185878 - DNA, 15 bp, Homo sapiens
agtgttgcctttggg

SEQ ID NO: 1185879 - DNA, 15 bp, Homo sapiens
cagtgttgcctttgg

SEQ ID NO: 1185880 - DNA, 15 bp, Homo sapiens
acagtgttgcctttg

SEQ ID NO: 1185881 - DNA, 15 bp, Homo sapiens
aacagtgttgccttt

SEQ ID NO: 1185882 - DNA, 15 bp, Homo sapiens
taacagtgttgcctt

SEQ ID NO: 1185883 - DNA, 15 bp, Homo sapiens
ctaacagtgttgcct

SEQ ID NO: 1185884 - DNA, 15 bp, Homo sapiens
cctaacagtgttgcc

SEQ ID NO: 1185885 - DNA, 15 bp, Homo sapiens
ccctaacagtgttgc

SEQ ID NO: 1185886 - DNA, 15 bp, Homo sapiens
tccctaacagtgttg

SEQ ID NO: 1185887 - DNA, 15 bp, Homo sapiens
ttccctaacagtgtt

SEQ ID NO: 1185888 - DNA, 15 bp, Homo sapiens
attccctaacagtgt

SEQ ID NO: 1185889 - DNA, 15 bp, Homo sapiens
tattccctaacagtg

SEQ ID NO: 1185890 - DNA, 15 bp, Homo sapiens
ttattccctaacagt

SEQ ID NO: 1185891 - DNA, 15 bp, Homo sapiens
cttattccctaacag

SEQ ID NO: 1185892 - DNA, 15 bp, Homo sapiens
tcttattccctaaca

SEQ ID NO: 1185893 - DNA, 15 bp, Homo sapiens
ctcttattccctaac

SEQ ID NO: 1185894 - DNA, 15 bp, Homo sapiens
cctcttattccctaa

SEQ ID NO: 1185895 - DNA, 15 bp, Homo sapiens
ccctcttattcccta

SEQ ID NO: 1185896 - DNA, 15 bp, Homo sapiens
tccctcttattccct

SEQ ID NO: 1185897 - DNA, 15 bp, Homo sapiens
ttccctcttattccc

SEQ ID NO: 1185898 - DNA, 15 bp, Homo sapiens
cttccctcttattcc

SEQ ID NO: 1185899 - DNA, 15 bp, Homo sapiens
ccttccctcttattc

SEQ ID NO: 1185900 - DNA, 15 bp, Homo sapiens
tccttccctcttatt

SEQ ID NO: 1185901 - DNA, 15 bp, Homo sapiens
gtccttccctcttat

SEQ ID NO: 1185902 - DNA, 15 bp, Homo sapiens
agtccttccctctta

SEQ ID NO: 1185903 - DNA, 15 bp, Homo sapiens
aagtccttccctctt

SEQ ID NO: 1185904 - DNA, 15 bp, Homo sapiens
gaagtccttccctct

SEQ ID NO: 1185905 - DNA, 15 bp, Homo sapiens
cgaagtccttccctc

SEQ ID NO: 1185906 - DNA, 15 bp, Homo sapiens
gcgaagtccttccct

SEQ ID NO: 1185907 - DNA, 15 bp, Homo sapiens
agcgaagtccttccc

SEQ ID NO: 1185908 - DNA, 15 bp, Homo sapiens
tagcgaagtccttcc

SEQ ID NO: 1185909 - DNA, 15 bp, Homo sapiens
atagcgaagtccttc

SEQ ID NO: 1185910 - DNA, 15 bp, Homo sapiens
aatagcgaagtcctt

SEQ ID NO: 1185911 - DNA, 15 bp, Homo sapiens
caatagcgaagtcct

SEQ ID NO: 1185912 - DNA, 15 bp, Homo sapiens
acaatagcgaagtcc

SEQ ID NO: 1185913 - DNA, 15 bp, Homo sapiens
cacaatagcgaagtc

SEQ ID NO: 1185914 - DNA, 15 bp, Homo sapiens
tcacaatagcgaagt

SEQ ID NO: 1185915 - DNA, 15 bp, Homo sapiens
ttcacaatagcgaag

SEQ ID NO: 1185916 - DNA, 15 bp, Homo sapiens
cttcacaatagcgaa

SEQ ID NO: 1185917 - DNA, 15 bp, Homo sapiens
acttcacaatagcga

SEQ ID NO: 1185918 - DNA, 15 bp, Homo sapiens
aacttcacaatagcg

SEQ ID NO: 1185919 - DNA, 15 bp, Homo sapiens
caacttcacaatagc

SEQ ID NO: 1185920 - DNA, 15 bp, Homo sapiens
gcaacttcacaatag

SEQ ID NO: 1185921 - DNA, 15 bp, Homo sapiens
agcaacttcacaata

SEQ ID NO: 1185922 - DNA, 15 bp, Homo sapiens
gagcaacttcacaat

SEQ ID NO: 1185923 - DNA, 15 bp, Homo sapiens
agagcaacttcacaa

SEQ ID NO: 1185924 - DNA, 15 bp, Homo sapiens
tagagcaacttcaca

SEQ ID NO: 1185925 - DNA, 15 bp, Homo sapiens
ctagagcaacttcac

SEQ ID NO: 1185926 - DNA, 15 bp, Homo sapiens
tctagagcaacttca

SEQ ID NO: 1185927 - DNA, 15 bp, Homo sapiens
ctctagagcaacttc

SEQ ID NO: 1185928 - DNA, 15 bp, Homo sapiens
gctctagagcaactt

SEQ ID NO: 1185929 - DNA, 15 bp, Homo sapiens
agctctagagcaact

SEQ ID NO: 1185930 - DNA, 15 bp, Homo sapiens
aagctctagagcaac

SEQ ID NO: 1185931 - DNA, 15 bp, Homo sapiens
caagctctagagcaa

SEQ ID NO: 1185932 - DNA, 15 bp, Homo sapiens
tcaagctctagagca

SEQ ID NO: 1185933 - DNA, 15 bp, Homo sapiens
gtcaagctctagagc

SEQ ID NO: 1185934 - DNA, 15 bp, Homo sapiens
tgtcaagctctagag

SEQ ID NO: 1185935 - DNA, 15 bp, Homo sapiens
atgtcaagctctaga

SEQ ID NO: 1185936 - DNA, 15 bp, Homo sapiens
catgtcaagctctag

SEQ ID NO: 1185937 - DNA, 15 bp, Homo sapiens
tcatgtcaagctcta

SEQ ID NO: 1185938 - DNA, 15 bp, Homo sapiens
ctcatgtcaagctct

SEQ ID NO: 1185939 - DNA, 15 bp, Homo sapiens
cctcatgtcaagctc

SEQ ID NO: 1185940 - DNA, 15 bp, Homo sapiens
ccctcatgtcaagct

SEQ ID NO: 1185941 - DNA, 15 bp, Homo sapiens
cccctcatgtcaagc

SEQ ID NO: 1185942 - DNA, 15 bp, Homo sapiens
gcccctcatgtcaag

SEQ ID NO: 1185943 - DNA, 15 bp, Homo sapiens
tgcccctcatgtcaa

SEQ ID NO: 1185944 - DNA, 15 bp, Homo sapiens
ttgcccctcatgtca

SEQ ID NO: 1185945 - DNA, 15 bp, Homo sapiens
attgcccctcatgtc

SEQ ID NO: 1185946 - DNA, 15 bp, Homo sapiens
cattgcccctcatgt

SEQ ID NO: 1185947 - DNA, 15 bp, Homo sapiens
gcattgcccctcatg

SEQ ID NO: 1185948 - DNA, 15 bp, Homo sapiens
agcattgcccctcat

SEQ ID NO: 1185949 - DNA, 15 bp, Homo sapiens
tagcattgcccctca

SEQ ID NO: 1185950 - DNA, 15 bp, Homo sapiens
ttagcattgcccctc

SEQ ID NO: 1185951 - DNA, 15 bp, Homo sapiens
cttagcattgcccct

SEQ ID NO: 1185952 - DNA, 15 bp, Homo sapiens
acttagcattgcccc

SEQ ID NO: 1185953 - DNA, 15 bp, Homo sapiens
cacttagcattgccc

SEQ ID NO: 1185954 - DNA, 15 bp, Homo sapiens
acacttagcattgcc

SEQ ID NO: 1185955 - DNA, 15 bp, Homo sapiens
gacacttagcattgc

SEQ ID NO: 1185956 - DNA, 15 bp, Homo sapiens
agacacttagcattg

SEQ ID NO: 1185957 - DNA, 15 bp, Homo sapiens
cagacacttagcatt

SEQ ID NO: 1185958 - DNA, 15 bp, Homo sapiens
gcagacacttagcat

SEQ ID NO: 1185959 - DNA, 15 bp, Homo sapiens
tgcagacacttagca

SEQ ID NO: 1185960 - DNA, 15 bp, Homo sapiens
atgcagacacttagc

SEQ ID NO: 1185961 - DNA, 15 bp, Homo sapiens
gatgcagacacttag

SEQ ID NO: 1185962 - DNA, 15 bp, Homo sapiens
agatgcagacactta

SEQ ID NO: 1185963 - DNA, 15 bp, Homo sapiens
cagatgcagacactt

SEQ ID NO: 1185964 - DNA, 15 bp, Homo sapiens
acagatgcagacact

SEQ ID NO: 1185965 - DNA, 15 bp, Homo sapiens
cacagatgcagacac

SEQ ID NO: 1185966 - DNA, 15 bp, Homo sapiens
ccacagatgcagaca

SEQ ID NO: 1185967 - DNA, 15 bp, Homo sapiens
cccacagatgcagac

SEQ ID NO: 1185968 - DNA, 15 bp, Homo sapiens
ccccacagatgcaga

SEQ ID NO: 1185969 - DNA, 15 bp, Homo sapiens
accccacagatgcag

SEQ ID NO: 1185970 - DNA, 15 bp, Homo sapiens
aaccccacagatgca

SEQ ID NO: 1185971 - DNA, 15 bp, Homo sapiens
aaaccccacagatgc

SEQ ID NO: 1185972 - DNA, 15 bp, Homo sapiens
caaaccccacagatg

SEQ ID NO: 1185973 - DNA, 15 bp, Homo sapiens
gcaaaccccacagat

SEQ ID NO: 1185974 - DNA, 15 bp, Homo sapiens
ggcaaaccccacaga

SEQ ID NO: 1185975 - DNA, 15 bp, Homo sapiens
aggcaaaccccacag

SEQ ID NO: 1185976 - DNA, 15 bp, Homo sapiens
caggcaaaccccaca

SEQ ID NO: 1185977 - DNA, 15 bp, Homo sapiens
ccaggcaaaccccac

SEQ ID NO: 1185978 - DNA, 15 bp, Homo sapiens
gccaggcaaacccca

SEQ ID NO: 1185979 - DNA, 15 bp, Homo sapiens
ggccaggcaaacccc

SEQ ID NO: 1185980 - DNA, 15 bp, Homo sapiens
aggccaggcaaaccc

SEQ ID NO: 1185981 - DNA, 15 bp, Homo sapiens
aaggccaggcaaacc

SEQ ID NO: 1185982 - DNA, 15 bp, Homo sapiens
gaaggccaggcaaac

SEQ ID NO: 1185983 - DNA, 15 bp, Homo sapiens
ggaaggccaggcaaa

SEQ ID NO: 1185984 - DNA, 15 bp, Homo sapiens
cggaaggccaggcaa

SEQ ID NO: 1185985 - DNA, 15 bp, Homo sapiens
tcggaaggccaggca

SEQ ID NO: 1185986 - DNA, 15 bp, Homo sapiens
ctcggaaggccaggc

SEQ ID NO: 1185987 - DNA, 15 bp, Homo sapiens
tctcggaaggccagg

SEQ ID NO: 1185988 - DNA, 15 bp, Homo sapiens
ctctcggaaggccag

SEQ ID NO: 1185989 - DNA, 15 bp, Homo sapiens
gctctcggaaggcca

SEQ ID NO: 1185990 - DNA, 15 bp, Homo sapiens
tgctctcggaaggcc

SEQ ID NO: 1185991 - DNA, 15 bp, Homo sapiens
ttgctctcggaaggc

SEQ ID NO: 1185992 - DNA, 15 bp, Homo sapiens
cttgctctcggaagg

SEQ ID NO: 1185993 - DNA, 15 bp, Homo sapiens
acttgctctcggaag

SEQ ID NO: 1185994 - DNA, 15 bp, Homo sapiens
gacttgctctcggaa

SEQ ID NO: 1185995 - DNA, 15 bp, Homo sapiens
agacttgctctcgga

SEQ ID NO: 1185996 - DNA, 15 bp, Homo sapiens
tagacttgctctcgg

SEQ ID NO: 1185997 - DNA, 15 bp, Homo sapiens
ttagacttgctctcg

SEQ ID NO: 1185998 - DNA, 15 bp, Homo sapiens
tttagacttgctctc

SEQ ID NO: 1185999 - DNA, 15 bp, Homo sapiens
ttttagacttgctct

SEQ ID NO: 1186000 - DNA, 15 bp, Homo sapiens
attttagacttgctc

SEQ ID NO: 1186001 - DNA, 15 bp, Homo sapiens
cattttagacttgct

SEQ ID NO: 1186002 - DNA, 15 bp, Homo sapiens
gcattttagacttgc

SEQ ID NO: 1186003 - DNA, 15 bp, Homo sapiens
tgcattttagacttg

SEQ ID NO: 1186004 - DNA, 15 bp, Homo sapiens
ctgcattttagactt

SEQ ID NO: 1186005 - DNA, 15 bp, Homo sapiens
cctgcattttagact

SEQ ID NO: 1186006 - DNA, 15 bp, Homo sapiens
gcctgcattttagac

SEQ ID NO: 1186007 - DNA, 15 bp, Homo sapiens
agcctgcattttaga

SEQ ID NO: 1186008 - DNA, 15 bp, Homo sapiens
cagcctgcattttag

SEQ ID NO: 1186009 - DNA, 15 bp, Homo sapiens
gcagcctgcatttta

SEQ ID NO: 1186010 - DNA, 15 bp, Homo sapiens
agcagcctgcatttt

SEQ ID NO: 1186011 - DNA, 15 bp, Homo sapiens
cagcagcctgcattt

SEQ ID NO: 1186012 - DNA, 15 bp, Homo sapiens
ccagcagcctgcatt

SEQ ID NO: 1186013 - DNA, 15 bp, Homo sapiens
accagcagcctgcat

SEQ ID NO: 1186014 - DNA, 15 bp, Homo sapiens
caccagcagcctgca

SEQ ID NO: 1186015 - DNA, 15 bp, Homo sapiens
ccaccagcagcctgc

SEQ ID NO: 1186016 - DNA, 15 bp, Homo sapiens
accaccagcagcctg

SEQ ID NO: 1186017 - DNA, 15 bp, Homo sapiens
cccaccaccagcagc

SEQ ID NO: 1186018 - DNA, 15 bp, Homo sapiens
ccccaccaccagcag

SEQ ID NO: 1186019 - DNA, 15 bp, Homo sapiens
cccccaccaccagca

SEQ ID NO: 1186020 - DNA, 15 bp, Homo sapiens
gcccccaccaccagc

SEQ ID NO: 1186021 - DNA, 15 bp, Homo sapiens
cgcccccaccaccag

SEQ ID NO: 1186022 - DNA, 15 bp, Homo sapiens
ccgcccccaccacca

SEQ ID NO: 1186023 - DNA, 15 bp, Homo sapiens
cccgcccccaccacc

SEQ ID NO: 1186024 - DNA, 15 bp, Homo sapiens
accccgcccccacca

SEQ ID NO: 1186025 - DNA, 15 bp, Homo sapiens
caccccgcccccacc

SEQ ID NO: 1186026 - DNA, 15 bp, Homo sapiens
ccaccccgcccccac

SEQ ID NO: 1186027 - DNA, 15 bp, Homo sapiens
cccaccccgccccca

SEQ ID NO: 1186028 - DNA, 15 bp, Homo sapiens
ccccaccccgccccc

SEQ ID NO: 1186029 - DNA, 15 bp, Homo sapiens
accccaccccgcccc

SEQ ID NO: 1186030 - DNA, 15 bp, Homo sapiens
caccccaccccgccc

SEQ ID NO: 1186031 - DNA, 15 bp, Homo sapiens
ccaccccaccccgcc

SEQ ID NO: 1186032 - DNA, 15 bp, Homo sapiens
cccaccccaccccgc

SEQ ID NO: 1186033 - DNA, 15 bp, Homo sapiens
ccccaccccaccccg

SEQ ID NO: 1186034 - DNA, 15 bp, Homo sapiens
cccccaccccacccc

SEQ ID NO: 1186035 - DNA, 15 bp, Homo sapiens
ccccccaccccaccc

SEQ ID NO: 1186036 - DNA, 15 bp, Homo sapiens
tccccccaccccacc

SEQ ID NO: 1186037 - DNA, 15 bp, Homo sapiens
ttccccccaccccac

SEQ ID NO: 1186038 - DNA, 15 bp, Homo sapiens
attccccccacccca

SEQ ID NO: 1186039 - DNA, 15 bp, Homo sapiens
gattccccccacccc

SEQ ID NO: 1186040 - DNA, 15 bp, Homo sapiens
ggattccccccaccc

SEQ ID NO: 1186041 - DNA, 15 bp, Homo sapiens
aggattccccccacc

SEQ ID NO: 1186042 - DNA, 15 bp, Homo sapiens
caggattccccccac

SEQ ID NO: 1186043 - DNA, 15 bp, Homo sapiens
gcaggattcccccca

SEQ ID NO: 1186044 - DNA, 15 bp, Homo sapiens
tgcaggattcccccc

SEQ ID NO: 1186045 - DNA, 15 bp, Homo sapiens
gtgcaggattccccc

SEQ ID NO: 1186046 - DNA, 15 bp, Homo sapiens
tgtgcaggattcccc

SEQ ID NO: 1186047 - DNA, 15 bp, Homo sapiens
ctgtgcaggattccc

SEQ ID NO: 1186048 - DNA, 15 bp, Homo sapiens
tctgtgcaggattcc

SEQ ID NO: 1186049 - DNA, 15 bp, Homo sapiens
ttctgtgcaggattc

SEQ ID NO: 1186050 - DNA, 15 bp, Homo sapiens
tttctgtgcaggatt

SEQ ID NO: 1186051 - DNA, 15 bp, Homo sapiens
ctttctgtgcaggat

SEQ ID NO: 1186052 - DNA, 15 bp, Homo sapiens
tctttctgtgcagga

SEQ ID NO: 1186053 - DNA, 15 bp, Homo sapiens
ttctttctgtgcagg

SEQ ID NO: 1186054 - DNA, 15 bp, Homo sapiens
cttctttctgtgcag

SEQ ID NO: 1186055 - DNA, 15 bp, Homo sapiens
tcttctttctgtgca

SEQ ID NO: 1186056 - DNA, 15 bp, Homo sapiens
gtcttctttctgtgc

SEQ ID NO: 1186057 - DNA, 15 bp, Homo sapiens
tgtcttctttctgtg

SEQ ID NO: 1186058 - DNA, 15 bp, Homo sapiens
ttgtcttctttctgt

SEQ ID NO: 1186059 - DNA, 15 bp, Homo sapiens
tttgtcttctttctg

SEQ ID NO: 1186060 - DNA, 15 bp, Homo sapiens
ctttgtcttctttct

SEQ ID NO: 1186061 - DNA, 15 bp, Homo sapiens
actttgtcttctttc

SEQ ID NO: 1186062 - DNA, 15 bp, Homo sapiens
cactttgtcttcttt

SEQ ID NO: 1186063 - DNA, 15 bp, Homo sapiens
gcactttgtcttctt

SEQ ID NO: 1186064 - DNA, 15 bp, Homo sapiens
agcactttgtcttct

SEQ ID NO: 1186065 - DNA, 15 bp, Homo sapiens
aagcactttgtcttc

SEQ ID NO: 1186066 - DNA, 15 bp, Homo sapiens
gaagcactttgtctt

SEQ ID NO: 1186067 - DNA, 15 bp, Homo sapiens
tgaagcactttgtct

SEQ ID NO: 1186068 - DNA, 15 bp, Homo sapiens
ttgaagcactttgtc

SEQ ID NO: 1186069 - DNA, 15 bp, Homo sapiens
tttgaagcactttgt

SEQ ID NO: 1186070 - DNA, 15 bp, Homo sapiens
atttgaagcactttg

SEQ ID NO: 1186071 - DNA, 15 bp, Homo sapiens
gatttgaagcacttt

SEQ ID NO: 1186072 - DNA, 15 bp, Homo sapiens
tgatttgaagcactt

SEQ ID NO: 1186073 - DNA, 15 bp, Homo sapiens
gtgatttgaagcact

SEQ ID NO: 1186074 - DNA, 15 bp, Homo sapiens
agtgatttgaagcac

SEQ ID NO: 1186075 - DNA, 15 bp, Homo sapiens
aagtgatttgaagca

SEQ ID NO: 1186076 - DNA, 15 bp, Homo sapiens
taagtgatttgaagc

SEQ ID NO: 1186077 - DNA, 15 bp, Homo sapiens
ataagtgatttgaag

SEQ ID NO: 1186078 - DNA, 15 bp, Homo sapiens
aataagtgatttgaa

SEQ ID NO: 1186079 - DNA, 15 bp, Homo sapiens
gaataagtgatttga

SEQ ID NO: 1186080 - DNA, 15 bp, Homo sapiens
tgaataagtgatttg

SEQ ID NO: 1186081 - DNA, 15 bp, Homo sapiens
atgaataagtgattt

SEQ ID NO: 1186082 - DNA, 15 bp, Homo sapiens
catgaataagtgatt

SEQ ID NO: 1186083 - DNA, 15 bp, Homo sapiens
gcatgaataagtgat

SEQ ID NO: 1186084 - DNA, 15 bp, Homo sapiens
ggcatgaataagtga

SEQ ID NO: 1186085 - DNA, 15 bp, Homo sapiens
gggcatgaataagtg

SEQ ID NO: 1186086 - DNA, 15 bp, Homo sapiens
ggggcatgaataagt

SEQ ID NO: 1186087 - DNA, 15 bp, Homo sapiens
aggggcatgaataag

SEQ ID NO: 1186088 - DNA, 15 bp, Homo sapiens
aaggggcatgaataa

SEQ ID NO: 1186089 - DNA, 15 bp, Homo sapiens
aaaggggcatgaata

SEQ ID NO: 1186090 - DNA, 15 bp, Homo sapiens
aaaaggggcatgaat

SEQ ID NO: 1186091 - DNA, 15 bp, Homo sapiens
caaaaggggcatgaa

SEQ ID NO: 1186092 - DNA, 15 bp, Homo sapiens
gcaaaaggggcatga

SEQ ID NO: 1186093 - DNA, 15 bp, Homo sapiens
tgcaaaaggggcatg

SEQ ID NO: 1186094 - DNA, 15 bp, Homo sapiens
atgcaaaaggggcat

SEQ ID NO: 1186095 - DNA, 15 bp, Homo sapiens
catgcaaaaggggca

SEQ ID NO: 1186096 - DNA, 15 bp, Homo sapiens
acatgcaaaaggggc

SEQ ID NO: 1186097 - DNA, 15 bp, Homo sapiens
tacatgcaaaagggg

SEQ ID NO: 1186098 - DNA, 15 bp, Homo sapiens
gtacatgcaaaaggg

SEQ ID NO: 1186099 - DNA, 15 bp, Homo sapiens
agtacatgcaaaagg

SEQ ID NO: 1186100 - DNA, 15 bp, Homo sapiens
aagtacatgcaaaag

SEQ ID NO: 1186101 - DNA, 15 bp, Homo sapiens
aaagtacatgcaaaa

SEQ ID NO: 1186102 - DNA, 15 bp, Homo sapiens
aaaagtacatgcaaa

SEQ ID NO: 1186103 - DNA, 15 bp, Homo sapiens
gaaaagtacatgcaa

SEQ ID NO: 1186104 - DNA, 15 bp, Homo sapiens
cgaaaagtacatgca

SEQ ID NO: 1186105 - DNA, 15 bp, Homo sapiens
acgaaaagtacatgc

SEQ ID NO: 1186106 - DNA, 15 bp, Homo sapiens
cacgaaaagtacatg

SEQ ID NO: 1186107 - DNA, 15 bp, Homo sapiens
tcacgaaaagtacat

SEQ ID NO: 1186108 - DNA, 15 bp, Homo sapiens
ttcacgaaaagtaca

SEQ ID NO: 1186109 - DNA, 15 bp, Homo sapiens
attcacgaaaagtac

SEQ ID NO: 1186110 - DNA, 15 bp, Homo sapiens
aattcacgaaaagta

SEQ ID NO: 1186111 - DNA, 15 bp, Homo sapiens
caattcacgaaaagt

SEQ ID NO: 1186112 - DNA, 15 bp, Homo sapiens
ccaattcacgaaaag

SEQ ID NO: 1186113 - DNA, 15 bp, Homo sapiens
accaattcacgaaaa

SEQ ID NO: 1186114 - DNA, 15 bp, Homo sapiens
caccaattcacgaaa

SEQ ID NO: 1186115 - DNA, 15 bp, Homo sapiens
tcaccaattcacgaa

SEQ ID NO: 1186116 - DNA, 15 bp, Homo sapiens
gtcaccaattcacga

SEQ ID NO: 1186117 - DNA, 15 bp, Homo sapiens
tgtcaccaattcacg

SEQ ID NO: 1186118 - DNA, 15 bp, Homo sapiens
ttgtcaccaattcac

SEQ ID NO: 1186119 - DNA, 15 bp, Homo sapiens
gttgtcaccaattca

SEQ ID NO: 1186120 - DNA, 15 bp, Homo sapiens
agttgtcaccaattc

SEQ ID NO: 1186121 - DNA, 15 bp, Homo sapiens
gagttgtcaccaatt

SEQ ID NO: 1186122 - DNA, 15 bp, Homo sapiens
ggagttgtcaccaat

SEQ ID NO: 1186123 - DNA, 15 bp, Homo sapiens
gggagttgtcaccaa

SEQ ID NO: 1186124 - DNA, 15 bp, Homo sapiens
ggggagttgtcacca

SEQ ID NO: 1186125 - DNA, 15 bp, Homo sapiens
tggggagttgtcacc

SEQ ID NO: 1186126 - DNA, 15 bp, Homo sapiens
gtggggagttgtcac

SEQ ID NO: 1186127 - DNA, 15 bp, Homo sapiens
agtggggagttgtca

SEQ ID NO: 1186128 - DNA, 15 bp, Homo sapiens
aagtggggagttgtc

SEQ ID NO: 1186129 - DNA, 15 bp, Homo sapiens
aaagtggggagttgt

SEQ ID NO: 1186130 - DNA, 15 bp, Homo sapiens
taaagtggggagttg

SEQ ID NO: 1186131 - DNA, 15 bp, Homo sapiens
ctaaagtggggagtt

SEQ ID NO: 1186132 - DNA, 15 bp, Homo sapiens
tctaaagtggggagt

SEQ ID NO: 1186133 - DNA, 15 bp, Homo sapiens
ctctaaagtggggag

SEQ ID NO: 1186134 - DNA, 15 bp, Homo sapiens
tctctaaagtgggga

SEQ ID NO: 1186135 - DNA, 15 bp, Homo sapiens
ctctctaaagtgggg

SEQ ID NO: 1186136 - DNA, 15 bp, Homo sapiens
tctctctaaagtggg

SEQ ID NO: 1186137 - DNA, 15 bp, Homo sapiens
ttctctctaaagtgg

SEQ ID NO: 1186138 - DNA, 15 bp, Homo sapiens
cttctctctaaagtg

SEQ ID NO: 1186139 - DNA, 15 bp, Homo sapiens
ccttctctctaaagt

SEQ ID NO: 1186140 - DNA, 15 bp, Homo sapiens
tccttctctctaaag

SEQ ID NO: 1186141 - DNA, 15 bp, Homo sapiens
ttccttctctctaaa

SEQ ID NO: 1186142 - DNA, 15 bp, Homo sapiens
tttccttctctctaa

SEQ ID NO: 1186143 - DNA, 15 bp, Homo sapiens
atttccttctctcta

SEQ ID NO: 1186144 - DNA, 15 bp, Homo sapiens
tatttccttctctct

SEQ ID NO: 1186145 - DNA, 15 bp, Homo sapiens
ttatttccttctctc

SEQ ID NO: 1186146 - DNA, 15 bp, Homo sapiens
tttatttccttctct

SEQ ID NO: 1186147 - DNA, 15 bp, Homo sapiens
atttatttccttctc

SEQ ID NO: 1186148 - DNA, 15 bp, Homo sapiens
catttatttccttct

SEQ ID NO: 1186149 - DNA, 15 bp, Homo sapiens
tcatttatttccttc

SEQ ID NO: 1186150 - DNA, 15 bp, Homo sapiens
gtcatttatttcctt

SEQ ID NO: 1186151 - DNA, 15 bp, Homo sapiens
tgtcatttatttcct

SEQ ID NO: 1186152 - DNA, 15 bp, Homo sapiens
atgtcatttatttcc

SEQ ID NO: 1186153 - DNA, 15 bp, Homo sapiens
gatgtcatttatttc

SEQ ID NO: 1186154 - DNA, 15 bp, Homo sapiens
agatgtcatttattt

SEQ ID NO: 1186155 - DNA, 15 bp, Homo sapiens
aagatgtcatttatt

SEQ ID NO: 1186156 - DNA, 15 bp, Homo sapiens
aaagatgtcatttat

SEQ ID NO: 1186157 - DNA, 15 bp, Homo sapiens
aaaagatgtcattta

SEQ ID NO: 1186158 - DNA, 15 bp, Homo sapiens
caaaagatgtcattt

SEQ ID NO: 1186159 - DNA, 15 bp, Homo sapiens
gcaaaagatgtcatt

SEQ ID NO: 1186160 - DNA, 15 bp, Homo sapiens
tgcaaaagatgtcat

SEQ ID NO: 1186161 - DNA, 15 bp, Homo sapiens
ttgcaaaagatgtca

SEQ ID NO: 1186162 - DNA, 15 bp, Homo sapiens
attgcaaaagatgtc

SEQ ID NO: 1186163 - DNA, 15 bp, Homo sapiens
aattgcaaaagatgt

SEQ ID NO: 1186164 - DNA, 15 bp, Homo sapiens
caattgcaaaagatg

SEQ ID NO: 1186165 - DNA, 15 bp, Homo sapiens
acaattgcaaaagat

SEQ ID NO: 1186166 - DNA, 15 bp, Homo sapiens
tacaattgcaaaaga

SEQ ID NO: 1186167 - DNA, 15 bp, Homo sapiens
atacaattgcaaaag

SEQ ID NO: 1186168 - DNA, 15 bp, Homo sapiens
aatacaattgcaaaa

SEQ ID NO: 1186169 - DNA, 15 bp, Homo sapiens
caatacaattgcaaa

SEQ ID NO: 1186170 - DNA, 15 bp, Homo sapiens
gcaatacaattgcaa

SEQ ID NO: 1186171 - DNA, 15 bp, Homo sapiens
tgcaatacaattgca

SEQ ID NO: 1186172 - DNA, 15 bp, Homo sapiens
ttgcaatacaattgc

SEQ ID NO: 1186173 - DNA, 15 bp, Homo sapiens
attgcaatacaattg

SEQ ID NO: 1186174 - DNA, 15 bp, Homo sapiens
aattgcaatacaatt

SEQ ID NO: 1186175 - DNA, 15 bp, Homo sapiens
gaattgcaatacaat

SEQ ID NO: 1186176 - DNA, 15 bp, Homo sapiens
agaattgcaatacaa

SEQ ID NO: 1186177 - DNA, 15 bp, Homo sapiens
cagaattgcaataca

SEQ ID NO: 1186178 - DNA, 15 bp, Homo sapiens
ccagaattgcaatac

SEQ ID NO: 1186179 - DNA, 15 bp, Homo sapiens
accagaattgcaata

SEQ ID NO: 1186180 - DNA, 15 bp, Homo sapiens
taccagaattgcaat

SEQ ID NO: 1186181 - DNA, 15 bp, Homo sapiens
ctaccagaattgcaa

SEQ ID NO: 1186182 - DNA, 15 bp, Homo sapiens
tctaccagaattgca

SEQ ID NO: 1186183 - DNA, 15 bp, Homo sapiens
ctctaccagaattgc

SEQ ID NO: 1186184 - DNA, 15 bp, Homo sapiens
actctaccagaattg

SEQ ID NO: 1186185 - DNA, 15 bp, Homo sapiens
cactctaccagaatt

SEQ ID NO: 1186186 - DNA, 15 bp, Homo sapiens
acactctaccagaat

SEQ ID NO: 1186187 - DNA, 15 bp, Homo sapiens
tacactctaccagaa

SEQ ID NO: 1186188 - DNA, 15 bp, Homo sapiens
ctacactctaccaga

SEQ ID NO: 1186189 - DNA, 15 bp, Homo sapiens
tctacactctaccag

SEQ ID NO: 1186190 - DNA, 15 bp, Homo sapiens
atctacactctacca

SEQ ID NO: 1186191 - DNA, 15 bp, Homo sapiens
aatctacactctacc

SEQ ID NO: 1186192 - DNA, 15 bp, Homo sapiens
aaatctacactctac

SEQ ID NO: 1186193 - DNA, 15 bp, Homo sapiens
gaaatctacactcta

SEQ ID NO: 1186194 - DNA, 15 bp, Homo sapiens
ggaaatctacactct

SEQ ID NO: 1186195 - DNA, 15 bp, Homo sapiens
cggaaatctacactc

SEQ ID NO: 1186196 - DNA, 15 bp, Homo sapiens
ccggaaatctacact

SEQ ID NO: 1186197 - DNA, 15 bp, Homo sapiens
cccggaaatctacac

SEQ ID NO: 1186198 - DNA, 15 bp, Homo sapiens
ccccggaaatctaca

SEQ ID NO: 1186199 - DNA, 15 bp, Homo sapiens
accccggaaatctac

SEQ ID NO: 1186200 - DNA, 15 bp, Homo sapiens
caccccggaaatcta

SEQ ID NO: 1186201 - DNA, 15 bp, Homo sapiens
ccaccccggaaatct

SEQ ID NO: 1186202 - DNA, 15 bp, Homo sapiens
cccaccccggaaatc

SEQ ID NO: 1186203 - DNA, 15 bp, Homo sapiens
ccccaccccggaaat

SEQ ID NO: 1186204 - DNA, 15 bp, Homo sapiens
tccccaccccggaaa

SEQ ID NO: 1186205 - DNA, 15 bp, Homo sapiens
atccccaccccggaa

SEQ ID NO: 1186206 - DNA, 15 bp, Homo sapiens
aatccccaccccgga

SEQ ID NO: 1186207 - DNA, 15 bp, Homo sapiens
aaatccccaccccgg

SEQ ID NO: 1186208 - DNA, 15 bp, Homo sapiens
taaatccccaccccg

SEQ ID NO: 1186209 - DNA, 15 bp, Homo sapiens
ataaatccccacccc

SEQ ID NO: 1186210 - DNA, 15 bp, Homo sapiens
aataaatccccaccc

SEQ ID NO: 1186211 - DNA, 15 bp, Homo sapiens
caataaatccccacc

SEQ ID NO: 1186212 - DNA, 15 bp, Homo sapiens
acaataaatccccac

SEQ ID NO: 1186213 - DNA, 15 bp, Homo sapiens
gacaataaatcccca

SEQ ID NO: 1186214 - DNA, 15 bp, Homo sapiens
ggacaataaatcccc

SEQ ID NO: 1186215 - DNA, 15 bp, Homo sapiens
aggacaataaatccc

SEQ ID NO: 1186216 - DNA, 15 bp, Homo sapiens
caggacaataaatcc

SEQ ID NO: 1186217 - DNA, 15 bp, Homo sapiens
acaggacaataaatc

SEQ ID NO: 1186218 - DNA, 15 bp, Homo sapiens
cacaggacaataaat

SEQ ID NO: 1186219 - DNA, 15 bp, Homo sapiens
ccacaggacaataaa

SEQ ID NO: 1186220 - DNA, 15 bp, Homo sapiens
tccacaggacaataa

SEQ ID NO: 1186221 - DNA, 15 bp, Homo sapiens
atccacaggacaata

SEQ ID NO: 1186222 - DNA, 15 bp, Homo sapiens
catccacaggacaat

SEQ ID NO: 1186223 - DNA, 15 bp, Homo sapiens
gccatccacaggaca

SEQ ID NO: 1186224 - DNA, 15 bp, Homo sapiens
tgccatccacaggac

SEQ ID NO: 1186225 - DNA, 15 bp, Homo sapiens
ctgccatccacagga

SEQ ID NO: 1186226 - DNA, 15 bp, Homo sapiens
cctgccatccacagg

SEQ ID NO: 1186227 - DNA, 15 bp, Homo sapiens
acctgccatccacag

SEQ ID NO: 1186228 - DNA, 15 bp, Homo sapiens
gacctgccatccaca

SEQ ID NO: 1186229 - DNA, 15 bp, Homo sapiens
ggacctgccatccac

SEQ ID NO: 1186230 - DNA, 15 bp, Homo sapiens
gggacctgccatcca

SEQ ID NO: 1186231 - DNA, 15 bp, Homo sapiens
ggggacctgccatcc

SEQ ID NO: 1186232 - DNA, 15 bp, Homo sapiens
aggggacctgccatc

SEQ ID NO: 1186233 - DNA, 15 bp, Homo sapiens
gaggggacctgccat

SEQ ID NO: 1186234 - DNA, 15 bp, Homo sapiens
ggaggggacctgcca

SEQ ID NO: 1186235 - DNA, 15 bp, Homo sapiens
aggaggggacctgcc

SEQ ID NO: 1186236 - DNA, 15 bp, Homo sapiens
aaggaggggacctgc

SEQ ID NO: 1186237 - DNA, 15 bp, Homo sapiens
gaaggaggggacctg

SEQ ID NO: 1186238 - DNA, 15 bp, Homo sapiens
agaaggaggggacct

SEQ ID NO: 1186239 - DNA, 15 bp, Homo sapiens
tagaaggaggggacc

SEQ ID NO: 1186240 - DNA, 15 bp, Homo sapiens
atagaaggaggggac

SEQ ID NO: 1186241 - DNA, 15 bp, Homo sapiens
catagaaggagggga

SEQ ID NO: 1186242 - DNA, 15 bp, Homo sapiens
tcatagaaggagggg

SEQ ID NO: 1186243 - DNA, 15 bp, Homo sapiens
gtcatagaaggaggg

SEQ ID NO: 1186244 - DNA, 15 bp, Homo sapiens
agtcatagaaggagg

SEQ ID NO: 1186245 - DNA, 15 bp, Homo sapiens
tagtcatagaaggag

SEQ ID NO: 1186246 - DNA, 15 bp, Homo sapiens
ctagtcatagaagga

SEQ ID NO: 1186247 - DNA, 15 bp, Homo sapiens
cctagtcatagaagg

SEQ ID NO: 1186248 - DNA, 15 bp, Homo sapiens
ccctagtcatagaag

SEQ ID NO: 1186249 - DNA, 15 bp, Homo sapiens
tccctagtcatagaa

SEQ ID NO: 1186250 - DNA, 15 bp, Homo sapiens
ttccctagtcataga

SEQ ID NO: 1186251 - DNA, 15 bp, Homo sapiens
gttccctagtcatag

SEQ ID NO: 1186252 - DNA, 15 bp, Homo sapiens
ggttccctagtcata

SEQ ID NO: 1186253 - DNA, 15 bp, Homo sapiens
gggttccctagtcat

SEQ ID NO: 1186254 - DNA, 15 bp, Homo sapiens
ggggttccctagtca

SEQ ID NO: 1186255 - DNA, 15 bp, Homo sapiens
gggggttccctagtc

SEQ ID NO: 1186256 - DNA, 15 bp, Homo sapiens
ggggggttccctagt

SEQ ID NO: 1186257 - DNA, 15 bp, Homo sapiens
aggggggttccctag

SEQ ID NO: 1186258 - DNA, 15 bp, Homo sapiens
taggggggttcccta

SEQ ID NO: 1186259 - DNA, 15 bp, Homo sapiens
ctaggggggttccct

SEQ ID NO: 1186260 - DNA, 15 bp, Homo sapiens
gctaggggggttccc

SEQ ID NO: 1186261 - DNA, 15 bp, Homo sapiens
agctaggggggttcc

SEQ ID NO: 1186262 - DNA, 15 bp, Homo sapiens
cagctaggggggttc

SEQ ID NO: 1186263 - DNA, 15 bp, Homo sapiens
ccagctaggggggtt

SEQ ID NO: 1186264 - DNA, 15 bp, Homo sapiens
accagctaggggggt

SEQ ID NO: 1186265 - DNA, 15 bp, Homo sapiens
gaccagctagggggg

SEQ ID NO: 1186266 - DNA, 15 bp, Homo sapiens
ggaccagctaggggg

SEQ ID NO: 1186267 - DNA, 15 bp, Homo sapiens
aggaccagctagggg

SEQ ID NO: 1186268 - DNA, 15 bp, Homo sapiens
gaggaccagctaggg

SEQ ID NO: 1186269 - DNA, 15 bp, Homo sapiens
tgaggaccagctagg

SEQ ID NO: 1186270 - DNA, 15 bp, Homo sapiens
gtgaggaccagctag

SEQ ID NO: 1186271 - DNA, 15 bp, Homo sapiens
ggtgaggaccagcta

SEQ ID NO: 1186272 - DNA, 15 bp, Homo sapiens
tggtgaggaccagct

SEQ ID NO: 1186273 - DNA, 15 bp, Homo sapiens
atggtgaggaccagc

SEQ ID NO: 1186274 - DNA, 15 bp, Homo sapiens
gatggtgaggaccag

SEQ ID NO: 1186275 - DNA, 15 bp, Homo sapiens
ggatggtgaggacca

SEQ ID NO: 1186276 - DNA, 15 bp, Homo sapiens
tggatggtgaggacc

SEQ ID NO: 1186277 - DNA, 15 bp, Homo sapiens
ctggatggtgaggac

SEQ ID NO: 1186278 - DNA, 15 bp, Homo sapiens
gctggatggtgagga

SEQ ID NO: 1186279 - DNA, 15 bp, Homo sapiens
ggctggatggtgagg

SEQ ID NO: 1186280 - DNA, 15 bp, Homo sapiens
gggctggatggtgag

SEQ ID NO: 1186281 - DNA, 15 bp, Homo sapiens
agggctggatggtga

SEQ ID NO: 1186282 - DNA, 15 bp, Homo sapiens
cagggctggatggtg

SEQ ID NO: 1186283 - DNA, 15 bp, Homo sapiens
tcagggctggatggt

SEQ ID NO: 1186284 - DNA, 15 bp, Homo sapiens
gtcagggctggatgg

SEQ ID NO: 1186285 - DNA, 15 bp, Homo sapiens
tgtcagggctggatg

SEQ ID NO: 1186286 - DNA, 15 bp, Homo sapiens
ctgtcagggctggat

SEQ ID NO: 1186287 - DNA, 15 bp, Homo sapiens
tctgtcagggctgga

SEQ ID NO: 1186288 - DNA, 15 bp, Homo sapiens
gtctgtcagggctgg

SEQ ID NO: 1186289 - DNA, 15 bp, Homo sapiens
ggtctgtcagggctg

SEQ ID NO: 1186290 - DNA, 15 bp, Homo sapiens
aggtctgtcagggct

SEQ ID NO: 1186291 - DNA, 15 bp, Homo sapiens
gaggtctgtcagggc

SEQ ID NO: 1186292 - DNA, 15 bp, Homo sapiens
tgaggtctgtcaggg

SEQ ID NO: 1186293 - DNA, 15 bp, Homo sapiens
gtgaggtctgtcagg

SEQ ID NO: 1186294 - DNA, 15 bp, Homo sapiens
tgtgaggtctgtcag

SEQ ID NO: 1186295 - DNA, 15 bp, Homo sapiens
atgtgaggtctgtca

SEQ ID NO: 1186296 - DNA, 15 bp, Homo sapiens
aatgtgaggtctgtc

SEQ ID NO: 1186297 - DNA, 15 bp, Homo sapiens
gaatgtgaggtctgt

SEQ ID NO: 1186298 - DNA, 15 bp, Homo sapiens
tgaatgtgaggtctg

SEQ ID NO: 1186299 - DNA, 15 bp, Homo sapiens
ctgaatgtgaggtct

SEQ ID NO: 1186300 - DNA, 15 bp, Homo sapiens
gctgaatgtgaggtc

SEQ ID NO: 1186301 - DNA, 15 bp, Homo sapiens
agctgaatgtgaggt

SEQ ID NO: 1186302 - DNA, 15 bp, Homo sapiens
aagctgaatgtgagg

SEQ ID NO: 1186303 - DNA, 15 bp, Homo sapiens
caagctgaatgtgag

SEQ ID NO: 1186304 - DNA, 15 bp, Homo sapiens
ccaagctgaatgtga

SEQ ID NO: 1186305 - DNA, 15 bp, Homo sapiens
cccaagctgaatgtg

SEQ ID NO: 1186306 - DNA, 15 bp, Homo sapiens
gcccaagctgaatgt

SEQ ID NO: 1186307 - DNA, 15 bp, Homo sapiens
agcccaagctgaatg

SEQ ID NO: 1186308 - DNA, 15 bp, Homo sapiens
tagcccaagctgaat

SEQ ID NO: 1186309 - DNA, 15 bp, Homo sapiens
ctagcccaagctgaa

SEQ ID NO: 1186310 - DNA, 15 bp, Homo sapiens
gctagcccaagctga

SEQ ID NO: 1186311 - DNA, 15 bp, Homo sapiens
ggctagcccaagctg

SEQ ID NO: 1186312 - DNA, 15 bp, Homo sapiens
gggctagcccaagct

SEQ ID NO: 1186313 - DNA, 15 bp, Homo sapiens
agggctagcccaagc

SEQ ID NO: 1186314 - DNA, 15 bp, Homo sapiens
gagggctagcccaag

SEQ ID NO: 1186315 - DNA, 15 bp, Homo sapiens
ggagggctagcccaa

SEQ ID NO: 1186316 - DNA, 15 bp, Homo sapiens
gggagggctagccca

SEQ ID NO: 1186317 - DNA, 15 bp, Homo sapiens
agggagggctagccc

SEQ ID NO: 1186318 - DNA, 15 bp, Homo sapiens
aagggagggctagcc

SEQ ID NO: 1186319 - DNA, 15 bp, Homo sapiens
aaagggagggctagc

SEQ ID NO: 1186320 - DNA, 15 bp, Homo sapiens
aaaagggagggctag

SEQ ID NO: 1186321 - DNA, 15 bp, Homo sapiens
aaaaagggagggcta

SEQ ID NO: 1186322 - DNA, 15 bp, Homo sapiens
gaaaaagggagggct

SEQ ID NO: 1186323 - DNA, 15 bp, Homo sapiens
tgaaaaagggagggc

SEQ ID NO: 1186324 - DNA, 15 bp, Homo sapiens
ctgaaaaagggaggg

SEQ ID NO: 1186325 - DNA, 15 bp, Homo sapiens
gctgaaaaagggagg

SEQ ID NO: 1186326 - DNA, 15 bp, Homo sapiens
agctgaaaaagggag

SEQ ID NO: 1186327 - DNA, 15 bp, Homo sapiens
cagctgaaaaaggga

SEQ ID NO: 1186328 - DNA, 15 bp, Homo sapiens
ccagctgaaaaaggg

SEQ ID NO: 1186329 - DNA, 15 bp, Homo sapiens
cccagctgaaaaagg

SEQ ID NO: 1186330 - DNA, 15 bp, Homo sapiens
acccagctgaaaaag

SEQ ID NO: 1186331 - DNA, 15 bp, Homo sapiens
cacccagctgaaaaa

SEQ ID NO: 1186332 - DNA, 15 bp, Homo sapiens
ccacccagctgaaaa

SEQ ID NO: 1186333 - DNA, 15 bp, Homo sapiens
accacccagctgaaa

SEQ ID NO: 1186334 - DNA, 15 bp, Homo sapiens
caccacccagctgaa

SEQ ID NO: 1186335 - DNA, 15 bp, Homo sapiens
tcaccacccagctga

SEQ ID NO: 1186336 - DNA, 15 bp, Homo sapiens
gtcaccacccagctg

SEQ ID NO: 1186337 - DNA, 15 bp, Homo sapiens
agtcaccacccagct

SEQ ID NO: 1186338 - DNA, 15 bp, Homo sapiens
cagtcaccacccagc

SEQ ID NO: 1186339 - DNA, 15 bp, Homo sapiens
tcagtcaccacccag

SEQ ID NO: 1186340 - DNA, 15 bp, Homo sapiens
gtcagtcaccaccca

SEQ ID NO: 1186341 - DNA, 15 bp, Homo sapiens
agtcagtcaccaccc

SEQ ID NO: 1186342 - DNA, 15 bp, Homo sapiens
cagtcagtcaccacc

SEQ ID NO: 1186343 - DNA, 15 bp, Homo sapiens
acagtcagtcaccac

SEQ ID NO: 1186344 - DNA, 15 bp, Homo sapiens
aacagtcagtcacca

SEQ ID NO: 1186345 - DNA, 15 bp, Homo sapiens
gaacagtcagtcacc

SEQ ID NO: 1186346 - DNA, 15 bp, Homo sapiens
agaacagtcagtcac

SEQ ID NO: 1186347 - DNA, 15 bp, Homo sapiens
cagaacagtcagtca

SEQ ID NO: 1186348 - DNA, 15 bp, Homo sapiens
tcagaacagtcagtc

SEQ ID NO: 1186349 - DNA, 15 bp, Homo sapiens
ttcagaacagtcagt

SEQ ID NO: 1186350 - DNA, 15 bp, Homo sapiens
tttcagaacagtcag

SEQ ID NO: 1186351 - DNA, 15 bp, Homo sapiens
gtttcagaacagtca

SEQ ID NO: 1186352 - DNA, 15 bp, Homo sapiens
ggtttcagaacagtc

SEQ ID NO: 1186353 - DNA, 15 bp, Homo sapiens
aggtttcagaacagt

SEQ ID NO: 1186354 - DNA, 15 bp, Homo sapiens
caggtttcagaacag

SEQ ID NO: 1186355 - DNA, 15 bp, Homo sapiens
gcaggtttcagaaca

SEQ ID NO: 1186356 - DNA, 15 bp, Homo sapiens
ggcaggtttcagaac

SEQ ID NO: 1186357 - DNA, 15 bp, Homo sapiens
aggcaggtttcagaa

SEQ ID NO: 1186358 - DNA, 15 bp, Homo sapiens
aaggcaggtttcaga

SEQ ID NO: 1186359 - DNA, 15 bp, Homo sapiens
gaaggcaggtttcag

SEQ ID NO: 1186360 - DNA, 15 bp, Homo sapiens
ggaaggcaggtttca

SEQ ID NO: 1186361 - DNA, 15 bp, Homo sapiens
tggaaggcaggtttc

SEQ ID NO: 1186362 - DNA, 15 bp, Homo sapiens
atggaaggcaggttt

SEQ ID NO: 1186363 - DNA, 15 bp, Homo sapiens
gatggaaggcaggtt

SEQ ID NO: 1186364 - DNA, 15 bp, Homo sapiens
ggatggaaggcaggt

SEQ ID NO: 1186365 - DNA, 15 bp, Homo sapiens
gggatggaaggcagg

SEQ ID NO: 1186366 - DNA, 15 bp, Homo sapiens
ggggatggaaggcag

SEQ ID NO: 1186367 - DNA, 15 bp, Homo sapiens
tggggatggaaggca

SEQ ID NO: 1186368 - DNA, 15 bp, Homo sapiens
ctggggatggaaggc

SEQ ID NO: 1186369 - DNA, 15 bp, Homo sapiens
actggggatggaagg

SEQ ID NO: 1186370 - DNA, 15 bp, Homo sapiens
aactggggatggaag

SEQ ID NO: 1186371 - DNA, 15 bp, Homo sapiens
gaactggggatggaa

SEQ ID NO: 1186372 - DNA, 15 bp, Homo sapiens
ggaactggggatgga

SEQ ID NO: 1186373 - DNA, 15 bp, Homo sapiens
gggaactggggatgg

SEQ ID NO: 1186374 - DNA, 15 bp, Homo sapiens
cgggaactggggatg

SEQ ID NO: 1186375 - DNA, 15 bp, Homo sapiens
acgggaactggggat

SEQ ID NO: 1186376 - DNA, 15 bp, Homo sapiens
cacgggaactgggga

SEQ ID NO: 1186377 - DNA, 15 bp, Homo sapiens
gcacgggaactgggg

SEQ ID NO: 1186378 - DNA, 15 bp, Homo sapiens
agcacgggaactggg

SEQ ID NO: 1186379 - DNA, 15 bp, Homo sapiens
cagcacgggaactgg

SEQ ID NO: 1186380 - DNA, 15 bp, Homo sapiens
gcagcacgggaactg

SEQ ID NO: 1186381 - DNA, 15 bp, Homo sapiens
cgcagcacgggaact

SEQ ID NO: 1186382 - DNA, 15 bp, Homo sapiens
tcgcagcacgggaac

SEQ ID NO: 1186383 - DNA, 15 bp, Homo sapiens
ctcgcagcacgggaa

SEQ ID NO: 1186384 - DNA, 15 bp, Homo sapiens
gctcgcagcacggga

SEQ ID NO: 1186385 - DNA, 15 bp, Homo sapiens
agctcgcagcacggg

SEQ ID NO: 1186386 - DNA, 15 bp, Homo sapiens
cagctcgcagcacgg

SEQ ID NO: 1186387 - DNA, 15 bp, Homo sapiens
acagctcgcagcacg

SEQ ID NO: 1186388 - DNA, 15 bp, Homo sapiens
gacagctcgcagcac

SEQ ID NO: 1186389 - DNA, 15 bp, Homo sapiens
tgacagctcgcagca

SEQ ID NO: 1186390 - DNA, 15 bp, Homo sapiens
ctgacagctcgcagc

SEQ ID NO: 1186391 - DNA, 15 bp, Homo sapiens
gctgacagctcgcag

SEQ ID NO: 1186392 - DNA, 15 bp, Homo sapiens
cgctgacagctcgca

SEQ ID NO: 1186393 - DNA, 15 bp, Homo sapiens
tcgctgacagctcgc

SEQ ID NO: 1186394 - DNA, 15 bp, Homo sapiens
gtcgctgacagctcg

SEQ ID NO: 1186395 - DNA, 15 bp, Homo sapiens
ggtcgctgacagctc

SEQ ID NO: 1186396 - DNA, 15 bp, Homo sapiens
tggtcgctgacagct

SEQ ID NO: 1186397 - DNA, 15 bp, Homo sapiens
ctggtcgctgacagc

SEQ ID NO: 1186398 - DNA, 15 bp, Homo sapiens
cctggtcgctgacag

SEQ ID NO: 1186399 - DNA, 15 bp, Homo sapiens
tcctggtcgctgaca

SEQ ID NO: 1186400 - DNA, 15 bp, Homo sapiens
ctcctggtcgctgac

SEQ ID NO: 1186401 - DNA, 15 bp, Homo sapiens
tctcctggtcgctga

SEQ ID NO: 1186402 - DNA, 15 bp, Homo sapiens
ctctcctggtcgctg

SEQ ID NO: 1186403 - DNA, 15 bp, Homo sapiens
actctcctggtcgct

SEQ ID NO: 1186404 - DNA, 15 bp, Homo sapiens
gactctcctggtcgc

SEQ ID NO: 1186405 - DNA, 15 bp, Homo sapiens
tgactctcctggtcg

SEQ ID NO: 1186406 - DNA, 15 bp, Homo sapiens
ctgactctcctggtc

SEQ ID NO: 1186407 - DNA, 15 bp, Homo sapiens
cctgactctcctggt

SEQ ID NO: 1186408 - DNA, 15 bp, Homo sapiens
tcctgactctcctgg

SEQ ID NO: 1186409 - DNA, 15 bp, Homo sapiens
gtcctgactctcctg

SEQ ID NO: 1186410 - DNA, 15 bp, Homo sapiens
cgtcctgactctcct

SEQ ID NO: 1186411 - DNA, 15 bp, Homo sapiens
ccgtcctgactctcc

SEQ ID NO: 1186412 - DNA, 15 bp, Homo sapiens
gccgtcctgactctc

SEQ ID NO: 1186413 - DNA, 15 bp, Homo sapiens
ggccgtcctgactct

SEQ ID NO: 1186414 - DNA, 15 bp, Homo sapiens
aggccgtcctgactc

SEQ ID NO: 1186415 - DNA, 15 bp, Homo sapiens
gaggccgtcctgact

SEQ ID NO: 1186416 - DNA, 15 bp, Homo sapiens
agaggccgtcctgac

SEQ ID NO: 1186417 - DNA, 15 bp, Homo sapiens
tagaggccgtcctga

SEQ ID NO: 1186418 - DNA, 15 bp, Homo sapiens
gtagaggccgtcctg

SEQ ID NO: 1186419 - DNA, 15 bp, Homo sapiens
ggtagaggccgtcct

SEQ ID NO: 1186420 - DNA, 15 bp, Homo sapiens
tggtagaggccgtcc

SEQ ID NO: 1186421 - DNA, 15 bp, Homo sapiens
ctggtagaggccgtc

SEQ ID NO: 1186422 - DNA, 15 bp, Homo sapiens
tctggtagaggccgt

SEQ ID NO: 1186423 - DNA, 15 bp, Homo sapiens
ttctggtagaggccg

SEQ ID NO: 1186424 - DNA, 15 bp, Homo sapiens
cttctggtagaggcc

SEQ ID NO: 1186425 - DNA, 15 bp, Homo sapiens
acttctggtagaggc

SEQ ID NO: 1186426 - DNA, 15 bp, Homo sapiens
cacttctggtagagg

SEQ ID NO: 1186427 - DNA, 15 bp, Homo sapiens
ccacttctggtagag

SEQ ID NO: 1186428 - DNA, 15 bp, Homo sapiens
gccacttctggtaga

SEQ ID NO: 1186429 - DNA, 15 bp, Homo sapiens
tgccacttctggtag

SEQ ID NO: 1186430 - DNA, 15 bp, Homo sapiens
ctgccacttctggta

SEQ ID NO: 1186431 - DNA, 15 bp, Homo sapiens
tctgccacttctggt

SEQ ID NO: 1186432 - DNA, 15 bp, Homo sapiens
atctgccacttctgg

SEQ ID NO: 1186433 - DNA, 15 bp, Homo sapiens
catctgccacttctg

SEQ ID NO: 1186434 - DNA, 15 bp, Homo sapiens
tcatctgccacttct

SEQ ID NO: 1186435 - DNA, 15 bp, Homo sapiens
atcatctgccacttc

SEQ ID NO: 1186436 - DNA, 15 bp, Homo sapiens
catcatctgccactt

SEQ ID NO: 1186437 - DNA, 15 bp, Homo sapiens
gcatcatctgccact

SEQ ID NO: 1186438 - DNA, 15 bp, Homo sapiens
agcatcatctgccac

SEQ ID NO: 1186439 - DNA, 15 bp, Homo sapiens
cagcatcatctgcca

SEQ ID NO: 1186440 - DNA, 15 bp, Homo sapiens
ccagcatcatctgcc

SEQ ID NO: 1186441 - DNA, 15 bp, Homo sapiens
gccagcatcatctgc

SEQ ID NO: 1186442 - DNA, 15 bp, Homo sapiens
ggccagcatcatctg

SEQ ID NO: 1186443 - DNA, 15 bp, Homo sapiens
aggccagcatcatct

SEQ ID NO: 1186444 - DNA, 15 bp, Homo sapiens
taggccagcatcatc

SEQ ID NO: 1186445 - DNA, 15 bp, Homo sapiens
ataggccagcatcat

SEQ ID NO: 1186446 - DNA, 15 bp, Homo sapiens
cataggccagcatca

SEQ ID NO: 1186447 - DNA, 15 bp, Homo sapiens
gcataggccagcatc

SEQ ID NO: 1186448 - DNA, 15 bp, Homo sapiens
tgcataggccagcat

SEQ ID NO: 1186449 - DNA, 15 bp, Homo sapiens
gtgcataggccagca

SEQ ID NO: 1186450 - DNA, 15 bp, Homo sapiens
agtgcataggccagc

SEQ ID NO: 1186451 - DNA, 15 bp, Homo sapiens
cagtgcataggccag

SEQ ID NO: 1186452 - DNA, 15 bp, Homo sapiens
gcagtgcataggcca

SEQ ID NO: 1186453 - DNA, 15 bp, Homo sapiens
tgcagtgcataggcc

SEQ ID NO: 1186454 - DNA, 15 bp, Homo sapiens
gtgcagtgcataggc

SEQ ID NO: 1186455 - DNA, 15 bp, Homo sapiens
cgtgcagtgcatagg

SEQ ID NO: 1186456 - DNA, 15 bp, Homo sapiens
acgtgcagtgcatag

SEQ ID NO: 1186457 - DNA, 15 bp, Homo sapiens
gacgtgcagtgcata

SEQ ID NO: 1186458 - DNA, 15 bp, Homo sapiens
ggacgtgcagtgcat

SEQ ID NO: 1186459 - DNA, 15 bp, Homo sapiens
aggacgtgcagtgca

SEQ ID NO: 1186460 - DNA, 15 bp, Homo sapiens
gaggacgtgcagtgc

SEQ ID NO: 1186461 - DNA, 15 bp, Homo sapiens
ggaggacgtgcagtg

SEQ ID NO: 1186462 - DNA, 15 bp, Homo sapiens
gggaggacgtgcagt

SEQ ID NO: 1186463 - DNA, 15 bp, Homo sapiens
ggggaggacgtgcag

SEQ ID NO: 1186464 - DNA, 15 bp, Homo sapiens
aggggaggacgtgca

SEQ ID NO: 1186465 - DNA, 15 bp, Homo sapiens
aaggggaggacgtgc

SEQ ID NO: 1186466 - DNA, 15 bp, Homo sapiens
gaaggggaggacgtg

SEQ ID NO: 1186467 - DNA, 15 bp, Homo sapiens
tgaaggggaggacgt

SEQ ID NO: 1186468 - DNA, 15 bp, Homo sapiens
ctgaaggggaggacg

SEQ ID NO: 1186469 - DNA, 15 bp, Homo sapiens
gctgaaggggaggac

SEQ ID NO: 1186470 - DNA, 15 bp, Homo sapiens
cgctgaaggggagga

SEQ ID NO: 1186471 - DNA, 15 bp, Homo sapiens
acgctgaaggggagg

SEQ ID NO: 1186472 - DNA, 15 bp, Homo sapiens
aacgctgaaggggag

SEQ ID NO: 1186473 - DNA, 15 bp, Homo sapiens
caacgctgaagggga

SEQ ID NO: 1186474 - DNA, 15 bp, Homo sapiens
acaacgctgaagggg

SEQ ID NO: 1186475 - DNA, 15 bp, Homo sapiens
aacaacgctgaaggg

SEQ ID NO: 1186476 - DNA, 15 bp, Homo sapiens
caacaacgctgaagg

SEQ ID NO: 1186477 - DNA, 15 bp, Homo sapiens
gcaacaacgctgaag

SEQ ID NO: 1186478 - DNA, 15 bp, Homo sapiens
ggcaacaacgctgaa

SEQ ID NO: 1186479 - DNA, 15 bp, Homo sapiens
tggcaacaacgctga

SEQ ID NO: 1186480 - DNA, 15 bp, Homo sapiens
gtggcaacaacgctg

SEQ ID NO: 1186481 - DNA, 15 bp, Homo sapiens
ggtggcaacaacgct

SEQ ID NO: 1186482 - DNA, 15 bp, Homo sapiens
tggtggcaacaacgc

SEQ ID NO: 1186483 - DNA, 15 bp, Homo sapiens
atggtggcaacaacg

SEQ ID NO: 1186484 - DNA, 15 bp, Homo sapiens
catggtggcaacaac

SEQ ID NO: 1186485 - DNA, 15 bp, Homo sapiens
tcatggtggcaacaa

SEQ ID NO: 1186486 - DNA, 15 bp, Homo sapiens
atcatggtggcaaca

SEQ ID NO: 1186487 - DNA, 15 bp, Homo sapiens
aatcatggtggcaac

SEQ ID NO: 1186488 - DNA, 15 bp, Homo sapiens
aaatcatggtggcaa

SEQ ID NO: 1186489 - DNA, 15 bp, Homo sapiens
aaaatcatggtggca

SEQ ID NO: 1186490 - DNA, 15 bp, Homo sapiens
gaaaatcatggtggc

SEQ ID NO: 1186491 - DNA, 15 bp, Homo sapiens
tgaaaatcatggtgg

SEQ ID NO: 1186492 - DNA, 15 bp, Homo sapiens
ctgaaaatcatggtg

SEQ ID NO: 1186493 - DNA, 15 bp, Homo sapiens
gctgaaaatcatggt

SEQ ID NO: 1186494 - DNA, 15 bp, Homo sapiens
tgctgaaaatcatgg

SEQ ID NO: 1186495 - DNA, 15 bp, Homo sapiens
ctgctgaaaatcatg

SEQ ID NO: 1186496 - DNA, 15 bp, Homo sapiens
actgctgaaaatcat

SEQ ID NO: 1186497 - DNA, 15 bp, Homo sapiens
cactgctgaaaatca

SEQ ID NO: 1186498 - DNA, 15 bp, Homo sapiens
acactgctgaaaatc

SEQ ID NO: 1186499 - DNA, 15 bp, Homo sapiens
cacactgctgaaaat

SEQ ID NO: 1186500 - DNA, 15 bp, Homo sapiens
acacactgctgaaaa

SEQ ID NO: 1186501 - DNA, 15 bp, Homo sapiens
cacacactgctgaaa

SEQ ID NO: 1186502 - DNA, 15 bp, Homo sapiens
gcacacactgctgaa

SEQ ID NO: 1186503 - DNA, 15 bp, Homo sapiens
agcacacactgctga

SEQ ID NO: 1186504 - DNA, 15 bp, Homo sapiens
tagcacacactgctg

SEQ ID NO: 1186505 - DNA, 15 bp, Homo sapiens
gtagcacacactgct

SEQ ID NO: 1186506 - DNA, 15 bp, Homo sapiens
agtagcacacactgc

SEQ ID NO: 1186507 - DNA, 15 bp, Homo sapiens
cagtagcacacactg

SEQ ID NO: 1186508 - DNA, 15 bp, Homo sapiens
ccagtagcacacact

SEQ ID NO: 1186509 - DNA, 15 bp, Homo sapiens
accagtagcacacac

SEQ ID NO: 1186510 - DNA, 15 bp, Homo sapiens
caccagtagcacaca

SEQ ID NO: 1186511 - DNA, 15 bp, Homo sapiens
tcaccagtagcacac

SEQ ID NO: 1186512 - DNA, 15 bp, Homo sapiens
ctcaccagtagcaca

SEQ ID NO: 1186513 - DNA, 15 bp, Homo sapiens
cctcaccagtagcac

SEQ ID NO: 1186514 - DNA, 15 bp, Homo sapiens
ccctcaccagtagca

SEQ ID NO: 1186515 - DNA, 15 bp, Homo sapiens
cccctcaccagtagc

SEQ ID NO: 1186516 - DNA, 15 bp, Homo sapiens
acccctcaccagtag

SEQ ID NO: 1186517 - DNA, 15 bp, Homo sapiens
aacccctcaccagta

SEQ ID NO: 1186518 - DNA, 15 bp, Homo sapiens
caacccctcaccagt

SEQ ID NO: 1186519 - DNA, 15 bp, Homo sapiens
acaacccctcaccag

SEQ ID NO: 1186520 - DNA, 15 bp, Homo sapiens
aacaacccctcacca

SEQ ID NO: 1186521 - DNA, 15 bp, Homo sapiens
gaacaacccctcacc

SEQ ID NO: 1186522 - DNA, 15 bp, Homo sapiens
tgaacaacccctcac

SEQ ID NO: 1186523 - DNA, 15 bp, Homo sapiens
ctgaacaacccctca

SEQ ID NO: 1186524 - DNA, 15 bp, Homo sapiens
actgaacaacccctc

SEQ ID NO: 1186525 - DNA, 15 bp, Homo sapiens
aactgaacaacccct

SEQ ID NO: 1186526 - DNA, 15 bp, Homo sapiens
gaactgaacaacccc

SEQ ID NO: 1186527 - DNA, 15 bp, Homo sapiens
tgaactgaacaaccc

SEQ ID NO: 1186528 - DNA, 15 bp, Homo sapiens
gtgaactgaacaacc

SEQ ID NO: 1186529 - DNA, 15 bp, Homo sapiens
ggtgaactgaacaac

SEQ ID NO: 1186530 - DNA, 15 bp, Homo sapiens
gggtgaactgaacaa

SEQ ID NO: 1186531 - DNA, 15 bp, Homo sapiens
tgggtgaactgaaca

SEQ ID NO: 1186532 - DNA, 15 bp, Homo sapiens
ctgggtgaactgaac

SEQ ID NO: 1186533 - DNA, 15 bp, Homo sapiens
cctgggtgaactgaa

SEQ ID NO: 1186534 - DNA, 15 bp, Homo sapiens
ccctgggtgaactga

SEQ ID NO: 1186535 - DNA, 15 bp, Homo sapiens
gccctgggtgaactg

SEQ ID NO: 1186536 - DNA, 15 bp, Homo sapiens
ggccctgggtgaact

SEQ ID NO: 1186537 - DNA, 15 bp, Homo sapiens
cggccctgggtgaac

SEQ ID NO: 1186538 - DNA, 15 bp, Homo sapiens
ccggccctgggtgaa

SEQ ID NO: 1186539 - DNA, 15 bp, Homo sapiens
cccggccctgggtga

SEQ ID NO: 1186540 - DNA, 15 bp, Homo sapiens
gcccggccctgggtg

SEQ ID NO: 1186541 - DNA, 15 bp, Homo sapiens
agcccggccctgggt

SEQ ID NO: 1186542 - DNA, 15 bp, Homo sapiens
gagcccggccctggg

SEQ ID NO: 1186543 - DNA, 15 bp, Homo sapiens
ggagcccggccctgg

SEQ ID NO: 1186544 - DNA, 15 bp, Homo sapiens
gggagcccggccctg

SEQ ID NO: 1186545 - DNA, 15 bp, Homo sapiens
tgggagcccggccct

SEQ ID NO: 1186546 - DNA, 15 bp, Homo sapiens
atgggagcccggccc

SEQ ID NO: 1186547 - DNA, 15 bp, Homo sapiens
catgggagcccggcc

SEQ ID NO: 1186548 - DNA, 15 bp, Homo sapiens
ccatgggagcccggc

SEQ ID NO: 1186549 - DNA, 15 bp, Homo sapiens
tccatgggagcccgg

SEQ ID NO: 1186550 - DNA, 15 bp, Homo sapiens
ctccatgggagcccg

SEQ ID NO: 1186551 - DNA, 15 bp, Homo sapiens
actccatgggagccc

SEQ ID NO: 1186552 - DNA, 15 bp, Homo sapiens
gactccatgggagcc

SEQ ID NO: 1186553 - DNA, 15 bp, Homo sapiens
tgactccatgggagc

SEQ ID NO: 1186554 - DNA, 15 bp, Homo sapiens
atgactccatgggag

SEQ ID NO: 1186555 - DNA, 15 bp, Homo sapiens
catgactccatggga

SEQ ID NO: 1186556 - DNA, 15 bp, Homo sapiens
ccatgactccatggg

SEQ ID NO: 1186557 - DNA, 15 bp, Homo sapiens
tccatgactccatgg

SEQ ID NO: 1186558 - DNA, 15 bp, Homo sapiens
ctccatgactccatg

SEQ ID NO: 1186559 - DNA, 15 bp, Homo sapiens
gctccatgactccat

SEQ ID NO: 1186560 - DNA, 15 bp, Homo sapiens
agctccatgactcca

SEQ ID NO: 1186561 - DNA, 15 bp, Homo sapiens
tagctccatgactcc

SEQ ID NO: 1186562 - DNA, 15 bp, Homo sapiens
ctagctccatgactc

SEQ ID NO: 1186563 - DNA, 15 bp, Homo sapiens
actagctccatgact

SEQ ID NO: 1186564 - DNA, 15 bp, Homo sapiens
cactagctccatgac

SEQ ID NO: 1186565 - DNA, 15 bp, Homo sapiens
ccactagctccatga

SEQ ID NO: 1186566 - DNA, 15 bp, Homo sapiens
cccactagctccatg

SEQ ID NO: 1186567 - DNA, 15 bp, Homo sapiens
tcccactagctccat

SEQ ID NO: 1186568 - DNA, 15 bp, Homo sapiens
gtcccactagctcca

SEQ ID NO: 1186569 - DNA, 15 bp, Homo sapiens
agtcccactagctcc

SEQ ID NO: 1186570 - DNA, 15 bp, Homo sapiens
gagtcccactagctc

SEQ ID NO: 1186571 - DNA, 15 bp, Homo sapiens
cgagtcccactagct

SEQ ID NO: 1186572 - DNA, 15 bp, Homo sapiens
acgagtcccactagc

SEQ ID NO: 1186573 - DNA, 15 bp, Homo sapiens
cacgagtcccactag

SEQ ID NO: 1186574 - DNA, 15 bp, Homo sapiens
gcacgagtcccacta

SEQ ID NO: 1186575 - DNA, 15 bp, Homo sapiens
tgcacgagtcccact

SEQ ID NO: 1186576 - DNA, 15 bp, Homo sapiens
ctgcacgagtcccac

SEQ ID NO: 1186577 - DNA, 15 bp, Homo sapiens
cctgcacgagtccca

SEQ ID NO: 1186578 - DNA, 15 bp, Homo sapiens
ccctgcacgagtccc

SEQ ID NO: 1186579 - DNA, 15 bp, Homo sapiens
tccctgcacgagtcc

SEQ ID NO: 1186580 - DNA, 15 bp, Homo sapiens
ctccctgcacgagtc

SEQ ID NO: 1186581 - DNA, 15 bp, Homo sapiens
tctccctgcacgagt

SEQ ID NO: 1186582 - DNA, 15 bp, Homo sapiens
ctctccctgcacgag

SEQ ID NO: 1186583 - DNA, 15 bp, Homo sapiens
gctctccctgcacga

SEQ ID NO: 1186584 - DNA, 15 bp, Homo sapiens
agctctccctgcacg

SEQ ID NO: 1186585 - DNA, 15 bp, Homo sapiens
gagctctccctgcac

SEQ ID NO: 1186586 - DNA, 15 bp, Homo sapiens
ggagctctccctgca

SEQ ID NO: 1186587 - DNA, 15 bp, Homo sapiens
tggagctctccctgc

SEQ ID NO: 1186588 - DNA, 15 bp, Homo sapiens
ctggagctctccctg

SEQ ID NO: 1186589 - DNA, 15 bp, Homo sapiens
cctggagctctccct

SEQ ID NO: 1186590 - DNA, 15 bp, Homo sapiens
ccctggagctctccc

SEQ ID NO: 1186591 - DNA, 15 bp, Homo sapiens
accctggagctctcc

SEQ ID NO: 1186592 - DNA, 15 bp, Homo sapiens
caccctggagctctc

SEQ ID NO: 1186593 - DNA, 15 bp, Homo sapiens
tcaccctggagctct

SEQ ID NO: 1186594 - DNA, 15 bp, Homo sapiens
ttcaccctggagctc

SEQ ID NO: 1186595 - DNA, 15 bp, Homo sapiens
cttcaccctggagct

SEQ ID NO: 1186596 - DNA, 15 bp, Homo sapiens
acttcaccctggagc

SEQ ID NO: 1186597 - DNA, 15 bp, Homo sapiens
aacttcaccctggag

SEQ ID NO: 1186598 - DNA, 15 bp, Homo sapiens
gaacttcaccctgga

SEQ ID NO: 1186599 - DNA, 15 bp, Homo sapiens
agaacttcaccctgg

SEQ ID NO: 1186600 - DNA, 15 bp, Homo sapiens
gagaacttcaccctg

SEQ ID NO: 1186601 - DNA, 15 bp, Homo sapiens
agagaacttcaccct

SEQ ID NO: 1186602 - DNA, 15 bp, Homo sapiens
cagagaacttcaccc

SEQ ID NO: 1186603 - DNA, 15 bp, Homo sapiens
gcagagaacttcacc

SEQ ID NO: 1186604 - DNA, 15 bp, Homo sapiens
agcagagaacttcac

SEQ ID NO: 1186605 - DNA, 15 bp, Homo sapiens
gagcagagaacttca

SEQ ID NO: 1186606 - DNA, 15 bp, Homo sapiens
agagcagagaacttc

SEQ ID NO: 1186607 - DNA, 15 bp, Homo sapiens
cagagcagagaactt

SEQ ID NO: 1186608 - DNA, 15 bp, Homo sapiens
ccagagcagagaact

SEQ ID NO: 1186609 - DNA, 15 bp, Homo sapiens
tccagagcagagaac

SEQ ID NO: 1186610 - DNA, 15 bp, Homo sapiens
ctccagagcagagaa

SEQ ID NO: 1186611 - DNA, 15 bp, Homo sapiens
cctccagagcagaga

SEQ ID NO: 1186612 - DNA, 15 bp, Homo sapiens
tcctccagagcagag

SEQ ID NO: 1186613 - DNA, 15 bp, Homo sapiens
atcctccagagcaga

SEQ ID NO: 1186614 - DNA, 15 bp, Homo sapiens
gatcctccagagcag

SEQ ID NO: 1186615 - DNA, 15 bp, Homo sapiens
agatcctccagagca

SEQ ID NO: 1186616 - DNA, 15 bp, Homo sapiens
tagatcctccagagc

SEQ ID NO: 1186617 - DNA, 15 bp, Homo sapiens
gtagatcctccagag

SEQ ID NO: 1186618 - DNA, 15 bp, Homo sapiens
tgtagatcctccaga

SEQ ID NO: 1186619 - DNA, 15 bp, Homo sapiens
gtgtagatcctccag

SEQ ID NO: 1186620 - DNA, 15 bp, Homo sapiens
agtgtagatcctcca

SEQ ID NO: 1186621 - DNA, 15 bp, Homo sapiens
aagtgtagatcctcc

SEQ ID NO: 1186622 - DNA, 15 bp, Homo sapiens
aaagtgtagatcctc

SEQ ID NO: 1186623 - DNA, 15 bp, Homo sapiens
caaagtgtagatcct

SEQ ID NO: 1186624 - DNA, 15 bp, Homo sapiens
gcaaagtgtagatcc

SEQ ID NO: 1186625 - DNA, 15 bp, Homo sapiens
ggcaaagtgtagatc

SEQ ID NO: 1186626 - DNA, 15 bp, Homo sapiens
gggcaaagtgtagat

SEQ ID NO: 1186627 - DNA, 15 bp, Homo sapiens
tgggcaaagtgtaga

SEQ ID NO: 1186628 - DNA, 15 bp, Homo sapiens
atgggcaaagtgtag

SEQ ID NO: 1186629 - DNA, 15 bp, Homo sapiens
gatgggcaaagtgta

SEQ ID NO: 1186630 - DNA, 15 bp, Homo sapiens
tgatgggcaaagtgt

SEQ ID NO: 1186631 - DNA, 15 bp, Homo sapiens
ctgatgggcaaagtg

SEQ ID NO: 1186632 - DNA, 15 bp, Homo sapiens
actgatgggcaaagt

SEQ ID NO: 1186633 - DNA, 15 bp, Homo sapiens
cactgatgggcaaag

SEQ ID NO: 1186634 - DNA, 15 bp, Homo sapiens
acactgatgggcaaa

SEQ ID NO: 1186635 - DNA, 15 bp, Homo sapiens
gacactgatgggcaa

SEQ ID NO: 1186636 - DNA, 15 bp, Homo sapiens
agacactgatgggca

SEQ ID NO: 1186637 - DNA, 15 bp, Homo sapiens
tagacactgatgggc

SEQ ID NO: 1186638 - DNA, 15 bp, Homo sapiens
ctagacactgatggg

SEQ ID NO: 1186639 - DNA, 15 bp, Homo sapiens
actagacactgatgg

SEQ ID NO: 1186640 - DNA, 15 bp, Homo sapiens
cactagacactgatg

SEQ ID NO: 1186641 - DNA, 15 bp, Homo sapiens
gcactagacactgat

SEQ ID NO: 1186642 - DNA, 15 bp, Homo sapiens
tgcactagacactga

SEQ ID NO: 1186643 - DNA, 15 bp, Homo sapiens
ttgcactagacactg

SEQ ID NO: 1186644 - DNA, 15 bp, Homo sapiens
attgcactagacact

SEQ ID NO: 1186645 - DNA, 15 bp, Homo sapiens
cattgcactagacac

SEQ ID NO: 1186646 - DNA, 15 bp, Homo sapiens
acattgcactagaca

SEQ ID NO: 1186647 - DNA, 15 bp, Homo sapiens
gacattgcactagac

SEQ ID NO: 1186648 - DNA, 15 bp, Homo sapiens
cgacattgcactaga

SEQ ID NO: 1186649 - DNA, 15 bp, Homo sapiens
acgacattgcactag

SEQ ID NO: 1186650 - DNA, 15 bp, Homo sapiens
tacgacattgcacta

SEQ ID NO: 1186651 - DNA, 15 bp, Homo sapiens
atacgacattgcact

SEQ ID NO: 1186652 - DNA, 15 bp, Homo sapiens
gatacgacattgcac

SEQ ID NO: 1186653 - DNA, 15 bp, Homo sapiens
agatacgacattgca

SEQ ID NO: 1186654 - DNA, 15 bp, Homo sapiens
aagatacgacattgc

SEQ ID NO: 1186655 - DNA, 15 bp, Homo sapiens
gaagatacgacattg

SEQ ID NO: 1186656 - DNA, 15 bp, Homo sapiens
ggaagatacgacatt

SEQ ID NO: 1186657 - DNA, 15 bp, Homo sapiens
tggaagatacgacat

SEQ ID NO: 1186658 - DNA, 15 bp, Homo sapiens
ctggaagatacgaca

SEQ ID NO: 1186659 - DNA, 15 bp, Homo sapiens
cctggaagatacgac

SEQ ID NO: 1186660 - DNA, 15 bp, Homo sapiens
tcctggaagatacga

SEQ ID NO: 1186661 - DNA, 15 bp, Homo sapiens
gtcctggaagatacg

SEQ ID NO: 1186662 - DNA, 15 bp, Homo sapiens
tgtcctggaagatac

SEQ ID NO: 1186663 - DNA, 15 bp, Homo sapiens
atgtcctggaagata

SEQ ID NO: 1186664 - DNA, 15 bp, Homo sapiens
aatgtcctggaagat

SEQ ID NO: 1186665 - DNA, 15 bp, Homo sapiens
taatgtcctggaaga

SEQ ID NO: 1186666 - DNA, 15 bp, Homo sapiens
ttaatgtcctggaag

SEQ ID NO: 1186667 - DNA, 15 bp, Homo sapiens
attaatgtcctggaa

SEQ ID NO: 1186668 - DNA, 15 bp, Homo sapiens
aattaatgtcctgga

SEQ ID NO: 1186669 - DNA, 15 bp, Homo sapiens
aaattaatgtcctgg

SEQ ID NO: 1186670 - DNA, 15 bp, Homo sapiens
aaaattaatgtcctg

SEQ ID NO: 1186671 - DNA, 15 bp, Homo sapiens
taaaattaatgtcct

SEQ ID NO: 1186672 - DNA, 15 bp, Homo sapiens
ataaaattaatgtcc

SEQ ID NO: 1186673 - DNA, 15 bp, Homo sapiens
aataaaattaatgtc

SEQ ID NO: 1186674 - DNA, 15 bp, Homo sapiens
caataaaattaatgt

SEQ ID NO: 1186675 - DNA, 15 bp, Homo sapiens
acaataaaattaatg

SEQ ID NO: 1186676 - DNA, 15 bp, Homo sapiens
tacaataaaattaat

SEQ ID NO: 1186677 - DNA, 15 bp, Homo sapiens
ttacaataaaattaa

SEQ ID NO: 1186678 - DNA, 15 bp, Homo sapiens
tttacaataaaatta

SEQ ID NO: 1186679 - DNA, 15 bp, Homo sapiens
atttacaataaaatt

SEQ ID NO: 1186680 - DNA, 15 bp, Homo sapiens
tatttacaataaaat

SEQ ID NO: 1186681 - DNA, 15 bp, Homo sapiens
ctatttacaataaaa

SEQ ID NO: 1186682 - DNA, 15 bp, Homo sapiens
gctatttacaataaa

SEQ ID NO: 1186683 - DNA, 15 bp, Homo sapiens
ggctatttacaataa

SEQ ID NO: 1186684 - DNA, 15 bp, Homo sapiens
gggctatttacaata

SEQ ID NO: 1186685 - DNA, 15 bp, Homo sapiens
tgggctatttacaat

SEQ ID NO: 1186686 - DNA, 15 bp, Homo sapiens
ttgggctatttacaa

SEQ ID NO: 1186687 - DNA, 15 bp, Homo sapiens
gttgggctatttaca

SEQ ID NO: 1186688 - DNA, 15 bp, Homo sapiens
agttgggctatttac

SEQ ID NO: 1186689 - DNA, 15 bp, Homo sapiens
cagttgggctattta

SEQ ID NO: 1186690 - DNA, 15 bp, Homo sapiens
acagttgggctattt

SEQ ID NO: 1186691 - DNA, 15 bp, Homo sapiens
cacagttgggctatt

SEQ ID NO: 1186692 - DNA, 15 bp, Homo sapiens
ccacagttgggctat

SEQ ID NO: 1186693 - DNA, 15 bp, Homo sapiens
cccacagttgggcta

SEQ ID NO: 1186694 - DNA, 15 bp, Homo sapiens
acccacagttgggct

SEQ ID NO: 1186695 - DNA, 15 bp, Homo sapiens
aacccacagttgggc

SEQ ID NO: 1186696 - DNA, 15 bp, Homo sapiens
caacccacagttggg

SEQ ID NO: 1186697 - DNA, 15 bp, Homo sapiens
gcaacccacagttgg

SEQ ID NO: 1186698 - DNA, 15 bp, Homo sapiens
tgcaacccacagttg

SEQ ID NO: 1186699 - DNA, 15 bp, Homo sapiens
ctgcaacccacagtt

SEQ ID NO: 1186700 - DNA, 15 bp, Homo sapiens
cctgcaacccacagt

SEQ ID NO: 1186701 - DNA, 15 bp, Homo sapiens
tcctgcaacccacag

SEQ ID NO: 1186702 - DNA, 15 bp, Homo sapiens
ctcctgcaacccaca

SEQ ID NO: 1186703 - DNA, 15 bp, Homo sapiens
tctcctgcaacccac

SEQ ID NO: 1186704 - DNA, 15 bp, Homo sapiens
gtctcctgcaaccca

SEQ ID NO: 1186705 - DNA, 15 bp, Homo sapiens
ggtctcctgcaaccc

SEQ ID NO: 1186706 - DNA, 15 bp, Homo sapiens
aggtctcctgcaacc

SEQ ID NO: 1186707 - DNA, 15 bp, Homo sapiens
caggtctcctgcaac

SEQ ID NO: 1186708 - DNA, 15 bp, Homo sapiens
tcaggtctcctgcaa

SEQ ID NO: 1186709 - DNA, 15 bp, Homo sapiens
ctcaggtctcctgca

SEQ ID NO: 1186710 - DNA, 15 bp, Homo sapiens
tctcaggtctcctgc

SEQ ID NO: 1186711 - DNA, 15 bp, Homo sapiens
ttctcaggtctcctg

SEQ ID NO: 1186712 - DNA, 15 bp, Homo sapiens
gttctcaggtctcct

SEQ ID NO: 1186713 - DNA, 15 bp, Homo sapiens
tgttctcaggtctcc

SEQ ID NO: 1186714 - DNA, 15 bp, Homo sapiens
ttgttctcaggtctc

SEQ ID NO: 1186715 - DNA, 15 bp, Homo sapiens
tttgttctcaggtct

SEQ ID NO: 1186716 - DNA, 15 bp, Homo sapiens
gtttgttctcaggtc

SEQ ID NO: 1186717 - DNA, 15 bp, Homo sapiens
ggtttgttctcaggt

SEQ ID NO: 1186718 - DNA, 15 bp, Homo sapiens
tggtttgttctcagg

SEQ ID NO: 1186719 - DNA, 15 bp, Homo sapiens
ttggtttgttctcag

SEQ ID NO: 1186720 - DNA, 15 bp, Homo sapiens
gttggtttgttctca

SEQ ID NO: 1186721 - DNA, 15 bp, Homo sapiens
tgttggtttgttctc

SEQ ID NO: 1186722 - DNA, 15 bp, Homo sapiens
ttgttggtttgttct

SEQ ID NO: 1186723 - DNA, 15 bp, Homo sapiens
cttgttggtttgttc

SEQ ID NO: 1186724 - DNA, 15 bp, Homo sapiens
tcttgttggtttgtt

SEQ ID NO: 1186725 - DNA, 15 bp, Homo sapiens
atcttgttggtttgt

SEQ ID NO: 1186726 - DNA, 15 bp, Homo sapiens
catcttgttggtttg

SEQ ID NO: 1186727 - DNA, 15 bp, Homo sapiens
tcatcttgttggttt

SEQ ID NO: 1186728 - DNA, 15 bp, Homo sapiens
gtcatcttgttggtt

SEQ ID NO: 1186729 - DNA, 15 bp, Homo sapiens
tgtcatcttgttggt

SEQ ID NO: 1186730 - DNA, 15 bp, Homo sapiens
atgtcatcttgttgg

SEQ ID NO: 1186731 - DNA, 15 bp, Homo sapiens
catgtcatcttgttg

SEQ ID NO: 1186732 - DNA, 15 bp, Homo sapiens
acatgtcatcttgtt

SEQ ID NO: 1186733 - DNA, 15 bp, Homo sapiens
cacatgtcatcttgt

SEQ ID NO: 1186734 - DNA, 15 bp, Homo sapiens
gcacatgtcatcttg

SEQ ID NO: 1186735 - DNA, 15 bp, Homo sapiens
ggcacatgtcatctt

SEQ ID NO: 1186736 - DNA, 15 bp, Homo sapiens
aggcacatgtcatct

SEQ ID NO: 1186737 - DNA, 15 bp, Homo sapiens
caggcacatgtcatc

SEQ ID NO: 1186738 - DNA, 15 bp, Homo sapiens
ccaggcacatgtcat

SEQ ID NO: 1186739 - DNA, 15 bp, Homo sapiens
cccaggcacatgtca

SEQ ID NO: 1186740 - DNA, 15 bp, Homo sapiens
tcccaggcacatgtc

SEQ ID NO: 1186741 - DNA, 15 bp, Homo sapiens
ttcccaggcacatgt

SEQ ID NO: 1186742 - DNA, 15 bp, Homo sapiens
attcccaggcacatg

SEQ ID NO: 1186743 - DNA, 15 bp, Homo sapiens
cattcccaggcacat

SEQ ID NO: 1186744 - DNA, 15 bp, Homo sapiens
tcattcccaggcaca

SEQ ID NO: 1186745 - DNA, 15 bp, Homo sapiens
gtcattcccaggcac

SEQ ID NO: 1186746 - DNA, 15 bp, Homo sapiens
ggtcattcccaggca

SEQ ID NO: 1186747 - DNA, 15 bp, Homo sapiens
aggtcattcccaggc

SEQ ID NO: 1186748 - DNA, 15 bp, Homo sapiens
caggtcattcccagg

SEQ ID NO: 1186749 - DNA, 15 bp, Homo sapiens
acaggtcattcccag

SEQ ID NO: 1186750 - DNA, 15 bp, Homo sapiens
gacaggtcattccca

SEQ ID NO: 1186751 - DNA, 15 bp, Homo sapiens
ggacaggtcattccc

SEQ ID NO: 1186752 - DNA, 15 bp, Homo sapiens
gggacaggtcattcc

SEQ ID NO: 1186753 - DNA, 15 bp, Homo sapiens
tgggacaggtcattc

SEQ ID NO: 1186754 - DNA, 15 bp, Homo sapiens
gtgggacaggtcatt

SEQ ID NO: 1186755 - DNA, 15 bp, Homo sapiens
tgtgggacaggtcat

SEQ ID NO: 1186756 - DNA, 15 bp, Homo sapiens
atgtgggacaggtca

SEQ ID NO: 1186757 - DNA, 15 bp, Homo sapiens
aatgtgggacaggtc

SEQ ID NO: 1186758 - DNA, 15 bp, Homo sapiens
gaatgtgggacaggt

SEQ ID NO: 1186759 - DNA, 15 bp, Homo sapiens
tgaatgtgggacagg

SEQ ID NO: 1186760 - DNA, 15 bp, Homo sapiens
gtgaatgtgggacag

SEQ ID NO: 1186761 - DNA, 15 bp, Homo sapiens
cgtgaatgtgggaca

SEQ ID NO: 1186762 - DNA, 15 bp, Homo sapiens
ccgtgaatgtgggac

SEQ ID NO: 1186763 - DNA, 15 bp, Homo sapiens
gccgtgaatgtggga

SEQ ID NO: 1186764 - DNA, 15 bp, Homo sapiens
tgccgtgaatgtggg

SEQ ID NO: 1186765 - DNA, 15 bp, Homo sapiens
ctgccgtgaatgtgg

SEQ ID NO: 1186766 - DNA, 15 bp, Homo sapiens
cctgccgtgaatgtg

SEQ ID NO: 1186767 - DNA, 15 bp, Homo sapiens
ccctgccgtgaatgt

SEQ ID NO: 1186768 - DNA, 15 bp, Homo sapiens
gccctgccgtgaatg

SEQ ID NO: 1186769 - DNA, 15 bp, Homo sapiens
ggccctgccgtgaat

SEQ ID NO: 1186770 - DNA, 15 bp, Homo sapiens
aggccctgccgtgaa

SEQ ID NO: 1186771 - DNA, 15 bp, Homo sapiens
caggccctgccgtga

SEQ ID NO: 1186772 - DNA, 15 bp, Homo sapiens
ccaggccctgccgtg

SEQ ID NO: 1186773 - DNA, 15 bp, Homo sapiens
cccaggccctgccgt

SEQ ID NO: 1186774 - DNA, 15 bp, Homo sapiens
gcccaggccctgccg

SEQ ID NO: 1186775 - DNA, 15 bp, Homo sapiens
ggcccaggccctgcc

SEQ ID NO: 1186776 - DNA, 15 bp, Homo sapiens
tggcccaggccctgc

SEQ ID NO: 1186777 - DNA, 15 bp, Homo sapiens
ctggcccaggccctg

SEQ ID NO: 1186778 - DNA, 15 bp, Homo sapiens
tctggcccaggccct

SEQ ID NO: 1186779 - DNA, 15 bp, Homo sapiens
ctctggcccaggccc

SEQ ID NO: 1186780 - DNA, 15 bp, Homo sapiens
tctctggcccaggcc

SEQ ID NO: 1186781 - DNA, 15 bp, Homo sapiens
ttctctggcccaggc

SEQ ID NO: 1186782 - DNA, 15 bp, Homo sapiens
cttctctggcccagg

SEQ ID NO: 1186783 - DNA, 15 bp, Homo sapiens
tcttctctggcccag

SEQ ID NO: 1186784 - DNA, 15 bp, Homo sapiens
ctcttctctggccca

SEQ ID NO: 1186785 - DNA, 15 bp, Homo sapiens
tctcttctctggccc

SEQ ID NO: 1186786 - DNA, 15 bp, Homo sapiens
ctctcttctctggcc

SEQ ID NO: 1186787 - DNA, 15 bp, Homo sapiens
cctctcttctctggc

SEQ ID NO: 1186788 - DNA, 15 bp, Homo sapiens
tcctctcttctctgg

SEQ ID NO: 1186789 - DNA, 15 bp, Homo sapiens
gtcctctcttctctg

SEQ ID NO: 1186790 - DNA, 15 bp, Homo sapiens
agtcctctcttctct

SEQ ID NO: 1186791 - DNA, 15 bp, Homo sapiens
gagtcctctcttctc

SEQ ID NO: 1186792 - DNA, 15 bp, Homo sapiens
agagtcctctcttct

SEQ ID NO: 1186793 - DNA, 15 bp, Homo sapiens
cagagtcctctcttc

SEQ ID NO: 1186794 - DNA, 15 bp, Homo sapiens
tcagagtcctctctt

SEQ ID NO: 1186795 - DNA, 15 bp, Homo sapiens
ttcagagtcctctct

SEQ ID NO: 1186796 - DNA, 15 bp, Homo sapiens
cttcagagtcctctc

SEQ ID NO: 1186797 - DNA, 15 bp, Homo sapiens
acttcagagtcctct

SEQ ID NO: 1186798 - DNA, 15 bp, Homo sapiens
tacttcagagtcctc

SEQ ID NO: 1186799 - DNA, 15 bp, Homo sapiens
ctacttcagagtcct

SEQ ID NO: 1186800 - DNA, 15 bp, Homo sapiens
gctacttcagagtcc

SEQ ID NO: 1186801 - DNA, 15 bp, Homo sapiens
agctacttcagagtc

SEQ ID NO: 1186802 - DNA, 15 bp, Homo sapiens
tagctacttcagagt

SEQ ID NO: 1186803 - DNA, 15 bp, Homo sapiens
ctagctacttcagag

SEQ ID NO: 1186804 - DNA, 15 bp, Homo sapiens
cctagctacttcaga

SEQ ID NO: 1186805 - DNA, 15 bp, Homo sapiens
tcctagctacttcag

SEQ ID NO: 1186806 - DNA, 15 bp, Homo sapiens
gtcctagctacttca

SEQ ID NO: 1186807 - DNA, 15 bp, Homo sapiens
ggtcctagctacttc

SEQ ID NO: 1186808 - DNA, 15 bp, Homo sapiens
gggtcctagctactt

SEQ ID NO: 1186809 - DNA, 15 bp, Homo sapiens
tgggtcctagctact

SEQ ID NO: 1186810 - DNA, 15 bp, Homo sapiens
ctgggtcctagctac

SEQ ID NO: 1186811 - DNA, 15 bp, Homo sapiens
cctgggtcctagcta

SEQ ID NO: 1186812 - DNA, 15 bp, Homo sapiens
acctgggtcctagct

SEQ ID NO: 1186813 - DNA, 15 bp, Homo sapiens
cacctgggtcctagc

SEQ ID NO: 1186814 - DNA, 15 bp, Homo sapiens
gcacctgggtcctag

SEQ ID NO: 1186815 - DNA, 15 bp, Homo sapiens
tgcacctgggtccta

SEQ ID NO: 1186816 - DNA, 15 bp, Homo sapiens
atgcacctgggtcct

SEQ ID NO: 1186817 - DNA, 15 bp, Homo sapiens
catgcacctgggtcc

SEQ ID NO: 1186818 - DNA, 15 bp, Homo sapiens
ccatgcacctgggtc

SEQ ID NO: 1186819 - DNA, 15 bp, Homo sapiens
cccatgcacctgggt

SEQ ID NO: 1186820 - DNA, 15 bp, Homo sapiens
ccccatgcacctggg

SEQ ID NO: 1186821 - DNA, 15 bp, Homo sapiens
cccccatgcacctgg

SEQ ID NO: 1186822 - DNA, 15 bp, Homo sapiens
ccccccatgcacctg

SEQ ID NO: 1186823 - DNA, 15 bp, Homo sapiens
cccccccatgcacct

SEQ ID NO: 1186824 - DNA, 15 bp, Homo sapiens
ccccccccatgcacc

SEQ ID NO: 1186825 - DNA, 15 bp, Homo sapiens
cccccccccatgcac

SEQ ID NO: 1186826 - DNA, 15 bp, Homo sapiens
gcccccccccatgca

SEQ ID NO: 1186827 - DNA, 15 bp, Homo sapiens
ggcccccccccatgc

SEQ ID NO: 1186828 - DNA, 15 bp, Homo sapiens
aggcccccccccatg

SEQ ID NO: 1186829 - DNA, 15 bp, Homo sapiens
caggcccccccccat

SEQ ID NO: 1186830 - DNA, 15 bp, Homo sapiens
ccaggccccccccca

SEQ ID NO: 1186831 - DNA, 15 bp, Homo sapiens
cccaggccccccccc

SEQ ID NO: 1186832 - DNA, 15 bp, Homo sapiens
ccccaggcccccccc

SEQ ID NO: 1186833 - DNA, 15 bp, Homo sapiens
cccccaggccccccc

SEQ ID NO: 1186834 - DNA, 15 bp, Homo sapiens
tcccccaggcccccc

SEQ ID NO: 1186835 - DNA, 15 bp, Homo sapiens
ctcccccaggccccc

SEQ ID NO: 1186836 - DNA, 15 bp, Homo sapiens
cctcccccaggcccc

SEQ ID NO: 1186837 - DNA, 15 bp, Homo sapiens
ccctcccccaggccc

SEQ ID NO: 1186838 - DNA, 15 bp, Homo sapiens
cccctcccccaggcc

SEQ ID NO: 1186839 - DNA, 15 bp, Homo sapiens
tcccctcccccaggc

SEQ ID NO: 1186840 - DNA, 15 bp, Homo sapiens
ctcccctcccccagg

SEQ ID NO: 1186841 - DNA, 15 bp, Homo sapiens
tctcccctcccccag

SEQ ID NO: 1186842 - DNA, 15 bp, Homo sapiens
ttctcccctccccca

SEQ ID NO: 1186843 - DNA, 15 bp, Homo sapiens
tttctcccctccccc

SEQ ID NO: 1186844 - DNA, 15 bp, Homo sapiens
ctttctcccctcccc

SEQ ID NO: 1186845 - DNA, 15 bp, Homo sapiens
gctttctcccctccc

SEQ ID NO: 1186846 - DNA, 15 bp, Homo sapiens
tgctttctcccctcc

SEQ ID NO: 1186847 - DNA, 15 bp, Homo sapiens
ctgctttctcccctc

SEQ ID NO: 1186848 - DNA, 15 bp, Homo sapiens
gctgctttctcccct

SEQ ID NO: 1186849 - DNA, 15 bp, Homo sapiens
ggctgctttctcccc

SEQ ID NO: 1186850 - DNA, 15 bp, Homo sapiens
aggctgctttctccc

SEQ ID NO: 1186851 - DNA, 15 bp, Homo sapiens
caggctgctttctcc

SEQ ID NO: 1186852 - DNA, 15 bp, Homo sapiens
tcaggctgctttctc

SEQ ID NO: 1186853 - DNA, 15 bp, Homo sapiens
ttcaggctgctttct

SEQ ID NO: 1186854 - DNA, 15 bp, Homo sapiens
attcaggctgctttc

SEQ ID NO: 1186855 - DNA, 15 bp, Homo sapiens
cattcaggctgcttt

SEQ ID NO: 1186856 - DNA, 15 bp, Homo sapiens
acattcaggctgctt

SEQ ID NO: 1186857 - DNA, 15 bp, Homo sapiens
tacattcaggctgct

SEQ ID NO: 1186858 - DNA, 15 bp, Homo sapiens
ttacattcaggctgc

SEQ ID NO: 1186859 - DNA, 15 bp, Homo sapiens
tttacattcaggctg

SEQ ID NO: 1186860 - DNA, 15 bp, Homo sapiens
ttttacattcaggct

SEQ ID NO: 1186861 - DNA, 15 bp, Homo sapiens
gttttacattcaggc

SEQ ID NO: 1186862 - DNA, 15 bp, Homo sapiens
ggttttacattcagg

SEQ ID NO: 1186863 - DNA, 15 bp, Homo sapiens
aggttttacattcag

SEQ ID NO: 1186864 - DNA, 15 bp, Homo sapiens
aaggttttacattca

SEQ ID NO: 1186865 - DNA, 15 bp, Homo sapiens
taaggttttacattc

SEQ ID NO: 1186866 - DNA, 15 bp, Homo sapiens
ttaaggttttacatt

SEQ ID NO: 1186867 - DNA, 15 bp, Homo sapiens
tttaaggttttacat

SEQ ID NO: 1186868 - DNA, 15 bp, Homo sapiens
ttttaaggttttaca

SEQ ID NO: 1186869 - DNA, 15 bp, Homo sapiens
gttttaaggttttac

SEQ ID NO: 1186870 - DNA, 15 bp, Homo sapiens
tgttttaaggtttta

SEQ ID NO: 1186871 - DNA, 15 bp, Homo sapiens
ctgttttaaggtttt

SEQ ID NO: 1186872 - DNA, 15 bp, Homo sapiens
tctgttttaaggttt

SEQ ID NO: 1186873 - DNA, 15 bp, Homo sapiens
gtctgttttaaggtt

SEQ ID NO: 1186874 - DNA, 15 bp, Homo sapiens
tgtctgttttaaggt

SEQ ID NO: 1186875 - DNA, 15 bp, Homo sapiens
gtgtctgttttaagg

SEQ ID NO: 1186876 - DNA, 15 bp, Homo sapiens
tgtgtctgttttaag

SEQ ID NO: 1186877 - DNA, 15 bp, Homo sapiens
atgtgtctgttttaa

SEQ ID NO: 1186878 - DNA, 15 bp, Homo sapiens
aatgtgtctgtttta

SEQ ID NO: 1186879 - DNA, 15 bp, Homo sapiens
gaatgtgtctgtttt

SEQ ID NO: 1186880 - DNA, 15 bp, Homo sapiens
tgaatgtgtctgttt

SEQ ID NO: 1186881 - DNA, 15 bp, Homo sapiens
ctgaatgtgtctgtt

SEQ ID NO: 1186882 - DNA, 15 bp, Homo sapiens
tctgaatgtgtctgt

SEQ ID NO: 1186883 - DNA, 15 bp, Homo sapiens
ctctgaatgtgtctg

SEQ ID NO: 1186884 - DNA, 15 bp, Homo sapiens
cctctgaatgtgtct

SEQ ID NO: 1186885 - DNA, 15 bp, Homo sapiens
ccctctgaatgtgtc

SEQ ID NO: 1186886 - DNA, 15 bp, Homo sapiens
accctctgaatgtgt

SEQ ID NO: 1186887 - DNA, 15 bp, Homo sapiens
caccctctgaatgtg

SEQ ID NO: 1186888 - DNA, 15 bp, Homo sapiens
ccaccctctgaatgt

SEQ ID NO: 1186889 - DNA, 15 bp, Homo sapiens
cccaccctctgaatg

SEQ ID NO: 1186890 - DNA, 15 bp, Homo sapiens
tcccaccctctgaat

SEQ ID NO: 1186891 - DNA, 15 bp, Homo sapiens
ttcccaccctctgaa

SEQ ID NO: 1186892 - DNA, 15 bp, Homo sapiens
cttcccaccctctga

SEQ ID NO: 1186893 - DNA, 15 bp, Homo sapiens
tcttcccaccctctg

SEQ ID NO: 1186894 - DNA, 15 bp, Homo sapiens
ctcttcccaccctct

SEQ ID NO: 1186895 - DNA, 15 bp, Homo sapiens
cctcttcccaccctc

SEQ ID NO: 1186896 - DNA, 15 bp, Homo sapiens
tcctcttcccaccct

SEQ ID NO: 1186897 - DNA, 15 bp, Homo sapiens
gtcctcttcccaccc

SEQ ID NO: 1186898 - DNA, 15 bp, Homo sapiens
tgtcctcttcccacc

SEQ ID NO: 1186899 - DNA, 15 bp, Homo sapiens
ctgtcctcttcccac

SEQ ID NO: 1186900 - DNA, 15 bp, Homo sapiens
gctgtcctcttccca

SEQ ID NO: 1186901 - DNA, 15 bp, Homo sapiens
tgctgtcctcttccc

SEQ ID NO: 1186902 - DNA, 15 bp, Homo sapiens
ttgctgtcctcttcc

SEQ ID NO: 1186903 - DNA, 15 bp, Homo sapiens
gttgctgtcctcttc

SEQ ID NO: 1186904 - DNA, 15 bp, Homo sapiens
ggttgctgtcctctt

SEQ ID NO: 1186905 - DNA, 15 bp, Homo sapiens
tggttgctgtcctct

SEQ ID NO: 1186906 - DNA, 15 bp, Homo sapiens
ttggttgctgtcctc

SEQ ID NO: 1186907 - DNA, 15 bp, Homo sapiens
gttggttgctgtcct

SEQ ID NO: 1186908 - DNA, 15 bp, Homo sapiens
tgttggttgctgtcc

SEQ ID NO: 1186909 - DNA, 15 bp, Homo sapiens
ctgttggttgctgtc

SEQ ID NO: 1186910 - DNA, 15 bp, Homo sapiens
tctgttggttgctgt

SEQ ID NO: 1186911 - DNA, 15 bp, Homo sapiens
ctctgttggttgctg

SEQ ID NO: 1186912 - DNA, 15 bp, Homo sapiens
cctctgttggttgct

SEQ ID NO: 1186913 - DNA, 15 bp, Homo sapiens
tcctctgttggttgc

SEQ ID NO: 1186914 - DNA, 15 bp, Homo sapiens
ctcctctgttggttg

SEQ ID NO: 1186915 - DNA, 15 bp, Homo sapiens
cctcctctgttggtt

SEQ ID NO: 1186916 - DNA, 15 bp, Homo sapiens
gcctcctctgttggt

SEQ ID NO: 1186917 - DNA, 15 bp, Homo sapiens
tgcctcctctgttgg

SEQ ID NO: 1186918 - DNA, 15 bp, Homo sapiens
ctgcctcctctgttg

SEQ ID NO: 1186919 - DNA, 15 bp, Homo sapiens
tctgcctcctctgtt

SEQ ID NO: 1186920 - DNA, 15 bp, Homo sapiens
cctctgcctcctctg

SEQ ID NO: 1186921 - DNA, 15 bp, Homo sapiens
ccctctgcctcctct

SEQ ID NO: 1186922 - DNA, 15 bp, Homo sapiens
accctctgcctcctc

SEQ ID NO: 1186923 - DNA, 15 bp, Homo sapiens
caccctctgcctcct

SEQ ID NO: 1186924 - DNA, 15 bp, Homo sapiens
tcaccctctgcctcc

SEQ ID NO: 1186925 - DNA, 15 bp, Homo sapiens
atcaccctctgcctc

SEQ ID NO: 1186926 - DNA, 15 bp, Homo sapiens
gatcaccctctgcct

SEQ ID NO: 1186927 - DNA, 15 bp, Homo sapiens
tgatcaccctctgcc

SEQ ID NO: 1186928 - DNA, 15 bp, Homo sapiens
ctgatcaccctctgc

SEQ ID NO: 1186929 - DNA, 15 bp, Homo sapiens
cctgatcaccctctg

SEQ ID NO: 1186930 - DNA, 15 bp, Homo sapiens
ccctgatcaccctct

SEQ ID NO: 1186931 - DNA, 15 bp, Homo sapiens
tccctgatcaccctc

SEQ ID NO: 1186932 - DNA, 15 bp, Homo sapiens
ctccctgatcaccct

SEQ ID NO: 1186933 - DNA, 15 bp, Homo sapiens
cctccctgatcaccc

SEQ ID NO: 1186934 - DNA, 15 bp, Homo sapiens
acctccctgatcacc

SEQ ID NO: 1186935 - DNA, 15 bp, Homo sapiens
tacctccctgatcac

SEQ ID NO: 1186936 - DNA, 15 bp, Homo sapiens
ctacctccctgatca

SEQ ID NO: 1186937 - DNA, 15 bp, Homo sapiens
tctacctccctgatc

SEQ ID NO: 1186938 - DNA, 15 bp, Homo sapiens
ttctacctccctgat

SEQ ID NO: 1186939 - DNA, 15 bp, Homo sapiens
tttctacctccctga

SEQ ID NO: 1186940 - DNA, 15 bp, Homo sapiens
ctttctacctccctg

SEQ ID NO: 1186941 - DNA, 15 bp, Homo sapiens
tctttctacctccct

SEQ ID NO: 1186942 - DNA, 15 bp, Homo sapiens
ctctttctacctccc

SEQ ID NO: 1186943 - DNA, 15 bp, Homo sapiens
ttctctttctacctc

SEQ ID NO: 1186944 - DNA, 15 bp, Homo sapiens
cttctctttctacct

SEQ ID NO: 1186945 - DNA, 15 bp, Homo sapiens
gcttctctttctacc

SEQ ID NO: 1186946 - DNA, 15 bp, Homo sapiens
tgcttctctttctac

SEQ ID NO: 1186947 - DNA, 15 bp, Homo sapiens
ctgcttctctttcta

SEQ ID NO: 1186948 - DNA, 15 bp, Homo sapiens
cctgcttctctttct

SEQ ID NO: 1186949 - DNA, 15 bp, Homo sapiens
tcctgcttctctttc

SEQ ID NO: 1186950 - DNA, 15 bp, Homo sapiens
atcctgcttctcttt

SEQ ID NO: 1186951 - DNA, 15 bp, Homo sapiens
aatcctgcttctctt

SEQ ID NO: 1186952 - DNA, 15 bp, Homo sapiens
caatcctgcttctct

SEQ ID NO: 1186953 - DNA, 15 bp, Homo sapiens
ccaatcctgcttctc

SEQ ID NO: 1186954 - DNA, 15 bp, Homo sapiens
cccaatcctgcttct

SEQ ID NO: 1186955 - DNA, 15 bp, Homo sapiens
gcccaatcctgcttc

SEQ ID NO: 1186956 - DNA, 15 bp, Homo sapiens
tgcccaatcctgctt

SEQ ID NO: 1186957 - DNA, 15 bp, Homo sapiens
ctgcccaatcctgct

SEQ ID NO: 1186958 - DNA, 15 bp, Homo sapiens
gctgcccaatcctgc

SEQ ID NO: 1186959 - DNA, 15 bp, Homo sapiens
tgctgcccaatcctg

SEQ ID NO: 1186960 - DNA, 15 bp, Homo sapiens
atgctgcccaatcct

SEQ ID NO: 1186961 - DNA, 15 bp, Homo sapiens
gatgctgcccaatcc

SEQ ID NO: 1186962 - DNA, 15 bp, Homo sapiens
tgatgctgcccaatc

SEQ ID NO: 1186963 - DNA, 15 bp, Homo sapiens
ctgatgctgcccaat

SEQ ID NO: 1186964 - DNA, 15 bp, Homo sapiens
tctgatgctgcccaa

SEQ ID NO: 1186965 - DNA, 15 bp, Homo sapiens
ctctgatgctgccca

SEQ ID NO: 1186966 - DNA, 15 bp, Homo sapiens
tctctgatgctgccc

SEQ ID NO: 1186967 - DNA, 15 bp, Homo sapiens
ctctctgatgctgcc

SEQ ID NO: 1186968 - DNA, 15 bp, Homo sapiens
cctctctgatgctgc

SEQ ID NO: 1186969 - DNA, 15 bp, Homo sapiens
tcctctctgatgctg

SEQ ID NO: 1186970 - DNA, 15 bp, Homo sapiens
atcctctctgatgct

SEQ ID NO: 1186971 - DNA, 15 bp, Homo sapiens
catcctctctgatgc

SEQ ID NO: 1186972 - DNA, 15 bp, Homo sapiens
tcatcctctctgatg

SEQ ID NO: 1186973 - DNA, 15 bp, Homo sapiens
ctcatcctctctgat

SEQ ID NO: 1186974 - DNA, 15 bp, Homo sapiens
cctcatcctctctga

SEQ ID NO: 1186975 - DNA, 15 bp, Homo sapiens
tcctcatcctctctg

SEQ ID NO: 1186976 - DNA, 15 bp, Homo sapiens
ttcctcatcctctct

SEQ ID NO: 1186977 - DNA, 15 bp, Homo sapiens
cttcctcatcctctc

SEQ ID NO: 1186978 - DNA, 15 bp, Homo sapiens
ccttcctcatcctct

SEQ ID NO: 1186979 - DNA, 15 bp, Homo sapiens
tccttcctcatcctc

SEQ ID NO: 1186980 - DNA, 15 bp, Homo sapiens
ctccttcctcatcct

SEQ ID NO: 1186981 - DNA, 15 bp, Homo sapiens
tctccttcctcatcc

SEQ ID NO: 1186982 - DNA, 15 bp, Homo sapiens
ctctccttcctcatc

SEQ ID NO: 1186983 - DNA, 15 bp, Homo sapiens
tctctccttcctcat

SEQ ID NO: 1186984 - DNA, 15 bp, Homo sapiens
ctctctccttcctca

SEQ ID NO: 1186985 - DNA, 15 bp, Homo sapiens
actctctccttcctc

SEQ ID NO: 1186986 - DNA, 15 bp, Homo sapiens
aactctctccttcct

SEQ ID NO: 1186987 - DNA, 15 bp, Homo sapiens
gaaactctctccttc

SEQ ID NO: 1186988 - DNA, 15 bp, Homo sapiens
tgaaactctctcctt

SEQ ID NO: 1186989 - DNA, 15 bp, Homo sapiens
ttgaaactctctcct

SEQ ID NO: 1186990 - DNA, 15 bp, Homo sapiens
cttgaaactctctcc

SEQ ID NO: 1186991 - DNA, 15 bp, Homo sapiens
ccttgaaactctctc

SEQ ID NO: 1186992 - DNA, 15 bp, Homo sapiens
tccttgaaactctct

SEQ ID NO: 1186993 - DNA, 15 bp, Homo sapiens
ttccttgaaactctc

SEQ ID NO: 1186994 - DNA, 15 bp, Homo sapiens
cttccttgaaactct

SEQ ID NO: 1186995 - DNA, 15 bp, Homo sapiens
acttccttgaaactc

SEQ ID NO: 1186996 - DNA, 15 bp, Homo sapiens
cacttccttgaaact

SEQ ID NO: 1186997 - DNA, 15 bp, Homo sapiens
acacttccttgaaac

SEQ ID NO: 1186998 - DNA, 15 bp, Homo sapiens
gacacttccttgaaa

SEQ ID NO: 1186999 - DNA, 15 bp, Homo sapiens
tgacacttccttgaa

SEQ ID NO: 1187000 - DNA, 15 bp, Homo sapiens
atgacacttccttga

SEQ ID NO: 1187001 - DNA, 15 bp, Homo sapiens
tatgacacttccttg

SEQ ID NO: 1187002 - DNA, 15 bp, Homo sapiens
ttatgacacttcctt

SEQ ID NO: 1187003 - DNA, 15 bp, Homo sapiens
tttatgacacttcct

SEQ ID NO: 1187004 - DNA, 15 bp, Homo sapiens
gtttatgacacttcc

SEQ ID NO: 1187005 - DNA, 15 bp, Homo sapiens
tgtttatgacacttc

SEQ ID NO: 1187006 - DNA, 15 bp, Homo sapiens
gtgtttatgacactt

SEQ ID NO: 1187007 - DNA, 15 bp, Homo sapiens
agtgtttatgacact

SEQ ID NO: 1187008 - DNA, 15 bp, Homo sapiens
aagtgtttatgacac

SEQ ID NO: 1187009 - DNA, 15 bp, Homo sapiens
gaagtgtttatgaca

SEQ ID NO: 1187010 - DNA, 15 bp, Homo sapiens
tgaagtgtttatgac

SEQ ID NO: 1187011 - DNA, 15 bp, Homo sapiens
ttgaagtgtttatga

SEQ ID NO: 1187012 - DNA, 15 bp, Homo sapiens
attgaagtgtttatg

SEQ ID NO: 1187013 - DNA, 15 bp, Homo sapiens
tattgaagtgtttat

SEQ ID NO: 1187014 - DNA, 15 bp, Homo sapiens
atattgaagtgttta

SEQ ID NO: 1187015 - DNA, 15 bp, Homo sapiens
aatattgaagtgttt

SEQ ID NO: 1187016 - DNA, 15 bp, Homo sapiens
caatattgaagtgtt

SEQ ID NO: 1187017 - DNA, 15 bp, Homo sapiens
gcaatattgaagtgt

SEQ ID NO: 1187018 - DNA, 15 bp, Homo sapiens
tgcaatattgaagtg

SEQ ID NO: 1187019 - DNA, 15 bp, Homo sapiens
ctgcaatattgaagt

SEQ ID NO: 1187020 - DNA, 15 bp, Homo sapiens
cctgcaatattgaag

SEQ ID NO: 1187021 - DNA, 15 bp, Homo sapiens
ccctgcaatattgaa

SEQ ID NO: 1187022 - DNA, 15 bp, Homo sapiens
cccctgcaatattga

SEQ ID NO: 1187023 - DNA, 15 bp, Homo sapiens
acccctgcaatattg

SEQ ID NO: 1187024 - DNA, 15 bp, Homo sapiens
aacccctgcaatatt

SEQ ID NO: 1187025 - DNA, 15 bp, Homo sapiens
taacccctgcaatat

SEQ ID NO: 1187026 - DNA, 15 bp, Homo sapiens
ttaacccctgcaata

SEQ ID NO: 1187027 - DNA, 15 bp, Homo sapiens
tttaacccctgcaat

SEQ ID NO: 1187028 - DNA, 15 bp, Homo sapiens
ctttaacccctgcaa

SEQ ID NO: 1187029 - DNA, 15 bp, Homo sapiens
cctttaacccctgca

SEQ ID NO: 1187030 - DNA, 15 bp, Homo sapiens
tcctttaacccctgc

SEQ ID NO: 1187031 - DNA, 15 bp, Homo sapiens
ctcctttaacccctg

SEQ ID NO: 1187032 - DNA, 15 bp, Homo sapiens
cctcctttaacccct

SEQ ID NO: 1187033 - DNA, 15 bp, Homo sapiens
acctcctttaacccc

SEQ ID NO: 1187034 - DNA, 15 bp, Homo sapiens
cacctcctttaaccc

SEQ ID NO: 1187035 - DNA, 15 bp, Homo sapiens
tcacctcctttaacc

SEQ ID NO: 1187036 - DNA, 15 bp, Homo sapiens
ttcacctcctttaac

SEQ ID NO: 1187037 - DNA, 15 bp, Homo sapiens
cttcacctcctttaa

SEQ ID NO: 1187038 - DNA, 15 bp, Homo sapiens
gcttcacctccttta

SEQ ID NO: 1187039 - DNA, 15 bp, Homo sapiens
tgcttcacctccttt

SEQ ID NO: 1187040 - DNA, 15 bp, Homo sapiens
atgcttcacctcctt

SEQ ID NO: 1187041 - DNA, 15 bp, Homo sapiens
tatgcttcacctcct

SEQ ID NO: 1187042 - DNA, 15 bp, Homo sapiens
ttatgcttcacctcc

SEQ ID NO: 1187043 - DNA, 15 bp, Homo sapiens
tttatgcttcacctc

SEQ ID NO: 1187044 - DNA, 15 bp, Homo sapiens
ctttatgcttcacct

SEQ ID NO: 1187045 - DNA, 15 bp, Homo sapiens
cctttatgcttcacc

SEQ ID NO: 1187046 - DNA, 15 bp, Homo sapiens
ccctttatgcttcac

SEQ ID NO: 1187047 - DNA, 15 bp, Homo sapiens
tccctttatgcttca

SEQ ID NO: 1187048 - DNA, 15 bp, Homo sapiens
ctccctttatgcttc

SEQ ID NO: 1187049 - DNA, 15 bp, Homo sapiens
tctccctttatgctt

SEQ ID NO: 1187050 - DNA, 15 bp, Homo sapiens
ttctccctttatgct

SEQ ID NO: 1187051 - DNA, 15 bp, Homo sapiens
cttctccctttatgc

SEQ ID NO: 1187052 - DNA, 15 bp, Homo sapiens
ccttctccctttatg

SEQ ID NO: 1187053 - DNA, 15 bp, Homo sapiens
gccttctccctttat

SEQ ID NO: 1187054 - DNA, 15 bp, Homo sapiens
ggccttctcccttta

SEQ ID NO: 1187055 - DNA, 15 bp, Homo sapiens
tggccttctcccttt

SEQ ID NO: 1187056 - DNA, 15 bp, Homo sapiens
atggccttctccctt

SEQ ID NO: 1187057 - DNA, 15 bp, Homo sapiens
aatggccttctccct

SEQ ID NO: 1187058 - DNA, 15 bp, Homo sapiens
caatggccttctccc

SEQ ID NO: 1187059 - DNA, 15 bp, Homo sapiens
gcaatggccttctcc

SEQ ID NO: 1187060 - DNA, 15 bp, Homo sapiens
tgcaatggccttctc

SEQ ID NO: 1187061 - DNA, 15 bp, Homo sapiens
ttgcaatggccttct

SEQ ID NO: 1187062 - DNA, 15 bp, Homo sapiens
attgcaatggccttc

SEQ ID NO: 1187063 - DNA, 15 bp, Homo sapiens
aattgcaatggcctt

SEQ ID NO: 1187064 - DNA, 15 bp, Homo sapiens
aaattgcaatggcct

SEQ ID NO: 1187065 - DNA, 15 bp, Homo sapiens
gaaattgcaatggcc

SEQ ID NO: 1187066 - DNA, 15 bp, Homo sapiens
ggaaattgcaatggc

SEQ ID NO: 1187067 - DNA, 15 bp, Homo sapiens
gggaaattgcaatgg

SEQ ID NO: 1187068 - DNA, 15 bp, Homo sapiens
tgggaaattgcaatg

SEQ ID NO: 1187069 - DNA, 15 bp, Homo sapiens
ttgggaaattgcaat

SEQ ID NO: 1187070 - DNA, 15 bp, Homo sapiens
tttgggaaattgcaa

SEQ ID NO: 1187071 - DNA, 15 bp, Homo sapiens
ttttgggaaattgca

SEQ ID NO: 1187072 - DNA, 15 bp, Homo sapiens
tttttgggaaattgc

SEQ ID NO: 1187073 - DNA, 15 bp, Homo sapiens
ttttttgggaaattg

SEQ ID NO: 1187074 - DNA, 15 bp, Homo sapiens
cttttttgggaaatt

SEQ ID NO: 1187075 - DNA, 15 bp, Homo sapiens
tcttttttgggaaat

SEQ ID NO: 1187076 - DNA, 15 bp, Homo sapiens
ctcttttttgggaaa

SEQ ID NO: 1187077 - DNA, 15 bp, Homo sapiens
gctcttttttgggaa

SEQ ID NO: 1187078 - DNA, 15 bp, Homo sapiens
agctcttttttggga

SEQ ID NO: 1187079 - DNA, 15 bp, Homo sapiens
aagctcttttttggg

SEQ ID NO: 1187080 - DNA, 15 bp, Homo sapiens
gaagctcttttttgg

SEQ ID NO: 1187081 - DNA, 15 bp, Homo sapiens
cgaagctcttttttg

SEQ ID NO: 1187082 - DNA, 15 bp, Homo sapiens
ccgaagctctttttt

SEQ ID NO: 1187083 - DNA, 15 bp, Homo sapiens
accgaagctcttttt

SEQ ID NO: 1187084 - DNA, 15 bp, Homo sapiens
taccgaagctctttt

SEQ ID NO: 1187085 - DNA, 15 bp, Homo sapiens
ctaccgaagctcttt

SEQ ID NO: 1187086 - DNA, 15 bp, Homo sapiens
tctaccgaagctctt

SEQ ID NO: 1187087 - DNA, 15 bp, Homo sapiens
ctctaccgaagctct

SEQ ID NO: 1187088 - DNA, 15 bp, Homo sapiens
actctaccgaagctc

SEQ ID NO: 1187089 - DNA, 15 bp, Homo sapiens
gactctaccgaagct

SEQ ID NO: 1187090 - DNA, 15 bp, Homo sapiens
tgactctaccgaagc

SEQ ID NO: 1187091 - DNA, 15 bp, Homo sapiens
atgactctaccgaag

SEQ ID NO: 1187092 - DNA, 15 bp, Homo sapiens
catgactctaccgaa

SEQ ID NO: 1187093 - DNA, 15 bp, Homo sapiens
ccatgactctaccga

SEQ ID NO: 1187094 - DNA, 15 bp, Homo sapiens
cccatgactctaccg

SEQ ID NO: 1187095 - DNA, 15 bp, Homo sapiens
ccccatgactctacc

SEQ ID NO: 1187096 - DNA, 15 bp, Homo sapiens
cccccatgactctac

SEQ ID NO: 1187097 - DNA, 15 bp, Homo sapiens
acccccatgactcta

SEQ ID NO: 1187098 - DNA, 15 bp, Homo sapiens
cacccccatgactct

SEQ ID NO: 1187099 - DNA, 15 bp, Homo sapiens
gcacccccatgactc

SEQ ID NO: 1187100 - DNA, 15 bp, Homo sapiens
tgcacccccatgact

SEQ ID NO: 1187101 - DNA, 15 bp, Homo sapiens
ttgcacccccatgac

SEQ ID NO: 1187102 - DNA, 15 bp, Homo sapiens
cttgcacccccatga

SEQ ID NO: 1187103 - DNA, 15 bp, Homo sapiens
acttgcacccccatg

SEQ ID NO: 1187104 - DNA, 15 bp, Homo sapiens
gacttgcacccccat

SEQ ID NO: 1187105 - DNA, 15 bp, Homo sapiens
tgacttgcaccccca

SEQ ID NO: 1187106 - DNA, 15 bp, Homo sapiens
ctgacttgcaccccc

SEQ ID NO: 1187107 - DNA, 15 bp, Homo sapiens
cctgacttgcacccc

SEQ ID NO: 1187108 - DNA, 15 bp, Homo sapiens
acctgacttgcaccc

SEQ ID NO: 1187109 - DNA, 15 bp, Homo sapiens
aacctgacttgcacc

SEQ ID NO: 1187110 - DNA, 15 bp, Homo sapiens
aaacctgacttgcac

SEQ ID NO: 1187111 - DNA, 15 bp, Homo sapiens
taaacctgacttgca

SEQ ID NO: 1187112 - DNA, 15 bp, Homo sapiens
gtaaacctgacttgc

SEQ ID NO: 1187113 - DNA, 15 bp, Homo sapiens
tgtaaacctgacttg

SEQ ID NO: 1187114 - DNA, 15 bp, Homo sapiens
cttgtaaacctgact

SEQ ID NO: 1187115 - DNA, 15 bp, Homo sapiens
tcttgtaaacctgac

SEQ ID NO: 1187116 - DNA, 15 bp, Homo sapiens
ttcttgtaaacctga

SEQ ID NO: 1187117 - DNA, 15 bp, Homo sapiens
cttcttgtaaacctg
